United States Patent Application Publication US 2021/0199660 A1 - sequence listing, part 10

SEQ ID NO: 130232 - DNA, 120 bp, Artificial Sequence
  ENSG00000102384_5 (sequence is synthesized)
ctcctggctttgtgttggcaagtgttctggtagcaccaaggtacttttttatcgttggctggttgcaatgtttgacttcattgatcgtaaggagcaaattaacttgctctatggcttctt

SEQ ID NO: 130233 - DNA, 120 bp, Artificial Sequence
  ENSG00000102384_6 (sequence is synthesized)
ttttgcttcattgcaagatgatgcactgtgcccttatgtttgccatttgttatatttacttaccaaaaaagagaatgtcaaaccatttcgtgtgagaaaactgcttgatcttcaggccaa

SEQ ID NO: 130234 - DNA, 120 bp, Artificial Sequence
  ENSG00000102384_7 (sequence is synthesized)
aatgggaatgcagcctcatctccaggctttgttgtcactgtataagttctttgctcctgctctgatttcagtatctttgcctgtaaggaagaagatatattttaagaattcagagaatct

SEQ ID NO: 130235 - DNA, 120 bp, Artificial Sequence
  ENSG00000102384_8 (sequence is synthesized)
atggaagacggctctgcttgccgtgaagcaaagaaaccggggaccttctccagaacctctgaagttgatgttaggtccagctaatgttcgtcctctaaaaagaaagtggaattctctctc

SEQ ID NO: 130236 - DNA, 120 bp, Artificial Sequence
  ENSG00000102384_9 (sequence is synthesized)
agttataccagtgctcaattccagtagctacactaaagaatgtggaaaaaaagagatgagtctttctgattgtctgaatagaagtggatcatttccactagaacaacttcaaagcttccc

SEQ ID NO: 130237 - DNA, 120 bp, Artificial Sequence
  ENSG00000102384_10 (sequence is synthesized)
ccaacttttacagaacatccattgcttagagctgccttctcagatgggctcagtgctaaacaactctctgctgcttcactacattaactgtgtcagagatgagccagtcttgctgaggtt

SEQ ID NO: 130238 - DNA, 120 bp, Artificial Sequence
  ENSG00000102384_11 (sequence is synthesized)
ttattactggttgagtcaaacattacaagaagaatgtatttggtacaaggtgaataattatgaacatggaaaagaatttaccaacttcctggataccatcatcagggcagagtgcttctt

SEQ ID NO: 130239 - DNA, 120 bp, Artificial Sequence
  ENSG00000102384_12 (sequence is synthesized)
gaagcattcctgtataagagccttcctctctgggatggcctttgttgtcggtcacagttccttcagcttgtgagctggattccttttagtagcttctctgaggtgaaaccacttcttttt

SEQ ID NO: 130240 - DNA, 120 bp, Artificial Sequence
  ENSG00000102384_13 (sequence is synthesized)
gaccatctagcgcagctcttctttacatcaaccatttatttcaagtgtagtgtgcttcagagtctgaaagagctattgcagaattggctgttgtggctttctatggacattcacatgaaa

SEQ ID NO: 130241 - DNA, 120 bp, Artificial Sequence
  ENSG00000102384_14 (sequence is synthesized)
cctgttacaaacagtcctctagagacaactttgggtggatccatgaactctgtgtctaaactgatccactatgtagggtggctatccactactgcaatgcgcttggagagcaacaatact

SEQ ID NO: 130242 - DNA, 120 bp, Artificial Sequence
  ENSG00000102384_15 (sequence is synthesized)
ttcttgctgcactttattttggatttctatgagaaggtgtgtgacatatatataaattataaccttccattagtggtattgtttcctcctgggatcttctattctgcactcctcagcctg

SEQ ID NO: 130243 - DNA, 120 bp, Artificial Sequence
  ENSG00000102384_16 (sequence is synthesized)
gataccagcatcctgaaccagctgtgttttattatgcacagatatcgtaaaaatttgactgccgcaaagaaaaatgagttggtacaaaagacaaaatcagagttcaatttcagcagcaag

SEQ ID NO: 130244 - DNA, 120 bp, Artificial Sequence
  ENSG00000102384_17 (sequence is synthesized)
acttatcaagaatttaatcactatttgacatcaatggttggttgcctgtggacgtccaaaccctttgggaaaggaatatatattgaccctgaaatcctagaaaaaactggagtggctgaa

SEQ ID NO: 130245 - DNA, 120 bp, Artificial Sequence
  ENSG00000102384_18 (sequence is synthesized)
tataaaaacagtttaaatgtagtccatcatccttctttcttgagttacgctgtttcctttttgctacaggaaagcccagaagaaaggacagtaaatgtgagctctattcggggaaagaaa

SEQ ID NO: 130246 - DNA, 120 bp, Artificial Sequence
  ENSG00000102384_19 (sequence is synthesized)
tggagctggtatttggactatttattttcacaggggttacaaggcttgaaactttttataagaagtagtgttcatcattcttccattcccagagcagagggcataaactgcaacaatcaa

SEQ ID NO: 130247 - DNA, 120 bp, Artificial Sequence
  ENSG00000102384_20 (sequence is synthesized)
tattaaatgaatgttgacataaactgaacacactggactaaactcactcctcattgctagagcaaagtggctcatcttgagttcccattttcatttcactgacagactgccatcctcaag

SEQ ID NO: 130248 - DNA, 120 bp, Artificial Sequence
  ENSG00000102384_21 (sequence is synthesized)
gagtactcagactggccttctgttcatggcttaggagagccttggtgtgcctaactgatttttcaaaatttagatttttttagcctaccagtgaaaaatgaccccttcatcatcaggctc

SEQ ID NO: 130249 - DNA, 120 bp, Artificial Sequence
  ENSG00000102384_22 (sequence is synthesized)
tgcgttctaccaaattgtatgtaaaaagacacatctgttttgtggtaggattttttcacatttttgggtactatgagctgcattgatggaagacagcaggcaatatgtggtgacagttaa

SEQ ID NO: 130250 - DNA, 120 bp, Artificial Sequence
  ENSG00000102384_23 (sequence is synthesized)
ctcacagacataaacatgcaaaatactttgctgtctctggggatattgccatttttcttactgtgagcaacagcaccaacaccaagttaacaggatgcaacatgtgtatgactctaaaag

SEQ ID NO: 130251 - DNA, 120 bp, Artificial Sequence
  ENSG00000102384_24 (sequence is synthesized)
ccctaagtagttggtaacttcctgggccttcaatcatagcaatttgatgagggaaggaaggggagaggatttgttgggtaatcaagacattcccgtatatgtctgatttcatggaactgc

SEQ ID NO: 130252 - DNA, 120 bp, Artificial Sequence
  ENSG00000102384_25 (sequence is synthesized)
tctattttgtttgtgtgtattgtatatgtatatgtgtatgtgtgcgtgtatgtgtgtgtctgtagcttcagtttttaagtgtaaggactaaataaactaactgaaattttactttcagaa

SEQ ID NO: 130253 - DNA, 120 bp, Artificial Sequence
  ENSG00000102384_26 (sequence is synthesized)
tatgtttaatagtgtggcgtgaaacaatttttttcatgtaaatgcttagtagtacttttttggaagacttttttgtgacttttcactcttcttcccccacaatcctgaaaggaaggctaa

SEQ ID NO: 130254 - DNA, 120 bp, Artificial Sequence
  ENSG00000102384_27 (sequence is synthesized)
ttctctaagttcctattgtgtaaatcagaaagcaacccttatctgctaaatgacttctttcaagagttaatataacaaaacactagagagatgagactagaatttgcaactttgacttcc

SEQ ID NO: 130255 - DNA, 120 bp, Artificial Sequence
  ENSG00000102384_28 (sequence is synthesized)
attcagtttaactcattttataaattatattcttatatttaaagccaattttcatgatggctagaaaaatctctaacgtaattttgcgtacaactttgtttttatgtttctgtgctgtat

SEQ ID NO: 130256 - DNA, 120 bp, Artificial Sequence
  ENSG00000102384_29 (sequence is synthesized)
tttggttatatgtgttaatttatcttaactttggagtttaaaataagagccctaaattgttaaatgtgtgctttaccttcaaagtaaaagtaaaagactaaatttcaaggaactgcataa

SEQ ID NO: 130257 - DNA, 120 bp, Artificial Sequence
  ENSG00000102384_30 (sequence is synthesized)
ggcctgtgcggctgcaggtagagtgtcttaggaacctaggaaataactcggaacctgtaacgtcccactggtttggacatattcctctcctgatctggcctcatctgttccagggaggtg

SEQ ID NO: 130258 - DNA, 120 bp, Artificial Sequence
  ENSG00000102384_31 (sequence is synthesized)
ctggagtgcagtggcgcaatcacggctctctgcagcctcgacccccggggctcaagctattctcctgcctcaccctcctgagtagataggactacaggcacgtgcggctatgcctagcta

SEQ ID NO: 130259 - DNA, 120 bp, Artificial Sequence
  ENSG00000102384_32 (sequence is synthesized)
tgcctagctaattttttaaatcttaagtagagacattgtctcactgtgttgcccagactggtcttgaactcctaggttgaagggatcttccagcctctgcctcccgaagtgctgtattac

SEQ ID NO: 130260 - DNA, 120 bp, Artificial Sequence
  ENSG00000102384_33 (sequence is synthesized)
ctgtgcggctgcaggaacctaggaaataactcggaacctgtaacgtcccactggtttggacatattcctctcctgatctggcctcatctgttccagggaggtgggattgagcctagtgca

SEQ ID NO: 130261 - DNA, 120 bp, Artificial Sequence
  ENSG00000102385_0 (sequence is synthesized)
cgctttcctcctctgcttctaatgaattgacatctccaagagccgccacatctctggtagttttacaaaactgtccttgctcttcctgcgtttgcccagtcaagggtatttttgcctgag

SEQ ID NO: 130262 - DNA, 120 bp, Artificial Sequence
  ENSG00000102385_1 (sequence is synthesized)
gtcggaatgatgctgttagtcctggtgatatgattgcatagcaacacagagcagctctgagaggggaggaggaggagaagaaggaagacagggaagtgggagagacagagggagagtgtg

SEQ ID NO: 130263 - DNA, 120 bp, Artificial Sequence
  ENSG00000102385_2 (sequence is synthesized)
catacagcagctgtcggcatccctgtctcagggacttctttgctgattcacagaggcagcccagccccggcctcccagcttacagctgccgcctgcttctcagacctgacggaatcagaa

SEQ ID NO: 130264 - DNA, 120 bp, Artificial Sequence
  ENSG00000102385_3 (sequence is synthesized)
gctacataatattcgccgtgtgagtggctatcgtaatagataacatttgaatatctactaaatgccagaaactatgaattaactcctctcaacaaagctaagaggtgcttaatgatcaat

SEQ ID NO: 130265 - DNA, 120 bp, Artificial Sequence
  ENSG00000102385_4 (sequence is synthesized)
agttggtgcactgcctatcctcatcccccccatgagccttggtttttatgcaacctatggtcatgcagggatgcccttacaccctcccacgatgtcatgactggcaggcagctgaccagt

SEQ ID NO: 130266 - DNA, 120 bp, Artificial Sequence
  ENSG00000102385_5 (sequence is synthesized)
tccatcatagcagcagcctccgaagcacctgcccccaccctcaggttagagctgctgtcaccagccctgcacctcctcaagatggtgctggggttccctgcctaagcctaaagctgttga

SEQ ID NO: 130267 - DNA, 120 bp, Artificial Sequence
  ENSG00000102385_6 (sequence is synthesized)
acgggtctgttggtgcctctggacccctggaaccaccagccatgaatctgtgttggaatgaaataaaaaagaagtctcacaacctccgcgctcgcctagaggccttctcagaccacagtg

SEQ ID NO: 130268 - DNA, 120 bp, Artificial Sequence
  ENSG00000102385_7 (sequence is synthesized)
gaaagcttcagctccctcttcaagagattattgactggctcagccaaaaggatgaggagttgtcagctcagctgcccctacagggggatgtggccctggtgcaacaggagaaggagacac

SEQ ID NO: 130269 - DNA, 120 bp, Artificial Sequence
  ENSG00000102385_8 (sequence is synthesized)
atgcggcctttatggaagaagtcaagtctcggggcccctacatctattctgtgctggagtcagctcaggccttcctgtcccagcacccatttgaggagttagaggagcctcattctgaga

SEQ ID NO: 130270 - DNA, 120 bp, Artificial Sequence
  ENSG00000102385_9 (sequence is synthesized)
gcaaagatacctccccgaaacagcggatccagaatctcagccgctttgtatggaagcaggcgacggtggccagtgaactgtgggagaagttgacagcccgctgtgtggaccagcaccgtc

SEQ ID NO: 130271 - DNA, 120 bp, Artificial Sequence
  ENSG00000102385_10 (sequence is synthesized)
acattgagcggactctggagcagctcttggagattcaaggggcaatggaggaactaagcactactctgagccaagctgagggagtccgagccacttgggagcccattggggatctcttca

SEQ ID NO: 130272 - DNA, 120 bp, Artificial Sequence
  ENSG00000102385_11 (sequence is synthesized)
ttgattcactcccagagcacatccaggctattaagctgttcaaagaagaattctcccccatgaaagatggagtaaagttggtgaatgatctggcccaccaacttgccatttctgatgtgc

SEQ ID NO: 130273 - DNA, 120 bp, Artificial Sequence
  ENSG00000102385_12 (sequence is synthesized)
acttgtcaatggagaattcccaggccctggaacagatcaacgtccgatggaaacaactacaggcgtcagttagtgagaggcttaagcagctccaggatgcccaccgggactttgggcctg

SEQ ID NO: 130274 - DNA, 120 bp, Artificial Sequence
  ENSG00000102385_13 (sequence is synthesized)
ggtcacagcactttctctcctcctctgtccaggttccctgggaaagagcaatttcacccaataaagttccctactacatcaaccaccaggctcagaccacatgctgggaccatcccaaga

SEQ ID NO: 130275 - DNA, 120 bp, Artificial Sequence
  ENSG00000102385_14 (sequence is synthesized)
tgacagagttataccaaaccctagctgatctgaacaacattaagttctcagcttatcgcactgccatgaaactccgcagagtccagaaagccctgcgcttggacctggtaactttaacca

SEQ ID NO: 130276 - DNA, 120 bp, Artificial Sequence
  ENSG00000102385_15 (sequence is synthesized)
cagccctggaaatcttcaatgagcatgatctgcaggccagtgagcacgtgatggatgtggtagaggtcattcactgcctgactgccttatatgaacgtttggaggaggaaagaggcatcc

SEQ ID NO: 130277 - DNA, 120 bp, Artificial Sequence
  ENSG00000102385_16 (sequence is synthesized)
tggtcaacgtgccactctgtgtggacatgagcctcaattggctcctcaatgtttttgatagtggtcgcagcggaaagatgcgggcattgtcttttaagactggcattgcatgcttgtgtg

SEQ ID NO: 130278 - DNA, 120 bp, Artificial Sequence
  ENSG00000102385_17 (sequence is synthesized)
gcacggaagtgaaggaaaaacttcagtacctcttcagccaagtggccaactcaggcagccagtgtgaccagcgccaccttggtgtcctgcttcatgaggccattcaggtgccccgtcagc

SEQ ID NO: 130279 - DNA, 120 bp, Artificial Sequence
  ENSG00000102385_18 (sequence is synthesized)
tgggtgaagtggcagcctttgggggcagcaatgtggagcccagtgtccgtagttgcttccgttttagcaccgggaagccagtcattgaagcatcccagttcctggagtgggtcaacctgg

SEQ ID NO: 130280 - DNA, 120 bp, Artificial Sequence
  ENSG00000102385_19 (sequence is synthesized)
agccccagtccatggtgtggctggctgttctgcatcgggtcaccattgctgagcaagtgaagcatcagaccaagtgctctatctgtaggcagtgccccatcaaggggttcaggtaccgga

SEQ ID NO: 130281 - DNA, 120 bp, Artificial Sequence
  ENSG00000102385_20 (sequence is synthesized)
gtctgaagcaattcaacgttgacatctgccagacctgcttcttgacaggcagggccagcaaaggcaataagctgcactaccccatcatggagtattacacaccgaccacatccagtgaga

SEQ ID NO: 130282 - DNA, 120 bp, Artificial Sequence
  ENSG00000102385_21 (sequence is synthesized)
acatgagggactttgccacaaccttaaagaacaaattccgctccaagcattatttcagcaaacaccctcagcgaggttatctgcctgtgcaatcagtgctggaggctgactacagtgaga

SEQ ID NO: 130283 - DNA, 120 bp, Artificial Sequence
  ENSG00000102385_22 (sequence is synthesized)
cgccggcttcttccccgatgtggccacacgccgacacacactcccgaattgagcattttgccagcaggcttgctgagatggaaagtcaaaattgctccttctttaatgacagcttgtccc

SEQ ID NO: 130284 - DNA, 120 bp, Artificial Sequence
  ENSG00000102385_23 (sequence is synthesized)
cagatgacagcatagacgaggaccagtacctgctgcggcactccagccccatcacagaccgggagccagcctttggacagcaggctccatgcagtgtggccacagaaagcaaaggggagc

SEQ ID NO: 130285 - DNA, 120 bp, Artificial Sequence
  ENSG00000102385_24 (sequence is synthesized)
tacagaagatcctggcccacttggaagatgagaaccggattctccagggagagctgaggcgcctgaagtggcagcatgaggaggcagctgaggcacccagtctggctgacggctccactg

SEQ ID NO: 130286 - DNA, 120 bp, Artificial Sequence
  ENSG00000102385_25 (sequence is synthesized)
aggcagcaacagaccaccgcaatgaggagcttctggccgaggcccgtatccttcggcaacataagagccgcctggagacgcgcatgcagatcctcgaagatcacaacaagcagctagagt

SEQ ID NO: 130287 - DNA, 120 bp, Artificial Sequence
  ENSG00000102385_26 (sequence is synthesized)
cccagctgcagcgtctgagggagcttctcctgcagccacccaccgaatcagatggcagtggctctgcaggctcgtccctagcttcctctccacagcagtcagaaggcagtcacccccggg

SEQ ID NO: 130288 - DNA, 120 bp, Artificial Sequence
  ENSG00000102385_27 (sequence is synthesized)
agaagggacagactactccagataccgaggctgcagatgatgtggggtcaaagagccaggatgtcagcctgtgcttggaggacatcatggagaaactccgtcatgccttccccagtgtgc

SEQ ID NO: 130289 - DNA, 120 bp, Artificial Sequence
  ENSG00000102385_28 (sequence is synthesized)
gaagttctgatgtgactgccaacaccctgctggcctcttgatggagccagatccccatcctatagttcatagtcctctcctggttccggtcaaagcctttcctcagccttcacccaacct

SEQ ID NO: 130290 - DNA, 120 bp, Artificial Sequence
  ENSG00000102385_29 (sequence is synthesized)
ttccagtttccactggccccacattcctcaactagtattatttgggctctgggcagcagcagggatctggtggtatgtgaggtgcatgcgggcagtgatgggagaaggggaggcatgatt

SEQ ID NO: 130291 - DNA, 120 bp, Artificial Sequence
  ENSG00000102385_30 (sequence is synthesized)
gcaaatatcacttggccattcagatggggagcagagaagctgccttgcagagctaagcggtacatgttggcccctcttccttctccgtggaattatggaaagagagaagcctaattaccc

SEQ ID NO: 130292 - DNA, 120 bp, Artificial Sequence
  ENSG00000102385_31 (sequence is synthesized)
caaggttccatccagcattatgaatccacagggtttacccctactctctggcgcaactcagggaggcaaaagggtatccccgagacaccttccccaccccaagtgcccctgaaaaagtct

SEQ ID NO: 130293 - DNA, 120 bp, Artificial Sequence
  ENSG00000102385_32 (sequence is synthesized)
gggcagtgtgtgttctattacttcagctccaggacagattgctagccatcctaatgctacctaggtattggtttctcctcaaatatcttcattttctttagcctcagtccctgacagacc

SEQ ID NO: 130294 - DNA, 120 bp, Artificial Sequence
  ENSG00000102385_33 (sequence is synthesized)
ttccttaaggggagaacagttcattctggttcttctacgttatatttggaagcattaaatccatacttatgggtttagattttttttttgccccacatcttcctatttcttaaagtcctc

SEQ ID NO: 130295 - DNA, 120 bp, Artificial Sequence
  ENSG00000102385_34 (sequence is synthesized)
agcattttgagagacccactgagttgcgagttgctctggaaacctggctgaagccaccctttgctcctctgagtctgtcctcacagacctgaggacacagtggcagcttgctgagcaagg

SEQ ID NO: 130296 - DNA, 120 bp, Artificial Sequence
  ENSG00000102385_35 (sequence is synthesized)
gagtgttgctttccttgggtaaggaagaggaagcccacctcaagtctggagtagtatgactgccatccaacacccttccaggctgtgacccttctagctctcaggctgaatcaggtgagg

SEQ ID NO: 130297 - DNA, 120 bp, Artificial Sequence
  ENSG00000102385_36 (sequence is synthesized)
tggctgattgtccccagctaatcataaggcatttgcaactggctaccgtgtgtagtggcccctccataggagccacaggccacaaatcaggaagctggccactttccacccagacaacaa

SEQ ID NO: 130298 - DNA, 120 bp, Artificial Sequence
  ENSG00000102385_37 (sequence is synthesized)
cagcaaggccttcctgtgcctaaaattgttatttctaactctggaaggtgaatccaatcctcaaactgaactagctcttcctaggcgacatataccatgatctctttatccagaaactgt

SEQ ID NO: 130299 - DNA, 120 bp, Artificial Sequence
  ENSG00000102385_38 (sequence is synthesized)
tcagaatagatagtaggggtgggggagtgggcttgggaatgttgaatagattcagagcccacttaggcagctttctcccaagaggagctttataacctagagccctgcagttgacttcat

SEQ ID NO: 130300 - DNA, 120 bp, Artificial Sequence
  ENSG00000102385_39 (sequence is synthesized)
ttgcctaagtttatatacatacatatctattctacatatctactgtacatcagtgctctcctggcctcactcacacattaaattctaatacctcttgaagtattaatgttctgccttgct

SEQ ID NO: 130301 - DNA, 120 bp, Artificial Sequence
  ENSG00000102385_40 (sequence is synthesized)
ctttgttagccccagcctctggttggaaagatagatgtatcctggctgttcccctaggatatctctctccattgatgtttggggtgggctgtcctcaagaccaaagcaacagaaacctgt

SEQ ID NO: 130302 - DNA, 120 bp, Artificial Sequence
  ENSG00000102385_41 (sequence is synthesized)
ggtcacagagaatctaacaggaagagtcactgttctcttcactcattccaaatcttgttcccttgagacctgggccttgggtgaattttcctgggctcccctaaatggttcaggtgccaa

SEQ ID NO: 130303 - DNA, 120 bp, Artificial Sequence
  ENSG00000102385_42 (sequence is synthesized)
aatagagcaaacccaagctctgcccaccccatgcagaaaaggacaaacaggcctttattagcctttgccagctaagacacagagaacattctctggtcccttccagctcttatggtctca

SEQ ID NO: 130304 - DNA, 120 bp, Artificial Sequence
  ENSG00000102385_43 (sequence is synthesized)
ctcagggctaaagaaagcaacagttgccaccacaatcaggagggagtgacggttggggtgttgtattataatccagcagtgggccagtgggtagaactgctaggaacctagtttgatctg

SEQ ID NO: 130305 - DNA, 120 bp, Artificial Sequence
  ENSG00000102385_44 (sequence is synthesized)
ctgcaggggaggcagggcagtggcttgggtccagaagcttagggttgcctcctccaccactaagtcacaggtccagggtgtcagacttcacagcataacatctgccttagtgttcatgag

SEQ ID NO: 130306 - DNA, 120 bp, Artificial Sequence
  ENSG00000102385_45 (sequence is synthesized)
gtctctgggcaggagaactgggtatctggatagatggttgagcaggtggtaggcgggcatcaatcatagaacctgggcatcagtcagagtgggagcatatttgtagaagcctagattgtg

SEQ ID NO: 130307 - DNA, 120 bp, Artificial Sequence
  ENSG00000102385_46 (sequence is synthesized)
ggcgggaatgtgggacggagggctcaaggactttggaggcatatgcctgcctaagccttaggcgggtacatgttatggagcaattttttaccaggaaagtcctggaaaatcttttctgtt

SEQ ID NO: 130308 - DNA, 120 bp, Artificial Sequence
  ENSG00000102385_47 (sequence is synthesized)
atccccaccccacctgagagctcttgggctgctgagggcctgtggcaactgcagtgggccaggcatggtagaaaagatgtagatcttgttatgtaggatttgcgttgtaggtggactgaa

SEQ ID NO: 130309 - DNA, 120 bp, Artificial Sequence
  ENSG00000102385_48 (sequence is synthesized)
gcagcaggtcaagagttgaattctcactaaggggtcactgacattttgtggtcctgtgtttaccttaatgcctaaggtgagtgtattgttcaagggtccagggacagtcactgcagtatg

SEQ ID NO: 130310 - DNA, 120 bp, Artificial Sequence
  ENSG00000102385_49 (sequence is synthesized)
tgtggggaattttcccacagtaaggtaaatggatccttgggtactatgaatccaacttggggttggatttaccaaaatgtgttgtatgttgttagacatcttgttgtgtattagtcttct

SEQ ID NO: 130311 - DNA, 120 bp, Artificial Sequence
  ENSG00000102385_50 (sequence is synthesized)
aaggatattgtgcatggcactgtgtagtttatagccctacactggaaggatggtgaagggagttgctagattgatagcctaaagaaaaccttctgactgtgggattagcatcaatgataa

SEQ ID NO: 130312 - DNA, 120 bp, Artificial Sequence
  ENSG00000102385_51 (sequence is synthesized)
ggaatgtgagcatttgctggggttgttgtcaaatagtatcagagaacagttaggactgagaggtgatttcttcttgacagaatttgatagaggccaaaaagccattacgaggatacctct

SEQ ID NO: 130313 - DNA, 120 bp, Artificial Sequence
  ENSG00000102385_52 (sequence is synthesized)
gcttccagtgacagcagagtggattcacattgattgggcattgtcacggaaggctgactagctggaggacatcaggctgtgctatgcttccctagggaggacatgtgcccttccctccag

SEQ ID NO: 130314 - DNA, 120 bp, Artificial Sequence
  ENSG00000102385_53 (sequence is synthesized)
attagaaaggctagaatcaagagtttcaagtgctcattttcttcaaggtccaaggttgggaactatttccctacagagaaatctgtttgagtttctggtgctccaggaaatgggttggca

SEQ ID NO: 130315 - DNA, 120 bp, Artificial Sequence
  ENSG00000102385_54 (sequence is synthesized)
ggacacagaaatgagaaaccctgaggccaggaagaggccaatcctaggagatgttttccctccagattcattttaaggaatatctgtgcttcctgatgtgtgtgcttgagatttgggctc

SEQ ID NO: 130316 - DNA, 120 bp, Artificial Sequence
  ENSG00000102385_55 (sequence is synthesized)
tatatccagcatttgaactcacattctcagtggcagagtcatggtctgtggcaccatttcaaggccaaaaatcccatccaatttcccttcacatagatgacagaaaagcaagaaagtagc

SEQ ID NO: 130317 - DNA, 120 bp, Artificial Sequence
  ENSG00000102385_56 (sequence is synthesized)
tgccttaactcgaacagttctgggaaaaaaactgggggccttgtcctgaggctgtggagacttaattcttcagctgggtggttcccgtaggaacaaggaacactttagctacttcttact

SEQ ID NO: 130318 - DNA, 120 bp, Artificial Sequence
  ENSG00000102385_57 (sequence is synthesized)
cttttaacaccaatggctgtgggagaaggaaaggctcaaggccagggctcagctcgcagagtccatcttctcccacagttgccacatttgagagggggcctgctgaatgcccttgctgtc

SEQ ID NO: 130319 - DNA, 120 bp, Artificial Sequence
  ENSG00000102385_58 (sequence is synthesized)
ccctatggcagtattgaggcctgaccgaagtctggtatgctgcttgctggctacaagaactggtcacaggatgaaaattggggaaaggatttgggggaggtgacaagggtggcatggaag

SEQ ID NO: 130320 - DNA, 120 bp, Artificial Sequence
  ENSG00000102385_59 (sequence is synthesized)
tctaggggacaaagggacagggttgggaacaaattggttaactttgattgccactcactgtggtgctttccccctttcccttgaattctgctttgaaaagaataaatttgtacttgttta

SEQ ID NO: 130321 - DNA, 120 bp, Artificial Sequence
  ENSG00000102385_60 (sequence is synthesized)
tacctgctgggatgataataataaatatgtcatgtgacatataactcagatattaaaaaataaagtgtcacctaattattatataattacagctagtctattgtacattattatatactg

SEQ ID NO: 130322 - DNA, 120 bp, Artificial Sequence
  ENSG00000102385_61 (sequence is synthesized)
aatcctttatattgcagaatgtttaattgtttttaaatgggaagtgaggaaatattttgttttagttgtattataaagtattacagacctacaaaaatgtatagaagaacataggtgtaa

SEQ ID NO: 130323 - DNA, 120 bp, Artificial Sequence
  ENSG00000102385_62 (sequence is synthesized)
gagcacctatgtactaaatggtatgccagcaaatggttcacaacctactctctagaaagaaaaaaggaaagctgatctgtagcatttgctaatttctgtgatgtatatactcccactgtg

SEQ ID NO: 130324 - DNA, 120 bp, Artificial Sequence
  ENSG00000102385_63 (sequence is synthesized)
aatgacatcaggctatttacaagaggtctctgagcagagtcagaaacagatcctcagttgcacaccatttatatagtatgtcaaccatgcagatacaatagatgttaagtaacctcaaga

SEQ ID NO: 130325 - DNA, 120 bp, Artificial Sequence
  ENSG00000102385_64 (sequence is synthesized)
agagagtagcaaagtaattaggaagtaatgagttttgagtatttattacctttgtttgtaatataatttatttaattgtgagtttatataatttaataatggctagatttaacaactggc

SEQ ID NO: 130326 - DNA, 120 bp, Artificial Sequence
  ENSG00000102385_65 (sequence is synthesized)
tggcttagaaaacccctgaaattttaacagccaactgtcgtgagctggtatgagctggcatcagcacaccacagtatatacctgtgaccaacttaaggaataaaacattactgcaataca

SEQ ID NO: 130327 - DNA, 120 bp, Artificial Sequence
  ENSG00000102387_0 (sequence is synthesized)
acgaggtgggccatggagtgccccgagggacagctccccatttcttcagaaaatgattcaacaccaacagtttcaacatcggaagtaactagccaacaagaaccccaaattcttgtcgac

SEQ ID NO: 130328 - DNA, 120 bp, Artificial Sequence
  ENSG00000102387_1 (sequence is synthesized)
cgtgggtctgaaaccacctatgaaagcagcgccgacattgctggcgacgaaggcacccagattcctgccgacgaggacactcaaacggatgcggacagcagcgcccaggctgctgcccag

SEQ ID NO: 130329 - DNA, 120 bp, Artificial Sequence
  ENSG00000102387_2 (sequence is synthesized)
gccccagaaaacttccaggaagggaaagacatgagtgaaagccaggatgaagttcctgatgaagttgagaaccagtttatattgcgtctgcctctggaacatgcttgtactgtcaggaac

SEQ ID NO: 130330 - DNA, 120 bp, Artificial Sequence
  ENSG00000102387_3 (sequence is synthesized)
ctagcacgttctcaaagtgtcaagatgaaggataaactaaaaattgacttattgcctgatgggcgccatgcagttgttgaagtagaagatgtcccactagctgctaagctggttgacttg

SEQ ID NO: 130331 - DNA, 120 bp, Artificial Sequence
  ENSG00000102387_4 (sequence is synthesized)
ccttgtgttattgaaagcctgagaacgcttgataaaaaaaccttttataaaacagcagacatttctcagatgcttgtgtgcactgctgatggtgatatccacctttctccagaagaacca

SEQ ID NO: 130332 - DNA, 120 bp, Artificial Sequence
  ENSG00000102387_5 (sequence is synthesized)
gctgcctctactgatcctaatatagtcaggaaaaaagaaagggggagagaagaaaaatgtgtctggaagcatggcattacgccaccacttaagaatgtcagaaagaaaaggttccggaaa

SEQ ID NO: 130333 - DNA, 120 bp, Artificial Sequence
  ENSG00000102387_6 (sequence is synthesized)
acacaaaaaaaggtccctgatgtcaaagaaatggaaaaaagcagctttactgagtacattgaatctccagacgtggaaaatgaagtaaagagactgctgcgttcggatgctgaagccgta

SEQ ID NO: 130334 - DNA, 120 bp, Artificial Sequence
  ENSG00000102387_7 (sequence is synthesized)
agtacccgttgggaagtcattgctgaagatggaaccaaggaaatagaaagtcaaggctccatcccaggatttttgatatcctcgggaatgagcagccacaagcagggtcatacctcgtca

SEQ ID NO: 130335 - DNA, 120 bp, Artificial Sequence
  ENSG00000102387_8 (sequence is synthesized)
gaatatgatatgcttcgggagatgttcagtgattctagaagtaacaatgatgatgatgaggatgaggatgatgaagatgaggatgaggatgaggatgaggatgaagatgaagacaaagaa

SEQ ID NO: 130336 - DNA, 120 bp, Artificial Sequence
  ENSG00000102387_9 (sequence is synthesized)
aatctggccagtatagggcaaatgaaggtaccagttcaatagtcatggaaattcagaagcagattgagaaaaaggagaaaaagctccataagattcagaataaagcacaaagacagaagg

SEQ ID NO: 130337 - DNA, 120 bp, Artificial Sequence
  ENSG00000102387_10 (sequence is synthesized)
atctcatcatgaaagtggaaaacctgacactcaagaatcattttcagtctgtgctggagcagcttgagttacaggaaaaacaaaaaaatgagaagctcatttccctacaggaacagttgc

SEQ ID NO: 130338 - DNA, 120 bp, Artificial Sequence
  ENSG00000102387_11 (sequence is synthesized)
agcgttttctgaagaagtgaggagagccattggcgtggcccacaaaccttggattcaccatccagactgcagattggatgaaactgtgcacgtttttgtcccttcagttgccttatgttg

SEQ ID NO: 130339 - DNA, 120 bp, Artificial Sequence
  ENSG00000102387_12 (sequence is synthesized)
aatcagttatatttatctgtaccttctttgctacttaaaatatgctcacagtttgtagtcatgtagaaaaggccagtataaaaatgtagtagacttaaagaccccactcgaccatgagac

SEQ ID NO: 130340 - DNA, 120 bp, Artificial Sequence
  ENSG00000102387_13 (sequence is synthesized)
tttctctttgtcaatttgggaattattattattaatttagaaatggggtcttgttatgttgcccaggctgaattcagactcctgggcttaagggatccttccgcctcagcctcctgagta

SEQ ID NO: 130341 - DNA, 120 bp, Artificial Sequence
  ENSG00000102387_14 (sequence is synthesized)
gctgggactacagttgtgcaccaccacaccaaacaagaattgattatattgcttctgtgctatggtaccagcagattattcagccatgcttctaaaggcagtctagcctagaggccgtac

SEQ ID NO: 130342 - DNA, 120 bp, Artificial Sequence
  ENSG00000102387_15 (sequence is synthesized)
agctgtttggtttgcatatgttttagcttttcttttggtttttagtatttcctaaaacataggggaaaaaacgaggtcatttctactaagcactaggacctgccatagtgagtttaagtg

SEQ ID NO: 130343 - DNA, 120 bp, Artificial Sequence
  ENSG00000102387_16 (sequence is synthesized)
cctaccttgcagcagttaatactagattgtgttctgtctctgttcaggtaacaggactgcattcctgctcaaggatgattccttgctgctgcttatgttctgttgtttttaggatggagc

SEQ ID NO: 130344 - DNA, 120 bp, Artificial Sequence
  ENSG00000102387_17 (sequence is synthesized)
tggttgttattcaccaactaagggaacagttagagcagagatgaagaaattatgaactgttatccttattctgagccttctcctcctaaccctcatcagttaaggttaggaagaacaaga

SEQ ID NO: 130345 - DNA, 120 bp, Artificial Sequence
  ENSG00000102387_18 (sequence is synthesized)
tgccataatgcctatgaagacttctttaacaatcttgtttgggtttttttctaggtatattattagtgttttatggtctatgttctttaagcaataaataaattgttcattttaaatgga

SEQ ID NO: 130346 - DNA, 120 bp, Artificial Sequence
  ENSG00000102387_19 (sequence is synthesized)
atttgttcatcaaattacatcatgtaatttggattgactttggaaaatctacacatattggagaggagctaaggtaacgtctagaaataattaagttatgtcaaataaggtattgtctaa

SEQ ID NO: 130347 - DNA, 120 bp, Artificial Sequence
  ENSG00000102387_20 (sequence is synthesized)
ctgtacacacatcattctagtgaggattatgggcaagatcttgtataatttagccagtactaccagaagtggtcaggagagggagcaagaggagtttttagtgatggttttctttttgct

SEQ ID NO: 130348 - DNA, 120 bp, Artificial Sequence
  ENSG00000102387_21 (sequence is synthesized)
gcgttcgcctctacgttccgcgcgggagcccacgcgcggttcgtccggaacccacagaccagagacgcaggtcccagccttttcggtgtcggcgccagttcccggaggagcggacatgag

SEQ ID NO: 130349 - DNA, 120 bp, Artificial Sequence
  ENSG00000102390_0 (sequence is synthesized)
gccagttgagaaggactctgatccggctcagctttccaatcagctgcggaaggagccacgctttcgggggttgcaagatggcggccaccagtggaactgatgagccggtttccggggagt

SEQ ID NO: 130350 - DNA, 120 bp, Artificial Sequence
  ENSG00000102390_1 (sequence is synthesized)
tggtgtctgtggcacatgcgctttctctcccagcagagtcgtatggcaacgatcctgacattgagatggcttgggccatgagagcaatgcagcatgctgaagtctattacaagctgattt

SEQ ID NO: 130351 - DNA, 120 bp, Artificial Sequence
  ENSG00000102390_2 (sequence is synthesized)
catcagttgacccacagttcctgaaactcaccaaagtagatgaccaaatttactctgagttccggaaaaattttgagacccttaggatagatgtgttggacccagaagaactcaagtcag

SEQ ID NO: 130352 - DNA, 120 bp, Artificial Sequence
  ENSG00000102390_3 (sequence is synthesized)
aatcagccaaagagaagtggaggccattctgcttgaagtttaatgggattgttgaagacttcaactatggtactttgctgcgactagattgttctcagggctacactgaggaaaacacca

SEQ ID NO: 130353 - DNA, 120 bp, Artificial Sequence
  ENSG00000102390_4 (sequence is synthesized)
gagtcaacaatggaggagaaaaaagagctgacagtggagaagaagagaacaccaagaatggaggagagaaaggagctgatagtggagaagaaaaagaggaaggaatcaacagagaagaca

SEQ ID NO: 130354 - DNA, 120 bp, Artificial Sequence
  ENSG00000102390_5 (sequence is synthesized)
aaactgacaaaggaggagaaaaagggaaagaagctgacaaagaaatcaacaaaagtggtgaaaaagctatgtaaggtatacagggaacagcactctagaagctatgactcaattgagact

SEQ ID NO: 130355 - DNA, 120 bp, Artificial Sequence
  ENSG00000102390_6 (sequence is synthesized)
acaagtaccacggtgctacttgcacagacccctttggttaaatgtaaattcttgtacaattgaaggatacgcagaaggacatctttctagtctaacagtcaggagctgctctggtcattc

SEQ ID NO: 130356 - DNA, 120 bp, Artificial Sequence
  ENSG00000102390_7 (sequence is synthesized)
ccttgtatgaactggtctaaagactgttagtggggtgttagttgatttttcctggtatactgtttcttggctgacactactggtcaagtaagaaatttgtaaataaatttcttttggttc

SEQ ID NO: 130357 - DNA, 120 bp, Artificial Sequence
  ENSG00000102390_8 (sequence is synthesized)
ttattatctatatctgtgactgactttaaaaaggtatttgacacttgaaatttttttcaaatatgtaatctcatcaccatgtcttatataagataatttactcctgtttcttactgcttc

SEQ ID NO: 130358 - DNA, 120 bp, Artificial Sequence
  ENSG00000102393_0 (sequence is synthesized)
atgctgtccggtcaccgtgacaatgcagctgaggaacccagaactacatctgggctgcgcgcttgcgcttcgcttcctggccctcgtttcctgggacatccctggggctagagcactgga

SEQ ID NO: 130359 - DNA, 120 bp, Artificial Sequence
  ENSG00000102393_1 (sequence is synthesized)
caatggattggcaaggacgcctaccatgggctggctgcactgggagcgcttcatgtgcaaccttgactgccaggaagagccagattcctgcatcagtgagaagctcttcatggagatggc

SEQ ID NO: 130360 - DNA, 120 bp, Artificial Sequence
  ENSG00000102393_2 (sequence is synthesized)
agagctcatggtctcagaaggctggaaggatgcaggttatgagtacctctgcattgatgactgttggatggctccccaaagagattcagaaggcagacttcaggcagaccctcagcgctt

SEQ ID NO: 130361 - DNA, 120 bp, Artificial Sequence
  ENSG00000102393_3 (sequence is synthesized)
tcctcatgggattcgccagctagctaattatgttcacagcaaaggactgaagctagggatttatgcagatgttggaaataaaacctgcgcaggcttccctgggagttttggatactacga

SEQ ID NO: 130362 - DNA, 120 bp, Artificial Sequence
  ENSG00000102393_4 (sequence is synthesized)
cattgatgcccagacctttgctgactggggagtagatctgctaaaatttgatggttgttactgtgacagtttggaaaatttggcagatggttataagcacatgtccttggccctgaatag

SEQ ID NO: 130363 - DNA, 120 bp, Artificial Sequence
  ENSG00000102393_5 (sequence is synthesized)
gatgattcctggaaaagtataaagagtatcttggactggacatcttttaaccaggagagaattgttgatgttgctggaccagggggttggaatgacccagatatgttagtgattggcaac

SEQ ID NO: 130364 - DNA, 120 bp, Artificial Sequence
  ENSG00000102393_6 (sequence is synthesized)
tttggcctcagctggaatcagcaagtaactcagatggccctctgggctatcatggctgctcctttattcatgtctaatgacctccgacacatcagccctcaagccaaagctctccttcag

SEQ ID NO: 130365 - DNA, 120 bp, Artificial Sequence
  ENSG00000102393_7 (sequence is synthesized)
gataaggacgtaattgccatcaatcaggaccccttgggcaagcaagggtaccagcttagacagggagacaactttgaagtgtgggaacgacctctctcaggcttagcctgggctgtagct

SEQ ID NO: 130366 - DNA, 120 bp, Artificial Sequence
  ENSG00000102393_8 (sequence is synthesized)
atgataaaccggcaggagattggtggacctcgctcttataccatcgcagttgcttccctgggtaaaggagtggcctgtaatcctgcctgcttcatcacacagctcctccctgtgaaaagg

SEQ ID NO: 130367 - DNA, 120 bp, Artificial Sequence
  ENSG00000102393_9 (sequence is synthesized)
aagctagggttctatgaatggacttcaaggttaagaagtcacataaatcccacaggcactgttttgcttcagctagaaaatacaatgcagatgtcattaaaagacttactttaaaatgtt

SEQ ID NO: 130368 - DNA, 120 bp, Artificial Sequence
  ENSG00000102393_10 (sequence is synthesized)
aggaggctttatgtgagagtacttagagcaggatgctgtggaaagtggtttctccatatgggtcatctaggtaactttaagaatgtttcctcctctcttgtttgaattatttcattcttt

SEQ ID NO: 130369 - DNA, 120 bp, Artificial Sequence
  ENSG00000102393_11 (sequence is synthesized)
tagccacaaaggaaagaactttgaggccatggtagctgagccaaagaaccaatcttcagaattttaaataccctgtcacaatactggaaataattattctccatgtgccagagctcccat

SEQ ID NO: 130370 - DNA, 120 bp, Artificial Sequence
  ENSG00000102393_12 (sequence is synthesized)
ctcttctctttcagttcattaattaattaattaattcatgtaaaatccatgcatacctaaccatagctaatattgtgcacttataattcaagagggctctaagagttaattagtaattgt

SEQ ID NO: 130371 - DNA, 120 bp, Artificial Sequence
  ENSG00000102393_13 (sequence is synthesized)
ccaggttgtcaatcggtcacagagaaagaagcatcttcattcctgcctttcctcaatatacacaccatctctgcactacttcctcagaacaatcccagcagtctgggaggttataagcac

SEQ ID NO: 130372 - DNA, 120 bp, Artificial Sequence
  ENSG00000102393_14 (sequence is synthesized)
aaaaattaaaataaaataaaataaaataactatatatatagccccagctggaaattcatttctttcccttattttacccattgttttctcatacaggttataagcacatgtccttggccc

SEQ ID NO: 130373 - DNA, 120 bp, Artificial Sequence
  ENSG00000102393_15 (sequence is synthesized)
caaaagagctccacactatttggaagtatttgttgacttgttaccatgtctccccactagagtcccaattatacagaaatccgacagtactgcaatcactggcgaaattttgctgacatt

SEQ ID NO: 130374 - DNA, 120 bp, Artificial Sequence
  ENSG00000102401_0 (sequence is synthesized)
agatctgggactagatttcagaggaaatggtagactttcatagctcgggggaggggaggtggagggagaggctgctgtcccaggagcctagggaaggaagaggcaatttttcataaaagt

SEQ ID NO: 130375 - DNA, 120 bp, Artificial Sequence
  ENSG00000102401_1 (sequence is synthesized)
acaagtggcccatagccccaggggaagatgccgtccctttctggtaatcggtggaagggaaacacaactacaaggtgatgagattatcgaagaagaaagagtaataaggcctggtgtggg

SEQ ID NO: 130376 - DNA, 120 bp, Artificial Sequence
  ENSG00000102401_2 (sequence is synthesized)
ggagggaaaggaggggggcgggccctcttctgccgcactgctggtgggaggggaaattggggacccgagttggtggatgacgtagccctcacgtgaccaagagctgacgtgtgcagaagt

SEQ ID NO: 130377 - DNA, 120 bp, Artificial Sequence
  ENSG00000102401_3 (sequence is synthesized)
ccttcttgtcctggtcgttgttcccgtctgagtaccagctccccactgccctgagggcgggccggcctgcggcggagggaaaaaggaagaggagaaggaaattgtcccgaatccctgcag

SEQ ID NO: 130378 - DNA, 120 bp, Artificial Sequence
  ENSG00000102401_4 (sequence is synthesized)
tgggtccaagcctctcccgggtggccagtctttctgtaggttgcggcacaacgccaggcaaaagaagaggaaggaatttaatcctaatcggtggaggtcgatttgagggtctgctgtagc

SEQ ID NO: 130379 - DNA, 120 bp, Artificial Sequence
  ENSG00000102401_5 (sequence is synthesized)
aggtggctccgcttgaagcgagggaggaagtttcctccgatcagtagagattggaaagattgttgggagtggcacaccactagggaaaagaagaaggggcgaactgcttgtcttgaggag

SEQ ID NO: 130380 - DNA, 120 bp, Artificial Sequence
  ENSG00000102401_6 (sequence is synthesized)
gtcaacccccagaatcagctcttgtggccttgaagtggctgaagacgatcaccctccacaggcttgagcccagtcccacagccttcctcccccagcctgagtgactactctattccttgg

SEQ ID NO: 130381 - DNA, 120 bp, Artificial Sequence
  ENSG00000102401_7 (sequence is synthesized)
tccctgctattgtcggggacgattgcatgggctacgccaggaaagtaggctgggtgaccgcaggcctggtgattggggctggcgcctgctattgcatttatagactgactaggggaagaa

SEQ ID NO: 130382 - DNA, 120 bp, Artificial Sequence
  ENSG00000102401_8 (sequence is synthesized)
aacagaacaaggaaaaaatggctgagggtggatctggggatgtggatgatgctggggactgttctggggccaggtataatgactggtctgatgatgatgatgacagcaatgagagcaaga

SEQ ID NO: 130383 - DNA, 120 bp, Artificial Sequence
  ENSG00000102401_9 (sequence is synthesized)
gtatagtatggtacccaccttgggctcggattgggactgaagctggaaccagagctagggccagggcaagggccagggctacccgggcacgtcgggctgtccagaaacgggcttccccca

SEQ ID NO: 130384 - DNA, 120 bp, Artificial Sequence
  ENSG00000102401_10 (sequence is synthesized)
attcagatgataccgttttgtcccctcaagagctacaaaaggttctttgcttggttgagatgtctgaaaagccttatattcttgaagcagctttaattgctctgggtaacaatgctgctt

SEQ ID NO: 130385 - DNA, 120 bp, Artificial Sequence
  ENSG00000102401_11 (sequence is synthesized)
atgcatttaacagagatattattcgtgatctgggtggtctcccaattgtcgcaaagattctcaatactcgggatcccatagttaaggaaaaggctttaattgtcctgaataacttgagtg

SEQ ID NO: 130386 - DNA, 120 bp, Artificial Sequence
  ENSG00000102401_12 (sequence is synthesized)
tgaatgctgaaaatcagcgcaggcttaaagtatacatgaatcaagtgtgtgatgacacaatcacttctcgcttgaactcatctgtgcagcttgctggactgagattgcttacaaatatga

SEQ ID NO: 130387 - DNA, 120 bp, Artificial Sequence
  ENSG00000102401_13 (sequence is synthesized)
ctgttactaatgagtatcagcacatgcttgctaattccatttctgacttttttcgtttattttcagcgggaaatgaagaaaccaaacttcaggttctgaaactccttttgaatttggctg

SEQ ID NO: 130388 - DNA, 120 bp, Artificial Sequence
  ENSG00000102401_14 (sequence is synthesized)
aaaatccagccatgactagggaactgctcagggcccaagtaccatcttcactgggctccctctttaataagaaggagaacaaagaagttattcttaaacttctggtcatatttgagaaca

SEQ ID NO: 130389 - DNA, 120 bp, Artificial Sequence
  ENSG00000102401_15 (sequence is synthesized)
tttcaaatgggaagaaaatgaacctactcagaatcaattcggtgaaggttcactttttttctttttaaaagaatttcaagtgtgtgctgataaggttctgggaatagaaagtcaccatga

SEQ ID NO: 130390 - DNA, 120 bp, Artificial Sequence
  ENSG00000102401_16 (sequence is synthesized)
ttttttggtgaaagtaaaagttggaaaattcatggccaaacttgctgaacatatgttcccaaagagccaggaataacaccttgattttgtaatttagaagcaacacacattgtaaactat

SEQ ID NO: 130391 - DNA, 120 bp, Artificial Sequence
  ENSG00000102401_17 (sequence is synthesized)
tcattttctccaccttgtttatatggtaaaggaatcctttcagctgccagttttgaataatgaatatcatattgtatcatcaatgctgatatttaactgagttggtctttaggtttaaga

SEQ ID NO: 130392 - DNA, 120 bp, Artificial Sequence
  ENSG00000102401_18 (sequence is synthesized)
tggataaatgaatatcactacttgttctgaaaacatgtttgttgctttttatctcgctgcctagattgaaatattttgctatttcttctgcataagtgacagtgaaccaattcatcatga

SEQ ID NO: 130393 - DNA, 120 bp, Artificial Sequence
  ENSG00000102401_19 (sequence is synthesized)
gtaagctcccttctgtcattttcattgatttaatttgtgtatcatcaataaaattgtatgttaatgctggaaagaaaaaaagaagaaagaaagaaaccatccctgtccttcagtttataa

SEQ ID NO: 130394 - DNA, 120 bp, Artificial Sequence
  ENSG00000102401_20 (sequence is synthesized)
tctagttggagagataagaaacgtacaaaccaaaagataacagaatatctgaagcatgtactcattgtcagatgttccctctgagagcacagaggaggcaaaagcttctgtgggatgtgc

SEQ ID NO: 130395 - DNA, 120 bp, Artificial Sequence
  ENSG00000102401_21 (sequence is synthesized)
tagtcggctaaagcttcacagaggaggtggcaattgaaaatgagtcctgaatggggtagggtggttagggaattccatgagacaagacaaggggggcatggtgtgagaaaggcatggaag

SEQ ID NO: 130396 - DNA, 120 bp, Artificial Sequence
  ENSG00000102401_22 (sequence is synthesized)
taggaaccctcttcctatgacaggagatcattctgcttagagtggagagtgtggagagtgggagtagataattttggaaagctgggtgaagccagttgtggagaattgtttgaatattat

SEQ ID NO: 130397 - DNA, 120 bp, Artificial Sequence
  ENSG00000102401_23 (sequence is synthesized)
cccattgaatacccagagccactaaatctttttttactagaaaataattggggtccatatgaaagtctctattactgagtagtgtcaatgagggtgtggcaaaatggagcctttcacatc

SEQ ID NO: 130398 - DNA, 120 bp, Artificial Sequence
  ENSG00000102401_24 (sequence is synthesized)
ctagtggtggccatttggtaatacagatataagccttaaactatgtaaacccttgtcctaaggaagtaattgaataattgcccaaagattgtatgtatgaggctgttcatcccagcactg

SEQ ID NO: 130399 - DNA, 120 bp, Artificial Sequence
  ENSG00000102401_25 (sequence is synthesized)
tctaagctagtaaaaattggaaacaatttaagtatctagcacattggattggttataaagcaaggaatgttcacacagtaggatattataagtatgctgatggaaatctatattgccagg

SEQ ID NO: 130400 - DNA, 120 bp, Artificial Sequence
  ENSG00000102401_26 (sequence is synthesized)
aaaagctattcattatgcgttgtgaagtcagaaagtaaaaaagggtagatagaagtattcgaagtatagttccattttttgagactaataaaacatatgtttaaaaggacactaaaaact

SEQ ID NO: 130401 - DNA, 120 bp, Artificial Sequence
  ENSG00000102401_27 (sequence is synthesized)
ggagttatagatatccagatagaaacagtagttatctttgggtagaagaataatgagtgatctttacttttttactttttattcatctttgtgtttttatttatctaaaatgggtattga

SEQ ID NO: 130402 - DNA, 120 bp, Artificial Sequence
  ENSG00000102401_28 (sequence is synthesized)
tttttaggacggttttgaaaaagaaaagtgttgggaatgaagcaagtgattgattggaaaacatactgaatggaagaaatatttagattaaaaatgaggtaggttgaagtttcttctctg

SEQ ID NO: 130403 - DNA, 120 bp, Artificial Sequence
  ENSG00000102401_29 (sequence is synthesized)
aaatgatagataaatggtgaagataaggcttattgtgaggattcagtgaggtaatatatgcaaagtacttacaatgttctggcacatagtaattaattaagaaaatcgagcacccttaat

SEQ ID NO: 130404 - DNA, 120 bp, Artificial Sequence
  ENSG00000102401_30 (sequence is synthesized)
tacctagaatgcagggttgttagttttttggttgacttttgttttgctggggcattctgccatgttttagtgtcatttaataaataatagtaacaataaaggttaacatttattaagtga

SEQ ID NO: 130405 - DNA, 120 bp, Artificial Sequence
  ENSG00000102401_31 (sequence is synthesized)
ccataaagtcggggtgcttgagggcgtagggccgagaccgtcgcgggtactgaggcgcctccgtcgtctctcccactcgccgcccgctttccaagacatatgtcccgcttgcagcccatt

SEQ ID NO: 130406 - DNA, 120 bp, Artificial Sequence
  ENSG00000102401_32 (sequence is synthesized)
tcgatgctgcgaaacggtgagctgcggggtgtttggggaagagctcagagactgggaaatgggaatctgctgggagcctagggccgcaatccggaaagggagctgtggcctgggtgttgg

SEQ ID NO: 130407 - DNA, 120 bp, Artificial Sequence
  ENSG00000102401_33 (sequence is synthesized)
acctctgacaaccaggcctccgaattagaaaagagttttgtgttctggggactagtccgtccaccaagcgctcagtggcggcagtttcccgtctttctgcctgtggctgtgtcttactga

SEQ ID NO: 130408 - DNA, 120 bp, Artificial Sequence
  ENSG00000102409_0 (sequence is synthesized)
tggcgtcagagccgtcgtggctcgttccattctcggcggtggtacctgctcccggtggccctgaggacgtgtgggccaggggcggccccgaaattaggaagcggagggggagcaggagta

SEQ ID NO: 130409 - DNA, 120 bp, Artificial Sequence
  ENSG00000102409_1 (sequence is synthesized)
atggagtccaaagaggaactagcggcaaacaatctcaacggggaaaatgcccaacaagaaaacgaaggaggggagcaggcccccacgcagaatgaagaagaatcccgccatttgggaggg

SEQ ID NO: 130410 - DNA, 120 bp, Artificial Sequence
  ENSG00000102409_2 (sequence is synthesized)
ggtgaaggccagaagcctggaggaaatatcaggcgggggcgagttaggcgacttgtccctaattttcgatgggccatacctaataggcatattgagcacaatgaagcgagagatgatgta

SEQ ID NO: 130411 - DNA, 120 bp, Artificial Sequence
  ENSG00000102409_3 (sequence is synthesized)
gaaaggtttgtagggcagatgatggaaatcaagagaaagactagggaacagcagatgaggcactatatgcgcttccaaactcctgaacctgacaaccattatgacttttgcctcatacct

SEQ ID NO: 130412 - DNA, 120 bp, Artificial Sequence
  ENSG00000102409_4 (sequence is synthesized)
ttctaatggaaattagaattctaattgaatattgttttgtctcagcctaaaagttacggtcagcatggcaattcacctattttaggaaaaatactcttttcataatatgaaatgcataaa

SEQ ID NO: 130413 - DNA, 120 bp, Artificial Sequence
  ENSG00000102409_5 (sequence is synthesized)
gcagttcaaaaagcagtctgtattccatcatcttcctttttcattccagtccttatttttgtaagtattacttttcctcctccggctacctggactcaaaatctcagttgtctttgacag

SEQ ID NO: 130414 - DNA, 120 bp, Artificial Sequence
  ENSG00000102409_6 (sequence is synthesized)
tttttttcttgtccctgaccaaaaaagaatgatcatacccagaattcaatgtttgatattttaagaatgtatgttctagtgtttttcagagtgagtctaccatctgtataaaaacacctt

SEQ ID NO: 130415 - DNA, 120 bp, Artificial Sequence
  ENSG00000102409_7 (sequence is synthesized)
gggggcaggcaggggcatttaaaaatgtaggacctatcgtccagactcacagagtggggctccagaatctccatttttaacaaactctcttaagtaattctgatgtgtaccaaaatcagt

SEQ ID NO: 130416 - DNA, 120 bp, Artificial Sequence
  ENSG00000102409_8 (sequence is synthesized)
gagtgttgtctcgctctggcgtcagagccgtcgtggctcgttccattctcggcggtggtacctgctcccggtggccctgaggacgtgtgggccaggggcggccccgaaattaggaagcgg

SEQ ID NO: 130417 - DNA, 120 bp, Artificial Sequence
  ENSG00000102409_9 (sequence is synthesized)
atacatatgtgtgtgtgtgtatatatataatgtgtcataaccgtaaacaataaacaatatcaagataaatctgactttgatgggcaagtaattaaaaaagaaaagtatgagaccttaaaa

SEQ ID NO: 130418 - DNA, 120 bp, Artificial Sequence
  ENSG00000102445_0 (sequence is synthesized)
agctgacacagtgagttgtccctgacactcatgactttcaagccctgtgtcttggagggcactgtgatctggaagttcaccttccccatgaaaaaacccaaaccagcctctccttttcct

SEQ ID NO: 130419 - DNA, 120 bp, Artificial Sequence
  ENSG00000102445_1 (sequence is synthesized)
gcatggtgatccgtctgtaatgatcagtgacattctcagaattaaccaatcaggaaattcttggaaagtccacgcctcagcatttagtgcttgggaaattctacttccagatcccagagg

SEQ ID NO: 130420 - DNA, 120 bp, Artificial Sequence
  ENSG00000102445_2 (sequence is synthesized)
ggacagagcagatttccagttctcctagcaccaccatgatctcaggactaaccactgcacacccgtgatgggattccaaaccttcgctgcaagaggacaaggtgacgagttgctgacagt

SEQ ID NO: 130421 - DNA, 120 bp, Artificial Sequence
  ENSG00000102445_3 (sequence is synthesized)
gaaggctaaactaacgcggacagtgaagtgctacatgagtcggactcagactccaggtgaagcagccagcagaggtcagagagagacagctcacgttccggaatagctctccagaccccc

SEQ ID NO: 130422 - DNA, 120 bp, Artificial Sequence
  ENSG00000102445_4 (sequence is synthesized)
agctggccatgtggtgagttcagggcccaaatcaagtagtaccagcaatcagggaactcctatctgttttgaatggattcacaccagccacaagcctggaaagatggtgtcacaatctac

SEQ ID NO: 130423 - DNA, 120 bp, Artificial Sequence
  ENSG00000102445_5 (sequence is synthesized)
agtcaggcaggattctcctgtggagccctgggaagggatcagcgatcactctggcattattgatggttcgcccagactcctgaacactgaccatcctccttgccaattagacatcaggct

SEQ ID NO: 130424 - DNA, 120 bp, Artificial Sequence
  ENSG00000102445_6 (sequence is synthesized)
catgaggcacaaagctgtctggattaacccccaggatgtgcagcaacagccgcaggacttgcaatctcaggtgccagcagcagggaacagtgggacccattttgtgacagatgctgcctc

SEQ ID NO: 130425 - DNA, 120 bp, Artificial Sequence
  ENSG00000102445_7 (sequence is synthesized)
tccctcaggcccttcaccttcgtgcctcggggactccctggcagagacaacgttgtctgaggataccacagactccgttggcagcgcttctccccatggctcgagtgaaaagagtagcag

SEQ ID NO: 130426 - DNA, 120 bp, Artificial Sequence
  ENSG00000102445_8 (sequence is synthesized)
cttctctctgtcctcaacagaggtacacatggtccgcccaggatactctcatcgggtgtctctgcccacaagccctgggattttggccacctccccatatcctgagactgacagtgcttt

SEQ ID NO: 130427 - DNA, 120 bp, Artificial Sequence
  ENSG00000102445_9 (sequence is synthesized)
ttttgagccttcccatctgacatctgctgctgatgaaggtgctgttcaagtcagtagaagaaccatttcttcgaattccttctcaccagaggtatttgtgctgcctgttgatgtagaaaa

SEQ ID NO: 130428 - DNA, 120 bp, Artificial Sequence
  ENSG00000102445_10 (sequence is synthesized)
ggaaaatgcccacttttatgttgcagatatgattatatcagcaatggagaaaatgaagtgtaacattctgagtcaacagcagacagagagctggagtaaagaagtcagtgggttacttgg

SEQ ID NO: 130429 - DNA, 120 bp, Artificial Sequence
  ENSG00000102445_11 (sequence is synthesized)
gagtgatcagcctgactctgaaatgacttttgataccaacataaagcaagagtctgggtcttctacttcttcatacagtggctatgaaggttgtgctgtgttacaggtcagcccagtgac

SEQ ID NO: 130430 - DNA, 120 bp, Artificial Sequence
  ENSG00000102445_12 (sequence is synthesized)
tgaaacacgtacttaccatgatgtgaaagagatttgcaaatgcgatgttgatgaatttgttattttagagcttggagattttaatgatatcacagaaacctgtagctgttcctgcagctc

SEQ ID NO: 130431 - DNA, 120 bp, Artificial Sequence
  ENSG00000102445_13 (sequence is synthesized)
ctctaagagtgtcacttatgagccagacttcaattctgcagaactattagccaaagagctgtaccgcgtgttccagaagtgctggatactgtcagtagttaattctcagctggcaggttc

SEQ ID NO: 130432 - DNA, 120 bp, Artificial Sequence
  ENSG00000102445_14 (sequence is synthesized)
cctgagtgcagctggctcgatagtcgtaaatgaagagtgtgtccgaaaagactttgaatccagtatgaatgtagtacaggaaattaaatttaagtctaggatcagagggactgaagactg

SEQ ID NO: 130433 - DNA, 120 bp, Artificial Sequence
  ENSG00000102445_15 (sequence is synthesized)
ggctcctcctagatttcaaatcatatttaatattcatccaccactcaagagggaccttgtggtggcagcccagaattttttctgtgccggctgtggaactccagtagagcctaagtttgt

SEQ ID NO: 130434 - DNA, 120 bp, Artificial Sequence
  ENSG00000102445_16 (sequence is synthesized)
acgtcagcaatttctccaaacagctgctcgacagcatatggcaccagcccattttcaatttgctgagcatcggccaaagcctgtatgcgaaagccaaggagctggacagagtgaaggaaa

SEQ ID NO: 130435 - DNA, 120 bp, Artificial Sequence
  ENSG00000102445_17 (sequence is synthesized)
ttcaggagcagctcttccatatcaagaagctgttgaagacctgtaggtttgctaacagtgcattaaaggagttcgagcaggtgccgggacacttgactgatgagctccacctgttctccc

SEQ ID NO: 130436 - DNA, 120 bp, Artificial Sequence
  ENSG00000102445_18 (sequence is synthesized)
ttgaggacctggtcaggatcaagaaagggctgctggcacccttactcaaggacattctgaaagcttcccttgcacatgtggctggctgtgagctgtgtcaaggaaagggctttatttgtg

SEQ ID NO: 130437 - DNA, 120 bp, Artificial Sequence
  ENSG00000102445_19 (sequence is synthesized)
aattttgccagaatacgactgtcatcttcccatttcagacagcaacatgtagaagatgttcagcgtgcagggcttgctttcacaaacagtgcttccagtcctccgagtgcccccggtgtg

SEQ ID NO: 130438 - DNA, 120 bp, Artificial Sequence
  ENSG00000102445_20 (sequence is synthesized)
cgaggatcacagcgaggagaaaacttctggaaagtgtggcctctgcagcaacatgatgcccctgagtactgtgaaaaagactgttcaacatgccttatgataacaccgatttgtgtctat

SEQ ID NO: 130439 - DNA, 120 bp, Artificial Sequence
  ENSG00000102445_21 (sequence is synthesized)
tattggtgacattgttttagatattgggtattgtatattaaggaaaaagatggtctatattctctttattgcatatacttaatgtttcaaaagaatgcagattctgtgtttaagcacagg

SEQ ID NO: 130440 - DNA, 120 bp, Artificial Sequence
  ENSG00000102445_22 (sequence is synthesized)
gctgatagttgtggttttgtttacaaatgttctgttttggctgctattggttttttaaagaggttttttatacttttgtatttgaatagttatgtttcactgatgctgagccagtttgta

SEQ ID NO: 130441 - DNA, 120 bp, Artificial Sequence
  ENSG00000102445_23 (sequence is synthesized)
tgtgtgtgcatatatgtgaactgtaactgacaagatgaattactcagtttctctttctctaaagcttgtttgatgaaactggttggtcctttcagtgaacaaaaatatgaccccaaatct

SEQ ID NO: 130442 - DNA, 120 bp, Artificial Sequence
  ENSG00000102445_24 (sequence is synthesized)
gtttgctctggcttttatttcttcaggaagcagacttccacttaaatgccattttgtgattgtgtcaatcatacacattttatttacttcagagtttgaatagagagtacacatttcttc

SEQ ID NO: 130443 - DNA, 120 bp, Artificial Sequence
  ENSG00000102445_25 (sequence is synthesized)
tgcagatttatttcatgatgagtttgagttgcttagcagggcgtgtgggtcccgttgaagtgcagtttgaagcaactgcttctagatggcactctttcaggtggcacaaattgaacctgt

SEQ ID NO: 130444 - DNA, 120 bp, Artificial Sequence
  ENSG00000102445_26 (sequence is synthesized)
atttgtcatctctgttccacacactgcaatgtcaagggatgcagaagtgagtagaattccatccctgcccttgaggatcttgctttaacagatgtaaaactgaacataaggtatttgcag

SEQ ID NO: 130445 - DNA, 120 bp, Artificial Sequence
  ENSG00000102445_27 (sequence is synthesized)
atttaaacgaactgggggaaataatgaacagtgtgattctagtaataacattaaaatcatagacattgactaataaggttaaatgaatcacaaaacctttatgaatttcttttttctaat

SEQ ID NO: 130446 - DNA, 120 bp, Artificial Sequence
  ENSG00000102445_28 (sequence is synthesized)
agttcttatatgttttcctgaaacatgtgagcctattcttttttcttctactttctatatactttctcccacttgagaaaggggccttgaggctgggtcccttcatggtatacctttaga

SEQ ID NO: 130447 - DNA, 120 bp, Artificial Sequence
  ENSG00000102445_29 (sequence is synthesized)
ctgaacggtttgcaacctagggcttgggcattacattccctgggattcacatgccctaactaaacctaccttgattttctcagacagcacaggcaggcaataaagcgtcacagattgtcc

SEQ ID NO: 130448 - DNA, 120 bp, Artificial Sequence
  ENSG00000102445_30 (sequence is synthesized)
cctaaccccatccagccatgtgtatgagtgtgttttattcaatgggatagtactgagcacatgaaagaaatgaatgacttctgtcaatctcttttcattcagtcttctcattctgtcaat

SEQ ID NO: 130449 - DNA, 120 bp, Artificial Sequence
  ENSG00000102445_31 (sequence is synthesized)
tgttttctcatccgcagtgcctctgccagaactgtgctcacatccattatttaagccagatcttttctaagtattatagaagtgtagaggcacatagaataaataaaaccagacttcaaa

SEQ ID NO: 130450 - DNA, 120 bp, Artificial Sequence
  ENSG00000102445_32 (sequence is synthesized)
ggatttctaggaggaccggcagaggcgcgcataggtgcgtggtgctgggcccgggcgccgcggcaccggtgtaggagcgcgcatctccagagtttcttccatctgggcgacgtctcggtg

SEQ ID NO: 130451 - DNA, 120 bp, Artificial Sequence
  ENSG00000102445_33 (sequence is synthesized)
cctgcggcgggaacggcgctttgcttccctgaggagcttctagagagctacggtggcccccgtgtgggaggcggggggcgtggcggcgtcggggcgtcgctgtcccctcctcggtagctc

SEQ ID NO: 130452 - DNA, 120 bp, Artificial Sequence
  ENSG00000102445_34 (sequence is synthesized)
tcctccctcccctttctgctgttaccgggagcgcggtggccacggaacgctgcccggagccgcgcgagggaggacccgacgcgcggcgtttacccagcgcagcgttccaccgctcgggtt

SEQ ID NO: 130453 - DNA, 120 bp, Artificial Sequence
  ENSG00000102445_35 (sequence is synthesized)
tggctggataaaataaaaaatggggatattgacctcctgtcactactgcatggactttgatggtttccaatcattactttctcctctgtgtcaatctgcctcttcgagaaattcatactc

SEQ ID NO: 130454 - DNA, 120 bp, Artificial Sequence
  ENSG00000102445_36 (sequence is synthesized)
actccttcggcgttggctcttgcgccggggtcgttgtttcgtgacaaccactcaggtagccgtttctgagacggcagatgcggccgctttagccctgagcgggctccgcggctccctgga

SEQ ID NO: 130455 - DNA, 120 bp, Artificial Sequence
  ENSG00000102445_37 (sequence is synthesized)
cggtctctgccagtgcccgactcttctcttccggactccacgccaagcagcgaccctgagccaacagccagagcgcccagaaatggcggcctggactgcctcgcactggccagtcaaggg

SEQ ID NO: 130456 - DNA, 120 bp, Artificial Sequence
  ENSG00000102445_38 (sequence is synthesized)
gatcctgaagaacaagacctctacagcttcctctatggtggcctcggctgaacagcccagcgggagtgtcgaggaggagctgagcaaaaaatcccagaagtgggaagaaatgaacatcct

SEQ ID NO: 130457 - DNA, 120 bp, Artificial Sequence
  ENSG00000102445_39 (sequence is synthesized)
ggcgacatatcatccagcggacaaagactatggtttaatgaaaatagttgaaccaagcactccttcctgtcgtaagatgggtgatggtgaagatgcgtgtagtggtatagaaaccactga

SEQ ID NO: 130458 - DNA, 120 bp, Artificial Sequence
  ENSG00000102445_40 (sequence is synthesized)
agccgtggcaccagatatcttagctaagaaattagctgttgctgaaggcttgaacccaaagtatcgggttcaggaacaagaaagcagtggagaggaggctagtgacctctcacctgaaga

SEQ ID NO: 130459 - DNA, 120 bp, Artificial Sequence
  ENSG00000102445_41 (sequence is synthesized)
acgagaaaaaaggcgacaatttcaaatgaaaaggaagcttcactacaatgagggactcaatatcaaactagctagagaattaatttgaaaagacctacatgatgacaaagatgaagaaat

SEQ ID NO: 130460 - DNA, 120 bp, Artificial Sequence
  ENSG00000102445_42 (sequence is synthesized)
tactggtacaagccactgtgctcagcctcacttttaaaatatgcatttttttgtttctgagattgtttttctctgttagttatctgcatttcttctttccgtgaattacctattcccatc

SEQ ID NO: 130461 - DNA, 120 bp, Artificial Sequence
  ENSG00000102445_43 (sequence is synthesized)
ctttgtgcatttttgtatttttttctcattgatttatcaaggtctttatgatgctgcttcctaacattgtatatatactgcttcacaatttataaagcacttttcctatgtgtaataaca

SEQ ID NO: 130462 - DNA, 120 bp, Artificial Sequence
  ENSG00000102445_44 (sequence is synthesized)
ctcgatccagttctgagttgcattttgtggtctcagaatagttagcctaacctgccttcagtcttcctgctagtgagaggagtctggactcccacccagatttccagatcctaaaatgaa

SEQ ID NO: 130463 - DNA, 120 bp, Artificial Sequence
  ENSG00000102445_45 (sequence is synthesized)
tgttccttttgctacactgcagtttgcaatttccatcttccaaatccaggagtattttgggaaggttttgtttttctgacgtctgttccacaagagcagagctcatgaatggccatgatt

SEQ ID NO: 130464 - DNA, 120 bp, Artificial Sequence
  ENSG00000102445_46 (sequence is synthesized)
taattccccaagtctctgctggagccttcccagctgtcatgaggttgagtatggctttatcatcatgaaacaagtcatcagagtctttgaatcttgcgtaggaattggaagtcggggtat

SEQ ID NO: 130465 - DNA, 120 bp, Artificial Sequence
  ENSG00000102445_47 (sequence is synthesized)
accaggataggttttcagcaccaggtgtggcactcaccctccggtatgcttggcagagtttgtgaagcggctccggtactgcgaatacctagggaagtatttctgtgactgctgccactc

SEQ ID NO: 130466 - DNA, 120 bp, Artificial Sequence
  ENSG00000102445_48 (sequence is synthesized)
ttaatactgtgtctctggtggctctagtgatgcaatcattctcgatggggccactgactctgatgtcacaatgacttggctggaggtgtcctgaagtctcttgtttgtccagggcctttg

SEQ ID NO: 130467 - DNA, 80 bp, Artificial Sequence
  ENSG00000102452_0 (sequence is synthesized)
agtgagtgacacggcgagcgtgagccgcggccccagccgggccgagcgcgctgcctgagctgagccgccgtaggtgaggg

SEQ ID NO: 130468 - DNA, 120 bp, Artificial Sequence
  ENSG00000102452_1 (sequence is synthesized)
gatcctgccggtcgcccactgtcgccgccgccgccgcccgcgggcaccatgacagctctgagcgctggggttacagactgtggttttgtgcttgctcaccaaagctaacctcagcatgct

SEQ ID NO: 130469 - DNA, 120 bp, Artificial Sequence
  ENSG00000102452_2 (sequence is synthesized)
caaaaggaagcagagttccagggtggaagcccagccagtcactgactttggtcctgatgagtctctgtcggataatgctgacatcctctggattaacaaaccatgggttcactctttgct

SEQ ID NO: 130470 - DNA, 120 bp, Artificial Sequence
  ENSG00000102452_3 (sequence is synthesized)
gcgcatctgtgccatcatcagcgtcatttctgtttgtatgaatacgccaatgaccttcgagcactatcctccacttcagtatgtgaccttcactttggatacattattgatgtttctcta

SEQ ID NO: 130471 - DNA, 120 bp, Artificial Sequence
  ENSG00000102452_4 (sequence is synthesized)
cacggcagagatgatagcaaaaatgcacatccggggcattgtcaagggggatagttcctatgtgaaagatcgctggtgtgtttttgatggatttatggtcttttgcctttgggtttcttt

SEQ ID NO: 130472 - DNA, 120 bp, Artificial Sequence
  ENSG00000102452_5 (sequence is synthesized)
ggtgctacaggtgtttgaaattgctgatatagttgatcagatgtcaccttggggcatgttgcggattccacggccactgattatgatccgagcattccggatttatttccgatttgaact

SEQ ID NO: 130473 - DNA, 120 bp, Artificial Sequence
  ENSG00000102452_6 (sequence is synthesized)
gccaaggaccagaattacaaatattttaaagcgatcgggagaacaaatatggagtgtttccatttttctacttttctttctacttctttatggaattttaggagttcagatgtttggaac

SEQ ID NO: 130474 - DNA, 120 bp, Artificial Sequence
  ENSG00000102452_7 (sequence is synthesized)
atttacttatcactgtgttgtaaatgacacaaagccagggaatgtaacctggaatagtttagctattccagacacacactgctcaccagagctagaagaaggctaccagtgcccacctgg

SEQ ID NO: 130475 - DNA, 120 bp, Artificial Sequence
  ENSG00000102452_8 (sequence is synthesized)
atttaaatgcatggaccttgaagatctgggacttagcaggcaagagctgggctacagtggctttaatgagataggaactagtatattcaccgtctatgaggccgcctcacaggaaggctg

SEQ ID NO: 130476 - DNA, 120 bp, Artificial Sequence
  ENSG00000102452_9 (sequence is synthesized)
ggtgttcctcatgtacagagcaattgacagctttccccgttggcgttcctacttctatttcatcactctcattttcttcctcgcctggcttgtgaagaacgtgtttattgctgttatcat

SEQ ID NO: 130477 - DNA, 120 bp, Artificial Sequence
  ENSG00000102452_10 (sequence is synthesized)
tgaaacatttgcagaaatcagagtacagtttcaacaaatgtggggatcgagaagcagcactacctcaacagccaccacccagatgtttcatgaagatgctgctggaggttggcagctggt

SEQ ID NO: 130478 - DNA, 120 bp, Artificial Sequence
  ENSG00000102452_11 (sequence is synthesized)
agctgtggatgtcaacaagccccagggacgcgccccagcctgcctccagaaaatgatgcggtcatccgttttccacatgttcatcctgagcatggtgaccgtggacgtgatcgtggcggc

SEQ ID NO: 130479 - DNA, 120 bp, Artificial Sequence
  ENSG00000102452_12 (sequence is synthesized)
tagcaactactacaaaggagaaaacttcaggaggcagtacgacgagttctacctggcggaggtggcttttacagtactttttgatttggaagcacttctgaagatatggtgtttgggatt

SEQ ID NO: 130480 - DNA, 120 bp, Artificial Sequence
  ENSG00000102452_13 (sequence is synthesized)
tactggatatattagctcatctctccacaaattcgaactactactcgtaattggaactactcttcatgtatacccagatctttatcattcacaattcacgtactttcaggttctccgagt

SEQ ID NO: 130481 - DNA, 120 bp, Artificial Sequence
  ENSG00000102452_14 (sequence is synthesized)
agttcggctgattaagatttcacctgcattagaagactttgtgtacaagatatttggtcctggaaaaaagcttgggagtttggttgtatttactgccagcctcttgattgttatgtcagc

SEQ ID NO: 130482 - DNA, 120 bp, Artificial Sequence
  ENSG00000102452_15 (sequence is synthesized)
aattagtttgcagatgttctgctttgtcgaagaactggacagatttactacgtttccgagggcatttatgtccatgttccagatcctcacccaggaaggatgggtggacgtaatggacca

SEQ ID NO: 130483 - DNA, 120 bp, Artificial Sequence
  ENSG00000102452_16 (sequence is synthesized)
aactctaaatgctgtgggacatatgtgggcacccgtggttgccatctatttcattctctatcatctttttgccactctgatcctcctgagtttgtttgttgctgttattttggacaactt

SEQ ID NO: 130484 - DNA, 120 bp, Artificial Sequence
  ENSG00000102452_17 (sequence is synthesized)
agaacttgatgaagacctaaagaagcttaaacaattaaagcaaagtgaagcaaatgcggacaccaaagaaaagctccctttacgcctgcgaatctttgaaaaatttccaaacagacctca

SEQ ID NO: 130485 - DNA, 120 bp, Artificial Sequence
  ENSG00000102452_18 (sequence is synthesized)
aatggtgaaaatctcaaagcttccttcagattttacagttcctaaaatcagggagagttttatgaagcagtttattgaccgccagcaacaggacacatgttgcctcctgagaagcctccc

SEQ ID NO: 130486 - DNA, 120 bp, Artificial Sequence
  ENSG00000102452_19 (sequence is synthesized)
gaccacctcttcctcctcctgcgaccactccaaacgctcagcaattgaggacaacaaatacatcgaccaaaaacttcgcaagtctgttttcagcatcagggcaaggaaccttctggaaaa

SEQ ID NO: 130487 - DNA, 120 bp, Artificial Sequence
  ENSG00000102452_20 (sequence is synthesized)
ggagaccgcagtcactaaaatcttaagagcttgcacccgacagcgcatgctgagcggatcatttgaggggcagcccgcaaaggagaggtcaatcctcagcgtgcagcatcatatccgcca

SEQ ID NO: 130488 - DNA, 120 bp, Artificial Sequence
  ENSG00000102452_21 (sequence is synthesized)
agagcgcaggtcactaagacatggatcaaacagccagaggatcagcaggggaaaatctcttgaaactttgactcaagatcattccaatacagtgagatatagaaatgcacaaagagaaga

SEQ ID NO: 130489 - DNA, 120 bp, Artificial Sequence
  ENSG00000102452_22 (sequence is synthesized)
cagtgaaataaagatgattcaggaaaaaaaggagcaagcagagatgaaaaggaaagtgcaagaagaggaactcagagagaaccacccatacttcgataagccactgttcattgtcgggcg

SEQ ID NO: 130490 - DNA, 120 bp, Artificial Sequence
  ENSG00000102452_23 (sequence is synthesized)
agaacacaggttcagaaacttttgccgggtggtggtccgagcacgcttcaacgcatctaaaacagaccctgtcacaggagctgtgaaaaatacaaagtaccatcaactttatgatttgct

SEQ ID NO: 130491 - DNA, 120 bp, Artificial Sequence
  ENSG00000102452_24 (sequence is synthesized)
gggattggtcacttacctggactgggtcatgatcatcgtaaccatctgctcttgcatttccatgatgtttgagtccccgtttcgaagagtcatgcatgcacctactttgcagattgctga

SEQ ID NO: 130492 - DNA, 120 bp, Artificial Sequence
  ENSG00000102452_25 (sequence is synthesized)
gtatgtgtttgtgatattcatgagcattgagcttaatctgaagattatggcagatggcttatttttcactccaactgctgtcatcagggacttcggtggagtaatggacatatttatata

SEQ ID NO: 130493 - DNA, 120 bp, Artificial Sequence
  ENSG00000102452_26 (sequence is synthesized)
tcttgtgagcttgatatttctttgttggatgcctcaaaatgtacctgctgaatcgggagctcagcttctaatggtccttcggtgcctgagacctctgcgcatattcaaactggtgcccca

SEQ ID NO: 130494 - DNA, 120 bp, Artificial Sequence
  ENSG00000102452_27 (sequence is synthesized)
gatgaggaaagttgttcgagaacttttcagcggcttcaaggaaatttttttggtctccattcttttgctgacattaatgctcgtttttgcaagctttggagttcagctttttgctggaaa

SEQ ID NO: 130495 - DNA, 120 bp, Artificial Sequence
  ENSG00000102452_28 (sequence is synthesized)
actggccaagtgcaatgatcccaacattattagaagggaagattgcaatggcatattcagaattaatgtcagtgtgtcaaagaacttaaatttaaaattgaggcctggagagaaaaaacc

SEQ ID NO: 130496 - DNA, 120 bp, Artificial Sequence
  ENSG00000102452_29 (sequence is synthesized)
tgccccgtgtttgggcgaatcctcggaactttaatttcgacaatgtgggaaacgctatgctggcgttgtttgaagttctctccttgaaaggctgggtggaagtgagagatgttattattc

SEQ ID NO: 130497 - DNA, 120 bp, Artificial Sequence
  ENSG00000102452_30 (sequence is synthesized)
atcgtgtggggccgatccatggaatctatattcatgtttttgtattcctgggttgcatgattggactgaccctttttgttggagtagttattgctaatttcaatgaaaacaaggggacgg

SEQ ID NO: 130498 - DNA, 120 bp, Artificial Sequence
  ENSG00000102452_31 (sequence is synthesized)
ctttgctgaccgtcgatcagagaagatgggaagacctgaagagccgactgaagatcgcacagcctcttcatcttccgcctcgcccggataatgatggttttagagctaaaatgtatgaca

SEQ ID NO: 130499 - DNA, 120 bp, Artificial Sequence
  ENSG00000102452_32 (sequence is synthesized)
taacccagcatccattttttaagaggacaatcgcattactcgtcctggcccagtcggtgttgctctctgtcaagtgggacgtcgaggacccggtgaccgtacctttggcaacaatgtcag

SEQ ID NO: 130500 - DNA, 120 bp, Artificial Sequence
  ENSG00000102452_33 (sequence is synthesized)
ttgttttcaccttcatctttgttctggaggttaccatgaagatcatagcaatgtcgcctgctggcttctggcaaagcagaagaaaccgatacgatctcctggtgacgtcgcttggcgttg

SEQ ID NO: 130501 - DNA, 120 bp, Artificial Sequence
  ENSG00000102452_34 (sequence is synthesized)
tatgggtggtgcttcactttgccctcctgaatgcatatacttacatgatgggcgcttgtgtgattgtatttaggtttttctccatctgtggaaaacatgtaacgctaaagatgctcctct

SEQ ID NO: 130502 - DNA, 120 bp, Artificial Sequence
  ENSG00000102452_35 (sequence is synthesized)
tgacagtggtcgtcagcatgtacaagagcttctttatcatagtaggcatgtttctcttgctgctgtgttacgcttttgctggagttgttttatttggtactgtgaaatatggggagaata

SEQ ID NO: 130503 - DNA, 120 bp, Artificial Sequence
  ENSG00000102452_36 (sequence is synthesized)
ttaacaggcatgcaaatttttcttcggctggaaaagctattaccgtactgttccgaattgtcacaggtgaagactggaacaagattatgcatgactgtatggttcagcctccgttttgta

SEQ ID NO: 130504 - DNA, 120 bp, Artificial Sequence
  ENSG00000102452_37 (sequence is synthesized)
ctccagatgaatttacatactgggcaacagactgtggaaattatgctggggcacttatgtatttctgttcattttatgtcatcattgcctacatcatgctaaatctgcttgtagccataa

SEQ ID NO: 130505 - DNA, 120 bp, Artificial Sequence
  ENSG00000102452_38 (sequence is synthesized)
ttgtggagaatttctccttgttttattccactgaggaggaccagcttttaagttacaatgatcttcgccactttcaaataatatggaacatggtggatgataaaagagagggggtgatcc

SEQ ID NO: 130506 - DNA, 120 bp, Artificial Sequence
  ENSG00000102452_39 (sequence is synthesized)
ccacgttccgcgtcaagttcctgctgcggctactgcgtgggaggctggaggtggacctggacaaggacaagctcctgtttaagcacatgtgctacgaaatggagaggctccacaatggcg

SEQ ID NO: 130507 - DNA, 120 bp, Artificial Sequence
  ENSG00000102452_40 (sequence is synthesized)
gcgacgtcaccttccatgatgtcctgagcatgctttcataccggtccgtggacatccggaagagcttgcagctggaggaactcctggcgagggagcagctggagtacaccatagaggagg

SEQ ID NO: 130508 - DNA, 120 bp, Artificial Sequence
  ENSG00000102452_41 (sequence is synthesized)
aggtggccaagcagaccatccgcatgtggctcaagaagtgcctgaagcgcatcagagctaaacagcagcagtcgtgcagtatcatccacagcctgagagagagtcagcagcaagagctga

SEQ ID NO: 130509 - DNA, 120 bp, Artificial Sequence
  ENSG00000102452_42 (sequence is synthesized)
gccggtttctgaacccgcccagcatcgagaccacccagcccagtgaggacacgaatgccaacagtcaggacaacagcatgcaacctgagacaagcagccagcagcagctcctgagcccca

SEQ ID NO: 130510 - DNA, 120 bp, Artificial Sequence
  ENSG00000102452_43 (sequence is synthesized)
cgctgtcggatcgaggaggaagtcggcaagatgcagccgacgcagggaaaccccagaggaaatttgggcagtggcgtctgccctcagccccaaaaccaataagccattcagtgtcctcag

SEQ ID NO: 130511 - DNA, 120 bp, Artificial Sequence
  ENSG00000102452_44 (sequence is synthesized)
tcaacttacggtttggaggaaggacaaccatgaaatctgtcgtgtgcaaaatgaaccccatgactgacgcggcttcctgcggttctgaagttaagaagtggtggacccggcagctgactg

SEQ ID NO: 130512 - DNA, 120 bp, Artificial Sequence
  ENSG00000102452_45 (sequence is synthesized)
tggagagcgacgaaagtggggatgaccttctggatatttaggtggatgtcaatgtagatgaatttctagtggtggaaaccgttttctaataatgtccttgattgtccagtgagcaatctg

SEQ ID NO: 130513 - DNA, 120 bp, Artificial Sequence
  ENSG00000102452_46 (sequence is synthesized)
taattgatctataactgaattccagcttgtcacaagatgtttataaattgattttcatcctgccacagaaaggcataagctgcatgtatgatgggttactatcaatcattgctcaaaaaa

SEQ ID NO: 130514 - DNA, 120 bp, Artificial Sequence
  ENSG00000102452_47 (sequence is synthesized)
atttttgtataatgacagtactgataatattagaaatgataccgcaagcaaatgtatatcacttaaaaatgtcatatattctgtctgcgtaaactaaggtatatattcatatgtgctcta

SEQ ID NO: 130515 - DNA, 120 bp, Artificial Sequence
  ENSG00000102452_48 (sequence is synthesized)
atgcagtattatcaccgccccgcaaaagagtgctaagcccaaagtggctgatatttagggtacaggggttatagctttagttcacatctttcccatttccactagaaatatttctcttga

SEQ ID NO: 130516 - DNA, 120 bp, Artificial Sequence
  ENSG00000102452_49 (sequence is synthesized)
gagaatttattatttatgattgatctgaaaaggtcagcactgaacttatgctaaaatgatagtagttttacaaactacagattctgaattttaaaaagtatcttctttttctcgtgttat

SEQ ID NO: 130517 - DNA, 120 bp, Artificial Sequence
  ENSG00000102452_50 (sequence is synthesized)
atttttaaatatacacaagacatttggtgaccagaacaagttgatttctgtcctcagttatgttaatgaaactgttgcctccttctaagaaaattgtgtgtgcaagcaccaggcaaagaa

SEQ ID NO: 130518 - DNA, 120 bp, Artificial Sequence
  ENSG00000102452_51 (sequence is synthesized)
atggactcaggatgcttagcggtttaaaacaaacctgtagataaatcacttgagtgacatagttgcgcaaagatgttaagtttcttaagaaaccttttaataactgagtttagcaaaaag

SEQ ID NO: 130519 - DNA, 120 bp, Artificial Sequence
  ENSG00000102452_52 (sequence is synthesized)
aataaaactatatagctcaatttatttaaaaaaatctttgcatgtgtgatgttatcattggcttcatttcttacccaaggtatgtctgttttgccataaatcagcagagtcatttcattc

SEQ ID NO: 130520 - DNA, 120 bp, Artificial Sequence
  ENSG00000102452_53 (sequence is synthesized)
tgggtgatcctaacacaccattgctacgttagatttgaaatgacatctctgttaaaagaatcttctatggaaataatggtgccctgcaaaatcttcctttgaactcacaggttagggatc

SEQ ID NO: 130521 - DNA, 120 bp, Artificial Sequence
  ENSG00000102452_54 (sequence is synthesized)
acacaacttacttaatcgttttttgtttttgttttttttccttatatgtcaatggcccatgtcctccgggaaaattagaaaagcaaaatgattacaaagtgctgttagatttcttgtgct

SEQ ID NO: 130522 - DNA, 120 bp, Artificial Sequence
  ENSG00000102452_55 (sequence is synthesized)
gggccagccaagtagaagtggacttgacttggacctttaactattttattacagattggacatttgctgttcagatgttttttaacagagggattatctcagaatcctgtgacctccagg

SEQ ID NO: 130523 - DNA, 120 bp, Artificial Sequence
  ENSG00000102452_56 (sequence is synthesized)
ttgttttataatctatttttctctatttaacattcctcagatagataggcaaataggacattccttctgtgtcacagaagtatcgtggtagtggcagtctacagtttatatgattcattg

SEQ ID NO: 130524 - DNA, 120 bp, Artificial Sequence
  ENSG00000102452_57 (sequence is synthesized)
taactatgagataaagaacaaccagtcatgtggccaaaaggattagatttgatttgatgttcacttggagtttactttttgtacatacaagataaaataaatattggatttgtaaaataa

SEQ ID NO: 130525 - DNA, 120 bp, Artificial Sequence
  ENSG00000102452_58 (sequence is synthesized)
caagaggccattaccgacgagctcacccattagcatccgctgttgtctctacttgggaagatcacattgtcactctagtggagtcagaatgtataggctttttccacacccttgttctgg

SEQ ID NO: 130526 - DNA, 120 bp, Artificial Sequence
  ENSG00000102452_59 (sequence is synthesized)
gacattaagaaagaagacatggagacaaagaagaaaagaaccggggaccccctgctactgtgtctataaacaactagtggtgtttaaaggctaataaagctccaaagatctctcttataa

SEQ ID NO: 130527 - DNA, 120 bp, Artificial Sequence
  ENSG00000102452_60 (sequence is synthesized)
acaacaaatacatcgaccaaaaagtaagatctgctgtttcgaataaccaggcttctaaaaagcatctatgtttgagaaaagaaccgcagagttctttagggtcctggaatccaatttctc

SEQ ID NO: 130528 - DNA, 120 bp, Artificial Sequence
  ENSG00000102452_61 (sequence is synthesized)
aagagaataatgaaaataaaatgatttcatttgtaaaagatatcatgaaacctaacattttttactctatgcattgaaattttgcatttgcccgtgtaagcttttgagctgcgccacgtg

SEQ ID NO: 130529 - DNA, 120 bp, Artificial Sequence
  ENSG00000102452_62 (sequence is synthesized)
gcagccatgcgactttgtaaacatcaagagcctcccaaatctgcattttctcaggtgcggaataaagggctgggatctccaaggctcagtccaggtgtaatgacctgccatctcctgcaa

SEQ ID NO: 130530 - DNA, 120 bp, Artificial Sequence
  ENSG00000102452_63 (sequence is synthesized)
ggctcaggccagaaaaagaggtgacactgaaactaccaaagggacagtatattacaaattcatgatcacctcaaactcaagcagcaatcccaattaaaagtacaaaggagttatttaagt

SEQ ID NO: 130531 - DNA, 120 bp, Artificial Sequence
  ENSG00000102452_64 (sequence is synthesized)
ctctcttatccgtgacctctgtggcactcaagacgcctgtccatcctgccttcctctccagcctccaaaccctctgcctggaagccagactctggccagacttactcaccaggccctcac

SEQ ID NO: 130532 - DNA, 120 bp, Artificial Sequence
  ENSG00000102452_65 (sequence is synthesized)
cacaccacctggaatgcgttcctcacagctcttttccaaaatcagtcttctccttggcatctgcgtggcttgggagagcatccttggctctctgtcattgtctcacaatcttcgataagt

SEQ ID NO: 130533 - DNA, 120 bp, Artificial Sequence
  ENSG00000102452_66 (sequence is synthesized)
agtgttcggaaagtgcccccctggcccatgtgcccagatgggctctccaagtctaaatgcttcaaaatggtacagaactaaatgtgtgaatttatgatggggcttcatttctggtcctcc

SEQ ID NO: 130534 - DNA, 120 bp, Artificial Sequence
  ENSG00000102452_67 (sequence is synthesized)
ttcttcacacttgcgtggccgcccttcccatccgctctccaattttctttcacgtttctgctttctgagaagaaataagactgatttctgggatggagcatgagagagacagatgcagag

SEQ ID NO: 130535 - DNA, 120 bp, Artificial Sequence
  ENSG00000102452_68 (sequence is synthesized)
agagagagagacaaagcgtgtttccgtgggagatgcccacacacctcacttgggagcatcggcagtgttggtacccacacaggtgtgttttgacatccaagacttgaccctaattcttct

SEQ ID NO: 130536 - DNA, 120 bp, Artificial Sequence
  ENSG00000102452_69 (sequence is synthesized)
tggaacctgatggggagagaaccttgctgggggccccacatgggccaggggcagccagggcagagttgggcagctgcctgagagttctcggtggagaggcccggaatatcccacaagaac

SEQ ID NO: 130537 - DNA, 120 bp, Artificial Sequence
  ENSG00000102452_70 (sequence is synthesized)
aagtctccgttagttccaagtggaatgacagccctttctgagtttccctgagttgagagctaatacatgtgttgtgggaacaacagcccaagccaaaggccacgcggaggccaggcgtgg

SEQ ID NO: 130538 - DNA, 79 bp, Artificial Sequence
  ENSG00000102452_71 (sequence is synthesized)
ccacggatctcatgagctcaggagttcaagaccagcctggtcaaccttgtctctacaaaaaataaaaaaaaaaaaaaaa

SEQ ID NO: 130539 - DNA, 79 bp, Artificial Sequence
  ENSG00000102452_72 (sequence is synthesized)
aattttaggagttcagatgtttggaacatttacttatcactgtgttgtaaatgacacaaagccaggactctcactctga

SEQ ID NO: 130540 - DNA, 120 bp, Artificial Sequence
  ENSG00000102452_73 (sequence is synthesized)
cagcctcccaaagtgctgggattaaaggcctgagccaccatgtccagccttatttttaaaaaaaaatttcagttcaatattactgcattttaaagccccacacataagcagaaaaactgt

SEQ ID NO: 130541 - DNA, 120 bp, Artificial Sequence
  ENSG00000102452_74 (sequence is synthesized)
cagaaaaactgtcagcaccattttaccgttactattagcccagacataaatgtagttttactcttagagactcaagaaatatccaaactcaaaataaaacagaaaatgttaattgatttg

SEQ ID NO: 130542 - DNA, 120 bp, Artificial Sequence
  ENSG00000102466_0 (sequence is synthesized)
atggccgcggccatcgctagcggcttgatccgccagaagcggcaggcgcgggagcagcactgggaccggccgtctgccagcaggaggcggagcagccccagcaagaaccgcgggctctgc

SEQ ID NO: 130543 - DNA, 120 bp, Artificial Sequence
  ENSG00000102466_1 (sequence is synthesized)
aacggcaacctggtggatatcttctccaaagtgcgcatcttcggcctcaagaagcgcaggttgcggcgccaagatccccagctcaagggtatagtgaccaggttatattgcaggcaaggc

SEQ ID NO: 130544 - DNA, 120 bp, Artificial Sequence
  ENSG00000102466_2 (sequence is synthesized)
tactacttgcaaatgcaccccgatggagctctcgatggaaccaaggatgacagcactaattctacactcttcaacctcataccagtgggactacgtgttgttgccatccagggagtgaaa

SEQ ID NO: 130545 - DNA, 120 bp, Artificial Sequence
  ENSG00000102466_3 (sequence is synthesized)
ggagaaggttacctctacccatcagaactttttacccctgaatgcaagtttaaagaatctgtttttgaaaattattatgtaatctactcatccatgttgtacagacaacaggaatctggt

SEQ ID NO: 130546 - DNA, 120 bp, Artificial Sequence
  ENSG00000102466_4 (sequence is synthesized)
agagcctggtttttgggattaaataaggaagggcaagctatgaaagggaacagagtaaagaaaaccaaaccagcagctcattttctacccaagccattggaagttgccatgtaccgagaa

SEQ ID NO: 130547 - DNA, 120 bp, Artificial Sequence
  ENSG00000102466_5 (sequence is synthesized)
ccatctttgcatgatgttggggaaacggtcccgaagcctggggtgacgccaagtaaaagcacaagtgcgtctgcaataatgaatggaggcaaaccagtcaacaagagtaagacaacatag

SEQ ID NO: 130548 - DNA, 120 bp, Artificial Sequence
  ENSG00000102466_6 (sequence is synthesized)
tatttgatctttgcgagaatgcttagaagctgtttattattcaccagtgtttagtaatatgagtttatctaaaggaagtgtaatactatgtcttaaatagtgcttttgccatattttaaa

SEQ ID NO: 130549 - DNA, 120 bp, Artificial Sequence
  ENSG00000102466_7 (sequence is synthesized)
aaataacctagtatacacgtgaatctaatcttttgtatttctagttagaaatgcacttatcttagagagtttcttataatgtttttaaaagaaacaatatgaattctaaaaaaagagaaa

SEQ ID NO: 130550 - DNA, 120 bp, Artificial Sequence
  ENSG00000102466_8 (sequence is synthesized)
ttcaactcctcctcctcctccctctaatgcctgtaactcacatccgaggctgggcgaggaatccggaggggagattttcctcatgctcacggttgttggaaactggaagagtgagaggaa

SEQ ID NO: 130551 - DNA, 120 bp, Artificial Sequence
  ENSG00000102466_9 (sequence is synthesized)
aggttcaaaccgatcccactgagcactggcgattgattataaaaaaaaatcgacactgggagaagggaggctctgtcttcggctgtcagactcaatctcggaggtggtattgggtgtcta

SEQ ID NO: 130552 - DNA, 120 bp, Artificial Sequence
  ENSG00000102466_10 (sequence is synthesized)
agctgctggattgcttttcgcccaaatcaatgtggtttctttggaacattttcagcaaaggaacgcatatgctgcagtgtctttgtggcaagagtcttaagaaaaacaagaacccaactg

SEQ ID NO: 130553 - DNA, 120 bp, Artificial Sequence
  ENSG00000102466_11 (sequence is synthesized)
ctggccgaaaacaaacaatcactgagaagtctcaaagaaatataccacgtgaggggaaaaaactgggagaagatccggaatattatcgtttttcctatggtaaaaccggtgcccctcttc

SEQ ID NO: 130554 - DNA, 120 bp, Artificial Sequence
  ENSG00000102466_12 (sequence is synthesized)
taatgcttattctttgctgtctccgaacttctctgttgcaagtggataaatctcaacctgttgcaccccccacaacaagaagacacctggataaccagctaaactcagaccatggaatgc

SEQ ID NO: 130555 - DNA, 120 bp, Artificial Sequence
  ENSG00000102466_13 (sequence is synthesized)
cctaccagatatggaatgcctttttaatatcttttctgtgactgtgacacttcatgtgaatgacatacttcacaagtacactcgataccttgcctgctgacagctacccataatcctttt

SEQ ID NO: 130556 - DNA, 120 bp, Artificial Sequence
  ENSG00000102466_14 (sequence is synthesized)
tgagtcctgtttcagcgaaatctatgtgtttaagttcaattttgtagcacacaaataatattgagtaatttctagttagacgctgtaaacctgtgctattacggatttctcttcttccca

SEQ ID NO: 130557 - DNA, 120 bp, Artificial Sequence
  ENSG00000102466_15 (sequence is synthesized)
tttttacagggctgctcgctccactgtctgtgaccttttgcagggattttgttcctctaaatcttaaatgttgcagttggcttaggtcggagagcaatcagggaatcaggaagccttcta

SEQ ID NO: 130558 - DNA, 120 bp, Artificial Sequence
  ENSG00000102466_16 (sequence is synthesized)
aacctattattacaaattgcatctataaagaaagattaagaaagattgttgtctctggctcacactatcgattaaacacacatatacgctctgtccagtagcagatactgtgctcccaag

SEQ ID NO: 130559 - DNA, 120 bp, Artificial Sequence
  ENSG00000102466_17 (sequence is synthesized)
gtcggcattgcctgggtgggaaatggctcaaacacaatccagggaagctctctatgatatgtgtttgacatccccctctagtttctttgtgtgtgtgtgttttatacatatcacaagctt

SEQ ID NO: 130560 - DNA, 120 bp, Artificial Sequence
  ENSG00000102466_18 (sequence is synthesized)
actggtaatggtaacatttgccttgcccagcgagcaagacccactggtttttgagaaagtgggtccaaagatttctgtaggccttgtaggcctgattaaggttcatttttcatctattaa

SEQ ID NO: 130561 - DNA, 120 bp, Artificial Sequence
  ENSG00000102466_19 (sequence is synthesized)
ttctcattatttggaaaaaaaaaaaaaggaaaatcagtaattataacctacaagaattgcgctacctaaatccatttcagatatactccgtcctgtttttaatgaaccaaacttaacgcc

SEQ ID NO: 130562 - DNA, 120 bp, Artificial Sequence
  ENSG00000102466_20 (sequence is synthesized)
atccccgtttctggctgcgttcccctcatactcagcagagcatgggcaagacggctgttgtgttctttcctgcagcagcaatgcaaacgttagttataaattaattagactttaatattt

SEQ ID NO: 130563 - DNA, 120 bp, Artificial Sequence
  ENSG00000102466_21 (sequence is synthesized)
ttggtgtttaatgacaagtttttaaactggacatattaggaaaaatattttttttagctcagcatgctgagtccggtactgtgtatttcaccagtacatgcctctagctcagcatctggg

SEQ ID NO: 130564 - DNA, 120 bp, Artificial Sequence
  ENSG00000102466_22 (sequence is synthesized)
gctcatgttgcccagtggctgggttagaggtgccttgccatgatctcagaatacagtctgttgaattatcctagatgaaaataaaggcaaaccaacacattcatccatgaggattttggt

SEQ ID NO: 130565 - DNA, 120 bp, Artificial Sequence
  ENSG00000102466_23 (sequence is synthesized)
ccattccatttattttcttttattttgcattcttaatttcctttttagtttaacactgtttgtttgagcttagggaagacaactaccaagaaaggccaggaacagttgactacacaatga

SEQ ID NO: 130566 - DNA, 120 bp, Artificial Sequence
  ENSG00000102466_24 (sequence is synthesized)
agattccatgcaaaatgttcaatattggatctaaaggggttcaaaatgtttcatactaaactgtttgggaatttatttgttaactctgtgtacacctaataaaattcaatgttttcttct

SEQ ID NO: 130567 - DNA, 120 bp, Artificial Sequence
  ENSG00000102466_25 (sequence is synthesized)
cagaagagttcattgagaccaaactgaacctcatttattgaaaattatatgtgggatcaatgtactggcctcttgttattctttctatgtgggaggatgacccagtcatcattttcccca

SEQ ID NO: 130568 - DNA, 120 bp, Artificial Sequence
  ENSG00000102466_26 (sequence is synthesized)
tctgcactgtatttattgggaaattattttgtcactgctttcataaatcttcttcatgacagcccttgcccagcattaaaaaattctggcctgcttagctgattaaaggtttagtagaaa

SEQ ID NO: 130569 - DNA, 120 bp, Artificial Sequence
  ENSG00000102466_27 (sequence is synthesized)
tttaactgtttgtttatgcttatttcattttcatattggattctacttgaataaataaaaagttagcagaacgtttgagtagatttattgccaatgatgctaaattacaaatctaacaaa

SEQ ID NO: 130570 - DNA, 120 bp, Artificial Sequence
  ENSG00000102466_28 (sequence is synthesized)
caaaatgattcctttggtcatttttgatttggtgttatgtcatcttgaagcctattgtttttaacaggaacagttaaaatatattagataacttccattaaccaattattttcagaaaac

SEQ ID NO: 130571 - DNA, 120 bp, Artificial Sequence
  ENSG00000102466_29 (sequence is synthesized)
atagatcccataatatgtggccaactatatgagtaattaactaacttgtaatacagtcaaatgggcttatggacactacttacagcagcaacacttcacttcacacaaacacacacatat

SEQ ID NO: 130572 - DNA, 120 bp, Artificial Sequence
  ENSG00000102466_30 (sequence is synthesized)
acacacacacacacacacagagcaaacacccccatctatttgttactgataattagccctacttgctggtttctttttcccctgcaagtctgtttattggtttaaattaagacaagattt

SEQ ID NO: 130573 - DNA, 120 bp, Artificial Sequence
  ENSG00000102466_31 (sequence is synthesized)
aattaagacaagatttatttttgtaaatgactgagatttatgtaaatgtgtatctctgttgtgttttatatatggggtgtctataagggcatttatccctatgaaggatgtcaaatactt

SEQ ID NO: 130574 - DNA, 120 bp, Artificial Sequence
  ENSG00000102466_32 (sequence is synthesized)
tcttctaatatatgtttagacatattgcagaggggtccttgttatttgtaattgagttaggtcatttactttgtgtctggtctcacctgtagcatgggaagaggacagcaatgatgagct

SEQ ID NO: 130575 - DNA, 120 bp, Artificial Sequence
  ENSG00000102466_33 (sequence is synthesized)
gcatgtagtaggtacctgtgtatcaagaactgttggtatgtattgctaatttgcatacaaagagtttgtctgtctgcattgtagtttgtgtttaatatcatttgttaaattcacaaatac

SEQ ID NO: 130576 - DNA, 120 bp, Artificial Sequence
  ENSG00000102466_34 (sequence is synthesized)
aacatattgaataaaatatttatatgaaggcatattaaaaaacatcaaacaactttatgtaacaaaatggcattgcattactcaccaatatagagaaatgtcatgtaaataagttggtaa

SEQ ID NO: 130577 - DNA, 120 bp, Artificial Sequence
  ENSG00000102466_35 (sequence is synthesized)
actcaatttccccctttaccatgccaaagaaaattttagctctttgatgatacctctcttgctatttgtttgggataagacttcgccatttttttcccctcagaaattaagtttgctgtt

SEQ ID NO: 130578 - DNA, 120 bp, Artificial Sequence
  ENSG00000102466_36 (sequence is synthesized)
attaagtaagaagtgcaatctgtcactactgatgttccgtatagtaaatctgatggaattcatttgtatttagactgtgtgttttgtacctccatgtgcatatgtccattgtatcaagtc

SEQ ID NO: 130579 - DNA, 120 bp, Artificial Sequence
  ENSG00000102466_37 (sequence is synthesized)
tctataatactccattccttctgcatgcatatctggtgtgggagggttatttctactgatttgttatagtagctgattgctttgccagtccctcaacaacgctcagaaatgttgttttgg

SEQ ID NO: 130580 - DNA, 120 bp, Artificial Sequence
  ENSG00000102466_38 (sequence is synthesized)
tatttcaagtgacaacatttttgttttctaatataagattgctttttaaaacattttgctaccactttacttggaaaaattagagaagacatgacaattctccaccctatgtaaagagca

SEQ ID NO: 130581 - DNA, 120 bp, Artificial Sequence
  ENSG00000102466_39 (sequence is synthesized)
aaatggaactgaacatcatttcattacaaatcctgaagaatttggagattcttgctctaaatgtttgcttgtcctgaatgtttttgggtagcagtggcttaaagagatccacgatgggtc

SEQ ID NO: 130582 - DNA, 120 bp, Artificial Sequence
  ENSG00000102466_40 (sequence is synthesized)
caaaggactcccgctccagttcttctaatagtttgcctcttggggagcaagcagaagttctttatcatacctagccacttgcttaattaatgctttaagcactaaaagttgttattttta

SEQ ID NO: 130583 - DNA, 120 bp, Artificial Sequence
  ENSG00000102466_41 (sequence is synthesized)
tcaggatgaacaatatcagatttggttgtctttaaaagcaaaaaccaaaaacttattctttaagtaagttagacacgtatcacttcatttaaaattatctccctaatattatggatcatt

SEQ ID NO: 130584 - DNA, 120 bp, Artificial Sequence
  ENSG00000102466_42 (sequence is synthesized)
aatatttgatacatattcaaaaagagaccacattgactaacatccagttgagaacaagatgaaaataattgaaatattttttccattttaattcagaacaaggctatatcaagggaaagc

SEQ ID NO: 130585 - DNA, 120 bp, Artificial Sequence
  ENSG00000102466_43 (sequence is synthesized)
gactgggctaaatcctcaatttttttttccaaaatgcaggcatatcaaaatccaggatgtacatggtcttactttgagtgaaatagtagtcatagctgaggtttcttagcctacaatgtg

SEQ ID NO: 130586 - DNA, 120 bp, Artificial Sequence
  ENSG00000102466_44 (sequence is synthesized)
acatagggcctgttgactctcttgaatatggagtagggtttcaaagtgttgacagttgagtctgcaaactaaggctgagttatattttagttttttttttttttcctggttttcactaag

SEQ ID NO: 130587 - DNA, 120 bp, Artificial Sequence
  ENSG00000102466_45 (sequence is synthesized)
tctaattccaatgtctactggcagagattgtgtttgcatttgaggtagtggagggcggtactttccaagtgctgttggaatccagataaactcaaggagcccagaaagacaacgggtata

SEQ ID NO: 130588 - DNA, 120 bp, Artificial Sequence
  ENSG00000102466_46 (sequence is synthesized)
atggctctcctcttatgacttagcactttagttgacttttttgaaaaagtctctgggtggaatacctcagtgatgatgatttgccaaacaagcagcgttagtgccaacaccttctctaaa

SEQ ID NO: 130589 - DNA, 120 bp, Artificial Sequence
  ENSG00000102466_47 (sequence is synthesized)
cttgctgcatcccttccaattgacattaatcccactgcaacttcctaaaaacaggaatgagccaatgagatttgcttattttctctcacccattacaagtaagtttgttcttgccctgct

SEQ ID NO: 130590 - DNA, 120 bp, Artificial Sequence
  ENSG00000102466_48 (sequence is synthesized)
tgttttttagagggagtttctatcatagagttgaaaatcacatttaagaaggaaagagtttatgtctttacatgtaactattttattttttccaatctaaattcaatcacttcttaatag

SEQ ID NO: 130591 - DNA, 120 bp, Artificial Sequence
  ENSG00000102466_49 (sequence is synthesized)
atatattggtgtttgcattgctggcatcaaaaccacacatacacacacaaacacacacatacacacaaacatagtggacagaaataagtaaaaatatttctgttttcaaagaaaaagcat

SEQ ID NO: 130592 - DNA, 120 bp, Artificial Sequence
  ENSG00000102466_50 (sequence is synthesized)
tccttagagtttaggtaccattaacttctactataatacagttccggtactatggtttctaactaaatgaacactagaacagagctgactatattttcatctttgtccaaaattttagat

SEQ ID NO: 130593 - DNA, 120 bp, Artificial Sequence
  ENSG00000102466_51 (sequence is synthesized)
gaatcacattttgaactttttatggtatgataatttctccaatatctaaattctttttctgagaaaacaaatgccgaggacatttttgacactcttcttacatgagactatgaaaaagag

SEQ ID NO: 130594 - DNA, 120 bp, Artificial Sequence
  ENSG00000102466_52 (sequence is synthesized)
cagcacttttgttgtagttgttgttgttaataaaaaggataataacatacagaggattataagaaaaataagacatacctgaggttttgtgatgagctatagagaatcaagggcagttcc

SEQ ID NO: 130595 - DNA, 120 bp, Artificial Sequence
  ENSG00000102466_53 (sequence is synthesized)
agtggagctgaggctgacaaagtactgcccagctgccagccaaatccacccttaagttgcttttgtatggcctgggagctcagaaggaattttttaaattttttttacagctttaaagta

SEQ ID NO: 130596 - DNA, 120 bp, Artificial Sequence
  ENSG00000102466_54 (sequence is synthesized)
ttaaacagaaaccaacaaagaagaatatgagacagggacgtacgtggtccgtaaagtttaactttctgatccttaataggaggataagcgccgtgatagagaaatccaaaggtcatttgt

SEQ ID NO: 130597 - DNA, 120 bp, Artificial Sequence
  ENSG00000102466_55 (sequence is synthesized)
attacgatggctagataatgtaatgaattccaatgtctgtgcatcagcgaatacgtcatcaaaattgctacaaaacaataataataggttgttcacagcttaaaatgtttaggtagtgaa

SEQ ID NO: 130598 - DNA, 120 bp, Artificial Sequence
  ENSG00000102466_56 (sequence is synthesized)
gaggaaagaatataacctacattatttattgactacttatatttccctcattttacggaagagatctatcaatttacgtactcaataatagaactacaacatggttgcactccttaatct

SEQ ID NO: 130599 - DNA, 120 bp, Artificial Sequence
  ENSG00000102466_57 (sequence is synthesized)
gaacattgttagtactataaaaatcaggatcagttaaatgttctcttaaaataattttcaatattaaatttttaagtaactcagtggatgcatattttccttatttttggaaatttgact

SEQ ID NO: 130600 - DNA, 120 bp, Artificial Sequence
  ENSG00000102466_58 (sequence is synthesized)
tataaagtttaagccatgactagaatatttacatcattaaaataaaatttccaagtaaaaattttcatcttaaagtaatacggaaatgattttgctacattattctaggattttacaaag

SEQ ID NO: 130601 - DNA, 120 bp, Artificial Sequence
  ENSG00000102466_59 (sequence is synthesized)
taattcacctttagaaaaaaagtggttttttttttagctctaaataattaaaggttgcctaaactaatgtgtataagtagatttacctgtaaatatgtaagggaagtcccaattattgta

SEQ ID NO: 130602 - DNA, 120 bp, Artificial Sequence
  ENSG00000102466_60 (sequence is synthesized)
cactttcataattcaatgtgaatttcatacaaagcaaagtttcaccattaagaaaataaacattttgttcctatcactgagtgaatatttgtaatttctatttaagccatttctagattt

SEQ ID NO: 130603 - DNA, 120 bp, Artificial Sequence
  ENSG00000102466_61 (sequence is synthesized)
ttttttttttttggtcttttgtgagcttctgagattggtgccattttatcacagtatttctcgtcttgacttctttgcatgaccccaggtttccagtaagtaaggtatccttagaaaaaa

SEQ ID NO: 130604 - DNA, 120 bp, Artificial Sequence
  ENSG00000102466_62 (sequence is synthesized)
aagtattttaagggaaatggatgcatacttcaggcccattttatatgtaactcaatattgtctttttaaaaggccacactaccatggaataaattaaaataaaaaatcagatttcttgta

SEQ ID NO: 130605 - DNA, 120 bp, Artificial Sequence
  ENSG00000102466_63 (sequence is synthesized)
cgcataacccctgcccagttttaaaaatgtgatcccttatttctagaaacctaaaatagatatccctgaataacaattcatttttaattatcagtagatatatatactgacacagagtat

SEQ ID NO: 130606 - DNA, 120 bp, Artificial Sequence
  ENSG00000102466_64 (sequence is synthesized)
aaacaacttctgtcactatttatttaaaatgttaaattgtacatttttcataatttctttaagagaatcttctttggtgagtttaaagtgagagtagacaaataacttagtggctaaatg

SEQ ID NO: 130607 - DNA, 120 bp, Artificial Sequence
  ENSG00000102466_65 (sequence is synthesized)
atttaatgtcagatgacttaatgaccagtttttgcccttgatccagccccactctgatattctacctcctgtgtgcttgtcttcattgtccccatattaaaatggtgactgatacggaat

SEQ ID NO: 130608 - DNA, 120 bp, Artificial Sequence
  ENSG00000102466_66 (sequence is synthesized)
tctggaaaaatctgatcgattaattaatgtgaatatgcatgttttccttagattctaatatggtctttcttgtgtaagaatgtggatttctaatagccatataactcaatgtttctcagt

SEQ ID NO: 130609 - DNA, 120 bp, Artificial Sequence
  ENSG00000102466_67 (sequence is synthesized)
ttgagccctattggcatttggggctggataattccttgtttgggggctgtcctgtacactgcgggatgctcagcagcatccctggcctctacccaccaaatgtctgcagcataccttcct

SEQ ID NO: 130610 - DNA, 120 bp, Artificial Sequence
  ENSG00000102466_68 (sequence is synthesized)
acccgacccagtgtgacaatcaaaattgtctgtagatgttgccaaatgacttttgggtggaaaaattgctctcgttaggaaccacttatgttaattatggaagaatcttttttttctaat

SEQ ID NO: 130611 - DNA, 120 bp, Artificial Sequence
  ENSG00000102466_69 (sequence is synthesized)
gttatttgcatctaaatttgcataactcatttctaataggtactcggatttcattcgtaattcagaaatagaaaaacatacaatggtctttttaacctgtcctagtggtgaatatacatg

SEQ ID NO: 130612 - DNA, 120 bp, Artificial Sequence
  ENSG00000102466_70 (sequence is synthesized)
gtttccttcgcatttatctgttctaatggcccagaaaaaataagaatccagacctctctcatgtaattgttaaggatattctgagccaagccagatttcacatgcatttccattccatcc

SEQ ID NO: 130613 - DNA, 120 bp, Artificial Sequence
  ENSG00000102466_71 (sequence is synthesized)
atcccagcattcacagtttccacagctacatattccattccctgcaataaaatacatataggtatcatgattatgatcaaaatgtgccaaatttaaacatgctattataaatcacaagtg

SEQ ID NO: 130614 - DNA, 120 bp, Artificial Sequence
  ENSG00000102466_72 (sequence is synthesized)
tccacaatgaaatcatttcattcatccttggtagattttcttattgtgcaatgatgttattattacatcttattaagcagctgcgagacatctaatctttcaaacaattagtggcattta

SEQ ID NO: 130615 - DNA, 120 bp, Artificial Sequence
  ENSG00000102466_73 (sequence is synthesized)
tttggtgccaccctttaccgatcagatagtcaccatcctgtatcactccagctaggcttttaggtgacaattttgttttcccttaaagagcaagttatatctgacttatgaataaataca

SEQ ID NO: 130616 - DNA, 120 bp, Artificial Sequence
  ENSG00000102466_74 (sequence is synthesized)
gaaaaacataaggctctttgacataacatgaggcaggccaagtaatccgtgaagagagtcttacgtagtaaggatgggcagaaagcaaaggtctaacttaatgacacacaaagagtcatc

SEQ ID NO: 130617 - DNA, 120 bp, Artificial Sequence
  ENSG00000102466_75 (sequence is synthesized)
ttttaccttcagctagagctgaggagaagtatacatgtctctgtttcctcgtaacttggctaaacaaatgaatttataaccaattatgaggactcaataaattaggatagcagtggctat

SEQ ID NO: 130618 - DNA, 120 bp, Artificial Sequence
  ENSG00000102466_76 (sequence is synthesized)
gacacggctgagccctctttatacctctcccccatacacacatccagttccctaaaagcaaccaacacatcaactagtggtacccagattctgtttaaaagaatatttcattccctatac

SEQ ID NO: 130619 - DNA, 120 bp, Artificial Sequence
  ENSG00000102466_77 (sequence is synthesized)
catgttcaaagtaaaatggttgccaacaaaattcttttctgtgttcaatatacaactgcatacatgtgagtttgagggtggggaggttactttgtggaaggatcccaaataatcacaaaa

SEQ ID NO: 130620 - DNA, 120 bp, Artificial Sequence
  ENSG00000102466_78 (sequence is synthesized)
tttagcttcattctcttgtattcttctatgcctaggaataatgtgaggcttttgtgagggctttttcccaaatgcccacttcgcctttggtagatatttcatattcacggttggccctgt

SEQ ID NO: 130621 - DNA, 120 bp, Artificial Sequence
  ENSG00000102466_79 (sequence is synthesized)
tggtccagccacctaaagcattgcatgacgagtgtctcttggctctataacaaactgtggcatagagcaattagaaaaggttaatactgcacctgtacaaatgagaccatcatgtttgtc

SEQ ID NO: 130622 - DNA, 120 bp, Artificial Sequence
  ENSG00000102466_80 (sequence is synthesized)
gcagtctctgtcatcacagtcacagaactccccagaaatataccactcttcagcagaacaaatgcacttcccacaatgacaagaacctgaaattacaaaggctattactcaccatcacct

SEQ ID NO: 130623 - DNA, 120 bp, Artificial Sequence
  ENSG00000102466_81 (sequence is synthesized)
tataactaaaggtttccatctcgaatagaatatcgttgacacactgacaacaggcttctaataacccatcatccaaaggtaaaagtgtattgaatggctggtttctcagaggggagcttt

SEQ ID NO: 130624 - DNA, 120 bp, Artificial Sequence
  ENSG00000102466_82 (sequence is synthesized)
acttactgtaattcataaaggtcacccaggaaagccttcattatggatctagacagttgcaattagccttgaacaaatgtcccatggcccagtctggttgaaatgtcaatgagagcagga

SEQ ID NO: 130625 - DNA, 120 bp, Artificial Sequence
  ENSG00000102466_83 (sequence is synthesized)
tggggttgattcttatagatggtcttccaaaaaagtattcaaaaatagattttttcctcctaaattgaatcatgtttttaaagtgcctgctctttaaaggaaatgaatagggaattgtat

SEQ ID NO: 130626 - DNA, 120 bp, Artificial Sequence
  ENSG00000102466_84 (sequence is synthesized)
taaattaggttgcatttctaattaaaacaactactaaattattgtgcttataattttggattttcgtttacatgattttcttggagtaggagcacacctgcatattgggtggctaattaa

SEQ ID NO: 130627 - DNA, 120 bp, Artificial Sequence
  ENSG00000102466_85 (sequence is synthesized)
agtgctaaaaatgcatacagtcactcagtatatttgccttgtgagactcatcctcaggaccctctgtcataaactgggatagctcaaattactcccaaagttcatattttatgaggctct

SEQ ID NO: 130628 - DNA, 120 bp, Artificial Sequence
  ENSG00000102466_86 (sequence is synthesized)
ggattcaactctttttccctccacttcacccatttctcctacctaactaaaaaacttcctctttggttatttaaaatatctttacttactgagtaaaaattttattaatgatatatttaa

SEQ ID NO: 130629 - DNA, 120 bp, Artificial Sequence
  ENSG00000102466_87 (sequence is synthesized)
aataaaagaaaataaatgagatgatgaatggtatccaagacagaagttctctcagtctaaacagctttccatgacagactaaaaacccttacatggaaaaactgcctcaacgacagcagg

SEQ ID NO: 130630 - DNA, 120 bp, Artificial Sequence
  ENSG00000102466_88 (sequence is synthesized)
aaagactttacaatgaaaaagaaacaaataaaaaggactttcttttccttctgtttccttgggttggttgttctttccaaacatgacttccatttactaaaagatggctgtattcttttt

SEQ ID NO: 130631 - DNA, 120 bp, Artificial Sequence
  ENSG00000102466_89 (sequence is synthesized)
gagtcaaaatcacgttgaaaaaatgtgcagttgaaaagagtattttgacatatttaacaaaactgcagaattggtaagttcaaaatatattgaaaaggggcaagaatcaatcattagtgc

SEQ ID NO: 130632 - DNA, 120 bp, Artificial Sequence
  ENSG00000102466_90 (sequence is synthesized)
ttcttttaaaacacagtgattaaaaatgagttaacagcctgggtgattaaagtgatcaggaaaaaggagttgtggtcatcacagatatcatgaaaggattcaggttcatgtgtctcaact

SEQ ID NO: 130633 - DNA, 120 bp, Artificial Sequence
  ENSG00000102466_91 (sequence is synthesized)
atgtgatatttcatatcagggaaactggtatatgcatttcagctgcaaaaatccccaaagtccaaattaaatgtttgccatttcttgacacacttctcaaagtaagagtgcagtcagaat

SEQ ID NO: 130634 - DNA, 120 bp, Artificial Sequence
  ENSG00000102466_92 (sequence is synthesized)
tatttagattgtgacaattgtgttttttaacttcttgcgtagctatggcataattgtatttagtcttgacttgttttcctgagggtccaggttgatttgcatgctcttgaggaaatatac

SEQ ID NO: 130635 - DNA, 120 bp, Artificial Sequence
  ENSG00000102466_93 (sequence is synthesized)
acgtcttctcagttttaataattgactgacagccctgtggtttctcaggacccagtgagctgctgctcccaggtcagtctgcaaaggatgctggttcccttgtggtctcatcaaggtgag

SEQ ID NO: 130636 - DNA, 120 bp, Artificial Sequence
  ENSG00000102466_94 (sequence is synthesized)
gaatttcctgattttagagatttctttatcctaattttgaagactttctttcacatttctaggcataaaaaaatgtacagcactctactgcttgtttaacaaatggatagtgatatatct

SEQ ID NO: 130637 - DNA, 120 bp, Artificial Sequence
  ENSG00000102466_95 (sequence is synthesized)
gccaacaaagaccacatggagtatttcattgactatcagagaagtttcctcgaaaggcaccatacttagtgttttatttccatgagtgaaggaaaattagttatttgaagtatttggctg

SEQ ID NO: 130638 - DNA, 120 bp, Artificial Sequence
  ENSG00000102466_96 (sequence is synthesized)
tctttagttgtttctaaagtagtgctgattttatatgcccataatattcatatatacacccaggatatcattttatatatgtcacaattcatgaaatatcttatatttcatcttcaaact

SEQ ID NO: 130639 - DNA, 120 bp, Artificial Sequence
  ENSG00000102466_97 (sequence is synthesized)
tatcctctggccctggaactattctaatcactgctcttgcttctggaatgcttagcttcatgccatagtagagcattttcagaaaactggtaagctcagctaaagctaatatggcatata

SEQ ID NO: 130640 - DNA, 120 bp, Artificial Sequence
  ENSG00000102466_98 (sequence is synthesized)
tggatagaacatttgatgagtaaattccagttctgaaagtctactagtcgctgaaatacttagaataaaaaatgaggattgattttgtatgtgtcatgaaacagtagcatttctaggtca

SEQ ID NO: 130641 - DNA, 120 bp, Artificial Sequence
  ENSG00000102466_99 (sequence is synthesized)
gcattttcccagctgtgttattctttcctgtttgtcaatgctcagtgcatcttagaggtaggaaattattctactgcttgtgaaactagaactagatagcacatagtaataacacagtgt

SEQ ID NO: 130642 - DNA, 120 bp, Artificial Sequence
  ENSG00000102466_100 (sequence is synthesized)
gaatagttattaggacctattatagcacttttcctgtagaacgctctagctgttttcttccataacatgggtcaaattgtgcctctcttaaatgggaagcacacagggagagggttccat

SEQ ID NO: 130643 - DNA, 120 bp, Artificial Sequence
  ENSG00000102466_101 (sequence is synthesized)
cagacagatgtaggctgcatgactatcaagaggtgagaaatggttcaactcagctggccaagacccactcacacccctgagacccagcctagccagagaacagctggctgatcttggcag

SEQ ID NO: 130644 - DNA, 120 bp, Artificial Sequence
  ENSG00000102466_102 (sequence is synthesized)
gagttttagggcagatagttcatcaccacagcaccactaatccattcattttctttctcaatataaggacccttgagaatgttcccatctcccttctgtgcatttttgctggcttccatc

SEQ ID NO: 130645 - DNA, 120 bp, Artificial Sequence
  ENSG00000102466_103 (sequence is synthesized)
cctggggaatcagccacattttctcatgtgtcttcagggcatcttaggacataggaaggggaaagaaatgaaattttaccttcaaagatgagaatggaagagagaataaaggaaactgtc

SEQ ID NO: 130646 - DNA, 120 bp, Artificial Sequence
  ENSG00000102466_104 (sequence is synthesized)
ctggacctcacaggcaataaacaaacagttaactgaagacttcactctgattcaatccactcttctttttagtgatctgcctatctgtgatgtatctccaggcaaaaactttcatataca

SEQ ID NO: 130647 - DNA, 120 bp, Artificial Sequence
  ENSG00000102466_105 (sequence is synthesized)
gtagtttaaaaatgagctgtttcttcctgcaggtctgactgcacaggcatattgagcgaggcaacttgaacaccaggctgaggccgattttgtgaagcatctttcactctttctcttttc

SEQ ID NO: 130648 - DNA, 120 bp, Artificial Sequence
  ENSG00000102466_106 (sequence is synthesized)
tggggatgtgggacaggttgtgggtgggtgagtgtgtgtgtatgctggacttctttggaagatgtgggacccaagaagtatcactgtgagagtttaaggagacagttaatgacatgtgtt

SEQ ID NO: 130649 - DNA, 120 bp, Artificial Sequence
  ENSG00000102466_107 (sequence is synthesized)
tacagccattgtcacacaacagcatctgtaagaagattggacgtgattatctggatctagcttgaagtagtcaaggcaaagatataattgtgtagtcttgaagccaaataaatccccaaa

SEQ ID NO: 130650 - DNA, 120 bp, Artificial Sequence
  ENSG00000102466_108 (sequence is synthesized)
tgaacaaaacaacccacaatgaattatatcatgtactttgcaaaggtagctaagcttagggaagacccggcactgcactaacctcatctctcttggttattcacaaaaacaatttgagtc

SEQ ID NO: 130651 - DNA, 120 bp, Artificial Sequence
  ENSG00000102466_109 (sequence is synthesized)
taagggcaaggcacctttgtcagttgcccattccattactaatgttggactttctttttcattcaagcctgacaaaatgctgcaacctgacatcccagcaggcagttttcactattgtac

SEQ ID NO: 130652 - DNA, 120 bp, Artificial Sequence
  ENSG00000102466_110 (sequence is synthesized)
taactactccatctgttatgaaggtcacaagaatgtatcttgttttaaatttttctatggagtgatttattgtcttggctataaatttgtaaagaaataaaacgctatttcttcatcgtc

SEQ ID NO: 130653 - DNA, 120 bp, Artificial Sequence
  ENSG00000102468_0 (sequence is synthesized)
ccagccccgggagaacagcatgtacaccagcctcagtgttacagagtgtgggtacatcaaggtgaatggtgagcagaaactataacctgttagtccttctacacctcatctgctacaagt

SEQ ID NO: 130654 - DNA, 120 bp, Artificial Sequence
  ENSG00000102468_1 (sequence is synthesized)
tctggcttagacatggatattctttgtgaagaaaatacttctttgagctcaactacgaactccctaatgcaattaaatgatgacaccaggctctacagtaatgactttaactccggagaa

SEQ ID NO: 130655 - DNA, 120 bp, Artificial Sequence
  ENSG00000102468_2 (sequence is synthesized)
gctaacacttctgatgcatttaactggacagtcgactctgaaaatcgaaccaacctttcctgtgaagggtgcctctcaccgtcgtgtctctccttacttcatctccaggaaaaaaactgg

SEQ ID NO: 130656 - DNA, 120 bp, Artificial Sequence
  ENSG00000102468_3 (sequence is synthesized)
tctgctttactgacagccgtagtgattattctaactattgctggaaacatactcgtcatcatggcagtgtccctagagaaaaagctgcagaatgccaccaactatttcctgatgtcactt

SEQ ID NO: 130657 - DNA, 120 bp, Artificial Sequence
  ENSG00000102468_4 (sequence is synthesized)
gccatagctgatatgctgctgggtttccttgtcatgcccgtgtccatgttaaccatcctgtatgggtaccggtggcctctgccgagcaagctttgtgcagtctggatttacctggacgtg

SEQ ID NO: 130658 - DNA, 120 bp, Artificial Sequence
  ENSG00000102468_5 (sequence is synthesized)
ctcttctccacggcctccatcatgcacctctgcgccatctcgctggaccgctacgtcgccatccagaatcccatccaccacagccgcttcaactccagaactaaggcatttctgaaaatc

SEQ ID NO: 130659 - DNA, 120 bp, Artificial Sequence
  ENSG00000102468_6 (sequence is synthesized)
attgctgtttggaccatatcagtaggtatatccatgccaataccagtctttgggctacaggacgattcgaaggtctttaaggaggggagttgcttactcgccgatgataactttgtcctg

SEQ ID NO: 130660 - DNA, 120 bp, Artificial Sequence
  ENSG00000102468_7 (sequence is synthesized)
atcggctcttttgtgtcatttttcattcccttaaccatcatggtgatcacctactttctaactatcaagtcactccagaaagaagctactttgtgtgtaagtgatcttggcacacgggcc

SEQ ID NO: 130661 - DNA, 120 bp, Artificial Sequence
  ENSG00000102468_8 (sequence is synthesized)
aaattagcttctttcagcttcctccctcagagttctttgtcttcagaaaagctcttccagcggtcgatccatagggagccagggtcctacacaggcaggaggactatgcagtccatcagc

SEQ ID NO: 130662 - DNA, 120 bp, Artificial Sequence
  ENSG00000102468_9 (sequence is synthesized)
aatgagcaaaaggcatgcaaggtgctgggcatcgtcttcttcctgtttgtggtgatgtggtgccctttcttcatcacaaacatcatggccgtcatctgcaaagagtcctgcaatgaggat

SEQ ID NO: 130663 - DNA, 120 bp, Artificial Sequence
  ENSG00000102468_10 (sequence is synthesized)
gtcattggggccctgctcaatgtgtttgtttggatcggttatctctcttcagcagtcaacccactagtctacacactgttcaacaagacctataggtcagccttttcacggtatattcag

SEQ ID NO: 130664 - DNA, 120 bp, Artificial Sequence
  ENSG00000102468_11 (sequence is synthesized)
tgtcagtacaaggaaaacaaaaaaccattgcagttaattttagtgaacacaataccggctttggcctacaagtctagccaacttcaaatgggacaaaaaaagaattcaaagcaagatgcc

SEQ ID NO: 130665 - DNA, 120 bp, Artificial Sequence
  ENSG00000102468_12 (sequence is synthesized)
aagacaacagataatgactgctcaatggttgctctaggaaagcagcattctgaagaggcttctaaagacaatagcgacggagtgaatgaaaaggtgagctgtgtgtgataggctagttgc

SEQ ID NO: 130666 - DNA, 120 bp, Artificial Sequence
  ENSG00000102468_13 (sequence is synthesized)
cgtggcaactgtggaaggcacactgagcaagttttcacctatctggaaaaaaaaaaatatgagattggaaaaaattagacaagtctagtggaaccaacgatcatatctgtatgcctcatt

SEQ ID NO: 130667 - DNA, 120 bp, Artificial Sequence
  ENSG00000102468_14 (sequence is synthesized)
ttattctgtcaatgaaaagcggggttcaatgctacaaaatgtgtgcttggaaaatgttctgacagcatttcagctgtgagctttctgatacttatttataacattgtaaatgatatgtct

SEQ ID NO: 130668 - DNA, 120 bp, Artificial Sequence
  ENSG00000102468_15 (sequence is synthesized)
ttaaaatgattcacttttattgtataattatgaagccctaagtaaatctaaattaacttctattttcaagtggaaaccttgctgctatgctgttcattgatgacatgggattgagttggt

SEQ ID NO: 130669 - DNA, 120 bp, Artificial Sequence
  ENSG00000102468_16 (sequence is synthesized)
tggttacctattgctgtaaataaaaatagctataaatagtgaaaattttattgaatataatggcctcttaaaaattatctttaaaacttactatggtatatattttgaaaggagaaaaaa

SEQ ID NO: 130670 - DNA, 120 bp, Artificial Sequence
  ENSG00000102468_17 (sequence is synthesized)
ccactaaggtcagtgttataaaatctgtattgctaagataattaaatgaaatacttgacaacatttttcattcctgctttttcatagataccattttgaaatattcacaaggttgctggc

SEQ ID NO: 130671 - DNA, 120 bp, Artificial Sequence
  ENSG00000102468_18 (sequence is synthesized)
atttgctgcatttcaagttaattctcagaagtgaaaaagacttcaaatgttattcaataactattgctgctttctcttctacttcttgtgctttactctgaatttccagtgtggtcttgt

SEQ ID NO: 130672 - DNA, 120 bp, Artificial Sequence
  ENSG00000102468_19 (sequence is synthesized)
ttaatatttgttcctctaggtaaactagcaaaaggatgatttaacattaccaaatgcctttctagcaattgcttctctaaaacagcactatcgaggtatttggtaacttgctgtgaaatg

SEQ ID NO: 130673 - DNA, 120 bp, Artificial Sequence
  ENSG00000102468_20 (sequence is synthesized)
gtatattgatgtaactgtgtcaggattgaggatgaactcaggtttccggctactgacagtggtagagtcctaggacatctctgtaaaaagcaggtgactttcctatgacactcatcaggt

SEQ ID NO: 130674 - DNA, 120 bp, Artificial Sequence
  ENSG00000102468_21 (sequence is synthesized)
aaactgatgctttcagatccatcggtttatactatttattaaaaccattctgcttggttccacaatcatctattgagtgtacatttatgtgtgaagcaaatttctagatatgagaaatat

SEQ ID NO: 130675 - DNA, 120 bp, Artificial Sequence
  ENSG00000102468_22 (sequence is synthesized)
caaatttctagatatgagaaatataaaaataattaaaacaaaatccttgccttcaaacgaaatggctcggccaggcacggaggctcgtgcatgtaatcctagcactttgggaggctgaga

SEQ ID NO: 130676 - DNA, 120 bp, Artificial Sequence
  ENSG00000102468_23 (sequence is synthesized)
gtttgagaccaacctgggtaacaaagtgagacctccctgtctctacaaaaaaaatcaaaaaattatctgatccttgtggcacacaactgtggtcccagctacaggggaggctgagacgca

SEQ ID NO: 130677 - DNA, 120 bp, Artificial Sequence
  ENSG00000102468_24 (sequence is synthesized)
aggatcacttgagcccagaagctcaaggctgcagtgagccaagttcacaccactgccatttcctcctgggcaacagagtgagaccctatcacaaaaaaaaagaaagaaaaaaagaaaatg

SEQ ID NO: 130678 - DNA, 120 bp, Artificial Sequence
  ENSG00000102468_25 (sequence is synthesized)
actaaactgaaatggtcttagtcaaaaaatatatacagacttatttttagaatcatttcaacttatttccttcttacctggttcagaaacaagtttgtttcaactgtgagagtagtttta

SEQ ID NO: 130679 - DNA, 120 bp, Artificial Sequence
  ENSG00000102468_26 (sequence is synthesized)
aaaataagttttcctgattggttaccaataaacaccaaacaaataaaggagggggaaaatatcacttgaggcttaacattgcaattaatttagaaatacgcacctcaatctcaagccagt

SEQ ID NO: 130680 - DNA, 120 bp, Artificial Sequence
  ENSG00000102468_27 (sequence is synthesized)
ttataactaccatagttttgagcaaaatttttcttctatttctccaaaaactcactcatttcagtattactcattgacactgggctccctaatagaaaagcagatattataatatttcat

SEQ ID NO: 130681 - DNA, 120 bp, Artificial Sequence
  ENSG00000102468_28 (sequence is synthesized)
tgaaatggttactaaagagaaaaagagattaacaacagttaatccaccttgatattataacactcaaggttaaattgcatgttgttattagaatcaatgttatatatatgattacaatgc

SEQ ID NO: 130682 - DNA, 120 bp, Artificial Sequence
  ENSG00000102468_29 (sequence is synthesized)
tgaagcatttctattgaatgagaaatagtgtttgccctaaacctttgggaaaaaaatacagatttgaaaactaaagaatgtgggaagtgtcattgtgtaatttggaaatgcataaaattc

SEQ ID NO: 130683 - DNA, 120 bp, Artificial Sequence
  ENSG00000102468_30 (sequence is synthesized)
tcattatgtcctcatagatatgttgaaagatggttcactgtttcaaagatagaatgtataatatgctgctagtaccaaggctgcatttgaactgaactactccttatgatataccatact

SEQ ID NO: 130684 - DNA, 120 bp, Artificial Sequence
  ENSG00000102468_31 (sequence is synthesized)
aactgatgaaaatataaatgttaaaatgtctccactctaatgtattttgccttcacttgtaactctgcacatttcattatatattagggaaaagattacagattctacccccatatactc

SEQ ID NO: 130685 - DNA, 120 bp, Artificial Sequence
  ENSG00000102468_32 (sequence is synthesized)
aatcttgatcagaatgtacattaatgttgcctgatagatgtcttttgactacctatatattacaaatgtgtatgtgtttttttcttccataagtatctattcaagtgtatactgtatagg

SEQ ID NO: 130686 - DNA, 120 bp, Artificial Sequence
  ENSG00000102468_33 (sequence is synthesized)
caaatgtgtagctgtatatatgtacagacatgttctcatgcactttattcaatatttatatatttatatggacgaaaagcaagtcaatgaaaacactcagtatatacacatgtgtgcatg

SEQ ID NO: 130687 - DNA, 120 bp, Artificial Sequence
  ENSG00000102468_34 (sequence is synthesized)
tttgtatcatgtttatttaaatgtgaattcatgttctaatatttctatgaccttccattgctgcaaagcagattaaagtgtaacaaaaatatcagctctttaaataaactggaaattaat

SEQ ID NO: 130688 - DNA, 120 bp, Artificial Sequence
  ENSG00000102468_35 (sequence is synthesized)
ctaattttgtggaagaactttaagacaagtctatgaggatggcgaaaacaatggtccacatatatagtttcttgatcctaaataaaatggtacctttgggccctttgtttagtctggcaa

SEQ ID NO: 130689 - DNA, 120 bp, Artificial Sequence
  ENSG00000102468_36 (sequence is synthesized)
ttttctgactactatggctttttaaacagactcacacctaagtgaaacacagttgtcaaatgatttatggatctgtgattaaaggattcacttttaatgaatactattaaaacggagtaa

SEQ ID NO: 130690 - DNA, 120 bp, Artificial Sequence
  ENSG00000102468_37 (sequence is synthesized)
caaaccttgctctactttaagttgaatgatagattcctctatattcaaaaaaaagcaattaactgccataattagggaaaactgtttaaagcatactgcatttacttggccacagcgcca

SEQ ID NO: 130691 - DNA, 120 bp, Artificial Sequence
  ENSG00000102468_38 (sequence is synthesized)
tctcatggtaattttttaaagtgctaccgtagccaaattgaactaagtcactgtactgctttcagcaaagggtgctcctcccatttgtgcatcaatgagacatatttataaagtgctaaa

SEQ ID NO: 130692 - DNA, 120 bp, Artificial Sequence
  ENSG00000102468_39 (sequence is synthesized)
ttattctgtgccatatgtaacaaatacagtgaagattattttatgaacttattttaatcaaggcgatgctaaaagttttcaagaaaggataaataactgtaaataaagtagactcaaaaa

SEQ ID NO: 130693 - DNA, 120 bp, Artificial Sequence
  ENSG00000102468_40 (sequence is synthesized)
ctgatgaaatgaacgagacagtcagagagctactccattcccgtggaaaccaggagtcccttggtgcagacagctcttcctactttcccatgcagttcttttgtgcgactttgaggggct

SEQ ID NO: 130694 - DNA, 120 bp, Artificial Sequence
  ENSG00000102468_41 (sequence is synthesized)
cgtgaatgatttctaaatgtgtgcctgctgaggcgagccgcacagggagggaggaacccagccgagccgtgccagaggaagccaacaggatcctagcagtgcgggagctggctcagctct

SEQ ID NO: 130695 - DNA, 120 bp, Artificial Sequence
  ENSG00000102468_42 (sequence is synthesized)
tgcatgcagtttttgaagtcagcaaaacagaaaccaaattactatcatattatgctggtggaagatcaagaagaggggactctacaccagtttaattactgtgagagatgcagcgagtca

SEQ ID NO: 130696 - DNA, 120 bp, Artificial Sequence
  ENSG00000102468_43 (sequence is synthesized)
cagaataacaaatgtatctcatgtgtggaccctgaagacaaatgacatttatcttcccgagcgctcaaaaaaaaccctgcaacctctatgctaaaagttcattctgcttttttgtcctcg

SEQ ID NO: 130697 - DNA, 120 bp, Artificial Sequence
  ENSG00000102468_44 (sequence is synthesized)
gctgctgggtttccttgtcatgcccgtgtccatgttaaccatcctgtatggtgagtggcattagtttcccagctatattcgcactggtaataaagagcatgtgcatgccaccagcagatg

SEQ ID NO: 130698 - DNA, 120 bp, Artificial Sequence
  ENSG00000102468_45 (sequence is synthesized)
agatggggctcagggggcaaacaaactataaatagaagtctttgtttatagactagagcctactatgttacttatattttactcttaaaatgggatttcacataaaaatcagacagtcta

SEQ ID NO: 130699 - DNA, 120 bp, Artificial Sequence
  ENSG00000102471_0 (sequence is synthesized)
cttacttttccatctcctcccacccagctataccctcccactggcggcgcggatggcacgccggcggagccagcgagtctgcgcgagcggtccgagcatgctcaatagcgcgcgcggcgc

SEQ ID NO: 130700 - DNA, 120 bp, Artificial Sequence
  ENSG00000102471_1 (sequence is synthesized)
cccggagcttctccgcggaaccgcgaccaacgcggaggtctcggcggccgctgcgggagccacaggaagtgaagagcttccgccgggagaccgcggctgcaggaacggaggcggaagggg

SEQ ID NO: 130701 - DNA, 120 bp, Artificial Sequence
  ENSG00000102471_2 (sequence is synthesized)
ccctgcggcgacgacgtcgtcgacgggggtggccgtgggagctgagcacggagaagactccctctctcggaagccggatcccgagccgggcaggatggatcaccaccagccggggactgg

SEQ ID NO: 130702 - DNA, 120 bp, Artificial Sequence
  ENSG00000102471_3 (sequence is synthesized)
gcgctaccaggtgcttcttaatgaagaggataactcagaatcatcggctatagagcagccacctacttcaaacccagcaccgcagattgtgcaggctgcgtcttcagcaccagcacttga

SEQ ID NO: 130703 - DNA, 120 bp, Artificial Sequence
  ENSG00000102471_4 (sequence is synthesized)
aactgactcttcccctccaccatatagtagtattactgtggaagtacctacaacttcagatacagaagtttacggtgagttttatcccgtgccacctccctatagcgttgctacctctct

SEQ ID NO: 130704 - DNA, 120 bp, Artificial Sequence
  ENSG00000102471_5 (sequence is synthesized)
tcctacatacgatgaagctgagaaggctaaagctgctgcaatggcagctgcagcagcagaaacatctcaaagaattcaggaggaagagtgtccaccaagagatgacttcagtgatgcaga

SEQ ID NO: 130705 - DNA, 120 bp, Artificial Sequence
  ENSG00000102471_6 (sequence is synthesized)
ccagctcagagtggggaatgatggcattttcatgctggcatttttcatggcatttattttcaactggcttggattttgtttatccttctgtatcaccaataccatagctggaaggtatgg

SEQ ID NO: 130706 - DNA, 120 bp, Artificial Sequence
  ENSG00000102471_7 (sequence is synthesized)
tgctatctgcggatttggcctttccttgatcaaatggatccttattgtcaggttttctgattattttactggatatttcaatggacagtattggctttggtggatatttcttgtacttgg

SEQ ID NO: 130707 - DNA, 120 bp, Artificial Sequence
  ENSG00000102471_8 (sequence is synthesized)
cctgctccttttcttcagaggatttgttaattatctaaaagtcagaaacatgtctgaaagtatggcagctgctcatagaacaaggtatttcttcttattgtagagactgcatcaacccga

SEQ ID NO: 130708 - DNA, 120 bp, Artificial Sequence
  ENSG00000102471_9 (sequence is synthesized)
cattcctttcttataccaatgtgaaatttccagatcatctgtaaacctacaactttaatagaagactactaataacagaagacaaattagtgaagaaaagacggagtttcgaaattgaat

SEQ ID NO: 130709 - DNA, 120 bp, Artificial Sequence
  ENSG00000102471_10 (sequence is synthesized)
ggcagggtggtttttgcttacaagccatttctgttcattctttaagtatctatatttcatttgttttgcacatatgcatatgtgcccatttaagatatttgcatatacttgatagaaacc

SEQ ID NO: 130710 - DNA, 120 bp, Artificial Sequence
  ENSG00000102471_11 (sequence is synthesized)
ataaagttgtagcagttaagtccagtcacatttggttaatcagtgtttgatataattgaaagagttgagtggataaacagtcttccagcttgtaaatgccattgacttctgacctgacat

SEQ ID NO: 130711 - DNA, 120 bp, Artificial Sequence
  ENSG00000102471_12 (sequence is synthesized)
ttagtataataaaaatgaaattcttaaccatgtcaaatgatttagtttctggctcttagactcatctggcagttctacacatgaaacatcttttgttatataaggtgtattgaaacctgc

SEQ ID NO: 130712 - DNA, 120 bp, Artificial Sequence
  ENSG00000102471_13 (sequence is synthesized)
agtgctgattattagaaaggatttgtcagatttttgaacatgatatttacattattatttaggaaaactcttcctgtaaataaccatgcataacttactttctgcaatgttttcttagaa

SEQ ID NO: 130713 - DNA, 120 bp, Artificial Sequence
  ENSG00000102471_14 (sequence is synthesized)
acttactttctgcaatgttttcttagaaattgtgtccagatagctttcactaattttaaattaagtgaactaaatatatatgtgtatatgtatacacatatatatacacacacacatata

SEQ ID NO: 130714 - DNA, 120 bp, Artificial Sequence
  ENSG00000102471_15 (sequence is synthesized)
agaatttgttttaggacaaattttaagaaaatgtgggaataccaaatgtcctttataagaaaaataaattttattttaagggacatactagttttagggattttcagatgggaagctgca

SEQ ID NO: 130715 - DNA, 120 bp, Artificial Sequence
  ENSG00000102471_16 (sequence is synthesized)
tttttaggattgcccatcttaagagatcttgcaggaagagattgtattagatattatatttatttcatttaagataattttcaaagttaattttctaaataagataattctcatttgtgt

SEQ ID NO: 130716 - DNA, 120 bp, Artificial Sequence
  ENSG00000102471_17 (sequence is synthesized)
ttgtcttttaaaaggccaataaaatatctttcagtatcattgtaataattttttagagtttaatttgtaaagcttagcaaataaaatcttgtactatgaatagcttcttgctttatgact

SEQ ID NO: 130717 - DNA, 120 bp, Artificial Sequence
  ENSG00000102471_18 (sequence is synthesized)
ttaggattaacttgtaaaaaacatatcctgaactgagatatgcaaaatactcattttcaagttatggaaatgtgtttgtggcatataggactgtggggtctgtgtgtgtagtgagagtgt

SEQ ID NO: 130718 - DNA, 120 bp, Artificial Sequence
  ENSG00000102471_19 (sequence is synthesized)
tcattttatgtctcatctgtttttcctttcggttatatctttggttttgaataccaacatttaaaatgatggtattttatcttttaaacttaaaaattatttaatacagctatatggacc

SEQ ID NO: 130719 - DNA, 120 bp, Artificial Sequence
  ENSG00000102471_20 (sequence is synthesized)
ttataaaattgatttcttatttattattagacattactactaaaaggtacatctaactattcagggacatttttccatttccaaaaaataaaatttattatgctttataacctcttctgt

SEQ ID NO: 130720 - DNA, 120 bp, Artificial Sequence
  ENSG00000102471_21 (sequence is synthesized)
attttctaattttttcattgtctttgataaataaaacagttttgttttgctaatatagcctattttttgttttgtctcattcagtttactttcctgcgtagaatttttattgttatatta

SEQ ID NO: 130721 - DNA, 120 bp, Artificial Sequence
  ENSG00000102471_22 (sequence is synthesized)
aaatttttattgttgtattaaagtacctgtgttacaccccttgaagtaagacagtagcatggggtaaagaaaaaatatttagtttagttgcctaatttggaagttaattaaaattaaact

SEQ ID NO: 130722 - DNA, 120 bp, Artificial Sequence
  ENSG00000102471_23 (sequence is synthesized)
gtactaataacatattcaaactcatgctggatctctttcatattaatttcttatagacctgtactttattctttcaataatttttaaatgaaattaagctttgctacatggtaattaaat

SEQ ID NO: 130723 - DNA, 120 bp, Artificial Sequence
  ENSG00000102471_24 (sequence is synthesized)
aattactaggaagcttagctatcaaacatcgacttactaaaatttcattttagcttttatggtatatgtgcttgttttctgaatatggatacatgttacttttgatccagcatcaaaact

SEQ ID NO: 130724 - DNA, 120 bp, Artificial Sequence
  ENSG00000102471_25 (sequence is synthesized)
tcactttttgttttgacttttccccccaaatctgtaaggttcaagtatacatattactgaatcctctataattggcataattcaatggtagccttaaatctcatcatgtaagcaggggaa

SEQ ID NO: 130725 - DNA, 120 bp, Artificial Sequence
  ENSG00000102471_26 (sequence is synthesized)
tcagaatgttattttcaagaacttaatgttcccttcagatatataaaatcctgcatacttcatttcctgtgagcttgaacagctgctgttgtgttttggggatgcttgatcatctttgca

SEQ ID NO: 130726 - DNA, 120 bp, Artificial Sequence
  ENSG00000102471_27 (sequence is synthesized)
ctctgccttaaagattgaaaaatcaaaactcttgttagggtatctaaacatttttgagtgtgaactggggattggaagttaatacaaaaaaatttcaaattatttctattgtaaatgaat

SEQ ID NO: 130727 - DNA, 120 bp, Artificial Sequence
  ENSG00000102471_28 (sequence is synthesized)
aagctagtcatggctaggataatccattttcatgtatttatgcaataaactgaattttaaggcaaaaacaacacttttctatatagtgtatgcaggacagattttagaaacttagattaa

SEQ ID NO: 130728 - DNA, 120 bp, Artificial Sequence
  ENSG00000102471_29 (sequence is synthesized)
aatacaaatcccattacatttggttaaaatgaaaatctctgcttaatggaaaaaatactaatctttagcctattttgagtctataagatatatttcattttagacatgccttctaagttg

SEQ ID NO: 130729 - DNA, 120 bp, Artificial Sequence
  ENSG00000102471_30 (sequence is synthesized)
ttcacagatttttacctgctaaaacaatattatttccagtaaaacctctcctaacaggaaaagtggagttcaaaatatccaattggagaaaaattcagagttccttcattaaatataatt

SEQ ID NO: 130730 - DNA, 120 bp, Artificial Sequence
  ENSG00000102471_31 (sequence is synthesized)
tttttcatctagtatgtactatttcaagaagtgcaaaaagtaatgatagtgaatgtgataccatacttaactaaggtaatatatatccttagtttgctcaaaagagtcctggttattcct

SEQ ID NO: 130731 - DNA, 120 bp, Artificial Sequence
  ENSG00000102471_32 (sequence is synthesized)
gttttctcagcttaatagtgcctcatcgtactctcaaaagtgttctaatttggaggataagttatatgatcatcctgtgtataattgtagactgtaccaagaagcaactaccttagctcc

SEQ ID NO: 130732 - DNA, 120 bp, Artificial Sequence
  ENSG00000102471_33 (sequence is synthesized)
actgccctttgagggatggaactggggtaagggcaggagccagttattattgccacagtgttttctaatgaaccatttggcctgtagaagaggaatagtattttttttaatagttgtatt

SEQ ID NO: 130733 - DNA, 120 bp, Artificial Sequence
  ENSG00000102471_34 (sequence is synthesized)
tgaatgattccagcttatcgtaaatactaaactgaatggcttttatatttttaactgctgttaaatgttattttagcatttattagttgtttattatttaattcttcaaatagtcatatg

SEQ ID NO: 130734 - DNA, 120 bp, Artificial Sequence
  ENSG00000102471_35 (sequence is synthesized)
aaaacatatatttgataaaggtcaattgttagatgataatgtgccattcattatcataggaatgtccttgcccatatataaaacatgctggcatgtattttacttgttaataaagttgta

SEQ ID NO: 130735 - DNA, 120 bp, Artificial Sequence
  ENSG00000102471_36 (sequence is synthesized)
tagatgtggaagtgtgaacctgtgatgcatccttttcaaaatcagtttaagattcgcatattatcatgactgtgacctcactaaactgtttatgtgacaaacctttcaagattggagatg

SEQ ID NO: 130736 - DNA, 120 bp, Artificial Sequence
  ENSG00000102471_37 (sequence is synthesized)
aaaacaacacttgtgaaattaggttggggttgcaacatcttttaacttctcagttatttgtatgtcaggagacagattgtggtttaattttaataaacaaaatatcatctttttgaaaat

SEQ ID NO: 130737 - DNA, 84 bp, Artificial Sequence
  ENSG00000102471_38 (sequence is synthesized)
cctgagctcgagcagtccgctcagccactgtgcccagtccaacatgctgttctttctaaattccaaaattcatgttcattttgc

SEQ ID NO: 130738 - DNA, 120 bp, Artificial Sequence
  ENSG00000102471_39 (sequence is synthesized)
gctgcaatggcagctgcagcagcagaaacatctcaaagaaattttggaatgatgatcaagcattctgtcttcctcatctacatgttttagtaatggagttaatgagatacatgtgtatta

SEQ ID NO: 130739 - DNA, 120 bp, Artificial Sequence
  ENSG00000102471_40 (sequence is synthesized)
ctctttgctctggtaaatggagtggctgtctcagtaatggagagtcagtgagatacatacacatctactattctgcagccagattcaggaggaagagtgtccaccaagagatgacttcag

SEQ ID NO: 130740 - DNA, 120 bp, Artificial Sequence
  ENSG00000102524_0 (sequence is synthesized)
aggggtagagatgcagaaaggcagaaaggagaaaattcaggataactctcctgaggggtgagccaagccctgccatgtagtgcacgcaggacatcaacaaacacagataacaggaaatga

SEQ ID NO: 130741 - DNA, 120 bp, Artificial Sequence
  ENSG00000102524_1 (sequence is synthesized)
tccattccctgtggtcacttattctaaaggccccaaccttcaaagttcaagtagtgatatggatgactccacagaaagggagcagtcacgccttacttcttgccttaagaaaagagaaga

SEQ ID NO: 130742 - DNA, 120 bp, Artificial Sequence
  ENSG00000102524_2 (sequence is synthesized)
aatgaaactgaaggagtgtgtttccatcctcccacggaaggaaagcccctctgtccgatcctccaaagacggaaagctgctggctgcaaccttgctgctggcactgctgtcttgctgcct

SEQ ID NO: 130743 - DNA, 120 bp, Artificial Sequence
  ENSG00000102524_3 (sequence is synthesized)
cacggtggtgtctttctaccaggtggccgccctgcaaggggacctggccagcctccgggcagagctgcagggccaccacgcggagaagctgccagcaggagcaggagcccccaaggccgg

SEQ ID NO: 130744 - DNA, 120 bp, Artificial Sequence
  ENSG00000102524_4 (sequence is synthesized)
cctggaggaagctccagctgtcaccgcgggactgaaaatctttgaaccaccagctccaggagaaggcaactccagtcagaacagcagaaataagcgtgccgttcagggtccagaagaaac

SEQ ID NO: 130745 - DNA, 120 bp, Artificial Sequence
  ENSG00000102524_5 (sequence is synthesized)
agtcactcaagactgcttgcaactgattgcagacagtgaaacaccaactatacaaaaaggatcttacacatttgttccatggcttctcagctttaaaaggggaagtgccctagaagaaaa

SEQ ID NO: 130746 - DNA, 120 bp, Artificial Sequence
  ENSG00000102524_6 (sequence is synthesized)
agagaataaaatattggtcaaagaaactggttacttttttatatatggtcaggttttatatactgataagacctacgccatgggacatctaattcagaggaagaaggtccatgtctttgg

SEQ ID NO: 130747 - DNA, 120 bp, Artificial Sequence
  ENSG00000102524_7 (sequence is synthesized)
ggatgaattgagtctggtgactttgtttcgatgtattcaaaatatgcctgaaacactacccaataattcctgctattcagctggcattgcaaaactggaagaaggagatgaactccaact

SEQ ID NO: 130748 - DNA, 120 bp, Artificial Sequence
  ENSG00000102524_8 (sequence is synthesized)
tgcaataccaagagaaaatgcacaaatatcactggatggagatgtcacattttttggtgcattgaaactgctgtgacctacttacaccatgtctgtagctattttcctccctttctctgt

SEQ ID NO: 130749 - DNA, 88 bp, Artificial Sequence
  ENSG00000102524_9 (sequence is synthesized)
ccattgccttttctgtgagctatttgttttggtttgctgaaactagtccaaaacaggaaatttaacagacagccacagccaaagagtg

SEQ ID NO: 130750 - DNA, 120 bp, Artificial Sequence
  ENSG00000102524_10 (sequence is synthesized)
agcccatttagggaaagatagaactagaaaggcttttcattataattccatgttgaacaattgagtcatagcttcttatcttggaggaaggacacaattcaaaggggcagtaaggatttt

SEQ ID NO: 130751 - DNA, 120 bp, Artificial Sequence
  ENSG00000102524_11 (sequence is synthesized)
gtaaaacgtggcatccataatttactatggagcaagtgcccacatctctaggacattaagacatttatgagaaatctcaggattcatcttctgtttttatgttaaatgcactccctcctt

SEQ ID NO: 130752 - DNA, 120 bp, Artificial Sequence
  ENSG00000102524_12 (sequence is synthesized)
ccctccttttcagttaacattataaaaagtaaaaaatgaaaattttagaaatcttgcattagacacatgaaaaaataactaaaagtttaaatttaaatatgaaacaattttgctgaaaat

SEQ ID NO: 130753 - DNA, 120 bp, Artificial Sequence
  ENSG00000102524_13 (sequence is synthesized)
tatactatttaagtcttttatggttatttcaagtatacaatttctatctgtaatgtaatatattacccacacatttttttcacaggagagagagaatatcctcatttgtttatgctcatg

SEQ ID NO: 130754 - DNA, 120 bp, Artificial Sequence
  ENSG00000102524_14 (sequence is synthesized)
tgtattttctatagtgaatttcagaaacttttaatatcaggtaatttcaatttatgcctataaagcattgattgaaaaataactagaattgtgcatatataacacataatctccaacaga

SEQ ID NO: 130755 - DNA, 120 bp, Artificial Sequence
  ENSG00000102524_15 (sequence is synthesized)
agttactgaatacattcatactaatgtaatgtaatttccctttatttcttgctcttctgtttcaaactgctgctattgtagtttacatatcccaacctttaaaaatattcctcttattag

SEQ ID NO: 130756 - DNA, 120 bp, Artificial Sequence
  ENSG00000102524_16 (sequence is synthesized)
ctttatattcactttatagaagttgagttttaattaaaattcttggcatcctgaagtatgtcacatagcatgtgctccttataaatatgttgatatctcagaagacagcatcccggtttt

SEQ ID NO: 130757 - DNA, 120 bp, Artificial Sequence
  ENSG00000102524_17 (sequence is synthesized)
cattttataaagtaccatacttaagaatgctgtaatacttatcttttataacatgtttccttcgctttgcttgtcttttatgtcatcagttttaactgtttacttcatttaacagtttac

SEQ ID NO: 130758 - DNA, 120 bp, Artificial Sequence
  ENSG00000102524_18 (sequence is synthesized)
atcattcaacagtttacttcattaaacagtaggtggaaaaatagatgccagtctatgaaaatcttcccatctatatcaaaatacttttcaaggatatacttttcaaaacaaacgatttaa

SEQ ID NO: 130759 - DNA, 120 bp, Artificial Sequence
  ENSG00000102524_19 (sequence is synthesized)
tagatttaaactttatttaaatatctggttcctatgattttgacttcagtaagttcaaataaaatatattttgcaattcatttttacattataatttaaaaagaagaagcgataagtgga

SEQ ID NO: 130760 - DNA, 120 bp, Artificial Sequence
  ENSG00000102524_20 (sequence is synthesized)
taaaaagaagaagcgataagtggagtcagtttcaatgctaggtggggtggttaatgatttttctggtgttgctgctaatgtggattaacaaataaaaacattcattgccttttgcctcat

SEQ ID NO: 130761 - DNA, 120 bp, Artificial Sequence
  ENSG00000102524_21 (sequence is synthesized)
gactgaaagtgagtttgcagcagctgcaagacgcaggcaagatcctgcctacactgctgcctctccctcgcctcagctgtctttctaataacttgaagtttttctgttcatagatctttg

SEQ ID NO: 130762 - DNA, 120 bp, Artificial Sequence
  ENSG00000102524_22 (sequence is synthesized)
gggccaaggaatggagagatttcttcgtctggaaacattttgccaaactcttcagatactctttcctctctgggaatcaaaggaaaatctctactagatcttacacatttgttccatggc

SEQ ID NO: 130763 - DNA, 120 bp, Artificial Sequence
  ENSG00000102524_23 (sequence is synthesized)
gaagaaaaagagaataaaatattggtcaaagaaactggttacttttttatatatggtcaggtaggttgaaaccctaattctggttttactgttcaaagcctcccattttgtgttcatttc

SEQ ID NO: 130764 - DNA, 120 bp, Artificial Sequence
  ENSG00000102531_0 (sequence is synthesized)
agccgttctccaattaaagctgttaacgtgtactacgctgtttccttgttggattttcttgttctctgctgctactgtaaaaacgaaatgagtggtcctgctcaggttccaatgatgtcc

SEQ ID NO: 130765 - DNA, 120 bp, Artificial Sequence
  ENSG00000102531_1 (sequence is synthesized)
ccaaatggttctgtgcctcctatctatgtgcctcctggatatgccccacaggttattgaagacaatggtgttcgaagagttgtcgtggtccctcaggcaccagagtttcaccctggtagt

SEQ ID NO: 130766 - DNA, 120 bp, Artificial Sequence
  ENSG00000102531_2 (sequence is synthesized)
cacacagttctccaccgttctccacatcctcctctacctggtttcattcctgtcccaactatgatgccgcctccaccacgtcatatgtactcacccgtgactggagctggagacatgaca

SEQ ID NO: 130767 - DNA, 120 bp, Artificial Sequence
  ENSG00000102531_3 (sequence is synthesized)
acacagtatatgccacagtatcagtcttcacaagtctatggagatgtagatgctcactctacacatggaaggtccaactttagagatgaacgatctagtaaaacatatgaacgtttgcag

SEQ ID NO: 130768 - DNA, 120 bp, Artificial Sequence
  ENSG00000102531_4 (sequence is synthesized)
aaaaaattgaaggatcgccaaggaacacagaaagataaaatgagcagtccaccatcatcaccccagaaatgcccttctcccattaatgaacataatggacttataaaaggacaaattgct

SEQ ID NO: 130769 - DNA, 120 bp, Artificial Sequence
  ENSG00000102531_5 (sequence is synthesized)
ggtggtataaacacaggatcagcaaaaatcaagtctgggaaggggaaaggtggtacacaagttgatacagaaattgaagaaaaagatgaagaaactaaagcatttgaagcacttctttcc

SEQ ID NO: 130770 - DNA, 120 bp, Artificial Sequence
  ENSG00000102531_6 (sequence is synthesized)
aacattgtcaaaccagtggcctccgacatccaggcaaggacagtagtacttacctggtcaccaccttccagcctcattaatggtgaaacagatgaaagtagtgtaccagagctctatggt

SEQ ID NO: 130771 - DNA, 120 bp, Artificial Sequence
  ENSG00000102531_7 (sequence is synthesized)
tatgaagttctgatctcaagtactggaaaagatgggaaatacaaaagtgtatatgtaggagaagaaacaaatatcactttaaatgatctcaagccagccatggattaccatgcaaaagtc

SEQ ID NO: 130772 - DNA, 120 bp, Artificial Sequence
  ENSG00000102531_8 (sequence is synthesized)
caggcagaatataattctataaagggaactccttcagaggctgaaatctttaccaccttgagctgtgaacctgatatacctaatccaccaaggatagccaatcggaccaaaaattcactc

SEQ ID NO: 130773 - DNA, 120 bp, Artificial Sequence
  ENSG00000102531_9 (sequence is synthesized)
actttgcaatggaaggcacctagtgacaatggttctaaaatccaaaactttgtattagaatgggatgaaggaaaaggaaatggagaattttgtcagtgttacatgggctcacagaaacaa

SEQ ID NO: 130774 - DNA, 120 bp, Artificial Sequence
  ENSG00000102531_10 (sequence is synthesized)
tttaaaattactaaactttcaccagcaatgggctgtaaattcagactatcggccagaaatgactatggtacaagtggttttagtgaagaagtcttatattacacctcaggctgtgctcct

SEQ ID NO: 130775 - DNA, 120 bp, Artificial Sequence
  ENSG00000102531_11 (sequence is synthesized)
tctatgccagcaagtcctgtattaaccaaggctggaattacttggttatccttacaatggagtaagccctcaggaacaccatcagatgaaggaatttcttacattttagagatggaggaa

SEQ ID NO: 130776 - DNA, 120 bp, Artificial Sequence
  ENSG00000102531_12 (sequence is synthesized)
gaaacttcaggatatggttttaagcctaaatatgatggagaagatcttgcttacacagtgaaaaatctcagacgtagtactaagtataaatttaaggttattgcttacaactcagaaggt

SEQ ID NO: 130777 - DNA, 120 bp, Artificial Sequence
  ENSG00000102531_13 (sequence is synthesized)
aaaagtaatccaagtgaagtagtagaatttactacttgccctgataaaccaggcatacctgtaaagccttcagtgaaaggaaagatacattcacacagttttaaaataacctgggatcca

SEQ ID NO: 130778 - DNA, 120 bp, Artificial Sequence
  ENSG00000102531_14 (sequence is synthesized)
ccaaaagacaatggcggagcaaccatcaataaatatgtagtggagatggcagaaggttctaacggaaacaaatgggaaatgatatacagtggtgctaccagggaacatctttgtgatcga

SEQ ID NO: 130779 - DNA, 120 bp, Artificial Sequence
  ENSG00000102531_15 (sequence is synthesized)
ctgaatccaggctgtttctatcgtttacgagtttactgcatcagtgatggaggacagagtgcggtctctgaatctttacttgtgcagactccagctgtgcctcctggcccatgcctccct

SEQ ID NO: 130780 - DNA, 120 bp, Artificial Sequence
  ENSG00000102531_16 (sequence is synthesized)
cccagattacagggtagacccaaagcaaaagaaatacagttacgatggggaccccctctggttgatggtggatcacccatttcctgttacagtgtggaaatgtctcctatagaaaaagat

SEQ ID NO: 130781 - DNA, 120 bp, Artificial Sequence
  ENSG00000102531_17 (sequence is synthesized)
gaacctagagaagtttaccaaggttctgaagtagaatgtacagtgagcagccttcttcctggaaagacatacagcttcagactacgtgcagctaacaaaatggggtttggaccattttca

SEQ ID NO: 130782 - DNA, 120 bp, Artificial Sequence
  ENSG00000102531_18 (sequence is synthesized)
gaaaaatgtgatattactacagcccctgggccaccagatcagtgcaagccccctcaagtgacatgtagatctgcaacttgtgcacaagtgaattgggaggttcctttgagtaatggaaca

SEQ ID NO: 130783 - DNA, 120 bp, Artificial Sequence
  ENSG00000102531_19 (sequence is synthesized)
gatgtcactgaatatcgactggagtggggaggagttgaaggaagtatgcagatatgttactgtgggcctggtctcagttatgaaataaaaggactttcaccagcaactacctattattgc

SEQ ID NO: 130784 - DNA, 120 bp, Artificial Sequence
  ENSG00000102531_20 (sequence is synthesized)
agggtccaggctctgagtgttgtgggtgcaggccctttcagtgaagtagtagcctgtgtgactccaccatcagttcctggcattgtgacctgtcttcaagaaataagcgatgatgagata

SEQ ID NO: 130785 - DNA, 120 bp, Artificial Sequence
  ENSG00000102531_21 (sequence is synthesized)
gaaaatccccattattcaccttctacatgccttgcaataagctgggaaaagccttgtgatcatggttcggaaatccttgcctacagcatagactttggagataaacaatccctaacagtg

SEQ ID NO: 130786 - DNA, 120 bp, Artificial Sequence
  ENSG00000102531_22 (sequence is synthesized)
ggaaaggttacaagctatattatcaacaatttgcaaccagatacaacatacagaatacgaattcaagccttgaatagccttggagctggtcctttcagccatatgataaaattaaaaact

SEQ ID NO: 130787 - DNA, 120 bp, Artificial Sequence
  ENSG00000102531_23 (sequence is synthesized)
agaaggaactccaaagacattgtcaaccgattctattcagtaccaccttcagatggaggataagaatggacggtttgtatccctatacagaggaccatgtcatacatacaaagtacaaag

SEQ ID NO: 130788 - DNA, 120 bp, Artificial Sequence
  ENSG00000102531_24 (sequence is synthesized)
acttaatgagtcaacatcctataaattctgtattcaagcttgtaatgaagctggggaaggtcccctctcccaagaatatattttcactactccaaaatctgtcccagctgccttgaaagc

SEQ ID NO: 130789 - DNA, 120 bp, Artificial Sequence
  ENSG00000102531_25 (sequence is synthesized)
ccccaaaatagagaaagtaaatgatcacatttgtgaaattacatgggagtgtttacagccaatgaaaggtgatccagttatttacagtcttcaagttatgttgggaaaagattcagaatt

SEQ ID NO: 130790 - DNA, 120 bp, Artificial Sequence
  ENSG00000102531_26 (sequence is synthesized)
caaacagatttacaagggtcccgactcttccttccggtattccagccttcagctgaactgtgaatatcgcttccgtgtatgtgccattcgccagtgccaagactctctgggacaccagga

SEQ ID NO: 130791 - DNA, 120 bp, Artificial Sequence
  ENSG00000102531_27 (sequence is synthesized)
cctcgtaggtccctacagcaccacagtgctcttcatctctcagaggactgaaccaccagccagcaccaacagagacactgtggaaagcacaaggacccgacgggcactgagtgacgagca

SEQ ID NO: 130792 - DNA, 120 bp, Artificial Sequence
  ENSG00000102531_28 (sequence is synthesized)
gtgtgctgccgtcatccttgtgctgtttgctttcttttccattttgattgcctttatcattcagtactttgtaatcaagtgaaaatataactttattttttaactctattacattttatt

SEQ ID NO: 130793 - DNA, 120 bp, Artificial Sequence
  ENSG00000102531_29 (sequence is synthesized)
ttgtcatgtactaaaattatttctgtattgcttttataaaaaacagtggcatttagcactggcattgagactatagcacatcatttttgccattttcagtgcttatattgttaggtagag

SEQ ID NO: 130794 - DNA, 120 bp, Artificial Sequence
  ENSG00000102531_30 (sequence is synthesized)
gctggcactttattagaatgcaagccacaaaaatatcaattttgttttttttgttagggtgggtcttctttttttctttccctctctctttttttaacaaatgccttcttatagaaaaac

SEQ ID NO: 130795 - DNA, 120 bp, Artificial Sequence
  ENSG00000102531_31 (sequence is synthesized)
tttctaagaggcaacaatttagaatggatattttgacgaatcggcatgagtgtaacagtgataacctgatctgtttgttttaaagattattaccaagtgaaaaattcagaatgaatagaa

SEQ ID NO: 130796 - DNA, 120 bp, Artificial Sequence
  ENSG00000102531_32 (sequence is synthesized)
tttacactaacatgctatataaaatgttaaagtctgatgctgtgaaagcaatctagtgctatatttctacctcctcatttgtcttaattatttggtaagtgggattatgatgagtaactg

SEQ ID NO: 130797 - DNA, 120 bp, Artificial Sequence
  ENSG00000102531_33 (sequence is synthesized)
gaggggcttagaaacaaaaactggatgaaagagtatgcatgaagaaaagcttctttgataaatgtggagttcttcattataaatatatattcatgaattcacagataagtacttaaagaa

SEQ ID NO: 130798 - DNA, 120 bp, Artificial Sequence
  ENSG00000102531_34 (sequence is synthesized)
cagacagtttacttggcctaaaaatattttgatgtttactcaaaaagtacctcttcaggtcttgagaacatggaaaagaattgagtgcttttaaatactttttagaaagtaatcataaaa

SEQ ID NO: 130799 - DNA, 120 bp, Artificial Sequence
  ENSG00000102531_35 (sequence is synthesized)
gtaaattgaatttcaaacctatttggcttctgttttgtgaacctttgaactatatgtatgtgtataagggtatacacatacatatatggcatataacaagtgtacacatatacacataac

SEQ ID NO: 130800 - DNA, 120 bp, Artificial Sequence
  ENSG00000102531_36 (sequence is synthesized)
aagtgtagaagtatatattacatacatacactcactctgtctggtataggctaattttgaagaactcccataagtttctgctgcttctcccataactgctgccaccaccatcagaattca

SEQ ID NO: 130801 - DNA, 120 bp, Artificial Sequence
  ENSG00000102531_37 (sequence is synthesized)
taatcaaacctaacctttttgtttggggcaccaaatctgaagacaaaattaatttgcaccagtaaacttcaagctgctttctttcttgaaaactaaacgtttaacgtataatgtctgttt

SEQ ID NO: 130802 - DNA, 120 bp, Artificial Sequence
  ENSG00000102531_38 (sequence is synthesized)
ggatactgttccaaattgttgattgcatgtggttaatgttgcattagagcactttgcaattgcataattcattaatgttttgtgagcttgcatttgtgagttattggatgatcagactga

SEQ ID NO: 130803 - DNA, 120 bp, Artificial Sequence
  ENSG00000102531_39 (sequence is synthesized)
attttgtcaagtatcacattgtacatcttgcctagatgtcgatgactgcaagtaataatacagtttataatgaaactatctacaattcttgttttagcacatctgttatccgtaaaacac

SEQ ID NO: 130804 - DNA, 120 bp, Artificial Sequence
  ENSG00000102531_40 (sequence is synthesized)
ctgtaactagcttttttaatttattatttgaattttaggatagcgaatcactaatttttagttgctgaggttggcattttagtgattattaagcacttctgtcagtctttgaaaaaagaa

SEQ ID NO: 130805 - DNA, 120 bp, Artificial Sequence
  ENSG00000102531_41 (sequence is synthesized)
cgtattttttgtgctttgaagatctctgaagaatttcttttataatagaatgggcatgtattgtaacagttttatgtcaaatgatctgtgctgtagaaaaacattaacccttgttcaaaa

SEQ ID NO: 130806 - DNA, 120 bp, Artificial Sequence
  ENSG00000102531_42 (sequence is synthesized)
aagaaatggataaacttggcctttctaagtggtaagaatgacctgtcactataatatactgtatgtttacattttatttaaatttaatctcttatgtatagggtgataaccttccccaga

SEQ ID NO: 130807 - DNA, 120 bp, Artificial Sequence
  ENSG00000102531_43 (sequence is synthesized)
aacaacagtgattgcgattgttttctagaaacttctttaaagtgccacatttggcagtacaaatgagtctgagtgtaatagcccagagatttatatatagttgaatgtctaaaatggtaa

SEQ ID NO: 130808 - DNA, 120 bp, Artificial Sequence
  ENSG00000102531_44 (sequence is synthesized)
aatgtgccactgtgtcaagttacagtggcttatgtttttcatagtaattcaaatgaacttcctatttttgatagtaaatgtcatttaatagtatacttgccatttgagcctcactgcaaa

SEQ ID NO: 130809 - DNA, 120 bp, Artificial Sequence
  ENSG00000102531_45 (sequence is synthesized)
attagtgcagaggagaaaacaatttttaatgtaatcttgattttacctcatatactgtacattccaaaaactctaaactttttaaagattatagatacactaccaaacatatcaccttaa

SEQ ID NO: 130810 - DNA, 120 bp, Artificial Sequence
  ENSG00000102531_46 (sequence is synthesized)
aattgtataaggctgaatgaacttcatacaaatgaaaaaaatctcataaaaatacataaactatgtagcaaaagtatctgtaaaatccatggaaaataaaagttgtatcattctttttga

SEQ ID NO: 130811 - DNA, 120 bp, Artificial Sequence
  ENSG00000102531_47 (sequence is synthesized)
ctcccggctccgtagtaagcatggcggcggcggcgttcgtggtccctcgggtgaaacagaaagcgggagctacgcggagagggagcgaagagcggggctgaggcggcggcgtcactgcca

SEQ ID NO: 130812 - DNA, 120 bp, Artificial Sequence
  ENSG00000102531_48 (sequence is synthesized)
ggaaacaaccccaacagtcagcgcgccggcggccgcggcggccctgagagctgactctgcagctgaggtagagagacaacgatcaggaaccctaagaagaggcgccagaggagccgcctt

SEQ ID NO: 130813 - DNA, 120 bp, Artificial Sequence
  ENSG00000102531_49 (sequence is synthesized)
ctgcctcagaacggcgtgactcggagaattggagcgttattcagtatattaatgtcttattgataatggcagaacatccaccactactggatacaactcagatcttaagtagtgatattt

SEQ ID NO: 130814 - DNA, 120 bp, Artificial Sequence
  ENSG00000102531_50 (sequence is synthesized)
ctcttttgtctgcccctattgtaagtgcagatggaacacaacaggttattctggtacaagttaacccaggagaagcatttacaataagaagagaagatggacagtttcagtgcattacag

SEQ ID NO: 130815 - DNA, 120 bp, Artificial Sequence
  ENSG00000102531_51 (sequence is synthesized)
tctcccctcttccaatgagcttaaaacatttttcccaacagtatataaatcttcaacatgagaggatgtatatttattatataaagcccagtaaagaataaaattagaagttttatccta

SEQ ID NO: 130816 - DNA, 120 bp, Artificial Sequence
  ENSG00000102531_52 (sequence is synthesized)
ggggcggaatcctcctgagaggatcgcccagcacccgcggcgccttcggctttggccgcccggcagccgccgaacttgaacgcttttctgaagagagttttccccgctcatcttggggtt

SEQ ID NO: 130817 - DNA, 120 bp, Artificial Sequence
  ENSG00000102531_53 (sequence is synthesized)
aaaacctcgaaaacccgccctctgtttgatcctgcgtggctgcttccagtacctggcagttcctctccccgggcgagttaaccacctgttcagtcgggaggtggactcgaggctgcagtc

SEQ ID NO: 130818 - DNA, 120 bp, Artificial Sequence
  ENSG00000102531_54 (sequence is synthesized)
tctgatctcaagtactggaaaagatgggaaatacaaaagtgtatatgtgtaggtatttgttgttttgctttctcccattgtgtaaattaatggtttattataaagagcttattactaatt

SEQ ID NO: 130819 - DNA, 120 bp, Artificial Sequence
  ENSG00000102531_55 (sequence is synthesized)
ttgctctacttttccttcttcacgcttttattctgaatctttaagttggctaatgatagtgatttcaatgtaaatggtccaaatgtagcttggtacacatttctgtctaccttccttcag

SEQ ID NO: 130820 - DNA, 120 bp, Artificial Sequence
  ENSG00000102531_56 (sequence is synthesized)
aataatcacttttattggccacattcagctttttttttcccagtaggctccctaatagatggttcagtattcacgtattcttaatgcattaaatataagttgtagtatgtagaacccatg

SEQ ID NO: 130821 - DNA, 120 bp, Artificial Sequence
  ENSG00000102531_57 (sequence is synthesized)
accaaaaatggacaattcatgattgtaaactcataaagtatgacattgctcctctaaggactggatttaattcttacatgtacaagctcatgtcctgttgtaaaatgaatttagtagcac

SEQ ID NO: 130822 - DNA, 120 bp, Artificial Sequence
  ENSG00000102531_58 (sequence is synthesized)
agtagcactgttatttatttgcatgttagtatgtttatagtcatattttgaaaacttacgtatttctttccttggtttaaaagtatattacacacagccaggcacggtggctcacgcctg

SEQ ID NO: 130823 - DNA, 120 bp, Artificial Sequence
  ENSG00000102531_59 (sequence is synthesized)
ctccatctcaagaaaaaaataaaagtatattacgcaccacgaagccttagaaagattcagtagctaaagttgtgacatttatgattgacagttttgaaataaattattctgtccatattc

SEQ ID NO: 130824 - DNA, 120 bp, Artificial Sequence
  ENSG00000102539_0 (sequence is synthesized)
cgagggggcgcgggagccgccgtggcccgcgctgccgccttgcgacgagcgccgctgctcgccctttcccctgggggcgctggtgccggtgaccgctgtgtgcctgtgcctgttcgtcgt

SEQ ID NO: 130825 - DNA, 120 bp, Artificial Sequence
  ENSG00000102539_1 (sequence is synthesized)
gtgaccgctgtgtgcctgtgcctgttcgtcgtcggggtgagcggcaacgtggtgaccgtgatgctgatcgggcgctaccgggacatgcggaccaccaccaacttgtacctgggcagcatg

SEQ ID NO: 130826 - DNA, 120 bp, Artificial Sequence
  ENSG00000102539_2 (sequence is synthesized)
gccgtgtccgacctactcatcctgctcgggctgccgttcgacctgtaccgcctctggcgctcgcggccctgggtgttcgggccgctgctctgccgcctgtccctctacgtgggcgagggc

SEQ ID NO: 130827 - DNA, 120 bp, Artificial Sequence
  ENSG00000102539_3 (sequence is synthesized)
tgcacctacgccacgctgctgcacatgaccgcgctcagcgtcgagcgctacctggccatctgccgcccgctccgcgcccgcgtcttggtcacccggcgccgcgtccgcgcgctcatcgct

SEQ ID NO: 130828 - DNA, 120 bp, Artificial Sequence
  ENSG00000102539_4 (sequence is synthesized)
gtgctctgggccgtggcgctgctctctgccggtcccttcttgttcctggtgggcgtcgagcaggaccccggcatctccgtagtcccgggcctcaatggcaccgcgcggatcgcctcctcg

SEQ ID NO: 130829 - DNA, 120 bp, Artificial Sequence
  ENSG00000102539_5 (sequence is synthesized)
gtccccgccgtcggggcccgagaccgcggaggccgcggcgctgttcagccgcgaatgccggccgagccccgcgcagctgggcgcgctgcgtgtcatgctgtgggtcaccaccgcctactt

SEQ ID NO: 130830 - DNA, 120 bp, Artificial Sequence
  ENSG00000102539_6 (sequence is synthesized)
gcctacttcttcctgccctttctgtgcctcagcatcctctacgggctcatcgggcgggagctgtggagcagccggcggccgctgcgaggcccggccgcctcggggcgggagagaggccac

SEQ ID NO: 130831 - DNA, 120 bp, Artificial Sequence
  ENSG00000102539_7 (sequence is synthesized)
cggcagaccgtccgcgtcctgctggtggtggttctggcatttataatttgctggttgcccttccacgttggcagaatcatttacataaacacggaagattcgcggatgatgtacttctct

SEQ ID NO: 130832 - DNA, 120 bp, Artificial Sequence
  ENSG00000102539_8 (sequence is synthesized)
cagtactttaacatcgtcgctctgcaacttttctatctgagcgcatctatcaacccaatcctctacaacctcatttcaaagaagtacagagcggcggcctttaaactgctgctcgcaagg

SEQ ID NO: 130833 - DNA, 120 bp, Artificial Sequence
  ENSG00000102539_9 (sequence is synthesized)
aagtccaggccgagaggcttccacagaagcagggacactgcgggggaagttgcaggggacactggaggagacacggtgggctacaccgagacaagcgctaacgtgaagacgatgggataa

SEQ ID NO: 130834 - DNA, 120 bp, Artificial Sequence
  ENSG00000102543_0 (sequence is synthesized)
agtgggccgttgccttacagttgctgagaggaggcgagaggcgggggcgctagggccgagatcatgtctgactgggagaggtttccttggcagcagaggacgctaggtttgggatgaaag

SEQ ID NO: 130835 - DNA, 120 bp, Artificial Sequence
  ENSG00000102543_1 (sequence is synthesized)
aagctgggcagatgcaaaatctggagagcgcgagggccgggcggtcagtcagcacccagactggcagcatgaccggtcagataccaaggctttctaaagtcaaccttttcactctgctca

SEQ ID NO: 130836 - DNA, 120 bp, Artificial Sequence
  ENSG00000102543_2 (sequence is synthesized)
gcctctggatggagctctttccagcagaagcccagcggcaaaaatctcagaaaaatgaagagggaaagcatggacccttaggagataatgaagagaggaccagagtatctactgacaaaa

SEQ ID NO: 130837 - DNA, 120 bp, Artificial Sequence
  ENSG00000102543_3 (sequence is synthesized)
gacaggtaaagagaactggtcttgtggtggtgaaaaacatgaaaattgttggtctccactgttctagtgaagatttacatgccgggcagattgctcttattaaacatgggtcaaggctga

SEQ ID NO: 130838 - DNA, 120 bp, Artificial Sequence
  ENSG00000102543_4 (sequence is synthesized)
aaaactgtgatctttatttttccagaaaaccatgttctgcttgtttgaaaatgattgtaaatgctggagttaaccgaatttcatactggcctgctgatccagaaataagtttgcttacgg

SEQ ID NO: 130839 - DNA, 120 bp, Artificial Sequence
  ENSG00000102543_5 (sequence is synthesized)
aggcttctagttctgaagatgcaaagttagatgccaaagcagtggaaagattgaagtcaaacagtcgggcccatgtgtgtgtcttacttcaacctttggtgtgttatatggtgcagtttg

SEQ ID NO: 130840 - DNA, 120 bp, Artificial Sequence
  ENSG00000102543_6 (sequence is synthesized)
tagaggagacctcttacaaatgtgactttattcaaaaaattacaaaaacattgccggatgctaacactgacttttattatgaatgtaaacaagaaagaataaaagaatatgaaatgttat

SEQ ID NO: 130841 - DNA, 120 bp, Artificial Sequence
  ENSG00000102543_7 (sequence is synthesized)
ttttggtttcaaatgaagaaatgcataagcaaatactgatgactataggtttggagaacctgtgtgaaaatccatactttagcaatctaaggcaaaacatgaaagaccttatcctacttt

SEQ ID NO: 130842 - DNA, 120 bp, Artificial Sequence
  ENSG00000102543_8 (sequence is synthesized)
tggccacagtagcttccagtgtgccgaactttaaacacttcggattttaccgtagcaatccagaacagattaatgaaattcacaatcaaagtttgccacaggaaattgcaaggcactgca

SEQ ID NO: 130843 - DNA, 120 bp, Artificial Sequence
  ENSG00000102543_9 (sequence is synthesized)
tggttcaggccaggttattggcatatcgaactgaggatcataaaacaggagttggggcagtcatttgggcagaagggaaatctagaagttgtgatggaacaggtgccatgtactttgtag

SEQ ID NO: 130844 - DNA, 120 bp, Artificial Sequence
  ENSG00000102543_10 (sequence is synthesized)
gatgtggttacaatgcttttcctgttggatctgagtatgctgacttcccacacatggatgacaagcagaaagacagagaaataaggaaattcagatacatcatacatgcggaacagaatg

SEQ ID NO: 130845 - DNA, 120 bp, Artificial Sequence
  ENSG00000102543_11 (sequence is synthesized)
ccttgacatttaggtgtcaagaaataaaaccagaagaaagaagcatgatttttgtgacaaagtgcccatgtgatgagtgtgtacctttaattaaaggtgcaggcataaaacaaatctatg

SEQ ID NO: 130846 - DNA, 120 bp, Artificial Sequence
  ENSG00000102543_12 (sequence is synthesized)
caggagatgtagatgttggaaaaaagaaggcagacatctcttacatgaggttcggggagcttgaaggtgttagcaaatttacgtggcagctgaatccatcaggagcttatggtcttgaac

SEQ ID NO: 130847 - DNA, 120 bp, Artificial Sequence
  ENSG00000102543_13 (sequence is synthesized)
aaaatgagcctgaaaggagagaaaatggtgtgttgagacctgtcccacagaaggaagagcagcaccaggacaagaagctgcgcctcggaatccactaagaaggcctgtctacactgcagg

SEQ ID NO: 130848 - DNA, 120 bp, Artificial Sequence
  ENSG00000102543_14 (sequence is synthesized)
ttctaaaattcagccttgttcattcagaaaataaggatggattttgtgaataattgaaaagattttttaaggaagctaatttatttctaggatacaaatggtgttaataagaatatttgt

SEQ ID NO: 130849 - DNA, 120 bp, Artificial Sequence
  ENSG00000102543_15 (sequence is synthesized)
cttttagatttatgtgtgggttttccataatgtagtagtgtgttattttattacacgaaatgagggagcaataacttcaaccaatgtaatcaccaacagggactgatttctatttatctt

SEQ ID NO: 130850 - DNA, 120 bp, Artificial Sequence
  ENSG00000102543_16 (sequence is synthesized)
gactttatattagccaatttgaaagggtctgcttcacaagaggtcatgcctctgcagggaatcacacaccttttgagaaatattaattcttttgaattacaagagtgacagttagtaaac

SEQ ID NO: 130851 - DNA, 120 bp, Artificial Sequence
  ENSG00000102543_17 (sequence is synthesized)
tgctccagggaaataagtgtcatcttttaagagtcagtgtatagcaaaccaaaagatcacatttatacccaaagctttctagtaatcagaatttacttaattagaattgactcataaaaa

SEQ ID NO: 130852 - DNA, 120 bp, Artificial Sequence
  ENSG00000102543_18 (sequence is synthesized)
taaagttagtggactttgtctccatttttaaagtatattttgtaaatgttaattctgtggtcctgtttatcacagactttgggtagcaataggaagagagtgttattctgagacagtgtc

SEQ ID NO: 130853 - DNA, 120 bp, Artificial Sequence
  ENSG00000102543_19 (sequence is synthesized)
gctgcttgatatcactgactcttgaaatcactaacagtgaacctcaaatttggttatgatgttaacagagaagaaatatttgagtctggaatattgaaactagctttcctagaattccat

SEQ ID NO: 130854 - DNA, 120 bp, Artificial Sequence
  ENSG00000102543_20 (sequence is synthesized)
taataaatgctgctcccccatatagtcttcccttctgtataattaacataggttgtctcatggctttgatcttcaaaaggaagagccttttaaaaacatttgccaacctcaagaataaat

SEQ ID NO: 130855 - DNA, 120 bp, Artificial Sequence
  ENSG00000102543_21 (sequence is synthesized)
actgaaagtcttgaaagtatggtcatttcagctattccagattgctgtctgtgatttctcacatttttatttgctgagaaacattcagaaaattattccaaaaatgaaggtacattttct

SEQ ID NO: 130856 - DNA, 120 bp, Artificial Sequence
  ENSG00000102543_22 (sequence is synthesized)
gttctctcctaggttagagaggggtggcctggggtgcttcatgagaaatgtcttcctggatctgcggtggtcaggtttgcctctgcttttgttccctgcctttccgccacatcacacggc

SEQ ID NO: 130857 - DNA, 120 bp, Artificial Sequence
  ENSG00000102543_23 (sequence is synthesized)
ctcactgggcttcctaccagtttctcagaattacacgcacgaccatccaaacattggctccatgccagggctgtgactgcagcctgtgtaggaccatggggagttcagagtcatcataca

SEQ ID NO: 130858 - DNA, 120 bp, Artificial Sequence
  ENSG00000102543_24 (sequence is synthesized)
aggcagccaagaactgccataaacactacacagatggagggcatgggataggacaggagaggaggtgatgtacacttagaggtaactaaggctagtttgaaaaccgtgaattaagatatt

SEQ ID NO: 130859 - DNA, 120 bp, Artificial Sequence
  ENSG00000102543_25 (sequence is synthesized)
cttatcagtataaaaacactgagattgcttacctcccaaattgctttattgtattaactctcatgcttcagctcttggatttgttgtttctaactaacatgtcatgtacaccaaacattt

SEQ ID NO: 130860 - DNA, 120 bp, Artificial Sequence
  ENSG00000102543_26 (sequence is synthesized)
tataaatcaatcagtaaatattttgtaagacccaaaatcctggcatattgccaggtctgtggatttgcctgttgggtgttgggatgggatatcagaggaagaagcatacaagtgggaaaa

SEQ ID NO: 130861 - DNA, 120 bp, Artificial Sequence
  ENSG00000102543_27 (sequence is synthesized)
actgtgattagaaagggaaaaataggcatttccacagtactattaagagaggcatgataatgccattttttttcttctgtacaactggtcagatttcaataaataatcattgatggttta

SEQ ID NO: 130862 - DNA, 120 bp, Artificial Sequence
  ENSG00000102543_28 (sequence is synthesized)
ccaatcggctcggtcgcactggcttttgaagtctcgctttttacccctgttagctacttctcacaggacctagagctggggcctctgaggtcaaagagcctgaacatttccaaacggcgc

SEQ ID NO: 130863 - DNA, 120 bp, Artificial Sequence
  ENSG00000102543_29 (sequence is synthesized)
ttaggaaatggattatgagaactcgaacagagggaaggtgaaatgcaaccggaggaaacactctgatatgagctggagttaaccgaatttcatactggcctgctgatccagaaataagtt

SEQ ID NO: 130864 - DNA, 120 bp, Artificial Sequence
  ENSG00000102547_0 (sequence is synthesized)
ggatttcttgtagaagccagttaaaaggagaacctagtatcacactaggcttctgaaaacaccaatcaagagttgcttaatgcaggggtcccttacccctgggctgcagacctgtacctg

SEQ ID NO: 130865 - DNA, 120 bp, Artificial Sequence
  ENSG00000102547_1 (sequence is synthesized)
tccatggcctgttaggaaccgggcagcacagtaggagcattccatattggaagaagagatttctacacatgaaaaaaatgcctttgtttagtaaatcacacaaaaatccagcagaaattg

SEQ ID NO: 130866 - DNA, 120 bp, Artificial Sequence
  ENSG00000102547_2 (sequence is synthesized)
tgaaaatcctgaaagacaatttggccattttggaaaagcaagacaaaaagacagacaaggcttcagaagaagtgtctaaatcactgcaagcaatgaaagaaattctgtgtggtacaaacg

SEQ ID NO: 130867 - DNA, 120 bp, Artificial Sequence
  ENSG00000102547_3 (sequence is synthesized)
agaaagaacccccaacagaagcagtggctcagctagcacaagaactctacagcagtggcctgctagtgacactgatagctgacctgcagctgatagactttgagggaaaaaaagatgtga

SEQ ID NO: 130868 - DNA, 120 bp, Artificial Sequence
  ENSG00000102547_4 (sequence is synthesized)
cccagatatttaacaacatcttgagaagacagataggcactcggagtcctactgtggagtatattagtgctcatcctcatatcctgtttatgctcctcaaaggatatgaagccccacaga

SEQ ID NO: 130869 - DNA, 120 bp, Artificial Sequence
  ENSG00000102547_5 (sequence is synthesized)
ttgccttacgttgtgggattatgctgagagaatgtattcgacatgaaccacttgccaaaatcatcctcttttctaatcaattcagagatttctttaagtacgtggagttgtcaacatttg

SEQ ID NO: 130870 - DNA, 120 bp, Artificial Sequence
  ENSG00000102547_6 (sequence is synthesized)
atattgcttcagatgcctttgctactttcaaggatttactaaccagacataaagtgttggtagcagacttcttagaacaaaattacgacactatttttgaagactatgagaaattgcttc

SEQ ID NO: 130871 - DNA, 120 bp, Artificial Sequence
  ENSG00000102547_7 (sequence is synthesized)
agtctgagaattatgttactaagagacagtctttaaagctgctaggggagctgatcctggaccgtcacaactttgccatcatgacaaagtatatcagcaagccggagaacctgaaactca

SEQ ID NO: 130872 - DNA, 120 bp, Artificial Sequence
  ENSG00000102547_8 (sequence is synthesized)
tgatgaacctccttcgggataaaagtcccaacatccagtttgaagcctttcatgtttttaaggtgtttgtggccagtcctcacaaaacacagcctattgtggagatcctgttaaaaaatc

SEQ ID NO: 130873 - DNA, 120 bp, Artificial Sequence
  ENSG00000102547_9 (sequence is synthesized)
agcccaaactcattgagtttctgagcagcttccaaaaagaaaggacggatgatgagcagttcgctgacgagaagaactacttgattaaacagatccgagacttgaagaaaacggcccctt

SEQ ID NO: 130874 - DNA, 120 bp, Artificial Sequence
  ENSG00000102547_10 (sequence is synthesized)
gaagagctccccggcccctgtcacagtcagtcgtctcatttgtccagtttgtacagtgtgtcatttcagaaagtcatcattcttgggaagactttggaggtgcctattttttctgctgta

SEQ ID NO: 130875 - DNA, 120 bp, Artificial Sequence
  ENSG00000102547_11 (sequence is synthesized)
attgttctgggtagatggagtataaacatttgaatggaaaaaaattaacctagaataatatattcattttagtcaagtctgtgattatttatgtgaaatgagaaccattgtatcagatgt

SEQ ID NO: 130876 - DNA, 120 bp, Artificial Sequence
  ENSG00000102547_12 (sequence is synthesized)
tgataaaagcaattttaacttgcagatgtgagcccctgggcacaatgagccgctaaatgggagctcaattgacaggcatcaccaagtcttcaaggaggactgagttctcaggggagaact

SEQ ID NO: 130877 - DNA, 120 bp, Artificial Sequence
  ENSG00000102547_13 (sequence is synthesized)
gggaatggggccagggtgcaaaaatgctttgcccatctgtaggtagacacacagatcgctcagggcactgagagatcccagaaggtaacgttaatgttttcagtcattgtgtgtcctttg

SEQ ID NO: 130878 - DNA, 120 bp, Artificial Sequence
  ENSG00000102547_14 (sequence is synthesized)
tgctgccaatgtctttggactgtaatcagtgcatccacacctcccaggatccagtgctccctctcagctcagtctcccctctctccctgtcctgcattccatcccagctcctcagcatgg

SEQ ID NO: 130879 - DNA, 120 bp, Artificial Sequence
  ENSG00000102547_15 (sequence is synthesized)
cctcagtgggcgcacccatgcctcccgcagtccaggtgagcaggggagcaactgagcaggaagaggatggatcaacaagggtcacggggaataggggacccacggggtgtgacctgcttg

SEQ ID NO: 130880 - DNA, 120 bp, Artificial Sequence
  ENSG00000102547_16 (sequence is synthesized)
ctagagaactgtgaacatgtggctctggatagagtgactgctgctccatattagcttccagagggtgagtgagggacagaatatttccttcataatggtcatgggtgaatgctttctgct

SEQ ID NO: 130881 - DNA, 120 bp, Artificial Sequence
  ENSG00000102547_17 (sequence is synthesized)
gtaagtgtcttttagagtaggaatcagcatagtgggatgcccagcaggcacaaaccatgggtccagggagtctcagcggggaacttctatcagtatcaataaccattggaaggagaaatg

SEQ ID NO: 130882 - DNA, 120 bp, Artificial Sequence
  ENSG00000102547_18 (sequence is synthesized)
attcatgtgtgaaaaaattctcagatccatcaataaatttttttcagagccattgtatcagatgttgataaaagcaatttttttctaataagctgtcattctataattgcccatcacagt

SEQ ID NO: 130883 - DNA, 120 bp, Artificial Sequence
  ENSG00000102547_19 (sequence is synthesized)
ctttagtgaacacatagaaagcctatacagttttggtcctgaatagtctcttgtgactaggatgattgaggtgttaattcctcttccttataaaaaggcttggaatcaaaaatattttaa

SEQ ID NO: 130884 - DNA, 120 bp, Artificial Sequence
  ENSG00000102547_20 (sequence is synthesized)
aaggccgtggtttcgtttcagacatcaaccatctaaaacgggattttaaagcgatattttacaagaatgaaaggcacaattgttgatctgtattttttacacttcagtttctaaatcatg

SEQ ID NO: 130885 - DNA, 120 bp, Artificial Sequence
  ENSG00000102547_21 (sequence is synthesized)
aatcgttgccttccacaggaaccctcccttatacattacttgagtgttgtgtagtttttcttcagccaggtatttctctgcctagagaggggaagagaaatgtgttctccaggactgatc

SEQ ID NO: 130886 - DNA, 120 bp, Artificial Sequence
  ENSG00000102547_22 (sequence is synthesized)
ccctttgtagattttgtacctgaagagttacctggcagggcaccacccttggctaggcccaggtgtgtgtttctttcttgcctggcatggaccccgaggcaggtgatgtggggcctggcg

SEQ ID NO: 130887 - DNA, 120 bp, Artificial Sequence
  ENSG00000102547_23 (sequence is synthesized)
cacctccccgctttggcagctgtggcctccctggccagtgcccttgcaggaggccggccggcagcctgatgacccgtactctttagtcactgacgtcagattatttttataacgttccct

SEQ ID NO: 130888 - DNA, 120 bp, Artificial Sequence
  ENSG00000102547_24 (sequence is synthesized)
gacagttcagagtcccttcgaattgcacttttctggtttcgcttatttaattaaaagagatgagtgtaagtataaaaaatgaaggtgaaataaccattggaattgtatttggttacttaa

SEQ ID NO: 130889 - DNA, 120 bp, Artificial Sequence
  ENSG00000102547_25 (sequence is synthesized)
tactgttccacaacatcttgggacgtctgttttcctttggagagtgaggccttgttattattcttttctgataaagaaaacattttatttcctttgggcttgcattagctctttcctagc

SEQ ID NO: 130890 - DNA, 120 bp, Artificial Sequence
  ENSG00000102547_26 (sequence is synthesized)
aacccattatcccagctcagtacctttcaaacagaaaactagagtctggggttttgttgtgatctgaatttgtaagttattaatgtgaaagggggagcaggaagctccccctttgcacaa

SEQ ID NO: 130891 - DNA, 120 bp, Artificial Sequence
  ENSG00000102547_27 (sequence is synthesized)
agggggatttgtttgcacaaagttcactgtaaatactgtgagaattgaattctgaaaaggtcatatttagtgatttcaaaagcacacatttaaatgaagactgactaaataaaaggtacc

SEQ ID NO: 130892 - DNA, 120 bp, Artificial Sequence
  ENSG00000102547_28 (sequence is synthesized)
gtgacgttacaggactgaggagggaggaagtaaaagggagctgtgactgtggtacgtatctgaaagcaagtgttagagagggagtggagaacgcataagcaagctggtttgaccagaaac

SEQ ID NO: 130893 - DNA, 120 bp, Artificial Sequence
  ENSG00000102547_29 (sequence is synthesized)
agaactgcctgtgacagattaagagacaagcaaggcttggaatctgagagcaagcaaagagagtggaaatttacagctgccctatgtgagtgttcaagtgatcattttctggtaacgttt

SEQ ID NO: 130894 - DNA, 120 bp, Artificial Sequence
  ENSG00000102547_30 (sequence is synthesized)
tccagtggtaactgttactcttcaaaaagagggacagaaagtcaagacctaattgtggaaactcttttctctgccacgcttggtaataggaggcaacctctattaaatggacgataaagg

SEQ ID NO: 130895 - DNA, 120 bp, Artificial Sequence
  ENSG00000102547_31 (sequence is synthesized)
ctacttcatctaaagtgctttgagctcaagaaagagctgtcttcagcacctcaccatgtgtctacattttgttgcttagaaaagcctaggcatttctgtaacatttgcattccatattgg

SEQ ID NO: 130896 - DNA, 120 bp, Artificial Sequence
  ENSG00000102547_32 (sequence is synthesized)
gcactgtagctgagccaatggagttactcgtagtcgagaggccggcatcactggagtggtggcgcagctgtttcctccggatatccatcaaatattgagaagaaagaatatcaggagcaa

SEQ ID NO: 130897 - DNA, 120 bp, Artificial Sequence
  ENSG00000102547_33 (sequence is synthesized)
agtgttctaagttgctgttcagaacgtaaagatgcgaaccccaaatcagtggtttgttcattcttcatgcaagagcaatgcactaaaggagagaagcaagctgtggtgatcagtgacttt

SEQ ID NO: 130898 - DNA, 120 bp, Artificial Sequence
  ENSG00000102547_34 (sequence is synthesized)
aaaccaatgtaaaagcttaatgaagaattcaaaatatggtctgtgatgtgcacatagaccctctataaatagatttaagttgatttcaggttttatgcaactgattattatttagtctgt

SEQ ID NO: 130899 - DNA, 120 bp, Artificial Sequence
  ENSG00000102547_35 (sequence is synthesized)
tgtgatgaactttaggttcactctctagagactctgaccacaccggatccctctagactacacagcttaaagatctaaaaggttatactggtgtgtaatgttacatttacatgaaaggta

SEQ ID NO: 130900 - DNA, 120 bp, Artificial Sequence
  ENSG00000102547_36 (sequence is synthesized)
taatcttttagtaagcattaagaattgtatagaaaatgcagaatttgtttggaagaaaagcatggataattcatttgtgatgaatgttgactccacaaagggtttgttcaagtatttgga

SEQ ID NO: 130901 - DNA, 120 bp, Artificial Sequence
  ENSG00000102547_37 (sequence is synthesized)
gacggttgttaaattgccttttaaggaggactgaggagggaggaagtaaaagggagctgtgactgtggtacgtatctgaaagcaagtgttagagagggagtggagaacgcataagcaagc

SEQ ID NO: 130902 - DNA, 120 bp, Artificial Sequence
  ENSG00000102547_38 (sequence is synthesized)
agcgttttgttagggaagaagtggagaacagatattggaaggcaattagctgtctctaatacattgataaaatatataactataactgcaaaatgctaataacccagcagaggagtagat

SEQ ID NO: 130903 - DNA, 120 bp, Artificial Sequence
  ENSG00000102547_39 (sequence is synthesized)
ttgggaacataagatgaaaaagtcaacaagtgcattgatcacaacatatggtaatgatagcgtgattgtgatgacctttgttttatacctccttttacattccatattggaagaagagat

SEQ ID NO: 130904 - DNA, 120 bp, Artificial Sequence
  ENSG00000102547_40 (sequence is synthesized)
gagtatatctaagtgtttcagaatacactcaaattccagaatacgtctgcaatagtgccaggcacatagtagatcttcagtggatattgaatgaatcgtgacaaatgatatgaagcccca

SEQ ID NO: 130905 - DNA, 120 bp, Artificial Sequence
  ENSG00000102554_0 (sequence is synthesized)
agtcgcggggcaggtacgtgcgctcgcggttctctcgcggaggtcggcggtggcgggagcgggctccggagagcctgagagcacggtggggcggggcgggagaaagtggccgcccggagg

SEQ ID NO: 130906 - DNA, 120 bp, Artificial Sequence
  ENSG00000102554_1 (sequence is synthesized)
acgttggcgtttacgtgtggaagagcggaagagttttgcttttcgtgcgcgccttcgaaaactgcctgccgctgtctgaggagtccacccgaaacctcccctcctccgccggcagccccg

SEQ ID NO: 130907 - DNA, 120 bp, Artificial Sequence
  ENSG00000102554_2 (sequence is synthesized)
cgctgagctcgccgacccaagccagcgtgggcgaggtgggaagtgcgcccgacccgcgcctggagctgcgcccccgagtgcccatggctacaagggtgctgagcatgagcgcccgcctgg

SEQ ID NO: 130908 - DNA, 120 bp, Artificial Sequence
  ENSG00000102554_3 (sequence is synthesized)
gacccgtgccccagccgccggcgccgcaggacgagccggtgttcgcgcagctcaagccggtgctgggcgccgcgaatccggcccgcgacgcggcgctcttccccggcgaggagctgaagc

SEQ ID NO: 130909 - DNA, 120 bp, Artificial Sequence
  ENSG00000102554_4 (sequence is synthesized)
gcaccaccgcccgcaggcgcagcccgcgcccgcgcaggccccgcagccggcccagccgcccgccaccggcccgcggctgcctccagaggacctggtccagacaagatgtgaaatggagaa

SEQ ID NO: 130910 - DNA, 120 bp, Artificial Sequence
  ENSG00000102554_5 (sequence is synthesized)
agaagtatctgacacctcagcttcctccagttcctataattccagagcataaaaagtatagacgagacagtgcctcagtcgtagaccagttcttcactgacactgaagggttaccttaca

SEQ ID NO: 130911 - DNA, 120 bp, Artificial Sequence
  ENSG00000102554_6 (sequence is synthesized)
gtatcaacatgaacgtcttcctccctgacatcactcacctgagaactggcctctacaaatcccagagaccgtgcgtaacacacatcaagacagaacctgttgccattttcagccaccaga

SEQ ID NO: 130912 - DNA, 120 bp, Artificial Sequence
  ENSG00000102554_7 (sequence is synthesized)
gtgaaacgactgcccctcctccggccccgacccaggccctccctgagttcaccagtatattcagctcacaccagaccgcagctccagaggtgaacaatattttcatcaaacaagaacttc

SEQ ID NO: 130913 - DNA, 120 bp, Artificial Sequence
  ENSG00000102554_8 (sequence is synthesized)
ctacaccagatcttcatctttctgtccctacccagcagggccacctgtaccagctactgaatacaccggatctagatatgcccagttctacaaatcagacagcagcaatggacactctta

SEQ ID NO: 130914 - DNA, 120 bp, Artificial Sequence
  ENSG00000102554_9 (sequence is synthesized)
atgtttctatgtcagctgccatggcaggccttaacacacacacctctgctgttccgcagactgcagtgaaacaattccagggcatgcccccttgcacatacacaatgccaagtcagtttc

SEQ ID NO: 130915 - DNA, 120 bp, Artificial Sequence
  ENSG00000102554_10 (sequence is synthesized)
ttccacaacaggccacttactttcccccgtcaccaccaagctcagagcctggaagtccagatagacaagcagagatgctccagaatttaaccccacctccatcctatgctgctacaattg

SEQ ID NO: 130916 - DNA, 120 bp, Artificial Sequence
  ENSG00000102554_11 (sequence is synthesized)
cttctaaactggcaattcacaatccaaatttacccaccaccctgccagttaactcacaaaacatccaacctgtcagatacaatagaaggagtaaccccgatttggagaaacgacgcatcc

SEQ ID NO: 130917 - DNA, 120 bp, Artificial Sequence
  ENSG00000102554_12 (sequence is synthesized)
actactgcgattaccctggttgcacaaaagtttataccaagtcttctcatttaaaagctcacctgaggactcacactggtgaaaagccatacaagtgtacctgggaaggctgcgactgga

SEQ ID NO: 130918 - DNA, 120 bp, Artificial Sequence
  ENSG00000102554_13 (sequence is synthesized)
cctgcatatgaagaggcaccagaactgagcactgcccgtgtgacccgttccaggtcccctgggctccctcaaatgacagacctaactattcctgtgtaaaaacaacaaaaacaaacaaaa

SEQ ID NO: 130919 - DNA, 120 bp, Artificial Sequence
  ENSG00000102554_14 (sequence is synthesized)
gcaagaaaaccacaactaaaactggaaatgtatattttgtatatttgagaaaacagggaatacattgtattaataccaaagtgtttggtcattttaagaatctggaatgcttgctgtaat

SEQ ID NO: 130920 - DNA, 120 bp, Artificial Sequence
  ENSG00000102554_15 (sequence is synthesized)
gtatatggctttactcaagcagatctcatctcatgacaggcagccacgtctcaacatgggtaaggggtgggggtggaggggagtgtgtgcagcgtttttacctaggcaccatcatttaat

SEQ ID NO: 130921 - DNA, 120 bp, Artificial Sequence
  ENSG00000102554_16 (sequence is synthesized)
gtgacagtgttcagtaaacaaatcagttggcaggcaccagaagaagaatggattgtatgtcaagattttacttggcattgagtagtttttttcaatagtaggtaattccttagagataca

SEQ ID NO: 130922 - DNA, 120 bp, Artificial Sequence
  ENSG00000102554_17 (sequence is synthesized)
gtatacctggcaattcacaaatagccattgaacaaatgtgtgggtttttaaaaattatatacatatatgagttgcctatatttgctattcaaaattttgtaaatatgcaaatcagcttta

SEQ ID NO: 130923 - DNA, 120 bp, Artificial Sequence
  ENSG00000102554_18 (sequence is synthesized)
taggtttattacaagttttttaggattcttttggggaagagtcataattcttttgaaaataaccatgaatacacttacagttaggatttgtggtaaggtacctctcaacattaccaaaat

SEQ ID NO: 130924 - DNA, 120 bp, Artificial Sequence
  ENSG00000102554_19 (sequence is synthesized)
catttctttagagggaaggaataatcattcaaatgaactttaaaaaagcaaatttcatgcactgattaaaataggattattttaaatacaaaaggcattttatatgaattataaactgaa

SEQ ID NO: 130925 - DNA, 120 bp, Artificial Sequence
  ENSG00000102554_20 (sequence is synthesized)
gagcttaaagatagttacaaaatacaaaagttcaacctcttacaataagctaaacgcaatgtcatttttaaaaagaaggacttagggtgtcgttttcacatatgacaatgttgcatttat

SEQ ID NO: 130926 - DNA, 120 bp, Artificial Sequence
  ENSG00000102554_21 (sequence is synthesized)
gatgcagtttcaagtaccaaaacgttgaattgatgatgcagttttcatatatcgagatgttcgctcgtgcagtactgttggttaaatgacaatttatgtggattttgcatgtaatacaca

SEQ ID NO: 130927 - DNA, 120 bp, Artificial Sequence
  ENSG00000102554_22 (sequence is synthesized)
gtgagacacagtaattttatctaaattacagtgcagtttagttaatctattaatactgactcagtgtctgcctttaaatataaatgatatgttgaaaacttaaggaagcaaatgctacat

SEQ ID NO: 130928 - DNA, 120 bp, Artificial Sequence
  ENSG00000102554_23 (sequence is synthesized)
atatgcaatataaaatagtaatgtgatgctgatgctgttaaccaaagggcagaataaataagcaaaatgccaaaaggggtcttaattgaaatgaaaatttaattttgtttttaaaatatt

SEQ ID NO: 130929 - DNA, 120 bp, Artificial Sequence
  ENSG00000102554_24 (sequence is synthesized)
ttatttattttgtggtaatatagtaagtttttttagaagacaattttcataacttgataaattatagttttgtttgttagaaaagttgctcttaaaagatgtaaatagatgacaaacgat

SEQ ID NO: 130930 - DNA, 120 bp, Artificial Sequence
  ENSG00000102554_25 (sequence is synthesized)
caaacgatgtaaataattttgtaagaggcttcaaaatgtttatacgtggaaacacacctacatgaaaagcagaaatcggttgctgttttgcttctttttccctcttatttttgtattgtg

SEQ ID NO: 130931 - DNA, 120 bp, Artificial Sequence
  ENSG00000102554_26 (sequence is synthesized)
gtcatttcctatgcaaataatggagcaaacagctgtatagttgtagaattttttgagagaatgagatgtttatatattaacgacaattttttttttggaaaataaaaagtgcctaaaaga

SEQ ID NO: 130932 - DNA, 120 bp, Artificial Sequence
  ENSG00000102554_27 (sequence is synthesized)
actttagctcagacctttcttttaaccttgcctatcatgtttcgagtcagaatttaaatactgtgcagtttaagctacaatacgcttggcctataacttggttccaggcatttatattta

SEQ ID NO: 130933 - DNA, 120 bp, Artificial Sequence
  ENSG00000102554_28 (sequence is synthesized)
tcagtaccagactattttgcttcaatctgcaaaaggaaggtgtgtgaaggtgaaaagccatacaagtgtacctgggaaggctgcgactggaggttcgcgcgatcggatgagctgacccgc

SEQ ID NO: 130934 - DNA, 120 bp, Artificial Sequence
  ENSG00000102572_0 (sequence is synthesized)
gcgggcctcgccgccccgcgcggatcgtcgcggcccggccgtcccgtcccaggaagtggccgtcctgagcgccatggctcactccccggtgcagtcgggcctgcccggcatgcagaacct

SEQ ID NO: 130935 - DNA, 120 bp, Artificial Sequence
  ENSG00000102572_1 (sequence is synthesized)
acctaaaggcagacccagaagagctttttacaaaactagagaaaattgggaagggctcctttggagaggtgttcaaaggcattgacaatcggactcagaaagtggttgccataaagatca

SEQ ID NO: 130936 - DNA, 120 bp, Artificial Sequence
  ENSG00000102572_2 (sequence is synthesized)
ttgatctggaagaagctgaagatgagatagaggacattcaacaagaaatcacagtgctgagtcagtgtgacagtccatatgtaaccaaatattatggatcctatctgaaggatacaaaat

SEQ ID NO: 130937 - DNA, 120 bp, Artificial Sequence
  ENSG00000102572_3 (sequence is synthesized)
tatggataataatggaatatcttggtggaggctccgcactagatctattagaacctggcccattagatgaaacccagatcgctactatattaagagaaatactgaaaggactcgattatc

SEQ ID NO: 130938 - DNA, 120 bp, Artificial Sequence
  ENSG00000102572_4 (sequence is synthesized)
tccattcggagaagaaaatccacagagacattaaagcggccaacgtcctgctgtctgagcatggcgaggtgaagctggcggactttggcgtggctggccagctgacagacacccagatca

SEQ ID NO: 130939 - DNA, 120 bp, Artificial Sequence
  ENSG00000102572_5 (sequence is synthesized)
aaaggaacaccttcgtgggcaccccattctggatggcacccgaggtcatcaaacagtcggcctatgactcgaaggcagacatctggtccctgggcataacagctattgaacttgcaagag

SEQ ID NO: 130940 - DNA, 120 bp, Artificial Sequence
  ENSG00000102572_6 (sequence is synthesized)
gggaaccacctcattccgagctgcaccccatgaaagttttattcctcattccaaagaacaacccaccgacgttggaaggaaactacagtaaacccctcaaggagtttgtggaggcctgtt

SEQ ID NO: 130941 - DNA, 120 bp, Artificial Sequence
  ENSG00000102572_7 (sequence is synthesized)
tgaataaggagccgagctttagacccactgctaaggagttattgaagcacaagtttatactacgcaatgcaaagaaaacttcctacttgaccgagctcatcgacaggtacaagagatgga

SEQ ID NO: 130942 - DNA, 120 bp, Artificial Sequence
  ENSG00000102572_8 (sequence is synthesized)
aggccgagcagagccatgacgactcgagctccgaggattccgacgcggaaacagatggccaagcctcggggggcagtgattctggggactggatcttcacaatccgagaaaaagatccca

SEQ ID NO: 130943 - DNA, 120 bp, Artificial Sequence
  ENSG00000102572_9 (sequence is synthesized)
agaatctcgagaatggagctcttcagccatcggacttggacagaaataagatgaaagacatcccgaagaggcctttctctcagtgtttatctacaattatttctcctctgtttgcagagt

SEQ ID NO: 130944 - DNA, 120 bp, Artificial Sequence
  ENSG00000102572_10 (sequence is synthesized)
tgaaggagaagagccaggcgtgcggagggaacttggggtccattgaagagctgcgaggggccatctacctagcggaggaggcgtgccctggcatctccgacaccatggtggcccagctcg

SEQ ID NO: 130945 - DNA, 120 bp, Artificial Sequence
  ENSG00000102572_11 (sequence is synthesized)
tgcagcggctccagagatactctctaagtggtggaggaacttcatcccactgaaattcctttggcatttggggttttgtttttccttttttccttcttcatcctcctccttttttaaaag

SEQ ID NO: 130946 - DNA, 120 bp, Artificial Sequence
  ENSG00000102572_12 (sequence is synthesized)
tcaacgagagccttcgctgactccaccgaagaggtgcgccactgggagccaccccagcgccaggcgcccgtccagggacacacacagtcttcactgtgctgcagccagatgaagtctctc

SEQ ID NO: 130947 - DNA, 120 bp, Artificial Sequence
  ENSG00000102572_13 (sequence is synthesized)
agatgggtggggagggtcagctccttccagcgatcattttattttattttattacttttgtttttaattttaaccatagtgcacatattccaggaaagtgtctttaaaaacaaaaacaaa

SEQ ID NO: 130948 - DNA, 120 bp, Artificial Sequence
  ENSG00000102572_14 (sequence is synthesized)
ccctgaaatgtatatttgggattatgataaggcaactaaagacatgaaacctcaggtatcctgctttaagttgataactccctctgggagctggagaatcgctctggtggatgggtgtac

SEQ ID NO: 130949 - DNA, 120 bp, Artificial Sequence
  ENSG00000102572_15 (sequence is synthesized)
agatttgtatataatgtcatttttacggaaaccctttcggcgtgcataaggaatcactgtgtacaaactggccaagtgcttctgtagataacgtcagtggagtaaatattcgacaggcca

SEQ ID NO: 130950 - DNA, 120 bp, Artificial Sequence
  ENSG00000102572_16 (sequence is synthesized)
taacttgagtctattgccttgcctttattacatgtacattttgaattctgtgaccagtgatttgggttttattttgtatttgcagggtttgtcattaataattaatgcccctctcttaca

SEQ ID NO: 130951 - DNA, 120 bp, Artificial Sequence
  ENSG00000102572_17 (sequence is synthesized)
gaacactcctatttgtacctcaacaaatgcaaattttccccgtttgccctacgccccttttggtacacctagaggttgatttcctttttcatcgatggtactatttcttagtgttttaaa

SEQ ID NO: 130952 - DNA, 120 bp, Artificial Sequence
  ENSG00000102572_18 (sequence is synthesized)
ttggaacatatcttgcctcatgaagctttaaattataattttcagtttctccccatgaagcgctctcgtctgacatttgtttggaatcgtgccactgctggtctgcgccagatgtaccgt

SEQ ID NO: 130953 - DNA, 120 bp, Artificial Sequence
  ENSG00000102572_19 (sequence is synthesized)
cctttccaatacgattttctgttgcaccttgtagtggattctgcatatcatctttcccacctaaaaatgtctgaatgcttacacaaataaattttataacacgcttattttgcatactcc

SEQ ID NO: 130954 - DNA, 120 bp, Artificial Sequence
  ENSG00000102572_20 (sequence is synthesized)
ttgaaatgtgactcttcagaggacagggcacctgctgtgtatgtgtggccgtgcgtgtgtactcgtggctgtgtgtgtgtgatgagacactttggaagactccagggagaagtccccagg

SEQ ID NO: 130955 - DNA, 120 bp, Artificial Sequence
  ENSG00000102572_21 (sequence is synthesized)
cctggagctgccgagtgcccaggtcagcgccctggactgcttgcgcacttgctcaccgagatgatgcagttggaggttgctgatctgtgcgattgctgtagcggttgccggggaccttaa

SEQ ID NO: 130956 - DNA, 120 bp, Artificial Sequence
  ENSG00000102572_22 (sequence is synthesized)
gagttattttgcttctctggaaggggcctatgcttgctaggcaggcagccagtgtgtctgtttttcttggtttgctgtgggaccttgcttggcgagggggaaaatctctgggtttctgga

SEQ ID NO: 130957 - DNA, 120 bp, Artificial Sequence
  ENSG00000102572_23 (sequence is synthesized)
gtgggagggttcgtgcagcagctgttgactggtacatgaagcattcttttatgtttgttgaagctgatgattgacatctcccgtgggtgtgccagttcttgtggagttaagacaggattt

SEQ ID NO: 130958 - DNA, 120 bp, Artificial Sequence
  ENSG00000102572_24 (sequence is synthesized)
ttggaagcaaggaagttagtgggtgagcttggggatgtagctcagctatctgctggtctagtggcctctaagctatagggaggggacagagccctgagctacagatgcttgagtgggtta

SEQ ID NO: 130959 - DNA, 120 bp, Artificial Sequence
  ENSG00000102572_25 (sequence is synthesized)
ttgtgtcggtttgctagtgcagtctggtttttaagctctaaaattgaggtattttattagaagtggatttgggttgaactcttaatttgtataagggatatattttggttggggaaatag

SEQ ID NO: 130960 - DNA, 120 bp, Artificial Sequence
  ENSG00000102572_26 (sequence is synthesized)
aactgagttgctaattcttattgtactcattactccatacaagaatgttatgttgaataataaaattggagaagatttcattttgtgtttccagggagtattctgtgtggggaactgttt

SEQ ID NO: 130961 - DNA, 120 bp, Artificial Sequence
  ENSG00000102572_27 (sequence is synthesized)
ccttacgtgaggccggcggcataagtcaaagatgagttttgtccttgcgaatcacacagattgagtctgtgttccccagggtgtgccgttacctgatttttaagtgagccagggcggaca

SEQ ID NO: 130962 - DNA, 120 bp, Artificial Sequence
  ENSG00000102572_28 (sequence is synthesized)
gcagcttttctgatttacagagttcttcagatttacaaatggacaatgacatcacagtttttagcactgaagccagtctcatgctagtaacagtgggtgagccgctcgagggactgggtt

SEQ ID NO: 130963 - DNA, 120 bp, Artificial Sequence
  ENSG00000102572_29 (sequence is synthesized)
ctaatgaatactggtatgaacggggagtctctgcagtcgccagacaaatcatactcagccccttcccccgtagagcaacaagtggttcttttagagttgactggcagcatttcctgtcgg

SEQ ID NO: 130964 - DNA, 120 bp, Artificial Sequence
  ENSG00000102572_30 (sequence is synthesized)
gggaggtggggtttgatggagttagaaagctcgcctctgtgtacattctctcctgggctgttactttctgtagacgcacaaaatcagccccaatgtttttaagggcatcttagccaagga

SEQ ID NO: 130965 - DNA, 120 bp, Artificial Sequence
  ENSG00000102572_31 (sequence is synthesized)
agctggcttttgtgtcgccacttccaggcctgcattaagagagagcccaggcaccagggctaccactggaacctgcctcagcgtcaactgctgctggtctgtagccaggcccagcctttg

SEQ ID NO: 130966 - DNA, 120 bp, Artificial Sequence
  ENSG00000102572_32 (sequence is synthesized)
agacgggtttactgtcaccagtagcctctcagtgccagccctgagctgctcctggctcagctgcccagagcctgcagcctggggaggtactcagcctctgggagacgagggccgtggact

SEQ ID NO: 130967 - DNA, 120 bp, Artificial Sequence
  ENSG00000102572_33 (sequence is synthesized)
gggtggctggtagctcctgcgtttttgagctgtgtcctggctggctgctgccaatgaggtggacaccagtgtggtttggggtgcactggccacttcttgctgggttctgattttcttgga

SEQ ID NO: 130968 - DNA, 120 bp, Artificial Sequence
  ENSG00000102572_34 (sequence is synthesized)
agtgcatctgccttccttatccaatagttttatccctgcattgctcttgtgaagtggctggtttggttctgtatgtagcattttgtacctttcctctggcaaaacactgtcagtttataa

SEQ ID NO: 130969 - DNA, 120 bp, Artificial Sequence
  ENSG00000102572_35 (sequence is synthesized)
acattttttatatttccctcctttaaaaacagcttgtgtatttctgctataaaatgtgtcagcaaaggcagagtgacctaatagggcatgttcttaagcacagggactgtatcatgcagg

SEQ ID NO: 130970 - DNA, 120 bp, Artificial Sequence
  ENSG00000102572_36 (sequence is synthesized)
ggccaataaagctcaagaaaacgagtatctgcatcattgtgtgtctcatgtgtagtgtgtctcaaactccactcagatggactgttacccacactagtattttcttgagggcacacagga

SEQ ID NO: 130971 - DNA, 120 bp, Artificial Sequence
  ENSG00000102572_37 (sequence is synthesized)
agcagaggtgctggtcacaggtcagaaccaccagtgtccagcaagtagtttggaatcaatcaatcattcagaaataaatagctgaggagactgccttgtccccaagtctccaggaatgag

SEQ ID NO: 130972 - DNA, 120 bp, Artificial Sequence
  ENSG00000102572_38 (sequence is synthesized)
tgagtggtgacttctggagggagcctgatgctgctgtgtggcccggagctgtttgtttgctctgcccctgcctggaggtggggggagcatagggaacagtggggggcaggccctccctgt

SEQ ID NO: 130973 - DNA, 120 bp, Artificial Sequence
  ENSG00000102572_39 (sequence is synthesized)
tcactctgaacactggggctttagaaacccttgctggagtgtccccttcccccctccccccccacacagaaaatgaagactacagacaaagttggttgttttgccttaaaacatcaatat

SEQ ID NO: 130974 - DNA, 120 bp, Artificial Sequence
  ENSG00000102572_40 (sequence is synthesized)
gctggattgtggcgtgaggtatttttattccctttgttagtactggaaaccgtctggtacatcttgtaaggcaaatgattaacacacggcaggctcttcgtccgtttgcaagttgctgtt

SEQ ID NO: 130975 - DNA, 120 bp, Artificial Sequence
  ENSG00000102572_41 (sequence is synthesized)
tgtttccagctacaccagtcagagctccacagagagggtgcgttcctggttctcaggtgggcaggtgctatggtgcggggcgctggaaagaatggggttgaattggccctcgcctccgct

SEQ ID NO: 130976 - DNA, 120 bp, Artificial Sequence
  ENSG00000102572_42 (sequence is synthesized)
tgtttgagactctcgttagaaagggcttaggaaaaccaagggaatggcagccaccccatcaccatcgagaacaggcagacgtttcccgagtaggggccaaagccactggaaaccgtgttc

SEQ ID NO: 130977 - DNA, 120 bp, Artificial Sequence
  ENSG00000102572_43 (sequence is synthesized)
cctgtgcagtccgactgacactaccccatgcctggggggaatgagtataaaaagggaaatgtttttgaagacaggcacgatatatactactagagaatgcgcagtttcaaaccacagttg

SEQ ID NO: 130978 - DNA, 120 bp, Artificial Sequence
  ENSG00000102572_44 (sequence is synthesized)
caggaggatataggaataacgacaggtgccggggactacgtaccatgatttcatagtgctctgcagccagcaggctcactaaacgctcatcacggaacataccacaaatggtgctgatca

SEQ ID NO: 130979 - DNA, 120 bp, Artificial Sequence
  ENSG00000102572_45 (sequence is synthesized)
atgacacacgggttttcatgcttgtgacacagacagacagcaaaacaccacggcttattatcttcccattgtgtacaccactcacaggacggtgacagtccaggtattgcactggatctc

SEQ ID NO: 130980 - DNA, 120 bp, Artificial Sequence
  ENSG00000102572_46 (sequence is synthesized)
ggctttgcttaacagaaaacaaccctgctacggttggaaagagttaccacttaaaacgatttggtcaacttgcaccaagaagtaggttgggaacaggtgttttcaggtgagcgtgaaacc

SEQ ID NO: 130981 - DNA, 120 bp, Artificial Sequence
  ENSG00000102572_47 (sequence is synthesized)
ccgcagtggaacgctgtgtgctgcaaattgcttattaatcagagaagtgagtcctactaacttcctattattacaaaagtagaaagactgaaaaaaaaaatgaaatctgaaaatgatctc

SEQ ID NO: 130982 - DNA, 120 bp, Artificial Sequence
  ENSG00000102572_48 (sequence is synthesized)
atttgcttaaggctgcactgagtgtattgcaaacaaacaaacaaacaccgggaagtccacttcgtaaaatgcagcagccaataggtgaaaataataaaagaaagaactttttttaggaag

SEQ ID NO: 130983 - DNA, 120 bp, Artificial Sequence
  ENSG00000102572_49 (sequence is synthesized)
aaaaacacttgccctgtcttgtgttgaacggatgtgtgtgtactgtttttcaggggcagggtggagggaagatgtcatttggcactctcgtaatgacaatgttttaatactggcactagc

SEQ ID NO: 130984 - DNA, 120 bp, Artificial Sequence
  ENSG00000102572_50 (sequence is synthesized)
taaagaacagcgcccccagcggatgccaggactggaggtgggagcgctgttcattcagacgctgagaggtcggggttaaaaaacgcggctgtggagacaggagagctgctgggaagccat

SEQ ID NO: 130985 - DNA, 120 bp, Artificial Sequence
  ENSG00000102572_51 (sequence is synthesized)
gtttttgattttcagacaggtgttaattttaccaggcttcattaatacagaagaaaggaaacgtcttccaggaaagcagccactgcggaaacgagtgtgtccggccatcaatacacaaga

SEQ ID NO: 130986 - DNA, 120 bp, Artificial Sequence
  ENSG00000102572_52 (sequence is synthesized)
gactctttgtgactcaacacgtggggtcgcgaggcagagctggtggcactgcggatcacttccatccacctgcaacacgggaacgccagttagtcaaccttttgtttggacggactcctg

SEQ ID NO: 130987 - DNA, 120 bp, Artificial Sequence
  ENSG00000102572_53 (sequence is synthesized)
acactttggtgggcatcgcttacagaaacacaaggtgaagtcaggccgcctggttggtaatctgccacttcagcagaagagcaagggaacagccagcacccaggcgttcctgaggtacag

SEQ ID NO: 130988 - DNA, 120 bp, Artificial Sequence
  ENSG00000102572_54 (sequence is synthesized)
tggagacccactggcctgggcactcactcagtgtggagctggaagtaccttgctgcagtgacactgcccgctccattggagcagttaggagcgaggtggcctctggttgctggggagaac

SEQ ID NO: 130989 - DNA, 120 bp, Artificial Sequence
  ENSG00000102572_55 (sequence is synthesized)
gaacgctacctcctattttcatggacatggcagagaatggcgggacgtgtcccatcctgcttagtggaagctctcccttccttttttctttttcttttttttttgagacagggtctggct

SEQ ID NO: 130990 - DNA, 120 bp, Artificial Sequence
  ENSG00000102572_56 (sequence is synthesized)
cactcatactggagttcagtggtgcagttatcgcccactgtagctacctcctgggctcaatcgatcctccagccttggcctcccaggagatgggactacaggcttgcaccaccacgccca

SEQ ID NO: 130991 - DNA, 120 bp, Artificial Sequence
  ENSG00000102572_57 (sequence is synthesized)
aatctccctttttatatatttgtgtatttgctctctaccggtgcttctcaaatgggtgcaatgctgtcccatttggtaaagtctggagacatttttagatgtcccaactgaggggttgct

SEQ ID NO: 130992 - DNA, 120 bp, Artificial Sequence
  ENSG00000102572_58 (sequence is synthesized)
gcgggcatctagtgggtggccagggatgccgctgaacatcctgcacaatgcaggacggactccccaaattacctggccttgtcccaggcctttcaggatctggactgcaaggctggaccc

SEQ ID NO: 130993 - DNA, 120 bp, Artificial Sequence
  ENSG00000102572_59 (sequence is synthesized)
tttgtcacaataatagcaaaatcccaactttgatcaacccagctctcaacccagctctcgagctcagtccaggatcagatttgagaatggctctcctctaggttcctttttcaggtgatg

SEQ ID NO: 130994 - DNA, 120 bp, Artificial Sequence
  ENSG00000102572_60 (sequence is synthesized)
ttgtttaggaggtgctcagcatattgctgaggacccctccccttctgcctcccggggcgaggagggctcagcagggcaaactgcacaagtagtcggcttggggatgcaatttgcagaggc

SEQ ID NO: 130995 - DNA, 120 bp, Artificial Sequence
  ENSG00000102572_61 (sequence is synthesized)
ccaggatctctattcaaaatatgaattgcaggaacagtcttaggcctgactgttgcatttctttcttggctaaatgaagtctgcagtccctgccattacaccatgtaggcagtctcactg

SEQ ID NO: 130996 - DNA, 120 bp, Artificial Sequence
  ENSG00000102572_62 (sequence is synthesized)
gggcttagcttcatcatcccggacacgttatgtcagagatctccaagcaagatgtctagggcctcagccaacaccgtgcagggtaagggcgcagggaagttgggaccccactttctgcca

SEQ ID NO: 130997 - DNA, 120 bp, Artificial Sequence
  ENSG00000102572_63 (sequence is synthesized)
tgagaacagaatcgcctgctggtgtcgggcagtgggaccccaggtctaaacgcttagttggcagggaagggtggggccatctcactcgctgacttgggagaaatcctgatgtttggaaga

SEQ ID NO: 130998 - DNA, 120 bp, Artificial Sequence
  ENSG00000102572_64 (sequence is synthesized)
gggggtcctcttctgcagggccctgtgcgtgggaagggggtgtctacctttcgaacgtgtactcgctttccgccctgaagtagtagacgtgggacttgaagtgcagcttgaacacgtagt

SEQ ID NO: 130999 - DNA, 120 bp, Artificial Sequence
  ENSG00000102572_65 (sequence is synthesized)
ctttctggatgttctcggactcagaggggatggtgagcgagtagccgagcagaggcaggctggcaaggggatgattgtcctggaaaggggaaacaaagcaaagtggcttttcggggtcag

SEQ ID NO: 131000 - DNA, 120 bp, Artificial Sequence
  ENSG00000102572_66 (sequence is synthesized)
cttctgctgctgggcctggctgctgccccgcatcagacagggacttgggagcccaggcagctccctcctcgggcgtgggcctggaagggaccatggcagccagtgtttgcctgtacgtga

SEQ ID NO: 131001 - DNA, 120 bp, Artificial Sequence
  ENSG00000102572_67 (sequence is synthesized)
tggcccgggtggcaagtcccgccaggactgagctgtagataaagccaacccccgtcccttgtccaggcagaagacaggtggcccttcctagggcagaagttgtccttcagtggatgataa

SEQ ID NO: 131002 - DNA, 120 bp, Artificial Sequence
  ENSG00000102572_68 (sequence is synthesized)
tgtcagtcttccctagagttgagggcctcgggtggacagggccccccgccagcatccctgtcatccccgtgacacctggagcccaagaggcctgagtcattccagaggagggcggccccc

SEQ ID NO: 131003 - DNA, 120 bp, Artificial Sequence
  ENSG00000102572_69 (sequence is synthesized)
tcacctcatgctgccacccccaaggtcccagggccacctgccctgtgcgagacacttacctggtgtgatttgtagaagaacaggcagaagtttgtgaacaccacccacagcttctgccac

SEQ ID NO: 131004 - DNA, 120 bp, Artificial Sequence
  ENSG00000102572_70 (sequence is synthesized)
ccgttgctgtttttgaatttcctcagcaggtttccagacaactgattctgaaaggcaaggaggcctgtgagaagcacagcgggcacctgccccaggagggcacagagagcagctctccct

SEQ ID NO: 131005 - DNA, 120 bp, Artificial Sequence
  ENSG00000102572_71 (sequence is synthesized)
gcaccagggccctgggctggggcatgtccgtgactgaaggatgtgggccccacccccgctcccccgtgtgtggggagacttggcaggtcctgggaccctgatctcatcacttccccttgt

SEQ ID NO: 131006 - DNA, 120 bp, Artificial Sequence
  ENSG00000102572_72 (sequence is synthesized)
cacttgctgtggggcatcttggggtccctgtgtccccccaaaagacacgttgaggtcctgactaccagtaccttagaacacaggcttatttggaaataggctcgttgcagggtaactagt

SEQ ID NO: 131007 - DNA, 120 bp, Artificial Sequence
  ENSG00000102572_73 (sequence is synthesized)
gaagacgagatcacactggggtagggtgggccctaaatccaacgggagtggtgtcctgaggagaagagccaccttgaggggagaggggtgtgccctgtgacaccgaggcagaaatggggg

SEQ ID NO: 131008 - DNA, 120 bp, Artificial Sequence
  ENSG00000102572_74 (sequence is synthesized)
cgcaggaccccatgcattgccagcaggcggaagctgaaggagggaaagatccatcccaacaagctcagagcagcactcgttttgaggggccaggcaccctacccaggaagtggggcctgg

SEQ ID NO: 131009 - DNA, 120 bp, Artificial Sequence
  ENSG00000102572_75 (sequence is synthesized)
ggtgcatgtgagtggctcccacatgccctctagtggcccaggaggcagttgcagccctgcccacctccaggctcagggccggcccagcccctggagcattgttaggatgcgctgcagccc

SEQ ID NO: 131010 - DNA, 120 bp, Artificial Sequence
  ENSG00000102572_76 (sequence is synthesized)
agctagggggcagggacaggcacctgtgtccatgctacctccaaacaactctgagcaggcctgacgcactggtggctcatttcgtccctttgccaaagtgacatcaccagcagagactca

SEQ ID NO: 131011 - DNA, 120 bp, Artificial Sequence
  ENSG00000102572_77 (sequence is synthesized)
aagcagttgcaccaccttgtaaaggcacttaatgccactgaattgttcccgtaaaaatcgttaagttggccaatattgtggtatagctattttaccacaataaaaaatacagacctccga

SEQ ID NO: 131012 - DNA, 120 bp, Artificial Sequence
  ENSG00000102572_78 (sequence is synthesized)
gacttagttgatgagtttggtacttgattcttggcctgtctgttcctgttatcttgcaggcctcagggtagacagagttgaattagaggagactttgttctgaattctagaaatcaatgt

SEQ ID NO: 131013 - DNA, 120 bp, Artificial Sequence
  ENSG00000102572_79 (sequence is synthesized)
gaatgaaggatctgaatctggaaactactggaaagcccacaggacttagtgcatttgtagcttttgccacataaatacagggtggtggtgaaatacctgtttcctcttaattatgcagct

SEQ ID NO: 131014 - DNA, 120 bp, Artificial Sequence
  ENSG00000102572_80 (sequence is synthesized)
taattattggccagagaatgatcgttcttagccagatgtgtgtaactatctatctggttttcggctttaaagtcaagtgtgagaaatgacagcagctttggtgtggtcaactcagcggga

SEQ ID NO: 131015 - DNA, 120 bp, Artificial Sequence
  ENSG00000102572_81 (sequence is synthesized)
gcgggcgcaggtgtgttccctgtgttagctgtgtgtgtcatgtctggaagcctccttggtaggggttcatctgtgccagcctgtagggagcttttgtccctgcccagtggccccacctgt

SEQ ID NO: 131016 - DNA, 120 bp, Artificial Sequence
  ENSG00000102572_82 (sequence is synthesized)
tgaatgcactatgggtgaggactcagtggggtgacagttttgccctccctgccccctcccaacttgttgtaggagtatccatgggaaccaagcccctcctgactgccatctggcacaagt

SEQ ID NO: 131017 - DNA, 120 bp, Artificial Sequence
  ENSG00000102572_83 (sequence is synthesized)
aggcagtggatgtgtgctgggaagccgctctgtgtgacctgagggtgatttgtcactgggctgtcctccacacccccaggaggaccaggcgtgctgctgccttgacagttcatcttcagg

SEQ ID NO: 131018 - DNA, 120 bp, Artificial Sequence
  ENSG00000102572_84 (sequence is synthesized)
tgtccaggctgacacctcccaaagctggctgagactctgtgatcatgagggggatttctgggtctttcctgagactgcgtcccacctgacagtacataaagaagttttgcacacgtgagg

SEQ ID NO: 131019 - DNA, 120 bp, Artificial Sequence
  ENSG00000102572_85 (sequence is synthesized)
tcccttttgctatttggaagtgattgaaggggctgcctactgtcctgtgaagagcccctctacgtggggacagcaggagaaaaccacagttctgatacttcacgtttatgcttctgaact

SEQ ID NO: 131020 - DNA, 120 bp, Artificial Sequence
  ENSG00000102572_86 (sequence is synthesized)
cgggtttcttagtaagacatttcaactttttaagttgctagaaaataaaaatgatctacttggctgccttcaattttgaggcaattgaaggacgatccctccctcctttgatactaaaaa

SEQ ID NO: 131021 - DNA, 120 bp, Artificial Sequence
  ENSG00000102572_87 (sequence is synthesized)
caatataggaataaaggaaaatagaattaaaaagtcacccatcttttgcctgaacacaaactttttgatttctcaaacttagcatcacatacctcattctagaggcatttatttcccatt

SEQ ID NO: 131022 - DNA, 120 bp, Artificial Sequence
  ENSG00000102572_88 (sequence is synthesized)
agaaagagctttataataaaacaaatagaacaaaaccagaaacgggtaggattgttactgtcttgttgggcattttgctctctgcttttgtagtattacttttaaaaccaatactttcca

SEQ ID NO: 131023 - DNA, 120 bp, Artificial Sequence
  ENSG00000102572_89 (sequence is synthesized)
cactgtccagaattgcctgaaattgttatgaactgtttgtttatatacgtgacttgatttccccagggcagctccagggcacagagtgtgtggcttgtatgtgttgaactgatccacgtt

SEQ ID NO: 131024 - DNA, 120 bp, Artificial Sequence
  ENSG00000102572_90 (sequence is synthesized)
tcccattcccaggcccctatctctctgttcctcttcttttagttgttaaggcaagttgatctgtaccagtgctggccagtagaagtacagcgtgggccacacacagaattttatgttttc

SEQ ID NO: 131025 - DNA, 73 bp, Artificial Sequence
  ENSG00000102572_91 (sequence is synthesized)
agaagtacagcgtgggccacacacagaattttatgttttctcaggcaggaggatcgcttgaggccaagagttt

SEQ ID NO: 131026 - DNA, 80 bp, Artificial Sequence
  ENSG00000102572_92 (sequence is synthesized)
ctgtgcgcgcccactccggctccagcggccagcgcgcgcgggcccaggccgcccggctccagcccagcagtagcggcagc

SEQ ID NO: 131027 - DNA, 80 bp, Artificial Sequence
  ENSG00000102572_93 (sequence is synthesized)
cggcggcagtgcgcgcgaggccctgcgcccccagcagctcctccctggcgccgtgcatggagacgcggcccgccacccgc

SEQ ID NO: 131028 - DNA, 120 bp, Artificial Sequence
  ENSG00000102572_94 (sequence is synthesized)
gtaaccgcgagttccacttgcagtggctttgcccggagcccccgtgcacctgcggaccgggggaaagtgcgagttgcaaaccttctggaaggaggaatccctcggacagccgcgcaccag

SEQ ID NO: 131029 - DNA, 120 bp, Artificial Sequence
  ENSG00000102572_95 (sequence is synthesized)
ggcaaagctgaagaatggacttcaaagcagagaaggtgtgaattgttttaagtgggagcttcatgggaataaaatatgaggcgtggccctgaagggaccttggggccagcttgcggtaag

SEQ ID NO: 131030 - DNA, 120 bp, Artificial Sequence
  ENSG00000102572_96 (sequence is synthesized)
tttgggttagggagagtgctttcgtttgttttaaatgggagaaactggagcatgttgccaagggcagagagccagcagagaggggtgaatggaagaaggagcgagaagggggttactgac

SEQ ID NO: 131031 - DNA, 120 bp, Artificial Sequence
  ENSG00000102575_0 (sequence is synthesized)
gccggggctcacctgggtcagccctgagccctcgagcagggcggatcggccgctgcctgcttaaagctggggccgccaggagtgcgatcgcctgcggatctgcagctgggcaccggccgc

SEQ ID NO: 131032 - DNA, 120 bp, Artificial Sequence
  ENSG00000102575_1 (sequence is synthesized)
aacgcccgccccgcgacggcagggactgaagggactcctgaatgtccgcgggacgtgtcgcggcggcgcccagcacggaggaggcaggcagggagggaataaaggctcagggaccggcag

SEQ ID NO: 131033 - DNA, 120 bp, Artificial Sequence
  ENSG00000102575_2 (sequence is synthesized)
ttctactctagagcccaccagcctctcagagcctccggtgactggcctgtgtctccccctggatggacatgtggacggcgctgctcatcctgcaagccttgttgctaccctccctggctg

SEQ ID NO: 131034 - DNA, 120 bp, Artificial Sequence
  ENSG00000102575_3 (sequence is synthesized)
atggtgccacccctgccctgcgctttgtagccgtgggtgactggggaggggtccccaatgccccattccacacggcccgggaaatggccaatgccaaggagatcgctcggactgtgcaga

SEQ ID NO: 131035 - DNA, 120 bp, Artificial Sequence
  ENSG00000102575_4 (sequence is synthesized)
tcctgggtgcagacttcatcctgtctctaggggacaatttttacttcactggtgtgcaagacatcaatgacaagaggttccaggagacctttgaggacgtattctctgaccgctcccttc

SEQ ID NO: 131036 - DNA, 120 bp, Artificial Sequence
  ENSG00000102575_5 (sequence is synthesized)
gcaaagtgccctggtacgtgctagccggaaaccatgaccaccttggcaatgtctctgcccagattgcatactctaagatctccaagcgctggaacttccccagccctttctaccgcctgc

SEQ ID NO: 131037 - DNA, 120 bp, Artificial Sequence
  ENSG00000102575_6 (sequence is synthesized)
ctcagatgacttcctcagccagcagcctgagaggccccgagacgtgaagctggcccgcacacagctgtcctggctcaagaaacagctggcggcggccagggaggactacgtgctggtggc

SEQ ID NO: 131038 - DNA, 120 bp, Artificial Sequence
  ENSG00000102575_7 (sequence is synthesized)
tggccactaccccgtgtggtccatagccgagcacgggcctacccactgcctggtcaagcagctacggccactgctggccacatacggggtcactgcctacctgtgcggccacgatcacaa

SEQ ID NO: 131039 - DNA, 120 bp, Artificial Sequence
  ENSG00000102575_8 (sequence is synthesized)
tctgcagtacctgcaagatgagaatggcgtgggctacgtgctgagtggggctgggaatttcatggacccctcaaagcggcaccagcgcaaggtccccaacggctatctgcgcttccacta

SEQ ID NO: 131040 - DNA, 120 bp, Artificial Sequence
  ENSG00000102575_9 (sequence is synthesized)
tgggactgaagactcactgggtggctttgcctatgtggagatcagctccaaagagatgactgtcacttacatcgaggcctcgggcaagtccctctttaagaccaggctgccgaggcgagc

SEQ ID NO: 131041 - DNA, 120 bp, Artificial Sequence
  ENSG00000102575_10 (sequence is synthesized)
caggccctgaactcccatgactgcccagctctgaggcccgatctccactgttgggtgggtgggccctgccgggaccctgctcacaggcaggcttttcctccaacctgtggcgctgcagca

SEQ ID NO: 131042 - DNA, 120 bp, Artificial Sequence
  ENSG00000102575_11 (sequence is synthesized)
gggcaggaaggggaaacacagctgatgaactgtggtgccacatgacccttgtggcacagatgcccacgtatgtgaaacacacatggacatgtgtcccagccacagtgttatgctctgtgg

SEQ ID NO: 131043 - DNA, 120 bp, Artificial Sequence
  ENSG00000102575_12 (sequence is synthesized)
ctggctcacctttgctgagttccggggtgcaatgggggagggagggagggaaagcttcctcctaaatcaagcatctttctgttactgatgttcaataaaagaatagttgccaaggctgaa

SEQ ID NO: 131044 - DNA, 120 bp, Artificial Sequence
  ENSG00000102575_13 (sequence is synthesized)
cgccccgcgacggcagggctgggaatgggggggaccaagcacttcgcagggtgacccggggagatctgtgagccagtggcctcagcgttgaatgagagctctctcccgggtccgcgctcg

SEQ ID NO: 131045 - DNA, 120 bp, Artificial Sequence
  ENSG00000102575_14 (sequence is synthesized)
tcgccctctcacagaccgcgccccccttccctaagccagcttgtgcagccttgtgcagcttgtgtgtcctgagaattagggcaccaaggggttcccgcaggggcagcctgcagcaagcag

SEQ ID NO: 131046 - DNA, 120 bp, Artificial Sequence
  ENSG00000102575_15 (sequence is synthesized)
tctccctctatctcagggcaggcgggggtctcaaggcctccctgcccttgtcacagcccgggccacctatgcttgtctctcttctcccagatggacatgtggacggcgctgctcatcctg

SEQ ID NO: 131047 - DNA, 120 bp, Artificial Sequence
  ENSG00000102575_16 (sequence is synthesized)
gcgccgggagcattcagtgtctcccttatcctgacttggtgggaggatcggcatagccactgaccccagggaagaggcctgccctatctgtttgctacaggagacctttgaggacgtatt

SEQ ID NO: 131048 - DNA, 120 bp, Artificial Sequence
  ENSG00000102575_17 (sequence is synthesized)
aggcctcgcaggctcagcatacatgtctgcagcaacaccatcaggtacagagccgaggcccaggtaggcatgctcagctgcacgcaggaagcaagacacacccagacacacacaggtaag

SEQ ID NO: 131049 - DNA, 120 bp, Artificial Sequence
  ENSG00000102575_18 (sequence is synthesized)
ctcacactgagatacacagacacacagagatacctggacgtgtcaagcctacagcacaaacaggcccctgcaggtccacccggaggctgtgtgggccgaggctgctgcacacgtgtgccc

SEQ ID NO: 131050 - DNA, 120 bp, Artificial Sequence
  ENSG00000102575_19 (sequence is synthesized)
agatcctcccacccccaccccaatcccgtgtcctgctccagggaagtccagggctcacatgacccaaggggagggctcccgggacagccctcggagaaactgcatcatcctcactaatga

SEQ ID NO: 131051 - DNA, 120 bp, Artificial Sequence
  ENSG00000102575_20 (sequence is synthesized)
acatcaatgacaagaggttccaggtctgtgcccaacagagtggggcaggaggtgggggcgggcagtggggagaagccgccttacctagtgaccttcctttggtgagggcagagggaaggt

SEQ ID NO: 131052 - DNA, 120 bp, Artificial Sequence
  ENSG00000102575_21 (sequence is synthesized)
gctggtgagccaccctcagccctgccttccgagatcctcacatagcagggacacaggggccctgtggcttgagctgaccctgggacttctgcgcccaagatgtgcacccacgacctctat

SEQ ID NO: 131053 - DNA, 120 bp, Artificial Sequence
  ENSG00000102575_22 (sequence is synthesized)
ctctcagagcctccggtgactggcctgtgtctccccctggatggacatgtggacggcgctgctcatcctgcaagccttgttgctaccctccctgggaatttcatggacccctcaaagcgg

SEQ ID NO: 131054 - DNA, 120 bp, Artificial Sequence
  ENSG00000102580_0 (sequence is synthesized)
agagccactgaggcctgagcgagagccgacggcgggcgggcgcagctgctgccggagcgccggcgcgtgctggtgggccacacacctttcctcctcttcactcgcgagccctcggacatg

SEQ ID NO: 131055 - DNA, 120 bp, Artificial Sequence
  ENSG00000102580_1 (sequence is synthesized)
gtggcccccggctccgtgaccagccggctgggctcggtattccccttcctgctagtcctggtggatctgcagtacgaaggtgctgaatgtggagtaaatgcagatgttgagaaacatctt

SEQ ID NO: 131056 - DNA, 120 bp, Artificial Sequence
  ENSG00000102580_2 (sequence is synthesized)
gaattgggcaagaaattacttgcagctggacagctagctgatgctttatctcagtttcatgctgccgtagatggtgaccctgataactatattgcttattatcggagggctactgtcttt

SEQ ID NO: 131057 - DNA, 120 bp, Artificial Sequence
  ENSG00000102580_3 (sequence is synthesized)
ttagctatgggcaaatcaaaagctgcacttcctgatttaactaaagtgattcaattgaagatggacttcactgcagcaagattacagagaggtcacttattactcaaacaaggaaaactt

SEQ ID NO: 131058 - DNA, 120 bp, Artificial Sequence
  ENSG00000102580_4 (sequence is synthesized)
gatgaagcagaagatgattttaaaaaagtgctcaaatctaatccaagtgaaaatgaagaaaaggaagcacagtctcaacttataaaatctgatgaaatgcagcgtttgcgttcacaagca

SEQ ID NO: 131059 - DNA, 120 bp, Artificial Sequence
  ENSG00000102580_5 (sequence is synthesized)
cttaacgcttttggaagtggagattatactgctgctatagccttccttgataagattttagaggtttgtgtttgggatgcagaactacgggaacttcgagctgaatgttttataaaagaa

SEQ ID NO: 131060 - DNA, 120 bp, Artificial Sequence
  ENSG00000102580_6 (sequence is synthesized)
ggagaacctaggaaagctataagtgacttaaaagctgcgtcaaagttgaagaatgataatactgaagcgttttataaaataagcacactgtactaccaactaggagaccacgaactgtcc

SEQ ID NO: 131061 - DNA, 120 bp, Artificial Sequence
  ENSG00000102580_7 (sequence is synthesized)
ctcagtgaagttcgggaatgtcttaaacttgaccaggatcataaaaggtgttttgcacactataaacaagtaaagaaacttaataagctgattgagtcagctgaagagctcatcagagat

SEQ ID NO: 131062 - DNA, 120 bp, Artificial Sequence
  ENSG00000102580_8 (sequence is synthesized)
ggcagatacacagatgctaccagcaaatatgaatctgtcatgaaaacagagccaagcattgctgaatatacagttcgttcaaaggagaggatttgccactgcttttctaaggacgagaag

SEQ ID NO: 131063 - DNA, 120 bp, Artificial Sequence
  ENSG00000102580_9 (sequence is synthesized)
cctgttgaagctattagggtttgttctgaagttttacagatggaacctgacaatgtgaatgccctgaaagatcgagcagaggcctatttgatagaggaaatgtatgatgaagctattcag

SEQ ID NO: 131064 - DNA, 120 bp, Artificial Sequence
  ENSG00000102580_10 (sequence is synthesized)
gattatgaaactgctcaggaacacaatgaaaatgatcagcagattcgagaaggtctagagaaagcacaaagattattgaaacagtcgcagaaacgagattattataaaatcttgggagta

SEQ ID NO: 131065 - DNA, 120 bp, Artificial Sequence
  ENSG00000102580_11 (sequence is synthesized)
aaaagaaatgccaaaaagcaagaaattattaaagcataccgaaaattagcactgcagtggcacccagataacttccagaatgaagaagaaaagaaaaaagctgagaaaaagttcattgat

SEQ ID NO: 131066 - DNA, 120 bp, Artificial Sequence
  ENSG00000102580_12 (sequence is synthesized)
atagcagctgctaaagaagtcctctctgatccagaaatgagaaagaagtttgacgacggagaagatcctttggatgcagagagccagcaaggaggcggcggcaaccctttccacagaagc

SEQ ID NO: 131067 - DNA, 120 bp, Artificial Sequence
  ENSG00000102580_13 (sequence is synthesized)
tggaactcatggcaagggttcaatcccttcagctcaggcggaccatttagatttaaattccacttcaattaaaccaactgtttttctgctcttcttaatttttttaaagattaaaaacaa

SEQ ID NO: 131068 - DNA, 120 bp, Artificial Sequence
  ENSG00000102580_14 (sequence is synthesized)
agaaatcttgttccgggaccctaatgaaaaaaaatttcaaatcttttcagtttgtccatgaccaaagagttgctttaataggaaaaaatctgttcttatccctgtcagatttatggttaa

SEQ ID NO: 131069 - DNA, 120 bp, Artificial Sequence
  ENSG00000102580_15 (sequence is synthesized)
tgggtttgcaacggcaaggaggcaaggaatggttctatttctgacagagcagcctgcatctgctttatgctgtctggagggaagtggtctgaggcaggctcacccgtggaagtgctcacg

SEQ ID NO: 131070 - DNA, 120 bp, Artificial Sequence
  ENSG00000102580_16 (sequence is synthesized)
tattctgtattatttttctacactggagctgagattcttctcttcacagccttgcagagtaagtcagtgcctacaagtgtaagaaggagctgtaatcttcatgaggatggttatacttca

SEQ ID NO: 131071 - DNA, 120 bp, Artificial Sequence
  ENSG00000102580_17 (sequence is synthesized)
gtattcttaaagagaacatgaacatttttgagctgtatgttcttagggacaactgtgcttcgatgtggtcagtctcgtcacttgtgagtagctgtgaaatctttagtgtgcatgtgtttg

SEQ ID NO: 131072 - DNA, 120 bp, Artificial Sequence
  ENSG00000102580_18 (sequence is synthesized)
cacctctgtggtctgtcaacgtggctgtcactgaaggagcaagagaccatcttttaggaaccctgccaccaaataataatatatccaggcttagactttggattaatgttaaatgtacat

SEQ ID NO: 131073 - DNA, 120 bp, Artificial Sequence
  ENSG00000102580_19 (sequence is synthesized)
ttttttggttcagtacctgaagaagaatactgaaacttgaatctataaattcctatggacccttttaatattaaacacaacaaattaaaagttgttataggtaaaataagttcagataaa

SEQ ID NO: 131074 - DNA, 120 bp, Artificial Sequence
  ENSG00000102580_20 (sequence is synthesized)
atagtggtggtatttaaaataatattgctgaagtgcagattgaaatactttttaaacaactgaagttctgagtttttatagggaatttcatgtaacaagactggtttagaaacgtaaagt

SEQ ID NO: 131075 - DNA, 120 bp, Artificial Sequence
  ENSG00000102580_21 (sequence is synthesized)
tgcgcagtcaacataaataaatacagaatgccatgttctccacttctaagtaaagacagtgggcagcttctgtttctccttctatcaaggcttcaccctatcttaaaggtctgtggtgcc

SEQ ID NO: 131076 - DNA, 120 bp, Artificial Sequence
  ENSG00000102580_22 (sequence is synthesized)
tcccacgtgggacctgtctgctggtatgtgttaaacagcagaccggcccttctaccagatcttgatgcctctgattttctcctgcctacaagaaaatacaggcaaggttagtcaggtctg

SEQ ID NO: 131077 - DNA, 120 bp, Artificial Sequence
  ENSG00000102580_23 (sequence is synthesized)
aagaagatactatttaagaagtgaactattcagtctttgtatactgaatgctttttccctaaaaaatgttaatcaagaatattgaatatttatggcactcttgatgctgcatttgaaagc

SEQ ID NO: 131078 - DNA, 120 bp, Artificial Sequence
  ENSG00000102580_24 (sequence is synthesized)
tgaaggaattactttagatagataggaattgctacctttattctggaaaggttttgtttctgcctcaaagcattttgaagtgttttaaccattaaagggtctaatttttttttcttaatg

SEQ ID NO: 131079 - DNA, 120 bp, Artificial Sequence
  ENSG00000102580_25 (sequence is synthesized)
aaatcaagcattttaattcactgtgggaggcatcctgaccacggacatccataacagcaaagcacaaatcgttttcgtctgtagtcatatcctgaaacataggtggacaaatttttaact

SEQ ID NO: 131080 - DNA, 120 bp, Artificial Sequence
  ENSG00000102580_26 (sequence is synthesized)
gagagacaaaaatcacatagttgaattgagcagaacacttaagtgctttctgcatctatttaggagtctatttcttaccaataaacttgacaacgcatttggaaaactagtgaacacctt

SEQ ID NO: 131081 - DNA, 120 bp, Artificial Sequence
  ENSG00000102580_27 (sequence is synthesized)
acagctttcattttgctttaatgtttcaattcaagccggtgtaaaaataatttccaaggcatttctgtttattctttagtaatctcactactggctatgtcagcaatatctttttcaatc

SEQ ID NO: 131082 - DNA, 120 bp, Artificial Sequence
  ENSG00000102580_28 (sequence is synthesized)
tggttccttttgtatatgatgtcactgtgacctctttgaaatatagtgatggcttttacctactttgaaaagaattttcacatagagtcagaaaaaaaaggaaatatcaaatcacttgcc

SEQ ID NO: 131083 - DNA, 120 bp, Artificial Sequence
  ENSG00000102580_29 (sequence is synthesized)
tttccacttggagagcacgacagttgccaacaacaaggggtcaagggccgcacaggagatgtgtgggggcctggccacctcccacctgctgcccagaggcttgtttgcattttcattttt

SEQ ID NO: 131084 - DNA, 120 bp, Artificial Sequence
  ENSG00000102580_30 (sequence is synthesized)
tctccacttgtaacaaccatagtttcagctcctaaattcttatcatggatttacttagtcatcttaactgacctgcagttacttgcctgttttcagtgaagagagagaagcagctctggt

SEQ ID NO: 131085 - DNA, 120 bp, Artificial Sequence
  ENSG00000102580_31 (sequence is synthesized)
gccacatgccagtgccatggagggaaatgaattctctgcaatctgttgtttcgctgattcatgaagaaagtaacaactgttgagtttcagccttgatggctgtcggcagttttctggtgt

SEQ ID NO: 131086 - DNA, 120 bp, Artificial Sequence
  ENSG00000102580_32 (sequence is synthesized)
ccacccaaacggagagacagtcactcctgcttaccctaatgtgtgactgagaagcagcctgggtgtgtaaagagatagtcattccccctgcctgtctcactgtagggtagcattatccac

SEQ ID NO: 131087 - DNA, 88 bp, Artificial Sequence
  ENSG00000102580_33 (sequence is synthesized)
attccccctgcctgtctcactgtagggtagcattatccactgtaaaaccatactactttcattttcccttggggactacaggtgccag

SEQ ID NO: 131088 - DNA, 65 bp, Artificial Sequence
  ENSG00000102580_34 (sequence is synthesized)
caggtaacctttatggctctttcaggaaaagtgaaatcagagaggcgtaccctagccacagctgt

SEQ ID NO: 131089 - DNA, 120 bp, Artificial Sequence
  ENSG00000102580_35 (sequence is synthesized)
gaaaagtgaaatcagagaggcgtaccctagccacagctgttgtattctgctcttctttcctttttggtgagcttcatgggtggagttatcagtggtctgtactttgtggatattttgccc

SEQ ID NO: 131090 - DNA, 120 bp, Artificial Sequence
  ENSG00000102580_36 (sequence is synthesized)
agcaggaagtattagacacatcagtctagaagcattgtgaaaaggttccaaaacgggagacaaaatttaattcattcctcagttctgaaagtttgtgctttcttaccatgaatagatgaa

SEQ ID NO: 131091 - DNA, 120 bp, Artificial Sequence
  ENSG00000102580_37 (sequence is synthesized)
aacttgaaaaaaatcttgacagtttactaatgtgaatcagatgtaacgtactactaattctacaatgcctttctctttagtcagtattaaaaatcttttttaaagtattggtatgaaaac

SEQ ID NO: 131092 - DNA, 120 bp, Artificial Sequence
  ENSG00000102580_38 (sequence is synthesized)
aaatttttgttgccctgataatggaattttaaaactacccacagtttaagagaaaacataacttggtaaaaaaggtagccaataaaaccacaatttgaaattgataccattttctactca

SEQ ID NO: 131093 - DNA, 120 bp, Artificial Sequence
  ENSG00000102580_39 (sequence is synthesized)
caatggatgatgaaaaatttcacctttaaatgggtcagaagttgtctttgacatttaccatgaaaaaactacataaaatggctccctggtgaggttacagacacggccctggtgatgggc

SEQ ID NO: 131094 - DNA, 120 bp, Artificial Sequence
  ENSG00000102580_40 (sequence is synthesized)
gttgcaaagttttcactgagcacacagcaatggtatcacctagagaagttcacgcaactttgttgaatgtagttgacttttccaaatttataaaggaaggaagaaggcaaatgttaattt

SEQ ID NO: 131095 - DNA, 120 bp, Artificial Sequence
  ENSG00000102580_41 (sequence is synthesized)
gccaacaacgaatatcctttttctaaatcagatcattccttttttgttagtggcagtttatcctgtaatttcaaatgacgttaagaggtgggattatttgggggttttttttgtttgttt

SEQ ID NO: 131096 - DNA, 120 bp, Artificial Sequence
  ENSG00000102580_42 (sequence is synthesized)
acagatgatctcatttgctgaatgattgatttaagagtaaaattagccactgcgtggctttgtgtatagtaaccggttttgttgcacttgtctgtggctgaaacacttacctgcagtgga

SEQ ID NO: 131097 - DNA, 120 bp, Artificial Sequence
  ENSG00000102580_43 (sequence is synthesized)
aagccgagcaaggaggaggtaaacattggagatgtttgtgaaaatattactcttgctgtgaggttttagtttgttttgaatgagaaaagactaagtaacttaatccatctcaatgtagtg

SEQ ID NO: 131098 - DNA, 120 bp, Artificial Sequence
  ENSG00000102580_44 (sequence is synthesized)
ttttaataaaaaaggaacctaatatttgaaatgggtctcagacatgtctacaaatatgggtactatttttatgcccgtgtattttcacatttaataaaaatatttatggtcatatcagta

SEQ ID NO: 131099 - DNA, 120 bp, Artificial Sequence
  ENSG00000102595_0 (sequence is synthesized)
agccgcgcagcgggaagagccggccgaagcgtggcggccacagactgtgggtaccgggtccgagggactcgcgcttttctctccgtgccatggcgccagcgaaagccacgaacgtggtgc

SEQ ID NO: 131100 - DNA, 120 bp, Artificial Sequence
  ENSG00000102595_1 (sequence is synthesized)
ggctgctactaggctccacagcgctgtggctttcgcagctcggctccgggacggtcgccgcgtccaagtcggtgactgcccacttggccgcgaagtggcccgagaccccgctgctgctgg

SEQ ID NO: 131101 - DNA, 120 bp, Artificial Sequence
  ENSG00000102595_2 (sequence is synthesized)
aggcaagtgaatttatggcagaagaaagtaatgaaaaattttggcagtttttggaaactgtgcaagaattagcaatttataagcaaacagaatcagattattcttattacaacttaatcc

SEQ ID NO: 131102 - DNA, 120 bp, Artificial Sequence
  ENSG00000102595_3 (sequence is synthesized)
tgaagaaagctggacagtttctagacaatttacacatcaaccttttaaagtttgctttctctataagggcatactccccagctattcagatgtttcagcagattgcagctgatgagccac

SEQ ID NO: 131103 - DNA, 120 bp, Artificial Sequence
  ENSG00000102595_4 (sequence is synthesized)
caccagatggttgtaatgcatttgtggttattcataagaagcacacctgtaaaattaatgagattaaaaagctgctgaagaaagctgcttcaaggactagaccttatctatttaaaggag

SEQ ID NO: 131104 - DNA, 120 bp, Artificial Sequence
  ENSG00000102595_5 (sequence is synthesized)
atcacaaatttcctacaaacaaagagaacttaccagtggtgattctctatgccgaaatgggtactagaacatttagtgcatttcacaaagtattgtctgaaaaagctcaaaatgaggaaa

SEQ ID NO: 131105 - DNA, 120 bp, Artificial Sequence
  ENSG00000102595_6 (sequence is synthesized)
ttctgtatgttcttcgccattatattcagaaaccaagctcacggaaaatgtacttatctgggtatggtgtggagctagcaattaagagtacagaatacaaagcactggatgatacccaag

SEQ ID NO: 131106 - DNA, 120 bp, Artificial Sequence
  ENSG00000102595_7 (sequence is synthesized)
ttaaaactgtgactaatactactgtagaggatgagactgaaacaaatgaagttcaaggatttctctttgggaaactaaaagaaatatattcagatcttagagataatctgacagcattcc

SEQ ID NO: 131107 - DNA, 120 bp, Artificial Sequence
  ENSG00000102595_8 (sequence is synthesized)
aaaaatacctgattgagagtaacaaacaaatgatgcctttgaaagtctgggaactacaagatcttagttttcaagcagcttctcaaataatgtccgctccagtttatgattccattaaat

SEQ ID NO: 131108 - DNA, 120 bp, Artificial Sequence
  ENSG00000102595_9 (sequence is synthesized)
taatgaaagacatttcacagaacttccccataaaagccagatctctaaccagaattgctgtaaatcaacatatgagagaagaaataaaggaaaatcaaaaggatcttcaagttagattta

SEQ ID NO: 131109 - DNA, 120 bp, Artificial Sequence
  ENSG00000102595_10 (sequence is synthesized)
aaattcagccaggcgatgctcgtctatttataaatggccttcgtgttgatatggatgtttatgacgcttttagtattttggatatgctgaaattagaaggaaaaatgatgaatggccttc

SEQ ID NO: 131110 - DNA, 120 bp, Artificial Sequence
  ENSG00000102595_11 (sequence is synthesized)
gcaatcttgggatcaatggggaagatatgagcaaatttttaaaattaaattcacacatttgggaatatacttatgtattagatattcgacattcttctataatgtggattaatgacttag

SEQ ID NO: 131111 - DNA, 120 bp, Artificial Sequence
  ENSG00000102595_12 (sequence is synthesized)
aaaatgatgatttgtatattacatggcctacaagttgccagaaacttctgaagccagtatttcctggaagtgtaccttccataaggcgcaattttcataatttggttctgtttattgatc

SEQ ID NO: 131112 - DNA, 120 bp, Artificial Sequence
  ENSG00000102595_13 (sequence is synthesized)
cggcccaagaatataccttggattttataaaacttgctgatgttttctattctcacgaagttcctcttagaattggttttgtgttcattcttaatacagatgatgaagttgatggagcaa

SEQ ID NO: 131113 - DNA, 120 bp, Artificial Sequence
  ENSG00000102595_14 (sequence is synthesized)
atgatgctggagttgctctctggcgagctttcaactatattgcagaagaatttgatatatcagaagcatttatttctatagtacacatgtaccaaaaagtgaagaaggatcaaaatatac

SEQ ID NO: 131114 - DNA, 120 bp, Artificial Sequence
  ENSG00000102595_15 (sequence is synthesized)
tcactgtggacaatgtgaagagtgttctccaaaatacatttcctcatgctaatatttgggatattttgggaattcattctaaatatgatgaagaaagaaaggctggagcaagcttttata

SEQ ID NO: 131115 - DNA, 120 bp, Artificial Sequence
  ENSG00000102595_16 (sequence is synthesized)
agatgactggcctgggtcctttgcctcaagctctttataatggtgaaccctttaaacatgaagagatgaatattaaagaactaaaaatggctgttcttcaaagaatgatggatgcatctg

SEQ ID NO: 131116 - DNA, 120 bp, Artificial Sequence
  ENSG00000102595_17 (sequence is synthesized)
tatatttacaaagagaagtttttttgggcacattaaatgatcgcacgaatgcaattgattttctaatggataggaataatgttgtaccccgtataaatactttgattttgcgtactaacc

SEQ ID NO: 131117 - DNA, 120 bp, Artificial Sequence
  ENSG00000102595_18 (sequence is synthesized)
agcagtacctcaatttaatatctacatcagtaactgctgatgttgaagatttctctactttctttttcttggattcacaagataagagtgctgtaattgcaaagaacatgtattatttaa

SEQ ID NO: 131118 - DNA, 120 bp, Artificial Sequence
  ENSG00000102595_19 (sequence is synthesized)
cccaagacgatgagagtataatttctgcagtcactctctggattattgcagattttgataagccttctgggagaaaacttctttttaatgcattaaagcacatgaaaacaagtgttcata

SEQ ID NO: 131119 - DNA, 120 bp, Artificial Sequence
  ENSG00000102595_20 (sequence is synthesized)
acagctatttctagaggaattttggcagcttttcttacacagaagaacatgtttttgagaagctttcttgggcaactggcaaaggaagaaattgctacagctatttactctggagataaa

SEQ ID NO: 131120 - DNA, 120 bp, Artificial Sequence
  ENSG00000102595_21 (sequence is synthesized)
attaaaacattccttattgaggggatggataagaatgcttttgagaaaaaatataatactgttggagtgaatatttttcgaactcaccagttgttctgtcaagatgtacttaaattacgt

SEQ ID NO: 131121 - DNA, 120 bp, Artificial Sequence
  ENSG00000102595_22 (sequence is synthesized)
cctggagaaatgggtattgtcagcaatgggagattcttaggacctttagatgaagatttttatgcagaagatttttacttgttggaaaagataacatttagtaatttaggagagaaaatt

SEQ ID NO: 131122 - DNA, 120 bp, Artificial Sequence
  ENSG00000102595_23 (sequence is synthesized)
aaaggcattgttgaaaatatgggaatcaacgcaaataacatgagtgactttattatgaaagttgatgcccttatgtcctctgtgcctaagcgtgcatctcgatatgatgtcacatttctt

SEQ ID NO: 131123 - DNA, 120 bp, Artificial Sequence
  ENSG00000102595_24 (sequence is synthesized)
agggagaatcacagtgttataaagacgaatcctcaagagaatgatatgttcttcaatgtcattgctattgttgatccattaacaagagaagcacagaaaatggcacagttgttggttgta

SEQ ID NO: 131124 - DNA, 120 bp, Artificial Sequence
  ENSG00000102595_25 (sequence is synthesized)
cttggcaagattatcaacatgaagataaagttgttcatgaactgtaggggcaggctttcagaagcccctttagaaagcttttaccgttttgttctggaaccagaactgatgtcaggggct

SEQ ID NO: 131125 - DNA, 120 bp, Artificial Sequence
  ENSG00000102595_26 (sequence is synthesized)
aatgacgtttcttctcttggaccagtggcaaaatttttggatattcctgaatcacccctcctaatcctcaacatgattactccagaaggctggttggttgaaacagtgcacagcaactgt

SEQ ID NO: 131126 - DNA, 120 bp, Artificial Sequence
  ENSG00000102595_27 (sequence is synthesized)
gaccttgataatattcacttaaaggatactgagaaaactgttacagcagaatatgaactagaatacttactactggaaggacaatgctttgataaagtgacagaacagcctcctcggggt

SEQ ID NO: 131127 - DNA, 120 bp, Artificial Sequence
  ENSG00000102595_28 (sequence is synthesized)
ctgcagttcacactaggcacaaaaaataaacctgctgtggttgatacaatagtgatggcacatcatgggtattttcaattaaaagcaaacccaggtgcttggatactgaggttacaccaa

SEQ ID NO: 131128 - DNA, 120 bp, Artificial Sequence
  ENSG00000102595_29 (sequence is synthesized)
ggaaaatctgaagatatttatcaaatagttgggcatgaaggaactgactctcaagcagacctagaagatatcattgttgtattaaacagcttcaaaagcaagatactcaaagtaaaagtg

SEQ ID NO: 131129 - DNA, 120 bp, Artificial Sequence
  ENSG00000102595_30 (sequence is synthesized)
aaaaaagaaacagacaaaattaaggaagatatccttaccgatgaagatgaaaaaacaaaaggactgtgggattccattaaaagtttcacagtaagcttgcataaagaaaacaaaaaggaa

SEQ ID NO: 131130 - DNA, 120 bp, Artificial Sequence
  ENSG00000102595_31 (sequence is synthesized)
aaagatgtcctaaacattttttcagttgcttctggtcatttatatgaacgttttttaagaattatgatgctttctgttttgcgtaacaccaaaacaccagtgaaattctggttgctaaaa

SEQ ID NO: 131131 - DNA, 120 bp, Artificial Sequence
  ENSG00000102595_32 (sequence is synthesized)
aattatctctcaccgacatttaaagaagtaattcctcacatggctaaagagtatggattccgatatgaactagttcaatataggtggccccgttggcttcgtcaacagactgaaagacag

SEQ ID NO: 131132 - DNA, 120 bp, Artificial Sequence
  ENSG00000102595_33 (sequence is synthesized)
aggattatttggggttacaaaattcttttccttgatgttcttttcccactagcagtggacaaaatcatttttgttgatgctgaccagattgtgagacatgatctaaaagaacttcgagat

SEQ ID NO: 131133 - DNA, 120 bp, Artificial Sequence
  ENSG00000102595_34 (sequence is synthesized)
ttcgatctggatggagctccttatgggtatactccattttgtgatagccgcagggaaatggatggatatcgtttctggaaaacaggatactgggcatcacatcttttaagacggaaatac

SEQ ID NO: 131134 - DNA, 120 bp, Artificial Sequence
  ENSG00000102595_35 (sequence is synthesized)
catatcagtgctttatatgtagtggatctcaagaagttcaggagaattggagcaggtgacaggctcaggagccagtatcaagctctcagtcaagatccaaacagtctttcaaacctagat

SEQ ID NO: 131135 - DNA, 120 bp, Artificial Sequence
  ENSG00000102595_36 (sequence is synthesized)
caggatctccccaataatatgatttaccaagtcgccattaagtctcttcctcaagactggctgtggtgtgaaacctggtgtgatgatgaatccaaacaaagagccaaaacaattgatctg

SEQ ID NO: 131136 - DNA, 120 bp, Artificial Sequence
  ENSG00000102595_37 (sequence is synthesized)
tgcaataatcccaaaacaaaagaatccaaactaaaagctgctgccagaattgtcccagaatgggtggagtatgatgctgagataagacaactattagatcatcttgaaaacaagaagcaa

SEQ ID NO: 131137 - DNA, 120 bp, Artificial Sequence
  ENSG00000102595_38 (sequence is synthesized)
gatacaattttgacacatgatgaactctagcactggtgtatatgagaaggaaggcgaaagcatgacaggaaacctgccgcctgctggggaagtctggagcccctgctgagacgatttgga

SEQ ID NO: 131138 - DNA, 120 bp, Artificial Sequence
  ENSG00000102595_39 (sequence is synthesized)
agacgatttggaagtctcgttaagatcagtgacatattctttaattttaaaaaattgtaattatttaaaacagttatttaatgtattgaatgagtttaagttatataataaatgaccatt

SEQ ID NO: 131139 - DNA, 120 bp, Artificial Sequence
  ENSG00000102595_40 (sequence is synthesized)
tgagaagtcgtcatttatataataaaacatgaaatatatatgggtgtgtataaatgtcatatctgtttagccataatattttaattaatggccgttataaaaattattagatcaaataca

SEQ ID NO: 131140 - DNA, 120 bp, Artificial Sequence
  ENSG00000102595_41 (sequence is synthesized)
taactttagtcttgatcagacagttgattagctctattgatgctaagtcagtataactgttcagaggttctgatgcaaaactctgctgttaatctgtaattaagaaaaaattataaaata

SEQ ID NO: 131141 - DNA, 120 bp, Artificial Sequence
  ENSG00000102595_42 (sequence is synthesized)
tgctaacattgcttaatggctaaattgtaggcttgagcatatctctaaaaccacttggtagacaatctgtaaatgtttgttgaaatgaaatatttgctaaataaatgaaaaatttgcctt

SEQ ID NO: 131142 - DNA, 120 bp, Artificial Sequence
  ENSG00000102595_43 (sequence is synthesized)
ggaactacaagatcctgttaagactattgcatgtttcattgataaatgtttaatggaaacatcaaatggaggacatgcagttttacaaaatcttagttttcaagcagcttctcaaataat

SEQ ID NO: 131143 - DNA, 120 bp, Artificial Sequence
  ENSG00000102595_44 (sequence is synthesized)
gaaaatttaagtaaggcaaaggtcctctaatctaggagggataagataaatacataaatgttactactgtgtacaagataggaaactagagctataagacagatgaaaataaaatactat

SEQ ID NO: 131144 - DNA, 120 bp, Artificial Sequence
  ENSG00000102595_45 (sequence is synthesized)
gaaattaaaattaaattttaaaaaacacttcaaggttaaaaaatatatatgagctcctgttactgttaatgtatattgggtttaatattcttttatacagaattatgatgctttctgttt

SEQ ID NO: 131145 - DNA, 120 bp, Artificial Sequence
  ENSG00000102595_46 (sequence is synthesized)
aatctttattctgctgttgctgaacagtttgcagaaaacaaaattgaatctttgaataagataaataaaaaatggggaaaatcatactttaataatttttgacaggttattgtaaaatct

SEQ ID NO: 131146 - DNA, 120 bp, Artificial Sequence
  ENSG00000102595_47 (sequence is synthesized)
ctttacttggaattgatttatagaatttattcattctacagttaataaatactttcttagatcattcgtgtattcatgagcaattcgatggtttttagtcatattactcaatgattattt

SEQ ID NO: 131147 - DNA, 120 bp, Artificial Sequence
  ENSG00000102595_48 (sequence is synthesized)
ttttctcatcttaaaaggggtattttcaattaaaagcaaacccaggtgcttggatactgaggttacaccaaggaaaatctgaagatatttatcaaatagttgggtgagttatgcaggctg

SEQ ID NO: 131148 - DNA, 120 bp, Artificial Sequence
  ENSG00000102595_49 (sequence is synthesized)
gcaggctgcttttaaatttttacacataaatacgtttttagtgtaatacaaccaagagaatcaaaacaacaattaaaatgttaagattggcctggcgcagtggctcaagcctgtaatccc

SEQ ID NO: 131149 - DNA, 71 bp, Artificial Sequence
  ENSG00000102595_50 (sequence is synthesized)
gacctgccagacatggtggcgcacacctgtaacttcagctattcaggagactgaggcccaagaattgcttg

SEQ ID NO: 131150 - DNA, 120 bp, Artificial Sequence
  ENSG00000102595_51 (sequence is synthesized)
acttcagctattcaggagactgaggcccaagaattgcttgaatcttcgggaggcggaggttgcagtgagcagactgcaccactgcactccagcccaggacagagagcaagactctgtctc

SEQ ID NO: 131151 - DNA, 120 bp, Artificial Sequence
  ENSG00000102595_52 (sequence is synthesized)
ccagttagaatgacaatcattaaaaaggaaacgacagatgctggaggggatgtggagaaataggaaggcttttacactgttggtgtgtgtgtagatgagttcaaccgttgtggaagacag

SEQ ID NO: 131152 - DNA, 74 bp, Artificial Sequence
  ENSG00000102595_53 (sequence is synthesized)
ttcttactcaaaagtgggactctggcttgtcgggggtggggagctaggagagggatagcattaggagaaatacc

SEQ ID NO: 131153 - DNA, 87 bp, Artificial Sequence
  ENSG00000102595_54 (sequence is synthesized)
tggcttgtcgggggtggggagctagggataacgggttgatgggtgcagcagaccaccatgacacgtgtatacctgtgtaacaaacct

SEQ ID NO: 131154 - DNA, 120 bp, Artificial Sequence
  ENSG00000102595_55 (sequence is synthesized)
gtataataaaatgaaaatatgtattttgtaagttgtgctgatagtaacttttttaaattgtatttctccatttaaatctgaaatggcaccatgtcttgatttcatgagtgatagaggaaa

SEQ ID NO: 131155 - DNA, 120 bp, Artificial Sequence
  ENSG00000102595_56 (sequence is synthesized)
gaagattacagtttagattgtgtgtatagtaaaataccattctactacatcattatttggctctctaaaagatgcctagagatgtttaacaatgggtaaaattatcttattttagttttt

SEQ ID NO: 131156 - DNA, 120 bp, Artificial Sequence
  ENSG00000102595_57 (sequence is synthesized)
tataagaatcaaagatggaacttttcagaaataaactctgattgtatgaggcatttttgactttccttatagtttttattttcaattataaaagcaaggcttgcaatttataaaatgtta

SEQ ID NO: 131157 - DNA, 120 bp, Artificial Sequence
  ENSG00000102595_58 (sequence is synthesized)
aacaaaaagtatgtaatatgaaaacataagtctgccctcatccttgcatcgcttacagttgacactaacaattgagagtatattcctccagattttgttttgtttcatatatttaataaa

SEQ ID NO: 131158 - DNA, 120 bp, Artificial Sequence
  ENSG00000102595_59 (sequence is synthesized)
agagacctgtatatcttcctcattatttttaagttccgtgaatatagctgtatcacaatttatgattatcttaatgatgaatgattcatttatgtctaattacatggaatatgtaatttc

SEQ ID NO: 131159 - DNA, 80 bp, Artificial Sequence
  ENSG00000102606_0 (sequence is synthesized)
gctgagcgggttggcatctggggcagcgggctcgctccaggccgtcgggggccgctcgccagcgtcgcccgctgtgttgg

SEQ ID NO: 131160 - DNA, 120 bp, Artificial Sequence
  ENSG00000102606_1 (sequence is synthesized)
tccccgctgccggccacggcgctcagcgcttgtgctctgtattgcaggtctaccccgagccccggagcgagagcgagtgcctgagcaacatccgcgagttcctgcgcggctgcggggctt

SEQ ID NO: 131161 - DNA, 120 bp, Artificial Sequence
  ENSG00000102606_2 (sequence is synthesized)
ccctgcggctggagacgtttgatgcaaatgatttgtatcaggggcagaattttaacaaggtcctcagttccttagtgactctaaataaagtaacagcagacatcgggctggggagtgact

SEQ ID NO: 131162 - DNA, 120 bp, Artificial Sequence
  ENSG00000102606_3 (sequence is synthesized)
ccgtgtgtgcccggccctcgtctcaccgcataaagtcttttgactcccttggatcacagtctttgcacactcggacttcaaaactgttccagggccagtatcggagtttggacatgaccg

SEQ ID NO: 131163 - DNA, 120 bp, Artificial Sequence
  ENSG00000102606_4 (sequence is synthesized)
ataatagcaacaatcaactggtagtaagagcaaagtttaacttccagcagaccaatgaggacgagctttccttctcaaaaggagacgtcatccatgtcacccgtgtggaagagggaggct

SEQ ID NO: 131164 - DNA, 120 bp, Artificial Sequence
  ENSG00000102606_5 (sequence is synthesized)
ggtgggagggcacactcaacggccggaccggctggttccccagcaactacgtgcgcgaggtcaaggccagcgagaagcctgtgtctcccaaatcaggaacactgaagagccctcccaaag

SEQ ID NO: 131165 - DNA, 120 bp, Artificial Sequence
  ENSG00000102606_6 (sequence is synthesized)
gatttgatacgactgccataaacaaaagctattacaatgtggtgctacagaatattttagaaacagaaaatgaatattctaaagaacttcagactgtgctttcaacgtacctacggccat

SEQ ID NO: 131166 - DNA, 120 bp, Artificial Sequence
  ENSG00000102606_7 (sequence is synthesized)
tgcagaccagtgagaagttaagttcagcaaacatttcatatttaatgggaaatctagaagaaatatgttctttccagcaaatgctcgtacagtctttagaagaatgcaccaagttgcccg

SEQ ID NO: 131167 - DNA, 120 bp, Artificial Sequence
  ENSG00000102606_8 (sequence is synthesized)
aagctcagcagagagtcggaggctgctttttaaacctgatgccacagatgaaaaccctgtacctcacgtattgtgccaatcacccttctgcagtgaatgtcctcacggaacacagtgagg

SEQ ID NO: 131168 - DNA, 120 bp, Artificial Sequence
  ENSG00000102606_9 (sequence is synthesized)
agttgggggagttcatggagaccaaaggtgccagcagccctgggattctcgtgctgaccacgggcctgagcaaacccttcatgcgcctggataaataccctacgctgctcaaagagctcg

SEQ ID NO: 131169 - DNA, 120 bp, Artificial Sequence
  ENSG00000102606_10 (sequence is synthesized)
agagacacatggaggattatcatacagatagacaagatattcaaaaatccatggctgccttcaaaaacctttcagcccaatgtcaagaagtccggaagaggaaagagcttgagctgcaga

SEQ ID NO: 131170 - DNA, 120 bp, Artificial Sequence
  ENSG00000102606_11 (sequence is synthesized)
tcctgacggaagccatccggaactgggagggcgatgacattaaaactctgggcaacgtcacttacatgtcccaggtcctgattcagtgtgccggaagtgaggaaaagaatgaaagatatc

SEQ ID NO: 131171 - DNA, 120 bp, Artificial Sequence
  ENSG00000102606_12 (sequence is synthesized)
ttctactcttcccaaatgttttgctaatgttgtctgccagtcctaggatgagtggctttatctatcagggaaagcttccaacgacaggaatgacaatcacaaagcttgaggacagtgaaa

SEQ ID NO: 131172 - DNA, 120 bp, Artificial Sequence
  ENSG00000102606_13 (sequence is synthesized)
atcatagaaatgcatttgaaatatcagggagcatgattgagcggatattagtgtcgtgcaacaaccagcaggatctgcaggaatgggtggagcacctacagaagcaaacgaaggtcacgt

SEQ ID NO: 131173 - DNA, 120 bp, Artificial Sequence
  ENSG00000102606_14 (sequence is synthesized)
ctgtgggaaaccccaccataaagcctcattcagtgccatctcataccctcccctcccacccggtcactccgtccagcaagcacgcagacagcaagcccgcgccgctgacgcccgcctacc

SEQ ID NO: 131174 - DNA, 120 bp, Artificial Sequence
  ENSG00000102606_15 (sequence is synthesized)
acacgctgccccacccctcccaccacggcaccccgcacaccaccatcaactggggacccctggagcctccgaaaacacccaagccctggagcctgagctgcctgcggcccgcgcctcccc

SEQ ID NO: 131175 - DNA, 120 bp, Artificial Sequence
  ENSG00000102606_16 (sequence is synthesized)
tccggccctcagctgctctctgctacaaggaggatcttagtaagagccctaagaccatgaaaaagctgctgcccaagcgcaaacctgaacggaagccttcagatgaggagttcgcgtccc

SEQ ID NO: 131176 - DNA, 120 bp, Artificial Sequence
  ENSG00000102606_17 (sequence is synthesized)
ggaaaagcacagctgctttggaagaagatgctcagattctgaaagtcattgaagcttactgcaccagcgccaaaacaaggcaaacactcaattcaagttcacgcaaagaatctgctccac

SEQ ID NO: 131177 - DNA, 120 bp, Artificial Sequence
  ENSG00000102606_18 (sequence is synthesized)
aagttttgcttccagaagaagagaaaattatagtggaagaaactaaaagtaatggtcagacagtgatagaagaaaagagtcttgtggataccgtatatgcattaaaggatgaagttcaag

SEQ ID NO: 131178 - DNA, 120 bp, Artificial Sequence
  ENSG00000102606_19 (sequence is synthesized)
aattaagacaggacaacaaaaagatgaagaaatctctagaggaagaacagagagcccgcaaagacctggagaagctggtgaggaaagtcctgaagaacatgaatgatcctgcctgggatg

SEQ ID NO: 131179 - DNA, 120 bp, Artificial Sequence
  ENSG00000102606_20 (sequence is synthesized)
gggtggggcgccaccttgctctctgtatatagaaaagctggagcttattctgcgaatggagacgatcaaaccatgactgatgaatccagacaggagggattgactctgaggacctgagct

SEQ ID NO: 131180 - DNA, 120 bp, Artificial Sequence
  ENSG00000102606_21 (sequence is synthesized)
acatcaatccactctgtgaacatctcagttacctcattctgcaataagttcagtgactgactaaaagtcttgtttttccagactttgaattgaatatataaatattatatatacatgttt

SEQ ID NO: 131181 - DNA, 120 bp, Artificial Sequence
  ENSG00000102606_22 (sequence is synthesized)
cttgtaaatatcccattttgaatgcatacctgtggtggttctgtccgggctaatccccatgctagaatgtcctttccagctacgtgaataagaagtcccatgcccgcatccaccggaagc

SEQ ID NO: 131182 - DNA, 120 bp, Artificial Sequence
  ENSG00000102606_23 (sequence is synthesized)
agaagcctggtggatgcctggttcgttccgcagcaccagggcctccaccgtgctgtggcagcaccccccatgtcggtatttctaaataaccttatttatacctgcagagatacacttcag

SEQ ID NO: 131183 - DNA, 120 bp, Artificial Sequence
  ENSG00000102606_24 (sequence is synthesized)
tcccattcagaagtcttctcttaaagcagcattacagtcccagacctgcgggtttctgagggcaacttgctggctgacagactcagtcttgacctcaaggaaggcccatacggcactgcc

SEQ ID NO: 131184 - DNA, 120 bp, Artificial Sequence
  ENSG00000102606_25 (sequence is synthesized)
gcatccacctagaggtgtttgctcttgtccgctgtctgagtactgtgattctcagatgagtttgctgcgttttgggaggacacagacggttctgtataggctagttcagtaacaacaaaa

SEQ ID NO: 131185 - DNA, 120 bp, Artificial Sequence
  ENSG00000102606_26 (sequence is synthesized)
tacactgttttgtcttccctcaaagagagatcttactagaacctgtaaatagaatgtattatttattataagtcactgcagctgatgaaaacagatggaggccatgctgcaggctgatac

SEQ ID NO: 131186 - DNA, 120 bp, Artificial Sequence
  ENSG00000102606_27 (sequence is synthesized)
tgatgggtggagttttgtcatcaggccagcctcatcccgaggtctcctccaccattggccgtagccagcaggcttcagtgctcaccgaaagtaaaatcccctccttcagcaagaataaag

SEQ ID NO: 131187 - DNA, 120 bp, Artificial Sequence
  ENSG00000102606_28 (sequence is synthesized)
caatatacaccttaggttccactaagtaacataggcataagcagggaacgtttcccccactgtgttccagtgcagaggagacgaagcctgtcctcaccgcggctcgctgggcccaggctg

SEQ ID NO: 131188 - DNA, 120 bp, Artificial Sequence
  ENSG00000102606_29 (sequence is synthesized)
gctctggaaagcctgtgcggtcctgggcaggaagcccggcccgtggagcaggttttcgttctgcttcagcaataaataagggtgaccacagggactttgcttttggtttcctttcctgtg

SEQ ID NO: 131189 - DNA, 120 bp, Artificial Sequence
  ENSG00000102606_30 (sequence is synthesized)
aaaaggttggttttaaagtgagatacacttttccgtagaacaagtgttctatctttaaaaacccaaattgcagcaccgtggattactggtctcagaacaactcattgcgcatcagatttg

SEQ ID NO: 131190 - DNA, 120 bp, Artificial Sequence
  ENSG00000102606_31 (sequence is synthesized)
actctctgattttctgtctattggccaaattgccctttaactgcacctgaatcctttgtgtactgatgcctttgagctgggcaccttgggagagtgttgtgttgctgtttacggttcttc

SEQ ID NO: 131191 - DNA, 120 bp, Artificial Sequence
  ENSG00000102606_32 (sequence is synthesized)
cttgcccttgctaattacagtctctggtgcccagcaagcccctttggcttccttccgtgactggtcacgttgtctgcctgggctcagcgtggacctgccccatgctgcagaacctggcct

SEQ ID NO: 131192 - DNA, 120 bp, Artificial Sequence
  ENSG00000102606_33 (sequence is synthesized)
cacctggacttttcactagaattgccagcttcctcaacttagcagatcattcactcatgcgggcacaagcaaagatcaacactttcttttttggtaagcttgagttttacaagttatttt

SEQ ID NO: 131193 - DNA, 120 bp, Artificial Sequence
  ENSG00000102606_34 (sequence is synthesized)
ttggtgatgcgtaagacattgcagtgggaaaccattcaacttgagtttattggagtttgctgttgtagcaggttttaactcaggaacaactcttgtctgatctctccgcccctctgccgg

SEQ ID NO: 131194 - DNA, 120 bp, Artificial Sequence
  ENSG00000102606_35 (sequence is synthesized)
gaggcgacattaactgtcctctcggagccggtagcgttgctgtccgagtccccaggacggatctcctgcagacctgccttaatgctcagatcgaagtatttcacaagaatacttgtgttt

SEQ ID NO: 131195 - DNA, 120 bp, Artificial Sequence
  ENSG00000102606_36 (sequence is synthesized)
ttaacagcccttcccctggacggtgcggccatgagggcctcatgttacggcattgccttttctttctgtggatccagtatcttcctcggctttttagggagcaggaaaaatgcgtctgag

SEQ ID NO: 131196 - DNA, 120 bp, Artificial Sequence
  ENSG00000102606_37 (sequence is synthesized)
agcaactctttttaaaaacctgccctgttgtatataactgtgtctgtttcaccgtgtgacctcccaagggggtgggaacttgatataaacgtttaaaggggccacgatttgcccgagggt

SEQ ID NO: 131197 - DNA, 120 bp, Artificial Sequence
  ENSG00000102606_38 (sequence is synthesized)
tactcctttgctctcaccttgtatggatgaggagatgaagccatttcttatcctgtagatgtgaagcactttcagttttcagcgatgttggaatgtagcatcagaagctcgttccttcac

SEQ ID NO: 131198 - DNA, 120 bp, Artificial Sequence
  ENSG00000102606_39 (sequence is synthesized)
actcagtggcgtctgtgcttgtccacatgcgctgggcgtctgggaccttgaatgcctgccctggttgtgtggactccttaatgccaatcatttcttcacttctctgggacacccagggcg

SEQ ID NO: 131199 - DNA, 120 bp, Artificial Sequence
  ENSG00000102606_40 (sequence is synthesized)
cctgttgacaagtgtggagaaactcctaatttaaatgtcacagacaatgtcctagtgttgactactacaatgttgatgctacactgttgtaattattaaactgattatttttcttatgtc

SEQ ID NO: 131200 - DNA, 120 bp, Artificial Sequence
  ENSG00000102606_41 (sequence is synthesized)
gatggtggaaagtgaggagaagcaaaaagacgactacttctttccccatttcccggtctggtctttttggggtctactacgtagaggtgcatcagccagcgctaccatggaggcaggagg

SEQ ID NO: 131201 - DNA, 120 bp, Artificial Sequence
  ENSG00000102606_42 (sequence is synthesized)
catggcaaggcactgacctgatgcataatcacgtcttggctgatgatgaccaaccaagcctagactccctggggcgtcgcagtagcctttctcgtttggagccttcagacctctcggaag

SEQ ID NO: 131202 - DNA, 120 bp, Artificial Sequence
  ENSG00000102606_43 (sequence is synthesized)
ccccgagacgcagccaggcgcccggcccggcccggcccggccctctgcacagccccacttcaggccacgccgtttccttgaccttcccccggcagggtctgaagcgtcaccgtccgtcta

SEQ ID NO: 131203 - DNA, 120 bp, Artificial Sequence
  ENSG00000102606_44 (sequence is synthesized)
gagcagagtcgcgcaggcccctgccctgccggtgaggtcggcgccgcgctccggagagtcggttcctcccgattcagacccatatggcttcagatggaaccatcatttctgttccgtcat

SEQ ID NO: 131204 - DNA, 120 bp, Artificial Sequence
  ENSG00000102606_45 (sequence is synthesized)
gaccggcttgcaaggtagcaaagcgaaacaaacgtctcgttttcagcctgtccccgccaccttgaaataaaaccggcaaaaataaaaagagcattctgggaagtacttcatcatttcaac

SEQ ID NO: 131205 - DNA, 120 bp, Artificial Sequence
  ENSG00000102606_46 (sequence is synthesized)
gctcacgaattcaaaacataaacaaaggcttccgagtgccccggccaggggcgcggggcgcacggcgggcccggggcaggtaagcgcaggtgcgcgcccgcccccacccccggctccctc

SEQ ID NO: 131206 - DNA, 80 bp, Artificial Sequence
  ENSG00000102606_47 (sequence is synthesized)
cctccccatccgctccccgctccccttcccctttcccttccccgcccgctcccagccgccgccgccgccccgcgcacggc

SEQ ID NO: 131207 - DNA, 120 bp, Artificial Sequence
  ENSG00000102606_48 (sequence is synthesized)
gcgggccgggcggacggccgcgtctttcttctcctggcggtgatgtcattgggcgacggcggccgaggccggggggcggcggcgggcgcccgcaggttcccgagccgctcctgagaaggc

SEQ ID NO: 131208 - DNA, 80 bp, Artificial Sequence
  ENSG00000102606_49 (sequence is synthesized)
gagaaggcgcctgacagcgggccggggcgcacggagaagcgggccgggccggacctgctgggccgcgccgagccaatcgc

SEQ ID NO: 131209 - DNA, 120 bp, Artificial Sequence
  ENSG00000102606_50 (sequence is synthesized)
cgcgggccgggccgccgctccgaggtgaaggcgcgcgcccctccccgcctgcctcccgggccgcagcgatgaattccgccgagcaaaccgttacgtggctcatcactctgggggtgctgg

SEQ ID NO: 131210 - DNA, 120 bp, Artificial Sequence
  ENSG00000102606_51 (sequence is synthesized)
agtcgcccaaaaaaaccatctcggacccggagggctttctgcaggcgtcgctgaaggatggggtggtcctctgcaggctgctggagcgcctgctccccgggaccatcgagaaagtctacc

SEQ ID NO: 131211 - DNA, 120 bp, Artificial Sequence
  ENSG00000102606_52 (sequence is synthesized)
aatgcttgttgtatcgcagcctgcttttcttagatgttttcttgctgttccttgtctcttttatgtgatattttaacaacttttgagagtgttcctgatatttcccattgtactttgtgg

SEQ ID NO: 131212 - DNA, 120 bp, Artificial Sequence
  ENSG00000102606_53 (sequence is synthesized)
aggcttaactgccgatgcgagtatacattcgaatgactgactattggagggaggtggtgtgttcacgtgagcctacatccgagggtgctcttcgtaaggggtagttgttgttttatagct

SEQ ID NO: 131213 - DNA, 120 bp, Artificial Sequence
  ENSG00000102606_54 (sequence is synthesized)
ccaaatggtttttttattctcagtgtagcaactgtttgatttctttctggatacagctgtatgaacacttttctattttatactgaaatcacacaggtttgtgatctaagtgccagaacc

SEQ ID NO: 131214 - DNA, 120 bp, Artificial Sequence
  ENSG00000102606_55 (sequence is synthesized)
atggaggagactctggccttatctgtagggacctaaattttttaagtgctatgaacactgatcaagtagttgtggagagatgagaagaatatatgcagcaaaggtgctgtgagcccagtt

SEQ ID NO: 131215 - DNA, 120 bp, Artificial Sequence
  ENSG00000102606_56 (sequence is synthesized)
ccaacggctgtgttctggtaatcgtgcagaacagcatgtgggctctgggccttggcaggtgcacagacgggcgggcgtcacgtgtgttcagagcttgtctccacctcacggctctgtgct

SEQ ID NO: 131216 - DNA, 120 bp, Artificial Sequence
  ENSG00000102606_57 (sequence is synthesized)
cttctgtgtgctgcgttgtggccgtgaagtgggagctctcctttccaaaggcagagcttactgtcatggctcagatgttcactcgcatcttcaccccaaacttccctgaattgcagtgat

SEQ ID NO: 131217 - DNA, 120 bp, Artificial Sequence
  ENSG00000102606_58 (sequence is synthesized)
ttctgttataaggcacatagcaagcctgtaccactctacagtaaaatctctacactaacagtttaaagcccgaaagctgaagcattcagcctctgcaagtgtagactactggactgtagt

SEQ ID NO: 131218 - DNA, 120 bp, Artificial Sequence
  ENSG00000102606_59 (sequence is synthesized)
agaggcatttggaatacttacaaagtcaagtgctgtggcttcagttcccccggctccccacccctgacatccatacttatgttgtctggaagagccatggacacatcattattttcagca

SEQ ID NO: 131219 - DNA, 120 bp, Artificial Sequence
  ENSG00000102606_60 (sequence is synthesized)
accagctgcagtgaaactccatttacagcaaccccatagtataaaaccacaatgcctcattgtaatgggatattgaagttcattgaagaattactaggttgccatgtggctcacttattt

SEQ ID NO: 131220 - DNA, 120 bp, Artificial Sequence
  ENSG00000102606_61 (sequence is synthesized)
tcagttgctttaaaacctaatcaatatttggataaaaagtgcaaaacacttgcttcacatttctctgcagatctttggccctcttcgtgcagtagtgaattgttttccaatgagtgttct

SEQ ID NO: 131221 - DNA, 120 bp, Artificial Sequence
  ENSG00000102606_62 (sequence is synthesized)
cgagaaacaaccctgaattgtgcctcctcacgcacagttcagaggtgcttgggtgggaagctgcttctgctccgtgtggccctagaagactgatttaggggagttttacactcaactata

SEQ ID NO: 131222 - DNA, 120 bp, Artificial Sequence
  ENSG00000102606_63 (sequence is synthesized)
gatgatttttctgagaattttaactgtttattatgcttcatttaagaaaacaaaaaataaatgattatgatgatgaaaagggccagactcatgttgaaggcattaaaagaatttatgaca

SEQ ID NO: 131223 - DNA, 120 bp, Artificial Sequence
  ENSG00000102606_64 (sequence is synthesized)
ctgcttcaaaaagcactgaatgtgacctgttgcattcagttgtagcatcaaatccacacctagtcattgcttgaggggccaaattgtgttctgtcccatgcacgctctatttggtgttaa

SEQ ID NO: 131224 - DNA, 120 bp, Artificial Sequence
  ENSG00000102606_65 (sequence is synthesized)
aatggaaccttacggttgtgttttaagtattcattgaaaccagcttcagaaaacaagatgccatagtaaattgagaataacattttttccttcttcagggtggctgtaattccaggtggc

SEQ ID NO: 131225 - DNA, 120 bp, Artificial Sequence
  ENSG00000102606_66 (sequence is synthesized)
cgtgatttctttcttccccactgcccactccttcgccaaacccacgtattcagtgttctgatcttgtttgtgcagagtgaactctgatgcagtatcagtcttgtcctgggagccgggtcc

SEQ ID NO: 131226 - DNA, 120 bp, Artificial Sequence
  ENSG00000102606_67 (sequence is synthesized)
tgctgctcacaagcccagagctgccagggagctcctggcagtagcacgttgtttagaaagttgggtggcttcattcagcatggaacaagctaatggcacaggagacatcagggcagctgt

SEQ ID NO: 131227 - DNA, 120 bp, Artificial Sequence
  ENSG00000102606_68 (sequence is synthesized)
taattccaaatatttgttcccaagtagctactgaactgctcacaccattggaagattttgtattttcataccaattagtaaaaataagaacattgaggagcagtcagagcccagtgttaa

SEQ ID NO: 131228 - DNA, 120 bp, Artificial Sequence
  ENSG00000102606_69 (sequence is synthesized)
tctccggcagagatggggtttatgtatgttcagccagatagtaaatgggatttttggagaaataagataactacaaagtttctatacttactataagtggatttagaagcgattttggtt

SEQ ID NO: 131229 - DNA, 120 bp, Artificial Sequence
  ENSG00000102606_70 (sequence is synthesized)
ttgtattacatacggtagtcctctgcgtcagggagcacttttttgtttgcctcgagactactcattagcgcactggctaagctgcctttgccttctcgtaggcgtgggttgcctgtgtca

SEQ ID NO: 131230 - DNA, 120 bp, Artificial Sequence
  ENSG00000102606_71 (sequence is synthesized)
tgggctgtgtagaccacaacactcaaacacagttgctgcacttggattttcctttaataccaagtatcatttggttatcttactgggacattttcattgatattctatacaccaaagttt

SEQ ID NO: 131231 - DNA, 120 bp, Artificial Sequence
  ENSG00000102606_72 (sequence is synthesized)
tgacggtttaccatcattccattttgtaccagttaaaggcattttgatgatgctttttcttgatgctaagatcactgcagaagaataacctgaccttttctttgcatttgttttgaatgt

SEQ ID NO: 131232 - DNA, 120 bp, Artificial Sequence
  ENSG00000102606_73 (sequence is synthesized)
ctaacaccattagcttttgtgatctggttaagaagtattagtgccacaagcctgaaaagacagttctcctgtggcagtggcgatgtggcatccagagggccattgtttctacttttgtgg

SEQ ID NO: 131233 - DNA, 120 bp, Artificial Sequence
  ENSG00000102606_74 (sequence is synthesized)
gacttcagtcatgctgataatagaatcttctgttcatacaattctgtaatatttatttgtacagttagtattctaatgaaaggatgaagagtctgaactagaaggtaggtttaagccatc

SEQ ID NO: 131234 - DNA, 120 bp, Artificial Sequence
  ENSG00000102606_75 (sequence is synthesized)
accaggcctttgcaaatggcctaaatggtgttccctttgaaataacgcttgccacaagtatataataagctatattaattgtgttttgcataaaattgccaaaacacagtaatgtgtata

SEQ ID NO: 131235 - DNA, 120 bp, Artificial Sequence
  ENSG00000102606_76 (sequence is synthesized)
tagtggtataagatcttgaaaaaaatctctataattgtgctctttatctgtgaatgggaaaagccatttttagtaggtgactaccatttgaaaaactcaattggatgtatatctgaatgt

SEQ ID NO: 131236 - DNA, 120 bp, Artificial Sequence
  ENSG00000102606_77 (sequence is synthesized)
tgcattgtattgtacagtatgcatattattgtttgtggttgcatatggcaatgaagtgtttgttttatattaaaaaaaacctgttatgtacagttgaaataaattttgcatttgctagcc

SEQ ID NO: 131237 - DNA, 120 bp, Artificial Sequence
  ENSG00000102606_78 (sequence is synthesized)
acacttcagatgggggatagtccaggctggtggtggagctcccaggggatttcgcttctgggtagaattgtcatttttttttttcctcagagactgttgtgtgggcctagtggtgcatca

SEQ ID NO: 131238 - DNA, 120 bp, Artificial Sequence
  ENSG00000102606_79 (sequence is synthesized)
ggttccggttagaatccagtgcaggccgcaggcttctctttaattagagagggtcacttcacctccggttagaatccagtgcaggcagcagcttctttttaattagagaggggtctgggt

SEQ ID NO: 131239 - DNA, 120 bp, Artificial Sequence
  ENSG00000102606_80 (sequence is synthesized)
taaatgttactccgtagctaataaatgtggctagtggatgtcttttgagtgctggggccccagctagagctgcccctcctgtctggggcagacgccgtgaggagccccacgctcggccca

SEQ ID NO: 131240 - DNA, 120 bp, Artificial Sequence
  ENSG00000102606_81 (sequence is synthesized)
ggtggcgcgagctagtgtttggccccaaaaactgactgctgagagccagagatacgaatgaaatgataaatcctgaggtttatttcacatggagtgtttaaagagcagaaggaagtgcgt

SEQ ID NO: 131241 - DNA, 120 bp, Artificial Sequence
  ENSG00000102606_82 (sequence is synthesized)
ctgcgtcctctgggttcccagcgttggtgggatggagctgtggcgtccaggctgtgaggtctcatggggtcctgcagcagccagagcgtgcagaagacgaggaggggaagaaaggtggtg

SEQ ID NO: 131242 - DNA, 120 bp, Artificial Sequence
  ENSG00000102606_83 (sequence is synthesized)
acttccggcgccggggctcacttcctggtgcgggaaggggcagagattggtgcagccccggaggaagaaaaaagggtctaccccgagccccggagcgagagcgagtgcctgagcaacatc

SEQ ID NO: 131243 - DNA, 120 bp, Artificial Sequence
  ENSG00000102606_84 (sequence is synthesized)
gcccacaagccggccagcagggccgaggaggcaggagagtttctaaaaacgatgtctccctgtagctcaaaatactaaaatcttattcccagggtgtttcttcggggggtggggtggggg

SEQ ID NO: 131244 - DNA, 120 bp, Artificial Sequence
  ENSG00000102606_85 (sequence is synthesized)
aagctattacaatgtgccagtacttagccgcggagcggaaagcagtgctcatgaaggtggaggcacacccagagactgcatggaggtggaaccgggaagtccggggtctgaggtcctgcc

SEQ ID NO: 131245 - DNA, 120 bp, Artificial Sequence
  ENSG00000102606_86 (sequence is synthesized)
tgcagggttgaaaggcatgcctgccagcagacacatttgggagccagagtgtgctgtggtctgaatgtgtttccccagatcatctgttactacagatgatcaccaattggatggtattaa

SEQ ID NO: 131246 - DNA, 120 bp, Artificial Sequence
  ENSG00000102606_87 (sequence is synthesized)
aagtgaggtactgctgcccacatgcacgcaccagggtttctgtcccactcttaggagctcatagcagaagattttaaaggcatctcaagcgatgaaaaatgtctaatagaagctctatct

SEQ ID NO: 131247 - DNA, 120 bp, Artificial Sequence
  ENSG00000102606_88 (sequence is synthesized)
tataatttgtgagctactttttattcttgacacaggagagaggcttatggcatgttagagaggcttagagctgagtgtggacttgttgatcagtttgatccagctgaagtcagtgtggcc

SEQ ID NO: 131248 - DNA, 120 bp, Artificial Sequence
  ENSG00000102606_89 (sequence is synthesized)
cgaagcccacgtgaactgaaggatagatagtgtgcagaaagacttgcaggagtcctgtgcacacatccgcatggagctgtatgcgcttatctggccagcaactttgtaccaaggctcact

SEQ ID NO: 131249 - DNA, 120 bp, Artificial Sequence
  ENSG00000102678_0 (sequence is synthesized)
gccactctgcgcgccggcgggggctgcgcaggaggagcgctccgcccggctacaacgctccgcgagccggcgcggcaacacctgttcgcggcagcctgggcggcacgcgagctcccggac

SEQ ID NO: 131250 - DNA, 120 bp, Artificial Sequence
  ENSG00000102678_1 (sequence is synthesized)
gcggctctcctcgctcgccgctcgccacccgttctaagccaatggacatctgccgagcctctggagaatcctggatactagctttggacgcctaaagtttcttcttctttttgttttatt

SEQ ID NO: 131251 - DNA, 120 bp, Artificial Sequence
  ENSG00000102678_2 (sequence is synthesized)
attattatcattttttggaggggggaccgggaggggagatttgtcgccgccaccaacgtgagatttttttttccccttgaaggattcatgctgatgtctgcagagtcggttagagagtaa

SEQ ID NO: 131252 - DNA, 120 bp, Artificial Sequence
  ENSG00000102678_3 (sequence is synthesized)
aaacagcgcatgccttcctggagtcaggatccgtaaattctgacgtagcccgtgcatcttaaaaatccctataataacgcctaggcatttaagttgctatggtcattctgatctcaaacc

SEQ ID NO: 131253 - DNA, 120 bp, Artificial Sequence
  ENSG00000102678_4 (sequence is synthesized)
aaatggagaaactacggattttttttccttattacggtcggatgggatgaagaccttcctgcctgctaagagctggggatctatctatagagatacatagatatgtttatcaatatgtca

SEQ ID NO: 131254 - DNA, 120 bp, Artificial Sequence
  ENSG00000102678_5 (sequence is synthesized)
gtgtgtgagtataaagtggtggtttcttagactatcagtggtttgaccttgaacctgtgccagtgaaacagcagattacttttatttatgcatttaatggattgaagaaaagaacctttt

SEQ ID NO: 131255 - DNA, 120 bp, Artificial Sequence
  ENSG00000102678_6 (sequence is synthesized)
ttttctctctctctctgcaactgcagtaagggaggggagttggatatacctcgcctaatatctcctgggttgacaccatcattattgtttattcttgtgctccaaaagccgagtcctctg

SEQ ID NO: 131256 - DNA, 120 bp, Artificial Sequence
  ENSG00000102678_7 (sequence is synthesized)
atggctcccttaggtgaagttgggaactatttcggtgtgcaggatgcggtaccgtttgggaatgtgcccgtgttgccggtggacagcccggttttgttaagtgaccacctgggtcagtcc

SEQ ID NO: 131257 - DNA, 120 bp, Artificial Sequence
  ENSG00000102678_8 (sequence is synthesized)
gaagcaggggggctccccaggggacccgcagtcacggacttggatcatttaaaggggattctcaggcggaggcagctatactgcaggactggatttcacttagaaatcttccccaatggt

SEQ ID NO: 131258 - DNA, 120 bp, Artificial Sequence
  ENSG00000102678_9 (sequence is synthesized)
actatccagggaaccaggaaagaccacagccgatttggcattctggaatttatcagtatagcagtgggcctggtcagcattcgaggcgtggacagtggactctacctcgggatgaatgag

SEQ ID NO: 131259 - DNA, 120 bp, Artificial Sequence
  ENSG00000102678_10 (sequence is synthesized)
aagggggagctgtatggatcagaaaaactaacccaagagtgtgtattcagagaacagttcgaagaaaactggtataatacgtactcatcaaacctatataagcacgtggacactggaagg

SEQ ID NO: 131260 - DNA, 120 bp, Artificial Sequence
  ENSG00000102678_11 (sequence is synthesized)
cgatactatgttgcattaaataaagatgggaccccgagagaagggactaggactaaacggcaccagaaattcacacattttttacctagaccagtggaccccgacaaagtacctgaactg

SEQ ID NO: 131261 - DNA, 120 bp, Artificial Sequence
  ENSG00000102678_12 (sequence is synthesized)
tataaggatattctaagccaaagttgacaaagacagtttcttcacttgagcccttaaaaaagtaaccactataaaggtttcacgcggtgggttcttattgattcgctgtgtcatcacatc

SEQ ID NO: 131262 - DNA, 120 bp, Artificial Sequence
  ENSG00000102678_13 (sequence is synthesized)
agctccactgttgccaaactttgtcgcatgcataatgtatgatggaggcttggatgggaatatgctgattttgttctgcacttaaaggcttctcctcctggagggctgcctagggccact

SEQ ID NO: 131263 - DNA, 90 bp, Artificial Sequence
  ENSG00000102678_14 (sequence is synthesized)
cttaaaggcttctcctcctggagggctgcctagggccacttgcttgatttatcatgagagaagaggagagagagagagactgagcgctag

SEQ ID NO: 131264 - DNA, 120 bp, Artificial Sequence
  ENSG00000102678_15 (sequence is synthesized)
cgagagcaaaaggactgcggcctgatgcatgctggaaaaagacacgcttttcatttctgatcagttgtacttcatcctatatcagcacagctgccatacttcgacttatcaggattctgg

SEQ ID NO: 131265 - DNA, 120 bp, Artificial Sequence
  ENSG00000102678_16 (sequence is synthesized)
ctggtggcctgcgcgagggtgcagtcttacttaaaagactttcagttaattctcactggtatcatcgcagtgaacttaaagcaaagacctcttagtaaaaaataaaaaaaaataaaaaat

SEQ ID NO: 131266 - DNA, 120 bp, Artificial Sequence
  ENSG00000102678_17 (sequence is synthesized)
agttaaatttatttatagaaattccaaaggcaacattttatttattttatatatttatttattatatagagtttatttttaatgaaacatgtacaggccagataggcattttggaagctt

SEQ ID NO: 131267 - DNA, 120 bp, Artificial Sequence
  ENSG00000102678_18 (sequence is synthesized)
gatataagaaattctaatgaccctaatgtactaaaggcgacaatctcttttgtgcccatattattgtaaacttatgcacatcgctcatgacactgagtattcactcttcagactgcttgt

SEQ ID NO: 131268 - DNA, 120 bp, Artificial Sequence
  ENSG00000102678_19 (sequence is synthesized)
ttcatagcttatcccagaggattaaagataaactgggtctcaaactttgattctgtgtctgcaatatttcctctctcataagtgactccactattgtaacttcatggttggaaaatatga

SEQ ID NO: 131269 - DNA, 120 bp, Artificial Sequence
  ENSG00000102678_20 (sequence is synthesized)
gggttgatatatgtcttacttgtttaaatctgtcgcagaatataccaaagctaaataataactatgctttcattttagccgatctccagaatgacagtattaacatcaaacattgtattg

SEQ ID NO: 131270 - DNA, 120 bp, Artificial Sequence
  ENSG00000102678_21 (sequence is synthesized)
atttagaattctcaaaaaaggaaaaaaaagtacatagcacagactattttttttaaagacgtaagaatcagattaacaggatcatacttgtaaactttttttggttcacttggctatcaa

SEQ ID NO: 131271 - DNA, 120 bp, Artificial Sequence
  ENSG00000102678_22 (sequence is synthesized)
atatgaaattatagaagtatcataggggtcattgtaacatcttttagagaaaatggctatcagtgtgaactgtcataattacgtggtaatagcacccttagtaaaacttgcaaaatgaaa

SEQ ID NO: 131272 - DNA, 120 bp, Artificial Sequence
  ENSG00000102678_23 (sequence is synthesized)
ctaataaatcgttatcaataatgacaatgagggggaaagtattatacttgttgactgtgttttgttttttaaaatggtctccacaagcgctcaatttttttagaggggatattactatat

SEQ ID NO: 131273 - DNA, 120 bp, Artificial Sequence
  ENSG00000102678_24 (sequence is synthesized)
agaatatcttttacaaggcttttataacattttatgctgaaaagcataagaatacgtatttctttagtagcaataattttggaacttgcccttgggcaagcgagactatttcttactata

SEQ ID NO: 131274 - DNA, 120 bp, Artificial Sequence
  ENSG00000102678_25 (sequence is synthesized)
tactaaggagaaaagagccaaattcttaaagcaatatttaagaaaaaaggaatttataacaaattctcatctacatatgacactttctagccagttgtgttgagaagtgcaaagtgacgg

SEQ ID NO: 131275 - DNA, 120 bp, Artificial Sequence
  ENSG00000102678_26 (sequence is synthesized)
tttaaacatgtgttgggatttattgaactaattttaaaatttactattcaaactttattttgctctgatgcacattctctatgaaaaataaaagtgtgtcactggtgagtgacagctgtt

SEQ ID NO: 131276 - DNA, 120 bp, Artificial Sequence
  ENSG00000102678_27 (sequence is synthesized)
atgagctagaagcgcatgacttattgtgacgatgtcttgcctttctgtggtccaagttggagtacatggcaatgccctcctgctgatgtgcattaaggaaaatctaagtctaatatttgg

SEQ ID NO: 131277 - DNA, 120 bp, Artificial Sequence
  ENSG00000102678_28 (sequence is synthesized)
aattaagatatattttagggggaggggacagaagcaatgtaaaatagttgatttatgataaagctcagaatgtcctcttcatttattttcttgttttattttcctttctaaacagaaact

SEQ ID NO: 131278 - DNA, 120 bp, Artificial Sequence
  ENSG00000102678_29 (sequence is synthesized)
gcatttaattccaaaaagtagtattcttatttattatttaaccctttgctgctgctaaaatgtgcacatattcaggctttagtttttccaaaaggcattttttttttggctgaaaaatat

SEQ ID NO: 131279 - DNA, 120 bp, Artificial Sequence
  ENSG00000102678_30 (sequence is synthesized)
taaacatttgaccacagggaagaatcaagtttctaggatgtcataggtatactatgtagcactgaaaaaattgattttaggtgacagccaaaagtagtcttaaagtagcatgagacctta

SEQ ID NO: 131280 - DNA, 120 bp, Artificial Sequence
  ENSG00000102678_31 (sequence is synthesized)
gataatcgacctaaaagaaagaaaattgtgaaaaagacaaaaatcttcatgcattcctataaaacgctactttaaggtctacttttggagttaattttgtttggtacttttttttttttt

SEQ ID NO: 131281 - DNA, 120 bp, Artificial Sequence
  ENSG00000102678_32 (sequence is synthesized)
aagacgagcaaattgttatatgcttttggcaattgatacaataaactgtaatggtctgtaaataaataaatattgactcatgcgatttatgtaaatagtggaactgggagagtggatggc

SEQ ID NO: 131282 - DNA, 120 bp, Artificial Sequence
  ENSG00000102678_33 (sequence is synthesized)
tcagggtttcggtgtgggcattgtctcttgggcagtagagtgagtcatccccagctcatgggtttgcatccagttcttgtcttaagagacccaaagcccagtgaatggcagccctgagcc

SEQ ID NO: 131283 - DNA, 120 bp, Artificial Sequence
  ENSG00000102678_34 (sequence is synthesized)
actgtggaatgggggttctggtttcacaaacagatgcttagatagccaaaccactgtcttgttggtgccaacacttgcactgtggtcaaagacttaccgagcatgggctgaacaaccttc

SEQ ID NO: 131284 - DNA, 120 bp, Artificial Sequence
  ENSG00000102678_35 (sequence is synthesized)
ccatctgtcatgtgaatgtccccaagcagtggtgaaggacatgctaggtcagtgttggggaacctgccctgccaggtcctgttttgtagataaacaaatggctgccttctggtgttttta

SEQ ID NO: 131285 - DNA, 120 bp, Artificial Sequence
  ENSG00000102678_36 (sequence is synthesized)
ttctatttcatctcattaacactacaaccttgtgttatttacttgataatctgtaattgtatgtaaatacatacaggattatgtaatttgtgtaaatacataattacagagttttgaaaa

SEQ ID NO: 131286 - DNA, 120 bp, Artificial Sequence
  ENSG00000102678_37 (sequence is synthesized)
ggggctgacacacttctggccgcgtttagggaatccggtttttcattttggcccaagttgagccccttcgctttctctttgtgtgtgagagtgggtctggcggggctgacagccgccgcc

SEQ ID NO: 131287 - DNA, 120 bp, Artificial Sequence
  ENSG00000102678_38 (sequence is synthesized)
gggatgaatgagaagggggagctgtatggatcagtaagtactggagggacttcatccagctttatctccatgtttgatttgaacagctgtcttttctctggattaaaaagggccagaaat

SEQ ID NO: 131288 - DNA, 120 bp, Artificial Sequence
  ENSG00000102683_0 (sequence is synthesized)
gttgctgaagcttcatcctttgctctcattctgtaagtcatagaaaagtttgaaacattctgtctgtggtagagctcgggccagctgtagttcattcgccagtgtgcttttcttaatatc

SEQ ID NO: 131289 - DNA, 120 bp, Artificial Sequence
  ENSG00000102683_1 (sequence is synthesized)
taagatggtgcgtgagcagtacactacagccacagaaggcatctgcatagagaggccagagaatcagtatgtctacaaaattggcatttatggctggagaaagcgctgtctctacttgtt

SEQ ID NO: 131290 - DNA, 120 bp, Artificial Sequence
  ENSG00000102683_2 (sequence is synthesized)
tgttcttcttttactcatcatcctcgttgtgaatttagctcttacaatttggattcttaaagtgatgtggttttctccagcaggaatgggccacttgtgtgtaacaaaagatggactgcg

SEQ ID NO: 131291 - DNA, 120 bp, Artificial Sequence
  ENSG00000102683_3 (sequence is synthesized)
cttggaaggggaatcagaatttttattcccattgtatgccaaagaaatacactccagagtggactcatctctgcttctacaatcaacccagaatgtgactgtaaatgcgcgcaactcaga

SEQ ID NO: 131292 - DNA, 120 bp, Artificial Sequence
  ENSG00000102683_4 (sequence is synthesized)
aggggaggtcacaggcaggttaaaagtcggtcccaaaatggtagaagtccagaatcaacagtttcagatcaactccaacgacggcaagccactatttactgtagatgagaaggaagttgt

SEQ ID NO: 131293 - DNA, 120 bp, Artificial Sequence
  ENSG00000102683_5 (sequence is synthesized)
ggttggtacagataaacttcgagtaactgggcctgaaggggctctttttgaacattcagtggagacaccccttgtcagagccgacccgtttcaagaccttagattagaatcccccactcg

SEQ ID NO: 131294 - DNA, 120 bp, Artificial Sequence
  ENSG00000102683_6 (sequence is synthesized)
ctttctcaaatggatattctttttcatagtagtgatggaatgcttgtgcttgatgctgaaactgtgtgcttacccaagctggtgcaggggacgtggggtccctctggcagctcacagagc

SEQ ID NO: 131295 - DNA, 120 bp, Artificial Sequence
  ENSG00000102683_7 (sequence is synthesized)
ctctacgaaatctgtgtgtgtccagatgggaagctgtacctgtctgtggccggtgtgagcaccacgtgccaggagcacaaccacatctgcctctgagctgcctgcgtcctctcggtgagc

SEQ ID NO: 131296 - DNA, 120 bp, Artificial Sequence
  ENSG00000102683_8 (sequence is synthesized)
tgtgcagtgccggccccagatcctcacacccagggagcagctgcacatcgtgaaagactgaggcagcgtggatgggaagtaaacgcttccagaggaactcagaaaaaattatgtgccagt

SEQ ID NO: 131297 - DNA, 120 bp, Artificial Sequence
  ENSG00000102683_9 (sequence is synthesized)
gaaagtgtttggacaaaaactacatgatctcaaaatgcacgtggatgtgagacacaaaagttgacaaaatggaaaagcaatgtgtttttccactggattaattttcaccggaacaattgc

SEQ ID NO: 131298 - DNA, 120 bp, Artificial Sequence
  ENSG00000102683_10 (sequence is synthesized)
gaattctctctgcctcgcctccccctatcttgtccgtgtgggcacacactgagtgttgagttgccgtgtggagttaatgtatgacgctccactgtggatatctaatgccctgttgagagt

SEQ ID NO: 131299 - DNA, 120 bp, Artificial Sequence
  ENSG00000102683_11 (sequence is synthesized)
agccttgctcagtactaaaatgccccaaagttctatacagcatttcctttatagcattcaaacctcacatcctcccttcagtttaatgcaagtaagtcaggtttcacaagaaaattttca

SEQ ID NO: 131300 - DNA, 120 bp, Artificial Sequence
  ENSG00000102683_12 (sequence is synthesized)
agttttgaagggaatttgaggttgatctggttttcaagatgtagttaaaggaataaatcactcaaaattaaactttctgtatatagtcaataagcaataaaaacctcatttttcagagtt

SEQ ID NO: 131301 - DNA, 120 bp, Artificial Sequence
  ENSG00000102699_0 (sequence is synthesized)
agattacggaagtaccgcgagcaaggagcgcggaatcggggagcgtccggagctagctggatcctctaggcaggatggtgatgggaatctttgcaaattgtatcttctgtttgaaagtga

SEQ ID NO: 131302 - DNA, 120 bp, Artificial Sequence
  ENSG00000102699_1 (sequence is synthesized)
agtacttacctcagcagcagaagaaaaagctacaaactgacattaaggaaaatggcggaaagttttccttttcgttaaatcctcagtgcacacatataatcttagataatgctgatgttc

SEQ ID NO: 131303 - DNA, 120 bp, Artificial Sequence
  ENSG00000102699_2 (sequence is synthesized)
tgagtcagtaccaactgaattctatccaaaagaaccacgttcatattgcaaacccagattttatatggaaatctatcagggaaaagagactcttggatgtaaagaattatgatccttata

SEQ ID NO: 131304 - DNA, 120 bp, Artificial Sequence
  ENSG00000102699_3 (sequence is synthesized)
agcccctggacatcacaccacctcctgatcagaaggcgagcagttctgaagtgaaaacagaaggtctatgcccggacagtgccacagaggaggaagacactgtggaactcactgagtttg

SEQ ID NO: 131305 - DNA, 120 bp, Artificial Sequence
  ENSG00000102699_4 (sequence is synthesized)
gtatgcagaatgttgaaattcctcatcttcctcaagattttgaagttgcaaaatataacaccttggagaaagtgggaatggagggaggccaggaagctgtggtggtggagcttcagtgtt

SEQ ID NO: 131306 - DNA, 120 bp, Artificial Sequence
  ENSG00000102699_5 (sequence is synthesized)
cgcgggactccagggactgtcctttcctgatatcctcacacttcctcctggatgatggcatggagactagaagacagtttgctataaagaaaacctctgaagatgcaagtgaatactttg

SEQ ID NO: 131307 - DNA, 120 bp, Artificial Sequence
  ENSG00000102699_6 (sequence is synthesized)
aaaattacattgaagaactgaagaaacaaggatttctactaagagaacatttcacacctgaagcaacccaattagcatctgaacaattgcaagcattgcttttggaggaagtcatgaatt

SEQ ID NO: 131308 - DNA, 120 bp, Artificial Sequence
  ENSG00000102699_7 (sequence is synthesized)
caagcactctgagccaagaggtgagcgatttagtagagatgatttgggcagaggccctgggccacctggaacacatgcttctcaagccagtgaacaggattagcctcaacgatgtgagca

SEQ ID NO: 131309 - DNA, 120 bp, Artificial Sequence
  ENSG00000102699_8 (sequence is synthesized)
aggcagaggggattctccttctagtaaaggcagcactgaaaaatggagaaacagcagagcaattgcaaaagatgatgacagagttttacagactgatacctcacaaaggcacaatgccca

SEQ ID NO: 131310 - DNA, 120 bp, Artificial Sequence
  ENSG00000102699_9 (sequence is synthesized)
aagaagtgaacctgggactattggctaagaaagcagacctctgccagctaataagagacatggttaatgtctgtgaaactaatttgtccaaacccaacccaccatccctggccaaatacc

SEQ ID NO: 131311 - DNA, 120 bp, Artificial Sequence
  ENSG00000102699_10 (sequence is synthesized)
gagctttgaggtgcaaaattgagcatgttgaacagaatactgaagaatttctcagggttagaaaagaggttttgcagaatcatcacagtaagagcccagtggatgtcttgcagatattta

SEQ ID NO: 131312 - DNA, 120 bp, Artificial Sequence
  ENSG00000102699_11 (sequence is synthesized)
gagttggcagagtgaatgaaaccacagagtttttgagcaaacttggtaatgtgaggcccttgttgcatggttctcctgtacaaaacatcgtgggaatcttgtgtcgagggttgcttttac

SEQ ID NO: 131313 - DNA, 120 bp, Artificial Sequence
  ENSG00000102699_12 (sequence is synthesized)
ccaaagtagtggaagatcgtggtgtgcaaagaacagacgtcggaaaccttggaagtgggatttatttcagtgattcgctcagtacaagtatcaagtactcacacccgggagagacagatg

SEQ ID NO: 131314 - DNA, 120 bp, Artificial Sequence
  ENSG00000102699_13 (sequence is synthesized)
gcaccagactcctgctcatttgtgacgtagccctcggaaagtgtatggacttacatgagaaggacttttccttaactgaagcaccaccaggctacgacagtgtgcatggagtttcgcaaa

SEQ ID NO: 131315 - DNA, 120 bp, Artificial Sequence
  ENSG00000102699_14 (sequence is synthesized)
cagcctctgtcaccacagactttgaggatgatgaatttgttgtctataaaaccaatcaggttaaaatgaaatatattattaaattttccatgcctggagatcagataaaggactttcatc

SEQ ID NO: 131316 - DNA, 120 bp, Artificial Sequence
  ENSG00000102699_15 (sequence is synthesized)
ctagtgatcatactgaattagaggaatacagacctgagttttcaaatttttcaaaggttgaagattaccagttaccagatgccaaaacttccagcagcaccaaggccggcctccaggatg

SEQ ID NO: 131317 - DNA, 120 bp, Artificial Sequence
  ENSG00000102699_16 (sequence is synthesized)
cctctgggaacttggttcctctggaggatgtccacatcaaagggagaatcatagacactgtagcccaggtcattgtttttcagacatacacaaataaaagtcacgtgcccattgaggcaa

SEQ ID NO: 131318 - DNA, 120 bp, Artificial Sequence
  ENSG00000102699_17 (sequence is synthesized)
aatatatctttcctttggatgacaaggccgctgtgtgtggcttcgaagccttcatcaatgggaagcacatagttggagagattaaagagaaggaagaagcccagcaagagtacctagaag

SEQ ID NO: 131319 - DNA, 120 bp, Artificial Sequence
  ENSG00000102699_18 (sequence is synthesized)
ccgtgacccagggccatggcgcttacctgatgagtcaggatgctccggacgtttttactgtaagtgttggaaacttaccccctaaggctaaggttcttataaaaattacctacatcacag

SEQ ID NO: 131320 - DNA, 120 bp, Artificial Sequence
  ENSG00000102699_19 (sequence is synthesized)
aactcagcatcctgggcactgttggtgtctttttcatgcccgccaccgtagcaccctggcaacaggacaaggctttgaatgaaaaccttcaggatacagtagagaagatttgtataaaag

SEQ ID NO: 131321 - DNA, 120 bp, Artificial Sequence
  ENSG00000102699_20 (sequence is synthesized)
aaataggaacaaagcaaagcttctctttgactatgtctattgagatgccgtatgtgattgaattcattttcagtgatacacatgaactgaaacaaaagcgcacagactgcaaagctgtca

SEQ ID NO: 131322 - DNA, 120 bp, Artificial Sequence
  ENSG00000102699_21 (sequence is synthesized)
ttagcaccatggaaggcagctccttagacagcagtggattttctctccacatcggtttgtctgctgcctatctcccaagaatgtgggttgaaaaacatccagaaaaagaaagcgaggctt

SEQ ID NO: 131323 - DNA, 120 bp, Artificial Sequence
  ENSG00000102699_22 (sequence is synthesized)
ccctgacctagccagtgagagcgaagtgattatttgtcttgactgctccagttccatggagggtgtgacattcttgcaagccaagcaaatcgccttgcatgcgctgtccttggtgggtga

SEQ ID NO: 131324 - DNA, 120 bp, Artificial Sequence
  ENSG00000102699_23 (sequence is synthesized)
gaagcagaaagtaaatattatccagttcggcacaggttacaaggagctattttcgtatcctaagcatatcacaagcaataccatggcagcagagttcatcatgtctgccacacctaccat

SEQ ID NO: 131325 - DNA, 120 bp, Artificial Sequence
  ENSG00000102699_24 (sequence is synthesized)
ggggaacacagacttctggaaaacactccgatatcttagcttattgtaccctgctcgagggtcacggaacatcctcctggtgtctgatgggcacctccaggatgagagcctgacattaca

SEQ ID NO: 131326 - DNA, 120 bp, Artificial Sequence
  ENSG00000102699_25 (sequence is synthesized)
gctcgtgaagaggagccgcccgcacaccaggttattcgcctgcggtatcggttctacagcaaatcgtcacgtcttaaggattttgtcccagtgtggtgccggagtatttgaatattttaa

SEQ ID NO: 131327 - DNA, 120 bp, Artificial Sequence
  ENSG00000102699_26 (sequence is synthesized)
tgcaaaatccaagcatagttggagaaaacagatagaagaccaaatgaccaggctatgttctccgagttgccactctgtctccgtcaaatggcagcaactcaatccagatgtgcccgaggc

SEQ ID NO: 131328 - DNA, 120 bp, Artificial Sequence
  ENSG00000102699_27 (sequence is synthesized)
cctgcaggccccagcccaggtgccgtccttgtttctcaatgatcgactccttgtctatggattcattcctcactgcacacaggcaactctgtgtgcactaattcaagagaaagaatttcg

SEQ ID NO: 131329 - DNA, 120 bp, Artificial Sequence
  ENSG00000102699_28 (sequence is synthesized)
tacaatggtgtcgactactgagcttcagaagacaactggaactatgatccacaagctggcagcccgagctctaatcagagattatgaagatggcattcttcacgaaaatgaaaccagtca

SEQ ID NO: 131330 - DNA, 120 bp, Artificial Sequence
  ENSG00000102699_29 (sequence is synthesized)
tgagatgaaaaaacaaaccttgaaatctctgattattaaactcagtaaagaaaactctctcataacacaatttacaagctttgtggcagttgagaaaagggatgagaatgagtcgccttt

SEQ ID NO: 131331 - DNA, 120 bp, Artificial Sequence
  ENSG00000102699_30 (sequence is synthesized)
tcctgatattccaaaagtttctgaacttattgccaaagaagatgtagacttcctgccctacatgagctggcagggggagccccaagaagccgtcaggaaccagtctcttttagcatcctc

SEQ ID NO: 131332 - DNA, 120 bp, Artificial Sequence
  ENSG00000102699_31 (sequence is synthesized)
tgagtggccagaattacgtttatccaaacgaaaacataggaaaattccattttccaaaagaaaaatggaattatctcagccagaagtttctgaagattttgaagaggatggcttaggtgt

SEQ ID NO: 131333 - DNA, 120 bp, Artificial Sequence
  ENSG00000102699_32 (sequence is synthesized)
actaccagctttcacatcaaatttggaacgtggaggtgtggaaaagctattggatttaagttggacagagtcatgtaaaccaacagcaactgaaccactatttaagaaagtcagtccatg

SEQ ID NO: 131334 - DNA, 120 bp, Artificial Sequence
  ENSG00000102699_33 (sequence is synthesized)
ggaaacatctacttctagcttttttcctattttggctccggccgttggttcctatcttcccccgactgcccgcgctcacagtcctgcttccttgtcttttgcctcatatcgtcaggtagc

SEQ ID NO: 131335 - DNA, 120 bp, Artificial Sequence
  ENSG00000102699_34 (sequence is synthesized)
tagtttcggttcagctgctcctcccagacagtttgatgcatctcaattcagccaaggccctgtgcctggcacttgtgctgactggatcccacagtcggcgtcttgtcccacaggacctcc

SEQ ID NO: 131336 - DNA, 120 bp, Artificial Sequence
  ENSG00000102699_35 (sequence is synthesized)
ccagaacccaccttcttcaccctattgtggcattgttttttcagggagctcattaagctctgcacagtctgctccactgcaacatcctggaggctttactaccaggccttctgctggcac

SEQ ID NO: 131337 - DNA, 120 bp, Artificial Sequence
  ENSG00000102699_36 (sequence is synthesized)
cttccctgagctggattctccccagcttcatttctctcttcctacagaccctgatcccatcagaggttttgggtcttatcatccctctgcttcctctccttttcattttcaaccttccgc

SEQ ID NO: 131338 - DNA, 120 bp, Artificial Sequence
  ENSG00000102699_37 (sequence is synthesized)
agcctctttgactgccaaccttaggctgccaatggcctctgctttacctgaggctctttgcagtcagtcccggactaccccagtagatctctgtcttctagaagaatcagtaggcagtct

SEQ ID NO: 131339 - DNA, 120 bp, Artificial Sequence
  ENSG00000102699_38 (sequence is synthesized)
cgaaggaagtcgatgtcctgtctttgcttttcaaagttctgacacagaaagtgatgagctatcagaagtacttcaagacagctgctttttacaaataaaatgtgatacaaaagatgacag

SEQ ID NO: 131340 - DNA, 120 bp, Artificial Sequence
  ENSG00000102699_39 (sequence is synthesized)
tatcctgtgctttctggaagtaaaagaagaggatgaaatagtgtgcatacaacactggcaggatgctgtgccttggacagaactcctcagtctacagacagaggatggcttctggaaact

SEQ ID NO: 131341 - DNA, 120 bp, Artificial Sequence
  ENSG00000102699_40 (sequence is synthesized)
tacaccagaactgggacttatattaaatcttaatacaaatggtttgcacagctttcttaaacaaaaaggcattcaatctctaggtgtaaaaggaagagaatgtctcctggacctaattgc

SEQ ID NO: 131342 - DNA, 120 bp, Artificial Sequence
  ENSG00000102699_41 (sequence is synthesized)
cacaatgctggtactacagtttattcgcaccaggttggaaaaagagggaatagtgttcaaatcactgatgaaaatggatgacgcttctatttccaggaatattccctgggcttttgaggc

SEQ ID NO: 131343 - DNA, 120 bp, Artificial Sequence
  ENSG00000102699_42 (sequence is synthesized)
aataaagcaagcaagtgaatgggtaagaagaactgaaggacagtacccatctatctgcccacggcttgaactggggaacgactgggactctgccaccaagcagttgctgggactccagcc

SEQ ID NO: 131344 - DNA, 120 bp, Artificial Sequence
  ENSG00000102699_43 (sequence is synthesized)
cataagcactgtgtcccctcttcatagagtcctccattacagtcaaggctaagtcaaatgaaactgaattttaaactttttgcatgcttctatgtagaaaataatcaaatgataatagat

SEQ ID NO: 131345 - DNA, 120 bp, Artificial Sequence
  ENSG00000102699_44 (sequence is synthesized)
acttataatgaaacttcattaaggtttcattcagtgtagcaattactgtctttaaaaattaagtggaagaagaattactttaatcaactaacaagcaataataaaatgaaacttaaaata

SEQ ID NO: 131346 - DNA, 120 bp, Artificial Sequence
  ENSG00000102699_45 (sequence is synthesized)
gtattttagaagttcctgtcattccatgagcaaactttctgtgtttcactgcttgaaagtgaaaccagctgtcttgctgacagttgtggccttgccaagattacattcactttagtctca

SEQ ID NO: 131347 - DNA, 120 bp, Artificial Sequence
  ENSG00000102699_46 (sequence is synthesized)
caagcttggaagttgacactagaatacagaagccttacagcatagagggatggggctccgggctcccagccagactgcctgagtctcagaacctgggttggccactcattagcttagccg

SEQ ID NO: 131348 - DNA, 120 bp, Artificial Sequence
  ENSG00000102699_47 (sequence is synthesized)
tgaccttgagcaagttccttaacctctcatctgtaaaaccaaggtgataatgaaaatacctacctcctaggattgctgaggaataaatgagctcatacatagaaagcactcagaacagaa

SEQ ID NO: 131349 - DNA, 120 bp, Artificial Sequence
  ENSG00000102699_48 (sequence is synthesized)
ctgaaccaaaagcaccaaatcagttagatgttattatttagcataagaatccaaatctccgcttgtcccgaagggcctgggtaaacctcctcactggctgtgctggactcgtgctggggg

SEQ ID NO: 131350 - DNA, 120 bp, Artificial Sequence
  ENSG00000102710_0 (sequence is synthesized)
ggtgcagcactgagccgccgacggggcgggtgggctttgctgccgagcaggcggcgccgtcttggggcctagcggcgaggcgacccgcacaggtgggcggtggcggtaggtgggtggcca

SEQ ID NO: 131351 - DNA, 120 bp, Artificial Sequence
  ENSG00000102710_1 (sequence is synthesized)
gcgactggcaacgcggtggcttagacgcgcgagatccggccagggtcagagtactgtaagattgatgttaaaggcatggtgttcaccccacttcatcagcgtacataagttatctcttct

SEQ ID NO: 131352 - DNA, 120 bp, Artificial Sequence
  ENSG00000102710_2 (sequence is synthesized)
tttggacccttattttatgccataatgcaacaagctttagaactagctttggatcgtgcagagtatgtcattgaaagtgcccgacagagacctcctaaaaggaaatacctatcaagtgga

SEQ ID NO: 131353 - DNA, 120 bp, Artificial Sequence
  ENSG00000102710_3 (sequence is synthesized)
agaaaatctgtatttcaaaaactttatgacttgtatattgaagaatgtgaaaaagaacctgaagttaagcagaaattaagaagaaatgtgaacttgttagagaagcttgttatgcaagag

SEQ ID NO: 131354 - DNA, 120 bp, Artificial Sequence
  ENSG00000102710_4 (sequence is synthesized)
actttgtcatgtttagtggtcaatctatacccaggaaatgagggatattctctgatgctcaggggaaaaaacggatcagattccgagaccattcgactgccctatgaagaaggagagttg

SEQ ID NO: 131355 - DNA, 120 bp, Artificial Sequence
  ENSG00000102710_5 (sequence is synthesized)
cttgaatatttggatgcagaagaattacctcctattttggttgatctcctagaaaaatctcaggttaatatttttcattgcggatgtgtcatagcagaaatacgtgactacaggcagtcc

SEQ ID NO: 131356 - DNA, 120 bp, Artificial Sequence
  ENSG00000102710_6 (sequence is synthesized)
agtaacatgaaatctcctggttaccaaagtcggcacattctcttacgtccaacaatgcagactttaatttgtgatgtacattcaataacaagtgataaccacaaatggacccaggaagac

SEQ ID NO: 131357 - DNA, 120 bp, Artificial Sequence
  ENSG00000102710_7 (sequence is synthesized)
aaacttttgcttgagagccagctcatcctagctacagctgaaccactctgtcttgatccttctatagcagtcacctgcactgcaaacagactgctctataacaagcaaaagatgaacact

SEQ ID NO: 131358 - DNA, 120 bp, Artificial Sequence
  ENSG00000102710_8 (sequence is synthesized)
cgcccaatgaaacggtgtttcaagaggtattccagatcctctctgaatcggcagcaagatctatctcattgtccacctcctcctcagctgaggttacttgatttcttacaaaaaagaaag

SEQ ID NO: 131359 - DNA, 120 bp, Artificial Sequence
  ENSG00000102710_9 (sequence is synthesized)
gaaagaaaagcaggtcagcattatgacctcaaaatttctaaggcaggaaattgtgtagatatgtggaaacggagtccctgtaatttggccataccttctgaagtagatgtggagaaatat

SEQ ID NO: 131360 - DNA, 120 bp, Artificial Sequence
  ENSG00000102710_10 (sequence is synthesized)
gctaaagtggaaaagtctatcaaatctgatgactcacagccaacagtctggccagcccatgatgtaaaagatgattatgtatttgaatgtgaagctggtactcagtatcagaaaacaaag

SEQ ID NO: 131361 - DNA, 120 bp, Artificial Sequence
  ENSG00000102710_11 (sequence is synthesized)
taaaatacagccatgtaaagcagatgaagaaagtgacagccagatgtctccatcacactcgtccacagatgatcattcaaattggttcattattggatcaaagaccgatgctgagagggt

SEQ ID NO: 131362 - DNA, 120 bp, Artificial Sequence
  ENSG00000102710_12 (sequence is synthesized)
agtcaatcagtaccaagaattagtccagaatgaagccaaatgtccggtcaagatgtcacacagctccagtggctcagccagtctgagtcaggtttctccagggaaagaaacagatcaaac

SEQ ID NO: 131363 - DNA, 120 bp, Artificial Sequence
  ENSG00000102710_13 (sequence is synthesized)
tgaaaccgtgtcagttcagtcttcggtattggggaagggtgtaaaacatcgacccccaccaatcaaacttccctcaagctcaggaaatagttcctcaggtaactattttacaccacaaca

SEQ ID NO: 131364 - DNA, 120 bp, Artificial Sequence
  ENSG00000102710_14 (sequence is synthesized)
gacaagcagctttctcaaatctccaactcctcctccttcttctaagccatcaagtattcctcggaaatcatctgtggatctcaatcaagttagcatgctttctccagctgccctatcacc

SEQ ID NO: 131365 - DNA, 120 bp, Artificial Sequence
  ENSG00000102710_15 (sequence is synthesized)
tgccagctcatcacaaagaaccacggccacccaggtcatggcaaactctgctggacttaacttcatcaatgtagtgggctctgtttgtggggcccaggctttgatgagtggttcaaaccc

SEQ ID NO: 131366 - DNA, 120 bp, Artificial Sequence
  ENSG00000102710_16 (sequence is synthesized)
catgctgggctgtaacactggtgccataactcctgcaggaataaacctgagcggccttctaccctcaggaggtctgctaccaaatgcactgcccagtgcaatgcaggcagcttctcaagc

SEQ ID NO: 131367 - DNA, 120 bp, Artificial Sequence
  ENSG00000102710_17 (sequence is synthesized)
aggtgttccatttggtttaaaaaatacttcaagtctcaggcccttaaatctactccagcttccaggtggttcacttatttttaacactctgcagcagcagcaacagcagctctcccagtt

SEQ ID NO: 131368 - DNA, 120 bp, Artificial Sequence
  ENSG00000102710_18 (sequence is synthesized)
tacaccacaacaacctcagcagcccacaacttgtagtcctcaacagccaggggagcagggttctgagcaaggttcaaccagtcaagaacaggccttatctgctcagcaagctgctgttat

SEQ ID NO: 131369 - DNA, 120 bp, Artificial Sequence
  ENSG00000102710_19 (sequence is synthesized)
taaccttactggagtaggaagttttatgcagtcacaggcagctgcagttgcgattcttgcagcatcaaatggctatggcagcagcagcagcacaaacagctcagctacatcatcatcggc

SEQ ID NO: 131370 - DNA, 120 bp, Artificial Sequence
  ENSG00000102710_20 (sequence is synthesized)
atacaggcagccagtcaaaaagtaaaatgaagagaggcacgccaaccactccaaaattttgagtcttgcattactttttgttccttttttaaaaacacaagagcactgaatcaaaagaat

SEQ ID NO: 131371 - DNA, 120 bp, Artificial Sequence
  ENSG00000102710_21 (sequence is synthesized)
tgagtttctactttttgttttttttaatgtgtcagtattttacattgctagatgtacaaactttatacagaagcacaaccttatcatttttaaataaaaacagggaaatggtttaacaaa

SEQ ID NO: 131372 - DNA, 120 bp, Artificial Sequence
  ENSG00000102710_22 (sequence is synthesized)
tccccgcccctcggcccagcctgccaatcggaagtgcggccgccggaactggctgttggtgggggtgcagcactgagccgccgacggggcgggtgggctttgctgccgagcaggcggcgc

SEQ ID NO: 131373 - DNA, 120 bp, Artificial Sequence
  ENSG00000102710_23 (sequence is synthesized)
atatggaagtgacctaagaaataatagaaacatctttcagaagaatgtagtttgatatttatttagtataaaacgtttgtgcacagtgttaacaaatacaatttttacaaatctgttttg

SEQ ID NO: 131374 - DNA, 120 bp, Artificial Sequence
  ENSG00000102710_24 (sequence is synthesized)
agagacccggcaggccggggcggaggttgaggcagctaaactccaggtggacgcctacatcgcctttcgcggtgttgctaagccgaacttttaattttagtttgacttttgggttccaga

SEQ ID NO: 131375 - DNA, 120 bp, Artificial Sequence
  ENSG00000102710_25 (sequence is synthesized)
gacgggtatttccggacactggcaagaattttgccttgcgtgtcttcgaaggcggttttcttggtgtccatattgcataaaggcttgtcgctcctctgtggagatgacggttgtacagta

SEQ ID NO: 131376 - DNA, 120 bp, Artificial Sequence
  ENSG00000102710_26 (sequence is synthesized)
ttgtctcagcttggctctgccgagaacagacctgagcaaagccttcctcagcagagattccagctctcctctgcctttcaacagcagcagcaacagatacaacagttgcgattcttgcag

SEQ ID NO: 131377 - DNA, 120 bp, Artificial Sequence
  ENSG00000102710_27 (sequence is synthesized)
cctactccccaagattcaggcttcacccctcagcccactttgttaactcagtttgctcagcagcaaaggtctctgagccaggcaatgcctgtaacaaccattcctctttccaccatggta

SEQ ID NO: 131378 - DNA, 120 bp, Artificial Sequence
  ENSG00000102710_28 (sequence is synthesized)
ggaggaagacggggtccccagagacccggcaggccggggcggaggttgaggcagctaaactccaggtggacgcctacatcgcctttcgcgtactgtaagattgatgttaaaggcatggtg

SEQ ID NO: 131379 - DNA, 120 bp, Artificial Sequence
  ENSG00000102710_29 (sequence is synthesized)
ttcaccccacttcatcagcgtacataagttatctcttcttttggacccttattttatgccataatgtatgtcattgaaagtgcccgacagagacctcctaaaaggaaatacctatcaagt

SEQ ID NO: 131380 - DNA, 120 bp, Artificial Sequence
  ENSG00000102710_30 (sequence is synthesized)
cagttactgttaaagatgcagtattatctctcagatatttgctttattactgttttttgtaaatttgtttgtcaggataaacttgatgtgttaggaattaaacatgtatatttaggtgcc

SEQ ID NO: 131381 - DNA, 120 bp, Artificial Sequence
  ENSG00000102710_31 (sequence is synthesized)
aaatatgattgttaaccatatgtaacttattaaatatgtttacagtttatctcagacttttacactaaataagcaatatttttaaatgaagtcttgaattagtgaaatcgtaaataacaa

SEQ ID NO: 131382 - DNA, 120 bp, Artificial Sequence
  ENSG00000102710_32 (sequence is synthesized)
attaatttgaattcgttttgaactttttaggccaaaggcagcatgtaggaaactaacttttaaatgggtattgtggtagaatataactgtatatttttactgttactgcaatagcatctt

SEQ ID NO: 131383 - DNA, 120 bp, Artificial Sequence
  ENSG00000102710_33 (sequence is synthesized)
taatgggatttttaggtgatatactgcatccttaattgtaattgagtgtagcaacactcatgtatcatgtgtagaaattaacacttgcagttaactgctaaaaaaaaaaaaactagaaca

SEQ ID NO: 131384 - DNA, 120 bp, Artificial Sequence
  ENSG00000102710_34 (sequence is synthesized)
aattgtcagtgctaagtaagattccattaaccttattttaaaaggactggccatttataacaaactagcaatttttatttttctcaatgagcaggatctggaactcctaagccatctact

SEQ ID NO: 131385 - DNA, 120 bp, Artificial Sequence
  ENSG00000102710_35 (sequence is synthesized)
cataacttaaattcttcattaaatcttcataagcttttgcattagtgtttcttaagacagcttttttcaacctgtgaagtagtgatatctgaatgtactgtgtacccaaaatgtataagt

SEQ ID NO: 131386 - DNA, 120 bp, Artificial Sequence
  ENSG00000102710_36 (sequence is synthesized)
tgctagaagcttcaggcagagctcttgttgattgtatgtattatgtctctattgtaattgtacttgtttttctgtatctgtgtatacattctgcgtgtacctttcttataggcttacaac

SEQ ID NO: 131387 - DNA, 120 bp, Artificial Sequence
  ENSG00000102710_37 (sequence is synthesized)
ctacacatctccttaaaaaaataacctggtagttacatgtggcaataagatttcaaaatattttttattccagtgtaccctaggatcattttgcatatttatgtaaattgtgtggctgat

SEQ ID NO: 131388 - DNA, 120 bp, Artificial Sequence
  ENSG00000102710_38 (sequence is synthesized)
atgaaaaaaatgtcataagagttgttgctgcaggtcctatctttgtgtatatgtaagaagtcaactagttccaaggtggtgatacaataaactgaaaaacaatatttcaaaaacactcct

SEQ ID NO: 131389 - DNA, 120 bp, Artificial Sequence
  ENSG00000102710_39 (sequence is synthesized)
aaagttccattatcagtggtacccccaactaacaggagaccatatactaaatttattctgaaatgtctatgatttgatacttaagattaatcatactgctaacttttctattatttcatt

SEQ ID NO: 131390 - DNA, 120 bp, Artificial Sequence
  ENSG00000102710_40 (sequence is synthesized)
ctcaaacaggcaaaatataggatgaaaaaaaattatcattaagcaaaagtgattttctgcttatttttattcaataattaagtttgatgctttatgtgaaaagctggtattcctttataa

SEQ ID NO: 131391 - DNA, 120 bp, Artificial Sequence
  ENSG00000102710_41 (sequence is synthesized)
gatctagaagttaagggtctctttatatgtgtagtaatccctcaagttgcctaagatcattttaaggtcaagctggcctaatatattcaatgagataaaacttagttctttatctcctct

SEQ ID NO: 131392 - DNA, 120 bp, Artificial Sequence
  ENSG00000102710_42 (sequence is synthesized)
caaacagaagaaaaatgttttgtttttaccatggttacaaatagatactggttttttttttcaaataattcaagtttctaaaccctagcctagcctatctttctttgccatttatactgg

SEQ ID NO: 131393 - DNA, 120 bp, Artificial Sequence
  ENSG00000102710_43 (sequence is synthesized)
ttgccttgaaatgaggggaactctcttacccctgagaataaccagttaacccctccagttctggctcagtgttatatgaggggacttcagaaagtttgtggaaaactggaattaaaagat

SEQ ID NO: 131394 - DNA, 120 bp, Artificial Sequence
  ENSG00000102710_44 (sequence is synthesized)
aataataaaaaatataaacttttcttctcaatataagctccatcaagttcaagatgcttgtaaatgatatcaaccatttatttagtccacccctgaagaactgagggtcctgggaactga

SEQ ID NO: 131395 - DNA, 120 bp, Artificial Sequence
  ENSG00000102710_45 (sequence is synthesized)
accatatcaatgcaatcttttctacattattaactgaagaaaaatgggtactttttaaactttttttttttaagattaggaaacaaaaagaagtcagaaggagccaaatctggactgtaa

SEQ ID NO: 131396 - DNA, 120 bp, Artificial Sequence
  ENSG00000102710_46 (sequence is synthesized)
ggtgcatacctaatggtttcccatcaaaactcttacaaaatttctcttttttgatgagaggaatgagtagaggcattgtggtgcagaagtctctagtgaagctttcccaggcatttttct

SEQ ID NO: 131397 - DNA, 120 bp, Artificial Sequence
  ENSG00000102710_47 (sequence is synthesized)
aagtcaacaagcaaaatgtcttgagcatcccagaaaactgtttccatgatctttgctcttcatctgtctgcttttgctttgactgaatcacttctgcctcttggtggccattgccttaat

SEQ ID NO: 131398 - DNA, 120 bp, Artificial Sequence
  ENSG00000102710_48 (sequence is synthesized)
tgtgctttactatcttcaggattatactggaaagaatgctttagtatcttggtcctacttgttgaaaatttctattgaaagctctgcttttgcagctgatcgggatgcagtggttttggt

SEQ ID NO: 131399 - DNA, 120 bp, Artificial Sequence
  ENSG00000102710_49 (sequence is synthesized)
acccatcgagtggaaagtttactcaactttaatttttcagtcaaaattattcaggctgaaccagttgagaggcctatagtgttggcaattgtttctgctgttaatcattggtcctcttca

SEQ ID NO: 131400 - DNA, 120 bp, Artificial Sequence
  ENSG00000102710_50 (sequence is synthesized)
gttaggttacaaacaaaatgaatttttttcctcgtaaattgatgtggaagatctgctgctgcaggcttcgtcttcaacatagtcttgtcccttcttaaaacaagttacccatttgtaaac

SEQ ID NO: 131401 - DNA, 120 bp, Artificial Sequence
  ENSG00000102710_51 (sequence is synthesized)
tgctgctttctttgaggcattcttctcataaacttttcaaaaagcatcagtgatttcacaattcttccactcaagcttcaccatcaatttgatgtttgttcttgcttcagttttagcaga

SEQ ID NO: 131402 - DNA, 120 bp, Artificial Sequence
  ENSG00000102710_52 (sequence is synthesized)
attcctgttgctctggtaaaggctgttttcaaactgatgtcttatccttcttagtgtttcaaactaggttctgttcagacatgttataacagcttagtacatgtttattttggtgcaaaa

SEQ ID NO: 131403 - DNA, 120 bp, Artificial Sequence
  ENSG00000102710_53 (sequence is synthesized)
agttttgaaacctatgtatagttttttcttaatactcatttttcataaactttttaaagaccccttgtatatgagatgtccactcacaaaagtgttcagttgcctgactatagtgaggaa

SEQ ID NO: 131404 - DNA, 120 bp, Artificial Sequence
  ENSG00000102710_54 (sequence is synthesized)
taattactaagtcaaaagaaaatatcagtaatggtagttatcctttctgtgacatgtgattataaactaagcttcagttcatcagtaactaccaagtattgtgttttggtttgggctata

SEQ ID NO: 131405 - DNA, 120 bp, Artificial Sequence
  ENSG00000102710_55 (sequence is synthesized)
atgttgtcatctacaaaaagattaaaagctattaaaagaatattagaaaacagaaaaactcattggttaccatcagagtttgctagggcatcagattcttactctgaagattgataaagg

SEQ ID NO: 131406 - DNA, 120 bp, Artificial Sequence
  ENSG00000102710_56 (sequence is synthesized)
agagaatataatatttatcctgcccttcttgttatgaactgtattttaggcagccaagtaactgagggaaaattcttaggaaaatttccagctaataggtgcaaaagaaatgatagactt

SEQ ID NO: 131407 - DNA, 120 bp, Artificial Sequence
  ENSG00000102710_57 (sequence is synthesized)
ttaaaaaataaaagtttgaaagtcttaatgaagtagtgaatctagacagcagtatttcttggatgtgaaaaccattagatgataggttaatgggaaattttataatgtagaaatctgatc

SEQ ID NO: 131408 - DNA, 120 bp, Artificial Sequence
  ENSG00000102710_58 (sequence is synthesized)
aaacccactgattgaagatgagacagtcaattattgtgtacctcctggtttgatgcaagagacagtacacaacagtagtaatagtaccaataaagaactcttgtccaaaaaaaaaaaaaa

SEQ ID NO: 131409 - DNA, 120 bp, Artificial Sequence
  ENSG00000102710_59 (sequence is synthesized)
ttatgggtctctgttgtaaaattagggcattggacaataaaacctctaaggtcctttccaactttaaaatcttactgattctagaaaaatatctgtaagcttgtgatacaccaaactact

SEQ ID NO: 131410 - DNA, 120 bp, Artificial Sequence
  ENSG00000102710_60 (sequence is synthesized)
aagaatggttcttttcatgggatgagatttttgggggacttaaatgcatttttccaaagtttataatacctaggttttttttcatagaattaagaaaacaaaagaaatgtttaaaatata

SEQ ID NO: 131411 - DNA, 120 bp, Artificial Sequence
  ENSG00000102710_61 (sequence is synthesized)
gaatcattttttgaggagcgggggtacagtttagttttgtttctacttttacctttttttaaaattatttaactctttataacatgatttttaaatgtacacaaagataaaaggaaaatt

SEQ ID NO: 131412 - DNA, 120 bp, Artificial Sequence
  ENSG00000102710_62 (sequence is synthesized)
acagtgaacacctgtgttctagtcatttggcttcaacagctgttattttcctttaatagataagtatggaagagtggaagcttgctttcatcttactcctctgcctttctccctaaaact

SEQ ID NO: 131413 - DNA, 120 bp, Artificial Sequence
  ENSG00000102710_63 (sequence is synthesized)
ctctcttcccaccctattactcagaaatcttttcctcattctttatgtgtactgtaatatatttcatgaatctcatgtgaaattttctctgtaatacatatagtattcaatctgtaacca

SEQ ID NO: 131414 - DNA, 120 bp, Artificial Sequence
  ENSG00000102710_64 (sequence is synthesized)
ctaagagcactttgcagagttaaaaatctgggatttatagcagtattaattttatttaataaactatgaagttaaatataaatatcatctggggtttatagcagtattaattttaacaag

SEQ ID NO: 131415 - DNA, 66 bp, Artificial Sequence
  ENSG00000102710_65 (sequence is synthesized)
atttttggaactattttacaccacaacagacaagcagctttctcaaatctccaactcctcctcctt

SEQ ID NO: 131416 - DNA, 120 bp, Artificial Sequence
  ENSG00000102710_66 (sequence is synthesized)
ttatcatagctccgttatggtggtgatgtggtctgccttattctgttgttcatttcatgaactgggttccaaattcaataatgtgtcctcctttcagctctgtgctcttttgtccaatct

SEQ ID NO: 131417 - DNA, 120 bp, Artificial Sequence
  ENSG00000102710_67 (sequence is synthesized)
tttatatccagggagatcccctcaagataaatgtaacttttgaaatgtttggcttgcaattatatactgaaatgttacttcagacactattttaggtggtaccaaaggatgtcttttgca

SEQ ID NO: 131418 - DNA, 120 bp, Artificial Sequence
  ENSG00000102710_68 (sequence is synthesized)
gagcaaaagtttttaattttgctgaagtccaagttaacagtatcttttctttatggaatatcctctagttttcatgtctcggaactctttacctagctctaggtcccaaagattttctcc

SEQ ID NO: 131419 - DNA, 120 bp, Artificial Sequence
  ENSG00000102710_69 (sequence is synthesized)
tgtgttttttttctaacagttttatagtttcttattttgaatccatgatccattttcagttaatttttgtacaagatgtgcaacttaggtccgtgttttgtttttgtttgtttttgtttt

SEQ ID NO: 131420 - DNA, 120 bp, Artificial Sequence
  ENSG00000102710_70 (sequence is synthesized)
aaaagaaaacaacaacaaagaaaaaaaacagctattctttctgaattgaattacttctgcacatttgttaaaagtcagttgggtctatttgagtgggtctatttctaggttccctgttct

SEQ ID NO: 131421 - DNA, 120 bp, Artificial Sequence
  ENSG00000102710_71 (sequence is synthesized)
gggtctatttgagtgggtctatttctaggttccctgttctgtttcattaatctatgtgtctctccttcagccaataccacactgtcttgttcattgtagtgtcttaaaattgggcagtgt

SEQ ID NO: 131422 - DNA, 120 bp, Artificial Sequence
  ENSG00000102710_72 (sequence is synthesized)
tttctcccataccatttttcaaaattgttgtagctaatgtaggttctctacctttccatatacattttaaagtcatcttgtctatatctacaaaaaccttgccagcatttctaaaagaat

SEQ ID NO: 131423 - DNA, 120 bp, Artificial Sequence
  ENSG00000102710_73 (sequence is synthesized)
tgagttaaacttgttgatcagtttgggggaagaactgccatctttatgatgtgagtcttccagtacatgaacatagtatatgtccttatctagaccaaagtcaatgttttgtagtttttg

SEQ ID NO: 131424 - DNA, 120 bp, Artificial Sequence
  ENSG00000102710_74 (sequence is synthesized)
gttcattactagtatatatagtgttgatttttgtatattggtcttgttttgtgccctcttactggacttactacttctaggagctgttttggagattgcttagggttttctaccatatag

SEQ ID NO: 131425 - DNA, 120 bp, Artificial Sequence
  ENSG00000102710_75 (sequence is synthesized)
acagttgtgccatttgaaaataaggacaattttattttttcctataaaatctatataccttttatttccttttcttgacttagtctgctgactaaaagttccagcactatgtttatgtta

SEQ ID NO: 131426 - DNA, 120 bp, Artificial Sequence
  ENSG00000102710_76 (sequence is synthesized)
caaagggtgttttaagctttaaaaaattgtttcagtgaagctttataaaagccttaggcgttatctaggtagcattaaacaataaatacagatgcactgaaaaatgaagttttctttgtt

SEQ ID NO: 131427 - DNA, 120 bp, Artificial Sequence
  ENSG00000102710_77 (sequence is synthesized)
caaataccataaatttattcttgcttattctaaatacctttgaagtattttccttgttattctttttacaagactagtctaatactgctttctttcatataggaaaaaatactgatttct

SEQ ID NO: 131428 - DNA, 120 bp, Artificial Sequence
  ENSG00000102710_78 (sequence is synthesized)
agttaaggtaagtatacatttttattatgttgtagcttttgaaatgtagaagagaggaatttggaggagttacatttggagtattatttttgtgtgtgtgagtgaactaacatctttttt

SEQ ID NO: 131429 - DNA, 120 bp, Artificial Sequence
  ENSG00000102710_79 (sequence is synthesized)
aacctgaccctagtcaattctgtagctgactcagagctctggctaatctggcaccaggcagagatcacctgctgaggtaggagtgaaggaacagttatattgagtatcagactgtctcac

SEQ ID NO: 131430 - DNA, 120 bp, Artificial Sequence
  ENSG00000102710_80 (sequence is synthesized)
gcacttcctcctgagaagttatttacagatttatagcagtaacctgttttctcatgatgatttaaactggaaagccagagctattacagagcatgtatgaaattcaagtacagtaataaa

SEQ ID NO: 131431 - DNA, 120 bp, Artificial Sequence
  ENSG00000102710_81 (sequence is synthesized)
aagtgagcttggtcataaaccgagttcatggccaatttaacttaattcatttttatttggcataaagatatgggtagtagacatgtaacagaagtcgatttattgatgtcttggagccct

SEQ ID NO: 131432 - DNA, 120 bp, Artificial Sequence
  ENSG00000102710_82 (sequence is synthesized)
cgggttggaagggtctaaacgtctctatgagcttttgttgtctgtctttaaaaatgaatacagttttactatttaggccaaaaacagtggaattccagtagtgtctaactttaaaatctt

SEQ ID NO: 131433 - DNA, 120 bp, Artificial Sequence
  ENSG00000102710_83 (sequence is synthesized)
cctctcacctgggcctcccaaagtcctggggttacaggtgtgaaccaccatgcccagtcttatctcagagcaaatgttacgcaccatcctttgctaggcagagtgagcttcaaccctggc

SEQ ID NO: 131434 - DNA, 120 bp, Artificial Sequence
  ENSG00000102710_84 (sequence is synthesized)
agcacgtttgactcgtctggggagctccaaaaatggggactgtgcctcactctagaccacttaatcagtctcaagcagtactgtaagattgatgttaaaggcatggtgttcaccccactt

SEQ ID NO: 131435 - DNA, 120 bp, Artificial Sequence
  ENSG00000102738_0 (sequence is synthesized)
ggcagcgggacgcaccatttcagttgtgttcttggttcatttcgtgtctcggcgatgtttcctagagtctcgacgttcctacctcttcgccccctttcccgccaccctttgtcctctgga

SEQ ID NO: 131436 - DNA, 120 bp, Artificial Sequence
  ENSG00000102738_1 (sequence is synthesized)
agcccggagacatcagcggctgcgattatgctactcactgttcggcacggaacagtcaggtaccgcagttcagcgctgttggcccggacaaaaaataacatccaaagatattttggcact

SEQ ID NO: 131437 - DNA, 120 bp, Artificial Sequence
  ENSG00000102738_2 (sequence is synthesized)
aacagtgtgatctgtagcaagaaagataagcagtctgttcgaactgaggagacttccaaggagacttcagagagccaagacagtgaaaaggaaaatacgaaaaaagacttgttaggcatt

SEQ ID NO: 131438 - DNA, 120 bp, Artificial Sequence
  ENSG00000102738_3 (sequence is synthesized)
attaagggcatgaaagttgaattaagcacagtaaatgtacgaacaacaaagccccccaaaagaagaccacttaaaagtttggaagctacacttggcaggcttcgaagagctacagaatat

SEQ ID NO: 131439 - DNA, 120 bp, Artificial Sequence
  ENSG00000102738_4 (sequence is synthesized)
gctccaaagaagagaattgagcccctgagtcctgagttggtggcagctgcatctgctgtggcagattctctcccttttgataagcaaacaaccaagtcagagctgctgagccagctccag

SEQ ID NO: 131440 - DNA, 120 bp, Artificial Sequence
  ENSG00000102738_5 (sequence is synthesized)
cagcatgaggaagagtcaagggcacagagagatgcaaagcgacctaaaattagtttcagtaacataatatcagatatgaaagttgccagatctgctacagctagagttcgttcaagacca

SEQ ID NO: 131441 - DNA, 120 bp, Artificial Sequence
  ENSG00000102738_6 (sequence is synthesized)
aggagaagacggatgatcttaaaaaaaggaaaaatatattcacagggaaaagacttaatatttttgacatgatggcagttactaaagaagcacctgaaacagacacatcaccttcacttt

SEQ ID NO: 131442 - DNA, 120 bp, Artificial Sequence
  ENSG00000102738_7 (sequence is synthesized)
gggatgtggaatttgctaagcagttagccacagtaaatgaacaaccccttcagaatggatttgaagagctgatccagtggacaaaagaggggaaactatgggagttcccaattaacaatg

SEQ ID NO: 131443 - DNA, 120 bp, Artificial Sequence
  ENSG00000102738_8 (sequence is synthesized)
aagcaggttttgatgatgatggttcagaatttcatgaacatatatttctggagaaacacctggagagctttccaaaacaaggaccaattcgccacttcatggagctggtgacttgtggcc

SEQ ID NO: 131444 - DNA, 120 bp, Artificial Sequence
  ENSG00000102738_9 (sequence is synthesized)
tttccaaaaacccatatcttagtgttaaacagaaggttgaacacatagagtggtttagaaattattttaatgaaaaaaaggatattctaaaagaaagtaacatacagttcaattaagacc

SEQ ID NO: 131445 - DNA, 120 bp, Artificial Sequence
  ENSG00000102738_10 (sequence is synthesized)
atggaaatttttatttcaaacaattagagatggatattacaactaaataaaataattttactagagtttgtatatgttatgttgattattacatttgatttggctggtataaatgttaca

SEQ ID NO: 131446 - DNA, 120 bp, Artificial Sequence
  ENSG00000102738_11 (sequence is synthesized)
ttgttttcaaaaatatgatggtaactgaaaaatattcttgcatggagaaaaatcatcagtattcataggttcaaaagaatatctgggaattagtaatacatttaagacaacaactcctaa

SEQ ID NO: 131447 - DNA, 120 bp, Artificial Sequence
  ENSG00000102738_12 (sequence is synthesized)
ccgacttcctggggtcgatgttaccacctgctgggtcttagaagctattgctttaaatctgaggaaagagaaatcccagaaagaaaagatgacttgcccaaggtcatagtgtgcgtgaaa

SEQ ID NO: 131448 - DNA, 120 bp, Artificial Sequence
  ENSG00000102738_13 (sequence is synthesized)
agactttaaaaatgaaagtcacatattctacaaaaaacattcacattcataaaaatacccttaaacaaaatacaaatttatttttttctttccagtagagggggcagtgattacctggca

SEQ ID NO: 131449 - DNA, 120 bp, Artificial Sequence
  ENSG00000102738_14 (sequence is synthesized)
ttgttgcaaaacaaaagttaagcttgccattattgtagttacaatttttaatataatttttgcagttatctctcagtaactttttattatatactatttaattatgaatgtcagggtctg

SEQ ID NO: 131450 - DNA, 79 bp, Artificial Sequence
  ENSG00000102738_15 (sequence is synthesized)
agaaggaagtgcaaaatgcgtagggacaaggaatcgcctcttccctgctcaaatggttaagcgtgcatcagaaaggaat

SEQ ID NO: 131451 - DNA, 120 bp, Artificial Sequence
  ENSG00000102743_0 (sequence is synthesized)
agccgagagcgggcggcggagcctgagctggacgcggccacgccggcgcggcgggatatgtggtgcctgtcataagctccagagagctgccttccacaagaccagcagaagagtgggcaa

SEQ ID NO: 131452 - DNA, 120 bp, Artificial Sequence
  ENSG00000102743_1 (sequence is synthesized)
acatgaaatccaatcctgctatccaggctgccattgacctcacagcgggggctgcaggaggtacagcatgtgtactgaccgggcagccctttgacacaatgaaagtgaagatgcagacgt

SEQ ID NO: 131453 - DNA, 120 bp, Artificial Sequence
  ENSG00000102743_2 (sequence is synthesized)
tccctgacctgtaccggggcctcaccgactgctgcctgaagacttactcccaggtgggcttccgtggcttctacaagggtaccagtccagcactaatcgccaacatcgctgagaactcag

SEQ ID NO: 131454 - DNA, 120 bp, Artificial Sequence
  ENSG00000102743_3 (sequence is synthesized)
tcctcttcatgtgctacggcttctgccagcaggtggtgcggaaagtggctggattggacaagcaggcaaagctgagtgatctgcagaatgcagccgccggttccttcgcctctgcctttg

SEQ ID NO: 131455 - DNA, 120 bp, Artificial Sequence
  ENSG00000102743_4 (sequence is synthesized)
ctgcactggtgctctgccccacggagctcgtgaagtgccggctgcagaccatgtatgagatggagacatcagggaagatagccaagagccagaatacagtgtggtctgtcatcaaaagta

SEQ ID NO: 131456 - DNA, 120 bp, Artificial Sequence
  ENSG00000102743_5 (sequence is synthesized)
ttcttaggaaagatggccccttggggttctaccatggactctcaagcactttacttcgagaagtaccaggctatttcttcttcttcggtggctatgaactgagccggtccttttttgcat

SEQ ID NO: 131457 - DNA, 120 bp, Artificial Sequence
  ENSG00000102743_6 (sequence is synthesized)
cagggagatcaaaagatgaattaggccctgtacctttgatgttaagtggtggagttggtgggatttgcctctggcttgcggtatacccagtggattgtatcaaatccagaattcaagttc

SEQ ID NO: 131458 - DNA, 120 bp, Artificial Sequence
  ENSG00000102743_7 (sequence is synthesized)
tttccatgtctggaaaacaggcaggatttatcagaacctttataaatgttgtgaaaaatgaaggaataacggccttatattctggactgaaacctactatgattcgagcattccctgcca

SEQ ID NO: 131459 - DNA, 120 bp, Artificial Sequence
  ENSG00000102743_8 (sequence is synthesized)
atggagcactctttttggcctacgaatatagcaggaagttgatgatgaaccagttggaagcatactgaagtgtcttggtgggcctgagccaagcacaggtgtttgaggactacagttcat

SEQ ID NO: 131460 - DNA, 120 bp, Artificial Sequence
  ENSG00000102743_9 (sequence is synthesized)
ctcagggtttcttggagtacaagaccagtgtgaagttattctgatttcttgggaattttgctttttgtcttcccttctaccctacatcttaaactttatggaagaacctctattttgcat

SEQ ID NO: 131461 - DNA, 120 bp, Artificial Sequence
  ENSG00000102743_10 (sequence is synthesized)
catatcatttctgtccataattgtactgaaatagaaaagtgaccgctcttgctcttggtaaaatatagagtggtcagtagccttatgcacctaattcaaaaggtggaatatagttctgtc

SEQ ID NO: 131462 - DNA, 120 bp, Artificial Sequence
  ENSG00000102743_11 (sequence is synthesized)
agggcttttacgtaaacctccacttgtacatgcaatttggacagttatgtgttgagggaaatacagtttggtaccttgtttatttcaaatatcagaaaaacccagaggtgatcatttctc

SEQ ID NO: 131463 - DNA, 120 bp, Artificial Sequence
  ENSG00000102743_12 (sequence is synthesized)
atgaagatgcttataaatggttgcttaacccattctagatgtagggtctgcttaatgtgtgtacttttctaagtggttgattattttttatttttttgatacagagtctcactctgtcac

SEQ ID NO: 131464 - DNA, 120 bp, Artificial Sequence
  ENSG00000102743_13 (sequence is synthesized)
ctgcatactggtgtggcttccacacttgagtaaaagcttcagagtaggtatcctagatttccccaagatgctctactcttaaaatagtgccattcattttctaggtgggatcatattcca

SEQ ID NO: 131465 - DNA, 120 bp, Artificial Sequence
  ENSG00000102743_14 (sequence is synthesized)
cgctgactatattgctaggggtggcccagagggtcaggcctttgggaaatagcatggcctttaccagcttcccttctctcccaaagaacttcccttcttgggctttagattgaggaaggg

SEQ ID NO: 131466 - DNA, 120 bp, Artificial Sequence
  ENSG00000102743_15 (sequence is synthesized)
gctgagtggtaggcggtgctgctgtgctctgatgaagacccatgtggctagcaacagcgcttaccttttgtctctgggtcctggcctggggccatcaatccactttgggccactcactgt

SEQ ID NO: 131467 - DNA, 120 bp, Artificial Sequence
  ENSG00000102743_16 (sequence is synthesized)
ctgctctgcctccaccaatcagaaacccttccaaggaacagtgagagccaaagccaagagaagccttcttccctgtttggtgattgtgtgacagtgggtgaacctctctcagagagaact

SEQ ID NO: 131468 - DNA, 120 bp, Artificial Sequence
  ENSG00000102743_17 (sequence is synthesized)
agaaagaactcagtgcttgtactccacagtgagtaatgtcaggtctgacccatcctgaagcctgtcttgccatgcttttacagtgttggaggcttctacatttggtacttgcagtcagta

SEQ ID NO: 131469 - DNA, 120 bp, Artificial Sequence
  ENSG00000102743_18 (sequence is synthesized)
cttctacatttggtacttgcagtcagtaagtcttaatgatgactgtatatgtgatatgagtttataaagcaatggaacataagaaaagcaattgtaggccaggcgcagtggctcacgcct

SEQ ID NO: 131470 - DNA, 74 bp, Artificial Sequence
  ENSG00000102743_19 (sequence is synthesized)
tgacacagcgagacttcatctcaaaaaaaaaaagaaaagaaaagcaattgtacttcactatgccatatgtatgt

SEQ ID NO: 131471 - DNA, 120 bp, Artificial Sequence
  ENSG00000102743_20 (sequence is synthesized)
aaaagaaaagcaattgtacttcactatgccatatgtatgtattcactgaccaaaaattcactgaccaaccaaccaaactccacacttcatctgatcccccatagacttggggatggacag

SEQ ID NO: 131472 - DNA, 120 bp, Artificial Sequence
  ENSG00000102743_21 (sequence is synthesized)
ctgttctttggccatatggtataagaggatcattcttgtcactacttaagttagcctcatcattttgtgctgctccaacaccagcagggtatctcccaataaagtgttcctaagcagcct

SEQ ID NO: 131473 - DNA, 120 bp, Artificial Sequence
  ENSG00000102743_22 (sequence is synthesized)
gtatactgagtgcaagcaggctatcaattttaataatagtccataccatgtatgtgtttctgtcagcagaatgtacatgttgtacaaaacctccaggttccttaagctttttgctgtcca

SEQ ID NO: 131474 - DNA, 120 bp, Artificial Sequence
  ENSG00000102743_23 (sequence is synthesized)
tgaatcctctgtggcaactgtaatcacagagccagaagccagagggccagggatatgagaggctgacaaacatcaggggacatctggggaggagatccctgtcatgtctcttgtgccatg

SEQ ID NO: 131475 - DNA, 120 bp, Artificial Sequence
  ENSG00000102743_24 (sequence is synthesized)
gagctattatggctggtcttccatttgctttttctttaagtgaaaaccatttttctactttgcttttctctccatacttaaatggtcagtagctactgagtggtgctttatctgaatagg

SEQ ID NO: 131476 - DNA, 120 bp, Artificial Sequence
  ENSG00000102743_25 (sequence is synthesized)
cctggatcgaagtaaaatagaaatgggactggctttccacaggaagtaaactgcttcagagcccacagtcccctgctcagtgtccggaaagaagtcagtcatccctgttggcagtaaatc

SEQ ID NO: 131477 - DNA, 120 bp, Artificial Sequence
  ENSG00000102743_26 (sequence is synthesized)
ttcccacaggccgtccattagagatttaactagatatgttcaatagaaagagtctgaggcaagtggaaatgaggaacggaaacttaggttgggagaatattttttttttattcattctgt

SEQ ID NO: 131478 - DNA, 120 bp, Artificial Sequence
  ENSG00000102743_27 (sequence is synthesized)
ttgcttaattcagagtacagtttgtgctatttcatatctgtactccaggcagaaatataacttgaaaatactgtgtctaaagaaatttcagtgttctatcattaaattatttacttaata

SEQ ID NO: 131479 - DNA, 120 bp, Artificial Sequence
  ENSG00000102743_28 (sequence is synthesized)
aaagtggctggattggacaagcaggcaaagctgagtacagtgtggtctgtcatcaaaagtattcttaggaaagatggccccttggggttctaccatggactctcaagcactttacttcga

SEQ ID NO: 131480 - DNA, 80 bp, Artificial Sequence
  ENSG00000102743_29 (sequence is synthesized)
cacggccctgggcaggccgcccgccagccgcaggggcgctcctgagcttcgcggggccgcagtccgggatgcctgcgcga

SEQ ID NO: 131481 - DNA, 120 bp, Artificial Sequence
  ENSG00000102743_30 (sequence is synthesized)
aactgtggatctgcaggctggctgcaagacaacagaaaccattttaagcttcagttctaacaagctgctaaggagtgaagtgggggaaaggagtggactgaacagcattggatggtttcc

SEQ ID NO: 131482 - DNA, 120 bp, Artificial Sequence
  ENSG00000102753_0 (sequence is synthesized)
agtcggcccgcgcctcccccggcgctactgccacctcgcgctcggaggcgtcacagaacgtgctcttctctcccctcccccctcccgctctccccctcctccccctcccgctccaagatt

SEQ ID NO: 131483 - DNA, 120 bp, Artificial Sequence
  ENSG00000102753_1 (sequence is synthesized)
cgccgccgccgccgccgcagccgcaggagtagccgccgccggagccgcgcgcagccatggccgagaaccccagcttggagaaccaccgcatcaagagcttcaagaacaagggccgcgatg

SEQ ID NO: 131484 - DNA, 120 bp, Artificial Sequence
  ENSG00000102753_2 (sequence is synthesized)
tggaaacaatgcgaagacatagaaatgaagtgacagtggaactgcggaagaacaaaagagatgaacacttattgaaaaagagaaatgttccccaagaagaaagtctagaagattcagatg

SEQ ID NO: 131485 - DNA, 120 bp, Artificial Sequence
  ENSG00000102753_3 (sequence is synthesized)
ttgatgctgattttaaagcacaaaatgtaaccctagaagctatattgcagaatgccacaagtgataacccagtggtccaattgagtgctgtccaggcagcaagaaaactgttatccagtg

SEQ ID NO: 131486 - DNA, 120 bp, Artificial Sequence
  ENSG00000102753_4 (sequence is synthesized)
acagaaatccaccgattgatgacttaataaaatctgggattttaccaattctagtcaaatgtctagaaagggatgataatccttcattacagtttgaagctgcttgggcattaactaaca

SEQ ID NO: 131487 - DNA, 120 bp, Artificial Sequence
  ENSG00000102753_5 (sequence is synthesized)
tagcatcaggaacttctgcacagactcaagctgttgtgcagtctaatgcagtacctctttttctgagacttcttcgttcaccacatcagaatgtttgtgaacaagcagtatgggctttgg

SEQ ID NO: 131488 - DNA, 120 bp, Artificial Sequence
  ENSG00000102753_6 (sequence is synthesized)
gaaacattataggtgatggtcctcaatgtagagattatgtcatatcactgggagttgtcaaacctcttctgtccttcatcagtccctccatccccatcaccttccttcggaacgtcacat

SEQ ID NO: 131489 - DNA, 120 bp, Artificial Sequence
  ENSG00000102753_7 (sequence is synthesized)
gggtcattgtcaatctctgcaggaataaggatcccccgccgcctatggagacagttcaggagattttgccagctttatgtgtcctcatataccatacagatataaacattcttgtagaca

SEQ ID NO: 131490 - DNA, 120 bp, Artificial Sequence
  ENSG00000102753_8 (sequence is synthesized)
ctgtttgggctctgtcatacttgacagatggaggtaatgaacagatacagatggttattgattcaggagttgtgccctttcttgtgccccttctgagccatcaggaagtcaaagttcaaa

SEQ ID NO: 131491 - DNA, 120 bp, Artificial Sequence
  ENSG00000102753_9 (sequence is synthesized)
cagcagccctcagagcagttggcaacatagtgactggcaccgacgagcagacccaggttgttctcaattgtgatgtcctgtcacacttcccaaatctcttatcacacccaaaagagaaga

SEQ ID NO: 131492 - DNA, 120 bp, Artificial Sequence
  ENSG00000102753_10 (sequence is synthesized)
taaataaggaagcagtgtggttcctttccaacataacagcaggcaaccagcaacaagttcaagctgtaatagatgctggattaattcctatgataattcatcagcttgctaagggggact

SEQ ID NO: 131493 - DNA, 120 bp, Artificial Sequence
  ENSG00000102753_11 (sequence is synthesized)
ttggaacacaaaaagaagctgcttgggcaatcagcaacttaacaataagtggcagaaaagatcaggttgagtaccttgtacagcagaatgtaataccaccgttctgtaatttactgtcag

SEQ ID NO: 131494 - DNA, 120 bp, Artificial Sequence
  ENSG00000102753_12 (sequence is synthesized)
tgaaagattctcaagtggttcaggtggttctagatggtctaaaaaacattctgataatggccggtgatgaagcaagcacaatagctgaaataatagaggaatgtggaggtttggagaaaa

SEQ ID NO: 131495 - DNA, 120 bp, Artificial Sequence
  ENSG00000102753_13 (sequence is synthesized)
ttgaagttttacagcaacatgaaaatgaagacatatataaattagcatttgaaatcatagatcagtatttctctggtgatgatattgatgaagatccctgcctcattcctgaagcaacac

SEQ ID NO: 131496 - DNA, 120 bp, Artificial Sequence
  ENSG00000102753_14 (sequence is synthesized)
aaggaggtacctacaattttgatccaacagccaaccttcaaacaaaagaatttaatttttaaattcagttgagtgcagcatctttcccacattcaatatgaagcaccaccagatggctac

SEQ ID NO: 131497 - DNA, 120 bp, Artificial Sequence
  ENSG00000102753_15 (sequence is synthesized)
caaatgataagaacaacagcaacaaaaggctccaaaacacacatgcctctttgttttgatgcttctaaagcaagccatgtctcagtcactttgcagttgccaaaagtcactatcacatgg

SEQ ID NO: 131498 - DNA, 120 bp, Artificial Sequence
  ENSG00000102753_16 (sequence is synthesized)
actgtaaatgcatatgcatgatttcctaaactgttttagaactctccttaacaatctcaactaccctatttttccctgttccctggtgccacaggctgacaactgcagtctccagtttag

SEQ ID NO: 131499 - DNA, 120 bp, Artificial Sequence
  ENSG00000102753_17 (sequence is synthesized)
catgtcagctgcccactgatactcctttggaaaatggtgcgctgtggatcaagacactttggtatgatgcatatacaagttggaagactaaagaggtgcagtgtgatctgagcctccatc

SEQ ID NO: 131500 - DNA, 120 bp, Artificial Sequence
  ENSG00000102753_18 (sequence is synthesized)
attgtcctccacaaacatattttcatattctttatgtggaagaatagattttaaagtacaagccaaatgattttcattggtggaactgacacaaaaaaagtaacttaaaaacaagaaact

SEQ ID NO: 131501 - DNA, 120 bp, Artificial Sequence
  ENSG00000102753_19 (sequence is synthesized)
tggttattgaataaacagataagtttaaaaaaaaaaaaaaactacttcatctaccagtaattgatgtgtttattatctgcctcagaagccagggttggaggaagaactttagatatggat

SEQ ID NO: 131502 - DNA, 120 bp, Artificial Sequence
  ENSG00000102753_20 (sequence is synthesized)
attaatgcttttgccattatacctaatttttgagaacagcaagccctatttgaccactctcttcagcctgtgtgttcctgctgttttgaagtaatcaaatgctgtgcatggtattttacc

SEQ ID NO: 131503 - DNA, 120 bp, Artificial Sequence
  ENSG00000102753_21 (sequence is synthesized)
tgagctgcaacctgttatggacttgaacttctgtttaagttgaaagcaagagtccctgagtataaaggaaaaacagcaaaacaaaaagcaaacaaaaaaaaactgcaaaagtctaaaata

SEQ ID NO: 131504 - DNA, 120 bp, Artificial Sequence
  ENSG00000102753_22 (sequence is synthesized)
cccattggtgatgttttttaaaaaaatcttgctttcagctttcaggagttaatattctttgttttaatttgataattggatatggttgatttatattgggtttaaactgtggagctttca

SEQ ID NO: 131505 - DNA, 120 bp, Artificial Sequence
  ENSG00000102753_23 (sequence is synthesized)
tgtttactgtaatttagtcttaaaatattttttacttagtaaccagtgcttttgataatgtggttggcaacaaaccagcaactatttagaagtgtcataagagttcattctttgagtatt

SEQ ID NO: 131506 - DNA, 120 bp, Artificial Sequence
  ENSG00000102753_24 (sequence is synthesized)
gggaaagttaattcagatcctactcaaaaagcatcttcacatattaaaagattcagacagggatctgtgtagaggagtaatttgcagttatttaacataaacctgatttgcagtgatctc

SEQ ID NO: 131507 - DNA, 120 bp, Artificial Sequence
  ENSG00000102753_25 (sequence is synthesized)
taagtaattctgcaaaatccggtattactatgtcaagttattgcttttggtaaattgtctgacccagttattaatgaaagaatatggatttaaaaatttttaaactaaataatttgtgct

SEQ ID NO: 131508 - DNA, 120 bp, Artificial Sequence
  ENSG00000102753_26 (sequence is synthesized)
gtcacagaaatggtattgttgctcttgtttactgggtataatttcccaatgcattgatgtgaagggatagaaaatctaaactaatttagttatccattggggggtgtatttactgtgatg

SEQ ID NO: 131509 - DNA, 120 bp, Artificial Sequence
  ENSG00000102753_27 (sequence is synthesized)
aagatgagacagatgccatcagagctttgtgaatcagctggggtgttttcactgataaacaacacatagcaggtgtgcattcattacaaatatatgtatctgccaaggtggagccacttt

SEQ ID NO: 131510 - DNA, 120 bp, Artificial Sequence
  ENSG00000102753_28 (sequence is synthesized)
aaagagtgagttttgtcttgtatctaaagtggatacaagcgtatgtttaaactgcaagatttttacttgctagagaatctgttttaatatagtggtttggcctctgattatttataggtt

SEQ ID NO: 131511 - DNA, 120 bp, Artificial Sequence
  ENSG00000102753_29 (sequence is synthesized)
ttataaattttagaatcaatttctctttaaggtggctcagatttttcaactcttgtgcacataaaattgagttgaagttcattgtgcctttttttctttatccaaattttgagttaaagc

SEQ ID NO: 131512 - DNA, 120 bp, Artificial Sequence
  ENSG00000102753_30 (sequence is synthesized)
ttcatatggtaactgcatcctgttcggacactatagtctaaatttttgaaactgtgtggtgttcgctaaaagtaggaataacaacgtaaaagctaattaaggtcacaaacttcggtgaaa

SEQ ID NO: 131513 - DNA, 120 bp, Artificial Sequence
  ENSG00000102753_31 (sequence is synthesized)
cccttaaaagtccaaatcttcttgatattgtgaaccgtaccccttccagtttagtttcttctggactttccttacttaactgacagttaccttttaaaatttgcacacattatgattaaa

SEQ ID NO: 131514 - DNA, 120 bp, Artificial Sequence
  ENSG00000102753_32 (sequence is synthesized)
attgggcctctactgtgatgattcctatttcctctcatgttttaaagtgcaaactaacatttaagtgaacattagcatcaagtagtgcagacacttgtatgcatttccttgattcaattt

SEQ ID NO: 131515 - DNA, 120 bp, Artificial Sequence
  ENSG00000102753_33 (sequence is synthesized)
gtgaccttaccagttttgaattggaattgcaccatttcgtagataaaggaaactaagtatattgctgcacttttaagttttcaaaacagtgtttaaaaattgcattgttattttttttta

SEQ ID NO: 131516 - DNA, 120 bp, Artificial Sequence
  ENSG00000102753_34 (sequence is synthesized)
aactcagtttaaaaagactaaaacgttctttcaaaagaggcatctaaatgtgttcctaattttgtatatgggcttaggttttgtaaccaataaaaaaagctgctatcaaatatgataaaa

SEQ ID NO: 131517 - DNA, 120 bp, Artificial Sequence
  ENSG00000102755_0 (sequence is synthesized)
gccaggcggacactcctctcggctcctccccggcagcggcggcggctcggagcgggctccggggctcgggtgcagcggccagcgggcgcctggcggcgaggattacccggggaagtggtt

SEQ ID NO: 131518 - DNA, 120 bp, Artificial Sequence
  ENSG00000102755_1 (sequence is synthesized)
gcggcgaggattacccggggaagtggttgtctcctggctggagccgcgagacgggcgctcagggcgcggggccggcggcggcgaacgagaggacggactctggcggccgggtcgttggcc

SEQ ID NO: 131519 - DNA, 120 bp, Artificial Sequence
  ENSG00000102755_2 (sequence is synthesized)
gcggggagcgcgggcaccgggcgagcaggccgcgtcgcgctcaccatggtcagctactgggacaccggggtcctgctgtgcgcgctgctcagctgtctgcttctcacaggatctagttca

SEQ ID NO: 131520 - DNA, 120 bp, Artificial Sequence
  ENSG00000102755_3 (sequence is synthesized)
ggttcaaaattaaaagatcctgaactgagtttaaaaggcacccagcacatcatgcaagcaggccagacactgcatctccaatgcaggggggaagcagcccataaatggtctttgcctgaa

SEQ ID NO: 131521 - DNA, 120 bp, Artificial Sequence
  ENSG00000102755_4 (sequence is synthesized)
atggtgagtaaggaaagcgaaaggctgagcataactaaatctgcctgtggaagaaatggcaaacaattctgcagtactttaaccttgaacacagctcaagcaaaccacactggcttctac

SEQ ID NO: 131522 - DNA, 120 bp, Artificial Sequence
  ENSG00000102755_5 (sequence is synthesized)
agctgcaaatatctagctgtacctacttcaaagaagaaggaaacagaatctgcaatctatatatttattagtgatacaggtagacctttcgtagagatgtacagtgaaatccccgaaatt

SEQ ID NO: 131523 - DNA, 120 bp, Artificial Sequence
  ENSG00000102755_6 (sequence is synthesized)
atacacatgactgaaggaagggagctcgtcattccctgccgggttacgtcacctaacatcactgttactttaaaaaagtttccacttgacactttgatccctgatggaaaacgcataatc

SEQ ID NO: 131524 - DNA, 120 bp, Artificial Sequence
  ENSG00000102755_7 (sequence is synthesized)
tgggacagtagaaagggcttcatcatatcaaatgcaacgtacaaagaaatagggcttctgacctgtgaagcaacagtcaatgggcatttgtataagacaaactatctcacacatcgacaa

SEQ ID NO: 131525 - DNA, 120 bp, Artificial Sequence
  ENSG00000102755_8 (sequence is synthesized)
accaatacaatcatagatgtccaaataagcacaccacgcccagtcaaattacttagaggccatactcttgtcctcaattgtactgctaccactcccttgaacacgagagttcaaatgacc

SEQ ID NO: 131526 - DNA, 120 bp, Artificial Sequence
  ENSG00000102755_9 (sequence is synthesized)
tggagttaccctgatgaaaaaaataagagagcttccgtaaggcgacgaattgaccaaagcaattcccatgccaacatattctacagtgttcttactattgacaaaatgcagaacaaagac

SEQ ID NO: 131527 - DNA, 120 bp, Artificial Sequence
  ENSG00000102755_10 (sequence is synthesized)
aaaggactttatacttgtcgtgtaaggagtggaccatcattcaaatctgttaacacctcagtgcatatatatgataaagcattcatcactgtgaaacatcgaaaacagcaggtgcttgaa

SEQ ID NO: 131528 - DNA, 120 bp, Artificial Sequence
  ENSG00000102755_11 (sequence is synthesized)
accgtagctggcaagcggtcttaccggctctctatgaaagtgaaggcatttccctcgccggaagttgtatggttaaaagatgggttacctgcgactgagaaatctgctcgctatttgact

SEQ ID NO: 131529 - DNA, 120 bp, Artificial Sequence
  ENSG00000102755_12 (sequence is synthesized)
cgtggctactcgttaattatcaaggacgtaactgaagaggatgcagggaattatacaatcttgctgagcataaaacagtcaaatgtgtttaaaaacctcactgccactctaattgtcaat

SEQ ID NO: 131530 - DNA, 120 bp, Artificial Sequence
  ENSG00000102755_13 (sequence is synthesized)
gtgaaaccccagatttacgaaaaggccgtgtcatcgtttccagacccggctctctacccactgggcagcagacaaatcctgacttgtaccgcatatggtatccctcaacctacaatcaag

SEQ ID NO: 131531 - DNA, 120 bp, Artificial Sequence
  ENSG00000102755_14 (sequence is synthesized)
tggttctggcacccctgtaaccataatcattccgaagcaaggtgtgacttttgttccaataatgaagagtcctttatcctggatgctgacagcaacatgggaaacagaattgagagcatc

SEQ ID NO: 131532 - DNA, 120 bp, Artificial Sequence
  ENSG00000102755_15 (sequence is synthesized)
actcagcgcatggcaataatagaaggaaagaataagatggctagcaccttggttgtggctgactctagaatttctggaatctacatttgcatagcttccaataaagttgggactgtggga

SEQ ID NO: 131533 - DNA, 120 bp, Artificial Sequence
  ENSG00000102755_16 (sequence is synthesized)
agaaacataagcttttatatcacagatgtgccaaatgggtttcatgttaacttggaaaaaatgccgacggaaggagaggacctgaaactgtcttgcacagttaacaagttcttatacaga

SEQ ID NO: 131534 - DNA, 120 bp, Artificial Sequence
  ENSG00000102755_17 (sequence is synthesized)
gacgttacttggattttactgcggacagttaataacagaacaatgcactacagtattagcaagcaaaaaatggccatcactaaggagcactccatcactcttaatcttaccatcatgaat

SEQ ID NO: 131535 - DNA, 120 bp, Artificial Sequence
  ENSG00000102755_18 (sequence is synthesized)
gtttccctgcaagattcaggcacctatgcctgcagagccaggaatgtatacacaggggaagaaatcctccagaagaaagaaattacaatcagagatcaggaagcaccatacctcctgcga

SEQ ID NO: 131536 - DNA, 120 bp, Artificial Sequence
  ENSG00000102755_19 (sequence is synthesized)
aacctcagtgatcacacagtggccatcagcagttccaccactttagactgtcatgctaatggtgtccccgagcctcagatcacttggtttaaaaacaaccacaaaatacaacaagagcct

SEQ ID NO: 131537 - DNA, 120 bp, Artificial Sequence
  ENSG00000102755_20 (sequence is synthesized)
ggaattattttaggaccaggaagcagcacgctgtttattgaaagagtcacagaagaggatgaaggtgtctatcactgcaaagccaccaaccagaagggctctgtggaaagttcagcatac

SEQ ID NO: 131538 - DNA, 120 bp, Artificial Sequence
  ENSG00000102755_21 (sequence is synthesized)
ctcactgttcaaggaacctcggacaagtctaatctggagctgatcactctaacatgcacctgtgtggctgcgactctcttctggctcctattaaccctctttatccgaaaaatgaaaagg

SEQ ID NO: 131539 - DNA, 120 bp, Artificial Sequence
  ENSG00000102755_22 (sequence is synthesized)
tcttcttctgaaataaagactgactacctatcaattataatggacccagatgaagttcctttggatgagcagtgtgagcggctcccttatgatgccagcaagtgggagtttgcccgggag

SEQ ID NO: 131540 - DNA, 120 bp, Artificial Sequence
  ENSG00000102755_23 (sequence is synthesized)
agacttaaactgggcaaatcacttggaagaggggcttttggaaaagtggttcaagcatcagcatttggcattaagaaatcacctacgtgccggactgtggctgtgaaaatgctgaaagag

SEQ ID NO: 131541 - DNA, 120 bp, Artificial Sequence
  ENSG00000102755_24 (sequence is synthesized)
ggggccacggccagcgagtacaaagctctgatgactgagctaaaaatcttgacccacattggccaccatctgaacgtggttaacctgctgggagcctgcaccaagcaaggagggcctctg

SEQ ID NO: 131542 - DNA, 120 bp, Artificial Sequence
  ENSG00000102755_25 (sequence is synthesized)
atggtgattgttgaatactgcaaatatggaaatctctccaactacctcaagagcaaacgtgacttattttttctcaacaaggatgcagcactacacatggagcctaagaaagaaaaaatg

SEQ ID NO: 131543 - DNA, 120 bp, Artificial Sequence
  ENSG00000102755_26 (sequence is synthesized)
gagccaggcctggaacaaggcaagaaaccaagactagatagcgtcaccagcagcgaaagctttgcgagctccggctttcaggaagataaaagtctgagtgatgttgaggaagaggaggat

SEQ ID NO: 131544 - DNA, 120 bp, Artificial Sequence
  ENSG00000102755_27 (sequence is synthesized)
tctgacggtttctacaaggagcccatcactatggaagatctgatttcttacagttttcaagtggccagaggcatggagttcctgtcttccagaaagtgcattcatcgggacctggcagcg

SEQ ID NO: 131545 - DNA, 120 bp, Artificial Sequence
  ENSG00000102755_28 (sequence is synthesized)
agaaacattcttttatctgagaacaacgtggtgaagatttgtgattttggccttgcccgggatatttataagaaccccgattatgtgagaaaaggagatactcgacttcctctgaaatgg

SEQ ID NO: 131546 - DNA, 120 bp, Artificial Sequence
  ENSG00000102755_29 (sequence is synthesized)
gcgacgtgtggtcttacggagtattgctgtgggaaatcttctccttaggtgggtctccatacccaggagtacaaatggatgaggacttttgcagtcgcctgagggaaggcatgaggatga

SEQ ID NO: 131547 - DNA, 120 bp, Artificial Sequence
  ENSG00000102755_30 (sequence is synthesized)
gagctcctgagtactctactcctgaaatctatcagatcatgctggactgctggcacagagacccaaaagaaaggccaagatttgcagaacttgtggaaaaactaggtgatttgcttcaag

SEQ ID NO: 131548 - DNA, 120 bp, Artificial Sequence
  ENSG00000102755_31 (sequence is synthesized)
caaatgtacaacaggatggtaaagactacatcccaatcaatgccatactgacaggaaatagtgggtttacatactcaactcctgccttctctgaggacttcttcaaggaaagtatttcag

SEQ ID NO: 131549 - DNA, 120 bp, Artificial Sequence
  ENSG00000102755_32 (sequence is synthesized)
ctccgaagtttaattcaggaagctctgatgatgtcagatacgtaaatgctttcaagttcatgagcctggaaagaatcaaaacctttgaagaacttttaccgaatgccacctccatgtttg

SEQ ID NO: 131550 - DNA, 120 bp, Artificial Sequence
  ENSG00000102755_33 (sequence is synthesized)
atgactaccagggcgacagcagcactctgttggcctctcccatgctgaagcgcttcacctggactgacagcaaacccaaggcctcgctcaagattgacttgagagtaaccagtaaaagta

SEQ ID NO: 131551 - DNA, 120 bp, Artificial Sequence
  ENSG00000102755_34 (sequence is synthesized)
aggagtcggggctgtctgatgtcagcaggcccagtttctgccattccagctgtgggcacgtcagcgaaggcaagcgcaggttcacctacgaccacgctgagctggaaaggaaaatcgcgt

SEQ ID NO: 131552 - DNA, 120 bp, Artificial Sequence
  ENSG00000102755_35 (sequence is synthesized)
gctgctccccgcccccagactacaactcggtggtcctgtactccaccccacccatctagagtttgacacgaagccttatttctagaagcacatgtgtatttatacccccaggaaactagc

SEQ ID NO: 131553 - DNA, 120 bp, Artificial Sequence
  ENSG00000102755_36 (sequence is synthesized)
ttttgccagtattatgcatatataagtttacacctttatctttccatgggagccagctgctttttgtgatttttttaatagtgcttttttttttttgactaacaagaatgtaactccaga

SEQ ID NO: 131554 - DNA, 120 bp, Artificial Sequence
  ENSG00000102755_37 (sequence is synthesized)
tagagaaatagtgacaagtgaagaacactactgctaaatcctcatgttactcagtgttagagaaatccttcctaaacccaatgacttccctgctccaacccccgccacctcagggcacgc

SEQ ID NO: 131555 - DNA, 120 bp, Artificial Sequence
  ENSG00000102755_38 (sequence is synthesized)
aggaccagtttgattgaggagctgcactgatcacccaatgcatcacgtaccccactgggccagccctgcagcccaaaacccagggcaacaagcccgttagccccagggatcactggctgg

SEQ ID NO: 131556 - DNA, 120 bp, Artificial Sequence
  ENSG00000102755_39 (sequence is synthesized)
cctgagcaacatctcgggagtcctctagcaggcctaagacatgtgaggaggaaaaggaaaaaaagcaaaaagcaagggagaaaagagaaaccgggagaaggcatgagaaagaatttgaga

SEQ ID NO: 131557 - DNA, 120 bp, Artificial Sequence
  ENSG00000102755_40 (sequence is synthesized)
cgcaccatgtgggcacggagggggacggggctcagcaatgccatttcagtggcttcccagctctgacccttctacatttgagggcccagccaggagcagatggacagcgatgaggggaca

SEQ ID NO: 131558 - DNA, 120 bp, Artificial Sequence
  ENSG00000102755_41 (sequence is synthesized)
ttttctggattctgggaggcaagaaaaggacaaatatcttttttggaactaaagcaaattttagaactttacctatggaagtggttctatgtccattctcattcgtggcatgttttgatt

SEQ ID NO: 131559 - DNA, 120 bp, Artificial Sequence
  ENSG00000102755_42 (sequence is synthesized)
tgtagcactgagggtggcactcaactctgagcccatacttttggctcctctagtaagatgcactgaaaacttagccagagttaggttgtctccaggccatgatggccttacactgaaaat

SEQ ID NO: 131560 - DNA, 120 bp, Artificial Sequence
  ENSG00000102755_43 (sequence is synthesized)
gtcacattctattttgggtattaatatatagtccagacacttaactcaatttcttggtattattctgttttgcacagttagttgtgaaagaaagctgagaagaatgaaaatgcagtcctg

SEQ ID NO: 131561 - DNA, 120 bp, Artificial Sequence
  ENSG00000102755_44 (sequence is synthesized)
aggagaggagttttctccatatcaaaacgagggctgatggaggaaaaaggtcaataaggtcaagggaaaaccccgtctctataccaaccaaaccaattcaccaacacagttgggacccaa

SEQ ID NO: 131562 - DNA, 120 bp, Artificial Sequence
  ENSG00000102755_45 (sequence is synthesized)
aacacaggaagtcagtcacgtttccttttcatttaatggggattccactatctcacactaatctgaaaggatgtggaagagcattagctggcgcatattaagcactttaagctccttgag

SEQ ID NO: 131563 - DNA, 120 bp, Artificial Sequence
  ENSG00000102755_46 (sequence is synthesized)
taaaaaggtggtatgtaatttatgcaaggtatttctccagttgggactcaggatattagttaatgagccatcactagaagaaaagcccattttcaactgctttgaaacttgcctggggtc

SEQ ID NO: 131564 - DNA, 120 bp, Artificial Sequence
  ENSG00000102755_47 (sequence is synthesized)
tgagcatgatgggaatagggagacagggtaggaaagggcgcctactcttcagggtctaaagatcaagtgggccttggatcgctaagctggctctgtttgatgctatttatgcaagttagg

SEQ ID NO: 131565 - DNA, 120 bp, Artificial Sequence
  ENSG00000102755_48 (sequence is synthesized)
gtctatgtatttatgatgtctgcaccttctgcagccagtcagaagctggagaggcaacagtggattgctgcttcttggggagaagagtatgcttccttttatccatgtaatttaactgta

SEQ ID NO: 131566 - DNA, 120 bp, Artificial Sequence
  ENSG00000102755_49 (sequence is synthesized)
gaacctgagctctaagtaaccgaagaatgtatgcctctgttcttatgtgccacatccttgtttaaaggctctctgtatgaagagatgggaccgtcatcagcacattccctagtgagccta

SEQ ID NO: 131567 - DNA, 120 bp, Artificial Sequence
  ENSG00000102755_50 (sequence is synthesized)
ctggctcctggcagcggcttttgtggaagactcactagccagaagagaggagtgggacagtcctctccaccaagatctaaatccaaacaaaagcaggctagagccagaagagaggacaaa

SEQ ID NO: 131568 - DNA, 120 bp, Artificial Sequence
  ENSG00000102755_51 (sequence is synthesized)
tctttgttcttcctcttctttacatacgcaaaccacctgtgacagctggcaattttataaatcaggtaactggaaggaggttaaacacagaaaaaagaagacctcagtcaattctctact

SEQ ID NO: 131569 - DNA, 120 bp, Artificial Sequence
  ENSG00000102755_52 (sequence is synthesized)
tttttttttttttccaaatcagataatagcccagcaaatagtgataacaaataaaaccttagctattcatgtcttgatttcaataattaattcttaatcattaagagaccataataaata

SEQ ID NO: 131570 - DNA, 120 bp, Artificial Sequence
  ENSG00000102755_53 (sequence is synthesized)
ctccttttcaagagaaaagcaaaaccattagaattgttactcagctccttcaaactcaggtttgtagcatacatgagtccatccatcagtcaaagaatggttccatctggagtcttaatg

SEQ ID NO: 131571 - DNA, 120 bp, Artificial Sequence
  ENSG00000102755_54 (sequence is synthesized)
tagaaagaaaaatggagacttgtaataatgagctagttacaaagtgcttgttcattaaaatagcactgaaaattgaaacatgaattaactgataatattccaatcatttgccatttatga

SEQ ID NO: 131572 - DNA, 120 bp, Artificial Sequence
  ENSG00000102755_55 (sequence is synthesized)
caaaaatggttggcactaacaaagaacgagcacttcctttcagagtttctgagataatgtacgtggaacagtctgggtggaatggggctgaaaccatgtgcaagtctgtgtcttgtcagt

SEQ ID NO: 131573 - DNA, 120 bp, Artificial Sequence
  ENSG00000102755_56 (sequence is synthesized)
ccaagaagtgacaccgagatgttaattttagggacccgtgccttgtttcctagcccacaagaatgcaaacatcaaacagatactcgctagcctcatttaaattgattaaaggaggagtgc

SEQ ID NO: 131574 - DNA, 120 bp, Artificial Sequence
  ENSG00000102755_57 (sequence is synthesized)
tgtgtgtgtgtgtgtgtgtgtgtgggtgtatgtgtgttttgtgcataactatttaaggaaactggaattttaaagttacttttatacaaaccaagaatatatgctacagatataagacag

SEQ ID NO: 131575 - DNA, 120 bp, Artificial Sequence
  ENSG00000102755_58 (sequence is synthesized)
tttatacaaaccaagaatatatgctacagatataagacagacatggtttggtcctatatttctagtcatgatgaatgtattttgtataccatcttcatataataaacttccaaaaacaca

SEQ ID NO: 131576 - DNA, 120 bp, Artificial Sequence
  ENSG00000102755_59 (sequence is synthesized)
acagagttactaattttgacagggaactgtaccgttttctcccctcagggattttcatcttaatggatcatccccctgcccccatgcttggataaagtgggctggaggcctggaaaaatc

SEQ ID NO: 131577 - DNA, 120 bp, Artificial Sequence
  ENSG00000102755_60 (sequence is synthesized)
atcatcattatcatcatcatcatcatcatcatcatagctaccatttattgaaaactattatgtgtcaacttcaaagaacttatcctttagttggagagccaagacaatcataacaataac

SEQ ID NO: 131578 - DNA, 69 bp, Artificial Sequence
  ENSG00000102755_61 (sequence is synthesized)
gcagggagccgagatcgtgttaaataaataaataaataaacagacaaaattcactttttattctattaa

SEQ ID NO: 131579 - DNA, 120 bp, Artificial Sequence
  ENSG00000102755_62 (sequence is synthesized)
tgcatgcccagcccaggcatgcagtggaaacgcagggcaggagagaggaggccttcagagtgcagctggacttccttcccaaccctcttgcttccttcagaccggggtcgggttggcaaa

SEQ ID NO: 131580 - DNA, 120 bp, Artificial Sequence
  ENSG00000102755_63 (sequence is synthesized)
actttaagtcttttccttttggtcttggaggaacagtgctcagcttttgatctctgtgattctgatagagaagctgtttctggaattacaaagtttgcaaacttgacagcaaaatttctg

SEQ ID NO: 131581 - DNA, 120 bp, Artificial Sequence
  ENSG00000102755_64 (sequence is synthesized)
agatgctcctcccaaaatgagttcggagatgatagcagtaataatgagacccccgggccccagctctgggccccccattcaggccgagggggctgctccggggggccgacttggtgcacg

SEQ ID NO: 131582 - DNA, 120 bp, Artificial Sequence
  ENSG00000102755_65 (sequence is synthesized)
tttggatttggaggatccctgcactgccttctctgtgtttgttgctcttgctgttttctcctgcctgataaacaacaacttgggatgatcctttccttccattttgatgccaacctcttt

SEQ ID NO: 131583 - DNA, 120 bp, Artificial Sequence
  ENSG00000102755_66 (sequence is synthesized)
ttatttttaagtgttgaagctgcacaaactgaataatttaaacaaatgctggtttctgccaaagatggacacgaataagttaattttccagctcagaatgagtacagttgaatttgagac

SEQ ID NO: 131584 - DNA, 120 bp, Artificial Sequence
  ENSG00000102755_67 (sequence is synthesized)
tctgtcggacttctgcctggttttatttgggactatttcatctgctcttgatttgtaaatagcacctggatagcaagttataatgcttatttatttgaaaatgctttttttttttttacg

SEQ ID NO: 131585 - DNA, 120 bp, Artificial Sequence
  ENSG00000102755_68 (sequence is synthesized)
ttaagcacatttatcttgaactggagcttctaaaatgggccccaggggtgcaagatgttggtgtaattcagagatagtaaaggtttatcgcagtgtgaattataagagtccatccaaatc

SEQ ID NO: 131586 - DNA, 120 bp, Artificial Sequence
  ENSG00000102755_69 (sequence is synthesized)
aacgtcccctccctcctctcatgcgatccaggtaattatgcagttagtgccacagtagactagcctagcaaagggtttgctccttgctgtctctgactgcaccacacagctattgatggc

SEQ ID NO: 131587 - DNA, 120 bp, Artificial Sequence
  ENSG00000102755_70 (sequence is synthesized)
agctgaaagaaagtggatcatgccttaattttaaatattcctgtcctctggttattattttaaggaacttcatcatgttaaaatgacagcattcaaaggtgtaccacaatcaatttatca

SEQ ID NO: 131588 - DNA, 120 bp, Artificial Sequence
  ENSG00000102755_71 (sequence is synthesized)
atgttaataggatttttatggggattaagaagcggcaaaactacagaagcagaattcaaagtaatttaaaaaatacacaccagttttaaatcaagagaagttgtaatctcttgttttaag

SEQ ID NO: 131589 - DNA, 120 bp, Artificial Sequence
  ENSG00000102755_72 (sequence is synthesized)
cttgcgtttgagggaaaatgactttttcaccaatttaatatgcattgttctgttgtttttatttatgattgatcattatatgtgacttgcataaactatttaaaaaaaaaaactataatg

SEQ ID NO: 131590 - DNA, 120 bp, Artificial Sequence
  ENSG00000102755_73 (sequence is synthesized)
accaaaatagccatggctgagaaacacagtggctgggcagttcaataggaggtgacaatatgacaacttctcaagcttgggaactcaccagactgtttcctcctttaggtaacagattct

SEQ ID NO: 131591 - DNA, 120 bp, Artificial Sequence
  ENSG00000102755_74 (sequence is synthesized)
gtcccacggctaaacttgtctttcacgtgggaattgcttttgtcaaacgtgaaagagtaaacaatagcatttccccagaatgccagttttatggagccccaaatgctctgaaaacaatta

SEQ ID NO: 131592 - DNA, 120 bp, Artificial Sequence
  ENSG00000102755_75 (sequence is synthesized)
gtaacctggaagttgtcagcccaaaggaaagaaaaatcaattgtatcttgaaattttacctatggctctttggcctggcttctttgttcattataagttagtgtgttccttcaggaaaca

SEQ ID NO: 131593 - DNA, 120 bp, Artificial Sequence
  ENSG00000102755_76 (sequence is synthesized)
atgccttaataccatagaacatgggggccttaatagttgctaacattaaaaaagcaaacagaatgattgagggatccttatgaaaacaaaatggtgaattggacatgcagaacctaccat

SEQ ID NO: 131594 - DNA, 120 bp, Artificial Sequence
  ENSG00000102755_77 (sequence is synthesized)
ttccttcccctgtttgcaatttttgtggggaggggaggatgttagtatttacaaaagatgattttaagaacttccaagagatgagtttaagaattccatagagtattagttgttcactgt

SEQ ID NO: 131595 - DNA, 120 bp, Artificial Sequence
  ENSG00000102755_78 (sequence is synthesized)
gtaattaatccttccggagagtctttttttttttttttaaagaaacttttgggtgggttttgttttttattagttaccctaggggtatgttaccctggggtatgaagggaggtgaagata

SEQ ID NO: 131596 - DNA, 120 bp, Artificial Sequence
  ENSG00000102755_79 (sequence is synthesized)
acggaggggggagaaaaaaaaaaggagaaaaaaggagcctaaaatggggaataattgaaatggaacagggggtgtgaggctggttcctcagtccccattccaaacggaggatagaagctg

SEQ ID NO: 131597 - DNA, 120 bp, Artificial Sequence
  ENSG00000102755_80 (sequence is synthesized)
tgtatttatgtgacctggcagatctctggggccataacactgaaaagtgaaagaacctggtgggcagctatctttggctactgataaccagcagaaatgtctgttaattctgattttctc

SEQ ID NO: 131598 - DNA, 120 bp, Artificial Sequence
  ENSG00000102755_81 (sequence is synthesized)
aatttgaagggatcagctacactgttaaattttggaaagccactacctacttccatcaagtaacttaggtttcgaaatatgggttcaacgcacctcccttattcaaaatgtcaaaataga

SEQ ID NO: 131599 - DNA, 120 bp, Artificial Sequence
  ENSG00000102755_82 (sequence is synthesized)
ttattataatgtataaagtaagaattgacaaaatatgattcttgggttgattggtcatttagaaactagccaaaagtgagacttttaatgtagaacatttttcagaaatgggtacaaaga

SEQ ID NO: 131600 - DNA, 120 bp, Artificial Sequence
  ENSG00000102755_83 (sequence is synthesized)
aaaatgcatattactgtatatttcagagtgtttatgtgaaccttgtatttaattgagagtcccatgtacgttctgcagcctttttgctgcttctatcatctgaagtttgtgtagtacaaa

SEQ ID NO: 131601 - DNA, 120 bp, Artificial Sequence
  ENSG00000102755_84 (sequence is synthesized)
taaggcctttgggattcttaatgacatttatgttaaaatgttctcttctctttaaacaccgttttccaatccacctgtcagggagtccaaatcgtgtctgtgttgatgatgctatacttt

SEQ ID NO: 131602 - DNA, 120 bp, Artificial Sequence
  ENSG00000102755_85 (sequence is synthesized)
gtagctagaaaaacaattttagtgttgtgggctctgtattcagacttcctttttacaagaccgatgggcagtgatagattattttatcatatttaatgcatgggaaatagtgtgctgagg

SEQ ID NO: 131603 - DNA, 120 bp, Artificial Sequence
  ENSG00000102755_86 (sequence is synthesized)
aagctattaaaagtataactcagtgaattgggtctgagttttaaatgagatatttcaaaattggcttgccactgtaaaagcgactaaataataatatgatactgttctttatgatcttgt

SEQ ID NO: 131604 - DNA, 120 bp, Artificial Sequence
  ENSG00000102755_87 (sequence is synthesized)
catgtttcactgatatgtttggggtcttcactatgtaaaaaatgtcaaaattgtaatgagcaagcatgtacaagtagtcgtaaatcaaaggttttaaacaggactgcattttcaattagg

SEQ ID NO: 131605 - DNA, 120 bp, Artificial Sequence
  ENSG00000102755_88 (sequence is synthesized)
aaaagctgtttggcagatagcatccaatgcaaaaacagaaatatcgtaacgttctgcttagtgggcaagataagataggaaagacatgctcaaagaggcaaaagaatcattgctatcatt

SEQ ID NO: 131606 - DNA, 120 bp, Artificial Sequence
  ENSG00000102755_89 (sequence is synthesized)
cattctacactagtttgaagaagtttttgtacatcagagcacttccttcagcacacttttttgccttcagatttcattttttataaaatgagaagactaatgataaactgtagaaatcaa

SEQ ID NO: 131607 - DNA, 120 bp, Artificial Sequence
  ENSG00000102755_90 (sequence is synthesized)
aatttattgagaaatctgtttctcctaacagatagtaaccctgccatgatatactacttcaacaatgttataaaatttatgtgataatatacattttaacctgggatttctaaattgctt

SEQ ID NO: 131608 - DNA, 120 bp, Artificial Sequence
  ENSG00000102755_91 (sequence is synthesized)
taacaaatgctaatcctgagagttgccctgcaggactcaaaagggaaaggttttgggacgtggcagaaccctgcagggacatggaattaaggccattgcaatgtatcatctttgtagcat

SEQ ID NO: 131609 - DNA, 120 bp, Artificial Sequence
  ENSG00000102755_92 (sequence is synthesized)
tgtcatcactcctaagctgccttcacagttttagtacactaagatgaggaaatcgaaaatgggcagagaaagctcatactgtataattgaagacagtgacagagaacgtgtcagttatgc

SEQ ID NO: 131610 - DNA, 120 bp, Artificial Sequence
  ENSG00000102755_93 (sequence is synthesized)
caaaactcttttgatttctgttccaggatttccaacaagaggggaaaggaatgacttgggagggtgggaaagacattaggagttgtttttattttttaccttggaagctttagctaccaa

SEQ ID NO: 131611 - DNA, 120 bp, Artificial Sequence
  ENSG00000102755_94 (sequence is synthesized)
tccagtaccctcctaactagaatgtatacacatcagcaggactgactgactacttcattagagatatactgtactcattgggggccttgggggtactgctgttcttatgtgggattttaa

SEQ ID NO: 131612 - DNA, 120 bp, Artificial Sequence
  ENSG00000102755_95 (sequence is synthesized)
gtgggattttaatgttgtaatgtattgcatcttaatgtattgaattcattttgttgtactatattggttggcattttattaaaataaattgtattgtatcatatttgtatgttttaagag

SEQ ID NO: 131613 - DNA, 120 bp, Artificial Sequence
  ENSG00000102755_96 (sequence is synthesized)
aatacaatatttgtactattatatagtgcaaaaactacaaatctgtgcctctgcctcttgaattaattctttggttgcttgcatttgggaagggaatggagaaaggaaagaaccaataaa

SEQ ID NO: 131614 - DNA, 120 bp, Artificial Sequence
  ENSG00000102760_0 (sequence is synthesized)
agggcgggcgcggaccgtgctgggagcggcgcggctggagcgcagcgccgaagggactggcagggctgaagtgtgcgggacagcaagcccccgaatagccccggctgccacctcgcagga

SEQ ID NO: 131615 - DNA, 80 bp, Artificial Sequence
  ENSG00000102760_1 (sequence is synthesized)
tcgcaggacccaaggccacgcgcgccgggcccagctgagccgcctcatgaagccgcccgcggcgcagggcagccccgcgg

SEQ ID NO: 131616 - DNA, 120 bp, Artificial Sequence
  ENSG00000102760_2 (sequence is synthesized)
tgtcggacgcgctgtgcgagtttgacgcggtgctggccgacttcgcgtcgcccttccacgagcgccacttccactacgaggagcacctggagcgcatgaagcggcgcagcagcgccagtg

SEQ ID NO: 131617 - DNA, 120 bp, Artificial Sequence
  ENSG00000102760_3 (sequence is synthesized)
tgccactgtcactcctcagaaagctaaattaggagacacaaaagagctagaagccttcattgctgatcttgacaaaactttagcaagtatgtgaaacaagaagttctgggtcctttcatc

SEQ ID NO: 131618 - DNA, 120 bp, Artificial Sequence
  ENSG00000102760_4 (sequence is synthesized)
ataagggagaagcttcagaaagttccgaggacctgctaaaatcagctactagaatctgctgccagaggggacaaagacgtgcactcaaccttctaccaggccactctcaggctcacctta

SEQ ID NO: 131619 - DNA, 120 bp, Artificial Sequence
  ENSG00000102760_5 (sequence is synthesized)
aaatcagcccttgatcccatttctgggcaatttagacagtgaaactgactttgtttacctgcttgcagcatattagaacagacgatccatgctaatattgtattttctcttaaaacatag

SEQ ID NO: 131620 - DNA, 120 bp, Artificial Sequence
  ENSG00000102760_6 (sequence is synthesized)
ttctcttaaaacatagctttcctgtaatttaaagtgcttttatgaaaatatttgtaattaattatatatagttggaaatagcagtaagctttcccattataatatatttttgtatacaaa

SEQ ID NO: 131621 - DNA, 120 bp, Artificial Sequence
  ENSG00000102760_7 (sequence is synthesized)
gaggtgtggtccctgcgatctgggccagccagcctctgggcccagggatgggggcgaagctctcaggtgcagattcactttataggaacagcttcagcttcagtgatgaaaaactgaatt

SEQ ID NO: 131622 - DNA, 120 bp, Artificial Sequence
  ENSG00000102763_0 (sequence is synthesized)
aggtgccgcttcctgtccccttctccgcgctgcctcacggtgcctgcacgggacgccgctcgatccccgagccccctcgccgtccccgacagcccccccggcgccatgcaatcccggctt

SEQ ID NO: 131623 - DNA, 120 bp, Artificial Sequence
  ENSG00000102763_1 (sequence is synthesized)
ctactcctcggggcacccggaggccacggcggcccggcctcgcggcgcatgcggctgctcctgcggcaggtggtgcagcgcaggccgggtggcgacaggcagcggccggaggtcagactg

SEQ ID NO: 131624 - DNA, 120 bp, Artificial Sequence
  ENSG00000102763_2 (sequence is synthesized)
ttgcacgccggctcgggggccgacacaggtgatacagttaatattggagatgtatcctacaagttgaaaattcctaagaatccagaacttgtgccacagaactacatttcagactctctg

SEQ ID NO: 131625 - DNA, 120 bp, Artificial Sequence
  ENSG00000102763_3 (sequence is synthesized)
gctcaatctgtagttcagcatctaagatggataatgcagaaggatcttttggggcaagatgtttttctaataggacctcctgggcctcttcgacgctctattgctatgcagtacttggag

SEQ ID NO: 131626 - DNA, 120 bp, Artificial Sequence
  ENSG00000102763_4 (sequence is synthesized)
ctgaccaaacgggaggtcgaatacattgccctgtcaagggacaccactgaaactgatctcaaacagcgacgagagatccgtgcaggcacagccttttacattgatcagtgtgcagttcgt

SEQ ID NO: 131627 - DNA, 120 bp, Artificial Sequence
  ENSG00000102763_5 (sequence is synthesized)
gcagccacagaaggcagaactctcattttggaaggtttggaaaaggcagagaggaatgttttgcctgttttgaacaacttgctggaaaacagagagatgcagcttgaagatggacgcttc

SEQ ID NO: 131628 - DNA, 120 bp, Artificial Sequence
  ENSG00000102763_6 (sequence is synthesized)
ctgatgtctgctgagcgttacgacaaacttctccgagatcataccaaaaaagagttggattcttggaaaattgtccgagttagtgaaaatttccgagtgattgccttgggcttgccagtg

SEQ ID NO: 131629 - DNA, 120 bp, Artificial Sequence
  ENSG00000102763_7 (sequence is synthesized)
ccaaggtattctgggaatccattagacccccctcttcgttctcgatttcaagccagggatatttattatttacccttcaaggaccaacttaagttgttatattcaattggagccaatgtt

SEQ ID NO: 131630 - DNA, 120 bp, Artificial Sequence
  ENSG00000102763_8 (sequence is synthesized)
tctgctgagaaagtttctcagctcttgtcctttgccacaactctgtgttcccaagaatcttctactcttggacttccagactttcctttagatagtttagcagctgcggttcaaatcttg

SEQ ID NO: 131631 - DNA, 120 bp, Artificial Sequence
  ENSG00000102763_9 (sequence is synthesized)
gattcctttcctatgatgccaatcaaacatgcaatccagtggctttatccatatagtattttactaggtcatgaagggaagatggctgtggaaggtgttttaaagcgctttgaacttcaa

SEQ ID NO: 131632 - DNA, 120 bp, Artificial Sequence
  ENSG00000102763_10 (sequence is synthesized)
gattcaggaagctctctacttcctaaagagattgtaaaagtagagaagatgatggaaaaccatgtgtcccaagcttctgtgaccatccggattgcagataaagaggtgaccattaaggtg

SEQ ID NO: 131633 - DNA, 120 bp, Artificial Sequence
  ENSG00000102763_11 (sequence is synthesized)
ccagccgggaccaggctattaagtcaaccttgtgcgtcagaccgtttcatacagactttgagccataagcagctacaggctgaaatgatgcagtctcacatggttaaagatatatgttta

SEQ ID NO: 131634 - DNA, 120 bp, Artificial Sequence
  ENSG00000102763_12 (sequence is synthesized)
attggaggaaagggttgtggaaaaacagtgatcgctaagaactttgccgataccttaggatacaacatagaacctattatgctctatcaggatatgacagcgcgtgatctgctacagcag

SEQ ID NO: 131635 - DNA, 120 bp, Artificial Sequence
  ENSG00000102763_13 (sequence is synthesized)
agatacacccttccaaatggagacactgcctggcggtcctcaccccttgtgaatgctgctctggaaggcaagctggtcctgctggatggcattcaccgggtgaatgcgggcacgcttgct

SEQ ID NO: 131636 - DNA, 120 bp, Artificial Sequence
  ENSG00000102763_14 (sequence is synthesized)
tacagaagagatccatttttcctatccatccctccttcagaatcattgccttggcagaaccccctgttattggaagcacagcacaccagtggctgggaccagaattcttaaccatgttct

SEQ ID NO: 131637 - DNA, 120 bp, Artificial Sequence
  ENSG00000102763_15 (sequence is synthesized)
ttttccattacatgaaaccacttgtgaaaagtgaagaaatccaagtgattaaggaaaaggtcccaaatgtacctcaggaagctctggataagttattatcatttacacacaaactcagag

SEQ ID NO: 131638 - DNA, 120 bp, Artificial Sequence
  ENSG00000102763_16 (sequence is synthesized)
aaacacaggatccaacggcacaatcattagcggcatcactttctaccagacaactgttgcgaatttctcgtcggctgtcacagtatcctaatgaaaatcttcacagtgctgttactaaag

SEQ ID NO: 131639 - DNA, 120 bp, Artificial Sequence
  ENSG00000102763_17 (sequence is synthesized)
cctgcctttccaggtttttacccagtcttgctaggtcagcattagaaaaaaatctggcagatgctacaatagaaataaatactgatgacaatttggagccagaactgaaggattacaaat

SEQ ID NO: 131640 - DNA, 120 bp, Artificial Sequence
  ENSG00000102763_18 (sequence is synthesized)
gtgaagtaacatctggaactctgaggattggtgctgttagtgcaccgatctataatgcacatgagaaaatgaaagtgcctgatgttcttttctatgacaacattcagcatgtgatagtga

SEQ ID NO: 131641 - DNA, 120 bp, Artificial Sequence
  ENSG00000102763_19 (sequence is synthesized)
tggaagatatgctgaaagactttctccttggagaacacttattattggttggcaaccagggtgtaggaaaaaacaagattgttgacagattccttcacctgctcaacagaccccgagaat

SEQ ID NO: 131642 - DNA, 120 bp, Artificial Sequence
  ENSG00000102763_20 (sequence is synthesized)
atattcagctacacagggataccacagtacaaactcttacgcttcagccttcggttaaagacggacttattgtatatgaagactcacctttggttaaagcagtaaagttgggtcatattc

SEQ ID NO: 131643 - DNA, 120 bp, Artificial Sequence
  ENSG00000102763_21 (sequence is synthesized)
tggtagtagatgaggctgacaaagctccaacaaatgtcacgtgtattttaaaaactctagtagaaaatggagaaatgattctagcagatggaagacgcattgttgcaaattctgctaatg

SEQ ID NO: 131644 - DNA, 120 bp, Artificial Sequence
  ENSG00000102763_22 (sequence is synthesized)
tgaatggaagagaaaatgttgtagtgattcatcctgattttaggatgattgttctggcaaatagacctggatttcctttcctaggcaatgatttcttcggtaccttaggtgatattttta

SEQ ID NO: 131645 - DNA, 120 bp, Artificial Sequence
  ENSG00000102763_23 (sequence is synthesized)
gctgccatgcagttgataaccccaaaccccactcggagctcgagatgctcagacagtatggaccaaatgtgcctgagcccatccttcagaagcttgtggctgcctttggagagctgagga

SEQ ID NO: 131646 - DNA, 120 bp, Artificial Sequence
  ENSG00000102763_24 (sequence is synthesized)
gtttggctgaccaagggattattaactatccttattctaccagagaagttgtcaacatagtcaaacatttacagaaatttccgactgaaggtctctccagtgtagttcgaaatgtgtttg

SEQ ID NO: 131647 - DNA, 120 bp, Artificial Sequence
  ENSG00000102763_25 (sequence is synthesized)
actttgattcctacaacaatgacatgagggagatattgattaacactttacacaaatacgggatacctatcggagcaaagcctaccagtgtgcagctggcaaaggagtaaggcaaattca

SEQ ID NO: 131648 - DNA, 120 bp, Artificial Sequence
  ENSG00000102763_26 (sequence is synthesized)
gtactcttctgattcttaaatgctgatagttcttgatttatcattccattctacaaaactgagttgctatggaaattactttccatgagtaagcttttcaaatacatgtatatgttgctg

SEQ ID NO: 131649 - DNA, 120 bp, Artificial Sequence
  ENSG00000102763_27 (sequence is synthesized)
tttgctggctgcttttcagttaaatagcattatttataggcctgtaaattgaaaattttgattattatgtatgtcccatgagtagatgtaataaataaagggaaatatttgtttctttaa

SEQ ID NO: 131650 - DNA, 120 bp, Artificial Sequence
  ENSG00000102763_28 (sequence is synthesized)
ctactggacaattggtcaggcaagaagtgggatgcaaaaactcttgtgtccagtggaaactcatcatatagacataaagggtccagcacttataaatatacaggagtatccaatagaaag

SEQ ID NO: 131651 - DNA, 120 bp, Artificial Sequence
  ENSG00000102763_29 (sequence is synthesized)
acatgaagaaagatccctaaactttactgaagaatgtgcctcatggagaataccattggatgaaattaatataatctgtgacattgctacatcacatgaaaatgagcaaaatactctcta

SEQ ID NO: 131652 - DNA, 120 bp, Artificial Sequence
  ENSG00000102763_30 (sequence is synthesized)
gccaatggcgtttggcacccttttgtgacagtggcaccgctgggaagtcctctcaaaggtcaagtggttctccatgagcagcagagtaatgttatcctgttgttagatactactggccgg

SEQ ID NO: 131653 - DNA, 120 bp, Artificial Sequence
  ENSG00000102763_31 (sequence is synthesized)
gcccttcatcgtctcatcctcccttccgagaagtttacatctaagaaacctttctggtggaacaaagaagaagctgaaacttataaaatgtgtaaagaattttcacacaaaaactggctg

SEQ ID NO: 131654 - DNA, 120 bp, Artificial Sequence
  ENSG00000102763_32 (sequence is synthesized)
gtgttctacaaagaaaaagggaacagcctgactgtgctggatgttctagaagggcgaactcacaccatctcacttcccatcaacctcaagacagttttccttgtagcagaggacaaatgg

SEQ ID NO: 131655 - DNA, 120 bp, Artificial Sequence
  ENSG00000102763_33 (sequence is synthesized)
cttctggtggagagcaaaacaaatcagaaatatcttttaactaagcctgcacacatcgaatctgagggtagtggggtttgccagttgtatgtgctgaaagaggagccgcccagcacaggg

SEQ ID NO: 131656 - DNA, 120 bp, Artificial Sequence
  ENSG00000102763_34 (sequence is synthesized)
tttggagttacacaagaaacagagttcagcatacctcataaaatttccagtgatcaactatcatctgaacatctaagttcagctgtggaacaaaagattgcctctcccaacagaattctc

SEQ ID NO: 131657 - DNA, 120 bp, Artificial Sequence
  ENSG00000102763_35 (sequence is synthesized)
tcagatgagaaaaattatgctacaatagttgttggttttccagatctcatgtcacccagtgaagtttattcttggaagagaccatcatctttgcataaacgaagtggcactgatacatca

SEQ ID NO: 131658 - DNA, 120 bp, Artificial Sequence
  ENSG00000102763_36 (sequence is synthesized)
ttctatagaggaaagaagaaaagggggactccaaaacaaagcaattgtgtgactcttttagatacgaatcaggtagtgaggattttacccccaggagaagtccctctaaaagatatctac

SEQ ID NO: 131659 - DNA, 120 bp, Artificial Sequence
  ENSG00000102763_37 (sequence is synthesized)
ccaaaagatgttactcctccacaaacatctggttatatagaagtcactgatcttcaatcaaagaaactccgatatatccctattcccagatcagaatctctctcgccgtataccacatgg

SEQ ID NO: 131660 - DNA, 120 bp, Artificial Sequence
  ENSG00000102763_38 (sequence is synthesized)
ctgtcgaccatttcagacacagatgcactgctggctgagtgggacaaaagcggtgttgttactgttgatatgggaggtcacatcaggctttgggaaactggacttgaacgtctgcagcga

SEQ ID NO: 131661 - DNA, 120 bp, Artificial Sequence
  ENSG00000102763_39 (sequence is synthesized)
tcactcatggaatggagaaacatgattggacaagatgacagaaatatgcagataacaatcaacagagacagtggtgaagatgtaagctcccccaaacacgggaaggaggacccagacaac

SEQ ID NO: 131662 - DNA, 120 bp, Artificial Sequence
  ENSG00000102763_40 (sequence is synthesized)
atgcctcacgtgggcggcaacacttgggctggcggaacagggggaagagacacggcaggcctgggtggcaaaggaggcccttaccggctggatgcaggccatacggtgtaccaggtctct

SEQ ID NO: 131663 - DNA, 120 bp, Artificial Sequence
  ENSG00000102763_41 (sequence is synthesized)
caggctgagaaagatgcagttcccgaagaggtcaagagagctgctagagagatgggccagagagcattccagcagaggctaaaggagatccaaatgagtgaatacgatgctgcaacctat

SEQ ID NO: 131664 - DNA, 120 bp, Artificial Sequence
  ENSG00000102763_42 (sequence is synthesized)
gaaaggttttcaggtgctgttcggcgacaggtgcactccctccgaatcatcctggataatttacaggctaaaggtaaagaaagacaatggctaagacatcaagctactggagaattagat

SEQ ID NO: 131665 - DNA, 120 bp, Artificial Sequence
  ENSG00000102763_43 (sequence is synthesized)
gatgccaagatcattgatgggctgactggagaaaaagccatctacaaacgtcggggtgagctggagccacaacttggcagcccacaacagaaacccaagcgtctgcgcctggtggtagat

SEQ ID NO: 131666 - DNA, 120 bp, Artificial Sequence
  ENSG00000102763_44 (sequence is synthesized)
gtgtctggtagcatgtaccgtttcaacaggatggatggccggcttgagcgcacaatggaggctgtgtgtatggtcatggaagccttcgagaactatgaggagaagttccagtatgacatc

SEQ ID NO: 131667 - DNA, 120 bp, Artificial Sequence
  ENSG00000102763_45 (sequence is synthesized)
gttggacactctggagatggctacaacattggtctggttccaatgaacaaaatccccaaggacaataagcaaagactagaaattctgaagacaatgcatgcccactctcagttctgcatg

SEQ ID NO: 131668 - DNA, 120 bp, Artificial Sequence
  ENSG00000102763_46 (sequence is synthesized)
agtggggaccacacgttagaagggacagaacatgccatcaaggaaattgtcaaagaagaagctgatgagtactttgtcatagtcttgagtgatgcaaatctgtcacgatatggaatacat

SEQ ID NO: 131669 - DNA, 120 bp, Artificial Sequence
  ENSG00000102763_47 (sequence is synthesized)
cctgctaagtttgctcaaatcctcacaagagaccctcaagtaaatgcttttgccatttttattggctctttaggtgatcaagcaaccaggcttcagagaactttaccagctggtcggtct

SEQ ID NO: 131670 - DNA, 120 bp, Artificial Sequence
  ENSG00000102763_48 (sequence is synthesized)
ttcgttgccatggataccaaggatatccctcagattttacaacagatcttcacctccaccatgttgtcgagtgtctaagaagtgcccttcatcaccctgatgacaccaggatttgaaata

SEQ ID NO: 131671 - DNA, 120 bp, Artificial Sequence
  ENSG00000102763_49 (sequence is synthesized)
agacaggaataaagagtattctgaaaaaaagaagatatggatgaagtgaacccatgcagtgactggatgattccggcattcctgggtcttcctacacttgctccgtaatgagaattcaga

SEQ ID NO: 131672 - DNA, 120 bp, Artificial Sequence
  ENSG00000102763_50 (sequence is synthesized)
gaagcagccagaaggagacttaaacatggaaagatactccactgatgagtttagaagtgattagggcaagctagttgacctgcactttatcaaaggttggggttaaaggaaggtggtttt

SEQ ID NO: 131673 - DNA, 120 bp, Artificial Sequence
  ENSG00000102763_51 (sequence is synthesized)
gagaactatgtgtttggtctatttccaaaaacctgagggggagaaaatactttgcttttgccttaacacatcatctggtcacgttagaaaagtgaccccatcaaactgagcctttgatgt

SEQ ID NO: 131674 - DNA, 120 bp, Artificial Sequence
  ENSG00000102763_52 (sequence is synthesized)
cacattctgacacaagatgcaagtctgtgcaaaacccaccaaaatgctcctatccaacaattatttttattttctccctgctctgtattgaccagaaaacaatgattttataatatttaa

SEQ ID NO: 131675 - DNA, 120 bp, Artificial Sequence
  ENSG00000102763_53 (sequence is synthesized)
cccaccaaaaagtccctccaacagcaatatcttatgaaagtctggctgttctcaataatttcattttcttggccaaagccaaaaggaatcaaaaaatccttggagtgcttgcctttccac

SEQ ID NO: 131676 - DNA, 120 bp, Artificial Sequence
  ENSG00000102763_54 (sequence is synthesized)
gtgacttttaaaaggctcttaaagagcaaatgtcctcttctccttgctgctagagtgggaggagaaagatgtcttgccttaaaagtttactgtttcttctgttcttctagcatctctcaa

SEQ ID NO: 131677 - DNA, 120 bp, Artificial Sequence
  ENSG00000102763_55 (sequence is synthesized)
aaaattcacagtactccattttggggtccaaactgtaatgctcaaaataataaatgcttacacgaaaattatttattgagaatattcatataaaaattacctaaagcaaagtaaaaaaag

SEQ ID NO: 131678 - DNA, 120 bp, Artificial Sequence
  ENSG00000102763_56 (sequence is synthesized)
taaaatcaaggtggtatatttgaagtgaatggtgattggaaatttttagctgtaacaaaaagaaagaaaacaactttttttaaagcctcattctcttttctttcaaaatgtaccttattc

SEQ ID NO: 131679 - DNA, 120 bp, Artificial Sequence
  ENSG00000102763_57 (sequence is synthesized)
ccacacactcttgggctgacctttattttatcaataagctcaatattactttgtttaaaataagatgcttcagcaaaagtcattctctctttaaccatataatttaaaaactcctcttca

SEQ ID NO: 131680 - DNA, 120 bp, Artificial Sequence
  ENSG00000102763_58 (sequence is synthesized)
cgattgatagcaaaatcagaaacgttagggcaccagtgagttgaaaaaactggtcttaagttggaaaaactattattaataatattatcctatccatccatatctattgaaattgtacag

SEQ ID NO: 131681 - DNA, 120 bp, Artificial Sequence
  ENSG00000102763_59 (sequence is synthesized)
gtccataatttcattttaattaattataggaaagaagaaaagataatacccatttgttctatcacccctctccctatcattaactatcaaataaataaataaaagcaatctgatttccaa

SEQ ID NO: 131682 - DNA, 120 bp, Artificial Sequence
  ENSG00000102763_60 (sequence is synthesized)
ttggactataagcatatatgcttaggccatcagcagaatttatggatatcttcttgttatgacctgtgtttttttatataggtaaagaaccaaaatagtaataaaattattcaaattaaa

SEQ ID NO: 131683 - DNA, 120 bp, Artificial Sequence
  ENSG00000102780_0 (sequence is synthesized)
ggccagcaccaccctccgggcgccgctggaggagcggccgccggagccggcgccgcggtcacctccgccgctgcctcggcggggccgggagaggattcgtctgacagcgaagcggagcaa

SEQ ID NO: 131684 - DNA, 120 bp, Artificial Sequence
  ENSG00000102780_1 (sequence is synthesized)
ccgggagaggattcgtctgacagcgaagcggagcaagagggaccccagaaactgatccgcaaagtgtctacctcggggcagatccggaccaagaccagtattaaagagggacagctattg

SEQ ID NO: 131685 - DNA, 120 bp, Artificial Sequence
  ENSG00000102780_2 (sequence is synthesized)
aagcaaaccagttctttccaaaggtggaaaaagcgatacttcaaacttcgaggccgcaccctttactatgcaaaggactcaaagtctctgatatttgatgaagttgacctctcagatgct

SEQ ID NO: 131686 - DNA, 120 bp, Artificial Sequence
  ENSG00000102780_3 (sequence is synthesized)
agtgtagctgaagcaagcacgaaaaatgctaacaacagcttcacgatcatcactccattcagaaggctaatgctgtgtgctgagaacagaaaggagatggaggattggatcagctcactg

SEQ ID NO: 131687 - DNA, 120 bp, Artificial Sequence
  ENSG00000102780_4 (sequence is synthesized)
aagtctgtacagaccagagaaccctacgaggtggcccagtttaatgtggaacatttctcagggatgcacaactggtacgcctgctcccacgcccgacccaccttctgtaacgtgtgcaga

SEQ ID NO: 131688 - DNA, 120 bp, Artificial Sequence
  ENSG00000102780_5 (sequence is synthesized)
gagagtctttctggagtcacctcccatggcctgtcctgcgaagtgtgtaaattcaaggctcacaaaagatgtgcagtgagagcaacaaataactgtaaatggactaccctggcctccatc

SEQ ID NO: 131689 - DNA, 120 bp, Artificial Sequence
  ENSG00000102780_6 (sequence is synthesized)
gggaaggacattatagaagatgaagatggcgtcgcgatgcctcaccagtggcttgagggcaacctgcctgtaagtgccaagtgtgctgtctgcgacaaaacatgtggcagtgttctccgt

SEQ ID NO: 131690 - DNA, 120 bp, Artificial Sequence
  ENSG00000102780_7 (sequence is synthesized)
ctacaggattggaaatgcctttggtgtaagacaatggtacacactgcctgcaaagatttataccatccaatatgtccacttggtcaatgtaaagtatctatcatacctccaattgcacta

SEQ ID NO: 131691 - DNA, 120 bp, Artificial Sequence
  ENSG00000102780_8 (sequence is synthesized)
aacagcaccgattccgatggtttctgtagagcaacattttcgttctgtgttagtcctctattggtttttgtcaattctaagagtggagataatcagggagtaaagttcctccgtcgcttt

SEQ ID NO: 131692 - DNA, 120 bp, Artificial Sequence
  ENSG00000102780_9 (sequence is synthesized)
aaacagttgctaaatccggctcaggtgtttgatttaatgaatggaggtcctcatttaggtttaagattatttcagaagtttgacaatttccggattcttgtttgtggaggcgatggaagt

SEQ ID NO: 131693 - DNA, 120 bp, Artificial Sequence
  ENSG00000102780_10 (sequence is synthesized)
gtaggttgggttttgtcagaaatcgataagctcaacttgaataaacagtgtcagctgggagtgttgcctttgggtacaggaaatgaccttgcccgagttcttggctggggaggttcatat

SEQ ID NO: 131694 - DNA, 120 bp, Artificial Sequence
  ENSG00000102780_11 (sequence is synthesized)
gacgatgacacccaacttcctcagatcctagagaaactggaacgagccagtaccaaaatgttggacaggtggagtataatgacatatgaactcaaattgccaccaaaagcttccctactt

SEQ ID NO: 131695 - DNA, 120 bp, Artificial Sequence
  ENSG00000102780_12 (sequence is synthesized)
ccaggacctccagaagcatctgaagaattttatatgacgatttatgaagactcagttgcaacgcatcttacaaaaatcctcaattctgatgaacatgcagtggtcatatcttctgccaag

SEQ ID NO: 131696 - DNA, 120 bp, Artificial Sequence
  ENSG00000102780_13 (sequence is synthesized)
acgctatgtgaaactgtaaaggacttcgttgccaaagtagaaaagacgtatgacaaaaccttggaaaatgccgttgtagctgatgccgtggccagtaaatgttcagtcctaaacgagaag

SEQ ID NO: 131697 - DNA, 120 bp, Artificial Sequence
  ENSG00000102780_14 (sequence is synthesized)
ctcgaacaactgctgcaggctttgcacacagattcccaggctgcgcctgttctccctggcctcagccctctcattgtggaagaagatgctgtggaatcgtccagtgaagagtccctgggt

SEQ ID NO: 131698 - DNA, 120 bp, Artificial Sequence
  ENSG00000102780_15 (sequence is synthesized)
gaaagcaaagagcagcttggggatgacgttacaaaaccttcctcccagaaagccgtcaaaccaagggaaatcatgttgcgggcaaatagtttaaagaaagcagtgaggcaagtcattgag

SEQ ID NO: 131699 - DNA, 120 bp, Artificial Sequence
  ENSG00000102780_16 (sequence is synthesized)
gaagccggaaaagttatggatgacccgacagttcacccctgtgaaccagctaatcagtcctctgattatgacagcacagaaacagatgaatctaaggaggaagctaaagatgatggtgcc

SEQ ID NO: 131700 - DNA, 120 bp, Artificial Sequence
  ENSG00000102780_17 (sequence is synthesized)
gggcaagttatggccattcccaaactgattctgtccctggtccagctgtggcagccagcaaagaaaacctccctgtgctcaataccagaataatctgcccaggtttaagagcaggactgg

SEQ ID NO: 131701 - DNA, 120 bp, Artificial Sequence
  ENSG00000102780_18 (sequence is synthesized)
ctgcctcaattgctgggagttcgattatcaacaaaatgttactggcaaacattgatccttttggtgccacgccgtttattgacccggatctagattccgtagatggatattcagaaaaat

SEQ ID NO: 131702 - DNA, 120 bp, Artificial Sequence
  ENSG00000102780_19 (sequence is synthesized)
gtgtcatgaacaattactttgggattggattagatgcaaaaatttcattagaatttaataataaaagagaggagcaccctgaaaaatgcaggagccgaactaaaaacttgatgtggtatg

SEQ ID NO: 131703 - DNA, 120 bp, Artificial Sequence
  ENSG00000102780_20 (sequence is synthesized)
gagtccttggaacccgggagttattacagagatcgtacaagaatttagaacaaagggttcaacttgagtgtgatgggcagtatattcctcttcccagcttgcaaggcatagccgtgttga

SEQ ID NO: 131704 - DNA, 120 bp, Artificial Sequence
  ENSG00000102780_21 (sequence is synthesized)
acattcccagctatgctggaggcactaacttttggggtggaactaaagaggatgatatatttgctgcaccatcctttgatgacaagatcctggaagttgtagcaatatttgatagcatgc

SEQ ID NO: 131705 - DNA, 120 bp, Artificial Sequence
  ENSG00000102780_22 (sequence is synthesized)
aaatggcagtttcaagggtcattaaactgcagcatcatcgaatagcccagtgccgtacagtgaaaatcactatatttggtgacgaaggagtcccagtgcaagtggatggtgaagcgtggg

SEQ ID NO: 131706 - DNA, 120 bp, Artificial Sequence
  ENSG00000102780_23 (sequence is synthesized)
ttcagcctccagggattatcaaaattgtgcacaaaaacagagcacaaatgctaacaagggacagagcctttgagagcactctgaaatcttgggaagataagcagaagtgtgattctggta

SEQ ID NO: 131707 - DNA, 120 bp, Artificial Sequence
  ENSG00000102780_24 (sequence is synthesized)
aaccagttctccgaacccatttgtacatccatcacgccattgacttggcaacagaagaggtgtcgcagatgcagctatgctcccaggctgcagaggagctcattactaggatatgtgacg

SEQ ID NO: 131708 - DNA, 120 bp, Artificial Sequence
  ENSG00000102780_25 (sequence is synthesized)
cagccacaattcactgtcttttggagcaagaactggcccatgctgtgaatgcctgctcccatgccctgaataaagccaacccaaggtgcccggagagtcttacaagagacactgccactg

SEQ ID NO: 131709 - DNA, 120 bp, Artificial Sequence
  ENSG00000102780_26 (sequence is synthesized)
aaatagccatcaatgtgaaggcgctgtataatgaaacagaatctttgctagttggcagggttcctttgcagctggaatcgccacatgaagagcgagtatccaatgccttacactctgtgg

SEQ ID NO: 131710 - DNA, 120 bp, Artificial Sequence
  ENSG00000102780_27 (sequence is synthesized)
aggtggaattacagaaactgacagagattccttggctttattatatcttacacccaaatgaggatgaggaacctcctatggattgcaccaaaaggaacaacagaagcaccgtatttcgaa

SEQ ID NO: 131711 - DNA, 120 bp, Artificial Sequence
  ENSG00000102780_28 (sequence is synthesized)
tagtgccaaagtttaaaaaggaaaaggttcagaagcagaagacaagttcacagcctgttcagaaatggggcacagaggaagttgctgcttggctggatctgctcaatttgggagagtaca

SEQ ID NO: 131712 - DNA, 120 bp, Artificial Sequence
  ENSG00000102780_29 (sequence is synthesized)
aagatatcttcatccgtcatgacatcagaggggctgaacttttgcatctggaaaggcgagatcttaaggatctggggataccgaaagtgggtcatgtgaagcgaattctccagggaatta

SEQ ID NO: 131713 - DNA, 120 bp, Artificial Sequence
  ENSG00000102780_30 (sequence is synthesized)
aagagcttggaaggagcactccacagtcggaggtgtaatcatattggtgctatttcttggaagagaagttattgccacttaatacaaagtccttggaagcaagtggctgttcttgtagtt

SEQ ID NO: 131714 - DNA, 120 bp, Artificial Sequence
  ENSG00000102780_31 (sequence is synthesized)
ttctgcatagataagtaagcaccactgaagcacctctgtggcttgatattttgctgtgggtgaaattttgatttgaggtattagaaaatatttttgtgccgaacaatacattccacaaag

SEQ ID NO: 131715 - DNA, 120 bp, Artificial Sequence
  ENSG00000102780_32 (sequence is synthesized)
ccattttctttttgtgcaaacctgacatgttcaaatatattcacaatggtaataaggtaggaggaatctgagacgattgcattgtctaaacagtggaattgcaaaatgtttactttccat

SEQ ID NO: 131716 - DNA, 120 bp, Artificial Sequence
  ENSG00000102780_33 (sequence is synthesized)
agatctggtctgatggaatgttcctactgtgcaactgcataacaatatgtggttaaaacttcctaggtttcattacgggggggcattggccattttcttaaaatcataggttaggagact

SEQ ID NO: 131717 - DNA, 120 bp, Artificial Sequence
  ENSG00000102780_34 (sequence is synthesized)
aaaatataaattaagttgtgatttgaatgtagattggtatcacctccaactcctagtgcttagtggtcaaatatgttgaaaacctttccaatactatgaatgaatgcaaatcttaatgca

SEQ ID NO: 131718 - DNA, 120 bp, Artificial Sequence
  ENSG00000102780_35 (sequence is synthesized)
tgaaacagaatctttgctagttggcagggttcctttgaaaagtgccacctttggggcatcctttgctctgagaagagaagctgaaaggctgcatgaaagccatcactcttacctacctcc

SEQ ID NO: 131719 - DNA, 120 bp, Artificial Sequence
  ENSG00000102780_36 (sequence is synthesized)
aggccttttacagactccaaatagatggtcctgagctgatactgtcattgtcaccatgatcctggagacacagcctgtagctgtgtggaagtaaacttctaaaacctgtctcttctgaga

SEQ ID NO: 131720 - DNA, 120 bp, Artificial Sequence
  ENSG00000102780_37 (sequence is synthesized)
gttactgcatgaaaacaggcaaggatgggtcaagttttggaccagcagcccaagttccaccaaccactctgttatacagaggcttctaagctatgcagagtgctatgaagggtttattct

SEQ ID NO: 131721 - DNA, 120 bp, Artificial Sequence
  ENSG00000102780_38 (sequence is synthesized)
tcttttgcccacctgactgatatactgatgtactttttgaagaagggcaatggaatttacctagacgtcactgtggtcttgatgtggctgaagtgttttgttgaaggctctttagtcctg

SEQ ID NO: 131722 - DNA, 120 bp, Artificial Sequence
  ENSG00000102780_39 (sequence is synthesized)
tactcatttagattgactctcacttctggtccctttttgtggtgcagactaaagcctcaaactctgtaaaagacaatggcttgtctcatgaagagaagtgaccaactgttaataagcttt

SEQ ID NO: 131723 - DNA, 120 bp, Artificial Sequence
  ENSG00000102780_40 (sequence is synthesized)
atccaaagagggtcgtggaaaacaagaaaatgcaaaagtgaggttctcttcaatttcatatgcaattaacaaatatccagagctgactgattggtgctcctcttccatgtgacttttggc

SEQ ID NO: 131724 - DNA, 120 bp, Artificial Sequence
  ENSG00000102780_41 (sequence is synthesized)
agaataatctgcccaggcaatgatttctcagatatgacaagcacacgccacaaaagacaaataaattggacttcaccgaaatgaatagttttgtgattcaaaggacactatcgagaaagt

SEQ ID NO: 131725 - DNA, 120 bp, Artificial Sequence
  ENSG00000102780_42 (sequence is synthesized)
gaaatgacaatttaagaatttacaaataatatatctgataaaggactagtatccagaacatataaagaacccttaaaattcaacaataaaaaggtttaagagcaggactggctgcctcaa

SEQ ID NO: 131726 - DNA, 120 bp, Artificial Sequence
  ENSG00000102780_43 (sequence is synthesized)
tatgagttcaagatggtcacctgcttctctaggaatccaagggacaacttcaattcctttaggagtttcctttacagaaaactgcgtggtgggaatccaggccaatacagaaaggatcaa

SEQ ID NO: 131727 - DNA, 120 bp, Artificial Sequence
  ENSG00000102780_44 (sequence is synthesized)
caagctgatgaatgagtctcaaatgttggtgacagctctcaatcctcgtatagcgtatgacaaggcagcaaagattgctaagacagcacacaaaaatggatcaaccttaaaggaaactgt

SEQ ID NO: 131728 - DNA, 120 bp, Artificial Sequence
  ENSG00000102780_45 (sequence is synthesized)
tattgaacttggctatctcacaccagaacagtttgatgaacaggtaaaaactaaggacatgctgagtccaaagtgatttaagtaaatttataatgaaaataaacgtgtatataatttttt

SEQ ID NO: 131729 - DNA, 120 bp, Artificial Sequence
  ENSG00000102780_46 (sequence is synthesized)
tcttctttggccaacctttgctttgtaatgcattgagcatgtagaaattaagggggttttgctcttaactttggtagttcagaaatggggcacagaggaagttgctgcttggctggatct

SEQ ID NO: 131730 - DNA, 120 bp, Artificial Sequence
  ENSG00000102780_47 (sequence is synthesized)
attattagaaatctttagtcatctcattccctgtgagctgaaaggggccttcaagaagagagttctcagagcagactcagctttaggtgctgaaatgaatttctcaagatcatcactcca

SEQ ID NO: 131731 - DNA, 120 bp, Artificial Sequence
  ENSG00000102780_48 (sequence is synthesized)
aatgttaatgggatttaatttattactaaagtacatttttgttggttaagggcactgcacttttctgttttttaatgtgggattttgcgtaaatattctgtacctaagactttgtgaaag

SEQ ID NO: 131732 - DNA, 120 bp, Artificial Sequence
  ENSG00000102780_49 (sequence is synthesized)
tgtgtctgtgccataatcaacaaatgatatacatcacatgcaagtcaattttatttcaatctatcataagcagtaggcgtgcacgttaagaaaattctctggatattttcataaaattac

SEQ ID NO: 131733 - DNA, 120 bp, Artificial Sequence
  ENSG00000102780_50 (sequence is synthesized)
atgctcccttacctgacaaaacttgttacagctttccaaaccaaaatttccacattttgtttctaatttttaatttcaatttaataattatttaatattctatttgaatttataatatag

SEQ ID NO: 131734 - DNA, 120 bp, Artificial Sequence
  ENSG00000102780_51 (sequence is synthesized)
taaagtgttgatatccaggaattccctgaggtgtcaactgagatttatatactgacagataacccagactcacccgctctctacagtgacttctgacacgatcttccaaacagaagggat

SEQ ID NO: 131735 - DNA, 120 bp, Artificial Sequence
  ENSG00000102780_52 (sequence is synthesized)
ttaaattttttcttaagggctttatgttgttattattattatctcacttaattcttaattcttatcaggtggatattattttcctttttctaaaccactgtacttcagtgtagcttatta

SEQ ID NO: 131736 - DNA, 120 bp, Artificial Sequence
  ENSG00000102780_53 (sequence is synthesized)
ttagaagtcaacattacaatgatcaaatctttgaaagccaaaggcatacgtatcaaaaagtcacaaaaatatccttaaataagctttctttagccattatataccaaaacattaattata

SEQ ID NO: 131737 - DNA, 120 bp, Artificial Sequence
  ENSG00000102780_54 (sequence is synthesized)
atattttaaaatttgtatataagagaaataaacagggtactgactcagtggtgacaatttttatgaagtagcctgctaggtgcttaatagatatatatacacacagatatatacatatac

SEQ ID NO: 131738 - DNA, 120 bp, Artificial Sequence
  ENSG00000102780_55 (sequence is synthesized)
acatatatgtgtatatatacatacatacacatatacatttatatgtgtatatatatacctacatacatataaccttgtgatatggcatcattgatattttctagacaattatttccccag

SEQ ID NO: 131739 - DNA, 120 bp, Artificial Sequence
  ENSG00000102780_56 (sequence is synthesized)
tgtttaaagagaaatactaataggcgagcatttaaaatgaactattgtcaggcatattatttaattacatcaaaggagtttaactgtttgacactttactcttgtttataacttgggtat

SEQ ID NO: 131740 - DNA, 120 bp, Artificial Sequence
  ENSG00000102780_57 (sequence is synthesized)
ttaactactagtaaaaatcacaaaattttaatgtctttaaaataaatgaccctgagggattcctgaccaagtatgtctgactatatattttacctaagttgtaaataaatggaaattttc

SEQ ID NO: 131741 - DNA, 77 bp, Artificial Sequence
  ENSG00000102780_58 (sequence is synthesized)
atattttacctaagttgtaaataaatggaaattttccaaagacagttatatcaagtagtttaaaaagtcatgaggca

SEQ ID NO: 131742 - DNA, 120 bp, Artificial Sequence
  ENSG00000102780_59 (sequence is synthesized)
cccaggagatggaggttgcagtgactgagatcacaccactgcactctactagcctgggtgacagagcaagactcccatctcaatctcaaaaaaaaatagtcatgaattatgcaattattc

SEQ ID NO: 131743 - DNA, 120 bp, Artificial Sequence
  ENSG00000102780_60 (sequence is synthesized)
taattgtatctgcacttacgaagtcagaggtctcctttttcagtccctctgatagtcccacctaagtgctgtcctgctcctgtgaacactttcctgtgcaaccaaacaggaggtgccagg

SEQ ID NO: 131744 - DNA, 120 bp, Artificial Sequence
  ENSG00000102780_61 (sequence is synthesized)
ttcccagaactctctaacattacagatctctgtccatctttactaaaaaaaggaaatgtgagggaaagaaggggaagaactctagcataaataatgtattaatataaatatctatattga

SEQ ID NO: 131745 - DNA, 120 bp, Artificial Sequence
  ENSG00000102780_62 (sequence is synthesized)
ttttcaccccccattcccctttgctaatagaaaagagtctagctatgatgtgtcccaaatttaagagtgtgatgtgaaggactgaatttttgtttgttcgtttggtgagcttttcactcg

SEQ ID NO: 131746 - DNA, 120 bp, Artificial Sequence
  ENSG00000102780_63 (sequence is synthesized)
taggtgacatcttttgtatatgctgtaaagtctcagttaatggaatcctacagtgcatttctggctagctcggttggtagagcgtgagtctcttaatggaatccttaattagctagaatt

SEQ ID NO: 131747 - DNA, 120 bp, Artificial Sequence
  ENSG00000102780_64 (sequence is synthesized)
ttcctgcaaatggctttggatgagggaaattctataaaatgacaatttggatatactttttgttaaatgagagcaattttctctgtatgctttgtctatgcatggctgtgcagggcccaa

SEQ ID NO: 131748 - DNA, 120 bp, Artificial Sequence
  ENSG00000102780_65 (sequence is synthesized)
atgacttcactgacacctgtttccaggagggggtcttcagagcctccttaggctcttgtcagtatcataaataattcctcttcttatagcggatggggttaccaaaaaaaataaaaagta

SEQ ID NO: 131749 - DNA, 120 bp, Artificial Sequence
  ENSG00000102780_66 (sequence is synthesized)
gggaagagcttctccatgggatcagatcacagctttggggagtgggatggggcctctatgctttgatctatgcatgagctggggtgagaagttcccacctgcacctgactgcaatgactg

SEQ ID NO: 131750 - DNA, 120 bp, Artificial Sequence
  ENSG00000102780_67 (sequence is synthesized)
taatggctggaattgtcacctcttctccctgataggctcttcctcacctggaggatcggggctggtgggagggcagggaaggggaggccatcagccagaatgtattttctttcagttcca

SEQ ID NO: 131751 - DNA, 120 bp, Artificial Sequence
  ENSG00000102780_68 (sequence is synthesized)
tttcctgaggaagaacttgcttttaaaggaggaaagggacagaatcagacctaaataaaattcctgagtatgcaatatttctctttagtgtctcttcacctccctttctgagtttctttc

SEQ ID NO: 131752 - DNA, 120 bp, Artificial Sequence
  ENSG00000102780_69 (sequence is synthesized)
ctacatcctggctcttcattttcccaatgcccaatataatcatggttgctgaaattctcactgccttctactttcctttccccatcaattaacccactacaaaatgacccctttcatttc

SEQ ID NO: 131753 - DNA, 120 bp, Artificial Sequence
  ENSG00000102780_70 (sequence is synthesized)
tcgcttaagcatacatggtgggtcatttaactaagtgttaggaagaaaacaatttaaagacactaattttacagtttgcgttctgtaaaaggatacttgctggataatctaagtgaattg

SEQ ID NO: 131754 - DNA, 120 bp, Artificial Sequence
  ENSG00000102780_71 (sequence is synthesized)
atggattaggtcatttgggattgtgatatatattgttcttgctgacaagaaatgacccatgaatgtctagatctatcctgtccaatattgtagctacatgtggctatctaaatttaaatg

SEQ ID NO: 131755 - DNA, 120 bp, Artificial Sequence
  ENSG00000102780_72 (sequence is synthesized)
taatttaattaagccaggcataatggcacaagcctgtaattccggtgactcaggaggcttaggagggaagatggcttcaggccaggagtttgagaccagcctcggcaacatagtgagacc

SEQ ID NO: 131756 - DNA, 87 bp, Artificial Sequence
  ENSG00000102780_73 (sequence is synthesized)
gccaggagtttgagaccagcctcggcaacatagtgagaccctgtctctgaaaaaaaatttttttaactagctttctgaaggctgagg

SEQ ID NO: 131757 - DNA, 120 bp, Artificial Sequence
  ENSG00000102780_74 (sequence is synthesized)
agccatgatcatgctactgccctccagcctgggcagcagagcaagacccctactctttaaaaaaattaatttaattagaaactccatttctcagttgcactaactacatttcaagtgttc

SEQ ID NO: 131758 - DNA, 120 bp, Artificial Sequence
  ENSG00000102780_75 (sequence is synthesized)
agtaaccatagtggacagtgcagatgtagaaaatttccatcactgcaaaaattctattggacagcactggtgcagatcattgctactcaaaatgtgatccatgggccagcagcatcaata

SEQ ID NO: 131759 - DNA, 120 bp, Artificial Sequence
  ENSG00000102780_76 (sequence is synthesized)
ttacctgggagcttacagaaatgcagaatttcaggcccactgcagatctaccgaatcaaaatcttcctttagcaaaatttctcaaacgattagcactggcctacatccattttatccttc

SEQ ID NO: 131760 - DNA, 120 bp, Artificial Sequence
  ENSG00000102780_77 (sequence is synthesized)
cttagctattagggatgtgaggtccgagggcttcaaaaggtccccggaatagcttgttccttcatccactgtgtcctattcattcttcagctaactccagcaatgagctgaaactcattc

SEQ ID NO: 131761 - DNA, 120 bp, Artificial Sequence
  ENSG00000102780_78 (sequence is synthesized)
atcacccttgctgagttttcttctcaatccttattcctaattctggttctagatgagccctacctacccagtggttgtatttttgtagccagtgtgggacacaggagattggcagaccaa

SEQ ID NO: 131762 - DNA, 120 bp, Artificial Sequence
  ENSG00000102780_79 (sequence is synthesized)
cacagctagcctctctctagccctccctccacctctaagtcactaacaatccatgtttgttcagtttgttgacatgtggcatgttcatttgttcacaacttaatcacgggggacatttca

SEQ ID NO: 131763 - DNA, 120 bp, Artificial Sequence
  ENSG00000102780_80 (sequence is synthesized)
gaaaaatgtgtactaagttaaaaccatgtttagtctcctacaacttgtacattttcattttctcttatcagtagattgtccttgttgacatagctcatgcatgaggacacatagcagtac

SEQ ID NO: 131764 - DNA, 120 bp, Artificial Sequence
  ENSG00000102780_81 (sequence is synthesized)
acacacattgaatgaattgttagtcatgcaaaaaaagaaaaggaatgaaccaagatgattgcaagttaatctcatttaagccctctaaaaaggcatgctttgctagatttagatctgttt

SEQ ID NO: 131765 - DNA, 120 bp, Artificial Sequence
  ENSG00000102780_82 (sequence is synthesized)
tccttacactcacttatcttgatgttcacatggttaataattccttaaaatagtgcctgaagaataatatttcatattcttgacccccaaataacagtttacttaattttataagatttt

SEQ ID NO: 131766 - DNA, 120 bp, Artificial Sequence
  ENSG00000102780_83 (sequence is synthesized)
tattaataaagaggacaatatttttgtcttcatggaacttatttttaacaggaatcaaggaagaaaatattcatgcagagctatgacttagaaagttataggggctgccactatacagca

SEQ ID NO: 131767 - DNA, 120 bp, Artificial Sequence
  ENSG00000102780_84 (sequence is synthesized)
cttctaaagtaaaacatcttctatctccaactgggctgtcaacatagtggactttcatgttctatggatatgaattctttaaggatgtagcccttaattaagctgtaaaaacaatgcatc

SEQ ID NO: 131768 - DNA, 120 bp, Artificial Sequence
  ENSG00000102780_85 (sequence is synthesized)
tctcaaccttgacatttaggatctctcctgtctgccccctctacgccccactccaattaactcatcctacatctctcagatgtaagttggataagagtgggtttgaagtttggtaataca

SEQ ID NO: 131769 - DNA, 120 bp, Artificial Sequence
  ENSG00000102780_86 (sequence is synthesized)
agtggcagttttaaaacaccaaattctttagatcagctgaaaagaagagtgagaattgaaaattcctccactagtaattgttagccaatagaatagcctcccagagcagtccccacagca

SEQ ID NO: 131770 - DNA, 120 bp, Artificial Sequence
  ENSG00000102780_87 (sequence is synthesized)
cttggttgccatgggtttctctcctctcactgcctgccccagtgccatgatgtctggggcttgtctcttctatggcatcccctgattgacttttgtatagcaacctctgtgtcaagtcag

SEQ ID NO: 131771 - DNA, 120 bp, Artificial Sequence
  ENSG00000102780_88 (sequence is synthesized)
taatatgatgccattgtaataggaggccttcctaaagaagtaactgcaacttttaaaacgtgatgattattggtttttataatacacaaagcattaattttttcttatcttattttctct

SEQ ID NO: 131772 - DNA, 120 bp, Artificial Sequence
  ENSG00000102780_89 (sequence is synthesized)
ttattatttctttccaacttttgtttggagacatttatgttagaagaaaaactataaagttttatcattgtagagaacagagagatcaaagacagctggactgtacctgtttgtgtaatt

SEQ ID NO: 131773 - DNA, 120 bp, Artificial Sequence
  ENSG00000102780_90 (sequence is synthesized)
atttctgatatttttaggaaaagaagtttaacagagtaactcagactgagactgttaaactctgttcatgataaactccatattacataatataggtgaacagattaattccctccatgt

SEQ ID NO: 131774 - DNA, 120 bp, Artificial Sequence
  ENSG00000102780_91 (sequence is synthesized)
aactaagatactctatttacattatttatatactctcttagttttttatgcacttccaagttttagttggaaaaatgaaaaccaagctactacttaaaagttattaaaaacttcacataa

SEQ ID NO: 131775 - DNA, 120 bp, Artificial Sequence
  ENSG00000102780_92 (sequence is synthesized)
aatatttcattttagctacaagttattcattgcataggattttataaatagtctgggtatttcataggaactgcatttcaaaagtgaattaaccaaacctaaaaaaagggttacttttaa

SEQ ID NO: 131776 - DNA, 120 bp, Artificial Sequence
  ENSG00000102780_93 (sequence is synthesized)
aatgcattaaaataaagaagtttcatattcagttgataaggccattaaggtaggataatgcagttacatatacaaactaaaaaaggaaaaagaatatattttgtggtccttaatgtttga

SEQ ID NO: 131777 - DNA, 120 bp, Artificial Sequence
  ENSG00000102780_94 (sequence is synthesized)
ttgcactattgtttcccacagcttagccgtatctatttctgtataccaagtattaagctgatatgtagctaaatatttcttacagttctggtaactggtaactagtgctgtgaaaggttt

SEQ ID NO: 131778 - DNA, 120 bp, Artificial Sequence
  ENSG00000102780_95 (sequence is synthesized)
tggtattgtaacattcccagttttgtgagttatatattgtatattgaagatgactagtaaattcaagtaatatatttatctacagctgggaaaatataattattttcaaatcttcaagta

SEQ ID NO: 131779 - DNA, 120 bp, Artificial Sequence
  ENSG00000102780_96 (sequence is synthesized)
agttgtatcgaatgtttttcttcctcttaagtgagataaatctcacttttatgttaaaatgtctatttatacaacaggtttctccttttgctgttattttcatattaaaatttttcttat

SEQ ID NO: 131780 - DNA, 120 bp, Artificial Sequence
  ENSG00000102780_97 (sequence is synthesized)
ctttttatatcaaaataattatgctggctattcaaactgccaagatgtattttagtttgcaggatttttggcagacaaaatatttaataacaaatataaaagctttgtatattttgtggc

SEQ ID NO: 131781 - DNA, 120 bp, Artificial Sequence
  ENSG00000102780_98 (sequence is synthesized)
attaggggcaagaattttacctttggatttctctatgtgaggcagtgctggtgtcagcaaagtcagtaacagacagtattacttgtaatcatcaaaagaaggtttccacaagttgtataa

SEQ ID NO: 131782 - DNA, 120 bp, Artificial Sequence
  ENSG00000102780_99 (sequence is synthesized)
atcagtgcatttatttattatgttgtgaaacttaagctttatatgaaatacatattctagctcttttcctttttactgctgttgtttagagtgtgtagttctgttgatgatttacttatg

SEQ ID NO: 131783 - DNA, 120 bp, Artificial Sequence
  ENSG00000102780_100 (sequence is synthesized)
tacttgaagtactcatttctgtcaaacagatgcccaactattttccttttaaaaaactgtattctttactgcaatagatagcggaatagtaatagacactttgttaaaaaaataagtttc

SEQ ID NO: 131784 - DNA, 120 bp, Artificial Sequence
  ENSG00000102780_101 (sequence is synthesized)
atgtttaaaataaatatttttttaaaatataaagccaaaatgaattcaccaatattaaggatttaatgtagccaagggattcagtgtgttatattttgccaatatgtattttatcttcat

SEQ ID NO: 131785 - DNA, 120 bp, Artificial Sequence
  ENSG00000102780_102 (sequence is synthesized)
gtcacaacttattttctgtagccaattctcagttttagttgaagagagatctcagtgattgtactgccaatatgacattcaaatgaacattaggaatcttgaaccatggctgagcgctgt

SEQ ID NO: 131786 - DNA, 120 bp, Artificial Sequence
  ENSG00000102780_103 (sequence is synthesized)
tgtctcagggggaaaaaaaagaattttgaaccccccaaaatatcacatatctagcagttctaggttccagggtggatatttttaacatatgtttgcatttggttctgggatagtaaccgt

SEQ ID NO: 131787 - DNA, 120 bp, Artificial Sequence
  ENSG00000102780_104 (sequence is synthesized)
tatggataattgtttgtttctgtcaagtcggtgagattttaattgtttgaattatttctatttaaaattactctcaatttaactgtttaaaaaactaaaaatttaaaacataatggcaca

SEQ ID NO: 131788 - DNA, 120 bp, Artificial Sequence
  ENSG00000102780_105 (sequence is synthesized)
acatacgacacagaataaaacacatgttttcaaggaagaagaaaaaactgttttgacttaatgtgaagcaggggtttaccaaagaaaattgctttaataagccctaactttaactgtttt

SEQ ID NO: 131789 - DNA, 120 bp, Artificial Sequence
  ENSG00000102780_106 (sequence is synthesized)
cttctatgttacagtgttagcggttgatgtattgtgtactgtttaagaactcataggagactaataattaatttactataattttaaaggcaaagagttttatattaattttactgttgc

SEQ ID NO: 131790 - DNA, 120 bp, Artificial Sequence
  ENSG00000102780_107 (sequence is synthesized)
acaagcagttattggaagtgggggaaaaaaagaaaactggtgagagaaattacatggaaattataggaaaaaggaacttgaattggtaatttggcaaagatttgggaacaaatagtttga

SEQ ID NO: 131791 - DNA, 120 bp, Artificial Sequence
  ENSG00000102780_108 (sequence is synthesized)
acatagatttctttcaccttatatgatagaaacacaaggcacacgtgagctgtatagtgtgctgagcacacccccagaaaacaaaaaatatcacattgatgaagtccgagactgtatcta

SEQ ID NO: 131792 - DNA, 120 bp, Artificial Sequence
  ENSG00000102780_109 (sequence is synthesized)
gatcttagcataactagtgaattcagggagcacatcctgctgctgaaattgagaagtcagtaagaaggtagttcagatgacctaatcattcaagacatttgatggagtccacacaagggt

SEQ ID NO: 131793 - DNA, 120 bp, Artificial Sequence
  ENSG00000102780_110 (sequence is synthesized)
ttatgatgtggggcaaatatctgtgctttctcatctcagtgattgatgtctggagaactagtcagacacacttagctggttcctatagaaaaacaccagtaaatgtggatcagaccatac

SEQ ID NO: 131794 - DNA, 120 bp, Artificial Sequence
  ENSG00000102780_111 (sequence is synthesized)
cctgcagaccaaggagattttcttaaacttgctaagcctttcttaaacttgccaagtattagcaatgataattgctaaatggattttttcctttcactgaaacaacaaaacaattattga

SEQ ID NO: 131795 - DNA, 120 bp, Artificial Sequence
  ENSG00000102780_112 (sequence is synthesized)
aattcacaatacctagagatgggaacatggtttaggtttatccagttctgtaactgactttggcattggctcattgtgtcctttctacaagttatgttttggtgacttggtgtccccagt

SEQ ID NO: 131796 - DNA, 120 bp, Artificial Sequence
  ENSG00000102780_113 (sequence is synthesized)
tagaaatggcacacaatattatcagttgttagtacttggtaacgtttcttttactaaaggaattatataagtatgaatcatacctaattttacaatttctttcccacggtcattttggat

SEQ ID NO: 131797 - DNA, 120 bp, Artificial Sequence
  ENSG00000102780_114 (sequence is synthesized)
ataaagatagacttcccagacagtgaggttagaaattagaagttcaaattgatatccctgatgtttaatttaaaaatgaaagtaaagttaaaattagtagcatttgtaccagagtagatt

SEQ ID NO: 131798 - DNA, 120 bp, Artificial Sequence
  ENSG00000102780_115 (sequence is synthesized)
atgggtattttcatctgttatattacatgttcatattattcattttaggataggccaaaactcacttctaaaatcttcaaaaattttgaatagtttcattttttcaatacttaagccaaa

SEQ ID NO: 131799 - DNA, 120 bp, Artificial Sequence
  ENSG00000102780_116 (sequence is synthesized)
tgacaattttatagatgtgaatatatgttttttaaagttaagtccttcatatcttttcttagtttaactccccaaagaggaaaatgtctctttaaaccagtagttaaaaagatggagtat

SEQ ID NO: 131800 - DNA, 120 bp, Artificial Sequence
  ENSG00000102780_117 (sequence is synthesized)
gtgatgttcctttctctgtactgagttctgaatgtttaatccagagcatggatcactgactgcgttctctgactgtggaatggtattctttcatgcaaagtactttcaaaacttcccata

SEQ ID NO: 131801 - DNA, 120 bp, Artificial Sequence
  ENSG00000102780_118 (sequence is synthesized)
aagaaactaaactagagattgtctttattaattaatggaactctgggtatgattaagggaattaaattagaaagtagaataacctagttaaaatcattatattagttatacatgagagtc

SEQ ID NO: 131802 - DNA, 120 bp, Artificial Sequence
  ENSG00000102780_119 (sequence is synthesized)
agtgaacgatgacttgatttttacatgacatttgaattctgtcactatctgattcttgacctaaaggtttctttgctaaatctgatatttattatagtataatatgataatttggagctc

SEQ ID NO: 131803 - DNA, 120 bp, Artificial Sequence
  ENSG00000102780_120 (sequence is synthesized)
ctgttgcatctcactgccccaaaaatgttggaatgccatatgatacagggaaaagattggagttcatcaccgtggaattttgatctgtcttaatgacacaacttaattttcatgatgata

SEQ ID NO: 131804 - DNA, 120 bp, Artificial Sequence
  ENSG00000102780_121 (sequence is synthesized)
gatctctgaatgattaatccagaatgatttggtacagtgactggaagaaattgtttttctgggaatttgcttcccataatgacctgatatacaggtgaccttagtataattgaaattaat

SEQ ID NO: 131805 - DNA, 120 bp, Artificial Sequence
  ENSG00000102780_122 (sequence is synthesized)
tataattttaattagaacatgctctgtttacagattataattgcgcagcattttaaaaaaatatacataattatgaggatgagagaattgcaaacttgaacagttcttttgttttctctc

SEQ ID NO: 131806 - DNA, 120 bp, Artificial Sequence
  ENSG00000102780_123 (sequence is synthesized)
cttttacttgaaaagctttcagaaagcttttgaaagatgacacagttttcatagcaacagtatgcaaattaggtttttctgccaagaaactcataaactaaagtatggaataacacaaat

SEQ ID NO: 131807 - DNA, 120 bp, Artificial Sequence
  ENSG00000102780_124 (sequence is synthesized)
gcttaatcttaatcttggctttggattttgtaagcaaaagcattttctgcatcaatttttttcagtatgcagttgcatatttcattttttgattatgtcaaaagttgaattctcatttta

SEQ ID NO: 131808 - DNA, 120 bp, Artificial Sequence
  ENSG00000102780_125 (sequence is synthesized)
tgctgtgtttctcattagttgcagtaaagtgttgatttcattgctgcctttcaggccttcatcatacaaaccctcaccatttttcactcctgtgcttttgccataggtttttttttgttt

SEQ ID NO: 131809 - DNA, 120 bp, Artificial Sequence
  ENSG00000102780_126 (sequence is synthesized)
ttggtttttttccagcaactagtttttctactttcactctttcccaccagagtggtctctctaaaacaaatttgctaaagttcttaagtaggctcttttttctctaaattacagaatagc

SEQ ID NO: 131810 - DNA, 120 bp, Artificial Sequence
  ENSG00000102780_127 (sequence is synthesized)
aaactaactcctaagcaagatgagtcagtgtctatgaccttgcctctttcttcctttttagtatcctcaccaaccttccctctgttgacttttgtaatccaggaatttggaactacttat

SEQ ID NO: 131811 - DNA, 120 bp, Artificial Sequence
  ENSG00000102780_128 (sequence is synthesized)
gacttagtgccttggcataatcacatgccatagatgaacatgttcaagactcagttcaaatttaactttctgtgaagccctacctgacttccctaggcaggtattttctccatgcctata

SEQ ID NO: 131812 - DNA, 120 bp, Artificial Sequence
  ENSG00000102780_129 (sequence is synthesized)
gtatattgaaactttttctgttaaaataacataacatttcaattacacacacacaacctgtctcttccactgaacttctctctccccctttgtattctcagtgtctagctacacataata

SEQ ID NO: 131813 - DNA, 120 bp, Artificial Sequence
  ENSG00000102780_130 (sequence is synthesized)
ggactttgataaatatttttgaatgaaggtaatagaaaacccgaacttctctatatttgtgtactttcacaaacaaaggcttagaattccacatgaaagtccacatgaggtaagtgtgca

SEQ ID NO: 131814 - DNA, 120 bp, Artificial Sequence
  ENSG00000102780_131 (sequence is synthesized)
ttcatgagcatgtgtgcactctgggcaaaccaacagaagataaacagcaaggaagagcagttgttttgtgaaaaataatcatctgttagctgtaaatcagaaatattggccaaatcagaa

SEQ ID NO: 131815 - DNA, 120 bp, Artificial Sequence
  ENSG00000102780_132 (sequence is synthesized)
ttcttgtttctaaaatgaggcttctaaaattttcacataactgccaaactcttatttgtaattcttaaatatgccctaaagatcatctttctcttttatagacatttagtgtatacagtc

SEQ ID NO: 131816 - DNA, 120 bp, Artificial Sequence
  ENSG00000102780_133 (sequence is synthesized)
cacataaatacatatactgattacctacagacaataatgagacttcagaaagaatcaaaagcaatagtgatggtggaatttttaaataatattcagctggggggaaatagactgagtttg

SEQ ID NO: 131817 - DNA, 120 bp, Artificial Sequence
  ENSG00000102780_134 (sequence is synthesized)
tgtgatttcaggttatttagagttattaatgtaaacataagaaggcttgtgactcttatcaccctctatagaatataaagactaaaaataaaaactattacctctgggcctgtttttctt

SEQ ID NO: 131818 - DNA, 120 bp, Artificial Sequence
  ENSG00000102780_135 (sequence is synthesized)
tgggattagataaagcctttctaccatatcaccaaatactcataaaggctaacacagaaagcttttccaagttaataatttctaaaattaaatatcagggccaggtgtggtggctgacac

SEQ ID NO: 131819 - DNA, 64 bp, Artificial Sequence
  ENSG00000102780_136 (sequence is synthesized)
cactttgggaggccgaagtgggtggattacctgaggtcaggagctcgagacaagatgcacacct

SEQ ID NO: 131820 - DNA, 120 bp, Artificial Sequence
  ENSG00000102780_137 (sequence is synthesized)
gactctgtctcaaaaaaaagaaaaaaaatcaaaataattgtaattaactgaaatgccctgttccttcattcacttgatagacttttctacctgctctatacttggcactcaattagattc

SEQ ID NO: 131821 - DNA, 120 bp, Artificial Sequence
  ENSG00000102780_138 (sequence is synthesized)
attctggggatacagataaaataagacaaagctcccatctggtagagtccaagtttgttttcacagttatttttccacagtctgtttaaggtattaggaggacttttataaaccgagtgt

SEQ ID NO: 131822 - DNA, 120 bp, Artificial Sequence
  ENSG00000102780_139 (sequence is synthesized)
ttttcaggttacttcagagaggagtctccttccacccaaaaaaactaaccaaattattttatcataaagaggtaatcccatttttatgtccacaatttttacatttttgtatcagccacc

SEQ ID NO: 131823 - DNA, 120 bp, Artificial Sequence
  ENSG00000102780_140 (sequence is synthesized)
aataattttgactgttttgtcaagtacatatttcatcaatcctatttccacagccgtacatgtgatcccagtgactgatagatctgtagaatgtgaactcacatttaaagtttattttgg

SEQ ID NO: 131824 - DNA, 120 bp, Artificial Sequence
  ENSG00000102780_141 (sequence is synthesized)
gaaggcatatatgccttttgatgacacacacaccaaaatatataagagctgtgcatggtaaacccacagtagaagggaaaaagtaatgctttctggtatacttcagaggctccatttgaa

SEQ ID NO: 131825 - DNA, 120 bp, Artificial Sequence
  ENSG00000102780_142 (sequence is synthesized)
gatgtgcgttgatgtttccttgattattttgaatgaggagtaggcggtaatatttaacaggtagcatacgtatctaagcatatagtaaatattactagtacttgtgtgccatgaggcact

SEQ ID NO: 131826 - DNA, 120 bp, Artificial Sequence
  ENSG00000102780_143 (sequence is synthesized)
aatacataggtgaaacaaaaatatttttagttctaaaaaattctctagatatttatggatggttaggcaatagggttccttcatgagaaggaaaaaactgtatctttattgtcagtaagt

SEQ ID NO: 131827 - DNA, 120 bp, Artificial Sequence
  ENSG00000102780_144 (sequence is synthesized)
gtggaaaaaaacccgacttgtatgtgtattcacagtttgataggcatattttgaagtcattgttttccatcagtattaagtatcatccatttctatgttctctagcaaaagaaaattctt

SEQ ID NO: 131828 - DNA, 120 bp, Artificial Sequence
  ENSG00000102780_145 (sequence is synthesized)
agtgtgatacagctttactctttgtttgactttgtacaaggtccacaaaaggaggaggctcaaaagattggacactttaccctgacattcagcacattcattttatctttcgataaagat

SEQ ID NO: 131829 - DNA, 120 bp, Artificial Sequence
  ENSG00000102780_146 (sequence is synthesized)
aaccagaaatcatttgcctcttgtttattatcatgttgaaaacacaacagtatagttccttttgtcccttacattggaaaaggtattttaaatttagccttgccgtattatttatagtta

SEQ ID NO: 131830 - DNA, 120 bp, Artificial Sequence
  ENSG00000102780_147 (sequence is synthesized)
ggaatttactacattttggtagtctgttttgaaactaagcacttgtgtctgaaagatgcagataatatctatctatttattacacagtgggctctgtttgctgcagaaaagagtgaaact

SEQ ID NO: 131831 - DNA, 120 bp, Artificial Sequence
  ENSG00000102780_148 (sequence is synthesized)
tttaactgcttagcacacttgccagtgaaatatacctgacagagcagaggttataactttggctctaattacttttagtaatggtaagacaacgtgagttttgtttgtttacatgctgtt

SEQ ID NO: 131832 - DNA, 120 bp, Artificial Sequence
  ENSG00000102780_149 (sequence is synthesized)
tacaatggcataattttaaaaatatatacaattgagatatttattgcctactattttaaagatgttttatgtgttttcacctttggaatatattgttacatttccttgtacagataattt

SEQ ID NO: 131833 - DNA, 120 bp, Artificial Sequence
  ENSG00000102780_150 (sequence is synthesized)
tggtggctttgttaatgtagctagtaatttttatgactactaagtgaccagttttcggtgccttttattgtgggatgcatgattatgtatttattgtacggaagtcactgacgtgtgtat

SEQ ID NO: 131834 - DNA, 120 bp, Artificial Sequence
  ENSG00000102780_151 (sequence is synthesized)
ttttgtactttgctgaaagtaatggttgatcctgatgtacatgatgatgaaagacatctttcccaaagggcactgccttgagatcatccttctcaaataaaaagaatgcatttgaagaaa

SEQ ID NO: 131835 - DNA, 120 bp, Artificial Sequence
  ENSG00000102780_152 (sequence is synthesized)
agggaccccagaaactgatccgcaaagtgtctacctcggggcagatccggaccaagggtttcatcatgttggccaggctggtcacttctgagctcaagtgatccgcccacctgggcctcc

SEQ ID NO: 131836 - DNA, 120 bp, Artificial Sequence
  ENSG00000102780_153 (sequence is synthesized)
cgcccagccgaaaacaatacaattgtgaagcagttctacaccatgttcgtagcagcgttattcataggagccaaaaagtggaagcaacccaactgttcactgatggatgaatggataaac

SEQ ID NO: 131837 - DNA, 120 bp, Artificial Sequence
  ENSG00000102780_154 (sequence is synthesized)
attctgacaggtcactgtgaggtgaaaggtcgcattttcaggtgtcagggaatctttactgcaatttgctgacattattgaacaccaccacatttagcatattttcacataacaaaaaac

SEQ ID NO: 131838 - DNA, 120 bp, Artificial Sequence
  ENSG00000102780_155 (sequence is synthesized)
actacatgtatgtacttaacattttatagggtcgatcttccttattcatggtttcagtatttgctaatttacctactcactaacatttatttgtgactccaaaatcaatacttgtatgta

SEQ ID NO: 131839 - DNA, 120 bp, Artificial Sequence
  ENSG00000102780_156 (sequence is synthesized)
atttttcacatgtgaaaaattggagttgcccaatgtgcacattcgcagctaaggttgaacctggctgtgctctgtcttcttgttttagctctcatgcaataaacaagcaccctttcatga

SEQ ID NO: 131840 - DNA, 120 bp, Artificial Sequence
  ENSG00000102781_0 (sequence is synthesized)
agtcccaagctccgccccagagcggactcacagcccccgcgctccctcccgcgctgcgcccaccgcgcggccgcggctgccatggcaacactacgccgccgccgccttttcacgcacgtc

SEQ ID NO: 131841 - DNA, 120 bp, Artificial Sequence
  ENSG00000102781_1 (sequence is synthesized)
gcgagctaacggactcggcggcggcggcggcggcggcctgcgccccacccgcaccccatctggaccgcatcgctgaatgtgcccggacctgcgccttctgggtctctgaaagaagatgaa

SEQ ID NO: 131842 - DNA, 120 bp, Artificial Sequence
  ENSG00000102781_2 (sequence is synthesized)
tttggctgagatttgtgataatgcaaagaaaggaagagaatatgcccttcttggaaattacgactcatcaatggtatattaccagggggtgatgcagcagattcagagacattgccagtc

SEQ ID NO: 131843 - DNA, 120 bp, Artificial Sequence
  ENSG00000102781_3 (sequence is synthesized)
agtcagagatccagctatcaaaggcaaatggcaacaggttcggcaggaattattggaggaatatgaacaagttaaaagtattgtcagcactttagaaagttttaaaattgacaagcctcc

SEQ ID NO: 131844 - DNA, 120 bp, Artificial Sequence
  ENSG00000102781_4 (sequence is synthesized)
agatttccctgtgtcctgtcaagatgaaccatttagagatcctgctgtttggccaccccctgttcctgcagaacacagagctccacctcagatcaggcgtcccaatcgagaagtaagacc

SEQ ID NO: 131845 - DNA, 120 bp, Artificial Sequence
  ENSG00000102781_5 (sequence is synthesized)
tctgaggaaagaaatggcaggagtaggagcccggggacctgtaggccgagcacatcctatatcaaagagtgaaaagccttctacaagtagggacaaggactatagagcaagagggagaga

SEQ ID NO: 131846 - DNA, 120 bp, Artificial Sequence
  ENSG00000102781_6 (sequence is synthesized)
tgacaagggaaggaagaatatgcaagatggtgcaagtgatggtgaaatgccaaaatttgatggtgctggttatgataaggatctggtggaagcccttgaaagagacattgtatccaggaa

SEQ ID NO: 131847 - DNA, 120 bp, Artificial Sequence
  ENSG00000102781_7 (sequence is synthesized)
tcctagcattcattgggatgacatagcagatctggaagaagctaagaagttgctaagggaagctgttgttcttccaatgtggatgcctgactttttcaaagggattagaaggccatggaa

SEQ ID NO: 131848 - DNA, 120 bp, Artificial Sequence
  ENSG00000102781_8 (sequence is synthesized)
gggtgtactgatggttggacccccaggcactggtaaaactatgctagctaaagctgttgccactgaatgtggtacaacattcttcaacgtttcgtcttctacactgacatctaaatacag

SEQ ID NO: 131849 - DNA, 120 bp, Artificial Sequence
  ENSG00000102781_9 (sequence is synthesized)
aggtgaatctgagaagttagttcgtctgttgtttgagatggctagattttatgcccctaccacgatcttcattgatgagatagattctatctgcagtcgaagaggaacctctgatgaaca

SEQ ID NO: 131850 - DNA, 120 bp, Artificial Sequence
  ENSG00000102781_10 (sequence is synthesized)
tgaggcaagtcgcagggtcaagtctgaactgctcattcagatggatggagttggaggagctttagaaaatgatgatccttccaaaatggttatggtattggctgctactaatttcccgtg

SEQ ID NO: 131851 - DNA, 120 bp, Artificial Sequence
  ENSG00000102781_11 (sequence is synthesized)
ggacattgatgaagctttgcgaagaaggttagaaaaaaggatatatatacctctcccaacagcaaaaggaagagctgagcttctgaagatcaaccttcgtgaggtcgaattagatcctga

SEQ ID NO: 131852 - DNA, 120 bp, Artificial Sequence
  ENSG00000102781_12 (sequence is synthesized)
tattcaactggaagatatagccgagaagattgagggctattctggtgctgacatcactaatgtttgcagggatgcctctttaatggcaatgagacggcgtatcaatggcttaagtccaga

SEQ ID NO: 131853 - DNA, 120 bp, Artificial Sequence
  ENSG00000102781_13 (sequence is synthesized)
agaaatccgtgcactttctaaagaggaacttcagatgcctgttaccaaaggagactttgaattggccctaaagaaaattgctaagtctgtctctgctgcagacttggagaagtatgaaaa

SEQ ID NO: 131854 - DNA, 120 bp, Artificial Sequence
  ENSG00000102781_14 (sequence is synthesized)
atggatggttgaatttggatctgcttgaatttctgtcagctctttaatttctggtatttttgttgataaaatacgaagaaattcctgcaatttttaaaaaacaagtttggaatttttttc

SEQ ID NO: 131855 - DNA, 120 bp, Artificial Sequence
  ENSG00000102781_15 (sequence is synthesized)
agtggagtggttttcgcttaaaggaaaaaaaaatctaaaactgcgaagaatactaaatgtagttgagaaataattgatggcgagagtttgctagtctccctccccggctttgtgctggta

SEQ ID NO: 131856 - DNA, 120 bp, Artificial Sequence
  ENSG00000102781_16 (sequence is synthesized)
ttccacgtattcctgcattaatattgcacacccaaaccagtctatcagggaggctgaagcaagggcgcagtgtgatattttaggaatacagaagatttagaaatacccctatttctcatt

SEQ ID NO: 131857 - DNA, 120 bp, Artificial Sequence
  ENSG00000102781_17 (sequence is synthesized)
tgcagtttttttttccaattctgtgctctgtcaacatgagggacctatctatgtatgttgacttttaacatcaaaattggatttgtgtcaaacattcattgttaagagaagaatgacagt

SEQ ID NO: 131858 - DNA, 120 bp, Artificial Sequence
  ENSG00000102781_18 (sequence is synthesized)
atattttggaggaaataatgaatttactaattaaacctttagaatttatgacttactgttagagtctgtcatatggttagaatttttacttccgctacccctgccatttcttctgctagc

SEQ ID NO: 131859 - DNA, 120 bp, Artificial Sequence
  ENSG00000102781_19 (sequence is synthesized)
tacttcataatatcttgagctttactgaggaatattctcacgctctgtggtatttgaatcattttgccaggtcatttctctgtctttagtattttttgctggtgcttcttacatttaata

SEQ ID NO: 131860 - DNA, 120 bp, Artificial Sequence
  ENSG00000102781_20 (sequence is synthesized)
tggaaaggtgggaagaatattactgcattagatgtaattcttcattctagacttccaagtttgttttcacttttttgtgtgtgcgtgaaggagtctgtgtcacccaggctgtgtagtgca

SEQ ID NO: 131861 - DNA, 120 bp, Artificial Sequence
  ENSG00000102781_21 (sequence is synthesized)
ttctttcaacatgttcaaccagatatatagccattatttttctcagctccagcattgtttgatttttcttgagtttgattttagtatttgagataaatacttttacattctaaacaagtc

SEQ ID NO: 131862 - DNA, 120 bp, Artificial Sequence
  ENSG00000102781_22 (sequence is synthesized)
cactctctgtggctaacgcaaaacaaatgaaatctttattgttttccaaacagctagtttaacaaaacagcatcatacatagtgaatgatgttcattggaaaattctaaaatttgtcctt

SEQ ID NO: 131863 - DNA, 120 bp, Artificial Sequence
  ENSG00000102781_23 (sequence is synthesized)
gtctaggttgagaacttttacacacactaagataaagatagaaatctgacatgctcactcaattcagcaggaattacacattagaaagaagccagaaaaataaatggcatatatccaatc

SEQ ID NO: 131864 - DNA, 120 bp, Artificial Sequence
  ENSG00000102781_24 (sequence is synthesized)
acaagtaaatgatcctggcgttagtttttatgattacatgtgtctcattaggcaatttatgctttaatggtcaagcttttaaaaatttgtatttgataacatcctgaattctcagtttcg

SEQ ID NO: 131865 - DNA, 120 bp, Artificial Sequence
  ENSG00000102781_25 (sequence is synthesized)
aatagtgcctactggtttaaaactaaaaataatacagctttttggacatttaaccaagatactaagaaggttttttttaaaaaaagagatttgattatttttccctgctaaaaactgtaa

SEQ ID NO: 131866 - DNA, 120 bp, Artificial Sequence
  ENSG00000102781_26 (sequence is synthesized)
atgccttatgttcttttcagataacttaagtctgacctaaactccagtattcatctgatgctgtaaattgcccttctttctgagacacagattataagatgccagatcataagacatcat

SEQ ID NO: 131867 - DNA, 120 bp, Artificial Sequence
  ENSG00000102781_27 (sequence is synthesized)
gattttattgtaattgaattcttcctaaaaattgagaggtttccttttattaacttttaaaataaagaaataagtagtttcattacgattattttgcaaactattgccagtcagaaatgc

SEQ ID NO: 131868 - DNA, 120 bp, Artificial Sequence
  ENSG00000102781_28 (sequence is synthesized)
actttttttttccctgaagttttaggagccgtcactaaaacattagtcttgtgattgttaaaacttgtttgtaatgggttggtgcaaaagtaattgtggtttttccattactttcaatgg

SEQ ID NO: 131869 - DNA, 120 bp, Artificial Sequence
  ENSG00000102781_29 (sequence is synthesized)
caaaaaccgcaattacttttgcaccagcctaacaatagttgattagttagaccttttctgggttttgtattgattatcttggtgtgcatttaattatttttctgaattcttcatggataa

SEQ ID NO: 131870 - DNA, 120 bp, Artificial Sequence
  ENSG00000102781_30 (sequence is synthesized)
tcctgggagcctaactttactatgttaagtgagtcaggtgtgctttttatttcccttgtttctcattttgccctgtcagtggatggtagatgctttgtatatcttaaatcccttaaagga

SEQ ID NO: 131871 - DNA, 72 bp, Artificial Sequence
  ENSG00000102781_31 (sequence is synthesized)
ggatggtagatgctttgtatatcttaaatcccttaaaggatcttaaagacatccctcaggtgttctatttaa

SEQ ID NO: 131872 - DNA, 65 bp, Artificial Sequence
  ENSG00000102781_32 (sequence is synthesized)
cgaactcctgacctcagaacctggccctaacttttaatatacaacacacacacacacacacacac

SEQ ID NO: 131873 - DNA, 120 bp, Artificial Sequence
  ENSG00000102781_33 (sequence is synthesized)
acacacacacacacacacacacactatttcagaagacagtgtgttgccttacccagaatgagtgctaggattacaggcgtgagacagacacacatacacacacatacacacacacagagt

SEQ ID NO: 131874 - DNA, 120 bp, Artificial Sequence
  ENSG00000102781_34 (sequence is synthesized)
agtgctaggattacaggcgtgagacagacacacatacacacacatacacacacacagagtctttattgcagaagacagtgtgttgccttataggcgtgagacacacacacacacacacac

SEQ ID NO: 131875 - DNA, 86 bp, Artificial Sequence
  ENSG00000102781_35 (sequence is synthesized)
gtgcttacttttaatgtacatcacacacacactcacactcacatacacacacacacacacactctgactgtctttattgcagaaga

SEQ ID NO: 131876 - DNA, 120 bp, Artificial Sequence
  ENSG00000102781_36 (sequence is synthesized)
acacacacacacacactctgactgtctttattgcagaagacagtgtgttgccttacccagaatgagattgaattgttttgcttcgttttgttttgttattcagtgttgcggtagcagatg

SEQ ID NO: 131877 - DNA, 120 bp, Artificial Sequence
  ENSG00000102781_37 (sequence is synthesized)
cattatcaaaggaaaaatatttggctcctttaattcctctgaaaacatgagtattttgagttctgcagcacaatgactgtaggactaagctaagtctgctttgcagatatctgatcagat

SEQ ID NO: 131878 - DNA, 120 bp, Artificial Sequence
  ENSG00000102781_38 (sequence is synthesized)
agtcccttcattctgtagacgtgtattggttggtccaagacacagtgagtaggagctctgtggaccaagacaaagctggactagagagtacagttcaaacttggcagtttctctaacgac

SEQ ID NO: 131879 - DNA, 120 bp, Artificial Sequence
  ENSG00000102781_39 (sequence is synthesized)
tctgtatagcttctggcttctactactgaaacaagagtttagatcactgatggagaggcatagtaatctgtttgtgctttggaaaaatatataaaagtttttttcccctattttttgcac

SEQ ID NO: 131880 - DNA, 120 bp, Artificial Sequence
  ENSG00000102781_40 (sequence is synthesized)
tttaaatctgttttgaaattagaactgatatacatttatttgaataatgtgtaactattatggatctattttaatgaacaatttttaccatttcccaagctgcctgtttattataagcat

SEQ ID NO: 131881 - DNA, 120 bp, Artificial Sequence
  ENSG00000102781_41 (sequence is synthesized)
gacatgtttactataaaccttttgcccccataatttctttttttaaaggaaattaatattagtaaaataaacacctctttaatggaagctgcaaccttctagtgatccaagtagacaata

SEQ ID NO: 131882 - DNA, 120 bp, Artificial Sequence
  ENSG00000102781_42 (sequence is synthesized)
gatggtggcatcacagactttatctacacactttcgggtctgaccactacctcccacaatacctagccattttggaaggggaaaacatgcggtggtctagctgtatagctcagggcttaa

SEQ ID NO: 131883 - DNA, 120 bp, Artificial Sequence
  ENSG00000102781_43 (sequence is synthesized)
tttcagcttctgagattgtgatgtcatatttcactctcaaaacataggctgaaagcacgaattactcaaaaagtaagcaaaccaatacctggtgaatctatggacagtcatacacataca

SEQ ID NO: 131884 - DNA, 120 bp, Artificial Sequence
  ENSG00000102781_44 (sequence is synthesized)
tcaggggaaaatgtgtgtgtacaacccaaatttacagtatgattgtcattctttgactttgttttgtatagcctgactctgttgaacatgaaattattagtactctaggttttggacagc

SEQ ID NO: 131885 - DNA, 120 bp, Artificial Sequence
  ENSG00000102781_45 (sequence is synthesized)
ttgagttcatttgaattccttccttaggaataagtttttatatacactgctaaatgtgtgatgagaatcataaaacactaaccagctgaggtagctgtgattcactttccccccacccta

SEQ ID NO: 131886 - DNA, 120 bp, Artificial Sequence
  ENSG00000102781_46 (sequence is synthesized)
acttgagataaaatgaaggactaggcaagtatttcatgttgtgtgagtggacttcggttccttcagtattgtctaggttattgagtctttctttgcctaatagtggattcccactcttaa

SEQ ID NO: 131887 - DNA, 120 bp, Artificial Sequence
  ENSG00000102781_47 (sequence is synthesized)
gataacttttattagtgataaatcagtttagggtatattctgtatgacaggcataaaatgttaagggtgaatgctggccttttccaagaaaaggccaccttaacttgtatgaggaaaaaa

SEQ ID NO: 131888 - DNA, 120 bp, Artificial Sequence
  ENSG00000102781_48 (sequence is synthesized)
tcctaactattctcttttttgtatctttttttccgtaactgttttgattgtatattttaaagaaaccacttaatttgtgatgcacgtaatatttgtgtgaacctgagaatatgtcacaat

SEQ ID NO: 131889 - DNA, 120 bp, Artificial Sequence
  ENSG00000102781_49 (sequence is synthesized)
aggaaaaagcagaaattatacttaggggacatgttaggggggtaaaaatatttaagcctcgaatgttttactgtcatctccactaactatttttacagaaaaagctaaaaactctgttgt

SEQ ID NO: 131890 - DNA, 120 bp, Artificial Sequence
  ENSG00000102781_50 (sequence is synthesized)
aaactctgttgtaattattgtaagtttacttatttatacttttaaattaggcttttcatacttaaatttttttgacatttgcttttaatatttgtttcttaatgtggaaattgtgtattt

SEQ ID NO: 131891 - DNA, 120 bp, Artificial Sequence
  ENSG00000102781_51 (sequence is synthesized)
tattaggataatagatatatttttaaacattcacctcattaacaaatagatctttgaatttttattaggttttttggctccagacaactgtttagctttaatgatatttctaaattccca

SEQ ID NO: 131892 - DNA, 120 bp, Artificial Sequence
  ENSG00000102781_52 (sequence is synthesized)
gtgacttattaataaaaacaggaaaaatatttaggtaatgtcataaaatttattttacctttctcattttctgagaaaataaatgaaaaaaaccctagatattgctttattaccaacagt

SEQ ID NO: 131893 - DNA, 120 bp, Artificial Sequence
  ENSG00000102781_53 (sequence is synthesized)
gtgtaggtttttgtacatatggaaatttgacacaaaaaaatagggaatttgtatagagaagtttccctcttataaaaggactcccatttgattgttcgaaactataaaatgcacttttac

SEQ ID NO: 131894 - DNA, 120 bp, Artificial Sequence
  ENSG00000102781_54 (sequence is synthesized)
tttaccatatctgaaatgacaaaatatcgccctttggaaaacctgactctttgcacgtgtaattcccagagtctacctcagttaaccaggcttagttttaggcaggaatgaattgaatta

SEQ ID NO: 131895 - DNA, 120 bp, Artificial Sequence
  ENSG00000102781_55 (sequence is synthesized)
aattcagttcatcatctatgcagatttgtttcttttaagcacatccttccctcctgctgttgccctcctcccattaacttttctttttaatcttgaaattgtttaaaatattccatcttt

SEQ ID NO: 131896 - DNA, 120 bp, Artificial Sequence
  ENSG00000102781_56 (sequence is synthesized)
ctttctctagcaaagtgtttgtattccaaataaggcctctgtgaaatgtctgaattacttttcccgtctttgttatggtcagcttcattatttggatgtattgcattcaaagcagcagtt

SEQ ID NO: 131897 - DNA, 120 bp, Artificial Sequence
  ENSG00000102781_57 (sequence is synthesized)
ccaaacataacacacatctattttcttagagttttgtaaatacaaactaacctgatgacattaaaaattgtggatcctacatgttcctatgttcattctctaaaaacctgagtaacttta

SEQ ID NO: 131898 - DNA, 120 bp, Artificial Sequence
  ENSG00000102781_58 (sequence is synthesized)
tgaaaacacacaaacctggaaaaacatcacatttttgtcacatttttactgacaaatgtatattcatatgatggtacggcagcagggagtggcccccagttaacatggctgtgagtggac

SEQ ID NO: 131899 - DNA, 120 bp, Artificial Sequence
  ENSG00000102781_59 (sequence is synthesized)
acagtgtctcgcaggatcactgcatgttatgatggcttgtaagtgcgttgttaagacttttgtttcagtgtttgtctcccagtatttgaacctaatttaaagaaaaagacgtttccaagt

SEQ ID NO: 131900 - DNA, 120 bp, Artificial Sequence
  ENSG00000102781_60 (sequence is synthesized)
tgtatttattaaatgtgtttttccttaccttttgtgctgctactttgctaatctcattagcttagctgtgtttgtgcataggttatatttggtaataaatttatagagtgttggttgtca

SEQ ID NO: 131901 - DNA, 120 bp, Artificial Sequence
  ENSG00000102781_61 (sequence is synthesized)
ttttttttttttttcaatttttagttactgcaacagaggcacataggaatttaaatgattccatgagtcatgcagtgaattggtaataatactaatggacacacagttattgactcttct

SEQ ID NO: 131902 - DNA, 120 bp, Artificial Sequence
  ENSG00000102781_62 (sequence is synthesized)
cattggcctcatttttcccccaaatgttaatatgtcatttctcagcaaaattatttgtaaagtaaaacatctaacaacaccaccaaaatcttgtaacagcaaaaggaagagctgagcttc

SEQ ID NO: 131903 - DNA, 120 bp, Artificial Sequence
  ENSG00000102781_63 (sequence is synthesized)
aaactttgagcggaccgggacagaaaaaaaaatctctctttgtcttgagggggctgttgagtggtcgcggacctgggctctgtgcgttgggaaagggaagtggaggtgagcctcgggctt

SEQ ID NO: 131904 - DNA, 120 bp, Artificial Sequence
  ENSG00000102781_64 (sequence is synthesized)
cccgccctgtagctgggcccgccccagttgcagcgctcagccccaccccggctgggccaccgccctgcacagtctcagggatgagcagccgcccaagctgcagggcctcgggtcttcggc

SEQ ID NO: 131905 - DNA, 120 bp, Artificial Sequence
  ENSG00000102786_0 (sequence is synthesized)
gcttcagtagcgagaggggctgagaaagtggtgacaccgccggggtgcggagggagtccctgaaacttctcccaacagccccagggccaatcttccctcagcccactcccctcttcgcca

SEQ ID NO: 131906 - DNA, 120 bp, Artificial Sequence
  ENSG00000102786_1 (sequence is synthesized)
gctcccaggtccccactcctgtaccgggggtggggtggggagccaggcccgtctcccgctgggacacacacaggggccgggagcggggacgggacccccgaggcgggggggacgaaccga

SEQ ID NO: 131907 - DNA, 120 bp, Artificial Sequence
  ENSG00000102786_2 (sequence is synthesized)
cagacagacggctgggcgcccgccccagcgggcaggcaggcaggaggaggcggaggcgggggtacgacggggagcactgggtctggggagtttcctctcaactatcgggggagaaactcc

SEQ ID NO: 131908 - DNA, 120 bp, Artificial Sequence
  ENSG00000102786_3 (sequence is synthesized)
ccgcagccggaggaaagacccagacagtgttttcctcccgggggccgtgctcccccgccccgcgtagcggcggtcgccgccaccggcgcctccacctctaccatctcctctttctccacc

SEQ ID NO: 131909 - DNA, 120 bp, Artificial Sequence
  ENSG00000102786_4 (sequence is synthesized)
acctcgggccccggtgtccccggccagcactatgcccatcttactgttcctgatagacacgtctgcctctatgaaccagcgcagccatctgggcaccacctacctggacacggccaaagg

SEQ ID NO: 131910 - DNA, 120 bp, Artificial Sequence
  ENSG00000102786_5 (sequence is synthesized)
cgcggtagagaccttcatgaagctccgtgcccgggaccctgccagcagaggagacaggtatatgctggtcactttcgaagagccgccctatgctatcaaggctggatggaaagaaaacca

SEQ ID NO: 131911 - DNA, 120 bp, Artificial Sequence
  ENSG00000102786_6 (sequence is synthesized)
tgcaacgtttatgaatgaattgaaaaaccttcaggctgaaggacttacgactcttggccaatccctaaggacagcttttgatttattaaatttaaatagattagtaactggcatagacaa

SEQ ID NO: 131912 - DNA, 120 bp, Artificial Sequence
  ENSG00000102786_7 (sequence is synthesized)
ctatgggcagggaagaaacccttttttcttggagccagcaataattatcacaattactgatgggagcaagttgactaccaccagtggagtccaggatgagcttcatttacctcttaattc

SEQ ID NO: 131913 - DNA, 120 bp, Artificial Sequence
  ENSG00000102786_8 (sequence is synthesized)
tcctttgcctggaagtgaattgaccaaggaaccttttcgttgggatcagagactctttgcattagtgttgcggttgcctggcaccatgtcagtagaatcagaacagttgacaggtgtgcc

SEQ ID NO: 131914 - DNA, 120 bp, Artificial Sequence
  ENSG00000102786_9 (sequence is synthesized)
tttagatgactctgcaatcacaccaatgtgtgaagtgacaggcggccgttcatattctgtgtgttctccaagaatgcttaatcagtgtctggagtccttggtgcagaaagtacaaagtgg

SEQ ID NO: 131915 - DNA, 120 bp, Artificial Sequence
  ENSG00000102786_10 (sequence is synthesized)
ggtggtaataaactttgaaaaagcaggaccagatccttcccctgtagaagatgggcagccagatatatcaaggccttttggatctcagccttggcatagctgtcacaaactcatatatgt

SEQ ID NO: 131916 - DNA, 120 bp, Artificial Sequence
  ENSG00000102786_11 (sequence is synthesized)
cagaccaaatcctaaaactggggttcctataggtcattggcctgttccagagtctttttggccagatcaaaattcgccaacactaccacctcgtacatctcatcctgtagtgaagttttc

SEQ ID NO: 131917 - DNA, 120 bp, Artificial Sequence
  ENSG00000102786_12 (sequence is synthesized)
ctgtacagactgtgaaccaatggttattgataaacttccttttgacaaatatgagttggaaccttcaccactgactcaatttatcctggaaaggaaatctcctcaaacatgttggcaggt

SEQ ID NO: 131918 - DNA, 120 bp, Artificial Sequence
  ENSG00000102786_13 (sequence is synthesized)
gtacgtgagcaatagtgcaaaatacagtgaacttggtcatccttttggttacttgaaagccagtacagcactgaactgtgtcaacttatttgtgatgccttacaattatccagtccttct

SEQ ID NO: 131919 - DNA, 120 bp, Artificial Sequence
  ENSG00000102786_14 (sequence is synthesized)
tcccctcttagatgacttgtttaaagtgcataaagcaaaaccaacattgaagtggagacagtcatttgaaagttatttgaagacaatgcctccctactatcttgggcccttgaagaaagc

SEQ ID NO: 131920 - DNA, 120 bp, Artificial Sequence
  ENSG00000102786_15 (sequence is synthesized)
tgttaggatgatgggagcacctaacctaatagcagacagtatggaatatggacttagttacagtgtcatttcatacctcaaaaaactgagtcaacaggccaaaatagaatctgatcgagt

SEQ ID NO: 131921 - DNA, 120 bp, Artificial Sequence
  ENSG00000102786_16 (sequence is synthesized)
cattggatctgtaggcaaaaaagtagtacaggagactggaataaaagtccggagccgatcacatggtttatcaatggcatataggaaagattttcaacaactcctccagggaatttcaga

SEQ ID NO: 131922 - DNA, 120 bp, Artificial Sequence
  ENSG00000102786_17 (sequence is synthesized)
ggatgtccctcacagactgctagaccttaatatgaaggaatacactgggttccaagttgctttgctgaataaggatttgaagccacagacatttagaaatgcttatgacataccaagacg

SEQ ID NO: 131923 - DNA, 120 bp, Artificial Sequence
  ENSG00000102786_18 (sequence is synthesized)
aaatcttttggatcacttaacaagaatgagatctaatcttttgaagagcactcgcagatttctgaaaggacaggacgaagatcaagtgcacagtgttcctatagcacaaatggggaacta

SEQ ID NO: 131924 - DNA, 120 bp, Artificial Sequence
  ENSG00000102786_19 (sequence is synthesized)
ccaggaatacctcaagcaagtaccttctccactaagagaacttgatcctgatcagccacgaaggttgcatacatttggcaacccctttaagctggataagaagggtatgatgatagatga

SEQ ID NO: 131925 - DNA, 120 bp, Artificial Sequence
  ENSG00000102786_20 (sequence is synthesized)
agcagatgaatttgtggctggacctcaaaataaacataaacgacccggagaaccaaatatgcaagggatccctaaaagacgtcggtgtatgtctccactactaagaggcagacagcagaa

SEQ ID NO: 131926 - DNA, 120 bp, Artificial Sequence
  ENSG00000102786_21 (sequence is synthesized)
tcctgttgtaaacaatcatattgggggaaaaggaccacctgcacctacaactcaagcacagccagatcttattaaacctcttcctcttcataaaatttcagaaaccactaatgattcgat

SEQ ID NO: 131927 - DNA, 120 bp, Artificial Sequence
  ENSG00000102786_22 (sequence is synthesized)
aatacatgatgtggttgaaaatcatgttgcagaccaactttcatcagacattacaccaaatgctatggatacggaattttcagcatcttctccagccagtttactggaacggccaaccaa

SEQ ID NO: 131928 - DNA, 120 bp, Artificial Sequence
  ENSG00000102786_23 (sequence is synthesized)
tcatatggaggctcttggtcatgaccatttaggaaccaatgacctcactgttggtggatttttagaaaatcatgaggagccaagagataaagaacaatgtgctgaagagaacataccagc

SEQ ID NO: 131929 - DNA, 120 bp, Artificial Sequence
  ENSG00000102786_24 (sequence is synthesized)
atcttcactcaacaaaggaaagaaattgatgcattgcagaagccatgaagaggtcaatactgaactaaaagcacaaataatgaaagagatccgaaagccaggaagaaaatatgaaagaat

SEQ ID NO: 131930 - DNA, 120 bp, Artificial Sequence
  ENSG00000102786_25 (sequence is synthesized)
cttcactttactgaagcatgtgcaaggcagtttacaaacaagactaatatttttacaaaatgtcattaaagaagcatcaaggtttaaaaaacgaatgctaatagaacaactggagaactt

SEQ ID NO: 131931 - DNA, 120 bp, Artificial Sequence
  ENSG00000102786_26 (sequence is synthesized)
cttggatgaaattcatcgaagagccaatcagatcaaccatattaatagcaattaaaagaaaatagaatgtggccacttatttcactatcttcttcaaatacaaagtaaatacaagactgt

SEQ ID NO: 131932 - DNA, 120 bp, Artificial Sequence
  ENSG00000102786_27 (sequence is synthesized)
tgtgatcttgcattcattttctgacatgcattgttggctatttgaaatactaaaagcaaatctacagatcctttttccatcattttacagtgaccttttcttcattttggtttatttttg

SEQ ID NO: 131933 - DNA, 120 bp, Artificial Sequence
  ENSG00000102786_28 (sequence is synthesized)
taatgtgaaaagtatcactctaaaaaacatttttaatttaacaaactaaaaatattcctccaaatctcttgcttgtcattgactcttgcgtgtcaatttccctcaggttctattttctta

SEQ ID NO: 131934 - DNA, 120 bp, Artificial Sequence
  ENSG00000102786_29 (sequence is synthesized)
aaccaacctttaaaattgtcacctctgttaaggttgaactttgccaaaaaaaaaagaagttactttgtaatttttggggaaaaaagcacatacattaaaactaggtaatgttttgtatat

SEQ ID NO: 131935 - DNA, 120 bp, Artificial Sequence
  ENSG00000102786_30 (sequence is synthesized)
gtacaaatgtattttgaagaatatttaagaaaagcacttttgttattccatcaataaatgctctattttactcttgtgtggtttaggaaataatcacatttaaagtaatcatttaaaaac

SEQ ID NO: 131936 - DNA, 120 bp, Artificial Sequence
  ENSG00000102786_31 (sequence is synthesized)
atcctaagataatggaattttaaaggccttgctttttagcattggaaaaatacaccacttgaagttcatgtttgttaagcctaactgtaattacatgttacataatctgcattgcctttt

SEQ ID NO: 131937 - DNA, 120 bp, Artificial Sequence
  ENSG00000102786_32 (sequence is synthesized)
tactatatgttcgtagtttttgttggccatgccaacatactcccatttctgcctagattatgggaatgactttgtatggggcagatagacagatactttaaaagctatttaaaaagcaaa

SEQ ID NO: 131938 - DNA, 120 bp, Artificial Sequence
  ENSG00000102786_33 (sequence is synthesized)
caactttggatattattggtttccttacttcaacaccttttcctttatcactaggattgtggatggcacgaagctgaagctgttagggagtggtaggtttggagtacagtacatgctctg

SEQ ID NO: 131939 - DNA, 120 bp, Artificial Sequence
  ENSG00000102786_34 (sequence is synthesized)
aaatatctagcctttagcagcttcatgccatgcttgcaaaagcccacaacaaattggaggcctccttgttctgctctgctgttctcacacttaaactctgttttatttataagctaaatg

SEQ ID NO: 131940 - DNA, 120 bp, Artificial Sequence
  ENSG00000102786_35 (sequence is synthesized)
gaaaggaaacacctttaagatgactttgctcattttgcatcccccctgagtttcacaggataaggaaaaccacgctattcattctccaccctcaattcaacatggcctagagtatccgta

SEQ ID NO: 131941 - DNA, 120 bp, Artificial Sequence
  ENSG00000102786_36 (sequence is synthesized)
ctgaggaagcaatcttatggcctgactcactcaccattcatgatcactgctgtgccttttagtggtttggggggtaagcagtagaaaagaaggtcaaaatagatttggattaagagtagg

SEQ ID NO: 131942 - DNA, 120 bp, Artificial Sequence
  ENSG00000102786_37 (sequence is synthesized)
caaaataaacttataacatttaaaaactgaagtatttttaggtttataatattgaaaatcacatacccttagctttttacactttatcagacatttttttaaatttcaagggtatagcaa

SEQ ID NO: 131943 - DNA, 120 bp, Artificial Sequence
  ENSG00000102786_38 (sequence is synthesized)
aatgaaattataactttatgaagaaaagcattgatgaaagtggagaacatgcatttagtctaggggatttgaaactctcccaatactgaagacaaaccctgtcaagaaaaagaagaattt

SEQ ID NO: 131944 - DNA, 120 bp, Artificial Sequence
  ENSG00000102786_39 (sequence is synthesized)
aatattatatagtattttcatatgcagttctttaagctttgtttacttctatacaaatacttttaagtaatgcaagataacatttaatagatggaattgttaaggtaattgcctgtagtc

SEQ ID NO: 131945 - DNA, 120 bp, Artificial Sequence
  ENSG00000102786_40 (sequence is synthesized)
acattgctaaattcattgagagttacacaaaatccagaatatattgtctgttcctaaattatatatatttagattctggaattactaggaggaattagaagtcattcagataaaaattca

SEQ ID NO: 131946 - DNA, 120 bp, Artificial Sequence
  ENSG00000102786_41 (sequence is synthesized)
tacttaacaagagtatctaggaaagagattcagcccatcccaatattgagcagctttccttatcagaaagttttattttctgtttcacagattgctcatgacctttaatacatttttctg

SEQ ID NO: 131947 - DNA, 120 bp, Artificial Sequence
  ENSG00000102786_42 (sequence is synthesized)
aatgaaccctggagggaggtgagaagtagcagttttgttcatctcttctttttgtcctttatctctctgccactgttctcacctcatcctaaaacctggtcaggagggtttgaaacctat

SEQ ID NO: 131948 - DNA, 120 bp, Artificial Sequence
  ENSG00000102786_43 (sequence is synthesized)
cagaactaaaggttaatatctcatctccctcaggcttttttcatttaaaaaaaaaatgggtatattagttaaattagaatacttgttgtagaattattgtcaaaggggaagggaaataca

SEQ ID NO: 131949 - DNA, 120 bp, Artificial Sequence
  ENSG00000102786_44 (sequence is synthesized)
tctaggggaaacatcatgtcttttaggccctttatgtcactgaatgacttaaggctcgacaaatgatattcttggaaagtttaatcttgaggttttcaaatctttttttttaatgtctcc

SEQ ID NO: 131950 - DNA, 120 bp, Artificial Sequence
  ENSG00000102786_45 (sequence is synthesized)
catgtttctcatttgctgattgattcattagttgctcttagtaagatttgtcagttggaaataatgaaggctgagactcatttctaaactcttccataaccatcaccagaagagcagcca

SEQ ID NO: 131951 - DNA, 120 bp, Artificial Sequence
  ENSG00000102786_46 (sequence is synthesized)
ctgtgttgtgtgatgtaggctaatgcctcccagatagaggtaaagtcacaaggactattagaattccagtggattgtggaactggttttggattatccttatattttcattctgattact

SEQ ID NO: 131952 - DNA, 120 bp, Artificial Sequence
  ENSG00000102786_47 (sequence is synthesized)
gaggcagttctgaaaactcctaccattgaaatagtggtgtgtcttttccttgtttaaggattttacatcatttttatgcacttgaattccaaaatcagaatctctcttttacctatcaac

SEQ ID NO: 131953 - DNA, 120 bp, Artificial Sequence
  ENSG00000102786_48 (sequence is synthesized)
ctttattggctattggcttttggcaatgacctttctgttcaaatgtagtcctgtctctttgtttccttagggagtagaacctgtcctttttctcatctttcatttttttgacgtgtcctt

SEQ ID NO: 131954 - DNA, 120 bp, Artificial Sequence
  ENSG00000102786_49 (sequence is synthesized)
tctaagagaaggctctctgccgcctgttctgggtgataagtgatattttcatctaatcgttatgtggttgggatgatcatggtgaaatactaggaagacatactctgttgatggactttt

SEQ ID NO: 131955 - DNA, 120 bp, Artificial Sequence
  ENSG00000102786_50 (sequence is synthesized)
tctctccaaataatcccaaatagattattttctagtgaatggtttatatctttctcgtcacaaaaatgttcctttgatttctagcacaaggtacagcaggatgcaaatgattctcagata

SEQ ID NO: 131956 - DNA, 120 bp, Artificial Sequence
  ENSG00000102786_51 (sequence is synthesized)
aaatgatgttgacagtatttccttaacaatttatgtaaaactatgcataattttcattctaacttttgacatttttctccataaataaaagtaatgcctgatgtttagttaaagtagatc

SEQ ID NO: 131957 - DNA, 120 bp, Artificial Sequence
  ENSG00000102786_52 (sequence is synthesized)
cacctttgcttgattttattagtcttgttctatcctatttctttttaatacactgtttagacttgccaacaactcttaactgagaatctcttttccttcctaggctaagtaattgtgagt

SEQ ID NO: 131958 - DNA, 120 bp, Artificial Sequence
  ENSG00000102786_53 (sequence is synthesized)
gggggaggaagaacattaagagaaataatctaaagactttgttcaatattgtcgaagcctaagaatatttgtgtgtccttctgatgtactgaggctttgccggtaccacaccatctttgg

SEQ ID NO: 131959 - DNA, 120 bp, Artificial Sequence
  ENSG00000102786_54 (sequence is synthesized)
attaccataaggttatgtagtaggacttaaaagtactagggcaaacatttgatttttgagaaagatcaacagaacagtatagaaatccaggtgcattcattagaatactaggatcacaag

SEQ ID NO: 131960 - DNA, 120 bp, Artificial Sequence
  ENSG00000102786_55 (sequence is synthesized)
aggactactctggtgtactctagtgacctgaaaaaactctaaaatgataagaaagctaggggacaaagggaaaaaagggcaagatttataatttattttactttcatgatttttccaagt

SEQ ID NO: 131961 - DNA, 120 bp, Artificial Sequence
  ENSG00000102786_56 (sequence is synthesized)
gtcttcagaagtagaaacctatagcattaaaaaaaaaaatctacattaactatatatgagctgagagaatgagaaggtaaaaaacatggaggataagtttcctttgtacttacgaaatag

SEQ ID NO: 131962 - DNA, 120 bp, Artificial Sequence
  ENSG00000102786_57 (sequence is synthesized)
tcccctttcttaggatagaagatagcaactgggtagcttctgaagcaccataaaaacagctagaaagaatgcttatttttgaggggatagtggacaaatgagcccttgttgctagagaga

SEQ ID NO: 131963 - DNA, 120 bp, Artificial Sequence
  ENSG00000102786_58 (sequence is synthesized)
cactgataaattatctgaatcctgtcaaaaaatactgtaatacctgtgttaggttctctcaggaaatagatgaatggccgatctgctttaaaaataggaatccgagaccttttcaataac

SEQ ID NO: 131964 - DNA, 120 bp, Artificial Sequence
  ENSG00000102786_59 (sequence is synthesized)
aacagagctgcaggaaagaaagaaaaattccattgcattttctgtgcatttttaagaaaataactattggttatgaagtaagttaattttttaagaaatcaaagcatcctaatggcattt

SEQ ID NO: 131965 - DNA, 120 bp, Artificial Sequence
  ENSG00000102786_60 (sequence is synthesized)
gattgtttactgttgtgatgggggtgcagatgggaaaattaaagagaaaagatgccatttagccaatcctgtctcctgttttcaacacattccatggaataaattccttattgaaggtaa

SEQ ID NO: 131966 - DNA, 120 bp, Artificial Sequence
  ENSG00000102786_61 (sequence is synthesized)
agttaaatatggaggatgaggggaagatatcaagaataacggctaggtttttagaacaggttttgtagcttgggggagaagaaacaaattgtacatattgtgtctgaggaacctgtggaa

SEQ ID NO: 131967 - DNA, 120 bp, Artificial Sequence
  ENSG00000102786_62 (sequence is synthesized)
gattcaggttatgtctagtgggtagttagatacagcagagaaataggagccatctggccccaacagtagatttgtgaaccaccagggtataagcagtaactgaggccaatagagtccttt

SEQ ID NO: 131968 - DNA, 120 bp, Artificial Sequence
  ENSG00000102786_63 (sequence is synthesized)
aatgtgtttgagaaaactgttttcctcggacatgcaggcgtggactccttacttcaggtaaggtgacagcagcttgacagagagtgccttccctcccacggcatttgggacgaggctgaa

SEQ ID NO: 131969 - DNA, 120 bp, Artificial Sequence
  ENSG00000102786_64 (sequence is synthesized)
ggaaagacacaggcggggttacgggaaacccattctctgcgccatctgggcaagctgaagtcagtttttccgctttctcacgagacacgtctgcctctatgaaccagcgcagccatctgg

SEQ ID NO: 131970 - DNA, 120 bp, Artificial Sequence
  ENSG00000102786_65 (sequence is synthesized)
ggcccggaagccagatgcggggctgccaggattggtcttgtcagattcgtcctaagagggccggtgggacagctgcaggttaacttcctaagtccggctcccatctgcttccactagtac

SEQ ID NO: 131971 - DNA, 120 bp, Artificial Sequence
  ENSG00000102786_66 (sequence is synthesized)
aataaggtggcaaaatagttgatttttcattttgtggaaaaacacagtccagtccaaaaactacataacatgaaatgcaagtataaaacattccaaattaaaatagaatatgcacattgt

SEQ ID NO: 131972 - DNA, 120 bp, Artificial Sequence
  ENSG00000102786_67 (sequence is synthesized)
tcaaaggcaaaactcttaccctactatatatattttacatccctcattttttccccctctaaaatgcattggtattcaggattagaatctgaaacttttgctataaagttgacatacatt

SEQ ID NO: 131973 - DNA, 120 bp, Artificial Sequence
  ENSG00000102786_68 (sequence is synthesized)
ggttttaatcccttgaaagttcagtaaagacctaaaaggaaaagcatcctaccacaccacactcatgttgtatgtgcaactattatagtggcttagagacactagttcgtgttcttcgtt

SEQ ID NO: 131974 - DNA, 120 bp, Artificial Sequence
  ENSG00000102786_69 (sequence is synthesized)
tctatattagtaaagatgttagaggaaattaatctgtttgttgcatcagggtttaatgtgaccatgttgtataactattctgaaaggtaagaagtttttcactggagtacagtcactggc

SEQ ID NO: 131975 - DNA, 120 bp, Artificial Sequence
  ENSG00000102786_70 (sequence is synthesized)
tgagaacatttaagttttcttttgaagcatacacagttaacaactattgcaggaagaactctgaattaaatttcaggcccagagttttgatttaaactccaaacccttggaaaaaaagac

SEQ ID NO: 131976 - DNA, 120 bp, Artificial Sequence
  ENSG00000102786_71 (sequence is synthesized)
tgctggaaaatatgaaagaacccttcgtttcttaacccccacaagtccttttattgcacttactttcatgtatttgaggatgagaggagctttaaatcaacaataattcactaaggaata

SEQ ID NO: 131977 - DNA, 120 bp, Artificial Sequence
  ENSG00000102786_72 (sequence is synthesized)
atgcaaggtggtctattgtaacattttatgatattattgccctggaaataaaagatactgaacaatgtataatgttacatgtaacaaaggaatattatttccaaggagctcagttcttat

SEQ ID NO: 131978 - DNA, 120 bp, Artificial Sequence
  ENSG00000102786_73 (sequence is synthesized)
gttgtagtgaaaagcactattcctaattatatattgggtatatgttgtattttcccaagtcccacagtccctagttttgtgagtttcgtacatttcagggaaattctttctgtgactaca

SEQ ID NO: 131979 - DNA, 120 bp, Artificial Sequence
  ENSG00000102786_74 (sequence is synthesized)
acttttatttgcttcctattgaaggaaattgacttgtttctgttttaggaaattttaagcttcttagggataacttcagtgcttaagtgtctttggaaataactgaatttagttctataa

SEQ ID NO: 131980 - DNA, 120 bp, Artificial Sequence
  ENSG00000102786_75 (sequence is synthesized)
catttaaaatgtacactgaaattcagagtgagcttaccaaattgaacttccaacgtttagttaggtaaatatgtactttcttaccacattaatacttttatgtttttcccatctctgctg

SEQ ID NO: 131981 - DNA, 120 bp, Artificial Sequence
  ENSG00000102786_76 (sequence is synthesized)
cttttattttgcaacttttaataatttaggtagatttgcaatgaactttttggtttgtttctgtaaaatagtagtggatttccttctcttttatattcctttgtgatatgtagtgcaaca

SEQ ID NO: 131982 - DNA, 120 bp, Artificial Sequence
  ENSG00000102786_77 (sequence is synthesized)
cagtcttactgcttaaggttttcatccttacctctttgagttcaaagagatatttaaaacttgccattatttggttacctttatttggttgtcatgttgttagtgtatggcagaactatt

SEQ ID NO: 131983 - DNA, 120 bp, Artificial Sequence
  ENSG00000102786_78 (sequence is synthesized)
agtttcctctttttctgcatcacatttcataagtggtcaaggcatttggacatattcacctcctattacctattaaaaatacttcttaaagattgcttccttcgaaaaactgcttgtcat

SEQ ID NO: 131984 - DNA, 120 bp, Artificial Sequence
  ENSG00000102786_79 (sequence is synthesized)
ggagaggctgaggacatttgtaatttaaacctgtattttccttttcccagttgatatctgcccccagagaacactttagttcttgtctataaggcttaccaaaagtttgcgggaaaggtg

SEQ ID NO: 131985 - DNA, 120 bp, Artificial Sequence
  ENSG00000102786_80 (sequence is synthesized)
gtcctgtgctgttaccactttgaccaagagaagaacctggagattgggatgtttttgcatgtcaggatttattaattcaataacagagagggatgatgcttctcacttattctgatgaat

SEQ ID NO: 131986 - DNA, 120 bp, Artificial Sequence
  ENSG00000102786_81 (sequence is synthesized)
cagcaaagattgcaaagcataatattaatgcttatgtcttgaattggcacattaaaaatgacactagcattaaaataagccactgttttcaaatgaaaatgataatttgagtaaagagta

SEQ ID NO: 131987 - DNA, 120 bp, Artificial Sequence
  ENSG00000102786_82 (sequence is synthesized)
ttgaattggaagaaaacattcttccagaagatttttttcatcataaaactatctgatttaaacatttcatgttttctattcacaacaaggataaatgattaggaattttggatgtctcaa

SEQ ID NO: 131988 - DNA, 120 bp, Artificial Sequence
  ENSG00000102786_83 (sequence is synthesized)
atatttaatactgaatattgttcatgtgttttcttctttgtaaaagtactttgtatctgcctgtttgctgtggaatacttttattttgtaacttcaatgtctttacataagtatttcccc

SEQ ID NO: 131989 - DNA, 120 bp, Artificial Sequence
  ENSG00000102786_84 (sequence is synthesized)
tttcctgctctatactaggatctgtggtgttcacagtactaaatacttgtatgtaacgttagtagttgaaggaaatgagaaaagattaggtggaagatagaacgtatatattttatagaa

SEQ ID NO: 131990 - DNA, 120 bp, Artificial Sequence
  ENSG00000102786_85 (sequence is synthesized)
catctaaaaactttaatgttctgaattactttcttaaatgtctgggttaatatatatatttgtatatttatgtagatatccaccattctcccacatatatgcacatatatgatttttcat

SEQ ID NO: 131991 - DNA, 120 bp, Artificial Sequence
  ENSG00000102786_86 (sequence is synthesized)
aactaattacaagactattaaatctatattgcatttgttaacttagttaacatacctacagataaaacatctttgaattattagctaggatgctatcagaatttgcagggcattagtaag

SEQ ID NO: 131992 - DNA, 120 bp, Artificial Sequence
  ENSG00000102786_87 (sequence is synthesized)
gttaagtaactgagaaaaaagaatggttcttagtgaatgttttcctcaagcactttgggtatcccactaaaaaattccatgcctacagacattgttataaatatttaattttgataatca

SEQ ID NO: 131993 - DNA, 120 bp, Artificial Sequence
  ENSG00000102786_88 (sequence is synthesized)
gtaccatttactgatatttctacagtaatggagcaatgtatagcctttagtcaatcttttcctttatagcagtactttaagttgcatatcattgcagataaatttgatacataagttttt

SEQ ID NO: 131994 - DNA, 120 bp, Artificial Sequence
  ENSG00000102786_89 (sequence is synthesized)
cacgtgtgttcaacagagtttcaaataatgctgatcctttgagacctgctgaaagtctgaagcagccttaatatctaaaattaggaaatgtataaaatgtgagaggtctgattaaagttt

SEQ ID NO: 131995 - DNA, 120 bp, Artificial Sequence
  ENSG00000102786_90 (sequence is synthesized)
atgtgagaggtctgattaaagttttatatgtagatgagttaattttcttattgttacaggtcatcctgttttccatcaatatatatgtatattttttttgagacagagtttctctcttgt

SEQ ID NO: 131996 - DNA, 68 bp, Artificial Sequence
  ENSG00000102786_91 (sequence is synthesized)
cagtggcgcgatctcggctcaccgcagcctcctcctcctgggttcaagccattctcattaattttgta

SEQ ID NO: 131997 - DNA, 120 bp, Artificial Sequence
  ENSG00000102786_92 (sequence is synthesized)
ttttttttttttttttttttcagtaaattatgttagttaagattagccaatatatctttactctggcctgcaagtccgtttttgttactgacctgattccacacccctgctacctgaagt

SEQ ID NO: 131998 - DNA, 120 bp, Artificial Sequence
  ENSG00000102786_93 (sequence is synthesized)
acacccctgctacctgaagtatgttagtactgattaaattgttccaggagttagaatggcacctttcctactatgtgcccttggtgaagacaatccttgacagatatcttaaaaggagat

SEQ ID NO: 131999 - DNA, 120 bp, Artificial Sequence
  ENSG00000102786_94 (sequence is synthesized)
aaaatatgtgcttaattttttgaggattttctatggtgaatgtttacctcattgaaaaatggtggctttcgtacaatatcaaatttaatgattctcagggaaaagaattttaaccaattt

SEQ ID NO: 132000 - DNA, 120 bp, Artificial Sequence
  ENSG00000102786_95 (sequence is synthesized)
tatttttgagcataaaggtctattttgtaaacttaggagataatacagttatagttctaatactacttttttttccctttacctaaatagtacccatttaataggtagtgtgaaatacag

SEQ ID NO: 132001 - DNA, 120 bp, Artificial Sequence
  ENSG00000102786_96 (sequence is synthesized)
gcttctttttgaaggctggcaggtgaagtagtgagaactccatttccatttgggtgcttggtttctcttagattatcaacaaatgtatgaataagagtttgatatttattaagctataga

SEQ ID NO: 132002 - DNA, 120 bp, Artificial Sequence
  ENSG00000102786_97 (sequence is synthesized)
catcttttcaaatgaaagtaagttaattactatacctgaaatactgctgtgttgaatataaactggaaacacaatgatgaatagtattttgtaaattttttaattcctttaattaaaatt

SEQ ID NO: 132003 - DNA, 120 bp, Artificial Sequence
  ENSG00000102786_98 (sequence is synthesized)
tttttttaaattgtggtaagaaacacctaacaaaatttaccatcttaaccatctttaagtgtgcagttcagtagtgttaagtatattcatattgctgtgcaaccaatatccagaactttt

SEQ ID NO: 132004 - DNA, 120 bp, Artificial Sequence
  ENSG00000102786_99 (sequence is synthesized)
ttatcttgcaaaattgaaactctatatcaagtaactcccagtccctggaaacctctattctactttctgtttttatgaatttgtctactctggatatcacagttaagtgaaatcatacag

SEQ ID NO: 132005 - DNA, 120 bp, Artificial Sequence
  ENSG00000102786_100 (sequence is synthesized)
tatttgcctttttagatgggctcatttcacttagcataatgttctcaacattcatttatattttagcatgtcaggattttttcatcctttttaaggctgaataatactctattgtatgta

SEQ ID NO: 132006 - DNA, 120 bp, Artificial Sequence
  ENSG00000102786_101 (sequence is synthesized)
ccacattttgcttatccacatatccattgatagtcacttgggttgcttccacttcttggctgttgtgaataatgctgcaatgaacatggttgtgtaagtaactttttgagatcctgcttc

SEQ ID NO: 132007 - DNA, 120 bp, Artificial Sequence
  ENSG00000102786_102 (sequence is synthesized)
cagttcttttggatatataccctgaaatgaaatgacaggatcatattgtaattccattttaaattttttgaggaagtaccatactgtttttcatagcagttgtaccattttacgttccta

SEQ ID NO: 132008 - DNA, 120 bp, Artificial Sequence
  ENSG00000102786_103 (sequence is synthesized)
ccaacagtgcacgagggttacactttctttatatcttcactaacacaattttctgttttactttgacattagccatcctattgggtgtgaggtcgtatctcattgtggtttttatttaca

SEQ ID NO: 132009 - DNA, 120 bp, Artificial Sequence
  ENSG00000102786_104 (sequence is synthesized)
ttttcctaataattatttatgttaagcatcaacatacgcttgttggccatttgtacactgtctttcgagaaatgttcattcaagtcctttgcccgttttaaaattgttttttgttgttga

SEQ ID NO: 132010 - DNA, 120 bp, Artificial Sequence
  ENSG00000102786_105 (sequence is synthesized)
gctttaggatttctttatattttctggatattaatcccttatcagataaatgatttgcaaatattttctcccattatgtagtttgcttttatactctgttgtttcttcagtgcacaaaat

SEQ ID NO: 132011 - DNA, 120 bp, Artificial Sequence
  ENSG00000102786_106 (sequence is synthesized)
ttttatttttgtatggtccagttacatatttttacttttattgcctgtgcctttggtgtcatccacaaaatcattgctaaatccaatgtcactgaagcttttctcctgtgttttaagagt

SEQ ID NO: 132012 - DNA, 120 bp, Artificial Sequence
  ENSG00000102786_107 (sequence is synthesized)
tttatagctttagatcttctgtttagatctttaatctattttgaattaatttttgtatatggtataaggtaagggtccaacttcattcttttgcatgtggatatccagtttttccaccac

SEQ ID NO: 132013 - DNA, 120 bp, Artificial Sequence
  ENSG00000102786_108 (sequence is synthesized)
catgttgaagagacttgccctttcccatttgaatggtctctgcaaatccctgaacttttgagcctcaataatttttgttggtggagagggcactctcctgtcaaacttgcttaaatgttt

SEQ ID NO: 132014 - DNA, 120 bp, Artificial Sequence
  ENSG00000102786_109 (sequence is synthesized)
tttccccatctttattgtgtaaaagaagagcagtggctagaaatgtgagaattggaatcccaatcttggcctcgccattgaattattatgtaacattgagcattcacattactattttga

SEQ ID NO: 132015 - DNA, 120 bp, Artificial Sequence
  ENSG00000102786_110 (sequence is synthesized)
gcctctgctacttcttattccaagttggcaataatgaagccattgtacctttaatatagaattgttgagaggtttaaatgggatgatatatttaaaatgtaccttattaggatgtctcac

SEQ ID NO: 132016 - DNA, 120 bp, Artificial Sequence
  ENSG00000102786_111 (sequence is synthesized)
tagacaaaagcatccttttcctccaaaagattagtatgtttacctctagttttctatttttttcagctttaattttgaaattaaaattataaaaatcttcaaagctgattattacatgct

SEQ ID NO: 132017 - DNA, 120 bp, Artificial Sequence
  ENSG00000102786_112 (sequence is synthesized)
ttaaacatctattagtatcacgaagtatatgtttttctttgggctttgtattgtatcccagaaaagcaggtgtgaaagaaaattaatataacttggccaaagttgtctcagtggcattta

SEQ ID NO: 132018 - DNA, 120 bp, Artificial Sequence
  ENSG00000102786_113 (sequence is synthesized)
ataagcataggatgatgtttttaaagaagtgttaaaacaatttaaataatttagcagataagtcagaaagtcattcttttgcaagaatacttatgtgaaaaaagcacatgccttaggatt

SEQ ID NO: 132019 - DNA, 120 bp, Artificial Sequence
  ENSG00000102786_114 (sequence is synthesized)
ctttcaaatagggagctccccctagtgcgttttagatgagatttacacaagtttgatttgcagggaaccttttaggagcacatatgttgggtaaatcaagggatagtttaataagattta

SEQ ID NO: 132020 - DNA, 120 bp, Artificial Sequence
  ENSG00000102786_115 (sequence is synthesized)
actgagctcaaagtagtacaaaatggatatgatttatttcctatagagcattaatttaatggtggtataatttaaatgagaaggaatatccccaaacccagattttattttcttttaaaa

SEQ ID NO: 132021 - DNA, 120 bp, Artificial Sequence
  ENSG00000102786_116 (sequence is synthesized)
ttattttcttttaaaacatttgcaaaatatttcttcagaattttatactctaaaactgttttctaaaagaaaaaattctccagtcatgatctgaaaaaaaaaaaaaaaagaaaaatgaaa

SEQ ID NO: 132022 - DNA, 120 bp, Artificial Sequence
  ENSG00000102786_117 (sequence is synthesized)
gctgggatttacaggcgtgagccaccgcccctggccattattgcattcttaattagaaattgttcaaaacaaatcttaaatacaaaagtcaaaaataggccgggtgccatggctcacacc

SEQ ID NO: 132023 - DNA, 62 bp, Artificial Sequence
  ENSG00000102786_118 (sequence is synthesized)
ttaattagaaattgttcaaaacaaatcttaaatacaaaagtcaaaaataggccggttgaggt

SEQ ID NO: 132024 - DNA, 120 bp, Artificial Sequence
  ENSG00000102786_119 (sequence is synthesized)
acaaaacaaaacaaaaacaaacaaaaaaccaaataatatattctactttaaagagcattttactttctttcgatataggagaatatcgataattatgtattatatacagctggaaattaa

SEQ ID NO: 132025 - DNA, 120 bp, Artificial Sequence
  ENSG00000102786_120 (sequence is synthesized)
gaaattaaaagatcaggaacaaatctaatatttgacatcattggacttatttgtgtattttgaattaaggtcatttgtggtcaaaattagttaaaaggattgtttatttagtcatgttca

SEQ ID NO: 132026 - DNA, 120 bp, Artificial Sequence
  ENSG00000102786_121 (sequence is synthesized)
tgtcatagatttctacaaagagattatatagtattttatagcttgaaatgtttctcaaatatataaaatgatttttggccataataaccttgactcagatttatactctacaattaaatt

SEQ ID NO: 132027 - DNA, 120 bp, Artificial Sequence
  ENSG00000102786_122 (sequence is synthesized)
agatttatactctacaattaaattagtcttggtggacttttcttgttttttggggctttttaattttaaaaatgtttagatacaaagtctctctgtgttacccaggctggtcttgaactc

SEQ ID NO: 132028 - DNA, 120 bp, Artificial Sequence
  ENSG00000102786_123 (sequence is synthesized)
acgccttcggagtagctgggactgcaggctcttgccattgtactcagcttaaaaaagtaatttccttatataaactttatttttgtttagtcttactattagtctataaaagtttaccat

SEQ ID NO: 132029 - DNA, 120 bp, Artificial Sequence
  ENSG00000102786_124 (sequence is synthesized)
ggttgccagactttaaacaaaatactaaatttttaaaaaattttgttttggtttgtattttctgatctctaacatttttattgagatgtaacttaaataaacaaatctgaagtgtgaagc

SEQ ID NO: 132030 - DNA, 120 bp, Artificial Sequence
  ENSG00000102786_125 (sequence is synthesized)
ttagtgaattttaaaatatacactcttaaaaaaattgaacatttgcatctactgacaagttttcattaaactttctgtgttttattattattttcatagggctttagaatggaagtgatt

SEQ ID NO: 132031 - DNA, 120 bp, Artificial Sequence
  ENSG00000102786_126 (sequence is synthesized)
ttagaagtttactcaattttcctcattttgtaggtgaagaaaaggcatagaaaggttcagaggcttaatttcttcacatttatgaaatatttttaaaaattgtaattggtgatagaacag

SEQ ID NO: 132032 - DNA, 120 bp, Artificial Sequence
  ENSG00000102786_127 (sequence is synthesized)
ttatggagattttattaaggatttgtatattatttaataacattttatttaaatgtataagcagtggatctgagttgctttcttcagttttgtgtatagttctgtaatgcagtatgattt

SEQ ID NO: 132033 - DNA, 120 bp, Artificial Sequence
  ENSG00000102786_128 (sequence is synthesized)
ctttcagttcttgtttgaaagctaagcttttcattttgtctctgttacatttagtctttcttgtaacattctatctaaatactgtttgttacaaaattagctttagttggattccttcct

SEQ ID NO: 132034 - DNA, 120 bp, Artificial Sequence
  ENSG00000102786_129 (sequence is synthesized)
ccctttgtttggcagaaagtaaatgaatttagggcagcggtccccagcctctttggcaccaggctggttttgtggaagacagtttttccatggattggtagaggtggttgggatggtttc

SEQ ID NO: 132035 - DNA, 120 bp, Artificial Sequence
  ENSG00000102786_130 (sequence is synthesized)
atggtttcagatgaaacttttccacctcaggtcatcaggcgttagagtctcataggagcgcataacctagaccccttgcatgcacagttcacaacagggtttgtgctcctatgagaatct

SEQ ID NO: 132036 - DNA, 120 bp, Artificial Sequence
  ENSG00000102786_131 (sequence is synthesized)
tgctgatctaacaggaggcggagccccaacggtaatgctcacttgcccactgctcaccttctgctgtgccacccattcctgatggggtccaggggttggggaccccgatctaggggataa

SEQ ID NO: 132037 - DNA, 120 bp, Artificial Sequence
  ENSG00000102786_132 (sequence is synthesized)
accaggaaagacttcttagaggtagtagcatctgaagaataaaagtttactgagaacccagaacccttgcaggttagggggcaatgcagagtgaagatcatgatcaatggccagatgcga

SEQ ID NO: 132038 - DNA, 67 bp, Artificial Sequence
  ENSG00000102786_133 (sequence is synthesized)
gcaatgcagagtgaagatcatgatcaatggccagatgcgatggttcatgcctgttcgagaccagcct

SEQ ID NO: 132039 - DNA, 78 bp, Artificial Sequence
  ENSG00000102786_134 (sequence is synthesized)
ccagcctgggcgacaagaacgaaacttcatctcaaaaaaaaaaaaaaatcatggtcaaaaacataggagaggctgtcc

SEQ ID NO: 132040 - DNA, 87 bp, Artificial Sequence
  ENSG00000102786_135 (sequence is synthesized)
agttcaagaccagcctggccaacctggtaaaactccatctctgccaaaaacacaaatattagccaggcatggtggtgcacgcctgcg

SEQ ID NO: 132041 - DNA, 89 bp, Artificial Sequence
  ENSG00000102786_136 (sequence is synthesized)
gaggttgctgtgagccaagattgtgcgatctgtctcaaaaaaaaaaaaaaggctggaggtggggaggcctggggacgtatgggatagtt

SEQ ID NO: 132042 - DNA, 120 bp, Artificial Sequence
  ENSG00000102786_137 (sequence is synthesized)
aggctggaggtggggaggcctggggacgtatgggatagttgacaggattttatactgtaattactttaaggcctagattctaataacatacataagtatttaatggcactttttggtttt

SEQ ID NO: 132043 - DNA, 120 bp, Artificial Sequence
  ENSG00000102786_138 (sequence is synthesized)
gtgcttcatactttaagtttctgatgtgtagctagttaatatagagctattaaccttgttcattagtcaatttttccaatgtagtatgccaaccagtattagggttacatttataacttt

SEQ ID NO: 132044 - DNA, 120 bp, Artificial Sequence
  ENSG00000102786_139 (sequence is synthesized)
tttcctggagagttgatgagttaactaccatattttcatttaacttaaggtagttttgaaaatttctaagcattatatcttaagattcagaaaaataagaccagatccacttatgaattt

SEQ ID NO: 132045 - DNA, 120 bp, Artificial Sequence
  ENSG00000102786_140 (sequence is synthesized)
ccattccactcgtgacctgacaagtcgtataacctctcagcctcactttccccattagacaaatagaatgaaaagacctatcttgcagaactgtgataaagattaaggaatgtacaacat

SEQ ID NO: 132046 - DNA, 120 bp, Artificial Sequence
  ENSG00000102786_141 (sequence is synthesized)
aatttattattgtaacacaacctattaatcatttttatgtattttctcttatttgaattttaaaaattgaaattatggggtactagaggtttttttaatcttgcttttttcagaacaagc

SEQ ID NO: 132047 - DNA, 120 bp, Artificial Sequence
  ENSG00000102786_142 (sequence is synthesized)
agcatggtggtatggaaagaactgctgtattagaactggctgtgcctggttctgtcactcactagcttatattgtattgaaaagtcccttaatctctctgagcatcaagtttctcatcca

SEQ ID NO: 132048 - DNA, 120 bp, Artificial Sequence
  ENSG00000102786_143 (sequence is synthesized)
tagaattgtgattataccaatgcttaaattttgtgaggattagaagtaatatttgttaatcatctagcaaaagtgcctgcctggcatatggtaggggctcatttatgatgatgatcatca

SEQ ID NO: 132049 - DNA, 120 bp, Artificial Sequence
  ENSG00000102786_144 (sequence is synthesized)
tctccagtattacggtaaacacttaacaggataaaagctttttagtctgaaacctttgacaaaaacagaattaaggttgttccataacctatcatacagttatgtatcgcttaacaatgg

SEQ ID NO: 132050 - DNA, 120 bp, Artificial Sequence
  ENSG00000102786_145 (sequence is synthesized)
agataggttctgagaactgcaccattaggcagatctgttgtgggaacatcatagagtatacctacagaaacctagatgggatagatgactatacccctaggctatatggtatatgaccca

SEQ ID NO: 132051 - DNA, 120 bp, Artificial Sequence
  ENSG00000102786_146 (sequence is synthesized)
ttgctcctaggctatacatctacctgtatagcatgtaactgtactgattgctctaggcagttttaacacttacaagcattcatgtgtctaaacagatataaacattgacaaatacagtag

SEQ ID NO: 132052 - DNA, 120 bp, Artificial Sequence
  ENSG00000102786_147 (sequence is synthesized)
aaatatggtatgaaagataaaaaatggtatacctagatagggcacttaccatgaatgtagcttgaggactggcagttgctctgggtgggtgagtgagttcgtgatgagtgaagtgaaggc

SEQ ID NO: 132053 - DNA, 120 bp, Artificial Sequence
  ENSG00000102786_148 (sequence is synthesized)
ctgggacagtacactgctgtagactttataaactgtacacttaggctacactaaatttattaaaaaattttctccaataataaattaaccttagcttactgtaactttataaacttctaa

SEQ ID NO: 132054 - DNA, 74 bp, Artificial Sequence
  ENSG00000102786_149 (sequence is synthesized)
cattctcccgcctcagcctcctgagtatctgggactactgccaccacacctggctaattttggtgtcatgctct

SEQ ID NO: 132055 - DNA, 120 bp, Artificial Sequence
  ENSG00000102786_150 (sequence is synthesized)
ctcccaaagtgctgggattacagacgttagccactgcactggcctttgttaaaaactaagacttacactcatttttctaggcgcacacagggtcaggatcattaagatgtcaggaggtga

SEQ ID NO: 132056 - DNA, 120 bp, Artificial Sequence
  ENSG00000102786_151 (sequence is synthesized)
gatcattaagatgtcaggaggtgataggaatttttcagctgtattataatcctacaggaccactgtcatgtatatggtggtctgtcattggccaaaacattatgtgatgtcttactgtac

SEQ ID NO: 132057 - DNA, 120 bp, Artificial Sequence
  ENSG00000102786_152 (sequence is synthesized)
atccatcatgagaagccataagtagctatccagttttttctggctaaagtaattttcaaagcaagaaaggttttaaacttctttgagaaaatttagagtttatttctaggactttgtata

SEQ ID NO: 132058 - DNA, 120 bp, Artificial Sequence
  ENSG00000102786_153 (sequence is synthesized)
ttttagaattcacgttggtgatggttgggatgggggtttaggggaggtgctctcctccagaagaaaagtcaagtgtaaaatatataattccttttatttgtcgtgtagatttgtgtagga

SEQ ID NO: 132059 - DNA, 120 bp, Artificial Sequence
  ENSG00000102786_154 (sequence is synthesized)
aaagacataataggataggcctaggaagaatttttttatatgaagatttttttttgaagggcatatataattggaaattgattattggtatatggagagagagaattgtacatgaaaagt

SEQ ID NO: 132060 - DNA, 120 bp, Artificial Sequence
  ENSG00000102786_155 (sequence is synthesized)
actataacttaaaaaaccttacagttaagaggattagttgtaaccaaaggacaaatttatgtcagtctagtgattagtcctatcaaaaattattctagctttcatataacctgtttttta

SEQ ID NO: 132061 - DNA, 120 bp, Artificial Sequence
  ENSG00000102786_156 (sequence is synthesized)
ttgcctgttttatctgtgacatgttgacatcttccttctattagtttttgcccaaatgaggtgtgggactcctagtgaaggtccttggaaggattatattttctataaaactttattagg

SEQ ID NO: 132062 - DNA, 120 bp, Artificial Sequence
  ENSG00000102786_157 (sequence is synthesized)
gacatgataacagttctgaatatgtgagaaaaagtaattgtatactattaggtgatgcagtttgtagctaggaaatgacagagttgatgctggtgtgtcagagtaaaactttccctttgt

SEQ ID NO: 132063 - DNA, 120 bp, Artificial Sequence
  ENSG00000102786_158 (sequence is synthesized)
cttaaagcgagtgaaccttgttaggtactaggaaacaacaacagtcttttggttattctggggtttcaacactggaaatatctaataacagaattattctgaaataattgaaaactattt

SEQ ID NO: 132064 - DNA, 120 bp, Artificial Sequence
  ENSG00000102786_159 (sequence is synthesized)
taaataaggaattgaagataattgaatatgcagtgtgaaaggtcaggctgcaagtgacagtgggtgatgttgcaagacaatgacaaggtacagtgcttttggattatcaggaattagcaa

SEQ ID NO: 132065 - DNA, 120 bp, Artificial Sequence
  ENSG00000102786_160 (sequence is synthesized)
aatgatgtcttggtgtcctctggtaatttctgagttgtgaactatcttgcttatttatatactttggcaggtaatgaaataatgaatgtaaaattttgaattttgtgtaatcacatttct

SEQ ID NO: 132066 - DNA, 120 bp, Artificial Sequence
  ENSG00000102786_161 (sequence is synthesized)
taaaccaataagttagaaaggaaaaccaagagattgcatccacaagatcaggcctaaataggtagtagaaagaatagaaggtctttattttaaattttatttttaattcagaatgggcag

SEQ ID NO: 132067 - DNA, 120 bp, Artificial Sequence
  ENSG00000102786_162 (sequence is synthesized)
tgtctaatcacaaatgagattatagtgaatgtaaatcttaatgtaacaaaggattatcttgccatgttcttaaagtttccattttaatgagctttagtaacattctaaaacatgtagcaa

SEQ ID NO: 132068 - DNA, 120 bp, Artificial Sequence
  ENSG00000102786_163 (sequence is synthesized)
tctgtgcagtcatccgtatgtgacatctgcttcttcatgaagtgcatttctaaggtaaaactattggtttatttgtatgtatagttaggaaggcttataaaacttttttttttttaatga

SEQ ID NO: 132069 - DNA, 120 bp, Artificial Sequence
  ENSG00000102786_164 (sequence is synthesized)
taggcacaagtattatgtagttagattttttttgtttctggaaaatgttatctactttgaaaattttaaatctataaacacttgggaaggtgtttagcacaagcatcaataaatgtttca

SEQ ID NO: 132070 - DNA, 120 bp, Artificial Sequence
  ENSG00000102786_165 (sequence is synthesized)
atcagaatctagcaagaaaggattcttagaaacttttactcctgtacatgtactgtgtaatggatttagagaaatttgtttcctcctaaaaaatcttagcaatgttgggttagtaccatt

SEQ ID NO: 132071 - DNA, 120 bp, Artificial Sequence
  ENSG00000102786_166 (sequence is synthesized)
tctttccttgaaaacaaaaaaatccacattttttacgaaccagggccccttaaaactaatctcacattatgtcttttttttaattattattgtttttgagacacagtcttgctctatcgc

SEQ ID NO: 132072 - DNA, 120 bp, Artificial Sequence
  ENSG00000102786_167 (sequence is synthesized)
tgagacacagtcttgctctatcgcccaggctagagggcagtggcatgatcttggcttactgtaatctctgcctcccaggttcaaacaattcttgtgcctcagccttcccagtagctggga

SEQ ID NO: 132073 - DNA, 120 bp, Artificial Sequence
  ENSG00000102786_168 (sequence is synthesized)
gagccatcacgcccggcctcacattatgccttacccaattattttcagattggccttcagccatagcatatgggaaacaatatactgttagagttttccaagtgcttttcatgaattttt

SEQ ID NO: 132074 - DNA, 120 bp, Artificial Sequence
  ENSG00000102786_169 (sequence is synthesized)
tttccctttttaaaatttaatgctttattgctaactttcctgatctgaaacatttattaggcagttcttcattttcagttgtagcctttaagatatttatatagaaggctgtcatagaat

SEQ ID NO: 132075 - DNA, 120 bp, Artificial Sequence
  ENSG00000102786_170 (sequence is synthesized)
gccatcttcttttgtaggacagttgtgtgtgtgaattgattttttttttttgagaccatatttgtagtgtgatgtgtagaaggaagtaaccagaatggttttatctgcttctttgcccta

SEQ ID NO: 132076 - DNA, 120 bp, Artificial Sequence
  ENSG00000102786_171 (sequence is synthesized)
cattcaaggtctgcttgtgatagtatttaaaattgagttcagtgctgagttcaagatgggatttaaccagacttttacaaaggtagcatctgtagattttgtagcagtctactcaaggag

SEQ ID NO: 132077 - DNA, 120 bp, Artificial Sequence
  ENSG00000102786_172 (sequence is synthesized)
gtgattaatcttgagagactagacagatttcttttaggtcaaattaaattttaccattattgctgtataactccattcacctatctttgaaaatatgtttacatcttggtttttatttat

SEQ ID NO: 132078 - DNA, 120 bp, Artificial Sequence
  ENSG00000102786_173 (sequence is synthesized)
acgtttatttttaaaaaacatatttctaacatgttttttattacatgcttcactagaataaaattttcccaagttattattacccagtttatcctgaaatcttagcctcaggcagtcctc

SEQ ID NO: 132079 - DNA, 120 bp, Artificial Sequence
  ENSG00000102786_174 (sequence is synthesized)
tacaagtgtgagccaccgtgcctggccccagtccatctaatgtatgtattagattcttagaatattactatttattaagtaaagttatatttctgatagcttaattactccttatatgac

SEQ ID NO: 132080 - DNA, 120 bp, Artificial Sequence
  ENSG00000102786_175 (sequence is synthesized)
ctgatagcttaattactccttatatgacagcataaacactatttgcctggcactactttttaggcattccccagaccagtttgttaatttcattcaaactttagattccagttcaagtat

SEQ ID NO: 132081 - DNA, 120 bp, Artificial Sequence
  ENSG00000102786_176 (sequence is synthesized)
cagttcaagtataaaactcaaattctgccaaattattaatatttcagatatattgagtttatattatcgtcttttgtagttatacttagtcttatcaattattgaatttccctaatgtta

SEQ ID NO: 132082 - DNA, 120 bp, Artificial Sequence
  ENSG00000102786_177 (sequence is synthesized)
tttacaaagtcaaactttagtgattctgcagttcttatggtgacttacgatttcttacattattactcttcagtctattattaaatcaaattccaggatggagttccttagtcgttacat

SEQ ID NO: 132083 - DNA, 120 bp, Artificial Sequence
  ENSG00000102786_178 (sequence is synthesized)
taaaacagatatatggaactcccccctacttttgcttaagtcatagtattccatctgtttttaatgctgttgtatttttaacataaggaattacgtggttgaataaaggaattgtatcgg

SEQ ID NO: 132084 - DNA, 120 bp, Artificial Sequence
  ENSG00000102786_179 (sequence is synthesized)
agagtttaagaaacttgcccaagatgacataatgagtatgtgatggacctcgattcaaatcaagcctgtgtgtgtgcagagcccatgctctagtcacctacattttgctacctcccatct

SEQ ID NO: 132085 - DNA, 120 bp, Artificial Sequence
  ENSG00000102786_180 (sequence is synthesized)
cgtgtggcatctcacatatagtaggtgcagaaaagaggctgttgactaattgccttattgacaattaatagagtattttatttaatagagtgtttatactggataaaatatattttcata

SEQ ID NO: 132086 - DNA, 120 bp, Artificial Sequence
  ENSG00000102786_181 (sequence is synthesized)
agccggcctacaagcttcccccgcccctgagctgtttaaatatgctaatgaaaggatagggcctgaccagtagaacggcgaggcggtgtatcacgtggctcggggacgtgtcaggggcgg

SEQ ID NO: 132087 - DNA, 120 bp, Artificial Sequence
  ENSG00000102786_182 (sequence is synthesized)
agcctccgcagcccctgcccgagttaaaaccggagtgtgagagagaaaagcgcttcagtagcgagaggggctgagaaagtggtgacaccgccgggacacgtctgcctctatgaaccagcg

SEQ ID NO: 132088 - DNA, 120 bp, Artificial Sequence
  ENSG00000102786_183 (sequence is synthesized)
gttttgtttgttgtggttttgatgttttttttcctttcagctaaaggagcagcccagtggttttcaagaagtgctaaagtgcactgactgtctcatgatgactggtgcctcagggagggt

SEQ ID NO: 132089 - DNA, 120 bp, Artificial Sequence
  ENSG00000102786_184 (sequence is synthesized)
catgattcctggatacaggatcgacctgatcctggatgtcacttcaagcagtcagatcgtggggaaaagccttgtctaatggctagccttcctcaaaagtctgatgctagtcatctcgga

SEQ ID NO: 132090 - DNA, 120 bp, Artificial Sequence
  ENSG00000102786_185 (sequence is synthesized)
tacccaaattttgggtattagattaggtagtaaatttgtcagtgaagttataaagtattaaggcagttaactaccaaaacctagagaggaagctgggttattcctgggccacctttggaa

SEQ ID NO: 132091 - DNA, 120 bp, Artificial Sequence
  ENSG00000102786_186 (sequence is synthesized)
ggtaagaagttgaagatggactcaaaggtgaaggggcagtaaagtctccaagggaagctaggaaaaataggacagtcttcccaaatttaaattgaagttgcatttccttttctgttggct

SEQ ID NO: 132092 - DNA, 120 bp, Artificial Sequence
  ENSG00000102786_187 (sequence is synthesized)
acgaagatgatgacgtaagatatttgggttggcgatattactaaaattaatcatttaaaataacaatatggaaaacctcacttgtattcaagcaaaaaataaactgaatgtaaacaataa

SEQ ID NO: 132093 - DNA, 120 bp, Artificial Sequence
  ENSG00000102786_188 (sequence is synthesized)
agaggaggtgggcctgacagcctggtgtgtttttggagtacagagtgggaaggggtatgagggaagaggtcttttagaggttgttacatgccaactcatttttctaaactttgtttgcaa

SEQ ID NO: 132094 - DNA, 120 bp, Artificial Sequence
  ENSG00000102786_189 (sequence is synthesized)
tatgcaagggagaaaataagtacttggcatggctgaagtatggagtctgtatggcgtggtggtgggaaggcagatagggaccagatcactgaagatctttatatgtgatattaagtgtct

SEQ ID NO: 132095 - DNA, 120 bp, Artificial Sequence
  ENSG00000102786_190 (sequence is synthesized)
agaccctatttttaggtgattggctgttacttttaccgaacagttttagatagggaaattatatgatcctatttatatttcactgccatggattgatcagacagggactgattagaaact

SEQ ID NO: 132096 - DNA, 120 bp, Artificial Sequence
  ENSG00000102786_191 (sequence is synthesized)
aaacaaagcaaaaagcatttgtactagtctaatctgagaaatgatgaaggcccaaattaaagtggtaagaaatagaagataacatttctagagagatgagagtttagtattgacagaagg

SEQ ID NO: 132097 - DNA, 120 bp, Artificial Sequence
  ENSG00000102786_192 (sequence is synthesized)
tccggcgcccgcgaggccccgagtcctcctccggagggcggctgcgggcctgccctcttctcctaaccagacacgtctgcctctatgaaccagcgcagccatctgggcaccacctacctg

SEQ ID NO: 132098 - DNA, 120 bp, Artificial Sequence
  ENSG00000102786_193 (sequence is synthesized)
ctatgacatttaaaattatttcctcatagctcattttgttcacaatttgtgagatttttaggaagaggactattaagaggtagattggggagtaacatgcctttttaaaaaaagtattac

SEQ ID NO: 132099 - DNA, 120 bp, Artificial Sequence
  ENSG00000102786_194 (sequence is synthesized)
ttttttatacctctagaacaggggtttctaaaataagggtgtgtatcctatagagtttaccaaaatgattgctggaatagggaaggaaacattagaagttctatttatggttatttttct

SEQ ID NO: 132100 - DNA, 120 bp, Artificial Sequence
  ENSG00000102786_195 (sequence is synthesized)
cctattttcataccattttggtatatattttgttatgtacatctacatttataatttgtataattagaaatatatagtgtgttcaaaaactgatcaagatctatgattactttggaagtc

SEQ ID NO: 132101 - DNA, 120 bp, Artificial Sequence
  ENSG00000102786_196 (sequence is synthesized)
gctactctctataagtaattgctacaaatgaagacttgtgagagtttctatatacatttctaattttttggatgtaaaaattaatgaatactcaattactaaattttgcgtaagacctaa

SEQ ID NO: 132102 - DNA, 120 bp, Artificial Sequence
  ENSG00000102786_197 (sequence is synthesized)
aaatattttcatttctatagattttcaagtgtttatctttttgttgtgaatattacataactttagcattacattttcaagtgtttcctttcagcttaatgttgcttttagcagtaaatc

SEQ ID NO: 132103 - DNA, 120 bp, Artificial Sequence
  ENSG00000102786_198 (sequence is synthesized)
aaactcttactagcaagacggaggaactgagtaaattttgataatgaggaatatttagttttgtttctgaaatttcatgtaagtagtaattacaagactttcccctttagccacctcgta

SEQ ID NO: 132104 - DNA, 120 bp, Artificial Sequence
  ENSG00000102786_199 (sequence is synthesized)
gccccgggcggtgtgtggggagcgatctgtgtgtgggggacggcgtggaggggtggccgctgcgtgtgcggtactgtgggggcggcggggccgctgggcgccccttctccgcctcgtaac

SEQ ID NO: 132105 - DNA, 120 bp, Artificial Sequence
  ENSG00000102794_0 (sequence is synthesized)
actcctctggttcactcctcctgaactgaacctcttctttacaacgaaatgatgctcaagtctatcacagaaagctttgccacagcaatccatggcttgaaagtgggacacctgacagat

SEQ ID NO: 132106 - DNA, 120 bp, Artificial Sequence
  ENSG00000102794_1 (sequence is synthesized)
cgtgttattcagaggagcaagaggatgattctagacactctgggtgctgggttcctgggaaccactacggaagtgtttcacatagccagccaatatagcaagatctacagttccaacata

SEQ ID NO: 132107 - DNA, 120 bp, Artificial Sequence
  ENSG00000102794_2 (sequence is synthesized)
tccagcactgtttggggtcagccagacatcaggctcccgcccacatatgctgcttttgtgaacggtgtggctattcactccatggattttgatgacacgtggcaccctgccacccaccct

SEQ ID NO: 132108 - DNA, 120 bp, Artificial Sequence
  ENSG00000102794_3 (sequence is synthesized)
tctggggctgtccttcctgtcctcacagctttagcagaagccctgccaaggagtccaaagttttctggccttgacctgctgctggctttcaatgttggtattgaagtgcaaggccgatta

SEQ ID NO: 132109 - DNA, 120 bp, Artificial Sequence
  ENSG00000102794_4 (sequence is synthesized)
ctgcatttcgccaaggaggccaatgacatgccaaagagattccatcccccttccgtggtaggaacgttgggtagtgctgctgctgcatccaagtttttaggacttagctcgacaaagtgc

SEQ ID NO: 132110 - DNA, 120 bp, Artificial Sequence
  ENSG00000102794_5 (sequence is synthesized)
cgagaagctctggccattgctgtttcccatgctggggcacccatggccaatgctgccacccagaccaagcccctccacattggcaatgctgccaagcatgggatagaagctgcatttttg

SEQ ID NO: 132111 - DNA, 120 bp, Artificial Sequence
  ENSG00000102794_6 (sequence is synthesized)
gcaatgttgggtctccaaggaaacaagcaggtcttggacttggaggcaggatttggggccttttatgccaactattccccaaaagtccttccaagcatagcttcctacagttggctgctg

SEQ ID NO: 132112 - DNA, 120 bp, Artificial Sequence
  ENSG00000102794_7 (sequence is synthesized)
gaccagcaggacgtggcctttaagcgttttcctgcacatttatctacccactgggtggcagacgcagctgcatctgtgagaaagcaccttgtagcagagagagccctgcttccaactgac

SEQ ID NO: 132113 - DNA, 120 bp, Artificial Sequence
  ENSG00000102794_8 (sequence is synthesized)
catgctgcttgatggtggcatcactgtcccctcattccatgaatgccagatcaacaggccacaggtgagagagctgctcagtaaggtggagctggagtaccctccggacaacttgccaag

SEQ ID NO: 132114 - DNA, 120 bp, Artificial Sequence
  ENSG00000102794_9 (sequence is synthesized)
cttcaacatactgtactgtgaaataagtgtcaccctcaaggatggagccaccttcacagatcgctctgataccttctatgggcactggagaaaaccactgagccaggaggacctagagga

SEQ ID NO: 132115 - DNA, 120 bp, Artificial Sequence
  ENSG00000102794_10 (sequence is synthesized)
aaagttcagagccaatgcctccaagatgctgtcctgggacacagtggaaagccttataaagatagtcaaaaatctagaagacctagaagactgttctgtgttaactacacttctcaaagg

SEQ ID NO: 132116 - DNA, 120 bp, Artificial Sequence
  ENSG00000102794_11 (sequence is synthesized)
accctctccaccagaggtagcttcaaactctccagcatgtaataattctatcacaaatctctcctgaggcttaccaacatctaaatgactttgcatttggggagattcaatgatttggtt

SEQ ID NO: 132117 - DNA, 120 bp, Artificial Sequence
  ENSG00000102794_12 (sequence is synthesized)
tgtaaagcaagggtctgctgcttggttttcccaggaaaaatgaacaaagatggagagagtccagaaacagaactacatatatctggaaggagccttctcctgaaaattttgcaggacagt

SEQ ID NO: 132118 - DNA, 120 bp, Artificial Sequence
  ENSG00000102794_13 (sequence is synthesized)
tccacttacctaaatcaagatgaaacacacacacaaaaatgagtttgtaagcattcacaagggtgaaattcaactcacctgtgatttacttataaaattaatctcttcataggaattatg

SEQ ID NO: 132119 - DNA, 120 bp, Artificial Sequence
  ENSG00000102794_14 (sequence is synthesized)
tgtggacttcatgagcctcaaggttttagagggatgtgaacctgcatgtatattttctgacagtggagagggctctggtgcattgtgtcaccaacagatctcctagaccatggcttatta

SEQ ID NO: 132120 - DNA, 120 bp, Artificial Sequence
  ENSG00000102794_15 (sequence is synthesized)
ccaagccctccacagtgcaaggggtgctactggggaatgggtgggtttaaatcctgcctctgccattcactagatgtagccttgagcatgttaccattagccctctgcctcagtttccct

SEQ ID NO: 132121 - DNA, 120 bp, Artificial Sequence
  ENSG00000102794_16 (sequence is synthesized)
atttgtcaagccgaagtaaaaagcagtctggaaaaatcgcattttggctctagaacccatggtcttaagcactgcaatatatcacctttcagtataaaaatatttgaatcagagttgcaa

SEQ ID NO: 132122 - DNA, 120 bp, Artificial Sequence
  ENSG00000102796_0 (sequence is synthesized)
gggcggaggccgcgccgggagcgcggtggggctaggcgtggggcgctcccggcatgtccctgtaccgcagcgtcgtgtggttcgccaaggggctgcgcgagtacaccaagagtggctatg

SEQ ID NO: 132123 - DNA, 120 bp, Artificial Sequence
  ENSG00000102796_1 (sequence is synthesized)
aatctgcatgtaaagactttgtccctcatgacttggaggtccagattcctggaagagtctttttggtcactggaggaaacagcggcattggcaaagcaactgcccttgaaatcgccaagc

SEQ ID NO: 132124 - DNA, 120 bp, Artificial Sequence
  ENSG00000102796_2 (sequence is synthesized)
gaggtggcacagttcacctggtttgtcgagatcaagccccagcagaagatgccaggggtgagatcatccgggagagcggtaaccagaacatttttctgcacattgtggacttgtctgatc

SEQ ID NO: 132125 - DNA, 120 bp, Artificial Sequence
  ENSG00000102796_3 (sequence is synthesized)
ccaagcaaatctggaaatttgttgaaaatttcaagcaggaacataaactccatgttctgatcaataatgcaggttgcatggtcaataaaagagagctcacagaagatggacttgaaaaaa

SEQ ID NO: 132126 - DNA, 120 bp, Artificial Sequence
  ENSG00000102796_4 (sequence is synthesized)
ctgaacaccaatgatctccagtccgaaagaacaccatttgatggaactatggtctatgcacaaaacaagaggcagcaagtggttctgacggagcggtgggcccaagggcacccggccatc

SEQ ID NO: 132127 - DNA, 120 bp, Artificial Sequence
  ENSG00000102796_5 (sequence is synthesized)
catttttcttccatgcatcctggctgggccgacaccccaggtgtgaggcaggcgatgccggggttccacgccaggttcggggaccgcctgcgctccgaggcccagggcgcggacaccatg

SEQ ID NO: 132128 - DNA, 120 bp, Artificial Sequence
  ENSG00000102796_6 (sequence is synthesized)
ctgtggctggccctctcctctgccgcagccgcacagcccagcggccgcttctttcaagatcggaagccagtttctacacacttgcctctcgctacagcgtcctcctcaccggccgaagag

SEQ ID NO: 132129 - DNA, 120 bp, Artificial Sequence
  ENSG00000102796_7 (sequence is synthesized)
gagaaactcattgaaatcctggaacagctggctcagacatttaaataggccaacccagacacagtgcggtaccagaattgccttagaagataccagaaggtgcggtctagggaccagtga

SEQ ID NO: 132130 - DNA, 120 bp, Artificial Sequence
  ENSG00000102796_8 (sequence is synthesized)
ataagaagaccccacttcaacttcccctcgaagacgttgtgcctcacagcgaggcctacaagggatgggaacttttatttcaaaataaatactaccgaggctgtgatcaggctcaccttg

SEQ ID NO: 132131 - DNA, 120 bp, Artificial Sequence
  ENSG00000102796_9 (sequence is synthesized)
ttttctttttcccttcctgtattcctgtagtgtggacatcttttcctgtcggtacatgaggctctaaggcatctttcttccagtcctgggaaaaggaacatttggcttgaaggatcctcg

SEQ ID NO: 132132 - DNA, 120 bp, Artificial Sequence
  ENSG00000102796_10 (sequence is synthesized)
tggtctatgcacaaaacaaggtcagtgagaggcagcaagtggttctgacggagcggtgggcccaagggcacccggccatccatttttcttccatgcatcctggctgggccgacaccccag

SEQ ID NO: 132133 - DNA, 120 bp, Artificial Sequence
  ENSG00000102796_11 (sequence is synthesized)
caccccagacaggaatgagcaggagctgaggaaggtagtgggagaggcccagactgcctcaccactccccaggtttttggaaataatgatgcatgaaggtaaatgccagccacaaggaca

SEQ ID NO: 132134 - DNA, 120 bp, Artificial Sequence
  ENSG00000102796_12 (sequence is synthesized)
cagctcgaatgatctggaagcgtgttggagcagcggtggaggggagcagaattctcttccggattggcctcaccaactccatgacctcaggcagctcacctgggctctctgcagctcttt

SEQ ID NO: 132135 - DNA, 120 bp, Artificial Sequence
  ENSG00000102796_13 (sequence is synthesized)
cctcctctacaaacaagggaactgaaagcagcagcagccacagcacacaccccagggtgcacccgcggcgccaagaactggtctcagcgctgtctgcggattaacgcatttgtcctcaag

SEQ ID NO: 132136 - DNA, 120 bp, Artificial Sequence
  ENSG00000102796_14 (sequence is synthesized)
cctctgtggagtggccactactgtctattatcacacccatttacagatgagggaactgaggcccagagaggctaagacctcccagccgggcctggccatggggttttgggaatcaggctc

SEQ ID NO: 132137 - DNA, 120 bp, Artificial Sequence
  ENSG00000102796_15 (sequence is synthesized)
tcacacactgctggcatggcctttctgaaaatcactatttatcagaagccttggaattcatcctaagaaataaagatagggaaaacaaggttgcttatcacagtgctggtggtaggagat

SEQ ID NO: 132138 - DNA, 120 bp, Artificial Sequence
  ENSG00000102796_16 (sequence is synthesized)
gaagttaataaattatagaacacctgtgcaaaatctgttcagggctgaagactctgctgccaatcatgcctatggaaaaaccctgtgtgcactatatcattaaatgaagataccaagttc

SEQ ID NO: 132139 - DNA, 120 bp, Artificial Sequence
  ENSG00000102796_17 (sequence is synthesized)
gcaccctccgccttccttgtcgctgctgtgtgccttccgaaggtggccctgtctgagactctctgcacctccacttcttctgtttatatgccctgggtgtgccccagttttgctccttga

SEQ ID NO: 132140 - DNA, 120 bp, Artificial Sequence
  ENSG00000102796_18 (sequence is synthesized)
ccccagaccaaatcctggtgaattacatctcatgactccaaatcctgacatttgaaagacctgcacttctttacagttttcccagaggacatgggaataaaccatccacttgtaaatgag

SEQ ID NO: 132141 - DNA, 120 bp, Artificial Sequence
  ENSG00000102796_19 (sequence is synthesized)
acacagggctaggggcagcagctgggccttcgaggcgcaccttcccctccgtgaaacctggggtgggactgtcccctggggggtgcctgggcttctttggcgagatgattgctttgcctg

SEQ ID NO: 132142 - DNA, 120 bp, Artificial Sequence
  ENSG00000102796_20 (sequence is synthesized)
agacttgtgataaccctgtcatcaaggtcctgtgagaacgggagaggcagttcctaccttgggaatggaagattttctctgcagtttgctgaggcccaggaggggcgctattcaaagctg

SEQ ID NO: 132143 - DNA, 120 bp, Artificial Sequence
  ENSG00000102796_21 (sequence is synthesized)
cactgcaaagggagtaacggactctgcttctctgcagtgcaaagggtgtaagggactctgcttctctatttttggaagcagtgatctgttcacgtctctccccagtgggctcctaagggg

SEQ ID NO: 132144 - DNA, 120 bp, Artificial Sequence
  ENSG00000102796_22 (sequence is synthesized)
gcaggcgtgtgagtggacgccatccgaagacagcacttgacctcgggtggaagccaggctctttgcttggcttctctttcctctgttcttgatgagaaccacccttgcttgaggaattct

SEQ ID NO: 132145 - DNA, 120 bp, Artificial Sequence
  ENSG00000102796_23 (sequence is synthesized)
gaagcgctggtgacccctggggtatccgggaggatggccgcaccccttcctgctgatcacccaaacgtggtctcccgtccagccctggctgcagcctcccagttcccaaactgcacttta

SEQ ID NO: 132146 - DNA, 120 bp, Artificial Sequence
  ENSG00000102796_24 (sequence is synthesized)
catatcaatccatgctgcctgatccctgtgggacctttgacagcagggatgggggtctaacagctgtagggtgctgccactccagcaggcgtcggttcaaggcctgagcagcacagggac

SEQ ID NO: 132147 - DNA, 120 bp, Artificial Sequence
  ENSG00000102796_25 (sequence is synthesized)
gtgctcgtggaagtgtcttcgtggtgctgctggcggcgtcagatagggctggatctaaatcgctagctaaggctctgtcctagtgcctttgggtgtgtttcctttaaaaagatgcagcac

SEQ ID NO: 132148 - DNA, 120 bp, Artificial Sequence
  ENSG00000102796_26 (sequence is synthesized)
cacaacagcaagaagcactgctctacagggggtgaagagtggaaggggtcacaggctttagtttgtaaatctctgttacctttattgcagataaccgtctcctcaggaggaatgttggtt

SEQ ID NO: 132149 - DNA, 120 bp, Artificial Sequence
  ENSG00000102796_27 (sequence is synthesized)
tcaagtgggctcctaagggggcaggcgtgtgagtggacgccatccgaagacagcacttgacctcgggtggaagccaggctctttgcttggcttctctttcctctgttcttgatgagaacc

SEQ ID NO: 132150 - DNA, 120 bp, Artificial Sequence
  ENSG00000102802_0 (sequence is synthesized)
gctttctccgcgcggtgcctgcagggctcccagcgagtggcagcttgggaggggccgcccgggcggtcagactggcacctgagcggccaccgcgtcccggccaggcgggcagaccgaccc

SEQ ID NO: 132151 - DNA, 120 bp, Artificial Sequence
  ENSG00000102802_1 (sequence is synthesized)
cctcctcacctcgcgcgcggctgacgcaggcagggcgcccggcccctcctggggaccatcaggtgccggctgggggctgtaggcaccggacggaagcaggcggtgtgaggaccgacgacg

SEQ ID NO: 132152 - DNA, 120 bp, Artificial Sequence
  ENSG00000102802_2 (sequence is synthesized)
cgggcatggcgggggcggcctgcgagccggtggccaggccgagcctgacctccatctcgtctggggagcttcgcagcctgtggacctgcgactgcgagctggccctgctgccgctggctc

SEQ ID NO: 132153 - DNA, 120 bp, Artificial Sequence
  ENSG00000102802_3 (sequence is synthesized)
agctgctgcgcctgcagcccggtgccttccagctgagcggcgaccagctcgtggtggccaggcccggggagccggcggcggcgcgggggggcttcaacgtcttcggtgacggcctcgtgc

SEQ ID NO: 132154 - DNA, 120 bp, Artificial Sequence
  ENSG00000102802_4 (sequence is synthesized)
gcctcgacgggcagctctaccgcctcagcagctacatcaagaggtatgtggaactgaccaactactgtgattataaagactacagggaaactatattgagcaaaccaatgttgttcttta

SEQ ID NO: 132155 - DNA, 120 bp, Artificial Sequence
  ENSG00000102802_5 (sequence is synthesized)
ttaatgtacagaccaaaaaagacacctcaaaagaaaggacgtacgcgtttcttgtaaacacgaggcaccccaagataagaagacagatagagcaagggatggacatggtcatctcctcag

SEQ ID NO: 132156 - DNA, 120 bp, Artificial Sequence
  ENSG00000102802_6 (sequence is synthesized)
tgattggagaaagttaccggcttcagtttgattttcaagaggcagtgaagaatttcttccccccaggaaatgaagtggttaatggagaaaatttaagctttgcatatgaattcaaagctg

SEQ ID NO: 132157 - DNA, 120 bp, Artificial Sequence
  ENSG00000102802_7 (sequence is synthesized)
atgcattatttgatttcttctattggtttgggctcagtaattccgttgtaaaagtaaatggaaaagttctgaatttgtcaagtacaagtccagaaaagaaggagacgattaagttatttc

SEQ ID NO: 132158 - DNA, 120 bp, Artificial Sequence
  ENSG00000102802_8 (sequence is synthesized)
tggaaaaaatgagtgagcctttaatccgaaggagcagtttctctgaccgaaagttcagtgtaacttccagaggttcaatagatgatgtttttaactgcaatctgtcacccagatcatctc

SEQ ID NO: 132159 - DNA, 120 bp, Artificial Sequence
  ENSG00000102802_9 (sequence is synthesized)
ttggcagaattaccatttccaagtgttctggaatctgaagagacacccaaccaatttatctgattgaactgaacattgtagcagttgctcccgcactccaggcctgtgctagactatagg

SEQ ID NO: 132160 - DNA, 120 bp, Artificial Sequence
  ENSG00000102802_10 (sequence is synthesized)
ctggggggagggtaggaggtgggaggcagatacttccacctgcgtgtcaatctccggctcctccatggcttctatggaggactcctctcttctgcttctgtggatgtgatgccctggcag

SEQ ID NO: 132161 - DNA, 120 bp, Artificial Sequence
  ENSG00000102802_11 (sequence is synthesized)
gcccagggcagctgattcccctaaaacttatgattaccaggatggaaaggccttggtcccatggcactgggtggggctgggggatattctctactttgaacacttctccaaagaggcaga

SEQ ID NO: 132162 - DNA, 120 bp, Artificial Sequence
  ENSG00000102802_12 (sequence is synthesized)
agggccacagagttctgccaccctgaacatttttctcagttccctgggagtttttgtggcagcctttgtgggagtggtctgactggctgttgacctagcatgcttcataaatcagggttt

SEQ ID NO: 132163 - DNA, 120 bp, Artificial Sequence
  ENSG00000102802_13 (sequence is synthesized)
ggccctctgcttggagcatccaaccccttgaactcaaacctgtcgagcaaggggttaagagttctgttctcttgccaacctggctgggcaaaagcctgtgccatctttcactgggaggca

SEQ ID NO: 132164 - DNA, 120 bp, Artificial Sequence
  ENSG00000102802_14 (sequence is synthesized)
aatatgtttttcatcctgccatatgacacctatgagaaacgttcacagtgaggagtagccaggttgctaggacagtaaccctgccacacactgcctgaaatcggaactcccttggcctcc

SEQ ID NO: 132165 - DNA, 120 bp, Artificial Sequence
  ENSG00000102802_15 (sequence is synthesized)
ctcttaactaagtgacccatgtagaaggaagccaggagatatggtaccgaacaatgacaggggaagggtattggacacggcagcgtcctccttattgaaaacacattatgtcagttggga

SEQ ID NO: 132166 - DNA, 120 bp, Artificial Sequence
  ENSG00000102802_16 (sequence is synthesized)
attttaaataagcttttagcaaacctaacactaaaagcaaaatagaagaaagctataccattaccataatacatttttcatctcatggctacaatggaattcttgaaaaggaaaaaaaaa

SEQ ID NO: 132167 - DNA, 120 bp, Artificial Sequence
  ENSG00000102802_17 (sequence is synthesized)
tcctatctacatataaaaacctgcatgaatgaatcactacatatgcttataatgaggaagagttatgggtcctgagtgtaattttttatcctttcttaaaaagtttctgtattatgcatt

SEQ ID NO: 132168 - DNA, 120 bp, Artificial Sequence
  ENSG00000102802_18 (sequence is synthesized)
ttgataacactactgatgatccttccacttatatttgaaatgttatgtaccacatttgcacaattaaaacttttcttagcattcaacctagaattgattaaatttatgactgaggcttca

SEQ ID NO: 132169 - DNA, 120 bp, Artificial Sequence
  ENSG00000102804_0 (sequence is synthesized)
tggagcccggctgcggatctgggaagcgcctcttcacggcactgggatccgcatctgcctgggatcatcaagccctagaagctgggtttctttaaattagggctgccgttttctgtttct

SEQ ID NO: 132170 - DNA, 120 bp, Artificial Sequence
  ENSG00000102804_1 (sequence is synthesized)
ccctgggctgcggaaagccagaagattttatctagcttatacaaggctgctggtgttccctctttttttccacgagggtgtttttggctgcaattgcatgaaatcccaatggtgtagacc

SEQ ID NO: 132171 - DNA, 120 bp, Artificial Sequence
  ENSG00000102804_2 (sequence is synthesized)
agtggcgatggatctaggagtttaccaactgagacatttttcaatttctttcttgtcatccttgctggggactgaaaacgcttctgtgagacttgataatagctcctctggtgcaagtgt

SEQ ID NO: 132172 - DNA, 120 bp, Artificial Sequence
  ENSG00000102804_3 (sequence is synthesized)
ggtagctattgacaacaaaatcgagcaagctatggatctagtgaaaagccatttgatgtatgcggtcagagaagaagtggaggtcctcaaagagcaaatcaaagaactaatagagaaaaa

SEQ ID NO: 132173 - DNA, 120 bp, Artificial Sequence
  ENSG00000102804_4 (sequence is synthesized)
ttcccagctggagcaggagaacaatctgctgaagacactggccagtcctgagcagcttgcccagtttcaggcccagctgcagactggctccccccctgccaccacccagccacagggcac

SEQ ID NO: 132174 - DNA, 120 bp, Artificial Sequence
  ENSG00000102804_5 (sequence is synthesized)
cacacagccccccgcccagccagcatcgcagggctcaggaccaaccgcatagctgcctatgcccccgcagaactggctgctgcgtgtgaactgaacagacggagaagatgtgctagggag

SEQ ID NO: 132175 - DNA, 120 bp, Artificial Sequence
  ENSG00000102804_6 (sequence is synthesized)
aatctgcctccacagtcacccatttcattgctcgctgcgaaagagacgtgagactgacatatgccattatctcttttccagtattaaacactcatatgcttatggcttggagaaatttct

SEQ ID NO: 132176 - DNA, 120 bp, Artificial Sequence
  ENSG00000102804_7 (sequence is synthesized)
tagttgggtgaattaaaggttaatccgagaattagcatggatataccgggacctcatgcagcttggcagatatctgagaaatggtttaattcatgctcaggagctgtgtgcctttccatc

SEQ ID NO: 132177 - DNA, 120 bp, Artificial Sequence
  ENSG00000102804_8 (sequence is synthesized)
ccttccggctccctacccctcacttccaagggttctctctcctgcttgcgcttagtgtcctacatggggttgtgaagcgatggagctcctcactggactcgcctctctcctctcctcccc

SEQ ID NO: 132178 - DNA, 120 bp, Artificial Sequence
  ENSG00000102804_9 (sequence is synthesized)
ccaggaggaacttgaaaggagggtaaaaagactaaaatgagggggaacagagttcactgtacaaatttgacaactgtcaccaaaattcataaaaaacaatagtactgtgcctctttcttc

SEQ ID NO: 132179 - DNA, 120 bp, Artificial Sequence
  ENSG00000102804_10 (sequence is synthesized)
tcaaacaatggatgacacaaaactatgagagtgacaaaatggtgacaggtagctgggacctaggctatcttaccatgaaggttgttttgcttattgtatatttgtgtatgtagtgtaact

SEQ ID NO: 132180 - DNA, 120 bp, Artificial Sequence
  ENSG00000102804_11 (sequence is synthesized)
attttgtacaatagaggactgtaactactatttaggttgtacagattgaaatttagttgtttcattggctgtctgaggaggtgtggacttttatatatagatctacataaaaactgctac

SEQ ID NO: 132181 - DNA, 120 bp, Artificial Sequence
  ENSG00000102804_12 (sequence is synthesized)
atgacaaaaaccacacctaaagaaattttaagaatttggcacagttactcactttgtgtaatctgaaatctagctgctgaatacgctgaagtaaatccttgttcactgaagtctttcaat

SEQ ID NO: 132182 - DNA, 120 bp, Artificial Sequence
  ENSG00000102804_13 (sequence is synthesized)
ctttgaaaaatgctcagttctaactaatgaaatggatttcccagtaggggtttctgcatatcacctgtatagtagttatatgcatatgtttctgtgcatgttctctacacaattgtaagg

SEQ ID NO: 132183 - DNA, 120 bp, Artificial Sequence
  ENSG00000102804_14 (sequence is synthesized)
tgtcactgtatttaactgttgcacttgtcaactttcaataaagcatataaatgttgataaacaagtgtttttcatatgaccctgttaacataatggcagtcatttccacaactgtttcca

SEQ ID NO: 132184 - DNA, 120 bp, Artificial Sequence
  ENSG00000102804_15 (sequence is synthesized)
ggtaaagttaacaatttgactagtaaaatcctgaagggcagtggaatgattggaaaagtaggggcgtgatttgactgcatgaagtaaaaggaaattgacacattgagttgttcagcaggt

SEQ ID NO: 132185 - DNA, 120 bp, Artificial Sequence
  ENSG00000102804_16 (sequence is synthesized)
aagagaagagacagtggaggagtccagctcaattctaactactgtgtgacttggacaggttgcttcactcctggacggatgtaggggtttgaaagagatgatctcttacattcccctttg

SEQ ID NO: 132186 - DNA, 120 bp, Artificial Sequence
  ENSG00000102804_17 (sequence is synthesized)
gctttaaaattctaggagtccttgaaaatcttaattttttactgaactgagaggaagaaggagccttattctgtgtataattggaataagcagatctaggatcaaaagacggaagttgga

SEQ ID NO: 132187 - DNA, 120 bp, Artificial Sequence
  ENSG00000102804_18 (sequence is synthesized)
gaagctgatttccactttaagaaccctgtcaccctgggttgggatgtttctcctagtgtaggatgagtttctagctcctgggataattcgttttgtctaagcaaaagatgatttgaggtg

SEQ ID NO: 132188 - DNA, 120 bp, Artificial Sequence
  ENSG00000102804_19 (sequence is synthesized)
ggaccagatgagcaaggatgtccttgcagttgattctgcatgactataaaacaggccaaaattaaaaccacgaaggaatcctgaggcagattggcccctggcacctgaggagtgagcctg

SEQ ID NO: 132189 - DNA, 120 bp, Artificial Sequence
  ENSG00000102804_20 (sequence is synthesized)
agggatcccactctgcagtaggagtaacgtgagcgagcaagtgaatggggtgggtttaccggctctgtaatctatcaacctagggcctcagcagtggccccctgcccagtaggaattgga

SEQ ID NO: 132190 - DNA, 120 bp, Artificial Sequence
  ENSG00000102804_21 (sequence is synthesized)
ccaatcccaagttctaaggcttgtcttaagtccttgcagaacaaggacaaactttctgaatcattcatttctctcatctagagctggtgggagattgagaggtgaatgggacatccaaga

SEQ ID NO: 132191 - DNA, 120 bp, Artificial Sequence
  ENSG00000102804_22 (sequence is synthesized)
tccctaaaaagaattgttcgatagcgtgcatgtgttataaagtggtgacacgggcatcctgttgaaatgatggatggctcactgccataggctgatagcagttgtcataaagatattttg

SEQ ID NO: 132192 - DNA, 120 bp, Artificial Sequence
  ENSG00000102804_23 (sequence is synthesized)
ggggaatttgaaaaggacgtaaagaaaaatctttcatattggcttgttggttatataacttcaaatttaataaaggaatacttacgtagtaattacatttccttgaaaaaactatagtga

SEQ ID NO: 132193 - DNA, 120 bp, Artificial Sequence
  ENSG00000102804_24 (sequence is synthesized)
atagaaatccctagccatttcattttttatgtttttaatgaagatctttaaaataccataggtggtaatcgtggaaaatttgaaaaatctcatgtcagtgtattaagatggtggagaagt

SEQ ID NO: 132194 - DNA, 120 bp, Artificial Sequence
  ENSG00000102804_25 (sequence is synthesized)
ttttttctccattatttaatggaactttgggtctttttattaaaaatgtgagactcatgaaattttggcagctgaatatttgtgaaataagaatgaattattaaaagatgtctttccata

SEQ ID NO: 132195 - DNA, 120 bp, Artificial Sequence
  ENSG00000102804_26 (sequence is synthesized)
aaagtgaatggcgaaggactgaagggatccccccttcgggtccccggccgccctgttcaccctcgttcatcctcctttccgaagctcgctctcgaaggcaggagcgaccggcgcctttgg

SEQ ID NO: 132196 - DNA, 120 bp, Artificial Sequence
  ENSG00000102804_27 (sequence is synthesized)
ctgaggaggaggagaaggaggaatcgcgccaggcggagcgtcaggtcccgttttcctctccggcgtctccaatacaaagattacggtgcagaaggaaattgcactcgtctcctccgcgcc

SEQ ID NO: 132197 - DNA, 120 bp, Artificial Sequence
  ENSG00000102804_28 (sequence is synthesized)
cccggtacccaacacaatgcaccagccgcctgagtccaccgccgcggccgccgccgctgcagacattagcgctaggaagatggcgcacccggcaatgttccctcgaaggggcagcggtag

SEQ ID NO: 132198 - DNA, 120 bp, Artificial Sequence
  ENSG00000102804_29 (sequence is synthesized)
tggcagcgcctctgctctcaatgcagcaggtaccggcgtcggtagtaatgccacatcttccgaggattttccgcctccgtcgctgcttcagccgccgccccctgcagcatcttctacgtc

SEQ ID NO: 132199 - DNA, 120 bp, Artificial Sequence
  ENSG00000102804_30 (sequence is synthesized)
gggaccacagcctccgcctccacaaagcctgaacctcctttcgcaggctcagctgcaggcacagcctcttgcgccaggcggaactcaaatgaaaaagaaaagtggcttccagataactag

SEQ ID NO: 132200 - DNA, 120 bp, Artificial Sequence
  ENSG00000102804_31 (sequence is synthesized)
cgttactcctgctcagatctccgctagtatcagctctaacaacagtatagcagaggacactgagagctatgatgatctggatgaatctcacacggaagatctctcttcttcggagatcct

SEQ ID NO: 132201 - DNA, 120 bp, Artificial Sequence
  ENSG00000102804_32 (sequence is synthesized)
tgatgtgtcactttccagggctactgacttaggggagcccgaacgcagctcctcagaagagaccctaaataacttccaggaagccgagacacctggggcagtctctcccaaccagcccca

SEQ ID NO: 132202 - DNA, 120 bp, Artificial Sequence
  ENSG00000102804_33 (sequence is synthesized)
ccttcctcagcctcatttgcctcaccttccacaacagaatgttgtgatcaatgggaatgctcatccacaccacctccatcaccaccatcagattcatcatgggcaccacctccaacatgg

SEQ ID NO: 132203 - DNA, 120 bp, Artificial Sequence
  ENSG00000102804_34 (sequence is synthesized)
tcaccaccatccatctcatgttgctgtggccagtgcatccattactggtgggccaccctcaagcccagtatctagaaaactctctacaactggaagctctgacagtatcacaccagttgc

SEQ ID NO: 132204 - DNA, 120 bp, Artificial Sequence
  ENSG00000102804_35 (sequence is synthesized)
accaacttctgctgtatcatccagtggttcacctgcatctgtaatgactaatatgcgtgctccaagtactacaggtggaataggtataaattctgttactggcactagtacagtaaataa

SEQ ID NO: 132205 - DNA, 120 bp, Artificial Sequence
  ENSG00000102804_36 (sequence is synthesized)
tgttaacattactgctgtgggtagttttaatcctaatgtgacaagcagcatgcttggtaatgttaatataagtacaagcaatattcctagtgctgctggtgtgagtgttgggcctggagt

SEQ ID NO: 132206 - DNA, 120 bp, Artificial Sequence
  ENSG00000102804_37 (sequence is synthesized)
taccagtggtgttaatgtgaatatcttgagtggcatgggcaatggtactatttcttcctctgctgctgttagcagtgttcctaatgcagctgcagggatgactgggggatcggtttcaag

SEQ ID NO: 132207 - DNA, 120 bp, Artificial Sequence
  ENSG00000102804_38 (sequence is synthesized)
tcagcagcaacaaccaacagttaacacttcgaggttcagagttgtgaagttagattctagttctgagccctttaaaaaaggtagatggacttgcactgagttctatgaaaaagaaaatgc

SEQ ID NO: 132208 - DNA, 120 bp, Artificial Sequence
  ENSG00000102804_39 (sequence is synthesized)
tgtacctgctacagaaggtgtgctgataaataaagtggtggagactgtaaagcaaaatccgatagaagtgacttctgaaagggagagcactagtgggagttcagtgagcagtagtgtcag

SEQ ID NO: 132209 - DNA, 120 bp, Artificial Sequence
  ENSG00000102804_40 (sequence is synthesized)
cacactgagtcactatacagagagtgtgggaagtggagagatgggagcccctactgtggtggtgcagcagcagcagcagcaacaacaacaacaacagcaacaaccagctctccaaggtgt

SEQ ID NO: 132210 - DNA, 120 bp, Artificial Sequence
  ENSG00000102804_41 (sequence is synthesized)
gaccctccaacagatggattttggtagcactggtccacagagtattccagcagttagtataccacagagtatttctcagtcacagatctcacaagtacaattacagtctcaagaactgag

SEQ ID NO: 132211 - DNA, 120 bp, Artificial Sequence
  ENSG00000102804_42 (sequence is synthesized)
ctatcagcaaaagcaaggtcttcagccagtacctctgcaagccactatgagtgctgcaactggtatccagccatcgcctgtaaatgtggttggtgtaacttcagctttaggtcagcagcc

SEQ ID NO: 132212 - DNA, 120 bp, Artificial Sequence
  ENSG00000102804_43 (sequence is synthesized)
ttccatttccagtttggctcaaccccagctaccatattctcaggcggctcctccagtgcaaactccccttccaggggcaccaccaccccaacagttacagtatggacaacagcaaccaat

SEQ ID NO: 132213 - DNA, 120 bp, Artificial Sequence
  ENSG00000102804_44 (sequence is synthesized)
ggtttctacacagatggccccaggccatgtcaaatcagtgactcaaaatcctgcttcagagtatgtacaacagcagccaattcttcaaacagcaatgtcctccggacagcccagttctgc

SEQ ID NO: 132214 - DNA, 120 bp, Artificial Sequence
  ENSG00000102804_45 (sequence is synthesized)
aggagtaggagcaggaacaacagtgattcctgtggctcagccacagggtatccagctgccagtgcagcccacagcagtcccagcacaacctgcaggggcatctgtccagcctgttggcca

SEQ ID NO: 132215 - DNA, 120 bp, Artificial Sequence
  ENSG00000102804_46 (sequence is synthesized)
ggctccggcagcagtgtctgctgtacctactggcagtcagattgcaaatattggtcagcaagcaaacatacctactgcagtgcagcagccctctacccaggttccaccttcagttattca

SEQ ID NO: 132216 - DNA, 120 bp, Artificial Sequence
  ENSG00000102804_47 (sequence is synthesized)
gcagggtgctcctccatcttcgcaagtggttccacctgctcaaactgggattattcatcagggagttcaaactagtgctccaagccttcctcaacaattggttattgcatcccaaagttc

SEQ ID NO: 132217 - DNA, 120 bp, Artificial Sequence
  ENSG00000102804_48 (sequence is synthesized)
cttgttaactgtgcctccccagccacaaggagtagaaccagtagctcaaggaattgtttcacagcagttgcctgcagttagttctttgccctctgctagtagtatttctgttacaagtca

SEQ ID NO: 132218 - DNA, 120 bp, Artificial Sequence
  ENSG00000102804_49 (sequence is synthesized)
ggttagttcaactggtccttctggaatgccttctgccccaacaaacttggttccaccacaaaatatagcacaaacccctgctacccaaaatggtaatttggttcaaagtgttagtcaacc

SEQ ID NO: 132219 - DNA, 120 bp, Artificial Sequence
  ENSG00000102804_50 (sequence is synthesized)
agctcaggcaattggaagccaaattgaagatgccaggcgtgcagcggagccctccttagttggcttacctcagactatcagtggtgacagtgggggaatgtcagcagtttcagatgggag

SEQ ID NO: 132220 - DNA, 120 bp, Artificial Sequence
  ENSG00000102804_51 (sequence is synthesized)
ttctcttttcccgttgaaggtgctaccgctgacgacacccctggtggatggcgaggatgagagtgcttctctcctaccagaggtgcaaggagtgatcctagaaccacagatacagccaag

SEQ ID NO: 132221 - DNA, 120 bp, Artificial Sequence
  ENSG00000102804_52 (sequence is synthesized)
accacggagagcttttgacgtcaggggtccactttctccactgaacccttggagacagaatatccagcttctggagagagtgggaaaggataataaacaaatttctttcaactggtaaaa

SEQ ID NO: 132222 - DNA, 120 bp, Artificial Sequence
  ENSG00000102804_53 (sequence is synthesized)
catgccagcacctgcagtttggaaggcagtggtgaatggatccatgcaatatgtctagaagacacaaggatgagccagccacctgatcttgtcatttataaacttttaagaattactctg

SEQ ID NO: 132223 - DNA, 120 bp, Artificial Sequence
  ENSG00000102804_54 (sequence is synthesized)
gtttacttttggtctgaaaatggaaaggcccaaataatgaaataatcttttcagattggaattttacatggccatgaaaatatttctttctattcagaagactgaaatagaggaagcttg

SEQ ID NO: 132224 - DNA, 120 bp, Artificial Sequence
  ENSG00000102804_55 (sequence is synthesized)
agagactcctttcttttaaaagcggctctctgtatctgtttcatttaaaacatttgtgggattgaaaatcaccttaatgaagtaggcaaacatttttttaagtagtagaggaagtccaga

SEQ ID NO: 132225 - DNA, 120 bp, Artificial Sequence
  ENSG00000102804_56 (sequence is synthesized)
aaacttaatgaaatggttttttttgttgcctgacactgaaagtaactagtaaataaagggtgaacttcttaattattcgaaaactgcttttaatattaggatatactcttttagctcatc

SEQ ID NO: 132226 - DNA, 120 bp, Artificial Sequence
  ENSG00000102804_57 (sequence is synthesized)
agcgcggggcggggcctgggggcggggacgcggtgggcgcgctgtggcttggacgtccccgctgctggtctcagtcggggacccagcgcccggctctggcccagtctcaggaagccttac

SEQ ID NO: 132227 - DNA, 120 bp, Artificial Sequence
  ENSG00000102804_58 (sequence is synthesized)
agcgcccggctctggcccagtctcaggaagccttacttgggcgtttctggccaacgtctgcagagaagcacagacttttacaaagcttgatcatttatacgttaaactcaagtattgtac

SEQ ID NO: 132228 - DNA, 120 bp, Artificial Sequence
  ENSG00000102804_59 (sequence is synthesized)
gtagctcctttttatcctgaggattaagccattacaaactcaaatgaccagagaatgtaatttcttaataagaatttttccttaaatctatattcagctctctatttcagtgcttctctc

SEQ ID NO: 132229 - DNA, 120 bp, Artificial Sequence
  ENSG00000102804_60 (sequence is synthesized)
ccgggggtggcgaggggaaggcgacatttgcttggcgctgcctccgtgcagagcggccgggagggctttgcagcggccgccgacgcggcgggaggagggggctgaggcggcttcggagtt

SEQ ID NO: 132230 - DNA, 120 bp, Artificial Sequence
  ENSG00000102804_61 (sequence is synthesized)
gaattcctttgtccattgctgagagattatggtgacatggatgttgtttttcgaaatgttaaaaaaccttatttttgcaagtctggccagagaacaggctttccccacattatgtaattt

SEQ ID NO: 132231 - DNA, 120 bp, Artificial Sequence
  ENSG00000102804_62 (sequence is synthesized)
agtcctttgtggcttactaaaatagggagatgcctggatattcgttagtaagagaggggctggcattttctggagggtgatacattacatagtgttaaataacattcaaaatatgatgct

SEQ ID NO: 132232 - DNA, 120 bp, Artificial Sequence
  ENSG00000102804_63 (sequence is synthesized)
cgctgcaccagcccgtctggccaccaacgccgcggagaaaggagccgccgccgcctgcggccctctcccgcccggtcgcgggagcagcgggctcgctctcgaaggcaggagcgaccggcg

SEQ ID NO: 132233 - DNA, 120 bp, Artificial Sequence
  ENSG00000102804_64 (sequence is synthesized)
aagcttttcctatagtctagtgataatcctgcttaccgctgccggtaagaactagataattgaaatcaagacactcgaagtcttacagtggtgggactgggcatgcccagtagctcagac

SEQ ID NO: 132234 - DNA, 120 bp, Artificial Sequence
  ENSG00000102804_65 (sequence is synthesized)
tgacaacaaaatcgagcaagctatggtatgtactgatgaaaaatcatttatactaaatgtgggcacagcacaaaaataagatgttttgtggaaccagtgcatccctaagttcagatgatg

SEQ ID NO: 132235 - DNA, 120 bp, Artificial Sequence
  ENSG00000102805_0 (sequence is synthesized)
atgcgccggaacctgcgcttggggccaagctctggagctgacgcgcaggggcaaggcgccccgcgtcccggactggcggctccgcgcatgctcctcccaccggcgtcgcaggcctcgaga

SEQ ID NO: 132236 - DNA, 120 bp, Artificial Sequence
  ENSG00000102805_1 (sequence is synthesized)
ggctccggaagtactgggtgcagcctgatggcgcaggaggtagacacggcacagggcgccgagatgcggcggggcgcgggcgcggctcggggacgcgcttcctggtgctgggccctggcg

SEQ ID NO: 132237 - DNA, 120 bp, Artificial Sequence
  ENSG00000102805_2 (sequence is synthesized)
ctgctttggctcgcggtggttccgggctggtcccgggtctcgggcatcccctcccggcgccactggccggtgccctacaagcgctttgacttccgtccaaaacctgatccttattgtcaa

SEQ ID NO: 132238 - DNA, 120 bp, Artificial Sequence
  ENSG00000102805_3 (sequence is synthesized)
gctaagtatactttctgtccaactggctcacctatcccagttatggagggtgatgatgacattgaagtttttcgattacaagccccagtatgggaatttaaatatggagacctcctggga

SEQ ID NO: 132239 - DNA, 120 bp, Artificial Sequence
  ENSG00000102805_4 (sequence is synthesized)
cacttgaaaattatgcatgatgccattggattcagaagtacattaactggcaagaactacacaatggaatggtatgaacttttccaacttggcaactgtacatttccccatctccgacct

SEQ ID NO: 132240 - DNA, 120 bp, Artificial Sequence
  ENSG00000102805_5 (sequence is synthesized)
aatcaaggcgctgcctgcttttttgagggaattgatgatgttcactggaaggaaaatgggacattagttcaagtagcaactatatcaggaaacatgttcaaccaaatggcaaagtgggtg

SEQ ID NO: 132241 - DNA, 120 bp, Artificial Sequence
  ENSG00000102805_6 (sequence is synthesized)
aaacaggacaatgaaacaggaatttattatgagacatggaatgtaaaagccagcccagaaaagggggcagagacatggtttgattcctacgactgttccaaatttgtgttaaggaccttt

SEQ ID NO: 132242 - DNA, 120 bp, Artificial Sequence
  ENSG00000102805_7 (sequence is synthesized)
aacaagttggctgaatttggagcagagttcaagaacatagaaaccaactatacaagaatatttctttacagtggagaacctacttatctgggaaatgaaacatctgtttttgggccaaca

SEQ ID NO: 132243 - DNA, 120 bp, Artificial Sequence
  ENSG00000102805_8 (sequence is synthesized)
ggaaacaagactcttggtttagccataaaaagattttattaccccttcaaaccacatttgccaactaaagaatttctgttgagtctcttgcaaatttttgatgcagtgattgtgcacaaa

SEQ ID NO: 132244 - DNA, 120 bp, Artificial Sequence
  ENSG00000102805_9 (sequence is synthesized)
cagttctatttgttttataattttgaatattggtttttacctatgaaattcccttttattaaaataacatatgaagaaatccctttacctatcagaaacaaaacactctctggtttataa

SEQ ID NO: 132245 - DNA, 120 bp, Artificial Sequence
  ENSG00000102805_10 (sequence is synthesized)
tggtttcaatttccgagcctttgttaatatggagaattatggttcatatcagttatgtaggacctttggacccagggtcctacagatagatatggtgtgcccagattttaaaaatacctt

SEQ ID NO: 132246 - DNA, 120 bp, Artificial Sequence
  ENSG00000102805_11 (sequence is synthesized)
caaaaataaaaaatacattcagtgacattttcatggtgggagctcttctttctgatatggcagttacactttttcacttaagtgctttagtttagactaactttacaacttctataactt

SEQ ID NO: 132247 - DNA, 120 bp, Artificial Sequence
  ENSG00000102805_12 (sequence is synthesized)
ttggaaccaagtttagtatagtctgattacattccattcacctaactttagacattcgtttagacaccataactggagtgattgtgcttctagatgtggcaaatccagtgttaacacata

SEQ ID NO: 132248 - DNA, 120 bp, Artificial Sequence
  ENSG00000102805_13 (sequence is synthesized)
tttctggctgagattttggaactagctagtaactggcttgtgttctttaagcatactaacatcactaaatcttaggatttaggattgctgtaaagatgtaagttgtgtatgtttggcagg

SEQ ID NO: 132249 - DNA, 120 bp, Artificial Sequence
  ENSG00000102805_14 (sequence is synthesized)
tcacattgaatggcagtgataatgattaatcaaagaacaaatgtcatccttgatcttgcctaatgtagtttatgtgccaaactttccagggttttgtagtcacctagattttaagctgat

SEQ ID NO: 132250 - DNA, 120 bp, Artificial Sequence
  ENSG00000102805_15 (sequence is synthesized)
agcatagtgcttcagcggttcttctaaccggggtatgcaggaacatggctgcagacacgtttgggtaaacaggcaccttctgacttcttcattgtttcctgtagttctccctcttcccac

SEQ ID NO: 132251 - DNA, 120 bp, Artificial Sequence
  ENSG00000102805_16 (sequence is synthesized)
aaagctgtcagcgcagtggaagaggttgcacttctccgagagaggacaggtttctgttaagatcaccaagtagctgtgctttaattagagccagacaagctttcaaggtcctttaagtat

SEQ ID NO: 132252 - DNA, 120 bp, Artificial Sequence
  ENSG00000102805_17 (sequence is synthesized)
ttgatgatcaactgaacacgtttctattcaaggagaaaacaccattcagtaagaagatggagtagatatcagataaaacaattcacgtttaatatgtaaatgtaccaattatgtgattca

SEQ ID NO: 132253 - DNA, 120 bp, Artificial Sequence
  ENSG00000102805_18 (sequence is synthesized)
gtttcaactttcaagtacttcctgagaggttagtacattattattgagctctcacagaaagcttaatcatagatataattaacctgatccaaatgagtaaagtggaccttagaaaggcta

SEQ ID NO: 132254 - DNA, 120 bp, Artificial Sequence
  ENSG00000102805_19 (sequence is synthesized)
agtgatctttctctggctatccagctagtagtaatgaagtcaggtcttgaaccccggttctgctgactgaattggatgcactatagtacaggcttttagcaccgaagtgtggtcctcaga

SEQ ID NO: 132255 - DNA, 120 bp, Artificial Sequence
  ENSG00000102805_20 (sequence is synthesized)
ccagtgcctgccaaccagatgttactggtctgtgaggaaataagtacagatactgacaggaagcttttataaacaatttattggagtgtttttgtttctgttgggtctaattaaaaaaat

SEQ ID NO: 132256 - DNA, 120 bp, Artificial Sequence
  ENSG00000102805_21 (sequence is synthesized)
tttttttttttttttaaagctgttcctgctgattgctttttaagctaggctcaagtgtggggccacggaatccttcaggtgcccttcaaatcagacattacatttcagctctcagggcta

SEQ ID NO: 132257 - DNA, 120 bp, Artificial Sequence
  ENSG00000102805_22 (sequence is synthesized)
gaatgcttccccctcttatcttgggcaggtctttgaagaagccagtttagccttggtaattttgaatttggccatagtatacggaggagagctaggtagctatcaaaacgcttagacaaa

SEQ ID NO: 132258 - DNA, 120 bp, Artificial Sequence
  ENSG00000102805_23 (sequence is synthesized)
cgtatggtaaaatgcagcccagcctgaacctccgcaaaacccccaaacctggagcagcaagtgggcaaaggagtgtgtgtttggggcagggtactgagtcccatatgtaatcaagagacc

SEQ ID NO: 132259 - DNA, 120 bp, Artificial Sequence
  ENSG00000102805_24 (sequence is synthesized)
tggagggcccaaggaagtcagtgacacccccacaagctacatatcctccaatggattgtggtggtcatctccggctaccgaagccaccttgcttattcccataggcttacaaacattatg

SEQ ID NO: 132260 - DNA, 120 bp, Artificial Sequence
  ENSG00000102805_25 (sequence is synthesized)
atgcttcacacgagttgtgggtgaagtgaaggaattggaaagtcccggtctaaggccctgcaaaactgctgtctggtaaaaacaagtgactatggcaaggccctgaatgtactacgtata

SEQ ID NO: 132261 - DNA, 120 bp, Artificial Sequence
  ENSG00000102805_26 (sequence is synthesized)
gacttaagtcagtatttgtgcctaacagcaaagcatgccacaagaggctcctcaaaagccgggtaattgatgccattgttttcttgacctagttgaagagtcaaagaagagaaggtgatg

SEQ ID NO: 132262 - DNA, 120 bp, Artificial Sequence
  ENSG00000102805_27 (sequence is synthesized)
cagaaacttctttccagtgaagtgacagatccaagcaaggaacacctgcctgtgaggggagcggtaggggagggggtagattcggcagcactcgggtagtggcagggaccacatattgtc

SEQ ID NO: 132263 - DNA, 120 bp, Artificial Sequence
  ENSG00000102805_28 (sequence is synthesized)
ggtgttaaccactgttatcactggcccaggtcgagtgaggacgagtcatttccccactaagcacttggggagtggcagggaccacatattgtcagtgttaaccactgttatgactggccc

SEQ ID NO: 132264 - DNA, 120 bp, Artificial Sequence
  ENSG00000102805_29 (sequence is synthesized)
aggtcgggtgacgacgagccatttccgcactattgtcccttcttcctcactgcacccccagccctgcaccctcagctccaaatacacattctcgttcactcaacgtttgttgacacctag

SEQ ID NO: 132265 - DNA, 120 bp, Artificial Sequence
  ENSG00000102805_30 (sequence is synthesized)
cgtgggccctgtgggatggggtaaaagttcggtgttgggaggagccccggtgacagatttttggttttggtggtggcttttgggcaaggacaggtcaattcataaaagatgacgccccag

SEQ ID NO: 132266 - DNA, 120 bp, Artificial Sequence
  ENSG00000102805_31 (sequence is synthesized)
ccttaattctactgctcttttttctccaatcaccagcatctgtttttcagggggtgattttacttttgtgaattccttagcctttcttccttggtgcataaagttaaaatgcacatcagc

SEQ ID NO: 132267 - DNA, 120 bp, Artificial Sequence
  ENSG00000102805_32 (sequence is synthesized)
tctgaaaataacccagtcaccagatatcttcctcaaatacagagggagaactttctttcacgcctcctttagcctgtcgactccttataataatgcctaaatattccaaattaatactgc

SEQ ID NO: 132268 - DNA, 120 bp, Artificial Sequence
  ENSG00000102805_33 (sequence is synthesized)
ctctttaacctgctaattgttttcacaatgttacaagaaaacttggatctgtgcattatcaccatctagtggctaaactcaggcaacacgaacttctaccaaactcaggaaattgctctg

SEQ ID NO: 132269 - DNA, 120 bp, Artificial Sequence
  ENSG00000102805_34 (sequence is synthesized)
gaaaaactacaggattttggatttccagaactgccttgaagagacaaagattcttgtaccaagttttggtcaactgcaaatcaaagaacttggttatgcagggaaaacaaatgaggatat

SEQ ID NO: 132270 - DNA, 120 bp, Artificial Sequence
  ENSG00000102805_35 (sequence is synthesized)
ctgtacctggaacttttaaacaagattctaatagttatgtgaaaaaagcattcaagatttttgagtaggcacagtggcttacgcctgtaatcctatcactttgcgaaactgaggtggtgg

SEQ ID NO: 132271 - DNA, 90 bp, Artificial Sequence
  ENSG00000102805_36 (sequence is synthesized)
gcctggccaatgtggtgaaaccccgtttctcctaaaattaaaaaaaaaaaaaaaaagctagggacgtgaggctaaggcaggagaatcact

SEQ ID NO: 132272 - DNA, 120 bp, Artificial Sequence
  ENSG00000102805_37 (sequence is synthesized)
aaagcattcaagatttttcattgttcctaagaatcttaattaaatgaagacagaaagcatcataaagtcaggtaactacagcacagacagcattaacatttacaaaagtatttcttaaga

SEQ ID NO: 132273 - DNA, 120 bp, Artificial Sequence
  ENSG00000102805_38 (sequence is synthesized)
attaaacctgtcagctctacttacaagatgtagagctttcaggtgaagatgattcaagaacatgctttcaaaatagtagttgagaaaccaaaacatagccacgcagaaatctgccaatta

SEQ ID NO: 132274 - DNA, 120 bp, Artificial Sequence
  ENSG00000102805_39 (sequence is synthesized)
agttttgctgccctttgagcaatatgacttaatgtgatttactttaattataacttaagtacaacttaaatgcagtttctattttgctattgttatagatgtaggctgggtgcggtggct

SEQ ID NO: 132275 - DNA, 120 bp, Artificial Sequence
  ENSG00000102805_40 (sequence is synthesized)
acagagtgagactccgtctcaaaaaaatgttgtagatgtataaaatttatacatttttagtctgactagggctttagagtgaatatatctcctcattaatctggcacaaaattagttaag

SEQ ID NO: 132276 - DNA, 120 bp, Artificial Sequence
  ENSG00000102805_41 (sequence is synthesized)
tagttaagtaagtatacccacaaagtgtcatctaatatattgttgcatgtagaggaaaacacagtgaagaaacctactaactttatttggaaccctcaatattggtggctccttaaaaat

SEQ ID NO: 132277 - DNA, 120 bp, Artificial Sequence
  ENSG00000102805_42 (sequence is synthesized)
tggagaaaaaaatcaagtcttaggaagtcttatccagttttatggtctgctgtggtggcacttaatgaattacctggaattatagttcctgtaagatgttttattttttaaatagttggc

SEQ ID NO: 132278 - DNA, 120 bp, Artificial Sequence
  ENSG00000102805_43 (sequence is synthesized)
aggctatacaaagagtgatgttccaaaactacacacatgctttttccctgttcacaaaggcaaacaggctggccaaagtgtttccagcatcttcgtcatatttaccctttattatccaag

SEQ ID NO: 132279 - DNA, 120 bp, Artificial Sequence
  ENSG00000102805_44 (sequence is synthesized)
tggtttcctgctcttcaaaccttcctttcaaaattttgtctcctacttaaaacaagttaggattatttatccttttattggactgattattctaaggataagctcttacttcactttcgg

SEQ ID NO: 132280 - DNA, 120 bp, Artificial Sequence
  ENSG00000102805_45 (sequence is synthesized)
agtaaaaggctttgtgccctttttaaagttgggtgtcagcaagcagctggaattttcctgcctggtaaaattaaaaccagccccacaaactggggttggagtctgtgcaaagctcattac

SEQ ID NO: 132281 - DNA, 120 bp, Artificial Sequence
  ENSG00000102805_46 (sequence is synthesized)
tatctatgtgtggggtagaaattatagtgtgttaaaggacctagtgtaaaaaaaaaaaattttaaaggacctagtggaggcttgaaccttcttcacatgaacgtcttcctttcagcctaa

SEQ ID NO: 132282 - DNA, 120 bp, Artificial Sequence
  ENSG00000102805_47 (sequence is synthesized)
agttcttaaaatgcactaaattgacttaatcttcaatcatacctattttttctgatatggttacaacagcccaaattaccaagataagttgaaagccagtaaaacaatgaaaataatttc

SEQ ID NO: 132283 - DNA, 120 bp, Artificial Sequence
  ENSG00000102805_48 (sequence is synthesized)
aatagttgaaaaactattctaatttatataaagacatttatctctaaaaagactggttgggttcaaggacccttaaagactgattctatgtctaaataatctgttttataagttctcatt

SEQ ID NO: 132284 - DNA, 120 bp, Artificial Sequence
  ENSG00000102805_49 (sequence is synthesized)
ctgaatgcagaaagaacctattattttctgtataaaaatttaaaaatttatatttcatggtaggttttaaatttcctatttctttaggcatcagagcttatttcaagaatagattccatg

SEQ ID NO: 132285 - DNA, 120 bp, Artificial Sequence
  ENSG00000102805_50 (sequence is synthesized)
tgcggggacagcgccgggtgacgctcggagcgcacttgagagcaaagttgaggactggggagtcgcagccgctcgttacgtgcagccctgggacctttcgtcccctctggtcacttgcgg

SEQ ID NO: 132286 - DNA, 120 bp, Artificial Sequence
  ENSG00000102805_51 (sequence is synthesized)
cagactcaggacagtcctgaatcgtggaagaagaaaaggagagtaatgttatttaatggagggacttctgggtacaagtagctgatttcttgagtagtttaaaaacactgtctatcgcat

SEQ ID NO: 132287 - DNA, 120 bp, Artificial Sequence
  ENSG00000102805_52 (sequence is synthesized)
ttatttatatcatgcactgtcgttagttattaccgcggaacatttggtacaatttactgggcgaccaactcgctctggtttgaacctgatcagaacctgatccgaagtccttattgggac

SEQ ID NO: 132288 - DNA, 120 bp, Artificial Sequence
  ENSG00000102805_53 (sequence is synthesized)
ttcccagttttgccctcaaaagtcgcgcatcccgggaatccccgtctcctgcagtcctggttagaccgggaagattgtcaccgcttttgtccagtcttcagcctggaggcgctttgactt

SEQ ID NO: 132289 - DNA, 120 bp, Artificial Sequence
  ENSG00000102805_54 (sequence is synthesized)
gcacagagaggttaaagttacacagcttagtaagtgggactccaaccctggcagttacgccccattgcccattctcctaactactttgatacattgcctcccaaaatgtatatgatctta

SEQ ID NO: 132290 - DNA, 120 bp, Artificial Sequence
  ENSG00000102805_55 (sequence is synthesized)
tatttgagaccctcttgagcagtttaaatattttatctttgagatttttttcttcttttggatgtattggaaagttgctgaaagttggaattgtgttgcaagtgctgcattgttggttag

SEQ ID NO: 132291 - DNA, 120 bp, Artificial Sequence
  ENSG00000102805_56 (sequence is synthesized)
taatgaaaagagttcagcaatcctttcattggtaactccttatgtgacttgggtcacattttatatcttattggcccgttgcctcatgtgcaaaatggagacaatataccatagcatttg

SEQ ID NO: 132292 - DNA, 120 bp, Artificial Sequence
  ENSG00000102805_57 (sequence is synthesized)
agaagtaaggagcttgtccatatgatttatgaagcattacattataaattgctgttccccagaacagtagaaacatctgaaatgaaagcactgttgtgacaataattattcagtgaaccc

SEQ ID NO: 132293 - DNA, 120 bp, Artificial Sequence
  ENSG00000102805_58 (sequence is synthesized)
caggacttgaggaagtaatcatgcttcctatttgtatagctctttacaaatgatttggaggtatgttaactcacggttcagtggagaggataagatactcattctctgcaaataaggaat

SEQ ID NO: 132294 - DNA, 120 bp, Artificial Sequence
  ENSG00000102805_59 (sequence is synthesized)
tgaggctcagccaggtaacatgacttacttgcctctcaaggtcaaagagctggatgtagcagaatcaggaataaaactgaggtcttttaaatgtaacaaggatctgttagccgaatgcac

SEQ ID NO: 132295 - DNA, 120 bp, Artificial Sequence
  ENSG00000102805_60 (sequence is synthesized)
catgttgttttctaatatttcctgctactttctaatcaatgtgccttaaaccataccaacaatacaaaagtccatcattagcggttctttctttcattccaggccagttcacacctttcc

SEQ ID NO: 132296 - DNA, 120 bp, Artificial Sequence
  ENSG00000102805_61 (sequence is synthesized)
ccatttccacctacatcgttatctgaaaatccttccttctgacataaagtcaatgatcatatgaataagtgatcactattttttgtaaaatagttcaaaatatgccagtacttaaatctt

SEQ ID NO: 132297 - DNA, 120 bp, Artificial Sequence
  ENSG00000102805_62 (sequence is synthesized)
ttaagtcatttatttgccttgtgaataatcctgtgattgacaaaatagtgttttgaagcattcttgtctcataaggatagtggtggcatttgaaagttgaagaatgctaagaacagtatc

SEQ ID NO: 132298 - DNA, 120 bp, Artificial Sequence
  ENSG00000102805_63 (sequence is synthesized)
cccagttctaatacaacaggctttattctgttctacaattttaattccataaaattgataaaggcagtcactctattcattttacagaacatgaagtatttattttatggactcaagttg

SEQ ID NO: 132299 - DNA, 120 bp, Artificial Sequence
  ENSG00000102805_64 (sequence is synthesized)
gagtaaccaaagaggtttgcacacagtgacaggatgcagtgtttggggcccagttctattaggcattataaatgcccaagatgagagttgtaaccatgcagagtagtgttttctgaatat

SEQ ID NO: 132300 - DNA, 120 bp, Artificial Sequence
  ENSG00000102805_65 (sequence is synthesized)
ttggaaagattcttctggtctagtacaagatggtagaagagagggttagccatcctggagtatgaactcggcctaaaacatttccagtttagttgatttgttggaaggacttaacgtggc

SEQ ID NO: 132301 - DNA, 120 bp, Artificial Sequence
  ENSG00000102805_66 (sequence is synthesized)
aggtggagaggtcatcagcagcatcccagcaactccaagtacagggaagaaagaaacgtaccaaacacacaaggtggatggggtatggtgcttgttctcataacagtaatagccagcctt

SEQ ID NO: 132302 - DNA, 120 bp, Artificial Sequence
  ENSG00000102805_67 (sequence is synthesized)
ctagagcagtggctcctcaggcagccattcatactttatgtgtagcatgctttgcaacagtgaagctccacatttcccacacctccattttccttacactgtctttgcccattctgcttt

SEQ ID NO: 132303 - DNA, 120 bp, Artificial Sequence
  ENSG00000102805_68 (sequence is synthesized)
tcctctttcgcaattctttttgtgctttccttttctcttttgcctctgaatccaagatttggtgagttgggtagagaaagagagcttctgcatttgtataatttcgctttgactatagct

SEQ ID NO: 132304 - DNA, 120 bp, Artificial Sequence
  ENSG00000102805_69 (sequence is synthesized)
taaatgattatagaattagtatgtaagatgacttctccttatacacctattatatctaatgtttataattcagaaatatcttgtgccttgaagaatggaataaaattggctgagcttgga

SEQ ID NO: 132305 - DNA, 120 bp, Artificial Sequence
  ENSG00000102805_70 (sequence is synthesized)
gcatcttggtcttataactttggttaattcaatgatttggttattaagttgatttttaaggagtaatcactatttagatggctgactttagatcatgttggtgtttgtcttagtacattt

SEQ ID NO: 132306 - DNA, 120 bp, Artificial Sequence
  ENSG00000102805_71 (sequence is synthesized)
aaaatgagtagtcaaaaatagttactatcagattttgtaatcttgacaacaacaaatgtaatcaccattatccattgtaatattatgaatctgaaaccagctcctgtacctagctcctgg

SEQ ID NO: 132307 - DNA, 120 bp, Artificial Sequence
  ENSG00000102805_72 (sequence is synthesized)
aaggtgagaagaggcccagaagtggcagggcaggcaggtaacacctcttgatttccatactctgttgtagtcacttttccaggttaacccatcaccatgtgaggtctgtagagctgcttc

SEQ ID NO: 132308 - DNA, 120 bp, Artificial Sequence
  ENSG00000102805_73 (sequence is synthesized)
cagagactggcatgggggctcctcacacttattctaagctctaaggaaattatcagcttgtccacataacatgcaggcctcctatttgagatgagccaaataggggtgtagtggccaaag

SEQ ID NO: 132309 - DNA, 120 bp, Artificial Sequence
  ENSG00000102805_74 (sequence is synthesized)
ctggggtggatgagggcctggagtttggggccacagagtggatatgacagtagcagcatggaagaacagctgaacagttgttctacttgatatgcatttgtgatgtgccacattttctcc

SEQ ID NO: 132310 - DNA, 120 bp, Artificial Sequence
  ENSG00000102805_75 (sequence is synthesized)
cacagagaaagaaaacatggtgtcaacatcaggcaggagaaagaccagcagtttttgaaaacagctatttttctttaaaccaaaagcatcattggacataattttaacttactagcataa

SEQ ID NO: 132311 - DNA, 120 bp, Artificial Sequence
  ENSG00000102805_76 (sequence is synthesized)
gtaatcaacagctaaaactgcacacaacaaacctgaaaaaaacagctattttgtatgacagtatgagtgggaaggagttctgcctgctgcgggtcaaatctggctctgtcatcaccaggg

SEQ ID NO: 132312 - DNA, 120 bp, Artificial Sequence
  ENSG00000102805_77 (sequence is synthesized)
atcttgggaaagttactcagaatctctgtgcccacatgccctgagtcaaaaaataggaatagtggtagcacgtacctcataggtttgctggaaggattaaatctagtaaaatgccagctg

SEQ ID NO: 132313 - DNA, 120 bp, Artificial Sequence
  ENSG00000102805_78 (sequence is synthesized)
ttgtcaaacctagatagtgtattctgctcactgaaatgtttacaacacttttttgttttgtgtgatatactacgtggaaagagaagtttgtggttgaagctagttttctggaaaatgtta

SEQ ID NO: 132314 - DNA, 120 bp, Artificial Sequence
  ENSG00000102805_79 (sequence is synthesized)
ataataaaatgtttgtaagaagtcaaaattactcaatagaacaagaattgtaaatccaaacgatttgatttaacattagggcaaggtgttgactatggctttttagtggatttttttttt

SEQ ID NO: 132315 - DNA, 120 bp, Artificial Sequence
  ENSG00000102805_80 (sequence is synthesized)
tgtcagtgaaatctccatgtgattatgtatttgtttaaaccaggtaagtgcctataaaacactgtacccaagtagcagaaacttttgggagcgtcgttaatagtttcgattagcataaag

SEQ ID NO: 132316 - DNA, 120 bp, Artificial Sequence
  ENSG00000102805_81 (sequence is synthesized)
attttaacttcttaagttaaaatagaaatttttgttgatttgttaagatttgttagatctggctacaaccttggggatctaggattcttagatagaagctgttgtcgccaccacttcttt

SEQ ID NO: 132317 - DNA, 120 bp, Artificial Sequence
  ENSG00000102805_82 (sequence is synthesized)
ctttcccagtgccagattataggtgaccagtgtgtctgttgagctgaattcagctgcagtgcccctcgagtcctattgctgtggccttctccggtcttcttttcttgcctgcattgttga

SEQ ID NO: 132318 - DNA, 120 bp, Artificial Sequence
  ENSG00000102805_83 (sequence is synthesized)
ggtcaccttctaactgatctctcatgttttatttggcctctctccataccctcttttaattcgtgaaataaggtttactttatagcaaattcagtcctgtcagatctgctacttaacatc

SEQ ID NO: 132319 - DNA, 120 bp, Artificial Sequence
  ENSG00000102805_84 (sequence is synthesized)
ctttaagtttagccctccccaattataaggcagggaattccatgcacattctcctagtgacaaaatgacagcccctgccagtctcttccgtctccattcctgcgtcgaggcctgaaatcc

SEQ ID NO: 132320 - DNA, 120 bp, Artificial Sequence
  ENSG00000102805_85 (sequence is synthesized)
agtcttccgtacctaccggagaccaaatgtgccaggcttgtcttacaatacttaacatttcctctgcctttctgtcttaaccttctaatcaactacattaaaaacctaggcccggccttc

SEQ ID NO: 132321 - DNA, 120 bp, Artificial Sequence
  ENSG00000102805_86 (sequence is synthesized)
atctctttctttgccctccccaccccattcatcccatacctggttaacaatgatttgtccttcctgtgtgcccataggactcattcctttagtctagcacataccacactcattacttgt

SEQ ID NO: 132322 - DNA, 120 bp, Artificial Sequence
  ENSG00000102805_87 (sequence is synthesized)
tcagtgtctttccagctcccacccacagttccatgagaaagggaacagtgttttaatttttgtttccctccttcttactatagttcactatatatgtagtggagcctcaataaatattgg

SEQ ID NO: 132323 - DNA, 120 bp, Artificial Sequence
  ENSG00000102805_88 (sequence is synthesized)
ttgaatgaatgttaattcgtaagtaaatataaaatgtattctgttactcataattatctgaataatcttaatgtatggactgtttgtaaaattgaacacattggaaaaatgttcatttat

SEQ ID NO: 132324 - DNA, 120 bp, Artificial Sequence
  ENSG00000102805_89 (sequence is synthesized)
tctgtaaacatttgcaaatgtctactatgatctggagctataaaaattttaagacaaaattcctgtcttcaaaattttcacagtgggatcagggaacagggaagcccgtatttatcagag

SEQ ID NO: 132325 - DNA, 84 bp, Artificial Sequence
  ENSG00000102805_90 (sequence is synthesized)
actataagaattctaccccaaagaggcaccttatattacctgagatgggtcttgctatgctgcccaggctgatcttgaactcct

SEQ ID NO: 132326 - DNA, 120 bp, Artificial Sequence
  ENSG00000102805_91 (sequence is synthesized)
atgggtcttgctatgctgcccaggctgatcttgaactcctggccacaacagaacctcctgcctcggcttcccaaagtactccaattatagctgtgagctaccacacccaaccaaaacact

SEQ ID NO: 132327 - DNA, 120 bp, Artificial Sequence
  ENSG00000102805_92 (sequence is synthesized)
accttcttgatcacaattccctaatttactttttccctactgtgattaaacaactggttaactagattttgataaactatttaactacttaaatgttaatatttttctcctaatattttc

SEQ ID NO: 132328 - DNA, 120 bp, Artificial Sequence
  ENSG00000102805_93 (sequence is synthesized)
atatcaaactcaattatatcttgtacaaacatatttcatttgcagtctaatgagtgcatcactgacgtctttccccatttccccaatttagctctggacaaaaacatttcttctatgttc

SEQ ID NO: 132329 - DNA, 120 bp, Artificial Sequence
  ENSG00000102805_94 (sequence is synthesized)
acagttattaagtatcctagcctcacttaataagggaagaagcattctttccattagctccattcatggttcccaaattagtactagatatatgcatagtgataagaaaaaaaagaaaat

SEQ ID NO: 132330 - DNA, 120 bp, Artificial Sequence
  ENSG00000102805_95 (sequence is synthesized)
taaattatgttcaacatatcctttaatatggtatacatacataccatatgagtcagtatgtatatttgtattttagctatggtaggtacactaaaaatcaattcagattgtttcatttcc

SEQ ID NO: 132331 - DNA, 120 bp, Artificial Sequence
  ENSG00000102805_96 (sequence is synthesized)
tatttgaagcttgaaggtggcgctataccatgtaactagtatttcttagcgtgagttcctttaaccatcttaatcagaatcacctggactgctcacaggaagagaagacttagaatcacc

SEQ ID NO: 132332 - DNA, 120 bp, Artificial Sequence
  ENSG00000102805_97 (sequence is synthesized)
ccgaatttgaaaaagggatagaaatccaaaatttaggaggctattcagaagatttttacacattaagtcggagtaccacaatgatctttctgtacttaggatcttaaaatattaagataa

SEQ ID NO: 132333 - DNA, 120 bp, Artificial Sequence
  ENSG00000102805_98 (sequence is synthesized)
tcagattctcctgcccatttcccttattttatatgtgaagaaaaacattttatctcaaaatatacatatgtaatgaaaatgtttcaaaatcaattaagactttgacatcaactggtgatt

SEQ ID NO: 132334 - DNA, 120 bp, Artificial Sequence
  ENSG00000102805_99 (sequence is synthesized)
tatttggtacagacattccactgaaacgaccacttgggttaatatattcaatttagttatattccctcctcaatcatcctagtacattaaactactagatacttaaaagggtgtctatat

SEQ ID NO: 132335 - DNA, 120 bp, Artificial Sequence
  ENSG00000102805_100 (sequence is synthesized)
tttagttttcagtgtcttctgggaaaaaaatatcaaattattgttggatactaacctattaaccattagctaacatattcagacacctttaccagttgcctttctaaaaatgcacccttc

SEQ ID NO: 132336 - DNA, 120 bp, Artificial Sequence
  ENSG00000102805_101 (sequence is synthesized)
ttatttttgtattttaagagaatagttgtgagagagagacacgatctctgattatatgcaggatcatgttagaatatatataagaatatatgttaacttttcacccaaagaaaggatgtc

SEQ ID NO: 132337 - DNA, 120 bp, Artificial Sequence
  ENSG00000102805_102 (sequence is synthesized)
tttaagtctgtaaattaatctaaactgtgctgagactaactttggtcatgattaaatctttccagaacatttgccaaaagattttagaagctatacctgctctcaatattggcactctac

SEQ ID NO: 132338 - DNA, 120 bp, Artificial Sequence
  ENSG00000102805_103 (sequence is synthesized)
ttttctttgattctaacttcaccaacctgctctggaagccccaaaatgagtatctatgtgtccctttttttctaatatgcttgactctattttacttactgaatttcttttaatacttcc

SEQ ID NO: 132339 - DNA, 120 bp, Artificial Sequence
  ENSG00000102805_104 (sequence is synthesized)
caaagtgctgggattaacagacgtgagccaacgtgcccagctgtattaaaaagtattctttctcttcccttcccttcctgaagaactagtccaaaagtcattatgaaaccaactttgcaa

SEQ ID NO: 132340 - DNA, 120 bp, Artificial Sequence
  ENSG00000102805_105 (sequence is synthesized)
aattatgaccgtgaaagaaatcagacctaaccgaccctatcttgcttctaacccttaagctgccctggttcattcctgggcataggccgaattaactttgggaaggaattcggttcacgg

SEQ ID NO: 132341 - DNA, 120 bp, Artificial Sequence
  ENSG00000102805_106 (sequence is synthesized)
tttgactctgaaacaaaactggtaaccgccgtttcacaaaaagacccctccttcttgccggggtccagtctgcctttgcaggacttccaaactagctacaagattagaaattacaatgtg

SEQ ID NO: 132342 - DNA, 120 bp, Artificial Sequence
  ENSG00000102805_107 (sequence is synthesized)
tctgaacctccccaaattgctcctggcaataacatgattattgtaaaacctaagaacagtgcttgagatattttgcaaaccctgcactagatggatcagctgacaccatccagactggta

SEQ ID NO: 132343 - DNA, 120 bp, Artificial Sequence
  ENSG00000102805_108 (sequence is synthesized)
ggatcagctgacaccatccagactggtaatctgggccaactggttctgccatggcacctaggaacagaagacattaagaaaacctaactctgaccccttataattccatctccaaactga

SEQ ID NO: 132344 - DNA, 120 bp, Artificial Sequence
  ENSG00000102805_109 (sequence is synthesized)
ccctacctgccaaattatctttaaaaattctgatctccaaatgctcgggaagactgatttgagtaataacaaaactctagtctcccacacagccggctctgcgtgaattactctttcttc

SEQ ID NO: 132345 - DNA, 120 bp, Artificial Sequence
  ENSG00000102805_110 (sequence is synthesized)
gcgtgaattactctttcttcattgcaattcccatcttgataaatcggttctgtctgggcaacggacaaggtgaacccattgggcggatcccacaattaagtgggatcaagtaagcttata

SEQ ID NO: 132346 - DNA, 120 bp, Artificial Sequence
  ENSG00000102805_111 (sequence is synthesized)
ctatactatcagaactgttgtgtatatttaataaaaatgaatgaacacagaatataccagaataaagagaactatgaactcacagttttatagagaaatcagagacataaagactcatac

SEQ ID NO: 132347 - DNA, 120 bp, Artificial Sequence
  ENSG00000102805_112 (sequence is synthesized)
aatgtgttaaatgctagcaataaagttcacagtgttctggaaatacacaggtaggaaatctcaaccagaaaggagaagttcccttctcctacgttgacaggcaggtcaacaaagatcaca

SEQ ID NO: 132348 - DNA, 120 bp, Artificial Sequence
  ENSG00000102805_113 (sequence is synthesized)
tctgagctgaattctgaagcctgggctggctggagttagcaaggggaagttaaaacatttgagcaagtattccacagggtaaagtgtactgagcaaccacaaacaaaggtaacaaacaaa

SEQ ID NO: 132349 - DNA, 120 bp, Artificial Sequence
  ENSG00000102805_114 (sequence is synthesized)
aatctgtagttccataggacccaagtaaaagctccacgtgagtgaccagcaagagacaggtggaggtcaagatacaaaaggaccttgtacactatgaagccaggaagcacagactttact

SEQ ID NO: 132350 - DNA, 120 bp, Artificial Sequence
  ENSG00000102805_115 (sequence is synthesized)
ctgaaagcagagctatacagtaaatataaaaatgtaatcaaggtcatataagaactaactgccaaagcctattcttaacttctgttttataacaggcagtggtaatctgtaagtggcaga

SEQ ID NO: 132351 - DNA, 120 bp, Artificial Sequence
  ENSG00000102805_116 (sequence is synthesized)
gagggctaagaaaatacaatagacctagccattctcatcaccaggagtctcctgtgggagaaaagagaatgagcaaggagacttgggagaatgagcaagcaatctccatctaaaatggaa

SEQ ID NO: 132352 - DNA, 120 bp, Artificial Sequence
  ENSG00000102805_117 (sequence is synthesized)
gacctttggcaatggcaagaaggttggaagtgtttttgtaaagatcaaagatttgtcactataccttaaagaacaggtttcccaaataacacagctaaaggatcagcaaacatgtcaata

SEQ ID NO: 132353 - DNA, 120 bp, Artificial Sequence
  ENSG00000102805_118 (sequence is synthesized)
gtgggaggagtcagaaattaaacagcagacagtagtataatacagtagtagggtttatactctcttttcaatacaaaccacctggaatttaagtaatctcaaactgaataatgtagtaat

SEQ ID NO: 132354 - DNA, 120 bp, Artificial Sequence
  ENSG00000102805_119 (sequence is synthesized)
gctcagaaaatcctatataagagaaactggaaagagctattataatgctcttcttgcatttgatgggttcttggctccaaaattcaacttaggaaaaacatcatcttgcaaaatctaagg

SEQ ID NO: 132355 - DNA, 120 bp, Artificial Sequence
  ENSG00000102805_120 (sequence is synthesized)
ctaccacttagtacaacttagttgtacaacttagtacaactcttctccctctacatagtgagaagaaaagcaattatgtgactgctctgactcaaaatctaccctattagctcaactaca

SEQ ID NO: 132356 - DNA, 120 bp, Artificial Sequence
  ENSG00000102805_121 (sequence is synthesized)
atgagaaaaaactctactgtaattaatggagcacctcaggctgacctcatactgtcctttcctcttttttttcctgttcattttctagcatgtgctattcataaatttatcaaataagat

SEQ ID NO: 132357 - DNA, 120 bp, Artificial Sequence
  ENSG00000102805_122 (sequence is synthesized)
tagaaaataagctgaaagtcagtgtctaggctagtaaccctacagaacttatgctattctattactacattaaaaatattttaaagagatgaagcagtcatattaatccaccttcaaggt

SEQ ID NO: 132358 - DNA, 120 bp, Artificial Sequence
  ENSG00000102805_123 (sequence is synthesized)
taatgatcatagttttttctaatttgaacatagcaatgcattttactaaaatgtgtctagcaaaaaacacaacatacctgctggagagacatgaggacagctgctcattttcaacagctt

SEQ ID NO: 132359 - DNA, 120 bp, Artificial Sequence
  ENSG00000102805_124 (sequence is synthesized)
gagtgtatcactattgttggccactagtactttgagagatggatcatctactggagtatcatctatcttaagcgaagacagggatttggagtttacgaacacaactgtcagtgcagagat

SEQ ID NO: 132360 - DNA, 120 bp, Artificial Sequence
  ENSG00000102805_125 (sequence is synthesized)
aaagtgagactgaaaagcaaaaaaaataaaataaaaattatttcaatttttagaaatgagaatcaaggggtttcctagtactacagtttatctgaaccataatgacatattaatattttg

SEQ ID NO: 132361 - DNA, 120 bp, Artificial Sequence
  ENSG00000102805_126 (sequence is synthesized)
taaatgttttaggggtggcatcccttcactctgttgttgggaatatggtaaaaataggtgactatctgtcatctttgagaagagtctatttatgtgtgggggaaaaaagcatttcaagcc

SEQ ID NO: 132362 - DNA, 120 bp, Artificial Sequence
  ENSG00000102805_127 (sequence is synthesized)
tcaggataagtgtctctaaatcagagaaaccactggtaagtaaaaagaggaattctggaacccaggatgagaatctctctcagacacttcattttgccatatctggaaaccctagtgttc

SEQ ID NO: 132363 - DNA, 120 bp, Artificial Sequence
  ENSG00000102805_128 (sequence is synthesized)
tataacactaaactgcatttcttttctgtttgatagttatgaccactaaatagtaactattaacaccatcattaaaaattaataatttattcaaaatctatgacagactcatttgagata

SEQ ID NO: 132364 - DNA, 120 bp, Artificial Sequence
  ENSG00000102805_129 (sequence is synthesized)
aactcatagaaaatttgattataaaacaatcaaaataatacttaaaattccaagtttaaaactccttcaaatgttatctacaatattttcaagtcttctattttaatgtattttgatcca

SEQ ID NO: 132365 - DNA, 120 bp, Artificial Sequence
  ENSG00000102805_130 (sequence is synthesized)
tccacaaaagcaccaatgagtatcattcatcatatatgtatatatttgtatgtatgtacatatgtgtatatacacacatacacacacacacgttatatatctgttggacaggatttgatc

SEQ ID NO: 132366 - DNA, 120 bp, Artificial Sequence
  ENSG00000102805_131 (sequence is synthesized)
taaaggaatcaatgtaggcaaacaggaattaaagcattctcaaagtatgcagctctcaatcggagctaagatatgagttgaaaccactgggcaaagaatctaggagagtaaagaaaggct

SEQ ID NO: 132367 - DNA, 120 bp, Artificial Sequence
  ENSG00000102805_132 (sequence is synthesized)
aatacatggtctaacacattcctctctacaaaaccaacttcatgctccagttaagctttataaattctctacaggagtgaaaaaggataagggcaggctaagagccaagaaagtataatg

SEQ ID NO: 132368 - DNA, 120 bp, Artificial Sequence
  ENSG00000102805_133 (sequence is synthesized)
aaacattacttttttttttttttgagacagagtactgttcttgtcacccaggctggagtgcactggcactccttagctcactacaaccttgaactcctgaacttaagcaatcctgtttca

SEQ ID NO: 132369 - DNA, 120 bp, Artificial Sequence
  ENSG00000102805_134 (sequence is synthesized)
aaaaaaaagcttaaaaaaatactatttattttcatcctaaatagtaactggttttccattatgtatatatataactttccttatactcacactgtcaatacaaaaaaaaaagattagact

SEQ ID NO: 132370 - DNA, 120 bp, Artificial Sequence
  ENSG00000102805_135 (sequence is synthesized)
attagactttcactgaatttctcagtaatagataataaaacaaaaacagcagatacctttggtaaatccataaagcttggtcgagcagttgaaataagtccaagtgtttttaaagagcaa

SEQ ID NO: 132371 - DNA, 120 bp, Artificial Sequence
  ENSG00000102805_136 (sequence is synthesized)
ttcacaagttgcgatagtatatcacaagctgcttcagctgattccttgctgctgtccaccttagaaaagaaacaccgtttactcatgaatattttattatttttttacttttttccccaa

SEQ ID NO: 132372 - DNA, 120 bp, Artificial Sequence
  ENSG00000102805_137 (sequence is synthesized)
atacccagacttcaagattactcatgtatatatttatatttctctgtacacatattcattttatagaagtatcattactagtttattgcattataacttaaagaatattctttcaatcat

SEQ ID NO: 132373 - DNA, 120 bp, Artificial Sequence
  ENSG00000102805_138 (sequence is synthesized)
ccaccctccaccctcacctccaacttggccttttctaagtctctctgaaaaagtataagggcaattgtcaagacaagacctagctttcattatgataagagacatatttaatgttggctt

SEQ ID NO: 132374 - DNA, 120 bp, Artificial Sequence
  ENSG00000102805_139 (sequence is synthesized)
ttacactgatttattccaaagtgactgtataaactaatggagtaaatcaatttatagtctttaaaaaataattatgtatttggtagtggatcacataatagatgtaaatacagtgtctat

SEQ ID NO: 132375 - DNA, 120 bp, Artificial Sequence
  ENSG00000102805_140 (sequence is synthesized)
aagttacccattcaatccatttcttccttatgtttagaaacagggataggaacaagaaaacatacaccgtattttcatctatttattgttacaagtatgatgtgccaggtactagatgtt

SEQ ID NO: 132376 - DNA, 120 bp, Artificial Sequence
  ENSG00000102805_141 (sequence is synthesized)
atcccacaaataattttaaaaatctggaaaagtattatttctactttgaagtggagacagctagctaaaaatagcaaagctgcaatacaaacacaggctaagtgactcttatgtccatgc

SEQ ID NO: 132377 - DNA, 120 bp, Artificial Sequence
  ENSG00000102805_142 (sequence is synthesized)
acttaactactgcttcagaaatgacaagacagaggccaccaataagccatagctttataacagtgggaaaagataggcattagaattatcagaagagataaactgaattaccagaatgag

SEQ ID NO: 132378 - DNA, 120 bp, Artificial Sequence
  ENSG00000102805_143 (sequence is synthesized)
agaatgagtcaccagaaaagagagtaatgtctcagtattcagcaaccacaaagtttctgttttccgcaaagtaggtatatactttatttttgttttgagatggagtctcgctctgccacc

SEQ ID NO: 132379 - DNA, 120 bp, Artificial Sequence
  ENSG00000102805_144 (sequence is synthesized)
gctcactgcaacctccgcctccctggtttaagcaattctcctgcctcggcctaccaagtagctggggttacaggcacacgccaccacgcccggctattttatatactttgaaatatactc

SEQ ID NO: 132380 - DNA, 64 bp, Artificial Sequence
  ENSG00000102805_145 (sequence is synthesized)
ggctattttatatactttgaaatatactctaattactcaaggtaacctaagcacatctccgttc

SEQ ID NO: 132381 - DNA, 78 bp, Artificial Sequence
  ENSG00000102805_146 (sequence is synthesized)
accgcatgttctcactcataagcctcacacgctggtgcctgtcgggagttggggggctaggggaggaatagcattagg

SEQ ID NO: 132382 - DNA, 120 bp, Artificial Sequence
  ENSG00000102805_147 (sequence is synthesized)
taataataattaaaaaaaaacacacagacatgggaaatggtagctaaccattcaaatgaaagaaactgtggagtatcatttaataactacaaaagcagttgtggcaggcgtaattctcaa

SEQ ID NO: 132383 - DNA, 120 bp, Artificial Sequence
  ENSG00000102805_148 (sequence is synthesized)
aatggcctccaagatcccacaccctaatgcctagcatctgtgaattccataagatatcatgcccatgattatgatatatggtacagctgagcatataaaagattatctggatggtcctag

SEQ ID NO: 132384 - DNA, 120 bp, Artificial Sequence
  ENSG00000102805_149 (sequence is synthesized)
tctaatcatatgagccccttttaaagcagtttcctctggctgattgcagaagaggaagtcagagagattcaaaatgcaaaggggactcaatgtgttattgctggctctaagctagagggg

SEQ ID NO: 132385 - DNA, 120 bp, Artificial Sequence
  ENSG00000102805_150 (sequence is synthesized)
gccaaaaaagaaaaatcacaaccagcctctaagagcagaaagaccccctaacagcctcctgctgacagccaataaggaaactggatgtcagtccaacaatcacaaggaactaaattcagc

SEQ ID NO: 132386 - DNA, 120 bp, Artificial Sequence
  ENSG00000102805_151 (sequence is synthesized)
caataacttgaatgagcgtggaggtggattcttctgcagagcctccaggtaagagcccagccttcctgacattttcctctcagccttttaagattttaagcagagaagccacttgagccc

SEQ ID NO: 132387 - DNA, 120 bp, Artificial Sequence
  ENSG00000102805_152 (sequence is synthesized)
taactacagctctaatgtacagaacagtggagcaaataaatgggtgttggtttaagctgctttgtgtatagctgtcagttatgtaccagtaagaacatagttccaagtatttaaaaacat

SEQ ID NO: 132388 - DNA, 120 bp, Artificial Sequence
  ENSG00000102805_153 (sequence is synthesized)
ttaaaaacattattggaagtttgttcacaagataacaaaatgtgtgtttatatttattaactatggtccgacctttgaatggtcccctaaaaatgttactggattctaaaagacgtgaga

SEQ ID NO: 132389 - DNA, 120 bp, Artificial Sequence
  ENSG00000102805_154 (sequence is synthesized)
cagtaatgttttacttagaggtcatttgtaaaatgtacttttggaaccattaaactttgggaatttttttcatctcttatttgtattttttatttattttatttgaataggtttgtgggg

SEQ ID NO: 132390 - DNA, 78 bp, Artificial Sequence
  ENSG00000102805_155 (sequence is synthesized)
ttgtattttttatttattttatttgaataggtttgtggggaactggttatgttatgcgcacccatcacccgagcagtg

SEQ ID NO: 132391 - DNA, 74 bp, Artificial Sequence
  ENSG00000102805_156 (sequence is synthesized)
tacacaatgtttggttttctattcctgaagagttacttcacttggatggaattggagaccattattccaggttg

SEQ ID NO: 132392 - DNA, 70 bp, Artificial Sequence
  ENSG00000102805_157 (sequence is synthesized)
tgagaatacacaatgtttggttttctattcctgaagagttacttcacttggatggaattggagaccatta

SEQ ID NO: 132393 - DNA, 79 bp, Artificial Sequence
  ENSG00000102805_158 (sequence is synthesized)
gaaagtattttttgcgtataatgagttctcttcctttgggtagatacccagtactgggattgctggatcaaatggcagt

SEQ ID NO: 132394 - DNA, 79 bp, Artificial Sequence
  ENSG00000102805_159 (sequence is synthesized)
taatttacattcctagcagcagagaagaagtgttccctttcccccacatcccgccaatatctaaggcggtattacattg

SEQ ID NO: 132395 - DNA, 120 bp, Artificial Sequence
  ENSG00000102805_160 (sequence is synthesized)
agcattttcatgtttcttggccatttgtatatcttctgagaattgtctatttgtgtccttagccacccccaccccgcctttttgttgttgttgtttgtttgtttgaggtggagttttatt

SEQ ID NO: 132396 - DNA, 75 bp, Artificial Sequence
  ENSG00000102805_161 (sequence is synthesized)
ctgattgttcctttatttgtttttgttgcatttgcttttggtggaaccactaaactctgacccaaactattactc

SEQ ID NO: 132397 - DNA, 120 bp, Artificial Sequence
  ENSG00000102805_162 (sequence is synthesized)
ttttggtggaaccactaaactctgacccaaactattactcatgcagaacttcacctgttggtgatgagtagcttatctctgatctttgaatgtttccctaaaaatgctcttttcccatca

SEQ ID NO: 132398 - DNA, 120 bp, Artificial Sequence
  ENSG00000102805_163 (sequence is synthesized)
taaaaatgaataaaatgataaaacattttgtacaattaaattggtctttctaaacgaaatagtaagagaaatccataaaatgcctgattaaaggatatgttaactatatctgaaaaaaat

SEQ ID NO: 132399 - DNA, 120 bp, Artificial Sequence
  ENSG00000102805_164 (sequence is synthesized)
tttagtgatgatatttttatgttgaaaaataatagctactaatatagactggttctggcactgttctgagtactgtacatacatcacatcattcatcatcacaacttctggaggtagtaa

SEQ ID NO: 132400 - DNA, 120 bp, Artificial Sequence
  ENSG00000102805_165 (sequence is synthesized)
agctcaaacctataatcccagtgctttagaatgctgaagcaggaggatcacttgaggctggtctcaaattaaaaaaaagaaaaattaaaaaattagttgggtttggtggccagcgcctgt

SEQ ID NO: 132401 - DNA, 120 bp, Artificial Sequence
  ENSG00000102837_0 (sequence is synthesized)
agcggctccagctaagaggacaagatgaggcccggcctctcatttctcctagcccttctgttcttccttggccaagctgcaggggatttgggggatgtgggacctccaattcccagcccc

SEQ ID NO: 132402 - DNA, 120 bp, Artificial Sequence
  ENSG00000102837_1 (sequence is synthesized)
ggcttcagctctttcccaggtgttgactccagctccagcttcagctccagctccaggtcgggctccagctccagccgcagcttaggcagcggaggttctgtgtcccagttgttttccaat

SEQ ID NO: 132403 - DNA, 120 bp, Artificial Sequence
  ENSG00000102837_2 (sequence is synthesized)
ttcaccggctccgtggatgaccgtgggacctgccagtgctctgtttccctgccagacaccacctttcccgtggacagagtggaacgcttggaattcacagctcatgttctttctcagaag

SEQ ID NO: 132404 - DNA, 120 bp, Artificial Sequence
  ENSG00000102837_3 (sequence is synthesized)
tttgagaaagaactttccaaagtgagggaatatgtccaattaattagtgtgtatgaaaagaaactgttaaacctaactgtccgaattgacatcatggagaaggataccatttcttacact

SEQ ID NO: 132405 - DNA, 120 bp, Artificial Sequence
  ENSG00000102837_4 (sequence is synthesized)
gaactggacttcgagctgatcaaggtagaagtgaaggagatggaaaaactggtcatacagctgaaggagagttttggtggaagctcagaaattgttgaccagctggaggtggagataaga

SEQ ID NO: 132406 - DNA, 120 bp, Artificial Sequence
  ENSG00000102837_5 (sequence is synthesized)
aatatgactctcttggtagagaagcttgagacactagacaaaaacaatgtccttgccattcgccgagaaatcgtggctctgaagaccaagctgaaagagtgtgaggcctctaaagatcaa

SEQ ID NO: 132407 - DNA, 120 bp, Artificial Sequence
  ENSG00000102837_6 (sequence is synthesized)
aacacccctgtcgtccaccctcctcccactccagggagctgtggtcatggtggtgtggtgaacatcagcaaaccgtctgtggttcagctcaactggagagggttttcttatctatatggt

SEQ ID NO: 132408 - DNA, 120 bp, Artificial Sequence
  ENSG00000102837_7 (sequence is synthesized)
gcttggggtagggattactctccccagcatccaaacaaaggactgtattgggtggcgccattgaatacagatgggagactgttggagtattatagactgtacaacacactggatgatttg

SEQ ID NO: 132409 - DNA, 120 bp, Artificial Sequence
  ENSG00000102837_8 (sequence is synthesized)
ctattgtatataaatgctcgagagttgcggatcacctatggccaaggtagtggtacagcagtttacaacaacaacatgtacgtcaacatgtacaacaccgggaatattgccagagttaac

SEQ ID NO: 132410 - DNA, 120 bp, Artificial Sequence
  ENSG00000102837_9 (sequence is synthesized)
ctgaccaccaacacgattgctgtgactcaaactctccctaatgctgcctataataaccgcttttcatatgctaatgttgcttggcaagatattgactttgctgtggatgagaatggattg

SEQ ID NO: 132411 - DNA, 120 bp, Artificial Sequence
  ENSG00000102837_10 (sequence is synthesized)
tgggttatttattcaactgaagccagcactggtaacatggtgattagtaaactcaatgacaccacacttcaggtgctaaacacttggtataccaagcagtataaaccatctgcttctaac

SEQ ID NO: 132412 - DNA, 120 bp, Artificial Sequence
  ENSG00000102837_11 (sequence is synthesized)
cacagggaaagagggcaaactagacattgtaatgcataagatgcaggaaaaagtgcagagcattaactataacccttttgaccagaaactttatgtctataacgatggttaccttctgaa

SEQ ID NO: 132413 - DNA, 120 bp, Artificial Sequence
  ENSG00000102837_12 (sequence is synthesized)
ttatgatctttctgtcttgcagaagccccagtaagctgtttaggagttagggtgaaagagaaaatgtttgttgaaaaaatagtcttctccacttacttagatatctgcaggggtgtctaa

SEQ ID NO: 132414 - DNA, 120 bp, Artificial Sequence
  ENSG00000102837_13 (sequence is synthesized)
aagtgtgttcattttgcagcaatgtttaggtgcatagttctaccacactagagatctaggacatttgtcttgatttggtgagttctcttgggaatcatctgcctcttcaggcgcattttg

SEQ ID NO: 132415 - DNA, 120 bp, Artificial Sequence
  ENSG00000102837_14 (sequence is synthesized)
caataaagtctgtctagggtgggattgtcagaggtctaggggcactgtgggcctagtgaagcctactgtgaggaggcttcactagaagccttaaattaggaattaaggaacttaaaactc

SEQ ID NO: 132416 - DNA, 120 bp, Artificial Sequence
  ENSG00000102837_15 (sequence is synthesized)
agtatggcgtctagggattctttgtacaggaaatattgcccaatgactagtcctcatccatgtagcaccactaattcttccatgcctggaagaaacctggggacttagttaggtagatta

SEQ ID NO: 132417 - DNA, 120 bp, Artificial Sequence
  ENSG00000102837_16 (sequence is synthesized)
atatctggagctcctcgagggaccaaatctccaacttttttttcccctcactagcacctggaatgatgctttgtatgtggcagataagtaaatttggcatgcttatatattctacatctg

SEQ ID NO: 132418 - DNA, 120 bp, Artificial Sequence
  ENSG00000102837_17 (sequence is synthesized)
taaagtgctgagttttatggagagaggcctttttatgcattaaattgtacatggcaaataaatcccagaaggatctgtagatgaggcacctgctttttcttttctctcattgtccacctt

SEQ ID NO: 132419 - DNA, 120 bp, Artificial Sequence
  ENSG00000102837_18 (sequence is synthesized)
actaaaagtcagtagaatcttctacctcataacttccttccaaaggcagctcagaagattagaaccagacttactaaccaattccaccccccaccaacccccttctactgcctactttaa

SEQ ID NO: 132420 - DNA, 120 bp, Artificial Sequence
  ENSG00000102837_19 (sequence is synthesized)
aaaaattaatagttttctatggaactgatctaagattagaaaaattaattttctttaatttcattatgaacttttatttacatgactctaagactataagaaaatctgatggcagtgaca

SEQ ID NO: 132421 - DNA, 120 bp, Artificial Sequence
  ENSG00000102837_20 (sequence is synthesized)
aagtgctagcatttattgttatctaataaagaccttggagcatatgtgcaacttatgagtgtatcagttgttgcatgtaatttttgcctttgtttaagcctggaacttgtaagaaaatga

SEQ ID NO: 132422 - DNA, 120 bp, Artificial Sequence
  ENSG00000102837_21 (sequence is synthesized)
aaatttaatttttttttctaggacgagctatagaaaagctattgagagtatctagttaatcagtgcagtagttggaaaccttgctggtgtatgtgatgtgcttctgtgcttttgaatgac

SEQ ID NO: 132423 - DNA, 120 bp, Artificial Sequence
  ENSG00000102837_22 (sequence is synthesized)
tttatcatctagtctttgtctatttttcctttgatgttcaagtcctagtctataggattggcagtttaaatgctttactcccccttttaaaataaatgattaaaatgtgctttgaaaaaa

SEQ ID NO: 132424 - DNA, 120 bp, Artificial Sequence
  ENSG00000102854_0 (sequence is synthesized)
ttctgcctggccggccactcccgtctgctgtgacgcgcggacagagagctaccggtggacccacggtgcctccctccctgggatctacacagaccatggccttgccaacggctcgacccc

SEQ ID NO: 132425 - DNA, 120 bp, Artificial Sequence
  ENSG00000102854_1 (sequence is synthesized)
tgttggggtcctgtgggacccccgccctcggcagcctcctgttcctgctcttcagcctcggatgggtgcagccctcgaggaccctggctggagagacagggcaggaggctgcgcccctgg

SEQ ID NO: 132426 - DNA, 120 bp, Artificial Sequence
  ENSG00000102854_2 (sequence is synthesized)
acggagtcctggccaacccacctaacatttccagcctctcccctcgccaactccttggcttcccgtgtgcggaggtgtccggcctgagcacggagcgtgtccgggagctggctgtggcct

SEQ ID NO: 132427 - DNA, 120 bp, Artificial Sequence
  ENSG00000102854_3 (sequence is synthesized)
tggcacagaagaatgtcaagctctcaacagagcagctgcgctgtctggctcaccggctctctgagccccccgaggacctggacgccctcccattggacctgctgctattcctcaacccag

SEQ ID NO: 132428 - DNA, 120 bp, Artificial Sequence
  ENSG00000102854_4 (sequence is synthesized)
atgcgttctcggggccccaggcctgcacccgtttcttctcccgcatcacgaaggccaatgtggacctgctcccgaggggggctcccgagcgacagcggctgctgcctgcggctctggcct

SEQ ID NO: 132429 - DNA, 120 bp, Artificial Sequence
  ENSG00000102854_5 (sequence is synthesized)
gctggggtgtgcgggggtctctgctgagcgaggctgatgtgcgggctctgggaggcctggcttgcgacctgcctgggcgctttgtggccgagtcggccgaagtgctgctaccccggctgg

SEQ ID NO: 132430 - DNA, 120 bp, Artificial Sequence
  ENSG00000102854_6 (sequence is synthesized)
tgagctgcccgggacccctggaccaggaccagcaggaggcagccagggcggctctgcagggcgggggacccccctacggccccccgtcgacatggtctgtctccacgatggacgctctgc

SEQ ID NO: 132431 - DNA, 120 bp, Artificial Sequence
  ENSG00000102854_7 (sequence is synthesized)
ggggcctgctgcccgtgctgggccagcccatcatccgcagcatcccgcagggcatcgtggccgcgtggcggcaacgctcctctcgggacccatcctggcggcagcctgaacggaccatcc

SEQ ID NO: 132432 - DNA, 120 bp, Artificial Sequence
  ENSG00000102854_8 (sequence is synthesized)
cctcatcttctacaagaagtgggagctggaagcctgcgtggatgcggccctgctggccacccagatggaccgcgtgaacgccatccccttcacctacgagcagctggacgtcctaaagca

SEQ ID NO: 132433 - DNA, 120 bp, Artificial Sequence
  ENSG00000102854_9 (sequence is synthesized)
taaactggatgagctctacccacaaggttaccccgagtctgtgatccagcacctgggctacctcttcctcaagatgagccctgaggacattcgcaagtggaatgtgacgtccctggagac

SEQ ID NO: 132434 - DNA, 120 bp, Artificial Sequence
  ENSG00000102854_10 (sequence is synthesized)
cctgaaggctttgcttgaagtcaacaaagggcacgaaatgagtcctcaggctcctcggcggcccctcccacaggtggccaccctgatcgaccgctttgtgaagggaaggggccagctaga

SEQ ID NO: 132435 - DNA, 120 bp, Artificial Sequence
  ENSG00000102854_11 (sequence is synthesized)
caaagacaccctagacaccctgaccgccttctaccctgggtacctgtgctccctcagccccgaggagctgagctccgtgccccccagcagcatctgggcggtcaggccccaggacctgga

SEQ ID NO: 132436 - DNA, 120 bp, Artificial Sequence
  ENSG00000102854_12 (sequence is synthesized)
cacgtgtgacccaaggcagctggacgtcctctatcccaaggcccgccttgctttccagaacatgaacgggtccgaatacttcgtgaagatccagtccttcctgggtggggcccccacgga

SEQ ID NO: 132437 - DNA, 120 bp, Artificial Sequence
  ENSG00000102854_13 (sequence is synthesized)
ggatttgaaggcgctcagtcagcagaatgtgagcatggacttggccacgttcatgaagctgcggacggatgcggtgctgccgttgactgtggctgaggtgcagaaacttctgggacccca

SEQ ID NO: 132438 - DNA, 120 bp, Artificial Sequence
  ENSG00000102854_14 (sequence is synthesized)
cgtggagggcctgaaggcggaggagcggcaccgcccggtgcgggactggatcctacggcagcggcaggacgacctggacacgctggggctggggctacagggcggcatccccaacggcta

SEQ ID NO: 132439 - DNA, 120 bp, Artificial Sequence
  ENSG00000102854_15 (sequence is synthesized)
cctggtcctagacctcagcatgcaagaggccctctcggggacgccctgcctcctaggacctggacctgttctcaccgtcctggcactgctcctagcctccaccctggcctgagggcccca

SEQ ID NO: 132440 - DNA, 120 bp, Artificial Sequence
  ENSG00000102854_16 (sequence is synthesized)
ctcccttgctggccccagccctgctggggatccccgcctggccaggagcaggcacgggtggtccccgttccaccccaagagaactcgcgctcagtaaacgggaacatgccccctgcagac

SEQ ID NO: 132441 - DNA, 120 bp, Artificial Sequence
  ENSG00000102854_17 (sequence is synthesized)
ccaggctctccacccccacttcccaattgaggaaaccgaggcagaggaggctcaggtgtggccaatcaccctgcacatcagagttaccctgggcagggcccactgagacctgggaggggc

SEQ ID NO: 132442 - DNA, 120 bp, Artificial Sequence
  ENSG00000102854_18 (sequence is synthesized)
cactcgggacctggagggctgggggctgcccgggcgttaggggtaaagctccctacccaactgcgcagaaggcctcagaggcctgggggctgggcttcccctttcacatcgccctttaga

SEQ ID NO: 132443 - DNA, 120 bp, Artificial Sequence
  ENSG00000102858_0 (sequence is synthesized)
gacgagcgtccgtgcggcctggtccgggccatgtccgcgtgaggaccccgccgctgtcgccgctcccgttccggccctggcccctctgcccggcagcgccgcgcaccatgggctccattc

SEQ ID NO: 132444 - DNA, 120 bp, Artificial Sequence
  ENSG00000102858_1 (sequence is synthesized)
gcagcgccgcgcaccatgggctccattctcagccgccgcatcgcgggggtggaggacatcgacatccaggcgaactcggcctatcgctaccctccgaagtccggaaactactttgcttcg

SEQ ID NO: 132445 - DNA, 120 bp, Artificial Sequence
  ENSG00000102858_2 (sequence is synthesized)
cactttttcatgggaggagagaaattcgacaccccccaccctgaaggttacctctttggagagaacatggatctgaacttcctgggcagccgcccggtccagtttccctacgtcactcct

SEQ ID NO: 132446 - DNA, 120 bp, Artificial Sequence
  ENSG00000102858_3 (sequence is synthesized)
gccccccacgagcccgtgaagacgctgcggagcctggtgaacatccgcaaagactccctgcggctggtgaggtacaaagacgatgccgacagccccaccgaggacggcgacaagccccgg

SEQ ID NO: 132447 - DNA, 120 bp, Artificial Sequence
  ENSG00000102858_4 (sequence is synthesized)
gtgctctacagcctggagttcaccttcgacgccgatgcccgcgtggccatcaccatctactgccaggcatcggaggagttcctgaacggcagggcagtatacagccccaagagcccctcg

SEQ ID NO: 132448 - DNA, 120 bp, Artificial Sequence
  ENSG00000102858_5 (sequence is synthesized)
ctacagtccgagaccgtccactacaagagaggggtgagccagcagttctccctgccctccttcaagattgacttctcggaatggaaggatgacgagctgaactttgacctggaccggggc

SEQ ID NO: 132449 - DNA, 120 bp, Artificial Sequence
  ENSG00000102858_6 (sequence is synthesized)
gtgtttccagtagtcatccaggctgtggtggacgaaggagatgtggtggaagtgactggccacgcccacgtgctcttggctgcctttgaaaagcacatggacggcagcttctctgtgaag

SEQ ID NO: 132450 - DNA, 120 bp, Artificial Sequence
  ENSG00000102858_7 (sequence is synthesized)
cctttaaagcagaagcaaattgtggaccgggtcagctacctcctgcaggagatctatggcattgagaacaagaacaaccaggagaccaagccctcggacgacgagaacagcgacaacagc

SEQ ID NO: 132451 - DNA, 120 bp, Artificial Sequence
  ENSG00000102858_8 (sequence is synthesized)
aacgagtgtgtggtgtgcctgtccgacctgcgggacacgctgatcctgccctgccgccacctgtgcctctgtacctcctgcgccgacacgctgcgctaccaggccaacaactgccccatc

SEQ ID NO: 132452 - DNA, 120 bp, Artificial Sequence
  ENSG00000102858_9 (sequence is synthesized)
tgccggctgcctttccgggccctcctgcagatccgggcggtgcggaagaagccaggagccctgtcccccgtgtccttcagccccgtcctggcccagagcctggagcatgatgagcactct

SEQ ID NO: 132453 - DNA, 120 bp, Artificial Sequence
  ENSG00000102858_10 (sequence is synthesized)
tgtccctttaaaaaatcaaagccgcaccccgcctccctggccagcaagaaacctaaaagggaaacaaactctgacagcgtcccacctggctacgagcccatctcgctgctcgaggcgctc

SEQ ID NO: 132454 - DNA, 120 bp, Artificial Sequence
  ENSG00000102858_11 (sequence is synthesized)
aacggcctccgggctgtctccccggccatcccctcggcccctctttatgaagaaatcacctattcaggcatctcggacggcctgtcccaggccagctgtcccctcgcggctatcgaccac

SEQ ID NO: 132455 - DNA, 120 bp, Artificial Sequence
  ENSG00000102858_12 (sequence is synthesized)
atcctggacagcagccgccagaagggcaggccgcagagcaaggcccccgacagcaccctacggtccccgtcttcccccatccacgaagaggatgaggagaagctctccgaggacgtggac

SEQ ID NO: 132456 - DNA, 120 bp, Artificial Sequence
  ENSG00000102858_13 (sequence is synthesized)
gcccctcccccactgggtggcgcagagctggccctgcgggaaagcagctcccctgagagtttcataacagaagaggttgatgagtcgtcgtcaccacagcaagggacccgagcagcttcc

SEQ ID NO: 132457 - DNA, 120 bp, Artificial Sequence
  ENSG00000102858_14 (sequence is synthesized)
attgagaatgtcctgcaggacagcagccccgagcactgtggccgaggcccacctgctgacatctacctgccaggacggcccacctccatggagacggcccacggcctcgccaccaccagc

SEQ ID NO: 132458 - DNA, 120 bp, Artificial Sequence
  ENSG00000102858_15 (sequence is synthesized)
cccacctggcctccacttggtggccccagccccgatcccagcgccgccgagctgaccccactctgagagcctggccgagctggcagcatggagccctcggctccccagactttgccgagg

SEQ ID NO: 132459 - DNA, 120 bp, Artificial Sequence
  ENSG00000102858_16 (sequence is synthesized)
aagagcacagtgaactgtcccttctgagtctcccttttctacagttgatatatttgtaactggtacaagatgaaggacagcagctttccatccctagttcagagcccccgttccccaggg

SEQ ID NO: 132460 - DNA, 120 bp, Artificial Sequence
  ENSG00000102858_17 (sequence is synthesized)
tcctgtgggctgagcggctggggctggggctgcccacgtgtggcctccgctggctctgcctgctcctgcaacagtgcggtccctgcccggagaactcaggaggcctgcagaagagaactg

SEQ ID NO: 132461 - DNA, 120 bp, Artificial Sequence
  ENSG00000102858_18 (sequence is synthesized)
attggtggtcgaagcaccatcttcacagatgttcaggggcagtggggggctccaggcacggtcaatgaaggaaacagtgcctgtccacccaccctgcgtgtcactgtggcggcctggctg

SEQ ID NO: 132462 - DNA, 120 bp, Artificial Sequence
  ENSG00000102858_19 (sequence is synthesized)
tcgctgctttttgtcctctgccgtgtttgcgcggcctcagtgccctccctggtgcgtctgcgctggggccctcagtgctcggggccttggggtgcatgggtgccgccctgggcagctaga

SEQ ID NO: 132463 - DNA, 120 bp, Artificial Sequence
  ENSG00000102858_20 (sequence is synthesized)
gtgtctcagcccggtgctgggcctggccgaggggcggaggcacagctgcttccagcagccagcattcagtggccttgtcaccaagctccacacctcctcctggtgctggctttggtgaca

SEQ ID NO: 132464 - DNA, 120 bp, Artificial Sequence
  ENSG00000102858_21 (sequence is synthesized)
tcacaaggcccctccaggtgcaggggcttctgtttggcaggcccctgccagggaggacctggtggcctcctcattctcttttgccattggaatgtccccttgcagttctcttctcttttt

SEQ ID NO: 132465 - DNA, 78 bp, Artificial Sequence
  ENSG00000102858_22 (sequence is synthesized)
tggagtgcagtggctcacgtcctgccttaggctcctgagtagctggggattacaggtgcctaccagcatgctcggcta

SEQ ID NO: 132466 - DNA, 71 bp, Artificial Sequence
  ENSG00000102858_23 (sequence is synthesized)
cctcccgggttcaagtgatcgtcctgccttaggctcctgagtagctggggattacaggtgcctaccagcat

SEQ ID NO: 132467 - DNA, 120 bp, Artificial Sequence
  ENSG00000102858_24 (sequence is synthesized)
tacaggcgtgagcctccgcgcccggcccccttgcagttctctctgatttggtttgttctgtctcaggcttctgtggcaggactggcccagggaggaggaagccagcagcacacctgggga

SEQ ID NO: 132468 - DNA, 120 bp, Artificial Sequence
  ENSG00000102858_25 (sequence is synthesized)
gtggcaggactggcccagggaggaggaagccagcagcacacctggggaatggggtcccggccgggaggcttggcctctgggcgacctcgtcctgttttttttgtttgtttgtttgttttt

SEQ ID NO: 132469 - DNA, 120 bp, Artificial Sequence
  ENSG00000102858_26 (sequence is synthesized)
agatggcaaagggagtgcctgggcctggtgacccagggctggatccacccctgcggagccctgggccaggcaggtgtctgctgctcacctggctctggagggctgccctgcagctgggcc

SEQ ID NO: 132470 - DNA, 120 bp, Artificial Sequence
  ENSG00000102858_27 (sequence is synthesized)
tggggacaggtcggctgtggggcagctcagtaccctccctgaggctcacggtggctccgagcatgaggtccgcctcctgggcgagacccagcagtggacagcatggtcctcacacccagc

SEQ ID NO: 132471 - DNA, 120 bp, Artificial Sequence
  ENSG00000102858_28 (sequence is synthesized)
tccctgcacacccaggccagccacccctcccgctcgtgcacaggcacgcagatgcgctcacacgtacacacacacaaatgcacgcccacttgcacatgctcacgcacatgttcacacatg

SEQ ID NO: 132472 - DNA, 120 bp, Artificial Sequence
  ENSG00000102858_29 (sequence is synthesized)
cacactcacgctcacacatgctgtcacgcatacacacacgcacatactcctgcacatgttcccatgcatgtgtgtgcactcggaccgagcatctcccacgcacctctaccccaccccaag

SEQ ID NO: 132473 - DNA, 120 bp, Artificial Sequence
  ENSG00000102858_30 (sequence is synthesized)
cacctctctccccccatgcacctctccccaacaacacacacagccccctgcaccgcccgccccccgcccccaccaaggccccagcctctggccatcagtcctggtgccagagctttgcgt

SEQ ID NO: 132474 - DNA, 120 bp, Artificial Sequence
  ENSG00000102858_31 (sequence is synthesized)
gaagttcgggccgcagagtggcccgctgggactcccatgtgctgccgtctgatgtgctcagatgggctcatcgttggttcgtttttactgtatatttatagtaataaaatcatgcagcaa

SEQ ID NO: 132475 - DNA, 120 bp, Artificial Sequence
  ENSG00000102858_32 (sequence is synthesized)
cgaggcccacctgctgacatctacctgccagccctggggcccgactcctgctctgttggtatagacgagtaagccggtacgtgacctcccagacgcgcttcgggggctctgacgcgcgtc

SEQ ID NO: 132476 - DNA, 120 bp, Artificial Sequence
  ENSG00000102858_33 (sequence is synthesized)
cttggagagaggagccctcccctgctctctggcgggggttccttctggtttttgggtcttcgtccgcatccgcatcttcccaggggccctggattccgaatccagagctctccagtggct

SEQ ID NO: 132477 - DNA, 120 bp, Artificial Sequence
  ENSG00000102858_34 (sequence is synthesized)
gctgcaccttcccccagaaagtggcctcctggggggtcctgactttcggggccagaggtctctccatctggactaggcggccggtcaggctcttcttccagccttgaggggccctggaac

SEQ ID NO: 132478 - DNA, 120 bp, Artificial Sequence
  ENSG00000102858_35 (sequence is synthesized)
agtcccagcccaggcagggagacagacacagcccaggtgcgccagagccactgtccactgcgggaggcaggagcttgagggatgagggcagcaccgtggagggaaccccagggagacatg

SEQ ID NO: 132479 - DNA, 120 bp, Artificial Sequence
  ENSG00000102858_36 (sequence is synthesized)
gggtgagcgtcccaaggggagaggcctgggcctggccttgttccggatggtcccaccatgagttcgcatcggtcctgcagcagacacgttaggacgctcagcaggtccactcccgtgttc

SEQ ID NO: 132480 - DNA, 120 bp, Artificial Sequence
  ENSG00000102858_37 (sequence is synthesized)
cggtcgtggctttaacaattcatggggaaagaatgcgccccgattgggagagcccctggatcacgtcttcccaagctcagtccctgtctcttggagggagtccgtcctcgaggggccctc

SEQ ID NO: 132481 - DNA, 120 bp, Artificial Sequence
  ENSG00000102858_38 (sequence is synthesized)
tggtgcccaggggagagtatcttgcgtcctgtcctgagggcgtccgctcacacagccacctgctcccccgctccctccttcccttgtcagcatggccaccgtgggcctggcatcaccatg

SEQ ID NO: 132482 - DNA, 120 bp, Artificial Sequence
  ENSG00000102858_39 (sequence is synthesized)
ggcctggcacacagtccctcgtgggctgcctttgtgccatgagcccactgctgccgactcacctgtccctcccagtactggaaccttctggaacaccagcactaaaagataggaggccct

SEQ ID NO: 132483 - DNA, 120 bp, Artificial Sequence
  ENSG00000102858_40 (sequence is synthesized)
gtgaggttggcatcccccatcccccccaagaggcgccctctaccagggtggcccaggtgagtgttttacagaaggcggctctgtccaggcagtggttcgcacctataagcccggtacttt

SEQ ID NO: 132484 - DNA, 120 bp, Artificial Sequence
  ENSG00000102858_41 (sequence is synthesized)
gggagaccgaggggatagatcacttgagcccaggaattcaagatcagtgtagaaaacatagaccccctctctatgaaaaataaaaaattggcttgggcgtggtagcttgtgcctgtggtc

SEQ ID NO: 132485 - DNA, 120 bp, Artificial Sequence
  ENSG00000102858_42 (sequence is synthesized)
ccagctactcaggggtgctgaggtgggaggattgccggagctggggaggtcaaggcccactccagcctgagacgctgtctcaataaaaaaaaatacacacacacccacccacccactcca

SEQ ID NO: 132486 - DNA, 120 bp, Artificial Sequence
  ENSG00000102858_43 (sequence is synthesized)
cacacacacacacacacacacacacgggggagagagagaaggcagctccaggagtgccaccaaaatgtaggcagacggattggggaccctctgccttcccagagggtcttggcacacaag

SEQ ID NO: 132487 - DNA, 120 bp, Artificial Sequence
  ENSG00000102858_44 (sequence is synthesized)
atgcagcctgctgggaggtgcctggccgggggtgcaggctctaagaggccctttccccttgggtggacttgagccgggtcagggagaacttcgcttcttttgactgcgctctgcattccc

SEQ ID NO: 132488 - DNA, 120 bp, Artificial Sequence
  ENSG00000102858_45 (sequence is synthesized)
atgaacctctgtcttcttgagcccagcgagtccctctgttgacccctgtcctgagccattatacccctagattgaaacagtcagcacctttcagacggccccggcctgcgcatcggtgga

SEQ ID NO: 132489 - DNA, 120 bp, Artificial Sequence
  ENSG00000102858_46 (sequence is synthesized)
aggtgccgtgcgaatgtcacgattcaggtcaagcttccggagctggggagtgcaggtgtgatctagaacagggctcacagcctcggaaacctgctctcgccgcggcccccgaagaaaata

SEQ ID NO: 132490 - DNA, 120 bp, Artificial Sequence
  ENSG00000102858_47 (sequence is synthesized)
gacgcccttcaccggagagtggggcctgggccgtgtctgctgggagccatgtgtcagggctggtggctgggtgtcaggcagccctgaggccatgctggccccgtcccaggctctgcacca

SEQ ID NO: 132491 - DNA, 120 bp, Artificial Sequence
  ENSG00000102858_48 (sequence is synthesized)
gcaccattgcccaagccccagggacgccagacccatctggggacagcgcccggcggcgtcgtgcaggccacagtctgggcattggggctctgtgggaggctcctctctttgccttgcagt

SEQ ID NO: 132492 - DNA, 120 bp, Artificial Sequence
  ENSG00000102858_49 (sequence is synthesized)
agccatccgggggctactctgagcacgggcttgttctcacccagggccgctccccacccctgcaccctgggttgaccgagttccaccctaacccagccgtaagaaccttggcaggacagt

SEQ ID NO: 132493 - DNA, 120 bp, Artificial Sequence
  ENSG00000102858_50 (sequence is synthesized)
ggctggccacatcccaggaaaccggaaccagggcaagggcaggaggcccagagggcatccaccgcggtgccgtgtcgcgctctgactcggggctgcagatctgctgtgggtgtccgggga

SEQ ID NO: 132494 - DNA, 120 bp, Artificial Sequence
  ENSG00000102858_51 (sequence is synthesized)
tctgggatcgtctgtcccaagagggacacagcgtatttggcacagttagggagtccccgggcccttggtgtgctcacatctgagtgaatgctgttgtggccacaggcggcgggagtgggg

SEQ ID NO: 132495 - DNA, 120 bp, Artificial Sequence
  ENSG00000102858_52 (sequence is synthesized)
gtgctggatggcccagcccctctggggctccagatcggtaggagcgggtggcgtggcaccaggcatccgagtgtgaccctcctccctctgctcccacctgcaggacggcccacctccatg

SEQ ID NO: 132496 - DNA, 120 bp, Artificial Sequence
  ENSG00000102858_53 (sequence is synthesized)
ctcctcataggagaagcgcagatctcatgcctaagtgtgccagggtcctgatgggcgccacctacagcctcccgccctcacgcgggagtcagactgaacgaactagcccagatccacaga

SEQ ID NO: 132497 - DNA, 120 bp, Artificial Sequence
  ENSG00000102858_54 (sequence is synthesized)
gacttctaaacccggctgggtgctgccatggaaagtacacagggctcagatttgggggtaaggtgacttagcctggggtcacgaaatgtgtaaggatttcttggggtggctgtgacaaat

SEQ ID NO: 132498 - DNA, 120 bp, Artificial Sequence
  ENSG00000102858_55 (sequence is synthesized)
gacctctaaccgtggcttgaaacagcagaaatgtattctctcaccatcacagaggcacacgtcagaaaccgaggtgccagcagggccacggtccccgaaggcgctgggggaggactcttc

SEQ ID NO: 132499 - DNA, 120 bp, Artificial Sequence
  ENSG00000102858_56 (sequence is synthesized)
cttacctctccccactcctggggccccaggcactcattgtcatccctgggcttgtggccgcatcactgcaatctcttgcctccatctcttcccttggccttcccttcaagtctgcgtcca

SEQ ID NO: 132500 - DNA, 120 bp, Artificial Sequence
  ENSG00000102858_57 (sequence is synthesized)
aacctccctctcctttcttctgttaagaaccagtcactggatttagagcccctcaatccagtatgacctcctcttaacttgattacatctgcaaagaccctagatccaaataaggtcaca

SEQ ID NO: 132501 - DNA, 120 bp, Artificial Sequence
  ENSG00000102858_58 (sequence is synthesized)
tgcacaggtaggggctgggtgtggagtaggacccgaacttcatcggaaacacagctcaggccactacagaagaaagtggtgttggagctggatgctggctgatgggctgggagcagcgag

SEQ ID NO: 132502 - DNA, 120 bp, Artificial Sequence
  ENSG00000102858_59 (sequence is synthesized)
gagccgtccagggaagggtgttgaggctggcagtgtggagaggccaggaggccaccttggaaggcccgaggccaggtggccgaggcagagggtatgaggggcacccgctggcctgtctgc

SEQ ID NO: 132503 - DNA, 120 bp, Artificial Sequence
  ENSG00000102858_60 (sequence is synthesized)
atcagctcccctcaggtggagcctttctcagggccgagcttcttggccgtcagatgttcccaccaggctgtgttcagcctcagagtcgataactgtttccaggctgggcgccgtggctca

SEQ ID NO: 132504 - DNA, 67 bp, Artificial Sequence
  ENSG00000102858_61 (sequence is synthesized)
caatatggtgaaaccccgtctccactaagaatacaaaaatcagctgggcgtggtggtgggtgtgggc

SEQ ID NO: 132505 - DNA, 120 bp, Artificial Sequence
  ENSG00000102858_62 (sequence is synthesized)
atggggctgtgggggtgggaggcccctgtccccagcagtccgcatcccagccatgagggcaagcaggcaccaaatcacccctaaagggggcagagctcctggcaggattccagttgagct

SEQ ID NO: 132506 - DNA, 120 bp, Artificial Sequence
  ENSG00000102858_63 (sequence is synthesized)
tgggtgtgggcacgtgccctggaatgggttgtgtcctggtgctgccccctagaggccagatggccaggggcaggtcactgagaaacagagcagccatactgaatgggtgcgtctgggctg

SEQ ID NO: 132507 - DNA, 120 bp, Artificial Sequence
  ENSG00000102858_64 (sequence is synthesized)
gcgtctgggctgcaacggctgcggaacatggtggatttgattccagccttcttggatgactttctttacaaggcaaaaatagtatttacagactgggcattgtggctcacgcctgtaatc

SEQ ID NO: 132508 - DNA, 120 bp, Artificial Sequence
  ENSG00000102858_65 (sequence is synthesized)
gtttccgccccaggctagtgtctgattcatataacccgtcagctccacttgcccagtcccggcctccctgcccagggagtttgtggaaccggaaaagctctcgaactctgacagcgtccc

SEQ ID NO: 132509 - DNA, 120 bp, Artificial Sequence
  ENSG00000102858_66 (sequence is synthesized)
cccgcctgccatcctgtcctgcagccaagagctcctctgggctcagccaggactgctgatttgcagtcacgtcctgtctcgggtgcagcctggagcttcaggggtgtgacgctttggggg

SEQ ID NO: 132510 - DNA, 120 bp, Artificial Sequence
  ENSG00000102858_67 (sequence is synthesized)
tcatggccaccagcctcttggaaacaccctctggagccccgccttgggcagcactgcatggccttgctgtgtttcctgcccggggccatttcattaatactgtgtttgcgggagttctgt

SEQ ID NO: 132511 - DNA, 120 bp, Artificial Sequence
  ENSG00000102858_68 (sequence is synthesized)
ctctcgtctttggagcgccccctccctctatttctgtacaggggagctgcttctttctttcttcccccatctttcctgcctattaaattcctgctccttaaaactaaaagaaaaaaaaaa

SEQ ID NO: 132512 - DNA, 120 bp, Artificial Sequence
  ENSG00000102858_69 (sequence is synthesized)
agccagcactacctcctgcaggagatctatggcattgagaacaagaacaaccaggagaccaagccctcggacgacgagaacagcgacaacagcaacgagtgtgtggtgtgcctgtccgac

SEQ ID NO: 132513 - DNA, 120 bp, Artificial Sequence
  ENSG00000102858_70 (sequence is synthesized)
acttgcgcaccggtgtccagtgcagcgctgctcaccgtagccaggacacaggcccagcccggtgtccgtcgcaaaggaacgcgtgcacagcgtgtggatatccacacagtgcctgttatt

SEQ ID NO: 132514 - DNA, 120 bp, Artificial Sequence
  ENSG00000102858_71 (sequence is synthesized)
tggccagaaaaaggaaagcagcaccgatgcgtgctgcaccgtgggtgaactttggaaacatacctagacacagaaggtcacctgttgtgcaattccatctgaactttgacctggaccggg

SEQ ID NO: 132515 - DNA, 120 bp, Artificial Sequence
  ENSG00000102858_72 (sequence is synthesized)
atttgggcatccagccccgtgctggagctgatggctgaggcagggagggcatcggtgctgccagggagctcttggccaccctctgagggtgggggagtctcaatcccccaaagaacagag

SEQ ID NO: 132516 - DNA, 120 bp, Artificial Sequence
  ENSG00000102858_73 (sequence is synthesized)
tggacaggaggtcatcaggaggagcgtctggggagcaggtggtccctgggcatgagccccctcacgcaccctgtccctacagaactctgacagcgtcccacctggctacgagcccatctc

SEQ ID NO: 132517 - DNA, 120 bp, Artificial Sequence
  ENSG00000102858_74 (sequence is synthesized)
aatcgcgccccgcgcatgcttcttggccccgtgtcccgctcctttaccctgcgggttcgagctccttgggctgagctttttggtttccttgggcttcccttgtgccccagggagcaggca

SEQ ID NO: 132518 - DNA, 120 bp, Artificial Sequence
  ENSG00000102858_75 (sequence is synthesized)
gggggaccagcacacaaccacctggagcctccgtggcccaggcagacccagccgaaaccctgtgtgcgttggtgtagaaggtggaggccactccggagccacccggaccgtgttttcctt

SEQ ID NO: 132519 - DNA, 120 bp, Artificial Sequence
  ENSG00000102858_76 (sequence is synthesized)
tgaaaagttctggaaatggatggtggcggttgcatgacattatagatgtactttactcaacgctgttgaaacgtagttaaaatggcagattttgtgttgtatctgttttaacacacacat

SEQ ID NO: 132520 - DNA, 120 bp, Artificial Sequence
  ENSG00000102858_77 (sequence is synthesized)
aaaaaaggtgccaagcctggcatccgccttccctgccatctcgaggcgtgtcctctgagctctgctgctgcctcctgctcctgcctgctttgtccagctcatttgttgaccgactccagg

SEQ ID NO: 132521 - DNA, 120 bp, Artificial Sequence
  ENSG00000102870_0 (sequence is synthesized)
acttcctgctccgtcccagtcaccctgaactggtccccgggtcctcagcctggaatcaccccttgagaaggaccccagagtcctcggcgcccagtccgtcccccgaggcagggcactgaa

SEQ ID NO: 132522 - DNA, 120 bp, Artificial Sequence
  ENSG00000102870_1 (sequence is synthesized)
ggggttaagtcccctggggctggattccgccttccggcttttcccagaccccagagccggtccctggaacactgcagtcctgagctctgggatggagcccgagactgcgctgtggggccc

SEQ ID NO: 132523 - DNA, 120 bp, Artificial Sequence
  ENSG00000102870_2 (sequence is synthesized)
ggatctgcagggtccggaacagagccccaacgatgctcacagaggtgccgagagtgaaaacgaagaggagagccctcggcaggaaagttctggggaggagatcatcatgggagacccggc

SEQ ID NO: 132524 - DNA, 120 bp, Artificial Sequence
  ENSG00000102870_3 (sequence is synthesized)
tcagagtccagaatccaaggactcaacagagatgtccctggagagatcctcccaggacccctctgtcccccagaaccccccaaccccactgggtcactccaatcccttggaccaccagat

SEQ ID NO: 132525 - DNA, 120 bp, Artificial Sequence
  ENSG00000102870_4 (sequence is synthesized)
ccccctggaccccccagccccggaggtagtccctaccccatctgactggaccaaggcctgcgaggccagctggcagtggggcgctctcaccacatggaacagccccccagtcgtccccgc

SEQ ID NO: 132526 - DNA, 120 bp, Artificial Sequence
  ENSG00000102870_5 (sequence is synthesized)
caacgagcccagcctgcgggagctggtgcagggccgcccggcgggggcggagaagccctacatctgcaacgagtgcggcaagagcttcagccagtggtccaagctgctgcggcaccagcg

SEQ ID NO: 132527 - DNA, 120 bp, Artificial Sequence
  ENSG00000102870_6 (sequence is synthesized)
catccacacgggagagcggcccaacacctgctccgagtgcggcaagagcttcacgcagagctcgcacctggtgcagcaccagcgcacgcacaccggcgagaagccctacaagtgccccga

SEQ ID NO: 132528 - DNA, 120 bp, Artificial Sequence
  ENSG00000102870_7 (sequence is synthesized)
ctgcggcaagtgcttcagctggagctccaacctggtgcagcaccagcgcacgcacacgggagagaagccctacaagtgcacggagtgcgagaaagccttcacccagagcaccaacctcat

SEQ ID NO: 132529 - DNA, 120 bp, Artificial Sequence
  ENSG00000102870_8 (sequence is synthesized)
caagcaccagcgatcccacaccggcgagaagccctacaagtgcggcgagtgccgccgggctttctaccgcagctcggacctcatccagcaccaggccacccacacaggcgagaaacccta

SEQ ID NO: 132530 - DNA, 120 bp, Artificial Sequence
  ENSG00000102870_9 (sequence is synthesized)
caagtgccccgagtgcgggaagcgcttcggccagaaccacaacctcctcaagcaccagaagatccacgcgggcgagaagccataccgctgcaccgagtgcgggaagagcttcatccagag

SEQ ID NO: 132531 - DNA, 120 bp, Artificial Sequence
  ENSG00000102870_10 (sequence is synthesized)
ctcggagctgacccagcaccagcgcacgcacacaggcgagaagccctacgagtgcctagagtgcggcaagagcttcggccacagctccaccctcatcaagcaccagcggactcacctgcg

SEQ ID NO: 132532 - DNA, 120 bp, Artificial Sequence
  ENSG00000102870_11 (sequence is synthesized)
cgaggacccgttcaagtgcccagtgtgcggcaagaccttcaccctgagcgccacgttgctgcggcaccagcgcacgcacacgggcgagcggccctacaagtgcccagagtgcggcaagag

SEQ ID NO: 132533 - DNA, 120 bp, Artificial Sequence
  ENSG00000102870_12 (sequence is synthesized)
cttcagcgtcagctccaacctcatcaaccaccagcgcatccaccgcggcgagcggccctacatctgcgccgactgcggcaagagcttcatcatgagctccacccttatccgccaccagcg

SEQ ID NO: 132534 - DNA, 120 bp, Artificial Sequence
  ENSG00000102870_13 (sequence is synthesized)
catccacaccggtgagaagccctacaagtgttccgactgcggcaagagcttcatccgcagctcccaccttatccagcaccgccgcacgcacaccggcgagaagccctacaagtgccccga

SEQ ID NO: 132535 - DNA, 120 bp, Artificial Sequence
  ENSG00000102870_14 (sequence is synthesized)
gtgcggcaagagcttcagccagagctccaaccttattacccacgtccgcacgcacatggacgagaacctgttcgtgtgctccgactgcgggaaggccttcctggaagcccacgagctgga

SEQ ID NO: 132536 - DNA, 120 bp, Artificial Sequence
  ENSG00000102870_15 (sequence is synthesized)
gcagcaccgggtgatccatgagagggggaagaccccagcgcgtagggcccagggcgacagcctgctggggctcggggacccctccctgctgaccccgccgccgggagccaagccgcacaa

SEQ ID NO: 132537 - DNA, 120 bp, Artificial Sequence
  ENSG00000102870_16 (sequence is synthesized)
gtgtctcgtgtgcggaaagggcttcaacgacgagggcatcttcatgcaacatcagaggatccacatcggagaaaacccctacaaaaatgcagacggcctcatcgcacacgcagcccccaa

SEQ ID NO: 132538 - DNA, 120 bp, Artificial Sequence
  ENSG00000102870_17 (sequence is synthesized)
acctcctcagttacgatccccaaggctccctttcagagggaattcctaccccggggctgcggagggcagagcggaggcccccggacagccccttaagccgccggagggtcaggagggctt

SEQ ID NO: 132539 - DNA, 120 bp, Artificial Sequence
  ENSG00000102870_18 (sequence is synthesized)
cagccagaggcgggggctgctgtcctccaagacctacatctgctcccactgcggagagagcttcctggatcgctctgtgctcctccagcatcagctcacccacggcaacgaaaagccctt

SEQ ID NO: 132540 - DNA, 120 bp, Artificial Sequence
  ENSG00000102870_19 (sequence is synthesized)
tctctttcctgattatagaattggcctaggggaaggcgcagggcccagccccttcttaagtgggaagccctttaaatgccctgaatgcaaacaaagctttggcctcagctctgagctgct

SEQ ID NO: 132541 - DNA, 120 bp, Artificial Sequence
  ENSG00000102870_20 (sequence is synthesized)
gctgcaccagaaagtccatgcaggcgggaagagctcccagaagagtccagagctggggaagagctcttccgtcctcctggagcatctcaggagccccctgggggccagaccctaccgctg

SEQ ID NO: 132542 - DNA, 120 bp, Artificial Sequence
  ENSG00000102870_21 (sequence is synthesized)
ctcagattgcagggcctccttcctcgaccgcgtggccctcacccggcaccaagaaacccacacccaggaaaaaccccccaatcccgaggacccccctccagaggcagtcaccctgtccac

SEQ ID NO: 132543 - DNA, 120 bp, Artificial Sequence
  ENSG00000102870_22 (sequence is synthesized)
agatcaggaaggtgagggcgagacccctacccccacagagagcagcagccatggggaagggcaaaaccccaaaaccctagtggaagaaaagccctatctgtgccccgagtgtggagccgg

SEQ ID NO: 132544 - DNA, 120 bp, Artificial Sequence
  ENSG00000102870_23 (sequence is synthesized)
cttcacagaagtcgcagccctcctgctccataggagctgccacccaggtgtctccctgtgaaatgggtctggagaccaggggcctcgctctctccagagaggaacactggattttttccc

SEQ ID NO: 132545 - DNA, 120 bp, Artificial Sequence
  ENSG00000102870_24 (sequence is synthesized)
ccaaaaaaattacatggggaagggaggataaccctatcagatggtagtggagtggaggagaaagaaccctgggaaaaaatagtgcttttacatcagtgatgagaaaccctataaaattgt

SEQ ID NO: 132546 - DNA, 120 bp, Artificial Sequence
  ENSG00000102870_25 (sequence is synthesized)
aagtctgtagcagaaaaaccctataaaccatagtggataaaagccctattaattgtaggaagaggtcccaatatgtctctgaacaaccctataaaattgtatcaaaatccttaggaaaat

SEQ ID NO: 132547 - DNA, 120 bp, Artificial Sequence
  ENSG00000102870_26 (sequence is synthesized)
cctatagggtcggggaagtaccgcaatggcactgacccgggagtaacgaccctcagatgatgcagaaaacacctctccctcactgttccacaatgttctctcccagcagccctggacagt

SEQ ID NO: 132548 - DNA, 120 bp, Artificial Sequence
  ENSG00000102870_27 (sequence is synthesized)
tctcatggaggaagatgctcagctgggggagtggtgtgggaactgggtggaactgaaaaggaagaaaataggagaaaaataagtgaccaggagctctggagcccccagaggagataagac

SEQ ID NO: 132549 - DNA, 120 bp, Artificial Sequence
  ENSG00000102870_28 (sequence is synthesized)
agagactaggaagaaaaggtcccactcactgcactggggtccttggggtttgaggacaatgttagatgcattgtgtgttttagggaaagaggcctatggaatcccttatcaaaaccccaa

SEQ ID NO: 132550 - DNA, 120 bp, Artificial Sequence
  ENSG00000102870_29 (sequence is synthesized)
aatggggaagaaaaaacaaattggcaagcctttttaaaggctgaagtttggggtgcagaaacatggtcagtataagaatactgagaaaccaccacaaaaattagggggaagcagggggca

SEQ ID NO: 132551 - DNA, 120 bp, Artificial Sequence
  ENSG00000102870_30 (sequence is synthesized)
gtttctgttagattgctttgaggggagcaaaccaaggtggggaaactgctcacatggaacccagctaactccaggccccttcttgcttccggaagcttgcgaaactgcaagtagcaggca

SEQ ID NO: 132552 - DNA, 120 bp, Artificial Sequence
  ENSG00000102870_31 (sequence is synthesized)
ggtcccagctctcagagtgcaagggttctccccacaccaggcaggaccaccctttctccctgcccagccagggacttctactctgcaaggcctccagggatggcggttgcctcccaccac

SEQ ID NO: 132553 - DNA, 120 bp, Artificial Sequence
  ENSG00000102870_32 (sequence is synthesized)
attctcaggtctcaccttcaggaggtttttcctgaaatctaactgccgccagtggcagctcatttcctcaaattctgtcctcagtggagagggagaaccgctgctagtcgacctccaaag

SEQ ID NO: 132554 - DNA, 120 bp, Artificial Sequence
  ENSG00000102870_33 (sequence is synthesized)
aataaagcccttcagagacttagggcctgcgtgtgggcctccccagccttctccaagtcatcagggccacagaatttcttagaaagctttgattagccagcaacttgattttaaacttca

SEQ ID NO: 132555 - DNA, 120 bp, Artificial Sequence
  ENSG00000102870_34 (sequence is synthesized)
gctattcatctttgttggtagcaaggctgccccgcaggataaggcagccctcctccctggtggggatccagacaccccacagactgagccacaggtccctgaagagtccgcagaggccgt

SEQ ID NO: 132556 - DNA, 120 bp, Artificial Sequence
  ENSG00000102870_35 (sequence is synthesized)
atcaccctcttcaccctggtacctggagccctccagggttgtgagatccagcccaatctcagccttgagatggatgggatggattccactcacttggctcccctctcctccttagccaga

SEQ ID NO: 132557 - DNA, 120 bp, Artificial Sequence
  ENSG00000102870_36 (sequence is synthesized)
aaccttcagaaggaaacagaaggatgagaaagcctcccttgccaggcccatctcacctcccacaccacacagttacacattcataaacagccaagcctgctcacaggcctgggcatatgt

SEQ ID NO: 132558 - DNA, 120 bp, Artificial Sequence
  ENSG00000102870_37 (sequence is synthesized)
ggctggggagagactgttgccctatgagatggtggaagacagaaaactcttgaatgaaacatctgtaacaagactcccactccctaatcctggagaccccttcaaaaggagaggactctg

SEQ ID NO: 132559 - DNA, 120 bp, Artificial Sequence
  ENSG00000102870_38 (sequence is synthesized)
ctcagcgctgggtcagaaaggaagtgcttgccaaccccagtaatgcgctgtcctggagtaagaggactgagatgccagctgtggggcccgtcaggagtcacgtctcaagagaggggtgac

SEQ ID NO: 132560 - DNA, 120 bp, Artificial Sequence
  ENSG00000102870_39 (sequence is synthesized)
ccagatttttgcaaagctgtggaagagacctctaattccatgacctaaagtttcacacaacctttatgcaaatccttcgccatttgtctatcctggccccagcaggatgaccctcacatt

SEQ ID NO: 132561 - DNA, 120 bp, Artificial Sequence
  ENSG00000102870_40 (sequence is synthesized)
taaaaggatcaaaatctcaaacattgtgggaggaaaacgccaggcctgctggggagagggagaaggcaggcctcaggattgtgcggagaaccatgttgccatctgcataacgccccagcc

SEQ ID NO: 132562 - DNA, 120 bp, Artificial Sequence
  ENSG00000102870_41 (sequence is synthesized)
tatccaagtgccaggaagggaagcactactgaggggggtgctgcctgtgggtctcttcctaacagaacgccaacgaagggggtgccctgtaagaatgagaagtctgccaagtctaaggag

SEQ ID NO: 132563 - DNA, 120 bp, Artificial Sequence
  ENSG00000102870_42 (sequence is synthesized)
atgtccccctccccaagatggtagcagaaactgaagttgtaaagacaaacctctcgcaaagccagaagcagatgctctcaaaaacaggcctaaggaatctgttcccagaagaggcctggg

SEQ ID NO: 132564 - DNA, 120 bp, Artificial Sequence
  ENSG00000102870_43 (sequence is synthesized)
gagcagcttttggggctcagaggccagtctggggggaggcaggcagtgtgactgaaggccggcgcaggcctgtttcggactagggtgtagcatatttagtaggatgctcacatgttgtag

SEQ ID NO: 132565 - DNA, 120 bp, Artificial Sequence
  ENSG00000102870_44 (sequence is synthesized)
ggatgggtgagggctaaggggcttggctcttgtacgggatggatgatgtgagcgcacagttcgtagggtcaggcgtcttgcggtaggaaaggggcagggttcgatacctctggggtgtgg

SEQ ID NO: 132566 - DNA, 120 bp, Artificial Sequence
  ENSG00000102870_45 (sequence is synthesized)
cgtgttctctcttgcccacctccccaagctcctttaaccaggagcttccctcccagagtgagctacgtcttgggaggattgaagcagggaggtggcagtggctagagttgctcagatcgg

SEQ ID NO: 132567 - DNA, 120 bp, Artificial Sequence
  ENSG00000102870_46 (sequence is synthesized)
ctcagatgaaggcccaggggtcaaagcatttgctcaccacaactgagtctggaaggcactgtgcagccaaaccctcttgtccaatcacatgcaggccccaggcccctcagaaacgccctg

SEQ ID NO: 132568 - DNA, 120 bp, Artificial Sequence
  ENSG00000102870_47 (sequence is synthesized)
gtggagggaggagcccaacagatagggtcagggagtcagtggggaaagcagaggggagagcttagagtgaaacttgaaactgctatggacatggaggtcagatgggaacttggaactggg

SEQ ID NO: 132569 - DNA, 120 bp, Artificial Sequence
  ENSG00000102870_48 (sequence is synthesized)
catgaatcctgaatggtggggaaacttgaagccatcacagccaagaggtggggttccatgacctgccctgaggtcagcagctcccagactcctttgccctcactagggaagccccagtca

SEQ ID NO: 132570 - DNA, 120 bp, Artificial Sequence
  ENSG00000102870_49 (sequence is synthesized)
ccggacttgtccccatggagtgaagagaggccccatttttgagtgttgtgtgtccaaaacagtgttgtgtcactggtggtcatgttgcttagttgaagagaataaagggaataagatttc

SEQ ID NO: 132571 - DNA, 120 bp, Artificial Sequence
  ENSG00000102871_0 (sequence is synthesized)
gcacacccggaagcggcggagtagagcggagcctggcgggcgtgggaacccaggccccgccgaggcggccaggaggtgagatggcagctgggcaaaatgggcacgaagagtgggtgggca

SEQ ID NO: 132572 - DNA, 120 bp, Artificial Sequence
  ENSG00000102871_1 (sequence is synthesized)
gcgcatacctgtttgtggagtcctcgctggacaaggtggtcctgtcggatgcctacgcgcacccccagcagaaggtggcagtgtacagggctctgcaggctgccttggcagagagcggcg

SEQ ID NO: 132573 - DNA, 120 bp, Artificial Sequence
  ENSG00000102871_2 (sequence is synthesized)
ggagcccggacgtgctgcagatgctgaagatccaccgcagcgacccgcagctgatcgtgcagctgcgattctgcgggcggcagccctgtggccgcttcctccgcgcctaccgcgaggggg

SEQ ID NO: 132574 - DNA, 120 bp, Artificial Sequence
  ENSG00000102871_3 (sequence is synthesized)
cgctgcgcgccgcgctgcagaggagcctggcggccgcgctcgcccagcactcggtgccgctgcaactggagctgcgcgccggcgccgagcggctggacgctttgctggcggacgaggagc

SEQ ID NO: 132575 - DNA, 120 bp, Artificial Sequence
  ENSG00000102871_4 (sequence is synthesized)
gctgtttgagttgcatcctagcccagcagcccgaccggctccgggatgaagaactggctgagctggaggatgcgctgcgaaatctgaagtgcggctcgggggcccggggtggcgacgggg

SEQ ID NO: 132576 - DNA, 120 bp, Artificial Sequence
  ENSG00000102871_5 (sequence is synthesized)
aggtcgcttcggcccccttgcagcccccggtgccctctctgtcggaggtgaagccgccgccgccgccgccacctgcccagacttttctgttccagggtcagcctgtagtgaatcggccgc

SEQ ID NO: 132577 - DNA, 120 bp, Artificial Sequence
  ENSG00000102871_6 (sequence is synthesized)
caaatggcgcaaggtggggcgctcactgcagcgaggctgccgggcgctgcgggacccggcgctggactcgctggcctacgagtacgagcgcgagggactgtacgagcaggccttccagct

SEQ ID NO: 132578 - DNA, 120 bp, Artificial Sequence
  ENSG00000102871_7 (sequence is synthesized)
gctgcggcgcttcgtgcaggccgagggccgccgcgccacgctgcagcgcctggtggaggcactcgaggagaacgagctcaccagcctggcagaggacttgctgggcctgaccgatcccaa

SEQ ID NO: 132579 - DNA, 120 bp, Artificial Sequence
  ENSG00000102871_8 (sequence is synthesized)
tggcggcctggcctagaccaggggtgcagccagcttttggagaacctggatggccttagggttccttctgcggctattgctgaacccctgtccatccacgggaccctgaaactccacttg

SEQ ID NO: 132580 - DNA, 120 bp, Artificial Sequence
  ENSG00000102871_9 (sequence is synthesized)
gcctatctgctggacctgctggggcagagttgattgccttccccaggagccagaccactgggggtgcatcattggggattctgcctcaggtactttgatagagtgtggggtgggggggac

SEQ ID NO: 132581 - DNA, 120 bp, Artificial Sequence
  ENSG00000102871_10 (sequence is synthesized)
ctgctttggagatcagcctcaccttctcccatcccagaagcggggcttacagccagcccttacagtttcactcatgaagcaccttgatctttggtgtcctggacttcatcctgggtgctg

SEQ ID NO: 132582 - DNA, 120 bp, Artificial Sequence
  ENSG00000102871_11 (sequence is synthesized)
cagatactgcagtgaagtaaaacaggaatcaatcttgcctgcccccagctcacactcagcgtgggaccccgaatgttaagcaatgataataaagtataacacggattttgatgtgagaaa

SEQ ID NO: 132583 - DNA, 120 bp, Artificial Sequence
  ENSG00000102871_12 (sequence is synthesized)
ggccacaggaggctgaagcgggttgggggatctgttcgtggcctcagagcggcgagagcccctcttcttcccgagcagtgggagtcgcgcttggtggaggccgaagacctgagacctctc

SEQ ID NO: 132584 - DNA, 120 bp, Artificial Sequence
  ENSG00000102871_13 (sequence is synthesized)
agagcgggggttaggtggcacccactctgtcttagggtgctccctgtgacagatcctggtcttctttctgggttattgctgtttgtatcccaattttgcttcccagctgggtactctggg

SEQ ID NO: 132585 - DNA, 120 bp, Artificial Sequence
  ENSG00000102871_14 (sequence is synthesized)
gtaactgcaccctaggtcaggggatgggacgcggggcttcaccacgggcttcgcccctcctccggccgtttggagaacggccgagcttggggaccgcccggcgcctgaccgcccgcctcc

SEQ ID NO: 132586 - DNA, 120 bp, Artificial Sequence
  ENSG00000102871_15 (sequence is synthesized)
gcggacgaggagcgctgtttgagttgcatcctagcccagcaggtgcggccgggctagggtcaggatggggtagggcggggatccgcggttaagtcccccgtgacggcacgttccattccc

SEQ ID NO: 132587 - DNA, 120 bp, Artificial Sequence
  ENSG00000102878_0 (sequence is synthesized)
atgcaggaagcgccagctgcgctgcccacggagccaggccccagccccgtgcctgccttcctcggcaagctatgggcgctggtgggggacccaggcacagaccacctgatccgctggagc

SEQ ID NO: 132588 - DNA, 120 bp, Artificial Sequence
  ENSG00000102878_1 (sequence is synthesized)
ccgagcgggaccagtttcctcgtaagcgaccagagccgtttcgccaaggaagtgctgccccagtatttcaagcatagcaacatggcgagcttcgtgcgccaactcaacatgtacggtttt

SEQ ID NO: 132589 - DNA, 120 bp, Artificial Sequence
  ENSG00000102878_2 (sequence is synthesized)
cggaaggtggtgagcatcgagcagggcggcctgcttaggccggagcgcgaccacgtcgagttccagcacccgagcttcgtgcgcggccgcgagcagctactggagcgcgtgcggcgcaag

SEQ ID NO: 132590 - DNA, 120 bp, Artificial Sequence
  ENSG00000102878_3 (sequence is synthesized)
gtgcccgcgctgcgcggcgacgacggccgctggcgcccggaggacctgggtcgactactgggcgaggtgcaggctttgcggggagtgcaggagagcaccgaggcgcggctgcgggagctc

SEQ ID NO: 132591 - DNA, 120 bp, Artificial Sequence
  ENSG00000102878_4 (sequence is synthesized)
aggcagcagaacgagatcttgtggcgggaggtggtgacacttcggcagagccacggtcagcagcaccgggtcattggcaagctgatccagtgtctctttgggccacttcaggcggggccg

SEQ ID NO: 132592 - DNA, 120 bp, Artificial Sequence
  ENSG00000102878_5 (sequence is synthesized)
agcaatgcaggaggcaagagaaagctgtccctgatgctggatgaggggagctcatgcccaacacctgccaagttcaacacctgccctctacctggtgcccttctgcaggacccctacttc

SEQ ID NO: 132593 - DNA, 120 bp, Artificial Sequence
  ENSG00000102878_6 (sequence is synthesized)
ccagaagactctccatcccctgaggggaccaggctttctccctccagtgatggcaggagggagaagggcctggcactgctcaaagaagagccggccagtccagggggggatggcgaggcc

SEQ ID NO: 132594 - DNA, 120 bp, Artificial Sequence
  ENSG00000102878_7 (sequence is synthesized)
gggctggccctggccccaaacgagtgtgacttctgcgtgacagcccccccgccactgcctgtggctgtggtgcaggccatcctggaagggaaagggagcttcagccccgaggggcccagg

SEQ ID NO: 132595 - DNA, 120 bp, Artificial Sequence
  ENSG00000102878_8 (sequence is synthesized)
aatgcccaacagcctgaaccaggggatcccagggagatacctgacagggggcctctgggcctggaaagcggggacaggagcccagagagtctgctgcctccgatgctgcttcagccccct

SEQ ID NO: 132596 - DNA, 120 bp, Artificial Sequence
  ENSG00000102878_9 (sequence is synthesized)
caagaaagtgtggaacctgcagggcctctagatgtgctgggccccagtctccaagggcgagaatggaccctgatggacttggacatggagctgtccttgatgcagcccttggttccagag

SEQ ID NO: 132597 - DNA, 120 bp, Artificial Sequence
  ENSG00000102878_10 (sequence is synthesized)
cggggtgagcctgagctggcggtcaaggggttaaattctccaagcccagggaaggaccccacgctcggggccccactcctgctggatgtccaggcggccttgggaggcccagccctgggc

SEQ ID NO: 132598 - DNA, 120 bp, Artificial Sequence
  ENSG00000102878_11 (sequence is synthesized)
ctgcctggggctttaaccatttatagcactcctgagagccggactgcctcctacttgggcccggaagccagtccctccccctaagaccccgcgcctctgaaggggcttggaaccagtccg

SEQ ID NO: 132599 - DNA, 120 bp, Artificial Sequence
  ENSG00000102878_12 (sequence is synthesized)
caggtaatggttgtgatgactcctacctgggaggacgccgtgattgggctgagctaccttgattgagtgagggggcaatctgcaatttgcagggaaatcctgagttcaggctgcactgca

SEQ ID NO: 132600 - DNA, 120 bp, Artificial Sequence
  ENSG00000102878_13 (sequence is synthesized)
gagcgttccttgagccacccatgccctcaccattgggcgagagtggggaggttaagaatggatgttttatcctaactgagcagaaggcaggcgggcagggctctccttccctgaagaaag

SEQ ID NO: 132601 - DNA, 120 bp, Artificial Sequence
  ENSG00000102878_14 (sequence is synthesized)
tgcacatccttcttggcttcctggcgccccctatcgggggtgagcgaagcccccactactaaatggcctctctccactaccccgactatccctgcacataaactccgttttttttttttc

SEQ ID NO: 132602 - DNA, 120 bp, Artificial Sequence
  ENSG00000102878_15 (sequence is synthesized)
atctagacttatgggcgatctctgggatggccagtcagcggggtggtctcctgggtccccagcctcgccattctgtggggggtggtgactgggcgaactctcagatgcctcagcaccctc

SEQ ID NO: 132603 - DNA, 120 bp, Artificial Sequence
  ENSG00000102878_16 (sequence is synthesized)
cctgacccggcgccccggggcggagtagggcggagcgggcggcaaacgcagcactttccgcggctttgacgagcccgcagcggccgggcccgagcgcagagccgggccgagactgcacca

SEQ ID NO: 132604 - DNA, 120 bp, Artificial Sequence
  ENSG00000102878_17 (sequence is synthesized)
gccctccagcatggactgagcctcctccctcaaaccttctcccttagacctggcccagcctctcccagagacaaatttgggccttagccctcacagggccaggggccccatcatctctga

SEQ ID NO: 132605 - DNA, 120 bp, Artificial Sequence
  ENSG00000102878_18 (sequence is synthesized)
gatggacttggacatggagctgtccttgatgcagcccttggttccagagcggggtgagcctgagctggcggtcaaggggttaaattctccaagcccaggaccccacgctcggggccccac

SEQ ID NO: 132606 - DNA, 120 bp, Artificial Sequence
  ENSG00000102878_19 (sequence is synthesized)
acccaggcacagaccacctgatccgctggagcccggtgagggccggggcccctcgattccccctgtggtcccggggtccctccacgtcagtgaacacccatgcccgcccaaccccctcct

SEQ ID NO: 132607 - DNA, 120 bp, Artificial Sequence
  ENSG00000102878_20 (sequence is synthesized)
gagactgggccgtggatccccggatttggccattcagagaagttcaccttggagggggtgtgcgagaggggggtttcctctgcggccgaagaagggttaggagcctgccttctgaagacc

SEQ ID NO: 132608 - DNA, 120 bp, Artificial Sequence
  ENSG00000102878_21 (sequence is synthesized)
tagagtccgagggaccttcgaggccatttagttcccaccctaccccatccgacagatgggaaaacagaggccgggagatgggaagggctggtctagctcagggtcacattgcggggctgg

SEQ ID NO: 132609 - DNA, 120 bp, Artificial Sequence
  ENSG00000102878_22 (sequence is synthesized)
cctggcctcgacccatatccccgtaagcggcaggcctggacccaagagtgagcatgagtgtgtgcgcgcgctggagcgcaggactggccgtgagcgggcaccgctcaccctcctggtctc

SEQ ID NO: 132610 - DNA, 120 bp, Artificial Sequence
  ENSG00000102879_0 (sequence is synthesized)
agattcgcttcccggagccgggatggcagcctgcgctatggttggggaccaacgtggtgcacgggcaggggccggggagagaggcggccgcagcgggagcccgggagcgcagggcgggcc

SEQ ID NO: 132611 - DNA, 120 bp, Artificial Sequence
  ENSG00000102879_1 (sequence is synthesized)
tggaagagctccgccccaaggggcgcggccaccccggaggcgggcgcacggctgcttctcattcattgtcttgacaagagcatcttcagcgggcgagtccccggctcctccagctccttc

SEQ ID NO: 132612 - DNA, 120 bp, Artificial Sequence
  ENSG00000102879_2 (sequence is synthesized)
ctcctcttcctcctcctcctccacctccggcttttgggggatcactgtcctctctcggcagcagaatgagccggcaggtggtccgctccagcaagttccgccacgtgtttggacagccgg

SEQ ID NO: 132613 - DNA, 120 bp, Artificial Sequence
  ENSG00000102879_3 (sequence is synthesized)
ccaaggccgaccagtgctatgaagatgtgcgcgtctcacagaccacctgggacagtggcttctgtgctgtcaaccctaagtttgtggccctgatctgtgaggccagcgggggaggggcct

SEQ ID NO: 132614 - DNA, 120 bp, Artificial Sequence
  ENSG00000102879_4 (sequence is synthesized)
tcctggtgctgcccctgggcaagactggacgtgtggacaagaatgcgcccacggtctgtggccacacagcccctgtgctagacatcgcctggtgcccgcacaatgacaacgtcattgcca

SEQ ID NO: 132615 - DNA, 120 bp, Artificial Sequence
  ENSG00000102879_5 (sequence is synthesized)
gtggctccgaggactgcacagtcatggtgtgggagatcccagatgggggcctgatgctgcccctgcgggagcccgtcgtcaccctggagggccacaccaagcgtgtgggcattgtggcct

SEQ ID NO: 132616 - DNA, 120 bp, Artificial Sequence
  ENSG00000102879_6 (sequence is synthesized)
ggcacaccacagcccagaacgtgctgctcagtgcaggttgtgacaacgtgatcatggtgtgggacgtgggcactggggcggccatgctgacactgggcccagaggtgcacccagacacga

SEQ ID NO: 132617 - DNA, 120 bp, Artificial Sequence
  ENSG00000102879_7 (sequence is synthesized)
acagtgtggactggagccgagatggaggcctcatttgtacctcctgccgtgacaagcgcgtgcgcatcatcgagccccgcaaaggcactgtcgtagctgagaaggaccgtccccacgagg

SEQ ID NO: 132618 - DNA, 120 bp, Artificial Sequence
  ENSG00000102879_8 (sequence is synthesized)
ggacccggcccgtgcgtgcagtgttcgtgtcggaggggaagatcctgaccacgggcttcagccgcatgagtgagcggcaggtggcgctgtgggacacaaagcacctggaggagccgctgt

SEQ ID NO: 132619 - DNA, 120 bp, Artificial Sequence
  ENSG00000102879_9 (sequence is synthesized)
ccctgcaggagctggacaccagcagcggtgtcctgctgcccttctttgaccctgacaccaacatcgtctacctctgtggcaagggtgacagctcaatccggtactttgagatcacttccg

SEQ ID NO: 132620 - DNA, 120 bp, Artificial Sequence
  ENSG00000102879_10 (sequence is synthesized)
aggcccctttcctgcactatctctccatgttcagttccaaggagtcccagcggggcatgggctacatgcccaaacgtggcctggaggtgaacaagtgtgagatcgccaggttctacaagc

SEQ ID NO: 132621 - DNA, 120 bp, Artificial Sequence
  ENSG00000102879_11 (sequence is synthesized)
tgcacgagcggaggtgtgagcccattgccatgacagtgcctcgaaagtcggacctgttccaggaggacctgtacccacccaccgcagggcccgaccctgccctcacggctgaggagtggc

SEQ ID NO: 132622 - DNA, 120 bp, Artificial Sequence
  ENSG00000102879_12 (sequence is synthesized)
tggggggtcgggatgctgggcccctcctcatctccctcaaggatggctacgtacccccaaagagccgggagctgagggtcaaccggggcctggacaccgggcgcaggagggcagcaccag

SEQ ID NO: 132623 - DNA, 120 bp, Artificial Sequence
  ENSG00000102879_13 (sequence is synthesized)
aggccagtggcactcccagctcggatgccgtgtctcggctggaggaggagatgcggaagctccaggccacggtgcaggagctccagaagcgcttggacaggctggaggagacagtccagg

SEQ ID NO: 132624 - DNA, 120 bp, Artificial Sequence
  ENSG00000102879_14 (sequence is synthesized)
ccaagtagagccccgcagggcctccagcagggtcagccattcacacccatccactcacctcccattcccagccacatggcagagaaaaaaatcataataaaatggctttattttctggta

SEQ ID NO: 132625 - DNA, 120 bp, Artificial Sequence
  ENSG00000102879_15 (sequence is synthesized)
gtcttgacaagagcatcttcagcgggcgagtccccggctcctccagctccttcctcctcttcctcctcctcctccacctccggcttttgggggatcactgtcctctctcggcagcagata

SEQ ID NO: 132626 - DNA, 120 bp, Artificial Sequence
  ENSG00000102879_16 (sequence is synthesized)
caggctgctcctcaagactggggctcttcacatacgctcctcaccgctctttgggcaggccgacctagcagcctcttcgggagtcctggggtggccgggggtgctggagcccccaaatga

SEQ ID NO: 132627 - DNA, 120 bp, Artificial Sequence
  ENSG00000102879_17 (sequence is synthesized)
tgagcccctggggccctggggggagcagctcctccaccggacccatggctctgtgcaggtcctgattaggtgacggtcaccaggccttccagggcctgtgttgccatctggaaaactgag

SEQ ID NO: 132628 - DNA, 120 bp, Artificial Sequence
  ENSG00000102879_18 (sequence is synthesized)
ctgggccccatgagccttacacttcctccagctcctctgtgctgtggctgtgtggaaactgacgctcagaaggagccaacacaagatgggtcacaccagtgaccaggactacagacagtc

SEQ ID NO: 132629 - DNA, 120 bp, Artificial Sequence
  ENSG00000102879_19 (sequence is synthesized)
ggggccaggtagcgggcgcagcagcccgtggggggacgctgcttggagtgggggccgccggggccccagagcgctctgcggaggcgagggctagggaccaccgcggccaagatggagaat

SEQ ID NO: 132630 - DNA, 120 bp, Artificial Sequence
  ENSG00000102879_20 (sequence is synthesized)
aacgtcattgccagtggctccgaggactgcacagtcatggtgagtggtggtggggacccaggggctgggagaggggctctaggatgggatctgacatttggagtcctgaagactcactgg

SEQ ID NO: 132631 - DNA, 120 bp, Artificial Sequence
  ENSG00000102879_21 (sequence is synthesized)
cccagaacgtgctgctcagtgcaggtgctgcgggaggaggggcttgggggtggctcgtggcctgcagtggatgagggcaggaggctcatggcttctgacactgtggggaacgtgcaggtt

SEQ ID NO: 132632 - DNA, 120 bp, Artificial Sequence
  ENSG00000102879_22 (sequence is synthesized)
cgtccctgctctgccactcacctggcaggatggccatgggcctcagtttacccaggcgtgagatggttgttcccactggttggtcgggagggccctcacaggtcactgcccagggaagac

SEQ ID NO: 132633 - DNA, 120 bp, Artificial Sequence
  ENSG00000102879_23 (sequence is synthesized)
caccatcccagggcctgggatgttacctctcacctgtgtctacagaagcacctggaggagccgctgtccctgcaggagctggacaccagcagcggtgtcctgctgcccttctttgaccct

SEQ ID NO: 132634 - DNA, 120 bp, Artificial Sequence
  ENSG00000102879_24 (sequence is synthesized)
gacaccaacatcgtctacctctgtggcaaggtggcctcgtcgggcggggtgggggtgggaggtgggcaggatgggcctggagagggccagggcagtgggcatccgctggtattgaccctc

SEQ ID NO: 132635 - DNA, 120 bp, Artificial Sequence
  ENSG00000102879_25 (sequence is synthesized)
cagtgcctcgaaaggtgatgctcccccgccccaccctgggctccaggctgggcactgactttgcggtcttgtggggggtgtcctggcataagcgctttcctcactatccctggccttgcc

SEQ ID NO: 132636 - DNA, 120 bp, Artificial Sequence
  ENSG00000102879_26 (sequence is synthesized)
agggaataaaactgggagggtggggtggggctggtgtttggggcacctcaaactcacaacattgggaatctttgtgggtccgggaatggtaatcctgaggcctcagaacacaggtttcag

SEQ ID NO: 132637 - DNA, 120 bp, Artificial Sequence
  ENSG00000102879_27 (sequence is synthesized)
attgataggcctgcaggtctccaggcagcaaccagctgagcgactaaagggcccaaggccagggctctagggatggggctcagcagaggctggggtaaggggagccagggaggagctggg

SEQ ID NO: 132638 - DNA, 120 bp, Artificial Sequence
  ENSG00000102879_28 (sequence is synthesized)
ggctttctccccatggaaacacagagggggttgggatggggtctgggggccctggcagcgttctcagggttgggagggactctggctctgggcctgtctgaggacctagcaactctgtcc

SEQ ID NO: 132639 - DNA, 120 bp, Artificial Sequence
  ENSG00000102879_29 (sequence is synthesized)
cccagctcgcaggcagggatgatgcaagaggtgctctcccccacccgcagccctgccctcccctggagcctgctgccccctccgctggctggctgctgccccgcacccccagcacactcc

SEQ ID NO: 132640 - DNA, 120 bp, Artificial Sequence
  ENSG00000102879_30 (sequence is synthesized)
tgtgctctttggggggtaagacaggaaggggagatgggccccaagttgttaccttaaaagggctgatggaagcaaagagaagaggaagtggttgtcggggtgagagctgggcccgcgccc

SEQ ID NO: 132641 - DNA, 120 bp, Artificial Sequence
  ENSG00000102879_31 (sequence is synthesized)
cacatggctgtcacacaggaagccctgctgaagcagctgtccccggaagaagccatttccaaacctctgctcctgcctggggccagttgggacaggctccctggcccctctccttttggg

SEQ ID NO: 132642 - DNA, 120 bp, Artificial Sequence
  ENSG00000102879_32 (sequence is synthesized)
aggacccacccctgcagccccaccactcacactcgctctctggggagctgcctccacccccccagcccccatacacctgtcctggctccagggccagttgtgcccatggaagcctcactc

SEQ ID NO: 132643 - DNA, 120 bp, Artificial Sequence
  ENSG00000102879_33 (sequence is synthesized)
ggggaagctggggtgggggtgccaaccctaagggcagagacagactgagacagagaccggcgggaactctgccagggtcttgcacggcccccaacctctgccatgcgtggccagccctcc

SEQ ID NO: 132644 - DNA, 120 bp, Artificial Sequence
  ENSG00000102879_34 (sequence is synthesized)
gcccccgtccccaccccaggccctggtccagctcccagggacaccacagctttcctctctgggcctctctgaaggaggtgtggggaggttggattgggtttgggaggcaaaagcacctcc

SEQ ID NO: 132645 - DNA, 120 bp, Artificial Sequence
  ENSG00000102879_35 (sequence is synthesized)
gttgctgcctccagaagcctctctgaatccaagggtgggaactattcctccttgccctcgagccttcgccaaagccagggcttggagcggccgtgggctcctcctccttcccccaggctg

SEQ ID NO: 132646 - DNA, 120 bp, Artificial Sequence
  ENSG00000102879_36 (sequence is synthesized)
ggctcttcaggggcggaaacctgcctggcttgcctgccttgctcgaccctgtagcccctggcacgaaaatgagccggcaggtggtccgctccagcaagttccgccacgtgtttggacagc

SEQ ID NO: 132647 - DNA, 120 bp, Artificial Sequence
  ENSG00000102879_37 (sequence is synthesized)
ccagctcctgtccctgcctttaggaagcgctgtgtgggtgtgagggaggtgggctctggacacggtaactaagagagaacccaccctcggagccatctgggctgatgacgcctgagtctg

SEQ ID NO: 132648 - DNA, 120 bp, Artificial Sequence
  ENSG00000102879_38 (sequence is synthesized)
aaccattaggaaggacgggctctgcatccatcagccagtcagtcaacaaacatgcagtggggcaacaccacgccaggctctgttgcagaggctgaggaatgagccggcaggtggtccgct

SEQ ID NO: 132649 - DNA, 120 bp, Artificial Sequence
  ENSG00000102879_39 (sequence is synthesized)
gctcgaccctgtagcccctggcacgaagtaggtgcccgtgatgccggattatttcagcaggagggcaggggtgttcccgatgaagccaggagatccagggaggagaagcgactcccgggg

SEQ ID NO: 132650 - DNA, 120 bp, Artificial Sequence
  ENSG00000102882_0 (sequence is synthesized)
gaggagtggagatggcggcggcggcggctcaggggggcgggggcggggagccccgtagaaccgagggggtcggcccgggggtcccgggggaggtggagatggtgaaggggcagccgttcg

SEQ ID NO: 132651 - DNA, 120 bp, Artificial Sequence
  ENSG00000102882_1 (sequence is synthesized)
acgtgggcccgcgctacacgcagttgcagtacatcggcgagggcgcgtacggcatggtcagctcggcctatgaccacgtgcgcaagactcgcgtggccatcaagaagatcagccccttcg

SEQ ID NO: 132652 - DNA, 120 bp, Artificial Sequence
  ENSG00000102882_2 (sequence is synthesized)
aacatcagacctactgccagcgcacgctccgggagatccagatcctgctgcgcttccgccatgagaatgtcatcggcatccgagacattctgcgggcgtccaccctggaagccatgagag

SEQ ID NO: 132653 - DNA, 120 bp, Artificial Sequence
  ENSG00000102882_3 (sequence is synthesized)
atgtctacattgtgcaggacctgatggagactgacctgtacaagttgctgaaaagccagcagctgagcaatgaccatatctgctacttcctctaccagatcctgcggggcctcaagtaca

SEQ ID NO: 132654 - DNA, 120 bp, Artificial Sequence
  ENSG00000102882_4 (sequence is synthesized)
tccactccgccaacgtgctccaccgagatctaaagccctccaacctgctcatcaacaccacctgcgaccttaagatttgtgatttcggcctggcccggattgccgatcctgagcatgacc

SEQ ID NO: 132655 - DNA, 120 bp, Artificial Sequence
  ENSG00000102882_5 (sequence is synthesized)
acaccggcttcctgacggagtatgtggctacgcgctggtaccgggccccagagatcatgctgaactccaagggctataccaagtccatcgacatctggtctgtgggctgcattctggctg

SEQ ID NO: 132656 - DNA, 120 bp, Artificial Sequence
  ENSG00000102882_6 (sequence is synthesized)
agatgctctctaaccggcccatcttccctggcaagcactacctggatcagctcaaccacattctgggcatcctgggctccccatcccaggaggacctgaattgtatcatcaacatgaagg

SEQ ID NO: 132657 - DNA, 120 bp, Artificial Sequence
  ENSG00000102882_7 (sequence is synthesized)
tttaaccccaataaacggatcacagtggaggaagcgctggctcacccctacctggagcagtactatgacccgacggatgagccagtggccgaggagcccttcaccttcgccatggagctg

SEQ ID NO: 132658 - DNA, 120 bp, Artificial Sequence
  ENSG00000102882_8 (sequence is synthesized)
gatgacctacctaaggagcggctgaaggagctcatcttccaggagacagcacgcttccagcccggagtgctggaggccccctagcccagacagacatctctgcaccctggggcctggacc

SEQ ID NO: 132659 - DNA, 120 bp, Artificial Sequence
  ENSG00000102882_9 (sequence is synthesized)
tgcctcctgcctgcccctctcccgccagactgttagaaaatggacactgtgcccagcccggaccttggcagcccaggccggggtggagcatgggcctggccacctctctcctttgctgag

SEQ ID NO: 132660 - DNA, 120 bp, Artificial Sequence
  ENSG00000102882_10 (sequence is synthesized)
gcctccagcttcaggcaggccaaggccttctcctccccacccgccctccccacggggcctcgggacctcaggtggccccagttcaatctcccgctgctgctgctgcgcccttaccttccc

SEQ ID NO: 132661 - DNA, 120 bp, Artificial Sequence
  ENSG00000102882_11 (sequence is synthesized)
cagcgtcccagtctctggcagttctggaatggaagggttctggctgccccaacctgctgaagggcagaggtggagggtggggggcgctgagtagggactcagggccatgcctgcccccct

SEQ ID NO: 132662 - DNA, 120 bp, Artificial Sequence
  ENSG00000102882_12 (sequence is synthesized)
catctcattcaaaccccaccctagtttccctgaaggaacattccttagtctcaagggctagcatccctgaggagccaggccgggccgaatcccctccctgtcaaagctgtcacttcgcgt

SEQ ID NO: 132663 - DNA, 120 bp, Artificial Sequence
  ENSG00000102882_13 (sequence is synthesized)
gccctcgctgcttctgtgtgtggtgagcagaagtggagctggggggcgtggagagcccggcgcccctgccacctccctgacccgtctaatatataaatatagagatgtgtctatggctga

SEQ ID NO: 132664 - DNA, 120 bp, Artificial Sequence
  ENSG00000102882_14 (sequence is synthesized)
agactggtggcccaccgagtcctccagccccaaatgtctctgcctgtcaacaccttgcatcctccagccccacaagccattctaatctccttctaggaacagaactggcaaagaggcaag

SEQ ID NO: 132665 - DNA, 120 bp, Artificial Sequence
  ENSG00000102882_15 (sequence is synthesized)
gagcgctttccgggacgtggagacgcggagcgtcccgaggaggcaggagactcgggatgatcgggagcgtcccagggagggggcccctgagtgctttctgggggagggggcgctgcctac

SEQ ID NO: 132666 - DNA, 120 bp, Artificial Sequence
  ENSG00000102882_16 (sequence is synthesized)
gtcctcaggggagcaggcttggaggctttgagtccacccttctgtaatgatgggaggggcatccgagtgcatgtgggggcccgcggggaccctagtgacacggggcgaggcccagaggat

SEQ ID NO: 132667 - DNA, 120 bp, Artificial Sequence
  ENSG00000102882_17 (sequence is synthesized)
gagtactctcggggaggcgacatccttagtgaagaggcagtggagggcccgttttgggggaaagggtgtcttggattccccctgtgaggcagtgccagggagcctgggggagaagagccg

SEQ ID NO: 132668 - DNA, 120 bp, Artificial Sequence
  ENSG00000102882_18 (sequence is synthesized)
agatcagggtggggcagggctttggccccaccaccccaggggcccagagagagatgaggcggccaggagtgccacctgcatgttttgggaggggtctgtgagtgcccccggccccaccgt

SEQ ID NO: 132669 - DNA, 120 bp, Artificial Sequence
  ENSG00000102882_19 (sequence is synthesized)
gtgctctgggcctctatccctctgggacagccccgctgcccggatccctcaccctgggaccctcccctgccctgtccattctctcctgcccctcccctggctgccaccttcccagtattt

SEQ ID NO: 132670 - DNA, 120 bp, Artificial Sequence
  ENSG00000102882_20 (sequence is synthesized)
gccccatggtgtgtccccagcatctgcacccccggacctgtcttgggttaaggagcctttcctgggaatgggggcgaagggttcagggccagtagaatggaaggggattgaggagagggg

SEQ ID NO: 132671 - DNA, 120 bp, Artificial Sequence
  ENSG00000102882_21 (sequence is synthesized)
aagtcagtgagcggtcagtctcttcctctgtttgtaaagtcaccgaagggccgcctggctggtccccagctttctctctggagatcccaggcctccacagcaggaaggaaccagcattgt

SEQ ID NO: 132672 - DNA, 120 bp, Artificial Sequence
  ENSG00000102882_22 (sequence is synthesized)
ttatgatttgaccagagccagctcctgctctctcccctccctgccaaggcctgggtggggccaccaggcccggactccccctttgtaaggccacagcagcagcctctctccggtcccctc

SEQ ID NO: 132673 - DNA, 120 bp, Artificial Sequence
  ENSG00000102882_23 (sequence is synthesized)
agggtgtgtgagcccagcagccgctggaggagacaggcaaagcaatgcttctcggagctcctccagtcttccctgtgacccctgactcctgcccttccatagcccttgacctgctggacc

SEQ ID NO: 132674 - DNA, 120 bp, Artificial Sequence
  ENSG00000102882_24 (sequence is synthesized)
gttcgacgtgggcccgcgctacacgcagttgcagtacatcggcgagggcgcgtacggcatggtcaggccacagcagcagcctctctccggtcccctcagctcggcctatgaccacgtgcg

SEQ ID NO: 132675 - DNA, 120 bp, Artificial Sequence
  ENSG00000102882_25 (sequence is synthesized)
acggaccagttcccaggaagccctggagctacctctgagccagacactgacccccatgacacaggaattctaccctctgggccttgggctctgcaaggaagctgagcattgagccctcca

SEQ ID NO: 132676 - DNA, 120 bp, Artificial Sequence
  ENSG00000102882_26 (sequence is synthesized)
cgggagaggaggaggaggcgccgagcgctttccgggacgtggagacgcggagcgtcccgaggagctcggcctatgaccacgtgcgcaagactcgcgtggccatcaagaagatcagcccct

SEQ ID NO: 132677 - DNA, 120 bp, Artificial Sequence
  ENSG00000102882_27 (sequence is synthesized)
aaactacctacagtctctgccctccaagaccaaggtggcttgggccaagcttttccccaagtcagactccaaaggttcgagagacatgaggcccttgacctgctggaccggatgttaacc

SEQ ID NO: 132678 - DNA, 120 bp, Artificial Sequence
  ENSG00000102886_0 (sequence is synthesized)
agcacagtcccgcggacggctgagcgtgtggctgcaggagcttctgtgggagtacggtcatgagccttttgctgtactatgccctccctgccctgggcagctatgccatgctctccatct

SEQ ID NO: 132679 - DNA, 120 bp, Artificial Sequence
  ENSG00000102886_1 (sequence is synthesized)
tcttcctgcgccggcctcatctgctgcacacgcccagggctcccaccttccgcatccgcctgggggcccaccgaggaggatctggagagctgctggagaacaccatggaggccatggaga

SEQ ID NO: 132680 - DNA, 120 bp, Artificial Sequence
  ENSG00000102886_2 (sequence is synthesized)
actccatggcccagcgctcggacctcctggagctcgactgtcagctgacacgggacagagtggtggtggtgtcacatgatgagaacctgtgccgccagtcgggcctaaacagggatgtgg

SEQ ID NO: 132681 - DNA, 120 bp, Artificial Sequence
  ENSG00000102886_3 (sequence is synthesized)
gcagcctggacttcgaggacctgcccctctacaaggagaagctggaggtttacttctctccaggccactttgctcacgggtcagaccggcgcatggttcgtctggaggacctgttccaga

SEQ ID NO: 132682 - DNA, 120 bp, Artificial Sequence
  ENSG00000102886_4 (sequence is synthesized)
gaagagctcggtcatgaagaaatgcaaggctgccaaccccgagatgcccctgtccttcacaataagccgaggattctgggtgctgctttcctactacctggggctgctgcccttcatccc

SEQ ID NO: 132683 - DNA, 120 bp, Artificial Sequence
  ENSG00000102886_5 (sequence is synthesized)
aatccctgagaagttcttcttctgcttcctgcccaacatcatcaacaggacctatttcccattttcctgctcttgcctgaaccagttattggctgtggtttcgaaatggctgatcatgag

SEQ ID NO: 132684 - DNA, 120 bp, Artificial Sequence
  ENSG00000102886_6 (sequence is synthesized)
gaagagtctgatccgacacttggaggagcgaggggtgcaggtggtcttttggtgccttaatgaagagtcggattttgaagcagccttcagcgtgggagccactggcgtcataacggatta

SEQ ID NO: 132685 - DNA, 120 bp, Artificial Sequence
  ENSG00000102886_7 (sequence is synthesized)
tcccacagccctgcggcactacctggacaaccatggaccagctgcccggacctcctaagtccagaagcctcgaggtctcctgtttctcttcctgaaaaataaatatttgcctttcgatca

SEQ ID NO: 132686 - DNA, 120 bp, Artificial Sequence
  ENSG00000102886_8 (sequence is synthesized)
gacctatttcccattttcctgctcttgcctgaaccagttattggctgtggtttcgaaatggctgatcatgaggaagagtctgatccgacacttggaggagcgaggggtgcaggtgaggcc

SEQ ID NO: 132687 - DNA, 120 bp, Artificial Sequence
  ENSG00000102886_9 (sequence is synthesized)
cagcccaccccacctctgggacaggggagaccctaggagctaacccccacttccttctctctgcaggacctatttcccattttcctgctcttgcctgaaccagttattggctgtggtttc

SEQ ID NO: 132688 - DNA, 120 bp, Artificial Sequence
  ENSG00000102886_10 (sequence is synthesized)
gaaatggtgaggtgggcaagatggctgggtggcgtgtccccatagagacctactgctgcccttctcccaggtcccctctcatcatcacctcccacgtccccaccccacccccaggctgat

SEQ ID NO: 132689 - DNA, 120 bp, Artificial Sequence
  ENSG00000102886_11 (sequence is synthesized)
agtgagtgtatctgcccctgcccaggctgccatgtgagggtgtgcaggtcgtggactgcatcacagcaagggacgccattcacttcctagctgggtgactggcgccccctggaggtggcc

SEQ ID NO: 132690 - DNA, 120 bp, Artificial Sequence
  ENSG00000102890_0 (sequence is synthesized)
ggaactaacctcggctcccttgggaaggccgcgttgcatggccaggagcagcagtctgggccgcgagtgcgggacaccgaggtcaggtctcggaaagggaggacctcctcgtccccaggg

SEQ ID NO: 132691 - DNA, 120 bp, Artificial Sequence
  ENSG00000102890_1 (sequence is synthesized)
gccccaggccaggtgcacccttggccgcaggtgcacggtctccggaaagtgcaggcgcccacgtcccagctggaccatggcgcctccgcggaacgtggtgaagattgccatcaagatgcg

SEQ ID NO: 132692 - DNA, 120 bp, Artificial Sequence
  ENSG00000102890_2 (sequence is synthesized)
tgacgccatcccgcagctcatccagctggaccaggcgaagcccctggccgctgtgctgaaggaggtgtgcgacgcgtggagcctgacgcactctgagcgttacgccctgcagtttgcgga

SEQ ID NO: 132693 - DNA, 120 bp, Artificial Sequence
  ENSG00000102890_3 (sequence is synthesized)
tgggcaccggagatacatcaccgagaataaccgcgcggagatcaagaatggcagcatcctgtgcctcagcacggccccagaccttgaggctgagcagctcttgggtgggctgcagagtaa

SEQ ID NO: 132694 - DNA, 120 bp, Artificial Sequence
  ENSG00000102890_4 (sequence is synthesized)
cagtcctgaagggcgccgggaagccctgaggcgccttgttccgctggcctcggacatgatctttgccagggaggtcatcagccgtaatgggctccagatactaggcaccatcattgaaga

SEQ ID NO: 132695 - DNA, 120 bp, Artificial Sequence
  ENSG00000102890_5 (sequence is synthesized)
tggggacgacctaggagaggtgctggccctcagcctgagggccttctcagagctcatggagcacggcgtggtgtcctgggagactctgagcatcccctttgtgaggaaggtggtgtgcta

SEQ ID NO: 132696 - DNA, 120 bp, Artificial Sequence
  ENSG00000102890_6 (sequence is synthesized)
cgtgaacatgaacctcatggatgcctccgtgcctcccctggcccttgggctgctggagagtgtgaccttgagcagcccagccctgggccagctggtcaagagcgaggtgcccctggatag

SEQ ID NO: 132697 - DNA, 120 bp, Artificial Sequence
  ENSG00000102890_7 (sequence is synthesized)
gctgctggtgcacctacaggtgatgaaccagcagctgcaaaccaaggccatggccctgctgacagccttgctgcagggggccagccctgtggaacgcaagcacatgcttgactatctttg

SEQ ID NO: 132698 - DNA, 120 bp, Artificial Sequence
  ENSG00000102890_8 (sequence is synthesized)
gcagaggaaccttcgccagttcatctataagaacatcatccacagtgcagcaccaatgggcgacgagatggctcatcacctgtacgtactgcaggctctcatgctggggctgctggagcc

SEQ ID NO: 132699 - DNA, 120 bp, Artificial Sequence
  ENSG00000102890_9 (sequence is synthesized)
gcgcatgcggacgcccctggacccctacagccaggagcagcgggagcagctgcaggtcctacgccaggctgccttcgaggtggagggggagtcctcgggtgccgggctaagtgctgaccg

SEQ ID NO: 132700 - DNA, 120 bp, Artificial Sequence
  ENSG00000102890_10 (sequence is synthesized)
gtctgctggccctggacaacatgttgtacttctccagaaacgcgcccagcgcgtacagccggtttgtgttggagaacagcagccgcgaggacaagcacgagtgcccctttgcccggggca

SEQ ID NO: 132701 - DNA, 120 bp, Artificial Sequence
  ENSG00000102890_11 (sequence is synthesized)
gcatccagctgacggtgctgctgtgtgagctgctccgtgttggggagccctgctctgagacagcccaggacttctcacccatgttcttcggccaagaccagagcttccacgagctcttct

SEQ ID NO: 132702 - DNA, 120 bp, Artificial Sequence
  ENSG00000102890_12 (sequence is synthesized)
gtgtgggcatccagctgttgaataagacctggaaggagatgcgggctacacaggaggacttcgacaaggtcatgcaggtggtgcgggagcagctggcccgcactctggccctgaagccca

SEQ ID NO: 132703 - DNA, 120 bp, Artificial Sequence
  ENSG00000102890_13 (sequence is synthesized)
cttccctggagctcttccgaaccaaggtgaatgcgctcacttatggggaggtgctgcggctgcggcagactgaacggctgcaccaggagggcacactggctccccctatactggagctgc

SEQ ID NO: 132704 - DNA, 120 bp, Artificial Sequence
  ENSG00000102890_14 (sequence is synthesized)
gggagaagctgaagccagagctcatgggcctgatccgccagcagcgcttgctccgcctctgtgaggggacgctcttccgcaagatcagcagccggcggcgccaggataagctgtggttct

SEQ ID NO: 132705 - DNA, 120 bp, Artificial Sequence
  ENSG00000102890_15 (sequence is synthesized)
gctgcctgtcccccaaccacaagctgctgcagtacggagacatggaggagggcgccagcccgcctaccctggagagtctgcccgagcaactccctgtggccgacatgagggcactcctga

SEQ ID NO: 132706 - DNA, 120 bp, Artificial Sequence
  ENSG00000102890_16 (sequence is synthesized)
caggcaaggactgcccccatgtccgggagaagggctccgggaagcagaacaaggacctctatgagttggccttctcaatcagctatgaccgtggggaggaggaagcgtacctcaacttca

SEQ ID NO: 132707 - DNA, 120 bp, Artificial Sequence
  ENSG00000102890_17 (sequence is synthesized)
ttgccccctccaagcgggagttctacctgtggacagatgggctcagtgccttgctgggcagtcccatgggcagcgagcagacacggctggacctggagcagctgctgaccatggagacca

SEQ ID NO: 132708 - DNA, 120 bp, Artificial Sequence
  ENSG00000102890_18 (sequence is synthesized)
agctgcgtctgctggagctggagaacgtgcccatccccgagcggccaccccctgtgcccccaccccccaccaacttcaacttctgctatgactgcagcatcgctgaaccttgacagtgtg

SEQ ID NO: 132709 - DNA, 120 bp, Artificial Sequence
  ENSG00000102890_19 (sequence is synthesized)
gctggccatgggccacagctgcggccactgcagcagccatgaagggcagtgggtagaggagtgcaggcaccctgaccagcagagattgctgcagaaataaagtctgcttggctcttggga

SEQ ID NO: 132710 - DNA, 120 bp, Artificial Sequence
  ENSG00000102891_0 (sequence is synthesized)
actcagcctcccttccccagccgtgacagcactggagcctttcggacacctggaccatggaccccagggaatgtgtctgcatgtctggaggaatctgcatgtgtggagacaactgcaaat

SEQ ID NO: 132711 - DNA, 120 bp, Artificial Sequence
  ENSG00000102891_1 (sequence is synthesized)
agagctgctgtccctgctgccccccgggctgtgccaaatgtgcccggggctgcatctgcaaaggaggctcagacaagtgcagctgctgcccatgaaagccatccatcgtgcccacccctt

SEQ ID NO: 132712 - DNA, 120 bp, Artificial Sequence
  ENSG00000102893_0 (sequence is synthesized)
aaggcggcgaccggagcgcgatggcgggggcggcgggactcacggcagaagtgagctggaaggtcttggagcgaagagctcggaccaagcgctcaggctcagtttatgaacctcttaaaa

SEQ ID NO: 132713 - DNA, 120 bp, Artificial Sequence
  ENSG00000102893_1 (sequence is synthesized)
gcattaatcttccaagacctgataatgaaactctctgggataagttggaccattattacagaattgtcaagtcaacattgctgctgtatcaaagtccaactaccggtctctttcccacta

SEQ ID NO: 132714 - DNA, 120 bp, Artificial Sequence
  ENSG00000102893_2 (sequence is synthesized)
aaacatgcggtggtgaccagaaggccaagatccaggacagcctatactgcgctgctggggcctgggctttggctcttgcatacaggcgaattgatgatgacaagggaaggacccatgagc

SEQ ID NO: 132715 - DNA, 120 bp, Artificial Sequence
  ENSG00000102893_3 (sequence is synthesized)
tggagcactcagctataaaatgcatgagaggaattctctactgctatatgcgtcaggccgataaggtccagcagtttaagcaggatccacgcccaacaacatgtcttcactctgttttca

SEQ ID NO: 132716 - DNA, 120 bp, Artificial Sequence
  ENSG00000102893_4 (sequence is synthesized)
atgtgcatacaggagatgagttgctttcctatgaggaatatggtcatcttcagataaatgcagtgtcactttatctcctttaccttgtggaaatgatttcctcaggactccagattatct

SEQ ID NO: 132717 - DNA, 120 bp, Artificial Sequence
  ENSG00000102893_5 (sequence is synthesized)
acaacactgatgaggtctcttttattcaaaaccttgtattttgtgtggaaagagtttaccgtgtgcctgactttggtgtctgggaaagaggaagcaaatataataatggcagcacagagc

SEQ ID NO: 132718 - DNA, 120 bp, Artificial Sequence
  ENSG00000102893_6 (sequence is synthesized)
tacattcgagctcggttggtttagcaaaagcagctctagaagcaattaatggattcaacctttttggcaaccagggctgttcgtggtcagttatatttgtggatctcgatgctcacaatc

SEQ ID NO: 132719 - DNA, 120 bp, Artificial Sequence
  ENSG00000102893_7 (sequence is synthesized)
gcaacaggcaaactttgtgctcgctgttacccagagaatcaagatcacataatacagatgctgccctgctcccctgcatcagttatcctgcatttgccctggatgatgaagttcttttta

SEQ ID NO: 132720 - DNA, 120 bp, Artificial Sequence
  ENSG00000102893_8 (sequence is synthesized)
gccagacacttgataaagtggttagaaaattaaaaggaaaatatggatttaaacgtttcttgagagatgggtatagaacatcattggaagatcccaacagatgctactacaagccagctg

SEQ ID NO: 132721 - DNA, 120 bp, Artificial Sequence
  ENSG00000102893_9 (sequence is synthesized)
aaattaagctatttgatggcattgaatgtgaatttcccatatttttcctttatatgatgattgatggagtttttagaggcaatcctaagcaagtacaggaatatcaggatcttttgactc

SEQ ID NO: 132722 - DNA, 120 bp, Artificial Sequence
  ENSG00000102893_10 (sequence is synthesized)
cagtacttcatcataccacagaaggatatcctgttgtaccaaagtactattatgtgccagctgactttgtagaatatgaaaaaaataaccctggtagtcaaaaacgatttcctagcaact

SEQ ID NO: 132723 - DNA, 120 bp, Artificial Sequence
  ENSG00000102893_11 (sequence is synthesized)
gtggccgtgatggaaaactgtttctttggggacaagcactttatatcatcgcaaaactcctggctgatgaacttattagtcctaaagacattgatcctgtccagcgctatgtcccactaa

SEQ ID NO: 132724 - DNA, 120 bp, Artificial Sequence
  ENSG00000102893_12 (sequence is synthesized)
aggatcaacgtaacgtgagcatgaggttttccaatcagggcccactggaaaatgacttggtagttcatgtggcacttatagcagaaagccaaagacttcaagtttttctgaacacatatg

SEQ ID NO: 132725 - DNA, 120 bp, Artificial Sequence
  ENSG00000102893_13 (sequence is synthesized)
gtattcaaactcaaactcctcaacaagtagaacccattcagatatggcctcagcaggagcttgtgaaagcttatttgcagctgggtatcaatgaaaagttaggactctctggaaggccag

SEQ ID NO: 132726 - DNA, 120 bp, Artificial Sequence
  ENSG00000102893_14 (sequence is synthesized)
acaggcccattggctgcctcgggacatcaaagatttatcgcattctaggaaagactgtggtttgttacccgattattttcgacctaagtgatttctacatgtctcaggatgttttcctgc

SEQ ID NO: 132727 - DNA, 120 bp, Artificial Sequence
  ENSG00000102893_15 (sequence is synthesized)
tgatagatgacataaagaatgcgctgcagttcattaaacaatattggaaaatgcatggacgtccacttttccttgttctcatccgggaagacaatataagaggtagccggttcaacccca

SEQ ID NO: 132728 - DNA, 120 bp, Artificial Sequence
  ENSG00000102893_16 (sequence is synthesized)
tattagatatgctggcagcccttaaaaaaggaataattggaggagtcaaagttcatgtggatcgtctacagacactaatatctggagctgtggtagaacaacttgatttcctacgaatca

SEQ ID NO: 132729 - DNA, 120 bp, Artificial Sequence
  ENSG00000102893_17 (sequence is synthesized)
gtgacacagaagagcttccagaatttaagagttttgaggaactagaacctcccaaacattcaaaagtcaaacggcaaagcagcacccctagtgctcctgaactgggacagcagccggatg

SEQ ID NO: 132730 - DNA, 120 bp, Artificial Sequence
  ENSG00000102893_18 (sequence is synthesized)
tcaacattagtgaatggaaggacaaacccacccacgaaattcttcaaaaactgaatgattgcagttgtctggctagccaagccatcctgctgggtatactgctcaaaagagaaggcccca

SEQ ID NO: 132731 - DNA, 120 bp, Artificial Sequence
  ENSG00000102893_19 (sequence is synthesized)
acttcatcacaaaggaaggtaccgtttctgatcacattgagagagtctatagaagagctggcagccaaaaactttggttggcggtgcgctacggggctgcatttacccagaaattttctt

SEQ ID NO: 132732 - DNA, 120 bp, Artificial Sequence
  ENSG00000102893_20 (sequence is synthesized)
cctctatagccccacacattactacttttctggtacatgggaaacaggtaactctgggtgcctttgggcatgaagaagaagttatctctaatcctttgtctccaagagtgattcaaaaca

SEQ ID NO: 132733 - DNA, 120 bp, Artificial Sequence
  ENSG00000102893_21 (sequence is synthesized)
tcatctattataagtgtaacacccatgatgagagggaagcggtcattcagcaagaactggtcatccatattggctggatcatctccaataaccctgagttattcagtggcatgctgaaaa

SEQ ID NO: 132734 - DNA, 120 bp, Artificial Sequence
  ENSG00000102893_22 (sequence is synthesized)
aagccagccttggacttgtatcagctgtcacctagtgaagttaaacagcttctgctggatattctgcagcctcaacagaatggaagatgttggctgaacaggcgtcagatcgatgggtct

SEQ ID NO: 132735 - DNA, 120 bp, Artificial Sequence
  ENSG00000102893_23 (sequence is synthesized)
ttgaatagaactcccaccgggttctatgaccgagtgtggcagattctggagcgcacgcccaatgggatcattgttgctgggaagcatttgcctcagcaaccaaccctgtcagatatgacc

SEQ ID NO: 132736 - DNA, 120 bp, Artificial Sequence
  ENSG00000102893_24 (sequence is synthesized)
atgtatgagatgaatttctctctccttgttgaagacacgttgggaaatattgaccagccacagtacagacagatcgttgtagagttacttatggttgtatccattgtactggaaagaaac

SEQ ID NO: 132737 - DNA, 120 bp, Artificial Sequence
  ENSG00000102893_25 (sequence is synthesized)
cccgagctagaatttcaagacaaagtagatctagacagactggtcaaagaagcatttaatgaatttcaaaaagatcagagtcggctaaaggaaattgaaaaacaagatgacatgacttcc

SEQ ID NO: 132738 - DNA, 120 bp, Artificial Sequence
  ENSG00000102893_26 (sequence is synthesized)
ttttacaacactcctcccctgggaaaaagaggaacatgcagctatttgacaaaggcggtgatgaatctgctgctggaaggagaagtcaagccaaacaatgatgacccgtgtctgattagc

SEQ ID NO: 132739 - DNA, 120 bp, Artificial Sequence
  ENSG00000102893_27 (sequence is synthesized)
tagtggggaaggtgtaggaagctctgttgagacacatgttctgaagtgtgttgtgtttcatgttcaagcttaatcaaggcagccattaatatacgaactgagcatgctggggaggtgaat

SEQ ID NO: 132740 - DNA, 120 bp, Artificial Sequence
  ENSG00000102893_28 (sequence is synthesized)
gccacatccttggcggggttatggacctcttgcatgtcatagccaatctaacggtaatggtaaatgcttttaatcaagcaggaaaaagttctcatgattatgccaactataatagtaatc

SEQ ID NO: 132741 - DNA, 120 bp, Artificial Sequence
  ENSG00000102893_29 (sequence is synthesized)
ctcactgagtgataaaaatagtttatgaattgaaaatttgccgctgcatgttgtatgatcaaatagttcatcaaaatgaatctttgctctttggactgaattcttaccatactgccatta

SEQ ID NO: 132742 - DNA, 120 bp, Artificial Sequence
  ENSG00000102893_30 (sequence is synthesized)
aaataaatttgccaactagtaatgcatactggaaatcaaaagatactgaaagaatggtgaacttctcttagtggtattgtcatgctaaaagatgttaatatacatcataaaagcaaagtc

SEQ ID NO: 132743 - DNA, 120 bp, Artificial Sequence
  ENSG00000102893_31 (sequence is synthesized)
agccagctgatattttggttctcaaaaactgcattattaataatattttagtatacagagctattctacagtttttacattgtaaacatgactgtggttttgtatttgctaaatataggg

SEQ ID NO: 132744 - DNA, 120 bp, Artificial Sequence
  ENSG00000102893_32 (sequence is synthesized)
gttggactaaaatataataaatctgtaccttatcaaacattttctttgagctcctgctaaaaataggacatgtctatgattgttcaaaaatatgttaaatttaggctcagcacagtagct

SEQ ID NO: 132745 - DNA, 61 bp, Artificial Sequence
  ENSG00000102893_33 (sequence is synthesized)
tgttcaaaaatatgttaaatttaggctcagcacagtagctcacacctgaaatctcagccaa

SEQ ID NO: 132746 - DNA, 89 bp, Artificial Sequence
  ENSG00000102893_34 (sequence is synthesized)
tgatggtgcatgcctttaaacccagctactgaggagacggaggttgcagtgagctgaaatcctgccactgcacaccagcctgggtgaca

SEQ ID NO: 132747 - DNA, 120 bp, Artificial Sequence
  ENSG00000102893_35 (sequence is synthesized)
aaaaaaaaaaagaaaaagaaaaaaatatgttaaatttaaggactgttaacctacgttctactagtaaaaacaacattaagggtcattaaattttatttctgaattaatgaacatatctgg

SEQ ID NO: 132748 - DNA, 120 bp, Artificial Sequence
  ENSG00000102893_36 (sequence is synthesized)
aattttatttctgaattaatgaacatatctggacattttttgttcctaggttcacaagattgagcttcaaactcccgagtgttttcatttaattgatttagaggtagaatggaagagaat

SEQ ID NO: 132749 - DNA, 120 bp, Artificial Sequence
  ENSG00000102893_37 (sequence is synthesized)
ctgtggtacctaccattatacacatttagttgcccagtttacttaaactttaatgaaagtagaaagtagattaaacatttaaattttatttctttcctaaatagaaaaaaaaaaggccca

SEQ ID NO: 132750 - DNA, 120 bp, Artificial Sequence
  ENSG00000102893_38 (sequence is synthesized)
tgagtttgagcccttgccccaaagagagttgtttttctgatcaatcttactggagtttcacctgagaagatagatttgtcacataaaaaatgcagcttatttgtagtgttttgaaaggat

SEQ ID NO: 132751 - DNA, 120 bp, Artificial Sequence
  ENSG00000102893_39 (sequence is synthesized)
gtaagaaaggatgagtggcttcagtattgagtcaatcgatatcaaatgaatggatgtgtgagcacatggaaaaatctgctgtcagtcacatttctcataacattgaggtacagtgccgag

SEQ ID NO: 132752 - DNA, 120 bp, Artificial Sequence
  ENSG00000102893_40 (sequence is synthesized)
atcttgcataagaaattgtatggatattagttggcaaaattgaaatgaatgagacacagttgggccctaaagaactaaggagggggattgacaaagaatagaattaaactacttgactca

SEQ ID NO: 132753 - DNA, 120 bp, Artificial Sequence
  ENSG00000102893_41 (sequence is synthesized)
atatgttaagagagtttatgaaaagatagtcgtgaagggtgaagctaatttgtaaaactaatgcctgaaaaaaacgtaagcatgaagtccatggagagggaattgagagctgacacttca

SEQ ID NO: 132754 - DNA, 120 bp, Artificial Sequence
  ENSG00000102893_42 (sequence is synthesized)
taactggagaaactggaaattaaagaaagggaaacaaaagacttaaaatttttgtttgccgaaatttttacgaaagtaaactgtgttgtagttttaagaatttttttaaaaaatctgatt

SEQ ID NO: 132755 - DNA, 120 bp, Artificial Sequence
  ENSG00000102893_43 (sequence is synthesized)
agctgagcaaagttaccagaaaactgctatcctagttgaaatcaaacattacttgcaaatgtgttttctgagtgttagcttcctgcttaaatgttacatatgcaaaattctgaagttttc

SEQ ID NO: 132756 - DNA, 120 bp, Artificial Sequence
  ENSG00000102893_44 (sequence is synthesized)
ctgtgctactcctgaaagcattcagaatctgtgacacgtattgacttcatgctttgagattcaaaatttattgttctgaaagttatatttagaatcagtaaatcttgatattcaccttta

SEQ ID NO: 132757 - DNA, 120 bp, Artificial Sequence
  ENSG00000102893_45 (sequence is synthesized)
cggcattgctgacaggcggccccgggggcggtggccaaggcggcgaccggagcgcgatggcgggggcggcgggactcacggcagaagtgagctggaaggtcttggagcgaagagctcgga

SEQ ID NO: 132758 - DNA, 120 bp, Artificial Sequence
  ENSG00000102893_46 (sequence is synthesized)
ccaagcgctcagttttaaaattgctatagcttagcctgcgacgcttatgattagagccaacaatttgaaatggcctgctcacctgatgcagtcgtctctccgtcttccgctttcttaagg

SEQ ID NO: 132759 - DNA, 120 bp, Artificial Sequence
  ENSG00000102893_47 (sequence is synthesized)
ttgtacgccgtgcagcaagtcttttaagtaaagtagtggacagcctggccccatccattactaatgttttagtgcagggcaaacaggtaactctgggtgcctttgggcatgaagaagaag

SEQ ID NO: 132760 - DNA, 120 bp, Artificial Sequence
  ENSG00000102893_48 (sequence is synthesized)
ctcccaagtagctcggactacaggcatacaccaccacatccagctttatttaatttcacggttgactatcacttggaaaccattttattgtgtgcacttttgaaattttagcagtgttgg

SEQ ID NO: 132761 - DNA, 120 bp, Artificial Sequence
  ENSG00000102893_49 (sequence is synthesized)
attttagcagtgttggcagtgttacagtctgttaggttgggccaaaagatccatttatctcttaaacaccttcaaatgtttctttcctatttaatacattttctgtgccaatatttacag

SEQ ID NO: 132762 - DNA, 120 bp, Artificial Sequence
  ENSG00000102893_50 (sequence is synthesized)
cacttacatttgaattggaccacctgcaactaactaccacctcgcacacttccaactttggatctgtccagcaagctttcttgctttggatctgtccagcaagctttcttcaccttctgc

SEQ ID NO: 132763 - DNA, 120 bp, Artificial Sequence
  ENSG00000102893_51 (sequence is synthesized)
tgagcaccactaaggaaagccacagcactgtgggtaggagctgccccacagtcaggagatctttcttggttcagcctcatcattgctgtcggttcttgtcagtcctgctatctgactctg

SEQ ID NO: 132764 - DNA, 120 bp, Artificial Sequence
  ENSG00000102893_52 (sequence is synthesized)
cctaaagaaaatggaccaatattaaagatagttattcatcctaatttttacttttaacctccaaggttacagcactttctaagaatgtgcctatgtagcatgtctgtccccccactgcct

SEQ ID NO: 132765 - DNA, 120 bp, Artificial Sequence
  ENSG00000102893_53 (sequence is synthesized)
ccaccaaaattctgagaacaaagacactgtagggattgaacctgaagagtattcgctggaatggtatgctaaggtttctttcctgctgtacacctcctctgccccaacaaggtgctttaa

SEQ ID NO: 132766 - DNA, 120 bp, Artificial Sequence
  ENSG00000102893_54 (sequence is synthesized)
gttctgttttttaatttaggaaacctgttctgctattatagaaggccatgaaaagagaccagtgatttatctaatcataagcaaaaatagtagaaggctattgtcttgtcacttaagttg

SEQ ID NO: 132767 - DNA, 120 bp, Artificial Sequence
  ENSG00000102893_55 (sequence is synthesized)
aatgaatcccagtgattgtagttgcttcacgaaaaataaccaatttgttctacagaggtagtctgttcccagagattgaaaaaaaaaaagatgtaggaaagtttaaataaataaaattgt

SEQ ID NO: 132768 - DNA, 120 bp, Artificial Sequence
  ENSG00000102893_56 (sequence is synthesized)
ttaaattcacaatggagggccaattcacatggccctctgcattttgatgtaattctaacagttttactagcagaatctaacaaattttgaaagtcagagcgtatgtatagatatatatac

SEQ ID NO: 132769 - DNA, 120 bp, Artificial Sequence
  ENSG00000102893_57 (sequence is synthesized)
ctcctggaaactctacctctatcctgatgtaattaggttaagaaaattaaaggccacggtccagaaaactaacttccacaaatgcaacaaaaggaaaaatttctccagtaacctctgtgc

SEQ ID NO: 132770 - DNA, 120 bp, Artificial Sequence
  ENSG00000102893_58 (sequence is synthesized)
aatgggaaatctttcttttaagtaccaagtcaatttcttcaactgtacaatgtattctaatttgaaggttttcaaatataatatagtaacaacaaaatataataaaattaaaactatcag

SEQ ID NO: 132771 - DNA, 120 bp, Artificial Sequence
  ENSG00000102893_59 (sequence is synthesized)
tgacagaaccaatatgaaggcgttaactgaagaatgaaaggaaggagggaatgtcaagcatttggaagcagtgatttttgtaatggtgtgaaggagttaacaggagaaatagcttgttct

SEQ ID NO: 132772 - DNA, 120 bp, Artificial Sequence
  ENSG00000102893_60 (sequence is synthesized)
tgaacagcctggctgaatatcacatcataggaacacagttgcaccggtgccttaggatgctgagagttctgtgaaagtgatctgaaaaattaaacacaaagatgccccatcagtacaaaa

SEQ ID NO: 132773 - DNA, 120 bp, Artificial Sequence
  ENSG00000102893_61 (sequence is synthesized)
gttctccttacgttttgggcttttcctatttatgaagttcttagttgtctgttgtgcacactgacttttttttttttttttttggagaaagtaaatctaatttctgaaaatctaatttca

SEQ ID NO: 132774 - DNA, 120 bp, Artificial Sequence
  ENSG00000102893_62 (sequence is synthesized)
gaaatcatacaccgaacactctgtttttttataccttacaaaaagttcagctttatatacttagggttatagtaaaattaccatctatgaagtatgagataattttttcaaaaagtagtc

SEQ ID NO: 132775 - DNA, 120 bp, Artificial Sequence
  ENSG00000102893_63 (sequence is synthesized)
cttagtactactaagaatcaataaagtgacttggaatagtcacatgtatttgtttcacactttttcttaaattgtttttgtgtgatatagaaatactgagttggctactaacgatgtggc

SEQ ID NO: 132776 - DNA, 120 bp, Artificial Sequence
  ENSG00000102893_64 (sequence is synthesized)
tatctggatataaaaagtgttattggattggttatgtctgaacaaagagaataactggagttttcttacagggacctgagtactgcccccaacatatatttttgcaacatttctctttaa

SEQ ID NO: 132777 - DNA, 120 bp, Artificial Sequence
  ENSG00000102893_65 (sequence is synthesized)
ctttcataagctcatagagttgattttcttcgtcagtctttgtttcctctgaaatgcatgtcataacagtaagctttgaaaaccttaattctcttttcttagctgagaaaaaaaattcta

SEQ ID NO: 132778 - DNA, 120 bp, Artificial Sequence
  ENSG00000102893_66 (sequence is synthesized)
gtgttaactgttgttgagtgcagttatttaaatccacttttatgtgcaaagtgcatagtatcaatgttgaatgttcctgtatgtttacatcatagtagtaaagagataccacttgaagtt

SEQ ID NO: 132779 - DNA, 120 bp, Artificial Sequence
  ENSG00000102893_67 (sequence is synthesized)
aagtacagaggataaagttaataactcgagttaataacttcctgtatcattaaaagcaatcaacttgattctgtttgttacttttagaagaatatataaatggagctttgttaaacactt

SEQ ID NO: 132780 - DNA, 120 bp, Artificial Sequence
  ENSG00000102893_68 (sequence is synthesized)
gactaacctgactccagtatagagtcctccccacagagttctgagcattgttacatagtagcataattacttcactgcacaacagaggatactacttttatgtaatgtctaataagtgga

SEQ ID NO: 132781 - DNA, 120 bp, Artificial Sequence
  ENSG00000102893_69 (sequence is synthesized)
tattatatagtttctatctcatccatatgagcaagtgtaatttatcaaagcaaagaaaatcacattttcaagtcataaaagagaaaataaaattataatgatcctcagttactgcctttg

SEQ ID NO: 132782 - DNA, 120 bp, Artificial Sequence
  ENSG00000102893_70 (sequence is synthesized)
aaacatttagaatgctgactgttatgtttggaagaactcctggaagttttatttactctattttcccttttatggctttccactgacacacccaggttggcggtgcgctacggggctgca

SEQ ID NO: 132783 - DNA, 120 bp, Artificial Sequence
  ENSG00000102893_71 (sequence is synthesized)
tttacccagaaattttcttcctctatagccccacacattactacttttctggtacatgggaaacaggtaacatgcacagaatttgaaaacccaagctgcttgaaatgtgtgggcttattt

SEQ ID NO: 132784 - DNA, 120 bp, Artificial Sequence
  ENSG00000102893_72 (sequence is synthesized)
gcactctgaaggttaaatatgtcttttggtcttatagtgtgtgggtgaaagcttctctagaagtaggaagtgtttgtttcactaactttattagttattgacttaattttcttttagtca

SEQ ID NO: 132785 - DNA, 120 bp, Artificial Sequence
  ENSG00000102893_73 (sequence is synthesized)
tctatgttgaaattaaggaatataaatgctttttataagtcagcttctgtggatatcctgaaatacatgaagattgcagccagtttcaaacctacatttttatttctctatctaaaagtt

SEQ ID NO: 132786 - DNA, 120 bp, Artificial Sequence
  ENSG00000102893_74 (sequence is synthesized)
ccacgagaatttttacttttgagggaaaaaaattgtcttatgtattgcatgtgctgtactttaaaaaaaaaaaatctgttctccctaggttctaagactttttcagtaatataaaaatag

SEQ ID NO: 132787 - DNA, 120 bp, Artificial Sequence
  ENSG00000102893_75 (sequence is synthesized)
cagtgtgaattccttcccccaacattatggctttatcagtaaaaagaaatactggtatttcattgtagcactttctaaaattcagtactaagtgaatcctctaatccagagatttggtta

SEQ ID NO: 132788 - DNA, 120 bp, Artificial Sequence
  ENSG00000102893_76 (sequence is synthesized)
tctaggcaccaaaagaaacatgatttaaagtggttatagaaataggtcacatgtactagtgacagatttagtaatgaacttgttaatgcaaaatcagaataccctcttaatccctcctat

SEQ ID NO: 132789 - DNA, 120 bp, Artificial Sequence
  ENSG00000102893_77 (sequence is synthesized)
acaccctccctccctaatcaaaataataattaggttttctttttttgctttttatatcaatagtgtcatcaataatatttttgtcacagcttggtggcagggatgaggtggagggatccc

SEQ ID NO: 132790 - DNA, 120 bp, Artificial Sequence
  ENSG00000102893_78 (sequence is synthesized)
tccctaattctgaatggtcctgcagtctgggaaatttcagctgttaggttcaatgtcctgggcagtgtttcctccaaatgatgatgtgaggattccactgtgtatattttaaagactacc

SEQ ID NO: 132791 - DNA, 120 bp, Artificial Sequence
  ENSG00000102893_79 (sequence is synthesized)
agagtggcgcgcagccccgggacgcgtaagagccgctgccggctcctttttctctctcccactagggctgcccttccgacgctaaaaaagcagtggagctagggtgaaagccgccctcac

SEQ ID NO: 132792 - DNA, 87 bp, Artificial Sequence
  ENSG00000102893_80 (sequence is synthesized)
gatggcgggggcggcgggactcacggcagaagtgagctggaaggtcttggagcgaagagctcggaccaagcgctcagaaattatttt

SEQ ID NO: 132793 - DNA, 120 bp, Artificial Sequence
  ENSG00000102893_81 (sequence is synthesized)
aaattgcaacgtcatgacttgtggcgttattaaaacttcctgtattcctggttggctggatataatcttgaacaaaaggcatgcacttaaacaggaaaggtgaaaggcggaatgcaggtt

SEQ ID NO: 132794 - DNA, 120 bp, Artificial Sequence
  ENSG00000102893_82 (sequence is synthesized)
attgatgaagtgtcattattgggggtgggtgtgaaaggtgttagctaggaaaattaactttgcacttgcattgatattaagaaattattttcggacgggcgcggtggctcacgcctgtaa

SEQ ID NO: 132795 - DNA, 71 bp, Artificial Sequence
  ENSG00000102893_83 (sequence is synthesized)
cttagcctgcgacgcttatgattagagccaacaatttgaaatggcctgctcacctgatgcagtcgtctctc

SEQ ID NO: 132796 - DNA, 120 bp, Artificial Sequence
  ENSG00000102893_84 (sequence is synthesized)
ccaaggcggcgaccggagcgcgatggcgggggcggcgggactcacggcagaagtgagctggaaggtcttggagcgaagagctcggaccaagcgctcagggacctgagtactgcccccaac

SEQ ID NO: 132797 - DNA, 120 bp, Artificial Sequence
  ENSG00000102893_85 (sequence is synthesized)
catctcatatggaaactccatctcagaatcccattgggatgatctcttgccatctaacatgatgtcacctctccgtcacctggtagacactcacgacacctgtggcaaacaccctaaaat

SEQ ID NO: 132798 - DNA, 120 bp, Artificial Sequence
  ENSG00000102893_86 (sequence is synthesized)
cccttcagacctacgcccacagcactcttccaccacagtaataaaggcttgggaatgctgtttctgccctagggatatcagacaacttcagataactgtcatcctgtctgtggggcttgt

SEQ ID NO: 132799 - DNA, 120 bp, Artificial Sequence
  ENSG00000102893_87 (sequence is synthesized)
gatagtgcccctctgaagagtaaaaagatacttttgtgtcttctatgtttttattagacttcatcctcaataaattatactaaggcctcaacccctttaagtgaatgggccccttgcata

SEQ ID NO: 132800 - DNA, 120 bp, Artificial Sequence
  ENSG00000102893_88 (sequence is synthesized)
tttgtttattagcagcagcaaatacatactcagtatgtttctttacaaattttaccttgaattagtccctggaaggtttttagtttgcttaaaattggtgagcaaattattcatttataa

SEQ ID NO: 132801 - DNA, 120 bp, Artificial Sequence
  ENSG00000102893_89 (sequence is synthesized)
agtctttgaatgtcaaatttcctataaattgttgaacatgtaactgtttctgagttagtcctttgtgtattgtagtggttgtagcacaattttaaaagaaagggaggggatttatagaat

SEQ ID NO: 132802 - DNA, 120 bp, Artificial Sequence
  ENSG00000102893_90 (sequence is synthesized)
gtattctttttttactgccttatggtacaataagcacatcagactcattcttacttggctttttgctattgtttctctcttttaaatgttaattatgattaaagagattgattgattggt

SEQ ID NO: 132803 - DNA, 120 bp, Artificial Sequence
  ENSG00000102893_91 (sequence is synthesized)
aaggcggcgaccggagcgcgatggcgggggcggcgggactcacggcagaagtgagctggaaggtcttggagcgaagagctcggaccaagcgctcaggtctcttttattcaaaaccttgta

SEQ ID NO: 132804 - DNA, 120 bp, Artificial Sequence
  ENSG00000102893_92 (sequence is synthesized)
ttttgtgtggaaagagtttaccgtgtgcctgactttggtgtctgggaaagaggaagcaaatataataatggcagcacagagctacattcgaggtaatttgctgatttctgaggttttttt

SEQ ID NO: 132805 - DNA, 120 bp, Artificial Sequence
  ENSG00000102893_93 (sequence is synthesized)
tttaaattaaatgtatggaatttgaatatgaagaaatactgaagcattagattggaactgtgattcatatgttaatttgtagcaatttttttctacctatgatgcagatggaagtcactt

SEQ ID NO: 132806 - DNA, 120 bp, Artificial Sequence
  ENSG00000102893_94 (sequence is synthesized)
tcattaatccacagcttggcctttctgctcaaccaagtcattttctttttcctctttgaaattacctcatttgaaatgtcaagtacattaaaattttcaaacaccagttgtatatgcact

SEQ ID NO: 132807 - DNA, 120 bp, Artificial Sequence
  ENSG00000102893_95 (sequence is synthesized)
gaatataaaatttccttccatgttatagagctgatttttatcctgaccacggatgcttacactgttcacataaaacttaacattcattgttaccagtaaggtgtgtgatcaacatcttga

SEQ ID NO: 132808 - DNA, 120 bp, Artificial Sequence
  ENSG00000102893_96 (sequence is synthesized)
gctgtggtttactgcgtttgaataagcaacaatagctgataactgatgttagtagtttatgaatttcttttaatccttagggttaaggaagtagctttagtgactgattgtacctttcct

SEQ ID NO: 132809 - DNA, 120 bp, Artificial Sequence
  ENSG00000102897_0 (sequence is synthesized)
ggtttggtccggcctggcctactggaccagcctgtgctcggtcggccacggctctgctgggctcctggcgccgcctcctcccagcccgccgcgggctgcgcgcttctgtgggtgggggaa

SEQ ID NO: 132810 - DNA, 120 bp, Artificial Sequence
  ENSG00000102897_1 (sequence is synthesized)
ggcaggactgacgcagaagagtacccagagaaggagaagccagcaaaggagacgacacagacaagacctcagagatcaaaggaagaggccccttaatatcctggaataatgggacccatc

SEQ ID NO: 132811 - DNA, 120 bp, Artificial Sequence
  ENSG00000102897_2 (sequence is synthesized)
cccgtaatcagtgaatctcatccacccgcttgccagcttctacccgcagcaagtagaagctaagtcctggctcaaatctcttccctccctccctctcccagctgtcagtgcttttggact

SEQ ID NO: 132812 - DNA, 120 bp, Artificial Sequence
  ENSG00000102897_3 (sequence is synthesized)
tgtgctcagatgacaacggcaacacgacaagaagtccttggcctctaccgcagcattttcaggcttgcgaggaaatggcaggcgacatcagggcagatggaagacaccatcaaagaaaaa

SEQ ID NO: 132813 - DNA, 120 bp, Artificial Sequence
  ENSG00000102897_4 (sequence is synthesized)
cagtacatactaaatgaagccagaacgctgttccggaaaaacaaaaatctcacggacacagacctaattaaacagtgtatagatgaatgcacagccaggattgaaattggactgcattac

SEQ ID NO: 132814 - DNA, 120 bp, Artificial Sequence
  ENSG00000102897_5 (sequence is synthesized)
aagattccttacccaaggccaattcatctgcctccaatgggccttaccccactccgaggccggggacttcgaagccaagagaaactgaggaaactttccaaaccagtatatctcagatct

SEQ ID NO: 132815 - DNA, 120 bp, Artificial Sequence
  ENSG00000102897_6 (sequence is synthesized)
atgtaaaccagatggcaaaacacttcttgattaggggcaaaaattcaaatgtcttcttaaaacctccacaattgattctccccctgtgatgtaaacttagatatccctagagtttctcag

SEQ ID NO: 132816 - DNA, 120 bp, Artificial Sequence
  ENSG00000102897_7 (sequence is synthesized)
catctttcttcctgagtggatggcattatccctagaggtcatggaccttacatcctcactgcagtcacctttggaaacaagaccgaggcctgtagaaggaaagcggaaggatgtaagagc

SEQ ID NO: 132817 - DNA, 120 bp, Artificial Sequence
  ENSG00000102897_8 (sequence is synthesized)
tgttcatgggaattccattcaccacacatgccagctgatgcaaagaaatttgccagtcactggaagttactgtggctactataaaactatgtaccactctcagaatattcttaggctttt

SEQ ID NO: 132818 - DNA, 120 bp, Artificial Sequence
  ENSG00000102897_9 (sequence is synthesized)
tttttttcaagttatagatttgcttaaagtgaggttttttggtgtgtgcttttttgttgtcttttgacccttccagtttccagacaaacttgtcttaaaaagtgcatcattggattgacc

SEQ ID NO: 132819 - DNA, 120 bp, Artificial Sequence
  ENSG00000102897_10 (sequence is synthesized)
atggtttttcatgaaattttatgagatttctgccttaacaaaatgcatatattccttatcttaaagcctgtcattacttaggatgcacttataggatctgaaaagctcactttaaactca

SEQ ID NO: 132820 - DNA, 120 bp, Artificial Sequence
  ENSG00000102897_11 (sequence is synthesized)
tactacattcgttacgagtattttacgttaacataattgaaaagtacaaggtccaagctggctttcaaattatgtctaaacagaaatgggacaaatagacttgaaaatagaagggattta

SEQ ID NO: 132821 - DNA, 120 bp, Artificial Sequence
  ENSG00000102897_12 (sequence is synthesized)
ttccacccctgcaagggtagagtcaggtgagagtcccttggtgagtcatttgtacatcagtgtcatttcttcttaacctctgaagaagatgggcatcagaaataaagacaaagcactatc

SEQ ID NO: 132822 - DNA, 120 bp, Artificial Sequence
  ENSG00000102897_13 (sequence is synthesized)
tttctggaaacgacggcggcccggcgggtccaaaccacctaccatccccgctcgcgtttccaggctccctacccccgccgccgccgcctcttcttccaccactgccaccgcctcctcttc

SEQ ID NO: 132823 - DNA, 120 bp, Artificial Sequence
  ENSG00000102897_14 (sequence is synthesized)
atctgcggcccaccggcggcggccgccccgaagccccgccccctccatcgcctcctgcatcatcacttccggtaaccccgccggccgccagctccaggagggagaatgggagaggggcaa

SEQ ID NO: 132824 - DNA, 120 bp, Artificial Sequence
  ENSG00000102897_15 (sequence is synthesized)
aggacagaggaccagagtctgcaccccctccagggcagctccaaccccatatccccaggccctgggttgaggggtgctggcggtggggaggcagggacagtaggctccctacccccgccg

SEQ ID NO: 132825 - DNA, 120 bp, Artificial Sequence
  ENSG00000102897_16 (sequence is synthesized)
acaagagggcgagtgcttgctgagaagcccagagctgctgtgggaggcatgttggaaataagctatcattgcatgctgccagcccatcacaacaaagtaaaatgtcaatgaatgcatgac

SEQ ID NO: 132826 - DNA, 120 bp, Artificial Sequence
  ENSG00000102897_17 (sequence is synthesized)
gtatcctgcttacatagctttccacgtatggaagggaaaaccagctcacactgtagagctttttctcttttcactttcatcttttttatggaaatgtgtttaattataaaaggcaggttt

SEQ ID NO: 132827 - DNA, 120 bp, Artificial Sequence
  ENSG00000102897_18 (sequence is synthesized)
tgttgttactaaaagaataaagttcaaacatgaaaggaatgcataaagtagaaagtaaaaatggtcaaaaattctcatccaggctaggcactgcggctcatgcctataatcctagcactt

SEQ ID NO: 132828 - DNA, 81 bp, Artificial Sequence
  ENSG00000102897_19 (sequence is synthesized)
caatcctcccacctcagcctcccaaagcttcttttttgtttgttcgtttttttggagacagagtcttactctgtcgcccag

SEQ ID NO: 132829 - DNA, 120 bp, Artificial Sequence
  ENSG00000102897_20 (sequence is synthesized)
ttactctgtcgcccaggctggagtgcagcatgatttctgctcactacaacctctgccttcccagttcaagtgattctcattcctcaacctctcgaataggtggaactacagtcgtgcacc

SEQ ID NO: 132830 - DNA, 84 bp, Artificial Sequence
  ENSG00000102897_21 (sequence is synthesized)
cttcccagttcaagtgattctcattcctcaacctctcgaataggtggaactacagtcatagaaacagggtttcaccatgttgcc

SEQ ID NO: 132831 - DNA, 120 bp, Artificial Sequence
  ENSG00000102897_22 (sequence is synthesized)
ccgtggcctccaaaagtgctaggatgacaggcgtaagccactgcgcccagcccaaatttcttaaaaaaaaaaaaaaaaaaaaaaaatttctcattgtgcagagggtgaacactttaactg

SEQ ID NO: 132832 - DNA, 120 bp, Artificial Sequence
  ENSG00000102897_23 (sequence is synthesized)
ttaaatggaaaattgccaatattcaactcttttagctacaaaaacagcaattttatattgtagtggctcaacctaattagtttggtagtatacccttttagtctttttttctgtattcat

SEQ ID NO: 132833 - DNA, 120 bp, Artificial Sequence
  ENSG00000102897_24 (sequence is synthesized)
gtacctacattttctttacatatgtaggattctggatataatgttatactgcgtacttattttacttcatgtcttctgcacatctttgtatgtagctctccctcaatctttttttttttt

SEQ ID NO: 132834 - DNA, 120 bp, Artificial Sequence
  ENSG00000102897_25 (sequence is synthesized)
tccccctagggctcctacctcacagcgctcacccaggacagaggaccagagtctgcaccccctccagggcagctccaaccccatatccccaggccctgggttgaggggtgctggcggtgg

SEQ ID NO: 132835 - DNA, 120 bp, Artificial Sequence
  ENSG00000102897_26 (sequence is synthesized)
ggaggcagggacagtaggtacccaacccccgccccttcatctctcaatgcccccccgccttttcctcaactccccccctccccaaaactcacagctgctccagaggttcctccagtcaaa

SEQ ID NO: 132836 - DNA, 120 bp, Artificial Sequence
  ENSG00000102898_0 (sequence is synthesized)
gcagaccgcgctgggttgccgctgccgctgccgccatcgtgccagcccctcgggtctccgtgaggccgggtgacgctccagaatgggagacaagccaatttgggagcagattggatccag

SEQ ID NO: 132837 - DNA, 120 bp, Artificial Sequence
  ENSG00000102898_1 (sequence is synthesized)
cttcattcaacattactaccagttatttgataatgatagaacccaactaggcgcaatttacattgacgcgtcatgccttacgtgggaaggacaacagttccaggggaaagctgccattgt

SEQ ID NO: 132838 - DNA, 120 bp, Artificial Sequence
  ENSG00000102898_2 (sequence is synthesized)
ggagaagttgtctagccttccgttccagaaaattcagcacagcatcaccgcgcaggaccatcagcccactccagatagctgcatcatcagcatggttgtgggccagcttaaggcggatga

SEQ ID NO: 132839 - DNA, 120 bp, Artificial Sequence
  ENSG00000102898_3 (sequence is synthesized)
agaccccatcatggggttccaccagatgttcctattaaagaacatcaacgatgcttgggtttgcaccaatgacatgttcaggctcgccctgcacaactttggctgacctcctctcagcta

SEQ ID NO: 132840 - DNA, 120 bp, Artificial Sequence
  ENSG00000102898_4 (sequence is synthesized)
ggcactcacgctgtttcctcctccctcctcttcccaatactattcccactcctccagatgctccaaatatcatgcacaaatgagcagggccgcggtgggagtgggcgcagtgcgctgctg

SEQ ID NO: 132841 - DNA, 120 bp, Artificial Sequence
  ENSG00000102898_5 (sequence is synthesized)
ccactgaggtgttgtgcatgatgtttggatgctagactagttgcatctgacgggagaagtttgtgttgtaccagcgcatgccttggaaagacttaagtaatgcaaaaggttgtccttttt

SEQ ID NO: 132842 - DNA, 120 bp, Artificial Sequence
  ENSG00000102898_6 (sequence is synthesized)
tttttttttttttttttaatctactgacaagttgctctagtaacccaaagaagtgaaggagaaagcagctgcctcaccgcccagacattgatttgttcagatgtttcaatgcctcatgat

SEQ ID NO: 132843 - DNA, 120 bp, Artificial Sequence
  ENSG00000102898_7 (sequence is synthesized)
acaataaaaccacaaaaattttcttaacagtttaaattgttttaattagtttactagttggctgggcatcagaagctacccagacccgttgtctctctcatgtttcaccctcccacttct

SEQ ID NO: 132844 - DNA, 120 bp, Artificial Sequence
  ENSG00000102898_8 (sequence is synthesized)
agttctctcccactccacagggcgactggtctttggaaagcaggcaggaagagctcaggtctggcctgaagcttctctcactgaagcctgtgcagtcagttctgatacctcctgtgactt

SEQ ID NO: 132845 - DNA, 120 bp, Artificial Sequence
  ENSG00000102898_9 (sequence is synthesized)
ctgctctgggtaggttcagggccctagtagcaggagagatgatcctgaatcctgttgaagctggagaggccttggcaaaatggctcatcacgttcaggccctccgggctgagttgtcagc

SEQ ID NO: 132846 - DNA, 120 bp, Artificial Sequence
  ENSG00000102898_10 (sequence is synthesized)
agtatcaagggaggggcctgctctatccccagaaggatcaggatcatatccaggatgccccacatacaccaagccaggcagagggcagctcagctcctgtcccatctgctttggatatct

SEQ ID NO: 132847 - DNA, 120 bp, Artificial Sequence
  ENSG00000102898_11 (sequence is synthesized)
ttacccaaaggcaggtaacccgaagagccagcctccactgcccacagagccaggcccagttgtgttggagtataggtcaggagctgtggaaggaggcagtctgtgagggactcatgcttt

SEQ ID NO: 132848 - DNA, 120 bp, Artificial Sequence
  ENSG00000102898_12 (sequence is synthesized)
aggagtcctcacccctcagactgctgcaggacattgccaggcctctctccacttccttcctcagcatacagacttcatgctatcttccaattccggggagtcttagctattagggcagtt

SEQ ID NO: 132849 - DNA, 120 bp, Artificial Sequence
  ENSG00000102898_13 (sequence is synthesized)
tctgcttctccattttggggacaaaggccttgcccagtacaaatctagccccttgtcccacagacttctggatggtataaacctagtggcaatgtagcaaccataggctagaaccaaacc

SEQ ID NO: 132850 - DNA, 120 bp, Artificial Sequence
  ENSG00000102898_14 (sequence is synthesized)
caagatttgggtcagtgccctgttaagggttttaggattggtaaggacaccacagctaaatctgacatgtaaaaggatacccttcccctgtcccactacgggtggaggctaaggacctcc

SEQ ID NO: 132851 - DNA, 120 bp, Artificial Sequence
  ENSG00000102898_15 (sequence is synthesized)
tcagatcccacagattgcctggtgacattgggcacagggctggatggtgtgctgtttgagaggacagcatgctcaggagatttcagtgggaatgatctctaggctgatgtgtatttgggg

SEQ ID NO: 132852 - DNA, 120 bp, Artificial Sequence
  ENSG00000102898_16 (sequence is synthesized)
aagtgggggtggggaagaggtaggtgcctgctgcctcaaaccaccttgtgtaaaatctgcaatacggcttcttccatgtacctgtgcctgaactgtctgcaataaagaagaatttgtaaa

SEQ ID NO: 132853 - DNA, 120 bp, Artificial Sequence
  ENSG00000102898_17 (sequence is synthesized)
tatctgggccgtaccgtgctggtggctggtgcaccggcctgcgccatggccaggcctttttctctagtcaggaccgtccggatggggccttagggccccgccccgtctagcctggcccgg

SEQ ID NO: 132854 - DNA, 120 bp, Artificial Sequence
  ENSG00000102898_18 (sequence is synthesized)
cctgcgcgagccccgcaagctctgcaggctggctagcgggcagaccccagccccacgtcctgctacccacctacgaaggatccggggatgggcagcgccacccggcccgctccagagtca

SEQ ID NO: 132855 - DNA, 120 bp, Artificial Sequence
  ENSG00000102898_19 (sequence is synthesized)
gcatgggtaagggcgcccgcctgccgcagccggggcttgggcccctcaccctgttcccgaccatagcccggccggggtgtaggtgaacgccccctccttgtctgcccctcggaagtgtct

SEQ ID NO: 132856 - DNA, 120 bp, Artificial Sequence
  ENSG00000102898_20 (sequence is synthesized)
gtggtcctgtgggcctctgcagtggacgcagaggcacctgctttctggcctggactttcctgtcagtttctcctgcctgttcaggatgtcctgctcagtgcctgtgcctgaagaggcaca

SEQ ID NO: 132857 - DNA, 120 bp, Artificial Sequence
  ENSG00000102898_21 (sequence is synthesized)
gaattcaggaggtctctgtagggagctcattgttcactttctcaggcaaaggtagtaaacactgctgcttcccaccggcttcaggttcttcctggtgattctgtccaatttggagctccc

SEQ ID NO: 132858 - DNA, 120 bp, Artificial Sequence
  ENSG00000102898_22 (sequence is synthesized)
aaacaactgatttgcctccttgatgacgataattcccagaaagcaggtgatgttagagacagtgctggttagctaggctcctatttcaactaggtctcatcctagttttctgcagtttgg

SEQ ID NO: 132859 - DNA, 120 bp, Artificial Sequence
  ENSG00000102898_23 (sequence is synthesized)
ctgcaggtttcttgcccttttttttcatctcaaatactgtttattacatgacaggaaacatcattggatagtgaacctatgttttcaagattgtttgcagtttttttgatactctataag

SEQ ID NO: 132860 - DNA, 120 bp, Artificial Sequence
  ENSG00000102898_24 (sequence is synthesized)
ttacttggtaaatactatgggattcgtttcaaaattgtgatcacttgtgtctggagatatgtgcttggaggcaggtacatcctctgctcttttgctgtagctaagggtgaattattgtgc

SEQ ID NO: 132861 - DNA, 120 bp, Artificial Sequence
  ENSG00000102898_25 (sequence is synthesized)
agtttaagcacacatagcacacataggcgtggctgattgttggcctacatgtgcccagggcattgtttcatacattacatcaattcacattcacaagtaccccttggctacactgggatt

SEQ ID NO: 132862 - DNA, 120 bp, Artificial Sequence
  ENSG00000102898_26 (sequence is synthesized)
tgagttcaggacagtagggcctgatcctaaagtcaacatttttttgccctcttctcctaccactgaattcccttcctgtttcttgatccccttactgaatcctcttttctctcctcatag

SEQ ID NO: 132863 - DNA, 120 bp, Artificial Sequence
  ENSG00000102898_27 (sequence is synthesized)
ggtaatggtactgccacagtggtagggaggggtgggcaggcagaggagagtcttgtacccctgctttccctgtggatgtgacctgcttatctagggacacccagacaaagtgactgtcta

SEQ ID NO: 132864 - DNA, 120 bp, Artificial Sequence
  ENSG00000102898_28 (sequence is synthesized)
gagctgcgtagttcagtatgctagccattagccacatgtaggtggcaatttttaagttatattaattaagattaaataaaatgtacttcttcggttgtactagccatatagaacattttt

SEQ ID NO: 132865 - DNA, 120 bp, Artificial Sequence
  ENSG00000102900_0 (sequence is synthesized)
aggaagcgggggagagcggcgcgagaagcggcggccgcgtcctcaagccggcacctgagcggcggagacggctgtagcacaaggatctgcatctccaatggatactgaggggtttggtga

SEQ ID NO: 132866 - DNA, 120 bp, Artificial Sequence
  ENSG00000102900_1 (sequence is synthesized)
gctccttcagcaagctgaacagcttgctgctgagactgagggcatctcagagcttccccatgtggaacggaacttacaggagatccagcaggcgggagagcgcctgcgttcccgtaccct

SEQ ID NO: 132867 - DNA, 120 bp, Artificial Sequence
  ENSG00000102900_2 (sequence is synthesized)
aacacgcacgtcccaggagacggcagatgtcaaggcgtcagttctcctcgggtctcggggacttgacatatcccacatctcccagcgattggagagtctgagtgcagccaccacctttga

SEQ ID NO: 132868 - DNA, 120 bp, Artificial Sequence
  ENSG00000102900_3 (sequence is synthesized)
gcctcttgagcctgtgaaggacactgacattcagggcttcctgaagaatgagaaggacaatgccctgctgtctgccatcgaagagtcccggaagaggaccttcggcatggctgaggagta

SEQ ID NO: 132869 - DNA, 120 bp, Artificial Sequence
  ENSG00000102900_4 (sequence is synthesized)
ccatcgggagtcaatgttggttgagtgggagcaagtgaaacagcgaattctgcacacactgctggcatcaggagaagacgcccttgactttactcaagaaagcgagccaagctacatcag

SEQ ID NO: 132870 - DNA, 120 bp, Artificial Sequence
  ENSG00000102900_5 (sequence is synthesized)
tgatgtgggaccccctggtcgaagctctctggataacatcgagatggcctatgcgcggcaaatttatatctataatgagaaaattgtaaatggacacctgcagcctaacctggtggacct

SEQ ID NO: 132871 - DNA, 120 bp, Artificial Sequence
  ENSG00000102900_6 (sequence is synthesized)
ttgtgcttccgtcgcagagctcgatgataagagcatttccgacatgtggaccatggtaaaacaaatgacagacgtgttgttgacaccggcaacggatgccctgaagaaccgcagcagcgt

SEQ ID NO: 132872 - DNA, 120 bp, Artificial Sequence
  ENSG00000102900_7 (sequence is synthesized)
ggaagtgcgcatggagtttgtcaggcaggccttggcgtaccttgagcagagttataagaattacacccttgtgactgtctttggaaatttgcatcaggcccagctgggcggggtgcctgg

SEQ ID NO: 132873 - DNA, 120 bp, Artificial Sequence
  ENSG00000102900_8 (sequence is synthesized)
gacttaccaattggttcgaagtttcctgaacattaaactgccagctcccttgcctggactacaggatggagaggtggaaggccatcctgtgtgggcgctaatttactactgcatgcgctg

SEQ ID NO: 132874 - DNA, 120 bp, Artificial Sequence
  ENSG00000102900_9 (sequence is synthesized)
tggagacctgcttgccgcttcacaggtagttaatcgagcccagcaccagctgggagagtttaaaacctggttccaggagtacatgaacagcaaggacagaagattgtccccagctacgga

SEQ ID NO: 132875 - DNA, 120 bp, Artificial Sequence
  ENSG00000102900_10 (sequence is synthesized)
aaacaagctccggctgcattaccgtagggccctcaggaacaatacagatccctacaagcgggccgtgtactgtatcattggcagatgtgacgtcaccgacaaccagagtgaagtggcgga

SEQ ID NO: 132876 - DNA, 120 bp, Artificial Sequence
  ENSG00000102900_11 (sequence is synthesized)
caaaactgaggattacctgtggctgaagttgaaccaagtgtgttttgacgacgatggcaccagctccccacaagacaggctcactctctcacagttccagaagcagttgttggaagacta

SEQ ID NO: 132877 - DNA, 120 bp, Artificial Sequence
  ENSG00000102900_12 (sequence is synthesized)
tggcgagtcccactttacggtgaaccagcaacccttcctctacttccaagtcctgttcctgacagcgcagtttgaagcagcagttgcctttcttttccgcatggagcggctgcgctgcca

SEQ ID NO: 132878 - DNA, 120 bp, Artificial Sequence
  ENSG00000102900_13 (sequence is synthesized)
tgctgtccatgtagcactggtgctgtttgagctgaagctgcttttaaagtcctctggacagagtgctcagctcctcagccacgagcctggtgaccctccttgcttgcggcggctgaactt

SEQ ID NO: 132879 - DNA, 120 bp, Artificial Sequence
  ENSG00000102900_14 (sequence is synthesized)
cgtgcggctcctcatgctgtacacccggaagtttgagtccacggacccaagggaggccctccagtacttctatttcctcagggatgagaaagatagtcaaggagaaaacatgtttctgcg

SEQ ID NO: 132880 - DNA, 120 bp, Artificial Sequence
  ENSG00000102900_15 (sequence is synthesized)
ctgtgtgagtgagcttgtgattgaaagccgagagttcgatatgattcttgggaaactagagaatgacggaagtagaaagcctggagtcatagataagtttactagtgacacaaagcctat

SEQ ID NO: 132881 - DNA, 120 bp, Artificial Sequence
  ENSG00000102900_16 (sequence is synthesized)
tatcaacaaagttgcttctgtggcagaaaataaaggactgtttgaagaggcagcaaagctgtatgaccttgccaagaatgctgacaaggtactggagctgatgaacaaactgctgagccc

SEQ ID NO: 132882 - DNA, 120 bp, Artificial Sequence
  ENSG00000102900_17 (sequence is synthesized)
tgtcgtcccccagatcagtgccccgcaatccaacaaggagaggctgaagaacatggcactctccattgccgaacggtatagggctcaaggaataagcgcaaataaatttgtggactccac

SEQ ID NO: 132883 - DNA, 120 bp, Artificial Sequence
  ENSG00000102900_18 (sequence is synthesized)
gttctatcttcttttggacttgatcaccttttttgacgagtatcatagtggtcatattgatagagcttttgatatcattgagcgcttgaagctggtgcccctgaatcaggaaagtgtgga

SEQ ID NO: 132884 - DNA, 120 bp, Artificial Sequence
  ENSG00000102900_19 (sequence is synthesized)
agagagagtggctgccttcagaaatttcagtgatgaaatcaggcacaacctctcagaagtgcttcttgccaccatgaacatcttgttcacacagtttaagaggctcaaggggacaagtcc

SEQ ID NO: 132885 - DNA, 120 bp, Artificial Sequence
  ENSG00000102900_20 (sequence is synthesized)
atcctcgtcatccaggccccagcgagtcatcgaggaccgcgactctcaactccgaagtcaagcccgcactctgattacctttgctggaatgataccataccgaacgtctggggacaccaa

SEQ ID NO: 132886 - DNA, 120 bp, Artificial Sequence
  ENSG00000102900_21 (sequence is synthesized)
tgcgaggctggtgcagatggaggtcctcatgaattaagtgccatgctttgtgggagtctgggtcggcacactgtcagtacatcaggcacatgggcccactaggctggggtttctggtttt

SEQ ID NO: 132887 - DNA, 120 bp, Artificial Sequence
  ENSG00000102900_22 (sequence is synthesized)
gtttctgttgtgttttgttttggtttctgtattatgtatttttgtcaacgccaataaatttctttgatttgtatttcttttcaacattcttttattttctttttttttttctttgaaatt

SEQ ID NO: 132888 - DNA, 120 bp, Artificial Sequence
  ENSG00000102900_23 (sequence is synthesized)
ttgtttacatttttatttgtgtaatgggaaataccgtcactagctcttgggccagggaatgagaggctatgtagatattcattatttggttaaattgaccttaattaattaaaaatctac

SEQ ID NO: 132889 - DNA, 120 bp, Artificial Sequence
  ENSG00000102900_24 (sequence is synthesized)
ccaaaatgagccaggaaacaaagcctttgggagttacttttatttagatataatattccatatagcagagtcacgattcattttcacatttttatttgaatgtgaaagtcaacctcagcc

SEQ ID NO: 132890 - DNA, 120 bp, Artificial Sequence
  ENSG00000102900_25 (sequence is synthesized)
ttagaagatgtaagatttgtgtgtgaaatatcaagcactccatgtcctcctctagagagtgtgacttaagtccagatggtccaagaccatcccccaaatcatcagctctgattgcaggat

SEQ ID NO: 132891 - DNA, 120 bp, Artificial Sequence
  ENSG00000102900_26 (sequence is synthesized)
tcatcagtttgccgttctgttgcaatcccagtggagataaaagcatagacctagaaaaagccttaagaaggaaggttgcaagtgcccccagcttgcacttgaggaaggggtaaaccttgc

SEQ ID NO: 132892 - DNA, 120 bp, Artificial Sequence
  ENSG00000102900_27 (sequence is synthesized)
cactgcactcctctgtagctgctccactgtgagttgactgctcggccttgtacacacccctcctagaaagacgtttaagcccctatttcccttctctggtggtcagttcctctgctcaga

SEQ ID NO: 132893 - DNA, 120 bp, Artificial Sequence
  ENSG00000102900_28 (sequence is synthesized)
cgacccccttccccactcattaaggtaattggccaggcaggctcatgggtcacgtgctgagtctgcaatgtacagaatccagaccaccacatggcatcagcaccatgggtgtttgctccc

SEQ ID NO: 132894 - DNA, 120 bp, Artificial Sequence
  ENSG00000102900_29 (sequence is synthesized)
tgagcagtagttgtcacccatcatttgctctgtttcccccaccatcagtcccaaagccctagactaaaccagagagcaaattaggtcgtgtttgttcctgaatgggccaactggagcctt

SEQ ID NO: 132895 - DNA, 120 bp, Artificial Sequence
  ENSG00000102900_30 (sequence is synthesized)
gagacagtgggcagtggtctgctctgctggtttgatggacggctccctgaggtagactctttcccagcagaatgttaagatccccaaagggtccccaaaggtgcctttgcttgtagggag

SEQ ID NO: 132896 - DNA, 120 bp, Artificial Sequence
  ENSG00000102900_31 (sequence is synthesized)
aagtttctgtcttgtcacagggtgtggtcatccccactgtctcccagttgttaaaataattgttaccttttcttttgggaagaaataatctgtagataatggaaccaactgctgcttatc

SEQ ID NO: 132897 - DNA, 120 bp, Artificial Sequence
  ENSG00000102900_32 (sequence is synthesized)
ggtaggattccatgttccaggaaggatgcggcctgagggtcagtggagctgtgttctgccttcctcctctagtcccatcttgtcaccctggaggactgtcttcaattgagctttactaga

SEQ ID NO: 132898 - DNA, 120 bp, Artificial Sequence
  ENSG00000102900_33 (sequence is synthesized)
aagtcttgaaacatgagccctgcagaggccttgatttagcaagttgtgccctgcttatatgtgctgatttaagctaatcaaatgatttaatagtgctttttaaaaaagagtactcctggc

SEQ ID NO: 132899 - DNA, 65 bp, Artificial Sequence
  ENSG00000102900_34 (sequence is synthesized)
cgatactccgtctcaaaaaaataaagagtactctggccgagtgcagtggctcacgcctgtaaccc

SEQ ID NO: 132900 - DNA, 66 bp, Artificial Sequence
  ENSG00000102900_35 (sequence is synthesized)
tggccgttcgcttgaggtaaggggtttgagaccagtctggccaacatggggaaaccccgtttctac

SEQ ID NO: 132901 - DNA, 65 bp, Artificial Sequence
  ENSG00000102900_36 (sequence is synthesized)
cttatgccactgcactccagcctaggcgatggagtgaggctctgattcaaaaataaaaataagag

SEQ ID NO: 132902 - DNA, 120 bp, Artificial Sequence
  ENSG00000102900_37 (sequence is synthesized)
gcgatggagtgaggctctgattcaaaaataaaaataagagtactctgtggacttttcataaagtgcaacttagtgctttgtttttctaatactagattttacttgcagatagaaatataa

SEQ ID NO: 132903 - DNA, 120 bp, Artificial Sequence
  ENSG00000102900_38 (sequence is synthesized)
caatgccacaaatgagaaggctcaagttgtttaaatacatgtttgctcctggcttacctcttcttcactatcccatgagaatcgtggatttgcctttccttgcatcctgcagttctactt

SEQ ID NO: 132904 - DNA, 120 bp, Artificial Sequence
  ENSG00000102900_39 (sequence is synthesized)
gtctcagagagaactgcacaccagccctgcatccaggggatgaggttctttgacctgtagatgggtcctaaaatgagaagggagagaagcagccagaccttgagctgctctgctagggga

SEQ ID NO: 132905 - DNA, 120 bp, Artificial Sequence
  ENSG00000102900_40 (sequence is synthesized)
gctgtgagttgggagaaaagtggtcactggttggcagttaaggacttgctgagagagacatttgtaggagaaagaagataagtaggttcataccagaagggccaggactcggatggagca

SEQ ID NO: 132906 - DNA, 120 bp, Artificial Sequence
  ENSG00000102900_41 (sequence is synthesized)
aatcccagttcttgtcctacaagctgattgtgcgattgagcacaggcctctggaattgtgcagagatgagaaacaggctgaatttgcaaggccacaacatcaggttgtcatgtacccatc

SEQ ID NO: 132907 - DNA, 120 bp, Artificial Sequence
  ENSG00000102900_42 (sequence is synthesized)
attacagcttatgcccagaagtcctgaccctgtgacaggttattatcttaaaaactcatcttcagcccactttttcagagaactaactctttccttagatgttgggccaggatttcacta

SEQ ID NO: 132908 - DNA, 120 bp, Artificial Sequence
  ENSG00000102900_43 (sequence is synthesized)
tttacccagagaaactaagagaaagtggcactaggcgtcttgtcttccagatgtgagatttcgatctttctaatgaaattgggggcactttgagactgtcagggtttgttcctgtctcag

SEQ ID NO: 132909 - DNA, 120 bp, Artificial Sequence
  ENSG00000102900_44 (sequence is synthesized)
aatggctcataataaactcactgaaacactcaaaggaaagtactgacttgatctggatccttttcagaggcctggagatttaatttcacagattctcttcttttggctcaacaacaacag

SEQ ID NO: 132910 - DNA, 120 bp, Artificial Sequence
  ENSG00000102900_45 (sequence is synthesized)
caacaaaaaactctttgactccccaacttcagagggaaaactgaagcgaaactggtgagctctgccacggcagatgccttcctttttcactcacgagctgggcgggctcatcaaagagca

SEQ ID NO: 132911 - DNA, 120 bp, Artificial Sequence
  ENSG00000102900_46 (sequence is synthesized)
ggaagtgcccattttacactggggccaggatgcagacccagctcctgtcctccgcgaacttacagtctaattagagcctcttaaggacaatttggcagccactgttaactcttgatgcat

SEQ ID NO: 132912 - DNA, 120 bp, Artificial Sequence
  ENSG00000102900_47 (sequence is synthesized)
catttaaatcctagaacaggcagctttaaagcaaagaactacagacttttccgcagtgtccagcatttgctgaccaaaaaaaacctgagggtgatttttctctctttgaatttttaccct

SEQ ID NO: 132913 - DNA, 120 bp, Artificial Sequence
  ENSG00000102900_48 (sequence is synthesized)
tgcctgcacctagccagaacccttaatactaaatttgcagttatatgcagctctgccaacgccttcctgctttagactggatctctactatcctttttctctactaggcaccagaacctt

SEQ ID NO: 132914 - DNA, 120 bp, Artificial Sequence
  ENSG00000102900_49 (sequence is synthesized)
tgtctagttcattaggtggttcacatcacttgccaaatttccagcatgccactcaggaagtgacttgagcatgctgaatgctgagtcagaaaatgaacccctgggctggcgggttgaccc

SEQ ID NO: 132915 - DNA, 120 bp, Artificial Sequence
  ENSG00000102900_50 (sequence is synthesized)
aggcctgacaaagtcttggcagtccccacactgactgcgaactctcccttagcctcagtcagctgggaaaggaattgagccctgtgtcagcaaattgggagaaagtgttacatataaaat

SEQ ID NO: 132916 - DNA, 120 bp, Artificial Sequence
  ENSG00000102900_51 (sequence is synthesized)
tcttgatggaaatgtgtgttttatatcagaattgagcttttgttcctgcatctcagaaataccaggaagaagtcagcatctcattaaacaggagttgtctaaactgtggaagaaaatatc

SEQ ID NO: 132917 - DNA, 120 bp, Artificial Sequence
  ENSG00000102900_52 (sequence is synthesized)
ccccattctttatcctacgctgaatccacaagtcttcccatcttccaccatcttctgacagttccataatatattggtatccctcacagggcagggacaggaaggaaataaatctttctg

SEQ ID NO: 132918 - DNA, 120 bp, Artificial Sequence
  ENSG00000102900_53 (sequence is synthesized)
ccacttgtttccaaccgaaaaggaaaaaagttaaaaattactaaagtgttctgaaaagagatttcaagtggtctgtgctgcttttttgccttgttacgcacataacttgtgactggctag

SEQ ID NO: 132919 - DNA, 120 bp, Artificial Sequence
  ENSG00000102900_54 (sequence is synthesized)
ataggccacgtgtatttatcagccaagattccattgcagcagatgatttcaaaacctctttgtgtgctgggccgtgctaggtagctggaatatctgaggtaaattaagcactgatttgtt

SEQ ID NO: 132920 - DNA, 120 bp, Artificial Sequence
  ENSG00000102900_55 (sequence is synthesized)
cccagagttgtgcataattctttaaaagtaggctcgtttttttcgtttttttgtccaggatcacctaagtgaagtactcgtggttctaagttgctaacccagggaaagaggatattttcc

SEQ ID NO: 132921 - DNA, 120 bp, Artificial Sequence
  ENSG00000102900_56 (sequence is synthesized)
tgtcctaaccttggtttttgaaatatgcttctcctgtgtgccctctctggggtatctggcccacagtagattgctcagcagatatttgaatgagcagatgctttgctttgtcctcctgtg

SEQ ID NO: 132922 - DNA, 120 bp, Artificial Sequence
  ENSG00000102900_57 (sequence is synthesized)
ccaggctcctccccacatcctctggatcagctccacgtgcctagattcagactccgtgattcaccgtgggggcccttaataggcattcagtctgaaagaaggtggaggagaataatgtct

SEQ ID NO: 132923 - DNA, 120 bp, Artificial Sequence
  ENSG00000102900_58 (sequence is synthesized)
cccaggatcaaatgagactcagggctgttccttcaaagacagaaacttgcagagctgcacagcagcagggaaacattgagaagggggtggaaatttgatgtactgtgaataatgaaggcc

SEQ ID NO: 132924 - DNA, 120 bp, Artificial Sequence
  ENSG00000102900_59 (sequence is synthesized)
ggatctttaaaaagaaaaagggacggggtgctggcagaaacccagctctgcgctagcacaatctgtacacctggctgcctttgcccttgagcttctatttcttggggatggggagggcaa

SEQ ID NO: 132925 - DNA, 120 bp, Artificial Sequence
  ENSG00000102900_60 (sequence is synthesized)
aaaagtttgccccagacactggcttctgtttgaacaggaagtggggagtcagtgatcccagaggggacttcagcatcaggacatatgctttggtggcctcagcagacctggcctaggcag

SEQ ID NO: 132926 - DNA, 120 bp, Artificial Sequence
  ENSG00000102900_61 (sequence is synthesized)
gctttcaggtggcacccaggggctttatggcctgcaggtaaggccccttcatccgggtcagacttagcaaataaaaatataggacactcaattaagtttgcattttggataaacagtgaa

SEQ ID NO: 132927 - DNA, 120 bp, Artificial Sequence
  ENSG00000102900_62 (sequence is synthesized)
gaagttcctagtgtaagtatgtcccagttctatgtggctgccctacctgggcttgcctctgctggtactagctgcccagagaccttcaggcctgccacgggctgccgggagctctctagt

SEQ ID NO: 132928 - DNA, 120 bp, Artificial Sequence
  ENSG00000102900_63 (sequence is synthesized)
ggaattggattaccctgattttgtgcattgtttgtgcttttgtgggcatcggaaatgactgagatacgcagttttgaagagctaggcaggcagctgagcgggataatgtgggccccagtt

SEQ ID NO: 132929 - DNA, 120 bp, Artificial Sequence
  ENSG00000102900_64 (sequence is synthesized)
gacctcagtggctgtcatctactgtgtttttcaaccaggaatttcaaatactgtgtattttagaaagaaaggaaagagccaaagtacagccttttctcacttgatcagtaacttgtgtta

SEQ ID NO: 132930 - DNA, 120 bp, Artificial Sequence
  ENSG00000102900_65 (sequence is synthesized)
gaaactcagtgggggagaattctttgcgtttttcagttgactgattattttcctttttttcttttttgcttttctcgagtcactctgtgtggtgcttgtgggagaagggagagggtggga

SEQ ID NO: 132931 - DNA, 120 bp, Artificial Sequence
  ENSG00000102900_66 (sequence is synthesized)
gagcgttggtggatgtgttctgcatgttcctttctgtacagtaacttctgcatttactctgtttaggatggttccttcaccactatccctgtctgtagccagtaaatttctggaatattc

SEQ ID NO: 132932 - DNA, 120 bp, Artificial Sequence
  ENSG00000102900_67 (sequence is synthesized)
aggaagcgggggagagcggcgcgagaagcggcggccgcgtcctcaagccggcacctgagcggcggagacggctgtagcacaaggttgcatgatctttgaagttgaaagagacaatatttg

SEQ ID NO: 132933 - DNA, 90 bp, Artificial Sequence
  ENSG00000102900_68 (sequence is synthesized)
ggctcaagccaccctcccacaactccgaagtcaagcccgcactctgattacctttgctggaatgataccataccgaacgtctggggacac

SEQ ID NO: 132934 - DNA, 120 bp, Artificial Sequence
  ENSG00000102900_69 (sequence is synthesized)
atgcaagatgtcggaagtcatcaaagattcacatcagagtaattgcagtggtttgggttggggaaaaaaagtatcatagcattccttgcctacatgttgtctctccccctcttaaatctt

SEQ ID NO: 132935 - DNA, 120 bp, Artificial Sequence
  ENSG00000102900_70 (sequence is synthesized)
aacttggtacagtccgttaacaataaaatacccttctgtaacctataaactgttactcccatcagtttgtgctttcaaactgatggctgacttctctgaatttgtgtagcgcacaacgaa

SEQ ID NO: 132936 - DNA, 120 bp, Artificial Sequence
  ENSG00000102900_71 (sequence is synthesized)
tggtgatgctgtgctccgggggctgcagtgcaccctttttaaagggaccctgcaatctcattgtttaatttgactctttagtgcttcagtcacatcagcacttgcagaggggttgttctt

SEQ ID NO: 132937 - DNA, 120 bp, Artificial Sequence
  ENSG00000102900_72 (sequence is synthesized)
ttcctttttcttctttctctctttttctcttctctctgtccttctccccacccccatccctcaattcaggcagtttggggtgggaaaaacttgagcactggttccgacagagctcatctc

SEQ ID NO: 132938 - DNA, 120 bp, Artificial Sequence
  ENSG00000102900_73 (sequence is synthesized)
ggaggaatggcgttttctatgaagaagccctttggagtatgtgaggtgctgactttacatgtagagagatgaaatgactgtgatggttgtgttacatggggccggtggttgttttaaaca

SEQ ID NO: 132939 - DNA, 120 bp, Artificial Sequence
  ENSG00000102900_74 (sequence is synthesized)
gttaagggaaggattcactcctgtccatcactgcttgagtgctgctgggttgtgcaatggagttctaattccctggcatttctcacctgcccatgaaggcctcagcaaatagaaaaccgg

SEQ ID NO: 132940 - DNA, 120 bp, Artificial Sequence
  ENSG00000102900_75 (sequence is synthesized)
caggccaatagatacaggtgcaggtagttgcaagtcaggttaaagcgatggtaccgaggggaggggatggggcagagacagtgtctcttaccccggatgaaggaaggcttccctgctttt

SEQ ID NO: 132941 - DNA, 120 bp, Artificial Sequence
  ENSG00000102900_76 (sequence is synthesized)
cttggccaatcaggaagcgggggagagcggcgcgagaagcggcggccgcgtcctcaagccggcacctgagcggcggagacggctgtagcacaaggatctgcatctccaatggatactgag

SEQ ID NO: 132942 - DNA, 120 bp, Artificial Sequence
  ENSG00000102900_77 (sequence is synthesized)
tctggcagaccttcggcatggctgaggagtaccatcgggagtcaatgttggttgagtgggagcaagtgaaacagcgaattctgcacacactgctggcatcaggagaagacgcccttgact

SEQ ID NO: 132943 - DNA, 120 bp, Artificial Sequence
  ENSG00000102900_78 (sequence is synthesized)
tggctgccttcagaaatttcagtgatgaagtaagttccttcttcctgagttgtggaattcctttttccccacttccaccaaaagctttttcttttcctgtacctaacagctttaagaatt

SEQ ID NO: 132944 - DNA, 120 bp, Artificial Sequence
  ENSG00000102900_79 (sequence is synthesized)
ctagttacagtaactatccagactgagttttccagagtggttccctttcagataccttggcctggcttttctgtgagtgcatacatccccatcagattattgtctgaattcctaattgag

SEQ ID NO: 132945 - DNA, 120 bp, Artificial Sequence
  ENSG00000102900_80 (sequence is synthesized)
aaaatacagtcacttcagtgattgacatgttcttgggagaaacaggtttctggttgatctgtgaagtctggtttaattcttctattatccgcttgtgctagagggtattttagtgcttaa

SEQ ID NO: 132946 - DNA, 120 bp, Artificial Sequence
  ENSG00000102900_81 (sequence is synthesized)
aagaggccaagctacatcagtgatgtgggaccccctggtcgaagctctctggataacatcgagatggcctatgcgcggcaaatttatatctataatgagaaaattgtaaatggacacctg

SEQ ID NO: 132947 - DNA, 120 bp, Artificial Sequence
  ENSG00000102900_82 (sequence is synthesized)
aaatgcaccctggtaaatagagtggcagcatgttgttgcagtgcctctgaaagacaaggtcttggtttgtttgaaaatttgagataaatttggaagcagttaactcatttgatagaagaa

SEQ ID NO: 132948 - DNA, 120 bp, Artificial Sequence
  ENSG00000102900_83 (sequence is synthesized)
gtacttgattcttctgagaattgttcagatttgtatcttgccattctaatattttttcttttaaaaatgtattgggtggggcagaatttgcttaaatatttaaatagttggttattggga

SEQ ID NO: 132949 - DNA, 120 bp, Artificial Sequence
  ENSG00000102900_84 (sequence is synthesized)
gcaggttaatgtacaccctcgaaaattcaaaacacttcatggaatttacttaaaacaaaggagctgttgccagtatgtttgttgtataaagaaagacaagtacaatcctgggacttaaaa

SEQ ID NO: 132950 - DNA, 120 bp, Artificial Sequence
  ENSG00000102900_85 (sequence is synthesized)
attcggctcctcttggcattggagttctggatttacccatgactaagattcctttgaaactctgacccagtgcagcattgcaaagaatcgatttctgagatgagacaatgagatgtggtt

SEQ ID NO: 132951 - DNA, 120 bp, Artificial Sequence
  ENSG00000102900_86 (sequence is synthesized)
attgcaaagaatcgatttctgagatgagacaatgagatgtggtttgcattttgtaaagatggaggaaacctctaacactgaccctgtatgggagatgactcaattatccacgccttggta

SEQ ID NO: 132952 - DNA, 120 bp, Artificial Sequence
  ENSG00000102900_87 (sequence is synthesized)
cagttgcaaattatttccctttgtctgaagtgggtggatgccagcgccttcatcagagctccttaatttaatgtatggaaaatgtctcagccaccatttttaacaattagctgtatcatg

SEQ ID NO: 132953 - DNA, 120 bp, Artificial Sequence
  ENSG00000102900_88 (sequence is synthesized)
gtcgaggtgagctgtattctgaaggcagctgcaaggccatttcatttacattaggttccatggcacaggagctttgttactgtaaaactaagaaaatgaatttgcacattgtatagaaga

SEQ ID NO: 132954 - DNA, 120 bp, Artificial Sequence
  ENSG00000102901_0 (sequence is synthesized)
cttgtctcaggtatctgataatttacacttgatctcagtgcagattctgggaaagtgaactccacggaagactcagaaaccaagttctaattcagttgccatgaaaacttaaggtgagag

SEQ ID NO: 132955 - DNA, 120 bp, Artificial Sequence
  ENSG00000102901_1 (sequence is synthesized)
gattgtcaaccagtgaaaaatacggaggaaaacactaacagaatatgatgaagaagccaagacttgggctgcttgcattacattaaccgaggtttacccgcagcgaggctgcctccaaag

SEQ ID NO: 132956 - DNA, 120 bp, Artificial Sequence
  ENSG00000102901_2 (sequence is synthesized)
catccggagtttgcaaccatcactgtccaccccgcgagctgcgatagtgcgagaactacaattcccgtggggctgtgcgggagcatcgcgagagttacattaactgtggcggcgggaagg

SEQ ID NO: 132957 - DNA, 120 bp, Artificial Sequence
  ENSG00000102901_3 (sequence is synthesized)
cggagcctgcagctggctgggcggttaggagggcccggggccgagacgatggctgaccacaaccctgacagcgactccacgccgcgcacgctgctgcgacgcgtgctggatacagcggac

SEQ ID NO: 132958 - DNA, 120 bp, Artificial Sequence
  ENSG00000102901_4 (sequence is synthesized)
ccgcgcaccccgcggcgaccccggagtgctcgggctggagcccggagagccctgcttgaaacggcttcccccaggaagttgagtggccaaacaaggacgatagccagagggcgttcccat

SEQ ID NO: 132959 - DNA, 120 bp, Artificial Sequence
  ENSG00000102901_5 (sequence is synthesized)
ggagccaggtctgttggcagatcggcccatattcaggccagtgggcacttggaggaacagacacctcggacgctgctgaagaacatcctactaactgccccagaatcttccatcctgatg

SEQ ID NO: 132960 - DNA, 120 bp, Artificial Sequence
  ENSG00000102901_6 (sequence is synthesized)
cctgagtcggtagtgaagccagtgccagcaccgcaggcggtccaaccctccagacaagagagcagttgcggcagcctggagctgcaacttcctgagctcgagccccccacaaccctggct

SEQ ID NO: 132961 - DNA, 120 bp, Artificial Sequence
  ENSG00000102901_7 (sequence is synthesized)
ccaggtctgctggcccctggcaggaggaaacagaggctgagactgtcagtgtttcagcagggagtggaccaggggctgtctctctcccaagagcctcaagggaatgctgatgcctcttcc

SEQ ID NO: 132962 - DNA, 120 bp, Artificial Sequence
  ENSG00000102901_8 (sequence is synthesized)
ctcaccagatccctcaacctgacctttgccacacctcttcagccacagtcagtgcagaggcctggcttggcccgcagacctccagcccgccgagctgtagacgtgggtgcctttttgcgg

SEQ ID NO: 132963 - DNA, 120 bp, Artificial Sequence
  ENSG00000102901_9 (sequence is synthesized)
tggaggacacccagccgttctctcagcccatggttggctcccccaacgtgtatcactccctgccctgcacgcctcacactggggctgaagacgctgagcaggctgccggtcgcaagacac

SEQ ID NO: 132964 - DNA, 120 bp, Artificial Sequence
  ENSG00000102901_10 (sequence is synthesized)
agagcagtgggcctgggctgcagaagaatagccctgggaaaccagcccagtttctggcaggagaggcagaggaggtcaatgcctttgctctgggcttcctgagcaccagcagtggtgtct

SEQ ID NO: 132965 - DNA, 120 bp, Artificial Sequence
  ENSG00000102901_11 (sequence is synthesized)
ctggagaagatgaagtagagcccttacacgatggagttgaagaggcagagaaaaagatggaagaagaaggtgtgagtgtgagtgaaatggaggcaacaggagcacaaggacccagcaggg

SEQ ID NO: 132966 - DNA, 120 bp, Artificial Sequence
  ENSG00000102901_12 (sequence is synthesized)
tagaagaggctgagggacacacagaggtgacagaagcagagggatcccaggggactgctgaggctgacgggccaggagcatcttcaggggatgaggatgcctctggcagggcagcaagtc

SEQ ID NO: 132967 - DNA, 120 bp, Artificial Sequence
  ENSG00000102901_13 (sequence is synthesized)
cagagtcggcctccagcacccctgagtctctccaggccaggcgacatcatcagtttcttgagccagccccagcgcctggtgctgcagtcttatcttcagagcctgcagagcctctgttgg

SEQ ID NO: 132968 - DNA, 120 bp, Artificial Sequence
  ENSG00000102901_14 (sequence is synthesized)
tcaggcatccccctaggccccggaccaccggccccaggccccggcaagatccccacaaggctggactgagccactatgtgaaactctttagcttctatgccaagatgcccatggagagga

SEQ ID NO: 132969 - DNA, 120 bp, Artificial Sequence
  ENSG00000102901_15 (sequence is synthesized)
aggctcttgagatggtggagaagtgcctagataaatatttccagcatctttgtgatgatctggaggtatttgctgctcatgctggccgcaagactgtgaagccagaggacctggagctgc

SEQ ID NO: 132970 - DNA, 120 bp, Artificial Sequence
  ENSG00000102901_16 (sequence is synthesized)
tgatgcggcggcagggcctggtcactgaccaagtctcactgcacgtgctagtggagcggcacctgcccctggagtaccggcagctgctcatcccctgtgcatacagtggcaactctgtct

SEQ ID NO: 132971 - DNA, 120 bp, Artificial Sequence
  ENSG00000102901_17 (sequence is synthesized)
tccctgcccagtagtggccaggcttcaacactttccctgtccccacctggggactcttgcccccacatatttctccaggtctcctccccacccccccagcatcaataaagtgtcataaac

SEQ ID NO: 132972 - DNA, 120 bp, Artificial Sequence
  ENSG00000102901_18 (sequence is synthesized)
agatcctctaagacaagacagggataaagtctcccgtggaatcccctcccgcctcatattccctgaccctgccctccctgcgagaactccagtccgggctccacaaagggcgcggtaaga

SEQ ID NO: 132973 - DNA, 120 bp, Artificial Sequence
  ENSG00000102901_19 (sequence is synthesized)
aacgtacacttccgaggggcagacaaggagggggcgttcacctacaccccggccgggctatggtcgggaacagggtgaggggcccaagccccggctgcggcaggcgggcgcccttaccca

SEQ ID NO: 132974 - DNA, 120 bp, Artificial Sequence
  ENSG00000102901_20 (sequence is synthesized)
tgctgactctggagcgggccgggtggcgctgcccatccccggatccttcgtagatggagtcttgcttagtcgcccaagctggagtagtgtggctcgatctcagctctgcaacctctgcct

SEQ ID NO: 132975 - DNA, 120 bp, Artificial Sequence
  ENSG00000102901_21 (sequence is synthesized)
cccagatcctctaagacaagacagggataaagtctcccgtggaatcccctcccgcctcatattccctgaccctgccctccctgcgagaactccagtccgggctccacaaagggcgcgtgc

SEQ ID NO: 132976 - DNA, 120 bp, Artificial Sequence
  ENSG00000102901_22 (sequence is synthesized)
gacttcagatccatgtcctggtgctgcctctggctttgtctttcctcagtgggcaggactgggtctgctggtccatctttacccttctctgagctatgcagccttggcctgctgcgtctc

SEQ ID NO: 132977 - DNA, 120 bp, Artificial Sequence
  ENSG00000102901_23 (sequence is synthesized)
gagtcagggttgcacccctctcggtggggtcaaggacagcgagcaactctggtcagtgggtctacaaggaatttctgcttgctttctacagggggcctctttccttggtccctcggtgtc

SEQ ID NO: 132978 - DNA, 120 bp, Artificial Sequence
  ENSG00000102901_24 (sequence is synthesized)
tcccagggccccatatccttagactatagggctggaggttgtaaaggggtgtggtgtggtggccaaaacttgttgagaggggccaggtttcaggatcagctggccaattcaaactgacct

SEQ ID NO: 132979 - DNA, 120 bp, Artificial Sequence
  ENSG00000102901_25 (sequence is synthesized)
ataggggcctgggactgccaggcagaggaacaggaaggtaagcaaggagggctgtaggcgataaggcctcgcgtgctaggtcgtcttctttctctgaaggccactcagggtggacccatg

SEQ ID NO: 132980 - DNA, 120 bp, Artificial Sequence
  ENSG00000102901_26 (sequence is synthesized)
actgatagagaagggcgtgggctgggcctacccggcaggagccgcctcaccccatcaggcccagatcctctaagacaagacagggataaagtctcccgtggaatcccctcccgcctcata

SEQ ID NO: 132981 - DNA, 120 bp, Artificial Sequence
  ENSG00000102901_27 (sequence is synthesized)
gataaagtctcccgtggaatcccctcccgcctcatattccctgaccctgccctccctgcgagaactccagtccgggctccacaaagggcgcgggttcaagcaattctcctgcctcagttt

SEQ ID NO: 132982 - DNA, 120 bp, Artificial Sequence
  ENSG00000102901_28 (sequence is synthesized)
acctcggacgctgctgaagaacatcctactaactggtaagtgagcgctggcctgccggtcagagttaggtaccagtccaaccccagtcttgtggtatcttttattcagggtggcctgttc

SEQ ID NO: 132983 - DNA, 120 bp, Artificial Sequence
  ENSG00000102901_29 (sequence is synthesized)
gtggaccaggggctgtctctctcccaaggtgaggccctggacaccacttttgctaccctctccctcctgtcctctggagaggctgaggagtcctgagagagggccctcacaggcctggat

SEQ ID NO: 132984 - DNA, 120 bp, Artificial Sequence
  ENSG00000102901_30 (sequence is synthesized)
cacttaccatggttttcttcttttacattctcttgccggttgctgacagagcctcaagggaatgctgatgcctcttccctcaccaggtgctgctctgggtgtttcctgttctgggagtgg

SEQ ID NO: 132985 - DNA, 120 bp, Artificial Sequence
  ENSG00000102901_31 (sequence is synthesized)
gtggaggagagacttggggagggaggtgctgcctgggatggaatctgcccatactacttcctaccagttttagcctcacagcatctgttctaagagatgagagccccagggcagatggag

SEQ ID NO: 132986 - DNA, 120 bp, Artificial Sequence
  ENSG00000102901_32 (sequence is synthesized)
cccactgtccaggccctggcaacgctgagtagcagccggtgggcctggaatacgctgagagccagctggcccctgatctccaggtgacagcctcagaacctgttactactctgcccacag

SEQ ID NO: 132987 - DNA, 120 bp, Artificial Sequence
  ENSG00000102901_33 (sequence is synthesized)
cagcttgcgcaggagctcctcctccgtggtgcctgacgacaaggagtacgaatggtcggagccagtatcagggaagccctcttcccctaccaccaccaactgggggcccatagggcactc

SEQ ID NO: 132988 - DNA, 120 bp, Artificial Sequence
  ENSG00000102901_34 (sequence is synthesized)
ggcagcctccagccctgcggtagcagcctgtaactccgacgcggcggccgcagcggctgcgccctctgcggctgcaaactccacttgcactgtgagatcgatgggcttcacgtcttctcc

SEQ ID NO: 132989 - DNA, 120 bp, Artificial Sequence
  ENSG00000102901_35 (sequence is synthesized)
acgtcttctccagtgggagtgatgggcgccggctgtacggatcccggagcctgactgctgtctacagtggcctgaagggtgagaagcacggccgcggaagcagataccagatggagtctt

SEQ ID NO: 132990 - DNA, 120 bp, Artificial Sequence
  ENSG00000102901_36 (sequence is synthesized)
aaagatcgagttactgcggaccaggattcgggcgaggttgtgctgtttgccagaaccagttccccagccccgagcccctttgagtcgacggcattgctgcagcagagggagacgaaacct

SEQ ID NO: 132991 - DNA, 120 bp, Artificial Sequence
  ENSG00000102901_37 (sequence is synthesized)
gggcctcggcgccccgaagggtctcaggagcccctttctttgcgttggggactctctcctgattcagctgctgcctgcgttgactaactgatctaaacaaagtctccagtagacgcctac

SEQ ID NO: 132992 - DNA, 120 bp, Artificial Sequence
  ENSG00000102901_38 (sequence is synthesized)
tagcagaatcgggaaaggcagcagtagagtaaggagagagactatccattctaaggcctggagtcatggacccaagcaggtaccaatatagataataagtctgaaccaggatgtcgagtc

SEQ ID NO: 132993 - DNA, 120 bp, Artificial Sequence
  ENSG00000102901_39 (sequence is synthesized)
gactgtggagggacagagccccagggaaagactggcctctatgtggccccctgacccaactgcccctcagcaggtggtcagggctgctggtcctggctggccaagggccacgtggtcccc

SEQ ID NO: 132994 - DNA, 120 bp, Artificial Sequence
  ENSG00000102901_40 (sequence is synthesized)
agatcctctaagacaagacagggataaagtctcccgtggaatcccctcccgcctcatattccctgaccctgccctccctgcgagaactccagtccgggctccacaaagggcgcgattctg

SEQ ID NO: 132995 - DNA, 120 bp, Artificial Sequence
  ENSG00000102904_0 (sequence is synthesized)
gctgattgcccgcctgcccgtgggtcatggcctgccagcagtcgcggtaccacagcttctcgtccgcgtcgaggtaggcgctggcagggatgagggcagagatgagggtttgagtacttc

SEQ ID NO: 132996 - DNA, 120 bp, Artificial Sequence
  ENSG00000102904_1 (sequence is synthesized)
tagagagggaaatggcacttgatccggacctctgcacctcctgctggcctctgaccattgatctagggctccagcaccacagagtcaatggttagaatcgggctgatttagcccagtgaa

SEQ ID NO: 132997 - DNA, 120 bp, Artificial Sequence
  ENSG00000102904_2 (sequence is synthesized)
gacgttacgtgctagcaaaacgattacagccacggccttcaggagtgaccatagacgaatcctttctcacagaagacaagagcacccagaatcgcaagcttcttcagaaacgaaggacgc

SEQ ID NO: 132998 - DNA, 120 bp, Artificial Sequence
  ENSG00000102904_3 (sequence is synthesized)
tgactggtcagttctccatgggtgggcacctgtccccatggcccacatacaccagtggccagaccattttgcaaaatcgaaaaccctgttcagatgactaccggaagcgagtagggagct

SEQ ID NO: 132999 - DNA, 120 bp, Artificial Sequence
  ENSG00000102904_4 (sequence is synthesized)
gccagcagcacccctttcgcactgccaagccccagtacttggaggaactggaaaactacctacgcaaggagctcctcctgctggacctgggcacagattccacccaggaactaaggctgc

SEQ ID NO: 133000 - DNA, 120 bp, Artificial Sequence
  ENSG00000102904_5 (sequence is synthesized)
agccttacagagagatctttgagttcttcatagaggacttcaaaacgtacaagccattactatcctccatcaagaatgcgtatgaggggatgctggcccaccaaagggagaagattcggg

SEQ ID NO: 133001 - DNA, 120 bp, Artificial Sequence
  ENSG00000102904_6 (sequence is synthesized)
ctctggagcccctgaaggccaagcttgtcactgtgaatgaggactgcaatgagaggatcctggccatgagagctgaggagaaatatgaaatctccctgctcaagaaagagaagatgaact

SEQ ID NO: 133002 - DNA, 120 bp, Artificial Sequence
  ENSG00000102904_7 (sequence is synthesized)
tgctaaaactcatcgacaaaaagaatgaggagaagatttcattgcagagcgaggtgaccaaactgaggaagaacttggctgaggagtacctgcactacctcagtgagcgagatgcctgta

SEQ ID NO: 133003 - DNA, 120 bp, Artificial Sequence
  ENSG00000102904_8 (sequence is synthesized)
agatcctcatcgcagacctgaatgagctgcggtaccagcgggaggacatgtcattagcccagtcgccaggcatctggggggaggaccctgtgaagttaaccctggctcttaagatgaccc

SEQ ID NO: 133004 - DNA, 120 bp, Artificial Sequence
  ENSG00000102904_9 (sequence is synthesized)
ggcaagacctgacccgcacgcagatggaactcaacaacatgaaggccaactttggagatgtggtccccaggagggactttgaaatgcaggagaagaccaacaaggatcttcaggagcagc

SEQ ID NO: 133005 - DNA, 120 bp, Artificial Sequence
  ENSG00000102904_10 (sequence is synthesized)
gttcgcaaggagcatgagatcctcatgcagctgcacatgagcacgctgaaggaacgggaccaattcttctctgagctgcaggagatccagcgcacttccacgccgcggcctgactggacc

SEQ ID NO: 133006 - DNA, 120 bp, Artificial Sequence
  ENSG00000102904_11 (sequence is synthesized)
aagtgcaaagatgtggtggctgggggcccagagcgctggcagatgctggctgagggcaagaacagcgaccagctggtggacgtgctcctggaagagattggttcggggctgctgcgggag

SEQ ID NO: 133007 - DNA, 120 bp, Artificial Sequence
  ENSG00000102904_12 (sequence is synthesized)
aaagacttcttccctggtctgggctatggggaagccatccctgcttttcttcggtttgatggcctcgtggagaacaagaagccaagcaagaaggacgtggtcaacctcctcaaggatgcc

SEQ ID NO: 133008 - DNA, 120 bp, Artificial Sequence
  ENSG00000102904_13 (sequence is synthesized)
tggaaggaacgtcttgctgaggagcagaaagagacgttcccagatttcttcttcaatttcctggagcatcgctttgggcccagtgatgccatggcctgggcttatactatttttgaaaat

SEQ ID NO: 133009 - DNA, 120 bp, Artificial Sequence
  ENSG00000102904_14 (sequence is synthesized)
atcaagatcttccactccaacgaggttatgagtcagttctatgcagtcttgatgggaaagcggagtgagaatgtgtatgtcacccagaaggagacagtagcccagctgctgaaggagatg

SEQ ID NO: 133010 - DNA, 120 bp, Artificial Sequence
  ENSG00000102904_15 (sequence is synthesized)
acaaatgctgacagtcagaacgaggggctactaaccatggagcagttcaacactgtcctcaagagtaccttccctctcaagacagaagagcaaatccaggagctgatggaggcagggggc

SEQ ID NO: 133011 - DNA, 120 bp, Artificial Sequence
  ENSG00000102904_16 (sequence is synthesized)
tggcatcccagcagcagcaatgcagacttgctcaactaccgctcactgtttatggaggatgaggagggccagagtgagccctttgtgcaaaaactctgggaacaatacatggatgagaag

SEQ ID NO: 133012 - DNA, 120 bp, Artificial Sequence
  ENSG00000102904_17 (sequence is synthesized)
gacgagtacttacagcagctaaagcaggagcttggcatagaactccatgaggaagtgactctgcccaagctgcgagggggcctgatgaccatcgaccccagcctggacaagcagacagtg

SEQ ID NO: 133013 - DNA, 120 bp, Artificial Sequence
  ENSG00000102904_18 (sequence is synthesized)
aacacctacatgagccaggccttccagctccctgagtcggaaatgccagaggagggtgacgagaaggaagaagccgtggtggaaatcctccagactgccctggagcggcttcaggtgatt

SEQ ID NO: 133014 - DNA, 120 bp, Artificial Sequence
  ENSG00000102904_19 (sequence is synthesized)
gacatcaggcgtgtgggacctcgagagccagagcctgcaagctaggaacttgtgggcagcctgcgtactccagtcctgctaacccctagcttttaatataaaagtgtttgtctgaatcca

SEQ ID NO: 133015 - DNA, 120 bp, Artificial Sequence
  ENSG00000102904_20 (sequence is synthesized)
ggccagcaggggaaaacccaaccttacttggaggagccagggaagtatctcgcagatcccgcaaaaaggcacccacgtctacagctcggcgggctggaggtctgcgggccaagccaggcc

SEQ ID NO: 133016 - DNA, 120 bp, Artificial Sequence
  ENSG00000102904_21 (sequence is synthesized)
agtttgcccacagatccctccatctgccctggggctctcatctcttagaacagatgctgtgaggctaaaactggtaggaagtagtatgggcagattccatcccaggcagcacctccctcc

SEQ ID NO: 133017 - DNA, 120 bp, Artificial Sequence
  ENSG00000102904_22 (sequence is synthesized)
ccaagtctctcctccacccactcccagaacaggaaacacccagagcagcacctggtgagggaagaggcatcagcattcccttgaggctctgtcagcaaccggcaagagaatgtaaaagaa

SEQ ID NO: 133018 - DNA, 120 bp, Artificial Sequence
  ENSG00000102904_23 (sequence is synthesized)
gaaaaccatgggttggaccgcctgcggtgctggcactggcttcactaccgactcaggcatcaggatggaagattctggggctgcagaaacaccaaggagagggtggggctgacagaacag

SEQ ID NO: 133019 - DNA, 120 bp, Artificial Sequence
  ENSG00000102904_24 (sequence is synthesized)
ggcctctgttcatccccctgcctcagttctggtacctggggtcaaatcggctgtagtggttgactctcagggcacccgctgccgggtcccagtccacctttgctactttgtcctactccc

SEQ ID NO: 133020 - DNA, 120 bp, Artificial Sequence
  ENSG00000102904_25 (sequence is synthesized)
ctactcccagcccgcgggcgctaggctcgggggcgtggcgcatccctgactccgcccccgccgcgggggggcctctggggcctggtcgccatggcgaccggctgtacgctaccacagctt

SEQ ID NO: 133021 - DNA, 120 bp, Artificial Sequence
  ENSG00000102904_26 (sequence is synthesized)
tgaccctcatccataggcgagtcccacaggctgggcccctgaagcccctgggtctccctgtgcaccatgcaccatccactgctcagcccagcacagaggagggcacctgggagtctgggg

SEQ ID NO: 133022 - DNA, 120 bp, Artificial Sequence
  ENSG00000102904_27 (sequence is synthesized)
aacccccacacccggcctacattacagccacggccttcaggagtgaccatagacgaatcctttctcacagaagacaagagcacccagaatcgcaagcttcttcagaaacgaaggacgctg

SEQ ID NO: 133023 - DNA, 120 bp, Artificial Sequence
  ENSG00000102908_0 (sequence is synthesized)
gcggcggtggcggcgaccgtcagttttcgctgaggagaaacacgaaacggaccctttggctctcccccttccccttccccgtcctgaacccctctcctggtcaccgagaatcagtccccg

SEQ ID NO: 133024 - DNA, 120 bp, Artificial Sequence
  ENSG00000102908_1 (sequence is synthesized)
tggagttccccctccacctcgccatcgtttcctcggtcctcggcccagtggaagtcactaccctcgaggaggaggcagcggcagccgccctcgcgtcgccgcccccggttcggtgcccgc

SEQ ID NO: 133025 - DNA, 120 bp, Artificial Sequence
  ENSG00000102908_2 (sequence is synthesized)
ggtcccggagaggaggtgccgccgccaccgccgctccccccctcccgctgccctcgggccgggctgggtcgagctgcgatgccctcggacttcatctcattgctcagcgcggacctagac

SEQ ID NO: 133026 - DNA, 120 bp, Artificial Sequence
  ENSG00000102908_3 (sequence is synthesized)
ctggaatcgcccaagtccctctactcgcgagaatctgtctatgatcttctcccaaaggagttacagttacctccatctagagaaacatctgtagcatcaatgagtcagacaagcggtggt

SEQ ID NO: 133027 - DNA, 120 bp, Artificial Sequence
  ENSG00000102908_4 (sequence is synthesized)
gaggcaggctcgcctcctccagctgttgttgctgctgatgcttcttcagctccctcctcttcctccatgggcggtgcttgcagctcctttaccacctcttccagccctaccatttattct

SEQ ID NO: 133028 - DNA, 120 bp, Artificial Sequence
  ENSG00000102908_5 (sequence is synthesized)
acctcagtcaccgacagcaaggctatgcaagtggagagctgctcctcagccgtgggggtaagtaacagaggggtaagtgaaaagcagttaaccagtaacacagttcagcagcatccatca

SEQ ID NO: 133029 - DNA, 120 bp, Artificial Sequence
  ENSG00000102908_6 (sequence is synthesized)
acaccgaagaggcacacagtcttgtacatctcaccaccacctgaggacttgctggataacagtcggatgtcctgccaggatgaggggtgtggattggaatctgagcagagctgcagtatg

SEQ ID NO: 133030 - DNA, 120 bp, Artificial Sequence
  ENSG00000102908_7 (sequence is synthesized)
tggatggaggattccccctccaacttcagtaacatgagcaccagttcctacaatgataacactgaggtacctcgtaaatcacgaaaacgaaatccaaagcagaggccgggggtcaaacga

SEQ ID NO: 133031 - DNA, 120 bp, Artificial Sequence
  ENSG00000102908_8 (sequence is synthesized)
cgagattgtgaagaatctaatatggatatatttgatgccgacagtgccaaagcacctcactatgtgctttctcagcttaccacggacaacaaaggcaactcaaaagcgggaaatggaaca

SEQ ID NO: 133032 - DNA, 120 bp, Artificial Sequence
  ENSG00000102908_9 (sequence is synthesized)
ttggaaaaccaaaaaggaactggagtaaagaagagccctatgttgtgtggacaatatcctgttaaaagtgagggaaaggagctgaagatagttgtacaacctgagacacagcaccgagct

SEQ ID NO: 133033 - DNA, 120 bp, Artificial Sequence
  ENSG00000102908_10 (sequence is synthesized)
cggtacctgactgagggcagccgtggctcagtgaaagatagaacacagcaaggctttcctacagtaaagctggaaggccataatgaacctgtagtgttgcaagtgtttgtgggcaacgac

SEQ ID NO: 133034 - DNA, 120 bp, Artificial Sequence
  ENSG00000102908_11 (sequence is synthesized)
tctggacgagtgaaaccacatggattttatcaggcctgcagagtaactggacgaaatacaactccttgcaaagaagtggacattgaaggcactactgttatagaagtcggccttgatcct

SEQ ID NO: 133035 - DNA, 120 bp, Artificial Sequence
  ENSG00000102908_12 (sequence is synthesized)
agcaacaacatgacactggcggtggactgcgtagggatattgaaattgaggaatgctgatgtcgaagccagaataggaattgctggttccaagaagaaaagcactcgtgccagattggtt

SEQ ID NO: 133036 - DNA, 120 bp, Artificial Sequence
  ENSG00000102908_13 (sequence is synthesized)
tttcgagttaatatcatgaggaaagatggctccactttgacactgcaaacaccctcttctccaattttgtgtactcagccagcaggagtgccagaaatcttaaagaaaagcttgcatagc

SEQ ID NO: 133037 - DNA, 120 bp, Artificial Sequence
  ENSG00000102908_14 (sequence is synthesized)
tgttcagtgaaaggagaagaagaagtgtttttaatcggcaagaactttctgaaaggaactaaagttattttccaagaaaatgtttctgatgaaaactcttggaagtcagaagctgaaatt

SEQ ID NO: 133038 - DNA, 120 bp, Artificial Sequence
  ENSG00000102908_15 (sequence is synthesized)
gatatggaactatttcatcagaatcatcttattgtgaaggttcctccctatcatgaccaacatataactttgcctgtgtcagtgggaatatatgtagtgacaaatgctggaagatctcat

SEQ ID NO: 133039 - DNA, 120 bp, Artificial Sequence
  ENSG00000102908_16 (sequence is synthesized)
gatgttcaaccattcacttacactccagacccagcagcagctggtgctttgaatgtaaatgtgaagaaggaaatatctagtccagcaagaccttgctcttttgaagaggccatgaaagca

SEQ ID NO: 133040 - DNA, 120 bp, Artificial Sequence
  ENSG00000102908_17 (sequence is synthesized)
atgaaaactactggatgtaatttagataaggtaaatattatccctaatgccctgatgactccactcataccaagcagtatgattaagagtgaagatgttactccaatggaagtaacagca

SEQ ID NO: 133041 - DNA, 120 bp, Artificial Sequence
  ENSG00000102908_18 (sequence is synthesized)
gaaaaaagatcttccactatttttaagactacaaagtctgttggatcaactcagcaaacattagaaaacatctcaaacatagcaggaaatggctctttttcatcaccatcatcttcccac

SEQ ID NO: 133042 - DNA, 120 bp, Artificial Sequence
  ENSG00000102908_19 (sequence is synthesized)
ctaccttctgaaaatgaaaaacagcagcagattcagcccaaggcatacaacccagagaccctgacaactattcaaacccaggacatctcacagcctggtacttttccagcagtttctgct

SEQ ID NO: 133043 - DNA, 120 bp, Artificial Sequence
  ENSG00000102908_20 (sequence is synthesized)
tctagtcagctgcccaacagcgatgcactattgcagcaggctacacagtttcagacaagagaaactcagtctagagagatattacagtcagatggtacagtggttaatttgtcacaactg

SEQ ID NO: 133044 - DNA, 120 bp, Artificial Sequence
  ENSG00000102908_21 (sequence is synthesized)
actgaggcatcacaacaacagcagcagtcaccactacaagaacaagcacagactttacagcagcagatttcatcaaatatttttccatcaccaaatagtgtgagtcagcttcagaatact

SEQ ID NO: 133045 - DNA, 120 bp, Artificial Sequence
  ENSG00000102908_22 (sequence is synthesized)
attcagcagctgcaagcagggagtttcacaggcagtactgctagtggcagcagtggaagtgttgacttggtccaacaagttttagaggcacagcagcagttatcttcagttttattttct

SEQ ID NO: 133046 - DNA, 120 bp, Artificial Sequence
  ENSG00000102908_23 (sequence is synthesized)
gctccagatggtaatgagaatgttcaagagcagcttagtgcagatatttttcaacaagtcagtcaaattcagagtggtgtaagccctggaatgttttcctcaacagagccaacagtccat

SEQ ID NO: 133047 - DNA, 120 bp, Artificial Sequence
  ENSG00000102908_24 (sequence is synthesized)
accagaccagataatttattacctggaagagctgaaagtgttcatccacagtctgaaaacacgttatctaatcaacagcagcagcagcagcagcaacagcaagtgatggaatcttcagcc

SEQ ID NO: 133048 - DNA, 120 bp, Artificial Sequence
  ENSG00000102908_25 (sequence is synthesized)
gcaatggtgatggagatgcaacagagtatctgccaggcagctgcccagattcagtcagagttattcccttcaactgcttcagcaaatggaaaccttcagcaatcgccagtttaccagcag

SEQ ID NO: 133049 - DNA, 120 bp, Artificial Sequence
  ENSG00000102908_26 (sequence is synthesized)
acttctcacatgatgagtgcattgtctaccaatgaggatatgcaaatgcagtgtgaattgttttcttctcctcctgcagtttctggaaatgaaacttctacaactaccacacagcaggtt

SEQ ID NO: 133050 - DNA, 120 bp, Artificial Sequence
  ENSG00000102908_27 (sequence is synthesized)
gcaacccctggcactaccatgtttcagacatcaagttcaggagatggagaagaaactggaacacaagcaaaacagattcagaacagtgtctttcagaccatggtccaaatgcaacatagt

SEQ ID NO: 133051 - DNA, 120 bp, Artificial Sequence
  ENSG00000102908_28 (sequence is synthesized)
ggggacaatcaacctcaagttaaccttttttcatccacaaaaagtatgatgagtgttcagaatagtggtacccaacaacaaggtaatggtttattccagcaagggaatgagatgatgtca

SEQ ID NO: 133052 - DNA, 120 bp, Artificial Sequence
  ENSG00000102908_29 (sequence is synthesized)
cttcaatctggaaattttttgcagcagtcttctcattcacaggcccaactttttcatcctcaaaatcctattgccgatgctcagaacctttcccaggaaactcaaggttctctctttcat

SEQ ID NO: 133053 - DNA, 120 bp, Artificial Sequence
  ENSG00000102908_30 (sequence is synthesized)
agtccaaatcctattgtccacagtcagacttctacaacctcctctgaacaaatgcagcctccaatgtttcactctcaaagtaccattgctgtgttacagggctcttcagttcctcaagac

SEQ ID NO: 133054 - DNA, 120 bp, Artificial Sequence
  ENSG00000102908_31 (sequence is synthesized)
cagcagtcaaccaacatatttctttcccagagtcccatgaataatcttcagactaacacagtagcccaagaagcattttttgcagcaccgaactcaatttctccacttcagtcaacatca

SEQ ID NO: 133055 - DNA, 120 bp, Artificial Sequence
  ENSG00000102908_32 (sequence is synthesized)
aacagtgaacaacaagctgctttccaacagcaagctccaatatcacacatccagactcctatgctttcccaagaacaggcacaacccccgcagcagggtttatttcagcctcaggtggcc

SEQ ID NO: 133056 - DNA, 120 bp, Artificial Sequence
  ENSG00000102908_33 (sequence is synthesized)
ctgggctcccttccacctaatccaatgcctcaaagccaacaaggaaccatgttccagtcacagcactcaatagttgccatgcagagtaactctccatcccaggaacagcagcagcagcag

SEQ ID NO: 133057 - DNA, 120 bp, Artificial Sequence
  ENSG00000102908_34 (sequence is synthesized)
caacagcagcagcaacagcagcagcaacaacaacagagcattttattcagtaatcagaataccatggctacaatggcgtctccaaagcaaccaccaccaaacatgatattcaacccaaat

SEQ ID NO: 133058 - DNA, 120 bp, Artificial Sequence
  ENSG00000102908_35 (sequence is synthesized)
caaaatccaatggctaatcaggagcaacagaaccagtcaatttttcaccaacaaagtaacatggccccaatgaatcaagagcaacagcccatgcaatttcagagtcagtccacagtttcc

SEQ ID NO: 133059 - DNA, 120 bp, Artificial Sequence
  ENSG00000102908_36 (sequence is synthesized)
tcacttcagaacccaggtcctacccagtcggaatcatcacagacccccttgttccatagctctcctcagattcagttggtacaagggtcacctagttctcaagagcagcaagtaactctc

SEQ ID NO: 133060 - DNA, 120 bp, Artificial Sequence
  ENSG00000102908_37 (sequence is synthesized)
ttcttatctccagcatccatgtctgccttgcagaccagtataaatcaacaagatatgcaacagtctcctctttattcccctcagaacaacatgcctggaattcaaggagccacatcttcg

SEQ ID NO: 133061 - DNA, 120 bp, Artificial Sequence
  ENSG00000102908_38 (sequence is synthesized)
cctcaaccacaggctactttatttcacaacacagcaggaggcacaatgaaccaactgcagaattctcctggctcatctcagcagacatcaggaatgttcttatttggcattcaaaataac

SEQ ID NO: 133062 - DNA, 120 bp, Artificial Sequence
  ENSG00000102908_39 (sequence is synthesized)
tgtagtcagcttttaacctctggaccagctacattgcctgatcagttgatggccataagtcagccaggccaaccacaaaacgagggccagccacctgtgacaacacttctttctcagcaa

SEQ ID NO: 133063 - DNA, 120 bp, Artificial Sequence
  ENSG00000102908_40 (sequence is synthesized)
atgccagagaattctccactggcatcctctataaacaccaaccagaacatcgaaaagattgatttgcttgtttcattgcaaaaccaagggaacaacttgactggctccttttaactggat

SEQ ID NO: 133064 - DNA, 120 bp, Artificial Sequence
  ENSG00000102908_41 (sequence is synthesized)
ataaattccacgaagaaaatcctgattccaagatgtcctgagatcttgtggttccatgagaattattactttaaaaacaaaacaaaatataaaaaactgtgtttgagtaaactgatagat

SEQ ID NO: 133065 - DNA, 120 bp, Artificial Sequence
  ENSG00000102908_42 (sequence is synthesized)
tttactctgactgcaaaagagcacacctatgctgcttgttgcagtaactaaccaccaatgttaacatcttcatattttatattcctaataacagtgatgactgagaatctatttgagttt

SEQ ID NO: 133066 - DNA, 120 bp, Artificial Sequence
  ENSG00000102908_43 (sequence is synthesized)
ccagctggcagaattaattgttattattttcctaggcgcaatttccttaaacgtacagtttaaattcaaggctggaccactcagttattattgctattagaaaataatatatcatgttta

SEQ ID NO: 133067 - DNA, 120 bp, Artificial Sequence
  ENSG00000102908_44 (sequence is synthesized)
cttttgttcttcattattttctttcctgcattgttttagtcaagtaatggcttttgaaaaagtaaagttcaataataactaaggctgtgatttttttcaatataaaaggcacagctgttg

SEQ ID NO: 133068 - DNA, 120 bp, Artificial Sequence
  ENSG00000102908_45 (sequence is synthesized)
gccaaagtgaaggaatcttttttcagttttattggagaaactgaagggtaacattctaacaagtaaactgtatgtgcagataaaagtactcttgatttaacacaaaggcagatgatacac

SEQ ID NO: 133069 - DNA, 120 bp, Artificial Sequence
  ENSG00000102908_46 (sequence is synthesized)
ttataaaactgggaacagctggaatgcttcttgattttattttttcagagagttgttagttctctgggtttctactaaggggtttagccataactgtgcatagaaaaataattatctgta

SEQ ID NO: 133070 - DNA, 120 bp, Artificial Sequence
  ENSG00000102908_47 (sequence is synthesized)
aaaaatgaaggggataatatatgataaattatgttctgatatcctcctacagtagtttaaattgacagaaaaatttgaatgttttcttcttaacccagtcttaggctggtattccctttt

SEQ ID NO: 133071 - DNA, 120 bp, Artificial Sequence
  ENSG00000102908_48 (sequence is synthesized)
tatatatatctatattacttttcacctctttttcactttactttagagaactattaatatactactggcttcatgaccctgtagcatctttggccactttaatctagggtgacctagcaa

SEQ ID NO: 133072 - DNA, 120 bp, Artificial Sequence
  ENSG00000102908_49 (sequence is synthesized)
tcctgcagcacagggcagagagtactgtcttaggaattattaggagttgattcctgagaaacaacacatttttccccatgaacggtgctgttctgaagtcttcaaatttttccctctaat

SEQ ID NO: 133073 - DNA, 120 bp, Artificial Sequence
  ENSG00000102908_50 (sequence is synthesized)
aggaaacagtataaattttaattaaaaaaaaaaggcaaactaaaatttcttgaaatatcacttctccctgatctgcagtgagtataaattcacttgtcacctcagtgctttacagtttga

SEQ ID NO: 133074 - DNA, 120 bp, Artificial Sequence
  ENSG00000102908_51 (sequence is synthesized)
agtggtcacttacctgatggttcccacaagccttaggctttacagggttgtatcattgacttaaaatgaagaattaacttgtgttacatctataaagagcaaaataacacactccagaac

SEQ ID NO: 133075 - DNA, 120 bp, Artificial Sequence
  ENSG00000102908_52 (sequence is synthesized)
ttggcagttgtagcattagttatacagttttgggtgttcttgccacccgtgggatgcctgcttctcactaccacctgtgtctggacacatgcttatgtctcattttccttttggcatgtg

SEQ ID NO: 133076 - DNA, 120 bp, Artificial Sequence
  ENSG00000102908_53 (sequence is synthesized)
gaaagctgtcaatgcagtgtaaggccaacgtgtgtgtggcttctatgtgttgagataatgttttggtatccttgtccgtttcatttattttttaagtgtacaaaaaataacctgttaatt

SEQ ID NO: 133077 - DNA, 120 bp, Artificial Sequence
  ENSG00000102908_54 (sequence is synthesized)
ctgttctttttttttttttttttctatcctgtacatttagttgaactgtgcggaattgtggtgttggttttgtttacacagccagatttttccttctttttgttttgtgatgatcttcct

SEQ ID NO: 133078 - DNA, 120 bp, Artificial Sequence
  ENSG00000102908_55 (sequence is synthesized)
gtgctcttttgtctttttctcttttttctcatgttttcttccctccacctccacccctttctttctttctctctctgattgagaggcattgaattacgttttcagtagtacaggcttctt

SEQ ID NO: 133079 - DNA, 120 bp, Artificial Sequence
  ENSG00000102908_56 (sequence is synthesized)
gccgatatgaagggaacttttcagaaagagacctactctgggtcatttaattttgaatacagttttcaatcgttcaagttttggatggtttatatctaatgtgtgtttcatttttttgga

SEQ ID NO: 133080 - DNA, 120 bp, Artificial Sequence
  ENSG00000102908_57 (sequence is synthesized)
aagctatattttgtatttaggaaatggtatactattttgctatttgtactgagtgagtacattggcataaatatagaaatttatatatatacatatatataaactattcttttttgccac

SEQ ID NO: 133081 - DNA, 120 bp, Artificial Sequence
  ENSG00000102908_58 (sequence is synthesized)
acatttttgtggtaaatttgtgagtttgtctgatgttctaccacaacgtggcgtctgataacagtgagggggggtggggtttgttatgtctttattgagtatttaagtatcttttgaaac

SEQ ID NO: 133082 - DNA, 120 bp, Artificial Sequence
  ENSG00000102908_59 (sequence is synthesized)
aaatgacctgttcatctgtggccattccatcaggcagttagttccttgatgtcagtagtgggctaaaggcagcttactgtgtgtttgctggagctttcactcagccaagtgttagagtca

SEQ ID NO: 133083 - DNA, 120 bp, Artificial Sequence
  ENSG00000102908_60 (sequence is synthesized)
ggaaacccattgaggcaatggcgtcaaatggtgtttcacaagaatgagccattcagtctttgctcactatatatttaatattttattattgttgttattgttattattaattggctttct

SEQ ID NO: 133084 - DNA, 120 bp, Artificial Sequence
  ENSG00000102908_61 (sequence is synthesized)
gtattctatgccttttatttataaagacactaagaaaacccatgtttgtaattttaataacatttttcccatcttgtaatatccagagctactttataaattctctgaaccaaaagtatt

SEQ ID NO: 133085 - DNA, 120 bp, Artificial Sequence
  ENSG00000102908_62 (sequence is synthesized)
ttcctcagtgtatctcttctcccccagcccctattgggaaaaattacccagtatagttcaggttatgaggaggatcagccacacaatccagtgcttcagtttgaaaatgtaaaattctaa

SEQ ID NO: 133086 - DNA, 120 bp, Artificial Sequence
  ENSG00000102908_63 (sequence is synthesized)
ccctaaagtagggttggttgaaatttcagacaaagcaaacccagcaggtataaaaagtagtataaatacaaatctgtaagttatttttgaattttctgaacttttttctaagagattaca

SEQ ID NO: 133087 - DNA, 120 bp, Artificial Sequence
  ENSG00000102908_64 (sequence is synthesized)
taggagactaaagaaatctatctgttcaagttctaattaggatgattgttaatactgcactgtggatgaagtggcgactggcttgtgtgctgacttctgtggtttagcaagaggtttatt

SEQ ID NO: 133088 - DNA, 120 bp, Artificial Sequence
  ENSG00000102908_65 (sequence is synthesized)
gttatcaaatgctaattggcaatgccaagtcactgggaccaattttctgttttataatatctaagtttagaacagaatatatacctgaactgtagtggtttgatcggatggagacagaaa

SEQ ID NO: 133089 - DNA, 120 bp, Artificial Sequence
  ENSG00000102908_66 (sequence is synthesized)
acccgatttttattctcataaattttgtggttatttatacaagggctgtgctatgctaccatattcttgttcaataataataggtttgttgttttttttacattgttaaatgttccttac

SEQ ID NO: 133090 - DNA, 120 bp, Artificial Sequence
  ENSG00000102908_67 (sequence is synthesized)
ccctaaaggtcaatgttaagtacaacattctgaaaatacaatttggctacgaagagtattcatcttctttgaagctcagtggttgatatttgtgctaataatgcaatttcctgattactg

SEQ ID NO: 133091 - DNA, 120 bp, Artificial Sequence
  ENSG00000102908_68 (sequence is synthesized)
ttacaagttatagctacatatgggagagactcagtgagccagcaaaggccatagaaacaacaatttattaaatgtatttatggcagaaggacctaaataaactgtgagccaccttttctt

SEQ ID NO: 133092 - DNA, 120 bp, Artificial Sequence
  ENSG00000102908_69 (sequence is synthesized)
ggacctaaataaactgtgagccaccttttcttctttatattgttacatttaagtgttcttgctttcagcaactcacattaatgcttggagcttatctctttctctctctctctctctctc

SEQ ID NO: 133093 - DNA, 120 bp, Artificial Sequence
  ENSG00000102908_70 (sequence is synthesized)
tgtgtgtgtttccttattgtcattccattatatatccacaccaacatgggtgacgataattcaaagtcatattttgcctctaagcttgatcatgttacctttatgattaaagtatcatgt

SEQ ID NO: 133094 - DNA, 120 bp, Artificial Sequence
  ENSG00000102908_71 (sequence is synthesized)
tatttagccaatgcaaatctgttttaaaacaaatagtttaaaaaaagaacaagtttttaagggctttattatagaagaagtattaatgaaggactttccttcctccctccctttcctccc

SEQ ID NO: 133095 - DNA, 120 bp, Artificial Sequence
  ENSG00000102908_72 (sequence is synthesized)
ctccctgcctcccttcttcccttccatctccccctcctccctgccttctttgtttctccttcccttattcctccctccctcctttctcccttccttcctttcttccattcatccttcctt

SEQ ID NO: 133096 - DNA, 120 bp, Artificial Sequence
  ENSG00000102908_73 (sequence is synthesized)
gccttttatttttattttttgtaatatcacatgtgctgtagtttggaattttattctagtgcatttcttgctcatcagaacctcagctaatctacctaggaaaaatagtatcaaaggaaa

SEQ ID NO: 133097 - DNA, 120 bp, Artificial Sequence
  ENSG00000102908_74 (sequence is synthesized)
tgagaaagttgtatctgagtccctccagaactaagataattctttttgaccatttaagcctttataaatgcgttttgaccatttaagcctttataaatgcttgttttaggaaagtgaatc

SEQ ID NO: 133098 - DNA, 120 bp, Artificial Sequence
  ENSG00000102908_75 (sequence is synthesized)
tgttagatgcatcaacaaataatgaccaggacaaaacgatttaataattaaagtctcaaatcaccatggttatacattttcaccagaaatagtaatcttacaatttttcatttttctgat

SEQ ID NO: 133099 - DNA, 120 bp, Artificial Sequence
  ENSG00000102908_76 (sequence is synthesized)
gaagatttctgttccaatatctgtttcctaatagattttttaaattaattagctttcctctgctttatgaccacaggttttatccctaaccgagacagctgtcttatatctgcatgcctt

SEQ ID NO: 133100 - DNA, 120 bp, Artificial Sequence
  ENSG00000102908_77 (sequence is synthesized)
agactgtgtggagggactccatgaagaaagaccataggttagaaaaataactcatagtatataccctagtaagtgggttagtagaatctcataacatgtattaaaaagaggttttcttct

SEQ ID NO: 133101 - DNA, 120 bp, Artificial Sequence
  ENSG00000102908_78 (sequence is synthesized)
ctgcttgtttgtgtcactagagcaaaattgtagagataatgctcataatgcagtaaatatcagaataatatctacaatatcatttgtggatggtcccaggtcccagtgctctagttactt

SEQ ID NO: 133102 - DNA, 81 bp, Artificial Sequence
  ENSG00000102908_79 (sequence is synthesized)
catttgtggatggtcccaggtcccagtgctctagttactttactcaggctagagcagtgtgcgatctcagctcactgcagc

SEQ ID NO: 133103 - DNA, 120 bp, Artificial Sequence
  ENSG00000102908_80 (sequence is synthesized)
tacaggcatgagccaccacatccggcctaattacttctttaatccccatttatttttatgccattctagcctcatttattaataaaattatgtttttactttctctttcaggaaattttt

SEQ ID NO: 133104 - DNA, 120 bp, Artificial Sequence
  ENSG00000102908_81 (sequence is synthesized)
tatgtttttactttctctttcaggaaattttttaaattaatattttatatctagatctaatgctatggaaaagtgcctttttatcatttataatttcatttttcactatttccaaaaaca

SEQ ID NO: 133105 - DNA, 120 bp, Artificial Sequence
  ENSG00000102908_82 (sequence is synthesized)
aacacataaacaaatagtttcagtaggtcccagcttttactttttccatttaaaccttcttttctccatttcttccctttggcttaagaataaaagaaaaggtacattgctagaattgtt

SEQ ID NO: 133106 - DNA, 120 bp, Artificial Sequence
  ENSG00000102908_83 (sequence is synthesized)
tctttgggagagggtaaaagattacagaattagactgttcagcctttatataaactaaatttgtcttcatctcaaccagctaatggtaggtcttatctgaatactcatgagaattttagc

SEQ ID NO: 133107 - DNA, 120 bp, Artificial Sequence
  ENSG00000102908_84 (sequence is synthesized)
atctgtgaaactccatgcaccagatgtgtgtaaatttcaggaagaaagtgttgaaagcattttctctgatgttaattagatggaaataaatcactaaaacatagtttaggtaaagcctga

SEQ ID NO: 133108 - DNA, 120 bp, Artificial Sequence
  ENSG00000102908_85 (sequence is synthesized)
ttatgccacttttttttaactagacagggcaaagttgtttatgttagtgtacttcttgtctatcctcagttaatttacctagacaaaaagtgtcaaaggaaatgagaaaaaggttatatc

SEQ ID NO: 133109 - DNA, 120 bp, Artificial Sequence
  ENSG00000102908_86 (sequence is synthesized)
tgactccctccagacctaagataattccttttgatcagatacagtcagatggagtgccttggtttttgttaattttgcctctattccagctccttaccacagcggtggtgcttaaagaaa

SEQ ID NO: 133110 - DNA, 120 bp, Artificial Sequence
  ENSG00000102908_87 (sequence is synthesized)
ggatcatcagcaacaggtcaggatagttctacctttgggatagggctgctttccccgtgctagtatttctgtgactgttagtggcactgaggactgcaaacttttatgcaatattcttaa

SEQ ID NO: 133111 - DNA, 120 bp, Artificial Sequence
  ENSG00000102908_88 (sequence is synthesized)
taccctattgatattatgcactttaatcattccaaagaagccaagaatgctgtatagtgatgattccttcctaatgaattcatcttaactatttagaatgttatgtcccttttcttttgg

SEQ ID NO: 133112 - DNA, 120 bp, Artificial Sequence
  ENSG00000102908_89 (sequence is synthesized)
atagccaacttggtataaatgttatatggatttttctaaaatgactatataggacttaagactttgaaatgtaatttacttataaggggaaataattatgctttagcacatcattttaga

SEQ ID NO: 133113 - DNA, 120 bp, Artificial Sequence
  ENSG00000102908_90 (sequence is synthesized)
aacgtcacattttagaaacattcagcttgctaacctacatgtttgggaattcattaaaaccagttgtctatatattttgtgccatgtatataagaacattacaatatatctttttctaca

SEQ ID NO: 133114 - DNA, 120 bp, Artificial Sequence
  ENSG00000102908_91 (sequence is synthesized)
tatgtagtatgtgcaaccagtggttctcagagtatggttctcagcccaccagctagtatcagtatcacctgggaactagttagaaatgtaaattctttggccccatcccagacatactga

SEQ ID NO: 133115 - DNA, 120 bp, Artificial Sequence
  ENSG00000102908_92 (sequence is synthesized)
gtcagaaactctggaatagggcccccgcaatctgttttcacaagccctccaggtgattctgatgcacactttaaagtttaggaaccactgggctaagactctgttgagatatagagtttt

SEQ ID NO: 133116 - DNA, 120 bp, Artificial Sequence
  ENSG00000102908_93 (sequence is synthesized)
tcttccactcagactgatatagttatacattgttcttcatgtaaattcagcttaacctggttatctataatcttttattggcaaaagttaattctcagtactgcctatagagatacagtg

SEQ ID NO: 133117 - DNA, 120 bp, Artificial Sequence
  ENSG00000102908_94 (sequence is synthesized)
tattttatgtacatacacaattagtctaattcttgataattcagttaatttagtttggcattttcctaccacttactaaaaggtttacattaaatgactgatttaaatatataggtgcaa

SEQ ID NO: 133118 - DNA, 120 bp, Artificial Sequence
  ENSG00000102908_95 (sequence is synthesized)
tgttctatgtttattttaattgttatgacatttaagtagctaatataattgaccggtgctaaagtctcctgtttatccataaaatgggtacattatgggcagtgtaatacaagctttctt

SEQ ID NO: 133119 - DNA, 120 bp, Artificial Sequence
  ENSG00000102908_96 (sequence is synthesized)
ttcattgcctagtactttaccagcagaccacagttttgccctggctagaccaaccctcagaacaaaatcatcattccttgtatttatatttgtatctgagatagtaaacaagatggctgg

SEQ ID NO: 133120 - DNA, 120 bp, Artificial Sequence
  ENSG00000102908_97 (sequence is synthesized)
ccaggtcaacatggcaccttaacttatttttttaataggtaaaacttcttcaaaagtagcttgctttgtataagaactaagctatcagtatagatatagctatccttggagcttatgttt

SEQ ID NO: 133121 - DNA, 120 bp, Artificial Sequence
  ENSG00000102908_98 (sequence is synthesized)
cagacaagaattatttactaaaataaataataaacaagataatgcattatacaatttgggcatttctcgtttctcaagtgtatgcatcatggtaaatataaactaaccacaagataggta

SEQ ID NO: 133122 - DNA, 120 bp, Artificial Sequence
  ENSG00000102908_99 (sequence is synthesized)
gattgattcatttcattttaatctccttgtgtaattcagtacctccataattgttctaatcttcttcccactgtttacaaattaccagttaattaactcgtgaaagaaaaattcacatat

SEQ ID NO: 133123 - DNA, 120 bp, Artificial Sequence
  ENSG00000102908_100 (sequence is synthesized)
cagaataaaaataaatgtatactcactttataaaaatcaccactgctgtctttccttaatactagcagtggaaatgtaagtggcttactctacaaattttggtgctggcaaatacatagg

SEQ ID NO: 133124 - DNA, 120 bp, Artificial Sequence
  ENSG00000102908_101 (sequence is synthesized)
caaactgttgggagctgctctagttacattcctcccttcttattccctttttctcttcctcactttattgcataacatattcctgtacccaaagcattctaccacagttctatttgactc

SEQ ID NO: 133125 - DNA, 120 bp, Artificial Sequence
  ENSG00000102908_102 (sequence is synthesized)
ccacttgtaataactcctttaaaaaattccatgtttaaccatatgaccctgcttgcttactcatattctccctccctctccccttcctttctctctcttccagaagtcatttgcctggtt

SEQ ID NO: 133126 - DNA, 120 bp, Artificial Sequence
  ENSG00000102908_103 (sequence is synthesized)
tgaaatattttgtagggattgcttattatattattttagctgatgaacctcaggacaacgtctacacacacacacatacatacacgcacacaaaatctcagctgttgaagagtgggcttg

SEQ ID NO: 133127 - DNA, 120 bp, Artificial Sequence
  ENSG00000102908_104 (sequence is synthesized)
gaatcagacttctgtgtccagtaaaaaactcctgcactgaagtcattgtgacttgagtagttacagactgattccagtgaacttgatctaatttcttttgatctaatgaatgtgtctgct

SEQ ID NO: 133128 - DNA, 120 bp, Artificial Sequence
  ENSG00000102908_105 (sequence is synthesized)
taccttgtttccttttaattgataagctccaagtagttgctaattttttgacaactttaaatgagtttcattcacttcttttacttaatgttttaagtatagtaccaataatttcattaa

SEQ ID NO: 133129 - DNA, 120 bp, Artificial Sequence
  ENSG00000102908_106 (sequence is synthesized)
cctgttctcaagtggtttagctaccattctgccatttttaatttttatttaattttatttgcttgagcacactgatcaaccactgaactgccttcttccattgtcctgcaatgatataag

SEQ ID NO: 133130 - DNA, 120 bp, Artificial Sequence
  ENSG00000102908_107 (sequence is synthesized)
ggttacatttttgtgtatatggctttcatagttgggatttcagagcactgataccagatattttcagtttgttctctgggggaatttcatttgcatctatgtttttagctatctgtgata

SEQ ID NO: 133131 - DNA, 120 bp, Artificial Sequence
  ENSG00000102908_108 (sequence is synthesized)
acttgttaaatattaaaaagatattttgcttctattggaacatttgtatactcgcaactatatttctgtaaacagctgcagtcaaaaataaaacactgaaagttttcattttgcagtgga

SEQ ID NO: 133132 - DNA, 120 bp, Artificial Sequence
  ENSG00000102908_109 (sequence is synthesized)
atagctaaatgctaagaggagagtgtagtttgtaattgagtagctttatcctcctggagatttttaagctgtatcctataatatactcttggtcaggttgggtagtatgattcaaggcac

SEQ ID NO: 133133 - DNA, 120 bp, Artificial Sequence
  ENSG00000102908_110 (sequence is synthesized)
ttggaaccgtcttggggaatatagcttggtaattgaactgcttaagcttattattaatatttaagctatagttccaggcccattccagaggtcccccagccaatgcacttcataaaaggg

SEQ ID NO: 133134 - DNA, 120 bp, Artificial Sequence
  ENSG00000102908_111 (sequence is synthesized)
aagatatatcttaatataccaggtttgtatctcatgctaccattgtagcatcaaaaaaatagacatttaaatcatggctaataacaaattttagaatgaaatagttggtaaattttgtga

SEQ ID NO: 133135 - DNA, 120 bp, Artificial Sequence
  ENSG00000102908_112 (sequence is synthesized)
gctcgcctcctccagctgttgttgctgctggatttgcctctgaagcagggagtgtctgcattaaaaatgacctgtagttctctgcttcatagatgcttcttcagctccctcctcttcctc

SEQ ID NO: 133136 - DNA, 120 bp, Artificial Sequence
  ENSG00000102908_113 (sequence is synthesized)
gatttaggttaagtaatagtagttctaatcttttaaaatgtggctttctcacaagatgatacttttttactctgaataaaattattctgaatgatagcttatggtcatatagttaataca

SEQ ID NO: 133137 - DNA, 64 bp, Artificial Sequence
  ENSG00000102908_114 (sequence is synthesized)
attattctgaatgatagcttatggtcatatagttaatacagtgggcggatcacgaggtcaggcg

SEQ ID NO: 133138 - DNA, 120 bp, Artificial Sequence
  ENSG00000102908_115 (sequence is synthesized)
tcgtaattgggtgctcctgtatgttttctctagcacaccttactattttgttttctcttaggtacttataatactttgcagggtatcttcatattgtaaaataaatatgtgtttaacttt

SEQ ID NO: 133139 - DNA, 89 bp, Artificial Sequence
  ENSG00000102908_116 (sequence is synthesized)
tgctgaatatgttttaagtatattggagtggaggagttttgtttttttttttaattacccaatattaaaagtatatgaggctgggcaca

SEQ ID NO: 133140 - DNA, 85 bp, Artificial Sequence
  ENSG00000102908_117 (sequence is synthesized)
ttttttaagtatattggagtggaggagttttgtttttttttttaattacccaatattaaaagtatatgaggctgggcacagtggt

SEQ ID NO: 133141 - DNA, 120 bp, Artificial Sequence
  ENSG00000102908_118 (sequence is synthesized)
caaaaattagccaggggtggtggcaggtgcccgtagtcccagctgctcgggaggctgagtcaggagaatctctttaatctgggaggcaggggttgcagtgagccaaggtcatgccactgt

SEQ ID NO: 133142 - DNA, 90 bp, Artificial Sequence
  ENSG00000102908_119 (sequence is synthesized)
taaaaaaaaaaaaaaagtgaaataaggccaggcacggtgggtcacacctatagtcccagcactttcagaggccaaggtaggaagattact

SEQ ID NO: 133143 - DNA, 120 bp, Artificial Sequence
  ENSG00000102908_120 (sequence is synthesized)
tagtcccagcactttcagaggccaaggtaggaagattacttgagtccagaaatttgagatgataaatatccattggctaataattaaatgcatcatctatagttattgctgaacagatat

SEQ ID NO: 133144 - DNA, 81 bp, Artificial Sequence
  ENSG00000102908_121 (sequence is synthesized)
taattaaatgcatcatctatagttattgctgaacagatatgggcagcacagtgagaagatttcttgtctctacaaaaaaat

SEQ ID NO: 133145 - DNA, 79 bp, Artificial Sequence
  ENSG00000102908_122 (sequence is synthesized)
agcactttaggaggccaaggtgggcagataacctgaggtcaggcatttaagaccagagtgaccaacatggagaaaccca

SEQ ID NO: 133146 - DNA, 120 bp, Artificial Sequence
  ENSG00000102908_123 (sequence is synthesized)
tttagtatgttaaaagaagggaccgaggtcagtgtggctacagtgtagtgagctagaagagcaggaatgagatgaagttgacagggcagggatcttgaccttgtaagccattataaaaca

SEQ ID NO: 133147 - DNA, 120 bp, Artificial Sequence
  ENSG00000102908_124 (sequence is synthesized)
cttggattttaccttaaaagcagtgttaagattaatatcctgatgcctgtgaacctgagctttaaaatgcattcttttttttttaatcactttttaaactttacagctaacaggaaatat

SEQ ID NO: 133148 - DNA, 120 bp, Artificial Sequence
  ENSG00000102908_125 (sequence is synthesized)
tgcaacggaaacttttggctccacgaacagaaaagcaagagcaaaaactcagttaaatgcgttcttcctccatctttgcctagtccaaaaggaaaaaaaaagaaacagaaaaaagaaaaa

SEQ ID NO: 133149 - DNA, 120 bp, Artificial Sequence
  ENSG00000102908_126 (sequence is synthesized)
ctgtttggaagagtagcgttgaggtttgctttttacctgtttttcctctagaacagccaggtggattcacatgatccaattttttaattgtcttctatgtcccactccgaataacccgga

SEQ ID NO: 133150 - DNA, 120 bp, Artificial Sequence
  ENSG00000102908_127 (sequence is synthesized)
tgccccagcacaatcagagagatcgttttttttaaaaaaaatttcagcctccaaaggtaggaggggagtgttaggggagaaagtactttaattaaaaatcaataactcgaggtttttggg

SEQ ID NO: 133151 - DNA, 120 bp, Artificial Sequence
  ENSG00000102908_128 (sequence is synthesized)
atacggtttgccatttcctaattaagaaatgggtttgacagtccctttgtacacactgctatgcaaaccccaaagggttggcggctgtccgggcgatgacactccggtcccctgcgagac

SEQ ID NO: 133152 - DNA, 120 bp, Artificial Sequence
  ENSG00000102908_129 (sequence is synthesized)
cccgggccagccaggcccgtccgccgccggcctctggggtccgtccccggctcgcgcagacctctcgcttctctcggctctgtctcctgcgctcagctctgctcggggccggccgcctca

SEQ ID NO: 133153 - DNA, 120 bp, Artificial Sequence
  ENSG00000102908_130 (sequence is synthesized)
ggctcgccgccaccaggtcgttgcaaataccttttccctccccggggccccagcgcgcggccacctcccagcctccccccctcccaccctggcagcggggccctttcccggctcaggaac

SEQ ID NO: 133154 - DNA, 120 bp, Artificial Sequence
  ENSG00000102908_131 (sequence is synthesized)
ttcccggctcaggaacagcagcagcccgggccgcgccggcaggaagcgaggcccatgttgctgctgttccctggcgcgcctccccgccctccgggggccgccacggctcttccgcgctcc

SEQ ID NO: 133155 - DNA, 120 bp, Artificial Sequence
  ENSG00000102910_0 (sequence is synthesized)
gggtctgaggtttggtgactgcggggcaggccgggggcagctgtctgtctggctctttttgacagcccccagtgcgaaaggctgccagcatgtcatcagtgagccccatccagatcccca

SEQ ID NO: 133156 - DNA, 120 bp, Artificial Sequence
  ENSG00000102910_1 (sequence is synthesized)
gtcgcctcccgctgctgctcacccacgagggcgtcctgctgcccggctccaccatgcgcaccagcgtggactcggcccgcaacctgcagctggtgcggagccgccttctgaagggcacgt

SEQ ID NO: 133157 - DNA, 120 bp, Artificial Sequence
  ENSG00000102910_2 (sequence is synthesized)
cgctgcaaagcaccatcctgggcgtcatccccaacacgcctgaccccgccagcgacgcgcaggacctgccgccgctgcacaggattggcacagctgcactggccgttcaggttgtgggca

SEQ ID NO: 133158 - DNA, 120 bp, Artificial Sequence
  ENSG00000102910_3 (sequence is synthesized)
gtaactggcccaagccccactacactctgttgattacaggcctatgccgtttccagattgtacaggtcttaaaagagaagccatatcccattgctgaagtggagcagttggaccgacttg

SEQ ID NO: 133159 - DNA, 120 bp, Artificial Sequence
  ENSG00000102910_4 (sequence is synthesized)
aggagtttcccaacacctgtaaaatgagggaggagctaggagaactatcagagcagttttacaaatatgcagtacaattggttgaaatgttggatatgtctgtccctgcagttgctaaat

SEQ ID NO: 133160 - DNA, 120 bp, Artificial Sequence
  ENSG00000102910_5 (sequence is synthesized)
tgagacgtcttttagatagtcttccaagggaagctttaccagacatcttgacatcaattatccgaacaagcaacaaagagaaactccagattttagatgctgtgagcctagaggagcggt

SEQ ID NO: 133161 - DNA, 120 bp, Artificial Sequence
  ENSG00000102910_6 (sequence is synthesized)
tcaagatgactataccactgcttgtcagacaaattgaaggcctgaaattgcttcaaaaaaccagaaaacccaagcaagatgatgataagagggttatagcaatacgccctattaggagaa

SEQ ID NO: 133162 - DNA, 120 bp, Artificial Sequence
  ENSG00000102910_7 (sequence is synthesized)
ttacacatatctcaggtactttagaagatgaagatgaagatgaagataatgatgacattgtcatgctagagaaaaaaatacgaacatctagtatgccagagcaggcccataaagtctgtg

SEQ ID NO: 133163 - DNA, 120 bp, Artificial Sequence
  ENSG00000102910_8 (sequence is synthesized)
tcaaagagataaagagactcaaaaaaatgcctcagtcaatgccagaatatgctctgactagaaattatttggaacttatggtagaacttccttggaacaaaagtacaactgaccgcctgg

SEQ ID NO: 133164 - DNA, 120 bp, Artificial Sequence
  ENSG00000102910_9 (sequence is synthesized)
acattagggcagcccggattcttctggataatgaccattacgccatggaaaaattgaagaaaagagtactggaatacttggctgtcagacagctcaaaaataacctgaagggcccaatcc

SEQ ID NO: 133165 - DNA, 120 bp, Artificial Sequence
  ENSG00000102910_10 (sequence is synthesized)
tatgctttgttggccctcctggagttggtaaaacaagtgtgggaagatcagtggccaagactctaggtcgagagttccacaggattgcacttggaggagtatgtgatcagtctgacattc

SEQ ID NO: 133166 - DNA, 120 bp, Artificial Sequence
  ENSG00000102910_11 (sequence is synthesized)
gaggacacaggcgcacctatgttggcagcatgcctggtcgcatcatcaacggcttgaagactgtgggagtgaacaacccagtgttcctattagatgaggttgacaaactgggaaaaagtc

SEQ ID NO: 133167 - DNA, 120 bp, Artificial Sequence
  ENSG00000102910_12 (sequence is synthesized)
tacagggtgatccagcagcagctctgcttgaggtgttggatcctgaacaaaaccataacttcacagatcattatctaaatgtggcctttgacctttctcaagttctttttatagctactg

SEQ ID NO: 133168 - DNA, 120 bp, Artificial Sequence
  ENSG00000102910_13 (sequence is synthesized)
ccaacaccactgctaccattccagctgccttgttggacagaatggagatcattcaggttccaggttatacacaggaggagaagatagagattgcccataggcacttgatccccaagcagc

SEQ ID NO: 133169 - DNA, 120 bp, Artificial Sequence
  ENSG00000102910_14 (sequence is synthesized)
tggaacaacatgggctgactccacagcagattcagataccccaggtcaccactcttgacatcatcaccaggtataccagagaggcaggggttcgttctctggatagaaaacttggggcca

SEQ ID NO: 133170 - DNA, 120 bp, Artificial Sequence
  ENSG00000102910_15 (sequence is synthesized)
tttgccgagctgtggccgtgaaggtggcagaaggacagcataaggaagccaagttggaccgttctgatgtgactgagagagaaggttgcagagaacacatcttagaagatgaaaaacctg

SEQ ID NO: 133171 - DNA, 120 bp, Artificial Sequence
  ENSG00000102910_16 (sequence is synthesized)
aatctatcagtgacactactgacttggctctaccacctgaaatgccgattttgattgatttccatgctctgaaagacatccttgggcccccgatgtatgaaatggaggtatctcagcgtt

SEQ ID NO: 133172 - DNA, 120 bp, Artificial Sequence
  ENSG00000102910_17 (sequence is synthesized)
tgagtcagccaggagtagcaataggtttggcttggactcccttaggtggagaaatcatgttcgtggaggcgagtcgaatggatggcgagggccagttaactctgaccggccagctcgggg

SEQ ID NO: 133173 - DNA, 120 bp, Artificial Sequence
  ENSG00000102910_18 (sequence is synthesized)
acgtgatgaaggagtccgcccacctcgctatcagctggctccgcagcaacgcaaagaagtaccagctgaccaatgcttttggaagttttgatcttcttgacaacacagacatccatctgc

SEQ ID NO: 133174 - DNA, 120 bp, Artificial Sequence
  ENSG00000102910_19 (sequence is synthesized)
acttcccagctggagctgtcacaaaagatggaccatctgctggagttaccatagtaacctgtctcgcctcactttttagtgggcggctggtacgttcagatgtagccatgactggagaaa

SEQ ID NO: 133175 - DNA, 120 bp, Artificial Sequence
  ENSG00000102910_20 (sequence is synthesized)
ttacactgagaggtcttgttcttccagtgggtggaattaaagacaaagtgctggcggcacacagagcgggactgaagcaagtcattattcctcggagaaatgaaaaagaccttgagggaa

SEQ ID NO: 133176 - DNA, 120 bp, Artificial Sequence
  ENSG00000102910_21 (sequence is synthesized)
tcccaggcaacgtacgacaggatttaagttttgtcacagcaagctgcctggatgaggttcttaatgcagcttttgatggtggctttactgtcaagaccagacctggtctgttaaatagca

SEQ ID NO: 133177 - DNA, 120 bp, Artificial Sequence
  ENSG00000102910_22 (sequence is synthesized)
aactgtaggtccaaatctcaattttttagaattttaagttatgaagtgctcaaaggtactgacacagttgattttattcacaccattaggggtatgcaagatgtccctgttttataaaca

SEQ ID NO: 133178 - DNA, 120 bp, Artificial Sequence
  ENSG00000102910_23 (sequence is synthesized)
taatcacaacagtaataaacctcaagtagtggctagtgtttagtatagaaatataagatgttgatttagtaaactgataaaaatcgaattcttgtctttttagtgggatccttactgtcc

SEQ ID NO: 133179 - DNA, 120 bp, Artificial Sequence
  ENSG00000102910_24 (sequence is synthesized)
ctggaaagatatagcatagtggttctcagcacagtctccagaacagaagcatctgtagtacctggtaacttgttagaaatgtacattctcaggctccacagcaggccgcctgaatcaaat

SEQ ID NO: 133180 - DNA, 120 bp, Artificial Sequence
  ENSG00000102910_25 (sequence is synthesized)
cctgggaggtggggacagaaatctgtgttttaagaagccttccaggtaattctgctgcacactcaagttcaggaaccaccggtatagaccattaccttagtggatttacctgtagagttt

SEQ ID NO: 133181 - DNA, 120 bp, Artificial Sequence
  ENSG00000102910_26 (sequence is synthesized)
gtttattggatcctgaaaccaatcaattacttagaactaggcaaagatgaaagtatagccaactattcttggctatatatatatattcaagtgggccgggcgtgatggctcacacctgta

SEQ ID NO: 133182 - DNA, 120 bp, Artificial Sequence
  ENSG00000102910_27 (sequence is synthesized)
cagcactttgggaggtcgaggtaggcagatcaccgagcccaagagttcaagacaatcctggccaacggcgaaactctgtctctacaaaaaatatacaggcgtgttagcatgtgcctgtaa

SEQ ID NO: 133183 - DNA, 72 bp, Artificial Sequence
  ENSG00000102910_28 (sequence is synthesized)
tctacaaaaaatatacaggcgtgttagcatgtgcctgtaatcccagcttcttgggaagctgaggcaccgcca

SEQ ID NO: 133184 - DNA, 120 bp, Artificial Sequence
  ENSG00000102910_29 (sequence is synthesized)
aaaaaaaagactcaagtggaccctacaatgaagcctacacatcccaatagaagccccttcttatgctgagggaagcagccctcagaacatgatagcttgtatccagcagagtggcacgtg

SEQ ID NO: 133185 - DNA, 120 bp, Artificial Sequence
  ENSG00000102910_30 (sequence is synthesized)
ctggcacacctcacagaagcaccctggccctggatgcctgcaacctcagaagagtgcagctcccagagggaggcagccatccatctgggatggtcctaagcatggaatcctaactcctga

SEQ ID NO: 133186 - DNA, 120 bp, Artificial Sequence
  ENSG00000102910_31 (sequence is synthesized)
ttccgtctcctatttcttgcttggctacgccagttcccaaatctggtagatgtccatgcccatgtgctcctgctgggactcaattcaggctatgtatgactatgaagtcaggctcatctg

SEQ ID NO: 133187 - DNA, 120 bp, Artificial Sequence
  ENSG00000102910_32 (sequence is synthesized)
cttactggctgtgtgaactttttgtatcttggttttcttcatccatgaaatccaagtaatactacctaattgttactgtggagattaagttcaaatgcaatgtatagtaatattaagcaa

SEQ ID NO: 133188 - DNA, 120 bp, Artificial Sequence
  ENSG00000102910_33 (sequence is synthesized)
tttctagttattattctagccagtaatggacttcagaatcttttattacacaatataagaatatgtatgtaaagacattttggaatttcctggatgagaaggaagtctgggctgggcatg

SEQ ID NO: 133189 - DNA, 64 bp, Artificial Sequence
  ENSG00000102910_34 (sequence is synthesized)
gcatggtggctcacgcctgtaaccctagcactttaggaaatcgaggcgagtggatcacttaagc

SEQ ID NO: 133190 - DNA, 79 bp, Artificial Sequence
  ENSG00000102910_35 (sequence is synthesized)
acaaaaattagctgggcatggtggcacccgcctgtagtccagctacttgaggctgagatgggaggatgagggaggtccc

SEQ ID NO: 133191 - DNA, 120 bp, Artificial Sequence
  ENSG00000102910_36 (sequence is synthesized)
aaaaaaaagattgggccaaaatactgtgataaaatagcaggcctgctgataaaagtttatctgaatgcattgagaggaaaagtccagacctaggactagttatggcagttggagagaaag

SEQ ID NO: 133192 - DNA, 120 bp, Artificial Sequence
  ENSG00000102910_37 (sequence is synthesized)
aacatcgggatgtttgaaaatatgccattgactatcttaactactgtaattttatcatttccaacgtcatctaactggggactagaacaaactgtgaattcactttcagcaaccagaggg

SEQ ID NO: 133193 - DNA, 120 bp, Artificial Sequence
  ENSG00000102910_38 (sequence is synthesized)
cgctaatccacacccacatcgctctgccctgttccacccagcaggggcaacaaggatataacttggggttctcggtattcttcctttagtcctgacacaggcagccttgcactttgtagc

SEQ ID NO: 133194 - DNA, 120 bp, Artificial Sequence
  ENSG00000102910_39 (sequence is synthesized)
agcaggagggcacttgctttaagcatatctttcgaaaggcatccattgagagaataatgcattctccccttgctgtgtatgacatggaacagtatgaccattgcactagctttgtttttg

SEQ ID NO: 133195 - DNA, 120 bp, Artificial Sequence
  ENSG00000102910_40 (sequence is synthesized)
gtttgttttgttttttttttaattccaggggtgggaggttggttggttgaagtctaagctcttcctttttcacctgggttttttttttttggggggggtggggggttaggggtggggcgg

SEQ ID NO: 133196 - DNA, 120 bp, Artificial Sequence
  ENSG00000102910_41 (sequence is synthesized)
ggggtggggcgggtggggaagagccaaaattttaaccatttttaagcatataatttgggggtatcagttactggatctaagcatgtccactctacacgcttttttttttttttttttttt

SEQ ID NO: 133197 - DNA, 120 bp, Artificial Sequence
  ENSG00000102910_42 (sequence is synthesized)
aaatgctggcattacaggcgtgagccaccacacccggcttacatgcattttttatcaccacaaactgaaactctgtacccactgaaaaagagctccaaattccaccctcaccccagaccc

SEQ ID NO: 133198 - DNA, 120 bp, Artificial Sequence
  ENSG00000102910_43 (sequence is synthesized)
tggtaaccactatttcactttctttctgaatttcccttcatatgagtgggatcaaacaagagttgtccttttgtgtttagcattcttacttagcaagccatcaactgctcgaacagtcac

SEQ ID NO: 133199 - DNA, 78 bp, Artificial Sequence
  ENSG00000102910_44 (sequence is synthesized)
ggtgcagaagggtagggatgaacctcttcctcctttgccactttagctttagctcaaaggaactccaactttttatta

SEQ ID NO: 133200 - DNA, 120 bp, Artificial Sequence
  ENSG00000102910_45 (sequence is synthesized)
cactttagctttagctcaaaggaactccaactttttattatttgcaacagttagctttctttgtttcacatctctgccttgcagaaccatgacctatcaaggtgttttgtcaaacaaaaa

SEQ ID NO: 133201 - DNA, 120 bp, Artificial Sequence
  ENSG00000102910_46 (sequence is synthesized)
ctaatactttccctgggaaaaagccatgtggtagcaagtaccagaaatttttatggccaaataatacaccactatatccatagaccgcatttggtttatccactcatctgctgattgttt

SEQ ID NO: 133202 - DNA, 120 bp, Artificial Sequence
  ENSG00000102910_47 (sequence is synthesized)
ccccctcttgggtattatgagtaatgctatgaacatgggtgtacacatctctcttgaagtcccttcttaggtcctttagggatacatatccaggagcagaactactagatcacatatgct

SEQ ID NO: 133203 - DNA, 120 bp, Artificial Sequence
  ENSG00000102910_48 (sequence is synthesized)
aaggtctgaatgtccccccaccaaattcgtatgttgaagcaaccaccaacgtgataggtgaggctttaggaggtgattatgtcatgagagctccatcctcattaatggatttagtgcctt

SEQ ID NO: 133204 - DNA, 120 bp, Artificial Sequence
  ENSG00000102910_49 (sequence is synthesized)
tataaaggggctcaagggaaccaattacctcctttttgcccttcgattcccttccaccatatgaggacacagcaacaggccccgtcctagaagctgagactgggccctcaatagatgata

SEQ ID NO: 133205 - DNA, 120 bp, Artificial Sequence
  ENSG00000102910_50 (sequence is synthesized)
ccagtctgccagcacgctgatcgtgggcttctcagtcttcacaactatgagaaataaattcgtacttttaaattacccagtctcaggtattctgttacggttaacacaaatgactaagac

SEQ ID NO: 133206 - DNA, 120 bp, Artificial Sequence
  ENSG00000102910_51 (sequence is synthesized)
aacaggataattctgtttaactttttgagaactgccaaacttttccaccgcagctgcaccatttgacattccttccagcaatgcacaaatgttccagtttctccacatccttgccagcac

SEQ ID NO: 133207 - DNA, 120 bp, Artificial Sequence
  ENSG00000102910_52 (sequence is synthesized)
tcattttctgggttttttataatagccctccaaatgggtgtgacgtattttgattctatgtccctaatgactagtgatgttgagcattttctagcattgatttttaagatgttacccaaa

SEQ ID NO: 133208 - DNA, 120 bp, Artificial Sequence
  ENSG00000102910_53 (sequence is synthesized)
gaccccttgtatcaaaataagctggatttttttattgaaaattattaactctagaaattttagtttaaactagacttagggatatgtgtattttaccggtattccacgttttatgcatgg

SEQ ID NO: 133209 - DNA, 120 bp, Artificial Sequence
  ENSG00000102910_54 (sequence is synthesized)
gtttttaaaacttctcaagtattaaaactaaaagctttaggtgctttgcttatcaagaaatcctacactgtccactggagacatccatgtttttacttggctctgcccctttagtggtcc

SEQ ID NO: 133210 - DNA, 120 bp, Artificial Sequence
  ENSG00000102910_55 (sequence is synthesized)
ctgtgaaccttacctcaaaccatgcatctggggcagagatccttacttgcttggtggttacaaatgcaaatacagtgaagaatgtcatctttgtgattgttcctgaaatagttcacgaga

SEQ ID NO: 133211 - DNA, 120 bp, Artificial Sequence
  ENSG00000102910_56 (sequence is synthesized)
aatccatgaccgtaaagtactgtgatagtgatgtctaccactgtgagcttccagtactaggtgattggtctgcattcacagtgaccaaaatcagctatgtggccaggtaattcactgctg

SEQ ID NO: 133212 - DNA, 120 bp, Artificial Sequence
  ENSG00000102910_57 (sequence is synthesized)
agggctttggattttcctttatgaactactgaaatgaggtcaacttgactattactaagggacattttgctacaaagaatgttagttttgccaattccctttccaaatctaaaatttatt

SEQ ID NO: 133213 - DNA, 120 bp, Artificial Sequence
  ENSG00000102910_58 (sequence is synthesized)
ttaaccaggattttagatgtaaacatcaagtagttttggttgtttcaatgaagtaacatgtttaagctcacattatttgaagtacttcagttcctattgccatgaaaattgtatccagca

SEQ ID NO: 133214 - DNA, 120 bp, Artificial Sequence
  ENSG00000102910_59 (sequence is synthesized)
gctaaaaaaaaaaaaaaaaaaaaagactacagttagtcattatccaatttgatgatttatggtccaacactaatgctcattttttttgtttgttttacaaacatttggtggataccacaa

SEQ ID NO: 133215 - DNA, 120 bp, Artificial Sequence
  ENSG00000102910_60 (sequence is synthesized)
tgaaaactgcacttaaaaaacaaaaatgctgaaagaggaaggaaatatcaaaaaggtctgaatagacaacaggcaaatatggtgagtggtcattgagatgttttaaaagttacagcaaaa

SEQ ID NO: 133216 - DNA, 120 bp, Artificial Sequence
  ENSG00000102910_61 (sequence is synthesized)
ggacttctaaaacaattttaggaaaagctttgtcatgaaaattcatttctttggaaatactgtagtttgtacttaatgacactgtcagcacatttctaggcaatacaaactcttgaggct

SEQ ID NO: 133217 - DNA, 120 bp, Artificial Sequence
  ENSG00000102910_62 (sequence is synthesized)
aaatcctcatcctgacatgacagtgcaagcctgtcaaaatgtgaccccaaaaccaggtgtccttttgctccattatttatatctgtaaacctgttattattttcagaattcagaaaggcc

SEQ ID NO: 133218 - DNA, 120 bp, Artificial Sequence
  ENSG00000102910_63 (sequence is synthesized)
taagaaaattacatctatgataataaagtgtatttctttgtcaagtttctagagctatataaggatagcgaaaatatttggttcagcaagacactggggtatcaagtcaggcataataag

SEQ ID NO: 133219 - DNA, 120 bp, Artificial Sequence
  ENSG00000102910_64 (sequence is synthesized)
cactttatagcacatctagccttcctcattcccttacgcagtggacatcatacccttttgtggaggagggaccaggcagagaaggtatttaaataaaaactggtagatacagagtcagaa

SEQ ID NO: 133220 - DNA, 120 bp, Artificial Sequence
  ENSG00000102910_65 (sequence is synthesized)
gtcaacccaggcagttagaatctacaacccacactgtttgccaccaaatcttagtagatgcttgataaggaattttgtttggatggtgccatttttagataaacgtacgtttcttttggt

SEQ ID NO: 133221 - DNA, 120 bp, Artificial Sequence
  ENSG00000102910_66 (sequence is synthesized)
gaatagacaacaggcaaatatgcttccacctaccgaaagagttttaggttggcagacagatgggtgccttattttctgtgaaactgaagttttaaacactggccagaaaatgtttgattg

SEQ ID NO: 133222 - DNA, 120 bp, Artificial Sequence
  ENSG00000102910_67 (sequence is synthesized)
ggaaatagttacattgatgcctaaattgccattttctgcaaaaagctgtgcaatgctggtgtcaaagactagacagtcgctattcataatggctgttgcaattccttcatgaatagatcg

SEQ ID NO: 133223 - DNA, 120 bp, Artificial Sequence
  ENSG00000102910_68 (sequence is synthesized)
aggagtcgcttcccaagtcaatcgtcgcctatgaccatttagctcaagtcgactaacatgaagtgaaagccaaaacaggactgcatcatcacccagtcaacagcaccaggaagattaatg

SEQ ID NO: 133224 - DNA, 120 bp, Artificial Sequence
  ENSG00000102910_69 (sequence is synthesized)
tctgtagcaagaaaaactatatcctctccctgtagggttgtaatggacttatgctgatgcatcagatggggcattacagcatccagagagccttgccatttacaggaagcaccagggcac

SEQ ID NO: 133225 - DNA, 120 bp, Artificial Sequence
  ENSG00000102910_70 (sequence is synthesized)
ttgcttgcgtgttcctatcagctgtacgattgcgaagaactgctggtgaccatcgtatttttcctgtttctctaagactaacatgaagtgaaagccaaaacaggactgcatcatcaccca

SEQ ID NO: 133226 - DNA, 120 bp, Artificial Sequence
  ENSG00000102910_71 (sequence is synthesized)
ggggaaaagtactgaattagccactttctccatagccaagttgcgaatggatcccaaagggccccggcaagttggacaacatgtgagctttgggcgacagttgctacaaacaagatggcc

SEQ ID NO: 133227 - DNA, 120 bp, Artificial Sequence
  ENSG00000102910_72 (sequence is synthesized)
actctgacattgaagaatgggcggtaacacatagtcaaagcagactggacactcaaaaagactcgccaagtcattgttggatgcagttgtgccagtcagggcaggcaccctctgggatgg

SEQ ID NO: 133228 - DNA, 120 bp, Artificial Sequence
  ENSG00000102910_73 (sequence is synthesized)
tggacacttcgaggtaccggtaggtaatgctgtagcagtctgacggctcatttctgaaataaatacataaggaggcaggagaaaaataattataaccatgacttactttataaataatgt

SEQ ID NO: 133229 - DNA, 120 bp, Artificial Sequence
  ENSG00000102910_74 (sequence is synthesized)
ttacatgccataagtccttttaaagtttcatacaaaatttactgagcaaaagaggaagaaaaataggattaaaaaagatattaaaaaaataaaattacactgaatgtgcactttattagg

SEQ ID NO: 133230 - DNA, 120 bp, Artificial Sequence
  ENSG00000102910_75 (sequence is synthesized)
atctgtacactggataagctctcttttcaaaatgttccggaaaacatgtggaactcccttaatcgtctttggatagactacatagaataataaatgctaaaatagaaaatggaccataaa

SEQ ID NO: 133231 - DNA, 120 bp, Artificial Sequence
  ENSG00000102910_76 (sequence is synthesized)
tgaagtttaatcgaatccgttttgctaggactctccctgaggctcccttactctatttctttctaatttggagtcagctgttgataggtacagggagttacaggtgaactcctgtataaa

SEQ ID NO: 133232 - DNA, 120 bp, Artificial Sequence
  ENSG00000102910_77 (sequence is synthesized)
atcggcactctgtatccacacggtctgcatccgaggacttcaccagccatggattgaaaatattcagaaaaatttataaagaatacaaaatttttaaaatacagtctataacaactattt

SEQ ID NO: 133233 - DNA, 120 bp, Artificial Sequence
  ENSG00000102910_78 (sequence is synthesized)
acatattgtttacattgtattaagtaatccagagatcacttaaattatacaagagaatatgcacatacaaatatgacaccattttctatcagggacttgagcatcctcaggttttggtat

SEQ ID NO: 133234 - DNA, 120 bp, Artificial Sequence
  ENSG00000102910_79 (sequence is synthesized)
ctgggtacaggtatctcagcgtttgagtcagccaggagtagcaataggtttggcttggactcccttaggtggagaaatcatgttcgtggaggcgagtcgaatggatggcgagggccagtt

SEQ ID NO: 133235 - DNA, 80 bp, Artificial Sequence
  ENSG00000102921_0 (sequence is synthesized)
ggaggggttcgctgccagcaattgccaagctgctgcggtcgtggcgggatggtatagccgggcctgagggcgggcggcgg

SEQ ID NO: 133236 - DNA, 80 bp, Artificial Sequence
  ENSG00000102921_1 (sequence is synthesized)
gggaagggccgacgccgcctgactggcttgggagcagcggcagcaagctgagggggcgtcgccgccgccggcccccggcg

SEQ ID NO: 133237 - DNA, 120 bp, Artificial Sequence
  ENSG00000102921_2 (sequence is synthesized)
tgcgccagctgagaaggcggagctgctggagcagagccgcggccgtatcgagggcctgtttggcgtgagcctagccgtgctcggcgcgctaggggctgaggagccgctgcccgcgcgcat

SEQ ID NO: 133238 - DNA, 120 bp, Artificial Sequence
  ENSG00000102921_3 (sequence is synthesized)
ctggctgcagctctgcggggcgcaggaggcggtgcacagcgccaaggaatatattaaaggaatctgtgaacctgaactagaagaaagagaatgttaccccaaggacatgcactgcatttt

SEQ ID NO: 133239 - DNA, 120 bp, Artificial Sequence
  ENSG00000102921_4 (sequence is synthesized)
tgttggggcagagagcctgtttctgaaaagcttgattcaggatacttgtgctgacctctgcattctggacattggccttcttggcatcagaggaagtgctgaggctgtggtcatggctag

SEQ ID NO: 133240 - DNA, 120 bp, Artificial Sequence
  ENSG00000102921_5 (sequence is synthesized)
gagtcacattcaacaatttgtaaagctctttgaaaataaagagaacctacccagtagtcagaaagaatcagaggtgaaaagggaattcaaacaatttgttgaagcccatgcagacaatta

SEQ ID NO: 133241 - DNA, 120 bp, Artificial Sequence
  ENSG00000102921_6 (sequence is synthesized)
cacaatggatttgttgattttgcccacttccttgaaaaaagaacttttgacactcacacaaggtgaggagaatctctttgaaacaggagatgatgaggttattgaaatgagagattctca

SEQ ID NO: 133242 - DNA, 120 bp, Artificial Sequence
  ENSG00000102921_7 (sequence is synthesized)
acaaacagagtttacacagaatgctgccacagggctgaatatttctagagatgaaactgttttgcaggaagaggcaagaaataaagctgggactcctgtttctgagcttacaaaacaaat

SEQ ID NO: 133243 - DNA, 120 bp, Artificial Sequence
  ENSG00000102921_8 (sequence is synthesized)
ggacacagtcctttctagctcaccagatgtgctttttgatccaataaatggtctaaccccagatgaagaggcactttccaatgagagaatttgtcagaaaaggagattttctgattctga

SEQ ID NO: 133244 - DNA, 120 bp, Artificial Sequence
  ENSG00000102921_9 (sequence is synthesized)
agaaaggcatacgaagaagcagttttctttggaaaatgttcaggagggggagattttacacgatgctaagacattggctggaaatgtaatagctgacctatctgattcttctgctgattc

SEQ ID NO: 133245 - DNA, 120 bp, Artificial Sequence
  ENSG00000102921_10 (sequence is synthesized)
tgaaaatttaagtccagatataaaagaaactactgaggaaatggaatacaacatcctcgtaaacttttttaaaaccatgggctactcccaagaaattgttgaaaaggtcattaaggtgta

SEQ ID NO: 133246 - DNA, 120 bp, Artificial Sequence
  ENSG00000102921_11 (sequence is synthesized)
tggaccatctactgaaccattattgctcttagaggaaattgaaaaagaaaataaaagattccaagaagacagagaattttcagctggtacagtgtatccagagaccaacaaaaccaaaaa

SEQ ID NO: 133247 - DNA, 120 bp, Artificial Sequence
  ENSG00000102921_12 (sequence is synthesized)
taaaggtgtttatagcagcacaaatgagcttacaactgattccactccaaagaaaacacaggctcacacacagcaaaatatggtagaaaaattttctcagttaccattcaaagtggaagc

SEQ ID NO: 133248 - DNA, 120 bp, Artificial Sequence
  ENSG00000102921_13 (sequence is synthesized)
taaaccatgtacctcaaattgtagaattaatactttcagaacagtgccaatagaacagaaacatgaagtctggggttcaaaccagaactacatttgtaacacagaccctgaaactgatgg

SEQ ID NO: 133249 - DNA, 120 bp, Artificial Sequence
  ENSG00000102921_14 (sequence is synthesized)
cctttcaccttctgttgcctctccaagtcccaaagaagtcaattttgtttcaaggggagcttcaagtcaccagcccagagttccactttttcctgaaaatggtttacaccagcagccaga

SEQ ID NO: 133250 - DNA, 120 bp, Artificial Sequence
  ENSG00000102921_15 (sequence is synthesized)
acccttgcttccaaataatatgaaatctgcctgtgaaaaacgtttaggatgttgtagttctcctcattctaagccaaattgctcaaccctttctccaccaatgccactgccccagctgtt

SEQ ID NO: 133251 - DNA, 120 bp, Artificial Sequence
  ENSG00000102921_16 (sequence is synthesized)
accttcggttactgatgcaaggtcggcaggaccttctgatcatattgattcctcagttactggggttcaaaggtttcgagatactctaaaaataccctacaagctggaattaaaaaatga

SEQ ID NO: 133252 - DNA, 120 bp, Artificial Sequence
  ENSG00000102921_17 (sequence is synthesized)
accagggagaacggatttgaaacacattgttatagatgggagcaatgttgcaattacccatggtctgaaaaagttcttttcttgtcgtggaattgcaattgcagttgaatatttttggaa

SEQ ID NO: 133253 - DNA, 120 bp, Artificial Sequence
  ENSG00000102921_18 (sequence is synthesized)
gcttggcaacagaaacatcactgtatttgtccctcagtggagaacaaggcgtgatcctaatgtcacagaacagcacttcttaacccagctccaggagctcggaatattatctttaactcc

SEQ ID NO: 133254 - DNA, 120 bp, Artificial Sequence
  ENSG00000102921_19 (sequence is synthesized)
tgcccggatggtctttggagaaagaattgcttctcatgatgacaggtttctactacacttagcggacaaaactggtggcataattgtgacaaatgataatttcagagaatttgtgaatga

SEQ ID NO: 133255 - DNA, 120 bp, Artificial Sequence
  ENSG00000102921_20 (sequence is synthesized)
gtcagtctcttggagagaaattattacaaaaaggctgctgcagtacacgttcgtgggggacatatttatggttcccgatgatcctctgggaagaagtggacctcgattagaggagtttct

SEQ ID NO: 133256 - DNA, 120 bp, Artificial Sequence
  ENSG00000102921_21 (sequence is synthesized)
tcagaaggaagtctgtcttagagatatgcagcccctactcagtgccctgccaaatgtgggcatgtttgaccccagcttcagagtccctggcacccaggcagccagcaccagccaccagcc

SEQ ID NO: 133257 - DNA, 120 bp, Artificial Sequence
  ENSG00000102921_22 (sequence is synthesized)
tccgacccggattcagggagccccttcaagccactggctccctcagcagccccacttcccactgctgccagccctccccagtctccagcagaacctgcccatgccagctcagagatcttc

SEQ ID NO: 133258 - DNA, 120 bp, Artificial Sequence
  ENSG00000102921_23 (sequence is synthesized)
tgcagaaaccaacgagctgagggaagcccttctgaagatcttccctgactcagagcaaagactgaaaatagaccagatcttggtggcccacccatacatgaaagatctaaatgcgctttc

SEQ ID NO: 133259 - DNA, 120 bp, Artificial Sequence
  ENSG00000102921_24 (sequence is synthesized)
tgccatggtgttggattgaagattgtgctgagcgctgagcttgcgctcagggctggctgatcaaactcaagctcacacctgtacctgatgggaatgaacataatgtgaagaaacttattt

SEQ ID NO: 133260 - DNA, 120 bp, Artificial Sequence
  ENSG00000102921_25 (sequence is synthesized)
cccagtgtaaacgcagttgtacagaaaaaaaatgttttgggtataaatctgggttttcaaaaccagcttttttctatatataaattatgctgctattacagatttaacattttctgttaa

SEQ ID NO: 133261 - DNA, 120 bp, Artificial Sequence
  ENSG00000102921_26 (sequence is synthesized)
aggaaagtctacattttctgcctgttcagaactgtttaatagcagttactcttgagtgtatttacctttttatgttttttaaactattttccttaaagccgaaaatattgacaaatggat

SEQ ID NO: 133262 - DNA, 120 bp, Artificial Sequence
  ENSG00000102921_27 (sequence is synthesized)
atggttagcctttataaataaataaaaaaaaaagtgttgctttcttaaggaaagcaagacgtcttaaagtatattttcttgagatgagtatgtcccatcactaccatgaagtgtgctcac

SEQ ID NO: 133263 - DNA, 120 bp, Artificial Sequence
  ENSG00000102921_28 (sequence is synthesized)
ccttccagcctcctctgccctcacccccggagttaaagtgggtaagagttggtttgttctgcagtctttggttggagtgttgtgaaagtggacccgcggtgccactagatggcacttggt

SEQ ID NO: 133264 - DNA, 120 bp, Artificial Sequence
  ENSG00000102921_29 (sequence is synthesized)
gacggcccagtgtgcacgccgtccggccatgcccacagccacagccacagctgaggagtggccgggcaggcagcaggctccccagccagggcttgacacgcccacagtcaggggcctcca

SEQ ID NO: 133265 - DNA, 120 bp, Artificial Sequence
  ENSG00000102921_30 (sequence is synthesized)
catgcctggcctggctctggaagtcacgtcttagcttctgaacaccgtagcgggttatgaggaagtttaatgaagagcccggtcactgtggccatcttgtgtccccaactgcaggagacg

SEQ ID NO: 133266 - DNA, 120 bp, Artificial Sequence
  ENSG00000102921_31 (sequence is synthesized)
ccctgatgtggagtttgtacagctttgccaaaaaatggttttctattctcaaaagtgacccaagccaataaatagcattagtagcttctgtggggggatcccagagcccctgtatttatt

SEQ ID NO: 133267 - DNA, 120 bp, Artificial Sequence
  ENSG00000102921_32 (sequence is synthesized)
ttccctgtgtttgtctctagtgtcctcctaaacagcctttcctgtgagtctttctcagaattgatatcttaatattgtctgttctaggtgttgcccaaattcagtgtcagtgaagttctt

SEQ ID NO: 133268 - DNA, 120 bp, Artificial Sequence
  ENSG00000102921_33 (sequence is synthesized)
ttcctgggcaatcttaacatctttactcttattgtctggaccttcaaagggctttgtattttacacctgcgcccccaggctgctcacagtcggcttgctgcctgtcctgcctgtccggat

SEQ ID NO: 133269 - DNA, 120 bp, Artificial Sequence
  ENSG00000102921_34 (sequence is synthesized)
cttgtctcctagtcctgaggagcggaggctgagaactcagtgctggtttgtaaatggtgaggggacttgggggcatcccagagtgctccctccaggcctgcttcttggttttgtttgatc

SEQ ID NO: 133270 - DNA, 120 bp, Artificial Sequence
  ENSG00000102921_35 (sequence is synthesized)
actgcgttcttcaagggatgaatccagagccctccatgaggccaagcttgtccttcaatcatgtttcctctcagatgcgtccgtgatgcctcctaatgtggaactggttgtccattgttt

SEQ ID NO: 133271 - DNA, 120 bp, Artificial Sequence
  ENSG00000102921_36 (sequence is synthesized)
gggcctatggccaagtcacccagctgtggaagcagaggtagaagacgaggccagccaggagggcgacttcagtcacagctcccatgcctcagctttgtacctgttttcaaaagcacaact

SEQ ID NO: 133272 - DNA, 120 bp, Artificial Sequence
  ENSG00000102921_37 (sequence is synthesized)
gaggtgtgcgggctggagctgtcttgcagtgattctggccttctggctcatggttcagtccagcagcctggctgacccactatttctcctctgcttcagaggaaacccaggaaatgccct

SEQ ID NO: 133273 - DNA, 120 bp, Artificial Sequence
  ENSG00000102921_38 (sequence is synthesized)
tactgccaggctgagtctccacccatgctggttggtgctggctaggctgagggggccaccacttttcctggctagaagctacttgacctttgatgtttgagttctgtaagtcttcgtgtt

SEQ ID NO: 133274 - DNA, 120 bp, Artificial Sequence
  ENSG00000102921_39 (sequence is synthesized)
ctgacttactgcttcagagggattggcctgtcccctttccctttctcggctatgggaaggaaggattgctcattggttgccttcatcagttacagcatgagacggaattcatcattcctt

SEQ ID NO: 133275 - DNA, 120 bp, Artificial Sequence
  ENSG00000102921_40 (sequence is synthesized)
ccgaaacccctgatatttaatatttaatatttaaaaacccaaattatcaaaccattaagaactcattactggttctcagcctcctccagtactagcctcagtgtggctgctgcataagta

SEQ ID NO: 133276 - DNA, 120 bp, Artificial Sequence
  ENSG00000102921_41 (sequence is synthesized)
tctgtagcctgtctacctcctgcagtggggccgctcgcctcttccctgtctactgctcaggctctcccacttcgtggcatccatgtaaagtaggtggcagggcagagatgtcactctcat

SEQ ID NO: 133277 - DNA, 120 bp, Artificial Sequence
  ENSG00000102921_42 (sequence is synthesized)
tcaacagggaggatgtctgttgctcagagaggttgtcctgaggggctgggtgattcctgggcctacattcttcccgaggctccaggccgctgtctctggaagtaaaagagccttgtctga

SEQ ID NO: 133278 - DNA, 120 bp, Artificial Sequence
  ENSG00000102921_43 (sequence is synthesized)
ccttaatgcaagcagtctgtttgaacccctgtaggctgcattcaggagacagaaggtgtctgggccatcctgggcggccggtcagcgttgctaggcaggctcggctgtctggccgggact

SEQ ID NO: 133279 - DNA, 120 bp, Artificial Sequence
  ENSG00000102921_44 (sequence is synthesized)
tgggcctgggtggcttttgagaccagtgaagaagggagagccggcctcatgccgatgcggcttgtggcacggctgggatgtgagggaggactcagatctacacacagaaacccctcttct

SEQ ID NO: 133280 - DNA, 120 bp, Artificial Sequence
  ENSG00000102921_45 (sequence is synthesized)
ccccgccctcccccagctcctacctgcctcccacgcctcaggtgtggctgcctgtgggaccatcccccaacccctttcctcgcacctccttgtcctcacccagttcctgcagtgtctctg

SEQ ID NO: 133281 - DNA, 120 bp, Artificial Sequence
  ENSG00000102921_46 (sequence is synthesized)
acccacgcctcccgcctcctggccgacttgcccaggaggtgtctctggctcacctccgtctgttcatcaccttcctccccagtgtttccacttatcttggatgttttagattgaaacagc

SEQ ID NO: 133282 - DNA, 120 bp, Artificial Sequence
  ENSG00000102921_47 (sequence is synthesized)
ctgattcccggaagaatcctcttcattcattgctagtgcttcccctcacctcccactctccacttcccagtttgcaaatgtggctttcgcccaccaagtgaaagcggactgagagcagcc

SEQ ID NO: 133283 - DNA, 120 bp, Artificial Sequence
  ENSG00000102921_48 (sequence is synthesized)
cttggggacggcccggtgcctggctgcaaggccgcgctggggctctgtcttggtgcacatggcttgaccggactttccctgcttcccaccacttccctcactcccagacctccctcattc

SEQ ID NO: 133284 - DNA, 120 bp, Artificial Sequence
  ENSG00000102921_49 (sequence is synthesized)
tttttgtctcttctttttgcctaaagccagtccttaacaccctattcttcctctgcaggtggcttgcagacttttccccacctttggggctcgtggtggtggagagggcagctggtgtta

SEQ ID NO: 133285 - DNA, 120 bp, Artificial Sequence
  ENSG00000102921_50 (sequence is synthesized)
agaatgtaggttaccgggcatgacccggcagatgcttgcccagtagttctggaggaaggcccgggaatctgcaaatgagcgcattccccaggcagttcccatgcaggtgatccacggacc

SEQ ID NO: 133286 - DNA, 120 bp, Artificial Sequence
  ENSG00000102921_51 (sequence is synthesized)
acatgttgagaaactgcagtcacccttagggccacaccgtccctctcctcgctgtcccctctctgtagtgactggccctgaccttcaggagtgcactttccactctaccaggaagcccta

SEQ ID NO: 133287 - DNA, 120 bp, Artificial Sequence
  ENSG00000102921_52 (sequence is synthesized)
tgacatcctcaggctccccagacctgcagcttgcatggggcccctcccttcttccacacccaccctccgtatggtcccctgctctgccctcgtgctttgctggcccctgcccgctactcc

SEQ ID NO: 133288 - DNA, 120 bp, Artificial Sequence
  ENSG00000102921_53 (sequence is synthesized)
cactctcagacacccaggggtggtgggccctaactggctggcccctcccagcgctgccctctgccgtccagatgctgcagtgtggccagatttaccttccagtaacatacttctagtcac

SEQ ID NO: 133289 - DNA, 120 bp, Artificial Sequence
  ENSG00000102921_54 (sequence is synthesized)
ccctcctcctgcgaagtgatctgcagtggctgtttgaccagaccacaaagttcacatctcctgagcttagtgtccgtggctgtccacctcccagccatacttgactgtccccaaactctc

SEQ ID NO: 133290 - DNA, 120 bp, Artificial Sequence
  ENSG00000102921_55 (sequence is synthesized)
cctgcagccacatgtttcccatgacctgtgggctctgcagatggacctctctccgctagagatgcccttctcccaaatggcttccctcctggaaggcccagcctgagtcctcgtctcctt

SEQ ID NO: 133291 - DNA, 120 bp, Artificial Sequence
  ENSG00000102921_56 (sequence is synthesized)
tccagtgcttctgccagaagcatccccatgatgttgtgaccgcacagcactttgtgtctcgctttgagcacttgccactctggctggtgctgctgccactgattgtgtactgtcttgctg

SEQ ID NO: 133292 - DNA, 120 bp, Artificial Sequence
  ENSG00000102921_57 (sequence is synthesized)
ccctttctagactgtgagctcctcgtgggcagggaccgcctgtgttctctgtatttcccacggcgcctagcacagtgccttgcacttgataggtgcttaataaatgtctgctcaactgaa

SEQ ID NO: 133293 - DNA, 120 bp, Artificial Sequence
  ENSG00000102921_58 (sequence is synthesized)
gacagtctttaaatcttatttttcaaagttatattgaaagttatattagaagaagaagcggcttcctaagcccagtacaaatctgcaagtcttaatgagaaatttgagggccagctgata

SEQ ID NO: 133294 - DNA, 120 bp, Artificial Sequence
  ENSG00000102921_59 (sequence is synthesized)
aaacgttctgactattgtttttgtgtccaaaacagaaattaaaagggtttgacttgggtgttttccccgcttttaggcagttgagcagtcttaggatttgtaggctgacctgaccgttgc

SEQ ID NO: 133295 - DNA, 120 bp, Artificial Sequence
  ENSG00000102921_60 (sequence is synthesized)
ttcttttcttgtcgtggaattgcaattgcagttgaatatttttggaagcttggcaacagaaacatcactgtatttgtccctcagtggagaacaaggcgtgatcctaatgtcacaggtttc

SEQ ID NO: 133296 - DNA, 120 bp, Artificial Sequence
  ENSG00000102921_61 (sequence is synthesized)
cacatgcaggaaggaaggaatttctgaggaccatctttggaaactacctaacacagacaaggaatagaaaaggcctggtttcctgtgagcccgccccacccctgacctgacgtctgatgc

SEQ ID NO: 133297 - DNA, 120 bp, Artificial Sequence
  ENSG00000102921_62 (sequence is synthesized)
caagctgatggcatcacagggtcaggtggtctcaagaggtcacctggctggcctcccatatctggtgaccgatcacctgtcccgcttccttcctgaggggtcttcctgcctctgccccag

SEQ ID NO: 133298 - DNA, 120 bp, Artificial Sequence
  ENSG00000102924_0 (sequence is synthesized)
ctccgcccgctccggctgcagcgccggctgcatcaataattcagagcggcggcggcggcggcagcggcgggtgcgggcaggaggcggcggcagcagcgggaccgagcagcagcggctatg

SEQ ID NO: 133299 - DNA, 120 bp, Artificial Sequence
  ENSG00000102924_1 (sequence is synthesized)
catccaagtgcggctgggcagccgcggcacccctgaggcccgggaggggctccgggaacacagcgcggaggggacgctagtcgcggaggggacgctagtcccggagtgcgaggaagaggt

SEQ ID NO: 133300 - DNA, 120 bp, Artificial Sequence
  ENSG00000102924_2 (sequence is synthesized)
gaagaggtgtagtgtccagagcggcggcggcggagctgcgcacggagctgaggagggggcttcggagcgggactgggacggggggggcggctggcgcgagcagccctgggggtggggggc

SEQ ID NO: 133301 - DNA, 120 bp, Artificial Sequence
  ENSG00000102924_3 (sequence is synthesized)
cgccggcggcgcgatgctgggcgtcctggagctgctgctgctgggggctgcgtggctggcgggcccggcccgcgggcagaatgagacggagcccatcgtgctggagggcaagtgcctggt

SEQ ID NO: 133302 - DNA, 120 bp, Artificial Sequence
  ENSG00000102924_4 (sequence is synthesized)
ggtgtgcgactccaaccccacgtccgaccccacgggcactgccctgggcatctctgtgcgctctggcagcgccaaggtggctttctctgccatcaggagcaccaaccacgagccgtccga

SEQ ID NO: 133303 - DNA, 120 bp, Artificial Sequence
  ENSG00000102924_5 (sequence is synthesized)
gatgagtaatcgcaccatgatcatctacttcgaccaggtactagtgaacattgggaacaactttgattcagaacgcagcactttcatcgccccgcgcaaagggatctacagttttaactt

SEQ ID NO: 133304 - DNA, 120 bp, Artificial Sequence
  ENSG00000102924_6 (sequence is synthesized)
ccacgtggtaaaagtctacaacagacaaaccatacaggtgagcctcatgctaaacgggtggccggtgatttcagccttcgctggtgaccaggacgtgacccgggaggccgccagcaacgg

SEQ ID NO: 133305 - DNA, 120 bp, Artificial Sequence
  ENSG00000102924_7 (sequence is synthesized)
agtcctaatccaaatggagaaaggcgaccgagcatacctcaagctggagcggggaaacttgatggggggctggaagtactcgaccttctccggattcctggtgtttcctctctgactggc

SEQ ID NO: 133306 - DNA, 120 bp, Artificial Sequence
  ENSG00000102924_8 (sequence is synthesized)
tcgtagccggaagggaggcagggagagggcgaaggcaggaaggggagtgagaaagaggctgaaattaagagggcgagaaagcagcacgacttgaaacttcctacatgttctctaactgta

SEQ ID NO: 133307 - DNA, 120 bp, Artificial Sequence
  ENSG00000102924_9 (sequence is synthesized)
tctgggtaaaaaggtgcgcgccagctgtgggacaactttgtccatttccttattaggagaaataaatttcgcttagctctgcgcactcccatttccaaaaataaactcgcctcccccatt

SEQ ID NO: 133308 - DNA, 120 bp, Artificial Sequence
  ENSG00000102924_10 (sequence is synthesized)
cttatcccccaacttcatgttccctgcaatttatttaaagaaactttgtatttcactacataatctgaaatctttctccctagccccctctgaatccttctgcctactgaaatctgatat

SEQ ID NO: 133309 - DNA, 120 bp, Artificial Sequence
  ENSG00000102924_11 (sequence is synthesized)
attacacacccccaaccttttttttttcagtttggaaaggggtaaagttttgttgttgttgttgttttgttttggatggggaaggtagttttaatttggcaagtgttgctcttcttaaaa

SEQ ID NO: 133310 - DNA, 120 bp, Artificial Sequence
  ENSG00000102924_12 (sequence is synthesized)
cactgctcaaattaattagctgaagatacttagtatcctcggctgcttgttagcagagaaaggactcaccttagtggtgactggtttaaaaaatataaatatatatcatttgtatacgaa

SEQ ID NO: 133311 - DNA, 120 bp, Artificial Sequence
  ENSG00000102924_13 (sequence is synthesized)
gaactcttcccagtggaaactggctgtgtttccgtatttctatgttctattcggagtgatcgtgaaatctaaggctgcttgatgttctgatgcttgtcaatgccgtcgtgctctgtgact

SEQ ID NO: 133312 - DNA, 120 bp, Artificial Sequence
  ENSG00000102924_14 (sequence is synthesized)
ccacgaaacgccaaggagcttcttccggacgcctcctcttcctctgtaacatacgtgtgaatagtcaaggtttaattttgctttaatctaataaagtcgaagtgggacttttatttttct

SEQ ID NO: 133313 - DNA, 120 bp, Artificial Sequence
  ENSG00000102924_15 (sequence is synthesized)
gaaacagctttctaaaatccgcatcttccccagctgcgaggttgggggtctggggtgccaaagggcgaggttccgaaaggcaggagacttgggggaacgcaaccatagaaaggcctgggc

SEQ ID NO: 133314 - DNA, 120 bp, Artificial Sequence
  ENSG00000102924_16 (sequence is synthesized)
gcgagggcttccttgcaaagccggccttgcgctccttcctgcgccaggccggggaccagcactgcattcgcctgtgttcacagctttggcggaaacgtaagaaatgtggccgaaatcttg

SEQ ID NO: 133315 - DNA, 120 bp, Artificial Sequence
  ENSG00000102924_17 (sequence is synthesized)
ctaggccaggcgcggccgccggcccaggagcgaagtttgatttttttctttgcattccaaatgcatcaggaatagtcccagtttgaggacccaaacgaccctgcctggagcggcagactc

SEQ ID NO: 133316 - DNA, 120 bp, Artificial Sequence
  ENSG00000102924_18 (sequence is synthesized)
ctcaggccttctgtccccggatgtctcccaccgcgtccccctcgcagttcccgaagcagcgtatgttttatacaccgcctctgaatccggagtccacccgccgcatactcgggcgcccag

SEQ ID NO: 133317 - DNA, 120 bp, Artificial Sequence
  ENSG00000102924_19 (sequence is synthesized)
gacctatgattccgctcattcacaggactttattcaagaggttcgtccaggagttttgattgtatcggaacataatgtgaaagcaaaaatgaaataaacgacttcgttttaagtctgaaa

SEQ ID NO: 133318 - DNA, 120 bp, Artificial Sequence
  ENSG00000102931_0 (sequence is synthesized)
agtgagctggccgcggccttggctgagaggccttaaccccgccgggcggccgcgccctgcatgcgagttgggccgcgggcggggttggagcctactcggggcgactgcgatggacgcctt

SEQ ID NO: 133319 - DNA, 120 bp, Artificial Sequence
  ENSG00000102931_1 (sequence is synthesized)
agaaggagagagctttgcgctgtctttctcctccgcctctgatgcagaatttgatgctgtggttggatatttagaggacattatcatggatgacgagttccagttattacagagaaattt

SEQ ID NO: 133320 - DNA, 120 bp, Artificial Sequence
  ENSG00000102931_2 (sequence is synthesized)
catggacaagtactacctggagtttgaagacacagaagagaataaactcatctacacacctatttttaatgaatacatttctttggtagaaaaatacattgaagaacagctgctgcagcg

SEQ ID NO: 133321 - DNA, 120 bp, Artificial Sequence
  ENSG00000102931_3 (sequence is synthesized)
gattcctgagttcaacatggcagccttcaccacaacattacagcaccataaggatgaagtggctggtgacatattcgacatgctgctcaccttcacagattttctggcttttaaagaaat

SEQ ID NO: 133322 - DNA, 120 bp, Artificial Sequence
  ENSG00000102931_4 (sequence is synthesized)
gtttttggactacagagcagaaaaagaaggccgaggactggacttaagcagtggcttagtggtgacttcattgtgcaaatcatcttctctgccagcttcccagaacaatctgcggcacta

SEQ ID NO: 133323 - DNA, 120 bp, Artificial Sequence
  ENSG00000102931_5 (sequence is synthesized)
ggtcctacctccagccaatgaatgggatcattctggatgtcaccagcccaataggctcagctcatgatgacagaacacatcttggaaagactgactctgttatgtaactcttcatttatg

SEQ ID NO: 133324 - DNA, 120 bp, Artificial Sequence
  ENSG00000102931_6 (sequence is synthesized)
ttaagtattaataggtcaaaaccaaaatgacctaaccctcctggacctatttatcctgaaacaccttcttgtattcattaaccatagtactcctccccacctcaagtagacacctctctc

SEQ ID NO: 133325 - DNA, 120 bp, Artificial Sequence
  ENSG00000102931_7 (sequence is synthesized)
aggagcttctgagtcagacgcctctggagcgagccctatgtcaggcactccacctggggggcccttccccagcatacctgctggtgtgtaagtgtggactaacccgccgccaccaccctc

SEQ ID NO: 133326 - DNA, 120 bp, Artificial Sequence
  ENSG00000102931_8 (sequence is synthesized)
acatgggccacagtttcagtacttcagcctcagtggggttcctgatgtttatctagggtgttactcaagcccagtttgagattttggagtctcctgtgatcacatcttgtctcggctgta

SEQ ID NO: 133327 - DNA, 120 bp, Artificial Sequence
  ENSG00000102931_9 (sequence is synthesized)
ggaatcaacagaaggagacgtcctctacataaaagctccatgtgaaaagctactcctagtcttaacatttgcagtccttgtgtcactgtcttctggtcctgatgtagtcccactgtttct

SEQ ID NO: 133328 - DNA, 120 bp, Artificial Sequence
  ENSG00000102931_10 (sequence is synthesized)
agaagtctcttttaagcattatttttgaaaaaaaaaatatttttatagatgaatactcaggctaacctagtggatgtgatcttggaacttccatgattatccacttaaagatcaaagtat

SEQ ID NO: 133329 - DNA, 120 bp, Artificial Sequence
  ENSG00000102931_11 (sequence is synthesized)
tatatgctgtgtgctttttaggtgtttgttagtactgtgaaggcaaaaatgctttctacattgacattcattcctattttactgggcacctatgaatgtatgctgtgtgctagaaataga

SEQ ID NO: 133330 - DNA, 120 bp, Artificial Sequence
  ENSG00000102931_12 (sequence is synthesized)
ctaaaacatattcctatagcatgttagtgtgtttgcatgtttgctgaaaatcctttgtgtataaaccagtttgtaaggttctctgggttaggtagggactctgcagtttcttcctgtcaa

SEQ ID NO: 133331 - DNA, 120 bp, Artificial Sequence
  ENSG00000102931_13 (sequence is synthesized)
aatctctcctaccaagatggtgttccactgtccagcccagcatgagtagcaggtagagcacagctttactggctgtttgtatgctttggtttagtgcaatgtgtggtagattacttatca

SEQ ID NO: 133332 - DNA, 120 bp, Artificial Sequence
  ENSG00000102931_14 (sequence is synthesized)
gaaaacatatatgtcatctctagaacgaagaaaaagcatagtagttcaattcccagtgtgtccctttgattttttttttttaatagtaaaaataagaatctgtactgacttttcacttgg

SEQ ID NO: 133333 - DNA, 120 bp, Artificial Sequence
  ENSG00000102931_15 (sequence is synthesized)
ccattctggttttaaaggacaagctacaagctctgtgtttctgtactgatgtgtcacttattaaatacttttgtaccatgagtaaaacttcaggtgtttcgcaagaaccaccattctcaa

SEQ ID NO: 133334 - DNA, 120 bp, Artificial Sequence
  ENSG00000102931_16 (sequence is synthesized)
ctactcggggcgactgcgatggacgccttagaaggagagagctttgcgctgtctttctcctccgcctctgatgcagaatttgatgctgtggttggatatttagaggacattatcatggaa

SEQ ID NO: 133335 - DNA, 120 bp, Artificial Sequence
  ENSG00000102934_0 (sequence is synthesized)
gacgcctcctgcagcgcctggagccacacagggatccggagcctgggggaaaagcggcgcgggagccggcacccaccgctggaggggcggcgacggcggccgtagcgacctcgggaggca

SEQ ID NO: 133336 - DNA, 120 bp, Artificial Sequence
  ENSG00000102934_1 (sequence is synthesized)
agcggagccgccatggccgagttcccgtcgaaagttagcacgcggaccagcagtcctgcgcagggcgccgaagcctcggtgtcggcgctgcgcccggacctgggcttcgtgcgctcccgc

SEQ ID NO: 133337 - DNA, 120 bp, Artificial Sequence
  ENSG00000102934_2 (sequence is synthesized)
ctcggggcgctcatgctgctgcagctggtgctggggctgctggtgtgggcgctgattgcggacaccccgtaccacctgtatccggcctatggctgggtgatgttcgtcgctgtcttcctc

SEQ ID NO: 133338 - DNA, 120 bp, Artificial Sequence
  ENSG00000102934_3 (sequence is synthesized)
tggctggtgacaatcgtcctcttcaacctctacctgtttcagctgcacatgaagttgtacatggttccctggccactggtgttaatgatctttaacatcagcgccaccgttctctacatc

SEQ ID NO: 133339 - DNA, 120 bp, Artificial Sequence
  ENSG00000102934_4 (sequence is synthesized)
accgccttcatcgcctgctctgcggcagttgacctgacatccctgaggggcacccggccttataaccagcgcgcggctgcctcgttctttgcgtgtttggtgatgatcgcctatggagtg

SEQ ID NO: 133340 - DNA, 120 bp, Artificial Sequence
  ENSG00000102934_5 (sequence is synthesized)
agtgccttcttcagctaccaggcctggcgaggagtaggcagcaatgcggccaccagtcagatggctggcggctatgcctaaaccacctgtgccacggccccctctggggctgaagccgcc

SEQ ID NO: 133341 - DNA, 120 bp, Artificial Sequence
  ENSG00000102934_6 (sequence is synthesized)
gtcagcccaacagggactgcatttgctcctctctgcccgtcagacataagctctcacagcgctaaggaagcaggcccaggctggcaggcatctcggcttgcaggaggccaactgctgaga

SEQ ID NO: 133342 - DNA, 120 bp, Artificial Sequence
  ENSG00000102934_7 (sequence is synthesized)
cctcttctccatcccccttattcagtggaagatgacgggggatctgaggctgtgtctctgccttgtctttagaggacttcagcgtccaagactggggcccacccttctcaccagcactaa

SEQ ID NO: 133343 - DNA, 120 bp, Artificial Sequence
  ENSG00000102934_8 (sequence is synthesized)
atgcactaacaaggactccagacctgcagccccagacccgccgtagtataagcctaacaagcaacacgtagcaccttagtctttgttccaggagagctgagcaagctggtgaaaccactc

SEQ ID NO: 133344 - DNA, 120 bp, Artificial Sequence
  ENSG00000102934_9 (sequence is synthesized)
tccttcctttaaacaccgtttcaaccaacctctccctggagccaacctgtaaaaagtgggttgattgctgacagcatggtcttccctccctgcatttcagacataccagttactgaaagc

SEQ ID NO: 133345 - DNA, 120 bp, Artificial Sequence
  ENSG00000102934_10 (sequence is synthesized)
aaatcagttttaagtgatttctcagtgctgaaaagcctgtccaggtttccttccctttcccaagcctctctctgtaatactccctttgggcgaagctaacatcggtgcctccccgacctt

SEQ ID NO: 133346 - DNA, 120 bp, Artificial Sequence
  ENSG00000102934_11 (sequence is synthesized)
gctgactaggcacatgggacgcaaaggagggagggaagcaaggccttgcctggcgagttgtcatgtggttggtggtgactgttttattttttttaataaaaataaagatgagagaaatta

SEQ ID NO: 133347 - DNA, 120 bp, Artificial Sequence
  ENSG00000102934_12 (sequence is synthesized)
atcgaagccagacagctgggctccagagttcatgctgttagccactacccatgctctgctgggatggtcaggcccatcctgccgtgtgggaacagcctgacaggtgctggggctgctggt

SEQ ID NO: 133348 - DNA, 120 bp, Artificial Sequence
  ENSG00000102934_13 (sequence is synthesized)
aaactgggcttgagtaacaccctagataaacatcaggaaccccactgaggctgaagtactgaaactgtggcccatgtgaaaaagaggtgcaagtgcacaaagattcatgcagagcctgct

SEQ ID NO: 133349 - DNA, 120 bp, Artificial Sequence
  ENSG00000102934_14 (sequence is synthesized)
caccagcaggtatgctggggaagggccccccaggtggagtgcctgacatagggctcgctccagaggcgtctgactcagaagctcctgagagaggtgtctacttgaggtggggaggagtac

SEQ ID NO: 133350 - DNA, 120 bp, Artificial Sequence
  ENSG00000102934_15 (sequence is synthesized)
tatggttaatgaatacaagaaggtgtttcaggataaataggtgtgtagatgagtttattctcttctgtgtcttcaaactccaggtagtacttgtccatgaaatttctctgtaataactgg

SEQ ID NO: 133351 - DNA, 120 bp, Artificial Sequence
  ENSG00000102934_16 (sequence is synthesized)
gctgtagggcagttcacgttctggagtcgttcagcaccacctgcgaactctttgaccggaggaaggctgcctatacttcctgcttgctgggtctggaacagtcctggtttatgctgtttg

SEQ ID NO: 133352 - DNA, 120 bp, Artificial Sequence
  ENSG00000102934_17 (sequence is synthesized)
tgctggcataaatagaatagcacggccttttattctcacaagtgactcagtttgacaataacttagtcacccttgctttgggcaggttaggtgagcttactgaatcaaagatttcaacaa

SEQ ID NO: 133353 - DNA, 120 bp, Artificial Sequence
  ENSG00000102934_18 (sequence is synthesized)
tatcatctaccttgaaagtctgtgaagcttggaggtcatataatcaaggtggctggccatgctgcctgctcagagctggtagagacagcagaggaaagcagctgagtactcctgagctta

SEQ ID NO: 133354 - DNA, 120 bp, Artificial Sequence
  ENSG00000102934_19 (sequence is synthesized)
tttttccaacaccacagaacaacgttctctgaacaataaggtaaaagcatttctaggtaccctctgtacccttttgttattttttatttttattttttggagaccgagtcttgctctagt

SEQ ID NO: 133355 - DNA, 86 bp, Artificial Sequence
  ENSG00000102934_20 (sequence is synthesized)
ttttttttaagagacagggtcttgctctcttgcccaggttggagtacagtgccacaactacagctcactgcagccttgactgtcag

SEQ ID NO: 133356 - DNA, 86 bp, Artificial Sequence
  ENSG00000102934_21 (sequence is synthesized)
tgcagccttgactgtcagtagcttggactacaagtgcaggccaccatgcccagctaatttttgtttttttttttttttgagatgga

SEQ ID NO: 133357 - DNA, 120 bp, Artificial Sequence
  ENSG00000102934_22 (sequence is synthesized)
taccagcgtgagccactgtgcccggctgatttttaaattttttgtagacattgggtctcgctatattgcttaggctggtcttaaactcccagcttcaagtgatcctcccatctcagcctc

SEQ ID NO: 133358 - DNA, 120 bp, Artificial Sequence
  ENSG00000102934_23 (sequence is synthesized)
gcatgaaccaccacacttggccctggtataaatattaatagcatcactttttactctaaagtctcggagtttgaataataaattagtccttccaggagtaagttataagagtttggtttt

SEQ ID NO: 133359 - DNA, 120 bp, Artificial Sequence
  ENSG00000102934_24 (sequence is synthesized)
aaggaagggcaatacacttaaatgtaaaacaaaatcccaggcaagttagagagctcacccctcttatgtttccaacatgaatcaaaagcctgtttcaggggggacattaaaggcattcag

SEQ ID NO: 133360 - DNA, 120 bp, Artificial Sequence
  ENSG00000102934_25 (sequence is synthesized)
tcaatgctaaggctcagcagtttgtgtgactactgcttcccactggggaggagtcctaagcaagaggactggggcttcctcaccccagggcaggtgggagccccatcaaaggtggcacct

SEQ ID NO: 133361 - DNA, 120 bp, Artificial Sequence
  ENSG00000102934_26 (sequence is synthesized)
gacatcacagtctaagtgtctgaggatggagagacaggctgctagtttattttaaaagaaatcagaatgtctacttataatattaagtgacaacagacttgcctcctttttgctgagcag

SEQ ID NO: 133362 - DNA, 74 bp, Artificial Sequence
  ENSG00000102934_27 (sequence is synthesized)
tattaagtgacaacagacttgcctcctttttgctgagcagaaagggtgaaaaaacctgggtgatcacctgaagt

SEQ ID NO: 133363 - DNA, 120 bp, Artificial Sequence
  ENSG00000102934_28 (sequence is synthesized)
taaaaatacaaaaattagctgggcgtgtttgtggacacctataatcccggctgcttgggaggctgaggcagcagaatcactggaactcgggaggtggaggttgcagtgtgccgagatcgt

SEQ ID NO: 133364 - DNA, 120 bp, Artificial Sequence
  ENSG00000102934_29 (sequence is synthesized)
cagcctgggcaacaaaagcaaaactccattcccaaaaaaaaaagaaaaaaaaaagggtgaaaaaccaatttgcctttatcatcgttttttcatcatttaatctctggacttgtccactgg

SEQ ID NO: 133365 - DNA, 120 bp, Artificial Sequence
  ENSG00000102934_30 (sequence is synthesized)
tctctggacttgtccactggccttttctcaagtaggcaggctggtccacaggtcttagcaagtgctcccagcatgcctgggctgtggtggacctcccatttatagacaaagcaagggaaa

SEQ ID NO: 133366 - DNA, 120 bp, Artificial Sequence
  ENSG00000102934_31 (sequence is synthesized)
gcaagcccaggagaggtggcatttaaaaaaaaaaaaaaaagaccaaagcaataattaataaccttatggcagtggctacattaaagaaagaatacaactcattgagaatggtggttcttg

SEQ ID NO: 133367 - DNA, 120 bp, Artificial Sequence
  ENSG00000102934_32 (sequence is synthesized)
cgaaacacctgaagttttactcatggtacaaaagtatttaataagtgacacatcagtacagaaacacagagcttgtagcttgtcctttaaaaccagaatggccaagtgaaaagtcagtac

SEQ ID NO: 133368 - DNA, 120 bp, Artificial Sequence
  ENSG00000102934_33 (sequence is synthesized)
agattcttatttttactattaaaaaaaaaaaatcaaagggacacactgggaattgaactactatgctttttcttcgttctagagatgacatatatgttttctgataagtaatctaccaca

SEQ ID NO: 133369 - DNA, 120 bp, Artificial Sequence
  ENSG00000102934_34 (sequence is synthesized)
cattgcactaaaccaaagcatacaaacagccagtaaagctgtgctctacctgctactcatgctgggctggacagtggaacaccatcttggtaggagagattttgacaggaagaaactgca

SEQ ID NO: 133370 - DNA, 120 bp, Artificial Sequence
  ENSG00000102934_35 (sequence is synthesized)
gagtccctacctaacccagagaaccttacaaactggtttatacacaaaggattttcagcaaacatgcaaacacactaacatgctataggaatatgttttagtctatttctagcacacagc

SEQ ID NO: 133371 - DNA, 120 bp, Artificial Sequence
  ENSG00000102934_36 (sequence is synthesized)
atacattcataggtgcccagtaaaataggaatgaatgtcaatgtagaaagcatttttgccttcacagtactaacaaacacctaaaaagcacacagcatataatactttgatctttaagtg

SEQ ID NO: 133372 - DNA, 120 bp, Artificial Sequence
  ENSG00000102934_37 (sequence is synthesized)
gataatcatggaagttccaagatcacatccactaggttagcctgagtattcatctataaaaatattttttttttcaaaaataatgcttaaaagagacttctagaaacagtgggactacat

SEQ ID NO: 133373 - DNA, 120 bp, Artificial Sequence
  ENSG00000102934_38 (sequence is synthesized)
acacaaggactgcaaatgttaagactaggagtagcttttcacatggagcttttatgtagaggacgtctccttctgttgattcctacagccgagacaagatgtgatcacaggagactccaa

SEQ ID NO: 133374 - DNA, 120 bp, Artificial Sequence
  ENSG00000102934_39 (sequence is synthesized)
attaatacttaacataaatgaagagttacataacagagtcagtctttccaagatgtgttctgtcatcatgagctgagcctattgggctggtgacatccagaatgatcccattcattggct

SEQ ID NO: 133375 - DNA, 120 bp, Artificial Sequence
  ENSG00000102934_40 (sequence is synthesized)
ggaggtaggacctagtgccgcagattgttctgggaagctggcagagaagatgatttgcacaatgaagtcaccactaagccactgcttaagtccagtcctcggccttctttttcctatatg

SEQ ID NO: 133376 - DNA, 120 bp, Artificial Sequence
  ENSG00000102934_41 (sequence is synthesized)
agaaaacaaccaaaggaaggactagaaagagccctggcttggaatcttgcctctgacatggggaaggcagagctgaaggtgggaacgtggacctccagagtacataggaagggaacacag

SEQ ID NO: 133377 - DNA, 120 bp, Artificial Sequence
  ENSG00000102934_42 (sequence is synthesized)
taggaagggaacacaggttattggttattctgcatttctgctcaatactggcctgccctagtcttaattttttttaatattatttttaaagaggtagggtcttgctctgtcacccaggct

SEQ ID NO: 133378 - DNA, 70 bp, Artificial Sequence
  ENSG00000102934_43 (sequence is synthesized)
tacagctgactaacttttttatttttatttttgtagagacagggtcttgatatgtcacttaggctggtct

SEQ ID NO: 133379 - DNA, 75 bp, Artificial Sequence
  ENSG00000102934_44 (sequence is synthesized)
cgctggaattgtaagtatgagccactgtgtccagcctggccctggtcattcttaaaatgcactcttaaaatgtac

SEQ ID NO: 133380 - DNA, 120 bp, Artificial Sequence
  ENSG00000102934_45 (sequence is synthesized)
gcgctggaattgtaagtatgagccactgtgtccagcctggccctggtcattcttaaaatgcactcttaaaatgtacctcccttcactggaaaacatttttctttctttcttttttttttt

SEQ ID NO: 133381 - DNA, 120 bp, Artificial Sequence
  ENSG00000102934_46 (sequence is synthesized)
gagtgcagtggctattcacaggcaccactgctgtgtaatacagccccaaactcctaggctcaagtgattctcctgcctcagccttcgaagtagctgggactacaggcatgcacaaccaca

SEQ ID NO: 133382 - DNA, 120 bp, Artificial Sequence
  ENSG00000102934_47 (sequence is synthesized)
tctttttcttttctttttttttttttgacacagggtctgactctgtcacccaggctggactgtagcagtacaatcacagctcacagcaatctcaaccttctgggctcaagcggtcctccc

SEQ ID NO: 133383 - DNA, 120 bp, Artificial Sequence
  ENSG00000102934_48 (sequence is synthesized)
tcacagcaatctcaaccttctgggctcaagcggtcctcccacccagcccccaaagtagctgactgggactacagatgcacaccagcacaccaagctaatttttgtatttttcatagagac

SEQ ID NO: 133384 - DNA, 88 bp, Artificial Sequence
  ENSG00000102934_49 (sequence is synthesized)
cccaaagtgctgggattataggtgtgagttaccatgcccagtctcctatttttcttataaagagcttgcattatatgaaaagcaaggc

SEQ ID NO: 133385 - DNA, 62 bp, Artificial Sequence
  ENSG00000102934_50 (sequence is synthesized)
gtctcctatttttcttataaagagcttgcattatatgaaaagcaaggcccatgcttcaggag

SEQ ID NO: 133386 - DNA, 120 bp, Artificial Sequence
  ENSG00000102934_51 (sequence is synthesized)
caaaactctgtctcaaaaaaaaaaataaataaaagaaaggcaaggcagaatgagacctgagacctgctttttcggttttgtccttctgattaggaactctaagttggtacctgggcttgt

SEQ ID NO: 133387 - DNA, 120 bp, Artificial Sequence
  ENSG00000102934_52 (sequence is synthesized)
attaggaactctaagttggtacctgggcttgtttcatgaaaacatgagaaggtcccagccacaacagaatagcagctcactcttctgatgcctcatcggccagtttgaagggagaatgat

SEQ ID NO: 133388 - DNA, 120 bp, Artificial Sequence
  ENSG00000102934_53 (sequence is synthesized)
gggggaagcgtgggaggttcatgttcggtatttctacctggaattttctaagtggctcaaagtggctaaataaataggagtagtaacttactgctctgtagtccaaaaacatttctttaa

SEQ ID NO: 133389 - DNA, 120 bp, Artificial Sequence
  ENSG00000102934_54 (sequence is synthesized)
aagccagaaaatctgtgaaggtgagcagcatgtcgaatatgtcaccagccacttcatccttatggtgcctgcaaacggaacagatggctgtttcgtgaatgaatgatgagacagtcctca

SEQ ID NO: 133390 - DNA, 120 bp, Artificial Sequence
  ENSG00000102934_55 (sequence is synthesized)
gatgagacagtcctcaagattgctttcgtttttctttccaccaccccagccccaccccccgcattatttttgttttgtttttttagagactgggtcttgctctgtcacccaggcaggagt

SEQ ID NO: 133391 - DNA, 120 bp, Artificial Sequence
  ENSG00000102934_56 (sequence is synthesized)
ttctccagcctcagcctcctgagtagctaggcccacaggtatgcaacaccacacctgactaatttattttttgtagggtcggggcctcactatgtcacccaggctggtcttgaactcctg

SEQ ID NO: 133392 - DNA, 120 bp, Artificial Sequence
  ENSG00000102934_57 (sequence is synthesized)
aactcctgggctcaagtgatcctcctcccttggcctcccaaagcactgagaacacaagcgtgagccaatgcctgatcttttcaagatttcattaaaaggtttgagggcttcctccatagg

SEQ ID NO: 133393 - DNA, 120 bp, Artificial Sequence
  ENSG00000102934_58 (sequence is synthesized)
taaaaggtttgagggcttcctccataggacctaaccaccaacggcatgcacaggaaaacaaacaaggagcgtcttttggtcagcctagggaaggaagaaagtgagaaaacaaaacaaaac

SEQ ID NO: 133394 - DNA, 120 bp, Artificial Sequence
  ENSG00000102934_59 (sequence is synthesized)
acaaaaatcagtcaagctcaactcactgtaatgttgtggtgaaggctgccatgttgaactcaggaatccgctgcagcagctgttcttcaatgtatttttctaccaaagaaatctgcaaca

SEQ ID NO: 133395 - DNA, 120 bp, Artificial Sequence
  ENSG00000102934_60 (sequence is synthesized)
gtggaaaggattttggtgagaccatactttgggaaaacaagacttcttttcagaaagcctgcccagccctttctaaacatttcctgaggtctgtgtgccacaatctacactgagtgccaa

SEQ ID NO: 133396 - DNA, 120 bp, Artificial Sequence
  ENSG00000102934_61 (sequence is synthesized)
ggataccaaagaggaccaaaacacagctcctgtcctggagaagtactcagcctggtgtggaagagaagccttagctgataatggtgctgtaacagggtggatgctctgacacaggtggag

SEQ ID NO: 133397 - DNA, 120 bp, Artificial Sequence
  ENSG00000102934_62 (sequence is synthesized)
acagtgagtagcacggtacccacacccacaacccagtgcaggatgcagtaagtgggggctttgcctcctgggtagagggcatctgtgtaacagaacatacggacatggaggcagtcacag

SEQ ID NO: 133398 - DNA, 120 bp, Artificial Sequence
  ENSG00000102934_63 (sequence is synthesized)
gttccttctgggcaggtttgtttatgccatgcttctgtgttaagaaaataaagtcctggaggccaaaatggattcttagatgacagaatcccagggggctgttaagaggcctcagggtaa

SEQ ID NO: 133399 - DNA, 120 bp, Artificial Sequence
  ENSG00000102934_64 (sequence is synthesized)
agtgtagagacccaagggtgacgagctgaggttcctgggttccagtcttggtttttccaccaaatagttagtgatcttggtctcagttttcacttttacttaatagtcatgcatatatga

SEQ ID NO: 133400 - DNA, 120 bp, Artificial Sequence
  ENSG00000102934_65 (sequence is synthesized)
ctggattatatagaagaaagaaagagtatgtgaaagcagaaaggtttgtcaaaagcatgcaaatgcaaggtatgaagaactcatgtactgtgattaaaagcaggattatgataagccaaa

SEQ ID NO: 133401 - DNA, 120 bp, Artificial Sequence
  ENSG00000102935_0 (sequence is synthesized)
ttttcccaagtcagaacccttcccgggcctgcccggagaccagagtctcagccggttcaggagctgcgggggacgcgcggcgccccctggcggctgggtaaaacctcgcagaaagtagca

SEQ ID NO: 133402 - DNA, 120 bp, Artificial Sequence
  ENSG00000102935_1 (sequence is synthesized)
gctggtttatttcttctgacaactgcgcggggagggggtgctcctgcaaggtctcagggttgaagagggggaggcctcagacttctcgctggcctgggattcctccgtgacagcagcagg

SEQ ID NO: 133403 - DNA, 120 bp, Artificial Sequence
  ENSG00000102935_2 (sequence is synthesized)
aggcctagaaggagagccagagtgcgatcagaaaaccagccgtgcgctggaagacaggaacagcgtgacaagtcaagaggagagaaatgaggatgatgaagacatggaggatgaatcaat

SEQ ID NO: 133404 - DNA, 120 bp, Artificial Sequence
  ENSG00000102935_3 (sequence is synthesized)
ttacacctgcgatcactgtcagcaggacttcgagtctctggcagacctgacggaccaccgggcccaccgctgtcctggagatggtgatgacgacccacaactctcctgggtggcctcgtc

SEQ ID NO: 133405 - DNA, 120 bp, Artificial Sequence
  ENSG00000102935_4 (sequence is synthesized)
tccctccagcaaggatgttgcgtcacccacgcagatgatcggagatggttgtgacctcggcctcggcgaggaggaagggggcacgggcctgccatacccttgccagttctgcgacaagtc

SEQ ID NO: 133406 - DNA, 120 bp, Artificial Sequence
  ENSG00000102935_5 (sequence is synthesized)
cttcatccgcttgagctacttgaagaggcacgagcagatccacagcgacaagctgccgttcaagtgcacctactgcagccgcctcttcaagcacaagaggagccgtgaccggcacatcaa

SEQ ID NO: 133407 - DNA, 120 bp, Artificial Sequence
  ENSG00000102935_6 (sequence is synthesized)
gctgcatacgggcgacaagaagtatcactgccacgagtgcgaggcagccttctcccgcagcgaccacctcaagatccacctgaagacccacagctccagcaagcccttcaagtgcactgt

SEQ ID NO: 133408 - DNA, 120 bp, Artificial Sequence
  ENSG00000102935_7 (sequence is synthesized)
gtgcaagcgcggcttctcctccaccagctcgctgcagagccacatgcaggcccacaaaaagaacaaggagcatctggccaagtcggagaaggaagccaagaaggacgacttcatgtgcga

SEQ ID NO: 133409 - DNA, 120 bp, Artificial Sequence
  ENSG00000102935_8 (sequence is synthesized)
ctactgcgaggacaccttcagccagacggaggagctggagaagcacgtgctcacccgccacccgcagctgtccgagaaggcggacctgcagtgcattcactgccctgaggtcttcgtcga

SEQ ID NO: 133410 - DNA, 120 bp, Artificial Sequence
  ENSG00000102935_9 (sequence is synthesized)
cgagaacacactgctcgcccatatccaccaagcccacgccaaccagaaacacaagtgccccatgtgccctgagcagttctcctcagtggaaggtgtctactgccacctggacagccaccg

SEQ ID NO: 133411 - DNA, 120 bp, Artificial Sequence
  ENSG00000102935_10 (sequence is synthesized)
gcagcccgactccagcaaccacagtgtcagtcccgaccctgtactgggcagcgtggcctccatgagcagcgccacacccgactccagcgcctctgtggagcgtggctccaccccggactc

SEQ ID NO: 133412 - DNA, 120 bp, Artificial Sequence
  ENSG00000102935_11 (sequence is synthesized)
caccttgaagccgctgcgggggcagaagaagatgcgggatgacgggcagggctggaccaaggtggtctatagctgcccctattgttccaagcgggactttaacagcctggccgtgctgga

SEQ ID NO: 133413 - DNA, 120 bp, Artificial Sequence
  ENSG00000102935_12 (sequence is synthesized)
gatccacctgaagaccatccacgcggacaagccccagcagagccacacatgtcagatctgcctggactccatgcccaccctctacaacctcaacgagcacgttcgcaagctgcacaagaa

SEQ ID NO: 133414 - DNA, 120 bp, Artificial Sequence
  ENSG00000102935_13 (sequence is synthesized)
ccatgcctaccctgtgatgcagtttggcaacatctctgccttccactgcaactactgccccgagatgttcgccgacatcaatagcctgcaggagcacatccgcgtctcccactgcggccc

SEQ ID NO: 133415 - DNA, 120 bp, Artificial Sequence
  ENSG00000102935_14 (sequence is synthesized)
caacgccaacccctctgacggtaataatgctttcttctgcaaccagtgctccatgggtttccttactgagtcctccctcaccgagcacatccagcaggcccactgcagtgtgggcagtgc

SEQ ID NO: 133416 - DNA, 120 bp, Artificial Sequence
  ENSG00000102935_15 (sequence is synthesized)
caaactagagtctccggtggtgcagcccacgcagtccttcatggaggtctattcctgcccctactgcaccaactcccccatctttggctccatcctgaaactcaccaagcacatcaagga

SEQ ID NO: 133417 - DNA, 120 bp, Artificial Sequence
  ENSG00000102935_16 (sequence is synthesized)
gtctcgtccgatgtggaggtgtcttccccgaagcggcagcggctctcagcaagcgccaactccatctccaatggggagtatccttgcaatcaatgcgacctcaagttctccaactttgag

SEQ ID NO: 133418 - DNA, 120 bp, Artificial Sequence
  ENSG00000102935_17 (sequence is synthesized)
agcttccagacccacctgaagctgcacctggagctgctgctgcggaagcaagcgtgcccccagtgcaaagaggactttgactcccaggagtccctcctgcagcacctgacagtgcattac

SEQ ID NO: 133419 - DNA, 120 bp, Artificial Sequence
  ENSG00000102935_18 (sequence is synthesized)
atgaccacgtcgacccactatgtgtgcgagagctgcgacaagcaattttcctcggtggatgacctgcagaagcacctgctggacatgcacacctttgtgttgtaccactgcaccctgtgt

SEQ ID NO: 133420 - DNA, 120 bp, Artificial Sequence
  ENSG00000102935_19 (sequence is synthesized)
caggaggtcttcgactccaaggtgtccatccaggtgcacctggcggtgaagcacagcaatgagaagaagatgtaccgctgcacggcctgcaactgggacttccgcaaggaggctgacctg

SEQ ID NO: 133421 - DNA, 120 bp, Artificial Sequence
  ENSG00000102935_20 (sequence is synthesized)
caggtgcacgtcaaacacagccacctgggcaacccggccaaggctcacaagtgcatcttctgtggggagaccttcagcaccgaggtggagctgcagtgccacatcaccacacacagcaag

SEQ ID NO: 133422 - DNA, 120 bp, Artificial Sequence
  ENSG00000102935_21 (sequence is synthesized)
aagtataactgtaagttctgcagcaaggccttccacgccatcatcctgctggagaagcacctgcgggagaagcactgtgtgtttgatgctgcgaccgagaacggcacggccaatggggta

SEQ ID NO: 133423 - DNA, 120 bp, Artificial Sequence
  ENSG00000102935_22 (sequence is synthesized)
cccccaatggccaccaagaaagctgagcctgctgacctgcagggcatgctgcttaagaaccctgaggcacctaacagccatgaggccagcgaggatgacgtggacgcgtcggagcccatg

SEQ ID NO: 133424 - DNA, 120 bp, Artificial Sequence
  ENSG00000102935_23 (sequence is synthesized)
tacggctgtgacatctgtggggcggcctacaccatggaggtgctgctgcagaatcaccggctgcgggaccacaatatccggccgggcgaggatgatggctcacgcaagaaggctgagttt

SEQ ID NO: 133425 - DNA, 120 bp, Artificial Sequence
  ENSG00000102935_24 (sequence is synthesized)
atcaagggcagtcacaagtgcaacgtttgttcacggactttcttctcggagaacgggctacgggagcacctgcagacgcaccggggccctgccaagcactacatgtgtcccatctgtggt

SEQ ID NO: 133426 - DNA, 120 bp, Artificial Sequence
  ENSG00000102935_25 (sequence is synthesized)
gagcgcttcccttcgctgctgacgctcaccgaacacaaggtgacccacagcaagagcctggacacgggcacctgtcgcatctgcaagatgcccctgcagagcgaggaggagtttattgag

SEQ ID NO: 133427 - DNA, 120 bp, Artificial Sequence
  ENSG00000102935_26 (sequence is synthesized)
cactgccagatgcaccctgacctgcgcaactcactcacgggcttccgctgtgtggtctgcatgcagacagtcacttccacgcttgagctcaagatccatggcaccttccacatgcagaag

SEQ ID NO: 133428 - DNA, 120 bp, Artificial Sequence
  ENSG00000102935_27 (sequence is synthesized)
ctggcgggcagctcagcggcgtcctcccccaatggccaggggctgcagaagctctacaagtgcgccctgtgcctcaaggagttccgcagcaagcaggacctggtgaagcttgacgtcaat

SEQ ID NO: 133429 - DNA, 120 bp, Artificial Sequence
  ENSG00000102935_28 (sequence is synthesized)
ctacggcctctgcgccggctgcatggcccgcagcgccaacggacaggtgggtggcctggccccgcccgagcccgccgaccggccctgtgccggcctccgttgccccgagtgcagtgtcaa

SEQ ID NO: 133430 - DNA, 120 bp, Artificial Sequence
  ENSG00000102935_29 (sequence is synthesized)
agtgtcaagtttgagagtgccgaagacctggagagccacatgcaggtggaccaccgtgacctcacgccggagaccagtgggccccggaaaggcacccagacatcgccagtgccccggaaa

SEQ ID NO: 133431 - DNA, 120 bp, Artificial Sequence
  ENSG00000102935_30 (sequence is synthesized)
aagacataccagtgcatcaagtgccagatgaccttcgagaacgagagagagatccaaatccacgttgccaaccacatgattgaggaaggcatcaaccacgagtgtaagctgtgcaaccag

SEQ ID NO: 133432 - DNA, 120 bp, Artificial Sequence
  ENSG00000102935_31 (sequence is synthesized)
atgttcgactccccggccaagctcctctgtcacctcattgagcacagcttcgagggcatgggcggcaccttcaaatgccccgtgtgtttcacagtcttcgtccaggccaacaagttgcag

SEQ ID NO: 133433 - DNA, 120 bp, Artificial Sequence
  ENSG00000102935_32 (sequence is synthesized)
cagcacatctttgccgtgcacgggcaggaggacaagatctacgactgctcacagtgccctcagaagttcttcttccagaccgagctgcagaaccacacgatgagccagcacgcacagtga

SEQ ID NO: 133434 - DNA, 120 bp, Artificial Sequence
  ENSG00000102935_33 (sequence is synthesized)
ttacatccaatcaaagtgtcatttgcaacccagatgtaaaactctaatgatttggccatgaggcgctgctattataagcagctggaaatgaatattaatggcagagattaaaagtattcc

SEQ ID NO: 133435 - DNA, 120 bp, Artificial Sequence
  ENSG00000102935_34 (sequence is synthesized)
atgctcagtattttttattgtcctgctacagctagtgtgcttttagactttccgccgcagactacatttctagagttagagaaacctgctttttaaggctattgtcctttgttccttcat

SEQ ID NO: 133436 - DNA, 120 bp, Artificial Sequence
  ENSG00000102935_35 (sequence is synthesized)
gtattatattgatagtttttaaaaaagaattagtgtgattttttttctttgcttcttttttttctttcttgtttttcttcccccccaccccccacccccttcggttaactactttttaat

SEQ ID NO: 133437 - DNA, 120 bp, Artificial Sequence
  ENSG00000102935_36 (sequence is synthesized)
tgcaattctaggtaattgtgcatcgtgatgtgattgcttggctattgtctgaatatttccttttaattttttaattaaagactaatgctttgattggatttgccagttcaccggacagtg

SEQ ID NO: 133438 - DNA, 120 bp, Artificial Sequence
  ENSG00000102935_37 (sequence is synthesized)
attaaaactatgtaatgaatataatcggtttcagtgcaactggatggtctgcttttaaatgtgacttaatctgactgcagtaactagtacagttcaataaagggaatccatgcgattagc

SEQ ID NO: 133439 - DNA, 120 bp, Artificial Sequence
  ENSG00000102935_38 (sequence is synthesized)
ttttttttttttttttttttttgcataactcggctcggccgagtggcctccggactccccgcgccgctgggaccgccgcttggatcgggagccccggactgccgcattgcaacaggcagg

SEQ ID NO: 133440 - DNA, 120 bp, Artificial Sequence
  ENSG00000102935_39 (sequence is synthesized)
cgggcctccccccgccttcgagcggcctcggccggcccgggctgcccccccaagggaggccgccccggacctgcggtccgctccccacagccgccaaccgggctgcaaaaaaaaaagttt

SEQ ID NO: 133441 - DNA, 120 bp, Artificial Sequence
  ENSG00000102935_40 (sequence is synthesized)
gcaaaaaaaaaagtttccaagagacaggcggaggagaagggggagaagggctgcccggagcggcggggggcggcggggggagccggctgcggagggcgacggagcgcccggagccccgga

SEQ ID NO: 133442 - DNA, 120 bp, Artificial Sequence
  ENSG00000102935_41 (sequence is synthesized)
accagtgggccggtgggaagcgcctctccagccctcgcctgccctgccgccgggtgctgggaacccgggctcaggttctggccctcttggcatcggccagtttgccctgggacgccctgg

SEQ ID NO: 133443 - DNA, 120 bp, Artificial Sequence
  ENSG00000102935_42 (sequence is synthesized)
atccttcccgtctgccgagcccgtcatgtgaggcccccgggggagaaggtgctggtgctctgggagggtgttccaggaggccccttgagctgggctggggagctgggcttcagagatggt

SEQ ID NO: 133444 - DNA, 120 bp, Artificial Sequence
  ENSG00000102935_43 (sequence is synthesized)
gaaaacttcctggagaaggatggattttaccctgtaaaagaagaaagacatggatgcataagaagagggttgaagagggggaggcctcagacttctcgctggcctgggattcctccgtga

SEQ ID NO: 133445 - DNA, 120 bp, Artificial Sequence
  ENSG00000102935_44 (sequence is synthesized)
gaagaaaatcaaaccctccggaatgtccccctgaagaggaccactgttgcagcggggaccctcctttcaggcatcctcattttatcatgtccctttgctttcttccccagtggccttttc

SEQ ID NO: 133446 - DNA, 120 bp, Artificial Sequence
  ENSG00000102935_45 (sequence is synthesized)
aaaggtcagagagaaatgcttagtcaaacccctacttgagtatcacaggtgactaattttgggatcgaagattaaggaggttttgttgcgtccttaaagaacttggaattggagtccagg

SEQ ID NO: 133447 - DNA, 120 bp, Artificial Sequence
  ENSG00000102935_46 (sequence is synthesized)
gttcctgtgggcttgcacacgcccttggggacctgcacacaatagaccctgctccccttggaaaagaatcgtagtaacctaatgcatgcagactggacaggctggcagtggccacaggag

SEQ ID NO: 133448 - DNA, 120 bp, Artificial Sequence
  ENSG00000102935_47 (sequence is synthesized)
tcaaagcagaagaccccttaatgatggaataccctgatcttcccactcttggatggggaaacagaggcccaagggtaacgtgcagctttcccaaggccacgcagcaggttggtcaccatg

SEQ ID NO: 133449 - DNA, 120 bp, Artificial Sequence
  ENSG00000102935_48 (sequence is synthesized)
ctgattgtgaagtcttcttggctttcccttcagggttggctttcccctttgttggatacaggcaggcaagtgggtagcccttcccttgccaggactccaggtggcacttgggttctgagg

SEQ ID NO: 133450 - DNA, 120 bp, Artificial Sequence
  ENSG00000102935_49 (sequence is synthesized)
cacggagatgtgtgactggggactgcagagcagagccaggtaggagccgcaggttcccagtcatagagatcagtaggatgtgagagcattgagactggtggcgggggccaggtctggagt

SEQ ID NO: 133451 - DNA, 120 bp, Artificial Sequence
  ENSG00000102935_50 (sequence is synthesized)
gaggcaggcaggggcctggggtacattatttcagggggcactcgctctcagggcccccctacacctgcaagtgctgggaatgggtgtcctcttgcattttacactctaggcaccttgctt

SEQ ID NO: 133452 - DNA, 120 bp, Artificial Sequence
  ENSG00000102935_51 (sequence is synthesized)
atttcacctactcctggccctgctggcctcccagggcccacccagcagccttggtctccaggcctcctccatgttacctcccacacctccatcatgctggtgctcagctgacttgccaat

SEQ ID NO: 133453 - DNA, 120 bp, Artificial Sequence
  ENSG00000102935_52 (sequence is synthesized)
cagaggccagaacttgcacggggaaacccttccttgctaacttttcacaaggggcaaggaaattggttattaccctctgcagagcggaaatgaaacaggcagacagattgcacctaatta

SEQ ID NO: 133454 - DNA, 120 bp, Artificial Sequence
  ENSG00000102935_53 (sequence is synthesized)
taatgtaatactaagtcacgggtgtggaatttggagcaattatacccatcatcttctagaagactcccatatcaaggggcttctggtgacctataagagttcccctttctttctgtcacc

SEQ ID NO: 133455 - DNA, 120 bp, Artificial Sequence
  ENSG00000102935_54 (sequence is synthesized)
tcatgtaatgttctcacgcgggtggggctttcagtttttcaaaaggcatcttacatatgtgaatcatagagcagaccctgccagtagtgggctgttgcctcctggaaactgaaggctgtg

SEQ ID NO: 133456 - DNA, 120 bp, Artificial Sequence
  ENSG00000102935_55 (sequence is synthesized)
aatgccaattttcagcctcctggagacctggcagttttgggggaagaccccagggtagacaccagtgttcctctaagtgtgcccacccgtggactggggcttggggcctggggctggggc

SEQ ID NO: 133457 - DNA, 120 bp, Artificial Sequence
  ENSG00000102935_56 (sequence is synthesized)
tatgtctgagtgaggctgccacacatccacagccaggcctaccttttgggcagtgctgggactgtcgatgggaccagtatgtcccggggcctgccacatctccgtctcagggccctctcc

SEQ ID NO: 133458 - DNA, 120 bp, Artificial Sequence
  ENSG00000102935_57 (sequence is synthesized)
agctctggatttatcccaaaccccatggagcccaggtgagccctcagtaactaccaatagaagattcgatttgacggttggtggcgtagggctaaattagtcactgcccccattaaaaat

SEQ ID NO: 133459 - DNA, 120 bp, Artificial Sequence
  ENSG00000102935_58 (sequence is synthesized)
acagcggggggtttaagagcttttcacgccatgtgggaatcagcagcgaagccggctgatgccttgggtaaggagagaggcggcctaggggaccgtgaggtaatgaggtttatggcggtg

SEQ ID NO: 133460 - DNA, 120 bp, Artificial Sequence
  ENSG00000102935_59 (sequence is synthesized)
acaaggcagccagggaaccccaccgactcccccctcaccccggccgcattgttctccggctggctctgtccctgctgctacggctgagagcccctcgtgactttgtgtggggagggggct

SEQ ID NO: 133461 - DNA, 120 bp, Artificial Sequence
  ENSG00000102935_60 (sequence is synthesized)
ggcagtggggaccctgaggcccttcctgggactggcattctttaccatcaggtggtattagggttggggagcagtgtagggttataaacctgtgcctcggagaactcactaaccccttcc

SEQ ID NO: 133462 - DNA, 120 bp, Artificial Sequence
  ENSG00000102935_61 (sequence is synthesized)
agaggaaaggtctggagctgggatgagacacttgcctttcaactgtgaggggccttagagggtctctgggaggcttgtatgaagtgatgcctgacaaagggctgcacacagagacctgta

SEQ ID NO: 133463 - DNA, 120 bp, Artificial Sequence
  ENSG00000102935_62 (sequence is synthesized)
agcagcatggtcatcaatgatggtgccaggcatcctgcaggagggcaccttttcagccaggagggcgcgatggaatcagcctctcatttggatttggctttggggagtgggcgaggtgac

SEQ ID NO: 133464 - DNA, 120 bp, Artificial Sequence
  ENSG00000102935_63 (sequence is synthesized)
tgaaagcctaaggttcattgctgctgtatttagatgtacaaattgtcagtttctagcggctctctgggcagaggaattttgcccaggctgggaaatggaccaggacccttgggccacagg

SEQ ID NO: 133465 - DNA, 120 bp, Artificial Sequence
  ENSG00000102935_64 (sequence is synthesized)
cccctgtcatggaacacctgcccagagtgcccagaagcaggcaggtaagggtttcagtctcagtggagaaactgtcatgggagaaatcttctcgagttccccagccttaaagaacgctcc

SEQ ID NO: 133466 - DNA, 120 bp, Artificial Sequence
  ENSG00000102935_65 (sequence is synthesized)
ttttaaattcacagttgtgtaatattgaacttttcacctgtttttcttccctcctaaggtgtgtgttcctagggatggaacctgtacctataaatattcagtaaataggaccaaaactca

SEQ ID NO: 133467 - DNA, 120 bp, Artificial Sequence
  ENSG00000102935_66 (sequence is synthesized)
aatccatcccttcctctactcatccattcagcaagtatttactgagctgcccccaggtgccaggcactgcacagggcactggggataaggagatgaccagcagatgtggtccctggcctc

SEQ ID NO: 133468 - DNA, 120 bp, Artificial Sequence
  ENSG00000102935_67 (sequence is synthesized)
atggaggccacagtggcacaggcaagcatgccagtaaatgcatagccacacctggtcatgagtgccgtgatggcaaagccagaagctgccagggattaatggagggacccgtgtatgaga

SEQ ID NO: 133469 - DNA, 120 bp, Artificial Sequence
  ENSG00000102935_68 (sequence is synthesized)
cacaggggtgcattaaggaaggccttgctgaggcaggggcttgagacctgaagaaataagggaggtgggcagtccaagagcagtgggaagagaacactgcaaatgcagaagccgtgagct

SEQ ID NO: 133470 - DNA, 120 bp, Artificial Sequence
  ENSG00000102935_69 (sequence is synthesized)
ggaaacgagccagaagtacccttagagagctgtattcctatggagtttcaattctaggtggcttaaaacaatcccagagaagttcagaatcttgtccaagatcataccattcaggataga

SEQ ID NO: 133471 - DNA, 120 bp, Artificial Sequence
  ENSG00000102935_70 (sequence is synthesized)
cttgcgactataacttgggtgcctcaccttccagcctggggtgtctgactccattgttaattttattataacaatcatgatgacaacgatgaataaagtgaaattgtactgtacaggaaa

SEQ ID NO: 133472 - DNA, 120 bp, Artificial Sequence
  ENSG00000102935_71 (sequence is synthesized)
agtgagattaaagaattaataatgtaattttacagttaatgtcattttattgtggtgtcttgggtaccctgtatccgccttttaaatacaattaaaaataaaagcaacagctttccggca

SEQ ID NO: 133473 - DNA, 120 bp, Artificial Sequence
  ENSG00000102962_0 (sequence is synthesized)
gcagacacctgggctgagacatacaggacagagcatggatcgcctacagactgcactcctggttgtcctcgtcctccttgctgtggcgcttcaagcaactgaggcaggcccctacggcgc

SEQ ID NO: 133474 - DNA, 120 bp, Artificial Sequence
  ENSG00000102962_1 (sequence is synthesized)
caacatggaagacagcgtctgctgccgtgattacgtccgttaccgtctgcccctgcgcgtggtgaaacacttctactggacctcagactcctgcccgaggcctggcgtggtgttgctaac

SEQ ID NO: 133475 - DNA, 120 bp, Artificial Sequence
  ENSG00000102962_2 (sequence is synthesized)
cttcagggataaggagatctgtgccgatcccagagtgccctgggtgaagatgattctcaataagctgagccaatgaagagcctactctgatgaccgtggccttggctcctccaggaaggc

SEQ ID NO: 133476 - DNA, 120 bp, Artificial Sequence
  ENSG00000102962_3 (sequence is synthesized)
tcaggagccctacctccctgccattatagctgctccccgccagaagcctgtgccaactctctgcattccctgatctccatccctgtggctgtcacccttggtcacctccgtgctgtcact

SEQ ID NO: 133477 - DNA, 120 bp, Artificial Sequence
  ENSG00000102962_4 (sequence is synthesized)
gccatctcccccctgacccctctaacccatcctctgcctccctccctgcagtcagagggtcctgttcccatcagcgattcccctgcttaaacccttccatgactccccactgccctaagc

SEQ ID NO: 133478 - DNA, 120 bp, Artificial Sequence
  ENSG00000102962_5 (sequence is synthesized)
tgaggtcagtctcccaagcctggcatgtggccctctggatctgggttccatctctgtctccagcctgcccacttcccttcatgaatgttgggttctagctccctgttctccaaacccata

SEQ ID NO: 133479 - DNA, 120 bp, Artificial Sequence
  ENSG00000102962_6 (sequence is synthesized)
ctacacatcccacttctgggtctttgcctgggatgttgctgacacccagaaagtcccaccacctgcacatgtgtagccccaccagccctccaaggcattgctcgcccaagcagctggtaa

SEQ ID NO: 133480 - DNA, 120 bp, Artificial Sequence
  ENSG00000102962_7 (sequence is synthesized)
ttccatttcatgtattagatgtcccctggccctctgtcccctcttaataaccctagtcacagtctccgcagattcttgggatttgggggttttctcccccacctctccactagttggacc

SEQ ID NO: 133481 - DNA, 120 bp, Artificial Sequence
  ENSG00000102962_8 (sequence is synthesized)
aaggtttctagctaagttactctagtctccaagcctctagcatagagcactgcagacaggccctggctcagaatcagagcccagaaagtggctgcagacaaaatcaataaaactaatgtc

SEQ ID NO: 133482 - DNA, 120 bp, Artificial Sequence
  ENSG00000102962_9 (sequence is synthesized)
cctcccctctccctgccaaaaggcagttacatatcaatacagagactcaaggtcactagaaatgggccagctgggtcaatgtgaagccccaaatttgcccagattcacctttcttccccc

SEQ ID NO: 133483 - DNA, 74 bp, Artificial Sequence
  ENSG00000102962_10 (sequence is synthesized)
cttcccccactccgctggagtgcaatggtgtggtcttggcttattgaagcctctgcctcctgggttcaagtgat

SEQ ID NO: 133484 - DNA, 70 bp, Artificial Sequence
  ENSG00000102962_11 (sequence is synthesized)
cttccctctccccaccccccccccaacttttttttttttttatggcagggtctcactctgtcgcccaggc

SEQ ID NO: 133485 - DNA, 70 bp, Artificial Sequence
  ENSG00000102962_12 (sequence is synthesized)
gcgtgatctcggctcactacaacctcgacctcctgggttcaagcgattggctggctaatttttgtatttt

SEQ ID NO: 133486 - DNA, 88 bp, Artificial Sequence
  ENSG00000102962_13 (sequence is synthesized)
gacctcaagtgatccaccttccttgtgatcacacccagcctccccctttttttcctaataggagactcctgtacctttcttcgtttta

SEQ ID NO: 133487 - DNA, 120 bp, Artificial Sequence
  ENSG00000102962_14 (sequence is synthesized)
tttttcctaataggagactcctgtacctttcttcgttttacctatgtgtcgtgtctgcttacatttccttctcccctcaggctttttttgggtggtcctccaacctccaatacccaggcc

SEQ ID NO: 133488 - DNA, 120 bp, Artificial Sequence
  ENSG00000102962_15 (sequence is synthesized)
tggcctcttcagagtaccccccattccactttccctgcctccttccttaaatagctgacaatcaaattcatgctatggtgtgaaagactacctttgacttggtattataagctggagtta

SEQ ID NO: 133489 - DNA, 120 bp, Artificial Sequence
  ENSG00000102962_16 (sequence is synthesized)
tatatgtatttgaaaacagagtaaatacttaagaggccaaatagatgaatggaagaattttaggaactgtgagagggggacaaggtggagctttcctggccctgggaggaagctggctgt

SEQ ID NO: 133490 - DNA, 120 bp, Artificial Sequence
  ENSG00000102962_17 (sequence is synthesized)
ggtagcgtagcgctctctctctctgtctgtggcaggaggcaaagagtagggtgtaattgagtgaaggaatcctgggtagagaccattctcaggtggttgggccaggctaaagactgggat

SEQ ID NO: 133491 - DNA, 67 bp, Artificial Sequence
  ENSG00000102962_18 (sequence is synthesized)
gaccattctcaggtggttgggccaggctaaagactgggatttgggtctatctatgcctttctggctg

SEQ ID NO: 133492 - DNA, 120 bp, Artificial Sequence
  ENSG00000102962_19 (sequence is synthesized)
ttacaggcgtgagtcactgcgcctggcttcctcttcctcttgagaaatattcttttcatacagcaagtatgggacagcagtgtcccaggtaaaggacataaatgttacaagtgtctggtc

SEQ ID NO: 133493 - DNA, 120 bp, Artificial Sequence
  ENSG00000102962_20 (sequence is synthesized)
ggtcctttctgagggaggctggtgccgctctgcagggtatttgaacctgtggaattggaggaggccatttcactccctgaacccagcctgacaaatcacagtgagaatgttcaccttata

SEQ ID NO: 133494 - DNA, 120 bp, Artificial Sequence
  ENSG00000102962_21 (sequence is synthesized)
ggcttgctgtggggctcaggttgaaagtgtggggagtgacactgcctaggcatccagctcagtgtcatccagggcctgtgtccctcccgaacccagggtcaacctgcctaccacaggcac

SEQ ID NO: 133495 - DNA, 120 bp, Artificial Sequence
  ENSG00000102962_22 (sequence is synthesized)
tagaaggacgaatctgcctactgcccatgaacggggccctcaagcgtcctgggatctccttctccctcctgtcctgtccttgcccctcaggactgctggaaaataaatcctttaaaatag

SEQ ID NO: 133496 - DNA, 120 bp, Artificial Sequence
  ENSG00000102967_0 (sequence is synthesized)
gggcttaatgacggaaggagcatggcgtggagacacctgaaaaagcgggcccaggatgctgtgatcatcctggggggaggaggacttctcttcgcctcctacctgatggccacgggagat

SEQ ID NO: 133497 - DNA, 120 bp, Artificial Sequence
  ENSG00000102967_1 (sequence is synthesized)
gagcgtttctatgctgaacacctgatgccgactctgcaggggctgctggacccggagtcagcccacagactggctgttcgcttcacctccctggggctccttccacgggccagatttcaa

SEQ ID NO: 133498 - DNA, 120 bp, Artificial Sequence
  ENSG00000102967_2 (sequence is synthesized)
gactctgacatgctggaagtgagagttctgggccataaattccgaaatccagtaggaattgctgcaggatttgacaagcatggggaagccgtggacggactttataagatgggctttggt

SEQ ID NO: 133499 - DNA, 120 bp, Artificial Sequence
  ENSG00000102967_3 (sequence is synthesized)
tttgttgagataggaagtgtgactccaaaacctcaggaaggaaaccctagacccagagtcttccgcctccctgaggaccaagctgtcattaacaggtatggatttaacagtcacgggctt

SEQ ID NO: 133500 - DNA, 120 bp, Artificial Sequence
  ENSG00000102967_4 (sequence is synthesized)
tcagtggtggaacacaggttacgggccagacagcagaagcaggccaagctcacagaagatggactgcctctgggggtcaacttggggaagaacaagacctcagtggacgccgcggaggac

SEQ ID NO: 133501 - DNA, 120 bp, Artificial Sequence
  ENSG00000102967_5 (sequence is synthesized)
tacgcagaaggggtgcgcgtactgggccccctggccgactacctggtggtgaatgtgtccagccccaacactgccgggctgcggagccttcagggaaaggccgagctgcgccgcctgctg

SEQ ID NO: 133502 - DNA, 120 bp, Artificial Sequence
  ENSG00000102967_6 (sequence is synthesized)
accaaggtgctgcaggagagggatggcttgcggagagtgcacaggccggcagtcctggtgaagatcgctcctgacctcaccagccaggataaggaggacattgccagtgtggtcaaagag

SEQ ID NO: 133503 - DNA, 120 bp, Artificial Sequence
  ENSG00000102967_7 (sequence is synthesized)
ttgggcatcgatgggctgattgttacgaacaccaccgtgagtcgccctgcgggcctccagggtgccctgcgctctgaaacaggagggctgagtgggaagcccctccgggatttatcaact

SEQ ID NO: 133504 - DNA, 120 bp, Artificial Sequence
  ENSG00000102967_8 (sequence is synthesized)
caaaccattcgggagatgtatgcactcacccaaggccgagttcccataattggggttggtggtgtgagcagcgggcaggacgcgctggagaagatccgggcaggggcctccctggtgcag

SEQ ID NO: 133505 - DNA, 120 bp, Artificial Sequence
  ENSG00000102967_9 (sequence is synthesized)
ctgtacacggccctcaccttctgggggccacccgttgtgggcaaagtcaagcgggaactggaggcccttctgaaagagcagggctttggcggagtcacagatgccattggagcagatcat

SEQ ID NO: 133506 - DNA, 120 bp, Artificial Sequence
  ENSG00000102967_10 (sequence is synthesized)
cggaggtgaggacagcgtctgacgggaagcctgatctggaaccttcccaaggactcaggcaagcctttgtggctggatcatgagaggagggactccatcttgagccatgtcccccagcca

SEQ ID NO: 133507 - DNA, 120 bp, Artificial Sequence
  ENSG00000102967_11 (sequence is synthesized)
tggcatggctgcactgtaaacgccaatcggggggtcaccaggatcaaccgcaggctttcttcagtcccttggtcagaccataaactgcatttttgattctttgtggattcaaaccctagg

SEQ ID NO: 133508 - DNA, 120 bp, Artificial Sequence
  ENSG00000102967_12 (sequence is synthesized)
atccatcagtcttgcaaggacattgaatattaggaggaaaaagtcatggaaaaaataaagccatttagaacctgggtttcaacgctagccctttctggtttgccataggccctgccaaga

SEQ ID NO: 133509 - DNA, 120 bp, Artificial Sequence
  ENSG00000102967_13 (sequence is synthesized)
tactgcaggtccatccaggcctctgctatctgcatctgcagtgggcttcccaggaacttgactgtctttcatttgatctttatttttgtttatttaatattttaaactttattttaaaaa

SEQ ID NO: 133510 - DNA, 74 bp, Artificial Sequence
  ENSG00000102967_14 (sequence is synthesized)
tgaggccaggagttggagaccagccaggccaatattgtggcaggcacttttaatcccagctactcgggaggctg

SEQ ID NO: 133511 - DNA, 120 bp, Artificial Sequence
  ENSG00000102967_15 (sequence is synthesized)
gccaagattgcaccagtgcactccagcttgggcgacagatcaagactctgtcacacacaaaacaaacaaacaaattttcccgtttctctctgtccctttctctataacatggataaaata

SEQ ID NO: 133512 - DNA, 120 bp, Artificial Sequence
  ENSG00000102967_16 (sequence is synthesized)
aatattcacgtcttatgtatttattattgctgagtcattggtgccttattcttcagtgtttcagtctgtatctcctaagcatcctgatgttagttttttgactataaaattgacctgcat

SEQ ID NO: 133513 - DNA, 120 bp, Artificial Sequence
  ENSG00000102967_17 (sequence is synthesized)
tctttactagcaattcaaacggtacagcactcttgaagtgtaaacattcctgttcctcctcaccccactctgcagacatgcctttctgtctgtcctcccagacttttcccctgcataaag

SEQ ID NO: 133514 - DNA, 120 bp, Artificial Sequence
  ENSG00000102967_18 (sequence is synthesized)
caaatgacatcatcccacaaatagaattctgccatttactttcttcactattcttatgtggcatggttcatgctgggcctcggtcttttgagtggggtctgtttacccagtcccctgttg

SEQ ID NO: 133515 - DNA, 120 bp, Artificial Sequence
  ENSG00000102967_19 (sequence is synthesized)
gtgatcacatcgctaacttccggcgttttcctatcaccatcggtgcctccgtgaacaccttgtgaatgtgcctgtgccttcgttctggtgtcggtgcagagcagggtccaaggggcgtga

SEQ ID NO: 133516 - DNA, 120 bp, Artificial Sequence
  ENSG00000102967_20 (sequence is synthesized)
cagctgggctgaggggctggcatgtttcacattctgatagatagagccaagttgctcctatcaggttttcaagctgcccatttcccaccgtggagacagcaacagaggggacatccccag

SEQ ID NO: 133517 - DNA, 120 bp, Artificial Sequence
  ENSG00000102967_21 (sequence is synthesized)
ctcctctggctctgcctgttcaaagctaccctgtgaggcctgaagacagagctgccctgaaggcagctcatgtccactgaacactgactgtgggctggatgctgtgccaagggcttgacg

SEQ ID NO: 133518 - DNA, 120 bp, Artificial Sequence
  ENSG00000102967_22 (sequence is synthesized)
tttcctctttaaggatgaggaaacgggcagagaagcggctgattgtccagtccccctgcgtggaggctgcttggctgggctcgagcccagcggtgtggtcatagagcatgttgtgctgaa

SEQ ID NO: 133519 - DNA, 120 bp, Artificial Sequence
  ENSG00000102967_23 (sequence is synthesized)
tggctctgccatggaccaagccttggctgctctaaaagccggctcattgccttctgcttctccggattcgttccttactccaggaagagcagtgcactgaaggagaaatgggaatgggca

SEQ ID NO: 133520 - DNA, 120 bp, Artificial Sequence
  ENSG00000102967_24 (sequence is synthesized)
aaaggaaccacatgctggccagacccctgcggggtcactttcctcagcctgggctccgacatgccacgtcaggtgccagcgcacatactctggacaccctcctcattctctctgggcttt

SEQ ID NO: 133521 - DNA, 120 bp, Artificial Sequence
  ENSG00000102967_25 (sequence is synthesized)
gatgctctctgtgagtcatctgccctccctttcccatgctacaggcatctaccttgctctgtcccacctaatagcttcaggactgaacaattcaggaaagggaagggaaggggtggagga

SEQ ID NO: 133522 - DNA, 85 bp, Artificial Sequence
  ENSG00000102967_26 (sequence is synthesized)
gactgaacaattcaggaaagggaagggaaggggtggaggagaagagggaagagtcggcccttggaaggttctccacggaagactg

SEQ ID NO: 133523 - DNA, 69 bp, Artificial Sequence
  ENSG00000102967_27 (sequence is synthesized)
gcctggctcgagagactgacattctgtctcagcacagctggaagaggctgcttgagcaccaggataagg

SEQ ID NO: 133524 - DNA, 120 bp, Artificial Sequence
  ENSG00000102967_28 (sequence is synthesized)
cagcacagctggaagaggctgcttgagcaccaggataaggagttgtcttgcattcaggggccatgtggtgtgcggatacctatttttctttcttttcttttttttttctgagacagagtc

SEQ ID NO: 133525 - DNA, 78 bp, Artificial Sequence
  ENSG00000102967_29 (sequence is synthesized)
agggtttcaccgtgttagccaggatggttcgatctcctgacctcatgatctggcgcgtgcctggctaatttttgtatt

SEQ ID NO: 133526 - DNA, 120 bp, Artificial Sequence
  ENSG00000102967_30 (sequence is synthesized)
cgcacccggcccaaggatacctatttttcttaatgctggaagccacactcagacaccagagcagctctcaatgctgggaatcctgggagactgatgatgaccgcgtctccctctgggacc

SEQ ID NO: 133527 - DNA, 120 bp, Artificial Sequence
  ENSG00000102967_31 (sequence is synthesized)
aaggatggtggaagggtgtgcagaattccaaatgttatttacatcactcactcttgtgtggagtgcataattgtctttgcttgccaatttcatatcagttaaatataagcagtaagctaa

SEQ ID NO: 133528 - DNA, 120 bp, Artificial Sequence
  ENSG00000102967_32 (sequence is synthesized)
gtgcacccaaccagaacctgggggtggtgccgggccttccccgctgcgcggaggcgtcctctcaacccttctgcccggcgactggtgggttggcggctaaggggcggagacaagaggggc

SEQ ID NO: 133529 - DNA, 120 bp, Artificial Sequence
  ENSG00000102967_33 (sequence is synthesized)
gggtgcacttggaatattcagatgccctggcctggtgccagaccagtttcaccgccacatctgagagcaggacctgaaagctgccaggggcctttgtggtgcagctggagctgagaacca

SEQ ID NO: 133530 - DNA, 120 bp, Artificial Sequence
  ENSG00000102967_34 (sequence is synthesized)
cattaacaggtggggatcaatatcttcagaattggccaggcaaaatatatttgcttaacattcagctgctacagataactgcaggtgctgggatgatggtacttggtgaatcctataggt

SEQ ID NO: 133531 - DNA, 120 bp, Artificial Sequence
  ENSG00000102967_35 (sequence is synthesized)
gcagaagcaggccaagctcacagaagagagcagggctttggcggagtcacagatgccattggagcagatcatcggaggtgaggacagcgtctgacgggaagcctgatctggaaccttccc

SEQ ID NO: 133532 - DNA, 120 bp, Artificial Sequence
  ENSG00000102967_36 (sequence is synthesized)
ggccagacagcagaagcaggccaagctcacagaagagtcttgctctgctccttaggctggagtgcagtggcgcgatcacggttcattggagcctcaatcctacttcagcctcccgagcag

SEQ ID NO: 133533 - DNA, 120 bp, Artificial Sequence
  ENSG00000102967_37 (sequence is synthesized)
ctaggactacagatggactgcctctgggggtcaacttggggaagaacaagacctcagtggacgccgcggaggactacgcagaaggggtgcgcgtactgggccccctggccgactacctgg

SEQ ID NO: 133534 - DNA, 120 bp, Artificial Sequence
  ENSG00000102967_38 (sequence is synthesized)
gagcagtgtggatgggggaccagggaccggggagggcgagaacggagagtcaggccgggcgaggcatggaccgaaggcggctccgggagtgtgggcccccctgggacgtgtgcgtgtttc

SEQ ID NO: 133535 - DNA, 120 bp, Artificial Sequence
  ENSG00000102967_39 (sequence is synthesized)
cggggtctcctgcaaatgctcgtgcgtgtgcatttgcacgtggactcggtcaggcgtgtgcagacagcgcctgcaggtctgggtgggtgctgatctgagtgtctgcgcctgggccatgtt

SEQ ID NO: 133536 - DNA, 120 bp, Artificial Sequence
  ENSG00000102967_40 (sequence is synthesized)
tttgagcctggcacaggggtgcttagtgaacacatgaccgcctagcgttgtgtgccggatccaacggggaatgaaactagagtaggacatgctcccaacccttttagaagcgggcccagg

SEQ ID NO: 133537 - DNA, 120 bp, Artificial Sequence
  ENSG00000102967_41 (sequence is synthesized)
gtgtgtagtaaacacttaatgaatgggtgaagttatgaagtcatcagatatgtgtgccagtgtgtctgttattatggatgcttttggctctaacaaagtggcttaaacaacaggcacatt

SEQ ID NO: 133538 - DNA, 120 bp, Artificial Sequence
  ENSG00000102967_42 (sequence is synthesized)
tgatattattttcttctcataacaggtgcaatgggcaggtccagggttggttgagcaccagggcagtgttgagactctggtccaacttctctgggcgttttctttttgcttgtcagagag

SEQ ID NO: 133539 - DNA, 120 bp, Artificial Sequence
  ENSG00000102967_43 (sequence is synthesized)
cgacctcggctgcaagtattatgttcttacacggacgcccaagagcagaaaggaaaaagggcagggatgttctcagaggctcccagtaggtctcacttgtgtctcagtgtctacacttgg

SEQ ID NO: 133540 - DNA, 120 bp, Artificial Sequence
  ENSG00000102967_44 (sequence is synthesized)
catacacttacgcttcccttgccagcaaggctgggaaaggagtcattagcatttttaccctgtatcagggcaggtgggtttcactggcaaagaggaagaggaaggggactggccactagg

SEQ ID NO: 133541 - DNA, 120 bp, Artificial Sequence
  ENSG00000102967_45 (sequence is synthesized)
tcaaaacccacagtggggctggggatacagggatgaaagagagatgaggctcctgccttcagggagtgtctagtgacagtgacagagggatgagagaagtatgagatgttgctcaccctc

SEQ ID NO: 133542 - DNA, 120 bp, Artificial Sequence
  ENSG00000102967_46 (sequence is synthesized)
aagaagattgtaacctagggaccttaagcatatatgtatgtatctatcccaagccaggagaaaggtggggccaaagctctgtatgaaggccagggggatgagggatcctttgcagctgcg

SEQ ID NO: 133543 - DNA, 120 bp, Artificial Sequence
  ENSG00000102967_47 (sequence is synthesized)
agctctgtgcaggaggagagggagcgtttgctctgagctaggaagagaggtgattttcagacagaaagcctagagagatggagtggctgcaggggcttcaggaggctgtttgggagccca

SEQ ID NO: 133544 - DNA, 120 bp, Artificial Sequence
  ENSG00000102967_48 (sequence is synthesized)
aaggtggcaagtgagtgtgcaattctcagagagtggctgggtaaggagtggggatccagcaggtctggggcagctgctgctgagtctgggctgtttccagtgctagctggctgagcattt

SEQ ID NO: 133545 - DNA, 120 bp, Artificial Sequence
  ENSG00000102967_49 (sequence is synthesized)
gcaaattttaatctttccctgggtattggatggtgttctggcaagttctctaggagtcccagtggtgtttagaccctggaagtgtaagaactgactgtgatttttttttttctcttgttt

SEQ ID NO: 133546 - DNA, 120 bp, Artificial Sequence
  ENSG00000102967_50 (sequence is synthesized)
gaaaaagtcctaagtgtatgggaagtggctatggtgccgtctcactctgcccctcccgtgtgcttgtgctctgcaggtatggatttaacagtcacgggctttcagtggtggaacacaggt

SEQ ID NO: 133547 - DNA, 120 bp, Artificial Sequence
  ENSG00000102970_0 (sequence is synthesized)
gctcagagagaagtgactttgagctcacagtgtcaccgcctgctgatgggagagctgaattcaaaaccagggtgtctccctgagcagagggacctgcacacagagactccctcctgggct

SEQ ID NO: 133548 - DNA, 120 bp, Artificial Sequence
  ENSG00000102970_1 (sequence is synthesized)
cctggcaccatggccccactgaagatgctggccctggtcaccctcctcctgggggcttctctgcagcacatccacgcagctcgagggaccaatgtgggccgggagtgctgcctggagtac

SEQ ID NO: 133549 - DNA, 120 bp, Artificial Sequence
  ENSG00000102970_2 (sequence is synthesized)
cccttagaaagctgaagacgtggtaccagacatctgaggactgctccagggatgccatcgtttttgtaactgtgcagggcagggccatctgttcggaccccaacaacaagagagtgaaga

SEQ ID NO: 133550 - DNA, 120 bp, Artificial Sequence
  ENSG00000102970_3 (sequence is synthesized)
atgcagttaaatacctgcaaagccttgagaggtcttgaagcctcctcaccccagactcctgactgtctcccgggactacctgggacctccaccgttggtgttcaccgcccccaccctgag

SEQ ID NO: 133551 - DNA, 120 bp, Artificial Sequence
  ENSG00000102970_4 (sequence is synthesized)
cgcctgggtccaggggaggccttccagggacgaagaagagccacagtgagggagatcccatccccttgtctgaactggagccatgggcacaaagggcccagattaaagtctttatcctca

SEQ ID NO: 133552 - DNA, 120 bp, Artificial Sequence
  ENSG00000102974_0 (sequence is synthesized)
gacgcaggcgcactgcaccgcgccgccgccattttgtgtctgagcctgtggagcgattaaaccgtgcgcggagctgcttctttggcggcagcggcggcggcggtggccggtgcggacgcg

SEQ ID NO: 133553 - DNA, 120 bp, Artificial Sequence
  ENSG00000102974_1 (sequence is synthesized)
cggagctcgccggagacgccgggtggccggagccgtggagcggcggcggagcgggcgccgcggggggtgtggcgcggagaatgattacggacctgaagccaaagaacaagatgcgctagt

SEQ ID NO: 133554 - DNA, 120 bp, Artificial Sequence
  ENSG00000102974_2 (sequence is synthesized)
ggacagattgctgaccaggggcttgagagctgggttctattttccctcctcaaactgactttgcagccacggagaggcaggggaaatggaaggtgatgcagtcgaagccattgtggagga

SEQ ID NO: 133555 - DNA, 120 bp, Artificial Sequence
  ENSG00000102974_3 (sequence is synthesized)
gtccgaaacttttattaaaggaaaggagagaaagacttaccagagacgccgggaagggggccaggaagaagatgcctgccacttaccccagaaccagacggatgggggtgaggtggtcca

SEQ ID NO: 133556 - DNA, 120 bp, Artificial Sequence
  ENSG00000102974_4 (sequence is synthesized)
ggatgtcaacagcagtgtacagatggtgatgatggaacagctggaccccacccttcttcagatgaagactgaagtaatggagggcacagtggctccagaagcagaggctgctgtggacga

SEQ ID NO: 133557 - DNA, 120 bp, Artificial Sequence
  ENSG00000102974_5 (sequence is synthesized)
tacccagattataactttacaggttgtaaatatggaggaacagcccataaacataggagaacttcagcttgttcaagtacctgttcctgtgactgtacctgttgctaccacttcagtaga

SEQ ID NO: 133558 - DNA, 120 bp, Artificial Sequence
  ENSG00000102974_6 (sequence is synthesized)
agaacttcagggggcttatgaaaatgaagtgtctaaagagggccttgcggaaagtgaacccatgatatgccacaccctacctttgcctgaagggtttcaggtggttaaagtgggggccaa

SEQ ID NO: 133559 - DNA, 120 bp, Artificial Sequence
  ENSG00000102974_7 (sequence is synthesized)
tggagaggtggagacactagaacaaggggaacttccaccccaggaagatcctagttggcaaaaagacccagactatcagccaccagccaaaaaaacaaagaaaaccaaaaagagcaaact

SEQ ID NO: 133560 - DNA, 120 bp, Artificial Sequence
  ENSG00000102974_8 (sequence is synthesized)
gcgttatacagaggagggcaaagatgtagatgtgtctgtctacgattttgaggaagaacagcaggagggtctgctatcagaggttaatgcagagaaagtggttggtaatatgaagcctcc

SEQ ID NO: 133561 - DNA, 120 bp, Artificial Sequence
  ENSG00000102974_9 (sequence is synthesized)
aaagccaacaaaaattaaaaagaaaggtgtaaagaagacattccagtgtgagctttgcagttacacgtgtccacggcgttcaaatttggatcgtcacatgaaaagccacactgatgagag

SEQ ID NO: 133562 - DNA, 120 bp, Artificial Sequence
  ENSG00000102974_10 (sequence is synthesized)
accacacaagtgccatctctgtggcagggcattcagaacagtcaccctcctgaggaatcaccttaacacacacacaggtactcgtcctcacaagtgcccagactgcgacatggcctttgt

SEQ ID NO: 133563 - DNA, 120 bp, Artificial Sequence
  ENSG00000102974_11 (sequence is synthesized)
gaccagtggagaattggttcggcatcgtcgttacaaacacacccacgagaagccattcaagtgttccatgtgcgattacgccagtgtagaagtcagcaaattaaaacgtcacattcgctc

SEQ ID NO: 133564 - DNA, 120 bp, Artificial Sequence
  ENSG00000102974_12 (sequence is synthesized)
tcatactggagagcgtccgtttcagtgcagtttgtgcagttatgccagcagggacacatacaagctgaaaaggcacatgagaacccattcaggggaaaagccttatgaatgttatatttg

SEQ ID NO: 133565 - DNA, 120 bp, Artificial Sequence
  ENSG00000102974_13 (sequence is synthesized)
tcatgctcggtttacccaaagtggtaccatgaagatgcacattttacagaagcacacagaaaatgtggccaaatttcactgtccccactgtgacacagtcatagcccgaaaaagtgattt

SEQ ID NO: 133566 - DNA, 120 bp, Artificial Sequence
  ENSG00000102974_14 (sequence is synthesized)
gggtgtccacttgcgaaagcagcattcctatattgagcaaggcaagaaatgccgttactgtgatgctgtgtttcatgagcgctatgccctcatccagcatcagaagtcacacaagaatga

SEQ ID NO: 133567 - DNA, 120 bp, Artificial Sequence
  ENSG00000102974_15 (sequence is synthesized)
gcctgcagccactgcgataagaccttccgccagaagcagcttctcgacatgcacttcaagcgctatcacgaccccaacttcgtccctgcggcttttgtctgttctaagtgtgggaaaaca

SEQ ID NO: 133568 - DNA, 120 bp, Artificial Sequence
  ENSG00000102974_16 (sequence is synthesized)
tttacacgtcggaataccatggcaagacatgctgataattgtgctggcccagatggcgtagagggggaaaatggaggagaaacgaagaagagtaaacgtggaagaaaaagaaagatgcgc

SEQ ID NO: 133569 - DNA, 120 bp, Artificial Sequence
  ENSG00000102974_17 (sequence is synthesized)
tctaagaaagaagattcctctgacagtgaaaatgctgaaccagatctggacgacaatgaggatgaggaggagcctgccgtagaaattgaacctgagccagagcctcagcctgtgacccca

SEQ ID NO: 133570 - DNA, 120 bp, Artificial Sequence
  ENSG00000102974_18 (sequence is synthesized)
gccccaccacccgccaagaagcggagaggacgaccccctggcagaaccaaccagcccaaacagaaccagccaacagctatcattcaggttgaagaccagaatacaggtgcaattgagaac

SEQ ID NO: 133571 - DNA, 120 bp, Artificial Sequence
  ENSG00000102974_19 (sequence is synthesized)
attatagttgaagtaaaaaaagagccagatgctgagcccgcagagggagaggaagaggaggcccagccagctgccacagatgcccccaacggagacctcacgcccgagatgatcctcagc

SEQ ID NO: 133572 - DNA, 120 bp, Artificial Sequence
  ENSG00000102974_20 (sequence is synthesized)
atgatggaccggtgatggcggagccttgtgcgtcgccaggacttctctgggctgtgtttaaacggcccgcatcttaatttttctcccttctttctttttttggctttgggaaaagcatca

SEQ ID NO: 133573 - DNA, 120 bp, Artificial Sequence
  ENSG00000102974_21 (sequence is synthesized)
ttttaccaaacataccgagaacgaaaacttcaaggatgatgttagaaaaaaatgtgatttaactagaacttgctgtctgatgttagcaaatcatggaatgttctgagtccctgagggttt

SEQ ID NO: 133574 - DNA, 120 bp, Artificial Sequence
  ENSG00000102974_22 (sequence is synthesized)
actgtgaagtgctgaggacagtgttgacaactaactcgttttcctagatggaaacggagacattgacccctccctccatgtggtaaaccactccagaatggccaccaggcttcccagagt

SEQ ID NO: 133575 - DNA, 120 bp, Artificial Sequence
  ENSG00000102974_23 (sequence is synthesized)
tctatggtcttcttcccaagagagtttttaattgtaaatgcatacttgggaaggacttagagttttaaactgttttttgcttttgcttttccctgactccctttgcttggagtcagctgc

SEQ ID NO: 133576 - DNA, 120 bp, Artificial Sequence
  ENSG00000102974_24 (sequence is synthesized)
acaccagtagtatggcatgctacgatcaggttctgtcctgaaagctttgcctctttcttggcaaagtttctggtatggtcaagcttgtaaataactttttttacattttaatcttttcca

SEQ ID NO: 133577 - DNA, 120 bp, Artificial Sequence
  ENSG00000102974_25 (sequence is synthesized)
ttaattaagaggttgaaaagaagtgcagtgtaagaaaacccagcattttaattacttgcaaattaagttaccacagactctgtagtgtgtaaatgttgacaaggaattggatcacaatca

SEQ ID NO: 133578 - DNA, 120 bp, Artificial Sequence
  ENSG00000102974_26 (sequence is synthesized)
tgtagcagaatggcacccagaccactgcccaccagtgacggacatgcacgtggcagatcatgatttccagcccacggagccagcatttgaaccttgtataattaactttcagttatgatt

SEQ ID NO: 133579 - DNA, 120 bp, Artificial Sequence
  ENSG00000102974_27 (sequence is synthesized)
tcccatcgacattttctttgccctgtttgtagctgattgttgtgttttataaatcttctgttaaggcagaagggtgattatgagtggttcacagcagcccttataagctgggccagaaaa

SEQ ID NO: 133580 - DNA, 120 bp, Artificial Sequence
  ENSG00000102974_28 (sequence is synthesized)
tttcactaggtcagtaatttaaaccttggatcttcaaaaaataaaataatgtgaagcaaaaccaactaaaaagtgattcttgcacatgaactgtcacatgtttaaaaatgtgttttttag

SEQ ID NO: 133581 - DNA, 120 bp, Artificial Sequence
  ENSG00000102974_29 (sequence is synthesized)
agagcctcagtcttactgatttcaaacacttttttcttctgtgtattgcttttaagagagccatcagttagctatcagactctaggttgatgcattttgtacttagctgtactgtgtgat

SEQ ID NO: 133582 - DNA, 120 bp, Artificial Sequence
  ENSG00000102974_30 (sequence is synthesized)
atttttcattattttaggacgccaacatgagacctgtaataaaatatgtaatggggttgaaagctggggaggaggatctactgctgtacagctaataaatcataacggattaacaagtgc

SEQ ID NO: 133583 - DNA, 120 bp, Artificial Sequence
  ENSG00000102974_31 (sequence is synthesized)
tggaatgcagtggcacaatctcagctcagtacagcctcaaactcctgggtgagtctcccaccctggcttccgaaagcgttaagattactggtgtgagcctggagtactattttgctactt

SEQ ID NO: 133584 - DNA, 120 bp, Artificial Sequence
  ENSG00000102974_32 (sequence is synthesized)
ggagtactattttgctacttagaaacctttagtcctttatatatttagcaaatgtgtgaaaaaataaatgaatgttttgttattggcttgatggtggacatttatggaatggctcggtta

SEQ ID NO: 133585 - DNA, 120 bp, Artificial Sequence
  ENSG00000102974_33 (sequence is synthesized)
gtgacatgacatgaacaggtgttttgtttctttcccaattttttctgtcttcagttttccctcattttttttcatactatatgcgtatttgtatgaatttagtgtttcataaaatgattt

SEQ ID NO: 133586 - DNA, 87 bp, Artificial Sequence
  ENSG00000102974_34 (sequence is synthesized)
tgtcaaggtacagcctcaaactcctggaatgattacggacctgaagccaaagaacaagatgcgctagtggacagattgctgaccagg

SEQ ID NO: 133587 - DNA, 120 bp, Artificial Sequence
  ENSG00000102974_35 (sequence is synthesized)
aggcgtgagccactgcacctggccagtagtggttgtttctttcatcaagaggcacatgtctgttgtgtcttttttaatattaacaaccattgatgcctaattcattcaccaaagggtctt

SEQ ID NO: 133588 - DNA, 120 bp, Artificial Sequence
  ENSG00000102974_36 (sequence is synthesized)
taacaaccattgatgcctaattcattcaccaaagggtctttttgttttaaaatgtatatttttatttagacatgctttgctttaaataacaatctgtgttctcccttaataaaggcaggg

SEQ ID NO: 133589 - DNA, 120 bp, Artificial Sequence
  ENSG00000102974_37 (sequence is synthesized)
tgcagccacggagagggaatcaggtggtatgatttcggggtacttggagtcacaagaaagataaacatgacccatcttcctagaacttcagttatagtcatagaggaggtggtgagttaa

SEQ ID NO: 133590 - DNA, 83 bp, Artificial Sequence
  ENSG00000102974_38 (sequence is synthesized)
tttttttttttttttttttttgagacaggttgtcactgtgttgcccacactgtcccccacctgccccaagcgatcctcccacc

SEQ ID NO: 133591 - DNA, 89 bp, Artificial Sequence
  ENSG00000102974_39 (sequence is synthesized)
ccttccaagtagctgggaccacaggcacacaacaccatgcctggcatatatatgtatacgtgtatatatatatattttttaagatggag

SEQ ID NO: 133592 - DNA, 87 bp, Artificial Sequence
  ENSG00000102974_40 (sequence is synthesized)
gctggtctggaactcatgacctcaggttctacagacgtgagccaccatgcctggccttttttttgttgttgttcttcttccctgaga

SEQ ID NO: 133593 - DNA, 79 bp, Artificial Sequence
  ENSG00000102974_41 (sequence is synthesized)
ttagcttactttgttctaaaagaagaccaagcatggtggctcacaacctgtaatctcaggactttgtgaggccgaggcc

SEQ ID NO: 133594 - DNA, 90 bp, Artificial Sequence
  ENSG00000102974_42 (sequence is synthesized)
aacgtggcaagactccatctctactgcaagcctgtagtctcagctactggagaggctgaagtaggaggatcacttgagcctgggaagtca

SEQ ID NO: 133595 - DNA, 120 bp, Artificial Sequence
  ENSG00000102974_43 (sequence is synthesized)
aggctgcagtgagccttgatcctatcactgcactcccactgggtaacagaggaagaccctggctcaaaaacaaaaaacgaaaagaaaattggatgccacttttcttctcttgttaattgt

SEQ ID NO: 133596 - DNA, 120 bp, Artificial Sequence
  ENSG00000102974_44 (sequence is synthesized)
tttacttcttatccataccaccagactatacactttcacaggaagaactctgtgctttaccgttagatccatagtggttctaaagaatcgaatgaacaaatgaacattccttggaattgc

SEQ ID NO: 133597 - DNA, 120 bp, Artificial Sequence
  ENSG00000102974_45 (sequence is synthesized)
ttagtttttattatactccagtcactcttcctctccagcattctcttcattctcaaagagaatcatttctgcagatggctggttctattcattacattgtggctcttcctaattgtatcc

SEQ ID NO: 133598 - DNA, 120 bp, Artificial Sequence
  ENSG00000102974_46 (sequence is synthesized)
tcaaaggcagccttcctttggttttagtgtttgatactaccttgctgtcaccccttacctgctgcccacaattacagatggtcactagtctgtgaaactagcactgcattgtgctctcag

SEQ ID NO: 133599 - DNA, 120 bp, Artificial Sequence
  ENSG00000102974_47 (sequence is synthesized)
ttttgtctctaagattccttcagtgaaagacaagaaatgtagagagtatattattcatgttttatattggatgaattgacattcagaatgatcacagcatattagacatggatgtttgaa

SEQ ID NO: 133600 - DNA, 120 bp, Artificial Sequence
  ENSG00000102974_48 (sequence is synthesized)
aatcatttgtttaaatcacataaaaggaaatactatgtaaagcctgtgataagcctctgaaattccttatcaagacagatacatgtggaaaacaagttatatgtttgtgtttttaaaaga

SEQ ID NO: 133601 - DNA, 120 bp, Artificial Sequence
  ENSG00000102974_49 (sequence is synthesized)
aaaacaagttatatgtttgtgtttttaaaagaaagttgcagaatatggacagcccaatggccctatatttatagtcataatacaacgagatttgagagacaggatcttgctatgttgccc

SEQ ID NO: 133602 - DNA, 120 bp, Artificial Sequence
  ENSG00000102974_50 (sequence is synthesized)
tctgggattagaggcatgagccaccaagcccggtctctattaacttttaatccataatgaccaggatattcacaaaataggaataagaaggtttttattgtattcaaaggcagcggattc

SEQ ID NO: 133603 - DNA, 120 bp, Artificial Sequence
  ENSG00000102974_51 (sequence is synthesized)
agatgggtaattaagagaaactaatttggtatgtgttataatatcctggtgttagtataaattcatccaggccctcccatagttttcggagctgacttttgtatctgctttcaagctact

SEQ ID NO: 133604 - DNA, 120 bp, Artificial Sequence
  ENSG00000102974_52 (sequence is synthesized)
gcagttgatgggatgaatagggttccagtctcatagcagttctgtgccacacattgaactctgtcattaactgtgcccttgatcttgctcttcctgttactccatcctttctctaggtac

SEQ ID NO: 133605 - DNA, 120 bp, Artificial Sequence
  ENSG00000102974_53 (sequence is synthesized)
cactgtgtgtccccattgtttatatgaatgaagactggcatgaaaatagtatggaattgataatgcttctccggcatatcctctgaattcgttgttcagaaaacacattagaaaatagta

SEQ ID NO: 133606 - DNA, 120 bp, Artificial Sequence
  ENSG00000102974_54 (sequence is synthesized)
ccttttgttttgttcaacttgaatctgcctacaacaagaaaaattttaagggagaaattaagttaaaatggacagattttaattttaaaagtctgggtagatttcctaacctaccttatt

SEQ ID NO: 133607 - DNA, 120 bp, Artificial Sequence
  ENSG00000102974_55 (sequence is synthesized)
cagttttcctggatattgtcttttcctaaaaagaaaaacttgtgggttctccattcagtctcccccaaaggtaagcattgctgtaatgtggaggattccagagtagagctgggcagagca

SEQ ID NO: 133608 - DNA, 120 bp, Artificial Sequence
  ENSG00000102974_56 (sequence is synthesized)
gaggtggccagcagcagtttaggacttggccatatctgaagatagacaagatccgggaactgggactgagcctcagccttcctaagacctgtagattctctgtggtgtagcatatctgcc

SEQ ID NO: 133609 - DNA, 65 bp, Artificial Sequence
  ENSG00000102974_57 (sequence is synthesized)
cttcaacctggaaggtagaggttgcagtgagccaaaatcatgctactgcactacaacctgggcga

SEQ ID NO: 133610 - DNA, 120 bp, Artificial Sequence
  ENSG00000102974_58 (sequence is synthesized)
agtgagccaaaatcatgctactgcactacaacctgggcgacagagcaagagactccgtctcaaaaaaaagaggatgggccttgagtgaagggatgtaggtggtcatgtggcacagcctaa

SEQ ID NO: 133611 - DNA, 120 bp, Artificial Sequence
  ENSG00000102974_59 (sequence is synthesized)
cttaacacacacacaggtgctggataagaatgttgggggctacaacagcaaatgctcagacttcgctttttagtattcattcaagctgactccagcgggaatttaaaggaagtttttatt

SEQ ID NO: 133612 - DNA, 120 bp, Artificial Sequence
  ENSG00000102974_60 (sequence is synthesized)
atttcttatgatgccctttttgtaatcatgattttattgtaagcacttggacttagttattatagacaaatgtaaagaaaatttaatgaaaaataacaccctctctcttaaaaaaaagaa

SEQ ID NO: 133613 - DNA, 120 bp, Artificial Sequence
  ENSG00000102974_61 (sequence is synthesized)
aaaaataacaccctctctcttaaaaaaaagaagtctcaggcaatagatgcctggtactatgaggaagaatgttagaaatagaagtgaaatcccagtgaaaccctgtctctactaaaaata

SEQ ID NO: 133614 - DNA, 86 bp, Artificial Sequence
  ENSG00000102974_62 (sequence is synthesized)
ctcaaaaaaaaaaaaaaaaaaaaaagatgttgtagcaattgaaagctaacttggtgaggatgagccttgtgcacctagggaggctg

SEQ ID NO: 133615 - DNA, 68 bp, Artificial Sequence
  ENSG00000102974_63 (sequence is synthesized)
gcttacgcctgtaatcccagcactttggcactttgggaggctgaggaaatcctgtctctattaaaaat

SEQ ID NO: 133616 - DNA, 75 bp, Artificial Sequence
  ENSG00000102974_64 (sequence is synthesized)
agcaaaactcggtctcaagaaaaagccaagcaggcggatcacaagggcaggagatcgagaccatcctggccaaca

SEQ ID NO: 133617 - DNA, 120 bp, Artificial Sequence
  ENSG00000102974_65 (sequence is synthesized)
gacaggtaggaaccttcattgaaagttgttggtgctttctcggtgtctggtgttatcagagggcatttacatatctagtacagtggctgtttttaaagatagtattttcaaactgtggat

SEQ ID NO: 133618 - DNA, 120 bp, Artificial Sequence
  ENSG00000102974_66 (sequence is synthesized)
tatgaggaatgtcaccaaaatcaaaggtcatgctccttgtcaattgtgtcatcccggtgtccagatgatgttttattcagtcacagcttacctcttccttaagcagacatctttctgaaa

SEQ ID NO: 133619 - DNA, 120 bp, Artificial Sequence
  ENSG00000102974_67 (sequence is synthesized)
actgtggaaagtaagtccaggacttgagagaggggaagaatctcatgcggggacatgactgttgggagggagccaaagaaggagctcagcaggaataagcagctctatctgtgctacaat

SEQ ID NO: 133620 - DNA, 81 bp, Artificial Sequence
  ENSG00000102974_68 (sequence is synthesized)
ggagctcagcaggaataagcagctctatctgtgctacaattatggaagcagttgtgcaccacactaaaaatacctttatca

SEQ ID NO: 133621 - DNA, 77 bp, Artificial Sequence
  ENSG00000102974_69 (sequence is synthesized)
tgggaggccgagataggcaacagagagagaccccatctctacaaaaagaaaaaattagggccgggcgcggtggctcg

SEQ ID NO: 133622 - DNA, 62 bp, Artificial Sequence
  ENSG00000102974_70 (sequence is synthesized)
ggcatggtgatagcggaggttgcattgagccgcgattgcgccactgcgctccagcctgggtg

SEQ ID NO: 133623 - DNA, 120 bp, Artificial Sequence
  ENSG00000102974_71 (sequence is synthesized)
ggaggttgcattgagccgcgattgcgccactgcgctccagcctgggtggcagagcgagactctgtctccaaaagaaaaagaaaaaattagctggggccaggcacggtgactcacacctgt

SEQ ID NO: 133624 - DNA, 77 bp, Artificial Sequence
  ENSG00000102974_72 (sequence is synthesized)
ggcagatcattcccatctctactaaaaaaaaaaaacaaaaaaacacgaaggtcggccgggcgcggtggctcacgcct

SEQ ID NO: 133625 - DNA, 120 bp, Artificial Sequence
  ENSG00000102977_0 (sequence is synthesized)
atgcctggccgctgtcagagtgacgccgcgatgagagtaaacgggccagcatcccgtgcaccagcggggtggaccagcgggagtctgcacacaggcccccgagcaggacgccctcgtgcg

SEQ ID NO: 133626 - DNA, 120 bp, Artificial Sequence
  ENSG00000102977_1 (sequence is synthesized)
caggcgcggggtgtacgtgggcggggcctcctcctccggccccgcccagcgaaggagcttcctcttccgaggaaaggcggggcctgggcgcccgcgggaaacccgggcccgttgcatccg

SEQ ID NO: 133627 - DNA, 120 bp, Artificial Sequence
  ENSG00000102977_2 (sequence is synthesized)
ctgggtgtagccgtggggatggcaggttcggggaggctggtcctacggccctggattcgggagctgattctggggtcagagacaccctccagtccacgagccgggcagctgcttgaggac

SEQ ID NO: 133628 - DNA, 120 bp, Artificial Sequence
  ENSG00000102977_3 (sequence is synthesized)
gccgaggccgcggtcgcgggcccatcccacgcccctgatacgtccgacgtcggggccacgctgcttgtgtctgacgggacccacagtgtccgatgcctggtgacgcgggaggccctggac

SEQ ID NO: 133629 - DNA, 120 bp, Artificial Sequence
  ENSG00000102977_4 (sequence is synthesized)
acctcggactgggaggagaaggagttcggcttccgcgggacagagggccggctgctgctgctgcaggactgcggggttcatgtccaggtcgctgagggcggcgcgcccgcagagttctat

SEQ ID NO: 133630 - DNA, 120 bp, Artificial Sequence
  ENSG00000102977_5 (sequence is synthesized)
ctccaggtggaccgcttcagcctgctgcccacggagcagccccggctacgggtgcctggttgcaaccaagacttagatgttcagaaaaagctctatgactgccttgaggagcacctttca

SEQ ID NO: 133631 - DNA, 120 bp, Artificial Sequence
  ENSG00000102977_6 (sequence is synthesized)
gagcatcagggggcactcgtgtgcctggctgaaagctgcctgacactggagggcccttgcacagcaccccctgtcacccactgggctgcctcacgatgcaaggccacgggagaagctgtg

SEQ ID NO: 133632 - DNA, 120 bp, Artificial Sequence
  ENSG00000102977_7 (sequence is synthesized)
tacactgtccccagctcaatgctgtgcatctctgagaatgaccagctaattctgagctctctaggcccctgtcagaggacacagggccctgagctgcccccaccagacccggctctgcag

SEQ ID NO: 133633 - DNA, 120 bp, Artificial Sequence
  ENSG00000102977_8 (sequence is synthesized)
gacctatctctgaccctcatagcctctcctccttcctcacccagttcctcaggaaccccggccttacccggccacatgtcatccgaggaaagtggtaccagcatcagccttctgcctgcc

SEQ ID NO: 133634 - DNA, 120 bp, Artificial Sequence
  ENSG00000102977_9 (sequence is synthesized)
ctgtccttggctgctccagacccagggcagagaagcagctcccagccctcaccagccatctgctcagcccctgccaccctgacccccaggtccccacacgccagccgtacccccagctcc

SEQ ID NO: 133635 - DNA, 120 bp, Artificial Sequence
  ENSG00000102977_10 (sequence is synthesized)
ccactccagagctgcactcccagtctctcaccccgtagccatgtccccagtccacaccaggctcttgtgaccaggccccagaaacctagcctggagttcaaggagtttgtagggttgccc

SEQ ID NO: 133636 - DNA, 120 bp, Artificial Sequence
  ENSG00000102977_11 (sequence is synthesized)
tgcaagaatcggccgccttttcccaggaccggagctaccaggggagcccaggagccctgctctgtctgggaacccccaaagaggcatcgtgatggttctgccttccagtatgagtatgag

SEQ ID NO: 133637 - DNA, 120 bp, Artificial Sequence
  ENSG00000102977_12 (sequence is synthesized)
ccaccctgcacgtccctctgtgctcgggtccaagctgtcaggcttcctccccagctcatggcctgggccttgcactttctgatggatgcacagccagggtctgagccaactccgatgtga

SEQ ID NO: 133638 - DNA, 120 bp, Artificial Sequence
  ENSG00000102977_13 (sequence is synthesized)
atcacgctgaggtccgcgcgcccccggagtctggggagcagggctccgccaatccgaggggagggcgaaggaagtaccatttatttagcgctgtgtgtgtgctcttatttccactggcct

SEQ ID NO: 133639 - DNA, 120 bp, Artificial Sequence
  ENSG00000102977_14 (sequence is synthesized)
tacaagaccgtgcactgtgtagatgaggaaactgagtcataataaatatgtgctgaaccgttcgggggtcacacggtgctgaaatggtttcgagtcaactcgctcggacggcactcggcc

SEQ ID NO: 133640 - DNA, 120 bp, Artificial Sequence
  ENSG00000102977_15 (sequence is synthesized)
cttcagcctgctgcccacggagcagccccggctacgggtgcctggttggtaagtgatgcctccgccctccagcagctctccccaccccagcctggccggcgctggcagacgcctatgggg

SEQ ID NO: 133641 - DNA, 120 bp, Artificial Sequence
  ENSG00000102977_16 (sequence is synthesized)
gacttagatgttcagaaaaagctctatgactgccttgagtgagtctggggttgggctcgggggccacgtgttgtttggtgaggggatggtgtatctaggtagacaggcctcagcatggtt

SEQ ID NO: 133642 - DNA, 120 bp, Artificial Sequence
  ENSG00000102977_17 (sequence is synthesized)
cctgagtcctggccactctcttcctgtagggagcacctttcagagtccacctcgtccaatgcaggtactgtagagcttgaccagtgatcctaacacgctgtgcagtgatctctccagcct

SEQ ID NO: 133643 - DNA, 120 bp, Artificial Sequence
  ENSG00000102977_18 (sequence is synthesized)
taaccttatgcttcctcaataagctgtcttccccctcaccctcctggtcctcccctttaagccttgactcatcccatggtcccctgtccccaggcctatcactgtcccagcttctggatg

SEQ ID NO: 133644 - DNA, 120 bp, Artificial Sequence
  ENSG00000102977_19 (sequence is synthesized)
tgcagctggagggtagaacaaggaaggcctgaggtagagctgggagggagcatgggtagccttggatggggttggggtccttgttagctcttccccagacaccatacccctttcaggaac

SEQ ID NO: 133645 - DNA, 120 bp, Artificial Sequence
  ENSG00000102977_20 (sequence is synthesized)
ggcggcgcggtgagtggtgagactgccttgggcgggttaccgggcatgactcttcgtgacgattctgagacccccccttccccccgaactcctccagcccgcagagttctatctccaggt

SEQ ID NO: 133646 - DNA, 120 bp, Artificial Sequence
  ENSG00000102977_21 (sequence is synthesized)
aggacatgagagtaaacgggcctgtcctacagagttcatgtcccacagggagaagctgtgtacactgtccccagctcaatgctgtgcatctctgagaatgaccagctaattctgagctct

SEQ ID NO: 133647 - DNA, 120 bp, Artificial Sequence
  ENSG00000102977_22 (sequence is synthesized)
ctaggcccctgtcagaggacacagggtaagggggactggagaggttggggggatacctggggcccaggtccacagtgctgataagacttcctgaaccccccaggccctgagctgccccca

SEQ ID NO: 133648 - DNA, 120 bp, Artificial Sequence
  ENSG00000102977_23 (sequence is synthesized)
ccagacccggctctgcaggacctatctctgaccctcatagcctctcctccttcctcacccagttcctcaggtgaggtgatgcacaggtcacaggcactcactgccgcctgtcagtcaggt

SEQ ID NO: 133649 - DNA, 120 bp, Artificial Sequence
  ENSG00000102977_24 (sequence is synthesized)
tcccgggctgcgcaggatgctgtgaaaggtgcacggtgggtgggggatgaacacggtccctgcagtcctgtctgagctcgcaggccactcagctgccctgagcggagagggctgtgccta

SEQ ID NO: 133650 - DNA, 120 bp, Artificial Sequence
  ENSG00000102977_25 (sequence is synthesized)
caagctgtcaggtgagtgcctgggtctgccccaactcttggtcactagtcccaggctccattgacctgcagcggtggtttctttccaggcttcctccccagctcatggcctgggccttgc

SEQ ID NO: 133651 - DNA, 120 bp, Artificial Sequence
  ENSG00000102978_0 (sequence is synthesized)
gcagtcaccgcggagcagacgcggaggctggtggcccctgggcgagatgccgtacgccaaccagcctaccgtgcggatcacggagctcactgacgagaatgtcaagttcatcatcgagaa

SEQ ID NO: 133652 - DNA, 120 bp, Artificial Sequence
  ENSG00000102978_1 (sequence is synthesized)
caccgacctggcggtggccaattcgattcggagggtcttcatcgctgaggttcccataatagccattgactgggttcagattgatgccaattcctcagttcttcatgatgaattcattgc

SEQ ID NO: 133653 - DNA, 120 bp, Artificial Sequence
  ENSG00000102978_2 (sequence is synthesized)
tcacaggcttggattaattcccctcattagtgatgacattgtggacaagctgcagtactctcgggactgcacatgtgaggagttctgccccgagtgctcggtggagttcaccctcgatgt

SEQ ID NO: 133654 - DNA, 120 bp, Artificial Sequence
  ENSG00000102978_3 (sequence is synthesized)
gcggtgcaatgaagaccagacgcgacatgtcacgtctcgagacctcatctccaacagcccccgggtcattccggtgacatcccggaaccgagataatgaccccaatgactacgtggagca

SEQ ID NO: 133655 - DNA, 120 bp, Artificial Sequence
  ENSG00000102978_4 (sequence is synthesized)
ggatgacatcctcatcgtcaagttgagaaagggccaggagctgagacttcgagcctatgccaaaaagggctttggcaaggagcatgccaagtggaaccctactgcaggggtggcttttga

SEQ ID NO: 133656 - DNA, 120 bp, Artificial Sequence
  ENSG00000102978_5 (sequence is synthesized)
atacgatccagacaatgccctgaggcacacagtgtaccccaagcccgaggaatggccaaagagtgagtactcggagctggatgaggatgagtcgcaggctccctatgaccccaacggcaa

SEQ ID NO: 133657 - DNA, 120 bp, Artificial Sequence
  ENSG00000102978_6 (sequence is synthesized)
gccagaaaggttttactacaatgtggagtcctgtggctctctgcgtcctgaaaccattgtcctgtcagccctctcaggattgaagaagaaactgagtgatttacaaactcaattaagcca

SEQ ID NO: 133658 - DNA, 120 bp, Artificial Sequence
  ENSG00000102978_7 (sequence is synthesized)
tatgggggtctctcttcagactcttctcgtttctgagaatctagtctactgttggttgagcttcttggcaggacatcagtaccaactagaagtgggtcatagatagattaccagggatgc

SEQ ID NO: 133659 - DNA, 120 bp, Artificial Sequence
  ENSG00000102978_8 (sequence is synthesized)
agtggtgtttaggcaggataggtctttactggccctgactgctgttaataattggcagcagtgctccccagatcccagaaggtccctgctggagtgtttccagtgcacctgtagggaacc

SEQ ID NO: 133660 - DNA, 120 bp, Artificial Sequence
  ENSG00000102978_9 (sequence is synthesized)
aactagacttctctcctggttagtccagctctttactctaaaccctttctgtccaaaatgagtcattttcagttgtaccttagatgtctggtgttgaggatcaagtgccatagcctttat

SEQ ID NO: 133661 - DNA, 120 bp, Artificial Sequence
  ENSG00000102978_10 (sequence is synthesized)
tcagggggcctataaacccttccagttcttgccccagggctggcctgctagcgcttcaaattcccaggtgtccctaatttgagaagtaaccttttggaatagcattagaccctggctgtc

SEQ ID NO: 133662 - DNA, 120 bp, Artificial Sequence
  ENSG00000102978_11 (sequence is synthesized)
ccctccccaccaaataaacatgatatttcattctctgtccagcagtcatgaaccccttcacctccaatgacctgatcatttagtttggtgggggtgggggtgggggtgggggtggaagca

SEQ ID NO: 133663 - DNA, 120 bp, Artificial Sequence
  ENSG00000102978_12 (sequence is synthesized)
gccgcaggagcaagggcccctcccacatacacaggaggagtatttcatttctccttaatgaaggctctggccctaacccctcagcactgtctccagataggaacatgcacaaagcagtta

SEQ ID NO: 133664 - DNA, 120 bp, Artificial Sequence
  ENSG00000102978_13 (sequence is synthesized)
attaggcagcctggagaaaaccagagatccagtacagaaaggaaaggatatttattgattaacagaagttgtctttttaaaagtgtttatttttggcaataaagagcacaacataatctc

SEQ ID NO: 133665 - DNA, 120 bp, Artificial Sequence
  ENSG00000102978_14 (sequence is synthesized)
ccagacacagcctctcgtgctgcctggtctcctcgaaaattggctttagaccgtttttccagatgtgtgtggtcttgcagtggcactccaagtcagaatttggagaagcatgtctctcct

SEQ ID NO: 133666 - DNA, 120 bp, Artificial Sequence
  ENSG00000102978_15 (sequence is synthesized)
ggtgtggcatagaaatggctgttgttgactgagatgtggcaggctctctaggaacttgggtgccccaaaaggagcagtggcaaccttgtgctgacctgtgtttgacctcaggccaaagag

SEQ ID NO: 133667 - DNA, 120 bp, Artificial Sequence
  ENSG00000102978_16 (sequence is synthesized)
tgagtactcggagctggatgaggatgagtcgcaggctccctatgaccccaacggcaagccagaaaggtaagagcctggttggacatgggaaggtgaagtgtggaagaagggatggttttg

SEQ ID NO: 133668 - DNA, 120 bp, Artificial Sequence
  ENSG00000102978_17 (sequence is synthesized)
cctagaagtgctaattctggattcctcttgggcatcgttagcatcgttggtgctgcgcaccctctatcacccagggactcttttaaaggccatggaattgttttgcctgaggctaccacc

SEQ ID NO: 133669 - DNA, 120 bp, Artificial Sequence
  ENSG00000102978_18 (sequence is synthesized)
acaccctgaagtgggggttggagtcctgggggcatctgtgccaccacctcgtcaggtgttcgttccctggttgacagattgcagtctagaggtgctgggatatggatgccagaggaggtg

SEQ ID NO: 133670 - DNA, 120 bp, Artificial Sequence
  ENSG00000102978_19 (sequence is synthesized)
ctgtgaagcagggagccccctgcattaaattcacctgggcagggaggtgaggtgtggtgtgtgtgggtcttattaaaatgcaagtacctgggccccactctaatgctgtggaatcagccc

SEQ ID NO: 133671 - DNA, 120 bp, Artificial Sequence
  ENSG00000102978_20 (sequence is synthesized)
atcatgccactgcactctggcctgggcaatagagtgagactccttctcaaacaaaagaaaataaaaaagaagatagtggcttccagccacgtccatgttgctgcagaggacatgatttcg

SEQ ID NO: 133672 - DNA, 120 bp, Artificial Sequence
  ENSG00000102978_21 (sequence is synthesized)
ttccagccacgtccatgttgctgcagaggacatgatttcgttcgttcttatggctgcatcacttactgcttttgtgaaacttggccattgactgggttcagattgatgccaattcctcag

SEQ ID NO: 133673 - DNA, 120 bp, Artificial Sequence
  ENSG00000102978_22 (sequence is synthesized)
atgtcaagttcatcatcgagaacaccgacctggcggtggccaattcgattcggagggtcttcatcgctgaggttcccataataggtaagcgactccccttcctcgttcccgcgcccacgg

SEQ ID NO: 133674 - DNA, 120 bp, Artificial Sequence
  ENSG00000102978_23 (sequence is synthesized)
gttcctgccccgctctccacccacacactctttggggctccttccagtccttggttcgggctgagggtggtagtgctgagaaaagtgcattgctggagacttgaccataccctgtgccct

SEQ ID NO: 133675 - DNA, 120 bp, Artificial Sequence
  ENSG00000102978_24 (sequence is synthesized)
taggtccacccttgtcctgggtatgcattgctgagaagcatgggtttagcagtgtgcagacttgggttcaaatactgttttcactactattgttacaaaagtttttaaaatgttttcaac

SEQ ID NO: 133676 - DNA, 120 bp, Artificial Sequence
  ENSG00000102978_25 (sequence is synthesized)
ttttattttggagtcaaggggtacattggtgcaggtttgttgcctgggtatagtgcgtgatgctgagatttggggtataaatgatcctttcacccaggtagtgagcatagtacgcaatag

SEQ ID NO: 133677 - DNA, 120 bp, Artificial Sequence
  ENSG00000102981_0 (sequence is synthesized)
cacctgcgcctcggcgggccgcctggggcaccgtccccggcccgcccggccccgccatggcccggccgcagaggactccggcgcgcagtcccgatagcatcgtcgaggtgaagagcaaat

SEQ ID NO: 133678 - DNA, 120 bp, Artificial Sequence
  ENSG00000102981_1 (sequence is synthesized)
gcatcgtcgaggtgaagagcaaatttgacgccgagttccgacgcttcgcgctgcctcgcgcttcggtgagcggcttccaggagttctcgcggttgctgcgggcggtgcaccagatcccgg

SEQ ID NO: 133679 - DNA, 120 bp, Artificial Sequence
  ENSG00000102981_2 (sequence is synthesized)
gcctggacgtgctacttggctatacggatgctcatggcgacctgctgcccctcaccaacgacgacagcctgcaccgggccctggccagcgggcccccgccactgcgcctactggtgcaga

SEQ ID NO: 133680 - DNA, 120 bp, Artificial Sequence
  ENSG00000102981_3 (sequence is synthesized)
agcgggcagaagctgactccagcggcctggcttttgcctccaactctctgcagcggcgcaagaaagggctcttgctgcggccagtggcacccctgcgcacccggccacccttgctaatca

SEQ ID NO: 133681 - DNA, 120 bp, Artificial Sequence
  ENSG00000102981_4 (sequence is synthesized)
gcctgccccaagatttccgccaggtttcctcagtcatagacgtggacctactgcctgagacccaccgacgggtgcggctgcacaagcatggttcagaccgccccctgggcttctacatcc

SEQ ID NO: 133682 - DNA, 120 bp, Artificial Sequence
  ENSG00000102981_5 (sequence is synthesized)
caggaatcttcatctcccgcctggtacgtgggggtctggctgagagtacagggctgctggcggtcagtgatgagatcctcgaggtcaatggcattgaagtagccgggaagaccttggacc

SEQ ID NO: 133683 - DNA, 120 bp, Artificial Sequence
  ENSG00000102981_6 (sequence is synthesized)
aagtgacggacatgatggttgccaacagccataacctcattgtcactgtcaagcccgccaaccagcgcaataacgtggtgcgaggggcatctgggcgtttgacaggtcctccctctgcag

SEQ ID NO: 133684 - DNA, 120 bp, Artificial Sequence
  ENSG00000102981_7 (sequence is synthesized)
ggcctgggcctgctgagcctgatagtgacgatgacagcagtgacctggtcattgagaaccgccagcctcccagttccaatgggctgtctcaggggcccccgtgctgggacctgcaccctg

SEQ ID NO: 133685 - DNA, 120 bp, Artificial Sequence
  ENSG00000102981_8 (sequence is synthesized)
gctgccgacatcctggtacccgcagctctctgccctccctggatgaccaggagcaggccagttctggctgggggagtcgcattcgaggagatggtagtggcttcagcctctgacagtcag

SEQ ID NO: 133686 - DNA, 120 bp, Artificial Sequence
  ENSG00000102981_9 (sequence is synthesized)
gatgaagccccatgccactccacactgctgggacatggcagggacttcacagtgggggtttttagctggctcacagggctccctcagcctggggaacattaaaggttttctacaaataca

SEQ ID NO: 133687 - DNA, 120 bp, Artificial Sequence
  ENSG00000102981_10 (sequence is synthesized)
catccgtcttccttcctccactgctggtctccagctctctgtggcctgagtacctggagggcggtaagaagaccttggacagcgtccctggtactggagctgaggtctgggcttaaggct

SEQ ID NO: 133688 - DNA, 120 bp, Artificial Sequence
  ENSG00000102981_11 (sequence is synthesized)
gccgcaaaagcggcagccgcatctttcccattcctgccagcctgcggtgagaaaggggcgcaggctgtcctgactcctcctctcccccaaccccgacttccagtttgacgccgagttccg

SEQ ID NO: 133689 - DNA, 120 bp, Artificial Sequence
  ENSG00000102984_0 (sequence is synthesized)
agctgcgggtgcgcgagccgcgcgctcccgccgcccgcgtcgccatctttttccccctccgtctgtctgtctgctgttggctttgtccgtctgcagcgccgcccctcggctccccgccac

SEQ ID NO: 133690 - DNA, 80 bp, Artificial Sequence
  ENSG00000102984_1 (sequence is synthesized)
ccagtcccggagcgccccggcccggctggcttgggctgcggtcccgggtccattgtccggcggtccgtctgtccggaggc

SEQ ID NO: 133691 - DNA, 120 bp, Artificial Sequence
  ENSG00000102984_2 (sequence is synthesized)
ggggcccagggacccagagcgcagcgcagcgccgaggcgccggatacagatcacttggattcagtcgagtttgctttgctccgtgggaactgcaccagagctggaggttagcatcttgca

SEQ ID NO: 133692 - DNA, 120 bp, Artificial Sequence
  ENSG00000102984_3 (sequence is synthesized)
aggaggtagtaacatatccagtcgtgaaactgggaaagaccagagctcttgcatcagggaaacatgtcccgtcggaaacagacaaatccaaataaagttcactgtgacagtgagggtgat

SEQ ID NO: 133693 - DNA, 120 bp, Artificial Sequence
  ENSG00000102984_4 (sequence is synthesized)
gaagaggagacgacacaagatgaagtctcttcccacacatcagaggaagatggaggggtggtcaaagtggagaaagagttagaaaatacagaacagcctgttggtgggaacgaagtggta

SEQ ID NO: 133694 - DNA, 120 bp, Artificial Sequence
  ENSG00000102984_5 (sequence is synthesized)
gagcacgaggtcacagggaatttgaattctgaccccttgcttgaactctgccagtgtcccctctgccagctagactgcgggagccgggagcagttgattgctcacgtgtaccagcacact

SEQ ID NO: 133695 - DNA, 120 bp, Artificial Sequence
  ENSG00000102984_6 (sequence is synthesized)
gcagcagtggtgagcgccaagagctacatgtgtcctgtctgtggccgggcccttagctccccggggtcattgggtcgccacctcttaatccactcggaggaccagcgatctaactgtgct

SEQ ID NO: 133696 - DNA, 120 bp, Artificial Sequence
  ENSG00000102984_7 (sequence is synthesized)
cctacccacagtccacaatgagggtccctccagtgctgaggggaaggatattgcctttagtcctccagtgtaccctgctggaattctgcttgtgtgcaacaactgtgctgcctaccgtaa

SEQ ID NO: 133697 - DNA, 120 bp, Artificial Sequence
  ENSG00000102984_8 (sequence is synthesized)
actgctggaagcccagactcccagtgtacgcaagtgggctctacgtcgacagaatgagcctttggaagtacggctgcagcggctggaacgagagcgcacggccaagaagagccggcggga

SEQ ID NO: 133698 - DNA, 120 bp, Artificial Sequence
  ENSG00000102984_9 (sequence is synthesized)
caatgagacccccgaggagcgggaggtgaggcgcatgagggaccgtgaagccaagcgcttgcagcgcatgcaggagacagacgagcagcgggcacgccggctgcagcgggatcgggaggc

SEQ ID NO: 133699 - DNA, 120 bp, Artificial Sequence
  ENSG00000102984_10 (sequence is synthesized)
catgaggctgaagcgggccaatgaaaccccggaaaagcggcaggcccggctcatccgagagcgagaggccaagcggctcaagaggaggctggagaaaatggacatgatgttgcgagctca

SEQ ID NO: 133700 - DNA, 120 bp, Artificial Sequence
  ENSG00000102984_11 (sequence is synthesized)
gtttggccaggacccttctgccatggcagccttagcagctgaaatgaacttcttccagctgcctgtaagtggggtggagttggacagccagcttctgggcaagatggcctttgaagagca

SEQ ID NO: 133701 - DNA, 120 bp, Artificial Sequence
  ENSG00000102984_12 (sequence is synthesized)
gaacagcagctctctgcactgaaccacaccctcctgcctgccctccttcccacctacctacccacccacccacacccacagccacgaggaccagtgctgctgccacccacgaggccctgt

SEQ ID NO: 133702 - DNA, 120 bp, Artificial Sequence
  ENSG00000102984_13 (sequence is synthesized)
ccttgctgccagaggcaggcctgggtttattgcaggtggacctgagcagcccttgcatatgggaacaggatgatggggtcaggagggacctggctcaaggcagctctggacaagggagca

SEQ ID NO: 133703 - DNA, 120 bp, Artificial Sequence
  ENSG00000102984_14 (sequence is synthesized)
ggcagtccagagaactggcctccccagcccactgccacaggctgtgcttctaggactgtggggcccctgtgtggcccatgaagttgtgaagtcaaataaattaattttatctttactgcc

SEQ ID NO: 133704 - DNA, 120 bp, Artificial Sequence
  ENSG00000102984_15 (sequence is synthesized)
ctaaatttagatttcggagattgtgttgtctaagggtttgtctgagccgcctcggaagacctccggctcttgtcaggctcttgtctggtaattcctgggaatttacctgggctcatgctt

SEQ ID NO: 133705 - DNA, 120 bp, Artificial Sequence
  ENSG00000102984_16 (sequence is synthesized)
gaagaagcagagggaccatctcggctgattagacacgccccagacccaaccccaggggtcaggtgaacagccaggcggctaagtgaccagctttcttgtcctctcctttttggcagatac

SEQ ID NO: 133706 - DNA, 120 bp, Artificial Sequence
  ENSG00000102984_17 (sequence is synthesized)
gggctagaagagcaagcccgccaggcgatgatgaaaactgattttcctggagaccttggcagtcagcgacaagctatccaacaactaagagatcaggactccagtagcagtgacagtgag

SEQ ID NO: 133707 - DNA, 120 bp, Artificial Sequence
  ENSG00000102984_18 (sequence is synthesized)
ccagcaatgccctacccttctgcctgccctgatgctgctcacccctgtggcacagtcttgcctctgatggtctcctgggcctgcatgggaggcctcttccttcatggcaccagaacccac

SEQ ID NO: 133708 - DNA, 120 bp, Artificial Sequence
  ENSG00000102984_19 (sequence is synthesized)
agacgttgggggaagcgccacgccgactgagtcagctgctgggggcatgcccttaatttcgctctgggcgcggggaggccagccacagctgttgattctcggactctgcgcccacggcct

SEQ ID NO: 133709 - DNA, 120 bp, Artificial Sequence
  ENSG00000102984_20 (sequence is synthesized)
caccgcgcccagtgccttggttccggattcttccataaccggctgccagtaccgcctctctgacgccgggagttgctccctaagatctgctgccgcctttcgctggactttccccctggg

SEQ ID NO: 133710 - DNA, 120 bp, Artificial Sequence
  ENSG00000102984_21 (sequence is synthesized)
cccagcgcctccgtgtccctctacgggctctaagcgttcccccgccccgcttttaagccgtccggttgccctttggaccagcatcgctccggtctgtgtggtataattcagtagtgtttc

SEQ ID NO: 133711 - DNA, 120 bp, Artificial Sequence
  ENSG00000102984_22 (sequence is synthesized)
ctcagcaccacagtctctggcgatttccctaatttatctcgatacagatcacttggattcagtcgagtttgctttgctccgtgggaactgcaccagagctggaggttagcatcttgcaag

SEQ ID NO: 133712 - DNA, 120 bp, Artificial Sequence
  ENSG00000102984_23 (sequence is synthesized)
gggggaggggaggatgggcgtgggcgtgcagaccggggggtatcagtccccgcgtctgggtctcgcagaaaagcttctaaatttagatttcggagattgtgttgtctaagggtttgtctg

SEQ ID NO: 133713 - DNA, 120 bp, Artificial Sequence
  ENSG00000102984_24 (sequence is synthesized)
agtgccacaagttcccctgcccctgggtctgcagccaatgttattttatcagttgagaatcatgtcagaaaattaaatactcaaaagaaatctcaagatttcccagctctgaggttctga

SEQ ID NO: 133714 - DNA, 120 bp, Artificial Sequence
  ENSG00000102984_25 (sequence is synthesized)
cagctgaacttggcccctcccaccaaggcccgtggtcacattcaaagcctcgggagccgaagccaccgcgaagcgtgggggaatgaggcgaagaggatacagatcacttggattcagtcg

SEQ ID NO: 133715 - DNA, 120 bp, Artificial Sequence
  ENSG00000102984_26 (sequence is synthesized)
agaactgtgtttgatatgcagatatgctagaagactgcctgaaagctgcttcctttgccacttcctgtggaggcctgtctttgccatttgcggtttctttattcttttggttagcatctt

SEQ ID NO: 133716 - DNA, 120 bp, Artificial Sequence
  ENSG00000102996_0 (sequence is synthesized)
gaggagggctgggagcgcccggagccgcgctgaactcgccggggacgtcgggcgcccgctccttggctggctcgcttgctctctcgctcgctctctcgggtcggctccctgcgcctcctc

SEQ ID NO: 133717 - DNA, 120 bp, Artificial Sequence
  ENSG00000102996_1 (sequence is synthesized)
ctctcgctcgctctctcgggtcggctccctgcgcctcctcccgggactgcttggggacccgggcccggtcgggcgcggcggcgagcagaatccccgtgcaggaggcgcgcgctccgggca

SEQ ID NO: 133718 - DNA, 120 bp, Artificial Sequence
  ENSG00000102996_2 (sequence is synthesized)
gcgcagggagcgccgcgggaccgggcggccggagcgctgagccagacaaaggctccggagttgcgcttgctctcgggagccgggccccaggcgctgggcgccgaggctgcggaacctcgc

SEQ ID NO: 133719 - DNA, 120 bp, Artificial Sequence
  ENSG00000102996_3 (sequence is synthesized)
ggcagctccggtcggccccctttcccgccggctggttccgagctcccggacctgccctgcccgcttctcctcgggcttgggaatttgccgaggcgacctaggcggctccggcggggaccg

SEQ ID NO: 133720 - DNA, 120 bp, Artificial Sequence
  ENSG00000102996_4 (sequence is synthesized)
ggagcccgaggtccgcggcgcgcctgccgggccaggagccagggagcgtcgcaagtttccaaggcgcgtgcgaggatccggcgtgcagtgttccgagctgggctgggcgccgagagcatg

SEQ ID NO: 133721 - DNA, 120 bp, Artificial Sequence
  ENSG00000102996_5 (sequence is synthesized)
gccgagagcatgggcagcgacccgagcgcgcccggacggccgggctggacgggcagcctcctcggcgaccgggaggaggcggcgcggccgcgactgctgccgctgctcctggtgcttctg

SEQ ID NO: 133722 - DNA, 120 bp, Artificial Sequence
  ENSG00000102996_6 (sequence is synthesized)
cttggcgtagcggccgaagacgcggaggtccatgccgagaactggctgcggctttatggctacctgcctcagcccagccgccatatgtccaccatgcgttccgcccagatcttggcctcg

SEQ ID NO: 133723 - DNA, 120 bp, Artificial Sequence
  ENSG00000102996_7 (sequence is synthesized)
gcccttgcagagatgcagcgcttctacgggatcccagtcaccggtgtgctcgacgaagagaccaaggagtggatgaagcggccccgctgtggggtgccagaccagttcggggtacgagtg

SEQ ID NO: 133724 - DNA, 120 bp, Artificial Sequence
  ENSG00000102996_8 (sequence is synthesized)
aaagccaacctgcggcggcgtcggaagcgctacgccctcaccgggaggaagtggaacaaccaccatctgacctttagcatccagaactacacggagaagttgggctggtaccactcgatg

SEQ ID NO: 133725 - DNA, 120 bp, Artificial Sequence
  ENSG00000102996_9 (sequence is synthesized)
gaggcggtgcgcagggccttccgcgtgtgggagcaggccacgcccctggtcttccaggaggtgccctatgaggacatccggctgcggcgacagaaggaggccgacatcatggtactcttt

SEQ ID NO: 133726 - DNA, 120 bp, Artificial Sequence
  ENSG00000102996_10 (sequence is synthesized)
gcctctggcttccacggcgacagctcgccgtttgatggcaccggtggctttctggcccacgcctatttccctggccccggcctaggcggggacacccattttgacgcagatgagccctgg

SEQ ID NO: 133727 - DNA, 120 bp, Artificial Sequence
  ENSG00000102996_11 (sequence is synthesized)
accttctccagcactgacctgcatggaaacaacctcttcctggtggcagtgcatgagctgggccacgcgctggggctggagcactccagcaaccccaatgccatcatggcgccgttctac

SEQ ID NO: 133728 - DNA, 120 bp, Artificial Sequence
  ENSG00000102996_12 (sequence is synthesized)
cagtggaaggacgttgacaacttcaagctgcccgaggacgatctccgtggcatccagcagctctacggtaccccagacggtcagccacagcctacccagcctctccccactgtgacgcca

SEQ ID NO: 133729 - DNA, 120 bp, Artificial Sequence
  ENSG00000102996_13 (sequence is synthesized)
ctgaccaccggccgccccggcctccccagccaccacccccaggtgggaagccagagcggcccccaaagccgggccccccagtccagccccgagccacagagcggcccgaccagtatggcc

SEQ ID NO: 133730 - DNA, 120 bp, Artificial Sequence
  ENSG00000102996_14 (sequence is synthesized)
cccgaccagtatggccccaacatctgcgacggggactttgacacagtggccatgcttcgcggggagatgttcgtgttcaagggccgctggttctggcgagtccggcacaaccgcgtcctg

SEQ ID NO: 133731 - DNA, 120 bp, Artificial Sequence
  ENSG00000102996_15 (sequence is synthesized)
gacaactatcccatgcccatcgggcacttctggcgtggtctgcccggtgacatcagtgctgcctacgagcgccaagacggtcgttttgtctttttcaaaggtgaccgctactggctcttt

SEQ ID NO: 133732 - DNA, 120 bp, Artificial Sequence
  ENSG00000102996_16 (sequence is synthesized)
ggccacaccttcttcttccaagaggacaggtactggcgcttcaacgaggagacacagcgtggagaccctgggtaccccaagcccatcagtgtctggcaggggatccctgcctcccctaaa

SEQ ID NO: 133733 - DNA, 120 bp, Artificial Sequence
  ENSG00000102996_17 (sequence is synthesized)
ggggccttcctgagcaatgacgcagcctacacctacttctacaagggcaccaaatactggaaattcgacaatgagcgcctgcggatggagcccggctaccccaagtccatcctgcgggac

SEQ ID NO: 133734 - DNA, 120 bp, Artificial Sequence
  ENSG00000102996_18 (sequence is synthesized)
ttcatgggctgccaggagcacgtggagccaggcccccgatggcccgacgtggcccggccgcccttcaacccccacgggggtgcagagcccggggcggacagcgcagagggcgacgtgggg

SEQ ID NO: 133735 - DNA, 120 bp, Artificial Sequence
  ENSG00000102996_19 (sequence is synthesized)
gatggggatggggactttggggccggggtcaacaaggacgggggcagccgcgtggtggtgcagatggaggaggtggcacggacggtgaacgtggtgatggtgctggtgccactgctgctg

SEQ ID NO: 133736 - DNA, 120 bp, Artificial Sequence
  ENSG00000102996_20 (sequence is synthesized)
ctgctctgcgtcctgggcctcacctacgcgctggtgcagatgcagcgcaagggtgcgccacgtgtcctgctttactgcaagcgctcgctgcaggagtgggtctgaccacccagcgctcct

SEQ ID NO: 133737 - DNA, 120 bp, Artificial Sequence
  ENSG00000102996_21 (sequence is synthesized)
gctaacggtgctcagggggcgcctgtggttctgagatggctcccaggggctccctccgcccccaggtaggggcccctctcagccctcacacaccctgtctgccccgccctcattatttat

SEQ ID NO: 133738 - DNA, 120 bp, Artificial Sequence
  ENSG00000102996_22 (sequence is synthesized)
gtccaggtgtttgttttgttttgtttttggcaccttacttgaccatttgtttctgtttccccgactggggcagggtgtttagaattttctaaatgtagttctgctccagacagggaatta

SEQ ID NO: 133739 - DNA, 120 bp, Artificial Sequence
  ENSG00000102996_23 (sequence is synthesized)
ggcccccatcatcctctggcttggccacagccaggggagcagaggggcagaggcccacattggaagagcagcacctcctcagcctgaaccccagggctgtaactgccaggctctctttgc

SEQ ID NO: 133740 - DNA, 120 bp, Artificial Sequence
  ENSG00000102996_24 (sequence is synthesized)
ccagttggagactgtctggcccccctggtcccctccttcccaagtgagtctctctgggccttaggaagagccttccacccaggggcagccccaggccaaaggggacctggaagggaggtg

SEQ ID NO: 133741 - DNA, 120 bp, Artificial Sequence
  ENSG00000102996_25 (sequence is synthesized)
ggccgtggcccttgagtccccattgaggcttggttccttcccaatccagtggacttcgcagtccacttctgacagcctcagtgaccctggctccttgtgccagagaacccagcccacccc

SEQ ID NO: 133742 - DNA, 120 bp, Artificial Sequence
  ENSG00000102996_26 (sequence is synthesized)
cggcagcagcccccagctcccacctccccttgggcccacacctccttccctctctggagaaagggccctgggcctgcctcaccacggaccaaagggagtctgccagggcccctctcccca

SEQ ID NO: 133743 - DNA, 120 bp, Artificial Sequence
  ENSG00000102996_27 (sequence is synthesized)
gggaagcagcagcctcgcccctggcagagatgcctccctgagctagaaccctctgttccttccctgtgcctcctccctccctctccgactcacaccactagcctcaggggtctgagctcc

SEQ ID NO: 133744 - DNA, 120 bp, Artificial Sequence
  ENSG00000102996_28 (sequence is synthesized)
agctcctttgggcttcagctgccagtgtcctgagccccagggagagggggctggtgggtgcctaggcctgggcagtggatggccgtgaatgggtgcccacagtgtcaggcactgggcatg

SEQ ID NO: 133745 - DNA, 120 bp, Artificial Sequence
  ENSG00000102996_29 (sequence is synthesized)
aggggttcctcccctccagctccctgtgcccccagggtcctgggaggagagacactggtggggataggccagccgcgcatcagactgtgaaccccacgaaggagcccattgtggcctaag

SEQ ID NO: 133746 - DNA, 120 bp, Artificial Sequence
  ENSG00000102996_30 (sequence is synthesized)
aggctgccctcctgtgctcagccctgaggacagatgcctccttcctcttttccttcccaaagcaagcaagaggccgtggctgctgtgggaaatggtactgtacagctggctctacttccc

SEQ ID NO: 133747 - DNA, 120 bp, Artificial Sequence
  ENSG00000102996_31 (sequence is synthesized)
catggccctgagcgagtggagtctgccacccaggatccccaaggcacttgagggggaaggattctgctggcctctgcgagtggtttcttgtgcactggcaccaagtgcgggtccggcagc

SEQ ID NO: 133748 - DNA, 120 bp, Artificial Sequence
  ENSG00000102996_32 (sequence is synthesized)
ttctgccccctgcagaaccggagagccagctaaggggtggggctgcgggggttccgtgtccacccccatacatttatttctgtaaataatgtgcactgaataaattgtacagccggcaaa

SEQ ID NO: 133749 - DNA, 120 bp, Artificial Sequence
  ENSG00000102996_33 (sequence is synthesized)
gccaatgaggagtaggcattgctgccatccccattttgtagatgaggaacccaaggctcagtgaggattagtgacttgcccacatcatttggggaataaatggtggtactggaaatgaaa

SEQ ID NO: 133750 - DNA, 120 bp, Artificial Sequence
  ENSG00000103005_0 (sequence is synthesized)
gcggtgccagcccaggccccgcccctgggagggcgcttccggcacagcggaactccgggtgccggttgaggttgctggtggacctgctctggtggtcttggatgaggccccatgagcgcg

SEQ ID NO: 133751 - DNA, 120 bp, Artificial Sequence
  ENSG00000103005_1 (sequence is synthesized)
gcgcccctggtgggctacagcagcagcggctccgaggatgagtccgaggacgggatgcggaccaggccgggggatgggagccaccgtcgtggccagagcccccttcccaggcagagattt

SEQ ID NO: 133752 - DNA, 120 bp, Artificial Sequence
  ENSG00000103005_2 (sequence is synthesized)
ccagtacctgacagtgtgctgaacatgttcccgggcaccgaggaggggcctgaagatgacagcacaaaacacgggggacgggtgcgcaccttcccccacgagcgaggcaactgggccacc

SEQ ID NO: 133753 - DNA, 120 bp, Artificial Sequence
  ENSG00000103005_3 (sequence is synthesized)
cacgtctatgtaccatatgaagccaaggaggagttcctggatctgcttgatgtgttgctgccccatgcccagacatatgtcccccggctggtaaggatgaaggtgttccacctcagcctg

SEQ ID NO: 133754 - DNA, 120 bp, Artificial Sequence
  ENSG00000103005_4 (sequence is synthesized)
tcccagagtgtggttctgcgccaccactggatcctccccttcgtgcaggctctgaaagcccgtatgacctccttccacagattcttctttactgccaaccaggtaaagatttacaccaat

SEQ ID NO: 133755 - DNA, 120 bp, Artificial Sequence
  ENSG00000103005_5 (sequence is synthesized)
caagagaaaaccaggacctttattgggcttgaggtcacttcagggcatgcccagttcctggacctggtttcagaggtggacagagtcatggaggaattcaacctcaccactttctaccag

SEQ ID NO: 133756 - DNA, 120 bp, Artificial Sequence
  ENSG00000103005_6 (sequence is synthesized)
gatccttctttccacctcagcctggcctggtgtgtgggtgatgcacgtctccagctggaggggcagtgcctgcaggaactacaggcaatcgtggatgggtttgaagatgctgaggtgctg

SEQ ID NO: 133757 - DNA, 120 bp, Artificial Sequence
  ENSG00000103005_7 (sequence is synthesized)
ctgcgcgtgcacactgagcaagtccgctgcaagtctgggaacaagttcttctcgatgcctttgaagtgagcaccagaggccttcctcctccagggccctctgcagaccaggctgagatgg

SEQ ID NO: 133758 - DNA, 120 bp, Artificial Sequence
  ENSG00000103005_8 (sequence is synthesized)
aggaacctgctaaaatcgatggagatgcttctagcctcccagtaggaggccccagccatgccttcaacctggcaggaggtgtagccactcctcatcctccctgagtgctgatattctctc

SEQ ID NO: 133759 - DNA, 120 bp, Artificial Sequence
  ENSG00000103005_9 (sequence is synthesized)
tctctttctcttcctcttctttctctctcttctcctctctttctctcctctgtctctcttcctctcctctcttcctctcttctctcttcctctcctctctctcttcctcttctctctctt

SEQ ID NO: 133760 - DNA, 120 bp, Artificial Sequence
  ENSG00000103005_10 (sequence is synthesized)
cccctcctgtctctcctcccctcctctcttcctctcctctctcttcctctcctctctctacccctcctgtctctcctcccctcctctctcttcctctcctctctctcttcctctcctctc

SEQ ID NO: 133761 - DNA, 120 bp, Artificial Sequence
  ENSG00000103005_11 (sequence is synthesized)
tcttcccttcctgtctctcttcccctcctctctctcttcctgtcctctatctcttcccctcctctatctcttcctctcctctctctcttcctctcctctctctctcttgctttcttctct

SEQ ID NO: 133762 - DNA, 120 bp, Artificial Sequence
  ENSG00000103005_12 (sequence is synthesized)
ctctcctgtctcggctgttgtgggttgcaggttgggtgctgctgttgtggtccttcccagaaactgccagtagagggcagcctgggcatcctaatgcttactctggttgttacacaaaga

SEQ ID NO: 133763 - DNA, 120 bp, Artificial Sequence
  ENSG00000103005_13 (sequence is synthesized)
aaatattggggtcactggcgagcccacccacactcaccagaatctccactgtagtccccctaacaaacagcccttcacttcctctcccacttcagcaatttgtattttgatgccattggc

SEQ ID NO: 133764 - DNA, 120 bp, Artificial Sequence
  ENSG00000103005_14 (sequence is synthesized)
ctcagatcagagtgttttaaatcatcacgccctggcttatccctggtcgagccaggacacggggtgcttcagtgggtctgtcaccctctctccttgaagcatgttgcttttatttattta

SEQ ID NO: 133765 - DNA, 120 bp, Artificial Sequence
  ENSG00000103005_15 (sequence is synthesized)
cttttactctcaccctgctcctgtaccagcaggggccacttcaaagccaaggtacagggtgataacttgtggtccagcatcagttttctccacttctttctcccactcacccccagcaag

SEQ ID NO: 133766 - DNA, 120 bp, Artificial Sequence
  ENSG00000103005_16 (sequence is synthesized)
gtgcctggggagacttgagcagatgtttcattttggcctggccagtggctgaaagccaggcctccaatgcactgtgacctctggcttccccagcagctttcccagagaggcagaggggcc

SEQ ID NO: 133767 - DNA, 120 bp, Artificial Sequence
  ENSG00000103005_17 (sequence is synthesized)
ttccacagcccgggttctcctgctgcctcctgcctgctgcagctgcaggcattctgaggggcaacgtggaggaagggccagggatgcatgggattttaattgtttcatcacaccttcccc

SEQ ID NO: 133768 - DNA, 120 bp, Artificial Sequence
  ENSG00000103005_18 (sequence is synthesized)
gtggcaaagaaacagtcagtcctcttcaggtgtcttctggatttctggtgatggacagagaaatctttttacagtttcaaattatgttcaacaaataaaaattgcattttttattttgga

SEQ ID NO: 133769 - DNA, 120 bp, Artificial Sequence
  ENSG00000103005_19 (sequence is synthesized)
agatgcaacccacttccaggttcccagctcatctgcctcttacatttaaaagtttgtaagttttctcctgagcagaggaagaaggaaggagaagccttcacaggacagtctggcctctaa

SEQ ID NO: 133770 - DNA, 120 bp, Artificial Sequence
  ENSG00000103005_20 (sequence is synthesized)
aaataaataatgactggaggagcatgtagtggggtggtgcccagagattgagagaagcatcttggtttagtgaaaacctgtgaaagtcaggaaacctgtttctgcccagctccatcccag

SEQ ID NO: 133771 - DNA, 120 bp, Artificial Sequence
  ENSG00000103005_21 (sequence is synthesized)
ttgtggtgtttagtccgtgtcttcatctctgtgacctttcattttcacactggcacacgcctcccaacatccactgttgggcagttgtaaggctcaaatgagccccaaggcctttgaaaa

SEQ ID NO: 133772 - DNA, 120 bp, Artificial Sequence
  ENSG00000103005_22 (sequence is synthesized)
gttaaaagtattaaagtgttagatgaacataagaagaaatgattatcctgccttcaaagcgagcctccctgtctgatgcactcactgggccaccttctctgagcacttctgaaaggggcc

SEQ ID NO: 133773 - DNA, 120 bp, Artificial Sequence
  ENSG00000103005_23 (sequence is synthesized)
tcatttattcattcatttattccatgctgcacaagtttgttaagcacccacttgtgccaggcatttgctgtacactaaggattcatcagtgaagaggtagacacagcccctgctcttttc

SEQ ID NO: 133774 - DNA, 120 bp, Artificial Sequence
  ENSG00000103005_24 (sequence is synthesized)
aatctcatattcagaggggagacagataataaacaagtaatgagagtgtttgttaataactgtggtgtgatatggtcaggagtgggtagtccaggagggtaccagggaagtggccaggga

SEQ ID NO: 133775 - DNA, 120 bp, Artificial Sequence
  ENSG00000103005_25 (sequence is synthesized)
gatggcatttgatggtgacctgagaatgagaagccagccttgggaagagctgttgcaagagcttcaagcagaggacatagcaaactaagtgactccgaggcagggaagatttcagcatgt

SEQ ID NO: 133776 - DNA, 120 bp, Artificial Sequence
  ENSG00000103005_26 (sequence is synthesized)
ttgaggaggccagtgaggcagaccccagaaagcacgagggagaatgataggagatgagatgggtagggttagcccatccaggggctgcaagctcaagtaaggagtttgaattttcagtat

SEQ ID NO: 133777 - DNA, 120 bp, Artificial Sequence
  ENSG00000103005_27 (sequence is synthesized)
aatggaagccattggagggatttgaacagaggagaggcatgacctgatctatatctggggatgtcagtctggctagtggtgtgtctgtggccatggagtctgggggcaagatagaaggga

SEQ ID NO: 133778 - DNA, 120 bp, Artificial Sequence
  ENSG00000103005_28 (sequence is synthesized)
gcaagagtggatgcagggaaaccagagaggagccaggtgtcattgtccaggtgagggaccattggtggcctagattagggtgatggccatggaagaccaagaggtggacacattggagat

SEQ ID NO: 133779 - DNA, 120 bp, Artificial Sequence
  ENSG00000103005_29 (sequence is synthesized)
acactagaggcagaagcaaccaaattaccaatgggttggatttatgtgaagcaaggggaagacgaacattgattcctgggtttgaggctagaacaactggccccgttttctgtgataaga

SEQ ID NO: 133780 - DNA, 120 bp, Artificial Sequence
  ENSG00000103005_30 (sequence is synthesized)
gacactggtgggatgaaaagcaaaagtgctgctttgtacctgtttgtttgtacctgctaggttttgctatctattggacccctaggtggaaatgtcacatatacaactgggtgttcagga

SEQ ID NO: 133781 - DNA, 120 bp, Artificial Sequence
  ENSG00000103005_31 (sequence is synthesized)
gagggaccagctggagatagaaatgtgggcagtgttggcctgtgtgggaagcggggctgggtgagatcagcctcctggagagtgcagatggagaagatccagtgatcttcaccacgggga

SEQ ID NO: 133782 - DNA, 120 bp, Artificial Sequence
  ENSG00000103005_32 (sequence is synthesized)
ggctggagaggagagagggtggcagaggacactgaaccgggagacaggaggcaggattaaaccaagactgcgtggcaggtgatgtcttgggagccaagagagaaaagggtttcaaggagg

SEQ ID NO: 133783 - DNA, 120 bp, Artificial Sequence
  ENSG00000103005_33 (sequence is synthesized)
gaagagtccactgtgtgagatactgctgggtgcgtacgaggcggacagcgaagtgtcccttggatttggtaacgtggaggttgttggcaactttgacaagaggactcccagcaaagtggg

SEQ ID NO: 133784 - DNA, 120 bp, Artificial Sequence
  ENSG00000103005_34 (sequence is synthesized)
ttgaagatgggaggtgagaaagagatagtgatggtggacaaatggtctttttgagaagtttcactgagaatgggatggggacgtgctgaaaccgtgggttcaggggagagtttttaaaga

SEQ ID NO: 133785 - DNA, 120 bp, Artificial Sequence
  ENSG00000103005_35 (sequence is synthesized)
tgagagagcatgcctgagtgcttgtgggaggcgtggcagatgcctgggagcaaagtcctcgagaagaggcctccttgaggacaggagtcatttgcgattggaatgatgatggagaatggg

SEQ ID NO: 133786 - DNA, 120 bp, Artificial Sequence
  ENSG00000103005_36 (sequence is synthesized)
ttcctggaagggttattagatccagagaagggaggagagctgtgtgggtgagaactgggaaaggaagatttacagacagagaatctgaggactgagagagttggctcatggagcaggaaa

SEQ ID NO: 133787 - DNA, 120 bp, Artificial Sequence
  ENSG00000103005_37 (sequence is synthesized)
gcgagtgtaccagggagacggtgagacccacggcccaggcctcttggccttctgcctggctcctgctcggctgcgcagatggctgtgttctcagaggctacatctcatgcctgcgttgtc

SEQ ID NO: 133788 - DNA, 120 bp, Artificial Sequence
  ENSG00000103005_38 (sequence is synthesized)
ggctctgaaagcccgtatgacctccttccacaggtgccagaagcccatgccagaagcccaacccaaagtggcttaaaccaaagagaaatttataggctggtataactaaaagattcagag

SEQ ID NO: 133789 - DNA, 120 bp, Artificial Sequence
  ENSG00000103005_39 (sequence is synthesized)
gtagcactggctcatgcatgagtggaccggggtgacaagatatcagatggcacctgactgtcaccaccacaggcagactgttcaccatctcagctctgtccccttcctttgtcacaatga

SEQ ID NO: 133790 - DNA, 120 bp, Artificial Sequence
  ENSG00000103005_40 (sequence is synthesized)
cgaagccaccgcatctcccggctaatggtgtaccagcctggaaagacagcctccctctctgattggcttcagcacaagtcacaggaatgactgcctggtctgacccgtctcctgtgtgct

SEQ ID NO: 133791 - DNA, 120 bp, Artificial Sequence
  ENSG00000103005_41 (sequence is synthesized)
tctgcccctggatgaaggaggagagcggctatgttagtgctgatgactggcacactgcacttgcgctaggaagacagcatgaactgcacccctccagggaagccacggcctgggctcccc

SEQ ID NO: 133792 - DNA, 120 bp, Artificial Sequence
  ENSG00000103005_42 (sequence is synthesized)
tgcatacagtggttccttaactgggcacgagtcccttgctgggacttaggaaaactctgcctaaagtccattgcaagaaatactgatccctgtgggatgtatatgtggctggttcccttg

SEQ ID NO: 133793 - DNA, 120 bp, Artificial Sequence
  ENSG00000103005_43 (sequence is synthesized)
ctcactgagagactagaaaacagcacctggacccctgggctggttccctctgaggaaaggatctgtgtcatgagtgaagcccgggcaggtgtggtctgttcaactttgatcatctggttg

SEQ ID NO: 133794 - DNA, 120 bp, Artificial Sequence
  ENSG00000103005_44 (sequence is synthesized)
agcctaaggtgaccaagagtgggcggtgcacccctgattctgttgctgtgactgaggaaatgctaagctctgtttggccaggcctgggcagcctgcctctggagtaggggtggagagcca

SEQ ID NO: 133795 - DNA, 120 bp, Artificial Sequence
  ENSG00000103005_45 (sequence is synthesized)
tcctgcaacacgaggttaccaggagaaggagttttggttgggcacagacatccagtgtccactccaggatgtttgggagacaccttgagaactcttcctaaaagctgcacttaaccaagc

SEQ ID NO: 133796 - DNA, 120 bp, Artificial Sequence
  ENSG00000103005_46 (sequence is synthesized)
tcctggtggttctgtgatcccttacattttctccagaggcagagagttggctgactgacttttgcccttgggcagattgtgaggctctacccagcatgctggtatattatgttccctcag

SEQ ID NO: 133797 - DNA, 120 bp, Artificial Sequence
  ENSG00000103005_47 (sequence is synthesized)
atgggggtgagacccttggcctgggggctgtaaaatgatctgtttctgtgaggagactttccatggtgagattgctagtgtctcagagaataaaggacagaaccagtccaagtcaaagca

SEQ ID NO: 133798 - DNA, 120 bp, Artificial Sequence
  ENSG00000103005_48 (sequence is synthesized)
ttcaggcaaacagtccacttactagggcgccagtttattacaaaggatatgttacaggatacacatgaacagccagatgaagagataggtagggtgaggtctggaagggtcccgagcatg

SEQ ID NO: 133799 - DNA, 120 bp, Artificial Sequence
  ENSG00000103005_49 (sequence is synthesized)
ggagcttctgaccctgtggagttgggagtgagccaccctcccagcacatgggtgcgttcttaatcaccaagggaagctcctcaaaccctgtagttccaaatttttacggaggcttcatca

SEQ ID NO: 133800 - DNA, 120 bp, Artificial Sequence
  ENSG00000103005_50 (sequence is synthesized)
cataggcatgatggattattaactcagtctctagcttccctcccataccgggagggtagggggtggggctgaaagttcccagcttctaatcatgccttgctctttctgtgatcagccccc

SEQ ID NO: 133801 - DNA, 120 bp, Artificial Sequence
  ENSG00000103005_51 (sequence is synthesized)
atccaggacctcattgcctcattggaaccaaagatgcccctgtcacccaggaaattccaaaggatttaggagctctgcgtcaggagccaggatcacagaccagataatagaacaaaagat

SEQ ID NO: 133802 - DNA, 120 bp, Artificial Sequence
  ENSG00000103005_52 (sequence is synthesized)
gctcctagcacccctgctgcttaggaaatgacacaggttttaggatctctgtgtcaggaactggaggctgagaccaacacatatgttatcatttcacagtgataggtcaaacaggtcatg

SEQ ID NO: 133803 - DNA, 120 bp, Artificial Sequence
  ENSG00000103005_53 (sequence is synthesized)
gtaatggtgggagctacctcactgggggcctatgggggtgaaaggagatcatgggtgccctcagcacaccacttgggtgaagggttagtaccagaccccacttctggttttgtctgccag

SEQ ID NO: 133804 - DNA, 120 bp, Artificial Sequence
  ENSG00000103005_54 (sequence is synthesized)
cctggggctttttttttccccttacctattagattatttcataactcttttcctaccagaaatgcatctcctgctagactggtccagatcaaaaccctgctctttcactgaggctctccc

SEQ ID NO: 133805 - DNA, 120 bp, Artificial Sequence
  ENSG00000103005_55 (sequence is synthesized)
ggttggcatatcctgcagaatccctccgtccagagatcagtcggtcctgtggttgtttcacaggtgactcctctgtccagagatcagtcggtcctgtggttgtttcacaggtgacacctc

SEQ ID NO: 133806 - DNA, 120 bp, Artificial Sequence
  ENSG00000103005_56 (sequence is synthesized)
cgtccagagatcagttggccctgtggttgtttcacaggtgacccctccatccagagatcagttggtcctgtggttctttacccctggtggtcatttcactcaccctcatatgcagtcgtt

SEQ ID NO: 133807 - DNA, 120 bp, Artificial Sequence
  ENSG00000103005_57 (sequence is synthesized)
cctgtgtccatcttccttcctggagcccacattcctccaggccaggactgtggcttctctctgaattgccccacagcttttttccaagtgctctgctcacagtagacatcaaatagatgc

SEQ ID NO: 133808 - DNA, 120 bp, Artificial Sequence
  ENSG00000103005_58 (sequence is synthesized)
ttgttgagtcatggtgcgggaatgagggagcctagagaatatctttctggatcctctactgttgatactagaaggagcctaagaagccacccggctgatggttttctgaccctgccttta

SEQ ID NO: 133809 - DNA, 120 bp, Artificial Sequence
  ENSG00000103005_59 (sequence is synthesized)
tcagcagagccttttttcaaatgaggtgttgcacaaaagcctgatgtgtggctgtgtaaaacagaaataaacagtcttctagccaaagccccattcccacagttcagggggccataggcc

SEQ ID NO: 133810 - DNA, 120 bp, Artificial Sequence
  ENSG00000103005_60 (sequence is synthesized)
atgtcactgcccaactaggaaactgctcagttagctgaaccccttctgagggccagaggaggacaggatttgtcccaatccagacactcggccagggaataagggctgaaactcatctct

SEQ ID NO: 133811 - DNA, 120 bp, Artificial Sequence
  ENSG00000103005_61 (sequence is synthesized)
gatttcacaccaacagacctattcccctcacgaaagcgtcataggtgacaacaaggactctggaaacaggcagactgactgttccaatcctggctcaccaaattcagcttcaccatgcct

SEQ ID NO: 133812 - DNA, 120 bp, Artificial Sequence
  ENSG00000103005_62 (sequence is synthesized)
ctgtttctttgtctgtaaaatgggcataattgtaggcctgctcacagagttgtgtgaggattcgagaaacagagtgtgcaaaggcttgagctcagccctgacacacgaagaaatgttgtc

SEQ ID NO: 133813 - DNA, 120 bp, Artificial Sequence
  ENSG00000103005_63 (sequence is synthesized)
gtgattgcttagatgaaatcggagtcatctattttaaaaaactgcaagaaatgaatcagctgttaagtggtccattatcacctacttgatcaataaggctttctcagttcccatcagtga

SEQ ID NO: 133814 - DNA, 120 bp, Artificial Sequence
  ENSG00000103005_64 (sequence is synthesized)
aaagtaaaatttttactagcacctggatgatgttgtgtgttactcgggctgggtgattttaaggtcttgtccagctctaatgtttaaggttcagtataccacctgcataatggggtgata

SEQ ID NO: 133815 - DNA, 120 bp, Artificial Sequence
  ENSG00000103005_65 (sequence is synthesized)
atatgaagtgcaaaatgagttaactatattttcaaagtgctgtttttttttaacataagctattttttctgctttttttcttacgatttttcctgaaatatggtcttctaaatttcagat

SEQ ID NO: 133816 - DNA, 120 bp, Artificial Sequence
  ENSG00000103018_0 (sequence is synthesized)
tgggccctggttacggaagccgaggaaggctgagcgcgggctctcaaggaaagtagtcgcggaatctcagttagcggtggagaggcagtatgtccggttcaatggcgactgcggaagcta

SEQ ID NO: 133817 - DNA, 120 bp, Artificial Sequence
  ENSG00000103018_1 (sequence is synthesized)
gcggcagcgatgggaaagggcaggaagtcgagacctcagtcacctattaccggttggaggaggtggcaaagcgcaactccttgaaggaactgtggcttgtgatccatgggcgagtctacg

SEQ ID NO: 133818 - DNA, 120 bp, Artificial Sequence
  ENSG00000103018_2 (sequence is synthesized)
atgtcacccgcttcctcaacgagcaccctggaggagaagaggttctgctggaacaagctggtgtagatgcaagtgaaagctttgaagatgtaggacactcttctgatgccagagaaatgc

SEQ ID NO: 133819 - DNA, 120 bp, Artificial Sequence
  ENSG00000103018_3 (sequence is synthesized)
taaagcagtactacattggtgatatccatccgagtgaccttaaacctgaaagtggtagcaaggacccttcaaaaaatgatacatgcaaaagttgctgggcatattggattttacccatca

SEQ ID NO: 133820 - DNA, 120 bp, Artificial Sequence
  ENSG00000103018_4 (sequence is synthesized)
taggcgctgttctcttaggtttcctgtaccgctactacacatcggaaagcaaatcctcctgaggaggccttgctgaagttagaaagtgcatccactttggggcgaaaactagagacttgc

SEQ ID NO: 133821 - DNA, 120 bp, Artificial Sequence
  ENSG00000103018_5 (sequence is synthesized)
ttgggggctgcagaagtgccctctcctcgaatcctgccagttgcattcttcccccttggagccaagacgattggccagacatcacctcagatctgagaccagcgtcttccatctctcaga

SEQ ID NO: 133822 - DNA, 120 bp, Artificial Sequence
  ENSG00000103018_6 (sequence is synthesized)
gccttactcccaaagtacctgctcactgttccgtgttgaacaattgccggtgtttcctctcttcactggtttccatgagtacccttatatttcacaactttctgttcataagttatagtg

SEQ ID NO: 133823 - DNA, 120 bp, Artificial Sequence
  ENSG00000103018_7 (sequence is synthesized)
acattgctctttggtaaaaatgcctgctttccaatactttgattgcatattagacattcttaacagggcggcagtctagtgttgaaagttttatttttccatttttcttttaagtaaatt

SEQ ID NO: 133824 - DNA, 84 bp, Artificial Sequence
  ENSG00000103018_8 (sequence is synthesized)
gttgaaagttttatttttccatttttcttttaagtaaattttttttaaaaaattctgatttagggctaggtgtggtggctcaga

SEQ ID NO: 133825 - DNA, 120 bp, Artificial Sequence
  ENSG00000103018_9 (sequence is synthesized)
catagcgagacccctatctgtattaaaaaaaaatctgatttaattcttttatttatcataaggggtttaattcctgaagtaaaggtttgcacctattaaacttaaaactgccaaatgatt

SEQ ID NO: 133826 - DNA, 120 bp, Artificial Sequence
  ENSG00000103018_10 (sequence is synthesized)
tttgttcttttatgtgcgtgataaaaatacaaagaatggtgtggccacctcctccctttcaagctagggcagcaggtagctcttcccagcccctgagcccagccccttcccaagtggtgc

SEQ ID NO: 133827 - DNA, 120 bp, Artificial Sequence
  ENSG00000103018_11 (sequence is synthesized)
cggacaaaaaactacatggccctttcgtgtcttgggggtggaaaggtagggatgaattggggtgatagaaccctggtgaattcagagtaatctttctttagaaaactggtgttttctaaa

SEQ ID NO: 133828 - DNA, 120 bp, Artificial Sequence
  ENSG00000103018_12 (sequence is synthesized)
gaaacaggataggagtttagagaaggcaccaaagctttcactttggtttggcaccagtttctaaccatctgttttttctaccctagctatcttttattggtaaaatataaatgtataatt

SEQ ID NO: 133829 - DNA, 120 bp, Artificial Sequence
  ENSG00000103018_13 (sequence is synthesized)
atgtttgtagagctttaccaaggagtttccctccttttttgtttgttgattagcaaatttttgattctccattttccaaaagtaagagactccagcatggccttctgtttgccccgcagt

SEQ ID NO: 133830 - DNA, 120 bp, Artificial Sequence
  ENSG00000103018_14 (sequence is synthesized)
aaagtaacttccatataaaatggtatttgaaagtgagagttcatgacaacagaccgttttccatttcatctgtattttatctccgtgactccaacttgtgggtttgttctgtttttccat

SEQ ID NO: 133831 - DNA, 120 bp, Artificial Sequence
  ENSG00000103018_15 (sequence is synthesized)
gagaataaaatactggcggtttttttctcagatgtgtgttcattgagaagtaggttactagaattatgttactgtgtcttattggttcaatgatgatttctctggcatattagactttta

SEQ ID NO: 133832 - DNA, 120 bp, Artificial Sequence
  ENSG00000103018_16 (sequence is synthesized)
ttttttcccccatggaagcacttgaggaaataaatagtacactggctgttttctgccagcaactgtggtgatttttctccctgtcctttgagaattgctagtctgcttctgagccattgt

SEQ ID NO: 133833 - DNA, 120 bp, Artificial Sequence
  ENSG00000103018_17 (sequence is synthesized)
tgatgagacaggaaactgcccagcaaaccagggactgcccatgtaaactatttaagaaaaagttcaacccaggtcttgtatcctgtgatttagcagttgaatgaatacagaattcatcaa

SEQ ID NO: 133834 - DNA, 120 bp, Artificial Sequence
  ENSG00000103018_18 (sequence is synthesized)
aataatattaaccttgtacttgcacacttggatatatttgggagtaattttaggagatttctggctgacttttattatcagggatatgggtttagtaaagcttttatctttagaaaaatg

SEQ ID NO: 133835 - DNA, 120 bp, Artificial Sequence
  ENSG00000103018_19 (sequence is synthesized)
tttgtatgcattataagatgctacttttaagacaatattgaaaaaaactttggttattatttaacaaaagtggtatgacttgatgcttctctatttaaaggcaaggaaggattggtatat

SEQ ID NO: 133836 - DNA, 120 bp, Artificial Sequence
  ENSG00000103018_20 (sequence is synthesized)
gattgcctgtaataaataaattgcgtgattattggagtacattggggtaaaagtaaagaacagaggagtattgaggagcttgaaagggaacattcaaactaaagccaagcctgaagataa

SEQ ID NO: 133837 - DNA, 120 bp, Artificial Sequence
  ENSG00000103018_21 (sequence is synthesized)
cttgaatcagttgtaaaagtgtgttggcaatgtccgaaattgaatgaaaaacatctggcttataagaaatgttaaagaactaccatcttaagtaaaattggtgtttttgttatttttaag

SEQ ID NO: 133838 - DNA, 120 bp, Artificial Sequence
  ENSG00000103018_22 (sequence is synthesized)
gtaaatgccaatgcaaaaggtatgtttttctacttcacattggttttcttttcctgtttacatctgcacttgttttttgctgagagccagaggaaaagataattagactttgtctcttcc

SEQ ID NO: 133839 - DNA, 120 bp, Artificial Sequence
  ENSG00000103018_23 (sequence is synthesized)
acccatgaaatcccccagtacccagggcttcttctgaactactgccgatgtgatgtcactttgtatctggaaaatcactttggggtccatttactgttattttgttgcctacaaaaacag

SEQ ID NO: 133840 - DNA, 120 bp, Artificial Sequence
  ENSG00000103018_24 (sequence is synthesized)
ccaggtgaaagctaaatcttgtgtgagagtttgcagaggtttttctatacaataaagtagtatagcacactagccaaatccatccaaaaggaccttttttttaggaagtagacttgaatt

SEQ ID NO: 133841 - DNA, 120 bp, Artificial Sequence
  ENSG00000103018_25 (sequence is synthesized)
cacaaaacagtcttgacatgggtagctggtgaaaaaccctctggagagcaagtggagccagtccccattggctgacagtgccacctggagctggtctctggggtgttcggttgtttattc

SEQ ID NO: 133842 - DNA, 120 bp, Artificial Sequence
  ENSG00000103018_26 (sequence is synthesized)
ctgaggaagactagctgctgctgctgctgctgctgcaaactgtactgtacacatcatggctgctggacacgaaggaggaggtgagagaagtttcatgctaccgaaatagagggtgttggt

SEQ ID NO: 133843 - DNA, 120 bp, Artificial Sequence
  ENSG00000103018_27 (sequence is synthesized)
accactgcccctggcctgagagccagggtttaaacctgcctcagtagagtctagtttgaaatgacaccaaaattcctcagcccctactcagcaattggttttggtttccaaatgacttct

SEQ ID NO: 133844 - DNA, 120 bp, Artificial Sequence
  ENSG00000103018_28 (sequence is synthesized)
gcatttgtaaagataacagagtggtggggtcaaagtttatcttgtgtttagatctcttcaagactgcttaagcaaaaacaaaaatcccttggaacctatcgtttgagcctgtaaagttgt

SEQ ID NO: 133845 - DNA, 120 bp, Artificial Sequence
  ENSG00000103018_29 (sequence is synthesized)
tttagcagttgtcataaatgcatatgttgtgaaatcagaacactgtcgagtttatactcatttagctgcaatgtgggacaatgaaaaatgctttacaggcctggagtatcattacttatg

SEQ ID NO: 133846 - DNA, 120 bp, Artificial Sequence
  ENSG00000103018_30 (sequence is synthesized)
gtatctcctgctttaaaatctcaagcgatatctatctggttaaattccattttaggagattgagatgcagaacgttaatgttcattacctcctcctaccccaagagaaatggattcagac

SEQ ID NO: 133847 - DNA, 120 bp, Artificial Sequence
  ENSG00000103018_31 (sequence is synthesized)
atgtcttgtctcaacaagaaattgatttttttttaaactatcttattctgttgccaaatatcacagaagtaatgaggagtttagttacatttggctgttgtgctctgaaagagccaggtt

SEQ ID NO: 133848 - DNA, 120 bp, Artificial Sequence
  ENSG00000103018_32 (sequence is synthesized)
tggaatttgtgggggtgatctaggaagaaggttccaaagaagcagaggcatttgtcaagttacctaccctatatccagcatcctcctcatgagcttcagtagctgctctttgcccacgct

SEQ ID NO: 133849 - DNA, 120 bp, Artificial Sequence
  ENSG00000103018_33 (sequence is synthesized)
tgtatcctacgtttgctatttgggcaaaccattacttcagttatttaacttccctttttttttaacttcacctttgactatgaacaagtaacggtaacattccttttgtgtattcaataa

SEQ ID NO: 133850 - DNA, 120 bp, Artificial Sequence
  ENSG00000103018_34 (sequence is synthesized)
tgcagttagtttacctttttcagaatattttgaacaaagatctttgtctctttctgctggaatgcgcacacagtgaacgtttgttagaactacacacaataaagacactgttttcctttt

SEQ ID NO: 133851 - DNA, 120 bp, Artificial Sequence
  ENSG00000103018_35 (sequence is synthesized)
aagcgcaactccttgaaggaactgtggcttgtgatccatgggcgagtctacgatgtcacccgcttcctcaacgaggacccttcaaaaaatgatacatgcaaaagttgctgggcatattgg

SEQ ID NO: 133852 - DNA, 120 bp, Artificial Sequence
  ENSG00000103018_36 (sequence is synthesized)
gtgcagtttgacaactaattcttttttggcccaaatcattgcaaattcagttgttccttgacattagaaaaattaacttttacagtttcagccattttgaataatctaaaagtttcatgc

SEQ ID NO: 133853 - DNA, 120 bp, Artificial Sequence
  ENSG00000103018_37 (sequence is synthesized)
cttgagtcattttttaatcttattgtgacataaattggaatcacactcagtaagaggccaggatgcatggacaggtagctactattgggtcagcctttagtcccgaagttcaacccagct

SEQ ID NO: 133854 - DNA, 120 bp, Artificial Sequence
  ENSG00000103018_38 (sequence is synthesized)
acatgattctacttaaaacttaatcgcatttacttctcacaaccactctgtaaggtaagtgctattattacatattgcaggagaaaaaaatactacggtcatatttaggaatttgggttt

SEQ ID NO: 133855 - DNA, 120 bp, Artificial Sequence
  ENSG00000103018_39 (sequence is synthesized)
tccatccgagtgaccttaaacctgaaagtggtagcaaggtaagaagtcagcggtttgtcttgtgtttatatttgtgtttactcaagtaggactgctttttgaaacattttttcttaacaa

SEQ ID NO: 133856 - DNA, 120 bp, Artificial Sequence
  ENSG00000103018_40 (sequence is synthesized)
gagaagttacaaagtatttactttttccccaagcaaaaatcctatttttctggaatttggactcagtatcatctcaggaataaaagaatagctgagtcttgaacagtaggaaacattttg

SEQ ID NO: 133857 - DNA, 120 bp, Artificial Sequence
  ENSG00000103018_41 (sequence is synthesized)
ctaatgcctttatacgctttttttttttaactgaaactccaaagctatgccctgtgtggttttgaaagaaattagtttatgggttcagttgtggaaaaatatcttacttttacattatgt

SEQ ID NO: 133858 - DNA, 120 bp, Artificial Sequence
  ENSG00000103018_42 (sequence is synthesized)
aggacaagtgataataattgtttctgtgttggaaaaaaataattgcaaagttgttttgtttcttataggttatcttctttatctgtaatacagaggcctttctgtacttattttccaaat

SEQ ID NO: 133859 - DNA, 120 bp, Artificial Sequence
  ENSG00000103018_43 (sequence is synthesized)
ttaattcttttttcctgtaggctcaaacaggcccacacccttcccggttacttagtaatacagcgaaaacaaaagactaagtatttgagtgtttgaaaactttaatgtgtactacattgc

SEQ ID NO: 133860 - DNA, 120 bp, Artificial Sequence
  ENSG00000103018_44 (sequence is synthesized)
ataccaggaagaaaatatggaaccattttctgcctcccacatgctaggtggttcatttcccttattccctaacaattttccttaatttctgtccttcagatagctggtacacagcactct

SEQ ID NO: 133861 - DNA, 120 bp, Artificial Sequence
  ENSG00000103018_45 (sequence is synthesized)
aatttaaagggacagcagtttaggtgccacctagaacataggaaagtgatgctgcctcccttccattttcctcctccttgctgcttgcttcccattcctcattgagccgaaattactgaa

SEQ ID NO: 133862 - DNA, 120 bp, Artificial Sequence
  ENSG00000103018_46 (sequence is synthesized)
ctgcaatccagagtgtttgtgtaaattaactcttccatgttgctagactgctactctgaactattgaattgtttctgaaaggggaatgaaatggttcttaaaacactttgtaacaactgt

SEQ ID NO: 133863 - DNA, 120 bp, Artificial Sequence
  ENSG00000103018_47 (sequence is synthesized)
tggttgtttgtcctctcctcctaacacatgtactatccattcttgaatccttaaaaaaaaaaaattaaatagttcaaaacagtattctgtaaaaagtttcttcctgtctcaagctctcag

SEQ ID NO: 133864 - DNA, 120 bp, Artificial Sequence
  ENSG00000103018_48 (sequence is synthesized)
tgtcttagttccccttccctggaggtaaccagccatcattttttgttgttgcttactcttaataacttgtgttattatggtaaaatttgaacgaagcgtggccttgatttgtatattgaa

SEQ ID NO: 133865 - DNA, 120 bp, Artificial Sequence
  ENSG00000103018_49 (sequence is synthesized)
catgtccagaaaataccactttcagaggtcaacatctgattcaaaggatataggagccataacacatttctgcacagcaactatgagagcatcttttatattaaaacaatagaaaaaata

SEQ ID NO: 133866 - DNA, 120 bp, Artificial Sequence
  ENSG00000103018_50 (sequence is synthesized)
tgtttgcaattacaatgtctagaagtctacagattgcttcttgttgctgtttttctttcttggtagtacagttaggaccattcttaggaatgtagaacaatgttccccaaattctgttct

SEQ ID NO: 133867 - DNA, 120 bp, Artificial Sequence
  ENSG00000103018_51 (sequence is synthesized)
tgtatcacctcagttggaatcccttggtatgtacatgaatatatataggaaatgtttatttcttgggcttctactcctactgctttggaatctctggagatagggtttaggaatttgcaa

SEQ ID NO: 133868 - DNA, 120 bp, Artificial Sequence
  ENSG00000103018_52 (sequence is synthesized)
tttaagtaatctaggtgataagtaggtagctaagcccaaactttttgctgaatgatatgcccatcttttcatttgaaaacttaggaaaatttaattctcttctgtggtaagcattgtctg

SEQ ID NO: 133869 - DNA, 120 bp, Artificial Sequence
  ENSG00000103018_53 (sequence is synthesized)
gaaaatttaattctcttctgtggtaagcattgtctgccttctataggccaaaggattagagatttctcagctgaattaaaactattgagccatccaggtgcagtggctcacgcctgtaat

SEQ ID NO: 133870 - DNA, 120 bp, Artificial Sequence
  ENSG00000103018_54 (sequence is synthesized)
ctgggcaacatggtgagaccctgtctctattttttaaaaatcataaaattagctgagcattataatgtgtgcctgcagtcccaactactggggaggctgaggctggaggatagcttgagc

SEQ ID NO: 133871 - DNA, 120 bp, Artificial Sequence
  ENSG00000103018_55 (sequence is synthesized)
gaggctgaggctggaggatagcttgagcccgggagtttgaggctgcagtgagccatggtaacaccattgcacttccatctgggtaacacagcatgaccccatctcaaaaaaaaaaaaaaa

SEQ ID NO: 133872 - DNA, 120 bp, Artificial Sequence
  ENSG00000103021_0 (sequence is synthesized)
gcagccggagtgacgcgtggccgccggcacccggagctcctgggcacacggcattggcaggggccgcttcggcagagtgatgactgatgatgagtccgagagcgtcctctccgactccca

SEQ ID NO: 133873 - DNA, 120 bp, Artificial Sequence
  ENSG00000103021_1 (sequence is synthesized)
tgaagggtcggagctggagctgcctgttatccagctgtgcgggctggtggaggagctcagctatgtaaactctgctctcaaaactgagactgagatgtttgagaaatattacgctaaact

SEQ ID NO: 133874 - DNA, 120 bp, Artificial Sequence
  ENSG00000103021_2 (sequence is synthesized)
ggagcccagggatcagcgacctccacgattatcagaaattaaaatatcagcagcagattatgcacagtttcgaggcaggcgtagatccaaatcccggacaggtatggaccgtggggtagg

SEQ ID NO: 133875 - DNA, 120 bp, Artificial Sequence
  ENSG00000103021_3 (sequence is synthesized)
cctgactgccgaccaaaaacttgagctggtacaaaaagaggttgcggacatgaaggatgacttacgacacacaagggcaaatgcggaacgcgacctgcagcatcacgaggcgatcattga

SEQ ID NO: 133876 - DNA, 120 bp, Artificial Sequence
  ENSG00000103021_4 (sequence is synthesized)
ggaggctgaaattcgatggagtgaagtttcgagagaagtgcatgagtttgaaaaagatattctaaaagccatatccaagaagaaagggagtattttggccactcagaaagtgatgaaata

SEQ ID NO: 133877 - DNA, 120 bp, Artificial Sequence
  ENSG00000103021_5 (sequence is synthesized)
cattgaggacatgaaccgccggagggataatatgaaggagaaattacgtttgaaaaatgtttctctcaaagttcagaggaaaaaaatgcttttacaattgaggcagaaggaagaggtgag

SEQ ID NO: 133878 - DNA, 120 bp, Artificial Sequence
  ENSG00000103021_6 (sequence is synthesized)
tgaggcccttcacgatgttgattttcagcagttgaagatagagaacgctcaatttcttgagacaattgaagcaaggaatcaagaactgacccagctaaagctgtcatctggaaacactct

SEQ ID NO: 133879 - DNA, 120 bp, Artificial Sequence
  ENSG00000103021_7 (sequence is synthesized)
gcaggttctcaatgcctacaaaagcaagcttcacaaggcaatggaaatatacctcaatctggacaaggagatcttgctgagaaaagagctacttgaaaaaattgaaaaagaaacactaca

SEQ ID NO: 133880 - DNA, 120 bp, Artificial Sequence
  ENSG00000103021_8 (sequence is synthesized)
agtagaggaggaccgggccaaagccgaggcagtgaataagaggctccggaagcagctggccgagttccgggcaccacaggtgatgacttacgtccgggagaagatcttaaatgcggacct

SEQ ID NO: 133881 - DNA, 120 bp, Artificial Sequence
  ENSG00000103021_9 (sequence is synthesized)
ggagaagagcatcaggatgtgggaaaggaaagtggagatagcagagatgtccttaaaaggccatcgtaaggcttggaatcgaatgaaaataaccaatgagcagttgcaggcagattacct

SEQ ID NO: 133882 - DNA, 120 bp, Artificial Sequence
  ENSG00000103021_10 (sequence is synthesized)
tgctgggaagtagccagaggcaggccacggcttacagaccactacatgacctataaaagtaatcagctcctttctagtcacgggctcctctcactgttccctgtctgcctggtgttccca

SEQ ID NO: 133883 - DNA, 120 bp, Artificial Sequence
  ENSG00000103021_11 (sequence is synthesized)
accccccacccaggctgcgtatcatctcctgggccacatctgcccatggggagtgttttcacagcctggcccctggaactgttaccactgaaagaaccacagggcactctaatggtttga

SEQ ID NO: 133884 - DNA, 120 bp, Artificial Sequence
  ENSG00000103021_12 (sequence is synthesized)
cacttgttagccagcatttagttcacaagcatagtgaaagtgaccttcccacacctgggagagggatagaggagggagagccagcccagtgtatgccatgggcttatccgtggcagcccc

SEQ ID NO: 133885 - DNA, 120 bp, Artificial Sequence
  ENSG00000103021_13 (sequence is synthesized)
agtgtgcaactatcaaaaacagacatcaaaacagcatggtgaatgcctggcactcagcattctcagtttactcttcagtttggtggggtagctcctggactagatactgctgcaaaagaa

SEQ ID NO: 133886 - DNA, 120 bp, Artificial Sequence
  ENSG00000103021_14 (sequence is synthesized)
aacaagcacgaaggaaaccaagatgatttcttcgggctgatacaacctgttctgacctgcaaaaatcctaccttcccccacctccccaccgtaatagtcatagtataagggttgtacaga

SEQ ID NO: 133887 - DNA, 120 bp, Artificial Sequence
  ENSG00000103021_15 (sequence is synthesized)
cgcctcaggagacctgcctgattcctttacatccttctccctaacatctagactatctctagagctgtttcctagtcgtgaatgcgtgatggtccttctttgtccctgcaagtatgatcc

SEQ ID NO: 133888 - DNA, 120 bp, Artificial Sequence
  ENSG00000103021_16 (sequence is synthesized)
aacatggcccagttcagaatcagaatatgtcttctgtgtcatggtggcatttggtccatggtgggagaaagaaatcaacttttcccagtggtggagtgaggacaggggagggccggccct

SEQ ID NO: 133889 - DNA, 120 bp, Artificial Sequence
  ENSG00000103021_17 (sequence is synthesized)
ctcagccttggatgtgatccatttgctgtagtcttccaccttggtgtacagaaacaggccagggcacgtctcaccaccgaagttcaggactcctctcagaacccacagatcgaactgctg

SEQ ID NO: 133890 - DNA, 120 bp, Artificial Sequence
  ENSG00000103021_18 (sequence is synthesized)
tagctggcacatcattgggcttcctgggtccccctgtgataaaagacagaaggcttcaagtcttagaaaaactagtttttgttgtaaatctatccttgtgcaatatactgtttgttctag

SEQ ID NO: 133891 - DNA, 120 bp, Artificial Sequence
  ENSG00000103021_19 (sequence is synthesized)
aaatgttttacgctggttctcactggaaatggggcaaattataggatacaatttcaaatctaggcagccaccaccacaaattccaacaagatgacttttccttttattatgcaaattagc

SEQ ID NO: 133892 - DNA, 120 bp, Artificial Sequence
  ENSG00000103021_20 (sequence is synthesized)
tgtggacttctgctgattgcctatagcttcctggttcatatttcattttcttgcccctttccagtcctttggccaaaccttccctctcttctggcttctcattcctgaaatgttggtgtt

SEQ ID NO: 133893 - DNA, 120 bp, Artificial Sequence
  ENSG00000103021_21 (sequence is synthesized)
gctctgggtcttccctactcccaatggagcagtcctctgggacttgggaattctgccacatacactttatctaacttaaagtgacggagtagaagcttggcatcattagctagatatggg

SEQ ID NO: 133894 - DNA, 120 bp, Artificial Sequence
  ENSG00000103021_22 (sequence is synthesized)
accctggcaagtgaccaaatcctctctgagccaaggtgggaacacagttaatgcctgtaacacgtgctgagcacagcacagtgcctggcacacagcaaacactcaatagaatattagcta

SEQ ID NO: 133895 - DNA, 120 bp, Artificial Sequence
  ENSG00000103021_23 (sequence is synthesized)
ccatcatcctgatgtcgctataaaggccagcatttttctgaaaagttggggaaaatgggaaaagcaacaaggcaactagtaggtatcacttaccttacctgcccagaccccacaccccta

SEQ ID NO: 133896 - DNA, 120 bp, Artificial Sequence
  ENSG00000103021_24 (sequence is synthesized)
ggtctcctctcaaaggaattcctgcccctcccatggcccatcttggtccgagaagggggtggtcatccccaggctagccagccacttctgacctgtgtggcctgcctggctggaaggccc

SEQ ID NO: 133897 - DNA, 120 bp, Artificial Sequence
  ENSG00000103021_25 (sequence is synthesized)
aggcaatgacatgttgctctcgcagtttggactgagacatggaatggggccgcaattaacaacaggaaacaatctgaacagactgaaccacgagcagcagaaaggcagaagagcagccgc

SEQ ID NO: 133898 - DNA, 120 bp, Artificial Sequence
  ENSG00000103021_26 (sequence is synthesized)
gcagccgcttcagccccttaccatccgagacctgggtgtgtggtctgtcttggtcactctctctgtctctctttctctctttctttctctgtccccaaggctggagtgcagtggtgcaat

SEQ ID NO: 133899 - DNA, 76 bp, Artificial Sequence
  ENSG00000103021_27 (sequence is synthesized)
aatctaacttcaagtgatctgcccgcctcgccctctcaaagtgctgggattaggcatgaactaccatgcccagtgg

SEQ ID NO: 133900 - DNA, 120 bp, Artificial Sequence
  ENSG00000103021_28 (sequence is synthesized)
caaagtgctgggattaggcatgaactaccatgcccagtggggtattctctttcaataaagctcctcttttccaaggaagccacaccagaacagagatgaagaccagtgggaaaacatggg

SEQ ID NO: 133901 - DNA, 120 bp, Artificial Sequence
  ENSG00000103021_29 (sequence is synthesized)
agcaactccgtgggcaggccagcggggaggccatgctgcaaagctgccgtgattccctggtgatctctcagcaggccaaggccagacatgtgaggaaggccttgaggacttcattctgtg

SEQ ID NO: 133902 - DNA, 120 bp, Artificial Sequence
  ENSG00000103021_30 (sequence is synthesized)
cctctccttggatggaagggggtgctttagtgtggcactcctgacttttcaattgactggtgaagaggcccttgtgtgcacctcactatgtctgcctaggtcatgggggctccctggcca

SEQ ID NO: 133903 - DNA, 120 bp, Artificial Sequence
  ENSG00000103021_31 (sequence is synthesized)
agaatgacgtggttccccctttcatcagtccgattcgcagtttgtcttaactgtagtggtatagccagagcaagaaaaagaatgtgatttaggacaaatgattggatgagtgattggtag

SEQ ID NO: 133904 - DNA, 120 bp, Artificial Sequence
  ENSG00000103021_32 (sequence is synthesized)
atgtcctcagctatggcgtggttttgcaggtcactgttccacccacctgggcacagcatatacgctttttctcttccccataatcctgtaggggctgcgacttctgaagcacaagaggca

SEQ ID NO: 133905 - DNA, 120 bp, Artificial Sequence
  ENSG00000103021_33 (sequence is synthesized)
gaggcgaacagctccaggtgcccctctggagctaccctacctcatctcccaagggagcggccacagcccagagtggggtctttcattttgtgatcttttcccttgacattcagcaaaagc

SEQ ID NO: 133906 - DNA, 120 bp, Artificial Sequence
  ENSG00000103021_34 (sequence is synthesized)
cctgacagtggtagaataaaggcaggatgggtgagtgcagagtgattctgcttttgttgggtttcagggaaacccataggcagattctgaacctggtggttgattctacatgtgggaatt

SEQ ID NO: 133907 - DNA, 120 bp, Artificial Sequence
  ENSG00000103021_35 (sequence is synthesized)
gtggctttgaagacctctggacatgagaacatatttccaagacagaggattctatggggacgggtcaccattaaatggtgtgcaagcataattctgttcaaaaatgaaggcatgtttaga

SEQ ID NO: 133908 - DNA, 120 bp, Artificial Sequence
  ENSG00000103021_36 (sequence is synthesized)
ggtgtgtcacagttaaaaaccaacctgaactttgcagttagattttaaaagatggtcagttagagtagaaatagcttagaatattccattgagtctaagatacagttagaaatcaacatc

SEQ ID NO: 133909 - DNA, 120 bp, Artificial Sequence
  ENSG00000103021_37 (sequence is synthesized)
tttgaaattagggtgtgtcttttaatcagttgatgtcagagtttaacgggcagcatttttttctttcttgggattacaaaaaatgatggtgcattctataattggcagcatcttagatct

SEQ ID NO: 133910 - DNA, 120 bp, Artificial Sequence
  ENSG00000103021_38 (sequence is synthesized)
gaggaagtatgatacttgtttgacggaatggttgacggcagaattttgttaaaaagctatatcttcactgtattttaacacattatctaatttaagaaattgttaagatcccccacctgg

SEQ ID NO: 133911 - DNA, 120 bp, Artificial Sequence
  ENSG00000103021_39 (sequence is synthesized)
cagaggacccagtacaaaataggcactcaatagatgttacaccaactttggaagggcaaacatatttcttaatgagaggcagtccttcatgttttgcaataaaatgacttttaaaaaaaa

SEQ ID NO: 133912 - DNA, 120 bp, Artificial Sequence
  ENSG00000103021_40 (sequence is synthesized)
aacatgatgttgaatgaacgaagccagtcacaaaggagaatgcactgcatgattctagaaaaataaatcttacaactggtgtccttataagaagaggaggggacacacaaagccacaggg

SEQ ID NO: 133913 - DNA, 120 bp, Artificial Sequence
  ENSG00000103021_41 (sequence is synthesized)
aagaagtccatgcaaagatggaggcagagattggagtgatgtagctacaatctaaggaatgacaagattgccaggagccaccagaagctgggaagaggcaagaaaagattcctcctagag

SEQ ID NO: 133914 - DNA, 120 bp, Artificial Sequence
  ENSG00000103021_42 (sequence is synthesized)
gagctcaggtaccgccgcccgcgcctgggggccgcccctcttcctcctaggccctcctctccgggcggcctcggacttggggaccagcatggagaagatccaagccctcactgagcactg

SEQ ID NO: 133915 - DNA, 120 bp, Artificial Sequence
  ENSG00000103021_43 (sequence is synthesized)
ctttactccttactccaccaccactgagccaacaagctgttggtggagctagaacggggtggtagggcgaggggatggggccggtggtgagaagcccagagggtaattggggaagtgagg

SEQ ID NO: 133916 - DNA, 120 bp, Artificial Sequence
  ENSG00000103021_44 (sequence is synthesized)
gtttcagccggaggagtctctctcatgccagacggtgtgcttagccgatccacaattctacagcagcaatttggaccagctatgtaaactctgctctcaaaactgagactgagatgtttg

SEQ ID NO: 133917 - DNA, 120 bp, Artificial Sequence
  ENSG00000103023_0 (sequence is synthesized)
aatggaacattcttcccaaggcagtagaagaaatccttctgttgaactctactgtgtcaggccagcctgagttcatttctccttgagcaggaacagttcatggacgaactctgaggacca

SEQ ID NO: 133918 - DNA, 120 bp, Artificial Sequence
  ENSG00000103023_1 (sequence is synthesized)
ttctgaggacaagaggcatccagtgtcatgagtggaacatgcagcattttatggctacagagttaaggcaagggttgaattccacgagtcaaaaagcagcccttttcagagacccaactc

SEQ ID NO: 133919 - DNA, 120 bp, Artificial Sequence
  ENSG00000103023_2 (sequence is synthesized)
tctggggtgctcaggggcttgggctggattgagaagaaaactgacaagagtaagctgccctctcttctctggccatctcacaaaccacagtgcgggccaactggtcctgcctctttacca

SEQ ID NO: 133920 - DNA, 120 bp, Artificial Sequence
  ENSG00000103023_3 (sequence is synthesized)
cacagaaccaagcactagggataagacagctgcccatggtgtccgcggcgggtctctctggggatggcaagatgcgaggggtgctcctggtgctgctcggccttctctattcttccacca

SEQ ID NO: 133921 - DNA, 120 bp, Artificial Sequence
  ENSG00000103023_4 (sequence is synthesized)
gttgtggcgtccagaaagcttccgttttctacggtcctgaccccaaggagggcttggtcagcagcatggagttcccgtgggtggtgtcgctgcaggactcccagtacacacacctggctt

SEQ ID NO: 133922 - DNA, 120 bp, Artificial Sequence
  ENSG00000103023_5 (sequence is synthesized)
tcggctgcatcctgagcgagttctgggtcctcagcatcgcatccgccattcagaacaggaaggacattgtcgttatagtgggtataagtaacatggatcctagcaagattgctcacacag

SEQ ID NO: 133923 - DNA, 120 bp, Artificial Sequence
  ENSG00000103023_6 (sequence is synthesized)
agtatccagtcaataccatcatcatccatgaggactttgataacaactccatgagcaacaacatagccctcctgaagacagacacagcgatgcattttggcaacctggtccagtccatct

SEQ ID NO: 133924 - DNA, 120 bp, Artificial Sequence
  ENSG00000103023_7 (sequence is synthesized)
cagaatgctgcatacaccaccagtcttgcagaactgctgggtgtcaggatggaatcccacatctgcaacaggaaatcacatgacgatgagtgtcctgaggaaaatcttcgtgaaagatct

SEQ ID NO: 133925 - DNA, 120 bp, Artificial Sequence
  ENSG00000103023_8 (sequence is synthesized)
tgacatgtgtcccctatacaaactccagaagacagaatgcggcagccacacgaaagaggaaaccaagactgcctgcttgggggacccaggaagcccaatgatgtgccagctacagcagtt

SEQ ID NO: 133926 - DNA, 120 bp, Artificial Sequence
  ENSG00000103023_9 (sequence is synthesized)
cgatctgtgggttctgagaggagtcctgaacttcggtggtgagacgtgccctggcctgtttctgtacaccaaggtggaagactacagcaaatggatcacatccaaggctgagagggccgg

SEQ ID NO: 133927 - DNA, 120 bp, Artificial Sequence
  ENSG00000103023_10 (sequence is synthesized)
ccctcccctgtcctcactccaccactgggaaaagttgatttctttctcccaccatggaccaaatgccaccatgacacagaagacatattctgattctgaactgggccatgttggatcata

SEQ ID NO: 133928 - DNA, 120 bp, Artificial Sequence
  ENSG00000103023_11 (sequence is synthesized)
cttgcagggacaaagaaggaccatcacgcattcacgactaggaaacagctctagagatagtctagatgttagggagaaggatgtaaaggaatcaggcaggtctcctgaggcgtctgtaca

SEQ ID NO: 133929 - DNA, 120 bp, Artificial Sequence
  ENSG00000103023_12 (sequence is synthesized)
acccttatactatgactattacggtggggaggtgggggaaggtaggatttttgcaggtcagaacaggttgtatcagcccgaagaaatcatcttggtttccttcgtgcttgttttcttttg

SEQ ID NO: 133930 - DNA, 120 bp, Artificial Sequence
  ENSG00000103023_13 (sequence is synthesized)
cagcagtatctagtccaggagctaccccaccaaactgaagagtaaactgagaatgctgagtgccaggcattcaccatgctgttttgatgtctgtttttgatagttgcacactggggctgc

SEQ ID NO: 133931 - DNA, 120 bp, Artificial Sequence
  ENSG00000103023_14 (sequence is synthesized)
cacggataagcccatggcatacactgggctggctctccctcctctatccctctcccaggtgtgggaaggtcactttcactatgcttgtgaactaaatgctggctaacaagtgtcaaacca

SEQ ID NO: 133932 - DNA, 120 bp, Artificial Sequence
  ENSG00000103023_15 (sequence is synthesized)
taagccatcgttgttttctttcactttggggaaagaaagaaacaaggaaatggatactctctagaagaggaggaagggtgttctctgcctgtttgcacattcaagttcaaagtggagaca

SEQ ID NO: 133933 - DNA, 120 bp, Artificial Sequence
  ENSG00000103023_16 (sequence is synthesized)
caggactccccttccctagatggggagctctgtgagggcagggcttgggatgagtggctgtctctggagtgaatagcacttggcagacagtatgcgctcaataaaaatctgctgaatgaa

SEQ ID NO: 133934 - DNA, 120 bp, Artificial Sequence
  ENSG00000103024_0 (sequence is synthesized)
agttagtgtccgagctgctggaggagacttggcctccgcagctgccctccggccccccacggctgccgggttccggggtgcaagtgaagcagcctccccgcggaggccgcagcgccccga

SEQ ID NO: 133935 - DNA, 120 bp, Artificial Sequence
  ENSG00000103024_1 (sequence is synthesized)
ccaggcctctttaagcgcaggccccgccccgggcgccaccgccccgccccgcggatcccgctcccgcaccgccatcatgatctgcctggtgctgaccatcttcgctaacctcttccccgc

SEQ ID NO: 133936 - DNA, 120 bp, Artificial Sequence
  ENSG00000103024_2 (sequence is synthesized)
ggcctgcaccggcgcacacgaacgcaccttcctggccgtgaagccggacggcgtgcagcggcggctggtgggcgagattgtgcggcgcttcgagaggaagggcttcaagttggtggcgct

SEQ ID NO: 133937 - DNA, 120 bp, Artificial Sequence
  ENSG00000103024_3 (sequence is synthesized)
gaagctggtgcaggcctccgaggagctgctgcgtgagcactacgccgagctgcgtgaacgcccgttctacggccgccttgtcaagtatatggcctccgggccggtggtggccatggtatg

SEQ ID NO: 133938 - DNA, 120 bp, Artificial Sequence
  ENSG00000103024_4 (sequence is synthesized)
aacctgattcacggcagcgactcggtggagagtgcccgccgcgagatcgctctctggttccgcgcagacgagctcctctgctgggaggacagcgctgggcactggctgtatgagtagccc

SEQ ID NO: 133939 - DNA, 120 bp, Artificial Sequence
  ENSG00000103024_5 (sequence is synthesized)
ggcagatgcgcgtcacagaggctctcacactccagcctcctccagggcccaggtgggcgggcttctggccccaccccacagcgcttggagcatccctttggacgggctgctgaacatcca

SEQ ID NO: 133940 - DNA, 120 bp, Artificial Sequence
  ENSG00000103024_6 (sequence is synthesized)
cctgtctggacgttgcatggagggtggcgcaggcctctccaatccctggcgtacagggtttcctgcccgaggagctgctccaggagcctgcgcggctcgcctggaaacgtgccaggacac

SEQ ID NO: 133941 - DNA, 120 bp, Artificial Sequence
  ENSG00000103024_7 (sequence is synthesized)
tgtcctggtgcccagcccaacgtggtccaacgtttttttataataaagtcctcgttttcgtttcgatttgggcccaggaacaggcagctacgacgttaagacatttattacatacagagc

SEQ ID NO: 133942 - DNA, 120 bp, Artificial Sequence
  ENSG00000103024_8 (sequence is synthesized)
gcgggcgggcggctccgggacccccacccccgcgtgataccgcgcccgttcctccgcacaggtatggcaggggctggacgtggtgcgcacctcgcgggcgctcatcggagccacgaaccc

SEQ ID NO: 133943 - DNA, 120 bp, Artificial Sequence
  ENSG00000103024_9 (sequence is synthesized)
cgcggatcccgctcccgcaccgccatcatgatctgcctggtgctgaccatcttcgctaacctcttccccgcgggtgagccgcgcggcgcgggccgggggcgggtggccggtgctgggccg

SEQ ID NO: 133944 - DNA, 120 bp, Artificial Sequence
  ENSG00000103024_10 (sequence is synthesized)
gttggcaagtaaggcccgccccggggacggtcccagccccgtccggcctccccctgttcagcctgcgtggtacccgtgccggaggtctctttcccacgctcacacgcgcctcttccgcgc

SEQ ID NO: 133945 - DNA, 120 bp, Artificial Sequence
  ENSG00000103034_0 (sequence is synthesized)
ccgtccgcgaccccccaccgcgacgcccggaggcggcggggtctctttgttcgggcggcgggcacgggggaccacctcccacggtgtcaccgcacccaccccgcgcccttcctccgcctc

SEQ ID NO: 133946 - DNA, 120 bp, Artificial Sequence
  ENSG00000103034_1 (sequence is synthesized)
caccccgcgcccttcctccgcctcctggagttcaccgggaccaggtggcggcgggtgcctttttgggggtgcgcggccatgcaattggtggatttttttaaaccgttttggaggggggag

SEQ ID NO: 133947 - DNA, 120 bp, Artificial Sequence
  ENSG00000103034_2 (sequence is synthesized)
cgcggcgttgggggcgggagagcgctcctggctgtgagctgctcctgccgcttcgctccgcgctctcctgccgctccgctccgggtctcccgcgctcctctccccggctcggccgagcgc

SEQ ID NO: 133948 - DNA, 120 bp, Artificial Sequence
  ENSG00000103034_3 (sequence is synthesized)
gctgccccgacgccgccacccagagccgggccgcgccgggcgccgagatgaaggtgctgggacaccggctggagctgctcacaggcctcctgctccacgacgtgaccatggccgggctgc

SEQ ID NO: 133949 - DNA, 120 bp, Artificial Sequence
  ENSG00000103034_4 (sequence is synthesized)
aggagctgcgattccctgaggagaagccgctgctccggggccaggacgccaccgagctggagagctccgatgccttcctcttggctgcagacacagactggaaggaacatgacatcgaga

SEQ ID NO: 133950 - DNA, 120 bp, Artificial Sequence
  ENSG00000103034_5 (sequence is synthesized)
caccctacggccttctgcatgtagtgatccggggctcccccaaggggaaccgcccagccatcctcacctaccatgatgtgggcctcaaccacaaactatgcttcaacaccttcttcaact

SEQ ID NO: 133951 - DNA, 120 bp, Artificial Sequence
  ENSG00000103034_6 (sequence is synthesized)
tcgaggacatgcaggagatcaccaagcactttgtggtgtgtcacgtggatgcccctggacaacaggtgggggcgtcgcagtttcctcaggggtaccagttcccctccatggagcagctgg

SEQ ID NO: 133952 - DNA, 120 bp, Artificial Sequence
  ENSG00000103034_7 (sequence is synthesized)
ctgccatgctccccagcgtggtgcagcatttcgggttcaagtatgtgattggcatcggagtgggcgccggagcctatgtgctggccaagtttgcactcatcttccccgacctggtggagg

SEQ ID NO: 133953 - DNA, 120 bp, Artificial Sequence
  ENSG00000103034_8 (sequence is synthesized)
ggctggtgctggtgaacatcgaccccaatggcaaaggctggatagactgggctgccaccaagctctccggcctaactagcactttacccgacacggtgctctcccacctcttcagccagg

SEQ ID NO: 133954 - DNA, 120 bp, Artificial Sequence
  ENSG00000103034_9 (sequence is synthesized)
aggagctggtgaacaacacagagttggtgcagagctaccggcagcagattgggaacgtggtgaaccaggccaacctgcagctcttctggaacatgtacaacagccgcagagacctggaca

SEQ ID NO: 133955 - DNA, 120 bp, Artificial Sequence
  ENSG00000103034_10 (sequence is synthesized)
ttaaccggcctggaacggtgcccaatgccaagacgctccgctgccccgtgatgctggtggttggggataatgcacccgctgaggacggggtggtggagtgcaactccaaactggacccga

SEQ ID NO: 133956 - DNA, 120 bp, Artificial Sequence
  ENSG00000103034_11 (sequence is synthesized)
ccactacgaccttcctgaagatggcagactctggagggctgccccaggtcacacagccagggaagctgactgaagccttcaaatacttcctgcaaggcatgggctacatgccctcagcca

SEQ ID NO: 133957 - DNA, 120 bp, Artificial Sequence
  ENSG00000103034_12 (sequence is synthesized)
gcatgacccgcctggcacgctcccgcactgcatccctcaccagtgccagctcggtggatggcagccgcccacaggcctgcacccactcagagagcagcgaggggctgggccaggtcaacc

SEQ ID NO: 133958 - DNA, 120 bp, Artificial Sequence
  ENSG00000103034_13 (sequence is synthesized)
acaccatggaggtgtcctgttgaagcccttgatcccgctgacgacgcccacgtcgaggccccaccgccatccttgcgccggctcatgttccctttagtttatttttgtgagggcaaaggg

SEQ ID NO: 133959 - DNA, 120 bp, Artificial Sequence
  ENSG00000103034_14 (sequence is synthesized)
gaggaaatggggttctgtttgaaaaaaatgaggggatcttagatgctgcagcagaacagtctccaggtgttttaaggggctcagtcctcctcatcccatctcactctccgtggtaactta

SEQ ID NO: 133960 - DNA, 120 bp, Artificial Sequence
  ENSG00000103034_15 (sequence is synthesized)
cccggcggcccaggcacagaagggcagggccatagggagggagattcgctacggatccaggccattcctgggtgagcccttgggcaggcatgtttggagatgagagaggcttcgagaggg

SEQ ID NO: 133961 - DNA, 120 bp, Artificial Sequence
  ENSG00000103034_16 (sequence is synthesized)
tgggtgctgggccacaggggtgcggggccagctcaggcactggcgtgggagccctgggagaccccttcccccaccctccaccaagcacacctgtttctgtctcatagcacatgtgacaat

SEQ ID NO: 133962 - DNA, 120 bp, Artificial Sequence
  ENSG00000103034_17 (sequence is synthesized)
catctggacaacagccacaagggggcgctcggaccaggcagccactttcctggtgctctctgggcccagctggtgctgtagggccacgcaggcaggggcgtcaaggggtttctctgccca

SEQ ID NO: 133963 - DNA, 120 bp, Artificial Sequence
  ENSG00000103034_18 (sequence is synthesized)
aggaagacagaacatggagaaccgtcagggcaggaaccccacagactgtcccttccagcccacactctgccacctcctggccctgtcccaattctgagccaaggcctccccgaggcagaa

SEQ ID NO: 133964 - DNA, 120 bp, Artificial Sequence
  ENSG00000103034_19 (sequence is synthesized)
gttgcctggtcctctgtccccacagtgacctgactgggggtgagggagaaggaggagagagcccatgtgtggtgtgtgtgcccctgagaacttcgtggtgactgcctttgggagcccgca

SEQ ID NO: 133965 - DNA, 120 bp, Artificial Sequence
  ENSG00000103034_20 (sequence is synthesized)
ggtggccagaggcaggggtagctgagttcctggagaccccttttttgcccccaggttccccagagggcaacgccatcagtagcagtgtggtgtttcaggcagagctctggccaggctgtg

SEQ ID NO: 133966 - DNA, 120 bp, Artificial Sequence
  ENSG00000103034_21 (sequence is synthesized)
ccagtgtgtcccggacgcatcactaaggaagagagagtttatttagtcaactggcccaaggcagcgaggcttctacagtcccacaccccatagccgcctgggctggggcttactgggggc

SEQ ID NO: 133967 - DNA, 120 bp, Artificial Sequence
  ENSG00000103034_22 (sequence is synthesized)
tgaaggttctggacatgaacaagggtcaggtagaagagaaaggcttcccctacaccccagcctcctgctgtcccctgaagcccaggactgcgttgtatgctttccatccactcaccttac

SEQ ID NO: 133968 - DNA, 120 bp, Artificial Sequence
  ENSG00000103034_23 (sequence is synthesized)
cccatagcatcttgcggcccagaaaccagagccatttgtctcagaccctaaatcaataatcacaaaccccaaaacgggagagagcagtgaaaacatgcagggctgtggacgggggaaggg

SEQ ID NO: 133969 - DNA, 120 bp, Artificial Sequence
  ENSG00000103034_24 (sequence is synthesized)
ttgtggcgggtgttctgaggctgagaggacacctatatgcgtatttcctctacacacatcaccccccttctataatcttaagccatgactagcctggtggcgtgttagtttctgcccagt

SEQ ID NO: 133970 - DNA, 120 bp, Artificial Sequence
  ENSG00000103034_25 (sequence is synthesized)
tctaccccctcatgtgcttcttctgaatactgaatgtgactgtttgaaagctggtagaattcatccctcttactgtagataacactgcaaatcttggaattttgttttttgctgtttcca

SEQ ID NO: 133971 - DNA, 120 bp, Artificial Sequence
  ENSG00000103034_26 (sequence is synthesized)
gtgtgtgtgtgtgtgtgtgtgtacatcgggtcctcccatgtgtggtgttcttctggaggttgtctctttggtcaaggtgaacttttaatgtttattattttcttctccgcacaaagtaaa

SEQ ID NO: 133972 - DNA, 120 bp, Artificial Sequence
  ENSG00000103034_27 (sequence is synthesized)
ttaatgtttattattttcttctccgcacaaagtaaagagcctaattttgtgtattctggtggctgctgtcatgagatgataaaatgtaaaacaaaactctagtcaacgtagaaagagtta

SEQ ID NO: 133973 - DNA, 120 bp, Artificial Sequence
  ENSG00000103034_28 (sequence is synthesized)
actgtgctgaaaaactaataaagaacctaagaagaattccagtgtggtgatgccatgcccatcatgggaggcttttggagaaacagaatgtttgggcaggggctgctggtgctgcttggg

SEQ ID NO: 133974 - DNA, 120 bp, Artificial Sequence
  ENSG00000103034_29 (sequence is synthesized)
ttttgggttgagggtgctaggagaggatggtctccacccatctttctatttccagtacacgtcacattattttaccggtgagatgagaatgtcacaaacattaaaagccttatgtgctca

SEQ ID NO: 133975 - DNA, 120 bp, Artificial Sequence
  ENSG00000103034_30 (sequence is synthesized)
gtaagcgagtggctgctcagaaaccctgcggggaggaggggctagctaggctgggccaggatccctgtataaatggcccaggagctgtgccccatcacagagccgaccatctcccactcg

SEQ ID NO: 133976 - DNA, 120 bp, Artificial Sequence
  ENSG00000103034_31 (sequence is synthesized)
agagcaagagcgaacggtcaggaagaggaggtgggaaagggagcagggacgggggggaggattcgaggagtgacttctgtgttctccccggtgtggagagacccagacaggaggaaagga

SEQ ID NO: 133977 - DNA, 120 bp, Artificial Sequence
  ENSG00000103034_32 (sequence is synthesized)
gcacgcggaggggctcctggctgcccgcacctgcacccgcgcgtcggcggcgccgaagccccgctccccgcctgcgcgtctgtctcgtccgcatctccgcggcctcctgctccacgacgt

SEQ ID NO: 133978 - DNA, 120 bp, Artificial Sequence
  ENSG00000103034_33 (sequence is synthesized)
tggcagtgttgggcttgggatgcccctcatcctgtcctggggtgcccacctctgcctctgcccctccccctgccccacagccgcagagacctggacattaaccggcctggaacggtgccc

SEQ ID NO: 133979 - DNA, 120 bp, Artificial Sequence
  ENSG00000103034_34 (sequence is synthesized)
aatgccaagacgctccggtgagtggcccctggccctctggcctgccctggcctttgcccccatgacccagccagacagcccttttcctctgtatctgcagctgccccgtgatgctggtgg

SEQ ID NO: 133980 - DNA, 120 bp, Artificial Sequence
  ENSG00000103034_35 (sequence is synthesized)
gcttccctagcatgggcccaacctcagggaggtgttttcctggggtcccagccagggtgggagcttgtcctggagtgagggccctgctcaggtcaccccactctctcccttgcagatggc

SEQ ID NO: 133981 - DNA, 120 bp, Artificial Sequence
  ENSG00000103034_36 (sequence is synthesized)
agactctggagggctgccccaggtcacacagccagggaagctgactgaagccttcaaatacttcctgcaaggcatgggctacagtgagtacatttccaccccaccccacaccacctagag

SEQ ID NO: 133982 - DNA, 120 bp, Artificial Sequence
  ENSG00000103034_37 (sequence is synthesized)
caggcgtgagccacggcgcctggccagggcttcattctctataaaagcaaaaaaacaacatgcttaagattttaagatgtttaatactcaattttgcacttcaaaaatatattaagagct

SEQ ID NO: 133983 - DNA, 120 bp, Artificial Sequence
  ENSG00000103034_38 (sequence is synthesized)
tgtgtgtgtgtgtctgtgtgtgtgtaggggtggaaacaatgatagagattctaaataaatccaagaactgtgaagggttcagtgagaggaggacaggcaggggcatctggacatgggtgt

SEQ ID NO: 133984 - DNA, 120 bp, Artificial Sequence
  ENSG00000103034_39 (sequence is synthesized)
agaggaggacaggcaggggcatctggacatgggtgtgcatgcacagacccggctgtagccgggtggctgatcagcagcaccttgaagactttacagagtgtttctgccatctgcacccat

SEQ ID NO: 133985 - DNA, 120 bp, Artificial Sequence
  ENSG00000103034_40 (sequence is synthesized)
ccaccctccccacagggccctgtcagccccactcacactcacctctgttgccttcgccctccgggcctccatttccccgacggacccgaggcttacacttctgccttgcctgccctctgg

SEQ ID NO: 133986 - DNA, 120 bp, Artificial Sequence
  ENSG00000103034_41 (sequence is synthesized)
atggacgcccagcctcctcctcccccgctccttcctctgcgcagtgtgctgcagccaggccgcatcttgctgtggtttggaaccttcttgtgtcctgttcaactcagaaaccccacagat

SEQ ID NO: 133987 - DNA, 120 bp, Artificial Sequence
  ENSG00000103034_42 (sequence is synthesized)
tcttgcttttctgcaggcttggcctctaggttggctgggttgcagagcagtcttgcttctaggttgtcatgagctgcgtggcttccagagctctggggataggaaacagaccctccttag

SEQ ID NO: 133988 - DNA, 120 bp, Artificial Sequence
  ENSG00000103034_43 (sequence is synthesized)
aggtagagcccaggcctggccctgcctgagccacataggtggccaggagagttccggagggtagagtttgctgcccgcaagtcttgcttgtgaaactctgaattagggaattagggcaca

SEQ ID NO: 133989 - DNA, 120 bp, Artificial Sequence
  ENSG00000103034_44 (sequence is synthesized)
gtctgaattgagggcagtatgcgaccaccgctccgcgtcctcctttacagaaacagtcctacttctccactggcatcctcttgagggaggcacggctggaaacccagcacctccctgcac

SEQ ID NO: 133990 - DNA, 120 bp, Artificial Sequence
  ENSG00000103034_45 (sequence is synthesized)
cagctcagggctgcctggtcagctgctggccgcagccccctaggcccactcactgtcgccggccctgcatgcccccagcccgacagctgtcgccagcctcctgactcaggaggagccctt

SEQ ID NO: 133991 - DNA, 120 bp, Artificial Sequence
  ENSG00000103034_46 (sequence is synthesized)
tgtgccttcgaggaacggttcgctggccgctttgcttgcagcctacttttcccaccagaggcacctggccctgcccgccagtcctcaggcccatcctgtctctgtccacagtgccctcag

SEQ ID NO: 133992 - DNA, 120 bp, Artificial Sequence
  ENSG00000103034_47 (sequence is synthesized)
gccttggggctcctctggagaagtgatcagttgccctgctggaaactcacatccagggggcagtggctggagagcaagagcgaacggtcaggaagaggaggcctcctgctccacgacgtg

SEQ ID NO: 133993 - DNA, 120 bp, Artificial Sequence
  ENSG00000103034_48 (sequence is synthesized)
gccacccagatccttgctgcccaggagaacagggcacggagcctgagatagacctagtgttctgctccccagagacccgagagccaagccccaaactggttgcctctgggaacgagggcc

SEQ ID NO: 133994 - DNA, 120 bp, Artificial Sequence
  ENSG00000103034_49 (sequence is synthesized)
gggtgggtctacaggaggtgggcatgtcaatgtcagcaagctgcctcctagccccgcttcctctccctggtggtctggagcccctggcagcagggtgagggtggggagggcagagctggt

SEQ ID NO: 133995 - DNA, 120 bp, Artificial Sequence
  ENSG00000103034_50 (sequence is synthesized)
aatgggagtgctcggccctgagggttgggggcctcagagtgcaccgcgctgtggcccttgtggggctgcccttgcgcagcgctccaagggacggggatgtttggcttcgatcaggctgaa

SEQ ID NO: 133996 - DNA, 120 bp, Artificial Sequence
  ENSG00000103034_51 (sequence is synthesized)
aaaacaatagagaatagagagacccagggcctgccatcccatatggtccaggagacaggccagtagcagaaactcccacagcacaggtggcggtgcgcatggctctgagggggatagaga

SEQ ID NO: 133997 - DNA, 120 bp, Artificial Sequence
  ENSG00000103034_52 (sequence is synthesized)
ggatggggtgggggaaggcaacgctggagccgtgaagctggcagggctaggggaccccaggtggagcccagggcacctcctctcgccggggcatcaggcctaacaggtaccaggctgcgt

SEQ ID NO: 133998 - DNA, 120 bp, Artificial Sequence
  ENSG00000103034_53 (sequence is synthesized)
gggcccctggcccccggcccccaaactccattttcagcatgtggggaaaccccctgtatctgcgtgggcaaggtgggattttcatccctggtgggtggagaaggagcagccccttgaagc

SEQ ID NO: 133999 - DNA, 120 bp, Artificial Sequence
  ENSG00000103034_54 (sequence is synthesized)
agggtgataacccaagttgccccagaaagcagcagctccccaggcctccacaaggttaagcgatggaaccttcctaatgggaaggctgggcgtgggggtctggtccccaagatgttgggc

SEQ ID NO: 134000 - DNA, 120 bp, Artificial Sequence
  ENSG00000103034_55 (sequence is synthesized)
ttggggccctctcgggccctccatactccccaaggtgtgggtcaagggctctagctgtctgggcagtgcccatgcaccctgccctgccccgcattggtaagctgtgcatgtctgtgacga

SEQ ID NO: 134001 - DNA, 120 bp, Artificial Sequence
  ENSG00000103034_56 (sequence is synthesized)
ccctgtgtgtacctgacatgggtgagtctgtacgtgtggtctcggcttttgtattcggaggatcccgtgtgagctgcagctgttggcgtgtgcctatgtgctgggggcggatgcaggggc

SEQ ID NO: 134002 - DNA, 120 bp, Artificial Sequence
  ENSG00000103034_57 (sequence is synthesized)
tggggaccatcaaggatgatgtgtggctggggtgggaggagcagtgacagggctggggcaaggaggacttcagaagccaattggagccaggcttgtctcccagcagccaatatgggagct

SEQ ID NO: 134003 - DNA, 120 bp, Artificial Sequence
  ENSG00000103034_58 (sequence is synthesized)
agggcgctgcgggcatcaaggtgggccgggaggatggtgcatccttatgacccaccgcagggaggaagtgcccccctcaacccacatctggtggcagcccggccttcaaatagcctcacc

SEQ ID NO: 134004 - DNA, 120 bp, Artificial Sequence
  ENSG00000103034_59 (sequence is synthesized)
ctggggtcactgagacacggccagagtgctccaggttccctggtgatcctgtttgcaggagtggctgggggcagctgctagtcagagcccatagcaggggctggggggagcgtgtggttg

SEQ ID NO: 134005 - DNA, 120 bp, Artificial Sequence
  ENSG00000103034_60 (sequence is synthesized)
gggggtgggtgacatatctgcaggaaatggaacgtggaaggcactgtctgacttggctgcattgcccgtgtggacccgggcgctagtgcctgcatgtccctctgaccgtgtgccctctgg

SEQ ID NO: 134006 - DNA, 120 bp, Artificial Sequence
  ENSG00000103034_61 (sequence is synthesized)
tgtgcgcttggatggtgtctgccttggtgatgcctggggccatcaggccagggggcgggggtgtccttggtgagcccccgaggctgtgtgcccagtgtgcgtgccgggtctgtgcgtgca

SEQ ID NO: 134007 - DNA, 120 bp, Artificial Sequence
  ENSG00000103034_62 (sequence is synthesized)
ggggctgccgtcccagtgggcggccgtctagcttgtttggatggctgcgccagtgtgatgggaaggacaggcggcctcttccttaggagccacctcacagttcccagggctctgctgcgc

SEQ ID NO: 134008 - DNA, 120 bp, Artificial Sequence
  ENSG00000103034_63 (sequence is synthesized)
cagccgggcagaggcaaggaggtctgggccacacaggaatgacagcctttcaggcaggggtccctgctggggaggaacgaggaggggttgcctgcctgccttattttgtaggtgggggaa

SEQ ID NO: 134009 - DNA, 120 bp, Artificial Sequence
  ENSG00000103034_64 (sequence is synthesized)
tgggcaggaggcgcattgcagttcttttgcagccccaccctccagagctgagagaactcacaggtggctgtgaaagggctgcctggtcaggagctccctcgggtggaacctgatctcctg

SEQ ID NO: 134010 - DNA, 120 bp, Artificial Sequence
  ENSG00000103034_65 (sequence is synthesized)
acctgcacccgcgcgtcggcggcgccgaagccccgctccccgcctgcgcgtctgtctcgtccgcatctccgcggatctcaaaatagaggattcccaaatcatggcttcatgattctcagg

SEQ ID NO: 134011 - DNA, 120 bp, Artificial Sequence
  ENSG00000103034_66 (sequence is synthesized)
cccctgagggaggcaggcagacaacacccttgccctggtttgtagatgggcacgatattgggcctcaaaggaggtcatttcctgcacaaggtcacaccctgtgaggggcagaggggaaca

SEQ ID NO: 134012 - DNA, 120 bp, Artificial Sequence
  ENSG00000103034_67 (sequence is synthesized)
aaagcccttaccagctgcagagtattcactctgtgcttggcctatgtggacggagcagaggagcagttgtcagagatgacccagaggtcccttgcaacccacaacctaaggcctcctgct

SEQ ID NO: 134013 - DNA, 120 bp, Artificial Sequence
  ENSG00000103034_68 (sequence is synthesized)
agagtgcaccgcgctgtggcccttgtggggctgcccttgcgcagcgctccaagggacggggatgtttggcttcgatcaggctgaactgagtcctgagctctccgcagagggaacatgaca

SEQ ID NO: 134014 - DNA, 120 bp, Artificial Sequence
  ENSG00000103034_69 (sequence is synthesized)
ctgccggttccgcagacgataggtcaccccgcacgcacggaggtgacgacgtcagcacctgcccgcccatgcagaccctgtcccctgaattattgatgcggctgacaggccgaaccacag

SEQ ID NO: 134015 - DNA, 120 bp, Artificial Sequence
  ENSG00000103034_70 (sequence is synthesized)
caccaccagcaccaactcccacaccggcgcaaagcccggctcaaagccccactcccctccagtgctcaaggtcacaggcgaggggagacggaccgaccgagaggagccgccacagccccc

SEQ ID NO: 134016 - DNA, 120 bp, Artificial Sequence
  ENSG00000103034_71 (sequence is synthesized)
aatcagtgtcgcttgtcccctaagaaaggacccgtgggcttctggcaggacccgcgccatggacctcttatttctgcgccctgtgacaatctgagccgtctttctctgggggagaagttt

SEQ ID NO: 134017 - DNA, 120 bp, Artificial Sequence
  ENSG00000103035_0 (sequence is synthesized)
ggaagaagaggaactgggcctgaaagggtaccggtgaccgctactgctgccggtgtttgcgtgtggcagggagccaggcctggcgagcggggtgtgtcgcgatgccggagctggcagtgc

SEQ ID NO: 134018 - DNA, 120 bp, Artificial Sequence
  ENSG00000103035_1 (sequence is synthesized)
agaaggtggtggtccaccccctggtgctgctcagtgtggtggatcatttcaaccgaatcggcaaggttggaaaccagaagcgtgttgttggtgtgcttttggggtcatggcaaaagaaag

SEQ ID NO: 134019 - DNA, 120 bp, Artificial Sequence
  ENSG00000103035_2 (sequence is synthesized)
tacttgatgtatcgaacagttttgcagttccttttgatgaagatgacaaagacgattctgtatggtttttagaccatgattatttggaaaacatgtatggaatgtttaagaaagtcaatg

SEQ ID NO: 134020 - DNA, 120 bp, Artificial Sequence
  ENSG00000103035_3 (sequence is synthesized)
ccagggaaagaatagttggctggtaccacacaggccctaaactacacaagaatgacattgccatcaacgaactcatgaaaagatactgtcctaattccgtattggtcatcattgatgtga

SEQ ID NO: 134021 - DNA, 120 bp, Artificial Sequence
  ENSG00000103035_4 (sequence is synthesized)
agccgaaggacctagggctgcctacagaagcgtacatttcagtggaagaagtccatgatgatggaactccaacctcgaaaacatttgaacacgtgaccagtgaaattggagcagaggaag

SEQ ID NO: 134022 - DNA, 120 bp, Artificial Sequence
  ENSG00000103035_5 (sequence is synthesized)
ctgaggaagttggagttgaacacttgttacgagatatcaaagacacgacggtgggcactctgtcccagcggatcacaaaccaggtccatggtttgaagggactgaactccaagcttctgg

SEQ ID NO: 134023 - DNA, 120 bp, Artificial Sequence
  ENSG00000103035_6 (sequence is synthesized)
caggacgtcttcaacctgctgccagatgtcagcctgcaggagttcgtcaaggccttttacctgaagaccaatgaccagatggtggtagtgtacttggcctcgctgatccgttccgtggtc

SEQ ID NO: 134024 - DNA, 120 bp, Artificial Sequence
  ENSG00000103035_7 (sequence is synthesized)
gccctgcacaacctcatcaacaacaagattgccaaccgggatgcagagaagaaagaagggcaggagaaagaagagagcaaaaaggataggaaagaggacaaggagaaagataaagataag

SEQ ID NO: 134025 - DNA, 120 bp, Artificial Sequence
  ENSG00000103035_8 (sequence is synthesized)
gaaaagagtgatgtaaagaaagaggagaaaaaggagaaaaagtaaaacatgtattaaatagcttttttaatttgtaaattaaaatcttacaaactaaatcagtgtgctgctagagggttc

SEQ ID NO: 134026 - DNA, 120 bp, Artificial Sequence
  ENSG00000103035_9 (sequence is synthesized)
tttttcacttgacatgcttattagaaagctgacccaacaagagctctctgcctccggtcactcttgctgtggtgctacgtggaagtgaatggagactgatctcaaatctgaactgcagct

SEQ ID NO: 134027 - DNA, 120 bp, Artificial Sequence
  ENSG00000103035_10 (sequence is synthesized)
ttcgctgctgtgagttggggatatgatagtcagctcaggcttcagattgtatgagaaaaatgaagagaagtcaacaaatattttggtactcttcattcatttatctctaaaaccaggagt

SEQ ID NO: 134028 - DNA, 120 bp, Artificial Sequence
  ENSG00000103035_11 (sequence is synthesized)
tgaattttcctcatcttgaaagactcttggggtctgtttctggtattttacaaaattgctaagtggaatgcatgaattgcattatgttctctggtaacacgtagagttcagacccttctg

SEQ ID NO: 134029 - DNA, 120 bp, Artificial Sequence
  ENSG00000103035_12 (sequence is synthesized)
aactctgttgataataccacaccatgttctggacccatagctctggcatcctcaggggttgtgatccagctccatatattgtttaccttcaaagatacaattaaatggcttgatttttaa

SEQ ID NO: 134030 - DNA, 120 bp, Artificial Sequence
  ENSG00000103035_13 (sequence is synthesized)
caaagcggtatacttttaagaatcaacctgagacctccctgtgcgttcatgccaagtgtgggcttgagggaatttccagatttttctcaacgcacagtgccccagcagactgcatcactg

SEQ ID NO: 134031 - DNA, 120 bp, Artificial Sequence
  ENSG00000103035_14 (sequence is synthesized)
agcagcaccacagtgatgttagctttgaaggctaagctttcaaagtaagccttacccacccttgccatagaaaattctcagtcatgcactcattaaatgagctgacttaaagcaaaagac

SEQ ID NO: 134032 - DNA, 120 bp, Artificial Sequence
  ENSG00000103035_15 (sequence is synthesized)
tcagggtgcgaaaaggaacacatgtcagttcgtttgtggaaaataaataattatagttaggcttcctctcccaggatggaactccaacctcgaaaacatttgaacacgtgaccagtgaaa

SEQ ID NO: 134033 - DNA, 120 bp, Artificial Sequence
  ENSG00000103035_16 (sequence is synthesized)
tgattaaaatgtcagtttaccctttaaaaatataaacctttgttaccgcttttgactacaacccagagattgtcttaaaattgctgaagtatagaaaagagaacctgaagattgcacact

SEQ ID NO: 134034 - DNA, 120 bp, Artificial Sequence
  ENSG00000103035_17 (sequence is synthesized)
agaccagacagtaaatattttaaacttgcaggccatgtggtctccactgcacctgctcctctctgccattatagtgcaagagctgctatagacaacatgtaaacaaacaaaagtggcagt

SEQ ID NO: 134035 - DNA, 120 bp, Artificial Sequence
  ENSG00000103035_18 (sequence is synthesized)
gaatatggagacctggggtctcgtcctggccgtccactaacaagtctgccattctgagcaaatcacagtccctttccagacctttgttttattgtctgtaaattgaagtgtttgaactac

SEQ ID NO: 134036 - DNA, 120 bp, Artificial Sequence
  ENSG00000103035_19 (sequence is synthesized)
atcaactgtaaaatgtcttgagttacaatttatgactttgtggatagcataccttgtctggaaactataatgttgactgacgggaagagaggtatgaaataaatgcaggcctgcactctc

SEQ ID NO: 134037 - DNA, 120 bp, Artificial Sequence
  ENSG00000103035_20 (sequence is synthesized)
cagtgcagaaggtggtggtccaccccctggtgctgctcagtgtggtggatcatttcaaccgggtttcgccatgttgcccacgctgcccatgctcgtctcaaactcctgagctcaagtgat

SEQ ID NO: 134038 - DNA, 120 bp, Artificial Sequence
  ENSG00000103035_21 (sequence is synthesized)
tacaggcatgagccactgcatccggcctactccatcatctttattccaaaaaagatttcaggatgggaaaagtttaaagaatcggcaaggttggaaaccagaagcgtgttgttggtgtgc

SEQ ID NO: 134039 - DNA, 120 bp, Artificial Sequence
  ENSG00000103037_0 (sequence is synthesized)
agagacgccggaagtgaccgcgcggtgcgccggcccgcgaggaaacgcgctcttagaccatggcgacccaggcgaagcgtccacgggtggcggggcccgtggacggcggcgacctggatc

SEQ ID NO: 134040 - DNA, 120 bp, Artificial Sequence
  ENSG00000103037_1 (sequence is synthesized)
ctgtggcctgcttcctgagctggtgccggcgggtggggctggagctgagtcccaaggtggcggtcagccggcagggcacggtggccggctacggcatggtggcccgggagagcgtgcagg

SEQ ID NO: 134041 - DNA, 120 bp, Artificial Sequence
  ENSG00000103037_2 (sequence is synthesized)
ccggagagctgttgttcgtggtgccgcgggccgcgctcctgtcgcagcacacctgctccatcggcggcctgctggagcgagagcgagttgcgctgcagagccagtcgggctgggtgccac

SEQ ID NO: 134042 - DNA, 120 bp, Artificial Sequence
  ENSG00000103037_3 (sequence is synthesized)
tgctgctggcgctgctccacgagctgcaggccccggcctcacgctggaggccctactttgcgctctggcccgagctgggccgcttggagcacccgatgttctggccagaggaggagcgcc

SEQ ID NO: 134043 - DNA, 120 bp, Artificial Sequence
  ENSG00000103037_4 (sequence is synthesized)
ggtgcctgctccagggcacaggcgtacctgaggccgtggagaaggatttggccaacatccgcagcgagtaccagtccatcgtgctgcccttcatggaagcccaccccgatctcttcagcc

SEQ ID NO: 134044 - DNA, 120 bp, Artificial Sequence
  ENSG00000103037_5 (sequence is synthesized)
tcagggttcgctccctagaactctaccaccagctggtggcccttgtgatggcctatagctttcaggaaccactggaggaagaagaggatgaaaaggagcccaactcccccgtgatggtgc

SEQ ID NO: 134045 - DNA, 120 bp, Artificial Sequence
  ENSG00000103037_6 (sequence is synthesized)
ctgctgcagacatactaaaccacttagccaatcacaacgccaatctagaatactctgcgaattgtcttcggatggtagccactcagcccattcctaaaggccatgagattttcaacactt

SEQ ID NO: 134046 - DNA, 120 bp, Artificial Sequence
  ENSG00000103037_7 (sequence is synthesized)
atgggcaaatggctaactggcaactgattcatatgtacggttttgttgaaccatatcctgacaacacagatgacacagctgacattcagatggtgacagttcgtgaggcagcattacagg

SEQ ID NO: 134047 - DNA, 120 bp, Artificial Sequence
  ENSG00000103037_8 (sequence is synthesized)
acaaaaactgaagctgaaaggcacctagtgtacgagcgctgggatttcctatgcaaactggagatggtaggggaagagggagcctttgtgatagggagggaggaggtgctgactgaagag

SEQ ID NO: 134048 - DNA, 120 bp, Artificial Sequence
  ENSG00000103037_9 (sequence is synthesized)
gagctgaccaccacactaaaggtactgtgcatgcctgctgaggagttcagagagcttaaagaccaggatggagggggagatgataaaagggaagagggcagcctgacgatcacaaatatt

SEQ ID NO: 134049 - DNA, 120 bp, Artificial Sequence
  ENSG00000103037_10 (sequence is synthesized)
cccaagctcaaagcatcgtggagacagctgcttcaaaacagtgttctactgactttgcagacctatgccacagacttaaaaactgaccaaggtttactcagtaataaggaagtctatgcg

SEQ ID NO: 134050 - DNA, 120 bp, Artificial Sequence
  ENSG00000103037_11 (sequence is synthesized)
aaactcagctggagggaacagcaagccttacaggttcgctatggtcagaagatgatcttacatcagttgttggagctgacaagttagcagtttccctgttccctgaaggaacagcaataa

SEQ ID NO: 134051 - DNA, 120 bp, Artificial Sequence
  ENSG00000103037_12 (sequence is synthesized)
gaactttattctaagctaatactcattgatgtttgaaaaagaggaaaatttggatctttcttttgcttactaaacaccaagaggaaaagtagcaaagttggtgtgctaggattaactcag

SEQ ID NO: 134052 - DNA, 120 bp, Artificial Sequence
  ENSG00000103037_13 (sequence is synthesized)
gtaagggtgatgtgttttaggattgagaacagcagacttgggaatcactgctaattgttacttaaagcatgttacagatgttttgttctcagttttaaccaaagccagtggacatacggt

SEQ ID NO: 134053 - DNA, 120 bp, Artificial Sequence
  ENSG00000103037_14 (sequence is synthesized)
agtaataagtaagtcttgttgtgtttcagcatttaataatagactttggaggtagacccctggtttaaatctaagtctagtttgaggaagtcacttaacctttattgaaaagactctgga

SEQ ID NO: 134054 - DNA, 120 bp, Artificial Sequence
  ENSG00000103037_15 (sequence is synthesized)
tttaataagctgtgtaactggtactcgatagttacccaaagttcagtctagatggcacaaaccacctctcagggaataaaccctaagacatcactcaaggaggacttcaattatttaatt

SEQ ID NO: 134055 - DNA, 120 bp, Artificial Sequence
  ENSG00000103037_16 (sequence is synthesized)
ttgaactgttttgtcctctctggccataaaacttgacagtcatgaaaggtaaggcaaattttaagtgggttaagtttttaaatacgtatctactcattttctttaaaaaaaaaaaaaaaa

SEQ ID NO: 134056 - DNA, 120 bp, Artificial Sequence
  ENSG00000103037_17 (sequence is synthesized)
acagctgacattcagatggtgacagttcgtgaggcagcattacagggtgagtgtatcattaactcaatatttgacactgatggtgtgtctatacccatgcctcaggttaaatagctttgc

SEQ ID NO: 134057 - DNA, 120 bp, Artificial Sequence
  ENSG00000103037_18 (sequence is synthesized)
tgttgaaataaataggaagaaaaatacaatttccttaaacatgccagcttagtagtaggaatgacctatcaatcaatcaatcaatcattcagcaagaagttagttggtggttccccatgg

SEQ ID NO: 134058 - DNA, 120 bp, Artificial Sequence
  ENSG00000103037_19 (sequence is synthesized)
ccccaaggtctgcagggctggattgtccacttttcctcctcaccaccagcactggctgctgctactgagaaaggcacagtggactcatgtgtgtgtcatgactttaatggttagctacag

SEQ ID NO: 134059 - DNA, 120 bp, Artificial Sequence
  ENSG00000103037_20 (sequence is synthesized)
tatgcatacacatacaagaagtaggggagctgaagcccaggaaaaggctacaaaatacaacacagggaccaatacatttgcaaaacattcaaaatccttataaaaggggctgtattggtc

SEQ ID NO: 134060 - DNA, 120 bp, Artificial Sequence
  ENSG00000103037_21 (sequence is synthesized)
ctttcaactttgtcattattcagcttagcctgtatggccattcattcagtggggtaatgggggagaacaattaattaatgagatttggttccctttcctatattcccactgtttttaagt

SEQ ID NO: 134061 - DNA, 120 bp, Artificial Sequence
  ENSG00000103037_22 (sequence is synthesized)
ttcaggagaggattgggggggtgagggtaggggtgggctttaggcctggtctggtttccctttatataaagagctgacccccatctcaggcggctgaggtgtataatccccaaaagaaat

SEQ ID NO: 134062 - DNA, 120 bp, Artificial Sequence
  ENSG00000103037_23 (sequence is synthesized)
aagatggtacaaatgcagtcagctttggaatacgtttgggtagagacaaaatggaaactcatgggattccaatagtgagcccttcccatgttcctggacatatccaattctagcacatcc

SEQ ID NO: 134063 - DNA, 120 bp, Artificial Sequence
  ENSG00000103037_24 (sequence is synthesized)
acatttttaataacttagtgattttcaaggtcccctgtccacattaaaaaaataagttacataatattcaaactggctttttgctattctttgggacaccaggaatgtcagaagacatgg

SEQ ID NO: 134064 - DNA, 120 bp, Artificial Sequence
  ENSG00000103037_25 (sequence is synthesized)
agctatgccctcagacaagtgcatggcatcagctgcctcttcattacaaggtaccagtttatgtacttgccttggacacagcttgcacaaagccaagaagttccagacaaaggttttctc

SEQ ID NO: 134065 - DNA, 120 bp, Artificial Sequence
  ENSG00000103037_26 (sequence is synthesized)
tttcatgtatttacacaagttcaaaatgatattcacagcatcttctaaattttggccaagagtcaaaaaaatgcatttaaactttggaacgtgcccacataagacaggaggctgatccca

SEQ ID NO: 134066 - DNA, 120 bp, Artificial Sequence
  ENSG00000103037_27 (sequence is synthesized)
acagtagttggggcagatacccacaaaccaaagggctgggaaagtcaggaagagctgaaaggattcttcagtcagtttatgaactcggtgcagtgagacctctagactgacacgtacaac

SEQ ID NO: 134067 - DNA, 120 bp, Artificial Sequence
  ENSG00000103037_28 (sequence is synthesized)
agagatgcagtttcgtctaactggcacctgtcccttccattacttgctgggcctgcttctgtcccatgcagcactgtgcgaccgactggaataacctgaaggatgaagacagttacaaat

SEQ ID NO: 134068 - DNA, 120 bp, Artificial Sequence
  ENSG00000103037_29 (sequence is synthesized)
ctctgattaaagagtaggcctaacaataccttgcatctcattcagctgacccaacctagagacagatggttttcagtctccagtctcattcctagacaattaaaaattactttgaactca

SEQ ID NO: 134069 - DNA, 120 bp, Artificial Sequence
  ENSG00000103037_30 (sequence is synthesized)
tgcaccgtagcctgctgcaagaagtttccccgcccctgcaccagtcctacccagtaaagtgtgtgaaggaatgaagggaacctgggtgtgggtgtccctgcaggccagaggaggagcgcc

SEQ ID NO: 134070 - DNA, 120 bp, Artificial Sequence
  ENSG00000103037_31 (sequence is synthesized)
cactgattgagcatgattcaagccattgtgtcttaggctccattctcttactagtgctacaaaatgagtaggtgaaatcagctcctcctgtatgtccttttagtatgcatattactgtag

SEQ ID NO: 134071 - DNA, 120 bp, Artificial Sequence
  ENSG00000103037_32 (sequence is synthesized)
aatcatttgaatgcgaaacattttaaagtcctcaaagtaagttgtggttaatcctctgataaactatactaccatcatttatttagtgctagacattgagtggtctgcatagccatgttt

SEQ ID NO: 134072 - DNA, 120 bp, Artificial Sequence
  ENSG00000103037_33 (sequence is synthesized)
aaccacttagccaatcacaacgccaatctagaatactctgcggcatggccccagcttctccctttcacctcagaattgtcttcggatggtagccactcagcccattcctaaaggccatga

SEQ ID NO: 134073 - DNA, 120 bp, Artificial Sequence
  ENSG00000103037_34 (sequence is synthesized)
gcttcctgagctggtgccggcgggtggggctggagctgagtcccaaggtgagcgagcgagccggcgggcggaggacccgcggcggggcgcgggctgccctgaccagccctcctgctcagg

SEQ ID NO: 134074 - DNA, 120 bp, Artificial Sequence
  ENSG00000103037_35 (sequence is synthesized)
cccgcgaggaaacgcgctcttagaccatggcgacccaggcgaagcgtccacgggtgagtggcgggcgcggggtccagccttttcctccgcgcctcaccccttctccgttcgcagaaccgt

SEQ ID NO: 134075 - DNA, 120 bp, Artificial Sequence
  ENSG00000103037_36 (sequence is synthesized)
ccgcctgcgccccctccgctccctcccgcgggtcccgcgcccctctccgctcgtcccctcctccacccaaagcccgttctgcgctcgcgccgcggtctcctgcagttcccagcggcctct

SEQ ID NO: 134076 - DNA, 88 bp, Artificial Sequence
  ENSG00000103037_37 (sequence is synthesized)
aatttcgtttttaaagctagcaactttttaagtgctgaagaggactgtgcagaaatccacccagttaaacatgaagctggccttttaa

SEQ ID NO: 134077 - DNA, 120 bp, Artificial Sequence
  ENSG00000103037_38 (sequence is synthesized)
gcagaaatccacccagttaaacatgaagctggccttttaaagttagcccaacccttttttgtttcacagtttagggtctaacaggaactaaaggtagaactttggtagttaacagcatca

SEQ ID NO: 134078 - DNA, 120 bp, Artificial Sequence
  ENSG00000103042_0 (sequence is synthesized)
atgtgatgcatgctcacgtgtctccgcagccggctcgggaaagaatcccccaagctccatttcatgagtaagcgtgagagccgctcagtttcctccagctctgctgaagccagcacagaa

SEQ ID NO: 134079 - DNA, 120 bp, Artificial Sequence
  ENSG00000103042_1 (sequence is synthesized)
gtagcccaaactcttccctctgctgacagcaaattttaggcaaagtcttgagaaagaagaaattgggtccagaaagggaagtgaggagaatcagatcccagacctttggggagaaggagc

SEQ ID NO: 134080 - DNA, 120 bp, Artificial Sequence
  ENSG00000103042_2 (sequence is synthesized)
aaccgcctctggcacagcccatcagggagaaagagcaggttgagaagagtcctaagctaacagccccaaacaggtgggtgttgctcagctccctgaggcatgtggttgtaaggcagaacc

SEQ ID NO: 134081 - DNA, 120 bp, Artificial Sequence
  ENSG00000103042_3 (sequence is synthesized)
cacagaccttgcaggaagaaggctctcggggccatggcccaggtcagcatcaacaatgactacagcgagtgggacttgagcacggatgccggggagcgggctcggctgctgcagagtccc

SEQ ID NO: 134082 - DNA, 120 bp, Artificial Sequence
  ENSG00000103042_4 (sequence is synthesized)
tgtgtggacacagcccccaagagtgagtgggaagcctctcctgggggtctggacagaggcaccacttccacacttggggccatcttcatcgtcgtcaacgcgtgcctgggtgcagggtta

SEQ ID NO: 134083 - DNA, 120 bp, Artificial Sequence
  ENSG00000103042_5 (sequence is synthesized)
ctcaacttcccagcagccttcagcactgcggggggcgtggcagcaggcatcgcactgcagatgggtatgctggttttcatcatcagtggccttgtcatcctggcctactgctcccaggcc

SEQ ID NO: 134084 - DNA, 120 bp, Artificial Sequence
  ENSG00000103042_6 (sequence is synthesized)
agcaatgagaggacctaccaggaggtggtatgggctgtgtgtggcaagctgacaggtgtgctatgtgaggtggccatcgctgtctacacctttggcacctgcattgccttcctaatcatc

SEQ ID NO: 134085 - DNA, 120 bp, Artificial Sequence
  ENSG00000103042_7 (sequence is synthesized)
attggcgaccagcaggacaagattatagctgtgatggcgaaagagccggagggggccagcggcccttggtacacagaccgcaagttcaccatcagcctcactgccttcctcttcatcctg

SEQ ID NO: 134086 - DNA, 120 bp, Artificial Sequence
  ENSG00000103042_8 (sequence is synthesized)
cccctctccatccccagggagattggtttccagaaatatgccagcttcctgagcgtcgtgggtacctggtacgtcacagccatcgttatcatcaagtacatctggccagataaagagatg

SEQ ID NO: 134087 - DNA, 120 bp, Artificial Sequence
  ENSG00000103042_9 (sequence is synthesized)
accccagggaacatcctgaccaggccggcttcctggatggctgtgttcaatgccatgcccaccatctgcttcggatttcagtgccacgtcagcagtgtgcccgtcttcaacagcatgcag

SEQ ID NO: 134088 - DNA, 120 bp, Artificial Sequence
  ENSG00000103042_10 (sequence is synthesized)
cagcctgaagtgaagacctggggtggagtggtgacagctgccatggtcatagccctcgctgtctacatggggacaggcatctgtggcttcctgacctttggagctgctgtggatcctgac

SEQ ID NO: 134089 - DNA, 120 bp, Artificial Sequence
  ENSG00000103042_11 (sequence is synthesized)
gtgctcctgtcctatccctcggaggacatggccgtggccgttgcccgagccttcatcatcctgagcgtgctcacctcctaccctatcctgcacttctgtgggcgggcggtggtggaaggc

SEQ ID NO: 134090 - DNA, 120 bp, Artificial Sequence
  ENSG00000103042_12 (sequence is synthesized)
ctgtggctgcgctaccagggggtgccagtggaggaggacgtggggcgggagcggcggcggcgagtgctgcagacgctggtctggttcctgctcaccctgctgctggcgctcttcatccct

SEQ ID NO: 134091 - DNA, 120 bp, Artificial Sequence
  ENSG00000103042_13 (sequence is synthesized)
gacatcggcaaggtgatctcagtcattggaggcctggccgcctgcttcatcttcgtcttcccagggctgtgcctcattcaagccaaactctctgagatggaagaggtcaaaccagccagc

SEQ ID NO: 134092 - DNA, 120 bp, Artificial Sequence
  ENSG00000103042_14 (sequence is synthesized)
tggtgggtgctggtcagctacggagtcctcttggtcaccctgggagccttcatcttcggccagaccacagccaacgccatctttgtggatctcttggcataaccactgcctcccagggaa

SEQ ID NO: 134093 - DNA, 120 bp, Artificial Sequence
  ENSG00000103042_15 (sequence is synthesized)
cacaaggcctttgccattggtcgcaggaacccatctcttagagctatggggccattcttagtccacgatcattccaactggtgggatgacatccggacatcctcttccagggactggggc

SEQ ID NO: 134094 - DNA, 120 bp, Artificial Sequence
  ENSG00000103042_16 (sequence is synthesized)
tagaggacccctcctcctctcccagttctcaacttctccatgcctggaatccacgggtgaagagagtcggtagatctcataagaaagaatccagtctgacttccctctggagaatgacta

SEQ ID NO: 134095 - DNA, 120 bp, Artificial Sequence
  ENSG00000103042_17 (sequence is synthesized)
tggacagaaggccaccatcctccacagagcaccctgtcctgagtaggggttgtgctcattaccccaggccagtggtagcttcctcaggagcctggccacttccaacggtagcactgaagt

SEQ ID NO: 134096 - DNA, 120 bp, Artificial Sequence
  ENSG00000103042_18 (sequence is synthesized)
catgcaaatgcatagtcaggtagattcagaccttgtccacaccttcctgggcaacccccaccatgaacctgtcagcctctttcccatagctaatagacatttcccaggccttgaggggcc

SEQ ID NO: 134097 - DNA, 120 bp, Artificial Sequence
  ENSG00000103042_19 (sequence is synthesized)
ccaccctgtctctttcatcaaacctgatggtccaggctgggcatccctctcctcctccatccccagacatcaccaggtctaatgtttacaaacggtgccagcccggctctgaagccaagg

SEQ ID NO: 134098 - DNA, 120 bp, Artificial Sequence
  ENSG00000103042_20 (sequence is synthesized)
gccgtcccgtgccacggtgctgtgagtattcctccgttagctttccccataaggttgggagtatctgcttttgtgtctgagatgggcccctcttttcagaggccgcagggtgggtgatgg

SEQ ID NO: 134099 - DNA, 120 bp, Artificial Sequence
  ENSG00000103042_21 (sequence is synthesized)
agaaggctgagaacctttcagaccctctgtgtgggctgggctggtcagaatcagggtgtacctccccgacaccttctttttcagtgatgttttctcttcttcctgcctttcctctgcctc

SEQ ID NO: 134100 - DNA, 86 bp, Artificial Sequence
  ENSG00000103042_22 (sequence is synthesized)
tcagtgatgttttctcttcttcctgcctttcctctgcctcctcccctgccagccctagcgtgactacgggctgggcgcagtggctc

SEQ ID NO: 134101 - DNA, 67 bp, Artificial Sequence
  ENSG00000103042_23 (sequence is synthesized)
ccagctacttgggaggctgaggcagcagagccgcttaaacccaggaggcagagactgcacatctcaa

SEQ ID NO: 134102 - DNA, 120 bp, Artificial Sequence
  ENSG00000103042_24 (sequence is synthesized)
aaacaaaaaggcagctgggttgtcactgatgggcagcatttgagcctgccacactggcctggaagtttcccttccagtctggattttgtctgctccttccttccccctcaccccgttacc

SEQ ID NO: 134103 - DNA, 120 bp, Artificial Sequence
  ENSG00000103042_25 (sequence is synthesized)
tcttcacctcccatctcacttcactgtgtagctcagtctctcccacgcacataattggggacagtgggggctctcttaccagcctcctcagcaacgcacgtccatcaggcctggcctcag

SEQ ID NO: 134104 - DNA, 120 bp, Artificial Sequence
  ENSG00000103042_26 (sequence is synthesized)
tggccagccacattgatgtcacactggaattgttaccccagagagggcgaagagataggctatctccccacctcccaccctactccccactatattcccgttttgaccacctcagcccct

SEQ ID NO: 134105 - DNA, 120 bp, Artificial Sequence
  ENSG00000103042_27 (sequence is synthesized)
cagctgccccctctcactttggccaatcccaggcaccaatcagacttcctcctccacctggagcccctagcatttccttgtcccctcttccccaaaacctctgtaaagggtacgagaggg

SEQ ID NO: 134106 - DNA, 120 bp, Artificial Sequence
  ENSG00000103042_28 (sequence is synthesized)
accccctgccgagccgcccgccactcagggcagtccgatctaagaagcagaagctggttggaggctggctgggcctctgtccagtccccagatggataaactgccttttctcacatcccc

SEQ ID NO: 134107 - DNA, 120 bp, Artificial Sequence
  ENSG00000103042_29 (sequence is synthesized)
tcttggtgcctgatcttctctgcccccggggccagacccactgtgctgttttctgtcagtctgtggcacagcaccaagctctgccagcaccagtccctgacagggctaggaggacagcct

SEQ ID NO: 134108 - DNA, 120 bp, Artificial Sequence
  ENSG00000103042_30 (sequence is synthesized)
ggtcagcagggctgcagtcccccagtgccgtgtttcgggggtcaagggatgtaagtggagtcattgcacagagacagaccagtcaggagaaggagctggaatctggcctcttgtcctaac

SEQ ID NO: 134109 - DNA, 120 bp, Artificial Sequence
  ENSG00000103042_31 (sequence is synthesized)
ctcaggagccccctcccatcctctccccaccctccctatcggggtacttcactgtttcttttctacttgtgtatactcgagaaagggaagatggttaataaaagggatttgtgctgctga

SEQ ID NO: 134110 - DNA, 120 bp, Artificial Sequence
  ENSG00000103042_32 (sequence is synthesized)
ccccaaggtaggtggccggagacaggctctggagggtggaagtgttagatccccgaggtctgtggagcccctcagtccccgccaccgcggaaaagctcagaccctttccctgcaggggtc

SEQ ID NO: 134111 - DNA, 120 bp, Artificial Sequence
  ENSG00000103042_33 (sequence is synthesized)
cagatcctggcgtcctcgccccacgcccgtccctctgttgcgccagctctgccgcgcctttacccagccagagggtctccacccagtcctaggccgggatcgggtcccggagctcctccc

SEQ ID NO: 134112 - DNA, 120 bp, Artificial Sequence
  ENSG00000103042_34 (sequence is synthesized)
caggttaccccacagtagcccacccttctcgctccaggcctgggaatcgccccgccccggcctcctggcccgggtgcgccctggctcacctcacaaagcctcacctcacaaagcagccca

SEQ ID NO: 134113 - DNA, 120 bp, Artificial Sequence
  ENSG00000103042_35 (sequence is synthesized)
ccctttctatctcagggctccaaccccaggctggactgggagcacactccagttgggatctgaggggcctacatcgctggcctgagcatgtgggcatcaggcttctattctggctctgcc

SEQ ID NO: 134114 - DNA, 89 bp, Artificial Sequence
  ENSG00000103042_36 (sequence is synthesized)
acccagcctaaaatggggaaggcatctgtggcttcctgacctttggagctgctgtggatcctgacgtgctcctgtcctatccctcggag

SEQ ID NO: 134115 - DNA, 120 bp, Artificial Sequence
  ENSG00000103042_37 (sequence is synthesized)
ccgcctctggcacagcccatcagggagaaagagcaggtaccttcctctggaaactggggttgaggtcatttccccaccatgacggtgcccttcacctggacagtgccacgtcagcagtgt

SEQ ID NO: 134116 - DNA, 120 bp, Artificial Sequence
  ENSG00000103042_38 (sequence is synthesized)
acttctcaggcgtttcctgagtctgcttggcatagtctccggttcattcagtggacacttgtggtcgctagagctgaaggtggatgtccctaggggtggaatcagataagaggcagctgg

SEQ ID NO: 134117 - DNA, 120 bp, Artificial Sequence
  ENSG00000103042_39 (sequence is synthesized)
ccgagaggtcttaaccaaggcagagaatctgcaagaggtgggacccccagcttctgagttccacgaggaccccagcctgcactctcatgtgggtggcaggagaggctggaggatggtgca

SEQ ID NO: 134118 - DNA, 120 bp, Artificial Sequence
  ENSG00000103042_40 (sequence is synthesized)
ggactcgggcaggggtgcccaagggaaacattttggttggagagtcaggaagccgcaccaagccttgtgaccttggacgaatcactctgtagacctctgtctctgtgacgtgagcagcgg

SEQ ID NO: 134119 - DNA, 120 bp, Artificial Sequence
  ENSG00000103042_41 (sequence is synthesized)
agcattctgacggcagaacctactcggagacccagatcacagccctgcccagggctgctcttgatctgggggtggacttgatgctttaggaccatcatttctctgcgggtctcaggctat

SEQ ID NO: 134120 - DNA, 120 bp, Artificial Sequence
  ENSG00000103042_42 (sequence is synthesized)
cactggccgggagggcagaggtgcagttcagttgggcgctttgcctcaaaagggaggcttcgggtcagggatggccagtaagtgatacacgcactgctctcccctccctcacacatggca

SEQ ID NO: 134121 - DNA, 120 bp, Artificial Sequence
  ENSG00000103042_43 (sequence is synthesized)
gacatgactaatctattctagtattctttcctgtgacccaaatgaggcttcagaagccttccaacaatcagagaaatttgaacatcaattacatctctaattttttaggtgtaacattga

SEQ ID NO: 134122 - DNA, 120 bp, Artificial Sequence
  ENSG00000103042_44 (sequence is synthesized)
gcgcttccaacatggtcctttggccttgtgtggaccccatcctgtagaaggagaaactgaagcctgtagaaaagagtcggtgcctaggatgggtccctacatatcccaggccaggtgtca

SEQ ID NO: 134123 - DNA, 120 bp, Artificial Sequence
  ENSG00000103042_45 (sequence is synthesized)
gtcagaagcgccctttgtcctggggtcaccagaacattccgtgagtcctgtaagaatctctatccatggcatggcacggtggctcacgtctctaaacccagcactttgggaggctgaggc

SEQ ID NO: 134124 - DNA, 120 bp, Artificial Sequence
  ENSG00000103042_46 (sequence is synthesized)
ggatcgcttgagcctgggagttcaagaccacctgggcaacctagtgagaccccatctctacacaaaataaaataaatagccaggtgtggtgggatgcacctgtggtcccagctactcagc

SEQ ID NO: 134125 - DNA, 71 bp, Artificial Sequence
  ENSG00000103042_47 (sequence is synthesized)
caggtgtggtgggatgcacctgtggtcccagctactcagccacttgggaggctgaggcagaaggatggctg

SEQ ID NO: 134126 - DNA, 120 bp, Artificial Sequence
  ENSG00000103042_48 (sequence is synthesized)
atgtgatgcatgctcacgtgtctccgcagccggctcgggaaagaatcccccaagctccatttcatgagtaagcgtgagagccgctcagtttcctccagctctggttttgatcagtgttct

SEQ ID NO: 134127 - DNA, 120 bp, Artificial Sequence
  ENSG00000103042_49 (sequence is synthesized)
gctccctgcttgcttagggctggagagtctcaggcatggtggtggtgggcaacatgggaaggggcatctgcagaaataacagcagcagtgaccatttattgagtcttaaacccttactga

SEQ ID NO: 134128 - DNA, 120 bp, Artificial Sequence
  ENSG00000103042_50 (sequence is synthesized)
ccttgagaacactgaagatcctttttcagggctgggctcctcagagcctctcgagattcttggaagaaaaaaaactgcatctcaattgtgtttatccagagagcaaagagaatcagtcag

SEQ ID NO: 134129 - DNA, 120 bp, Artificial Sequence
  ENSG00000103043_0 (sequence is synthesized)
gactcgagtaacatggccgctgtctcgtgagtcccgctagtgccgggcgggagttgttaagcggccagggtcaggtgtgctggagcggggtccgggcccgggttccagggcgaggcggcg

SEQ ID NO: 134130 - DNA, 120 bp, Artificial Sequence
  ENSG00000103043_1 (sequence is synthesized)
gtggcaggcaagcctagagcggcgtggtccatgcgccggcgccgggggcagagcggagccgcagactcccctggccccggcgcggccccggcagccgcgggctaaggagtcgcgaggttc

SEQ ID NO: 134131 - DNA, 120 bp, Artificial Sequence
  ENSG00000103043_2 (sequence is synthesized)
gttcccccagctgccaccatgaaccccgagaaggatttcgcgccgctcacgcctaacatcgtgcgcgccctcaatgacaagctgtacgaaaagcggaaggtggcagcgctggagatcgag

SEQ ID NO: 134132 - DNA, 120 bp, Artificial Sequence
  ENSG00000103043_3 (sequence is synthesized)
aagctggtccgggagttcgtggcccagaacaataccgtgcaaatcaagcatgtgatccagaccctgtcccaggagtttgccctgtctcagcacccccacagccggaaagggggcctcatc

SEQ ID NO: 134133 - DNA, 120 bp, Artificial Sequence
  ENSG00000103043_4 (sequence is synthesized)
ggcctggccgcctgctccatcgcactgggcaaggactcagggctctacctgaaggagctgatcgagccagtgctgacctgcttcaatgatgcagacagcaggctgcgctactatgcctgc

SEQ ID NO: 134134 - DNA, 120 bp, Artificial Sequence
  ENSG00000103043_5 (sequence is synthesized)
gaggccctctacaacatcgtcaaggtggcccggggcgctgtgctgccccacttcaacgtgctctttgacgggctgagcaagctggcagccgacccagaccccaatgtgaaaagcggatct

SEQ ID NO: 134135 - DNA, 120 bp, Artificial Sequence
  ENSG00000103043_6 (sequence is synthesized)
gagctcctagaccgccttttaaaggacattgtgactgagagcaacaagtttgacctggtgagcttcatccccttgttgcgagagaggatttactccaacaaccagtatgcccggcagttc

SEQ ID NO: 134136 - DNA, 120 bp, Artificial Sequence
  ENSG00000103043_7 (sequence is synthesized)
atcatctcctggatcctggttctggagtcggtgccagacattaacctgctggattacctgccggagatcctggatggactcttccagatcctgggtgacaatggcaaagagattcgcaaa

SEQ ID NO: 134137 - DNA, 120 bp, Artificial Sequence
  ENSG00000103043_8 (sequence is synthesized)
atgtgtgaggttgttcttggagaattcttaaaagaaattaagaagaacccctccagtgtgaagtttgctgagatggccaacatcctggtgatccactgccagacaacagatgacctcatc

SEQ ID NO: 134138 - DNA, 120 bp, Artificial Sequence
  ENSG00000103043_9 (sequence is synthesized)
cagctgacagccatgtgctggatgcgggagttcatccagctggcgggccgcgtcatgctgccttactcctccgggatcctgactgctgtcttgccctgcttggcctacgatgaccgcaag

SEQ ID NO: 134139 - DNA, 120 bp, Artificial Sequence
  ENSG00000103043_10 (sequence is synthesized)
aaaagcatcaaagaagtggccaacgtgtgcaaccagagcctgatgaagctggtcacccccgaggacgacgagctggatgagctgagacctgggcagaggcaggcagagcccacccctgac

SEQ ID NO: 134140 - DNA, 120 bp, Artificial Sequence
  ENSG00000103043_11 (sequence is synthesized)
gatgccctgccaaagcaggagggcacagccagtggaggtccagatggttcctgtgactccagcttcagtagcggcatcagtgtcttcactgcagccagcactgaaagagccccagtgacc

SEQ ID NO: 134141 - DNA, 120 bp, Artificial Sequence
  ENSG00000103043_12 (sequence is synthesized)
cacctctacatcaaaactcctcggaagatgttccggcacacggacagcctctttcccatcctactgcagacgttatcggatgaatcggatgaggtgatcctgaaggacctggaggtgctg

SEQ ID NO: 134142 - DNA, 120 bp, Artificial Sequence
  ENSG00000103043_13 (sequence is synthesized)
gcagaaatcgcttcctcccccgcaggccagacggatgacccaggccccctcgatggccctgacctccaggccagccactcagagctccaggtgcccacccctggcagagccggcctactg

SEQ ID NO: 134143 - DNA, 120 bp, Artificial Sequence
  ENSG00000103043_14 (sequence is synthesized)
aacacctctggtaccaaaggcttagaatgttctccttcaactcccaccatgaattcttacttttataagttcatgatcaaccttctcaagagattcagcagcgaacggaagctcctggag

SEQ ID NO: 134144 - DNA, 120 bp, Artificial Sequence
  ENSG00000103043_15 (sequence is synthesized)
gtcagaggccctttcatcatcaggcagctgtgcctcctgctgaatgcggagaacatcttccactcaatggcagacatcctgctgcgggaggaggacctcaagttcgcctcgaccatggtc

SEQ ID NO: 134145 - DNA, 120 bp, Artificial Sequence
  ENSG00000103043_16 (sequence is synthesized)
cacgccctcaacaccatcctgctgacctccacagagctcttccagctaaggaaccagctgaaggacctgaagaccctggagagccagaacctgttctgctgcctgtaccgctcctggtgc

SEQ ID NO: 134146 - DNA, 120 bp, Artificial Sequence
  ENSG00000103043_17 (sequence is synthesized)
cacaacccagtcaccacggtgtccctctgcttcctcacccagaactaccggcacgcctatgacctcatccagaagtttggggacctggaggtcaccgtggacttcctcgcagaggtggac

SEQ ID NO: 134147 - DNA, 120 bp, Artificial Sequence
  ENSG00000103043_18 (sequence is synthesized)
aagctggtgcagctgattgagtgccccatcttcacatatctgcgcctgcagctgctggacgtgaagaacaacccctacctgatcaaggccctctacggcctgctcatgctcctgccgcag

SEQ ID NO: 134148 - DNA, 120 bp, Artificial Sequence
  ENSG00000103043_19 (sequence is synthesized)
agcagcgccttccagctgctctcgcaccggctccagtgcgtgcccaaccctgagctgctgcagaccgaagacagtctaaaggcagcccccaagtcccagaaagctgactcccctagcatc

SEQ ID NO: 134149 - DNA, 120 bp, Artificial Sequence
  ENSG00000103043_20 (sequence is synthesized)
gactacgcagagctgctgcagcactttgagaaggtccagaacaagcacctggaagtgcggcaccagcggagcgggcgtggggaccacctggaccggagggttgtcctctgacaggcctgg

SEQ ID NO: 134150 - DNA, 120 bp, Artificial Sequence
  ENSG00000103043_21 (sequence is synthesized)
cacggaggagggcccaccgagtggtcccatgaaacactaagggtcgtcacgccctcccgaggagctcaaggacctgcctgtcaggaccagggctgggcctgccaacccagggcagtgttg

SEQ ID NO: 134151 - DNA, 120 bp, Artificial Sequence
  ENSG00000103043_22 (sequence is synthesized)
gggccggaggctgctgtgtctgcccaagctcctctcagagtccagtccccaggcctccagcgctgtcagctgcaccctggcattctcacagagctggctgcccacccagtggggggctat

SEQ ID NO: 134152 - DNA, 120 bp, Artificial Sequence
  ENSG00000103043_23 (sequence is synthesized)
agcctcagagaccactcatcctctggaatcaacctctttctaataccctcttggaaaaagagcttgcccctcctccagcacactagagctctggccttgtgtgtatatgtatacatacgt

SEQ ID NO: 134153 - DNA, 120 bp, Artificial Sequence
  ENSG00000103043_24 (sequence is synthesized)
gaacacatgcctgtgtgtgtgtgtgtgtgtgtgtacttgtatgcacgtaggcaccagcacaaagatctgaatgatgcaccccacccccaccccaataaagaaataacagaaaaccctcaa

SEQ ID NO: 134154 - DNA, 120 bp, Artificial Sequence
  ENSG00000103043_25 (sequence is synthesized)
gaacggcctgcctactgtttgcgctttgtggtctggcctctttgttaccaaatgctctggggttgctttggggctgggggtggggaggaatcttctccagcctggccccagagccatggc

SEQ ID NO: 134155 - DNA, 120 bp, Artificial Sequence
  ENSG00000103043_26 (sequence is synthesized)
tggcgttcaggggcatttgggaagctgggcccaggtcatgcggagcggaggctgagtccagcgacctaggaggagatggaggtgtttcaggcctcccaccaagaaatgtggctcacgtca

SEQ ID NO: 134156 - DNA, 120 bp, Artificial Sequence
  ENSG00000103043_27 (sequence is synthesized)
ctgagcacccaagacctcggggcctccgacgccgtgttggaactgtggtgatgcttccctggagacgggatgcggcgtcaggcactggagcttagccccagacggaaggtggtgtgggca

SEQ ID NO: 134157 - DNA, 120 bp, Artificial Sequence
  ENSG00000103043_28 (sequence is synthesized)
ggggtgccacgctgccgccagcccagcactcaggaagcgcagtgctgcacaccaccctctcaccagccaccccgctcatgccccatcctgcctgcatcatgctgttttggggaagctccc

SEQ ID NO: 134158 - DNA, 120 bp, Artificial Sequence
  ENSG00000103043_29 (sequence is synthesized)
gaatccctgggactccagctgggaagcattgcccaggtgcccttcccctgcaggccaggcctccaagggcacgtggaaaagcagcgcggattcctccaagcctgtcctcaccacccactt

SEQ ID NO: 134159 - DNA, 120 bp, Artificial Sequence
  ENSG00000103043_30 (sequence is synthesized)
ctcactgctcgtgtcatccggcccagggaccctgaggaatctgcttttcttcatcctctgggttccctttttgccttttgtataacagggaggctcctcttcacaaagtccgatccttag

SEQ ID NO: 134160 - DNA, 120 bp, Artificial Sequence
  ENSG00000103043_31 (sequence is synthesized)
ccctgaacgactcttaactagacaagagatgggaaaggggtcatggcccagggaccagcgagccctaagtgactctggccgtaagtgactctgcgaccttagtcaagtcacttcaccaga

SEQ ID NO: 134161 - DNA, 120 bp, Artificial Sequence
  ENSG00000103043_32 (sequence is synthesized)
gtttcaccatccgtacagtgaagaaaaaactcagggtcataacgctgatcccacacggatctgtgctccaggccgcagggtacagcccgaacagtgcaaatccctgacctcgggggcttc

SEQ ID NO: 134162 - DNA, 120 bp, Artificial Sequence
  ENSG00000103043_33 (sequence is synthesized)
taccagtcctggccttgacgctgaccaagccatcccgatgccttccctgtcaagacccagtagggcattgcagacctatgttttattaccactctgtccgcacctgagaccagcaaggct

SEQ ID NO: 134163 - DNA, 120 bp, Artificial Sequence
  ENSG00000103043_34 (sequence is synthesized)
ggctttgcggccttgcagcctggtcccctaggcatgggccctctcctgggaatgaggcttgggaagggtctttgagcccagccctcacacaaaggcctgagcaccttcaagggagctggg

SEQ ID NO: 134164 - DNA, 120 bp, Artificial Sequence
  ENSG00000103043_35 (sequence is synthesized)
tcagtggatgctttgcaggcctagagtaggatctggtgtgagctctgccatggatttgttgtgtgacctccagcaagcccagtgccctctctgggttcttggttacttggtcagtaaatg

SEQ ID NO: 134165 - DNA, 120 bp, Artificial Sequence
  ENSG00000103043_36 (sequence is synthesized)
cacatttggactaaatgggtgtgtgagacaccccctagccttcaatgccctggacccccagccttactttgcaacgacctaggaagagataccatagataggggcacagaagcagtgggc

SEQ ID NO: 134166 - DNA, 120 bp, Artificial Sequence
  ENSG00000103043_37 (sequence is synthesized)
atgccaggggacttcagaacagctgggggaggggtcagattgcagggtggggcccagaggacggctcacaccctgggaagggagctgaggacagtcccagccctgggaggggcagacagc

SEQ ID NO: 134167 - DNA, 120 bp, Artificial Sequence
  ENSG00000103043_38 (sequence is synthesized)
tggcagacagggtcgagttgcggggcaggccttggagctgggaacagctgggagagttttgtacactcctcgcccatccctggttctgtgtgctccaagtgccatcaaggccctggggac

SEQ ID NO: 134168 - DNA, 120 bp, Artificial Sequence
  ENSG00000103043_39 (sequence is synthesized)
ctcagctcccccaccccctggcttctgggccactccccagtgactgtctcctcagtaaggcaggagggaacctctaagaaaaagctggcaacaggtgcatgggtgggatggcaagagtga

SEQ ID NO: 134169 - DNA, 120 bp, Artificial Sequence
  ENSG00000103043_40 (sequence is synthesized)
gagccggccctgagtcctggacttgccacactgtgctgtgggctggctggcctcagcctcggtgcccgagggtggttatggacctacagaagatgtgcagggcctgagagcagccatctg

SEQ ID NO: 134170 - DNA, 120 bp, Artificial Sequence
  ENSG00000103043_41 (sequence is synthesized)
cattaggtggggcagggagagcgggcctggcctctgtgctcagcagcccaggcagtgtcacccacccccggtgacacagcccgccctgctcccaagatctcaggccaggaagggtctgcc

SEQ ID NO: 134171 - DNA, 120 bp, Artificial Sequence
  ENSG00000103043_42 (sequence is synthesized)
catcacagggagcaggacttcttgccaccctaagggcccagggagcagatgtggcccactcttcccaccccgaccaaccctgccacaccgacgccatcttcccgggtttgccatccagtg

SEQ ID NO: 134172 - DNA, 120 bp, Artificial Sequence
  ENSG00000103043_43 (sequence is synthesized)
ctgagagcatctctctaaaggcccctaagctcccctaacctaaggccttggcttgccaggagtgtcatggggagcaacgcacagacctgtgggtgcccagcatcagaagacacactttag

SEQ ID NO: 134173 - DNA, 120 bp, Artificial Sequence
  ENSG00000103043_44 (sequence is synthesized)
ggtcacacctgtggccttggcctaagtgggttagaggagcgtctggccacaccctggacttagggctgcaagctccggggtggcccttggcctccttagaagtccaagctgctctcttgg

SEQ ID NO: 134174 - DNA, 120 bp, Artificial Sequence
  ENSG00000103043_45 (sequence is synthesized)
agcagtggcacctggttcccaaggttactgtgcctgggaggtcccttcccagtagcaaccacagcctagaacactgcccacagcctggccctctagaatggccccgcccagctgcttttg

SEQ ID NO: 134175 - DNA, 120 bp, Artificial Sequence
  ENSG00000103043_46 (sequence is synthesized)
atctttgttgaactaaagtcagctgagccccgctagggagccaggagcgccaggcccagaaaagcagcagccgcagccgtagacatgtccaagatgttttctggtggtgcatcttcagca

SEQ ID NO: 134176 - DNA, 120 bp, Artificial Sequence
  ENSG00000103043_47 (sequence is synthesized)
gggaggcgggaagggaacaggtgtgggcaggcagagctgagcaggggtgcaggaggccgcctccgggccccagatggcatctcaactgtgggaagagtccccctgccctggtcctgccca

SEQ ID NO: 134177 - DNA, 120 bp, Artificial Sequence
  ENSG00000103043_48 (sequence is synthesized)
gcaggctggtggccacctgaagcaactgtcaggctctggccgttgactcttcctgctggactgaactcatggccaagagttcgttttgggggagctcctttttgtctcccccaaaatggc

SEQ ID NO: 134178 - DNA, 120 bp, Artificial Sequence
  ENSG00000103043_49 (sequence is synthesized)
ctcctttatttccaccctcaagctgctgggccccggctggcctcacgttggaggggcagaactgtagccacagtggcacctgccagatacctaagctggggctggataccaggtgaagct

SEQ ID NO: 134179 - DNA, 120 bp, Artificial Sequence
  ENSG00000103043_50 (sequence is synthesized)
cgtgtcaaggcatcttggcagccaccccagggccgctccttaggtagccctcgctttgcagatgaggaaacagtcacatgctcaagtcacaccgctaggaagcggtggagttatggttgg

SEQ ID NO: 134180 - DNA, 120 bp, Artificial Sequence
  ENSG00000103043_51 (sequence is synthesized)
gtccaggtctgtctagatcctgtgctctgccagtgcctgcaccccccttcccggccccgccgattggcatcttttcataaacttgaagggccccaagactctctgcttagctgagcagcc

SEQ ID NO: 134181 - DNA, 120 bp, Artificial Sequence
  ENSG00000103043_52 (sequence is synthesized)
cacagtcttcctgagaccccttcccaggtccaccaggcctcagggcctggaaacagatacttcctagcccacatggatctgctcctccaaaccagtgaggccaaagggagggagcagaac

SEQ ID NO: 134182 - DNA, 120 bp, Artificial Sequence
  ENSG00000103043_53 (sequence is synthesized)
atttcatgagacactgctggagggtgagtaggaacaggacaggagcccaaggggatctcatcgccaggggcaagctaagcactgggcttgacagggacagcaaggctaccgcattgcacc

SEQ ID NO: 134183 - DNA, 120 bp, Artificial Sequence
  ENSG00000103043_54 (sequence is synthesized)
attatagggagcatcatgcacactagctgtgcagtgcacaacctgtgttgctgtacagagcaactggagagggtggcagcaacaggaatgtaggagctgtaggcatgtccagtggtgaga

SEQ ID NO: 134184 - DNA, 120 bp, Artificial Sequence
  ENSG00000103043_55 (sequence is synthesized)
ccggcattcctcctcccagggacagtgagtgactgcaggccttggggccccaacactcaaaaacaaatgtcctgccaagtggagggcccggcagaggctcttcagcaattcccattttcc

SEQ ID NO: 134185 - DNA, 120 bp, Artificial Sequence
  ENSG00000103043_56 (sequence is synthesized)
ccagtcctagccctgcctctcagagaaagggccaagctgccacctcccccttctccccagaccctgttccaggccccagctggcttcctggctggctgctagccctggctttcaccccaa

SEQ ID NO: 134186 - DNA, 120 bp, Artificial Sequence
  ENSG00000103043_57 (sequence is synthesized)
agggagccactcgtaaacaggaaatgcttcccaatgcgatgcctgctctgggcgccatcgccagcccacaggccgagggcaatagccaagcagcagtgttagctgttcccaccaactgcg

SEQ ID NO: 134187 - DNA, 120 bp, Artificial Sequence
  ENSG00000103043_58 (sequence is synthesized)
gaagagggggatgctcaggggcttcccagctctggggcccgccatgacggaagagttgccaggcctgagacagacgcccacaggccgagcccaccagcctgtggctctgcctctgacccc

SEQ ID NO: 134188 - DNA, 120 bp, Artificial Sequence
  ENSG00000103043_59 (sequence is synthesized)
actgccctccagcagtaacccccctgtgagctgatccctgacactgagcatttctgctccctcttcccagagacagtctaaaggcagcccccaagtcccagaaagctgactcccctagca

SEQ ID NO: 134189 - DNA, 120 bp, Artificial Sequence
  ENSG00000103043_60 (sequence is synthesized)
gcagaggagacagctgctagagtggaacctggaactcctgaacaggggagttccatttaggacagaaaggcgaggaacagggaagagcctggtgtcctttgtgcgccaaatcctgcttca

SEQ ID NO: 134190 - DNA, 120 bp, Artificial Sequence
  ENSG00000103043_61 (sequence is synthesized)
ccacaaccaggctctgtgcacaggaagccaggtgcagggggggagggcgtgtggtgctgtgagctgcggctgtgctggcccagcagacagactttccttgactgcacacccagtggggac

SEQ ID NO: 134191 - DNA, 120 bp, Artificial Sequence
  ENSG00000103043_62 (sequence is synthesized)
ctctcactgtggttggggttgagcctctgaggggcaggaaggggccggctgccccctttccacccaacaggcgggcccaagtgccatgctcctgtccccacccctccactcagcctcagg

SEQ ID NO: 134192 - DNA, 120 bp, Artificial Sequence
  ENSG00000103043_63 (sequence is synthesized)
gcttgtgacatcagggctgccaggacactgggaggggagggacgtatttgggagagcgagattggcagcaaagaggggctcttggagggggagctggcccgggagaaaccctgtgggttg

SEQ ID NO: 134193 - DNA, 120 bp, Artificial Sequence
  ENSG00000103043_64 (sequence is synthesized)
aagtgtcaaagcagccaccttctctttcccttctctctcctccttttcctgacctttggatctgtaagaaatgaagaaggttgccccttcatactggttgctgatgcttctgacatgaaa

SEQ ID NO: 134194 - DNA, 120 bp, Artificial Sequence
  ENSG00000103044_0 (sequence is synthesized)
gagtgcgttcgcggctgctttgacctggtgggcgccgcctccggcactgcaccgaggcggggcgccagcgcccaggttgctgggctggccttggcgcccccttcccctacccagagcgca

SEQ ID NO: 134195 - DNA, 120 bp, Artificial Sequence
  ENSG00000103044_1 (sequence is synthesized)
ggcaggcaggggggtcccgccgcgccccttcagcatatgccggtgcagctgacgacagccctgcgtgtggtgggcaccagcctgtttgccctggcagtgctgggtggcatcctggcagcc

SEQ ID NO: 134196 - DNA, 120 bp, Artificial Sequence
  ENSG00000103044_2 (sequence is synthesized)
tatgtgacgggctaccagttcatccacacggaaaagcactacctgtccttcggcctgtacggcgccatcctgggcctgcacctgctcattcagagcctttttgccttcctggagcaccgg

SEQ ID NO: 134197 - DNA, 120 bp, Artificial Sequence
  ENSG00000103044_3 (sequence is synthesized)
cgcatgcgacgtgccggccaggccctgaagctgccctccccgcggcggggctcggtggcactgtgcattgccgcataccaggaggaccctgactacttgcgcaagtgcctgcgctcggcc

SEQ ID NO: 134198 - DNA, 120 bp, Artificial Sequence
  ENSG00000103044_4 (sequence is synthesized)
cagcgcatctccttccctgacctcaaggtggtcatggtggtggatggcaaccgccaggaggacgcctacatgctggacatcttccacgaggtgctgggcggcaccgagcaggccggcttc

SEQ ID NO: 134199 - DNA, 120 bp, Artificial Sequence
  ENSG00000103044_5 (sequence is synthesized)
tttgtgtggcgcagcaacttccatgaggcaggcgagggtgagacggaggccagcctgcaggagggcatggaccgtgtgcgggatgtggtgcgggccagcaccttctcgtgcatcatgcag

SEQ ID NO: 134200 - DNA, 120 bp, Artificial Sequence
  ENSG00000103044_6 (sequence is synthesized)
aagtggggaggcaagcgcgaggtcatgtacacggccttcaaggccctcggcgattcggtggactacatccaggtgtgcgactctgacactgtgctggatccagcctgcaccatcgagatg

SEQ ID NO: 134201 - DNA, 120 bp, Artificial Sequence
  ENSG00000103044_7 (sequence is synthesized)
cttcgagtcctggaggaggatccccaagtagggggagtcgggggagatgtccagatcctcaacaagtacgactcatggatttccttcctgagcagcgtgcggtactggatggccttcaac

SEQ ID NO: 134202 - DNA, 120 bp, Artificial Sequence
  ENSG00000103044_8 (sequence is synthesized)
gtggagcgggcctgccagtcctactttggctgtgtgcagtgtattagtgggcccttgggcatgtaccgcaacagcctcctccagcagttcctggaggactggtaccatcagaagttccta

SEQ ID NO: 134203 - DNA, 120 bp, Artificial Sequence
  ENSG00000103044_9 (sequence is synthesized)
ggcagcaagtgcagcttcggggatgaccggcacctcaccaaccgagtcctgagccttggctaccgaactaagtataccgcgcgctccaagtgcctcacagagacccccactaagtacctc

SEQ ID NO: 134204 - DNA, 120 bp, Artificial Sequence
  ENSG00000103044_10 (sequence is synthesized)
cggtggctcaaccagcaaacccgctggagcaagtcttacttccgggagtggctctacaactctctgtggttccataagcaccacctctggatgacctacgagtcagtggtcacgggtttc

SEQ ID NO: 134205 - DNA, 120 bp, Artificial Sequence
  ENSG00000103044_11 (sequence is synthesized)
ttccccttcttcctcattgccacggttatacagcttttctaccggggccgcatctggaacattctcctcttcctgctgacggtgcagctggtgggcattatcaaggccacctacgcctgc

SEQ ID NO: 134206 - DNA, 120 bp, Artificial Sequence
  ENSG00000103044_12 (sequence is synthesized)
ttccttcggggcaatgcagagatgatcttcatgtccctctactccctcctctatatgtccagccttctgccggccaagatctttgccattgctaccatcaacaaatctggctggggcacc

SEQ ID NO: 134207 - DNA, 120 bp, Artificial Sequence
  ENSG00000103044_13 (sequence is synthesized)
tctggccgaaaaaccattgtggtgaacttcattggcctcattcctgtgtccatctgggtggcagttctcctgggagggctggcctacacagcttattgccaggacctgttcagtgagaca

SEQ ID NO: 134208 - DNA, 120 bp, Artificial Sequence
  ENSG00000103044_14 (sequence is synthesized)
gagctagccttccttgtctctggggctatactgtatggctgctactgggtggccctcctcatgctatatctggccatcatcgcccggcgatgtgggaagaagccggagcagtacagcttg

SEQ ID NO: 134209 - DNA, 120 bp, Artificial Sequence
  ENSG00000103044_15 (sequence is synthesized)
gcttttgctgaggtgtgacatggcccccaagcagagcgggtaaagtgcaatgggtaagggagggaaggggaatggaagagaaaagacagggtgggagggaggagggagtgctgtgtttta

SEQ ID NO: 134210 - DNA, 120 bp, Artificial Sequence
  ENSG00000103044_16 (sequence is synthesized)
gtctcttaatggtccaaaggacaaatctaaaatgcaaagaacggtgatgtagtatggcctgacagctctgtttagaggaggcaacactgatcccccagatgcagggctgcaggggattct

SEQ ID NO: 134211 - DNA, 120 bp, Artificial Sequence
  ENSG00000103044_17 (sequence is synthesized)
tgcttgcatctgcacataggcagtagcctcctcctgggctccagagggcactcagaagttgtgctaaaccaagttaagtcccattcagtggcaacttgtgataggtacctgagtgacggc

SEQ ID NO: 134212 - DNA, 120 bp, Artificial Sequence
  ENSG00000103044_18 (sequence is synthesized)
aacctgcggaaggaggttctcccagcccatctgaacacaaccagaggtggcaggagaatttctactgagcgagctgggccggttagtgtatgtcacccccaccccacccctaagtagtca

SEQ ID NO: 134213 - DNA, 120 bp, Artificial Sequence
  ENSG00000103044_19 (sequence is synthesized)
tcaatgcaataagattgcgcctgagatacaaggcccagaagcctgatctttgggcatcagaaaacagggtccaggaatggtgctttatgtgagataccccactccacatcaacattccag

SEQ ID NO: 134214 - DNA, 120 bp, Artificial Sequence
  ENSG00000103044_20 (sequence is synthesized)
ggatgagccaaaccagcagggagttagcactgaactgcttttaaaagtgcacattaaaaaggaaagtttgccaggaggaacaaagagattgtggtggtgctaaaggaggccataagctac

SEQ ID NO: 134215 - DNA, 120 bp, Artificial Sequence
  ENSG00000103044_21 (sequence is synthesized)
acagaggccttgggtgttccacctggaaactgctcagacgtctagatgggttcttagcttgtctgtgatctctgctggggagataaaaagattaagccccaacatgttcagaaaagaagt

SEQ ID NO: 134216 - DNA, 120 bp, Artificial Sequence
  ENSG00000103044_22 (sequence is synthesized)
gaagtcttgggtattttaacctgtatactcttgaattcctctcaaattcagctctgatctgaggctaagacacactccccacttcactttcttcaaagccacattttttgaggtatcact

SEQ ID NO: 134217 - DNA, 120 bp, Artificial Sequence
  ENSG00000103044_23 (sequence is synthesized)
gcagtcacctcttctaccctcatcatcataggtaaggttttcaaggtggcaattggggcggagccccggctcttatagaagcttcagcaggaggcaagcgtgttctcagcacatatggga

SEQ ID NO: 134218 - DNA, 120 bp, Artificial Sequence
  ENSG00000103044_24 (sequence is synthesized)
actatgaggagcctctgatcaaattggctacaatcttggagctgcttggacggattccttggcagccgggttagcatgtgtgactttcaggctactgttcttgacaatcatctccaatgg

SEQ ID NO: 134219 - DNA, 120 bp, Artificial Sequence
  ENSG00000103044_25 (sequence is synthesized)
aaagcttttcagtgttcccaaagtgaactctcaaatccaaaatggttatctttgagaccatccattctcctcagtggcttctccagggaattcttacagccaagttgtgacagtcactgc

SEQ ID NO: 134220 - DNA, 120 bp, Artificial Sequence
  ENSG00000103044_26 (sequence is synthesized)
atttgcctgcttctttccagaaaccaaactaggagatgaaactggttcctacatcctaaggttcttgctttctctctcatgcctcctgaggctgtttttggctgttttccctctgctgct

SEQ ID NO: 134221 - DNA, 120 bp, Artificial Sequence
  ENSG00000103044_27 (sequence is synthesized)
tttggggaatgaggggaagccattttccagtgacttgcaatccaggctgttctcagcgttttgagtttaaaacctgggatcctgactaagcctttgacttaagggttgcttgcttgccct

SEQ ID NO: 134222 - DNA, 120 bp, Artificial Sequence
  ENSG00000103044_28 (sequence is synthesized)
ccaaatgtcctttctcagaggggccagctaacccgtgcagaaccagcactaaggtggacagcagacaagagggcaagcctctagtgtaccaagtgcttcctacaaagacgcaaggtgtgc

SEQ ID NO: 134223 - DNA, 120 bp, Artificial Sequence
  ENSG00000103044_29 (sequence is synthesized)
tctgagccacagatgggcaaaccctggtgctttccttcatctcccacgaactcaagggttttccaggtgtagctaacagttgccacatcacacagacctcgagtttctggtaagactgct

SEQ ID NO: 134224 - DNA, 120 bp, Artificial Sequence
  ENSG00000103044_30 (sequence is synthesized)
ggttgacatcagacccaacccatgaaggctggaaggcagcaggcatttgctaaggcagctgatccaggcaatcgttctgctggccaagaagttaaactattttgagcattagaatggagg

SEQ ID NO: 134225 - DNA, 120 bp, Artificial Sequence
  ENSG00000103044_31 (sequence is synthesized)
aaatccggtcagccaagtgcagagttcagacttcgctaagggcttgtttttcttcagcatttacttgaagattaatgtaggatgacaggctctcctggctgtcctaccatcagctctgcc

SEQ ID NO: 134226 - DNA, 120 bp, Artificial Sequence
  ENSG00000103044_32 (sequence is synthesized)
ttgcactgtggtcgtcaactttcctcaaatcaaaaacaggcaggtacaggtagtgggctcacaacgtttgacctcgactggtttttctaagttattttgtacatttttcagcagcaaaac

SEQ ID NO: 134227 - DNA, 120 bp, Artificial Sequence
  ENSG00000103044_33 (sequence is synthesized)
caaactgggtcttcagctttatccccgtttcttgcaagggaagagcctttatacaattggacgcattttggtttttcctcattgagaattcaaatcctcttttgtattgtttctacaata

SEQ ID NO: 134228 - DNA, 120 bp, Artificial Sequence
  ENSG00000103044_34 (sequence is synthesized)
atttgtaaacatatttatttttacctgcttttttttttttttttaattttcaggtcaagttttttatactgcacttatttgtcaaaataaagattctcacatatgccggttatctcgaaa

SEQ ID NO: 134229 - DNA, 120 bp, Artificial Sequence
  ENSG00000103044_35 (sequence is synthesized)
aattctcttcagcgcctctttcctgccagcaggaaggttttgctgccttggctttcgggagccccctagacagcgaactgccccttcgcgtgcagaagtcggggaagagtgctctcagct

SEQ ID NO: 134230 - DNA, 120 bp, Artificial Sequence
  ENSG00000103044_36 (sequence is synthesized)
agggaaaggtatggcagtagaggatgaccaggtccaagctgcccaggtcagagctacggaagcatggtccgttcaccaacgccacgtttctagagagcagtgagctgattctccaatggt

SEQ ID NO: 134231 - DNA, 120 bp, Artificial Sequence
  ENSG00000103044_37 (sequence is synthesized)
gagcaggggactacatgtgaactgggacctgcaggccaatgtatccctgaggaaaagtccacaagaacaattcaagaaactagtaagaaacaatgggcagaaagctgtgggacgaaagca

SEQ ID NO: 134232 - DNA, 120 bp, Artificial Sequence
  ENSG00000103044_38 (sequence is synthesized)
cagcaggcttctgggaggctggagatcctttctctcaagggcaggattattcccacctgccacagttcacatgccacaaataacatctcaccttcagtcaagaaaaacgcaaaggaaaaa

SEQ ID NO: 134233 - DNA, 120 bp, Artificial Sequence
  ENSG00000103044_39 (sequence is synthesized)
aatgaattaggaggcggacgccggtgcggggctccaggctggctggggtacccctcccccgcaccttctacgacctcccgggggtttgcacctgtccgggcaccaagatgccggtgcagc

SEQ ID NO: 134234 - DNA, 120 bp, Artificial Sequence
  ENSG00000103044_40 (sequence is synthesized)
ggaggaggggcatggagccgccgcgggcctgctgagctccggagcgcggcagccggcggcacgcctcgcctccctcctccccggcggctcctgttttgtgaatgaattaggaggcggacg

SEQ ID NO: 134235 - DNA, 120 bp, Artificial Sequence
  ENSG00000103044_41 (sequence is synthesized)
ccggtgcggggctccaggctggctggggtacccctcccccgcaccttctacgacctcccgggggtttgcacctgtccgggcaccaaggtaccaggcgcccacgttcctgcgggttagccg

SEQ ID NO: 134236 - DNA, 120 bp, Artificial Sequence
  ENSG00000103044_42 (sequence is synthesized)
ggccgcggcagcacgtgtccgggggagtgggctcccctcccctggccggcctggaggggcccggagggcggccgggcacaagaggaggagccccgttgggcgcacaagtttccatgccgc

SEQ ID NO: 134237 - DNA, 120 bp, Artificial Sequence
  ENSG00000103044_43 (sequence is synthesized)
tgcgtgtggccctgccgcggggcgcacctgtcagcgggagagacgctgcacaccagcagcccctcaaagtttcggaggcttgatggagaagcgtgcgtccttgactgggggttctccttc

SEQ ID NO: 134238 - DNA, 120 bp, Artificial Sequence
  ENSG00000103047_0 (sequence is synthesized)
agagccttctgccacacttaacatggcggcggcggcgccctgccgaggcgcctgagcgggtcgcgagcgtggtgttacactccagtcatggcggcccgacaggccgtgggcagcggggct

SEQ ID NO: 134239 - DNA, 120 bp, Artificial Sequence
  ENSG00000103047_1 (sequence is synthesized)
caggagacatgcggtctggatcggattttggaggcattgaagctgctgctgagcccgggaggctcgggctcaagttcactacaggtcacaaaacatgatgtcttgttggctactttaaaa

SEQ ID NO: 134240 - DNA, 120 bp, Artificial Sequence
  ENSG00000103047_2 (sequence is synthesized)
tctaacctgtctgctttggaggacaagtttctgaaggatcctcagtggaagaatctgaaactcctaagagatgaaattgctgataaggcagaatggccacaaaactctgtggatgtcact

SEQ ID NO: 134241 - DNA, 120 bp, Artificial Sequence
  ENSG00000103047_3 (sequence is synthesized)
tggagttttacctctcaaaccttgttgttgcttttgtgcttgaaggaaaccatgatccgccttgcagctaatttcaatccaggtaaacccaaccctaggactccggaagttgctcctgcc

SEQ ID NO: 134242 - DNA, 120 bp, Artificial Sequence
  ENSG00000103047_4 (sequence is synthesized)
ctgagccccgatgcacttagtatctcacaacagaagactgtccagttcgttttgcagtttgtagttaccttgggtatctgcccctatctcatgcctggtgttggagtccctttgagatat

SEQ ID NO: 134243 - DNA, 120 bp, Artificial Sequence
  ENSG00000103047_5 (sequence is synthesized)
agaactgaatttggtgccgtcgttcaagacgtggtgtgttttgatgctgcccccgatgcaactcgaagactgtacaccagctgcaaggcccttctgaatgttgctcagcacacatctctg

SEQ ID NO: 134244 - DNA, 120 bp, Artificial Sequence
  ENSG00000103047_6 (sequence is synthesized)
gggagcttgatcttctgccaccactttggggatatcgcagcaggtctgtgccaactgggattctgcccaaccaaaagaaaactgctaacacctgcagaagaggttctaactgaagaggag

SEQ ID NO: 134245 - DNA, 120 bp, Artificial Sequence
  ENSG00000103047_7 (sequence is synthesized)
agaaccctatccaggggggccttgagagacatgctggatcaagtctatcagcccttagcagtccgggaactgcttatcctccagggaggaccaccccagtcctgcacagatgtgaagaca

SEQ ID NO: 134246 - DNA, 120 bp, Artificial Sequence
  ENSG00000103047_8 (sequence is synthesized)
cagatgaggtgtcgggccccagcttggcttcggcgtctatgtggacagctgctctctgaaaggttaatgagacctaatggtgttcaggcagtagtccggggcattttggaaggagcaggt

SEQ ID NO: 134247 - DNA, 120 bp, Artificial Sequence
  ENSG00000103047_9 (sequence is synthesized)
gcgggagcagctggtggaagtgatgctgaggtgacggctgctgactggaagaagtgtgacctgatcgcaaagattttggcctcttgtccccagcagtctctttcaccagagaattactac

SEQ ID NO: 134248 - DNA, 120 bp, Artificial Sequence
  ENSG00000103047_10 (sequence is synthesized)
agggacatctgcccccaggttctggatttatttcactttcaagataaattgacagcacgacaatttcagagagttgccaccactacctttataactttgtcaagagaacgcccacatttg

SEQ ID NO: 134249 - DNA, 120 bp, Artificial Sequence
  ENSG00000103047_11 (sequence is synthesized)
gcagcaaagtatttgctccagccagtgttagctcctcttcatcgatgtttgaatacagcagagctttcagagagtgacatggtaccaggaactattttggtgacagaagaagaacttagt

SEQ ID NO: 134250 - DNA, 120 bp, Artificial Sequence
  ENSG00000103047_12 (sequence is synthesized)
agatgcattgaggatgtgtttaaggtgtacgtggttgggaatgaacctttaacagttttgatggattccctgcttccagtcctgggagtgctttttcttctctactgttttactaagcag

SEQ ID NO: 134251 - DNA, 120 bp, Artificial Sequence
  ENSG00000103047_13 (sequence is synthesized)
agtgtgtctcacataaggtcactttgccaagaaatcttattatggattctggggaagctggaaaggaagaaggcaattgccagcctgaaaggatttgcagggttggacaaagctgtgccc

SEQ ID NO: 134252 - DNA, 120 bp, Artificial Sequence
  ENSG00000103047_14 (sequence is synthesized)
tctctccattctctgtgtcagtttagagttgccactcaaggtggcattatgattaccatcaaagaggccattagtgatgaagatgaagatgaagccctgtaccagaaggtatcctctgag

SEQ ID NO: 134253 - DNA, 120 bp, Artificial Sequence
  ENSG00000103047_15 (sequence is synthesized)
cagggccgggtggagcatctcggggacttgctgtcccactgccaggaatgcggtttggcaggagacttcttcatcttctgtttgaaagagttgactcatgtggcctcggaaaatgaaaca

SEQ ID NO: 134254 - DNA, 120 bp, Artificial Sequence
  ENSG00000103047_16 (sequence is synthesized)
gagttaaaaactgagcccttctccagcaagagcctcttggaattagagcaacatcagactcttcttgtggaaggccaagagcggaagctgcttgtcctgcagctgatggctgttctgtgc

SEQ ID NO: 134255 - DNA, 120 bp, Artificial Sequence
  ENSG00000103047_17 (sequence is synthesized)
gagagaatgtctgagcagatattcacaaacgtcactcaggtggtggactttgtagcagcaacattgcagagagcctgtgcaagcctggcccatcaggcagagagcaccgtggaatcacag

SEQ ID NO: 134256 - DNA, 120 bp, Artificial Sequence
  ENSG00000103047_18 (sequence is synthesized)
acgctgagcatgtccatggggctggtggctgtcatgctaggaggagctgttcagttgaagtcaagtgattttgctgttctgaagcagttgttgcctctgttggagaaggtatccaacaca

SEQ ID NO: 134257 - DNA, 120 bp, Artificial Sequence
  ENSG00000103047_19 (sequence is synthesized)
taccctgatccggtcatccaagaactcgctgttgatctccgcatcaccatctctacccatggagcctttgccactgaggccgtcagcatggctgcccaaagtacactgaacagaaaagat

SEQ ID NO: 134258 - DNA, 120 bp, Artificial Sequence
  ENSG00000103047_20 (sequence is synthesized)
acagccccccagacaggcctgcagtcaaatgctccaatcattcctcaaggagtcaatgagcccagcactactacaagtcagaaatctggaagcgtaaccacagaacagctccaagaggtt

SEQ ID NO: 134259 - DNA, 120 bp, Artificial Sequence
  ENSG00000103047_21 (sequence is synthesized)
cttttgtcagcttatgaccctcaaattccaacacgggctgctgccctgcgtactctttcccactggatagagcagagagaagcaaaagcccttgagatgcaagagaagcttctcaagata

SEQ ID NO: 134260 - DNA, 120 bp, Artificial Sequence
  ENSG00000103047_22 (sequence is synthesized)
ttcttggaaaacttggaacatgaagacacttttgtatatctatctgcaattcagggggttgccctgctgtcagacgtctatcctgagaaaatcttgccggacttgttggctcaatatgac

SEQ ID NO: 134261 - DNA, 120 bp, Artificial Sequence
  ENSG00000103047_23 (sequence is synthesized)
agcagcaaagacaagcacacaccagagaccagaatgaaagtcggggaagtccttatgcgaatcgtcagggcattaggagacatggtctcaaagtaccgagaacctttgatccataccttc

SEQ ID NO: 134262 - DNA, 120 bp, Artificial Sequence
  ENSG00000103047_24 (sequence is synthesized)
ctgaggggagtgagagatcctgatggtgctcacagggccagcagcttggccaaccttggggagctgtgccagaggctggactttctgctgggctccgtggtccatgaggtaacagcttgc

SEQ ID NO: 134263 - DNA, 120 bp, Artificial Sequence
  ENSG00000103047_25 (sequence is synthesized)
ctgattgctgtggccaaaacagatggtgaagttcaagtacgcagagctgccatacatgtggttgtgctgctgcttcggggactcagccagaaagctactgaggtgctgagcgccgtcctc

SEQ ID NO: 134264 - DNA, 120 bp, Artificial Sequence
  ENSG00000103047_26 (sequence is synthesized)
aaggatctctaccacctgctgaagcacgtagtgtgtctggagcccgatgacgtggccaagctccatgcccagttggccctagaagagctggatgacatcatgaaaaacttcctgttccct

SEQ ID NO: 134265 - DNA, 120 bp, Artificial Sequence
  ENSG00000103047_27 (sequence is synthesized)
ccacagaagctggagaagaagatcatggtcctgccgtagacctggctccaaggacgtggaggaggcaggcagggccaggcacccagagccgtgcccaggtcttccagcaggtggccctgc

SEQ ID NO: 134266 - DNA, 120 bp, Artificial Sequence
  ENSG00000103047_28 (sequence is synthesized)
tgcctcttgagtgctggcagcatggctgaccctcggggtggttttatggtgcaggtcacttgggtcttcagggtcccttccgagggcatgtgttcagcactcccgcgttcagcctgaggg

SEQ ID NO: 134267 - DNA, 120 bp, Artificial Sequence
  ENSG00000103047_29 (sequence is synthesized)
gtgtacagttaagagaagacagttacagatctcattaatctacatttttcactgtcctctagcattgaaagaaggatgtctacctggtgaaagtatattttaacatgactgatggaattt

SEQ ID NO: 134268 - DNA, 120 bp, Artificial Sequence
  ENSG00000103047_30 (sequence is synthesized)
cactaattgcccactctcttggaacttgaggagaagcggttggccacccatatgtcacctagctctatattctttcaggctgagattcttcttcaggaaaatgaggagcagaactggcca

SEQ ID NO: 134269 - DNA, 120 bp, Artificial Sequence
  ENSG00000103047_31 (sequence is synthesized)
cccttggctgctcaagaggcatttcagagtaggagatgcagttggaggtggggaggggaaggaaatagttatcaaataatgcaaaatggaataaagttatcttggatggaaagaacaggg

SEQ ID NO: 134270 - DNA, 120 bp, Artificial Sequence
  ENSG00000103047_32 (sequence is synthesized)
ctaaatctggtcctctggtgtcgagatggaaaactgtggagttgaagaggctctgatgcccagaaaggacaatcaagctggttgactcttccagagaagaagggtaagccctgtatttat

SEQ ID NO: 134271 - DNA, 120 bp, Artificial Sequence
  ENSG00000103047_33 (sequence is synthesized)
cctcccaggccattcttcttcactcctgctgctgtttgcagagagttgccctgattatcaggagaaaagaaccacgagcatccagagagtttacatcctgccttctgtcctctgctcctt

SEQ ID NO: 134272 - DNA, 120 bp, Artificial Sequence
  ENSG00000103047_34 (sequence is synthesized)
cagaaagatgaatgcctagacaatgggttcacactgaatgcaggctggaaagaatgcatgctggtggcctaatgccagggctgttgaaacaatttcagatatagcactgtggtctccact

SEQ ID NO: 134273 - DNA, 120 bp, Artificial Sequence
  ENSG00000103047_35 (sequence is synthesized)
ttatttctttatatgttttggccgctgcattttgattgcagctaaaagagataacagaaaggagatactggctggctgcttcatattagccctctctgttgtcaacaccttgatgaggcc

SEQ ID NO: 134274 - DNA, 120 bp, Artificial Sequence
  ENSG00000103047_36 (sequence is synthesized)
aacccagagatgcttgatcagtcctcagctttgcagggctaggtacagaattttatcacaggattttatcacgctctctggggtgactagatccacaggaaccaaaacgcagtttccaaa

SEQ ID NO: 134275 - DNA, 120 bp, Artificial Sequence
  ENSG00000103047_37 (sequence is synthesized)
agctcgagtgactgaaggatctatacacaaacatggctatttgctagttaacaacaggatatttctctctggccagatcacagacatggttctgagtcagatcttccttggtggcatccc

SEQ ID NO: 134276 - DNA, 120 bp, Artificial Sequence
  ENSG00000103047_38 (sequence is synthesized)
tttaaagaggccatcttatgaacaggatcacaagtgagcttagtgagcagagagttagaacaaatctagctaggtgtgtttaaggaatatttccattcagctagtgtagctggattaatt

SEQ ID NO: 134277 - DNA, 120 bp, Artificial Sequence
  ENSG00000103047_39 (sequence is synthesized)
tctattctccaaatcaaggatgtctagaaaatgggcattgtggctttcaaatctaagaagaatctcctttgggccagctggatgtacaataaaaatgcttgtttcttggccttcctttaa

SEQ ID NO: 134278 - DNA, 120 bp, Artificial Sequence
  ENSG00000103047_40 (sequence is synthesized)
agagagccaggcaaagcgagctgcatgatgccctcctctgtaggctaggcctgctagctgggggaaatggcagatgtcttatcaaagcagggcatggcagagtgagaaggtaacagcttg

SEQ ID NO: 134279 - DNA, 120 bp, Artificial Sequence
  ENSG00000103047_41 (sequence is synthesized)
atattcagggaagaagggaaaccactgaggggtctgggcagaagcatgaaggggccagacttatgattcaaaccaaatagctccatctgcaatggatgaaaaaggggttgccctgctgtc

SEQ ID NO: 134280 - DNA, 120 bp, Artificial Sequence
  ENSG00000103047_42 (sequence is synthesized)
ttttcctttgagtcagagtctgaggtgaattattggtctttagtatttacctttaaaacctgactgaaactaaactccatccttgcagggattgaacaggttaaacttagaggccgttaa

SEQ ID NO: 134281 - DNA, 120 bp, Artificial Sequence
  ENSG00000103047_43 (sequence is synthesized)
tgagcttcttttccaaagaaactaattctcttgctcttttcctaaaacacttgtgatacactgcctattttattgaacaatattgtaagccatttcaaataatttatactatctggggaa

SEQ ID NO: 134282 - DNA, 120 bp, Artificial Sequence
  ENSG00000103047_44 (sequence is synthesized)
gtaagccatttcaaataatttatactatctggggaaaacattacacagaaaattgaagtaaaaaccctaaagtaaatgttaaataaagctaggtgtgggccgggcgcggtggctcacgcc

SEQ ID NO: 134283 - DNA, 73 bp, Artificial Sequence
  ENSG00000103047_45 (sequence is synthesized)
aggtgacagaatgagactttgtctcaataatcataataataataataaagccaggtgtggtggctcacacctg

SEQ ID NO: 134284 - DNA, 120 bp, Artificial Sequence
  ENSG00000103047_46 (sequence is synthesized)
agatattcacaaacgtcactcaggtcagtagttgccacattctggaccgcagcctttttttctttccaaaaaataaagtttaaaaatgttgctgagagtgtgatttgatgacacctggat

SEQ ID NO: 134285 - DNA, 120 bp, Artificial Sequence
  ENSG00000103047_47 (sequence is synthesized)
catgaggtgtttcctggaatgctggttaaatatggaaactacacagcccacaccaggccactgaatccaaaacgttccagtgtcctgagactccacacgtttaacaagctcccgaggtgg

SEQ ID NO: 134286 - DNA, 120 bp, Artificial Sequence
  ENSG00000103047_48 (sequence is synthesized)
actatgctgactctccaaacaataggcagcccttgctgggagagctttagagatggttttcagcatctctgcgttcatcccatcacagggtgactggtttatttgccttttgatcgtaaa

SEQ ID NO: 134287 - DNA, 120 bp, Artificial Sequence
  ENSG00000103047_49 (sequence is synthesized)
agtcatggcggcccgacaggccgtgggcagcggggctcaggagacatgcggtctggatcggattttggaggcattgaagctgctgctgagcccgggagacggagtcttgctctgtcgccc

SEQ ID NO: 134288 - DNA, 120 bp, Artificial Sequence
  ENSG00000103047_50 (sequence is synthesized)
ggattacagatgtgagccaccacgtccggtcttttatacaattctaaagctcaacaagataatctctgcatgtattgtgtggggaaaaaagtatcgagaaactcaacaagaggtaatacc

SEQ ID NO: 134289 - DNA, 120 bp, Artificial Sequence
  ENSG00000103047_51 (sequence is synthesized)
ctccagggaggaccaccccaggtactcaggcctagggactcttgggggtgactcattaatgataatgtgtggtttgctgtcttcttctggaaaattaaataactttagttccctgtttaa

SEQ ID NO: 134290 - DNA, 120 bp, Artificial Sequence
  ENSG00000103047_52 (sequence is synthesized)
actgtcttgtttcagcctgtctgccaaactcaaattgtttcattgccatatctgagcacatctttggagctaaaatggtgtgattcggatgagatattgcttaagacgctgagccctgct

SEQ ID NO: 134291 - DNA, 120 bp, Artificial Sequence
  ENSG00000103051_0 (sequence is synthesized)
ggaagtgccgaatggggaccaagatggcggaccttgattcgcctccgaagctgtcaggggtgcagcagccgtctgagggggtgggaggtggccgctgctccgaaatctccgctgagctca

SEQ ID NO: 134292 - DNA, 120 bp, Artificial Sequence
  ENSG00000103051_1 (sequence is synthesized)
ttcgctccctgacagagctgcaggagctggaggctgtatacgaacggctctgcggcgaggagaaagtggtggagagagagctggatgctcttttggaacagcaaaacaccattgaaagta

SEQ ID NO: 134293 - DNA, 120 bp, Artificial Sequence
  ENSG00000103051_2 (sequence is synthesized)
agatggtcactctccaccgaatgggtcctaatctgcagctgattgagggagatgcaaagcagctggctggaatgatcacctttacctgcaacctggctgagaatgtgtccagcaaagttc

SEQ ID NO: 134294 - DNA, 120 bp, Artificial Sequence
  ENSG00000103051_3 (sequence is synthesized)
gtcagcttgacctggccaagaaccgcctctatcaggccattcagagagctgatgacatcttggacctgaagttctgcatggatggagttcagactgctttgaggagtgaagattatgagc

SEQ ID NO: 134295 - DNA, 120 bp, Artificial Sequence
  ENSG00000103051_4 (sequence is synthesized)
aggctgcagcacatactcatcgctacttgtgcctggacaagtcggtcattgagctcagccgacagggcaaagaggggagcatgattgatgccaacctgaaattgctgcaggaagctgagc

SEQ ID NO: 134296 - DNA, 120 bp, Artificial Sequence
  ENSG00000103051_5 (sequence is synthesized)
aacgtctcaaagccattgtggcagagaagtttgccattgccaccaaggaaggtgatctgccccaggtggagcgcttcttcaagatcttcccactgctgggtttgcatgaggagggattaa

SEQ ID NO: 134297 - DNA, 120 bp, Artificial Sequence
  ENSG00000103051_6 (sequence is synthesized)
gaaagttctcggagtacctttgcaagcaggtggccagtaaagctgaggagaatctgctcatggtgctggggacagacatgagtgatcggagagctgcagtcatctttgcagatacactta

SEQ ID NO: 134298 - DNA, 120 bp, Artificial Sequence
  ENSG00000103051_7 (sequence is synthesized)
ctcttctgtttgaagggattgcccgcattgtggagacccaccagccaatagtggagacctattatgggccagggagactctataccctgatcaaatatctgcaggtggaatgtgacagac

SEQ ID NO: 134299 - DNA, 120 bp, Artificial Sequence
  ENSG00000103051_8 (sequence is synthesized)
aggtggagaaggtggtagacaagttcatcaagcaaagggactaccaccagcagttccggcatgttcagaacaacctgatgagaaattctacaacagaaaaaatcgaaccaagagaactgg

SEQ ID NO: 134300 - DNA, 120 bp, Artificial Sequence
  ENSG00000103051_9 (sequence is synthesized)
accccatcctgactgaggtcaccctgatgaatgcccgcagtgagctatacttacgcttcctcaagaagaggattagctctgattttgaggtgggagactccatggcctcagaggaagtaa

SEQ ID NO: 134301 - DNA, 120 bp, Artificial Sequence
  ENSG00000103051_10 (sequence is synthesized)
agcaagagcaccagaagtgtctggacaaactcctcaataactgccttttgagctgtaccatgcaggagctaattggcttatatgttaccatggaggagtacttcatgagggagactgtca

SEQ ID NO: 134302 - DNA, 120 bp, Artificial Sequence
  ENSG00000103051_11 (sequence is synthesized)
atgtcttctacattgttaagaagtgcattgggcgggctctgtccagctccagcattgactgtctctgtgccatgatcaacctcgccaccacagagctggagtctgacttcagggatgttc

SEQ ID NO: 134303 - DNA, 120 bp, Artificial Sequence
  ENSG00000103051_12 (sequence is synthesized)
tgtgtaataagctgcggatgggctttcctgccaccaccttccaggacatccagcgcggggtgacaagtgccgtgaacatcatgcacagcagcctccagcaaggcaaatttgacacaaaag

SEQ ID NO: 134304 - DNA, 120 bp, Artificial Sequence
  ENSG00000103051_13 (sequence is synthesized)
gcatcgagagtactgacgaggcgaagatgtccttcctggtgactctgaacaacgtggaagtctgcagtgaaaacatctccactctgaagaagacactggagagtgactgcaccaagctct

SEQ ID NO: 134305 - DNA, 120 bp, Artificial Sequence
  ENSG00000103051_14 (sequence is synthesized)
tcagccagggcattggaggggagcaggcccaggccaagtttgacagctgcctttctgacttggccgccgtgtccaacaaattccgagacctcttgcaggaagggctgacggagctcaaca

SEQ ID NO: 134306 - DNA, 120 bp, Artificial Sequence
  ENSG00000103051_15 (sequence is synthesized)
gcacagccatcaagccacaggtgcagccttggatcaacagctttttctccgtctcccacaacatcgaggaggaagaattcaatgactatgaggccaacgacccttgggtacaacagttca

SEQ ID NO: 134307 - DNA, 120 bp, Artificial Sequence
  ENSG00000103051_16 (sequence is synthesized)
tccttaacctggagcagcaaatggcagagttcaaggccagcctgtccccggtcatctacgacagcctaaccggcctcatgactagccttgttgccgtcgagttggagaaagtggtgctga

SEQ ID NO: 134308 - DNA, 120 bp, Artificial Sequence
  ENSG00000103051_17 (sequence is synthesized)
aatccacctttaaccggctgggtggtctgcagtttgacaaggagctgaggtcgctcattgcctaccttaccacggtgaccacctggaccatccgagacaagtttgcccggctctcccaga

SEQ ID NO: 134309 - DNA, 120 bp, Artificial Sequence
  ENSG00000103051_18 (sequence is synthesized)
tggccaccatcctcaatctggagcgggtgaccgagatcctcgattactggggacccaattccggcccattgacgtggcgcctcacccctgctgaagtgcgccaggtgctggccctgcgga

SEQ ID NO: 134310 - DNA, 120 bp, Artificial Sequence
  ENSG00000103051_19 (sequence is synthesized)
tagacttccgcagtgaagatatcaagaggctgcgcctgtagctgcctggatgagcacacctggctcatcacacttgcaggcctgttccctaaggggccccagccaaggagctgagcgagg

SEQ ID NO: 134311 - DNA, 120 bp, Artificial Sequence
  ENSG00000103051_20 (sequence is synthesized)
ctgtctggcttgggggagatctgacagcccagacctttctacggctggcagcagagaaacaaagtctggacccactccatgctctgccctcagacctggccaggtgatgctctgggggca

SEQ ID NO: 134312 - DNA, 120 bp, Artificial Sequence
  ENSG00000103051_21 (sequence is synthesized)
gcatctccccaccgagagaagcgggctcctaatgaggtgggaaagccacggcaggcagcgagcagcccaggccagctttctgcatggatggtcagtctcttgccctcaaacactacagca

SEQ ID NO: 134313 - DNA, 120 bp, Artificial Sequence
  ENSG00000103051_22 (sequence is synthesized)
aacaagctacccctgccagtcctagacaacttgggtacatctggggacctagcagttaggcttgactttgaggagaggctgtgatgtttatgatccctgaataaagctactccttggaga

SEQ ID NO: 134314 - DNA, 120 bp, Artificial Sequence
  ENSG00000103051_23 (sequence is synthesized)
aggaacactgagtagaataaattgtagggtttgaaaaagtgaaaaaaaaggtgcagacaggagaaaaataaatgctaagcgcacactggcctgcatcttgcccattgacagcttactttg

SEQ ID NO: 134315 - DNA, 120 bp, Artificial Sequence
  ENSG00000103051_24 (sequence is synthesized)
gacttgaggtgttgtcgagatgatgatggcctcagttcaagaccaaaacggaaataaaaagagcttcctgaaaagaacacagcagaagtagtaaaccagttctctatcacaaaatgtgca

SEQ ID NO: 134316 - DNA, 120 bp, Artificial Sequence
  ENSG00000103051_25 (sequence is synthesized)
acagtgccctctaatgatataatgacaattctatttcttgaggtcctattaagtgtccaagtaattgtctccaatttccccttcattcctaagatgttaaagataacgtttgctttttca

SEQ ID NO: 134317 - DNA, 120 bp, Artificial Sequence
  ENSG00000103051_26 (sequence is synthesized)
gaactttgttttttccttcttttgagcagagaaagtaaaagtacgacatagaaataggagtggcctcatacaattgtatttctagaactccagactaggagactataaacagtagtctat

SEQ ID NO: 134318 - DNA, 120 bp, Artificial Sequence
  ENSG00000103051_27 (sequence is synthesized)
tggaacaccattagcatgacttttaagcacagtaatagaggtgagtattattagcatccaacccaaaaacaaatctttggcctgtcatcctgaaagcccactgctggcttgaagggaagg

SEQ ID NO: 134319 - DNA, 120 bp, Artificial Sequence
  ENSG00000103051_28 (sequence is synthesized)
taaacctggtaaacaaactaaatctaaatgttcttgtatgccaaaagtttggagtgaccagcaagaggccaatagatgtgggggtggggaagaatattctcattcctgtggtatgttgca

SEQ ID NO: 134320 - DNA, 120 bp, Artificial Sequence
  ENSG00000103051_29 (sequence is synthesized)
tgtcggacgcgccgagcttgtcttccctgatacctgggcgatctgcagcctctcctccctagacccccgttgatttccctgatccatgatcaccagtttctccacgggagtaaaaaagtg

SEQ ID NO: 134321 - DNA, 120 bp, Artificial Sequence
  ENSG00000103051_30 (sequence is synthesized)
acatcgaggaggttagcctggccacaggcagccatcaagccccgatgacccctcatccctagccccagctagagggagcagagccatctgaacagactagaccttccatgcttcccaggc

SEQ ID NO: 134322 - DNA, 120 bp, Artificial Sequence
  ENSG00000103051_31 (sequence is synthesized)
ccacttcccccaccctgacccatgaagactaggttcctcccaggaaacagtttgtccctagtcagaagggctcagaaagacatggagtttgccttgacctaacttattcccttattggag

SEQ ID NO: 134323 - DNA, 120 bp, Artificial Sequence
  ENSG00000103051_32 (sequence is synthesized)
ctctttttgccccgcctatgatagacttagaagcgtttttttcctcctggcgtagtgatttcattcctgtagaacaagagatccaagaaggaataaaatgccaggaactttaccatgtta

SEQ ID NO: 134324 - DNA, 120 bp, Artificial Sequence
  ENSG00000103051_33 (sequence is synthesized)
agaaaagaagacacatctcccaaccttttatttaggtctggcagaattttagggagtgaatgatttaggtgaagcaggtaaatggaaaatgtgattgacagctatctctgattctaattg

SEQ ID NO: 134325 - DNA, 120 bp, Artificial Sequence
  ENSG00000103051_34 (sequence is synthesized)
cagcagagctaggagggccatctggcagagcttttccttatgggcccagtggggagggggaatttgggactctctttgccctgtagctcttgtgtctaaggtaatccattgtcgtcctat

SEQ ID NO: 134326 - DNA, 120 bp, Artificial Sequence
  ENSG00000103056_0 (sequence is synthesized)
gtgctgagtctgagggaggctccggacccgagagccgcgagagccgccgccgctgcggccgccgccagatctgcggccgggagcccgggctgtgaggagccgggaggagcggggtgcgct

SEQ ID NO: 134327 - DNA, 120 bp, Artificial Sequence
  ENSG00000103056_1 (sequence is synthesized)
gccgggcgctgaccgccctcccgcccgccgtcagaggtctgcggtgacagctcttcttcagagagaaggacaacaaggtcccagtggcccctcctcagggtctgcagtaggcctccgcat

SEQ ID NO: 134328 - DNA, 120 bp, Artificial Sequence
  ENSG00000103056_2 (sequence is synthesized)
ggcccaccgaggtgaaccatgaccggctggccaacattcgccattgaccagccggagttgcatctcgccaggaggtgacccctcctccagctgcccccaactcgcccaccctcgcccagg

SEQ ID NO: 134329 - DNA, 120 bp, Artificial Sequence
  ENSG00000103056_3 (sequence is synthesized)
aaagtgcccgcagctgccacggacaccatgtagtagggccggctgcggcgcccagtgagctgcgatggttttgtacacgaccccctttcctaacagctgtctgtccgccctgcactgtgt

SEQ ID NO: 134330 - DNA, 120 bp, Artificial Sequence
  ENSG00000103056_4 (sequence is synthesized)
gtcctgggcccttatctttccatgctactggctggtggaccggctcgctgcctccttcatacccaccacctacgagaagcgccagcgggcagacgacccgtgctgcctgcagctgctctg

SEQ ID NO: 134331 - DNA, 120 bp, Artificial Sequence
  ENSG00000103056_5 (sequence is synthesized)
cactgccctcttcacgcccatctacctggccctcctggtggcctcgctgccctttgcgtttctcggctttctcttctggtccccactgcagtcggcccgccggccctacatctattcacg

SEQ ID NO: 134332 - DNA, 120 bp, Artificial Sequence
  ENSG00000103056_6 (sequence is synthesized)
gctggaagacaagggcctggccggtggggcagccctgctcagtgaatggaagggcacggggcctggcaaaagcttctgctttgccactgccaacgtctgcctcctgcccgactcactcgc

SEQ ID NO: 134333 - DNA, 120 bp, Artificial Sequence
  ENSG00000103056_7 (sequence is synthesized)
cagggtcaacaacctttttaacacccaagcgcgggccaaggagatcgggcagagaatccgcaatggggccgcccggccccagatcaaaatttacatcgactcccccaccaatacctccat

SEQ ID NO: 134334 - DNA, 120 bp, Artificial Sequence
  ENSG00000103056_8 (sequence is synthesized)
cagcgccgctagcttcagcagcctggtgtcaccacagggcggcgatggggtggcccgggccgtccccgggagcattaagaggacagcctctgtggagtacaagggtgacggtgggcggca

SEQ ID NO: 134335 - DNA, 120 bp, Artificial Sequence
  ENSG00000103056_9 (sequence is synthesized)
ccccggtgacgaggctgccaacggcccagcctctggggaccctgtcgacagcagcagcccggaggatgcctgcatcgtgcgcatcggtggcgaggagggcggccggccacctgaagctga

SEQ ID NO: 134336 - DNA, 120 bp, Artificial Sequence
  ENSG00000103056_10 (sequence is synthesized)
cgaccctgtgcctgggggccaggccaggaacggagctggcgggggcccaaggggccagacgcccaaccataatcagcaggacggggattcagggagcctgggcagcccctcggcctcccg

SEQ ID NO: 134337 - DNA, 120 bp, Artificial Sequence
  ENSG00000103056_11 (sequence is synthesized)
ggagtccctggtgaaggggcgagctgggccagacaccagtgccagcggggagccaggtgccaacagcaagctcctgtacaaggcctcggtggtgaagaaggcggctgcacgcaggaggcg

SEQ ID NO: 134338 - DNA, 120 bp, Artificial Sequence
  ENSG00000103056_12 (sequence is synthesized)
gcaccccgacgaggccttcgaccatgaggtctccgccttcttccccgccaacctggacttcctgtgcctgcaggaggtgtttgacaagcgagcagccaccaaattgaaagagcagctgca

SEQ ID NO: 134339 - DNA, 120 bp, Artificial Sequence
  ENSG00000103056_13 (sequence is synthesized)
cggctacttcgagtacatcctgtacgacgtcggggtctacggctgccagggctgctgcagcttcaagtgtctcaacagcggcctcctctttgccagccgctaccccatcatggacgtggc

SEQ ID NO: 134340 - DNA, 120 bp, Artificial Sequence
  ENSG00000103056_14 (sequence is synthesized)
ctatcactgttaccccaacaagtgtaacgacgatgccctggcctctaagggagctctgtttctcaaggtgcaggtgggaagcacacctcaggaccaaagaatcgtcgggtacatcgcctg

SEQ ID NO: 134341 - DNA, 120 bp, Artificial Sequence
  ENSG00000103056_15 (sequence is synthesized)
cacacacctgcatgccccgcaagaggacagcgccatccggtgtgggcagctggacctgcttcaggactggctggctgatttccgaaaatctacctcctcgtccagcgcagccaaccccga

SEQ ID NO: 134342 - DNA, 120 bp, Artificial Sequence
  ENSG00000103056_16 (sequence is synthesized)
ggagctggtggcatttgacgtcgtctgtggagatttcaactttgataactgctcctctgacgacaagctggagcagcaacactccctgttcacccactacagggacccctgccgcctggg

SEQ ID NO: 134343 - DNA, 120 bp, Artificial Sequence
  ENSG00000103056_17 (sequence is synthesized)
gcctggtgaggagaagccgtgggccatcggtactctgctggacacgaacggcctgtacgatgaggatgtgtgcacccccgacaacctgcagaaggtcctggagagtgaggagggccgcag

SEQ ID NO: 134344 - DNA, 120 bp, Artificial Sequence
  ENSG00000103056_18 (sequence is synthesized)
ggagtacctggcgtttcccaccagcaagagctcgggccagaaggggcggaaggagctgctgaagggcaacggccggcgcatcgactacatgctgcatgcagaggaggggctgtgcccaga

SEQ ID NO: 134345 - DNA, 120 bp, Artificial Sequence
  ENSG00000103056_19 (sequence is synthesized)
ctggaaggccgaggtggaagaattcagttttatcacccagctgtccggcctgacggaccacctgccagtagccatgcgactgatggtgtcttcgggggaggaggaggcatagaccgtccg

SEQ ID NO: 134346 - DNA, 120 bp, Artificial Sequence
  ENSG00000103056_20 (sequence is synthesized)
gagcagcggggcctctgccagcccttgcagctgcagcccatccctgggccatgtcccctccatcgagtgcccggtgcttgggggaggagggcagggacagggagggagccacagtcagtg

SEQ ID NO: 134347 - DNA, 120 bp, Artificial Sequence
  ENSG00000103056_21 (sequence is synthesized)
acacgattttctacaaatctacagcacaaccgagtttgtaacccgtgggttagtatgaggaccgggttcgtgtactctctgtatctcctcttaagcttcgtccagggttctttatttttg

SEQ ID NO: 134348 - DNA, 120 bp, Artificial Sequence
  ENSG00000103056_22 (sequence is synthesized)
tctgctgccaatgtcgtctcgcatgcctgcaccctcgcatgcacgctgcccgcatgccacgtgccacgctgtagccacagaccccttgctcgggcctcacccaaggccaaactccaaaca

SEQ ID NO: 134349 - DNA, 120 bp, Artificial Sequence
  ENSG00000103056_23 (sequence is synthesized)
caatcagaaccagccaaagaagcacttcctgggcacggccaccagctctcccgcctccagtgtgggccggctcctgcagggtccgagggctgcatctctaccagccagcccagggctctt

SEQ ID NO: 134350 - DNA, 120 bp, Artificial Sequence
  ENSG00000103056_24 (sequence is synthesized)
cccagggtctcgcattcaagggcaattacattttaaaaagaaaaacagaaaaaggttaatcacaaaaccaaccctcacttcacagggtctgtaagtcactcatagaactttgctcttccc

SEQ ID NO: 134351 - DNA, 120 bp, Artificial Sequence
  ENSG00000103056_25 (sequence is synthesized)
gagacagggtcccttccccagctcaggcacaacagagtctggcaggctctggcaccctgggcctcctccgggagcctcccatctgggcagtggagccataaacggggatccgagaagaga

SEQ ID NO: 134352 - DNA, 120 bp, Artificial Sequence
  ENSG00000103056_26 (sequence is synthesized)
gtatccacttttttttttacaggaagaagggactcacagcataaacgggggtgggggggatcctgattttgaaaataatctatttgtagcttctcttctatcaaaaccaacacatcctct

SEQ ID NO: 134353 - DNA, 120 bp, Artificial Sequence
  ENSG00000103056_27 (sequence is synthesized)
tctttctgccaatcctctcccccacgggacacctctctggttcgggaccaatccctccctggggacgtgccccacctgcgtgccggctgagctcaggaacccctgcctgccccccgggtg

SEQ ID NO: 134354 - DNA, 120 bp, Artificial Sequence
  ENSG00000103056_28 (sequence is synthesized)
gggctgcggctctggcctcccaggcccatcctcaacagctaccccagccaacaccaaggccacaaggggaccccggcctaggaggcaggaagccaaggtgcagagagcagcctggccctc

SEQ ID NO: 134355 - DNA, 120 bp, Artificial Sequence
  ENSG00000103056_29 (sequence is synthesized)
accagtgcgcaagctggggcagcaaggctgacagttgctgcatgcccagggcagggtgtggtactggcacccaagttcagcatggcagagctggccaacagcttgtggtccccgatctgc

SEQ ID NO: 134356 - DNA, 120 bp, Artificial Sequence
  ENSG00000103056_30 (sequence is synthesized)
ctccagccccaagatgcctacagcccccaggccccttcggcagcactgcctctgcccacctgcctttaagagactccagggctgctcctgtcatgcagcgaaggttttgtctgtttcaaa

SEQ ID NO: 134357 - DNA, 120 bp, Artificial Sequence
  ENSG00000103056_31 (sequence is synthesized)
gttcgagactcaacttgagggactgtttttgacaatccccgctgacctccgctcctcgtggcgccctggccctacacccagcctggcccagggccggctttgcctggtgaggctggaggg

SEQ ID NO: 134358 - DNA, 120 bp, Artificial Sequence
  ENSG00000103056_32 (sequence is synthesized)
agcaccaggacctgctgtctgctgtcagcccctcctggtgctggtgccctgatgctgtgccttgtcacccattgagctgcaagagggaccaagagggggccacgcagccagccagatgcc

SEQ ID NO: 134359 - DNA, 120 bp, Artificial Sequence
  ENSG00000103056_33 (sequence is synthesized)
tggccctgtgctggggcagacaacgctgcagagcccagggagcctggcgctaggacgtgcgtccttgtgacactggcctgtctgaactcacctggcctgggaagcaccgtctgcccgggc

SEQ ID NO: 134360 - DNA, 120 bp, Artificial Sequence
  ENSG00000103056_34 (sequence is synthesized)
ccaagccctgcccctccagagtccagagccaggaaggggctgctgagggcgagcatcctgctgggctctctgcccggcccacccctccaaggggctggcctgtgagccttgactgggatt

SEQ ID NO: 134361 - DNA, 120 bp, Artificial Sequence
  ENSG00000103056_35 (sequence is synthesized)
catgatgtggaggcccccaacttccagaagcagctggtactctgctcacacaagcgactgggccggccggccctggacccctagaccccgagccgcctgccgactgcctgcacagggaga

SEQ ID NO: 134362 - DNA, 120 bp, Artificial Sequence
  ENSG00000103056_36 (sequence is synthesized)
gcagttgaggcccgggcagggcccccacaccagaccccaacatagcttccccacccaggcaccccctcccggggcagcaggcgtgggagtcagggctgcatgctcctcccctcccacctc

SEQ ID NO: 134363 - DNA, 120 bp, Artificial Sequence
  ENSG00000103056_37 (sequence is synthesized)
acaggcggccttaggcaagtcattttctgtcatcacaaggtcgcctctgcctagtcaggtcctggggtccagagtaaggatgtgcggcccccaggcccccgcacacctccctcagcacca

SEQ ID NO: 134364 - DNA, 120 bp, Artificial Sequence
  ENSG00000103056_38 (sequence is synthesized)
agaccgggacccccccacccacgtgtctcattgtggctgcctatggactcccgggccttgtgtgcaggccaggcccttccactgattttttaaagtgaaccattgctggatctcagattc

SEQ ID NO: 134365 - DNA, 120 bp, Artificial Sequence
  ENSG00000103056_39 (sequence is synthesized)
tgtggcatctaaggcctagcaggggtgggcacacgggtcacccgaggcccataccaagactctgttcctgccctaggcccagtctcaaaggaagccacaaggcgcgggggccactgagga

SEQ ID NO: 134366 - DNA, 120 bp, Artificial Sequence
  ENSG00000103056_40 (sequence is synthesized)
aggaaatgttcattttcatttgtccaaaaccaccttaagttttaagtatattaatcttgatgctttttaactattgctttttaacttgctgagatttagaaatactgttataaaaacttt

SEQ ID NO: 134367 - DNA, 120 bp, Artificial Sequence
  ENSG00000103056_41 (sequence is synthesized)
tttaatttctgtatttttttctgtattgtatcttcatgggacattaggggttttctatggtaagcacacctatggttttggtaaaaacattatcaaatatatatccagacggttcttccc

SEQ ID NO: 134368 - DNA, 120 bp, Artificial Sequence
  ENSG00000103056_42 (sequence is synthesized)
tagaagaaaaacaagtctttacacctgataaaatattttgcgaagagaggtgttctttttccttactggtgctgaaaggaaggatggataacgaggagaaaataaaactgtgaggctcaa

SEQ ID NO: 134369 - DNA, 120 bp, Artificial Sequence
  ENSG00000103056_43 (sequence is synthesized)
ggagctggtggcatttgacgtcgtctgtggagatttcaactttgataactgctcctctgaaatcctagaacaggaagagcccacgctctgcctagaaagctggagacagagatgccctaa

SEQ ID NO: 134370 - DNA, 120 bp, Artificial Sequence
  ENSG00000103056_44 (sequence is synthesized)
aaacgaacctctgacaaggaaggctgggggcctctgaagcagacaaaggacgagtccactagtaacacccatcaacggggcgccgcgctcttgcttcgagccagctgccattctatcgct

SEQ ID NO: 134371 - DNA, 86 bp, Artificial Sequence
  ENSG00000103056_45 (sequence is synthesized)
cagccttgaccaatatgttaaaatcaagatatttcacagaaaacccggtttgcaggttctctcagcagccccaggcctgccacatt

SEQ ID NO: 134372 - DNA, 120 bp, Artificial Sequence
  ENSG00000103056_46 (sequence is synthesized)
atgcaaagagagagcagggcccgggccctgcagctctcgacagccgctccctgaaaccccacgccccaggccactcttacaatgatacccatcactccctcagacccttagggccccagg

SEQ ID NO: 134373 - DNA, 120 bp, Artificial Sequence
  ENSG00000103056_47 (sequence is synthesized)
ccccactgctggggaagggccccattcagctgcccctggctagcagaagcccgtgtccacccacagaggccaccccctagaggctgcctgggccctgcctgcagcgaccactgtcacccc

SEQ ID NO: 134374 - DNA, 120 bp, Artificial Sequence
  ENSG00000103056_48 (sequence is synthesized)
tcccagcccaccccagccccggggcctcactttggggatccccaggccgctccctgcaagatgcccttggaatctgaccaggctgtttctcccctctcccactcaccccaggaggtggaa

SEQ ID NO: 134375 - DNA, 120 bp, Artificial Sequence
  ENSG00000103056_49 (sequence is synthesized)
gctcagtcacagctagacagacttcgttaggcagctcaaagaattcctgctcctcgagagcatgtgggcggggtatttagcaagactgatttctctgccccctagaaatcctagaacagg

SEQ ID NO: 134376 - DNA, 120 bp, Artificial Sequence
  ENSG00000103056_50 (sequence is synthesized)
cctggcctctaagggagctctgtttctcaagtctttgcccgccaggactcaaaggcacagcctttcgtgtgattgcttgtttttgcaagagaaacacaaggctctgcggctcccaaggcc

SEQ ID NO: 134377 - DNA, 120 bp, Artificial Sequence
  ENSG00000103056_51 (sequence is synthesized)
gaggagggagaagcggggcgggagggagcaggacctcgtcactcctccggccagtgggttcttgtcgtgcagggcccagtctgaggcctccctgcgagtgtccaaccctgtccgggacac

SEQ ID NO: 134378 - DNA, 120 bp, Artificial Sequence
  ENSG00000103056_52 (sequence is synthesized)
agcgcggggcaggtgacaccaagtgttggatgagtgagaggctgacgccttaagaccaacaaacaggcggccggggagaaaccgcaaagacaccagcccctcagaaagcagcgcagagca

SEQ ID NO: 134379 - DNA, 120 bp, Artificial Sequence
  ENSG00000103056_53 (sequence is synthesized)
catggtgctagaagaacttggacagggtctgcagtaggcctccgcatggcccaccgaggtgaaccatgaccggctggccaacattcgccattgaccagccggagttgcatctcgccagga

SEQ ID NO: 134380 - DNA, 120 bp, Artificial Sequence
  ENSG00000103061_0 (sequence is synthesized)
agtgctcagcggcagccactatggaggccgccaggaccgctgtactccgggtgaagcggaagcgcagtgcggagccggcggaggctcttgtgctcgcttgtaaacgcctccggagcgacg

SEQ ID NO: 134381 - DNA, 120 bp, Artificial Sequence
  ENSG00000103061_1 (sequence is synthesized)
cggtcgagtcagcggcacagaagacgtcggagggtttggagagagcggcggagaataatgtcttccacttggtggccactgtgtgctcccaggaggaaccagtccagcctctcctgcggg

SEQ ID NO: 134382 - DNA, 120 bp, Artificial Sequence
  ENSG00000103061_2 (sequence is synthesized)
aagttctgcgcccgtcacgggacagccagcagcgtgtccgccgtaatctccgcgcctcggctcgggaggtccggcaggagggccgctaccgggtgctttccagccgccgatccttgggga

SEQ ID NO: 134383 - DNA, 120 bp, Artificial Sequence
  ENSG00000103061_3 (sequence is synthesized)
ccacctcgagcggccaggagtccgagtacacgccggggaacccagaagccgccgggaactcgggctttcagttgttagaccttgtccacgaggagggagaacctgaagccgcctctgcag

SEQ ID NO: 134384 - DNA, 120 bp, Artificial Sequence
  ENSG00000103061_4 (sequence is synthesized)
gctcctgcaaaacatctgacccagatgtgatcctctgcaattctgtagagttgatccgtgagcgattgactgtgtctgaggatggaccaggagtcaggcgccaggaagaacaaaaacacg

SEQ ID NO: 134385 - DNA, 120 bp, Artificial Sequence
  ENSG00000103061_5 (sequence is synthesized)
atgactatgtgtatgacatttactacttggagacggccactccaggctggattgagaacatcctctccgtgcagccctacagccaagaatgggagctggtgaatgatgatcaagaaccag

SEQ ID NO: 134386 - DNA, 120 bp, Artificial Sequence
  ENSG00000103061_6 (sequence is synthesized)
aggacatttacgacgatgaagatgacgagaacagtgagaataactggcgcaatgagtacccagaggaggagagcagtgatggagatgaggattccagaggctctgctgactacaacagcc

SEQ ID NO: 134387 - DNA, 120 bp, Artificial Sequence
  ENSG00000103061_7 (sequence is synthesized)
tgagtgaggaggaaagaggcagcagcagacagcggatgtggagcaagtaccctctggatgtgcagaaggagttcggctatgacagcccccacgacctggattcagactgatggtcttgtg

SEQ ID NO: 134388 - DNA, 120 bp, Artificial Sequence
  ENSG00000103061_8 (sequence is synthesized)
atgtccatgaggttctgccacatgcccttgagggctctgagtccagagttaactgccctgctgacatcctgttaggtttcctagcttaacatgtggaaggaaaagcatatcaagcatatc

SEQ ID NO: 134389 - DNA, 120 bp, Artificial Sequence
  ENSG00000103061_9 (sequence is synthesized)
gggcggcaccatcccaccacagtgaaaacttatgttaggggagtgagtcttttccacttacagtaggacccctttgcctcaatcaaaagtgaccctacagtttgaaagaaaaaaaaacgt

SEQ ID NO: 134390 - DNA, 120 bp, Artificial Sequence
  ENSG00000103061_10 (sequence is synthesized)
tgaaaaaaggaaggtttctttagctttagcttcttggcccaggaatttttcctggcattcaggttctgtgctgaaaccacaagggagggggaggttcccatttcattagcagtaagcttc

SEQ ID NO: 134391 - DNA, 120 bp, Artificial Sequence
  ENSG00000103061_11 (sequence is synthesized)
tgctgtgccataccaccaggctgcctgcctctaggaaaaccctgttccttttgatagaatctaaaaggggtaccagtgggtcccttgtagcaatacagactggatagtaatggccattag

SEQ ID NO: 134392 - DNA, 120 bp, Artificial Sequence
  ENSG00000103061_12 (sequence is synthesized)
ggcagaaagtagtctgagcagtgggagattttagttaacagctatttctgcttccaaactctgataacggttgtgaaattactgactgacttcctttggcagtggggccaagaaacaata

SEQ ID NO: 134393 - DNA, 120 bp, Artificial Sequence
  ENSG00000103061_13 (sequence is synthesized)
tatatgaatgtgatacatgtgtttagtaaaatctagctttgaacatggaagaaagtaattctttgaaaaccttttaaatctgaatatctaaaacagggagcggtagtgaaatagaaggtt

SEQ ID NO: 134394 - DNA, 120 bp, Artificial Sequence
  ENSG00000103061_14 (sequence is synthesized)
cagcattgattataaataccaaggacttaaggcaagggaggaaaaacaaagtaccttctgaacttagctttccactgagtaatgtttactcttcacagcacccaccacaaaaacaaacta

SEQ ID NO: 134395 - DNA, 120 bp, Artificial Sequence
  ENSG00000103061_15 (sequence is synthesized)
ctatcaacaggatcaattttattaacaacttgtatctcttctaagcagactctgtccgtatgcctttccaaaccatagctgccttaactgactgccttggtgtttattctagcgtaacat

SEQ ID NO: 134396 - DNA, 120 bp, Artificial Sequence
  ENSG00000103061_16 (sequence is synthesized)
tgtccagtagaactatctgcagtgatgatatgttctgtgtctgcactgtgtagtagtagacacgggtggctgctgagcacttgaaatgtgattagcgcaactgagaaactgagcttttaa

SEQ ID NO: 134397 - DNA, 120 bp, Artificial Sequence
  ENSG00000103061_17 (sequence is synthesized)
cctgtgagtgtctcttactcactgtcatgggggaaggtgagttacacagggaggtaccttcttgccgcctcttttaggatttcctaagtatctctccttcatcctacctgccatcattct

SEQ ID NO: 134398 - DNA, 120 bp, Artificial Sequence
  ENSG00000103061_18 (sequence is synthesized)
ttgactttatgtccattttctaaacctttgcctacacttgctcttatctacatggagttgttcaacctgccgaagtgattaaattctgtgtacacaggccgtatatattgcagctaatta

SEQ ID NO: 134399 - DNA, 120 bp, Artificial Sequence
  ENSG00000103061_19 (sequence is synthesized)
aaacaacaaacatcctaggcatgcacaaaggtataattcaccgttataacaggcagcaacttgtatgtctaatattagacatcttgctttctgtctgtaggcatagaaacaaaggattga

SEQ ID NO: 134400 - DNA, 120 bp, Artificial Sequence
  ENSG00000103061_20 (sequence is synthesized)
aagccattctcatacagcaaccgggtgaaaaaaacaaaacactgtgctgttacaatgtgctccctgctatttatactcattaagtttccccaatattaaagggctgacaacttaataaac

SEQ ID NO: 134401 - DNA, 120 bp, Artificial Sequence
  ENSG00000103061_21 (sequence is synthesized)
tgtactcactgcaaaagggataataagcacaccaggaaaaggatttaaggagacagacaacaaagagctggcagaaattaattccaccatgaagcttgagtgctgtagggatcctctggc

SEQ ID NO: 134402 - DNA, 120 bp, Artificial Sequence
  ENSG00000103061_22 (sequence is synthesized)
ttcgctcccaaagagaggatcctgggagaagtctgtatccagcacagaggggaaaaatgctgtcaccatccaaaaatgaaaggaggatgacatggctcactaagcaagtactagggcacc

SEQ ID NO: 134403 - DNA, 120 bp, Artificial Sequence
  ENSG00000103061_23 (sequence is synthesized)
tggcatgtgaggtccttgctttccctagaagccactggtggggggcagcaaattcctgggattagctggttatctggtggagaaagctaaagctggggtcagggatctttaaaaggcaag

SEQ ID NO: 134404 - DNA, 120 bp, Artificial Sequence
  ENSG00000103061_24 (sequence is synthesized)
cacattttgcttaaaggattagctccagaggagccctgggatgggtgccagcttagctcagacagaagtcatgttcttagcgttcaggcaagtcagcctttgcataagacaccctgtcgt

SEQ ID NO: 134405 - DNA, 120 bp, Artificial Sequence
  ENSG00000103061_25 (sequence is synthesized)
cgggcaggaatttgccgttacaaatcccaaacccatgacagtaggaatgtcaccccatgcttcacatatgcattatgctctgaacccagggcaactatgaccatgcttccttcaatcttt

SEQ ID NO: 134406 - DNA, 120 bp, Artificial Sequence
  ENSG00000103061_26 (sequence is synthesized)
attgagcaaatatatggccaaggttattcccttatctgtgactgggtggagaagaatggtcaggaagggagactgcctcactgttgaccaattccaaaacctaaggataagcccatgggg

SEQ ID NO: 134407 - DNA, 120 bp, Artificial Sequence
  ENSG00000103061_27 (sequence is synthesized)
tatgtcaagctagcaggttcttctcggcccaggatgacagtgtctgggggcatcacaaaacagttgtacaatccaatgcagccgtcctgctcatacagtaagatccattaggccagagca

SEQ ID NO: 134408 - DNA, 120 bp, Artificial Sequence
  ENSG00000103061_28 (sequence is synthesized)
ggcctaacttgggtggagagcccagcctgagcaccagaattagttgcttccacttgtgcagcctgctgaagagccggactcaggttgaagcagctttcctcccagtcttcactgatctcc

SEQ ID NO: 134409 - DNA, 120 bp, Artificial Sequence
  ENSG00000103061_29 (sequence is synthesized)
acagggagaaaacagaagtccccacaagtaccaagctcttcctgagactgcagccaccacacctcggggaaggggaggctggcaggagaggagtacactgtcccggtgacccacaccaag

SEQ ID NO: 134410 - DNA, 120 bp, Artificial Sequence
  ENSG00000103061_30 (sequence is synthesized)
gtggctccaagtgtaaacaaagcctggtgccagggacagaagaggatgcagcctgatgtgaggttttcagaaaagtgaaatgacctagcaccaggttgggattgcttgggtctgcacagc

SEQ ID NO: 134411 - DNA, 120 bp, Artificial Sequence
  ENSG00000103061_31 (sequence is synthesized)
agtccctcacactgcccttacagagaggaacaggttatttgatgacttgggcccatgagatgttctccaagccattgacagctgagagaattcaggtgatccacctgaatatcagaagtt

SEQ ID NO: 134412 - DNA, 120 bp, Artificial Sequence
  ENSG00000103061_32 (sequence is synthesized)
tcagccctcttagagttcgtaacagaaacccagagatttactgtcagctagaacaaagatgtaaggtctcaagtaaaataaaggattgtccttcaaaacagcaatattaacagacttctg

SEQ ID NO: 134413 - DNA, 120 bp, Artificial Sequence
  ENSG00000103061_33 (sequence is synthesized)
actcaggaatttgttcatctgtccttgctggacctgagccaagtgcttgtaacgtgatctatgatctatctgtatgctaaagtgtaacaggtacgtgagtaaaaaaatctttaaggttca

SEQ ID NO: 134414 - DNA, 120 bp, Artificial Sequence
  ENSG00000103061_34 (sequence is synthesized)
aaaacacgatgactatgtgtatgacatttactacttggagacggccactccaggctggattgagaacatcctctccgtgcagccctacagccaagaatgggagctgatgtgtaggtgaat

SEQ ID NO: 134415 - DNA, 120 bp, Artificial Sequence
  ENSG00000103061_35 (sequence is synthesized)
ccttccttctatcctgccataaatgtcctacaggtttggtcctctctgtgcacaggtaaatattacacacagtggaaattcaactatgtgctaaactaatgaataaagaaggctgcttgt

SEQ ID NO: 134416 - DNA, 120 bp, Artificial Sequence
  ENSG00000103061_36 (sequence is synthesized)
gggcatcttcgggtgcagccggtacgaaacccgatccctgacccgctcgcgaactcctgcttacgctggcctccgtcccctgttgccccctaggaggaaccagtccagcctctcctgcgg

SEQ ID NO: 134417 - DNA, 120 bp, Artificial Sequence
  ENSG00000103061_37 (sequence is synthesized)
ggagggactggtaggatctgagactgaggtgcaggcatagttgacaggtgcatcttaattgcctttccttctctgtcattgagcgccagcagcccagccgcaactgagccatgctgtagg

SEQ ID NO: 134418 - DNA, 120 bp, Artificial Sequence
  ENSG00000103061_38 (sequence is synthesized)
agacccaaagaccagtgtttcccaggggcctcctgggggtgtaataatccatcaggcctggattcaaatctgtagttgtcattactttgctgtggctcttgggcagttacttcacctcac

SEQ ID NO: 134419 - DNA, 120 bp, Artificial Sequence
  ENSG00000103061_39 (sequence is synthesized)
tgagcctcattttctctccaaatgagatggttctgcatgaattttagtggttgagattatgtaaaatatgtagctcattgtctcttcccctgccccagtcaagaaaccaatgaagagaga

SEQ ID NO: 134420 - DNA, 120 bp, Artificial Sequence
  ENSG00000103061_40 (sequence is synthesized)
tgtccttagttcttttcctcctgaaaaggaagaaattattctaagtgccttttaggaacctgactttatagtacagggaatttggggaaagatcatcttagattgatcatttttacatta

SEQ ID NO: 134421 - DNA, 120 bp, Artificial Sequence
  ENSG00000103061_41 (sequence is synthesized)
atgaatattttacaaggtttgcaacatcacctttattgtttatagctatccattcttaggggggaaatatgtatatggggcttatgataagataaagacgataaaatcagaaattcttaa

SEQ ID NO: 134422 - DNA, 120 bp, Artificial Sequence
  ENSG00000103064_0 (sequence is synthesized)
gcggcggcggcggcgcgaccgagcatcctggcggcgccgggccactgggagagtttatgtggccgaggcagacaagtggaattaggccttgctgcaggggacttcatttccttctcagta

SEQ ID NO: 134423 - DNA, 120 bp, Artificial Sequence
  ENSG00000103064_1 (sequence is synthesized)
ctggacccatttatgaggaggtggcttatgaaagtgtgatgttcgcgtatttcttgacaggccacagcaaacacaggtgtgcaggaaccgtttgtcatggaagccagggagcctgggagg

SEQ ID NO: 134424 - DNA, 120 bp, Artificial Sequence
  ENSG00000103064_2 (sequence is synthesized)
cccacacccacctaccatcttgtccctaacaccagccagtcccaggtggaagaagatgtcagctcgccacctcaaaggtcctccgaaactatgcagctgaagaaggagatctccctgctg

SEQ ID NO: 134425 - DNA, 120 bp, Artificial Sequence
  ENSG00000103064_3 (sequence is synthesized)
aatggggtcagcctggtggtgggcaacatgatcggctcagggatctttgtctcacccaagggtgtgctggtacacactgcctcctatgggatgtcactgattgtgtgggccattggtggg

SEQ ID NO: 134426 - DNA, 120 bp, Artificial Sequence
  ENSG00000103064_4 (sequence is synthesized)
ctcttctctgttgtgggtgccctttgttatgcagagctggggaccaccatcaccaagtcgggagccagctacgcttatattctagaggcctttgggggcttcattgccttcatccgcctg

SEQ ID NO: 134427 - DNA, 120 bp, Artificial Sequence
  ENSG00000103064_5 (sequence is synthesized)
tgggtctcactgctagttgttgagcccaccggtcaggccatcatcgccatcacctttgccaactacatcatccagccgtccttccccagctgtgatcccccatacctggcctgccgtctc

SEQ ID NO: 134428 - DNA, 120 bp, Artificial Sequence
  ENSG00000103064_6 (sequence is synthesized)
ctggctgctgcttgcatatgtctgctgacatttgtgaactgtgcctatgtcaagtggggcacacgtgtgcaggacacgttcacttacgccaaggtcgtagcgctcattgccatcattgtc

SEQ ID NO: 134429 - DNA, 120 bp, Artificial Sequence
  ENSG00000103064_7 (sequence is synthesized)
atgggccttgttaaactgtgccagggacactctgagcactttcaggacgcctttgagggttcctcctgggacatgggaaacctctctcttgccctctactctgccctcttctcttactca

SEQ ID NO: 134430 - DNA, 120 bp, Artificial Sequence
  ENSG00000103064_8 (sequence is synthesized)
ggttgggacacccttaattttgtaacagaagaaatcaaaaacccagaaagaaatttgcccttggccattgggatttctatgccaattgtgacgctcatctacatcctgaccaatgtggcc

SEQ ID NO: 134431 - DNA, 120 bp, Artificial Sequence
  ENSG00000103064_9 (sequence is synthesized)
tattacacagtgctgaacatttcagatgtccttagcagtgatgctgtggctgtgacatttgctgaccagacgtttggcatgttcagctggaccatccccattgctgttgccctgtcctgc

SEQ ID NO: 134432 - DNA, 120 bp, Artificial Sequence
  ENSG00000103064_10 (sequence is synthesized)
tttgggggcctcaatgcatccatctttgcttcatcaaggttgttcttcgtgggctcccgggagggccacctaccggaccttctgtccatgatccacattgagcgttttacacctatccct

SEQ ID NO: 134433 - DNA, 120 bp, Artificial Sequence
  ENSG00000103064_11 (sequence is synthesized)
gctttactgttcaattgcaccatggcactcatctacctcatcgtggaggatgttttccagcttatcaactacttcagcttcagctactggttcttcgtgggcctgtctgttgttggacag

SEQ ID NO: 134434 - DNA, 120 bp, Artificial Sequence
  ENSG00000103064_12 (sequence is synthesized)
ctctacctccgctggaaggagcccaagcggccccggcctctcaagctgagcgtgtttttccccatcgtgttctgcatatgctccgtgtttctggtgatagtgcccctcttcactgacacc

SEQ ID NO: 134435 - DNA, 120 bp, Artificial Sequence
  ENSG00000103064_13 (sequence is synthesized)
attaattccctcattggcatcgggattgccctttctggagtccctttctacttcatgggtgtttacctgccagagtcccggaggccattgtttattcggaatgtcctggctgctatcacc

SEQ ID NO: 134436 - DNA, 120 bp, Artificial Sequence
  ENSG00000103064_14 (sequence is synthesized)
agaggcacccagcagctttgcttttgtgtcctgactgagcttgatgtagccgaagaaaaaaaggatgagaggaaaactgactagaggtcagaggtggctttctgaggcctggaaggcagg

SEQ ID NO: 134437 - DNA, 120 bp, Artificial Sequence
  ENSG00000103064_15 (sequence is synthesized)
ccaaccagcaaaatcctgataacaagactctgtgggcccaactctcctgaattaaaggagccttttgacccaatcatatagtggggctcagggccagtgctcactcttattggtaagcta

SEQ ID NO: 134438 - DNA, 120 bp, Artificial Sequence
  ENSG00000103064_16 (sequence is synthesized)
taggagactcaggatctgggccaacctcaaggtgggggcttcagagggtggggggaagattggggaacggggggaatggtcatttagttttactcctgataggtagatgcagctcttaca

SEQ ID NO: 134439 - DNA, 120 bp, Artificial Sequence
  ENSG00000103064_17 (sequence is synthesized)
gatatttacttggtaaagtgcagtggggaagagggaatgctaggttgatagggctggtggcttctgaatttggtatttgaactaggagtccctatagaggggctgctttatgggaagttt

SEQ ID NO: 134440 - DNA, 120 bp, Artificial Sequence
  ENSG00000103064_18 (sequence is synthesized)
ttctctgaccaggtacaacacctgactttaaaggcctgaaatgctaccatttcttcctctggctcaaaattcttccctggggagagagttatattcccttatttattgatatttagtcca

SEQ ID NO: 134441 - DNA, 120 bp, Artificial Sequence
  ENSG00000103064_19 (sequence is synthesized)
gaacaccagttctaacgaagcatgcgtgtctcttcatctacaggatgcaataggctgattgtatttaaaaatcaaagtacccaaaactgagtccctttgggctcagaaatgtctgtggta

SEQ ID NO: 134442 - DNA, 120 bp, Artificial Sequence
  ENSG00000103064_20 (sequence is synthesized)
ttgggtcagactctgaccacaggttttatgctgtttagcacaatttctattgagtcttacctgcaacaatgaaccttaaagatttttttactcacgtacctgttacactttagcatacag

SEQ ID NO: 134443 - DNA, 120 bp, Artificial Sequence
  ENSG00000103064_21 (sequence is synthesized)
atagatcatagatcacgttacaagcacttggctcaggtccagcaaggacagatgaacaaattcctgagtcagaagtctgttaatattgctgttttgaaggacaatcctttattttacttg

SEQ ID NO: 134444 - DNA, 120 bp, Artificial Sequence
  ENSG00000103064_22 (sequence is synthesized)
agaccttacatctttgttctagctgacagtaaatctctgggtttctgttacgaactctaagagggctgaaacttctgatattcaggtggatcacctgaattctctcagctgtcaatggct

SEQ ID NO: 134445 - DNA, 120 bp, Artificial Sequence
  ENSG00000103064_23 (sequence is synthesized)
tggagaacatctcatgggcccaagtcatcaaataacctgttcctctctgtaagggcagtgtgagggactgctgtgcagacccaagcaatcccaacctggtgctaggtcatttcacttttc

SEQ ID NO: 134446 - DNA, 120 bp, Artificial Sequence
  ENSG00000103064_24 (sequence is synthesized)
tgaaaacctcacatcaggctgcatcctcttctgtccctggcaccaggctttgtttacacttggagccaccttggtgtgggtcaccgggacagtgtactcctctcctgccagcctcccctt

SEQ ID NO: 134447 - DNA, 120 bp, Artificial Sequence
  ENSG00000103064_25 (sequence is synthesized)
ccccgaggtgtggtggctgcagtctcaggaagagcttggtacttgtggggacttctgttttctccctgtggagatcagtgaagactgggaggaaagctgcttcaacctgagtccggctct

SEQ ID NO: 134448 - DNA, 120 bp, Artificial Sequence
  ENSG00000103064_26 (sequence is synthesized)
agtggaagcaactaattctggtgctcaggctgggctctccacccaagttaggcctgctctggcctaatggatcttactgtatgagcaggacggctgcattggattgtacaactgttttgt

SEQ ID NO: 134449 - DNA, 120 bp, Artificial Sequence
  ENSG00000103064_27 (sequence is synthesized)
gatgcccccagacactgtcatcctgggccgagaagaacctgctagcttgacataccccatgggcttatccttaggttttggaattggtcaacagtgaggcagtctcccttcctgaccatt

SEQ ID NO: 134450 - DNA, 120 bp, Artificial Sequence
  ENSG00000103064_28 (sequence is synthesized)
cttctccacccagtcacagataagggaataaccttggccatatatttgctcaataaagattgaaggaagcatggtcatagttgccctgggttcagagcataatgcatatgtgaagcatgg

SEQ ID NO: 134451 - DNA, 120 bp, Artificial Sequence
  ENSG00000103064_29 (sequence is synthesized)
ggtgacattcctactgtcatgggtttgggatttgtaacggcaaattcctgcccgacgacagggtgtcttatgcaaaggctgacttgcctgaacgctaagaacatgacttctgtctgagct

SEQ ID NO: 134452 - DNA, 120 bp, Artificial Sequence
  ENSG00000103064_30 (sequence is synthesized)
aagctggcacccatcccagggctcctctggagctaatcctttaagcaaaatgtgcttgccttttaaagatccctgaccccagctttagctttctccaccagataaccagctaatcccagg

SEQ ID NO: 134453 - DNA, 120 bp, Artificial Sequence
  ENSG00000103064_31 (sequence is synthesized)
aatttgctgccccccaccagtggcttctagggaaagcaaggacctcacatgccaggtgccctagtacttgcttagtgagccatgtcatcctcctttcatttttggatggtgacagcattt

SEQ ID NO: 134454 - DNA, 120 bp, Artificial Sequence
  ENSG00000103064_32 (sequence is synthesized)
ttcccctctgtgctggatacagacttctcccaggatcctctctttgggagcgaagccagaggatccctacagcactcaagcttcatggtggaattaatttctgccagctctttgttgtct

SEQ ID NO: 134455 - DNA, 120 bp, Artificial Sequence
  ENSG00000103064_33 (sequence is synthesized)
gtctccttaaatccttttcctggtgtgcttattatcccttttgcagtgagtacagtttattaagttgtcagccctttaatattggggaaacttaatgagtataaatagcagggagcacat

SEQ ID NO: 134456 - DNA, 120 bp, Artificial Sequence
  ENSG00000103064_34 (sequence is synthesized)
tgtaacagcacagtgttttgtttttttcacccggttgctgtatgagaatggctttcaatcctttgtttctatgcctacagacagaaagcaagatgtctaatattagacatacaagttgct

SEQ ID NO: 134457 - DNA, 120 bp, Artificial Sequence
  ENSG00000103064_35 (sequence is synthesized)
gcctgttataacggtgaattatacctttgtgcatgcctaggatgtttgttgttttaattagctgcaatatatacggcctgtgtacacagaatttaatcacttcggcaggttgaacaactc

SEQ ID NO: 134458 - DNA, 120 bp, Artificial Sequence
  ENSG00000103064_36 (sequence is synthesized)
catgtagataagagcaagtgtaggcaaaggtttagaaaatggacataaagtcaaagaatgatggcaggtaggatgaaggagagatacttaggaaatcctaaaagaggcggcaagaaggta

SEQ ID NO: 134459 - DNA, 120 bp, Artificial Sequence
  ENSG00000103064_37 (sequence is synthesized)
cctccctgtgtaactcaccttcccccatgacagtgagtaagagacactcacaggctatgagggtacacccctagctgaatgttctgtgttgtttccttagacctgtggtgtccgctgcaa

SEQ ID NO: 134460 - DNA, 120 bp, Artificial Sequence
  ENSG00000103064_38 (sequence is synthesized)
cagctactagccacgtgtagctaattacattaaaatgaaataaaattaaaagctcagtttctcagttgcgctaatcacatttcaagtgctcagcagccacccgtgtctactactacacag

SEQ ID NO: 134461 - DNA, 120 bp, Artificial Sequence
  ENSG00000103064_39 (sequence is synthesized)
tgcagacacagaacatatcatcactgcagatagttctactggacaatgttacgctagaataaacaccaaggcagtcagttaaggcagctatggtttggaaaggcatacggacagagtctg

SEQ ID NO: 134462 - DNA, 120 bp, Artificial Sequence
  ENSG00000103064_40 (sequence is synthesized)
cttagaagagatacaagttgttaataaaattgatcctgttgatagtagtttgtttttgtggtgggtgctgtgaagagtaaacattactcagtggaaagctaagttcagaaggtactttgt

SEQ ID NO: 134463 - DNA, 120 bp, Artificial Sequence
  ENSG00000103064_41 (sequence is synthesized)
ttttcctcccttgccttaagtccttggtatttataatcaatgctgaaccttctatttcactaccgctccctgttttagatattcagatttaaaaggttttcaaagaattactttcttcca

SEQ ID NO: 134464 - DNA, 120 bp, Artificial Sequence
  ENSG00000103064_42 (sequence is synthesized)
tgttcaaagctagattttactaaacacatgtatcacattcatatatattgtttcttggccccactgccaaaggaagtcagtcagtaatttcacaaccgttatcagagtttggaagcagaa

SEQ ID NO: 134465 - DNA, 120 bp, Artificial Sequence
  ENSG00000103064_43 (sequence is synthesized)
atagctgttaactaaaatctcccactgctcagactactttctgccctaatggccattactatccagtctgtattgctacaagggacccactggtaccccttttagattctatcaaaagga

SEQ ID NO: 134466 - DNA, 120 bp, Artificial Sequence
  ENSG00000103064_44 (sequence is synthesized)
acagggttttcctagaggcaggcagcctggtggtatggcacagcagaagcttactgctaatgaaatgggaacctccccctcccttgtggtttcagcacagaacctgaatgccaggaaaaa

SEQ ID NO: 134467 - DNA, 120 bp, Artificial Sequence
  ENSG00000103064_45 (sequence is synthesized)
ttcctgggccaagaagctaaagctaaagaaaccttccttttttcaacgtttttttttctttcaaactgtagggtcacttttgattgaggcaaaggggtcctactgtaagtggaaaagact

SEQ ID NO: 134468 - DNA, 120 bp, Artificial Sequence
  ENSG00000103064_46 (sequence is synthesized)
cactcccctaacataagttttcactgtggtgggatggtgccgcccgatatgcttgatatgcttttccttccacatgttaagctaggaaacctaacaggatgtcagcagggcagttaactc

SEQ ID NO: 134469 - DNA, 120 bp, Artificial Sequence
  ENSG00000103064_47 (sequence is synthesized)
tggactcagagccctcaagggcatgtggcagaacctcatggacatcacaagaccatcagtctgaatccaggtcgtgggggctgtcatagccgaactccttctgcacatccagagggtact

SEQ ID NO: 134470 - DNA, 120 bp, Artificial Sequence
  ENSG00000103064_48 (sequence is synthesized)
tgctccacatccgctgtctgctgctgcctctttcctcctcactcaggctgttgtagtcagcagagcctagaatgacatcccgggagtggattctaaatgtgattttcctaggctactgca

SEQ ID NO: 134471 - DNA, 120 bp, Artificial Sequence
  ENSG00000103064_49 (sequence is synthesized)
ggagccccttctcttctcagaaaggtctgtttttgttcccgattgtaatgcaaaatccttgctcaataaataaaaaagaatatagaattcttttttttttaaagaaggaatcactttcct

SEQ ID NO: 134472 - DNA, 120 bp, Artificial Sequence
  ENSG00000103064_50 (sequence is synthesized)
atcatctaaaccaagttccttcacactggagtattttgtcacttctcccctccgtggagtattttgtcacttctcccctccgtataggattttttgttgttgtaagagttgtagtcatat

SEQ ID NO: 134473 - DNA, 120 bp, Artificial Sequence
  ENSG00000103064_51 (sequence is synthesized)
tgtaaatatttttgtacctttctccttttaacgtgttattgacaaacctccccaaaagaatatgcaattgtttgattcatttctctgttatcagacaccaataaattctttttgttgggc

SEQ ID NO: 134474 - DNA, 65 bp, Artificial Sequence
  ENSG00000103064_52 (sequence is synthesized)
tcagtactggacccatttatgaggaggtggcttatgaaagtgtgatgttcgcgtatttcttgaca

SEQ ID NO: 134475 - DNA, 120 bp, Artificial Sequence
  ENSG00000103064_53 (sequence is synthesized)
ctttactgttcaatgtaagctttgctgggaccacggggctcaggtggatctgtgcattgctccttctgatttgtgctaagttgttaaataagagggaccctgagaaaggccttactctaa

SEQ ID NO: 134476 - DNA, 120 bp, Artificial Sequence
  ENSG00000103064_54 (sequence is synthesized)
gggcgcgccgggagcggggccggggctgggccgcgttctgtgggagccgaaccctgtgggtcttcgctgccgccgtcgggagcgggatgcggcccagaaacagcgcggggctggccgatc

SEQ ID NO: 134477 - DNA, 120 bp, Artificial Sequence
  ENSG00000103064_55 (sequence is synthesized)
gaaacccagtaggacccattggtcctactgtggcaaagattaaatattgatcatgagctatcttcacagagaaagttgggtctttctcaatagaaagaacccagggtcaaggggaaggtg

SEQ ID NO: 134478 - DNA, 120 bp, Artificial Sequence
  ENSG00000103064_56 (sequence is synthesized)
agcctccctcaaagacttggaggctagtgaactgttaaatgttaggaaaatcccagtggagacttgataaactttgttcccaaggagaggttggttctaggtagtcctttctcacttgtc

SEQ ID NO: 134479 - DNA, 120 bp, Artificial Sequence
  ENSG00000103064_57 (sequence is synthesized)
cttgttaaactgtgccaggacatttgctgaccagacgtttggcatgttcagctggaccatccccattgctgttgccctgtcctgctttgggggcctcaatgcatccatctttgcttcatc

SEQ ID NO: 134480 - DNA, 120 bp, Artificial Sequence
  ENSG00000103064_58 (sequence is synthesized)
tctgcattcaaatttacctcacttactgatgagtttcttttggccatgaagaggtcttgtgtctcctgtggtttggaaccttgggagtctgggtgggaaagagtctgctgacatttgtga

SEQ ID NO: 134481 - DNA, 120 bp, Artificial Sequence
  ENSG00000103064_59 (sequence is synthesized)
cagtgctgaacatttcagatgtccttagcagtgatgctgtggctgtggtgagtctcttgggatccccatttgttcatcatctcctgatactgagccaccctgcacagctcagtctgtctt

SEQ ID NO: 134482 - DNA, 120 bp, Artificial Sequence
  ENSG00000103064_60 (sequence is synthesized)
cttagcagtgattgcatttgttccgagatcatagatgcaggaggattatgaaaccctgtgcgtttaagtgccttttctgtgccctgcccccagacatttgctgaccagacgtttggcatg

SEQ ID NO: 134483 - DNA, 120 bp, Artificial Sequence
  ENSG00000103064_61 (sequence is synthesized)
tcagtgcccagccatccggggcttgtctctcagaactgctcccagatttcagatctgggaggagcagacttgaaaggctgtgagtacttccttatatcagttccacctctttttggtggc

SEQ ID NO: 134484 - DNA, 120 bp, Artificial Sequence
  ENSG00000103064_62 (sequence is synthesized)
ggtgaggccttttggggacctgcccaggctgcctgcattactcaggtcccatgtgtgctgcgcagacggcttttgcttcccaactttgatctcagatcgttattcaagtcgttacactgg

SEQ ID NO: 134485 - DNA, 120 bp, Artificial Sequence
  ENSG00000103066_0 (sequence is synthesized)
gagagcccagagagctgaacctgcatcccggacctgcggcgaccgtcgtacaccatgggcctccacctccgcccctaccgtgtggggctgctcccggatggcctcctgttcctcttgctg

SEQ ID NO: 134486 - DNA, 120 bp, Artificial Sequence
  ENSG00000103066_1 (sequence is synthesized)
ctgctaatgctgctcgcggacccagcgctcccggccggacgtcaccccccagtggtgctggtccctggtgatttgggtaaccaactggaagccaagctggacaagccgacagtggtgcac

SEQ ID NO: 134487 - DNA, 120 bp, Artificial Sequence
  ENSG00000103066_2 (sequence is synthesized)
tacctctgctccaagaagaccgaaagctacttcacaatctggctgaacctggaactgctgctgcctgtcatcattgactgctggattgacaatatcaggctggtttacaacaaaacatcc

SEQ ID NO: 134488 - DNA, 120 bp, Artificial Sequence
  ENSG00000103066_3 (sequence is synthesized)
agggccacccagtttcctgatggtgtggatgtacgtgtccctggctttgggaagaccttctcactggagttcctggaccccagcaaaagcagcgtgggttcctatttccacaccatggtg

SEQ ID NO: 134489 - DNA, 120 bp, Artificial Sequence
  ENSG00000103066_4 (sequence is synthesized)
gagagccttgtgggctggggctacacacggggtgaggatgtccgaggggctccctatgactggcgccgagccccaaatgaaaacgggccctacttcctggccctccgcgagatgatcgag

SEQ ID NO: 134490 - DNA, 120 bp, Artificial Sequence
  ENSG00000103066_5 (sequence is synthesized)
gagatgtaccagctgtatgggggccccgtggtgctggttgcccacagtatgggcaacatgtacacgctctactttctgcagcggcagccgcaggcctggaaggacaagtatatccgggcc

SEQ ID NO: 134491 - DNA, 120 bp, Artificial Sequence
  ENSG00000103066_6 (sequence is synthesized)
ttcgtgtcactgggtgcgccctgggggggcgtggccaagaccctgcgcgtcctggcttcaggagacaacaaccggatcccagtcatcgggcccctgaagatccgggagcagcagcggtca

SEQ ID NO: 134492 - DNA, 120 bp, Artificial Sequence
  ENSG00000103066_7 (sequence is synthesized)
gctgtctccaccagctggctgctgccctacaactacacatggtcacctgagaaggtgttcgtgcagacacccacaatcaactacacactgcgggactaccgcaagttcttccaggacatc

SEQ ID NO: 134493 - DNA, 120 bp, Artificial Sequence
  ENSG00000103066_8 (sequence is synthesized)
ggctttgaagatggctggctcatgcggcaggacacagaagggctggtggaagccacgatgccacctggcgtgcagctgcactgcctctatggtactggcgtccccacaccagactccttc

SEQ ID NO: 134494 - DNA, 120 bp, Artificial Sequence
  ENSG00000103066_9 (sequence is synthesized)
tactatgagagcttccctgaccgtgaccctaaaatctgctttggtgacggcgatggtactgtgaacttgaagagtgccctgcagtgccaggcctggcagagccgccaggagcaccaagtg

SEQ ID NO: 134495 - DNA, 120 bp, Artificial Sequence
  ENSG00000103066_10 (sequence is synthesized)
ttgctgcaggagctgccaggcagcgagcacatcgagatgctggccaacgccaccaccctggcctatctgaaacgtgtgctccttgggccctgactcctgtgccacaggactcctgtggct

SEQ ID NO: 134496 - DNA, 120 bp, Artificial Sequence
  ENSG00000103066_11 (sequence is synthesized)
aagtttgtgactcaccattcaaggccccgagtcttggactgtgaagcatctgccatggggaagtgctgtttgttatcctttctctgtggcagtgaagaaggaagaaatgagagtctagac

SEQ ID NO: 134497 - DNA, 120 bp, Artificial Sequence
  ENSG00000103066_12 (sequence is synthesized)
tcaagggacactggatggcaagaatgctgctgatggtggaactgctgtgaccttaggactggctccacagggtggactggctgggccctggtcccagtccctgcctggggccatgtgtcc

SEQ ID NO: 134498 - DNA, 120 bp, Artificial Sequence
  ENSG00000103066_13 (sequence is synthesized)
cccctattcctgtgggcttttcatacttgcctactgggccctggccccgcagccttcctatgagggatgttactgggctgtggtcctgtacccagaggtcccagggatcggctcctggcc

SEQ ID NO: 134499 - DNA, 120 bp, Artificial Sequence
  ENSG00000103066_14 (sequence is synthesized)
cctcgggtgacccttcccacacaccagccacagataggcctgccactggtcatgggtagctagagctgctggcttccctgtggcttagctggtggccagcctgactggcttcctgggcga

SEQ ID NO: 134500 - DNA, 120 bp, Artificial Sequence
  ENSG00000103066_15 (sequence is synthesized)
gcctagtagctcctgcaggcaggggcagtttgttgcgttcttcgtggttcccaggccctgggacatctcactccactcctacctcccttaccaccaggagcattcaagctctggattggg

SEQ ID NO: 134501 - DNA, 120 bp, Artificial Sequence
  ENSG00000103066_16 (sequence is synthesized)
cagcagatgtgcccccagtcccgcaggctgtgttccaggggccctgatttcctcggatgtgctattggccccaggactgaagctgcctcccttcaccctgggactgtggttccaaggatg

SEQ ID NO: 134502 - DNA, 120 bp, Artificial Sequence
  ENSG00000103066_17 (sequence is synthesized)
agagcaggggttggagccatggccttctgggaacctatggagaaagggaatccaaggaagcagccaaggctgctcgcagcttccctgagctgcacctcttgctaaccccaccatcacact

SEQ ID NO: 134503 - DNA, 120 bp, Artificial Sequence
  ENSG00000103066_18 (sequence is synthesized)
gccaccctgccctagggtctcactagtaccaagtgggtcagcacagggctgaggatggggctcctatccaccctggccagcacccagcttagtgctgggactagcccagaaacttgaatg

SEQ ID NO: 134504 - DNA, 120 bp, Artificial Sequence
  ENSG00000103066_19 (sequence is synthesized)
ggaccctgagagagccaggggtcccctgaggcccccctaggggctttctgtctgccccagggtgctccatggatctccctgtggcagcaggcatggagagtcagggctgccttcatggca

SEQ ID NO: 134505 - DNA, 120 bp, Artificial Sequence
  ENSG00000103066_20 (sequence is synthesized)
gtaggctctaagtgggtgactggccacaggccgagaaaagggtacagcctctaggtggggttcccaaagacgccttcacgctggactgagctgctctcccacagggtttctgtgcagctg

SEQ ID NO: 134506 - DNA, 120 bp, Artificial Sequence
  ENSG00000103066_21 (sequence is synthesized)
gattttctctgttgcatacatgcctggcatctgtctccccttgttcctgagtggccccacatggggctctgagcaggctgtatctggattctggcaataaaagtactctggatgctgtaa

SEQ ID NO: 134507 - DNA, 120 bp, Artificial Sequence
  ENSG00000103066_22 (sequence is synthesized)
ttacttttcggtctctcctatccatctgaccaaacctgggcatgagaagggagtatgactcaggacatgatgcactgttgggacacaccaagctcagtgtcccctccgggtcactggctc

SEQ ID NO: 134508 - DNA, 120 bp, Artificial Sequence
  ENSG00000103066_23 (sequence is synthesized)
cagcaaaagcagcgtgggtatgtagcccttactcaaggcctccgggagctgggatggggtttctgccggactggagctggagctggaggaactctgctggtttgtagggacagcctgtga

SEQ ID NO: 134509 - DNA, 120 bp, Artificial Sequence
  ENSG00000103066_24 (sequence is synthesized)
gctgtctctgatcagcgtgggcacagagccctgtagcattcttccaaggacctgctagctgtcacagtctccatgctgggcatagtgtaggtggccggcactagctgtatcttttcttat

SEQ ID NO: 134510 - DNA, 120 bp, Artificial Sequence
  ENSG00000103066_25 (sequence is synthesized)
gtaagcaggcactctcattccctccctgacgtctcgggaggtaggggtgaggtgatcatgggcaccacagaccttgggctctccccttgtccttggctgtctcctgtccctgggcctctg

SEQ ID NO: 134511 - DNA, 120 bp, Artificial Sequence
  ENSG00000103066_26 (sequence is synthesized)
gcatccagtctagtggtcacagccaccacctttggtcagtcttatcctgtcctccatttcccaccctgggacctctgggcctgtgagccctggggagaaatataaggcttcctcccttca

SEQ ID NO: 134512 - DNA, 120 bp, Artificial Sequence
  ENSG00000103066_27 (sequence is synthesized)
tggaaggcggggggacccagaccgctctgtttgaatgtgagcaccctcccctccccctctcgtcttgtgtctggcctgagaaaagctcagtggttccggctccaggacccttcccacctg

SEQ ID NO: 134513 - DNA, 120 bp, Artificial Sequence
  ENSG00000103066_28 (sequence is synthesized)
gtttccttcttcctctctcagggcgaacaggaccctgtcttctatgtagcctgggatagctatgggtggaagacttttgggttcaagcctccagggtatatatctttttttttttttgag

SEQ ID NO: 134514 - DNA, 65 bp, Artificial Sequence
  ENSG00000103066_29 (sequence is synthesized)
tgcctcgaagtccctggtgatttgggtaaccaactggaagccaagctggacaagccgacagtggt

SEQ ID NO: 134515 - DNA, 60 bp, Artificial Sequence
  ENSG00000103066_30 (sequence is synthesized)
ctcctgagtagctgggattacagtcgcctcccacgacacccggctgacactcaggtgacc

SEQ ID NO: 134516 - DNA, 120 bp, Artificial Sequence
  ENSG00000103067_0 (sequence is synthesized)
gatccgcgtctgcggtcggtcggtgcgtgcgtgcgcctcgtcggtccgcgtgtctggccgagagcccccttcctctgcggccatgactccgccgccgccgccgccccctcccccgggccc

SEQ ID NO: 134517 - DNA, 120 bp, Artificial Sequence
  ENSG00000103067_1 (sequence is synthesized)
tgaccccgcggccgaccccgccgcggacccctgcccctggcccggatcactggtcgtcctcttcggggctacggcgggtgcgctgggacgggacctgggctcggacgagaccgacttaat

SEQ ID NO: 134518 - DNA, 120 bp, Artificial Sequence
  ENSG00000103067_2 (sequence is synthesized)
cctcctagtttggcaagtggttgagccgcggagccgccaggtggggacgctgcacaaatcgctggttcgtgccgaggcggccgcactgagtacgcagtgccgcgaggcgagcggcctgag

SEQ ID NO: 134519 - DNA, 120 bp, Artificial Sequence
  ENSG00000103067_3 (sequence is synthesized)
cgccgacagcctggcgcgggcagagccgctggacaaggtgctgcagcagttctcacagctggtgaacggggatgtggctttgctgggcgggggcccctacatgctctgcactgatgggca

SEQ ID NO: 134520 - DNA, 120 bp, Artificial Sequence
  ENSG00000103067_4 (sequence is synthesized)
gcagctattgcgacaggtcctgcaccccgaggcctccaggaagaacctggtgctccccgacatgttcttctccttctatgacctccgaagagaattccatatgcagcatccaagcacctg

SEQ ID NO: 134521 - DNA, 120 bp, Artificial Sequence
  ENSG00000103067_5 (sequence is synthesized)
ccctgccagggacctcactgtggccaccatggcacagggtttaggactggagacagatgccacagaggatgactttggggtctgggaagtcaagacaatggtagctgttatcctccatct

SEQ ID NO: 134522 - DNA, 120 bp, Artificial Sequence
  ENSG00000103067_6 (sequence is synthesized)
actcaaagagcccagcagtcaattgttttcgaagcccgaggtgataaagcagaaatacgagacggggccttgcagcaaggctgatgtggtggacagtgagactgtggtacgggctcgtgg

SEQ ID NO: 134523 - DNA, 120 bp, Artificial Sequence
  ENSG00000103067_7 (sequence is synthesized)
gttgccgtggcagtcatcagaccaggacgtggctcgcttcttcaaagggctcaacgtggccaggggtggtgtagcactctgcctcaacgcccagggccgcagaaatggcgaggccctcat

SEQ ID NO: 134524 - DNA, 120 bp, Artificial Sequence
  ENSG00000103067_8 (sequence is synthesized)
ccgctttgtggacagcgagcagcgggacctagcgctgcagagacacaagcaccacatgggcgtccgctatattgaggtgtataaagcgacaggggaggagtttgtaaagattgcaggggg

SEQ ID NO: 134525 - DNA, 120 bp, Artificial Sequence
  ENSG00000103067_9 (sequence is synthesized)
cacatcactagaggtggctcgtttcttgtcacgggaagaccaagtgatcctgcggctgcggggactgcccttctcggctgggccaacggacgtgcttggcttcctggggccagagtgccc

SEQ ID NO: 134526 - DNA, 120 bp, Artificial Sequence
  ENSG00000103067_10 (sequence is synthesized)
agtgactgggggtaccgaggggctgctctttgtgcgccatcctgatggccggccgactggtgatgccttcgccctctttgcttgtgaggagctggcacaggctgcactgcgcaggcacaa

SEQ ID NO: 134527 - DNA, 120 bp, Artificial Sequence
  ENSG00000103067_11 (sequence is synthesized)
gggcatgctgggtaagcgatacattgaactcttccggagcactgcagccgaagtgcagcaggtcttgaaccgctatgcatccggcccactccttcctacactgactgccccactgctgcc

SEQ ID NO: 134528 - DNA, 120 bp, Artificial Sequence
  ENSG00000103067_12 (sequence is synthesized)
catccccttcccactggcacctgggactgggagggactgtgtacgcctccgaggcctgccctacacggccaccattgaagacatcctgagctttctgggggaggcagcagctgacattcg

SEQ ID NO: 134529 - DNA, 120 bp, Artificial Sequence
  ENSG00000103067_13 (sequence is synthesized)
gccccacggtgtacacatggtgctcaaccagcagggccggccatcgggcgatgccttcattcagatgacatcagcagagcgagccctagctgctgctcagcgttgccataagaaggtgat

SEQ ID NO: 134530 - DNA, 120 bp, Artificial Sequence
  ENSG00000103067_14 (sequence is synthesized)
cttgggccgcagtggcatgtcccctccaccctgcaagctgccctgcctctcaccacctacctacaccaccttccaagccaccccaacgctcattcccacggagacggcagctctataccc

SEQ ID NO: 134531 - DNA, 120 bp, Artificial Sequence
  ENSG00000103067_15 (sequence is synthesized)
ctcttcagcactgctcccagctgccagggtgcctgctgcccccacccctgttgcctactatccagggccagccactcaactctacctgaactacacagcctactacccaagccccccagt

SEQ ID NO: 134532 - DNA, 120 bp, Artificial Sequence
  ENSG00000103067_16 (sequence is synthesized)
ctcccccaccactgtgggctacctcactacacccactgctgccctggcctctgctcccacctcagtgttgtcccagtcaggagccttggtccgcatgcagggtgtcccatacacggctgg

SEQ ID NO: 134533 - DNA, 120 bp, Artificial Sequence
  ENSG00000103067_17 (sequence is synthesized)
tatgaaggatctgctcagcgtcttccaggcctaccagctacccgctgatgactacaccagtctgatgcctgttggtgacccacctcgcactgtgttacaagcccccaaggaatgggtgtg

SEQ ID NO: 134534 - DNA, 120 bp, Artificial Sequence
  ENSG00000103067_18 (sequence is synthesized)
tttgtaggagagaaagccaggaggtaagagccagctgatatcctcggcgaacatgtctctcctgagtccagaagaccagcaccctcaacctggtagcttctttctggcttgtcaaagctc

SEQ ID NO: 134535 - DNA, 120 bp, Artificial Sequence
  ENSG00000103067_19 (sequence is synthesized)
tcagaaggtacctagaggagcccaagccccagctccatcctccacttattctgcctgtttcccccaaagacaatggctggaccctgcatgcagggctgggggtggaatggggctaaccag

SEQ ID NO: 134536 - DNA, 120 bp, Artificial Sequence
  ENSG00000103067_20 (sequence is synthesized)
ctcctgatggcctgagccaggcatcttgactggcacctggagagcccttaagtctgtcctggctgtggcccatgccgacagatatcgtggggctgacaggtccacggcaggcttgctttc

SEQ ID NO: 134537 - DNA, 120 bp, Artificial Sequence
  ENSG00000103067_21 (sequence is synthesized)
ttttataaaatggaagctctggtaccttcaatgtatgactcctgggagaatcaagggtccatctgagcctctgagtaaagatcccaatgttctacctctccctgtccctcttgtagggga

SEQ ID NO: 134538 - DNA, 120 bp, Artificial Sequence
  ENSG00000103067_22 (sequence is synthesized)
tagggaggcagagagagccagcccctaccctcagagtatctggacctcagagaccatgttgtgccaggggtggtcccacctaaagatgctagcccctctccaggtgggcataaggagtaa

SEQ ID NO: 134539 - DNA, 120 bp, Artificial Sequence
  ENSG00000103067_23 (sequence is synthesized)
cagatggcaaaaccacaaactattttgatggactgtgctgcagtatcaccagaagacattagggggcagtaggcccccacacaaaaccttcaggcttgaattttaaaggggaggactttc

SEQ ID NO: 134540 - DNA, 120 bp, Artificial Sequence
  ENSG00000103067_24 (sequence is synthesized)
tgccaacttttcttgtatgccttgggaaagccagttgccctgaacccagcagacaccatggaatgtcctttgcacgcattaaatggtacagaactgaagcctcggaagcaatttggaact

SEQ ID NO: 134541 - DNA, 120 bp, Artificial Sequence
  ENSG00000103067_25 (sequence is synthesized)
cgatcttctcttccttaaatgaaaagttattgaccaaatggactttttaaaagacacaggacccttaactttgccccaaagtgaggggctccacaccaaccccaggcggaggaacactca

SEQ ID NO: 134542 - DNA, 120 bp, Artificial Sequence
  ENSG00000103067_26 (sequence is synthesized)
gacagattaaggatactgttgacctgtcactgtttattatttcagcactaaaactgaggagcctcaactgctggctcttcttccctttgtatttgtgtaaggagcactgcactcccataa

SEQ ID NO: 134543 - DNA, 120 bp, Artificial Sequence
  ENSG00000103067_27 (sequence is synthesized)
aaggttttaaaatacaaaatgtacaagaacacacaattccaagtgctgtaaacataactgagaaccagttcctttactaaacatccattttataaaacacaaggtttcaatttgagccca

SEQ ID NO: 134544 - DNA, 120 bp, Artificial Sequence
  ENSG00000103067_28 (sequence is synthesized)
gtgggtgggtaatatggacacatacaagactgcgttatctgctaagtccctgagtgtactgtgtcttcgtgtctgtgctaggatgagtttggaatgtgggtatgtgtctgtctatgtctg

SEQ ID NO: 134545 - DNA, 120 bp, Artificial Sequence
  ENSG00000103067_29 (sequence is synthesized)
gactgggaatctgtatgtgcacacatgaactgggccaaaacaaatgtgtatgctggtctccagcatgtgtctatggaggggagttgggcccaggagtaaacaggattagtgcttatgcta

SEQ ID NO: 134546 - DNA, 120 bp, Artificial Sequence
  ENSG00000103067_30 (sequence is synthesized)
agatgtcttcactgtcacttctctgcccataggtttaggactggagacagatgccacagaggatgactttggggtctgggaagtcaagacaatggtagctgttatcctccatctactcaa

SEQ ID NO: 134547 - DNA, 120 bp, Artificial Sequence
  ENSG00000103067_31 (sequence is synthesized)
cgagacggggccttggtgagtgtgggagcaggggctgggggtgacaacagctgaatagctctgacagcactgtgccctgcccctacagcagcaaggctgatgtggtggacagtgagactg

SEQ ID NO: 134548 - DNA, 120 bp, Artificial Sequence
  ENSG00000103067_32 (sequence is synthesized)
tccctcactgcctgtcacctgttctcagggatgacaaatgcctattgctcctccccactgtgaccttctctaagagaccacgggggaatcctctttgtcatttctttttttttttttttt

SEQ ID NO: 134549 - DNA, 120 bp, Artificial Sequence
  ENSG00000103067_33 (sequence is synthesized)
aagagcgggcgtcgagactcaggctgaagaggaaaaagggcctagaggctgcacagatgaggtcgccaggaggggcgagaaggagaccgagtagcgcccagaccttcgggcggggacgct

SEQ ID NO: 134550 - DNA, 120 bp, Artificial Sequence
  ENSG00000103067_34 (sequence is synthesized)
cttcactacggcgctcattctatgtctgactcttgagtgtaattagtgtaagtcctttttatacactcacgttctttcatcttccaacaactcttgtggttcctgatgaggaggcaccac

SEQ ID NO: 134551 - DNA, 120 bp, Artificial Sequence
  ENSG00000103067_35 (sequence is synthesized)
gatgatgattccttgtctgttccagaagggctcccggcccttcacttggggagtttgctggaggagagctgggttgccttgctctgtcagccccaagttgtaaagtgtcacagaattggc

SEQ ID NO: 134552 - DNA, 120 bp, Artificial Sequence
  ENSG00000103067_36 (sequence is synthesized)
agggagggttcgtgggtcactgattagtgtttatacttctccagcaaggatggaggctgggggagggctgggcagcctcaggagtgccaccccctctatgagcaaacagctcagtgccag

SEQ ID NO: 134553 - DNA, 120 bp, Artificial Sequence
  ENSG00000103067_37 (sequence is synthesized)
ccggtcaataggatgtgggtcaaagctcatgctgcccctgatgtccaagtgtggagctctgtccttggagtttctctgcccctcggttggtcagacctggaggcggggctgccattgacc

SEQ ID NO: 134554 - DNA, 120 bp, Artificial Sequence
  ENSG00000103067_38 (sequence is synthesized)
atgagccttctgggcctcaggcaggcctgggcctcccccacctgtctgagggtggtacccggtcaaagacaggtttaacctgctttgccccgccccttcccacctgcttgtcccactcca

SEQ ID NO: 134555 - DNA, 120 bp, Artificial Sequence
  ENSG00000103067_39 (sequence is synthesized)
tatgtgattgccctcatttggcctggaggaggtgacagtggactggaacagggttggggggtgaggggaagggacatagggctaggctcaacaggcgtggcctcttattcccaggcagga

SEQ ID NO: 134556 - DNA, 120 bp, Artificial Sequence
  ENSG00000103067_40 (sequence is synthesized)
tagggctgaacatctggctgaaccagctttgcagcctgcctccttcctcctaccctcacttcctgcctgcccagctgtgaatctgtgtgtttctctctccccattccctatccccagttc

SEQ ID NO: 134557 - DNA, 120 bp, Artificial Sequence
  ENSG00000103067_41 (sequence is synthesized)
gactgtggtacgggctcgtgggttgccgtggcagtcatcagaccaggacgtggctcgcttcttcaaagggctcaacgtggccaggtgggtgtggcagggtgggtgggcccaattggacag

SEQ ID NO: 134558 - DNA, 120 bp, Artificial Sequence
  ENSG00000103089_0 (sequence is synthesized)
agaggcgctcagggtggcagcagagcagacgccgggctgcgcgctgggagctgcggtctccggccatggcccccgctccgccccccgccgcctccttctcgccctccgaggtccagcggc

SEQ ID NO: 134559 - DNA, 120 bp, Artificial Sequence
  ENSG00000103089_1 (sequence is synthesized)
gcgcgtgctgggtccgccgcggggcccgcctctacgacctctccagcttcgtgcggcaccacccggggggcgagcagctgctgcgggccagggcgggccaggacatcagcgccgacctgg

SEQ ID NO: 134560 - DNA, 120 bp, Artificial Sequence
  ENSG00000103089_2 (sequence is synthesized)
gcgccgacctggacgggccgccgcacaggcactcggccaacgcgcgccgctggctggagcagtactacgtgggagagctccgcggggagcagcagggctccatggagaacgagcctgtag

SEQ ID NO: 134561 - DNA, 120 bp, Artificial Sequence
  ENSG00000103089_3 (sequence is synthesized)
cccttgaggaaactcagaagacagatcctgctatggaaccacggttcaaagtggtggattgggacaaggacctggtggactggcgaaagcctctcctgtggcaggtgggccacttgggag

SEQ ID NO: 134562 - DNA, 120 bp, Artificial Sequence
  ENSG00000103089_4 (sequence is synthesized)
agaagtacgatgagtgggttcaccagccggtgaccaggcccatccgcctcttccactcagacctcattgagggcctctctaagactgtctggtacagtgtccccatcatctgggtgcccc

SEQ ID NO: 134563 - DNA, 120 bp, Artificial Sequence
  ENSG00000103089_5 (sequence is synthesized)
tggtgctgtatctcagctggtcctactaccgaacctttgcccagggcaacgtccgactcttcacgtcatttacaacagagtacacggtggcagtgcccaagtccatgttccccgggctct

SEQ ID NO: 134564 - DNA, 120 bp, Artificial Sequence
  ENSG00000103089_6 (sequence is synthesized)
tcatgctggggacattcctctggagcctcatcgagtacctcatccaccgcttcctgttccacatgaagccccccagcgacagctattacctcatcatgctgcacttcgtcatgcacggcc

SEQ ID NO: 134565 - DNA, 120 bp, Artificial Sequence
  ENSG00000103089_7 (sequence is synthesized)
agcaccacaaggcacccttcgacggctcccgcctggtcttcccccctgtgccagcctccctggtgatcggcgtcttctacttgtgcatgcagctcatcctgcccgaggcagtagggggca

SEQ ID NO: 134566 - DNA, 120 bp, Artificial Sequence
  ENSG00000103089_8 (sequence is synthesized)
ctgtgtttgcggggggcctcctgggctacgtcctctatgacatgacccattactacctgcactttggctcgccgcacaagggctcctacctgtacagcctgaaggcccaccacgtcaagc

SEQ ID NO: 134567 - DNA, 120 bp, Artificial Sequence
  ENSG00000103089_9 (sequence is synthesized)
accactttgcacatcagaagtcaggatttggtatcagcactaaattgtgggattactgtttccacaccctcactccagagaaaccccacctgaagacgcagtgacaactcccaccccctc

SEQ ID NO: 134568 - DNA, 120 bp, Artificial Sequence
  ENSG00000103089_10 (sequence is synthesized)
tgccctcagcccggccctggccccttcccgacccccacccgccattcagaccccattaagaaggttggcttggccaggcaggatgggctgtgtccggccctgcagcctagtggaaggtgc

SEQ ID NO: 134569 - DNA, 120 bp, Artificial Sequence
  ENSG00000103089_11 (sequence is synthesized)
tgagggggccctgaggcaggaccgccctcctgacccctggtaggagggtcacatccacttggtggccaggtggcccttggtgacccacttcttcctggagcgtccctgcctagagctcag

SEQ ID NO: 134570 - DNA, 120 bp, Artificial Sequence
  ENSG00000103089_12 (sequence is synthesized)
cccacaggactgcttcaggccgtggccacaggtagcagccgcaaggggaaatgaagaaaactgagccctcgtggccacctgtgtcacccttgtgccttagcctcatgggctgcctaggag

SEQ ID NO: 134571 - DNA, 120 bp, Artificial Sequence
  ENSG00000103089_13 (sequence is synthesized)
ctgcctgcacggcacagctcgctttcacagtcagaagtgggtctgtgggatctgtggtccctgtcctccctgctgtcccttctggggaggctttggtggctctgaggtggacaaagagct

SEQ ID NO: 134572 - DNA, 120 bp, Artificial Sequence
  ENSG00000103089_14 (sequence is synthesized)
ctcgcaagaagagacagcgtgatgcctcccacagtccaccccagaccctggggcagcccctctggccctgccagctgcctgcgtcgttgggcccagggtggctggcaggagtcccagctg

SEQ ID NO: 134573 - DNA, 120 bp, Artificial Sequence
  ENSG00000103089_15 (sequence is synthesized)
cttgctttaggacctggcagcttttcttgccgtccctcccctgcctccagaatcacagcccttctccccaagggaggctgaggaggcttctccaccagtggcagccccaccccgtccctg

SEQ ID NO: 134574 - DNA, 120 bp, Artificial Sequence
  ENSG00000103089_16 (sequence is synthesized)
gccattcttggcctccaccccgctcaggcccctactcgggcgctcccagaaggagccacctctcagtgcctcacctccccctgcctcccagcctccgcagatgaggttcctgccccttcc

SEQ ID NO: 134575 - DNA, 120 bp, Artificial Sequence
  ENSG00000103089_17 (sequence is synthesized)
tcctcgtaaccaaaaccctcactgctcccaggacggtcttatttataaaccagatacatgttcttagtctggtcccagaccaaggagctggtcagacggccctttctaatcctacatgtt

SEQ ID NO: 134576 - DNA, 120 bp, Artificial Sequence
  ENSG00000103089_18 (sequence is synthesized)
gagcttatgtaaaaaatgttgtttcctcctgtttttggttcctttcttacccacaaaccattactacttgaaacttaaaaaactcgccaagtgtaaaggctaaagagaagcagtttgacg

SEQ ID NO: 134577 - DNA, 120 bp, Artificial Sequence
  ENSG00000103089_19 (sequence is synthesized)
gaccttgtgatttgtactgtttgctgcggagctatttaaagattttggaataaatatacaaaactacggttgtgaaataaaaacttaaattgtatattttgaaaaataaaacactgaaaa

SEQ ID NO: 134578 - DNA, 120 bp, Artificial Sequence
  ENSG00000103089_20 (sequence is synthesized)
ggacacctctagtgacacttccgggtcatcccgccacagaggctgcattaacctcagttgccctcagtgccttgctctcccagacaacatcaggcctcagtctaggtgccctgtctccag

SEQ ID NO: 134579 - DNA, 120 bp, Artificial Sequence
  ENSG00000103089_21 (sequence is synthesized)
aatgcccctctagccaggggcacggcatttagggatgggatacctgtctagcacctgacaaattccagagtcacagtggcctctataagatgggctctgagccgccagcacaccccaccc

SEQ ID NO: 134580 - DNA, 120 bp, Artificial Sequence
  ENSG00000103089_22 (sequence is synthesized)
atcctgcccatcctgcccatcccgcccatcccatgttcctttgcaatctgccaggtcccttcctggctcacaaatgggaagtaagacagtctctccagatcttccagacgtggtggcccg

SEQ ID NO: 134581 - DNA, 120 bp, Artificial Sequence
  ENSG00000103089_23 (sequence is synthesized)
ccctccccaaagccaccaaaggtgccaagcctacgcagtggaatgtctgggccgctgtgcccctgtcctctgcagggagtggccagggtttggccagctgccggggcccctggctgcctc

SEQ ID NO: 134582 - DNA, 120 bp, Artificial Sequence
  ENSG00000103089_24 (sequence is synthesized)
actcttcacgtcatttacaacaggtaatgccagtttctttcctgacttgccctgaggatcctagagggaggagacctcagtgctttccctggcccagagtttctgagagcacagaacccc

SEQ ID NO: 134583 - DNA, 120 bp, Artificial Sequence
  ENSG00000103089_25 (sequence is synthesized)
aaagaagaattttgtctgactcccatctaccccccaaatggatacaaaacccaacaacacatcagcagaaactaaatggaatcatcgggtggcatagcaataaaaaaagagagagagaga

SEQ ID NO: 134584 - DNA, 120 bp, Artificial Sequence
  ENSG00000103091_0 (sequence is synthesized)
gtgtcggggctgattctctggctgtgtggggcgcacggtcccgggatactggggacggcggggtgggagggcgccgtcctggggccgcggcggccgggcgggggagatggcggcgcgatg

SEQ ID NO: 134585 - DNA, 120 bp, Artificial Sequence
  ENSG00000103091_1 (sequence is synthesized)
gagcagcgaaaacgtggttgtagagttccgtgactcccaggcaactgcgatgtctgtggactgtcttgggcagcatgcagtgctttctggccgcagattcttatacatcgtcaatctaga

SEQ ID NO: 134586 - DNA, 120 bp, Artificial Sequence
  ENSG00000103091_2 (sequence is synthesized)
tgcccctttcgaaggtcaccgaaagatctctcgccagagcaaatgggacattggagctgtgcagtggaatcctcatgacagctttgcacactattttgcggcttcgagtaaccaacgagt

SEQ ID NO: 134587 - DNA, 120 bp, Artificial Sequence
  ENSG00000103091_3 (sequence is synthesized)
agacctttacaagtggaaagacggcagtggggaagttggcacaaccttacaaggccacactcgtgtcatcagcgacttggactgggcggtgtttgagcctgacctcctggttaccagctc

SEQ ID NO: 134588 - DNA, 120 bp, Artificial Sequence
  ENSG00000103091_4 (sequence is synthesized)
tgtggacacctacatctacatttgggatatcaaagacacaaggaaacctactgttgcactgtctgctgttgcgggtgcctcccaggtcaaatggaataaaaaaaatgctaactgccttgc

SEQ ID NO: 134589 - DNA, 120 bp, Artificial Sequence
  ENSG00000103091_5 (sequence is synthesized)
caccagccatgacggcgatgtgcggatatgggataagaggaaacccagtacagcagtggaatatctagccgcccacctctccaaaatccatggcctggactggcacccagacagcgagca

SEQ ID NO: 134590 - DNA, 120 bp, Artificial Sequence
  ENSG00000103091_6 (sequence is synthesized)
cattcttgctacctccagtcaagacaattctgtgaagttctgggattaccgccagcctcggaaatacctcaatattcttccttgccaggtgcctgtctggaaggccagatacacaccttt

SEQ ID NO: 134591 - DNA, 120 bp, Artificial Sequence
  ENSG00000103091_7 (sequence is synthesized)
cagcaatggattggtgactgtgatggttccccagctgcggagggaaaacagccttctcctgtggaatgtctttgacttgaacaccccagtccacaccttcgtggggcatgatgatgtggt

SEQ ID NO: 134592 - DNA, 120 bp, Artificial Sequence
  ENSG00000103091_8 (sequence is synthesized)
cctggagttccagtggaggaagcagaaggaagggtccaaggactatcaactggtgacgtggtcccgggatcagaccttgagaatgtggcgggtggattcccagatgcagaggctttgtgc

SEQ ID NO: 134593 - DNA, 120 bp, Artificial Sequence
  ENSG00000103091_9 (sequence is synthesized)
aaatgacatattagatggtgttgatgagttcattgagagtatttcccttctgccggaacctgagaagaccctgcacactgaagatacagatcaccagcacactgcaagccatggggagga

SEQ ID NO: 134594 - DNA, 120 bp, Artificial Sequence
  ENSG00000103091_10 (sequence is synthesized)
agaagccctaaaagaagatccccctagaaatctcctggaagagaggaaatcagatcaactggggctgcctcagaccttgcagcaggaattctccctgatcaatgtgcaaatccggaatgt

SEQ ID NO: 134595 - DNA, 120 bp, Artificial Sequence
  ENSG00000103091_11 (sequence is synthesized)
caatgtggagatggatgcggcagacaggagctgcacagtgtctgtgcactgcagcaaccatcgtgtcaagatgctggtgaagttccctgcacagtacccaaacaacgccgccccttcctt

SEQ ID NO: 134596 - DNA, 120 bp, Artificial Sequence
  ENSG00000103091_12 (sequence is synthesized)
ccagtttattaaccccacaaccatcacatccaccatgaaagctaagctgctgaagatcctgaaggacacagccctgcagaaagtgaagcgtggccagagctgcctggagccctgcctgcg

SEQ ID NO: 134597 - DNA, 120 bp, Artificial Sequence
  ENSG00000103091_13 (sequence is synthesized)
ccagctcgtctcctgccttgagtcctttgtgaaccaggaagacagcgcttccagcaacccgtttgcactccccaactctgtcactccccccttaccgacgtttgcgcgggtgaccacggc

SEQ ID NO: 134598 - DNA, 120 bp, Artificial Sequence
  ENSG00000103091_14 (sequence is synthesized)
ttacgggtcgtaccaggacgccaacattccctttcctaggacttctggggccaggttctgcggagcaggttacctggtatatttcacaaggcccatgacaatgcatcgggcggtgtctcc

SEQ ID NO: 134599 - DNA, 120 bp, Artificial Sequence
  ENSG00000103091_15 (sequence is synthesized)
cacagagcctactccgagatctctctcagccttgtctgcttatcacactggcttgatcgcgcccatgaagatccgcacagaggcccctgggaaccttcgtttatacagtgggagccccac

SEQ ID NO: 134600 - DNA, 120 bp, Artificial Sequence
  ENSG00000103091_16 (sequence is synthesized)
tcgcagcgagaaagagcaggtctccatcagctccttctactacaaggagcggaaatcaagacgatggaaaagtaagcgtgagggatcagactctggcaatcgacagatcaaggctgctgg

SEQ ID NO: 134601 - DNA, 120 bp, Artificial Sequence
  ENSG00000103091_17 (sequence is synthesized)
gaaagtcatcatccaggatattgcttgcctcctgcctgttcacaaatcgctgggagagctgtacatattgaatgtgaatgatattcaggaaacatgtcagaagaatgccgcctctgcctt

SEQ ID NO: 134602 - DNA, 120 bp, Artificial Sequence
  ENSG00000103091_18 (sequence is synthesized)
gctcgttggaagaaaggatcttgtccaggtttggtcgctggctacggtagctacagatctttgccttggtccgaaatctgacccagatttggaaacaccctgggctcgacatccatttgg

SEQ ID NO: 134603 - DNA, 120 bp, Artificial Sequence
  ENSG00000103091_19 (sequence is synthesized)
gcggcagctgctggagtccctgttggctcactattgccggctccgggatgttcagacactggcgatgctctgtagcgtgtttgaagcccagtctcggcctcaggggctaccaaacccctt

SEQ ID NO: 134604 - DNA, 120 bp, Artificial Sequence
  ENSG00000103091_20 (sequence is synthesized)
tgggccttttcctaaccgttcttctaatcttgtggtgtcccatagtcgatatcctagctttacctcttctggttcctgctccagtatgtcagacccagggctcaacactggcggctggaa

SEQ ID NO: 134605 - DNA, 120 bp, Artificial Sequence
  ENSG00000103091_21 (sequence is synthesized)
catagcgggaagagaggcagagcacttgtcctccccttggggagaatcctcaccagaagagctccgctttgggagtctgacctacagtgatccccgtgagcgagaacgcgaccagcatga

SEQ ID NO: 134606 - DNA, 120 bp, Artificial Sequence
  ENSG00000103091_22 (sequence is synthesized)
taaaaataaaaggctcctggaccccgccaatacccagcaatttgatgactttaagaaatgctatggggaaatcctctaccgttggggtctgagagagaagcgagctgaagtgttgaagtt

SEQ ID NO: 134607 - DNA, 120 bp, Artificial Sequence
  ENSG00000103091_23 (sequence is synthesized)
tgtctcctgtcctcctgaccctcacaaagggatcgagttcggcgtgtactgcagccactgccggagtgaggtccgtggcacgcagtgtgccatctgcaaaggcttcacgttccagtgtgc

SEQ ID NO: 134608 - DNA, 120 bp, Artificial Sequence
  ENSG00000103091_24 (sequence is synthesized)
gggtgccactgcctgcttgaaagcactttctgaacctacagaagttgggtattgtctgaaatcccagaggacccataagtgccggtgacaagctgtctgtcaggggagaggctccagaac

SEQ ID NO: 134609 - DNA, 120 bp, Artificial Sequence
  ENSG00000103091_25 (sequence is synthesized)
ctgggttcgtccccagtgagaccggaggatgatcccccaaggactgcgcagcatcagctcttggtgggcctctgccttctcttctgtttggccacctggtgtggatgtcactgtgtgaag

SEQ ID NO: 134610 - DNA, 120 bp, Artificial Sequence
  ENSG00000103091_26 (sequence is synthesized)
ataaggacagaagtgcagagctgcgctttgtgtgttgtctatgtcggctgagctaccaaggtggaagttttcatggagaaaagcacctggctccagggccagtgttacagtgttaccctg

SEQ ID NO: 134611 - DNA, 120 bp, Artificial Sequence
  ENSG00000103091_27 (sequence is synthesized)
taaggtgttagccttaaaccaccgagcagcgttctcttgatgccagtgcagagaccagagtcagatgcccgaggacagtgggtaggaatttcatcaacaaatggacctatggcatcatgg

SEQ ID NO: 134612 - DNA, 120 bp, Artificial Sequence
  ENSG00000103091_28 (sequence is synthesized)
ctttagaagctggtacatttactgagctgatggacagtggccttctaaaatatgacacttaaattgtaaatatgcactgtacttaaggattcttaagatgtatttttttgttatttctcc

SEQ ID NO: 134613 - DNA, 120 bp, Artificial Sequence
  ENSG00000103091_29 (sequence is synthesized)
tccagctgctatcccttggctaataaaattctagtaatttgaaaaaaaaaaaaaagagagaaagttaaacaacattatggtgaatcattttttaccctaattctaattgaaggtagctat

SEQ ID NO: 134614 - DNA, 120 bp, Artificial Sequence
  ENSG00000103091_30 (sequence is synthesized)
tttgaataggaccaaagtcagtgctccgatttttaaaggaaatgctgatttacttttgtcatctgacaagagaaaatggaatttgacatttaaggttcttcctagccccaagagtcttat

SEQ ID NO: 134615 - DNA, 120 bp, Artificial Sequence
  ENSG00000103091_31 (sequence is synthesized)
ttcttctagcaaaaggaggacaagattgccgtgcagcatggatagaaaagtctccctggccaggccccatggctcatgcctgtaatcccacactttagaaggcaaaagtgaggggatcac

SEQ ID NO: 134616 - DNA, 75 bp, Artificial Sequence
  ENSG00000103091_32 (sequence is synthesized)
ctttagaaggcaaaagtgaggggagatcccatctctgcaaaaaatttaaaaaataggccgggcacggtggctcat

SEQ ID NO: 134617 - DNA, 120 bp, Artificial Sequence
  ENSG00000103091_33 (sequence is synthesized)
agcctgggcaacagagtgagaccctgtcaataaaccaaagtcttccttgcctctgttcagatgggctgggttccagtgagtgccctcactcttcctttaggctccctcgcaaactgcctg

SEQ ID NO: 134618 - DNA, 120 bp, Artificial Sequence
  ENSG00000103091_34 (sequence is synthesized)
gctccctcgcaaactgcctgtgtttgcctgtgttctgagtagttataacatctgtgtccaccaattcttcagaatgattttcttttttaaagttaaattttttttttttttttttagaga

SEQ ID NO: 134619 - DNA, 86 bp, Artificial Sequence
  ENSG00000103091_35 (sequence is synthesized)
tttttttttttttttagagagaagtggtgatgcaatcatagctcactgtagcctctatcacctgagctcaagtgatcctcccacct

SEQ ID NO: 134620 - DNA, 120 bp, Artificial Sequence
  ENSG00000103091_36 (sequence is synthesized)
tgtgcaccaccatgcctggctaatttcagaatgattttcaacttcacattttgtatgtgccagtgaaaagaaatcttttttattatttctactgaaatatctatttctgtttcttagaat

SEQ ID NO: 134621 - DNA, 120 bp, Artificial Sequence
  ENSG00000103091_37 (sequence is synthesized)
cttagaattttacagttccaagtagattagcttagggactaggacatgtctcataatgggagagcattgcatattcatgtgtttcaaactccaggtcaggacccattagtggattgtgac

SEQ ID NO: 134622 - DNA, 120 bp, Artificial Sequence
  ENSG00000103091_38 (sequence is synthesized)
attgatctagtgcggaaaaccagcatttaaaaaaatgaaatggtgtaagagaaaaatgatcacaatgtaccatacatagctaaggaaaatgttttgtgtaacttgtttacgtgtgtgcag

SEQ ID NO: 134623 - DNA, 120 bp, Artificial Sequence
  ENSG00000103091_39 (sequence is synthesized)
cacatgtgtgcacaggtgtataccggatcatagcgtaaattcatttcttactgaaagttgtagtcaaaacattttcacaacactgttttggatgaagcttatacctcgtcccctgtgtta

SEQ ID NO: 134624 - DNA, 120 bp, Artificial Sequence
  ENSG00000103091_40 (sequence is synthesized)
ctgggcacaaaacttcaggatgtaagaaagaactgagatcctgtgcagtggaaccagaggtttagtgctgggctctggtctgaggtaaggtgccagtgtctcagtagcgtgagcagggcg

SEQ ID NO: 134625 - DNA, 120 bp, Artificial Sequence
  ENSG00000103091_41 (sequence is synthesized)
ggggagccgctgggaggatgacaggagaaggcccagccgggaatttgcatacacaaattctgttgtaatggtgatcacagaataggttggctgatttacacagagagaaaggatctgttg

SEQ ID NO: 134626 - DNA, 120 bp, Artificial Sequence
  ENSG00000103091_42 (sequence is synthesized)
tgttcctcagtgaaatcacaccatttgcagagagcaatcttttcctgttccccactgctcaagttagtgtaaaaacctgtccctatctgtccccatcaagaatgagatgtttttcttgtt

SEQ ID NO: 134627 - DNA, 120 bp, Artificial Sequence
  ENSG00000103091_43 (sequence is synthesized)
ttattgttggaggaacattgactttcaaaattgaaaaaccttaatggtgtgaagaaatttcgagtttaaaatattacataatgtcatccttcaatacggaaattccttttgaatttccaa

SEQ ID NO: 134628 - DNA, 120 bp, Artificial Sequence
  ENSG00000103091_44 (sequence is synthesized)
gttaccagaacaaaagtctaatattttaaaatattcatgtttggaaacaggttggttgtctggttgcgggccatggccgatattctctcagccgcagaatagatgattacaagcacctga

SEQ ID NO: 134629 - DNA, 120 bp, Artificial Sequence
  ENSG00000103091_45 (sequence is synthesized)
ctcttaggccccgtcgggggagggaagacgaccatcgggggcaatcggggcgagcatggacggagtttcggggctccctacgcgggtaggggagtggggtccgccttgtgacactgaggc

SEQ ID NO: 134630 - DNA, 120 bp, Artificial Sequence
  ENSG00000103091_46 (sequence is synthesized)
agagactgcgcatcgtgagtgctgaggggaggcttcccacaatcagggtacggagcgagggcgtgacggcttcccgaggccctagccgcgtgtggcgacttaaggcaactgcgatgtctg

SEQ ID NO: 134631 - DNA, 120 bp, Artificial Sequence
  ENSG00000103091_47 (sequence is synthesized)
ttaaccccacaaccatcacatccaccatgaaagctaagctgctgaaggtgggggtctgggttcccaaattctccttgctgttctgcatcattgtctagatggattagtaaagaagaatga

SEQ ID NO: 134632 - DNA, 120 bp, Artificial Sequence
  ENSG00000103091_48 (sequence is synthesized)
aaactccagtagatgagattcggaagtcatctgtttcgtacacacactagtattagcaacgtaacctctgaacttgccatttactttgtgcagaaaacatcagagcagtggttcttaacc

SEQ ID NO: 134633 - DNA, 120 bp, Artificial Sequence
  ENSG00000103091_49 (sequence is synthesized)
gtgggagagggaaccatttcagcaatgatttcagttagcaaatagctttgcagctttaacagaactctctctgcttgcttttttatttcctgggttttctggccaggcgcggtggctcac

SEQ ID NO: 134634 - DNA, 120 bp, Artificial Sequence
  ENSG00000103091_50 (sequence is synthesized)
gccgggcgggggagatggcggcgcgatggagcagcgaaaacgtggttgtagagttccgtgactcccaggcaactgcgatgtctgtggactgtcttgggcagcatgcagtgctttctggat

SEQ ID NO: 134635 - DNA, 120 bp, Artificial Sequence
  ENSG00000103091_51 (sequence is synthesized)
aaggtcttgccaggttgcccaggctggtcttaactccgggcctcaagcgatgcttctgcctcggcctgcagcactaagagttccagtgtgagctgctgcttccaaccatgaaggcttttt

SEQ ID NO: 134636 - DNA, 120 bp, Artificial Sequence
  ENSG00000103091_52 (sequence is synthesized)
gttgcattagtccctatccttcaggtttcctccggtgactgagatcgttggctgctaatgctaaagagcgactggcatctctctttaagtgggtagacggtggaggagatcagccgcaga

SEQ ID NO: 134637 - DNA, 120 bp, Artificial Sequence
  ENSG00000103091_53 (sequence is synthesized)
ggactccaggcaggactccagtttctccacaatcacaactcttactttttttttttttggacacagaatcttacccggtcactaggttggagtgcagtggcgggatctcggctctctgca

SEQ ID NO: 134638 - DNA, 87 bp, Artificial Sequence
  ENSG00000103091_54 (sequence is synthesized)
gtgacaggtgttagccaccgtgcctggccaggactgttgctttaagaagggtatattaagtgccatttaggatgaagcttgtttttt

SEQ ID NO: 134639 - DNA, 120 bp, Artificial Sequence
  ENSG00000103091_55 (sequence is synthesized)
tttaattgccatttaaatagccactgtggctaatggctatgatattggaaagtacagttcagagtactgagaagtgtggagattagttttcactctcaaggaaaggcaactgcgatgtct

SEQ ID NO: 134640 - DNA, 60 bp, Artificial Sequence
  ENSG00000103091_56 (sequence is synthesized)
gcaactgcgatgtctgtggactgtcttgggcagcatgcagtgctttctgctctgcctccc

SEQ ID NO: 134641 - DNA, 74 bp, Artificial Sequence
  ENSG00000103091_57 (sequence is synthesized)
atatctttataatagagtaatttagattcctctgggtacataccctataatgggattgctgggtcaaatggtat

SEQ ID NO: 134642 - DNA, 74 bp, Artificial Sequence
  ENSG00000103091_58 (sequence is synthesized)
ctggccatatctttataatagagtaatttagattcctctgggtacataccctcaggaatctctcacctctccta

SEQ ID NO: 134643 - DNA, 120 bp, Artificial Sequence
  ENSG00000103091_59 (sequence is synthesized)
tcctggaagagaggaaatcagatcaactggggctgcctcagaccttgcagcaggaattctccctgatcaatgtgcaaatccggaatgtcaatgtggaggcgcggtggctcacgcctgtaa

SEQ ID NO: 134644 - DNA, 120 bp, Artificial Sequence
  ENSG00000103091_60 (sequence is synthesized)
aaaccctgtctccacttaaaaaaaaaaaaaaaaattagcctgtaattccaactactcgagaggctgaggcacaggaatcacttgaacttgagaagcagaggttgcagtgagccaagatcg

SEQ ID NO: 134645 - DNA, 120 bp, Artificial Sequence
  ENSG00000103091_61 (sequence is synthesized)
actccccccttaccgacgtttgcgcgggtgaccacggcttacgggtcgtaccaggacgccaacattccctttcctaggacttctggggccaggttctgcggagcagatctctctcagcct

SEQ ID NO: 134646 - DNA, 120 bp, Artificial Sequence
  ENSG00000103091_62 (sequence is synthesized)
atcacacagtccctggcttagctgacttccacctattaaatgaccccagatacttctaaactgggggaccaaaacaggatgttcagaaatattaaaagaaaaccaaaaagagcaaggcta

SEQ ID NO: 134647 - DNA, 120 bp, Artificial Sequence
  ENSG00000103091_63 (sequence is synthesized)
acaaggccacactcgtgtcatcaggaactttggagattctcagcctaaaccacattaagaagcccgttaatgatgacattctgaagccactggagactcgatgtgctagtgctttggacc

SEQ ID NO: 134648 - DNA, 120 bp, Artificial Sequence
  ENSG00000103091_64 (sequence is synthesized)
ataattgtgggcatgatgtaatttttaaaaagtgcaaattgccaatgaccccaatatgatgagctctgcaattgttggtttccacttgtcaaagtccccattagttacatcctgtcatct

SEQ ID NO: 134649 - DNA, 120 bp, Artificial Sequence
  ENSG00000103091_65 (sequence is synthesized)
agacctgggaaggaccactgagtttgcttttggacagtgcatttcagttcttcagtaaactcccattataagatttatttgagaaagattgaagtcaattaaattgcaaaaaagctgtga

SEQ ID NO: 134650 - DNA, 120 bp, Artificial Sequence
  ENSG00000103091_66 (sequence is synthesized)
ttcaaattcacttattctagtagtttgtagattcctttgaattttttatgtctgtaatcatagaagcattctatgcttgtgcagataaagcatttttcagtgttaaaagttttattgact

SEQ ID NO: 134651 - DNA, 120 bp, Artificial Sequence
  ENSG00000103091_67 (sequence is synthesized)
tctttttctggagtttccatcttctcattttgtcttctccttttggtatcaagtgctaagaatagcaccacttggaaatatgacaggactgcagccagtgtggataattatcattttcaa

SEQ ID NO: 134652 - DNA, 120 bp, Artificial Sequence
  ENSG00000103091_68 (sequence is synthesized)
caccagcacactgcaagccatggggaggaagaaggtaatttgtcaaactgatgtctcaggtaaggtgccactctacgcattgcagagttgtggcagataccccagacctgttctctgttt

SEQ ID NO: 134653 - DNA, 120 bp, Artificial Sequence
  ENSG00000103091_69 (sequence is synthesized)
aaaccttggcacgcacgcgaaggcttggggcgccccggcgcgccctccctccgaggcctccaccacccgcggactcaccactatgcgagctgaaccacctgggtgcgatgtgcagaggta

SEQ ID NO: 134654 - DNA, 120 bp, Artificial Sequence
  ENSG00000103111_0 (sequence is synthesized)
aagtgtgatgccaccgccgctacggggaagtaatggtatccggccaattgagattcggagttaaaacagggatgtgcagatggaggtcggaggagacactgctgccccggcccccggggg

SEQ ID NO: 134655 - DNA, 120 bp, Artificial Sequence
  ENSG00000103111_1 (sequence is synthesized)
cgcggaggacttggaggacacgcagttccccagtgaggaagctagagaaggtggaggggttcacgcggtcccgccggatcccgaagacgagggcctggaggaaacaggatccaaggacaa

SEQ ID NO: 134656 - DNA, 120 bp, Artificial Sequence
  ENSG00000103111_2 (sequence is synthesized)
ggaccagccacccagcccatcaccaccgccccagtcagaggccctgtcaagcacctctcggctctggagtcctgcagcccctgagaatagtcccacatgtagccctgagagtagctctgg

SEQ ID NO: 134657 - DNA, 120 bp, Artificial Sequence
  ENSG00000103111_3 (sequence is synthesized)
aggccagggcggggaccccagtgatgaggagtggcgcagccagcggaagcatgtgtttgtgctgagtgaggctggcaagcccatctactcgcggtatggtagtgtggaggcgctgtcggc

SEQ ID NO: 134658 - DNA, 120 bp, Artificial Sequence
  ENSG00000103111_4 (sequence is synthesized)
taccatgggtgtaatgaccgccctggtgtcctttgtgcagagtgcgggagatgccatccgtgccatctacgctgaggaccacaagctggtgttcctacaacagggcccactgttgctcgt

SEQ ID NO: 134659 - DNA, 120 bp, Artificial Sequence
  ENSG00000103111_5 (sequence is synthesized)
ggccatgtcacggacttctcagtcagcagcccagctgcggggggagctgctagctgtgcacgcacagatcgtgagcacacttacacgtgcaagtgtcgcccgcatcttcgcacacaagca

SEQ ID NO: 134660 - DNA, 120 bp, Artificial Sequence
  ENSG00000103111_6 (sequence is synthesized)
gaactatgacctccgccgcctgctggctggttcagagcgcacactggaccgacttctggacagtatggagcaggacccaggagccctgctcctgggtgccgtgcgctgtgtgccccttgc

SEQ ID NO: 134661 - DNA, 120 bp, Artificial Sequence
  ENSG00000103111_7 (sequence is synthesized)
ccgcccgctgcgagacgcactaggtgcgctcctccgacgttgcacagcgcctggcctggcgctgtcagtgctggcagtaggcggtcgacttataacagcagcccaggagcgaaatgtgct

SEQ ID NO: 134662 - DNA, 120 bp, Artificial Sequence
  ENSG00000103111_8 (sequence is synthesized)
ggccgagtgccggctggacccagctgacctgcagttgctgctcgactgggtgggtgcaccagcctttgcggcgggtgaggcttgggcacctgtgtgcctgccccgcttcaaccctgatgg

SEQ ID NO: 134663 - DNA, 120 bp, Artificial Sequence
  ENSG00000103111_9 (sequence is synthesized)
ttttttctacgcctacgtggcccgcctggatgctatgcctgtctgcctgctgctgcttggcacccaacgtgaagccttccatgccatggccgcctgccggcgcctggttgaagatgggat

SEQ ID NO: 134664 - DNA, 120 bp, Artificial Sequence
  ENSG00000103111_10 (sequence is synthesized)
gcatgcccttggtgccatgcgtgcccttggggaggctgccagcttctctaatgcctcatcagccagtgctcctgcctacagcgtgcaggctgtcggggcgccgggcctccggcacttcct

SEQ ID NO: 134665 - DNA, 120 bp, Artificial Sequence
  ENSG00000103111_11 (sequence is synthesized)
gtataagccgctggacatccctgaccaccaccgccaactgccccagtttaccagccctgagctagaggccccctacagcagagaggaggagcggcagcggctgtcggacctgtaccaccg

SEQ ID NO: 134666 - DNA, 120 bp, Artificial Sequence
  ENSG00000103111_12 (sequence is synthesized)
cctgcatgctcgtctccacagcacctcccgacccctgcgcctcatttaccacgtggctgagaaggagacactactggcctgggtgacctccaaattcgagctctatacctgcctcagccc

SEQ ID NO: 134667 - DNA, 120 bp, Artificial Sequence
  ENSG00000103111_13 (sequence is synthesized)
tctggtgaccaaggcaggtgcaatcttggtagtgaccaaactcctgcgctgggtgaagaaagaggaggaccggctcttcattcgttacccacccaagtactccacaccaccagccacctc

SEQ ID NO: 134668 - DNA, 120 bp, Artificial Sequence
  ENSG00000103111_14 (sequence is synthesized)
tacggaccaagctgcccataatggcttgttcactggactctgatagttggagctcccagaccaggcagtgctgggagcaaccacctttgttttttaccttctgtctaccctggaaatgtg

SEQ ID NO: 134669 - DNA, 120 bp, Artificial Sequence
  ENSG00000103111_15 (sequence is synthesized)
tgtgggggtgtgtctgtggccagtcattgtctccctaagcaatggggcaaggtctgagggcccaccgatgagagagatggtggcagccgccaggcgagcaggctgctttccctgcccagt

SEQ ID NO: 134670 - DNA, 120 bp, Artificial Sequence
  ENSG00000103111_16 (sequence is synthesized)
catgcacctccccctctggggaaatccttaggcctccctctcccttccctctgtctcatctcctccacttggatgatgctctagcctctgtcagggactgtcccctccaaacttgcttcc

SEQ ID NO: 134671 - DNA, 120 bp, Artificial Sequence
  ENSG00000103111_17 (sequence is synthesized)
gtggtctgcctcctagttgaatctcagccctgagtgtccagatctggccaaggtgtctagggtggcccacgggggtgctggaattggcacttcagggccaggctatgcttgggactggcc

SEQ ID NO: 134672 - DNA, 120 bp, Artificial Sequence
  ENSG00000103111_18 (sequence is synthesized)
tgagggtattttaaagaaaaaaactacataaaaggcctaaaagtaagacccacaaggatattcctttgcccttcttgtacttttttcatctttaccctgccagaaatgacccgccctcaa

SEQ ID NO: 134673 - DNA, 120 bp, Artificial Sequence
  ENSG00000103111_19 (sequence is synthesized)
tgctggctgctgctaacattaatgagaaggtggccttcagtgtccacctgtggaacccaggacacagcacctgactgcacacagtggctgaaatccagcatttttacataggagatgcac

SEQ ID NO: 134674 - DNA, 120 bp, Artificial Sequence
  ENSG00000103111_20 (sequence is synthesized)
ttagcctctaagcctcgttttactcatctgtgaaacagagataagtaaccctctctcatgaactctttgatgaggatttgtaaacgaaaacagactcgaactattgtgtaccaccacata

SEQ ID NO: 134675 - DNA, 120 bp, Artificial Sequence
  ENSG00000103111_21 (sequence is synthesized)
gcacatgcacgtctgtcccagactttgacaacctgcacaagacaagcagcctaaagcaggagagacctccctagggttttgtgtgtgtgcacactaccctcactccccaactggccatta

SEQ ID NO: 134676 - DNA, 120 bp, Artificial Sequence
  ENSG00000103111_22 (sequence is synthesized)
ccctagttctgcccttgtttgtggagttacagcctcaaggttgtagcatgtgtgctggcaatcagggccgcagtgtgttctgcgcctgcccagagctgactcctgatttaaccgctggcg

SEQ ID NO: 134677 - DNA, 120 bp, Artificial Sequence
  ENSG00000103111_23 (sequence is synthesized)
taaccgcgggttgcacgcatgcgtgctgaaaagcctttcaccctcacgtggtttcttttttaaccagtcatcaagcgaggctcgcgcgcaggccccgcgttggaaaatggcggggaagct

SEQ ID NO: 134678 - DNA, 120 bp, Artificial Sequence
  ENSG00000103111_24 (sequence is synthesized)
agggcaagtgggctgcactcctttctctccaaccagggcagaaaggagggaggattcgtcccattacaataatgaaataatgatattctaatttttttaaataaaatgttaagccttttg

SEQ ID NO: 134679 - DNA, 120 bp, Artificial Sequence
  ENSG00000103111_25 (sequence is synthesized)
ttattgaagaaaaacaattttttaaccgttcagcacagtggagataaattaacaggcatattcttatcaccgagattaacttttgtcaactgtagtgtatacgttgttgaaagtaaacaa

SEQ ID NO: 134680 - DNA, 120 bp, Artificial Sequence
  ENSG00000103111_26 (sequence is synthesized)
catgtagttcagtacgaaagtcttcaaacaaaagtggggcggtggggatgttctcataacaatcaccgtgctgcagccaccccttattaacagtaattcccagtgtcgccatttcacacc

SEQ ID NO: 134681 - DNA, 120 bp, Artificial Sequence
  ENSG00000103111_27 (sequence is synthesized)
taacacatatgacactttgatggactcttaaacctcctaatcgaacatggcctcccccacagcctcttttctccagggtattgacttgaatgacaggcaaaggagggtggaggggtgtcg

SEQ ID NO: 134682 - DNA, 90 bp, Artificial Sequence
  ENSG00000103111_28 (sequence is synthesized)
ttgacttgaatgacaggcaaaggagggtggaggggtgtcggcctagacactattggaaattgtattccatccaaaagaaaaaaaaatctc

SEQ ID NO: 134683 - DNA, 66 bp, Artificial Sequence
  ENSG00000103111_29 (sequence is synthesized)
gggcggatcacgaggttctatatatacatatacatatgtgtgtatgtgtatttatatgtatgtatg

SEQ ID NO: 134684 - DNA, 76 bp, Artificial Sequence
  ENSG00000103111_30 (sequence is synthesized)
tatatacacacactaatcagccgggcgcggtggtgtgggcctgtaatcgcagctactcaggaagctgaggcaggag

SEQ ID NO: 134685 - DNA, 90 bp, Artificial Sequence
  ENSG00000103111_31 (sequence is synthesized)
tcccaaggcagtcatgcatttgtatgccactagcatttttttgttatagaaatattcaaagtgtaccaacgtagagaaaatagctttaaa

SEQ ID NO: 134686 - DNA, 120 bp, Artificial Sequence
  ENSG00000103111_32 (sequence is synthesized)
aatattcaaagtgtaccaacgtagagaaaatagctttaaacaaagcccatgtgtacctatcagtatgctttaactgttgtcacctttctgccccacttttatctatctcgaacacccctt

SEQ ID NO: 134687 - DNA, 120 bp, Artificial Sequence
  ENSG00000103111_33 (sequence is synthesized)
tctgcacactctttaaaccactgtattaacaaacacattagactgcatcctgccagacctacccatacagacatcaaagtaatgattattgcttattgcctgacctaggatgtgagctcc

SEQ ID NO: 134688 - DNA, 120 bp, Artificial Sequence
  ENSG00000103111_34 (sequence is synthesized)
atgagaacagagactgtttacctctcgctcccctgcacctaaaacaatgcctgcttggtgtaaagtaagtgctcagtaattttttaatgtgtgaccaatgaaataacttcaagagcagag

SEQ ID NO: 134689 - DNA, 120 bp, Artificial Sequence
  ENSG00000103111_35 (sequence is synthesized)
agctcttttagattagaggcacatactaagtgccagcattcaacaaaagacagacggaaataagacagatgcaaatagatctcatttattaactgtgtaatgcagctgccactgcaatta

SEQ ID NO: 134690 - DNA, 120 bp, Artificial Sequence
  ENSG00000103111_36 (sequence is synthesized)
aaaaaaaaattttagtatcaacctttcaaattcctcaaaattaaagttatgactaacttcaccagcaaaggaaaaattgaaggatgtatcaagttgccatttctagcccatcaaatcggc

SEQ ID NO: 134691 - DNA, 120 bp, Artificial Sequence
  ENSG00000103111_37 (sequence is synthesized)
tttataaagggaagcatagtatctggtattgacgaccttgtagagaaacaggccttttcctgcctcagggaagagagctgactcaaagtaaaggctttgctagaggcagtcggcagagta

SEQ ID NO: 134692 - DNA, 120 bp, Artificial Sequence
  ENSG00000103111_38 (sequence is synthesized)
tttttagcatctaaaatgctcttccacttcggcagtgaccatgcgatgtaatcaaaggagaatacgtaagtgtatggaccaggaatggtcactggagtgttgatgtaggcacaacacaag

SEQ ID NO: 134693 - DNA, 120 bp, Artificial Sequence
  ENSG00000103111_39 (sequence is synthesized)
aagtagtcacagaaattgctaagtctaggtttatgtgtgcatgctgtggagtgtctctgtggtggatttctttttaagaggcagaaaaaaattctaatttaaatgtattaaattataagt

SEQ ID NO: 134694 - DNA, 120 bp, Artificial Sequence
  ENSG00000103111_40 (sequence is synthesized)
tctaatttaaatgtattaaaattaaattataagttgataggattattattgacacacaaggagctccaaaagagatcgtatttttattagagacaagccagttgggattgaaacaaaaat

SEQ ID NO: 134695 - DNA, 120 bp, Artificial Sequence
  ENSG00000103111_41 (sequence is synthesized)
ggaggggggtatagccctgtgtatgttgcacagaaaaagtatctgaatgataaaggcctaagtgataactctggacaaggaatttggattttgggagtagtgcagaggtagaggcatttt

SEQ ID NO: 134696 - DNA, 120 bp, Artificial Sequence
  ENSG00000103111_42 (sequence is synthesized)
tgtgatttattgttctattttttcttctagaaaaatgtaagtagtcatatataattttaaaatataaaggagaagaggcaaaatgttgaatggcacctgaggatcctatattcatattgg

SEQ ID NO: 134697 - DNA, 120 bp, Artificial Sequence
  ENSG00000103111_43 (sequence is synthesized)
atcagtattaacatccaggttttgattgttgtactatggttacctggtagattccctttgtatataggaaatagacactggaatagtaaggagtagtgggtcaagatgtctgcaacttat

SEQ ID NO: 134698 - DNA, 120 bp, Artificial Sequence
  ENSG00000103111_44 (sequence is synthesized)
tgttcagaatcactcacaaatgggaaatctgatataaggacaaaatgggagcactgtggcctatttttacaacttttgtgtacatctgcaattgtttcaaaataaaatgtttaaaagggt

SEQ ID NO: 134699 - DNA, 120 bp, Artificial Sequence
  ENSG00000103111_45 (sequence is synthesized)
gaggcggctcatctcgattggcccagaaagaagacggtcgcgccctatgtactccgggattggctagagcgagccgcgtcccccctcacgccaaccactgggatgtgcagatggaggtcg

SEQ ID NO: 134700 - DNA, 120 bp, Artificial Sequence
  ENSG00000103111_46 (sequence is synthesized)
gttagcagccgtagccagatccgttgaaaggagtgcagagaggtctcattgcgctcccgaacagacctgacgtagatccgaagtggcccgcgccatctcaactatgaggggacacccgta

SEQ ID NO: 134701 - DNA, 120 bp, Artificial Sequence
  ENSG00000103111_47 (sequence is synthesized)
gctggcacgggtaggtctgtctgcctcaggcactatccagccagccagggttgggtccatgtgtgtggatggtcagccagagctctgtcagtggcgggaggtgggggggttcatctctgt

SEQ ID NO: 134702 - DNA, 120 bp, Artificial Sequence
  ENSG00000103111_48 (sequence is synthesized)
gattgacttgctgggatctcagtgactagctggatacttctgtgtcacctgagaggataactgtgggggctgtgtggttgagctgtgtctttctggctctgtgtcagcccttgtaccatc

SEQ ID NO: 134703 - DNA, 120 bp, Artificial Sequence
  ENSG00000103111_49 (sequence is synthesized)
tctacccgcctgcccgtggtctttgctgtgtatctaacctacttgttcctttgtccatcccatcatgtctctgcaaatgtccagattcctccagcttgtccttaccccagtccaggtgcc

SEQ ID NO: 134704 - DNA, 120 bp, Artificial Sequence
  ENSG00000103111_50 (sequence is synthesized)
cacagagtgagcatgtggactcgggcctggtgtgtgtatggtaggagagggcagaagagccccactgtctccctctggtcattcctgatccagctgtacccccccttcttaccccttcct

SEQ ID NO: 134705 - DNA, 120 bp, Artificial Sequence
  ENSG00000103111_51 (sequence is synthesized)
catgattttggatgtctcgtcctattgaaatccgtggggaaatgagcagtaggagtgtgtccaagggggcctgactctataaaggcttttcagaagtttctttcaccgcccgtcaccctc

SEQ ID NO: 134706 - DNA, 120 bp, Artificial Sequence
  ENSG00000103121_0 (sequence is synthesized)
cgaaggtcgccgagccccccacgccgctcttcttagaagtgtgcaaccttgcaccagtagtggacttacacataggctccgttaggacctggcttatgtgctcggcttgtggcttagacg

SEQ ID NO: 134707 - DNA, 120 bp, Artificial Sequence
  ENSG00000103121_1 (sequence is synthesized)
ctgccgtgccccagtggactcactgtgcctccccccacgacggacggaaatgggcccctccaggacaggcggcgcatgcgccttggggcccgcgggcggcgggggcgaggagccgggagc

SEQ ID NO: 134708 - DNA, 120 bp, Artificial Sequence
  ENSG00000103121_2 (sequence is synthesized)
acggtggagcggtggagggcgtcactgggtttcggcgtctggcaagcggttcagctgtctgctccctagcagccggccttcgggtcgggcgtctccgccggctactgccgcttcagttct

SEQ ID NO: 134709 - DNA, 120 bp, Artificial Sequence
  ENSG00000103121_3 (sequence is synthesized)
cccggtgtggccacgagtcgggttgcactgctgtgatccatcctcatctcctaaagatgcatcctgacttatctccacacttgcacactgaagaatgcaacgtcttgattaacttgctta

SEQ ID NO: 134710 - DNA, 120 bp, Artificial Sequence
  ENSG00000103121_4 (sequence is synthesized)
aggaatgtcacaaaaatcacaacattctgaaattttttggttattgtaatgatgttgatcgggagttgagaaaatgcctgaagaatgagtacgtagaaaacaggaccaagagcagggagc

SEQ ID NO: 134711 - DNA, 120 bp, Artificial Sequence
  ENSG00000103121_5 (sequence is synthesized)
atggcattgcaatgcgaaagaaactttttaatcctccagaggaatccgaaaaataaattgtattttcactcgatgccttggctgagagaagacctaaagactctgggttgatacctgaaa

SEQ ID NO: 134712 - DNA, 120 bp, Artificial Sequence
  ENSG00000103121_6 (sequence is synthesized)
gaatcctgtcttatttggtctccataatcctttgaatggaaagtgacctgtgagagattgaaccatggagaaatatgaaaaccctggattctgagtatttgttgggcagggcgtttagta

SEQ ID NO: 134713 - DNA, 120 bp, Artificial Sequence
  ENSG00000103121_7 (sequence is synthesized)
ctgtctcccctttaccagcaaacctgacttcaccatgtttattccctttgcctacaaccagttaatatctgagtaacttatctccttcaataaaataatttaaataatttttttctcctt

SEQ ID NO: 134714 - DNA, 120 bp, Artificial Sequence
  ENSG00000103121_8 (sequence is synthesized)
tctcttagattcttttggcattagaggaaaatgttgccattaggctttttctttttgacaacatgatgttgaagaattctggggaaatcccagcagtgttaactatttgaaaatgttgca

SEQ ID NO: 134715 - DNA, 120 bp, Artificial Sequence
  ENSG00000103121_9 (sequence is synthesized)
aactatttgaaaatgttgcaactttattgtttttaaagagtgattttctaaatgattaaaaaaaattttttttttgagacatagtgttactttgctgcccaggctggagtgcagtggtgc

SEQ ID NO: 134716 - DNA, 120 bp, Artificial Sequence
  ENSG00000103121_10 (sequence is synthesized)
tccacctcccggattcaagtgattctccagcctcagcctctctagtagctggggctacaggcgcaggctaccatgcctggctggtttttgtatttttggtagagacagagttttgccatg

SEQ ID NO: 134717 - DNA, 120 bp, Artificial Sequence
  ENSG00000103121_11 (sequence is synthesized)
aacattgataaaatttcatctggttaggaattgagtcttagcagactttgctttcccatttggttgaatgtgtccactcgaggtgccagttaactcctggacattaaccttaggccagtg

SEQ ID NO: 134718 - DNA, 120 bp, Artificial Sequence
  ENSG00000103121_12 (sequence is synthesized)
tgtctcctctctgctgagtataggactgttcttcccgtgcccaattctagcagtcatttcaccagtgttccttctgccaagtgtttctgagacctgtgacaatctggaagtcagcagctt

SEQ ID NO: 134719 - DNA, 120 bp, Artificial Sequence
  ENSG00000103121_13 (sequence is synthesized)
ccagctgcagtcacagcaggggcttgatcttgtcaggtgtcagggaacagactcagctgtgagctccttctagtggagttctgtgtataatatccagcatgaggccttgttggtgttggt

SEQ ID NO: 134720 - DNA, 120 bp, Artificial Sequence
  ENSG00000103121_14 (sequence is synthesized)
gtttaataagtgacttccccatcacaggaggtattcaagaagctggactttcgctcagtacgtcgattacagagcataacagacattcagtgaaaggatggggaaagaaccagaattaat

SEQ ID NO: 134721 - DNA, 120 bp, Artificial Sequence
  ENSG00000103121_15 (sequence is synthesized)
tctgaagtaccttccaagacaaagtgtatgaatatttattcagtccccctagtgtcaggcagtagaaatacagaaatgagacattttgcctttagaatcttgtagttaactgaaaagttg

SEQ ID NO: 134722 - DNA, 120 bp, Artificial Sequence
  ENSG00000103121_16 (sequence is synthesized)
acttttagtcacctgtaatcatcaaagtgccatgattaggtagatgtcatagaagacagaggactttcatgttcagtcttcatgaagaaggagctattccaagaaagctatttagcaaag

SEQ ID NO: 134723 - DNA, 120 bp, Artificial Sequence
  ENSG00000103121_17 (sequence is synthesized)
atgacctttgacaaatgagtgaaaatgggatacattctgaggcgcactttaaggcatttagcatgactagaatatgggagcttagagtggaggaagatcatagacagctttgaaatctgt

SEQ ID NO: 134724 - DNA, 120 bp, Artificial Sequence
  ENSG00000103121_18 (sequence is synthesized)
tggaattttattttcagtgctgtgatgaccagttgcaggttttaatatggtgattagggatttgggtagaggagttagttggaaggctgatatatttcaatttgtattttagtaagtttt

SEQ ID NO: 134725 - DNA, 120 bp, Artificial Sequence
  ENSG00000103121_19 (sequence is synthesized)
tttggttatagtttgggggataaattggaggggaaggaagataacgcccaaggagagcaattaggtttttgtgctaacttgagtgagaaatgagggcctggatgaaagatgtggctttgg

SEQ ID NO: 134726 - DNA, 120 bp, Artificial Sequence
  ENSG00000103121_20 (sequence is synthesized)
ggattaggaggagtgacgattcaagcattgagtcagcatgactgactaggtgtagggtttaaggaagtgtctaggatgtctcaggcatttgatttgtgcctgcttgggagggagtactgg

SEQ ID NO: 134727 - DNA, 120 bp, Artificial Sequence
  ENSG00000103121_21 (sequence is synthesized)
ggaggtgaagtgtgtgtggaggatccagcgggagagggcttccgggttgctgctgggtatttaggtctgcagcttgttagagtcacctggattagaacaaaattgggagatgtcagcatg

SEQ ID NO: 134728 - DNA, 120 bp, Artificial Sequence
  ENSG00000103121_22 (sequence is synthesized)
cagatgccagctaaggccctgtaggccaatgtcagtagctgaccataagagcaggatgaaactttggaagttcattcttaaaaattttataagtaatatatgagtacgtttttatgggat

SEQ ID NO: 134729 - DNA, 120 bp, Artificial Sequence
  ENSG00000103121_23 (sequence is synthesized)
attcaaaccacctactgtttttaggtcttactctcttgtgttgcagctgttgctgatccctgtagagtaaagtacacactgaaggctatggcaatgatctacctttccagcttcctctag

SEQ ID NO: 134730 - DNA, 120 bp, Artificial Sequence
  ENSG00000103121_24 (sequence is synthesized)
gaagggagtttgacaaataaaatgctagtgaactggagcacagtgagcaagggggagggtggcatgagctgaggacacaggtgggcagggccagaacacacaggccttggacatcacctc

SEQ ID NO: 134731 - DNA, 120 bp, Artificial Sequence
  ENSG00000103121_25 (sequence is synthesized)
agggaacttgcatgttatttggagcataatggaaaaccattagaaagttttagggagtggttatgatttcatttatttatattttataaagatctttctggttattcggtgaatagttat

SEQ ID NO: 134732 - DNA, 120 bp, Artificial Sequence
  ENSG00000103121_26 (sequence is synthesized)
ggttaaaccagttcaacccagtgacagtacctgtcacatagagttattgtgaggattggttgagatgtatgtgatagattatctggcacaaagtaagggccccctcaatattgtttttct

SEQ ID NO: 134733 - DNA, 120 bp, Artificial Sequence
  ENSG00000103121_27 (sequence is synthesized)
ctcaagtgcacccaaattggggtattggaaacacttcctccgtagtttggtagaaggcaccaaatcactagggctgataccgtttgagtggggccccagctgatggggcagggggtaaag

SEQ ID NO: 134734 - DNA, 120 bp, Artificial Sequence
  ENSG00000103121_28 (sequence is synthesized)
gggtgaggggcttaatatgaggcagaaggaagggccaggcctctagaactcatcccaagccggccccattctctggctccctgtacatcctgcctttccatagaggaagccagtcccagg

SEQ ID NO: 134735 - DNA, 120 bp, Artificial Sequence
  ENSG00000103121_29 (sequence is synthesized)
ggtggctgcatcttattccatgctttacatctcatcagccttgctgactttccccagcctgctgtagatcagagtgaaatctgtttctcctgtctagagcaagcgcactttttcctgagg

SEQ ID NO: 134736 - DNA, 120 bp, Artificial Sequence
  ENSG00000103121_30 (sequence is synthesized)
atttccaaatattttgaattcccatatgcagtggaagccgaagaagctggagggagagtggggttgggaggtgcagaggttccatgtcttcttgcctttatgaagcttctggcattgtgc

SEQ ID NO: 134737 - DNA, 120 bp, Artificial Sequence
  ENSG00000103121_31 (sequence is synthesized)
tgggtgcaggtgataccatggaataagatggatgtggttctagtgacggttcacatcacgaaggaccatctgtgtcctcttagggagtctggctttcctgctaagggcaacaggaaggca

SEQ ID NO: 134738 - DNA, 120 bp, Artificial Sequence
  ENSG00000103121_32 (sequence is synthesized)
ttgtagggtctgtgcaggataccaagtgaaggaagagatttccttactgtggacttgcagacgataagtaaacttttgggtcataagagaccatctcttggaagctgaagaacttaggcc

SEQ ID NO: 134739 - DNA, 120 bp, Artificial Sequence
  ENSG00000103121_33 (sequence is synthesized)
aaggttttcctgagaaatctagttttgcagaatgttgtgaaccttgatgctctggtgacagtgaattaatggtttattttaggaagcactacacaattttacttaagagtgaggctagaa

SEQ ID NO: 134740 - DNA, 120 bp, Artificial Sequence
  ENSG00000103121_34 (sequence is synthesized)
agttgagctgtttctcaccttttataaatgaagtttaagatcagattaatctccatggagtttttagctcaaagcacaattagttttctatagaaagggcttgggctgaaccaaattatg

SEQ ID NO: 134741 - DNA, 87 bp, Artificial Sequence
  ENSG00000103121_35 (sequence is synthesized)
tcctcactgtcccaagggagttgctcctttcactacaccctgatattgaaaccctgatattgaaatttgtgccccttaaatgatatc

SEQ ID NO: 134742 - DNA, 120 bp, Artificial Sequence
  ENSG00000103121_36 (sequence is synthesized)
gaaaccctgatattgaaatttgtgccccttaaatgatatcatattcagggaaccagctataccagaatctaccttaatccatagacatccctgcctcctctagagaggtcactgaaggag

SEQ ID NO: 134743 - DNA, 120 bp, Artificial Sequence
  ENSG00000103121_37 (sequence is synthesized)
ataagtacatagcagaaagtggtgaagggaaagcaaagggatgctttattgttaccagtctcctgcctctggtatcagatggagcaggtggcctgggctagaggcctgtggggccatttc

SEQ ID NO: 134744 - DNA, 120 bp, Artificial Sequence
  ENSG00000103121_38 (sequence is synthesized)
tgtcctctaagctctagtctgatctcaccggcagctggtcacatgggaggacaggagatggagaacaagactgacagtagggaggggagagcagagacaggtggctgagtttctctcact

SEQ ID NO: 134745 - DNA, 120 bp, Artificial Sequence
  ENSG00000103121_39 (sequence is synthesized)
tagagaaaagaaactggctgagtgtataccacgtctgaagtgagcaaaagggaagattgcccaaatcctgtaaaggaccttttttgtggtattaatgctattcttttttatgacaaaatg

SEQ ID NO: 134746 - DNA, 120 bp, Artificial Sequence
  ENSG00000103121_40 (sequence is synthesized)
tttcaggtttacagaaaactatacagactaatacgaacactcacatagctgctatctaagtcatacttttaaaaaatacaggtttaaaaaaataataatacaaaagtgggtaaagcctcc

SEQ ID NO: 134747 - DNA, 120 bp, Artificial Sequence
  ENSG00000103121_41 (sequence is synthesized)
atatatatgcatgatttcatacatatatatatatatatatataaaatgtatgtatgtcagtatccatagccatattttattttgcatgtttagtcattttacttaggaggcgtcatgatg

SEQ ID NO: 134748 - DNA, 120 bp, Artificial Sequence
  ENSG00000103121_42 (sequence is synthesized)
tgtgtagcctttggtagcgtaccttttttttttaaaaaaaaaatactatgttgataaatgaggttcttgtttatttgttttgcctgctatatagcattttgttgtaggcctataccacgg

SEQ ID NO: 134749 - DNA, 120 bp, Artificial Sequence
  ENSG00000103121_43 (sequence is synthesized)
tttatgtatttccccgtagatggtcacttagatatccagtctttgctattgtaaacttcaatgaacgttcttacttaccttcttgtccaatctgggagagtgtttttaggtataaaccta

SEQ ID NO: 134750 - DNA, 120 bp, Artificial Sequence
  ENSG00000103121_44 (sequence is synthesized)
ggattttaattattgggctgtaaggtatgcattttcaaacttactagaagttgctaaattacaccccaaatgtttttaagattttatgatttgtatttttgttgttgttttttgagacag

SEQ ID NO: 134751 - DNA, 81 bp, Artificial Sequence
  ENSG00000103121_45 (sequence is synthesized)
gctggagtgcagtggtatgatctcagctcgctgcaacttccacctcctggcttcaagcaattctcgtgccttagcctcctg

SEQ ID NO: 134752 - DNA, 120 bp, Artificial Sequence
  ENSG00000103121_46 (sequence is synthesized)
ttttagtagagatagggtttcaccatgtccaggctggaaaattttatgatttttaaaatagtgttcttatacatcttttgctagatttgtgtctaaggggtatttttaaaattacttatt

SEQ ID NO: 134753 - DNA, 120 bp, Artificial Sequence
  ENSG00000103121_47 (sequence is synthesized)
gtgtctaaggggtatttttaaaattacttattctaatatctcttaaaatttttttataaagcagggattataggcatgagcccctgcatccaatttattctaatttcctattactgatac

SEQ ID NO: 134754 - DNA, 120 bp, Artificial Sequence
  ENSG00000103121_48 (sequence is synthesized)
attggagtgtaattgacttctgtatatttatcttacattcagaaggcttgccaaactttcttaataattctggggcctatagattattttagatttttctatgtagacagtcacatcact

SEQ ID NO: 134755 - DNA, 120 bp, Artificial Sequence
  ENSG00000103121_49 (sequence is synthesized)
tttgaatagtaacagtaatgaatcatttgtttctttccaatgtttatacttccttattttattgtacttagaacattcagtataatgtttaatagatacatcagacttctcttgtgactg

SEQ ID NO: 134756 - DNA, 120 bp, Artificial Sequence
  ENSG00000103121_50 (sequence is synthesized)
atgttaaatccttacatttcactgacaagtagcaaatttgtagtaggtttttggaagatgtctgttcctccctaaggaagttccttttggtaattgtagatagacttgctcaacctctac

SEQ ID NO: 134757 - DNA, 120 bp, Artificial Sequence
  ENSG00000103121_51 (sequence is synthesized)
tgcacctccttctagtgtgccttcccatatttgtgaaactcaaaagctaaatactgcattttctccaattcctttacagttaggattccagataggaattaatgtccattaatcggtgag

SEQ ID NO: 134758 - DNA, 120 bp, Artificial Sequence
  ENSG00000103121_52 (sequence is synthesized)
atttggatttggaattgacttaaattgagagagagacggtccatgaagcatccattttctggtatggatcagagcagaaatggtggggttatagagcctgcaactgtagccgcagttttc

SEQ ID NO: 134759 - DNA, 120 bp, Artificial Sequence
  ENSG00000103121_53 (sequence is synthesized)
tcttttttgctagacagctttttaattgcaatgtggctctgaagtttcttcatccctcccaatggtcaggtaagttatttaaatacctgtctgtcattgcttactacactgtccttttaa

SEQ ID NO: 134760 - DNA, 120 bp, Artificial Sequence
  ENSG00000103121_54 (sequence is synthesized)
tcttcattatataaacaataaagacatacttaatgctcaccgctagtcttgtgttaatatctccctagtcattttggttgtctgagcctcattttccagcagattcctaaggaagttctc

SEQ ID NO: 134761 - DNA, 85 bp, Artificial Sequence
  ENSG00000103121_55 (sequence is synthesized)
tctgagcctcattttccagcagattcctaaggaagttctcatgggaacaatattccatgggtttttttcttttctaagtgcagtg

SEQ ID NO: 134762 - DNA, 120 bp, Artificial Sequence
  ENSG00000103121_56 (sequence is synthesized)
cctcctgaagtgctgggattacaggcctgaaccaccgtgcctggctctcttcatcacttctgttgtccctatcctgttcaattttttttctgctccctgcagttcctcctcactttggag

SEQ ID NO: 134763 - DNA, 120 bp, Artificial Sequence
  ENSG00000103121_57 (sequence is synthesized)
tttttctgctccctgcagttcctcctcactttggagtcttgtcctgggagggaaccctacgggatcagttttgagagttcattaatgctaaattgttccagccccttcagaccttcctgt

SEQ ID NO: 134764 - DNA, 120 bp, Artificial Sequence
  ENSG00000103121_58 (sequence is synthesized)
gggccccatttactgaagtgggcaagaaccttcccagtaccaattgctgttctcaaattggccctccgggctttgcagtgaatatctgttgttttgggttcttcggtccttagttggttc

SEQ ID NO: 134765 - DNA, 120 bp, Artificial Sequence
  ENSG00000103121_59 (sequence is synthesized)
aggtaccttgtgcctccctgtgctgctttccacatcgatgctgagacctcccaggactcctctggctcttgatgctctgtcctcacctcactcatttgtattttgggatatgagggttac

SEQ ID NO: 134766 - DNA, 120 bp, Artificial Sequence
  ENSG00000103121_60 (sequence is synthesized)
attttaacctaattttgttgtaaatactgtctctcctcctgccctttttatatcataaaaaagatagttgcttccacagtcacaactatctttccagaatttcccaccagtaactttctg

SEQ ID NO: 134767 - DNA, 120 bp, Artificial Sequence
  ENSG00000103121_61 (sequence is synthesized)
acacacacacttaacttaccaatgggaaacatattttttctgctcagagcccaaggtgagtcacactggccttactcttacctccctatgctggcaagtgttatgttttctagttaatgt

SEQ ID NO: 134768 - DNA, 120 bp, Artificial Sequence
  ENSG00000103121_62 (sequence is synthesized)
tttcttagaggattaccatctcctggctttatgtgatattcttgtttctcacaccattcctcgtagagactcagtatcttccatctttttccattgtgtttatgaaaacctcacttcctg

SEQ ID NO: 134769 - DNA, 120 bp, Artificial Sequence
  ENSG00000103121_63 (sequence is synthesized)
gtacctggaactggtctaggctgcatagcatgtgctgatgcacttactttctggtttacagttctctctgatttcaacccccaaggattttctttcctttcttgtgagctcaactacacc

SEQ ID NO: 134770 - DNA, 120 bp, Artificial Sequence
  ENSG00000103121_64 (sequence is synthesized)
tttaaaaactatatttgatatatgctatctagtatttgtagatagctttttagcaggagtgttttcagattacctaatgagctattttaccagaaacagatatcctgtacataaaatttt

SEQ ID NO: 134771 - DNA, 120 bp, Artificial Sequence
  ENSG00000103121_65 (sequence is synthesized)
accttggaaagactgccccctaggaatgattatattttcaacagttagagaactaactcattcctagaagatggggggaggatgggagttggggagggcatggcaaagagaggagttata

SEQ ID NO: 134772 - DNA, 120 bp, Artificial Sequence
  ENSG00000103121_66 (sequence is synthesized)
agagcatcttctgttcagagaccttcatcttcatctgcatttgggccattagactgtggtccgtgggccagcagctttagcgtaacccgggaaagtttgttagcaacgcagaatctcagc

SEQ ID NO: 134773 - DNA, 120 bp, Artificial Sequence
  ENSG00000103121_67 (sequence is synthesized)
tagcaacgcagaatctcagccgtgtggggtggcttgcgcctgtaatcccagtactttcgaaggccgaggtgggagaattgcttgaggccagggagttcaagaccagcttgggcaacatag

SEQ ID NO: 134774 - DNA, 120 bp, Artificial Sequence
  ENSG00000103121_68 (sequence is synthesized)
aataaaaataaaaaaaagaaatggagagttttagaccccaccctgacctactaactgagaatctgcattttaatgaaatccccagatgatttgcatgcatataaaaattggagaagcatt

SEQ ID NO: 134775 - DNA, 120 bp, Artificial Sequence
  ENSG00000103121_69 (sequence is synthesized)
gacttagactctttctgatgtaactgccttccataaaatgcctacttctttagggttaatgaccttcatccactcttgtcatcacttctagcttactcttttttctgcatttaattttta

SEQ ID NO: 134776 - DNA, 120 bp, Artificial Sequence
  ENSG00000103121_70 (sequence is synthesized)
agcagtttcctcaaataacttttgtatttaagtttttgagaaaagttcttattggtgatatattatgttgagaatgtgatttgaaaaaaaaataggaagcgttaatatggtatgttgtca

SEQ ID NO: 134777 - DNA, 120 bp, Artificial Sequence
  ENSG00000103121_71 (sequence is synthesized)
ttgaatatgacagcaaaatcttaagggcaaagctgttacgaaattctcagggcatttactttttcctcaactctggcgagtagagggctaagaaagtaaagcattctgcaattctgcata

SEQ ID NO: 134778 - DNA, 120 bp, Artificial Sequence
  ENSG00000103121_72 (sequence is synthesized)
cagaaatttagacctggctatttttcactggagtatttgcttacagagcatccatatttcctaaaatgctatgattggattattgagctaatgattggacttgctacaaatattgaaaag

SEQ ID NO: 134779 - DNA, 83 bp, Artificial Sequence
  ENSG00000103121_73 (sequence is synthesized)
cgaggatatcttttcaaagcagatacaattaaaggaaaattctctagggatagttcaagttgctgtgatggctttatctgcta

SEQ ID NO: 134780 - DNA, 120 bp, Artificial Sequence
  ENSG00000103121_74 (sequence is synthesized)
ctagggatagttcaagttgctgtgatggctttatctgctaaaattttagttaagctagcagataatttatgagcaagttcatgatacatggaattcaggttatgtgtagactgaaagctc

SEQ ID NO: 134781 - DNA, 120 bp, Artificial Sequence
  ENSG00000103121_75 (sequence is synthesized)
tctgggctgacacctctctgggcagacaccacattattcctgtatctgcagctcttaggacagtggttaacacataattggtattcaataaatgctttttcactgaatgaatgaattttt

SEQ ID NO: 134782 - DNA, 120 bp, Artificial Sequence
  ENSG00000103121_76 (sequence is synthesized)
agtgaataaagaataaataaagtgttgaagtagcccaaaggactttaaaatttacattttctttttctgtagatcacttgataggtacattgttggatgtaattaaaataagacgggctc

SEQ ID NO: 134783 - DNA, 120 bp, Artificial Sequence
  ENSG00000103121_77 (sequence is synthesized)
tatatgtctacgaataggacagtagttaaataaacaatgatgcatttacacaaaggtataccatgaatctatacaaaggaatgaagatttcgtgtgtctgtatgtatgactatatggtga

SEQ ID NO: 134784 - DNA, 120 bp, Artificial Sequence
  ENSG00000103121_78 (sequence is synthesized)
ttatataaagaaaagaagaaattcctaaaacttgaaaacaagctgaaacaaataactcgagtacatgtcaagttgattttataaccacagaaaggaaatgattataagtgttgttcaaat

SEQ ID NO: 134785 - DNA, 120 bp, Artificial Sequence
  ENSG00000103121_79 (sequence is synthesized)
acaatattttgactttacatctccagaaggtgatacatcctgaagataaggagaactgcaaaaaaagtaaaactttataataaaaataatattgttttgaaattggtattataaaatatc

SEQ ID NO: 134786 - DNA, 120 bp, Artificial Sequence
  ENSG00000103121_80 (sequence is synthesized)
acgttttaaagttatgatgttagtgtcagtagaaaccaagattttcaacctaagaccaaaacaagatacaagtgtaaaattcaagtcaaaacatgcattaaatttgaattggaaatagta

SEQ ID NO: 134787 - DNA, 120 bp, Artificial Sequence
  ENSG00000103121_81 (sequence is synthesized)
cacattgtgctgatccattgtctgttggactcttgggttgcttccatgttttaattattgtgaataatatgccgtgaacatgggtgttcaaatatctcttcaaaaccctgcatttaattc

SEQ ID NO: 134788 - DNA, 120 bp, Artificial Sequence
  ENSG00000103121_82 (sequence is synthesized)
ttatgaaaatatagccggaagtggaattgttggatcatatggtaatttcatttttaattttttgaggaactgctataccagtttccacagtggctatcccagtttacatgcccgcccaca

SEQ ID NO: 134789 - DNA, 120 bp, Artificial Sequence
  ENSG00000103121_83 (sequence is synthesized)
gtgcgcaggagtttcagtttctccacatcctctttagcgtttgttattttctgtttttttttcagcagtagccatcctaatggatatgggttggttcctgttttctatttggaactttaa

SEQ ID NO: 134790 - DNA, 120 bp, Artificial Sequence
  ENSG00000103121_84 (sequence is synthesized)
cagaagcggtgtattgcgcctcagcatggaggaggacgtgaaggcgtacggagtctgggagtagtacaccacgtagattttggatataagtaatgtgcaggtttcttacatgggtacatt

SEQ ID NO: 134791 - DNA, 120 bp, Artificial Sequence
  ENSG00000103121_85 (sequence is synthesized)
cgggagttgagaaaatgcctgaagaatgaggttcttgctctgtcacctaagctggagtgcagtagggtgatcgtaactcacggaagcctcaaactcaagtgatcctcccacctcagcctc

SEQ ID NO: 134792 - DNA, 120 bp, Artificial Sequence
  ENSG00000103121_86 (sequence is synthesized)
tgaagaatgagggaccatctggacttcctttggagatgtcttagcatattttaatgtagactatattttaatttgctttgtaacttattttattggcctgctacaaagtattatcttctg

SEQ ID NO: 134793 - DNA, 89 bp, Artificial Sequence
  ENSG00000103121_87 (sequence is synthesized)
ggctttttcgcatctattgagataatcacatggtttttgtgtttaattctgtttgtgtggagaatcacatttattgatttgcgtatgtt

SEQ ID NO: 134794 - DNA, 120 bp, Artificial Sequence
  ENSG00000103121_88 (sequence is synthesized)
tgtttgtgtggagaatcacatttattgatttgcgtatgttgaaccctatatatatgttttttgactggcttatttcattcagaatgtcctcacatttcatccatgttgtagcatatgcca

SEQ ID NO: 134795 - DNA, 120 bp, Artificial Sequence
  ENSG00000103121_89 (sequence is synthesized)
atcatttctgagttagagtaggttaagcccaggtggggcacggtagctcatgcctgtcccaacactttgggaggctgaggatcacttgaggacaggagtttgaaaccagcctgggcaaca

SEQ ID NO: 134796 - DNA, 120 bp, Artificial Sequence
  ENSG00000103121_90 (sequence is synthesized)
aaaaaagaacagctgcccatgatgtttttcctttgaccttggctgctaattttccaccttgtggatgatccaattaaacttaagttcagggatttcagcttcatgttttcagtgtaataa

SEQ ID NO: 134797 - DNA, 120 bp, Artificial Sequence
  ENSG00000103121_91 (sequence is synthesized)
ttctggtttcatttcattgtttagtttttttttcagccagctattaagaaaaaagcaatctatattcacactaatatgagactaatgaccctttaaccctcagaataatatacattttaa

SEQ ID NO: 134798 - DNA, 120 bp, Artificial Sequence
  ENSG00000103121_92 (sequence is synthesized)
aataataagccaattctcttaattggtagaatttcatctgaacaaaatgagttgttaatttcgagaatgtggcgaaaatatttgaagtcaggcttattaatataagcaagctgtttctgc

SEQ ID NO: 134799 - DNA, 120 bp, Artificial Sequence
  ENSG00000103121_93 (sequence is synthesized)
tttagtgcttatttccgggattgggtctcttgaggcttcctgcttttctcctgaacctgtaggttctctaaatactactgataacttgctgaatatcttaaatcattgaattagaaagct

SEQ ID NO: 134800 - DNA, 120 bp, Artificial Sequence
  ENSG00000103121_94 (sequence is synthesized)
ttgtctcaagtttaataatttgcctgaggtcacacagctggttaatggttaacatacttctctgataaaggtcactagaggttcttatgaagatacttttaggtggcgtaacaaatgtgt

SEQ ID NO: 134801 - DNA, 120 bp, Artificial Sequence
  ENSG00000103121_95 (sequence is synthesized)
ttccgtccaggatacacattacacttagttcttgtcactctttaggctcctgttatctgtgacattttctttgtttttgatgacccgaaaaggtttgaggcataatggccaggtatttgg

SEQ ID NO: 134802 - DNA, 120 bp, Artificial Sequence
  ENSG00000103121_96 (sequence is synthesized)
aatgtcacaaaaatgaaacgtgcatcatatctgcaacttactcggttcagaagaaaagctcgggtgtatatcacaacattctgaaattttttggttattgtaatgatgttgatcgggagt

SEQ ID NO: 134803 - DNA, 120 bp, Artificial Sequence
  ENSG00000103121_97 (sequence is synthesized)
aatttgttcatttgtatagttgatccttgaacagcttggaagttcggggcactgacccccatgcagttgaaagtccacatataactttttgactccccaaaaacttgtctgagagtttcc

SEQ ID NO: 134804 - DNA, 80 bp, Artificial Sequence
  ENSG00000103126_0 (sequence is synthesized)
acttccggacgccgccggcgggggcgctcgggcctgggcttcggcgctctggctcgggctctggctcgggaggcgatcgt

SEQ ID NO: 134805 - DNA, 120 bp, Artificial Sequence
  ENSG00000103126_1 (sequence is synthesized)
cgcccgccgcgctgccgctgagcgcatgggcccggaccgcgccgcgccgctccgggagccgggcccggggtcccgccaccaccgcgcgcgggacagattgattcactttggagctgtaag

SEQ ID NO: 134806 - DNA, 120 bp, Artificial Sequence
  ENSG00000103126_2 (sequence is synthesized)
attgattcactttggagctgtaagtactgatgtattagggtgcagcgctcattgttccttgacgcagagtcccaaaatgaatatccaagagcagggtttccccttggacctcggagcaag

SEQ ID NO: 134807 - DNA, 120 bp, Artificial Sequence
  ENSG00000103126_3 (sequence is synthesized)
tttcaccgaagatgctccccgacccccagtgcctggtgaggagggagaactggtgtccacagacccgaggcccgccagctacagtttctgctccgggaaaggtgttggcattaaaggtga

SEQ ID NO: 134808 - DNA, 120 bp, Artificial Sequence
  ENSG00000103126_4 (sequence is synthesized)
gacttcgacggccactccgaggcgctcggatctggacctggggtatgagcctgagggcagtgcctcccccaccccaccatacttgaagtgggctgagtcactgcattccctgctggatga

SEQ ID NO: 134809 - DNA, 120 bp, Artificial Sequence
  ENSG00000103126_5 (sequence is synthesized)
ccaagatgggataagcctgttcaggactttcctgaagcaggagggctgtgccgacttgctggacttctggtttgcctgcactggcttcaggaagctggagccctgtgactcgaacgagga

SEQ ID NO: 134810 - DNA, 120 bp, Artificial Sequence
  ENSG00000103126_6 (sequence is synthesized)
gaagaggctgaagctggcgagagccatctaccgaaagtacattcttgataacaatggcatcgtgtcccggcagaccaagccagccaccaagagcttcataaagggctgcatcatgaagca

SEQ ID NO: 134811 - DNA, 120 bp, Artificial Sequence
  ENSG00000103126_7 (sequence is synthesized)
gctgatcgatcctgccatgtttgaccaggcccagaccgaaatccaggccactatggaggaaaacacctatccctccttccttaagtctgatatttatttggaatatacgaggacaggctc

SEQ ID NO: 134812 - DNA, 120 bp, Artificial Sequence
  ENSG00000103126_8 (sequence is synthesized)
ggagagccccaaagtctgtagtgaccagagctctgggtcagggacagggaagggcatatctggatacctgccgaccttaaatgaagatgaggaatggaagtgtgaccaggacatggatga

SEQ ID NO: 134813 - DNA, 120 bp, Artificial Sequence
  ENSG00000103126_9 (sequence is synthesized)
ggacgatggcagagacgctgctccccccggaagactccctcagaagctgctcctggagacagctgccccgagggtctcctccagtagacggtacagcgaaggcagagagttcaggtatgg

SEQ ID NO: 134814 - DNA, 120 bp, Artificial Sequence
  ENSG00000103126_10 (sequence is synthesized)
atcctggcgggagccagtcaacccctattatgtcaatgccggctatgccctggccccagccaccagtgccaacgacagcgagcagcagagcctgtccagcgatgcagacaccctgtccct

SEQ ID NO: 134815 - DNA, 120 bp, Artificial Sequence
  ENSG00000103126_11 (sequence is synthesized)
cacggacagcagcgtggatgggatccccccatacaggatccgtaagcagcaccgcagggagatgcaggagagcgtgcaggtcaatgggcgggtgcccctacctcacattccccgcacgta

SEQ ID NO: 134816 - DNA, 120 bp, Artificial Sequence
  ENSG00000103126_12 (sequence is synthesized)
ccgggtgccgaaggaggtccgcgtggagcctcagaagttcgcggaggagctcatccaccgcctggaggctgtgcagcgcacgcgggaggccgaggagaagctggaggagcggctgaagcg

SEQ ID NO: 134817 - DNA, 120 bp, Artificial Sequence
  ENSG00000103126_13 (sequence is synthesized)
cgtgcgcatggaggaggaaggtgaggacggcgatccatcgtcagggcccccagggccgtgtcacaagctgcctcccgcccccgcttggcaccacttcccgccccgctgtgtggacatggg

SEQ ID NO: 134818 - DNA, 120 bp, Artificial Sequence
  ENSG00000103126_14 (sequence is synthesized)
atcgctccccggacagtgggcacgtggccaagatgccagtggcactggggggtgccgcctcggggcacgggaagcacgtacccaagtcaggggcgaagctggacgcggccggcctgcacc

SEQ ID NO: 134819 - DNA, 120 bp, Artificial Sequence
  ENSG00000103126_15 (sequence is synthesized)
accaccgacacgtccaccaccacgtccaccacagcacagcccggcccaaggagcaggtggaggccgaggccacccgcagggcccagagcagcttcgcctggggcctggaaccacacagcc

SEQ ID NO: 134820 - DNA, 120 bp, Artificial Sequence
  ENSG00000103126_16 (sequence is synthesized)
atggggcaaggtcccgaggctactcagagagtgttggcgctgcccccaacgccagtgatggcctcgcccacagtgggaaggtgggcgtggcgtgcaaaagaaatgccaagaaggctgagt

SEQ ID NO: 134821 - DNA, 120 bp, Artificial Sequence
  ENSG00000103126_17 (sequence is synthesized)
cggggaagagcgccagcaccgaggtgccaggtgcctcggaggatgcggagaagaaccagaaaatcatgcagtggatcattgagggggaaaaggagatcagcaggcaccgcaggaccggcc

SEQ ID NO: 134822 - DNA, 120 bp, Artificial Sequence
  ENSG00000103126_18 (sequence is synthesized)
acgggtcttcggggacgaggaagccacagccccatgagaactccagacccttgtcccttgagcacccctgggccggccctcagctccggacctccgtgcagccctcccacctcttcatcc

SEQ ID NO: 134823 - DNA, 120 bp, Artificial Sequence
  ENSG00000103126_19 (sequence is synthesized)
aagaccccaccatgccaccccacccagctcccaaccccctaacccagctggaggaggcgcgccgacgtctggaggaggaagaaaagagagccagccgagcaccctccaagcagaggtatg

SEQ ID NO: 134824 - DNA, 120 bp, Artificial Sequence
  ENSG00000103126_20 (sequence is synthesized)
tgcaggaggttatgcggcggggacgcgcctgcgtcaggccagcgtgcgcgccggtgctgcacgtggtaccagccgtgtcggacatggagctctccgagacagagacaagatcgcagagga

SEQ ID NO: 134825 - DNA, 120 bp, Artificial Sequence
  ENSG00000103126_21 (sequence is synthesized)
aggtgggcggcgggagtgcccagccgtgtgacagcatcgttgtggcgtactacttctgcggggaacccatcccctaccgcaccctggtgaggggccgcgctgtcaccctgggccagttca

SEQ ID NO: 134826 - DNA, 120 bp, Artificial Sequence
  ENSG00000103126_22 (sequence is synthesized)
aggagctgctgaccaaaaagggcagctacagatactacttcaagaaagtgagcgacgagtttgactgtggggtggtgtttgaggaggttcgagaggacgaggccgtcctgcccgtctttg

SEQ ID NO: 134827 - DNA, 120 bp, Artificial Sequence
  ENSG00000103126_23 (sequence is synthesized)
aggagaagatcatcggcaaagtggagaaggtggactgataggctggtgggctggccgctgtgccaggcgaggcccttggcgggcacgggtgtcacggccaggcagatgacctcgtactca

SEQ ID NO: 134828 - DNA, 120 bp, Artificial Sequence
  ENSG00000103126_24 (sequence is synthesized)
ggagcccgatggggaacagtgttgggtgtaccacccatccctgtggtctacccgtgtctagaggcaggtagggggtccctccaagtggtccacaagcttctgtcctgcccccaaggaggc

SEQ ID NO: 134829 - DNA, 120 bp, Artificial Sequence
  ENSG00000103126_25 (sequence is synthesized)
agcctggaccactcctcatagcaatacttggagggcccagcccaagtgaggcagccgaggtccctgctgccagcttcaggtgacccccccccatcccccggcacctcccttgggcacgtg

SEQ ID NO: 134830 - DNA, 120 bp, Artificial Sequence
  ENSG00000103126_26 (sequence is synthesized)
tgctgggatctactttccctctgggatttgcccacgtacccaggtctgggtggggcccaggcccggatgcagaggcctgcagggcctctgtcaattgtacgcgccaccgagtgccttcaa

SEQ ID NO: 134831 - DNA, 120 bp, Artificial Sequence
  ENSG00000103126_27 (sequence is synthesized)
cacagcttgtctcttgcctgccactgtgtgaatcggcgacggagcactgcacctgcctccagccgccggctgtgcagtcctgggtcctcctttctgagggcccgtgtaaatatgtacatt

SEQ ID NO: 134832 - DNA, 120 bp, Artificial Sequence
  ENSG00000103126_28 (sequence is synthesized)
tctcaggctaggccagcaggggctgcccgagtctgtttttcatgcgatgacacttgtacaattaattatcttttcaaaggtacttggataataatgaaataaaactgtttttgaacctgc

SEQ ID NO: 134833 - DNA, 120 bp, Artificial Sequence
  ENSG00000103126_29 (sequence is synthesized)
caggcctccttcccatctgcggtgctgcctgctcactgccctcctcacctccgtcctgcagatactacttcaagaaagtgagcgacgagtttgactgtggggtggtgtttgaggaggttc

SEQ ID NO: 134834 - DNA, 120 bp, Artificial Sequence
  ENSG00000103126_30 (sequence is synthesized)
ctgaggtcttcaggggaaaaacggccctctgggtgtcccccagccatactgggcccttccatccactgagaaccactgaggggccacgtggcaggccaccctgcggtggacggaggctgg

SEQ ID NO: 134835 - DNA, 120 bp, Artificial Sequence
  ENSG00000103126_31 (sequence is synthesized)
ggctggagctttcacacacccgaggccgccgcgctcattgctctggaggcggggtccctcctcaacctgagcccagtctgcagggaggctgcagggccccagtgtgtggggaacgccggt

SEQ ID NO: 134836 - DNA, 120 bp, Artificial Sequence
  ENSG00000103126_32 (sequence is synthesized)
ccccagccagaggctgctcgctgctgggcagcctgggctttagggcagaggtcctggaggcatggcggctgcctcttgacagttgcgtcccaggagccctgagtggctctgcacggtcgg

SEQ ID NO: 134837 - DNA, 120 bp, Artificial Sequence
  ENSG00000103126_33 (sequence is synthesized)
aaagctacgtggttctgaaagccgtgcagatgtagaagtgtcgtcctggacgtccagcccacagccctcctcgctgtgtcctcttgtcatcctggatgtccagcccacagccctcctcac

SEQ ID NO: 134838 - DNA, 120 bp, Artificial Sequence
  ENSG00000103126_34 (sequence is synthesized)
tgtgcccttctctcatccgggacgtccagcccacagccctcctcactgcgccctccttggtcttctgggctccgtagccagaccctgttctctccctagggcagggaggcttctgtctgg

SEQ ID NO: 134839 - DNA, 120 bp, Artificial Sequence
  ENSG00000103126_35 (sequence is synthesized)
gctgcagggaggtctcccctttgtgtgggcagcattttcgctccaggccagaacctggcttctccattttcagcttgctcataaggccagttttctcggccatcctgggtcattggaatt

SEQ ID NO: 134840 - DNA, 120 bp, Artificial Sequence
  ENSG00000103126_36 (sequence is synthesized)
ccccacagatcagtgtctctttgagggtcctgggagcctatagctcacccaggccctggggctgtggtcacagaggccatggttgccttcagaggtcaccagctcctcctgtccaccttg

SEQ ID NO: 134841 - DNA, 120 bp, Artificial Sequence
  ENSG00000103126_37 (sequence is synthesized)
ggtcacctggggcctggggtccaggcccgcctcccgggcctccagctttggggctgtgccactccagggaggctgtggctaggggccttattctgccgaaccagcatcagggttcagacc

SEQ ID NO: 134842 - DNA, 120 bp, Artificial Sequence
  ENSG00000103126_38 (sequence is synthesized)
cttcccagctgaaagcctgtgtggtctcaagtcattaaaggttcctgagcttctgccaggctgtgagcctaatgacagctctggggccagaaagggtcacagttacctcaaacccaaagg

SEQ ID NO: 134843 - DNA, 120 bp, Artificial Sequence
  ENSG00000103126_39 (sequence is synthesized)
gtgaccactttatgaccaaacatctgtgaccctgtgatcgtgttcggccaacaaggagctggagccccctgccatgcaggagcctggagtgtggtgctcggagccggggcgtgtgactgg

SEQ ID NO: 134844 - DNA, 120 bp, Artificial Sequence
  ENSG00000103126_40 (sequence is synthesized)
gctggcagatgagccgtggtgggcatcgtgtgcagcaggtccgaggccctgggcgtgtgtgggctctcctgccggggcttcctgagccatccttgctgggctgagcaggggtctctcagg

SEQ ID NO: 134845 - DNA, 120 bp, Artificial Sequence
  ENSG00000103126_41 (sequence is synthesized)
ttgcgtctgcgctttcccctggtacccgtggccccacatgatggcaggggatgcccgctgagccgtgggaccactcccgccgttctgagacacgaccctcccgcccgtttggctgctggg

SEQ ID NO: 134846 - DNA, 120 bp, Artificial Sequence
  ENSG00000103126_42 (sequence is synthesized)
ctccagcatccccccatggggaaacccagagttgctgggtttgtccgtccaggggatgtgggtttttgcgagaagctgtggagacggagtgaaggcccagaggcaggttgggtgctgggc

SEQ ID NO: 134847 - DNA, 120 bp, Artificial Sequence
  ENSG00000103126_43 (sequence is synthesized)
ctcagttgtggcgccggggggccctcagcctccctgaggtgcagaccgagttgccacgcacgccccagagccagtgtccacgctatcggtggggaattcatgccaagagactgaaggaca

SEQ ID NO: 134848 - DNA, 120 bp, Artificial Sequence
  ENSG00000103126_44 (sequence is synthesized)
gactctcgggacgagatgtcatcccaccagaggggatgaggtggtgggatcccagcacccctgatcggaagctccccaaagtgcggtccagggaactcagggggttggtgccgggatcat

SEQ ID NO: 134849 - DNA, 120 bp, Artificial Sequence
  ENSG00000103126_45 (sequence is synthesized)
gaatgtggggcgcgctgcagtatcgggtaccaccaaggcaggcctaggaggggactcggtgtcttgtctaccctgcaaactggagcctgcgcagggtgggttgttcgggcccttcacgct

SEQ ID NO: 134850 - DNA, 120 bp, Artificial Sequence
  ENSG00000103126_46 (sequence is synthesized)
ccgtccgtccctgcgcagcagcattggtcgaggctccctccccagggctggtggccgccggcacagccacctttgacgcgggttgttccctaggtatgtgcaggaggttatgcggcgggg

SEQ ID NO: 134851 - DNA, 120 bp, Artificial Sequence
  ENSG00000103126_47 (sequence is synthesized)
acgcgcctgcgtcaggccagcgtgcgcgccggtgctgcacgtggtaccagccgtgtcggacatggagctctccgagacagagtacgtgcgtcctgagggtcctcccggtcctgcccaccc

SEQ ID NO: 134852 - DNA, 120 bp, Artificial Sequence
  ENSG00000103126_48 (sequence is synthesized)
cagccctggcgtcccaagccaggtcccatcgtagagccgccgtcccggggcttgagctcgggtaccacgctcagaagcagctgtggcaggagagggtcccgtggcatcagactcgaagct

SEQ ID NO: 134853 - DNA, 120 bp, Artificial Sequence
  ENSG00000103126_49 (sequence is synthesized)
gcccgagagccttctcctgtctccatcaaaggagacgctgactgtccagcatgatgacaagtgaccaaaaggcccggctggaggcctgggcacagccagcccctgcatccacacaggtgt

SEQ ID NO: 134854 - DNA, 120 bp, Artificial Sequence
  ENSG00000103126_50 (sequence is synthesized)
cacggccaggcttcctgtggggcagagacctgcctgcgcctccacccggcttggaacgggccggtccctgccaggcctgacttgaccaggctcggggctgcaggtgctgaggtgcccggg

SEQ ID NO: 134855 - DNA, 120 bp, Artificial Sequence
  ENSG00000103126_51 (sequence is synthesized)
gtgcgtctgcttgcagtgtgggtctcagccatgcgtgtctgtccagcccgtgcagtcagtgagtcggggctctgctcccacctacaatgctgactgctctgaacccgtgagaaagggctc

SEQ ID NO: 134856 - DNA, 120 bp, Artificial Sequence
  ENSG00000103126_52 (sequence is synthesized)
agaccatgtgatcccacatgggccgtgtcgacggcgcctttatgtgctcaaggtggcaggaggagggggcacaccccaaaaggggccttgagaacaagggtcccccaggccttgccaggc

SEQ ID NO: 134857 - DNA, 120 bp, Artificial Sequence
  ENSG00000103126_53 (sequence is synthesized)
ttgccccagatgcaggtttgttgtggccctcatcgtgtaggcggtcttggggcagccttcacctgtccctggggcagcccccacgtgttggctcttctctgatgggcctggctccaggag

SEQ ID NO: 134858 - DNA, 120 bp, Artificial Sequence
  ENSG00000103126_54 (sequence is synthesized)
gctccgaggatgtggcactgggaggacgtctaagagcgcacgtggctgggggcctggtgtgcaaagaggatggtcacatggctcaggtggccatgaggccttcctgccctggtgttggct

SEQ ID NO: 134859 - DNA, 120 bp, Artificial Sequence
  ENSG00000103126_55 (sequence is synthesized)
ctggaagcctctggtgcacccagccaggaggaggcccaagggctgaaccccagtgggccaggggcagcttctggagtcacttgaaggacaggtggcggcggggtagccgagtggggggtg

SEQ ID NO: 134860 - DNA, 120 bp, Artificial Sequence
  ENSG00000103126_56 (sequence is synthesized)
cgagagcaaccaggccccgcccgtcatcccggcacggctgtggaagcacagcacctgtcagaggagggcccggctcagcctgggcaggagacggtgccagccctgccccctctgaagggc

SEQ ID NO: 134861 - DNA, 120 bp, Artificial Sequence
  ENSG00000103126_57 (sequence is synthesized)
ctgctggccacccccgccccagtcctccgacaaacttcgctgcggggtcaggcttatccagaaatcgtgcacagttctgtttgtccaatccctgcccttcagatgtttttaaggtttggg

SEQ ID NO: 134862 - DNA, 120 bp, Artificial Sequence
  ENSG00000103126_58 (sequence is synthesized)
ggccgtaggtcttcctgagataggagccctgcagcctgccctgccatcctagaggtgggagctgcagtgcacctggcagccaggccctggccagtcgagggtggggctgtgaggcagcag

SEQ ID NO: 134863 - DNA, 120 bp, Artificial Sequence
  ENSG00000103126_59 (sequence is synthesized)
ggagaccttcgtgctcccagtgagcggagccgactccactgctagcggactagatcccagattgagatgctgtgcgggggctgcgggccccaggtgtttgaatggggtgctgctcacccc

SEQ ID NO: 134864 - DNA, 120 bp, Artificial Sequence
  ENSG00000103126_60 (sequence is synthesized)
tgcaggcctgccccgccttacactggcagcctgaggccagcaggagggaccctgtgggacctcagtccaaaaccaggtaccaccgctgcatctctttccccaggacaagatcgcagagga

SEQ ID NO: 134865 - DNA, 120 bp, Artificial Sequence
  ENSG00000103145_0 (sequence is synthesized)
gtggcgccctaccgccttcggcgcgaaggtggctggtgcgtaccgtcccgaaccctaggagccgaggtgagcgccgcgaagacccccgacattaagaagtggtgtccaccgcagccccct

SEQ ID NO: 134866 - DNA, 120 bp, Artificial Sequence
  ENSG00000103145_1 (sequence is synthesized)
taagccggataccctcccccaccccgaggagcaagcctgccttccgccacgcgccgcccgtcttccgcgcccgcgcagaacctcgcggctgtgcccgcctaaagccacgcccatcctctc

SEQ ID NO: 134867 - DNA, 120 bp, Artificial Sequence
  ENSG00000103145_2 (sequence is synthesized)
ttggccacgccctcagagactcctcccctgtcgcccagatcccacccgcaggaccccaaaacccaatgatcctgcagcagcccttgcagcgaggcccccagggaggggcccagcgcctcc

SEQ ID NO: 134868 - DNA, 120 bp, Artificial Sequence
  ENSG00000103145_3 (sequence is synthesized)
cgcgggccgccttgggggtgacttggggcctggacgccagctcccctctccgaggagctgtgcccatgagcaccaagcggcgcctggaggaggagcaggagcctctgcgcaagcagtttc

SEQ ID NO: 134869 - DNA, 120 bp, Artificial Sequence
  ENSG00000103145_4 (sequence is synthesized)
gaggagaacatggccacccacttctctcaactcagcctgcacaatgaccacccctactgcagcccccccatgaccttctccccagccctgcccccactcaggagcccttgctctgagctg

SEQ ID NO: 134870 - DNA, 120 bp, Artificial Sequence
  ENSG00000103145_5 (sequence is synthesized)
cttctctggcgctatcctggcagcctcatccctgaggccctccgtctgctgaggctgggggacacccccagtcccccctaccctgcaaccccagctggggacataatggagctctgagtg

SEQ ID NO: 134871 - DNA, 120 bp, Artificial Sequence
  ENSG00000103145_6 (sequence is synthesized)
ctggtggacagtgcccctcccaccttccttcttccccacaacagaagagaccagcgactcccgcaaagggacaaggttcctccctctcctgcagagtaggcatctgggcaccaagacctt

SEQ ID NO: 134872 - DNA, 120 bp, Artificial Sequence
  ENSG00000103145_7 (sequence is synthesized)
ccctcaacagaggacactgagcccaacggagttctgggatgggaggggtgggagcatgggaagggaggcatcccacccccaagaagaactgaataaagattgctgagcaaaggaaggctt

SEQ ID NO: 134873 - DNA, 120 bp, Artificial Sequence
  ENSG00000103145_8 (sequence is synthesized)
ctggtctgcaggatgaatacggggtggggcgaatcggcggggcttaggcgtgagctgagatgggactggggctgcggctgagggtcgagacttccgaggtaccctgctggatggtccagg

SEQ ID NO: 134874 - DNA, 120 bp, Artificial Sequence
  ENSG00000103145_9 (sequence is synthesized)
cctggctgatgctgcaggcttaggcgggcagatccttgggaaggggccaagagggtggggtgcaccaggctctctttttttcccagctcccctctccgaggagctgtgcccatgagcacc

SEQ ID NO: 134875 - DNA, 120 bp, Artificial Sequence
  ENSG00000103145_10 (sequence is synthesized)
cgtgcctagagcggttcctctccgtggcgccctaccgccttcggcgcgaaggtggctggtgcgtaccgtcccgaaccctaggagccgagatcccacccgcaggaccccaaaacccaatga

SEQ ID NO: 134876 - DNA, 120 bp, Artificial Sequence
  ENSG00000103145_11 (sequence is synthesized)
gggagggactcccaacaagatctctgtcacctctggtccccaacaggctgcctcctgtgtcagtatcccagcctgcctctctgccatctctccccagggagcctctgcgcaagcagtttc

SEQ ID NO: 134877 - DNA, 120 bp, Artificial Sequence
  ENSG00000103145_12 (sequence is synthesized)
ccgcaggaccccaaaacccaatgatcctgcagcagcccttgcagcgaggcccccagggaggggcccagcgcctcccgcgggccgccttgggggtgacttggggcctggacgccagggagc

SEQ ID NO: 134878 - DNA, 120 bp, Artificial Sequence
  ENSG00000103148_0 (sequence is synthesized)
ggagcgtggcacgtgggccccctccgcctccggctccgtcctcctctggccccctccgcccccggccccggccccacggcgggatgcgggacaacaccagccccatcagcgtgattctgg

SEQ ID NO: 134879 - DNA, 120 bp, Artificial Sequence
  ENSG00000103148_1 (sequence is synthesized)
atcagcgtgattctggtgagctcggggagcaggggcaataagctgctgttcaggtaccccttccagagaagccaggagcacccggcgtcccagacaagtaagccgcgtagcagatacgct

SEQ ID NO: 134880 - DNA, 120 bp, Artificial Sequence
  ENSG00000103148_2 (sequence is synthesized)
gccagcaacacgggcgaccatgctgatgagcaggacggcgattccaggttttcagatgttattctggcaacaattttggcaaccaagtctgaaatgtgtggccaaaaatttgaactgaag

SEQ ID NO: 134881 - DNA, 120 bp, Artificial Sequence
  ENSG00000103148_3 (sequence is synthesized)
attgataatgtgcgatttgttgggcacccaacactgctacagcatgctctggggcagatctccaaaacagatccttccccgaagagggaagcacctactatgattctttttaatgtggtg

SEQ ID NO: 134882 - DNA, 120 bp, Artificial Sequence
  ENSG00000103148_4 (sequence is synthesized)
tttgcactgagggccaacgcagacccgtcagtgataaactgtctgcataacctgtcccgtcgtatcgccaccgtgctgcagcacgaggagcgccgctgccagtacctcacccgggaggcc

SEQ ID NO: 134883 - DNA, 120 bp, Artificial Sequence
  ENSG00000103148_5 (sequence is synthesized)
aagctgatcctggcgctccaggatgaggtgtccgccatggctgatggaaatgaaggtcctcagtccccattccatcacatcctgcccaagtgcaagctggccagggacctcaaggaagct

SEQ ID NO: 134884 - DNA, 120 bp, Artificial Sequence
  ENSG00000103148_6 (sequence is synthesized)
tatgacagcctgtgcacgtcgggcgtagttcggcttcacatcaacagctggctggaggtgagcttctgcctgccccacaagatccactatgcggcctccagtctgatccccccagaggcc

SEQ ID NO: 134885 - DNA, 120 bp, Artificial Sequence
  ENSG00000103148_7 (sequence is synthesized)
atcgaacggagcctgaaagccatccgcccctaccatgccctgctgctgctcagtgatgagaagtccttgctgggtgagcttcctattgactgctcccctgccctagtgcgggtgatcaag

SEQ ID NO: 134886 - DNA, 120 bp, Artificial Sequence
  ENSG00000103148_8 (sequence is synthesized)
accacatctgctgtgaagaacctgcagcagctagcccaagatgcggacctggccttgctgcaggttttccagcttgcagctcatctggtgtactggggcaaggccatcatcatctacccg

SEQ ID NO: 134887 - DNA, 120 bp, Artificial Sequence
  ENSG00000103148_9 (sequence is synthesized)
ctgtgtgagaacaacgtctacatgctgtctcccaatgccagcgtatgtctgtactccccgctggccgagcagttctcccaccagttcccatctcatgacctgccgtccgttcttgccaag

SEQ ID NO: 134888 - DNA, 120 bp, Artificial Sequence
  ENSG00000103148_10 (sequence is synthesized)
ttctccttgccggtctccttgtcagaatttaggaatcccctggcccccgctgtgcaggagacccagctcatccagatggtggtgtggatgctgcagcgccggcttctcatccagctgcac

SEQ ID NO: 134889 - DNA, 120 bp, Artificial Sequence
  ENSG00000103148_11 (sequence is synthesized)
acctatgtctgcctgatggcctcacccagcgaggaggagccccgtccgcgagaggacgacgtccccttcactgcccgggtcggcggtcgcagcctcagcacgcccaacgccctcagcttt

SEQ ID NO: 134890 - DNA, 120 bp, Artificial Sequence
  ENSG00000103148_12 (sequence is synthesized)
ggctccccaaccagcagcgatgacatgaccctcaccagccccagcatggacaactccagcgcagagctacttcccagcggggactcgccactgaaccagaggatgacggagaacctgctg

SEQ ID NO: 134891 - DNA, 120 bp, Artificial Sequence
  ENSG00000103148_13 (sequence is synthesized)
gtcggagcatgaacgcgcagccatcctcagtgtacccgcagcccagaaccctgaggacctccgcatgtttgccaggctccttcactacttccgcggccgccaccacctggaggagattat

SEQ ID NO: 134892 - DNA, 120 bp, Artificial Sequence
  ENSG00000103148_14 (sequence is synthesized)
gtacaacgagaacacgcggcgctcccagctgctcatgctgtttgacaagttccgcagcgtgctggtggtgaccacccacgaggaccctgtcattgccgtcttccaggctctgctcccctg

SEQ ID NO: 134893 - DNA, 120 bp, Artificial Sequence
  ENSG00000103148_15 (sequence is synthesized)
agcccaggcggagggcggaaggctgctggggtgcgcaggtgggcgctcgcgtctccccaccccagggctccccccgtgctgaggctgagccctcttggccctgaggcctggcattgggtg

SEQ ID NO: 134894 - DNA, 120 bp, Artificial Sequence
  ENSG00000103148_16 (sequence is synthesized)
gatgcgggctggccgtggcccagtgaagcctgcagagccccgctgtccttgcccctggtggttccgctgtggggctgctgccctctgtgttcctacgcttccctccagtccttgccgcac

SEQ ID NO: 134895 - DNA, 120 bp, Artificial Sequence
  ENSG00000103148_17 (sequence is synthesized)
gcgtaggcatctccacgctggaggggggcctgccaggactcctgtctctgggtgaggccgcatccttcaaggcccatgtgggctgtgcgtttctcagaccctccttctgtccctacacct

SEQ ID NO: 134896 - DNA, 120 bp, Artificial Sequence
  ENSG00000103148_18 (sequence is synthesized)
gctccttggaccccccagtctgtggccaccctgaagaatgtgcagaaacacttgtgtggcctgtccctgtctctctgacagccttctatttgtgaagtgccctgtggccccctccccagc

SEQ ID NO: 134897 - DNA, 120 bp, Artificial Sequence
  ENSG00000103148_19 (sequence is synthesized)
acctctgtctgccatgcgcttcttcctcccaggctaccctgagcctttcctggcccagtcctcaccacagtccacagaagccgcaaacaggctcatagccaagctgtgacctggtcctga

SEQ ID NO: 134898 - DNA, 120 bp, Artificial Sequence
  ENSG00000103148_20 (sequence is synthesized)
ccatctggggcacgagggcctgggctggccctgctaggctggagaagccctgtcacctgtgcacatcttgctggtggaggcatggcccactgtgcaggaccccaccctcgggggctttcg

SEQ ID NO: 134899 - DNA, 120 bp, Artificial Sequence
  ENSG00000103148_21 (sequence is synthesized)
gctcccacactgatgattctccccagcatccacaccgggcctggcgctacgtactcaggcccccagctctcgtgtcctggaggaagagctagctccagacatgggttgatcacctagagg

SEQ ID NO: 134900 - DNA, 120 bp, Artificial Sequence
  ENSG00000103148_22 (sequence is synthesized)
agctctggctaaggcacagttttctagaaataaaacatttattcggtttttaaacaattaaaaaatcttgtctgggcaggccctttgctcaggcctgtgtgtcctgctcagccactctgt

SEQ ID NO: 134901 - DNA, 120 bp, Artificial Sequence
  ENSG00000103148_23 (sequence is synthesized)
cgaccacactgacccaggggctgccccggacatagaagcggaggggtttccgggcccactcccctgcatggccgacgcccacccgggctgctgccactacagccggctcactgggctcca

SEQ ID NO: 134902 - DNA, 120 bp, Artificial Sequence
  ENSG00000103148_24 (sequence is synthesized)
ggggaccacgctccagccatacagcttcatcctgtgccaggtccctctggtcaaagctcttgttgatggccagggcctggcacagcttggaggggccactgcagagctcgcggtccttga

SEQ ID NO: 134903 - DNA, 120 bp, Artificial Sequence
  ENSG00000103148_25 (sequence is synthesized)
ggacacggctggcggtgcctttccggagggtgctgcgaagctgacgcatggtctccagaccttccaggggctccagtgctcgcagcaagacgcaagccccgtcccctgtgggacggacag

SEQ ID NO: 134904 - DNA, 120 bp, Artificial Sequence
  ENSG00000103148_26 (sequence is synthesized)
ttcccatccgcaccagcaagaggggcccctgtgccccaaacgcgaaccgtacggctccagacagcaccgcggaactcggtggcttccagaaggccccgcgcctgcgcattccgctgcctg

SEQ ID NO: 134905 - DNA, 120 bp, Artificial Sequence
  ENSG00000103148_27 (sequence is synthesized)
ctaaggcacagttttctagaaataaaacatttattcgggtttggaaaggccccttggattcctggctggggacaatgatgacctggaccctggccagaagagccctggccctccagcaag

SEQ ID NO: 134906 - DNA, 120 bp, Artificial Sequence
  ENSG00000103148_28 (sequence is synthesized)
gcagcacctgctctgatgcacctgtgcacccctggccctcccagccacctgggagtccgaagcttagcctggaggtggccaagccagtccctactcttgggctgcggccacgtgaggctc

SEQ ID NO: 134907 - DNA, 120 bp, Artificial Sequence
  ENSG00000103148_29 (sequence is synthesized)
cgcatcagcagccaggggcgagcactagtggacaaagccagcaaatgcggcgttcctgtgagcagataccctcaaccagccagctgtcaaaagtatttcaagataaaatccaggccaagc

SEQ ID NO: 134908 - DNA, 120 bp, Artificial Sequence
  ENSG00000103148_30 (sequence is synthesized)
ctccgcctccacccctgccctcctcaggccccctccgcctccacccctgccctcctcaggccccctccgcctccacccctgccctcctcaggccccctgcgtccccgcctcgtcctcctc

SEQ ID NO: 134909 - DNA, 120 bp, Artificial Sequence
  ENSG00000103148_31 (sequence is synthesized)
gtctcgcgagcccggagcgtggcacgtgggttggtaactgtggcgctgctccgcgtccaccaccacccctgtcctcctcaggccccctccgcctccacccctgccctcctcaggccccct

SEQ ID NO: 134910 - DNA, 120 bp, Artificial Sequence
  ENSG00000103148_32 (sequence is synthesized)
tctgtgagtgctgctggctgccagagcctggagccccgagtgggaaggggtgaggctggcagggccctccagatgctgttctctgtgttggccaggcaccaaaggctgtggaagccccaa

SEQ ID NO: 134911 - DNA, 120 bp, Artificial Sequence
  ENSG00000103148_33 (sequence is synthesized)
gctctgtggctctcctgtgtcccccatatgcctggccccctcctccaggctggctcttctaatccaccttgagggatcagaggtgagatgcaggatgaactgtgcccatggctcctgctg

SEQ ID NO: 134912 - DNA, 120 bp, Artificial Sequence
  ENSG00000103148_34 (sequence is synthesized)
ctgctcaaggggaagtgcccaggctctgtccacctggaggcctgcctggcctcataccgttctgccctcatcgcactgtcctgacccacctgccacactttgcttctctgctgcccactg

SEQ ID NO: 134913 - DNA, 120 bp, Artificial Sequence
  ENSG00000103148_35 (sequence is synthesized)
ctgttttatttcttaaattcatgtgaagtctggatatcttgcagtccttttgaccaagtcttcttacttgcctgggatatatcccccattcccatccccagttccccagccccctcccag

SEQ ID NO: 134914 - DNA, 120 bp, Artificial Sequence
  ENSG00000103148_36 (sequence is synthesized)
gaggtgaccctggccagcagctccttgttgaccctcccagagatgagtagacagatgtgtatctgaggacactgatgtgtctcacactccttactgttcaacgcctgagtctgggcagta

SEQ ID NO: 134915 - DNA, 120 bp, Artificial Sequence
  ENSG00000103148_37 (sequence is synthesized)
ctttctcatggggactggactctacctggcacaaggctcctcactgctcctcactgccagccccacctgctaacccagagacattggagggcctggccaggacgtgccttctcacggtgg

SEQ ID NO: 134916 - DNA, 120 bp, Artificial Sequence
  ENSG00000103148_38 (sequence is synthesized)
gggtgggggtggggtgctccacccccaagcccagggtcactggcctcagctttcttgtggatccactcttgtgctcagggtggactttcaggtagatccaaggagaggactttctgctct

SEQ ID NO: 134917 - DNA, 120 bp, Artificial Sequence
  ENSG00000103148_39 (sequence is synthesized)
cagggtacctgcccacagcctctttttaaacagtgtctgggcttgtgtggaggtggacttgctggctgggtccaactccagggccagtgggccaaagaagagaggaggcagaggggcagc

SEQ ID NO: 134918 - DNA, 120 bp, Artificial Sequence
  ENSG00000103148_40 (sequence is synthesized)
tgcagcagcacagggtggggggtttgctcagcgaagcagtcacaggggcctccacgtctcaggtcctgctcctcagccagatgctgggtggccccggtgtgtggtgggagcctgtgcagg

SEQ ID NO: 134919 - DNA, 120 bp, Artificial Sequence
  ENSG00000103148_41 (sequence is synthesized)
tgtgatccagatgttcccctggcccctctcccttcccaggagggtgagcgggccttgcagagctggctggcagctgggggctccctttctgagaagagggcctttctgcctgtgcgtcag

SEQ ID NO: 134920 - DNA, 120 bp, Artificial Sequence
  ENSG00000103148_42 (sequence is synthesized)
cacagggagcgtgctgtggccatgtctagggccatggctccctgatcacccaggaggaagttggagtggggagggggaccagcctcacctgctgccacccgcagacccagctcatccaga

SEQ ID NO: 134921 - DNA, 120 bp, Artificial Sequence
  ENSG00000103148_43 (sequence is synthesized)
acagctgcacacgcacatgcacgtgcctcgtgtcccccgtggagacacctctcctgtctcctagcaccaccgtgactctgaggtggcagctctgtctccgggctcttcagcaggcttgct

SEQ ID NO: 134922 - DNA, 120 bp, Artificial Sequence
  ENSG00000103148_44 (sequence is synthesized)
agaattaggggcagctcccagcccagcaaatcagtgctggaatctctgccccagcctgggagcagagcaggatctcataccactaccaggacagctgacacctctgcgccccagaagagc

SEQ ID NO: 134923 - DNA, 120 bp, Artificial Sequence
  ENSG00000103148_45 (sequence is synthesized)
cgtcatggccagtgtggcttgagggcagcagcctgttgccaggtcccaggtccccggtccccaggcttggggaaggaagggggtggaagactttgaaagtccccccttggctgaggtctg

SEQ ID NO: 134924 - DNA, 120 bp, Artificial Sequence
  ENSG00000103148_46 (sequence is synthesized)
gctgtaggcttcatgcttcatgtgaggaccccacctgcccagggtgctttgtcctccatcctgggtgagggacaggatgcccaggcccaccttggggtgtttgtggggcacacatcgcac

SEQ ID NO: 134925 - DNA, 120 bp, Artificial Sequence
  ENSG00000103148_47 (sequence is synthesized)
ctctgttcaggtcccttgaggttgcccccagaggggaggctacccgtttcccaagtcagccgtatgaggggcgtgtcacacccaggaggtggggcagcagcgaatgcttgcaggcagatg

SEQ ID NO: 134926 - DNA, 120 bp, Artificial Sequence
  ENSG00000103148_48 (sequence is synthesized)
taccctaacccttgtaggagttaggggtgtcattggaggctggctgctggctctgccctcgctgttcccctgggtgtcctggaattccacttggtcaccctgacccatgtcccccacagc

SEQ ID NO: 134927 - DNA, 120 bp, Artificial Sequence
  ENSG00000103148_49 (sequence is synthesized)
cgcgagcccggagcgtggcacgtgggtaagccgcgtagcagatacgctgccagcaacacgggcgaccatgctgatgagcaggacggcgattccagacaaagtttcactctgtcgcccaag

SEQ ID NO: 134928 - DNA, 80 bp, Artificial Sequence
  ENSG00000103150_0 (sequence is synthesized)
gctccccctcggcagctgttgtggggcaccatgcgaggcttcgggccaggcttgacggccaggcgtctcctcccgctgcg

SEQ ID NO: 134929 - DNA, 120 bp, Artificial Sequence
  ENSG00000103150_1 (sequence is synthesized)
cggccggcgccctggagcgggccatggacgagctgctgcgccgcgcggtgccgccgacgccggcctacgagctgcgcgagaagacaccggcgcccgccgagggtcagtgcgcggacttcg

SEQ ID NO: 134930 - DNA, 120 bp, Artificial Sequence
  ENSG00000103150_2 (sequence is synthesized)
ttcgtgagcttctacggtgggctggccgagacggcccagcgggccgaactgctgggccgcctggcgcggggcttcggcgtggaccacggccaggtggcggagcagagcgccggcgtgctc

SEQ ID NO: 134931 - DNA, 120 bp, Artificial Sequence
  ENSG00000103150_3 (sequence is synthesized)
catctgcgccagcagcagcgggaggcggcggtgctgctgcaggccgaggaccggctgcgctacgcgctggtgccgcgctatcgcggcctcttccaccacatcagcaagctggacggcggc

SEQ ID NO: 134932 - DNA, 120 bp, Artificial Sequence
  ENSG00000103150_4 (sequence is synthesized)
gtgcgcttcctggtgcagctgcgggccgacctgctggaggcgcaggccctcaagctggtggaggggccggacgtccgggaaatgaatggggtgctgaaaggaatgctctcagaatggttt

SEQ ID NO: 134933 - DNA, 120 bp, Artificial Sequence
  ENSG00000103150_5 (sequence is synthesized)
tcctccgggttcctgaacctagaacgggttacctggcattcaccgtgtgaagtgcttcagaaaatcagtgaggctgaggctgtgcatcctgtaaaaaactggatggacatgaagcgccgc

SEQ ID NO: 134934 - DNA, 120 bp, Artificial Sequence
  ENSG00000103150_6 (sequence is synthesized)
gttgggccctacagaaggtgttacttcttttctcactgttcgacccctggggagcccctggtcgttttgcacgtggcactgactggtgacatctccagcaacatccaggcaatcgtgaag

SEQ ID NO: 134935 - DNA, 120 bp, Artificial Sequence
  ENSG00000103150_7 (sequence is synthesized)
gaacatcctccatcagaaacagaagagaagaacaaaatcactgctgcgatcttttattccatcagcttgacccagcagggactccaaggggtggagctgggaacattcctcataaagcga

SEQ ID NO: 134936 - DNA, 120 bp, Artificial Sequence
  ENSG00000103150_8 (sequence is synthesized)
gtcgtcaaggagttgcagagagagtttcctcaccttggggtgttttcaagtctgtcacctatacctggtttcaccaaatggcttctggggcttctgaactcgcaaacgaaggagcatggg

SEQ ID NO: 134937 - DNA, 120 bp, Artificial Sequence
  ENSG00000103150_9 (sequence is synthesized)
aggaatgaactctttacagattcggaatgtaaggaaatctcggagatcacaggtggccccattaacgagaccctcaagctcctcctcagcagcagcgagtgggtgcagtcggagaagctg

SEQ ID NO: 134938 - DNA, 120 bp, Artificial Sequence
  ENSG00000103150_10 (sequence is synthesized)
gtgcgggcgctgcagactccgctgatgaggctgtgcgcctggtacctgtatggagagaagcaccgcggctacgcgctgaaccccgtggccaacttccacctgcagaacggggcggtgctg

SEQ ID NO: 134939 - DNA, 120 bp, Artificial Sequence
  ENSG00000103150_11 (sequence is synthesized)
tggcgcatcaactggatggcggatgtgagcctcagaggcatcaccggctcctgcggcctgatggccaactaccgctacttcctggaggagacgggccccaacagcacctcctacctcggc

SEQ ID NO: 134940 - DNA, 120 bp, Artificial Sequence
  ENSG00000103150_12 (sequence is synthesized)
tccaagatcatcaaagcctctgagcaggtcctcagcctagtggcccagtttcaaaagaacagcaagctctgacagtaaacctctcctaaagcacagggccccggctaagaaaacgatcat

SEQ ID NO: 134941 - DNA, 120 bp, Artificial Sequence
  ENSG00000103150_13 (sequence is synthesized)
tttcaggaggggccgggagttatgtatctgaagcagctttccaagcaaagccaaagttgactgtgttcttgtcccgcagccggtccacactgtgaggccaggcctcaacttccctcaccc

SEQ ID NO: 134942 - DNA, 120 bp, Artificial Sequence
  ENSG00000103150_14 (sequence is synthesized)
tgggcgtgacatgcacccagtgcaagacggttgtgggtgcgggtgcacacaaatgagtgggttgctgtgctgtctccggaagattctgtcgttgcccttggcctggctccctgcccgggg

SEQ ID NO: 134943 - DNA, 120 bp, Artificial Sequence
  ENSG00000103150_15 (sequence is synthesized)
ctggtgctgtggtacctacatcttcaggaagctgtgcagcctctgccattgccatcccagggggatctggcatcctcctaaggaccggggcgcgtggcccagataagaataggtgttcct

SEQ ID NO: 134944 - DNA, 120 bp, Artificial Sequence
  ENSG00000103150_16 (sequence is synthesized)
ttgtgctcataaaacagaatgcggcgatggttgctttagccgtttctcaccatgcaatgcagagggacaaagggctgtgctacacttcccagttacattctgaagctcataaatgtatga

SEQ ID NO: 134945 - DNA, 120 bp, Artificial Sequence
  ENSG00000103150_17 (sequence is synthesized)
gaaggtttgtgattttgcacaaggtgtgtgtagtaagttaaattgttgaacacaaaaatgttgctgcttgaggcataagttggataataggctttaaatgatcagggattcaggttcata

SEQ ID NO: 134946 - DNA, 120 bp, Artificial Sequence
  ENSG00000103150_18 (sequence is synthesized)
atgaacttcacagtaaagaacacgtttgttctgtaaagcattgaacatctgattgtgtagtggtggtcgtctttaagattagagacctgggaaggctggaatcagccagccagcctacgg

SEQ ID NO: 134947 - DNA, 120 bp, Artificial Sequence
  ENSG00000103150_19 (sequence is synthesized)
ggagtttgggatgaaggagcctggggtgtgttggatgagaacaaaggtgaaggaaggggcagtcattgtgcttgtgggaggaaggcagttgtgtttgtgtgtgtatgtgtgtatcagtgc

SEQ ID NO: 134948 - DNA, 120 bp, Artificial Sequence
  ENSG00000103150_20 (sequence is synthesized)
acatctgtgtgcatgtgcacgagcgtctctgtgtggatcagtgcacgtctgtgcgtgtgcacgagcgtctgtggatcagtgcacgtctgtgtgcgtgtgcacgagcgtctctgtgtgtat

SEQ ID NO: 134949 - DNA, 120 bp, Artificial Sequence
  ENSG00000103150_21 (sequence is synthesized)
cagtgcatgtctgtgtacgtgtgcacgagcatctctggatcagtgcacgtctgtgtgcatgtgcccgagcgtctctgtgtggatcagtgcacgtctgtgtgcgtgtgcacgagcgtctct

SEQ ID NO: 134950 - DNA, 120 bp, Artificial Sequence
  ENSG00000103150_22 (sequence is synthesized)
gtgtggatcagtgcacgtctgtgtgcgtgtgcacgagcatctctgtgtgtgtcagtgcacgtctgtgtgcgtgtgcacgagcgtctctgtgtgtatcagtgcacgtctgtgtgcgtgtgc

SEQ ID NO: 134951 - DNA, 120 bp, Artificial Sequence
  ENSG00000103150_23 (sequence is synthesized)
ccgagcgtctctgtgtggatcagtgcacgtctgtgtgcatgtgcacgagcgttctatgtggatcagtgcacgcctgtgtgcgtgtgcacgagcgtctctgtgtgtcagtgcacgtctgtg

SEQ ID NO: 134952 - DNA, 120 bp, Artificial Sequence
  ENSG00000103150_24 (sequence is synthesized)
tgcgtgtgcccgagcgtctctgtgtggatcagtgcacgtctgtgtgcgtgtgcacgagcgtctctgtgtggatcagtgcacgtctgtgtgcgtgtgcacgagcgttctatgtggatcagt

SEQ ID NO: 134953 - DNA, 120 bp, Artificial Sequence
  ENSG00000103150_25 (sequence is synthesized)
gcacgcctgtgtgcgtgtgcacgagcgtctctgtgtgtcagtgcacgtctgtgtgcgtgtgcacaagcgtctctgtgtggatcagtgcacgtctgtgtgcgtgtgcacgagcgtctctgt

SEQ ID NO: 134954 - DNA, 120 bp, Artificial Sequence
  ENSG00000103150_26 (sequence is synthesized)
ggatcagtgcacgtctgtgtgcgtgtgcacgagcgttctatgtggatcagtgcacgcctgtgtgcgtgtgcacgagcgtctctgtgtgtgtcagtgcacgtctgtgtgtgcacgagcgtc

SEQ ID NO: 134955 - DNA, 120 bp, Artificial Sequence
  ENSG00000103150_27 (sequence is synthesized)
tctgtgtggatcagtgcacgtctgtgtgcgtgtgcccgagcgtctctgtgtggatcagtgcacgtctgtgtgcgtgtgcacaagcatctgtgtgtgtcagtgcacgtctgtgtgcgtgtg

SEQ ID NO: 134956 - DNA, 120 bp, Artificial Sequence
  ENSG00000103150_28 (sequence is synthesized)
cacgagcgtctctggatcagtgcacgtctgtgcatgtgcacacgtgcatgtgcatgtgcttacacgtctttgtgtgtctgtgtgcgtgtgtccgcagttgccctgtcctcgctgtcctcg

SEQ ID NO: 134957 - DNA, 120 bp, Artificial Sequence
  ENSG00000103150_29 (sequence is synthesized)
gtttggcagacaggtccctcaccttccttgcctttcatctcctgtgaccctcgccaggccccttctctgtcttctgcgtacggcgtgttgcttcgtgacagacggtgtgatcgcgggagc

SEQ ID NO: 134958 - DNA, 120 bp, Artificial Sequence
  ENSG00000103150_30 (sequence is synthesized)
tgtctcatgcctcttgttctccgggctgattctgaaagagtggcttgcaggccaatcaatgcaatcctggcaacctgcccgcccttcttgcgggcagagttctttaccgtaagcgtcccc

SEQ ID NO: 134959 - DNA, 120 bp, Artificial Sequence
  ENSG00000103150_31 (sequence is synthesized)
agaccctcaggcctgcggaaacctgctgggccttaccgtctttgcttagcttttggcctagaccttaaagaccagcagtcttctgtgctttatcctgctgcctccagagtgccatggaca

SEQ ID NO: 134960 - DNA, 120 bp, Artificial Sequence
  ENSG00000103150_32 (sequence is synthesized)
gatcacccattctcgatcactccggcagcctttcggatccggtggcgcccttcctggctgtgtccttcacctgtgctgtctggttctctcctgtgtggacaggggatgataggaattccc

SEQ ID NO: 134961 - DNA, 120 bp, Artificial Sequence
  ENSG00000103150_33 (sequence is synthesized)
gctgcacaggccgctgggaggacgggctcaggtgacatctgccgaggctttggctcaccagaggagtttgtagatgtcagtcatccccaagtcactaggaactagcacgcctgaggtagg

SEQ ID NO: 134962 - DNA, 120 bp, Artificial Sequence
  ENSG00000103150_34 (sequence is synthesized)
tctcggaatagtgttcaaatccattttactattgcggccaaggagccctccctccagcaaggcggctcatcacatcacgttactctttaggtcaaatgtaaccctcccggttttatttat

SEQ ID NO: 134963 - DNA, 120 bp, Artificial Sequence
  ENSG00000103150_35 (sequence is synthesized)
cactcaggcagagtttcttaaccttttgtgagttacagatcactgaaattctggtgaaagccaggtaggcctcgccgcaggagaacacatacatggtgcacagaacacacacagtgcaca

SEQ ID NO: 134964 - DNA, 120 bp, Artificial Sequence
  ENSG00000103150_36 (sequence is synthesized)
gaacacagtgcacaggagaacactcacagtgcacaggagaacacgcacacggtgcacaggagaacacgcacacatgttgcacaggagaattcacacacagtgcacaggagaacacacagt

SEQ ID NO: 134965 - DNA, 120 bp, Artificial Sequence
  ENSG00000103150_37 (sequence is synthesized)
gcacaggagaacacatggtgcacaggagaacacgcacacacggtgcacaggagaacacacacagtgcacaggagaacacgcacagtgcacaggagaacacagagtgcacaggagaacaca

SEQ ID NO: 134966 - DNA, 120 bp, Artificial Sequence
  ENSG00000103150_38 (sequence is synthesized)
tggtgcacaggagaacacgcacacacggtgcacagaacacacacagtgcacaggagaacacgcacagtgcacaggagaacacggtgcaccggagaacatgcacacatggtgcacaggaga

SEQ ID NO: 134967 - DNA, 120 bp, Artificial Sequence
  ENSG00000103150_39 (sequence is synthesized)
acacagtgcacaggagaatacagactgcacagaacacacgcacagtgcacaggagaaaacgcacacacagtgcacagaacacagtgcacaggagaacacgcacacagtgcacagagaacc

SEQ ID NO: 134968 - DNA, 120 bp, Artificial Sequence
  ENSG00000103150_40 (sequence is synthesized)
acacagtgcacaggagaatacgcacacacagtgcacagaacacagacacagtacacaggagaacacgcacacacagtgcacagaacacagccagtgcacaggagaacactgcacaggaga

SEQ ID NO: 134969 - DNA, 120 bp, Artificial Sequence
  ENSG00000103150_41 (sequence is synthesized)
accacactgcacaggagaatatgcataaacagttcacaggagaacacgcacacacagtgcatagagcacagacacagtgcacaggagaaccacacaatgtacaggagaatacgcacacac

SEQ ID NO: 134970 - DNA, 120 bp, Artificial Sequence
  ENSG00000103150_42 (sequence is synthesized)
agtgcacaggagaacatacacgcagtacacagacacagtgcaccggagaacacagtgcacaggagaacacgcacacacagtgcacagaacacagacacagtgcacaggagaacacacagt

SEQ ID NO: 134971 - DNA, 120 bp, Artificial Sequence
  ENSG00000103150_43 (sequence is synthesized)
gcacaggagaacacagtgcacaggagaatacacacggtgcacaggagaattcacacacaatgcacaggagaacacagtgcacaggagaacacacacacacactgcacaggagaccatgca

SEQ ID NO: 134972 - DNA, 120 bp, Artificial Sequence
  ENSG00000103150_44 (sequence is synthesized)
cagtgcacaggagaatacacatggtgcacagcagaattcacacagtgcacaggagaacacacacagtgcacagaattcatgcacacagtgcacaggagaacacacacagtgcacaggaga

SEQ ID NO: 134973 - DNA, 120 bp, Artificial Sequence
  ENSG00000103150_45 (sequence is synthesized)
acacagtgcacaggagaacacacactgcacagaacaaatgcacagcacacaggagaacatgcacacacagtgcacaggagaacacagtgcacaggagaacacacagtgcacaggagagaa

SEQ ID NO: 134974 - DNA, 120 bp, Artificial Sequence
  ENSG00000103150_46 (sequence is synthesized)
cacacagtgcacagaacacacagggcacaggagaacacacagtgcacaggagaacactgcacagaacacacggtgatcagaacacacagtgcacaggagaacacacagtgcacagaacac

SEQ ID NO: 134975 - DNA, 120 bp, Artificial Sequence
  ENSG00000103150_47 (sequence is synthesized)
acggggcacaggagaacacacgatgcacggaacacggtgatcagaacacggttcacaggagaacacacagtgcacagaacacacggggcacaggagaacacacagtgcacagaacacaca

SEQ ID NO: 134976 - DNA, 120 bp, Artificial Sequence
  ENSG00000103150_48 (sequence is synthesized)
gtgcacagaacacacggtgcacaggagaacacatggtgcacaggagaacacacggtgtacagaacacacggtgcacaggagaacacgcagtgcacaggagaacatgcaatgcacgggaga

SEQ ID NO: 134977 - DNA, 120 bp, Artificial Sequence
  ENSG00000103150_49 (sequence is synthesized)
acacagtgcagagaacacacacgcactgcacagaacatgcagtggtgcacaggagaacagtacacaacaacacattccatgcacaggagaacacacgcaattcacaggacacaacagaac

SEQ ID NO: 134978 - DNA, 120 bp, Artificial Sequence
  ENSG00000103150_50 (sequence is synthesized)
acacgcagtgcacaggacacaacagaacacacgtgcacaggagaacacagtacacacacagcgcactggagaacacgcacagtgcacaggagaacagagtgcacagaacacagtccacag

SEQ ID NO: 134979 - DNA, 120 bp, Artificial Sequence
  ENSG00000103150_51 (sequence is synthesized)
gacagcacacggtacacagcagaacacccgcagtgcacaggagaacctagtgcacagaacacacaccctgtgcacagttttgttttgttttgcttttgcaattccagggagctccctggc

SEQ ID NO: 134980 - DNA, 120 bp, Artificial Sequence
  ENSG00000103150_52 (sequence is synthesized)
ctcccacagccattcatagagcccattctgtttgcgataaaaacagatctcctccagctcacgtgaggctaggcacgggttcctcaaaacctttttgggcagctagcagctttgactagc

SEQ ID NO: 134981 - DNA, 120 bp, Artificial Sequence
  ENSG00000103150_53 (sequence is synthesized)
agctcatctcaccaggctgaggtcgctgcctgtgaacagttgacagacctaaagccagccagaatgttctgtgtcagagagccctgtccaatgggcagagctgggagacacgcaggaaga

SEQ ID NO: 134982 - DNA, 120 bp, Artificial Sequence
  ENSG00000103150_54 (sequence is synthesized)
gtctctccgggtggctgtgttctgccagggcctcccaggctccaagatcactgccttcagggagcccaggaagagctgcacatccgctgcctctgtgtggcaggcgtgtccgagactgca

SEQ ID NO: 134983 - DNA, 120 bp, Artificial Sequence
  ENSG00000103150_55 (sequence is synthesized)
actcctagttcccacctttcacacctcatctctctaacctcttatggaaaatttcaaacatatgtaaaagcagggagaaattgcataacgaacctacagacctatcacccagcttccaca

SEQ ID NO: 134984 - DNA, 120 bp, Artificial Sequence
  ENSG00000103150_56 (sequence is synthesized)
gtcatcagtggttttctgtttttatcaaactttatctttgtacttcttacagtgcttcacatttagcaggtcctcaatgaacattagatggatggatggaaggaaggaagatggatggat

SEQ ID NO: 134985 - DNA, 120 bp, Artificial Sequence
  ENSG00000103150_57 (sequence is synthesized)
ggatggatggatggatggatggatgacagatggatggtggagggttaatggaaggaaggaagatggatgggtggaaggaagatgggtggatggatggtggagggtggatagaaggaagat

SEQ ID NO: 134986 - DNA, 120 bp, Artificial Sequence
  ENSG00000103150_58 (sequence is synthesized)
aggaagatgggtatatgaatagatggctgggtgggtggaaggaaggaagatggttggatggatggaagatggatggatggatggatggagggtagagttttaatggaaggaagatggatg

SEQ ID NO: 134987 - DNA, 120 bp, Artificial Sequence
  ENSG00000103150_59 (sequence is synthesized)
gacgaatagatggaaggaagatgggtggatggaaggaagatggatggatggaatgatggatgggtggtagagggtggatggaaggaagatggatgaatagatgggtgggtgggtggatgt

SEQ ID NO: 134988 - DNA, 120 bp, Artificial Sequence
  ENSG00000103150_60 (sequence is synthesized)
atgtttggatggatggtggagggcagagtgttaatggaaggaagatgaatggatagatggagggtagagtgtagatggaaggaaaggaaaggaggatggatggatggatggatggataga

SEQ ID NO: 134989 - DNA, 120 bp, Artificial Sequence
  ENSG00000103150_61 (sequence is synthesized)
tggaggagggtggatggaaggaaggaggatggatggatggatgggtgggtgggtgggtggatggatggcgcagggtatatggaaggaagatggatgaatgatggaagatggatggatggg

SEQ ID NO: 134990 - DNA, 120 bp, Artificial Sequence
  ENSG00000103150_62 (sequence is synthesized)
ggacagatgaattgatggcggaggatgttaggatgggtggatggatgtattaacatcccttctccatgcctcagtccccatcataaggagaaagagcctgtcgtccctctatgatactgc

SEQ ID NO: 134991 - DNA, 120 bp, Artificial Sequence
  ENSG00000103150_63 (sequence is synthesized)
actgaaccaatattcccctcacttcatgggtgttacaaacctcttatcatctgtttacgtctcactcttactgtagaacctctagaaaggcaggtggcttccagctcctcgcttttcctg

SEQ ID NO: 134992 - DNA, 120 bp, Artificial Sequence
  ENSG00000103150_64 (sequence is synthesized)
agggatgatctgaccacccattcttacacatgtcatctttcccacagtggcagtgcagaggagacaaaagcagaacaaaagcagacagcggccaggtctgagggtgataggctactcact

SEQ ID NO: 134993 - DNA, 120 bp, Artificial Sequence
  ENSG00000103150_65 (sequence is synthesized)
gggtcctagtgttctgaactacaccctacaggaaagtgctactcagtgcccaggtgacatcgtcacaaggggaacacagtggctaagagggcaggggctcagtctcacagacctggtttc

SEQ ID NO: 134994 - DNA, 120 bp, Artificial Sequence
  ENSG00000103150_66 (sequence is synthesized)
catcccacttgctctcaggaaccctgggcaacaactgtgaccacagtgtcttcctctggaaagtgcccagcagtgttgggctcaccgtagctgcacaataaattgtcatgagtgctttcc

SEQ ID NO: 134995 - DNA, 120 bp, Artificial Sequence
  ENSG00000103150_67 (sequence is synthesized)
actgtgtcccaggttcaaggctgaagtcacaaccccacccctgccacagagcctgcccccccgagtgttccccatctcagtctgaggcccgacctgtgcttccggagcccgcgtcccgtc

SEQ ID NO: 134996 - DNA, 120 bp, Artificial Sequence
  ENSG00000103150_68 (sequence is synthesized)
ccatctcaggagctactctgctccattccccccgtatccgagacctaagttccggctctccttatctcttggagccctgtcatctgtggatcagatgctccccagctccctccatcccac

SEQ ID NO: 134997 - DNA, 120 bp, Artificial Sequence
  ENSG00000103150_69 (sequence is synthesized)
ccacagggtttcacaagaggcccagccatgcaccctgctggggttcagacttgaggggtgccactggagttggggtgcacctgctctcacctgttcatgggctcctttttcttctgaaat

SEQ ID NO: 134998 - DNA, 120 bp, Artificial Sequence
  ENSG00000103150_70 (sequence is synthesized)
gcagcgtgaggcaccatggagggagctgtagactttggctccggccagtgcccagttcaaatgctggccccaccacttccagctgggtggcccagggcaagccacctacccttgctttgc

SEQ ID NO: 134999 - DNA, 120 bp, Artificial Sequence
  ENSG00000103150_71 (sequence is synthesized)
ctcagtttcctcatctttaagtggcagtaaccatagtaccgaccccacagcctgctgagaggctcaaaggagacgatgtatataaagcagttaactgatgcctgccctgggaagcagagc

SEQ ID NO: 135000 - DNA, 120 bp, Artificial Sequence
  ENSG00000103150_72 (sequence is synthesized)
agtccctgtcatgatgggcgtttctacatctggacctgggcgccaccatcctgctcacctgaatgcgggttctgggatctttcagtccttatttggatatttgaatatttgttggttttc

SEQ ID NO: 135001 - DNA, 120 bp, Artificial Sequence
  ENSG00000103150_73 (sequence is synthesized)
tggcttctcacaatttctaagaggtgactaagtggatcattcgttcccgggagaggtgggaatggctcctgtggacacggcattgcacaggggcttgaggggacctcctgacccctgatg

SEQ ID NO: 135002 - DNA, 120 bp, Artificial Sequence
  ENSG00000103150_74 (sequence is synthesized)
gctgagcacccttgtcatactcctcagggagagcccaggccaccggctagctccagactggctctgcagggcctcagaatctgaactccctgtggtcactctgaggcctctctgtctctc

SEQ ID NO: 135003 - DNA, 120 bp, Artificial Sequence
  ENSG00000103150_75 (sequence is synthesized)
tgtgtctttctctttctaccctctccatccctccttccctctgagggcttgaccttcactgacctccagggcaagaacaaccaagagttgctcccaagagggcttccctcctcctcgttc

SEQ ID NO: 135004 - DNA, 120 bp, Artificial Sequence
  ENSG00000103150_76 (sequence is synthesized)
tgtgtggcctcagaagtgagggaatctcagtgctctgtgcaggcatgtgcttattctgagctctgtttgaaattaaacatgaggtgtactaaagatttaaatcgagcaaacacctctgtg

SEQ ID NO: 135005 - DNA, 120 bp, Artificial Sequence
  ENSG00000103150_77 (sequence is synthesized)
atttccaattggattctgaggcgcttacagaaatatgaagtccattttgatctactcttagaaacaaaagctgcccatgatttcaccacagaaagtctgcctcatttgcagtttagcgga

SEQ ID NO: 135006 - DNA, 120 bp, Artificial Sequence
  ENSG00000103150_78 (sequence is synthesized)
ctcacagaggtgaccctagatctctgtctcgcctttgtttggtttatttccacattgcatttgcgtttcccgcctggctagttcttgatcattgaggaaggcagagagaaacgagattct

SEQ ID NO: 135007 - DNA, 120 bp, Artificial Sequence
  ENSG00000103150_79 (sequence is synthesized)
ctgctctgggccaggcattctctgtacacgttcctggttccagcctgcctccttccctagaggatcaccgtgtccagccctgaagctggagcgagtgttcctcacttagagatgaggcga

SEQ ID NO: 135008 - DNA, 120 bp, Artificial Sequence
  ENSG00000103150_80 (sequence is synthesized)
tgaggcggcgagctgggagagggctgagcagctggtgagggcagagttgggactcaaacccaggcccgaccaccacccagctctccttccaccgcactggtccacctcctgaccgtacgt

SEQ ID NO: 135009 - DNA, 120 bp, Artificial Sequence
  ENSG00000103150_81 (sequence is synthesized)
ggggagacccacgcaaaggcccagagaggagaaggccagcagtgggcagaacagagtgggccgcaggttttggcaagcctggaggggaataggtcagaaaggtagcccggctgggctgag

SEQ ID NO: 135010 - DNA, 120 bp, Artificial Sequence
  ENSG00000103150_82 (sequence is synthesized)
agactgaggacagggggtgttagggtgctgacattctggcaagggggcgggggtctgtggaagacaaccccaggctggggtggcttctctcaaacccgggcatgcacagtgctggccgta

SEQ ID NO: 135011 - DNA, 120 bp, Artificial Sequence
  ENSG00000103150_83 (sequence is synthesized)
tcggtccgagccctcggctgccagggagagaagctgagctcccaccaaagcataaaatccaggccagcgaggggcagccagaccacgggaagacaggaggaacccggacctggctctcgt

SEQ ID NO: 135012 - DNA, 120 bp, Artificial Sequence
  ENSG00000103150_84 (sequence is synthesized)
gcaggaagcaggcagtgcacagctccgccgccacagagacagcctcctctcatgaccccagactcagcccgggccgtggtgggaacgatggttggcccggtttggagatgggggatctgg

SEQ ID NO: 135013 - DNA, 120 bp, Artificial Sequence
  ENSG00000103150_85 (sequence is synthesized)
ccctgtggtgagtgcacccagagcaggtgtctctccggagcagttgagtagaacagctggcgtcacctcttcatgttgacgaggggagatgagtggcccaggcagttcctagagcggggg

SEQ ID NO: 135014 - DNA, 120 bp, Artificial Sequence
  ENSG00000103150_86 (sequence is synthesized)
agatggagtgggccgtatcccacccagcaggagcgcttgcttctgaagctcccgtgcgtctgtgacagaggcttgaacccccggcttgttctctcacgtctgttgccgtaaatctgtctc

SEQ ID NO: 135015 - DNA, 120 bp, Artificial Sequence
  ENSG00000103150_87 (sequence is synthesized)
catcgcctggcacataggagaggcttggcaaatatttttggttcactgaagaaaggcagccctcactcctgctgctcagacagcaccccctgaacgtgagttactgcctccttgagcact

SEQ ID NO: 135016 - DNA, 120 bp, Artificial Sequence
  ENSG00000103150_88 (sequence is synthesized)
ttcgcaggagagaagaccagagagctgccttcaaagatgccagagccatgtttatttaagcggcgctgctccagagagaactggccatttgcagtctccaccccagtgtggctcacgatg

SEQ ID NO: 135017 - DNA, 120 bp, Artificial Sequence
  ENSG00000103150_89 (sequence is synthesized)
ccacctctccttgccagctctcaccgaggcccccggtgacctcctagggggtacatccagccaggttccccctcagcaatggccaggggccaccgtgggccacactgcacttcccaaatg

SEQ ID NO: 135018 - DNA, 120 bp, Artificial Sequence
  ENSG00000103150_90 (sequence is synthesized)
ctcccggcactggcacagatgcacaccctcttggccatccccacctgtgctccgccactcttagtcagccattcctctcggcttccgggagtcccctccttctctaaggatctcaccccc

SEQ ID NO: 135019 - DNA, 120 bp, Artificial Sequence
  ENSG00000103150_91 (sequence is synthesized)
atccgtgtctctgctgtctcctaactaccgatagcaagggcactagtgcccctgtttgccggggacaggccctgtctggggccctggtgtggcatcattgttaacagagcttcttttcac

SEQ ID NO: 135020 - DNA, 120 bp, Artificial Sequence
  ENSG00000103150_92 (sequence is synthesized)
tctgaagtgttcagttaggacagtcacttgcacagtcccctcactggtgacacagacaccccatacctgtgtgtttcccctgcatagctcagcagcagctcaggctcagcacggccaagg

SEQ ID NO: 135021 - DNA, 120 bp, Artificial Sequence
  ENSG00000103150_93 (sequence is synthesized)
ctgaatgcagatgccctccctccaaaacctggcctcctccagctgttccttcctggcgaggccacctccaactgtgtaacacagaagcctgggtgccatccctggggctcccctcacccc

SEQ ID NO: 135022 - DNA, 120 bp, Artificial Sequence
  ENSG00000103150_94 (sequence is synthesized)
cacctcccacccgtccccgggcccctggacagaccactggccttgttctcttcatttccctggcccaggttacaaagtctccttcctgattatgtgcattaactaacctcgcaggtgctc

SEQ ID NO: 135023 - DNA, 120 bp, Artificial Sequence
  ENSG00000103150_95 (sequence is synthesized)
tgcccacctgcctacgccagactcttccagatccttctccaccccagcaggcagagttgtcattgtgaaatgcaaatcaggttccatctctcctctcctttcctacctcccaccatcccc

SEQ ID NO: 135024 - DNA, 120 bp, Artificial Sequence
  ENSG00000103150_96 (sequence is synthesized)
gtcaccctccctgtcacacacagccccctccgtggcctctcaagcctgctgtggcctgaccctcccctctgcttttccaggccctcctggcactgtcctccctcagtctgggactccctg

SEQ ID NO: 135025 - DNA, 120 bp, Artificial Sequence
  ENSG00000103150_97 (sequence is synthesized)
tcctccctccttcctgcgtggcacatgctcctccctcttcttgaaacgctctcccctccctgcctcccaggcaatgcccactctgcctccaaagttcatccatcgtcctctcctcaggaa

SEQ ID NO: 135026 - DNA, 120 bp, Artificial Sequence
  ENSG00000103150_98 (sequence is synthesized)
gatttccctggtggcttgactaggtcacagtccccctttatttgccgtcttctcactggggcctctccttcctggtagcttctaaacaaggcagtttcatgtgtgtatctccactagact

SEQ ID NO: 135027 - DNA, 120 bp, Artificial Sequence
  ENSG00000103150_99 (sequence is synthesized)
agacgctctctgagggcagggaccctgcttcgcttctggcccgaggtggctgcagggtctgcaagatcatcagggccccctccaatgtgacacttgcagaggggacccctggcctggggc

SEQ ID NO: 135028 - DNA, 120 bp, Artificial Sequence
  ENSG00000103150_100 (sequence is synthesized)
cacgctggttacttgggtacactccttgcccagggttccacagccccttaaaggcagggtctttctggccacgcctggccctggtctggcctccccaaggagccctgccgctgggggtgc

SEQ ID NO: 135029 - DNA, 120 bp, Artificial Sequence
  ENSG00000103150_101 (sequence is synthesized)
tgtgtgggaacagagcacaggccctccctcccagagcccacgagatctcactttctccaagcccagctccccaaggactcagaccccagttgccctgcactgaacgctggcttgccctag

SEQ ID NO: 135030 - DNA, 120 bp, Artificial Sequence
  ENSG00000103150_102 (sequence is synthesized)
ctcactcggaccccaccctgcactgggaaggagggtccctgtccccgtttgacgggtgacgacactgaggcccagagagctgaaggggctggccgaggggacgggcttgggcgcttccat

SEQ ID NO: 135031 - DNA, 120 bp, Artificial Sequence
  ENSG00000103150_103 (sequence is synthesized)
tctcacactgctgccgtgacacctaatccatccggggaagttccctttaaacccaaaaggggacggtgaagccacacgcggccgcccttctcaggagcccacttccacctctcgcaggct

SEQ ID NO: 135032 - DNA, 120 bp, Artificial Sequence
  ENSG00000103150_104 (sequence is synthesized)
agacagcgttccccaagtccccccttgagctgggtgggctgcccagctgtgaacacaaggacacctccgatttcgtcctgtgaatgttgatattagtggtcccttccttcaggggctgtg

SEQ ID NO: 135033 - DNA, 120 bp, Artificial Sequence
  ENSG00000103150_105 (sequence is synthesized)
gggatctcaaaagataaggcaggtctggagtcctgcgcggtacctgccgcatggcaggctctttacggacagcgcagggacgcactttgatgctgaaaatgagtctctgggacagatgga

SEQ ID NO: 135034 - DNA, 120 bp, Artificial Sequence
  ENSG00000103150_106 (sequence is synthesized)
tcccagtctgggtcctcgcaagcgctgtgcaccccgtcgccgcgagatggcggtgttgcgcccctccagcctcctctgctctgcgcttgggcgctgaatgttaaaattcctaacaggtga

SEQ ID NO: 135035 - DNA, 86 bp, Artificial Sequence
  ENSG00000103150_107 (sequence is synthesized)
gggcgctgaatgttaaaattcctaacaggttggccgagatggcgccactcactccagcctggcgacagagcgagactacgtctcaa

SEQ ID NO: 135036 - DNA, 120 bp, Artificial Sequence
  ENSG00000103150_108 (sequence is synthesized)
tcaaaaccactgggaagccacagaccaggcaccgtgggatggggaagtggagaccgagaggctgctgccggggaaatatgcagtgcagacaagaggttcctgctactctcacctcatcag

SEQ ID NO: 135037 - DNA, 120 bp, Artificial Sequence
  ENSG00000103150_109 (sequence is synthesized)
gatgctccggtaccctgggctgtggcttccaggatgtgcctgactccagggcagggctgtggccaccagggccaggacgagggtgaggagggggaggcatcacctcaggcacaaaatttt

SEQ ID NO: 135038 - DNA, 120 bp, Artificial Sequence
  ENSG00000103150_110 (sequence is synthesized)
aggggcagcaaagcactcccatcaccagaatacatactgtgtccatgcagtgttcttacacatcaaaattcatgaaaaaaaatccagaatggaaaaaatatcaaacttttattataaaca

SEQ ID NO: 135039 - DNA, 120 bp, Artificial Sequence
  ENSG00000103150_111 (sequence is synthesized)
atgaaaaagtcaaacaaaggtatatttcctaaaagaaaattatataggactgcttatagcctcttgagaaatttgaaaaacctagggttcagagaaaaggaggaaaaacaattcagtggt

SEQ ID NO: 135040 - DNA, 120 bp, Artificial Sequence
  ENSG00000103150_112 (sequence is synthesized)
gggaaacgtcagtcctttaggagaagctgaaggaactggagctgtttggtctcaaggatccgtgtgttatcgctgagtgttggccggagagtttatggagcaagtttttgtttgcacaaa

SEQ ID NO: 135041 - DNA, 120 bp, Artificial Sequence
  ENSG00000103150_113 (sequence is synthesized)
ggcctaaaagagacagaaaggggcatacattgctcttcaacaaagtttgcatgaaaatttcaagaaacgatgcagtgctgaggacccccaggcacgcggtggagtcgcctcctccagaga

SEQ ID NO: 135042 - DNA, 120 bp, Artificial Sequence
  ENSG00000103150_114 (sequence is synthesized)
gttttcaaaacagagcagcttttaggctctgtagcctgaaccccagctggggagccgaggtctcttccagctccttcagtgctctgagaattgtcttctcgtcccagcaacaggcttgcc

SEQ ID NO: 135043 - DNA, 120 bp, Artificial Sequence
  ENSG00000103150_115 (sequence is synthesized)
cttccgtgtggtcaggtcagcgaacctcgtggggtgtcaggtgccatgagggacacagatgaagacaggagctaaagggaggggcagggggtagaaaaggtgccagagaccccttggcaa

SEQ ID NO: 135044 - DNA, 120 bp, Artificial Sequence
  ENSG00000103150_116 (sequence is synthesized)
ctcctaggagccatgagtctcccagagagatgagaatgatgctgagagaggcctccaacccagctgcccagttgactgcaagacgcagttgtattctgaggtcatcaactctctctaggg

SEQ ID NO: 135045 - DNA, 120 bp, Artificial Sequence
  ENSG00000103150_117 (sequence is synthesized)
tgacctcgttctgacctggtcaggacactctggatttcacgtgtcatcctggtgtaagtgtcactctgaaatgtcccagccagatggcacagctggtagtcatcctgccacgcctgtcct

SEQ ID NO: 135046 - DNA, 120 bp, Artificial Sequence
  ENSG00000103150_118 (sequence is synthesized)
ccccctgcccctgcccacactctcagggcctctgacacctgatgtgctgttagcttgggccttctcatggcctgtgagggagtgctgaggtgagaccagacagctcgaaggtaaatgcat

SEQ ID NO: 135047 - DNA, 120 bp, Artificial Sequence
  ENSG00000103150_119 (sequence is synthesized)
cggcttttaatctaactctcctctctttgctgccctgtgaaaaacatattaaccatcctacatcagaaatgttgatgttcactccaggcctaggctttcaaaaaccaccagcctcatcag

SEQ ID NO: 135048 - DNA, 120 bp, Artificial Sequence
  ENSG00000103150_120 (sequence is synthesized)
ggacttggataaattccaatgagtagaatctaataattaggtgcggtagctagatgtttgctaatgactggctctgagcagggtgttcactgtgttgggggctgcacatggctgcagcag

SEQ ID NO: 135049 - DNA, 120 bp, Artificial Sequence
  ENSG00000103150_121 (sequence is synthesized)
aggccttcctttgaggacgacagtgtggagtggggacgtttacatgctcctagtaaattcataatcaatttctaattgaagccctcaggattcagctgggcgtgggcttcattaccacgc

SEQ ID NO: 135050 - DNA, 120 bp, Artificial Sequence
  ENSG00000103150_122 (sequence is synthesized)
cgccatgtttcccccgggtaacaatgagccgtagctcattcccacagtttcctcattcctctgtcttcactgagggtggtgattagcagggcggggtggggaaatgtatcagggtaagga

SEQ ID NO: 135051 - DNA, 120 bp, Artificial Sequence
  ENSG00000103150_123 (sequence is synthesized)
aggcaggaagaggaggagcagatcccgggattcgggggagttgggccttagcccagcagctgtcctgagggtgtcgcttaactgcccctgggcggccagcctagaagtcctcaaagggag

SEQ ID NO: 135052 - DNA, 120 bp, Artificial Sequence
  ENSG00000103150_124 (sequence is synthesized)
cggccagcctagaagtcctcaaagggagtctggaagggaacaaatggcccctctgcgtggaggcgctcgtcagggtttacaaaagcaaaacacagctgggcgcagtggctcacgcctgta

SEQ ID NO: 135053 - DNA, 120 bp, Artificial Sequence
  ENSG00000103150_125 (sequence is synthesized)
agaatcacttgaacctaggaggcggagattgcagtgagccaagactgcaccattgcgctccagcctgggagagacagtctcaaaaaaaaaaaaaaaaaaacagtggttcggggtggggga

SEQ ID NO: 135054 - DNA, 120 bp, Artificial Sequence
  ENSG00000103150_126 (sequence is synthesized)
aaaatcataataggctgctttttttatattactctgtggttaaaatcttctgtttttgaattttaaatgataatgagaaaatgctcacgatataaattcatattgcaaaatataaagtaa

SEQ ID NO: 135055 - DNA, 120 bp, Artificial Sequence
  ENSG00000103150_127 (sequence is synthesized)
gtgtctcacccatgcaaaaatcgcatcaagaaacaccaggagtttatctgagcagactgtcgagagtggttttctcaatgtagtggagtgtgatggttttattttcttctgtcattaatt

SEQ ID NO: 135056 - DNA, 120 bp, Artificial Sequence
  ENSG00000103150_128 (sequence is synthesized)
ttttcaaaaaatatctatagtgagcatgtgttacatttataatcagaaagtagcagattgtttgaaatgatcatgagatctctatctagttgggacaataacgattgaaccgtgtcatgt

SEQ ID NO: 135057 - DNA, 120 bp, Artificial Sequence
  ENSG00000103150_129 (sequence is synthesized)
gatatggagagatacccgcagcgtccccctcctcgccctctaccccgttctgcacccgccgtggtgtggccgggcagctagtcgctcactcaccagtccctggccactcgtgtgccgagc

SEQ ID NO: 135058 - DNA, 120 bp, Artificial Sequence
  ENSG00000103150_130 (sequence is synthesized)
agcagagcagcttccggggcctcacaggtggccatgggaggagcatggtgtacgggaaagacaaggcctgcagtgagtagctgcagtgcaccgagccccactccccactggccagctgtc

SEQ ID NO: 135059 - DNA, 120 bp, Artificial Sequence
  ENSG00000103150_131 (sequence is synthesized)
tggttttaggcaagtcccccaacactctagtctcggttttgccgacatgagaagggatggtggggacagagacgccctgccttggggagtcaggatgcctccagggtctggcacacatca

SEQ ID NO: 135060 - DNA, 90 bp, Artificial Sequence
  ENSG00000103150_132 (sequence is synthesized)
cttggggagtcaggatgcctccagggtctggcacacatcaggttcctgataaatatttcctgctgggtgtggcggcgcgagcctgtggga

SEQ ID NO: 135061 - DNA, 120 bp, Artificial Sequence
  ENSG00000103150_133 (sequence is synthesized)
tgacaccactgcactccagctagggcaatagagcaagaccctgactctaagaggaaaaaaagaaaagctgcttgaaagaagataaacaacatgtatcagatgtcactctgaccgctacac

SEQ ID NO: 135062 - DNA, 120 bp, Artificial Sequence
  ENSG00000103152_0 (sequence is synthesized)
ctgggctccgcgccggggtccgagtcccacgaagccccggcccgagccgccggatgcccgcgcgcagcggggcccaggtcatgcagcctgggcccccatgccgtgcagctcgcacatatg

SEQ ID NO: 135063 - DNA, 120 bp, Artificial Sequence
  ENSG00000103152_1 (sequence is synthesized)
tggggcagagcagccaccctgcccccagcagcagccgtccatcgtcagacgtgatcatttcctgaggcctcgagtgtgtcagggtgtttgtgcctcataacaacccacaggatggtcacc

SEQ ID NO: 135064 - DNA, 120 bp, Artificial Sequence
  ENSG00000103152_2 (sequence is synthesized)
cccgctttgcagatgaagaaaccaaagcagttttgccgacggatggggcaaaagaagcagcgaccagctagagcagggcagccacacagctcgtccgacgcagcccaggcacctgcagag

SEQ ID NO: 135065 - DNA, 120 bp, Artificial Sequence
  ENSG00000103152_3 (sequence is synthesized)
cagccacacagctcgtccgatgcagcccaggcaccttgccccagggagcgctgcttgggaccgcccaccactccgggcccataccgcagcatctatttctcaagcccaaagggccacctt

SEQ ID NO: 135066 - DNA, 120 bp, Artificial Sequence
  ENSG00000103152_4 (sequence is synthesized)
cgtggagaccgaggcatacctggggccagaggatgaagccgcccactcaaggggtggccggcagaccccccgcaaccgaggcatgttcatgaagccggggaccctgtacgtgtacatcat

SEQ ID NO: 135067 - DNA, 120 bp, Artificial Sequence
  ENSG00000103152_5 (sequence is synthesized)
ttacggcatgtacttctgcatgaacatctccagccagggggacggggcttgcgtcttgctgcgagcactggagcccctggaaggtctggagaccatgcgtcagcttcgcagcaccctccg

SEQ ID NO: 135068 - DNA, 120 bp, Artificial Sequence
  ENSG00000103152_6 (sequence is synthesized)
gaaaggcaccgccagccgtgtcctcaaggaccgcgagctctgcagtggcccctccaagctgtgccaggccctggccatcaacaagagctttgaccagagggacctggcacaggatgaagc

SEQ ID NO: 135069 - DNA, 120 bp, Artificial Sequence
  ENSG00000103152_7 (sequence is synthesized)
tgtatggctggagcgtggtcccctggagcccagtgagccggctgtagtggcagcagcccgggtgggcgtcggccatgcaggggagtgggcccggaaacccctccgcttctatgtccgggg

SEQ ID NO: 135070 - DNA, 120 bp, Artificial Sequence
  ENSG00000103152_8 (sequence is synthesized)
cagcccctgggtcagtgtggtcgacagagtggctgagcaggacacacaggcctgagcaaagggcctgcccagacaagattttttaattgtttaaaaaccgaataaatgttttatttctag

SEQ ID NO: 135071 - DNA, 120 bp, Artificial Sequence
  ENSG00000103152_9 (sequence is synthesized)
cgcatcgggcccgggaatcggtccggacctggcggtgggcgctgggaagaggatccacctccacgtggcccgccccgccccgggggcgcagccagttcccggcgctcactgccccccttc

SEQ ID NO: 135072 - DNA, 120 bp, Artificial Sequence
  ENSG00000103152_10 (sequence is synthesized)
tcccggcttccgtccccttctgcgcaggcgccgctccgccccggtcctaggggtgcttccgtggtcggcggctgctgggctccgcgccggggtccgagtcccacgaagccccggcccgag

SEQ ID NO: 135073 - DNA, 120 bp, Artificial Sequence
  ENSG00000103152_11 (sequence is synthesized)
gtcacactcatctgagggctccagacacatggcctgtgcgtctgtcctgcccagcgtctcccacctgacgcggccaggtgcccagttgctcttcaaggccttttcagttttgccgacgga

SEQ ID NO: 135074 - DNA, 120 bp, Artificial Sequence
  ENSG00000103152_12 (sequence is synthesized)
ccctcctgaagtgcctgtcactgcagttgtccctgaacccctgtccgctgcctgctggattggccctcagttagtcctccttgtcctcatgcatttagcggctttgctcacactggtccc

SEQ ID NO: 135075 - DNA, 120 bp, Artificial Sequence
  ENSG00000103154_0 (sequence is synthesized)
caggatgggcgagccccgggagtcgctggcccccgccgcccccgcggaccccggcccagcctcgccgcgcgggggcaccgccgtcatcctggacattttccgccgtgcggacaaaaatga

SEQ ID NO: 135076 - DNA, 120 bp, Artificial Sequence
  ENSG00000103154_1 (sequence is synthesized)
atgatgatgggaagctgtccttggaggaattccagctcttctttgcagatggcgtccttaatgagaaagaactggaggatctctttcacacgattgactctgacaacaccaaccatgtgg

SEQ ID NO: 135077 - DNA, 120 bp, Artificial Sequence
  ENSG00000103154_2 (sequence is synthesized)
acaccaaggagctgtgtgattactttgtggaccacatgggtgactatgaggatgtcctggcctccctggagaccttgaatcactctgtcctgaaggccatgggttataccaagaaggtat

SEQ ID NO: 135078 - DNA, 120 bp, Artificial Sequence
  ENSG00000103154_3 (sequence is synthesized)
atgagggtgggagcaacgtggaccagtttgtgacccgcttcctcctgaaggagacggccaatcagatccagtcgctgctgagctcagtggagagtgcggtggaggccatcgaggaacaga

SEQ ID NO: 135079 - DNA, 120 bp, Artificial Sequence
  ENSG00000103154_4 (sequence is synthesized)
ccagccagctccgacagaaccacatcaaacccagccacagcgcggcacagacctggtgtggaagccccactcccgcctctgcccccaaccacaagctcatggctatggaacaaggcaaga

SEQ ID NO: 135080 - DNA, 120 bp, Artificial Sequence
  ENSG00000103154_5 (sequence is synthesized)
agatcagccgcttggcagagctgattgggaggctggagagcaaagcactgtggttcgacctgcagcagcgcctgtcagatgaagatggcaccaacatgcacctgcagctggtccggcagg

SEQ ID NO: 135081 - DNA, 120 bp, Artificial Sequence
  ENSG00000103154_6 (sequence is synthesized)
agatggccgtgtgccccgagcaactgagcgagtttctggactctctgcgccagtatctgcgggggaccactggcgtgaggaactgcttccacatcactgccgtgaggctctcagatggct

SEQ ID NO: 135082 - DNA, 120 bp, Artificial Sequence
  ENSG00000103154_7 (sequence is synthesized)
tcacctttgtcatctatgagttctgggagacagaggaggcgtggaagaggcacctgcagagccccctgtgtaaggcgttccggcacgtcaaggtggacacactgagccagcctgaggccc

SEQ ID NO: 135083 - DNA, 120 bp, Artificial Sequence
  ENSG00000103154_8 (sequence is synthesized)
tctccaggatcttggtgccagctgcttggtgcacggtgggacgggactgacagcctcccagaggcccgtggaggagcccaccagccccttcttcttgtgaaggaaatcccgtttttttct

SEQ ID NO: 135084 - DNA, 120 bp, Artificial Sequence
  ENSG00000103154_9 (sequence is synthesized)
agacagacactttggtgcagaagcttcttttcaatccatcctccacaagaaggtgtttccctgttgttaagtgaaggaggccgcccctgcccccacctgagaaggcagagcagtgtctgt

SEQ ID NO: 135085 - DNA, 120 bp, Artificial Sequence
  ENSG00000103154_10 (sequence is synthesized)
gctgccaggtcctggtgaagcccaaggttgaagggggcggcttcctggagccagcacccctgcctcctggtcctggcctctcccctacccctcacatggccacgcatgacccacactgac

SEQ ID NO: 135086 - DNA, 120 bp, Artificial Sequence
  ENSG00000103154_11 (sequence is synthesized)
cacaccctgccctcttcggtgacattcttctacctagtaggagtcatgcccctgtagtgcccaacctagccaggtagccaccactgtgcccaggcgccaaataaaccctggttgggaaga

SEQ ID NO: 135087 - DNA, 120 bp, Artificial Sequence
  ENSG00000103154_12 (sequence is synthesized)
ggaaaggggagcagctctgtcccacggattcagatgtcactggaaaggcagaacgaggaggcacctggtcttgtaggttcaggccagccttggagctgccctccacccatccctgcctaa

SEQ ID NO: 135088 - DNA, 120 bp, Artificial Sequence
  ENSG00000103154_13 (sequence is synthesized)
tgcagccggaacttcgtctgcggctgcttttctgaactcttggcgtcctgtttctcctcctgcaccccaaaattaacgcagtcctgcccgtggctggcattgtcaccaggccttgcaaac

SEQ ID NO: 135089 - DNA, 120 bp, Artificial Sequence
  ENSG00000103154_14 (sequence is synthesized)
acctctgtcggactttgcccaacctccctggaaacacaccaggggttttggaaggactgcagtggtaaaggttgtggcgctccctgggacactgattcggagtgtggttgtgtgcagctg

SEQ ID NO: 135090 - DNA, 120 bp, Artificial Sequence
  ENSG00000103154_15 (sequence is synthesized)
agcgtttggcggtgggtgaagccacgtggactgatgactgtggacctacacctgcagggatggccgtgggcctgcgtgtgtgtgtcagcgtggctgggagcaggctggtggtactggcag

SEQ ID NO: 135091 - DNA, 120 bp, Artificial Sequence
  ENSG00000103154_16 (sequence is synthesized)
ccgcttccacgtgggtgaggggagggcctctgtctgcaacatccctcatcagttccccctggatcccagcccggggagggggagagggaaggggggctcagcttcccaggaccctaagct

SEQ ID NO: 135092 - DNA, 120 bp, Artificial Sequence
  ENSG00000103154_17 (sequence is synthesized)
gctcctgggagaagagaaggatcccagtatccggtcagaggctgcaggaagcgcttgcctctccctggcccagggctgactccgcctctcttttctgcagattttccgccgtgcggacaa

SEQ ID NO: 135093 - DNA, 120 bp, Artificial Sequence
  ENSG00000103154_18 (sequence is synthesized)
acaagagacaaattccagaatgcaccaagaccgcgatgcacagagaccaagcgggtgttggggccgtgcacagggcactctgtgtgtcttctgggggagtgtctgtgtttctgtatgtct

SEQ ID NO: 135094 - DNA, 120 bp, Artificial Sequence
  ENSG00000103154_19 (sequence is synthesized)
agccgcttggcagagctgattgggaggctggagagcaaacacctgcagctggtccggcaggagatggccgtgtgccccgagcaactgagcgagtttctggactctctgcgccagtatctg

SEQ ID NO: 135095 - DNA, 120 bp, Artificial Sequence
  ENSG00000103160_0 (sequence is synthesized)
gtgagggcgcggcgcggcagcagctccggcggccgagacgggggcggcggccgcgcgggtctggcgggaccggtttggaagactttgccggcctgcagattggccttaagagaaggacgg

SEQ ID NO: 135096 - DNA, 120 bp, Artificial Sequence
  ENSG00000103160_1 (sequence is synthesized)
agccacatactgctgacggcccagaactggcagagagaaggttgccatggctgctgttgacagtttctacctcttgtacagggaaatcgccaggtcttgcaattgctatatggaagctct

SEQ ID NO: 135097 - DNA, 120 bp, Artificial Sequence
  ENSG00000103160_2 (sequence is synthesized)
agctttggttggagcctggtatacggccagaaaaagcatcactgtcatctgtgacttttacagcctgatcaggctgcattttatcccccgcctggggagcagagcagacttgatcaagca

SEQ ID NO: 135098 - DNA, 120 bp, Artificial Sequence
  ENSG00000103160_3 (sequence is synthesized)
gtatggaagatgggccgttgtcagcggtgcaacagatgggattggaaaagcctacgctgaagagttagcaagccgaggtctcaatataatcctgattagtcggaacgaggagaagttgca

SEQ ID NO: 135099 - DNA, 120 bp, Artificial Sequence
  ENSG00000103160_4 (sequence is synthesized)
ggttgttgctaaagacatagccgacacgtacaaagtggaaactgatattatagttgcggacttcagcagcggtcgtgagatctaccttccaattcgagaagccctgaaggacaaagacgt

SEQ ID NO: 135100 - DNA, 120 bp, Artificial Sequence
  ENSG00000103160_5 (sequence is synthesized)
tggcatcttggtaaataacgtgggtgtgttttatccctacccgcagtatttcactcagctgtccgaggacaagctctgggacatcataaatgtgaacattgccgccgctagtttgatggt

SEQ ID NO: 135101 - DNA, 120 bp, Artificial Sequence
  ENSG00000103160_6 (sequence is synthesized)
ccatgttgtgttaccgggaatggtggagagaaagaaaggtgccatcgtcacgatctcttctggctcctgctgcaaacccactcctcagctggctgcattttctgcttctaaggcttattt

SEQ ID NO: 135102 - DNA, 120 bp, Artificial Sequence
  ENSG00000103160_7 (sequence is synthesized)
agaccacttcagcagagccttgcaatatgaatatgcctctaaaggaatctttgtacagagtctaatccctttctatgtagccaccagcatgacagcacccagcaactttctgcacaggtg

SEQ ID NO: 135103 - DNA, 120 bp, Artificial Sequence
  ENSG00000103160_8 (sequence is synthesized)
ctcgtggttggtgccttcgccaaaagtctatgcacatcatgctgtttctactcttgggatttccaaaaggaccacaggatattggtcccattctattcagtttctttttgcacagtatat

SEQ ID NO: 135104 - DNA, 120 bp, Artificial Sequence
  ENSG00000103160_9 (sequence is synthesized)
gcctgaatggctctgggtgtggggagcaaatattctcaaccgttcactacgtaaggaagccttatcctgcacagcctgagtctggatggccacttgagaagttttgccaactcctgggaa

SEQ ID NO: 135105 - DNA, 120 bp, Artificial Sequence
  ENSG00000103160_10 (sequence is synthesized)
cctcgatattctgacatttggaaaaacacatttaatttatctcctgtgtttcattgctgattattcagcatactgttgattcgtcatttgcaaaacacacataataccgtcagagtgctg

SEQ ID NO: 135106 - DNA, 120 bp, Artificial Sequence
  ENSG00000103160_11 (sequence is synthesized)
tgaaaaaccttaagggtgtgtggatggcacaggatcaataatgcctgaggctgattgacgacatctacatttcagtgctttttccctaagctgtttgaaagttacgcttttctgttgttc

SEQ ID NO: 135107 - DNA, 120 bp, Artificial Sequence
  ENSG00000103160_12 (sequence is synthesized)
tagagccacagcagtctaatattgaaatataatatgatttgtcaggtcttataatttcagatgttgttttttaagggaaattgaccatttcactagaggagttgtgctggtttttaaatg

SEQ ID NO: 135108 - DNA, 120 bp, Artificial Sequence
  ENSG00000103160_13 (sequence is synthesized)
tgcatcaagaaagactactgaaaagtattattttgtaactaagattgctggtactattaggaaaaatctgtgtgtattgtatagctctagctgtttgactatctgtaatgaaaatgctgc

SEQ ID NO: 135109 - DNA, 120 bp, Artificial Sequence
  ENSG00000103160_14 (sequence is synthesized)
acttcaactggtatttcattagagaaccgtgtgtgtgcgtgtgtgtggtgcctttgagcaactttatttatggttaccatatttttaaaaagattttttgtcagggtgacttaacatgga

SEQ ID NO: 135110 - DNA, 120 bp, Artificial Sequence
  ENSG00000103160_15 (sequence is synthesized)
taagcctaccaaatttcatgctgttggtttgccatgaatgatattacttcctacattatatttgtgttttttcaaatctgctatggaatgaacttattcctagatttggatatgtaagag

SEQ ID NO: 135111 - DNA, 120 bp, Artificial Sequence
  ENSG00000103160_16 (sequence is synthesized)
aaacctgcagtcatcttttgatttataaggcaattcttgtggataaatagtgatttctcagcctctgacccattttataactgaaatttagccctttagagcttgttatatctggttttc

SEQ ID NO: 135112 - DNA, 120 bp, Artificial Sequence
  ENSG00000103160_17 (sequence is synthesized)
ctacgtttttctatgtaatattattccattccagtagcattattgatagaaatagtaagtatttatggaatagtaaaatatggacaaattacgtgtgtgacatatctgtcaatataagtt

SEQ ID NO: 135113 - DNA, 120 bp, Artificial Sequence
  ENSG00000103160_18 (sequence is synthesized)
agaagcttattcttggtttgtgtaatgaatttatgtattgtagtgaatacctttactggtgtgaagataattatgcacaaaccctcacaatacgcgttaacattgaaacctgtgaaatgt

SEQ ID NO: 135114 - DNA, 120 bp, Artificial Sequence
  ENSG00000103160_19 (sequence is synthesized)
ccttagtttgggtcatataaagccaaccatttttgaggaccatgtacctagtgctttgaaaactctaagtcactatatgaatatgacaatatgtgcacatttaaaattcagagctcggca

SEQ ID NO: 135115 - DNA, 120 bp, Artificial Sequence
  ENSG00000103160_20 (sequence is synthesized)
ttgtgatactgatgcagaagctagtagattggttaaaagtctggacttctgtggcatttttttcgtgacgtgataatctatcataagcagacctaagcacagttttatgaacacaatttt

SEQ ID NO: 135116 - DNA, 120 bp, Artificial Sequence
  ENSG00000103160_21 (sequence is synthesized)
gcccatgacattgcctacaggatttccagatgtgacttgcactcagaagatcagtggtcaacttcagaagctcttccacgcttagatcatgtcttcagaacttagatgtgaaaatctaca

SEQ ID NO: 135117 - DNA, 120 bp, Artificial Sequence
  ENSG00000103160_22 (sequence is synthesized)
cactgggagatgctgtgagccccaaggttttgatggagtttgcttggaatcctcttgacttcatgccacattgacgtgaactttgatgtataataagcagcagcaacttcatgtgaaaat

SEQ ID NO: 135118 - DNA, 120 bp, Artificial Sequence
  ENSG00000103160_23 (sequence is synthesized)
atggtcaggtagttatatgtaaggttacgtggtccagtaatgtcttagattgataaattaggtatggaatccatcagtgttacgtgatgagaataggtgaacacaccttgtcagtgatga

SEQ ID NO: 135119 - DNA, 120 bp, Artificial Sequence
  ENSG00000103160_24 (sequence is synthesized)
tgtaaacttctctccttggcaggacatgggcaaacatgctgattggtgcaaatgtggtgccgagctgtccatagctgcagtgaaagatgaagagcaagaccttctctaggttttctagct

SEQ ID NO: 135120 - DNA, 120 bp, Artificial Sequence
  ENSG00000103160_25 (sequence is synthesized)
ttcattaaatgtatttttttccccagagctaatttgaaagttgattggaccactgtggatggggtgtcattaagaatgtgggaaataggggccgagtgcggtggctcacacctgtaatcc

SEQ ID NO: 135121 - DNA, 85 bp, Artificial Sequence
  ENSG00000103160_26 (sequence is synthesized)
ctcacacctgtaatcccagcagtttggaaggccagggcaggtggatcgcttgatcccaggaggtcgagaccagcctggggaacac

SEQ ID NO: 135122 - DNA, 78 bp, Artificial Sequence
  ENSG00000103160_27 (sequence is synthesized)
ctacttgggaggctgaggcaggagaattttttgagcccaggatgcagaagacagagcgagaccctgtctcaaaaaaaa

SEQ ID NO: 135123 - DNA, 120 bp, Artificial Sequence
  ENSG00000103160_28 (sequence is synthesized)
tctcaaaaaaaaaaaaagaacgtgggaaatatgaacctttgaaagttaatctgtgaattgaaagtttaacaataaaagtagttgtttgtttcctttggaagagttttgttccagatgttt

SEQ ID NO: 135124 - DNA, 120 bp, Artificial Sequence
  ENSG00000103160_29 (sequence is synthesized)
gtaatttggttgtttgtaatttggaatgagagaatttttttttcttaggagtgattgcaagaaattaacatgaacaacagtggtcataactgattaaaagctgacacgtcagtaacaaaa

SEQ ID NO: 135125 - DNA, 120 bp, Artificial Sequence
  ENSG00000103160_30 (sequence is synthesized)
gagggcgcggcgcggcagcagctccggcggccgagacgggggcggcggccgcgcgggtctggcgggaccggtttggaagactttgccggcctgcaggacacatgatgacattggacccac

SEQ ID NO: 135126 - DNA, 120 bp, Artificial Sequence
  ENSG00000103160_31 (sequence is synthesized)
gttgtgattggtgggtatttgttgtgattgattggtgggtatttgttgtgattgcttggtgggtatttgttgtgattggtgggtatttgttgtgattggtgggtatttgttgtgattgat

SEQ ID NO: 135127 - DNA, 120 bp, Artificial Sequence
  ENSG00000103160_32 (sequence is synthesized)
tggtgggtatttgttgtgattgcttggtgggtatttgttgtgattggtgggtatttgtttgattggtgggtattgtgattggtgggtatttgtttgattggtgtgtattgtgattggtgg

SEQ ID NO: 135128 - DNA, 120 bp, Artificial Sequence
  ENSG00000103160_33 (sequence is synthesized)
gtatttgttatgattgattggtgggtatttgttgtgattggtgggtatttgttgtgattggtgggtatttgttgtgattgattggtgggtatttgttgtgattggtgggtatttgttgtg

SEQ ID NO: 135129 - DNA, 120 bp, Artificial Sequence
  ENSG00000103160_34 (sequence is synthesized)
attgattggtgggtatttgttgtgattggtgggtttcatgtgctggtctgtgtacttgttccttcagtgttgattttgggttctaaccttacaacctttttctctttcatttttagtttc

SEQ ID NO: 135130 - DNA, 120 bp, Artificial Sequence
  ENSG00000103160_35 (sequence is synthesized)
ataatcttttctgtgaagtcggatgcattattcaaggagctattgaatttaatgtggtgtttttatgggaacatgctgataaaaaaataaaacttatggctcctgccgtgattatgttca

SEQ ID NO: 135131 - DNA, 120 bp, Artificial Sequence
  ENSG00000103160_36 (sequence is synthesized)
agacgcagccccagaaaccggatcgctgcagcgcccctcggcgatcccaacatgatgtgtacaggtgactgcgaggcagtcggggggtctcacagtgggctccctggacaggactctgcg

SEQ ID NO: 135132 - DNA, 120 bp, Artificial Sequence
  ENSG00000103168_0 (sequence is synthesized)
cccgagtgccaaagctggggttctacttgagatttccctcgtggtgccagggtccggcgagcatcacgccgaggcccattttccagacgaccacgacgaggccggggtcacgaactctgg

SEQ ID NO: 135133 - DNA, 120 bp, Artificial Sequence
  ENSG00000103168_1 (sequence is synthesized)
cgccccttaccagcttccagtctctcgaggtggccagtgtggtgcttggtccttgtttccaggatggacttccccagctccctccgccctgcattgtttctgaccggcccccttggtctg

SEQ ID NO: 135134 - DNA, 120 bp, Artificial Sequence
  ENSG00000103168_2 (sequence is synthesized)
agcgacgtccctgacctctctttcatgtgcagctggcgagacgcactgactctgccagaggcccagccccagaactcagagaatggggcactgcatgtgaccaaggacctgctgtgggag

SEQ ID NO: 135135 - DNA, 120 bp, Artificial Sequence
  ENSG00000103168_3 (sequence is synthesized)
ccggcaacccctgggcctctccccatgctgcctcccctcatcgatccctgggaccctggcctgactgcccgggacctgcttttccgcggagggtgccggtatcggaagcggccccgagtc

SEQ ID NO: 135136 - DNA, 120 bp, Artificial Sequence
  ENSG00000103168_4 (sequence is synthesized)
gtgctggatgtgactgagcagatcagccggttcctcttggatcatggagacgtagcctttgcgcccctggggaagctgatgctggagaatttcaagctggagggagcggggagccgcact

SEQ ID NO: 135137 - DNA, 120 bp, Artificial Sequence
  ENSG00000103168_5 (sequence is synthesized)
aagaagaagacagtggtcagtgtgaagaagctgctccaggacctcggtggacaccagccctgggggtgtccctgggcttacctcagcaaccgacagcgccgcttctctatcctcgggggc

SEQ ID NO: 135138 - DNA, 120 bp, Artificial Sequence
  ENSG00000103168_6 (sequence is synthesized)
cccatcctgggcacgtcggtggcgagccacttggcagagctgctgcacgaggagctggtgctgcggtgggagcagctgcttctggatgaggcctgcactgggggcgcgctggcctgggtt

SEQ ID NO: 135139 - DNA, 120 bp, Artificial Sequence
  ENSG00000103168_7 (sequence is synthesized)
cctggaaggacaccccagttcgggcagctggtctaccctgctggaggcgcccaggacaggctgcatttccaagaggtcgttctgaccccaggtgacaatccccaattccttgggaaacct

SEQ ID NO: 135140 - DNA, 120 bp, Artificial Sequence
  ENSG00000103168_8 (sequence is synthesized)
ggacgcatccagctccagggacctgtccggcaagtggtgacatgcaccgtccagggagaaagtaaggcccttatatacactttcctccctcactggctgacctgctacctgacccctggc

SEQ ID NO: 135141 - DNA, 120 bp, Artificial Sequence
  ENSG00000103168_9 (sequence is synthesized)
cctttccatccctcctcagctctgctggccgtccgctctgactaccactgtgccgtgtggaagtttggtaaacagtggcagccaacccttctgcaggcaatgcaggtggagaaaggggcc

SEQ ID NO: 135142 - DNA, 120 bp, Artificial Sequence
  ENSG00000103168_10 (sequence is synthesized)
acggggatcagcctcagccctcacctgcccggggagctggccatctgcagccgctcgggagccgtctgcctgtggagccctgaggatgggctgcggcaaatctacagggaccctgagacc

SEQ ID NO: 135143 - DNA, 120 bp, Artificial Sequence
  ENSG00000103168_11 (sequence is synthesized)
ctcgtgttccgggactcctcttcgtggcgttgggcagacttcactgcgcaccctcgggtgctgaccgtgggtgaccgcaccggagtgaagatgctggacactcagggcccgccgggctgt

SEQ ID NO: 135144 - DNA, 120 bp, Artificial Sequence
  ENSG00000103168_12 (sequence is synthesized)
ggtctgttgctttttcgtttgggggcagaggcttcgtgccagaaaggggaacgtgtcctgcttacccagtacctggggcactccagccccaaatgcctcccccctactcttcatctcgtc

SEQ ID NO: 135145 - DNA, 120 bp, Artificial Sequence
  ENSG00000103168_13 (sequence is synthesized)
tgtacccagttctctctctacctagtggacgagcgccttcccctggtgccgatgctgaagtggaaccatggcctcccctccccgctcctgctggcccgactgctgcctccgccccggccc

SEQ ID NO: 135146 - DNA, 120 bp, Artificial Sequence
  ENSG00000103168_14 (sequence is synthesized)
agctgcgtgcagcccctgctcctcggaggccagggtgggcagctgcagctgctgcacctggcaggagaaggggcgtcggtgccccgcctggcaggccccccccagtctcttccttccagg

SEQ ID NO: 135147 - DNA, 120 bp, Artificial Sequence
  ENSG00000103168_15 (sequence is synthesized)
atcgactccctccctgcatttcctctgctggagcctaagatccagtggcggctgcaggagcgcctgaaagcaccgaccataggtctggctgccgtcgtcccgcccttgccctcagcgccc

SEQ ID NO: 135148 - DNA, 120 bp, Artificial Sequence
  ENSG00000103168_16 (sequence is synthesized)
gatgtcttctaccagcagctccgcccccaggtggactccagcctccgcagagatgctgggcctcctggcgacacccaacctgactgccatgcccccacagcttcctggacctcccaggac

SEQ ID NO: 135149 - DNA, 120 bp, Artificial Sequence
  ENSG00000103168_17 (sequence is synthesized)
actgccggctgcagccagtggctgaaggccctgctaaaagtgcccctggctcctcctgtgtggacagcacccaccttcacccaccgccagatgctgggcagcacagagctgcggagggag

SEQ ID NO: 135150 - DNA, 120 bp, Artificial Sequence
  ENSG00000103168_18 (sequence is synthesized)
gaagaggaagggcagcggctgggtgtgctccgcaaggccatggcccgagggcagctcctgctgcagagagacctgggctccctccctgcggcagagccaccccctgcacccgagtcaggc

SEQ ID NO: 135151 - DNA, 120 bp, Artificial Sequence
  ENSG00000103168_19 (sequence is synthesized)
ctagaggacaagctcagtgagcgcctgggggaagcctgggcaggccgaggggctgcctggtgggagaggcagcagggcaggacctcggagcccgggagacagaccaggcggcccaagcgc

SEQ ID NO: 135152 - DNA, 120 bp, Artificial Sequence
  ENSG00000103168_20 (sequence is synthesized)
cggacccagctgtccagcagcttttcgctcagtggccatgtggatccctcagaggacaccagctcccctcatagccctgagtggccacctgctgatgctctgcccctgccccccacgacc

SEQ ID NO: 135153 - DNA, 120 bp, Artificial Sequence
  ENSG00000103168_21 (sequence is synthesized)
ccgccctcccaggagttgactccggatgcatgcgcccagggcgtcccatcagagcagcggcagatgctccgtgactacatggccaagctaccaccccagagggacaccccaggctgtgcc

SEQ ID NO: 135154 - DNA, 120 bp, Artificial Sequence
  ENSG00000103168_22 (sequence is synthesized)
accacacctccccactcccaggcctccagcgtccgggccactcgctcccagcagcacacacccgtcctctctagctctcagcccctccggaagaagcctcgaatgggcttctgaggacac

SEQ ID NO: 135155 - DNA, 120 bp, Artificial Sequence
  ENSG00000103168_23 (sequence is synthesized)
aaggtgggctgccctcaagccccagagagcccctcatccttcctctgggaccagatgtgccttccacagttgaaacttgagaagcagagctcgccaccttctggaggccactgtgatgat

SEQ ID NO: 135156 - DNA, 120 bp, Artificial Sequence
  ENSG00000103168_24 (sequence is synthesized)
gagccaagcaatttggagccaagttgaagggacagggcaacaaaatacagtagtagtttcttttgtattttgtatattcgcctgaagatcatcccgcaaggcaggctggaggtgccggtg

SEQ ID NO: 135157 - DNA, 120 bp, Artificial Sequence
  ENSG00000103168_25 (sequence is synthesized)
ggcctgtgttgctgggattttagtctgtgctgggaggcagggctccgctgcgcctcagctgtgggggcctcaggcaggtccctcagttctcacgccttcctgtccagtggaatgggggcc

SEQ ID NO: 135158 - DNA, 120 bp, Artificial Sequence
  ENSG00000103168_26 (sequence is synthesized)
aggagtgctggctcctcgtgtttggtgagggtggagtgaggcccctgcagagctgctgatgaggtgggcacagcggccgttggcagctgctgttgtgggttgctttgtcaatctctgccc

SEQ ID NO: 135159 - DNA, 120 bp, Artificial Sequence
  ENSG00000103168_27 (sequence is synthesized)
cggtctgatgtttcctacagggagatgccttggatccaggttcagggactaaatacacttggcagctgaagatgaattggaatggtcacgttttttaggctggacagcgtcccgccacag

SEQ ID NO: 135160 - DNA, 120 bp, Artificial Sequence
  ENSG00000103168_28 (sequence is synthesized)
ctactacctgacactgagctcatgcagagagatgatggctgatgttccttctcccttgggacatgggtctggcacctgtgggctgtcgatagtgccctctgagcagagggtcacggtcat

SEQ ID NO: 135161 - DNA, 120 bp, Artificial Sequence
  ENSG00000103168_29 (sequence is synthesized)
gtcagtttgggggaattctctgttgtgcctcacagactcccccctttctttcctccctccccttctcattttgatgtctaaagcatcaagtccctcttcctcggagtttctctagctgca

SEQ ID NO: 135162 - DNA, 120 bp, Artificial Sequence
  ENSG00000103168_30 (sequence is synthesized)
gtggaagattctgttttcctgtggggaaaatgctcacttgagattttgcagggacccgggtctgtctggtttctgatgacatagtaagagaaaggtcttttttcaggttggctggtgaaa

SEQ ID NO: 135163 - DNA, 120 bp, Artificial Sequence
  ENSG00000103168_31 (sequence is synthesized)
ggaattgcatgtgactcacacaaacaggagctagcccaatcatacactgactcgcgtgggtgttaaaatgtttatcatgcctaagggagacatttatgattaaaccatttatgctacata

SEQ ID NO: 135164 - DNA, 120 bp, Artificial Sequence
  ENSG00000103168_32 (sequence is synthesized)
cctgctcctcggaggccagggtgggcagctgcagctgctgcacctggcaggtctggctgccgtcgtcccgcccttgccctcagcgcccacaccaggcctggtgctcttccagctctcggc

SEQ ID NO: 135165 - DNA, 120 bp, Artificial Sequence
  ENSG00000103168_33 (sequence is synthesized)
ttccagcgggctcgcctctggtagaggaggtgctcttggcatggtccagagaagggcaggaatttggggggcttgcagtgatcatagctcgtgcactgatccttagtgagaggcccagat

SEQ ID NO: 135166 - DNA, 120 bp, Artificial Sequence
  ENSG00000103168_34 (sequence is synthesized)
ctgtggagccctgaggatgggtatcgccgcttcctgtgaaaccccccaccctaacgaactgaactccgccctgttgagcatgtcgcgacccttgagccccttccccatcagcctgtcccc

SEQ ID NO: 135167 - DNA, 120 bp, Artificial Sequence
  ENSG00000103168_35 (sequence is synthesized)
cactagaggctgctgcttaccagcggctctgctgggcccagacaaccacccagcaaaccaaactcaaccctggatgaatctgtggcccaaacacgcagtggatcccacagtcggtgctaa

SEQ ID NO: 135168 - DNA, 120 bp, Artificial Sequence
  ENSG00000103168_36 (sequence is synthesized)
caggcaggtggggaagctctcccagggcctccccttagtagagcttcgaggtgcagccaggggtggagcaggggaggaggggcctcggggtggggcttccgtgcagagctggagagtttc

SEQ ID NO: 135169 - DNA, 120 bp, Artificial Sequence
  ENSG00000103168_37 (sequence is synthesized)
tgctgtgcaggaggcgggggctctgaggaagcaggtctgtcctccacccgccctcccggggacattcgtaggcgtgcctcgagcacaggctcccgggtcaggagagtgggggtggctgcg

SEQ ID NO: 135170 - DNA, 120 bp, Artificial Sequence
  ENSG00000103168_38 (sequence is synthesized)
agaaggccaggcaggtttctgctggcaaggctcccccacacctcttctgagcacccctttcccacttgttctgtctgtccaccggactgtcggtcagaattggtgaaggaagcggcacct

SEQ ID NO: 135171 - DNA, 120 bp, Artificial Sequence
  ENSG00000103168_39 (sequence is synthesized)
gttcagggctggcaggtgaagtctgagaggcacgtggaggctgatgggagatgctgctgcccctcagggctctgcactcacctggagagccacatggggcctggagggccactacacagc

SEQ ID NO: 135172 - DNA, 120 bp, Artificial Sequence
  ENSG00000103168_40 (sequence is synthesized)
taggaagacgatgctcagatgcagtccctggctgtggagtaacttgagcgtcttgggggtgtagtctgtaaatgatggacttccccagctccctccgccctgcattgtttctgaccggcc

SEQ ID NO: 135173 - DNA, 120 bp, Artificial Sequence
  ENSG00000103168_41 (sequence is synthesized)
ctcactctggctgcctcattttctcacacacttcactgctctaggattttcacagttgttgaccgttcggcctggaaccctcttcccagttgcgtacatggttctctccttcactaggtt

SEQ ID NO: 135174 - DNA, 120 bp, Artificial Sequence
  ENSG00000103168_42 (sequence is synthesized)
caggctgtgctcaaacgccaccttctcaacgaggcttttcctggctggctttgctgaaaccacgccctcagcccactaccagatccccttctcctggacgggtggttggctttaatacag

SEQ ID NO: 135175 - DNA, 120 bp, Artificial Sequence
  ENSG00000103168_43 (sequence is synthesized)
ggacagtgctgcgtagcctggagactgtgcttagtgacctggcctcctcttctccccagatcagccggttcctcttggatcatggagacgtagcctttgcgcccctggggaagctgatgc

SEQ ID NO: 135176 - DNA, 120 bp, Artificial Sequence
  ENSG00000103174_0 (sequence is synthesized)
gacccgaggccccggtccaatatggcgacctccacgggtcgctggcttctcctccggcttgcactattcggcttcctctgggaagcgtccggcggcctcgactcgggggcctcccgcgac

SEQ ID NO: 135177 - DNA, 120 bp, Artificial Sequence
  ENSG00000103174_1 (sequence is synthesized)
gacgacttgctactgccctatccacgcgcgcgcgcgcgcctcccccgggactgcacacgggtgcgcgccggcaaccgcgagcacgagagttggcctccgcctcccgcgactcccggcgcc

SEQ ID NO: 135178 - DNA, 120 bp, Artificial Sequence
  ENSG00000103174_2 (sequence is synthesized)
ggcggtctggccgtgcgcaccttcgtgtcgcacttcagggaccgcgcggtggccggccacctgacgcgggccgttgagcccctgcgcaccttctcggtgctggagcccggtggacccggc

SEQ ID NO: 135179 - DNA, 120 bp, Artificial Sequence
  ENSG00000103174_3 (sequence is synthesized)
ggctgcgcggcgagacgacgcgccaccgtggaggagacggcgcgggcggccgactgccgtgtcgcccagaacggcggcttcttccgcatgaactcgggcgagtgcctggggaacgtggtg

SEQ ID NO: 135180 - DNA, 120 bp, Artificial Sequence
  ENSG00000103174_4 (sequence is synthesized)
agcgacgagcggcgggtgagcagctccggggggctgcagaacgcgcagttcgggatccgccgcgacgggaccctggtcaccgggtacctgtctgaggaggaggtgctggacactgagaac

SEQ ID NO: 135181 - DNA, 120 bp, Artificial Sequence
  ENSG00000103174_5 (sequence is synthesized)
ccatttgtgcagctgctgagtggggtcgtgtggctgattcgtaatggaagcatctacatcaacgagagccaagccacagagtgtgacgagacacaggagacaggttcctttagcaaattt

SEQ ID NO: 135182 - DNA, 120 bp, Artificial Sequence
  ENSG00000103174_6 (sequence is synthesized)
gtgaatgtgatatcagccaggacggccattggccacgaccggaaagggcagctggtgctctttcatgcagacggccaaacggagcagcgtggcatcaacctgtgggaaatggcggagttc

SEQ ID NO: 135183 - DNA, 120 bp, Artificial Sequence
  ENSG00000103174_7 (sequence is synthesized)
ctgctgaaacaggacgtggtcaacgccatcaacctggatgggggtggctctgccacctttgtgctcaacgggaccttggccagttacccgtcagatcactgccaggacaacatgtggcgc

SEQ ID NO: 135184 - DNA, 120 bp, Artificial Sequence
  ENSG00000103174_8 (sequence is synthesized)
tgtccccgccaagtgtccaccgtggtgtgtgtgcacgaaccccgctgccagccgcctgactgccacggccacgggacctgcgtggacgggcactgccaatgcaccgggcacttctggcgg

SEQ ID NO: 135185 - DNA, 120 bp, Artificial Sequence
  ENSG00000103174_9 (sequence is synthesized)
gccagcacggactgtgcacggagaccggctgccgctgtgatgccggatggaccgggtccaactgcagtgaagagtgtccccttggctggcatgggccgggctgccagaggccttgtaagt

SEQ ID NO: 135186 - DNA, 120 bp, Artificial Sequence
  ENSG00000103174_10 (sequence is synthesized)
gtgagcaccattgtccctgtgaccccaagactggcaactgcagcgtctccagagtaaagcagtgtctccagccacctgaagccaccctgagggcgggagaactctcctttttcaccagga

SEQ ID NO: 135187 - DNA, 120 bp, Artificial Sequence
  ENSG00000103174_11 (sequence is synthesized)
ccgcctggctagccctcaccctggcgctggccttcctcctgctgatcagcactgcagcaaacctgtccttgctcctgtccagagcagagaggaaccggcgcctgcatggggactatgcat

SEQ ID NO: 135188 - DNA, 120 bp, Artificial Sequence
  ENSG00000103174_12 (sequence is synthesized)
accacccgctgcaggagatgaacggggagcctctggccgcagagaaggagcagccagggggcgcccacaaccccttcaaggactgaagcctcaagctgcccggggtggcacgtcgcgaaa

SEQ ID NO: 135189 - DNA, 120 bp, Artificial Sequence
  ENSG00000103174_13 (sequence is synthesized)
gcttgtttccccacggtctggcttctgcaggggaaatttcaaggccactggcgtggaccatctgggtgtcctcagcccctgtggggcagccaagttcctgatagcacttgtgcctcagcc

SEQ ID NO: 135190 - DNA, 120 bp, Artificial Sequence
  ENSG00000103174_14 (sequence is synthesized)
cctcacctggccacctgccagggcacctgcaaccctagcaataccatgctcgctggagaggctcagctgcctgcttctggcctgcctgtgtctgctgccgagaagcccgtgcccccggga

SEQ ID NO: 135191 - DNA, 120 bp, Artificial Sequence
  ENSG00000103174_15 (sequence is synthesized)
gggctgccgcactgccaaagagtctccctcctcctggggaaggggctgccaacgaaccagactcagtgaccacgtcatgacagaacagcacatcctggccagcacccctggctggagtgg

SEQ ID NO: 135192 - DNA, 120 bp, Artificial Sequence
  ENSG00000103174_16 (sequence is synthesized)
gttaaagggacgagtctgccttcctggctgtgacacgggaccccttttctacagacctcatcactggatttgccaactagaattcgatttcctgtcataggaagctccttggaagaaggg

SEQ ID NO: 135193 - DNA, 120 bp, Artificial Sequence
  ENSG00000103174_17 (sequence is synthesized)
atggggggatgagatcatgtttacagacctgttttgtcatcctgctgccaagaagttttttaatcacttgaataaattgatataataaaaggagccaccaggtggtgtgtggattctgaa

SEQ ID NO: 135194 - DNA, 120 bp, Artificial Sequence
  ENSG00000103174_18 (sequence is synthesized)
gagcagctccggggggctgcagaacgcgcagttcgggatccgccgcgacgggaccctggtcaccggaatggggataggaatcgcttccttgcagagtttattcatcatccagtatcattg

SEQ ID NO: 135195 - DNA, 120 bp, Artificial Sequence
  ENSG00000103174_19 (sequence is synthesized)
agcacttgcttgtatcaggcaatgtgccgcgccccggtgagatagccgtgaacaacacagtctttgccttaacagccctcccccattactagaaaaatcaacaaaagccgggtacctgtc

SEQ ID NO: 135196 - DNA, 120 bp, Artificial Sequence
  ENSG00000103174_20 (sequence is synthesized)
gggcagagggcaccacatgtgaaaggcccagggctgggagggattgtagggagcggaggaacctataaaagactggagagggctgggcacaggggctcacgcctggaatcccagtgcttt

SEQ ID NO: 135197 - DNA, 120 bp, Artificial Sequence
  ENSG00000103174_21 (sequence is synthesized)
gggaggccgaggtgggaggttcgcttgggcccaggagtttaagaccagtgtgggcaacatagaccctgtctttatgaaaaaataaaaaaaaattaggcaggcgtgatggtgcacacctta

SEQ ID NO: 135198 - DNA, 120 bp, Artificial Sequence
  ENSG00000103174_22 (sequence is synthesized)
gacgccatcttgtaggtaggtaggtagacaggtgagaatggagagaggggtggttgggggcagcctggagggagttgaggggccgtctgggggtgtcctctcctcacacatcacatccct

SEQ ID NO: 135199 - DNA, 120 bp, Artificial Sequence
  ENSG00000103174_23 (sequence is synthesized)
agaaatgtgcctgcactgtgggcgtgatgctctgcactgtggaaggaaaaggagttaaatgagaaatgatggtgggcgctgagcctgagcagcgccgctttgtgccgcagcatcaacctg

SEQ ID NO: 135200 - DNA, 120 bp, Artificial Sequence
  ENSG00000103174_24 (sequence is synthesized)
ccccggtccaatatggcgacctccacgggtcgctggcttctcctccggcttgcactattcggcttcctctgggaagcgtccggcggcctcgactcggggtgagtgcagctccctgggcca

SEQ ID NO: 135201 - DNA, 120 bp, Artificial Sequence
  ENSG00000103174_25 (sequence is synthesized)
aaaccactgctaaacatgaataacagttctacgagagttctttatgctctccttgcaacttcctgtaggtttgagattacctggagataaaaagttaacatcaccagcaccgcccgccag

SEQ ID NO: 135202 - DNA, 120 bp, Artificial Sequence
  ENSG00000103174_26 (sequence is synthesized)
caggttggatggggaggctgttggcaacaaccctctcgagaaccaggaccagtgggctgggcggagctgttcttaagtctttcaacaagtattgagcagctactttgtgcccagcactat

SEQ ID NO: 135203 - DNA, 120 bp, Artificial Sequence
  ENSG00000103174_27 (sequence is synthesized)
tctgggtactggggattcatggggaggaagataggcttatattgaatatataggacaaaaaatagttatagaatatgctgaaaagaattgataagtgctcagaaacaaaaataaagttag

SEQ ID NO: 135204 - DNA, 120 bp, Artificial Sequence
  ENSG00000103174_28 (sequence is synthesized)
gggaaaggggagagatggggaccggagctgtgggtacaggaagagaaaagtgaagagaaaaaaatcttcatggacctgcaacatcggcgtggcccaggagcttgtttcaaagccccacac

SEQ ID NO: 135205 - DNA, 120 bp, Artificial Sequence
  ENSG00000103174_29 (sequence is synthesized)
cctcagacctgcagaatcagaggcaaggcccaagagtctatgttttaacgggcctccatggtgactctgaccgacactcaaggttgagaaccactgggatgcagaatactgggatgggga

SEQ ID NO: 135206 - DNA, 120 bp, Artificial Sequence
  ENSG00000103174_30 (sequence is synthesized)
aggttgagaaccactgggatgcagaatactgggatggggacaggataccatgaccattttagagtgggcagtaagctaggtgtggtggctaacacctataatcccagcactttgggaggc

SEQ ID NO: 135207 - DNA, 70 bp, Artificial Sequence
  ENSG00000103174_31 (sequence is synthesized)
cgaggcgggaggatcggttgagcccaggagttcaagacctgcctgggcaacatagtgagacctatctcta

SEQ ID NO: 135208 - DNA, 120 bp, Artificial Sequence
  ENSG00000103174_32 (sequence is synthesized)
tagataggatacaaggaaatggtcacaaagtgagcagggagaagatcttggttccaatcccagcttagccatcgatgacttgtctacccacctatgccgtagacaagtccctcggcctcc

SEQ ID NO: 135209 - DNA, 120 bp, Artificial Sequence
  ENSG00000103174_33 (sequence is synthesized)
ctgagcctcatttctagcccctgtaaagagagtgttttggtttgctctggttgcataaccagcacaaatttagcaacactcagcagggaatgttcttttgtttgtttgtttctttgagac

SEQ ID NO: 135210 - DNA, 78 bp, Artificial Sequence
  ENSG00000103174_34 (sequence is synthesized)
aatctcagctcactgcaacctctacctctcaggttcaggtgatcctcccaccttagcctcccaggtaactgggattac

SEQ ID NO: 135211 - DNA, 69 bp, Artificial Sequence
  ENSG00000103174_35 (sequence is synthesized)
aacttggaatgttctatgttcagggtgtcccatggacaaaaccaagatgctggttaggcagggctcttc

SEQ ID NO: 135212 - DNA, 120 bp, Artificial Sequence
  ENSG00000103174_36 (sequence is synthesized)
ccatggacaaaaccaagatgctggttaggcagggctcttctcttatctggaaagaatcctcttgtttaggttgttggaagaatccccgtcgcctcctcagttgtgactgaggtcttggtt

SEQ ID NO: 135213 - DNA, 120 bp, Artificial Sequence
  ENSG00000103174_37 (sequence is synthesized)
tccctgctggccgccatctggggcctcagctccttcaagctgcccaggttccttcccatgtgtgtcctctcccccagttgtccggccaccctctcatccccctcgtatttcaaatctcac

SEQ ID NO: 135214 - DNA, 120 bp, Artificial Sequence
  ENSG00000103174_38 (sequence is synthesized)
ttcctattctgtcaccagccagagaaggctctctgtgttgaacactcctgtgattccagtggctgcacccagatcctccgggccgtttcccctcccttaaggattcctatgccatgtaac

SEQ ID NO: 135215 - DNA, 120 bp, Artificial Sequence
  ENSG00000103174_39 (sequence is synthesized)
gtctgccccagcctgtctcattcagccaatattgagtgcctgctatgtgccaggccccgggggttcaagagagcagaaattgctgcagtccctcccccaggatgccagtactacccaggc

SEQ ID NO: 135216 - DNA, 120 bp, Artificial Sequence
  ENSG00000103174_40 (sequence is synthesized)
gaggtacctatccctccaaggggaggggtatgggcagacgctcctgctccggccccttcagcctgtctctggtatgttacagtaaagcagtgtctccagccacctgaagccaccctgagg

SEQ ID NO: 135217 - DNA, 120 bp, Artificial Sequence
  ENSG00000103174_41 (sequence is synthesized)
agactgggatgtgcagaggggaggcagggagacgagcaaggaggctgctgtgcttcccagggaggtaccaggtagctcagaccagtgggaagtggagttaggcaagaagcaggaggcctc

SEQ ID NO: 135218 - DNA, 120 bp, Artificial Sequence
  ENSG00000103174_42 (sequence is synthesized)
aagggcagctggtgctctttcatgcagacggccaaacggagcagcgtgggtgagtcctgggagctgaggccccccggccggggctcagtcctgctaggaggaacgttgacccaatgacag

SEQ ID NO: 135219 - DNA, 120 bp, Artificial Sequence
  ENSG00000103175_0 (sequence is synthesized)
agactgtgcacgctcctgtccccactcacaggcccacgcagcgaggggggcccctcttctgtgtgcgtctggaaggtcgctgcccagggaggaaatgcctttaaccggcgtggggccggg

SEQ ID NO: 135220 - DNA, 120 bp, Artificial Sequence
  ENSG00000103175_1 (sequence is synthesized)
cagctgcaggaggcagatcatccgggctctgtgcctcttgctacttctcctccacgccggctctgccaagaatatctggaaacgggcattgcctgcgaggctggccgagaaatcccgtgc

SEQ ID NO: 135221 - DNA, 80 bp, Artificial Sequence
  ENSG00000103175_2 (sequence is synthesized)
gcagaccgctgcccgccgcctccgcggacgctgccccccggcgcctgccaggccgcgcgctgtcaggcggactccgagtg

SEQ ID NO: 135222 - DNA, 120 bp, Artificial Sequence
  ENSG00000103175_3 (sequence is synthesized)
cccgcggcaccggcgctgctgctacaacggatgcgcctacgcctgcctagaagctgtgccgcccccgccagtcttagactggctggtgcagccgaaacctcgatggcttggtggcaatgg

SEQ ID NO: 135223 - DNA, 120 bp, Artificial Sequence
  ENSG00000103175_4 (sequence is synthesized)
ctggctcctggatggccctgaggaggtgttacaagcagaggcgtgcagcaccacggaggatggggccgaacccctgctctgtccctcgggctatgagtgccacatcctgagcccaggtga

SEQ ID NO: 135224 - DNA, 120 bp, Artificial Sequence
  ENSG00000103175_5 (sequence is synthesized)
cagaaggtgactcaaagaatgtggcagaacctggaaggggacaacagaagcactttcagtaaagcaacggcaagcagctaggttgcaagaacattcctctactttctgctaagccttgga

SEQ ID NO: 135225 - DNA, 120 bp, Artificial Sequence
  ENSG00000103175_6 (sequence is synthesized)
aacagttgggaaaagtagtttgaccctcacagttcacattcagctcagcagagcaagaccccagagatgcttagagacaggacacctggccatcaaacccagtttggcccagcctggttg

SEQ ID NO: 135226 - DNA, 120 bp, Artificial Sequence
  ENSG00000103175_7 (sequence is synthesized)
ggtgactttgtgggagccacttaacagctctgggtccctgttttaccatcctgggagcaaggccctgcagctccacgagacctttaccccgggaagaagccgccacccatgaaagcattt

SEQ ID NO: 135227 - DNA, 120 bp, Artificial Sequence
  ENSG00000103175_8 (sequence is synthesized)
ctgaagcccctttctaagacaaggctcagcatcttgatatttttgacagattcctcccaagtctggctctgggaggtatgtacccatctcaaatgttcccaagataaattcatccttcag

SEQ ID NO: 135228 - DNA, 120 bp, Artificial Sequence
  ENSG00000103175_9 (sequence is synthesized)
gaaatggaaatgaacttgcttactaatgtgtgattcctagttgtagccaccggatgtgctgaggcctaaatgttagcaggtgggaggaggccacagaacaataaaaacaaccaaataaga

SEQ ID NO: 135229 - DNA, 120 bp, Artificial Sequence
  ENSG00000103175_10 (sequence is synthesized)
tgtgtctgagttgtgtggtgggcagatggggctcacccccaaaaaaggacccttatctgtgaatcaagaggcaaaagacacatcacaaatgtgccaaagaatcgtgccttacttttgcct

SEQ ID NO: 135230 - DNA, 120 bp, Artificial Sequence
  ENSG00000103175_11 (sequence is synthesized)
tgttacaaaagtatgcttgctcctgaaagacagcatctcatttcggaaccccaggatttaaacggagcattccgtctccctgatcagtaccaaatgtttgtgaaatacacttatgcattc

SEQ ID NO: 135231 - DNA, 120 bp, Artificial Sequence
  ENSG00000103175_12 (sequence is synthesized)
gagaatacaaacagcacatattactacgtttcccacctgaaaatgtttcctaacacgtggtctgatgtggtggtggaaaggagggaagaaccgaaaggttgcgtatagaggctgaagaac

SEQ ID NO: 135232 - DNA, 120 bp, Artificial Sequence
  ENSG00000103175_13 (sequence is synthesized)
catcgcgtcattcctgttttggaggtcacagactgctggctcctttctctgctgttccaacttccatgtcattataatcagtataatcagcgagtgctcctttacagaaaaagctaacca

SEQ ID NO: 135233 - DNA, 120 bp, Artificial Sequence
  ENSG00000103175_14 (sequence is synthesized)
gcatttttaccagtacccatcaatatactttaaaagatgctaattatttttctattctctttataaagataaatattagtaatttttatttttgtcttactttggagtcaaacgaatgca

SEQ ID NO: 135234 - DNA, 120 bp, Artificial Sequence
  ENSG00000103175_15 (sequence is synthesized)
tttttgtcttactttggagtcaaacgaatgcagaggtcacaagcaaatgtgatcccagaacagttttgatctccaacatgcttaaagttttctgcccaggcacggtggctcacacctgta

SEQ ID NO: 135235 - DNA, 120 bp, Artificial Sequence
  ENSG00000103175_16 (sequence is synthesized)
agtttgggaccagcctgggcaacatagggagaccgcctatctctgtagaataatcatcatcatcatcattagtaaaaaaagttttaaaattacttgtcaacacttaaaaaccagaagatt

SEQ ID NO: 135236 - DNA, 90 bp, Artificial Sequence
  ENSG00000103175_17 (sequence is synthesized)
atcattagtaaaaaaagttttaaaattacttgtcaacacttaaaaaccagaagatttctatttttaaaaatacaggataccagcactttg

SEQ ID NO: 135237 - DNA, 69 bp, Artificial Sequence
  ENSG00000103175_18 (sequence is synthesized)
ttgtctcaaaaaaaaaaaagaaaaaaatacagacttacagtccgggtgcagtggctcactcctgtaatc

SEQ ID NO: 135238 - DNA, 74 bp, Artificial Sequence
  ENSG00000103175_19 (sequence is synthesized)
tgtaatcccagctactcgggagactgagagaggagaactgcacccttcagcctgggtgacagaacaagactctg

SEQ ID NO: 135239 - DNA, 80 bp, Artificial Sequence
  ENSG00000103175_20 (sequence is synthesized)
taagaagtaaataaataaatagaataagaacttacagtaagaaaaaaaataaaacagtctgggagcattggaaatgactg

SEQ ID NO: 135240 - DNA, 120 bp, Artificial Sequence
  ENSG00000103175_21 (sequence is synthesized)
gaaaaaaaataaaacagtctgggagcattggaaatgactggtcagggctaaccagcagctgattcatccaggcaggaggcactctctgctttgctgtggccctgcctggtctgttttcct

SEQ ID NO: 135241 - DNA, 120 bp, Artificial Sequence
  ENSG00000103175_22 (sequence is synthesized)
gtcccctagaggcatttgagttttcgacccctgccttttgaaggccttcccataaactgtgtgggtgactctttctgttaaaaccaggtatattggttatacctgggtgatgggatcacc

SEQ ID NO: 135242 - DNA, 120 bp, Artificial Sequence
  ENSG00000103175_23 (sequence is synthesized)
tgtacaccaaacttcacccatacaccaaacttcagtgacatacaatttacctgtgcaacaaacctgcatgtgtacccccgaacctaaaaattaaaaaaataaagtattagttagagaaca

SEQ ID NO: 135243 - DNA, 120 bp, Artificial Sequence
  ENSG00000103175_24 (sequence is synthesized)
ggctatgctgctgcaacaaaaagacccataaatacagggacccaacctgtgaggcattttcttctctctcagctattagtgcagagacagacatttgtggtaggcaggtagctctgctcg

SEQ ID NO: 135244 - DNA, 120 bp, Artificial Sequence
  ENSG00000103175_25 (sequence is synthesized)
caaagccatctagggacccagcttccttccttcttgccactctgcagtctgactgatgtccttgtccacatggtcagaatggcccccagcctgcaggaaggaaaagagggagggagagga

SEQ ID NO: 135245 - DNA, 120 bp, Artificial Sequence
  ENSG00000103175_26 (sequence is synthesized)
gcagagagccccgattggagggtgagacaggaagttgcatggtcactgctgctcacatctttgtagctgcaagggaggcagggaaggctagtccccagctttgtggcccagtgcccagcc

SEQ ID NO: 135246 - DNA, 120 bp, Artificial Sequence
  ENSG00000103175_27 (sequence is synthesized)
atggggagcctctgtgctgtcatgaagttggggtgcccccagcccccaagcctgggcgtttctcagctgcttgaggagggccctgatctgaccccgtattgtgttagtcttagactggct

SEQ ID NO: 135247 - DNA, 120 bp, Artificial Sequence
  ENSG00000103175_28 (sequence is synthesized)
ggtgcagccgaaacctcgatggcttggtggcaatggctggctcctggatggccctgaggaggtgttacaaggtacctgccgggtaaagcccagaccctacatccaagcctcgatccctcc

SEQ ID NO: 135248 - DNA, 120 bp, Artificial Sequence
  ENSG00000103175_29 (sequence is synthesized)
ttctcagctgcttccagaaagctggcagcaccaggccggctgtcccccatgcacgggcccttcagccaaacactcagccctctttgatcctccccaccccagcgaagaagggctgatggc

SEQ ID NO: 135249 - DNA, 120 bp, Artificial Sequence
  ENSG00000103175_30 (sequence is synthesized)
tgggggcttggccagaatcaaagcccagtacagaataagggcttcgactctccccaagaatggagcctcctcctggatggagaattgaaggggagggggcttagggttggttttcaaatt

SEQ ID NO: 135250 - DNA, 120 bp, Artificial Sequence
  ENSG00000103175_31 (sequence is synthesized)
cctagaattctagggggttcaccgctctctaatgatgaagcctccctgggggtgggggaggtaccaggaggcagagggcaatttctggaaggaacagcatgcaggtcgggggcctggagg

SEQ ID NO: 135251 - DNA, 120 bp, Artificial Sequence
  ENSG00000103175_32 (sequence is synthesized)
cctaggaggtgcgagcgggcacccttgcacacctgcggctgtgcttctgactccacgtccatctgtgtgttgtgtgactgtgtccgctagagtgtgcggccgtatatgcaactgtgtggc

SEQ ID NO: 135252 - DNA, 120 bp, Artificial Sequence
  ENSG00000103175_33 (sequence is synthesized)
tgtgtgtgtgtgtgtgtgtgtgcatgcaaaagtgtgtgactgtattgtgagtgtacatgtgtgggtaagcgtgtgtgtatgtgggtgtggatatgtgtgtgcaggatttgtgtgtgggga

SEQ ID NO: 135253 - DNA, 120 bp, Artificial Sequence
  ENSG00000103175_34 (sequence is synthesized)
gtgtggatatgtgtgtgcaggatttgtgtgtggggatgcgtgcgtatatgtctgtgtgtatttgtgcgtctgacttgcttgtgtaaatgtctgtgtccccatgcgactgtagggctgagt

SEQ ID NO: 135254 - DNA, 120 bp, Artificial Sequence
  ENSG00000103175_35 (sequence is synthesized)
gtgtgtttcagggtgtatccgtgaacatgtctatatggatgttgctgagcctgtgagagtatgtttgggatcaggtgagcttggactgcctgtgtttgtgtgcgtgtttgtgggtgtgca

SEQ ID NO: 135255 - DNA, 120 bp, Artificial Sequence
  ENSG00000103175_36 (sequence is synthesized)
cgtgtgccacatgccgctgagtgagacccagggcctagcctggaacctggggtacagaggcgaggccgcctctctgggtgaggtgcgttccctgcacccgtcccgggagtctgccttcta

SEQ ID NO: 135256 - DNA, 120 bp, Artificial Sequence
  ENSG00000103175_37 (sequence is synthesized)
aagcatgcatccatccatccattcctccatcgatctattcatccatctgttcattcttccatctatccatctatatattcatctatcttttcatctacccatctattattttatccaccc

SEQ ID NO: 135257 - DNA, 120 bp, Artificial Sequence
  ENSG00000103175_38 (sequence is synthesized)
ttctattcctttatccctccatccaaccatccttatatccactcatctatttgcccgtacatccattcacccaaccatccatccatctgcccattcatccattcatgcacatatccttgc

SEQ ID NO: 135258 - DNA, 120 bp, Artificial Sequence
  ENSG00000103175_39 (sequence is synthesized)
attcattcatctatctcttctttcatccattcatacatccatccatccacccatccacccatctacccatccatccattcacctatgtatccattcatccatccacccatatatccatct

SEQ ID NO: 135259 - DNA, 120 bp, Artificial Sequence
  ENSG00000103175_40 (sequence is synthesized)
acccatatatccatctatctattcagccatccagccagccactatccatccatctatccatccatccatatatccatccgtccatccacccacccatctatccatccatccatccatcca

SEQ ID NO: 135260 - DNA, 120 bp, Artificial Sequence
  ENSG00000103175_41 (sequence is synthesized)
tctatccatctatccacccacccatatatccatgcatccatccatccatcatttatccattcacccattcacccatccatccatccatcatttatccattcacccatccatccatccatt

SEQ ID NO: 135261 - DNA, 120 bp, Artificial Sequence
  ENSG00000103175_42 (sequence is synthesized)
ctcccatccatctgatatgtctttatcaataatttacagcacatattttctaagtattactcatcagtctgtgctgggggttggagctacatttgtgaacatgacagacccagtcgctgc

SEQ ID NO: 135262 - DNA, 120 bp, Artificial Sequence
  ENSG00000103175_43 (sequence is synthesized)
tgtcatgcagctaatatcaagcagaaaattcagacatgaatatagcccaagtggttattttatgagaatagtgacaagccttcctgacatcacatgctggatactatgaggacaccttag

SEQ ID NO: 135263 - DNA, 120 bp, Artificial Sequence
  ENSG00000103175_44 (sequence is synthesized)
tccaggttgtgagaaaaggcttcctaaggaggagacatgaaagctcagcctaaagaataagaaatagtgggcagcagaatggcatgtgtgaagctcttgaggtcggaagcaatttggcca

SEQ ID NO: 135264 - DNA, 120 bp, Artificial Sequence
  ENSG00000103175_45 (sequence is synthesized)
tccccaaagctggagtgtgtggtgagctgtggaggtggtgggaggtaagaccagaaacatagacagagctggtgacaccagctggggggcctggggagggagaggaggcactgcaggtgg

SEQ ID NO: 135265 - DNA, 120 bp, Artificial Sequence
  ENSG00000103175_46 (sequence is synthesized)
ggactgagtgacctcagctgggggagggaggagagggccaggtcaccaggcttcatttggcagttcctggtgagccacggggggcattagagcaggaatagatacatctaccccaacaga

SEQ ID NO: 135266 - DNA, 120 bp, Artificial Sequence
  ENSG00000103175_47 (sequence is synthesized)
gctgtgttcttttcacagaaggtgactcaaagaatgtggcagaacctggaaggggacaacagaagcactttcagtaaagcaacggcaagcaggtgagtgggcagagagcaagagtcatgg

SEQ ID NO: 135267 - DNA, 120 bp, Artificial Sequence
  ENSG00000103175_48 (sequence is synthesized)
ccagggtaaatgtgggcagccagtgtcctggcagctttcaccaccaggttgaggagcaggagggtgagagtagcgctttccctactggtagaatttgaaattcccttctgcagtaagtcc

SEQ ID NO: 135268 - DNA, 120 bp, Artificial Sequence
  ENSG00000103175_49 (sequence is synthesized)
tcacctaacgtcatcaataggttcttggaaactgactttaaatgcaacgacatactatatgcactgtatgccatagaagcttaactcatttgtttgtttttttaagagatggggtctcac

SEQ ID NO: 135269 - DNA, 120 bp, Artificial Sequence
  ENSG00000103175_50 (sequence is synthesized)
ccaggctggagtgcactggcacaatcattgttcactgcagcctcagactcctaggctcaagccatcctcctgcctcagctttagtctcagtagctgggactacagacatacaccacctca

SEQ ID NO: 135270 - DNA, 120 bp, Artificial Sequence
  ENSG00000103175_51 (sequence is synthesized)
ttagtctcagtagctgggactacagacatacaccacctcacctggctaattttttttttgtattttttgtagagatgagttctcactatgttactcaggctggtcttgaactcctggcct

SEQ ID NO: 135271 - DNA, 120 bp, Artificial Sequence
  ENSG00000103175_52 (sequence is synthesized)
gctgggattgcaggcatgagtcactgtgcctggccttaactcttgtttatatccattagcctatggtaaaattgtttttgttatatagtaggtcattttgcttaaagttgcagtttccaa

SEQ ID NO: 135272 - DNA, 120 bp, Artificial Sequence
  ENSG00000103175_53 (sequence is synthesized)
taagctatccatgatgttaaatgaggacctactgcaatttcaaggcaggaacgtaggagaactttgtgtgtgatcagaagcagaagcaattctgtatccctctgaatcaaaaatccaaga

SEQ ID NO: 135273 - DNA, 120 bp, Artificial Sequence
  ENSG00000103175_54 (sequence is synthesized)
gtgccaactatctgatagtcatggttccagcctcttggttgctcagcggtagttcatgccagggtggtatagtgaacaaatcccacagagccgctgccctcagggaggccacatcctggt

SEQ ID NO: 135274 - DNA, 120 bp, Artificial Sequence
  ENSG00000103175_55 (sequence is synthesized)
aggggacggctacacaagccaacagatcaatcaatacaaagacaggtgtggtgaagaagtgaacaggcaatgtggggcagagtccctgggcaggagcagagcctggggcaggggctgctt

SEQ ID NO: 135275 - DNA, 120 bp, Artificial Sequence
  ENSG00000103175_56 (sequence is synthesized)
cgtttggggtcagggaaggccctgtgggggttgaagtctgagccaagatccaaggtgagaaggtgctgcttggggagggtctggaggataggcgcccaggtggagggagttggaagagtg

SEQ ID NO: 135276 - DNA, 120 bp, Artificial Sequence
  ENSG00000103175_57 (sequence is synthesized)
aaagtactgaggcaggagggacgctggctttggggagccaaagaaggcccctggggtagacgcaggaaggtggcagggaggctgactccagaggaggccgcaggtgaggcacaggcttgc

SEQ ID NO: 135277 - DNA, 120 bp, Artificial Sequence
  ENSG00000103175_58 (sequence is synthesized)
cctcacgtgccctcaaaggtgaggcgtaggtgcatgcaaagggctgtggagttgcagccctaaacctgaaaatctacccagcccctgtgaatgctggatagccacagagggcaaaaagga

SEQ ID NO: 135278 - DNA, 120 bp, Artificial Sequence
  ENSG00000103175_59 (sequence is synthesized)
gcccctaaaagcaggtgacagcctcccaggacgtcgctgaaacgcaaatgtcagattgcaggttccagaatcctcccggaaaatctggagcccgtagggactgatgccagcacgtctgtt

SEQ ID NO: 135279 - DNA, 120 bp, Artificial Sequence
  ENSG00000103175_60 (sequence is synthesized)
acctgctgatgacaggagccgtccctggagtaggtcagatgcagctgaggactgagcttctaacagggaagaaggaggccagtggatgaggacgagaccttgggaggcagttgaggatgg

SEQ ID NO: 135280 - DNA, 120 bp, Artificial Sequence
  ENSG00000103175_61 (sequence is synthesized)
cagtttggaagttgaggcttttgggtgggcgcagcagctcccgcctgtaatctcaacattttgggagaccgaagcaggcatatggtataatcccaggagttcaagcccagcctggcctgg

SEQ ID NO: 135281 - DNA, 86 bp, Artificial Sequence
  ENSG00000103175_62 (sequence is synthesized)
gaaaaaaaaaaagtacagcctttggagcaagctaggtctgggtttaaattcttgttccagcactgtggatttagtaaataatttcg

SEQ ID NO: 135282 - DNA, 120 bp, Artificial Sequence
  ENSG00000103175_63 (sequence is synthesized)
aattcttgttccagcactgtggatttagtaaataatttcggctctccaagcctcagcctcctcatctataaaatggaactgatggtaggggaggagttaggaactaaataagatgatgcc

SEQ ID NO: 135283 - DNA, 120 bp, Artificial Sequence
  ENSG00000103175_64 (sequence is synthesized)
gtgaagacgtcacagtgagttcagaattgggtcttctcagaaaggggcatcttcctggtgtttctgatggtggcggtggcggcggggagacgaaagatttgtgactctgtggtctgccct

SEQ ID NO: 135284 - DNA, 120 bp, Artificial Sequence
  ENSG00000103175_65 (sequence is synthesized)
gcagtggttcaccctgacccttctttgtctctggtctgccctgcagcggttcaccctgatccttctttgcttgctttccagctaggttgcaagaacattcctctactttctgctaagcct

SEQ ID NO: 135285 - DNA, 120 bp, Artificial Sequence
  ENSG00000103184_0 (sequence is synthesized)
ctctcggcccggcaggtttcgctcccgcccctccggccttccacagctgtcctggccgcagggtgttcaaggcgggacacaccaggctagagatccgcgatcgggccccgcctcaggctc

SEQ ID NO: 135286 - DNA, 120 bp, Artificial Sequence
  ENSG00000103184_1 (sequence is synthesized)
tgtgcacacccctgcctggtgacctccattggtgctccagcgtgaacatggtgcaaagataccagtctcctgtccgagtctacaagtacccgtttgagctggtcatggcggcctacgaga

SEQ ID NO: 135287 - DNA, 120 bp, Artificial Sequence
  ENSG00000103184_2 (sequence is synthesized)
agcgtttccccacgtgcccacagatcccagtcttcctgggcagcgaggtcttgcgcgagtcccgcagcccggacggggctgtgcacgtggtggagcggagctgccggctgcgcgtggacg

SEQ ID NO: 135288 - DNA, 120 bp, Artificial Sequence
  ENSG00000103184_3 (sequence is synthesized)
ccccgcggctgctgcggaagatcgcaggtgttgagcacgtggtcttcgtgcagacaaacatcttgaactggaaggagaggacgctcctcatcgaagcgcacaatgagaccttcgccaacc

SEQ ID NO: 135289 - DNA, 120 bp, Artificial Sequence
  ENSG00000103184_4 (sequence is synthesized)
gcgtggtggtgaacgagcactgcagctacacggtccaccctgagaatgaagactggacttgcttcgagcagtctgcctcactggacattcggtctttctttggctttgaaaatgccttgg

SEQ ID NO: 135290 - DNA, 120 bp, Artificial Sequence
  ENSG00000103184_5 (sequence is synthesized)
agaagatcgccatgaagcagtacaccgccaacgtcaagagggggaaggaggtgattgagcattacctgaatgagctcatctcccagggtacctcgcacattccgcgctggacgcctgccc

SEQ ID NO: 135291 - DNA, 120 bp, Artificial Sequence
  ENSG00000103184_6 (sequence is synthesized)
cagtccgtgaggaggatgcccgcaaccaggctggaccgagggaccccagctccctggaggcccacgggccccgtagcaccctggggcccgctctggaggcggtcagtatggacggggaca

SEQ ID NO: 135292 - DNA, 120 bp, Artificial Sequence
  ENSG00000103184_7 (sequence is synthesized)
agctggatgcggactacattgagaggtgcctgggccacctcacgcccatgcaggagagctgcctgatccagcttcggcactggttacaggagacccacaaaggcaagattcccaaagatg

SEQ ID NO: 135293 - DNA, 120 bp, Artificial Sequence
  ENSG00000103184_8 (sequence is synthesized)
agcacatccttcggttcctgcgggctcatgacttccacctggacaaggcccgggaaatgctgcgccagtccttgagctggcgcaagcagcaccaggtggatctcctccttcagacctggc

SEQ ID NO: 135294 - DNA, 120 bp, Artificial Sequence
  ENSG00000103184_9 (sequence is synthesized)
aaccccctgccctgctggaggagttctatgcagggggctggcattaccaggacatagatggccgccccctctacatcctccgcctgggccagatggacaccaaaggcttgatgaaggccg

SEQ ID NO: 135295 - DNA, 120 bp, Artificial Sequence
  ENSG00000103184_10 (sequence is synthesized)
tgggggaggaggcgctgctgcggcatgttctctccgtcaacgaggaaggacagaagcggtgtgaggggagcacaaggcagctgggccgtcccatcagctcctggacctgcctgctagacc

SEQ ID NO: 135296 - DNA, 120 bp, Artificial Sequence
  ENSG00000103184_11 (sequence is synthesized)
tggagggactcaacatgcggcacctgtggcggccgggggtgaaggccctgctgcggatgattgaggtggttgaggacaattacccagagaccctgggtcggctgctcatcgtgcgagccc

SEQ ID NO: 135297 - DNA, 120 bp, Artificial Sequence
  ENSG00000103184_12 (sequence is synthesized)
cccgagtcttccccgtgctctggacactgatcagccccttcatcaatgagaacaccaggcggaagttcctcatctacagtggcagcaactaccagggacccggaggccttgtggactatc

SEQ ID NO: 135298 - DNA, 120 bp, Artificial Sequence
  ENSG00000103184_13 (sequence is synthesized)
tggatagagaagtgatccctgacttccttgggggagagagtgtgtgtaatgtccccgaaggagggctggtccccaagtccctctacatgacagaagaggagcaggagcacacggaccagc

SEQ ID NO: 135299 - DNA, 120 bp, Artificial Sequence
  ENSG00000103184_14 (sequence is synthesized)
tgtggcagtggagtgagacctaccattcagccagcgtgctccgcggagccccccacgaggtggccgtggagatcctggaaggagagtcggtcatcacctgggactttgacatcctgcgag

SEQ ID NO: 135300 - DNA, 120 bp, Artificial Sequence
  ENSG00000103184_15 (sequence is synthesized)
gggacgtggtgttcagcctgtaccacaccaagcaggcgcccaggctgggcgcccgggaaccggggaccagggccagcgggcagctgatcgacaaaggctgggtcctgggcagggattaca

SEQ ID NO: 135301 - DNA, 120 bp, Artificial Sequence
  ENSG00000103184_16 (sequence is synthesized)
gccgtgtggaggctccccttgtctgccgggagggggagagcatccagggctcccatgtgacccggtggcccggcgtctacctgctccagtggcaaatgcacagcccccccagcagcgtgg

SEQ ID NO: 135302 - DNA, 120 bp, Artificial Sequence
  ENSG00000103184_17 (sequence is synthesized)
cctgcagcctcccgggtgtggacgatgtcctgacggctctgcacagccccgggcccaagtgcaaacttctctactactgtgaggtgctcgcctctgaggacttcaggggctccatgtcca

SEQ ID NO: 135303 - DNA, 120 bp, Artificial Sequence
  ENSG00000103184_18 (sequence is synthesized)
gcctggaatcctgcaccagcggcttctcccagctcagcgccgccacctcgtcctcctcctccggccagtctcatagcagctccctggtctccagatagccgggcccagtgtttcagggcc

SEQ ID NO: 135304 - DNA, 120 bp, Artificial Sequence
  ENSG00000103184_19 (sequence is synthesized)
gcccgctcgcctccagtgtccagaaatgtccagaatgagaagccagctaactgcagggcctgggaccatgtgggctggagccccaggcctagatgctgcccaagttggggtgtctggagc

SEQ ID NO: 135305 - DNA, 120 bp, Artificial Sequence
  ENSG00000103184_20 (sequence is synthesized)
ggatggcaaggatccagaactggcctgtgggtggtgtcagggctcttgaaattgcaaggacagaaccatctccttccggcttcgtgtaaggaagaccaagccaaggccaaggtgtctacc

SEQ ID NO: 135306 - DNA, 120 bp, Artificial Sequence
  ENSG00000103184_21 (sequence is synthesized)
ataccacacctttgggacatccgggcttagcgacgtcagccaggcccatctcctctctgtccacctcttgctctgctttcgccatgcaggggaccatcactatcaggtgcccttctcctc

SEQ ID NO: 135307 - DNA, 120 bp, Artificial Sequence
  ENSG00000103184_22 (sequence is synthesized)
cctgcagcttgcctgcataagagagcctcttcctcccaaaggctccagcccacttcccagagctgagtcttagcctggaagggggagcgattgccaggtcaattcctgaaccaatcacag

SEQ ID NO: 135308 - DNA, 120 bp, Artificial Sequence
  ENSG00000103184_23 (sequence is synthesized)
ttgccaggcacactggagaatgctgattggccagcagggtcatgcccaatctggaccaatcaccgtgatccagggttgcagtgaggtgcagtgattggccagcctggatcacatgcacat

SEQ ID NO: 135309 - DNA, 120 bp, Artificial Sequence
  ENSG00000103184_24 (sequence is synthesized)
ctctggaaccaaccacctgctctcaaaagcactagtgggtgcctcgaggagtactggggtcccccctaagaagaaggaggaaggatgctggggaggcagaaatgaagggtgtttaccttg

SEQ ID NO: 135310 - DNA, 120 bp, Artificial Sequence
  ENSG00000103184_25 (sequence is synthesized)
gcatctgattgcataacgttctgttatgcagtatcaagatgtgcttggtgagcagttaagtgagttacaggcgctgctctttgtggggaacagcacatcctgaagtgaaaatccatgttc

SEQ ID NO: 135311 - DNA, 120 bp, Artificial Sequence
  ENSG00000103184_26 (sequence is synthesized)
agtgatggggtgactgaggctgtctgtataccccactggagatgcctttctctcctagggaactgtttaattatgactgtttttggttgtaagccacagagacccatgcccaggtgcttc

SEQ ID NO: 135312 - DNA, 120 bp, Artificial Sequence
  ENSG00000103184_27 (sequence is synthesized)
aacacaaaagcatgatcattcatgggtgcatagaactggccagtccaggagggcttgcttcaggtaaggctagatccagggtctcaacatggagtctcgattccccccgcgagtggaggc

SEQ ID NO: 135313 - DNA, 120 bp, Artificial Sequence
  ENSG00000103184_28 (sequence is synthesized)
tgctgtgtttgccctggggcagatatgactctggaactaggttcaatattgacatgagttcccctagttactacacaggagcgtcttgggtctccttggggcctgaggacatttctcctt

SEQ ID NO: 135314 - DNA, 120 bp, Artificial Sequence
  ENSG00000103184_29 (sequence is synthesized)
tcctttcctggactccccaaaaggcagccagtcaggggtcaccaacttgaagcctgatctggcctgcttttagtgttgcttttttgcctttagaatggtttaaaaattgaggcatttcgc

SEQ ID NO: 135315 - DNA, 120 bp, Artificial Sequence
  ENSG00000103184_30 (sequence is synthesized)
atcgaaatcaggatttctggcttcccttaggcatttgggagcaccagcagaatggggtcactattgttgcatgaagacaacacctctgcacccctggatgtggccacgccagtccctacc

SEQ ID NO: 135316 - DNA, 120 bp, Artificial Sequence
  ENSG00000103184_31 (sequence is synthesized)
ccattgacttgcgcccagcccacattacacatcctcatgacctgcgtggcaggagtctcactgacatggctctgtcagcagtggctggtacccttgtctcctggccttgcttagagttgg

SEQ ID NO: 135317 - DNA, 120 bp, Artificial Sequence
  ENSG00000103184_32 (sequence is synthesized)
ggctcatctctgctgcagtaactgagccaaggggtggttttgtggccacaagaatcatctttatgcaggctcagcaatgcagggccaggaaacttatatctacgccagcctcaaccccaa

SEQ ID NO: 135318 - DNA, 120 bp, Artificial Sequence
  ENSG00000103184_33 (sequence is synthesized)
acccaaggaagagagaaagtgtcatcttttcagatacatccttcttcctgctgggagagagccttgcccaccttcctgttggctctctgtccgcttctcaggtatctgaacaaaatagat

SEQ ID NO: 135319 - DNA, 120 bp, Artificial Sequence
  ENSG00000103184_34 (sequence is synthesized)
tgctttgcactctgcgtcaaggtgtgtgtgcacatgtgtgcataagagaccgactgattggaaggagacgttctcaaaactaattgctcccatatcaccaggcatttattgctgagagca

SEQ ID NO: 135320 - DNA, 120 bp, Artificial Sequence
  ENSG00000103184_35 (sequence is synthesized)
acttgcaatattttcaactatctttaagtgaatttctagcttttctcttaaaaactaggtgttatcctacaagtatgctgggataagctgccctggcagtctttatacatttattgtcta

SEQ ID NO: 135321 - DNA, 120 bp, Artificial Sequence
  ENSG00000103184_36 (sequence is synthesized)
gccccagagaaggacacagaagccttttacggaaggaagctggaactgcctgttccagaggcgggtggggggaggggagtctgctatcagctgtccacccttaacagtgggggtgaggaa

SEQ ID NO: 135322 - DNA, 120 bp, Artificial Sequence
  ENSG00000103184_37 (sequence is synthesized)
cctcaggccctttcagttctgctcttgagagtgctctctccctagggaaaaccagcccaaactggcttaagcaacaaagcaaattccctgggtcctgtactagggatggctgaaggtggg

SEQ ID NO: 135323 - DNA, 120 bp, Artificial Sequence
  ENSG00000103184_38 (sequence is synthesized)
tgctgcttcagatatggctggatccaggagcttaatgtcctcaggcctctcaactgcacccaggcctcttgactctgcatctctttgcatgctgacctcattctttcttccacctggcgg

SEQ ID NO: 135324 - DNA, 120 bp, Artificial Sequence
  ENSG00000103184_39 (sequence is synthesized)
gaaagatggctgccagcagccccaagcctataatttcaggattcacactctaagagatgcttttccatctcaaatctcatggaaggctctgattggcccagctcgagtcacatgcttatt

SEQ ID NO: 135325 - DNA, 120 bp, Artificial Sequence
  ENSG00000103184_40 (sequence is synthesized)
cctgtgggccacactggcaaggaactagggtcccgtgattgacattccctgcagaagccgcagcaggattggggagggccattcccccaatggacaagagaagctggaccacagaaccag

SEQ ID NO: 135326 - DNA, 120 bp, Artificial Sequence
  ENSG00000103184_41 (sequence is synthesized)
caggtatccatggtggcatctgctacggccggctctcctcccatgtggaggtctcggggacccacgtggaagcattatcaaggtcattcttcttgccttcgggaggactggaattaaaaa

SEQ ID NO: 135327 - DNA, 120 bp, Artificial Sequence
  ENSG00000103184_42 (sequence is synthesized)
taatccaaggaagggattgccaagcttttggcttttgaatttcccctgagccacaaaggctggaagtgccttggcttgggcttcttgcatcattagttcattaatccattgtgaccagga

SEQ ID NO: 135328 - DNA, 120 bp, Artificial Sequence
  ENSG00000103184_43 (sequence is synthesized)
cagaagcaacccacaagcagcattactgttggtgtttgggcacctgggccttgaatttaggccaggactcaaaccccagccttcctttcactagctgtgtaaccttgaccaggtgactta

SEQ ID NO: 135329 - DNA, 120 bp, Artificial Sequence
  ENSG00000103184_44 (sequence is synthesized)
acctctctgtgcctcagtttcctcatctgtaaagtgaggatagcagtgcctacctcaataggttgtagtgggacgaaatgagggagtagctgtaaagctttcagcacagctcccagaaca

SEQ ID NO: 135330 - DNA, 120 bp, Artificial Sequence
  ENSG00000103184_45 (sequence is synthesized)
cagaaagcgctccattaatgtcagtggtcattctgattacttaatgcttcgcatccaaagactcgttttcttcctgaggtcgcctatccctgtttttcgttattgcacccagagaaaagt

SEQ ID NO: 135331 - DNA, 120 bp, Artificial Sequence
  ENSG00000103184_46 (sequence is synthesized)
tattgcacccagagaaaagtaggtgtcaagaattattgccctctgagttgggtgtgcagtctttctcttttagaaactgcttgtgtgggcggggcgtggtggctcatgcctataatccca

SEQ ID NO: 135332 - DNA, 90 bp, Artificial Sequence
  ENSG00000103184_47 (sequence is synthesized)
gtgcctaaaggattgcttggaggtcaaggctggagtgagccatgatctcacccctgtacttcatcctgggtgacaaagcaagaccctgtc

SEQ ID NO: 135333 - DNA, 120 bp, Artificial Sequence
  ENSG00000103184_48 (sequence is synthesized)
ctgcttgtgttttctgggtaagtccacccatctgagggagtgtattctgagtggtatttcccttggcagttagaaaatgttttttcccagaggttgaagtatggagagtttgagactctt

SEQ ID NO: 135334 - DNA, 120 bp, Artificial Sequence
  ENSG00000103184_49 (sequence is synthesized)
tttttctaccctgcactctctggaattccccctccctgctgtaaaatttattgtccaatgagaatagtataattgttttcaacaaagtctctttgagccagtgaaacacgatgggttttt

SEQ ID NO: 135335 - DNA, 120 bp, Artificial Sequence
  ENSG00000103184_50 (sequence is synthesized)
ttgtttgcctgatcacttgctccaaccagcagcattaaatgttttccatttggataaacttgcatcgtcagcttcctaaaaccctggaggtttcccgtgggctcgttcaagaactttcca

SEQ ID NO: 135336 - DNA, 120 bp, Artificial Sequence
  ENSG00000103184_51 (sequence is synthesized)
gctgttgtttaaaagactttagagctagcttgttcagcctgtggcctgcaggctgcacgcggccccggactgctttgaatgtgctccaacacgagttcgtaaactttcttaaaatactga

SEQ ID NO: 135337 - DNA, 80 bp, Artificial Sequence
  ENSG00000103187_0 (sequence is synthesized)
agtggaagccgccgccgcgctcgcagcttgcaggcgccgcgtagccgtcgccaccgccgccagcccgtgcgccctcggcg

SEQ ID NO: 135338 - DNA, 120 bp, Artificial Sequence
  ENSG00000103187_1 (sequence is synthesized)
gcgctcggccgccccggacagtgtcccgctgcggctccgcggcgatggccaccaagatcgacaaagaggcttgccgggcggcgtacaacctggtgcgcgacgacggctcggccgtcatct

SEQ ID NO: 135339 - DNA, 120 bp, Artificial Sequence
  ENSG00000103187_2 (sequence is synthesized)
gggtgacttttaaatatgacggctccaccatcgtccccggcgagcagggagcggagtaccagcacttcatccagcagtgcacagatgacgtccggttgtttgccttcgtgcgcttcacca

SEQ ID NO: 135340 - DNA, 120 bp, Artificial Sequence
  ENSG00000103187_3 (sequence is synthesized)
ccggggatgccatgagcaagaggtccaagtttgccctcatcacgtggatcggtgagaacgtcagcgggctgcagcgcgccaaaaccgggacggacaagaccctggtgaaggaggtcgtac

SEQ ID NO: 135341 - DNA, 120 bp, Artificial Sequence
  ENSG00000103187_4 (sequence is synthesized)
agaatttcgctaaggagtttgtgatcagtgatcggaaggagctggaggaagatttcatcaagagcgagctgaagaaggcggggggagccaattacgacgcccagacggagtaaccccagc

SEQ ID NO: 135342 - DNA, 120 bp, Artificial Sequence
  ENSG00000103187_5 (sequence is synthesized)
ccccgccacaccaccccttgccaaagtcatctgcctgctccccgggggagaggaccgccggcctcagctactagcccaccagcccaccagggagaaaagaagccatgagaggcagcgccc

SEQ ID NO: 135343 - DNA, 120 bp, Artificial Sequence
  ENSG00000103187_6 (sequence is synthesized)
gccaccctgtgtccacagcccccaccttcccgcttcccttagaaccctgccgtgtcctatctcatgacgctcatggaacctctttctttgatcttctttttcttttctccccctcttttt

SEQ ID NO: 135344 - DNA, 120 bp, Artificial Sequence
  ENSG00000103187_7 (sequence is synthesized)
atcagatccgaggtgcctcctgcagtgaccccttttcctggcatttctcttccacgcgacgaggtctgcctagtgagatctgcatgacctcacgttgctttccagagcccgggcctattt

SEQ ID NO: 135345 - DNA, 120 bp, Artificial Sequence
  ENSG00000103187_8 (sequence is synthesized)
tgccatctcagttttcctggaccctgcttcctgtgtaccactgaggggcagctgggccaggagctgtgcccggtgcctgcagccttcataagcacacacgtccattccctactaaggccc

SEQ ID NO: 135346 - DNA, 120 bp, Artificial Sequence
  ENSG00000103187_9 (sequence is synthesized)
agacctcctggtatctgccccgggctccctcatcccacctccatccggagttgcctaagatgcatgtccagcataggcaggattgctcggtggtgagaaggttaggtccggctcagactg

SEQ ID NO: 135347 - DNA, 120 bp, Artificial Sequence
  ENSG00000103187_10 (sequence is synthesized)
aataagaagagataaaatttgccttaaaacttacctggcagtggctttgctgcacggtctgaaaccacctgttcccaccctcttgaccgaaatttccttgtgacacagagaagggcaaag

SEQ ID NO: 135348 - DNA, 120 bp, Artificial Sequence
  ENSG00000103187_11 (sequence is synthesized)
gtctgagcccagagttgacggagggagtatttcagggttcacttcaggggctcccaaagcgacaagatcgttagggagagaggcccagggtggggactgggaatttaaggagagctggga

SEQ ID NO: 135349 - DNA, 120 bp, Artificial Sequence
  ENSG00000103187_12 (sequence is synthesized)
acggatcccttaggttcaggaagcttctgtgtaagctgcgaggatggcttgggccgaagggttgctctgcccgccgcgctagctgtgagctgagcaaagccctgggctcacagcacccca

SEQ ID NO: 135350 - DNA, 120 bp, Artificial Sequence
  ENSG00000103187_13 (sequence is synthesized)
aaagcctgtggcttcagtcctgcgtctgcaccacacattcaaaaggatcgttttgttttgtttttaaagaaaggtgagattggcttggttcttcatgagcacatttgatatagctctttt

SEQ ID NO: 135351 - DNA, 120 bp, Artificial Sequence
  ENSG00000103187_14 (sequence is synthesized)
tctgtttttccttgctcatttcgttttggggaagaaatctgtactgtattgggattgtaaagaacatctctgcactcagacagtttacagaaataaatgttttttttgtttttcagaaaa

SEQ ID NO: 135352 - DNA, 120 bp, Artificial Sequence
  ENSG00000103187_15 (sequence is synthesized)
ttattccgggacggcgtgccaggcccccgcgggcttctccgtggccagcgcgtctgttagattgtcctctgcaagcgccgcgtcgcgcggccaccagcgctgatgtgtgtgtgtgttttt

SEQ ID NO: 135353 - DNA, 88 bp, Artificial Sequence
  ENSG00000103187_16 (sequence is synthesized)
caccatcgtccccggcgagcagggagcggagtaccagcacttcatccagcagtgcaactgcaacctccgtctcccgggttcaagagat

SEQ ID NO: 135354 - DNA, 74 bp, Artificial Sequence
  ENSG00000103187_17 (sequence is synthesized)
ggattacaggcgcccacgcaccattttggccaggctggtctctaacttctgaccttaggtgatctgcccacctt

SEQ ID NO: 135355 - DNA, 120 bp, Artificial Sequence
  ENSG00000103187_18 (sequence is synthesized)
caggcgtgagccactgcgcccggccgacggtgtgggttcgaatccctgaacggctgcttcctggctgtgtggtttggaacgagttccttaatctctgggggtcttggtttcctcacctgc

SEQ ID NO: 135356 - DNA, 120 bp, Artificial Sequence
  ENSG00000103187_19 (sequence is synthesized)
actctcacagtgctgttgcgaggataagtgagtcagtatgtataaaatgctcagaacagtgcctgtacaagctacatgattgtttgcgaaataaataaaaagtacaaaattgtgccaggg

SEQ ID NO: 135357 - DNA, 120 bp, Artificial Sequence
  ENSG00000103187_20 (sequence is synthesized)
gtgggtttcatagctgtgtgttttcatttggctcctcttccttggggattgccttgtctcctagcaagattcagggtgctggggactgtggctgtatttcttcagcagttcagagtcttt

SEQ ID NO: 135358 - DNA, 120 bp, Artificial Sequence
  ENSG00000103187_21 (sequence is synthesized)
ggtttattggtcatcatcacccacttgtggaaaagacacattcatgtgtccagcacatgtcttgtctatccccggctccatcttatgcctgcgggaggggagattctagtccccacaccg

SEQ ID NO: 135359 - DNA, 120 bp, Artificial Sequence
  ENSG00000103187_22 (sequence is synthesized)
tgttgtgagggtttgggaaggacctgaagccagcaggcagccttcattgtgagagctatgctctgatcccaaagctgacttttccatgccaggtttccccattgccctaggatctggtgt

SEQ ID NO: 135360 - DNA, 120 bp, Artificial Sequence
  ENSG00000103187_23 (sequence is synthesized)
ccctggtggaacttcgtcccgtgtctatgtgctctggaggcttaggtgtaggatccctggatgactggtggggaaaggctgggggaccctgttgtccagccttcttctttcacagaggtg

SEQ ID NO: 135361 - DNA, 120 bp, Artificial Sequence
  ENSG00000103187_24 (sequence is synthesized)
gaaaccagggcccagagccattaaatactgccttccgggcatttcagagcccgctgcttctatttttctattctcagtctgtcagagagaccagtaagtaccagaattttgacttcccag

SEQ ID NO: 135362 - DNA, 120 bp, Artificial Sequence
  ENSG00000103187_25 (sequence is synthesized)
agcctaggagagtgtatggcatatgacaggtgtttattaatgtgtgttcgtgggaagaacaaattgtgtcgctttcattgtctttcaatacaatgaagatcagttcctctcctgggcccc

SEQ ID NO: 135363 - DNA, 120 bp, Artificial Sequence
  ENSG00000103187_26 (sequence is synthesized)
acttcatagaaatatgcattcctgacttcacaaatggaactgcccaagaatccccactcatgttttctccccggagcttcccctgcacccacattctctgcattggttaggaatatcctc

SEQ ID NO: 135364 - DNA, 120 bp, Artificial Sequence
  ENSG00000103187_27 (sequence is synthesized)
ataggcgcaacactcctgaatagcagaccttacacttgtaccccgacaggcctccttgttccctgaagctaaccctgggcctggctttggggtttgcagccggatttgtcatcttctgtc

SEQ ID NO: 135365 - DNA, 120 bp, Artificial Sequence
  ENSG00000103187_28 (sequence is synthesized)
tgccagtttcactgacttggttattccaaggaattcctgggacttccctttgttaaaaaataaacgttaggaatgagaagaggaactagctactgcctgtgtcttcactctgagtgactg

SEQ ID NO: 135366 - DNA, 120 bp, Artificial Sequence
  ENSG00000103187_29 (sequence is synthesized)
agggaacttcattaaatctcagattcccctaacgatcctgagaatgaaggtgaacccacagtcctgtagaacattctctctgactgttgagcactccgctttgtaccaggtgttctcatc

SEQ ID NO: 135367 - DNA, 120 bp, Artificial Sequence
  ENSG00000103187_30 (sequence is synthesized)
aagtgtgcaagccccttttatgctcatacgaccctcccaacagccctaggatgtgaagctgctattgtccgcatttgcagatgaggagactcaggctcagggaggttgagtccccaggga

SEQ ID NO: 135368 - DNA, 120 bp, Artificial Sequence
  ENSG00000103187_31 (sequence is synthesized)
ggctcaggccactggagatgcctgtggacaagggtgcctgtttgtatttggcctggacctgctcccagcatgctggggtttaaacctgggcagttgggagccattaaaaaatgaaaaggg

SEQ ID NO: 135369 - DNA, 70 bp, Artificial Sequence
  ENSG00000103187_32 (sequence is synthesized)
taaacctgggcagttgggagccattaaaaaatgaaaagggggggggagatcacttgaggccaggagttcg

SEQ ID NO: 135370 - DNA, 86 bp, Artificial Sequence
  ENSG00000103187_33 (sequence is synthesized)
acagagtgagactccgtctcaaaaaatgaaaataaataaaaataaaaatgaaaaggatgggctgggcgtggtgagtctcgaactcc

SEQ ID NO: 135371 - DNA, 120 bp, Artificial Sequence
  ENSG00000103187_34 (sequence is synthesized)
ggtgatctgcctgcctcggcctccaaagtgctgggatgacgggcgtgagccaccgcacctggcctgaaccattttaaagtgtacaattcagtggctttcagaacattcacagtgttgtgc

SEQ ID NO: 135372 - DNA, 120 bp, Artificial Sequence
  ENSG00000103187_35 (sequence is synthesized)
ggctttcagaacattcacagtgttgtgcaagccctacctctgtctggttccaaaactttttcatcaccccaaaaggagatggtggctctttcaagacgccagctttggcatcaactggac

SEQ ID NO: 135373 - DNA, 120 bp, Artificial Sequence
  ENSG00000103187_36 (sequence is synthesized)
cttctggttgtctgacttcggacaagcattgtaatttccagcctttgtttcctcacctttaaaatggaaataatgttgatcaccttacgggcctttttaaaaagaacttgattgaggtat

SEQ ID NO: 135374 - DNA, 120 bp, Artificial Sequence
  ENSG00000103187_37 (sequence is synthesized)
gatgtatgtacctcaaaatcaagtcatcctaagtgtactttttcagtactttttcgtgaatttgtggagttgtgcacccattaccacaatcccaattttagaacgtctctatcatttcct

SEQ ID NO: 135375 - DNA, 120 bp, Artificial Sequence
  ENSG00000103187_38 (sequence is synthesized)
gttcccatctccagctctgtgtaaccacgagtctgctttctgtctgtatgggtttgccttttttagacatttataccaatggcagctgacagtacatggtcttcatgcctggcttctttc

SEQ ID NO: 135376 - DNA, 120 bp, Artificial Sequence
  ENSG00000103187_39 (sequence is synthesized)
actcagcatcctgtttccgaggttcatccatgtagttgcgtgtggcagcgcttcattcctctctgtggctgaggaatattccattgtgtggacggaccgtgttttgataatccactcctc

SEQ ID NO: 135377 - DNA, 120 bp, Artificial Sequence
  ENSG00000103187_40 (sequence is synthesized)
tgttgatggacataggggttgcttccaccttccatgattcatatttactactgtgtgtcattctcagtactgtggcactgtgctggtacacataagtgcttaataattgtggttagccgg

SEQ ID NO: 135378 - DNA, 120 bp, Artificial Sequence
  ENSG00000103187_41 (sequence is synthesized)
ccagcctggccaatgtggcgaaaccctgcttctactaaaaatacaaaaaatagctgggtgtggtggcagacgcctgtagttcgagctacttgggaggctgagacatgagaatggcttgaa

SEQ ID NO: 135379 - DNA, 79 bp, Artificial Sequence
  ENSG00000103187_42 (sequence is synthesized)
gctgggtgtggtggcagacgcctgtagttcgagctacttgggaggctgagacatgagaatggcttgaaccctgggggca

SEQ ID NO: 135380 - DNA, 120 bp, Artificial Sequence
  ENSG00000103187_43 (sequence is synthesized)
gtcattgtttatgttatttccttatgggcttttttttttaatgtggatgattttcttacctttagacgtgttatttgtggttttgatagcttttttttgtcaagctgtccgtcatcgttc

SEQ ID NO: 135381 - DNA, 120 bp, Artificial Sequence
  ENSG00000103187_44 (sequence is synthesized)
tgaaattttgtttgttaaagtcttatgatccacatatggcagtaactgtgtatcatcatggcttaagggtgtctgataagccaggtcacctggttccctcattcatgccacaagcgttta

SEQ ID NO: 135382 - DNA, 120 bp, Artificial Sequence
  ENSG00000103187_45 (sequence is synthesized)
ctgagtgcatcatgggtgcctgcgggttctatgggtgaaacctgtgtactgcaagaggaaagactgactgcatccattttgctgagccctgtagccccacagcctggcgtggtatttgtt

SEQ ID NO: 135383 - DNA, 120 bp, Artificial Sequence
  ENSG00000103187_46 (sequence is synthesized)
gaaagaaggcagagcctctaccctcgtgtaactcagtgcgggtggagagcccatggcagacccaggactggaggctcctgcgtcattaggaacattggtggctgaagcttgcttgtccca

SEQ ID NO: 135384 - DNA, 120 bp, Artificial Sequence
  ENSG00000103187_47 (sequence is synthesized)
gctggcgagagccaattacgcctgtctccttccacctccacgtatggtgacatcactttgatagcttgacgtcagccactgggggactatttacatcatggatatgggcaaaagacacca

SEQ ID NO: 135385 - DNA, 120 bp, Artificial Sequence
  ENSG00000103187_48 (sequence is synthesized)
atctgagcttttgtccttttcttttttttggagtgcctgcacacccgtgagcctttccaacctcgtaacctattattttcctgacgagatagttttttacagatgagaaagttgaggcac

SEQ ID NO: 135386 - DNA, 120 bp, Artificial Sequence
  ENSG00000103187_49 (sequence is synthesized)
agagaattgaagggacttggccaaggtaacagcccaaattcaagccccagcttcctcgggccatccccacggacatgggaagacgcagcatcagatctgccccactccctcctcccagtc

SEQ ID NO: 135387 - DNA, 120 bp, Artificial Sequence
  ENSG00000103187_50 (sequence is synthesized)
aggttttttctgccagatgactctgctgttcaatttccattgactctgctgctgaatttccattgactgactctgctgctgaatttccatttccatctctcatcagggttttcagtgctt

SEQ ID NO: 135388 - DNA, 120 bp, Artificial Sequence
  ENSG00000103187_51 (sequence is synthesized)
gaagcctgcagcactgttgccaggattcaggggagtgtgacaagggcagcggatgagtgcttccctcctgtcctctgcacatggtgctcccagggaactgcaccggtctcctgctgtgct

SEQ ID NO: 135389 - DNA, 120 bp, Artificial Sequence
  ENSG00000103187_52 (sequence is synthesized)
gctccaggcgcactcgtggctcacagcctctccccagggacatgacatgggggtgttttaacgcagcaccatgttctcttttcgcttttggccacagatgacgtccggttgtttgccttc

SEQ ID NO: 135390 - DNA, 120 bp, Artificial Sequence
  ENSG00000103194_0 (sequence is synthesized)
gcgcaggcgcggcggccgatgcgagtgtgtatgtgcgggcgagaagatggcggcggcgggggaagcagcgtgagcagccggaggatcgcggagtcccaatgaaacgggcagccatggccc

SEQ ID NO: 135391 - DNA, 120 bp, Artificial Sequence
  ENSG00000103194_1 (sequence is synthesized)
tccacagcccgcagtatatttttggagattttagccctgatgaattcaatcaattctttgtgactcctcgatcttcagttgagcttcctccatacagtggaacagttctgtgtggcacac

SEQ ID NO: 135392 - DNA, 120 bp, Artificial Sequence
  ENSG00000103194_2 (sequence is synthesized)
aggctgtggataaactacctgatggacaagaatatcagagaattgagtttggtgtcgatgaagtcattgaacccagtgacactttgccgagaacccccagctacagtatttcaagcacac

SEQ ID NO: 135393 - DNA, 120 bp, Artificial Sequence
  ENSG00000103194_3 (sequence is synthesized)
tgaaccctcaggcccctgaatttattctcggttgtacagcttccaaaataacccctgatggtatcactaaagaagcaagctatggctccatcgactgccagtacccaggctctgccctcg

SEQ ID NO: 135394 - DNA, 120 bp, Artificial Sequence
  ENSG00000103194_4 (sequence is synthesized)
ctttggatggaagttctaatgtggaggcggaagttttggaaaatgatggtgtctcaggtggtcttggacaaagggagcgtaaaaagaagaaaaagcggccacctggatattacagctatt

SEQ ID NO: 135395 - DNA, 120 bp, Artificial Sequence
  ENSG00000103194_5 (sequence is synthesized)
tgaaagatggtggcgatgatagtatctccacagaagccctggtcaatggccatgccaattcagcagtcccgaacagtgtcagtgcagaggatgcagaatttatgggtgacatgcccccgt

SEQ ID NO: 135396 - DNA, 120 bp, Artificial Sequence
  ENSG00000103194_6 (sequence is synthesized)
cagttacgcccaggacttgtaacagcccccagaactccacagactctgtcagtgacattgtgcctgacagtcctttccccggagcactcggcagtgacaccaggactgcagggcagccag

SEQ ID NO: 135397 - DNA, 120 bp, Artificial Sequence
  ENSG00000103194_7 (sequence is synthesized)
aggggggccccggggctgattttggtcagtcctgcttccctgcagaggctggcagagacaccctgtcaaggacagctggggctcagccctgcgttggtaccgatactactgaaaaccttg

SEQ ID NO: 135398 - DNA, 120 bp, Artificial Sequence
  ENSG00000103194_8 (sequence is synthesized)
gagttgctaatggacaaatacttgaatcctcgggtgagggcacagctaccaacggggtggagttgcacaccacggaaagcatagacttggacccaaccaaacccgagagtgcatcacctc

SEQ ID NO: 135399 - DNA, 120 bp, Artificial Sequence
  ENSG00000103194_9 (sequence is synthesized)
ctgctgacggcacgggctctgcatcaggcacccttcctgtcagccagcccaagtcctgggccagcctctttcatgattctaagccctcttcctcctcgccggtggcctatgtggaaacta

SEQ ID NO: 135400 - DNA, 120 bp, Artificial Sequence
  ENSG00000103194_10 (sequence is synthesized)
agtattcccctcccgccatatctcccctggtttctgaaaagcaggttgaagtcaaagaagggcttgttccggtttcagaggatcctgtagccataaagattgcagagttgctggagaatg

SEQ ID NO: 135401 - DNA, 120 bp, Artificial Sequence
  ENSG00000103194_11 (sequence is synthesized)
taaccctaatccataaaccagtgtcgttgcaaccccgtgggctgatcaataaagggaactggtgctacattaatgctacactgcaggcattggttgcttgcccgccgatgtaccacctga

SEQ ID NO: 135402 - DNA, 120 bp, Artificial Sequence
  ENSG00000103194_12 (sequence is synthesized)
ttcctctgtattccaaagtgcaaaggccttgtacgtcaacacccatgatagacagctttgttcggctaatgaatgagttcactaatatgccagtacctccaaaaccccgacaagctcttg

SEQ ID NO: 135403 - DNA, 120 bp, Artificial Sequence
  ENSG00000103194_13 (sequence is synthesized)
gagataaaatcgtgagggatattcgccctggagctgcctttgagcccacatatatttacagactcctgacagttaacaagtcaagcctgtctgaaaagggtcgacaagaagatgctgagg

SEQ ID NO: 135404 - DNA, 120 bp, Artificial Sequence
  ENSG00000103194_14 (sequence is synthesized)
aatacttaggcttcattctaaatggacttcatgaggaaatgttgaacctaaagaagcttctctcaccaagtaatgaaaaacttacgatttccaacggccccaaaaaccactcggtcaatg

SEQ ID NO: 135405 - DNA, 120 bp, Artificial Sequence
  ENSG00000103194_15 (sequence is synthesized)
aagaagagcaggaagaacaaggtgaaggaagcgaggatgaatgggaacaagtgggcccccggaacaagacttccgtcacccgccaggcggattttgttcagactccaatcaccggcattt

SEQ ID NO: 135406 - DNA, 120 bp, Artificial Sequence
  ENSG00000103194_16 (sequence is synthesized)
ttggtggacacatcaggtctgtggtttaccagcagagttcaaaagaatctgccactttgcagccatttttcacgttgcagttggatatccagtcagacaagatacgcacagtccaggatg

SEQ ID NO: 135407 - DNA, 120 bp, Artificial Sequence
  ENSG00000103194_17 (sequence is synthesized)
cactggagagcttggtggcaagagaatctgtccaaggttataccacaaaaaccaaacaagaggttgagataagtcgaagagtgactctggaaaaactccctcctgtcctcgtgctgcacc

SEQ ID NO: 135408 - DNA, 120 bp, Artificial Sequence
  ENSG00000103194_18 (sequence is synthesized)
tgaaacgattcgtttatgagaagactggtgggtgccagaagcttatcaaaaatattgaatatcctgtggacttggaaattagtaaagaactgctttctccaggggttaaaaataagaatt

SEQ ID NO: 135409 - DNA, 120 bp, Artificial Sequence
  ENSG00000103194_19 (sequence is synthesized)
ttaaatgccaccgaacctatcggctctttgcagtggtctaccatcacggcaacagtgcgacgggcggccattacactacagacgtcttccagatcggtctgaatggctggctgcgcatcg

SEQ ID NO: 135410 - DNA, 120 bp, Artificial Sequence
  ENSG00000103194_20 (sequence is synthesized)
atgaccagacagtcaaggtgatcaaccagtaccaggtggtgaaaccaactgctgaacgcacagcctacctcctgtattaccgccgagtggacctgctgtaaaccctgtgtgcgctgtgtg

SEQ ID NO: 135411 - DNA, 120 bp, Artificial Sequence
  ENSG00000103194_21 (sequence is synthesized)
tgcgcccagtgcccgcttcgtaggacaccacctcacactcacttcccgcctctctttagtggctctttagagagaaactctttctccctttgcaaaaatgggctagaatgaaaaggagat

SEQ ID NO: 135412 - DNA, 120 bp, Artificial Sequence
  ENSG00000103194_22 (sequence is synthesized)
gccttggggttcgtgcacaacacagcttctgttgactctaacttccaaatcaaaatcatttggttgaaacagactgttgcttgattttagaaaatacacaaaaacccatatttctgaaat

SEQ ID NO: 135413 - DNA, 120 bp, Artificial Sequence
  ENSG00000103194_23 (sequence is synthesized)
aatgctgattcctgagataagaaagtggatttgatccccagtctcattgcttagtagaataaatcctgcaccagcaacaacacttgtaaatttgtgaaaatgaattttatctttccttaa

SEQ ID NO: 135414 - DNA, 120 bp, Artificial Sequence
  ENSG00000103194_24 (sequence is synthesized)
aaaagaaattttttaatccatcacacttttcttccctaccctttagtttttgataaatgataaaaatgagccagttatcaaagaagaactagttcttacttcaaaagaaaaataaacata

SEQ ID NO: 135415 - DNA, 120 bp, Artificial Sequence
  ENSG00000103194_25 (sequence is synthesized)
gtgtatgtgcgggcgagaagatggcggcggcgggggaagcagcgtgagcagccggaggatcgcggagtcccaatgaaacgggcagccatggccctccacagcccgcagctcctgggccat

SEQ ID NO: 135416 - DNA, 120 bp, Artificial Sequence
  ENSG00000103194_26 (sequence is synthesized)
ccagtcagacaagatacgcacagtccaggatgcactggagagcttggtggcaagagaatctgtccaaggttataccacaaaaaccaaacaagagaactgctttctccaggggttaaaaat

SEQ ID NO: 135417 - DNA, 120 bp, Artificial Sequence
  ENSG00000103194_27 (sequence is synthesized)
tagtctacatagatgggtgattgtaactttattgccattaaaagatttcaaattgcattcatgcttctgtgtacacataatgaaaaatgggcaaataatgaagatctctccttcagtctg

SEQ ID NO: 135418 - DNA, 120 bp, Artificial Sequence
  ENSG00000103194_28 (sequence is synthesized)
ctctgtttaattctgctgtctgctcttctctaatgctgcgtccctaattgtacacagtttagtgatatctaggagtataaagttgtcgcccatcaataaaaatcacaaagttggtttaaa

SEQ ID NO: 135419 - DNA, 120 bp, Artificial Sequence
  ENSG00000103194_29 (sequence is synthesized)
atcctgtggacttggaaattagtaaagtggtctaccatcacggcaacagtgcgacgggcggccattacactacagacgtcttccagatcggtctgaatggctggctgcgcatcgatgacc

SEQ ID NO: 135420 - DNA, 120 bp, Artificial Sequence
  ENSG00000103194_30 (sequence is synthesized)
gtgtgtatgtgcgggcgagaagatggcggcggcgggggaagcagcgtgagcagccggaggatcgcggagtcccaatgaaacgggcagccatggccctccacagcccgcagattttggtgg

SEQ ID NO: 135421 - DNA, 120 bp, Artificial Sequence
  ENSG00000103194_31 (sequence is synthesized)
ccggacgttaggagtatagagctgaagagagaattcctgtgctttagaggttcgctgggtagtgagggagagaagcaggctaatggctgggtgcatccagttttagggtggtaattcctg

SEQ ID NO: 135422 - DNA, 120 bp, Artificial Sequence
  ENSG00000103194_32 (sequence is synthesized)
gctgtgtaccaggcactgaggagggagtgatgagcgaaaacaggcattgtttctctcgcggaggagtttatgggtccattgaggaagacagcttgctaatcagataatcacagttacgta

SEQ ID NO: 135423 - DNA, 120 bp, Artificial Sequence
  ENSG00000103194_33 (sequence is synthesized)
cacgtcactccaaactgagagatgtttcccaaaggaagggaacacaatctgaagtcagagaaccgttcccgtggaagtgacgtgtttacagcatgagacagtggggacagcatgtgtggt

SEQ ID NO: 135424 - DNA, 120 bp, Artificial Sequence
  ENSG00000103194_34 (sequence is synthesized)
ggcggcgggggaagcagcgtgagcagccggaggatcgcggagtcccaatgaaacgggcagccatggccctccacagcccgcagtatgtttggcagagaaagcggaaatggaggttgaagt

SEQ ID NO: 135425 - DNA, 120 bp, Artificial Sequence
  ENSG00000103194_35 (sequence is synthesized)
aataaaaatctcctgcaagcaggactcgacaagtttggcatacaaaattgatttgtttcaaaataagctttatcagtttcatagtgttctttgacaatttgtaggaaaggttcagtagta

SEQ ID NO: 135426 - DNA, 120 bp, Artificial Sequence
  ENSG00000103194_36 (sequence is synthesized)
tttcttttatataaacaacctagaactctgagttgcagatcctctgtttaattgagaaaggatcttgggggttatggcccaaatgttgcataggattgttaaaatatgtagcattttttc

SEQ ID NO: 135427 - DNA, 120 bp, Artificial Sequence
  ENSG00000103194_37 (sequence is synthesized)
atgtgcgggcgagaagatggcggcggcgggggaagcagcgtgagcagccggaggatcgcggagtcccaatgaaacgggcagccatggccctccacagcccgcagatggagtctggctctg

SEQ ID NO: 135428 - DNA, 120 bp, Artificial Sequence
  ENSG00000103194_38 (sequence is synthesized)
tttaaatattattgttccttaactgttaatgtgtctgtgccttgaggtcagcctcaggttccaatcctgttccattttgtttgtggaatctcaggcaaggttggtttctctgaactttta

SEQ ID NO: 135429 - DNA, 120 bp, Artificial Sequence
  ENSG00000103194_39 (sequence is synthesized)
aagttttttcatcttcattcagcaaatctttattagattctcagtattgtgcttcagtggacgaaatacagactgacacaaggagataacagttcattcacagagacatagtatgtttgg

SEQ ID NO: 135430 - DNA, 120 bp, Artificial Sequence
  ENSG00000103194_40 (sequence is synthesized)
ataaacattcttgtgcttcatgtgccttcaggaaatgtggtgtgtctgttcatttcctttacgcttccttactgccactacatagacactgcaggcattggttgcttgcccgccgatgta

SEQ ID NO: 135431 - DNA, 120 bp, Artificial Sequence
  ENSG00000103194_41 (sequence is synthesized)
gatgcgagtgtgtatgtgcgggcgagaagatggcggcggcgggggaagcagcgtgagcagccggaggatcgcggagtcccaatgaaacgggcagccatggccctccacagcccgcagata

SEQ ID NO: 135432 - DNA, 120 bp, Artificial Sequence
  ENSG00000103194_42 (sequence is synthesized)
ggactcctcagactggaagattgtcctttctccttggcaaatcatcttatatttttggagattttagccctgatgaattcaatcaattctttgtgactcctcgatcttcagttgagcttc

SEQ ID NO: 135433 - DNA, 120 bp, Artificial Sequence
  ENSG00000103194_43 (sequence is synthesized)
taaaagtatatattgtttaaaactgcactatttaacattttttccccatgtttagtgttcggctaatgaatgagttcactaatatgccagtacctccaaaaccccgacaaggttagtaaa

SEQ ID NO: 135434 - DNA, 120 bp, Artificial Sequence
  ENSG00000103196_0 (sequence is synthesized)
actcgcatcccagggcgtctccggctgctcctattgagctgtctgctcgctgtgcccgctgtgcctgctgtgcccgcgctgtcgccgctgctaccgcgtctgctggacgcgggagacgcc

SEQ ID NO: 135435 - DNA, 120 bp, Artificial Sequence
  ENSG00000103196_1 (sequence is synthesized)
agcgagctggtgattggagccctgcggagagctcaagcgcccagctctgcccgaggagcccaggctgccccgtgagtcccatagttgctgcaggagtggagccatgagctgcgtcctggg

SEQ ID NO: 135436 - DNA, 120 bp, Artificial Sequence
  ENSG00000103196_2 (sequence is synthesized)
tggtgtcatccccttggggctgctgttcctggtctgcggatcccaaggctacctcctgcccaacgtcactctcttagaggagctgctcagcaaataccagcacaacgagtctcactcccg

SEQ ID NO: 135437 - DNA, 120 bp, Artificial Sequence
  ENSG00000103196_3 (sequence is synthesized)
ggtccgcagagccatccccagggaggacaaggaggagatcctcatgctgcacaacaagcttcggggccaggtgcagcctcaggcctccaacatggagtacatgacctgggatgacgaact

SEQ ID NO: 135438 - DNA, 120 bp, Artificial Sequence
  ENSG00000103196_4 (sequence is synthesized)
ggagaagtctgctgcagcgtgggccagtcagtgcatctgggagcacgggcccaccagtctgctggtgtccatcgggcagaacctgggcgctcactggggcaggtatcgctctccggggtt

SEQ ID NO: 135439 - DNA, 120 bp, Artificial Sequence
  ENSG00000103196_5 (sequence is synthesized)
ccatgtgcagtcctggtatgacgaggtgaaggactacacctacccctacccgagcgagtgcaacccctggtgtccagagaggtgctcggggcccatgtgcacgcactacacacagatagt

SEQ ID NO: 135440 - DNA, 120 bp, Artificial Sequence
  ENSG00000103196_6 (sequence is synthesized)
ttgggccaccaccaacaagatcggttgtgctgtgaacacctgccggaagatgactgtctggggagaagtttgggagaacgcggtctactttgtctgcaattattctccaaaggggaactg

SEQ ID NO: 135441 - DNA, 120 bp, Artificial Sequence
  ENSG00000103196_7 (sequence is synthesized)
gattggagaagccccctacaagaatggccggccctgctctgagtgcccacccagctatggaggcagctgcaggaacaacttgtgttaccgagaagaaacctacactccaaaacctgaaac

SEQ ID NO: 135442 - DNA, 120 bp, Artificial Sequence
  ENSG00000103196_8 (sequence is synthesized)
ggacgagatgaatgaggtggaaacggctcccattcctgaagaaaaccatgtttggctccaaccgagggtgatgagacccaccaagcccaagaaaacctctgcggtcaactacatgaccca

SEQ ID NO: 135443 - DNA, 120 bp, Artificial Sequence
  ENSG00000103196_9 (sequence is synthesized)
agtcgtcagatgtgacaccaagatgaaggacaggtgcaaagggtccacgtgtaacaggtaccagtgcccagcaggctgcctgaaccacaaggcgaagatctttggaactctgttctatga

SEQ ID NO: 135444 - DNA, 120 bp, Artificial Sequence
  ENSG00000103196_10 (sequence is synthesized)
aagctcgtctagcatatgccgcgccgccatccactacgggatcctggatgacaagggaggcctggtggatatcaccaggaacgggaaggtccccttcttcgtgaagtctgagagacacgg

SEQ ID NO: 135445 - DNA, 120 bp, Artificial Sequence
  ENSG00000103196_11 (sequence is synthesized)
cgtgcagtccctcagcaaatacaaaccttccagctcattcatggtgtcaaaagtgaaagtgcaggatttggactgctacacgaccgttgctcagctgtgcccgtttgaaaagccagcaac

SEQ ID NO: 135446 - DNA, 120 bp, Artificial Sequence
  ENSG00000103196_12 (sequence is synthesized)
tcactgcccaagaatccattgtccggcacactgcaaagacgaaccttcctactgggctccggtgtttggaaccaacatctatgcagatacctcaagcatctgcaagacagccgtgcacgc

SEQ ID NO: 135447 - DNA, 120 bp, Artificial Sequence
  ENSG00000103196_13 (sequence is synthesized)
gggagtcatcagcaacgagagtgggggtgacgtggacgtgatgcccgtggataaaaagaagacctacgtgggctcgctcaggaatggagttcagtctgaaagcctggggactcctcggga

SEQ ID NO: 135448 - DNA, 120 bp, Artificial Sequence
  ENSG00000103196_14 (sequence is synthesized)
tggaaaggccttccggatctttgctgtcaggcagtgaatttccagcaccaggggagaaggggcgtcttcaggagggcttcggggttttgcttttatttttattttgtcattgcggggtat

SEQ ID NO: 135449 - DNA, 120 bp, Artificial Sequence
  ENSG00000103196_15 (sequence is synthesized)
atggagagtcaggaaacttcctttgactgatgttcagtgtccatcactttgtggcctgtgggtgaggtgacatctcatcccctcactgaagcaacagcatcccaaggtgctcagccggac

SEQ ID NO: 135450 - DNA, 120 bp, Artificial Sequence
  ENSG00000103196_16 (sequence is synthesized)
tccctggtgcctgatcctgctggggcctgggggtctccatctggacgtcctctctcctttagagatctgagctgtctcttaaaggggacagttgcccaaaatgttccttgctatgtgttc

SEQ ID NO: 135451 - DNA, 120 bp, Artificial Sequence
  ENSG00000103196_17 (sequence is synthesized)
ttctgttggtggaggaagttgatttcaacctccctgccaaaagaacaaaccatttgaagctcacaattgtgaagcattcacggcgtcggaagaggccttttgagcaagcgccaatgagtt

SEQ ID NO: 135452 - DNA, 120 bp, Artificial Sequence
  ENSG00000103196_18 (sequence is synthesized)
tcaggaatgaagtagaaggtagttatttaaaaataaaaaacacagtccgtccctaccaatagaggaaaatggttttaatgtttgctggtcagacagacaaatgggctagagtaagagggc

SEQ ID NO: 135453 - DNA, 120 bp, Artificial Sequence
  ENSG00000103196_19 (sequence is synthesized)
ccgccctggcacgtgtccttgctggcggcccgccacaggcccccttcaatggccgcattcaggatggctctatacacagcagtgctggtttatgtagagttcagcagtcacttcagagat

SEQ ID NO: 135454 - DNA, 120 bp, Artificial Sequence
  ENSG00000103196_20 (sequence is synthesized)
gtatcttgtctttgtcaggcccttcgtcttcatggcccacctgttttctgccgtgacctttggtcccattgaggactaaggatcgggaccctttctttaccccctacccgttgtggctcc

SEQ ID NO: 135455 - DNA, 120 bp, Artificial Sequence
  ENSG00000103196_21 (sequence is synthesized)
caccctgcctcggactggtttacgtgtcctggttcacacccaggacttttctttgcaagcgaacctgtttgaagcccaagtcttaactcctggtctcgtaaggttccactgagacgagat

SEQ ID NO: 135456 - DNA, 120 bp, Artificial Sequence
  ENSG00000103196_22 (sequence is synthesized)
gtctgagaacaaccaaagaaggcctgctctttgctgcttttaaaaaatgacaattaaatgtgcagattccccacgcacccgatgacctattttttcagccgtgggaggaatggagtcttt

SEQ ID NO: 135457 - DNA, 120 bp, Artificial Sequence
  ENSG00000103196_23 (sequence is synthesized)
ggtacattcctcaccgaggttagcagctcagtttgtggttatgaaaccgtctgtggcctcatgacagcgagagatgggaatacactagaaggatctcttttcctgttttcgtgaaacgac

SEQ ID NO: 135458 - DNA, 120 bp, Artificial Sequence
  ENSG00000103196_24 (sequence is synthesized)
tcttgccaaacgttcccgaggcgccaaggagtgtagtacaccctggctgccatcactctataaaagtgcttcatgagcccagaccaaaagcccacagtgaaatgaagtacccttttgtaa

SEQ ID NO: 135459 - DNA, 120 bp, Artificial Sequence
  ENSG00000103196_25 (sequence is synthesized)
atagcatttttttgcagaaggtgaaaattccactctctaccaccgggccagccaatagatcactttggtgaatgctagtttcaaatttgattcaaaatatttcttaggtgaaagaactag

SEQ ID NO: 135460 - DNA, 120 bp, Artificial Sequence
  ENSG00000103196_26 (sequence is synthesized)
cagaaagtcaaaaactaagatactgtagactggacaagaaattctacctgggcacctaggtgatgccttctttctttgattgcctttctaataaatgcagaatctgaaggtaaataggtt

SEQ ID NO: 135461 - DNA, 120 bp, Artificial Sequence
  ENSG00000103196_27 (sequence is synthesized)
taaaacaaaacaaaaacccacccctttaaggagttggtaaaaagcagttcaactcttagcttgactgagctaaaattcacaggactacgtgctttgtgcattgtagtctagtcgtaattc

SEQ ID NO: 135462 - DNA, 120 bp, Artificial Sequence
  ENSG00000103196_28 (sequence is synthesized)
ataggtactgactcctcagccccaaatgtcggagaggaagaattcggtcagcctgtcaggtcgtgagtccagttaccaccaaacatctgggaaacttctgggtgctgggtgctctgctgc

SEQ ID NO: 135463 - DNA, 120 bp, Artificial Sequence
  ENSG00000103196_29 (sequence is synthesized)
tggacttttgtggctgtgtctgtgtctgcaagataaattagatcgccctgtggggtttgcagaattagtgaagggtccaggacgatcccagtgggctcgcttccaaagcatcccactcaa

SEQ ID NO: 135464 - DNA, 120 bp, Artificial Sequence
  ENSG00000103196_30 (sequence is synthesized)
gggagacttgaaacttccagtgtgagttgaccccatcatttaaaaataaagtccccgggttccttaatgcctccttcactgggccttcctagcaggatagaaagtccttgcccagagcag

SEQ ID NO: 135465 - DNA, 120 bp, Artificial Sequence
  ENSG00000103196_31 (sequence is synthesized)
tttttttttttttttttttttttcccgagaccaagtttcactctgttgcccaaggtagagtgcagtggcgtgatctctgctcattgcaactgccgcctcccgggttcaagcaattctcat

SEQ ID NO: 135466 - DNA, 77 bp, Artificial Sequence
  ENSG00000103196_32 (sequence is synthesized)
gacctggctgtctttatcatccccacaaacattttgaaactggaatatttgtcttcagaaaatggaaacaagactat

SEQ ID NO: 135467 - DNA, 120 bp, Artificial Sequence
  ENSG00000103196_33 (sequence is synthesized)
aactggaatatttgtcttcagaaaatggaaacaagactataaatgataagccctgtccctagcaccacctctcctgtgtgtggaatagaggcccctcgtgctaccaacacttaccctgtg

SEQ ID NO: 135468 - DNA, 120 bp, Artificial Sequence
  ENSG00000103196_34 (sequence is synthesized)
tttaaaaagatcttgtaccaagccaacggcgttcctggctctcctgcccacaggatgaacattttcggcttccttaggagttttgccctaccgtattccaaagcgtgtgctggtttctca

SEQ ID NO: 135469 - DNA, 120 bp, Artificial Sequence
  ENSG00000103196_35 (sequence is synthesized)
tattgtctgtaggctcactcagcccgcagtttatgtgtgtgcttttttctatgaaaaatgatgtattttgctacttcctgtgtacaaagttttattgtaaatgttttttgtgctttgcat

SEQ ID NO: 135470 - DNA, 120 bp, Artificial Sequence
  ENSG00000103196_36 (sequence is synthesized)
gaacaggggccacgttgttgcaattgtttcagtagaactggtttgatttctaaaatgttcctgtaacatatcttttatgaacaaatctgaacaatttgtgaaataaaacattgaaaacca

SEQ ID NO: 135471 - DNA, 120 bp, Artificial Sequence
  ENSG00000103196_37 (sequence is synthesized)
gccacaagttcctctccggctgccgcaggaccccactgccgtgtgccgggctcagcacttgtgccccttatcaagtttagcctgcaaagagagtgagagagaccacccgtcccatcgata

SEQ ID NO: 135472 - DNA, 120 bp, Artificial Sequence
  ENSG00000103196_38 (sequence is synthesized)
ttctgggaaactgaggcttggcatccaggaacactcctgagtgactgacaaaatgtattcaagcttggttggctgaccccagacactgatgattgattaaagtttgtagtttgggttttc

SEQ ID NO: 135473 - DNA, 120 bp, Artificial Sequence
  ENSG00000103196_39 (sequence is synthesized)
cttcacagccagacagtgcacctgccccatgttcatcaacccccagactccttgggaaccttgatcgtcctgtcgtctcagctgccagctcactccagggcctccggaggcacatggcag

SEQ ID NO: 135474 - DNA, 120 bp, Artificial Sequence
  ENSG00000103196_40 (sequence is synthesized)
caactatctcgcaaagcctgttaaagacctcaacatgcaagctccaagatctggatacttgaaactttattccagtgcctcttagctaaattaattaattaattaattaattaatttcga

SEQ ID NO: 135475 - DNA, 120 bp, Artificial Sequence
  ENSG00000103196_41 (sequence is synthesized)
cgggaggcggggagtgaagaacaaagagccgttccggagacctgggaggcattgcccatgggtcagggctacactggttttctggctgggctttctgtctttctccaagctctggacaca

SEQ ID NO: 135476 - DNA, 120 bp, Artificial Sequence
  ENSG00000103196_42 (sequence is synthesized)
ccgcaccgtgagaaaggctcctggaagcagagcaaccctgcccgggggctgtttctgaaggggcagagcagaggctggaaaacctgcaagccttccctcagagtcactgcgttccctcgt

SEQ ID NO: 135477 - DNA, 120 bp, Artificial Sequence
  ENSG00000103196_43 (sequence is synthesized)
agcgagctggtgattggagccctgcggagattgggtcttatccccaagatatctcattatgtacatgcaaatcagcggagcatcgtcatgacaccaggaggacaccccgtgacgccgatt

SEQ ID NO: 135478 - DNA, 120 bp, Artificial Sequence
  ENSG00000103196_44 (sequence is synthesized)
ggccgcctgcagctggaaatgctcatatatggtggtgtgactaacctgagagagagagatcagggatcctgagaagttctgcattcttggtctgcttcccagtgggacgaagctcaagcg

SEQ ID NO: 135479 - DNA, 120 bp, Artificial Sequence
  ENSG00000103196_45 (sequence is synthesized)
tccgcctcctcggcctccctccctcccggctgcccgtggctgctcctggaattggccgctattcaccctcctcggcctccctccctcctacctgcccgtggctgctgctgtctccactgg

SEQ ID NO: 135480 - DNA, 120 bp, Artificial Sequence
  ENSG00000103196_46 (sequence is synthesized)
aaacatgtaaatcaaaccacaggatgaagttgacatttgcttgcagctcttgggccttttaaaaaataagaggagttccttttcctggcttcgaaaaggaacagcagtggtgatcataat

SEQ ID NO: 135481 - DNA, 120 bp, Artificial Sequence
  ENSG00000103196_47 (sequence is synthesized)
ctaactataagatgctcaaggaggagcaagaggtggctgtgctgggggcaccccacaaccctgctcccctgacgtccacgtgatccacatccacagcgagacctctgtgaccgaccatgt

SEQ ID NO: 135482 - DNA, 120 bp, Artificial Sequence
  ENSG00000103196_48 (sequence is synthesized)
catctggtccctgtttaacaccctcttcatgaactcctgctgcctgggcttcatagcatttgcctactccgtgaagtctagggacaggaagatggttgacgacctgaacagggcccaggc

SEQ ID NO: 135483 - DNA, 120 bp, Artificial Sequence
  ENSG00000103196_49 (sequence is synthesized)
gcaccgggggtggggcctgggccaccagcctgctctgttccccagccagctctgttccccagccagtgcgtgtgatggctggctcagggtctcctctggcaggggaggatcccggctctg

SEQ ID NO: 135484 - DNA, 120 bp, Artificial Sequence
  ENSG00000103196_50 (sequence is synthesized)
tgtttgttttgagacagggtctcactctgccactgacgctggagtgcaatggcacaatcgtcatgccctgaaaccttagactcccggggttaagcgatcctgcttcagcctcccaagtag

SEQ ID NO: 135485 - DNA, 80 bp, Artificial Sequence
  ENSG00000103196_51 (sequence is synthesized)
atcctgtggtgcccagctagattttaaatattttgtggagatgggggtcttgctacgttgcccaggctggtcttgaactc

SEQ ID NO: 135486 - DNA, 120 bp, Artificial Sequence
  ENSG00000103196_52 (sequence is synthesized)
gctctggctctgttcttaacattctgccaaaacaacacacgtgggttccctgtgcagagcctgcctcgttgccttcatgtcactcttggtagctccactgggaacacagctctcagcctt

SEQ ID NO: 135487 - DNA, 120 bp, Artificial Sequence
  ENSG00000103196_53 (sequence is synthesized)
tcccacctggaggcagagtggggaggggcccagggctgggctttgctgatgctgatctcagctgtgccacacgctagctgcaccaccctgacttctccttagcccgtgtgagcctcactt

SEQ ID NO: 135488 - DNA, 120 bp, Artificial Sequence
  ENSG00000103196_54 (sequence is synthesized)
tccacttggagagtccttcctcgcgtggttgccatgactgtgagataagtcgaggctgtgaagggcccggcacagactgaccctgcctccccaacccctaggctttgctaaccgggaaag

SEQ ID NO: 135489 - DNA, 120 bp, Artificial Sequence
  ENSG00000103196_55 (sequence is synthesized)
gagctaacggtgacagaagacagccaaggtcaaccctcccgggtgattgtgatgggtgttccaggtgtggttgggcgatgctgctacttgaccccaagctccagtgtggaaacttccttc

SEQ ID NO: 135490 - DNA, 120 bp, Artificial Sequence
  ENSG00000103196_56 (sequence is synthesized)
ctggctggttttccagaactacagaggaatggaccacagtcttccagggtccctcctcgtccaccaaccgggagcctccaccttggccatccgtcagctatgaatggctttttaaacaaa

SEQ ID NO: 135491 - DNA, 120 bp, Artificial Sequence
  ENSG00000103196_57 (sequence is synthesized)
ggccatccgtcagctatgaatggctttttaaacaaacccacgtcccagcctgggtaacatggtaaagccccgtctctacaaaaaaatccaagttagccgggcatggtggtgcgcacctgt

SEQ ID NO: 135492 - DNA, 62 bp, Artificial Sequence
  ENSG00000103196_58 (sequence is synthesized)
ctgtagtcccagctgcagtgggactgaggtggaggtggaggtggggggtgggagctgaggaa

SEQ ID NO: 135493 - DNA, 120 bp, Artificial Sequence
  ENSG00000103196_59 (sequence is synthesized)
atcggggctctgtgaaacggttttcctgtttatgacggtgttgttgaaattttgaaaaataccacacaggccgggcgtggtggctcacacctgcactttgggaggcagaggcaggtggat

SEQ ID NO: 135494 - DNA, 120 bp, Artificial Sequence
  ENSG00000103196_60 (sequence is synthesized)
tctcaggaggctacggcagaagaaccgcttgaggccgaggcagaggttgcagtgagctaagatagtgtcactgcactccagcctggccaacacagcaaaactccgtctcaaaaaaaaaaa

SEQ ID NO: 135495 - DNA, 120 bp, Artificial Sequence
  ENSG00000103197_0 (sequence is synthesized)
gcttccggcggcgtcccggggccaggggggtgcgcctttctccgcgtcggggcggcccggagcgcggtggcgcggcgcgggaggggttttctggtgcgtcctggtccaccatggccaaac

SEQ ID NO: 135496 - DNA, 120 bp, Artificial Sequence
  ENSG00000103197_1 (sequence is synthesized)
caacaagcaaagattcaggcttgaaggagaagtttaagattctgttgggactgggaacaccgaggccaaatcccaggtctgcagagggtaaacagacggagtttatcatcaccgcggaaa

SEQ ID NO: 135497 - DNA, 120 bp, Artificial Sequence
  ENSG00000103197_2 (sequence is synthesized)
tactgagagaactgagcatggaatgtggcctcaacaatcgcatccggatgatagggcagatttgtgaagtcgcaaaaaccaagaaatttgaagagcacgcagtggaagcactctggaagg

SEQ ID NO: 135498 - DNA, 120 bp, Artificial Sequence
  ENSG00000103197_3 (sequence is synthesized)
cggtcgcggatctgttgcagccggagcggccgctggaggcccggcacgcggtgctggctctgctgaaggccatcgtgcaggggcagggcgagcgtttgggggtcctcagagccctcttct

SEQ ID NO: 135499 - DNA, 120 bp, Artificial Sequence
  ENSG00000103197_4 (sequence is synthesized)
ttaaggtcatcaaggattacccttccaacgaagaccttcacgaaaggctggaggttttcaaggccctcacagacaatgggagacacatcacctacttggaggaagagctggctgactttg

SEQ ID NO: 135500 - DNA, 120 bp, Artificial Sequence
  ENSG00000103197_5 (sequence is synthesized)
tcctgcagtggatggatgttggcttgtcctcggaattccttctggtgctggtgaacttggtcaaattcaatagctgttacctcgacgagtacatcgcaaggatggttcagatgatctgtc

SEQ ID NO: 135501 - DNA, 120 bp, Artificial Sequence
  ENSG00000103197_6 (sequence is synthesized)
tgctgtgcgtccggaccgcgtcctctgtggacatagaggtctccctgcaggtgctggacgccgtggtctgctacaactgcctgccggctgagagcctcccgctgttcatcgttaccctct

SEQ ID NO: 135502 - DNA, 120 bp, Artificial Sequence
  ENSG00000103197_7 (sequence is synthesized)
gtcgcaccatcaacgtcaaggagctctgcgagccttgctggaagctgatgcggaacctccttggcacccacctgggccacagcgccatctacaacatgtgccacctcatggaggacagag

SEQ ID NO: 135503 - DNA, 120 bp, Artificial Sequence
  ENSG00000103197_8 (sequence is synthesized)
cctacatggaggacgcgcccctgctgagaggagccgtgttttttgtgggcatggctctctggggagcccaccggctctattctctcaggaactcgccgacatctgtgttgccatcatttt

SEQ ID NO: 135504 - DNA, 120 bp, Artificial Sequence
  ENSG00000103197_9 (sequence is synthesized)
accaggccatggcatgtccgaacgaggtggtgtcctatgagatcgtcctgtccatcaccaggctcatcaagaagtataggaaggagctccaggtggtggcgtgggacattctgctgaaca

SEQ ID NO: 135505 - DNA, 120 bp, Artificial Sequence
  ENSG00000103197_10 (sequence is synthesized)
tcatcgaacggctccttcagcagctccagaccttggacagcccggagctcaggaccatcgtccatgacctgttgaccacggtggaggagctgtgtgaccagaacgagttccacgggtctc

SEQ ID NO: 135506 - DNA, 120 bp, Artificial Sequence
  ENSG00000103197_11 (sequence is synthesized)
aggagagatactttgaactggtggagagatgtgcggaccagaggcctgagtcctccctcctgaacctgatctcctatagagcgcagtccatccacccggccaaggacggctggattcaga

SEQ ID NO: 135507 - DNA, 120 bp, Artificial Sequence
  ENSG00000103197_12 (sequence is synthesized)
acctgcaggcgctgatggagagattcttcaggagcgagtcccgaggcgccgtgcgcatcaaggtgctggacgtgctgtcctttgtgctgctcatcaacaggcagttctatgaggaggagc

SEQ ID NO: 135508 - DNA, 120 bp, Artificial Sequence
  ENSG00000103197_13 (sequence is synthesized)
tgattaactcagtggtcatctcgcagctctcccacatccccgaggataaagaccaccaggtccgaaagctggccacccagttgctggtggacctggcagagggctgccacacacaccact

SEQ ID NO: 135509 - DNA, 120 bp, Artificial Sequence
  ENSG00000103197_14 (sequence is synthesized)
tcaacagcctgctggacatcatcgagaaggtgatggcccgctccctctccccacccccggagctggaagaaagggatgtggccgcatactcggcctccttggaggatgtgaagacagccg

SEQ ID NO: 135510 - DNA, 120 bp, Artificial Sequence
  ENSG00000103197_15 (sequence is synthesized)
tcctggggcttctggtcatccttcagaccaagctgtacaccctgcctgcaagccacgccacgcgtgtgtatgagatgctggtcagccacattcagctccactacaagcacagctacaccc

SEQ ID NO: 135511 - DNA, 120 bp, Artificial Sequence
  ENSG00000103197_16 (sequence is synthesized)
tgccaatcgcgagcagcatccggctgcaggcctttgacttcctgttgctgctgcgggccgactcactgcaccgcctgggcctgcccaacaaggatggagtcgtgcggttcagcccctact

SEQ ID NO: 135512 - DNA, 120 bp, Artificial Sequence
  ENSG00000103197_17 (sequence is synthesized)
gcgtctgcgactacatggagccagagagaggctctgagaagaagaccagcggccccctttctcctcccacagggcctcctggcccggcgcctgcaggccccgccgtgcggctggggtccg

SEQ ID NO: 135513 - DNA, 120 bp, Artificial Sequence
  ENSG00000103197_18 (sequence is synthesized)
tgccctactccctgctcttccgcgtcctgctgcagtgcttgaagcaggagtctgactggaaggtgctgaagctggttctgggcaggctgcctgagtccctgcgctataaagtgctcatct

SEQ ID NO: 135514 - DNA, 120 bp, Artificial Sequence
  ENSG00000103197_19 (sequence is synthesized)
ttacttccccttgcagtgtggaccagctgtgctctgctctctgctccatgctttcaggcccaaagacactggagcggctccgaggcgccccagaaggcttctccagaactgacttgcacc

SEQ ID NO: 135515 - DNA, 120 bp, Artificial Sequence
  ENSG00000103197_20 (sequence is synthesized)
tggccgtggttccagtgctgacagcattaatctcttaccataactacctggacaaaaccaaacagcgcgagatggtctactgcctggagcagggcctcatccaccgctgtgccagccagt

SEQ ID NO: 135516 - DNA, 120 bp, Artificial Sequence
  ENSG00000103197_21 (sequence is synthesized)
gcgtcgtggccttgtccatctgcagcgtggagatgcctgacatcatcatcaaggcgctgcctgttctggtggtgaagctcacgcacatctcagccacagccagcatggccgtcccactgc

SEQ ID NO: 135517 - DNA, 120 bp, Artificial Sequence
  ENSG00000103197_22 (sequence is synthesized)
tggagttcctgtccactctggccaggctgccgcacctctacaggaactttgccgcggagcagtatgccagtgtgttcgccatctccctgccgtacaccaacccctccaagtttaatcagt

SEQ ID NO: 135518 - DNA, 120 bp, Artificial Sequence
  ENSG00000103197_23 (sequence is synthesized)
acatcgtgtgtctggcccatcacgtcatagccatgtggttcatcaggtgccgcctgcccttccggaaggattttgtccctttcatcactaagggcctgcggtccaatgtcctcttgtctt

SEQ ID NO: 135519 - DNA, 120 bp, Artificial Sequence
  ENSG00000103197_24 (sequence is synthesized)
ttgatgacacccccgagaaggacagcttcagggcccggagtactagtctcaacgagagacccaagagtctgaggatagccagaccccccaaacaaggcttgaataactctccacccgtga

SEQ ID NO: 135520 - DNA, 120 bp, Artificial Sequence
  ENSG00000103197_25 (sequence is synthesized)
aagaattcaaggagagctctgcagccgaggccttccggtgccgcagcatcagtgtgtctgaacatgtggtccgcagcaggatacagacgtccctcaccagtgccagcttggggtctgcag

SEQ ID NO: 135521 - DNA, 120 bp, Artificial Sequence
  ENSG00000103197_26 (sequence is synthesized)
cacggaaacctgtctggacatgatggctcgatacgtcttctccaacttcacggctgtcccgaagaggtctcctgtgggcgagttcctcctagcgggtggcaggaccaaaacctggctggt

SEQ ID NO: 135522 - DNA, 120 bp, Artificial Sequence
  ENSG00000103197_27 (sequence is synthesized)
tgggaacaagcttgtcactgtgacgacaagcgtgggaaccgggacccggtcgttactaggcctggactcgggggagctgcagtccggcccggagtcgagctccagccccggggtgcatgt

SEQ ID NO: 135523 - DNA, 120 bp, Artificial Sequence
  ENSG00000103197_28 (sequence is synthesized)
gagacagaccaaggaggcgccggccaagctggagtcccaggctgggcagcaggtgtcccgtggggcccgggatcgggtccgttccatgtcggggggccatggtcttcgagttggcgccct

SEQ ID NO: 135524 - DNA, 120 bp, Artificial Sequence
  ENSG00000103197_29 (sequence is synthesized)
ggacgtgccggcctcccagttcctgggcagtgccacttctccaggaccacggactgcaccagccgcgaaacctgagaaggcctcagctggcacccgggttcctgtgcaggagaagacgaa

SEQ ID NO: 135525 - DNA, 120 bp, Artificial Sequence
  ENSG00000103197_30 (sequence is synthesized)
cctggcggcctatgtgcccctgctgacccagggctgggcggagatcctggtccggaggcccacagggaacaccagctggctgatgagcctggagaacccgctcagccctttctcctcgga

SEQ ID NO: 135526 - DNA, 120 bp, Artificial Sequence
  ENSG00000103197_31 (sequence is synthesized)
catcaacaacatgcccctgcaggagctgtctaacgccctcatggcggctgagcgcttcaaggagcaccgggacacagccctgtacaagtcactgtcggtgccggcagccagcacggccaa

SEQ ID NO: 135527 - DNA, 120 bp, Artificial Sequence
  ENSG00000103197_32 (sequence is synthesized)
accccctcctctgcctcgctccaacacagtggcctctttctcctccctgtaccagtccagctgccaaggacagctgcacaggagcgtttcctgggcagactccgccgtggtcatggagga

SEQ ID NO: 135528 - DNA, 120 bp, Artificial Sequence
  ENSG00000103197_33 (sequence is synthesized)
gggaagtccgggcgaggttcctgtgctggtggagcccccagggttggaggacgttgaggcagcgctaggcatggacaggcgcacggatgcctacagcaggtcgtcctcagtctccagcca

SEQ ID NO: 135529 - DNA, 120 bp, Artificial Sequence
  ENSG00000103197_34 (sequence is synthesized)
ggaggagaagtcgctccacgcggaggagctggttggcaggggcatccccatcgagcgagtcgtctcctcggagggtggccggccctctgtggacctctccttccagccctcgcagcccct

SEQ ID NO: 135530 - DNA, 120 bp, Artificial Sequence
  ENSG00000103197_35 (sequence is synthesized)
gagcaagtccagctcctctcccgagctgcagactctgcaggacatcctcggggaccctggggacaaggccgacgtgggccggctgagccctgaggttaaggcccggtcacagtcagggac

SEQ ID NO: 135531 - DNA, 120 bp, Artificial Sequence
  ENSG00000103197_36 (sequence is synthesized)
cctggacggggaaagtgctgcctggtcggcctcgggcgaagacagtcggggccagcccgagggtcccttgccttccagctccccccgctcgcccagtggcctccggccccgaggttacac

SEQ ID NO: 135532 - DNA, 120 bp, Artificial Sequence
  ENSG00000103197_37 (sequence is synthesized)
catctccgactcggccccatcacgcaggggcaagagagtagagagggacgccttaaagagcagagccacagcctccaatgcagagaaagtgccaggcatcaaccccagtttcgtgttcct

SEQ ID NO: 135533 - DNA, 120 bp, Artificial Sequence
  ENSG00000103197_38 (sequence is synthesized)
gcagctctaccattcccccttctttggcgacgagtcaaacaagccaatcctgctgcccaatgagtcacagtcctttgagcggtcggtgcagctcctcgaccagatcccatcatacgacac

SEQ ID NO: 135534 - DNA, 120 bp, Artificial Sequence
  ENSG00000103197_39 (sequence is synthesized)
ccacaagatcgccgtcctgtatgttggagaaggccagagcaacagcgagctcgccatcctgtccaatgagcatggctcctacaggtacacggagttcctgacgggcctgggccggctcat

SEQ ID NO: 135535 - DNA, 120 bp, Artificial Sequence
  ENSG00000103197_40 (sequence is synthesized)
cgagctgaaggactgccagccggacaaggtgtacctgggaggcctggacgtgtgtggtgaggacggccagttcacctactgctggcacgatgacatcatgcaagccgtcttccacatcgc

SEQ ID NO: 135536 - DNA, 120 bp, Artificial Sequence
  ENSG00000103197_41 (sequence is synthesized)
caccctgatgcccaccaaggacgtggacaagcaccgctgcgacaagaagcgccacctgggcaacgactttgtgtccattgtctacaatgactccggtgaggacttcaagcttggcaccat

SEQ ID NO: 135537 - DNA, 120 bp, Artificial Sequence
  ENSG00000103197_42 (sequence is synthesized)
caagggccagttcaactttgtccacgtgatcgtcaccccgctggactacgagtgcaacctggtgtccctgcagtgcaggaaagacatggagggccttgtggacaccagcgtggccaagat

SEQ ID NO: 135538 - DNA, 120 bp, Artificial Sequence
  ENSG00000103197_43 (sequence is synthesized)
cgtgtctgaccgcaacctgcccttcgtggcccgccagatggccctgcacgcaaatatggcctcacaggtgcatcatagccgctccaaccccaccgatatctacccctccaagtggattgc

SEQ ID NO: 135539 - DNA, 120 bp, Artificial Sequence
  ENSG00000103197_44 (sequence is synthesized)
ccggctccgccacatcaagcggctccgccagcggatctgcgaggaagccgcctactccaaccccagcctacctctggtgcaccctccgtcccatagcaaagcccctgcacagactccagc

SEQ ID NO: 135540 - DNA, 120 bp, Artificial Sequence
  ENSG00000103197_45 (sequence is synthesized)
cgagcccacacctggctatgaggtgggccagcggaagcgcctcatctcctcggtggaggacttcaccgagtttgtgtgaggccggggccctccctcctgcactggccttggacggtattg

SEQ ID NO: 135541 - DNA, 120 bp, Artificial Sequence
  ENSG00000103197_46 (sequence is synthesized)
cctgtcagtgaaataaataaagtcctgaccccagtgcacagacatagaggcacagattgcagtcagacagctcttttattgactttgtctgcttggtgcgggggttgggggggtgtcgag

SEQ ID NO: 135542 - DNA, 120 bp, Artificial Sequence
  ENSG00000103197_47 (sequence is synthesized)
gctctagaagcggccatgcccacagaagtggtacacagaagcaggcacagccagctccgagggccttgaggctgcctgggccatacagcacactcgcgcgtgcgcgcgcgcacacacaca

SEQ ID NO: 135543 - DNA, 120 bp, Artificial Sequence
  ENSG00000103197_48 (sequence is synthesized)
cacacacagtcaccttcctccaccctgggagccagcccccaggaggagtcttttcctctaaccaccctggggtcctctgacatgcctagtcctgctacttgcccagacctgatgccagca

SEQ ID NO: 135544 - DNA, 120 bp, Artificial Sequence
  ENSG00000103197_49 (sequence is synthesized)
ggcctgggcgctgctctcttgctacctggcctggggcaagggaggatgacaaggcctctggggtgatgagagtgcctggcagacagctgtgcccccagcaccggcccaaggccaagctcg

SEQ ID NO: 135545 - DNA, 120 bp, Artificial Sequence
  ENSG00000103197_50 (sequence is synthesized)
catccaagcagcagccgggctgccataacgccaccacacctaccaagcgcagcaggtgttgggggaggccagctctgggcgcaggcccctcagccctagtgaaaatagtgacatacaaaa

SEQ ID NO: 135546 - DNA, 120 bp, Artificial Sequence
  ENSG00000103197_51 (sequence is synthesized)
atatacacattttaacaccatataaattactgacacgagacacacagtgagacggtgcagggagtacggtaggaactggagaggtaataacttaggggcagggtggcggcggtgcaggct

SEQ ID NO: 135547 - DNA, 120 bp, Artificial Sequence
  ENSG00000103197_52 (sequence is synthesized)
aaccctccctgaagccagcagccttagcagtgggggacatctgcccagggggtggggccgggcacagcccgctgtacctgaggactcggggaaataaattagcatctcagaggctagaaa

SEQ ID NO: 135548 - DNA, 120 bp, Artificial Sequence
  ENSG00000103197_53 (sequence is synthesized)
ttgtcttttgatgacacccccgagaaggacagcttcagggcccggagtactagtctcaacgagagacccaagagcaggatacagacgtccctcaccagtgccagcttggggtctgcagat

SEQ ID NO: 135549 - DNA, 120 bp, Artificial Sequence
  ENSG00000103197_54 (sequence is synthesized)
gaccgcaacctgcccttcgtggcccgccagatggccctgcacgcaaatgtgagtgggggtgggtccaggcgtgagctggtgggacaggcccaggtgccacctgatagtgagctcaccccc

SEQ ID NO: 135550 - DNA, 120 bp, Artificial Sequence
  ENSG00000103197_55 (sequence is synthesized)
ctcccggtgacggcaatgtggctcctctctgctgagggcgcccacacggctgggagtggtccctggcctgcctcagcaccattgttctccggtgtttgggaggaggctgacccgtgggag

SEQ ID NO: 135551 - DNA, 120 bp, Artificial Sequence
  ENSG00000103197_56 (sequence is synthesized)
gtgtctgccctgctcaggaagctggggctggcagcttcagaagcagtaggggccctgtggagcctctgcccagcatcctccgtggggagtccagcactgcgggctccaggaggctctgcg

SEQ ID NO: 135552 - DNA, 120 bp, Artificial Sequence
  ENSG00000103197_57 (sequence is synthesized)
gcagcctccctccctgcctgggcccaggtttggacacctgagcccgcctgcgcactctgggcccccaccccactcggcaccgtgcttctcgccaggccctctggctcttccctgtggctg

SEQ ID NO: 135553 - DNA, 120 bp, Artificial Sequence
  ENSG00000103197_58 (sequence is synthesized)
cagatggcacttagcggcctaggacgtctattcacgggaggagggaggcactgccctcctcaggtctgcccaagcagcttgtagctagcactgggccccgtgcgcgcccctgccggccgc

SEQ ID NO: 135554 - DNA, 120 bp, Artificial Sequence
  ENSG00000103197_59 (sequence is synthesized)
tggccctgccctctctcctctgcaggcacggggcctgtgctctctgctcgacctgtgtgtagcccctcctcctgctgacgtggccgcacacggccttcccttgcagtggcctctttctcc

SEQ ID NO: 135555 - DNA, 120 bp, Artificial Sequence
  ENSG00000103197_60 (sequence is synthesized)
catctctgggggtcccgcagagactgccagaaccgtgttctctggtgattcgcagtggcgctcatccaccttccaccggagacaggtctgatttttccagacgtggtgcatcgtttaggc

SEQ ID NO: 135556 - DNA, 120 bp, Artificial Sequence
  ENSG00000103197_61 (sequence is synthesized)
cccagacaggaatatgcagtaggtgagccggggctgggccagtgctgtccacagtccgcagagtgacctgcaggccgccttcgtggcctgagtgggccccggcacagttcccagagggat

SEQ ID NO: 135557 - DNA, 120 bp, Artificial Sequence
  ENSG00000103197_62 (sequence is synthesized)
gccagtgtggcttccgcatgactttggaggaccgcattagtcgagtctgttaaccacagctttaaggaggactccacggccacacgggctcatcagcataggggccctggggaggcgagg

SEQ ID NO: 135558 - DNA, 120 bp, Artificial Sequence
  ENSG00000103197_63 (sequence is synthesized)
ctagtatccagcagcctcagggctgtgccttttcctggagcctggggcgggtgatgtacaggaggccaggcagcagaagggaggccgggacttcgccgggacttagcagggactgaagtc

SEQ ID NO: 135559 - DNA, 120 bp, Artificial Sequence
  ENSG00000103197_64 (sequence is synthesized)
cagagcctgtcgctgggccagagcattgcccccgaccgctggtggcagtggcagaggtcatagcctggggcttctaaaagaggctggacctgggagaggcaagaaaggcttgtagttgtg

SEQ ID NO: 135560 - DNA, 120 bp, Artificial Sequence
  ENSG00000103197_65 (sequence is synthesized)
gctactcttggccctcctgcccgagcttccttcttggcccagctgcatgggcacagccaagattccttggggggtggggtacgggcaggaacagcagctgccatcacagccactgtggcc

SEQ ID NO: 135561 - DNA, 120 bp, Artificial Sequence
  ENSG00000103197_66 (sequence is synthesized)
ccttgagaggatctggggggtgtcctgggccacgtgggtcagggtggcccctggagaggatctgggggtgtctcaacccatgaggcccggagcggcctcagagggctgggggcgtctgtc

SEQ ID NO: 135562 - DNA, 120 bp, Artificial Sequence
  ENSG00000103197_67 (sequence is synthesized)
cccatgcggcccagagcggcctgagagggctgagggtgtctccatgcggtgggtgtgtagcgaggcctctggtgccaagtccatgtggggagtggaagtcagcctgtgtcatcgtgcctg

SEQ ID NO: 135563 - DNA, 120 bp, Artificial Sequence
  ENSG00000103197_68 (sequence is synthesized)
atcgagaaggtgagagccgttgtacccggggccgggtgctagcgtgccagagctccgtgggcagcaatggcctctgggccctctgtcctcctcttcgagtgaccggatggctgtgtccgt

SEQ ID NO: 135564 - DNA, 120 bp, Artificial Sequence
  ENSG00000103197_69 (sequence is synthesized)
aggtgaggctcccctccctgcagggtgggtgtcccgaggcctgtgcagggcctgccactgctggatttgtgtcctgactgaaagtcctggacatgggtgtcctgtcacactctgggacag

SEQ ID NO: 135565 - DNA, 120 bp, Artificial Sequence
  ENSG00000103197_70 (sequence is synthesized)
ctgggctgggcctcctggaccgacgctggagcccagacctggggctggggctttggcctgccgtcctccctgcccagccaacagctttgctctttgattttcagatgcattttggtttct

SEQ ID NO: 135566 - DNA, 89 bp, Artificial Sequence
  ENSG00000103197_71 (sequence is synthesized)
acagctttgctctttgattttcagatgcattttggtttctgcacagtcactcgggtataaagggcatctttgcttttgagcaataaaga

SEQ ID NO: 135567 - DNA, 120 bp, Artificial Sequence
  ENSG00000103197_72 (sequence is synthesized)
gccaaggacagctgcacaggagcgtttcctgggcaggtatcgcctctcagagggaagcggttggctgcagagcgccactctgcctcataggtgctgtgctcgtcgcctcatccgcccacc

SEQ ID NO: 135568 - DNA, 120 bp, Artificial Sequence
  ENSG00000103197_73 (sequence is synthesized)
tgggtgacgtcaggctgcccactgactgtcctgtccctgctgggccgtgtttggactcctgcctcggtgagttgctgggcacagggtctaggggctgatgggctctggagctggatggcc

SEQ ID NO: 135569 - DNA, 120 bp, Artificial Sequence
  ENSG00000103197_74 (sequence is synthesized)
tgtggggtctcctggtgtcatgaggtctgtgtgaccgtaggcactgcctcctcgcctgtaaacagatggtcactgcaccttcctcttatgggatgttctggggatcatatgaggcagttc

SEQ ID NO: 135570 - DNA, 120 bp, Artificial Sequence
  ENSG00000103197_75 (sequence is synthesized)
tcgcagagtgctgagatcgtacctggcagctggtgtggggctacggtgttgttttgcccttgcaccctttcggggccactcccctgctcactgcattccatctgtgctggtcttggctga

SEQ ID NO: 135571 - DNA, 120 bp, Artificial Sequence
  ENSG00000103197_76 (sequence is synthesized)
ccctgaacacccaggcctcttggtgttcctgcctcccctggtcggccacttctactccttcatgtcccagctgctcagaagggccgtccactctcacaggctctcctgggtttcccccac

SEQ ID NO: 135572 - DNA, 120 bp, Artificial Sequence
  ENSG00000103197_77 (sequence is synthesized)
tcaggccttgtcctcagtctctgagcacaaggctgtctgccctgcaccgagtgcaggggtcgggcaggagctgtgtcatcccctgctctgcgccacccgctgtgccaggtcccgacacac

SEQ ID NO: 135573 - DNA, 120 bp, Artificial Sequence
  ENSG00000103197_78 (sequence is synthesized)
tacgccgctctgcggtcggccggtgcatccggccccctgccctgtacaatgctgatgctgcagacctgtctcttgcagggcgcctctgtgggaaggagaggggtccagggctggagtccg

SEQ ID NO: 135574 - DNA, 120 bp, Artificial Sequence
  ENSG00000103197_79 (sequence is synthesized)
aaaagaattgagatcctgttctgataatggtcctaagttcagctccgcagtgaataaagttgaaaccaccaaaaaaatagaggttgggctgggcacaatggctcacgcctgtaatctcag

SEQ ID NO: 135575 - DNA, 66 bp, Artificial Sequence
  ENSG00000103197_80 (sequence is synthesized)
ctactaaaaatataaaaattagctgcacgtggtggcgggcacctgcaaggttgcagtgagccaaga

SEQ ID NO: 135576 - DNA, 120 bp, Artificial Sequence
  ENSG00000103197_81 (sequence is synthesized)
gaggagctggacaggatccctggaaggggccccggggtctctgagtcgcgctcagcgggtgcttgtgctctctgcccagctgtgctgaagtcccgagggacatgtccgctgcttgcgggt

SEQ ID NO: 135577 - DNA, 120 bp, Artificial Sequence
  ENSG00000103197_82 (sequence is synthesized)
gtgtggctcgggtgaatggtggggggcccagctctgctgctgggagctcaggcttgcagagggctctggcctaagctccctgtggcagcctgccgtgaccggcctgggtggggcggcctc

SEQ ID NO: 135578 - DNA, 120 bp, Artificial Sequence
  ENSG00000103197_83 (sequence is synthesized)
gaggcgctggggctgtggtggcgctgtttgcatgtctgagggatgtcccagggttgggaagagccaagtctgttccgttcctgctgcggggacttggcctcagctgcttctcttgcttct

SEQ ID NO: 135579 - DNA, 120 bp, Artificial Sequence
  ENSG00000103197_84 (sequence is synthesized)
gaggattgtgggagggagcatgagggcaaaaccagggcccaggccaggaggcccctggggggccagagatgggtaaggggaggtactggcctcaggccaaaggtgctgccgcctccgcag

SEQ ID NO: 135580 - DNA, 120 bp, Artificial Sequence
  ENSG00000103197_85 (sequence is synthesized)
ttctccccgcagtgtctgggtgcaggtgtgggctctcgggctctcggctgtcacctgcctgtgggtcatcgctgctggcactggcagaggggatacctgtctcctcctggaagcccgttg

SEQ ID NO: 135581 - DNA, 120 bp, Artificial Sequence
  ENSG00000103197_86 (sequence is synthesized)
caggccaaggggtcccatggccctcagtccatccacctcctcacctcaggccggcctctgctgggtgggacttggccaggggttggggtggtagaggtgctcggtgaggcttaaagccat

SEQ ID NO: 135582 - DNA, 120 bp, Artificial Sequence
  ENSG00000103197_87 (sequence is synthesized)
tttctagcacattctgtatcatgagcaaaatattgcctaggggctatgaaatttgtatcagaatgaactcccataagcctcttccctgtcactgggtgtggagctcaggcagccgctcgc

SEQ ID NO: 135583 - DNA, 120 bp, Artificial Sequence
  ENSG00000103197_88 (sequence is synthesized)
ctgcctgagggtgacggtggaaggccacatggggatcccagacctctgtgtgcttgccggaggcagcctgcgggcagaatgcaatctgggcctgtctgtgtggcctccgcctctctgcat

SEQ ID NO: 135584 - DNA, 120 bp, Artificial Sequence
  ENSG00000103197_89 (sequence is synthesized)
gactacaccgtttcgccaggaggccgtaacctagtgctcccgtgggcttcggtgagggggatgtcggtctctagcctcctgagtctgctccgaccagtaggcctggtcttccccacccag

SEQ ID NO: 135585 - DNA, 120 bp, Artificial Sequence
  ENSG00000103197_90 (sequence is synthesized)
cgtctccccgttctctgggacaatgtggtccacgtgattctcaagctgaggctcgctgggccgcccacgccctgttggggtctttccgagcgaggtcctcagccgtgcatgcgttgagct

SEQ ID NO: 135586 - DNA, 120 bp, Artificial Sequence
  ENSG00000103197_91 (sequence is synthesized)
ttggcccttggtgataggtggctcggcccgccctacctggcaccctgaccctggtcacggcctctccctccagcaggatacagacgtccctcaccagtgccagcttggggtctgcagatg

SEQ ID NO: 135587 - DNA, 120 bp, Artificial Sequence
  ENSG00000103197_92 (sequence is synthesized)
cagcaccgagagcagtggctggcgcacagcaggcacctgagtgcttgttgggtgggtgggacccccagggaggatgagccatgcgtgttattgacgtcatagagtgactagaccacagcc

SEQ ID NO: 135588 - DNA, 120 bp, Artificial Sequence
  ENSG00000103197_93 (sequence is synthesized)
gacccagggctgggcggagatcctggtccggaggcccacaggtactgggcggggctggcctgagcgccatctttctgccagtcacccacagagctgtggacactcaggggcgattgcaga

SEQ ID NO: 135589 - DNA, 84 bp, Artificial Sequence
  ENSG00000103197_94 (sequence is synthesized)
gtcacccacagagctgtggacactcaggggcgattgcagacttggccctcttgggatatttgggggtaacttttgcgctggaac

SEQ ID NO: 135590 - DNA, 69 bp, Artificial Sequence
  ENSG00000103197_95 (sequence is synthesized)
gggggtaacttgtaagtctccagaggtgagctgtgaggggcgatccaggtggctgaggtggggcagggg

SEQ ID NO: 135591 - DNA, 120 bp, Artificial Sequence
  ENSG00000103197_96 (sequence is synthesized)
gctgtgaggggcgatccaggtggctgaggtggggcaggggcctgtggcgaaccaagtgacttccatggcagagagttgccctccccgcctggaggctgcaagtccgagaccaaggtgctc

SEQ ID NO: 135592 - DNA, 120 bp, Artificial Sequence
  ENSG00000103197_97 (sequence is synthesized)
ctcggcaggaggtgctcctcagaggcctcaatccttggcatgcagttggttttttccctgtgtcctcacaggctctttcctggatgtctgcgtgttaatctcctcttgggaggaaaccgg

SEQ ID NO: 135593 - DNA, 120 bp, Artificial Sequence
  ENSG00000103197_98 (sequence is synthesized)
tcatggcttagggtccgctctggtcccttgctagccgtaattagctttctgaaacccagtctccagagacagtcccgttctgagttcctggggttgggactaaagcataccaacatgggg

SEQ ID NO: 135594 - DNA, 120 bp, Artificial Sequence
  ENSG00000103197_99 (sequence is synthesized)
gcacagctcagcctgttcccaggggcagagggagcccccgcagaggcccagagcccagggacagagggaggcctttgcagaggcccagagcccaggggcgcctgggtgtgccgtggctga

SEQ ID NO: 135595 - DNA, 120 bp, Artificial Sequence
  ENSG00000103197_100 (sequence is synthesized)
ggggtgcaaagagtaggggttccagccctcgtggaggccttgggtccggactgtgaggctgtgggctggaggccgctgctctgaggtgcctggcggagcctggcctcgaggcaggggctg

SEQ ID NO: 135596 - DNA, 120 bp, Artificial Sequence
  ENSG00000103197_101 (sequence is synthesized)
aaaaaaaaaaaaaaaaaaaaaaaaggtgtttgtggtagaaagtgttctcacggctgctgactcagaaccatgagcctgtgtgtaagtcctggccttctcttcaaaggtgatggcccgctc

SEQ ID NO: 135597 - DNA, 120 bp, Artificial Sequence
  ENSG00000103197_102 (sequence is synthesized)
tgtccctgcagtgcaggaaaggtagggccgggtggggccctgcagtgcaggaaaggtagggccgggtggggccctgcagtgtggcgccaagagccctgggcctggcgtgaccaccaagtc

SEQ ID NO: 135598 - DNA, 120 bp, Artificial Sequence
  ENSG00000103197_103 (sequence is synthesized)
ctctttctcctccctgtaccagtccagctgccaaggacagctgcacaggagcgtttcctgggcaggtatcgcctctcagagggaagcggttggctgcagagcgccactctgcctcataga

SEQ ID NO: 135599 - DNA, 120 bp, Artificial Sequence
  ENSG00000103197_104 (sequence is synthesized)
atgcatttttgttttctgtctcttccccgctaactgccctttggcatggctctttttgctcatctcacccgcgggatctctccatcctgaccctgtggcctgggacctttcctcctcacc

SEQ ID NO: 135600 - DNA, 120 bp, Artificial Sequence
  ENSG00000103197_105 (sequence is synthesized)
cctccactggcttgttctccccttcccgggagctgggctctctggggcgttggggctccttcctcacccgatagtctgaggatagccagaccccccaaacaaggcttgaataactctcca

SEQ ID NO: 135601 - DNA, 120 bp, Artificial Sequence
  ENSG00000103197_106 (sequence is synthesized)
tcggtcacgaggagcaggaggagaggccgcagtgctcagggccccgtgggcacgagcttcaccccgagcctgcgttgtgtcctctgtgccctgaagcctgtggcgcctgctgctgagtgt

SEQ ID NO: 135602 - DNA, 120 bp, Artificial Sequence
  ENSG00000103197_107 (sequence is synthesized)
ctgtcaggagtaactggcaagtgcagactgggtgtgctgggtgggcacagtgtagttggtgcttcctgtctgtccggcgcggcccttgggcccccaccatctccccagtggcagctgtca

SEQ ID NO: 135603 - DNA, 120 bp, Artificial Sequence
  ENSG00000103197_108 (sequence is synthesized)
tcagggcccggagtactagtctcaacgagagacccaagaggtacggcctgcgggggtgtgcctggagtcggtgtggggtggggaaggacatggggctgtggcctgcctgacggtgcctcc

SEQ ID NO: 135604 - DNA, 120 bp, Artificial Sequence
  ENSG00000103197_109 (sequence is synthesized)
caaaattcatccataagatgttggatggtagaacagtttcctgtctgctgactggattgttccacccagcgccatgtgtccaggcccgtccaggctgtggcagctgttggtgctcccctc

SEQ ID NO: 135605 - DNA, 120 bp, Artificial Sequence
  ENSG00000103197_110 (sequence is synthesized)
cttttcatggctgagtagtattccatcatctggaaggagcacattttgtctgtccgttcctccattggtggacatttggcctgtgtccgccttgcagctgcgtgaagtaagctagagaaa

SEQ ID NO: 135606 - DNA, 120 bp, Artificial Sequence
  ENSG00000103197_111 (sequence is synthesized)
atggcagaagggcactgctgggcccgcacttggtgtagaggctggagagaagatcgtgtgtgctttgtgggccacatgcaggtcctgtcggtctttctgttttgttgataaccctttaga

SEQ ID NO: 135607 - DNA, 120 bp, Artificial Sequence
  ENSG00000103197_112 (sequence is synthesized)
cgatcaagtgtaacctggatgggaaggacctggggctggggaggggctgccgttctcagggatggcctgcagcgggtatgcccaccctgcttcatgcacctgggctcacctgcgtggccg

SEQ ID NO: 135608 - DNA, 120 bp, Artificial Sequence
  ENSG00000103197_113 (sequence is synthesized)
gagtgcccctgaggcacgtgttaaaaatgcagagtcctggccttcaccccagacctgctgactgtgagtctctggggcttggggcctccgaacacctctgcaacggcaggagctgggcga

SEQ ID NO: 135609 - DNA, 120 bp, Artificial Sequence
  ENSG00000103197_114 (sequence is synthesized)
gttctgtcactgggaggtggtgctgctgacttggtctcaaccggagcgtactggtcccgtcttcctcctcctttctccactttgtggaccttcctcctgccatcctgtggtgggaggttt

SEQ ID NO: 135610 - DNA, 120 bp, Artificial Sequence
  ENSG00000103197_115 (sequence is synthesized)
ccattagtcttgggtctctgtgtcatgattctgggaagtagagaaagaggaggaagagatcggtctgactctggctttgctgttctgtcgcccagaaaagggcctcagtggctgggctgc

SEQ ID NO: 135611 - DNA, 120 bp, Artificial Sequence
  ENSG00000103197_116 (sequence is synthesized)
ctgcaggacaggtgccggccaggtgcctaccgtcaggtttcctgtctgaggtgacgtggccggcagccaagtgtgcacacgtctcctccgagccactctctgctgggggtggggaacgcc

SEQ ID NO: 135612 - DNA, 120 bp, Artificial Sequence
  ENSG00000103197_117 (sequence is synthesized)
caggagtctggtgatgtcggcgtctcccagcctcgggttgggccctgagtgtacggcatacacacttctgctgccgcctcggcacagaccctctgtgcagccccaggggcggtagatcct

SEQ ID NO: 135613 - DNA, 120 bp, Artificial Sequence
  ENSG00000103197_118 (sequence is synthesized)
agtgtccgtgcgtagccggcctgccctgggctcccctgagcctcttcgggcccagtgcgtggtctgtctgttgctgccgggggactgatgatggggtttctggcagtgacgggtttggac

SEQ ID NO: 135614 - DNA, 120 bp, Artificial Sequence
  ENSG00000103197_119 (sequence is synthesized)
tccaggcggccgcagctgggggctcagggctatttctccgtgggcgggctgtctctgttgtgcacgtgctcccgcagagccgggctctgcctgggacttcggtcctgccggaccctctgc

SEQ ID NO: 135615 - DNA, 120 bp, Artificial Sequence
  ENSG00000103197_120 (sequence is synthesized)
agcccccagcgtggtctgtttacccctgttcattcactggcttgctcgtcctgggtgcctctgccaggccttgacacgtggccaagtagcaaggaaggcacagtgcctgccctcagggag

SEQ ID NO: 135616 - DNA, 120 bp, Artificial Sequence
  ENSG00000103197_121 (sequence is synthesized)
ctccggccggttttcacccaacacaggagcctcttaaaaattctgtgtgagttcgtttcagccagtcttgcatggggacattgtcttccgtttcagtcctgacgttcaccctgtgcacct

SEQ ID NO: 135617 - DNA, 120 bp, Artificial Sequence
  ENSG00000103197_122 (sequence is synthesized)
gcgtgatcgccagccctgcctggtctctcctctgcgggctctccctctccactccctcctctgggagctctgtggccccaggcccaccttccttgagagacatttgtgtgcctgccagtc

SEQ ID NO: 135618 - DNA, 120 bp, Artificial Sequence
  ENSG00000103197_123 (sequence is synthesized)
atacccctttcccaggaggcgcagcttaggctctgaggctgtcccttcccaccgaactcctccctgcagcctcgcagtcctgccctcctgagagctgcccactctgctcctctccccagc

SEQ ID NO: 135619 - DNA, 120 bp, Artificial Sequence
  ENSG00000103197_124 (sequence is synthesized)
gtccactgtccttgaattgccctttgctgggcattgcgatcccgcattctgtctgagggagctaagggcctcctggaagttcctctgggtcctctggcttctcccatcagggctggtctt

SEQ ID NO: 135620 - DNA, 120 bp, Artificial Sequence
  ENSG00000103197_125 (sequence is synthesized)
gtcctggtctctgttcctgtggaactttttacctgcttctgtgaaaactcacgctgtcctcagcacagcacgcacacacacgcatattcacgcatgcacaggcacacacgtgcacatgcc

SEQ ID NO: 135621 - DNA, 120 bp, Artificial Sequence
  ENSG00000103197_126 (sequence is synthesized)
acacagccacacacaccctcacgcacacacgcacagcaccatgtgggaggggttctcggctgtgacagtgaagggcagggcctcacctcggctgctccttgtgagttgtgggccccgtgt

SEQ ID NO: 135622 - DNA, 120 bp, Artificial Sequence
  ENSG00000103197_127 (sequence is synthesized)
gaatgtggatgtctcccatctgtgcttttcctaagtggggctcccgtgccgttcacctcacattcctggtgtgttacttggcaggcactcccaccactccgaaagggaggcccttcctgg

SEQ ID NO: 135623 - DNA, 120 bp, Artificial Sequence
  ENSG00000103197_128 (sequence is synthesized)
gagggaggcaagaaggctccccagcccctttgccccctttcctgggcctgcgttcccagggcctccccagcccctctggctaccccgtgacctggccgctggggagaggtttcatgcctg

SEQ ID NO: 135624 - DNA, 120 bp, Artificial Sequence
  ENSG00000103197_129 (sequence is synthesized)
atgcacccgagaggttcgggctgtgtaacctgtgcgggcttctctggtgccctctctcaggactccttggggaacctgggtgtctcgccttctgctgcctcagggcctgggcgtctctgc

SEQ ID NO: 135625 - DNA, 120 bp, Artificial Sequence
  ENSG00000103197_130 (sequence is synthesized)
ccggctgccatgagtgctctccttcctggctttgaggggcggctcctctcacccctctagtgtccatgtgaacgctcctccttgaagaagcctcttcccccccgagcagtggccctcccc

SEQ ID NO: 135626 - DNA, 120 bp, Artificial Sequence
  ENSG00000103197_131 (sequence is synthesized)
cctttcatcactaaggtgggctcagggccggtgaaggctgtgtctctcggtaggccagggcttgctttgcccttggctgtccatggtcgggcagagtgacagggcctgcggtccaatgtc

SEQ ID NO: 135627 - DNA, 120 bp, Artificial Sequence
  ENSG00000103197_132 (sequence is synthesized)
aagcagagctctgtgccctgtgtgcctggccgcgggaggacccagagtcgggctggcctgcgccaggcagacgggctggtgtggggctgtggccgggcactccccacccgccccagcagg

SEQ ID NO: 135628 - DNA, 120 bp, Artificial Sequence
  ENSG00000103197_133 (sequence is synthesized)
atcagcaggtggccttttctgagtgcctgtggtgctggacgtgggtctgagcaggtgggacgccgcctgtcctgggcctgcacgagcttggctctggctttcaccatcctcttcctgaca

SEQ ID NO: 135629 - DNA, 120 bp, Artificial Sequence
  ENSG00000103197_134 (sequence is synthesized)
ctgtccaacagagcacacgccgcttcaggggggctttgttcgcttcccccagactgtgacttcaggagctcaggtgcctgtcccttcccctcaccgcctgtgcgcatctgggcaggccct

SEQ ID NO: 135630 - DNA, 63 bp, Artificial Sequence
  ENSG00000103197_135 (sequence is synthesized)
caggagaatctcatgaacccaggaggtggagcttctagtgagctgagatcacgccaccgcact

SEQ ID NO: 135631 - DNA, 120 bp, Artificial Sequence
  ENSG00000103197_136 (sequence is synthesized)
aggccatcgtgcaggggcaggtaaggcccagggcgacgctgggatgggtgacgtcaggctgcccactgactgtcctgtccctgctgggccgtgtttggactcctgcctcgggcgagcgtt

SEQ ID NO: 135632 - DNA, 120 bp, Artificial Sequence
  ENSG00000103197_137 (sequence is synthesized)
gtgcagaatgtctttggcttggccagcgggatccccttgacttggtccctttgtggctgagccctgttcccacgctgtgcgagcactcccggcccagcttcaggcctgaggggtgggggt

SEQ ID NO: 135633 - DNA, 120 bp, Artificial Sequence
  ENSG00000103197_138 (sequence is synthesized)
ggcctgagtctccatggtgacatcagctgagctgcagactctgatgggtggcagctgtttagggggaagcccacccctgggcctgcaccgagcgggccttgccctggcctttggtggctc

SEQ ID NO: 135634 - DNA, 120 bp, Artificial Sequence
  ENSG00000103197_139 (sequence is synthesized)
ccctggcctctggaacccacagatggggctgcctcaagtcccaggttgaccaggggccctgcagaccgacctctgcctgttgcccccaagccctggtggggagtgctgtgacctgcatgg

SEQ ID NO: 135635 - DNA, 120 bp, Artificial Sequence
  ENSG00000103197_140 (sequence is synthesized)
tgctcccctgccaggtctccacgtgcagacgagctggtttggaagggctgcgtgggacgggccctggggtggctgactgcgcgtgtgcagggctgtggggcgcccgggggctgtgatggt

SEQ ID NO: 135636 - DNA, 120 bp, Artificial Sequence
  ENSG00000103197_141 (sequence is synthesized)
cccctctgttgctgcttctacttcctctccccctgtcctgacgctggcacaggaaatgctgctttgggacctcccaccctctctccttagcgtccccagctgtgggtctggcttggagtt

SEQ ID NO: 135637 - DNA, 120 bp, Artificial Sequence
  ENSG00000103197_142 (sequence is synthesized)
ggagggtgagcctctgctcttgggagcagtctgtttgcaaacagggacttcccccacgtcacggagtctccgcagctctcctcggttacgagggctggtttcaggctcccgctcttttag

SEQ ID NO: 135638 - DNA, 120 bp, Artificial Sequence
  ENSG00000103197_143 (sequence is synthesized)
agctgaggcccgtcgggcggagagcgtcttgcccctgcctacctggaggcacaggggtggctgctggtggacactagggtgggcagagccgattgcctgcccaacccccgggcactcatg

SEQ ID NO: 135639 - DNA, 120 bp, Artificial Sequence
  ENSG00000103197_144 (sequence is synthesized)
caggagaggcctgtgtcggggtcacgtgcaggccttcccagcgtcctccctgcccgctcggtggatggcagcagtaagcagagccctggggaggctcgcagggctgctgtccctctggtc

SEQ ID NO: 135640 - DNA, 120 bp, Artificial Sequence
  ENSG00000103199_0 (sequence is synthesized)
acggcctggtttgcacccctggtttagggtcttcggccccggctctggcgtccctggctgccaagcctgaggcccgcagtcctactcccgccgagacccgccgctccggtcctgccccga

SEQ ID NO: 135641 - DNA, 120 bp, Artificial Sequence
  ENSG00000103199_1 (sequence is synthesized)
actgcccacggccggcagcgcttccaggccctgaaaaaaactctcttcctgtgtctggccagaggtatagagagagacaggttcaactctaaggcctgaaaaggaacaaggcccaccgga

SEQ ID NO: 135642 - DNA, 120 bp, Artificial Sequence
  ENSG00000103199_2 (sequence is synthesized)
agcaatggccactgtccctggcctccagcccctgccaaccttggagcaggacctggaacaggaagagatcctgattgtgaaggtggaggaggacttctgcttggaagaggagccctccgt

SEQ ID NO: 135643 - DNA, 120 bp, Artificial Sequence
  ENSG00000103199_3 (sequence is synthesized)
ggagacggaggaccccagccctgagactttccgccagctcttccggctcttctgctaccaggaggtggctgggccccgggaggccctgagccgcctctgggagctgtgctgccgctggct

SEQ ID NO: 135644 - DNA, 120 bp, Artificial Sequence
  ENSG00000103199_4 (sequence is synthesized)
gcggccggagctgcgcaccaaggagcagatcctggagctgctggtgctggagcagttcctgactgtgctgccgggggagatccaggctcgggtacgcgagcagcagccggagagcggtga

SEQ ID NO: 135645 - DNA, 120 bp, Artificial Sequence
  ENSG00000103199_5 (sequence is synthesized)
ggaggccgtggtccttgtggaagggctgcagcggaagcccaggaaacacaggcagcggggctcagagctgctttctgatgacgaggtgcccctcgggatagggggacagttcttaaaaca

SEQ ID NO: 135646 - DNA, 120 bp, Artificial Sequence
  ENSG00000103199_6 (sequence is synthesized)
ccaggcagaggctcagccagaggatctgtccctggaggaagaggctcgattctccagccagcagcccccagcccagctgagccacaggccacagaggggcccgctgttgtggccagagag

SEQ ID NO: 135647 - DNA, 120 bp, Artificial Sequence
  ENSG00000103199_7 (sequence is synthesized)
aggccctccagctccccggcatcaggagatggcgtcagcctcgcccttcctttcggcctggtcccaggtgcccgtgaacttggaggacgtggctgtatacctttctggggaggagccaag

SEQ ID NO: 135648 - DNA, 120 bp, Artificial Sequence
  ENSG00000103199_8 (sequence is synthesized)
atgcatggacccagctcagcgggacgcgccgctggagaatgaaggacctgggatccagttggaggacggcggtgatggcagggaggatgccccgttgagaatggagtggtaccgagtgct

SEQ ID NO: 135649 - DNA, 120 bp, Artificial Sequence
  ENSG00000103199_9 (sequence is synthesized)
ctcggcacgatgccaggggcctggccacccgctcccaggtcagaggccagccccagtcaggggcttggtcaggcctgatcagccaagaggcggccccccaccaggaagacgggcttccca

SEQ ID NO: 135650 - DNA, 120 bp, Artificial Sequence
  ENSG00000103199_10 (sequence is synthesized)
tggggctgacaagccgtacacctgccccgaatgtggcaaaggcttcagcaagacgtcccacttgaccaagcaccagcgcacacacacgggcgagcggccttacaagtgcctagtctgtgg

SEQ ID NO: 135651 - DNA, 120 bp, Artificial Sequence
  ENSG00000103199_11 (sequence is synthesized)
gaagggctttagcgaccgctccaacttcagcacgcaccagagggtgcacacaggcgagaagccctacccgtgccccgagtgtgggaagcgcttcagccagagctccagcctggtcatcca

SEQ ID NO: 135652 - DNA, 120 bp, Artificial Sequence
  ENSG00000103199_12 (sequence is synthesized)
ccgcaggacacacagcggggagcggccctatgcctgcacccagtgcgggaagcgcttcaacaacagctcgcacttcagcgcccaccgccggacgcacacaggtgagaagccctacacctg

SEQ ID NO: 135653 - DNA, 120 bp, Artificial Sequence
  ENSG00000103199_13 (sequence is synthesized)
cccggcctgtggccggggcttccgccggggcaccgacctgcacaagcaccagcggacccacatgggggcaggctccttgccgacgctccagccggtggctcctggaggccccggtgccaa

SEQ ID NO: 135654 - DNA, 120 bp, Artificial Sequence
  ENSG00000103199_14 (sequence is synthesized)
agcctgatcaccaggcctgaaactccctttccaggactctcatccctgggcacagaattcaggaaactgctagacagcctggtccgaaagcattgccagctgcccgtttcctcccatggc

SEQ ID NO: 135655 - DNA, 120 bp, Artificial Sequence
  ENSG00000103199_15 (sequence is synthesized)
ccagtatgaggccagcaggggacatttgggatgcccaggccgcagaggaagctgggcactgggtgcagaacaagggcaaggacaggctctgagtgtccagtggcagccagaacaggtgac

SEQ ID NO: 135656 - DNA, 120 bp, Artificial Sequence
  ENSG00000103199_16 (sequence is synthesized)
acagagcaggggcttcagccacagagacacactcaggaggccagaagccgacactcaaggtgttcgtggggctggctcctgaagggcctgggagggtccatcagctgcctccagcatcca

SEQ ID NO: 135657 - DNA, 120 bp, Artificial Sequence
  ENSG00000103199_17 (sequence is synthesized)
gtggctgctggcatacagcctcatccccacgtcccaacccctctcctgtgtgtctgtgaccctgtgcgctgtctctgtgtgtaccccccacctgctcccccccccttttttttttgagac

SEQ ID NO: 135658 - DNA, 120 bp, Artificial Sequence
  ENSG00000103199_18 (sequence is synthesized)
ggggccttgctgtgtcccccaggcgggaatacagtgccatgatcatagctcactgcagcctcgaatccctgggctcaagtgttcctcctgcctcatcctcctgagtagctggggttacag

SEQ ID NO: 135659 - DNA, 120 bp, Artificial Sequence
  ENSG00000103199_19 (sequence is synthesized)
gtgtgtgccgccatgcccagtctcttttttggtagggccaccactcactgggtttagggtcccccaatacactgtgacctcatcttaactaattatatcatcaaaacccgtgtttccaaa

SEQ ID NO: 135660 - DNA, 120 bp, Artificial Sequence
  ENSG00000103199_20 (sequence is synthesized)
taaggtcacattctgaggtctgggtgcacatgaatttgagggacccctcgtctgctgcagggagccctgctgtaccccagccttcccaggacgtggtctccagcttcttcatcctgccag

SEQ ID NO: 135661 - DNA, 120 bp, Artificial Sequence
  ENSG00000103199_21 (sequence is synthesized)
agtttccaaatggagcccggggctctgcagcattccagtcccctttgcagatccatagctgctctgcagggcggaagacacctggggcgggaaagcacccctgagttccatcttcctgac

SEQ ID NO: 135662 - DNA, 120 bp, Artificial Sequence
  ENSG00000103199_22 (sequence is synthesized)
atgttgcctgggatgtgacgggcctgacatctccccagggccggggcccagggctgcgtttgctcctggccccttagtgtctggaatgtggccttccacggttgccccactttgtctttc

SEQ ID NO: 135663 - DNA, 120 bp, Artificial Sequence
  ENSG00000103199_23 (sequence is synthesized)
taaggtaagaagccttcaccttccagcttttgtctggcctgtgctgcgtgggagccactggtctgtgcacatccacggtgggtgagtggccaagacaagcagtgtgatagagtccttggt

SEQ ID NO: 135664 - DNA, 120 bp, Artificial Sequence
  ENSG00000103199_24 (sequence is synthesized)
ccaggcagtggttgttcctcataggtaggtggccttggccttcatcccagcctgggatgctccattgcatttgtcacctagtcactgtatatacgtgcacatttgaccttttggcacagc

SEQ ID NO: 135665 - DNA, 120 bp, Artificial Sequence
  ENSG00000103199_25 (sequence is synthesized)
ggcacagcccaggttccaggtgcgtgacctgccctttttctcattcccttaactgacattatttagtgtcagaggccgagcacagtggctcccacctataatcctagcactttgggaggc

SEQ ID NO: 135666 - DNA, 74 bp, Artificial Sequence
  ENSG00000103199_26 (sequence is synthesized)
tataatcctagcactttgggaggccaactatagaaagacctcttccctaccaaaaaaaaaaaaaaaaaaaaaaa

SEQ ID NO: 135667 - DNA, 68 bp, Artificial Sequence
  ENSG00000103199_27 (sequence is synthesized)
gttgtactccagcctggtgatagaacgagactccacacaaaaaaaaaaaaaattagccaggcatgatg

SEQ ID NO: 135668 - DNA, 83 bp, Artificial Sequence
  ENSG00000103199_28 (sequence is synthesized)
cgaggtcgcaccgttgtactccagcctggtgatagaacgagactccacacaaaaaaaaaaaaaattagccaggcatgatgggt

SEQ ID NO: 135669 - DNA, 120 bp, Artificial Sequence
  ENSG00000103199_29 (sequence is synthesized)
ctgtgattgtgccactgcactcatcctggaagacagagtgagatcctgtctcagataaaataaacaattttttttttaagtcattgcttctggcccctgtgtgctctgtcctgtgtctgc

SEQ ID NO: 135670 - DNA, 120 bp, Artificial Sequence
  ENSG00000103199_30 (sequence is synthesized)
agaatggggctgcctggttgagggacggcttttaccttctagactagctctgggatctctcatggggcatgaggtacccagctagatgtggccaggccacactccaggagctagcaaagc

SEQ ID NO: 135671 - DNA, 120 bp, Artificial Sequence
  ENSG00000103199_31 (sequence is synthesized)
acccagcgttgctgacacccatctccccagcgcagcctgagcccccaggcccctctctcatatccaggcctgtgctggaggtggcggcctctgggggagtgtggttggggtctgcccact

SEQ ID NO: 135672 - DNA, 120 bp, Artificial Sequence
  ENSG00000103199_32 (sequence is synthesized)
tccctccccctgccgaggctgtggcctcccactggctgctgcttggccccatctcatggtcgctgcctgctgcttggccccatctcatgggcgtcatcctcagcactcacgtgatgggag

SEQ ID NO: 135673 - DNA, 120 bp, Artificial Sequence
  ENSG00000103199_33 (sequence is synthesized)
agttttgtaggagctgtgagtcccaggtgcctgcgtgtgctgtgatgttatctcatgcagtccagtgaggggggactcccattagtctcctttttttgttttgttttgagacacagtctc

SEQ ID NO: 135674 - DNA, 65 bp, Artificial Sequence
  ENSG00000103199_34 (sequence is synthesized)
attagtctcctttttttgttttgttttgagacacagtctcacttcattacccaggctggagtgca

SEQ ID NO: 135675 - DNA, 120 bp, Artificial Sequence
  ENSG00000103199_35 (sequence is synthesized)
gcgtgagccaccgcgcccggccatgattctccttctgtgggtggaggaactgggcactgggagcgtgaaaaccttgcccaggtggcagagccagctttggacgcaggtctgacttcctac

SEQ ID NO: 135676 - DNA, 120 bp, Artificial Sequence
  ENSG00000103199_36 (sequence is synthesized)
ctacctcactccccttgccttgacagacacagtaattcagagttgaacttggaacagagtttattttccatcactgtaaaacattctcagtgaggttactggcattaaaaaggtgggaga

SEQ ID NO: 135677 - DNA, 120 bp, Artificial Sequence
  ENSG00000103199_37 (sequence is synthesized)
aatggaagaaaatggggttgaagaaaaaaaaagcctttgctcttgacagctaggcagccacagcggaggccgccaggctgcgagggcagcgtatgggggcagagcccggttctggcggca

SEQ ID NO: 135678 - DNA, 120 bp, Artificial Sequence
  ENSG00000103199_38 (sequence is synthesized)
caggccccggagtggagggggcaggggagggtctctgtaggtgggagagggcctgggggctgggaggcagcctggccttgtgccctacaggagggacctcctgggactttatggaagcct

SEQ ID NO: 135679 - DNA, 120 bp, Artificial Sequence
  ENSG00000103199_39 (sequence is synthesized)
gtcttgcctttgacttgcaatgaaaatgcccctcatcattgggagtggggtcgggtgggggtccccagtggccagatcacgtggggtccagagagcagacatctgtagccctgatcttgg

SEQ ID NO: 135680 - DNA, 120 bp, Artificial Sequence
  ENSG00000103199_40 (sequence is synthesized)
cggccagtgaccacggccaagcagggcctgtcttttgcctggtacaaggcttgatgagaagagacccctgcccatcctcagtggcctggcagccaggggtgaaccccaggggaagctggg

SEQ ID NO: 135681 - DNA, 120 bp, Artificial Sequence
  ENSG00000103199_41 (sequence is synthesized)
acactgtcccaaaggcccggcgccctactgtgctgcctgagcccgtggcaccgtggggcccaaggtggtgatgatttctctgctcttcccacggggcagacagcaggacacatcctggag

SEQ ID NO: 135682 - DNA, 120 bp, Artificial Sequence
  ENSG00000103199_42 (sequence is synthesized)
acaaggttggggagacaaacaggtgcccaggtcagggctgatcacagcagttacaaaagcatcccgtgaagacggggctgcaagacggtgctggcaaaggaacaggacccaggaagacca

SEQ ID NO: 135683 - DNA, 120 bp, Artificial Sequence
  ENSG00000103199_43 (sequence is synthesized)
ggcttgtcctgtggaggggccgggtcttggcagggggcaagcagatgtccccagtttttgctggtgatcaacaagtgaggccgctgctccattctacacaggacagcatttccaggggtt

SEQ ID NO: 135684 - DNA, 120 bp, Artificial Sequence
  ENSG00000103199_44 (sequence is synthesized)
tccagtattctgtctagattcataaaggtcaaaggccttgagaatctatgtgtgcctttctatcttaggtaaagaagagaaagagaaagcaaattctcgttactcctctttcaaaaagtt

SEQ ID NO: 135685 - DNA, 120 bp, Artificial Sequence
  ENSG00000103199_45 (sequence is synthesized)
cattaaaagccaggctggcagctcacagtgctataatcccagcactgtggaaggcctaggcaggaggattgagaggagttccagaccaacctgggcaacaccgtgagaccccatctctac

SEQ ID NO: 135686 - DNA, 83 bp, Artificial Sequence
  ENSG00000103199_46 (sequence is synthesized)
tcctgagtagctaggattacaggcatgaaccaccacgcccaggtttctccacgttttatcgtctctccacagggccctgaaaa

SEQ ID NO: 135687 - DNA, 120 bp, Artificial Sequence
  ENSG00000103199_47 (sequence is synthesized)
gtgcccagcccctgctaaatgttttgtaggggaaccttaggagccctgtgaggccttcattttcctattagaaggatttcccttgccctcttgctgtgagttcctagagatcgtgctttc

SEQ ID NO: 135688 - DNA, 120 bp, Artificial Sequence
  ENSG00000103199_48 (sequence is synthesized)
gtcatccaccgcaggacacacagcggggagcggccctatgcctgcacccagtgcgggaagcgcttcaacaacagctcgcacttcagcgcccaccgccggacgcacacaggtaaagaagag

SEQ ID NO: 135689 - DNA, 120 bp, Artificial Sequence
  ENSG00000103199_49 (sequence is synthesized)
gcggccgcatcagagacagcccgggccaggtcccatggacaccacctgcaccgtgattgaggaaccctgatctgaagatctctgagcgcacattacctgtggtccagttcattccctgtg

SEQ ID NO: 135690 - DNA, 120 bp, Artificial Sequence
  ENSG00000103199_50 (sequence is synthesized)
caaaaggcagaagtcaaaagggaaagaatttgccagccctcccggctcccaagtggttacgtggaatcctcagaagggaaggaatgagattctgcccagctctgtccaccagctcctgga

SEQ ID NO: 135691 - DNA, 80 bp, Artificial Sequence
  ENSG00000103202_0 (sequence is synthesized)
cgtcatgggcggcctcttctggcgctccgcgctgcgggggctgcgctgcggcccgcgggccccgggcccgagcctgctag

SEQ ID NO: 135692 - DNA, 120 bp, Artificial Sequence
  ENSG00000103202_1 (sequence is synthesized)
ccctcctggacccgggagcggaccctggtggcggtgaagcccgatggcgtgcaacggcggctcgttggggacgtgatccagcgctttgagaggcggggcttcacgctggtggggatgaag

SEQ ID NO: 135693 - DNA, 120 bp, Artificial Sequence
  ENSG00000103202_2 (sequence is synthesized)
atgctgcaggcaccagagagcgtccttgccgagcactaccaggacctgcggaggaagcccttctaccctgccctcatccgctacatgagctctgggcctgtggtggccatggtctgggaa

SEQ ID NO: 135694 - DNA, 120 bp, Artificial Sequence
  ENSG00000103202_3 (sequence is synthesized)
gggtacaatgtcgtccgcgcctcgagggccatgattggacacaccgactcggctgaggctgccccaggaaccataaggggtgacttcagcgtccacatcagcaggaatgtcatccacgcc

SEQ ID NO: 135695 - DNA, 120 bp, Artificial Sequence
  ENSG00000103202_4 (sequence is synthesized)
ggttccagagcagtgagctggtgagctgggcagacgggggccagcacagcagcatccacccagcctgaggctcaagctgcccttaccaccccatcccccacgcaggaccaactacctccg

SEQ ID NO: 135696 - DNA, 120 bp, Artificial Sequence
  ENSG00000103202_5 (sequence is synthesized)
tcagcaagaacccaagcccacatccaaacctgcctgtcccaaaccacttacttccctgttcacctctgccccaccccagcccagaggagtttgagccaccaacttcagtgcctttctgta

SEQ ID NO: 135697 - DNA, 120 bp, Artificial Sequence
  ENSG00000103202_6 (sequence is synthesized)
ccccaagccagcacaagattggaccaatcctttttgcaccaaagtgccggacaacctttgtggtgggggggggtcttcacattatcataacctctcctctaaaggggaggcattaaaatt

SEQ ID NO: 135698 - DNA, 120 bp, Artificial Sequence
  ENSG00000103202_7 (sequence is synthesized)
cactgtgcccagcacatgggtggtacactaattatgacttcccccagctctgaggtagaaatgacgcctttatgcaagttgtaaggagttgaacagtaaagaggaagttttgcacaccca

SEQ ID NO: 135699 - DNA, 120 bp, Artificial Sequence
  ENSG00000103202_8 (sequence is synthesized)
ccagctgtggttccagagcagtgagctgtccccgacgggagcgccatggcccagccgccgcccgacgtggagggggacgactgtctccccgcgtaccgccacctcttctgcccggacctg

SEQ ID NO: 135700 - DNA, 120 bp, Artificial Sequence
  ENSG00000103202_9 (sequence is synthesized)
ctgcgggacaaagtggccttcatcacaggaggcggctctgggattgggttccggattgctgagattttcatgcggcacggctgccatacggtgattgccagtaggagcctgccgcgagtg

SEQ ID NO: 135701 - DNA, 63 bp, Artificial Sequence
  ENSG00000103202_10 (sequence is synthesized)
ctgccatacggtgattgccagtaggagcctgccgcgagtgctgacgagatgggttttcaccac

SEQ ID NO: 135702 - DNA, 120 bp, Artificial Sequence
  ENSG00000103202_11 (sequence is synthesized)
gccaccggccggcgctgcctccctctctctatggacgtccgagcgcccccagctgtcatggccgccgtggaccaggctctgaaggagtttggcagaatcgacattctcattaactgtgcg

SEQ ID NO: 135703 - DNA, 120 bp, Artificial Sequence
  ENSG00000103202_12 (sequence is synthesized)
gccgggaacttcctgtgccccgctggcgccttgtccttcaacgccttcaagaccgtgatggacatcgataccagcggcaccttcaatgtgtctcgtgtgctctatgagaagttcttccgg

SEQ ID NO: 135704 - DNA, 120 bp, Artificial Sequence
  ENSG00000103202_13 (sequence is synthesized)
gttccctgccactcattcacctcagacacagggtgggctctgggttcttcctcatgtggaaagtcggggcttcagaccatgtctgtcgtcatccagaagggatggagtcaaaagtgaggc

SEQ ID NO: 135705 - DNA, 120 bp, Artificial Sequence
  ENSG00000103202_14 (sequence is synthesized)
tggagttttgcaggatctccagacttccctgaggccactgagctgggctgtgcctctgtggacctcagggtggtcgctgagctgggctgtccctccctggaccttgaggtggtccctgag

SEQ ID NO: 135706 - DNA, 120 bp, Artificial Sequence
  ENSG00000103202_15 (sequence is synthesized)
ctggctctgcctctatggaccttgcggtggtggtccctgagctgggcagtgcctccctgaacctcggggcgatctcaggcagcctctgcctctgctgggaggagccatggcccctgggag

SEQ ID NO: 135707 - DNA, 120 bp, Artificial Sequence
  ENSG00000103202_16 (sequence is synthesized)
aggctagaagccctggggacacattgccttgggtgtccctgacagggactatcatgggggtgtttgtggctgtgggcaccatccctgtcccttccagagtgccctgcatagaggcagaca

SEQ ID NO: 135708 - DNA, 120 bp, Artificial Sequence
  ENSG00000103202_17 (sequence is synthesized)
ggactctgggcttgtgggtgtccctgtggggatggggttgggggatccttctcggcctttcacatcccagccagcgccggggcagggcctggctttggcagttgaaggggcaggagggat

SEQ ID NO: 135709 - DNA, 120 bp, Artificial Sequence
  ENSG00000103202_18 (sequence is synthesized)
catcacagctgctgtgctagtgcccacgtttactgtctgcggctcctccttacctcaatgccacccaggcaccagagagcgtccttgccgagcactaccaggacctgcggaggaagccct

SEQ ID NO: 135710 - DNA, 120 bp, Artificial Sequence
  ENSG00000103202_19 (sequence is synthesized)
tctaccctgccctcatccgctacatgagctctgggcctgtggtggccatggtacggcagggcaggggtggtggaagggcctgtgggtaaagggcgtgtgggtgtgtctttccccccagca

SEQ ID NO: 135711 - DNA, 120 bp, Artificial Sequence
  ENSG00000103202_20 (sequence is synthesized)
attggagggggctcagaccagggcttctagacctccttttggtccgtgaatttatttttgagacagagtcttgctctattgctcaggctggagtgcagcggtgcagtcacagctcactgc

SEQ ID NO: 135712 - DNA, 120 bp, Artificial Sequence
  ENSG00000103202_21 (sequence is synthesized)
agcctcaatctcctgggctcacgcgatcctcctgcctcagcctcccgagtgggccttcctccgtgggaaagcgttaaaacgatagttaacggttgcgtcggtgtaaagacgaatgcaatt

SEQ ID NO: 135713 - DNA, 120 bp, Artificial Sequence
  ENSG00000103202_22 (sequence is synthesized)
gggtctggaagcgacaggccttgaaactccacagcagcacaggccccgtctcctggctcggacagaaccctgctaccttccctcttcaatcttcaggcccctttttgtccgtgtttccag

SEQ ID NO: 135714 - DNA, 120 bp, Artificial Sequence
  ENSG00000103202_23 (sequence is synthesized)
tcatgggcggcctcttctggcgctccgcgctgcgggggctgcgctgcggcccgcgggccccgggcccgagcctgctagtgcgccacggctcggggctccctccatcggctctgaaaagag

SEQ ID NO: 135715 - DNA, 120 bp, Artificial Sequence
  ENSG00000103202_24 (sequence is synthesized)
ggggagccgctccgctggggcgttcgctgaaggccaagttaggccagaatctgactgggacgtcaggccccaagtccccggccccgccgctgcccggcccccccagctgccacctcacag

SEQ ID NO: 135716 - DNA, 120 bp, Artificial Sequence
  ENSG00000103202_25 (sequence is synthesized)
gacgatccatgtcccagggctccctccatcggctctgaaaagtgagccgccgcctgcaatgcccgcaccagccgcagcagagccccaggctacacaaggcgccctgcaaactgggttttg

SEQ ID NO: 135717 - DNA, 120 bp, Artificial Sequence
  ENSG00000103202_26 (sequence is synthesized)
ggggaacaaaccaaccagggggtcttcctcccgtgggcttcagccgcctgctggggttaacttttcctcctggcctggcggagcccctttggctctgtccagattctgtgggacatacag

SEQ ID NO: 135718 - DNA, 120 bp, Artificial Sequence
  ENSG00000103222_0 (sequence is synthesized)
cgcccgcgccaccggcatggcgctccggggcttctgcagcgccgatggctccgacccgctctgggactggaatgtcacgtggaataccagcaaccccgacttcaccaagtgctttcagaa

SEQ ID NO: 135719 - DNA, 120 bp, Artificial Sequence
  ENSG00000103222_1 (sequence is synthesized)
cacggtcctcgtgtgggtgccttgtttttacctctgggcctgtttccccttctacttcctctatctctcccgacatgaccgaggctacattcagatgacacctctcaacaaaaccaaaac

SEQ ID NO: 135720 - DNA, 120 bp, Artificial Sequence
  ENSG00000103222_2 (sequence is synthesized)
tgccttgggatttttgctgtggatcgtctgctgggcagacctcttctactctttctgggaaagaagtcggggcatattcctggccccagtgtttctggtcagcccaactctcttgggcat

SEQ ID NO: 135721 - DNA, 120 bp, Artificial Sequence
  ENSG00000103222_3 (sequence is synthesized)
caccatgctgcttgctacctttttaattcagctggagaggaggaagggagttcagtcttcagggatcatgctcactttctggctggtagccctagtgtgtgccctagccatcctgagatc

SEQ ID NO: 135722 - DNA, 120 bp, Artificial Sequence
  ENSG00000103222_4 (sequence is synthesized)
caaaattatgacagccttaaaagaggatgcccaggtggacctgtttcgtgacatcactttctacgtctacttttccctcttactcattcagctcgtcttgtcctgtttctcagatcgctc

SEQ ID NO: 135723 - DNA, 120 bp, Artificial Sequence
  ENSG00000103222_5 (sequence is synthesized)
acccctgttctcggaaaccatccacgaccctaatccctgcccagagtccagcgcttccttcctgtcgaggatcaccttctggtggatcacagggttgattgtccggggctaccgccagcc

SEQ ID NO: 135724 - DNA, 120 bp, Artificial Sequence
  ENSG00000103222_6 (sequence is synthesized)
cctggagggcagtgacctctggtccttaaacaaggaggacacgtcggaacaagtcgtgcctgttttggtaaagaactggaagaaggaatgcgccaagactaggaagcagccggtgaaggt

SEQ ID NO: 135725 - DNA, 120 bp, Artificial Sequence
  ENSG00000103222_7 (sequence is synthesized)
tgtgtactcctccaaggatcctgcccagccgaaagagagttccaaggtggatgcgaatgaggaggtggaggctttgatcgtcaagtccccacagaaggagtggaacccctctctgtttaa

SEQ ID NO: 135726 - DNA, 120 bp, Artificial Sequence
  ENSG00000103222_8 (sequence is synthesized)
ggtgttatacaagacctttgggccctacttcctcatgagcttcttcttcaaggccatccacgacctgatgatgttttccgggccgcagatcttaaagttgctcatcaagttcgtgaatga

SEQ ID NO: 135727 - DNA, 120 bp, Artificial Sequence
  ENSG00000103222_9 (sequence is synthesized)
cacgaaggccccagactggcagggctacttctacaccgtgctgctgtttgtcactgcctgcctgcagaccctcgtgctgcaccagtacttccacatctgcttcgtcagtggcatgaggat

SEQ ID NO: 135728 - DNA, 120 bp, Artificial Sequence
  ENSG00000103222_10 (sequence is synthesized)
caagaccgctgtcattggggctgtctatcggaaggccctggtgatcaccaattcagccagaaaatcctccacggtcggggagattgtcaacctcatgtctgtggacgctcagaggttcat

SEQ ID NO: 135729 - DNA, 120 bp, Artificial Sequence
  ENSG00000103222_11 (sequence is synthesized)
ggacttggccacgtacattaacatgatctggtcagcccccctgcaagtcatccttgctctctacctcctgtggctgaatctgggcccttccgtcctggctggagtggcggtgatggtcct

SEQ ID NO: 135730 - DNA, 120 bp, Artificial Sequence
  ENSG00000103222_12 (sequence is synthesized)
catggtgcccgtcaatgctgtgatggcgatgaagaccaagacgtatcaggtggcccacatgaagagcaaagacaatcggatcaagctgatgaacgaaattctcaatgggatcaaagtgct

SEQ ID NO: 135731 - DNA, 120 bp, Artificial Sequence
  ENSG00000103222_13 (sequence is synthesized)
aaagctttatgcctgggagctggcattcaaggacaaggtgctggccatcaggcaggaggagctgaaggtgctgaagaagtctgcctacctgtcagccgtgggcaccttcacctgggtctg

SEQ ID NO: 135732 - DNA, 120 bp, Artificial Sequence
  ENSG00000103222_14 (sequence is synthesized)
cacgccctttctggtggccttgtgcacatttgccgtctacgtgaccattgacgagaacaacatcctggatgcccagacagccttcgtgtctttggccttgttcaacatcctccggtttcc

SEQ ID NO: 135733 - DNA, 120 bp, Artificial Sequence
  ENSG00000103222_15 (sequence is synthesized)
cctgaacattctccccatggtcatcagcagcatcgtgcaggcgagtgtctccctcaaacgcctgaggatctttctctcccatgaggagctggaacctgacagcatcgagcgacggcctgt

SEQ ID NO: 135734 - DNA, 120 bp, Artificial Sequence
  ENSG00000103222_16 (sequence is synthesized)
caaagacggcgggggcacgaacagcatcaccgtgaggaatgccacattcacctgggccaggagcgaccctcccacactgaatggcatcaccttctccatccccgaaggtgctttggtggc

SEQ ID NO: 135735 - DNA, 120 bp, Artificial Sequence
  ENSG00000103222_17 (sequence is synthesized)
cgtggtgggccaggtgggctgcggaaagtcgtccctgctctcagccctcttggctgagatggacaaagtggaggggcacgtggctatcaagggctccgtggcctatgtgccacagcaggc

SEQ ID NO: 135736 - DNA, 120 bp, Artificial Sequence
  ENSG00000103222_18 (sequence is synthesized)
ctggattcagaatgattctctccgagaaaacatcctttttggatgtcagctggaggaaccatattacaggtccgtgatacaggcctgtgccctcctcccagacctggaaatcctgcccag

SEQ ID NO: 135737 - DNA, 120 bp, Artificial Sequence
  ENSG00000103222_19 (sequence is synthesized)
tggggatcggacagagattggcgagaagggcgtgaacctgtctgggggccagaagcagcgcgtgagcctggcccgggccgtgtactccaacgctgacatttacctcttcgatgatcccct

SEQ ID NO: 135738 - DNA, 120 bp, Artificial Sequence
  ENSG00000103222_20 (sequence is synthesized)
ctcagcagtggatgcccatgtgggaaaacacatctttgaaaatgtgattggccccaaggggatgctgaagaacaagacgcggatcttggtcacgcacagcatgagctacttgccgcaggt

SEQ ID NO: 135739 - DNA, 120 bp, Artificial Sequence
  ENSG00000103222_21 (sequence is synthesized)
ggacgtcatcatcgtcatgagtggcggcaagatctctgagatgggctcctaccaggagctgctggctcgagacggcgccttcgctgagttcctgcgtacctatgccagcacagagcagga

SEQ ID NO: 135740 - DNA, 120 bp, Artificial Sequence
  ENSG00000103222_22 (sequence is synthesized)
gcaggatgcagaggagaacggggtcacgggcgtcagcggtccagggaaggaagcaaagcaaatggagaatggcatgctggtgacggacagtgcagggaagcaactgcagagacagctcag

SEQ ID NO: 135741 - DNA, 120 bp, Artificial Sequence
  ENSG00000103222_23 (sequence is synthesized)
cagctcctcctcctatagtggggacatcagcaggcaccacaacagcaccgcagaactgcagaaagctgaggccaagaaggaggagacctggaagctgatggaggctgacaaggcgcagac

SEQ ID NO: 135742 - DNA, 120 bp, Artificial Sequence
  ENSG00000103222_24 (sequence is synthesized)
agggcaggtcaagctttccgtgtactgggactacatgaaggccatcggactcttcatctccttcctcagcatcttccttttcatgtgtaaccatgtgtccgcgctggcttccaactattg

SEQ ID NO: 135743 - DNA, 120 bp, Artificial Sequence
  ENSG00000103222_25 (sequence is synthesized)
gctcagcctctggactgatgaccccatcgtcaacgggactcaggagcacacgaaagtccggctgagcgtctatggagccctgggcatttcacaagggatcgccgtgtttggctactccat

SEQ ID NO: 135744 - DNA, 120 bp, Artificial Sequence
  ENSG00000103222_26 (sequence is synthesized)
ggcttcccgctgtctgcacgtggacctgctgcacagcatcctgcggtcacccatgagcttctttgagcggacccccagtgggaacctggtgaaccgcttctccaaggagctggacacagt

SEQ ID NO: 135745 - DNA, 120 bp, Artificial Sequence
  ENSG00000103222_27 (sequence is synthesized)
ggactccatgatcccggaggtcatcaagatgttcatgggctccctgttcaacgtcattggtgcctgcatcgttatcctgctggccacgcccatcgccgccatcatcatcccgccccttgg

SEQ ID NO: 135746 - DNA, 120 bp, Artificial Sequence
  ENSG00000103222_28 (sequence is synthesized)
cctcatctacttcttcgtccagaggttctacgtggcttcctcccggcagctgaagcgcctcgagtcggtcagccgctccccggtctattcccatttcaacgagaccttgctgggggtcag

SEQ ID NO: 135747 - DNA, 120 bp, Artificial Sequence
  ENSG00000103222_29 (sequence is synthesized)
cgtcattcgagccttcgaggagcaggagcgcttcatccaccagagtgacctgaaggtggacgagaaccagaaggcctattaccccagcatcgtggccaacaggtggctggccgtgcggct

SEQ ID NO: 135748 - DNA, 120 bp, Artificial Sequence
  ENSG00000103222_30 (sequence is synthesized)
ggagtgtgtgggcaactgcatcgttctgtttgctgccctgtttgcggtgatctccaggcacagcctcagtgctggcttggtgggcctctcagtgtcttactcattgcaggtcaccacgta

SEQ ID NO: 135749 - DNA, 120 bp, Artificial Sequence
  ENSG00000103222_31 (sequence is synthesized)
cttgaactggctggttcggatgtcatctgaaatggaaaccaacatcgtggccgtggagaggctcaaggagtattcagagactgagaaggaggcgccctggcaaatccaggagacagctcc

SEQ ID NO: 135750 - DNA, 120 bp, Artificial Sequence
  ENSG00000103222_32 (sequence is synthesized)
gcccagcagctggccccaggtgggccgagtggaattccggaactactgcctgcgctaccgagaggacctggacttcgttctcaggcacatcaatgtcacgatcaatgggggagaaaaggt

SEQ ID NO: 135751 - DNA, 120 bp, Artificial Sequence
  ENSG00000103222_33 (sequence is synthesized)
cggcatcgtggggcggacgggagctgggaagtcgtccctgaccctgggcttatttcggatcaacgagtctgccgaaggagagatcatcatcgatggcatcaacatcgccaagatcggcct

SEQ ID NO: 135752 - DNA, 120 bp, Artificial Sequence
  ENSG00000103222_34 (sequence is synthesized)
gcacgacctccgcttcaagatcaccatcatcccccaggaccctgttttgttttcgggttccctccgaatgaacctggacccattcagccagtactcggatgaagaagtctggacgtccct

SEQ ID NO: 135753 - DNA, 120 bp, Artificial Sequence
  ENSG00000103222_35 (sequence is synthesized)
ggagctggcccacctgaaggacttcgtgtcagcccttcctgacaagctagaccatgaatgtgcagaaggcggggagaacctcagtgtcgggcagcgccagcttgtgtgcctagcccgggc

SEQ ID NO: 135754 - DNA, 120 bp, Artificial Sequence
  ENSG00000103222_36 (sequence is synthesized)
cctgctgaggaagacgaagatccttgtgttggatgaggccacggcagccgtggacctggaaacggacgacctcatccagtccaccatccggacacagttcgaggactgcaccgtcctcac

SEQ ID NO: 135755 - DNA, 120 bp, Artificial Sequence
  ENSG00000103222_37 (sequence is synthesized)
catcgcccaccggctcaacaccatcatggactacacaagggtgatcgtcttggacaaaggagaaatccaggagtacggcgccccatcggacctcctgcagcagagaggtcttttctacag

SEQ ID NO: 135756 - DNA, 120 bp, Artificial Sequence
  ENSG00000103222_38 (sequence is synthesized)
catggccaaagacgccggcttggtgtgagccccagagctggcatatctggtcagaactgcagggcctatatgccagcgcccagggaggagtcagtacccctggtaaaccaagcctcccac

SEQ ID NO: 135757 - DNA, 120 bp, Artificial Sequence
  ENSG00000103222_39 (sequence is synthesized)
actgaaaccaaaacataaaaaccaaacccagacaaccaaaacatattcaaagcagcagccaccgccatccggtcccctgcctggaactggctgtgaagacccaggagagacagagatgcg

SEQ ID NO: 135758 - DNA, 120 bp, Artificial Sequence
  ENSG00000103222_40 (sequence is synthesized)
aaccacccaaaacacgcacaccctgcccctggtgccctgagacagacacacagcctcacgcccccaggaatgcaagtggtttcctggtgcttcccacggaggagttttggcagccagact

SEQ ID NO: 135759 - DNA, 120 bp, Artificial Sequence
  ENSG00000103222_41 (sequence is synthesized)
tctggaggaattggttgtatagaagatcctagtgaccaaattcagcctactgcctcggatctctccagccgaagtctgtggactgcaagtctttgagatgcttctggctcccatcacctc

SEQ ID NO: 135760 - DNA, 120 bp, Artificial Sequence
  ENSG00000103222_42 (sequence is synthesized)
taacatccttgtctgggtctaccaggaacgcttcatttccttggggctgcagttttgtggttgaggggcctggagaaaatcattttctccccttggcagtgtcccagggccctggatggt

SEQ ID NO: 135761 - DNA, 120 bp, Artificial Sequence
  ENSG00000103222_43 (sequence is synthesized)
cctcttaccaacatctggtcttccaggcactcaaaagctgggaaccagcatctcagcgccagctctaccagttctcgttttgggccagaggcagcctctgcactcccacgcctgtcctcc

SEQ ID NO: 135762 - DNA, 120 bp, Artificial Sequence
  ENSG00000103222_44 (sequence is synthesized)
tggaagggacctggttggactaacggctaacctggacctggaactgtagggccaggggattgtctcagggccgacgttccacctggggcttccctccccacccaccccgactccaggctt

SEQ ID NO: 135763 - DNA, 120 bp, Artificial Sequence
  ENSG00000103222_45 (sequence is synthesized)
tcccttttttcttttgttcaacattgtaagaacaatcaatgctgttattactgttcccaccatgattgatgtggggtaaatattaaggagatggcctcatgggaatttgaccttgactag

SEQ ID NO: 135764 - DNA, 120 bp, Artificial Sequence
  ENSG00000103222_46 (sequence is synthesized)
aaatagagactgagagtgagcaaccagctggaaggtactatgccagtcctagcagaaaaatgtgttaggggcctggcccaaagcagtgttggttgcttacagtgttgattgattttgttc

SEQ ID NO: 135765 - DNA, 120 bp, Artificial Sequence
  ENSG00000103222_47 (sequence is synthesized)
ttttttcttaccacctcttttctttccctctcatggtacctgctcatggttatgaagctttcaaagtaaagaacacgaaatacctcccaagtattaccagtgggtaccaaaaaaatgtcc

SEQ ID NO: 135766 - DNA, 120 bp, Artificial Sequence
  ENSG00000103222_48 (sequence is synthesized)
ccttgagtcttttccttgtttttagatgttaattctctcccttggcatccggttagccccccagggggggcagcattgtggagaacttgatatttagttactgatgctcttccaggacac

SEQ ID NO: 135767 - DNA, 120 bp, Artificial Sequence
  ENSG00000103222_49 (sequence is synthesized)
gaaaagaacccatctttgaatatcaatgattttttttttttaagtactgttccggggagaaaaacagtctcaaaacttgaacttcttgggaatagaagtgttgggctgagaagtaacatt

SEQ ID NO: 135768 - DNA, 120 bp, Artificial Sequence
  ENSG00000103222_50 (sequence is synthesized)
cccaggaaatagtgagaagctcgccctgtgtttgaaaccgtgttggtctctgtgttcctggaagaaaacagggaagcagcatcttttaaagcctgttctttaaggtgtctcgttagagcc

SEQ ID NO: 135769 - DNA, 120 bp, Artificial Sequence
  ENSG00000103222_51 (sequence is synthesized)
caaagtggaatccggaaggcagccagagctgaggctgccccaagactcagacttgctaagaattacgccgccgacttcaaacccagagagcatctttcttttaggcgaaaacgcatatat

SEQ ID NO: 135770 - DNA, 120 bp, Artificial Sequence
  ENSG00000103222_52 (sequence is synthesized)
ttattttttgtaagttataccattctttcacattagataaactaagttttgggggatccttttgtaatgacttacactggaaatgcgaacatttgcagtaaaaaaatatatatatatcta

SEQ ID NO: 135771 - DNA, 120 bp, Artificial Sequence
  ENSG00000103222_53 (sequence is synthesized)
agaacccgtggctgatgtcaccagataataatgcctagcgccattcgtgccaagcgtctggggttgaaccattcaagcagagaaagagagtgttctgtgcatgtggagtcgcacagctca

SEQ ID NO: 135772 - DNA, 120 bp, Artificial Sequence
  ENSG00000103222_54 (sequence is synthesized)
aaatgcagtgatggagggctgcttgagggcctgggaaatcacagagaaggagcccccatcccagcctgggagggtccagggtgatatctgggctaagtcaccttttcttctcctcttggg

SEQ ID NO: 135773 - DNA, 120 bp, Artificial Sequence
  ENSG00000103222_55 (sequence is synthesized)
cacatgtgcatctggctctgtgtggggccagcccctctcaggagcagtgtctgtcctcaaaggggctggagctgatgcccatgccacctcccagtgtcatgcctggcctgcctactgtaa

SEQ ID NO: 135774 - DNA, 120 bp, Artificial Sequence
  ENSG00000103222_56 (sequence is synthesized)
agacactgcctttctctgggtacctataaacctggagagtgacatggtggggtgtggtgcatatattcatatatatgtttacatgtgtgcatgtggaaacactccgtctcttatgccatg

SEQ ID NO: 135775 - DNA, 120 bp, Artificial Sequence
  ENSG00000103222_57 (sequence is synthesized)
cctcattgtttgatgttttattttctctgcgtacctgaatatttttaaaaggtcactatgttgcccaggtgcagtggctcatgcttggtaatcccagcactctgggaggccaaagcaggt

SEQ ID NO: 135776 - DNA, 120 bp, Artificial Sequence
  ENSG00000103226_0 (sequence is synthesized)
ctggcggcggcggtggggcggggcctgggctgtcagccggcctaggaggaggaaggagcctgcggcgtgcagtgtgaggggcgggacccggctgccggcggtgggtctagctgggggagg

SEQ ID NO: 135777 - DNA, 120 bp, Artificial Sequence
  ENSG00000103226_1 (sequence is synthesized)
cgcggggccgctggggcccgcggtggtcaccgccgcggtggtgctgctgctgagcggcgtggggccggcgcacggctcggaggacatcgtggtgggctgcggtggcttcgtcaagtcgga

SEQ ID NO: 135778 - DNA, 120 bp, Artificial Sequence
  ENSG00000103226_2 (sequence is synthesized)
catcgtggtgggctgcggtggcttcgtcaagtcggacgtggagatcaactactctctcatcgagataaagctgtacaccaagcatgggactttgaaataccagacagactgtgcccctaa

SEQ ID NO: 135779 - DNA, 120 bp, Artificial Sequence
  ENSG00000103226_3 (sequence is synthesized)
taatggttactttatgatccctttgtatgataagggggatttcattctgaagattgagcctcccctagggtggagttttgagccgacgaccgtggagctccatgtggatggagtcagtga

SEQ ID NO: 135780 - DNA, 120 bp, Artificial Sequence
  ENSG00000103226_4 (sequence is synthesized)
catctgcacaaagggtggggacatcaactttgtcttcactgggttctctgtgaatggcaaggtcctcagcaaagggcagcccctgggtcctgcgggagttcaggtgtctctgagaaacac

SEQ ID NO: 135781 - DNA, 120 bp, Artificial Sequence
  ENSG00000103226_5 (sequence is synthesized)
tgggaccgaagcaaagatccagtccacagttacacagcctggcggaaagtttgcattttttaaagttctgcctggagattatgaaatcctcgcaactcatccaacctgggcgttgaaaga

SEQ ID NO: 135782 - DNA, 120 bp, Artificial Sequence
  ENSG00000103226_6 (sequence is synthesized)
ggcaagcaccacagtgcgtgtaaccaactccaatgccaatgcggccagtcccctcatagttgctggctacaatgtgtctggctctgtccgaagtgatggggagcccatgaaaggcgtgaa

SEQ ID NO: 135783 - DNA, 120 bp, Artificial Sequence
  ENSG00000103226_7 (sequence is synthesized)
gtttcttctcttttcttctttagtaactaaagaggatgtcctgggctgcaatgtctcaccagtgcctgggttccagccccaagacgagagtctggtgtatttgtgctacacggtctccag

SEQ ID NO: 135784 - DNA, 120 bp, Artificial Sequence
  ENSG00000103226_8 (sequence is synthesized)
agaagatggctcgttctctttctattccttgccaagtgggggctacactgtgattccgttctatcgaggggagaggattacctttgatgtggcgccttccagacttgacttcacagtgga

SEQ ID NO: 135785 - DNA, 120 bp, Artificial Sequence
  ENSG00000103226_9 (sequence is synthesized)
gcatgacagcttgaaaatcgagcccgtgttccacgtcatgggattctccgtcaccgggagggtcttgaacggacccgaaggagatggtgttccagaagcagtagtcaccctgaataacca

SEQ ID NO: 135786 - DNA, 120 bp, Artificial Sequence
  ENSG00000103226_10 (sequence is synthesized)
aatcaaagttaaaacaaaagctgatggctcattccgccttgagaacataaccacagggacatacaccatccatgctcagaaagagcacctctactttgaaacggtcaccatcaaaattgc

SEQ ID NO: 135787 - DNA, 120 bp, Artificial Sequence
  ENSG00000103226_11 (sequence is synthesized)
accaaacacacctcagctggctgacattgttgcaacagggttcagtgtctgtggtcagatatcaatcattcgcttccccgacaccgtcaagcagatgaataaatacaaagttgtcctgtc

SEQ ID NO: 135788 - DNA, 120 bp, Artificial Sequence
  ENSG00000103226_12 (sequence is synthesized)
atctcaagacaaggacaagtctttggtcaccgtggagacagatgctcatggatcattttgttttaaagcaaacccagggacttacaaagtgcaggtgatggttcctgaggcagaaaccag

SEQ ID NO: 135789 - DNA, 120 bp, Artificial Sequence
  ENSG00000103226_13 (sequence is synthesized)
agcagggctgacgttgaaaccccagacatttcctcttactgtgaccgacaggcctgtgatggatgtggcctttgtacagttcttggcatcagtttctgggaaagtctcttgtttggacac

SEQ ID NO: 135790 - DNA, 120 bp, Artificial Sequence
  ENSG00000103226_14 (sequence is synthesized)
ctgtggtgacttgctggtgactctacagtccctgagccgccagggtgagaagcggagcctccagctctccggcaaggtcaacgccatgactttcacctttgacaacgtgctccctggaaa

SEQ ID NO: 135791 - DNA, 120 bp, Artificial Sequence
  ENSG00000103226_15 (sequence is synthesized)
atacaaaataagcatcatgcatgaggattggtgctggaagaacaagagcctggaggtggaagtgctggaggatgacgtgtctgcagttgagttcaggcagacgggctacatgctgagatg

SEQ ID NO: 135792 - DNA, 120 bp, Artificial Sequence
  ENSG00000103226_16 (sequence is synthesized)
ttccctgtctcacgccatcactctggaattttatcaggatggaaatgggcgtgagaatgtggggatttataacctctccaaaggagtcaaccgattctgcctgtccaagcctggtgtgta

SEQ ID NO: 135793 - DNA, 120 bp, Artificial Sequence
  ENSG00000103226_17 (sequence is synthesized)
caaagtgacccctcgctcctgccaccggtttgagcaagcgttctacacctatgacacgtcttcacctagtatcttgacattgacagccattcgccaccatgtccttggaactatcaccac

SEQ ID NO: 135794 - DNA, 120 bp, Artificial Sequence
  ENSG00000103226_18 (sequence is synthesized)
cgacaaaatgatggatgtcactgtgactatcaagtcttccatcgacagtgaacccgccttggtcttaggccctctgaagtctgtgcaggagctgcggagggagcagcagctggctgagat

SEQ ID NO: 135795 - DNA, 120 bp, Artificial Sequence
  ENSG00000103226_19 (sequence is synthesized)
cgaggcccgcaggcaggagagggagaaaaacggcaatgaggaaggtgaagaaagaatgaccaagcctcctgtgcaggagatggtagatgagttacaaggccccttctcgtatgatttctc

SEQ ID NO: 135796 - DNA, 120 bp, Artificial Sequence
  ENSG00000103226_20 (sequence is synthesized)
ttactgggcgcggtctggagagaaaatcactgttacaccgtcatctaaagagctgctcttttatcccccttcaatggaagccgttgtcagtggagaaagctgcccagggaagctgatcga

SEQ ID NO: 135797 - DNA, 120 bp, Artificial Sequence
  ENSG00000103226_21 (sequence is synthesized)
gatccacgggaaggcaggcctgtttttagaaggccagatccaccccgagttggaaggagtcgagattgtcatcagtgaaaagggggcaagttcaccgctgatcacagtctttactgatga

SEQ ID NO: 135798 - DNA, 120 bp, Artificial Sequence
  ENSG00000103226_22 (sequence is synthesized)
caaaggtgcctacagtgttggccccctgcacagtgacctggagtacacggtgacctcacagaaggagggctatgttctgactgcagtggaaggaaccatcggagacttcaaggcctatgc

SEQ ID NO: 135799 - DNA, 120 bp, Artificial Sequence
  ENSG00000103226_23 (sequence is synthesized)
cctggcaggcgtaagctttgagataaaagctgaggatgaccagcccctcccgggagtcctcttatccctgagtggtggcctgtttcgttccaacctcttgacccaggacaacggcattct

SEQ ID NO: 135800 - DNA, 120 bp, Artificial Sequence
  ENSG00000103226_24 (sequence is synthesized)
gacattctcaaacctgagccctggccagtattacttcaaacccatgatgaaggagttccggtttgagccatcctcacagatgatcgaggtgcaggaaggccagaacctgaagatcaccat

SEQ ID NO: 135801 - DNA, 120 bp, Artificial Sequence
  ENSG00000103226_25 (sequence is synthesized)
cacggggtaccgaaccgcttacagttgctatggcacagtgtcttccttaaacggagagcccgaacaaggggttgccatggaagcggtgggccagaacgactgcagcatttacggagaaga

SEQ ID NO: 135802 - DNA, 120 bp, Artificial Sequence
  ENSG00000103226_26 (sequence is synthesized)
caccgtgacagacgaagagggcaagttcagattacgtggattgctgccgggatgtgtgtaccacgttcagctcaaggcagaaggcaacgaccacattgagcgggcgctcccccaccatag

SEQ ID NO: 135803 - DNA, 120 bp, Artificial Sequence
  ENSG00000103226_27 (sequence is synthesized)
ggtgattgaggttgggaataatgacatcgatgatgtaaacatcatagttttccggcagattaatcaatttgatttaagtggaaatgtgatcacttcctctgaataccttcctacgttatg

SEQ ID NO: 135804 - DNA, 120 bp, Artificial Sequence
  ENSG00000103226_28 (sequence is synthesized)
ggtcaagctttacaaaagcgaaaacctcgacaatccaatccagacagtttcccttggccagtccctgttcttccatttccccccactgctcagagatggcgagaactatgttgtgcttct

SEQ ID NO: 135805 - DNA, 120 bp, Artificial Sequence
  ENSG00000103226_29 (sequence is synthesized)
ggactccacactccccagatcccagtatgactacatcttgcctcaagtttctttcaccgcagtgggctaccataaacacatcaccttgatttttaatcccacgaggaagctgcctgaaca

SEQ ID NO: 135806 - DNA, 120 bp, Artificial Sequence
  ENSG00000103226_30 (sequence is synthesized)
ggacatcgcacaaggatcctacattgccctgccattgacgctgctggttctgctggccggttacaaccatgacaagctcattcctttgctgctgcagttgacaagccggctacagggagt

SEQ ID NO: 135807 - DNA, 120 bp, Artificial Sequence
  ENSG00000103226_31 (sequence is synthesized)
cggcgcgctcggccaggcagcctctgacaatagcggcccagaagatgcaaagagacaagccaagaaacagaagacaaggcggacgtgaggaggaaggggacagttgcagtctcacttggg

SEQ ID NO: 135808 - DNA, 120 bp, Artificial Sequence
  ENSG00000103226_32 (sequence is synthesized)
acaggccacagccaggggtccggccactacccgcccgtgggataaaagccaaaagcatgcgtcagctaacttcagcctgtgctgctgggcccgcaccccatgtcccttgtcactgtggca

SEQ ID NO: 135809 - DNA, 120 bp, Artificial Sequence
  ENSG00000103226_33 (sequence is synthesized)
tcctgcacccatcctcacccctccgtagagcccctcgtgcaatgcaatgaatggaccctcctgtcactctgctgaacagaatttattttctgagtcaaatataatttattattatttttg

SEQ ID NO: 135810 - DNA, 120 bp, Artificial Sequence
  ENSG00000103226_34 (sequence is synthesized)
tcaaagaagtatttaagctgtgctgtggtgtgagaatgtcattcttgatcttcagccttcgtttgcaagaagagttccagttgatgtggtgtttggttccatggcggggtaccctaggga

SEQ ID NO: 135811 - DNA, 120 bp, Artificial Sequence
  ENSG00000103226_35 (sequence is synthesized)
ttcatctgttttcttcacttccctttgcatctgagatcctgctggaaaccacggcaacctgtatccactattaggaggtaaaaatcaataaaatggcccattcatttgtgttgtagctca

SEQ ID NO: 135812 - DNA, 120 bp, Artificial Sequence
  ENSG00000103226_36 (sequence is synthesized)
tttgaaggcatttttttctaccttggttctgtttgcatcaagctttcaatttctgtgtgttcaacctgctcttgtttttctgtctgtcttgggtttgagttgggtagacaccactgggcc

SEQ ID NO: 135813 - DNA, 120 bp, Artificial Sequence
  ENSG00000103226_37 (sequence is synthesized)
tggaaatctgttcctgcccttattctttcatttatgaaagggcatcccaggtacagcggcccccacagtcactctctagcccagcagttctcggatgggttggttgcaggacccctttat

SEQ ID NO: 135814 - DNA, 120 bp, Artificial Sequence
  ENSG00000103226_38 (sequence is synthesized)
actgttaaaaattattgaggattttaaagagtttgagtttgcatggattatctctgtgtatatttatcatattagtaattaaaaccgagatgttgaaaacgcaagaactcacaagctaca

SEQ ID NO: 135815 - DNA, 120 bp, Artificial Sequence
  ENSG00000103226_39 (sequence is synthesized)
ctatttggacagagctaacttgtagttggtgtggggagtgcaaactttgcaaagaatttggttcttttctggtggtcttagcctgaggatgtcaagtgtgagcctagagggtgacgtttc

SEQ ID NO: 135816 - DNA, 120 bp, Artificial Sequence
  ENSG00000103226_40 (sequence is synthesized)
ctctcctggctccttaccacctgccgtgaagatgatctactctggcctttctctgtggaaaatggctgcgaaataatgaaacaggctgtcacggaattttctcctcctctttctccaggg

SEQ ID NO: 135817 - DNA, 120 bp, Artificial Sequence
  ENSG00000103226_41 (sequence is synthesized)
gtgttgaaatagtcacttcctacagcgatgcggaaacatcttgggctttggggtcacacttcccctgagttcagagccttcatagatgtgtggcagccttcttagctgagtgaccttggg

SEQ ID NO: 135818 - DNA, 120 bp, Artificial Sequence
  ENSG00000103226_42 (sequence is synthesized)
caagttactcttagtctcttcgtgcttgactttcctcgtctataagacggggtgatgatcccgaccttgccagtggtagaaagcaaagcagccgcgggcctcatgcaatgtgcatggtgc

SEQ ID NO: 135819 - DNA, 120 bp, Artificial Sequence
  ENSG00000103226_43 (sequence is synthesized)
ctggcagctggtcggtgctcagcacacagagctgtgacgggcctcatgcaatgtgcatggtgcctggcagctggtcggtgctcagcacacagagctgtggctgcccctggtgccgttcca

SEQ ID NO: 135820 - DNA, 120 bp, Artificial Sequence
  ENSG00000103226_44 (sequence is synthesized)
gggatgctgtatttttaggatttgccagcttacgagcctctcaagcatcgtcccttagaagtcagccccgttgtggatcctcagttgtatcacgtacctccctcatcagaattggctcat

SEQ ID NO: 135821 - DNA, 120 bp, Artificial Sequence
  ENSG00000103226_45 (sequence is synthesized)
aataattttttgtgtttcataaagtcagatcctcagaggaccgtaattgtcaaggttgggtactcataaaaaggctgcaggctctgacagccttatcagaagccacagtctcagagacac

SEQ ID NO: 135822 - DNA, 120 bp, Artificial Sequence
  ENSG00000103226_46 (sequence is synthesized)
aaaacataaagttctttacatcacagccatacgttaggttttagttttcatttgctttgccagagctgtccttataaaaataacttcttcccatgtgtgcacagaactatgttgtgcttc

SEQ ID NO: 135823 - DNA, 120 bp, Artificial Sequence
  ENSG00000103226_47 (sequence is synthesized)
gatcctacattgccctgccattgacgctgctggttctgctggccggttacaaccatgacaagggacatattaggcccggagagaggccagcccatccctggggactcattagtaagaggc

SEQ ID NO: 135824 - DNA, 120 bp, Artificial Sequence
  ENSG00000103226_48 (sequence is synthesized)
agacgggctacatgctgagatgttccctgtctcacgccatcactctggtatgtacggcttatggagtctcttatttggaaaagcgcttgccttgtggatgtcaagaaagactaacatccc

SEQ ID NO: 135825 - DNA, 120 bp, Artificial Sequence
  ENSG00000103226_49 (sequence is synthesized)
acacttctgtccccttctccttgtcagttcatgcctgtcacctctgtcaaacccagtcgaatgttctgtgactggtccctgctgtgctacaaggattggttttatgccagaaatccttga

SEQ ID NO: 135826 - DNA, 120 bp, Artificial Sequence
  ENSG00000103226_50 (sequence is synthesized)
tcagtttcttgggggcccacggtcattagagtattgctcttactcgaacttaatgctgctgattcatgttcccttccacacgcgcttcttgttttctgatcacccgcttgtcactaagac

SEQ ID NO: 135827 - DNA, 120 bp, Artificial Sequence
  ENSG00000103226_51 (sequence is synthesized)
agtgtaattaatttccctggccacaacggctgctctcttaggcgtcttctcgttttgccacagaatcatgtttatgatgctgagtcttgtttggtggttagcttgcgtttcttctgaaaa

SEQ ID NO: 135828 - DNA, 120 bp, Artificial Sequence
  ENSG00000103226_52 (sequence is synthesized)
gacattccacttggtgggaagagagcagcagtttttctttcaagatgcagtcggaggccctgactggtggggattcaggaagtgtgtgttagttggtcatcttgtcagtcatggtgacaa

SEQ ID NO: 135829 - DNA, 120 bp, Artificial Sequence
  ENSG00000103226_53 (sequence is synthesized)
agtggctgtggtggggctactggagaccgggcagtgggggcatctgaagacaccactttgcagtgatgcagactgctccttacttgctgtgtcctatcaggcaagttactttgcctctct

SEQ ID NO: 135830 - DNA, 120 bp, Artificial Sequence
  ENSG00000103226_54 (sequence is synthesized)
gagcctcagtttctttattcattaaattcaaatatgagccaggtatggtggcccacgcctgtaatcccaccgctttgggagggtgaggcagtaggatcgcttgagcttgggagtttgaga

SEQ ID NO: 135831 - DNA, 120 bp, Artificial Sequence
  ENSG00000103226_55 (sequence is synthesized)
gtgattgccactacctgactgtgagtggtgattatagagagagggttactatttttggctgccagggaagccatggcgctcccctggtgtaattctggtccatcgtgacattcgcccctc

SEQ ID NO: 135832 - DNA, 120 bp, Artificial Sequence
  ENSG00000103226_56 (sequence is synthesized)
cccatcactgtgtgccctgggtctagaactgtaggttcttgatacatccttgtaggactaagtccctgcatgttgctgggactcaacaaactgagacccagttgcttttcaaccaccaag

SEQ ID NO: 135833 - DNA, 120 bp, Artificial Sequence
  ENSG00000103226_57 (sequence is synthesized)
actctctgatagctgcatctcttcatttcctcagttgggaggagggtccagaggctgaggaatgccttgtcattggaatctctttgtccctgagtttcagaagcaaatagtgaagctttg

SEQ ID NO: 135834 - DNA, 120 bp, Artificial Sequence
  ENSG00000103226_58 (sequence is synthesized)
ttccttcctttggatagaaggaatttggatcatgagggcccctgggtgtcctcaagtggccactttggaaggctgggtgggtggtggctgtggcattgtggatgatggacaagcttgtgg

SEQ ID NO: 135835 - DNA, 120 bp, Artificial Sequence
  ENSG00000103226_59 (sequence is synthesized)
atctttcccgggaagactgtgccagtttttaactttgcaacttgaatgtcaagatttttgttccttttatctgtattaatgtttcttagatttcagaaatacatatattgacatgaaact

SEQ ID NO: 135836 - DNA, 120 bp, Artificial Sequence
  ENSG00000103226_60 (sequence is synthesized)
taaaaaaattttcctataatgtggctaattgatggtattcagaacatgtaaatggaaaaggaagtcttgtcttttttaccccctggcataggatgtcctgggctgcaatgtctcaccagt

SEQ ID NO: 135837 - DNA, 120 bp, Artificial Sequence
  ENSG00000103226_61 (sequence is synthesized)
tgtgaatctgtacaaccacatgaaaaggagtggctctatgtctgcacctgaagaaaccgaacacgagcttgcccaaggccacgcaacacgtggaagactcagatggcatttgggcatctt

SEQ ID NO: 135838 - DNA, 120 bp, Artificial Sequence
  ENSG00000103227_0 (sequence is synthesized)
gagtgcgccctccccgcacatgcgccctgacagcccaacaatggcggcgcccgcggagtcgctgaggaggcggaagactgggtactcggatccggagcctgagtcgccgcccgcgccggg

SEQ ID NO: 135839 - DNA, 120 bp, Artificial Sequence
  ENSG00000103227_1 (sequence is synthesized)
gcgtggccccgcaggctctccggcccatctccacacgggcaccttctggctgacccggatcgtgctcctgaaggccctagccttcgtgtacttcgtggcattcctggtggctttccatca

SEQ ID NO: 135840 - DNA, 120 bp, Artificial Sequence
  ENSG00000103227_2 (sequence is synthesized)
gaacaagcagctcatcggtgacagggggctgcttccctgcagagtgttcctgaagaacttccagcagtacttccaggacaggacgagctgggaagtcttcagctacatgcccaccatcct

SEQ ID NO: 135841 - DNA, 120 bp, Artificial Sequence
  ENSG00000103227_3 (sequence is synthesized)
ctggctgatggactggtcagacatgaactccaacctggacttgctggctcttctcggactgggcatctcgtctttcgtactgatcacgggctgcgccaacatgcttctcatggctgccct

SEQ ID NO: 135842 - DNA, 120 bp, Artificial Sequence
  ENSG00000103227_4 (sequence is synthesized)
gtggggcctctacatgtccctggttaatgtgggccatgtctggtactctttcggatgggagtcccagcttctggagacggggttcctggggatcttcctgtgccctctgtggacgctgtc

SEQ ID NO: 135843 - DNA, 120 bp, Artificial Sequence
  ENSG00000103227_5 (sequence is synthesized)
aaggctgccccagcatacccccacatcccggattgtcctgtggggcttccggtggctgatcttcaggatcatgcttggagcaggcctgatcaagatccggggggaccggtgctggcgaga

SEQ ID NO: 135844 - DNA, 120 bp, Artificial Sequence
  ENSG00000103227_6 (sequence is synthesized)
cctcacctgcatggacttccactatgagacccagccgatgcccaatcctgtggcgtactacctgcaccactcaccctggtggttccatcgcttcgagacgctcagcaaccacttcatcga

SEQ ID NO: 135845 - DNA, 120 bp, Artificial Sequence
  ENSG00000103227_7 (sequence is synthesized)
gctcctggtgcccttcttcctcttcctcggccggcgggcgtgcatcatccacggggtgctgcagatcctgttccaggccgtcctcatcgtcagcgggaacctcagcttcctgaactggct

SEQ ID NO: 135846 - DNA, 120 bp, Artificial Sequence
  ENSG00000103227_8 (sequence is synthesized)
gactatggtgcccagcctggcctgctttgatgacgccaccctgggattcttgttcccctctgggccaggcagcctgaaggaccgagttctgcagatgcagagggacatccgaggggcccg

SEQ ID NO: 135847 - DNA, 120 bp, Artificial Sequence
  ENSG00000103227_9 (sequence is synthesized)
gcccgagcccagattcggctccgtggtgcggcgtgcagccaacgtctcgctgggcgtcctgctggcctggctcagcgtgcccgtggtcctcaacttgctgagctccaggcaggtcatgaa

SEQ ID NO: 135848 - DNA, 120 bp, Artificial Sequence
  ENSG00000103227_10 (sequence is synthesized)
acgccagcgcccccgatgccatgtgggaggactacgagttcaagtgcaagccaggtgaccccagcagacggccctgcctcatctccccgtaccactaccgcctggactggctgatgtggt

SEQ ID NO: 135849 - DNA, 120 bp, Artificial Sequence
  ENSG00000103227_11 (sequence is synthesized)
tcgcggccttccagacctacgagcacaacgactggatcatccacctggctggcaagctcctggccagcgacgccgaggccttgtccctgctggcacacaaccccttcgcgggcaggcccc

SEQ ID NO: 135850 - DNA, 120 bp, Artificial Sequence
  ENSG00000103227_12 (sequence is synthesized)
cgcccaggtgggtccgaggagagcactacaggtacaagttcagccgtcctgggggcaggcacgccgccgagggcaagtggtgggtgcggaagaggatcggagcctacttccctccgctca

SEQ ID NO: 135851 - DNA, 120 bp, Artificial Sequence
  ENSG00000103227_13 (sequence is synthesized)
gcctggaggagctgaggccctacttcagggaccgtgggtggcctctgcccgggcccctctagacgtgcaccagaaataaaggcgaagacccagcccctcggcggctcagcaacgtttgcc

SEQ ID NO: 135852 - DNA, 120 bp, Artificial Sequence
  ENSG00000103227_14 (sequence is synthesized)
cttccctgcgcccagcccaagctgggcatcgccaagagagacgtggagaggagagcggtgggacccagcccccagcacgggggtccagggtggggtctgttgtcacatactgtggcggct

SEQ ID NO: 135853 - DNA, 120 bp, Artificial Sequence
  ENSG00000103227_15 (sequence is synthesized)
cccaggccctgcccacctggggccccacatccaggccaacccttgtcccaggcgccaggggctctgatctcccatccatcccaccctcctcccagaggcccagcctggggctgtgccgcc

SEQ ID NO: 135854 - DNA, 120 bp, Artificial Sequence
  ENSG00000103227_16 (sequence is synthesized)
cacaggagttgagacaatggccatcctgacaccttcctccactacagccctgaccatagacccagccaggtagctcttggggtctctagcgtcccagggcctggtttctgttccctcttc

SEQ ID NO: 135855 - DNA, 120 bp, Artificial Sequence
  ENSG00000103227_17 (sequence is synthesized)
aatggtgtgttcccagccaggtcctgaccctcagagccaagtccctgtcacgtctggggcagccaaaccctcgccccacagggacctggacacgcccggccaggatgtggggttggatgg

SEQ ID NO: 135856 - DNA, 120 bp, Artificial Sequence
  ENSG00000103227_18 (sequence is synthesized)
gccattttctgtcctatccctcatctccacccccgccacagcctacacgcatcccacacatgcaggcacacacagcctgtgcacacatgtgttcttggcccggtttcatccccccatgac

SEQ ID NO: 135857 - DNA, 120 bp, Artificial Sequence
  ENSG00000103227_19 (sequence is synthesized)
tggtgtctgtgaggtgcagatggacacagcgcacacccagaccctccaccaggctgtgacctcgctgcctctgaggccttgacaaggcccctcaatcggaggacagccggccgtgcacac

SEQ ID NO: 135858 - DNA, 120 bp, Artificial Sequence
  ENSG00000103227_20 (sequence is synthesized)
tttcatcatcgtcggacaaacagcgtctactgcacatttttcttattcctattcttgagccatagctatggcatattcttctactattcctattataccacttaccagcttactcgaaaa

SEQ ID NO: 135859 - DNA, 120 bp, Artificial Sequence
  ENSG00000103227_21 (sequence is synthesized)
gccatgtctggtactctttcgcctctgccatcagccttcccagtatgcacggagggcagtgatgggcgcttgtgatctgatccgtgcctcctccctggatgtgggagctcctgggcttcc

SEQ ID NO: 135860 - DNA, 120 bp, Artificial Sequence
  ENSG00000103227_22 (sequence is synthesized)
aggccccgggcacctagagacggatggtcgcacgcatgattgtcggcatctcacaggatgggagtcccagcttctggagacggggttcctggggatcttcctgtgccctctgtggacgct

SEQ ID NO: 135861 - DNA, 120 bp, Artificial Sequence
  ENSG00000103227_23 (sequence is synthesized)
ccttcgcgggcaggcccccgcccaggcgcctcagggaccctcctccacccagagggtctctgtcttcccggttttcctggcgtaattcagacttggggagagaagaatcatcatccatca

SEQ ID NO: 135862 - DNA, 120 bp, Artificial Sequence
  ENSG00000103227_24 (sequence is synthesized)
cacacccagacccaaagagactcaaagccaggaggagccgggtggacccagaggccctcaccctgccagcctaaggggcatggcccaaggtctccacccccagcccccagagcacagctg

SEQ ID NO: 135863 - DNA, 120 bp, Artificial Sequence
  ENSG00000103227_25 (sequence is synthesized)
tgtgcaggtcaccagaagccccaaataatgacagcagcccagacagtcgctaccgggccctggtgcagtgtgaagcctctggcacctgcctgggctcattccaggggccatgagagggtc

SEQ ID NO: 135864 - DNA, 120 bp, Artificial Sequence
  ENSG00000103227_26 (sequence is synthesized)
ctgttatggctgcaccatcacacccaccgggcagctggggcccagctctgccatggatcccagccaggcagcagccgccctgtgggctgagaagcttccgctcctgctgcacaactgcga

SEQ ID NO: 135865 - DNA, 120 bp, Artificial Sequence
  ENSG00000103227_27 (sequence is synthesized)
acccccaggagaaaatgcccagtcctccgagagtccagtgagggcttgccagccagggaccaagacccagtatggcctaaaccaggcctggtcaccaggggtcaggcgggaccttataca

SEQ ID NO: 135866 - DNA, 120 bp, Artificial Sequence
  ENSG00000103227_28 (sequence is synthesized)
gggctcagcagagagacctgcccgctaccctgctccaggggagatgggggtgggggccttcatcccactcgggcatgacagaggagagcagccagccagcatctgcacgtctcaggcagg

SEQ ID NO: 135867 - DNA, 120 bp, Artificial Sequence
  ENSG00000103227_29 (sequence is synthesized)
gaagggcctgaagccctgggaagcagaggctccgccctcaggaaacaggtcccggcctggctccctcacagcctcggactgccccgtggaccgaaacccccaggcaccttgcgccaggac

SEQ ID NO: 135868 - DNA, 120 bp, Artificial Sequence
  ENSG00000103227_30 (sequence is synthesized)
ctctctcacacacacacacacacacacagcccgtctcgcgcctgaggtctcgcccgcaggccggtggcgcggggtcagctgctgcctgcggtccaggacagggtcggttccgccgcgcag

SEQ ID NO: 135869 - DNA, 120 bp, Artificial Sequence
  ENSG00000103227_31 (sequence is synthesized)
tctggtactctttcgcggctcagcacgtcactttggactgtcgcgcagaaattcagaagactcgtagtagcttcggcagtgctctccctgccttccgagcagccatgcgtctttgaactg

SEQ ID NO: 135870 - DNA, 120 bp, Artificial Sequence
  ENSG00000103227_32 (sequence is synthesized)
aaagatcctctccagaaacttggaccaaagtcaggacacctcaggggtcctccttcctgtggcgggagctgcccttggagcttccttcctgggcaggacggatggtggctccacttcaaa

SEQ ID NO: 135871 - DNA, 120 bp, Artificial Sequence
  ENSG00000103227_33 (sequence is synthesized)
gagtactgagagcagcgccagggctggaggggacgctgggaggccgccagcacccagggacaccgccctcggtgcttcatttctcactgacgatgaacagcatgtttgggctccaggact

SEQ ID NO: 135872 - DNA, 120 bp, Artificial Sequence
  ENSG00000103227_34 (sequence is synthesized)
tgcccttctcaaattctgccttcctgagtgtttcatacgtaaggtcccctccctcacagcgcctgcagcccagatccacggccttcgtggatggttcgtcttcctgggaagctgtttctg

SEQ ID NO: 135873 - DNA, 120 bp, Artificial Sequence
  ENSG00000103227_35 (sequence is synthesized)
tgggggtagcagaggcacccatggacagagctgctgtttctgtcctcccggtcccgtctcagccaccagaaaactgagcctcagggaggcaaggcccagacagagggtgctggggtggac

SEQ ID NO: 135874 - DNA, 120 bp, Artificial Sequence
  ENSG00000103227_36 (sequence is synthesized)
aggctccaaggcacccagccaggggagcgaagccagcggccgacatgggaatgagtggtcagggctacacgaagcaggcagccccttaaggggaccccagccaaagagctggagtgcggc

SEQ ID NO: 135875 - DNA, 120 bp, Artificial Sequence
  ENSG00000103227_37 (sequence is synthesized)
tcctctccccaccttcccaggcgggggacacttggggctcaaactggggccttgtgaacggtctcaggcttgctcagtgccacccgtgaagctcctggccttccccgggccggtccctct

SEQ ID NO: 135876 - DNA, 120 bp, Artificial Sequence
  ENSG00000103227_38 (sequence is synthesized)
gccaagtgggccctgctgggtctcccctcccggagctgccccccgtccgcccttcccccttgctgcgctgttcactgctgagggtgccgactggaacagttgccctgcccggggtctgct

SEQ ID NO: 135877 - DNA, 120 bp, Artificial Sequence
  ENSG00000103227_39 (sequence is synthesized)
gggggtctacctgtgctcagggtgggggctcctcatgcagcccctctgtccgtgggggaccctgtgagcagctgcagctcagcagcaggctgaggagccgggtcgggggccgggagtccc

SEQ ID NO: 135878 - DNA, 120 bp, Artificial Sequence
  ENSG00000103227_40 (sequence is synthesized)
gtttccgtgggtcaggcatagggctctgggtcactgctgtcgtggatgctgatggactggtgttagacctcagcagattctctacctcccaccatgttcttctgccctcatctcctctct

SEQ ID NO: 135879 - DNA, 120 bp, Artificial Sequence
  ENSG00000103227_41 (sequence is synthesized)
gtgacactgaagagagacctgggttcacgcccaccagagtgcccacctggaacacaatgcatttcctcagcagagggtccccgcgagcgcaggggtgtcctcggcggagggtccccgcga

SEQ ID NO: 135880 - DNA, 120 bp, Artificial Sequence
  ENSG00000103227_42 (sequence is synthesized)
acaggcatgtcctcggcggagggtccctgtgagcgcgggcgtgtcctcggcagagggtccccacaagccacctgttctccgtggcagctgacaggcaggaggctgcatccaaagatgcca

SEQ ID NO: 135881 - DNA, 120 bp, Artificial Sequence
  ENSG00000103227_43 (sequence is synthesized)
ctcttccttcttggggccatgcgccgttggcctcggaacacctgctgctccgtctcttgggcccaggattccatcacctcaagctcctcttcctgtgccggccttggggaccccctcggg

SEQ ID NO: 135882 - DNA, 120 bp, Artificial Sequence
  ENSG00000103227_44 (sequence is synthesized)
cctcgcctccgctcccagccaccggccgggtcatctgtgggccgcacagccttgtgaggactccgccggcgggggcgagcacagatgggcagtgagaagactgatttccctctgaggaga

SEQ ID NO: 135883 - DNA, 120 bp, Artificial Sequence
  ENSG00000103227_45 (sequence is synthesized)
tggctcagtgatgctagaagaaaaacaaggaaggcgaggtcccccaggagcgctcaggccgtgcactctacgcggaactgcgttttcataacaaaacagccgaccagatggagggcgaga

SEQ ID NO: 135884 - DNA, 120 bp, Artificial Sequence
  ENSG00000103227_46 (sequence is synthesized)
gatgcaccagagcagctgaacggggcgcagctggggatgcctctgcatggagcagggccccgagccccgaagctttcttagaaacaggatctgatgcccagatctgtgctctctggagcc

SEQ ID NO: 135885 - DNA, 120 bp, Artificial Sequence
  ENSG00000103227_47 (sequence is synthesized)
ctagttccctgaggctagagttccccactgagcccacagcaggatgacccaagggggctttggaaatacactcaggcagggcccaccctgacccaggcaggcaggtgctcagggctgggt

SEQ ID NO: 135886 - DNA, 120 bp, Artificial Sequence
  ENSG00000103227_48 (sequence is synthesized)
gttcctcaaagctcctgatggttctggcatggccgagcatccgaacgggcactggctcaggctgtgccccaggtcgctttggtcccatctgccagtcaggctgaccacagcgaagggcca

SEQ ID NO: 135887 - DNA, 120 bp, Artificial Sequence
  ENSG00000103227_49 (sequence is synthesized)
gaaagacccgagcttttcccaccaggacattccagtgtcacctgtggcatctcctccagagcatccccaagagtgggcccaaaggtcagacctcagtgcctagccctgcaccctccctgt

SEQ ID NO: 135888 - DNA, 120 bp, Artificial Sequence
  ENSG00000103227_50 (sequence is synthesized)
cacgggagctcaggggctcccagccaccccaccccagaccagccctggtcacactcaggacggagggcatgggggtctggaccagcggaggggagctggtggcagaggtggctaacccca

SEQ ID NO: 135889 - DNA, 120 bp, Artificial Sequence
  ENSG00000103227_51 (sequence is synthesized)
gccagggcgaggcggggctgtttttggcacaggggtttagtaaccttgtagacagtggagaataagaaataactgttttggggctcagaaccagaaaagctatttttcccaattcaccca

SEQ ID NO: 135890 - DNA, 120 bp, Artificial Sequence
  ENSG00000103227_52 (sequence is synthesized)
gggagagccatgagtgcacagttcataaaacaccatcatcgcccataacactgatgtggctgccctcacgagtcccttcattagacgtcgatgtccctgccctcaaccttcctcctgagt

SEQ ID NO: 135891 - DNA, 120 bp, Artificial Sequence
  ENSG00000103227_53 (sequence is synthesized)
tgcagggcgaccggccacgcaagctgcccctgtctccctgatgcctccacggcaacggcaggggtgaggtctggcagcacacctgtgatatcacccgacggagctgcagggacagcggct

SEQ ID NO: 135892 - DNA, 120 bp, Artificial Sequence
  ENSG00000103227_54 (sequence is synthesized)
ccatctccagtttcgtcacctaacgatcgctggcctgcggggatgtccagaagcgggtccctctgagtccctcctgccgcaggtttactcactgctgctgctgagtctttccttggagct

SEQ ID NO: 135893 - DNA, 120 bp, Artificial Sequence
  ENSG00000103227_55 (sequence is synthesized)
ctcccagccgtgctgctcagccagccctgcatgcagcccctcccctctcctgctgttcatctctgtggcacagggtcctgtgcctgtgtctcacttccttgcatttcgtattttggagtg

SEQ ID NO: 135894 - DNA, 120 bp, Artificial Sequence
  ENSG00000103227_56 (sequence is synthesized)
ggggcgttactggtggcccccccacggcccctgttgtctgtgtcacccatcggctgaggggcgtccccagtacccactctccaagcacagcctcctctgtttggactcaccagccttccc

SEQ ID NO: 135895 - DNA, 120 bp, Artificial Sequence
  ENSG00000103227_57 (sequence is synthesized)
cgggcatgaccccggcaggtgccctctgaaagtgaggagttccaggagggcacagggtctggtggtctggtccagcccccgccttgcggatcactaaagcaagggacagaacctgcacag

SEQ ID NO: 135896 - DNA, 120 bp, Artificial Sequence
  ENSG00000103227_58 (sequence is synthesized)
aaatgtgcagtcatgggaggaatgttctggaagcacctgccggaaggcacctctgaggcatctgctgtcccctccatgaaggcacagctgggtttcagttgtgatgctgggcccgaggga

SEQ ID NO: 135897 - DNA, 120 bp, Artificial Sequence
  ENSG00000103227_59 (sequence is synthesized)
cagcaagggcagagctgggtgcaggttccctcccccctccctgctccaggaagagaggcgccagctgcccaggggccccacacgagcccctgcacgagactcagctgcggcgtctccaca

SEQ ID NO: 135898 - DNA, 120 bp, Artificial Sequence
  ENSG00000103227_60 (sequence is synthesized)
gtgggtcaccaagcgccctcagatatgggggcccgctaatgtggaaataatatatatccaggttggcgtcgcccgtgaagactgtaaatgtcaccattaggggaaccacgcctgaatccc

SEQ ID NO: 135899 - DNA, 80 bp, Artificial Sequence
  ENSG00000103241_0 (sequence is synthesized)
gcagagcagcggcggcagcggcggcggcggcagcagccacccgatgtcttcggcgcccgagaagcagcagccaccgcacg

SEQ ID NO: 135900 - DNA, 120 bp, Artificial Sequence
  ENSG00000103241_1 (sequence is synthesized)
ggaccccgcgtcgtccggcccgtccaaggccaagaagaccaacgccggcatccggcgcccggagaagccgccctattcctacatcgcgctcatcgtcatggccatccagagttcacccac

SEQ ID NO: 135901 - DNA, 120 bp, Artificial Sequence
  ENSG00000103241_2 (sequence is synthesized)
caagcgcctgacgctgagcgagatctaccagttcctgcagagccgcttccccttcttccggggctcctaccagggctggaagaactccgtgcgccacaacctctcgctcaacgagtgctt

SEQ ID NO: 135902 - DNA, 120 bp, Artificial Sequence
  ENSG00000103241_3 (sequence is synthesized)
catcaagctacccaagggccttgggcggcccggcaagggccactactggaccatcgacccggccagcgagttcatgttcgaggagggctcctttcggcggcggccgcgcggcttccgaag

SEQ ID NO: 135903 - DNA, 120 bp, Artificial Sequence
  ENSG00000103241_4 (sequence is synthesized)
gaaatgccaggcgctcaagcccatgtacagcatgatgaacgggctcggcttcaaccacctcccggacacctacggcttccagggctcggccggcggcctctcgtgcccgcccaacagcct

SEQ ID NO: 135904 - DNA, 120 bp, Artificial Sequence
  ENSG00000103241_5 (sequence is synthesized)
ggcgctggagggcggcctgggcatgatgaacggccacttgccgggcaacgtggacggcatggccctgcccagccactcggtgccccacctgccttccaacggcggccactcgtacatggg

SEQ ID NO: 135905 - DNA, 120 bp, Artificial Sequence
  ENSG00000103241_6 (sequence is synthesized)
tacatgggcggctgcggcggcgcggcggccggcgagtacccgcaccacgacagctcggtgcccgcctccccgctgctgcccaccggcgccggtggggtcatggagccgcacgccgtctac

SEQ ID NO: 135906 - DNA, 120 bp, Artificial Sequence
  ENSG00000103241_7 (sequence is synthesized)
ggcggcggcctggccgccctcggcgtccgcggcgctcaacagcggcgcctcttatatcaagcagcagcccctgtccccctgtaaccccgcggccaaccccctgtccggcagcctctccac

SEQ ID NO: 135907 - DNA, 120 bp, Artificial Sequence
  ENSG00000103241_8 (sequence is synthesized)
gcactccctggagcagccgtatctgcaccagaacagccacaacgccccagccgagctgcaaggcatcccgcggtatcactcgcagtcgcccagcatgtgtgaccgaaaggagtttgtctt

SEQ ID NO: 135908 - DNA, 120 bp, Artificial Sequence
  ENSG00000103241_9 (sequence is synthesized)
ctctttcaacgccatggcgtcctcttccatgcactcggccggcgggggctcctactaccaccagcaggtcacctaccaagacatcaagccttgcgtgatgtgaggctgccgccgcaggcc

SEQ ID NO: 135909 - DNA, 120 bp, Artificial Sequence
  ENSG00000103241_10 (sequence is synthesized)
ctcctggtgcaggcaggcgggtcacagggaccctggaccggcacaagaaactgctttcttctcgaggtataaccgtcggcagaagaaaagggttccacctctccccaaccggagtttttg

SEQ ID NO: 135910 - DNA, 120 bp, Artificial Sequence
  ENSG00000103241_11 (sequence is synthesized)
gcaaggagtccccaatgcaaagacacagcgctgcggttggcacctccttcctcactccttcaaaattgttaagaaatgttagtggtgggtctgatctgactgcagccatcggtaaataaa

SEQ ID NO: 135911 - DNA, 120 bp, Artificial Sequence
  ENSG00000103241_12 (sequence is synthesized)
agtttttgatcctgttgaacccgcctgagacggtgctgtgcaggggaaagcccccgcacccacacaggaattctgctgaggtcccccctccttccggccaatggcagaagtgggggaaaa

SEQ ID NO: 135912 - DNA, 120 bp, Artificial Sequence
  ENSG00000103241_13 (sequence is synthesized)
tccggccaatggcagaagtgggggaaaatttttagaagaaaagcaaacatgtgagaccaatcattatcaaatacttttattttttggttgagtatttatctttttattttttattttttt

SEQ ID NO: 135913 - DNA, 120 bp, Artificial Sequence
  ENSG00000103241_14 (sequence is synthesized)
caagagctcagatctccctcccgatctccctccccacctccgaagtctcctccgtggaccacaggtggatctttgtgcgaacaacttgcatttcggaagccactgtccgtctttaaacag

SEQ ID NO: 135914 - DNA, 120 bp, Artificial Sequence
  ENSG00000103241_15 (sequence is synthesized)
aaagtcaaaggagccacgaagcaagcggccgtccgggcgtccgcctccgtccccttccatgttcctcctcttccttcgcttcagcctcttctgttatgttttgtcttgaattttatttag

SEQ ID NO: 135915 - DNA, 120 bp, Artificial Sequence
  ENSG00000103241_16 (sequence is synthesized)
actttttcagtgggtatttttctgtctcccaacctctactgtaaactttctggtccgagaacgagccgaacacagcgcgacgcagggactaggacggcccggtgaccgcgcggattcagg

SEQ ID NO: 135916 - DNA, 120 bp, Artificial Sequence
  ENSG00000103241_17 (sequence is synthesized)
attgcggggacgcagaaaggttaaggcacttttaaaaactatagcaaggctcctgtttatttattctactttctttccctaataatcaaaacaccgcgtaggctcctccgtttatcagta

SEQ ID NO: 135917 - DNA, 120 bp, Artificial Sequence
  ENSG00000103241_18 (sequence is synthesized)
ttaatggtgtaactttgttggcaatatttgccgtgtagaattttttttagatatccattgtaaatttgaaacaaagaccgatctgtgtaaaaacaaatttccatatgttttatataaata

SEQ ID NO: 135918 - DNA, 120 bp, Artificial Sequence
  ENSG00000103241_19 (sequence is synthesized)
tatatataatatgaaggactaccctccttttttttttttgtattttggctgctagagtgcagcatttgtgacacgtatttgaaatttgaaatttccttctgcactgtataaaaggaccat

SEQ ID NO: 135919 - DNA, 120 bp, Artificial Sequence
  ENSG00000103241_20 (sequence is synthesized)
ttgaggatgttttgccttttgtgtattttttcctaaaaaaagaacaaaaataaaaatgtataacatttgtacatggcctttaaaattgtatcaactagaaataaaattgcatgagtattt

SEQ ID NO: 135920 - DNA, 120 bp, Artificial Sequence
  ENSG00000103241_21 (sequence is synthesized)
tattgggactgagattgtagaataccttccagactcccaaagatagaggggggaaaaaagaaaaaacaggctttggatctctagacgcttaaaaatttacaatctgggtgattctgagta

SEQ ID NO: 135921 - DNA, 120 bp, Artificial Sequence
  ENSG00000103241_22 (sequence is synthesized)
cttttttcttttttggcaaatcctcctcttttcactcttcattccactttgaagtaaacgctggacaagaggaactatttttcttggcttctgttttttaagaagagccctttgcccctc

SEQ ID NO: 135922 - DNA, 120 bp, Artificial Sequence
  ENSG00000103241_23 (sequence is synthesized)
taaatgtcattgatcgttttaaagaaataaacttttaaagaacactatagacctccttcccctagggaacaccaattaaaccatatatgtgcacatacatatggatatacatatatatgt

SEQ ID NO: 135923 - DNA, 120 bp, Artificial Sequence
  ENSG00000103241_24 (sequence is synthesized)
atatacatatatgtacatatatgtatacgtgtccatgtacataatatatatttttttgccactacaagaccaatgagagttttactttgggtttccgactttcttgttctcttgctgtag

SEQ ID NO: 135924 - DNA, 120 bp, Artificial Sequence
  ENSG00000103241_25 (sequence is synthesized)
ctgttataaatcgtgaatcaactttaaggtttttttgtagttgttggtttgtcttgttttgttttggctttttggtgccttgttcttggttttccccgatagaaaatcaagcaaaatcta

SEQ ID NO: 135925 - DNA, 120 bp, Artificial Sequence
  ENSG00000103241_26 (sequence is synthesized)
aatgaggcaaaagggcgcttggtgggccaggtgacaggcacctttccaatcctgtaacatttatctcctaagtcacagttcgtcctctctgggggaaaaatattttttaacacttgtacc

SEQ ID NO: 135926 - DNA, 120 bp, Artificial Sequence
  ENSG00000103241_27 (sequence is synthesized)
ttccactgaccaccctctttctattccagttcccggctaccgagaaaaacaaacacagtaagtcacattgttggtgcggtccttccagacccaccgcagtgtcttgcgtcgtggggtcgt

SEQ ID NO: 135927 - DNA, 120 bp, Artificial Sequence
  ENSG00000103241_28 (sequence is synthesized)
gagtctctgaacctggttcttctcagagttgacattttggacgtgggggtaatttctccggtgctctgttacatcaaaattatcaataaactcgcctgggcaattagtgtccccaactaa

SEQ ID NO: 135928 - DNA, 120 bp, Artificial Sequence
  ENSG00000103245_0 (sequence is synthesized)
agtgcggccgtcatggcgtcgcccttcagcggggcgctgcagctgacggacctggatgacttcatcgggccgtctcaggagtgcatcaagcctgtcaaagtggaaaaaagggcgggaagt

SEQ ID NO: 135929 - DNA, 120 bp, Artificial Sequence
  ENSG00000103245_1 (sequence is synthesized)
ggcgtggccaagattcgcattgaagatgacgggagctacttccaaattaaccaagacggcgggacccggaggctggagaaggccaaggtctcgctaaacgactgcctggcgtgcagcggc

SEQ ID NO: 135930 - DNA, 120 bp, Artificial Sequence
  ENSG00000103245_2 (sequence is synthesized)
tgcatcacctccgcagagaccgtgcttatcacccagcagagccacgaggagctgaagaaggttctagatgctaacaagatggcggcacccagtcagcagaggctggttgtagtttcggtc

SEQ ID NO: 135931 - DNA, 120 bp, Artificial Sequence
  ENSG00000103245_3 (sequence is synthesized)
tcaccacagtctagagcatcgctggctgcacggtttcagctgaatcctacagatactgccaggaaattaacctcattctttaaaaaaataggggtgcacttcgtcttcgacaccgccttc

SEQ ID NO: 135932 - DNA, 120 bp, Artificial Sequence
  ENSG00000103245_4 (sequence is synthesized)
tcaaggcacttcagcctcctggagagccagcgagagtttgtgcggcgattccgaggacaggccgactgcagacaggcgctgcccctgctggcctctgcctgcccaggctggatctgctat

SEQ ID NO: 135933 - DNA, 120 bp, Artificial Sequence
  ENSG00000103245_5 (sequence is synthesized)
gccgagaagactcacggcagcttcatcctcccccacatcagcaccgcccggtccccgcagcaggtcatgggctccctggtcaaggacttcttcgcccagcagcagcacttgacccctgac

SEQ ID NO: 135934 - DNA, 120 bp, Artificial Sequence
  ENSG00000103245_6 (sequence is synthesized)
aagatctaccacgtcacagtgatgccctgctatgacaaaaagctggaagcctccagacccgactttttcaaccaggagcaccagacacgggatgtggactgtgtcctcacaacaggagaa

SEQ ID NO: 135935 - DNA, 120 bp, Artificial Sequence
  ENSG00000103245_7 (sequence is synthesized)
gttttcaggttgctggaggaagagggcgtctccctccccgacctggaaccagcccctctggacagcctgtgcagcggtgcctctgcagaggagcccaccagccatcggggagggggctcg

SEQ ID NO: 135936 - DNA, 120 bp, Artificial Sequence
  ENSG00000103245_8 (sequence is synthesized)
atgtggctgaggttacctacaaacccctgaggaacaaagacttccaggaggtgacactggagaaggagggccaggtgctgctgcacttcgcaatggcgtacggcttccgcaacatccaga

SEQ ID NO: 135937 - DNA, 120 bp, Artificial Sequence
  ENSG00000103245_9 (sequence is synthesized)
acctggtgcagaggctcaaacgagggcgctgcccctaccactacgtggaggtcatggcctgcccctcaggctgcctgaacggcgggggccagctccaggccccagacaggcccagcagag

SEQ ID NO: 135938 - DNA, 120 bp, Artificial Sequence
  ENSG00000103245_10 (sequence is synthesized)
agctcctccagcacgtggagagactgtacggcatggtccgggctgaggcgcccgaggacgcgcctggggttcaggagctgtacacacactggctgcagggcacggactcggagtgtgcag

SEQ ID NO: 135939 - DNA, 120 bp, Artificial Sequence
  ENSG00000103245_11 (sequence is synthesized)
gtcgcttgctgcatacgcagtaccacgccgtggagaaggccagcactggcctgggcatccggtggtaggggctgcaggaccaggactcccaggaggccgtgtccatgtgtgacagcagaa

SEQ ID NO: 135940 - DNA, 120 bp, Artificial Sequence
  ENSG00000103245_12 (sequence is synthesized)
ccacatgccccaagaccccagggcttcccccaaaattctgagtgagctgcagggtgtgctgggacccgagtaggagctaggactagccaggacccgcagccgcctcgtcacctccagttg

SEQ ID NO: 135941 - DNA, 120 bp, Artificial Sequence
  ENSG00000103245_13 (sequence is synthesized)
ggtgcctctgggttcccactggctctgcccaggtggggtggggtggcccaggcagcagaaggttccctgaggtcccagagcctgttccgttggccctgggccgaggcccacaggtgctgc

SEQ ID NO: 135942 - DNA, 120 bp, Artificial Sequence
  ENSG00000103245_14 (sequence is synthesized)
ccttgctgctgctggtcgggcacccaagtgcgtgaggggcttcagcctgtcccggggttgcctgaggcagagcaagacgggttctcacccctgacttctggaggcttcccttgaagctct

SEQ ID NO: 135943 - DNA, 120 bp, Artificial Sequence
  ENSG00000103245_15 (sequence is synthesized)
gtgcaaaaggtgggagacagagctggacctgcaggggtggtcccgccacaaccctgcgtgtggaccctggcaggggggggtgccaggcccctggaaagcaggggttaccgttacgaggct

SEQ ID NO: 135944 - DNA, 120 bp, Artificial Sequence
  ENSG00000103245_16 (sequence is synthesized)
gtggtccggggcaagccaagtacgaagcagcagccatcgcgggctgcatcatcccccagccaggtccccaccaggcctgtctcccagcgtttgtctaataaacgcacccctcctaaaaca

SEQ ID NO: 135945 - DNA, 120 bp, Artificial Sequence
  ENSG00000103245_17 (sequence is synthesized)
tcctgtgccttcgtcctttcctcctttgtcctcagctttcccgcctcctcctttcagagcccaccttcggcattttcctgccctacagccctgacggcgggacccggaggctggagaagg

SEQ ID NO: 135946 - DNA, 120 bp, Artificial Sequence
  ENSG00000103245_18 (sequence is synthesized)
caccagacacgggatgtggactgtgtcctcacaacaggtgcggtcacgccgtgcggccctgagccctcaagcctcctggtctgattcctgagccctgggcacaggtggcgactgcccagg

SEQ ID NO: 135947 - DNA, 120 bp, Artificial Sequence
  ENSG00000103245_19 (sequence is synthesized)
atcctgcctgtgggggccctggctggagtgtgggggctcgcatgcgtgcacgtaccttcgtctctccccttggagccaggtgggcccatttgcagctggcctgtcttggggacctgcagc

SEQ ID NO: 135948 - DNA, 120 bp, Artificial Sequence
  ENSG00000103245_20 (sequence is synthesized)
caggtggcgctcagtaatacctccttgttggctctgaaatgagtctttggaggtgggcagagattctcgaatgcagcctcttcagctcccatgagtcaccccattcctgagtcgagcagc

SEQ ID NO: 135949 - DNA, 75 bp, Artificial Sequence
  ENSG00000103245_21 (sequence is synthesized)
ttcagctcccatgagtcaccccattcctgagtcgagcagccccacagtctcccaaatgtgaggcagaaaagcaaa

SEQ ID NO: 135950 - DNA, 78 bp, Artificial Sequence
  ENSG00000103245_22 (sequence is synthesized)
atgaaaccccatgtctactaaaaatacgaaaattagccgggagtagtggtggtgctcctgtaatcccagctactcggg

SEQ ID NO: 135951 - DNA, 65 bp, Artificial Sequence
  ENSG00000103245_23 (sequence is synthesized)
acagactgcctaagaggatggacagatggacactgggtgagcagagtggcctggccgctggcaca

SEQ ID NO: 135952 - DNA, 120 bp, Artificial Sequence
  ENSG00000103245_24 (sequence is synthesized)
atggacactgggtgagcagagtggcctggccgctggcacacctccctgggcaggaccaggcagcctccagaggggcttcaggagtgaccgggcctggcctccccaccacgggctagggtg

SEQ ID NO: 135953 - DNA, 120 bp, Artificial Sequence
  ENSG00000103245_25 (sequence is synthesized)
gacatttggggccttctggggccaaagtgcagactgctggggatgcaggtggcttggatgttctctgactttgttgctgggatctccgctaaagagtgtctgcgctgtggcttctttgca

SEQ ID NO: 135954 - DNA, 120 bp, Artificial Sequence
  ENSG00000103245_26 (sequence is synthesized)
gcctctgaggatagcatccccctgctctgggcttgcctccccgcagcccatcttggcgtccacagaagtggctggatagccaggcgcagtagctcacgcctgtcaccccagcactttggg

SEQ ID NO: 135955 - DNA, 69 bp, Artificial Sequence
  ENSG00000103245_27 (sequence is synthesized)
caggagttcgagaccagctacatggtggtaatccatgccaggccctgtaatcccagctacttgggaggt

SEQ ID NO: 135956 - DNA, 76 bp, Artificial Sequence
  ENSG00000103245_28 (sequence is synthesized)
gaagtggctgggcccctgtgatggctggtgacacaggagctgttcctctgtgtctgtgacttgtctcccacctgga

SEQ ID NO: 135957 - DNA, 120 bp, Artificial Sequence
  ENSG00000103245_29 (sequence is synthesized)
gagctgttcctctgtgtctgtgacttgtctcccacctggaaatgcaaacgctcatgtgtgagggacagaggccctgctcgggaggttggcaggcagcagccccagctgtgctgaggcccc

SEQ ID NO: 135958 - DNA, 120 bp, Artificial Sequence
  ENSG00000103245_30 (sequence is synthesized)
cctacaaacccctgaggtcagtgggatgggccagatctctgggcagagcggccacacagcccccagccttcctcgggctgctgcctcccctggggtcctcccacagaggtgggctgggtg

SEQ ID NO: 135959 - DNA, 120 bp, Artificial Sequence
  ENSG00000103245_31 (sequence is synthesized)
gggtgtgaaggcacctaagcactccaggcctcagtcggcccattgtgggggatggtgaccctgagcccgagaggccagcatgggcaaaggtgatgggtgcctggcgcaggcacgcgacca

SEQ ID NO: 135960 - DNA, 120 bp, Artificial Sequence
  ENSG00000103245_32 (sequence is synthesized)
catcccaggagggagggccagggcctcacagacatccctggggagggaggcctgtttcacagacagcccgaggctggaggtgaggtcccctgctggactcaaggaagtgagccttccacc

SEQ ID NO: 135961 - DNA, 120 bp, Artificial Sequence
  ENSG00000103245_33 (sequence is synthesized)
ctctctctccgttcttgtccttccctctgcccaggagagagggagagagccctgggaggtacccggtcatcccctgaagcccagcaggcctccccttccaggcaggcaggagcctggtgg

SEQ ID NO: 135962 - DNA, 120 bp, Artificial Sequence
  ENSG00000103245_34 (sequence is synthesized)
gaaaagttgctgaggcatgtcccggaggcccccgactggaacaccttgttcctgcatctgtttggcgagtctgacggttgtttctgccccgcccaccggaggccaggctcccaggcttcc

SEQ ID NO: 135963 - DNA, 120 bp, Artificial Sequence
  ENSG00000103245_35 (sequence is synthesized)
tccctctgctctcctcttcctgtgccttcgtcctttcctcctttgtcctcagctttcccgcctcctcctttcagagcccaccttcggcattttcctgccctacagccctgtgagtgtgca

SEQ ID NO: 135964 - DNA, 120 bp, Artificial Sequence
  ENSG00000103245_36 (sequence is synthesized)
ccggggccagcaccccgtccagggccccatgggtgagtggggtggctgctgctttgctgagataccagtggcaagccttagtcctgtgattcggatgcactaaccaagtggtaccaagaa

SEQ ID NO: 135965 - DNA, 120 bp, Artificial Sequence
  ENSG00000103245_37 (sequence is synthesized)
gcagacttgacggcattatgaaactgtagagcgtgcgtgtgcatttttgtaatacatacctaatttttaaaaattcagcggcacacaagcccagccagcagccatgttggttgtcggtta

SEQ ID NO: 135966 - DNA, 120 bp, Artificial Sequence
  ENSG00000103245_38 (sequence is synthesized)
tgagctggactccactatcctctgtctccatgtcctcgtgcagagggggcccctgtgcaccgggttcttctcccttgtaggacggcgggacccggaggctggagaaggccaaggtctcgc

SEQ ID NO: 135967 - DNA, 120 bp, Artificial Sequence
  ENSG00000103245_39 (sequence is synthesized)
agtcaagttcaagtgcagttgaaacgtgaggtgatatggacacaaatgacaaggcgggggcatggggggtggagacgcaagcaggttttgcgggacgggttggaaatgttggcacaaatg

SEQ ID NO: 135968 - DNA, 120 bp, Artificial Sequence
  ENSG00000103245_40 (sequence is synthesized)
gccttttctggagaagaggctgccctcccgtgggagccacgcgcagtcacctcaggtccctaggcggtgtcgcctgcacgccgagctccgcgtggtggtggggagaacaggaatgagcac

SEQ ID NO: 135969 - DNA, 120 bp, Artificial Sequence
  ENSG00000103245_41 (sequence is synthesized)
agtgactttgctggcctcttgccatgaggctgcaggaaacagagtcctcgctgtgctgtgcggccttccccagcacacctccacccttgttccctcctggttcaggcccttcctcttctg

SEQ ID NO: 135970 - DNA, 120 bp, Artificial Sequence
  ENSG00000103245_42 (sequence is synthesized)
cagcagagggcttcgttctgatccagaggtgctcactgctcacccagaggcagccaggcctgaggctgagggagcaggaggccctgggcagtccgggcctggagcccacccctccggcca

SEQ ID NO: 135971 - DNA, 120 bp, Artificial Sequence
  ENSG00000103245_43 (sequence is synthesized)
ccaggtccacgaggatgcccagcacgacccccacctgaggcccagcgggatagaagcctgaagacactcagccagcagggggcgggagagggcgagggcggccccggtggtgcctgggcc

SEQ ID NO: 135972 - DNA, 120 bp, Artificial Sequence
  ENSG00000103245_44 (sequence is synthesized)
tcgagcgcccatgtcccctgcggcacctcttgcctgactgcacgcggattttcacccggggctggagctggttggttcccccgtgacatccgtttccccggctgctgtgcagtgagacgg

SEQ ID NO: 135973 - DNA, 120 bp, Artificial Sequence
  ENSG00000103245_45 (sequence is synthesized)
aagggcagctcgtgtggtgccgacgtccgtcgtgcgggtggcgcctgcctttttgaggcttggaatcttggtgatttgtcagtgggctccagtggtgaacgtgtcaggccccaaacttca

SEQ ID NO: 135974 - DNA, 120 bp, Artificial Sequence
  ENSG00000103245_46 (sequence is synthesized)
atcgggccgtctcaggtgggccggcctgggcgggcggggtcgaggctgcgctcggtgccctgtcgcgcggagggaaattgctctgcgccccacttcctcccctgaggaatgagatccgaa

SEQ ID NO: 135975 - DNA, 120 bp, Artificial Sequence
  ENSG00000103245_47 (sequence is synthesized)
tcccgggagcccggtctgggccgtcagggactctatcgacccgggcgcggggcctcagacactgaggcccgcttcttaccaacaaggaaactgaggccagggagggcggcgccccccaac

SEQ ID NO: 135976 - DNA, 120 bp, Artificial Sequence
  ENSG00000103245_48 (sequence is synthesized)
ccgctcctgtgccccatggtgtccgggcgggctgcgtgggagggtcccgtggtcgcgggctcgcgccggcctgcccaacccagaggaggcagcagaggcggctcccacacatccctaacc

SEQ ID NO: 135977 - DNA, 120 bp, Artificial Sequence
  ENSG00000103245_49 (sequence is synthesized)
ctaacccgacccctgggtcgcagctggagggcggcggggcccgggccggggcctcttccccttcccctgcgcaggacgccttgtcaggcctcaggacccccaagccacagcctttgcatc

SEQ ID NO: 135978 - DNA, 120 bp, Artificial Sequence
  ENSG00000103245_50 (sequence is synthesized)
tgcataaacgggtgcggtggggaccccacctcatttgagggcagtaggggcggcccgctagacgccccgcagtggctcctcagtagagctgtccttaacgtcgccctggtgggccggaca

SEQ ID NO: 135979 - DNA, 120 bp, Artificial Sequence
  ENSG00000103245_51 (sequence is synthesized)
gctacccttgaacccgggaggctgcaggcgcccttttctgggtgcacctgcctgtccatgtccaacagccccgcggggccagagctgagcagggcgagaggcgggctgctgggagcgctt

SEQ ID NO: 135980 - DNA, 120 bp, Artificial Sequence
  ENSG00000103245_52 (sequence is synthesized)
ccggcagggatgagctgggaggcggctttctgggctgccagggttctcaaggagaagagagagaaatccacttgtttcccgggcactgagcaggaggtggtctccaaacagatccaagca

SEQ ID NO: 135981 - DNA, 120 bp, Artificial Sequence
  ENSG00000103245_53 (sequence is synthesized)
cacgtcctctcgatgggcagtgcaactctggtctctgtggtggtcacgccccctgttcacgtgaagggtgaaggtcagtgttggtggtgtctccgcaggtgggtagtttgcaggcgctgt

SEQ ID NO: 135982 - DNA, 120 bp, Artificial Sequence
  ENSG00000103245_54 (sequence is synthesized)
tagcactggccttcctgcacactgggaacttcagtgccgcaggatgttgggaacccgatccctgggtgagagcagtggggcaggaagaagacggtgggaccagcctcagtccctgagtgc

SEQ ID NO: 135983 - DNA, 120 bp, Artificial Sequence
  ENSG00000103245_55 (sequence is synthesized)
atggctcctggcagagccttcaggctgtgcggctgggcagccatccttgaggcctggcctcccagggaacctccgcccactcacaggggctgatttggggtctcttcctgctctaggagt

SEQ ID NO: 135984 - DNA, 120 bp, Artificial Sequence
  ENSG00000103245_56 (sequence is synthesized)
agtgcggccgtcatggcgtcgcccttcagcggggcgctgcagctgacggacctggatgacttcatcgggccgtctcagatccaagcacacgtcctctcgatgggcagtgcaactctggtc

SEQ ID NO: 135985 - DNA, 120 bp, Artificial Sequence
  ENSG00000103245_57 (sequence is synthesized)
agtgcggccgtcatggcgtcgcccttcagcggggcgctgcagctgacggacctggatgacttcatcgggccgtctcaggagtgcatcaagcctgtcaaagtggaaaaaagggcaggagaa

SEQ ID NO: 135986 - DNA, 120 bp, Artificial Sequence
  ENSG00000103245_58 (sequence is synthesized)
ctggaaggtgctggggtgctggtaggcgtggctgtcggtgcagtggcagttggtttggaggagcctgtcagcctctgcccagcaccctgtggcaggcaaggctttgtgccttggggcaga

SEQ ID NO: 135987 - DNA, 120 bp, Artificial Sequence
  ENSG00000103245_59 (sequence is synthesized)
accaacgtaggaatacaaggcgagctcagattgtgatacacaggcctagcagagagctgggctgcgaggggttcccacacagttcccacccagtcgccttactcctctggctgtattccg

SEQ ID NO: 135988 - DNA, 120 bp, Artificial Sequence
  ENSG00000103245_60 (sequence is synthesized)
aggtacgcagaggatgaggaaatggacggagccagatcccctccgcttccttgtgaaggcggagagactccggggccggagctgcggcgctggcccgaccaacccctgcgccccctgcac

SEQ ID NO: 135989 - DNA, 120 bp, Artificial Sequence
  ENSG00000103245_61 (sequence is synthesized)
aagattcgcattgaagatgacgggagctacttccaaattaaccaagtaaggcacaggaggctgctccaccatctctcctgcccggctgatccgaaacacttttctctgcttcctcccgtc

SEQ ID NO: 135990 - DNA, 120 bp, Artificial Sequence
  ENSG00000103245_62 (sequence is synthesized)
gaccccgagacactccaggtctcaccagtcttttcccactggtcgaattcacctgccatctgggaggctgggggtcagggtgcctggggcaggtgaatgagcagcacccaggccaaacag

SEQ ID NO: 135991 - DNA, 120 bp, Artificial Sequence
  ENSG00000103245_63 (sequence is synthesized)
cttgatctgctcagcagaggggctatttgcagagatggtggatcctgtctgcgtctgcctgttccccctagttctaaccatgtaagattttctaattcagacccctcgttcttttgtttg

SEQ ID NO: 135992 - DNA, 120 bp, Artificial Sequence
  ENSG00000103248_0 (sequence is synthesized)
gcacagcgactgcatcaccatggagccgagggcaggtgtctccaaacaggacatacgtgaacaaatttggggctacatggaatcacaaaatttagctgactttccccgacctgttcatca

SEQ ID NO: 135993 - DNA, 120 bp, Artificial Sequence
  ENSG00000103248_1 (sequence is synthesized)
caggatacccaactttaaggggtcttatctggcttgccaaaacatcaaagacctagacgtttttgccagaacacaggaagttaaagtggaccctgataaaccactggaaggcgttcggct

SEQ ID NO: 135994 - DNA, 120 bp, Artificial Sequence
  ENSG00000103248_2 (sequence is synthesized)
gctggtgctgcagagcaaaaaaacattgttggttccaacaccacgactgagaacgggattgtttaataagatcacaccaccccctggggcaactaaagacatcttgagaaaatgtgccac

SEQ ID NO: 135995 - DNA, 120 bp, Artificial Sequence
  ENSG00000103248_3 (sequence is synthesized)
ctctcagggtgtgaggaactacagtgtccccataggcttggactccagagtcctcgtggatttagttgtggtgggatccgtcgccgtttctgaaaaaggctggagaatcgggaagggaga

SEQ ID NO: 135996 - DNA, 120 bp, Artificial Sequence
  ENSG00000103248_4 (sequence is synthesized)
aggctacgccgatctggaatatgccatgatggtatccatgggcgccgtcagcaaggagacgccggtggtcaccatcgtccacgactgccaggtcgtggacatccctgaagagcttgttga

SEQ ID NO: 135997 - DNA, 120 bp, Artificial Sequence
  ENSG00000103248_5 (sequence is synthesized)
gacatcactgtggactacatcctcactccaaccagagtcatcgccacaggctgcaagcgcccaaagccaatgggaatcacctggttcaagatcagcctggagatgatggagaaaatcccc

SEQ ID NO: 135998 - DNA, 120 bp, Artificial Sequence
  ENSG00000103248_6 (sequence is synthesized)
atactgaggagcctccgcgcccgagagcagcaggctgggaaggatgtcaccctccagggtgagcaccagcaccttccggaaccaggctgccagcagacagtgcccctgagtgttggcagg

SEQ ID NO: 135999 - DNA, 120 bp, Artificial Sequence
  ENSG00000103248_7 (sequence is synthesized)
aggcccccggacacacccggaccagaaaccaattccatggaggcagcccctggctccccaccaggggagggtgccccgcttgcagccgatgtttacgttgggaacctccccggggacgcc

SEQ ID NO: 136000 - DNA, 120 bp, Artificial Sequence
  ENSG00000103248_8 (sequence is synthesized)
cgtgtgagtgacctgaagagagccctgcgggaactcggctccgtgcccctgcggctcacctggcagggcccgcggcgcagagccttcctccattacccggactctgccgcagcccagcag

SEQ ID NO: 136001 - DNA, 120 bp, Artificial Sequence
  ENSG00000103248_9 (sequence is synthesized)
gccgtctcctgcttgcagggcctgcgcctgggcaccgacaccctgagggtggcgctggccaggcagcagagggacaagtgacctcgtggacagccacggagctcactgcagactcgccat

SEQ ID NO: 136002 - DNA, 120 bp, Artificial Sequence
  ENSG00000103248_10 (sequence is synthesized)
tgctcgggtctcaattcttctcagaagtcaccgctcagtgaacgcccaggccctcctgtgagtggggaagccgccctgcggttcatctcacagcgcgcagagactgcagcctcccaatcg

SEQ ID NO: 136003 - DNA, 120 bp, Artificial Sequence
  ENSG00000103248_11 (sequence is synthesized)
gtttctctggagggacagagcagaggggccagggactgagtgagtggctaagcaggggagggtgatgtgaaggtgatctcgagtttgccaggggtgggctgaacaggagaagatgaacaa

SEQ ID NO: 136004 - DNA, 120 bp, Artificial Sequence
  ENSG00000103248_12 (sequence is synthesized)
aggatccggctctcaaaaggccctggcagggactggatgctgggtacagaagcgcgcccttgggcttcaggctcctgagctggcagcacggcagggagagctccatccatgtcgcaggag

SEQ ID NO: 136005 - DNA, 120 bp, Artificial Sequence
  ENSG00000103248_13 (sequence is synthesized)
cccaggaagctcagcccctgggtaaaaagtgctcactgcagctcagatcagtcctcaggtcacatttcggggagccagcctcccctcttcccctccccagccccgctcctccctctgtgg

SEQ ID NO: 136006 - DNA, 120 bp, Artificial Sequence
  ENSG00000103248_14 (sequence is synthesized)
acacactccgggccctcagccagctggctgcatgaggagcagctttgtgctgtgggagagaccggctctgggagaatgggtttcatcccagcctacgtcacatttgcccagtgccttatg

SEQ ID NO: 136007 - DNA, 120 bp, Artificial Sequence
  ENSG00000103248_15 (sequence is synthesized)
ttttctgggtttttttcctccagttctgtttctaaaaaccagcttgagtttggctgaactgtcctttctcaacagaagcgcttttgcaattgatcccgggcaacaagtcaaaataagctt

SEQ ID NO: 136008 - DNA, 120 bp, Artificial Sequence
  ENSG00000103248_16 (sequence is synthesized)
ttaagtggagattttgtttttttcaaatgtatatgctttggaaattttgattttttagccagagggttttaccaagtgttctttgaagcacattacgatgcctcgagagggcggcccgtg

SEQ ID NO: 136009 - DNA, 120 bp, Artificial Sequence
  ENSG00000103248_17 (sequence is synthesized)
cacgcgctttcaagaaaatgttctcgggacactcggtcttctctttgaaaggacattttctcattggttttgccgtgaaaatcctgtggagacttcgcaaagaaaacgcagccttacatt

SEQ ID NO: 136010 - DNA, 120 bp, Artificial Sequence
  ENSG00000103248_18 (sequence is synthesized)
tgctcattaaagacagatttccttcccaagtcgccatgaataaaatgagagagtagaaacgtctggaagcgccacacctggccctgggccctcggccctctgtgtccttggccttgcccc

SEQ ID NO: 136011 - DNA, 120 bp, Artificial Sequence
  ENSG00000103248_19 (sequence is synthesized)
cgcccgcacggctggtcacgtttgtcattgggcattcagctcagcgtcagaggctgactcagtccccagttcagagtagtcacctggttacactgaactcctcaccttcttttctctctt

SEQ ID NO: 136012 - DNA, 120 bp, Artificial Sequence
  ENSG00000103248_20 (sequence is synthesized)
tttttaaaaaatacttctttttctgaaagattcttatttttttttttttgtttacctttttcctgtggatttgctgccgttagaatagcaactccaggagaagagcaagtgagtcagccc

SEQ ID NO: 136013 - DNA, 120 bp, Artificial Sequence
  ENSG00000103248_21 (sequence is synthesized)
cccttctccactccctgccccaccggcagtgggcacagccctgcagacaggagcaaggacttcggggaatagacccactggggccgggagagggagaagctggattctgaccccaccact

SEQ ID NO: 136014 - DNA, 120 bp, Artificial Sequence
  ENSG00000103248_22 (sequence is synthesized)
ggcactcctgtgtccagccatgcctgacgcccaccccaccctcagacggcgggattaaaccaggcagtacagggttactcggggaagccagactgctgggatttcctgtcgctttagcca

SEQ ID NO: 136015 - DNA, 120 bp, Artificial Sequence
  ENSG00000103248_23 (sequence is synthesized)
gaataatccaggtatatggatatacagataatctgaaagagtttctcatttttatatttgtggaacatcgtgtaagaaaaactgaagagcaagtgcctgaaataaaatcccccacatgta

SEQ ID NO: 136016 - DNA, 120 bp, Artificial Sequence
  ENSG00000103248_24 (sequence is synthesized)
caggatacccaactttaagggcgcttctcatgctgccgagcaactcccacgcttgcaggcgttcaaaacggccaggaccattaaagtaaatcctgatgccccccagaaaagtgctcgctt

SEQ ID NO: 136017 - DNA, 120 bp, Artificial Sequence
  ENSG00000103248_25 (sequence is synthesized)
ctcctcctcttttaagtgttttctgtctggcatgggagctgttggcaatcccagcatggctgtatgttagaatcacccaaggagcttttgagcaatttggctcctgaatgaccatgtcca

SEQ ID NO: 136018 - DNA, 120 bp, Artificial Sequence
  ENSG00000103248_26 (sequence is synthesized)
tattgatgcttaacttggggcctgtgtacttcttgtagtttggaggcccatgaatagtctttatcgaccctgggaaattgtacagaaaattgtgggtgagtcattcttgggagggaaccc

SEQ ID NO: 136019 - DNA, 120 bp, Artificial Sequence
  ENSG00000103248_27 (sequence is synthesized)
cagctcctcacaaaggctcctctctcaccctgccaaggataaggaccattgctctaaattacatattattctgaatgtaatgagagcattgatactagttgaactatttcatcttgtaga

SEQ ID NO: 136020 - DNA, 120 bp, Artificial Sequence
  ENSG00000103248_28 (sequence is synthesized)
acaatttacagttgtctagctcatgtgctgccctgtactgcgacatattcacttctgttggaggcctgcaggtgaccatggcttgcctcttgatgaccatgctcatgtgaaagcttggtg

SEQ ID NO: 136021 - DNA, 120 bp, Artificial Sequence
  ENSG00000103248_29 (sequence is synthesized)
cccaaaagaaaaataaaaagcatctctaaagaatgagaattgtcaaaaaggactacacagtgtctgtctgtttcttttttgcacagggcacggtggtccaggcgtcacctgacttgtcct

SEQ ID NO: 136022 - DNA, 120 bp, Artificial Sequence
  ENSG00000103248_30 (sequence is synthesized)
gacccataggcagcccccagtgcaaactgccccacaggacagagccatcaggccttcaccatttaggctgcatcaagccagttccagtctgttccaaggggcccgctgccgtagctaatt

SEQ ID NO: 136023 - DNA, 120 bp, Artificial Sequence
  ENSG00000103248_31 (sequence is synthesized)
gattagaaaaatccagataaagccaaagatgtcctttgtctgcaagtcgcatacaattgagacttaagtttcgcatagcgttactgatttcatagtttgatgacccatcgctaggaagtg

SEQ ID NO: 136024 - DNA, 120 bp, Artificial Sequence
  ENSG00000103248_32 (sequence is synthesized)
ttttcaaagctgtgtttcagacttgccttgcttctgcatttttggctgtgcattgaagggggtgacccctgagagacgttccttcaggggagaggagacccctgtggtcttattaaagtc

SEQ ID NO: 136025 - DNA, 120 bp, Artificial Sequence
  ENSG00000103248_33 (sequence is synthesized)
ctcatcccacccaaaggtacaggtagggggcagatgcggaggcagctccccattattctgggggggtcattaggggagctgccttttgtgaccctataatcccaatagtagcaatcttag

SEQ ID NO: 136026 - DNA, 120 bp, Artificial Sequence
  ENSG00000103248_34 (sequence is synthesized)
gtgcctcttctgggtaggaggcctgagcagagagccccagctttactttcctgcttctgggcctggaggaaaatggaggcccaaccctgcagcctccacagctcgtggcaaacgctccag

SEQ ID NO: 136027 - DNA, 120 bp, Artificial Sequence
  ENSG00000103248_35 (sequence is synthesized)
agcccccgtgagtgctgacttcccttaagccaggggcgaggggcagagctacagactggtgacatcgtctgtgtgagatagtgggtgggacagtgggagtcccatgtccctggggctcag

SEQ ID NO: 136028 - DNA, 120 bp, Artificial Sequence
  ENSG00000103248_36 (sequence is synthesized)
accacttggcatccagtccacgtgtgcagcacagccagtagtcagaggtgtggatgcgtgtgtggcaggtgcccctgcgattctgtccctgaaagagctgcaactgctttgcttttcaga

SEQ ID NO: 136029 - DNA, 120 bp, Artificial Sequence
  ENSG00000103248_37 (sequence is synthesized)
ttttcattctttttaagtatgagtcttgctaacataaagctgacatgagtgtgatctgtttccctttgtgacatgcttgaacggtccagtgttcacgtcattgtagtttcaccacctgac

SEQ ID NO: 136030 - DNA, 120 bp, Artificial Sequence
  ENSG00000103248_38 (sequence is synthesized)
attggccgtgttgttattcctgttgaatgcccaaaagtccatcgtcagtgtgggctgcttgtgggcatttggtgggcatttctgtgaaaatttctatagattagctcgggatattgggtt

SEQ ID NO: 136031 - DNA, 120 bp, Artificial Sequence
  ENSG00000103248_39 (sequence is synthesized)
ggttcgggtcgaaccagcggctctctcgcccggaatcccgagaaagatgtcaggaaaaataaagataacgagaagacgaggcgggagggacacctgccgtgcacgtgggggagcccgtgg

SEQ ID NO: 136032 - DNA, 120 bp, Artificial Sequence
  ENSG00000103248_40 (sequence is synthesized)
gccccttgaggtcggggaaactgaggctcaggaacaggatcggaagccggtttgacctacacgcgggggtcgcttaactactgttaagcggtttcagcatgggctctggaattcctttgt

SEQ ID NO: 136033 - DNA, 120 bp, Artificial Sequence
  ENSG00000103248_41 (sequence is synthesized)
gggcagtggatggcaccaggcaccgtggagcaggagcgtcgctcctcggggaggctctagctgcacaggagcccgccggtgggggtggggaggctcaggcatggcaggctgcaggtcttg

SEQ ID NO: 136034 - DNA, 88 bp, Artificial Sequence
  ENSG00000103248_42 (sequence is synthesized)
gggggtggggaggctcaggcatggcaggctgcaggtcttggggaggcagctaaggcccggcgagaaatagagcacagcagctgggcca

SEQ ID NO: 136035 - DNA, 120 bp, Artificial Sequence
  ENSG00000103248_43 (sequence is synthesized)
ccagtccagaaaggggctcccacagtgcagctgcgggatgaagggctcctcaagcacggccagagtaggcgccaaggccgaggaggcgccgagagggaccgagggctgccagcacgctgt

SEQ ID NO: 136036 - DNA, 120 bp, Artificial Sequence
  ENSG00000103248_44 (sequence is synthesized)
cacctttcaaggggtcttatctggcttgccaaaacatcaaagacctagacgtttttgccagaacacaggaagttaaagtggaccctgataaaccactggaaggcgttcggctgctggtgc

SEQ ID NO: 136037 - DNA, 120 bp, Artificial Sequence
  ENSG00000103248_45 (sequence is synthesized)
ggtggggggcctggcggggctccggggcggctgggaatggggagggacagccgggaccggtgagggtcgaggcggggccaccggggctggcagaggatggggcagaatcaccggaagcgg

SEQ ID NO: 136038 - DNA, 120 bp, Artificial Sequence
  ENSG00000103248_46 (sequence is synthesized)
actacgcgccagaacctgcgccgggaagcgtcgcacagcgactgcatcaccatggagccgagggtgtctccaaacaggacatacgtgaacaaatttggggctacatggaatcacaaaatt

SEQ ID NO: 136039 - DNA, 120 bp, Artificial Sequence
  ENSG00000103248_47 (sequence is synthesized)
gagacaggatagaatttccaaaacatgctccattggaaattgcctcaccagttctaattggtcagtgcctgcccccgtggaccctgcgagatgatgagaacacagggtttcctgcagtgc

SEQ ID NO: 136040 - DNA, 120 bp, Artificial Sequence
  ENSG00000103248_48 (sequence is synthesized)
agggtttcctggactaagcccccttctgtgactgtcgggagacccccaagccacccgtatgcactgatccatacggaacttgtcatagcactgcaggcagatcccaccgccacatcgaat

SEQ ID NO: 136041 - DNA, 120 bp, Artificial Sequence
  ENSG00000103248_49 (sequence is synthesized)
gatcagttactgctggatacgggactgaaaatggctttttcctgagtcttacataaaccgtgttatgagaaccatgaacatattcagcttccctattctttatatgcatgcctgcattag

SEQ ID NO: 136042 - DNA, 120 bp, Artificial Sequence
  ENSG00000103248_50 (sequence is synthesized)
tataaagcggtacacttttgggacattttggttgaagggataattttttagaagcgagtatattgtacataaagatagtggccttcaggattttatattgaataaatatgtcatacagtg

SEQ ID NO: 136043 - DNA, 120 bp, Artificial Sequence
  ENSG00000103248_51 (sequence is synthesized)
gattaggtaatggcacaggttgcaaattagtctgcagtaggagtttgaccctgcaaatcagcctgtaggttatgatgctgtctctgctggcaaacagccagaattactgagaagacattt

SEQ ID NO: 136044 - DNA, 120 bp, Artificial Sequence
  ENSG00000103248_52 (sequence is synthesized)
gtgcttcgtgtggacaaaactactggtcaaataagcatacgtgtccacgtctcccattctttaatcccaaatcattcaccgtttgaatccctcctttgggcatggaaaattaacaacatc

SEQ ID NO: 136045 - DNA, 120 bp, Artificial Sequence
  ENSG00000103248_53 (sequence is synthesized)
acctctaaggatgaacacagaatacctgctgcttttgccacagcccagccgggactttccctgcaggtgtcctgggcaggcactgctggggactcccaggtgtgcactcctcggttggcc

SEQ ID NO: 136046 - DNA, 120 bp, Artificial Sequence
  ENSG00000103248_54 (sequence is synthesized)
gctgatgaacgcagagggaacagcctttgtaacccagagtgtatgggcggccctctaagcgcaccaggagcactgggaaagaaggtggtcactgctcttccaggaaatgaaaatatccct

SEQ ID NO: 136047 - DNA, 120 bp, Artificial Sequence
  ENSG00000103249_0 (sequence is synthesized)
aacaaacacgggggcagccggcgcttcccggccggtgtcgctccgcggcgggccatggccaacgtctctaagaaggtgtcctggtccggccgggaccgggacgacgaggaggcggcgccg

SEQ ID NO: 136048 - DNA, 120 bp, Artificial Sequence
  ENSG00000103249_1 (sequence is synthesized)
ctgctgcggaggacggcgcggcccggcggggggacgccgctgctgaacggggctgggcctggggctgcgcgccagtcaccacgttctgcgcttttccgagtcggacatatgagcagcgtg

SEQ ID NO: 136049 - DNA, 120 bp, Artificial Sequence
  ENSG00000103249_2 (sequence is synthesized)
gagctggatgatgaacttttggacccggatatggaccctccacatcccttccccaaggagatcccacacaacgagaagctcctgtccctcaagtatgagagcttggactatgacaacagt

SEQ ID NO: 136050 - DNA, 120 bp, Artificial Sequence
  ENSG00000103249_3 (sequence is synthesized)
gagaaccagctgttcctggaggaggagcggcggatcaatcacacggccttccggacggtggagatcaagcgctgggtcatctgcgccctcattgggatcctcacgggcctcgtggcctgc

SEQ ID NO: 136051 - DNA, 120 bp, Artificial Sequence
  ENSG00000103249_4 (sequence is synthesized)
ttcattgacatcgtggtggaaaacctggctggcctcaagtacagggtcatcaagggcaatatcgacaagttcacagagaagggcggactgtccttctccctgttgctgtgggccacgctg

SEQ ID NO: 136052 - DNA, 120 bp, Artificial Sequence
  ENSG00000103249_5 (sequence is synthesized)
aacgccgccttcgtgctcgtgggctctgtgattgtggctttcatagagccggtggctgctggcagcggaatcccccagatcaagtgcttcctcaacggggtgaagatcccccacgtggtg

SEQ ID NO: 136053 - DNA, 120 bp, Artificial Sequence
  ENSG00000103249_6 (sequence is synthesized)
cggctcaagacgttggtgatcaaagtgtccggtgtgatcctgtccgtggtcgggggcctggccgtgggaaaggaagggccgatgatccactcaggttcagtgattgccgccgggatctct

SEQ ID NO: 136054 - DNA, 120 bp, Artificial Sequence
  ENSG00000103249_7 (sequence is synthesized)
cagggaaggtcaacgtcactgaaacgagatttcaagatcttcgagtacttccgcagagacacagagaagcgggacttcgtctccgcaggggctgcggccggagtgtcagcggcgtttgga

SEQ ID NO: 136055 - DNA, 120 bp, Artificial Sequence
  ENSG00000103249_8 (sequence is synthesized)
gcccccgtgggtggggtcctgttcagcttggaggagggtgcgtccttctggaaccagttcctgacctggaggatcttctttgcttccatgatctccacgttcaccctgaattttgttctg

SEQ ID NO: 136056 - DNA, 120 bp, Artificial Sequence
  ENSG00000103249_9 (sequence is synthesized)
agcatttaccacgggaacatgtgggacctgtccagcccaggcctcatcaacttcggaaggtttgactcggagaaaatggcctacacgatccacgagatcccggtcttcatcgccatgggc

SEQ ID NO: 136057 - DNA, 120 bp, Artificial Sequence
  ENSG00000103249_10 (sequence is synthesized)
gtggtgggcggtgtgcttggagcagtgttcaatgccttgaactactggctgaccatgtttcgaatcaggtacatccaccggccctgcctgcaggtgattgaggccgtgctggtggccgcc

SEQ ID NO: 136058 - DNA, 120 bp, Artificial Sequence
  ENSG00000103249_11 (sequence is synthesized)
gtcacggccacagttgccttcgtgctgatctactcgtcgcgggattgccagcccctgcaggggggctccatgtcctacccgctgcagctcttttgtgcagatggcgagtacaactccatg

SEQ ID NO: 136059 - DNA, 120 bp, Artificial Sequence
  ENSG00000103249_12 (sequence is synthesized)
gctgcggccttcttcaacaccccggagaagagcgtggtgagcctcttccacgacccgccaggctcctacaaccccctgaccctcggcctgttcacgctggtctacttcttcctggcctgc

SEQ ID NO: 136060 - DNA, 120 bp, Artificial Sequence
  ENSG00000103249_13 (sequence is synthesized)
tggacctacgggctcacggtgtctgccggggtcttcatcccgtccctgctcatcggggctgcctggggccggctctttgggatctccctgtcctacctcacgggggcggcgatctgggcg

SEQ ID NO: 136061 - DNA, 120 bp, Artificial Sequence
  ENSG00000103249_14 (sequence is synthesized)
gaccccggcaaatacgccctgatgggagctgctgcccagctgggcgggattgtgcggatgacactgagcctgaccgtcatcatgatggaggccaccagcaacgtgacctacggcttcccc

SEQ ID NO: 136062 - DNA, 120 bp, Artificial Sequence
  ENSG00000103249_15 (sequence is synthesized)
atcatgctggtgctcatgaccgccaagatcgtgggcgacgtcttcattgagggcctgtacgacatgcacattcagctgcagagtgtgcccttcctgcactgggaggccccggtcacctca

SEQ ID NO: 136063 - DNA, 120 bp, Artificial Sequence
  ENSG00000103249_16 (sequence is synthesized)
cactcactcactgccagggaggtgatgagcacaccagtgacctgcctgaggcggcgtgagaaggtcggcgtcattgtggacgtgctgagcgacacggcgtccaatcacaacggcttcccc

SEQ ID NO: 136064 - DNA, 120 bp, Artificial Sequence
  ENSG00000103249_17 (sequence is synthesized)
tgtttgtggagcggtccaacctgggcctggtacagcggcgcctgaggctgaaggacttccgagacgcctacccgcgcttcccacccatccagtccatccacgtgtcccaggacgagcggg

SEQ ID NO: 136065 - DNA, 120 bp, Artificial Sequence
  ENSG00000103249_18 (sequence is synthesized)
agtgcaccatggacctctccgagttcatgaacccctccccctacacggtgccccaggaggcgtcgctcccacgggtgttcaagctgttccgggccctgggcctgcggcacctggtggtgg

SEQ ID NO: 136066 - DNA, 120 bp, Artificial Sequence
  ENSG00000103249_19 (sequence is synthesized)
tggacaaccgcaatcaggttgtcgggttggtgaccaggaaggacctcgccaggtaccgcctgggaaagagaggcttggaggagctctcgctggcccagacgtgaggcccagccctgccca

SEQ ID NO: 136067 - DNA, 120 bp, Artificial Sequence
  ENSG00000103249_20 (sequence is synthesized)
taatgggcactggcgctggcaccccggcccttctgcatttcctcccggagtcactggtttctcggcccaaaccatgctccccagcagtggcaatggcgagcaccctgcagctgggcgggc

SEQ ID NO: 136068 - DNA, 120 bp, Artificial Sequence
  ENSG00000103249_21 (sequence is synthesized)
aggcggcaggcgcggaactgaccctctcgcgggactgaccctgttgtgggcagtggtctccccccttggcgcctccttgcgcaggcccagcctccactctcctcgtctaggtttctttac

SEQ ID NO: 136069 - DNA, 120 bp, Artificial Sequence
  ENSG00000103249_22 (sequence is synthesized)
ctccagggatcagctgtgtgtgtgtgacctccctaccgggctatcggcctcttgggagccagcggcagggccggcacctgcgtgcctgtgcccgtgtgcgtgagacagagcccttgcccc

SEQ ID NO: 136070 - DNA, 120 bp, Artificial Sequence
  ENSG00000103249_23 (sequence is synthesized)
tgctgctgccccgagggctgccctgccctggaagggcccctctgcctccacaccagtggagtcttcgagacttgggagctgcttggcctcattttcagccatgagcagacggcctgtggt

SEQ ID NO: 136071 - DNA, 120 bp, Artificial Sequence
  ENSG00000103249_24 (sequence is synthesized)
ccctgggcctgaggcacggactcgtagcaccagggtttggaggctgcgaccgccccggagagcagcttcacactggcgccacagaggagccccacgtgcactccccggcctgcatccggc

SEQ ID NO: 136072 - DNA, 120 bp, Artificial Sequence
  ENSG00000103249_25 (sequence is synthesized)
ttgggtacacaggcccagaggactggggtgactcacgggccctgtgctgtgatgttgagagctgagaaaaacctccaaggccctgagccccatgcccagccctgccttggtcccccaacc

SEQ ID NO: 136073 - DNA, 120 bp, Artificial Sequence
  ENSG00000103249_26 (sequence is synthesized)
cccagagcttggagtctgggccccacacccagccctgccttggtccctgagcctcagagcgtggaattgctgccctgtggacactggctgggaaggcaggtcttcccctagcacatgggg

SEQ ID NO: 136074 - DNA, 120 bp, Artificial Sequence
  ENSG00000103249_27 (sequence is synthesized)
accccggcctcgagggtgacctccctaccccgcccctgccagccaccaagcgcaggtgcagcgggggccagactcctgccggcctcagaggacacctggcccagcacaggcagctagaag

SEQ ID NO: 136075 - DNA, 120 bp, Artificial Sequence
  ENSG00000103249_28 (sequence is synthesized)
gctagaagggccggtgggcaccggggccgggaagcccccacctcaccacctgagggcccctgggaggctcctctggcctggctgggctgggtctggggccgccacaggcccctcacgggg

SEQ ID NO: 136076 - DNA, 120 bp, Artificial Sequence
  ENSG00000103249_29 (sequence is synthesized)
gcaacttcagtgtccctgttagagcaacacgggtccctccgtggggggctgggtgcggccccctgccgtgtatttcctccccagggagtggggcctccccgggagctgacgccaccaccc

SEQ ID NO: 136077 - DNA, 120 bp, Artificial Sequence
  ENSG00000103249_30 (sequence is synthesized)
tgcttagccctcacagggccccaaggtgtccgagtgtgttgggtctgaacgcgaaataaagaaatcctctcagcccgcctttgccagcgtcgtccctcccaccccacccagaccacgtcc

SEQ ID NO: 136078 - DNA, 120 bp, Artificial Sequence
  ENSG00000103249_31 (sequence is synthesized)
aacagcctgggactttcgggaccctggggtcggggcaccgtgtggagtgagaaaggcgtgaaagacagcggctgcggccacccagggcaccagccacatcctcttcctcgtccccgcccc

SEQ ID NO: 136079 - DNA, 120 bp, Artificial Sequence
  ENSG00000103249_32 (sequence is synthesized)
tcagcctccctcctctggctcctggctggtgggtctgggggcaaggcagaggcgctccaggtggaggggggcgggccggggtgcccacgctggggtgacgcaagaagaaaactcccgggc

SEQ ID NO: 136080 - DNA, 120 bp, Artificial Sequence
  ENSG00000103249_33 (sequence is synthesized)
ctcagagtcggcgccggaaacctaggtctgggtttccctcgtggtggttgtgtactgaggacctggaagtgatcatattttggatatattcggttaaataaaatcagcggttaggattca

SEQ ID NO: 136081 - DNA, 120 bp, Artificial Sequence
  ENSG00000103249_34 (sequence is synthesized)
ggcttgcgggctccaggcagccccgcgtttcctgtccagcggcttcacacctcaccagcccgcagaggtaactgtgggagttggtggcgtgtgacgggcatgtgtggccgggctcctccg

SEQ ID NO: 136082 - DNA, 120 bp, Artificial Sequence
  ENSG00000103249_35 (sequence is synthesized)
cgaggcagtgcggccgtcactaccacttctagaatgttccgtcatcccagaatggaaaccctgtgcccaccgaccctcgtgccccgctttctgcagcctccatgcctgggttctgtggcc

SEQ ID NO: 136083 - DNA, 120 bp, Artificial Sequence
  ENSG00000103249_36 (sequence is synthesized)
cagcctgatgttcccggggctctctgtgtcgtgtgtgccggggtttcactcctcatgctggacggtgctccctagttggcctgggctgctgcgtggtgactgtgccctctgcatcctcca

SEQ ID NO: 136084 - DNA, 120 bp, Artificial Sequence
  ENSG00000103249_37 (sequence is synthesized)
tgcctgccactcccctgttgctcgggtgctgagcgcctggttcaggccaaggatgcagcctccgcagcagggtgtactgtgctaggttgttctgtgtgtatgtacgcggccacgaggttt

SEQ ID NO: 136085 - DNA, 120 bp, Artificial Sequence
  ENSG00000103249_38 (sequence is synthesized)
accccggcaaatacgccctgatgggagctgctgcccagctgggtatgtcccagctcttgcccgatgggtggggagctccacggggtctggagggggccatggctgtccttgcggggctag

SEQ ID NO: 136086 - DNA, 120 bp, Artificial Sequence
  ENSG00000103249_39 (sequence is synthesized)
ggtctgggagcaggtggatgggatgggtgctgcagagaaggcagtggccacgtgaccctgagccaggagggtggacgtgctggggttcatgatggctcccgcaggcgggattgtgcggat

SEQ ID NO: 136087 - DNA, 120 bp, Artificial Sequence
  ENSG00000103249_40 (sequence is synthesized)
agtgagaatgactgagcgcctttatctgccatctttctgtgtggggatcagtcccgactttcaggtgatcttgggagtgacgagtatttgtactcagtctcccttcgcaccgagttgaat

SEQ ID NO: 136088 - DNA, 120 bp, Artificial Sequence
  ENSG00000103249_41 (sequence is synthesized)
ttgcaatgtgcaggcaaacacaataagcagcaagtcagaggttggaatgcgttccgcatgtcaccctgcagcgtgcgtctgagcagtgttaagtcaccacgttctgcgcttttccgagtc

SEQ ID NO: 136089 - DNA, 120 bp, Artificial Sequence
  ENSG00000103249_42 (sequence is synthesized)
ccgacgtttgtgtgctgagctccccttccctgaggccccgacgtgtctgctgctctcctcagctcctggggctcctggggctgaggggctgcatctgtctcagcctggccgtgacccact

SEQ ID NO: 136090 - DNA, 120 bp, Artificial Sequence
  ENSG00000103249_43 (sequence is synthesized)
aaagtgcacatggccactccagctggagcctgaggccgccgggcccgcgagggccgccacgcccatgtgtgtctctgagcaccggtccttctggtctccaggaagggccgcgtcacgcgt

SEQ ID NO: 136091 - DNA, 120 bp, Artificial Sequence
  ENSG00000103249_44 (sequence is synthesized)
gtctctgagcaccggtccttctggtctccaggaagggccgcgtcacgcgtgtctctgagcaccggtccttctggtctccaggaagggccgcgtcacgcgtgtctctgagcatcggtcctt

SEQ ID NO: 136092 - DNA, 120 bp, Artificial Sequence
  ENSG00000103249_45 (sequence is synthesized)
ctggtctccaggaagggccgcgtcacgcgtgtctctgagcatcggtccttctggtctccaggaagggccgcgtcacgcgtgtctctgagcaccggtccttctggtctccaggaagggccg

SEQ ID NO: 136093 - DNA, 120 bp, Artificial Sequence
  ENSG00000103249_46 (sequence is synthesized)
cgtaagttcctgctgatggctgcctcctgatcagggtgcatgctgcgctctcatttcccaccatggggtccaccttggggccacccatcgagctgcggctggagctggaccccctgtggg

SEQ ID NO: 136094 - DNA, 120 bp, Artificial Sequence
  ENSG00000103249_47 (sequence is synthesized)
tctgtcaggccttggtcctgcccaaagcagcggtcctgcctttgctgcccagttcgcccttggtcctgggcaccattgccagccctgggtggctcccgggtaggggatcaaacagccggg

SEQ ID NO: 136095 - DNA, 76 bp, Artificial Sequence
  ENSG00000103249_48 (sequence is synthesized)
cgccgggaaggtctggttctgaaggcagtttctgggatggcggtttggggagcccgtctccttcaggggtgagcac

SEQ ID NO: 136096 - DNA, 120 bp, Artificial Sequence
  ENSG00000103249_49 (sequence is synthesized)
agggctagacacggccccctgctgggcctaggccgtgtgtgtcctcctttccctccgtgaccatggcttgggccttgtgtgtcctccttgccctctgtgaccgtggccctgacccaatgg

SEQ ID NO: 136097 - DNA, 120 bp, Artificial Sequence
  ENSG00000103249_50 (sequence is synthesized)
caggatcgtgtggtttcgcgcctgatgctggccaggcacagggtacacggcctctcacggcgacaccaggtttgtgcctgcagcccaccagctcatctcccctcccaacgtgtgctctct

SEQ ID NO: 136098 - DNA, 120 bp, Artificial Sequence
  ENSG00000103249_51 (sequence is synthesized)
ggcaggacaaaagtgtcgcacctcacgtggttcacgggccgtgggcgttgtcctcgcgtggttcacgggccgtgggcgttgtcctgctgtggtggcagcgtgtactgtggcagcgcagcc

SEQ ID NO: 136099 - DNA, 120 bp, Artificial Sequence
  ENSG00000103249_52 (sequence is synthesized)
catgtgtggagtctggaccaggcgaaggtagggggcggaggctcgtgtccttattcttgagaatgtgatgaaaagcagaggtgattgtgggctgctgcagagctgtttctagactccatg

SEQ ID NO: 136100 - DNA, 120 bp, Artificial Sequence
  ENSG00000103249_53 (sequence is synthesized)
gggtggatgtccggccagggctgctctctgtgaggccgggggccagagcggcatacactgccctccagacctcagcccccgcaggccttccttctctgcctgcctctgctgggactgggt

SEQ ID NO: 136101 - DNA, 120 bp, Artificial Sequence
  ENSG00000103249_54 (sequence is synthesized)
tctcttatgtgtcttctgtttctcatttcagtcgcttaaataagactgaaaacctgtaagaggccctggcaggaagcccccggccatgcttctcatccccggcaggaagcgcccactcct

SEQ ID NO: 136102 - DNA, 120 bp, Artificial Sequence
  ENSG00000103249_55 (sequence is synthesized)
gctccccaggcccgtgtgctctgcccatctccctccgcacaagggtttggtttggtttttaaaattgaaacatgattcaaataccgtaaaactcatcgttttaaagagggcagttcagcg

SEQ ID NO: 136103 - DNA, 120 bp, Artificial Sequence
  ENSG00000103249_56 (sequence is synthesized)
gtgtttgggatgcgctgtggagcctggaggtcagccctgctgcgcacatgaacaggctttgaatttggctcatctctaggggagcccatgggaagctaggaccccattcctgaagggccc

SEQ ID NO: 136104 - DNA, 120 bp, Artificial Sequence
  ENSG00000103249_57 (sequence is synthesized)
cagccttcccctgcagacagactggagaggcggagtctagaggccaagacaccacctcttaggccaggcgtttgtgctctgagcatcggactcgccgatggcctcctgcaaggcctgtag

SEQ ID NO: 136105 - DNA, 120 bp, Artificial Sequence
  ENSG00000103249_58 (sequence is synthesized)
cctccctgttgcccagttttcccgtctgcgaaaaagttaacgcatgcatagcgctgagcacggtgcctgtcacaaactacgctctgaagaaactcaccacgttctgcgcttttccgagtc

SEQ ID NO: 136106 - DNA, 120 bp, Artificial Sequence
  ENSG00000103253_0 (sequence is synthesized)
gccggggctggttggggaccggccgggttccgctcctgctggagcccggtgcgtggaattccacgcgagtgccggggagttcctggggagccgggcttctcttttggcccccagcgtgtt

SEQ ID NO: 136107 - DNA, 120 bp, Artificial Sequence
  ENSG00000103253_1 (sequence is synthesized)
gaccgagcccgcttcgcacagcccttcctagggtgtggagagcgggccccgccctgaaggggcaccgtgggctggggggcctgttttggagcaggcaccggtggccgagctccgtgacca

SEQ ID NO: 136108 - DNA, 120 bp, Artificial Sequence
  ENSG00000103253_2 (sequence is synthesized)
tgaaggtcaaggtcatccccgtgctcgaggacaactacatgtacctggtcatcgaggagctcacgcgcgaggcggtggccgtggacgtggctgtgcccaagaggctgctggagatcgtgg

SEQ ID NO: 136109 - DNA, 120 bp, Artificial Sequence
  ENSG00000103253_3 (sequence is synthesized)
gccgggagggggtgtctctgaccgctgtgctgaccacccaccatcactgggaccacgcgcggggaaacccggagctggcgcggcttcgtcccgggctggcggtgctgggcgcggacgagc

SEQ ID NO: 136110 - DNA, 120 bp, Artificial Sequence
  ENSG00000103253_4 (sequence is synthesized)
gcatcttctcgctgacgcgcaggctggcgcacggcgaggagctgcggttcggggccatccacgtgcgttgcctcctgacgcccggccacaccgccggccacatgagctacttcctgtggg

SEQ ID NO: 136111 - DNA, 120 bp, Artificial Sequence
  ENSG00000103253_5 (sequence is synthesized)
tgttctcgggcgacgcgctgtcggtggccggctgcggctcgtgcctggagggcagcgcccagcagatgtaccagagcctggccgagctgggtaccctgccccccgagacgaaggtgttct

SEQ ID NO: 136112 - DNA, 120 bp, Artificial Sequence
  ENSG00000103253_6 (sequence is synthesized)
gcggccacgagcacacgcttagcaacctggagtttgcccagaaagtggagccctgcaacgaccacgtgagagccaagctgtcctgggctaagaagagggatgaggatgacgtgcccactg

SEQ ID NO: 136113 - DNA, 120 bp, Artificial Sequence
  ENSG00000103253_7 (sequence is synthesized)
tgccgtcgactctgggcgaggagcgcctctacaaccccttcctgcgggtggcagaggagccggtgcgcaagttcacgggcaaggcggtccccgccgacgtcctggaggcgctatgcaagg

SEQ ID NO: 136114 - DNA, 120 bp, Artificial Sequence
  ENSG00000103253_8 (sequence is synthesized)
agcgggcgcgcttcgaacaggcgggcgagccgcggcagccacaggcgcgggccctccttgcgctgcagtgggggctcctgagtgcagccccacacgactgagccacccagaccctcacag

SEQ ID NO: 136115 - DNA, 120 bp, Artificial Sequence
  ENSG00000103253_9 (sequence is synthesized)
ggctggggcctgcgtccctcctcgtgacctcggccagctggacccacatgagggccacctctggaaccttcttcgaggccctggccagccatctgcccagcctcggagggtgggcaacct

SEQ ID NO: 136116 - DNA, 120 bp, Artificial Sequence
  ENSG00000103253_10 (sequence is synthesized)
ggtgcttcccgggtggacacacaggaccactcagtggggcctgtgtgggcgccgagacctgggtgtctgggaagtggggcacacggggcctccgaactatgaataaagctttgaaaggcc

SEQ ID NO: 136117 - DNA, 120 bp, Artificial Sequence
  ENSG00000103253_11 (sequence is synthesized)
tggtaggagcgagcccccacgtgctctgctctccggaagtcattggcggctggggttccttgtttatcttggggctccctgaagttacggcacctctggcctccgccctttcgctgctgc

SEQ ID NO: 136118 - DNA, 120 bp, Artificial Sequence
  ENSG00000103253_12 (sequence is synthesized)
cgcagtcaccgcccgctgggtccccgctccccggcgctccccggggctctggccggcctggggcagtgagcgcggcggatcccgatatggagggagtgggccaccgggaccgtctgtgtt

SEQ ID NO: 136119 - DNA, 120 bp, Artificial Sequence
  ENSG00000103253_13 (sequence is synthesized)
acagcccccacgctccgcaccctcactgtgctaggggtgcagagtgaatgcccacctgagggcagaccgggcaggggaggccaggcccccggcgcaagcactttccccgcttcctggccg

SEQ ID NO: 136120 - DNA, 120 bp, Artificial Sequence
  ENSG00000103253_14 (sequence is synthesized)
ccaccgttacgtggacccttaggaaggcatctggggactgcgtgttgggctgagtgagcatctctggcttgggggaggctgctcattaagtgcctgcctgcccgcccacccctcggcgcc

SEQ ID NO: 136121 - DNA, 80 bp, Artificial Sequence
  ENSG00000103253_15 (sequence is synthesized)
gcgcgtccgcggaggggggcggttggcggctcccgagcccagcgccgcgctcagtccggaccccgtgaccggcggccgag

SEQ ID NO: 136122 - DNA, 120 bp, Artificial Sequence
  ENSG00000103253_16 (sequence is synthesized)
aggcacggcccctttcccgccgcggcaagagggtggggggggagggaacaggcttcggggtggggggggctctcagacaaggcctaatggtgaccggggcctgtggtcactccagaagag

SEQ ID NO: 136123 - DNA, 120 bp, Artificial Sequence
  ENSG00000103253_17 (sequence is synthesized)
cccggccgtgtcccccgagagcctccccgacccccctgctgctggagatcgtgggccgggagggggtgtctctgaccgctgtgctgaccacccaccatcactggtgagcgccggcggggc

SEQ ID NO: 136124 - DNA, 120 bp, Artificial Sequence
  ENSG00000103253_18 (sequence is synthesized)
cacccaccatcactggtgagcgccggcggggcgcggggaggcacgaggacgccgccttgtcccaacccgacctaacccggcccccgcccgcccgcccgcagggaccacgcgcggggaaac

SEQ ID NO: 136125 - DNA, 120 bp, Artificial Sequence
  ENSG00000103253_19 (sequence is synthesized)
tgtgacagaaaatgacactgacccattcccagtgtgcctgcgctccctaacagccaagtccagcggaggagaagtggccttcccacggctcgggccgtctcactgcacagcagccgggga

SEQ ID NO: 136126 - DNA, 120 bp, Artificial Sequence
  ENSG00000103253_20 (sequence is synthesized)
aacggatgtcacgggggaaccaaccagctccagccccgggtgaaaatccgcgtgcagtcaggcaagaggtgccgcaggggacatgggcgctcgaggcccaggcaccaccggggccgccct

SEQ ID NO: 136127 - DNA, 120 bp, Artificial Sequence
  ENSG00000103253_21 (sequence is synthesized)
gctgtcggtggccggctgcggctcgtgcctggagggcagcgcccagcagatgtaccagagcctggccgagctgggtaccctgccccccgagacgacggagtctcactctgccgcccaggc

SEQ ID NO: 136128 - DNA, 66 bp, Artificial Sequence
  ENSG00000103253_22 (sequence is synthesized)
ccccccgggaccactactcccggctaattttcgtatttttagtagacatggggtttcatcatctcg

SEQ ID NO: 136129 - DNA, 73 bp, Artificial Sequence
  ENSG00000103253_23 (sequence is synthesized)
gtagctgggattacaggagcaccaccactactcccggctaattttcgtatttttagtagacatggggtttcat

SEQ ID NO: 136130 - DNA, 120 bp, Artificial Sequence
  ENSG00000103253_24 (sequence is synthesized)
ccatgcccggccacagtttgcttttctgcctcacatttgggagactgtggggctgctcgactcaggaatggggtgactcatgggagctgaagaggctgcattcgagaatctctgcccacc

SEQ ID NO: 136131 - DNA, 120 bp, Artificial Sequence
  ENSG00000103253_25 (sequence is synthesized)
tccaaagactcatttcagagccaacaaggaggtattactgagcgccacctggctgcaggtccccaagacaggccagctgcaaatgggcccacctggctccaaggggagagacgaagtaag

SEQ ID NO: 136132 - DNA, 120 bp, Artificial Sequence
  ENSG00000103253_26 (sequence is synthesized)
gtggctgagacgggacctggaactcagccatcctgcagccaggccggaccccgagggacagtgagcctcactccatttcccagcaagcctcctgccggctctgcggatgtgtccctggac

SEQ ID NO: 136133 - DNA, 120 bp, Artificial Sequence
  ENSG00000103253_27 (sequence is synthesized)
gtgggctccaggcccggactgcccagggcctcctgctccctcagcctcaggcctggctgcctctgggtgagcagtgagcacctctggatcagaacgaagccctctgctgcagaagaggaa

SEQ ID NO: 136134 - DNA, 120 bp, Artificial Sequence
  ENSG00000103253_28 (sequence is synthesized)
ctcatggcaagaggccagcaaagtcacttctggccgctccccagcctgagtctggggctggcccaacgccgttacctgctgctgggcgaagaagtccttgaccagggagcccatgacctg

SEQ ID NO: 136135 - DNA, 120 bp, Artificial Sequence
  ENSG00000103253_29 (sequence is synthesized)
ctgcggggaccgggcggtgctgatgtgggggaggatgaagctgccgtgagtcttctcggcatagcagatccagcctgaggtgacagggggcacacggggctggcgggggcgcacggcggc

SEQ ID NO: 136136 - DNA, 120 bp, Artificial Sequence
  ENSG00000103253_30 (sequence is synthesized)
ccccgcacccacaggcagcagcacgacattctgggggcgggcccgctcatacaggagatcatgatgacattaaagagtgctcattcctgttctccccaccaccacgcggagctcggcgtg

SEQ ID NO: 136137 - DNA, 120 bp, Artificial Sequence
  ENSG00000103253_31 (sequence is synthesized)
caggcgacaccgcctagggacctgaggtgactgcgcgtggctcccacgggagggcagcctcttctccagaaaaggccatttgtgccaacatttccaacccgtcccgcaaaacctgcttgc

SEQ ID NO: 136138 - DNA, 120 bp, Artificial Sequence
  ENSG00000103253_32 (sequence is synthesized)
gtctccaccccccatgcccccgccttgtcatttgtgtccatatcacctcacgtttcaactgcacttgaacttgactctcccaccacccgcaccatgagcacacctgggcaggcagaggcc

SEQ ID NO: 136139 - DNA, 120 bp, Artificial Sequence
  ENSG00000103253_33 (sequence is synthesized)
agcaggggcagcgcctgtctgcagtcggcctgtcctcggaatcgccgcacaaactctcgctggctctccaggaggctgaagtgccttgagaaggcggtgtcgaagacgaagtgcacccct

SEQ ID NO: 136140 - DNA, 120 bp, Artificial Sequence
  ENSG00000103253_34 (sequence is synthesized)
ggaaggtgaaggtgggtgcctggttaaccccatgcgggacgcccacacgagcacacgccggcgtgtggaccaccatggtgctgccagggcacgtgtgtcgcacctgcttgccgtgccaaa

SEQ ID NO: 136141 - DNA, 120 bp, Artificial Sequence
  ENSG00000103253_35 (sequence is synthesized)
gccccggccccaccgtggggacctcctaaagccacgttgcgccaaagccccagccccactgtggggacctcctaaagccacgttgcctcggcatcccctgtgaacccaggccttggtttc

SEQ ID NO: 136142 - DNA, 120 bp, Artificial Sequence
  ENSG00000103253_36 (sequence is synthesized)
ccaccccagaggcagccacccagcagctcagtcctccaccctcccagctcttcagcgtggctggtccagggaattgccacgtgcgctgctcccggtgaccctccctagggcacagctgga

SEQ ID NO: 136143 - DNA, 120 bp, Artificial Sequence
  ENSG00000103253_37 (sequence is synthesized)
cgcagcctgctggactggcccctcggaccctgactgtgcagacctaccatagtggccacccctcacacacagcaggactcctggaacacgccagccagctccaagcccagccattagaac

SEQ ID NO: 136144 - DNA, 120 bp, Artificial Sequence
  ENSG00000103253_38 (sequence is synthesized)
gtgggtccctctctctctgcctgacttgtcattcctccctcgcgtaacccgtggtcggaggactcgctgtgccccacttgcccgtcatcatcatctctaagtaaaaatctttgaacttgc

SEQ ID NO: 136145 - DNA, 120 bp, Artificial Sequence
  ENSG00000103253_39 (sequence is synthesized)
atcttctcgctgacgcgcaggctggcgcacggcgaggagctgcgggtgagcgcgcgctcccgggaggggcggggagggcgccccgggtccacccgccctcacaggtccgcctgctcctcc

SEQ ID NO: 136146 - DNA, 120 bp, Artificial Sequence
  ENSG00000103254_0 (sequence is synthesized)
gctcccggcaggaggcagagggcacaccgccagccccaggccaggctgcgagggccgcggacccgagccgggaaggaccttgggcggacgagccgcgcgtcccgcagccatggagcagga

SEQ ID NO: 136147 - DNA, 120 bp, Artificial Sequence
  ENSG00000103254_1 (sequence is synthesized)
cccgcagccatggagcaggacgacccggtcgaggcgctgacggagctgcgcgagcggcggctgggcgcgctggagctgctgcaggcggcggccggctcgggcttggcagcctacgcggtg

SEQ ID NO: 136148 - DNA, 120 bp, Artificial Sequence
  ENSG00000103254_2 (sequence is synthesized)
tgggcgctgctgctccagcccggcttccggcgcgtgccgctgcggctgcaggtgccctacgtcggcgcgagcgcgcggcaggtggagcacgtgttgtcgctgctgcgaggacgccccgga

SEQ ID NO: 136149 - DNA, 120 bp, Artificial Sequence
  ENSG00000103254_3 (sequence is synthesized)
aggatcgtgctggcggcccacaggtgcggcctccgcccggccgtgggctacgagctgaacccctggctggtggcgctggcgcggctgcacgcctggagggccggctgtgccggcagcgtc

SEQ ID NO: 136150 - DNA, 120 bp, Artificial Sequence
  ENSG00000103254_4 (sequence is synthesized)
tgctatcgccgcaaggatctctggaaggtgagcctgagggactgccgcaacgtgtctgtgttcctggcccctagcgtgctcccgctgctggaggacaagctgcggacagagctgcctgct

SEQ ID NO: 136151 - DNA, 120 bp, Artificial Sequence
  ENSG00000103254_5 (sequence is synthesized)
ggggcccgcgtggtgtctgggcgcttcccactccccacctggcagcctgtgaccgcggttggcgagggcctggaccgagtatgggcttatgatgttcctgagggtgggcaggctggggag

SEQ ID NO: 136152 - DNA, 120 bp, Artificial Sequence
  ENSG00000103254_6 (sequence is synthesized)
gccgcctcctcgcggatacccatccaggctgcccccggacctagttctgcccccatcccggggggccttatttctcaggccagctgagtattagacacgataaagactctgtgggttcta

SEQ ID NO: 136153 - DNA, 120 bp, Artificial Sequence
  ENSG00000103254_7 (sequence is synthesized)
acgtgtctgtgttcctggcccctagcgtggtaggtgcggggttgccagccccgctgggaagccccagccacaccccagggtgtttgctgctctgaggcctgggcctgcctggtgggtgct

SEQ ID NO: 136154 - DNA, 120 bp, Artificial Sequence
  ENSG00000103254_8 (sequence is synthesized)
aggcttggggctaggggggtgagcgcggctgttttctaccggccccgcccccgccccctctactctgctgttctctccctcagctcccgctgctggaggacaagctgcggacagagctgc

SEQ ID NO: 136155 - DNA, 120 bp, Artificial Sequence
  ENSG00000103254_9 (sequence is synthesized)
cgcaaggatctctggaaggtaacctggggatccctggccacccgctgacagcccaaggtgcggctgacacctgcgagggctgggggccgggactcggaagctgcgatgacccggtgccca

SEQ ID NO: 136156 - DNA, 120 bp, Artificial Sequence
  ENSG00000103254_10 (sequence is synthesized)
atcgctcaggctgtaggagggaaatggaaggatgtcctcccgggctctggctggcgctgggtgtccgagtcagcggagcgcccccagcagtctccccgaggcagagtcatgggggtgctg

SEQ ID NO: 136157 - DNA, 120 bp, Artificial Sequence
  ENSG00000103254_11 (sequence is synthesized)
gcgcctggacgctgtctcatcccggggagccgctttcccaccggctccctgggctccagccgccccacgcgagcccccggctggttctggggccaggaccgcccctctccaaggcagact

SEQ ID NO: 136158 - DNA, 120 bp, Artificial Sequence
  ENSG00000103254_12 (sequence is synthesized)
tcccttcattccacgacaaagacgcgcagccccgtttccctggggctctagcccgtgagatcgccgggtgtatcccgactcccgccggcacgtgcgctcccccagggcagggcctgcctg

SEQ ID NO: 136159 - DNA, 120 bp, Artificial Sequence
  ENSG00000103254_13 (sequence is synthesized)
tccccttccgcgggtcgccagcagccagcacaggccgcaaacggcggtccgcagagcggaccaacggagccgaccctcgcaggcttggagccggacgcggcggggcagagcccccgaggc

SEQ ID NO: 136160 - DNA, 120 bp, Artificial Sequence
  ENSG00000103254_14 (sequence is synthesized)
cgctgcggctgcaggtgcggggcggggccaggccgggcaggggagctcggctgccgctcagggtctcaaggtctgggcgtggccggggtgagctccgccccgccgtgtggtagttcgggc

SEQ ID NO: 136161 - DNA, 80 bp, Artificial Sequence
  ENSG00000103257_0 (sequence is synthesized)
cgggcggcgcgcacactgctcgctgggccgcggctcccgggtgtcccaggcccggccggtgcgcagagcatggcgggtgc

SEQ ID NO: 136162 - DNA, 120 bp, Artificial Sequence
  ENSG00000103257_1 (sequence is synthesized)
ggcgccggcggccgaggagaaggaagaggcgcgggagaagatgctggccgccaagagcgcggacggctcggcgccggcaggcgagggcgagggcgtgaccctgcagcggaacatcacgct

SEQ ID NO: 136163 - DNA, 120 bp, Artificial Sequence
  ENSG00000103257_2 (sequence is synthesized)
gctcaacggcgtggccatcatcgtggggaccattatcggctcgggcatcttcgtgacgcccacgggcgtgctcaaggaggcaggctcgccggggctggcgctggtggtgtgggccgcgtg

SEQ ID NO: 136164 - DNA, 120 bp, Artificial Sequence
  ENSG00000103257_3 (sequence is synthesized)
cggcgtcttctccatcgtgggcgcgctctgctacgcggagctcggcaccaccatctccaaatcgggcggcgactacgcctacatgctggaggtctacggctcgctgcccgccttcctcaa

SEQ ID NO: 136165 - DNA, 120 bp, Artificial Sequence
  ENSG00000103257_4 (sequence is synthesized)
gctctggatcgagctgctcatcatccggccttcatcgcagtacatcgtggccctggtcttcgccacctacctgctcaagccgctcttccccacctgcccggtgcccgaggaggcagccaa

SEQ ID NO: 136166 - DNA, 120 bp, Artificial Sequence
  ENSG00000103257_5 (sequence is synthesized)
gctcgtggcctgcctctgcgtgctgctgctcacggccgtgaactgctacagcgtgaaggccgccacccgggtccaggatgcctttgccgccgccaagctcctggccctggccctgatcat

SEQ ID NO: 136167 - DNA, 120 bp, Artificial Sequence
  ENSG00000103257_6 (sequence is synthesized)
cctgctgggcttcgtccagatcgggaagggtgatgtgtccaatctagatcccaacttctcatttgaaggcaccaaactggatgtggggaacattgtgctggcattatacagcggcctctt

SEQ ID NO: 136168 - DNA, 120 bp, Artificial Sequence
  ENSG00000103257_7 (sequence is synthesized)
tgcctatggaggatggaattacttgaatttcgtcacagaggaaatgatcaacccctacagaaacctgcccctggccatcatcatctccctgcccatcgtgacgctggtgtacgtgctgac

SEQ ID NO: 136169 - DNA, 120 bp, Artificial Sequence
  ENSG00000103257_8 (sequence is synthesized)
caacctggcctacttcaccaccctgtccaccgagcagatgctgtcgtccgaggccgtggccgtggacttcgggaactatcacctgggcgtcatgtcctggatcatccccgtcttcgtggg

SEQ ID NO: 136170 - DNA, 120 bp, Artificial Sequence
  ENSG00000103257_9 (sequence is synthesized)
cctgtcctgcttcggctccgtcaatgggtccctgttcacatcctccaggctcttcttcgtggggtcccgggaaggccacctgccctccatcctctccatgatccacccacagctcctcac

SEQ ID NO: 136171 - DNA, 120 bp, Artificial Sequence
  ENSG00000103257_10 (sequence is synthesized)
ccccgtgccgtccctcgtgttcacgtgtgtgatgacgctgctctacgccttctccaaggacatcttctccgtcatcaacttcttcagcttcttcaactggctctgcgtggccctggccat

SEQ ID NO: 136172 - DNA, 120 bp, Artificial Sequence
  ENSG00000103257_11 (sequence is synthesized)
catcggcatgatctggctgcgccacagaaagcctgagcttgagcggcccatcaaggtgaacctggccctgcctgtgttcttcatcctggcctgcctcttcctgatcgccgtctccttctg

SEQ ID NO: 136173 - DNA, 120 bp, Artificial Sequence
  ENSG00000103257_12 (sequence is synthesized)
gaagacacccgtggagtgtggcatcggcttcaccatcatcctcagcgggctgcccgtctacttcttcggggtctggtggaaaaacaagcccaagtggctcctccagggcatcttctccac

SEQ ID NO: 136174 - DNA, 120 bp, Artificial Sequence
  ENSG00000103257_13 (sequence is synthesized)
gaccgtcctgtgtcagaagctcatgcaggtggtcccccaggagacatagccaggaggccgagtggctgccggaggagcatgcgcagaggccagttaaagtagatcacctcctcgaaccca

SEQ ID NO: 136175 - DNA, 120 bp, Artificial Sequence
  ENSG00000103257_14 (sequence is synthesized)
ctccggttccccgcaacccacagctcagctgcccatcccagtccctcgccgtccctcccaggtcgggcagtggaggctgctgtgaaaactctggtacgaatctcatccctcaactgaggg

SEQ ID NO: 136176 - DNA, 120 bp, Artificial Sequence
  ENSG00000103257_15 (sequence is synthesized)
ccagggacccaggtgtgcctgtgctcctgcccaggagcagcttttggtctccttgggccctttttcccttccctcctttgtttacttatatatatattttttttaaacttaaattttggg

SEQ ID NO: 136177 - DNA, 120 bp, Artificial Sequence
  ENSG00000103257_16 (sequence is synthesized)
tcaacttgacaccactaagatgattttttaaggagctgggggaaggcaggagccttcctttctcctgccccaagggcccagaccctgggcaaacagagctactgagacttggaacctcat

SEQ ID NO: 136178 - DNA, 120 bp, Artificial Sequence
  ENSG00000103257_17 (sequence is synthesized)
tgctaccacagacttgcactgaagccggacagctgcccagacacatgggcttgtgacattcgtgaaaaccaaccctgtgggcttatgtctctgccttagggtttgcagagtggaaactca

SEQ ID NO: 136179 - DNA, 120 bp, Artificial Sequence
  ENSG00000103257_18 (sequence is synthesized)
cctgagccagggaacagccccagggttggggggtgccggcatctcccctagctcaccaggcctggcctctgggcagtgtggcctcttggctatttctgtgtccagttttggaggctgagt

SEQ ID NO: 136180 - DNA, 120 bp, Artificial Sequence
  ENSG00000103257_19 (sequence is synthesized)
tctggttcatgcagacaaagccctgtccttcagtcttctagaaacagagacaagaaaggcagacacaccgcggccaggcacccatgtgggcgcccaccctgggctccacacagcagtgtc

SEQ ID NO: 136181 - DNA, 120 bp, Artificial Sequence
  ENSG00000103257_20 (sequence is synthesized)
ccctgccccagaggtcgcagctaccctcagcctccaatgcattggcctctgtaccgcccggcagccccttctggccggtgctgggttcccactcccggcctaggcacctccccgctctcc

SEQ ID NO: 136182 - DNA, 120 bp, Artificial Sequence
  ENSG00000103257_21 (sequence is synthesized)
ctgtcacgctcatgtcctgtcctggtcctgatgcccgttgtctaggagacagagccaagcactgctcacgtctctgccgcctgcgtttggaggcccctgggctctcacccagtccccacc

SEQ ID NO: 136183 - DNA, 120 bp, Artificial Sequence
  ENSG00000103257_22 (sequence is synthesized)
cgcctgcagagagggaactagggcaccccttgtttctgttgttcccgtgaatttttttcgctatgggaggcagccgaggcctggccaatgcggcccactttcctgagctgtcgctgcctc

SEQ ID NO: 136184 - DNA, 120 bp, Artificial Sequence
  ENSG00000103257_23 (sequence is synthesized)
catggcagcagccagggacccccagaacaagaagaccccgcaggatccctcctgagctcggggggctctgccttctcaggccccgggcttcccttctccccagccagaggtggagccaag

SEQ ID NO: 136185 - DNA, 120 bp, Artificial Sequence
  ENSG00000103257_24 (sequence is synthesized)
tggtccagcgtcactccagtgctcagctgtggctggaggagctggcctgtggcacagccctgagtgtcccaagccgggagccaacgaagccggacacggcttcactgaccagcggctgct

SEQ ID NO: 136186 - DNA, 120 bp, Artificial Sequence
  ENSG00000103257_25 (sequence is synthesized)
caagccgcaagctctcagcaagtgcccagtggagcctgccgcccccgcctgggcaccgggaccccctcaccatccagtgggcccggagaaacctgatgaacagtttggggactcaggacc

SEQ ID NO: 136187 - DNA, 120 bp, Artificial Sequence
  ENSG00000103257_26 (sequence is synthesized)
agatgtccgtctctcttgcttgaggaatgaagacctttattcacccctgccccgttgcttcccgctgcacatggacagacttcacagcgtctgctcataggacctgcatccttcctgggg

SEQ ID NO: 136188 - DNA, 120 bp, Artificial Sequence
  ENSG00000103257_27 (sequence is synthesized)
acgaattccactcgtccaagggacagcccacggtctggaggccgaggaccaccagcaggcaggtggactgactgtgttgggcaagacctcttccctctgggcctgttctcttggctgcaa

SEQ ID NO: 136189 - DNA, 120 bp, Artificial Sequence
  ENSG00000103257_28 (sequence is synthesized)
ataaggacagcagctggtgccccacctgcctggtgcattgctgtgtgaatccaggaggcagtggacatcgtaggcagccacggccccgggtccaggagaagtgctccctggaggcacgca

SEQ ID NO: 136190 - DNA, 120 bp, Artificial Sequence
  ENSG00000103257_29 (sequence is synthesized)
ccactgcttcccactggggccggcggggcccacgcacgacgtcagcctcttaccttcccgcctcggctaggggtcctcgggatgccgttctgttccaacctcctgctctgggacgtggac

SEQ ID NO: 136191 - DNA, 120 bp, Artificial Sequence
  ENSG00000103257_30 (sequence is synthesized)
atgcctcaaggatacagggagccggcggcctctcgacggcacgcacttgcctgttggctgctgcggctgtgggcgagcatgggggctgccagcgtctgttgtggaaagtagctgctagtg

SEQ ID NO: 136192 - DNA, 120 bp, Artificial Sequence
  ENSG00000103257_31 (sequence is synthesized)
aaatggctggggccgctggggtccgtcttcacactgcgcaggtctcttctgggcgtctgagctggggtgggagctcctccgcagaaggttggtggggggtccagtctgtgatccttggtg

SEQ ID NO: 136193 - DNA, 120 bp, Artificial Sequence
  ENSG00000103257_32 (sequence is synthesized)
ctgtgtgccccactccagcctggggaccccacttcagaaggtaggggccgtgtcccgcggtgctgactgaggcctgcttccccctccccctcctgctgtgctggaattccacagggacca

SEQ ID NO: 136194 - DNA, 120 bp, Artificial Sequence
  ENSG00000103257_33 (sequence is synthesized)
gggccaccgcaggggactgtctcagaagacttgatttttccgtccctttttctccacactccactgacaaacgtccccagcggtttccacttgtgggcttcaggtgttttcaagcacaac

SEQ ID NO: 136195 - DNA, 120 bp, Artificial Sequence
  ENSG00000103257_34 (sequence is synthesized)
ccaccacaacaagcaagtgcattttcagtcgttgtgcttttttgttttgtgctaacgtcttactaatttaaagatgctgtcggcaccatgtttatttatttccagtggtcatgctcagcc

SEQ ID NO: 136196 - DNA, 120 bp, Artificial Sequence
  ENSG00000103257_35 (sequence is synthesized)
ttgctgctctgcgtggcgcaggtgccatgcctgctccctgtctgtgtcccagccacgcagggccatccactgtgacgtcggccgaccaggctggacaccctctgccgagtaatgacgtgt

SEQ ID NO: 136197 - DNA, 120 bp, Artificial Sequence
  ENSG00000103257_36 (sequence is synthesized)
gtggctgggaccttctttattctgtgttaatggctaacctgttacactgggctgggttgggtagggtgttctggcttttttgtggggtttttatttttaaagaaacactcaatcatccta

SEQ ID NO: 136198 - DNA, 120 bp, Artificial Sequence
  ENSG00000103257_37 (sequence is synthesized)
gaccttgcatgttgctcagatgaggtttctcctttaaaacaaaattccctggtgctcagctgggcccagccaggctggacagtccccggtggccaccacggccgtccacagccctgctcg

SEQ ID NO: 136199 - DNA, 80 bp, Artificial Sequence
  ENSG00000103260_0 (sequence is synthesized)
ccggggcagcggtggtgagagccccgactccccggacgccgcccgccgtgccatggggttcccggccgcggcgctgctct

SEQ ID NO: 136200 - DNA, 120 bp, Artificial Sequence
  ENSG00000103260_1 (sequence is synthesized)
cggctactccgaggagcgctgcagctggaggggcagcggcctcacccaggagcccggcagcgtggggcagctggccctggcctgtgcggagggcgcggttgagtggctgtacccggctgg

SEQ ID NO: 136201 - DNA, 120 bp, Artificial Sequence
  ENSG00000103260_2 (sequence is synthesized)
ggttgagtggctgtacccggctggggcgctgcgcctgaccctgggcggccccgatcccagagcgcggcccggcatcgcctgtctgcggccggtgcggcccttcgcgggcgcccaggtctt

SEQ ID NO: 136202 - DNA, 120 bp, Artificial Sequence
  ENSG00000103260_3 (sequence is synthesized)
ccggcagggggccgctgcgtgcgctggggtccccgcgagcgccgggccctcttcctgcaggccacgccgcaccaggacatcagccgccgcgtggccgccttccgctttgagctgcgcgag

SEQ ID NO: 136203 - DNA, 120 bp, Artificial Sequence
  ENSG00000103260_4 (sequence is synthesized)
ggccgccttccgctttgagctgcgcgaggacgggcgccccgagctgcccccgcaggcccacggtctcggcgtagacggtgcctgcaggccctgcagcgacgctgagctgctcctggccgc

SEQ ID NO: 136204 - DNA, 120 bp, Artificial Sequence
  ENSG00000103260_5 (sequence is synthesized)
atgcaccagcgacttcgtaattcacgggatcatccatggggtcacccatgacgtggagctgcaggagtctgtcatcactgtggtggccgcccgtgtcctccgccagacaccgccgctgtt

SEQ ID NO: 136205 - DNA, 120 bp, Artificial Sequence
  ENSG00000103260_6 (sequence is synthesized)
ccaggcggggcgatccggggaccaggggctgacctccattcgtaccccactgcgctgtggcgtccacccgggcccaggcaccttcctcttcatgggctggagccgctttggggaggcccg

SEQ ID NO: 136206 - DNA, 120 bp, Artificial Sequence
  ENSG00000103260_7 (sequence is synthesized)
gctgggctgtgccccacgattccaggagttccgccgtgcctacgaggctgcccgtgctgcccacctccacccctgcgaggtggcgctgcactgaggggctgggtgctggggaggggctgg

SEQ ID NO: 136207 - DNA, 120 bp, Artificial Sequence
  ENSG00000103260_8 (sequence is synthesized)
taggagggagggtgggcccactgctttggaggtgatgggactatcaataagaactctgttcacgcaagctgctgtggacctggtctcctgtgtccagcccagccttgggcctgcctcgca

SEQ ID NO: 136208 - DNA, 120 bp, Artificial Sequence
  ENSG00000103260_9 (sequence is synthesized)
gctgtgaggatggctccaattcctgcctcctggcgggagactgaggctcaggggaatggtatcttgttcaagaccatttggcaactgagagggagagcagatgtcaggaggagctacacc

SEQ ID NO: 136209 - DNA, 120 bp, Artificial Sequence
  ENSG00000103260_10 (sequence is synthesized)
cacattccggggaggggccgctgctgggtggggggcacgtggggacctgcactcatgcaagcttctgctctgctgcacccaccagccccgtccttgcccgcacccttgcctgcttccctg

SEQ ID NO: 136210 - DNA, 120 bp, Artificial Sequence
  ENSG00000103260_11 (sequence is synthesized)
gctggctcccacttgcctcccgtgccaggtgcttctggggctcagcaggagaggaaaggggcagaggggcatagggtccctcgggtacggtgggggcaggcgggcgcacagcgctccggc

SEQ ID NO: 136211 - DNA, 120 bp, Artificial Sequence
  ENSG00000103260_12 (sequence is synthesized)
atccttggccccgtcccgcccttggggaagaatgggcccctctgtcctcaggccccttcgacgtgctgagcatccagacgtggcgaggagcccgaagggtgtggggtcccctctgcaggg

SEQ ID NO: 136212 - DNA, 120 bp, Artificial Sequence
  ENSG00000103260_13 (sequence is synthesized)
tcctgcttgttgcctgtttccggcgggcggggtgcacaatggggtctctaaggaccgtttcccgccactggccccattgtcactgtctccgccttcctcctcggcctttcagccgcataa

SEQ ID NO: 136213 - DNA, 120 bp, Artificial Sequence
  ENSG00000103260_14 (sequence is synthesized)
agggccagtgaggtttgggacagccacagcccaaggctccgaggctaaaagcccctgggtgggggtgttccaggacacctggccctgtgtgagctgcctcctctcaccccaacccctcgg

SEQ ID NO: 136214 - DNA, 120 bp, Artificial Sequence
  ENSG00000103260_15 (sequence is synthesized)
atcctgggaaagagacagccatggctcaagggccagggacccctgggctgagccccagaaatggctttccattctcgcctgggccggggtgggggtggaggccagaggccctgcccaggc

SEQ ID NO: 136215 - DNA, 120 bp, Artificial Sequence
  ENSG00000103260_16 (sequence is synthesized)
agatgaagcccccagctttcaagggggaaactgaggctgtgtgagggacacagctgtgcagggcccacaaacacggtcctttctctaggttagcggatgcagatgcctgatgagtgccat

SEQ ID NO: 136216 - DNA, 120 bp, Artificial Sequence
  ENSG00000103260_17 (sequence is synthesized)
gccctctgtggacacctggggaggggggtcacctccagcgccgccctgggacttccactgcacgtgcaagagacttaccctttcacacagatcacctgcctgccgcagggctgatgagga

SEQ ID NO: 136217 - DNA, 120 bp, Artificial Sequence
  ENSG00000103260_18 (sequence is synthesized)
tgggtgaggagcgcagccactgggtgtcatgcactgtgggggttctcccaccttctgcccctcctcaggttccttgctgcttctctcctctcccaactgtggcacgctgagggctcaggc

SEQ ID NO: 136218 - DNA, 120 bp, Artificial Sequence
  ENSG00000103260_19 (sequence is synthesized)
acaggaccgctcctctggggcagcctccaataacccttggacaacctccactttttcatcttcagccctgaccactccctggggcccatagccttacatccatctgcccccagcccaaac

SEQ ID NO: 136219 - DNA, 120 bp, Artificial Sequence
  ENSG00000103260_20 (sequence is synthesized)
acttctgcaaacactagaaaaggaggtagcccgtgtgccctcctgcaccgcctcctccactcctgtcttggagaggctttcccgtgggccgagcaacccccttacctttggcacttgccc

SEQ ID NO: 136220 - DNA, 120 bp, Artificial Sequence
  ENSG00000103260_21 (sequence is synthesized)
tgattctctggccagcttcctacaacctctccttttcagccacacccaagtccacctgttcacaaacaccctgggctgggccctggccgaaccctggcttctacctacctgtctcaggaa

SEQ ID NO: 136221 - DNA, 120 bp, Artificial Sequence
  ENSG00000103260_22 (sequence is synthesized)
gtgcctgagccttgcacctacagaccctcccagagaaagccctggctttgcaaccagctgtcttctcatgagacacagggccacaggagcaccacggtgcccaaatgggtcttggagcat

SEQ ID NO: 136222 - DNA, 120 bp, Artificial Sequence
  ENSG00000103260_23 (sequence is synthesized)
tagaccaggggcttcatgcctgccctggggacaggtggccaaagtggcatgggagatagggagacagtgtgggtgagcaggtgggcaggagctacaggagcctggggcctgtggatcaca

SEQ ID NO: 136223 - DNA, 120 bp, Artificial Sequence
  ENSG00000103260_24 (sequence is synthesized)
gacaccgccaggcaagtgccagttcacacaggtacaggtggctgcagagtgcccaaaggccaagcagcagagtgcctggtgtggacgggagaggagtggggaggttgggcgcagtggctc

SEQ ID NO: 136224 - DNA, 120 bp, Artificial Sequence
  ENSG00000103260_25 (sequence is synthesized)
tcagacctcagatccgggaaactagaggggtcccagatgctggggtgcatatgtcagatgggagtgcaggagggcggcccaggacagctgatcgctaggcatggcccccaggcccacgtc

SEQ ID NO: 136225 - DNA, 120 bp, Artificial Sequence
  ENSG00000103260_26 (sequence is synthesized)
cagctcttgcttggctctcctggagcttggcgcctgaccctgaaagggatgggctctcgctattctgccccctggccctgggccagggaccccagaccacccttcctctgcccccacttc

SEQ ID NO: 136226 - DNA, 80 bp, Artificial Sequence
  ENSG00000103264_0 (sequence is synthesized)
acaggcggcagcagtggccgtcactgggcggcatggcggtgtgtgctcgcctttgcggcgtgggcccgtcgcgcggatgt

SEQ ID NO: 136227 - DNA, 120 bp, Artificial Sequence
  ENSG00000103264_1 (sequence is synthesized)
cgacagcgagccggacacagaccccgaggaggagcgcatcgaggctagcgccggggtcgggggcggcttgtgcgcgggcccctcgccgccgcccccgcgctgctcgctgctggagctgcc

SEQ ID NO: 136228 - DNA, 120 bp, Artificial Sequence
  ENSG00000103264_2 (sequence is synthesized)
tgccgcccgagctgctggtggagatcttcgcgtcgctgccgggcacggacctacccagcttggcccaggtctgcacgaagttccggcgcatcctccacaccgacaccatctggaggaggc

SEQ ID NO: 136229 - DNA, 120 bp, Artificial Sequence
  ENSG00000103264_3 (sequence is synthesized)
gttgccgtgaggagtatggtgtttgcgaaaacttgcggaagctggagatcacaggcgtgtcttgtcgggacgtctatgcgaagctgcttcaccgatatagacacattttgggattgtggc

SEQ ID NO: 136230 - DNA, 120 bp, Artificial Sequence
  ENSG00000103264_4 (sequence is synthesized)
agccagatatcgggccatacggaggactgctgaacgtggtggtggacggcctgttcatcatcgggtggatgtacctgcctccccatgacccccacgtcgatgaccctatgagattcaagc

SEQ ID NO: 136231 - DNA, 120 bp, Artificial Sequence
  ENSG00000103264_5 (sequence is synthesized)
ctctgttcaggatccacctgatggagaggaaggctgccacagtggagtgcatgtacggccacaaagggccccaccacggccacatccagattgtgaagaaggatgagttctccaccaagt

SEQ ID NO: 136232 - DNA, 120 bp, Artificial Sequence
  ENSG00000103264_6 (sequence is synthesized)
gcaaccagacggaccaccacaggatgtccggcgggaggcaggaggagtttcggacgtggctgagggaggaatgggggcgcacgctggaggacatcttccacgagcacatgcaggagctca

SEQ ID NO: 136233 - DNA, 120 bp, Artificial Sequence
  ENSG00000103264_7 (sequence is synthesized)
tcctgatgaagttcatctacaccagtcagtacgacaactgcctgacctaccgccgcatctacctgccgcccagccgccccgacgacctcatcaagcctggcctcttcaaaggtacctatg

SEQ ID NO: 136234 - DNA, 120 bp, Artificial Sequence
  ENSG00000103264_8 (sequence is synthesized)
gcagccacggcctggagattgtgatgctcagcttccacggccggcgtgccaggggcaccaagatcacgggcgaccccaacatccccgctgggcagcagacagtggagatcgacctgaggc

SEQ ID NO: 136235 - DNA, 120 bp, Artificial Sequence
  ENSG00000103264_9 (sequence is synthesized)
atcggatccagctgcccgacctcgagaaccagcgcaacttcaatgagctctcccgcatcgtcctggaggtgcgcgagagggtgcgccaggagcagcaggaaggcgggcacgaggcgggcg

SEQ ID NO: 136236 - DNA, 120 bp, Artificial Sequence
  ENSG00000103264_10 (sequence is synthesized)
agggtcgtggccggcagggcccccgggagtcccagccaagccctgcccagcccagggcagaggcgcccagcaagggcccagatgggacacctggtgaggatggtggcgagcctggggatg

SEQ ID NO: 136237 - DNA, 120 bp, Artificial Sequence
  ENSG00000103264_11 (sequence is synthesized)
ccgtagctgcggccgagcagcctgcccagtgtgggcaggggcagccgttcgtgctgcccgtgggcgtgagctccaggaatgaggactacccccgaacctgcaggatgtgtttttatggca

SEQ ID NO: 136238 - DNA, 120 bp, Artificial Sequence
  ENSG00000103264_12 (sequence is synthesized)
caggcctcatcgcgggccacggcttcaccagccctgaacgcacccccggggtcttcatcctcttcgatgaggaccgcttcgggttcgtctggctggagctgaaatccttcagcctgtaca

SEQ ID NO: 136239 - DNA, 120 bp, Artificial Sequence
  ENSG00000103264_13 (sequence is synthesized)
gccgggtccaggccaccttccggaacgcagatgcgccgtccccacaggccttcgatgagatgctcaagaacattcagtccctcacctcctgaccggccacatccttgccgccacatcccg

SEQ ID NO: 136240 - DNA, 120 bp, Artificial Sequence
  ENSG00000103264_14 (sequence is synthesized)
ggtggctctggggctctgaactctgacctgtgaatagaagcagcatgcactttggaaatccggccttttgaccagaacgcacacctcgtcggggggcccagtccagccaccccccagcac

SEQ ID NO: 136241 - DNA, 120 bp, Artificial Sequence
  ENSG00000103264_15 (sequence is synthesized)
tttatgtagagagtgtgacatagacctgcatatttgtcagtgccatgatggaagaagctgagcatgtcttaccaaaaacagagagaacgagcctgaatacagcagatgtaggggacagcc

SEQ ID NO: 136242 - DNA, 120 bp, Artificial Sequence
  ENSG00000103264_16 (sequence is synthesized)
gtgggaccgcgtgagaattgaagcggtggggttcccgcaccctgggctggctggtggttttctcgggaagcaggaccctcctgactggtgctcttcctgtgagcggatagagtgatagac

SEQ ID NO: 136243 - DNA, 120 bp, Artificial Sequence
  ENSG00000103264_17 (sequence is synthesized)
tgggtcgtgtgtgagacgcatgtgctccaccccactccttttgggggaagccaggcaacagtggcctctgggagggggtcaggaagaggcgaacagctcaggcagcgcaggtgtgatggg

SEQ ID NO: 136244 - DNA, 120 bp, Artificial Sequence
  ENSG00000103264_18 (sequence is synthesized)
cacagtacgcagagcaagctcgggaagttggtaggatctcaggcttggggccgggactctggagtgaatccccatttctctaccggcttgcttggagtttggacagaagcatttcacctc

SEQ ID NO: 136245 - DNA, 120 bp, Artificial Sequence
  ENSG00000103264_19 (sequence is synthesized)
tgatctcagcttccccacctgtggagtgggtttagtgacctgagtcactagggaatgtcacctgaatgcacagcccagcccatgcacctgccccagcccctccagctttggagccaaggc

SEQ ID NO: 136246 - DNA, 120 bp, Artificial Sequence
  ENSG00000103264_20 (sequence is synthesized)
catcgttccagccacttgactgtcctcgacggcctgttccagacagggcgtttgttttgtccatgccttcctccctgcacgcacacggcgtcaaaaccaagctgccggccactgtctcca

SEQ ID NO: 136247 - DNA, 120 bp, Artificial Sequence
  ENSG00000103264_21 (sequence is synthesized)
gaacgcaaggctccaggcccgtgtgtctgaagcagtgagtggtccacacaggtgccaggagtgcccatatgagatgacgaggaaacccctttgcaggtgaggggacagctttctagaaaa

SEQ ID NO: 136248 - DNA, 120 bp, Artificial Sequence
  ENSG00000103264_22 (sequence is synthesized)
gccacacctgcatctggggacacactttggaaagtgggaccctccagcctggagaccccatggactgatgcctccactgctgtgtgccccatgttgtgttaacacctgcgtgtggggacc

SEQ ID NO: 136249 - DNA, 120 bp, Artificial Sequence
  ENSG00000103264_23 (sequence is synthesized)
ccatctgaggtcttggctgaggttggcatctcctgaagaacagagagcacggtgtccagagctggcccttcccccagcccacagccagctccgtgcccgagtgggcgtccccagcgagcc

SEQ ID NO: 136250 - DNA, 120 bp, Artificial Sequence
  ENSG00000103264_24 (sequence is synthesized)
ctggtgagggacctcgggaaggtgacagtctgtgtgccttggtgtggagaccaacctgaggatgtcctgggaaatgttttcctgatgaatttctccttgactggcctttaaagaacataa

SEQ ID NO: 136251 - DNA, 120 bp, Artificial Sequence
  ENSG00000103264_25 (sequence is synthesized)
gaattcccattgcccagcctcagtgcatttggcaaatgcttactttgcttcccagagtcagagaattggcaaaggttcctaaatggtaatctggccggcctgggagaaagactcacgaga

SEQ ID NO: 136252 - DNA, 120 bp, Artificial Sequence
  ENSG00000103264_26 (sequence is synthesized)
aaagccagtggagaaagcgcccttccagggcggcagcagcgggagccacgcagaccccgaggcgcacctgctggctcttgtgtgtggccccagtttctagcggcttttgcagcattagcc

SEQ ID NO: 136253 - DNA, 120 bp, Artificial Sequence
  ENSG00000103264_27 (sequence is synthesized)
tacaagctttgtcactccctgccctctgtggtggtcactgtttttctctcttgccaaatgaggcagtctctgagtgacggtgactgtggccttgaagcctggaggactgttgggcatgta

SEQ ID NO: 136254 - DNA, 120 bp, Artificial Sequence
  ENSG00000103264_28 (sequence is synthesized)
gactggcaccttgaagattcaccattgtttaaataaaatcaagcaaatgcttttttaccaagagcccgagcctcgctctaagggacgcagtcctagaggcgtgccctttggggcttgaag

SEQ ID NO: 136255 - DNA, 120 bp, Artificial Sequence
  ENSG00000103264_29 (sequence is synthesized)
agcacactgtgggacgcacgtgcttctgattaaaggaatctcagatctcaattacgcttccagtgtttgggtatagaaatagcttccacccatcatgtctcagccatgggctgttggtca

SEQ ID NO: 136256 - DNA, 120 bp, Artificial Sequence
  ENSG00000103264_30 (sequence is synthesized)
gttcatgtggctcctggttctggtgtgtatgttgggggcgggggtctctccatggtggtgacctgcagtgatgccaggcagggccagagccacacagccaggaaagggaggcctttttgg

SEQ ID NO: 136257 - DNA, 120 bp, Artificial Sequence
  ENSG00000103264_31 (sequence is synthesized)
ccgcacagccagtcccttcagtcgtgactacaggtcttgttttttccgctccgatgtgtccttagccagttcttggctccggttctgtagggacaggcactgaatctgcgcgcctcaaaa

SEQ ID NO: 136258 - DNA, 120 bp, Artificial Sequence
  ENSG00000103264_32 (sequence is synthesized)
cagcagcttcccttccgggggagggcatccaccctctcaggggatcctgcaggtggcccatttcctgcaggtgagaactcggaagggctgatgtcgtcatcagaggcctaagggcagctg

SEQ ID NO: 136259 - DNA, 120 bp, Artificial Sequence
  ENSG00000103264_33 (sequence is synthesized)
agagttggataaaaccgtttccaaggaggaggctgagtaacccagttcaggacagccaagcgcattaggcttgattggggaaggtggcaggtggagttgggaggttgggactctccatct

SEQ ID NO: 136260 - DNA, 120 bp, Artificial Sequence
  ENSG00000103264_34 (sequence is synthesized)
tttgcaccacggatgcctttctgtcgctgtctcactctggggcaggatcaagtctgctctctggagtggggctgcctgcagtgcagctctgcacacctgaacgtgttctttgtcacttgt

SEQ ID NO: 136261 - DNA, 120 bp, Artificial Sequence
  ENSG00000103264_35 (sequence is synthesized)
ttggaaatgatgtgattgaagatttcagagaggtcattggaggcttttctgtgccggcactgaatgttcatttgcatgaggaagttgcaaacgacttctgcaggctgagattcaaggcag

SEQ ID NO: 136262 - DNA, 120 bp, Artificial Sequence
  ENSG00000103264_36 (sequence is synthesized)
gtggtattggggtccctcagcccacctgggccgtgacctcaagtgtccactgctgagtgtgagtggctttgcaggcctggtggtgggagagcctcaggctccctccttcttcgttcctga

SEQ ID NO: 136263 - DNA, 120 bp, Artificial Sequence
  ENSG00000103264_37 (sequence is synthesized)
ccatgccctgggccccttcagtctgcctgcggctctgtggcatccctgccctgacactgggcacctgtgcccctagcaagcccacctggcacacgaggagggaggggtgggtggccatgt

SEQ ID NO: 136264 - DNA, 120 bp, Artificial Sequence
  ENSG00000103264_38 (sequence is synthesized)
ccttcctctagccacatgccctgctggccgctccattctgagctttgtgcagaaccgggtctgagctggagatttttctctgagaacctgcagttgtgctgcagccgcacgcaagggccc

SEQ ID NO: 136265 - DNA, 120 bp, Artificial Sequence
  ENSG00000103264_39 (sequence is synthesized)
ttcagccgctggctctggcttccctgactcctcagggcgtgttcacccccaggctttctcacctgcacacggttaggccattttcagtgctcgtgggcagtcacggacagcagcagaaac

SEQ ID NO: 136266 - DNA, 120 bp, Artificial Sequence
  ENSG00000103264_40 (sequence is synthesized)
tcctcagcccctttgttacttcagaacgcctgcccacatgcatcttctgagctcgtgttgtcctcatggccgtggggtcttgggtgcgaacaggagatgctgagctgtggtccaccgtcc

SEQ ID NO: 136267 - DNA, 120 bp, Artificial Sequence
  ENSG00000103264_41 (sequence is synthesized)
aaggtgctgcagaaagcagctaggctcttttaggatgtttctattctggttgctgccttcgtggtgtaacttttaagaacacttacgggaatgtgctcatagaaccatcacctgtcctga

SEQ ID NO: 136268 - DNA, 120 bp, Artificial Sequence
  ENSG00000103264_42 (sequence is synthesized)
gaataaaactcctggaatcatgatcaagtccagtgttaacgtggcccaacctgtctgtacttctggggagagaccaggaacatcactggactcctcatccccgtaattatttagagaaga

SEQ ID NO: 136269 - DNA, 82 bp, Artificial Sequence
  ENSG00000103264_43 (sequence is synthesized)
catcactggactcctcatccccgtaattatttagagaagatgcaagcagcagatagtctccatgcggctggtactttttttg

SEQ ID NO: 136270 - DNA, 79 bp, Artificial Sequence
  ENSG00000103264_44 (sequence is synthesized)
tggagtgcagagcggcgatcatggctccctgaggcctcaacctactaggctcaagctgtctgcccgcctcatgcttggc

SEQ ID NO: 136271 - DNA, 72 bp, Artificial Sequence
  ENSG00000103264_45 (sequence is synthesized)
agccttggggcctgtctttgaatgggaatgagactgtgcaaaccgtggactaccctgtgtcacccacagctc

SEQ ID NO: 136272 - DNA, 120 bp, Artificial Sequence
  ENSG00000103264_46 (sequence is synthesized)
actgtgcaaaccgtggactaccctgtgtcacccacagctcagtggcctgcctgccggccctcaggggctgctgaccgggagaccagccagagcacgagggggtcagggctgtgtgggttt

SEQ ID NO: 136273 - DNA, 120 bp, Artificial Sequence
  ENSG00000103264_47 (sequence is synthesized)
tggcctgattctgcatttggttgtttctgggggccatgtagcctgcctgcattaggaaagcgctgtgccatctgatcatgagcacctctgcaccccctggtaaggtgaccttgcagcagg

SEQ ID NO: 136274 - DNA, 120 bp, Artificial Sequence
  ENSG00000103264_48 (sequence is synthesized)
agctgtgccctgcctgggtaggcacccactaggtaggaccggagcaatcctggcagccgccacctgcacccgtgcacttgtttctcctcacagtttcaagtaaatccgtttttgaaggct

SEQ ID NO: 136275 - DNA, 120 bp, Artificial Sequence
  ENSG00000103264_49 (sequence is synthesized)
ccgctgggcgcctgaggcccctgagattccgaaatttttaacctctgaagctgtgccttcacatgatctaggacagcgttcagaagatggctacagtctgttggtttgtattctgtgaaa

SEQ ID NO: 136276 - DNA, 120 bp, Artificial Sequence
  ENSG00000103264_50 (sequence is synthesized)
cagcaatctgagcaaagataaactgcctcaggaacagtattgatggcttgcagaggactggcttatgacttcaggcggcataaacaacaagcacaaatggatgcgttttccggtgtccac

SEQ ID NO: 136277 - DNA, 120 bp, Artificial Sequence
  ENSG00000103264_51 (sequence is synthesized)
ccatctggccgttggcgcagggaatcagagcatcttgtctgcagcattaaggcaactacgaaaatgcgtcagaggagaagcacccccagtccagactcctttgtcagtgaggtgtcatgt

SEQ ID NO: 136278 - DNA, 120 bp, Artificial Sequence
  ENSG00000103264_52 (sequence is synthesized)
atgtaactgctaagaattgaatgtgatggcccagcttgagtgatcttctgctcagaccacaccctggactgaaccagcctcctgtttccctcaggcctcctgaggtccctgatctccggc

SEQ ID NO: 136279 - DNA, 120 bp, Artificial Sequence
  ENSG00000103264_53 (sequence is synthesized)
aagtgatgctccttctcaccatcgtctgtgccattgccttgaaaactcccttcctggcctcgcctactacatgagccagggacaaccagctgtccttttattcttttctttttttttttt

SEQ ID NO: 136280 - DNA, 120 bp, Artificial Sequence
  ENSG00000103264_54 (sequence is synthesized)
gaggaaatagtggcagctgactggtgggtctcaggaagagccacctgatcatcagggcactggcaggacccccctgggaatcttgatgtgcttcagtggtcgggggttggtgcggagctc

SEQ ID NO: 136281 - DNA, 120 bp, Artificial Sequence
  ENSG00000103264_55 (sequence is synthesized)
agattccgaaatttttaacctctgaagctgtgccttcacatgatctaggacagcgttcagaagatggctacagtctgttggtttgtattctgtgaaaatagaaaaaaaaatccgagtatg

SEQ ID NO: 136282 - DNA, 80 bp, Artificial Sequence
  ENSG00000103266_0 (sequence is synthesized)
gctccggctgcgggcgctgggccgcgaggcgcggagcttgggagcggagcccaggccgtgccgcgcggcgccatgaaggg

SEQ ID NO: 136283 - DNA, 120 bp, Artificial Sequence
  ENSG00000103266_1 (sequence is synthesized)
agggcaaggaggagaaggagggcggcgcacggctgggcgctggcggcggaagccccgagaagagcccgagcgcgcaggagctcaaggagcagggcaatcgtctgttcgtgggccgaaagt

SEQ ID NO: 136284 - DNA, 120 bp, Artificial Sequence
  ENSG00000103266_2 (sequence is synthesized)
acccggaggcggcggcctgctacggccgcgcgatcacccggaacccgctggtggccgtgtattacaccaaccgggccttgtgctacctgaagatgcagcagcacgagcaggccctggccg

SEQ ID NO: 136285 - DNA, 120 bp, Artificial Sequence
  ENSG00000103266_3 (sequence is synthesized)
actgccggcgcgccctggagctggacgggcagtctgtgaaggcgcacttcttcctggggcagtgccagctggagatggagagctatgatgaggccatcgccaatctgcagcgagcttaca

SEQ ID NO: 136286 - DNA, 120 bp, Artificial Sequence
  ENSG00000103266_4 (sequence is synthesized)
gcctggccaaggagcagcggctgaacttcggggacgacatccccagcgctcttcgaatcgcgaagaagaagcgctggaacagcattgaggagcggcgcatccaccaggagagcgagctgc

SEQ ID NO: 136287 - DNA, 120 bp, Artificial Sequence
  ENSG00000103266_5 (sequence is synthesized)
attgccgcggagcgtgagagggagctggaagagtgccagcgaaaccacgagggtgatgaggacgacagccacgtccgggcccagcaggcctgcattgaggccaagcacgacaagtacatg

SEQ ID NO: 136288 - DNA, 120 bp, Artificial Sequence
  ENSG00000103266_6 (sequence is synthesized)
gcggacatggacgagcttttttctcaggtggatgagaagaggaagaagcgagacatccccgactacctgtgtggcaagatcagctttgagctgatgcgggagccgtgcatcacgcccagt

SEQ ID NO: 136289 - DNA, 120 bp, Artificial Sequence
  ENSG00000103266_7 (sequence is synthesized)
ggcatcacctacgaccgcaaggacatcgaggagcacctgcagcgtgtgggtcattttgaccccgtgacccggagccccctgacccaggaacagctcatccccaacttggctatgaaggag

SEQ ID NO: 136290 - DNA, 120 bp, Artificial Sequence
  ENSG00000103266_8 (sequence is synthesized)
gttattgacgcattcatctctgagaatggctgggtggaggactactgaggttccctgccctacctggcgtcctggtccaggggagccctgggcagaagcccccggcccctatacatagtt

SEQ ID NO: 136291 - DNA, 120 bp, Artificial Sequence
  ENSG00000103266_9 (sequence is synthesized)
tatgttcctggccaccccgaccgcttcccccaagttctgctgttggactctggactgtttcccctctcagcatcgcttttgctgggccgtgatcgtccccctttgtgggctggaaaagca

SEQ ID NO: 136292 - DNA, 120 bp, Artificial Sequence
  ENSG00000103266_10 (sequence is synthesized)
ggtgagggtgggctgggctgaggccattgccgccactatctgtgtaataaaatccgtgagcacgaggtgggacgtgctggtgtgtgaccggcagtcctgccagctgttttggctagccga

SEQ ID NO: 136293 - DNA, 120 bp, Artificial Sequence
  ENSG00000103266_11 (sequence is synthesized)
ctgcccttcttgtcactgcagcgtgtgggtcattttgaccccgtgacccggagccccctgacccaggaacagctcatccccaacttggctatgaaggaggttattgacgcattcatctct

SEQ ID NO: 136294 - DNA, 120 bp, Artificial Sequence
  ENSG00000103266_12 (sequence is synthesized)
gcaatcgtctgttcgtgggccgaaagtacccggaggcggcggcctgctacggccgcgcgatcgtgagtgcgcccgcgcggggagggcggcggcggtggcaccggggagggccgggcccgg

SEQ ID NO: 136295 - DNA, 120 bp, Artificial Sequence
  ENSG00000103266_13 (sequence is synthesized)
ggggcgtgtcctcggctcccaaagcccagccgtggttctcgagcccagcgccgggtgccggagaacgagggtgcgatgctggatggaggccggccgggtggggggagggcaggggccctc

SEQ ID NO: 136296 - DNA, 120 bp, Artificial Sequence
  ENSG00000103266_14 (sequence is synthesized)
gacccttgaggaccccaggtcctaagcccggactctccaaagatttggaaaactttacaaaaccaagtggaatcaagcggataggctcagccagtactccactgtgcacagatccttgga

SEQ ID NO: 136297 - DNA, 120 bp, Artificial Sequence
  ENSG00000103266_15 (sequence is synthesized)
cccaggggctttgacaactgagaaacctagtttcttgattctagccagagcgcagaagctgggacgggccgtgggtcagagtgggcacgctgagcctacgccctcatgcggctggcccgg

SEQ ID NO: 136298 - DNA, 120 bp, Artificial Sequence
  ENSG00000103266_16 (sequence is synthesized)
ccccccacccacatgacaagtacatggcggacatggacgagcttttttctcaggtggatgagaagaggaagaagcgagacatccccgactacctgtgtggcaagatcagctttgagctga

SEQ ID NO: 136299 - DNA, 120 bp, Artificial Sequence
  ENSG00000103266_17 (sequence is synthesized)
caggccagggcctacgcgaacgcccacccttaagagcgcggggacagggaactggagcgttcctcccagcccccgacgtcgcgggcccagtgtccccgtccaggctggttgggcgcacgc

SEQ ID NO: 136300 - DNA, 120 bp, Artificial Sequence
  ENSG00000103269_0 (sequence is synthesized)
ggccggctggggcggagcggagtcgtccgcagagcagcccctcccggccgcggccgccgaccccggaccccggcccccggccaggctctatggacaggagctcgctgctgcagctcatcc

SEQ ID NO: 136301 - DNA, 120 bp, Artificial Sequence
  ENSG00000103269_1 (sequence is synthesized)
gctctatggacaggagctcgctgctgcagctcatccaggagcagcagctggaccccgagaacacaggcttcatcggtgcggacaccttcactggcctggtgcacagccatgagctgcccc

SEQ ID NO: 136302 - DNA, 120 bp, Artificial Sequence
  ENSG00000103269_2 (sequence is synthesized)
tggacccggccaagctggacatgctggtggccctggctcagagcaacgagcagggccaggtctgctaccaggagctggtggacctgatcagcagcaagcgctccagcagtttcaagcggg

SEQ ID NO: 136303 - DNA, 120 bp, Artificial Sequence
  ENSG00000103269_3 (sequence is synthesized)
ccattgctaacggacagcgggcactgccccgggacgggccgctggatgagccaggcctaggtgtctacaagcggtttgtgcgttacgtggcctacgagatcctgccttgtgaggtggacc

SEQ ID NO: 136304 - DNA, 120 bp, Artificial Sequence
  ENSG00000103269_4 (sequence is synthesized)
gccgctggtacttctaccgtcaccgcagctgcccaccccccgtgttcatggcctcggtcactcttgcccagatcatcgtgttcctgtgttacggggcccgcctcaacaagtgggtgctgc

SEQ ID NO: 136305 - DNA, 120 bp, Artificial Sequence
  ENSG00000103269_5 (sequence is synthesized)
agacctaccaccccgagtacatgaagagcccccttgtgtaccaccccgggcaccgtgcccgcgcctggcgcttcctcacctacatgttcatgcacgttgggctggagcagctggggttca

SEQ ID NO: 136306 - DNA, 120 bp, Artificial Sequence
  ENSG00000103269_6 (sequence is synthesized)
ggggtgcccctggagatggtgcacggcctgctccgcatcagcctgctctacctggcaggcgtgctggcaggctccctaaccgtctccatcaccgacatgcgggccccggtggtgggaggc

SEQ ID NO: 136307 - DNA, 120 bp, Artificial Sequence
  ENSG00000103269_7 (sequence is synthesized)
tccggcggggtctacgccctgtgctcggcacacctggccaacgttgtcatgaactgggctgggatgagatgtccctacaagttgctgaggatggtgctggccttggtgtgcatgagctcc

SEQ ID NO: 136308 - DNA, 120 bp, Artificial Sequence
  ENSG00000103269_8 (sequence is synthesized)
gaggtgggccgggccgtgtggctgcgcttctccccgccgctgcccgcctcgggcccacagcccagcttcatggcgcacctggcaggcgcggtggtgggggtgagcatgggcctgaccatc

SEQ ID NO: 136309 - DNA, 120 bp, Artificial Sequence
  ENSG00000103269_9 (sequence is synthesized)
ctgcggagctacgaggagcgcctgcgggaccagtgcggctggtgggtggtgctgctggcctacggcaccttcctgctcttcgccgtcttctggaacgtcttcgcctacgacctgctgggc

SEQ ID NO: 136310 - DNA, 120 bp, Artificial Sequence
  ENSG00000103269_10 (sequence is synthesized)
gcccacatccccccaccgccctgaccggctacctgaggctgcacaggccagggctcgggcatgtggtggccgcccaccaggggccttcacgtctgccctttgtgaacggacgtctcaggg

SEQ ID NO: 136311 - DNA, 120 bp, Artificial Sequence
  ENSG00000103269_11 (sequence is synthesized)
ctgctgtgccccttgggtgtgggtggcctcaaaggaggccctgtcccagccacccaccccccactcccaggacttgcggtctgagcctttttggataattaataaatattttacacagca

SEQ ID NO: 136312 - DNA, 120 bp, Artificial Sequence
  ENSG00000103269_12 (sequence is synthesized)
cttggaccttggccctcgctttccaggatgggtagggtggaagacgggggaacaactgaggagctggaggactgggacccaggcaccagtgccctgccagctcctgggatcaagcagggt

SEQ ID NO: 136313 - DNA, 120 bp, Artificial Sequence
  ENSG00000103269_13 (sequence is synthesized)
cccagggaacagacaggcacggggcccctgtcccaaaagtgctgggagcctgagcctgatgctcccagccagcctggcccagccctttggtccaggggtcgggcccgcactcaggccttg

SEQ ID NO: 136314 - DNA, 120 bp, Artificial Sequence
  ENSG00000103269_14 (sequence is synthesized)
aacgttgtcatggtaacgggcctgcccggtggggggcgtggggaggggccccaggtgagcctcaccacttctcgtctgcacacacccatagaactgggctgggatgagatgtccctacaa

SEQ ID NO: 136315 - DNA, 120 bp, Artificial Sequence
  ENSG00000103269_15 (sequence is synthesized)
gttgctgaggatggtgctggccttggtgtgcagtgagtaggggccggggggagggccggggggcctctcagcctgcagccagggcacctcccacctgccgcgtccctctgcagtgagctc

SEQ ID NO: 136316 - DNA, 120 bp, Artificial Sequence
  ENSG00000103274_0 (sequence is synthesized)
cgaaggcggcaaaggcgacggaatggaggaggtgcctcacgactgtccaggggccgacagcgcccaggcgggcagaggggcttcatgtcagggatgccccaaccagcggctgtgcgcttc

SEQ ID NO: 136317 - DNA, 120 bp, Artificial Sequence
  ENSG00000103274_1 (sequence is synthesized)
tggagcgggggccactccggacacggctatagaggaaatcaaagagaaaatgaagactgtaaaacacaaaatcttggtattgtctgggaaaggcggtgttgggaaaagcacattcagcgc

SEQ ID NO: 136318 - DNA, 120 bp, Artificial Sequence
  ENSG00000103274_2 (sequence is synthesized)
ccaccttgcccatggcctagcagaggatgaaaacacacagattgctcttctagacatcgatatatgtgggccatcgattcccaagataatgggattggaaggagagcaggttcaccagag

SEQ ID NO: 136319 - DNA, 120 bp, Artificial Sequence
  ENSG00000103274_3 (sequence is synthesized)
tggctcaggctggtctccagtgtacgtggaagacaacctgggggtgatgtcagtgggcttcctgctcagcagtcctgatgatgctgttatctggaggggacccaagaaaaacggcatgat

SEQ ID NO: 136320 - DNA, 120 bp, Artificial Sequence
  ENSG00000103274_4 (sequence is synthesized)
caagcagttcctccgagatgtggactggggagaggtcgactacctcattgtggacaccccacctgggacgtcggatgaacacctctcggtcgtccggtacctggccacagcacacatcga

SEQ ID NO: 136321 - DNA, 120 bp, Artificial Sequence
  ENSG00000103274_5 (sequence is synthesized)
gtgtcactccaggatgtccggaaagaaatcaacttctgccgcaaggtgaagctgcccatcatcggggtggtggagaacatgagtggcttcatctgtcctaagtgcaagaaagaatctcag

SEQ ID NO: 136322 - DNA, 120 bp, Artificial Sequence
  ENSG00000103274_6 (sequence is synthesized)
atattccctcccacaaccgggggcgcggagctcatgtgccaggacttggaggtccctctcctcggcagagtgcccctggatccgctcataggtaagaattgtgacaaaggccagtctttt

SEQ ID NO: 136323 - DNA, 120 bp, Artificial Sequence
  ENSG00000103274_7 (sequence is synthesized)
ttcattgacgccccagattccccagccacgttagcctacagaagtataattcagagaatccaagagttttgtaatctccatcagtcaaaagaagagaacctcatcagttcctgaaacgag

SEQ ID NO: 136324 - DNA, 120 bp, Artificial Sequence
  ENSG00000103274_8 (sequence is synthesized)
agaatgttcaggaccaagcagttaccgagcgaggcactcactgggcagcacatccagccagacccgaccagctccgggatggggtgggtcacagcaaaaggaccagatgctggtgtggtc

SEQ ID NO: 136325 - DNA, 120 bp, Artificial Sequence
  ENSG00000103274_9 (sequence is synthesized)
cgaagccactttctcagagacactttaatcattgagtatttgtacacttttctttagaacatatataaagggcattctctacaaatgtgccgttttaagaataaaaccccctcaaatctc

SEQ ID NO: 136326 - DNA, 120 bp, Artificial Sequence
  ENSG00000103274_10 (sequence is synthesized)
gtgtggggcggcacctcactcctcggtcagccccacaggcacgggtcgggcacaacagggggcggctacagagaggggcaatggaaggaggagggtcaatggggcgctggagccagaccc

SEQ ID NO: 136327 - DNA, 120 bp, Artificial Sequence
  ENSG00000103274_11 (sequence is synthesized)
accctccagctggcaccccaagaggccaccgggagagaggccgagacccctgcgggcaggtagcgggagcaagcaggcctcaggcagaggggtgaggcctggaagaatggggtagaggtt

SEQ ID NO: 136328 - DNA, 120 bp, Artificial Sequence
  ENSG00000103274_12 (sequence is synthesized)
gctgccctctgaggcccctggaggcagttgggctgcatgaatggatgtgattggggacaggagcttgcagcagcccagggcacatccattcctgccagcctgcacctctgccacagttca

SEQ ID NO: 136329 - DNA, 120 bp, Artificial Sequence
  ENSG00000103274_13 (sequence is synthesized)
gctctgccgagatgggattggtgggcaggacgtttgtcaggggaaacatctgtgggagaaaatgacaagggagagcgttagcccacgatgaaggagtgggggaaggaacatatcagcccg

SEQ ID NO: 136330 - DNA, 120 bp, Artificial Sequence
  ENSG00000103274_14 (sequence is synthesized)
cctgcccgagtgccatgctcgtctcagtcactagctaggagcagcctgggagtggcattgcctcaacacaaacgtggtggtggattttggagcatggcagctgctgccagagatccaaga

SEQ ID NO: 136331 - DNA, 120 bp, Artificial Sequence
  ENSG00000103275_0 (sequence is synthesized)
aactcgcgggagcgtcaccgtcctgcgacgcttcagaggatccttaggcctcagtggtctttgacccccggccccaggacctgaccccaaggaaacctccgggacctgtggctggagagg

SEQ ID NO: 136332 - DNA, 120 bp, Artificial Sequence
  ENSG00000103275_1 (sequence is synthesized)
gactttgaacatgtcggggatcgccctcagcagactcgcccaggagaggaaagcatggaggaaagaccacccatttggtttcgtggctgtcccaacaaaaaatcccgatggcacgatgaa

SEQ ID NO: 136333 - DNA, 120 bp, Artificial Sequence
  ENSG00000103275_2 (sequence is synthesized)
cctcatgaactgggagtgcgccattccaggaaagaaagggactccgtgggaaggaggcttgtttaaactacggatgcttttcaaagatgattatccatcttcgccaccaaaatgtaaatt

SEQ ID NO: 136334 - DNA, 120 bp, Artificial Sequence
  ENSG00000103275_3 (sequence is synthesized)
cgaaccaccattatttcacccgaatgtgtacccttcggggacagtgtgcctgtccatcttagaggaggacaaggactggaggccagccatcacaatcaaacagatcctattaggaataca

SEQ ID NO: 136335 - DNA, 120 bp, Artificial Sequence
  ENSG00000103275_4 (sequence is synthesized)
ggaacttctaaatgaaccaaatatccaagacccagctcaagcagaggcctacacgatttactgccaaaacagagtggagtacgagaaaagggtccgagcacaagccaagaagtttgcgcc

SEQ ID NO: 136336 - DNA, 120 bp, Artificial Sequence
  ENSG00000103275_5 (sequence is synthesized)
ctcataagcagcgaccttgtggcatcgtcaaaaggaagggattggtttggcaagaacttgtttacaacatttttgcaaatctaaagttgctccatacaatgactagtcacctgggggggt

SEQ ID NO: 136337 - DNA, 120 bp, Artificial Sequence
  ENSG00000103275_6 (sequence is synthesized)
tgggcgggcgccatcttccattgccgccgcgggtgtgcggtctcgattcgctgaattgcccgtttccatacagggtctcttccttcggtcttttgtatttttgattgttatgtaaaactc

SEQ ID NO: 136338 - DNA, 120 bp, Artificial Sequence
  ENSG00000103275_7 (sequence is synthesized)
gcttttattttaatattgatgtcagtatttcaactgctgtaaaattataaacttttatacttgggtaagtcccccaggggcgagttcctcgctctgggatgcaggcatgcttctcaccgt

SEQ ID NO: 136339 - DNA, 120 bp, Artificial Sequence
  ENSG00000103275_8 (sequence is synthesized)
gcagagctgcacttggcctcagctggctgtatggaaatgcaccctccctcctgccgctcctctctagaaccttctagaacctgggctgtgctgcttttgagcctcagaccccaggtcagc

SEQ ID NO: 136340 - DNA, 120 bp, Artificial Sequence
  ENSG00000103275_9 (sequence is synthesized)
atctcggttctgcgccacttcctttgtgtttatatggcgttttgtctgtgttgctgtttagagtaaataaactgtttatataaaggttttggttgcattattatcattgaaagtgagagg

SEQ ID NO: 136341 - DNA, 120 bp, Artificial Sequence
  ENSG00000103275_10 (sequence is synthesized)
aggcggcctcccagtgcccggccctccccacccacctgcagccccaccgcgggccaggaccaggctctccatctgcttcggatgcacgcaggctgtgaggctctgtcttgccctggatct

SEQ ID NO: 136342 - DNA, 120 bp, Artificial Sequence
  ENSG00000103275_11 (sequence is synthesized)
gggcagctaagatctgcataggtcgggattggcatcgagaccctggcaactgcaccggtgccagctgtcttgggggccacaaggccaggtccagaccagggctgggggctgcctgaggac

SEQ ID NO: 136343 - DNA, 120 bp, Artificial Sequence
  ENSG00000103275_12 (sequence is synthesized)
tcctatccgggcagcctgctggcgggggttcccctcttcagtggccaggtcacagggatggagctgcgctgtgcatagggtgccacctcaggtgtctgtcccttgtgtcctcaggaggca

SEQ ID NO: 136344 - DNA, 120 bp, Artificial Sequence
  ENSG00000103275_13 (sequence is synthesized)
gccttgctaccacccgtggcaaacgccaggtgctttttctgggagagcccacagccgtggccctccagggcttccccgacccttagcgccaggtagagggccctgggcagcctgtgtctg

SEQ ID NO: 136345 - DNA, 120 bp, Artificial Sequence
  ENSG00000103275_14 (sequence is synthesized)
gaattcttcgtcctgaggccacctgagtgtggtctgtcctggggaggctgtgcgcctcagcagccgtcctgacgctgagccctctgcaaaggttgggccggccaggcctcttggggctgc

SEQ ID NO: 136346 - DNA, 120 bp, Artificial Sequence
  ENSG00000103275_15 (sequence is synthesized)
ctgagccactgcaggaagtggcctggctgggaagttgggtgccggtcacctcccagcaggaaggcacagtggacagagatgggaagccctgggggacacagcccggtgctcccagccctc

SEQ ID NO: 136347 - DNA, 120 bp, Artificial Sequence
  ENSG00000103275_16 (sequence is synthesized)
caacctctggctcccaacccagtctccccatcctagcgagcttggccctcctcagtttcgtttcaagccttggggctggagctggccctgctgccctggcaccccccggtggctggagct

SEQ ID NO: 136348 - DNA, 120 bp, Artificial Sequence
  ENSG00000103275_17 (sequence is synthesized)
gggtccccgtggcccaagtgcagggtcccaagagggcagggcggggctccccaaaggagcaaagaatgcagggagggcggtccagggccctgggaaggggagctcggcaccctccaggtc

SEQ ID NO: 136349 - DNA, 120 bp, Artificial Sequence
  ENSG00000103275_18 (sequence is synthesized)
cgtgtgggactccagccgctgttggctgggaatcgaagttagaggtgacttccaaaggccccccgagccggcagtgccccccaccacccctccagcgactctgcggtgccagtgccttgt

SEQ ID NO: 136350 - DNA, 120 bp, Artificial Sequence
  ENSG00000103275_19 (sequence is synthesized)
tggcttttccggctacgcaccctgcagtcactgagctctcggtctgacgtctgatgtttgtggtttgtttataacacggggccttacctggggaattcagctggtttgaatatttgtagc

SEQ ID NO: 136351 - DNA, 120 bp, Artificial Sequence
  ENSG00000103275_20 (sequence is synthesized)
ccgctcccagaatgtcttattttgtaatgactgaactacatttagtaatagttacacatgtatatggttaatacatatggaaattcaatatattttgtagttaacgtattctgaagtaac

SEQ ID NO: 136352 - DNA, 120 bp, Artificial Sequence
  ENSG00000103275_21 (sequence is synthesized)
ggatgtttctcgccaatcgtagtgacttcagctaacgaaatgttcttttgtagtaccacggtcctcggcctaacgaaggacgtgaaccttgtaagaggagagctctgaaacgcggtcacc

SEQ ID NO: 136353 - DNA, 120 bp, Artificial Sequence
  ENSG00000103275_22 (sequence is synthesized)
tttgtttagtggaagggaaagtgtgttcccggcatgaggtgcctcggaattagtaaagaattgtgggcaatggattaaccactgtatctaagaatccaccattaaagcatttgcacagac

SEQ ID NO: 136354 - DNA, 80 bp, Artificial Sequence
  ENSG00000103275_23 (sequence is synthesized)
gacccggtcctgcttgttgcgtgggcgggaggggggaccggaagcgcccctcccccacgggctcgccccgcccccgccgc

SEQ ID NO: 136355 - DNA, 120 bp, Artificial Sequence
  ENSG00000103275_24 (sequence is synthesized)
cagcccccggtttagggagcatccacacttctcctcccgtcggtcatgctcgcattcggccttttgtacggggtcagctcattgggcggatgagaaggtgtccccgcctaccgccccgaa

SEQ ID NO: 136356 - DNA, 120 bp, Artificial Sequence
  ENSG00000103275_25 (sequence is synthesized)
agggtcctcggagctgctctggctgcgcgcggagcgggctccggagggaagtcccgagacaaagggaagcgccgccgccgccgccccgctcggtcctccacctgtccgctacgctcgccg

SEQ ID NO: 136357 - DNA, 120 bp, Artificial Sequence
  ENSG00000103275_26 (sequence is synthesized)
ctgccttggcttctttgatcccaaccccacccccgatttctgctctgctgactggggaagtcatcgtgccacccagaacctgagtgcgggcctctcagagctccttcgtccgtgggtctg

SEQ ID NO: 136358 - DNA, 120 bp, Artificial Sequence
  ENSG00000103275_27 (sequence is synthesized)
gggaagcgagagctgtgagtcctcaagtcgcagctgggctgctccacgtgggagtggagggtggaggaacgtgtggagtttcggagtccagcccagtgcggagacagccttgaaaccgtg

SEQ ID NO: 136359 - DNA, 120 bp, Artificial Sequence
  ENSG00000103275_28 (sequence is synthesized)
gttggcgggcgctccactccgctctgggctcgaaccctgcctgaccatagctgtgccccccactttctccctgtctggcccctggctccccccccctcacttagaggagggcacggggaa

SEQ ID NO: 136360 - DNA, 120 bp, Artificial Sequence
  ENSG00000103275_29 (sequence is synthesized)
gggcaaacggtccagagggcgggcggcctgcgggctcctctgcatcatgtgaggagggcgtggggaaggacatcccggtggggcccggtctggggctgcctccagcccgggctgcctgtc

SEQ ID NO: 136361 - DNA, 120 bp, Artificial Sequence
  ENSG00000103275_30 (sequence is synthesized)
ttggacttagtcgtggacctggaggccagtgcccggctggcccctgtcaccctctcgctgtgacgccagcgcctgctgactggaggacccaggttccttcgcctgctttttctcaggctg

SEQ ID NO: 136362 - DNA, 120 bp, Artificial Sequence
  ENSG00000103275_31 (sequence is synthesized)
ggcagccacctgcagccggggccccgcgaggccgcgccttcctcctgcgcggggagcggcttccggggtcacggtcgccccgcggacggataggatgggccgcggggggagagtcttgga

SEQ ID NO: 136363 - DNA, 120 bp, Artificial Sequence
  ENSG00000103275_32 (sequence is synthesized)
ctggggtgagggcacgggtgtgctcttggcgctgccggccccagtgtgcggcactcgttgccccccagcccagcccccgacccccgtctcctcctctcctttccaggagggcctttccga

SEQ ID NO: 136364 - DNA, 120 bp, Artificial Sequence
  ENSG00000103275_33 (sequence is synthesized)
gtcgggcctctggcccccggtgtcctcgcagtcctggaggttgtgtcctagaagcgatccccttcctcctgggccggcctgcggcaggcaagcagcccatctcaccacggtttatttccc

SEQ ID NO: 136365 - DNA, 120 bp, Artificial Sequence
  ENSG00000103275_34 (sequence is synthesized)
caagcagcccatctcaccacggtttatttccccacagactccgtgggaaggaggctgaggcaggagaagtgcttgaatccaggaggcgggtccagtgagccgagatcgcgccactacact

SEQ ID NO: 136366 - DNA, 120 bp, Artificial Sequence
  ENSG00000103275_35 (sequence is synthesized)
ggcctgtgttcccagactgcctggctgtgctgggagttctgtcctgggagagacacagcttcgtctcggctgcggccgtgtccccaaggctctgttccctgtgtgcaaaggtggatatgt

SEQ ID NO: 136367 - DNA, 120 bp, Artificial Sequence
  ENSG00000103275_36 (sequence is synthesized)
cttcctttagtctcctcatggccacaatttaatttttttgaaaagtttttggccaaataacctggctaccaacccggggccccagtgttgggaggagggtgatgtggggaaggacgtgac

SEQ ID NO: 136368 - DNA, 120 bp, Artificial Sequence
  ENSG00000103275_37 (sequence is synthesized)
ctggaagggcgttggctatgtccctggacgtctcctgcagctcctcccatctcccctgagtctggcccagctggaaaggatgtgggggccacaggtaaattcgaaccaccattatttcac

SEQ ID NO: 136369 - DNA, 120 bp, Artificial Sequence
  ENSG00000103275_38 (sequence is synthesized)
gctcctccccgtcccagccaaggccgcctggcaggacgggagtggaggacacaggctcaccctacggacagccagggtccacgcctctgtggggaaggtcggggggcataaaccctgtgg

SEQ ID NO: 136370 - DNA, 120 bp, Artificial Sequence
  ENSG00000103275_39 (sequence is synthesized)
gcagcaggcaccgttgcacaccgtctgcggtgggcatggatggcgccggagccgtgtcccggggagggagcaggccaggtgacgggctgtcttgggccactgccccagtgagttgtggcc

SEQ ID NO: 136371 - DNA, 120 bp, Artificial Sequence
  ENSG00000103275_40 (sequence is synthesized)
agctaggaggggaaggaccctgggcgtgggtgccagaggaggccatgctgagaggcctctccaccggctcagcctcccatggaccccagcctcccgcgccgcccttgctgcttgtcccca

SEQ ID NO: 136372 - DNA, 120 bp, Artificial Sequence
  ENSG00000103275_41 (sequence is synthesized)
ggggggcccagcccagcagggctcagtgacgtgatgctgtcacacggaccctgggcttccaccctgtccctgtgaggtgctgctgtggctagaagggtccccgtgggcctggggtcctgt

SEQ ID NO: 136373 - DNA, 120 bp, Artificial Sequence
  ENSG00000103275_42 (sequence is synthesized)
ctgcaccgaggagggcctggtgtgagttaggatgcagacgacagccaaacagtgctggggaaagcagggaggaccctgccctgagcagaggccatgcgcccgcctgtcctgttccctctg

SEQ ID NO: 136374 - DNA, 120 bp, Artificial Sequence
  ENSG00000103275_43 (sequence is synthesized)
cagctgttctgggcaggtccataagaaggtgggttggggcctccgaccccccactgctccgcctgcagcgttgagaaacccagccccatctcaccacgggtccccacacctctgaggggg

SEQ ID NO: 136375 - DNA, 120 bp, Artificial Sequence
  ENSG00000103275_44 (sequence is synthesized)
tctcagggcccccaatggccagggacccagaaggctcacctgcagccaccccacacatccctgccactgtgggcatcagaggccctctccctccagggtgcatctcctggtcaggagggg

SEQ ID NO: 136376 - DNA, 120 bp, Artificial Sequence
  ENSG00000103275_45 (sequence is synthesized)
ggtgcatctcctggtcaggaggggggaggctgaggggtcccggttgccttaggcccggcctgcacaggtcgtgaggaaaagcacctggtttcggccgggcgcagtggctcacgcttgtaa

SEQ ID NO: 136377 - DNA, 120 bp, Artificial Sequence
  ENSG00000103275_46 (sequence is synthesized)
tccatggagctgggagggagtgagatcacagatttggaggtcggctttgatccctgatccccgcctcaggctgcagatgcgagtctgtttccagctccacgggtgggcggtgcacgtaat

SEQ ID NO: 136378 - DNA, 120 bp, Artificial Sequence
  ENSG00000103275_47 (sequence is synthesized)
agacttagtctctcatcccagctaattggctgggaagctccagagtcctttgcagggagaggctgtgagatccaggctggagctcctgggctaggagtgcctggaccctcagtgattgtt

SEQ ID NO: 136379 - DNA, 120 bp, Artificial Sequence
  ENSG00000103275_48 (sequence is synthesized)
ggcgatgaagacaggatttggtgcccacaagaccccagccctggatgggatggacgtgcagaagcgccaccactccgagtctcactggagggtttatcttgccccacctcactgctcttc

SEQ ID NO: 136380 - DNA, 120 bp, Artificial Sequence
  ENSG00000103275_49 (sequence is synthesized)
agggctgaggccaggttcgactttgagcctacagctaagttagtgatctcagtcagttcagcaaaactcaggagagggaggagagggccgccacgtccctgccgtcccatagctggaaat

SEQ ID NO: 136381 - DNA, 120 bp, Artificial Sequence
  ENSG00000103275_50 (sequence is synthesized)
cggcaggccctttctgtggtgagttccacgcattaacacgtgcccagcacctagacagcgcctggccacggtgaggcgagagtgctgtgtaaaagcttccactgcaattgtcactcaaga

SEQ ID NO: 136382 - DNA, 120 bp, Artificial Sequence
  ENSG00000103275_51 (sequence is synthesized)
cacacaagtgttttccacagtggcagtgaccagaggagcttgaggactgctgacagcaccagctggtcgagacttgcttcatttttggattgtcctttgctgtttgattttttttttaaa

SEQ ID NO: 136383 - DNA, 120 bp, Artificial Sequence
  ENSG00000103275_52 (sequence is synthesized)
ccatgagcaggtattacttaagatgacttattttaattaagaaaaatataagaatgagacacagtagctgctttcattgattctgttcaaccgttgattggaattccaagcaaatgcagc

SEQ ID NO: 136384 - DNA, 120 bp, Artificial Sequence
  ENSG00000103275_53 (sequence is synthesized)
cagcaagacaagaaaaagaagtcacaacggaagaggtggggaggaaggccaggacaacagctcagtaaagctgaggtgcaaggctgggcacggtggctcacacctggaatcccagcactt

SEQ ID NO: 136385 - DNA, 71 bp, Artificial Sequence
  ENSG00000103275_54 (sequence is synthesized)
caaacaaacaaacaaaaattagcgggtgtggtggtgggtgcctttaatcccagctgctcgggaggctgagg

SEQ ID NO: 136386 - DNA, 85 bp, Artificial Sequence
  ENSG00000103275_55 (sequence is synthesized)
acaaaaattagcgggtgtggtggtgggtgccttgtgcttgaatccaggaggcgggtccagtgagccgagatcgcgccactacact

SEQ ID NO: 136387 - DNA, 120 bp, Artificial Sequence
  ENSG00000103275_56 (sequence is synthesized)
agctcagaaggtggtgctggcaaggttggggtgacagctgtgtccctaccgagggcatttctggttgagaaggaagcaggctgggcctggccgggcacagggctgagctgtggcagaggg

SEQ ID NO: 136388 - DNA, 120 bp, Artificial Sequence
  ENSG00000103275_57 (sequence is synthesized)
gaaggggctctgatgtgtgttgggagcaggcctgaggggcgggcagcctttgcgtgctggaacccgggattctgctgtgtccttccaggtgtggctcaggtcgcgggagctgggtttgca

SEQ ID NO: 136389 - DNA, 120 bp, Artificial Sequence
  ENSG00000103275_58 (sequence is synthesized)
ggagagccaccccggcctaaaaccgtctactggagaacctcctggggcacagggactggcggcagccacctaggatgcctgcttggggccccgtgtgtctgtggcaagcagggcggccca

SEQ ID NO: 136390 - DNA, 120 bp, Artificial Sequence
  ENSG00000103275_59 (sequence is synthesized)
tgtgcctgtcctctttgcccggctcacatgaagtgcttggccagggactccaggccggcttgcacataaggttcatgctcgtggactctgaaggaaggagagatccctgaggtgttggtc

SEQ ID NO: 136391 - DNA, 120 bp, Artificial Sequence
  ENSG00000103275_60 (sequence is synthesized)
ctgcccgaggccttgttccctccggcccatgccagcctctgggtttcgctctgaaactcacagcagctccggccccctgagctgagcagtcccagcaggactcagctttgcccgagacag

SEQ ID NO: 136392 - DNA, 120 bp, Artificial Sequence
  ENSG00000103275_61 (sequence is synthesized)
gatgtggcttggatttgtcacttgtctgaggctctgctgagaacgtcccttgcccttcacattacggcgaggcaggtgcgcgcgcggccccaaggaagacgggagtggtgtcgggttgtg

SEQ ID NO: 136393 - DNA, 120 bp, Artificial Sequence
  ENSG00000103275_62 (sequence is synthesized)
ctcagttctgagcgcctgatactaaggcagggacccagcaccccacatccatctggggccccagccctgcctagtccccacctgatggtatggtgaggaccctgccatgtcagccaccac

SEQ ID NO: 136394 - DNA, 120 bp, Artificial Sequence
  ENSG00000103275_63 (sequence is synthesized)
agggtggcagctaccccccagccgcagcggcccagcctctgaacatctgtctcctcaccttcgagcagaggccgcagcatgtgtcgcagaccagggctgggttggggccatggggagggg

SEQ ID NO: 136395 - DNA, 120 bp, Artificial Sequence
  ENSG00000103275_64 (sequence is synthesized)
tcctacctgcccccgcctcccggtgatctgggcgccgctcacaaggcctcccctggtagacccccggggtcggacgacggcttgcaagaagagagtccctgctgggccaggccaccgtat

SEQ ID NO: 136396 - DNA, 120 bp, Artificial Sequence
  ENSG00000103275_65 (sequence is synthesized)
ccatttactccgtgggaaggaggcttgtttaaactacggatgcttttcaaagatgattatccatcttcgccaccaaaatgtaagtaaattcgaaccaccattatttcacccgaatgtgta

SEQ ID NO: 136397 - DNA, 120 bp, Artificial Sequence
  ENSG00000103310_0 (sequence is synthesized)
tcagctcccacttataagtgagaacagaatgttaagaatcatttttgtaataactttagtttttcctacctcctgataggagacactgttttacggagcagctatttcttcctgtgttca

SEQ ID NO: 136398 - DNA, 120 bp, Artificial Sequence
  ENSG00000103310_1 (sequence is synthesized)
agacactgttttacggagcagctatttcttcctgtgttcaaagtcagttgctgaacagatggtagcttcctgcttttccggagcagaatcctagacatggatgctcctgggcccagagcc

SEQ ID NO: 136399 - DNA, 120 bp, Artificial Sequence
  ENSG00000103310_2 (sequence is synthesized)
atttgttcggtggctgtccccagcacaccacaggtctgggttagggcagctggcagaatacccggcgcaagctgtcaggaatcagaggccacttccttccccaatccttccgtttcagct

SEQ ID NO: 136400 - DNA, 120 bp, Artificial Sequence
  ENSG00000103310_3 (sequence is synthesized)
gggagaatgggacaagattcaggtgcccccaatggggagagggtgtggatgcggctggcttcctgctataaaaacacagagcagcctaccctctacctggttgatctggtagtgtcttct

SEQ ID NO: 136401 - DNA, 120 bp, Artificial Sequence
  ENSG00000103310_4 (sequence is synthesized)
gctatggcgtgcaggcagagaggaggctcttggagtccctcaggctggttcaatgcaggctggagcacctacaggtcgatttctctcttcttcgcccttgtgacttcagggaactccata

SEQ ID NO: 136402 - DNA, 120 bp, Artificial Sequence
  ENSG00000103310_5 (sequence is synthesized)
gatgtttctcagttggtaaatcctgcctttccaggcactgtcacttgcgatgaaagggaaataacagtggagttcccaagcagtcctggcaccaagaaatggcatgcatctgtggtggat

SEQ ID NO: 136403 - DNA, 120 bp, Artificial Sequence
  ENSG00000103310_6 (sequence is synthesized)
cctcttggtctcgacatgccgaactgcacttacatcctggacccagaaaagctcaccctgagggctacctatgataactgtaccaggagagtgcatggtggacaccagatgaccatcaga

SEQ ID NO: 136404 - DNA, 120 bp, Artificial Sequence
  ENSG00000103310_7 (sequence is synthesized)
gtcatgaacaacagtgctgccttaagacacggagctgtcatgtatcagttcttctgtccagctatgcaagtagaagagacccaggggctttcagcatctacaatctgccagaaggatttc

SEQ ID NO: 136405 - DNA, 120 bp, Artificial Sequence
  ENSG00000103310_8 (sequence is synthesized)
atgtctttttccttgccacgggtcttctctggcttggctgacgacagtaaggggaccaaagttcagatgggatggagcattgaggttggtgatggtgcaagagccaaaactctgaccctg

SEQ ID NO: 136406 - DNA, 120 bp, Artificial Sequence
  ENSG00000103310_9 (sequence is synthesized)
ccagaggccatgaaggaaggcttcagcctcttgattgacaaccacaggatgaccttccatgtgccattcaatgccactggagtgactcactatgtgcaaggtaacagtcatctctacatg

SEQ ID NO: 136407 - DNA, 120 bp, Artificial Sequence
  ENSG00000103310_10 (sequence is synthesized)
gtgtctctgaagcttacatttatatctcctggacagaaggtgatcttctcttcacaagctatttgtgcaccagatcctgtgacctgcaatgccacacacatgactctcaccataccagag

SEQ ID NO: 136408 - DNA, 120 bp, Artificial Sequence
  ENSG00000103310_11 (sequence is synthesized)
tcagcaaaactctgctcaaaacgaaattatctgaaaaatgcctactccatcagttctacttagcttcactcaagctgacctttctccttcggccagagacagtatccatggtgatctatc

SEQ ID NO: 136409 - DNA, 120 bp, Artificial Sequence
  ENSG00000103310_12 (sequence is synthesized)
ctgagtgtctctgtgagtcacccgtttctatagttacaggggagctgtgcacccaggatgggtttatggacgtcgaggtctacagctaccaaacacaaccagctcttgacctgggtactc

SEQ ID NO: 136410 - DNA, 120 bp, Artificial Sequence
  ENSG00000103310_13 (sequence is synthesized)
tgagggtgggaaactcatcctgccagcctgtctttgaggctcagtctcaggggctggtacggttccacatacccctgaatggatgtggaacgagatataagttcgaagatgataaagtcg

SEQ ID NO: 136411 - DNA, 120 bp, Artificial Sequence
  ENSG00000103310_14 (sequence is synthesized)
tctatgaaaacgaaatacatgctctctggacggattttcctccaagcaaaatatctagagacagtgagttcagaatgacagtgaagtgttcttatagcaggaatgacatgctactaaaca

SEQ ID NO: 136412 - DNA, 120 bp, Artificial Sequence
  ENSG00000103310_15 (sequence is synthesized)
tcaacgttgaaagccttactcctccagtggcctcagtgaagttgggtccatttaccttgatcctgcaaagctacccagataattcctaccaacaaccttatggggaaaacgagtaccctc

SEQ ID NO: 136413 - DNA, 120 bp, Artificial Sequence
  ENSG00000103310_16 (sequence is synthesized)
tagtgagattcctccgccaaccaatttacatggaagtgagagtcctaaacagggatgaccccaacatcaagctggtcttagatgactgctgggcgacgtccaccatggatccagactctt

SEQ ID NO: 136414 - DNA, 120 bp, Artificial Sequence
  ENSG00000103310_17 (sequence is synthesized)
tcccccagtggaacgttgtcgtggatggctgtgcatatgacctggacaactaccagaccaccttccatccagtcggctcctctgtgacccatcctgatcactatcagaggtttgacatga

SEQ ID NO: 136415 - DNA, 120 bp, Artificial Sequence
  ENSG00000103310_18 (sequence is synthesized)
aggcttttgcctttgtatcagaagcccacgtgctctctagcctggtctacttccactgcagtgccttaatctgtaatcgactctcccctgactccccactgtgttctgtgacctgccctg

SEQ ID NO: 136416 - DNA, 120 bp, Artificial Sequence
  ENSG00000103310_19 (sequence is synthesized)
tgtcctctaggcacaggcgagccacaggggccactgaagcagagaaaatgacagtcagcctcccaggacccattctcctgttgtcagatgactcctcattcagaggtgtcggctcatctg

SEQ ID NO: 136417 - DNA, 120 bp, Artificial Sequence
  ENSG00000103310_20 (sequence is synthesized)
atctaaaagcaagtgggagcagtggggagaagagtaggagtgaaacaggggaggaggttggctcacgaggtgctatggacaccaaagggcacaagactgctggagatgttggttccaaag

SEQ ID NO: 136418 - DNA, 120 bp, Artificial Sequence
  ENSG00000103310_21 (sequence is synthesized)
ctgtggctgctgtggctgcctttgcaggtgtggtggcaactctaggcttcatctactacctgtacgagaaaaggactgtgtcaaatcactaaatgggcttctaaataaagcagtcaaaat

SEQ ID NO: 136419 - DNA, 120 bp, Artificial Sequence
  ENSG00000103310_22 (sequence is synthesized)
ctggctgcaagtcataccatctcaaagctcaagttctatcactgagttggggcggaagtgaagggactgaagtaccttagaaatggactggtggtcttgactctatagctttggactgtc

SEQ ID NO: 136420 - DNA, 120 bp, Artificial Sequence
  ENSG00000103310_23 (sequence is synthesized)
agtatgttcaattgtcaaccactgaactccaccgggtcctgacttgaagtatactcttgtgggtagtcctcatacggctgataacttgcccgtgagctctaattgccaacataacagatt

SEQ ID NO: 136421 - DNA, 120 bp, Artificial Sequence
  ENSG00000103310_24 (sequence is synthesized)
caaactccaaaaggcctcatttgatcatcttgtataagtgaaatatcaagtaactaaagttcattctctaacacaaaacctctttaacttctgtcatgaaaaatcgtctaagtctttcta

SEQ ID NO: 136422 - DNA, 120 bp, Artificial Sequence
  ENSG00000103313_0 (sequence is synthesized)
gaagccagacagctggctcgagcctctcctgctcagcaccatggctaagacccctagtgaccatctgctgtccaccctggaggagctggtgccctatgacttcgagaagttcaagttcaa

SEQ ID NO: 136423 - DNA, 120 bp, Artificial Sequence
  ENSG00000103313_1 (sequence is synthesized)
gctgcagaacaccagtgtgcagaaggagcactccaggatcccccggagccagatccagagagccaggccggtgaagatggccactctgctggtcacctactatggggaagagtacgccgt

SEQ ID NO: 136424 - DNA, 120 bp, Artificial Sequence
  ENSG00000103313_2 (sequence is synthesized)
gcagctcaccctgcaggtcctgcgggccatcaaccagcgcctgctggccgaggagctccacagggcagccattcaggaatattccacacaagaaaacggcacagatgattccgcagcgtc

SEQ ID NO: 136425 - DNA, 120 bp, Artificial Sequence
  ENSG00000103313_3 (sequence is synthesized)
cagctccctgggggagaacaagcccaggagcctgaagactccagaccaccccgaggggaacgaggggaacggccctcggccgtacgggggcggagctgccagcctgcggtgcagccagcc

SEQ ID NO: 136426 - DNA, 120 bp, Artificial Sequence
  ENSG00000103313_4 (sequence is synthesized)
cgaggccgggagggggctgtcgaggaagcccctgagcaaacgcagagagaaggcctcggagggcctggacgcgcagggcaagcctcggacccggagcccggccctgccgggcgggagaag

SEQ ID NO: 136427 - DNA, 120 bp, Artificial Sequence
  ENSG00000103313_5 (sequence is synthesized)
cagggcgctagaggggggccaggccgaggtccggctgcgcagaaacgccagctccgcggggaggctgcaggggctggcggggggcgccccggggcagaaggagtgcaggcccttcgaagt

SEQ ID NO: 136428 - DNA, 120 bp, Artificial Sequence
  ENSG00000103313_6 (sequence is synthesized)
gcccttcgaagtgtacctgccctcgggaaagatgcgacctagaagccttgaggtcaccatttctacaggggagaaggcgcccgcaaatccagaaattctcctgactctagaggaaaagac

SEQ ID NO: 136429 - DNA, 120 bp, Artificial Sequence
  ENSG00000103313_7 (sequence is synthesized)
agctgcgaatctggactcggcaacagaaccccgggcaaggcccactccggatggaggggcatctgcggacctgaaggaaggccctggaaatccagaacattcggtcaccggaaggccacc

SEQ ID NO: 136430 - DNA, 120 bp, Artificial Sequence
  ENSG00000103313_8 (sequence is synthesized)
agacacggctgcgagtccccgctgccacgcccaggaaggagacccagttgacggtacctgtgtgcgtgattcctgcagcttccccgaggcagtttctgggcacccccaggcctcaggcag

SEQ ID NO: 136431 - DNA, 120 bp, Artificial Sequence
  ENSG00000103313_9 (sequence is synthesized)
ccgctcacctggctgcccccggtgccaggactcccatgaaaggaagagcccgggaagcctaagcccccagcccctgccacagtgtaagcgccacctgaagcaggtccagctgctcttctg

SEQ ID NO: 136432 - DNA, 120 bp, Artificial Sequence
  ENSG00000103313_10 (sequence is synthesized)
tgaggatcacgatgagcccatctgcctcatctgcagtctgagtcaggagcaccaaggccaccgggtgcgccccattgaggaggtcgccctggaacacaagaagaaaattcagaagcagct

SEQ ID NO: 136433 - DNA, 120 bp, Artificial Sequence
  ENSG00000103313_11 (sequence is synthesized)
ggagcatctgaagaagctgagaaaatcaggggaggagcagcgatcctatggggaggagaaggcagtgagctttctgaaacaaactgaagcgctgaagcagcgggtgcagaggaagctgga

SEQ ID NO: 136434 - DNA, 120 bp, Artificial Sequence
  ENSG00000103313_12 (sequence is synthesized)
gcaggtgtactacttcctggagcagcaagagcatttctttgtggcctcactggaggacgtgggccagatggttgggcagatcaggaaggcatatgacacccgcgtatcccaggacatcgc

SEQ ID NO: 136435 - DNA, 120 bp, Artificial Sequence
  ENSG00000103313_13 (sequence is synthesized)
cctgctcgatgcgctgattggggaactggaggccaaggagtgccagtcagaatgggaacttctgcaggacattggagacatcttgcacagggctaagacagtgcctgtccctgaaaagtg

SEQ ID NO: 136436 - DNA, 120 bp, Artificial Sequence
  ENSG00000103313_14 (sequence is synthesized)
aaacaaaagatccaactcctccaccagaagtcagagtttgtggagaagagcacaaagtacttctcagaaaccctgcgttcagaaatggaaatgttcaatgttccggagctgattggcgct

SEQ ID NO: 136437 - DNA, 120 bp, Artificial Sequence
  ENSG00000103313_15 (sequence is synthesized)
caggcacatgctgttaatgtgattctggatgcagaaaccgcttaccccaacctcatcttctctgatgatctgaagagtgttagacttggaaacaagtgggagaggctgcctgatggcccg

SEQ ID NO: 136438 - DNA, 120 bp, Artificial Sequence
  ENSG00000103313_16 (sequence is synthesized)
caaagatttgacagctgtatcattgttctgggctctccgagtttcctctctggccgccgttactgggaggtggaggttggagacaagacagcatggatcctgggagcctgcaagacatcc

SEQ ID NO: 136439 - DNA, 120 bp, Artificial Sequence
  ENSG00000103313_17 (sequence is synthesized)
ataagcaggaaagggaacatgactctgtcgccagagaatggctactgggtggtgataatgatgaaggaaaatgagtaccaggcgtccagcgttcccccgacccgcctgctaataaaggag

SEQ ID NO: 136440 - DNA, 120 bp, Artificial Sequence
  ENSG00000103313_18 (sequence is synthesized)
cctcccaagcgtgtgggcatcttcgtggactacagagttggaagcatctccttttacaatgtgacagccagatcccacatctatacattcgccagctgctctttctctgggccccttcaa

SEQ ID NO: 136441 - DNA, 120 bp, Artificial Sequence
  ENSG00000103313_19 (sequence is synthesized)
cctatcttcagccctgggacacgtgatggagggaagaacacagctcctctgactatctgtccagtgggtggtcaggggcctgactgaatgcccaacactgcatctctcttcctgcttctg

SEQ ID NO: 136442 - DNA, 120 bp, Artificial Sequence
  ENSG00000103313_20 (sequence is synthesized)
gccttgtatcttgcattcacactcaatagtcacggaatgccgactaggtgctagctgctatgggaaatgcaaaaataacaaaatagttactgtgcccacggagcctacccgattatagca

SEQ ID NO: 136443 - DNA, 120 bp, Artificial Sequence
  ENSG00000103313_21 (sequence is synthesized)
gaggtaagttaggaacgaacatgttagtcaatccgggtgaagacatgtactgatgacacaccatggatttcagaggaggaagtacggagtcgttgcataatccgcccctggtgggtggca

SEQ ID NO: 136444 - DNA, 120 bp, Artificial Sequence
  ENSG00000103313_22 (sequence is synthesized)
ctctcaggtgctcctgaacagaagatttggccctcattttccctcagaaccccacggcaaggatatatgtccccttgttctctctgcttctgtcttgaggatatgggaagcctagagaaa

SEQ ID NO: 136445 - DNA, 120 bp, Artificial Sequence
  ENSG00000103313_23 (sequence is synthesized)
agcctagagaaacgcaagcagactggattgggatagaagtatttgtgtacctggattaatgaactatgattttttttttttttttttgagaccaaatcttgctctgtggcccaggctgga

SEQ ID NO: 136446 - DNA, 120 bp, Artificial Sequence
  ENSG00000103313_24 (sequence is synthesized)
gtgtgtgctggcctggggttgttgcagtgttcccttgtgctgttgacttgaggggccctatttagaagacaaaaaaaaaaaccaaacacctggagcaaagttccggagctgattggcgct

SEQ ID NO: 136447 - DNA, 120 bp, Artificial Sequence
  ENSG00000103313_25 (sequence is synthesized)
attatacccaacatagcatgcagggccctaagcagggggttccttgtctttccttgttgtcaggacagtgtaatttagcccctcttaatgctaatgctcaggatttttttccctatctga

SEQ ID NO: 136448 - DNA, 120 bp, Artificial Sequence
  ENSG00000103313_26 (sequence is synthesized)
aaagtgctgggattacagacatgagccaatgcacccagcccaaatttccccattttataagacaacatttatattggattagggacccacccaatcccagtaggaccacatcttaactaa

SEQ ID NO: 136449 - DNA, 120 bp, Artificial Sequence
  ENSG00000103313_27 (sequence is synthesized)
acccacccaatcccagtaggaccacatcttaactaattacatctgcaagaactcttatctccaaataagatcacatgctgagtactgggggttagggcttcaacgtgtaaattttggaag

SEQ ID NO: 136450 - DNA, 120 bp, Artificial Sequence
  ENSG00000103313_28 (sequence is synthesized)
aaaccttaacaccaggtttaaggacattttcccagagctagccccagccatgctcagtcttttctggaaggttccagacaatatcgcctcctgctctggaatctaggccttgaagaggca

SEQ ID NO: 136451 - DNA, 120 bp, Artificial Sequence
  ENSG00000103313_29 (sequence is synthesized)
gcataagcccacctcttatccacctccaggaggtgggcttctgggggttcctggacatccacgtccacccacagcacagacccccatacctccctgtcctctgctccccagaaacaaact

SEQ ID NO: 136452 - DNA, 120 bp, Artificial Sequence
  ENSG00000103313_30 (sequence is synthesized)
cacaggtacagcgaggtcctgtggtgtaccctggggtgtcttgcagaaagcatatgggggagacagtcccagaagggacctgggagggagatgttcccaaccccggggtctgtgattcca

SEQ ID NO: 136453 - DNA, 86 bp, Artificial Sequence
  ENSG00000103316_0 (sequence is synthesized)
tcaccttctgccgaaaaactcctggaagaaaagatcctgcaatttggctttttgtgagatggaaaagattacaccttgccctgcaa

SEQ ID NO: 136454 - DNA, 120 bp, Artificial Sequence
  ENSG00000103316_1 (sequence is synthesized)
gctttttgtgagatggaaaagattacaccttgccctgcaaacttcccccctttaaaggcgaaggtttgttagagcagcgggcgcgctcataaagggcacagccgagggtacgtggatcgc

SEQ ID NO: 136455 - DNA, 120 bp, Artificial Sequence
  ENSG00000103316_2 (sequence is synthesized)
ggtgcggagactgaggttagaaggcacaggtggcgagatgagccgggtaccagcgttcctgagcgcggccgaggtggaggaacacctccgcagctccagcctcctcatcccgcctctaga

SEQ ID NO: 136456 - DNA, 120 bp, Artificial Sequence
  ENSG00000103316_3 (sequence is synthesized)
gacggccctggccaacttctccagcggtcccgaaggaggggtcatgcagcccgtgcgcaccgtggtgccggtgaccaagcacaggggctacctgggggtcatgcccgcctacagtgctgc

SEQ ID NO: 136457 - DNA, 120 bp, Artificial Sequence
  ENSG00000103316_4 (sequence is synthesized)
agaggatgcactgaccaccaagttggtcaccttctacgaggaccgcggcatcacctcggtcgtcccttcccaccaggctactgtgctactctttgagcccagcaatggcaccctgctggc

SEQ ID NO: 136458 - DNA, 120 bp, Artificial Sequence
  ENSG00000103316_5 (sequence is synthesized)
ggtcatggatggaaatgtcataactgcaaagagaacagctgcagtttctgccattgccaccaagtttctgaaacctcccagcagtgaagtgctgtgcatccttggggctggggtccaggc

SEQ ID NO: 136459 - DNA, 120 bp, Artificial Sequence
  ENSG00000103316_6 (sequence is synthesized)
ggaggtgaggatatggaaccgcaccaaagaaaatgcagagaagtttgcagacacagtgcaaggagaggtacgggtctgttcttcggtccaggaggctgtggcaggtgcagatgtgatcat

SEQ ID NO: 136460 - DNA, 120 bp, Artificial Sequence
  ENSG00000103316_7 (sequence is synthesized)
cacagtcaccctggcaacagagcccattttgtttggtgaatgggtgaagccaggggctcacatcaatgctgttggagccagcagacctgactggagagaactggatgatgagctcatgaa

SEQ ID NO: 136461 - DNA, 120 bp, Artificial Sequence
  ENSG00000103316_8 (sequence is synthesized)
agaagctgtgctgtacgtggattcccaggaggctgccctgaaggagtctggagatgtcctgctgtcaggggccgagatctttgctgagctgggagaagtgattaagggagtgaaaccagc

SEQ ID NO: 136462 - DNA, 120 bp, Artificial Sequence
  ENSG00000103316_9 (sequence is synthesized)
ccactgtgagaagaccaccgtgttcaagtctttgggaatggcagtggaagacacagttgcagccaaactcatctatgattcctggtcatctggtaaataaaacaaaggaacttgatgttg

SEQ ID NO: 136463 - DNA, 120 bp, Artificial Sequence
  ENSG00000103316_10 (sequence is synthesized)
agatggatgcttgaggaatattgctgctggttctcataatttctagagtaaatgagggagtccagtccccagtgaactctccttttgtgcttatcatgttttaccttaaatgctgagatc

SEQ ID NO: 136464 - DNA, 120 bp, Artificial Sequence
  ENSG00000103316_11 (sequence is synthesized)
ctcatttatgtttgtagttggaaagcaaagctaggtagccatttcttctgttctaccaagttataatagcattcatttccctttatatttccctgaaataaagcacattccaattgtgca

SEQ ID NO: 136465 - DNA, 120 bp, Artificial Sequence
  ENSG00000103316_12 (sequence is synthesized)
tggaccaaacaatattgactcccagcacgccaccgcgatgtccatcttggggaatccgttgctggaagggacccatctcgcccacccttaggggtcgaggtgggcgaagggggaggagag

SEQ ID NO: 136466 - DNA, 120 bp, Artificial Sequence
  ENSG00000103316_13 (sequence is synthesized)
tgctttcaagacagaaggaagaacagtacacctgagatgaccccaaagcctacatcaggcctgctcaacacagcagatcccagatgcttttgagggcaatgaaacaaatctgagatgtac

SEQ ID NO: 136467 - DNA, 120 bp, Artificial Sequence
  ENSG00000103316_14 (sequence is synthesized)
cgcgcggaggagccgggagcgccacctcagtccccccaccgccccaccccgcgcatgctcccaagagccccagaccacccttctccggcttccgagatacttcatccgttgcttgtcctg

SEQ ID NO: 136468 - DNA, 120 bp, Artificial Sequence
  ENSG00000103316_15 (sequence is synthesized)
gtaaaaactcctggaagaaaagatcctgcaatttggctttttgtgagatggaaaagattacaccttgccctgcaaacttcccccctttaaaggcgaaggtttgttaggttagttagcctg

SEQ ID NO: 136469 - DNA, 120 bp, Artificial Sequence
  ENSG00000103316_16 (sequence is synthesized)
tgagaaaactgtgcgttcttagcaatcaaaggccagacatctgggggtacaggggggaggaagactaggataagagactctagacggggacagaattaaaaggaaaaaaaaattaaataa

SEQ ID NO: 136470 - DNA, 120 bp, Artificial Sequence
  ENSG00000103316_17 (sequence is synthesized)
tttgttagaggcgcgcgctttcgagctccgcgcgccgaccacgggcagcgggtgggccccctggcgtctggagcagcggccagcgcagaggacgcaggcagaaggaggaagggctggccg

SEQ ID NO: 136471 - DNA, 120 bp, Artificial Sequence
  ENSG00000103316_18 (sequence is synthesized)
caacggcccgccgcgcagccgcccgcgggcgagtctgtagcctgatcctgcgcggacccgccagaggcacaccaggagagcagcgggcgcgctcataaagggcacagccgagggtacgtg

SEQ ID NO: 136472 - DNA, 120 bp, Artificial Sequence
  ENSG00000103316_19 (sequence is synthesized)
ggctgccacctggctggcctcacctggatcccagggtttcattaacttcccttccagtttggtctgctccagacctcagccaccccacctccttgtaggggaaggagctcctaaacattt

SEQ ID NO: 136473 - DNA, 120 bp, Artificial Sequence
  ENSG00000103316_20 (sequence is synthesized)
tgcaaccctctttaattccattccagaaaaatatgggcattatgggtggtgacatgtgtgttcctggaaggagaagctcagtggattttatttttttgctgggctgtcctctaaagaagt

SEQ ID NO: 136474 - DNA, 120 bp, Artificial Sequence
  ENSG00000103316_21 (sequence is synthesized)
gggattggaagcttcttgcagcctggaaaccttcccaatgtggccaacatgataagactgtgttgcccaccttctggcctcattttacggttataatcagcataaaacaagaagggagct

SEQ ID NO: 136475 - DNA, 120 bp, Artificial Sequence
  ENSG00000103316_22 (sequence is synthesized)
gctggcatgcatgttcagataacagcatgtctatttcctcactgacacaatgatcttggcaggacagctccctgagcaccaactcgaatctctgtgtttatggtatcacaaaagcaaatg

SEQ ID NO: 136476 - DNA, 120 bp, Artificial Sequence
  ENSG00000103316_23 (sequence is synthesized)
ccaccccaaaaggatttcggggccagcctcctccctaatatcattcagtgtacaaaggatctctctctttttttttttttttttaatcaaatttatctcttatccaattcaggaattccc

SEQ ID NO: 136477 - DNA, 120 bp, Artificial Sequence
  ENSG00000103316_24 (sequence is synthesized)
tgggctggcttcaaaagccaaccctgcacagactttagcttcatgcctgggtcagcgtatgtttgtttcctaggccgagatctttgctgagctgggagaagtgattaagggagtgaaacc

SEQ ID NO: 136478 - DNA, 120 bp, Artificial Sequence
  ENSG00000103316_25 (sequence is synthesized)
ctatttcttaataagtatttcgtcctactgattgggagagcatggcctggggaatgagggggtattttgaatctgagtgtgttcacgagtcctttgttcacctctctcctgtgctttggg

SEQ ID NO: 136479 - DNA, 120 bp, Artificial Sequence
  ENSG00000103316_26 (sequence is synthesized)
tcacccattggtggaaagagcaatgagtcaccagactctgcagctgaatcattgtgctccatcattcaggtcaattatttacatggtttagcctagtgctaagcccatgaactctggaac

SEQ ID NO: 136480 - DNA, 120 bp, Artificial Sequence
  ENSG00000103316_27 (sequence is synthesized)
gtgggccttcttttgagaaaatttcaaatgcaaaattccagatttacagatgaaactgtcagtaagacaattcatgggttttcctagtggctttaagctattaaaacttgcaaaactttg

SEQ ID NO: 136481 - DNA, 120 bp, Artificial Sequence
  ENSG00000103319_0 (sequence is synthesized)
gctcaacctagaccagccccagcttcagcctcagctcccctccttcctggatcgagcgcccgcactcccggccctgcagccacccgagtcccgctcgctgtcgcctgcacgcgagtcccc

SEQ ID NO: 136482 - DNA, 120 bp, Artificial Sequence
  ENSG00000103319_1 (sequence is synthesized)
cctggcacgcgctcccacatcccgggatcgtcccaacggcccctgcgcccttcctgggatcactccgactgccccgcgcgccctgggatcggtccatctaccccgcgtggccccagctgc

SEQ ID NO: 136483 - DNA, 120 bp, Artificial Sequence
  ENSG00000103319_2 (sequence is synthesized)
ttgcccggagcgccagctagcgctccccgctctccgctccccggcactctcggggggcccgcccgccctgcaccctggagctccgggccgcgagcctctgccaactcctctggaccctcg

SEQ ID NO: 136484 - DNA, 120 bp, Artificial Sequence
  ENSG00000103319_3 (sequence is synthesized)
cggccgtgggcagcggctgccgcgcctgtctgcccgagggaggaccttcgcctctgcatttgtccagtaactctggctgtgccggatactgcttgggtaaaacgggcaccccaggaacat

SEQ ID NO: 136485 - DNA, 120 bp, Artificial Sequence
  ENSG00000103319_4 (sequence is synthesized)
ggcagacgaagatctcatcttccgcctggaaggcgttgatggcggccagtccccccgagctggccatgatggtgattctgatggggacagcgacgatgaggaaggttacttcatctgccc

SEQ ID NO: 136486 - DNA, 120 bp, Artificial Sequence
  ENSG00000103319_5 (sequence is synthesized)
catcacggatgacccaagctcgaaccagaatgtcaattccaaggttaataagtactacagcaacctaacaaaaagtgagcggtatagctccagcgggtccccggcaaactccttccactt

SEQ ID NO: 136487 - DNA, 120 bp, Artificial Sequence
  ENSG00000103319_6 (sequence is synthesized)
caaggaagcctggaagcacgcaatccagaaggccaagcacatgcccgacccctgggctgagttccacctggaagatattgccaccgaacgtgctactcgacacaggtacaacgccgtcac

SEQ ID NO: 136488 - DNA, 120 bp, Artificial Sequence
  ENSG00000103319_7 (sequence is synthesized)
cggggaatggctggatgatgaagttctgatcaagatggcatctcagcccttcggccgaggagcaatgagggagtgcttccggacgaagaagctctccaacttcttgcatgcccagcagtg

SEQ ID NO: 136489 - DNA, 120 bp, Artificial Sequence
  ENSG00000103319_8 (sequence is synthesized)
gaagggcgcctccaactacgtggcgaagcgctacatcgagcccgtagaccgggatgtgtactttgaggacgtgcgtctacagatggaggccaagctctggggggaggagtataatcggca

SEQ ID NO: 136490 - DNA, 120 bp, Artificial Sequence
  ENSG00000103319_9 (sequence is synthesized)
caagccccccaagcaggtggacatcatgcagatgtgcatcatcgagctgaaggacagaccgggcaagcccctcttccacctggagcactacatcgagggcaagtacatcaagtacaactc

SEQ ID NO: 136491 - DNA, 120 bp, Artificial Sequence
  ENSG00000103319_10 (sequence is synthesized)
caactctggctttgtccgcgatgacaacatccgcctgacgccgcaggccttcagccacttcacttttgagcgttccggccatcagctgatagtggtggacatccagggagttggggatct

SEQ ID NO: 136492 - DNA, 120 bp, Artificial Sequence
  ENSG00000103319_11 (sequence is synthesized)
ctacactgacccacagatccacacggagacgggcactgactttggagacggcaacctaggtgtccgcgggatggcgctcttcttctactctcatgcctgcaaccggatttgcgagagcat

SEQ ID NO: 136493 - DNA, 120 bp, Artificial Sequence
  ENSG00000103319_12 (sequence is synthesized)
gggccttgctccctttgacctctcgccccgggagagggatgcagtgaatcagaacaccaagctgctgcaatcagccaagaccatcttgagaggaacagaggaaaaatgtgggagccccca

SEQ ID NO: 136494 - DNA, 120 bp, Artificial Sequence
  ENSG00000103319_13 (sequence is synthesized)
agtaaggaccctctctgggagccggccacccctgctccgtcccctttcagagaactctggagacgagaacatgagcgacgtgaccttcgactctctcccttcttccccatcttcggccac

SEQ ID NO: 136495 - DNA, 120 bp, Artificial Sequence
  ENSG00000103319_14 (sequence is synthesized)
accacacagccagaagctagaccacctccattggccagtgttcagtgacctcgataacatggcatccagagaccatgatcatctagacaaccaccgggagtctgagaatagtggggacag

SEQ ID NO: 136496 - DNA, 120 bp, Artificial Sequence
  ENSG00000103319_15 (sequence is synthesized)
cggataccccagtgagaagcggggtgagctggatgaccctgagccccgagaacatggccactcatacagtaatcggaagtacgagtctgacgaagacagcctgggcagctctggacgggt

SEQ ID NO: 136497 - DNA, 120 bp, Artificial Sequence
  ENSG00000103319_16 (sequence is synthesized)
atgtgtagagaagtggaatctcctcaactcctcccgcctccacctgccgagggcttcggccgtggccctggaagtgcaaaggcttaatgctctggacctcgaaaagaaaatcgggaagtc

SEQ ID NO: 136498 - DNA, 120 bp, Artificial Sequence
  ENSG00000103319_17 (sequence is synthesized)
cattttggggaaggtccatctggccatggtgcgctaccacgagggtgggcgcttctgcgagaagggcgaggagtgggaccaggagtcggctgtcttccacctggagcacgcagccaacct

SEQ ID NO: 136499 - DNA, 120 bp, Artificial Sequence
  ENSG00000103319_18 (sequence is synthesized)
gggcgagctggaggccatcgtgggcctgggactcatgtactcgcagttgcctcatcacatcctagccgatgtctctctgaaggagacagaagagaacaaaaccaaaggatttgattactt

SEQ ID NO: 136500 - DNA, 120 bp, Artificial Sequence
  ENSG00000103319_19 (sequence is synthesized)
actaaaggccgctgaagctggcgacaggcagtccatgatcctagtggcgcgagcttttgactctggccagaacctcagcccggacaggtgccaagactggctagaggccctgcactggta

SEQ ID NO: 136501 - DNA, 120 bp, Artificial Sequence
  ENSG00000103319_20 (sequence is synthesized)
caacactgccctggagatgacggactgtgatgagggcggtgagtacgacggaatgcaggacgagccccggtacatgatgctggccagggaggccgagatgctgttcacaggaggctacgg

SEQ ID NO: 136502 - DNA, 120 bp, Artificial Sequence
  ENSG00000103319_21 (sequence is synthesized)
gctggagaaggacccgcagagatcaggggacttgtatacccaggcagcagaggcagcgatggaagccatgaagggccgactggccaaccagtactaccaaaaggctgaagaggcctgggc

SEQ ID NO: 136503 - DNA, 120 bp, Artificial Sequence
  ENSG00000103319_22 (sequence is synthesized)
ccagatggaggagtaaccaggaaaatcactgccggctagtcccaagcaaacgggctaggaggaaagattaaaaaaacaacaacaacaacttatttagtttggggaggggaagcattttta

SEQ ID NO: 136504 - DNA, 120 bp, Artificial Sequence
  ENSG00000103319_23 (sequence is synthesized)
agtgtgttgtaaaatcaaattttatatttcattttttgactcttgaaaaatgtctttgctccttggcagctaccagcagagactctatagctgtctcttagggcagtattttggggaagt

SEQ ID NO: 136505 - DNA, 88 bp, Artificial Sequence
  ENSG00000103319_24 (sequence is synthesized)
gactctatagctgtctcttagggcagtattttggggaagtggggcttgaagaagcagcctaatgaaccaacataccgttttgtgtgtg

SEQ ID NO: 136506 - DNA, 120 bp, Artificial Sequence
  ENSG00000103319_25 (sequence is synthesized)
ttcatttttatttctttttttttttttgtcacgagatataagaaagtgctttttgccttgaatggacaattttagggctgtgctcactagtcttttcaggctggactgaaatgtcgggcc

SEQ ID NO: 136507 - DNA, 120 bp, Artificial Sequence
  ENSG00000103319_26 (sequence is synthesized)
actgaaatgtcgggcccatggagccctgtgttttgtgcatcgggatgagaaatgaagcacttcacgctggctttcctaagtcacggggcgtgtattgccgtggcttagtgcaaagcattc

SEQ ID NO: 136508 - DNA, 120 bp, Artificial Sequence
  ENSG00000103319_27 (sequence is synthesized)
tttctcagagcatttagaggcatgcgtggcattttttcagtgggtgtgagattgcacaatacccaggctcccttctactgtggggaagggcctgcatgttggctgttttttaaacttcta

SEQ ID NO: 136509 - DNA, 120 bp, Artificial Sequence
  ENSG00000103319_28 (sequence is synthesized)
ggcttttcaaaacaggtttgagttttgtatgcacacgtttactacctctaactcctacatcagctagtgtggaagagggtgcacctcaaagcttttacacgtaaggacagcggcttggaa

SEQ ID NO: 136510 - DNA, 120 bp, Artificial Sequence
  ENSG00000103319_29 (sequence is synthesized)
tgtgagagccttttctccaagcagacccacactctgcatctcagtggcagctcccacaacgtgactgcaatgtctcttatacagtattccttggtgttttcttagtgtctggatgttctt

SEQ ID NO: 136511 - DNA, 120 bp, Artificial Sequence
  ENSG00000103319_30 (sequence is synthesized)
acgtgaaatctgctccccagccctggtccttggcattttctgcttgaagctgggctgattttcttgtaatttacagcaggacgctttcagcagcagtctcttgggattttatctaagatg

SEQ ID NO: 136512 - DNA, 120 bp, Artificial Sequence
  ENSG00000103319_31 (sequence is synthesized)
tttgaggatgagagggcaagaactataaacactcattaattctagtagtctccccatggccagacaatggcgattgttatttaatgagcttttcctttcaatggaattcagctctcacat

SEQ ID NO: 136513 - DNA, 120 bp, Artificial Sequence
  ENSG00000103319_32 (sequence is synthesized)
cagctctcacattagtatgatttcatttgatgtttcaaatagcaaagatgctaggtgcggtggctcccgcctgtaatctcagcactttgaggagggccaaggtgggaggattgcttgagc

SEQ ID NO: 136514 - DNA, 120 bp, Artificial Sequence
  ENSG00000103319_33 (sequence is synthesized)
gaccagcctgggtaaacatggcgagaccctgtctctaccaaaacaacaaaaaaaagacagactgctttgatcaaccctaaatgcaaaagcagcctatttttctttgtttaaaagtcaaaa

SEQ ID NO: 136515 - DNA, 120 bp, Artificial Sequence
  ENSG00000103319_34 (sequence is synthesized)
cataaaaaagcagagtataacatacaaaccattcttaactattcattaaaatgggtccttcaacaccttagtggggtttgttgttgttgcttatgcagagagattattttctttttatta

SEQ ID NO: 136516 - DNA, 120 bp, Artificial Sequence
  ENSG00000103319_35 (sequence is synthesized)
gcccaggctggtctcgaactcctggacttaagtgagcctcccgcctcagtctcccaaagcgctgggattacaggcaggagccactgagcccagccaagacttcagtgttgactgctttgg

SEQ ID NO: 136517 - DNA, 120 bp, Artificial Sequence
  ENSG00000103319_36 (sequence is synthesized)
ccactgagcccagccaagacttcagtgttgactgctttggaggcacaaacccatgcaagcgttagttccaaagttcagtgtgtacccttaaatgaacaatgaagcaggtaaaattaccct

SEQ ID NO: 136518 - DNA, 120 bp, Artificial Sequence
  ENSG00000103319_37 (sequence is synthesized)
tgaaaaaaatcccttggaccacccataaatgacagtgactttttcaatatggactcatcatagccagttttccttttgaagttggaactgatcacccttttgtcatctgtaccagatcag

SEQ ID NO: 136519 - DNA, 120 bp, Artificial Sequence
  ENSG00000103319_38 (sequence is synthesized)
tagttggcttgtgttacattttgtgtgtgtgtgtgcgtgttttaaaccagtgcatataaattgtatgttaaatgtaagtaactttaagttgacttatctcttcacagtaatcaagcctca

SEQ ID NO: 136520 - DNA, 120 bp, Artificial Sequence
  ENSG00000103319_39 (sequence is synthesized)
cgtaattcatgctttttaaattcagccagccccccctctctgaaattttattatgtaaataatttgtgttccctgatcactcgtttaagttcttagttgtatgtcatctcttctctagca

SEQ ID NO: 136521 - DNA, 120 bp, Artificial Sequence
  ENSG00000103319_40 (sequence is synthesized)
ggaattggcaaacttttttgtaaaggggtagaaagtgaagattttaggctttgcaggccatatagcctctgctgcaaatgctcagccctgctgttgtaatgtaaaagctgccacagacac

SEQ ID NO: 136522 - DNA, 120 bp, Artificial Sequence
  ENSG00000103319_41 (sequence is synthesized)
tacatgaacacgaatgagtgtggctggtgttccaataaaactttatttacacaaacgggtggcccttttgggctgtagtttgtcaacccttgctctaacccttgactgagagctacttta

SEQ ID NO: 136523 - DNA, 120 bp, Artificial Sequence
  ENSG00000103319_42 (sequence is synthesized)
ttaagccctgagggcaggagctatcccaattttgtgttccccagggcaccaaaacacagtgctttggcatagagtaggcactcaacaagtgtgtgaacagatggagagccagccctagtc

SEQ ID NO: 136524 - DNA, 120 bp, Artificial Sequence
  ENSG00000103319_43 (sequence is synthesized)
agtgcactcaccctttgaggctctggttcctccaaacaatgattcgttgtctggattggctggaactgtcacccccgcaattctactccccacccacccatgtgaccttaatgtcagttg

SEQ ID NO: 136525 - DNA, 120 bp, Artificial Sequence
  ENSG00000103319_44 (sequence is synthesized)
ctggtctgttgctcttcggggagggagagatggcctggatacagagctaagcaaatgcttctttaagggcccttaaaagtgaaaagtaacttgcaagaggttgagatccttctgagctag

SEQ ID NO: 136526 - DNA, 120 bp, Artificial Sequence
  ENSG00000103319_45 (sequence is synthesized)
gaaaagtaacttgcaagaggttgagatccttctgagctaggagaacttattccaccttcaaaacctagtttgggctgggtgcagtggctcacgccactttgggaggctgaggtgggcgga

SEQ ID NO: 136527 - DNA, 69 bp, Artificial Sequence
  ENSG00000103319_46 (sequence is synthesized)
ccaaaaacaagaaaaacccctagttttgtgccttctgaagatagttaggacatcttctttttccgcaaa

SEQ ID NO: 136528 - DNA, 120 bp, Artificial Sequence
  ENSG00000103319_47 (sequence is synthesized)
gccttctgaagatagttaggacatcttctttttccgcaaatgctggacatgccaaaaacctaacgcaaaacccaggacattccagcccaactgggacgatatcagagaccatcttcaagt

SEQ ID NO: 136529 - DNA, 120 bp, Artificial Sequence
  ENSG00000103319_48 (sequence is synthesized)
gcaagaagcaggtgaaagcccaggaaattggcagagccaggattatcatccagtactttcatttcacaaatggagaaaccgaggttctgccagctagattttttttcacagtgtcactgc

SEQ ID NO: 136530 - DNA, 120 bp, Artificial Sequence
  ENSG00000103319_49 (sequence is synthesized)
tagcaagccactaagctggagctgggatttgagagctgctgctatttagaggatcttgggaataaaatttaaactggagtttaatggccctttcagttttgctataggcaagagaataaa

SEQ ID NO: 136531 - DNA, 120 bp, Artificial Sequence
  ENSG00000103319_50 (sequence is synthesized)
atgaatgaatggataggtggctttatgggtgtaagaaagaagcgaaaaaaactcccaaaccccagtgttcctgaatatctgttctccccctgaccactctgggaatttatcaaatgcagc

SEQ ID NO: 136532 - DNA, 120 bp, Artificial Sequence
  ENSG00000103319_51 (sequence is synthesized)
atcaaatgcagctttgacctccaagccaagtaaactgctcttgttgctattttagtggtttttgtttttttaagacacaaggtctcactttgttactcaggctggagtgcagtggcatga

SEQ ID NO: 136533 - DNA, 87 bp, Artificial Sequence
  ENSG00000103319_52 (sequence is synthesized)
cattgtaggctcaacctcctgggccccaaaactacagatgtgcaccatcacatctggctaatttttttttttttttttttgaggtgg

SEQ ID NO: 136534 - DNA, 71 bp, Artificial Sequence
  ENSG00000103319_53 (sequence is synthesized)
tgaggtggagtctcgctctgttgcccagattcaagtgcaatggcacgtctcggcctcccgagtagctggga

SEQ ID NO: 136535 - DNA, 80 bp, Artificial Sequence
  ENSG00000103319_54 (sequence is synthesized)
gggattacaggcatgagccaccgtgccaagccacgcctggctaattttttaaaattattttttgcagagacagactcaag

SEQ ID NO: 136536 - DNA, 120 bp, Artificial Sequence
  ENSG00000103319_55 (sequence is synthesized)
ggcgtgagccactgcacctggccctgttttcatggcttttatttcctttcatcccacacatttgtctgcagtactagacatgttttacaaatcaacaagtttacacaagtatatgcagct

SEQ ID NO: 136537 - DNA, 120 bp, Artificial Sequence
  ENSG00000103319_56 (sequence is synthesized)
tgttttacaaatcaacaagtttacacaagtatatgcagcttgttttggggggaaaggagacaaaatatgcatattttctgtgtggatttgtgcctcttaattgtgtttctagtctctaag

SEQ ID NO: 136538 - DNA, 120 bp, Artificial Sequence
  ENSG00000103319_57 (sequence is synthesized)
gtgaccctttaacctactcaagatggggcccagagaagtggcctgcgttacagatttattttggcatatgtactaagttccattttctctttacaaataaagtgttttctttcttttctg

SEQ ID NO: 136539 - DNA, 120 bp, Artificial Sequence
  ENSG00000103319_58 (sequence is synthesized)
gaaatgagaccggtgtcacctgttgccttgtttatcctccaggaaaatgaaaactccccttcctggagggggaatatgagtgggtcctgagaagataacaagtaaattaataaagagtat

SEQ ID NO: 136540 - DNA, 120 bp, Artificial Sequence
  ENSG00000103319_59 (sequence is synthesized)
gctagaccacctccgtgagtgacggttcggtccctagtcactgtgattggaggggacaggtggagcagagctaaaccagctttcatttatgttagaaaaatcagacatgctaatcgaaaa

SEQ ID NO: 136541 - DNA, 120 bp, Artificial Sequence
  ENSG00000103319_60 (sequence is synthesized)
gcgccctgaggcacccttgtctctgcctcttccctgtctcctccaggctctgttgctgtttctcctgtctcatatctctgctgcctgcccatctgtcttgcacatgtgctaaaggaagat

SEQ ID NO: 136542 - DNA, 120 bp, Artificial Sequence
  ENSG00000103319_61 (sequence is synthesized)
tttgcaaagcagcaaatctgggcaaatgctctttgaacctctgcagggcaggatgctgggggatttgtggggaggattagagaagagcagctcagccccatcctggaggggaaatcacca

SEQ ID NO: 136543 - DNA, 120 bp, Artificial Sequence
  ENSG00000103319_62 (sequence is synthesized)
cagggacagctcctgtcttaagtgcctgccatgaaggcacttcgcagtaatcagtttccttcttgcaaccacccagagagacaggctaatgtgactctcatccccattttatgtatgaga

SEQ ID NO: 136544 - DNA, 80 bp, Artificial Sequence
  ENSG00000103326_0 (sequence is synthesized)
cgccgtagccgcggggcccgggccgggcgctacgctacgaaggcagcgtaaggcgggcgccggacgcgggcaggggccgg

SEQ ID NO: 136545 - DNA, 80 bp, Artificial Sequence
  ENSG00000103326_1 (sequence is synthesized)
gcgggaggccgtccgggcagcgcggccggcggcgagaggggccccgccgctctccggaggcagaagttgtggatcggccg

SEQ ID NO: 136546 - DNA, 120 bp, Artificial Sequence
  ENSG00000103326_2 (sequence is synthesized)
gggccggggccgcgctgcccgggccgcgaggacgaggcggcgccgccgggctgtggaggcagcagcccagacgcggcacagagagggcctgggagcttgctgcagcttcagacagggagc

SEQ ID NO: 136547 - DNA, 120 bp, Artificial Sequence
  ENSG00000103326_3 (sequence is synthesized)
tgcagcttcagacagggagccaggatgggaaccacggactgacctgacctgcgtcctcggggccactgcactgggtgattcacgtgtgcccaggccctgaggtgggccggacctgggagt

SEQ ID NO: 136548 - DNA, 120 bp, Artificial Sequence
  ENSG00000103326_4 (sequence is synthesized)
ggcagccacacccactcgcccgggtctatggccacggtcggagagtggtcctgtgtgcgctgcaccttcctgaacccggccggccagcgccagtgctccatctgcgaggctccccggcac

SEQ ID NO: 136549 - DNA, 120 bp, Artificial Sequence
  ENSG00000103326_5 (sequence is synthesized)
aagcccgacctcaaccacatcctgcggctcagcgtggaggagcagaaatggccctgcgcccgctgcaccttccgcaacttcctgggcaaggaggcctgcgaggtgtgcggcttcaccccg

SEQ ID NO: 136550 - DNA, 120 bp, Artificial Sequence
  ENSG00000103326_6 (sequence is synthesized)
gagcctgcgcctggggctgccttcctgccagtcctcaacggggtcctccccaagccacccgccatcctgggggagcccaagggcagctgccaggaggaagcaggtccagtgaggactgcg

SEQ ID NO: 136551 - DNA, 120 bp, Artificial Sequence
  ENSG00000103326_7 (sequence is synthesized)
gggctggtggccacggagcccgccagggggcagtgcgaggacaaggacgaggaggagaaggaggagcaggaggaggaggagggagcggcggagcccagagggggctgggcgtgtccgcgt

SEQ ID NO: 136552 - DNA, 120 bp, Artificial Sequence
  ENSG00000103326_8 (sequence is synthesized)
tgcacgctgcacaacacgcccgtggccagctcctgctccgtctgcgggggcccacgcaggctctcgctgccacggatccctcctgaggccctggtggtcccggaagtggtggccccggcc

SEQ ID NO: 136553 - DNA, 120 bp, Artificial Sequence
  ENSG00000103326_9 (sequence is synthesized)
ggcttccacgtcgtgcctgccgcgcctccacctggcctccccggggaaggtgccgaggccaaccccccagccaccagccagggcccagctgccgaaccagagccgcccagggtcccgccc

SEQ ID NO: 136554 - DNA, 120 bp, Artificial Sequence
  ENSG00000103326_10 (sequence is synthesized)
ttcagccccttctcgtccaccctgcagaacaaccccgtgccgcgcagccgacgcgaggttcccccccagctgcagccaccggtgcctgaggctgcccagccgtcaccctctgccggctgc

SEQ ID NO: 136555 - DNA, 120 bp, Artificial Sequence
  ENSG00000103326_11 (sequence is synthesized)
aggggagccccccagggctcgggctgggctggggcctcccgcctagcagagttgctgtctggcaagcggctgagtgtgctggaggaagaggccacggagggtggcaccagccgcgtagag

SEQ ID NO: 136556 - DNA, 120 bp, Artificial Sequence
  ENSG00000103326_12 (sequence is synthesized)
gccggcagctccacctcgggcagtgacatcattgacctggccggagacaccgtgcgttacacgcccgccagcccctccagccccgacttcaccacctggtcatgtgccaagtgcacgctc

SEQ ID NO: 136557 - DNA, 120 bp, Artificial Sequence
  ENSG00000103326_13 (sequence is synthesized)
agaaaccccacagtggcccccaggtgctcggcctgcggctgctccaaactgcacggcttccaggagcatggcgagccccccacccactgccccgactgtggggccgacaagcccagcccc

SEQ ID NO: 136558 - DNA, 120 bp, Artificial Sequence
  ENSG00000103326_14 (sequence is synthesized)
tgcggcagaagctgcggacgggtgtcctcggcccagaaggccgcccgcgtcctgcccgagcgcccgggccagtgggcctgccctgcctgtaccctgctcaacgcactgcgggccaagcac

SEQ ID NO: 136559 - DNA, 120 bp, Artificial Sequence
  ENSG00000103326_15 (sequence is synthesized)
tgcgccgcctgccacacgcctcagctcctggtggcccagcggcggggggccgcgcccctgaggcgcagggagagcatgcacgtggagcagcggcggcagacagacgagggcgaggccaag

SEQ ID NO: 136560 - DNA, 120 bp, Artificial Sequence
  ENSG00000103326_16 (sequence is synthesized)
gcactctgggagaacatcgtggccttctgccgggagaacaatgtgagcttcgtggatgacagcttccctcccgggcccgagtctgtcggcttccccgcgggtgacagcgtgcagcagcgt

SEQ ID NO: 136561 - DNA, 120 bp, Artificial Sequence
  ENSG00000103326_17 (sequence is synthesized)
gtgaggcagtggctgcgaccccaggagatcaactgctccgtcttcagggaccacagggccacgtggtctgtgttccacacactgcggccctcagacatcctgcaggggctgctggggaac

SEQ ID NO: 136562 - DNA, 120 bp, Artificial Sequence
  ENSG00000103326_18 (sequence is synthesized)
tgctggttcctgagcgccctggcggtgctggcggagcggccggacctggtggagcgggtgatggtcacgcgcagcctgtgtgcagagggcgcctaccaggtgcggctgtgcaaggacggc

SEQ ID NO: 136563 - DNA, 120 bp, Artificial Sequence
  ENSG00000103326_19 (sequence is synthesized)
acgtggaccacggtgctggtggacgacatgctgccctgtgatgaggccggctgcctcctcttctcacaggcgcagcggaagcagctgtgggtggccctcatcgagaaggcgctggccaag

SEQ ID NO: 136564 - DNA, 120 bp, Artificial Sequence
  ENSG00000103326_20 (sequence is synthesized)
tgcagctcagctccactaacccccgcgaggagcccgttgacactgacctcatctgggccaaaatgctgagttctaaggaggctgggttcctcatgggtgcctcctgtggcgggggcaaca

SEQ ID NO: 136565 - DNA, 120 bp, Artificial Sequence
  ENSG00000103326_21 (sequence is synthesized)
tgaaggtggacgattcggcctacgagagcctgggcctgcgcccccggcatgcctactccatcctggatgtccgagatgtccagggcaccaggcttctgcggctccgaaacccgtggggcc

SEQ ID NO: 136566 - DNA, 120 bp, Artificial Sequence
  ENSG00000103326_22 (sequence is synthesized)
gtttctcctggaacggcagctggtccgacgagtggccacactggccggggcacctgcgtggcgagctcatgccgcacggcagcagtgagggtgtcttctggatggagtacggcgactttg

SEQ ID NO: 136567 - DNA, 120 bp, Artificial Sequence
  ENSG00000103326_23 (sequence is synthesized)
tcaggtacttcgactccgtggacatctgtaaggtgcactcggactggcaggaggcgcgggtgcagggctgctttcccagctcggccagcgcgcccgtgggggtaacagcgctcacggtgc

SEQ ID NO: 136568 - DNA, 120 bp, Artificial Sequence
  ENSG00000103326_24 (sequence is synthesized)
tggagcgggcctcgctggagttcgcgctcttccaggagggcagcaggcgctcggacgccgtggacagccacctgctggacctgtgcatcctggtgttccgggccacgttcggcagcggcg

SEQ ID NO: 136569 - DNA, 120 bp, Artificial Sequence
  ENSG00000103326_25 (sequence is synthesized)
gccacctcagcctgggccgcctcctggcccacagtaagcgcgcggtcaagaagttcgtcagctgcgacgtcatgctggagcctggcgagtacgctgtggtgtgctgcgccttcaaccact

SEQ ID NO: 136570 - DNA, 120 bp, Artificial Sequence
  ENSG00000103326_26 (sequence is synthesized)
cactgggggccgcccctgccgggcacccctgccccccaggcctccagcccctcggcaggggtcccgagagcctccccagagccgccgggccacgtgctggctgtgtacagctcgaggctg

SEQ ID NO: 136571 - DNA, 120 bp, Artificial Sequence
  ENSG00000103326_27 (sequence is synthesized)
tggtggagcccgtggaagcccagccgaccacgctggccgacgccatcatcctgctcaccgagagccgcggagagcggcacgagggccgtgagggcatgacctgctactacctgacacacg

SEQ ID NO: 136572 - DNA, 120 bp, Artificial Sequence
  ENSG00000103326_28 (sequence is synthesized)
gttgggcggggctcatcgtggtggtggagaaccgacaccccaaggcctacctgcacgtgcagtgtgactgcaccgacagcttcaacgtggtgtccacacgcggcagcctgcgtacccagg

SEQ ID NO: 136573 - DNA, 120 bp, Artificial Sequence
  ENSG00000103326_29 (sequence is synthesized)
atagcgtgccacccctgcacaggcaggtcctggtgatcttgtcccagctagagggcaacgccggcttctctatcacccaccgcctggcacatcgcaaggcagcccaggccttcctcagtg

SEQ ID NO: 136574 - DNA, 120 bp, Artificial Sequence
  ENSG00000103326_30 (sequence is synthesized)
actggacagcctccaaggggacccacagccccccactcacgccagaggtcgccggtctgcatgggccccgaccgctgtgaccaccatgcctggggcaggggctgtgcacagacggacccc

SEQ ID NO: 136575 - DNA, 120 bp, Artificial Sequence
  ENSG00000103326_31 (sequence is synthesized)
ccacccccacacgcactttatgagggagaccccgacagaggacgcttgagccagaatctcaggaccccgcccagggagctgccagcccagggctcagcttcccatgggccccccgccccc

SEQ ID NO: 136576 - DNA, 120 bp, Artificial Sequence
  ENSG00000103326_32 (sequence is synthesized)
ctccttcccctccctgaaccccacagtccgcctggccaggcctcctggccgccacgcagaatacctcgaaccaggcgggctgtgaaccagccccgctcacctgccagccccaacacccga

SEQ ID NO: 136577 - DNA, 120 bp, Artificial Sequence
  ENSG00000103326_33 (sequence is synthesized)
cgggggccgaggccaggctgcccctccctgtgggctcagggtctcctgcgggctaggcagccaggagctctgtccgcaaaaccaaatctgggtgtcagaggccaagaccctggggtggga

SEQ ID NO: 136578 - DNA, 120 bp, Artificial Sequence
  ENSG00000103326_34 (sequence is synthesized)
tcagggaccacccctcacggggcataaggtcagttttcccccagagcccgggtccctgtcccccacagggcaggcggggtccctggagccctggtgtggagcggcgagtcccggggcggt

SEQ ID NO: 136579 - DNA, 120 bp, Artificial Sequence
  ENSG00000103326_35 (sequence is synthesized)
gcctgtctcagaagaaggggcccttggccagccccccagcgacactatgcaaatcctggagtgcccgccaggatcgaagccatgactgggtgcaggcgggcgccaggcccgctgtgggtg

SEQ ID NO: 136580 - DNA, 120 bp, Artificial Sequence
  ENSG00000103326_36 (sequence is synthesized)
ggcaccagttctcagcaccgctcactgctgccgggcacactgggaccagcaggctcctcagccaaccctgtccctcggcccggccctgccagagagggaccccagcacatcgtgggcacg

SEQ ID NO: 136581 - DNA, 120 bp, Artificial Sequence
  ENSG00000103326_37 (sequence is synthesized)
ggcagggctcagccgctcccacctccccacagaagcccaggagtgtgtggacgtctgagcccagctttctgcgtgccctcctggcccctcactcccggcagcgggccggcctcgccccca

SEQ ID NO: 136582 - DNA, 120 bp, Artificial Sequence
  ENSG00000103326_38 (sequence is synthesized)
ctccccctcctaccccggcaggggcttccggggccttttcacctggagaaacattcccactcccctttggcctccctgtactctgagctgtgaatatttttaaccctgtaaatacggcca

SEQ ID NO: 136583 - DNA, 120 bp, Artificial Sequence
  ENSG00000103326_39 (sequence is synthesized)
gctcttgtgacacagagactattttatcaattgtcagtcccgttcctttaccataggattctccacagtggcttccgactcaggctccaatggaccaaataaaagcgttttgttttgtaa

SEQ ID NO: 136584 - DNA, 120 bp, Artificial Sequence
  ENSG00000103326_40 (sequence is synthesized)
tttcccacagtcacccttgcgatgggaccctcagggtcctctcttctcttccgagcacccacgggaggggactgtgctgtccctgctctcctaggacaggcctccctcctgtccagatgg

SEQ ID NO: 136585 - DNA, 120 bp, Artificial Sequence
  ENSG00000103326_41 (sequence is synthesized)
ggcccacagggtcagttgcctgagactggctccagctcaagaaaggttttctgagtgagcgcaggggagcaggaggctggtgagcagctcgcttcctgccctgggtgcagctgggcacca

SEQ ID NO: 136586 - DNA, 120 bp, Artificial Sequence
  ENSG00000103326_42 (sequence is synthesized)
tttctagcggcacgcgtgaccccaggtgccacgtgggtgagtgcgtgggtgggtgagtggcgaaggagctgaggttggccctggcaggtgtgcagtcctcacacagaacgggcagggctc

SEQ ID NO: 136587 - DNA, 120 bp, Artificial Sequence
  ENSG00000103326_43 (sequence is synthesized)
ctgtcagagccaaaccagctcagggcccagtgcaagcagcttctgtcccgtggcacctccgctagtcgccgctcccacccaagccctgccccgccctgacccgctcagggtttggctaca

SEQ ID NO: 136588 - DNA, 120 bp, Artificial Sequence
  ENSG00000103326_44 (sequence is synthesized)
ggagtgtcggaaatgcccaacccgtctcccgtgagggactcctgcgtggcctgggctggggaacgcaggggccgtttgggtggttccggcgtctggcgtagccacgcgagaggccctggg

SEQ ID NO: 136589 - DNA, 120 bp, Artificial Sequence
  ENSG00000103326_45 (sequence is synthesized)
ttgatgcgtgggctccctgctagcgagcctgctccgtgcgtgctgggctcccggccttgcttccgtgtggcattcgagaccccgtggacctcgcctgcgtcctgcatgtttgagcgctgc

SEQ ID NO: 136590 - DNA, 120 bp, Artificial Sequence
  ENSG00000103326_46 (sequence is synthesized)
cccttgtggaggccgccagcactggtggctgcagggcctgtagtgtggcacgtccagagacccggcctggagaacgggtcctggatgtctccgtcatgttttacgttcgcttcacacgga

SEQ ID NO: 136591 - DNA, 120 bp, Artificial Sequence
  ENSG00000103326_47 (sequence is synthesized)
cgcagcgatgtctcagatacctcggatcacacagagcacgtcgccaaggcttgttttgtctgttcctttccacctgtcttacgtggataccaggagatccgccacgactcccgtggcccc

SEQ ID NO: 136592 - DNA, 120 bp, Artificial Sequence
  ENSG00000103326_48 (sequence is synthesized)
gtccacactgcgcggcgctctccggcgtggccgccaggtgccccttcgagggcaggtgtgagtacagggtggtccctgtggagaagcgcctgcaggcgagtgagccaggctgtgccctgc

SEQ ID NO: 136593 - DNA, 120 bp, Artificial Sequence
  ENSG00000103326_49 (sequence is synthesized)
tttttttgatttttttccaaccatttaaaaatgtaaaagccattgttgacttgcgggctggaccaggcttagggctgggctctggtccgcaccccacactggccccgtgtgtcctgtgac

SEQ ID NO: 136594 - DNA, 120 bp, Artificial Sequence
  ENSG00000103326_50 (sequence is synthesized)
cgttctgcctacggggcaggcctgagccaccacaggatggcagggtctccagggtgcagggcccgcaatgcttcaaccctcccacgaccccagcaccttcagagaaaacggaccctcgtg

SEQ ID NO: 136595 - DNA, 120 bp, Artificial Sequence
  ENSG00000103326_51 (sequence is synthesized)
ccgagtgaagtggttcaggcgaacgttatcaccacacgggggactcggcggcttctgccccaggcctcaaaggagaggggatccagaattctctgtctcaccccctcagcccctgccctt

SEQ ID NO: 136596 - DNA, 120 bp, Artificial Sequence
  ENSG00000103326_52 (sequence is synthesized)
gaagcttctgtccccaaggctgtggggaggaaccagggaagggctggcgcgtctgctgtgcgatcccaggtgctcgtgcctcgctgagctcagcccctgtggcctcagagctgcaggccc

SEQ ID NO: 136597 - DNA, 120 bp, Artificial Sequence
  ENSG00000103326_53 (sequence is synthesized)
ctcccgggtgtcagagcactgactggaaaggccccccacatccctgccctctgctgctccccatcgtcgcgggggagaagctggaactgcacccccaccccccccagcccgctcacctag

SEQ ID NO: 136598 - DNA, 120 bp, Artificial Sequence
  ENSG00000103326_54 (sequence is synthesized)
ggctgcccccaggcctccctgagctccaaaggatatgttctttggtgctttttttttttttggctctgtctcccaggctggaatgcagctgtggtgctcacgccatcctcccacgtcagc

SEQ ID NO: 136599 - DNA, 120 bp, Artificial Sequence
  ENSG00000103326_55 (sequence is synthesized)
ggtgctcacgccatcctcccacgtcagcctcctgagtagctaggtctacaggtgcacaccaccacacccggatagtgtttagttttctataaagacagggtctcactgtgttgcccaggc

SEQ ID NO: 136600 - DNA, 120 bp, Artificial Sequence
  ENSG00000103326_56 (sequence is synthesized)
cccccacgcacggcagctttgacacttacttgaccctttcctcctaagctctaccctgacgctggctgtgtgtcccagagacttaatcagaagctggaagaagggctgtgacgtgtgtga

SEQ ID NO: 136601 - DNA, 120 bp, Artificial Sequence
  ENSG00000103326_57 (sequence is synthesized)
cagcaggaactgctggtcaacccacagccggccagcctgccgggacgccatcttggccccaatcttggcagggagaggggagtgtatcggactctggggagagcagctgcctgcacgggc

SEQ ID NO: 136602 - DNA, 120 bp, Artificial Sequence
  ENSG00000103326_58 (sequence is synthesized)
agggtcctcccgtctcaggattaacgttctcaactgtatttgatttctcctcagccagagggggtaaggtggccttcccagaagcacaggtgggccgcgtgtcagaggccctggacagcc

SEQ ID NO: 136603 - DNA, 120 bp, Artificial Sequence
  ENSG00000103326_59 (sequence is synthesized)
tgtgcctctcccaggcctcccagcaggggtggctctcgcccctctggaggggagaccccaggaaccggcccccgccctcagccatagcctcacagggtccttgtttctcggggcctggct

SEQ ID NO: 136604 - DNA, 120 bp, Artificial Sequence
  ENSG00000103326_60 (sequence is synthesized)
ctgtgggtgcacaaggcatggtcgggctcccgtccttctggaagtctccagagtggcatgtgggcagctgtgtgaagcggccccccagatcttcatccagcctggcctgcagcagctccc

SEQ ID NO: 136605 - DNA, 120 bp, Artificial Sequence
  ENSG00000103326_61 (sequence is synthesized)
tacgccctctgctacctcccctgcctacctttgggtagacgttctcttgacccttccttctgtgataaagcaaaagcgtgtgatctcttttctcaccaaggaataaaacgtctctgaata

SEQ ID NO: 136606 - DNA, 120 bp, Artificial Sequence
  ENSG00000103326_62 (sequence is synthesized)
tctcttccctccatgctccgcttcgcccgctgctggccagaggtgaccaggtccggctctcagcacggccgccggccggggggccatggggagctccgcctcctccctggccgcagagac

SEQ ID NO: 136607 - DNA, 120 bp, Artificial Sequence
  ENSG00000103326_63 (sequence is synthesized)
cgagtcggaccacagcttccccgggggaccgccctacccgggtcccccggcagcggctggctggtgtaggagcggcccaggggggcccgtctggggaggtgccctggtcagccggcagca

SEQ ID NO: 136608 - DNA, 120 bp, Artificial Sequence
  ENSG00000103335_0 (sequence is synthesized)
cccagctcggccccagtgagccgagcgctgcgctccgccgaggggcagggcggtcgcctgagcgagcgcgggcccgggacgtcggcaccggcggggcggccgaaggagaaggaggaagag

SEQ ID NO: 136609 - DNA, 80 bp, Artificial Sequence
  ENSG00000103335_1 (sequence is synthesized)
ggagaaggaggaagaggagaaggcggcgcgcgggtccccgcgggtcagccatggcgcgccggccccggggcccccgcacc

SEQ ID NO: 136610 - DNA, 120 bp, Artificial Sequence
  ENSG00000103335_2 (sequence is synthesized)
cctgggccctccagccatggagccgcacgtgctcggcgcggtcctgtactggctgctgctgccctgcgcgctgctggctgcctgcctgctccgcttcagcggactctcgctggtctacct

SEQ ID NO: 136611 - DNA, 120 bp, Artificial Sequence
  ENSG00000103335_3 (sequence is synthesized)
gctcttcctgctgctgctgccctggttccccggccccacccgatgcggcctccaaggtcacacaggccgcctcctgcgggcattgctgggcctcagcctgctcttcctggtggcccatct

SEQ ID NO: 136612 - DNA, 120 bp, Artificial Sequence
  ENSG00000103335_4 (sequence is synthesized)
cgccctccagatctgcctgcatattgtgccccgcctggaccagctcctgggacccagctgcagccgctgggagaccctctcgcgacacataggggtcacaaggctggacctgaaggacat

SEQ ID NO: 136613 - DNA, 120 bp, Artificial Sequence
  ENSG00000103335_5 (sequence is synthesized)
ccccaacgccatccggctggtggcccctgacctgggcatcttggtggtctcctctgtctgcctcggcatctgcgggcgccttgcaaggaacacccggcagagcccacatccacgggagct

SEQ ID NO: 136614 - DNA, 120 bp, Artificial Sequence
  ENSG00000103335_6 (sequence is synthesized)
ggatgatgatgagagggatgtggatgccagcccgacggcagggctgcaggaagcagcaacgctggcccctacacggaggtcacggctggccgctcgtttccgagtcacggcccactggct

SEQ ID NO: 136615 - DNA, 120 bp, Artificial Sequence
  ENSG00000103335_7 (sequence is synthesized)
gctggtggcggctgggcgggtcctggccgtaacactgcttgcactggcaggcatcgcccacccctcggccctctccagtgtctacctgctgctcttcctggccctctgcacctggtgggc

SEQ ID NO: 136616 - DNA, 120 bp, Artificial Sequence
  ENSG00000103335_8 (sequence is synthesized)
ctgccactttcccatcagcactcggggcttcagcagactctgcgtcgcggtggggtgcttcggcgccggccatctcatctgcctctactgctaccagatgcccttggcacaggctctgct

SEQ ID NO: 136617 - DNA, 120 bp, Artificial Sequence
  ENSG00000103335_9 (sequence is synthesized)
cccgcctgccggcatctgggctagggtgctgggtctcaaggacttcgtgggtcccaccaactgctccagcccccacgcgctggtcctcaacaccggcctggactggcctgtgtatgccag

SEQ ID NO: 136618 - DNA, 120 bp, Artificial Sequence
  ENSG00000103335_10 (sequence is synthesized)
ccccggcgtcctcctgctgctgtgctacgccacggcctctctgcgcaagctccgcgcgtaccgcccctccggccagaggaaggaggcggcaaaggggtatgaggctcgggagctggagct

SEQ ID NO: 136619 - DNA, 120 bp, Artificial Sequence
  ENSG00000103335_11 (sequence is synthesized)
agcagagctggaccagtggccccaggaacgggagtctgaccagcacgtggtgcccacagcacccgacaccgaggctgataactgcatcgtgcacgagctgaccggccagagctccgtcct

SEQ ID NO: 136620 - DNA, 120 bp, Artificial Sequence
  ENSG00000103335_12 (sequence is synthesized)
gcggcggcctgtgcggcccaagcgggctgagcccagggaggcgtctccgctccacagcctgggccacctcatcatggaccagagctatgtgtgcgcgctcattgccatgatggtatggag

SEQ ID NO: 136621 - DNA, 120 bp, Artificial Sequence
  ENSG00000103335_13 (sequence is synthesized)
catcacctaccacagctggctgaccttcgtactgctgctctgggcctgcctcatctggacggtgcgcagccgccaccaactggccatgctgtgctcgccctgcatcctgctgtatgggat

SEQ ID NO: 136622 - DNA, 120 bp, Artificial Sequence
  ENSG00000103335_14 (sequence is synthesized)
gacgctgtgctgcctacgctacgtgtgggccatggacctgcgccctgagctgcccaccaccctgggccccgtcagcctgcgccagctggggctggagcacacccgctacccctgtctgga

SEQ ID NO: 136623 - DNA, 120 bp, Artificial Sequence
  ENSG00000103335_15 (sequence is synthesized)
ccttggtgccatgttgctctacaccctgaccttctggctcctgctgcgccagtttgtgaaagagaagctgctgaagtgggcagagtctccagctgcgctgacggaggtcaccgtggcaga

SEQ ID NO: 136624 - DNA, 120 bp, Artificial Sequence
  ENSG00000103335_16 (sequence is synthesized)
cacagagcccacgcggacgcagacgctgttgcagagcctgggggagctggtgaagggcgtgtacgccaagtactggatctatgtgtgtgctggcatgttcatcgtggtcagcttcgccgg

SEQ ID NO: 136625 - DNA, 120 bp, Artificial Sequence
  ENSG00000103335_17 (sequence is synthesized)
ccgcctcgtggtctacaagattgtctacatgttcctcttcctgctctgcctcaccctcttccaggtctactacagcctgtggcggaagctgctcaaggccttctggtggctcgtggtggc

SEQ ID NO: 136626 - DNA, 120 bp, Artificial Sequence
  ENSG00000103335_18 (sequence is synthesized)
ctacaccatgctggtcctcatcgccgtctacaccttccagttccaggacttccctgcctactggcgcaacctcactggcttcaccgacgagcagctgggggacctgggcctggagcagtt

SEQ ID NO: 136627 - DNA, 120 bp, Artificial Sequence
  ENSG00000103335_19 (sequence is synthesized)
cagcgtgtccgagctcttctccagcatcctggtgcccggcttcttcctcctggcctgcatcctgcagctgcactacttccacaggcccttcatgcagctcaccgacatggagcacgtgtc

SEQ ID NO: 136628 - DNA, 120 bp, Artificial Sequence
  ENSG00000103335_20 (sequence is synthesized)
cctgcctggcacgcgcctcccgcgctgggctcacaggcaggatgcagtgagtgggaccccactgctgcgggaggagcagcaggagcatcagcagcagcagcaggaggaggaggaggagga

SEQ ID NO: 136629 - DNA, 120 bp, Artificial Sequence
  ENSG00000103335_21 (sequence is synthesized)
ggaggactccagggacgaggggctgggcgtggccactccccaccaggccacgcaggtgcctgaaggggcagccaagtggggcctggtggctgagcggctgctggagctggcagccggctt

SEQ ID NO: 136630 - DNA, 120 bp, Artificial Sequence
  ENSG00000103335_22 (sequence is synthesized)
ctcggacgtcctctcacgcgtgcaggtgttcctgcggcggctgctggagcttcacgttttcaagctggtggccctgtacaccgtctgggtggccctgaaggaggtgtcggtgatgaacct

SEQ ID NO: 136631 - DNA, 120 bp, Artificial Sequence
  ENSG00000103335_23 (sequence is synthesized)
gctgctggtggtgctgtgggccttcgccctgccctacccacgcttccggcccatggcctcctgcctgtccaccgtgtggacctgcgtcatcatcgtgtgtaagatgctgtaccagctcaa

SEQ ID NO: 136632 - DNA, 120 bp, Artificial Sequence
  ENSG00000103335_24 (sequence is synthesized)
ggttgtcaacccccaggagtattccagcaactgcaccgagcccttccccaacagcaccaacttgctgcccacggagatcagccagtccctgctgtaccgggggcccgtggaccctgccaa

SEQ ID NO: 136633 - DNA, 120 bp, Artificial Sequence
  ENSG00000103335_25 (sequence is synthesized)
ctggtttggggtgcggaaagggttccccaacctgggctacatccagaaccacctgcaagtgctgctgctgctggtattcgaggccatcgtgtaccggcgccaggagcactaccgccggca

SEQ ID NO: 136634 - DNA, 120 bp, Artificial Sequence
  ENSG00000103335_26 (sequence is synthesized)
gcaccagctggccccgctgcctgcccaggccgtgtttgccagcggcacccgccagcagctggaccaggatctgctcggctgcctcaagtacttcatcaacttcttcttctacaaattcgg

SEQ ID NO: 136635 - DNA, 120 bp, Artificial Sequence
  ENSG00000103335_27 (sequence is synthesized)
gctggagatctgcttcctgatggccgtgaacgtgatcgggcagcgcatgaactttctggtgaccctgcacggttgctggctggtggccatcctcacccgcaggcaccgccaggccattgc

SEQ ID NO: 136636 - DNA, 120 bp, Artificial Sequence
  ENSG00000103335_28 (sequence is synthesized)
ccgcctctggcccaactactgcctcttcctggcgctgttcctgctgtaccagtacctgctgtgcctggggatgcccccggccctgtgcattgattatccctggcgctggagccgggccgt

SEQ ID NO: 136637 - DNA, 120 bp, Artificial Sequence
  ENSG00000103335_29 (sequence is synthesized)
ccccatgaactccgcactcatcaagtggctgtacctgcctgatttcttccgggcccccaactccaccaacctcatcagcgactttctcctgctgctgtgcgcctcccagcagtggcaggt

SEQ ID NO: 136638 - DNA, 120 bp, Artificial Sequence
  ENSG00000103335_30 (sequence is synthesized)
gttctcagctgagcgcacagaggagtggcagcgcatggctggcgtcaacaccgaccgcctggagccgctgcggggggagcccaaccccgtgcccaactttatccactgcaggtcctacct

SEQ ID NO: 136639 - DNA, 120 bp, Artificial Sequence
  ENSG00000103335_31 (sequence is synthesized)
tgacatgctgaaggtggccgtcttccgatacctgttctggctggtgctggtggtggtgtttgtcacgggggccacccgcatcagcatcttcgggctgggctacctgctggcctgcttcta

SEQ ID NO: 136640 - DNA, 120 bp, Artificial Sequence
  ENSG00000103335_32 (sequence is synthesized)
cctgctgctcttcggcacggccctgctgcagagggacacacgggcccgcctcgtgctgtgggactgcctcattctgtacaacgtcaccgtcatcatctccaagaacatgctgtcgctcct

SEQ ID NO: 136641 - DNA, 120 bp, Artificial Sequence
  ENSG00000103335_33 (sequence is synthesized)
cagctcttcagccttgtatgcaccgtcaagggctactatgaccccaaggagatgatggacagagaccaggactgcctgctgcctgtggaggaggctggcatcatctgggacagcgtctgc

SEQ ID NO: 136642 - DNA, 120 bp, Artificial Sequence
  ENSG00000103335_34 (sequence is synthesized)
ttcttcttcctgctgctgcagcgccgcgtcttccttagccattactacctgcacgtcagggccgacctccaggccaccgccctgctagcctccaggggcttcgccctctacaacgctgcc

SEQ ID NO: 136643 - DNA, 120 bp, Artificial Sequence
  ENSG00000103335_35 (sequence is synthesized)
aacctcaagagcattgactttcaccgcaggatagaggagaagtccctggcccagctgaaaagacagatggagcgtatccgtgccaagcaggagaagcacaggcagggccgggtggaccgc

SEQ ID NO: 136644 - DNA, 120 bp, Artificial Sequence
  ENSG00000103335_36 (sequence is synthesized)
gcccccaggacaccctgggccccaaggaccccggcctggagccagggcccgacagtccagggggctcctccccgccacggaggcagtggtggcggccctggctggaccacgccacagtca

SEQ ID NO: 136645 - DNA, 120 bp, Artificial Sequence
  ENSG00000103335_37 (sequence is synthesized)
gtcatccactccggggactacttcctgtttgagtccgacagtgaggaagaggaggaggctgttcctgaagacccgaggccgtcggcacagagtgccttccagctggcgtaccaggcatgg

SEQ ID NO: 136646 - DNA, 120 bp, Artificial Sequence
  ENSG00000103335_38 (sequence is synthesized)
gtgaccaacgcccaggcggtgctgaggcggcggcagcaggagcaggagcaggcaaggcaggaacaggcaggacagctacccacaggaggtggtcccagccaggaggtggagccagcagag

SEQ ID NO: 136647 - DNA, 120 bp, Artificial Sequence
  ENSG00000103335_39 (sequence is synthesized)
ggccccgaggaggcagcggcaggccggagccatgtggtgcagagggtgctgagcacggcgcagttcctgtggatgctggggcaggcgctagtggatgagctgacacgctggctgcaggag

SEQ ID NO: 136648 - DNA, 120 bp, Artificial Sequence
  ENSG00000103335_40 (sequence is synthesized)
ttcacccggcaccacggcaccatgagcgacgtgctgcgggcagagcgctacctcctcacacaggagctcctgcagggcggcgaagtgcacaggggcgtgctggatcagctgtacacaagc

SEQ ID NO: 136649 - DNA, 120 bp, Artificial Sequence
  ENSG00000103335_41 (sequence is synthesized)
caggccgaggccacgctgccaggccccaccgaggcccccaatgccccaagcaccgtgtccagtgggctgggcgcggaggagccactcagcagcatgacagacgacatgggcagccccctg

SEQ ID NO: 136650 - DNA, 120 bp, Artificial Sequence
  ENSG00000103335_42 (sequence is synthesized)
agcaccggctaccacacgcgcagtggcagtgaggaggcagtcaccgaccccggggagcgtgaggctggtgcctctctgtaccagggactgatgcggacggccagcgagctgctcctggac

SEQ ID NO: 136651 - DNA, 120 bp, Artificial Sequence
  ENSG00000103335_43 (sequence is synthesized)
aggcgcctgcgcatcccagagctggaggaggcagagctgtttgcggaggggcagggccgggcgctgcggctgctgcgggccgtgtaccagtgtgtggccgcccactcggagctgctctgc

SEQ ID NO: 136652 - DNA, 120 bp, Artificial Sequence
  ENSG00000103335_44 (sequence is synthesized)
tacttcatcatcatcctcaaccacatggtcacggcctccgccggctcgctggtgctgcccgtgctcgtcttcctgtgggccatgctgtcgatcccgaggcccagcaagcgcttctggatg

SEQ ID NO: 136653 - DNA, 120 bp, Artificial Sequence
  ENSG00000103335_45 (sequence is synthesized)
acggccatcgtcttcaccgagatcgcggtggtcgtcaagtacctgttccagtttgggttcttcccctggaacagccacgtggtgctgcggcgctacgagaacaagccctacttcccgccc

SEQ ID NO: 136654 - DNA, 120 bp, Artificial Sequence
  ENSG00000103335_46 (sequence is synthesized)
cgcatcctgggcctggagaagactgacggctacatcaagtacgacctggtgcagctcatggcccttttcttccaccgctcccagctgctgtgctatggcctctgggaccatgaggaggac

SEQ ID NO: 136655 - DNA, 120 bp, Artificial Sequence
  ENSG00000103335_47 (sequence is synthesized)
tcaccatccaaggagcatgacaagagcggcgaggaggagcagggagccgaggaggggccaggggtgcctgcggccaccaccgaagaccacattcaggtggaagccagggtcggacccacg

SEQ ID NO: 136656 - DNA, 120 bp, Artificial Sequence
  ENSG00000103335_48 (sequence is synthesized)
gacgggaccccagaaccccaagtggagctcaggccccgtgatacgaggcgcatcagtctacgttttagaagaaggaagaaggagggcccagcacggaaaggagcggcagccatcgaagct

SEQ ID NO: 136657 - DNA, 120 bp, Artificial Sequence
  ENSG00000103335_49 (sequence is synthesized)
gaggacagggaggaagaagagggggaggaagagaaagaggcccccacggggagagagaagaggccaagccgctctggaggaagagtaagggcggccgggcggcggctgcagggcttctgc

SEQ ID NO: 136658 - DNA, 120 bp, Artificial Sequence
  ENSG00000103335_50 (sequence is synthesized)
ctgtccctggcccagggcacatatcggccgctacggcgcttcttccacgacatcctgcacaccaagtaccgcgcagccaccgacgtctatgccctcatgttcctggctgatgttgtcgac

SEQ ID NO: 136659 - DNA, 120 bp, Artificial Sequence
  ENSG00000103335_51 (sequence is synthesized)
ttcatcatcatcatttttggcttctgggcctttgggaagcactcggcggccacagacatcacgtcctccctatcagacgaccaggtacccgaggctttcctggtcatgctgctgatccag

SEQ ID NO: 136660 - DNA, 120 bp, Artificial Sequence
  ENSG00000103335_52 (sequence is synthesized)
ttcagtaccatggtggttgaccgcgccctctacctgcgcaagaccgtgctgggcaagctggccttccaggtggcgctggtgctggccatccacctatggatgttcttcatcctgcccgcc

SEQ ID NO: 136661 - DNA, 120 bp, Artificial Sequence
  ENSG00000103335_53 (sequence is synthesized)
gtcactgagaggatgttcaaccagaatgtggtggcccagctctggtacttcgtgaagtgcatctacttcgccctgtccgcctaccagatccgctgcggctaccccacccgcatcctcggc

SEQ ID NO: 136662 - DNA, 120 bp, Artificial Sequence
  ENSG00000103335_54 (sequence is synthesized)
aacttcctcaccaagaagtacaatcatctcaacctcttcctcttccaggggttccggctggtgccgttcctggtggagctgcgggcagtgatggactgggtgtggacggacaccacgctg

SEQ ID NO: 136663 - DNA, 120 bp, Artificial Sequence
  ENSG00000103335_55 (sequence is synthesized)
tccctgtccagctggatgtgtgtggaggacatctatgccaacatcttcatcatcaaatgcagccgagagacagagaagaaatacccgcagcccaaagggcagaagaagaagaagatcgtc

SEQ ID NO: 136664 - DNA, 120 bp, Artificial Sequence
  ENSG00000103335_56 (sequence is synthesized)
aagtacggcatgggtggcctcatcatcctcttcctcatcgccatcatctggttcccactgctcttcatgtcgctggtgcgctccgtggttggggttgtcaaccagcccatcgatgtcacc

SEQ ID NO: 136665 - DNA, 120 bp, Artificial Sequence
  ENSG00000103335_57 (sequence is synthesized)
gtcaccctgaagctgggcggctatgagccgctgttcaccatgagcgcccagcagccgtccatcatccccttcacggcccaggcctatgaggagctgtcccggcagtttgacccccagccg

SEQ ID NO: 136666 - DNA, 120 bp, Artificial Sequence
  ENSG00000103335_58 (sequence is synthesized)
ctggccatgcagttcatcagccagtacagccctgaggacatcgtcacggcgcagattgagggcagctccggggcgctgtggcgcatcagtccccccagccgtgcccagatgaagcgggag

SEQ ID NO: 136667 - DNA, 120 bp, Artificial Sequence
  ENSG00000103335_59 (sequence is synthesized)
ctctacaacggcacggccgacatcaccctgcgcttcacctggaacttccagagggacctggcgaagggaggcactgtggagtatgccaacgagaagcacatgctggccctggcccccaac

SEQ ID NO: 136668 - DNA, 120 bp, Artificial Sequence
  ENSG00000103335_60 (sequence is synthesized)
agcactgcacggcggcagctggccagcctgctcgagggcacctcggaccagtctgtggtcatccctaatctcttccccaagtacatccgtgcccccaacgggcccgaagccaaccctgtg

SEQ ID NO: 136669 - DNA, 120 bp, Artificial Sequence
  ENSG00000103335_61 (sequence is synthesized)
aagcagctgcagcccaatgaggaggccgactacctcggcgtgcgtatccagctgcggagggagcagggtgcgggggccaccggcttcctcgaatggtgggtcatcgagctgcaggagtgc

SEQ ID NO: 136670 - DNA, 120 bp, Artificial Sequence
  ENSG00000103335_62 (sequence is synthesized)
cggaccgactgcaacctgctgcccatggtcattttcagtgacaaggtcagcccaccgagcctcggcttcctggctggctacggcatcatggggctgtacgtgtccatcgtgctggtcatc

SEQ ID NO: 136671 - DNA, 120 bp, Artificial Sequence
  ENSG00000103335_63 (sequence is synthesized)
ggcaagttcgtgcgcggattcttcagcgagatctcgcactccattatgttcgaggagctgccgtgcgtggaccgcatcctcaagctctgccaggacatcttcctggtgcgggagactcgg

SEQ ID NO: 136672 - DNA, 120 bp, Artificial Sequence
  ENSG00000103335_64 (sequence is synthesized)
gagctggagctggaggaggagttgtacgccaagctcatcttcctctaccgctcaccggagaccatgatcaagtggactcgtgagaaggagtaggagctgctgctggcgcccgagagggaa

SEQ ID NO: 136673 - DNA, 120 bp, Artificial Sequence
  ENSG00000103335_65 (sequence is synthesized)
ggagccggcctgctgggcagcgtggccacaaggggcggcactcctcaggccgggggagccactgccccgtccaaggccgccagctgtgatgcatcctcccggcctgcctgagccctgatg

SEQ ID NO: 136674 - DNA, 120 bp, Artificial Sequence
  ENSG00000103335_66 (sequence is synthesized)
ctgctgtcagagaaggacactgcgtccccacggcctgcgtggcgctgccgtcccccacgtgtactgtagagttttttttttaattaaaaaatgttttatttatacaaatggacaatcaga

SEQ ID NO: 136675 - DNA, 120 bp, Artificial Sequence
  ENSG00000103335_67 (sequence is synthesized)
ggaatctgtgtgtgtgaacacacaggacactagagctgtcagttctcgagacaccaggtgtgcgcgaggtgattcccatggaccctgagggctggtgatagactcgggtcaacgggtggg

SEQ ID NO: 136676 - DNA, 120 bp, Artificial Sequence
  ENSG00000103335_68 (sequence is synthesized)
tcaaatgcagccgagagacagagaagatacattggctagaaatgactgaattggaagaattctctgtattctctggttgctagaaccttatcaattaaaatttgcagaaaatttctccaa

SEQ ID NO: 136677 - DNA, 120 bp, Artificial Sequence
  ENSG00000103335_69 (sequence is synthesized)
accgcgcagccaccgacgtctatgccctcatgttcctggctgatgttgtcgacttcatcatcatcatttttggcttctgggcctttggggtgagccaggcccgggacccaaacccagtgt

SEQ ID NO: 136678 - DNA, 120 bp, Artificial Sequence
  ENSG00000103335_70 (sequence is synthesized)
gtgagaccctgtctctaaaaaagtaaaaagaagaaacccagtgcccattggctgtcactcggtttcccctcccctggcccctagtaaccccttgtctaggtcctggttctatgagatttg

SEQ ID NO: 136679 - DNA, 120 bp, Artificial Sequence
  ENSG00000103335_71 (sequence is synthesized)
cctacagtggatatttcatgaaaacaggctcagacagcgtttgtccttttgtaatcagctttccttgctcagcatggtgtctctgaggtccacccacgtggcagtatggccttcctgttt

SEQ ID NO: 136680 - DNA, 120 bp, Artificial Sequence
  ENSG00000103335_72 (sequence is synthesized)
atgggcaaatgatattctgtggcatggatggaccacaacatgctcatctgttgatgggctgttgcccgtgatgctgccaggcacgccggtgtacacgtctgtgtgcccgtgcccctggtc

SEQ ID NO: 136681 - DNA, 120 bp, Artificial Sequence
  ENSG00000103335_73 (sequence is synthesized)
ctgtggctgcacgccagggccggaagtgctggtggtggtttccatcatgaggagctgctggttttccatagcagctccaccatctaaggttcccaccaccaacacgaggttgcggtttct

SEQ ID NO: 136682 - DNA, 120 bp, Artificial Sequence
  ENSG00000103335_74 (sequence is synthesized)
ccacatcctcaacaacctgttactatgtcttttttgttctggccatgctgctgaacgggtggcttgctgtgggctcttctcagttccctgttgaccgacgctgagcgtcttttcatgtgc

SEQ ID NO: 136683 - DNA, 120 bp, Artificial Sequence
  ENSG00000103335_75 (sequence is synthesized)
ttggccatttgtgtatcttctctggggaaatgtctattcaaatcctttctccatagtttagttgggcttttgagataggatctcaggctgaagtgcagtggcatgaccttcactcactgt

SEQ ID NO: 136684 - DNA, 82 bp, Artificial Sequence
  ENSG00000103335_76 (sequence is synthesized)
gcctggctagtcttttgtatttttggccaggttcgtctcaaactcctgacctcaaagtgctgggatgacaagtgtgagccgc

SEQ ID NO: 136685 - DNA, 120 bp, Artificial Sequence
  ENSG00000103335_77 (sequence is synthesized)
ctcctgacctcaaagtgctgggatgacaagtgtgagccgccacacccagcagttgggttgttttttattagagttttttctgtttttctgcagatacattggctagaaatgactgaattg

SEQ ID NO: 136686 - DNA, 120 bp, Artificial Sequence
  ENSG00000103335_78 (sequence is synthesized)
gaagaattctctgtattctctggttgctagaaccttatcaattaaaatttgcagaaaatttctccaattctatggactgtctcttaaattttcttggtgtctttggaagcacaaagtatt

SEQ ID NO: 136687 - DNA, 120 bp, Artificial Sequence
  ENSG00000103335_79 (sequence is synthesized)
tattttggtaatatctggtttactttgtttccttcgccaaatccaggttcatgaagatttgcccgttttcttctaaaagttctatagttttagctctgaagtttcgctctttgatccact

SEQ ID NO: 136688 - DNA, 120 bp, Artificial Sequence
  ENSG00000103335_80 (sequence is synthesized)
ttgaggtaaattttggcacatggtatgaggcaggagttgcgtttcattctcctgcctggggcggtgcctgcaccgtgttgaaaaaggttgtccgttcccactgaacggtcacagctccct

SEQ ID NO: 136689 - DNA, 120 bp, Artificial Sequence
  ENSG00000103335_81 (sequence is synthesized)
tgtctaagatcaacgacccctgaacatgagggttccaactggactcttagttctactccactggcctgtgtctgcccaccattactaccgctgtgccatactgaggtcaggctggggctt

SEQ ID NO: 136690 - DNA, 120 bp, Artificial Sequence
  ENSG00000103335_82 (sequence is synthesized)
gggctgctgggtgagctggagaatgcggttgtgtgacccgcaggaagggcagagctgagcgtatgacctgtgtcgttcccctccagaaatacccgcagcccaaagggcagaagaagaaga

SEQ ID NO: 136691 - DNA, 120 bp, Artificial Sequence
  ENSG00000103335_83 (sequence is synthesized)
gcctgggcccagggcgggggccgggacaagggccagggatatgccctctccctaagacagaggcactgctgccacgagaacccgtggtgctggaggccctcccagggctcggagcccatg

SEQ ID NO: 136692 - DNA, 120 bp, Artificial Sequence
  ENSG00000103335_84 (sequence is synthesized)
gggacatgaggcgagcccacccactagctgatcacgaggccagtgatcttggcagctgcgagtgagtgctgggcgcagaagtgggcagcggagttggtcctgttccaggcaggctggcag

SEQ ID NO: 136693 - DNA, 120 bp, Artificial Sequence
  ENSG00000103335_85 (sequence is synthesized)
cagagcagggcctggtgcagggaggaccggacagccactgtttgctgcattcttgtttaatggcctttctcagagagaattcgtgcgtcagaccactcccccacgtaaaaagtacaactc

SEQ ID NO: 136694 - DNA, 120 bp, Artificial Sequence
  ENSG00000103335_86 (sequence is synthesized)
aggggtttctagtggattcacagttgagcatctgccttctcaccacttcaaaaagaaaccccgggccgggcacagcggctcacccctatcatcccagcactgtaagagacccaggaggga

SEQ ID NO: 136695 - DNA, 120 bp, Artificial Sequence
  ENSG00000103335_87 (sequence is synthesized)
ggtactgctcaaggccaggagttcaagatctgcacggccacaagcgagaccctgcctcagcaaatgtaaaaataaaacaattagctggcaatggcagctcatgcctatggtcccagcact

SEQ ID NO: 136696 - DNA, 120 bp, Artificial Sequence
  ENSG00000103335_88 (sequence is synthesized)
gggaccttctcgcacatccctccttctccctggacctctcttcactcccccagcccctgcccgtggtctccctgtttctcaaacacctggtccccttccccgtgaaggtggctccaaggc

SEQ ID NO: 136697 - DNA, 120 bp, Artificial Sequence
  ENSG00000103335_89 (sequence is synthesized)
ggtcatccctaatctcttccccaagtacatccgtgcccccaacgggcccgaagccaaccctgtgaagcagctgcagcccaatgaggaggccgactacctcggctgacaaggtcagcccac

SEQ ID NO: 136698 - DNA, 120 bp, Artificial Sequence
  ENSG00000103335_90 (sequence is synthesized)
actaagggctaagtttctccaccagcgggagggccactgtgtggtgtcacgactgccccagggaggggttctggcttggggccagctttgccttcttccctgcagctgtggtggggtggg

SEQ ID NO: 136699 - DNA, 120 bp, Artificial Sequence
  ENSG00000103335_91 (sequence is synthesized)
tgccaccagacgcccctgcatctgtacggcagaagggcctgtcctcgccgcagacagcacggagggtgggggcagcagatgcctcccccgtgggtgcctcttgtccagcgtgggcagaga

SEQ ID NO: 136700 - DNA, 120 bp, Artificial Sequence
  ENSG00000103342_0 (sequence is synthesized)
ggaaacgggggcggccagaacagagaactaccgaggcgaagcacctgtggaatcctctcaagaggaacagtcattgtgtgaaggttcaaattcagctgttagcatggaactttcagaacc

SEQ ID NO: 136701 - DNA, 120 bp, Artificial Sequence
  ENSG00000103342_1 (sequence is synthesized)
tattgtagaaaatggagagacagaaatgtctccagaagaatcatgggagcacaaagaagaaataagtgaagcagagccagggggtggttccttgggagatggaaggccgccagaggaaag

SEQ ID NO: 136702 - DNA, 120 bp, Artificial Sequence
  ENSG00000103342_2 (sequence is synthesized)
tgcccatgaaatgatggaggaggaagaggaaatcccaaaacctaagtctgtggttgcaccgccaggtgctcctaagaaagagcatgtaaatgtagtattcattgggcacgtagatgctgg

SEQ ID NO: 136703 - DNA, 120 bp, Artificial Sequence
  ENSG00000103342_3 (sequence is synthesized)
caagtcaaccattggaggacaaataatgtatttgactggaatggttgacaaaaggacgcttgaaaagtatgaaagagaagctaaagagaaaaacagagaaacttggtacttgtcttgggc

SEQ ID NO: 136704 - DNA, 120 bp, Artificial Sequence
  ENSG00000103342_4 (sequence is synthesized)
cttagacacaaatcaggaagaacgagacaagggtaaaacagtagaagtgggtcgtgcctattttgaaaccgaaaagaagcatttcacaattctagatgcccctggccacaagagttttgt

SEQ ID NO: 136705 - DNA, 120 bp, Artificial Sequence
  ENSG00000103342_5 (sequence is synthesized)
cccaaatatgattggtggtgcctctcaagctgatttggctgtgctggtaatctcagccaggaaaggagagtttgaaactggatttgaaaaaggaggacagacaagagaacatgcaatgtt

SEQ ID NO: 136706 - DNA, 120 bp, Artificial Sequence
  ENSG00000103342_6 (sequence is synthesized)
aagatggatgatccaacagtaaattggagcaatgagagatatgaagaatgtaaggagaaactagtgccatttttgaaaaaagttggcttcaatcccaaaaaggacattcactttatgccc

SEQ ID NO: 136707 - DNA, 120 bp, Artificial Sequence
  ENSG00000103342_7 (sequence is synthesized)
tgctcaggacttactggagcaaatctcaaagagcagtcggatttctgtccttggtacattggattaccgtttattccatatctggataatttgccgaacttcaatagatcagttgatgga

SEQ ID NO: 136708 - DNA, 120 bp, Artificial Sequence
  ENSG00000103342_8 (sequence is synthesized)
ccaatcaggctgccaattgtggataagtacaaggatatgggcactgtggtcctgggaaagctggaatcaggatctatttgtaaaggccagcagcttgtgatgatgccaaacaagcacaac

SEQ ID NO: 136709 - DNA, 120 bp, Artificial Sequence
  ENSG00000103342_9 (sequence is synthesized)
gtggaagttcttggaatactttccgatgatgtagagactgataccgtagccccaggtgaaaacctcaaaatcagactgaaaggaattgaagaagaggagattcttccagggtttatactt

SEQ ID NO: 136710 - DNA, 120 bp, Artificial Sequence
  ENSG00000103342_10 (sequence is synthesized)
tgtgatcctaataatctttgtcattctggacgcacatttgatgcccagatagtgattatagagcacaaatccatcatctgcccaggctataatgcggtgctgcatattcatacctgtatt

SEQ ID NO: 136711 - DNA, 120 bp, Artificial Sequence
  ENSG00000103342_11 (sequence is synthesized)
gaggaggtggaaataacagccttaatctgcttggtagacaaaaaatcaggagaaaaaagtaagacccgaccccgttttgtcaaacaagatcaagtatgcattgctcgcttaaggacagca

SEQ ID NO: 136712 - DNA, 120 bp, Artificial Sequence
  ENSG00000103342_12 (sequence is synthesized)
ggaaccatctgccttgagacctttaaagacttccctcagatgggtcgtttcaccttaagagatgagggtaagaccattgcaattggaaaagttctgaaactggttccagagaaagactaa

SEQ ID NO: 136713 - DNA, 120 bp, Artificial Sequence
  ENSG00000103342_13 (sequence is synthesized)
attttctgcccattgataaacctctccccatattttgcaaagaggaaattcacagcaaaagtccacattatgtcagctttctcatattgagagctctgctatgccactgttgaatttttc

SEQ ID NO: 136714 - DNA, 120 bp, Artificial Sequence
  ENSG00000103342_14 (sequence is synthesized)
ccaagattcctgtccctagccctcacttcaaactctgcttccttggacagatttggcaatagctttgtaagtgatgtggacataattgcctacaataatgaaaacctacaggaatttttt

SEQ ID NO: 136715 - DNA, 120 bp, Artificial Sequence
  ENSG00000103342_15 (sequence is synthesized)
tatttttcattttccccttaggcatatttagtatttttcccccaggcagatcattctgagtgtgcgagtgtgtgtgcacatgttacaaaggcaactaccatgttaataaaatattcaatt

SEQ ID NO: 136716 - DNA, 120 bp, Artificial Sequence
  ENSG00000103342_16 (sequence is synthesized)
gagctgctgccgcggcgacgccggggatctttgtcgctagctcccggcccttctgccccgccgccttccctcagtcagcgttgcccactcctctccggccgggcgcccctgcctccattt

SEQ ID NO: 136717 - DNA, 120 bp, Artificial Sequence
  ENSG00000103342_17 (sequence is synthesized)
ttgcccactcctctccggccgggcgcccctgcctccatttcccgctctctgtccaccacacacacggcccccccgatcatggatccgggcagtggcggcggcggcggcggcggcggcggc

SEQ ID NO: 136718 - DNA, 120 bp, Artificial Sequence
  ENSG00000103342_18 (sequence is synthesized)
gacatggaagcccccgggccgggcccttgcggcggcggcggctccctggcggcggcggccgaggcccagcgggagaacctcagcgcggccttcagccggcaactcaacgtcaacgccaag

SEQ ID NO: 136719 - DNA, 120 bp, Artificial Sequence
  ENSG00000103342_19 (sequence is synthesized)
aactcaacgtcaacgccaagcccttcgtgcccaacgtccacgccgccgagttcgtgccgtccttcctgcggggcccggcagcgccgccacccccagttggcggcgccgccaataaccacg

SEQ ID NO: 136720 - DNA, 120 bp, Artificial Sequence
  ENSG00000103342_20 (sequence is synthesized)
gagccggcagcggcgcgggaggccgtgcggcacctgtggaatcctctcaagaggaacagtcattgtgtgaaggttcaaattcagctgttagcatggaactttcagaacctattgaaaatg

SEQ ID NO: 136721 - DNA, 120 bp, Artificial Sequence
  ENSG00000103342_21 (sequence is synthesized)
gcccgcggcggtggccgggcggggagcggacagcgggcagcgcgcccaaagacccggacccgagtgccgcccctccgcgcccctgccctgctctggagtccgcagttacccacttgagat

SEQ ID NO: 136722 - DNA, 120 bp, Artificial Sequence
  ENSG00000103342_22 (sequence is synthesized)
gccaccgagcccagccttgaggctcattttcaaaaggagaagggtaatgaactaggatttatgccccaaattcatatggaagatttaattatgtatgttaaagggtgctgttgtttgcat

SEQ ID NO: 136723 - DNA, 120 bp, Artificial Sequence
  ENSG00000103342_23 (sequence is synthesized)
gaggacaaataatgtatttgactggaatggttgacaaaaggacgcttgaaaagtatgaaagagaagctaaagagaaaaacagagaaacttggtatagtaaacttttatgacacttataaa

SEQ ID NO: 136724 - DNA, 120 bp, Artificial Sequence
  ENSG00000103342_24 (sequence is synthesized)
ttacttttaaggagacgatgcccacttagtgcttttggagcctgttaaaatataaattgttgaagtctaaaatcgtatcacaacaaaggaaatttcccctctcctcataatacacagtag

SEQ ID NO: 136725 - DNA, 120 bp, Artificial Sequence
  ENSG00000103342_25 (sequence is synthesized)
atgagttcctaatgctttaataacttacacagagaaatttggaaacaatccatatatctggtgatagacttgttgaaaatactataaaccatccatttaattgggtgattttgcaaccac

SEQ ID NO: 136726 - DNA, 120 bp, Artificial Sequence
  ENSG00000103342_26 (sequence is synthesized)
aacattgttgcattagctttttaactttcccaagtaattgaatacattttattacttggacttttataaactctttccctacccactataaatgagacattcacagcgttcaagtttgta

SEQ ID NO: 136727 - DNA, 120 bp, Artificial Sequence
  ENSG00000103342_27 (sequence is synthesized)
ttaaaggaaaggattagtttgaccccttcttttgatggttaatgcatacatgcagttaaatccctttatgcaaatgtgacactgctttactaggtcttttagttatttatttattttttt

SEQ ID NO: 136728 - DNA, 120 bp, Artificial Sequence
  ENSG00000103342_28 (sequence is synthesized)
tttttttgccaatttatattgtaacatgatttcttgaacacagtaagttgttttaaaataaaagaacagcatactgtagtttttataagtaaagcgtaatgaaattgtacccctagagaa

SEQ ID NO: 136729 - DNA, 120 bp, Artificial Sequence
  ENSG00000103342_29 (sequence is synthesized)
aattccattaacttgttaaattagtggaattaacaacaaataaagcatgtttgagacctggcaaaaattcctctggtagtatttataaatagagctgcatgcctctagtatgaaaaccgt

SEQ ID NO: 136730 - DNA, 120 bp, Artificial Sequence
  ENSG00000103342_30 (sequence is synthesized)
atcagttgcaagtgccacttctacaagttactcagtttactctttgtatcagtaactttaaaggttggatgatccttgctggttaaagctaaatctcaacctagcaactaaatgaaaata

SEQ ID NO: 136731 - DNA, 120 bp, Artificial Sequence
  ENSG00000103342_31 (sequence is synthesized)
tttagaatcatcagaatctgaacagactaaaattatcagcgataagcagaatcaagcagggtataagttttatctcaattatttgaaattgactgagttttcttaagtgtaaagctgaaa

SEQ ID NO: 136732 - DNA, 120 bp, Artificial Sequence
  ENSG00000103342_32 (sequence is synthesized)
tttgctaaccatgtttttgatgaaccacagtgcagcattgtgtgggttttagattgaatgactctctgctataattatcatgactttgaaatttttcatgagaataaatgaggaatggag

SEQ ID NO: 136733 - DNA, 120 bp, Artificial Sequence
  ENSG00000103342_33 (sequence is synthesized)
cctcttttagattgtgatttctctctaaataagatactttgtatatttaatgacaagtctcttccctataattttgctcctcagaaaagaaaagcctagacagactgtatttccagtcac

SEQ ID NO: 136734 - DNA, 90 bp, Artificial Sequence
  ENSG00000103342_34 (sequence is synthesized)
tcagaaaagaaaagcctagacagactgtatttccagtcacagaacataaaacttaatctaatgggtgttttgttttgttttgagacagag

SEQ ID NO: 136735 - DNA, 86 bp, Artificial Sequence
  ENSG00000103342_35 (sequence is synthesized)
agccctccacgaggcccagttaatttttgtatctttagtggagacgaggtttccccctattggtcaggctggtctcaaacttctga

SEQ ID NO: 136736 - DNA, 120 bp, Artificial Sequence
  ENSG00000103342_36 (sequence is synthesized)
cctcaagtgatccactcgcctcagcctctcaaaagtgctgggattacaggcatgaggcgccgcacttggcctagtgttttcttaactgtgaaattcccattcatttcttgaatgaggcta

SEQ ID NO: 136737 - DNA, 120 bp, Artificial Sequence
  ENSG00000103342_37 (sequence is synthesized)
tgaatgaggctacatcttatggacagagcaaagttattgtcctacagattcttaaaactataattatggctattgcatgaaatttaaatagattttattatgtctgcaaatctctgggct

SEQ ID NO: 136738 - DNA, 120 bp, Artificial Sequence
  ENSG00000103342_38 (sequence is synthesized)
tttatttttctggaaaatataggagctttaatcaaaacataatagttctttttgtaattccatgttaataaaaacaaatactagcaattgcttgaattttaatgaatatttaaaagttca

SEQ ID NO: 136739 - DNA, 120 bp, Artificial Sequence
  ENSG00000103342_39 (sequence is synthesized)
agagccacggaaatcacttccagagataagagttccctttctaaatagaacacatttttaaaaaataagttatgtttgctactaaaacatttacactgttagactattatgtgcatgttg

SEQ ID NO: 136740 - DNA, 120 bp, Artificial Sequence
  ENSG00000103342_40 (sequence is synthesized)
ccaagactcttaagtaacttggatatcaactgtgaagggcctacctctaaaaagtaacaggtcatacaaatacaaatgtaactgtaaaaattccactggattcttgcatatttgcaagat

SEQ ID NO: 136741 - DNA, 120 bp, Artificial Sequence
  ENSG00000103342_41 (sequence is synthesized)
tagattattcaaaagaaatttcagtgctaaaattaaccagcaacataagttctatgggctttgaaaattgttctcatctttttaaagttgatgcattttcaatcctgcttacacaggctg

SEQ ID NO: 136742 - DNA, 120 bp, Artificial Sequence
  ENSG00000103342_42 (sequence is synthesized)
ttcatttggataagtaaataaaatgtctaaggtgaacttggcattatgtggagatgttggaccgttatagagcaatacaaattcctatgctgtcattctgttttctgcaaatgcaaacgt

SEQ ID NO: 136743 - DNA, 120 bp, Artificial Sequence
  ENSG00000103342_43 (sequence is synthesized)
gcttatatggtcaacagtgcaaaaatagggtagttggctgcatatttagggtattacctaagcatttgttctctaacgttgctctactagaatgatttttttcttgcatcttttcacatt

SEQ ID NO: 136744 - DNA, 120 bp, Artificial Sequence
  ENSG00000103342_44 (sequence is synthesized)
aatgatgttctttatataactttcatgcgattatttagttttttaaattaataaagtgaatttaagaaatattgaaataaacatctaagtaattgccattttaaacccttgtttcttact

SEQ ID NO: 136745 - DNA, 120 bp, Artificial Sequence
  ENSG00000103342_45 (sequence is synthesized)
gtgggagagggggaaatacagcactcatttcttgtttttaatttgcagaagtaagtgaaaatctatgtaaaatcaaaccaaaagagttggactgagtgtgtattgtcttgagattaagtg

SEQ ID NO: 136746 - DNA, 120 bp, Artificial Sequence
  ENSG00000103342_46 (sequence is synthesized)
acaaatagtaaagtgttactgagtaattaagcccatgtattttttttttgtgagttgaaaatctttgaaatatgtgataaccgaatgtcaaaagttcctaaactctaacagtgcaggttg

SEQ ID NO: 136747 - DNA, 120 bp, Artificial Sequence
  ENSG00000103342_47 (sequence is synthesized)
ttcactgtaacgaggtaactcatatttgctggttacataaactacaagtactgctctcacaatatgggactttgaactgtgatgtagttcaacagttgccggcatcctctcagctgatac

SEQ ID NO: 136748 - DNA, 120 bp, Artificial Sequence
  ENSG00000103342_48 (sequence is synthesized)
gctgcgaatattttgggttagacttgcagccagatgcagttttgcaacccaagaaaaaagttgaacctatgatcaaaaactgctcccaagatgaacctggaaaaaaatcagctaagctcc

SEQ ID NO: 136749 - DNA, 120 bp, Artificial Sequence
  ENSG00000103342_49 (sequence is synthesized)
cttggcgatctgcaggaacactagtaatgactggaattactccgtgatctttgatgactattacacataacagcactctagcaccttttcttactggcatggacttcctcatggactgct

SEQ ID NO: 136750 - DNA, 120 bp, Artificial Sequence
  ENSG00000103342_50 (sequence is synthesized)
acttcatggatgatagcttcattgctttgggtagggatttaaggtagtcaaggggaaaatacgcagttttattacaggtcttaacatcaggcaactttcaactttaaaaccctttgtgaa

SEQ ID NO: 136751 - DNA, 120 bp, Artificial Sequence
  ENSG00000103342_51 (sequence is synthesized)
aaatgtggttatagcactatagctctgattttaggatggttaaatgttatattcattgttggcttaccttatcaaactgtgccattaatcctttcacagacataggtaaggaagagaaca

SEQ ID NO: 136752 - DNA, 120 bp, Artificial Sequence
  ENSG00000103342_52 (sequence is synthesized)
accagtggattcaggggacaattatctatctccaaataataggcttttatttcttgcagctaactttttcagtgattctagcagatgccatctagtacatccttgatcttgtttctttcg

SEQ ID NO: 136753 - DNA, 120 bp, Artificial Sequence
  ENSG00000103342_53 (sequence is synthesized)
tgagagatctcgccatggcagcatcttgttaagtaagtgtaattgcacatgcacaaaagacttaactagctttacatttagcagtcagttggttagattaggtttcatagtaaatgaata

SEQ ID NO: 136754 - DNA, 120 bp, Artificial Sequence
  ENSG00000103342_54 (sequence is synthesized)
ggaatagaaagaataggaagtgtttttattttccagtagtaattccgtggattccatttgacccagtttactatcagttcagttcaggtagatttggttcaacttttggtggtttttggc

SEQ ID NO: 136755 - DNA, 120 bp, Artificial Sequence
  ENSG00000103342_55 (sequence is synthesized)
tctaggatattcttgactttaatatcctagaacttactgagtcttcccttcaataaatacacttctcacatacctctaatcctatgcttccttgaaacaataatgctagctgagttgttt

SEQ ID NO: 136756 - DNA, 120 bp, Artificial Sequence
  ENSG00000103342_56 (sequence is synthesized)
actaaggattattataagggcctgaaggtgtgggagtggagattaattaaaacctttatgttctccaatataagggaaaagcaggttggtactacttctgattaggcagaaaacaccagg

SEQ ID NO: 136757 - DNA, 120 bp, Artificial Sequence
  ENSG00000103342_57 (sequence is synthesized)
attccttaagtgatccttgaaatggttattgttttctgccttgtcacatttgccactgtgccctttaaaacgatgtggaaacctcaggtttgtggacagcacaggtggaatgacatcttg

SEQ ID NO: 136758 - DNA, 120 bp, Artificial Sequence
  ENSG00000103342_58 (sequence is synthesized)
tgcttcctgaggctcccctctaccaggcacattagcttagtgcttcagatgtcagcccaagtccttgttacctccttttcctgctgcccagggaagagtgtgtgtgctggagctggagcg

SEQ ID NO: 136759 - DNA, 120 bp, Artificial Sequence
  ENSG00000103342_59 (sequence is synthesized)
cttgcactcttcaggtgactattctcacctccatttcctccacatgcattaggtgaaactgaggtctaagcctcctgcaaggtctacattttaaggactcacacatcaggctctcagaaa

SEQ ID NO: 136760 - DNA, 120 bp, Artificial Sequence
  ENSG00000103342_60 (sequence is synthesized)
tgtacacaggtattagttctgtttgttctaaaggaaatgtgggtatctctcaggccaggacttagtgactagttttcgctagacagcaggttaatacctagatctcatttaaaaaaaaaa

SEQ ID NO: 136761 - DNA, 120 bp, Artificial Sequence
  ENSG00000103342_61 (sequence is synthesized)
aaaaaaaacaggattaaagggaactgatcaggtttgttgagttttttagcctaattccaaagcatggaagagtgctctaggtaggaaagaaagctttttcttacgatttgtagctaccta

SEQ ID NO: 136762 - DNA, 120 bp, Artificial Sequence
  ENSG00000103342_62 (sequence is synthesized)
ctgtgcctgacttggtgcctgtgtgaggattaagcccttagtctgctcttgcaattattcaaatgacaaattaaatttgcttttgtaataacaataaaagttgtcatcttcccttttgaa

SEQ ID NO: 136763 - DNA, 120 bp, Artificial Sequence
  ENSG00000103343_0 (sequence is synthesized)
agcccgtgctcgccggtgtcgggtcctaagtccctcggtcttgggttcccggagaggtgagtcggctgcaggtgggtgcggggcgccgggctgttcggggtaccggtgtcgcagtcgcca

SEQ ID NO: 136764 - DNA, 120 bp, Artificial Sequence
  ENSG00000103343_1 (sequence is synthesized)
gtccgagctcacaccgggcgtggagttcagctgcgcatcgggttgcggcagcttcgccaggcctggggctggctgggccgcggggccgccctggaggccggagccactgggcctgcggcg

SEQ ID NO: 136765 - DNA, 120 bp, Artificial Sequence
  ENSG00000103343_2 (sequence is synthesized)
cctcggcagcgagcagccgctttgctcgcgtgcaggaggctgttcgctacctcacacccccggctggcgctgtggcctcgcttagctctaccgtttagcacccggcgacatgcacccggt

SEQ ID NO: 136766 - DNA, 120 bp, Artificial Sequence
  ENSG00000103343_3 (sequence is synthesized)
cggtttccgccaggatgcgggagagttggggcaagctacctgcgacagcttgaacttttcctagggattccgctccacccgccggttagagcgtattgctcattaaatccgagacctgtg

SEQ ID NO: 136767 - DNA, 120 bp, Artificial Sequence
  ENSG00000103343_4 (sequence is synthesized)
tgcttgctactgaaataaaagaagtattttttccccagagtccttttaggacgttatgacttttctcctttgcaagactgcaaaaaactgacaagaagacaaaactcttcccactcccag

SEQ ID NO: 136768 - DNA, 120 bp, Artificial Sequence
  ENSG00000103343_5 (sequence is synthesized)
ggaccgcgttgtcttgagtttggctagtaaaggctagcaagtgaggctttgtctctgcatcccgttccccctaacatcctcagagaaccttcgtttctagaatctttctagtattcagag

SEQ ID NO: 136769 - DNA, 120 bp, Artificial Sequence
  ENSG00000103343_6 (sequence is synthesized)
acttctccagggtcatgatcccaaaggcttaacccgtttacaaggagagagttgtctcctgacgcccaaaatggcagctaaaatggagataactttaagctccaacactgaagcttcctc

SEQ ID NO: 136770 - DNA, 120 bp, Artificial Sequence
  ENSG00000103343_7 (sequence is synthesized)
caagcaagagagacacataatagccaaactagaagagaaacggggccctcctctgcaaaaaaactgcccagatcctgagctctgccgccagagcttcagacgcttttgttatcaagaggt

SEQ ID NO: 136771 - DNA, 120 bp, Artificial Sequence
  ENSG00000103343_8 (sequence is synthesized)
gtctggaccccaagaggctctctcccagctccgacagctctgccgtcagtggttgcaacccgagctgcacaccaaggagcagattttggagcttctggtgatggagcagttcctgaccat

SEQ ID NO: 136772 - DNA, 120 bp, Artificial Sequence
  ENSG00000103343_9 (sequence is synthesized)
cctgcccccggagatccaggctcgggtcaggcatcgatgtccaatgagcagcaaggagattgtgaccctcgtggaagattttcacagagcatccaagaaaccaaagcagtgggtggccgt

SEQ ID NO: 136773 - DNA, 120 bp, Artificial Sequence
  ENSG00000103343_10 (sequence is synthesized)
aactgccagactttcaaccgcagactcctaggagagatctcagggagagctctccagcagagccttcccaggcaggagcttatgaccggctgagcccccatcattgggagaaatccccac

SEQ ID NO: 136774 - DNA, 120 bp, Artificial Sequence
  ENSG00000103343_11 (sequence is synthesized)
tcctccaagaaccaacccccaaattggctgggacagaggcccccagaatgagaagtgacaacaaggaaaatccacaacaggaaggggctaaaggagcaaagccatgtgcagtgtcagctg

SEQ ID NO: 136775 - DNA, 120 bp, Artificial Sequence
  ENSG00000103343_12 (sequence is synthesized)
gcagatccaaagggaatggtctgcagaatcctgaaccaagaggggcaaatatgagtgaacctcggttgtcacggaggcaggtcagctccccaaatgctcaaaagccatttgctcactacc

SEQ ID NO: 136776 - DNA, 120 bp, Artificial Sequence
  ENSG00000103343_13 (sequence is synthesized)
agagacattgcagggtggaatacatcagcagccccctaaaaagccacccactgagagagctaaagaaaagcaaaggaggtaaacggagtctgagcaaccgtttgcaacatcttggtcacc

SEQ ID NO: 136777 - DNA, 120 bp, Artificial Sequence
  ENSG00000103343_14 (sequence is synthesized)
agcccacccgctcagcaaagaaaccctacaaatgtgatgactgtgggaaaagcttcacgtggaattcagagctgaagagacacaagagagtccacacaggagagagaccctacacgtgcg

SEQ ID NO: 136778 - DNA, 120 bp, Artificial Sequence
  ENSG00000103343_15 (sequence is synthesized)
gagagtgtggaaactgctttgggcggcagtcaaccctgaagctgcaccagaggatccacactggagagaagccataccagtgtggccagtgtgggaaaagctttcgccagagctcaaacc

SEQ ID NO: 136779 - DNA, 120 bp, Artificial Sequence
  ENSG00000103343_16 (sequence is synthesized)
ttcaccagcatcaccgacttcaccatggggactaaaaggagcactccatgctttagattcacacggaaggtgtttgtgtttctcctcccccttacttgcatgtaaatcacaaaaactgtg

SEQ ID NO: 136780 - DNA, 120 bp, Artificial Sequence
  ENSG00000103343_17 (sequence is synthesized)
tgacttacaaggaaagcacgaggcccttgaggaatgatgatgcacattctgctgtgaggaggcccagaaaaggccaaccagggcccaaccgtgcatgatgacagggtgaagagaaggcag

SEQ ID NO: 136781 - DNA, 120 bp, Artificial Sequence
  ENSG00000103343_18 (sequence is synthesized)
gtctgggcactggggcaaagagaacttaagtctctgcagagagcaaggagtaactactgagagagaatcaggacaatcctgcaggtggcccgcttactgttaaatcgtccctctgttgct

SEQ ID NO: 136782 - DNA, 120 bp, Artificial Sequence
  ENSG00000103343_19 (sequence is synthesized)
ttatcctctaaaatatgttaagggataaattctatatatatagttatgcatttgctgtcataccagacaattttttatcatgagcacacttctttaataaagatgagtgatctaccagaa

SEQ ID NO: 136783 - DNA, 120 bp, Artificial Sequence
  ENSG00000103343_20 (sequence is synthesized)
attggctgggacaggtaaacactctgccttttctctccctctcatcagccctttatctccatcaatgtatctcatggttctgcaaaggcatagaccacatgtgtgtgtttttttaaatgt

SEQ ID NO: 136784 - DNA, 120 bp, Artificial Sequence
  ENSG00000103343_21 (sequence is synthesized)
tatatataatagtagatgattattcactaaacaaatttcactaattaggatggtggtgatactacaagtaagtatgtttttatcgttttctgttaatgaaaatttaagaatccagtgcat

SEQ ID NO: 136785 - DNA, 120 bp, Artificial Sequence
  ENSG00000103343_22 (sequence is synthesized)
gacagggttgtacctacttttctgtccgtttcagaacttcttatagaaaagacagatccaaatatggccacagatgaacttccatgcaagctatggctgagtttcattgcttaaaatgct

SEQ ID NO: 136786 - DNA, 120 bp, Artificial Sequence
  ENSG00000103343_23 (sequence is synthesized)
gcaagctatggctgagtttcattgcttaaaatgctcctctgtttagaggggcctggtagaaataaaaacccaccctatatcttatatctttgtcctcctctgtgatgttgcttgtacttt

SEQ ID NO: 136787 - DNA, 120 bp, Artificial Sequence
  ENSG00000103351_0 (sequence is synthesized)
gctgggcctgtgatcgctgaggggcgagcagttgcgaccctgggctcctggggacctgagcgttatgtctttccgcgacctccgcaatttcacagagatgatgagagccctgggataccc

SEQ ID NO: 136788 - DNA, 120 bp, Artificial Sequence
  ENSG00000103351_1 (sequence is synthesized)
tcgacatatttctatggaaaatttccgtacacccaattttggacttgtatctgaagtgcttctctggcttgtgaaaagatatgagccccagactgacatcccgcctgacgtggatactga

SEQ ID NO: 136789 - DNA, 120 bp, Artificial Sequence
  ENSG00000103351_2 (sequence is synthesized)
acaggaccgagttttcttcattaaggcaattgcccagttcatggccaccaaggcacatataaaactcaacactaagaagctttatcaagcagatgggtatgcggtaaaagagctgctgaa

SEQ ID NO: 136790 - DNA, 120 bp, Artificial Sequence
  ENSG00000103351_3 (sequence is synthesized)
gatcacatctgtcctttataatgctatgaagaccaaggggatggagggctctgaaatagtagaggaagatgtcaacaagttcaagtttgatcttggctcaaagattgcagatttgaaggc

SEQ ID NO: 136791 - DNA, 120 bp, Artificial Sequence
  ENSG00000103351_4 (sequence is synthesized)
agccaggcagcttgcgtctgaaatcacctccaaaggagcatctctgtatgacttgctcggcatggaagtagagttgagggaaatgagaacagaagccattgccagacctctggaaataaa

SEQ ID NO: 136792 - DNA, 120 bp, Artificial Sequence
  ENSG00000103351_5 (sequence is synthesized)
cgagactgaaaaagtgatgagaattgcaataaaagagattttgacacaggttcagaagactaaagacctgctcaataatgtggcctctgatgaagctaatttagaagccaaaatcgaaaa

SEQ ID NO: 136793 - DNA, 120 bp, Artificial Sequence
  ENSG00000103351_6 (sequence is synthesized)
gagaaaattagaactggaaagaaatcggaagcgactagagactctgcagagtgtcaggccatgttttatggatgagtatgagaagactgaggaagaattacaaaagcagtatgacactta

SEQ ID NO: 136794 - DNA, 120 bp, Artificial Sequence
  ENSG00000103351_7 (sequence is synthesized)
tctggagaaatttcaaaatctgacttatctggaacaacagcttgaagaccatcataggatggagcaagaaaggtttgaggaagctaaaaacactctctgcctgatacagaacaagctcaa

SEQ ID NO: 136795 - DNA, 120 bp, Artificial Sequence
  ENSG00000103351_8 (sequence is synthesized)
ggaggaagagaagcgcctgctcaagagtggaagtaacgatgactcggacatagacatccaggaggacgatgaatccgacagtgagttggaagaaaggcggctgcccaagccacagacagc

SEQ ID NO: 136796 - DNA, 120 bp, Artificial Sequence
  ENSG00000103351_9 (sequence is synthesized)
catggagatgctcatgcaaggaagacctggcaaacgcattgtgggcacgatgcaaggtggagactccgatgacaatgaggactcggaggagagtgaaattgacatggaagatgatgatga

SEQ ID NO: 136797 - DNA, 120 bp, Artificial Sequence
  ENSG00000103351_10 (sequence is synthesized)
cgaggatgacgatttggaagacgagagcatttctctctcaccaaccaagcccaatcgaagggtccggaaatctgaacccctggatgagagtgacaatgacttctgacccttttgccaagg

SEQ ID NO: 136798 - DNA, 120 bp, Artificial Sequence
  ENSG00000103351_11 (sequence is synthesized)
gaccctggcagattaaaaccctcagacttgtaggtaaatgggaacttagaaggttaggaaggtaacccctgttttgtttactaagctggctggactcatgatcactgaagcaatacttat

SEQ ID NO: 136799 - DNA, 120 bp, Artificial Sequence
  ENSG00000103351_12 (sequence is synthesized)
ttctgctttagcctcctatgtttgcattccatgaagcttaaataagaattgaagcaaatccctaagatttatttttttccaccttatttatcttctaaaacttgaggaatgcatgtgttc

SEQ ID NO: 136800 - DNA, 120 bp, Artificial Sequence
  ENSG00000103351_13 (sequence is synthesized)
ttagtgattcacatccacgggacaaaaactcaagaagaaataagagctgacgccacacaagtcttggctgcttttgttactatacattttctctgagactccagcagagttggggctgga

SEQ ID NO: 136801 - DNA, 120 bp, Artificial Sequence
  ENSG00000103351_14 (sequence is synthesized)
acttggcactggggactcatgtttggaatcgtaggggaacatctggctgttaatcacttgcacagttgagaacatttcctatacatcggcttttaattctagctcttatttcattttgta

SEQ ID NO: 136802 - DNA, 120 bp, Artificial Sequence
  ENSG00000103351_15 (sequence is synthesized)
atcttattttctttcgtctgcatgttcacaataccaagcattaaatgtattttaataactaaacttttctgaaagaaggttagctaaagttaaatgaaaacttggtttctttgaaaatca

SEQ ID NO: 136803 - DNA, 120 bp, Artificial Sequence
  ENSG00000103351_16 (sequence is synthesized)
ggcaatagagacaggctccagatgaggaatcctccattttctgtccgaagctgacattcctctggcagtccagttcaccttggattacagccaccttcatgtttccacggttggtactaa

SEQ ID NO: 136804 - DNA, 120 bp, Artificial Sequence
  ENSG00000103351_17 (sequence is synthesized)
tggaaactctggtgacctgggctgccctctcagaaactccagactcccatggcaatgacagccgggacacttttcttccctccagccagggtttctctaaaggagctttgttttgtctaa

SEQ ID NO: 136805 - DNA, 120 bp, Artificial Sequence
  ENSG00000103351_18 (sequence is synthesized)
agtgtggcaagacatagtgcacaacacagggacaaaggcaggtttcctgcagctcgctacctaagtgtttctgtaggggaaggagccaattaagaaaaagtgttggtacagattcatgtt

SEQ ID NO: 136806 - DNA, 120 bp, Artificial Sequence
  ENSG00000103351_19 (sequence is synthesized)
tctgatttaaaaaaacaacaacacaggattgaattaagtagagtaatagcactagaagaatttttctgttgtgaaattagaagtggagttggtttttttcttttttcttcttcttttttt

SEQ ID NO: 136807 - DNA, 72 bp, Artificial Sequence
  ENSG00000103351_20 (sequence is synthesized)
tttcttttttcttcttctttttttttaatatgaaaagtacttagctgggagtggtggcaagcgcccttgggt

SEQ ID NO: 136808 - DNA, 120 bp, Artificial Sequence
  ENSG00000103351_21 (sequence is synthesized)
ccaggagttttagactagcctggacaactaagtgagactccatctctacaaaaaattaaaaaattagccaggtgtggaggggcatgcctgtggtctcagctattcaggaggctgaggcag

SEQ ID NO: 136809 - DNA, 71 bp, Artificial Sequence
  ENSG00000103351_22 (sequence is synthesized)
gaaaaagaaaagcacgctgcttgtaaaaagcgtacagtaggtcaggcgtggtggctcatgcctgtaatcct

SEQ ID NO: 136810 - DNA, 120 bp, Artificial Sequence
  ENSG00000103351_23 (sequence is synthesized)
aaaaaaaaaaaaaaaaaaaagcatacagtaaataaaaaagcacaaaacagttttcacttattttacaattaaaaagtcagaagacttctgaagttacttatcttttaatacatgtattta

SEQ ID NO: 136811 - DNA, 120 bp, Artificial Sequence
  ENSG00000103351_24 (sequence is synthesized)
tcttttaatacatgtatttaacaccatacttcatattattaaataggttttacttaaaaatataattattgtatttgtacctgtcagatataaatacttattcaggagttcacaggtacg

SEQ ID NO: 136812 - DNA, 120 bp, Artificial Sequence
  ENSG00000103351_25 (sequence is synthesized)
ttcacaggtacgaaaagatacacataaattttaggaacttttgagttatttctgtcatttttgcttttttctctttcttttcctaaattttatgtataagattacccctaaaaaaaaaaa

SEQ ID NO: 136813 - DNA, 120 bp, Artificial Sequence
  ENSG00000103351_26 (sequence is synthesized)
aacagccagtattcagtgaattcaccagtaatttgaaatgcaccatattgtaaatgatccactgacagggaagccagcgtgttggagccatgccagccacctcagacaccgtggctctaa

SEQ ID NO: 136814 - DNA, 120 bp, Artificial Sequence
  ENSG00000103351_27 (sequence is synthesized)
gatgcggaagagtcactgcatcttcttgaatgttacagatttggtttgcctgaatgtgacttgacttctgttttgaaaaaacatacgaatagagttctattttccttatgtgatgctttc

SEQ ID NO: 136815 - DNA, 120 bp, Artificial Sequence
  ENSG00000103351_28 (sequence is synthesized)
ttctaacacactttaacacagaagcctaacctagctacaaagagcctatccacagacataggcaacagctccaaagggtatttcattgtgtcacctgcttctagatcatctgttagttaa

SEQ ID NO: 136816 - DNA, 120 bp, Artificial Sequence
  ENSG00000103351_29 (sequence is synthesized)
ctgactttgtgcaaggtctcaccatgtatagcactgccttgcttgagcacggaagtttctgtcaacagcaagctttatgtgctctatcatttttattaaagtatttcagtcaatagtgac

SEQ ID NO: 136817 - DNA, 120 bp, Artificial Sequence
  ENSG00000103351_30 (sequence is synthesized)
ccattgtagaatggatgcaggattcacatgtgcaagtgctttgtgacctggcaccatttggttttggccaagcagcagagcagacctcaggacctaacgaggatggttgtgattaggtca

SEQ ID NO: 136818 - DNA, 120 bp, Artificial Sequence
  ENSG00000103351_31 (sequence is synthesized)
aatagaaaactagcaggccattgctgacaatttttactatataattagaggacttcctaaaatgctttaaaaaaaaatgtgtatggatggaaaatacaaaggaatttttcaaatactcaa

SEQ ID NO: 136819 - DNA, 120 bp, Artificial Sequence
  ENSG00000103351_32 (sequence is synthesized)
ataagaaatgaacaaatgacttttgcacacagaccttactgggcagagctgtttcgttgtgatcatgaagccactcctttgttttgcctgcttgtgttcctgctaggtaacgatgactcg

SEQ ID NO: 136820 - DNA, 120 bp, Artificial Sequence
  ENSG00000103351_33 (sequence is synthesized)
tgcactctgggtttggctgtccccatagatgggagtggctgagttgctgtcagcagccagggagccgtctatggtcagcccggccgtgcctcgatgcgtggcagggtttggcctcatgag

SEQ ID NO: 136821 - DNA, 120 bp, Artificial Sequence
  ENSG00000103351_34 (sequence is synthesized)
gctctggactcttcgttgctcgtggatggctcatctcttttcaagtgaatgtgcttgctctgctttttttgccttctcactgttctttccattctcgctttccaaagatggaagcagcac

SEQ ID NO: 136822 - DNA, 120 bp, Artificial Sequence
  ENSG00000103351_35 (sequence is synthesized)
gttgccatagagatcgtcgagcgctgggcctgtgatcgctgaggggcgagcagttgcgaccctgggctcctggggacctgagcgttatgtctttccgcgacctccgcaatatgagcccca

SEQ ID NO: 136823 - DNA, 120 bp, Artificial Sequence
  ENSG00000103351_36 (sequence is synthesized)
gtttttgcatcagagatccacatggcaataaacttcggagaatcagtctataaggcacatctagatctaggaatactggttttgagaactccttttctgaaaatatacgtaaatgatttt

SEQ ID NO: 136824 - DNA, 120 bp, Artificial Sequence
  ENSG00000103351_37 (sequence is synthesized)
cagctccaagaagcaggttggttttctgttctgcctcatgtgtttgtgggtgtctgtcagccctcccggggccagccaggggcctctccctaggagtgatgcttcctctctcctgggcaa

SEQ ID NO: 136825 - DNA, 120 bp, Artificial Sequence
  ENSG00000103351_38 (sequence is synthesized)
aaaggccactcaaaagagatcctgtggtgacagcgggatcactgaaggcccctgtgctaaagtggaggcgcaggcacggagcctggaggcggggaaagctcaggccgggccatcctcagg

SEQ ID NO: 136826 - DNA, 120 bp, Artificial Sequence
  ENSG00000103351_39 (sequence is synthesized)
ccctgggccgccacctagaaatgaaggaggacgccgagggccgggctcaggaccaacccccctccctgttctgtgctggggacggaatggtgaagcagcactgtccccagaccaggccct

SEQ ID NO: 136827 - DNA, 120 bp, Artificial Sequence
  ENSG00000103351_40 (sequence is synthesized)
cgaggtgccaggcatgaggctgagacataagctgccttgagctttactgagtggataactccctggagcacttaagcaaaaggggattctaggggtcctcagtgaggtccagtcatcagg

SEQ ID NO: 136828 - DNA, 120 bp, Artificial Sequence
  ENSG00000103351_41 (sequence is synthesized)
gctctgccgcccattgctcaagcctacgttctttgttgcgtccctggcagtgctgctcggcccacacagcaaagggcgactcaacagagactgaccccaggctgcctccatgtgccctga

SEQ ID NO: 136829 - DNA, 120 bp, Artificial Sequence
  ENSG00000103351_42 (sequence is synthesized)
atttacagggcacagtctgtagagaagcagagagagcaactggaaaataattttcctaacaagctcgggtgtggatggtatacagcgtctctccgtcttgcccacccaagacagaagcag

SEQ ID NO: 136830 - DNA, 120 bp, Artificial Sequence
  ENSG00000103351_43 (sequence is synthesized)
agggagtgtggcgtgggtgctggcaatgctgaggcagcaccgcctgcctcttctccagggtttgccttctctctcctcagagcgaatgcattagtcgcagctgagctttatgcctggtgg

SEQ ID NO: 136831 - DNA, 120 bp, Artificial Sequence
  ENSG00000103351_44 (sequence is synthesized)
tcacttgtttatttcaaggaggctgtgtccatgccgccctccaggcacagggttccatgctttacgtgttcaggcatccaacacgtgtctgttgagtgcctgccacatgccagtgctgtc

SEQ ID NO: 136832 - DNA, 120 bp, Artificial Sequence
  ENSG00000103351_45 (sequence is synthesized)
gtggattatggggaacgcagcaggggcagaggcaagcccctgcttcatggctcacaccccagcaataatgatggattgtcggatcagggctcatggtgttaacaggaggaataacagctt

SEQ ID NO: 136833 - DNA, 120 bp, Artificial Sequence
  ENSG00000103351_46 (sequence is synthesized)
agggcctgagtggagggagcgagcgcatgggttggcggcacctgggcatgtggaatgcactcctcgcatcgaggagcagaggcagctggtgtgattgtgggtgagtgcgagaggcagcag

SEQ ID NO: 136834 - DNA, 120 bp, Artificial Sequence
  ENSG00000103351_47 (sequence is synthesized)
gggccatgcagagctttgcagggtgagatgaagactctgttttctctgagtgtgaggggaaggccctgaagaatcatgagcccagaagggtcaagagctgatgatccctgtttgagagaa

SEQ ID NO: 136835 - DNA, 120 bp, Artificial Sequence
  ENSG00000103351_48 (sequence is synthesized)
gccagttaggaggcgcctgcacccgtggaggtcagaggtgacggtgcttggccgaaggtgtggcagcagaggtgttgagaaatggtcaggtcctgggtctctctaagaaccatcaggttt

SEQ ID NO: 136836 - DNA, 120 bp, Artificial Sequence
  ENSG00000103351_49 (sequence is synthesized)
tgtgaattgattggacataggctgttagagaaagagaaaaatgagggtgcctgggcttggtctaatcagcagaaagcagagtttcattttctgagatggggccgacttgacaaaggggct

SEQ ID NO: 136837 - DNA, 120 bp, Artificial Sequence
  ENSG00000103351_50 (sequence is synthesized)
tggaaggcagatcgaaagtttgattttggacattctgaatgtgacagccacatgctagggttgagtagccaggtggaatttaagtctggagttcaagggccacgtctgggctagagattg

SEQ ID NO: 136838 - DNA, 120 bp, Artificial Sequence
  ENSG00000103351_51 (sequence is synthesized)
aattttgggagccacccttatttggttggtatctaagccacaaggatagatgtgactgcctagggagagcaagtagaatgagaagagaggcgacccaaggtcctgagctgcatctgccct

SEQ ID NO: 136839 - DNA, 120 bp, Artificial Sequence
  ENSG00000103351_52 (sequence is synthesized)
gcagaggtccgggaggaaggggcaggcagaggaggctgaggggcgtcagcagtgaggaagggggacctggactagagaaggggccctgggggatggagaagatgggttttaaggatgaag

SEQ ID NO: 136840 - DNA, 120 bp, Artificial Sequence
  ENSG00000103351_53 (sequence is synthesized)
gggtgattccacagctcaagcaggatgaggcctgagaatcgatcccagtccgttgaatgtttccttcttgacaggagcagtgctggggtcagtaggtgagagcccgggggaactgaagca

SEQ ID NO: 136841 - DNA, 120 bp, Artificial Sequence
  ENSG00000103351_54 (sequence is synthesized)
gtcgtgaggggcacaggtgtggacagtgagttcaacgactcgctcaggagctttgtgtgaggggagagagacagggcagagcagctggagaggaaggtgggattacctttggggtttttt

SEQ ID NO: 136842 - DNA, 120 bp, Artificial Sequence
  ENSG00000103351_55 (sequence is synthesized)
ttcaagaaggaaattacagcatgagtgtgcaccgacaggaatgatctagatagaacgaccagccatcctggtttacatgggacgcaggaactgccgttttaaagctgggctgagttggtc

SEQ ID NO: 136843 - DNA, 120 bp, Artificial Sequence
  ENSG00000103351_56 (sequence is synthesized)
gacgcaggaactgccgttttaaagctgggctgagttggtcaccctggagccctggatccgatgaggagagagagggtgtgtctttcactttgctccctttttttcttttttttctttttt

SEQ ID NO: 136844 - DNA, 120 bp, Artificial Sequence
  ENSG00000103351_57 (sequence is synthesized)
gttcaagcgattcttctgcctcagtctccggagtagctgggattcactttgctccttataccaatgtctatgttgctttccatccacaatctacaaaaagccaaaacaggcctcccttcc

SEQ ID NO: 136845 - DNA, 120 bp, Artificial Sequence
  ENSG00000103351_58 (sequence is synthesized)
acaaaaagccaaaacaggcctcccttccctctctccaagcccctgtccttcttgccatctgtagggggagtctctaggtccagtggccctcagcgcagatgcagagtgcttcttagacgc

SEQ ID NO: 136846 - DNA, 120 bp, Artificial Sequence
  ENSG00000103351_59 (sequence is synthesized)
tgcgggaaagccagcccctgcagcaccacacccagatgcacctgcagtttggaggattctggttggatgataaattccagctggcagtacatagcctcagtcccatctgtatgccctccc

SEQ ID NO: 136847 - DNA, 120 bp, Artificial Sequence
  ENSG00000103351_60 (sequence is synthesized)
acagcctgcttgccactctgccagcctcttccttcacacagggatgctgctatagaaagggaggcagagagtcttaggacaagatgtcaggaatgaggcaggatcccccgttgcatctgc

SEQ ID NO: 136848 - DNA, 120 bp, Artificial Sequence
  ENSG00000103353_0 (sequence is synthesized)
gttgtacacaatcatcatggcggcggccggggccccggatggcatggaggaacctggcatggacacggaggccgagactgtggctactgaggctcccgcgcggcccgtcaactgcctgga

SEQ ID NO: 136849 - DNA, 80 bp, Artificial Sequence
  ENSG00000103353_1 (sequence is synthesized)
cacgaggcagcctgcagccggccccggcccagccccctggggaccccgcagcccaggcctcggtcagcaacggcgaagac

SEQ ID NO: 136850 - DNA, 120 bp, Artificial Sequence
  ENSG00000103353_2 (sequence is synthesized)
agacgcgggcggcggcgcgggcagggagctggtggacttgaagatcatctggaataagaccaagcatgacgtgaagttccccctggacagcacaggctccgagctgaaacagaagatcca

SEQ ID NO: 136851 - DNA, 120 bp, Artificial Sequence
  ENSG00000103353_3 (sequence is synthesized)
ctcgattacaggtctcccgcctgccatgcagaaagtcatgtataagggactcgtccccgaggataaaacattgagagaaataaaagtgaccagtggggccaagatcatggtggttggctc

SEQ ID NO: 136852 - DNA, 120 bp, Artificial Sequence
  ENSG00000103353_4 (sequence is synthesized)
caccatcaatgatgttttagcagtaaacacacccaaagatgctgcgcagcaggatgcaaaggccgaagagaacaagaaggagcctctctgcaggcagaaacaacacaggaaagtgttgga

SEQ ID NO: 136853 - DNA, 120 bp, Artificial Sequence
  ENSG00000103353_5 (sequence is synthesized)
taaaggaaaacctgaagatgtgatgccatctgttaagggggcccaggagcgcctgccaacggtaccgctgtccggcatgtacaataaatctggaggaaaagtgagactcacctttaaact

SEQ ID NO: 136854 - DNA, 120 bp, Artificial Sequence
  ENSG00000103353_6 (sequence is synthesized)
agaacaagaccagctgtggattggcactaaagagcggactgagaaattgcccatgggctccataaaaaatgtggtcagtgaacctatcgaaggacatgaagactaccacatgatggcgtt

SEQ ID NO: 136855 - DNA, 120 bp, Artificial Sequence
  ENSG00000103353_7 (sequence is synthesized)
tcagttgggccccacggaagcctcttactactgggtgtactgggttccaactcaatatgtggatgcaatcaaagacactgtgctggggaaatggcagtatttttgaaagcactttcacct

SEQ ID NO: 136856 - DNA, 120 bp, Artificial Sequence
  ENSG00000103353_8 (sequence is synthesized)
ctggcccaggagactgacccaaagtgaaggacattgccgggagaggcctgcagcatccctggatttcagagttctggaactttgttcataaaaaatctatattcaatctgaggtgatgtg

SEQ ID NO: 136857 - DNA, 120 bp, Artificial Sequence
  ENSG00000103353_9 (sequence is synthesized)
gtgactgaagccagaggtgatgtactttcaccattagcttaattttaacttaaaattaccagttccctttcttgcagtcagcttcataccatttttaaagtcaatacgatggaaatcaat

SEQ ID NO: 136858 - DNA, 120 bp, Artificial Sequence
  ENSG00000103353_10 (sequence is synthesized)
aaatctgaattccgaacatgttgtgtggaatactcttaagtgtgtttgagagtagatctgccaattatgttgacaagggaatgatcaaaagctttgttttttttaaaaaaaaaaaaagca

SEQ ID NO: 136859 - DNA, 120 bp, Artificial Sequence
  ENSG00000103353_11 (sequence is synthesized)
gtttcaattgaaatattttcatacatctttggttgcaaacatttggactgcattgcaatgagttggggtgttttttttttccttttttgtataaaattgtatgcaaaatgggggtgggtt

SEQ ID NO: 136860 - DNA, 120 bp, Artificial Sequence
  ENSG00000103353_12 (sequence is synthesized)
agtaagccacatatttctgtccattgattcagatttaattctttccctttttcattctctcgcttcctcaatttgagtttttgttttaagaacccaaagatgtcagttcttcttttggta

SEQ ID NO: 136861 - DNA, 120 bp, Artificial Sequence
  ENSG00000103353_13 (sequence is synthesized)
cctcatcaacgcttcctttcctgggctccctcccgccgtgctgctgctgcctgtgaacgcacggtgggagaggaagagctgctcagtcttgggcaaggagctctcacacttgctgtggtg

SEQ ID NO: 136862 - DNA, 120 bp, Artificial Sequence
  ENSG00000103353_14 (sequence is synthesized)
ttcgttgagcagcagagtatctcccagtgactcctgtttaaatgtcttgccctttgggcccccatctccaaggagttccattgctggttggatgattgtctgcacccctcactgagcttg

SEQ ID NO: 136863 - DNA, 120 bp, Artificial Sequence
  ENSG00000103353_15 (sequence is synthesized)
gcctagaggcccagcctggcatggttgtgcctgggctgtgccgctcaacagccccagctcccaagcagacaaagacctcttccaggaggagccaggtagaagatagttatacagccatat

SEQ ID NO: 136864 - DNA, 120 bp, Artificial Sequence
  ENSG00000103353_16 (sequence is synthesized)
agctgcagatccagataaccttctttctttggaagttttcaagaaattcttaagcagtccaaggatgatttcaattatgcttctccattgggtccttctgctcatgcattcagttcaagt

SEQ ID NO: 136865 - DNA, 120 bp, Artificial Sequence
  ENSG00000103353_17 (sequence is synthesized)
gtcctttatcccaggttcagagatgctgcctttctgaagaagacatctgaccctagcaggttggccagtgttattgaacaacaaaaatgggataaattgctttcatgattagctcacctt

SEQ ID NO: 136866 - DNA, 120 bp, Artificial Sequence
  ENSG00000103353_18 (sequence is synthesized)
cttctggttttagcccttctgttctctgtacacgtgaacttctgtcatctccttctggcttggttgcctctgaaaggagggaaagtctcttggtaaattatctcttttgtgctgtttgct

SEQ ID NO: 136867 - DNA, 120 bp, Artificial Sequence
  ENSG00000103353_19 (sequence is synthesized)
cgagaaatgttccaaacatcacattttggattctaggctgtcacccctcattctgtgaaacgtattagcatgtgttcgcccaagatgactattccttgtgagccagttaatgatgatatt

SEQ ID NO: 136868 - DNA, 120 bp, Artificial Sequence
  ENSG00000103353_20 (sequence is synthesized)
ctacgcccttcccttctaagctgtagttcaggaatccagcccacatagacagactcttgctttccatggtgtagtcaatgccaagtgatgcatctaggcaggaaaatctactctttgctt

SEQ ID NO: 136869 - DNA, 120 bp, Artificial Sequence
  ENSG00000103353_21 (sequence is synthesized)
ttttgggggcaattagtacatttgtgaagtgcagcatccaagaaacagcctgttttttcatcccttgagaaaggagcagtcattgcagcttttctgtccttgtcggcctgcagttcctgg

SEQ ID NO: 136870 - DNA, 120 bp, Artificial Sequence
  ENSG00000103353_22 (sequence is synthesized)
ggaaaagagtacatctgagctacttgtccaagcctctgtctgcaggtgacaggttttgggggaaatgagatgcattaagtagaacatcatctcgggtcagacattgccccttttgtttgc

SEQ ID NO: 136871 - DNA, 120 bp, Artificial Sequence
  ENSG00000103353_23 (sequence is synthesized)
caatgccccagtcctagagacttgtcctgacagtgccgcacacctacttttgatctctcagagcaggtggctccatccccagactagcctggctgctctccgaggcccctccacctgctc

SEQ ID NO: 136872 - DNA, 120 bp, Artificial Sequence
  ENSG00000103353_24 (sequence is synthesized)
cccttattgccccattcttgtggcttgccgggccacttggcctcccttcttgccggtgacagcgttccatcatctccccgctccccaagggccaactgcttctcactcaggctggtgtca

SEQ ID NO: 136873 - DNA, 120 bp, Artificial Sequence
  ENSG00000103353_25 (sequence is synthesized)
tttcaggaggaccaaagcctgcgtgagcctttttattttcagtaaaatggtgcttttttccttacttcgagatactatatataaataataatgtaaatgacaccttttcgtacggagctg

SEQ ID NO: 136874 - DNA, 120 bp, Artificial Sequence
  ENSG00000103353_26 (sequence is synthesized)
tttgagtattgctttacagagctcactaaatcagcttcaacaatcttgagctctgtggctcctcaccctgtctgcatggaagaccttgctggacgctctcgggagagcagacatagcacc

SEQ ID NO: 136875 - DNA, 120 bp, Artificial Sequence
  ENSG00000103353_27 (sequence is synthesized)
agaagccactgggagaagtgttttcgatccgtgtctgggccacagtagtattcactgtttagtctttgagttccgtaagcagtctcttcatacatttcttacagtctggagtgtactgac

SEQ ID NO: 136876 - DNA, 120 bp, Artificial Sequence
  ENSG00000103353_28 (sequence is synthesized)
taaatctgtgtaagcaaattgaaatactctttcttttaggtagcgtcacagtggttttttttttcctcaggataatttctatacaatttccttactgtcagagggaccagatctttccct

SEQ ID NO: 136877 - DNA, 120 bp, Artificial Sequence
  ENSG00000103353_29 (sequence is synthesized)
cactgtggcaggggccgtgcaggtggataaaggaagagctggtttccggagagtgactgtaacagcgttgactcgaagctagagatggagggggtggccgtctcttagacattggacacc

SEQ ID NO: 136878 - DNA, 120 bp, Artificial Sequence
  ENSG00000103353_30 (sequence is synthesized)
tctcagagcctcctgagggcttctttgtcttctagaatctctaccggtggtcctcctgcaggttctggctcacagacatcatcatgcctttttttccctccctgaggcgccttggcagaa

SEQ ID NO: 136879 - DNA, 120 bp, Artificial Sequence
  ENSG00000103353_31 (sequence is synthesized)
gagcgtgaccctgtgagccaggccccccttagctctgcttcagatcacagaacacagacagactcgcgagttgctggacctctttggtattaagtgtttgaatccatggtgggccttttg

SEQ ID NO: 136880 - DNA, 120 bp, Artificial Sequence
  ENSG00000103353_32 (sequence is synthesized)
caagtagcgttagctctttttaaatgttgaactgagctaaggatgcactttcttgtggacatagaaggggcccacgtaaggccctgagtaggctccttagttgctgctttacctgatgag

SEQ ID NO: 136881 - DNA, 120 bp, Artificial Sequence
  ENSG00000103353_33 (sequence is synthesized)
ggccaaagagattaactctgcctcgttgccatgtctcagaaaagttgccatatttcacccagaaggggcttgttttcctcttactcttactttaaccatgtgcctggaggagccattctg

SEQ ID NO: 136882 - DNA, 120 bp, Artificial Sequence
  ENSG00000103353_34 (sequence is synthesized)
ggctcttgcacttgcccagcctttctttgccaggggcagagaagggaaagggggtagattgagtgtgccaagggccgtgcaagggcaggcttgctttccacccatctgctgagggagccc

SEQ ID NO: 136883 - DNA, 120 bp, Artificial Sequence
  ENSG00000103353_35 (sequence is synthesized)
tctcctctcgctccttgcctctgttcacacctgttgtcttggaagaggatggtccctttgtcttaaggctttgtgataaagtcatctccagttaggatctgcacctgtttccttcgtaat

SEQ ID NO: 136884 - DNA, 120 bp, Artificial Sequence
  ENSG00000103353_36 (sequence is synthesized)
agtgcctggcggcctttctgaagttacaggtggttgggagccctctcgcatgcagaacatctggtagattgatctgccaggctgggtggttctactgctttctcaatttctaagaacctt

SEQ ID NO: 136885 - DNA, 120 bp, Artificial Sequence
  ENSG00000103353_37 (sequence is synthesized)
ttttttttcttaaagagttctgctgaattatttgacaatatttgtaagtaccatgtttccttgtggtgtatgctctgttctggtttctgttttcaaatcaaatgcctgtttgggaggaga

SEQ ID NO: 136886 - DNA, 120 bp, Artificial Sequence
  ENSG00000103353_38 (sequence is synthesized)
tgaacgtatttagtctattagatttgcactgctggattttttttttaaagtgtaaccttgaatagctgtcttattgtttatcctgtaagattagtcaatcgattaaagtttgataattaa

SEQ ID NO: 136887 - DNA, 120 bp, Artificial Sequence
  ENSG00000103353_39 (sequence is synthesized)
cgccgggccggggctgaggttgcggtcgctcctctgggggatgcggcccggcccgggagggagaaccgcggctcgggaacggaggtccggcggcgcccggacagcgtccgttcccaagcc

SEQ ID NO: 136888 - DNA, 120 bp, Artificial Sequence
  ENSG00000103353_40 (sequence is synthesized)
ttttttttttttttaaagctttctacatgtagccttgtaatctccattaagaacaggagttttgtccctattggcttctgtagctctgatgcctgtggattctcacttaatatgtgaatg

SEQ ID NO: 136889 - DNA, 120 bp, Artificial Sequence
  ENSG00000103353_41 (sequence is synthesized)
atttagatgactgaggaacaacttggaaagaatgagagctagtacttactgaacaattattcaatgctagccaccgtactaaatgccccgcattggtctcttaatccttgaaacaggtct

SEQ ID NO: 136890 - DNA, 120 bp, Artificial Sequence
  ENSG00000103353_42 (sequence is synthesized)
gtacagaaggacttactctaataaatcttctacagttctagaaactgaggttcagaggttgtaaatctcccaagttcacaaagctaataggtggtggaggcagtattcactttttggtct

SEQ ID NO: 136891 - DNA, 120 bp, Artificial Sequence
  ENSG00000103353_43 (sequence is synthesized)
tgaaccctctgctagatcattctcttctgtagagcctgtccatcttccctttatcagtagtaagctgcccagcctctgtcaactttgcaggtgattttgcttagttctgtctcatcacat

SEQ ID NO: 136892 - DNA, 120 bp, Artificial Sequence
  ENSG00000103353_44 (sequence is synthesized)
tcacttgctgaagtgcatagacttcctgcctcttgctggacctctacttttgcttgtgggcagcctcattgaaggcagttgctacggctgacctggaaagaccctgccatgaagataggt

SEQ ID NO: 136893 - DNA, 120 bp, Artificial Sequence
  ENSG00000103353_45 (sequence is synthesized)
ttttttttgaggggaggagggcaatctggaaatcccgtttgctgtagaactttgatatctaatatggtagctatccacatgtggctggttaaaatgaaattaagaattcagttcctcagt

SEQ ID NO: 136894 - DNA, 120 bp, Artificial Sequence
  ENSG00000103353_46 (sequence is synthesized)
catagtagctgcatttcaagtgtgtaatagtcacagcagtaggtagtggctagcacaggtacgaacatattcgccctcccagaaagttctgctggacagcactgtgctatagtttcaaag

SEQ ID NO: 136895 - DNA, 120 bp, Artificial Sequence
  ENSG00000103353_47 (sequence is synthesized)
gatccatagtctgtcgtcattaaaagcttttgagccaaaacactaaggctttcttcatcctctctttcaagggaatagtaacacgacgaaatgtagtcagctgtttcatttcattctctc

SEQ ID NO: 136896 - DNA, 120 bp, Artificial Sequence
  ENSG00000103353_48 (sequence is synthesized)
tgttgaggagcatggccatggactactcatgttttctagggttgaacaaggttaagattttcattcccacccatagcactgtacctctggagcccaaggggcaggcagtcttgtcacttg

SEQ ID NO: 136897 - DNA, 120 bp, Artificial Sequence
  ENSG00000103353_49 (sequence is synthesized)
cccagtcctgttacctaagtgtcataagcactcataagaggacagcttgttctgggagttggctgctagccactggcttcgtctttctgctggcaagaagaagcggctatggaatgacca

SEQ ID NO: 136898 - DNA, 120 bp, Artificial Sequence
  ENSG00000103353_50 (sequence is synthesized)
tcccagcagcgagttggcctcttcgtggggcgctttgctgagtaagtgacccttaagggctgctactcttgactaaactctgctagcttgtgtaggaggaggcagttctaacagcctcaa

SEQ ID NO: 136899 - DNA, 120 bp, Artificial Sequence
  ENSG00000103353_51 (sequence is synthesized)
aagaatgagaacaagctccaggcaggaaaccggaagccgctggaggagagcatgtaccctgctcgtaggaaagttgaatctggctgaaggtctgatgtagtgatcaggagtgtgggtcca

SEQ ID NO: 136900 - DNA, 120 bp, Artificial Sequence
  ENSG00000103353_52 (sequence is synthesized)
gaattgcccaatttttggagttttcaagagaagccagaaatctgttgtatatttttgtgaaatctccagacatttcaggatgaaaggtgttttaaaagtttccatcttaaagacagctgc

SEQ ID NO: 136901 - DNA, 120 bp, Artificial Sequence
  ENSG00000103353_53 (sequence is synthesized)
tgcccaggtcctgctttagggccgactgttgtagagccactagaagtccaaacctaaataaacatcttcaggtcccttctccccagcccccatttttcagatactgaggcccacagaact

SEQ ID NO: 136902 - DNA, 120 bp, Artificial Sequence
  ENSG00000103353_54 (sequence is synthesized)
gaagtaaaatgtcttaagtccccagctagaccagaacgctggtctctaaattcctagtctgtttggccaacttatctatttttagactctatctttccagatttttctttctgcaaaggc

SEQ ID NO: 136903 - DNA, 120 bp, Artificial Sequence
  ENSG00000103353_55 (sequence is synthesized)
tgcaagtttttttccacttggtttagctgtttgctgagcctccctgcccccctccccctgcgcccccgtccctgaggtgtctgctgctccaggatggccatgtccccttgtgcaggtgca

SEQ ID NO: 136904 - DNA, 120 bp, Artificial Sequence
  ENSG00000103353_56 (sequence is synthesized)
cctcgcctcccctgacctcacccagtcccgcttcacttggctcactcccggcagtctcatctcactccaggcatcccttgctgcccccttctcttacctgccatcctccttaaactcgcc

SEQ ID NO: 136905 - DNA, 120 bp, Artificial Sequence
  ENSG00000103353_57 (sequence is synthesized)
tcaatgtcttctgaccccatgtgatcagtggtatctcaagtgttaatcacaaaaggttataaatgttttaagagaacttcataaaagtgtgtgaatatagagtgcggaggactcgaggag

SEQ ID NO: 136906 - DNA, 120 bp, Artificial Sequence
  ENSG00000103353_58 (sequence is synthesized)
gaacgtgttgcctctttgttcgtaggcctcttgactctccctactgcccaagaccttagtcaatgctgggcttgcataaggttacaaaggaatttcttgggtatttatttattttatatt

SEQ ID NO: 136907 - DNA, 87 bp, Artificial Sequence
  ENSG00000103353_59 (sequence is synthesized)
gttacaaaggaatttcttgggtatttatttattttatatttttttttgttgagatggagtttcgctctttggcccaggctgaagtaa

SEQ ID NO: 136908 - DNA, 120 bp, Artificial Sequence
  ENSG00000103353_60 (sequence is synthesized)
tacaggcttgagccaccgcgcctggcctttcttggatatttattaaccatcagacttttaaaaaataatcccagggaagatacaattctgccctcagagacctttactataccattgcca

SEQ ID NO: 136909 - DNA, 120 bp, Artificial Sequence
  ENSG00000103353_61 (sequence is synthesized)
attctgccctcagagacctttactataccattgccaaacccagtttcccacttgctcctacggagttcccagctcccacacgaagccctatgtgcactggtcagaagaccctgtcgtgtt

SEQ ID NO: 136910 - DNA, 120 bp, Artificial Sequence
  ENSG00000103353_62 (sequence is synthesized)
gtccccagagggcatggcgccagtcacttgagtttactgtagatcccgcagccaccagccctgatgagggactgctgagtcagagaagttagaacaggagggccctttgaataatcactg

SEQ ID NO: 136911 - DNA, 120 bp, Artificial Sequence
  ENSG00000103355_0 (sequence is synthesized)
ggagctgaggacagacagaaggaccacggagggggtgacgggctggtgtgaggattggtgcccctgggccaggactctcctctcttctccctgctggctccagaccagagtccaagccct

SEQ ID NO: 136912 - DNA, 120 bp, Artificial Sequence
  ENSG00000103355_1 (sequence is synthesized)
aggcagtgccacccttacccagcccagccttgaagacagaatgagaggggtttcctgtctccaggtcctgctccttctggtgctgggagctgctgggactcagggaaggaagtctgcagc

SEQ ID NO: 136913 - DNA, 120 bp, Artificial Sequence
  ENSG00000103355_2 (sequence is synthesized)
ctgcgggcagccccgcatgtccagtcggatcgttgggggccgggatggccgggacggagagtggccgtggcaggcgagcatccagcatcgtggggcacacgtgtgcggggggtcgctcat

SEQ ID NO: 136914 - DNA, 120 bp, Artificial Sequence
  ENSG00000103355_3 (sequence is synthesized)
cgccccccagtgggtgctgacagcggcgcactgcttccccaggagggcactgccagctgagtaccgcgtgcgcctgggggcgctgcgtctgggctccacctcgccccgcacgctctcggt

SEQ ID NO: 136915 - DNA, 120 bp, Artificial Sequence
  ENSG00000103355_4 (sequence is synthesized)
gcccgtgcgacgggtgctgctgcccccggactactccgaggacggggcccgcggcgacctggcactgctgcagctgcgtcgcccggtgcccctgagcgctcgcgtccaacccgtctgcct

SEQ ID NO: 136916 - DNA, 120 bp, Artificial Sequence
  ENSG00000103355_5 (sequence is synthesized)
gcccgtgcccggcgcccgcccgccgcccggcacaccatgccgggtcaccggctggggcagcctccgcccaggagtgcccctcccagagtggcgaccgctacaaggagtaagggtgccgct

SEQ ID NO: 136917 - DNA, 120 bp, Artificial Sequence
  ENSG00000103355_6 (sequence is synthesized)
gctggactcgcgcacctgcgacggcctctaccacgtgggcgcggacgtgccccaggctgagcgcattgtgctgcctgggagtctgtgtgccggctacccccagggccacaaggacgcctg

SEQ ID NO: 136918 - DNA, 120 bp, Artificial Sequence
  ENSG00000103355_7 (sequence is synthesized)
ggggacctctgacctgcctgcagtctgggagctgggtcctggtgggcgtggtgagctggggcaagggttgtgccctgcccaaccgtccaggggtctacaccagtgtggccacatatagcc

SEQ ID NO: 136919 - DNA, 120 bp, Artificial Sequence
  ENSG00000103355_8 (sequence is synthesized)
cctggattcaggctcgcgtcagcttctaatgctagccggtgaggctgacctggagccagctgctggggtccctcagcctcctggttcatccaggcacctgcctataccccacatcccttc

SEQ ID NO: 136920 - DNA, 120 bp, Artificial Sequence
  ENSG00000103355_9 (sequence is synthesized)
tgcctcgaggccaagatgcctaaaaaagctaaaggccaccccaccccccacccaccacctcctgcctcctctcctctttggggatcaccagctctgactccaccaaccctcatccaggaa

SEQ ID NO: 136921 - DNA, 120 bp, Artificial Sequence
  ENSG00000103355_10 (sequence is synthesized)
tctgccatgagtcccagggagtcacactccccactcccttcctggcttgtatttacttttcttggccctggccagggctgggcgcaaggcacgcagtgatgggcaaaccaattgctgccc

SEQ ID NO: 136922 - DNA, 120 bp, Artificial Sequence
  ENSG00000103355_11 (sequence is synthesized)
atctggcctgtgtgcccatctttttctggagaaagtcagattcacagcatgacagagatttgacaccagggagatcctccatagctggctttgaggacacggggaccacagccatgagcg

SEQ ID NO: 136923 - DNA, 120 bp, Artificial Sequence
  ENSG00000103355_12 (sequence is synthesized)
gcctctaagagctgagagacagccggcagggaatcggaaccctcagacccacagccgcaaggcactggattctggcagcaccctgaaggagctgggaagtaagttcttccccagcctcca

SEQ ID NO: 136924 - DNA, 120 bp, Artificial Sequence
  ENSG00000103355_13 (sequence is synthesized)
gataagagccccgccggccaatcccttcatttcaacctaaagagaccctaagcagagaacctagctgagccactcctgacctacaaagttgtgacttaataaatgtgtgctttaagctgc

SEQ ID NO: 136925 - DNA, 120 bp, Artificial Sequence
  ENSG00000103355_14 (sequence is synthesized)
gggggttaggctccagggcttctgtcgagaccaaggatgcccaaatatctgggtggtgggtgctgcatacctgggccctgggcagaacgaagggtatacagcctgggccaccaggataag

SEQ ID NO: 136926 - DNA, 120 bp, Artificial Sequence
  ENSG00000103355_15 (sequence is synthesized)
tccccagcctccggagtcccctccctgtgcccagcaccctccctccctgaactccaggacccaggacatcccaactcaggctcaggatcctggcctccaacctagaggcaccacgccagg

SEQ ID NO: 136927 - DNA, 120 bp, Artificial Sequence
  ENSG00000103356_0 (sequence is synthesized)
gggagaagcccacgtgtgctattccatcccacatggcggcgctcctgaggagactgctgcagcgcgagaggccttcggcggcctctggccgccccgtaggacggcgcgaggccaacctgg

SEQ ID NO: 136928 - DNA, 120 bp, Artificial Sequence
  ENSG00000103356_1 (sequence is synthesized)
gcactgatgccggggttgcggtgcgagtgcggttcgctcccagccccacaggcttcttgcacctgggtggcctccgcactgccttgtacaactacatctttgctaagaagtaccagggga

SEQ ID NO: 136929 - DNA, 120 bp, Artificial Sequence
  ENSG00000103356_2 (sequence is synthesized)
gcttcatcctgaggctagaggacacagatcagactcgcgttgtgcctggggcagcggagaatattgaggacatgctggagtgggcaggcatcccgcctgatgagagcccccgccggggcg

SEQ ID NO: 136930 - DNA, 120 bp, Artificial Sequence
  ENSG00000103356_3 (sequence is synthesized)
gtcctgctgggccctaccagcaatctcagcggttggagctgtatgcccaggccacagaagcgctgctgaagaccggagctgcttacccctgtttctgctcaccccagcggctggagctcc

SEQ ID NO: 136931 - DNA, 120 bp, Artificial Sequence
  ENSG00000103356_4 (sequence is synthesized)
tgaagaaggaggccttgcggaaccaccagacgccccggtatgacaatcggtgcaggaacatgagccaggagcaggtggcccagaagctggccaaggaccccaagcctgcgatccgcttcc

SEQ ID NO: 136932 - DNA, 120 bp, Artificial Sequence
  ENSG00000103356_5 (sequence is synthesized)
gcctggagcaggtggtgccagccttccaggacctggtctatggctggaataggcatgaagtggccagcgtggagggagacccagtcatcatgaagagcgacggcttccccacataccacc

SEQ ID NO: 136933 - DNA, 120 bp, Artificial Sequence
  ENSG00000103356_6 (sequence is synthesized)
tggcctgcgtggtggacgaccaccacatgggcatcagccacgtgctgcgaggctctgagtggctcgtctccactgccaagcacctgctcctctaccaggccctgggctggcagccacccc

SEQ ID NO: 136934 - DNA, 120 bp, Artificial Sequence
  ENSG00000103356_7 (sequence is synthesized)
acttcgcccacctgcccctgctcctcaacagggatggcagcaagctctccaagaggcaaggggacgttttcctggagcactttgctgctgatggcttcctgcccgattccttgttggaca

SEQ ID NO: 136935 - DNA, 120 bp, Artificial Sequence
  ENSG00000103356_8 (sequence is synthesized)
tcatcaccaactgtggctcaggttttgcagagaaccaaatgggcaggaccctgccggagctgatcacacagttcaacctgacacaggtcacctgtcactcagccctgctggacctggaga

SEQ ID NO: 136936 - DNA, 120 bp, Artificial Sequence
  ENSG00000103356_9 (sequence is synthesized)
agctcccagaattcaacagactgcacctccagcggctggtgagcaatgagagccagaggcgccagctggtggggaagctgcaggtccttgtggaggaggcctttggttgccagctgcaaa

SEQ ID NO: 136937 - DNA, 120 bp, Artificial Sequence
  ENSG00000103356_10 (sequence is synthesized)
acagggatgtcctcaacccagtctacgtggagaggatcctcctgctgagacagggtcacatttgccgcctgcaggacttggtgtccccagtatactcttacctgtggactcgccctgcag

SEQ ID NO: 136938 - DNA, 120 bp, Artificial Sequence
  ENSG00000103356_11 (sequence is synthesized)
taggtcgagcacagctggacgccatctcggagaaggtggatgtgattgccaagcgtgtgctggggcttctagaaagatctagtatgagcttaactcaggatatgctgaatggagaactga

SEQ ID NO: 136939 - DNA, 120 bp, Artificial Sequence
  ENSG00000103356_12 (sequence is synthesized)
agaagctatcagaaggtctggaaggcaccaagtacagtaatgtgatgaaactccttcggatggccctcagtggacagcagcaaggacctcctgtagctgagatgatgttggccttgggac

SEQ ID NO: 136940 - DNA, 120 bp, Artificial Sequence
  ENSG00000103356_13 (sequence is synthesized)
caaaggaagtacgggaacggatccagaaggtggtttccagctagggagaggatgtttcgggcagtggagatcgccctaagaacctgtgagcttagaaacagctttcagagaccagaagga

SEQ ID NO: 136941 - DNA, 120 bp, Artificial Sequence
  ENSG00000103356_14 (sequence is synthesized)
ggcctggggcccgtcgggaagtttgctgaaggaactaagagtggaaacaatctctgactgcacacaagtgcatttgtgatccaccacaggcacgtttttgtcaattggctggggaagccc

SEQ ID NO: 136942 - DNA, 120 bp, Artificial Sequence
  ENSG00000103356_15 (sequence is synthesized)
aacccatctaacctcctggactctggaaaggcattctccgggtctggtttctcacacattacacagcagaggtttggagttagttcacagaaaagttaacatcccggaacagtgcagaag

SEQ ID NO: 136943 - DNA, 120 bp, Artificial Sequence
  ENSG00000103356_16 (sequence is synthesized)
cttgggtttcagtttgctagggcccccataacaaaatgccacagaaccaggtggtttaaacaacagagatttattttctcacatttggaggctagaagttcaagatcaaggtgtcagcag

SEQ ID NO: 136944 - DNA, 120 bp, Artificial Sequence
  ENSG00000103356_17 (sequence is synthesized)
gcctggtttttcctagaggcctcttttgttggcttgcagacagctgtcttctcactgtgtccttgtgcggtcttccctccatgcacacacatctctaagtttcattatgtgcccaacgtt

SEQ ID NO: 136945 - DNA, 120 bp, Artificial Sequence
  ENSG00000103356_18 (sequence is synthesized)
cctcttctaagaacaccagttggactggattttaactttaaccagcctcatttaagttaatcacctctttaaatgctcaatctccaagtacagtctcattctgaggttccaggggtttct

SEQ ID NO: 136946 - DNA, 120 bp, Artificial Sequence
  ENSG00000103356_19 (sequence is synthesized)
caacgtaagaatttagggggacagaattcagcccgtagcagctgggcagcaggactcatgggtcccagttctcaggccccaaggactcagagcagcaaaggatacgtgacacaagcaggg

SEQ ID NO: 136947 - DNA, 120 bp, Artificial Sequence
  ENSG00000103356_20 (sequence is synthesized)
ctgaactggacaccagactttctttggggttgtaaaaggagaagtgtgactccactgccaagggtaagcactcttgtcttatgctaccctttattcttgaaccttggggcagcctgtgtc

SEQ ID NO: 136948 - DNA, 120 bp, Artificial Sequence
  ENSG00000103356_21 (sequence is synthesized)
tcccttccctaaacgtcatctgttccgtttttccagtcttccagacctggtccttggactggagaccttcacccttcctattttgtggctttctcttcaaatccacctcgtccttcctcc

SEQ ID NO: 136949 - DNA, 120 bp, Artificial Sequence
  ENSG00000103356_22 (sequence is synthesized)
atgacttataagtcatcatctctgctggtttctgaaatgagatatgcttcttggggtcttcagtgaagaggaatagcaagtgaaaggaggatggtggcagggtacatgaacccctaccag

SEQ ID NO: 136950 - DNA, 120 bp, Artificial Sequence
  ENSG00000103356_23 (sequence is synthesized)
gcttctaggcttcccctgcatggcagccagcctctaagttggcccccaaccatccctgccttcttctattcacacccttgtgtggttccttcccacattgaataggcctgacttgtgtaa

SEQ ID NO: 136951 - DNA, 120 bp, Artificial Sequence
  ENSG00000103356_24 (sequence is synthesized)
ccactacactattgaagaaatgagagtttgacttctgagggtaagtcataaaatacatcgtggcttctgtcttgttttctttgatcgcttactttgggggaagccagcttccaggtcatg

SEQ ID NO: 136952 - DNA, 120 bp, Artificial Sequence
  ENSG00000103356_25 (sequence is synthesized)
aaaatactcaagcagccttatggagtgctccacatgacaagggatcgaggcctcccaccaatagccatgggagtgtgcaatcttgaaagctggtccttcaattccagccaagcattcaca

SEQ ID NO: 136953 - DNA, 120 bp, Artificial Sequence
  ENSG00000103356_26 (sequence is synthesized)
tgaccgcaatcctagctgatctcgcttgtgacctctatgggagaccctaagccagaaccactcagagaagctgctccggaacgtcagacacacatgaactgtgagatagtaaacgtttat

SEQ ID NO: 136954 - DNA, 120 bp, Artificial Sequence
  ENSG00000103356_27 (sequence is synthesized)
tgtttaaagctacttggtttggggataatttgcgtttcagcagtagacaatatatttattttgtccaggggagtggaaaggcgattacagagtttgttgagccccatagagtcctagtct

SEQ ID NO: 136955 - DNA, 120 bp, Artificial Sequence
  ENSG00000103356_28 (sequence is synthesized)
ttgcttaaagaaatataccagttctttctaatacagaatccattaagttcgttggttgcaaacaatagaaaccaactctgcctcacttatgtttattggaggccataagagagccacagc

SEQ ID NO: 136956 - DNA, 120 bp, Artificial Sequence
  ENSG00000103356_29 (sequence is synthesized)
atctaccaaaaagccaaaaaaaaaacaggttttggaaaagacaggaactagctacaggagctaatggccaatcttgtctgagttctttgatggcgacacatgaactacagccgttttgtt

SEQ ID NO: 136957 - DNA, 120 bp, Artificial Sequence
  ENSG00000103356_30 (sequence is synthesized)
gttgttaatttctccgtgttttcccctcagttttggatgactctgctcaaggttcagattctgaggagcaagtatctgttgggctatctgaggtcctgctaccattccttggccagtaat

SEQ ID NO: 136958 - DNA, 120 bp, Artificial Sequence
  ENSG00000103356_31 (sequence is synthesized)
aggtagtttcacagggattatatgcaatggaggaaaagttgttctcaaggaaaactagggagctttctccagaagatgatgtaatggcagaaacaacaggtggttgaccacagaagggga

SEQ ID NO: 136959 - DNA, 120 bp, Artificial Sequence
  ENSG00000103356_32 (sequence is synthesized)
caataataatacttgtaatttattgtgcgcttatatgagcctcaccctctcccaggtgtcagataatgctcgtaaatgccttagtccatcatctcagtaaattttttttataacactatg

SEQ ID NO: 136960 - DNA, 120 bp, Artificial Sequence
  ENSG00000103356_33 (sequence is synthesized)
tggccctcagtggacagcaggtgaggcagggacacgggttggattgttccctggagcccctcattgatcctttgaacttacatttcctggcaggcactgagctcaatattgagtatacaa

SEQ ID NO: 136961 - DNA, 120 bp, Artificial Sequence
  ENSG00000103356_34 (sequence is synthesized)
aggtgaatgaaacatgatcactcccctcatttagtcaatcaacagacactattgagtacctactatgtgcaagcattgtgttaggtacagtgaatacaatatagaattaaacacacatac

SEQ ID NO: 136962 - DNA, 120 bp, Artificial Sequence
  ENSG00000103356_35 (sequence is synthesized)
aattcaacaggtgagtggggagcatggagatcccctggtggcaaagggctttcttgcttatgatgatccctacagcagagggtataatgggctctggtacctaattctgtgtgaccatgg

SEQ ID NO: 136963 - DNA, 120 bp, Artificial Sequence
  ENSG00000103356_36 (sequence is synthesized)
gcttaaggtcacacagctatgacagaggtaggactcctgtccatcaacctttccatcaacagtactcatgctgctctgctccccatcaggtatgacaatcggtgcaggaacatgagccag

SEQ ID NO: 136964 - DNA, 120 bp, Artificial Sequence
  ENSG00000103356_37 (sequence is synthesized)
aattagggatgtggactttggagcccgtacacctccgtttgctccttagtccatgagcccatgcgactttgagtgcttcacctctctgtgttttaacttttcatctctaaaagggacatt

SEQ ID NO: 136965 - DNA, 120 bp, Artificial Sequence
  ENSG00000103356_38 (sequence is synthesized)
ggggttgcggtgcgagtgcggttcgctcccagccccacagagtctcactctactgctgcccaggctggagtgcagaggcgtgatcatggctcgctgcagcctcagcgtccccaggctcag

SEQ ID NO: 136966 - DNA, 120 bp, Artificial Sequence
  ENSG00000103356_39 (sequence is synthesized)
attccatcccacatggcggcgctcctgaggagactgctgcagcgcgagaggccttcggcggcctctggccgccccgccgaggccccctgtcccgtctccgccccacgaatgttcccgaat

SEQ ID NO: 136967 - DNA, 120 bp, Artificial Sequence
  ENSG00000103356_40 (sequence is synthesized)
gaatcctttccggtggtgtcagagtgggcgggcggaggagggttaaggcagcgcgagcccattttacagaggcggaaactgaggtgcaggagcggaaataattcaaattgccaggagttt

SEQ ID NO: 136968 - DNA, 120 bp, Artificial Sequence
  ENSG00000103356_41 (sequence is synthesized)
gtaacaggtgttgtagacgctgggatacagtgatcattgagaaaggtaggggccttgctctgtggaagtctgcattctagtggctgccgcagacacttataaaaaataagtgtaatttta

SEQ ID NO: 136969 - DNA, 120 bp, Artificial Sequence
  ENSG00000103356_42 (sequence is synthesized)
acaacacccaccgctcccgcagaggccgctgggaagaggcgagctggctgagattggcccccgcagcagcccctaatctctcacagcccggccggaaacaggtggaggtttctatggaga

SEQ ID NO: 136970 - DNA, 120 bp, Artificial Sequence
  ENSG00000103356_43 (sequence is synthesized)
cccgcctcctccgctcccaggtccggcccctgccacgctttcgctttcccaagctgaagggggcgggtccgggaaatagccctttctctggcctctgccccctggtggcgagtgcggccg

SEQ ID NO: 136971 - DNA, 120 bp, Artificial Sequence
  ENSG00000103363_0 (sequence is synthesized)
cgggaacggggcggagcgcggctgcgccggcgcgtcgaggggagaggcagcagccgcgatggacgtgttcctcatgatccggcgccacaagaccaccatcttcacggacgccaaggagtc

SEQ ID NO: 136972 - DNA, 120 bp, Artificial Sequence
  ENSG00000103363_1 (sequence is synthesized)
cagcacggtgttcgaactgaagcgcatcgtcgagggcatcctcaagcggcctcctgacgagcagcggctgtacaaggatgaccaactcttggatgatggcaagacactgggcgagtgtgg

SEQ ID NO: 136973 - DNA, 120 bp, Artificial Sequence
  ENSG00000103363_2 (sequence is synthesized)
cttcaccagtcaaacagcacggccacaggccccagccacagtggggctggccttccgggcagatgacacctttgaggccctgtgcatcgagccgttttccagcccgccagagctgcccga

SEQ ID NO: 136974 - DNA, 120 bp, Artificial Sequence
  ENSG00000103363_3 (sequence is synthesized)
tgtgatgaagccccaggactcgggaagcagtgccaatgaacaagccgtgcagtgaggacccccaagaggcccatttcccccaataaaagagatttgggagtctgcctggttgctgcctct

SEQ ID NO: 136975 - DNA, 120 bp, Artificial Sequence
  ENSG00000103363_4 (sequence is synthesized)
tccctgtgggctccttttggggcttgtgcttggcagttcctgtgctgtcctgtctcccagatcctgagaccctggctgagaacttggcccagcctgctgcttaaaggcaccatggggacc

SEQ ID NO: 136976 - DNA, 120 bp, Artificial Sequence
  ENSG00000103363_5 (sequence is synthesized)
tgggttgccctgagacccaagccattgttagcagctagccagccacaccaaccacgccagggggaggaaagggaaggactgggagagacacaaagaccagagccagcctcagggacaaga

SEQ ID NO: 136977 - DNA, 120 bp, Artificial Sequence
  ENSG00000103363_6 (sequence is synthesized)
gattccagttttaggcctttctccttctaagtgccccccacccccatagcctgcatgtccactcccagacgatggccaagagcagaaacacaagctggagccagtgtcctggtttgacag

SEQ ID NO: 136978 - DNA, 120 bp, Artificial Sequence
  ENSG00000103363_7 (sequence is synthesized)
catgttcaacgagggaaccccaagacggacccacacaggtccacccacgctgggggctgtaatcacggagggaagtggctgcccccttaacacacctttaataaacagtctacagaccca

SEQ ID NO: 136979 - DNA, 120 bp, Artificial Sequence
  ENSG00000103363_8 (sequence is synthesized)
gcggcggggggcggctgggccgcgcggggggcccgggcttcgtgctcacgccggcccgccgcccccaggacgtgttcctcatgatccggcgccacaagaccaccatcttcacggacgcca

SEQ ID NO: 136980 - DNA, 120 bp, Artificial Sequence
  ENSG00000103365_0 (sequence is synthesized)
gcagtcagcagaggagagcgccaggacgctacagcggctgaagaggcagtggcgcccgcggccgcagcgtcggggctggagcgatggcggcgaccgcggtggcggcggctgtggcgggaa

SEQ ID NO: 136981 - DNA, 120 bp, Artificial Sequence
  ENSG00000103365_1 (sequence is synthesized)
ccgagtcggcccagggtcccccgggcccggcagcgtcgctggagctgtggctcaacaaagccacagacccaagcatgtcggaacaggattggtcagctatccagaatttctgtgagcagg

SEQ ID NO: 136982 - DNA, 120 bp, Artificial Sequence
  ENSG00000103365_2 (sequence is synthesized)
tgaacactgaccccaatggccccacacatgcgccctggctactggcccacaagatccagtctccgcaagagaaggaagctctttatgccttaacggtgctggagatgtgcatgaaccact

SEQ ID NO: 136983 - DNA, 120 bp, Artificial Sequence
  ENSG00000103365_3 (sequence is synthesized)
gtggggagaagttccacagcgaggtggccaaatttcgtttcctgaacgaactgatcaaagtgttgtccccaaagtacctggggtcctgggccacaggaaaagttaaaggaagagtcattg

SEQ ID NO: 136984 - DNA, 120 bp, Artificial Sequence
  ENSG00000103365_4 (sequence is synthesized)
aaatactcttcagttggacagtctggtttccggaagacatcaagattcgagacgcttatcagatgctgaagaaacaaggaattataaaacaagaccctaaactaccagtggataaaatct

SEQ ID NO: 136985 - DNA, 120 bp, Artificial Sequence
  ENSG00000103365_5 (sequence is synthesized)
tacccccaccatctccctggcccaagagctccatctttgatgctgatgaagaaaagtccaagcttctgacaaggcttctaaagagcaaccaccccgaggaccttcaggctgcaaaccggt

SEQ ID NO: 136986 - DNA, 120 bp, Artificial Sequence
  ENSG00000103365_6 (sequence is synthesized)
taatcaagaatttggtcaaggaggaacaagaaaaatcggagaaggtgtccaagagggtcagtgcggtggaggaagtgcgaagccatgtgaaggtgctgcaggagatgctgagcatgtacc

SEQ ID NO: 136987 - DNA, 120 bp, Artificial Sequence
  ENSG00000103365_7 (sequence is synthesized)
gcaggccagggcaggccccgcccgaccaggaggccctgcaggtcgtgtatgagaggtgtgaaaagctgcggcccacgctgttccggttggcgagtgacaccactgatgacgatgatgcac

SEQ ID NO: 136988 - DNA, 120 bp, Artificial Sequence
  ENSG00000103365_8 (sequence is synthesized)
tcgcggaaattctccaggcaaatgacctcctcacccaaggagttctgctgtacaaacaggtgatggagggccgggtcacctttggaaacagagtgaccagctcattgggagacatccctg

SEQ ID NO: 136989 - DNA, 120 bp, Artificial Sequence
  ENSG00000103365_9 (sequence is synthesized)
tctccagagtctttcagaatccagcaggctgcatgaagacctgccccctgattgacttggaggtggacaatggacctgcgcagatggggactgtggtgccatctttgcttcatcaggacc

SEQ ID NO: 136990 - DNA, 120 bp, Artificial Sequence
  ENSG00000103365_10 (sequence is synthesized)
tggcagccttgggaatcagtgatgctcctgttacaggcatggtttctggtcagaattgctgtgaggaaaagaggaatccctcctccagcacgctgccaggcggtggtgttcagaaccctt

SEQ ID NO: 136991 - DNA, 120 bp, Artificial Sequence
  ENSG00000103365_11 (sequence is synthesized)
ctgcagacaggaatttgctggacctcctctcagcacagccagctccgtgccctctgaattatgtttcgcagaaaagtgtccccaaggaagtgccaccaggtactaagtcctctccaggtt

SEQ ID NO: 136992 - DNA, 120 bp, Artificial Sequence
  ENSG00000103365_12 (sequence is synthesized)
ggtcctgggaggctggcccgttggctccttccccatcttcacagaatacacctctggctcaagtgtttgtccctttggagtctgttaagcccagcagcctgccgcctctcattgtgtatg

SEQ ID NO: 136993 - DNA, 120 bp, Artificial Sequence
  ENSG00000103365_13 (sequence is synthesized)
accggaatggattcagaattctgctccacttctcccagacgggagcccctgggcacccagaggtacaggtgctgctcttgaccatgatgagcacggctccccagcctgtctgggatatca

SEQ ID NO: 136994 - DNA, 120 bp, Artificial Sequence
  ENSG00000103365_14 (sequence is synthesized)
tgtttcaagtggctgtgccaaagtcaatgagagtgaagctgcagccggcatccagctccaagcttcctgcattcagtcctttgatgcctccagctgtgatatctcagatgctgctgcttg

SEQ ID NO: 136995 - DNA, 120 bp, Artificial Sequence
  ENSG00000103365_15 (sequence is synthesized)
acaatccacacaaagaacctatccgcttacggtacaagctgacattcaaccaaggtggacagcctttcagcgaagtaggagaagtgaaagacttcccagacctggctgtcttgggcgcag

SEQ ID NO: 136996 - DNA, 120 bp, Artificial Sequence
  ENSG00000103365_16 (sequence is synthesized)
cctaacttttcacaagatggacccttcatttcaagcttaggctggcgttacttttgctgtctagtcaggactaatcacggtgtttcagtgcggagtgccaagagtcctatcctgacgtca

SEQ ID NO: 136997 - DNA, 73 bp, Artificial Sequence
  ENSG00000103365_17 (sequence is synthesized)
tgtttcagtgcggagtgccaagagtcctatcctgacgtcaggctctgggtgtcaacctctgacttattctgca

SEQ ID NO: 136998 - DNA, 120 bp, Artificial Sequence
  ENSG00000103365_18 (sequence is synthesized)
atcggcagtgtgggaaatgcgaagcatttctcatcatcatcatctctgctacagtcatgtttctgcatgtcagcgagcgacactgtccctgcctcaggttggaggttttatcagccaaag

SEQ ID NO: 136999 - DNA, 120 bp, Artificial Sequence
  ENSG00000103365_19 (sequence is synthesized)
tgtttttttcatgtatcgttcgttccattcatccactctgtgccttgtcagcctttgaaaggcttggttgctcccaggctgctgttctcagggaccttaaaagggacctggttagtcttg

SEQ ID NO: 137000 - DNA, 120 bp, Artificial Sequence
  ENSG00000103365_20 (sequence is synthesized)
gggcagagagtatctacttgggcactctcttccaagaaagaccttgtctccattttcattagacaatgcttcttgtgtgtgttctggaagatcttctaaatggaatgcttgttgcactgt

SEQ ID NO: 137001 - DNA, 120 bp, Artificial Sequence
  ENSG00000103365_21 (sequence is synthesized)
tcccaggcgagtggctgccatgagacctgaggaccacacttgggggaccaatcatgtccttcaccactgtgccttagaatcgcccctggacagagttcctgggcagaggggaaagcagct

SEQ ID NO: 137002 - DNA, 120 bp, Artificial Sequence
  ENSG00000103365_22 (sequence is synthesized)
cccaggccttactcaggcctcaggtccatgggttgggcagccagtctgggcccttctcaggatcctcatctccatcctcatcctcttccttcacagcatttacttggagctctttgtgac

SEQ ID NO: 137003 - DNA, 120 bp, Artificial Sequence
  ENSG00000103365_23 (sequence is synthesized)
acaccatgtcagtcatgatgaatcggccaacagccagcccttgccagctgacgtcacagtctaagatgggaaactgtggtacagatagacatgaagagagcttagcagtgattgaggtgg

SEQ ID NO: 137004 - DNA, 120 bp, Artificial Sequence
  ENSG00000103365_24 (sequence is synthesized)
gagatgataggcctaaagggaactgtcttctgtcgagaagtaaaggaaacttcatgaaggatgtagaagcttagctgcctcagagaagagagaacctgaagatctgaggcaagctggaca

SEQ ID NO: 137005 - DNA, 120 bp, Artificial Sequence
  ENSG00000103365_25 (sequence is synthesized)
ggagaggtggatatttgttgatggaagaattcaagtttataatcaattcccacttagcacctactgtgtgctaggaacttgaatgtgtatgtttgacaagtcctgcttggcctgatgggt

SEQ ID NO: 137006 - DNA, 120 bp, Artificial Sequence
  ENSG00000103365_26 (sequence is synthesized)
gggagaaggaacctgagcctggctgagatggctaggcggagggctttgaagtccaagcagctgaactggctgggtgggtttctacctttgaaactgcaagacttgtttggagctcttaat

SEQ ID NO: 137007 - DNA, 120 bp, Artificial Sequence
  ENSG00000103365_27 (sequence is synthesized)
tacaatatctgatatttttacagtctgatcttttgacttctacatatagtggaaatctgccaatactaattggtggagatgggaactgtaaaagatcaagtatgctaattttaagcaaat

SEQ ID NO: 137008 - DNA, 120 bp, Artificial Sequence
  ENSG00000103365_28 (sequence is synthesized)
gtaaaaactcataaaacaggtaaacagtggggtgatttcatttgccataattcacataagacgaattttaatctaaaagtactttcttgcttgtattctgtgtggcttttttttgttttt

SEQ ID NO: 137009 - DNA, 120 bp, Artificial Sequence
  ENSG00000103365_29 (sequence is synthesized)
tgtggcttttttttgttttttgaggccatatctcactctgtcactcaggctggagtgcggtggtataatctcagctcactgcaatctctgcctaccaggttcaagcgattctcgtgcctc

SEQ ID NO: 137010 - DNA, 120 bp, Artificial Sequence
  ENSG00000103365_30 (sequence is synthesized)
ggcgtgagccaccgcacccggcctctgtgtagcttttataggctctgttactgttgcgtagtcttgaagaggtacccatcataatgacagcatctccctctgaagggttttggtcaaaat

SEQ ID NO: 137011 - DNA, 120 bp, Artificial Sequence
  ENSG00000103365_31 (sequence is synthesized)
tgaagggttttggtcaaaatgggtgaatgagacttatacataaagacaggctttctcccctatagttaggaggtgaactcacacatgtgtacctgaacattcttgcttttgaggagacag

SEQ ID NO: 137012 - DNA, 120 bp, Artificial Sequence
  ENSG00000103365_32 (sequence is synthesized)
actcccagtggtactactatgcttaggtgttggacaggataggggtaggaggagaggaggcaggctgctgtcctgaaagtggctgtggtttatggcatcactcccttctaatcagcaagt

SEQ ID NO: 137013 - DNA, 120 bp, Artificial Sequence
  ENSG00000103365_33 (sequence is synthesized)
tttatggcatcactcccttctaatcagcaagtccagtggccacttagagcccagctcctacctcttcattcacttaacaagtagttattggctgtgcacagtggctcacgcctataatcc

SEQ ID NO: 137014 - DNA, 120 bp, Artificial Sequence
  ENSG00000103365_34 (sequence is synthesized)
ttgagcccaggatttcaagtccagcctgggctacatagtgagaccgtgtctctgtttttttaaaagctagttgttgaccagctaccctgagccaggcaccaccctgaaggagcttctttt

SEQ ID NO: 137015 - DNA, 120 bp, Artificial Sequence
  ENSG00000103365_35 (sequence is synthesized)
cctctggggagaagcaaattcatgatgtgtgtgctggagatctggcactcatggccagtgctttccagtatcttgaactcttcgggggtcctgttgacccatttcgtgacctacctccgt

SEQ ID NO: 137016 - DNA, 120 bp, Artificial Sequence
  ENSG00000103365_36 (sequence is synthesized)
gactgctctttttcctctgtctcttaagtgtgatggttttccagagtccaatcctcaggactttcccgtccacacacaggcctggtagtcaggtggctctaaaccattaggtgggttgta

SEQ ID NO: 137017 - DNA, 120 bp, Artificial Sequence
  ENSG00000103365_37 (sequence is synthesized)
gacctctctcaagctgccacctccttgctgtcgccagatcgtatttcagtctgtcaggggttatctgtatctggaggttccactgttgcttcagtctcagttacttagaatggaacccag

SEQ ID NO: 137018 - DNA, 120 bp, Artificial Sequence
  ENSG00000103365_38 (sequence is synthesized)
agtcctgcccctttccacctacatgctcttacttgaaagcacctgagacttattgggtccctgattcctgcttcgtctgtatccgcagagtagttgcatgtcatttggcctgttttctaa

SEQ ID NO: 137019 - DNA, 120 bp, Artificial Sequence
  ENSG00000103365_39 (sequence is synthesized)
ataatcccacatcatgtcctccctgcacttacattgccactgctctgatttgggcttttttttttttgggacaatgcctctgtcccaattctgagtaacagctctggttcttgccactac

SEQ ID NO: 137020 - DNA, 120 bp, Artificial Sequence
  ENSG00000103365_40 (sequence is synthesized)
cagagttctctagcaaatctgagcatctgacagggtgaaaaattctgaatggcttcctgatgcctgactttatgggatcaaattcaagttgcacgctggcactcagtgcccttctggtat

SEQ ID NO: 137021 - DNA, 120 bp, Artificial Sequence
  ENSG00000103365_41 (sequence is synthesized)
catctgccaagaccagggcctgcttcaccacagccacaataaagtcctttcaagccctgataatgccatgttttgtcctaaccttttgctgcagttaattactcttcctattatcttcca

SEQ ID NO: 137022 - DNA, 120 bp, Artificial Sequence
  ENSG00000103365_42 (sequence is synthesized)
tgaacttaagactgggcaaaaatgtttccttatctgtgagccactctgaacacaaacaggtcatgaagatagtgttgaaaacaataaatgacaaccaaaagaaaagtgaatattacctag

SEQ ID NO: 137023 - DNA, 120 bp, Artificial Sequence
  ENSG00000103365_43 (sequence is synthesized)
tacaaatagtgtaaattgagacagaaaatgttaaagctagaaagcaagggcaatattctagaatacaaatagtgcttgcctactacaatattaatcccaaatcctttaaatatacccatt

SEQ ID NO: 137024 - DNA, 120 bp, Artificial Sequence
  ENSG00000103365_44 (sequence is synthesized)
aatcccaaatcctttaaatatacccattatagaagatgcttacccagcgtcaagagtataaaagtgggtttgtttgttttcttgagacagggctttgctctgttgcccaggctggagtgc

SEQ ID NO: 137025 - DNA, 88 bp, Artificial Sequence
  ENSG00000103365_45 (sequence is synthesized)
tggcccagctaatgttgcagtttttcgtaaagactggatctctgtgttacccaggctggtctcctgggctcaagcagtcctcctgcct

SEQ ID NO: 137026 - DNA, 75 bp, Artificial Sequence
  ENSG00000103365_46 (sequence is synthesized)
tgaccccagtttgttttaaagccaagcgatgcaccaagatgtttgtgtgcacatctgacagtggtaatctttggg

SEQ ID NO: 137027 - DNA, 120 bp, Artificial Sequence
  ENSG00000103365_47 (sequence is synthesized)
aagatgtttgtgtgcacatctgacagtggtaatctttgggtcagggaattatagataaattttctttaaattttttctgagctttctaaaatcagctgaaaataaaaccttattttttta

SEQ ID NO: 137028 - DNA, 120 bp, Artificial Sequence
  ENSG00000103365_48 (sequence is synthesized)
cggggctggagcgatggcggcgaccgcggtggcggcggctgtggcgggaaccgagtcggcccagggtcccccgggcccggcagcgtcgctggagctgtggctcagtgaccacagacccaa

SEQ ID NO: 137029 - DNA, 120 bp, Artificial Sequence
  ENSG00000103365_49 (sequence is synthesized)
ctctttatgccttaacggtgagtgctggagatgtgcatgaaccactgtggggagaagttccacagcgaggtggccaaatttcgtttcctgaacgaactgatcaaagtgttgtccccaaag

SEQ ID NO: 137030 - DNA, 120 bp, Artificial Sequence
  ENSG00000103365_50 (sequence is synthesized)
ccccaatgggtaaggtaacttctcacacacatagttgactctgggggcaccccacactgagtgtaggcctttgtctctcaagactgttttagggttaagctctctaggcaaggatcggtg

SEQ ID NO: 137031 - DNA, 80 bp, Artificial Sequence
  ENSG00000103365_51 (sequence is synthesized)
tgacagagtgagagactctgtctcaaaaaaatagaaatgcagtcaggctggcattcattctctcattttcccctataatc

SEQ ID NO: 137032 - DNA, 120 bp, Artificial Sequence
  ENSG00000103365_52 (sequence is synthesized)
agtcaggctggcattcattctctcattttcccctataatcctgagaacattatttttctaaaattagcaaattcatgtgggggaaaaaaaacacaggatagctcacttgcaactggcagt

SEQ ID NO: 137033 - DNA, 120 bp, Artificial Sequence
  ENSG00000103365_53 (sequence is synthesized)
aacctttcctgtccttgtgctatagagagccgagaggcgctttgcttccacacagatccttttcactggagaagggaggtcccctgagaggtttaccttcacagcaggttggaggaggga

SEQ ID NO: 137034 - DNA, 120 bp, Artificial Sequence
  ENSG00000103365_54 (sequence is synthesized)
gatctgggccagggtccccacccttcttcctcctgtttctcgtctgtttcttcagggcagcattgagtctactgtgggagaaggaaaggaaggttttatttcatttgcccttcttagacc

SEQ ID NO: 137035 - DNA, 120 bp, Artificial Sequence
  ENSG00000103365_55 (sequence is synthesized)
ctcagggttgctagtttaggtctttgtatatgtttgagtgtttagatgttggtgactaatttgcagtgttgaaagccacagtatggacgagaggaggggtctgcaggctcagcttgcctc

SEQ ID NO: 137036 - DNA, 120 bp, Artificial Sequence
  ENSG00000103365_56 (sequence is synthesized)
ttgagtgccagtgggtgacatccggctggtcttgggcactggataccagatctctgcctctggggaggggttggttctttagccactttctcctctcaaagggtctccttaaaaggtggg

SEQ ID NO: 137037 - DNA, 120 bp, Artificial Sequence
  ENSG00000103365_57 (sequence is synthesized)
gtgacctcagggtttgacatacctcactaagctatttcctgggcataaacctcaggcagttatagcaagattgaacaggggacatttttttcttgatctgaaaacgtcctcttcatcaaa

SEQ ID NO: 137038 - DNA, 120 bp, Artificial Sequence
  ENSG00000103365_58 (sequence is synthesized)
acttcagtgtcctcataggcttgaggcagggttagccttggttccagcgcagtctccagcaagtgattaccagcctggaggggagcctgggaccactggctttccaccttctcctggggg

SEQ ID NO: 137039 - DNA, 120 bp, Artificial Sequence
  ENSG00000103365_59 (sequence is synthesized)
ttttctgttacagatatggaaaccgaggttctgaaaagttaactaaaacttccgaggttatagtacgaggcaaaaccaagatttaaactcagatctgtgccgatccagagtccaagctta

SEQ ID NO: 137040 - DNA, 120 bp, Artificial Sequence
  ENSG00000103365_60 (sequence is synthesized)
actctgatctactgagtgttgtcagagcatctgtttctaagacattaagaatggttaaaaggagcttcttggctcatggtcaagctgcctttctctttatctctgcagttggccaacagc

SEQ ID NO: 137041 - DNA, 120 bp, Artificial Sequence
  ENSG00000103365_61 (sequence is synthesized)
acaaagccacagacccaagcatgtcggaacaggattggtcagctatccagaatttctgtgagcagccccacacatgcgccctggctactggcccacaagatccagtctccgcaagagaag

SEQ ID NO: 137042 - DNA, 120 bp, Artificial Sequence
  ENSG00000103365_62 (sequence is synthesized)
agatggctaagctgtgcctgcgtttgaattctcataaatgcttgcatacaggagctagagacaaaagaaatgatcttccttagtggttcctagtgccaggtcagctgtatcagaatcacc

SEQ ID NO: 137043 - DNA, 120 bp, Artificial Sequence
  ENSG00000103365_63 (sequence is synthesized)
gaagctctttatgccttaacgcctggaggggagcctgggaccactggctttccaccttctcctgggggtcctgtgtctgtgcaggtgctggagatgtgcatgaaccactgtggggagaag

SEQ ID NO: 137044 - DNA, 120 bp, Artificial Sequence
  ENSG00000103365_64 (sequence is synthesized)
tctagtcaggactaatcacggtgtttcagtgcggagtgccaagagtcctatcctgacgtcaggctctgggtgtcaacctctgacttattctgcagatgctctgtcatttacttggagctc

SEQ ID NO: 137045 - DNA, 120 bp, Artificial Sequence
  ENSG00000103365_65 (sequence is synthesized)
ttggaccaggaacttgtatcctgggatatgagacacttggccaatgtgagataacatccatcccttttcaagggaagtggggccctactgattaacaggcaccccacagtcacaggggaa

SEQ ID NO: 137046 - DNA, 120 bp, Artificial Sequence
  ENSG00000103365_66 (sequence is synthesized)
ggggcctgtcctgaaaggaaaagattcgagacagacaaaaatatgacctgcagtctctacttcttacggtagtcctatgggcaatgttctgctactacctctgttttataagttaaccca

SEQ ID NO: 137047 - DNA, 120 bp, Artificial Sequence
  ENSG00000103365_67 (sequence is synthesized)
aggctcagaaattaaatattttactcaaggtcacagagctagtgagaagcagttagaattcaacccaagatgtgccctggctgttgatgctgcgtctcagatgccggttattgaccacac

SEQ ID NO: 137048 - DNA, 120 bp, Artificial Sequence
  ENSG00000103365_68 (sequence is synthesized)
aactcccgatccattctgtgtgtggaaggaaaggcctcttagatccttttatcaattagtgggagtctgtctgcttgggctcccataggtgcctcggggtaccacgtttaagagggccat

SEQ ID NO: 137049 - DNA, 120 bp, Artificial Sequence
  ENSG00000103365_69 (sequence is synthesized)
ttcctcttggaggggtgttggggaggtccagctccccctcacctgatctccatcctagaagctgtggttaggaatgagttacatgttggttttcttcccctgatagtcaatgagagtgaa

SEQ ID NO: 137050 - DNA, 120 bp, Artificial Sequence
  ENSG00000103375_0 (sequence is synthesized)
agcaggtcctgtccctaggagataagagtatcttgcacagcaggtgcaggtttcccagcagctcaggcaagagtccgatgtttgtgccatctgatcctgatgtctggagagatagccatg

SEQ ID NO: 137051 - DNA, 120 bp, Artificial Sequence
  ENSG00000103375_1 (sequence is synthesized)
tgtgagcctgaatttggcaatgacaaggccagggagccgagcgtgggtggcaggtggcgagtgtcctggtacgaacggtttgtgcagccatgtctggtcgaactgctgggctctgctctc

SEQ ID NO: 137052 - DNA, 120 bp, Artificial Sequence
  ENSG00000103375_2 (sequence is synthesized)
ttcatcttcatcgggtgcctgtcggtcattgagaatgggacggacactgggctgctgcagccggccctggcccacgggctggctttggggctcgtgattgccacgctggggaatatcagt

SEQ ID NO: 137053 - DNA, 120 bp, Artificial Sequence
  ENSG00000103375_3 (sequence is synthesized)
ggtggacacttcaaccctgcggtgtccctggcagccatgctgatcggaggcctcaacctggtgatgctcctcccgtactgggtctcacagctgctcggggggatgctcggggctgccttg

SEQ ID NO: 137054 - DNA, 120 bp, Artificial Sequence
  ENSG00000103375_4 (sequence is synthesized)
gccaaggcggtgagtcctgaggagaggttctggaatgcatctggggcggcctttgtgacagtccaggagcaggggcaggtggcaggggcgttggtggcagagatcatcctgacgacgctg

SEQ ID NO: 137055 - DNA, 120 bp, Artificial Sequence
  ENSG00000103375_5 (sequence is synthesized)
cctggctgtatgcatgggtgccatcaatgagaagacaaagggccctctggccccgttctccatcggctttgccgtcaccgtggatatcctggctgggggccctgtgtctggaggctgcat

SEQ ID NO: 137056 - DNA, 120 bp, Artificial Sequence
  ENSG00000103375_6 (sequence is synthesized)
gaatcccgcccgtgcttttggacctgcggtggtggccaaccactggaacttccactggatctactggctgggcccactcctggctggcctgcttgttggactgctcattaggtgcttcat

SEQ ID NO: 137057 - DNA, 120 bp, Artificial Sequence
  ENSG00000103375_7 (sequence is synthesized)
tggagatgggaagacccgcctcatcctgaaggctcggtgaagcagagctcgtgggattcctgctgctccaggtgtcctcagctcacctgtcccagactgaggacaggggagttcctgcat

SEQ ID NO: 137058 - DNA, 120 bp, Artificial Sequence
  ENSG00000103375_8 (sequence is synthesized)
ttcctgccagggcagaggcccagaggagcgaccccctgcttccactgcttgggcctgctttctcagatagactgactgctgaggaggctctaggttcttggaattcctttgtgctcatca

SEQ ID NO: 137059 - DNA, 120 bp, Artificial Sequence
  ENSG00000103375_9 (sequence is synthesized)
gagaccccagcctggggaacacgctgcccgcactgcccagagagcagtgcaaacaccacaacacgagcgtgtttcttgagaggaatgtccccgagttggacaaggaggctgtttctgcac

SEQ ID NO: 137060 - DNA, 120 bp, Artificial Sequence
  ENSG00000103375_10 (sequence is synthesized)
atcagctcatttcccgcaccccatttcttgcttgattgctttgttgggggcctggccacttccttgcttctcaagctgacaattctcactttgcaataaatagtccagtgtttccttcca

SEQ ID NO: 137061 - DNA, 120 bp, Artificial Sequence
  ENSG00000103381_0 (sequence is synthesized)
gagatcaaagggcgtcgcccaaagcgggacaggtccagcggttgttctgtgtgaagtcgcgcggcttccacccacgcagtgttctaagtgaaggccagaaactcgctcgccatgtcggct

SEQ ID NO: 137062 - DNA, 120 bp, Artificial Sequence
  ENSG00000103381_1 (sequence is synthesized)
gcagaggcggggggtgttttccacagagccaggggcaggaccctggccgcgtttcccgcagaaaaggaaagcgaatggaaaggcccattctacttcatcctgggcgcagacccacagttt

SEQ ID NO: 137063 - DNA, 120 bp, Artificial Sequence
  ENSG00000103381_2 (sequence is synthesized)
gggctgatcaaggcctggtccactggggactgtgacaatggcggtgacgaatgggaacaggagatccgtctaactgagcaagccgtccaggccatcaacaagctgaaccccaaacccaaa

SEQ ID NO: 137064 - DNA, 120 bp, Artificial Sequence
  ENSG00000103381_3 (sequence is synthesized)
ttcttcgttctgtgcggcgacctcatccacgccatgccagggaagccgtggcggacggagcagacggaggacctgaagcgagtgcttagggcagtggacagggccatcccactggtcctt

SEQ ID NO: 137065 - DNA, 120 bp, Artificial Sequence
  ENSG00000103381_4 (sequence is synthesized)
gtcagcggcaaccatgacattggcaacacccccacggccgagaccgtcgaggagttctgccggacttggggagatgactacttcagcttctgggtcgggggcgtcctgttcctggtcctc

SEQ ID NO: 137066 - DNA, 120 bp, Artificial Sequence
  ENSG00000103381_5 (sequence is synthesized)
aactcccagttctacgagaacccctccaaatgccccagcctgaagcaggctcaggaccagtggctggacgagcagctgagcatcgcgaggcagcggcactgccagcatgccatcgtcttc

SEQ ID NO: 137067 - DNA, 120 bp, Artificial Sequence
  ENSG00000103381_6 (sequence is synthesized)
cagcacatcccgctgttcctggagagcatcgacgaggacgacgactactacttcaacctcagcaagtccactcggaagaagttggcagacaagttcatccacgcaggtgtcaaagtcgtg

SEQ ID NO: 137068 - DNA, 120 bp, Artificial Sequence
  ENSG00000103381_7 (sequence is synthesized)
ttctcaggccactaccacaggaatgccgggggtacctaccagaacctcgacatggtggtgtcatctgccattggatgccagctgggcagagacccccacgggctccgagtcgtggtggtc

SEQ ID NO: 137069 - DNA, 120 bp, Artificial Sequence
  ENSG00000103381_8 (sequence is synthesized)
accgccgagaaaattgttcaccgatactacagtctagatgagctgagtgagaaaggaatagaagacgatctcatggatttgatcaagaaaaaatgacgctccttcccgttcccgttcact

SEQ ID NO: 137070 - DNA, 120 bp, Artificial Sequence
  ENSG00000103381_9 (sequence is synthesized)
tttcacttgcactatttttttattttgccagaaacagcagctgcacacaacctcttgctgaaatataaaaatagcccaggcaggtttgtgaatttatgtccttttgcataaatcagagag

SEQ ID NO: 137071 - DNA, 120 bp, Artificial Sequence
  ENSG00000103381_10 (sequence is synthesized)
ctggggccctgtcctgaattatattcaaaatagaactgcatttcctttaaaatggagcgaatgatcctggaaatcagtttttaaaatattagactatctctgcatggatgtttgaataaa

SEQ ID NO: 137072 - DNA, 120 bp, Artificial Sequence
  ENSG00000103381_11 (sequence is synthesized)
ttctcctaatgctgtgtttctcaactccacttttgaattggattgtattctggttagcatatggtcaaagtctgcctatcgacctcaattccaatctgacagccaagtatgatctttgat

SEQ ID NO: 137073 - DNA, 120 bp, Artificial Sequence
  ENSG00000103381_12 (sequence is synthesized)
aattccttaaacaaactacacctgattgtattaaattgtggtcacgattcccaaaacgctaggcaaaacaaagttcatctcctttcctttccagcggaacgaacagctgtctcccttgtt

SEQ ID NO: 137074 - DNA, 120 bp, Artificial Sequence
  ENSG00000103381_13 (sequence is synthesized)
gtgagagccatgcagacttattttgacaaggagccaagtaggcaccatttactgttcaattctgagacttctgatgataggaacagaatgcagttgatacagctcggagcttaaatttgc

SEQ ID NO: 137075 - DNA, 120 bp, Artificial Sequence
  ENSG00000103381_14 (sequence is synthesized)
cttcctgggtgcctagaaaagtcacctttgcacataaattggccatttctgaaaatctcctccaagagactgaaaccaaagctctaaaacgccgcttcttcagtctctggggagcacgtt

SEQ ID NO: 137076 - DNA, 120 bp, Artificial Sequence
  ENSG00000103381_15 (sequence is synthesized)
gagttggttcacatccacattctggctgtgtagccactccacagatgggtggtctcttgggatcagaatgcccctccactcatgagactcttcattttgtccactttgacaggaaaagtg

SEQ ID NO: 137077 - DNA, 120 bp, Artificial Sequence
  ENSG00000103381_16 (sequence is synthesized)
ggaatgtatgcagagctctcaaaagaaacaaaaaaggccaaaacggtgccttcagccacatcctctgaattggccctgacttggactaaatgcactaatgcaaaatcccttgacaaaagc

SEQ ID NO: 137078 - DNA, 120 bp, Artificial Sequence
  ENSG00000103381_17 (sequence is synthesized)
gcataggttatttcaaaccagcattgttttttatgtaacctgttttaccgcatcttctcagcagcttctgaccactgctcaattttctcctttacagccattgttctggtggacaaataa

SEQ ID NO: 137079 - DNA, 120 bp, Artificial Sequence
  ENSG00000103381_18 (sequence is synthesized)
cctaggtactccaaatcctggcaggaaaaatatacagcattatgaaacagcactcagtaatcctaaaatgatttccaaagctggttacacatgacctgcaaagtctattaaattaaaaga

SEQ ID NO: 137080 - DNA, 120 bp, Artificial Sequence
  ENSG00000103381_19 (sequence is synthesized)
ctttctcattacagagtttagtcaacgtagcaaaaccatgggaaattaaatggaaagataattaaatatgtaaattcataaggaacaaaagacgagaagttaattatacaataggctggt

SEQ ID NO: 137081 - DNA, 120 bp, Artificial Sequence
  ENSG00000103381_20 (sequence is synthesized)
gacaccagagttcattgttatgtgccacaagaaaattaaattttttaaaaaactagaacgctcttcttttagtgttttgctgaaatcctgttttgtatttgtttctttacaacaggtgta

SEQ ID NO: 137082 - DNA, 120 bp, Artificial Sequence
  ENSG00000103381_21 (sequence is synthesized)
tgttttgtatttgtttctttacaacaggtgtaggtataggaggtcaagaaaaggagttcggtaaagggcatagctaataacaaccacacattgggccaggcacagtggcttacgcctgta

SEQ ID NO: 137083 - DNA, 120 bp, Artificial Sequence
  ENSG00000103381_22 (sequence is synthesized)
ccacacacacacacattgagacttgagatgtggtgacacttggatcataaacagagggcttcgattccaggatgggggttcctccagggggaaatgaaaaggagctctcactctgttctt

SEQ ID NO: 137084 - DNA, 120 bp, Artificial Sequence
  ENSG00000103381_23 (sequence is synthesized)
gtggcacatgggtttgcagaaggataatggagataattgaaagtaatgaaaatgaaaccaaatctccttccccaaaaacttaaaagaactgattcaaaagtaccccaagaatatgcaaag

SEQ ID NO: 137085 - DNA, 120 bp, Artificial Sequence
  ENSG00000103381_24 (sequence is synthesized)
aaaagggaatcacatcaacagatgattggataaagaacatgtggtatgtatacataatggaatactattcagccactaaaaagaatgaaaccatgtcttttgcagcaacctggatggaac

SEQ ID NO: 137086 - DNA, 120 bp, Artificial Sequence
  ENSG00000103381_25 (sequence is synthesized)
tggaggctgttatcttaagtgaaataacttagaagtagaaagtcgaatacttcatgttctcactcataaatgggagctacataaagtgtacccatgaacatagagtgtggaacaaacatt

SEQ ID NO: 137087 - DNA, 120 bp, Artificial Sequence
  ENSG00000103381_26 (sequence is synthesized)
ggagactcagaagggtgggaggagggtaagggatgagaaagtacctgatgggtacagtgtacacttttctggtgttggttgcaggaaaagcctggacttcaccacttcgcaatatatccg

SEQ ID NO: 137088 - DNA, 120 bp, Artificial Sequence
  ENSG00000103381_27 (sequence is synthesized)
tgtaacaaaactgcacttgtacgccttatatttatacaaatttaattttttaaaagggaagagagaatcatattaatttctcaccactttttaagtaagcaaacagcagtatttcccaga

SEQ ID NO: 137089 - DNA, 120 bp, Artificial Sequence
  ENSG00000103381_28 (sequence is synthesized)
ggcaagaggttcagcaagaagtcaggaaatgtttttgtagataagcatctatcattctgatgggccatgactagtgtgttcacttgtaattcctttgcctttaaaaaaagagaatgatat

SEQ ID NO: 137090 - DNA, 120 bp, Artificial Sequence
  ENSG00000103381_29 (sequence is synthesized)
caaaaaataagtgccttatactgtgaaaaacgataaaaggacttcctgattctaagtgctatggttttgaatgtttattatgtgttttaagtgctttggctcagaaaggtgggggtcacg

SEQ ID NO: 137091 - DNA, 120 bp, Artificial Sequence
  ENSG00000103381_30 (sequence is synthesized)
tggccaaggtcgcctaactcatcttggtggagaaagaacggatgtagatggcccaaggcttgagtccatgctccataacactgtcctgtcttggaaaacgtttctcagaggtgaaaggtt

SEQ ID NO: 137092 - DNA, 120 bp, Artificial Sequence
  ENSG00000103381_31 (sequence is synthesized)
gcaccagctcagccagtggcaacacactgagtacggtattcagcaccttggacagcgttagctggaggcccagggatttcctcccagctctgcaaagcctagaccagaccctgattgcac

SEQ ID NO: 137093 - DNA, 120 bp, Artificial Sequence
  ENSG00000103381_32 (sequence is synthesized)
caggttcagggggcagaagcttgtccaaagagcagatggttccagggggaggatttttactgggggagatttagaaaccgaactgaaccataatgagtcacgggacacagccctgtctgc

SEQ ID NO: 137094 - DNA, 120 bp, Artificial Sequence
  ENSG00000103381_33 (sequence is synthesized)
agcagtaactgtccgcagctctagctgctccatgtctggagttaccaccacagggtgtaggaaaccaccagctgtctcaaggcaaggaatgtcacctaatgctcccctttccaattaatc

SEQ ID NO: 137095 - DNA, 120 bp, Artificial Sequence
  ENSG00000103381_34 (sequence is synthesized)
actttaattggaggaaaaaacaaaaacacaaggacatgttacgggggaaggttttttaaagtgatctcaaattggattgcaaaggctcaagtgactttgggaatggggctggggagatga

SEQ ID NO: 137096 - DNA, 120 bp, Artificial Sequence
  ENSG00000103381_35 (sequence is synthesized)
tcatttactttttacaataaataattttatctcacatctttagtcaagtttctcctaagtttggggagaatggggaaaaaatgtagtaagctttatgggactagcaacagaacgttttat

SEQ ID NO: 137097 - DNA, 120 bp, Artificial Sequence
  ENSG00000103381_36 (sequence is synthesized)
cctattttgtgattttcagtattaagagattattgatcacttgcagagttacaaggcaagcactagtttaaatctgaattagactagggccattgaccttatatacctgtaaaagacact

SEQ ID NO: 137098 - DNA, 120 bp, Artificial Sequence
  ENSG00000103381_37 (sequence is synthesized)
acggtgtatacaactgtagaaacaatatacacatagtagtttaatattacagtctgtattccaatgcagaatcttttgagaaaaggttgccaaaacatcatttgcatttacttgaaccct

SEQ ID NO: 137099 - DNA, 73 bp, Artificial Sequence
  ENSG00000103381_38 (sequence is synthesized)
ccaaccttcccacctcagcctcccaaattagctgggactataggctcgtgtcaccacatctaattttttattt

SEQ ID NO: 137100 - DNA, 120 bp, Artificial Sequence
  ENSG00000103381_39 (sequence is synthesized)
ccacctcagcctcccaaattagctgggactataggctcgtgtcaccacatctaattttttatttttatatttgtggagttgaaggtcttgctctgttacccaggctggtcttgaactcct

SEQ ID NO: 137101 - DNA, 120 bp, Artificial Sequence
  ENSG00000103381_40 (sequence is synthesized)
tcccaaagtgttgggattacaggcgttggccactgtacccagccttacttgaactcttaatacttattcccaagtggtacctaaaatggttttgtgcagtcacaatattaggtagcaata

SEQ ID NO: 137102 - DNA, 120 bp, Artificial Sequence
  ENSG00000103381_41 (sequence is synthesized)
aatattatattgagctggaggaaaaagaagatttaggagtaaattgccaaggcaagttctgttaaaagctttctgtaatagacatcagggattttttttattcaggtaacctcaacagtt

SEQ ID NO: 137103 - DNA, 120 bp, Artificial Sequence
  ENSG00000103381_42 (sequence is synthesized)
ttgattgcacatgtaacatagtacttgacaggtaatactgatttttataacttcataaaatattctcaagccatggaggagctcttatgtattttttaatgagtacacacacacacacac

SEQ ID NO: 137104 - DNA, 120 bp, Artificial Sequence
  ENSG00000103381_43 (sequence is synthesized)
acacacacacacacacacacatatagtaaaagtggaggattcttttcttggaataatgatttctagcatttatctagaaaagattttgctgactaaattttccttttcctccagtggatt

SEQ ID NO: 137105 - DNA, 120 bp, Artificial Sequence
  ENSG00000103381_44 (sequence is synthesized)
tttaaacatcagtgcatgcacataaatacagattggatttttcctttaggctttatctatgtaaatgaagtcgattaaatgtgaataatcatgttacccttcattattctgaccattatg

SEQ ID NO: 137106 - DNA, 120 bp, Artificial Sequence
  ENSG00000103381_45 (sequence is synthesized)
tttgagaagtagatttcttcactaaaggggctttgcagcacacttagaatgagtgagccactgtgcctctctagaaactggcttcttgtcatcatttcaacatccactcaaacgctcacc

SEQ ID NO: 137107 - DNA, 120 bp, Artificial Sequence
  ENSG00000103381_46 (sequence is synthesized)
gtttggctctgtgtctccacccaaattggtttggctctgtgtccccactgaaatctcatctcgaattgtaatccccataatccccatgtgtcaagggacggacctggtgggaggtaattg

SEQ ID NO: 137108 - DNA, 120 bp, Artificial Sequence
  ENSG00000103381_47 (sequence is synthesized)
aagggacggacctggtgggaggtaattggatcatggaggcagtttctcccatgctattcttgtgatagtgagttctcatgacactgatggttttgtgtttgatagctccttcacactctt

SEQ ID NO: 137109 - DNA, 85 bp, Artificial Sequence
  ENSG00000103381_48 (sequence is synthesized)
acactgatggttttgtgtttgatagctccttcacactctttctttcctgttgccatgtaagacatgcctgcttccccttccacca

SEQ ID NO: 137110 - DNA, 120 bp, Artificial Sequence
  ENSG00000103381_49 (sequence is synthesized)
gtgcggcgacctcatccacgccatgccaggtaagactcgggtcatcgcttgtgaccttttctccttcagccggtcatgactgcatttgggcaggagaaaaaaagattttgcttcgaaggc

SEQ ID NO: 137111 - DNA, 120 bp, Artificial Sequence
  ENSG00000103381_50 (sequence is synthesized)
atctttgctcagtcatggaccgttctttcgcttcatgattgttgcagtatcattgaacatcagaaagtgcacactcatgttatatttagagtttggcgagattaatcacagtaattaggc

SEQ ID NO: 137112 - DNA, 120 bp, Artificial Sequence
  ENSG00000103404_0 (sequence is synthesized)
atgtccaaggtaacggcgcctgggtccgggccgccggcggcggcgagcgggaaggagaagcgctccttcagcaagcggctgtttcggagcggccgcgctggcggcggcggcgcggggggc

SEQ ID NO: 137113 - DNA, 120 bp, Artificial Sequence
  ENSG00000103404_1 (sequence is synthesized)
cccggggcgtccgggccggccgcgccttcctcgccctcctcgccctcctctgcacgctcggtgggcagcttcatgagccgcgttctcaagacgctgtccacgctctcgcaccttagctct

SEQ ID NO: 137114 - DNA, 120 bp, Artificial Sequence
  ENSG00000103404_2 (sequence is synthesized)
cgttctcaagacgctgtccacgctctcgcaccttagctctgagggcgccgccccagaccgcggcggcctccgcagctgcttcccgcccgggccggccgccgcgcccacgccgccgccgtg

SEQ ID NO: 137115 - DNA, 120 bp, Artificial Sequence
  ENSG00000103404_3 (sequence is synthesized)
gccgagccggtgcccggcgtggcggggctccgcaaccacggcaacacgtgcttcatgaacgccacgctgcagtgcctcagcaacaccgagctcttcgccgagtacctggcgctgggccag

SEQ ID NO: 137116 - DNA, 120 bp, Artificial Sequence
  ENSG00000103404_4 (sequence is synthesized)
ggggcggcccgagccctcgcctgacccggagcagcctgcgggccgcggcgcgcagggccagggcgaggtcactgagcagctggcgcacctggtgcgggccctctggaccctggagtacac

SEQ ID NO: 137117 - DNA, 120 bp, Artificial Sequence
  ENSG00000103404_5 (sequence is synthesized)
gagtacaccccgcagcacagccgcgacttcaagactattgtgtcaaagaatgcactgcagtaccggggaaattcccaacatgatgcccaggagtttctgctgtggcttttggaccgagtt

SEQ ID NO: 137118 - DNA, 120 bp, Artificial Sequence
  ENSG00000103404_6 (sequence is synthesized)
catgaagacctcaaccattcagtgaagcagagtggccagcctcctctgaagccaccatcagagactgatatgatgcctgagggaccatctttccctgtctgtagcacttttgtacaagaa

SEQ ID NO: 137119 - DNA, 120 bp, Artificial Sequence
  ENSG00000103404_7 (sequence is synthesized)
ctctttcaagcgcaatacagatcttctttgacgtgtcctcattgtcagaaacagagcaacacttttgatcctttcctttgcatttctttgccaattcctctgccccacacaaggcctctc

SEQ ID NO: 137120 - DNA, 120 bp, Artificial Sequence
  ENSG00000103404_8 (sequence is synthesized)
tatgtcactgtagtgtatcaaggcaaatgttctcactgcatgaggattggtgtggccgtacctctgtctgggactgtcgccagacttcgggaagcagtgtctatggaaacaaagatcccc

SEQ ID NO: 137121 - DNA, 120 bp, Artificial Sequence
  ENSG00000103404_9 (sequence is synthesized)
actgatcagattgtgttaacagaaatgtactatgatgggttccatcgttccttttgtgatacagacgacctggaaacagtccatgaaagcgactgcatttttgcctttgagactcccgaa

SEQ ID NO: 137122 - DNA, 120 bp, Artificial Sequence
  ENSG00000103404_10 (sequence is synthesized)
atatttaggcctgaaggaattctcagtcaaagaggaattcatttaaacaacaacctaaaccacttgaaatttggcttggattatcatagactgtcttctcctacacaaacagcagcaaag

SEQ ID NO: 137123 - DNA, 120 bp, Artificial Sequence
  ENSG00000103404_11 (sequence is synthesized)
caggggaaaatggattctcccacatcaagagcaggcagcgacaagattgtcctgttggtgtgtaaccgagcctgcactgggcaacaagggaaaagatttggactgccttttgtgctgcac

SEQ ID NO: 137124 - DNA, 120 bp, Artificial Sequence
  ENSG00000103404_12 (sequence is synthesized)
ttagagaagacaatagcttgggaccttctgcagaaggaaatcttggagaagatgaagtatttcttgaggcccacggtttgcattcaggtgtgtccattcagcttgcgtgtggtcagtgtt

SEQ ID NO: 137125 - DNA, 120 bp, Artificial Sequence
  ENSG00000103404_13 (sequence is synthesized)
gttggaataacatatttgctgccccaggaggagcagcccttgtgccacccaatagtagaaagggcattaaaatcttgtggaccaggtggcactgctcatgtgaaattagtagtcgagtgg

SEQ ID NO: 137126 - DNA, 120 bp, Artificial Sequence
  ENSG00000103404_14 (sequence is synthesized)
gacaaggagacaagagatttcttatttgtaaatactgaggatgagtatattcctgatgcagaaagtgttcgtctgcaaagggagcgtcatcatcagcctcaaacctgcactttatcccag

SEQ ID NO: 137127 - DNA, 120 bp, Artificial Sequence
  ENSG00000103404_15 (sequence is synthesized)
tgtttccaactgtacaccaaagaggagcggcttgcccccgatgatgcctggcgttgcccacactgtaagcagctgcagcagggaagcattacgttaagcctctggactctgcctgatgtg

SEQ ID NO: 137128 - DNA, 120 bp, Artificial Sequence
  ENSG00000103404_16 (sequence is synthesized)
cttattatacatctaaagagatttcggcaggaaggagacaggcgcatgaaacttcagaacatggtcaaattccccttgactggcctggacatgacacctcacgtggttaagaggagccag

SEQ ID NO: 137129 - DNA, 120 bp, Artificial Sequence
  ENSG00000103404_17 (sequence is synthesized)
agcagctggagtttgccatcgcattggtccccgtggagacggccctatggactcgggagggaccctgaggactacatctatgacctgtatgctgtgtgcaatcaccatggcaccatgcaa

SEQ ID NO: 137130 - DNA, 120 bp, Artificial Sequence
  ENSG00000103404_18 (sequence is synthesized)
ggggggcactacacagcgtactgtaagaactctgtggacggcctctggtactgcttcgatgacagcgatgtgcagcagctgtcagaagatgaggtctgcacgcagacagcatacatcctc

SEQ ID NO: 137131 - DNA, 120 bp, Artificial Sequence
  ENSG00000103404_19 (sequence is synthesized)
ttctaccagaggcggacagccatcccgtcatggtcagccaacagctcggtggcaggctccacaagttcttccctgtgtgaacactgggtgagccggctcccgggcagcaagccagccagc

SEQ ID NO: 137132 - DNA, 120 bp, Artificial Sequence
  ENSG00000103404_20 (sequence is synthesized)
gtgacctctgcagcttcctccagacgcacctccctggcgtcgctctctgagtccgtggagatgactggagaaaggagtgaagatgatggaggcttttcaactcgaccatttgtgagaagt

SEQ ID NO: 137133 - DNA, 120 bp, Artificial Sequence
  ENSG00000103404_21 (sequence is synthesized)
gtccagcgtcagagtttgtcatccagatcttctgtcaccagccccttggccgtcaatgaaaattgcatgagaccttcatggtccctgtctgctaagctgcagatgcgctccaattctcca

SEQ ID NO: 137134 - DNA, 120 bp, Artificial Sequence
  ENSG00000103404_22 (sequence is synthesized)
tcccgattttcaggggattcgccaattcacagctctgcttccaccttggagaagattggggaggcagcagatgacaaggtctccatctcttgctttggtagcttgcggaacctttctagc

SEQ ID NO: 137135 - DNA, 120 bp, Artificial Sequence
  ENSG00000103404_23 (sequence is synthesized)
agttaccaggaaccaagcgacagtcatagtcgccgtgagcacaaggctgtgggccgggcccctctggctgtcatggaaggcgtgttcaaagacgaatcggacacccgcagattgaactcc

SEQ ID NO: 137136 - DNA, 120 bp, Artificial Sequence
  ENSG00000103404_24 (sequence is synthesized)
agtgtcgtagatacacagagcaaacattcagcacaaggggaccgcctgcccccgctctctggtccatttgataacaataatcagatcgcttatgtggatcagagcgactccgtagacagc

SEQ ID NO: 137137 - DNA, 120 bp, Artificial Sequence
  ENSG00000103404_25 (sequence is synthesized)
tctccagtcaaagaggtgaaagcccccagccacccaggctcactcgcaaagaaaccagagagcacaactaagagatcccccagttccaaaggcacttctgagccagagaaaagcttgcgg

SEQ ID NO: 137138 - DNA, 120 bp, Artificial Sequence
  ENSG00000103404_26 (sequence is synthesized)
aaggggagaccagccttggcaagccaggagtcatccctttcaagtacatccccttcttctcctcttcctgtaaaagtctctctaaagccctcccgctcccgcagcaaagcagattcttct

SEQ ID NO: 137139 - DNA, 120 bp, Artificial Sequence
  ENSG00000103404_27 (sequence is synthesized)
tccaggggcagtggacggcattcatcccctgcccctgcccaacccaaaaaggagtcatccccgaaatctcaggactccgtgtcatctccttcgccacagaagcagaagtcagcctcggcc

SEQ ID NO: 137140 - DNA, 120 bp, Artificial Sequence
  ENSG00000103404_28 (sequence is synthesized)
ctcacctacactgcttcctccacatctgccaaaaaggcctcgggccctgccacaaggagccctttcccacctgggaagagcaggacttcagaccacagcttgagtagagagggctccaga

SEQ ID NO: 137141 - DNA, 120 bp, Artificial Sequence
  ENSG00000103404_29 (sequence is synthesized)
caaagcttgggttctgacagagccagcgccacctccacctccaaacccaattcccctcgggtgagccaggcccgagcaggggagggcaggggggccgggaagcacgtgcggagctcctcc

SEQ ID NO: 137142 - DNA, 120 bp, Artificial Sequence
  ENSG00000103404_30 (sequence is synthesized)
atggccagcctgcgctcccccagcacaagcatcaagtctggtttgaagagggacagcaagtctgaggacaaggggctgtccttcttcaaatcagccttgagacagaaggaaacccggcgc

SEQ ID NO: 137143 - DNA, 120 bp, Artificial Sequence
  ENSG00000103404_31 (sequence is synthesized)
tcgacggatcttggcaagacagccttgctctctaaaaaggctggtgggagctctgttaagtctgtctgtaagaacaccggggacgacgaggcagagagaggccaccagcctccagcttcc

SEQ ID NO: 137144 - DNA, 120 bp, Artificial Sequence
  ENSG00000103404_32 (sequence is synthesized)
cagcagccaaatgcaaatacaacgggaaaagagcagcttgtcaccaaggaccctgcttctgccaaacattccctgctgtccgctcgcaaatccaagtcttcccaactagactctggagtt

SEQ ID NO: 137145 - DNA, 120 bp, Artificial Sequence
  ENSG00000103404_33 (sequence is synthesized)
ccctcgtctccgggtggcaggcagtctgcagagaaatcctcaaaaaagttatcttctagcatgcaaacctctgcacggccttctcaaaaacctcagtgatatttctgcaatcaaagtgtt

SEQ ID NO: 137146 - DNA, 120 bp, Artificial Sequence
  ENSG00000103404_34 (sequence is synthesized)
ttatctgtaaagatgtttatttatttagaacccctgccctcccaccaaagcctcctgtgcttttgttttgtacttttttgagtcacgtgcccgactgtgtgtgtgtgtgtgagtgtatgc

SEQ ID NO: 137147 - DNA, 120 bp, Artificial Sequence
  ENSG00000103404_35 (sequence is synthesized)
gtgtgtgtgtctaattcaattgcaaattgttcaaagcgtcgccttattctgccattgaaccaaataacagccataggcaaaacattgacaccaagctaactggaataattgtagacgata

SEQ ID NO: 137148 - DNA, 120 bp, Artificial Sequence
  ENSG00000103404_36 (sequence is synthesized)
cccaggacggtccctttagcaattgtacatatttctttctagagaactctaatgactttctttggatatgagggttttgaaacctgtgaaccagaaaagctaccattagtgcgtagaagg

SEQ ID NO: 137149 - DNA, 120 bp, Artificial Sequence
  ENSG00000103404_37 (sequence is synthesized)
aggaaggagctgactcgtgtttcttctgagcaggacttgtccttactgtggattgtgggtggcaccaggagctctaaaaactgtgactctaacaacgaaacaaatcgagggaaaaactct

SEQ ID NO: 137150 - DNA, 120 bp, Artificial Sequence
  ENSG00000103404_38 (sequence is synthesized)
tgctttctgcactttcgccccatctaccagtctttgtaaagggcaatattttaacactaatgtttctcaggtatatactcagctagtctaggatggttgcacaccagtaaatggattaaa

SEQ ID NO: 137151 - DNA, 120 bp, Artificial Sequence
  ENSG00000103404_39 (sequence is synthesized)
gaggaaggtgccatgtgggtgactgtgtcatttctcctactgccacagatagacattttcgaggtagaaatgaagcctttcaccaccttcctatctgtggtgacatgtgcaccaaaacct

SEQ ID NO: 137152 - DNA, 120 bp, Artificial Sequence
  ENSG00000103404_40 (sequence is synthesized)
gtcttgactcttgggataggtcctaggaagtggcagattggatagccagaaagccagtcactcgtttaattttttttccttctgaaattactagctaaggctcttggaattttgcactgt

SEQ ID NO: 137153 - DNA, 120 bp, Artificial Sequence
  ENSG00000103404_41 (sequence is synthesized)
agtagagcagttaacacctttgacagattcctggaaaaaacttctagattctaaactgggtgaaagactggacatcattttccttgtcaggtgttgcatttttccgttagaggtgggaag

SEQ ID NO: 137154 - DNA, 120 bp, Artificial Sequence
  ENSG00000103404_42 (sequence is synthesized)
ctccacgatgccctgtgtctgtgggctcatgttccctcatcttgtagcttggagaggaaagaagttgccttctgccaaaagccaatggtggtatgttgaagcgttgtgtgatcaagtgtt

SEQ ID NO: 137155 - DNA, 120 bp, Artificial Sequence
  ENSG00000103404_43 (sequence is synthesized)
acatatgcacttcagatcctgtctgtcagtctctgttagggctgcctttcagtaactcatttattatttcttctttgttcttaagatttcatctcatgcccagaactcacaagcaggttt

SEQ ID NO: 137156 - DNA, 120 bp, Artificial Sequence
  ENSG00000103404_44 (sequence is synthesized)
ccgtgtcagtgcaaattgcatttcttacaaaggagaacctcaccaaaaaaaacctcacagataagcaaagtatatagttttgcaagctttttcaaggtctcctggcaatactttcctgct

SEQ ID NO: 137157 - DNA, 120 bp, Artificial Sequence
  ENSG00000103404_45 (sequence is synthesized)
caatttttagcttttcttttttttttaaatgtcaagagagtgaaggtcttgattctctctgaatagcatttgtcactttgccagtaaatacagcatgctaagtttatgtgcttttaaata

SEQ ID NO: 137158 - DNA, 120 bp, Artificial Sequence
  ENSG00000103404_46 (sequence is synthesized)
ttagcgtttttcgtcagactcttcaagttcttcttgaacccttggtgcacagatccatatataacctcccttttcagtattgctgtgtgtgaattaactacaacacatatgcatgcatag

SEQ ID NO: 137159 - DNA, 120 bp, Artificial Sequence
  ENSG00000103404_47 (sequence is synthesized)
ctgtgaattctgcactactttttttttcttttttccccccaagaatatctcttgggaaaagtttttagtacgttacttaactttattttgctgctaatttgcgcattagccggtaacttg

SEQ ID NO: 137160 - DNA, 120 bp, Artificial Sequence
  ENSG00000103404_48 (sequence is synthesized)
caagtctggagaccacttactgttgagggtagctggaattttagacccttggcagtatttaagatttagacatttagccttgtgaaagttaccacagtgctccatgtgattcattgactg

SEQ ID NO: 137161 - DNA, 120 bp, Artificial Sequence
  ENSG00000103404_49 (sequence is synthesized)
tgagcctgttgtccattgcactcagccctgtactcacttcttcactcgctgtcctggttttactgttcagattttggtgggttctcaaagcagtaccactctcatctgctcagtacatct

SEQ ID NO: 137162 - DNA, 120 bp, Artificial Sequence
  ENSG00000103404_50 (sequence is synthesized)
gcggcaactggctgccttcgatgctgtcattgcgttcagcccagcacatcacagccccatcagtgtgtagccaccgctctcgtttttctgtatcgcttttatctcctgaaaaagatgcac

SEQ ID NO: 137163 - DNA, 120 bp, Artificial Sequence
  ENSG00000103404_51 (sequence is synthesized)
caaataagagatcatctatatcaggaattgaatgtctaactcaaacctctcatttttgtttaataggtagatctcatttgaagtctcctatctgaatctctgaaacaattatagtttgat

SEQ ID NO: 137164 - DNA, 120 bp, Artificial Sequence
  ENSG00000103404_52 (sequence is synthesized)
tagacaaaggtttttaataacacttcttttttgctgtagtcaagcattaatagaaactagtttaattttcacagtggtaaatatttttattcttgagttatctaggaatggattttccac

SEQ ID NO: 137165 - DNA, 120 bp, Artificial Sequence
  ENSG00000103404_53 (sequence is synthesized)
gatgtctagtgacttaaaaaaaaaaaggaaaaacgtttctacaaatccctttggttttccatgggatctggaataaaatgtcagtgtctataaactgtatgtcatggagtttagtccttg

SEQ ID NO: 137166 - DNA, 120 bp, Artificial Sequence
  ENSG00000103404_54 (sequence is synthesized)
tttcaggtttaatagaaaaaatcaggaagtatcatggcattgtctagacatcatgaagctattttatttccatagttggtaaacagtgaaaatttcattatctccaactactaggtacaa

SEQ ID NO: 137167 - DNA, 120 bp, Artificial Sequence
  ENSG00000103404_55 (sequence is synthesized)
ctttaggccacaggaaaggttatttggcccgaaagtttggaggtgctccttgaggtgggaagtatcttgtgggaaagtagttacttgattcaatttagttcattggtagggttggggact

SEQ ID NO: 137168 - DNA, 120 bp, Artificial Sequence
  ENSG00000103404_56 (sequence is synthesized)
tctttttttttttttttttaattttcccagcaatatttagcacaatgagcgtgtatgtgctttggggttaaaaattatctgctagggatgataggcctgggtttctcgttgacatctaga

SEQ ID NO: 137169 - DNA, 120 bp, Artificial Sequence
  ENSG00000103404_57 (sequence is synthesized)
ctgggtttctcgttgacatctagatgggcctgattagagcagtcatctcctggtaggcacaaaataatcaccaacagtaatgttgtatctgtaatgtttgtttgctttttaaagttttat

SEQ ID NO: 137170 - DNA, 120 bp, Artificial Sequence
  ENSG00000103404_58 (sequence is synthesized)
tcttgatttcttgtaaacatccattgcactgaggccgtatcattccttaagacagccctacatcttgccttggtaatcccttagataatgtggaaactcaaaccgttaggctccagtcat

SEQ ID NO: 137171 - DNA, 120 bp, Artificial Sequence
  ENSG00000103404_59 (sequence is synthesized)
cttagaccatttcccatccgttttgtattttctcgtcctgaaagcagctgaactgaaagtaagtaataatatgctggaccagtgggaacggatgtgggagtatttgtggtgtgctaaaat

SEQ ID NO: 137172 - DNA, 120 bp, Artificial Sequence
  ENSG00000103404_60 (sequence is synthesized)
actgtaattatctgtgaggctgcctgacacgcttttgcaatcttgttttcatcattcattctgcaaacgtttatggagggccttctttgagcacagaggcaaaactgaaagcttcaggga

SEQ ID NO: 137173 - DNA, 120 bp, Artificial Sequence
  ENSG00000103404_61 (sequence is synthesized)
tttgctgtagctgaggagccctgggagcacagcccatcaagcaagggatgtgatggtgtcctaaatggagtgacagttctcctgggaaaagagatcacgtggattccggtcaaatcggct

SEQ ID NO: 137174 - DNA, 120 bp, Artificial Sequence
  ENSG00000103404_62 (sequence is synthesized)
aaggcttgtggttctcttgagcaagtctgttccttctggaaaccaaaagtgcccttcatctttagagacattttactcttccatccaccttttcagactgagctgtctctactatttagg

SEQ ID NO: 137175 - DNA, 120 bp, Artificial Sequence
  ENSG00000103404_63 (sequence is synthesized)
ggttgaaaatccattacacagtcactttacgttaacattgggtcatcttatgtttgtatgagacggatgtgggatttgaggggaacattgtcattcccttaaaataactatcatgaaaaa

SEQ ID NO: 137176 - DNA, 120 bp, Artificial Sequence
  ENSG00000103404_64 (sequence is synthesized)
aatagcaacagtatgtaaagggaccaagagtggcagcctttagggaaaatggagcagagaagagctgtgaacaaagctcatttatttgaaataagcgtgctttatttcacatagaggggc

SEQ ID NO: 137177 - DNA, 120 bp, Artificial Sequence
  ENSG00000103404_65 (sequence is synthesized)
atcagacgttacatttcattcggacaaattactgaacagccgaagtgattgtttccaatgtaggttattataattattggatacaaagatttaactagtgtttctgggttggatttttga

SEQ ID NO: 137178 - DNA, 120 bp, Artificial Sequence
  ENSG00000103404_66 (sequence is synthesized)
aatagtatgcaagtcataagcacagtttcaataaaacacgtattctggaggtgcgtggaactttgtattatttgtagttgagaaaggcaaactttgctgacaaaccagtacctatcacaa

SEQ ID NO: 137179 - DNA, 120 bp, Artificial Sequence
  ENSG00000103404_67 (sequence is synthesized)
acgaacacaaaaagtagctgttactgtgcaggctgtctttaactttcatttcataaagggtacattattgttaaactctactacatggtttggggagaaatccagtggttttatttaaat

SEQ ID NO: 137180 - DNA, 120 bp, Artificial Sequence
  ENSG00000103404_68 (sequence is synthesized)
gaacactctcacactgccttttgatcaactttcaaagtattttgcagatgcattttgagcatgaccatttttttccccaagtaaaaacaattgtgcgtggcctccatataactcagaaag

SEQ ID NO: 137181 - DNA, 120 bp, Artificial Sequence
  ENSG00000103404_69 (sequence is synthesized)
catgctcttactacctatgcaagcaaacaataaaacatatagacatgaaatgttaagtcttaaaaaaaaaaggcaacaattatggagctctatttttaaatttgtgattttcaaaatatg

SEQ ID NO: 137182 - DNA, 120 bp, Artificial Sequence
  ENSG00000103404_70 (sequence is synthesized)
gcttactcatcattgtgtagaagagcatgaatgcgatttcttgttttgctctgcatatatttctctgctgtttttctgatcattggcgagattgtaaagtattttgcaagcagaagtgga

SEQ ID NO: 137183 - DNA, 120 bp, Artificial Sequence
  ENSG00000103404_71 (sequence is synthesized)
attggatatgttgaacacacatcattggtgtacatactgtatttagcctgaagactttcctaaagtgttttgttctaaaaataacctgccattttctatagattttaattttttatatct

SEQ ID NO: 137184 - DNA, 120 bp, Artificial Sequence
  ENSG00000103404_72 (sequence is synthesized)
tcaagggttctattttggtcacaaggaaagaatgtggcttctaatagtgctaagaattaaaagatgcttttatagagacttagagctattttgaaaagctttggggcttcccagccactg

SEQ ID NO: 137185 - DNA, 120 bp, Artificial Sequence
  ENSG00000103404_73 (sequence is synthesized)
atcacaattagactaagcccatggaatttctgggagtgttgtgcagtggattcggttctagatccatcttacatttgtttagtgtttcccaatttttgggagaaggggtgcacagcaaat

SEQ ID NO: 137186 - DNA, 120 bp, Artificial Sequence
  ENSG00000103404_74 (sequence is synthesized)
ttgagagacttttttgaatctcacacatgtattttcctcaagattcttttaagcctcttctgaatgacttgtctgagatagtgaagacccacattaactagaatcagctggggaacttta

SEQ ID NO: 137187 - DNA, 120 bp, Artificial Sequence
  ENSG00000103404_75 (sequence is synthesized)
aaaaatacagtgcctgggtcccagtccctagcttttgatctaattcatgtaggggtgggatccaggaattaccatgtattttaaaagcttctgggtgtttctaatttgcagacagattga

SEQ ID NO: 137188 - DNA, 120 bp, Artificial Sequence
  ENSG00000103404_76 (sequence is synthesized)
gaaccactatgatacgtcatccctttactgagaattatggcgagaatcactgccatttgaattactcaggagtgactgattcctcagttgtgtaggagaagcagaaaaaataagaataaa

SEQ ID NO: 137189 - DNA, 120 bp, Artificial Sequence
  ENSG00000103404_77 (sequence is synthesized)
aagaattgagagatactgatatcaaactcccatttgaaatacaagggcccttctgattcaaggcccagttggggagcttggaccatgttgtgaatggcctagcactcgccagtctggtgg

SEQ ID NO: 137190 - DNA, 120 bp, Artificial Sequence
  ENSG00000103404_78 (sequence is synthesized)
aaattggtggtcttagttgctggagcaggctgagtgtccccgcggggtttgcatctgtccccagaaccttttccccaggcccgtgggggaatagggaagtcactctgagctagaaattgt

SEQ ID NO: 137191 - DNA, 120 bp, Artificial Sequence
  ENSG00000103404_79 (sequence is synthesized)
cgaagaagaaaagaaacaaccttcctagccttggaaagcctgtccctgcttttgatagaattattgcctttttgtaggaattacagtagcaaaccccaggctgccgctgaatttcctact

SEQ ID NO: 137192 - DNA, 120 bp, Artificial Sequence
  ENSG00000103404_80 (sequence is synthesized)
tttgctcattctctaggatagttcttatccagaatgtggtttcaggaattcttttttttagtttgaaaatgaatgtgaaacattttctttggtgtcttttttttaaaaaaaaaaaaccct

SEQ ID NO: 137193 - DNA, 120 bp, Artificial Sequence
  ENSG00000103404_81 (sequence is synthesized)
tttgttttgttttgttttttgtttgttttaccattaagtaatacacatcccagaatttggcactctgtgttaactgtggaggcaaataaaatttagttttaatctgtggtgagctgaatg

SEQ ID NO: 137194 - DNA, 120 bp, Artificial Sequence
  ENSG00000103404_82 (sequence is synthesized)
aatctgtggtgagctgaatgcactacaacaccttcgaagtaatctgatggtttcattctgtcgagcctcatgctgcctacaaaacaccacaatttacctggtgttttcaacattttaagg

SEQ ID NO: 137195 - DNA, 120 bp, Artificial Sequence
  ENSG00000103404_83 (sequence is synthesized)
aatgaagatacaagtagacatgcaagttggaaatgtttctttagaaaggccatccagaataatgatatctgttgcagtcgtccaaatgcaatatgaaatttcctaggtgctattataaac

SEQ ID NO: 137196 - DNA, 120 bp, Artificial Sequence
  ENSG00000103404_84 (sequence is synthesized)
ggtgtggtgtcataccaaatgcaaaagcagttacagtatttccgaagttggagttctctttgtaggcctttcaaatacgtgtttgcattccatagaggtctgctcaccaactgtgcctct

SEQ ID NO: 137197 - DNA, 120 bp, Artificial Sequence
  ENSG00000103404_85 (sequence is synthesized)
caccactggttaaaattgaatttaagcctcattgacataagtcgtttcttgattgaactcttcagtttttacactggaatttctgtagttgtcttgaaagctgcatgtcacatcactgta

SEQ ID NO: 137198 - DNA, 120 bp, Artificial Sequence
  ENSG00000103404_86 (sequence is synthesized)
cacaaagtgctttggtattactcatgcaccgtggatagtgatttctgtgtcgttttcattttcagttgtacagtaatatggaaggcaggatgtctttcctagaggctggaagaaaagtgt

SEQ ID NO: 137199 - DNA, 120 bp, Artificial Sequence
  ENSG00000103404_87 (sequence is synthesized)
atcgtacattttaaatttattttagaacaagtgcatgagatgtgtcactgatttctgttatttatttgtatgttttattattcaaagtgtatgcacttttaagaagcagaatttatattt

SEQ ID NO: 137200 - DNA, 120 bp, Artificial Sequence
  ENSG00000103404_88 (sequence is synthesized)
ttacgtttgaaacgttttatttctgaaacagcgttgattatatagtatacagttggaattaagagaaaagtggaaaatgtaacaaaatacaataaatttattacaagatgtcctcttcaa

SEQ ID NO: 137201 - DNA, 120 bp, Artificial Sequence
  ENSG00000103404_89 (sequence is synthesized)
gtgtgagaggctgcgtgtctgtgctggcgagtccttcagacgggtttgcttgtggcagggtgacttgactttagagcctcatttcccctccggtaggcagtgtgccaactgtgagggcag

SEQ ID NO: 137202 - DNA, 120 bp, Artificial Sequence
  ENSG00000103404_90 (sequence is synthesized)
tttccatcctctggatctctgcccaagagcaaataaacgaacattcttcctccttttcctgagttgggtcgtccagtaggtagctgactgattggggagtggtatgtgcagatggcattg

SEQ ID NO: 137203 - DNA, 120 bp, Artificial Sequence
  ENSG00000103404_91 (sequence is synthesized)
tctggtcaactgaggatttgctctttgtttacctaacctgcgctccccatttacggttttgctagatagagttccttgagttctatcttctctctcattttaaatgattgtgaactactt

SEQ ID NO: 137204 - DNA, 120 bp, Artificial Sequence
  ENSG00000103404_92 (sequence is synthesized)
tttttttttttaattaaagatgagctgttgctgtgttgcccaggctggagtacagtagctattcacagatgtgattatcacacactacagccttgaacttctgggctcaagcaagtctcc

SEQ ID NO: 137205 - DNA, 120 bp, Artificial Sequence
  ENSG00000103404_93 (sequence is synthesized)
tgccttattctccagagtagctgggatacaagtgcatgacacttttatagtgtctttaaagtgacttagaagggtttttctttttgttttaaggttaaattgaccttgtcatttataaaa

SEQ ID NO: 137206 - DNA, 120 bp, Artificial Sequence
  ENSG00000103404_94 (sequence is synthesized)
gcaactatgttcatcatgaaatttagagtctagaggtggaaagaataccatcatccatgggcttatcactgagataaccactggtaacattttttttaattgcgataaaatatacataag

SEQ ID NO: 137207 - DNA, 120 bp, Artificial Sequence
  ENSG00000103404_95 (sequence is synthesized)
aaaatgtaccattttaaccatttttaagtgtacagttcagtgacattaagtacactcacattgttgtgcaaccattatcactatccatctctacaagttttttaatcttcccagacttaa

SEQ ID NO: 137208 - DNA, 120 bp, Artificial Sequence
  ENSG00000103404_96 (sequence is synthesized)
actctgtacctaataaacactaattcccattttctctcccttcagccatgacaagcaccatactttctgtctctgtgaatttgactactcttggtacctcttttaaatggaatcattcaa

SEQ ID NO: 137209 - DNA, 120 bp, Artificial Sequence
  ENSG00000103404_97 (sequence is synthesized)
catgtagatgcttcataaatatttgtagaatgaatgtatgagtgcttgtctattccattctcttgccaattctttagactcagacttacattataaagtattcatccctatccttgcatt

SEQ ID NO: 137210 - DNA, 120 bp, Artificial Sequence
  ENSG00000103404_98 (sequence is synthesized)
ttattactacaaatttcatgcgtcaggaagtctgccttacatcttttcatcttaactggggatattcggacaggcacgacatgacacagggtctgggaattgatgctgacctcggggtga

SEQ ID NO: 137211 - DNA, 120 bp, Artificial Sequence
  ENSG00000103404_99 (sequence is synthesized)
ggacatcaacgccccccagctcagctcgtaacaccttcatgagggtgtgtgtggctcagggctggccgagggaccccagcctgacctctatgcctgttttcttctctgcaggctccacaa

SEQ ID NO: 137212 - DNA, 120 bp, Artificial Sequence
  ENSG00000103415_0 (sequence is synthesized)
gccggcctcgcgccagtccgctgggctgcagggactgcggaccagaggagcgagagcagcaagaaccacacccagcagcaatgtcagcggaagtggaaacctcagagggggtagacgagt

SEQ ID NO: 137213 - DNA, 120 bp, Artificial Sequence
  ENSG00000103415_1 (sequence is synthesized)
cagaaaaaaagaactctggggccctagaaaaggagaaccaaatgagaatggctgacctctcggagctcctgaaggaagggaccaaggaagcacacgaccgggcagaaaacacccagtttg

SEQ ID NO: 137214 - DNA, 120 bp, Artificial Sequence
  ENSG00000103415_2 (sequence is synthesized)
tcaaggacttcttgaaaggcaacattaagaaggagctgtttaagctggccaccacggcactttacttcacatactcagccctcgaggaggaaatggagcgcaacaaggaccatccagcct

SEQ ID NO: 137215 - DNA, 120 bp, Artificial Sequence
  ENSG00000103415_3 (sequence is synthesized)
ttgcccctttgtacttccccatggagctgcaccggaaggaggcgctgaccaaggacatggagtatttctttggtgaaaactgggaggagcaggtgcagtgccccaaggctgcccagaagt

SEQ ID NO: 137216 - DNA, 120 bp, Artificial Sequence
  ENSG00000103415_4 (sequence is synthesized)
acgtggagcggatccactacatagggcagaacgagccggagctactggtggcccatgcatacacccgctacatgggggatctctcggggggccaggtgctgaagaaggtggcccagcgag

SEQ ID NO: 137217 - DNA, 120 bp, Artificial Sequence
  ENSG00000103415_5 (sequence is synthesized)
cactgaaactccccagcacaggggaagggacccagttctacctgtttgagaatgtggacaatgcccagcagttcaagcagctctaccgggccaggatgaacgccctggacctgaacatga

SEQ ID NO: 137218 - DNA, 120 bp, Artificial Sequence
  ENSG00000103415_6 (sequence is synthesized)
caatgaactggaccaggccggctccacactggccagagagaccttggaggatgggttccctgtacacgatgggaaaggagacatgcgtaaatgccctttctacgctgctgaacaagacaa

SEQ ID NO: 137219 - DNA, 120 bp, Artificial Sequence
  ENSG00000103415_7 (sequence is synthesized)
aggtgccctggagggcagcagctgtcccttccgaacagctatggctgtgctgaggaagcccagcctccagttcatcctggccgctggtgtggccctagctgctggactcttggcctggta

SEQ ID NO: 137220 - DNA, 120 bp, Artificial Sequence
  ENSG00000103415_8 (sequence is synthesized)
ctacatgtgaagcacccatcatgccacaccggtaccctcctcccgactgaccactggcctacccctttctccagccctgactaaactaccacctcaggtgactttttaaaaaatgctggg

SEQ ID NO: 137221 - DNA, 120 bp, Artificial Sequence
  ENSG00000103415_9 (sequence is synthesized)
tttaagaaaggcaaccaataaaagccagatgctagagcctctgcctgacagcatcctctctatgggccatattccgcactgggcacaggccgtcaccctgggagcagtcggcacagtgca

SEQ ID NO: 137222 - DNA, 120 bp, Artificial Sequence
  ENSG00000103415_10 (sequence is synthesized)
gcaagcctggcccccgacccagctctactccaggcttccacacttctgggccctaggctgcttccggtagtccctgtttttgcagtacatgggtgactatctcccctgttggaggtgagt

SEQ ID NO: 137223 - DNA, 120 bp, Artificial Sequence
  ENSG00000103415_11 (sequence is synthesized)
ggcctgtaagtccaagctgtgcgagggggccttgctggatgctgctgtacaacttctgggcctctcttggaccctgggagtgagggtgggtgtgggtggaagcctcagaggccttgggag

SEQ ID NO: 137224 - DNA, 120 bp, Artificial Sequence
  ENSG00000103415_12 (sequence is synthesized)
ctcatccctctcacccagaatccctctaaccccttgggtgcggtttgctcagccccagcttatctcctcctccgcgctgtgtaaatgctccagcactcaataaagtgggctttgcaagct

SEQ ID NO: 137225 - DNA, 120 bp, Artificial Sequence
  ENSG00000103415_13 (sequence is synthesized)
attgtccactaaggtctggcaggtctgattgcctcttttcaggcactgagtggtggggtatgccatcctcccctgctggaaccagccttggcctgccctgttagtcatcaaaaatagatc

SEQ ID NO: 137226 - DNA, 87 bp, Artificial Sequence
  ENSG00000103415_14 (sequence is synthesized)
accagccttggcctgccctgttagtcatcaaaaatagatctcaccagggaacaatcttctcaggttgttgtgtaatttgagtgagcc

SEQ ID NO: 137227 - DNA, 120 bp, Artificial Sequence
  ENSG00000103415_15 (sequence is synthesized)
ccaggcacgtgcacagtgagtttgtgtaaatccagttagaccaaaatgagcgaggtggagagcctcttaaccggatgctacgggtgatgactgggaggaggagaaaaattacctctttat

SEQ ID NO: 137228 - DNA, 120 bp, Artificial Sequence
  ENSG00000103415_16 (sequence is synthesized)
catctctaggccccgccccgcgctgcgtgcccacgttgcgccggcctcgcgccagtccgctgggctgcagggactgcggcgcctgagggagtcgctgacgggcacgctgactggaggctg

SEQ ID NO: 137229 - DNA, 80 bp, Artificial Sequence
  ENSG00000103415_17 (sequence is synthesized)
gcctgagggagtcgctgacgggcacgctgactggaggctggcggacaggcgacagcgacctgcggcagagtcttgctgcg

SEQ ID NO: 137230 - DNA, 120 bp, Artificial Sequence
  ENSG00000103415_18 (sequence is synthesized)
gctgggctgcagggactgcggcgcctgagggagtcgctgacgggcacgctgactggaggctggcggacaggcgacagcgacctgcggcaggaccagaggagcgagagcagcaagaaccac

SEQ ID NO: 137231 - DNA, 120 bp, Artificial Sequence
  ENSG00000103415_19 (sequence is synthesized)
gcggacaggcgacagcgacctgcggcagagaacaacatgaagagaccttgctgctgctatgaaacccagactctaaggacaacttgggggacattggatattttttcacagatgtagaca

SEQ ID NO: 137232 - DNA, 120 bp, Artificial Sequence
  ENSG00000103415_20 (sequence is synthesized)
gcggacaggcgacagcgacctgcggcaggtgagctgtccgcgccctcccggggccttccttccgcccggcttctcggaccgcgctgcgtccttcgcgggccctgcctcggtccaggcctt

SEQ ID NO: 137233 - DNA, 120 bp, Artificial Sequence
  ENSG00000103415_21 (sequence is synthesized)
cggacctgggcttggccgggccacagccctttgggtcccctgcgccggtctgaggggagacccggccgggggcggccggaagctgggaccagaggagcgagagcagcaagaaccacaccc

SEQ ID NO: 137234 - DNA, 120 bp, Artificial Sequence
  ENSG00000103415_22 (sequence is synthesized)
tgtgagtcaccatgcctggcctcttgctcacttttcatactaaaacaacaaattacaggctgtagtttaacctctctactgcatgcataaatgcagtgtggtacgagtgcctctgtagcc

SEQ ID NO: 137235 - DNA, 120 bp, Artificial Sequence
  ENSG00000103415_23 (sequence is synthesized)
cataacttcagtttccttgttgctagcagtctgtggtgacactatactaatctcacatgcaggaaccaatgaggattagccagggacacaggaggagtcaccttgcattcagaatgactc

SEQ ID NO: 137236 - DNA, 120 bp, Artificial Sequence
  ENSG00000103415_24 (sequence is synthesized)
aagtttagtctcaacttgaccattagctctctgagtgatcttgcccatgttaattctcttgatcttagtttcttcagagccagtgagacattgcttgaaagtgacttagcctggtatacc

SEQ ID NO: 137237 - DNA, 120 bp, Artificial Sequence
  ENSG00000103415_25 (sequence is synthesized)
gcagggactgcggcgcctgagggagtcgctgacgggcacgctgactggaggctggcggacaggcgacagcgacctgcggcagaatggctgacctctcggagctcctgaaggaagggacca

SEQ ID NO: 137238 - DNA, 120 bp, Artificial Sequence
  ENSG00000103423_0 (sequence is synthesized)
gtccccgggccaagatggctgcgcggtgctccacacgctggttgctggtggttgtggggaccccgcggctgccggctatatcgggtagaggggcccggccgcccagggagggcgtggtgg

SEQ ID NO: 137239 - DNA, 120 bp, Artificial Sequence
  ENSG00000103423_1 (sequence is synthesized)
gggcatggctgagccgcaagctgagcgtccccgcctttgcgtcttccctgacctcttgcggcccccgagcgctgctgacattgagacctggtgtcagccttacaggaacaaaacataacc

SEQ ID NO: 137240 - DNA, 120 bp, Artificial Sequence
  ENSG00000103423_2 (sequence is synthesized)
ctttcatttgtactgcctccttccacacgagtgcccctttggccaaagaagattattatcagatattaggagtgcctcgaaatgccagccagaaagagatcaagaaagcctattatcagc

SEQ ID NO: 137241 - DNA, 120 bp, Artificial Sequence
  ENSG00000103423_3 (sequence is synthesized)
ttgccaagaagtatcaccctgacacaaataaggatgatcccaaagccaaggagaagttctcccagctggcagaagcctatgaggttttgagtgatgaggtgaagaggaagcagtacgatg

SEQ ID NO: 137242 - DNA, 120 bp, Artificial Sequence
  ENSG00000103423_4 (sequence is synthesized)
cctacggctctgcaggcttcgatcctggggccagcggctcccagcatagctactggaagggaggccccactgtggaccccgaggagctgttcaggaagatctttggcgagttctcatcct

SEQ ID NO: 137243 - DNA, 120 bp, Artificial Sequence
  ENSG00000103423_5 (sequence is synthesized)
cttcatttggagatttccagaccgtgtttgatcagcctcaggaatacttcatggagttgacattcaatcaagctgcaaagggggtcaacaaggagttcaccgtgaacatcatggacacgt

SEQ ID NO: 137244 - DNA, 120 bp, Artificial Sequence
  ENSG00000103423_6 (sequence is synthesized)
gtgagcgctgcaacggcaaggggaacgagcccggcaccaaggtgcagcattgccactactgtggcggctccggcatggaaaccatcaacacaggcccttttgtgatgcgttccacgtgta

SEQ ID NO: 137245 - DNA, 120 bp, Artificial Sequence
  ENSG00000103423_7 (sequence is synthesized)
ggagatgtggtggccgcggctccatcatcatatcgccctgtgtggtctgcaggggagcaggacaagccaagcagaaaaagcgagtgatgatccctgtgcctgcaggagtcgaggatggcc

SEQ ID NO: 137246 - DNA, 120 bp, Artificial Sequence
  ENSG00000103423_8 (sequence is synthesized)
agaccgtgaggatgcctgtgggaaaaagggaaattttcattacgttcagggtgcagaaaagccctgtgttccggagggacggcgcagacatccactccgacctctttatttctatagctc

SEQ ID NO: 137247 - DNA, 120 bp, Artificial Sequence
  ENSG00000103423_9 (sequence is synthesized)
aggctcttcttgggggtacagccagagcccagggcctgtacgagacgatcaacgtgacgatcccccctgggactcagacagaccagaagattcggatgggtgggaaaggcatcccccgga

SEQ ID NO: 137248 - DNA, 120 bp, Artificial Sequence
  ENSG00000103423_10 (sequence is synthesized)
ttaacagctacggctacggagaccactacatccacatcaagatacgagttccaaagaggctaacgagccggcagcagagcctgatcctgagctacgccgaggacgagacagatgtggagg

SEQ ID NO: 137249 - DNA, 120 bp, Artificial Sequence
  ENSG00000103423_11 (sequence is synthesized)
gaagcaaggctaggcgtgaggctggggaggacgaggagggattcctttccaaacttaagaaaatgtttacctcatgatatcccagccgaggaaaaagatccactggaaactaggccggga

SEQ ID NO: 137250 - DNA, 120 bp, Artificial Sequence
  ENSG00000103423_12 (sequence is synthesized)
agcagcagcccctccaagggccagggcacctgggagacgggaggattccagaacagcagcactgagctcccacccgcagagcctctggacggccttggcaacagcaaaatcatgggacaa

SEQ ID NO: 137251 - DNA, 120 bp, Artificial Sequence
  ENSG00000103423_13 (sequence is synthesized)
cacctctctccacggaaaggtcacagtggacagcccgggcagtaggatgcagccccagaggctggtggcagtttcctgtccattggtaggtgacggcccctggctcaggcagagggagat

SEQ ID NO: 137252 - DNA, 120 bp, Artificial Sequence
  ENSG00000103423_14 (sequence is synthesized)
ggttagactcttgcagggctaaaactctaatttggaattgaatattgtggatatcttagttaaaggccatgcttacagcttagaaatgaagccttaagctgcatcaagttacgaagtgat

SEQ ID NO: 137253 - DNA, 120 bp, Artificial Sequence
  ENSG00000103423_15 (sequence is synthesized)
taatttccttctcagcaaacctccgggaggttccagaatgagttcttcctgacaggttgtcttcactgggagcgtggggcccccaggccccaccagcaccgtcctcccctaatgaggggc

SEQ ID NO: 137254 - DNA, 120 bp, Artificial Sequence
  ENSG00000103423_16 (sequence is synthesized)
cctgccgaggcatcagctgctctgctcagttagtttttattcccggggtaccaagcagctgcacagtcggtgcctgggaggcacgtagaggcccagagagtccctgggggttctgctctg

SEQ ID NO: 137255 - DNA, 120 bp, Artificial Sequence
  ENSG00000103423_17 (sequence is synthesized)
accgtgtgggtggtgatccttgtcaggatgtacagtccttgctcccaccccatccgggatggccgcctgtccctgactattgagtcctgttgttgtaagccaggcatggagggctcctgc

SEQ ID NO: 137256 - DNA, 120 bp, Artificial Sequence
  ENSG00000103423_18 (sequence is synthesized)
ccttctgctgagccacagcccattgcagcactgtgctggccagacttcagctgccttgggaactgaagccctgccactgttgctagtcaggggcttggttctcccacttacactgttgac

SEQ ID NO: 137257 - DNA, 120 bp, Artificial Sequence
  ENSG00000103423_19 (sequence is synthesized)
atctattttctgaagtgtgtttaaattattcagtgctaatcattgttttttcctttgtaaatgttgattcagaaaaggaaagcacaggctaagcagttgaaggttccccaccattcagtg

SEQ ID NO: 137258 - DNA, 120 bp, Artificial Sequence
  ENSG00000103423_20 (sequence is synthesized)
agagcagaacccccattccccagcctctgctggtagcatgtcgcagtttccatgtgtttcaggatcttcgggctgtcgttagacaggttaatgaagaacacttctcaacagtttcctttt

SEQ ID NO: 137259 - DNA, 120 bp, Artificial Sequence
  ENSG00000103423_21 (sequence is synthesized)
tgttttcctttataattcactaaaataaagcatctattagtgtctgatttaggaatgtaaaatgattctgtattaatgtaaataagattatctattgcaaaaagatatttcaaacctaaa

SEQ ID NO: 137260 - DNA, 120 bp, Artificial Sequence
  ENSG00000103423_22 (sequence is synthesized)
ccgttgcttttcttgttgatgttactagcactgttaggagctggagaggtggcctgggcagagtgctgtgggtacctagggcgggacatgcctgactcccctcgggagcactcatgcttt

SEQ ID NO: 137261 - DNA, 120 bp, Artificial Sequence
  ENSG00000103423_23 (sequence is synthesized)
ctttttgttaattagataatttctttttttttttttgagatggtgtctagctctgtctctaggtggagttcagtggtgcaatctccacctcccagatttaagcaattctcctgcctcagc

SEQ ID NO: 137262 - DNA, 120 bp, Artificial Sequence
  ENSG00000103423_24 (sequence is synthesized)
gcatgagccactgcgcctggcctaattagataatttcttacttgcttcacatacacactggtaaaatctgtttcccctcctgtaaactgtatttagcatagccacagtgacacttgttta

SEQ ID NO: 137263 - DNA, 120 bp, Artificial Sequence
  ENSG00000103423_25 (sequence is synthesized)
gtatttagcatagccacagtgacacttgtttaaatgacttagtgtagggtgttttaggagcttttctgtacagaagctttgagggcatggtccttaggttctcaccgctgcactggctca

SEQ ID NO: 137264 - DNA, 120 bp, Artificial Sequence
  ENSG00000103423_26 (sequence is synthesized)
gggtgtccgcccctgccaaggttgggtccctctcttcccatgtgctgcgagggtgctggctgcctgtgagttctttccaaagcttcccggcggaagccttggctgctgactctgctcggt

SEQ ID NO: 137265 - DNA, 120 bp, Artificial Sequence
  ENSG00000103423_27 (sequence is synthesized)
gcggtcactgctgttcagctatgtgtatgaatcaaaggttgcattgctacctgggacagcctggtgtgtcatacagtccagtgtgaaggccatgtccctgcgccaagtaatcttgttaag

SEQ ID NO: 137266 - DNA, 120 bp, Artificial Sequence
  ENSG00000103423_28 (sequence is synthesized)
agtttaatattaattgaatactgtggcttccttagccattattgaagtgcattagggaacagccctaaagctgtagcctgtgtattagtctgttctcatgcagctaataaagacatacct

SEQ ID NO: 137267 - DNA, 120 bp, Artificial Sequence
  ENSG00000103423_29 (sequence is synthesized)
aagactgggtaaattttaaaggaaagaggtttatttaactcacagttcagcacggctggggaggcctcagcgatcgtggcggaaggggaagcaaacacatccttcttaacatggcagcag

SEQ ID NO: 137268 - DNA, 72 bp, Artificial Sequence
  ENSG00000103423_30 (sequence is synthesized)
cgtctcaaaaaaaaaaaaaaagatacaaagtgaatactacatttttccttgtccctccctaatccccctttt

SEQ ID NO: 137269 - DNA, 120 bp, Artificial Sequence
  ENSG00000103423_31 (sequence is synthesized)
aatactacatttttccttgtccctccctaatccccctttttgaggtagttagtccttattaacagttttgtgggccaggcccagtggctcatgcctgtaatcccagtattttgggaggtc

SEQ ID NO: 137270 - DNA, 84 bp, Artificial Sequence
  ENSG00000103423_32 (sequence is synthesized)
cttaaaacaatttgccaggactggtggtgtgcacctgtagacccagctactgtggaggctgaggcaggaggattgcttcaacct

SEQ ID NO: 137271 - DNA, 120 bp, Artificial Sequence
  ENSG00000103423_33 (sequence is synthesized)
agctactgtggaggctgaggcaggaggattgcttcaacctgggaggttgaggctgcagtgagctaggattgcaccactgctattgtcgttgctgttacttctgttactccggttgttctg

SEQ ID NO: 137272 - DNA, 120 bp, Artificial Sequence
  ENSG00000103423_34 (sequence is synthesized)
gcttgcagaaaacctttcgatgaaggtaagggtaggaagcataaattctctacgaggtaatgtcccctgaggagagaggtgaagtgtgaatctgtgaagaatccagggtgcctgtgaggt

SEQ ID NO: 137273 - DNA, 120 bp, Artificial Sequence
  ENSG00000103423_35 (sequence is synthesized)
caagcgaggatcaacacaaacattttcccagcatgcgcgacggcgggagagttcgtgagacttttggaagcacttcacgccctacacttagcattcagtttggtcatctcatccctcttc

SEQ ID NO: 137274 - DNA, 120 bp, Artificial Sequence
  ENSG00000103423_36 (sequence is synthesized)
taggtgctagtcacaggcccaccccaacctcataggatgtgtttgcacacagggccacttaataaatgttatggctgccttatttgctgtgaactcttgtctgtattcctgggccttggt

SEQ ID NO: 137275 - DNA, 120 bp, Artificial Sequence
  ENSG00000103423_37 (sequence is synthesized)
agcattgccactactgtggcggctccggcatggtaaggctctgcccgagactccacctcccacggcttgcaccactgactgagaagagctggttgtggcactgctcccagagaacgtatg

SEQ ID NO: 137276 - DNA, 120 bp, Artificial Sequence
  ENSG00000103423_38 (sequence is synthesized)
acagcagctccgggggcggggcgggggattgcatccagttgtcactttcttctttatttttctaacaattgctttggtaattcaaggggaaataatcttttttaaatgtactgttcagct

SEQ ID NO: 137277 - DNA, 120 bp, Artificial Sequence
  ENSG00000103423_39 (sequence is synthesized)
cccaggagtcttcaggtacttctgtagacaggcggtatcatatttttcagtgtcgtgtggtcaagttgatgatctggagtgcagaagtttgtgtgttctagaaaatcagatgaacagatt

SEQ ID NO: 137278 - DNA, 120 bp, Artificial Sequence
  ENSG00000103423_40 (sequence is synthesized)
gaggccctgcacctgggttcctaggcagtgtgtttgagtgcacatgcacataaaaaacaagccttaaagagacatttttcttacgcacattgtggtcccagaaccacccatcagtttacc

SEQ ID NO: 137279 - DNA, 120 bp, Artificial Sequence
  ENSG00000103423_41 (sequence is synthesized)
cgagacgatcaacgtgacggtaagagggtgtgagaacacctttgtcacccctgtactttattgctctttttctgaaatggaaaagaactgaccagtggcctggaacccatgagtgaccag

SEQ ID NO: 137280 - DNA, 120 bp, Artificial Sequence
  ENSG00000103423_42 (sequence is synthesized)
catgtgggggggcactcacaggggaggacatgaggaattttaggctgctccttgagtgtggaccacaagccacaggccttgagtctataatcgcatgggaagcagttcctggctggcatc

SEQ ID NO: 137281 - DNA, 120 bp, Artificial Sequence
  ENSG00000103423_43 (sequence is synthesized)
actcccacactggttagcggggcctgggaactgggcgcattcaggacacagaagggttcaccctgggttgtgctctctgcacttgcttctgtccagtgtctggctccaagagcagaagac

SEQ ID NO: 137282 - DNA, 120 bp, Artificial Sequence
  ENSG00000103423_44 (sequence is synthesized)
tcgggcggtgcatatcccttttgccacagtgatggctgcctgtgtgctgccagcacctgtcccccacctctctcttgacctgcccctccagctcttcccacctccaggccacatcattct

SEQ ID NO: 137283 - DNA, 120 bp, Artificial Sequence
  ENSG00000103423_45 (sequence is synthesized)
ctgtattcgcctcagaaccttctccagcttctttgtggggaaccttggggtaacctccatgaaggaggtgggcattttgggccaaggctttctcctccatctgggggctattccctggct

SEQ ID NO: 137284 - DNA, 120 bp, Artificial Sequence
  ENSG00000103423_46 (sequence is synthesized)
tctccagggtcctgtggttccaagggccagggagcgacctcagccacgcaccctgtattggcttttcctgctttgctccctcactcctgcttcctgggctcacttgcccaaactcttgcc

SEQ ID NO: 137285 - DNA, 120 bp, Artificial Sequence
  ENSG00000103423_47 (sequence is synthesized)
ccctcatcctagtcacaggctctgctctgggcagacccaacttagctcatttccatgtgcttgtgggcgggcttggcccagaaacccaagtggtggttctttttttttttttgagatgga

SEQ ID NO: 137286 - DNA, 120 bp, Artificial Sequence
  ENSG00000103429_0 (sequence is synthesized)
ctcttcctctgctcccgcggggtctgtgctgagaataatggcccggttggcccgggacgagtggaatgattaatgatgttttgcagcagttttctacgtctgaaattttttatgtctctg

SEQ ID NO: 137287 - DNA, 120 bp, Artificial Sequence
  ENSG00000103429_1 (sequence is synthesized)
gaacccagaatttgctaagagatggaggaacctcagaaaagctatgtgaacacaatggaccttgagagagatgaacctctcaaaagcaccggccctcagatttctgttagtgaattttct

SEQ ID NO: 137288 - DNA, 120 bp, Artificial Sequence
  ENSG00000103429_2 (sequence is synthesized)
tgccactgctgctacgacatcctggttaaccccaccaccttgaactgtgggcacagcttctgccgtcactgccttgctttatggtgggcatcttcaaagaaaacagaatgtccagaatgc

SEQ ID NO: 137289 - DNA, 120 bp, Artificial Sequence
  ENSG00000103429_3 (sequence is synthesized)
agagaaaaatgggaaggtttccccaaagtcagtattctcctcagggatgccattgaaaagttatttcctgatgccattagactgagatttgaagacattcagcagaataatgacatagtc

SEQ ID NO: 137290 - DNA, 120 bp, Artificial Sequence
  ENSG00000103429_4 (sequence is synthesized)
caaagtcttgcagcctttcagaaatatgggaatgatcagattcctttagctcctaacacaggccgagcgaatcagcagatgggagggggattcttttccggtgtgctcacagctttaact

SEQ ID NO: 137291 - DNA, 120 bp, Artificial Sequence
  ENSG00000103429_5 (sequence is synthesized)
ggagtggcagtggtcctgctcgtctatcactggagcagcagggaatctgaacacgacctcctggtccacaaggctgtggccaaatggacggcggaagaagttgtcctctggctggagcag

SEQ ID NO: 137292 - DNA, 120 bp, Artificial Sequence
  ENSG00000103429_6 (sequence is synthesized)
ctgggcccttgggcatctctttacagggaaaggtttttatctgaacgagtaaatggaaggttgcttttaactttgacagaggaagaattttccaagacgccctataccatagaaaacagc

SEQ ID NO: 137293 - DNA, 120 bp, Artificial Sequence
  ENSG00000103429_7 (sequence is synthesized)
agccacaggagagccatcctcatggagctagaacgtgtcaaagcattaggcgtgaagcccccccagaatctctgggaatataaggctgtgaacccaggcaggtccctgttcctgctatac

SEQ ID NO: 137294 - DNA, 120 bp, Artificial Sequence
  ENSG00000103429_8 (sequence is synthesized)
gccctcaagagctcccccaggctgagtctgctctacctgtacctgtttgactacaccgacaccttcctacctttcatccacaccatctgccctctgcaagaagacagctctggggaggac

SEQ ID NO: 137295 - DNA, 120 bp, Artificial Sequence
  ENSG00000103429_9 (sequence is synthesized)
atcgtcaccaagcttctggatcttaaggagcctacgtggaagcagtggagagagttcctggtcaaatactccttccttccataccagctgattgctgagtttgcttgggactggttggag

SEQ ID NO: 137296 - DNA, 120 bp, Artificial Sequence
  ENSG00000103429_10 (sequence is synthesized)
gtccattactggacatcacggtttctcatcatcaatgctatgttactctcagttctggaattattctccttttggagaatctggtcgagaagtgaactgaagaccgtgcctcagaggatg

SEQ ID NO: 137297 - DNA, 120 bp, Artificial Sequence
  ENSG00000103429_11 (sequence is synthesized)
tggagccatttctggaaagtatcaacgcaggggctttttgtggccatgttctggcccctcatccctcagtttgtttgcaactgtttgttttactgggccctgtactttaacccaattatt

SEQ ID NO: 137298 - DNA, 120 bp, Artificial Sequence
  ENSG00000103429_12 (sequence is synthesized)
actccggcggctggaaacccaggtgttgtgactggcactgcccaggctgagactcttcaagtcccgctgacgtctgagctttgatgcttaagaggggtgaggcagggagcggacttccta

SEQ ID NO: 137299 - DNA, 120 bp, Artificial Sequence
  ENSG00000103429_13 (sequence is synthesized)
ttttctaccctcagtaaaacaaggtgctgctttgtatatcaaaagctccaaccatgtcctctccccctcagcctgtgggtggcacgagcaaggactgacatccgcacagggaggattgtc

SEQ ID NO: 137300 - DNA, 120 bp, Artificial Sequence
  ENSG00000103429_14 (sequence is synthesized)
tgtttggctgacacagcagcagcccttcccacccagccaccttcctcacagggactaggaggctcagtccccaacggctggcaagactcagggtcctcagtggacatggtgtgggtgaca

SEQ ID NO: 137301 - DNA, 120 bp, Artificial Sequence
  ENSG00000103429_15 (sequence is synthesized)
tcagaagggtgccacatcagtcccctccccaacctcagtgactgacagaggatccggatctcagagcctgagaccaggtttattggggcctggcctgtcctctaagtcaagtttaggaaa

SEQ ID NO: 137302 - DNA, 120 bp, Artificial Sequence
  ENSG00000103429_16 (sequence is synthesized)
acaaggataagattctgtcataggcatagagagttgcacataaaaaataccgaagaaaacccaaaattcaatcaacaattctgtcttattgaagagttgctaggattcagagtaaaactc

SEQ ID NO: 137303 - DNA, 120 bp, Artificial Sequence
  ENSG00000103429_17 (sequence is synthesized)
aaaggattcagtttgagcctagaatgatggttagacttgtagtcactgggcttttgttttgctttatggaaatcattgaaggtctggatccctttctctgaatggagagattgagaggga

SEQ ID NO: 137304 - DNA, 120 bp, Artificial Sequence
  ENSG00000103429_18 (sequence is synthesized)
tgtcgggcagttcccattagatttagtggccttcatgttattcagaattgttttggtgatacctcacccctgtaatcccagcactttgggtgggtgaggcaggcggatcacttgaagcca

SEQ ID NO: 137305 - DNA, 80 bp, Artificial Sequence
  ENSG00000103429_19 (sequence is synthesized)
ctgcacttaaaaaaatcatctgtaaaataaattccgggatagtcgttttgttcaaggaaatgttttgtaaattgagctca

SEQ ID NO: 137306 - DNA, 120 bp, Artificial Sequence
  ENSG00000103429_20 (sequence is synthesized)
agtcgttttgttcaaggaaatgttttgtaaattgagctcacactatataatctttattgtcctatcctgatgtataatacagcaggtataattacaccaagcgctatagttataaatatg

SEQ ID NO: 137307 - DNA, 120 bp, Artificial Sequence
  ENSG00000103429_21 (sequence is synthesized)
gcatgaagtgaactatggccttttatttccttccagtgtgaacacagcaggtgtgagatgtcatcttggaagacaggccttgcagaaataggcctacatccaaaatattatcttgtgact

SEQ ID NO: 137308 - DNA, 120 bp, Artificial Sequence
  ENSG00000103429_22 (sequence is synthesized)
ccatgaaccattcattaaccctttgtatctttgagtgaaaattttactcaaaagttgcatctggaagttcgaagaaattacttgaaataaaaataaagatttctatatagataaaaccta

SEQ ID NO: 137309 - DNA, 120 bp, Artificial Sequence
  ENSG00000103429_23 (sequence is synthesized)
gcccgagtcctgagcatccccactcctggccgcggggttcggaccccagcttggccaactgcgctatcccttcccgagagccccacgtccgcacagccggtcgctgggcctcgcctgcgt

SEQ ID NO: 137310 - DNA, 120 bp, Artificial Sequence
  ENSG00000103429_24 (sequence is synthesized)
cctttcgggggtcagggtcagagccactccctcctggggctccctagggcgggaaggaggaggggtcgcttccaaacaccttggaggggaaccacggggcgcctgcccgccaggagcgct

SEQ ID NO: 137311 - DNA, 120 bp, Artificial Sequence
  ENSG00000103429_25 (sequence is synthesized)
tgccacaccctgcaacagccggaccagaattgatgaggcttctgatagtcgccacgctgagtttacggtctaattgtcgagattaatgatgttttgcagcagttttctacgtctgaaatt

SEQ ID NO: 137312 - DNA, 120 bp, Artificial Sequence
  ENSG00000103429_26 (sequence is synthesized)
caaaggaatgagaccctgtctcaaaaggaaaaaaaaatatgtaaatgtaacaaagtgatgaagcaggtgaagttgaggctgtcacagggaggccttgcccagtgtgggggcaaagaagct

SEQ ID NO: 137313 - DNA, 120 bp, Artificial Sequence
  ENSG00000103429_27 (sequence is synthesized)
ccctgtaggtcatgtccttgagagttaaaagatgggttgagtaggcagaggtctcaggcaccggggacagaagacaaggacattcagcacgggcagccatgctcttcccagcacccagaa

SEQ ID NO: 137314 - DNA, 120 bp, Artificial Sequence
  ENSG00000103429_28 (sequence is synthesized)
gaacgagtaaatggaaggtgaggagcaaagtcttctgacacaccgtggacattttagaaaacagctttcttgagatataatccaggccaggcgcggtggctcacacctggatcccagcac

SEQ ID NO: 137315 - DNA, 68 bp, Artificial Sequence
  ENSG00000103429_29 (sequence is synthesized)
actaaaaatacaaaaaaaaaaaattggccaggcttggtagtgcacaccttgtaatcccatacaatgag

SEQ ID NO: 137316 - DNA, 120 bp, Artificial Sequence
  ENSG00000103429_30 (sequence is synthesized)
aagactccatctcaaaaagagagagagagagatgtaatctacataaaattcacacgtttgaagtgcacaatccatggtttttaatgtgttcacaaatagtgtgattatcaccacagctgg

SEQ ID NO: 137317 - DNA, 120 bp, Artificial Sequence
  ENSG00000103429_31 (sequence is synthesized)
ttttagaacattttcatcaccctaaaagaaagcttttacccttcagtcaatcctcatttctccccaacccccagcccctggcaaacaccattctactttctgtctttatggatttgtcta

SEQ ID NO: 137318 - DNA, 120 bp, Artificial Sequence
  ENSG00000103429_32 (sequence is synthesized)
gtgaactgaagtaagtatgttttaatggttgtcacaacaggggatgggaaagaaataccaagtgagagaaagatcctcttttatttctcacacttgaaataaatcctccatccacccaga

SEQ ID NO: 137319 - DNA, 120 bp, Artificial Sequence
  ENSG00000103449_0 (sequence is synthesized)
tttttattctgccccagctgatgtttgagccagcatgtcgcggaggaagcaagcgaagcctcaacatttccaatccgaccccgaagtggcctcgctcccccggcgagatggagacacaga

SEQ ID NO: 137320 - DNA, 120 bp, Artificial Sequence
  ENSG00000103449_1 (sequence is synthesized)
aaagggtcaaccgagtcgccctactaagagcaaggatgcccacgtctgtggccggtgctgtgccgagttctttgaattatcagatcttctgctccacaagaagaactgtactaaaaatca

SEQ ID NO: 137321 - DNA, 120 bp, Artificial Sequence
  ENSG00000103449_2 (sequence is synthesized)
attagttttaatcgtaaatgaaaatccagcctccccacccgaaaccttctcccccagcccccctcctgataatcctgatgaacaaatgaatgacacagttaacaaaacagatcaagtgga

SEQ ID NO: 137322 - DNA, 120 bp, Artificial Sequence
  ENSG00000103449_3 (sequence is synthesized)
ctgcagcgacctttcagaacacaacggacttgacagggaagagtccatggaggtggaggccccggttgctaacaaaagcggcagcggcacttccagcggcagccacagcagtaccgcccc

SEQ ID NO: 137323 - DNA, 120 bp, Artificial Sequence
  ENSG00000103449_4 (sequence is synthesized)
agcagcagcagcagcagcagcagcagcggcggcggcggcagctcctccacaggtacctcagcgatcacaacctctctacctcaactcggggacctgacaacactgggcaacttctccgta

SEQ ID NO: 137324 - DNA, 120 bp, Artificial Sequence
  ENSG00000103449_5 (sequence is synthesized)
cgtaatcaacagcaacgtcatcatcgagaacctccagagcaccaaggtggcggtggcccagttctcccaggaagcgaggtgcggcggggcctctgggggcaagctggccgtcccagccct

SEQ ID NO: 137325 - DNA, 120 bp, Artificial Sequence
  ENSG00000103449_6 (sequence is synthesized)
catggaacaactcctagctctgcagcagcagcagatccaccagctgcaattgatcgaacagattcgtcaccaaatattgctgttggcttctcagaatgcagacttgccaacatcttctag

SEQ ID NO: 137326 - DNA, 120 bp, Artificial Sequence
  ENSG00000103449_7 (sequence is synthesized)
tccttctcaaggtactttacgaacatctgccaaccccttgtccacgctaagttcccatttatctcagcagctggcagcagcagctggattggcacagagcctcgccagccaatctgccag

SEQ ID NO: 137327 - DNA, 120 bp, Artificial Sequence
  ENSG00000103449_8 (sequence is synthesized)
cattagtggtgtgaaacagctacccccaatccagctacctcagagcagttctggcaacaccatcattccatccaacagcggctcttctcccaatatgaacatattggcagcggcagttac

SEQ ID NO: 137328 - DNA, 120 bp, Artificial Sequence
  ENSG00000103449_9 (sequence is synthesized)
caccccgtcctctgaaaaagtggcttcaagtgctggggcctcccatgtcagcaacccagcggtctcatcatcgtcctcaccagcttttgcaataagcagtttattaagtcctgcgtctaa

SEQ ID NO: 137329 - DNA, 120 bp, Artificial Sequence
  ENSG00000103449_10 (sequence is synthesized)
tccacttctacctcagcaagcctccgctaactcggttttccccagccctttgcccaacatcggaacaactgcagaggatttaaactccttgtctgccttggcccagcaaagaaaaagcaa

SEQ ID NO: 137330 - DNA, 120 bp, Artificial Sequence
  ENSG00000103449_11 (sequence is synthesized)
gccaccaaatgtcactgcctttgaagcgaaaagtacttccgatgaggcattcttcaaacacaagtgcaggttctgcgcgaaggtctttgggagtgacagtgccttgcagatccacttgcg

SEQ ID NO: 137331 - DNA, 120 bp, Artificial Sequence
  ENSG00000103449_12 (sequence is synthesized)
ttcccataccggagagaggccattcaagtgcaacatctgcgggaacaggttctccaccaaggggaatctgaaagtccactttcagcgccacaaagagaaataccctcatatccagatgaa

SEQ ID NO: 137332 - DNA, 120 bp, Artificial Sequence
  ENSG00000103449_13 (sequence is synthesized)
cccctatcctgtgcctgagcatttggacaatatccccacgagtactggcatcccatatggcatgtccatccctccagagaagccagtcaccagctggctagacaccaaaccagtcctgcc

SEQ ID NO: 137333 - DNA, 120 bp, Artificial Sequence
  ENSG00000103449_14 (sequence is synthesized)
tactctgaccacttcagtcggcctgccgttgcccccaaccctcccaagcctcatacccttcatcaagacggaagagccagcccccatccccatcagccattctgccaccagccccccagg

SEQ ID NO: 137334 - DNA, 120 bp, Artificial Sequence
  ENSG00000103449_15 (sequence is synthesized)
ctcagtcaaaagtgactccgggggccctgagtcagccacaagaaacctaggtgggctcccagaggaagccgaagggtccactctgccaccctctggtggcaaaagcgaagagagtggcat

SEQ ID NO: 137335 - DNA, 120 bp, Artificial Sequence
  ENSG00000103449_16 (sequence is synthesized)
ggtcaccaactcagtcccgacggcgagcagtagcgtcctgagctccccagcggcagactgcggccccgcgggcagtgccaccaccttcaccaaccctttgttgccgctcatgtccgagca

SEQ ID NO: 137336 - DNA, 120 bp, Artificial Sequence
  ENSG00000103449_17 (sequence is synthesized)
gttcaaggccaagtttccttttgggggactcctggactcagctcaggcatcagagacgtccaagcttcagcaactggtagaaaacattgacaagaaggccactgaccccaatgagtgcat

SEQ ID NO: 137337 - DNA, 120 bp, Artificial Sequence
  ENSG00000103449_18 (sequence is synthesized)
catctgccaccgggttctcagctgccagagcgccttgaaaatgcactacaggacacacactggggagaggccctttaagtgtaagatctgtggccgggctttcaccacgaaagggaatct

SEQ ID NO: 137338 - DNA, 120 bp, Artificial Sequence
  ENSG00000103449_19 (sequence is synthesized)
taaaacccactacagtgtccatcgtgctatgcccccgctcagagtccagcattcctgccccatctgccagaagaagttcacgaacgctgtggtcctgcagcagcacatccgaatgcatat

SEQ ID NO: 137339 - DNA, 120 bp, Artificial Sequence
  ENSG00000103449_20 (sequence is synthesized)
gggaggccagatccccaacaccccagtccccgacagctactctgagtccatggagtctgacacaggttcctttgatgagaaaaattttgatgacctagacaacttctctgatgaaaacat

SEQ ID NO: 137340 - DNA, 120 bp, Artificial Sequence
  ENSG00000103449_21 (sequence is synthesized)
gctttggaaaatcagatgaagatgatcaatgctggcctggcagagcagctacaggccagcctgaagtcagtggagaatgggtccatcgagggggatgtcctgaccaatgattcatcctca

SEQ ID NO: 137341 - DNA, 120 bp, Artificial Sequence
  ENSG00000103449_22 (sequence is synthesized)
gtgggtggtgacatggaaagccaaagtgctggcagcccagccatctcagagtctacctcttccatgcaggctctgtccccgtccaacagcacgcaggagttccacaagtcacccagcatt

SEQ ID NO: 137342 - DNA, 120 bp, Artificial Sequence
  ENSG00000103449_23 (sequence is synthesized)
gaggagaaaccacagagagcggtcccaagcgagtttgccaatggtttgtctcccaccccagtgaatggtggggctttggatttgacatctagtcacgcagagaaaatcatcaaagaagat

SEQ ID NO: 137343 - DNA, 120 bp, Artificial Sequence
  ENSG00000103449_24 (sequence is synthesized)
tctttggggatcctcttcccttttagagaccggggtaaatttaaaaacactgcttgtgacatttgtggcaaaacatttgcttgtcagagtgccttggacattcactatagaagtcatacc

SEQ ID NO: 137344 - DNA, 120 bp, Artificial Sequence
  ENSG00000103449_25 (sequence is synthesized)
aaagagagaccatttatttgcacagtttgcaatcgtggcttttccacaaagggtaatttgaagcagcacatgttgacacatcagatgcgagatctgccatcccagctctttgagcccagt

SEQ ID NO: 137345 - DNA, 120 bp, Artificial Sequence
  ENSG00000103449_26 (sequence is synthesized)
tccaaccttggccccaatcagaactcagcggtgattcccgccaactcgttgtcatctctcatcaagacagaggtcaacggcttcgtgcatgtttctcctcaggacagtaaggacaccccc

SEQ ID NO: 137346 - DNA, 120 bp, Artificial Sequence
  ENSG00000103449_27 (sequence is synthesized)
accagtcacgtcccgtctgggcctctgtcttcctctgccacatccccagttctgctccctgctctgcccaggagaactcccaagcagcactactgcaacacatgtggcaaaaccttctcc

SEQ ID NO: 137347 - DNA, 120 bp, Artificial Sequence
  ENSG00000103449_28 (sequence is synthesized)
tcatcgagtgccctgcagattcacgagagaactcacactggagagaaaccctttgcttgcactatttgtggaagagctttcacgactaaaggcaatcttaaggtacacatgggcactcac

SEQ ID NO: 137348 - DNA, 120 bp, Artificial Sequence
  ENSG00000103449_29 (sequence is synthesized)
atgtggaatagcacccctgcacgacggggtcggcggctctctgtggatggccccatgacatttctaggaggcaatcccgtcaagttcccagaaatgttccagaaggatttggcggcaaga

SEQ ID NO: 137349 - DNA, 120 bp, Artificial Sequence
  ENSG00000103449_30 (sequence is synthesized)
tcaggaagtggggatccttccagcttctggaatcagtatgcagcagcgctctccaacgggctggcgatgaaggccaacgagatctccgtcattcagaacggtggcatccctccaattcct

SEQ ID NO: 137350 - DNA, 120 bp, Artificial Sequence
  ENSG00000103449_31 (sequence is synthesized)
ggaagcctcggcagtgggaacagctcacctgttagtgggctgacgggaaacctggagaggctccagaactcagagcccaatgctcccctggccggcctggagaaaatggcaagcagtgag

SEQ ID NO: 137351 - DNA, 120 bp, Artificial Sequence
  ENSG00000103449_32 (sequence is synthesized)
aacggaaccaacttccgcttcacccgcttcgtggaggacagcaaggagatcgtcacgagttaaagcagctcgggctggagacatagcattcattcctgttcagaatgcgacctatggtgg

SEQ ID NO: 137352 - DNA, 120 bp, Artificial Sequence
  ENSG00000103449_33 (sequence is synthesized)
cctcctactccttgccccccaccccgccccgccccttccttctgttccccagatctatgaactacaacattatgaagacattcttttgtaccttgttcaactttagagttctaagaaagc

SEQ ID NO: 137353 - DNA, 120 bp, Artificial Sequence
  ENSG00000103449_34 (sequence is synthesized)
ttatttattagcgatataaccttgctttgcaaacagaatgcaagcgttaactttggtcttctgtattttggactaaatactaattgactagagtgctgtaaacttgctgtaacatttatg

SEQ ID NO: 137354 - DNA, 120 bp, Artificial Sequence
  ENSG00000103449_35 (sequence is synthesized)
gcaattgcaagttgccctgctaggcagttgtaatctggcattaacttattttctatatccagtttaatatgaatctggtgttgatgcaatgcctcagtgatgcattagatctctaataaa

SEQ ID NO: 137355 - DNA, 120 bp, Artificial Sequence
  ENSG00000103449_36 (sequence is synthesized)
gtctgtatatacatgtacactttgatcctgctggaaaattttatcagcaaacacattgtctaatctttcaaaacagatttaaggaaaggactgaaagtacagactgaacagtgtggttct

SEQ ID NO: 137356 - DNA, 120 bp, Artificial Sequence
  ENSG00000103449_37 (sequence is synthesized)
ttgaaaggtttggttttttaatttttattctaaaattcaacctttttttttgtcgatttaaccatttccattttgaactgctatttgtattgtgctttttacttgagtcgtcttcaatgt

SEQ ID NO: 137357 - DNA, 120 bp, Artificial Sequence
  ENSG00000103449_38 (sequence is synthesized)
taataagtttctgtacagtaataagcacgcagaattctttagagaaaaagaaaacaagcgttgttttggtagttgaaactgagacgtaacattttgccttgtaggtatattcacgataga

SEQ ID NO: 137358 - DNA, 120 bp, Artificial Sequence
  ENSG00000103449_39 (sequence is synthesized)
aaatgtgtgctggaatttcacaatgctgctaagtatagcatcttgaacaaccttcagtggagaaaatgtagatgctcttgtatatacaataagaaatatcactttcattcaaatgtacat

SEQ ID NO: 137359 - DNA, 120 bp, Artificial Sequence
  ENSG00000103449_40 (sequence is synthesized)
atgttccttacaagagcaaatgcttcttcttgatcaagagagcaggtatagtgtttgtttattttgtcttaggtatggaagaaaaaaattggactgttacatgcactttcttggaaagtt

SEQ ID NO: 137360 - DNA, 120 bp, Artificial Sequence
  ENSG00000103449_41 (sequence is synthesized)
gaaaggaaagggggggtccaatttctttaacatttaatacttactaacaacagagatactgtaattttactcaagtaatcaaatacattttttttgcaacagataaaacaaaatactgtg

SEQ ID NO: 137361 - DNA, 120 bp, Artificial Sequence
  ENSG00000103449_42 (sequence is synthesized)
ctttggaggttcagagctgcaagaagatggggactggtgtcggggcgccagcgcctgacccgctggggttgcggccggggtggagagtgctgctggccgccagttgttccggagacggtg

SEQ ID NO: 137362 - DNA, 120 bp, Artificial Sequence
  ENSG00000103449_43 (sequence is synthesized)
gggagggggcgggcgggccggcgggcggggggagccgccgccgccgccgccgctcgatttccgtaattttgagaagatttttttttagtaattttttattctgccccagctgatgtttga

SEQ ID NO: 137363 - DNA, 120 bp, Artificial Sequence
  ENSG00000103449_44 (sequence is synthesized)
cgaccccgaagtggcctcgctcccccggcgagatgccttcgtagatgaccacacaccatttgtacaacagaagttggtgttccccatgctgggcaaacaatgggaagccatcctgtcttt

SEQ ID NO: 137364 - DNA, 120 bp, Artificial Sequence
  ENSG00000103449_45 (sequence is synthesized)
gaataggatgttagcttggagttagagatttttctgtttaatttacaaatggatcttagtgagaagacatctgagcaaccaatggaaacaaacatgaaataaagggatttttataataaa

SEQ ID NO: 137365 - DNA, 120 bp, Artificial Sequence
  ENSG00000103460_0 (sequence is synthesized)
gtctccgcggctcgtctcctcagtccgcccggggaggaggaggaggagcggggccagccgccgccgccgccgccgtcccagcctcgcccagcgcacctgaactcgcctcgccgacccggg

SEQ ID NO: 137366 - DNA, 80 bp, Artificial Sequence
  ENSG00000103460_1 (sequence is synthesized)
ggccgcctcccgctctcccgcggctcgcgtggccgcgcctttgtgtgcggcggccgcggctcccgagctcctcgggctct

SEQ ID NO: 137367 - DNA, 80 bp, Artificial Sequence
  ENSG00000103460_2 (sequence is synthesized)
ttgtgtgcggcggccgcggctcccgagctcctcgggctctgggtcccggcgcccctccggccgcgagtcccacgcgccac

SEQ ID NO: 137368 - DNA, 120 bp, Artificial Sequence
  ENSG00000103460_3 (sequence is synthesized)
ccccggcgaaccccagtcccggcccccggccccgggcccagcttcggcatggatgtgaggttctaccccgcggcggccggggaccctgccagcctggacttcgcgcagtgcctggggtac

SEQ ID NO: 137369 - DNA, 120 bp, Artificial Sequence
  ENSG00000103460_4 (sequence is synthesized)
tgcctggggtactacggctacagcaagtttggaaataataataactatatgaatatggctgaggcgaacaatgcgttcttcgctgccagtgagcagacattccacacaccaagccttggg

SEQ ID NO: 137370 - DNA, 120 bp, Artificial Sequence
  ENSG00000103460_5 (sequence is synthesized)
gacgaggaattcgaaattccaccaatcacgcctcctccagagtcagaccctgccctaggcatgccggatgtactgctaccctttcaagccctcagcgatccattgccttcccagggaagt

SEQ ID NO: 137371 - DNA, 120 bp, Artificial Sequence
  ENSG00000103460_6 (sequence is synthesized)
gaattcacaccccagtttccccctcaaagcctggacctcccttccattacaatctcaagaaatctcgtggaacaagatggcgtgcttcatagcagtgggttgcatatggatcagagccac

SEQ ID NO: 137372 - DNA, 120 bp, Artificial Sequence
  ENSG00000103460_7 (sequence is synthesized)
acacaagtgtcccagtaccggcaggatccctccctgatcatgcggtccatcgtccacatgaccgatgctgcgcgttctggggtcatgcctcctgcccagctcaccaccatcaaccagtct

SEQ ID NO: 137373 - DNA, 120 bp, Artificial Sequence
  ENSG00000103460_8 (sequence is synthesized)
cagctcagcgcccagttggggttgaatttgggaggtgccagtatgcctcacacatctccttcacctccagcaagcaaatcagccactccctccccttccagctccatcaatgaagaggat

SEQ ID NO: 137374 - DNA, 120 bp, Artificial Sequence
  ENSG00000103460_9 (sequence is synthesized)
gctgatgaagccaacagagccattggagagaaaagagctgctccagactctggcaagaagcccaagactccaaagaaaaagaaaaagaaagatcccaatgagccacagaagccagtgtca

SEQ ID NO: 137375 - DNA, 120 bp, Artificial Sequence
  ENSG00000103460_10 (sequence is synthesized)
gcatatgccctgtttttcagagacacacaggctgcaattaaaggtcaaaaccccaatgcaacctttggagaggtctcaaaaattgtagcatctatgtgggacagccttggagaagaacaa

SEQ ID NO: 137376 - DNA, 120 bp, Artificial Sequence
  ENSG00000103460_11 (sequence is synthesized)
aagcaggtatataaaaggaaaacagaagctgccaaaaaagaatacctgaaggccctggcggcatacagggccagcctcgtttctaaggctgctgctgagtcagcagaagcccagaccatc

SEQ ID NO: 137377 - DNA, 120 bp, Artificial Sequence
  ENSG00000103460_12 (sequence is synthesized)
cgttctgttcagcagaccctggcgtcgaccaatctaacatcctctctccttctcaacactccactgtctcaacatggaacagtgtcagcatcacctcagactctccagcaatccctccct

SEQ ID NO: 137378 - DNA, 120 bp, Artificial Sequence
  ENSG00000103460_13 (sequence is synthesized)
aggtcaatcgctcccaaacccttaaccatgagactccccatgaaccagattgtcacatcagtcaccattgcagccaacatgccctcgaacattggggctccactgataagctccatggga

SEQ ID NO: 137379 - DNA, 120 bp, Artificial Sequence
  ENSG00000103460_14 (sequence is synthesized)
acgaccatggttggctcagcaccctccacccaagtgagtccttcggtgcaaacccagcagcatcagatgcaattgcagcagcagcagcagcagcaacaacaacagatgcaacagatgcag

SEQ ID NO: 137380 - DNA, 120 bp, Artificial Sequence
  ENSG00000103460_15 (sequence is synthesized)
cagcagcaactccagcagcaccaaatgcatcagcaaatccagcagcagatgcagcagcagcatttccagcaccacatgcagcagcacctgcagcagcagcagcagcatctccagcagcaa

SEQ ID NO: 137381 - DNA, 120 bp, Artificial Sequence
  ENSG00000103460_16 (sequence is synthesized)
attaatcaacagcagctgcagcagcagctgcagcagcgcctccagctgcagcagctgcaacacatgcagcaccagtctcagccttctcctcggcagcactcccctgtcgcctctcagata

SEQ ID NO: 137382 - DNA, 120 bp, Artificial Sequence
  ENSG00000103460_17 (sequence is synthesized)
acatcccccatccctgccatcgggagcccccagccagcctctcagcagcaccagtcgcaaatacagtctcagacacagactcaagtattatcgcaggtcagtattttctgaagacgcata

SEQ ID NO: 137383 - DNA, 120 bp, Artificial Sequence
  ENSG00000103460_18 (sequence is synthesized)
tggcagacggatttgcgtataccaaggagagtggcataggagggaaaagcatatgtggctgaaacctgtaagttggtgttggttatgcagaaatgtgtaacagatcaaacggtcctctca

SEQ ID NO: 137384 - DNA, 120 bp, Artificial Sequence
  ENSG00000103460_19 (sequence is synthesized)
agtgtctattagataggcaataagaactgcagtgtagctgagtaacatcttttagctgactataaatcactttgtttttaaacaagaaaagctgtgctcttttatgtgatgcctttttta

SEQ ID NO: 137385 - DNA, 120 bp, Artificial Sequence
  ENSG00000103460_20 (sequence is synthesized)
ttaatgaatcctgggacatactgatgactataaactggcctctctgagtcatagaaaaatggccttatttctccagaagtgagtaaaccacacttccaggctatctgaactcctgaagcc

SEQ ID NO: 137386 - DNA, 120 bp, Artificial Sequence
  ENSG00000103460_21 (sequence is synthesized)
ctaaaaataaaaagcacagttgtaactacctgaaatatgaagatccagtttcatacaaacatttgtatgacgtgaatagttgatggcatttttttgtcatgaaaaaaataatgtaaatca

SEQ ID NO: 137387 - DNA, 120 bp, Artificial Sequence
  ENSG00000103460_22 (sequence is synthesized)
cagacttttgccaaagctcttattttttttcctaaatctctccagaaaaaaaatgcaagtgactaaattcaattattgactaatttccactttttatccatgacttctccaaatcaaacc

SEQ ID NO: 137388 - DNA, 120 bp, Artificial Sequence
  ENSG00000103460_23 (sequence is synthesized)
acagtatatgttgtaacaatatctatgaccactgttagcccattatattcattccaattagaagaaatgtgaatactatattccgtgttttgagtgacaagtttcgaaaaataaaaacac

SEQ ID NO: 137389 - DNA, 120 bp, Artificial Sequence
  ENSG00000103460_24 (sequence is synthesized)
tgtatttttaaaagggaaatgcacttaaatgaaaacagttattacaaaagttaagatttaaaaagaaaaagcaagagtttttattatgatgtaataccagtagaatatttaaaaggcaca

SEQ ID NO: 137390 - DNA, 120 bp, Artificial Sequence
  ENSG00000103460_25 (sequence is synthesized)
ccacatctgaataatcaatgtaaatattttctttcaaagttgtaagttttcatatcatgtgctgtaaagttttcctaaatgaggctttaacgtaaacactggtgacataaaccattcatt

SEQ ID NO: 137391 - DNA, 120 bp, Artificial Sequence
  ENSG00000103460_26 (sequence is synthesized)
gctacgttgcttattgtgtttttatgctgttttatacttttttatgagttatgatagcagcaattaagttgtttgtattttgcttaactaaaacaaaaatgcttttatcttgctatagaa

SEQ ID NO: 137392 - DNA, 120 bp, Artificial Sequence
  ENSG00000103460_27 (sequence is synthesized)
taaacacatttcagtaaaaactgtggactgtattttgatgcaacaacaaagaaactgttcacttttcaaataaaatgatatgtcagatttcatttttggttccttgaatacatgtaagat

SEQ ID NO: 137393 - DNA, 120 bp, Artificial Sequence
  ENSG00000103460_28 (sequence is synthesized)
ggggaaatatgccacataccaagtttcgttttagcccaaacatcatcttccatttttcaattggaaatatgatatttatggccaagaatatgcattgcatagcctgaaatgaagatcctt

SEQ ID NO: 137394 - DNA, 87 bp, Artificial Sequence
  ENSG00000103460_29 (sequence is synthesized)
caagtacaaggtaagtatagagaaaaaagtaatcgcttttttgagggggctagaactagctgggtattgtaatgttattgcgattaa

SEQ ID NO: 137395 - DNA, 120 bp, Artificial Sequence
  ENSG00000103460_30 (sequence is synthesized)
ggctagaactagctgggtattgtaatgttattgcgattaaaatagatggtgaatgctaattcttaagccaaaataattatttcggtgcccatttattccccccttttcttgctctgtagc

SEQ ID NO: 137396 - DNA, 120 bp, Artificial Sequence
  ENSG00000103460_31 (sequence is synthesized)
ggttcctctttgagagcagtgtgaccactatccccagttgtcttgcatgattaattacagcatctgtcctgtcagaagctataatgaagaggtcttgataaaaattgcaaattaccactg

SEQ ID NO: 137397 - DNA, 120 bp, Artificial Sequence
  ENSG00000103460_32 (sequence is synthesized)
gcaacagtcttaaactgcttatgataaaatgaaaattaaaaacagcaagtgtcaaccctgaccagaatcctaatctggaaagaatgagggtgtgcgtggtgcgctccacagctactatgt

SEQ ID NO: 137398 - DNA, 120 bp, Artificial Sequence
  ENSG00000103460_33 (sequence is synthesized)
gcaagacattcaaaaataatggaatatggatccctcaaagttgttgtatttcagagattatttactgtatgttgtgggttatgaataatgaattcagctttcaatatttcataatcctct

SEQ ID NO: 137399 - DNA, 120 bp, Artificial Sequence
  ENSG00000103460_34 (sequence is synthesized)
cctactctgtattatgtacaaatattgaacagcaagagattctaattataaatttatggatttcttgctgtagaaaaatttatgtctaaattgaagcttttcataagatgtattagttga

SEQ ID NO: 137400 - DNA, 120 bp, Artificial Sequence
  ENSG00000103460_35 (sequence is synthesized)
caggtatcagtgttcaaacagccttagaatgatgcctaattacatctacaagggagtgattgtattccacaaagaaatgatgtgctagcatcagatccttcagaagtagagctcgaatgg

SEQ ID NO: 137401 - DNA, 120 bp, Artificial Sequence
  ENSG00000103460_36 (sequence is synthesized)
taaaagattttctgtgaattgaaactaacattacataacaataaccattttatattctgttgtgaaacctttagacagatgtcttcaaaattaattgctaaactacatgtgacagtaatt

SEQ ID NO: 137402 - DNA, 120 bp, Artificial Sequence
  ENSG00000103460_37 (sequence is synthesized)
gtgtattagttctgtaattgtcattttgaaaacccatgaagtattgcttggaaaaaaatgtcactagtgataagacttaattgcaagtgaagtctgttttcaactgtttgcagttagaag

SEQ ID NO: 137403 - DNA, 120 bp, Artificial Sequence
  ENSG00000103460_38 (sequence is synthesized)
caggtgttgtaacatctattaaatgattttataaatcttgggttttatcacatttgattaaatgctgctaagccactgatggtcaattccagaggaaaaaaaaagtttaatgactacagt

SEQ ID NO: 137404 - DNA, 120 bp, Artificial Sequence
  ENSG00000103460_39 (sequence is synthesized)
ttataaaattaatcaccaggcaaaactacatatttaaaatgtcaaaaggcttgaatcatgaaaagaattcctcaaccttgttaccaaattattgttttcaggattcacaaagcatgttat

SEQ ID NO: 137405 - DNA, 120 bp, Artificial Sequence
  ENSG00000103460_40 (sequence is synthesized)
atatccatttatatttcagtttatacatatgactggtttctattcctgagacttaagtaagtacttggtgcgctttttcttttgttacaggtcagaaataaatcaggataatgaaaaata

SEQ ID NO: 137406 - DNA, 120 bp, Artificial Sequence
  ENSG00000103460_41 (sequence is synthesized)
gaaccgacacgaggcttcacctgggaagcttcaagtctgcctacctgtgaaaggtcaggccccaacaccccttctgggaaatcctacagctaggatgcatttctctcactgaaccccatc

SEQ ID NO: 137407 - DNA, 120 bp, Artificial Sequence
  ENSG00000103460_42 (sequence is synthesized)
cagcagaggacagaagagtcagaagagggtagagaggatttagatactcatagaagatgtagtggaggatgaagtgccaacctcgctcgggagccaggcgcattgaggagagacttcatt

SEQ ID NO: 137408 - DNA, 120 bp, Artificial Sequence
  ENSG00000103460_43 (sequence is synthesized)
tttgatgataatcttttcattttaaataatgtggaattttttcccctttgttcaaaaagggcactacaaagggattaggtccatcctgcttgcctttccattgatcatctttctgaaccc

SEQ ID NO: 137409 - DNA, 120 bp, Artificial Sequence
  ENSG00000103460_44 (sequence is synthesized)
ttgtgctgtcctggtgggtttccaaactttgaagctgcctctgcgtgtctcattattgtcaccgggcatttgaaattttattccaagttcattttaaagcaaggcagtatgagaggtatt

SEQ ID NO: 137410 - DNA, 120 bp, Artificial Sequence
  ENSG00000103460_45 (sequence is synthesized)
cagaaattagccatgcttgtgggagatacttccttaggggcttcgtctcctctccttccccttgcaactcctccacacaaatgaagggaagaatgggttccttgggggtcgatccccccc

SEQ ID NO: 137411 - DNA, 120 bp, Artificial Sequence
  ENSG00000103460_46 (sequence is synthesized)
ttactccttgcatgaaactccaattaccattaaaagaagttaacttttacatatccacagaagaatagatcaactcctatgagtgataaaatagaataattgttttcaagaatgaagagt

SEQ ID NO: 137412 - DNA, 120 bp, Artificial Sequence
  ENSG00000103460_47 (sequence is synthesized)
ggaaagtccttgattttgtttacaaatcatgaacttatttcaggaactcattcctagaagcttgttttgttgggaaggtgcaacattagaaatttctttttagtttgcactgagtttatt

SEQ ID NO: 137413 - DNA, 120 bp, Artificial Sequence
  ENSG00000103460_48 (sequence is synthesized)
actgtagatagcagactgattttctgtcccagaaatataattctgagggactggaaaagtgctgcacctaacttttaaactctggagagaaagatgcatgttgactgaacacccagccat

SEQ ID NO: 137414 - DNA, 120 bp, Artificial Sequence
  ENSG00000103460_49 (sequence is synthesized)
cagaccacttaggaaaaggagaagcccaaatcatgtttaatatgctggaattttatttatgtaactcagtggggtcactaatggaaatctcctagcttggatgatttctgacttttaatt

SEQ ID NO: 137415 - DNA, 120 bp, Artificial Sequence
  ENSG00000103460_50 (sequence is synthesized)
ttgctccaaaagaaaaccaacattgaaatgctttgctcttttctcttctgtcttcatcattttacctgttgtttttatcctcttgtttggtatagtttagaaaggtatctgagggaaaga

SEQ ID NO: 137416 - DNA, 120 bp, Artificial Sequence
  ENSG00000103460_51 (sequence is synthesized)
agacattgatggagaaactcattattttctctaaagtaagccatttgcagcaaagcttattcttcttgctaccttatttattgccttagcatgaggttttcagctgttctcaagaaaaag

SEQ ID NO: 137417 - DNA, 120 bp, Artificial Sequence
  ENSG00000103460_52 (sequence is synthesized)
tgattctcaagtaatctgtattgcatccagaaatctttttcttatttgcaatagtaaatataaaaattgtgctccagtgagggtggcagggttctgttttgttttaatatccgtgtgtgt

SEQ ID NO: 137418 - DNA, 120 bp, Artificial Sequence
  ENSG00000103460_53 (sequence is synthesized)
gtgtgtgtgtgtgtgtgtgcatgcgctaacatttaaaaatcaaagccaaggagaccaacctttttatgtgagttgtgtttatgtgacctaatttgtgcagcagctattttatagctgaga

SEQ ID NO: 137419 - DNA, 120 bp, Artificial Sequence
  ENSG00000103479_0 (sequence is synthesized)
ggcggacgggcgggcgcttcgccgtttgaatggctgcgggcccgggccctcacctcacctgaggtccggccgcccaggggtgcgctatgccgtcgggaggtgaccagtcgccaccgcccc

SEQ ID NO: 137420 - DNA, 120 bp, Artificial Sequence
  ENSG00000103479_1 (sequence is synthesized)
cgcctccccctccggcggcggcagcctcggatgaggaggaggaggacgacggcgaggcggaagacgccgcgccgcctgccgagtcgcccacccctcagatccagcagcggttcgacgagc

SEQ ID NO: 137421 - DNA, 120 bp, Artificial Sequence
  ENSG00000103479_2 (sequence is synthesized)
tgtgcagccgcctcaacatggacgaggcggcgcgggccgaggcctgggacagctaccgcagcatgagcgaaagctacacgctggagggaaatgatcttcattggttagcatgtgccttat

SEQ ID NO: 137422 - DNA, 120 bp, Artificial Sequence
  ENSG00000103479_3 (sequence is synthesized)
atgtggcttgcagaaaatctgttccaactgtaagcaaagggacagtggaaggaaactatgtatctttaactagaatcctgaaatgttcagagcagagcttaatcgaattttttaataaga

SEQ ID NO: 137423 - DNA, 120 bp, Artificial Sequence
  ENSG00000103479_4 (sequence is synthesized)
tgaagaagtgggaagacatggcaaatctacccccacatttcagagaacgtactgagagattagaaagaaacttcactgtttctgctgtaatttttaagaaatatgaacccatttttcagg

SEQ ID NO: 137424 - DNA, 120 bp, Artificial Sequence
  ENSG00000103479_5 (sequence is synthesized)
acatctttaaataccctcaagaggagcaacctcgtcagcagcgaggaaggaaacagcggcgacagccctgtactgtgtctgaaattttccatttttgttgggtgctttttatatatgcaa

SEQ ID NO: 137425 - DNA, 120 bp, Artificial Sequence
  ENSG00000103479_6 (sequence is synthesized)
aaggtaatttccccatgattagtgatgatttggtcaattcttatcacctgctgctgtgtgctttggacttagtttatggaaatgcacttcagtgttctaatcgtaaagaacttgtgaacc

SEQ ID NO: 137426 - DNA, 120 bp, Artificial Sequence
  ENSG00000103479_7 (sequence is synthesized)
ctaattttaaaggcttatctgaagattttcatgctaaagattctaaaccttcctctgaccccccttgtatcattgagaaactgtgttccttacatgatggcctagttttggaagcaaagg

SEQ ID NO: 137427 - DNA, 120 bp, Artificial Sequence
  ENSG00000103479_8 (sequence is synthesized)
ggataaaggaacatttctggaaaccctatattaggaaactttatgaaaaaaagctccttaagggaaaagaagaaaatctcactgggtttctagaacctgggaactttggagagagtttta

SEQ ID NO: 137428 - DNA, 120 bp, Artificial Sequence
  ENSG00000103479_9 (sequence is synthesized)
aagccatcaataaggcctatgaggagtatgttttatctgttgggaatttagatgagcggatatttcttggagaggatgctgaggaggaaattgggactctctcaaggtgtctgaacgctg

SEQ ID NO: 137429 - DNA, 120 bp, Artificial Sequence
  ENSG00000103479_10 (sequence is synthesized)
gttcaggaacagagactgctgaaagggtgcagatgaaaaacatcttacagcagcattttgacaagtccaaagcacttagaatctccacaccactaactggtgttaggtacattaaggaga

SEQ ID NO: 137430 - DNA, 120 bp, Artificial Sequence
  ENSG00000103479_11 (sequence is synthesized)
atagcccttgtgtgactccagtttctacagctacgcatagcttgagtcgtcttcacaccatgctgacaggcctcaggaatgcaccaagtgagaaactggaacagattctcaggacatgtt

SEQ ID NO: 137431 - DNA, 120 bp, Artificial Sequence
  ENSG00000103479_12 (sequence is synthesized)
ccagagatccaacccaggctattgctaacagactgaaagaaatgtttgaaatatattctcagcatttccagccagacgaggatttcagtaattgtgctaaagaaattgccagcaaacatt

SEQ ID NO: 137432 - DNA, 120 bp, Artificial Sequence
  ENSG00000103479_13 (sequence is synthesized)
ttcgttttgcggagatgctttactataaagtattagaatctgttattgagcaggaacaaaaaagactaggagacatggatttatctggtattctggaacaagatgcgttccacagatctc

SEQ ID NO: 137433 - DNA, 120 bp, Artificial Sequence
  ENSG00000103479_14 (sequence is synthesized)
tcttggcctgctgccttgaggtcgtcactttttcttataagcctcctgggaattttccatttattactgaaatatttgatgtgcctctttatcatttttataaggtgatagaagtattca

SEQ ID NO: 137434 - DNA, 120 bp, Artificial Sequence
  ENSG00000103479_15 (sequence is synthesized)
ttagagcagaagatggcctttgtagagaggtggtaaaacaccttaatcagattgaagaacagatcttagatcatttggcatggaaaccagagtctccactctgggaaaaaattagagaca

SEQ ID NO: 137435 - DNA, 120 bp, Artificial Sequence
  ENSG00000103479_16 (sequence is synthesized)
atgaaaacagagttcctacatgtgaagaggtcatgccacctcagaacctggaaagggcagatgaaatttgcattgctggctcccctttgactcccagaagggtgactgaagttcgtgctg

SEQ ID NO: 137436 - DNA, 120 bp, Artificial Sequence
  ENSG00000103479_17 (sequence is synthesized)
atactggaggacttggaaggagcataacatctccaaccacattatacgataggtacagctccccaccagccagcactaccagaaggcggctatttgttgagaatgatagcccctctgatg

SEQ ID NO: 137437 - DNA, 120 bp, Artificial Sequence
  ENSG00000103479_18 (sequence is synthesized)
gagggacgcctgggcgcatgcccccacagcccctagtcaatgctgtccctgtgcagaatgtatctggggagactgtttctgtcacaccagttcctggacagactttggtcaccatggcaa

SEQ ID NO: 137438 - DNA, 120 bp, Artificial Sequence
  ENSG00000103479_19 (sequence is synthesized)
ccgccactgtcacagccaacaatgggcaaacggtaaccattcctgtgcaaggtattgccaatgaaaatggagggataacattcttccctgtccaagtcaatgttggggggcaggcacaag

SEQ ID NO: 137439 - DNA, 120 bp, Artificial Sequence
  ENSG00000103479_20 (sequence is synthesized)
gctctcaacaggtgacaggaacaactttgcaagtccctggtcaagtggccattcaacagatttccccaggtggccaacagcagaagcaaggccagtctgtaaccagcagtagtaatagac

SEQ ID NO: 137440 - DNA, 120 bp, Artificial Sequence
  ENSG00000103479_21 (sequence is synthesized)
ccaggaagaccagctctttatcgcttttctttagaaaggtataccatttagcagctgtccgccttcgggatctctgtgccaaactagatatttcagatgaattgaggaaaaaaatctgga

SEQ ID NO: 137441 - DNA, 120 bp, Artificial Sequence
  ENSG00000103479_22 (sequence is synthesized)
cctgctttgaattctccataattcagtgtcctgaacttatgatggacagacatctggaccagttattaatgtgtgccatttatgtgatggcaaaggtcacaaaagaagataagtccttcc

SEQ ID NO: 137442 - DNA, 120 bp, Artificial Sequence
  ENSG00000103479_23 (sequence is synthesized)
agaacattatgcgttgttataggactcagccgcaggcccggagccaggtgtatagaagtgttttgataaaagggaaaagaaaaagaagaaattctggcagcagtgatagcagaagccatc

SEQ ID NO: 137443 - DNA, 120 bp, Artificial Sequence
  ENSG00000103479_24 (sequence is synthesized)
agaattctccaacagaactaaacaaagatagaaccagtagagactccagtccagttatgaggtcaagcagcaccttgccagttccacagcccagcagtgctcctcccacacctactcgcc

SEQ ID NO: 137444 - DNA, 120 bp, Artificial Sequence
  ENSG00000103479_25 (sequence is synthesized)
tcacaggtgccaacagtgacatggaagaagaggagaggggagacctcattcagttctacaacaacatctacatcaaacagattaagacatttgccatgaagtactcacaggcaaatatgg

SEQ ID NO: 137445 - DNA, 120 bp, Artificial Sequence
  ENSG00000103479_26 (sequence is synthesized)
atgctcctccactctctccctatccatttgtaagaacaggctcccctcgccgaatacagttgtctcaaaatcatcctgtctacatttccccacataaaaatgaaacaatgctttctcctc

SEQ ID NO: 137446 - DNA, 120 bp, Artificial Sequence
  ENSG00000103479_27 (sequence is synthesized)
gagaaaagattttctattacttcagcaacagtccttcaaagagactgagagaaattaatagtatgatacgcacaggagaaactcctactaaaaagagaggaattcttttggaagatggaa

SEQ ID NO: 137447 - DNA, 120 bp, Artificial Sequence
  ENSG00000103479_28 (sequence is synthesized)
gtgaatcacctgcaaaaagaatttgcccagaaaatcattctgccttattacgccgtctccaagatgtagctaatgaccgtggttcccactgaggttagtctcttgtattaaactcttcac

SEQ ID NO: 137448 - DNA, 120 bp, Artificial Sequence
  ENSG00000103479_29 (sequence is synthesized)
aaaatctgtttagcagcagcctttaatgcatctagattatggagcttttttccttaatccagctgatgagttacagcctgttagtaacatgaggggacattttggtgagaaatgggactt

SEQ ID NO: 137449 - DNA, 120 bp, Artificial Sequence
  ENSG00000103479_30 (sequence is synthesized)
aactccttccagtgtccttagaacattttaattcatcccaactgtctttttttccctaccattcagtgattactgtcaaggctgcttagaatccaaacttggatttttgactctggcaaa

SEQ ID NO: 137450 - DNA, 120 bp, Artificial Sequence
  ENSG00000103479_31 (sequence is synthesized)
gcttttagaaatactgcaagaaaatgatgtgtacccaaacgtgagcataggaggcttctgttgacgtactccaacagaagaactgtgtttcaagttcaatcctacctgttttgtggtcag

SEQ ID NO: 137451 - DNA, 120 bp, Artificial Sequence
  ENSG00000103479_32 (sequence is synthesized)
ctgtagtcctcataaaaagcaaaacaaaaattaggtattttgtcctaaaacacctggtaggagtgtgtgattttttgcattcctgacaaaggagagcacacccaggtttggaggtcctag

SEQ ID NO: 137452 - DNA, 120 bp, Artificial Sequence
  ENSG00000103479_33 (sequence is synthesized)
gtcattagccctcgtctcccgttccctttgtgcacatcttccctctccccattcggtgtggtgcagtgtgaaaagtccttgattgttcgggtgtgcaatgtctgagtgaacctgtataag

SEQ ID NO: 137453 - DNA, 120 bp, Artificial Sequence
  ENSG00000103479_34 (sequence is synthesized)
tggaggcactttagggctgtaaaatgcatgattttgtaacccagattttgctgtatatttgtgatagcactttctacaatgtgaactttattaaatacaaaacttccaggctaaacatcc

SEQ ID NO: 137454 - DNA, 120 bp, Artificial Sequence
  ENSG00000103479_35 (sequence is synthesized)
aatattttctttaatgcttttatatttttttaaaatgttaaaacccctatagccaccttttgggaatgttttaaattctccagttttttgttatatagggatcaaccagctaagaaaaga

SEQ ID NO: 137455 - DNA, 120 bp, Artificial Sequence
  ENSG00000103479_36 (sequence is synthesized)
ttttaatcaagttgaattgaggggattaatatgaaaacttatgacctcttcctttaggagggagttatctaaaagaaatgtctattaaggtgatatatttaaaaatatttttgggtgttc

SEQ ID NO: 137456 - DNA, 120 bp, Artificial Sequence
  ENSG00000103479_37 (sequence is synthesized)
ctggcagtttaaaaaaattggttggagaatttaggtttttattagtaccatagtaccatttatacaaattagaaaatgttatttaacagctgaattatctatacatatctttattaatca

SEQ ID NO: 137457 - DNA, 120 bp, Artificial Sequence
  ENSG00000103479_38 (sequence is synthesized)
ctattgttccagcagttttcaagtcaaattaataatcttattagggagaaaattcaattgtaaattgaatcagtataaacaaagttactaggtaacttcatattgctgagagaaatatgg

SEQ ID NO: 137458 - DNA, 120 bp, Artificial Sequence
  ENSG00000103479_39 (sequence is synthesized)
aacttacattgttcaattagaatagtgttctgcaaaaatatttataaaacttctcaagatactgctactgtaattttatatgaagataagtgtatttttcaataaagcatttataaatta

SEQ ID NO: 137459 - DNA, 120 bp, Artificial Sequence
  ENSG00000103479_40 (sequence is synthesized)
ttagttaggtcttcgcccaggaatgaacaagggcagctcggaagtgagaagcgtggagtcatttaggtcagatcccttgcactgtcataactttctcactgttaggatttttgcaaaggc

SEQ ID NO: 137460 - DNA, 120 bp, Artificial Sequence
  ENSG00000103479_41 (sequence is synthesized)
agtttcgtgaacgtacagagacaggcccttgctattatccctattttttagataaggatatccaggcgatgaggaagttttacttctgggaacagcctggatacgaaaccttcacacgtc

SEQ ID NO: 137461 - DNA, 120 bp, Artificial Sequence
  ENSG00000103479_42 (sequence is synthesized)
gtcacatggaaatttaaaacccactttgcctttattaccattcatctctgagaggcaaatcggccagatctgtgtatcttacttagaatgacttgacattatggttgggtgctgtcactg

SEQ ID NO: 137462 - DNA, 120 bp, Artificial Sequence
  ENSG00000103479_43 (sequence is synthesized)
cagtgtagtactgcaggtagtacttggcatgtgatgctagatgggctctgattgaatcctggatctgttataatttgagttatgtttctcaacctgttctgaggacaactattgctatac

SEQ ID NO: 137463 - DNA, 120 bp, Artificial Sequence
  ENSG00000103479_44 (sequence is synthesized)
ttgtgaaaataacatctttttatgagaaaaatacatcaatatctaatctattaataatccttttggggatgggagggtggcaattaggtttaatatgttataattacaccttgttatgag

SEQ ID NO: 137464 - DNA, 120 bp, Artificial Sequence
  ENSG00000103479_45 (sequence is synthesized)
ctctacccacaaattgggaaggtgccaagagaccaaagaatgactcagacaagtccagcttggtaagtagataacgtttattaagacttacatatggaggaggcagaggtggtggggaaa

SEQ ID NO: 137465 - DNA, 120 bp, Artificial Sequence
  ENSG00000103479_46 (sequence is synthesized)
aataaaagacttatatacagggtactcctaggtagcagcaggacagctctagagatcctcgccacctcccatcgctaagctgcttttaagctaattttctggctctttgcctactatgtg

SEQ ID NO: 137466 - DNA, 120 bp, Artificial Sequence
  ENSG00000103479_47 (sequence is synthesized)
tgtgcacgatgggactgttttccttggtagtttctcagatcttctctgggatgttggggttctcagggacacctgttccttggctgggcaccatggccttggctcactgcctagccttca

SEQ ID NO: 137467 - DNA, 120 bp, Artificial Sequence
  ENSG00000103479_48 (sequence is synthesized)
gagagcttacagtacagtcagcgagatgaggcaggtatgaagattccagtgcatgcaatgcagtgtgttataaaagtcccatgactaccagagggaatacagatgtaaaacttaggagga

SEQ ID NO: 137468 - DNA, 120 bp, Artificial Sequence
  ENSG00000103479_49 (sequence is synthesized)
tccatggcccaggggttggggactcctgctttagagtggttgatattcaaactctccaaaccagtaatgaagtttgactcatatttagtatccaattacaaggttttgaattttttgact

SEQ ID NO: 137469 - DNA, 120 bp, Artificial Sequence
  ENSG00000103479_50 (sequence is synthesized)
gccaaaagttttttttttaactttattattaaaatgggaaagacagctgattttatttagatggaataattgttaagatactttttctgccttagattactattgtatttgtaattaaag

SEQ ID NO: 137470 - DNA, 120 bp, Artificial Sequence
  ENSG00000103479_51 (sequence is synthesized)
ccactgtcacagccaacaatgggcaaacggtaaccattcctgtgcaaggtaaggaaggcagagttggatattgagttccttctctgtggcatgtattgaaaagttacccgaggtttggct

SEQ ID NO: 137471 - DNA, 120 bp, Artificial Sequence
  ENSG00000103479_52 (sequence is synthesized)
gtttatcagctgtttgactgtgtgtgtggcatttaaacctgaggccatttgatttctcaagtcgttttataattaatttgtagaaagagtcgggcaaataggtccaggatgcaaagccta

SEQ ID NO: 137472 - DNA, 120 bp, Artificial Sequence
  ENSG00000103479_53 (sequence is synthesized)
taagacctatgtaaattcttttaatattgtatgaaagatctattttgggtaaaagctttgattcctctctatctaataaaagtttttagaatactgtgatttttatgagctgagaaggct

SEQ ID NO: 137473 - DNA, 120 bp, Artificial Sequence
  ENSG00000103479_54 (sequence is synthesized)
taaaaaaagtagcacacatgtcactagctaatcttgtatagcagcctttttttattttatgaaaattaaataccattgaaaatgtcagaaaaaaaataaaaagttctctttcatgtgtta

SEQ ID NO: 137474 - DNA, 78 bp, Artificial Sequence
  ENSG00000103479_55 (sequence is synthesized)
aatgtcagaaaaaaaataaaaagttctctttcatgtgttacagagaggcatagagttaaagcattgatttggtagcta

SEQ ID NO: 137475 - DNA, 120 bp, Artificial Sequence
  ENSG00000103485_0 (sequence is synthesized)
agacagctgcaagtcaccatggacgctgaaggcctggcgctgctgctgccgcccgtcaccctggcagccctggtggacagctggctccgagaggactgcccagggctcaactacgcagcc

SEQ ID NO: 137476 - DNA, 120 bp, Artificial Sequence
  ENSG00000103485_1 (sequence is synthesized)
ttggtcagcggggcaggcccctcgcaggcggcgctgtgggccaaatcccctggggtactggcagggcagcctttcttcgatgccatatttacccaactcaactgccaagtctcctggttc

SEQ ID NO: 137477 - DNA, 120 bp, Artificial Sequence
  ENSG00000103485_2 (sequence is synthesized)
ctccccgagggatcgaagctggtgccggtggccagagtggccgaggtccggggccctgcccactgcctgctgctgggggaacgggtggccctcaacacgctggcccgctgcagtggcatt

SEQ ID NO: 137478 - DNA, 120 bp, Artificial Sequence
  ENSG00000103485_3 (sequence is synthesized)
gccagtgctgccgccgctgcagtggaggccgccaggggggccggctggactgggcacgtggcaggcacgaggaagaccacgccaggcttccggctggtggagaagtatgggctcctggtg

SEQ ID NO: 137479 - DNA, 120 bp, Artificial Sequence
  ENSG00000103485_4 (sequence is synthesized)
ggcggggccgcctcgcaccgctacgacctgggagggctggtgatggtgaaggataaccatgtggtggccgccggtggcgtggagaaggcggtgcgggcggccagacaggcggctgacttc

SEQ ID NO: 137480 - DNA, 120 bp, Artificial Sequence
  ENSG00000103485_5 (sequence is synthesized)
actctgaaggtggaagtggaatgcagcagcctgcaggaggccgtgcaggcagctgaggctggtgccgaccttgtcctgctggacaacttcaagccagaggagctgcaccccacggccacc

SEQ ID NO: 137481 - DNA, 120 bp, Artificial Sequence
  ENSG00000103485_6 (sequence is synthesized)
gtgctgaaggcccagttcccgagtgtggctgtggaagccagtgggggcatcaccctggacaacctcccccagttctgcgggccgcacatagacgtcatctccatggggatgctgacccag

SEQ ID NO: 137482 - DNA, 120 bp, Artificial Sequence
  ENSG00000103485_7 (sequence is synthesized)
gcggccccagcccttgatttctccctcaagctgtttgccaaagaggtggctccagtgcccaaaatccactagtcctaaaccggaagaggatgacaccggccatgggttaacgtggctcct

SEQ ID NO: 137483 - DNA, 120 bp, Artificial Sequence
  ENSG00000103485_8 (sequence is synthesized)
caggaccctctgggtcacacatctttagggtcagtggccaatggggcacatttggcactagcttgagcccaactctggctctgccacctgctgctcctgtgacctgtcagggctgacttc

SEQ ID NO: 137484 - DNA, 120 bp, Artificial Sequence
  ENSG00000103485_9 (sequence is synthesized)
aatgggtctaataaaggatcaaccacatggggttctgcggtgataatgagcacatagtgaggggtcagcaaatgtcagaagttacctgggacagccgggcacgatggctcacacctgtaa

SEQ ID NO: 137485 - DNA, 120 bp, Artificial Sequence
  ENSG00000103485_10 (sequence is synthesized)
tctccaaagaagaaacaaaggaaagaaagagagaaagagagagggagggagggagggagggaaaggaaggatggaaagaaaggaagaaaggcaggcaaaagccccagacaggccaaaacc

SEQ ID NO: 137486 - DNA, 120 bp, Artificial Sequence
  ENSG00000103485_11 (sequence is synthesized)
ttcatccttcatgcacccaacctgtaccaaacaccagcatggcctggctgtgagtgcacagcagatggaggtttgctgggcagagacactgggctggcctagacactgcctttggtgata

SEQ ID NO: 137487 - DNA, 120 bp, Artificial Sequence
  ENSG00000103485_12 (sequence is synthesized)
ccctaaaccaaaggggccagtcccacagtaagaaggagaccactactactcctgctgccctcctccccccaccttgcctagtttacaagacaggaggaaagagagaaagcaaaaagttag

SEQ ID NO: 137488 - DNA, 120 bp, Artificial Sequence
  ENSG00000103485_13 (sequence is synthesized)
aaaacaaaacaaaacagaagtaagataaatagccagaagaccttggcgacaccacccggccctggtagttaaaaaaaagtaacaataataataatatcaacccctgacctaaactacttg

SEQ ID NO: 137489 - DNA, 120 bp, Artificial Sequence
  ENSG00000103485_14 (sequence is synthesized)
tgttatctgtaaattccagacattgtatgaaaaagcattgcaaaactttctgctctgttagctgatgcgtgtagcccccagtcacgttccccgcttgcttgagatatcatgaccctttca

SEQ ID NO: 137490 - DNA, 120 bp, Artificial Sequence
  ENSG00000103485_15 (sequence is synthesized)
cgtggaccccttagagttgtaagcctttaaaaaggccaagaatttctttttcagggatctcagctattaagatgcaagtctgccaatgctcctggccaaataaacctcttccttctttaa

SEQ ID NO: 137491 - DNA, 120 bp, Artificial Sequence
  ENSG00000103485_16 (sequence is synthesized)
gactttcagggcctgctgaggaatctgcaggcctggcagaggacaggagggaggcttggggagcctgggaagggccggctgacagcttgatgggccctccctccctccacagtcccaccc

SEQ ID NO: 137492 - DNA, 120 bp, Artificial Sequence
  ENSG00000103485_17 (sequence is synthesized)
agccaccatgcctggttttggaattggttctttatctttgttctgctgctgcgtggcgtgatgttcaagagcaaaggacaacacaggggaagccagtgtcactggcaccacagccttgag

SEQ ID NO: 137493 - DNA, 120 bp, Artificial Sequence
  ENSG00000103485_18 (sequence is synthesized)
cccatctctctagccctctgcaccttatttcccatctgtgaaatgcccttaaacaccccttctaattttaatattctgagtcaaattgagctcaggtccaaatgccaaatattgctgata

SEQ ID NO: 137494 - DNA, 120 bp, Artificial Sequence
  ENSG00000103485_19 (sequence is synthesized)
attgagctcaggtccaaatgccaaatattgctgatattcatccactttttgacccacaaaagtggtcattttaacctacaataaaacatcctggctcagtggctcatacctgtaatccca

SEQ ID NO: 137495 - DNA, 120 bp, Artificial Sequence
  ENSG00000103485_20 (sequence is synthesized)
tacttaagtccaggagtctgagaccagcctgggccatatagcaagattctgtctctacaaaaaattaaaaaattagccatgcttgtgggcaagcccctgtagtcccagccacttgggagg

SEQ ID NO: 137496 - DNA, 120 bp, Artificial Sequence
  ENSG00000103485_21 (sequence is synthesized)
ggaggatcacttgatcccaggaggtggaggctgcagtgaactatgactgcactgaactccagcctgggcgacagagcgggaccctgactcaaaaacaaaacagtggccaggtgcggtggc

SEQ ID NO: 137497 - DNA, 65 bp, Artificial Sequence
  ENSG00000103485_22 (sequence is synthesized)
tgagttagagaccatcctggccaccatggtgaaacgtcgtctctattaaaaatacaaaaattagc

SEQ ID NO: 137498 - DNA, 87 bp, Artificial Sequence
  ENSG00000103485_23 (sequence is synthesized)
cgggagactgaggtgggagaatcacttgatcccaggaggtagaggctgcagtgagctatcttgagaccctgtctcaaaaacaaaaca

SEQ ID NO: 137499 - DNA, 120 bp, Artificial Sequence
  ENSG00000103485_24 (sequence is synthesized)
ggcgacaggttgagaccctgtctcaaaaacaaaacaaagcaaaaacaaccccaaagtctggtttccttattaaccccaagttcatggtccacccgaagcttttcaaatgtcagtcccggc

SEQ ID NO: 137500 - DNA, 120 bp, Artificial Sequence
  ENSG00000103489_0 (sequence is synthesized)
tcgctcgccggccgcgctccgaagatggtggcggcgccgtgcgcccggaggctggcccggcgctcgcactcggcgctgctcgcggcgctcacggtgctgctgctgcagacgctggtcgtg

SEQ ID NO: 137501 - DNA, 120 bp, Artificial Sequence
  ENSG00000103489_1 (sequence is synthesized)
gcgctcacggtgctgctgctgcagacgctggtcgtgtggaatttcagcagcctcgactccggggccggggagcgccgcgggggcgcagcggtcggcggcggggagcagccgcccccggcc

SEQ ID NO: 137502 - DNA, 80 bp, Artificial Sequence
  ENSG00000103489_2 (sequence is synthesized)
agcgccgggacctgcccgccgagccggctgcagcccgaggaggaggaggaggcggcggcggaggaggaggaggacggggg

SEQ ID NO: 137503 - DNA, 120 bp, Artificial Sequence
  ENSG00000103489_3 (sequence is synthesized)
ggggacagcagccggccagccggggggcactgcccgcccgggctctggatccacacccaagtccgctcatcaccctggagactcaggatggctacttttctcatcggccgaaagagaaag

SEQ ID NO: 137504 - DNA, 120 bp, Artificial Sequence
  ENSG00000103489_4 (sequence is synthesized)
tgcgaacagacagcaacaacgagaactctgtccccaaagactttgagaatgtcgacaacagcaacttcgcacccaggactcaaaagcagaagcaccagcctgagttggcgaagaagccac

SEQ ID NO: 137505 - DNA, 120 bp, Artificial Sequence
  ENSG00000103489_5 (sequence is synthesized)
cgagtagacagaaggagcttttgaaaaggaagctggaacagcaggagaaaggaaaaggacatacattccctgggaaaggccccggtgaggtgctgcctcccggggacagagccgcagcca

SEQ ID NO: 137506 - DNA, 120 bp, Artificial Sequence
  ENSG00000103489_6 (sequence is synthesized)
acagcagccacgggaaggatgtgtccagaccgcctcatgccaggaaaactgggggcagctcccccgagaccaagtatgaccagccccctaagtgtgacatctcaggcaaggaggccatct

SEQ ID NO: 137507 - DNA, 120 bp, Artificial Sequence
  ENSG00000103489_7 (sequence is synthesized)
ctgccctgtcccgtgctaagtccaagcactgccgccaggagattggggagacttactgccgccacaagttagggctgctgatgcctgagaaggtgactcggttctgccccctcgagggta

SEQ ID NO: 137508 - DNA, 120 bp, Artificial Sequence
  ENSG00000103489_8 (sequence is synthesized)
aagccaacaagaacgtgcagtgggacgaggactccgtggagtacatgccagccaacccggtcagaatcgcctttgtcctggtggtccacggccgtgcctctcggcagttgcagcgcatgt

SEQ ID NO: 137509 - DNA, 120 bp, Artificial Sequence
  ENSG00000103489_9 (sequence is synthesized)
tcaaggccatctaccacaaagaccacttctactacatccacgtggacaagcgctctaattacctgcatcggcaagtgctccaggtctccaggcagtacagcaatgtccgcgtcaccccct

SEQ ID NO: 137510 - DNA, 120 bp, Artificial Sequence
  ENSG00000103489_10 (sequence is synthesized)
ggagaatggccaccatctggggaggagccagcctcctgtccacctacctgcagagcatgcgggacctcctggagatgaccgactggccctgggacttcttcatcaacctgagtgcggccg

SEQ ID NO: 137511 - DNA, 120 bp, Artificial Sequence
  ENSG00000103489_11 (sequence is synthesized)
actaccccatcaggacaaatgaccagttggtggcgtttctctcccgataccgagatatgaatttcttgaagtcacacggccgggacaatgcaaggttcattcggaagcagggcctggatc

SEQ ID NO: 137512 - DNA, 120 bp, Artificial Sequence
  ENSG00000103489_12 (sequence is synthesized)
ggctcttcctggagtgcgacgctcacatgtggcgcctgggagatcggcggatcccagagggcattgccgtggatggcggttcggactggttcctgctgaaccggaggtttgtagaatatg

SEQ ID NO: 137513 - DNA, 120 bp, Artificial Sequence
  ENSG00000103489_13 (sequence is synthesized)
tgaccttctccacagacgatctggtgaccaagatgaaacagttctactcctacaccctgcttcctgctgagtccttcttccatacggtcctggagaacagcccccactgcgacaccatgg

SEQ ID NO: 137514 - DNA, 120 bp, Artificial Sequence
  ENSG00000103489_14 (sequence is synthesized)
tggacaacaacctgcgcatcaccaactggaatcgcaagctgggctgcaagtgccagtacaagcacatcgtggactggtgcggctgctcccccaatgacttcaagccgcaggacttccacc

SEQ ID NO: 137515 - DNA, 120 bp, Artificial Sequence
  ENSG00000103489_15 (sequence is synthesized)
gcttccagcagacagcccggcctaccttctttgcccgcaagtttgaagccgtggtgaatcaggaaatcattgggcagctggactattacctgtacgggaactaccctgcaggtaccccgg

SEQ ID NO: 137516 - DNA, 120 bp, Artificial Sequence
  ENSG00000103489_16 (sequence is synthesized)
gcctgcgctcctactgggagaatgtctacgatgagcctgacggcatccacagcctgagcgacgtgacactcaccttgtaccactcctttgcccgcctgggtcttcgacgggccgagacgt

SEQ ID NO: 137517 - DNA, 120 bp, Artificial Sequence
  ENSG00000103489_17 (sequence is synthesized)
ccctgcacacggatggggagaacagctgccgatactacccaatgggccacccagcatctgtgcacctctacttccttgctgaccgcttccagggctttctgatcaagcatcatgctacca

SEQ ID NO: 137518 - DNA, 120 bp, Artificial Sequence
  ENSG00000103489_18 (sequence is synthesized)
atctggctgtgagcaaactagagactctggagacctgggtgatgccgaaaaaagtcttcaagatcgcaagcccacccagtgactttgggaggcttcagttttccgaggtcggcactgact

SEQ ID NO: 137519 - DNA, 120 bp, Artificial Sequence
  ENSG00000103489_19 (sequence is synthesized)
gggatgccaaggagaggctattccgcaactttgggggtcttctggggcccatggatgagccggtgggtatgcagaagtgggggaagggacctaatgtgaccgtgaccgtcatttgggtgg

SEQ ID NO: 137520 - DNA, 120 bp, Artificial Sequence
  ENSG00000103489_20 (sequence is synthesized)
atcccgtcaatgtcatcgcagccacctacgacatcctcattgagtccactgccgaattcacacactacaagccccctttgaacttgcccctgaggcctggggtctggacagtgaaaattc

SEQ ID NO: 137521 - DNA, 120 bp, Artificial Sequence
  ENSG00000103489_21 (sequence is synthesized)
tccaccactgggtgccagttgcagagaccaaattcctcgttgcgcctctgaccttctcgaacaggcagcccatcaaacctgaggaggcactgaagctgcacaatgggcccctccgcaatg

SEQ ID NO: 137522 - DNA, 120 bp, Artificial Sequence
  ENSG00000103489_22 (sequence is synthesized)
cctacatggagcagagcttccagagcctaaaccccgtcctcagcctgcccatcaaccccgcccaggtggaacaggcacggaggaacgcagcctccacgggcacagcgctggagggatggc

SEQ ID NO: 137523 - DNA, 120 bp, Artificial Sequence
  ENSG00000103489_23 (sequence is synthesized)
tggactcgttggtgggcgggatgtggactgccatggacatctgtgccacgggccccacagcctgcccggtcatgcagacctgcagccagacggcctggagctccttcagccctgacccca

SEQ ID NO: 137524 - DNA, 120 bp, Artificial Sequence
  ENSG00000103489_24 (sequence is synthesized)
agtcggagctgggggcagtcaaacctgatggccggctcaggtagcactgggcacgaggagtgggccacagcaggatctcaacgggaaagcagccagaggggttgtggggcctgaaccccg

SEQ ID NO: 137525 - DNA, 120 bp, Artificial Sequence
  ENSG00000103489_25 (sequence is synthesized)
gcctcccaccctgggggaggccctctgtgaatgggtctctcctggccatagaatgatggaaagggaaggtcagcaggtcaaagcaggatcagccaacaacctgcctttggcaagctgcgg

SEQ ID NO: 137526 - DNA, 120 bp, Artificial Sequence
  ENSG00000103489_26 (sequence is synthesized)
gtgggatggctcagtccctgcactgtgactgtctcacctcttctggttgatcctcaagtcctacaggttccttgtcttccccttccagtgacccacccctgaccccagacgtgtgatttt

SEQ ID NO: 137527 - DNA, 120 bp, Artificial Sequence
  ENSG00000103489_27 (sequence is synthesized)
cagacttttctttcgagcagcagaacttcgtttacggagcacagtcataagtggaggttcagggtgctgacgaaatccaagctgctctggttgaagctgacaagtgcgaggttccctccc

SEQ ID NO: 137528 - DNA, 120 bp, Artificial Sequence
  ENSG00000103489_28 (sequence is synthesized)
aaagctcagccctctgggcggtccccttgcccagggtatctcctacggtacctcttcagaacccaagggctctgcaaatgccagtttgacaagcactgcccagaccaaccatgggttcaa

SEQ ID NO: 137529 - DNA, 120 bp, Artificial Sequence
  ENSG00000103489_29 (sequence is synthesized)
actccagccctgccctttggttcatttttctgcttctcttggctgggggactctggtgccagccttgaaagtcatggtcgtgggccctttcccatggaggctgcagccttaggagagctc

SEQ ID NO: 137530 - DNA, 120 bp, Artificial Sequence
  ENSG00000103489_30 (sequence is synthesized)
tgagcctctcagcagccctccttgggttgaactattctccttagtaactaggtaagtgggaaagccttttgatgtggcatggccaaggtccagccacaagtgcaactgccacctgtccag

SEQ ID NO: 137531 - DNA, 120 bp, Artificial Sequence
  ENSG00000103489_31 (sequence is synthesized)
gggtctgggcctccttccctcaaggctgccacacaaagtagcagaaataggatgatgtttgtgagcaccagactcaagaccatgaccttctttgatccttgaaaatgggaactttgacag

SEQ ID NO: 137532 - DNA, 120 bp, Artificial Sequence
  ENSG00000103489_32 (sequence is synthesized)
ccatgaccatgaaactcacaaggcaacgcgatgaaactcacaaagcaatgcttggagcaaaactcctgagctagacagcacagcagcacccatcccctgccagagcccttccgttctgag

SEQ ID NO: 137533 - DNA, 120 bp, Artificial Sequence
  ENSG00000103489_33 (sequence is synthesized)
gtcagacacacaaaaccttcgtcaattgcacaccggtgctgttgggagtgaccaaaccacatgaaccagacttttcccgtccaggaaatagcatttcagatttggtttttaatttcatgc

SEQ ID NO: 137534 - DNA, 120 bp, Artificial Sequence
  ENSG00000103489_34 (sequence is synthesized)
ccttcggccacaggctcaacgggacatgcaacataaaaatgggaaggttatttaaacaacaaaaaacagtatgatttaagtgttgagttaccagaaacccaaaaggtttccttgccacga

SEQ ID NO: 137535 - DNA, 120 bp, Artificial Sequence
  ENSG00000103489_35 (sequence is synthesized)
gccccctggagtgtcatccctgttcaccaggagagctcttcgcaggaggcctcccttgctcctgtaatcccacctcccctgaatgatgggattcccttggaaaaaggtctcacccctggt

SEQ ID NO: 137536 - DNA, 120 bp, Artificial Sequence
  ENSG00000103489_36 (sequence is synthesized)
agccatctgcccttcccatggagagccagtcctgacacttctctccagcgtgggtttgaaggggctgcccttcgctttgtgtgacttgtcctaatcctagccagatgtgttgccccatcc

SEQ ID NO: 137537 - DNA, 120 bp, Artificial Sequence
  ENSG00000103489_37 (sequence is synthesized)
caagcctcgcaaggcagggtgtcctgttggcaatggaggacgtagagaagggacactttagatatttattatttacatgttttagtcgatgactaattagtaggtgctgtttttgcagct

SEQ ID NO: 137538 - DNA, 120 bp, Artificial Sequence
  ENSG00000103489_38 (sequence is synthesized)
tgtcaattatgttaccttactaactgaagctgcctttattcacaaaaggccccttttcccatcttttcccaccccctggtgtctctctctctctcggtttctctttctctgcgtctaccc

SEQ ID NO: 137539 - DNA, 120 bp, Artificial Sequence
  ENSG00000103489_39 (sequence is synthesized)
cccatcctcctcatcctcagagtaaagcaggggcatcgaacaccacgcaaagaaagctccaacccgcatcttccactggctttgagtggggtgccttggggaccgttggagccttgtttt

SEQ ID NO: 137540 - DNA, 120 bp, Artificial Sequence
  ENSG00000103489_40 (sequence is synthesized)
cagagtgtcagcctcactctccctcggattccaagagtattggaattcctgagcctcccatcctccccctactcaccccccgtcacaggcacaaggaggtgacaggcagaaaacgtggag

SEQ ID NO: 137541 - DNA, 120 bp, Artificial Sequence
  ENSG00000103489_41 (sequence is synthesized)
ggtgagtggggaatgtgctagctgcagagagtttgtggggaatgtgctagctgcagagagtttgggccattcctgcttgctccgtggttgccttcccatggcccatctaattatgggcat

SEQ ID NO: 137542 - DNA, 120 bp, Artificial Sequence
  ENSG00000103489_42 (sequence is synthesized)
tcatgcgaccttaacagagggaaacaggctcctttgagagagatccatcttaggaggagggtcgtcagatccaggcagcagagtccgggagatagccattctcaacagcgattccaggga

SEQ ID NO: 137543 - DNA, 120 bp, Artificial Sequence
  ENSG00000103489_43 (sequence is synthesized)
tctcagggtacttttctcagaaagcccctatgatctcttttacagactctatggtggccacgcgctgggtgccacatcctctttctgcccccggcctctgcctctggccagggtttccct

SEQ ID NO: 137544 - DNA, 120 bp, Artificial Sequence
  ENSG00000103489_44 (sequence is synthesized)
ggggctgccgaagccactttgggagcttccctttcaccctccttgctgggccaccagtgctttgtgttcgcagcgttatttgcagtggctttggggactcagcagtggcaagtccctgtg

SEQ ID NO: 137545 - DNA, 120 bp, Artificial Sequence
  ENSG00000103489_45 (sequence is synthesized)
cataatgtgaacctgcagacttcaagatggggcccctcctgcacccactaacatgtctgcctttttttgtttttatcctggaacaagtggagaaatggcagagctggctgactctgggga

SEQ ID NO: 137546 - DNA, 120 bp, Artificial Sequence
  ENSG00000103489_46 (sequence is synthesized)
cccttccctttttcccatggcttcatttcttcctcaccacaactaattcggggagctgagaagtcacacagggtattcctctcccttctctgatgttattaattaatagaccagagaata

SEQ ID NO: 137547 - DNA, 120 bp, Artificial Sequence
  ENSG00000103489_47 (sequence is synthesized)
aggttgcagatattacatttgttgtgtttttgtgttttgtttttttttttaaggaaaatcccaaacaaagcccagcatgatttgagaaaagaggatgttttcccagggaaaataattttt

SEQ ID NO: 137548 - DNA, 120 bp, Artificial Sequence
  ENSG00000103489_48 (sequence is synthesized)
ttaacctgcctgagaatgatttatttatttgttggaggccattggtcagacagcctggagcttgggctgtggaagatttcaaaagcatagggctgtggtctctggaaacctattacagcc

SEQ ID NO: 137549 - DNA, 120 bp, Artificial Sequence
  ENSG00000103489_49 (sequence is synthesized)
tgcagctgtgagctgagccagtgacgaggtccctggaaactcaggaaggctgacaggtgggccttggggtattggtttgtggagaaggaagcattctttaggctgcggcactccttatag

SEQ ID NO: 137550 - DNA, 120 bp, Artificial Sequence
  ENSG00000103489_50 (sequence is synthesized)
tttcccacccaccgagtgacattcaggcagaaattgagctcaggagacagccagccttcccacatcccacttcacttcccggtccacacgtaaagcagtgtgtctccaaggaggcagtga

SEQ ID NO: 137551 - DNA, 120 bp, Artificial Sequence
  ENSG00000103489_51 (sequence is synthesized)
gcaattcccaaggtccccgtgttgtgagaagcgcgctgctttctccctttgcaggggaaaaaaaaggctttcctggtgagatcatgagtccttccggcttcatttctcattgtgggttta

SEQ ID NO: 137552 - DNA, 120 bp, Artificial Sequence
  ENSG00000103489_52 (sequence is synthesized)
acttctaaaacgcaaatggagtttagagaggatgagcagaaccacaggacctgcccccatctctcactcactgcaattgcttctactctgggcacaagtagggtgtctgaagaccatgtt

SEQ ID NO: 137553 - DNA, 120 bp, Artificial Sequence
  ENSG00000103489_53 (sequence is synthesized)
tccctctggttctctagtttgcagataacacagaagacactggctagaaccttaagctttctgccaaaaagatgcagagagcagggcagtagctactggcagtggggtgtgaataaagag

SEQ ID NO: 137554 - DNA, 120 bp, Artificial Sequence
  ENSG00000103489_54 (sequence is synthesized)
tcctttcacaaccaagttcactgaggatttggagcaccagcttcccagcagtatcgaggggtggagaggtgtacattcaggtggaggggtacatctaggggtggagaggtgtacattcta

SEQ ID NO: 137555 - DNA, 120 bp, Artificial Sequence
  ENSG00000103489_55 (sequence is synthesized)
gaaacagctgttaacacactccactttaaagacagcaagctagacctgcaggatcaaagccacacactgtggtaggggttacaaatgtttatggggcccagaatactagcatagatgcgt

SEQ ID NO: 137556 - DNA, 120 bp, Artificial Sequence
  ENSG00000103489_56 (sequence is synthesized)
gaaatggttggtgtgaggcaaaagggcatggtgggggcaaggatggggactgtggtcttactggcatgcacgtgacctacccagaatgagcagctgctactcagccccaacctgtcattg

SEQ ID NO: 137557 - DNA, 120 bp, Artificial Sequence
  ENSG00000103489_57 (sequence is synthesized)
tttgtaaaaatgtaagcacagtgtagtggaatcttccaatttggaagggaagccggaaatccagatttaatggaaaaaatctgatttttcaacgtcgggttgtttgtttgtttgtttttg

SEQ ID NO: 137558 - DNA, 120 bp, Artificial Sequence
  ENSG00000103489_58 (sequence is synthesized)
ttttttttaacagatagtgggcaaagaaaaattccactgttccacgtgtacactgccagcaacctctgctctctggagaggtggtttaaagtgagattatgcattgccctggtagaagag

SEQ ID NO: 137559 - DNA, 120 bp, Artificial Sequence
  ENSG00000103489_59 (sequence is synthesized)
gaaaaaagccagcatcaggtcagggcaaaaataacagcccatgttgaactcggaatggggacctcttgctaagtcattccactcctcaagagaccattccacagaggggggatggatcat

SEQ ID NO: 137560 - DNA, 120 bp, Artificial Sequence
  ENSG00000103489_60 (sequence is synthesized)
tcagctctcctggtcccaagattgtgctgaagggaagaaggaatagaatctggagatctggactgctgccccttagatatgcagaggtccacatctgcctggggctacagcttgtgggac

SEQ ID NO: 137561 - DNA, 120 bp, Artificial Sequence
  ENSG00000103489_61 (sequence is synthesized)
tccatcaaaccaggccgaaatggcaaagacagtctaggaggaggaggaggtagggtgtgaaacagccaggctctctccaaatcccaagtgttgacacagccatcttgtcccatccctgga

SEQ ID NO: 137562 - DNA, 120 bp, Artificial Sequence
  ENSG00000103489_62 (sequence is synthesized)
agcctctttggaaaccacatagagctgtgctggctcacgggatgtcctgtttgcttctgcctcagttaccttactttgcccatgggtctaccacaggcgctacctcattgtgtctgctga

SEQ ID NO: 137563 - DNA, 120 bp, Artificial Sequence
  ENSG00000103489_63 (sequence is synthesized)
gaagtttacctgggaggggggaacaaagttgtccaaatctgcttgagctgaatgtatgatctatgcaaattctctctctcctctctctcttcctctctggctctcttagaagtttttttg

SEQ ID NO: 137564 - DNA, 120 bp, Artificial Sequence
  ENSG00000103489_64 (sequence is synthesized)
ttttgttttgttttgttttgtgtttaccttgcaaacaagatactgtataggaccctcttaagatggaggagggctttcttgcgccacctgtgtctacccctcacgttgtctttggctctg

SEQ ID NO: 137565 - DNA, 120 bp, Artificial Sequence
  ENSG00000103489_65 (sequence is synthesized)
gtcttaccaggcgtatgcagggagaaagtgacctctcttccctctccacttggctgggaatattccaactgcctctgcctacagataccaccagaaagcgggttctgcaccttgtcatcc

SEQ ID NO: 137566 - DNA, 120 bp, Artificial Sequence
  ENSG00000103489_66 (sequence is synthesized)
ccctccctaacgtcatctactccatccctcatgttcctccaacttgcttctcccatccctccttcaaaaacaaaacaaaacaaaacaaaagccttaggtttctcctttttgaaatgtggc

SEQ ID NO: 137567 - DNA, 120 bp, Artificial Sequence
  ENSG00000103489_67 (sequence is synthesized)
cttaacattatttttgggaagctgaccatccatcctttccctcccatctccaccaacatcagagaagacagcatcgtgaagcttctgtggcagcctcctaaggaaggggctgccaatctg

SEQ ID NO: 137568 - DNA, 120 bp, Artificial Sequence
  ENSG00000103489_68 (sequence is synthesized)
tagttggcagatgctataggaattgcttacaaatgtcgtctttaagaaaaatgttcttatatttttcctatgggcaaaatgaaggcttgggtgctcatctaaagctcagccaactcctga

SEQ ID NO: 137569 - DNA, 120 bp, Artificial Sequence
  ENSG00000103489_69 (sequence is synthesized)
agcactctctcagagcatactgctgctgtaatgggctggcttaattatcggcagagtgcttgaaaaggctttgcagacctcccctgcccccaagactgggtgactttatatgtacttcat

SEQ ID NO: 137570 - DNA, 120 bp, Artificial Sequence
  ENSG00000103489_70 (sequence is synthesized)
tcaagggtaaatcaggagacgttctccatttatctcttcgtccttcctgcctggaaagtgatagcactaaatattcccagcagatgggtagtgttctcaaaggaatcaccctttccctac

SEQ ID NO: 137571 - DNA, 120 bp, Artificial Sequence
  ENSG00000103489_71 (sequence is synthesized)
cttcagactctattctttacccttccattgctccagtgctgatggaggccaaagacaaccccagggttttcataggaaattcactggaattgtgcgcaattgtctttgtagtccttttgc

SEQ ID NO: 137572 - DNA, 120 bp, Artificial Sequence
  ENSG00000103489_72 (sequence is synthesized)
cttttttttttttaaatattatgttgtcaatagcatttgtttgggtatttgttttagaggcctcactctaagttattaccgtccccttcattgttttcaaagacatgtggtgatatagtt

SEQ ID NO: 137573 - DNA, 120 bp, Artificial Sequence
  ENSG00000103489_73 (sequence is synthesized)
taactattttgttatagatcataatatgcataaaactgtacagaaatattttgtaatgtgttgattttaaaaaaaatctgtaaataaagttttaaaaaaagaattcaaatggcacacgct

SEQ ID NO: 137574 - DNA, 120 bp, Artificial Sequence
  ENSG00000103489_74 (sequence is synthesized)
cacacgctgaaatatgtagatattttgctatttatttaaaggagtattttaagagatattgaactatctgaaattgaccagtaatcaaagttccaatcatctgaatgcttttccttgagg

SEQ ID NO: 137575 - DNA, 120 bp, Artificial Sequence
  ENSG00000103489_75 (sequence is synthesized)
tagaatgtgagtctcagaaatgactgcattacctgcccttttttgcaccttttctgtctttttattttgcagaacaacaacaacaacaaaattgtgccttagctgtatttttttgtctag

SEQ ID NO: 137576 - DNA, 120 bp, Artificial Sequence
  ENSG00000103489_76 (sequence is synthesized)
gggagtttgtttctgtctgacaaagcaacattttttgcagaaaacagtggatgtattaaatactgtatcataccaaaaacactgcaggtgtatatagatgctttctgtcatactgtgttt

SEQ ID NO: 137577 - DNA, 120 bp, Artificial Sequence
  ENSG00000103489_77 (sequence is synthesized)
tcagatgcagaattttaaaattaaaaaaacactgcctttatggaacagtgactatatgtggcttcttttcagcaacattgtgcatctttacacaatctcatattctcttctgtcatctgc

SEQ ID NO: 137578 - DNA, 120 bp, Artificial Sequence
  ENSG00000103489_78 (sequence is synthesized)
atggtgaagataggatgactatataatttatcatccaaactgggatacttttgagagttaaaggaagcaccacgtggatgggatgctgagactgcaggcataaatggcctatcctgggaa

SEQ ID NO: 137579 - DNA, 120 bp, Artificial Sequence
  ENSG00000103489_79 (sequence is synthesized)
aacctgggtgtgtggacacatttccctcataaaaactgctgtcatcttctaactggattatagcaacaacctcctataagtacctcctggttgaggcagaagtatatgatttttaaaccc

SEQ ID NO: 137580 - DNA, 120 bp, Artificial Sequence
  ENSG00000103489_80 (sequence is synthesized)
gtactgagtagagaataacaagaagggactgccatggaaagttgcagtttcctatacccaactggttggttggttggcaaacgtgttttcctttcctctttaccacagagactacatttc

SEQ ID NO: 137581 - DNA, 120 bp, Artificial Sequence
  ENSG00000103489_81 (sequence is synthesized)
ccagactgccttgctcttagctgtgaccatgtgaccaggccaatggaacagctagactgcatcttccagactgccttgctcttagccatggccatgtgactgactcaggccaatggaatg

SEQ ID NO: 137582 - DNA, 120 bp, Artificial Sequence
  ENSG00000103489_82 (sequence is synthesized)
agacgtgactttcaccttctgccgtgattgtgaggcctcgccagccacctggaactgatccacacccaagtccgctcatcaccctggagactcagaaggataccctattaaacttatgaa

SEQ ID NO: 137583 - DNA, 120 bp, Artificial Sequence
  ENSG00000103489_83 (sequence is synthesized)
aacccatgggcgaacatctgtgtccggaactctggaagtcaaatcttatctcctgggagtggaacagcagaatccctggatggttctgtctttgaccttcctgtatccttcactctggac

SEQ ID NO: 137584 - DNA, 120 bp, Artificial Sequence
  ENSG00000103489_84 (sequence is synthesized)
accaccccatcagcccttcaaaaccctcatgggaaagaggagttgcagaccagtggctttggccagcacctgaggcttccagcagcagctccttacacagtggcgactcttaaagtccaa

SEQ ID NO: 137585 - DNA, 120 bp, Artificial Sequence
  ENSG00000103489_85 (sequence is synthesized)
tcagtctcatttggttccctgtctttggggagcctgggaatattgttctcgctccccgagttctgatttcccatgttaaagagatgttggaacccaaccaaagtgcaaatgtttctttgt

SEQ ID NO: 137586 - DNA, 120 bp, Artificial Sequence
  ENSG00000103489_86 (sequence is synthesized)
gactgttggcacaagcccgtggccagatctgactttgtgctggcctcagcccattgtgaggtgaatgatgggatcctgttcagctgcctgcaggcaggtcagacaagggggtcaggtccc

SEQ ID NO: 137587 - DNA, 120 bp, Artificial Sequence
  ENSG00000103489_87 (sequence is synthesized)
tttctggcaggaagtagtgcctcaaatgttacccatatgccatgaacaagatggcagatgtggccaagcttggaagaattaactctgcagaggttaggtgacagatgtaccctgagccct

SEQ ID NO: 137588 - DNA, 120 bp, Artificial Sequence
  ENSG00000103489_88 (sequence is synthesized)
tgggaactcacgaggcagaaggagactgatgcatagtctccacaggatcgctcaggataggattctgattggacctgagaatcattgattcattcactcattcattcatgcattcaacag

SEQ ID NO: 137589 - DNA, 120 bp, Artificial Sequence
  ENSG00000103489_89 (sequence is synthesized)
gactgttgagctagaggaagatggtcctgtgtgtattaacctcagtgctcaacttcctgatggattatttgagtttttctgtttctgctgtgaagtcacgggatcccgaatttttcttct

SEQ ID NO: 137590 - DNA, 120 bp, Artificial Sequence
  ENSG00000103490_0 (sequence is synthesized)
ggagccgacttcctcctggtcggcggctgcagcggggtgagcggcggcagcggccggggatcctggagccatggggcgcgcgcgcgacgccatcctggatgcgctggagaacctgaccgc

SEQ ID NO: 137591 - DNA, 120 bp, Artificial Sequence
  ENSG00000103490_1 (sequence is synthesized)
cgaggagctcaagaagttcaagctgaagctgctgtcggtgccgctgcgcgagggctacgggcgcatcccgcggggcgcgctgctgtccatggacgccttggacctcaccgacaagctggt

SEQ ID NO: 137592 - DNA, 120 bp, Artificial Sequence
  ENSG00000103490_2 (sequence is synthesized)
cagcttctacctggagacctacggcgccgagctcaccgctaacgtgctgcgcgacatgggcctgcaggagatggccgggcagctgcaggcggccacgcaccagggctctggagccgcgcc

SEQ ID NO: 137593 - DNA, 120 bp, Artificial Sequence
  ENSG00000103490_3 (sequence is synthesized)
ccaggcctgcactttatagaccagcaccgggctgcgcttatcgcgagggtcacaaacgttgagtggctgctggatgctctgtacgggaaggtcctgacggatgagcagtaccaggcagtg

SEQ ID NO: 137594 - DNA, 120 bp, Artificial Sequence
  ENSG00000103490_4 (sequence is synthesized)
cgggccgagcccaccaacccaagcaagatgcggaagctcttcagtttcacaccagcctggaactggacctgcaaggacttgctcctccaggccctaagggagtcccagtcctacctggtg

SEQ ID NO: 137595 - DNA, 120 bp, Artificial Sequence
  ENSG00000103490_5 (sequence is synthesized)
gaggacctggagcggagctgaggctccttcccagcaacactccggtcagcccctggcaatcccaccaaatcatcctgaatctgatctttttatacacaatatacgaaaagccagcttgaa

SEQ ID NO: 137596 - DNA, 120 bp, Artificial Sequence
  ENSG00000103490_6 (sequence is synthesized)
tggcttcaagttcatggtctttaatctcctggaggctgtctctctttcttttttcttttttttaatcagtgttgggatcaaattctggctcccctaggaagcatctggcaaggtttcggg

SEQ ID NO: 137597 - DNA, 120 bp, Artificial Sequence
  ENSG00000103490_7 (sequence is synthesized)
agccatcgggttggccatgttatgctggaatatttataagcaccggagggttatccccatgtcgtagaaaatgaaactgaagctcagagagatttgcactctctgcccttttgtacaact

SEQ ID NO: 137598 - DNA, 120 bp, Artificial Sequence
  ENSG00000103490_8 (sequence is synthesized)
catttttccccagtatgtggaattgagggagcttcacgcttctagctgtcatgattccaagattctacgacatgtgggagaggatcctaaggttcggggaaccgcggaggtttcggggtt

SEQ ID NO: 137599 - DNA, 120 bp, Artificial Sequence
  ENSG00000103490_9 (sequence is synthesized)
ctagaaatccgaggttctaagcctaggtgctccaataaacccagtgagagccagcccaggtttccggtctgtacccgctggtgcaagcccagagacaagcaggcgccacccatgagcccc

SEQ ID NO: 137600 - DNA, 120 bp, Artificial Sequence
  ENSG00000103490_10 (sequence is synthesized)
gtcccccgacggcctggggccccaatccagaggcctgggtgggaggggaccaagggtgtagtaaggaagcgccttttgctggagggcaacggaccggggcggggagtcgggagaccagag

SEQ ID NO: 137601 - DNA, 120 bp, Artificial Sequence
  ENSG00000103490_11 (sequence is synthesized)
agctgcaggcggccacgcaccagggtgagccgcccccgttcccctccaccccgtctttcccctccacccacaccagcgcttaccccgcgggctcttccgctttctgttcctcctacccct

SEQ ID NO: 137602 - DNA, 120 bp, Artificial Sequence
  ENSG00000103490_12 (sequence is synthesized)
aaacaaagctgctctaccggaaaggaggctccccacgcttggcctaccgaccaacgggaccccggccccacggcgggaagggaagggaaggggatcacttggcccatatccttccaggct

SEQ ID NO: 137603 - DNA, 120 bp, Artificial Sequence
  ENSG00000103494_0 (sequence is synthesized)
atgtttctcccgtgctcctctcggccagccgcccgccacgctgtcggcgctatagcaacggtagctagctgcagggccagtggcacgctaggccatgtctggtccaactgatgagactgc

SEQ ID NO: 137604 - DNA, 120 bp, Artificial Sequence
  ENSG00000103494_1 (sequence is synthesized)
aggagacttgcctgtgaaagatacaggtctaaacctctttggaatgggagggttacaagaaacttcaacaacacggacaatgaagtctcgccaggcagtgtcacgtgtcagtcgtgagga

SEQ ID NO: 137605 - DNA, 120 bp, Artificial Sequence
  ENSG00000103494_2 (sequence is synthesized)
actggaagacagatttttgcgtttgcatgatgagaacattttacttaaacagcatgcccgcaagcaggaggataaaattaaaagaatggccaccaagttaatacggctagttaatgacaa

SEQ ID NO: 137606 - DNA, 120 bp, Artificial Sequence
  ENSG00000103494_3 (sequence is synthesized)
gaaaagatatgagcgggttggtggcggccccaagcggctgggacgagatgtggaaatggaagaaatgattgagcagctgcaagagaaagttcatgagcttgaaaaacaaaatgaaaccct

SEQ ID NO: 137607 - DNA, 120 bp, Artificial Sequence
  ENSG00000103494_4 (sequence is synthesized)
caaaaacagactgatttcagccaaacagcaacttcaaacccagggttacaggcaaactccatacaataatgtacaatctcgtattaacactgggcgtagaaaagcaaatgaaaatgctgg

SEQ ID NO: 137608 - DNA, 120 bp, Artificial Sequence
  ENSG00000103494_5 (sequence is synthesized)
tttacaggaatgccccaggaaaggtataaaattccaagatgcagatgtagcagaaactccacatcccatgtttacaaaatatggcaacagtttacttgaagaagccagaggagaaataag

SEQ ID NO: 137609 - DNA, 120 bp, Artificial Sequence
  ENSG00000103494_6 (sequence is synthesized)
aaatttagaaaacgttattcagtcacaaagaggccagatagaggagttagagcacttggctgagatcctgaaaactcagttgaggagaaaagaaaatgaaattgagttatctcttcttca

SEQ ID NO: 137610 - DNA, 120 bp, Artificial Sequence
  ENSG00000103494_7 (sequence is synthesized)
gcttcgagaacagcaagctacagatcaaaggtcaaatattcgggacaatgtagaaatgattaagcttcataaacagctagtagagaaaagcaatgctctttcagcaatggaaggaaaatt

SEQ ID NO: 137611 - DNA, 120 bp, Artificial Sequence
  ENSG00000103494_8 (sequence is synthesized)
tattcagcttcaagagaagcaaagaactctcagaatcagccacgatgctttgatggcaaatggggatgaattaaacatgcaacttaaagagcagcgtttaaaatgctgcagtcttgagaa

SEQ ID NO: 137612 - DNA, 120 bp, Artificial Sequence
  ENSG00000103494_9 (sequence is synthesized)
acaattacattctatgaagttttctgaaagaagaatagaagagctgcaggatagaattaatgatttagaaaaggaacgggaacttttaaaggaaaactatgataaactttatgacagtgc

SEQ ID NO: 137613 - DNA, 120 bp, Artificial Sequence
  ENSG00000103494_10 (sequence is synthesized)
cttcagtgctgcccatgaagagcaatggaagttaaaggagcaacagctgaaagtgcagattgctcagctcgagactgccttgaagtctgacttaacagacaaaactgaaatccttgacag

SEQ ID NO: 137614 - DNA, 120 bp, Artificial Sequence
  ENSG00000103494_11 (sequence is synthesized)
attaaaaactgaaagagatcaaaatgaaaaactcgttcaagagaatagagaactacagttacagtatctggaacaaaagcaacaacttgatgaacttaaaaaacgcataaaattgtacaa

SEQ ID NO: 137615 - DNA, 120 bp, Artificial Sequence
  ENSG00000103494_12 (sequence is synthesized)
ccaggagaatgatattaatgctgatgaattgagtgaagctctcctacttataaaggctcaaaaagaacaaaaaaatggagacctttcctttttagtgaaagtagatagtgaaattaataa

SEQ ID NO: 137616 - DNA, 120 bp, Artificial Sequence
  ENSG00000103494_13 (sequence is synthesized)
agatctagaacgctctatgagagagctgcaagcaactcatgcagaaacggtgcaagagctggaaaagacaagaaacatgctaattatgcaacacaaaattaataaagattatcagatgga

SEQ ID NO: 137617 - DNA, 120 bp, Artificial Sequence
  ENSG00000103494_14 (sequence is synthesized)
ggttgaggcagtgacccgtaagatggaaaatttgcagcaagattatgaactcaaagtggaacagtatgttcatcttcttgatatcagggctgcacgtatccataaactagaagcccaatt

SEQ ID NO: 137618 - DNA, 120 bp, Artificial Sequence
  ENSG00000103494_15 (sequence is synthesized)
aaaggatattgcctatggcaccaagcagtacaaatttaaaccagaaatcatgccagatgactctgttgatgaatttgatgaaaccatccacttagaacgaggcgaaaatctatttgaaat

SEQ ID NO: 137619 - DNA, 120 bp, Artificial Sequence
  ENSG00000103494_16 (sequence is synthesized)
ccatatcaacaaagtaaccttttcttctgaagttttacaggcatctggagataaagagcctgtcactttctgtacctatgctttctatgattttgaactacagacaactcccgtagtgcg

SEQ ID NO: 137620 - DNA, 120 bp, Artificial Sequence
  ENSG00000103494_17 (sequence is synthesized)
aggccttcatcccgaatataacttcacttctcaatatcttgttcatgttaatgacttatttttgcaatatattcagaagaatactatcacccttgaggtccaccaggcttatagcacaga

SEQ ID NO: 137621 - DNA, 120 bp, Artificial Sequence
  ENSG00000103494_18 (sequence is synthesized)
atatgaaacaattgcagcatgtcaattaaaatttcacgaaattcttgaaaaaagcggccgaatattttgtacagcaagtttgattggaacaaaaggagacatcccaaattttggcacagt

SEQ ID NO: 137622 - DNA, 120 bp, Artificial Sequence
  ENSG00000103494_19 (sequence is synthesized)
ggaatactggttccgattaagagttcccatggatcaagcaattcgactttatcgagaaagggcaaaggctttggggtatataacatcaaattttaaggggccagagcatatgcagtcgtt

SEQ ID NO: 137623 - DNA, 120 bp, Artificial Sequence
  ENSG00000103494_20 (sequence is synthesized)
aagtcagcaagcacccaaaactgctcaactcagttctacagattccacagatggcaacttaaatgaacttcacattacaataagatgttgcaaccacctgcagtcccgagcaagccacct

SEQ ID NO: 137624 - DNA, 120 bp, Artificial Sequence
  ENSG00000103494_21 (sequence is synthesized)
gcagccacacccatatgttgtgtacaagttttttgattttgcagaccatgatacagctatcattcccagtagcaatgatccacagtttgatgatcatatgtatttcccagtgccaatgaa

SEQ ID NO: 137625 - DNA, 120 bp, Artificial Sequence
  ENSG00000103494_22 (sequence is synthesized)
tatggacttggatcgataccttaagtcagagtctctgagtttttatgtttttgatgatagtgatacccaggagaatatttacataggaaaagtcaatgtgcctctgatttcgttggcaca

SEQ ID NO: 137626 - DNA, 120 bp, Artificial Sequence
  ENSG00000103494_23 (sequence is synthesized)
tgacaggtgtatctcaggaatatttgagttaacagaccatcaaaagcatcctgctggcaccatccatgttatattgaaatggaaatttgcttaccttccaccaagtggatcaataacaac

SEQ ID NO: 137627 - DNA, 120 bp, Artificial Sequence
  ENSG00000103494_24 (sequence is synthesized)
tgaagacttaggaaatttcattcgcagcgaagagccagaagttgttcaaagacttcctccagcatcctctgttagcacactagttttagcaccaagacctaaaccaagacaacgtttaac

SEQ ID NO: 137628 - DNA, 120 bp, Artificial Sequence
  ENSG00000103494_25 (sequence is synthesized)
acctgtagataagaaggtatctttcgtggatatcatgccacatcagagtgatgtttcacaagaaggcagtgtagatgaggtaaaagagaatactgagaaaatgcagcaaggaaaagatga

SEQ ID NO: 137629 - DNA, 120 bp, Artificial Sequence
  ENSG00000103494_26 (sequence is synthesized)
tgtgtctttactatctgaaggtcagcttgcagaacaaagcttggcatcttctgaagatgaaacagaaataacagaggacttggaaccagaagttgaagaggacatgtcagcttctgacag

SEQ ID NO: 137630 - DNA, 120 bp, Artificial Sequence
  ENSG00000103494_27 (sequence is synthesized)
tgatgactgtattattccaggtcctatctccaagaatatcaaacagccatcagaaaaaattcggattgagatcatagctctaagccttaatgattctcaagtaaccatggatgacactat

SEQ ID NO: 137631 - DNA, 120 bp, Artificial Sequence
  ENSG00000103494_28 (sequence is synthesized)
ccaacggctgtttgttgagtgtcgattctacagtcttcctgctgaagagacacccgtgtcacttccaaaacccaagagtgggcagtgggtctactataactatagcaatgtgatctacgt

SEQ ID NO: 137632 - DNA, 120 bp, Artificial Sequence
  ENSG00000103494_29 (sequence is synthesized)
ggataaagaaaacaacaaagcaaagagagacatcttaaaagctatactacaaaaacaagagatgcctaatagaagccttcgcttcaccgtggtcagtgaccctccagaggacgagcagga

SEQ ID NO: 137633 - DNA, 120 bp, Artificial Sequence
  ENSG00000103494_30 (sequence is synthesized)
cctggagtgtgaggacattggcgtggctcacgtcgaccttgccgacatgtttcaggaagggagggacctcattgagcaaaatatcgatgtttttgatgcacgagcagatggtgaaggtat

SEQ ID NO: 137634 - DNA, 120 bp, Artificial Sequence
  ENSG00000103494_31 (sequence is synthesized)
tggcaagctcagggtaacagtcgaagctctccatgccctccagtctgtctacaagcaatacagagatgacttggaggcttgaaagcaaatgctccagaggcatctcctactcctcagtaa

SEQ ID NO: 137635 - DNA, 120 bp, Artificial Sequence
  ENSG00000103494_32 (sequence is synthesized)
gtgtatataatctataattcatgggaagctgggagcggggagacctgggtttgaagtgttgaagttttgtatactttttcatttgtttatttctctattccctccttctcataactgcca

SEQ ID NO: 137636 - DNA, 120 bp, Artificial Sequence
  ENSG00000103494_33 (sequence is synthesized)
cccctcaggacttaagttctccataatgggcagtaccttctcaataatttatacctacgtgatagcgtgagaaagtctatttgcattttcaacattttcttaggaagaaccgaaatgcaa

SEQ ID NO: 137637 - DNA, 120 bp, Artificial Sequence
  ENSG00000103494_34 (sequence is synthesized)
ttcccatttttatttttaataagcaaaagcataaatcttagaaaacctatgaaaaagaaatacttttatgttatccctaatcgtcccactaaatggaatgcctatgattagcttcattaa

SEQ ID NO: 137638 - DNA, 120 bp, Artificial Sequence
  ENSG00000103494_35 (sequence is synthesized)
gagttttatactgtgaagattttattagaagcaatatatgaaaattacttggattaatgtgttaatcttcctctttaaaatgctaatatccattttatgcacattaaagctcagtatgca

SEQ ID NO: 137639 - DNA, 120 bp, Artificial Sequence
  ENSG00000103494_36 (sequence is synthesized)
ttttctttgatgcatgcagtttctatcaattaaatataaagaatgaaacttagcaccaacttattcaatgactgcaagttttttgtctttctttcttaaaagttcattctatttgtatta

SEQ ID NO: 137640 - DNA, 120 bp, Artificial Sequence
  ENSG00000103494_37 (sequence is synthesized)
ttttcatacatttgtaatggtgacccagggatgtatatataaaaaggagatagttatatagatagatgtgaaatttacacgttgaaaacttagtatatgacacagaaagaaattatgaaa

SEQ ID NO: 137641 - DNA, 120 bp, Artificial Sequence
  ENSG00000103494_38 (sequence is synthesized)
agtataactcaaattctgatatgcttagttagacgtgaaaggagtatctttttatcattttttaaatttacatcaagccagtacagtgccagggtgtatctgggtaaccagatcctcgaa

SEQ ID NO: 137642 - DNA, 120 bp, Artificial Sequence
  ENSG00000103494_39 (sequence is synthesized)
aagcagctctgaaagttaattttctagcttttacccaatctcactgaaggatttaattgatatttttaatggagctgtgaatcaatgctgcaaaggaattgtctctagaggtctaggata

SEQ ID NO: 137643 - DNA, 120 bp, Artificial Sequence
  ENSG00000103494_40 (sequence is synthesized)
taatgcatttcattttttaatttacttttttatttgtcattttcttcaaaggatttttataggctgtgggttttcactgtttgcaaacaggctatgttccttcttaagcatatgtaaagt

SEQ ID NO: 137644 - DNA, 120 bp, Artificial Sequence
  ENSG00000103494_41 (sequence is synthesized)
attcagggagataagtaatttattaaaatctacctaatttgccgtgatatattaaatctctgcttcagtgatcacagaccatttcatttagagaattaggcattccctctttgtgtgatt

SEQ ID NO: 137645 - DNA, 120 bp, Artificial Sequence
  ENSG00000103494_42 (sequence is synthesized)
aaagctctggaaaatgagttctttgctcctatttgtgaacattcaaagcctgctaatggcaagaagatggaatagattatgagacaattcattacagttcaatagaaaaaaaaagcagct

SEQ ID NO: 137646 - DNA, 120 bp, Artificial Sequence
  ENSG00000103494_43 (sequence is synthesized)
ataatgcaaaaatgcaagtatgaatatctgcatatagtttgaaccatctgtgctctaatggcttcaataatgactctcgtctttagaaggctttgaaatgacatccgtacaatattaatt

SEQ ID NO: 137647 - DNA, 120 bp, Artificial Sequence
  ENSG00000103494_44 (sequence is synthesized)
tgttgatgtacattgtgggaccagtagagtatgatctgaccacagaaatctataaattctgtctataccactgggcctccctgtcctggggcctgccatctccgagaagaatcttgctct

SEQ ID NO: 137648 - DNA, 120 bp, Artificial Sequence
  ENSG00000103494_45 (sequence is synthesized)
catccaactctgcaaatcttcataacaactcgttcctctggaaccttctggagaccacaaacatctgcagactaaacctctccagtcctagtaaacaaccacatgtttgttgtcacttcg

SEQ ID NO: 137649 - DNA, 120 bp, Artificial Sequence
  ENSG00000103494_46 (sequence is synthesized)
gctggctctgagctcatttttttggcccctttttctagctttctttggctttatgcagttacagtgtcattaaggcccataatattccctgcagtaatttaaaacagccagattataccc

SEQ ID NO: 137650 - DNA, 120 bp, Artificial Sequence
  ENSG00000103494_47 (sequence is synthesized)
tgggattaactgagtggtttttgagacatttattgtggtattctcccaggaggtttgtattattgttgtaaaatgttacatcccaaactaaataacccttctgcagggagaagaaccaga

SEQ ID NO: 137651 - DNA, 120 bp, Artificial Sequence
  ENSG00000103494_48 (sequence is synthesized)
ttgcactgacttcttaggatcattaagtggaaaggaaaagtttttcttagaaaacttatgggacccagtcacctgtatggaatgtatatctcagacaagatgagagaaacagccatgttt

SEQ ID NO: 137652 - DNA, 120 bp, Artificial Sequence
  ENSG00000103494_49 (sequence is synthesized)
ctgtcacattgtttactgtcatattaaagatatctagttttaaaatattcagtttcaaactattgcgaattttcacaacactcattttcatagctaattgctgctgacacattttgaagt

SEQ ID NO: 137653 - DNA, 120 bp, Artificial Sequence
  ENSG00000103494_50 (sequence is synthesized)
ggcgaggtagtattgaacgctgtcatgtggatacttcagttgggtttcataatctgtttgagaattttgtttgttttatcttgtggtaactggaggccattgaaaagcttaccacctttt

SEQ ID NO: 137654 - DNA, 120 bp, Artificial Sequence
  ENSG00000103494_51 (sequence is synthesized)
gggttaaagagcagtggatttctcttggtgagccaaactggatccattgaagagggcttggcgtcaggggccaccagcagtggccttgccacacagataccagcttaaggtgttgctggt

SEQ ID NO: 137655 - DNA, 120 bp, Artificial Sequence
  ENSG00000103494_52 (sequence is synthesized)
gtgaacatacacttcttggtgtaactagaccagtgcacgcagcacttttttgggctgtaatgcttttagtttggaaatacaaatagagatgtgatgtggtatgtgggagagtgtatttta

SEQ ID NO: 137656 - DNA, 120 bp, Artificial Sequence
  ENSG00000103494_53 (sequence is synthesized)
catgtatttttgcctactgtagtagaaatgtcaaattcccagccactgtcatgaaaagcagttgacaaaaataagttttatggtttacagtgtggtttacgtaaagaacatttctcttca

SEQ ID NO: 137657 - DNA, 120 bp, Artificial Sequence
  ENSG00000103494_54 (sequence is synthesized)
ctctcagtttcaccatgttttctaaattatcatggtttactgccatttaacttaaattagtttttttaaaaatacataaagaatatgtttaatcaaataaagaaaggccacactgaaatt

SEQ ID NO: 137658 - DNA, 120 bp, Artificial Sequence
  ENSG00000103494_55 (sequence is synthesized)
ctgctgttcctgccattcattcgttaccacaaaacacaaataatttctatgtgttatgaagacatgtgggctgagaagtggtcatgtgattggagaggttttgcgtgcactcatgttccc

SEQ ID NO: 137659 - DNA, 120 bp, Artificial Sequence
  ENSG00000103494_56 (sequence is synthesized)
acaacaaaacataaattattttagtaatctgacatcaagagctgtgaaaatgaaaaccagttcttacacatgttctaacaagaatctgattaacatttttgtggatatggaaaatttttt

SEQ ID NO: 137660 - DNA, 120 bp, Artificial Sequence
  ENSG00000103494_57 (sequence is synthesized)
ttttagtcaaactggcactattgctgaatgtagaatgatttccttatgcactagatagaaaaatgtgaatcatgtctgtgaacaaatatgagaataaaatgtcatctttgtgtaggacaa

SEQ ID NO: 137661 - DNA, 120 bp, Artificial Sequence
  ENSG00000103494_58 (sequence is synthesized)
aacaaccaggagagagattttgggataaaaattatcaagtgattgacaatatcaggatgataattcatccccaactatcagagtacattttaataagtcactcatgcctgaaggcctctg

SEQ ID NO: 137662 - DNA, 120 bp, Artificial Sequence
  ENSG00000103494_59 (sequence is synthesized)
actaccttaacaaagaaaaactaaacccgtgatttattagagattgggcaacatgcctaattaaatccatgaatgggaacaaacagatttacatcccctttgttcagaacaaaaacaacc

SEQ ID NO: 137663 - DNA, 120 bp, Artificial Sequence
  ENSG00000103494_60 (sequence is synthesized)
tctaggtcaaccagaaagctagaaaatatcaaagcaagagaaacaagtgtttttaaaactaaaaatatagaattagaaaacatctcctcatcctaatctcttttatcttacaaggtagaa

SEQ ID NO: 137664 - DNA, 120 bp, Artificial Sequence
  ENSG00000103494_61 (sequence is synthesized)
ttttcacttccatttcaaagtgccaccagtggactgcaccctccagcctgaccgcctggaaaattggacccatattactggtattcttataccttttgttcttgccctttcattttccat

SEQ ID NO: 137665 - DNA, 120 bp, Artificial Sequence
  ENSG00000103494_62 (sequence is synthesized)
atgacattcactaatatatcaagctatgtttttccttcaggcttttggaagtgcaatctggtactcttagacttcgatcatgacctgttttctgaggtagatgctgtttgacttttctgc

SEQ ID NO: 137666 - DNA, 120 bp, Artificial Sequence
  ENSG00000103494_63 (sequence is synthesized)
tttttgcctcttctcactctattgagagtcacctttttcatccctagaacagcattacctctgtcttcactgtgcaccatttgttttctttttaaataaaatttaacatcttgattttta

SEQ ID NO: 137667 - DNA, 120 bp, Artificial Sequence
  ENSG00000103494_64 (sequence is synthesized)
ctgaagataggaaggaaatttcaccagaggtagagcatataccagaaatagaaattaatatgctgactgttccacatgttcccaaggtttcacaagaaggcagtgtagatgaggtaaaag

SEQ ID NO: 137668 - DNA, 120 bp, Artificial Sequence
  ENSG00000103494_65 (sequence is synthesized)
gtggcacggtgagtacccgggaggatgggggaggatgagggtgggtggaggttgctgaccctccccactgcagcgcgggccggggtcctagggtccgctctgccgcctggagaaggccct

SEQ ID NO: 137669 - DNA, 76 bp, Artificial Sequence
  ENSG00000103494_66 (sequence is synthesized)
tccccaggctcaacagatcctcccacctcagcctcccaagtagatgggactacaagcatgcccagctaattttgtt

SEQ ID NO: 137670 - DNA, 120 bp, Artificial Sequence
  ENSG00000103494_67 (sequence is synthesized)
caagtagatgggactacaagcatgcccagctaattttgttttaattttttttttaagagatgagatctccctgtgttgcccaggctgatctcaaaactcctggacttaagggatcctcct

SEQ ID NO: 137671 - DNA, 120 bp, Artificial Sequence
  ENSG00000103494_68 (sequence is synthesized)
ctcccaaagtgctgagattataggcataagccacgatgcccaacccatatgaattattattgataccaccatgcatggcttaagaatccagtcctcctaatgtaatagacctgttggaag

SEQ ID NO: 137672 - DNA, 120 bp, Artificial Sequence
  ENSG00000103494_69 (sequence is synthesized)
gttggaagtatggttgactaaatacagattcagaatttccttactttttaatttttttattatggatttagagggtacaagtgcacatgggtatattaggtagtgatgaagtctggcctt

SEQ ID NO: 137673 - DNA, 120 bp, Artificial Sequence
  ENSG00000103494_70 (sequence is synthesized)
tcagtgtaaccatcactcgaataatgtacattatacccaacaggtaatttctcatccctcacccccctaccatgttctggaaattaccttgttttaataaaaatactatatgctaagttg

SEQ ID NO: 137674 - DNA, 120 bp, Artificial Sequence
  ENSG00000103494_71 (sequence is synthesized)
ggaaaataaaattcaaagatgtcaattaaaaaactaaaagacaattttttttccacatgcttttcaggagccttaataagtaagtaaaaaatcacagattttgaaacacattttctcagg

SEQ ID NO: 137675 - DNA, 120 bp, Artificial Sequence
  ENSG00000103494_72 (sequence is synthesized)
attaatactgtgaacttatgtcttgggtttttgatgagcaagtgaatcatatggtagacacatgatagtgttcatttattcctcattcccctgctgtctttgtcgaggtgctagctcagt

SEQ ID NO: 137676 - DNA, 120 bp, Artificial Sequence
  ENSG00000103494_73 (sequence is synthesized)
ttcctttctgaccagaacaatactagatcaagactggtgtggaacaggaattaaagtaatttgaaatgtgtccttaaacctgatttttacttacctttccaattgtgtggactttatttt

SEQ ID NO: 137677 - DNA, 120 bp, Artificial Sequence
  ENSG00000103494_74 (sequence is synthesized)
atataagtgttcttcagctgttggagttttgcatattctccataaccaaaattttcacagaaaagcaaggcagatattcacgttggtgatatttggttggcctctgtatataacggtgaa

SEQ ID NO: 137678 - DNA, 120 bp, Artificial Sequence
  ENSG00000103494_75 (sequence is synthesized)
tccagttcagtttctactctgtggacttcaacaacccactggcatgctatgtgcaggccttttactttgagttgggttttagtcatgatgatggctgttttcaagatttgtgactcactt

SEQ ID NO: 137679 - DNA, 120 bp, Artificial Sequence
  ENSG00000103494_76 (sequence is synthesized)
gcctgattccttttctgaccattatcccacacacatcagccagtcagaatgaggcatgtagtctgctatgaccacctaacaatttttttctttgtaagcctaattggtcagtaaaagaat

SEQ ID NO: 137680 - DNA, 120 bp, Artificial Sequence
  ENSG00000103494_77 (sequence is synthesized)
cgaattcacatccttgacctcattagtaatttgtcatagccagaaaataaaaaacaactgaataatgagccatgtagtttaatgggaaaaggactgagctaggaatcaagttgtatgtat

SEQ ID NO: 137681 - DNA, 120 bp, Artificial Sequence
  ENSG00000103494_78 (sequence is synthesized)
gcattctgttatctctctgccactagcctgtggtatgtatgttcaagccatttaacctcctgaaagttcgttttactttagctacgagaataatgatccaatgaacactatgacccaaaa

SEQ ID NO: 137682 - DNA, 120 bp, Artificial Sequence
  ENSG00000103494_79 (sequence is synthesized)
acccaaaagctctaaatgcctctcgatctcacaccactgactgtgacctagatacatgggtagaactgtctttaaatttatcttttagaagtaaataggccaggcacagtggctcacgcc

SEQ ID NO: 137683 - DNA, 84 bp, Artificial Sequence
  ENSG00000103494_80 (sequence is synthesized)
ccaagatcgcgccattggactgagcttgggcaataagagcgaaactctgtctaaaaaacaaaacaaaacaaaaaagtaaatagt

SEQ ID NO: 137684 - DNA, 81 bp, Artificial Sequence
  ENSG00000103494_81 (sequence is synthesized)
acaaaacaaaacaaaaaagtaaatagtttattttctataaatgtagattttataaactaaggaagtctttgttgcccaggc

SEQ ID NO: 137685 - DNA, 70 bp, Artificial Sequence
  ENSG00000103494_82 (sequence is synthesized)
gaactccaccatgagccacctcgtctagccaaaactacctttttaaataagcactcagactttgccagat

SEQ ID NO: 137686 - DNA, 120 bp, Artificial Sequence
  ENSG00000103494_83 (sequence is synthesized)
aaaactacctttttaaataagcactcagactttgccagatcacgtatgattcattaatatgataaaataatcaaatccagcaaatggaatgtatggctattacgagacaaacagatgcaa

SEQ ID NO: 137687 - DNA, 120 bp, Artificial Sequence
  ENSG00000103494_84 (sequence is synthesized)
tcatgtttcttgacaaagtttatttgaatatcatttgaagaatttaaagataccctgccttaaaaattagggtcatttatttttacctgggtgttaactgcctttttatattaaatctgt

SEQ ID NO: 137688 - DNA, 120 bp, Artificial Sequence
  ENSG00000103494_85 (sequence is synthesized)
gtctttcttttgaatgtaatctacatctctgtgtgaaagtctctctgtaacagaaaattcagatatttaggttgacgtctcattcatatgacaaccttacttttgtgcacaggccattgg

SEQ ID NO: 137689 - DNA, 120 bp, Artificial Sequence
  ENSG00000103494_86 (sequence is synthesized)
gtggggcttaggaccctaaactcattaaagggccaggtagagtgtgtggccctcttggactgtgatacctggccaaatttcccagtgatatatcattctcggaattaggtggaaaaggaa

SEQ ID NO: 137690 - DNA, 120 bp, Artificial Sequence
  ENSG00000103494_87 (sequence is synthesized)
ctaatccattgattattttactagagtgtttgtggtactcttggatcttggtttttattatcctgtatcctttataaagcatgcttaatggatgtgcctcaagggaaagagaaaacaatc

SEQ ID NO: 137691 - DNA, 120 bp, Artificial Sequence
  ENSG00000103494_88 (sequence is synthesized)
ttaactgattatgttatgcatagctctccctgatgccacatgctgtaggccgagtagccagagtgtggatagacatgtattactaccgcatttacagcggactctgcttagggcagaaaa

SEQ ID NO: 137692 - DNA, 120 bp, Artificial Sequence
  ENSG00000103494_89 (sequence is synthesized)
aaggttgttctatgacatcccaaagctattaaaggtttttttatttcacttttgttcccttaagtaaaagcttctgtccataaccacgctaaaataaagcaaaacccatttaaagaaaaa

SEQ ID NO: 137693 - DNA, 72 bp, Artificial Sequence
  ENSG00000103494_90 (sequence is synthesized)
gtattattccaggtcctatctccaagaatatcaaacagagtctcgcattgtctcccgggctgggcagcgatt

SEQ ID NO: 137694 - DNA, 76 bp, Artificial Sequence
  ENSG00000103494_91 (sequence is synthesized)
gtgagcagcagtctgggtgacagagtgagattctgtctctcaaaaaataaagaaataaagcaaaacaatagaacag

SEQ ID NO: 137695 - DNA, 120 bp, Artificial Sequence
  ENSG00000103494_92 (sequence is synthesized)
aaaatttggagggtatggtattttataaacttaattgaataccccaccttgaatcttgtttggaacaaggcaggatgtaaataagtacaatttttaaaaatggaaaatcttgcaaactag

SEQ ID NO: 137696 - DNA, 120 bp, Artificial Sequence
  ENSG00000103494_93 (sequence is synthesized)
aataataaaccaaaaagattatgagtgtttattatgtctgaatttgctatttaaatgaaaaaagctaatagagtgccgttagtatatcatacctataaataacttttggtttaatattta

SEQ ID NO: 137697 - DNA, 120 bp, Artificial Sequence
  ENSG00000103494_94 (sequence is synthesized)
tagtttaataagcaaatggccaaagcatctgttttttaaatgtcttgattttaaaatgaaagttttaaaaagtaactaactattctaacttgttagaatgcacattcccttaagatttgg

SEQ ID NO: 137698 - DNA, 120 bp, Artificial Sequence
  ENSG00000103494_95 (sequence is synthesized)
ggtttactaatgaaaacatcacttcagtctctggaacatatttaactttgcttgggttatactagattctatattgatttcaaagagtctctactgtttctgaagaaacagtattgtcac

SEQ ID NO: 137699 - DNA, 80 bp, Artificial Sequence
  ENSG00000103495_0 (sequence is synthesized)
cgcgcccccggcccccgctgagccccgggggccccgctgcggccgaggccatgttcccggtgtttccttgcacgctgctg

SEQ ID NO: 137700 - DNA, 120 bp, Artificial Sequence
  ENSG00000103495_1 (sequence is synthesized)
tccttgcacgctgctggccccccccttccccgtgctgggcctggactcccggggggtgggcggcctcatgaactccttcccgccacctcagggtcacgcccagaaccccctgcaggtcgg

SEQ ID NO: 137701 - DNA, 120 bp, Artificial Sequence
  ENSG00000103495_2 (sequence is synthesized)
ggctgagctccagtcccgcttctttgcctcccagggctgcgcccagagtccattccaggccgcgccggcgcccccgcccacgccccaggccccggcggccgagcccctccaggtggactt

SEQ ID NO: 137702 - DNA, 80 bp, Artificial Sequence
  ENSG00000103495_3 (sequence is synthesized)
gtggacttgctcccggtgctcgccgccgcccaggagtccgccgcggctgctgcggccgctgccgccgctgctgccgccgt

SEQ ID NO: 137703 - DNA, 80 bp, Artificial Sequence
  ENSG00000103495_4 (sequence is synthesized)
ggtggacacagcggccctgaagcagcctccggcgccccctccgccacccccgccagtgtcggcgcccgcggccgaggccg

SEQ ID NO: 137704 - DNA, 120 bp, Artificial Sequence
  ENSG00000103495_5 (sequence is synthesized)
agccccaacctcgacggtcgccgtggccccggtcgcgtctgccttggagaagaagacaaagagcaaggggccctacatctgcgctctgtgcgccaaggagttcaagaacggctacaatct

SEQ ID NO: 137705 - DNA, 120 bp, Artificial Sequence
  ENSG00000103495_6 (sequence is synthesized)
ccggaggcacgaagccatccacacgggagccaaggccggccgggtcccctcgggtgctatgaagatgccgaccatggtgcccctgagcctcctgagcgtgccccagctgagcggagccgg

SEQ ID NO: 137706 - DNA, 120 bp, Artificial Sequence
  ENSG00000103495_7 (sequence is synthesized)
cgggggagggggagaggcgggtgccggcggcggcgctgccgcagtggccgccggtggcgtggtgaccacgaccgcctcggggaagcgcatccggaagaaccatgcctgcgagatgtgtgg

SEQ ID NO: 137707 - DNA, 120 bp, Artificial Sequence
  ENSG00000103495_8 (sequence is synthesized)
caaggccttccgcgacgtctaccacctgaaccgacacaagctgtcgcactcggacgagaagccctaccagtgcccggtgtgccagcagcgcttcaagcgcaaggaccgcatgagctacca

SEQ ID NO: 137708 - DNA, 120 bp, Artificial Sequence
  ENSG00000103495_9 (sequence is synthesized)
cgtgcgctcacatgacggcgctgtgcacaagccctacaactgctcccactgtggcaagagcttctcccggccggatcacctcaacagtcacgtcagacaagtgcactcaacagaacggcc

SEQ ID NO: 137709 - DNA, 120 bp, Artificial Sequence
  ENSG00000103495_10 (sequence is synthesized)
cttcaaatgtgagaaatgtgaggcagctttcgccacgaaggatcggctgcgggcgcacacagtacgacacgaggagaaagtgccatgtcacgtgtgtggcaagatgctgagctcggctta

SEQ ID NO: 137710 - DNA, 120 bp, Artificial Sequence
  ENSG00000103495_11 (sequence is synthesized)
aacaaaggcttcaccacggcagcatacctgcgcatccacgcggtgaaggaccacgggctccaggccccgcgggctgaccgcatcctgtgcaagctgtgcagcgtgcactgcaagacccct

SEQ ID NO: 137711 - DNA, 120 bp, Artificial Sequence
  ENSG00000103495_12 (sequence is synthesized)
gcccagctggccggccacatgcagacccatctggggggggccgccccccctgtcccgggagacgccccccagccacagcccacctgctgagggggacccccgcacccaccaggtactggt

SEQ ID NO: 137712 - DNA, 120 bp, Artificial Sequence
  ENSG00000103495_13 (sequence is synthesized)
gaggtttgtccaatggcggcggcagcggcagcggcggcagcggcagcagcggcagcagtagcagcccctcccacagctgtgggctccctctcgggggcggagggggtgcctgtgagctct

SEQ ID NO: 137713 - DNA, 120 bp, Artificial Sequence
  ENSG00000103495_14 (sequence is synthesized)
cagccacttccctcccaaccctggtgagctccaagttggttgcgggggagaggggagaatggagtagagtcccttggtacaagctcctctcccccctcttttcccaccaactcctatttc

SEQ ID NO: 137714 - DNA, 120 bp, Artificial Sequence
  ENSG00000103495_15 (sequence is synthesized)
cctaccaaccaaggagcctccagaaggaaaggaggaagaaatgttttcttaggggaattcgctaggttttaacgatttgtttctcctgctcctcttctgtcagacctgaccccacacaaa

SEQ ID NO: 137715 - DNA, 120 bp, Artificial Sequence
  ENSG00000103495_16 (sequence is synthesized)
cctgtcccctcggttgtgttgaagtcccctggacagtgggcaggggtggcagaggacacgagcagccactgcccgtaccccctctcctctctgtaagcccatgccctgtcttcccaggga

SEQ ID NO: 137716 - DNA, 120 bp, Artificial Sequence
  ENSG00000103495_17 (sequence is synthesized)
cttgtgagcctcttccctcgacggtcctcttctctccttccagtcctctccccctgctgtctgcagcccctccccggggagttggtgctttcttttccttttttttttttttccaggggg

SEQ ID NO: 137717 - DNA, 120 bp, Artificial Sequence
  ENSG00000103495_18 (sequence is synthesized)
agggaggagaggaaggagggggatcagagctgtcccaaagagggaaagcggtgaggtttgaggaggggcagaagcagggccggcaaaggttgtaccttcataaggtggtatggggggttg

SEQ ID NO: 137718 - DNA, 120 bp, Artificial Sequence
  ENSG00000103495_19 (sequence is synthesized)
gggtcaggccctgaacatcgtcctacttgagaatctgtcaggggaaaaagtcaaggggagcaggaggaagagccaggagggccagaggcagagaagagatggagtcttaggggccagggt

SEQ ID NO: 137719 - DNA, 120 bp, Artificial Sequence
  ENSG00000103495_20 (sequence is synthesized)
gagcgaggggtccagggcctagaggtgcttcctgggggcgggggaatgcagccagtgtccccctcccctcttccaccccagctccagccctggtcttgtcttttcatccctcttccccac

SEQ ID NO: 137720 - DNA, 120 bp, Artificial Sequence
  ENSG00000103495_21 (sequence is synthesized)
gacagaagaagttgtggccctggccatgtcatcgtgttcctgtgtcccctgcatgtaccccaccctccaccccttccttttgcgcggaccccattacaataaattttaaataaaatcctg

SEQ ID NO: 137721 - DNA, 120 bp, Artificial Sequence
  ENSG00000103495_22 (sequence is synthesized)
aggcggcggcggcggcagcggctgctgggctccaggggagggatttcctgcttaagtgtcgctgtgacggcctgggctccgggaggaggcgcagggatcctcggaaaggcctgtggtgcg

SEQ ID NO: 137722 - DNA, 120 bp, Artificial Sequence
  ENSG00000103495_23 (sequence is synthesized)
gctctgcaacaaaggtacatgccgagggctgccgggagggccaggggcagagggtgggcgcctggccagacgccttgccacggatacgggttaagggtgctgtagccaagagctcgtggc

SEQ ID NO: 137723 - DNA, 120 bp, Artificial Sequence
  ENSG00000103495_24 (sequence is synthesized)
ctggggaaggggagccactcccagggcggagggaggaagcctctcccggttaccagggagcaaggggtggtcctttgtcgaggaggccggatcacctcaacagtcacgtcagacaagtgc

SEQ ID NO: 137724 - DNA, 120 bp, Artificial Sequence
  ENSG00000103495_25 (sequence is synthesized)
ccttcttcaaggcctcatcatgtcactcccatttcctacagatcaaagatccccaaggctctgattcctttaatctcttgctcccccctccccagcccaccaagctttaactctcctgtg

SEQ ID NO: 137725 - DNA, 120 bp, Artificial Sequence
  ENSG00000103496_0 (sequence is synthesized)
gctgaggctgcgggagctggagcggggaagaaaagggaattccaacctgtggaaccttggggggtccccggggtcggcgccttcccattgactgtgggcggtgcaagggacggagcctct

SEQ ID NO: 137726 - DNA, 120 bp, Artificial Sequence
  ENSG00000103496_1 (sequence is synthesized)
ggcggctcgtgggggtgttggggtccgcagggggagggaggggagtgtcagagtgtgagcggggtacgggaattccaaatttgagggcctcccggctctggcgccggggagggagagctc

SEQ ID NO: 137727 - DNA, 120 bp, Artificial Sequence
  ENSG00000103496_2 (sequence is synthesized)
aggccgccatgcgggacaggacccacgagctgagacagggggatgacagctcggacgaagaggacaaggagcgggtcgcgctggtggtgcacccgggcacggcacggctggggagcccgg

SEQ ID NO: 137728 - DNA, 120 bp, Artificial Sequence
  ENSG00000103496_3 (sequence is synthesized)
acgaggagttcttccacaaggtccggacaattcggcagactattgtcaaactggggaataaagtccaggagttggagaaacagcaggtcaccatcctggccacgccccttcccgaggaga

SEQ ID NO: 137729 - DNA, 120 bp, Artificial Sequence
  ENSG00000103496_4 (sequence is synthesized)
gcatgaagcaggagctgcagaacctgcgcgatgagatcaaacagctggggagggagatccgcctgcagctgaaggccatagagccccagaaggaggaagctgatgagaactataactccg

SEQ ID NO: 137730 - DNA, 120 bp, Artificial Sequence
  ENSG00000103496_5 (sequence is synthesized)
accgggagaagaacgtggagcggattcggaggcagctgaagatcaccaatgctgggatggtgtctgatgaggagttggagcagatgctggacagtgggcaaagcgaggtgtttgtgtcca

SEQ ID NO: 137731 - DNA, 120 bp, Artificial Sequence
  ENSG00000103496_6 (sequence is synthesized)
atatcctgaaggacacgcaggtgactcgacaggccttaaatgagatctcggcccggcacagtgagatccagcagcttgaacgcagtattcgtgagctgcacgacatattcacttttctgg

SEQ ID NO: 137732 - DNA, 120 bp, Artificial Sequence
  ENSG00000103496_7 (sequence is synthesized)
ctaccgaagtggagatgcagggggagatgatcaatcggattgagaagaacatcctgagctcagcggactacgtggaacgtgggcaggagcacgtcaagacggccctggagaaccagaaga

SEQ ID NO: 137733 - DNA, 120 bp, Artificial Sequence
  ENSG00000103496_8 (sequence is synthesized)
aggcgaggaagaagaaagtcttgattgccatctgtgtgtccatcaccgtcgtcctcctagcagtcatcattggcgtcacagtggttggataatgtcgcacattgttggcactaggagcac

SEQ ID NO: 137734 - DNA, 120 bp, Artificial Sequence
  ENSG00000103496_9 (sequence is synthesized)
caggaacccagggcctggccttctctcccagcagcctggggggcagggcagagcctccagtcggaccccttcctcacactggcccctatgcagaagggcagacagttcttctggggttgg

SEQ ID NO: 137735 - DNA, 120 bp, Artificial Sequence
  ENSG00000103496_10 (sequence is synthesized)
cagctgctcattcatgatggcctcctccttcaggcctcaatgcctgggggaggcctgcactgtcctgattggccgggacacacggttttgtaaaaaattaaaaaacaaaaaaagagcata

SEQ ID NO: 137736 - DNA, 120 bp, Artificial Sequence
  ENSG00000103496_11 (sequence is synthesized)
acccactgcctcgaaaggcctctgggggtggtcggcgcgcccctccccacctcgcgggggccgtgtgggcgtcgctcggtcgttggggtgccggggacgtcgtgatgagaacggcgtccc

SEQ ID NO: 137737 - DNA, 120 bp, Artificial Sequence
  ENSG00000103496_12 (sequence is synthesized)
agagacggcggtgacagagccgggacacgtgacagtcacagggtcacattctgcggtccacgagtttgggaccgggctggtcacgtgacgcgatttccgttggaagatgcaacggttccg

SEQ ID NO: 137738 - DNA, 120 bp, Artificial Sequence
  ENSG00000103496_13 (sequence is synthesized)
gtgacggtagcaagttctcgcgtccaggcatctccgcttccgctcggggcgcaacaacttccgactccaccttcccagcctcgggcaaggaagagacgcgaccatggggatgacagctcg

SEQ ID NO: 137739 - DNA, 120 bp, Artificial Sequence
  ENSG00000103496_14 (sequence is synthesized)
agtcatgctacagccaatgcccttttgcagctgagacttacaggaaagagatctcattcagtaggagtactgagacctgaggctggtggtgccaggaggaggcagggatagggagggctt

SEQ ID NO: 137740 - DNA, 120 bp, Artificial Sequence
  ENSG00000103496_15 (sequence is synthesized)
acaggcatgagccaccgcgcccggcccccgacacctagttttaaagggcccctgctgttgctgccgctgccgccgctcccagctgcccagtctggcgggctcagtcccgcgttgccatgt

SEQ ID NO: 137741 - DNA, 120 bp, Artificial Sequence
  ENSG00000103496_16 (sequence is synthesized)
gatgcacattggaccgggctctggactgggctaggggaagggcaggagggcggaattgggcccgagggccaggcctcgccgacccccgactgcgcctcccggtggccccgcagcgcctcc

SEQ ID NO: 137742 - DNA, 120 bp, Artificial Sequence
  ENSG00000103496_17 (sequence is synthesized)
cggtggccctggagtgcaggtcttaccgtccgagatcgtccgcaactgggcgagctgtgcatggggcgtggctaaggccgtggtttggttacgattggccagcgggacttaagtgttgtc

SEQ ID NO: 137743 - DNA, 120 bp, Artificial Sequence
  ENSG00000103496_18 (sequence is synthesized)
tctgaagagcatggacattagtctggagggtcctggaagagtgatccccgccccaccatcaaatggcgcttaggtctaggaagcgggtgtgggtggggccttagggcgaggcgcagacat

SEQ ID NO: 137744 - DNA, 120 bp, Artificial Sequence
  ENSG00000103496_19 (sequence is synthesized)
accccgaagtggttggattgtataccgcaaggggctggatcgaaccccccaaagacactggaaggctgtgtggctgaggagggcccggcagatccagtgtgtcgtgggctttacaggaaa

SEQ ID NO: 137745 - DNA, 120 bp, Artificial Sequence
  ENSG00000103496_20 (sequence is synthesized)
gagctccaccttctctggagtgtgcagatgcgatctaggtgtgtccacccgatgggagctgcgggccgggcagatgctgccccagtacaaagctgatttggacctggggcctctggactt

SEQ ID NO: 137746 - DNA, 120 bp, Artificial Sequence
  ENSG00000103496_21 (sequence is synthesized)
ccctgattctctgcttgcatctccagcaaagtcctgtcccgttggctgccttcatccactctctcacttctctgccttcagagtaaaattgcaagatctgtggtgcttactgggatctga

SEQ ID NO: 137747 - DNA, 120 bp, Artificial Sequence
  ENSG00000103496_22 (sequence is synthesized)
atccgcctgcagctgaagggtgagctcctgggacctcagacagatccttccctctgatcctgccctgttgttggtatatctggggagtgtgtggcccagagaagccagtgatatatccag

SEQ ID NO: 137748 - DNA, 120 bp, Artificial Sequence
  ENSG00000103496_23 (sequence is synthesized)
gtcacacagcaggcctgggtctagcatctgtctcctggcctccaggccattgtactctccacagcacaagtccgcctctcaggttcttttatttacaatgaaaccatttacttacacagt

SEQ ID NO: 137749 - DNA, 120 bp, Artificial Sequence
  ENSG00000103496_24 (sequence is synthesized)
tatcgctgcccactgggcattctttgggcagggagatggagttttgttaggtggcctctgcatacctatgggaactcagtgatgtaatgcaaagaaaaataaacttactttctcctctta

SEQ ID NO: 137750 - DNA, 120 bp, Artificial Sequence
  ENSG00000103496_25 (sequence is synthesized)
agatagaggttgtatgggataagtgagcaggggacaagggactacatgatagaaggggcctggaagccatccccaaggagtctgaacttttgtcagatcaagtcttgcccttgtctttgg

SEQ ID NO: 137751 - DNA, 120 bp, Artificial Sequence
  ENSG00000103496_26 (sequence is synthesized)
gagatttctgccttggctgaggtcccatgatgctgacagccccaaatgctaagtcgtcagtccgcccacgccctggacccgaaagcaataaaggcgagatttccgttggaagatgcaacg

SEQ ID NO: 137752 - DNA, 120 bp, Artificial Sequence
  ENSG00000103502_0 (sequence is synthesized)
aagccactttttcctctctccaattttgcaacgacgggcgcggaggaggaggttcccggaagccacgcgcagctggagcagcggcgaccgcagctggaggcccggagcgcctgcggggct

SEQ ID NO: 137753 - DNA, 120 bp, Artificial Sequence
  ENSG00000103502_1 (sequence is synthesized)
ggcagaggcgagggaggttgcgggtaggaagggcggactgcgcgcgccccctgcgtcccgcgcacctcggggccggtccatgctcccgacggctgcgggcttcagcatctggggccaggt

SEQ ID NO: 137754 - DNA, 120 bp, Artificial Sequence
  ENSG00000103502_2 (sequence is synthesized)
gtccagggcgcaggtggtgcggccgatgcgccgggccggaggctgaggccgcgctgcggggctgggacagcactggcatctccagagcaggcccggggcagcaagggaggcgccgcgatg

SEQ ID NO: 137755 - DNA, 120 bp, Artificial Sequence
  ENSG00000103502_3 (sequence is synthesized)
ggcgccgcgatgccagacgaaaatatcttcctgttcgtgcccaacctcatcggttatgcccggattgtcttcgccatcatttctttctacttcatgccctgctgccccctcacggcctcc

SEQ ID NO: 137756 - DNA, 120 bp, Artificial Sequence
  ENSG00000103502_4 (sequence is synthesized)
tccttctacctgctcagcggcctgctggacgctttcgatggacacgctgctcgcgctcttaatcaaggaacccggtttggggccatgctggacatgctgacggaccgctgctccaccatg

SEQ ID NO: 137757 - DNA, 120 bp, Artificial Sequence
  ENSG00000103502_5 (sequence is synthesized)
tgcctgttggtcaacctggccctgctgtaccctggagccacgctgttcttccaaatcagcatgagtttggatgtggccagtcactggctgcacctccacagttctgtggtccgaggcagt

SEQ ID NO: 137758 - DNA, 120 bp, Artificial Sequence
  ENSG00000103502_6 (sequence is synthesized)
gagagtcacaagatgatcgacttgtccgggaatccggtgcttcggatctactacacctcgaggcctgctctgttcaccttgtgtgctgggaatgagctcttctactgcctcctctacctg

SEQ ID NO: 137759 - DNA, 120 bp, Artificial Sequence
  ENSG00000103502_7 (sequence is synthesized)
tccggatgggcctctgggtcactgcccccatcgccttgctgaagtcgctcatcagcgtcatccacctgatcacggccgcccgcaacatggctgccctggacgcagcagaccgcgccaaga

SEQ ID NO: 137760 - DNA, 120 bp, Artificial Sequence
  ENSG00000103502_8 (sequence is synthesized)
agaagtgacgctggagccccgggtcctggctgcccacctgccctgggagtcttgctgtgccacacagctccccaccccctgctaggaggtcccagtctcacgccttcctcatgtgttgtt

SEQ ID NO: 137761 - DNA, 120 bp, Artificial Sequence
  ENSG00000103502_9 (sequence is synthesized)
ctacctgctgggatgggggtcagcctctctttggtgacgtcacgttctctgggatcctgaggacccgggcctcaaatcagggaggatacgcgggaggccccctccatccaggcggtgctc

SEQ ID NO: 137762 - DNA, 120 bp, Artificial Sequence
  ENSG00000103502_10 (sequence is synthesized)
ctggggtgccgggaccgggcagtgtcacaccctgcctgctcagtcctggggtccgagatgctagggacgcttgagtgagggaggtggtgtgagggccaggtttcctgaaaggcgggagtc

SEQ ID NO: 137763 - DNA, 120 bp, Artificial Sequence
  ENSG00000103502_11 (sequence is synthesized)
agacctccgcccccagccagagcaagcttggggcaccatgcccaggagggaagaagccatccacagccttccctgtcaccggctcctctgtcctgcctaccctggtcctggcgggacttc

SEQ ID NO: 137764 - DNA, 120 bp, Artificial Sequence
  ENSG00000103502_12 (sequence is synthesized)
actatttgacttggtttcctttcagatattcttggctcagggcctgggttgagggagcttagggaaggacgtccgtctgggtgcttttcctccagtttgctggctggcttctccgtctac

SEQ ID NO: 137765 - DNA, 120 bp, Artificial Sequence
  ENSG00000103502_13 (sequence is synthesized)
ccacagtgacctcacagagaggccctcctgccacccatgctcatgtggtgtccccaccgcccacttgtttgatgtcactgactgtctacatgtatttatattcttgatattttctaccct

SEQ ID NO: 137766 - DNA, 120 bp, Artificial Sequence
  ENSG00000103502_14 (sequence is synthesized)
cactagaatgtaaactccatgaaggcacagacttttcttgttctcttctctatccctagagtaagaccaacttgaacctggcatatagtagctgcttaataaatactcgtctgtcaatga

SEQ ID NO: 137767 - DNA, 120 bp, Artificial Sequence
  ENSG00000103502_15 (sequence is synthesized)
ctactgtgtgccctgcataagcagttggggttccagaaggcatgcttagagggaggatggagagggaagggtgatggcttctggagggttgactaattttttaatctgttctccagaccc

SEQ ID NO: 137768 - DNA, 120 bp, Artificial Sequence
  ENSG00000103502_16 (sequence is synthesized)
aactgtaaggcttcccctgaggcatcaagtctctatctagccctggagtcttggttctggggttgatgagttgcagacatagctttcctctcctcctaccctgttccctccactctcatg

SEQ ID NO: 137769 - DNA, 120 bp, Artificial Sequence
  ENSG00000103502_17 (sequence is synthesized)
cctttctcagttcatgccatggtgacctttgcccactgacctcacacacagcctgttttctagcctgcgttcctccccaggcaggcggacacttccagtcttcgtttacaccctgcgtca

SEQ ID NO: 137770 - DNA, 120 bp, Artificial Sequence
  ENSG00000103502_18 (sequence is synthesized)
gagtgataaaccaaatatgggcacctgtcctgcatccactgtgccataacagcccttgcccacctaatcttccaggaacccggtttggggccatgctggacatgctgacggaccgctgct

SEQ ID NO: 137771 - DNA, 120 bp, Artificial Sequence
  ENSG00000103502_19 (sequence is synthesized)
ggaaagcagagatttttattcggtcttctcttttaccctttccttttccgtttctaactttgcttgacgttaatggttccttcctccctctcctcctctgcgctttggtacgagccaagg

SEQ ID NO: 137772 - DNA, 120 bp, Artificial Sequence
  ENSG00000103502_20 (sequence is synthesized)
gcgatgccagacgaaaatatcttcctgttcgtgcccaacctcatcggtgagtgctgcccacggccccgggccgaacgagagggcgaggggccttggcgggctccctgatcctgccctgtc

SEQ ID NO: 137773 - DNA, 120 bp, Artificial Sequence
  ENSG00000103502_21 (sequence is synthesized)
gggctgagcctagacggaagggtgtctgggatggcactaggcatcctggaagggctcctttttagctctgctttgtagaaagaccccaggcaaacctgcctctctttaaagcttcagtca

SEQ ID NO: 137774 - DNA, 120 bp, Artificial Sequence
  ENSG00000103502_22 (sequence is synthesized)
tgtttacagttgcattaagcaattcttaggactcttctggctgggtattctaggattccatataggtgacagcttataggaaggggcatgggagctttcaaatgtggcatttgaatcctg

SEQ ID NO: 137775 - DNA, 120 bp, Artificial Sequence
  ENSG00000103502_23 (sequence is synthesized)
actctgcccccaaataggtaactgtggctttcggcaggatactggtccttagccgtgcccagttttccatctgtacaataggtgttaacatgaggattggatgcatggtagtggtcatga

SEQ ID NO: 137776 - DNA, 120 bp, Artificial Sequence
  ENSG00000103507_0 (sequence is synthesized)
gtcacggcggcggagggcgcaggcggctgggcgcctggcgagtggactgttcgagcccttccgctgggacccgggccctggctccggccccgcgatgggagctgctctccgcgggctgag

SEQ ID NO: 137777 - DNA, 120 bp, Artificial Sequence
  ENSG00000103507_1 (sequence is synthesized)
cctgtcagcatcctcgacgcaccctggtccctgaagtcggagaagagcccctacccacccacacccccttgccccattttgggtcgcctgggtcctcagtcctagcggatcctcagtcct

SEQ ID NO: 137778 - DNA, 120 bp, Artificial Sequence
  ENSG00000103507_2 (sequence is synthesized)
agcggccaccgggtctgaaaggagcaagacgatgatcctggcgtcggtgctgaggagcggtcccgggggcgggcttccgctccggcccctcctgggacccgcactcgcgctccgggcccg

SEQ ID NO: 137779 - DNA, 120 bp, Artificial Sequence
  ENSG00000103507_3 (sequence is synthesized)
ctcgacgtcggccaccgacacacaccacgtggagatggctcgggagcgctccaagaccgtcacctccttttacaaccagtcggccatcgacgcggcagcggagaagccctcagtccgcct

SEQ ID NO: 137780 - DNA, 120 bp, Artificial Sequence
  ENSG00000103507_4 (sequence is synthesized)
aacgcccaccatgatgctctacgctggccgctctcaggacggcagccaccttctgaaaagtgctcggtacctgcagcaagaacttccagtgaggattgctcaccgcatcaagggcttccg

SEQ ID NO: 137781 - DNA, 120 bp, Artificial Sequence
  ENSG00000103507_5 (sequence is synthesized)
ctgccttcctttcatcattggctgcaaccccaccatactgcacgtgcatgagctatatatccgtgccttccagaagctgacagacttccctccgatcaaggaccaggcggacgaggccca

SEQ ID NO: 137782 - DNA, 120 bp, Artificial Sequence
  ENSG00000103507_6 (sequence is synthesized)
gtactgccagctggtgcgacagctgctggatgaccacaaggatgtggtgaccctcttggcagagggcctacgtgagagccggaagcacatagaggatgaaaagctcgtccgctacttctt

SEQ ID NO: 137783 - DNA, 120 bp, Artificial Sequence
  ENSG00000103507_7 (sequence is synthesized)
ggacaagacgctgacttcgaggcttggaatccgcatgttggccacgcatcacctggcgctgcatgaggacaagcctgactttgtcggcatcatctgtactcgtctctcaccaaagaagat

SEQ ID NO: 137784 - DNA, 120 bp, Artificial Sequence
  ENSG00000103507_8 (sequence is synthesized)
tggactacatcctgccggagctgctcaagaatgccatgagagccacaatggagagtcacctagacactccctacaatgtcccagatgtggtcatcaccatcgccaacaatgatgtcgatc

SEQ ID NO: 137785 - DNA, 120 bp, Artificial Sequence
  ENSG00000103507_9 (sequence is synthesized)
tgatcatcaggatctcagaccgtggtggaggaatcgctcacaaagatctggaccgggtcatggactaccacttcactactgctgaggccagcacacaggacccccggatcagccccctct

SEQ ID NO: 137786 - DNA, 120 bp, Artificial Sequence
  ENSG00000103507_10 (sequence is synthesized)
ttggccatctggacatgcatagtggcgcccagtcaggacccatgcacggctttggcttcgggttgcccacgtcacgggcctacgcggagtacctcggtgggtctctgcagctgcagtccc

SEQ ID NO: 137787 - DNA, 120 bp, Artificial Sequence
  ENSG00000103507_11 (sequence is synthesized)
tgcagggcattggcacggacgtctacctgcggctccgccacatcgatggccgggaggaaagcttccggatctgaccccacagcctttggcctgctcacccgaccagcctgggccgcattc

SEQ ID NO: 137788 - DNA, 120 bp, Artificial Sequence
  ENSG00000103507_12 (sequence is synthesized)
cctgcaggacctcccgggtcaggcagggcggccccctgctccacacactgctgcatcttgggtctcagggacccagacagatggacttacatggagctgggcactgccctgcctcaacag

SEQ ID NO: 137789 - DNA, 120 bp, Artificial Sequence
  ENSG00000103507_13 (sequence is synthesized)
ggtccattgcctcctcgcctccagaacttggagcagggaagtgggcaccctgaggcctccagcaccagttccgtcattctcgttcctggggaacccccactctgacctgttattaaagtt

SEQ ID NO: 137790 - DNA, 120 bp, Artificial Sequence
  ENSG00000103507_14 (sequence is synthesized)
cacattttgaatgccctctcgggccccgtgtgtggggagggcaggtgaacttttgtttctgcccccattcaggttcactgagcccttgggttgaactggttcgtgtcccagtctcttacc

SEQ ID NO: 137791 - DNA, 120 bp, Artificial Sequence
  ENSG00000103507_15 (sequence is synthesized)
tgccctgagagcctggcaggccaggagtagaatgggtcccaagtctgttgcatgtttgatttggtgggagtgggatgactgcagcaccttatacaaagagctttcattcatcttgttgaa

SEQ ID NO: 137792 - DNA, 120 bp, Artificial Sequence
  ENSG00000103507_16 (sequence is synthesized)
aaagaacgggtgggaatggtgtgggtgggggtcaaagaggaaacccagagatgcagggcgcccctttcccgtggtctgcccccaattgctcaggcaggccagtcacgggcacggaaagat

SEQ ID NO: 137793 - DNA, 120 bp, Artificial Sequence
  ENSG00000103507_17 (sequence is synthesized)
ctattcaactcactgcccaatctcctctcctggtgcagaaaagacacccagtcagcgacttgcattatctgcaggcatgagtgaataataataatgcctaacccttatatagtgctaatt

SEQ ID NO: 137794 - DNA, 120 bp, Artificial Sequence
  ENSG00000103507_18 (sequence is synthesized)
ccacgcctggcactgttctaggcactcatataaattcatgtaatccacacaaccccaaaactgatgatatctcttcatcttaccaagcactgagcagttaaataacttgctccagatatt

SEQ ID NO: 137795 - DNA, 120 bp, Artificial Sequence
  ENSG00000103507_19 (sequence is synthesized)
ttaggtcagcgggccaccctgccccgggggcaagtggggagtctggggcccagagtggcagacgattgcttgcctaaaggtgtcagggccacacaggattcaaccccaggccttcagaag

SEQ ID NO: 137796 - DNA, 120 bp, Artificial Sequence
  ENSG00000103507_20 (sequence is synthesized)
ccaaaggtgtgtattcacggagcctggaagggtcgaagtgggggtttgatcacgtggtcgaccagctgggtggtgatccccatgggtaggtgggggtggctgttctctgctcagtgccca

SEQ ID NO: 137797 - DNA, 120 bp, Artificial Sequence
  ENSG00000103507_21 (sequence is synthesized)
gtggggctggtgctttggggcagttccgaagttgccagcatcttggggtggggctaggggcgtgggtagtcctgacctcctttctccggccagcctgactttgtcggcatcatctgtact

SEQ ID NO: 137798 - DNA, 120 bp, Artificial Sequence
  ENSG00000103507_22 (sequence is synthesized)
cgtctctcaccaaagaagattattgagaagtgggtggactttgccaggtgaggcaagaatggctcagggggtgggcagacatctggggcagggaaggcttgggtctgagcccttgcccgg

SEQ ID NO: 137799 - DNA, 120 bp, Artificial Sequence
  ENSG00000103507_23 (sequence is synthesized)
ggcatgatctgcggggagcagggtttctcaaccatggcactattgacatttccagccagataattctttgtcacaggggctgccccgtgcacgttaggaagttcagcagcatccctggcg

SEQ ID NO: 137800 - DNA, 120 bp, Artificial Sequence
  ENSG00000103507_24 (sequence is synthesized)
ccagcagtactgcctagttgtgacaaacaaaaatgtctctgcacattgccatatgttacttaggggggcagaattgtttccagttgcaaaccactggtggaggggcccctgactgaaccc

SEQ ID NO: 137801 - DNA, 120 bp, Artificial Sequence
  ENSG00000103507_25 (sequence is synthesized)
gggagtggtggggagaggtcgcccgggtctggggagaccgatgcacaggtggagagatggtgcgggttctgtggattcggatccttacaacttcctcttccccgccccggtagatgggag

SEQ ID NO: 137802 - DNA, 120 bp, Artificial Sequence
  ENSG00000103507_26 (sequence is synthesized)
gtggggcgaccccagcctactcagtccgcggaggccccgcggcgcacgtccgcagcctccatcacagcgcgggcgcgcagacggggctggcatctaccatatggggggcatccgggccga

SEQ ID NO: 137803 - DNA, 120 bp, Artificial Sequence
  ENSG00000103507_27 (sequence is synthesized)
agtgacccgcgtggggggtcccgctggggactccgtgccgcaccctcccaagccggccccaggggcccagggctggtgtcgcacgttcgctggccgcgctcccagggcccgggtttgaag

SEQ ID NO: 137804 - DNA, 120 bp, Artificial Sequence
  ENSG00000103510_0 (sequence is synthesized)
gtcacttcccttcccgcgatggcggcacagggagctgctgcggcggttgcggcggggacttcaggggtcgcgggggagggcgagcccgggcccggggagaatgcggccgctgaggggacc

SEQ ID NO: 137805 - DNA, 120 bp, Artificial Sequence
  ENSG00000103510_1 (sequence is synthesized)
gccccatccccgggccgcgtctctccgccgaccccggcgcgcggcgagccggaagtcacggtggagatcggagaaacgtacctgtgccggcgaccggatagcacctggcattctgctgaa

SEQ ID NO: 137806 - DNA, 120 bp, Artificial Sequence
  ENSG00000103510_2 (sequence is synthesized)
gtgatccagtctcgagtgaacgaccaggagggccgagaggaattctatgtacactacgtgggctttaaccggcggctggacgagtgggtagacaagaaccggctggcgctgaccaagaca

SEQ ID NO: 137807 - DNA, 120 bp, Artificial Sequence
  ENSG00000103510_3 (sequence is synthesized)
gtgaaggatgctgtacagaagaactcagagaagtacctgagcgagctcgcagagcagcctgagcgcaagatcactcgcaaccaaaagcgcaagcatgatgagatcaaccatgtgcagaag

SEQ ID NO: 137808 - DNA, 120 bp, Artificial Sequence
  ENSG00000103510_4 (sequence is synthesized)
acttatgcagagatggaccccaccacagcagccttggagaaggagcatgaggcgatcaccaaggtgaagtatgtggacaagatccacatcgggaactacgaaattgatgcctggtatttc

SEQ ID NO: 137809 - DNA, 120 bp, Artificial Sequence
  ENSG00000103510_5 (sequence is synthesized)
tcaccattccccgaagactatgggaaacagcccaagctctggctctgcgagtactgcctcaagtacatgaaatatgagaagagctaccgcttccacttgggtcagtgccagtggcggcag

SEQ ID NO: 137810 - DNA, 120 bp, Artificial Sequence
  ENSG00000103510_6 (sequence is synthesized)
gcaaagaccataagatttactgtcagaacctgtgtctgctggccaagcttttcctggaccataagacactgtactttgacgtggagccgttcgtcttttacatcctgactgaggtggacc

SEQ ID NO: 137811 - DNA, 120 bp, Artificial Sequence
  ENSG00000103510_7 (sequence is synthesized)
ggcagggggcccacattgttggctacttctccaaggagaaggagtccccggatggaaacaatgtggcctgcatcctgaccttgcccccctaccaacgccgcggctacgggaagttcctca

SEQ ID NO: 137812 - DNA, 120 bp, Artificial Sequence
  ENSG00000103510_8 (sequence is synthesized)
tcgctttcagttatgagctctccaagctggagagcacagtcggctccccggagaagccactgtctgacctgggcaagctcagctaccgcagctactggtcctgggtgctgctagagatcc

SEQ ID NO: 137813 - DNA, 120 bp, Artificial Sequence
  ENSG00000103510_9 (sequence is synthesized)
tgcgggacttccggggcacactgtccatcaaggacctcagccagatgaccagtatcacccaaaatgacatcatcagtaccctgcaatccctcaatatggtcaagtactggaagggccagc

SEQ ID NO: 137814 - DNA, 120 bp, Artificial Sequence
  ENSG00000103510_10 (sequence is synthesized)
acgtgatctgtgtcacacccaagctggtggaggagcacctcaaaagtgcccagtataagaaaccacccatcacagtggactccgtctgcctcaagtgggcaccccccaagcacaagcaag

SEQ ID NO: 137815 - DNA, 120 bp, Artificial Sequence
  ENSG00000103510_11 (sequence is synthesized)
tcaagctctccaagaagtgagcagcctggcccctgctgtcggacctgagcctcctggctcccagcctgtaaatatgtatagacctgttttgtcatttttttaataaagtcagttctggtg

SEQ ID NO: 137816 - DNA, 120 bp, Artificial Sequence
  ENSG00000103510_12 (sequence is synthesized)
gaactcctggcctgaagcgatcctcctgcttggattcctgaagtgcgagattacaggtgtgagccaccatacctcaacactgtattttcaacccgctcttcgttcaatctccaaaggctg

SEQ ID NO: 137817 - DNA, 120 bp, Artificial Sequence
  ENSG00000103510_13 (sequence is synthesized)
cagccacaggtccgcacggaaaaccaggagctccaagactgccgcacactcaacatccaactcgcggggccgcggggacggccacagaagccaatcggctcctgctacatcacagacccc

SEQ ID NO: 137818 - DNA, 120 bp, Artificial Sequence
  ENSG00000103510_14 (sequence is synthesized)
gggactttacctacttcctcttacttacttttcataggtaagaaaacagacagagggtaagggcttcgctgcagtctcacagcaaggaaatggcacagctgggactagaactcaggcctc

SEQ ID NO: 137819 - DNA, 120 bp, Artificial Sequence
  ENSG00000103510_15 (sequence is synthesized)
cggcactggtagcctcttttgtctcctagtagctgtgtcttagtagaaaaaatgacttgaagttcagtgggaaagacgagaatgttattcggcagttgctatagccaagcaccctgccaa

SEQ ID NO: 137820 - DNA, 120 bp, Artificial Sequence
  ENSG00000103510_16 (sequence is synthesized)
gtgctgtatatgtataagctcctcaaatccttcccaacaattcaacacacaggaatagttacttttttggtaggtgaggaagcaggctgagagagattaagtaacatgcccaaggtcaca

SEQ ID NO: 137821 - DNA, 120 bp, Artificial Sequence
  ENSG00000103510_17 (sequence is synthesized)
cccaaggtcacacagccagtaaaacggtgggctggaattagaataataatgccaaacacttgttagccggtgagcagaagtattcagctaaatggtttttgtgtgtgtgtgtgtgtgtgt

SEQ ID NO: 137822 - DNA, 120 bp, Artificial Sequence
  ENSG00000103510_18 (sequence is synthesized)
tgctgtgtgtcgggggcggtgggggagtgtcagtatatggactggtaggagtcaaggcctccttattgctgtcacatgatcccaaaccagtcagaccagctcccaggatggagcccgggg

SEQ ID NO: 137823 - DNA, 120 bp, Artificial Sequence
  ENSG00000103510_19 (sequence is synthesized)
caggcctctcattcctgggcttccctacccctccccagcacagcctgcccttttgttctcacctggaggaggtgaaactggcctgagcccagaggagggcagccaggtgtgagctggcct

SEQ ID NO: 137824 - DNA, 120 bp, Artificial Sequence
  ENSG00000103510_20 (sequence is synthesized)
aaaaaaaaaaaaaaaaaagaaataacactctatgtaagggttactgaaaggattaaatgaggccatataaacatataggcacagtgctttgtggagggggttctgggtaaagcactggct

SEQ ID NO: 137825 - DNA, 120 bp, Artificial Sequence
  ENSG00000103510_21 (sequence is synthesized)
ggggttctgggtaaagcactggctccttcctcccttctcagctacagggcagggccttgtctgccctggtgtaggtcatggaccgtcttgggtcccccttccattgtcaggctgtactgg

SEQ ID NO: 137826 - DNA, 120 bp, Artificial Sequence
  ENSG00000103510_22 (sequence is synthesized)
gttcctcccacagggtctggcctaggagcaggatgtgttgtgagtgtggtgtgactcttagtctctgctttctaaggacttgaaaaatagaggaacccaggtgggcatacttggacagtg

SEQ ID NO: 137827 - DNA, 120 bp, Artificial Sequence
  ENSG00000103510_23 (sequence is synthesized)
ttgccctgttgaccacttctcgctgaacttgggaaggagggaatgttttctggatgggaagaatccagtcaggcctcctggagggggtggtaagaatctcaagccttgaaggatgggaaa

SEQ ID NO: 137828 - DNA, 120 bp, Artificial Sequence
  ENSG00000103510_24 (sequence is synthesized)
gagcacaataacaacagtgacaaaggatagatcacaaagcatcatggactcacctgactcatgctccgtgccaggctgaggaagtgttttctgctggcagtgagagaaggaagggcattc

SEQ ID NO: 137829 - DNA, 120 bp, Artificial Sequence
  ENSG00000103510_25 (sequence is synthesized)
tccaggtagaaggagctgtttgtgcagaagcatgaaggccgctaaaagggggctgctgatagcaatgaggaggctggggctggaggcagggagtctgaggcggcctagtaaattgtccag

SEQ ID NO: 137830 - DNA, 120 bp, Artificial Sequence
  ENSG00000103510_26 (sequence is synthesized)
acctgagatggggccatgactacctggagcaggacagagaggagaattccagagagggcccaattccagagatgtcagaagtagactcgacatccactgtattaggacttggccaggccg

SEQ ID NO: 137831 - DNA, 120 bp, Artificial Sequence
  ENSG00000103510_27 (sequence is synthesized)
agggagagagagtagtctgaggcaagcctagttatgggtcttggacactgggaccaagggtgatgttcccagtaaaatgagcaacccaggaggaggcgcaggtttgcagggaggagtgat

SEQ ID NO: 137832 - DNA, 120 bp, Artificial Sequence
  ENSG00000103510_28 (sequence is synthesized)
gaggtcctttctgcacatcttgagtccgctgtccctgtgggagggacctctggggcagtcgcatgggcaggcagggtctggtcctcaggaaaggggtccaggaacatcggggaggtagta

SEQ ID NO: 137833 - DNA, 120 bp, Artificial Sequence
  ENSG00000103510_29 (sequence is synthesized)
acagttcttacgctgggcctggaaggcaaatctgttatttcatttgagtctcacaactttggcagagctggattgccccccatcgtgcagctgaagccccatcctgatcctaaccctgtt

SEQ ID NO: 137834 - DNA, 120 bp, Artificial Sequence
  ENSG00000103510_30 (sequence is synthesized)
caagtcagataggttagctattggtgtggttattattgccatccaggaatgaggtctggtagacggcagggaagccttgtgggtcctgacgggagggacagcctggtcaccacttctgtt

SEQ ID NO: 137835 - DNA, 120 bp, Artificial Sequence
  ENSG00000103510_31 (sequence is synthesized)
gcatgagccaccatgcctgtcggatgtttcttgatttgtaacctctgagagacccatccgcaggccctgagcattccactcctctcagaattgtttccaagcccaataaccacattataa

SEQ ID NO: 137836 - DNA, 120 bp, Artificial Sequence
  ENSG00000103510_32 (sequence is synthesized)
atcaaacaagattcagagaatagccaaagggaatgtttactgagtacctacccggtctggcactttgcaatacacttgtatattgctaagacggatagttcaaccgttacatagttatat

SEQ ID NO: 137837 - DNA, 120 bp, Artificial Sequence
  ENSG00000103510_33 (sequence is synthesized)
gattgatagttatacatgcttaactgctggggattggttccaggaccgcctgtgaataccgaaatctgcaggcgctcaagtcctacagttggccctgccaaacagcagatatgaagtcag

SEQ ID NO: 137838 - DNA, 120 bp, Artificial Sequence
  ENSG00000103510_34 (sequence is synthesized)
ctcttcagatctgtgggttctgcatccttacaatatttcctttcctttccttttcttttcctcccttcctccctcttttttctttttcttttttgagatggagtcttgttgtgtcggcca

SEQ ID NO: 137839 - DNA, 89 bp, Artificial Sequence
  ENSG00000103510_35 (sequence is synthesized)
gccactgcgcccagcctccttttctttccccccagctggagtgcagtggagggattatagctcactcagcctcgacctcctgggtttaa

SEQ ID NO: 137840 - DNA, 89 bp, Artificial Sequence
  ENSG00000103510_36 (sequence is synthesized)
ttgagacagggtctctgtcacccaagctggagtgcagtggagggattatagctcactcagcctcgacctcctgggtttaagcgatccct

SEQ ID NO: 137841 - DNA, 120 bp, Artificial Sequence
  ENSG00000103510_37 (sequence is synthesized)
aggctggtcttgaactcctggcctgaagcgatcctcctgcttggattcctgaagtgcgagattacaggtgtgagccaccatacctcaacactgtattttcaacccgctcttcgttcaatc

SEQ ID NO: 137842 - DNA, 120 bp, Artificial Sequence
  ENSG00000103510_38 (sequence is synthesized)
attacaggtgtgagccaccatacctcaacactgtattttcaacccgctcttcgttcaatctccaaaggtaccagggcctttaaaaaggttcagctggccgggcacggtggctcacgccta

SEQ ID NO: 137843 - DNA, 120 bp, Artificial Sequence
  ENSG00000103510_39 (sequence is synthesized)
tccggggcacactgtccatcaaggacctcaggtgagggggcctcccgggccctgggggcaggacttgccctgagatgggccacgatcctgcttcctcataccctgtcaccatcctggcca

SEQ ID NO: 137844 - DNA, 120 bp, Artificial Sequence
  ENSG00000103512_0 (sequence is synthesized)
ggctctggcggcggcggtggggcggggcctgggctgtcagccggcctaggaggaggaaggagcctgcggcgtgcagtgtgaggggcgggacccggctgccggcggtgggtctagctgggg

SEQ ID NO: 137845 - DNA, 120 bp, Artificial Sequence; identical to SEQ ID NO: 135777
  ENSG00000103512_1 (sequence is synthesized)

SEQ ID NO: 137846 - DNA, 120 bp, Artificial Sequence
  ENSG00000103512_2 (sequence is synthesized)
tgggctgcggtggcttcgtcaagtcggacgtggagatcaactactctctcatcgagataaagctgtacaccaagcatgggactttgaaataccagacagactgtgcccctaataatggtt

SEQ ID NO: 137847 - DNA, 120 bp, Artificial Sequence
  ENSG00000103512_3 (sequence is synthesized)
actttatgatccctttgtatgataagggggatttcattctgaagattgagcctcccctagggtggagttttgagccgacgaccgtggagctccatgtggatggagtcagtgacatctgca

SEQ ID NO: 137848 - DNA, 120 bp, Artificial Sequence
  ENSG00000103512_4 (sequence is synthesized)
caaagggtggggacatcaactttgtcttcactgggttctctgtgaatggcaaggtcctcagcaaagggcagcccctgggtcctgcgggagttcaggtgtctctgagaaacactgggaccg

SEQ ID NO: 137849 - DNA, 120 bp, Artificial Sequence
  ENSG00000103512_5 (sequence is synthesized)
aagcaaagatccagtccacagttacacagcctggcggaaagtttgcattttttaaagttctgcctggagattatgaaatcctcgcaactcatccaacctgggcgttgaaagaggcaagca

SEQ ID NO: 137850 - DNA, 120 bp, Artificial Sequence
  ENSG00000103512_6 (sequence is synthesized)
ccacagtgcgtgtaaccaactccaatgccaatgcggccagtcccctcatagttgctggctacaatgtgtctggctctgtccgaagtgatggggagcccatgaaaggcgtgaagtttcttc

SEQ ID NO: 137851 - DNA, 120 bp, Artificial Sequence
  ENSG00000103512_7 (sequence is synthesized)
tcttttcttctttagtaactaaagaggatgtcctgggctgcaatgtctcaccagtgcctgggttccagccccaagacgagagtctggtgtatttgtgctacacggtctccagagaagatg

SEQ ID NO: 137852 - DNA, 120 bp, Artificial Sequence
  ENSG00000103512_8 (sequence is synthesized)
gctcgttctctttctattccttgccaagtgggggctacactgtgattccgttctatcgaggggagaggattacctttgatgtggcgccttccagacttgacttcacagtggagcatgaca

SEQ ID NO: 137853 - DNA, 120 bp, Artificial Sequence
  ENSG00000103512_9 (sequence is synthesized)
gcttgaaaatcgagcccgtgttccacgtcatgggattctccgtcaccgggagggtcttgaacggacccgaaggagatggtgttccagaagcagtagtcaccctgaataaccaaatcaaag

SEQ ID NO: 137854 - DNA, 120 bp, Artificial Sequence
  ENSG00000103512_10 (sequence is synthesized)
ttaaaacaaaagctgatggctcattccgccttgagaacataaccacagggacatacaccatccatgctcagaaagagcacctctactttgaaacggtcaccatcaaaattgcaccgaaca

SEQ ID NO: 137855 - DNA, 120 bp, Artificial Sequence
  ENSG00000103512_11 (sequence is synthesized)
cacctcagctggctgacattattgcaacagggttcagtgtctgtggtcagatatcaatcattcgcttccccgacaccgtcaagcagatgaataaatacaaagttgtcctgtcatctcaag

SEQ ID NO: 137856 - DNA, 120 bp, Artificial Sequence
  ENSG00000103512_12 (sequence is synthesized)
acaaggacaagtctttggtcaccgtggagacagatgctcatggatcattttgttttaaagcaaaaccagggacttacaaagtgcaggtgatggttcctgaggcagaaaccagagcagggc

SEQ ID NO: 137857 - DNA, 120 bp, Artificial Sequence
  ENSG00000103512_13 (sequence is synthesized)
tgacgttgaaaccccagacatttcctcttactgtgaccaacaggcccatgatggatgtggcctttgtacagttcttggcatcagtttctgggaaagtctcttgtttggacacctgtggtg

SEQ ID NO: 137858 - DNA, 120 bp, Artificial Sequence
  ENSG00000103512_14 (sequence is synthesized)
acttgctggtgactctacagtccctgagccgccagggtgagaagcggagcctccagctctccggcaaggtcaacgccatgactttcacctttgacaacgtgctccctggaaaatacaaaa

SEQ ID NO: 137859 - DNA, 120 bp, Artificial Sequence
  ENSG00000103512_15 (sequence is synthesized)
taagcatcatgcatgaggattggtgctggaagaacaagagcctggaggtggaagtgctggaggatgacatgtctgcagttgagttcaggcagacgggctacatgctgagatgttccctgt

SEQ ID NO: 137860 - DNA, 120 bp, Artificial Sequence
  ENSG00000103512_16 (sequence is synthesized)
ctcacgccatcactctggaattttatcaggatggaaatgggcgtgagaatgtggggatttataacctctccaaaggagtcaaccgattctgcctgtccaagcctggtgtgtacaaagtga

SEQ ID NO: 137861 - DNA, 120 bp, Artificial Sequence; identical to SEQ ID NO: 135794
  ENSG00000103512_17 (sequence is synthesized)

SEQ ID NO: 137862 - DNA, 120 bp, Artificial Sequence
  ENSG00000103512_18 (sequence is synthesized)
cgaggcccgcaggcaggagagggagaaaaacggcaatgaggaaggcgaagaaagaatgaccaagcctcccgtgcaggagatggtagatgagttacaaggccccttctcgtatgatttctc

SEQ ID NO: 137863 - DNA, 120 bp, Artificial Sequence; identical to SEQ ID NO: 135796
  ENSG00000103512_19 (sequence is synthesized)

SEQ ID NO: 137864 - DNA, 120 bp, Artificial Sequence
  ENSG00000103512_20 (sequence is synthesized)
gatccatgggaaggcaggcctgtttttagaaggccagatccaccccgagttggaaggagtcgagattgtcatcagtgaaaagggggcaagttcaccgctgatcacagtctttactgatga

SEQ ID NO: 137865 - DNA, 120 bp, Artificial Sequence
  ENSG00000103512_21 (sequence is synthesized)
caaaggtgcctacagtgttggccccctgcacagtgacctggagtacacggtgacctcacagaaggagggctatgttctgactgcggtggaaggaaccatcggagacttcaaggcctatgc

SEQ ID NO: 137866 - DNA, 120 bp, Artificial Sequence
  ENSG00000103512_22 (sequence is synthesized)
cctggcaggcgtaagctttgagataaaagctgaggatgaccagcccctcccgggagtcctcttatccctgagcggtggcctgtttcgttccaacctcttgacccaggacaacggcattct

SEQ ID NO: 137867 - DNA, 120 bp, Artificial Sequence; identical to SEQ ID NO: 135800
  ENSG00000103512_23 (sequence is synthesized)

SEQ ID NO: 137868 - DNA, 120 bp, Artificial Sequence; identical to SEQ ID NO: 135801
  ENSG00000103512_24 (sequence is synthesized)

SEQ ID NO: 137869 - DNA, 120 bp, Artificial Sequence; identical to SEQ ID NO: 135802
  ENSG00000103512_25 (sequence is synthesized)

SEQ ID NO: 137870 - DNA, 120 bp, Artificial Sequence
  ENSG00000103512_26 (sequence is synthesized)
ggtgattgaggttgggaataatgacatcgatgatgtaaacatcatagttttccggcagattaatcaatttgatttaagtggaaatgtgatcacttcctctgaataccttcctacattatg

SEQ ID NO: 137871 - DNA, 120 bp, Artificial Sequence
  ENSG00000103512_27 (sequence is synthesized)
ggtcaagctttacaaaagcgaaaacctcgacaatccaatccagacagtttcccttggccagtccctgttcttccatttccccccactgctcagagacggcgagaactatgttgtgcttct

SEQ ID NO: 137872 - DNA, 120 bp, Artificial Sequence; identical to SEQ ID NO: 135805
  ENSG00000103512_28 (sequence is synthesized)

SEQ ID NO: 137873 - DNA, 120 bp, Artificial Sequence; identical to SEQ ID NO: 135806
  ENSG00000103512_29 (sequence is synthesized)

SEQ ID NO: 137874 - DNA, 120 bp, Artificial Sequence
  ENSG00000103512_30 (sequence is synthesized)
ccgcgcgctcggccaggcagcctctgacaatagcggcccagaagatgcaaagagacaagccaagaaacagaagacaaggcggacttgaggaggaaggggacagttgcagtctcacttggg

SEQ ID NO: 137875 - DNA, 120 bp, Artificial Sequence; identical to SEQ ID NO: 135808
  ENSG00000103512_31 (sequence is synthesized)

SEQ ID NO: 137876 - DNA, 120 bp, Artificial Sequence; identical to SEQ ID NO: 135809
  ENSG00000103512_32 (sequence is synthesized)

SEQ ID NO: 137877 - DNA, 120 bp, Artificial Sequence
  ENSG00000103512_33 (sequence is synthesized)
tcaaagaagtatttaagctgtgctgtggtgtgagaatgtcattcttgatcttcagccttcgtttgcaaggagagttccagttgacgtggtgtttggttccatggcggggtaccctaggga

SEQ ID NO: 137878 - DNA, 120 bp, Artificial Sequence
  ENSG00000103512_34 (sequence is synthesized)
ttcatctgttttcttcacttccctttgcatctgagatcctgctggaaaccacagcaacctgtatccactattaggaggtaaaaatcaataaaatggcccattcatttgtgttgtagctca

SEQ ID NO: 137879 - DNA, 120 bp, Artificial Sequence; identical to SEQ ID NO: 135815
  ENSG00000103512_35 (sequence is synthesized)

SEQ ID NO: 137880 - DNA, 120 bp, Artificial Sequence
  ENSG00000103512_36 (sequence is synthesized)
ctctcctggctccttaccacctgccgtgaagatgatctactctggcctttctctgtggaaaatggctgcaaaataatgaaacaggctgtcacggaattttctcctcctctttctccaggg

SEQ ID NO: 137881 - DNA, 120 bp, Artificial Sequence; identical to SEQ ID NO: 135817
  ENSG00000103512_37 (sequence is synthesized)

SEQ ID NO: 137882 - DNA, 120 bp, Artificial Sequence; identical to SEQ ID NO: 135818
  ENSG00000103512_38 (sequence is synthesized)

SEQ ID NO: 137883 - DNA, 120 bp, Artificial Sequence
  ENSG00000103512_39 (sequence is synthesized)
ctggcagctggtcggtgctcagcacacagagctgtgatgggtctcatgcaatgtgcatggtgcctggcagctggtcggtgctcagcacacagagctgtggctgcccctggtgccgttcca

SEQ ID NO: 137884 - DNA, 120 bp, Artificial Sequence
  ENSG00000103512_40 (sequence is synthesized)
gggatgctgtatttttaggatttgccagcttacgagcctctcaagcatcgtccctttgaagtcagccccgttgtggatcctcagttgtatcacgtacctccctcatcagaattggctcat

SEQ ID NO: 137885 - DNA, 120 bp, Artificial Sequence; identical to SEQ ID NO: 135821
  ENSG00000103512_41 (sequence is synthesized)

SEQ ID NO: 137886 - DNA, 120 bp, Artificial Sequence
  ENSG00000103512_42 (sequence is synthesized)
aaaacataaagttctttacatcacagccatacgttaggttttagttttcatttgctttgccagagctgtccttgtaaaaataacttcttcccatgtgtgcacagaactatgttgtgcttc

SEQ ID NO: 137887 - DNA, 120 bp, Artificial Sequence
  ENSG00000103512_43 (sequence is synthesized)
acacttctgtccccttctccttgtcagttcatgcctgtcacctctgtcaaacccagtcgaatgttctgtgactggtccctgctgtgctgcaaggattggttttatgccagaaatccttga

SEQ ID NO: 137888 - DNA, 120 bp, Artificial Sequence
  ENSG00000103512_44 (sequence is synthesized)
atctttcccgggaagactgtgccagtttttaactttgcaacttgaatgtcaagatttttgttccttttatctgtattaatgtgtcttagatttcagaaatacatatattgacatgaaact

SEQ ID NO: 137889 - DNA, 120 bp, Artificial Sequence
  ENSG00000103522_0 (sequence is synthesized)
actctgcacatgcggctgggtggcagccagcggcctcagacagacccactggcgtctctctgctgagtgaccgtaagctcggcgtctggccctctgcctgcctctccctgagtgtggctg

SEQ ID NO: 137890 - DNA, 120 bp, Artificial Sequence
  ENSG00000103522_1 (sequence is synthesized)
acagccacgcagctgtgtctgtctgtctgcggcccgtgcatccctgctgcggccgcctggtaccttccttgccgtctctttcctctgtctgctgctctgtgggacacctgcctggaggcc

SEQ ID NO: 137891 - DNA, 120 bp, Artificial Sequence
  ENSG00000103522_2 (sequence is synthesized)
cagctgcccgtcatcagagtgacaggtcttatgacagcctgattggtgactcgggctgggtgtggattctcaccccaggcctctgcctgctttctcagaccctcatctgtcacccccacg

SEQ ID NO: 137892 - DNA, 120 bp, Artificial Sequence
  ENSG00000103522_3 (sequence is synthesized)
ctgaacccagctgccacccccagaagcccatcagactgcccccagcacacggaatggatttctgagaaagaagccgaaacagaaggcccgtgggagtcagcatgccgcgtggctgggccg

SEQ ID NO: 137893 - DNA, 120 bp, Artificial Sequence
  ENSG00000103522_4 (sequence is synthesized)
cccccttgctcctgctgctgctccagggaggctggggctgccccgacctcgtctgctacaccgattacctccagacggtcatctgcatcctggaaatgtggaacctccaccccagcacgc

SEQ ID NO: 137894 - DNA, 120 bp, Artificial Sequence
  ENSG00000103522_5 (sequence is synthesized)
tcacccttacctggcaagaccagtatgaagagctgaaggacgaggccacctcctgcagcctccacaggtcggcccacaatgccacgcatgccacctacacctgccacatggatgtattcc

SEQ ID NO: 137895 - DNA, 120 bp, Artificial Sequence
  ENSG00000103522_6 (sequence is synthesized)
acttcatggccgacgacattttcagtgtcaacatcacagaccagtctggcaactactcccaggagtgtggcagctttctcctggctgagagcatcaagccggctccccctttcaacgtga

SEQ ID NO: 137896 - DNA, 120 bp, Artificial Sequence
  ENSG00000103522_7 (sequence is synthesized)
ctgtgaccttctcaggacagtataatatctcctggcgctcagattacgaagaccctgccttctacatgctgaagggcaagcttcagtatgagctgcagtacaggaaccggggagacccct

SEQ ID NO: 137897 - DNA, 120 bp, Artificial Sequence
  ENSG00000103522_8 (sequence is synthesized)
gggctgtgagtccgaggagaaagctgatctcagtggactcaagaagtgtctccctcctccccctggagttccgcaaagactcgagctatgagctgcaggtgcgggcagggcccatgcctg

SEQ ID NO: 137898 - DNA, 120 bp, Artificial Sequence
  ENSG00000103522_9 (sequence is synthesized)
gctcctcctaccaggggacctggagtgaatggagtgacccggtcatctttcagacccagtcagaggagttaaaggaaggctggaaccctcacctgctgcttctcctcctgcttgtcatag

SEQ ID NO: 137899 - DNA, 120 bp, Artificial Sequence
  ENSG00000103522_10 (sequence is synthesized)
tcttcattcctgccttctggagcctgaagacccatccattgtggaggctatggaagaagatatgggccgtccccagccctgagcggttcttcatgcccctgtacaagggctgcagcggag

SEQ ID NO: 137900 - DNA, 120 bp, Artificial Sequence
  ENSG00000103522_11 (sequence is synthesized)
acttcaagaaatgggtgggtgcacccttcactggctccagcctggagctgggaccctggagcccagaggtgccctccaccctggaggtgtacagctgccacccaccacggagcccggcca

SEQ ID NO: 137901 - DNA, 120 bp, Artificial Sequence
  ENSG00000103522_12 (sequence is synthesized)
agaggctgcagctcacggagctacaagaaccagcagagctggtggagtctgacggtgtgcccaagcccagcttctggccgacagcccagaactcggggggctcagcttacagtgaggaga

SEQ ID NO: 137902 - DNA, 120 bp, Artificial Sequence
  ENSG00000103522_13 (sequence is synthesized)
gggatcggccatacggcctggtgtccattgacacagtgactgtgctagatgcagaggggccatgcacctggccctgcagctgtgaggatgacggctacccagccctggacctggatgctg

SEQ ID NO: 137903 - DNA, 120 bp, Artificial Sequence
  ENSG00000103522_14 (sequence is synthesized)
gcctggagcccagcccaggcctagaggacccactcttggatgcagggaccacagtcctgtcctgtggctgtgtctcagctggcagccctgggctaggagggcccctgggaagcctcctgg

SEQ ID NO: 137904 - DNA, 120 bp, Artificial Sequence
  ENSG00000103522_15 (sequence is synthesized)
acagactaaagccaccccttgcagatggggaggactgggctgggggactgccctggggtggccggtcacctggaggggtctcagagagtgaggcgggctcacccctggccggcctggata

SEQ ID NO: 137905 - DNA, 120 bp, Artificial Sequence
  ENSG00000103522_16 (sequence is synthesized)
tggacacgtttgacagtggctttgtgggctctgactgcagcagccctgtggagtgtgacttcaccagccccggggacgaaggacccccccggagctacctccgccagtgggtggtcattc

SEQ ID NO: 137906 - DNA, 120 bp, Artificial Sequence
  ENSG00000103522_17 (sequence is synthesized)
ctccgccactttcgagccctggaccccaggccagctaatgaggctgactggatgtccagagctggccaggccactgggccctgagccagagacaaggtcacctgggctgtgatgtgaaga

SEQ ID NO: 137907 - DNA, 120 bp, Artificial Sequence
  ENSG00000103522_18 (sequence is synthesized)
cacctgcagcctttggtctcctggatgggcctttgagcctgatgtttacagtgtctgtgtgtgtgtgtgcatatgtgtgtgtgtgcatatgcatgtgtgtgtgtgtgtgtgtcttaggtg

SEQ ID NO: 137908 - DNA, 120 bp, Artificial Sequence
  ENSG00000103522_19 (sequence is synthesized)
cgcagtggcatgtccacgtgtgtgtgtgattgcacgtgcctgtgggcctgggataatgcccatggtactccatgcattcacctgccctgtgcatgtctggactcacggagctcacccatg

SEQ ID NO: 137909 - DNA, 120 bp, Artificial Sequence
  ENSG00000103522_20 (sequence is synthesized)
agatgacaacagccgtcctccctcctagggtcttgtgttgcaagttggtccacagcatctccggggctttgtgggatcagggcattgcctgtgactgaggcggagcccagccctccagcg

SEQ ID NO: 137910 - DNA, 120 bp, Artificial Sequence
  ENSG00000103522_21 (sequence is synthesized)
tctgcctccaggagctgcaagaagtccatattgttccttatcacctgccaacaggaagcgaaaggggatggagtgagcccatggtgacctcgggaatggcaattttttgggcggcccctg

SEQ ID NO: 137911 - DNA, 120 bp, Artificial Sequence
  ENSG00000103522_22 (sequence is synthesized)
gacgaaggtctgaatcccgactctgataccttctggctgtgctacctgagccaagtcgcctcccctctctgggctagagtttccttatccagacagtggggaaggcatgacacacctggg

SEQ ID NO: 137912 - DNA, 120 bp, Artificial Sequence
  ENSG00000103522_23 (sequence is synthesized)
ggaaattggcgatgtcacccgtgtacggtacgcagcccagagcagaccctcaataaacgtcagcttccttccttctgcggccagagccgaggcgggcgggggtgagaacatcaatcgtca

SEQ ID NO: 137913 - DNA, 120 bp, Artificial Sequence
  ENSG00000103522_24 (sequence is synthesized)
gcgacagcctgggcacccgcggggccgtcccgcctgcagagggccactcgggggggtttccaggcttaaaatcagtccgtttcgtctcttggaaacagctccccaccaaccaagatttct

SEQ ID NO: 137914 - DNA, 120 bp, Artificial Sequence
  ENSG00000103522_25 (sequence is synthesized)
ttttctaacttctgctactaagtttttaaaaattccctttatgcacccaagagatatttattaaacaccaattacgtagcaggccatggctcatgggacccaccccccgtggcactcatg

SEQ ID NO: 137915 - DNA, 120 bp, Artificial Sequence
  ENSG00000103522_26 (sequence is synthesized)
gagggggctgcaggttggaactatgcagtgtgctccggccacacatcctgctgggccccctaccctgccccaattcaatcctgccaataaatcctgtcttatttgttcatcctggagaat

SEQ ID NO: 137916 - DNA, 120 bp, Artificial Sequence
  ENSG00000103522_27 (sequence is synthesized)
gaattgaagggaggtcaagttgtttgtcaatgatttgtcagagaacctgttgaaatgtgaattaagaagctaagaaaatatttcttagcaacattttctttttcttttttttttttttct

SEQ ID NO: 137917 - DNA, 120 bp, Artificial Sequence
  ENSG00000103522_28 (sequence is synthesized)
taatttttgtatttttagtagagctggggccaccctggcccggccccgtcttcctccccaaaggtcagactgcaggctgcagggctgtgctggaggagccagctctagctcacccatgct

SEQ ID NO: 137918 - DNA, 120 bp, Artificial Sequence
  ENSG00000103522_29 (sequence is synthesized)
agccagctctagctcacccatgcttttgcaacagggtcgggttggaagtcagcacaggtcagtcctgcggaaggttccttcgtgactcatctgtgaagtggggtggttgggagaggtagc

SEQ ID NO: 137919 - DNA, 120 bp, Artificial Sequence
  ENSG00000103522_30 (sequence is synthesized)
tgagagaatgcatgagagtcctcggtgcctggcaggaggctggaaggttctagaacactgatggttataagagtgggactgtgagcctgggatcggggggtgtgagacttggatgggagc

SEQ ID NO: 137920 - DNA, 120 bp, Artificial Sequence
  ENSG00000103522_31 (sequence is synthesized)
acaagagtggaaacacagcttctgcacggagcaggcgcagccctcaacaccccgtgcacctgcaccctagggactcttgggtccagatgtgctgtggttttcacaccttcttgggggcaa

SEQ ID NO: 137921 - DNA, 120 bp, Artificial Sequence
  ENSG00000103522_32 (sequence is synthesized)
caggttccaggagccacctgtgggtgccacctgagccacaggctcccaggaaagcagcacagctctcctgcacccagagcttgctgggtggcggaggggaacacagatggttggggaagg

SEQ ID NO: 137922 - DNA, 120 bp, Artificial Sequence
  ENSG00000103522_33 (sequence is synthesized)
cctgaggccagattgggggactctggactggggcagatgaggctcctcagaatcccacctttgaagggaactcagcttataaacacagaggagcaaagttggagggccgggcgtagtggc

SEQ ID NO: 137923 - DNA, 70 bp, Artificial Sequence
  ENSG00000103522_34 (sequence is synthesized)
gccccatctctacaaaaattattattttttaaaaaaattagccaggtgtggtggtgcttgcctatagtcc

SEQ ID NO: 137924 - DNA, 79 bp, Artificial Sequence
  ENSG00000103522_35 (sequence is synthesized)
acatagcaaggccccatctctacaaaaattattattttttaaaaaaattagccaggtgtggtggtgcttggctggagcc

SEQ ID NO: 137925 - DNA, 120 bp, Artificial Sequence
  ENSG00000103522_36 (sequence is synthesized)
cactccagcctgggtcacagatcaagaccctgtctcttaaaaataaaagttggagacaagagctggctcacctgaaaggagggattagtaggtaggagggtggatggaggatggatggat

SEQ ID NO: 137926 - DNA, 120 bp, Artificial Sequence
  ENSG00000103522_37 (sequence is synthesized)
gtgtgggtggataggaagatggtattaagttggtgcaaaagtctttgatattactcttaatggctttaataaaaagcttgaaggaagaatgattggttggatagacagagataaatgcat

SEQ ID NO: 137927 - DNA, 120 bp, Artificial Sequence
  ENSG00000103522_38 (sequence is synthesized)
actggaaacaaagataaagataaaacacaagttataccaggccagcaactctattttgttcactgcctttagtcccagcctggcacatagtaggcactcaataaagcctgatttgtagca

SEQ ID NO: 137928 - DNA, 120 bp, Artificial Sequence
  ENSG00000103522_39 (sequence is synthesized)
cctcaggcaaaccactagaggcagctcagatagaggagctctttgggaagagacgccgggcaggcagaagcagcaggtaccccctccacatccctagggctctgtgatgtaggcagaggc

SEQ ID NO: 137929 - DNA, 120 bp, Artificial Sequence
  ENSG00000103522_40 (sequence is synthesized)
tccctcggtgactcaactgggacgtagcaggtcgggcagtcaagccaggtgaccccatgagctgtcgctgcatctttctcatgaagcacggggaacgggtcggatggcccgtgggagtca

SEQ ID NO: 137930 - DNA, 120 bp, Artificial Sequence
  ENSG00000103522_41 (sequence is synthesized)
ttatttcgtcacagtccctaaacctgcttcactcctctctgtgacctgcccgcccctgagtttgcaatcctgatcaggtctaaatctcccaggtcccagatgaataaactgaagcccaga

SEQ ID NO: 137931 - DNA, 120 bp, Artificial Sequence
  ENSG00000103522_42 (sequence is synthesized)
gttgggagtactttgcccaaagtcactcagggttgttggtcttcatctcatccatgatgggtcaggcatggaggcaggggtgggggcaggcaggacttcctcccatcaccaaatcctttt

SEQ ID NO: 137932 - DNA, 120 bp, Artificial Sequence
  ENSG00000103528_0 (sequence is synthesized)
gtctccggccccgcctgcgctggggtcgctgcagtccccgcagctgccccgggctgcttgcccaggcgccccggccttattccagcctggggagcgcctcggtggggagcacgggacagc

SEQ ID NO: 137933 - DNA, 120 bp, Artificial Sequence
  ENSG00000103528_1 (sequence is synthesized)
gggagcacgggacagcgagggaggccgaggcgggggccctgggcgcccgatatctccgaaccggggaggcggccccgattccgagagccggaacgcagggaaaggcaaggacggggcggc

SEQ ID NO: 137934 - DNA, 120 bp, Artificial Sequence
  ENSG00000103528_2 (sequence is synthesized)
cggcggaggggcgggcgccgctcatcagccacgccagtcacgtctggggccaccggctgcctttttcttcctttccccctttgctttcttccccctccgctgttggcgagggcaaagtgg

SEQ ID NO: 137935 - DNA, 120 bp, Artificial Sequence
  ENSG00000103528_3 (sequence is synthesized)
ccgtggcggcgccatgcccgggccggagtgagtgcgcgcgggcgaaaatggcgtacatccagttggaaccattaaacgagggttttctttctagaatctctggtctgctgctgtgcagat

SEQ ID NO: 137936 - DNA, 120 bp, Artificial Sequence
  ENSG00000103528_4 (sequence is synthesized)
ggacctgccggcactgctgtcagaagtgctacgagtccagctgttgccagtcaagtgaggatgaagttgaaattctgggacctttccctgctcagacccctccctggctgatggccagcc

SEQ ID NO: 137937 - DNA, 120 bp, Artificial Sequence
  ENSG00000103528_5 (sequence is synthesized)
ggagcagtgacaaggatggtgactctgtccacacggccagcgaagtcccgctgaccccacggaccaattccccggatggaagacgctcgtcctcagacacatccaagtctacatacagcc

SEQ ID NO: 137938 - DNA, 120 bp, Artificial Sequence
  ENSG00000103528_6 (sequence is synthesized)
tgacgcggaggatttcgagtcttgagtcaagacgtcccagctctccactcatcgatattaaacccatcgagtttggcgttctcagcgccaagaaggagcccatccaaccttcggtgctca

SEQ ID NO: 137939 - DNA, 120 bp, Artificial Sequence
  ENSG00000103528_7 (sequence is synthesized)
gacggacctataaccccgacgactatttcaggaagttcgaaccccacctgtactccctcgactccaacagcgacgatgtggactctctgacagacgaggagatcctgtccaagtaccagc

SEQ ID NO: 137940 - DNA, 120 bp, Artificial Sequence
  ENSG00000103528_8 (sequence is synthesized)
tgggcatgctgcacttcagcactcagtacgacctgctgcacaaccacctcaccgtgcgcgtgatcgaggccagggacctgccacctcccatctcccacgatggctcgcgccaggacatgg

SEQ ID NO: 137941 - DNA, 120 bp, Artificial Sequence
  ENSG00000103528_9 (sequence is synthesized)
cgcactccaacccctacgtcaagatctgtctcctgccagaccagaagaactcaaagcagaccggggtcaaacgcaagacccagaagcccgtgtttgaggagcgctacaccttcgagatcc

SEQ ID NO: 137942 - DNA, 120 bp, Artificial Sequence
  ENSG00000103528_10 (sequence is synthesized)
ccttcctggaggcccagaggaggaccctgctcctgaccgtggtggattttgataagttctcccgccactgtgtcattgggaaagtttctgtgcctttgtgtgaagttgacctggtcaagg

SEQ ID NO: 137943 - DNA, 120 bp, Artificial Sequence
  ENSG00000103528_11 (sequence is synthesized)
gcgggcactggtggaaggcgctgattcccagttctcagaatgaagtggagctgggggagctgcttctgtcactgaattatctcccaagtgctggcagactgaatgttgatgtcattcgag

SEQ ID NO: 137944 - DNA, 120 bp, Artificial Sequence
  ENSG00000103528_12 (sequence is synthesized)
caagaagacgtccttcttaaggggcacaattgatcctttctacaatgaatccttcagcttcaaagttccccaagaagaactggaaaatgccagcctagtgtttacagttttcggccacaa

SEQ ID NO: 137945 - DNA, 120 bp, Artificial Sequence
  ENSG00000103528_13 (sequence is synthesized)
catgaagagcagcaatgacttcatcgggaggatcgtcattggccagtactcttcaggcccctctgagaccaaccactggaggcgcatgctcaacacgcaccgcacagccgtggagcagtg

SEQ ID NO: 137946 - DNA, 120 bp, Artificial Sequence
  ENSG00000103528_14 (sequence is synthesized)
gcatagcctgaggtcccgagctgagtgtgaccgcgtgtctcctgcctccctggaggtgacctgagggctgcagggaaggcagctttcatttgtttaaaaaaaaaaaaaaaagacggaaaa

SEQ ID NO: 137947 - DNA, 120 bp, Artificial Sequence
  ENSG00000103528_15 (sequence is synthesized)
aaatgtgtcacatactattacatccacacctgcatacacactcgcaacatgtctacacacgtccacacacacagacacacagataccccaaatcctctcagaactgagaggaagctgact

SEQ ID NO: 137948 - DNA, 120 bp, Artificial Sequence
  ENSG00000103528_16 (sequence is synthesized)
attgatcacaaaatggccgccctcagttgagtgaggcctaggaactttccggaagccccatccatagatcacaagctcagtgggctctgccgtgggacttattggcagtgcctgctcttg

SEQ ID NO: 137949 - DNA, 120 bp, Artificial Sequence
  ENSG00000103528_17 (sequence is synthesized)
tcaatactcctgccccaaaatgcactttcaaccctcaggccagagaaaggacctcccaaagggtgccaagctccatcaagactaaatttaccaagagtttggccagtgtgtgggagactt

SEQ ID NO: 137950 - DNA, 120 bp, Artificial Sequence
  ENSG00000103528_18 (sequence is synthesized)
gaacaccccccacttccgaaacacacacctactgggtaacttctgaacaggctgctgttccctggggttcttcaaacctgatacctttctccaaaggtgtaagtatctttgtcttctccg

SEQ ID NO: 137951 - DNA, 120 bp, Artificial Sequence
  ENSG00000103528_19 (sequence is synthesized)
tagtaaatgtgataactagattatgggccatttggagaaaccaaatggcaaccaaaactattccagtgtcagaagcctttcctggcttaacagaattgttcttgtgttagctcatcccag

SEQ ID NO: 137952 - DNA, 120 bp, Artificial Sequence
  ENSG00000103528_20 (sequence is synthesized)
ggaacgccctgtgggtatgtatgtgtatgtcctcgtgcatgtgccctcacaggcgaacacgtgtgtgcctatgtgtcctcttggagagcatggcgatgggccaggacctcagccctgagc

SEQ ID NO: 137953 - DNA, 120 bp, Artificial Sequence
  ENSG00000103528_21 (sequence is synthesized)
tcagccctgagcactgccttctctctgcctctcctgtccagtgagagtccaaccagtgtcctcctgtctgtcagagatcccactttggataaaagtagtgtgtgtgtgtgtgtgtgtgtg

SEQ ID NO: 137954 - DNA, 120 bp, Artificial Sequence
  ENSG00000103528_22 (sequence is synthesized)
taaagtaaataggatatgatagagcaaaagtaacattttttgaccgaatcatggtgattgtgacccacgaaagacatacaaagacttgatatatggattaaaatggctatcacaccccat

SEQ ID NO: 137955 - DNA, 120 bp, Artificial Sequence
  ENSG00000103528_23 (sequence is synthesized)
ccatgatgatcttcttccttaatcatactctgaggatctttctgtgtttttctgtgaacgaatgtcacgtctctcgtgctaaggaattagtgtagttagaatagatctctctctctctct

SEQ ID NO: 137956 - DNA, 120 bp, Artificial Sequence
  ENSG00000103528_24 (sequence is synthesized)
ctttctctctctctctttcctctctctctgttggatgcttctgtatctttttccacagcataatgtctggtgtgatggggagctatttattgaaattaaagattatttatttgtgccatg

SEQ ID NO: 137957 - DNA, 120 bp, Artificial Sequence
  ENSG00000103528_25 (sequence is synthesized)
gttagctaatcatgtccttttgggttggctacatggctatttctgtataggaaggtttgctcttctcctgaagtgtggctgcattggatagcatgactatctatccgcccgctctgattc

SEQ ID NO: 137958 - DNA, 120 bp, Artificial Sequence
  ENSG00000103528_26 (sequence is synthesized)
ataacagcatacggtgcaaatcaaatcgaaatgctaaagtttcccatttatttggtgttggttaaccaggaggctaccagcagccctgaaaatagcaacaccttgttaggatgttaggaa

SEQ ID NO: 137959 - DNA, 120 bp, Artificial Sequence
  ENSG00000103528_27 (sequence is synthesized)
ctctgcaagcctcaccgcaaccgtgctaggcgcgtcgggtggggcgggaataaagtttttccaacccagtttggggagagggctggatgggaaggaccctccctgctgcagacttcatgg

SEQ ID NO: 137960 - DNA, 120 bp, Artificial Sequence
  ENSG00000103528_28 (sequence is synthesized)
atcgggctcttacaagaaaggaaatgaggcctgtttatttgtgacatcgcttccacaagggacgaggtagaagtgggcctgtcacccagttccttctcctgtcttggcttcgattctgtg

SEQ ID NO: 137961 - DNA, 120 bp, Artificial Sequence
  ENSG00000103528_29 (sequence is synthesized)
ggggttggataggacagggggtggaacatcgtgctgacaacccctctcggcccgtggtgtggcagcagctcagcctctgtgttgggggctgcactgcttgatcttggatttgtttctggt

SEQ ID NO: 137962 - DNA, 120 bp, Artificial Sequence
  ENSG00000103528_30 (sequence is synthesized)
cagcctgcgaactgagtagtcacccagctcatggtatcagtccttggataccctcacctggaaatgaacatttccatggcataaagaagcaagtaaaggcaataaaagtagaatgattga

SEQ ID NO: 137963 - DNA, 120 bp, Artificial Sequence
  ENSG00000103528_31 (sequence is synthesized)
ctaaattggggaatatttcttcatatcatttcacattttgtgcaaaaagcaagacgttgttgagagtttaaggacaccacactgtcaaatttgcattattccatgttgcataaaatgagt

SEQ ID NO: 137964 - DNA, 120 bp, Artificial Sequence
  ENSG00000103528_32 (sequence is synthesized)
ggggctattgagtagtcgcccaacaaacacttgggcgaccgcctactaagtgctggcactggggatacagtgatgaaaacagcacagttcctgcccctctgggtgcgcaatttagtgaga

SEQ ID NO: 137965 - DNA, 120 bp, Artificial Sequence
  ENSG00000103528_33 (sequence is synthesized)
aatgaacatgattaccggctcctggagttcttaatggccgccttcagcacagagaaattaagtgacttgcccaaggccacatagctgcttaggggtcaaggtgggatctcaagaggggac

SEQ ID NO: 137966 - DNA, 120 bp, Artificial Sequence
  ENSG00000103528_34 (sequence is synthesized)
tgtggtagatatgttaagcatctcatatggcgatgacccagtgatgttggttttccttctagaacaaggtgttaaactttgttgtcctgtaaagtgccagatactattttttttctcttg

SEQ ID NO: 137967 - DNA, 120 bp, Artificial Sequence
  ENSG00000103528_35 (sequence is synthesized)
gaggctcacatggtctctgtcacaactattccactctgactatagcaccaaaactgctatggacagtagtaaatgagtgggcgtggctgtgttccaataaaactttatttgcaggcacca

SEQ ID NO: 137968 - DNA, 120 bp, Artificial Sequence
  ENSG00000103528_36 (sequence is synthesized)
aaatttgaattttgtatactttgcacgagtcaagaggcattcatcttttttttttttcaaccttttaaaaactcacaaattattcttagctcaagggctgtagcaaaacaggctgcgggg

SEQ ID NO: 137969 - DNA, 120 bp, Artificial Sequence
  ENSG00000103528_37 (sequence is synthesized)
ctggttttgatctgcgagccttagtttgccaacctctgtttagaatgcatgggttgtctttcttcctctttctttctggtgtgaattggttctcttccatcggtgtcaaacacgtgagcc

SEQ ID NO: 137970 - DNA, 120 bp, Artificial Sequence
  ENSG00000103528_38 (sequence is synthesized)
caggagacccaatgccagaaagactcagcatgcctgggaatgtcagggcaccctctttcatcttctttgctttctctctgctccttgacactcatcttgcacctgggctttgagaaagtt

SEQ ID NO: 137971 - DNA, 120 bp, Artificial Sequence
  ENSG00000103528_39 (sequence is synthesized)
ggggaggctgtttttcagcagggccatgaggtgaccttgtctctgttcactttggtttcataaatggcctcttttgaccaccacatgtctaggaaatgcttccctgtattcagaaaatgg

SEQ ID NO: 137972 - DNA, 120 bp, Artificial Sequence
  ENSG00000103528_40 (sequence is synthesized)
tcatagattattatgaaaaagtatcactttatcctaacattctaaagcactttttcatgcaagccctatgagggtataatattttgctgttttgtgccctgctgtacctgccgggacaat

SEQ ID NO: 137973 - DNA, 120 bp, Artificial Sequence
  ENSG00000103528_41 (sequence is synthesized)
acccagtgcctactgggttccactaggtcttgacaatcacctaattctcatcacagaaagggtgcattttatttttcagctggaccgcacgcaagtatttgcatagtcagtgtcctgtcc

SEQ ID NO: 137974 - DNA, 120 bp, Artificial Sequence
  ENSG00000103528_42 (sequence is synthesized)
cacctcaacagcacgcctttgaggtatagagtagcctttccactaaagaagaggtaaccgaggctcagagaggccccctgtcttgcccaagtcacatgatcagtcgatggtgagactagg

SEQ ID NO: 137975 - DNA, 120 bp, Artificial Sequence
  ENSG00000103528_43 (sequence is synthesized)
actctagtacttcctggctcagcttgttgcgtggcccctcagcacctttgggtcttgttctgtgtatggtttgagttttggctttagagagtttgtgataagtgcctttgactatttccc

SEQ ID NO: 137976 - DNA, 120 bp, Artificial Sequence
  ENSG00000103528_44 (sequence is synthesized)
gataagtgcctttgactatttcccaagctgttgctattcccttaccacttcgaggatttcaattttttcacaagccacgtaccacctatactatgatgatgatgatgatgatgatgatga

SEQ ID NO: 137977 - DNA, 120 bp, Artificial Sequence
  ENSG00000103528_45 (sequence is synthesized)
cccaaagtactgtgattataggcatcagccaccacgcccagccctacctatgctattattaacttaattttttttctataaatgggctcatttttatttttactttaaaaaaatcatatg

SEQ ID NO: 137978 - DNA, 120 bp, Artificial Sequence
  ENSG00000103528_46 (sequence is synthesized)
aaaaggaaacattatgtcactaatatcataggaaaccaagatcatgtgacatcgcagaaggcaactagaagaataaacccaatgggaataatgccacattactgaattctaggtggacgt

SEQ ID NO: 137979 - DNA, 120 bp, Artificial Sequence
  ENSG00000103528_47 (sequence is synthesized)
ggctgtctccaagcctctggacaagatctactttctttgtttaaaagaaaggggatgggggagggtggaaattggtaagtggtaaaagatgttaacatgtagtggtaccaaattgagact

SEQ ID NO: 137980 - DNA, 120 bp, Artificial Sequence
  ENSG00000103528_48 (sequence is synthesized)
ttctcctccttaaaggagaatcggaaaaaagataataactttctccctcttgattcaaagttctgagtttgagtcccacctcagttcacctctgggacatgcccgaggttgggatgcagt

SEQ ID NO: 137981 - DNA, 120 bp, Artificial Sequence
  ENSG00000103528_49 (sequence is synthesized)
acttctaacctatctagcctacttggcccatttggaaaaccaccttaaagagaaggagggagtctgtgccttgagaacccaggagacgaagatggggaggcggggtggggccacaacagg

SEQ ID NO: 137982 - DNA, 120 bp, Artificial Sequence
  ENSG00000103528_50 (sequence is synthesized)
aagggaggacctccttcctcaagaggaccagattagggcttcctttttagttccctctatttgtgggtggtgataggaaacaccccaccatcaccattggagcagaattggaaggtaggg

SEQ ID NO: 137983 - DNA, 120 bp, Artificial Sequence
  ENSG00000103528_51 (sequence is synthesized)
gtcagctcccttcccaggatggtaagtggaaatatgcagggcttttttttttttttgtaaaatttttttgagttgctggaatattgctaaactggtcttgtctctctttctttaacccct

SEQ ID NO: 137984 - DNA, 120 bp, Artificial Sequence
  ENSG00000103528_52 (sequence is synthesized)
tcgttcccttacgcccttggcttcatcgtggatcttaaaagggcagttggaaccattaaacgaggtgggttcatttgatgatttgtttggtctggtttctaatcaagaaatgcctgactt

SEQ ID NO: 137985 - DNA, 120 bp, Artificial Sequence
  ENSG00000103528_53 (sequence is synthesized)
tcattttggagtcttatgtggggctgtggggatattgaatattcaacaataacctggtgttaataacggcacagtttccattcctttctaccgaaaggagatcccggttttgaaaagaca

SEQ ID NO: 137986 - DNA, 120 bp, Artificial Sequence
  ENSG00000103528_54 (sequence is synthesized)
ccagttgacaagacaagtttccctctccacccctacttattccgtttgattatctctgtctgtttcatgtcaccgagattttttaaaaatattttttcccctgctttcaagaagacacag

SEQ ID NO: 137987 - DNA, 120 bp, Artificial Sequence
  ENSG00000103528_55 (sequence is synthesized)
taatattcattgtgtttcgaacatatcgtatagcccttatgatgttgtataaaccacccacatgtcaagaaagacgttcacataaactacaaaagaaaatacctgcaaatgttttgcttg

SEQ ID NO: 137988 - DNA, 120 bp, Artificial Sequence
  ENSG00000103528_56 (sequence is synthesized)
ctactaacggctccagcgagttgatgtttgctatctttgtgcctgcagttggtaaatagaaatggaaaacattttgttctaagtgctgagcagcagagccagaactcctgaatgtctatt

SEQ ID NO: 137989 - DNA, 120 bp, Artificial Sequence
  ENSG00000103528_57 (sequence is synthesized)
tctcatccgagatcggctgcttgtaattttgggtgttgtttctcctcttcctcttccccaccctgcccacctcccctctcccccatccccccgcccacctcccccaatggcctcagggtt

SEQ ID NO: 137990 - DNA, 120 bp, Artificial Sequence
  ENSG00000103534_0 (sequence is synthesized)
acagaattctctgcaggaaaacactccttctcctgagaaaactcctcaggggttagatgcagggagttatgttgtgatttgtgtaggggtggctttggtgagctcatcctggcattttaa

SEQ ID NO: 137991 - DNA, 120 bp, Artificial Sequence
  ENSG00000103534_1 (sequence is synthesized)
aaataatgtgaatggtgtatccctttgtgatcatcatcactttttccctgcgagtcccaatcaatgcgggtgtgactgctgtatgaagtctcaggaagcccaccccagtggagaagaagg

SEQ ID NO: 137992 - DNA, 120 bp, Artificial Sequence
  ENSG00000103534_2 (sequence is synthesized)
cttgcaggaggcaggagatgctgtccgatgaccacgtgaatgaaatcatcatacaggttgagaatgtttcctctggggtccaaagccacccatcctcaaatcagatttttcaagaaaagg

SEQ ID NO: 137993 - DNA, 120 bp, Artificial Sequence
  ENSG00000103534_3 (sequence is synthesized)
tgctgctagactcaagcatcaacatggttttgtcaatatctgacattgatgtgatagactctcagacagtcagcaaaaggaatgaccaaaagggtaaccaggtgctgcggttttcaacat

SEQ ID NO: 137994 - DNA, 120 bp, Artificial Sequence
  ENSG00000103534_4 (sequence is synthesized)
ctttgaatgagtcgatgtctcagacccttcatagcctagaatgcatgggcatagacactcctggttcttcacatgaaactgttcaaggacagaagttaatcgcatcccttatacccatga

SEQ ID NO: 137995 - DNA, 120 bp, Artificial Sequence
  ENSG00000103534_5 (sequence is synthesized)
catccagagacagaattaaagccatcaggaaccagccaaggaccatggaagagaaaaggaaccttaggaaaatagttgacaaagaaaaaagcaaacagacccatcgtatccttcagctca

SEQ ID NO: 137996 - DNA, 120 bp, Artificial Sequence
  ENSG00000103534_6 (sequence is synthesized)
attgctgtattcagtgtctgaactccatttcccgggcttatcggagatccaagaacagcctgtcggaaattctgaattccatcagcctgtggcagaagacgctgaagatcattggaggca

SEQ ID NO: 137997 - DNA, 120 bp, Artificial Sequence
  ENSG00000103534_7 (sequence is synthesized)
agtttggaaccagcgtcctctcctatttcaactttctgagatggcttttgaagttcaacattttctcattcatcctgaacttcagcttcatcataatccctcagtttaccgtggccaaaa

SEQ ID NO: 137998 - DNA, 120 bp, Artificial Sequence
  ENSG00000103534_8 (sequence is synthesized)
agaacaccctccagttcactgggctggagtttttcactggggtgggttattttagggacacagtgatgtactatggcttttacaccaattccaccatccagcacgggaacagcggggcat

SEQ ID NO: 137999 - DNA, 120 bp, Artificial Sequence
  ENSG00000103534_9 (sequence is synthesized)
cctacaacatgcagctggcctacatcttcacaatcggagcatgcttgaccacctgcttcttcagtttgctgttcagcatggccaagtatttccggaacaacttcattaatccccacattt

SEQ ID NO: 138000 - DNA, 120 bp, Artificial Sequence
  ENSG00000103534_10 (sequence is synthesized)
actccggagggatcaccaagctgatcttttgctgggacttcactgtcactcatgaaaaagctgtgaagctaaaacagaagaatcttagcactgagataagggagaacctgtcagagctcc

SEQ ID NO: 138001 - DNA, 120 bp, Artificial Sequence
  ENSG00000103534_11 (sequence is synthesized)
gtcaggagaattccaagttgacgttcaatcagctgctgacccgcttctctgcctacatggtagcctgggttgtctctacaggagtggccatagcctgctgtgcagccgtttattacctgg

SEQ ID NO: 138002 - DNA, 120 bp, Artificial Sequence
  ENSG00000103534_12 (sequence is synthesized)
ctgagtacaacttagagttcctgaagacacacagtaaccctggggcggtgctgttactgcctttcgttgtgtcctgcattaatctggccgtgccatgcatctactccatgttcaggcttg

SEQ ID NO: 138003 - DNA, 120 bp, Artificial Sequence
  ENSG00000103534_13 (sequence is synthesized)
tggagaggtacgagatgccacggcacgaagtctacgttctcctgatccgaaacatctttttgaaaatatcaatcattggcattctttgttactattggctcaacaccgtggccctgtctg

SEQ ID NO: 138004 - DNA, 120 bp, Artificial Sequence
  ENSG00000103534_14 (sequence is synthesized)
gtgaagagtgttgggaaaccctcattggccaggacatctaccggctccttctgatggattttgtgttctctttagtcaattccttcctgggggagtttctgaggagaatcattgggatgc

SEQ ID NO: 138005 - DNA, 120 bp, Artificial Sequence
  ENSG00000103534_15 (sequence is synthesized)
gcatcttcttctgccccctgctgccctttatccaaatgattatgcttttcatcatgttctactccaaaaatatcagcctgatgatgaatttccagcctccgagcaaagcctggcgggcct

SEQ ID NO: 138006 - DNA, 120 bp, Artificial Sequence
  ENSG00000103534_16 (sequence is synthesized)
cacagatgatgactttcttcatcttcttgctctttttcccatccttcaccggggtcttgtgcaccctggccatcaccatctggagattgaagccttcagctgactgtggcccttttcgag

SEQ ID NO: 138007 - DNA, 120 bp, Artificial Sequence
  ENSG00000103534_17 (sequence is synthesized)
gtctgcctctcttcattcactccatctacagctggatcgacaccctaagtacacggcctggctacctgtgggttgtttggatctatcggaacctcattggaagtgtgcacttctttttca

SEQ ID NO: 138008 - DNA, 120 bp, Artificial Sequence
  ENSG00000103534_18 (sequence is synthesized)
tcctcaccctcattgtgctaatcatcacctatctttactggcagatcacagagggaaggaagattatgataaggctgctccatgagcagatcattaatgagggcaaagataaaatgttcc

SEQ ID NO: 138009 - DNA, 120 bp, Artificial Sequence
  ENSG00000103534_19 (sequence is synthesized)
tgatagaaaaattgatcaagctgcaggatatggagaagaaagcaaaccccagctcacttgttctggaaaggagagaggtggagcaacaaggctttttgcatttgggggaacatgatggca

SEQ ID NO: 138010 - DNA, 120 bp, Artificial Sequence
  ENSG00000103534_20 (sequence is synthesized)
gtcttgacttgcgatctagaagatcagttcaagaaggtaatccaagggcctgatgactcttttggtaaccagacaccaatcaaataaggggaggagacgaaaatggaatgatttcttcca

SEQ ID NO: 138011 - DNA, 120 bp, Artificial Sequence
  ENSG00000103534_21 (sequence is synthesized)
tgccacctgtgcctttaggaactgcccagaagaaaatccaaggctttagccaggagcggaaactgactaccatgtaattatcaaagtaaaattgggcattccatgctatttttaatacct

SEQ ID NO: 138012 - DNA, 120 bp, Artificial Sequence
  ENSG00000103534_22 (sequence is synthesized)
ggattgctgatttttcaagacaaaatacttggggttttccaataaagattgttgtaatattgaaatgagcctacaaaaacctaggaagagataactagggaataatgtatattatcttca

SEQ ID NO: 138013 - DNA, 120 bp, Artificial Sequence
  ENSG00000103534_23 (sequence is synthesized)
agaagtgtgtgcaggaatgattggttcttagaaatctctcctgccagacttcccagacctggcaaaggtttagaaactgttgctaagaaaagtggtccatcctgaataaacatgtaatac

SEQ ID NO: 138014 - DNA, 120 bp, Artificial Sequence
  ENSG00000103534_24 (sequence is synthesized)
tccagcagggatatgaagcctctgaattgtagaacctgcatttatttgtgactttgaactaaagacatcccccatgtcccaaaggtggaatacaaccagaggtctcatctctgaactttc

SEQ ID NO: 138015 - DNA, 120 bp, Artificial Sequence
  ENSG00000103534_25 (sequence is synthesized)
ttgcgtactgattacatgagtctttggagtcggggatggaggaggttctgcccctgtgaggtgttatacatgaccatcaaagtcctacgtcaagctagctttgcagtggcagtaccgtag

SEQ ID NO: 138016 - DNA, 120 bp, Artificial Sequence
  ENSG00000103534_26 (sequence is synthesized)
ccaatgagatttatccgagacgcgattattgctaattggaaattttcccaataccccaccgtgatgacttgaaatataatcagcgctggcaatttttgacagtctctacggagactgaat

SEQ ID NO: 138017 - DNA, 78 bp, Artificial Sequence
  ENSG00000103534_27 (sequence is synthesized)
cagcgctggcaatttttgacagtctctacggagactgaataagaaaaaagaaaagaaaagaaattagctgggtgcgaa

SEQ ID NO: 138018 - DNA, 90 bp, Artificial Sequence
  ENSG00000103534_28 (sequence is synthesized)
gggaggcagaggttgcagtgaggcgagattgtaccactgcattccagcctgggcaacagtgagactctgcgtaaattaaaagtcttattc

SEQ ID NO: 138019 - DNA, 120 bp, Artificial Sequence
  ENSG00000103534_29 (sequence is synthesized)
cagggtcgacccgagggccagcgcaagcagcggcaacaggagcgccaggaggtgaggcgggttcgccaggagtggggccagcgcccgggctgccagcctagcaggggcgtcttggcggag

SEQ ID NO: 138020 - DNA, 120 bp, Artificial Sequence
  ENSG00000103534_30 (sequence is synthesized)
ccccctcgccggctcccagagaggctgggaagaactgggaggggtgtccccaatgcggggcgcccaagcgtggcagcacgggctgggagcggggagccagcggggtgcggcgccggagtg

SEQ ID NO: 138021 - DNA, 120 bp, Artificial Sequence
  ENSG00000103534_31 (sequence is synthesized)
cggggagaaccaccaggcgccggaattggggagcacgtggagggggcagcggctccagccccagaccgccgcgctctgtcactttgcattaagaaagcttccggggaatgcacacggcct

SEQ ID NO: 138022 - DNA, 120 bp, Artificial Sequence
  ENSG00000103534_32 (sequence is synthesized)
ggccgccgccttcgtgcagcccgccctgcaggtgcaggaagaaaagaataatcgcacccgtttctcaggtgcttacttcaccatgtccgatccggacatgaggctctgcctgcagtcagc

SEQ ID NO: 138023 - DNA, 120 bp, Artificial Sequence
  ENSG00000103534_33 (sequence is synthesized)
aacttggaatattcagacttcagaccagcatcacagattataaccctccgtaaatcatctgcatcccagctcccatcaaaagccagcctgaaggacccatggacacgtgactccagtgtt

SEQ ID NO: 138024 - DNA, 120 bp, Artificial Sequence
  ENSG00000103534_34 (sequence is synthesized)
ctcaacaacatcttaagatcaagttggtttgcacaacatttgcatctacttgggacaaagcaagaacaataagggcaaaaaagtgaaaaaaaaaaaagatccctgagtaattgcaaatgc

SEQ ID NO: 138025 - DNA, 120 bp, Artificial Sequence
  ENSG00000103534_35 (sequence is synthesized)
tgggacagtttaccactccagggtgaagagtccataccaacatgtctgcctactacaggaataactggtctgaggaagacccagattaccctgactattcagggtctcagaaccgtacgc

SEQ ID NO: 138026 - DNA, 120 bp, Artificial Sequence
  ENSG00000103534_36 (sequence is synthesized)
aggggtatttgaaaactcaaggttatccagatgttccaggtcctctgaacaatccagactaccccggcaccaggagcaatccatactctgtagcctccagaacacgtccagactatcctg

SEQ ID NO: 138027 - DNA, 120 bp, Artificial Sequence
  ENSG00000103534_37 (sequence is synthesized)
ggtctctggcagaaccaaattatcctagatctctgagtaatccagactattctggcaccagaagcaatgcatactctgcagcctctagaacaagcccagaccatcctacctctctaccag

SEQ ID NO: 138028 - DNA, 120 bp, Artificial Sequence
  ENSG00000103534_38 (sequence is synthesized)
agccagattatagtgaatttcagagtcatccctaccaccgagcatcatccagacaaccagactaccctggatctcaacgaaatcctgattttgcaggctccagcagcagtggaaactatg

SEQ ID NO: 138029 - DNA, 120 bp, Artificial Sequence
  ENSG00000103534_39 (sequence is synthesized)
caggctccagaacacatccagatcattttggctccttagaaccggactaccctggagctcagagcaactctgatcatcctggacccagagccaatttgaaccatccaggatccagaaaga

SEQ ID NO: 138030 - DNA, 120 bp, Artificial Sequence
  ENSG00000103534_40 (sequence is synthesized)
atctggaacatacaagttttagaatcaatccatacgcagactctctgggaaagcctgattatccaggcgctgacattcaacctaactctccacccttttttggggagccagactatccca

SEQ ID NO: 138031 - DNA, 120 bp, Artificial Sequence
  ENSG00000103534_41 (sequence is synthesized)
gtgctgaggacaatcagaacttgccaagcacttggagagaacctgattattcagatgctgagaatggtcatgattatggctcttctgagaccccaaagatgaccaggggggtgctcagca

SEQ ID NO: 138032 - DNA, 120 bp, Artificial Sequence
  ENSG00000103534_42 (sequence is synthesized)
gaacatcttcaatccagccctcatttcgtcacaggagtgatgaccccgtgggcagtctttggggagagaatgattaccctgaaggcattgaaatggcatccatggagatggcaaactcat

SEQ ID NO: 138033 - DNA, 120 bp, Artificial Sequence
  ENSG00000103534_43 (sequence is synthesized)
atggccactctctgccaggtgctcctggaagtggctatgtgaaccctgcttatgtaggtgaaagtggtcctgtccatgcttatggaaacccaccattgtctgaatgtgattggcacaagt

SEQ ID NO: 138034 - DNA, 120 bp, Artificial Sequence
  ENSG00000103534_44 (sequence is synthesized)
aggtaaggctgggtcatggaaagaaagaatgaatgcagactacgggcggtgaatagaggtctcggatgccagcaggcgtcccaacccagcaggaactggctcaattctcagaagaaagcg

SEQ ID NO: 138035 - DNA, 120 bp, Artificial Sequence
  ENSG00000103534_45 (sequence is synthesized)
atcggccccgaggcaggaaggccggctccggtgcagggagcgccgcctgcgggctgcttcgggccagggtcgacccgagggccagcgcaagcagcggcaacaggagcgccaggaggacat

SEQ ID NO: 138036 - DNA, 120 bp, Artificial Sequence
  ENSG00000103534_46 (sequence is synthesized)
cccccttcccgtgatcttcgtggcttcccgcccagacgtgtgaccaagatagcaaggagcagtctttaaggcgacacggcagagaggcagaaaaagatgggccttaccggttagttaaga

SEQ ID NO: 138037 - DNA, 120 bp, Artificial Sequence
  ENSG00000103534_47 (sequence is synthesized)
atcccttatacccatgacatccagagacagaattaaagccatcaggaaccagccaaggaccatggaagagaaaaggaaccttagcaggggaggcctcacaatcacgacagaggacgaagg

SEQ ID NO: 138038 - DNA, 120 bp, Artificial Sequence
  ENSG00000103534_48 (sequence is synthesized)
tgcctttcgttgtgtcctgcattaatctggccgtgccatgcatctactccatgttcaggcttgtggagaggtacgagatgccacggcacgaagtctacgttctcctgatccgcaggggat

SEQ ID NO: 138039 - DNA, 120 bp, Artificial Sequence
  ENSG00000103540_0 (sequence is synthesized)
acattaaaaataacatttttctctcttgtagtgtgactgtgggaagatggaggagtatgagaagttctgtgaaaaaagtcttgccagaatacaagaagcatcactatccacagagagctt

SEQ ID NO: 138040 - DNA, 120 bp, Artificial Sequence
  ENSG00000103540_1 (sequence is synthesized)
tctccctgctcagtctgaaagtatctcacttattcgctttcatggagtggctatcctttctccactgcttaacattgagaaaagaaaggaaatgcaacaagaaaagcagaaagcacttga

SEQ ID NO: 138041 - DNA, 120 bp, Artificial Sequence
  ENSG00000103540_2 (sequence is synthesized)
tgtagaagcaagaaagcaggttaacaggaagaaagctttactgactcgtgtccaggagattcttgacaatgttcaggttagaaaagcacctaatgccagtgattttgatcagtgggagat

SEQ ID NO: 138042 - DNA, 120 bp, Artificial Sequence
  ENSG00000103540_3 (sequence is synthesized)
ggaaacagtttactctaattcagaagtcagaaacttgaatgttcctgctacatttccaaatagctttccaagccatacggaacactctactgcagcaaagcttgataagatagctgggat

SEQ ID NO: 138043 - DNA, 120 bp, Artificial Sequence
  ENSG00000103540_4 (sequence is synthesized)
tttgccattggataatgaggaccaatgtaaaactgatggaatagacttagctagagattcagaaggatttaattctccgaagcaatgtgatagttccaatattagtcatgtagaaaatga

SEQ ID NO: 138044 - DNA, 120 bp, Artificial Sequence
  ENSG00000103540_5 (sequence is synthesized)
agcttttccaaagacctcttcagcaaccccacaagaaactcttatttctgatggtcccttctcagtaaatgaacaacaggatctaccacttttggcagaagtcatcccagatccctatgt

SEQ ID NO: 138045 - DNA, 120 bp, Artificial Sequence
  ENSG00000103540_6 (sequence is synthesized)
aatgagtcttcagaatctgatgaaaaagtcaaaggaatatatagaaagagaacaatctagacgcagtctgagaggtagtatcaacagaattgttaatgagagtcatttagacaaagaaca

SEQ ID NO: 138046 - DNA, 120 bp, Artificial Sequence
  ENSG00000103540_7 (sequence is synthesized)
tgatgctgttgaagtggctgactgtgtaaaagagaaaggccagttgacaggcaaacactgtgtctcagttattcctgacaaaccaagccttaataaatcaaatgttcttctccaaggtgc

SEQ ID NO: 138047 - DNA, 120 bp, Artificial Sequence
  ENSG00000103540_8 (sequence is synthesized)
ttccactcaagcaagcagcatgagtatgccagttttagctagcttttcgaaagtggacatacctatacgaactggccatcccactgttctagagtctaattctgattttaaagttattcc

SEQ ID NO: 138048 - DNA, 120 bp, Artificial Sequence
  ENSG00000103540_9 (sequence is synthesized)
cacttttgttaccgaaaataatgttatcaaaagtcttacaggttcatatgccaaattacctagtccagagccaagtatgagtcctaaaatgcaccgaagacgttccaggacatcatcagc

SEQ ID NO: 138049 - DNA, 120 bp, Artificial Sequence
  ENSG00000103540_10 (sequence is synthesized)
gtgtcatatacttataaataacccaataaatgcctgtgaattaagccctaaaggaaaagaacaggcaatggacttaattattcaagatactgatgaaaacacaaatgtgcccgaaattat

SEQ ID NO: 138050 - DNA, 120 bp, Artificial Sequence
  ENSG00000103540_11 (sequence is synthesized)
gccaaagttaccaactgatttagcgggagtttgttcaagcaaggtttatgtgggcaaaaatacatctgaagtcaaagaagatgtggttttaggtaaatcaaatcaggtatgtcaatcttc

SEQ ID NO: 138051 - DNA, 120 bp, Artificial Sequence
  ENSG00000103540_12 (sequence is synthesized)
aggaaatcatttagaaaataaagttactcatggacttgttactgtggaaggtcagttaacatccgatgagagaggcgcacacataatgaacagtacctgtgctgcgatgccaaagctgca

SEQ ID NO: 138052 - DNA, 120 bp, Artificial Sequence
  ENSG00000103540_13 (sequence is synthesized)
tgaaccatatgccagcagtcagtgtatagcaagtccaaactttggaactgtgagtggactcaagccagccagtatgttagagaaaaactgcagtttgcaaacagaactgaataagtctta

SEQ ID NO: 138053 - DNA, 120 bp, Artificial Sequence
  ENSG00000103540_14 (sequence is synthesized)
tgatgtaaaaaacccttctcctttattgatgcaaaaccagaatacgagacagcagatggacacacctatggtgtcctgtggaaatgaacaatttttggataacagttttgagaaagttaa

SEQ ID NO: 138054 - DNA, 120 bp, Artificial Sequence
  ENSG00000103540_15 (sequence is synthesized)
acggagacttgatttagatattgatggtttgcaaaaagaaaactgcccttatgtcataacaagtggaataactgaacaagaaaggcaacatttgccagaaaaaagataccctaagggatc

SEQ ID NO: 138055 - DNA, 120 bp, Artificial Sequence
  ENSG00000103540_16 (sequence is synthesized)
tggcttcgttaacaagaataaaatgttaggaactagttccaaagaaagcgaggagttactaaaaagcaagatgttagcttttgaagaaatgcggaagagactagaagaacagcacgccca

SEQ ID NO: 138056 - DNA, 120 bp, Artificial Sequence
  ENSG00000103540_17 (sequence is synthesized)
gcaattatcactactcatagctgagcaggaaagggaacaagaaagactgcaaaaggaaatagaagagcaggagaaaatgttaaaagagaagaaggcaatgacagcggaagcctctgagtt

SEQ ID NO: 138057 - DNA, 120 bp, Artificial Sequence
  ENSG00000103540_18 (sequence is synthesized)
ggacattaacaatgcagtggaattagaatggagaaaaataagtgactctagtttgctggaaacaatgctgtctcaagcggactcactccatacttcaaattcaaatagttctggtttcac

SEQ ID NO: 138058 - DNA, 120 bp, Artificial Sequence
  ENSG00000103540_19 (sequence is synthesized)
aaattctgccatgcaatatagctttgtttctgcaaacgaagcaccattctacctctggggatcatcaactagtggcttgaccaaactctcagtaacaaggccttttggaagagccaaaac

SEQ ID NO: 138059 - DNA, 120 bp, Artificial Sequence
  ENSG00000103540_20 (sequence is synthesized)
tagatggtctcaagtttttagtctggaaatacaagcaaaatttaacaaaataactgcagtggcaaaaggatttcttactcgtagacttatgcagacagataagctgaagcaacttcgaca

SEQ ID NO: 138060 - DNA, 120 bp, Artificial Sequence
  ENSG00000103540_21 (sequence is synthesized)
gttgcgagctgccttgtacggtattcatgacatattctttgtaatggatgcagctgaaagaatgtctattctacatcatgatcgagaagttcgcaaagagaaaatgctcaggcaaatgga

SEQ ID NO: 138061 - DNA, 120 bp, Artificial Sequence
  ENSG00000103540_22 (sequence is synthesized)
taaaatgaaaagtccacgagtggctctttcagctgcaacacagaagtctcttgataggaagaaatacatgaaagctgctgaaatgggaatgccaaataagaaatttctggttaaacaaaa

SEQ ID NO: 138062 - DNA, 120 bp, Artificial Sequence
  ENSG00000103540_23 (sequence is synthesized)
tccttctgaaacaagagtccttcagccaaaccaaggacagaatgcacctgttcataggctacttagtagacaagggagtatatgcaggaaaaatccaaagaaagcggccaaatgttgcga

SEQ ID NO: 138063 - DNA, 120 bp, Artificial Sequence
  ENSG00000103540_24 (sequence is synthesized)
caatttaagaagacaacattcattaggataaaatggggggaaggattattattcatgttattttccctgcccaagactttatttaaccctggactccgtttacacagacaaagtgacatc

SEQ ID NO: 138064 - DNA, 120 bp, Artificial Sequence
  ENSG00000103540_25 (sequence is synthesized)
agaaggctgagcacttatctggatcatttggtcagtttggtaattcctgctccacacccctattttcctcttaataatacgtttgggtgaagacaaattagtgtttagtaattgcatcat

SEQ ID NO: 138065 - DNA, 120 bp, Artificial Sequence
  ENSG00000103540_26 (sequence is synthesized)
ctctgtgcttacctatacaaacataagtttattttatatgcccagatgtctacagagaccctttttgtaaatgtcaaggacatttggatttacttttacagaatattgaaaagataagac

SEQ ID NO: 138066 - DNA, 120 bp, Artificial Sequence
  ENSG00000103540_27 (sequence is synthesized)
aaattataaataagttctaaaacataaatttaattcatctctgcatagtgatttttgaatttgattcaaagggaaattattgcagaagaatgcctttccctcattttataactttaaaaa

SEQ ID NO: 138067 - DNA, 120 bp, Artificial Sequence
  ENSG00000103540_28 (sequence is synthesized)
cttggattaaccactcaatgtccactttctttgacttacagtataaccatgtagccaattgtggcccactaaaatctacagaagttaatgtgggtcaccattttggtcagaagcatacat

SEQ ID NO: 138068 - DNA, 120 bp, Artificial Sequence
  ENSG00000103540_29 (sequence is synthesized)
tcctgtcagacaactagttgtctgacagaaatgttaggcttcatgtatgttaccccagtactgttagaaacatttgtactaggttataagatctttctgtgacaggtaacaaatttgggg

SEQ ID NO: 138069 - DNA, 120 bp, Artificial Sequence
  ENSG00000103540_30 (sequence is synthesized)
aagacagcacaatcttcttgaatgtagctcttgggaatgcattattacatccatttctgtaacataataatatgttgcatgcagttatattttctatttagtctgtatattttgttcttc

SEQ ID NO: 138070 - DNA, 120 bp, Artificial Sequence
  ENSG00000103540_31 (sequence is synthesized)
atagtctgttttttctagcatgcttgatttaggagagaataaagggctatataataataaatccagatttccggataagaatattgcctggttaaaattctgcattgcttaaagacaccc

SEQ ID NO: 138071 - DNA, 120 bp, Artificial Sequence
  ENSG00000103540_32 (sequence is synthesized)
acccatgtttaagatttttcatcactaacatatccattaaaagtatcaactggccaggcagggtggctcacgcctgtactcccagcattttgtgaggccaaggtgggtggatcacctgag

SEQ ID NO: 138072 - DNA, 77 bp, Artificial Sequence
  ENSG00000103540_33 (sequence is synthesized)
tgtgccattgcactccagtcgggttatcaaccaacaaatgttaccaagataacgtgacttcatgagggagaatgtca

SEQ ID NO: 138073 - DNA, 120 bp, Artificial Sequence
  ENSG00000103540_34 (sequence is synthesized)
atgttaccaagataacgtgacttcatgagggagaatgtcactattaatttatcataccatttccaaaaagggctttgtgcttttcacataaaattgagacagtgtatatttaatctaatt

SEQ ID NO: 138074 - DNA, 120 bp, Artificial Sequence
  ENSG00000103540_35 (sequence is synthesized)
taaattttaaagagatactggtattttgaaaatgcaacctatatatattcttaatatccttttaagaatatggagatgaagattgttttctccaattttctgtgccattttaaatttaac

SEQ ID NO: 138075 - DNA, 120 bp, Artificial Sequence
  ENSG00000103540_36 (sequence is synthesized)
tttgacatccagctatagacagaaataataagccaccctgggtgtaaacttgattttctttattgagatgtatcatgtattgaatgagtgaaccagaaaattagaagatggtcaaaaaaa

SEQ ID NO: 138076 - DNA, 120 bp, Artificial Sequence
  ENSG00000103540_37 (sequence is synthesized)
gtccaagttaccaattttttaaaatttataggcaaagtatcaaattgtcttcttaatatgataaactgtgctttatcattctgaaaactcaggatacagcttattcatagcattgtgggt

SEQ ID NO: 138077 - DNA, 120 bp, Artificial Sequence
  ENSG00000103540_38 (sequence is synthesized)
ctctccagtaagaaagatgctaaaagttttgtgcactttttgtgtgtgtaatgcaaattagttaaaacaaatagttttggagaaagttaaaactagctttagagtaaggatgagaaactt

SEQ ID NO: 138078 - DNA, 120 bp, Artificial Sequence
  ENSG00000103540_39 (sequence is synthesized)
gagtgtttttaatttaaagataaaagcctgtgttttacacattcttttttggtgttcatagcttcttctcatacaggtgccagacactgtttgtgcttttgatggatttttatttatata

SEQ ID NO: 138079 - DNA, 120 bp, Artificial Sequence
  ENSG00000103540_40 (sequence is synthesized)
ctttttttgcttatttttactttgagtggaatgttcattaatgtaaattgtatttatttttatacttttattttcactagttttgcttctaggcaaaaagcaaaataaacttttcatctt

SEQ ID NO: 138080 - DNA, 120 bp, Artificial Sequence
  ENSG00000103540_41 (sequence is synthesized)
aatgcacctcggggatggtagtgttctggtggcccaacggttttaacagcccgggaatcaaccaccggaagtgccggccctgagaggtggagtcggggtggcagcggcggcggttgccag

SEQ ID NO: 138081 - DNA, 120 bp, Artificial Sequence
  ENSG00000103540_42 (sequence is synthesized)
gagcccgcgttgcagcctgagatccgtaatatggcggggaggaggaggagaaggcggcggcggaccgagctgcgctctgtcagtaccatttgagccattcgcttcctgacaaggcccgtg

SEQ ID NO: 138082 - DNA, 120 bp, Artificial Sequence
  ENSG00000103540_43 (sequence is synthesized)
gcgaggggagaggagctgaaggggccgtgggggatcagtgcctgctgtgtgctgatactgttctgtgtaatggggattcagtgaacaagactgaaaaggtacctgtacttatggcgctta

SEQ ID NO: 138083 - DNA, 120 bp, Artificial Sequence
  ENSG00000103540_44 (sequence is synthesized)
agaggagctgaaggggccgtgggggatcagtttcatttgaaacctacggggaaccaagcactgtcgctgccctccaggaattcatactctactgctaaaaatcgtcatcatcattatcct

SEQ ID NO: 138084 - DNA, 120 bp, Artificial Sequence
  ENSG00000103540_45 (sequence is synthesized)
ttctttgctgataaaaacctaaggtttggactcttagtgagcaaaatacaagtatcatattaatatgctttagtcgatttgctctgatttgtggtaatatataggccatattattgcata

SEQ ID NO: 138085 - DNA, 120 bp, Artificial Sequence
  ENSG00000103540_46 (sequence is synthesized)
gttgacctttaccttacagtcatcatctttcatccgttgaaagaaaatgggaaaaaatggaatttaacctattaaattaatttttcatttaatttgtcaacagagtccttcagccaaacc

SEQ ID NO: 138086 - DNA, 120 bp, Artificial Sequence
  ENSG00000103540_47 (sequence is synthesized)
aaggacagaatgcacctgttcataggctacttagtagacaagggtaagaatgccacacacgggtattgaaaactacggaaaccaagattagatttgagagggaaaaataaatctagtgtt

SEQ ID NO: 138087 - DNA, 120 bp, Artificial Sequence
  ENSG00000103540_48 (sequence is synthesized)
ctttatgtaaaggataatggtttttcaatgggattttttttctttatagcattgggaaagatattttaaagttttgtcttcaaatgtaaccctcttggtgtactgttgtgtattctaatt

SEQ ID NO: 138088 - DNA, 120 bp, Artificial Sequence
  ENSG00000103540_49 (sequence is synthesized)
tatagtaaattcagcatcaccgaagtgattctccaacagagtatgactcgtgcttatagtctcctgctgaagccagagtttagctttccttactgtgcgcatgcatgagacttcagttct

SEQ ID NO: 138089 - DNA, 120 bp, Artificial Sequence
  ENSG00000103540_50 (sequence is synthesized)
tttcaagcttatttgtgctttggacagttgatgcaatgtgattgctttctttgaattttgaacatttagaccttaatgccagtgacttattaatttttttatattcaattagaaccccta

SEQ ID NO: 138090 - DNA, 120 bp, Artificial Sequence
  ENSG00000103540_51 (sequence is synthesized)
agacatcagtgaagggggttgtgcaaaatagacagaagccttcacagagcagagtgcctaacagagtgcctgtttcaggagtatatgcaggaaaaatccaaagaaagcggccaaatgttg

SEQ ID NO: 138091 - DNA, 120 bp, Artificial Sequence
  ENSG00000103540_52 (sequence is synthesized)
ttgccctacatgcattagctcattgaattcttacaacattcctttgagacggataccgtgatcatccctcttttacagaggacgaaacaggtgtggggatggtaactggcttgccaagaa

SEQ ID NO: 138092 - DNA, 120 bp, Artificial Sequence
  ENSG00000103540_53 (sequence is synthesized)
cttgcagctagtacgcatctgaataagaaatcttcccctttaccgcttttacaagaagtttgcgtctttggcggaactgatgggcaaagaaacactaggttctgcaaaaaaaaagcagga

SEQ ID NO: 138093 - DNA, 120 bp, Artificial Sequence
  ENSG00000103540_54 (sequence is synthesized)
tctgttctgtgttacttttaccactcttttcagtgacatgtctggcagagcacgggtaaggagcagataggaccatgagtctacggggtttgcaaagaggctcatttgcacaagggtcag

SEQ ID NO: 138094 - DNA, 120 bp, Artificial Sequence
  ENSG00000103540_55 (sequence is synthesized)
tggttctctgtggtataaatggagaagacggcatgtctgaacctgctgtagctgacaaattattactggaagtggaccagtgatgcctgatggcaagatatagagcagtagatttgtggc

SEQ ID NO: 138095 - DNA, 120 bp, Artificial Sequence
  ENSG00000103540_56 (sequence is synthesized)
tggggtagccttgtagtcagggctcccttaaaataaaaccttgctgacagtggtaattgtagtgtgaaaggcatagtgtcctcttgcttaatcatgggatacagactgctcacttcttaa

SEQ ID NO: 138096 - DNA, 120 bp, Artificial Sequence
  ENSG00000103540_57 (sequence is synthesized)
atggttacctttgcagtttaagaggtaccagtttctctgggactagagccatggtgaaatttccattctctaaattccactcttccttgctagcttcggtgtatagtccgccttcttttt

SEQ ID NO: 138097 - DNA, 120 bp, Artificial Sequence
  ENSG00000103540_58 (sequence is synthesized)
tttcagatagtggtaagtgctatgaaaattgggaaacagcagggtaatgtgatagtgatagaggcagagttcatttagatggggtcatcagggatgccttctctgaggaggggatatcca

SEQ ID NO: 138098 - DNA, 120 bp, Artificial Sequence
  ENSG00000103540_59 (sequence is synthesized)
agccgagactgaagaataagaaggatccagtcatgctctaaggatcatctagtaatttgtataatctccatattagcactcatatttgaatgagtaatgcgttgtcatatgctgtgttgt

SEQ ID NO: 138099 - DNA, 120 bp, Artificial Sequence
  ENSG00000103540_60 (sequence is synthesized)
gctgtaataataatatagtactatacatctgcaagatataggacatatatgtactatttaagggatgtgaataactttctgaaacaatgaggcatagctctatgatgttgaaagaaaaat

SEQ ID NO: 138100 - DNA, 120 bp, Artificial Sequence
  ENSG00000103540_61 (sequence is synthesized)
aaaactatggccataaaagtattatatttccttaataatttccctcacttctaaaattgaatttcatgctttgcttgagtatccatagaagatatattactttatttgtataatctattt

SEQ ID NO: 138101 - DNA, 120 bp, Artificial Sequence
  ENSG00000103540_62 (sequence is synthesized)
acattctgtgtattgctgaatgcatggcatgattaaaaaaataaaatatttgagcagaaatggggttaagaaataatgtgagttgaaacctagacctaaaaaaaggctatgccttaaggt

SEQ ID NO: 138102 - DNA, 120 bp, Artificial Sequence
  ENSG00000103540_63 (sequence is synthesized)
gttttattgtttttacttttgcttttttaaaataaataaaagcttgtaaaatagtctcactcacactgtagagaaccatttgtttgtcattagattcctactttgcatagattgaacaca

SEQ ID NO: 138103 - DNA, 120 bp, Artificial Sequence
  ENSG00000103540_64 (sequence is synthesized)
tgaatagtaggaagaagttttgttattgattaaactatttagaaaaaatagcattatatcttatttttttataacctgattataattttgactattttttttttcccatttctcattgca

SEQ ID NO: 138104 - DNA, 120 bp, Artificial Sequence
  ENSG00000103540_65 (sequence is synthesized)
cccatttctcattgcactataatttgtccctgatactttggtgtactgaatttttaagtactttgaggcctaccgaggacatatcctatttcatctttgcatatcccacatcatgaattg

SEQ ID NO: 138105 - DNA, 120 bp, Artificial Sequence
  ENSG00000103540_66 (sequence is synthesized)
aatttccctgccctctctttttttgttaagaagctaattattttaaaatgaagacataaaggaacatgattgtattctattttctgtttccatagttcatacccttgctggttatgattc

SEQ ID NO: 138106 - DNA, 120 bp, Artificial Sequence
  ENSG00000103540_67 (sequence is synthesized)
tgataatgtctttttattttcccttgcttatttaaaggaaacagtgccacacataatgctgtgcaaataagcaatcaacatttactgtttgctaaatgaatgaatatgatgcctaatccc

SEQ ID NO: 138107 - DNA, 120 bp, Artificial Sequence
  ENSG00000103540_68 (sequence is synthesized)
tcctggttaccttgtattttcataatcacaatttcccagaaactgtgaaattactgggattgttttaagtagtttggtgatggttccaattttcaacaataaaatataattaatatcaga

SEQ ID NO: 138108 - DNA, 120 bp, Artificial Sequence
  ENSG00000103540_69 (sequence is synthesized)
tttaccactcttttcagtgacatgtctggcagagcacggtgcctgctgtgtgctgatactgttctgtgtaatggggattcagtgaacaagactgaaaaggtacctgtacttatggcgctt

SEQ ID NO: 138109 - DNA, 120 bp, Artificial Sequence
  ENSG00000103540_70 (sequence is synthesized)
cttgataggaagaaatacatgaagtaagttttttgtatcatgtcatgttagttatcaaaccaattaattttagtcatctgttggtctatttgcatatttaaatttagaaataaagagtta

SEQ ID NO: 138110 - DNA, 120 bp, Artificial Sequence
  ENSG00000103540_71 (sequence is synthesized)
atttttctgcagttgagctgatagaaatcccctttatataaagaaatttattaaaatcaggtgctaaaatctcatttcatcttagatgaatttatttactaaatttgacaacattcaact

SEQ ID NO: 138111 - DNA, 120 bp, Artificial Sequence
  ENSG00000103540_72 (sequence is synthesized)
aaagacttaatgggaaaaatatcttaataacttttttaaaaaattcttctttcttgaatgcagtctttaatatgcttagtacaggtcttccagtagtacaccagcttctaaatgatgatt

SEQ ID NO: 138112 - DNA, 120 bp, Artificial Sequence
  ENSG00000103540_73 (sequence is synthesized)
tgtttctgtcatcctgtattacatttgtaagcatgttttcttcccttctctaaatacattatgtccttatttttatattgtgttagagctgctgaaatgggaatgccaaataagaaattt

SEQ ID NO: 138113 - DNA, 120 bp, Artificial Sequence
  ENSG00000103540_74 (sequence is synthesized)
aataagaaatttctggttaaacaaaatccttctgaaacaaggtgagaaaaatcacttagtcttaatgagaggctttttgttttttatagaaaaaaaaaattggctgggcacggtggctca

SEQ ID NO: 138114 - DNA, 120 bp, Artificial Sequence
  ENSG00000103540_75 (sequence is synthesized)
agaatacaagaagcatcactatccacagagagctttctccctgctcagtctgaaagtatctcacttattcgctttcatggagtggctatcctttctccactggttagaaaagcacctaat

SEQ ID NO: 138115 - DNA, 120 bp, Artificial Sequence
  ENSG00000103540_76 (sequence is synthesized)
atttaaatcccaaacttcatttttgttgactttgttctacttgacatcagtagagcacttcttgctgaattgggtcgggggtcgtcctcaggctcaagattcataccaatacctggccat

SEQ ID NO: 138116 - DNA, 120 bp, Artificial Sequence
  ENSG00000103540_77 (sequence is synthesized)
atacctagtcacatgtcagaccagatgtgcccggaccttttgtaggacatgctatctgtggtagaaattttgagcgtggtatgtcttgagttcagttagacagtccagaggatctttgat

SEQ ID NO: 138117 - DNA, 120 bp, Artificial Sequence
  ENSG00000103540_78 (sequence is synthesized)
tctttgatacttatttaaaaaccttagaaagctaatttaagctgggctgggagcagtggctcatgcttgttatcctagcagtctgggagggtgaggtgggtggatcacgaggtcaggagt

SEQ ID NO: 138118 - DNA, 65 bp, Artificial Sequence
  ENSG00000103540_79 (sequence is synthesized)
atcctgtctctattaaaaatacaaaaataaaagatacaaaaagccgggtatgatggcgcgtgcct

SEQ ID NO: 138119 - DNA, 120 bp, Artificial Sequence
  ENSG00000103540_80 (sequence is synthesized)
gttgcagtgagccgagactgcaccactgtactccatcctgggcgacagagcaagggtccgtctcaaaaaaaagctaacttaagctgggcacagtggcatgctcctatggtcccaggtact

SEQ ID NO: 138120 - DNA, 89 bp, Artificial Sequence
  ENSG00000103540_81 (sequence is synthesized)
catgctcctatggatagcttaagcccagaaattcaaaccagtatgggtaacatagtaagacccatctcaaaaaaataaataaataaaaa

SEQ ID NO: 138121 - DNA, 120 bp, Artificial Sequence
  ENSG00000103544_0 (sequence is synthesized)
atagaaactacggcactctggccgtggccgacgttgctcctccgaagcatggcgccggcgggagttgtaacccgggctgtccggagcggggagctgcccctcacaagcatggcgtcagct

SEQ ID NO: 138122 - DNA, 120 bp, Artificial Sequence
  ENSG00000103544_1 (sequence is synthesized)
gaaaatgaagcctgtgctgtgcggagcgtcgcctgcccctcacaagcatggcgtctgcagaaggtgctgtgcggccgctgcggggcggccagctgcccttcacaaacatggcggccgagg

SEQ ID NO: 138123 - DNA, 120 bp, Artificial Sequence
  ENSG00000103544_2 (sequence is synthesized)
ggtgcggggagtggcggggtaaggatgggaagccgagcagacggccccagaacaagcggtcatgtgactgggaagatggccgtctttccttggcactccaggaataggaactacaaagct

SEQ ID NO: 138124 - DNA, 120 bp, Artificial Sequence
  ENSG00000103544_3 (sequence is synthesized)
gaatttgcatcatgccgactggaggctgtaccattggagtttggggactatcaccctctgaaacccataactgtcacagagtcaaagacaaagaaagtgaaccggaaaggaagcacttct

SEQ ID NO: 138125 - DNA, 120 bp, Artificial Sequence
  ENSG00000103544_4 (sequence is synthesized)
tccacgtcctcctcctcctccagctccgtggtggacccgctgagcagcgtcctcgatgggactgaccccctctccatgtttgcagccactgctgaccccgcagccttggcagctgccatg

SEQ ID NO: 138126 - DNA, 120 bp, Artificial Sequence
  ENSG00000103544_5 (sequence is synthesized)
gacagctccagaaggaaacgtgatagagatgataactccgttgtaggatcggattttgagccttggaccaacaaacggggagaaatccttgcccggtacaccactaccgaaaagctgtct

SEQ ID NO: 138127 - DNA, 120 bp, Artificial Sequence
  ENSG00000103544_6 (sequence is synthesized)
attaatctgtttatgggatctgaaaaaggcaaagctgggactgccacattggcaatgtcagagaaggtgcggacccggctggaggagctggatgactttgaggagggttcccaaaaggag

SEQ ID NO: 138128 - DNA, 120 bp, Artificial Sequence
  ENSG00000103544_7 (sequence is synthesized)
ctgttgaacttgactcagcaggattacgtgaaccgcatagaggagctcaaccaatcgctgaaggatgcctgggcctcagaccagaaagtgaaggctctaaaaatagtcatccagtgttca

SEQ ID NO: 138129 - DNA, 120 bp, Artificial Sequence
  ENSG00000103544_8 (sequence is synthesized)
aagcttctttcagacaccagtgttattcagttctacccaagcaaatttgtccttatcaccgacatacttgatacatttggaaagctcgtgtacgagcgcatcttttccatgtgtgtggat

SEQ ID NO: 138130 - DNA, 120 bp, Artificial Sequence
  ENSG00000103544_9 (sequence is synthesized)
agccgcagcgtcttaccagatcacttttctccagagaatgcaaatgacacggccaaggaaacatgcctaaattggtttttcaagattgcctccatcagggaactcattccaagattttac

SEQ ID NO: 138131 - DNA, 120 bp, Artificial Sequence
  ENSG00000103544_10 (sequence is synthesized)
gtggaggcatccatcctgaaatgtaacaaattcctctccaaaacgggaatttcagagtgcctgccccggttgacatgcatgatcagagggatcggagacccactagtgtcggtgtatgcc

SEQ ID NO: 138132 - DNA, 120 bp, Artificial Sequence
  ENSG00000103544_11 (sequence is synthesized)
cgtgcctacctgtgccgggtgggaatggaagtggccccacatctcaaagaaaccctaaataagaacttttttgacttcctccttacgttcaaacagattcatggggatacggtccagaac

SEQ ID NO: 138133 - DNA, 120 bp, Artificial Sequence
  ENSG00000103544_12 (sequence is synthesized)
cagctggtggtccaaggagtggagctcccatcttacctccccttgtacccgcctgccatggactggatcttccagtgcatctcctaccatgcccccgaggctctgctgaccgagatgatg

SEQ ID NO: 138134 - DNA, 120 bp, Artificial Sequence
  ENSG00000103544_13 (sequence is synthesized)
gaaaggtgtaagaaactaggaaacaatgccttgctgttgaattctgtgatgtctgccttccgggctgagttcatcgccacaaggtctatggatttcattggcatgattaaagagtgtgat

SEQ ID NO: 138135 - DNA, 120 bp, Artificial Sequence
  ENSG00000103544_14 (sequence is synthesized)
gaatctggtttccccaagcatcttctttttcgatcactgggattaaacttggccttggctgatcctcctgagagtgaccgacttcagattctcaacgaagcttggaaagtcatcactaag

SEQ ID NO: 138136 - DNA, 120 bp, Artificial Sequence
  ENSG00000103544_15 (sequence is synthesized)
ctgaagaacccacaggactacattaattgtgccgaagtgtgggtggaatacacctgcaagcatttcacgaaacgagaggtgaataccgttttggcagatgtcatcaagcacatgactcca

SEQ ID NO: 138137 - DNA, 120 bp, Artificial Sequence
  ENSG00000103544_16 (sequence is synthesized)
attgcccacttccatgacttctcagttcttttctcagtggaaaaatttctgccgtttctggacatgttccaaaaagagagtgtgcgggtggaggtttgcaaatgcatcatggacgccttt

SEQ ID NO: 138138 - DNA, 120 bp, Artificial Sequence
  ENSG00000103544_17 (sequence is synthesized)
atcaagcatcaacaagagcccaccaaggacccggtcatcttgaatgcccttttgcatgtttgcaagaccatgcatgactctgtgaatgcactcactcttgaggatgagaaaagaatgctg

SEQ ID NO: 138139 - DNA, 120 bp, Artificial Sequence
  ENSG00000103544_18 (sequence is synthesized)
tcatatttgattaatggatttataaaaatggtttcctttggccgtgattttgaacaacagctgagtttttatgttgagtccaggtcgatgttttgcaatctggagcctgttcttgtgcag

SEQ ID NO: 138140 - DNA, 120 bp, Artificial Sequence
  ENSG00000103544_19 (sequence is synthesized)
ttgattcatagtgtgaaccggttggcaatggagacaagaaaagtaatgaaaggaaatcattccagaaagacagctgcatttgtccgggcctgtgttgcctactgcttcatcaccatcccc

SEQ ID NO: 138141 - DNA, 120 bp, Artificial Sequence
  ENSG00000103544_20 (sequence is synthesized)
tccctggcgggcatcttcacacgtctcaatctctacctgcattctggtcaggtggccttggccaaccagtgcctctcccaagctgatgcttttttcaaagccgctataagccttgttccg

SEQ ID NO: 138142 - DNA, 120 bp, Artificial Sequence
  ENSG00000103544_21 (sequence is synthesized)
gaagttccaaagatgattaatattgatgggaagatgcggccatcggaatcgttccttctggaattcctctgcaatttcttttctactttattaatagttccggatcatcctgaacatggg

SEQ ID NO: 138143 - DNA, 120 bp, Artificial Sequence
  ENSG00000103544_22 (sequence is synthesized)
gtcctgtttcttgttcgagagcttctcaacgtgatccaggactacacctgggaggacaacagcgatgagaaaatccgcatctacacctgcgtcctgcatctcctctccgccatgagccag

SEQ ID NO: 138144 - DNA, 120 bp, Artificial Sequence
  ENSG00000103544_23 (sequence is synthesized)
gagacgtacctttaccacatagacaaagtggactccaacgacagcctctacgggggagactccaagttcctggcagaaaacaacaagctgtgtgagacggtgatggctcagatcctagag

SEQ ID NO: 138145 - DNA, 120 bp, Artificial Sequence
  ENSG00000103544_24 (sequence is synthesized)
catctgaaaaccctggccaaggacgaggccctgaagcgccagagctcgttgggcctttccttctttaacagcatcttggcccatggggacctacgcaacaacaagctcaaccagctctcc

SEQ ID NO: 138146 - DNA, 120 bp, Artificial Sequence
  ENSG00000103544_25 (sequence is synthesized)
gtcaacctgtggcacctggcacagaggcacggctgtgcagacaccaggaccatggtgaaaacgctagaatacatcaagaagcaaagcaaacaaccagacatgactcatctgacggagctg

SEQ ID NO: 138147 - DNA, 120 bp, Artificial Sequence
  ENSG00000103544_26 (sequence is synthesized)
gccctcagactccctctgcaaacaaggacctgacccccgggcccatccccaggctcagggactctggtgccaaatccagaaagatctgctctgctgccctgaactcttacggcaatttag

SEQ ID NO: 138148 - DNA, 120 bp, Artificial Sequence
  ENSG00000103544_27 (sequence is synthesized)
gtttctcatttttcttttctttttacatatgtacaaattgttttaagctttggcctctatccaggttattctgacaatgaagaaatgggagttgtcagagcattaaaatgcaatcttcac

SEQ ID NO: 138149 - DNA, 120 bp, Artificial Sequence
  ENSG00000103544_28 (sequence is synthesized)
taagaagcagtctctgtgttgtctttgcacaagtggccttcggtctactcagcccgatctgatgggcctttttagcaagagagaaacaagaatgcaagtaacatctttcttctctggaag

SEQ ID NO: 138150 - DNA, 120 bp, Artificial Sequence
  ENSG00000103544_29 (sequence is synthesized)
gtgtttgttttttcatagtttagaaataaggactttaaaagtggactgcttttcaaagtgccactgttccagacccattccattccagactttgtaccttaaagttagagcacacccaaa

SEQ ID NO: 138151 - DNA, 120 bp, Artificial Sequence
  ENSG00000103544_30 (sequence is synthesized)
gtctggaactgtgttacctgaacccctatggaggatttataaaaggcagaaatagcactccattaactctttttcctatcaaaagcagctcttgattggacttagaatctgtgttggtgg

SEQ ID NO: 138152 - DNA, 120 bp, Artificial Sequence
  ENSG00000103544_31 (sequence is synthesized)
atcaaaggagaaagcgaggtcaaatttgagattctctgtggcttcagtatacagtaactgaataaatgtcctgaaggagcatttatgttcatgactgttcatttaattacttctgactgt

SEQ ID NO: 138153 - DNA, 120 bp, Artificial Sequence
  ENSG00000103544_32 (sequence is synthesized)
atgacggatttttggcatccttatctggactgcctttctttaggaataaacagatgatacagagcaaagtttgtaaatctcaaatgcagcggttaacctctttgaggctggcccactggg

SEQ ID NO: 138154 - DNA, 120 bp, Artificial Sequence
  ENSG00000103544_33 (sequence is synthesized)
ctcccaggggcagcttctaagtgggaaatgtttcgatggaattctggttacataaggaagttgctttgaaaatctgggatagttttctataatggaatcattcccttgtgtctttattca

SEQ ID NO: 138155 - DNA, 120 bp, Artificial Sequence
  ENSG00000103544_34 (sequence is synthesized)
cgttaatgggaccctttcataacagctatagcaatgttagtgctagccagcctttatagagggcttgccatggtggctggctctgtgctgagtgcttttctgagatagtctcattttgac

SEQ ID NO: 138156 - DNA, 120 bp, Artificial Sequence
  ENSG00000103544_35 (sequence is synthesized)
agctgtggaaggggaatgtggtagctccagaggccatgtacctaagtgaggccacacagctagaaagcagtttggtggctgggtgtgctcatatctgtaatcccagcactttgcaaggcc

SEQ ID NO: 138157 - DNA, 120 bp, Artificial Sequence
  ENSG00000103544_36 (sequence is synthesized)
aaggtgggaggatcacttgattttaggagtttgagacgagctttggcaacatagcaaaactccatctctacaaaaaaatagaaaaaattagccagacacggtgatatatgcctatagtcc

SEQ ID NO: 138158 - DNA, 88 bp, Artificial Sequence
  ENSG00000103544_37 (sequence is synthesized)
aggctgaggtgggaggaccacttgagccccagagttcaaggctacaatgagctgtgactgtactactgtctcattaaaaaagaaacaa

SEQ ID NO: 138159 - DNA, 120 bp, Artificial Sequence
  ENSG00000103544_38 (sequence is synthesized)
aaaaagaaacaaaaaggaagatggttggtgacttgatacaaacccatagaattgggctccagggccaacaagccttattgcgtcttcacttaaccttcatgtaccccttttgtgtttata

SEQ ID NO: 138160 - DNA, 120 bp, Artificial Sequence
  ENSG00000103544_39 (sequence is synthesized)
gtaccccttttgtgtttataataatccaataaagtctgtagagcaggtattttatggaaggaaaacaaaactcagatgcttaatttcttttataattttatttttcttttcttttttctt

SEQ ID NO: 138161 - DNA, 120 bp, Artificial Sequence
  ENSG00000103544_40 (sequence is synthesized)
tcaggaattgaagtgacatcagaatcatagcagacacatattttctttcttttccaagactgagaagcagttttagtagaacaccaattcaaactgtcatgaagactgtgataggccggg

SEQ ID NO: 138162 - DNA, 86 bp, Artificial Sequence
  ENSG00000103544_41 (sequence is synthesized)
agttcacttcaggccagcagttcaagaccagcctggctaacatggatatataggtgtatatcaccatgcctggctaattttttgta

SEQ ID NO: 138163 - DNA, 86 bp, Artificial Sequence
  ENSG00000103544_42 (sequence is synthesized)
tgtatttttttgtagagatggagtttcactatgttgcccaggcctgtcttttgtaatgtgcgtggtggtttgtgcctgtagtccca

SEQ ID NO: 138164 - DNA, 120 bp, Artificial Sequence
  ENSG00000103544_43 (sequence is synthesized)
cataactttgtgatcctgagtcatgtccatttgtcacaaaaactaagcatcccctgcagatggttaagtctctgctgcaaatgaaccatccattcaactaccagaatgggaggaaagtac

SEQ ID NO: 138165 - DNA, 120 bp, Artificial Sequence
  ENSG00000103544_44 (sequence is synthesized)
aaataacccaactgcagtcacctccctgagaagcagccttatatggagcacaaagaccttgctttgcaacagacgctgctcaggctggctggatatggcccacaggaatcttttaattgg

SEQ ID NO: 138166 - DNA, 120 bp, Artificial Sequence
  ENSG00000103544_45 (sequence is synthesized)
cctacatgtactttgaaaaaaaaggttcccaaaaggagctgttgaacttgactcagcaggattacgtgaaccgcatagaggagctcaaccaatcgctgaaggatgcctgggcctcagacc

SEQ ID NO: 138167 - DNA, 120 bp, Artificial Sequence
  ENSG00000103544_46 (sequence is synthesized)
ggggttacaggcctgaaccactgtgctcaaccaagagagattcctttaaggaggaaagaaaaaaaaagatgaataaatgatgagttttaaatttgtttctccgctaggaagcacattgga

SEQ ID NO: 138168 - DNA, 120 bp, Artificial Sequence
  ENSG00000103544_47 (sequence is synthesized)
cacatatgcatttatagagtcagacagatcatagagcacagatagcttcctgtaagaaccttcttaaatctgtctaggacagaccgggtcatgcagctcagacatcctgagctcagcaca

SEQ ID NO: 138169 - DNA, 120 bp, Artificial Sequence
  ENSG00000103544_48 (sequence is synthesized)
tgcgagtcactgcccttgacggcacggctgccacccgtctccttgaatgttcacacagggccctccttccccaccaccccgcaagtcattgagagaaggactttattagtggctaatttt

SEQ ID NO: 138170 - DNA, 120 bp, Artificial Sequence
  ENSG00000103544_49 (sequence is synthesized)
gcacctggcacagaggcacggctgtgcagacaccaggaccatgggtcttgatatgctgcctggaactgttactgccatctttgtactagccttgatgaagccaacactggagatgatgga

SEQ ID NO: 138171 - DNA, 120 bp, Artificial Sequence
  ENSG00000103544_50 (sequence is synthesized)
gagaatgcttccttggcgagctgttgaaccaggccctaatcaggccttcctgccacgtgagactgaactttctggccatcgaggcctgcctgggctgggatgtctgtaggaggcatgttc

SEQ ID NO: 138172 - DNA, 120 bp, Artificial Sequence
  ENSG00000103544_51 (sequence is synthesized)
aggccaaacgatcgtgaaaatgtcccagtcagaacctgtattttgggatgcaaaaagctaggtgagtggaaagaaggtggtcacagatggtcacatgcgacttgggccactggacctgga

SEQ ID NO: 138173 - DNA, 120 bp, Artificial Sequence
  ENSG00000103544_52 (sequence is synthesized)
gctctttgaggcttgctgtagagtccaggcttggaaacgctgtccccacagccgatgaggcaacttcccgtgtcatctccacacgttcatctcctcctggcattcaatatccacctacag

SEQ ID NO: 138174 - DNA, 120 bp, Artificial Sequence
  ENSG00000103544_53 (sequence is synthesized)
aagtcacctgggattctcttccttgtgataaaaaagaatctcatcagacacatccctggggctgggcacagtggctcacacctgtgatcccagctcttgggggctgaggcaggagcatga

SEQ ID NO: 138175 - DNA, 120 bp, Artificial Sequence
  ENSG00000103544_54 (sequence is synthesized)
gttgagtccaggagtttgggactagcctggacaatatagtgagaccccatctctacaaaaaattttaaacactagctggttgttgtggtgcacacccacagtcccagctacttgggaggc

SEQ ID NO: 138176 - DNA, 120 bp, Artificial Sequence
  ENSG00000103544_55 (sequence is synthesized)
ctccagcctgggtgacagagtgagagcctatctcaaaacacacacacacgtccctgggatctgccattgattcatttgcgggactaaccactcttcctaaaatgccttgttcagaatcca

SEQ ID NO: 138177 - DNA, 120 bp, Artificial Sequence
  ENSG00000103544_56 (sequence is synthesized)
ctaaaatgccttgttcagaatccagtcaaagcacaaaaatcctacctcagcacttagggccgaagggacaccagtggaaaaggcaggactggtttagaggcacatttcccagcagcagca

SEQ ID NO: 138178 - DNA, 120 bp, Artificial Sequence
  ENSG00000103544_57 (sequence is synthesized)
gctcagtcacatgtgtttggtaacaactcagacacctctctgcctacagctgctctatgacaggggaaaggaaaaggaaggaaaaggagtttgcgattctccgttcctcattcactccac

SEQ ID NO: 138179 - DNA, 120 bp, Artificial Sequence
  ENSG00000103544_58 (sequence is synthesized)
tttttatcagagatgcagacttgtcataaaactttttcctccatctaaagacatttcaatccccaacgaggattctggtggaaattccctaaaggggacattcagagtggcgaatagtga

SEQ ID NO: 138180 - DNA, 120 bp, Artificial Sequence
  ENSG00000103544_59 (sequence is synthesized)
acttagggcttcgggtacaaaagtacaacaccctgcacttagtggctgggtgaccccaggcaattttattactttatccctgaacctcagttgcctcatctataagatggggctaataat

SEQ ID NO: 138181 - DNA, 120 bp, Artificial Sequence
  ENSG00000103544_60 (sequence is synthesized)
agcacccatttcataattatgaagattaaatacattaaggaaaacactagtatgtccctagtacctgctaaacactcaacaaaagttaactgtacatactgatgtctcaaacagggacgg

SEQ ID NO: 138182 - DNA, 120 bp, Artificial Sequence
  ENSG00000103544_61 (sequence is synthesized)
aatgtttaacacagaaaacaggaggttttagcactcactcgttctcctggctcccgaaatatgagctgccctgccccagttcatccaagcccatcaatatagttgtcctcgtccttaatc

SEQ ID NO: 138183 - DNA, 120 bp, Artificial Sequence
  ENSG00000103544_62 (sequence is synthesized)
tccacaggtgttcaatgtgagccaactgtcagatggctttcatttgcacaactgaataaaccatttatgcctagtgttccattactggaacgctaagcttatgggagttatttatatctt

SEQ ID NO: 138184 - DNA, 120 bp, Artificial Sequence
  ENSG00000103544_63 (sequence is synthesized)
ctccagagtctactttggagttagtagtaatttctttttgttatgttgcttcaactcctgggctctgtaagtttcacttatttatttatttttctacttctcttaaaagctcacatataa

SEQ ID NO: 138185 - DNA, 120 bp, Artificial Sequence
  ENSG00000103544_64 (sequence is synthesized)
attcttattgaaagtttggtcccgttacggttgctagcctgaaaacacatacagggcaagccacattgtagaaacccttggactcttgctctttccagttttttgtcttttactttgaat

SEQ ID NO: 138186 - DNA, 120 bp, Artificial Sequence
  ENSG00000103544_65 (sequence is synthesized)
acgatgccatgtgtcaagcatttgtttccttgaggaacattcccaccttaattctctcaattaaaatgcttcatatttgtgttttctctgattccaagaacttgaaagaacagggtcaag

SEQ ID NO: 138187 - DNA, 120 bp, Artificial Sequence
  ENSG00000103544_66 (sequence is synthesized)
ctttgcagggcaaatgctactattgaagaacagataatttgacttatacataaattccatcttagttacctaaagttctttctttccccataaagcattgattagaaatgctcaaaaccc

SEQ ID NO: 138188 - DNA, 120 bp, Artificial Sequence
  ENSG00000103544_67 (sequence is synthesized)
ctgtttgctcctgaagagtgtgatactaacaccatctgtccttttcctcccaggaaagctcgtgtacgagcgcatcttttccatgtgtgtggatagccgcagcgtcttaccaggggaatt

SEQ ID NO: 138189 - DNA, 120 bp, Artificial Sequence
  ENSG00000103544_68 (sequence is synthesized)
atacatggcagagctggcactggaactcaggcatgacctaccccagagtcagcactgtccacagcatctctgcggggcacggcctgagccccagtgcaaggcagtaacctcccttttctg

SEQ ID NO: 138190 - DNA, 120 bp, Artificial Sequence
  ENSG00000103544_69 (sequence is synthesized)
catgtgcagctgcacaggttgtgcactgcacaactccaggaagcactcttcaccctaggttacagaactgatgataccccatgtgttgtgcagtacattaaccatggtgcaacccctgac

SEQ ID NO: 138191 - DNA, 120 bp, Artificial Sequence
  ENSG00000103544_70 (sequence is synthesized)
acatttatgatttgtacacactaaagattgagcaactttctttcgggattccttgaccgcattcgcttggtgtctttgggattaatgacgtgtccctaataaatgaatatttcagacata

SEQ ID NO: 138192 - DNA, 120 bp, Artificial Sequence
  ENSG00000103546_0 (sequence is synthesized)
gtcagaagtctccaactcttgagttccggcgtgccccaacctctgtttccaaatttttccagcggacgcgcgcccttttctgggaaccctgcgtccgctcagcgcgcgctcatcccagtg

SEQ ID NO: 138193 - DNA, 120 bp, Artificial Sequence
  ENSG00000103546_1 (sequence is synthesized)
tctaaggcgctcccgggtggtcttgggagttgcaagtagggaggaacggccgggtaaccacctcttttccctttatccaagcagagcctcggcgtgcccccaggaccggtaaagttcctc

SEQ ID NO: 138194 - DNA, 120 bp, Artificial Sequence
  ENSG00000103546_2 (sequence is synthesized)
tcgccagccgcatccatgcttctggcgcggatgaacccgcaggtgcagcccgagaacaacggggcggacacgggtccagagcagccccttcgggcgcgcaaaactgcggagctgctggtg

SEQ ID NO: 138195 - DNA, 120 bp, Artificial Sequence
  ENSG00000103546_3 (sequence is synthesized)
gtgaaggagcgcaacggcgtccagtgcctgctggcgccccgcgacggcgacgcgcagccccgggagacctggggcaagaagatcgacttcctgctgtccgtagtcggcttcgcagtggac

SEQ ID NO: 138196 - DNA, 120 bp, Artificial Sequence
  ENSG00000103546_4 (sequence is synthesized)
ctggccaacgtgtggcgcttcccctacctctgctacaagaacggcggcggtgccttcttgatcccgtacacactgttccttatcatcgcggggatgcccctgttctacatggagctggct

SEQ ID NO: 138197 - DNA, 120 bp, Artificial Sequence
  ENSG00000103546_5 (sequence is synthesized)
ctgggacagtacaaccgggagggggctgccaccgtttggaaaatctgcccattcttcaaaggcgttggctatgctgtcatcctgatcgccctgtacgttggcttctactacaacgtcatc

SEQ ID NO: 138198 - DNA, 120 bp, Artificial Sequence
  ENSG00000103546_6 (sequence is synthesized)
atcgcctggtcactctactacctcttctcctccttcaccctcaacctgccctggaccgactgtggccacacctggaacagccccaactgtaccgaccccaagctcctcaatggctccgtg

SEQ ID NO: 138199 - DNA, 120 bp, Artificial Sequence
  ENSG00000103546_7 (sequence is synthesized)
cttggcaaccacaccaagtactccaagtacaagttcacgccggcagccgagttttatgagcgtggtgtcctgcaccttcacgagagcagcgggattcatgacatcggcctgccccagtgg

SEQ ID NO: 138200 - DNA, 120 bp, Artificial Sequence
  ENSG00000103546_8 (sequence is synthesized)
cagctcttgctctgtctgatggtcgtcgtcatcgtcttgtattttagcctctggaaaggggtgaagacatcaggaaaggtggtgtggatcacagccacgctgccttacttcgtgctgttc

SEQ ID NO: 138201 - DNA, 120 bp, Artificial Sequence
  ENSG00000103546_9 (sequence is synthesized)
gtgctcctggtccatggcgtcacgctgcccggagcctccaatggcatcaatgcctacctgcacatcgacttctaccgcttgaaagaggccacggtatggattgatgccgcaactcagata

SEQ ID NO: 138202 - DNA, 120 bp, Artificial Sequence
  ENSG00000103546_10 (sequence is synthesized)
tttttttccttgggggctggatttggagtattgattgcatttgccagttacaacaaatttgacaacaactgttacagggatgccctgctgaccagcagcatcaactgtatcaccagcttc

SEQ ID NO: 138203 - DNA, 120 bp, Artificial Sequence
  ENSG00000103546_11 (sequence is synthesized)
gtctctgggttcgccatcttctccatccttggttacatggcccatgaacacaaggtcaacattgaggatgtggccacagaaggagctggcctagtgttcatcctgtatccagaggccatt

SEQ ID NO: 138204 - DNA, 120 bp, Artificial Sequence
  ENSG00000103546_12 (sequence is synthesized)
tctaccctgtctggatctacattctgggctgttgtgtttttcgtcatgctcctggcgctgggccttgacagctcaatgggaggcatggaggctgtcatcacgggcctggcagatgacttc

SEQ ID NO: 138205 - DNA, 120 bp, Artificial Sequence
  ENSG00000103546_13 (sequence is synthesized)
caggtcctgaagcgacaccggaaactcttcacatttggcgtcaccttcagcactttccttctcgccctgttctgcataaccaagggtggaatttacgtcttgaccctcctggacaccttt

SEQ ID NO: 138206 - DNA, 120 bp, Artificial Sequence
  ENSG00000103546_14 (sequence is synthesized)
caggttcagcaacgacatccagcagatgatggggttcaggccgggtctatactggagactgtgctggaagttcgtcagtcctgccttcctcctgttcgtggttgtggtcagcatcatcaa

SEQ ID NO: 138207 - DNA, 120 bp, Artificial Sequence
  ENSG00000103546_15 (sequence is synthesized)
cttcaagccactcacctacgacgactacatcttcccgccctgggccaactgggtggggtggggcatcgccctgtcctccatggtcctggtgcccatctacgtcatctataagttcctcag

SEQ ID NO: 138208 - DNA, 120 bp, Artificial Sequence
  ENSG00000103546_16 (sequence is synthesized)
cacgcagggctctctttgggagagactggcctatggcatcacgccagagaacgagcaccacctggtggctcagagggacatcagacagttccagttgcaacactggctggccatctgagc

SEQ ID NO: 138209 - DNA, 120 bp, Artificial Sequence
  ENSG00000103546_17 (sequence is synthesized)
ctgcctggaggagaaggaggaacccccatgccaatgtccaggtcacaggcatccgctgcgctcccacctcggacaccatcttgggattcctcccctggaagttgtcctttctgatcctct

SEQ ID NO: 138210 - DNA, 120 bp, Artificial Sequence
  ENSG00000103546_18 (sequence is synthesized)
cttcttttcccatttacaaatgatttcgtgactgtagtttttgttcaccttctgtgcatctggcctgggggctgttagctcagaggagaggagcaaacaggaaaatgacttctgttctgt

SEQ ID NO: 138211 - DNA, 120 bp, Artificial Sequence
  ENSG00000103546_19 (sequence is synthesized)
ccccgctgttttgggggaagtctctcccactttgggatcctgctgaagctaggttcatgaggtcggaaatccccaccacatttgcctagactttgggcacaggagttcttagtccaccaa

SEQ ID NO: 138212 - DNA, 120 bp, Artificial Sequence
  ENSG00000103546_20 (sequence is synthesized)
atcagagagaggatgggcttttgatcagatacccctcccaaaaaaaaaaaaaactaaaactaaagcaaaaatcaaacaaaatctggctgagtttagtggggtggttggggaaggtacata

SEQ ID NO: 138213 - DNA, 120 bp, Artificial Sequence
  ENSG00000103546_21 (sequence is synthesized)
gaccctcctcttgcccaccctagacagccctctcatgtctgaacctcagcctgggagttagatttatttgtctctaaaatgaagtcagtggatagatgctttgagggattttgagtagaa

SEQ ID NO: 138214 - DNA, 120 bp, Artificial Sequence
  ENSG00000103546_22 (sequence is synthesized)
acattcatagttaattttcactctggccaatctgagtttgatgtgtgtgttctggaacattcctccagcttttggtggtcagatggcccagagatatgggggacaggaggaagagggtaa

SEQ ID NO: 138215 - DNA, 120 bp, Artificial Sequence
  ENSG00000103546_23 (sequence is synthesized)
atgaaccacagtgagcaggttctaggaggtacctgcatcagacaagctggtggaggccacgtggcaagccacatctactgaggcctcatgctgctcttgctctgtaagacacggagccca

SEQ ID NO: 138216 - DNA, 120 bp, Artificial Sequence
  ENSG00000103546_24 (sequence is synthesized)
gaaacccatctgcacttcctgagacctgcctggggaaacgggggcagggaccaagtgaggcctcatgtgtgtcttcaccgtgctgtcctcacaaggccaggtgggtgcccaaagggagcc

SEQ ID NO: 138217 - DNA, 120 bp, Artificial Sequence
  ENSG00000103546_25 (sequence is synthesized)
tgacaggctgttgtgttaatttattgttcttgcacacctgcacagcctccctctggggatcccacctggagtggaccaggggtcttgagaaatggagagttggctgcaaaaactctcatg

SEQ ID NO: 138218 - DNA, 120 bp, Artificial Sequence
  ENSG00000103546_26 (sequence is synthesized)
cactagatgtggcaccttggagggcagggtgagacaagcagcccagaaatactctctcaagtggaggggagaattttgagagtggatggaacagtttggtggtttcagagaatttctagg

SEQ ID NO: 138219 - DNA, 120 bp, Artificial Sequence
  ENSG00000103546_27 (sequence is synthesized)
tttctacttggatctacttctgatacaaacttgcacttggtgccctctggtggtgtttagttttagttccgtaagagaaatgattcctagtttgctaaattggtggcatctttgggaggg

SEQ ID NO: 138220 - DNA, 120 bp, Artificial Sequence
  ENSG00000103546_28 (sequence is synthesized)
gtttctgtttatggttagagtctcttacacccttgttggagggattcttattctgactgtgggagctcctgttgcgggatcttgggaaaaaataaagaagccgctgcattcgcacgtcaa

SEQ ID NO: 138221 - DNA, 120 bp, Artificial Sequence
  ENSG00000103546_29 (sequence is synthesized)
agtttaagtggcctgctgcggaagacagagctggtgctgcaccggtcgctgcttccccagtccttttttggcctcctttctgacgcgacgcagaccccagttctggagagtctgtcactc

SEQ ID NO: 138222 - DNA, 120 bp, Artificial Sequence
  ENSG00000103546_30 (sequence is synthesized)
gctccccgtggtgggagatcagaggcctggtgtccttgggagcggcgagcggtgctcggcgcaggatagaaagggagtgcgcgcccgagtcccccagatccctgggaacccgcgccaccc

SEQ ID NO: 138223 - DNA, 120 bp, Artificial Sequence
  ENSG00000103546_31 (sequence is synthesized)
tcccgcccctgcccatccccggccgcgctgtcagtctccattagcgctaacaggctccagacggagcgggccgggcgctgggttaatgcaatcggcgcgttacctggggcgcaggctaca

SEQ ID NO: 138224 - DNA, 120 bp, Artificial Sequence
  ENSG00000103546_32 (sequence is synthesized)
caatcggcgcgttacctggggcgcaggctacattaccagcccggcccccgccaggcacggccagaaccagtcagcccgcgccctgccggccgccccgcgcctccagctcttccccggccc

SEQ ID NO: 138225 - DNA, 120 bp, Artificial Sequence
  ENSG00000103546_33 (sequence is synthesized)
agcccgcgccctagagcctgccaaggcgccgccggtcgggggccggcagggcgcaaggcaccagggatcccctcgccgccggacacagcctcggcgtgcccccaggaccggtaaagttcc

SEQ ID NO: 138226 - DNA, 120 bp, Artificial Sequence
  ENSG00000103546_34 (sequence is synthesized)
gggagaaggagagctaccaactcttgccagatatcctgctgaacagaaatccctgaagctgccttaattctcaaaaggagttaccgctcagctgggagccagttcctgctatatgatctg

SEQ ID NO: 138227 - DNA, 120 bp, Artificial Sequence
  ENSG00000103546_35 (sequence is synthesized)
ttttctagcctcgctaatgtgagactgaagcattcttaccaaagaaatcatttcctagtaaagaagcccattgaactcactttatttgtttatttccttcgaaagccaccgaagagagaa

SEQ ID NO: 138228 - DNA, 120 bp, Artificial Sequence
  ENSG00000103546_36 (sequence is synthesized)
gcggaaaaagcacagcatatagttttacagacttgggtctgcagctgactagctgggtggcctggggatagtggcttcatcttttggggcttcaagattctttgtctttaaaatcagggg

SEQ ID NO: 138229 - DNA, 120 bp, Artificial Sequence
  ENSG00000103546_37 (sequence is synthesized)
ttatatcagatcatcaaagttcccattccattaaagaaaaccctgcatgtatccataatgatgctctcctgttaaatttacaatgaaggaaacacatcacttaactgtaagaatttccca

SEQ ID NO: 138230 - DNA, 120 bp, Artificial Sequence
  ENSG00000103546_38 (sequence is synthesized)
aaatgaactgatgaccagtgatctctctatcagagaaatgtcagatttctagcctccagaactttgatttttctggacattcaatagttcctctttctcagatatttttcaactgatgcc

SEQ ID NO: 138231 - DNA, 120 bp, Artificial Sequence
  ENSG00000103546_39 (sequence is synthesized)
gtagtgcagtgacgttaagtgtccgagaaggctcctgtggctgttgaagtgtcgcggacctgagctggggagggggtcggcacgctgccctcagcctcgagcctcggcgtgcccccagga

SEQ ID NO: 138232 - DNA, 120 bp, Artificial Sequence
  ENSG00000103546_40 (sequence is synthesized)
tgtgtgctccttatgagaatctaactaacgcctgatgacctgaggtggaacggtttcatcttgaaactacccccaccccaaaatctgtggaaaaattgtcttccatgcgacaggtcactg

SEQ ID NO: 138233 - DNA, 120 bp, Artificial Sequence
  ENSG00000103546_41 (sequence is synthesized)
actggtgctgaaaaggttggggaccgctgttctgcaggaaacgagagacagagggaatgggagtgcagtggtggagccacacccaaggagaggtggctgtggggctgggcctgggagact

SEQ ID NO: 138234 - DNA, 120 bp, Artificial Sequence
  ENSG00000103546_42 (sequence is synthesized)
gctgtggtcttagaagccactgaaacattggtgaatgtgaagtcacttttggggtgcctgccctcatccctctgtctctctgcttccgtgtaaataaagactgtttcaattgtgtcctct

SEQ ID NO: 138235 - DNA, 120 bp, Artificial Sequence
  ENSG00000103546_43 (sequence is synthesized)
ctgtgtcatggactgttccaatgtcatgcagatttctgtgtctgatatggattttaaaagttgttctctttgtggaatataagtgtacagaataataaataatgtttcctgggctgtgta

SEQ ID NO: 138236 - DNA, 120 bp, Artificial Sequence
  ENSG00000103549_0 (sequence is synthesized)
aacgcgcagatacgtgagaagttgcgagtgcccacctgggcgccctctcttccaggttgctaatacgagggccggtgctgtcctccaggctgggaagtgggagcgcggtgtcagttacta

SEQ ID NO: 138237 - DNA, 120 bp, Artificial Sequence
  ENSG00000103549_1 (sequence is synthesized)
tgggaactgcctcttggccaatcaccgagagaaagaggaggtgtttgggaagaagccagaggacccgagtggcgggaccaagcgtaaccaatagaagcagaagataaagaagtttcctca

SEQ ID NO: 138238 - DNA, 120 bp, Artificial Sequence
  ENSG00000103549_2 (sequence is synthesized)
catccggggctgcctttggcgcctgcgccctgcgcaccgttggggggggggcagtggcgtccagtgacgcccagtgacgtccggtgaaatccaagatggcggcgctaggctgaccctcct

SEQ ID NO: 138239 - DNA, 120 bp, Artificial Sequence
  ENSG00000103549_3 (sequence is synthesized)
gctggtgacggaagtaccgcctcctcccgtttgacgcccctcaggggaccctgcatcgctccagccgccgcggccatgtctgggccaggcaacaaacgcgccgccggcgacgggggctca

SEQ ID NO: 138240 - DNA, 120 bp, Artificial Sequence
  ENSG00000103549_4 (sequence is synthesized)
gggcccccggaaaagaagctgagtcgtgaggagaagaccaccacgactcttatcgagcccattcgtcttggaggcatctcttccacggaggagatggacctgaaggtactacagttcaag

SEQ ID NO: 138241 - DNA, 120 bp, Artificial Sequence
  ENSG00000103549_5 (sequence is synthesized)
aacaagaaactggcagagcggctggaacaacggcaggcttgtgaagatgaactccgagaacgaattgagaagttggagaagcggcaggccacagatgatgccacactcctcatcgtcaat

SEQ ID NO: 138242 - DNA, 120 bp, Artificial Sequence
  ENSG00000103549_6 (sequence is synthesized)
cgctactgggcccagctggatgaaactgtggaagcccttctccgatgccatgagagccagggggagctgtcttcagcgcctgaggcacctgggacccaggaggggccaacatgtgatggg

SEQ ID NO: 138243 - DNA, 120 bp, Artificial Sequence
  ENSG00000103549_7 (sequence is synthesized)
actcctctcccagagccggggacatcagagctgagagaccccttgctgatgcagctgcggccccctctcagtgagccggccttggcttttgtggtggcactgggtgccagcagcagtgag

SEQ ID NO: 138244 - DNA, 120 bp, Artificial Sequence
  ENSG00000103549_8 (sequence is synthesized)
gaggtggagctggagctgcaaggccgaatggagttctccaaggcagctgtgtctcgtgtggtagaggcctcagaccgcctacagcgccgggtggaggaactctgtcagcgagtgtacagc

SEQ ID NO: 138245 - DNA, 120 bp, Artificial Sequence
  ENSG00000103549_9 (sequence is synthesized)
cgaggggacagtgagcccctcagtgaggcggctcaggcacacacccgagagctgggccgtgagaaccggcgactgcaggacttggccactcagctgcaggagaaacaccaccgcatctca

SEQ ID NO: 138246 - DNA, 120 bp, Artificial Sequence
  ENSG00000103549_10 (sequence is synthesized)
ttggagtactccgagctccaggataaagtgacatcggcagagaccaaggtgctggagatggagacaacagtggaggacttgcagtgggacatcgagaagctgcggaagcgagagcaaaag

SEQ ID NO: 138247 - DNA, 120 bp, Artificial Sequence
  ENSG00000103549_11 (sequence is synthesized)
ctcaataagcacctggcagaggccttagagcagcttaactctggctactatgtatctgggagctcctcaggcttccaggggggccagatcacactcagcatgcagaagtttgagatgctg

SEQ ID NO: 138248 - DNA, 120 bp, Artificial Sequence
  ENSG00000103549_12 (sequence is synthesized)
aatgcagagttagaggaaaaccaggaactggccaacagccgtatggcagagctggagaaactgcaggccgaacttcagggggctgtgcggaccaatgagcgcctcaaggtggccctgcgg

SEQ ID NO: 138249 - DNA, 120 bp, Artificial Sequence
  ENSG00000103549_13 (sequence is synthesized)
agccttcctgaggaggtagtgcgggagacgggggagtaccgcatgctgcaggcccaattctcactgctctacaacgagtctctgcaagtgaagacccagctagacgaggctcggggcctg

SEQ ID NO: 138250 - DNA, 120 bp, Artificial Sequence
  ENSG00000103549_14 (sequence is synthesized)
ctgctggccacaaagaactcccacctgcgacacatcgagcacatggagagcgacgagctggggctgcagaagaagctacgcacagaggtcattcagctggaggacacgctggcccaggta

SEQ ID NO: 138251 - DNA, 120 bp, Artificial Sequence
  ENSG00000103549_15 (sequence is synthesized)
cgcaaggagtatgagatgctgcgcatcgagtttgagcagaatctggcggccaacgagcaggcggggcccatcaaccgtgagatgcgccacctgattagtagtcttcaaaaccacaaccac

SEQ ID NO: 138252 - DNA, 120 bp, Artificial Sequence
  ENSG00000103549_16 (sequence is synthesized)
cagctaaaaggggacgcccagcgatacaagcggaagcttcgagaagtacaagctgagattggcaagctccgggcccaggccagtggctctgcccactccacccccaacctgggccaccca

SEQ ID NO: 138253 - DNA, 120 bp, Artificial Sequence
  ENSG00000103549_17 (sequence is synthesized)
gaggattctggcgtcagtgccccagccccagggaaagaggagggtgggccaggccctgtcagtacccccgacaacagaaaggagatggctccagtgcctggcaccaccactactaccact

SEQ ID NO: 138254 - DNA, 120 bp, Artificial Sequence
  ENSG00000103549_18 (sequence is synthesized)
tcagtgaagaaggaggagctggtcccctctgaagaggacttccagggtataacccctggggcccagggcccttcctcccggggccgagaacctgaggccaggcccaagcgggagcttcgg

SEQ ID NO: 138255 - DNA, 120 bp, Artificial Sequence
  ENSG00000103549_19 (sequence is synthesized)
gaacgggaaggtcccagcctaggacctccacctgtagcctccgctctctcaagggctgatcgggagaaggccaaggtggaagaaaccaagcggaaggaatcagaactcctcaagggtctc

SEQ ID NO: 138256 - DNA, 120 bp, Artificial Sequence
  ENSG00000103549_20 (sequence is synthesized)
cgagcagagctcaagaaggcccaggagagccagaaggagatgaaactgctgctggatatgtacaagtcagcgcccaaggagcagcgggataaggtgcagctcatggcagcggaacgcaag

SEQ ID NO: 138257 - DNA, 120 bp, Artificial Sequence
  ENSG00000103549_21 (sequence is synthesized)
gctaaggccgaggttgatgagctgcggagccgcatccgggaattggaggagagggatcgaagggagagcaagaagatcgcggatgaggatgccctgcggcgcattcggcaggcagaggag

SEQ ID NO: 138258 - DNA, 120 bp, Artificial Sequence
  ENSG00000103549_22 (sequence is synthesized)
cagatagaacacctgcagcgcaagctgggtgccaccaagcaggaggaggaggctctgctctcagagatggatgtgacaggtcaggcttttgaggacatgcaggaacagaacgggcggctg

SEQ ID NO: 138259 - DNA, 120 bp, Artificial Sequence
  ENSG00000103549_23 (sequence is synthesized)
gtccttggcctcaagtcccaggtggatgcccagctgctgactgtgcagaagctagaggagaaggagcgagccttgcagggcagcctcgggggtgtggagaaggagctgacgctgcgcagc

SEQ ID NO: 138260 - DNA, 120 bp, Artificial Sequence
  ENSG00000103549_24 (sequence is synthesized)
caagccctggagctcaacaagcggaaggctgtagaagccgcccagctggccgaggacctgaaggtgcagctggagcacgtgcagactcggctgcgggagatccagccctgcctggcagag

SEQ ID NO: 138261 - DNA, 120 bp, Artificial Sequence
  ENSG00000103549_25 (sequence is synthesized)
agccgggctgctcgtgagaaagagagcttcaacctcaagagggctcaggaggacatctcacggctgcggcgcaagctggaaaagcagaggaaggtggaggtctacgcagatgccgacgaa

SEQ ID NO: 138262 - DNA, 120 bp, Artificial Sequence
  ENSG00000103549_26 (sequence is synthesized)
atcctccaggaggagatcaaggagtacaaggcgcggttgacctgcccctgctgtaacacccgcaagaaggatgcagtccttaccaagtgcttccacgttttctgcttcgagtgcgtgcgg

SEQ ID NO: 138263 - DNA, 120 bp, Artificial Sequence
  ENSG00000103549_27 (sequence is synthesized)
ggccgctatgaggcccgccagaggaagtgccccaagtgcaacgcggcctttggtgcccacgacttccatcgtatctacatcagctgaacctgaaactcaggggactctggaacaccatgg

SEQ ID NO: 138264 - DNA, 120 bp, Artificial Sequence
  ENSG00000103549_28 (sequence is synthesized)
accctgggggctgtgcccccatctcctccccaccccaggtctagtggccccaccctccattccggaccccatgggcccagcccctgcccatctagttggtttggggaccctggtgcatgc

SEQ ID NO: 138265 - DNA, 120 bp, Artificial Sequence
  ENSG00000103549_29 (sequence is synthesized)
tagtgggcatgggatcagccaagcttcgttccatcttttcctaaaggtcagagctgcagcctagggggcactgccctacagaaaaggtctgcctgagaggcctgaggagcccagagcact

SEQ ID NO: 138266 - DNA, 120 bp, Artificial Sequence
  ENSG00000103549_30 (sequence is synthesized)
tgactgagcttcccggaaactggccctaacctgtctgtctccgtggatgcatcctaaccctaaggaaaattccccaggctgtgatctaccctagagaaggctcgctccctgcctactggc

SEQ ID NO: 138267 - DNA, 120 bp, Artificial Sequence
  ENSG00000103549_31 (sequence is synthesized)
tcacaaatgaggaccagtgagccatgtccttgttccttgtttgagactgggctgcaggccccaggaagactttccttcacccaccatccccctaacctcggcagggcttctgtcctgtgg

SEQ ID NO: 138268 - DNA, 120 bp, Artificial Sequence
  ENSG00000103549_32 (sequence is synthesized)
agttccctggacaccttggtctggctcttgtgccaagggctgaaggaggtaccctcttggcagatgggggcatcacttgcttcctttgggaagctctaaggttgctgcagtcaccttcct

SEQ ID NO: 138269 - DNA, 120 bp, Artificial Sequence
  ENSG00000103549_33 (sequence is synthesized)
catcttgcaggtgctgaaccaacatcatcagtttctattctaatcaggccccttcccaatctccatttctctgccaagcccatttacccccacctcatgcatcccaaggctctactgggt

SEQ ID NO: 138270 - DNA, 120 bp, Artificial Sequence
  ENSG00000103549_34 (sequence is synthesized)
ccctggacctaaccctgctttcatcctggtggccttaactacagtggaggtggaacttcccaggaggggaagggacagaccagccccagccgctgggccaacttccaatcattccagcta

SEQ ID NO: 138271 - DNA, 120 bp, Artificial Sequence
  ENSG00000103549_35 (sequence is synthesized)
gaagagcttccccctgacaccctgtgactgagcctgtgtcctgtctgcctgcccagccatgctccatcggctgtgagggcagtgcccggagaggccagagggttggagctgcagggaccc

SEQ ID NO: 138272 - DNA, 120 bp, Artificial Sequence
  ENSG00000103549_36 (sequence is synthesized)
gtttggacccacagcctctgttctagagatgcttgtataggctgttaattgtgatgaataaacgttcaaccctcggcctgcagccagagtagccaggccgcgcaccccaaatgtagtccc

SEQ ID NO: 138273 - DNA, 120 bp, Artificial Sequence
  ENSG00000103549_37 (sequence is synthesized)
ccgattttagctgcagcagctgagcagcactttgctggcttggtgtgagcctgggagggctcagacttaacggccggcagggatcccggactgggcctgaaggggagagcgtggtggtcg

SEQ ID NO: 138274 - DNA, 120 bp, Artificial Sequence
  ENSG00000103549_38 (sequence is synthesized)
tcgcggagccgcctgtcctgctcccaccgaccccggtctgaccacgtccttggctgtcatggccgggggatgccgggactcctcgggctgcatcctgggaagtgtagttcctggtccgca

SEQ ID NO: 138275 - DNA, 120 bp, Artificial Sequence
  ENSG00000103549_39 (sequence is synthesized)
catggttaggaggttctcggagagagagctagtttcccggttgcgctggccaaaggccggcctgaactggatcctgcggaccgcttctcagcggcttcacccccacaccactcgaatgca

SEQ ID NO: 138276 - DNA, 120 bp, Artificial Sequence
  ENSG00000103549_40 (sequence is synthesized)
cagatcgggacacctcagctgggtgacttccctcgttgcaatcggcctcgggagcggtgcggcgtgtaccgagcggcgcccctgggctcagcgcgctgcaggcgccccgggcggatcctt

SEQ ID NO: 138277 - DNA, 120 bp, Artificial Sequence
  ENSG00000103549_41 (sequence is synthesized)
caccgaggcaggactggggctggcgccagagccggtgcggagcggtgttggttcaggcgctggcgacagtgctatggccacggcaggggccgcgtgcgtctcagcggtggcgccttcgga

SEQ ID NO: 138278 - DNA, 120 bp, Artificial Sequence
  ENSG00000103549_42 (sequence is synthesized)
ccctattggcgcccgggacttaagcggggccgccgctgctggaccaggacgaactggagaaggagacgcgggccgccacggtgacctcgggcgtagggccggcggcggcgggcacgctgg

SEQ ID NO: 138279 - DNA, 120 bp, Artificial Sequence
  ENSG00000103549_43 (sequence is synthesized)
tggaagcgcgggccgcggcaggggaggacatcgggccgcagagaaagtgccgatggcctggggcagcggtgcgagggtgggaaaaacgcaggatattgcatcatagagacgcggccacct

SEQ ID NO: 138280 - DNA, 120 bp, Artificial Sequence
  ENSG00000103549_44 (sequence is synthesized)
tcgcccctggagagcgccagtctcaggagcgccgcaccggtcacgggtggaggtcagccaggcctccgtaagcgcggtccccttccaggagtagccttcgcctgggctcttgagtagatg

SEQ ID NO: 138281 - DNA, 120 bp, Artificial Sequence
  ENSG00000103549_45 (sequence is synthesized)
ccaagtaattccgcatcgtctctctagatatctgcgctaaaggccacccggtctccttatcagaggggcaaaactctcctcgtgggtcttcatacctaataaaagtcggcatcaaaccac

SEQ ID NO: 138282 - DNA, 120 bp, Artificial Sequence
  ENSG00000103549_46 (sequence is synthesized)
cgagcacatggaggtatggccctggaacaggcgttagggctgggctaagggccaaaccgttagtgttgacgtgtttgtgccttccgaggccctgtgtgccagccaggggtccctggggaa

SEQ ID NO: 138283 - DNA, 120 bp, Artificial Sequence
  ENSG00000103549_47 (sequence is synthesized)
tagattcttcctaagatactgagtcctgaggtgggaccgaggggctgtgtgggtccttaacacatcaacccacagagcgacgagctggggctgcagaagaagctacgcacagaggtcatt

SEQ ID NO: 138284 - DNA, 120 bp, Artificial Sequence
  ENSG00000103549_48 (sequence is synthesized)
gcatctcgccgctcttccgtgccgcgaggcgccccgggctcccgccgcctaggttccaggacagccagcgctcggtcggcggctaccaaggccgggcccgttcgcctcgctccggccaat

SEQ ID NO: 138285 - DNA, 120 bp, Artificial Sequence
  ENSG00000103549_49 (sequence is synthesized)
ctacgcgcggagaggcgcggcggggcgaatccgtgggggcgtctccctccgtctcaacggcgacggttgccaagggggcttgtgagggaaggaaggcggaaagcgcaggctcacgccagt

SEQ ID NO: 138286 - DNA, 120 bp, Artificial Sequence
  ENSG00000103549_50 (sequence is synthesized)
ttagcaaaaatcgtatgaataggcagtgtcaagttaattttgggtgagtttccttgaagtcagcattatttactttgatgagttcatgctccgttgaggccgcaatgttcccctcctgca

SEQ ID NO: 138287 - DNA, 120 bp, Artificial Sequence
  ENSG00000103549_51 (sequence is synthesized)
cagtgggagtgatggcatagcctcttaccccactgaggggttggagtcctaacccaggaactggttctgacacctttacttgctgatgctcctccagggcccatcaaccgtgagatgcgc

SEQ ID NO: 138288 - DNA, 120 bp, Artificial Sequence
  ENSG00000103549_52 (sequence is synthesized)
gagttgggcgagcaggtccttggcctcaagtcccaggtatggccgccgccagcttgcagactggagctggagaggtgggggtcatggccctgagtcctcctctggtccttaggtggatgc

SEQ ID NO: 138289 - DNA, 120 bp, Artificial Sequence
  ENSG00000103549_53 (sequence is synthesized)
gcggcctttggtgcccacgacttccatcgtatctacatcagctgaacctgaaactcaggggactctggaacaccatggaccctgggggctgtgcccccatctcctccccaccccaggtca

SEQ ID NO: 138290 - DNA, 120 bp, Artificial Sequence
  ENSG00000103549_54 (sequence is synthesized)
gactcctcctgctgtcagcttggggtctgggcactgtcagagttgttcccaagctgatgcctttgcctggcccaggcgcggttgacctgcccctgctgtaacacccgcaagaaggatgca

SEQ ID NO: 138291 - DNA, 120 bp, Artificial Sequence
  ENSG00000103550_0 (sequence is synthesized)
gactcgaagtggacttccgggtcacggcggagctggctctcacgtggaggcggggaaatttcgcccaccggaatgatcaccaagacacacaaagtagaccttgggctcccagagaagaaa

SEQ ID NO: 138292 - DNA, 120 bp, Artificial Sequence
  ENSG00000103550_1 (sequence is synthesized)
aagaagaagaaagtggtcaaagaaccagagactcgatactcagttttaaacaatgatgattactttgctgatgtttctcctttaagagctacatccccctctaagagtgtggcccatggg

SEQ ID NO: 138293 - DNA, 120 bp, Artificial Sequence
  ENSG00000103550_2 (sequence is synthesized)
caggcacctgagatgcctctagtgaagaaaaagaagaagaaaaagaagggtgtcagcaccctttgcgaggagcatgtagaacctgagaccacgctgcctgctagacggacagagaagtca

SEQ ID NO: 138294 - DNA, 120 bp, Artificial Sequence
  ENSG00000103550_3 (sequence is synthesized)
cccagcctcaggaagcaggtgtttggccacttggagttcctcagtggggaaaagaaaaataagaagtcacctctagccatgtcccatgcctctggggtgaaaacctccccagaccctaga

SEQ ID NO: 138295 - DNA, 120 bp, Artificial Sequence
  ENSG00000103550_4 (sequence is synthesized)
cagggtgaggaggaaaccagagttggcaagaagctcaaaaaacacaagaaggaaaaaaagggggcccaggaccccacagccttctcggtccaggacccttggttctgtgaggccagggag

SEQ ID NO: 138296 - DNA, 120 bp, Artificial Sequence
  ENSG00000103550_5 (sequence is synthesized)
gccagggatgttggggacacttgctcagtggggaagaaggatgaggaacaggcagccttggggcagaaacggaagcggaagagccccagagaacacaatgggaaggtgaagaagaaaaaa

SEQ ID NO: 138297 - DNA, 120 bp, Artificial Sequence
  ENSG00000103550_6 (sequence is synthesized)
aaaatccaccaggagggagatgccctcccaggccactccaagccctccaggtccatggagagcagccctaggaaaggaagtaaaaagaagccagtcaaagttgaggctccggaatacatc

SEQ ID NO: 138298 - DNA, 120 bp, Artificial Sequence
  ENSG00000103550_7 (sequence is synthesized)
cccataagtgatgaccctaaggcctccgcaaagaaaaagatgaagtccaaaaagaaggtagagcagccagtcatcgaggagccagctctgaaaaggaagaaaaagaagaagaggaaagag

SEQ ID NO: 138299 - DNA, 120 bp, Artificial Sequence
  ENSG00000103550_8 (sequence is synthesized)
agtggggtagcaggagacccttggaaggaggaaacagacacggacttagaggtggtgttggaaaaaaaaggcaacatggatgaggcgcacatagaccaggtgaggcgaaaggccttgcaa

SEQ ID NO: 138300 - DNA, 120 bp, Artificial Sequence
  ENSG00000103550_9 (sequence is synthesized)
gaagagatcgatcgcgagtcaggcaaaacggaagcttctgaaaccaggaagtggacgggaacccagtttggccagtgggatactgctggttttgagaacgaggaccaaaaactgaaattt

SEQ ID NO: 138301 - DNA, 120 bp, Artificial Sequence
  ENSG00000103550_10 (sequence is synthesized)
ctcagacttatgggtggcttcaaaaacctgtccccttcgttcagccgccccgccagcacgattgcaaggcccaacatggccctcggcaagaaggcggctgacagcctgcagcagaatctg

SEQ ID NO: 138302 - DNA, 120 bp, Artificial Sequence
  ENSG00000103550_11 (sequence is synthesized)
cagcgggactacgaccgggccatgagctggaagtacagccggggagccggcctcggcttctccaccgcccccaacaagatcttttacattgacaggaacgcttccaagtcagtcaagctg

SEQ ID NO: 138303 - DNA, 120 bp, Artificial Sequence
  ENSG00000103550_12 (sequence is synthesized)
gaagattaaactctagagttttgtccccccaaaactgccacaattgctttgattattccatttatgctggagattacaaattttttttgtgaaaaaatcagatcttggtgaggacctcga

SEQ ID NO: 138304 - DNA, 120 bp, Artificial Sequence
  ENSG00000103550_13 (sequence is synthesized)
gcagtaagatataaataactcccataagcttagcgttccagtaatggaacactaggcataaatggtttattcagttgtgcaaatgaaagccatctgacagttggctcacattgaacacct

SEQ ID NO: 138305 - DNA, 120 bp, Artificial Sequence
  ENSG00000103550_14 (sequence is synthesized)
gtggagattaaggacgaggacaactatattgatgggcttggatgaactggggcagggcagctcatatttcgggagccaggagaacgagtgagtgctaaaacctcctgttttctgtgttaa

SEQ ID NO: 138306 - DNA, 120 bp, Artificial Sequence
  ENSG00000103550_15 (sequence is synthesized)
acattccgtccctgtttgagacatcagtatgtacagttaacttttgttgagtgtttagcaggtactagggacatactagtgttttccttaatgtatttaatcttcataattatgaaatgg

SEQ ID NO: 138307 - DNA, 120 bp, Artificial Sequence
  ENSG00000103550_16 (sequence is synthesized)
gtgctattattagccccatcttatagatgaggcaactgaggttcagggataaagtaataaaattgcctggggtcacccagccactaagtgcagggtgttgtacttttgtacccgaagccc

SEQ ID NO: 138308 - DNA, 120 bp, Artificial Sequence
  ENSG00000103550_17 (sequence is synthesized)
taagttcactattcgccactctgaatgtcccctttagggaatttccaccagaatcctcgttggggattgaaatgtctttagatggaggaaaaagttttatgacaagtctgcatctctgat

SEQ ID NO: 138309 - DNA, 120 bp, Artificial Sequence
  ENSG00000103550_18 (sequence is synthesized)
aaaaagtggagtgaatgaggaacggagaatcgcaaactccttttccttccttttcctttcccctgtcatagagcagctgtaggcagagaggtgtctgagttgttaccaaacacatgtgac

SEQ ID NO: 138310 - DNA, 120 bp, Artificial Sequence
  ENSG00000103550_19 (sequence is synthesized)
tgagctgctgctgctgggaaatgtgcctctaaaccagtcctgccttttccactggtgtcccttcggccctaagtgctgaggtaggatttttgtgctttgactggattctgaacaaggcat

SEQ ID NO: 138311 - DNA, 120 bp, Artificial Sequence
  ENSG00000103550_20 (sequence is synthesized)
ctggattctgaacaaggcattttaggaagagtggttagtcccgcaaatgaatcaatggcagatcccagggacgtgtgtgtgtgttttgagataggctctcactctgtcacccaggctgga

SEQ ID NO: 138312 - DNA, 120 bp, Artificial Sequence
  ENSG00000103550_21 (sequence is synthesized)
acctcagcctcccaagtagctgggactgtgggtgtgcaccacaacaaccagctagtgtttaaaattttttgtagagatggggtctcactatattgtccaggctagtcccaaactcctgga

SEQ ID NO: 138313 - DNA, 120 bp, Artificial Sequence
  ENSG00000103550_22 (sequence is synthesized)
ggtctcactatattgtccaggctagtcccaaactcctggactcaactcatgctcctgcctcagcccccaagagctgggatcacaggtgtgagccactgtgcccagccccagggatgtgtc

SEQ ID NO: 138314 - DNA, 120 bp, Artificial Sequence
  ENSG00000103550_23 (sequence is synthesized)
tgatgagattcttttttatcacaaggaagagaatcccaggtgacttctgtaggtggatattgaatgccaggaggagatgaacgtgtggagatgacacgggaagttgcctcatcggctgtg

SEQ ID NO: 138315 - DNA, 120 bp, Artificial Sequence
  ENSG00000103550_24 (sequence is synthesized)
gggacagcgtttccaagcctggactctacagcaagcctcaaagagctccaggtccagtggcccaagtcgcatgtgaccatctgtgaccaccttctttccactcacctagctttttgcatc

SEQ ID NO: 138316 - DNA, 120 bp, Artificial Sequence
  ENSG00000103550_25 (sequence is synthesized)
ccaaaatacaggttctgactgggacattttcacgatcgtttggcctgaacatgcctcctacagacatcccagcccaggcaggcctcgatggccagaaagttcagtctcacgtggcaggaa

SEQ ID NO: 138317 - DNA, 120 bp, Artificial Sequence
  ENSG00000103550_26 (sequence is synthesized)
ttggcttcatcaaggctagtacaaagatggcagtaacagttccaggcagcatatcaagaccctagaacattccagaggaagaaaagcctttttgtgtctcaaggaaacttccagaagcct

SEQ ID NO: 138318 - DNA, 120 bp, Artificial Sequence
  ENSG00000103550_27 (sequence is synthesized)
ccattgctgggcaatgagtcatctgcccatagctgcacccgcccctgtcatgggaaggctggtgattcccttcagtcaagaagagtggatgctggtgaagtggccatggtgtccacagct

SEQ ID NO: 138319 - DNA, 120 bp, Artificial Sequence
  ENSG00000103550_28 (sequence is synthesized)
gcccattgggcagaggtgaggcaggcacttcaggcagtttccctggctctgaaccctgatccgcaagcattggccaggtcaatagttggacaagtatgtgctacaaggacctacttgggc

SEQ ID NO: 138320 - DNA, 120 bp, Artificial Sequence
  ENSG00000103550_29 (sequence is synthesized)
cacttccctcaggacgtgaacttgtcctgcctttctttcctggattcaaccttgagatacataatgggagaggccgtggaaagcccaagaggcagtgttctggatttgagtgagtgcctt

SEQ ID NO: 138321 - DNA, 120 bp, Artificial Sequence
  ENSG00000103550_30 (sequence is synthesized)
ctgggcacctcctcctttgatggagaaacaaatccctcctgaccttgagcaacactacaggaatgtgcctggtgtaaacaggaaccagccgttcgtttctttttttttgagatggagtct

SEQ ID NO: 138322 - DNA, 64 bp, Artificial Sequence
  ENSG00000103550_31 (sequence is synthesized)
tcattgtaatcggccgtttactactcatagtttttatcttgccaagaggtcaccctgacgttgg

SEQ ID NO: 138323 - DNA, 120 bp, Artificial Sequence
  ENSG00000103550_32 (sequence is synthesized)
tggaatcggccgtttactactcatagtttttatcttgccaagaggtcaccctgacgttggcctgccttagctctgttaaaaaggttgtgctctgccaggtgcggtgactcacgcctgtaa

SEQ ID NO: 138324 - DNA, 64 bp, Artificial Sequence
  ENSG00000103550_33 (sequence is synthesized)
tgtggtgtcacgggcttgtaatcccggctactcaggaggctgacaggagaatcgcttgaacccg

SEQ ID NO: 138325 - DNA, 90 bp, Artificial Sequence
  ENSG00000103550_34 (sequence is synthesized)
cccgggaggtggaggttgtagtgagctgggatggtgccactgcacactctagcccccaaacaaaaaaaaactgtctttgggtgattgtgg

SEQ ID NO: 138326 - DNA, 120 bp, Artificial Sequence
  ENSG00000103550_35 (sequence is synthesized)
aacaaacaaaaaaaaactgtctttgggtgattgtggagaggtgatcatatgtccgctgtgttgctcccatccaagccctggtgactggtagctctcatgagggtgtgatggtcaggcctt

SEQ ID NO: 138327 - DNA, 120 bp, Artificial Sequence
  ENSG00000103550_36 (sequence is synthesized)
gcccctggtgtaaattctgtctgtaataggctgtgactttctaactcaacatcaccactggcttaggagttccatttgcacagggggagctttattgcttttctatatacataagaactt

SEQ ID NO: 138328 - DNA, 120 bp, Artificial Sequence
  ENSG00000103550_37 (sequence is synthesized)
tacgtctcaccagtggaggttgggcagccaagacaccacaatgctgggtgtcttcagaatggacttaatcttgtccttttgctttctgccagtgcagatcaccatctctcagatgagcag

SEQ ID NO: 138329 - DNA, 120 bp, Artificial Sequence
  ENSG00000103550_38 (sequence is synthesized)
gaccccaccctctggcagtcttgtcttgggagaatcactctgagctcccatcctttgtaaattaacattggtttgagcaccaccctccatcacggctgcagtgagccatgattgcaccac

SEQ ID NO: 138330 - DNA, 120 bp, Artificial Sequence
  ENSG00000103550_39 (sequence is synthesized)
agcctgggtgacagagcaagaccccattccaaaaaaaaaaaaaaatttgccaaatagacacagtcctcacaaaagaagttggcagaataacaccccttcctaccacatctcctcagaacc

SEQ ID NO: 138331 - DNA, 120 bp, Artificial Sequence
  ENSG00000103550_40 (sequence is synthesized)
tcagaacctgtgtatttgttaggttacgaaacaaaagggaattaagtttgctaatcagctgaccttaaaacaggaagaggatcccgtgtttctgggtgggccggaggaatcacaaagatc

SEQ ID NO: 138332 - DNA, 120 bp, Artificial Sequence
  ENSG00000103550_41 (sequence is synthesized)
cctaaatgtggaagaggaaggcaaaaaagagtccacatcaaagagacttaagaaagacttgactagacactgctggttttgaagatgggaagggaagggtcagaagccaaggaatgtgtg

SEQ ID NO: 138333 - DNA, 120 bp, Artificial Sequence
  ENSG00000103550_42 (sequence is synthesized)
tgctgtctagaagctggaaaaggcaaggaagtagattctcccctagagcctcccagaaggagcgtagccctgctgatgccttaattttagctcagtgagaccaggcggacttaagaccta

SEQ ID NO: 138334 - DNA, 120 bp, Artificial Sequence
  ENSG00000103550_43 (sequence is synthesized)
tagaaccgtcagatgacaacattatgttttaagccgctacaattgtggcaatttgttaaagtaacaatagaagacctaatgtaagtaagtctcatgtggaagttgccatggttttgtttt

SEQ ID NO: 138335 - DNA, 120 bp, Artificial Sequence
  ENSG00000103550_44 (sequence is synthesized)
agtgttggtattacaggcatgagccaccgcacccaggccccatcatttttattttctacaattctggctgacatcttattgctccatccttgctaatgatagacttcatctcacatagac

SEQ ID NO: 138336 - DNA, 120 bp, Artificial Sequence
  ENSG00000103550_45 (sequence is synthesized)
ctaatgatagacttcatctcacatagaccagtgttttcagagaccggcttattgattcagtaaagggctgggggaaactgcacacacaaggacatataaaatctaagcctctgcctgggc

SEQ ID NO: 138337 - DNA, 120 bp, Artificial Sequence
  ENSG00000103550_46 (sequence is synthesized)
cacatgacaggattcagaagcacctttgatataatgggtgcccgacctcatgtgaaagtccaagttcaggtgtaatgtgagagcggtaagaattcactggcctaggcttgggaactaatg

SEQ ID NO: 138338 - DNA, 120 bp, Artificial Sequence
  ENSG00000103550_47 (sequence is synthesized)
ctgcccaccacgttcagcctcagaggagaagaaatgacttgaagaacataatttgtgaatttgccaattgtttttcattttatagcatcacacagtaaaagtagataaaataattttaat

SEQ ID NO: 138339 - DNA, 73 bp, Artificial Sequence
  ENSG00000103550_48 (sequence is synthesized)
aattagctgggtgtggtggcgcacgactcgggaggcggaggttggggtgagccgagatcacgccattgtactc

SEQ ID NO: 138340 - DNA, 120 bp, Artificial Sequence
  ENSG00000103550_49 (sequence is synthesized)
cacagcagcccacccagtccagcaaatgcacatgtgttgcaggcctggatgagtgatgggaatggagagggcttccagggtcatcacacacgtgacgctaggtgccaggcacagcacact

SEQ ID NO: 138341 - DNA, 120 bp, Artificial Sequence
  ENSG00000103550_50 (sequence is synthesized)
tctcaagtgaggacgcatgaaatgtcagcatttgtcgttactgaagaaccccaagaaagtggccggcctgaggtctcgctgttggagggtgtcttcagggccaaggcgggtgggagagca

SEQ ID NO: 138342 - DNA, 120 bp, Artificial Sequence
  ENSG00000103550_51 (sequence is synthesized)
gggctagggctctgcgaggaggtggcacgctcggcctcccgacgcttcccctcgcctccagcatgaggagtggagcaggagaaccaagtatgtccaggccccagaggcagccctagcctg

SEQ ID NO: 138343 - DNA, 120 bp, Artificial Sequence
  ENSG00000103550_52 (sequence is synthesized)
cagcaggctccctccacagcagaatttgtcctgagctaatttccttccttctgaaaagggcgcttgcctccctcctagagagctggcccggtgagataagctgcctgaacctttgtctca

SEQ ID NO: 138344 - DNA, 120 bp, Artificial Sequence
  ENSG00000103550_53 (sequence is synthesized)
ggccggcgcggggtgtggagattgcaccagaggaagtgcgcggcggggaagatggggaaatgcggtccacccacatccctgaatccgacccctccagtcggtgtgcgcccgctccggcct

SEQ ID NO: 138345 - DNA, 120 bp, Artificial Sequence
  ENSG00000103550_54 (sequence is synthesized)
gaggccgccgcctccagaaagttttcccgcctcagagccggccctgggaccccacgtaatccctcccagtctgttgatgcggaggcttgggcccatgggagccttggaggtacggatctt

SEQ ID NO: 138346 - DNA, 120 bp, Artificial Sequence
  ENSG00000103550_55 (sequence is synthesized)
acttcctggctcccgcgcgtcctgctggtgatcctgccgggggagtggggtgttgctgcacaggctttggagtcctgtgggcggaattccagtctccgttttccacttgctggctttgga

SEQ ID NO: 138347 - DNA, 120 bp, Artificial Sequence
  ENSG00000103550_56 (sequence is synthesized)
acctagggcaagtgaattattgtagtctctggagcttgcgaggtcgggtattcacaaagatcttcacaaggctgtccctggaatttaaaagcggttttggagaaagcgtttgcgtttgca

SEQ ID NO: 138348 - DNA, 120 bp, Artificial Sequence
  ENSG00000103550_57 (sequence is synthesized)
gggctaaagaggaggatgctatacttttctaaatggcaagagatggggagagaaggggattaagagttgacccgcaacctcccggtggattctttgttcttaccagatctcttggccact

SEQ ID NO: 138349 - DNA, 120 bp, Artificial Sequence
  ENSG00000103550_58 (sequence is synthesized)
cccctattctgaagtcgtcttggctctcttgactgctcccctattctgaagtcgtcttggctctcttgactgctcccctattctgaagtcgtcttggctctcctgactacactatttcaa

SEQ ID NO: 138350 - DNA, 120 bp, Artificial Sequence
  ENSG00000103569_0 (sequence is synthesized)
ccaccagaagacgattaagccacagcctctaattggaacggcatttgtacagtcagagactcttaccagacatctccaggaatctgtgagccattgtcaaaacgtccattttcatctggc

SEQ ID NO: 138351 - DNA, 120 bp, Artificial Sequence
  ENSG00000103569_1 (sequence is synthesized)
tgtgaaagtgaggaccacaacaggtaggtattggtagaaacaggagtcctcagagaagccccaagatgcagcctgagggagcagaaaagggaaaaagcttcaagcagagactggtcttga

SEQ ID NO: 138352 - DNA, 120 bp, Artificial Sequence
  ENSG00000103569_2 (sequence is synthesized)
agagcagcttagcgaaagaaaccctctctgagttcttgggcacgttcatcttgattgtccttggatgtggctgtgttgcccaagctattctcagtcgaggacgttttggaggggtcatca

SEQ ID NO: 138353 - DNA, 120 bp, Artificial Sequence
  ENSG00000103569_3 (sequence is synthesized)
ctatcaatgttggattttcaatggcagttgcaatggccatttatgtggctggcggtgtctctggtggtcacatcaacccagctgtgtctttagcaatgtgtctctttggacggatgaaat

SEQ ID NO: 138354 - DNA, 120 bp, Artificial Sequence
  ENSG00000103569_4 (sequence is synthesized)
ggttcaaattgccattttatgtgggagcccagttcttgggagcctttgtgggggctgcaaccgtctttggcatttactatgatggacttatgtcctttgctggtggaaaactgctgatcg

SEQ ID NO: 138355 - DNA, 120 bp, Artificial Sequence
  ENSG00000103569_5 (sequence is synthesized)
tgggagaaaatgcaacagcacacatttttgcaacatacccagctccgtatctatctctggcgaacgcatttgcagatcaagtggtggccaccatgatactcctcataatcgtctttgcca

SEQ ID NO: 138356 - DNA, 120 bp, Artificial Sequence
  ENSG00000103569_6 (sequence is synthesized)
tctttgactccagaaacttgggagcccccagaggcctagagcccattgccatcggcctcctgattattgtcattgcttcctccctgggactgaacagtggctgtgccatgaacccagctc

SEQ ID NO: 138357 - DNA, 120 bp, Artificial Sequence
  ENSG00000103569_7 (sequence is synthesized)
gagacctgagtcccagacttttcactgccttggcaggctgggggtttgaagtcttcagagctggaaacaacttctggtggattcctgtagtgggccctttggttggtgctgtcattggag

SEQ ID NO: 138358 - DNA, 120 bp, Artificial Sequence
  ENSG00000103569_8 (sequence is synthesized)
gcctcatctatgttcttgtcattgaaatccaccatccagagcctgactcagtctttaagacagaacaatctgaggacaaaccagagaaatatgaactcagtgtcatcatgtagtggcatg

SEQ ID NO: 138359 - DNA, 120 bp, Artificial Sequence
  ENSG00000103569_9 (sequence is synthesized)
ctcagctctggatttgcagtcagtttgggattctcttcagaaagatggcatctaagtgtctgtgttcttgtaagcctgaggtggaatccacccagttttgtctgctagccatatgggaca

SEQ ID NO: 138360 - DNA, 120 bp, Artificial Sequence
  ENSG00000103569_10 (sequence is synthesized)
tctaattggaaaagcatctgcataaaagtttggaaacaatgaccacttctctaccattgtcccccacccccaccccccagaataacgctgactgtcccctgaaacagccttctctcctgc

SEQ ID NO: 138361 - DNA, 120 bp, Artificial Sequence
  ENSG00000103569_11 (sequence is synthesized)
ctgcactatctgtatgaaatggtgtcaccaaaacccttttcttcagtatcgacaaagattacattctgagtaccaaccaaaccctaaattgaaagacaaaactatggtttcagtcaacat

SEQ ID NO: 138362 - DNA, 120 bp, Artificial Sequence
  ENSG00000103569_12 (sequence is synthesized)
attcatgaattagggagctaatgggttaagcttccagttcccgctatgctactggatttgtataaatactgatattctccaaacctagtggtgtagggagcaagagaatgcagctggaag

SEQ ID NO: 138363 - DNA, 120 bp, Artificial Sequence
  ENSG00000103569_13 (sequence is synthesized)
gcacaaggggaggacattgtggcattcagaaactgcaggagacaagatgaatttgagaagccaaatggaatttttaatggaaaccatttatcagattaatctcttgctctcctgcatttt

SEQ ID NO: 138364 - DNA, 120 bp, Artificial Sequence
  ENSG00000103569_14 (sequence is synthesized)
agaggacaccaattaatttcctggtctttagtatataataacctaaaataccattgtaacctcagtcatgaaaaatacatcactctgtctttttagctcaaatgtattttcctaattgcc

SEQ ID NO: 138365 - DNA, 120 bp, Artificial Sequence
  ENSG00000103569_15 (sequence is synthesized)
cacttgagaacagacatttgacaagttatatcaacgactgtgcttgtccattattttacacatgccctagaagccaaaactgaaagccactggatcctggtctagctgaatcttcagagt

SEQ ID NO: 138366 - DNA, 120 bp, Artificial Sequence
  ENSG00000103569_16 (sequence is synthesized)
gggaggtctccaaaaagatattaccttattgggcttaacaattcacaaggcactttcacacccattatctaatttaatcctcataatgactatgtgaggcaaatgccacattgcccattt

SEQ ID NO: 138367 - DNA, 120 bp, Artificial Sequence
  ENSG00000103569_17 (sequence is synthesized)
ttcagataaagaaacaaaatcttagggaagataagttgagttgtccaagagcacactgaaagttgaatgttatctaatgcattcctctacctttcagaagatcagtagctggctgacaat

SEQ ID NO: 138368 - DNA, 120 bp, Artificial Sequence
  ENSG00000103569_18 (sequence is synthesized)
ctttgccaaatcttccttgctagccagaagtggaattggcagcttctagaatatgtacacctctggacaaaatgttcctcaatcttaagatacaaagaccctcattgtctgggtctattc

SEQ ID NO: 138369 - DNA, 120 bp, Artificial Sequence
  ENSG00000103569_19 (sequence is synthesized)
ccacacttactgagtacagatgaaggaaagtggtagcaatttaatcataactttcatttgctgaaaaacattatgagaaggcctcccttcctaagccacctctggtcttgctaagtcttg

SEQ ID NO: 138370 - DNA, 120 bp, Artificial Sequence
  ENSG00000103569_20 (sequence is synthesized)
atcttgcttcctgccagcaccaaacattacattcaggggatttcctctggctcagtcttttccccttgaagttctctaatagatgttacttttgacaaaagatcgcctatgagttacaag

SEQ ID NO: 138371 - DNA, 120 bp, Artificial Sequence
  ENSG00000103569_21 (sequence is synthesized)
caccaggggatgctctacatcaagggatgcaccttcagtcaaactgtcaaaaagcccagaattcccaaaggcattaggtttcccaactgctttgtgctgatatcagaacagcagaaatta

SEQ ID NO: 138372 - DNA, 120 bp, Artificial Sequence
  ENSG00000103569_22 (sequence is synthesized)
aatgtgaaatgtttctgatgacttatgttctacaatctatggacatacgggatttttttttcttgctttgaagctacctggatatttcctatttgaaataaaattgttcggtcattgttg

SEQ ID NO: 138373 - DNA, 120 bp, Artificial Sequence
  ENSG00000103569_23 (sequence is synthesized)
aaaatcttttctggaccagggcccgtcactgtgatttggcaacacaactggcacatctcttttctcatctcttgaaaaaaaccaacagagaaaaaagtaccttgagaataaaggtccttg

SEQ ID NO: 138374 - DNA, 120 bp, Artificial Sequence
  ENSG00000103569_24 (sequence is synthesized)
tgattgctgtggagtggcaaactgaaaagagaagcctgggggatgcaggtgcctgttgaagagcactctcccaaaagaacggcactctgtgacctttctcccaactgtgaccgtaaatga

SEQ ID NO: 138375 - DNA, 120 bp, Artificial Sequence
  ENSG00000103591_0 (sequence is synthesized)
gcctgacggaaccggctcgcgagcgcagctatggctgctggcgtaccctgtgcgttagtcaccagctgctcctccgtcttctcaggagaccagctggtccaacatatccttggaacagaa

SEQ ID NO: 138376 - DNA, 120 bp, Artificial Sequence
  ENSG00000103591_1 (sequence is synthesized)
gatcttattgtggaagtgacttccaatgatgctgtgagattttatccctggaccattgataataaatactattcagcagacatcaatctatgtgtggtgccaaacaaatttcttgttact

SEQ ID NO: 138377 - DNA, 120 bp, Artificial Sequence
  ENSG00000103591_2 (sequence is synthesized)
gcagagattgcagaatctgtccaagcatttgtggtttactttgacagcacacaaaaatcgggccttgatagtgtctcctcatggcttccactggcaaaagcatggttacctgaggtgatg

SEQ ID NO: 138378 - DNA, 120 bp, Artificial Sequence
  ENSG00000103591_3 (sequence is synthesized)
atcttggtctgcgatagagtgtctgaagatggtataaaccgacaaaaagctcaagaatggtgcatcaaacatggctttgaattggtagaacttagtccagaggagttgcctgaggaggat

SEQ ID NO: 138379 - DNA, 120 bp, Artificial Sequence
  ENSG00000103591_4 (sequence is synthesized)
gatgacttcccagaatctacaggagtaaagcgaattgtccaagccctgaatgccaatgtgtggtccaatgtagtgatgaagaatgataggaaccaaggctttagccttctcaactcattg

SEQ ID NO: 138380 - DNA, 120 bp, Artificial Sequence
  ENSG00000103591_5 (sequence is synthesized)
actggaacaaaccatagcattgggtcagcagatccctgtcacccagagcaaccccatttgccagcagcagatagtactgaatccctctctgatcatcggggtggtgcatctaacacaaca

SEQ ID NO: 138381 - DNA, 120 bp, Artificial Sequence
  ENSG00000103591_6 (sequence is synthesized)
gatgcccaggttgatagcattgtggatcccatgttagatctggatattcaagaattagccagtcttaccactggaggaggagatgtggagaattttgaaagactcttttcaaagttaaag

SEQ ID NO: 138382 - DNA, 120 bp, Artificial Sequence
  ENSG00000103591_7 (sequence is synthesized)
gaaatgaaagacaaggctgcgacgcttcctcatgagcaaagaaaagtgcatgcagaaaaggtggccaaagcattctggatggcaatcgggggagacagagatgaaattgaaggcctttca

SEQ ID NO: 138383 - DNA, 120 bp, Artificial Sequence
  ENSG00000103591_8 (sequence is synthesized)
tctgatgaagagcactgaattattcatactagggtttgaccaacaaagatgctagctgtctctgagatacctctctactcagcccagtcatattttgccaaaattgcccttatcatgttg

SEQ ID NO: 138384 - DNA, 120 bp, Artificial Sequence
  ENSG00000103591_9 (sequence is synthesized)
gctgcctgacttgtttatagggtccccttaattttagtttttagtaggaggttaaggagaaatcttttttttcctcagtatattgtaagagagtgaggaatacagtgatagtaatgagtg

SEQ ID NO: 138385 - DNA, 120 bp, Artificial Sequence
  ENSG00000103591_10 (sequence is synthesized)
aggatttcttaaatatactttttttttgttctaggaatgagggtaggataaatctcagaggtctgtgtgatttactcaagttgaagacaacctccaggccattcctggtcaaccttttaa

SEQ ID NO: 138386 - DNA, 120 bp, Artificial Sequence
  ENSG00000103591_11 (sequence is synthesized)
gtagcatttccagcattcacacttgatactgcacatcaggagttgtgtcacctttcctgggtgatttgggttttctccattcaaggagcttgtagctctgagctatgatgcttttattgg

SEQ ID NO: 138387 - DNA, 120 bp, Artificial Sequence
  ENSG00000103591_12 (sequence is synthesized)
gaggaaaggaggcagctgcagaattgatgtgagctatgtggggccgaagtctcagcccgcagctaagtctctacctaagaaaatgcctctgggcattcttttgaagtatagtgtctgagc

SEQ ID NO: 138388 - DNA, 120 bp, Artificial Sequence
  ENSG00000103591_13 (sequence is synthesized)
gaatcaaaaagccagtgtggatttttagactgtaataaatgaggcaaaggatttctattccagtgggaagaaaacctctctactgagttgtgggggatatgttgtatgttagagagaacc

SEQ ID NO: 138389 - DNA, 120 bp, Artificial Sequence
  ENSG00000103591_14 (sequence is synthesized)
ttaaggagtccttgtatgggccatggagacagtatgtgataacataccgtgattttcatgaagaaattcttctgtcttagagttctcccctgctgcttgagatgccagagctgtgttgtt

SEQ ID NO: 138390 - DNA, 120 bp, Artificial Sequence
  ENSG00000103591_15 (sequence is synthesized)
gcacacctgcaaaacaaggcacatttccccctttctctttaaagccaaagagagatcactgccaaagtgggagcactaaggggtgggtggggaagtgaaatgttaggcgatgaattcctg

SEQ ID NO: 138391 - DNA, 120 bp, Artificial Sequence
  ENSG00000103591_16 (sequence is synthesized)
agcaccttgtttttcttccaaggttcgtagctcctctctgcccttccaagcctgtaacctcggaggactatcttttgttctttatcctttgtcttgtttgagtgggtcagccccagagga

SEQ ID NO: 138392 - DNA, 120 bp, Artificial Sequence
  ENSG00000103591_17 (sequence is synthesized)
actgataagcaaatggcaagtttttaaaggaagagtggaaagtactgcaaataaaaatccttatttgtttttgtagactttgtaatgcatatcattagccctcactgtgatcattactgc

SEQ ID NO: 138393 - DNA, 120 bp, Artificial Sequence
  ENSG00000103591_18 (sequence is synthesized)
tgtggctctgaactggcacatagtacagtggatggaaggtgcccgcacaccagctgagaactggttctggcctaggtgggctctagaaccatttacacagcatgaaagaaacaggttggg

SEQ ID NO: 138394 - DNA, 120 bp, Artificial Sequence
  ENSG00000103591_19 (sequence is synthesized)
ttaggagcagaaagaaataaggctcacacccctccagacactaccttataagcactgcagaacctgaaacagatggcagaaggaatggaatgctacaggggccagcaggagtgaccacag

SEQ ID NO: 138395 - DNA, 120 bp, Artificial Sequence
  ENSG00000103591_20 (sequence is synthesized)
gccagcaggagtgaccacagggaggggacagctcagtgactggagcattcaggaagaggctttccagggaacactggacattgcttagtgaccttttgttcctttttttttttttttctt

SEQ ID NO: 138396 - DNA, 120 bp, Artificial Sequence
  ENSG00000103591_21 (sequence is synthesized)
gagtctgtggttcaccaccagcccatcagtgtttctttgaggtgattgcattagggaagttggctctgggattgcaaaaaaaaaaaaaaggtggaacatgttttccttaaaagatggaag

SEQ ID NO: 138397 - DNA, 120 bp, Artificial Sequence
  ENSG00000103591_22 (sequence is synthesized)
gttttagaaaatatactaggccatctggttagaaaaaacagaccagactagaaaaagctgtgaatttgattttgtagattaaacaaagccagatgattaaaatgtgatttatttataaac

SEQ ID NO: 138398 - DNA, 120 bp, Artificial Sequence
  ENSG00000103591_23 (sequence is synthesized)
tgtgctaatgtctattattatgattttgtggttttttattagggggtatgagtgagggaagccctatatccttcattggattagacatatatagtgaatagtggaagagtctgtcaagct

SEQ ID NO: 138399 - DNA, 120 bp, Artificial Sequence
  ENSG00000103591_24 (sequence is synthesized)
cactattttagaatttaccctgcatatgtaatgtcatgtttttaagacctcagctatgcagggatattggcctcttctagggacatatgggatgaaggtctctagtgaaatctactaaaa

SEQ ID NO: 138400 - DNA, 120 bp, Artificial Sequence
  ENSG00000103591_25 (sequence is synthesized)
gcccatgttagaatagtgatcatgagctaacactacagtaatagctgcagtctatctaaagtgacctatgttcatgctaccacaagttgttacagaattgccagctggaatttaaaataa

SEQ ID NO: 138401 - DNA, 120 bp, Artificial Sequence
  ENSG00000103591_26 (sequence is synthesized)
aggcggaagcggctgcctgacggaaccggctcgcgagcgcagctatggctgctggcgtaccctgtgcgttagtcaccagctgctcctccgtcttctcaggagaccagctggtccaacgtg

SEQ ID NO: 138402 - DNA, 120 bp, Artificial Sequence
  ENSG00000103591_27 (sequence is synthesized)
agtagataggcgcctgggccgacctccaaggcccctgagcctcagcgggcgacggacccagcaccacggcctctctgggccttgtccccgcagcgggccctgcgttcttcctccagtcag

SEQ ID NO: 138403 - DNA, 120 bp, Artificial Sequence
  ENSG00000103591_28 (sequence is synthesized)
gtctccctaggaggtgaagaaagttccaacagaattgggaaaggtttacctcagggagactgaaatgaccaaggggatgggaagaatgggaattgtctaatataataaataagtgtggac

SEQ ID NO: 138404 - DNA, 120 bp, Artificial Sequence
  ENSG00000103591_29 (sequence is synthesized)
aaaccagagctgagaagagatttagctggaatctgtattacagggtggggaaaaacaggacccaaagaggaagagtaacatgctcatattcacacaataggaaccaaggctttagccttc

SEQ ID NO: 138405 - DNA, 120 bp, Artificial Sequence
  ENSG00000103591_30 (sequence is synthesized)
tgatattcaaaggtcaaatatttaatctgaaaatctaggtaattaaaaacgtaagagatgaattgcattccttcctgccctccacccagataaattggatgtgttatctatatgggaatt

SEQ ID NO: 138406 - DNA, 120 bp, Artificial Sequence
  ENSG00000103591_31 (sequence is synthesized)
catgatttaatatgtgattattataagtctgaacaacttacttggttataggatatcttcataacttttttcctttagtgtcttcttaaaagttagtaatacacaagcaaccaaaggaaa

SEQ ID NO: 138407 - DNA, 120 bp, Artificial Sequence
  ENSG00000103591_32 (sequence is synthesized)
tcttcggcgttcctttcggcttcctgtgtaaagtgagactgatttcccgctctgctcagcccaggccacaggtttttgcgaggatccgttgagatgaacctgaaggctctccggaaattg

SEQ ID NO: 138408 - DNA, 120 bp, Artificial Sequence
  ENSG00000103591_33 (sequence is synthesized)
cgctaggttacaggagtatatccttggaacagaagatcttattgtggaagtgacttccaatgatgctgtgagattttatccctggaccattgataataaatactattcagcagacatcaa

SEQ ID NO: 138409 - DNA, 120 bp, Artificial Sequence
  ENSG00000103591_34 (sequence is synthesized)
aatccagttactcttccctcagcaagtctatgctactccagtgactcttacctcagcaagtccatactactccagtgatcgacctgtcatataaactgcaacaaatactgcataaacttg

SEQ ID NO: 138410 - DNA, 120 bp, Artificial Sequence
  ENSG00000103599_0 (sequence is synthesized)
cgcgcgcggtgttgccatggggacgagcggctccggctgaaggtttccgtgcttggaaaccgcgcctccgcggaggtagccgttccctgacctagccatggcacagaacactgaaaacca

SEQ ID NO: 138411 - DNA, 120 bp, Artificial Sequence
  ENSG00000103599_1 (sequence is synthesized)
cgaccctgtcggatccatcttaatccagatccatgaagacctttatcagttaaaggagaaattaacaaaattctcacctgaggaaaaaggagagactctagacattcagagtcttgaaac

SEQ ID NO: 138412 - DNA, 120 bp, Artificial Sequence
  ENSG00000103599_2 (sequence is synthesized)
agcaatcaaaaggactgaagtggggttaagaattcacattgagaagtatttaaatgttgtaaaccagaatgtattaacgacttctgttaatgatgagagcttatatactccccaggcttc

SEQ ID NO: 138413 - DNA, 120 bp, Artificial Sequence
  ENSG00000103599_3 (sequence is synthesized)
caaatggttacttccaactgtaattgatcagaaatcatttattttccctcaggaatctgagggtacattttggcaaccccaaagacagcacagttcatctctgcctgtctttccaagagc

SEQ ID NO: 138414 - DNA, 120 bp, Artificial Sequence
  ENSG00000103599_4 (sequence is synthesized)
cctgaaaacatccaccacagagctgctgtaaatgcgaactatggaatcagtttgccatatattaatcagagaaaagcatgttaggtcctcaaaggtatgtggaaacaagaagaaatccct

SEQ ID NO: 138415 - DNA, 120 bp, Artificial Sequence
  ENSG00000103599_5 (sequence is synthesized)
ggtactgttcatgttccctcactgacatccagttccagttagactttataatacaacacattaagaaatctacagaaaatttgactttgatttattccttttaaataaaaagtgtttctt

SEQ ID NO: 138416 - DNA, 120 bp, Artificial Sequence
  ENSG00000103599_6 (sequence is synthesized)
aaaaggcttgaaacatgtatctgttaacatgaattttaaaagaacaattatgaatgcataacaaaatagccaaaccaaacattgctttgaattgctgcacaaataactgattataactgt

SEQ ID NO: 138417 - DNA, 120 bp, Artificial Sequence
  ENSG00000103599_7 (sequence is synthesized)
tatgacctagaaaaaaatcataaaaacatttttctttttggcaagatgtgagttgctgtagaattataccagttctttggttctactttccaaataaatatatatataatgcaatgtaaa

SEQ ID NO: 138418 - DNA, 120 bp, Artificial Sequence
  ENSG00000103599_8 (sequence is synthesized)
caagcagatgcccacaaagggattttaagtatgatagaacgagggctgattccaccaacagcaaggattacctttcagaatccacccattacacccagagcagctcctctgcatagtttt

SEQ ID NO: 138419 - DNA, 120 bp, Artificial Sequence
  ENSG00000103599_9 (sequence is synthesized)
gatgaagcacgtaagattccaactgtagccactttcactatacctcgggaaccacctccatctccagcagaagtgaagttctttcccaagaaacaaagatcaaaggggaaaagcagaagg

SEQ ID NO: 138420 - DNA, 120 bp, Artificial Sequence
  ENSG00000103599_10 (sequence is synthesized)
tcaagaggacatcatgataggaaggccatgaaagtcaaaacacctttgagagccctgaaatcactgtgggattatgactttttaatttatgatggtgtcatagacaatacagccccagac

SEQ ID NO: 138421 - DNA, 120 bp, Artificial Sequence
  ENSG00000103599_11 (sequence is synthesized)
ttcttagcattcaaggaacattttagcttagcttggggaggtattttttctctcttggaacacgtcgagaagtttctcaggaactatgctataccagaagtcaaaataaaagggaataat

SEQ ID NO: 138422 - DNA, 120 bp, Artificial Sequence
  ENSG00000103599_12 (sequence is synthesized)
ttggtggccctccttccagagtttgagctgacgaataaacttaccagatatgaccttctctcagtgttagaggacccagctcatgtccaaatgctgataaatcttccagggcaaaggtac

SEQ ID NO: 138423 - DNA, 120 bp, Artificial Sequence
  ENSG00000103599_13 (sequence is synthesized)
aagggccaagatggaaattcggaggccgccatgaagatccaagccacatggaaatgctacaaagcaagaaaattcttcctcttttatcgccagcagaagtgggcatcaggtgtgattgcc

SEQ ID NO: 138424 - DNA, 120 bp, Artificial Sequence
  ENSG00000103599_14 (sequence is synthesized)
attgcttggctgttatattgccataagactcgactaaagaagatactaaaggaatcacgtcagagacacctggagaattttcgcattcgagccaagcatctggcagccaactggaatcgc

SEQ ID NO: 138425 - DNA, 120 bp, Artificial Sequence
  ENSG00000103599_15 (sequence is synthesized)
atcaggacctccaggaggactattatccatatcccatcattagggtattcccagcctgtgagagaacatattgccgatttcaacacacagcagaacatgcagctggggaggctgtgtgac

SEQ ID NO: 138426 - DNA, 120 bp, Artificial Sequence
  ENSG00000103599_16 (sequence is synthesized)
atcttagatgccaatgtgaatgtcatctacatctgctcccatcatatgaatgacgagttagtgctgtattacaaaaaaatcctaagtctacatgcagccgtcaaatctgggaaccttgag

SEQ ID NO: 138427 - DNA, 120 bp, Artificial Sequence
  ENSG00000103599_17 (sequence is synthesized)
gacagaagtgacctgcaggacaggttcaaaattatcacacctgaagctgtaaacatcttccctaagcatcatatgtgcctggccactcacctgatgtacagtcccaaggcaatcaaaaga

SEQ ID NO: 138428 - DNA, 120 bp, Artificial Sequence
  ENSG00000103599_18 (sequence is synthesized)
ataaaaaatctcatccgaggaacagaggcctacatcgtcagcgggctcctccacagagatgatttagctgtggccgatatgttagacatacccatcctgggctctgagcctgaactagct

SEQ ID NO: 138429 - DNA, 120 bp, Artificial Sequence
  ENSG00000103599_19 (sequence is synthesized)
catctttatagtaccaaatctggaggcaaacgtgtctttgacagtgccaatgtggcagttcctcctggaatatatgatatttatagtcagcaacagatgatagagcagctgagtcagctg

SEQ ID NO: 138430 - DNA, 120 bp, Artificial Sequence
  ENSG00000103599_20 (sequence is synthesized)
ccgaggaaatgggactgcattttgtgatattccttcctacctaaagtgctacaaatgggtgctaaaggagagtagcagatatggccttgaagactggagaaagaaatgggcacaagagcc

SEQ ID NO: 138431 - DNA, 120 bp, Artificial Sequence
  ENSG00000103599_21 (sequence is synthesized)
agctttggtgaagatctctgaggagctggcgggcattttagcacagcacgcacagccagtcaatgagaaacggttcccgacgtggaggaaattcctccaaacatttctcagtcaaggggg

SEQ ID NO: 138432 - DNA, 120 bp, Artificial Sequence
  ENSG00000103599_22 (sequence is synthesized)
tgtgatcgaagcattcccacctgcagacaatgtcaccaacctcacagtggacatgctgatagagcccaacgggaaaatcagcgtgctgtcgacaggggaccagcttcatgctgaaagccc

SEQ ID NO: 138433 - DNA, 120 bp, Artificial Sequence
  ENSG00000103599_23 (sequence is synthesized)
cttcatctcctctggtaccaccgtgcctcagacctcagtggatccccaagttctcacttatttgtgcctccaaattggaaaagcctgcagaatgagagatgtggttggttacttttcgat

SEQ ID NO: 138434 - DNA, 120 bp, Artificial Sequence
  ENSG00000103599_24 (sequence is synthesized)
agatctggtgacttttatagatccaagcaccttggaacaacaggtgtgggcaaccggccttaacctcgcatatagtgaccagctggccctgactcaactcaccttatacctgacaaacgg

SEQ ID NO: 138435 - DNA, 120 bp, Artificial Sequence
  ENSG00000103599_25 (sequence is synthesized)
ccatctggattgcagtttgagcaccctggaagtgccccgctttgttccaaaggaaaggaagaaaaccaaatgcatgagtgcgctgtcaatgccgatgctggcaaccagtcgctatgcagt

SEQ ID NO: 138436 - DNA, 120 bp, Artificial Sequence
  ENSG00000103599_26 (sequence is synthesized)
gatgaccacccagctaagacacagcaatctctcactggttttccactatgtttttctccagatctgtagggcccatggcattggctatgatgttgaggaaaggcaaggaactgtttttat

SEQ ID NO: 138437 - DNA, 120 bp, Artificial Sequence
  ENSG00000103599_27 (sequence is synthesized)
attatatgagcacctgaagagacacaagttgggaatgttaacaatcggcgaggatctccagggggtcctcatgacctttgctcgccatctcttcatcatccatcaagaaatatcagcacc

SEQ ID NO: 138438 - DNA, 120 bp, Artificial Sequence
  ENSG00000103599_28 (sequence is synthesized)
taatatgcaaggcgagaccaattttaagaccaccattgctgatattgaaactattctaagagtaacaaaggaaaacaaaatgagatttgaagaggagcaacagtccaaagatgataaaaa

SEQ ID NO: 138439 - DNA, 120 bp, Artificial Sequence
  ENSG00000103599_29 (sequence is synthesized)
cctctctaaacccaagaaatgatcctggaatacagtacataacaatttggatcccagtctggaataaaaagggcaatttttttttctgttagaaataaaagccaggggaaattggtttgc

SEQ ID NO: 138440 - DNA, 120 bp, Artificial Sequence
  ENSG00000103599_30 (sequence is synthesized)
tttgtgtgctaggaggtgaatcagaacagattataatgaaatgctctttttaaaacattgtttattaagtgatcttattttatttattaaaccaaaacttatttgtgttttcatttgaga

SEQ ID NO: 138441 - DNA, 120 bp, Artificial Sequence
  ENSG00000103599_31 (sequence is synthesized)
gtgttgaacaatcccttcttcttctcaaactcagaaaaaagtaatctgataaaagaagaaagttaaaagtcttactgatatcacctccgcatttacttcctcataggcctcaggattatg

SEQ ID NO: 138442 - DNA, 120 bp, Artificial Sequence
  ENSG00000103599_32 (sequence is synthesized)
tagcttttattttttatgttttataaagttttctcctatttctaatagtccatcgatcttctgcatttataggtttgaataaaggcttaagaattgctatttgtcaaaacacaaatgcct

SEQ ID NO: 138443 - DNA, 120 bp, Artificial Sequence
  ENSG00000103599_33 (sequence is synthesized)
ttttttcaaagcttcaaattatattgaaattatatttatatgaatttttaagtgactatcattcatcgtgtttttgttataccaagccactattgtctgctattgttgccatttttcaaa

SEQ ID NO: 138444 - DNA, 120 bp, Artificial Sequence
  ENSG00000103599_34 (sequence is synthesized)
aagtaggataagccagcatctagttaaccaaagcatcagaatgtatctaggtggcagtatctgctcttagtttaagatggagtgtagctcgagctctgtagcttgaataaacatttgtat

SEQ ID NO: 138445 - DNA, 120 bp, Artificial Sequence
  ENSG00000103599_35 (sequence is synthesized)
tctctagttctccatttaatacagcagtaggattttttcaagtttagttcaacattatactacctttaaaaaggcagactgttaagattgtagtagtgctgactctaactttcagcattc

SEQ ID NO: 138446 - DNA, 120 bp, Artificial Sequence
  ENSG00000103599_36 (sequence is synthesized)
acttcataattgtccaaaaatatttccacatcagtgagctttactgaagggtgaaataaaagcaaattacaacaccaaaaccattattgttttaaagaatgacctttatgtctataaaaa

SEQ ID NO: 138447 - DNA, 120 bp, Artificial Sequence
  ENSG00000103599_37 (sequence is synthesized)
tattttagtgtattggggaaaggaataggatttttacctgtggaatttcaataatttgttaactgtgattcagccacaggctaagagtttctgtaataaaattaacatttgtgtgtgtca

SEQ ID NO: 138448 - DNA, 120 bp, Artificial Sequence
  ENSG00000103599_38 (sequence is synthesized)
caggacaggttcaaaattatcacacctgaagctgtaaacatcttccctatgatagagcagctgagtcagctgataactgatcacctgcaaatacagcgttggctctttaaaatggactct

SEQ ID NO: 138449 - DNA, 120 bp, Artificial Sequence
  ENSG00000103599_39 (sequence is synthesized)
ctgcaaatctatcagcaacctctattacccaccacattatggctccttgattgagttcaaggaaggccccttgttttattcaaattggtctcggcaggaaaatgttctcgacatgatgag

SEQ ID NO: 138450 - DNA, 120 bp, Artificial Sequence
  ENSG00000103599_40 (sequence is synthesized)
agtaataacacaggaccctcgcttgaaacggcgtttaatttggggattaagcaaataaagtcattatgtgggggctgctattcagtggagaggtgatttgctgtaattcgctttcatctg

SEQ ID NO: 138451 - DNA, 120 bp, Artificial Sequence
  ENSG00000103599_41 (sequence is synthesized)
tatgaaatgaactaaaaagttgtatttttccccgaaataacagataatgttttcgatcttctttaatgatagaagaacacaggcttgtatgtgttgttgctgttacgccaataagccagg

SEQ ID NO: 138452 - DNA, 120 bp, Artificial Sequence
  ENSG00000103599_42 (sequence is synthesized)
atattgcttgtacactgtttttaatcaaatgtgcagtcaaaatgataagctacattctctgaaattatttagttctaattacgagcagatgggatgctttatttgcacctagggcgcctg

SEQ ID NO: 138453 - DNA, 120 bp, Artificial Sequence
  ENSG00000103599_43 (sequence is synthesized)
agcaaaaggaaatgctgtgtgaacaagaataattaagaagttgaatagtgttttttgcacttaaataatctgcagtttcatgttaattagcactaatgtaattatttaattacatttatg

SEQ ID NO: 138454 - DNA, 120 bp, Artificial Sequence
  ENSG00000103599_44 (sequence is synthesized)
aattggggaacttaaaagctgttgtctgaaacacactggtaaaaaaggtatgccaaaatgacattgggaatttcagaaatttgcattggagtttcttttaagacatgagctactgtcaac

SEQ ID NO: 138455 - DNA, 120 bp, Artificial Sequence
  ENSG00000103599_45 (sequence is synthesized)
aatccattcgaggggcccattgttcagacacttgacagataggaagtcctacatgcccattagagccgcgcctcgactgaagccagagcaacataaggtccaagagactcattagttcac

SEQ ID NO: 138456 - DNA, 120 bp, Artificial Sequence
  ENSG00000103599_46 (sequence is synthesized)
tggcacaatcgtgtcctgagagtaaatgaaaccctctgtctccttatggctctcatctgctctggactttaaaagaaaactgtctccgttttgttcggcacagtagtggatcattcacat

SEQ ID NO: 138457 - DNA, 120 bp, Artificial Sequence
  ENSG00000103599_47 (sequence is synthesized)
ggtgagagcccctgcttaacagtacaaaactgttaaatctatcggaaagttttgcatgtgaattttgattagcactcccgaagctcaagctgctggcaatagcgaaacgatttcgccatc

SEQ ID NO: 138458 - DNA, 120 bp, Artificial Sequence
  ENSG00000103599_48 (sequence is synthesized)
tttggtgcgccgcccctagactccctccaactcgcgagaggctcccaaaaatgcccacccagaccttcccccacggcccagcacactcccggtgacttaccctgtaggttacgccccaga

SEQ ID NO: 138459 - DNA, 120 bp, Artificial Sequence
  ENSG00000103599_49 (sequence is synthesized)
agcaggactttctgcctctgggaaaactctaaaaccgttcacccggaacctttacttcagaaaaattaacctcacgctgaggcatcatttttaaatgttatattctgaaaaatttgaacc

SEQ ID NO: 138460 - DNA, 120 bp, Artificial Sequence
  ENSG00000103599_50 (sequence is synthesized)
ccactttcactatacctcgggaaccacctccatctccagcagaagtgaagttctttcccaagaaacaaagatcaaaggggaaaagcagaaggtcaagaggacatcatgataggaaggtct

SEQ ID NO: 138461 - DNA, 120 bp, Artificial Sequence
  ENSG00000103599_51 (sequence is synthesized)
gacagctggagatggcaacaaaagttcgtgcttcctttgtaaaagaaattagatcatggtttcaggaaaaaaaaaaaaacatggttcatttaaagtgaaaacccttttttgcctcctttt

SEQ ID NO: 138462 - DNA, 120 bp, Artificial Sequence
  ENSG00000103599_52 (sequence is synthesized)
ttcatctctgcctgtctttccaagagcaaagtcgtttaaaggtatcagactcaatctctcccagatccaggaaatgactggaaaggggaggccttggcagcattggtggagattctctac

SEQ ID NO: 138463 - DNA, 120 bp, Artificial Sequence
  ENSG00000103599_53 (sequence is synthesized)
agaagcaaaatttccccacaaaagacagctttgcaagaccacttctgtttgctggccctgtggcaactatttcaaaatatgtcaaagtacatattttggggtaaaatatttttatttcct

SEQ ID NO: 138464 - DNA, 120 bp, Artificial Sequence
  ENSG00000103599_54 (sequence is synthesized)
atgtaaaatatcagttcaggctcctgtgaactcccaaagcagccctctcctatctctgtccttgcacttgttacattgggtctgtcagccactctctgaggagtgcttactgtgtgccca

SEQ ID NO: 138465 - DNA, 120 bp, Artificial Sequence
  ENSG00000103599_55 (sequence is synthesized)
ggattattagaggcacgctgggctgaataagacagatcagatccctgacatcagagagcttatattctagtggggaaagacagaccatcaataagataccaccagataatgataaaagct

SEQ ID NO: 138466 - DNA, 120 bp, Artificial Sequence
  ENSG00000103599_56 (sequence is synthesized)
ctgataaaaataaaacagaatgctgtgataaagggagcttaaacttctcatcttccttactgttaaatcacttcttcagtcatttttttacctgtttgccaagaatctcagaaggtccat

SEQ ID NO: 138467 - DNA, 120 bp, Artificial Sequence
  ENSG00000103599_57 (sequence is synthesized)
aaattaacaaaattctcacctgaggaaaaaggagagactctagacattcagagtcttgaaacagcaatcaaaaggactgaagtggggttaagaccactttcactatacctcgggaaccac

SEQ ID NO: 138468 - DNA, 120 bp, Artificial Sequence
  ENSG00000103642_0 (sequence is synthesized)
gcagagacgccatgtaccggctcatgtcagcagtgactgcccgggctgccgcccccgggggcttggcctcaagctgcggacgacgcggggtccatcagcgcgccgggctgccgcctctcg

SEQ ID NO: 138469 - DNA, 80 bp, Artificial Sequence
  ENSG00000103642_1 (sequence is synthesized)
gccacggctgggtcgggggcctcgggctggggctggggctggcgctcggggtgaagctggcaggtgggctgaggggcgcg

SEQ ID NO: 138470 - DNA, 120 bp, Artificial Sequence
  ENSG00000103642_2 (sequence is synthesized)
cgcctctggccgagccgccacaggagcagtccctcgccccgtggtctccgcagaccccggcgccgccctgctccaggtgcttcgccagagccatcgagagcagccgcgacctgctgcaca

SEQ ID NO: 138471 - DNA, 120 bp, Artificial Sequence
  ENSG00000103642_3 (sequence is synthesized)
ggatcaaggatgaggtgggcgcaccgggcatagtggttggagtttctgtagatggaaaagaagtctggtcagaaggtttaggttatgctgatgttgagaaccgtgtaccatgtaaaccag

SEQ ID NO: 138472 - DNA, 120 bp, Artificial Sequence
  ENSG00000103642_4 (sequence is synthesized)
agacagttatgcgaattgctagcatcagcaaaagtctcaccatggttgctcttgccaaattgtgggaagcagggaaactggatcttgatattccagtacaacattatgttcccgaattcc

SEQ ID NO: 138473 - DNA, 120 bp, Artificial Sequence
  ENSG00000103642_5 (sequence is synthesized)
cagaaaaagaatatgaaggtgaaaaggtttctgtcacaacaagattactgatttcccatttaagtggaattcgtcattatgaaaaggacataaaaaaggtgaaagaagagaaagcttata

SEQ ID NO: 138474 - DNA, 120 bp, Artificial Sequence
  ENSG00000103642_6 (sequence is synthesized)
aagccttgaagatgatgaaagagaatgttgcatttgagcaagaaaaagaaggcaaaagtaatgaaaagaatgattttactaaatttaaaacagagcaggagaatgaagccaaatgccgga

SEQ ID NO: 138475 - DNA, 120 bp, Artificial Sequence
  ENSG00000103642_7 (sequence is synthesized)
tcttcaaacctggtagtcagtttttgtattcaacttttggctataccctactggcagccatagtagagagagcttcaggatgtaaatatttggactatatgcagaaaatattccatgact

SEQ ID NO: 138476 - DNA, 120 bp, Artificial Sequence
  ENSG00000103642_8 (sequence is synthesized)
tggatatgctgacgactgtgcaggaagaaaacgagccagtgatttacaatagagcaagattttatgtttacaataaaaagaaacgtcttgtcaacacaccttacgtggataactcctata

SEQ ID NO: 138477 - DNA, 120 bp, Artificial Sequence
  ENSG00000103642_9 (sequence is synthesized)
aatgggctggtggtggatttctgtctacagtgggtgaccttctgaaatttgggaatgcaatgctttatggttaccaagttgggctgtttaagaactcaaatgaaaatcttttacctggat

SEQ ID NO: 138478 - DNA, 120 bp, Artificial Sequence
  ENSG00000103642_10 (sequence is synthesized)
acctcaaaccagaaacaatggttatgatgtggaccccagtccctaacacagagatgtcttgggataaagagggtaaatatgcaatggcgtggggtgttgtggaaaggaaacaaacgtatg

SEQ ID NO: 138479 - DNA, 120 bp, Artificial Sequence
  ENSG00000103642_11 (sequence is synthesized)
gttcgtgtagaaagcaacggcattatgcttcacatactggaggggcagtgggtgccagtagtgtcctgctggtccttcctgaagaactggatacagagactataaataacaaggttcccc

SEQ ID NO: 138480 - DNA, 120 bp, Artificial Sequence
  ENSG00000103642_12 (sequence is synthesized)
caagaggaatcattgtttctatcatatgtaacatgcaatctgttggcctcaatagcaccgctttgaagattgcccttgaatttgataaagacagatcagactgataaccttaacaccata

SEQ ID NO: 138481 - DNA, 120 bp, Artificial Sequence
  ENSG00000103642_13 (sequence is synthesized)
ggtgcaaaatgagttgttctgaggtttttttgaaacattaaagttccaaaacatgacatttttaagaataaatttgaaatagagtataactgaatgcagagaattatgtacctctaattg

SEQ ID NO: 138482 - DNA, 120 bp, Artificial Sequence
  ENSG00000103642_14 (sequence is synthesized)
cttaattttgtaatggtcttttattgtagaattggttctttatactcagggaagtaattatattgtttttactttttgaaaaaagtgttaactcttgaaataaaatattctgataaaata

SEQ ID NO: 138483 - DNA, 120 bp, Artificial Sequence
  ENSG00000103642_15 (sequence is synthesized)
tctgaatgctgaagtaaaatattccagttttaaaagtatgccaattttcagtgggaatatattttatatgtttttgaataataatcaagtattttatttttttcctcctcgcaatgatgt

SEQ ID NO: 138484 - DNA, 120 bp, Artificial Sequence
  ENSG00000103642_16 (sequence is synthesized)
acactattttattaattaaaagtcaaattttctttgtttccattccaaaatcaacctgccacattttgggagcttttctacatgtctgttttctcatctgtaaagtgaaggaagtaaaac

SEQ ID NO: 138485 - DNA, 120 bp, Artificial Sequence
  ENSG00000103642_17 (sequence is synthesized)
atgtttataaagtacactaagaccctttgatgaaagatagcaataatattaataattcaaacatgaataactaaaccaaaattgcacccaccatgagcatctgtaatttgctctttaacc

SEQ ID NO: 138486 - DNA, 120 bp, Artificial Sequence
  ENSG00000103642_18 (sequence is synthesized)
tgcaagagtagtacaaaggattcacatatcctctttactcagattcccttaatgttagtttaccgcatttgcattacctttctgtctacatatgtgtttgtttctgaaccatttggaaat

SEQ ID NO: 138487 - DNA, 120 bp, Artificial Sequence
  ENSG00000103642_19 (sequence is synthesized)
tttgtttctgaaccatttggaaataagttgtagacgtgatacccctttacctataaatatttacatgtgtattttctaaaaacaaggacattcagggccgggtgcagtggctcacgcctg

SEQ ID NO: 138488 - DNA, 61 bp, Artificial Sequence
  ENSG00000103642_20 (sequence is synthesized)
agaccagcctggccaatgtggtgaaatcaaccctcacgcgggaggctgaggcaggagaatc

SEQ ID NO: 138489 - DNA, 85 bp, Artificial Sequence
  ENSG00000103642_21 (sequence is synthesized)
gcagtaagccaagatcgtgcccctgcacttcaggctgggcgaaagagtgagactccatgtcaaaaaaggaaaaaaaaaaaaaaaa

SEQ ID NO: 138490 - DNA, 120 bp, Artificial Sequence
  ENSG00000103642_22 (sequence is synthesized)
aaggaaaaaaaaaaaaaaaaaaaggacatttgggaaattaacatagatacaatgcttttattaaatctacagaccttactcaaattttgccagttgttccaataatgtcctttatagcaa

SEQ ID NO: 138491 - DNA, 120 bp, Artificial Sequence
  ENSG00000103642_23 (sequence is synthesized)
aagagcagaaaaacttttttttctggtctaggatctaatccatgatctcacattgcatttacttgtcatatctatcagaagtcacttgacatcagtttgtcccattattgctgatggtat

SEQ ID NO: 138492 - DNA, 120 bp, Artificial Sequence
  ENSG00000103642_24 (sequence is synthesized)
tttaatcactttttgaggtggtgcctgtcaggttattgtaaagttactatttttactttataattaacaagtatatttggaggagataatttgagatgatgtaaaaatcctctttctcat

SEQ ID NO: 138493 - DNA, 120 bp, Artificial Sequence
  ENSG00000103642_25 (sequence is synthesized)
caaactttctactagttttagcatctatcagtgattcatgactgaatcagttattacagtgatggttgtcaaatggtgattttctaattccatcatccattctgtatttatcagttggca

SEQ ID NO: 138494 - DNA, 62 bp, Artificial Sequence
  ENSG00000103642_26 (sequence is synthesized)
tttctaattccatcatccattctgtatttatcagttggcattctattataagaaggtgcggg

SEQ ID NO: 138495 - DNA, 76 bp, Artificial Sequence
  ENSG00000103642_27 (sequence is synthesized)
cagccgggcatggtggcatacacttgtaatctcggctgctcgggagtctgaggcaggagaatctcttgaacccagg

SEQ ID NO: 138496 - DNA, 120 bp, Artificial Sequence
  ENSG00000103642_28 (sequence is synthesized)
cctgggcgacaaagtgagactccatctcagaaaaaaaagtgctttcccttctctcttatttatttattcataccagtatgcactcatggattcttattttagtcaatgagttataatctg

SEQ ID NO: 138497 - DNA, 120 bp, Artificial Sequence
  ENSG00000103642_29 (sequence is synthesized)
gattcttattttagtcaatgagttataatctgtcactgtcattatttaatatgttgcttttaaaatagtatatgaaataataaaactgtaacagtaaatggttattagattgcttaccta

SEQ ID NO: 138498 - DNA, 120 bp, Artificial Sequence
  ENSG00000103647_0 (sequence is synthesized)
cgggccctctccctctctccctttcttcctgcctcgccttcctgcggcgaaggaggctcatctattataaatgcacattcggggctgacatcagcgacgagcggcgggcgagcgccgacg

SEQ ID NO: 138499 - DNA, 80 bp, Artificial Sequence
  ENSG00000103647_1 (sequence is synthesized)
catcagcgacgagcggcgggcgagcgccgacgagcggtccctgcgcgctgcccgcccggagcgcagcccccaggctcggc

SEQ ID NO: 138500 - DNA, 120 bp, Artificial Sequence
  ENSG00000103647_2 (sequence is synthesized)
gccgccgcccccgcacgccgcgcccgcgcccccgctccgccgcggagtttctgcatgactgtcacaaagatgtcctggcgtccgcaataccgtagctccaagttccggaatgtctacggg

SEQ ID NO: 138501 - DNA, 120 bp, Artificial Sequence
  ENSG00000103647_3 (sequence is synthesized)
aaggtggccaaccgggagcactgcttcgatgggatccccatcaccaagaatgtgcacgacaaccacttctgtgccgtcaacacccgcttcctggccatcgtcaccgagagcgcagggggc

SEQ ID NO: 138502 - DNA, 120 bp, Artificial Sequence
  ENSG00000103647_4 (sequence is synthesized)
ggctccttcctcgtcatccccctggagcagacaggcaggattgaacccaactaccccaaggtctgcggccaccagggcaatgtgctggatatcaaatggaaccccttcatcgacaacatc

SEQ ID NO: 138503 - DNA, 120 bp, Artificial Sequence
  ENSG00000103647_5 (sequence is synthesized)
attgcctcgtgctcggaggacacgtcggtgcggatctgggagatccccgagggcgggctgaagcggaacatgacggaggcgctcctggagctgcacgggcacagccggcgtgtggggctg

SEQ ID NO: 138504 - DNA, 120 bp, Artificial Sequence
  ENSG00000103647_6 (sequence is synthesized)
gtcgagtggcaccccaccaccaacaacatcctgttcagcgctggctacgactacaaggtcctcatctggaacctggatgtgggtgagccggtgaagatgattgactgccacacggatgtg

SEQ ID NO: 138505 - DNA, 120 bp, Artificial Sequence
  ENSG00000103647_7 (sequence is synthesized)
atcctctgcatgtccttcaacacggacggcagcctgctcaccaccacgtgcaaggacaagaagctgcgtgtgattgagccccgctctggccgtgttctgcaggaggccaactgcaaaaac

SEQ ID NO: 138506 - DNA, 120 bp, Artificial Sequence
  ENSG00000103647_8 (sequence is synthesized)
cacagagtgaaccgggtggtgttcctggggaacatgaagcggctcctcacgacaggggtctccaggtggaacacaagacagattgccctctgggaccaggaggacctctccatgcccctg

SEQ ID NO: 138507 - DNA, 120 bp, Artificial Sequence
  ENSG00000103647_9 (sequence is synthesized)
atcgaagaggaaattgatgggctctctggcctcctgttccccttctatgatgctgacacccacatgctctacctggctggaaagggtgatggaaacatccggtactacgagatcagcact

SEQ ID NO: 138508 - DNA, 120 bp, Artificial Sequence
  ENSG00000103647_10 (sequence is synthesized)
gagaagccctacctgagttacctcatggagttccgctccccagccccgcagaaaggcctaggggtcatgcccaagcacgggctggatgtgtcagcctgcgaggtgttccgcttctacaag

SEQ ID NO: 138509 - DNA, 120 bp, Artificial Sequence
  ENSG00000103647_11 (sequence is synthesized)
ctggtgactctcaagggcctgatcgagcccatctccatgatcgtgccccggaggtcagattcctaccaggaagacatttacccaatgacaccaggcacggagccagcactgaccccggat

SEQ ID NO: 138510 - DNA, 120 bp, Artificial Sequence
  ENSG00000103647_12 (sequence is synthesized)
gaatggctgggaggcatcaaccgagatcccgtgctgatgtctttgaaagaaggctataagaagtcctcaaaaatggtatttaaggctcccatcaaagaaaagaagagtgttgtggtcaac

SEQ ID NO: 138511 - DNA, 120 bp, Artificial Sequence
  ENSG00000103647_13 (sequence is synthesized)
ggaatagatttattagaaaatgtcccacccaggacagagaatgagctccttcgaatgttcttccggcagcaggatgagattcgacggttgaaagaggagctggcccagaaggacatccgc

SEQ ID NO: 138512 - DNA, 120 bp, Artificial Sequence
  ENSG00000103647_14 (sequence is synthesized)
tctctccgtcgtttctactcatcccttaacttctcccttaccagtgaccccagagacagagccaggacaggagtgggggccagcctgaggacccccgcctaccacctcgagaactggaag

SEQ ID NO: 138513 - DNA, 120 bp, Artificial Sequence
  ENSG00000103647_15 (sequence is synthesized)
ccaacctctaacctcctgacctcatgctaataaaagtccccagcttctggagaccccctgccggcagcccctttccctgccaccccaggagccaggcttcccctcagctgggtgaagact

SEQ ID NO: 138514 - DNA, 120 bp, Artificial Sequence
  ENSG00000103647_16 (sequence is synthesized)
acagactccctggggttggcaggggctccatctcagtggaccaggaagcaagaggggaagcgggatcccagctagacttagaacttggacttttcccctgtgaagggggctgccaggaca

SEQ ID NO: 138515 - DNA, 120 bp, Artificial Sequence
  ENSG00000103647_17 (sequence is synthesized)
tctcagcactcccgcctggagctctcagcatcactgaaggtaccacagtgtaagtgctggactgcaggctgcagtgatccctctttcgtcccaccccctcttccctcagcagccccggaa

SEQ ID NO: 138516 - DNA, 120 bp, Artificial Sequence
  ENSG00000103647_18 (sequence is synthesized)
gcctgcctcacccgacgaggacagcgagcggcccggctcctttctgtctcttcccttcccaccctcttgtcttcagggaattcagaggattgctctccaaggccataatgaccccttgcc

SEQ ID NO: 138517 - DNA, 120 bp, Artificial Sequence
  ENSG00000103647_19 (sequence is synthesized)
ttccccatgattctctacaaagctcttgcacacccttttcccattcaatttgtgagccaggcagggtagggattagtgtccccctttgacaaatgacagaactgagggttgcaatgggga

SEQ ID NO: 138518 - DNA, 120 bp, Artificial Sequence
  ENSG00000103647_20 (sequence is synthesized)
aatgacttataaagtcacccagcaggtcaacaatgggcccacgaccaagaccctgggtgttcagaccccaaggccagggcctttcccgctgcatcaagatgccaatccctttgtgggctt

SEQ ID NO: 138519 - DNA, 120 bp, Artificial Sequence
  ENSG00000103647_21 (sequence is synthesized)
caccagtgcccaagtctctatggagaatgagaactggaagccactgctaccgtctacccagcaccagtagtgccgatgtgccacactgcccagttgaggcccctcacgctctgtgcccct

SEQ ID NO: 138520 - DNA, 120 bp, Artificial Sequence
  ENSG00000103647_22 (sequence is synthesized)
agatccttcaggtccccaccctcagctgtcaccaccaccctccccaggggactccatctgagatgaggcctcgtcctcctggaagctgaggctgagaagggtggagcttggccctgggga

SEQ ID NO: 138521 - DNA, 120 bp, Artificial Sequence
  ENSG00000103647_23 (sequence is synthesized)
aggcagaccagggtctgatggcttctagggatgctctgcgtgtgtctcagcaccgctatctcagccactttcagccttatgcacgtagaatgaccacagccactcgcatccgtatagcac

SEQ ID NO: 138522 - DNA, 120 bp, Artificial Sequence
  ENSG00000103647_24 (sequence is synthesized)
tttaaagtttctgcagtcctttgacacataggatctcatggagcctcacgtctactcccttctgcagatgaggaaaccgagagaagtggcccaaggtcacgcaactctgagatgccacat

SEQ ID NO: 138523 - DNA, 120 bp, Artificial Sequence
  ENSG00000103647_25 (sequence is synthesized)
ttcatttgatcttgtacacattttcttttattccttcttttttcctcctttcatttcccactacgcacaaagagtttataaacactgttctcagaagagtcacagtttggggtgagatct

SEQ ID NO: 138524 - DNA, 120 bp, Artificial Sequence
  ENSG00000103647_26 (sequence is synthesized)
ggaaatcaagaaatgggtgtccactcttttctttcattagctaggatctactagatgcattatactccatacctgcttttcccatggccgccctacggaaaatcccatccacagaggcca

SEQ ID NO: 138525 - DNA, 120 bp, Artificial Sequence
  ENSG00000103647_27 (sequence is synthesized)
gggctacccaagcccctccaggtgagctgggcctttcctttatgaacctccatcctcccagccagctacagtagggcctcctcaccccgtaccccacagctagacagtgtcagcactcat

SEQ ID NO: 138526 - DNA, 120 bp, Artificial Sequence
  ENSG00000103647_28 (sequence is synthesized)
ctcctcctcccacatttctggagcttttttttttccttccccattgacctttgtggtcttctgtgattatttatgctgcctcccaaggatagaattgaaataaaatgttttcaacttatc

SEQ ID NO: 138527 - DNA, 120 bp, Artificial Sequence
  ENSG00000103647_29 (sequence is synthesized)
attcaaaccgcctgctgggtgccgtgggccattgtgcaagtcttccaggccgcggtcgaatgattctgacaagcgatgtcctggcgtccgcaataccgtagctccaagttccggaatgtc

SEQ ID NO: 138528 - DNA, 120 bp, Artificial Sequence
  ENSG00000103647_30 (sequence is synthesized)
acagattctgttgacctttagtaatgagggaggcagggctagagggtgactagcagccaggcctcccaggctcccaggcctctcagatgcctggaatttcggagctagaaggtagtcaga

SEQ ID NO: 138529 - DNA, 120 bp, Artificial Sequence
  ENSG00000103647_31 (sequence is synthesized)
ttcccgttatcttgactgctgcagcggggtctctgggatggtgatgtgagtgcctcctgcacccgtggcccccatgtggcataactccttgggcgctattcatccacacggcccatctgt

SEQ ID NO: 138530 - DNA, 120 bp, Artificial Sequence
  ENSG00000103647_32 (sequence is synthesized)
gcagggtacagccttcatggtcttagctggcagccctgacaacttggatgtgcaaagaagatacaagtttgtttcctctgaagcttgtctggtgtcatccaggagccccacctgatgtcc

SEQ ID NO: 138531 - DNA, 80 bp, Artificial Sequence
  ENSG00000103653_0 (sequence is synthesized)
gcaggcgcgctgccgcgggcggaggatccgggccgcgcttcctctcgccaggcctgcgagcttcctcccagcggagccct

SEQ ID NO: 138532 - DNA, 120 bp, Artificial Sequence
  ENSG00000103653_1 (sequence is synthesized)
cagccagcctctggccgccggagcccgcggggcgtggagcgcgaggagccccgcggccccgatcgagcgtccggggcggcccccggcagccagcgcgacgttccaaaatcgaacctcagt

SEQ ID NO: 138533 - DNA, 120 bp, Artificial Sequence
  ENSG00000103653_2 (sequence is synthesized)
acctcagtggcggcgctcggaagcggaactctgccggggccgcgccggctacattgtttcctccccccgactccctcccgcccccttcccccgcctttcttccctccgcgacccgggccg

SEQ ID NO: 138534 - DNA, 120 bp, Artificial Sequence
  ENSG00000103653_3 (sequence is synthesized)
tgcgtccgtccccctgcctctgcctggcggtccctcctcccctctccttgcacccatacctctttgtaccgcaccccctggggacccctgcgcccctcccctcccccctgaccgcatgga

SEQ ID NO: 138535 - DNA, 120 bp, Artificial Sequence
  ENSG00000103653_4 (sequence is synthesized)
ccgtcccgcaggccgctgatgccgcccgcggcgaggtggcccggaccgcagtgccccaagagagctctaatggtaccaagtgacaggttggctttactgtgactcggggacgccagagct

SEQ ID NO: 138536 - DNA, 120 bp, Artificial Sequence
  ENSG00000103653_5 (sequence is synthesized)
cctgagaagatgtcagcaatacaggccgcctggccatccggtacagaatgtattgccaagtacaacttccacggcactgccgagcaggacctgcccttctgcaaaggagacgtgctcacc

SEQ ID NO: 138537 - DNA, 120 bp, Artificial Sequence
  ENSG00000103653_6 (sequence is synthesized)
attgtggccgtcaccaaggaccccaactggtacaaagccaaaaacaaggtgggccgtgagggcatcatcccagccaactacgtccagaagcgggagggcgtgaaggcgggtaccaaactc

SEQ ID NO: 138538 - DNA, 120 bp, Artificial Sequence
  ENSG00000103653_7 (sequence is synthesized)
agcctcatgccttggttccacggcaagatcacacgggagcaggctgagcggcttctgtacccgccggagacaggcctgttcctggtgcgggagagcaccaactaccccggagactacacg

SEQ ID NO: 138539 - DNA, 120 bp, Artificial Sequence
  ENSG00000103653_8 (sequence is synthesized)
ctgtgcgtgagctgcgacggcaaggtggagcactaccgcatcatgtaccatgccagcaagctcagcatcgacgaggaggtgtactttgagaacctcatgcagctggtggagcactacacc

SEQ ID NO: 138540 - DNA, 120 bp, Artificial Sequence
  ENSG00000103653_9 (sequence is synthesized)
tcagacgcagatggactctgtacgcgcctcattaaaccaaaggtcatggagggcacagtggcggcccaggatgagttctaccgcagcggctgggccctgaacatgaaggagctgaagctg

SEQ ID NO: 138541 - DNA, 120 bp, Artificial Sequence
  ENSG00000103653_10 (sequence is synthesized)
ccatcgggaagggggagttcggagacgtgatgctgggcgattaccgagggaacaaagtcgccgtcaagtgcattaagaacgacgccactgcccaggccttcctggctgaagcctcagtca

SEQ ID NO: 138542 - DNA, 120 bp, Artificial Sequence
  ENSG00000103653_11 (sequence is synthesized)
tgacgcaactgcggcatagcaacctggtgcagctcctgggcgtgatcgtggaggagaagggcgggctctacatcgtcactgagtacatggccaaggggagccttgtggactacctgcggt

SEQ ID NO: 138543 - DNA, 120 bp, Artificial Sequence
  ENSG00000103653_12 (sequence is synthesized)
ctaggggtcggtcagtgctgggcggagactgtctcctcaagttctcgctagatgtctgcgaggccatggaatacctggagggcaacaatttcgtgcatcgagacctggctgcccgcaatg

SEQ ID NO: 138544 - DNA, 120 bp, Artificial Sequence
  ENSG00000103653_13 (sequence is synthesized)
tgctggtgtctgaggacaacgtggccaaggtcagcgactttggtctcaccaaggaggcgtccagcacccaggacacgggcaagctgccagtcaagtggacagcccctgaggccctgagag

SEQ ID NO: 138545 - DNA, 120 bp, Artificial Sequence
  ENSG00000103653_14 (sequence is synthesized)
agaagaaattctccactaagtctgacgtgtggagtttcggaatccttctctgggaaatctactcctttgggcgagtgccttatccaagaattcccctgaaggacgtcgtccctcgggtgg

SEQ ID NO: 138546 - DNA, 120 bp, Artificial Sequence
  ENSG00000103653_15 (sequence is synthesized)
agaagggctacaagatggatgcccccgacggctgcccgcccgcagtctatgaagtcatgaagaactgctggcacctggacgccgccatgcggccctccttcctacagctccgagagcagc

SEQ ID NO: 138547 - DNA, 120 bp, Artificial Sequence
  ENSG00000103653_16 (sequence is synthesized)
ttgagcacatcaaaacccacgagctgcacctgtgacggctggcctccgcctgggtcatgggcctgtggggactgaacctggaagatcatggacctggtgcccctgctcactgggcccgag

SEQ ID NO: 138548 - DNA, 120 bp, Artificial Sequence
  ENSG00000103653_17 (sequence is synthesized)
cctgaactgagccccagcgggctggcgggcctttttcctgcgtcccagcctgcacccctccggccccgtctctcttggacccacctgtggggcctggggagcccactgaggggccaggga

SEQ ID NO: 138549 - DNA, 120 bp, Artificial Sequence
  ENSG00000103653_18 (sequence is synthesized)
ggaaggaggccacggagcgggaggcagcgccccaccacgtcgggcttccctggcctcccgccactcgccttcttagagttttattcctttccttttttgagattttttttccgtgtgttt

SEQ ID NO: 138550 - DNA, 120 bp, Artificial Sequence
  ENSG00000103653_19 (sequence is synthesized)
attttttattatttttcaagataaggagaaagaaagtacccagcaaatgggcattttacaagaagtacgaatcttatttttcctgtcctgcccgtgagggtgggggggaccgggcccctc

SEQ ID NO: 138551 - DNA, 120 bp, Artificial Sequence
  ENSG00000103653_20 (sequence is synthesized)
tctagggacccctcgccccagcctcattccccattctgtgtcccatgtcccgtgtctcctcggtcgccccgtgtttgcgcttgaccatgttgcactgtttgcatgcgcccgaggcagacg

SEQ ID NO: 138552 - DNA, 120 bp, Artificial Sequence
  ENSG00000103653_21 (sequence is synthesized)
tctgtcaggggcttggatttcgtgtgccgctgccacccgcccacccgccttgtgagatggaattgtaataaaccacgccatgaggacaccgccgcccgcctcggcgcttcctccaccgag

SEQ ID NO: 138553 - DNA, 120 bp, Artificial Sequence
  ENSG00000103653_22 (sequence is synthesized)
attctgcagcccatcctgctggaggagtgtactgagctcccagtccaccctaaaccacaggccacaaccagtgaggttctcactggagcacggggatgtgtgagaggccttggaggcctc

SEQ ID NO: 138554 - DNA, 120 bp, Artificial Sequence
  ENSG00000103653_23 (sequence is synthesized)
ggcagccaacacagctggggacccaaggaattctccagagagaggggtctcatgaccccaccagggaggagccgtccaagagagttagcagctcccacttgcaagatgtctgtggcaagg

SEQ ID NO: 138555 - DNA, 120 bp, Artificial Sequence
  ENSG00000103653_24 (sequence is synthesized)
caggcactgttctggtgctgagagctcaactccagtcctcacagcagcccccagagccaaggagtatcaccagtccattgcacagatggggaagctgggttctagagtcacagccagcag

SEQ ID NO: 138556 - DNA, 120 bp, Artificial Sequence
  ENSG00000103653_25 (sequence is synthesized)
gtacaggcctggggaagtgggggagtctcaacaggaagggacccagggctcgttctccgggcagagcacctcacccaggctcacagaggccagctcagaggctgtgaccacgagggtgcg

SEQ ID NO: 138557 - DNA, 120 bp, Artificial Sequence
  ENSG00000103653_26 (sequence is synthesized)
ggatgagttctaccgcagcggctgggccctgaacatgaaggagctgaagctgctgcagaccatcgggaagggggagttcggaggtgagctgggccgggccccctgggggggttctgaggg

SEQ ID NO: 138558 - DNA, 120 bp, Artificial Sequence
  ENSG00000103653_27 (sequence is synthesized)
aaagtcgccgtcaagtgcattaagaacgacgccactgcccaggccttcctggctgaagcctcagtcatgacgtgagtgggggcggggtaggggggaggttggcctaggttaggagtgagg

SEQ ID NO: 138559 - DNA, 120 bp, Artificial Sequence
  ENSG00000103653_28 (sequence is synthesized)
ccgcaccccctggggacccctgcgcccctcccctcccccctgaccgcatggaccgtcccgcaggccgctgatgccgcccgcggcgaggtggcccggaccgcagtgccccaagagagtctt

SEQ ID NO: 138560 - DNA, 120 bp, Artificial Sequence
  ENSG00000103653_29 (sequence is synthesized)
cggcccaggatgagttctaccgcagtgagtgcaccccaccccagacctcttgcccacccacctcctcccacgcaggcttcctggcactgccccatccaggaacctccagagaaccccagt

SEQ ID NO: 138561 - DNA, 120 bp, Artificial Sequence
  ENSG00000103653_30 (sequence is synthesized)
gcctgatagtccagtcagcctctgtcatcccagccatgtccctagtggcctccaggccctcactggcccctccccacaggcggctgggccctgaacatgaaggagctgaagctgctgcag

SEQ ID NO: 138562 - DNA, 120 bp, Artificial Sequence
  ENSG00000103653_31 (sequence is synthesized)
tgccctctccccaggaccccaactggtacaaagccaaaaacaaggtgggccgtgagggcatcatcccagccaactacgtccagaagcgggagggcgtgaaggcgggtaccaaactcagcc

SEQ ID NO: 138563 - DNA, 120 bp, Artificial Sequence
  ENSG00000103653_32 (sequence is synthesized)
tcatgccgtgagtaccacgaggaggggttggggagggaaggggccttggtcctcctgaaggagcatcaggagcaagcagggaggccagagtgaggggcttgggtgttggggagggcctca

SEQ ID NO: 138564 - DNA, 120 bp, Artificial Sequence
  ENSG00000103653_33 (sequence is synthesized)
gaacagtagctggaaccaggcctggggctgacggtcaggtgtccattgtcccactagccccctttgctcctttctatcagtcctggaaggccccctgtggccttagggttggtggctccc

SEQ ID NO: 138565 - DNA, 120 bp, Artificial Sequence
  ENSG00000103653_34 (sequence is synthesized)
tctgcccctgggggtcctcagccctcatgctcctctacccagtaccgtcagcctgccaggactggagagaatggcccatgtgtcaaatcccagcgcaggacactcttggcacctgttcat

SEQ ID NO: 138566 - DNA, 120 bp, Artificial Sequence
  ENSG00000103657_0 (sequence is synthesized)
gtctttccctttgacaagtcgctgctgctgcagcaaaaataaaggacgcgaccgccgcagcctctgcggagccgggctcgggtcgccggagccgcgccccaccccgccagctccagagcc

SEQ ID NO: 138567 - DNA, 120 bp, Artificial Sequence
  ENSG00000103657_1 (sequence is synthesized)
acgactaatggctgaaggataaatcaacatggcaactatgattccaccagtgaagctgaaatggcttgaacacttgaacagctcctggattacagaggacagtgaatctattgctacaag

SEQ ID NO: 138568 - DNA, 120 bp, Artificial Sequence
  ENSG00000103657_2 (sequence is synthesized)
agagggagttgctgttctgtattctaaactggttagcaataaggaagtagtacctttgccccaacaagttttatgcctcaaaggaccacagttgccagactttgaacgtgagtctctttc

SEQ ID NO: 138569 - DNA, 120 bp, Artificial Sequence
  ENSG00000103657_3 (sequence is synthesized)
aagtgatgagcaggaccactatttggatgcccttcttagcagccagctagcattggcaaagatggtatgttcagattccccatttgccggggcacttagaaaacgactgcttgtactcca

SEQ ID NO: 138570 - DNA, 120 bp, Artificial Sequence
  ENSG00000103657_4 (sequence is synthesized)
gcgtgtcttttatgcactttctaataaataccatgacaaaggcaaggtgaagcagcagcagcattctccggagagcagttctggttcagcagatgtccattctgttagtgaacgcccccg

SEQ ID NO: 138571 - DNA, 120 bp, Artificial Sequence
  ENSG00000103657_5 (sequence is synthesized)
gtcaagcactgatgcacttatagaaatgggtgttcgaactggtctaagtttattatttgcgcttctaagacaaagttggatgatgcctgtgtcaggacctggtctcagtctttgcaacga

SEQ ID NO: 138572 - DNA, 120 bp, Artificial Sequence
  ENSG00000103657_6 (sequence is synthesized)
tgtcattcatactgcaattgaagttgtgagctctttgccaccattatcattagcaaatgaaagcaagattcctcctatgggcttggactgcttatcgcaagtaacaacatttcttaaagg

SEQ ID NO: 138573 - DNA, 120 bp, Artificial Sequence
  ENSG00000103657_7 (sequence is synthesized)
agtcactattcctaattctggggcagacactttaggtcgtagattagcttctgagttgctgcttggtttggcagctcaacgaggctcattgcgatatcttcttgaatggatagaaatggc

SEQ ID NO: 138574 - DNA, 120 bp, Artificial Sequence
  ENSG00000103657_8 (sequence is synthesized)
tttgggggcttcggcagttgtacacaccatggagaaaggcaaactactctcaagccaggaaggaatgatcagctttgactgctttatgaccatattaatgcagatgaggcgttctttggg

SEQ ID NO: 138575 - DNA, 120 bp, Artificial Sequence
  ENSG00000103657_9 (sequence is synthesized)
ttcatctgctgatcggagtcagtggagagaaccaaccagaacatcggatggcttgtgctccctttacgaggcagcattatgtctctttgaagaggtttgcagaatggcttctgattattc

SEQ ID NO: 138576 - DNA, 120 bp, Artificial Sequence
  ENSG00000103657_10 (sequence is synthesized)
gagaacatgtgctagcccagatagcattcagactggtgatgctcccattgtctccgaaacctgtgaggtttatgtttgggggagcaatagcagccatcagttggtagaaggtacacagga

SEQ ID NO: 138577 - DNA, 120 bp, Artificial Sequence
  ENSG00000103657_11 (sequence is synthesized)
gaaaatactgcaacccaaactggctcctagtttctctgatgcacagaccattgaagctggacagtactgcacttttgtcatttctacggatggctctgttagagcttgcgggaaaggcag

SEQ ID NO: 138578 - DNA, 120 bp, Artificial Sequence
  ENSG00000103657_12 (sequence is synthesized)
ctatgggagactgggccttggagactccaataatcagtcaactttaaaaaagttaacattcgagcctcacagatccattaaaaaggtttcatcttctaaaggatctgatggtcacacttt

SEQ ID NO: 138579 - DNA, 120 bp, Artificial Sequence
  ENSG00000103657_13 (sequence is synthesized)
agcctttacgacagaaggagaagtcttcagttggggagatggtgattatgggaaactggggcatggaaatagttcaacacagaaatatcccaagcttattcagggacctctacaaggaaa

SEQ ID NO: 138580 - DNA, 120 bp, Artificial Sequence
  ENSG00000103657_14 (sequence is synthesized)
ggtagttgtttgtgtgtcagctggatacagacatagtgctgctgtcacagaggatggggaattatacacatggggtgaaggagactttggaagattaggtcatggtgacagcaatagtcg

SEQ ID NO: 138581 - DNA, 120 bp, Artificial Sequence
  ENSG00000103657_15 (sequence is synthesized)
taacattccaacattagtaaaagacatcagcaatgtaggagaggtttcttgtggcagttcacatactattgctctgtctaaagatgggagaactgtatggtcttttggaggaggagacaa

SEQ ID NO: 138582 - DNA, 120 bp, Artificial Sequence
  ENSG00000103657_16 (sequence is synthesized)
tggtaaacttggtcatggtgataccaacagagtgtataaacctaaagttattgaagctttacaaggaatgttcattcgcaaagtttgtgctgggagccagtcttcacttgctttgacatc

SEQ ID NO: 138583 - DNA, 120 bp, Artificial Sequence
  ENSG00000103657_17 (sequence is synthesized)
aacagggcaggtctatgcttggggctgtggagcttgtctaggttgtggttcttcagaagctactgctttgagacccaagcttattgaagaactggctgccacaagaatagttgatgtttc

SEQ ID NO: 138584 - DNA, 120 bp, Artificial Sequence
  ENSG00000103657_18 (sequence is synthesized)
tattggagacagtcattgtttggctctttctcatgataatgaagtttatgcctggggcaataactcaatggggcaatgtggtcagggaaattccacaggtcctattactaaaccaaagaa

SEQ ID NO: 138585 - DNA, 120 bp, Artificial Sequence
  ENSG00000103657_19 (sequence is synthesized)
agtgagtggcttagatggcatagctattcagcagatttcggctggaacatcacatagtctggcatggactgctcttcctagggacagacaagttgttgcatggcaccgaccttattgtgt

SEQ ID NO: 138586 - DNA, 120 bp, Artificial Sequence
  ENSG00000103657_20 (sequence is synthesized)
agatcttgaagagagtaccttctcacacctgcgttcttttcttgagagatactgtgataaaataaacagtgagattcccccactccctttcccttcatcaagagaacaccacagttttct

SEQ ID NO: 138587 - DNA, 120 bp, Artificial Sequence
  ENSG00000103657_21 (sequence is synthesized)
caagctgtgcctgaagctactttcaaatcaccttgctcttgcacttgcgggaggggtagctaccagcattctcgggaggcaggcaggtccacttcgaaatttgctcttcagactgatgga

SEQ ID NO: 138588 - DNA, 120 bp, Artificial Sequence
  ENSG00000103657_22 (sequence is synthesized)
ctcaactgtcccagatgaaatccaagaggtggtaattgaaactttatcagtgggagcaaccatgctgttacctccattacgagaacggatggaattacttcattctcttttacctcaagg

SEQ ID NO: 138589 - DNA, 120 bp, Artificial Sequence
  ENSG00000103657_23 (sequence is synthesized)
acctgatagatgggaaagcttatctaaaggacagagaatgcaactggatatcatcctgacaagtttgcaagatcatacccacgtagcctccctacttggctatagttcaccctctgatgc

SEQ ID NO: 138590 - DNA, 120 bp, Artificial Sequence
  ENSG00000103657_24 (sequence is synthesized)
tgctgacctatcttctgtgtgtactggctacggaaatctgtcagatcaaccttacggcactcagagctgccatccagatacccacctggctgaaattttgatgaagaccctcttaagaaa

SEQ ID NO: 138591 - DNA, 120 bp, Artificial Sequence
  ENSG00000103657_25 (sequence is synthesized)
tttaggattttatacagatcaagcatttggagagctagaaaagaatagtgataaatttctacttggaacatcatcatcagaaaacagtcagcctgctcatcttcatgaactgctatgttc

SEQ ID NO: 138592 - DNA, 120 bp, Artificial Sequence
  ENSG00000103657_26 (sequence is synthesized)
actacagaaacagctgctggcattttgccatatcaataacattagtgagaactcaagcagtgtggcattgcttcataaacatcttcagcttttgttgcctcatgccacagatatttattc

SEQ ID NO: 138593 - DNA, 120 bp, Artificial Sequence
  ENSG00000103657_27 (sequence is synthesized)
acgttctgcaaatttgctcaaagaaagtccttggaatggcagtgttggagaaaaattaagagatgtgatatacgtctcagctgctggcagtatgctctgccagattgttaactccctgct

SEQ ID NO: 138594 - DNA, 120 bp, Artificial Sequence
  ENSG00000103657_28 (sequence is synthesized)
gttactccctgtgtcagtggctcggcctttattgagttacctcctcgacttgttgccacctcttgattgccttaatagactcctgccagctgctgatcttttagaagaccaggagttaca

SEQ ID NO: 138595 - DNA, 120 bp, Artificial Sequence
  ENSG00000103657_29 (sequence is synthesized)
gtggcctcttcatggagggccagaactaattgatcctgctggtctgccattacctcagccagctcagtcctgggtatggcttgtggatctagaaagaacaattgctctccttattgggcg

SEQ ID NO: 138596 - DNA, 120 bp, Artificial Sequence
  ENSG00000103657_30 (sequence is synthesized)
gtgtcttggtggcatgcttcagggctcccctgtgtctccagaggaacaggacactgcatattggatgaaaacgccactgttcagtgacggtgtagaaatggacactcctcaattggataa

SEQ ID NO: 138597 - DNA, 120 bp, Artificial Sequence
  ENSG00000103657_31 (sequence is synthesized)
atgtatgagttgcctgttagaagtagcactttctggaaatgaagaacagaagccttttgattataaattgcggcctgaaattgctgtctatgtagacttggcattgggttgttctaaaga

SEQ ID NO: 138598 - DNA, 120 bp, Artificial Sequence
  ENSG00000103657_32 (sequence is synthesized)
gcctgcccgaagcctttggatcagcatgcaggactatgctgttagtaaagattgggacagtgcaactttaagtaatgagtcactcttggacactgtgtctagatttgttcttgcagctct

SEQ ID NO: 138599 - DNA, 120 bp, Artificial Sequence
  ENSG00000103657_33 (sequence is synthesized)
tctgaaacacacaaatttacttagtcaagcatgtggagaaagccgatatcaacctggtaaacacttatcagaagtgtaccgttgtgtatacaaagttcgaagtcgtttacttgcttgcaa

SEQ ID NO: 138600 - DNA, 120 bp, Artificial Sequence
  ENSG00000103657_34 (sequence is synthesized)
gaaccttgaacttattcaaacaaggtcatcatcacgggacagatggatatcagaaaaccaggactctgcagatgttgatcctcaggagcattcatttactcgaactattgatgaagaagc

SEQ ID NO: 138601 - DNA, 120 bp, Artificial Sequence
  ENSG00000103657_35 (sequence is synthesized)
tgaaatggaagaacaggctgagagagaccgggaagaggggcatccggagccagaggatgaagaggaggaacgggaacatgaagtgatgacagctggcaaaatctttcagtgtttcctctc

SEQ ID NO: 138602 - DNA, 120 bp, Artificial Sequence
  ENSG00000103657_36 (sequence is synthesized)
agcccgtgaagtagctcgtagccgagaccgagatagaatgaacagtggggcagggtctggggctcgagctgatgatccacctcctcagtctcagcaagagcgaagggtcagcacagacct

SEQ ID NO: 138603 - DNA, 120 bp, Artificial Sequence
  ENSG00000103657_37 (sequence is synthesized)
tcctgagggtcaggatgtgtacactgctgcatgcaactccgtgatccatcggtgtgccctgttaatattaggagtaagtcctgtgatagatgagcttcagaagcgaagagaagaaggaca

SEQ ID NO: 138604 - DNA, 120 bp, Artificial Sequence
  ENSG00000103657_38 (sequence is synthesized)
gttgcagcaaccttcaacaagtgcctctgaagggggtggacttatgaccaggagtgaaagtcttactgcagagagccggctagtccacacaagcccaaattatagactgatcaaatcgag

SEQ ID NO: 138605 - DNA, 120 bp, Artificial Sequence
  ENSG00000103657_39 (sequence is synthesized)
gagtgaatctgatttgtctcagcctgaatcagatgaagagggttacgcactgagtggcagacgaaatgttgatttggatttggcagcatctcacagaaagagaggtcctatgcacagtca

SEQ ID NO: 138606 - DNA, 120 bp, Artificial Sequence
  ENSG00000103657_40 (sequence is synthesized)
attggaatccctgagtgactcttgggctcgcctgaaacatagcagagactggttatgcaactcctcctattcctttgagtcagattttgatcttaccaagtctttgggagttcacacttt

SEQ ID NO: 138607 - DNA, 120 bp, Artificial Sequence
  ENSG00000103657_41 (sequence is synthesized)
gattgaaaatgttgtaagctttgtgagtggagatgtggggaatgccccaggttttaaagagccagaggaaagtatgtctacaagtccccaggcctccatcattgcaatggaacagcagca

SEQ ID NO: 138608 - DNA, 120 bp, Artificial Sequence
  ENSG00000103657_42 (sequence is synthesized)
gttaagggcagaacttcgtttagaggcacttcatcagatcctcgttctattgtctgggatggaagaaaaaggtagcatctcactggcaggaagcagattgagttcaggcttccagtcctc

SEQ ID NO: 138609 - DNA, 120 bp, Artificial Sequence
  ENSG00000103657_43 (sequence is synthesized)
cacactactcacgtctgtgaggctgcagttcctagcagggtgttttggtttaggcactgttggacacacaggaggcaagggagagagtggccgattgcatcactatcaggatgggatcag

SEQ ID NO: 138610 - DNA, 120 bp, Artificial Sequence
  ENSG00000103657_44 (sequence is synthesized)
agcagctaagagaaatattcagattgaaatccaggtagctgtgcataaaatttatcaacagttgtctgctaccctggaaagagccctgcaagcaaacaagcatcacattgaagcccagca

SEQ ID NO: 138611 - DNA, 120 bp, Artificial Sequence
  ENSG00000103657_45 (sequence is synthesized)
acgtctgcttctggttacagtttttgccctaagtgttcattatcaaccagtagatgtttctttggcaatttccactggtctgctaaacgtattgtcacagttgtgtggtacagacaccat

SEQ ID NO: 138612 - DNA, 120 bp, Artificial Sequence
  ENSG00000103657_46 (sequence is synthesized)
gctaggacagcccctgcagttgttgccaaagacgggtgtttcccagcttagcacagctttgaaagtggccagtacaaggttgctccagattctagccatcactactgggacctatgctga

SEQ ID NO: 138613 - DNA, 120 bp, Artificial Sequence
  ENSG00000103657_47 (sequence is synthesized)
taaactgagtcccaaagtagttcaatccttgttggatctactctgtagtcagttgaagaatttattgtcccaaactggtgtactacatatggcctctttcggagaaggggagcaagaaga

SEQ ID NO: 138614 - DNA, 120 bp, Artificial Sequence
  ENSG00000103657_48 (sequence is synthesized)
cggtgaagaagaagaaaaaaaagttgactccagtggagaaactgagaagaaagatttcagagctgctcttaggaaacaacatgcagccgaactccatctaggggattttttagtttttct

SEQ ID NO: 138615 - DNA, 120 bp, Artificial Sequence
  ENSG00000103657_49 (sequence is synthesized)
tcgcagagttgtatcttcaaaagcaattcaatcaaaaatggcttccccaaagtggaccgaagtgcttctaaatatagcatctcagaaatgttcttcaggtatccctctggttggtaactt

SEQ ID NO: 138616 - DNA, 120 bp, Artificial Sequence
  ENSG00000103657_50 (sequence is synthesized)
aagaacaaggctccttgcacttcatgtccttgaagctgtgctgccagcttgtgaatctggtgtagaagatgatcaaatggcccagattgttgagcgcttattttcccttctctctgattg

SEQ ID NO: 138617 - DNA, 120 bp, Artificial Sequence
  ENSG00000103657_51 (sequence is synthesized)
tatgtgggagacacccattgctcaggccaaacatgctattcagataaaggaaaaagaacaagaaataaaactacagaagcagggcgagttggaagaagaagatgagaatcttcctatcca

SEQ ID NO: 138618 - DNA, 120 bp, Artificial Sequence
  ENSG00000103657_52 (sequence is synthesized)
agaagtatcctttgacccggagaaagctcagtgttgcctagtggagaatggacagattttaactcacggcagtggagggaaaggatatggattggcatctacaggagtaacttctgggtg

SEQ ID NO: 138619 - DNA, 120 bp, Artificial Sequence
  ENSG00000103657_53 (sequence is synthesized)
ctatcagtggaagttttatattgtgaaggaaaacagaggtaatgaaggcacgtgtgttggagtttctcgctggccagtacatgactttaatcaccgcactacctcggatatgtggctcta

SEQ ID NO: 138620 - DNA, 120 bp, Artificial Sequence
  ENSG00000103657_54 (sequence is synthesized)
tagggcctacagtggtaacctctatcacaatggagaacagactctcacattgtccagctttactcaaggagatttcattacctgtgtgttagacatggaagccaggaccatttcttttgg

SEQ ID NO: 138621 - DNA, 120 bp, Artificial Sequence
  ENSG00000103657_55 (sequence is synthesized)
gaaaaatggagaggaacccaaattagcttttgaagatgtggatgcagcagagttgtacccatgtgtgatgttctatagtagcaatccaggggaaaaggtgaaaatttgtgatatgcagat

SEQ ID NO: 138622 - DNA, 120 bp, Artificial Sequence
  ENSG00000103657_56 (sequence is synthesized)
gcgtggcacaccccgagacttacttccaggagaccctatttgtagtccagtagcagcagtgctggctgaggccactattcagctcatccgtatccttcaccgaacagaccgttggactta

SEQ ID NO: 138623 - DNA, 120 bp, Artificial Sequence
  ENSG00000103657_57 (sequence is synthesized)
ctgcattaacaaaaaaatgatggaaaggcttcacaaaattaagatatgtattaaagagtcaggtcagaagctaaagaaaagccgctcggttcagagccgagaggaaaatgaaatgagaga

SEQ ID NO: 138624 - DNA, 120 bp, Artificial Sequence
  ENSG00000103657_58 (sequence is synthesized)
ggagaaggagagcaaagaggaagagaaaggtaaacatactaggcatggcctcgctgacctctcagagctgcagctgaggactctttgcatagaggtgtggcccgtgctggctgtgatagg

SEQ ID NO: 138625 - DNA, 120 bp, Artificial Sequence
  ENSG00000103657_59 (sequence is synthesized)
aggagttgatgctggtcttagagttggaggtcggtgtgttcacaagcaaactgggcgccatgccacgctgctgggagtggtcaaagagggcagcacgtctgccaaggtccaatgggatga

SEQ ID NO: 138626 - DNA, 120 bp, Artificial Sequence
  ENSG00000103657_60 (sequence is synthesized)
agcagaaattactatcagcttcccaactttttggtcgcctagtgatactccattgtataatctggaaccctgtgaaccattgccgtttgatgtggcgcgattccgaggcctgacggcttc

SEQ ID NO: 138627 - DNA, 120 bp, Artificial Sequence
  ENSG00000103657_61 (sequence is synthesized)
tgtgctgctggacctaacatatctcactggcgttcatgaagacatgggcaaacagagcaccaaacgacatgaaaagaaacaccgacatgaatccgaggagaaaggggatgttgagcagaa

SEQ ID NO: 138628 - DNA, 120 bp, Artificial Sequence
  ENSG00000103657_62 (sequence is synthesized)
acctgagagtgaatccgctttagatatgcgaacaggcctaacatctgatgacgtcaaaagtcagagtaccacaagctccaaatcagaaaatgaaatcgcttcattttctttagatccaac

SEQ ID NO: 138629 - DNA, 120 bp, Artificial Sequence
  ENSG00000103657_63 (sequence is synthesized)
atgtagcccagtcagaaatcagagcagtccagctgtcctatctttacctcggtgctatgaagtcacttagtgcccttcttggctgtagtaaatatgctgagctgttgctgataccaaaag

SEQ ID NO: 138630 - DNA, 120 bp, Artificial Sequence
  ENSG00000103657_64 (sequence is synthesized)
ttctggctgaaaatggccacaactcagactgtgcaagttctccagttgttcatgaagacgtggagatgcgagcagccctgcagttcttgatgcgacacatggtgaagcgagcagtcatgc

SEQ ID NO: 138631 - DNA, 120 bp, Artificial Sequence
  ENSG00000103657_65 (sequence is synthesized)
ggtcacccataaagagagcattgggattagctgatctggaacgagcgcaagccatgatctataaattagtggttcatgggcttttggaagaccagtttgggggcaaaattaagcaagaga

SEQ ID NO: 138632 - DNA, 120 bp, Artificial Sequence
  ENSG00000103657_66 (sequence is synthesized)
ttgatcaacaagctgaagaaagtgaccctgcccagcaggcacagacaccagttactactagcccatcagcctcaagcacgacctcctttatgagcagctctctggaggacaccacaactg

SEQ ID NO: 138633 - DNA, 120 bp, Artificial Sequence
  ENSG00000103657_67 (sequence is synthesized)
ccaccactccagtcactgacacagaaacagtgcctgcatccgagtccccgggagtgatgcctcttagtcttctcaggcaaatgttctctagttacccaactaccactgtacttcccacac

SEQ ID NO: 138634 - DNA, 120 bp, Artificial Sequence
  ENSG00000103657_68 (sequence is synthesized)
gtcgggcacagactcctccaatatcttcgttaccaacctctccttctgatgaagtaggaaggaggcaaagtttaacttctcctgattcccagtcagcaaggccagctaaccgcacagcct

SEQ ID NO: 138635 - DNA, 120 bp, Artificial Sequence
  ENSG00000103657_69 (sequence is synthesized)
tgtcagacccaagcagtagactttcaacttctcctcctcctccagcaattgcagttcccttgctggaaatggggttctctcttcggcagattgccaaagccatggaagctacaggtgcta

SEQ ID NO: 138636 - DNA, 120 bp, Artificial Sequence
  ENSG00000103657_70 (sequence is synthesized)
ggggagaggctgatgcccagaatatcactgtccttgccatgtggatgatagagcaccctgggcatgaggatgaagaggagccccagtcgggcagcacagcagactctaggcctggagcag

SEQ ID NO: 138637 - DNA, 120 bp, Artificial Sequence
  ENSG00000103657_71 (sequence is synthesized)
ccgttctaggcagtggcgggaagtcaaatgatccctgttatttgcagtcacctggagacataccatcagctgatgctgctgaaatggaggaaggttttagtgaaagccctgataatttgg

SEQ ID NO: 138638 - DNA, 120 bp, Artificial Sequence
  ENSG00000103657_72 (sequence is synthesized)
atcatacagagaatgcagcttctggaagtggaccatcagctagaggtcgctcagcggtaacaagaagacacaagtttgacttagctgctcgcacactgctagcaagagcagcgggattat

SEQ ID NO: 138639 - DNA, 120 bp, Artificial Sequence
  ENSG00000103657_73 (sequence is synthesized)
accgctctgtgcaggcccacaggaatcaaagtcggagagaaggaatatctttgcagcaagacccaggggcgttgtatgactttaatttagatgaggaattggaaattgatcttgatgatg

SEQ ID NO: 138640 - DNA, 120 bp, Artificial Sequence
  ENSG00000103657_74 (sequence is synthesized)
aggcgatggaagctatgtttggacaagacctgaccagtgacaatgatattctgggaatgtggatcccagaggtactggattggcctacctggcatgtttgtgagtctgaagacagggaag

SEQ ID NO: 138641 - DNA, 120 bp, Artificial Sequence
  ENSG00000103657_75 (sequence is synthesized)
aagtggtggtgtgtgaactgtgtgaatgcagcgtcgtcagcttcaatcagcacatgaagagaaaccatccaggctgtgggcgcagtgcaaaccgccagggctatcgcagcaatggttcct

SEQ ID NO: 138642 - DNA, 120 bp, Artificial Sequence
  ENSG00000103657_76 (sequence is synthesized)
atgtggatggctggtttggcggtgaatgtgggagtggaaatccgtactacctgttatgtggcacctgcagggagaagtacttagccatgaagaccaaatctaagtcaacaagttctgaaa

SEQ ID NO: 138643 - DNA, 120 bp, Artificial Sequence
  ENSG00000103657_77 (sequence is synthesized)
ggtacaagggacaagctccagatctaattggcaagcaagacagtgtgtatgaagaagactgggacatgttggatgttgatgaagatgaaaagctaactggtgaagaagaatttgaattac

SEQ ID NO: 138644 - DNA, 120 bp, Artificial Sequence
  ENSG00000103657_78 (sequence is synthesized)
ttgctggaccgcttggtttaaatgaccggcgcattgtaccagaaccagttcagttccctgacagcgatccactgggagcatcagtagcaatggtcacagccaccaacagtatggaagaga

SEQ ID NO: 138645 - DNA, 120 bp, Artificial Sequence
  ENSG00000103657_79 (sequence is synthesized)
ctctgatgcaaataggttgccatggctccgtagaaaagagctcctctgggagaataacgttaggagagcaggcagctgccctagcaaaccctcatgaccgtgtggtggctttaaggagag

SEQ ID NO: 138646 - DNA, 120 bp, Artificial Sequence
  ENSG00000103657_80 (sequence is synthesized)
tgactgctgctgctcaggttcttctggccagaaccatggtcatgagagcgctgtctcttctctcagtcagtggttccagttgtagcctggctgctggtcttgagtctctggggctaacag

SEQ ID NO: 138647 - DNA, 120 bp, Artificial Sequence
  ENSG00000103657_81 (sequence is synthesized)
atatccgaacgctagttcgattaatgtgcttggcagcagcagggagagctggcctctccaccagcccttctgccatggctagcacctcagaacgatcacgaggtgggcatagcaaggcta

SEQ ID NO: 138648 - DNA, 120 bp, Artificial Sequence
  ENSG00000103657_82 (sequence is synthesized)
acaagcctatctcttgcctggcctatttgagcacagcagtgggatgtctggcatcaaatgctcctagtgctgccaaactgcttgtacagttgtgtacacagaacttgatttctgctgcaa

SEQ ID NO: 138649 - DNA, 120 bp, Artificial Sequence
  ENSG00000103657_83 (sequence is synthesized)
caggtgtaaatctaaccacagttgatgactcaattcagcgaaagtttctacccagctttctccgaggaattgctgaagagaacaagcttgtgacctccccaaactttgttgtaacacagg

SEQ ID NO: 138650 - DNA, 120 bp, Artificial Sequence
  ENSG00000103657_84 (sequence is synthesized)
cccttgtggcattgctagcagacaaaggggccaaactaagacctaactatgataagtcagaagttgaaaagaaaggccctctggagttggctaatgccctggcagcctgctgcctctcct

SEQ ID NO: 138651 - DNA, 120 bp, Artificial Sequence
  ENSG00000103657_85 (sequence is synthesized)
ccaggctgtcctcacagcatcggcaatgggcagctcagcaactcgtgcgcactcttgctgcacacgaccgtgacaaccaaactactctgcagacacttgctgatatgggaggagatctta

SEQ ID NO: 138652 - DNA, 120 bp, Artificial Sequence
  ENSG00000103657_86 (sequence is synthesized)
gaaaatgctcctttatcaaattggaggctcatcagaacagagtaatgacatgtgtttggtgtaataaaaaaggtcttttggctacaagtggcaatgatggcaccatccgcgtatggaatg

SEQ ID NO: 138653 - DNA, 120 bp, Artificial Sequence
  ENSG00000103657_87 (sequence is synthesized)
ttaccaagaagcaatattcactgcaacagacctgtgtgttcaacagattggaaggggatgctgaggaaagcctgggatcacccagtgatccaagtttctcaccagtttcctggagtatca

SEQ ID NO: 138654 - DNA, 120 bp, Artificial Sequence
  ENSG00000103657_88 (sequence is synthesized)
gtggcaaatatctagcaggcgctttggaaaagatggtgaatatctggcaagttaatggaggaaaaggattagtagatattcagcctcattgggtatctgccctggcttggccagaagagg

SEQ ID NO: 138655 - DNA, 120 bp, Artificial Sequence
  ENSG00000103657_89 (sequence is synthesized)
gtccggctacagcctggtcaggagagtctccagaattgttgttggtgggacggatggatggatctctgggactgattgaagttgttgatgtgtccaccatgcaccgtcgagaattggagc

SEQ ID NO: 138656 - DNA, 120 bp, Artificial Sequence
  ENSG00000103657_90 (sequence is synthesized)
attgctatcgaaaggatgtgtctgttacttgcattgcatggttcagtgaagacagaccatttgcagtgggatattttgatggaaaactgttactgggaacaaaggaaccacttgagaaag

SEQ ID NO: 138657 - DNA, 120 bp, Artificial Sequence
  ENSG00000103657_91 (sequence is synthesized)
gaggcattgttctaattgatgcacataaggatactcttattagcatgaagtgggaccctacaggtcatattcttatgacatgtgccaaagaagacagtgtgaaactctggggctctattt

SEQ ID NO: 138658 - DNA, 120 bp, Artificial Sequence
  ENSG00000103657_92 (sequence is synthesized)
cgggatgctggtgctgtctacattcactctgccatccatctattgtaaatggcattgcttggtgccgccttccagggaaaggatccaagttgcagttactgatggctactggctgtcaga

SEQ ID NO: 138659 - DNA, 120 bp, Artificial Sequence
  ENSG00000103657_93 (sequence is synthesized)
gtggcttagtatgtgtttggcgcattcctcaagatactacacagaccaatgtgactagtgcagaaggatggtgggagcaggaatcaaattgccaggatggatataggaaatcatcaggag

SEQ ID NO: 138660 - DNA, 120 bp, Artificial Sequence
  ENSG00000103657_94 (sequence is synthesized)
ccaagtgtgtttatcagctgcggggacacatcactcctgttcggactgttgcctttagttctgatgggttggccctggtgtctggtggactaggtgggctcatgaacatttggtctttaa

SEQ ID NO: 138661 - DNA, 120 bp, Artificial Sequence
  ENSG00000103657_95 (sequence is synthesized)
gggatggctctgtcttgcaaactgttgtgataggctctggagctattcagaccacagtatggattccagaagttggagtagctgcttgctcaaatagatcaaaggatgttttggtcgtga

SEQ ID NO: 138662 - DNA, 120 bp, Artificial Sequence
  ENSG00000103657_96 (sequence is synthesized)
attgtacagcagaatgggcagctgccaatcatgttttggcaacctgtaggacagcattgaaacagcagggtgttctgggattgaacatggctccctgcatgagagcatttttggagcggc

SEQ ID NO: 138663 - DNA, 120 bp, Artificial Sequence
  ENSG00000103657_97 (sequence is synthesized)
tccccatgatgcttcaggagcagtatgcctatgaaaagcctcatgtggtttgtggtgaccaacttgttcatagcccctatatgcaatgcttggcttcccttgctgtgggacttcatctgg

SEQ ID NO: 138664 - DNA, 120 bp, Artificial Sequence
  ENSG00000103657_98 (sequence is synthesized)
atcagctgttgtgtaaccctccagtgccaccacaccaccagaactgtctccctgaccctgcatcctggaatccaaatgaatgggcctggttagaatgtttctcaaccactataaaagctg

SEQ ID NO: 138665 - DNA, 120 bp, Artificial Sequence
  ENSG00000103657_99 (sequence is synthesized)
ccgaagccctgaccaatggagcccagtttccagaatcttttaccgttccagatctagaacctgttccagaggatgaacttgtatttctaatggataacagtaaatggattaacggcatgg

SEQ ID NO: 138666 - DNA, 120 bp, Artificial Sequence
  ENSG00000103657_100 (sequence is synthesized)
atgaacaaattatgtcttgggcaacttccagacctgaggactggcacctgggaggtaaatgtgatgtctacttatggggtgctggtaggcatggacagctggcagaagctggaagaaatg

SEQ ID NO: 138667 - DNA, 120 bp, Artificial Sequence
  ENSG00000103657_101 (sequence is synthesized)
taatggtacctgcagcagctccctcattctcacaggcccaacaggtcatttgtggtcagaattgtacctttgtcatccaggccaatggcacagtgttggcttgtggggaaggaagttatg

SEQ ID NO: 138668 - DNA, 120 bp, Artificial Sequence
  ENSG00000103657_102 (sequence is synthesized)
gcagattaggacaaggaaattcagatgaccttcatgtgctgacagttatttcagccttacaaggctttgtggtgacccagctggtgacttcctgtggttctgatgggcactctatggccc

SEQ ID NO: 138669 - DNA, 120 bp, Artificial Sequence
  ENSG00000103657_103 (sequence is synthesized)
taactgaaagtggtgaggtctttagctggggagatggtgactatggtaaacttggccatgggaacagcgacaggcagcggcggcccaggcagatcgaggccttacaaggagaagaagtgg

SEQ ID NO: 138670 - DNA, 120 bp, Artificial Sequence
  ENSG00000103657_104 (sequence is synthesized)
tgcagatgtcttgtggcttcaagcactcagcagtggtcacttcagatggcaaactgttcacctttgggaatggtgactatggtcgtctgggtcttggaaatacctctaacaaaaaacttc

SEQ ID NO: 138671 - DNA, 120 bp, Artificial Sequence
  ENSG00000103657_105 (sequence is synthesized)
cagagagagtgactgcactggagggatatcagattggacaggtggcctgtggattaaaccacactttggcagtgtcagcagatggttccatggtgtgggcttttggagatggagactatg

SEQ ID NO: 138672 - DNA, 120 bp, Artificial Sequence
  ENSG00000103657_106 (sequence is synthesized)
gaaaactaggcttaggaaattccactgcaaaatcttcacctcagaaaattgacgtcctttgtggaattggaataaaaaaggttgcttgtggaactcagttttctgttgctttgaccaaag

SEQ ID NO: 138673 - DNA, 120 bp, Artificial Sequence
  ENSG00000103657_107 (sequence is synthesized)
atggtcatgtgtatacctttggtcaagatcgcctgataggcttgccagaggggcgtgctcgcaatcacaatcgaccgcaacaaatccctgtcctggctggagtaatcatagaagatgtgg

SEQ ID NO: 138674 - DNA, 120 bp, Artificial Sequence
  ENSG00000103657_108 (sequence is synthesized)
cagttggagctgaacacacacttgctttggcatcaaatggagatgtgtatgcctgggggagcaattcagaagggcagctcggcttaggccataccaaccatgttcgagaaccaaccctgg

SEQ ID NO: 138675 - DNA, 120 bp, Artificial Sequence
  ENSG00000103657_109 (sequence is synthesized)
taacaggtctgcaagggaaaaatgttcggcagatctcggctggccgctgccacagtgctgcatggacagcaccacctgtcccaccaagagcaccaggtgtgtcagtacctctgcagctgg

SEQ ID NO: 138676 - DNA, 120 bp, Artificial Sequence
  ENSG00000103657_110 (sequence is synthesized)
gcctgcctgacacagtgcccccccagtatggggcgctgagagaagtcagcattcacacggtgcgggccaggctccggctgctctaccacttctctgacctcatgtactcatcctggagac

SEQ ID NO: 138677 - DNA, 120 bp, Artificial Sequence
  ENSG00000103657_111 (sequence is synthesized)
tgctgaaccttagccccaacaaccagaacagcacatcccattataatgctggaacttggggcattgtacagggacaacttcggcctttgttagccccaagagtctacactctgccaatgg

SEQ ID NO: 138678 - DNA, 120 bp, Artificial Sequence
  ENSG00000103657_112 (sequence is synthesized)
tgcgctccataggaaaaaccatggttcaaggcaaaaactatggacctcagataactgtaaagaggatatcaaccagaggacggaagtgtaagcctatttttgtccaaatagcgagacaag

SEQ ID NO: 138679 - DNA, 120 bp, Artificial Sequence
  ENSG00000103657_113 (sequence is synthesized)
tagttaagctgaatgcttcagacctccgcctgccttcccgagcgtggaaggttaagctggttggagaaggggctgatgatgctggaggagtgtttgatgacaccatcacagagatgtgcc

SEQ ID NO: 138680 - DNA, 120 bp, Artificial Sequence
  ENSG00000103657_114 (sequence is synthesized)
aggaacttgaaactggtattgttgaccttcttataccctctcccaatgccaccgcagaagtgggttacaatagggacaggttcctttttaacccttctgcctgcctcgatgaacacttaa

SEQ ID NO: 138681 - DNA, 120 bp, Artificial Sequence
  ENSG00000103657_115 (sequence is synthesized)
tgcagtttaagtttttaggaattttaatgggggttgccattcgcacaaagaagcctctggacctccacttggcccctctggtgtggaagcagctgtgctgtgtcccactcaccctagagg

SEQ ID NO: 138682 - DNA, 120 bp, Artificial Sequence
  ENSG00000103657_116 (sequence is synthesized)
acctggaggaggtggatctgctctacgtgcagactctcaacagcattcttcacattgaagacagtgggattaccgaggagagtttccatgagatgattcctcttgattcttttgttggcc

SEQ ID NO: 138683 - DNA, 120 bp, Artificial Sequence
  ENSG00000103657_117 (sequence is synthesized)
agagtgctgatggcaaaatggttcctataatccctggtggaaatagtatcccactcacattttccaacaggaaggaatatgtggagagggccattgaatatcgacttcatgagatggaca

SEQ ID NO: 138684 - DNA, 120 bp, Artificial Sequence
  ENSG00000103657_118 (sequence is synthesized)
gacaggtggctgcagtccgagaagggatgtcctggattgttcctgtgccgctgctgtccctcctcacagcaaaacaactggagcagatggtgtgtgggatgcccgagatctctgtggaag

SEQ ID NO: 138685 - DNA, 120 bp, Artificial Sequence
  ENSG00000103657_119 (sequence is synthesized)
tcttgaagaaagtggtgcggtaccgtgaggtggatgagcagcatcagctggtgcagtggttctggcacacgctggaagagttctccaatgaggagcgggtgcttttcatgaggtttgtgt

SEQ ID NO: 138686 - DNA, 120 bp, Artificial Sequence
  ENSG00000103657_120 (sequence is synthesized)
caggaagatctcgactaccagccaacactgctgacatttctcagagatttcaaatcatgaaggttgataggccttacgacagtctgcctacctcacagacctgcttcttccagctgaggc

SEQ ID NO: 138687 - DNA, 120 bp, Artificial Sequence
  ENSG00000103657_121 (sequence is synthesized)
tgcccccgtactccagccagctggtcatggccgagcgcctgcgctatgccatcaacaactgccgctcaatcgacatggacaactacatgctctcgagaaacgtggacaacgccgagggct

SEQ ID NO: 138688 - DNA, 120 bp, Artificial Sequence
  ENSG00000103657_122 (sequence is synthesized)
ccgacactgactactgaccgtgcgggtgctctcaccctcccttctctccctcaataatgctcacttctgatttgatgttgatatacttttatggtaactacatagatgttataagaacat

SEQ ID NO: 138689 - DNA, 120 bp, Artificial Sequence
  ENSG00000103657_123 (sequence is synthesized)
aaaccaacattataaacaatggccacatttagttactctaaatgtaacaaagaaattagatgtttttatttttctgtgattgtacaaaaacaacaaaaacgaagtgctctcagtcaggtt

SEQ ID NO: 138690 - DNA, 120 bp, Artificial Sequence
  ENSG00000103657_124 (sequence is synthesized)
tttccctccatatttttggtcacttttgataagtttgcatgaaaccattttggtgcatttttagttgggaatggtacatttttgtaaatccacccagtgaacatgaaattgtacattgtg

SEQ ID NO: 138691 - DNA, 120 bp, Artificial Sequence
  ENSG00000103657_125 (sequence is synthesized)
tataattgttcattagaaaggacagttttacatgaatattcatatatttattttgttttaatttgaattgcctgttcagggttccttatgcagagaaataaagcagattcaggaattgga

SEQ ID NO: 138692 - DNA, 120 bp, Artificial Sequence
  ENSG00000103657_126 (sequence is synthesized)
caaaaataaaggacgcgaccgccgcagcctctgcggagccgggctcgggtcgccggagccgcgccccaccccgccagctccagagccacgtacgaaatggggtttcaccgtgttagccag

SEQ ID NO: 138693 - DNA, 120 bp, Artificial Sequence
  ENSG00000103657_127 (sequence is synthesized)
cctttggtcaaggtggtgagtagtcactatgacctcctttcagtatagataattttccacttctctttcatgtgctttattataaagacaaactcccctccccattaagaccccttatgc

SEQ ID NO: 138694 - DNA, 120 bp, Artificial Sequence
  ENSG00000103657_128 (sequence is synthesized)
tgctgccacaaatactgccttgaccatcagagctcctctgtgtcctgcctcattcttcatcccttctagggactggggctgcagatcttaggaactggaggaattcataggcactctggg

SEQ ID NO: 138695 - DNA, 120 bp, Artificial Sequence
  ENSG00000103657_129 (sequence is synthesized)
ttcaaatcttgagtagatcgcctgataggcttgccagaggggcgtgctcgcaatcacaatcgaccgcaacaaatccctgtcctggctggagtaatcatagaagatgtggcagttggagct

SEQ ID NO: 138696 - DNA, 120 bp, Artificial Sequence
  ENSG00000103657_130 (sequence is synthesized)
tatgtttttctgcaagctgtgagagctagctctaaattggtttatgtgagaaaaaaatgtgccttggttattgcatatgttcaatacatgttgagtagttcttttcctagcagaaaaaaa

SEQ ID NO: 138697 - DNA, 120 bp, Artificial Sequence
  ENSG00000103657_131 (sequence is synthesized)
aaagttcaaataaatacatttttaggcaacatgctaaaatgaaatatcttcttctgtttgaagtagagtatctgagaaggaaccaggttttctaacctggcatatgtgacccagataaat

SEQ ID NO: 138698 - DNA, 120 bp, Artificial Sequence
  ENSG00000103657_132 (sequence is synthesized)
cttagtggagcctctgttctttgtattaaactgactttctaaaatgttttagcatttagcttcccttaaaccttttctaaaacattatggatagtcggggaaagctgaactagatcttga

SEQ ID NO: 138699 - DNA, 120 bp, Artificial Sequence
  ENSG00000103657_133 (sequence is synthesized)
tggagccagtgatatgaactaagaaggcaagagggtgatcaaaaaggagggtaaagagaacacttaggtatggaaaatattctgagagagttaggtgtttctgagaaacagtgtgaagtc

SEQ ID NO: 138700 - DNA, 120 bp, Artificial Sequence
  ENSG00000103657_134 (sequence is synthesized)
aattcagatgaccttcatgtgctgacagttatttcagccttacaagactttaaaggacatcttcatcagagttctttgtgacttggagagagaacacctttggagaaaccactgtacaag

SEQ ID NO: 138701 - DNA, 120 bp, Artificial Sequence
  ENSG00000103657_135 (sequence is synthesized)
cccccggcttgctcattaactgaactcataatgactctgaagcctacaaagagagcaccgacggtttttttaggctttgtggtgacccagctggtgacttcctgtggttctgatgggcac

SEQ ID NO: 138702 - DNA, 120 bp, Artificial Sequence
  ENSG00000103657_136 (sequence is synthesized)
ctgcggagccgggctcgggtcgccggagccgcgccccaccccgccagctccagagccacgtacgatggagtctccctctgtcgccaggctggagtgcagtcttgtgatctcggctcactg

SEQ ID NO: 138703 - DNA, 63 bp, Artificial Sequence
  ENSG00000103657_137 (sequence is synthesized)
ggttcgtactggctaatttttgtatttttattaaagacggggtttcaccatgttggcaaggat

SEQ ID NO: 138704 - DNA, 120 bp, Artificial Sequence
  ENSG00000103657_138 (sequence is synthesized)
gcctgaataatatcatcttaaacttttgggacttgccttaccagtcatcagaacatttatacatttataagcctattgtaatcaagtcactgttgtaagaatagacaagtggaccagaat

SEQ ID NO: 138705 - DNA, 120 bp, Artificial Sequence
  ENSG00000103657_139 (sequence is synthesized)
agagaatccagaaatagatcctgttagtggaaaagactaatggctgaaggataaatcaacatggcaactatgattccaccagtgaagctgaaatggcttgaacacttgaacagctcctgg

SEQ ID NO: 138706 - DNA, 120 bp, Artificial Sequence
  ENSG00000103671_0 (sequence is synthesized)
gcagctcagctggttccggctggggaagatggcggtggctggggcggtgtccggggagccgctggtgcactggtgcacccagcagttgcggaagactttcggcctggatgtcagcgagga

SEQ ID NO: 138707 - DNA, 120 bp, Artificial Sequence
  ENSG00000103671_1 (sequence is synthesized)
gatcattcagtacgttttgtcaattgagagtgctgaagagatacgagaatatgttactgatctcctccagggaaatgaaggcaaaaaaggtcaattcatagaagaacttataaccaaatg

SEQ ID NO: 138708 - DNA, 120 bp, Artificial Sequence
  ENSG00000103671_2 (sequence is synthesized)
gcaaaagaatgatcaggagttgatttcggatcctttgcagcagtgcttcaaaaaagatgaaattttagatgggcagaaatcaggcgaccatctaaagcggggtaggaagaaagggagaaa

SEQ ID NO: 138709 - DNA, 120 bp, Artificial Sequence
  ENSG00000103671_3 (sequence is synthesized)
cagacaggaagttcctgcatttactgaacctgacacgactgcagaggttaaaacaccttttgatttggccaaggcacaagagaacagcaactccgtaaagaagaagacaaagtttgtcaa

SEQ ID NO: 138710 - DNA, 120 bp, Artificial Sequence
  ENSG00000103671_4 (sequence is synthesized)
tttatacacaagagagggacaggacaggcttgcagtcctgctccctggtcgtcacccttgtgattgcctgggccagaagcacaagctcatcaataactgtctgatctgtgggcgcattgt

SEQ ID NO: 138711 - DNA, 120 bp, Artificial Sequence
  ENSG00000103671_5 (sequence is synthesized)
ctgtgaacaagaaggctcaggcccttgcttattctgtggcactctggtgtgtactcatgaggaacaagatattttacagcgtgactcaaacaagagccagaaactgctaaagaaactcat

SEQ ID NO: 138712 - DNA, 120 bp, Artificial Sequence
  ENSG00000103671_6 (sequence is synthesized)
gtcaggagtggagaattctggaaaggtggacatctctaccaaggaccttcttcctcatcaagaattgcgaattaagtctggtctggagaaggctatcaagcataaagacaaactgttaga

SEQ ID NO: 138713 - DNA, 120 bp, Artificial Sequence
  ENSG00000103671_7 (sequence is synthesized)
gtttgacagaactagtattcgaaggacccaagtcattgatgatgagtcagattactttgccagtgattctaaccaatggttgtccaaacttgagcgggaaaccttgcagaagcgagagga

SEQ ID NO: 138714 - DNA, 120 bp, Artificial Sequence
  ENSG00000103671_8 (sequence is synthesized)
agcagagtatcatagcagactagatgagacaatacaggccattgccaatggaaccttgaaccagccactgaccaaattggatagatcttctgaagagcctttgggagttctggtaaatcc

SEQ ID NO: 138715 - DNA, 120 bp, Artificial Sequence
  ENSG00000103671_9 (sequence is synthesized)
caacatgtaccagtcccctccccagtgggttgaccacacaggtgcagcctcacagaagaaggctttccgttcttcaggatttggactagagttcaactcatttcagcaccagttgcgaat

SEQ ID NO: 138716 - DNA, 120 bp, Artificial Sequence
  ENSG00000103671_10 (sequence is synthesized)
ccaggatcaagaatttcaggaaggctttgatggtggctggtgcctctctgtacatcagccctgggcttctctgcttgtcagagggattaaaagggtggagggcagatcctggtacacccc

SEQ ID NO: 138717 - DNA, 120 bp, Artificial Sequence
  ENSG00000103671_11 (sequence is synthesized)
ccacagaggacgactttggatagcagccacagctaaaaaaccctcccctcaagaagtctcagaactccaggctacatatcgtcttcttcgtgggaaagatgtggaatttcctaatgacta

SEQ ID NO: 138718 - DNA, 120 bp, Artificial Sequence
  ENSG00000103671_12 (sequence is synthesized)
tccgtcaggttgtcttctgggctgtgtggacctaattgactgcttgtcccagaagcaatttaaggagcagtttccagacatcagtcaagagtctgattctccatttgttttcatctgcaa

SEQ ID NO: 138719 - DNA, 120 bp, Artificial Sequence
  ENSG00000103671_13 (sequence is synthesized)
aaatcctcaggaaatggttgtgaagtttcctattaaaggaaatccaaaaatctggaaattggattccaagatccatcaaggagcaaagaaggggttaatgaagcagaataaagctgtctg

SEQ ID NO: 138720 - DNA, 120 bp, Artificial Sequence
  ENSG00000103671_14 (sequence is synthesized)
acccaggagaaaaggaactatacagcatagtggagttttgtgtactaaaattgctatctactggtcctttggaattgaagtagtagaaacctaaaggcttggcgtcaggcttgaatatct

SEQ ID NO: 138721 - DNA, 120 bp, Artificial Sequence
  ENSG00000103671_15 (sequence is synthesized)
cagaacttaaactcttaccaaaatctgtatatttttcttaaggagtgggattcctactttatgtaatggggtcgaaatctttgaacacattatttataaaaacctgtttaaaaattctaa

SEQ ID NO: 138722 - DNA, 120 bp, Artificial Sequence
  ENSG00000103671_16 (sequence is synthesized)
taattccatcactcactagtaatcgttttggtgtataacgttgtttttttcctacacataagtgtatgtatgtatacattcataccagttaggatcgtatcgtatttctagcacctagca

SEQ ID NO: 138723 - DNA, 120 bp, Artificial Sequence
  ENSG00000103671_17 (sequence is synthesized)
tagtacttggctcaaagtaaacactctaatagattaatgaatggtttttactacctagatctctgttaagattactgagaaacagtgtaagttagtcttgtttcaacaacttatatcttt

SEQ ID NO: 138724 - DNA, 120 bp, Artificial Sequence
  ENSG00000103671_18 (sequence is synthesized)
ttcatcttctttcacttccttctttctttggctttttctttgttaaaagagacttttaatctttgtatatgtttgtttgtttagtggtaaatcattgacagcgttcaaagcattaatctg

SEQ ID NO: 138725 - DNA, 120 bp, Artificial Sequence
  ENSG00000103671_19 (sequence is synthesized)
gatcattcagtgagaacagttcgggtccaagcggggaaggagctctgggatgtgcactgcctgagcgaaccgggaagcggggaggactgaaaaggaaatgaaggcaaaaaaggtcaattc

SEQ ID NO: 138726 - DNA, 120 bp, Artificial Sequence
  ENSG00000103671_20 (sequence is synthesized)
ggagctgagagaacttcgacacgcctctcgactttctaagaaggtcaccattgactttgcaggaaggaagatcctggaagaagaaaattcactagcagagtatcatagcagtttccagac

SEQ ID NO: 138727 - DNA, 120 bp, Artificial Sequence
  ENSG00000103671_21 (sequence is synthesized)
ctggggaagatggcggtggctggggcggtgtccggggagccgctggtgcactggtgcacccagcagttgcggaagactttcggcctggatgtcagcgaggagatcattcaggaaatgaag

SEQ ID NO: 138728 - DNA, 78 bp, Artificial Sequence
  ENSG00000103671_22 (sequence is synthesized)
cgttttgtcaattgagagtgctgaagagatacgagaatatgttactgatctcctccagggaaatgaaggcaaaaaagg

SEQ ID NO: 138729 - DNA, 120 bp, Artificial Sequence
  ENSG00000103671_23 (sequence is synthesized)
caaggagatctctgaatctcctgactcttggttgtttgtgataaaagagcattccgttctgattcttctgggaggatttcagtttccagacatcagtcaagagtctgattctccatttgt

SEQ ID NO: 138730 - DNA, 120 bp, Artificial Sequence
  ENSG00000103671_24 (sequence is synthesized)
tagctttccattttagacatcatcattgaagccagagattagtctgcctacaattgagtgttttattctgatgggttgatcttacctgagctggtctcacttgagggctttcataatcat

SEQ ID NO: 138731 - DNA, 120 bp, Artificial Sequence
  ENSG00000103671_25 (sequence is synthesized)
actggagtttcctgaaacgtaaaataggaatgttctcattcagtaaagctttaagaatgtgaagaaaatgatatgtctttttttcttatgaagaatctgaaataaataataattaaaaga

SEQ ID NO: 138732 - DNA, 120 bp, Artificial Sequence
  ENSG00000103707_0 (sequence is synthesized)
agggccggccgccggcggccgaggcgatgagggtgttggtgcggcgctgttggggtcctccgctggctcatggcgccaggcgtgggaggccgagtccccagtggcgagcactggcccgac

SEQ ID NO: 138733 - DNA, 120 bp, Artificial Sequence
  ENSG00000103707_1 (sequence is synthesized)
tcggctgggaggactgccgggactccagagtccgcgagaagcctccctggcgggtgctcttcttcggcacggaccagttcgcccgcgaggcgctgcgggcgctgcacgccgccagggaaa

SEQ ID NO: 138734 - DNA, 120 bp, Artificial Sequence
  ENSG00000103707_2 (sequence is synthesized)
acaaagaagaagagttaatcgacaaactggaggtggtcacaatgccttccccatcaccaaaaggactgccagtgaagcaatatgctgtgcagtctcagcttcccgtatatgagtggccgg

SEQ ID NO: 138735 - DNA, 120 bp, Artificial Sequence
  ENSG00000103707_3 (sequence is synthesized)
atgtgggatctggagaatatgatgttggagtagtggcttcgtttggccgacttttgaatgaggctcttattcttaaatttccctatggcatattgaatgttcatcccagttgcctcccga

SEQ ID NO: 138736 - DNA, 120 bp, Artificial Sequence
  ENSG00000103707_4 (sequence is synthesized)
gatggcgtggcccagcccctgtaatccatacagtgcttcacggagacacagttactggagtaacaattatgcaaattagacctaaaaggtttgatgtaggcccaattctcaaacaagaaa

SEQ ID NO: 138737 - DNA, 120 bp, Artificial Sequence
  ENSG00000103707_5 (sequence is synthesized)
ctgttcctgtgccacccaagagcactgcaaaggaattggaagcagtgttgtcaagactgggtgccaacatgctcatttcagttttgaaaaatttgcctgaaagtctgagcaatggaaggc

SEQ ID NO: 138738 - DNA, 120 bp, Artificial Sequence
  ENSG00000103707_6 (sequence is synthesized)
agcagccaatggagggggcgacttacgcccctaagatttctgctggtaccagttgtataaaatgggaggaacaaacttcagaacaaatattcagactttaccgtgccattggaaatataa

SEQ ID NO: 138739 - DNA, 120 bp, Artificial Sequence
  ENSG00000103707_7 (sequence is synthesized)
ttccgttgcagacgctctggatggcgaataccattaaacttctggatttggtagaagttaacagttcagtccttgctgatccaaaattaacgggacaggctcttattccaggatcagtaa

SEQ ID NO: 138740 - DNA, 120 bp, Artificial Sequence
  ENSG00000103707_8 (sequence is synthesized)
tataccacaaacagtcacaaatactattggtttattgcaaggatggttggattggtgttcgatcagtgatgctcaagaaatcactaacagctactgacttctacaatggatatttgcacc

SEQ ID NO: 138741 - DNA, 120 bp, Artificial Sequence
  ENSG00000103707_9 (sequence is synthesized)
cctggtaccagaaaaattcccaagctcaaccaagccaatgcagatttcagactctcagacttccaacaaagaagaagcagaaaaaaactgttgctatgcaacaatgcattgagtagttag

SEQ ID NO: 138742 - DNA, 120 bp, Artificial Sequence
  ENSG00000103707_10 (sequence is synthesized)
tgcaacaatgcattgagtagttaggaagaagatggataaaaacctattacatatttgtaatttattaaaaaccttatttacaaggaattatctggacttttttttttttttttttttttg

SEQ ID NO: 138743 - DNA, 120 bp, Artificial Sequence
  ENSG00000103707_11 (sequence is synthesized)
attacagacgtgagccaccgtgcctggcctggaattatctggactttcaaagaagatggcattattataagaagagaagattattgccgaaaagatggattgcctcactttccacttttt

SEQ ID NO: 138744 - DNA, 120 bp, Artificial Sequence
  ENSG00000103707_12 (sequence is synthesized)
atgtaacagtagttaaaaaacagctttttttttacttgaattacaaaaaagtttaaataaaacttgtatttatgatacgaaactcaaggagattatctttccttaagaacaagggcaacc

SEQ ID NO: 138745 - DNA, 90 bp, Artificial Sequence
  ENSG00000103707_13 (sequence is synthesized)
aactcaaggagattatctttccttaagaacaagggcaaccctaactggtgtatgtatgtacctacatacatactgagaagaggttttttg

SEQ ID NO: 138746 - DNA, 120 bp, Artificial Sequence
  ENSG00000103707_14 (sequence is synthesized)
gaggtttttttaaaaacagtgcatctatttaattttttaaaaatcgtgtcaccactgacattttaggagtattgaatctgcattttttatttcctataagtagtaaatccagctctttac

SEQ ID NO: 138747 - DNA, 120 bp, Artificial Sequence
  ENSG00000103707_15 (sequence is synthesized)
atttcactaccagctagatttaaccaagtagtaaacgtaggtaatatttaataatctctgccacattgatctgtactataaattaacattttacatccagattttatttttttttattaa

SEQ ID NO: 138748 - DNA, 120 bp, Artificial Sequence
  ENSG00000103707_16 (sequence is synthesized)
tttttttagagatggggtcttgctctctcacacagtctggagtccagtggcgtgaaacactgcttactgcatcttcaacctcctgggcttaagtgatcctccagcctcagcctcccaaag

SEQ ID NO: 138749 - DNA, 90 bp, Artificial Sequence
  ENSG00000103707_17 (sequence is synthesized)
ttaagggccaccacgcctggctaattttctttcttagtttttaaaaaaaattttgtagagataggggtctcactatgttgcttaggctgg

SEQ ID NO: 138750 - DNA, 78 bp, Artificial Sequence
  ENSG00000103707_18 (sequence is synthesized)
gcacccggcccaggttttcttgaagtaggaacgtgctaacatttttcaacttacttgtgcaataaaggttattgagca

SEQ ID NO: 138751 - DNA, 120 bp, Artificial Sequence
  ENSG00000103707_19 (sequence is synthesized)
attcttaaatttccctagtttgatgtaggcccaattctcaaacaagaaactgttcctgtgccacccaagagcactgcaaaggaattggaagcagtgttgtcaagactgggtgccaacatg

SEQ ID NO: 138752 - DNA, 120 bp, Artificial Sequence
  ENSG00000103707_20 (sequence is synthesized)
tctaaatatttttatttaggaataatcccaaataaaaatatcccaaataaaaggttgatcttaggaacaaaacctagaaaacctgaaatttattcttaaaaattctttaagctgtttaaa

SEQ ID NO: 138753 - DNA, 120 bp, Artificial Sequence
  ENSG00000103707_21 (sequence is synthesized)
ataaccaagttttactatcctacttcataggtgaggggaaagaaatgagatgactaacaggaatgtccagtcactaaataatgaacttaaatcttctcactcctaatcctgtgcttcttc

SEQ ID NO: 138754 - DNA, 120 bp, Artificial Sequence
  ENSG00000103707_22 (sequence is synthesized)
cagtatgtctttctgcctttagccaattttttacaatcaaattgttaaatcattgatttctacatatggtacaccaagtgtagtaatataacagtttgttaaaatgtctgagttaaattc

SEQ ID NO: 138755 - DNA, 120 bp, Artificial Sequence
  ENSG00000103707_23 (sequence is synthesized)
tcagttcattgataaatttgtggggttttttcctttcatttcaatagctacttgtgttatttgaacactgagcttaccgtatgtgtgtttgtgtgtgtgtgttgttttattttttgagac

SEQ ID NO: 138756 - DNA, 80 bp, Artificial Sequence
  ENSG00000103710_0 (sequence is synthesized)
agcccgctggacgcggggccgagggcgcggacgccgacgggtccggggccgcgcgctccagggaagcctgcatcccgctc

SEQ ID NO: 138757 - DNA, 120 bp, Artificial Sequence
  ENSG00000103710_1 (sequence is synthesized)
cggccgcagacctgcgtggccgtccagggcgtcgccatgtcctcggtgtttggaaaaccccgcgcgggcagcgggcctcagagcgcgcccctcgaggtcaacctggccatcctggggcgc

SEQ ID NO: 138758 - DNA, 120 bp, Artificial Sequence
  ENSG00000103710_2 (sequence is synthesized)
cgcggggctggcaagtctgccctgaccgtgaagtttctgaccaagaggtttatcagtgaatatgaccccaacttggaggacacctacagctccgaggagactgtggaccaccagcctgtc

SEQ ID NO: 138759 - DNA, 120 bp, Artificial Sequence
  ENSG00000103710_3 (sequence is synthesized)
cacctgagggtcatggacactgcagacctggacacccccaggaactgcgagcgctacctgaactgggcccatgccttcctggtggtgtacagcgtcgacagccgccagagctttgatagc

SEQ ID NO: 138760 - DNA, 120 bp, Artificial Sequence
  ENSG00000103710_4 (sequence is synthesized)
agcagcagctacctggagctgcttgccttgcacgcgaaggagacacagcgcagcatccctgccctgctgctgggcaacaagctggacatggctcagtacaggcaagtcaccaaggcagag

SEQ ID NO: 138761 - DNA, 120 bp, Artificial Sequence
  ENSG00000103710_5 (sequence is synthesized)
ggtgtggctttggcaggcaggtttgggtgcctgtttttcgaggtctctgcctgtctggactttgagcacgtgcagcatgtcttccacgaggcagtgcgagaggcacggcgggagctggag

SEQ ID NO: 138762 - DNA, 120 bp, Artificial Sequence
  ENSG00000103710_6 (sequence is synthesized)
aagagccccctgacccggcccctcttcatctccgaggagagggccctgccccaccaggccccgctcaccgcgcggcatgggctggccagctgcaccttcaacacgctctccaccatcaac

SEQ ID NO: 138763 - DNA, 120 bp, Artificial Sequence
  ENSG00000103710_7 (sequence is synthesized)
ctgaaggagatgcccactgtggcccaggccaagctggtcaccgtgaagtcatcccgggcccagagcaagcgcaaggcgcctaccctgactctcctgaagggcttcaagatcttctgaggc

SEQ ID NO: 138764 - DNA, 120 bp, Artificial Sequence
  ENSG00000103710_8 (sequence is synthesized)
cccctccccaggaagcctaggctcggtggctggacaggactgcagcaggacagggactggcttctcaccaccagcctttccgtctgatggacagcagaccccgcctccagcaccaagcag

SEQ ID NO: 138765 - DNA, 120 bp, Artificial Sequence
  ENSG00000103710_9 (sequence is synthesized)
tgtccctacactcaattcactgtgtgagctggagtggcaggcagggatgctgcttctgttccctccaggccttggtcttcatggtaaccaccgcgtctgtggccgtagagggaaacagcc

SEQ ID NO: 138766 - DNA, 120 bp, Artificial Sequence
  ENSG00000103710_10 (sequence is synthesized)
tggtctgggtggatggctctgtcaatgtcaggcccgagaacagcctgcggaatgacagcctggggtccttgtgccacctggtggacgggaaaggcagggcggctgcagtttcagaggcca

SEQ ID NO: 138767 - DNA, 120 bp, Artificial Sequence
  ENSG00000103710_11 (sequence is synthesized)
gagcctggccctcctgtcatctgctgacttcacagaaggcccaggctacaaaccccacagtttatccaaggaaaatctagttaaaataatccaatggacagaagccccaggaaggggtat

SEQ ID NO: 138768 - DNA, 120 bp, Artificial Sequence
  ENSG00000103710_12 (sequence is synthesized)
ttccaacacttggcgtctcaatgaggataaaagggagggactgtaggttgtccagcataaggagccccagagttctttcaccagcagacagattctccatgtgttttcccactgttaagg

SEQ ID NO: 138769 - DNA, 120 bp, Artificial Sequence
  ENSG00000103710_13 (sequence is synthesized)
actctgtccaaagaacctcagcatcagctccctcaagcttaatgatccaggctgcagaagaaagttgtcactccagtgagttacccagggctccagggagcccacagcagcatcagaccc

SEQ ID NO: 138770 - DNA, 120 bp, Artificial Sequence
  ENSG00000103710_14 (sequence is synthesized)
atccaggggctacagggcctgcccccctgcaggtagaaacacagtatacccgtttgtcatctggtttggcaggacccaggaccctcagcaatgagtctgagtgttcaaagcccactttag

SEQ ID NO: 138771 - DNA, 120 bp, Artificial Sequence
  ENSG00000103710_15 (sequence is synthesized)
aacctaaagcattttgggttaataaagcaaaattttgcttatgttatttggtggtgtcaccgcagcttataccaagacaccatggctcagacatgggatcaggacacacctttgagatcc

SEQ ID NO: 138772 - DNA, 120 bp, Artificial Sequence
  ENSG00000103710_16 (sequence is synthesized)
cactgttagcaagaaaaggctgtccaaggcaggcagtgtggtagttgtctgattttgtttaccacacgccaggtcccagggaagtcttgcacagactcttagcagacaagcagggaaaag

SEQ ID NO: 138773 - DNA, 120 bp, Artificial Sequence
  ENSG00000103710_17 (sequence is synthesized)
agagggtcctggtgggtggaaggattgggaaggggattctgggcctggaagcctgctccttcccctctcagccgtctcaggactactgttggattgcaaacagcatctctgacccagtct

SEQ ID NO: 138774 - DNA, 120 bp, Artificial Sequence
  ENSG00000103710_18 (sequence is synthesized)
tcggactcattctgtaaatggaggagctgaggtcagaggggggctgtgaactactcaagaccacatgcttgcagtcctacaggcttcccgacccacaggccagctacggattttgcactt

SEQ ID NO: 138775 - DNA, 120 bp, Artificial Sequence
  ENSG00000103710_19 (sequence is synthesized)
ttgctccaggccacttgtgtgtgtatgtgtgtgtgtaccactgccatctgaacaaactatgcaataccacctgctcccttccaggagcattttaataaaagattttttttaataacagaa

SEQ ID NO: 138776 - DNA, 120 bp, Artificial Sequence
  ENSG00000103710_20 (sequence is synthesized)
tggctcatgtgatgtggtggcccgcaggctgtatggctgcaggcccggagggcatctggagacctgtgtgatcactcatatccttagaagaaatggtaataatgggtccagaattggtgg

SEQ ID NO: 138777 - DNA, 120 bp, Artificial Sequence
  ENSG00000103723_0 (sequence is synthesized)
ggctggcgccggtgcctttaagacctcagcgcgcggccctgattgagaaatccgcgcgcagcctccgccgctgcacactgcagcctctgctgaacccctgccgcgccgccgccttcgcca

SEQ ID NO: 138778 - DNA, 120 bp, Artificial Sequence
  ENSG00000103723_1 (sequence is synthesized)
gcccggaccggaccggcccgccttcccttcctccgctccagccggcctccggccccgcaacctcctcctcggcgaagtctccctggccgccccatgtcggccgcccccgcctacagcgaa

SEQ ID NO: 138779 - DNA, 120 bp, Artificial Sequence
  ENSG00000103723_2 (sequence is synthesized)
gacaagggcggctccgctggccccggggagcccgagtacggccacgaccccgcgagcggcggcatcttctcctccgactacaagcggcatgatgacctgaaggagatgctggacaccaac

SEQ ID NO: 138780 - DNA, 120 bp, Artificial Sequence
  ENSG00000103723_3 (sequence is synthesized)
aaggattctctcaagctggaggccatgaagaggattgtggcgatgattgcccgaggaaagaatgcttcagacctgtttcccgcggtggtgaagaacgtggcctgtaagaacatagaggtg

SEQ ID NO: 138781 - DNA, 120 bp, Artificial Sequence
  ENSG00000103723_4 (sequence is synthesized)
aagaagcttgtctatgtgtacctggtacgctacgctgaggagcagcaagacctggccctgctgtccatctccaccttccaacgtggcctaaaggatcccaaccagctgattcgtgccagt

SEQ ID NO: 138782 - DNA, 120 bp, Artificial Sequence
  ENSG00000103723_5 (sequence is synthesized)
gccctccgtgtcctctctagcatccgtgtgcccatcatagtgcccatcatgatgctagctatcaaggaagccgcctcggacatgtcaccctatgtgcggaaaacagctgcccacgccatc

SEQ ID NO: 138783 - DNA, 120 bp, Artificial Sequence
  ENSG00000103723_6 (sequence is synthesized)
cctaaactctacagtttggactctgaccagaaggatcagctgatagaagtcattgagaagcttctggctgacaagaccacgctggtggcgggcagtgtggtgatggcctttgaggaggtc

SEQ ID NO: 138784 - DNA, 120 bp, Artificial Sequence
  ENSG00000103723_7 (sequence is synthesized)
tgcccggagcgcatcgacctgattcacaaaaactaccggaaactctgtaacctgctgatcgacgtggaggagtggggccaggtggtcatcatcagcatgctcacccgctacgcccgcacg

SEQ ID NO: 138785 - DNA, 120 bp, Artificial Sequence
  ENSG00000103723_8 (sequence is synthesized)
cagttcctgagccccacccagaacgaatccctactagaggagaacgcggaaaaagccttctacggctcagaggaggacgaggccaagggcgcggggtctgaggagacggccgccgcggcc

SEQ ID NO: 138786 - DNA, 120 bp, Artificial Sequence
  ENSG00000103723_9 (sequence is synthesized)
gccccctcccgaaagccctatgtcatggaccccgaccaccggctgctgctgcgcaacaccaaacccctgctgcagagccgcagcgccgcggtggtgatggcggtggcgcagctctacttc

SEQ ID NO: 138787 - DNA, 120 bp, Artificial Sequence
  ENSG00000103723_10 (sequence is synthesized)
cacctggcgcccaaggcggaagtgggcgtcatcgccaaggcgctggtgcgcctgctgcgcagccacagtgaggtgcagtacgttgtgctccagaacgtggccaccatgtccatcaagcgc

SEQ ID NO: 138788 - DNA, 120 bp, Artificial Sequence
  ENSG00000103723_11 (sequence is synthesized)
cggggtatgtttgagccctacctgaagagcttctacatcaggtccaccgaccccacccagattaagatcctgaagctggaagtgctgaccaacctggccaatgagaccaacattcctact

SEQ ID NO: 138789 - DNA, 120 bp, Artificial Sequence
  ENSG00000103723_12 (sequence is synthesized)
gtcctacgggaattccagacctatattcgcagcatggacaaggactttgtggcagccacaatccaggccattggacgctgtgcaactaacatcggccgagtccgtgacacctgcctcaat

SEQ ID NO: 138790 - DNA, 120 bp, Artificial Sequence
  ENSG00000103723_13 (sequence is synthesized)
ggcctggtgcagctgctgtccaaccgtgatgagcttgtggttgcagagtcagtggtcgtcattaagaaattgctacagatgcagccagcacaacatggagagatcatcaaacacttggca

SEQ ID NO: 138791 - DNA, 120 bp, Artificial Sequence
  ENSG00000103723_14 (sequence is synthesized)
aagcttacagacaacatccaggtgcccatggcccgagccagcatcctgtggctcatcggagagtactgtgagcatgtccccaggattgcacctgatgtcttaagaaaaatggccaagtca

SEQ ID NO: 138792 - DNA, 120 bp, Artificial Sequence
  ENSG00000103723_15 (sequence is synthesized)
attgtcaagctgcaggtcatcaacctggcagccaagctctacctgaccaactctaaacagaccaagctgctgacccagtatgtgctgagtctggccaaatatgaccagaactatgatatt

SEQ ID NO: 138793 - DNA, 120 bp, Artificial Sequence
  ENSG00000103723_16 (sequence is synthesized)
cgcgaccgggcgcgcttcacccggcagctcatcgtcccttccgagcagggtggggccctcagccgccatgccaagaagctcttcctggcacccaaaccagctccagtcttggagtcatcc

SEQ ID NO: 138794 - DNA, 120 bp, Artificial Sequence
  ENSG00000103723_17 (sequence is synthesized)
ttcaaagaccgggaccacttccagctgggctcactgtcccacctgcttaatgccaaggccacaggctaccaggagctcccagactggccggaggaagccccagacccatctgtgcgcaac

SEQ ID NO: 138795 - DNA, 120 bp, Artificial Sequence
  ENSG00000103723_18 (sequence is synthesized)
gtggaggtacctgaatggaccaagtgctcaaatcgggagaagagaaaggagaaggaaaaacccttctactcggactctgagggggagtcaggccccacggagtccgcagacagtgaccct

SEQ ID NO: 138796 - DNA, 120 bp, Artificial Sequence
  ENSG00000103723_19 (sequence is synthesized)
gagtctgagagtgaatcggacagtaagagcagcagtgagagcggctctggggagtccagcagtgagtccgacaatgaagaccaggatgaggatgaggagaaagggagaggcagtgagagt

SEQ ID NO: 138797 - DNA, 120 bp, Artificial Sequence
  ENSG00000103723_20 (sequence is synthesized)
gaacagagtgaggaggatggtaagaggaagacaaagaagaaggtgccagagagaaaaggagaagcgtcatcctctgatgagggcagcgattccagcagtagctcatcagagtccgagatg

SEQ ID NO: 138798 - DNA, 120 bp, Artificial Sequence
  ENSG00000103723_21 (sequence is synthesized)
acatcggagtccgaggaggagcagttagaacctgcctcctggagcaggaaaacacctcccagcagcaaaagtgctcctgcaaccaaggagatctccctgcttgatctagaggatttctta

SEQ ID NO: 138799 - DNA, 120 bp, Artificial Sequence
  ENSG00000103723_22 (sequence is synthesized)
tctactcccacagtcacccctcccagtgtccagcctgtgtctcccccagcaattgtgtctaccagtctggctgctgacctggagggcctgacactcacagactccaccctggtaccgtcg

SEQ ID NO: 138800 - DNA, 120 bp, Artificial Sequence
  ENSG00000103723_23 (sequence is synthesized)
cttctgagtccagtatcgggtgttgggcggcaggagctgctgcaccgggtagctggcgaggggctggctgtggactacaccttcagccgccaacctttctccggggatccccacatggtg

SEQ ID NO: 138801 - DNA, 120 bp, Artificial Sequence
  ENSG00000103723_24 (sequence is synthesized)
tccgtgcacatccacttctccaacagctctgatacccccatcaagggcctgcatgtgggcactcccaaactgcctgctggcatcagcatccaagaatttcccgaaattgagtccctggca

SEQ ID NO: 138802 - DNA, 120 bp, Artificial Sequence
  ENSG00000103723_25 (sequence is synthesized)
cctggagaatctgccactgctgtaatgggcattaatttctgtgactcaacccaggcagccaacttccagctgtgcacccagacccgacagttctacgtctccattcagccacctgttggg

SEQ ID NO: 138803 - DNA, 120 bp, Artificial Sequence
  ENSG00000103723_26 (sequence is synthesized)
gagctgatggcccctgtgttcatgagtgaaaatgagtttaagaaggaacagggaaagctgatgggcatgaatgagatcacagagaaactcatgctgccagacacctgtcggagtgaccac

SEQ ID NO: 138804 - DNA, 120 bp, Artificial Sequence
  ENSG00000103723_27 (sequence is synthesized)
attgtggtgcagaaagtgactgccactgccaacctgggtcgtgttccttgtgggacatctgatgagtacaggtttgcagggaggacactgactggtggaagcctcgttctgctgaccctg

SEQ ID NO: 138805 - DNA, 120 bp, Artificial Sequence
  ENSG00000103723_28 (sequence is synthesized)
gatgcccggccagctggagctgcccagctgactgtcaacagcgagaaaatggtgattggcaccatgctggtaaaggatgtgatacaggctctgacccagtgacttccaaatgctgtgacc

SEQ ID NO: 138806 - DNA, 120 bp, Artificial Sequence
  ENSG00000103723_29 (sequence is synthesized)
tgtttggctcccatctatacctccccatgacacctaggctgtcagtctctctcatctttctctctctctctcatcatcctcctcatgccagatagcattcagggtgtcctctctccctct

SEQ ID NO: 138807 - DNA, 120 bp, Artificial Sequence
  ENSG00000103723_30 (sequence is synthesized)
ggaggaccaagccctcccctaatgccctccccatggattccttagtgatctgtgcagagagagatggcagccactcccttcagtcctcccagatttctgtagctatttatgtagcaggct

SEQ ID NO: 138808 - DNA, 120 bp, Artificial Sequence
  ENSG00000103723_31 (sequence is synthesized)
tcagtccattcctggagaagaacctgatgcagcgattcctgcagctcccgggggccgtggtgaggcctggggtcagaggggcctgcggagctgatcaagaggctgctagccctgtgctgg

SEQ ID NO: 138809 - DNA, 120 bp, Artificial Sequence
  ENSG00000103723_32 (sequence is synthesized)
ctcccgaaggtgggcccccactccggtaccaggccttggagcctgaggagcttcggtggctgcaggcccaggaggaagacacgaccccagaagcatctctggaaggaccttgcccagagg

SEQ ID NO: 138810 - DNA, 120 bp, Artificial Sequence
  ENSG00000103723_33 (sequence is synthesized)
ccccaggaccacactcaagcttggggtgaggaaggaaatgatttagcccctgggggcccgacctgctgagaaatgtctctgagccaggagaagacactgtctccatgtccctgaactgga

SEQ ID NO: 138811 - DNA, 120 bp, Artificial Sequence
  ENSG00000103723_34 (sequence is synthesized)
tgtggatcaaggtaaaggacccggatacactcaggggtgctctcccccactgggagagtttgtccccatggaccgcagctggctggggagatgacatcccaggggtaggggggtgggcac

SEQ ID NO: 138812 - DNA, 120 bp, Artificial Sequence
  ENSG00000103723_35 (sequence is synthesized)
ccaggccaggggccaagctataggggcacagagatagcatctaacatgatcaacactctggtggacaagacagatgatgaaataagcaagttcacatcagggcgggaggtgcttgcagca

SEQ ID NO: 138813 - DNA, 120 bp, Artificial Sequence
  ENSG00000103723_36 (sequence is synthesized)
gcagatttgggccttggttgtttcaggactaacttaaatgtggtgagggtgagtgggggaaagggtgcttagagttcaggaggaaaccgggaacagtctccagcagccaagaaagccaag

SEQ ID NO: 138814 - DNA, 120 bp, Artificial Sequence
  ENSG00000103723_37 (sequence is synthesized)
attctgtagagggctggtcagctgtgacagtggagaggagagtagggctaggctgggttctagacctatcaggtgatggtggccctccctctccccttcactgccttataccacttcaga

SEQ ID NO: 138815 - DNA, 120 bp, Artificial Sequence
  ENSG00000103723_38 (sequence is synthesized)
aggggaaaggaggcctggggagcatgaattagaacagcccatagggactctggatcgggttcctcaggtcttgtgggagcaggggagcagacagaacatatcttcaggcctgagagggca

SEQ ID NO: 138816 - DNA, 120 bp, Artificial Sequence
  ENSG00000103723_39 (sequence is synthesized)
gcagggctgacctccccaggtctggggttgaggtctaggaatgggtattttgcgagagcctccaggcagccatgtgccccgctgtccatggtgctgaaatgcgtgctccttgatccctag

SEQ ID NO: 138817 - DNA, 120 bp, Artificial Sequence
  ENSG00000103723_40 (sequence is synthesized)
tcacccccctttgtgtaaaggtgtgaattgtggtccacagccaggtagatttcaacctttagcagtggcctgaatcccccacaccattctcaccttttgtttcattttgcccaaggcctc

SEQ ID NO: 138818 - DNA, 120 bp, Artificial Sequence
  ENSG00000103723_41 (sequence is synthesized)
tagttggatttacatatgttaggtgcatgtataagtctcccccctaagggcttttctggttagtctaagacatcttgagggtaaagacagccatttcaaggccattctctccatattgga

SEQ ID NO: 138819 - DNA, 120 bp, Artificial Sequence
  ENSG00000103723_42 (sequence is synthesized)
ttctctccatattggatttttcagctctgattacaaccattaactcctctatttttgcatacctttatttatttatttatttatgagacaggttctcactgtgttgcccaggctggagtg

SEQ ID NO: 138820 - DNA, 120 bp, Artificial Sequence
  ENSG00000103723_43 (sequence is synthesized)
gctcactggagcctcgacttccctgagctcaggtgattctcccacctctgtctcctgagtagctgcgactactcagcctgcatcaccatgctcggctaatttttttgtagtttttgtaga

SEQ ID NO: 138821 - DNA, 120 bp, Artificial Sequence
  ENSG00000103723_44 (sequence is synthesized)
catcaccatgctcggctaatttttttgtagtttttgtagagatggggtttcaccctgttgcctatgctggtcttggactcctgggctcaagtggcctcagcttcccaaagtgctgggatt

SEQ ID NO: 138822 - DNA, 120 bp, Artificial Sequence
  ENSG00000103723_45 (sequence is synthesized)
tcaaatttctgtgagagagattgtgaaaggtccagctcatcttttcatatccagaagttctgtaggttgctgggtagacaggattgctgctcaaatccagggcccaccccttgtccaatc

SEQ ID NO: 138823 - DNA, 120 bp, Artificial Sequence
  ENSG00000103723_46 (sequence is synthesized)
tgctatggccagcaagaggggttgacagtcggcttctttggggtgagagtagaaagcatggtcacttgaatatacaattcattcatttagtaaatacttgggtgtctctatgccacacat

SEQ ID NO: 138824 - DNA, 120 bp, Artificial Sequence
  ENSG00000103723_47 (sequence is synthesized)
tgtgctagatttctttttataagtcaaaaccatggaatccgtcttagattggcaagtaatcttttggtttgagtaagggttaagtataaaaactaatctgaaattgttgtacagattttc

SEQ ID NO: 138825 - DNA, 120 bp, Artificial Sequence
  ENSG00000103723_48 (sequence is synthesized)
acctatagtctctaccaactgaccctgtcccccttttagaaaaccagagctcatttagttcaactcaatgtgataatttctttctgcaaagtgccaaatagtattttaggttttgtaggc

SEQ ID NO: 138826 - DNA, 120 bp, Artificial Sequence
  ENSG00000103723_49 (sequence is synthesized)
cttatagtctcaactatgcaactactcaattttgcccttatggtgcaaatgcagccattgacaagtgggcgtggccgtgttccaataaatctatataaaaaacaggcaatagacagattt

SEQ ID NO: 138827 - DNA, 120 bp, Artificial Sequence
  ENSG00000103723_50 (sequence is synthesized)
tatccaagggctgtagcatgccagcctttgctctagaacatgtctaacaggtcatcttttctgatagggacctcactccttcataaggcaacttgctccatctcaagacaactaccacta

SEQ ID NO: 138828 - DNA, 71 bp, Artificial Sequence
  ENSG00000103723_51 (sequence is synthesized)
actcaggaggctgacacgtgccactgcagtccagcccaggcgacagtgtgagatccatctcaaaaaaaaaa

SEQ ID NO: 138829 - DNA, 120 bp, Artificial Sequence
  ENSG00000103723_52 (sequence is synthesized)
cagcccaggcgacagtgtgagatccatctcaaaaaaaaaaaaaattgatttcaggctgtactgcattatgactgcacctgtgaatagccactgtactccagcctgggcaacatagggaga

SEQ ID NO: 138830 - DNA, 120 bp, Artificial Sequence
  ENSG00000103723_53 (sequence is synthesized)
ccctgtatctaaaaaataaaataaaatttactacaggttcacaaaaggcataaagaataatataatgaatatccataagaaatgacacatttctcaaatagccaaagcctcctatatatc

SEQ ID NO: 138831 - DNA, 120 bp, Artificial Sequence
  ENSG00000103723_54 (sequence is synthesized)
ttctcttgtttatcattcataggtatgtatttattcctgtgctagtaatttgcatattgttaagcaatataaaatgttttgtaaatggtgtcatcgtactacatatgtattcctttaaaa

SEQ ID NO: 138832 - DNA, 120 bp, Artificial Sequence
  ENSG00000103723_55 (sequence is synthesized)
cttgttttcttttttgttgtcactggcttttggtctctcctgcatgttggaaccaatcatttcaatccagccttctcccttctttcaatcctagcccaggctagggccgtgttcactttc

SEQ ID NO: 138833 - DNA, 120 bp, Artificial Sequence
  ENSG00000103723_56 (sequence is synthesized)
ttaggagatccctcatggaatcaaacctctgactggcaagcagataatccaggtctccctacatcctgtctttgtacagttggtcccttgaaccccctatgaaaccctactctatttcat

SEQ ID NO: 138834 - DNA, 120 bp, Artificial Sequence
  ENSG00000103723_57 (sequence is synthesized)
tttatcagtttagcacagggtccaaaccagggtgattctgaatcttaattatgtccctcctgattttgtgtcttctttcaagatactgataagctatttggaccagggcaaaagactgag

SEQ ID NO: 138835 - DNA, 120 bp, Artificial Sequence
  ENSG00000103723_58 (sequence is synthesized)
gcatagcatgtttccaggttgacactgatctgttaataaaccttctccaagtatatttcaccacgttgtagacccacctgactgtacagacagctggcatttttctatcttgttaggaag

SEQ ID NO: 138836 - DNA, 120 bp, Artificial Sequence
  ENSG00000103723_59 (sequence is synthesized)
gatcttattcaatagcaataaataaataaataaataacacctttcatgtgcaaagggttgtgggtgacacagagataaaacagatgtgaattctgctcttaaaaatgcttggctattagg

SEQ ID NO: 138837 - DNA, 120 bp, Artificial Sequence
  ENSG00000103723_60 (sequence is synthesized)
tgaaacaaaaggcctacctaaaaaatagcaatgcaggaaatgctatgagacttccacaaacatatcactgaaatcaagatactaatatccaccggcctagttaccccatcaaaaaggaaa

SEQ ID NO: 138838 - DNA, 120 bp, Artificial Sequence
  ENSG00000103723_61 (sequence is synthesized)
acacattttttttgataactttctgtgaatctataatcatttcccaaataaaatgctcacacacaaaaaaggaaaacaggtttaagcagatgatgtgactatttgtctctaagaaaacag

SEQ ID NO: 138839 - DNA, 120 bp, Artificial Sequence
  ENSG00000103723_62 (sequence is synthesized)
agactccttccttttcaataaatgtttctaacccatctgtttaaaagtcaattccagaattttgtcaggaattagcatcaattttacctgcaattgtgaggatcttgtcttgtctttttc

SEQ ID NO: 138840 - DNA, 120 bp, Artificial Sequence
  ENSG00000103723_63 (sequence is synthesized)
catttcagaaagtcagggtaatatctacccttctttagtgttctattcccgtcattctctaagagtaatagtacaggcacacctcattgtattgcactttgcagatattgccagatattg

SEQ ID NO: 138841 - DNA, 120 bp, Artificial Sequence
  ENSG00000103723_64 (sequence is synthesized)
cactttttacaaattgagggtttgtggcaaccctacatcaatcaagtctatcagtgccatttttccaacagtatgtgctcacattgtgcctctgtcacattctggtaattctcacaatat

SEQ ID NO: 138842 - DNA, 71 bp, Artificial Sequence
  ENSG00000103723_65 (sequence is synthesized)
acattgtgcctctgtcacattctggtaattctcacaatattccaaactttttaatgattattatatgttat

SEQ ID NO: 138843 - DNA, 120 bp, Artificial Sequence
  ENSG00000103723_66 (sequence is synthesized)
tcatcaacctggcagccaagctctacctgaccaactctaaacaggcagggctgaactctagctcctattttggaaaagaagaatcagggaaggtggctggtctgcccacataaccaatgc

SEQ ID NO: 138844 - DNA, 120 bp, Artificial Sequence
  ENSG00000103723_67 (sequence is synthesized)
taccccagtgcccacaaagaccttgtagtgctggtggtcactgttgaagagactctcctatgaagctgtgacctccagtctgctagtacaagagtcctgtctgccaccttggaactctgg

SEQ ID NO: 138845 - DNA, 120 bp, Artificial Sequence
  ENSG00000103723_68 (sequence is synthesized)
ctgtgaagaaccacagttgattgggataagggaagggcccaacagtggcaggtactgatgggagaacatgcatcccagatgtggtctgtgcttctttccaaagcttgacaatgcttggcc

SEQ ID NO: 138846 - DNA, 120 bp, Artificial Sequence
  ENSG00000103723_69 (sequence is synthesized)
agtctgtgccaaagataagggggtgagtctctgcttgggcttgggtggtgctggtggccactgtcattcccaaggtgaaaggttataagagatacacagccaaggatgaggctcaactaa

SEQ ID NO: 138847 - DNA, 120 bp, Artificial Sequence
  ENSG00000103723_70 (sequence is synthesized)
gttgtagtatcagggtgttcagagcctcctagctgtctggcatctcctgagatggttccaggagattctcctaaaatgaagcataatgtgctgagcttttcaaggtgtcagggacatcaa

SEQ ID NO: 138848 - DNA, 120 bp, Artificial Sequence
  ENSG00000103723_71 (sequence is synthesized)
acaccatgacgatttccacactctcccactcagttaagcaggacagggattggcaaactactgcccataggctgaatttggcctattcctgtttttgtaataaagttttgttggaacaca

SEQ ID NO: 138849 - DNA, 120 bp, Artificial Sequence
  ENSG00000103723_72 (sequence is synthesized)
tgacagcgaggtgtatatcaagggaggccctcggtgctgcccacgcctacccagctcaatggtctgtacctatgaccatgcccctggtgtcctgagctcagcctcctacccactaagaaa

SEQ ID NO: 138850 - DNA, 120 bp, Artificial Sequence
  ENSG00000103723_73 (sequence is synthesized)
agccccacccagaacgtaagtgggcccagcccaggcagagcgggccgaagtgtgtcccggggaggcgcccacagacccgtcggtctccccgtccaggaatccctactagaggagaacgcg

SEQ ID NO: 138851 - DNA, 120 bp, Artificial Sequence
  ENSG00000103723_74 (sequence is synthesized)
ggaaggagcagagacactggaccatgtgaccctgaccttgttacccctgatttgctttccctttggagaccctcaatgagcacgatggactttactactactcttgttttctctctaaag

SEQ ID NO: 138852 - DNA, 120 bp, Artificial Sequence
  ENSG00000103723_75 (sequence is synthesized)
ctctagccaaccatggttgagtgacaaatcttgtgtttttctatcgcactgctaagctgaaacatctaaacaaggcattcccaaagattctggagagtaacatggaaataaagtactgag

SEQ ID NO: 138853 - DNA, 120 bp, Artificial Sequence
  ENSG00000103723_76 (sequence is synthesized)
acctttgattcgttcgtttgtttcttcatttgtttattcgtaaattctgcaacaagcatttatgaaaagccaactgtgtcgagtcctgaactagtcacggaatacaactgtgaacatgag

SEQ ID NO: 138854 - DNA, 120 bp, Artificial Sequence
  ENSG00000103723_77 (sequence is synthesized)
acccttcttgtcctcacgatgctctagaggggagcacagatgaagaagcagtcagggacagtcgagtgtaatgggggcagtgggagcagggagaggacctagtctctggcgccggagaga

SEQ ID NO: 138855 - DNA, 120 bp, Artificial Sequence
  ENSG00000103723_78 (sequence is synthesized)
tccgccccctcacgcccaccagccgcttccacctctgcccacccgctccacactgaccgtagtcctgccctccgcactggtcctctccccgcaacgacttgccccaccttttcccctcat

SEQ ID NO: 138856 - DNA, 120 bp, Artificial Sequence
  ENSG00000103723_79 (sequence is synthesized)
gtgctgccctcctccagcagtgcctcaactctgatccagacttctacacactcatgctctgactgttcatccctccctgctgagtccagagcctgactagacgtgcatgctgagcagaca

SEQ ID NO: 138857 - DNA, 76 bp, Artificial Sequence
  ENSG00000103723_80 (sequence is synthesized)
cgagtacggccacgaccccgcgagcggcggcatcttctcctccgactacaagcgacacatttgatcctcccgtctc

SEQ ID NO: 138858 - DNA, 120 bp, Artificial Sequence
  ENSG00000103723_81 (sequence is synthesized)
acccagcccacatggctgtcttcttatgggaaaccagacatgggattagagacccactctattagagcatgatgacctgaaggagatgctggacaccaacaaggattctctcaagctgga

SEQ ID NO: 138859 - DNA, 120 bp, Artificial Sequence
  ENSG00000103723_82 (sequence is synthesized)
gcctgggcctcgttggcgctgtatcggaggagtaggcctggggagaggccatgagcatgggagcgggctctgcagaccccttcctacctgcctaaaattgggagggtcacagtcagaaga

SEQ ID NO: 138860 - DNA, 120 bp, Artificial Sequence
  ENSG00000103723_83 (sequence is synthesized)
ggccagccagaccctcagagagtggaagctgggctcagaaggggcgtaagagatgaagtgggtacccagggcccctgtctctcttcccaggagcctgtggtaatggctgcttctagtatg

SEQ ID NO: 138861 - DNA, 120 bp, Artificial Sequence
  ENSG00000103740_0 (sequence is synthesized)
gctcactcaaggctagcctctctcagtgggtgactgagctgtcttcagtggaagcccgaggcagatgccacgcaattctggagctggatacggctgcccacacggggaccccagcatgct

SEQ ID NO: 138862 - DNA, 120 bp, Artificial Sequence
  ENSG00000103740_1 (sequence is synthesized)
ggacagcagagagaccccacaggagagccggcaggacatgattgtgaggaccacccaagaaaaattgaaaaccagctcactgactgacaggcagccactctccaaagagtccctgaacca

SEQ ID NO: 138863 - DNA, 120 bp, Artificial Sequence
  ENSG00000103740_2 (sequence is synthesized)
tgctctcgagctctcagtgccagagaaggtgaataatgcccagtgggatgctccagaggaggcgctgtggacgactcgggccgatgggcgggtgcgcctgcgcatagaccccagctgccc

SEQ ID NO: 138864 - DNA, 120 bp, Artificial Sequence
  ENSG00000103740_3 (sequence is synthesized)
acagcttccctacactgtgcatcggatgttctacgaggccctggataagtatggggacctcatcgctttgggcttcaagcgccaggacaagtgggaacacatctcctactcccaatacta

SEQ ID NO: 138865 - DNA, 120 bp, Artificial Sequence
  ENSG00000103740_4 (sequence is synthesized)
cctgctcgcccgcagagccgccaagggcttcctgaagctcggcctgaagcaggcccacagtgtggccatcctcggcttcaactccccggagtggttcttctcggcagtgggcacagtatt

SEQ ID NO: 138866 - DNA, 120 bp, Artificial Sequence
  ENSG00000103740_5 (sequence is synthesized)
tgcaggtggcatcgtcactggcatctacaccaccagctccccagaggcctgccagtacatcgcttatgactgctgcgccaatgtcatcatggtcgacacgcagaagcagctggaaaagat

SEQ ID NO: 138867 - DNA, 120 bp, Artificial Sequence
  ENSG00000103740_6 (sequence is synthesized)
cctgaagatctggaaacagttgccacatctaaaggcagtcgtgatatataaagaacctcctccaaacaagatggccaatgtgtacacgatggaggaattcatggagctggggaatgaagt

SEQ ID NO: 138868 - DNA, 120 bp, Artificial Sequence
  ENSG00000103740_7 (sequence is synthesized)
gcctgaggaagccctggacgccatcattgacacccagcagcccaaccagtgctgtgtgctagtctacacttccggcaccactgggaaccccaagggcgtgatgctgagtcaagacaatat

SEQ ID NO: 138869 - DNA, 120 bp, Artificial Sequence
  ENSG00000103740_8 (sequence is synthesized)
cacgtggacggcacggtacggcagccaggccggtgacatccggccggcagaagtccagcaggaggtggtagtcagctacctgcccctcagccatattgccgcccagatctacgacctgtg

SEQ ID NO: 138870 - DNA, 120 bp, Artificial Sequence
  ENSG00000103740_9 (sequence is synthesized)
gacaggcatccagtggggggcccaggtttgctttgccgaacccgacgccctgaaggggagcctggtgaacacgctgcgggaggtggagcccacatcacacatgggggtgccccgggtatg

SEQ ID NO: 138871 - DNA, 120 bp, Artificial Sequence
  ENSG00000103740_10 (sequence is synthesized)
ggagaagatcatggagcgcatccaggaggtggcggctcagtctggcttcatccggcgaaagatgctgctgtgggccatgtcggtgaccttggagcagaacctcacctgccccggcagcga

SEQ ID NO: 138872 - DNA, 120 bp, Artificial Sequence
  ENSG00000103740_11 (sequence is synthesized)
cctgaagcccttcacaaccagactggcagattacctggtgctagccaaggttcgccaggcactgggatttgccaagtgtcaaaagaacttctatggagcggcccccatgatggcagagac

SEQ ID NO: 138873 - DNA, 120 bp, Artificial Sequence
  ENSG00000103740_12 (sequence is synthesized)
acagcacttcttcctgggtctcaacatccgcttgtatgcgggctacggcctcagtgagacctcaggcccccacttcatgtccagtccctacaactaccggctgtacagctcaggcaagtt

SEQ ID NO: 138874 - DNA, 120 bp, Artificial Sequence
  ENSG00000103740_13 (sequence is synthesized)
ggtgcccggctgtcgggtgaagctggtgaaccaggacgcagagggcattggcgagatctgcctgtggggccgcaccatattcatgggctacctgaacatggaggacaagacttgtgaggc

SEQ ID NO: 138875 - DNA, 120 bp, Artificial Sequence
  ENSG00000103740_14 (sequence is synthesized)
catcgacgaggaaggctggctgcacacgggtgatgctggccgcctggacgccgatggcttcctctacatcactgggcgcctcaaagaattaatcatcacagctggtggggagaatgtgcc

SEQ ID NO: 138876 - DNA, 120 bp, Artificial Sequence
  ENSG00000103740_15 (sequence is synthesized)
ccctgtgcccatcgaggaggccgtgaagatggagctgcccatcatcagcaacgccatgctcattggggaccagaggaagttcctgtccatgctgctcaccttgaagtgcactctggaccc

SEQ ID NO: 138877 - DNA, 120 bp, Artificial Sequence
  ENSG00000103740_16 (sequence is synthesized)
agacacctctgaccagactgataatctgactgaacaagctatggagttctgccagagggtgggcagcagagccaccacagtgtccgagatcatagagaagaaggatgaggccgtgtacca

SEQ ID NO: 138878 - DNA, 120 bp, Artificial Sequence
  ENSG00000103740_17 (sequence is synthesized)
ggccatcgaagaggggatccggagggtcaacatgaacgcggcggcccggccctaccacatccagaagtgggccattctcgagagagacttctccatttcgggtggagagttgggtcccac

SEQ ID NO: 138879 - DNA, 120 bp, Artificial Sequence
  ENSG00000103740_18 (sequence is synthesized)
gatgaaactgaaacggctcacagttttggagaagtacaaaggtatcattgactccttttaccaagagcaaaaaatgtaatcagggcctatgcctgcagtttctatagaatagagggcagg

SEQ ID NO: 138880 - DNA, 120 bp, Artificial Sequence
  ENSG00000103740_19 (sequence is synthesized)
cgttccgagcctcttcctgagccccaggtctcttcagtctgggcacaggcatttctgccaagtctgttagatctccaggtcagggcacagcactggctctacatttaccaggtcttacgc

SEQ ID NO: 138881 - DNA, 120 bp, Artificial Sequence
  ENSG00000103740_20 (sequence is synthesized)
caacaatagctgacaattccaagaagcttcacgtgtgggtagttttaattcagtttaagtattgctttttgttcaggtgacaaatgagatcagctctccttccagaacgaaagggctgat

SEQ ID NO: 138882 - DNA, 120 bp, Artificial Sequence
  ENSG00000103740_21 (sequence is synthesized)
aatttttggccttagttccaggtagattaaaaagctgctagctcacatacaggacagccagcagtaggctgtggagcgggtaggagagagatggctgatactgctcacgtgcgctgcagg

SEQ ID NO: 138883 - DNA, 120 bp, Artificial Sequence
  ENSG00000103740_22 (sequence is synthesized)
aaaagcaatcagtcacaactcacctagcgacctgacttactctggaatcttggcgggcatcgccgaccctattattccattaccaggcactccgccacccacatgccaactgacttgatg

SEQ ID NO: 138884 - DNA, 120 bp, Artificial Sequence
  ENSG00000103740_23 (sequence is synthesized)
cttaataaaactgctgctgcctgtttgattctatttaatgtataatttgaatattaaaccttttaacagaactgtcaacaaggacctgattttttttgtcaattgagcaggtgggaccag

SEQ ID NO: 138885 - DNA, 120 bp, Artificial Sequence
  ENSG00000103740_24 (sequence is synthesized)
tgcagagagtagtgggcatttaactcacaggactgtgcacagcgggcatgcgagtgaccattagtgccctggaataaacaaaggtgcaggatggggtcaagtggcgcattctcataaaag

SEQ ID NO: 138886 - DNA, 120 bp, Artificial Sequence
  ENSG00000103740_25 (sequence is synthesized)
gaccgaaggcatctgaacaggaaacaggtagagaaagcaaacatctcagttttggaattctttattactttgaacccaagagccactgataactggcacaatccaatgaaacagaggaag

SEQ ID NO: 138887 - DNA, 120 bp, Artificial Sequence
  ENSG00000103740_26 (sequence is synthesized)
cagcagcttaaacaaaggaaaatacatttaagattataagtctgggggggcggttacaagcttaaaaagtgacccagacagggatatcattgctaaaaaaaaaaaaatccccttgtgacc

SEQ ID NO: 138888 - DNA, 120 bp, Artificial Sequence
  ENSG00000103740_27 (sequence is synthesized)
tgggtacattttgcaaagccacaggtttgcaatgttacacaagggccaaaggaggccatgagttgtctttggttgtggggacagagggtaactgttcatgaaaatagtgagtgtctgaag

SEQ ID NO: 138889 - DNA, 120 bp, Artificial Sequence
  ENSG00000103740_28 (sequence is synthesized)
attaagaaaatcatgctgcagcagaggagaagggagaggaagacaggaagggaaaggagatgcctgagggtcaaaagctgagcccaagcctaagcccaagctcaagctcaagccccagca

SEQ ID NO: 138890 - DNA, 120 bp, Artificial Sequence
  ENSG00000103740_29 (sequence is synthesized)
tggcataattttgtgaattaactcaggctgagttgcctccagtctttggaatgtcatcttatactggtactgctgaggcagagggcagtaattggtgctttgggataggagaaggggcag

SEQ ID NO: 138891 - DNA, 120 bp, Artificial Sequence
  ENSG00000103740_30 (sequence is synthesized)
ttgctgaaatacaaaattaatagcatcccaagttcctcaattgcagccaaaatacatgtgttcgggcctttcggcagtatcgcccccagaactacctgctgtagtgtggtccattcccag

SEQ ID NO: 138892 - DNA, 120 bp, Artificial Sequence
  ENSG00000103740_31 (sequence is synthesized)
acagcaacatgcaagaataagtttacaatacactcagcccttctggcttcagatcaggggctcagaggctgtgacaactcatgatgctgaaaatgtatccagtgaaaatgaagtactagc

SEQ ID NO: 138893 - DNA, 120 bp, Artificial Sequence
  ENSG00000103740_32 (sequence is synthesized)
tctctgcttcattaaaagctcttggaaagaatattaaatctcaagacaacaaaataattgaacacacaatacatttgtgtctttgtatccaatatattacctttgtcttattaacaaaaa

SEQ ID NO: 138894 - DNA, 120 bp, Artificial Sequence
  ENSG00000103740_33 (sequence is synthesized)
ttatatctctcattatatatttcttggatctgaagtttttattcacactcagtaatttctgtaaaggacaaatctgtctctattttccatatcatttagaaatataccacattcactctt

SEQ ID NO: 138895 - DNA, 120 bp, Artificial Sequence
  ENSG00000103740_34 (sequence is synthesized)
tttgatgtgaactttcccaggaaaattctcttgtgcccatttagttttagaagagtgtcattttgtgctattatgtcaatatcctgttttatttccattatgtttttcaaaaaccgaaga

SEQ ID NO: 138896 - DNA, 120 bp, Artificial Sequence
  ENSG00000103740_35 (sequence is synthesized)
aaataaggtttttcttaaaaagttagacattttctcttgttaattctgtatcctgttatttacagctgaagagaaactattttaacttaagtgtaaaatggtttagaatagcaaatgata

SEQ ID NO: 138897 - DNA, 120 bp, Artificial Sequence
  ENSG00000103740_36 (sequence is synthesized)
cagtccactcagagtttacaaaaaaaacatttaccaggtagacacttaataaataaaacaagcacttggaaaaagttctttgaaaacagacctagggacatccacctgcatcttttgcac

SEQ ID NO: 138898 - DNA, 120 bp, Artificial Sequence
  ENSG00000103740_37 (sequence is synthesized)
agattttgttaagaaaaggccagatctaaaaatgtactgtcaagaaacaagcaaaccaatgcatacatacgtaggtattctaaacagaggttcatgtggtgtccatttagagtgactgat

SEQ ID NO: 138899 - DNA, 120 bp, Artificial Sequence
  ENSG00000103740_38 (sequence is synthesized)
gtaaatgccagttgtagaagtgttaatctaaatcttttactcggcgacagatttcctctgtgaagtctgagcattttgcattgcctcccaaatcttttgtcaagctctgagaaaaggaaa

SEQ ID NO: 138900 - DNA, 120 bp, Artificial Sequence
  ENSG00000103740_39 (sequence is synthesized)
aagcaaaaataaaagatgtatccgcaaactaaactaaaccaaggagattttaaagccctcagtgagatgccacctgggcaagttactcggctgctctttcatttagttcctcatttcaaa

SEQ ID NO: 138901 - DNA, 120 bp, Artificial Sequence
  ENSG00000103740_40 (sequence is synthesized)
gtgaggaaccactccaccaccatctacccagcccaggaggatcgggatccaatctcatagtgtatacaacagcactctgcaaagaataaggtgctcttgatgcaaagggaggcagggagc

SEQ ID NO: 138902 - DNA, 120 bp, Artificial Sequence
  ENSG00000103740_41 (sequence is synthesized)
tttaccaaaattttccctttgttcacacaatagaccctaacccagattagttggtcatggatatttaaataaaagcgaatctaaataagaagtttcataaaaatccttgggaaatatgtc

SEQ ID NO: 138903 - DNA, 70 bp, Artificial Sequence
  ENSG00000103740_42 (sequence is synthesized)
ctaaataagaagtttcataaaaatccttgggaaatatgtctcaggaatagacctgagacatattttgatc

SEQ ID NO: 138904 - DNA, 120 bp, Artificial Sequence
  ENSG00000103740_43 (sequence is synthesized)
aagcgattctcctgcctcagcgtcctgaatagctggaattacaagtgcatgccaccatacccaactaatttttgtatctgatctatttttggaggctgggacacaaatacgaaagaaata

SEQ ID NO: 138905 - DNA, 120 bp, Artificial Sequence
  ENSG00000103740_44 (sequence is synthesized)
acacaaatacgaaagaaatatttaaatcattaactcttttttttttttttaagagacggggtctcactatgtggcccaggctggtcttgaactcagaggctaaggtgatcctcctgcctc

SEQ ID NO: 138906 - DNA, 120 bp, Artificial Sequence
  ENSG00000103740_45 (sequence is synthesized)
agcctatagctgcaactacaggcatgcaccaccacacctgcctaaatcattaactcttaaacctccctctttaggaaagaaagcctcccatacaactgatctgttctaccagcttatcct

SEQ ID NO: 138907 - DNA, 120 bp, Artificial Sequence
  ENSG00000103740_46 (sequence is synthesized)
ttctttcctgcatacagaccccaatatatttaattctctttatctttccatcctacacaataaaagggcccactatgtaattcaggcacctctctactgggctgtagattataacttccc

SEQ ID NO: 138908 - DNA, 120 bp, Artificial Sequence
  ENSG00000103740_47 (sequence is synthesized)
aaatataactttaaagaataagaaaatcatatgacctccaatgtgactatcaggctgttaaaaacaagcctgaatttcttgtattttggccacacgatataatttcaaattacagaattt

SEQ ID NO: 138909 - DNA, 120 bp, Artificial Sequence
  ENSG00000103740_48 (sequence is synthesized)
ttttaaaagaagggaccaactttgaagatattacgctaagtgaaataagccagactcaaaggacaaatactgtatgattccacttacatgaggtacctagagtagtcaaattcatagaga

SEQ ID NO: 138910 - DNA, 120 bp, Artificial Sequence
  ENSG00000103740_49 (sequence is synthesized)
caggaagcagaatggcaggtgtcagaggatgggagggggaagggaaagttactgtttaacgggtgcagagtctcagtttgagaaaatgaaactggtctggagatgactgatggtgatggt

SEQ ID NO: 138911 - DNA, 120 bp, Artificial Sequence
  ENSG00000103740_50 (sequence is synthesized)
tacattacaatgtgaatgtacttaacattattgaactgtatacctaaatacggctaaaatggcaaattttatgttatgcatatttttcacaatttttgttaaaaaggacctcaaattagg

SEQ ID NO: 138912 - DNA, 120 bp, Artificial Sequence
  ENSG00000103740_51 (sequence is synthesized)
gtaacactcactggaaagtctgcagcttcattcctgaagccagcaagaccgcgagccccccgggggaggaatgaacaactccagagacgccactttaagagctgtaacactcaccgtgaa

SEQ ID NO: 138913 - DNA, 82 bp, Artificial Sequence
  ENSG00000103740_52 (sequence is synthesized)
ggaagaaactccgaacacatccgaacgtcagaaggaacaaactccagacgcgcccgtcagtcttgaagtcagtgagaccaag

SEQ ID NO: 138914 - DNA, 120 bp, Artificial Sequence
  ENSG00000103740_53 (sequence is synthesized)
atgccttagctgagggagcagaggggttgctgagccctgtgcctgccaggtgcaagaaggaggaagggcggtccggtggagccgggcctctctggggctgctgtggctctcccgggggga

SEQ ID NO: 138915 - DNA, 120 bp, Artificial Sequence
  ENSG00000103740_54 (sequence is synthesized)
ctccgtgacatgttctctgaggttctggctctctcctgggcaagctcacagattgcagccaccccccaggcaccatgccagaggtgctcctgctcaggtctgccagctccatcctgagga

SEQ ID NO: 138916 - DNA, 120 bp, Artificial Sequence
  ENSG00000103740_55 (sequence is synthesized)
ctgcgttcttaagcagatggctgccaggtgggcctaggtgtgttcacaaacttagttttgttcggaacctgcagtgccgacaaggagtgaggctgaatgtgagaagcagctcactgactg

SEQ ID NO: 138917 - DNA, 120 bp, Artificial Sequence
  ENSG00000103740_56 (sequence is synthesized)
aaacagtatgtgccacccttgcgtgcaggtgtgtgtgggtgcccgttggagcatgtgtgtgccaccggcatgcctggctggtaagaggggacccctgggccccagatgcccctgacccaa

SEQ ID NO: 138918 - DNA, 120 bp, Artificial Sequence
  ENSG00000103740_57 (sequence is synthesized)
aaaattgaaaaccagggccgtggagagaatgggagaagccaacacaaggcactcggcatagtacatgtgcttagtaaggaaccaaaccaaacaaaaagacgagcttctcgcccagccctg

SEQ ID NO: 138919 - DNA, 120 bp, Artificial Sequence
  ENSG00000103740_58 (sequence is synthesized)
ggggacccagtggcaggaactgtctcccaaggctctgccaaggatgacggccaaaaaactgcctctcctgccgcccacccttcttatgtaagagccacacaggtgggcaactgggtcccg

SEQ ID NO: 138920 - DNA, 120 bp, Artificial Sequence
  ENSG00000103740_59 (sequence is synthesized)
tgccatataggtcagaggtatctggggctacacctcaacagcagccctagggcaggctggggcgggtccccactcatgcccaaccccactgcctcatcacccggaacctggggcatccac

SEQ ID NO: 138921 - DNA, 120 bp, Artificial Sequence
  ENSG00000103740_60 (sequence is synthesized)
ctgggactggcagaagggggccatggatgagatgtctgagcaggctgagtcgtggatgacaagccgaggagagggaaacttgggtgagcatttgtcgtcggggtgctgccaccagccccc

SEQ ID NO: 138922 - DNA, 120 bp, Artificial Sequence
  ENSG00000103740_61 (sequence is synthesized)
aagcaggtgtgagttgctttggagggcctgccactgcttcttggctcccagaaagggggcatctccagctgtgctgaggcttccgggttgtggttgaggcttgggttgtggttcagctgg

SEQ ID NO: 138923 - DNA, 90 bp, Artificial Sequence
  ENSG00000103740_62 (sequence is synthesized)
gaagcgatctgaacaggctggagccactacacctggcccactactacagccttatactaaatcttgaaatcagaggaggcgctgtggacg

SEQ ID NO: 138924 - DNA, 120 bp, Artificial Sequence
  ENSG00000103740_63 (sequence is synthesized)
ccgcagagccgccaagggcttcctgaagcaggcccacagtgtggccatcctcggcttcaactccccggagtggttcttctcggcagtgggcacagtatttgcaggtggcatcgtcactgg

SEQ ID NO: 138925 - DNA, 80 bp, Artificial Sequence
  ENSG00000103742_0 (sequence is synthesized)
cggcggcccgagcccagccccatggcgcggggggacgccggccgcggccgcgggctcctcgcgttgaccttctgcctgtt

SEQ ID NO: 138926 - DNA, 120 bp, Artificial Sequence
  ENSG00000103742_1 (sequence is synthesized)
cctcgcgttgaccttctgcctgttggccgcgcgcggggagctgctgttgccccaggagacgactgtggagctgagctgtggagtggggccactgcaagtgatcctgggcccagagcaggc

SEQ ID NO: 138927 - DNA, 120 bp, Artificial Sequence
  ENSG00000103742_2 (sequence is synthesized)
tgcagtgctaaactgtagcctgggggctgctgccgctggaccccccaccagggtgacctggagcaaggatggggacaccctgctggagcacgaccacttacacctgctgcccaatggttc

SEQ ID NO: 138928 - DNA, 120 bp, Artificial Sequence
  ENSG00000103742_3 (sequence is synthesized)
cctgtggctgtcccagccactagcacccaatggcagtgacgagtcagtccctgaggctgtgggggtcattgaaggcaactattcgtgcctagcccacggccccctcggagtgctggccag

SEQ ID NO: 138929 - DNA, 120 bp, Artificial Sequence
  ENSG00000103742_4 (sequence is synthesized)
ccagactgctgtcgtcaagcttgccacactcgcagacttctctctgcacccggagtctcagacggtggaggagaacgggacagctcgctttgagtgccacattgaagggctgccagctcc

SEQ ID NO: 138930 - DNA, 120 bp, Artificial Sequence
  ENSG00000103742_5 (sequence is synthesized)
catcattacttgggagaaggaccaggtgacattgcctgaggagcctcggctcatcgtgcttcccaacggcgtccttcagatcctggatgttcaggagagtgatgcaggcccctaccgctg

SEQ ID NO: 138931 - DNA, 120 bp, Artificial Sequence
  ENSG00000103742_6 (sequence is synthesized)
cgtggccaccaactcagctcgccagcacttcagccaggaggccctactcagtgtggcccacagagggtccctggcgtccaccagggggcaggacgtggtcattgtggcagccccagagaa

SEQ ID NO: 138932 - DNA, 120 bp, Artificial Sequence
  ENSG00000103742_7 (sequence is synthesized)
caccacagtggtgtctggccagagtgtggtgatggaatgtgtggcctcagctgaccccaccccttttgtgtcctgggtccgacaagacgggaagcccatctccacagatgtcatcgtcct

SEQ ID NO: 138933 - DNA, 120 bp, Artificial Sequence
  ENSG00000103742_8 (sequence is synthesized)
gggccgcaccaacctactaattgccaacgcgcagccctggcactccggcgtctatgtctgccgcgccaacaagccccgcacgcgcgacttcgccactgcagccgctgagctccgtgtgct

SEQ ID NO: 138934 - DNA, 120 bp, Artificial Sequence
  ENSG00000103742_9 (sequence is synthesized)
ggcggctcccgccatcactcaggcgcccgaggcgctgtcgcggacgcgggcgagcacagcgcgcttcgtgtgccgcgcgtcgggggagccgcggccagcgctgcgctggctgcacaacgg

SEQ ID NO: 138935 - DNA, 120 bp, Artificial Sequence
  ENSG00000103742_10 (sequence is synthesized)
ggcgccgctgcggcccaacgggcgcgtcaaggtccagggcggcggtggcagcctggtcatcacacagatcggcctgcaggacgccggctactaccagtgcgtggctgagaacagcgcggg

SEQ ID NO: 138936 - DNA, 120 bp, Artificial Sequence
  ENSG00000103742_11 (sequence is synthesized)
aatggcgtgcgctgccgcgtcgctggccgtggtggtgcgcgaggggctgcccagcgcccccacgcgggtcactgctacgccactgagcagctccgctgtgttggtggcctgggagcggcc

SEQ ID NO: 138937 - DNA, 120 bp, Artificial Sequence
  ENSG00000103742_12 (sequence is synthesized)
cgagatgcacagcgagcagatcatcggcttctctctccactaccagaaggcacggggcatggacaatgtggaataccagtttgcagtgaacaacgacaccacagaactacaggttcggga

SEQ ID NO: 138938 - DNA, 120 bp, Artificial Sequence
  ENSG00000103742_13 (sequence is synthesized)
cctggaacccaacacagattatgagttctacgtggtggcctactcccagctgggagccagccgcacctccaccccagcactggtgcacacactggatgatgtccccagtgcagcacccca

SEQ ID NO: 138939 - DNA, 120 bp, Artificial Sequence
  ENSG00000103742_14 (sequence is synthesized)
gctctccctgtccagccccaacccttcggacatcagggtggcgtggctgcccctgccccccagcctgagcaatgggcaggtggtgaagtacaagatagaatacggtttgggaaaggaaga

SEQ ID NO: 138940 - DNA, 120 bp, Artificial Sequence
  ENSG00000103742_15 (sequence is synthesized)
tcagattttctctactgaggtgcgaggaaatgagacacagcttatgctgaactcgcttcagccaaacaaggtgtatcgagtacggatttcggctggtacagcagccggcttcggggcccc

SEQ ID NO: 138941 - DNA, 120 bp, Artificial Sequence
  ENSG00000103742_16 (sequence is synthesized)
ctcccagtggatgcatcacaggacgcccagtatgcacaaccagagccatgtcccttttgcccctgcagagttgaaggtgcaggcaaagatggagtccctggtcgtgtcatggcagccacc

SEQ ID NO: 138942 - DNA, 120 bp, Artificial Sequence
  ENSG00000103742_17 (sequence is synthesized)
ccctcaccccacccagatctctggctacaaactatattggcgggaggtgggggctgaggaggaggccaatggcgatcgcctgccagggggccgtggagaccaggcttgggatgtggggcc

SEQ ID NO: 138943 - DNA, 120 bp, Artificial Sequence
  ENSG00000103742_18 (sequence is synthesized)
tgtccggctcaagaagaaagtgaagcagtatgagctgacccagctagtccctggccggctgtacgaggtgaagctcgtggctttcaacaaacatgaggatggctatgcagcagtgtggaa

SEQ ID NO: 138944 - DNA, 120 bp, Artificial Sequence
  ENSG00000103742_19 (sequence is synthesized)
gggcaagacggagaaggcgccggcaccagacatgcctatccagaggggaccacccctgcctccagcccacgtccatgcggaatcaaacagctccacatccatctggcttcggtggaaaaa

SEQ ID NO: 138945 - DNA, 120 bp, Artificial Sequence
  ENSG00000103742_20 (sequence is synthesized)
gccagatttcaccacagtcaagattgtcaactacactgtgcgcttcagcccctgggggctcaggaatgcctccctggtcacctattacaccagttctggagaagacatcctcattggcgg

SEQ ID NO: 138946 - DNA, 120 bp, Artificial Sequence
  ENSG00000103742_21 (sequence is synthesized)
cttgaagccattcaccaaatacgagtttgcagtgcagtctcacggcgtggacatggatgggcctttcggctctgtggtggagcgctccaccctgcctgaccggccctccacacccccatc

SEQ ID NO: 138947 - DNA, 120 bp, Artificial Sequence
  ENSG00000103742_22 (sequence is synthesized)
cgacctgcgactgagccccctgacaccgtccacggttcggctgcactggtgcccccccacagagcccaacggggagatcgtggagtatctgatcctgtacagcagcaaccacacgcagcc

SEQ ID NO: 138948 - DNA, 120 bp, Artificial Sequence
  ENSG00000103742_23 (sequence is synthesized)
tgagcaccagtggaccttgctcaccacgcagggaaacatcttcagtgctgaggtccatggcctggagagcgacactcggtacttcttcaagatgggggcgcgcacagaggtgggacctgg

SEQ ID NO: 138949 - DNA, 120 bp, Artificial Sequence
  ENSG00000103742_24 (sequence is synthesized)
gcctttctcccgcctgcaggatgtgatcacgctccaggagaagctgtcagactcgctggacatgcactcagtcacgggcatcatcgtgggtgtctgcctgggcctcctctgcctcctggc

SEQ ID NO: 138950 - DNA, 120 bp, Artificial Sequence
  ENSG00000103742_25 (sequence is synthesized)
ctgcatgtgtgctggcctgcgccgcagcccccacagggaatccctcccaggcctgtcctccaccgccacccccgggaatcccgcgctgtactccagagctcggcttggcccccccagccc

SEQ ID NO: 138951 - DNA, 120 bp, Artificial Sequence
  ENSG00000103742_26 (sequence is synthesized)
agctgcccatgaattggagtcccttgtgcacccccatccccaggactggtccccgccaccctcagacgtggaggacagggctgaagtgcacagccttatgggtggcggtgtttctgaagg

SEQ ID NO: 138952 - DNA, 120 bp, Artificial Sequence
  ENSG00000103742_27 (sequence is synthesized)
ccggagtcactccaaaagaaagatctcctgggctcaaccaagcgggctgagctgggctggttcctgggcaggctgtgagctgccccaggcaggcccccggccggctctgacccgggccct

SEQ ID NO: 138953 - DNA, 120 bp, Artificial Sequence
  ENSG00000103742_28 (sequence is synthesized)
gctgccccctgctggaactgggcagacgctgttgctgcaggctctggtgtacgacgccataaagggcaatgggaggaagaagtcacccccagcctgcaggaaccaggtggaggctgaagt

SEQ ID NO: 138954 - DNA, 120 bp, Artificial Sequence
  ENSG00000103742_29 (sequence is synthesized)
cattgtccactctgactttagtgcatctaacgggaaccctgacctccatctccaagacctggagcctgaggaccccctgcctccagaggctcctgatctcatctcgggtgttggggatcc

SEQ ID NO: 138955 - DNA, 120 bp, Artificial Sequence
  ENSG00000103742_30 (sequence is synthesized)
agggcagggggcagcctggctggacagggagttgggagggtgtgagctggcagcccccgggccagacagacttacctgcttgccagaggcagccagtgcttcctgctcctacccggacct

SEQ ID NO: 138956 - DNA, 120 bp, Artificial Sequence
  ENSG00000103742_31 (sequence is synthesized)
ccagccaggcgaggtgctagaggagacccctggagatagctgccagctcaaatccccctgccctctaggagccagcccaggcctgcccagatccccggtctcctcctctgcctagctctt

SEQ ID NO: 138957 - DNA, 120 bp, Artificial Sequence
  ENSG00000103742_32 (sequence is synthesized)
cccagaggatgtggtttggggcaggcaggtatggatcacataggatgcgatacctgtggccgtgtatgtccacatgtgtgcctgtagatacatcatcaagccctttggagcttcctaagt

SEQ ID NO: 138958 - DNA, 120 bp, Artificial Sequence
  ENSG00000103742_33 (sequence is synthesized)
tgctttggctgaggggagaggaaaacatggattattcactccccccatactctttgtgatacacatgtgacatgtgaaagacatacgagacatagctacatgtgatgtgcacatgtgtga

SEQ ID NO: 138959 - DNA, 120 bp, Artificial Sequence
  ENSG00000103742_34 (sequence is synthesized)
agtgcatgtatgcgtactggttgttgagctgggaaaccgtggcccaggcagtggtcactacagcctgattggtcctccaggtcagaacggtgccccacagtggtcagtccccagccctgt

SEQ ID NO: 138960 - DNA, 120 bp, Artificial Sequence
  ENSG00000103742_35 (sequence is synthesized)
gggcccccacctccatcgcccagccttttattacacactctgagagtgtctccaatgcctgtctgacaaagacagtcccagcccattctcctgtctggctgggttgggtgcaagcaggct

SEQ ID NO: 138961 - DNA, 120 bp, Artificial Sequence
  ENSG00000103742_36 (sequence is synthesized)
ctgaatgcctggcatttcagctgcatcacctcccagctccttattgcccaaatagagagggtggccctggctcccctccgagcaactctgcatttaattttgtaatctgggaagtgcctg

SEQ ID NO: 138962 - DNA, 120 bp, Artificial Sequence
  ENSG00000103742_37 (sequence is synthesized)
gttttgaaaatccgctttctctcactcttcccctccttccttgcccctggctgctctagtgttctgtctcccagtcacctcgctctcccagcaccagtgcccttctcctgctcccagata

SEQ ID NO: 138963 - DNA, 120 bp, Artificial Sequence
  ENSG00000103742_38 (sequence is synthesized)
ctctttcctttcctctctcctgttttccttcctctgctatctctcacacctctcccagactatgtcatcttgttctcctgcctgggttcaaactctgcatccttctctaacaacgtgact

SEQ ID NO: 138964 - DNA, 120 bp, Artificial Sequence
  ENSG00000103742_39 (sequence is synthesized)
acctcatgtctgcttcaaggcccccgtgcccttcctgtatccgcggctgccgcgcactcgcctgccatcctcctgcctcctcttcactcagtgcttctgcttgccctgccccaggcagcc

SEQ ID NO: 138965 - DNA, 120 bp, Artificial Sequence
  ENSG00000103742_40 (sequence is synthesized)
cacccacgcccagtgcgggtgtggagaagatcttctggcttccctgcatcttgcctttgggattgggatccaagggttctccatggatggatccaagtcatagaggggaatgtttgagac

SEQ ID NO: 138966 - DNA, 120 bp, Artificial Sequence
  ENSG00000103742_41 (sequence is synthesized)
agggaagggggctgtgatccagaggctcagaataaaaagatgccctcccttctatgcaggggggcaagtttactggatggagatgatttgggcctctcttccagaagaagctaaaggaag

SEQ ID NO: 138967 - DNA, 120 bp, Artificial Sequence
  ENSG00000103742_42 (sequence is synthesized)
agaaggggagtgagagttcagggaggcccttcccaccctgtgaggcttgacttgatctggattggggatgacaggaatctcaccctctggggtgctggcaaggaggtctttgcacaggaa

SEQ ID NO: 138968 - DNA, 120 bp, Artificial Sequence
  ENSG00000103742_43 (sequence is synthesized)
aaggggtagctcatttcagtttgttttttctttaaattgaatcctcaagtcattttctgttcacctgccgcacagggacaagcttgacttctattttctgtgtagtgaaaacaatgtcat

SEQ ID NO: 138969 - DNA, 120 bp, Artificial Sequence
  ENSG00000103742_44 (sequence is synthesized)
ttatttggtttttcacctcagccctctcataggagcatagaatgttagggtctttactccctaatgatgtctgattggcacatcaagagttaactctgccttctgggccaaattcgaaat

SEQ ID NO: 138970 - DNA, 120 bp, Artificial Sequence
  ENSG00000103742_45 (sequence is synthesized)
tttccttttttttttttttttttttaaatggtggaatgtctctcagcacagttgcggcttcctcaaaccctgaaagcatctgtgtttattatactcgggtgtcactcactgttgatgtct

SEQ ID NO: 138971 - DNA, 120 bp, Artificial Sequence
  ENSG00000103742_46 (sequence is synthesized)
ctgttgatgtctgcacctacgtttccacctcctccccctccttcagccagcctatgataacactaaagattattaatgttggttttgtatctcgttaaagacagaattgtcacttgtagt

SEQ ID NO: 138972 - DNA, 120 bp, Artificial Sequence
  ENSG00000103742_47 (sequence is synthesized)
atttctgtagcattcagcgctgctgtggctaacaccactgtgtatgtttcatcattgctctgaaggtcaaaagcctcattttattttgctggtttgattttttttttttaaagaagaaaa

SEQ ID NO: 138973 - DNA, 120 bp, Artificial Sequence
  ENSG00000103742_48 (sequence is synthesized)
aaaaactgccctgaattaaatggctgttttaacagtaggctcttagcattataccacatagtcatttttcatgttcttgtttaacaggcactgaggttctggtttaaattaaatagctgc

SEQ ID NO: 138974 - DNA, 120 bp, Artificial Sequence
  ENSG00000103742_49 (sequence is synthesized)
aaatgagacaatttataacccattaggttgggtggaaaattgtttctcaaaagcaaataagtaataaatctggtatctgcctataactcacagttgataagaaagtggccatttctcact

SEQ ID NO: 138975 - DNA, 120 bp, Artificial Sequence
  ENSG00000103742_50 (sequence is synthesized)
agcactatatatgatttgggctctgggtaatttggaagtgttaggtttgtgtctttgtagcagtatttttattagaaaagaatctattggccttttacagggtattaatccctttgtcac

SEQ ID NO: 138976 - DNA, 120 bp, Artificial Sequence
  ENSG00000103742_51 (sequence is synthesized)
ctaccattgatgccttaagttttctgagtctcaattaaaaatcttccttttcttgatgcatgacaagtgtaatcagtacttgctcatttatttgtctgtatttagtttatgctgtactat

SEQ ID NO: 138977 - DNA, 120 bp, Artificial Sequence
  ENSG00000103742_52 (sequence is synthesized)
ttaattatccttccagcgttttttttttctccttacaaatatgatactctttagtgttaagctaaggcattgattcatgtatctgtccttataatgaattaataaactattttccagaaa

SEQ ID NO: 138978 - DNA, 120 bp, Artificial Sequence
  ENSG00000103742_53 (sequence is synthesized)
agcaatatttaggggaggctgaggaggcctggggacagttttgggagagaaagagaatggtcgttgtggggctggggtaaatggggagaagaaagggtaggtctgcgctgagccggagta

SEQ ID NO: 138979 - DNA, 120 bp, Artificial Sequence
  ENSG00000103742_54 (sequence is synthesized)
gtttggaaagggtgaatcagggagaggttaaagtgattggaaggggagcgagggagggcggtggggggcaggcttggggtactggggggggggcagagaccttagttgcgggatcccgcg

SEQ ID NO: 138980 - DNA, 120 bp, Artificial Sequence
  ENSG00000103742_55 (sequence is synthesized)
acgacgccataaaggtcagcgtcctggaaggaaggggcaggaaaggaggaaagggtctctgtgcttgtgaagaggaagtaatgagttctctggagacccctgggtggtaactttcctggg

SEQ ID NO: 138981 - DNA, 120 bp, Artificial Sequence
  ENSG00000103742_56 (sequence is synthesized)
attcgtgcctagcccacggccccctcggagtgctggccagccagactgctgtcgtcaagcttgccagtctcttcctggtattgtctatcctcattcttgggtattccataatcttcccgc

SEQ ID NO: 138982 - DNA, 120 bp, Artificial Sequence
  ENSG00000103742_57 (sequence is synthesized)
ttcttctccactcccctgttccttctgcttttctttccctttgagtcctagagtctgggcttgtgctgtcctccagggagcctgccagagtgccccctttgtgtcagaggcacaaagctg

SEQ ID NO: 138983 - DNA, 120 bp, Artificial Sequence
  ENSG00000103742_58 (sequence is synthesized)
tcaccatgaagtaactttcaggccagaagaagtgtgcatcttactgtatagtttgaccatcatgatgatgttgggcaggggggctttggaattcattctgctggcagtatctgaccgcta

SEQ ID NO: 138984 - DNA, 120 bp, Artificial Sequence
  ENSG00000103742_59 (sequence is synthesized)
atcaccacttcttgttgtgtctccctcggtctgaattggctctgctgtgtgtttctgtgactgtgtgtttctgtgtctccatgcggatgtgtttcactgtttgtgcttgctgtggcttct

SEQ ID NO: 138985 - DNA, 120 bp, Artificial Sequence
  ENSG00000103742_60 (sequence is synthesized)
tcttcggagccggctgcggacgctagggcctctctccctcctccacggaatggttggctgtcagggaagcacatgggcctccatatcccggcggaataggtcagcttggttctcacgaag

SEQ ID NO: 138986 - DNA, 120 bp, Artificial Sequence
  ENSG00000103769_0 (sequence is synthesized)
agttgaagctcggcgctcgggttacccctgcagcgacgccccctggtcccacagataccactgctgctcccgccctttcgctcctcggccgcgcaatgggcacccgcgacgacgagtacg

SEQ ID NO: 138987 - DNA, 120 bp, Artificial Sequence
  ENSG00000103769_1 (sequence is synthesized)
actacctctttaaagttgtccttattggagattctggtgttggaaagagtaatctcctgtctcgatttactcgaaatgagtttaatctggaaagcaagagcaccattggagtagagtttg

SEQ ID NO: 138988 - DNA, 120 bp, Artificial Sequence
  ENSG00000103769_2 (sequence is synthesized)
caacaagaagcatccaggttgatggaaaaacaataaaggcacagatatgggacacagcagggcaagagcgatatcgagctataacatcagcatattatcgtggagctgtaggtgccttat

SEQ ID NO: 138989 - DNA, 120 bp, Artificial Sequence
  ENSG00000103769_3 (sequence is synthesized)
tggtttatgacattgctaaacatctcacatatgaaaatgtagagcgatggctgaaagaactgagagatcatgctgatagtaacattgttatcatgcttgtgggcaataagagtgatctac

SEQ ID NO: 138990 - DNA, 120 bp, Artificial Sequence
  ENSG00000103769_4 (sequence is synthesized)
gtcatctcagggcagttcctacagatgaagcaagagcttttgcagaaaagaatggtttgtcattcattgaaacttcggccctagactctacaaatgtagaagctgcttttcagacaattt

SEQ ID NO: 138991 - DNA, 120 bp, Artificial Sequence
  ENSG00000103769_5 (sequence is synthesized)
taacagagatttaccgcattgtttctcagaagcaaatgtcagacagacgcgaaaatgacatgtctccaagcaacaatgtggttcctattcatgttccaccaaccactgaaaacaagccaa

SEQ ID NO: 138992 - DNA, 120 bp, Artificial Sequence
  ENSG00000103769_6 (sequence is synthesized)
aggtgcagtgctgtcagaacatctaaggcatttctcttctcccctagaaggctgtgtatagtccatttcccaggtctgagatttaaatatatttgtaattcttgtgtcacttttgtgttt

SEQ ID NO: 138993 - DNA, 120 bp, Artificial Sequence
  ENSG00000103769_7 (sequence is synthesized)
tattacttcatacttatgaatttttccatgtcctaagtcttttgattttagctttataaaatcatccacttgtcccgaatgactgcagctttttttcatgctatggcttcactagcctta

SEQ ID NO: 138994 - DNA, 120 bp, Artificial Sequence
  ENSG00000103769_8 (sequence is synthesized)
gtttaataaactgaatgtttggattcctcagttattgtttacttttcatcatggaagcctgtcactgtatgtaggacataatagaacttgatcacttgaagctcagacctattggtcttg

SEQ ID NO: 138995 - DNA, 120 bp, Artificial Sequence
  ENSG00000103769_9 (sequence is synthesized)
atcaaatcaaactaagaagaccttagaaataagctaccattttgccacagagcagcttataggtaatacactcttctctcagtgcagtgtacatttccacaaatctaagaattgccctat

SEQ ID NO: 138996 - DNA, 120 bp, Artificial Sequence
  ENSG00000103769_10 (sequence is synthesized)
aaacatagcaggattttgagagcttgaaaattttccattattctggacatgaatttctaaaatgccttaataggtttatgtagttgagtaaattttgttttttaatttttgtaagcatca

SEQ ID NO: 138997 - DNA, 120 bp, Artificial Sequence
  ENSG00000103769_11 (sequence is synthesized)
aagttgattagagaggggggcactttttctggagaattctcttagtaaacacaaaagattgttacggtttcattagtagtatggttgtggggccataagttaaacagtgctgcctggtag

SEQ ID NO: 138998 - DNA, 120 bp, Artificial Sequence
  ENSG00000103769_12 (sequence is synthesized)
gctgggaactgaagagacttgtggtattccatctcgggtgcctctgttggcaatgatcaggcagcccaaaagatttaaatgatctataataatttccaagcggtagattatgtggcattt

SEQ ID NO: 138999 - DNA, 120 bp, Artificial Sequence
  ENSG00000103769_13 (sequence is synthesized)
tattgctcaggcaataattggtttaatgctggtagtgtcaaattttgaagtgttaattttgtcttagaaccttccagtaagtgaaatacaacctagttttatcaccatatccaccagcag

SEQ ID NO: 139000 - DNA, 120 bp, Artificial Sequence
  ENSG00000103769_14 (sequence is synthesized)
gcatggataattattttaacaatgctaatatttgagttttgcagtatattatagaatatagtccagttaaatctttggtttcagtatgtctgaagagtacagtgagaggttaatttctgc

SEQ ID NO: 139001 - DNA, 120 bp, Artificial Sequence
  ENSG00000103769_15 (sequence is synthesized)
tcaagtggtaccacttaaaggcatgtattcttttagtatgtaaaatgaaatagtaccttgagtttaaatagaatgcatttaggcattgtagagatctgaaatagttttcttccactacat

SEQ ID NO: 139002 - DNA, 120 bp, Artificial Sequence
  ENSG00000103769_16 (sequence is synthesized)
tgttgaaatcaatgaagcaattagtttctcattcagaaatgtgcacactaatatttagttttgctttctcgtggataatattaagcacttactctgcagtttcctggaagttgtgtcaac

SEQ ID NO: 139003 - DNA, 120 bp, Artificial Sequence
  ENSG00000103769_17 (sequence is synthesized)
tgcagtgatactattcaggatggtgggaaatccccaaaaatatgtatgtgtgggcttgcttagattactatatttcatagttaatcttttgtctcttgcggtgctcatgatgtgtggggc

SEQ ID NO: 139004 - DNA, 120 bp, Artificial Sequence
  ENSG00000103769_18 (sequence is synthesized)
acacggaaggcattgctgtagtcagtcattttggttttcttctatagccattttattattttagtgtattagttatgaagataatattatctatttgtaaattgctactttgtattttat

SEQ ID NO: 139005 - DNA, 120 bp, Artificial Sequence
  ENSG00000103769_19 (sequence is synthesized)
gcatgctctgtaatttgatttttttttagttattgatttggattatattcacattctaataaacagttatagggggattatttcttatgctgtcagattacatttttcctttgagtgctt

SEQ ID NO: 139006 - DNA, 120 bp, Artificial Sequence
  ENSG00000103769_20 (sequence is synthesized)
attttagaactgcagttcaattatgctttccttggaaaaagtatgtccaaaaacattaggaaagtagtgtgtattttcatatataacagtgtcaccagacccaggaaaagaaaccatctc

SEQ ID NO: 139007 - DNA, 120 bp, Artificial Sequence
  ENSG00000103769_21 (sequence is synthesized)
tattttattgaaagttggtggtagattttttacaaagtaaggagaaaagagaaaaactaaatagtgaattgaaaatgaataaagtaaacttagaatttttacccaagtgtagacttaaat

SEQ ID NO: 139008 - DNA, 120 bp, Artificial Sequence
  ENSG00000103769_22 (sequence is synthesized)
gttgctttgagtatggctggatcttgggagaattccaggaaatattaggtattagaaaatgactttgattgcatttcagcaggtgtctttattctgagtagtatcttaggagacaaactg

SEQ ID NO: 139009 - DNA, 120 bp, Artificial Sequence
  ENSG00000103769_23 (sequence is synthesized)
tctcaagcaagaaacaataaatttttaaatattatgacagttcagggcttaaggcagtttagaagtattttgctacttgaccttgattttcagttattttaactttgaattttttttttt

SEQ ID NO: 139010 - DNA, 120 bp, Artificial Sequence
  ENSG00000103769_24 (sequence is synthesized)
taaaggcgtgagccaccgtgcctggccttgaatttttttttaacctgttatatagtctcctgaatagttagccatggtgccttgatttaatcttatgtcattgttctcaaatgccatgat

SEQ ID NO: 139011 - DNA, 120 bp, Artificial Sequence
  ENSG00000103769_25 (sequence is synthesized)
ttgttctcaaatgccatgatttctctttaatagtagttgtcattatgtaagggtaagttattgcccatttaattgtaattataagaagaggtgccagctagtgaccttacatcagtgatc

SEQ ID NO: 139012 - DNA, 120 bp, Artificial Sequence
  ENSG00000103769_26 (sequence is synthesized)
ttttaagttctgaagggttctgcagaaaagttacacttcttgagtttgggttgcccatcagagctggtcacatttctttgatcattgaaaaaatgaatatcttaatttttgtctttgctg

SEQ ID NO: 139013 - DNA, 120 bp, Artificial Sequence
  ENSG00000103769_27 (sequence is synthesized)
actggtatttataaaatacaaatgcttttagtgggttgagctgttgtgataatctcttccatctaccttagagaagaagctgtactatttagacagttttggccaacactagaagcaaaa

SEQ ID NO: 139014 - DNA, 120 bp, Artificial Sequence
  ENSG00000103769_28 (sequence is synthesized)
gaattcaaaggctgggtggatatttaagaacttattctaacctgtcaggtttcaatttgtggggcttggtttaacagaggaaaaaaatataaattgattttctgatgtctcacaaatatc

SEQ ID NO: 139015 - DNA, 120 bp, Artificial Sequence
  ENSG00000103769_29 (sequence is synthesized)
acatacctggaaaaaaattaaaacaaaaaatgaattttgtaaaaggttatgtatgacttccatttgctctgtaaaaaaatgaacaaagattgtgaaaggatcctcttccaccacatcatt

SEQ ID NO: 139016 - DNA, 120 bp, Artificial Sequence
  ENSG00000103769_30 (sequence is synthesized)
taatgggttagcggaacagatagggagctatgacactagcaccaaagagagatttttcttctggttgggtggtgctggtgccacgcccctttctgggatttgacaagtctttcccactca

SEQ ID NO: 139017 - DNA, 120 bp, Artificial Sequence
  ENSG00000103769_31 (sequence is synthesized)
cctatacaatatgccaaatcaactggagttgtcattctaatgttttaaagaatgattgggttcccccaaactgtaggaggtcgatggtaacaataaagtgatacaaaatgcttatgtcat

SEQ ID NO: 139018 - DNA, 120 bp, Artificial Sequence
  ENSG00000103769_32 (sequence is synthesized)
tataatttatgtaagggagaccattaggctgagaatcaatatgattgaggttatctattctcctgaaaagtgaattggagaataaagaaagaatatttgaaaggatgttgtgtactaggc

SEQ ID NO: 139019 - DNA, 120 bp, Artificial Sequence
  ENSG00000103769_33 (sequence is synthesized)
aatatactagcatgtattagaaaatacggtaaactgtgggttagaagagtgaaagtagctggtatgatagagcactggactgagtaacgaagagattctagtcatggctcttgtggtcat

SEQ ID NO: 139020 - DNA, 120 bp, Artificial Sequence
  ENSG00000103769_34 (sequence is synthesized)
ttcatttttgagcctcacattcttccaattaatgagggtaccagattaaataaactctggggattcatcccaattcgaactctgtaattctctgaatgaactctctcttcaattaaagcc

SEQ ID NO: 139021 - DNA, 120 bp, Artificial Sequence
  ENSG00000103769_35 (sequence is synthesized)
aaattattaacattttaactcaagtttaaatttaatagagaagtcaaaatgaggtatgcactttgtggaatgtttttggtcttatcacaataacctgattaaaatggtgcctttatttcc

SEQ ID NO: 139022 - DNA, 120 bp, Artificial Sequence
  ENSG00000103769_36 (sequence is synthesized)
atgtttactcctttaaataagatgaaagctttcagaacatttatttgcaaaatgactgtcaatatcaacaatatgcatcaaagtaccatatatgctaagggagaggagcacttgatgggc

SEQ ID NO: 139023 - DNA, 120 bp, Artificial Sequence
  ENSG00000103769_37 (sequence is synthesized)
tgctatgttaactgtaaattgagaactgcttgttttatggcttttgctgttaaaaaaaaactgctggcttttaatatgtactttaaaatatactcatgtctgggagagaacttttaaaaa

SEQ ID NO: 139024 - DNA, 120 bp, Artificial Sequence
  ENSG00000103769_38 (sequence is synthesized)
tcattagtgatcaaagcagaaagaaaagagctcagacctcagcaacttcaagaaagaaagaaaaaatagctgaagtgcaatggcatgatcttcgctcactgcaacctccgcctcctggat

SEQ ID NO: 139025 - DNA, 120 bp, Artificial Sequence
  ENSG00000103769_39 (sequence is synthesized)
agtccgtgacgtgcggtgtagttggggaaacgcaccgtggttccccgtcgggtcaggagatcccgagccccaggctggcgtgggcgaagcgtacaatcccttcacctttcgtcacccaga

SEQ ID NO: 139026 - DNA, 120 bp, Artificial Sequence
  ENSG00000103769_40 (sequence is synthesized)
ggcacaagaatccagttcgcgccaactgacctgtttcttccttcctccccggcactctgggagtcctgagattgccttgctcggctacaagtgcaaaaagctgaatgaaaaatggaaagg

SEQ ID NO: 139027 - DNA, 120 bp, Artificial Sequence
  ENSG00000103769_41 (sequence is synthesized)
ccaagatagaaaggctacaagtgcaaaaagctgaatgaaaaatggaaaggttactgctgaaatatttacagatggaaggatatgatgtctagaatttgtttcaaacaagacgaggtctta

SEQ ID NO: 139028 - DNA, 64 bp, Artificial Sequence
  ENSG00000103769_42 (sequence is synthesized)
tatgatgtctagaatttgtttcaaacaagacgaggtcttactaccatagcccaggctgggctca

SEQ ID NO: 139029 - DNA, 120 bp, Artificial Sequence
  ENSG00000103811_0 (sequence is synthesized)
tcccgccgctcctccacgctcgtgccgctccccccccgcgctcccagttgacgctctgggccgccacctccgcggaccctgagcgcaagagccaagccgccagcgctgcgatgtgggcca

SEQ ID NO: 139030 - DNA, 120 bp, Artificial Sequence
  ENSG00000103811_1 (sequence is synthesized)
cgctgccgctgctctgcgccggggcctggctcctgggagtccccgtctgcggtgccgccgaactgtgcgtgaactccttagagaagtttcacttcaagtcatggatgtctaagcaccgta

SEQ ID NO: 139031 - DNA, 120 bp, Artificial Sequence
  ENSG00000103811_2 (sequence is synthesized)
agacctacagtacggaggagtaccaccacaggctgcagacgtttgccagcaactggaggaagataaacgcccacaacaatgggaaccacacatttaaaatggcactgaaccaattttcag

SEQ ID NO: 139032 - DNA, 120 bp, Artificial Sequence
  ENSG00000103811_3 (sequence is synthesized)
acatgagctttgctgaaataaaacacaagtatctctggtcagagcctcagaattgctcagccaccaaaagtaactaccttcgaggtactggtccctacccaccttccgtggactggcgga

SEQ ID NO: 139033 - DNA, 120 bp, Artificial Sequence
  ENSG00000103811_4 (sequence is synthesized)
aaaaaggaaattttgtctcacctgtgaaaaatcagggtgcctgcggcagttgctggactttctccaccactggggccctggagtctgcgatcgccatcgcaaccggaaagatgctgtcct

SEQ ID NO: 139034 - DNA, 120 bp, Artificial Sequence
  ENSG00000103811_5 (sequence is synthesized)
tggcggaacagcagctggtggactgcgcccaggacttcaataatcacggctgccaagggggtctccccagccaggctttcgagtatatcctgtacaacaaggggatcatgggtgaagaca

SEQ ID NO: 139035 - DNA, 120 bp, Artificial Sequence
  ENSG00000103811_6 (sequence is synthesized)
cctacccctaccagggcaaggatggttattgcaagttccaacctggaaaggccatcggctttgtcaaggatgtagccaacatcacaatctatgacgaggaagcgatggtggaggctgtgg

SEQ ID NO: 139036 - DNA, 120 bp, Artificial Sequence
  ENSG00000103811_7 (sequence is synthesized)
ccctctacaaccctgtgagctttgcctttgaggtgactcaggacttcatgatgtatagaaccggcatctactccagtacttcctgccataaaactccagataaagtaaaccatgcagtac

SEQ ID NO: 139037 - DNA, 120 bp, Artificial Sequence
  ENSG00000103811_8 (sequence is synthesized)
tggctgttgggtatggagaaaaaaatgggatcccttactggatcgtgaaaaactcttggggtccccagtggggaatgaacgggtacttcctcatcgagcgcggaaagaacatgtgtggcc

SEQ ID NO: 139038 - DNA, 120 bp, Artificial Sequence
  ENSG00000103811_9 (sequence is synthesized)
tggtgtgagccgtggcagccgcagcgcagactggcggagaaggagaggaacgggcagcctgggcctgggtggaaatcctgccctggaggaagttgtggggagatccactgggacccccaa

SEQ ID NO: 139039 - DNA, 120 bp, Artificial Sequence
  ENSG00000103811_10 (sequence is synthesized)
cattctgccctcacctctgtgcccagcctggaaacctacagacaaggaggagttccaccatgagctcacccgtgtctatgacgcaaagatcaccagccatgtgccttagtgtccttctta

SEQ ID NO: 139040 - DNA, 120 bp, Artificial Sequence
  ENSG00000103811_11 (sequence is synthesized)
acagactcaaaccacatggaccacgaatattctttctgtccagaagggctactttccacatatagagctccagggactgtcttttctgtattcgctgttcaataaacattgagtgagcac

SEQ ID NO: 139041 - DNA, 120 bp, Artificial Sequence
  ENSG00000103811_12 (sequence is synthesized)
ctccccagatggagcatgctggtcctgggccatgactcaaaccaggtctgtcctcgccactcagtctcccaggagggaggcatcagggggtgtccaggctctggctgggaggatggtggg

SEQ ID NO: 139042 - DNA, 120 bp, Artificial Sequence
  ENSG00000103811_13 (sequence is synthesized)
ggtgctggcggtattatccaccagatggggtatccaggatgaagagcaggcttaatttgagatcttgactatttgtcccaaacctgagtggagaggtggggaggaaggagaaaaacgggc

SEQ ID NO: 139043 - DNA, 120 bp, Artificial Sequence
  ENSG00000103811_14 (sequence is synthesized)
caagctgcggcagaggcaggattcaaacccacaatgtcagcccagaagcctgtacttctctgtgtggcctccccagtctcagctgcctactcctactcagactctgccccccacctccac

SEQ ID NO: 139044 - DNA, 120 bp, Artificial Sequence
  ENSG00000103811_15 (sequence is synthesized)
atgagactgcccaccccttcctcaccaaccccttatttatttcaaacgtgcccagatgctcctgtcgtttccacaccatcccttcccttatcttgccttttgagaaatcttgatctctgt

SEQ ID NO: 139045 - DNA, 120 bp, Artificial Sequence
  ENSG00000103811_16 (sequence is synthesized)
ttagagggcggccatgaagttgctgctgcttcctgaagcctccgggctctgggatgtctgtagaacaagctggagtccaccagctctttgtcctatggctcacagactttcttaatgata

SEQ ID NO: 139046 - DNA, 120 bp, Artificial Sequence
  ENSG00000103811_17 (sequence is synthesized)
aaagctgtcatcttatttgggcttcctgaaaagctaaaggcttgagaatatttgaaaaatatatatgttcatgataaggcttatttagataatgcaaatatagtttaatttattagaaaa

SEQ ID NO: 139047 - DNA, 120 bp, Artificial Sequence
  ENSG00000103811_18 (sequence is synthesized)
gtcttcatgagggaagagccgggacctatgcatccatcccctcgcccacaagagacggatgatgcccctgaaggaactatcctagcccctgcctctgtggagaaaggagggacagtgcac

SEQ ID NO: 139048 - DNA, 120 bp, Artificial Sequence
  ENSG00000103811_19 (sequence is synthesized)
gattgtggctccgctgttactctctgtgtaatgtgggatcgtaaatttgggacaaagccggtacccctctgggtggttgtgaagtttacaagagactctgtagaagcccctgccccattc

SEQ ID NO: 139049 - DNA, 120 bp, Artificial Sequence
  ENSG00000103811_20 (sequence is synthesized)
ctccatcctctccctgcaaaacggccacactcccagacaatacaccaggaagaacaactcaaaaggtccacaaaaccaccacaagcacatccctgcctctgtttcctctcggcatctctc

SEQ ID NO: 139050 - DNA, 120 bp, Artificial Sequence
  ENSG00000103811_21 (sequence is synthesized)
tggcgtccaggagtgccccacatgtggcaggtttgttcaccagtgcctcttggaccacattctgactttcacgcagctgcatggtcttcattctggccacaggtccctgaaaacggggtt

SEQ ID NO: 139051 - DNA, 120 bp, Artificial Sequence
  ENSG00000103811_22 (sequence is synthesized)
gttttgtaacttcccaaatttctcagcagtaccccgcccattaacacagatttggcctgagaatcatagcagaaagaaaaccttcatctttcctcttaggaaaacaaaaaggtctccctc

SEQ ID NO: 139052 - DNA, 120 bp, Artificial Sequence
  ENSG00000103811_23 (sequence is synthesized)
gaactccttaggtacgcagagggcgcgccgcccgagagggtgctagcaggccctagagtggacgctgggagaacttggccaggggcgcactgggctccggaggaacggggcagagctttc

SEQ ID NO: 139053 - DNA, 120 bp, Artificial Sequence
  ENSG00000103811_24 (sequence is synthesized)
tgcgtgctggcacggggaggggtaaactgcattataggcgggggttctcggagggtgggcggcttgtaggaccagaggagcagatgggctgagtgtccagggtcccacctagccaggtgg

SEQ ID NO: 139054 - DNA, 120 bp, Artificial Sequence
  ENSG00000103811_25 (sequence is synthesized)
ctctccagcctagaataccaaaggagcccgcagctccttccgccttcctcaactggggacacagagtgtcacacagaggactctgatctgtccctgccagagagaagtttcacttcaagt

SEQ ID NO: 139055 - DNA, 120 bp, Artificial Sequence
  ENSG00000103811_26 (sequence is synthesized)
agccaacatcacaatcgtgagtgccgatccccctctgggatggggaatgtgtcctgatgaggaggcctctctcatgctgtcggatagccagtgggcccagcaaggcagcccttctggcag

SEQ ID NO: 139056 - DNA, 120 bp, Artificial Sequence
  ENSG00000103811_27 (sequence is synthesized)
cagcaataacatcttaacttgatggagtacttctaggtgctgtaccaaccctcaatacgcactatcccctctagacccgaactggccctaggagatgagtatccttattacctcatttga

SEQ ID NO: 139057 - DNA, 120 bp, Artificial Sequence
  ENSG00000103811_28 (sequence is synthesized)
caggtgaggaaacgggggctccaagtggttaagtaatgtgcccaaggccacagagctaggaaatagatgctggatttgaactaagaatgtgtcattccagaaccagggctcattgccttg

SEQ ID NO: 139058 - DNA, 120 bp, Artificial Sequence
  ENSG00000103811_29 (sequence is synthesized)
acaacatacagcgcaaatcctgtactcaggatgtcaccctcttcagaatgttgctgctgtcactcaagctggctgctctgggccatgatatcccaaggacaggtgaatttgggcctcaaa

SEQ ID NO: 139059 - DNA, 120 bp, Artificial Sequence
  ENSG00000103811_30 (sequence is synthesized)
ggtatccctttgcatggtccccaggagagcctcattggtgacacctgcagggccctgacgaccaggccagaactagcattcagccctcttgggcaggcccatggggtggaaatggtgcca

SEQ ID NO: 139060 - DNA, 120 bp, Artificial Sequence
  ENSG00000103811_31 (sequence is synthesized)
cctgcagaagtcatcgcccctgtgctgggctggcctctgtgccctccatgtctcagatatgccctgacctgttgggctcacaaggccttgtccacataccaggaaggagggcactccctt

SEQ ID NO: 139061 - DNA, 120 bp, Artificial Sequence
  ENSG00000103811_32 (sequence is synthesized)
gccaggcacctgtttgcttttcacagctgggtctctgtccacccctctagggaggcaggactgagggaggctgggcgccccgtccctcctgcacttgctttccttcagtagggccctggc

SEQ ID NO: 139062 - DNA, 120 bp, Artificial Sequence
  ENSG00000103811_33 (sequence is synthesized)
ctcagcacaggtaacttcccccctcatttcagctcccagaggtctcttggttagtgcacttgaacccagccacccccaacccagaagctccaaaaagtgccaatgcctgggacccaccct

SEQ ID NO: 139063 - DNA, 120 bp, Artificial Sequence
  ENSG00000103811_34 (sequence is synthesized)
gcagatactgttgtagttggtctgaggcacagcctggacttggggtttttttaaggttctgcatggggttctacctgctgctgtcacctggtctctgcagctctgttccaaagctgcagc

SEQ ID NO: 139064 - DNA, 120 bp, Artificial Sequence
  ENSG00000103811_35 (sequence is synthesized)
ttccaccgccatctgggacctacccgtccatggtttataacccctgtgttctagcagcaaagctttgtagactctgggtttatgggtgtaggggtgagagctgctggcccaggagaggac

SEQ ID NO: 139065 - DNA, 120 bp, Artificial Sequence
  ENSG00000103811_36 (sequence is synthesized)
ctcagggaatggatgtgaatgactgaatgagtaggtccacgctgtaccccgtggtccctatctcagagggtgcagggtttcctaggagcagagttggggagaggaacgagagatggccag

SEQ ID NO: 139066 - DNA, 120 bp, Artificial Sequence
  ENSG00000103811_37 (sequence is synthesized)
acagacccagccagagacaggaagggagagaggccgcaggggagctgcttctggccatccatgctgctctgggcctctagcccctagcttgaggcaaaaggctgtactgtgaaaggagtg

SEQ ID NO: 139067 - DNA, 120 bp, Artificial Sequence
  ENSG00000103811_38 (sequence is synthesized)
gctgtgatggtggcgaggcaggagatgggagggagagcgcaaactggcaggcaggccctctggttctgaactccagatccacacatgccttcattcttttggttctgttttcttgcttgt

SEQ ID NO: 139068 - DNA, 120 bp, Artificial Sequence
  ENSG00000103811_39 (sequence is synthesized)
aaaatgcaagcaattgtccgcatcctgcagaagagggtatgagcacgtgcttgacacagcgtgtgtgaaactgaggagggtgagtgtgtgtcactcaggatgagccaggttctgttgcaa

SEQ ID NO: 139069 - DNA, 120 bp, Artificial Sequence
  ENSG00000103811_40 (sequence is synthesized)
taacaaccgtgcccaatctgcatggctgacaacagtcaaagggtgtgtggcactcctgcgcccatgcacagcttagggagggtggtgtgtgctccgtgtcattggcctcacgccaggact

SEQ ID NO: 139070 - DNA, 120 bp, Artificial Sequence
  ENSG00000103811_41 (sequence is synthesized)
attcatgcaggaggcattctgcatgcaggcagtgactgcagattccaggacctgtggttagcggactcctattgatgtttctgggaactctagacctggaagttcagagaagtttcactt

SEQ ID NO: 139071 - DNA, 120 bp, Artificial Sequence
  ENSG00000103811_42 (sequence is synthesized)
tgccatgaggaccctgggttgtggacaggtgggggtagggtctctggctgggcctgtttcccccatcctatacaccgctgtgggaccccacactctgcatcgtatgggcacacctacggg

SEQ ID NO: 139072 - DNA, 120 bp, Artificial Sequence
  ENSG00000103811_43 (sequence is synthesized)
tgagcccctcccgacatgtgccagctgctgggctggcactgcaggacatacagcaactgtccctgcccttggggagtttataatttggtcaccttgacacagcactgacggggcctcaga

SEQ ID NO: 139073 - DNA, 120 bp, Artificial Sequence
  ENSG00000103852_0 (sequence is synthesized)
gaggtacccgcttgctttatgggaaaaggctgctccggaactgccctactttagactttttcatggttatcaatctgtacaaagaatcaccaaactgataaagcaggaaccagagggcaa

SEQ ID NO: 139074 - DNA, 120 bp, Artificial Sequence
  ENSG00000103852_1 (sequence is synthesized)
atcacgctgccaagacaactgtgtaattcgctcgaaaaagaaacggtgagcctctccagcagactgggtaaactggcaagggattttacgacatagttggagattggagagttacagaaa

SEQ ID NO: 139075 - DNA, 120 bp, Artificial Sequence
  ENSG00000103852_2 (sequence is synthesized)
cttttccggttttttacaagttttaaaggagtgattgagtgtcaaaggaaaagcagagaaaatacaggcacaatttaaagacagcaggaagaagagtgttcagagagcatttttctcttt

SEQ ID NO: 139076 - DNA, 89 bp, Artificial Sequence
  ENSG00000103852_3 (sequence is synthesized)
acagcaggaagaagagtgttcagagagcatttttctctttagggtgaagtttgaaagcatcatgcccagattatcagtggatttttgaa

SEQ ID NO: 139077 - DNA, 120 bp, Artificial Sequence
  ENSG00000103852_4 (sequence is synthesized)
gcctctcgagtagctggaattacaggtctggcagaaggaacagtatcaactgactgagtaggtctcattggcagttgtgattcagagacctagaaagctgaacccacggctggcaagaag

SEQ ID NO: 139078 - DNA, 120 bp, Artificial Sequence
  ENSG00000103852_5 (sequence is synthesized)
gaaagctgaacccacggctggcaagaagaggatggtttgtgggacctgggctgatgtctgatgaaattttaagccccagctatagctactacaaagaaaagtggctgatgataagcatgt

SEQ ID NO: 139079 - DNA, 120 bp, Artificial Sequence
  ENSG00000103852_6 (sequence is synthesized)
agagttttgccatgttgcccaggctggtcccaaactcctgagctgaggtgaccctcccgcctccacctcccagagtgctgggattacagaagacaatgtatataaaaatatgcaagaatc

SEQ ID NO: 139080 - DNA, 120 bp, Artificial Sequence
  ENSG00000103852_7 (sequence is synthesized)
tatgcaagaatcacaggaaacccacatatccaaccacctagatgaagttgttgctgctgttagcatcactcatagaaagaagttccaaaacaagctgcttcagacagcactattccagcc

SEQ ID NO: 139081 - DNA, 120 bp, Artificial Sequence
  ENSG00000103852_8 (sequence is synthesized)
tcctcgagagaaactccacctctgtgaagagaaagcaaagtcctattccaacagtcatgagtacaaacaggccgtccatgagcttgtgcgttgcgtagcactgacaagaatttgctatgg

SEQ ID NO: 139082 - DNA, 120 bp, Artificial Sequence
  ENSG00000103852_9 (sequence is synthesized)
agactcacattggaaactagcagaggcacatgttaatctggctcaaggctacctccagctgaaaggactgtcactgcaagcaaaacaacatgcagaaaaagccagacaaatcctcgccaa

SEQ ID NO: 139083 - DNA, 120 bp, Artificial Sequence
  ENSG00000103852_10 (sequence is synthesized)
ctccattgtgcctccctatagtgagaatacagatgttttcaagttttccattgagcttttccataccatgggcagagctttactctcccttcaaaaatttaaggaagctgcagagaattt

SEQ ID NO: 139084 - DNA, 120 bp, Artificial Sequence
  ENSG00000103852_11 (sequence is synthesized)
gacaaaagcagagagactttcaaaggagctgctacaatgtggaagaattataaaggaagaatggatagaaattgaagcacggatcagattatcatttgcacaggtgtatcaaggtcagaa

SEQ ID NO: 139085 - DNA, 120 bp, Artificial Sequence
  ENSG00000103852_12 (sequence is synthesized)
gaagtcaaaagaagctttgtcccactatcaagcagctttggaatatgttgagatcagtaaaggtgaaacaagtcgtgagtgtgtacccatattgagagaattagcaggtgtagagcaagc

SEQ ID NO: 139086 - DNA, 120 bp, Artificial Sequence
  ENSG00000103852_13 (sequence is synthesized)
cctgggactccacgatgtatccatcaaccacttcctccaggcacatcttatcatcctgagtagaagcccctctcaagtggaggcagcagactcggcacacatcgtcgcccatgctgctgt

SEQ ID NO: 139087 - DNA, 120 bp, Artificial Sequence
  ENSG00000103852_14 (sequence is synthesized)
cgcttcagggagacacgagcaccatgatgtagctgagcagtattttcaagagagcatggctcatcttaaggattctgaagggatgggaagaaccaaatttctttcaattcaagatgaatt

SEQ ID NO: 139088 - DNA, 120 bp, Artificial Sequence
  ENSG00000103852_15 (sequence is synthesized)
ttgccattttctacaaatgactggacaaaaagagagagcaacctcgatcctgagagagtccctggaagccaaagtggaagcatttggcgatttcagtcccgaggtggcagagacataccg

SEQ ID NO: 139089 - DNA, 120 bp, Artificial Sequence
  ENSG00000103852_16 (sequence is synthesized)
accacagtggggcccgcaagaaactgaagaagtgtctccagatccagaccctcttatatggaccgcaggacaaaaggactctggccacccagcaggccatgggcatgctgtccacggccc

SEQ ID NO: 139090 - DNA, 120 bp, Artificial Sequence
  ENSG00000103852_17 (sequence is synthesized)
ccaaggttgcttcgaagccaaggcaggcatcaaaagccaaagtggccttctgcaccagcatccctcaggacaccctgctggggaaggcccggcccggcacaacagcagactgaggccccc

SEQ ID NO: 139091 - DNA, 120 bp, Artificial Sequence
  ENSG00000103852_18 (sequence is synthesized)
accctgaaaaagcctaggacattcctgggcactgtcatttagggtgctgtacaaatcacctccgcctagaaaatggaattcaacagtcaggatacagatttccaaggccaactgttggcc

SEQ ID NO: 139092 - DNA, 120 bp, Artificial Sequence
  ENSG00000103852_19 (sequence is synthesized)
ccaacatgcaacagtgagaccataagcctcccgtgggccacattttgacagtggatgcccttcagggtgatatatgctataaagcagttttctatcacctaagtggtttttcttgccaac

SEQ ID NO: 139093 - DNA, 120 bp, Artificial Sequence
  ENSG00000103852_20 (sequence is synthesized)
aagaatttttacccatcagcactactgtggctgaaaaacttctcttcaacagttcagtgcgccctgtgcaggagtcagcccggcatctgcttgtacacacagctccttgcataggtgtgg

SEQ ID NO: 139094 - DNA, 120 bp, Artificial Sequence
  ENSG00000103852_21 (sequence is synthesized)
agttagatctggacagtgaacttcaggaagtcctttcttataggaggctaatagggattgagaataacatgagaagaaaacgctaataaagggaaacctgaacacgctgctgtcagcatg

SEQ ID NO: 139095 - DNA, 120 bp, Artificial Sequence
  ENSG00000103852_22 (sequence is synthesized)
tgttttcaaagtgcagcctgcctcagagttcttcggagcctgaaaaggggtttgagaaagagcccagtaggaggggcaggaggccgacacacctgacttggcctggggcccaggaggcag

SEQ ID NO: 139096 - DNA, 120 bp, Artificial Sequence
  ENSG00000103852_23 (sequence is synthesized)
gtgtaagggagtgaaaagaaaggctagccggaggctgcggggggaagaccgcagactccctgctgcttcgcatccctcctgtggcctccactgcaggcaggacaaacctggatgccacct

SEQ ID NO: 139097 - DNA, 120 bp, Artificial Sequence
  ENSG00000103852_24 (sequence is synthesized)
ggagctgcttcctgagttggcacactatcgtgtacacagcagtcttcagccccctggaaggaggccatagtcgtgtgaggatggcaaagtcgaacaggaagctttgagtgccttcctcca

SEQ ID NO: 139098 - DNA, 120 bp, Artificial Sequence
  ENSG00000103852_25 (sequence is synthesized)
cgatgtcaacgaggagatccagtgccagatcgaggtggatggaacacccaggggtaggggtgcaggtgtgggcagtgatgtcccttcccctccctcccctggtcccacagactgtggcca

SEQ ID NO: 139099 - DNA, 120 bp, Artificial Sequence
  ENSG00000103852_26 (sequence is synthesized)
tgaggctgcaggctggtgctatgacagcagattgcagcacagggccctcccctccagcccccagtgggacatcaaaaccaccctggggccatttgtgcagggcaccacctccagtattga

SEQ ID NO: 139100 - DNA, 120 bp, Artificial Sequence
  ENSG00000103852_27 (sequence is synthesized)
tggggaaaataaactcagtagagccacgacagggtggagagaagcagggaccattgtcttcctcaggagcgtgacagctgaccccacagaccatgcttgctggtacacactggtcccaga

SEQ ID NO: 139101 - DNA, 120 bp, Artificial Sequence
  ENSG00000103852_28 (sequence is synthesized)
cccaggcctgtcggacatcagcagtgtgctaaaaacgtgtaagatgtcactactcaccgtgtgtcctatctagttgacatgggtggagtcagctaaggggtgaatgttcatatgctccca

SEQ ID NO: 139102 - DNA, 120 bp, Artificial Sequence
  ENSG00000103852_29 (sequence is synthesized)
attcacgttgaagccctaatccccaaagggatggtattgggggtggggtcttggagaggtgattaggttatgagggtggagccctgatgaatgggattagtgctttataaggagagacac

SEQ ID NO: 139103 - DNA, 120 bp, Artificial Sequence
  ENSG00000103852_30 (sequence is synthesized)
cagagagatgatctctctctccaccatgtgaggacacagtgagaagacagccgtctgcaggcccggaagagagccctcaccaggaaatgaaactgttggcaccttgagacttcccagctt

SEQ ID NO: 139104 - DNA, 120 bp, Artificial Sequence
  ENSG00000103852_31 (sequence is synthesized)
ccagaactgtaagaaataaatgtttgttgtttaagcctttcaggctacggctttctgttacagcagcctgaactgagagtccatgccgagtttttgaaataaatgtgaattctgatgtta

SEQ ID NO: 139105 - DNA, 120 bp, Artificial Sequence
  ENSG00000103852_32 (sequence is synthesized)
actcttgcttccggctccggcgtggggtttgatgtcgacggagtggcttttgcttagcgtcttgaaggggggaaaaaaatcctctaagctggtgatttcacgttctttgacaaacttcaa

SEQ ID NO: 139106 - DNA, 120 bp, Artificial Sequence
  ENSG00000103852_33 (sequence is synthesized)
tatcaacaggcaacgataccactttaagaaaattccaaggaaaagacctcattttaaaattcccacctctggctcccaaagattggtttgcaaacttcgacaaaatactcttctccactc

SEQ ID NO: 139107 - DNA, 120 bp, Artificial Sequence
  ENSG00000103852_34 (sequence is synthesized)
cgcaggggaaccacagtggggcccgcaagaaactgaagaagggagaccttagtttcctgctctcagcgacacttccatagcctcatgatagctgcttggtgttctacagtgtctccagat

SEQ ID NO: 139108 - DNA, 120 bp, Artificial Sequence
  ENSG00000103852_35 (sequence is synthesized)
aggggaaccacagtggggcccgcaagaaactgaagaagaatctcaagagaaagctggttctagaaggttctgtgtaaccttctctggaatgttttgctgacttcccataacttgcataaa

SEQ ID NO: 139109 - DNA, 120 bp, Artificial Sequence
  ENSG00000103852_36 (sequence is synthesized)
acttttgtttctgtatttctactctgagaattgagctatatggtataatcaagagaagtagaatgttttggattacattcctaatctcagcagtttgatacaagaaagtatataagacag

SEQ ID NO: 139110 - DNA, 120 bp, Artificial Sequence
  ENSG00000103852_37 (sequence is synthesized)
tataacaagggccacatttaaaaatagaaactggagcccatcctctggtcagtaccaaggttcttgcctttatttttaaaaatactacttttaaatctattttttgcatacagatagtca

SEQ ID NO: 139111 - DNA, 120 bp, Artificial Sequence
  ENSG00000103852_38 (sequence is synthesized)
cagagagttttgtgaaatagtgctaaaactgttcacttttgcctagatccctcagaacatccaaaccaaaggtcagtcactaggagacatcccaggagcatgctaattccatcacagcag

SEQ ID NO: 139112 - DNA, 120 bp, Artificial Sequence
  ENSG00000103852_39 (sequence is synthesized)
gacttaggaagtgtgattggaagtatgggagccaaggaagttcaggacatggggtgtagaatctagaaccaagtggaaaatttcctgaacacaattcagatttaaggaagctgcagagaa

SEQ ID NO: 139113 - DNA, 120 bp, Artificial Sequence
  ENSG00000103852_40 (sequence is synthesized)
cagggcccacccctggctcagtcagccaaggccaggagagtggtgaaaggctgcagaaagaattcctgaaggcggcttcatggatcaggaacatctcaggagtatactgagcccaagaac

SEQ ID NO: 139114 - DNA, 120 bp, Artificial Sequence
  ENSG00000103852_41 (sequence is synthesized)
actgaagtcggatttgggtccagtcatcatctggcctccgtattaggtactatcttcagcagggttcagtccactgcctcactactttagctgtgggcattaaacatttccacacacaaa

SEQ ID NO: 139115 - DNA, 120 bp, Artificial Sequence
  ENSG00000103852_42 (sequence is synthesized)
taattcgctcgaaaaagaaacggaggcaccccttatgaaagtaatatttgaagacaataaaactgacagtggaatttaagatggctagaccagagcagagaccagaagctaaggggcccc

SEQ ID NO: 139116 - DNA, 120 bp, Artificial Sequence
  ENSG00000103852_43 (sequence is synthesized)
gaggagcagacctggcgcaggggaaccacagtggggcccgcaagaaactgaagaaggtaaagctggaaccagtactaacacgagactaggctctccctcccctctccaaggtcaatttct

SEQ ID NO: 139117 - DNA, 120 bp, Artificial Sequence
  ENSG00000103852_44 (sequence is synthesized)
ctcccttgtggtggttcttttaaatgaaactttagaagtggcttgtttagataggatgacatcacttttgtggtagatctaacctgatactttttgggtaaaagacatagtaagcctctt

SEQ ID NO: 139118 - DNA, 120 bp, Artificial Sequence
  ENSG00000103852_45 (sequence is synthesized)
agacatacatattttttaaatgaattatcagtttttactatgcaaatatttttaattttttacgtagtacaattgatcagtcctttatgtttgcggtgctctctctatactgagtttata

SEQ ID NO: 139119 - DNA, 120 bp, Artificial Sequence
  ENSG00000103852_46 (sequence is synthesized)
gaggaattctcttacactttcttcaattgtcattcttctttaaatttggagtttatttgtgtggatggcatgaggaatggatctaatcttaccttttttccaaatggccacccagttgtc

SEQ ID NO: 139120 - DNA, 120 bp, Artificial Sequence
  ENSG00000103852_47 (sequence is synthesized)
cagcaccatttaattagagagcccatctatgctccagtgacttcagataacaccttcatcatatactgattttccttatggacttaagtctatttctagatttctcttctcttccactag

SEQ ID NO: 139121 - DNA, 120 bp, Artificial Sequence
  ENSG00000103852_48 (sequence is synthesized)
tctttctgtttattcatgtgtcaatatttcagttttaattacagagattttatagaatgatttaatatgtgataggagtagacaccccttatggcttttcttttactagaatatcaggtg

SEQ ID NO: 139122 - DNA, 120 bp, Artificial Sequence
  ENSG00000103852_49 (sequence is synthesized)
ttctagctattcttccgtgtttatttttctacatgaatttttgtatcaatttgtctaactccataaagagcttactagtatttttattgcattatttataaataaatcttgtgagaattg

SEQ ID NO: 139123 - DNA, 120 bp, Artificial Sequence
  ENSG00000103855_0 (sequence is synthesized)
attcgggccgggcctcgctgcggcggcgactgagccaggctgggccgcgtccctgagtcccagagtcggcgcggcgcggcaggggcagccttccaccacggggagcccagctgtcagccg

SEQ ID NO: 139124 - DNA, 120 bp, Artificial Sequence
  ENSG00000103855_1 (sequence is synthesized)
cctcacaggaagatgctgcgtcggcggggcagccctggcatgggtgtgcatgtgggtgcagccctgggagcactgtggttctgcctcacaggagccctggaggtccaggtccctgaagac

SEQ ID NO: 139125 - DNA, 120 bp, Artificial Sequence
  ENSG00000103855_2 (sequence is synthesized)
ccagtggtggcactggtgggcaccgatgccaccctgtgctgctccttctcccctgagcctggcttcagcctggcacagctcaacctcatctggcagctgacagataccaaacagctggtg

SEQ ID NO: 139126 - DNA, 120 bp, Artificial Sequence
  ENSG00000103855_3 (sequence is synthesized)
cacagctttgctgagggccaggaccagggcagcgcctatgccaaccgcacggccctcttcccggacctgctggcacagggcaacgcatccctgaggctgcagcgcgtgcgtgtggcggac

SEQ ID NO: 139127 - DNA, 120 bp, Artificial Sequence
  ENSG00000103855_4 (sequence is synthesized)
gagggcagcttcacctgcttcgtgagcatccgggatttcggcagcgctgccgtcagcctgcaggtggccgctccctactcgaagcccagcatgaccctggagcccaacaaggacctgcgg

SEQ ID NO: 139128 - DNA, 120 bp, Artificial Sequence
  ENSG00000103855_5 (sequence is synthesized)
ccaggggacacggtgaccatcacgtgctccagctaccagggctaccctgaggctgaggtgttctggcaggatgggcagggtgtgcccctgactggcaacgtgaccacgtcgcagatggcc

SEQ ID NO: 139129 - DNA, 120 bp, Artificial Sequence
  ENSG00000103855_6 (sequence is synthesized)
aacgagcagggcttgtttgatgtgcacagcatcctgcgggtggtgctgggtgcaaatggcacctacagctgcctggtgcgcaaccccgtgctgcagcaggatgcgcacagctctgtcacc

SEQ ID NO: 139130 - DNA, 120 bp, Artificial Sequence
  ENSG00000103855_7 (sequence is synthesized)
atcacaccccagagaagccccacaggagccgtggaggtccaggtccctgaggacccggtggtggccctagtgggcaccgatgccaccctgcgctgctccttctcccccgagcctggcttc

SEQ ID NO: 139131 - DNA, 120 bp, Artificial Sequence
  ENSG00000103855_8 (sequence is synthesized)
agcctggcacagctcaacctcatctggcagctgacagacaccaaacagctggtgcacagtttcaccgaaggccgggaccagggcagcgcctatgccaaccgcacggccctcttcccggac

SEQ ID NO: 139132 - DNA, 120 bp, Artificial Sequence
  ENSG00000103855_9 (sequence is synthesized)
ctgctggcacaaggcaatgcatccctgaggctgcagcgcgtgcgtgtggcggacgagggcagcttcacctgcttcgtgagcatccgggatttcggcagcgctgccgtcagcctgcaggtg

SEQ ID NO: 139133 - DNA, 120 bp, Artificial Sequence
  ENSG00000103855_10 (sequence is synthesized)
gccgctccctactcgaagcccagcatgaccctggagcccaacaaggacctgcggccaggggacacggtgaccatcacgtgctccagctaccggggctaccctgaggctgaggtgttctgg

SEQ ID NO: 139134 - DNA, 120 bp, Artificial Sequence
  ENSG00000103855_11 (sequence is synthesized)
caggatgggcagggtgtgcccctgactggcaacgtgaccacgtcgcagatggccaacgagcagggcttgtttgatgtgcacagcgtcctgcgggtggtgctgggtgcgaatggcacctac

SEQ ID NO: 139135 - DNA, 120 bp, Artificial Sequence
  ENSG00000103855_12 (sequence is synthesized)
agctgcctggtgcgcaaccccgtgctgcagcaggatgcgcacggctctgtcaccatcacagggcagcctatgacattccccccagaggccctgtgggtgaccgtggggctgtctgtctgt

SEQ ID NO: 139136 - DNA, 120 bp, Artificial Sequence
  ENSG00000103855_13 (sequence is synthesized)
gctgtgaggaggagaatgcaggagctgaggaccaggatggggagggagaaggctccaagacagccctgcagcctctgaaacactctgacagcaaagaagatgatggacaagaaatagcct

SEQ ID NO: 139137 - DNA, 120 bp, Artificial Sequence
  ENSG00000103855_14 (sequence is synthesized)
gaccatgaggaccagggagctgctacccctccctacagctcctaccctctggctgcaatggggctgcactgtgagccctgcccccaacagatgcatcctgctctgacaggtgggctcctt

SEQ ID NO: 139138 - DNA, 120 bp, Artificial Sequence
  ENSG00000103855_15 (sequence is synthesized)
ctccaaaggatgcgatacacagaccactgtgcagccttatttctccaatggacatgattcccaagtcatcctgctgccttttttcttatagacacaatgaacagaccacccacaacctta

SEQ ID NO: 139139 - DNA, 120 bp, Artificial Sequence
  ENSG00000103855_16 (sequence is synthesized)
gttctctaagtcatcctgcctgctgccttatttcacagtacatacatttcttagggacacagtacactgaccacatcaccaccctcttcttccagtgctgcgtggaccatctggctgcct

SEQ ID NO: 139140 - DNA, 120 bp, Artificial Sequence
  ENSG00000103855_17 (sequence is synthesized)
tttttctccaaaagatgcaatattcagactgactgaccccctgccttatttcaccaaagacacgatgcatagtcaccccggccttgtttctccaatggccgtgatacactagtgatcatg

SEQ ID NO: 139141 - DNA, 120 bp, Artificial Sequence
  ENSG00000103855_18 (sequence is synthesized)
ttcagccctgcttccacctgcatagaatcttttcttctcagacagggacagtgcggcctcaacatctcctggagtctagaagctgtttcctttcccctccttcctcctcttgctctagcc

SEQ ID NO: 139142 - DNA, 120 bp, Artificial Sequence
  ENSG00000103855_19 (sequence is synthesized)
ttaatactggccttttccctccctgccccaagtgaagacagggcactctgcgcccaccacatgcacagctgtgcatggagacctgcaggtgcacgtgctggaacacgtgtggttcccccc

SEQ ID NO: 139143 - DNA, 120 bp, Artificial Sequence
  ENSG00000103855_20 (sequence is synthesized)
tggcccagcctcctctgcagtgcccctctcccctgcccatcctccccacggaagcatgtgctggtcacactggttctccaggggtctgtgatggggcccctgggggtcagcttctgtccc

SEQ ID NO: 139144 - DNA, 120 bp, Artificial Sequence
  ENSG00000103855_21 (sequence is synthesized)
tctgccttctcacctctttgttcctttcttttcatgtatccattcagttgatgtttattgagcaactacagatgtcagcactgtgttaggtgctgggggccctgcgtgggaagataaagt

SEQ ID NO: 139145 - DNA, 120 bp, Artificial Sequence
  ENSG00000103855_22 (sequence is synthesized)
tcctccctcaaggactccccatccagctgggagacagacaactaactacactgcaccctgcggtttgcagggggctcctgcctggctccctgctccacacctcctctgtggctcaaggct

SEQ ID NO: 139146 - DNA, 120 bp, Artificial Sequence
  ENSG00000103855_23 (sequence is synthesized)
tcctggatacctcacccccatcccacccataattcttacccagagcatggggttggggcggaaacctggagagagggacatagcccctcgccacggctagagaatctggtggtgtccaaa

SEQ ID NO: 139147 - DNA, 120 bp, Artificial Sequence
  ENSG00000103855_24 (sequence is synthesized)
atgtctgtccaggtgtgggcaggtgggcaggcaccaaggccctctggacctttcatagcagcagaaaaggcagagcctggggcagggcagggccaggaatgctttggggacaccgagggg

SEQ ID NO: 139148 - DNA, 120 bp, Artificial Sequence
  ENSG00000103855_25 (sequence is synthesized)
actgccccccacccccaccatggtgctattctggggctggggcagtcttttcctggcttgcctctggccagctcctggcctctggtagagtgagacttcagacgttctgatgccttccgg

SEQ ID NO: 139149 - DNA, 120 bp, Artificial Sequence
  ENSG00000103855_26 (sequence is synthesized)
atgtcatctctccctgccccaggaatggaagatgtgaggacttctaatttaaatgtgggactcggagggattttgtaaactgggggtatattttggggaaaataaatgtctttgtaaaaa

SEQ ID NO: 139150 - DNA, 120 bp, Artificial Sequence
  ENSG00000103855_27 (sequence is synthesized)
gtgtctgtgtatgcacacatctgtgtgtgagaggctgagagggtgggtaggcatcatcctttcactagtgacctgaggccccctctgcagaagagcagcctcaacttccccctggtgaga

SEQ ID NO: 139151 - DNA, 120 bp, Artificial Sequence
  ENSG00000103855_28 (sequence is synthesized)
tggcagagggctgagtaaccaaggtcccagctgctctgatgggacccaaatacgacagaggcttaagcaggacaggagtttattcctccttcctgtgatagtgtgagcataggtaatcgt

SEQ ID NO: 139152 - DNA, 120 bp, Artificial Sequence
  ENSG00000103855_29 (sequence is synthesized)
aaaaccactgatgacctggagccaggttccacttacctggattctgccctcttcaacttcaagctttcactcctaggtctaagaggctgtttgtgctcccacgccccctccagagccaag

SEQ ID NO: 139153 - DNA, 120 bp, Artificial Sequence
  ENSG00000103855_30 (sequence is synthesized)
agggagagaaaggaaggatatgtttccttctagagcttgagtggaagtagcctgcatcacttccgcttacattccattggtcagaacccaggcatatgagccctaactcaggggaggcta

SEQ ID NO: 139154 - DNA, 120 bp, Artificial Sequence
  ENSG00000103855_31 (sequence is synthesized)
gaaaagtgttcagctgggtagccatgtccctggcgcacagtgggtggttagtaaatgtccatagtcattattgggcctattgttataatgtcagtgatgacatttggaaatacaggagat

SEQ ID NO: 139155 - DNA, 120 bp, Artificial Sequence
  ENSG00000103855_32 (sequence is synthesized)
aggtcatttccttcctgtttttcagaatcaaataaccatagaagagctgggcagatggagataaaaagtgtcagcttaggccaggcatggtacttcacacctgtaatctcagcactttgg

SEQ ID NO: 139156 - DNA, 120 bp, Artificial Sequence
  ENSG00000103855_33 (sequence is synthesized)
agagctgtgaggaggagaatgcaggtgagtgtgtgtgtatgtgtgtgcgtgcgcatgcacacttatgtgtcttggggtatgttgctgtctttgatgtcaatagagtgtcactttctagtg

SEQ ID NO: 139157 - DNA, 120 bp, Artificial Sequence
  ENSG00000103855_34 (sequence is synthesized)
acagaacgagtgtgtgtgtgcagatggggctggatttgtctgtgtgtgaccttgagtctacgtcttgtgtgtgtgaacaagcgtgagcctgtctgtccatgtgcagataccacaggatga

SEQ ID NO: 139158 - DNA, 120 bp, Artificial Sequence
  ENSG00000103855_35 (sequence is synthesized)
gggcgaaggtgtgggcgactggtgcacttccacaggcagccgtgggcagcatgaggggtcagattccgggaaggacaggcaggggcagccttccaccacggggagcccagctgtcagccg

SEQ ID NO: 139159 - DNA, 120 bp, Artificial Sequence
  ENSG00000103855_36 (sequence is synthesized)
attcgggccgggcctcgctgcggcggcgactgagccaggctgggccgcgtccctgagtcccagagtcggcgcggcgcgtcttgcagtatcgcccagactggagtacagtggcgcgatttc

SEQ ID NO: 139160 - DNA, 120 bp, Artificial Sequence
  ENSG00000103855_37 (sequence is synthesized)
tttcctcgggttgagaggggcccgggcgccgtcggacctgcagaccccggaagctgcggaccgggccgggtgggtgaatgcgcttttgcaggccccgggtctggagcgggcatgggggca

SEQ ID NO: 139161 - DNA, 120 bp, Artificial Sequence
  ENSG00000103855_38 (sequence is synthesized)
ctttgtctgctgcgggccgggcctggatcccgcggaggtccgcacgttcccgctcagggctgcaggagctgagcagggcgccttccctccgggctcctgctcccctgccctcccccaggt

SEQ ID NO: 139162 - DNA, 120 bp, Artificial Sequence
  ENSG00000103855_39 (sequence is synthesized)
gcggcccccctcgcacaggagtcccgggaaccgcgggcgcccctcctgccctgggctgtggggcccgcggagagctgggggctcccggatcctaccccgcccccctttcctcgggttgag

SEQ ID NO: 139163 - DNA, 120 bp, Artificial Sequence
  ENSG00000103855_40 (sequence is synthesized)
agtcccagagtcggcgcggcgcggccccacctcttaatactgttacagtggcaattaaatttcaacatgagtcttaaagcacccatgtcatctaggaagaagaaactgtatttgcagcaa

SEQ ID NO: 139164 - DNA, 120 bp, Artificial Sequence
  ENSG00000103855_41 (sequence is synthesized)
ctttctgggctgtggtgccagcatggtgtggaggaagaacccaagactggggttggacagcaggattccagccctgttctgccgccagtcgatgaccagcaggggcagccttccaccacg

SEQ ID NO: 139165 - DNA, 120 bp, Artificial Sequence
  ENSG00000103876_0 (sequence is synthesized)
ggaagggcgggcgagactgtggaggacctggagctggcgggggtcagggcccgcagccgtgccgggtgctcttcagcatgtccttcatcccggtggccgaggattccgacttccccatcc

SEQ ID NO: 139166 - DNA, 120 bp, Artificial Sequence
  ENSG00000103876_1 (sequence is synthesized)
acaacctgccctacggcgtcttctcgaccagaggcgacccaagaccgaggataggtgtggccattggcgaccagatcctggacctcagcatcatcaagcacctctttactggtcctgtcc

SEQ ID NO: 139167 - DNA, 120 bp, Artificial Sequence
  ENSG00000103876_2 (sequence is synthesized)
tctccaaacaccaggatgtcttcaatcagcctacactcaacagcttcatgggcctgggtcaggctgcctggaaggaggcgagagtgttcttgcagaacttgctgtctgtgagccaagcca

SEQ ID NO: 139168 - DNA, 120 bp, Artificial Sequence
  ENSG00000103876_3 (sequence is synthesized)
ggctcagagatgacaccgaacttcggaagtgtgcattcatctcccaggcttctgccacgatgcaccttccagccaccataggagactacacagacttctattcctctcggcagcatgcta

SEQ ID NO: 139169 - DNA, 120 bp, Artificial Sequence
  ENSG00000103876_4 (sequence is synthesized)
ccaacgtcggaatcatgttcagggacaaggagaatgcgttgatgccaaattggctgcacttaccagtgggctaccatggccgtgcctcctctgtcgtggtgtctggcaccccaatccgaa

SEQ ID NO: 139170 - DNA, 120 bp, Artificial Sequence
  ENSG00000103876_5 (sequence is synthesized)
ggcccatgggacagatgaaacctgatgactctaagcctcccgtatatggtgcctgcaagctcttggacatggagctggaaatggctttttttgtaggccctggaaacagattgggagagc

SEQ ID NO: 139171 - DNA, 120 bp, Artificial Sequence
  ENSG00000103876_6 (sequence is synthesized)
ttttggaatggtccttatgaacgactggagtgcacgagacattcagaagtgggagtatgtccctctcgggccattccttgggaagagttttgggaccactgtctctccgtgggtggtgcc

SEQ ID NO: 139172 - DNA, 120 bp, Artificial Sequence
  ENSG00000103876_7 (sequence is synthesized)
catggatgctctcatgccctttgctgtgcccaacccgaagcaggaccccaggcccctgccgtatctgtgccatgacgagccctacacatttgacatcaacctctctgttaacctgaaagg

SEQ ID NO: 139173 - DNA, 120 bp, Artificial Sequence
  ENSG00000103876_8 (sequence is synthesized)
agaaggaatgagccaggcggctaccatatgcaagtccaattttaagtacatgtactggacgatgctgcagcagctcactcaccactctgtcaacggctgcaacctgcggccgggggacct

SEQ ID NO: 139174 - DNA, 120 bp, Artificial Sequence
  ENSG00000103876_9 (sequence is synthesized)
cctggcttctgggaccatcagcgggccggagccagaaaacttcggctccatgttggaactgtcgtggaagggaacgaagcccatagacctggggaatggtcagaccaggaagtttctgct

SEQ ID NO: 139175 - DNA, 120 bp, Artificial Sequence
  ENSG00000103876_10 (sequence is synthesized)
ggacggggatgaagtcatcataacagggtactgccagggggatggttaccgcatcggctttggccagtgtgctggaaaagtgctgcctgctctcctgccatcatgagattttctctgctc

SEQ ID NO: 139176 - DNA, 120 bp, Artificial Sequence
  ENSG00000103876_11 (sequence is synthesized)
ttctggaaacaaagggctcaagcacccctttcaaccctgtgactggggtcctccctcgggctgtaggcctggtccgccattcagtgacaaataaagccattgtgctctgaggcctgcact

SEQ ID NO: 139177 - DNA, 120 bp, Artificial Sequence
  ENSG00000103876_12 (sequence is synthesized)
cggggcggggctctggaagggcgggcgagactgtggaggacctggagctggcgggggtcagggtaggggggaggggcagggctcggggttcgggggcggggtgttcacggtgagaccaaa

SEQ ID NO: 139178 - DNA, 120 bp, Artificial Sequence
  ENSG00000103876_13 (sequence is synthesized)
gcagatgcagctgtgtccacttatgatcgtgatttgatccagtgggtcaaggtgtgtaaagcctccctgccagatattcattaatatgttttctcactcttattagtgaggtcaggggtc

SEQ ID NO: 139179 - DNA, 120 bp, Artificial Sequence
  ENSG00000103876_14 (sequence is synthesized)
tttgtgggattttcttattagacatcccaggcctcctggtattccatggaatttgaaaagagactggcacctgtagtagtcagggctctccagagaaatagaaccaaggagaaagagatc

SEQ ID NO: 139180 - DNA, 120 bp, Artificial Sequence
  ENSG00000103876_15 (sequence is synthesized)
gatttattgattgattgattgattttaagcaaattggcttctgggattctggagggtggcaagcccaaaacctgctgggtgggttgctggctggagacccaaggaagagctgcagtttga

SEQ ID NO: 139181 - DNA, 120 bp, Artificial Sequence
  ENSG00000103876_16 (sequence is synthesized)
gtctgaagcagtctgctgtcaaaatttcctcttcctctgggaagtgagtcattgtttggtgaaggccatcaactgattagatgaggcccagccacactgtgggggtcttctgctttactc

SEQ ID NO: 139182 - DNA, 120 bp, Artificial Sequence
  ENSG00000103876_17 (sequence is synthesized)
cactgatttaagttttatttcacctaaaaagtactttcttagaaacatgtagaatagcatttgagcaaatatttgggtaccttagtctagccaaattaatacagaaaactgcccatcaca

SEQ ID NO: 139183 - DNA, 120 bp, Artificial Sequence
  ENSG00000103876_18 (sequence is synthesized)
aaaagtcaggtaggagcctccggggtccctgctgtgtcacccggacaggccgtgggggcgggcaggggggcggggccgggcctgaccacagcggccgagttcagtcctgctctccgcacg

SEQ ID NO: 139184 - DNA, 120 bp, Artificial Sequence
  ENSG00000103876_19 (sequence is synthesized)
gtcaggctgggagttgggtaatgctttcctttggacaactttatatcagatatgaccaactattttaaaacaaaggcaatgcacattcattctcttgaagttagacaaatgcggtctccc

SEQ ID NO: 139185 - DNA, 120 bp, Artificial Sequence
  ENSG00000103876_20 (sequence is synthesized)
tccttagtttgtttccctcaagttgcagatgggaaactgaggcccagagacttgtccaaggtgataagatggtgaatgagggagcagacttggagcccaggaatcctggatctgacctgt

SEQ ID NO: 139186 - DNA, 120 bp, Artificial Sequence
  ENSG00000103876_21 (sequence is synthesized)
gagccccctctagttttgtgctgaagaaaataactcccaaggttgaaagtagagggactcactctctcagactttttctgggtcctcaggtcatagtttgaagcacaagtttgaagcttc

SEQ ID NO: 139187 - DNA, 120 bp, Artificial Sequence
  ENSG00000103876_22 (sequence is synthesized)
taggctttgtttgcatttgaggcagcaggcagctgcacttgtgaccccattttggaagttgcttactggtggtgactccttcttgccttcagctggggtgtggggaccagggtcagagat

SEQ ID NO: 139188 - DNA, 120 bp, Artificial Sequence
  ENSG00000103876_23 (sequence is synthesized)
gtggtccaagggtctgccctgcacattccctgaatggaaagccacttggattcaggtggttcagctctttgcctaaagcagatttgccattttcaggaggggaagactgaggcccaggga

SEQ ID NO: 139189 - DNA, 120 bp, Artificial Sequence
  ENSG00000103876_24 (sequence is synthesized)
gttggcagtggggctgagaatgagtaactaagctctccaggcagcctcttctagggtaggctctgctgggacctcagatgaggagtatggctctggtctaccccgattccaagagctgac

SEQ ID NO: 139190 - DNA, 120 bp, Artificial Sequence
  ENSG00000103876_25 (sequence is synthesized)
atgcgtggagaaatggtcatcttttctcagcccaccccagtgagcagccaatggagataaggccagccaataatcccaccactaagctcgctggcactgaaatggccaagctggtggttc

SEQ ID NO: 139191 - DNA, 120 bp, Artificial Sequence
  ENSG00000103876_26 (sequence is synthesized)
aggagagctggaagcctggctcaggacagagccctgggaagttgagtctgcaaacatgccctcgggttcttgttgacgagcaaagctcagggttgtggggacaaagaccaggacttaaca

SEQ ID NO: 139192 - DNA, 120 bp, Artificial Sequence
  ENSG00000103876_27 (sequence is synthesized)
aatatttaagacatctttgttgatgctgggattttgtggtacagaaaggaacttgccttgcatgttctgagcagtctggcttcctgcagctcccttacaacccgagctctcctccatttg

SEQ ID NO: 139193 - DNA, 120 bp, Artificial Sequence
  ENSG00000103876_28 (sequence is synthesized)
agctacaacagagctcattaatccaagccacctggccctcagcactgtgtgttgggcactcatgctccaccgcacaactgaactaccctagtcaaggcctagaaacctggaaaataatcc

SEQ ID NO: 139194 - DNA, 120 bp, Artificial Sequence
  ENSG00000103876_29 (sequence is synthesized)
aacatcctggtaaggtggtaagctcctcatcactggaggcatttatgtaatgcctagggaactttgcaggggtctttgcccaggttaagtggctaggaccaggctgactgctcttccccc

SEQ ID NO: 139195 - DNA, 120 bp, Artificial Sequence
  ENSG00000103876_30 (sequence is synthesized)
agtccaagggatatttgatttctttcccattcagggaacacagattatttttccttttagttctggaagcagagatggcacaagggagctggggcaggatgctgagaacatggttcttca

SEQ ID NO: 139196 - DNA, 120 bp, Artificial Sequence
  ENSG00000103876_31 (sequence is synthesized)
gggccacctaaagggggacctgtggactcttcaatagataggctttctgagtaaatgagccaagcccagccaggggctttttctggtgctgacggtgtcgtcttcctcctagccaagacc

SEQ ID NO: 139197 - DNA, 120 bp, Artificial Sequence
  ENSG00000103876_32 (sequence is synthesized)
aaattgatcttgaatccatctggatttccttttatgtgtgaggtgtggtatgggtctgtatccatttcctggggctgctgtaagaaaaagccacaacaacaggaatttatcccctcagtt

SEQ ID NO: 139198 - DNA, 120 bp, Artificial Sequence
  ENSG00000103876_33 (sequence is synthesized)
ttgtttcacagactctaagtgaaatcatgttggacaatgggaagcttcagccacagaacaattctttttttattttcctccctgatgcatggaattaagttttcatcaatattgcttttc

SEQ ID NO: 139199 - DNA, 120 bp, Artificial Sequence
  ENSG00000103876_34 (sequence is synthesized)
agttcaaagtctttcttttcatttccagcagcatatttgtctcaggagctgccaagttcttcttaaagtaaactggggaggaaaagcagttatgatgttgcaacctctggaagcagtggt

SEQ ID NO: 139200 - DNA, 120 bp, Artificial Sequence
  ENSG00000103876_35 (sequence is synthesized)
tgctccccacacagccccaagggccctcagctcagcctcgagaagagatttcaggcccgaggagccagaaaacttcggctccatgttggaactgtcgtggaagggaacgaagcccataga

SEQ ID NO: 139201 - DNA, 120 bp, Artificial Sequence
  ENSG00000103876_36 (sequence is synthesized)
tgtgtattattgtactatgggcaagtcttagactctagcatgctccatacttacattttctgatgaatgagaatcctcaaatgtgcccagtgctgtatattcctcaacatgtgatcggtt

SEQ ID NO: 139202 - DNA, 120 bp, Artificial Sequence
  ENSG00000103876_37 (sequence is synthesized)
tcattcatttgtttgatcctcgtagtagttctctgatgtcacaaggccatgattgtaagccccattttacagacaggaaaatgggctcagagaaggatcaacttgcctgagcacaacagg

SEQ ID NO: 139203 - DNA, 120 bp, Artificial Sequence
  ENSG00000103876_38 (sequence is synthesized)
gccacagcctgtctcccagcccccagatcaggccattgaccaagctgaggatgcagagctgggatccttgccctttgttctgtgttgtcccctggatgtgatggttccttggaactgaag

SEQ ID NO: 139204 - DNA, 120 bp, Artificial Sequence
  ENSG00000103876_39 (sequence is synthesized)
agggcctggactcagtggcaggcatacactccaggccccagtgccatcagtcacacacaggagctgggttagggacggggctttactctctctcgagtgagtgtctccagtaggctatgc

SEQ ID NO: 139205 - DNA, 120 bp, Artificial Sequence
  ENSG00000103876_40 (sequence is synthesized)
catgaggggagggtctgttagaaccaagatgaggaagaaagaaagggagagagagcagttccaagccagagatgttgaacaacaaggccaaggttgcagaatgaggcaggggtgaatctg

SEQ ID NO: 139206 - DNA, 120 bp, Artificial Sequence
  ENSG00000103876_41 (sequence is synthesized)
agaccagaacccaggctccaggttccaggcttccacgtgagatgcgcaaatatttgagaatcttgcactgtacaggctccaggctgtatttgtccccagccagcttcaacttgtctatct

SEQ ID NO: 139207 - DNA, 120 bp, Artificial Sequence
  ENSG00000103876_42 (sequence is synthesized)
gatgggctgagtgtctatatgagtgtccttggcagtgatgacccagtggactgcccagccccagaagagctggctgtcacctgtgtgccaggatcccagtggccaaagggcaggggcacc

SEQ ID NO: 139208 - DNA, 120 bp, Artificial Sequence
  ENSG00000103876_43 (sequence is synthesized)
aggaagtgagaggagagccgggacctgggaaatgagtgttgactgtgtctgaaaccgagtgtgggggccgcagccatccttgccccatgtccttctgcagaataagagtaaacaggcctt

SEQ ID NO: 139209 - DNA, 120 bp, Artificial Sequence
  ENSG00000103876_44 (sequence is synthesized)
ctctagccatgtttgatgcaagatggcccacagctgtgactttttagctttatgtacatagtctttattataaaggtaacatatatttactggaattaacccaaacactacagaaaatat

SEQ ID NO: 139210 - DNA, 120 bp, Artificial Sequence
  ENSG00000103876_45 (sequence is synthesized)
agtggacatgccaggcatgcagaccatcaggagggaagctctgtgcccacggcatgcccacagcagagtgcctgggagttcctggccacgattacttccaggcagccagggcatcattct

SEQ ID NO: 139211 - DNA, 120 bp, Artificial Sequence
  ENSG00000103876_46 (sequence is synthesized)
agaatcttgcaagacccgggggatctggccagttggcaggaggagtccctgcaggtaccaacattgcacaacctcccaggtggccatcaaatcttgttctgtgcaaatggcgccacctgg

SEQ ID NO: 139212 - DNA, 120 bp, Artificial Sequence
  ENSG00000103876_47 (sequence is synthesized)
accccaactcatagaatgcagcttggagcccagcaacagggagtccctgcagcctctggttcccggcaccgcttggtctaccactgggtctaggccttgacccctggttccagtcctccc

SEQ ID NO: 139213 - DNA, 120 bp, Artificial Sequence
  ENSG00000103876_48 (sequence is synthesized)
ttctcagcctgttgcaatctgccccactccatcactggcaacacctggccagagtcacctgtgacccgatagtcagtgtcatgaccttgtgtccccttcagcatggacttcctgtggccc

SEQ ID NO: 139214 - DNA, 120 bp, Artificial Sequence
  ENSG00000103876_49 (sequence is synthesized)
ttgccttggcgcctggaatggagctgcccaagctaggccaggccaggcccattggccctctctcttactcaggctgtcctcattagcatcatctgtgacctcatctggtttctagagtag

SEQ ID NO: 139215 - DNA, 120 bp, Artificial Sequence
  ENSG00000103876_50 (sequence is synthesized)
gaaagagtttccacttgtctagtcccatttcctagggtagaatatagaaacggcttcagtgggtggatgtcctctcagctgtgaaaggttcagcatagctctggccccaggccagccaga

SEQ ID NO: 139216 - DNA, 120 bp, Artificial Sequence
  ENSG00000103876_51 (sequence is synthesized)
tgttccctgactcctccaaggaaagggagactcccttttgcggtctgctaagtaatgggtgccttcccaggcactggcgttaccgcttgaccaaggagcgctcaagcggcccttatgcgg

SEQ ID NO: 139217 - DNA, 120 bp, Artificial Sequence
  ENSG00000103876_52 (sequence is synthesized)
tcacctcttgccttctaggtcacttctcagaatgtcccttcagtacctgaccctatacccaccggttattcctaggttatattgtactacaataaagagtaatattaaaaactaatgatt

SEQ ID NO: 139218 - DNA, 120 bp, Artificial Sequence
  ENSG00000103876_53 (sequence is synthesized)
aatattaaaaactaatgattaataatgtttatactaataatcgataattgtccatgatcatctgtatatctaatttgtattacaactgtatagcagtatagctacagtttatgccttcag

SEQ ID NO: 139219 - DNA, 120 bp, Artificial Sequence
  ENSG00000103876_54 (sequence is synthesized)
acatggagctggaaatggtaagtgagcttgatgttttattgccatgggatctatagacacccggcaggagagccctttgggatggctccccgcaccatgagccgcccactcccctcctct

SEQ ID NO: 139220 - DNA, 120 bp, Artificial Sequence
  ENSG00000103888_0 (sequence is synthesized)
aaaagcggcctctcggctgagggccggggagctagcgctcaagcagagcccagcgcggtgctatcggacagagcctggcgagcgcaagcggcgcggggagccagcggggctgagcgcggc

SEQ ID NO: 139221 - DNA, 120 bp, Artificial Sequence
  ENSG00000103888_1 (sequence is synthesized)
cagggtctgaacccagatttcccagactagctaccactccgcttgcccacgccccgggagctcgcggcgcctggcggtcagcgaccagacgtccggggccgctgcgctcctggcccgcga

SEQ ID NO: 139222 - DNA, 120 bp, Artificial Sequence
  ENSG00000103888_2 (sequence is synthesized)
ggcgtgacactgtctcggctacagacccagagggagcacactgccaggatgggagctgctgggaggcaggacttcctcttcaaggccatgctgaccatcagctggctcactctgacctgc

SEQ ID NO: 139223 - DNA, 120 bp, Artificial Sequence
  ENSG00000103888_3 (sequence is synthesized)
ttccctggggccacatccacagtggctgctgggtgccctgaccagagccctgagttgcaaccctggaaccctggccatgaccaagaccaccatgtgcatatcggccagggcaagacactg

SEQ ID NO: 139224 - DNA, 120 bp, Artificial Sequence
  ENSG00000103888_4 (sequence is synthesized)
ctgctcacctcttctgccacggtctattccatccacatctcagagggaggcaagctggtcattaaagaccacgacgagccgattgttttgcgaacccggcacatcctgattgacaacgga

SEQ ID NO: 139225 - DNA, 120 bp, Artificial Sequence
  ENSG00000103888_5 (sequence is synthesized)
ggagagctgcatgctgggagtgccctctgccctttccagggcaatttcaccatcattttgtatggaagggctgatgaaggtattcagccggatccttactatggtctgaagtacattggg

SEQ ID NO: 139226 - DNA, 120 bp, Artificial Sequence
  ENSG00000103888_6 (sequence is synthesized)
gttggtaaaggaggcgctcttgagttgcatggacagaaaaagctctcctggacatttctgaacaagacccttcacccaggtggcatggcagaaggaggctatttttttgaaaggagctgg

SEQ ID NO: 139227 - DNA, 120 bp, Artificial Sequence
  ENSG00000103888_7 (sequence is synthesized)
ggccaccgtggagttattgttcatgtcatcgaccccaaatcaggcacagtcatccattctgaccggtttgacacctatagatccaagaaagagagtgaacgtctggtccagtatttgaac

SEQ ID NO: 139228 - DNA, 120 bp, Artificial Sequence
  ENSG00000103888_8 (sequence is synthesized)
gcggtgcccgatggcaggatcctttctgttgcagtgaatgatgaaggttctcgaaatctggatgacatggccaggaaggcgatgaccaaattgggaagcaaacacttcctgcaccttgga

SEQ ID NO: 139229 - DNA, 120 bp, Artificial Sequence
  ENSG00000103888_9 (sequence is synthesized)
tttagacacccttggagttttctaactgtgaaaggaaatccatcatcttcagtggaagaccatattgaatatcatggacatcgaggctctgctgctgcccgggtattcaaattgttccag

SEQ ID NO: 139230 - DNA, 120 bp, Artificial Sequence
  ENSG00000103888_10 (sequence is synthesized)
acagagcatggcgaatatttcaatgtttctttgtccagtgagtgggttcaagacgtggagtggacggagtggttcgatcatgataaagtatctcagactaaaggtggggagaaaatttca

SEQ ID NO: 139231 - DNA, 120 bp, Artificial Sequence
  ENSG00000103888_11 (sequence is synthesized)
gacctctggaaagctcacccaggaaaaatatgcaatcgtcccattgatatacaggccactacaatggatggagttaacctcagcaccgaggttgtctacaaaaaaggccaggattatagg

SEQ ID NO: 139232 - DNA, 120 bp, Artificial Sequence
  ENSG00000103888_12 (sequence is synthesized)
tttgcttgctacgaccggggcagagcctgccggagctaccgtgtacggttcctctgtgggaagcctgtgaggcccaaactcacagtcaccattgacaccaatgtgaacagcaccattctg

SEQ ID NO: 139233 - DNA, 120 bp, Artificial Sequence
  ENSG00000103888_13 (sequence is synthesized)
aacttggaggataatgtacagtcatggaaacctggagataccctggtcattgccagtactgattactccatgtaccaggcagaagagttccaggtgcttccctgcagatcctgcgccccc

SEQ ID NO: 139234 - DNA, 120 bp, Artificial Sequence
  ENSG00000103888_14 (sequence is synthesized)
aaccaggtcaaagtggcagggaaaccaatgtacctgcacatcggggaggagatagacggcgtggacatgcgggcggaggttgggcttctgagccggaacatcatagtgatgggggagatg

SEQ ID NO: 139235 - DNA, 120 bp, Artificial Sequence
  ENSG00000103888_15 (sequence is synthesized)
gaggacaaatgctacccctacagaaaccacatctgcaatttctttgacttcgatacctttgggggccacatcaagtttgctctgggatttaaggcagcacacttggagggcacggagctg

SEQ ID NO: 139236 - DNA, 120 bp, Artificial Sequence
  ENSG00000103888_16 (sequence is synthesized)
aagcatatgggacagcagctggtgggtcagtacccgattcacttccacctggccggtgatgtagacgaaaggggaggttatgacccacccacatacatcagggacctctccatccatcat

SEQ ID NO: 139237 - DNA, 120 bp, Artificial Sequence
  ENSG00000103888_17 (sequence is synthesized)
acattctctcgctgcgtcacagtccatggctccaatggcttgttgatcaaggacgttgtgggctataactctttgggccactgcttcttcacggaagatgggccggaggaacgcaacact

SEQ ID NO: 139238 - DNA, 120 bp, Artificial Sequence
  ENSG00000103888_18 (sequence is synthesized)
tttgaccactgtcttggcctccttgtcaagtctggaaccctcctcccctcggaccgtgacagcaagatgtgcaagatgatcacagaggactcctacccggggtacatccccaagcccagg

SEQ ID NO: 139239 - DNA, 120 bp, Artificial Sequence
  ENSG00000103888_19 (sequence is synthesized)
caagactgcaatgctgtgtccaccttctggatggccaatcccaacaacaacctcatcaactgtgccgctgcaggatctgaggaaactggattttggtttatttttcaccacgtaccaacg

SEQ ID NO: 139240 - DNA, 120 bp, Artificial Sequence
  ENSG00000103888_20 (sequence is synthesized)
ggcccctccgtgggaatgtactccccaggttattcagagcacattccactgggaaaattctataacaaccgagcacattccaactaccgggctggcatgatcatagacaacggagtcaaa

SEQ ID NO: 139241 - DNA, 120 bp, Artificial Sequence
  ENSG00000103888_21 (sequence is synthesized)
accaccgaggcctctgccaaggacaagcggccgttcctctcaatcatctctgccagatacagccctcaccaggacgccgacccgctgaagccccgggagccggccatcatcagacacttc

SEQ ID NO: 139242 - DNA, 120 bp, Artificial Sequence
  ENSG00000103888_22 (sequence is synthesized)
attgcctacaagaaccaggaccacggggcctggctgcgcggcggggatgtgtggctggacagctgccggtttgctgacaatggcattggcctgaccctggccagtggtggaaccttcccg

SEQ ID NO: 139243 - DNA, 120 bp, Artificial Sequence
  ENSG00000103888_23 (sequence is synthesized)
tatgacgacggctccaagcaagagataaagaacagcttgtttgttggcgagagtggcaacgtggggacggaaatgatggacaataggatctggggccctggcggcttggaccatagcgga

SEQ ID NO: 139244 - DNA, 120 bp, Artificial Sequence
  ENSG00000103888_24 (sequence is synthesized)
aggaccctccctataggccagaattttccaattagaggaattcagttatatgatggccccatcaacatccaaaactgcactttccgaaagtttgtggccctggagggccggcacaccagc

SEQ ID NO: 139245 - DNA, 120 bp, Artificial Sequence
  ENSG00000103888_25 (sequence is synthesized)
gccctggccttccgcctgaataatgcctggcagagctgcccccataacaacgtgaccggcattgcctttgaggacgttccgattacttccagagtgttcttcggagagcctgggccctgg

SEQ ID NO: 139246 - DNA, 120 bp, Artificial Sequence
  ENSG00000103888_26 (sequence is synthesized)
ttcaaccagctggacatggatggggataagacatctgtgttccatgacgtcgacggctccgtgtccgagtaccctggctcctacctcacgaagaatgacaactggctggtccggcaccca

SEQ ID NO: 139247 - DNA, 120 bp, Artificial Sequence
  ENSG00000103888_27 (sequence is synthesized)
gactgcatcaatgttcccgactggagaggggccatttgcagtgggtgctatgcacagatgtacattcaagcctacaagaccagtaacctgcgaatgaagatcatcaagaatgacttcccc

SEQ ID NO: 139248 - DNA, 120 bp, Artificial Sequence
  ENSG00000103888_28 (sequence is synthesized)
agccaccctctttacctggagggggcgctcaccaggagcacccattaccagcaataccaaccggttgtcaccctgcagaagggctacaccatccactgggaccagacggcccccgccgaa

SEQ ID NO: 139249 - DNA, 120 bp, Artificial Sequence
  ENSG00000103888_29 (sequence is synthesized)
ctcgccatctggctcatcaacttcaacaagggcgactggatccgagtggggctctgctacccgcgaggcaccacattctccatcctctcggatgttcacaatcgcctgctgaagcaaacg

SEQ ID NO: 139250 - DNA, 120 bp, Artificial Sequence
  ENSG00000103888_30 (sequence is synthesized)
cttgcagatggacaaagtggagcagagctaccctggcaggagccactactactgggacgaggactcagggctgttgttcctgaagctgaaagctcagaacgagagagagaagtttgcttt

SEQ ID NO: 139251 - DNA, 120 bp, Artificial Sequence
  ENSG00000103888_31 (sequence is synthesized)
ctgctccatgaaaggctgtgagaggataaagattaaagctctgattccaaagaacgcaggcgtcagtgactgcacagccacagcttaccccaagttcaccgagagggctgtcgtagacgt

SEQ ID NO: 139252 - DNA, 120 bp, Artificial Sequence
  ENSG00000103888_32 (sequence is synthesized)
gccgatgcccaagaagctctttggttctcagctgaaaacaaaggaccatttcttggaggtgaagatggagagttccaagcagcacttcttccacctctggaacgacttcgcttacattga

SEQ ID NO: 139253 - DNA, 120 bp, Artificial Sequence
  ENSG00000103888_33 (sequence is synthesized)
agtggatgggaagaagtaccccagttcggaggatggcatccaggtggtggtgattgacgggaaccaagggcgcgtggtgagccacacgagcttcaggaactccattctgcaaggcatacc

SEQ ID NO: 139254 - DNA, 120 bp, Artificial Sequence
  ENSG00000103888_34 (sequence is synthesized)
atggcagcttttcaactatgtggcgaccatccctgacaattccatagtgcttatggcatcaaagggaagatacgtctccagaggcccatggaccagagtgctggaaaagcttggggcaga

SEQ ID NO: 139255 - DNA, 120 bp, Artificial Sequence
  ENSG00000103888_35 (sequence is synthesized)
caggggtctcaagttgaaagagcaaatggcattcgttggcttcaaaggcagcttccggcccatctgggtgacactggacactgaggatcacaaagccaaaatcttccaagttgtgcccat

SEQ ID NO: 139256 - DNA, 120 bp, Artificial Sequence
  ENSG00000103888_36 (sequence is synthesized)
ccctgtggtgaagaagaagaagttgtgaggacagctgccgcccggtgccacctcgtggtagactatgacggtgactcttggcagcagaccagtgggggatggctgggtcccccagcccct

SEQ ID NO: 139257 - DNA, 120 bp, Artificial Sequence
  ENSG00000103888_37 (sequence is synthesized)
gccagcagctgcctgggaaggccgtgtttcagccctgatgggccaagggaaggctatcagagaccctggtgctgccacctgcccctactcaagtgtctacctggagcccctggggcggtg

SEQ ID NO: 139258 - DNA, 120 bp, Artificial Sequence
  ENSG00000103888_38 (sequence is synthesized)
ctggccaatgctggaaacattcactttcctgcagcctcttgggtgcttctctcctatctgtgcctcttcagtgggggtttggggaccatatcaggagacctgggttgtgctgacagcaaa

SEQ ID NO: 139259 - DNA, 120 bp, Artificial Sequence
  ENSG00000103888_39 (sequence is synthesized)
gatccactttggcaggagccctgacccagctaggaggtagtctggagggctggtcattcacagatccccatggtcttcagcagacaagtgagggtggtaaatgtaggagaaagagccttg

SEQ ID NO: 139260 - DNA, 120 bp, Artificial Sequence
  ENSG00000103888_40 (sequence is synthesized)
gccttaaggaaatctttactcctgtaagcaagagccaacctcacaggattaggagctggggtagaactggctatccttggggaagaggcaagccctgcctctggccgtgtccacctttca

SEQ ID NO: 139261 - DNA, 120 bp, Artificial Sequence
  ENSG00000103888_41 (sequence is synthesized)
ggagactttgagtggcaggtttggacttggactagatgactctcaaaggcccttttagttctgagattccagaaatctgctgcatttcacatggtacctggaacccaacagttcatggat

SEQ ID NO: 139262 - DNA, 120 bp, Artificial Sequence
  ENSG00000103888_42 (sequence is synthesized)
atccactgatatccatgatgctgggtgccccagcgcacacgggatggagaggtgagaactaatgcctagcttgaggggtctgcagtccagtagggcaggcagtcaggtccatgtgcactg

SEQ ID NO: 139263 - DNA, 120 bp, Artificial Sequence
  ENSG00000103888_43 (sequence is synthesized)
caatgccaggtggagaaatcacagagaggtaaaatggaggccagtgccatttcagaggggaggctcaggaaggcttcttgcttacaggaatgaaggctgggggcattttgctggggggag

SEQ ID NO: 139264 - DNA, 120 bp, Artificial Sequence
  ENSG00000103888_44 (sequence is synthesized)
atgaggcagcctctggaatggctcagggattcagccctccctgccgctgcctgctgaagctggtgactacggggtcgccctttgctcacgtctctctggcccactcatgatggagaagtg

SEQ ID NO: 139265 - DNA, 120 bp, Artificial Sequence
  ENSG00000103888_45 (sequence is synthesized)
tggtcagaggggagcaatgggctttgctgcttatgagcacagaggaattcagtccccaggcagccctgcctctgactccaagagggtgaagtccacagaagtgagctcctgccttagggc

SEQ ID NO: 139266 - DNA, 120 bp, Artificial Sequence
  ENSG00000103888_46 (sequence is synthesized)
ctcatttgctcttcatccagggaactgagcacagggggcctccaggagaccctagatgtgctcgtactccctcggcctgggatttcagagctggaaatatagaaaatatctagcccaaag

SEQ ID NO: 139267 - DNA, 120 bp, Artificial Sequence
  ENSG00000103888_47 (sequence is synthesized)
ccttcattttaacagatggggaaagtgagcccccaagatgggaaagaaccacacagctaagggagggcctggggagccccaccctagcccttgctgccacaccacattgcctcaacaacc

SEQ ID NO: 139268 - DNA, 120 bp, Artificial Sequence
  ENSG00000103888_48 (sequence is synthesized)
ggccccagagtgcccaggcactcctgaggtagcttctggaaatggggacaagtcccctcgaaggaaaggaaatgactagagtagaatgacagctagcagatctcttccctcctgctccca

SEQ ID NO: 139269 - DNA, 120 bp, Artificial Sequence
  ENSG00000103888_49 (sequence is synthesized)
gcgcacacaaacccgccctccccttggtgttggcggtccctgtggccttcactttgttcactacctgtcagcccagcctgggtgcacagtagctgcaactccccattggtgctacctggc

SEQ ID NO: 139270 - DNA, 120 bp, Artificial Sequence
  ENSG00000103888_50 (sequence is synthesized)
tctcctgtctctgcagctctacaggtgaggcccagcagagggagtagggctcgccatgtttctggtgagccaatttggctgatcttgggtgtctgaacagctattgggtccaccccagtc

SEQ ID NO: 139271 - DNA, 120 bp, Artificial Sequence
  ENSG00000103888_51 (sequence is synthesized)
cctttcagctgctgcttaatgccctgctctctccctggcccaccttatagagagcccaaagagctcctgtaagagggagaactctatctgtggtttataatcttgcacgaggcaccagag

SEQ ID NO: 139272 - DNA, 120 bp, Artificial Sequence
  ENSG00000103888_52 (sequence is synthesized)
tctccctgggtcttgtgatgaactacatttatcccctttcctgccccaaccacaaactctttccttcaaagagggcctgcctggctccctccacccaactgcacccatgagactcggtcc

SEQ ID NO: 139273 - DNA, 120 bp, Artificial Sequence
  ENSG00000103888_53 (sequence is synthesized)
aagagtccattccccaggtgggagccaactgtcagggaggtctttcccaccaaacatctttcagctgctgggaggtgaccatagggctctgcttttaaagatatggctgcttcaaaggcc

SEQ ID NO: 139274 - DNA, 120 bp, Artificial Sequence
  ENSG00000103888_54 (sequence is synthesized)
agagtcacaggaaggacttcttccagggagattagtggtgatggagaggagagttaaaatgacctcatgtccttcttgtccacggttttgttgagttttcactcttctaatgcaagggtc

SEQ ID NO: 139275 - DNA, 120 bp, Artificial Sequence
  ENSG00000103888_55 (sequence is synthesized)
tcacactgtgaaccacttaggatgtgatcactttcaggtggccaggaatgttgaatgtctttggctcagttcatttaaaaaagatatctatttgaaagttctcagagttgtacatatgtt

SEQ ID NO: 139276 - DNA, 120 bp, Artificial Sequence
  ENSG00000103888_56 (sequence is synthesized)
tcacagtacaggatctgtacataaaagtttctttcctaaaccattcaccaagagccaatatctaggcattttcttggtagcacaaattttcttattgcttagaaaattgtcctccttgtt

SEQ ID NO: 139277 - DNA, 120 bp, Artificial Sequence
  ENSG00000103888_57 (sequence is synthesized)
atttctgtttgtaagacttaagtgagttaggtctttaaggaaagcaacgctcctctgaaatgcttgtcttttttctgttgccgaaatagctggtcctttttcgggagttagatgtataga

SEQ ID NO: 139278 - DNA, 120 bp, Artificial Sequence
  ENSG00000103888_58 (sequence is synthesized)
gtgtttgtatgtaaacatttcttgtaggcatcaccatgaacaaagatatattttctatttatttattatatgtgcacttcaagaagtcactgtcagagaaataaagaattgtcttaaatg

SEQ ID NO: 139279 - DNA, 120 bp, Artificial Sequence
  ENSG00000103888_59 (sequence is synthesized)
tcatgattggagatgtcctttgcattgcttggaaggggtgtacctagagccaaggaaattggctctggtttggaaaaattttgctgttattatagtaaacatacaaaggatgtcatcatc

SEQ ID NO: 139280 - DNA, 120 bp, Artificial Sequence
  ENSG00000103888_60 (sequence is synthesized)
agagagaaaagcttcattctggaggggaaggagttttgagtgccaaggatgaaattccacccatcactcggtctctgagctgcaggacacaggcaggacaacgggagcacactgccagga

SEQ ID NO: 139281 - DNA, 120 bp, Artificial Sequence
  ENSG00000103888_61 (sequence is synthesized)
actactactgggacgaggactcagggtgagcaggcgcccacttggctgcaggaaagtggctcaacctcatcttgtccccttggcctttccaataagtctaagaacagccatgtagttaat

SEQ ID NO: 139282 - DNA, 120 bp, Artificial Sequence
  ENSG00000103888_62 (sequence is synthesized)
gccaattaatgtaagacacctttctaggcattttgactctaaggctgactgtcccatacattaacgacatttttaaagctattaagctttaaaagtaaaataaacaccctattaaatata

SEQ ID NO: 139283 - DNA, 120 bp, Artificial Sequence
  ENSG00000103932_0 (sequence is synthesized)
gcggggcaagatggcggcgcccagacaggcctggagcacggatgaataagagggaacccccacacggagacactgctggagagagtcgtactggggaggcagctggagcagcaagatgct

SEQ ID NO: 139284 - DNA, 120 bp, Artificial Sequence
  ENSG00000103932_1 (sequence is synthesized)
gtcgagaccgaagccaggggagtccgaggtggacctgctgcacttccagagtcagtttctcgcagctggtgcagccccagcagtgcagttggtgaagaaaggaaataggggcggtggtga

SEQ ID NO: 139285 - DNA, 120 bp, Artificial Sequence
  ENSG00000103932_2 (sequence is synthesized)
tgccaactcagaccggcctccgctccaggaccatcgggatgtggtgatgttggacaatctcccagatttgcccccagctttggtcccttctcctccaaagagagccaggcccagccctgg

SEQ ID NO: 139286 - DNA, 120 bp, Artificial Sequence
  ENSG00000103932_3 (sequence is synthesized)
ccactgcctgcctgaggatgaggacccagaagagaggctgaggaggcatgatcagcacatcactgctgtcttgactaagattattgaacgagatacaagttcagtggccgtgaatctgcc

SEQ ID NO: 139287 - DNA, 120 bp, Artificial Sequence
  ENSG00000103932_4 (sequence is synthesized)
tgtgcccagtggtgttgctttccctgctgtgttccttcgctcgcgggacacacaggggaaatcagcaacatctggtaagagaagcatctttgcccaggaaattgcggcaaggaggatagc

SEQ ID NO: 139288 - DNA, 120 bp, Artificial Sequence
  ENSG00000103932_5 (sequence is synthesized)
tgaagccaagggcccatcagttggggaagttgtgcccaacgtgggcccaccagagggtgccgtgacctgtgagacacccactcctaggaaccagggctgccagcttcctgggagcagcca

SEQ ID NO: 139289 - DNA, 120 bp, Artificial Sequence
  ENSG00000103932_6 (sequence is synthesized)
cagctttcagggacccaatctggtcacagggaaggggctcagggatcaagaagctgagcaggaagcccagactatccatgaagagaacatagcaagactgcaggccatggctcctgagga

SEQ ID NO: 139290 - DNA, 120 bp, Artificial Sequence
  ENSG00000103932_7 (sequence is synthesized)
gatcctgcaggaacagcagcggttgctggcccagcttgaccccagcttggttgctttcttgagatctcacagccacacgcaagagcaaacaggagagacagcctctgaggagcagaggcc

SEQ ID NO: 139291 - DNA, 120 bp, Artificial Sequence
  ENSG00000103932_8 (sequence is synthesized)
aggaggaccctctgctaatgtcaccaaggaggaacccctcatgtcagcttttgccagtgagcccaggaagagagacaagctggagccagaagccccagctctggcattgcccgtgacccc

SEQ ID NO: 139292 - DNA, 120 bp, Artificial Sequence
  ENSG00000103932_9 (sequence is synthesized)
tcagaaagaatggctgcacatggacactgtcgagctggagaagctccactggacccaggacttgccccctgtccggcggcagcagacacaggagaggatgcaggctcgattcagtcttca

SEQ ID NO: 139293 - DNA, 120 bp, Artificial Sequence
  ENSG00000103932_10 (sequence is synthesized)
gggagaactactggcccctgacgtggacctgcccacccacctgggtctgcaccaccatggagaggaggcagagagagcggggtattccctacaggagctgttccacctgacccgcagcca

SEQ ID NO: 139294 - DNA, 120 bp, Artificial Sequence
  ENSG00000103932_11 (sequence is synthesized)
ggtttcccagcagagagcactggcactgcatgtgttagcccaggtcatcagcagggcccaggctggtgagtttggggaccggctagcaggcagtgtcttaagcctccttttggatgctgg

SEQ ID NO: 139295 - DNA, 120 bp, Artificial Sequence
  ENSG00000103932_12 (sequence is synthesized)
tttcctcttcctactgcgcttctccttggatgacagagtggatggggtcattgcaaccgccatccgtgctcttcgggctctgctggtggctcctggagatgaggagctcctcgacagcac

SEQ ID NO: 139296 - DNA, 120 bp, Artificial Sequence
  ENSG00000103932_13 (sequence is synthesized)
cttctcttggtaccatggagctttgacgttccctctgatgcccagccaggaggacaaggaggatgaggacgaggatgaagaatgcccagcaggaaaagcaaaaaggaaaagccctgaaga

SEQ ID NO: 139297 - DNA, 120 bp, Artificial Sequence
  ENSG00000103932_14 (sequence is synthesized)
agaaagccggcctccacctgacctggcccgacatgatgtcatcaaggggctcctggctaccagcctgctgcctcggctgcgctacgtgctggaggtgacatacccaggacctgcggtggt

SEQ ID NO: 139298 - DNA, 120 bp, Artificial Sequence
  ENSG00000103932_15 (sequence is synthesized)
ccttgacatcctggctgtgctcatccgcctggcccggcattccctggaatcagccacaagggtcctggagtgccctcggctgatagagactatagttcgagagttcttgcccaccagttg

SEQ ID NO: 139299 - DNA, 120 bp, Artificial Sequence
  ENSG00000103932_16 (sequence is synthesized)
gtctcctgtgggggcagggcctacccctagtctatacaaagtaccctgtgctactgccatgaaactacttcgtgtcctggcctcagctgggaggaatattgctgcccggctgttgagcag

SEQ ID NO: 139300 - DNA, 120 bp, Artificial Sequence
  ENSG00000103932_17 (sequence is synthesized)
ctttgatctccggagccgcctgtgccgcatcatagctgaggctccccaagaactggccttgcccccagaggaagctgagatgctgagcaccgaggccctccgtctgtgggctgtggctgc

SEQ ID NO: 139301 - DNA, 120 bp, Artificial Sequence
  ENSG00000103932_18 (sequence is synthesized)
ctcctatggccagggcggttacctttacagggagctctacccagtgctgatgcgggccttgcaggtggtgccgcgggagctcagcacccacccacctcaacccctgtccatgcagcggat

SEQ ID NO: 139302 - DNA, 120 bp, Artificial Sequence
  ENSG00000103932_19 (sequence is synthesized)
tccttagtcacttggacacaggtgtctgggctccagcctcttgttgagccgtgtctaaggcagaccttgaagttgctgtccagacctgagatgtggagagccgtgggcccagtgcccgtt

SEQ ID NO: 139303 - DNA, 120 bp, Artificial Sequence
  ENSG00000103932_20 (sequence is synthesized)
gcctgcctgttgttcctgggagcctactaccaggcctggagccagcaaccaagctcatgcccggaggattggctccaggacatgcagcgcctgtcagaggagctgctgctgccactgctg

SEQ ID NO: 139304 - DNA, 120 bp, Artificial Sequence
  ENSG00000103932_21 (sequence is synthesized)
agtcagcccacactgggcagcctgtgggattcccttaggcactgctcccttctctgcaacccgctgtcctgtgtgccagcccttgaagctccccccagcctcgtgtcactgggctgctcg

SEQ ID NO: 139305 - DNA, 120 bp, Artificial Sequence
  ENSG00000103932_22 (sequence is synthesized)
ggaggctgcccccgtctcagtctggctggctcagcctcacccttcccattcctcactgccctcctctctcttcttaataccctggcccagatccacaaggggctgtgtggccagctggct

SEQ ID NO: 139306 - DNA, 120 bp, Artificial Sequence
  ENSG00000103932_23 (sequence is synthesized)
gccatattggctgccccgggactccagaattacttcctccagtgtgtggctcctggggctgccccacacctcacacctttctctgcatgggccctgcgccatgagtaccacctgcagtac

SEQ ID NO: 139307 - DNA, 120 bp, Artificial Sequence
  ENSG00000103932_24 (sequence is synthesized)
ctggcactcgctctggcccagaaagcggcagcgctgcagccactgccagccacccatgctgccctctatcatggtatggccttggccctgctgagccggctgctgcccggaagtgagtac

SEQ ID NO: 139308 - DNA, 120 bp, Artificial Sequence
  ENSG00000103932_25 (sequence is synthesized)
ctcacccatgagctgctgctgagctgtgtattccggctggagttcctcccggaaagaacatcagggggtccagaggcagccgacttctctgaccagctgtcgttaggaagcagcagggtc

SEQ ID NO: 139309 - DNA, 120 bp, Artificial Sequence
  ENSG00000103932_26 (sequence is synthesized)
cctcggtgtgggcaagggactctgctggctcaggcctgccaggacctccccagcatccgcaactgctacctgactcattgctcgccagcccgagccagtctgctggcctcccaggctctg

SEQ ID NO: 139310 - DNA, 120 bp, Artificial Sequence
  ENSG00000103932_27 (sequence is synthesized)
caccgaggggagctacagcgagtcccaaccctgctactgcccatgcctacggagccgctgctgcccaccgactggcccttcctgccactgattcgcctctaccaccgggcttcagacacc

SEQ ID NO: 139311 - DNA, 120 bp, Artificial Sequence
  ENSG00000103932_28 (sequence is synthesized)
ccctcgggactctctcccacagacaccatgggcacagccatgcgggtcctgcagtgggtgctagttttggagagctggcgcccccaggctctctgggctgtgccccctgctgcccgcctg

SEQ ID NO: 139312 - DNA, 120 bp, Artificial Sequence
  ENSG00000103932_29 (sequence is synthesized)
gcacggctcatgtgtgtgttcctggtggacagtgagctgttccgggagtccccagtacagcatctggtggcagccctcctcgcccagctctgtcagcctcaagtcttgccaaacctcaac

SEQ ID NO: 139313 - DNA, 120 bp, Artificial Sequence
  ENSG00000103932_30 (sequence is synthesized)
ctggactgccgactccctggcctgacgtctttccctgacctctatgccaacttcctggatcattttgaggctgtctcttttggggaccacctctttggggccctggtcctcctgcccctg

SEQ ID NO: 139314 - DNA, 120 bp, Artificial Sequence
  ENSG00000103932_31 (sequence is synthesized)
cagcgtcggttcagtgtcaccttgcgccttgccctctttggggaacacgtgggagccttgcgagctctgagcctgcctctgacccagttgcctgtgtccctggagtgttacacagtgcct

SEQ ID NO: 139315 - DNA, 120 bp, Artificial Sequence
  ENSG00000103932_32 (sequence is synthesized)
cctgaagacaacctggccctccttcagctctacttccggaccctggttactggtgcgctccgcccacgttggtgccccgtgctctatgctgtggctgtggctcatgtcaatagcttcatc

SEQ ID NO: 139316 - DNA, 120 bp, Artificial Sequence
  ENSG00000103932_33 (sequence is synthesized)
ttctctcaggacccacagagctcagatgaggtcaaagctgcccgcaggagtatgctgcagaaaacatggctgctggcagatgagggtctccggcagcacctcctgcactataagcttccc

SEQ ID NO: 139317 - DNA, 120 bp, Artificial Sequence
  ENSG00000103932_34 (sequence is synthesized)
aattccacgctcccagagggctttgagctctattctcagttgccccctctgcgtcagcactacctccagagactgacttcaacagtgctccaaaatggggtatcagagacctaggatagt

SEQ ID NO: 139318 - DNA, 120 bp, Artificial Sequence
  ENSG00000103932_35 (sequence is synthesized)
tgatatagatggaaagatgggtacgttgtcctgtatccagcctttcaacagatgtctggccagacgaagaacattgtgtcctaatggtaggcaggagaccaaggagcagaaggcttgcct

SEQ ID NO: 139319 - DNA, 120 bp, Artificial Sequence
  ENSG00000103932_36 (sequence is synthesized)
tcctgggagcaggttgtttgagctgttttagagcagtgagccctaccattacatcctgatatctggggcttctgaaggtctgtactgggagtgaagagtggcttagctatttacccgctc

SEQ ID NO: 139320 - DNA, 120 bp, Artificial Sequence
  ENSG00000103932_37 (sequence is synthesized)
tttggggacagggcaaactaaatgcatcccttcttacctaactcccaacccctgccctgggctgaggcatatgaatgctatagttgtgcattaaaataaatgttttttatctcctggaaa

SEQ ID NO: 139321 - DNA, 120 bp, Artificial Sequence
  ENSG00000103932_38 (sequence is synthesized)
aacgcgatctctgcggggcaagatggcggcgcccagacaggcctggagcacgtaggtggcggggctggagggacggatttcagggatgaataagagggaacccccacacggagacactgc

SEQ ID NO: 139322 - DNA, 120 bp, Artificial Sequence
  ENSG00000103932_39 (sequence is synthesized)
gttacatctccatcttcagaggaaggaagggagctagcaattgagctgcctctgggccagctggggaagaggtaagtgtcaagcaaggccagtggtgggtaccagccctcggctcagtgc

SEQ ID NO: 139323 - DNA, 120 bp, Artificial Sequence
  ENSG00000103932_40 (sequence is synthesized)
aggggctgtgtggccaggtaagtgtggggtgcctgattaggggccaggcaaggggccaagatggcaggaatcagaaagaaagtgggagggtgggatgggcgcggtggctcacgcctgtaa

SEQ ID NO: 139324 - DNA, 120 bp, Artificial Sequence
  ENSG00000103932_41 (sequence is synthesized)
ggttgggggctgggttagaatcactgccctgaagggaggagggtccgtaaccccccagagtgaggttctcatcgttcagaactgggctaataggatcgggtccagcctggggaagtttct

SEQ ID NO: 139325 - DNA, 120 bp, Artificial Sequence
  ENSG00000103932_42 (sequence is synthesized)
ccctccctcttcctgttgtggttggattcagacacatcattattatttcagacactgcatagcctgtgtttctgcagccccattttacagaggaagaaaatgaggctcaaagaggttaaa

SEQ ID NO: 139326 - DNA, 120 bp, Artificial Sequence
  ENSG00000103932_43 (sequence is synthesized)
tatcttacccaagatgacacagcttgagccagggccccatggcagctgtctttcttccctagcctgcagtgtcttcctaggaaggtgtgcatatactcacgtttgggatcttttctttct

SEQ ID NO: 139327 - DNA, 120 bp, Artificial Sequence
  ENSG00000103932_44 (sequence is synthesized)
agccttgaggagctttggaagacctcagcttcctcatcttacctcttgggggctttgaggggattaagagaatcaatgaaaagggcttaacatgggctgggtgtggtggctcacgcctgt

SEQ ID NO: 139328 - DNA, 120 bp, Artificial Sequence
  ENSG00000103932_45 (sequence is synthesized)
aaaaagaaaaaaggaaagggtttaacctggtgtctggcatatagtgggtattcattactattaataaggcatagctccttgcttatcagtgctacaatctagataagaagagatttactg

SEQ ID NO: 139329 - DNA, 120 bp, Artificial Sequence
  ENSG00000103932_46 (sequence is synthesized)
aaaacctacatagttgtgaattattcagatgctaggtggtatcaggattcagagaagggaaagatcaaattgggctttgtggaagaagtggggattgacccaggcactgtaggttgggta

SEQ ID NO: 139330 - DNA, 120 bp, Artificial Sequence
  ENSG00000103932_47 (sequence is synthesized)
gaatttgaattggtgaggaggtagaaaggcaggagattcctaacagaataacataagcaaaaggagcatgacaaagggcagaaggagggaggagagatttctgttgggaacttaaggctg

SEQ ID NO: 139331 - DNA, 120 bp, Artificial Sequence
  ENSG00000103932_48 (sequence is synthesized)
gtcttgaattcctaatttcgtgtgatccgcctgcctcagcctcccaagtgctgagattacaggcgtggcccactacacatggccaatttcatgctttttaatggctgcttctcagttccc

SEQ ID NO: 139332 - DNA, 120 bp, Artificial Sequence
  ENSG00000103932_49 (sequence is synthesized)
agttttccccaacatctgctctgtagtctttaaccctgatccttgtgctagaaggacagatgtttgtctaggacctgatctctgccctcatgatttggtttcatgtgatcgttatccaca

SEQ ID NO: 139333 - DNA, 120 bp, Artificial Sequence
  ENSG00000103932_50 (sequence is synthesized)
aagatggcggcgcccagacaggcctggagcacgtaggtggcggggctggagggacggatttcaggtgatctgggaggaggacccagggtagcgtgtccagtttctttgctggaacctgcc

SEQ ID NO: 139334 - DNA, 120 bp, Artificial Sequence
  ENSG00000103932_51 (sequence is synthesized)
tgcgggcctttggtctgtaagggagcaactgtggcctcctctgtgcatagatctcgggcacggcccttcaacgggcggcgaaagctgcgactcgatgattcctcattgtagagttgggtg

SEQ ID NO: 139335 - DNA, 120 bp, Artificial Sequence
  ENSG00000103932_52 (sequence is synthesized)
gtccaggaggcttaactggagcccttgacctgagcggtaagggcagtcacgcgtcccgactcgggattggatcctggctctggaggataggctgcaatggatgaataagagggaaccccc

SEQ ID NO: 139336 - DNA, 80 bp, Artificial Sequence
  ENSG00000103942_0 (sequence is synthesized)
ctgagccgggcgcgcacgggccgccgcatgtgccgcgcggggagcggctgccgagcgggcggagagcgagcgcgagaggc

SEQ ID NO: 139337 - DNA, 120 bp, Artificial Sequence
  ENSG00000103942_1 (sequence is synthesized)
ggagcggctgccgagcgggcggagagcgagcgcgagaggccccgtcggagcggccgccggagcagcgccggagatgggagaacagcccatcttcaccacccgagcgcatgtcttccagat

SEQ ID NO: 139338 - DNA, 120 bp, Artificial Sequence
  ENSG00000103942_2 (sequence is synthesized)
tgaccccaacaccaagaagaactggatgcctgcgagcaagcaggcggtcaccgtttcctacttctatgatgtcacaaggaacagctatcggatcatcagtgtggacggagccaaggtgat

SEQ ID NO: 139339 - DNA, 120 bp, Artificial Sequence
  ENSG00000103942_3 (sequence is synthesized)
cataaacagcacaatcacaccgaatatgaccttcaccaaaacgtcacagaagtttgggcagtgggccgacagcagagccaacacagtgtttggtttggggttttcctctgagcagcagct

SEQ ID NO: 139340 - DNA, 120 bp, Artificial Sequence
  ENSG00000103942_4 (sequence is synthesized)
gacaaagtttgcagagaaattccaggaggtgaaagaagctgccaagatagccaaagacaagacgcaggagaaaatcgagacctcaagtaatcattcccaagaatctgggcgtgaaacccc

SEQ ID NO: 139341 - DNA, 120 bp, Artificial Sequence
  ENSG00000103942_5 (sequence is synthesized)
atcttctactcaggcatccagtgtcaacgggacggacgatgaaaaggcctctcacgccggtccagccaacacacacctgaagtctgagaatgacaagctgaagattgccttgacgcagag

SEQ ID NO: 139342 - DNA, 120 bp, Artificial Sequence
  ENSG00000103942_6 (sequence is synthesized)
cgcagccaacgtgaagaagtgggagatcgagctgcagacccttcgggagagcaatgcacggctgaccacagcactgcaggagtcggcagccagtgtggagcagtggaagaggcagttctc

SEQ ID NO: 139343 - DNA, 120 bp, Artificial Sequence
  ENSG00000103942_7 (sequence is synthesized)
catctgccgtgatgagaatgaccggctccgcaacaagattgatgagctggaagaacaatgcagtgagatcaacagagagaaggagaagaacacgcagctgaagaggaggatcgaggagct

SEQ ID NO: 139344 - DNA, 120 bp, Artificial Sequence
  ENSG00000103942_8 (sequence is synthesized)
ctcatgtcagagtgcgaatatgtctctgagaagctagaggcggcagagagagacaatcaaaacctggaagacaaagtgcgttccttaaagacagacattgaggagagcaaataccgacag

SEQ ID NO: 139345 - DNA, 120 bp, Artificial Sequence
  ENSG00000103942_9 (sequence is synthesized)
cgccacctgaaggtggagttgaagagcttcctggaggtgctggacgggaagattgacgacctgcatgacttccgccgagggctctccaagctgggcaccgataactagggctggccgagg

SEQ ID NO: 139346 - DNA, 120 bp, Artificial Sequence
  ENSG00000103942_10 (sequence is synthesized)
cccaggccccgcccgtgagtcccaagcgtgtgtgcgagaccagatagctctaggacgttcttctgtgtgcattgcttctgtaaatgcaggcgcagtttgtcgtgtttccaaaccagttgt

SEQ ID NO: 139347 - DNA, 120 bp, Artificial Sequence
  ENSG00000103942_11 (sequence is synthesized)
gccgtccactcactccttttcagaatagaaatctcctctcgcttctctggccttgtgaggttgtggacaactggaagattctgactcaggaatccagaactaggtctaccttcaacattt

SEQ ID NO: 139348 - DNA, 120 bp, Artificial Sequence
  ENSG00000103942_12 (sequence is synthesized)
atgcagtcagggcagggatgtttatatctttcataagggctgttgcaaccatatgaactgaaaaaacacgcattttgtaatccaaatattgatattctttacaccaagccatcaggctcc

SEQ ID NO: 139349 - DNA, 120 bp, Artificial Sequence
  ENSG00000103942_13 (sequence is synthesized)
ttttatcaaatagcattcagagtatttgaatgtccaccagacaccagccccggggggcacagagagaacaacattcctctctgtcaacatcgagaggctttaaaacaactgtttagtgga

SEQ ID NO: 139350 - DNA, 120 bp, Artificial Sequence
  ENSG00000103942_14 (sequence is synthesized)
aactttctgagagatggaaaacaagcttctggtgggtgcattttctggcccggagttgcctgcatccacgctactgccccctgccccccgcccccccagtttgtacggttgcaacagtgt

SEQ ID NO: 139351 - DNA, 120 bp, Artificial Sequence
  ENSG00000103942_15 (sequence is synthesized)
tccttttcttggttttaatttctgagcagatgattgtgctgtgggaacagcacacagtgagggtgcctagcacaatgtctggcacaaagtaggtgcttaataaatatttgttcaattaaa

SEQ ID NO: 139352 - DNA, 120 bp, Artificial Sequence
  ENSG00000103942_16 (sequence is synthesized)
tttgcagagaaattccaggaggtgaaagaagctgccaagatagccaaagacaagacgcaggagaaaatcgagacctcaagtaatcattcccaaataattcactttggccaggaatctggg

SEQ ID NO: 139353 - DNA, 120 bp, Artificial Sequence
  ENSG00000103942_17 (sequence is synthesized)
ttgatttataatattcgaaatgtcattgcttcccttttcggcagccactgtaccatgaggttgcttgatttttctaccctgctggcttaaacccttgagatgaaacagaataatgcagga

SEQ ID NO: 139354 - DNA, 120 bp, Artificial Sequence
  ENSG00000103942_18 (sequence is synthesized)
cgtgattacagtggtgtaacagtcattctggagaaaagcagatcaattcaggggacacttggcccttgcttgtgatggatccttaaagcaaatctgaatctacttcttcacggccatgag

SEQ ID NO: 139355 - DNA, 120 bp, Artificial Sequence
  ENSG00000103942_19 (sequence is synthesized)
aggaaaccagaagcccagagcatcttgaaggcaggctttattacttatttggctctgctggtaagatgcctctggtaaggcatcatgtgcaaagcaggtcccatgcaagcggtgcaggca

SEQ ID NO: 139356 - DNA, 120 bp, Artificial Sequence
  ENSG00000103942_20 (sequence is synthesized)
agtagctgtctaaaggtggatgatgccctccatgcactttcagcctgcctggtggctgggcagtcgaaaacgtcgccgtctattaagctcctttgattgggagcaggtgacgggtagaga

SEQ ID NO: 139357 - DNA, 120 bp, Artificial Sequence
  ENSG00000103942_21 (sequence is synthesized)
cggaagttctgggaatcaccggagaagggagggaagggctccttccggccgcctgctcccggagtcttcgtggggaacgtgaggtgagagcaggcggtgaagagtagacacgactgatga

SEQ ID NO: 139358 - DNA, 120 bp, Artificial Sequence
  ENSG00000103942_22 (sequence is synthesized)
gcctcggtagtaagatttccgtagtccgttttgtatgtggttttgcagaaacataccccctctctgctccagcttcagtcgtcagtatccagctacttccaagagtcttgcccatgtctt

SEQ ID NO: 139359 - DNA, 120 bp, Artificial Sequence
  ENSG00000103942_23 (sequence is synthesized)
gtgggatgttcagcaaatgtataaacacttaatatcccgacaaagcttggcctcttccctcccaaattacttcccaggctatgcacccgtttttgttaatacaaccaacttggaaacttt

SEQ ID NO: 139360 - DNA, 120 bp, Artificial Sequence
  ENSG00000103942_24 (sequence is synthesized)
caccgataactagggctggccgaggcccaggccccgccctggccctggagcaacctggacggtgttcccttgagctggtgtgacgtgccctcgtttattctgacatccagcccagtctca

SEQ ID NO: 139361 - DNA, 120 bp, Artificial Sequence
  ENSG00000103942_25 (sequence is synthesized)
gtactgttgtcataaccttacgccagactcaggcagaatgtaagccattcactcgtgagcatcgcagccgcttgtgctgcctggaagctgcagggccaggactgcattttcagtttgcaa

SEQ ID NO: 139362 - DNA, 120 bp, Artificial Sequence
  ENSG00000103942_26 (sequence is synthesized)
ttgaggtctcctgattttggtgtttccaagactggctgctataccttgataagctttccttctgcctccatgaaacctggtgtctaaaaaagatcaactaaaacttggaaccctttaacc

SEQ ID NO: 139363 - DNA, 120 bp, Artificial Sequence
  ENSG00000103942_27 (sequence is synthesized)
aagaggacctttaaaaataacctttcattccagtcaagacccagctggatgcattttaaagttgggagtggcgaggaagccttcctagtgccgcccggggaatgtaaaaccaccagagca

SEQ ID NO: 139364 - DNA, 120 bp, Artificial Sequence
  ENSG00000103942_28 (sequence is synthesized)
acaggttgggacagtatggtcaggccttggagggaaagagaaccagtatccacacaagacctcgaacttgtgtggcccctcagtttcatctctcctgcctgccatcacattagactttaa

SEQ ID NO: 139365 - DNA, 120 bp, Artificial Sequence
  ENSG00000103942_29 (sequence is synthesized)
ttgggtgagagaacagggcagagactgtcacctgcattttgcagatgggaagtagagacagagaaagtgacacgcccagggtcacccagcggtgaccagcagcgtggactctgcatccag

SEQ ID NO: 139366 - DNA, 120 bp, Artificial Sequence
  ENSG00000103942_30 (sequence is synthesized)
gtctcctggaccttgatgcagtatcttttgagacatgccactctagtccctttggtgacccgtgggtgccaagagaaaataattcttatatcctgataagagcatattacaattatatta

SEQ ID NO: 139367 - DNA, 120 bp, Artificial Sequence
  ENSG00000103942_31 (sequence is synthesized)
tttcaatatgtgtccacagcaaaggacagtttacaaaaatgtgaatccgaatgacatttaggaatgtttgttataaatgataagttccactttggaatgattctggttttgcaggaatct

SEQ ID NO: 139368 - DNA, 120 bp, Artificial Sequence
  ENSG00000103942_32 (sequence is synthesized)
ttccaagaaagttggttaaaatgatgtctctgcctgtgaggccagttctatggaaaacaaacacaccctgagttctttattgatggctttagtggaggcagagcagtatgttcaaaacaa

SEQ ID NO: 139369 - DNA, 120 bp, Artificial Sequence
  ENSG00000103942_33 (sequence is synthesized)
gtgggaggccctgagatcgcaggaatggaaacagagttctggctgggggtggcctgtccactgcccgccccttcctggagatgcactcctttctggctttctggggagggagcagccttg

SEQ ID NO: 139370 - DNA, 120 bp, Artificial Sequence
  ENSG00000103942_34 (sequence is synthesized)
ctcagtggtgggagcagcttgaacgggacctgatcaacacccaggaagactgtgcacagagggcagttggtctccagcctgcaggctccatgagcacagccttgatggtggtgggcaggc

SEQ ID NO: 139371 - DNA, 120 bp, Artificial Sequence
  ENSG00000103942_35 (sequence is synthesized)
gcctgcctgctgtggactacatttgatgcaaaacatcaagtaaagggtggagcgtaatacagtgaatatgcctcccagaaacatcatgctctgcctattttaacagggctctttttcttt

SEQ ID NO: 139372 - DNA, 120 bp, Artificial Sequence
  ENSG00000103942_36 (sequence is synthesized)
agaaaagtctccttctctatagaaaccagggacaattttggatgagagccaaccacaggacgcgctggggacgttatggtgggacctcacatgtggccaggtgcacctttgggaagaagg

SEQ ID NO: 139373 - DNA, 120 bp, Artificial Sequence
  ENSG00000103942_37 (sequence is synthesized)
cagacgtgatgtgacttagcacaggcactcaaaagaggcagccactggtctttgctaatatccagaagtggattgtttgttccattcatccttctagaagctaaattctttcattgcctt

SEQ ID NO: 139374 - DNA, 120 bp, Artificial Sequence
  ENSG00000103942_38 (sequence is synthesized)
gagacatcactagattttgaagcacttgcaaactagaagcttgcaagatcaatgtccatgtatatttttaaagatatgcatgctttaaaaggaccctaatttctgagtacatggcttccc

SEQ ID NO: 139375 - DNA, 120 bp, Artificial Sequence
  ENSG00000103942_39 (sequence is synthesized)
caaagaaacagtatatattctggagatgatgggggttttggcatggagagggactcctgtctagtctagaaaatgttacttacatgcctcttccatgtaccgatctcaagaatatgggtt

SEQ ID NO: 139376 - DNA, 120 bp, Artificial Sequence
  ENSG00000103942_40 (sequence is synthesized)
ttctagttggctttaaacactacccaggcaggaaggtggctttggtaagaattttgagctggatgaaatgttctagtgaacttacgactgtgtatgtgcgcacgcgtgtgtgtgtgtgtg

SEQ ID NO: 139377 - DNA, 120 bp, Artificial Sequence
  ENSG00000103942_41 (sequence is synthesized)
tgtgtgtgtgtgtgtgtgtgtgtgaagaaacagcaaaaggggaagtgggagaaacagtaaggaagcgtttttaattaaaaatatgtatacctaagaggagactttattttctatttctgg

SEQ ID NO: 139378 - DNA, 120 bp, Artificial Sequence
  ENSG00000103942_42 (sequence is synthesized)
ctggtggtggtgatctatgttctggaatccatttaccagaagtttgtggatcttttgtttgaagtggaattgttcagtgccctactctctttgacggtgcagagccttgcggcaaagtgt

SEQ ID NO: 139379 - DNA, 120 bp, Artificial Sequence
  ENSG00000103942_43 (sequence is synthesized)
tctcctgggccctagagacccccagggcacctggcaggagcccgtaaaccacggcagagtcccaagtggtgcatgttttggcgagtgatgggcaggactgatgattcacagctgtgaggc

SEQ ID NO: 139380 - DNA, 120 bp, Artificial Sequence
  ENSG00000103942_44 (sequence is synthesized)
tgtgctattgtttttaccctcttgtactgcttttaataggaagtcccgactttacgtcagttgtgagagcagcgtcttatgatgtgacaggcaagaagacattccttgcatcaaatataa

SEQ ID NO: 139381 - DNA, 120 bp, Artificial Sequence
  ENSG00000103942_45 (sequence is synthesized)
gagtttaatgagaagagtggagtggataagtgaactctcccaagagtactgttttttgtttccctttttaaatgctttcttggtacataaataatataatactttttttaaagaaattcc

SEQ ID NO: 139382 - DNA, 120 bp, Artificial Sequence
  ENSG00000103942_46 (sequence is synthesized)
agatgagtgggaaaaaaaccaatcacctgttattacactatctgattataaccactgttaacatttcagtttttatcttttcagacttttttctatgcatctgtgtgtgttttattactt

SEQ ID NO: 139383 - DNA, 120 bp, Artificial Sequence
  ENSG00000103942_47 (sequence is synthesized)
tcatattatacatactgttttataacttttatcccttttaatgctatattgtgaatagatttctatatcagtaaatatgtaattacattatttttaacctctatgtaggttgtaccttgg

SEQ ID NO: 139384 - DNA, 120 bp, Artificial Sequence
  ENSG00000103942_48 (sequence is synthesized)
gtaggttgtaccttggatacttaggttgtttccaatttttttactgttgtagtcaaggacataatgaagttcttctaacatccttgcgaacttttcagaatattgacttagggtaatttt

SEQ ID NO: 139385 - DNA, 120 bp, Artificial Sequence
  ENSG00000103942_49 (sequence is synthesized)
ctgaagttatcactggctcaaaagtacgcgcctccctatctgcggctcctttccttctgaggcatacaggacttcaccctccatcccccttgtactcattcagggtcctatgactaattc

SEQ ID NO: 139386 - DNA, 120 bp, Artificial Sequence
  ENSG00000103942_50 (sequence is synthesized)
tggccaatgaaatgtgagcacaggtgacacatgaagctccagacagacactgaaatgcccatgagcagttccgcagtgtctgccttcccttccctcagcaaatgctgatgtcccagggac

SEQ ID NO: 139387 - DNA, 120 bp, Artificial Sequence
  ENSG00000103942_51 (sequence is synthesized)
agagcctctgtcaagcctggatccctgagtgactacgtggagcagcccccttctcccttcatgttaccctcacctgccaccctgcatggacgggtagcatgaataaaaaaaataaacctt

SEQ ID NO: 139388 - DNA, 120 bp, Artificial Sequence
  ENSG00000103942_52 (sequence is synthesized)
aggtgttaaacactggggtttcagggttaattggttaactgcagcataacatatcctgttgcaacaataaaaaagaatgcacatttttaggacttgtaatatgtattgcctcaaattgcc

SEQ ID NO: 139389 - DNA, 120 bp, Artificial Sequence
  ENSG00000103942_53 (sequence is synthesized)
ttccagaaagacagacccaattatactcccacccacagtgtgtgagtgtgtactgcttcctctttaacactggagttaccctggggacagagagctaaaaaaaatatttttttggttaaa

SEQ ID NO: 139390 - DNA, 120 bp, Artificial Sequence
  ENSG00000103942_54 (sequence is synthesized)
atgtaaccctttaaggtgttcagcagtatcattgatttctaagaggtttatttcataaacattgtaaaacaaaattttaagttgcacgtatggctttttaaaaacgtttagacatttaaa

SEQ ID NO: 139391 - DNA, 120 bp, Artificial Sequence
  ENSG00000103942_55 (sequence is synthesized)
catttaaaaaaacaccttttagtcaagtttatctgttacttttttttttttttttaatggttgctacctatgccgtcatgcttatgcaggtctttccaattctttttttttttttttttt

SEQ ID NO: 139392 - DNA, 65 bp, Artificial Sequence
  ENSG00000103942_56 (sequence is synthesized)
atgtgtcaacctccctcctgagtagctgggactacaagtgtatgccaccacgcccaggtaacttt

SEQ ID NO: 139393 - DNA, 120 bp, Artificial Sequence
  ENSG00000103942_57 (sequence is synthesized)
aagcgattctcatgtgtcaacctccctcctgagtagctgggactacaagtgtatgccaccacgcccaggtaactttttgtttttagtagagatgggtttcgccatgttgcctaggctggt

SEQ ID NO: 139394 - DNA, 120 bp, Artificial Sequence
  ENSG00000103942_58 (sequence is synthesized)
gctggaattacaggtgtgagccaccaagcccggcgaggtcttcccaattctgatggcaaggttgtataaatattcaccactatcttattcttgtacttttattatttctttctaaacagt

SEQ ID NO: 139395 - DNA, 120 bp, Artificial Sequence
  ENSG00000103942_59 (sequence is synthesized)
tttctaaacagttaaatctgtgatctggctgggcgtgttggctcttgcctgtaatcccaacactttgggtcgccaaggtggaaggatcacttgagtccaggcatttgaggttacagtgag

SEQ ID NO: 139396 - DNA, 120 bp, Artificial Sequence
  ENSG00000103942_60 (sequence is synthesized)
gcactccagcctggggaacagagcaagaccctgtctctaaaaaaaattttaaaaacctctgatctatctggaatgtattttctaaattaccccaacactgtttattgggaagtctgtcct

SEQ ID NO: 139397 - DNA, 120 bp, Artificial Sequence
  ENSG00000103942_61 (sequence is synthesized)
ttgggaagtctgtcctttattctatatgaaatcccatttttgccatacacctagtagcccttctgttgggtgccaggataagcaccctggccttgagtgtgctgtgaactctttattatg

SEQ ID NO: 139398 - DNA, 120 bp, Artificial Sequence
  ENSG00000103942_62 (sequence is synthesized)
ggttgtgatcttcctgcacattctagcactggtaccacattgtttggatcgccatagctttggactaaacttccccattaaactttttcaaaacttgcctagtatattgtgcaggccggg

SEQ ID NO: 139399 - DNA, 120 bp, Artificial Sequence
  ENSG00000103942_63 (sequence is synthesized)
acaaaaaacaaaacaaaaaaaaaaccttccaaaagaagtttgagataattttatgtttagaaaaattagaaattggattgagtaaaatttacatattttacacaagaggactaacatctt

SEQ ID NO: 139400 - DNA, 120 bp, Artificial Sequence
  ENSG00000103942_64 (sequence is synthesized)
agtaaaatttacatattttacacaagaggactaacatctttataatatttaacctttcagtaaatttatgttttatgtttctcagcctatcttttctagtataggtgatttttttagtgt

SEQ ID NO: 139401 - DNA, 120 bp, Artificial Sequence
  ENSG00000103942_65 (sequence is synthesized)
cctactactttaaaaaatgaaaattaaatctatcgcttttatgactttaaaacattagacttatgtaagtgtaaacattatttaaaaacataatgtagaaaattaaagtcccccataatt

SEQ ID NO: 139402 - DNA, 120 bp, Artificial Sequence
  ENSG00000103942_66 (sequence is synthesized)
aaaatccctttcccccagaaaaagtcaacagcatattcatcagttttttcctaaagtatgttttagcactttgaccatatgagacaacccttctgctgttagcatttttctctttgcaat

SEQ ID NO: 139403 - DNA, 120 bp, Artificial Sequence
  ENSG00000103942_67 (sequence is synthesized)
agatcttcctatgtcagtacacatcaatctacctcattcttacctctgcataagagagtagtgtgtagttgtataatagtttaacttggcgattggttattgattttgtaactagccagt

SEQ ID NO: 139404 - DNA, 120 bp, Artificial Sequence
  ENSG00000103942_68 (sequence is synthesized)
tactgaattattctaaaggttttgctgttgttaatttctttcgcctttttcagttgggtaatagttctgggtaggttgataattttattcccatatttgtaatcttatttcactttctca

SEQ ID NO: 139405 - DNA, 120 bp, Artificial Sequence
  ENSG00000103942_69 (sequence is synthesized)
actcatcacattgactggtacttttagaacaatgttaaaaaacatttacataattgtgctgatattgtacattatttgatatatatatatcaaattttttttacttagaagagtgtttct

SEQ ID NO: 139406 - DNA, 120 bp, Artificial Sequence
  ENSG00000103942_70 (sequence is synthesized)
ccaaaactataaatttgactcttagtgtaaaataatcttaatatttgaattatacattcaggttatgccctctatttctagtttgatgaaaatattattagtaatggatgttggggtttt

SEQ ID NO: 139407 - DNA, 120 bp, Artificial Sequence
  ENSG00000103942_71 (sequence is synthesized)
attaaatggcttttttccacatctgtcaagatgatcaactggcttttctctattatgactttagatgaatcgttttaatagatttgctaatgttaagacatctctgcatttctacaagaa

SEQ ID NO: 139408 - DNA, 120 bp, Artificial Sequence
  ENSG00000103942_72 (sequence is synthesized)
tctgatgtagtcatagtatactattcttttaatatacatctcctttcaatgttaacagtggttatttatgattggttggtccatagtagatttttattttgtgtttcttatctgtacttt

SEQ ID NO: 139409 - DNA, 120 bp, Artificial Sequence
  ENSG00000103942_73 (sequence is synthesized)
ctgatttttctacaaagattgtgtattacttgtataataaaaataagagctttaaattgtgaaattcttctggatttggttttctcattttattatggaatttttcatacctaaataaga

SEQ ID NO: 139410 - DNA, 120 bp, Artificial Sequence
  ENSG00000103942_74 (sequence is synthesized)
tgaatagttgggtaattttttttctgctttgtcagttattggtgtttgttaacttcttaaaaaaattaaaaagaacttgggaagctctgtttttctatgccctggaaacatttaaatatt

SEQ ID NO: 139411 - DNA, 120 bp, Artificial Sequence
  ENSG00000103942_75 (sequence is synthesized)
tagaattttttgctctttgaagtttttataacatgtatgaaactgtccaaatctagtagtgcctttttaggaaatatggggttgttgtttttttttaatttttttcatgctcattatttt

SEQ ID NO: 139412 - DNA, 120 bp, Artificial Sequence
  ENSG00000103942_76 (sequence is synthesized)
ttgtttttttttaatttttttcatgctcattattttcttcaaactttatttctattctgtaagtttttggcaatttaaattttcccggctaagcacagtggctcatgcttgtaatcccag

SEQ ID NO: 139413 - DNA, 120 bp, Artificial Sequence
  ENSG00000103942_77 (sequence is synthesized)
gggggccgaagctgcagtgagccgtgagcatgcctgggacacagagcaagaccctttctcaaaaaaaaattttttttaattaagtgaattttcctaaatagtgattctgttctattttca

SEQ ID NO: 139414 - DNA, 120 bp, Artificial Sequence
  ENSG00000103942_78 (sequence is synthesized)
gatttgttggcctggagttgtagtattctgcttcctcattcccatgttgcgtgtgctttccctttttgttctcattggtttttccagaattactctgtttcattgatcttttcaaataac

SEQ ID NO: 139415 - DNA, 120 bp, Artificial Sequence
  ENSG00000103942_79 (sequence is synthesized)
caactctgagatttatatcttaattttactgttttactatttcatgattcttttcgttttgttcttaattttttcctttattattttcccaccttcttaagttacatgccattttaactt

SEQ ID NO: 139416 - DNA, 120 bp, Artificial Sequence
  ENSG00000103942_80 (sequence is synthesized)
ccattttaactttttcttacttaataaaagacagttactaacattgtaaggtacgacttttcctctaaatacatctttatccatatctcttaaatttatatttagtgttctaagttataa

SEQ ID NO: 139417 - DNA, 120 bp, Artificial Sequence
  ENSG00000103942_81 (sequence is synthesized)
ttcagatttgactttattttttactggagttttttgaaattatacttttaaatttccaggtagtttattttgttgttgttttttagcatttcttacaaacttctagttttattgccttgt

SEQ ID NO: 139418 - DNA, 120 bp, Artificial Sequence
  ENSG00000103942_82 (sequence is synthesized)
caaagagagtatggcctgtacaatttgtgtgcattttggagatcatggatgttttcttgagacctgatttttagttttaatacatatctccaggaaactgaagaagaaagcatattctct

SEQ ID NO: 139419 - DNA, 120 bp, Artificial Sequence
  ENSG00000103942_83 (sequence is synthesized)
gaagggaacaaaattcaatcagatgtattcatttgaccttacaaagtataatattatggacctttaattttaatttacttgattcattaaggctaagaaagatatgttcgtctcctatta

SEQ ID NO: 139420 - DNA, 120 bp, Artificial Sequence
  ENSG00000103942_84 (sequence is synthesized)
ttgtatttctgtctgtttcttttgtttctaacagtttttgctttgtttctttttgatgttatttggcaaatgatctttttatatttaagggaaaaaatattttcctttaaaggcttgtat

SEQ ID NO: 139421 - DNA, 120 bp, Artificial Sequence
  ENSG00000103942_85 (sequence is synthesized)
acctttgtgaattttacctgattttgttgtaatagtttctgtagaaatacatagttcagtaaaatatttgtgtctgtttttaagtcaacagaaatctttcagaaatcctttgtatcttga

SEQ ID NO: 139422 - DNA, 120 bp, Artificial Sequence
  ENSG00000103942_86 (sequence is synthesized)
caagatactttggaagttcttgatctccctaagtaggctaatgtccttgcaggctactcctgaaccaaagcataagtggaagtgggggctggggcatattaggcttgggattttttgagt

SEQ ID NO: 139423 - DNA, 120 bp, Artificial Sequence
  ENSG00000103942_87 (sequence is synthesized)
gtgccaatgtttctggttcttgctttggggcaaccccatgcttagggatgtttaggggatgcctgcccttcatctggtcatattctgcctcagtagggcccacacaaaggcaacctatga

SEQ ID NO: 139424 - DNA, 120 bp, Artificial Sequence
  ENSG00000103942_88 (sequence is synthesized)
ggcacttttcttctgtggggactagccttctgagaaggcaggagaatgtagctttatatgcctggctattggggtaaaagctaatctcagagactcattccaccagataagattttggtt

SEQ ID NO: 139425 - DNA, 90 bp, Artificial Sequence
  ENSG00000103942_89 (sequence is synthesized)
ctaatctcagagactcattccaccagataagattttggttttttttttctgtagagtcagagtcccgccatgttttccaggctggtcctg

SEQ ID NO: 139426 - DNA, 120 bp, Artificial Sequence
  ENSG00000103942_90 (sequence is synthesized)
acacagcccccaccagaaaaggtttttccagagctgttggaacaggctattcacatggcaaagtctgtatcaaacacagaaccggcttttcccaaatgtgtaggagtggtgaatcccagc

SEQ ID NO: 139427 - DNA, 120 bp, Artificial Sequence
  ENSG00000103942_91 (sequence is synthesized)
cctcagctcaagagtaaaagaaataggaccttctctatttttccttcattcaagtgagtgttgatttttgagcccctgttccaccaggctcatgcaatttgactcagtcagcttcagcac

SEQ ID NO: 139428 - DNA, 120 bp, Artificial Sequence
  ENSG00000103942_92 (sequence is synthesized)
tcccctttctccagaggagagtcctttacagttctggggagcttacatattccaacatgttaaggggaggggattcacgtctgctgagatatccccgtttcctaccccgctggatacctc

SEQ ID NO: 139429 - DNA, 120 bp, Artificial Sequence
  ENSG00000103942_93 (sequence is synthesized)
atgcctccatcccatgcttgggacataggaattagctgttctgtgctgtaggaatctccatgaagctgtacttggctctgcctgcctgggccctccctgtagccatgccctgtctggcgc

SEQ ID NO: 139430 - DNA, 120 bp, Artificial Sequence
  ENSG00000103942_94 (sequence is synthesized)
cacaatgacttcatttaacttgaagggactgctagataagcccaatgtgtgtttgcacgggagtcaagaccactgagtggaaataattctgtggctgccaccgatgctgtttgcattgcc

SEQ ID NO: 139431 - DNA, 120 bp, Artificial Sequence
  ENSG00000103942_95 (sequence is synthesized)
gagagccacagttctaccccctacttcccagcagtggccccgctgcgcctgccagagttgttaccatctctgtgccctttctcttgcttattgcacagtaggttacacagtcttgtgctt

SEQ ID NO: 139432 - DNA, 120 bp, Artificial Sequence
  ENSG00000103942_96 (sequence is synthesized)
ctccatcttgccatgtcatctcttcactctaccgctgctctgaccggcccatgcctaccctgttcccgtaccctccaggatctcctccgttttcgtattcctttaatgcagagctgccag

SEQ ID NO: 139433 - DNA, 120 bp, Artificial Sequence
  ENSG00000103942_97 (sequence is synthesized)
aggcttcttcctaaagcatagacagatcaggtcctaggaccctgcaggctcttcccctgcctgcccaggccttgctgtgcactctccctgtgttcttcttgcttatgctgttccatccct

SEQ ID NO: 139434 - DNA, 120 bp, Artificial Sequence
  ENSG00000103942_98 (sequence is synthesized)
ggaatcctttcctgctccaactccattcctcttttaggccccaaaggccccagccctccggatgaaactaaaccactaccagggagggggacttgtgcctcttccatcgtccttttcata

SEQ ID NO: 139435 - DNA, 120 bp, Artificial Sequence
  ENSG00000103942_99 (sequence is synthesized)
cttacagctgttaaatcattcattcatgttttcatttagcaaatatttattgtgcaccctcatgcccaggccctgggaacaccacagtaagaagactattactttccccagatctgctct

SEQ ID NO: 139436 - DNA, 120 bp, Artificial Sequence
  ENSG00000103942_100 (sequence is synthesized)
gttccagtggaggggtgagctgctccattgcaggcgttcatggaactcagctgatgggggattttggaggctcccccacaaggcagagctctcataggcagccgacgacagaggccagtg

SEQ ID NO: 139437 - DNA, 120 bp, Artificial Sequence
  ENSG00000103942_101 (sequence is synthesized)
tgcaccccacttctccagacttgggacgacctgggacattctgaagacctcatgaataccaggcttcaggatcgctgaccccaggaggagcccacggtggctctaagtgtacctgcttcg

SEQ ID NO: 139438 - DNA, 120 bp, Artificial Sequence
  ENSG00000103942_102 (sequence is synthesized)
ctgttcctgcgtcaccagcccactaaggtcctctgacttttgtgtagtagcatttttctaaggacaatctgcagagcagctgcttcagaactatttgtgttgccggcccatcccaaaaaa

SEQ ID NO: 139439 - DNA, 120 bp, Artificial Sequence
  ENSG00000103942_103 (sequence is synthesized)
acctggatgaggacccttgcattctgggcctggaaatcttcattctagaaagctccttttactagacagaataatggtccccaaagatgtccacatcctaatccctggaacctgtggcta

SEQ ID NO: 139440 - DNA, 120 bp, Artificial Sequence
  ENSG00000103942_104 (sequence is synthesized)
tgttaccatagttggcaaaagggcccttcagatggagagatgatcctggattatccgggtgggcccagactaatcacacaagttctcagcagcagcagagaacctttccttgggtcagaa

SEQ ID NO: 139441 - DNA, 120 bp, Artificial Sequence
  ENSG00000103942_105 (sequence is synthesized)
agagatgtgatgatggaagaagggtcagatacgatgctgctggcactgaaggtggaggaaggggccacaagccaaggaacaggggcaacctctagaaaccagaaagggcaaggaaatggc

SEQ ID NO: 139442 - DNA, 120 bp, Artificial Sequence
  ENSG00000103942_106 (sequence is synthesized)
ttctccccggagcctttagaagagaacacagccctgtcaacaccttgattttagcccagtgagacccatgtcagacttctgactatggaactgtaagataagaaatttgtcttttaagca

SEQ ID NO: 139443 - DNA, 120 bp, Artificial Sequence
  ENSG00000103942_107 (sequence is synthesized)
ggtgagagcaggcggtgaagagtagacacgactgatgacttcagggatgctacacctttctctcctgcctgggcaagcctcggtgtccgccccagtcctacacccacttcatgccttctg

SEQ ID NO: 139444 - DNA, 120 bp, Artificial Sequence
  ENSG00000103942_108 (sequence is synthesized)
tgagaagctgcctccacacctcagcccagactgagccaatcaggacattccattcccctggccacagtgatgggctcaggaatcggcctgtgccccaaggcagggcagtcagacacggcg

SEQ ID NO: 139445 - DNA, 120 bp, Artificial Sequence
  ENSG00000103942_109 (sequence is synthesized)
aggcttagttcggagactttggcttgacctgtttgggaatttgctagacttgaatgtgagttgggagtccagaagagagcttacctgaggatggagccaaacagaacaagaaaaacccag

SEQ ID NO: 139446 - DNA, 120 bp, Artificial Sequence
  ENSG00000103942_110 (sequence is synthesized)
gagggaccctgcccttgaagaccatagtctagtggaggagacaccttttgataggggtaagggtgacaatgagtgtgatagctcagagcatggggcagcataatcaggatgcccctgggg

SEQ ID NO: 139447 - DNA, 120 bp, Artificial Sequence
  ENSG00000103942_111 (sequence is synthesized)
gcacttgcagctggctgggctattcatctggtcatttctatttttgcctcttggaattgaattctgctgggaggcagccagtgaggtccaaagtcctctcctcaaggttgttggattgtt

SEQ ID NO: 139448 - DNA, 120 bp, Artificial Sequence
  ENSG00000103942_112 (sequence is synthesized)
agctccctggctcttctctctaatcaggctcccagcctcactgggggctgattaagacatttcctgtccttccccaatcttggagtcttgctaagatcctcctgacaagcttctcctgcc

SEQ ID NO: 139449 - DNA, 120 bp, Artificial Sequence
  ENSG00000103942_113 (sequence is synthesized)
tccagcctgcctttccacaaccttctcccatctgctgccagagaagctaagacacaagtctgatcatgccaccctcctacttcaaaatctccactaactccctgaggcctcagaatcaag

SEQ ID NO: 139450 - DNA, 120 bp, Artificial Sequence
  ENSG00000103942_114 (sequence is synthesized)
tccaaactcctaacatgacccggaggtctttcacagagtggtcccaacttacctcttgttcctggccacttcctaccacactgttgagccaagcacatggacattcttgtcgtttcctgt

SEQ ID NO: 139451 - DNA, 120 bp, Artificial Sequence
  ENSG00000103942_115 (sequence is synthesized)
ttaagtcatggcctttaatgcctccgtgtctcagcatgtgctggtctcgttgctggacatagaaatgatcttccctcctgtacatccttgaggacccaactcacacatcccctttttgaa

SEQ ID NO: 139452 - DNA, 120 bp, Artificial Sequence
  ENSG00000103942_116 (sequence is synthesized)
gtcttctgcaggaactaccttattcatacctcggttacattatatttagcttattgtttaaggacacagactggctcaaaataggtgctcagttaagattaaataaatgggtaggccggg

SEQ ID NO: 139453 - DNA, 120 bp, Artificial Sequence
  ENSG00000103966_0 (sequence is synthesized)
agtgcgagccggggagagtcgaacccggagcagggtcccatccgagcgtggactggcggcaggatgttcagctggatggggcggcaggcgggcgggcgcgaacgcgctggcggcgcggac

SEQ ID NO: 139454 - DNA, 120 bp, Artificial Sequence
  ENSG00000103966_1 (sequence is synthesized)
gcggtgcagacggtgacgggcgggctgcgctcgctctacctgcgcaaggtgctgccgctggaggaggcgtaccgcttccacgagttccactcgcctgcgctggaggacgccgacttcgag

SEQ ID NO: 139455 - DNA, 120 bp, Artificial Sequence
  ENSG00000103966_2 (sequence is synthesized)
aacaagcccatgatcctgctggtgggccagtacagcaccggcaagaccaccttcatcagatacctactggagcaggatttcccaggcatgaggattggtccggagcccaccacagactcc

SEQ ID NO: 139456 - DNA, 120 bp, Artificial Sequence
  ENSG00000103966_3 (sequence is synthesized)
ttcatcgccgtgatgtatggagagactgagggcagcaccccagggaatgctttagtcgtggaccccaaaaagccgtttagaaagctcagtcgctttggaaacgctttcctgaatcgattc

SEQ ID NO: 139457 - DNA, 120 bp, Artificial Sequence
  ENSG00000103966_4 (sequence is synthesized)
atgtgctcacagctccccaatcaggtcctgaagagcatcagcgtcatcgacagccccggcatcctttctggggagaagcagcgcatcagccgaggctatgacttctgccaggtcctgcag

SEQ ID NO: 139458 - DNA, 120 bp, Artificial Sequence
  ENSG00000103966_5 (sequence is synthesized)
tggtttgccgagagggtggacaggatcatcctgctctttgacgctcacaagctggacatctcagatgaattctcagaggccatcaaggccttccggggccaggacgacaagatccgtgtc

SEQ ID NO: 139459 - DNA, 120 bp, Artificial Sequence
  ENSG00000103966_6 (sequence is synthesized)
gtgctgaacaaggccgaccaagtggacacgcagcagctgatgcgggtctacggggccctcatgtggtccctaggcaaggtcatcaacacgcccgaggtactgcgcgtctacattggctcc

SEQ ID NO: 139460 - DNA, 120 bp, Artificial Sequence
  ENSG00000103966_7 (sequence is synthesized)
ttctgggcgcagcccctgcagaacacggacaaccgccggctcttcgaggctgaggcccaggacctctttagagacatccagagcctcccccagaaggcagcggtgcgcaagctcaacgac

SEQ ID NO: 139461 - DNA, 120 bp, Artificial Sequence
  ENSG00000103966_8 (sequence is synthesized)
ctcatcaagcgagcgaggctggccaaggtgcatgcctacatcatcagctacctgaagaaggagatgccaagtgtatttggaaaggaaaacaagaagagagagcttatcagcaggctaccg

SEQ ID NO: 139462 - DNA, 120 bp, Artificial Sequence
  ENSG00000103966_9 (sequence is synthesized)
gaaatctacattcagctacagcgagaataccagatttctgcaggggacttccctgaggtcaaggctatgcaggaacagcttgagaactatgacttcaccaaattccactcgctgaagccc

SEQ ID NO: 139463 - DNA, 120 bp, Artificial Sequence
  ENSG00000103966_10 (sequence is synthesized)
aagctgatcgaggcagtggacaacatgctgagcaacaagatctcgcccctcatgaacctcatcagccaggaggagacgagcacgcccacgcagctggtgcagggcggcgccttcgatggc

SEQ ID NO: 139464 - DNA, 120 bp, Artificial Sequence
  ENSG00000103966_11 (sequence is synthesized)
accaccgagggccccttcaaccagggctacggggagggtgccaaggagggcgccgacgaggaggagtgggtcgtggccaaagacaagcccgtctacgacgagctcttctacactctgtcg

SEQ ID NO: 139465 - DNA, 120 bp, Artificial Sequence
  ENSG00000103966_12 (sequence is synthesized)
cccatcaatggcaagatatcaggtgtcaacgccaagaaggagatggtgacctccaagctgcccaacagcgtcctgggcaagatctggaagctggccgactgcgactgcgacggcatgctt

SEQ ID NO: 139466 - DNA, 120 bp, Artificial Sequence
  ENSG00000103966_13 (sequence is synthesized)
gatgaggaggagttcgcgctggccaagcacctcatcaagatcaagctcgacggctacgagctgcccagcagcctgcccccccacctcgtgcccccctcgcacaggaagtccctgcccaag

SEQ ID NO: 139467 - DNA, 120 bp, Artificial Sequence
  ENSG00000103966_14 (sequence is synthesized)
gccgactgaggggtgggctgcagaacggggtgggaactgggggacctgggcctcaggcctgctccaccactgactcaccgaatgaccttgggcaaggcactgccctctctgtgccttggt

SEQ ID NO: 139468 - DNA, 120 bp, Artificial Sequence
  ENSG00000103966_15 (sequence is synthesized)
ttccccatctgtagaatggggagggtggacactggaaactagatgacttctttcacctccaaaattcccttagtttctatgaaaatattgggggtaggggggtggattaggagattgaag

SEQ ID NO: 139469 - DNA, 120 bp, Artificial Sequence
  ENSG00000103966_16 (sequence is synthesized)
ggttgagaagaaagagaaattgtccaaagagtcctcagaacctgcctggagaaatgcgcatgggggtgggcctggtaagtcccaggaaccacaggaagtgagctaaggctcacccagagc

SEQ ID NO: 139470 - DNA, 120 bp, Artificial Sequence
  ENSG00000103966_17 (sequence is synthesized)
agctgggtctccaggctgcctgggctttttgtcctcatgaacaactctggagcagctgtctgtccctcagagggcacctggaggcagcaaagattatcttatttattttattttgttttc

SEQ ID NO: 139471 - DNA, 120 bp, Artificial Sequence
  ENSG00000103966_18 (sequence is synthesized)
tgctatatttagagtggcaaaaaaatagagcagagggtttctgctgtctccagactgtctaccaaagagaaggcgacagatgcctcctgggtttggaagggggatgcactgtggatctgc

SEQ ID NO: 139472 - DNA, 120 bp, Artificial Sequence
  ENSG00000103966_19 (sequence is synthesized)
catccattctgcagtctccagcagagcaggcagtcaggccccagcgtgcctccatcccagtgccccgatgaccatctggtcagccctcccaacctcccttccagggggcttaccagcaaa

SEQ ID NO: 139473 - DNA, 120 bp, Artificial Sequence
  ENSG00000103966_20 (sequence is synthesized)
gccatattcggctaggaatttggaattcacaacctttattaacccctggcaaaacttcccgtttgcatgtcaaatcacattgaagcctgaaaattagcttttcttactggtttttccaat

SEQ ID NO: 139474 - DNA, 120 bp, Artificial Sequence
  ENSG00000103966_21 (sequence is synthesized)
aagtaatagcaaagcccacttatcatacttaaactacagtaaagaaaagaggtggttctctgcagtgatcgtttagtgtggccctcaaacattaaatatcccgaggtctccttggtgggt

SEQ ID NO: 139475 - DNA, 120 bp, Artificial Sequence
  ENSG00000103966_22 (sequence is synthesized)
ggcaggatttaaattcaatcaaatcctgtcctagtgtgtgcagtgtcttcggccctgtggacacaggtgaatgagggaccagccctgccctgggctgttgagaagagatcagtccaccca

SEQ ID NO: 139476 - DNA, 120 bp, Artificial Sequence
  ENSG00000103966_23 (sequence is synthesized)
gagttagacattgtttttgtagaaaacaggcatttattatgtctagggttttgtgttttttttttttccttacaggataaaagcctttatacagaaacaaaatggaacctttcatataaa

SEQ ID NO: 139477 - DNA, 120 bp, Artificial Sequence
  ENSG00000103966_24 (sequence is synthesized)
accttttctttaaaggctgtgtggttcgtatcatgaatgcccatcacgaggcaggattcgggcacatacctgtacttctgctccagagtgtgcgctccccaaatcccctgagtaaacctc

SEQ ID NO: 139478 - DNA, 120 bp, Artificial Sequence
  ENSG00000103966_25 (sequence is synthesized)
tctggactgctgctcagacacctgcgtcaggtggaggtgcctccccctctgtgggcaccagcttggggaggtaggtgacttttccttgcaaatctccctgcctcatctccagaaaattgc

SEQ ID NO: 139479 - DNA, 120 bp, Artificial Sequence
  ENSG00000103966_26 (sequence is synthesized)
cacgaaacagcaatggccacatggtatgggggcctgctggcaccagaagtgaatgaaatcagaaccgtcccactgagtcttccaaaaggcacataattttttttttctgtcacctgcctt

SEQ ID NO: 139480 - DNA, 120 bp, Artificial Sequence
  ENSG00000103966_27 (sequence is synthesized)
tggtgacagggtcaaaggcacagattgaagagaaaatcttgatttgggagaagcatttatatccagatgcctacccttacactccctagcttactttctacataatttagttttaagagc

SEQ ID NO: 139481 - DNA, 120 bp, Artificial Sequence
  ENSG00000103966_28 (sequence is synthesized)
aggaaatgcataacatggtttttagtcttaacaagcacttaaattcattagacgcatagaaaagaaccatttattattttattatttttatttttattttgagaggaagtctctgtcacc

SEQ ID NO: 139482 - DNA, 63 bp, Artificial Sequence
  ENSG00000103966_29 (sequence is synthesized)
ttggtcaaaacctaagcagacagttctgtgaatgcgtgaggaccacctgaagtctgcagccac

SEQ ID NO: 139483 - DNA, 120 bp, Artificial Sequence
  ENSG00000103966_30 (sequence is synthesized)
ttctgtgaatgcgtgaggaccacctgaagtctgcagccacggtggaggtcaccaaagggtgaactgagagagaagagggaattcacttgcccaaaggtttacagatgcccaggcaaactg

SEQ ID NO: 139484 - DNA, 120 bp, Artificial Sequence
  ENSG00000103966_31 (sequence is synthesized)
atttttccatccagaattatcttgttctttaactctcctcaattgtcatatataaacatgaatttatatacatgtgtgtcacatgagtatgtcgttttaaaacaacgtgtacatatgtaa

SEQ ID NO: 139485 - DNA, 120 bp, Artificial Sequence
  ENSG00000103966_32 (sequence is synthesized)
gttttgtctggatacagaaagctgctttagagggcagcaggttgaggtctctgatttctccgtggaggaaaacctctcaggcactgtgatctccctacctctgcgctctcaggtgggaga

SEQ ID NO: 139486 - DNA, 120 bp, Artificial Sequence
  ENSG00000103966_33 (sequence is synthesized)
ggcgtcaggcagcggagtcctttccctgctggcacctggtaatgttcttggagagaaaggaaaaaaaaaggaaatcatttggccacttttcttaatatcctcttacatgcagtcattcat

SEQ ID NO: 139487 - DNA, 120 bp, Artificial Sequence
  ENSG00000103966_34 (sequence is synthesized)
caagaaaagttgactggaaaagaaaacactagaaaatatgagggatggcgaccaagtgaggacttgtatcttcccaggaccagtacaaagttctgtgaatgtgtccacaccaccagctgt

SEQ ID NO: 139488 - DNA, 120 bp, Artificial Sequence
  ENSG00000103966_35 (sequence is synthesized)
ctccctaccccacacggcagggcggcagggccgaccctggggcctgctcaccatcaccgttgcccttcctgcaccaccccaattttcaaagaacctcttccacagagtgtttatgtatag

SEQ ID NO: 139489 - DNA, 120 bp, Artificial Sequence
  ENSG00000103966_36 (sequence is synthesized)
gagagagggtggaagtacctaaactctagaactacaacatctaagaagctgaggccctgttttctacacagcatatggtatcgcataacacaaaccttccggtcttgagtttaaagggaa

SEQ ID NO: 139490 - DNA, 120 bp, Artificial Sequence
  ENSG00000103966_37 (sequence is synthesized)
aatgaaaactccagcctattgctcccacagtctgcttccaagttgtcagcctgccagtgagggtctcctgaccccgtttgtagagaaacactgcactaagacttgggaatctccccagct

SEQ ID NO: 139491 - DNA, 120 bp, Artificial Sequence
  ENSG00000103966_38 (sequence is synthesized)
cccagggaggggtggcacacaacagccttccaacctgcttccgcctcctgctccagccctgcagcgtctgtcaattcatttctcaactcaccgcacttggatggcctgggggcagggttg

SEQ ID NO: 139492 - DNA, 120 bp, Artificial Sequence
  ENSG00000103966_39 (sequence is synthesized)
ctcttctgggggagggtcattcattcagttggcttttggctttcctttctccgggctgggcctggttctcttttgaacacttgtcgtgctgcagcaagagcatctttggatttggggctg

SEQ ID NO: 139493 - DNA, 120 bp, Artificial Sequence
  ENSG00000103966_40 (sequence is synthesized)
tggagctgtggttcacccgcgggagtcacagccgcggcctggacctttccacctcgcaccctcgctcaccctccttcatgatgcctggaggatgcctgagacaattgccttgaagatgag

SEQ ID NO: 139494 - DNA, 120 bp, Artificial Sequence
  ENSG00000103966_41 (sequence is synthesized)
gaaagtgtttcactgtttattttctccatgggatgtagcaggcaagcatgcttaggacagaaaaccactgagtttactcaggtaaatgcgggcctaatacaagagtattgggttccaatg

SEQ ID NO: 139495 - DNA, 120 bp, Artificial Sequence
  ENSG00000103966_42 (sequence is synthesized)
ttggttaaccaatgcagttaatacgcaatgcttctattttttttctttttgtaatcttatttagaagtttcaaacaaaaagacatagtctgctgatcaataaacatggagctgccctctc

SEQ ID NO: 139496 - DNA, 120 bp, Artificial Sequence
  ENSG00000103966_43 (sequence is synthesized)
ccactggctcattttccagtggctgcgtgctggcctctcggagcagagtgtggatccctggatccaggttgaaccgggggagaagagttagggagagggtgtgcctgtgagccccaactc

SEQ ID NO: 139497 - DNA, 120 bp, Artificial Sequence
  ENSG00000103966_44 (sequence is synthesized)
ttcctgtggagagaaacccaaaatgcagccgcttcagaaggaaagcggccccatcaggtggggacagaagagggtaggcagcagaggccaggtctgtggacaaaagccccacttcagagt

SEQ ID NO: 139498 - DNA, 120 bp, Artificial Sequence
  ENSG00000103966_45 (sequence is synthesized)
ggttggaagccaggacaggagggactcatggaggtgaccgcttcacaggagtcctttctccagtcgtgctagggaggagcccctgcctgtccagcactgcccctgcctcttgctgtacct

SEQ ID NO: 139499 - DNA, 120 bp, Artificial Sequence
  ENSG00000103966_46 (sequence is synthesized)
tgccagtgtgccctccccccgcccactaccatagtaggcatctggcttttcccaccaacccatctacctttttggtggtccagacctacagtctccttgcagagcactcctcctcccacc

SEQ ID NO: 139500 - DNA, 120 bp, Artificial Sequence
  ENSG00000103966_47 (sequence is synthesized)
ctcacttcaagtgaggtttggatgagattgaccacatccccttggtcacaaatattggctcaggaatggacatgtggccctgttcaagcctatgagagccaggacccccagacttatgtt

SEQ ID NO: 139501 - DNA, 120 bp, Artificial Sequence
  ENSG00000103966_48 (sequence is synthesized)
agaactcttgagagagatactctgtcttctctgaaccttgcagtatatagaaatgagcctattgatgcaacaatataaatggcactgagaggggtgtccagagctgctggggtcagggga

SEQ ID NO: 139502 - DNA, 120 bp, Artificial Sequence
  ENSG00000103966_49 (sequence is synthesized)
gggaggtcagcctggcagaagccatcttgtggagcatgaaaatgaaagagaccttgagaaaggccagaggaatccaggcctgtggtgacaacatttgagctgctggatcaaacctcacct

SEQ ID NO: 139503 - DNA, 120 bp, Artificial Sequence
  ENSG00000103966_50 (sequence is synthesized)
tgctggatcaaacctcacctgaagtccttcctattcctactagatatttttttccactgtgtgggccaatgcattccctttatactgtgtaagccaggcatggtggctcacacctataat

SEQ ID NO: 139504 - DNA, 82 bp, Artificial Sequence
  ENSG00000103966_51 (sequence is synthesized)
ggaggctgaagtgggaagatcagaagaccctgtctctaaaaaagaattaaatataaataaataaataataaaaatataatgt

SEQ ID NO: 139505 - DNA, 120 bp, Artificial Sequence
  ENSG00000103966_52 (sequence is synthesized)
gtgctggctgaggccctctctgctgtgagcagaggatttctgtccctatattattctatccgtcctccaggacagctgttgggcagctgaaggggccccaagtgtcaaccaggagttcat

SEQ ID NO: 139506 - DNA, 120 bp, Artificial Sequence
  ENSG00000103966_53 (sequence is synthesized)
agcatcaaagactctgccccctccagaggcttatattctgtgagaaagacatttgtcaagttacacatgagtaaatgaagatgaggagtggggtaaacaatgggaggtatcgaggtgtga

SEQ ID NO: 139507 - DNA, 120 bp, Artificial Sequence
  ENSG00000103966_54 (sequence is synthesized)
ggggacctggcttggcctcgggggtgttgggagaggctcctggaggaagcagcattggaactaggatctgaaggagtaggaattacctaagggaagctgtggggtagggagagattatga

SEQ ID NO: 139508 - DNA, 67 bp, Artificial Sequence
  ENSG00000103966_55 (sequence is synthesized)
acaaggctgaggcaatagctgcttctaggcctgtgctttgtagtcaaaacagatgggtctgctgggt

SEQ ID NO: 139509 - DNA, 70 bp, Artificial Sequence
  ENSG00000103966_56 (sequence is synthesized)
gcagctgaacctgggaggcggaggttgcggagagctgagatcatgccatggcactctagcctgtgggcaa

SEQ ID NO: 139510 - DNA, 79 bp, Artificial Sequence
  ENSG00000103966_57 (sequence is synthesized)
aaccggtgggcctgctatctccctccgtcctggaggaagggggcatcaggggcagaccagaggacagagttgacttacg

SEQ ID NO: 139511 - DNA, 120 bp, Artificial Sequence
  ENSG00000103966_58 (sequence is synthesized)
ggggcatcaggggcagaccagaggacagagttgacttacggagaggaaatgcctgatcgggagggtcaggatgggttcctgccatcacaggtccagaggcagctcaagtcttttccttgc

SEQ ID NO: 139512 - DNA, 120 bp, Artificial Sequence
  ENSG00000103966_59 (sequence is synthesized)
cctggcccttgaaacaaaggcgggttgctgggagggaggagatggagcagatgcatcgctgccatcacttctggctgagaactcttcacaaccccttgaacagcaagtcggtagcaccgt

SEQ ID NO: 139513 - DNA, 120 bp, Artificial Sequence
  ENSG00000103966_60 (sequence is synthesized)
gctgagaagtctgggcatgccagggttgagcagaagcctgtgtggggtcacggtcgcaggttatgacaaggcagtgaacaccccacagctcacaaagcagaagtgcagttacataggcca

SEQ ID NO: 139514 - DNA, 120 bp, Artificial Sequence
  ENSG00000103966_61 (sequence is synthesized)
gtgagggtcccgtgacaggggtcaagaaagggattccgaggccaataagccctcctttctcttggcattttgggaatgccatctctgctgctccgtggtcccgcagagagctcggggcta

SEQ ID NO: 139515 - DNA, 120 bp, Artificial Sequence
  ENSG00000103966_62 (sequence is synthesized)
tgctgagccgaggcctcccagggtgcctgctgtgccttcactgtttcagtcagggacttgccagctatggaatgccattaaggtcacctttcccgggcctccaagaaccttgcaattatg

SEQ ID NO: 139516 - DNA, 120 bp, Artificial Sequence
  ENSG00000103978_0 (sequence is synthesized)
gaaatgctttcggtaggcactccacggctgtgaagatggcggcggctgcgtggcttcaggtgttgcctgtcattcttctgcttctgggagctcacccgtcaccactgtcgtttttcagtg

SEQ ID NO: 139517 - DNA, 120 bp, Artificial Sequence
  ENSG00000103978_1 (sequence is synthesized)
cgggaccggcaaccgtagctgctgccgaccggtccaaatggcacattccgataccgtcggggaaaaattattttagttttggaaagatcctcttcagaaataccactatcttcctgaagt

SEQ ID NO: 139518 - DNA, 120 bp, Artificial Sequence
  ENSG00000103978_2 (sequence is synthesized)
ttgatggagaaccttgtgacctgtctttgaatataacctggtatctgaaaagcgctgattgttacaatgaaatctataacttcaaggcagaagaagtagagttgtatttggaaaaactta

SEQ ID NO: 139519 - DNA, 120 bp, Artificial Sequence
  ENSG00000103978_3 (sequence is synthesized)
aggaaaaaagaggcttgtctgggaaatatcaaacatcatcaaaattgttccagaactgcagtgaactctttaaaacacagaccttttctggagattttatgcatcgactgcctcttttag

SEQ ID NO: 139520 - DNA, 120 bp, Artificial Sequence
  ENSG00000103978_4 (sequence is synthesized)
gagaaaaacaggaggctaaggagaatggaacaaaccttacctttattggagacaaaaccgcaatgcatgaaccattgcaaacttggcaagatgcaccatacatttttattgtacatattg

SEQ ID NO: 139521 - DNA, 120 bp, Artificial Sequence
  ENSG00000103978_5 (sequence is synthesized)
gcatttcatcctcaaaggaatcatcaaaagaaaattcactgagtaatctttttaccatgactgttgaagtgaagggtccctatgaatacctcacacttgaagactatcccttgatgattt

SEQ ID NO: 139522 - DNA, 120 bp, Artificial Sequence
  ENSG00000103978_6 (sequence is synthesized)
ttttcatggtgatgtgtattgtatatgtcctgtttggtgttctgtggctggcatggtctgcctgctactggagagatctcctgagaattcagttttggattggtgctgtcatcttcctgg

SEQ ID NO: 139523 - DNA, 120 bp, Artificial Sequence
  ENSG00000103978_7 (sequence is synthesized)
gaatgcttgagaaagctgtcttctatgcggaatttcagaatatccgatacaaaggagaatctgtccagggtgctttgatccttgcagagctgctttcagcagtgaaacgctcactggctc

SEQ ID NO: 139524 - DNA, 120 bp, Artificial Sequence
  ENSG00000103978_8 (sequence is synthesized)
gaaccctggtcatcatagtcagtctgggatatggcatcgtcaagccacgccttggagtcactcttcataaggttgtagtagcaggagccctctatcttttgttctctggcatggaagggg

SEQ ID NO: 139525 - DNA, 120 bp, Artificial Sequence
  ENSG00000103978_9 (sequence is synthesized)
tcctcagagttactggggcccagactgatcttgcttccttggcctttatccccttggctttcctagacactgccttgtgctggtggatatttattagcctgactcaaacaatgaagctat

SEQ ID NO: 139526 - DNA, 120 bp, Artificial Sequence
  ENSG00000103978_10 (sequence is synthesized)
taaaacttcggaggaacattgtaaaactctctttgtatcggcatttcaccaacacgcttattttggcagtggcagcatccattgtgtttatcatctggacaaccatgaagttcagaatag

SEQ ID NO: 139527 - DNA, 120 bp, Artificial Sequence
  ENSG00000103978_11 (sequence is synthesized)
tgacatgtcagtcggactggcgggagctgtgggtagacgatgccatctggcgcttgctgttctccatgatcctctttgtcatcatggttctctggcgaccatctgcaaacaaccagaggt

SEQ ID NO: 139528 - DNA, 120 bp, Artificial Sequence
  ENSG00000103978_12 (sequence is synthesized)
tgagaagtaccaaacaagaacccaatggaaatagtaaagttaacaaagcacaggaagatgatttgaagtgggtagaagagaatgttccttcttctgtgacagatgtagcacttccagccc

SEQ ID NO: 139529 - DNA, 120 bp, Artificial Sequence
  ENSG00000103978_13 (sequence is synthesized)
ttctggattcagatgaggaacgaatgatcacacactttgaaaggtccaaaatggagtaaggaatgggaagatttgcagttaaagatggctaccatcagggaagagatcagcatctgtgtc

SEQ ID NO: 139530 - DNA, 120 bp, Artificial Sequence
  ENSG00000103978_14 (sequence is synthesized)
agtcttctgtacggctccatgggattaaaggaagcaatgacatcctgatctgttccttgatctttgggcattggagttggcgagaggtgtcagaacaaagagaacatcttactgaaaaca

SEQ ID NO: 139531 - DNA, 120 bp, Artificial Sequence
  ENSG00000103978_15 (sequence is synthesized)
agttcataagatgagaaaaatctacgagcttcttatttacaacactgctgccccctttcctcccagactctgacatggatgttcatgcaacttaagtgtgttgttcctgaactttctgta

SEQ ID NO: 139532 - DNA, 120 bp, Artificial Sequence
  ENSG00000103978_16 (sequence is synthesized)
atgtttcattttttaaatctgacaaactaaaaagtttaacgtcttctaaaagattgtcatcaacaccataatatgtaatctccaggagcaactgcctgtaatttttatttatttagggag

SEQ ID NO: 139533 - DNA, 120 bp, Artificial Sequence
  ENSG00000103978_17 (sequence is synthesized)
ttacataggtgatgggggaaattgttaactacctttcattttcctgggaagtcaaggttacatcttgcagaggttgttttgagaaaaaagggcccttctgagttaaggagccatagttct

SEQ ID NO: 139534 - DNA, 120 bp, Artificial Sequence
  ENSG00000103978_18 (sequence is synthesized)
atcaatgatcaaaagaaaaaaaaaaaaagagaaactgttacagtatgattcagatcatttaaaaaagcaaaatcaagtgcaattttgtttacaaatggtgtatattaaagatttttctat

SEQ ID NO: 139535 - DNA, 120 bp, Artificial Sequence
  ENSG00000103978_19 (sequence is synthesized)
ttcagatgtactttaaagagaaatattagcttaactcttttgacatctgctattgtgacacatcccattgctggcaatgtggtgcacactccgaaacttttaactactgttttgtaagcc

SEQ ID NO: 139536 - DNA, 120 bp, Artificial Sequence
  ENSG00000103978_20 (sequence is synthesized)
tccaagggtggcattgcagggtccttaggcaatgttttgtttgcctttatgcagagaggtgctccaagtgctgtgattgagcaccgtgctagaggaactgtaatgcttcagaagttgtag

SEQ ID NO: 139537 - DNA, 120 bp, Artificial Sequence
  ENSG00000103978_21 (sequence is synthesized)
cttatacaaaggaaacaggtcctgctggcttaatttaaacagttattgcatgaagtagcgtggaggccctggactgctgctcgttctttaggatggactgttctggtatctggtattggt

SEQ ID NO: 139538 - DNA, 120 bp, Artificial Sequence
  ENSG00000103978_22 (sequence is synthesized)
ttagagactgttaataagggacatcacaaggtgatgggattcatttgaagcactctatttctgttttaatggttttatccaattttgccttcccaagatttttgttctacataaaaagtt

SEQ ID NO: 139539 - DNA, 120 bp, Artificial Sequence
  ENSG00000103978_23 (sequence is synthesized)
catgccactttttaatataaaaaaatttaacaaaattaatgtatttttctcatttttttcaaactttttctaaagactctttctgtcaaactcatgaaaaatttctttctatggctttta

SEQ ID NO: 139540 - DNA, 120 bp, Artificial Sequence
  ENSG00000103978_24 (sequence is synthesized)
agtaggtccaaagtctcacggcgcacagacgactgtctgagagaggggccgctacgccgcacagcaaacaagctccgcgacgtttccaggacccggataatcccgcccttagagcagagc

SEQ ID NO: 139541 - DNA, 120 bp, Artificial Sequence
  ENSG00000103978_25 (sequence is synthesized)
ccaaagttccaaaagttgattttgatagtttttgccagtgttttcgttgcttttatggatgagtagattttcagagtttcttattctgccattctgaaagtgttctcactacctaaaccc

SEQ ID NO: 139542 - DNA, 120 bp, Artificial Sequence
  ENSG00000103978_26 (sequence is synthesized)
cagaattttaactgaatgtaagttaggcatgacagtctttgttaatttttttaaacaaaagatagccattaggactgggtacagtggctcacgcctgtaatgccaacactttgggaggcc

SEQ ID NO: 139543 - DNA, 120 bp, Artificial Sequence
  ENSG00000103978_27 (sequence is synthesized)
tgggcagatgacttgaggttgggagttcgagaccagcttggccaatgtggtgaaactttgtctttactaaaaatacaaaaattagttgctcatggtggcaggcacctgtaatccaagcta

SEQ ID NO: 139544 - DNA, 90 bp, Artificial Sequence
  ENSG00000103978_28 (sequence is synthesized)
gccagtgagattccatctcaaaaaaaaaagaaaaaagatattcattggattttctcttactaataggtatatattcactgtgaaaatgga

SEQ ID NO: 139545 - DNA, 120 bp, Artificial Sequence
  ENSG00000103978_29 (sequence is synthesized)
tttctcttactaataggtatatattcactgtgaaaatggagacgatatacataaatgaaaagaagaaaatagtaatctataataccatgcagtgatatatttatcttcctattcttttgt

SEQ ID NO: 139546 - DNA, 120 bp, Artificial Sequence
  ENSG00000103978_30 (sequence is synthesized)
atatgggcatgtttatattattttaaaaagggaatcttagagtatgtattatatgacttttttttgtagcttagcaatataacatggacatgtcgtcagtttggtaaatattgtattgca

SEQ ID NO: 139547 - DNA, 120 bp, Artificial Sequence
  ENSG00000103978_31 (sequence is synthesized)
tcgttacttaaatgcttgtatagtgtcttattgtatgagtacattgcaatttgttcaattctctgttcttgaacttttatgagtttcattatcttggaattttatgcagtgttgtgatta

SEQ ID NO: 139548 - DNA, 120 bp, Artificial Sequence
  ENSG00000103978_32 (sequence is synthesized)
gtgttgtgattaatattttaactacatttgcttttaagtctttattttctgatctcagaagaattgtatattgggataagtttttaattctataacttaaaagtaaaaatcctttgtaat

SEQ ID NO: 139549 - DNA, 120 bp, Artificial Sequence
  ENSG00000103978_33 (sequence is synthesized)
ctgtgattaggctagcgggaatgtaagggccacttcagcaacagaaaggagtggtggagcggcttctcatcagaaaaacagaactttcagtgcctgacttgagatgtaaacttgatggga

SEQ ID NO: 139550 - DNA, 120 bp, Artificial Sequence
  ENSG00000103978_34 (sequence is synthesized)
ggagcggcttctcatcagaaaaacagaactttcagtgcctgacttgagatgtaaacttgatgtacaaacggagagttgtttatctttcagatgtttcacagaatccagtgtccccgggtt

SEQ ID NO: 139551 - DNA, 120 bp, Artificial Sequence
  ENSG00000103978_35 (sequence is synthesized)
aaaacacagactaggaggattggttggtcttttcttggatttgattatggaaagctacctgatgcatctggttgctggaggctgactacttttagatgtgctgtaatctttccagggtct

SEQ ID NO: 139552 - DNA, 120 bp, Artificial Sequence
  ENSG00000103978_36 (sequence is synthesized)
gtttgctttaagtcacttttgggctctgattttcaaaatatatgtatagttcatgttctcttttaaatctattagagctttgtaaatttagtgtgtgcccgaatgaatgcttttccacct

SEQ ID NO: 139553 - DNA, 120 bp, Artificial Sequence
  ENSG00000103978_37 (sequence is synthesized)
gtctccaaattgctaattgttttagttcctcctcccaagcagtagacttgcatttttttttctttttctaatcaatggaatccagactgaaatccagactgaaattcttgtgtaaatggc

SEQ ID NO: 139554 - DNA, 120 bp, Artificial Sequence
  ENSG00000103978_38 (sequence is synthesized)
ttctgtaactgttgcttattgtatttgctgtttatttttcctaaaagggccattaataaaatgcaaatcttagataattataaagcttttaattgcattattccattgtcttttatgaac

SEQ ID NO: 139555 - DNA, 120 bp, Artificial Sequence
  ENSG00000103978_39 (sequence is synthesized)
ctttttcttcctctgcacttcttggtccctgggtaattctgcttacgagatggttcgacttcgcttcaactttggaatggctattctaagctttactgtgtgactagaaagcatagagat

SEQ ID NO: 139556 - DNA, 120 bp, Artificial Sequence
  ENSG00000103978_40 (sequence is synthesized)
ttaagaaatgtgttttaacatgggaatggttaaaattgaagaaatagtacttaaaatttaatgtggggaaaaattattttagttttggaaagatcctcttcagaaataccactatcttcc

SEQ ID NO: 139557 - DNA, 120 bp, Artificial Sequence
  ENSG00000103978_41 (sequence is synthesized)
ggctgtgtcatatagtggaaggaacactgggcctggaatcagaagaactgggttcctatctcagctctcctcttaacttcatgatttttggcatgcagcctctccacctctctggcctta

SEQ ID NO: 139558 - DNA, 120 bp, Artificial Sequence
  ENSG00000103994_0 (sequence is synthesized)
ggtgtgcgcctgcgcgttggcggcggctgtggcggggcccggcggggagcgggtccggagcaggctcccggacccaaaactgaagggggcgtctgaggcgtcagggagctccctcgcctg

SEQ ID NO: 139559 - DNA, 120 bp, Artificial Sequence
  ENSG00000103994_1 (sequence is synthesized)
gctctcggcggcctgatggagtaagaggggttggctgtgaatctgtgacgttgagtgcttcagatctggtcactatggtacgagaacgaaaatgcatattatgccacatcgtgtacagct

SEQ ID NO: 139560 - DNA, 120 bp, Artificial Sequence
  ENSG00000103994_2 (sequence is synthesized)
caaaaaaggagatggacgaacacatgcggagcatgttgcatcacagggaacttgagaacctcaagggcagggacattagtcatgagtgccgagtgtgcggggtcacagaagtgggtcttt

SEQ ID NO: 139561 - DNA, 120 bp, Artificial Sequence
  ENSG00000103994_3 (sequence is synthesized)
ctgcatatgcaaagcacatttctggccagttgcacaaagataacgttgatgcccaggaaagagaagatgatggaaaaggagaggaagaggaagaagattattttgacaaggaactcattc

SEQ ID NO: 139562 - DNA, 120 bp, Artificial Sequence
  ENSG00000103994_4 (sequence is synthesized)
agttaataaaacaaaggaaagaacaaagtcgacaagatgaaccttccaatagcaaccaagaaataaactctgatgacagacgaccccaatggagacgagaagaccgaattccttaccaag

SEQ ID NO: 139563 - DNA, 120 bp, Artificial Sequence
  ENSG00000103994_5 (sequence is synthesized)
acagagagagttacagtcagcctgcatggcatcatcgtggacctccacagcgggattggaaatgggaaaaagatggctttaataatactaggaaaaacagctttccacattctttgagga

SEQ ID NO: 139564 - DNA, 120 bp, Artificial Sequence
  ENSG00000103994_6 (sequence is synthesized)
atggtggtggaccaagaggacgttccgggtggcataagggtgttgcaggaggctcctcgacttggtttcacaaccatagtaattctggaggtggttggctttcaaatagtggagcagtag

SEQ ID NO: 139565 - DNA, 120 bp, Artificial Sequence
  ENSG00000103994_7 (sequence is synthesized)
attggaatcataatggtacaggaaggaattccagttggctttctgaaggaacaggtggcttttccagttggcatatgaacaacagtaacggaaactggaaatccagtgtacgtagtacaa

SEQ ID NO: 139566 - DNA, 120 bp, Artificial Sequence
  ENSG00000103994_8 (sequence is synthesized)
ataattggaattacagtggccctggagacaaatttcaaccaggcagaaacagaaattctaactgtcaaatggaagacatgactatgctatggaacaagaaatctaataagtcaaacaaat

SEQ ID NO: 139567 - DNA, 120 bp, Artificial Sequence
  ENSG00000103994_9 (sequence is synthesized)
acagtcacgacagatataattggcagcggcaagaaaatgacaaacttggtacagttgccacatatagaggtccttctgaaggatttacaagtgataaatttccttcagaaggcttactcg

SEQ ID NO: 139568 - DNA, 120 bp, Artificial Sequence
  ENSG00000103994_10 (sequence is synthesized)
acttcaattttgagcagctggaaagccaaaccactaaacaagcagacactgctacttccaaagttagtggaaagaatggcagtgcggcaagggaaaagcctcgtcgctggacgccttacc

SEQ ID NO: 139569 - DNA, 120 bp, Artificial Sequence
  ENSG00000103994_11 (sequence is synthesized)
cttctcagaagactctggatttacagtcgggattgaaagacatcactggtaacaagtcagaaatgatagagaaacctctctttgattttagcttgataactacaggaatacaggagcccc

SEQ ID NO: 139570 - DNA, 120 bp, Artificial Sequence
  ENSG00000103994_12 (sequence is synthesized)
aaactgatgaaacacgtaattccccaacacagaaaacacaaaaagaaatacatactggatctcttaatcacaaggcctcttctgattccgctgcttccttcgaggtggtgagacagtgcc

SEQ ID NO: 139571 - DNA, 120 bp, Artificial Sequence
  ENSG00000103994_13 (sequence is synthesized)
ccactgcagaaaaacctgaacaagagcatacaccaaataaaatgccatcattgaaatccccactccttccatgtccagccactaaatcattgtctcaaaagcaagatccaaagaatatct

SEQ ID NO: 139572 - DNA, 120 bp, Artificial Sequence
  ENSG00000103994_14 (sequence is synthesized)
caaaaaacaccaaaacaaattttttttcccctggagaacactcaaatccctcgaacaagcccactgtggaagataaccatggtccttacatatccaaactgcgtagttcatgtcctcatg

SEQ ID NO: 139573 - DNA, 120 bp, Artificial Sequence
  ENSG00000103994_15 (sequence is synthesized)
ttttaaaagggaataaaagtacatttggctctcaaaagcaatctggtgataatttaaatgatactttacgaaaggccaaagaggtgctacagtgtcatgagtcattgcaaaatccacttc

SEQ ID NO: 139574 - DNA, 120 bp, Artificial Sequence
  ENSG00000103994_16 (sequence is synthesized)
ttagcacttctaaaagtaccaggaactatgcaaaagcaagtagaaatgtagaagaatctgaaaaagggtctttgaaaattgagtttcaagtgcacgcactagaagatgaaagtgatggag

SEQ ID NO: 139575 - DNA, 120 bp, Artificial Sequence
  ENSG00000103994_17 (sequence is synthesized)
agacatctgacacggaaaagcatggaacaaaaattggaaccctaggttctgcaactacagaattgttatctggcagcactcgaactgctgatgagaaagaggaggatgaccgcatcctga

SEQ ID NO: 139576 - DNA, 120 bp, Artificial Sequence
  ENSG00000103994_18 (sequence is synthesized)
agacttctagagagctatccacttccccatgtaatcccatagttcgccagaaagaatctgaattacaaatgacatctgcagccagtccacaccctggcttattgctagacttgaaaacct

SEQ ID NO: 139577 - DNA, 120 bp, Artificial Sequence
  ENSG00000103994_19 (sequence is synthesized)
ctctagaagatgcacaggttgatgactctattaaatctcatgtatcttatgaaacagaaggctttgagagtgctagcttggatgcagagcttcaaaaaagtgacatcagtcagccctcgg

SEQ ID NO: 139578 - DNA, 120 bp, Artificial Sequence
  ENSG00000103994_20 (sequence is synthesized)
gccctctcctgcctgaactaagtaagcttggctttcctgcctcacttcagagggatctaacccggcacattagtttgaagagcaaaactggagtacaccttcctgagccaaacctcaata

SEQ ID NO: 139579 - DNA, 120 bp, Artificial Sequence
  ENSG00000103994_21 (sequence is synthesized)
gtgcccgccgcattcgcaatattagcggtcaccgaaagagtgagacagagaaggagtctgggctcaagccaaccctacggcagattctaaatgcatctcggagaaatgtcaactgggaac

SEQ ID NO: 139580 - DNA, 120 bp, Artificial Sequence
  ENSG00000103994_22 (sequence is synthesized)
aggtcattcagcaagtaaccaagaaaaagcaagagctgggcaaaggcttacccaggtttggcatagaaatggtaccccttgttcaaaatgaacaagaagccttagatttggatggggaac

SEQ ID NO: 139581 - DNA, 120 bp, Artificial Sequence
  ENSG00000103994_23 (sequence is synthesized)
ctgatctgtccagtctagaaggattccagtgggaaggtgtttccatttcctcgtcccctggcttggcaagaaagcgaagcctttctgagagcagcgtgatcatggacagagctccttctg

SEQ ID NO: 139582 - DNA, 120 bp, Artificial Sequence
  ENSG00000103994_24 (sequence is synthesized)
tgtatagcttcttcagtgaggaaggtacaggcaaagaaaatgagccccagcagatggtttcacctagtaactcattgagggctggacagagccagaaagcaaccatgcacctcaaacaag

SEQ ID NO: 139583 - DNA, 120 bp, Artificial Sequence
  ENSG00000103994_25 (sequence is synthesized)
aagtgacacctcgggctgcctccctccgaacaggtgaaagggctgaaaatgttgctacccaaaggcgacatagtgcacaattatcctctgaccatataatacctttgatgcatttggcaa

SEQ ID NO: 139584 - DNA, 120 bp, Artificial Sequence
  ENSG00000103994_26 (sequence is synthesized)
aagacttgaacagccaggagaggtctataccaccgtcagagaatcagaattcccaggagagtaatggagagggaaactgtctgtcatcaagcgcatcctcagcccttgcgatctccagtt

SEQ ID NO: 139585 - DNA, 120 bp, Artificial Sequence
  ENSG00000103994_27 (sequence is synthesized)
tagcggatgcagccacagatagtagctgtacctctggtgctgaacaaaatgatggccaaagtattagaaagaaacgaagagccactggagatggatcttctcctgaactcccaagtcttg

SEQ ID NO: 139586 - DNA, 120 bp, Artificial Sequence
  ENSG00000103994_28 (sequence is synthesized)
agagaaaaaataaaagaaggaaaattaaaggaaaaaaagaacgttctcaggttgaccagctgctgaatatttctttaagggaggaagaacttagtaagtcattgcagtgcatggataaca

SEQ ID NO: 139587 - DNA, 120 bp, Artificial Sequence
  ENSG00000103994_29 (sequence is synthesized)
atcttctgcaagcccgtgcagcccttcagacagcttatgtggaagttcagaggctacttatgctcaagcagcagataactatggagatgagtgcactgaggacccatagaatacagattc

SEQ ID NO: 139588 - DNA, 120 bp, Artificial Sequence
  ENSG00000103994_30 (sequence is synthesized)
cttctgagcacccagaccaggttccctgtagcctcacacgagaacgaaggaacagtagatctcaaacatccattgatgccgcactgctgcccactccctttttcccactttttctggagc

SEQ ID NO: 139589 - DNA, 120 bp, Artificial Sequence
  ENSG00000103994_31 (sequence is synthesized)
ctccatcttcccatgtgtctccatcacccaccggagcctctcttcaaataaccacgtctcctactttccaaacccatggcagtgtccctgctccagactcatcagttcagattaaacaag

SEQ ID NO: 139590 - DNA, 120 bp, Artificial Sequence
  ENSG00000103994_32 (sequence is synthesized)
agcccatgtctcctgaacaagatgagaatgtgaatgctgtgccaccaagctctgcctgcaatgtgtccaaggaattactggaagctaatagagagatcagtgacagttgtccagtttatc

SEQ ID NO: 139591 - DNA, 120 bp, Artificial Sequence
  ENSG00000103994_33 (sequence is synthesized)
cagtcatcactgctagattgtccttaccagagtcaacagaaagtttccatgagcctagccaagaactgaagttttctgtggagcaaagaaataccagaaacagagaaaactctccctctt

SEQ ID NO: 139592 - DNA, 120 bp, Artificial Sequence
  ENSG00000103994_34 (sequence is synthesized)
cccaatcagctggtctttctagcataaataaagaaggggaagagccaaccaaaggcaatagtgggtctgaagcctgtaccagttcttttctaagattgtcttttgcttcagaaacccctt

SEQ ID NO: 139593 - DNA, 120 bp, Artificial Sequence
  ENSG00000103994_35 (sequence is synthesized)
tggagaaggaaccccactctccagctgaccagcctgaacaacaggcagaatccactttgacatcagctgagactaggggaagcaagaaaaagaagaaactccggaagaagaaaagtctac

SEQ ID NO: 139594 - DNA, 120 bp, Artificial Sequence
  ENSG00000103994_36 (sequence is synthesized)
gggctgcccatgttcctgagaatagtgacactgaacaggatgttttgactgttaaacctgtaaggaaagtaaaagctggaaagttaattaaaggggggaaagtaacaacctccacttggg

SEQ ID NO: 139595 - DNA, 120 bp, Artificial Sequence
  ENSG00000103994_37 (sequence is synthesized)
aagacagcaggactggtcgggagcaggagagtgtcagagatgagccagatagtgactcgtctctggaagtcctagaaattcctaatcctcagttagaagtagtagccattgattcttcag

SEQ ID NO: 139596 - DNA, 120 bp, Artificial Sequence
  ENSG00000103994_38 (sequence is synthesized)
aatcaggagaagagaaaccagacagcccatctaaaaaggatatttggaactctacagagcaaaacccactagaaacgtctcgttctgggtgtgatgaagttagctctaccagtgaaattg

SEQ ID NO: 139597 - DNA, 120 bp, Artificial Sequence
  ENSG00000103994_39 (sequence is synthesized)
gcactcgctataaagatggcatccctgtaagtgtggcagaaactcagactgtgatctcctccataaaaggatcaaagaattcttcagaaatatcttcagagccaggagatgatgatgaac

SEQ ID NO: 139598 - DNA, 120 bp, Artificial Sequence
  ENSG00000103994_40 (sequence is synthesized)
ccacagaaggaagctttgagggacaccaagctgccgtaaatgcaattcagatatttgggaacttgctatatacctgttcagcagataaaactgttcgggtttataatctggtgagtcgga

SEQ ID NO: 139599 - DNA, 120 bp, Artificial Sequence
  ENSG00000103994_41 (sequence is synthesized)
aatgtattggtgtctttgagggtcatacctccaaagttaactgcctcctggttactcagacctccgggaagaatgctgccctttacaccgggtccagtgaccataccatccgctgctata

SEQ ID NO: 139600 - DNA, 120 bp, Artificial Sequence
  ENSG00000103994_42 (sequence is synthesized)
atgttaagagccgagagtgtgtggagcagttacagctggaagaccgggtcctctgcctccacagtagatggcgaatcctctatgcgggactggcaaatggcactgtggtcaccttcaaca

SEQ ID NO: 139601 - DNA, 120 bp, Artificial Sequence
  ENSG00000103994_43 (sequence is synthesized)
taaagaacaacaaacgacttgagatctttgaatgccatggccctcgggcagtcagctgtcttgctacagctcaggaaggtgcccgaaaactgctggtcgtggggtcttatgactgcacaa

SEQ ID NO: 139602 - DNA, 120 bp, Artificial Sequence
  ENSG00000103994_44 (sequence is synthesized)
ttagtgtacgcgatgcccggaatggactgctcctcagaactctggagggccatagcaaaaccattctttgcatgaaggtggtgaatgatctcgtgttcagtggctccagtgatcagtcag

SEQ ID NO: 139603 - DNA, 120 bp, Artificial Sequence
  ENSG00000103994_45 (sequence is synthesized)
tccatgctcacaacattcacactggtgagctcgtgcggatctataaaggtcacaatcatgcagtgactgtggtgaatatcctaggaaaagtgatggtgactgcttgcctggataaatttg

SEQ ID NO: 139604 - DNA, 120 bp, Artificial Sequence
  ENSG00000103994_46 (sequence is synthesized)
ttcgtgtctatgaattacagtctcatgatcgattacaagtttatggaggacacaaagacatgattatgtgtatgaccatccataaaagcatgatttacactggctgttatgatggcagta

SEQ ID NO: 139605 - DNA, 120 bp, Artificial Sequence
  ENSG00000103994_47 (sequence is synthesized)
ttcaggccgtgaggcttaatctgatgcagaattaccgctgttggtggcatggttgctctctgatatttggcgttgtagatcatttaaaacaacacttgctgaccgaccacactaatccca

SEQ ID NO: 139606 - DNA, 120 bp, Artificial Sequence
  ENSG00000103994_48 (sequence is synthesized)
acttccagactctgaaatgtcgctggaagaactgcgatgcttttttcactgctaggaaaggatccaaacaggatgctgcaggacatattgaacgacatgctgaagatgacagcaaaattg

SEQ ID NO: 139607 - DNA, 120 bp, Artificial Sequence
  ENSG00000103994_49 (sequence is synthesized)
attcatgaagttttttgcctcccacgttgggaagtcattagttgaactattttcacattggccccccacacaggccactctcttccctttcttggtgaagtaaggaaggagaaagtggtt

SEQ ID NO: 139608 - DNA, 120 bp, Artificial Sequence
  ENSG00000103994_50 (sequence is synthesized)
actagccaggcatacccctagcataagtctgggcagctctatgggatgataaattacacttttaagttcttgctggaggttttaaatagatttagacaaatgttaaggaaccatacttct

SEQ ID NO: 139609 - DNA, 120 bp, Artificial Sequence
  ENSG00000103994_51 (sequence is synthesized)
ctgggacagcatggcatatagtgatatatgctatttgcgttctccagatgtttattgaagatacagatcctaattggttacccagtttgaccctaatcatatgtatattttattgatttc

SEQ ID NO: 139610 - DNA, 120 bp, Artificial Sequence
  ENSG00000103994_52 (sequence is synthesized)
agtttgcaatttttaatttatgttcttatgatggtttaaacctatagtcaggcttttaagtacaagtttgtttaagtgccagactttgaggatcagttttaatttctccatttgtaatag

SEQ ID NO: 139611 - DNA, 120 bp, Artificial Sequence
  ENSG00000103994_53 (sequence is synthesized)
ctgggtatttaaactggaagcaaatagttttctttcttaacaattatgtgcagtgtgtgtcactgttttcttgctttatagatagagctggctttaagtgctaaaggacacagtagattt

SEQ ID NO: 139612 - DNA, 120 bp, Artificial Sequence
  ENSG00000103994_54 (sequence is synthesized)
ttgacaaacagtggctgctctgctgactatcttttaggaattcaggaagcaaatcacatagtgacaagtccttacagacaccacttctagtaaatctctgtaaatgtggatagaaagctc

SEQ ID NO: 139613 - DNA, 120 bp, Artificial Sequence
  ENSG00000103994_55 (sequence is synthesized)
agtgtgaggcagtgcgtagacctaacgtctacctttacatctgctgttgaacctgggcactacctgttacagatcctgtcaggctgttgaactggaggtgtacctttatcttcctttcta

SEQ ID NO: 139614 - DNA, 120 bp, Artificial Sequence
  ENSG00000103994_56 (sequence is synthesized)
gtgtctgaccctgcaagcctaatgttggtttgaacccttttggtttgttcagttgccagcctccatctctcccactgtatggccgtgcctagaccgatggcagccatcgaatattcctct

SEQ ID NO: 139615 - DNA, 120 bp, Artificial Sequence
  ENSG00000103994_57 (sequence is synthesized)
gggctcacggggtgttttccacccccctgcagcaactaagatggtgggggagagggggttagaataaagcatctgaatacagttttcaggacctcaagcagacttcctagagacttgttt

SEQ ID NO: 139616 - DNA, 120 bp, Artificial Sequence
  ENSG00000103994_58 (sequence is synthesized)
ctgagacagttctttgccttcacttccctgctagctgggaaagaagagtggagcagagactctgcctggccactgagaacagccaaattcacaaaccctcagtggggctttgtttttgga

SEQ ID NO: 139617 - DNA, 120 bp, Artificial Sequence
  ENSG00000103994_59 (sequence is synthesized)
gggctttgtttttggattttctccggactcatcagtaaacctgtagaagtgtcgctttccagccttttgtttctggatcctcaaaactcagaacgtggccgggcgtggtggctcacgcct

SEQ ID NO: 139618 - DNA, 120 bp, Artificial Sequence
  ENSG00000103994_60 (sequence is synthesized)
taaaattgggggaggagcccagggccacataccaagctttgggacatggtgcctcatgctctctgggattgcagaccatccaggtctgtcttcgcccctgttagtgcacatatatccact

SEQ ID NO: 139619 - DNA, 120 bp, Artificial Sequence
  ENSG00000103994_61 (sequence is synthesized)
cacatgtcttccctcaggctatcgggcagggggacttcaccagggggtttatggataggcttcaagagggtctgtgagcccccagaaattgtgtgtgagactgagtatgtgttctttttt

SEQ ID NO: 139620 - DNA, 120 bp, Artificial Sequence
  ENSG00000103994_62 (sequence is synthesized)
ttgtgtgtgagactgagtatgtgttcttttttccaggaaaggctccagtggttcttacttgatccaaaaaatgtcaagaattaatctaggaggccgggcctggtggctcacacctgtaat

SEQ ID NO: 139621 - DNA, 120 bp, Artificial Sequence
  ENSG00000103994_63 (sequence is synthesized)
attagcatgcttggtaggggggtgtaagtttcagctgagaaaattcatctgagaaacttttatacctagttcatcgtgctcatctcaaaataggatggaaattagaatttgccaatgtgt

SEQ ID NO: 139622 - DNA, 120 bp, Artificial Sequence
  ENSG00000103994_64 (sequence is synthesized)
ggtgtgctccagagcaacttctgcttgctctgagccccctgccctgcctcccctttcaccatgtttcctctgacaagattttaagtacagcaattcaagaagatttctcctcctaaacga

SEQ ID NO: 139623 - DNA, 120 bp, Artificial Sequence
  ENSG00000103994_65 (sequence is synthesized)
catttatctgaagtctattgcctcttgattgctggaaaagaatcttaaaatcatttcaaaagtaacttataaacaaacttattaaaagtgatgaaaggagcattgaaattaattagcact

SEQ ID NO: 139624 - DNA, 62 bp, Artificial Sequence
  ENSG00000103994_66 (sequence is synthesized)
actagttaatctaggagataatgaatggcctagtactagataatatatggccccacaagctc

SEQ ID NO: 139625 - DNA, 120 bp, Artificial Sequence
  ENSG00000103994_67 (sequence is synthesized)
gaatggcctagtactagataatatatggccccacaagctcttgacttctgtccttggggaaagccattttgttaaccacactagtgagatttacatgatgcttaatggagaacagagaag

SEQ ID NO: 139626 - DNA, 120 bp, Artificial Sequence
  ENSG00000103994_68 (sequence is synthesized)
atcttgttgcaaaaggtgtattaaatatttgtgctgtttctgtatgagattgagaagcttttcccacctctcacccctatttcctataaggatatccagagaagccaaactgttctgtgg

SEQ ID NO: 139627 - DNA, 120 bp, Artificial Sequence
  ENSG00000103994_69 (sequence is synthesized)
gtttgggaatggtcatttcccgggaaaatgcatctggatcgatgactaaacctggcccttttctctgggctgtagtgaagccgcattttcacgctggctggcagtgtgctgagagcctcg

SEQ ID NO: 139628 - DNA, 120 bp, Artificial Sequence
  ENSG00000103994_70 (sequence is synthesized)
aatgctctgcggcgtagtgcccttctgccctgcctgacgatgtatcgaaaagatgagagtgaaggagactttgtgcagcaggaaacgggtaggtgaggtgttgggcagttgtgggaactt

SEQ ID NO: 139629 - DNA, 120 bp, Artificial Sequence
  ENSG00000103994_71 (sequence is synthesized)
ctgagagtattacagagtggtagaatcggtaagaactctgatttggacttcgctttggtggaactgtgtgcctatacctgcctgtgtgtgtgcaagtgtgcaggttcctttgtatgtatg

SEQ ID NO: 139630 - DNA, 120 bp, Artificial Sequence
  ENSG00000103994_72 (sequence is synthesized)
tgtacgtgtgggaacctgtgtttgtcatatttttcttcatttcacaaaggctttttttgaagcagtggcagtatgcctttgtttcaagaacacatgaaattcttttaacaccagattagt

SEQ ID NO: 139631 - DNA, 120 bp, Artificial Sequence
  ENSG00000103994_73 (sequence is synthesized)
gtgttaccccaaatgaacggttctagccctctattaagaaataaagggaccataagcattttggctgcttatggctgtgtgttactacttacaagagtcttgaaaattatacagaacttt

SEQ ID NO: 139632 - DNA, 120 bp, Artificial Sequence
  ENSG00000103994_74 (sequence is synthesized)
gccttctttttttaatgtcttccacaatgttgtgactgattataaccctgtttcccctcagagaagagctatggctcagggatctgtgttgactctggcatttagtggctttgtgaagga

SEQ ID NO: 139633 - DNA, 120 bp, Artificial Sequence
  ENSG00000103994_75 (sequence is synthesized)
aagaaaccattaaatgacctgacaaaaactgactcatgtctttaaagtagttgaagccacttttagaatgttactctcggttgcttttgtctaattctaatggcttaaagccaagaaaac

SEQ ID NO: 139634 - DNA, 120 bp, Artificial Sequence
  ENSG00000103994_76 (sequence is synthesized)
catagtataaatctttttgtgtacctatgctagtgtttaaatggcagttcgttgtgataaagtatcagtcacttcaagttttctgtgaaagtttttaattaggttaaaaataattttggc

SEQ ID NO: 139635 - DNA, 120 bp, Artificial Sequence
  ENSG00000103994_77 (sequence is synthesized)
atacgtctctactcagtttataaagcagttccacaccatgcaaacaaaactctaacagcaaaggttatcttgacctgatgttacttgaatctgagagaaagtcattacttactactgcac

SEQ ID NO: 139636 - DNA, 120 bp, Artificial Sequence
  ENSG00000103994_78 (sequence is synthesized)
tcctgcttttgtgggaaaaattttcttcttccccagaagagttaacagttgagtgttcagctcctgacttacctttaatttagaggcaatattattactgtttaagtgattatttgctta

SEQ ID NO: 139637 - DNA, 120 bp, Artificial Sequence
  ENSG00000103994_79 (sequence is synthesized)
acacaggttttattttgtctttttgctggtagattatacaagggacaactttagtgatgaggcatgtggatgatttggtgggagtaggtatatacttagtggaatggtttattttatgga

SEQ ID NO: 139638 - DNA, 120 bp, Artificial Sequence
  ENSG00000103994_80 (sequence is synthesized)
agagaattcattggaggtgagattgaagtatattgtgaagtgggatttgaacagcacatatgctctggtttgctcaaataactgcagtttatgcttacatctaaattttgtttctgttac

SEQ ID NO: 139639 - DNA, 120 bp, Artificial Sequence
  ENSG00000103994_81 (sequence is synthesized)
ctaaacgggagcttctagaattacgaaggccatacctgccacatttataaaataatggttttatccctgcccccaaatcatcaggttcctcgggtttaagagaagtggtctaatagacag

SEQ ID NO: 139640 - DNA, 120 bp, Artificial Sequence
  ENSG00000103994_82 (sequence is synthesized)
gaatagaagttgtggtggaggtgatttgggatagactaggtttccttatgcaagtggatatgagctcctcatagaaaccagacctactgtattagacagtaacctctaacctcacctcca

SEQ ID NO: 139641 - DNA, 120 bp, Artificial Sequence
  ENSG00000103994_83 (sequence is synthesized)
agcccaagtatatggccctgctgggttacctggtgactacatttcccagattcactctaaattcaaggtagtgacccaaataaattgggaaaggagggggtcaaggaggaaaagctgttg

SEQ ID NO: 139642 - DNA, 120 bp, Artificial Sequence
  ENSG00000103994_84 (sequence is synthesized)
aaaatctttctcctatttaagagaaatatatgccctagagctgctccagcacccttggtttctgatttttttaatattgaatatggattagaagaatgaaatcagatgacacctgactgc

SEQ ID NO: 139643 - DNA, 120 bp, Artificial Sequence
  ENSG00000103994_85 (sequence is synthesized)
aaaaatgtttataagcaaatagccttcttacattttggtataaagctgtgaacttcgtaactttgtaaagcaagatataaagcaaatacaagaggaaaataaagtacttttactaattga

SEQ ID NO: 139644 - DNA, 120 bp, Artificial Sequence
  ENSG00000103994_86 (sequence is synthesized)
gtgtccaaggaattactggaagctaatagtatgtaagcttttctctgggttaagggcatcccagtagtgagactggggcatttttatatgagtgatataagccatacttgctcattaaaa

SEQ ID NO: 139645 - DNA, 120 bp, Artificial Sequence
  ENSG00000103994_87 (sequence is synthesized)
ctaaaatgagcaagtacaactaatttgtcactggaattctcttcatatatacaggaggattcttttaaaatattttagagaatgtaatttaaatatcagtcattttctttcatttcctct

SEQ ID NO: 139646 - DNA, 120 bp, Artificial Sequence
  ENSG00000103994_88 (sequence is synthesized)
aatctagggttagagttgactttgtattagcacccacaaggttccatttattaggataagtacaaaatttgtttcgtgtgaaataaatggggttgaagttaattcagccaattttctgaa

SEQ ID NO: 139647 - DNA, 120 bp, Artificial Sequence
  ENSG00000103994_89 (sequence is synthesized)
acaaatagaagggttttgaggccaggcgaggtggctcacgtctgtagtcccagcactttgggagggtgaggcagggggatcgcttgagctcagaagttcgagaccagccagggcaacatg

SEQ ID NO: 139648 - DNA, 120 bp, Artificial Sequence
  ENSG00000103994_90 (sequence is synthesized)
gcaaaactcgatctctacaaaaaaatacaaaaattagcgggatgttgtggtgtgcacctgtactacttatgaggctgaggtgggagaatcacttgagcaccaaagatcgaggctgcagtg

SEQ ID NO: 139649 - DNA, 120 bp, Artificial Sequence
  ENSG00000103994_91 (sequence is synthesized)
agccatgattgtgccactgtactctagcatgggcaacagagtgagaccttgactcaagcaaagcaaaacaaaacaaagaagggttttaaatggcatttcccgtgttgtctcatgcatcat

SEQ ID NO: 139650 - DNA, 120 bp, Artificial Sequence
  ENSG00000103994_92 (sequence is synthesized)
ggaaagagcaaggagattgcaaaccttttctttacaccaacatcaccaagtgatgcactttcatttgagaaacaatgagtgtattttgttatactgtgggtatactcgaatgcccttcta

SEQ ID NO: 139651 - DNA, 120 bp, Artificial Sequence
  ENSG00000103994_93 (sequence is synthesized)
atctttgagagtaagattaaggcatcttattgagaagtttgagatatccgtggcttttagcaacttgagactgtcatcctagctgtgacgttgagtgcttcagatctggtcactatggta

SEQ ID NO: 139652 - DNA, 120 bp, Artificial Sequence
  ENSG00000103995_0 (sequence is synthesized)
tcgcggtaacagcctccgtggcctccggaggaccatgtcattagactttggcagtgtggcactaccagtgcaaaatgaagatgaagagtatgacgaagaggactatgaaagagagaaaga

SEQ ID NO: 139653 - DNA, 120 bp, Artificial Sequence
  ENSG00000103995_1 (sequence is synthesized)
gttgcagcagttactcacagaccttccccatgacatgctggatgacgacctctcctctccagagctccagtattcggactgcagcgaggatggcacagacggacaaccacatcatcctga

SEQ ID NO: 139654 - DNA, 120 bp, Artificial Sequence
  ENSG00000103995_2 (sequence is synthesized)
gcaattggagatgagctggaatgagcaaatgctgcccaaatctcaaagtgtaaatggctataatgaaattcagagtttatatgctggagaaaaatgtggtaatgtctgggaagaaaatag

SEQ ID NO: 139655 - DNA, 120 bp, Artificial Sequence
  ENSG00000103995_3 (sequence is synthesized)
aagtaaaactgaagaccgacatcctgtgtaccatcctgaagaaggtggagatgaaggtggaagtggttatagtcctccaagtaaatgtgaacagactgatttatatcaccttcctgaaaa

SEQ ID NO: 139656 - DNA, 120 bp, Artificial Sequence
  ENSG00000103995_4 (sequence is synthesized)
ctttaggccatataccaatggtcagaagcaggaatttaataaccaagcaaccaatgtaattaaattttcagatcctcaatggaaccattttcagggtcccagttgtcaaggtttggaacc

SEQ ID NO: 139657 - DNA, 120 bp, Artificial Sequence
  ENSG00000103995_5 (sequence is synthesized)
gtataataaagtgacatataaaccttatcagtcttctgcccagaataatggctcaccagcccaggagataacaggaagtgacacattcgaaggcctgcaacaacaatttttaggagctaa

SEQ ID NO: 139658 - DNA, 120 bp, Artificial Sequence
  ENSG00000103995_6 (sequence is synthesized)
tgagaactctgcagaaaatatgcagattattcaacttcaggttcttaacaaagcaaaagagagacaactggagaacttaattgaaaagttaaatgaaagtgaacgtcaaattcgatatct

SEQ ID NO: 139659 - DNA, 120 bp, Artificial Sequence
  ENSG00000103995_7 (sequence is synthesized)
gaatcaccagcttgtaataataaaagatgaaaaggatggtttgactctcagccttcgagaatcacagaaactctttcagaatggaaaagaaagagagatacagcttgaagctcaaataaa

SEQ ID NO: 139660 - DNA, 120 bp, Artificial Sequence
  ENSG00000103995_8 (sequence is synthesized)
agcactggagactcagatacaagcattaaaagtcaatgaagaacagatgatcaagaagtccagaacaactgaaatggctctggaaagcttgaagcagcagctggtggaccttcatcattc

SEQ ID NO: 139661 - DNA, 120 bp, Artificial Sequence
  ENSG00000103995_9 (sequence is synthesized)
tgaatcacttcaacgagctagagaacagcatgagagcattgttatgggcctcacaaagaagtacgaagagcaagtattgtccttacaaaagaatttggatgccacagtcaccgcacttaa

SEQ ID NO: 139662 - DNA, 120 bp, Artificial Sequence
  ENSG00000103995_10 (sequence is synthesized)
agaacaggaagacatttgctctcgtctgaaagatcacgtgaaacaactggaaaggaatcaagaagcaatcaagttagaaaagactgagatcattaataagttgacaagaagtctagagga

SEQ ID NO: 139663 - DNA, 120 bp, Artificial Sequence
  ENSG00000103995_11 (sequence is synthesized)
gagtcaaaagcagtgtgcccacttgttgcagtccgggtcagtacaagaggtggctcagctacagttccagctgcagcaagcacagaaggcacatgctatgagtgcaaacatgaacaaggc

SEQ ID NO: 139664 - DNA, 120 bp, Artificial Sequence
  ENSG00000103995_12 (sequence is synthesized)
tttgcaagaagaattaacagaactaaaagatgaaatttctctctatgaatctgctgcaaaactaggaatacatccaagtgactcagaaggagaattaaatatagaactcactgaatcgta

SEQ ID NO: 139665 - DNA, 120 bp, Artificial Sequence
  ENSG00000103995_13 (sequence is synthesized)
tgtggatttgggtattaaaaaggtcaactggaaaaaatccaaagttaccagcattgtacaagaagaagacccaaatgaagagctttcaaaagatgagttcattctgaagttaaaggcaga

SEQ ID NO: 139666 - DNA, 120 bp, Artificial Sequence
  ENSG00000103995_14 (sequence is synthesized)
agtacagcgtttgctgggtagcaactcaatgaagcgtcatctggtgtctcagttacaaaatgacctcaaagactgtcataagaaaattgaagatctccaccaagtgaagaaggatgaaaa

SEQ ID NO: 139667 - DNA, 120 bp, Artificial Sequence
  ENSG00000103995_15 (sequence is synthesized)
aagcattgaggttgagactaaaacagatacctcagaaaaaccaaagaatcaattatggcctgagtcttctacttctgatgttgtcagagatgatattctgctgcttaaaaatgaaattca

SEQ ID NO: 139668 - DNA, 120 bp, Artificial Sequence
  ENSG00000103995_16 (sequence is synthesized)
agttttacaacaacaaaatcaggaacttaaagaaactgaaggaaaactgagaaatacaaatcaagacttatgtaatcaaatgagacaaatggtacaagattttgaccatgacaaacaaga

SEQ ID NO: 139669 - DNA, 120 bp, Artificial Sequence
  ENSG00000103995_17 (sequence is synthesized)
agctgtggataggtgtgaaaggacttatcagcagcaccatgaagccatgaaaactcaaatacgtgaaagcctattagcaaagcatgctttggagaagcagcagctctttgaggcttatga

SEQ ID NO: 139670 - DNA, 120 bp, Artificial Sequence
  ENSG00000103995_18 (sequence is synthesized)
gagaactcatttgcaactgaggtctgagttggataagttgaataaggaggtgactgctgtgcaggaatgttacctagaagtgtgcagagagaaggataatctagaattgactctcaggaa

SEQ ID NO: 139671 - DNA, 120 bp, Artificial Sequence
  ENSG00000103995_19 (sequence is synthesized)
gaccactgaaaaggagcaacagactcaggagaagatcaaagaaaaactcattcaacagcttgaaaaggagtggcagtctaagctggatcaaactataaaggcaatgaaaaagaagacctt

SEQ ID NO: 139672 - DNA, 120 bp, Artificial Sequence
  ENSG00000103995_20 (sequence is synthesized)
agattgtggcagccaaactgaccaagtaaccaccagtgatgttatttccaagaaagagatggcaattatgatagaagagcagaagtgcacaatccagcaaaacttagaacaagagaagga

SEQ ID NO: 139673 - DNA, 120 bp, Artificial Sequence
  ENSG00000103995_21 (sequence is synthesized)
tgaaaatattaccaaacaggtagaaatagctgtgcaaaatgctcatcagcgatggctgggagaactaccagagctggcagagtatcaagcacttgtgaaggcagaacagaaaaagtggga

SEQ ID NO: 139674 - DNA, 120 bp, Artificial Sequence
  ENSG00000103995_22 (sequence is synthesized)
agaacagcatgaggtctctgtgaacaaaaggatatcatttgctgtttctgaagctaaagagaaatggaagagtgagcttgaaaatatgaggaaaaatatacttcctggaaaggaattgga

SEQ ID NO: 139675 - DNA, 120 bp, Artificial Sequence
  ENSG00000103995_23 (sequence is synthesized)
agagaagattcattctcttcagaaggaacttgagttaaagaacgaagaagtccctgtggtcatcagggctgagttagctaaggctcggagtgaatggaacaaagaaaagcaagaagaaat

SEQ ID NO: 139676 - DNA, 120 bp, Artificial Sequence
  ENSG00000103995_24 (sequence is synthesized)
ccacagaatccaagaacaaaatgagcaagattaccggcaatttttagatgatcaccgaaataaaattaatgaggtgcttgcggcagctaaagaagactttatgaaacaaaaaactgaact

SEQ ID NO: 139677 - DNA, 120 bp, Artificial Sequence
  ENSG00000103995_25 (sequence is synthesized)
acttcttcagaaggagacagaattacaaacttgtctagaccagagtcgtagagaatggactatgcaggaagccaagcggatccaactggaaatctatcagtatgaggaagacatcctgac

SEQ ID NO: 139678 - DNA, 120 bp, Artificial Sequence
  ENSG00000103995_26 (sequence is synthesized)
tgtacttggggttcttttaagtgatacccaaaaggagcacatcagtgattctgaggacaagcagcttttggaaatcatgtcgacttgttcttcaaaatggatgtctgtgcaatattttga

SEQ ID NO: 139679 - DNA, 120 bp, Artificial Sequence
  ENSG00000103995_27 (sequence is synthesized)
aaaactaaagggctgcatacagaaagcatttcaagatacacttcctctgcttgtagaaaacgctgacccagaatggaaaaagagaaatatggccgagctctctaaggattctgccagcca

SEQ ID NO: 139680 - DNA, 120 bp, Artificial Sequence
  ENSG00000103995_28 (sequence is synthesized)
gggcactggccaaggagaccctggacctgctgctggacaccatgctcagcccttggccttacaagcaacagaagcagaagctgaagagaataataaagttgttgaagaattaatagaaga

SEQ ID NO: 139681 - DNA, 120 bp, Artificial Sequence
  ENSG00000103995_29 (sequence is synthesized)
aaacaacgacatgaagaataaattggaagaattgcaaacactttgtaaaacaccaccaaggtcattgtcagcaggggccattgaaaatgcttgcctgccatgcagtgggggagccttgga

SEQ ID NO: 139682 - DNA, 120 bp, Artificial Sequence
  ENSG00000103995_30 (sequence is synthesized)
agaacttcgtgggcagtacattaaagctgtaaaaaaaattaaatgtgacatgcttcgttatattcaggagagtaaggaacgagctgcagaaatggtaaaagcagaggtactgcgagaacg

SEQ ID NO: 139683 - DNA, 120 bp, Artificial Sequence
  ENSG00000103995_31 (sequence is synthesized)
tcaagaaaccgcccgaaagatgcgcaaatattatttgatttgcctccaacagattttgcaggatgatggaaaagaaggggctgagaaaaagattatgaatgctgctagcaaacttgctac

SEQ ID NO: 139684 - DNA, 120 bp, Artificial Sequence
  ENSG00000103995_32 (sequence is synthesized)
aatggcaaaattactggaaacacctatttctagtaagtcccaaagcaaaactacacagtcagcactgcccctaacttcagagatgctgattgcagttaaaaaatcaaaaagaaatgatgt

SEQ ID NO: 139685 - DNA, 120 bp, Artificial Sequence
  ENSG00000103995_33 (sequence is synthesized)
gaatcagaaaataccatgttgtattgaaagcaaatcaaatagtgtaaacaccatcaccagaactctgtgcgaacaagctcccaagaggagggcagcttgtaacttacaaaggctgttaga

SEQ ID NO: 139686 - DNA, 120 bp, Artificial Sequence
  ENSG00000103995_34 (sequence is synthesized)
gaactcagagcatcagagcataaagcatgtgggatccaaagagacacatttggaattccagtttggggatggtagttgcaagcacctaaacagtttgccaaggaatgtttctcctgagtt

SEQ ID NO: 139687 - DNA, 120 bp, Artificial Sequence
  ENSG00000103995_35 (sequence is synthesized)
tgttccttgtgaaggtgaaggaggctttggtttgcacaagaagaaagacctactcagtgataatggttctgaatcacttccgcattcagctgcatacccctttcttggaaccttaggaaa

SEQ ID NO: 139688 - DNA, 120 bp, Artificial Sequence
  ENSG00000103995_36 (sequence is synthesized)
taaaccctcacctagatgtacccctggtccttctgaatcaggatgcatgcatataacctttcgcgattctaatgaaagacttggtttaaaagtatataaatgcaatccactaatggaaag

SEQ ID NO: 139689 - DNA, 120 bp, Artificial Sequence
  ENSG00000103995_37 (sequence is synthesized)
tgaaaatgctgcatctgagaaaagtcaaggtttggatgttcaggaacctccagtaaaagatggaggggaccttagtgactgcttgggctggccttccagcagtgcaaccttatcctttga

SEQ ID NO: 139690 - DNA, 120 bp, Artificial Sequence
  ENSG00000103995_38 (sequence is synthesized)
cagtcgtgaagcatcatttgtacatggtaggccacaaggaactttggaaataccaagtgaatctgttaaatccaaacagttttcaccatccggttatctttcagatacagaggaaagtaa

SEQ ID NO: 139691 - DNA, 120 bp, Artificial Sequence
  ENSG00000103995_39 (sequence is synthesized)
tatgatttgtcaaacaatgaaatgtcagcgttatcaaactccatacctgtcagaagaaaccacgtatttggagccaggaaagatcagtgtgaattgtggacacccatctcgtcataaggc

SEQ ID NO: 139692 - DNA, 120 bp, Artificial Sequence
  ENSG00000103995_40 (sequence is synthesized)
tgatagattaaagtcagatttcaaaaaactgagcagtacattaccatcttcagtgtgtcagcagccttcaagaaaattaattgttccgctatctagccaacaagatagtggctttgatag

SEQ ID NO: 139693 - DNA, 120 bp, Artificial Sequence
  ENSG00000103995_41 (sequence is synthesized)
cccatttgttaatctagactaattatggtacagtatttaagaagaatcattaatatattaacaaaaatggaagggaagacctcatactgaaaaaaattgtgagccctgcctcttttgaga

SEQ ID NO: 139694 - DNA, 120 bp, Artificial Sequence
  ENSG00000103995_42 (sequence is synthesized)
actgcttccaagaacttgaaaaggcaaagcaggaatgtcaagatctgaaaggaaaactggagaaatgctgtaggcatcttcagcatttagaaaggaagcacaaagctgtagtggaaaaaa

SEQ ID NO: 139695 - DNA, 120 bp, Artificial Sequence
  ENSG00000103995_43 (sequence is synthesized)
tcgccaaatggtttttctatcttttcttctttagctatttaatattttcagtatgaagaaggcagggaaggtaaggagtgagagttaatttgtgaagttttgtatgttttacttaaacta

SEQ ID NO: 139696 - DNA, 120 bp, Artificial Sequence
  ENSG00000103995_44 (sequence is synthesized)
gaagtttacgcaaaaagagtacacagtttccaatttaagtaggcagactgagcatgcccatcagtttcctattgctgcttccatccctcgaaatgatagaaaagattttaaacagcaaat

SEQ ID NO: 139697 - DNA, 120 bp, Artificial Sequence
  ENSG00000103995_45 (sequence is synthesized)
cgaaatgatagaaaagattttaaacagcaaataaagaatgagaaaaagaagaaattataagtgggttttaaaaagttgcagtgggccaggcatcatggctcacacctgtaatcccagcac

SEQ ID NO: 139698 - DNA, 67 bp, Artificial Sequence
  ENSG00000103995_46 (sequence is synthesized)
tggtttgcagtggatagaccagaagctacaagaaatccctgagagaaagaagacagtataggatgga

SEQ ID NO: 139699 - DNA, 120 bp, Artificial Sequence
  ENSG00000103995_47 (sequence is synthesized)
acaagaaatccctgagagaaagaagacagtataggatggaagatggaaacctcagttcaaaaccaccgggagatgactattgcaattaggagcaatatcaaaactgttccacatatgagg

SEQ ID NO: 139700 - DNA, 120 bp, Artificial Sequence
  ENSG00000103995_48 (sequence is synthesized)
gtgatatgttccaggagaaatagagggcctaggggatatgaatggggtaattagttggtgttctaaaccaacagcaaccaggtggggttaatcctctctttatttcttcttctcccctcc

SEQ ID NO: 139701 - DNA, 120 bp, Artificial Sequence
  ENSG00000103995_49 (sequence is synthesized)
tttccccaacctcaatattgagctgggcaacaacaacaggaacaaagaatctgggagcagggcagtgctccaggtggctagccatatcaagcaggaactgggagccgacttgccttggga

SEQ ID NO: 139702 - DNA, 120 bp, Artificial Sequence
  ENSG00000103995_50 (sequence is synthesized)
aaaaaaaaaagtaagagtaaccaacaaaaacatagaacgtataactttaaaactggtaaaggaaaaacttggaaaaaaacattttcaatctaacaaaatcaggaaagaggaaaaaaacct

SEQ ID NO: 139703 - DNA, 120 bp, Artificial Sequence
  ENSG00000103995_51 (sequence is synthesized)
atgtataatctgcttttgtgtggtgcttatttttggtttctaaaccatctatttttatacttataaattgactcactctgcagtgttaacttatttaaataaacttgcatatggtctgta

SEQ ID NO: 139704 - DNA, 120 bp, Artificial Sequence
  ENSG00000103995_52 (sequence is synthesized)
gcccaccgggcgagcttctagtcggcgattgaaggatgcgagtgctccttaagggcctccgccccgtgagttcggttgtgactaggaaggagctagtggactagagccagggtaagggga

SEQ ID NO: 139705 - DNA, 120 bp, Artificial Sequence
  ENSG00000103995_53 (sequence is synthesized)
agccccgggcatcctgggccccgtgcggctttggtcatgtttgtagtgccgtagctgacgccaaacagttcctcaaggtcattcgctcagcctgtggatgcttattgtgtattagcatta

SEQ ID NO: 139706 - DNA, 120 bp, Artificial Sequence
  ENSG00000103995_54 (sequence is synthesized)
ctcgctccgccctctgggcaacttgaatcaatttgtccaaagtgctgttattagcactgatcacaagatgttgtgatcatttgtttatatgtctattttctttcccttcatcgtgtcctg

SEQ ID NO: 139707 - DNA, 120 bp, Artificial Sequence
  ENSG00000103995_55 (sequence is synthesized)
ttctataagtctttttcttttgatgaagattaataattacatgattataaaattgtaaattgattcttaaaattttgggtgaagattggaaggaaaaaggttaaaatcttggggttcttt

SEQ ID NO: 139708 - DNA, 120 bp, Artificial Sequence
  ENSG00000103995_56 (sequence is synthesized)
gtgttatctatgtacaaataaatgatacgctttaaatcgaaagtattcctttttctcgagaccacatcatcctgagcaattggagatgagctggaatgagcaaatgctgcccaaatctca

SEQ ID NO: 139709 - DNA, 120 bp, Artificial Sequence
  ENSG00000103995_57 (sequence is synthesized)
ttactggaaacacctatttctagtgaagaagctaagtctcagaaagataactcacccaagaggacacaaggataaacctgatacccatggcagtagaaagcctacacttacccactcaga

SEQ ID NO: 139710 - DNA, 77 bp, Artificial Sequence
  ENSG00000103995_58 (sequence is synthesized)
cctgtaatcccagcactttgggaggctaacgtgggcaaatcacttgagcccaggagttcccaatacaaaaattaggt

SEQ ID NO: 139711 - DNA, 120 bp, Artificial Sequence
  ENSG00000103995_59 (sequence is synthesized)
actggggccatcacggcatcagcagattccgtgcctgatagccacatccatcatgctgcgcaaaatcctctttcactcccctcagatgatcaagaagtccagaacaactgaaatggctct

SEQ ID NO: 139712 - DNA, 120 bp, Artificial Sequence
  ENSG00000103995_60 (sequence is synthesized)
atttcttcccttcatattctagccactctggactccccaaattctgaattctttctctgaaactcagtgagattactgggctctgtttgggtttcacctccctgtgctatggcctggaca

SEQ ID NO: 139713 - DNA, 120 bp, Artificial Sequence
  ENSG00000103995_61 (sequence is synthesized)
ctctccaggcagaaagctggggtaatcttagagctcaccttgtttgctttccttttctcaggaatccctggcctgtgctgcctgttgtctagtgattgaaaactattattttatttgctt

SEQ ID NO: 139714 - DNA, 120 bp, Artificial Sequence
  ENSG00000104043_0 (sequence is synthesized)
gcttttctccttggcatggtcacggaatggatacctgtttgatcttcctgcactgctgagaaatcttccttttgggggagaggattaagtctgggttgaggtaggccacctgttgagacc

SEQ ID NO: 139715 - DNA, 120 bp, Artificial Sequence
  ENSG00000104043_1 (sequence is synthesized)
tggtgaaagatcaggtataataatgttctgcagtgaaaagaaattgcgtgaagtggaacggatagtgaaagccaatgaccgtgaatataatgaaaagttccagtatgcggataatcgtat

SEQ ID NO: 139716 - DNA, 120 bp, Artificial Sequence
  ENSG00000104043_2 (sequence is synthesized)
ccacacatcgaaatataatattctcaccttcttgccaattaatttatttgaacagttccaaagagtggcaaatgcctattttctttgccttctgattttacagctaattccagaaatttc

SEQ ID NO: 139717 - DNA, 120 bp, Artificial Sequence
  ENSG00000104043_3 (sequence is synthesized)
ctccttgacctggtttaccaccattgtgcctttggtcctggtgataactatgacagctgtcaaagatgccacagatgactattttcgccacaagagtgataatcaagtgaataatcggca

SEQ ID NO: 139718 - DNA, 120 bp, Artificial Sequence
  ENSG00000104043_4 (sequence is synthesized)
gtctgaagtgctcatcaacagcaaactgcagaatgaaaaatggatgaatgtcaaagtgggagacatcattaaattagaaaataaccaatttgttgctgctgatttacttctcctatcaag

SEQ ID NO: 139719 - DNA, 120 bp, Artificial Sequence
  ENSG00000104043_5 (sequence is synthesized)
tagtgagccacatggtctctgttatgttgaaactgctgagcttgatggggaaacgaacctaaaagtccgccatgcactatcagttacttcagaacttggagcagatatcagcagacttgc

SEQ ID NO: 139720 - DNA, 120 bp, Artificial Sequence
  ENSG00000104043_6 (sequence is synthesized)
agggtttgatgggattgttgtctgtgaggtgcctaacaacaagttagataaattcatgggaatcctttcttggaaagacagcaagcattccctcaacaatgagaagataatcctgagagg

SEQ ID NO: 139721 - DNA, 120 bp, Artificial Sequence
  ENSG00000104043_7 (sequence is synthesized)
ctgcatcctgagaaataccagctggtgttttggaatggttatttttgcaggtcctgacactaaactaatgcagaatagtggtaagacaaagtttaaaaggacaagcattgatagattgat

SEQ ID NO: 139722 - DNA, 120 bp, Artificial Sequence
  ENSG00000104043_8 (sequence is synthesized)
gaatactctagtactatggatttttgggtttctgatatgcttgggaattattcttgcaataggaaattcaatctgggagagtcaaactggggaccaattcagaactttcctcttttggaa

SEQ ID NO: 139723 - DNA, 120 bp, Artificial Sequence
  ENSG00000104043_9 (sequence is synthesized)
tgaaggagagaagagctctgtgttctccggattcttaacattctggtcatatattattattctcaatacagttgtacccatttccttatatgtgagtgtggaagtaattcgtctaggaca

SEQ ID NO: 139724 - DNA, 120 bp, Artificial Sequence
  ENSG00000104043_10 (sequence is synthesized)
cagttattttataaactgggaccggaagatgtattattctcgaaaagcaatacctgcagtggctcgaacgaccacgctcaatgaggaactggggcagattgagtacattttctccgacaa

SEQ ID NO: 139725 - DNA, 120 bp, Artificial Sequence
  ENSG00000104043_11 (sequence is synthesized)
aacgggtaccctcactcaaaacatcatgacctttaaaagatgttccattaatgggagaatctatggtgaagtacatgatgacctggatcagaagacagaaataactcaggaaaaagagcc

SEQ ID NO: 139726 - DNA, 120 bp, Artificial Sequence
  ENSG00000104043_12 (sequence is synthesized)
tgtggatttctcagtcaaatctcaagcggatagagaatttcagttctttgaccaccatctgatggaatccattaaaatgggtgatcccaaagttcatgaattccttaggttacttgctct

SEQ ID NO: 139727 - DNA, 120 bp, Artificial Sequence
  ENSG00000104043_13 (sequence is synthesized)
ctgccacactgtaatgtcagaagagaatagcgcaggagagctgatttaccaagttcagtcacctgatgaaggggctctagtgactgccgctagaaattttgggttcatttttaaatcccg

SEQ ID NO: 139728 - DNA, 120 bp, Artificial Sequence
  ENSG00000104043_14 (sequence is synthesized)
gaccccagagaccataacaatagaagaattgggaacactagttacttatcaattacttgcctttttggatttcaacaacaccagaaaaaggatgtctgtcatagttcgaaacccagaagg

SEQ ID NO: 139729 - DNA, 120 bp, Artificial Sequence
  ENSG00000104043_15 (sequence is synthesized)
acagataaagctttattccaaaggagcagatactattctgtttgaaaaacttcatccttccaatgaagtccttttgtctttgacgtcagaccacctcagtgaatttgcaggggaaggcct

SEQ ID NO: 139730 - DNA, 120 bp, Artificial Sequence
  ENSG00000104043_16 (sequence is synthesized)
tcggaccttggccatcgcatacagagacctggatgacaagtactttaaagagtggcataagatgcttgaagatgcgaatgctgccacagaagagagggatgaacgaatagctgggctata

SEQ ID NO: 139731 - DNA, 120 bp, Artificial Sequence
  ENSG00000104043_17 (sequence is synthesized)
tgaagaaattgaaagagatttgatgctactaggtgccactgctgtagaagataagttacaggagggtgttattgaaacagttacaagtttatcactagccaatattaagatctgggtcct

SEQ ID NO: 139732 - DNA, 120 bp, Artificial Sequence
  ENSG00000104043_18 (sequence is synthesized)
aacaggagacaaacaagaaactgccatcaacatcggttatgcctgcaacatgctgactgacgacatgaatgatgtgtttgtgatagcagggaataatgctgtggaagtgagagaagaact

SEQ ID NO: 139733 - DNA, 120 bp, Artificial Sequence
  ENSG00000104043_19 (sequence is synthesized)
caggaaagcaaaacaaaatttgtttggacaaaacagaaatttttccaatggccatgtagtttgtgaaaaaaagcagcagctggagttggattctattgtagaagaaaccataacaggaga

SEQ ID NO: 139734 - DNA, 120 bp, Artificial Sequence
  ENSG00000104043_20 (sequence is synthesized)
ttatgccttaatcataaatggccacagtttggctcatgccctagaaagtgatgtcaagaatgatctcctagaacttgcttgcatgtgtaagactgtaatttgctgcagggtcactccact

SEQ ID NO: 139735 - DNA, 120 bp, Artificial Sequence
  ENSG00000104043_21 (sequence is synthesized)
ccagaaagcccaagtggtagagctggtgaagaagtacagaaatgctgttactttggccattggtgatggagccaatgatgtcagcatgattaaaagtgctcacattggtgttggcatcag

SEQ ID NO: 139736 - DNA, 120 bp, Artificial Sequence
  ENSG00000104043_22 (sequence is synthesized)
cggccaggaaggattgcaagcagtcttagccagcgactattcatttgcacagtttagatatctccaaaggcttctccttgttcatggaaggtggtcttatttccgaatgtgcaaattctt

SEQ ID NO: 139737 - DNA, 120 bp, Artificial Sequence
  ENSG00000104043_23 (sequence is synthesized)
tgtgcatttctggtttggtttcttctgtggtttctcagcccagactgtttatgaccagtggttcatcaccctttttaacattgtttacacatcactgcctgttttagccatggggatttt

SEQ ID NO: 139738 - DNA, 120 bp, Artificial Sequence
  ENSG00000104043_24 (sequence is synthesized)
tgaccaggatgtgagtgaccagaacagcgtggactgtccccagctctacaaaccaggacagctgaatctgctttttaacaagcgtaaatttttcatttgcgtgttgcatggaatctacac

SEQ ID NO: 139739 - DNA, 120 bp, Artificial Sequence
  ENSG00000104043_25 (sequence is synthesized)
ctcattagtccttttcttcatcccctatggggccttttacaacgtggctggagaagatgggcaacatattgctgactaccagtcctttgcagttaccatggccacatctttggtcattgt

SEQ ID NO: 139740 - DNA, 120 bp, Artificial Sequence
  ENSG00000104043_26 (sequence is synthesized)
ggtcagtgtgcagatagccttggataccagttactggactttcattaatcacgtcttcatctgggggagcattgccatttatttctccattttatttacaatgcacagtaatggcatctt

SEQ ID NO: 139741 - DNA, 120 bp, Artificial Sequence
  ENSG00000104043_27 (sequence is synthesized)
tggcatcttcccaaaccagtttccatttgttggtaatgcacgacattccctgacccagaagtgcatctggcttgtaattctcttaacaacagtggcttcagttatgccagtggtggcatt

SEQ ID NO: 139742 - DNA, 120 bp, Artificial Sequence
  ENSG00000104043_28 (sequence is synthesized)
cagatttttgaaggtggatttatacccaaccctgagtgatcagatccgccggtggcagaaggctcaaaagaaggcaaggcctccaagtagccgaaggcctcggacccgcaggtcaagctc

SEQ ID NO: 139743 - DNA, 120 bp, Artificial Sequence
  ENSG00000104043_29 (sequence is synthesized)
aagaaggtctggatatgcttttgctcaccaagaaggctatggagagcttatcacatctggaaaaaatatgcgagctaaaaatccacccccaacatcagggctggaaaagacacattataa

SEQ ID NO: 139744 - DNA, 120 bp, Artificial Sequence
  ENSG00000104043_30 (sequence is synthesized)
tagcactagctggattgaaaatttatgtaagaaaaccacagacaccgtgagcagctttagccaggataaaacagtgaaactgtgagtcaatatgaatttaaaccacgtagttatcttttc

SEQ ID NO: 139745 - DNA, 120 bp, Artificial Sequence
  ENSG00000104043_31 (sequence is synthesized)
acttcaggtggagctgaaattctgctggctccagagtttgagatttgaggcaagaggtggggcaggcagattgcctcacttaacttaaatctgcggcagacaactgccagtgcccatcaa

SEQ ID NO: 139746 - DNA, 120 bp, Artificial Sequence
  ENSG00000104043_32 (sequence is synthesized)
acaggagtgtgcgctatggaaaaccaggccagagggtcactgtctggtttgtgatttggtggacaaaacactcgctgttacaagtacagattttttttttttttaaatcaacctagatac

SEQ ID NO: 139747 - DNA, 120 bp, Artificial Sequence
  ENSG00000104043_33 (sequence is synthesized)
caattgacctgaactttagaatcttatttatggagaaaaacttgtaaagctgcatattcactgaatggatcctcaggcggataaaagggtgcattttaaaggtatatatccaagctgaaa

SEQ ID NO: 139748 - DNA, 120 bp, Artificial Sequence
  ENSG00000104043_34 (sequence is synthesized)
agcatgcctattgacagataaacatgtatctgtaagatcagcctttcccaaggtatacttttaaaatttaaagcgtgtactgtgttgctttcagactgagttgcatgtcactctttagtc

SEQ ID NO: 139749 - DNA, 120 bp, Artificial Sequence
  ENSG00000104043_35 (sequence is synthesized)
ttgatatctacctgtctgttcagccaggacaacaaatggcttccaagcctgaagaatacaaaagtgtgcttgtgtttctcatttttataccagtctagggacaaaggagactgaacatct

SEQ ID NO: 139750 - DNA, 120 bp, Artificial Sequence
  ENSG00000104043_36 (sequence is synthesized)
ttgcagcaggataggctggtaatttgatcaaatttattcaaaaagctctcagtctgtgtcatgtaaggacatgcttatgaaatgtgagagaggctcgccactaagtattctaaatacttt

SEQ ID NO: 139751 - DNA, 120 bp, Artificial Sequence
  ENSG00000104043_37 (sequence is synthesized)
tcaatggcttttctaacaacctcagtagtaatttgctgagcatcatccagaccattaatagaatcagcaaagcactggaatttcacactttaatgataatattccacatagtctatgggc

SEQ ID NO: 139752 - DNA, 120 bp, Artificial Sequence
  ENSG00000104043_38 (sequence is synthesized)
aaatattttcaacatttccaatttttaaagcttcagaattgaagccaaacaaattaataaataattgttttaattactatttaaaaactcaggtttagattgtttaaaattagttgcttt

SEQ ID NO: 139753 - DNA, 120 bp, Artificial Sequence
  ENSG00000104043_39 (sequence is synthesized)
tgatactcagctgtcatgtttataattcaaacatgtagtaaacatatgtaggtaaggttgtttttttggagatgttgcagctcaaatttcagtccacatatgaatcatcagtgtattttc

SEQ ID NO: 139754 - DNA, 120 bp, Artificial Sequence
  ENSG00000104043_40 (sequence is synthesized)
cataaagtgattcgggcatatttgtgtgaaaacctcagttctgtcacttcttacctctataaacttggacgataatgtgccttctctgagactcagtttcttcctctgtaaaatgaggac

SEQ ID NO: 139755 - DNA, 120 bp, Artificial Sequence
  ENSG00000104043_41 (sequence is synthesized)
atactacctacctcatgtggttggttgatgattgtctgtcaaagcacaaactctgaaattattaaaaacataattatttcataaacagatgagttaagttccagttaactcaacatcagt

SEQ ID NO: 139756 - DNA, 120 bp, Artificial Sequence
  ENSG00000104043_42 (sequence is synthesized)
ataacagagcaattggaagagaatatgaaaaaactggaatctaaatagtcagtgaggaaggctttgataaaatgaaattgccagaaagatataaaactggttagggtcctacagggaaat

SEQ ID NO: 139757 - DNA, 120 bp, Artificial Sequence
  ENSG00000104043_43 (sequence is synthesized)
aaaattataaccgtggaggtacatttctctaccagaaagcaaaaataaagcatcatgtcttaatggttttctacaaatcaacttctaattctacagagtccttaatctggtccctattaa

SEQ ID NO: 139758 - DNA, 120 bp, Artificial Sequence
  ENSG00000104043_44 (sequence is synthesized)
attcttggtcagacaaagttacatttcccaagagagtcaggtgacacttgagtgagtttgatggataatgagctaatgtgatatctataggtcacaattttttaaaaccaaaattttcaa

SEQ ID NO: 139759 - DNA, 120 bp, Artificial Sequence
  ENSG00000104043_45 (sequence is synthesized)
gtctgggataatctttcctaaatgggatcaaatgaaataatatgtgtaaaagagtcaaatgcagtcctttaccatagtaactgcctatggacgttgtctttcccttacatgcctgcctac

SEQ ID NO: 139760 - DNA, 120 bp, Artificial Sequence
  ENSG00000104043_46 (sequence is synthesized)
acttaaccagatgttggttttcaatgtctaatttgtcattagtttcaccacatttgctcactttttgtaacatttttgcaagatttgaaaactttcagtaaatgttttggcactattggt

SEQ ID NO: 139761 - DNA, 120 bp, Artificial Sequence
  ENSG00000104043_47 (sequence is synthesized)
aattcatatttgtctgattccaaaagtcaactcccacccacctcagaaaacctggttatttaacctaaatgtgaatattctcactactatggatgatgtttctcacttatatgttatatt

SEQ ID NO: 139762 - DNA, 120 bp, Artificial Sequence
  ENSG00000104043_48 (sequence is synthesized)
gaacatactctgtgcgtggaatcaaggtagctccagtgtaagggcactagatggggaactgggagagaactgagactttgcttcattctttcagtgacagtaaagactttatcttctttg

SEQ ID NO: 139763 - DNA, 120 bp, Artificial Sequence
  ENSG00000104043_49 (sequence is synthesized)
tctttggtttgtccatgtgtcaaataagatgctagaccactacaggatctcaaaaatccgttccatgctgtgattctcttctaagctgacactagactatacgattcttgcaggcaaagc

SEQ ID NO: 139764 - DNA, 120 bp, Artificial Sequence
  ENSG00000104043_50 (sequence is synthesized)
acctattgatttgcctgttctccaacacttggtgccatgttccatcaacaggggcatttggtaaatgttagctgaataattaagtgttgatctttgtaagaaagaagacaggaaaaaaaa

SEQ ID NO: 139765 - DNA, 120 bp, Artificial Sequence
  ENSG00000104043_51 (sequence is synthesized)
aaacaccaaggccctggtttttcatacattctcctttaatactaaactataggaaacctaatttggtctttttacatttctctgcaaaataattttttttcaggaatttgcaggggaagg

SEQ ID NO: 139766 - DNA, 120 bp, Artificial Sequence
  ENSG00000104043_52 (sequence is synthesized)
ggcacagcccagcttcaccagccccagccacagccacacgtaggccggctcgttacccataaggagcgccacgcagtctccctggcgcaggccgaggtggtcgtgcagcgcccgggccac

SEQ ID NO: 139767 - DNA, 120 bp, Artificial Sequence
  ENSG00000104043_53 (sequence is synthesized)
ttgattgctgcgccggtccacctgcgcgtaggtgagagtctcgtcgcggaagagcagaaaaggcttgtgtggcgtctggcgcgctttctccaggaacgcccgcaggatggtgcgcgccgg

SEQ ID NO: 139768 - DNA, 120 bp, Artificial Sequence
  ENSG00000104043_54 (sequence is synthesized)
ccgccgcttcccgtagctgcgcaccctccggcccacggcggccaccttcaagaagtagcctatgtcctggaagaagtatgggcagcagaggttcaccaggagcggcaggaacagcagtcc

SEQ ID NO: 139769 - DNA, 120 bp, Artificial Sequence
  ENSG00000104043_55 (sequence is synthesized)
gatggcggaaagcatgacggctgcggggccctctgtcccagcgagggcagagggttcaccccgggcgtgcagcgcggcgactgggcgggctccgggcggactggcgggctgcgccggggc

SEQ ID NO: 139770 - DNA, 120 bp, Artificial Sequence
  ENSG00000104043_56 (sequence is synthesized)
ccggtggtgactgcagaatgaaaaatggatgaatgtcaaagtgggagacatcattaaattagaaaataaccaatttgttgctggattgttgtctgtgaggtgcctaacaacaagttagat

SEQ ID NO: 139771 - DNA, 120 bp, Artificial Sequence
  ENSG00000104043_57 (sequence is synthesized)
tatttcttctataagaattttgcatttacacttgtgcatttctggtttggtttcttctgtggtttctcagcccaggatcaaacatattgaagcagatgagaagtaagaggatggacatcc

SEQ ID NO: 139772 - DNA, 120 bp, Artificial Sequence
  ENSG00000104043_58 (sequence is synthesized)
cagcagaggagacaacaggaggaaagttccagaagtgaagaatagcttgggcaggaacacaagccatcagtcagatgccatcatcaatgagttgaagatttgtgtcagctgctctgcttt

SEQ ID NO: 139773 - DNA, 120 bp, Artificial Sequence
  ENSG00000104043_59 (sequence is synthesized)
atttcatttcgccaaaagacacaatattcactttctggtcttctctcactctccatgttctcctgagtgctcattttgtaaatgccagttatgacccatgctggatagttctctggtcgt

SEQ ID NO: 139774 - DNA, 120 bp, Artificial Sequence
  ENSG00000104043_60 (sequence is synthesized)
ggttgaagcttctgtaggtttgtcagcttgccttatgttacttcaaagcctgcactcaactgttcttgaagaggaatttcccttcctttaagggcatcatctttccattttggagagaac

SEQ ID NO: 139775 - DNA, 120 bp, Artificial Sequence
  ENSG00000104043_61 (sequence is synthesized)
agtagaatgccacttctaagtgtgctatgtcaccatacaatcttcctcttagatggcagagatgcatgggatgtgagcaggattgctttatagctactgctaattagatctagagcattt

SEQ ID NO: 139776 - DNA, 120 bp, Artificial Sequence
  ENSG00000104043_62 (sequence is synthesized)
ggagggcgtttccatttggaacaaccctctatattttggtgtctagtttttttcctagaagatttattctattttttaagctgaatacaatttttgcttaaaatgttctatcctattata

SEQ ID NO: 139777 - DNA, 120 bp, Artificial Sequence
  ENSG00000104043_63 (sequence is synthesized)
tgtttgtttgtttgtttttgtatgatattacaaatgactcttcttcatagctctttactaataaattcagagcattttttaatggctgattcaagtaatagtattacaattatgtaattg

SEQ ID NO: 139778 - DNA, 120 bp, Artificial Sequence
  ENSG00000104043_64 (sequence is synthesized)
atagttgacttgagctttgtacccaagaagaatatgtatctagctggaattttatttatttattttcttatttagatagtcaaccagtgagtactccttccatgcatactttagtttttg

SEQ ID NO: 139779 - DNA, 120 bp, Artificial Sequence
  ENSG00000104043_65 (sequence is synthesized)
ttgaaatgtttttggtatgatgacaggtaagcttgttgtagagttttaatttagaacagaagtctgcaaatcactaataagaaatgttgaggtatctttactgggaagatggtttcttat

SEQ ID NO: 139780 - DNA, 120 bp, Artificial Sequence
  ENSG00000104043_66 (sequence is synthesized)
ccaacacactaaatgtatctggactgattggtactctgacatcaaagctgtttagacagcaattcatcagctaaaagttgatctatagataatgctggtaggaagaaagaaaattagcaa

SEQ ID NO: 139781 - DNA, 120 bp, Artificial Sequence
  ENSG00000104043_67 (sequence is synthesized)
atgtataaattaggattctatttttatatcgcttcttatacattaaaggatagttatttaaccacacatcttcaatatcagaaaagttttgacccaatgaatcaactgtaaaatgtaatg

SEQ ID NO: 139782 - DNA, 120 bp, Artificial Sequence
  ENSG00000104043_68 (sequence is synthesized)
gaaaaagattgtccttgaaaaggaaatggtaaccataacactcagagatttattcaattgttcttcccttctttgggtttaatcaatgacatggattcaacgatatgcatgaaggtgatt

SEQ ID NO: 139783 - DNA, 120 bp, Artificial Sequence
  ENSG00000104043_69 (sequence is synthesized)
tttaaaaaatcattttattcaaaaagactgaggataaatgaaatcttggcatcttcttcttacatgtgctaagggagattagtgaattcctttttacaatgaaaatacattttcaacatt

SEQ ID NO: 139784 - DNA, 120 bp, Artificial Sequence
  ENSG00000104043_70 (sequence is synthesized)
ttttccttcttctgggaagttaagatttcttaaagtgaggcatacctgttcccattcctaattttctctttttaggataacatgccctaaactaagagtagattatgttgatatttttgc

SEQ ID NO: 139785 - DNA, 120 bp, Artificial Sequence
  ENSG00000104043_71 (sequence is synthesized)
cttttttttgttaatctcttgacagttgaagtaaagcagagtcttgattttagctactcagaagtagaagttatcttagtgctacttcagagtaggcgtggggctggggttatttgcatg

SEQ ID NO: 139786 - DNA, 120 bp, Artificial Sequence
  ENSG00000104043_72 (sequence is synthesized)
ctcataattcctcctttgtccaacaaagacaagcattggaatgtggcctgtggcttcctagtctgttgattttccttccacataagaacaaagcaagaccatctgctaacgggtgtttct

SEQ ID NO: 139787 - DNA, 120 bp, Artificial Sequence
  ENSG00000104043_73 (sequence is synthesized)
aagagatctaattttcatattccaaaggcttaaggctgaagaatctcaagactatgaagggacaaaccccatttaaaaactcttagaacacagaagagtagtcagtgatttgtatttgca

SEQ ID NO: 139788 - DNA, 120 bp, Artificial Sequence
  ENSG00000104043_74 (sequence is synthesized)
gacgcacaaagcttgaataggcaactgttccactaagttgtctgttaaaactgtgaagttgaaactaacgttcaatgacttctaacctctacatttaggtcattttctgggttctgataa

SEQ ID NO: 139789 - DNA, 120 bp, Artificial Sequence
  ENSG00000104043_75 (sequence is synthesized)
aaatcggtcagagccagatattaagcaactagaatttttattctttcactggtatttgcattttaaaagagaacaacaagggagaacaataattgccccaaagacatgagcagcttgatg

SEQ ID NO: 139790 - DNA, 120 bp, Artificial Sequence
  ENSG00000104043_76 (sequence is synthesized)
gttgaacccagctgtaaggcacaccacctgtctgtgattaggtttctgaaatgtttgatttaactaacatgtttcttttctgtgtcccttcctttcccttttgtttttttacactgaaat

SEQ ID NO: 139791 - DNA, 120 bp, Artificial Sequence
  ENSG00000104043_77 (sequence is synthesized)
ctctagttaattgcacaatcttcattttgaatctattgttagtcccagttgaccatctgtgttctttcttaagccagtgaattgggttggaccagtggttctcaagctttagcgtgcata

SEQ ID NO: 139792 - DNA, 120 bp, Artificial Sequence
  ENSG00000104043_78 (sequence is synthesized)
ggaatcacctggagggctggttaaagcactgcccactgggctctagcccctagaactgtactttgagaaccactgggctagaaaacctagaagagtatcccaagttctgcttccttgaac

SEQ ID NO: 139793 - DNA, 120 bp, Artificial Sequence
  ENSG00000104043_79 (sequence is synthesized)
ccagaccagagtaaagtccaatctgctgactttttgttttgtcaacaacattagaccgtattcatcttttctaaagcagaggggccagttaagccaacagctgatctcccccagttgaat

SEQ ID NO: 139794 - DNA, 120 bp, Artificial Sequence
  ENSG00000104043_80 (sequence is synthesized)
ttttccagaggatttaaaatcctttcagccctcttgtcagaccactgtccctgaggcatattttacctgcgctaagacagggccaggtggaaaagggatgtctgttcatggtacaggatt

SEQ ID NO: 139795 - DNA, 120 bp, Artificial Sequence
  ENSG00000104043_81 (sequence is synthesized)
tctttccccagtttagccagtctattatatcttacctagcttaaccattagctccttgaggaaaagaagtacatctaactcatcgatacatctgtaataaaatcttgaatgttacctgcc

SEQ ID NO: 139796 - DNA, 120 bp, Artificial Sequence
  ENSG00000104043_82 (sequence is synthesized)
acattcgttagtgttgctacttgtgcatgggtttagcaagtagggaatttgatcctgaaacccaggtctttgaatttccctctgcactgcttgtattttatcacctgttgtgctctctct

SEQ ID NO: 139797 - DNA, 120 bp, Artificial Sequence
  ENSG00000104043_83 (sequence is synthesized)
gacatcagccccctgtaggctttaagaaaatacagctaagccctcaaaactttcattaaaaatggacttaggttattaagtaacattttaactgaattgggctttattttgtgttagaaa

SEQ ID NO: 139798 - DNA, 120 bp, Artificial Sequence
  ENSG00000104043_84 (sequence is synthesized)
cagctcccaaggctgagattactctgcttcatctggatcgcccatctctggggtctcatggctgagtttcagttccccaatcctacctgctcctcagggggccagcactggggctgcagg

SEQ ID NO: 139799 - DNA, 120 bp, Artificial Sequence
  ENSG00000104044_0 (sequence is synthesized)
gttcttacttcgaaggctgtgctccgctcaccatccagagcggaggtgcggaccttaaactcactcctggagaaagatctgcaagtgcgcagagagaagactggcagtggagcatgcatc

SEQ ID NO: 139800 - DNA, 120 bp, Artificial Sequence
  ENSG00000104044_1 (sequence is synthesized)
tggagggcagagacggcaggcggtaccccggcgcgccggcggtggagctcctgcagacgtccgtgcccagcggactcgctgaacttgtggccggcaagcgcaggcttcctcggggagccg

SEQ ID NO: 139801 - DNA, 120 bp, Artificial Sequence
  ENSG00000104044_2 (sequence is synthesized)
gtggagctgacccctcgcactcctgccccaggggggctgccgggcagagctcttgggctcctgcaggccaggagtttgcttcattcctcacaaaagggaggtctcactcttctttgcccc

SEQ ID NO: 139802 - DNA, 120 bp, Artificial Sequence
  ENSG00000104044_3 (sequence is synthesized)
agatgtccagctccaggtctaaagattcctgctttacagaaaacactcctttgctgaggaattccttacaggagaaagggtcacggtgcatacctgtttaccatccagagttcatcactg

SEQ ID NO: 139803 - DNA, 120 bp, Artificial Sequence
  ENSG00000104044_4 (sequence is synthesized)
ctgaagagtcttgggaagacagctctgctgactgggagcgaagatacctgctaagcagggaggtgtctggtctgtctgcatctgcctcctccgagaagggagaccttctggacagcccgc

SEQ ID NO: 139804 - DNA, 120 bp, Artificial Sequence
  ENSG00000104044_5 (sequence is synthesized)
acatccgactccgtctttccaagctgaggcgctgtgtgcagtggctgaaagtcatgggcctgtttgcctttgtggtgctgtgttctattttgttcagcctatatccggatcaaggaaagc

SEQ ID NO: 139805 - DNA, 120 bp, Artificial Sequence
  ENSG00000104044_6 (sequence is synthesized)
tctggcagctgttggccttatcaccgctggagaactactccgtgaaccttagcagccacgtggactccacgctgctgcaggtggacctggcaggggccctagtggccagtgggccgagtc

SEQ ID NO: 139806 - DNA, 120 bp, Artificial Sequence
  ENSG00000104044_7 (sequence is synthesized)
gtcctgggagggaagagcacatcgtggtggagctgacccaggctgacgctttgggctccaggtggcggcggccacagcaggtcactcacaactggacggtgtatttaaatccgaggagaa

SEQ ID NO: 139807 - DNA, 120 bp, Artificial Sequence
  ENSG00000104044_8 (sequence is synthesized)
gcgagcactcagtgatgagcaggacctttgaggtactgaccagagagacggtgtccatcagcatccgggcctccctgcagcagacccaggctgtccctcttttgatggctcatcagtacc

SEQ ID NO: 139808 - DNA, 120 bp, Artificial Sequence
  ENSG00000104044_9 (sequence is synthesized)
tccgcggaagtgtagaaacccaggtgaccatcgcgacggccatcctcgcgggcgtctacgcgctgatcatatttgagatcgtgcacagaactctggcggccatgctgggttcccttgcag

SEQ ID NO: 139809 - DNA, 120 bp, Artificial Sequence
  ENSG00000104044_10 (sequence is synthesized)
cactggcagcactggctgtgattggcgatagacccagcctgacccatgtggtggagtggattgattttgagacgctggccctgctgtttggcatgatgatcttagtagccatattttcag

SEQ ID NO: 139810 - DNA, 120 bp, Artificial Sequence
  ENSG00000104044_11 (sequence is synthesized)
aaacgggatttttcgattattgtgctgtaaaggcataccggctctcccggggacgggtgtgggccatgatcatcatgctctgtctcatcgcggccgtcctctctgccttcttggacaacg

SEQ ID NO: 139811 - DNA, 120 bp, Artificial Sequence
  ENSG00000104044_12 (sequence is synthesized)
tcaccaccatgctcctcttcacgcctgtgaccataaggttgtgtgaggtgctcaaccttgatccaagacaagtcctgattgcagaagtgatcttcacaaacattggaggagctgccactg

SEQ ID NO: 139812 - DNA, 120 bp, Artificial Sequence
  ENSG00000104044_13 (sequence is synthesized)
attattgtttccaaccaagagctgaggaagatgggcctggactttgccggattcactgcacacatgttcattgggatttgccttgttctcctggtctgctttccgctcctcagactcctt

SEQ ID NO: 139813 - DNA, 120 bp, Artificial Sequence
  ENSG00000104044_14 (sequence is synthesized)
tactggaacagaaagctttataacaaggaacccagtgagattgttgaactgaagcacgagattcacgtctggcgcctgactgctcagcgcatcagcccggccagccgcgaggagacagct

SEQ ID NO: 139814 - DNA, 120 bp, Artificial Sequence
  ENSG00000104044_15 (sequence is synthesized)
gtgcgccgcctgctgctggggaaggtgctggcactggagcacctgctcgcccggaggctgcacaccttccacagacagatctcacaggaggacaaaaattgggagaccaatatccaagaa

SEQ ID NO: 139815 - DNA, 120 bp, Artificial Sequence
  ENSG00000104044_16 (sequence is synthesized)
ctccaaaaaaagcataggatatctgacgggattctgctcgccaaatgcctgacagtgttgggatttgttatcttcatgtttttcctcaattcgtttgtccctggcattcatcttgatctt

SEQ ID NO: 139816 - DNA, 120 bp, Artificial Sequence
  ENSG00000104044_17 (sequence is synthesized)
ggatggattgctattctgggtgccatctggttgctaattttagctgatattcatgattttgagataattctacacagagtggaatgggcaacccttctgttttttgcagcgctctttgtt

SEQ ID NO: 139817 - DNA, 120 bp, Artificial Sequence
  ENSG00000104044_18 (sequence is synthesized)
ctgatggaggcattggcacatctccacttaatagaatatgttggagaacaaactgctttgctaataaagatggtcccagaggagcagcgcctcatagccgccattgtcctggtggtgtgg

SEQ ID NO: 139818 - DNA, 120 bp, Artificial Sequence
  ENSG00000104044_19 (sequence is synthesized)
gtctcagccctggcgtcgtccctgattgacaacatcccgttcactgctaccatgattcccgtgctcctgaacctgagccacgaccctgaggttggcctgcccgcaccgccgctcatgtat

SEQ ID NO: 139819 - DNA, 120 bp, Artificial Sequence
  ENSG00000104044_20 (sequence is synthesized)
gccctggccttcggtgcttgcctgggaggtaacgggacactgattggcgcgtcggcaaacgtcgtgtgtgcagggattgcagaacagcatggatatgggttctccttcatggaatttttc

SEQ ID NO: 139820 - DNA, 120 bp, Artificial Sequence
  ENSG00000104044_21 (sequence is synthesized)
aggctgggcttcccaatgatggttgtgtcctgcactgttgggatgtgttatctccttgtggctcatgtggtggtgggatggaattaatagacatccatctattgctcgaagactaaagga

SEQ ID NO: 139821 - DNA, 120 bp, Artificial Sequence
  ENSG00000104044_22 (sequence is synthesized)
aacttcatccatcacaacccattagtcataaaactaccctgaccccactgtttgaagaagaaaaggtgcttaccctggagatgctacagagacacagtggaatagaccttgacactaaca

SEQ ID NO: 139822 - DNA, 120 bp, Artificial Sequence
  ENSG00000104044_23 (sequence is synthesized)
ctctaattcaagcgaatgttggaacaccatgacctcctctgtgtgtcctttctccccaaggacaaaatgtagaaagatgtgagataacttactcaagattcccctccagaaaaatacgta

SEQ ID NO: 139823 - DNA, 120 bp, Artificial Sequence
  ENSG00000104044_24 (sequence is synthesized)
tgtttaaaaacccttcctgctatacataggaaaagacacacatccacctaaaattgactgtactgtttaactgtcaattctcctgaggctaaacacagtttgtttttcttgtaatcactt

SEQ ID NO: 139824 - DNA, 120 bp, Artificial Sequence
  ENSG00000104044_25 (sequence is synthesized)
ttcatgttaaaataatcagcattcaaattgtatgctttctgaatatagactttctgggaaaaggtttactgctcgtaaggaaacattttatgtattaaaataaactgttccttgataaaa

SEQ ID NO: 139825 - DNA, 120 bp, Artificial Sequence
  ENSG00000104044_26 (sequence is synthesized)
tccgctcaccatccagagcggaggtgcggaccttaaactcactcctggagaaagatctgcaagtgcgcaggtaaagtgcacgtgctccgcggtcgggaggaaggaggcgaggagccagac

SEQ ID NO: 139826 - DNA, 120 bp, Artificial Sequence
  ENSG00000104047_0 (sequence is synthesized)
gttcgaggactcgcgggtgtgcagggatgcggtttaatattttcatgtgattcctaaaagaatctgaggctcaagaaaagagggcatcttaatatcctgcactttcagtcattgagggca

SEQ ID NO: 139827 - DNA, 120 bp, Artificial Sequence
  ENSG00000104047_1 (sequence is synthesized)
tgatcacaaagatcaaagccatttttaggcagtgcacctatgatatgtgttttagaaatagccgttaaactttggtttgaatgaagaatgtctctcaatccacctatatttctcaaacga

SEQ ID NO: 139828 - DNA, 120 bp, Artificial Sequence
  ENSG00000104047_2 (sequence is synthesized)
agtgaagaaaatagttcaaaatttgtggaaacaaaacagtcacaaactacttccatagcttcagaagatccccttcaaaacttatgtttagcatctcaagaagttcttcaaaaagctcag

SEQ ID NO: 139829 - DNA, 120 bp, Artificial Sequence
  ENSG00000104047_3 (sequence is synthesized)
caaagtgggagatcaaaatgtctcaaatgtggtggttccagaatgttctactgctatacatgttatgttccagttgaaaatgtacctattgaacagattccacttgtgaagcttccattg

SEQ ID NO: 139830 - DNA, 120 bp, Artificial Sequence
  ENSG00000104047_4 (sequence is synthesized)
aagattgacatcattaaacatccaaatgaaacagatggcaaaagtactgctatacatgcaaaactcttagcacctgaatttgtaaacatttacacgtatccgtgtattccagaatatgaa

SEQ ID NO: 139831 - DNA, 120 bp, Artificial Sequence
  ENSG00000104047_5 (sequence is synthesized)
gaaaaggaccatgaagttgcactcatttttcctggacctcagtctatctcaataaaagatatttcttttcatctgcaaaaaaggattcaaaataatgttagaggcaaaaatgatgaccct

SEQ ID NO: 139832 - DNA, 120 bp, Artificial Sequence
  ENSG00000104047_6 (sequence is synthesized)
gacaagccatcttttaaacgcaaaagaactgaagaacaagagttctgtgatttgaatgacagcaagtgcaaaggcacaacactgaaaaaaattatatttatagatagcacctggaaccaa

SEQ ID NO: 139833 - DNA, 120 bp, Artificial Sequence
  ENSG00000104047_7 (sequence is synthesized)
acaaacaaaatattcactgatgagcgacttcaagggttgttacaagttgagttgaaaacaagaaaaacttgcttttggcgccatcaaaaaggaaagccagatactttcctttctacaatt

SEQ ID NO: 139834 - DNA, 120 bp, Artificial Sequence
  ENSG00000104047_8 (sequence is synthesized)
gaagccatttactactttctggtagactaccatactgatatattaaaagagaaatacagagggcaatatgacaatcttttatttttctattcttttatgtaccagttgataaagaatgcc

SEQ ID NO: 139835 - DNA, 120 bp, Artificial Sequence
  ENSG00000104047_9 (sequence is synthesized)
aaatgctctggagataaggaaacaggaaaacttacacattagtttttaacaagccacttatgtctttttattttgctaacattaataaacttatatttgtgctttgttttttcttaagaa

SEQ ID NO: 139836 - DNA, 120 bp, Artificial Sequence
  ENSG00000104047_10 (sequence is synthesized)
ataatcatatataatgcctgtaagaccatttgaaaaaattccagtttcatatatatcacttcatatttcttgaaggaaattgtatctgggggaatttttcagagatactgttgattgaaa

SEQ ID NO: 139837 - DNA, 120 bp, Artificial Sequence
  ENSG00000104047_11 (sequence is synthesized)
aacttacttcagaagttatttgctcagtgaaacctcagtttcattactacattttaatatagtgtgttatgtctctgtgattagatataacatattccattagatctaattagctattta

SEQ ID NO: 139838 - DNA, 120 bp, Artificial Sequence
  ENSG00000104047_12 (sequence is synthesized)
tttcaacatctttatatcttttcacctgtactcatgaccacctttagaagtaaatggggttacaatctgctggctgaaaaataggtcataagtgatttttcttgaggttagtagcaaaca

SEQ ID NO: 139839 - DNA, 120 bp, Artificial Sequence
  ENSG00000104047_13 (sequence is synthesized)
taggcagaactagaattagaattctggtatctagggctgtttctttaagtcctaaggttgttaaaagcagagactctggagctagactacctgaatctaaatctcagcctttctgcttat

SEQ ID NO: 139840 - DNA, 120 bp, Artificial Sequence
  ENSG00000104047_14 (sequence is synthesized)
cagccatgtcattttcttccatttgtacaaagcaggcaatactgagcaactaccttataggaataactgagttaatatctaaggggctttcagcagtacctgaaatatagtaagtgttac

SEQ ID NO: 139841 - DNA, 120 bp, Artificial Sequence
  ENSG00000104047_15 (sequence is synthesized)
atatatgtttactctttttattttatttggaattgtgaactgataataattgaagcctacctgctagtggccatctctgctgccaggtgaaaagagcctgacttagaatgaagtcagcga

SEQ ID NO: 139842 - DNA, 120 bp, Artificial Sequence
  ENSG00000104047_16 (sequence is synthesized)
aggaaagcagagtggagagaaaaagagagactgagtcctgatgacatcatttatttacctagacctagctgcttgtgaatagagccctactgtgctgaatagcttctgtctgctcttttc

SEQ ID NO: 139843 - DNA, 120 bp, Artificial Sequence
  ENSG00000104047_17 (sequence is synthesized)
tattctgctccctgctctgtgaggtaggttcctttgctctcttgcttttggttgggttcaacaaatgggaagcaccagtgggagattagaagttgagaggaaaatgaaatgatgttattt

SEQ ID NO: 139844 - DNA, 120 bp, Artificial Sequence
  ENSG00000104047_18 (sequence is synthesized)
atttccctggctcctttcctgccatgtcatcatcagttggctgtgttcctctactaaatagtaccttatcaggaatcctatctcttctgttcccaagcagttaccccagttacctcacta

SEQ ID NO: 139845 - DNA, 120 bp, Artificial Sequence
  ENSG00000104047_19 (sequence is synthesized)
ggtttagttcctgctccctccctttaccccttttcacttagggttggtaatagcttacagttattactagccccagtatagttcactacaacttgttgctttacctaaaccctgctcata

SEQ ID NO: 139846 - DNA, 120 bp, Artificial Sequence
  ENSG00000104047_20 (sequence is synthesized)
catttgtaaatactgtagttgttttattacactcttctcaaatgtccccacttgaaatagccttctatttcttttggggactctgataaattcacctgtttgggtgaaataatagcacat

SEQ ID NO: 139847 - DNA, 120 bp, Artificial Sequence
  ENSG00000104047_21 (sequence is synthesized)
ttcctgaagtatatacagtgggacacatgatgttttatgggggaaagagttcttggtgaaattagtttgctgtacattacgttgtttccctcccagggattcagaaggcaaaacatatta

SEQ ID NO: 139848 - DNA, 120 bp, Artificial Sequence
  ENSG00000104047_22 (sequence is synthesized)
aaggttctgaaaagtcctgaaataaacattttgaactttatttaagctgatatatcttaaacttacttgaatatgtagcacctattaacatgccatggaaataggacgtttggagtattg

SEQ ID NO: 139849 - DNA, 120 bp, Artificial Sequence
  ENSG00000104047_23 (sequence is synthesized)
taattaagaacaattcctattaatatacatggggcaactgagaattaaagaggtaagtaaattattgatagatcatacacctagttagtagcagagcctgttctagaatctggaacttct

SEQ ID NO: 139850 - DNA, 120 bp, Artificial Sequence
  ENSG00000104047_24 (sequence is synthesized)
gatttggtttggttcagtaaggtcaccattatattatgctattcataaaaaggaatgtggattatataaggcttgaacattattagtcttacagtcttagccaaataaactaactggctt

SEQ ID NO: 139851 - DNA, 120 bp, Artificial Sequence
  ENSG00000104047_25 (sequence is synthesized)
gcttattttagcagttattctacaagaatggaattaaaatagattttttttttcatgtttagaacttggccctgggaatagaggaaggcttgaattgatttaagcagggccaaagttgga

SEQ ID NO: 139852 - DNA, 120 bp, Artificial Sequence
  ENSG00000104047_26 (sequence is synthesized)
tttctctaggctaaatttggacttccctgagccaaaatctattgcatttaactggctttacaaaccaactaaacataacagttcagagggaaaagaaaaaaaaaagcgagagacagagaa

SEQ ID NO: 139853 - DNA, 120 bp, Artificial Sequence
  ENSG00000104047_27 (sequence is synthesized)
caattctatcactcatttgcctccatctctcagctggcataagaaagatgacccacgtacttcataagagcctaatttacagctaaggccagataaaatctcaggttcttttcaaaagaa

SEQ ID NO: 139854 - DNA, 82 bp, Artificial Sequence
  ENSG00000104047_28 (sequence is synthesized)
agctaaggccagataaaatctcaggttcttttcaaaagaagttagtaatacctattagaacaatgaattgactatacttgtc

SEQ ID NO: 139855 - DNA, 120 bp, Artificial Sequence
  ENSG00000104047_29 (sequence is synthesized)
gcttgtattcatggtcatttttcaggttcctttgaagtactccccccactgtgattctgggtcatctgcattcagagatttagtgcatttttacttacacttgtgcttctgctgttgaca

SEQ ID NO: 139856 - DNA, 120 bp, Artificial Sequence
  ENSG00000104047_30 (sequence is synthesized)
taagaatatgcatggctgagttagcctgctggagcatgagactccatggaacagagccaggttgccctggtcaccctcactgaatcttgtctagattggctgatggccagccaaacccaa

SEQ ID NO: 139857 - DNA, 120 bp, Artificial Sequence
  ENSG00000104047_31 (sequence is synthesized)
gatatgtgaatgattccagccaagatcagcagagtcatctaactgacacctacctgattccaaacatgtgagcaaggaatgtctattatgccaccaatgtcttatagctatttattgtgg

SEQ ID NO: 139858 - DNA, 120 bp, Artificial Sequence
  ENSG00000104047_32 (sequence is synthesized)
ctatagatatctcatctttggatgcattatcagatcatcttcttcaagtaccttagaagattctcagtctcatgtttcttgggctcttgaccacttgctttgccttagctaccacctcat

SEQ ID NO: 139859 - DNA, 120 bp, Artificial Sequence
  ENSG00000104047_33 (sequence is synthesized)
atagtaacagattaccagcaggtttgtatgattcctctgcttgagatcaattagccatatgttcagaatccctggcctataacaacacttctgtgctttaaaaaccccatgccacaatga

SEQ ID NO: 139860 - DNA, 120 bp, Artificial Sequence
  ENSG00000104047_34 (sequence is synthesized)
ctgttaaaagggctaggcgatgtagtctggtaggtttgtgaagttaactgtctgaaaaacttggatcaatggactagaaaaagctgctgggtaaattgctcttcttctgatggactgtat

SEQ ID NO: 139861 - DNA, 120 bp, Artificial Sequence
  ENSG00000104047_35 (sequence is synthesized)
agagacactgtttttcatcttgcctgtccagaagcgtactctgtggccaagcaagtgtacttgccacatgattggcagtgtctcttcatggcttttcatgaaacagcagcaagtgctaca

SEQ ID NO: 139862 - DNA, 120 bp, Artificial Sequence
  ENSG00000104047_36 (sequence is synthesized)
cagtaatttatcagtttgcatttgcctcccattattgccagcctcacttcctttcttcctcgctcttaccagcctggattgtacctttaataaagtagtggatatatttcctttagggtc

SEQ ID NO: 139863 - DNA, 120 bp, Artificial Sequence
  ENSG00000104047_37 (sequence is synthesized)
tctttttctagggaagtcaggtgttttagtctggatttagttagaaaagcagcatcgttacaagtattacatgaataaagaagtttagtaaagaaattaaggtttaccccaatgtgagaa

SEQ ID NO: 139864 - DNA, 120 bp, Artificial Sequence
  ENSG00000104047_38 (sequence is synthesized)
ttactggggtaataaaggtctggaaggctgcagcagaagagatttagagaagcagtgactaactaggtcagccggagattctcaaagtactcatgacttcatttgtagaaacatgtatat

SEQ ID NO: 139865 - DNA, 120 bp, Artificial Sequence
  ENSG00000104047_39 (sequence is synthesized)
cttaagcatatcaagtgtctcattcctctaatctttctaggagccctttggttcatcctgaaggtccccctaaatcccttcagaagtcttaaaaaggagtaaatggccacaccttttatt

SEQ ID NO: 139866 - DNA, 120 bp, Artificial Sequence
  ENSG00000104047_40 (sequence is synthesized)
tgttcttttctttgaggccatgttaatggcagtcccttgatttggtctttgtactaggctgtttttaatgatcacattttatttgatgagaaacaattttattttctagttctgcatatc

SEQ ID NO: 139867 - DNA, 120 bp, Artificial Sequence
  ENSG00000104047_41 (sequence is synthesized)
ctaggttatgtatttcatttcagttccatttccatacccattgccttaattttgagcttgtctgtttcttacatttctcattttgacagaataagctgactgttattaagtacaatagat

SEQ ID NO: 139868 - DNA, 120 bp, Artificial Sequence
  ENSG00000104047_42 (sequence is synthesized)
aaggtacctaagagcctcgaaacatcaccaaataccatgaatgcattaggtatattttttgtcttccatgttactggaagcattaattatagcaactttttatctccaaatactgacaat

SEQ ID NO: 139869 - DNA, 120 bp, Artificial Sequence
  ENSG00000104047_43 (sequence is synthesized)
taaaagaccctagtgaaaactttaaccaaacacttactgaccctacattgaaggccaccagccaaaaatcaccacccatacataagagccaaacatcactagacacttggtgaaatcctt

SEQ ID NO: 139870 - DNA, 120 bp, Artificial Sequence
  ENSG00000104047_44 (sequence is synthesized)
caaatataaaaggggaaaaggaggggagaaaatccaaaggaaatagacaaacggagaataatggcaacaaaaaaaaaactgtcttcaaaataagagtatattatattcacaaaacaagaa

SEQ ID NO: 139871 - DNA, 120 bp, Artificial Sequence
  ENSG00000104047_45 (sequence is synthesized)
taggagagtgtgaaaaagaacaagcaataaaaaagatctcagaaatttaaaaagtgattgctgaaataaaaattaaatataagagttgaagataaaatatagcataagaatagaaaattc

SEQ ID NO: 139872 - DNA, 120 bp, Artificial Sequence
  ENSG00000104047_46 (sequence is synthesized)
tgaattccaaatacctaaggccaatcttagttaaaagttgtaaatgcaaccataggctacatgttacattgtatttaattaaaaaccttaagaggaaaggcaatagagcttgtaacagct

SEQ ID NO: 139873 - DNA, 120 bp, Artificial Sequence
  ENSG00000104047_47 (sequence is synthesized)
attacccttggttgtaaaggagaaggttggagattatttgtataccaactacttaagtttacaaaaaataatgagcattaggtagatggaatgaaagtctattcatacactgtatattaa

SEQ ID NO: 139874 - DNA, 120 bp, Artificial Sequence
  ENSG00000104047_48 (sequence is synthesized)
gctctatatacactgcatatcatcatcatgacattgagtttctagctggattgcagagatgagccaaagcgcttctccccaaattattatttattcatttttgagacagagtctcactct

SEQ ID NO: 139875 - DNA, 66 bp, Artificial Sequence
  ENSG00000104047_49 (sequence is synthesized)
ctcttgtctagttcaagcaattatcatgccttagccccccgagtagctgggatcacaggcatgtgc

SEQ ID NO: 139876 - DNA, 120 bp, Artificial Sequence
  ENSG00000104047_50 (sequence is synthesized)
tgtatttttagtagagatggagttttgtcatgtttggccagccttatctgaaactcctgacctcaagtgatcctgcctttgcttcccaaagtgctgggattaacaggcctgagccacaac

SEQ ID NO: 139877 - DNA, 120 bp, Artificial Sequence
  ENSG00000104047_51 (sequence is synthesized)
aggcctgagccacaacacccagcctaaattatttttaattatgacattttttgtattcccttgaggcactgacaactatagtcttattttatatgttatagtgaatcatatttatctcat

SEQ ID NO: 139878 - DNA, 120 bp, Artificial Sequence
  ENSG00000104047_52 (sequence is synthesized)
tatatattacagaatattttgtttgatggagaaaattcactgacctgtgctgtaatgtttataccagcaattagctgattgatttactatgacctcactctttattcagcagttctgcca

SEQ ID NO: 139879 - DNA, 120 bp, Artificial Sequence
  ENSG00000104047_53 (sequence is synthesized)
ctattactagctaatccaacaacgaggccttattttggctttctttcgaaaggtcatttctgaccccagcttgaagtttgtttattttcacttgaagagatctctcagaaagtcaaagaa

SEQ ID NO: 139880 - DNA, 120 bp, Artificial Sequence
  ENSG00000104047_54 (sequence is synthesized)
aataggaggaaaaaaacttaagattaagggccaatctaagaggtccttcatttgaataataggagtaacagaatgggaaaggcgtggaaaaaaatttgtgatttctaaaattgaggacat

SEQ ID NO: 139881 - DNA, 120 bp, Artificial Sequence
  ENSG00000104047_55 (sequence is synthesized)
taagtcattagagtaaaaaaaagatgtacattaaggcttatcatcaaggaatttcagaacactgtggatagaaaatactaaaagatttcaaacagaagaaataggtcgtatatcgaccaa

SEQ ID NO: 139882 - DNA, 120 bp, Artificial Sequence
  ENSG00000104047_56 (sequence is synthesized)
taatcaggatattaaaggacttcttaacaacattggaaactagaagacatggggtgatgcctttagaactttaagtgaaaatagttttctatttggattctatttttagtcatgcaatta

SEQ ID NO: 139883 - DNA, 120 bp, Artificial Sequence
  ENSG00000104047_57 (sequence is synthesized)
gagataaagatgcttaggagaatactgaagatgttttccagtaaaacggagaaggaaaccaaaaaccaaaaaagagagcattaagaagtcagcaggccaggcgcggtggctcacgcctct

SEQ ID NO: 139884 - DNA, 68 bp, Artificial Sequence
  ENSG00000104047_58 (sequence is synthesized)
ccaaggcaggtggatcgcctgaggtctggagtttaagaccagcctggcatggcatgtgtctgtaatcc

SEQ ID NO: 139885 - DNA, 120 bp, Artificial Sequence
  ENSG00000104047_59 (sequence is synthesized)
aaaaataaaaagtcagcaaagggaagtttcagggtttcaggattcattcatccattctaaaaaattttgagtgcatactatgtgtcaaattattgtctaggtgatggctatagcatgccg

SEQ ID NO: 139886 - DNA, 120 bp, Artificial Sequence
  ENSG00000104047_60 (sequence is synthesized)
aggtagtaagtgctaagaagaaaataaagcagagtaaggaactgatagtgactggtgcaggaaaggggtgccagtttaaatagcatggtcagatggaaaagcctgtgataaggtaaaatt

SEQ ID NO: 139887 - DNA, 120 bp, Artificial Sequence
  ENSG00000104047_61 (sequence is synthesized)
gagcagagacctaaatgagagagagtgaaccatgcgaataattaagtgaataatgttttaattatagggaacaatatgtgtgtgtctatatatatatatacacacaaaggtactgaggca

SEQ ID NO: 139888 - DNA, 120 bp, Artificial Sequence
  ENSG00000104047_62 (sequence is synthesized)
gcagtatacttggcatgtttgaggaataacaaggacactagtttggaacagtgtgtgggagggaaaaaatgatagaagatgacatcatagggagtaatggtgtggagccatggtaagatg

SEQ ID NO: 139889 - DNA, 120 bp, Artificial Sequence
  ENSG00000104047_63 (sequence is synthesized)
ttaagattttactctgagtgatgagataggaagccatcagagaatttaagcaaatgagtgacaggatctgacttatatttttaaaggattatttggcttctttatgaaaaatagactgca

SEQ ID NO: 139890 - DNA, 120 bp, Artificial Sequence
  ENSG00000104047_64 (sequence is synthesized)
agagagtaagaaataaaataggaagatcaattagaatgctatttcagtagtccatttgagagatgatatttgcctggacaagggttgtgatcatgggcgagtggtacagaatgacaagat

SEQ ID NO: 139891 - DNA, 120 bp, Artificial Sequence
  ENSG00000104047_65 (sequence is synthesized)
cctgcatgtatttttaaggtagagccagtatttgcagatagtttagacattgtggtagatatgaaaatgtgctgcctatatcccccttctaggaaggacttgctaattagctgcagggag

SEQ ID NO: 139892 - DNA, 120 bp, Artificial Sequence
  ENSG00000104047_66 (sequence is synthesized)
tgtgaagaacagaaatccaccagtatcagcacttcatctgcaacagctatagaaaaagcttcacctgaggttaccctcgtcttagatctcagggcagccctcagtggagatgtaaggcct

SEQ ID NO: 139893 - DNA, 120 bp, Artificial Sequence
  ENSG00000104047_67 (sequence is synthesized)
tgctacttcagcctcatttattacactgtcaggcaaaaccttcctcagagctccctctattacaacttaatttcttcttctgcccaatcctgcttcctccccttcccctgaaaggtgaca

SEQ ID NO: 139894 - DNA, 120 bp, Artificial Sequence
  ENSG00000104047_68 (sequence is synthesized)
ctttctaataaacatcttacaccccaaactccatctcagcattcctctttagaggactcgacctgtggtaattgttagtaggagtgatctgagctgccaatgagaatcccatcacatgtg

SEQ ID NO: 139895 - DNA, 120 bp, Artificial Sequence
  ENSG00000104047_69 (sequence is synthesized)
gcacatggaacaaaagcccatggctcaaggtggtaacttttattagtggtaaaatgagaagatttacccacggaagagaatgtgccagcaagtgcagtatatcaggtatttgagactcat

SEQ ID NO: 139896 - DNA, 120 bp, Artificial Sequence
  ENSG00000104047_70 (sequence is synthesized)
gaaggaaatagtaaatttaagaataacagaattgaatggccaagtgccactaatgctctgtagaaagagggcttctttggttgcatacaaatctcatctagaatttaatagtccaagtag

SEQ ID NO: 139897 - DNA, 120 bp, Artificial Sequence
  ENSG00000104047_71 (sequence is synthesized)
ccaaactggtatttgtccttaagaataaatactggaagatcaagcacagaaagtctagaatagaggcatgtgaatggacatacttgtgtcaagtatgtacatgaactgtgaaggtctctg

SEQ ID NO: 139898 - DNA, 120 bp, Artificial Sequence
  ENSG00000104047_72 (sequence is synthesized)
tattacgtgcagtgcccaccagagagcattcagtactgaagagtctctaaacaataaagcaaactaaacacattgcctagttgacgtcatccttcctgcttcagttattcgccacccagt

SEQ ID NO: 139899 - DNA, 120 bp, Artificial Sequence
  ENSG00000104047_73 (sequence is synthesized)
gctagcacagtgggcacatgaatggaatgtccactgtggaaaggatgaagactaagcatagggttcagtagcttgagtttcaacttaccaaggctgccttagctgctgctgctgttgaat

SEQ ID NO: 139900 - DNA, 120 bp, Artificial Sequence
  ENSG00000104047_74 (sequence is synthesized)
gtccaacctacaagcaacacagacaatactgcacccctgatataataccattcttcaatatcaagttggttacattgggccccttccacactggaaggaccagcatttccttgtcataga

SEQ ID NO: 139901 - DNA, 120 bp, Artificial Sequence
  ENSG00000104047_75 (sequence is synthesized)
aatagacacaatttccagataggagtttgcttttcctctttgcagagcctcagtcagtatcaccatttgagtttacttagtattgtattgaccagcatgcgatctcacattatatcatat

SEQ ID NO: 139902 - DNA, 120 bp, Artificial Sequence
  ENSG00000104047_76 (sequence is synthesized)
cagatccggaaacctattttatggaaaaccaagcgcaggagtggacccatatccacaggatccactaataatatcacttttttcaccacttggaatttgtcagcttgatagaacattgga

SEQ ID NO: 139903 - DNA, 120 bp, Artificial Sequence
  ENSG00000104047_77 (sequence is synthesized)
acaacctgctgaaggtacagctgaacaccagctcataggcaaattctacaaggataggatgccatactccaagatacagagtatgtactggatcaattatccttatatagcatgtgcccc

SEQ ID NO: 139904 - DNA, 120 bp, Artificial Sequence
  ENSG00000104047_78 (sequence is synthesized)
aatatgaagaataaatgggtcttggaacccatttattcctaggggtagatgcaaagagagtagaagaagaggtgcctcccctccgtgccatcacttttaatgacccatatggtactttgc

SEQ ID NO: 139905 - DNA, 120 bp, Artificial Sequence
  ENSG00000104047_79 (sequence is synthesized)
acctcttcataactctgaactctgcagtgagaggtcttggtcccacaaggggacacagttttgctgagagatatataaaaaatctcactgaaaaacataagctgcagcagctacctggat

SEQ ID NO: 139906 - DNA, 120 bp, Artificial Sequence
  ENSG00000104047_80 (sequence is synthesized)
actttcggttccttgtgtctgtctagggagcagcagccaataaaaggagtcaagatcagttgaccctaatcaagaggagattggaatcctggttacacaatctgggcagaagtaataaat

SEQ ID NO: 139907 - DNA, 120 bp, Artificial Sequence
  ENSG00000104047_81 (sequence is synthesized)
gtggtgcccaagtgataaacctaccaaattgagactaatgtgtaggtgtggcaacccatcctcaaaagggcatgatggcctggaactcaggcctctcaaggaatgtgggtctgaattata

SEQ ID NO: 139908 - DNA, 120 bp, Artificial Sequence
  ENSG00000104047_82 (sequence is synthesized)
ccagataaaccaccaggagcagcagaggtggtagcagaggctgagggaaatctagaattgatagtggaggatgaggggatgtgacaagtattgatggcattcccaagccccactgcagca

SEQ ID NO: 139909 - DNA, 120 bp, Artificial Sequence
  ENSG00000104047_83 (sequence is synthesized)
gcaagcactgtaatttgtcccactaatctcccatcttctaaatttctgagaggtcaagaaaagaggtctcttgattcctttaggaactgctccctaagcatacagggagacatagatcta

SEQ ID NO: 139910 - DNA, 120 bp, Artificial Sequence
  ENSG00000104047_84 (sequence is synthesized)
tgtggagcaaagggtggattgtaataagcaaagagatacactgcctgattcactttaagaaaggactgacctcccagttgcaaggaatgaggtcagcagcctccaactgtcagctccttc

SEQ ID NO: 139911 - DNA, 120 bp, Artificial Sequence
  ENSG00000104047_85 (sequence is synthesized)
agagtctgcttcaactgcagaaggacactgtgcttgaggtcatacccttcccatgtctggtgactgaagtccagctgaatgtagctgccaaagttaccttaatgcccatgggaagcaaaa

SEQ ID NO: 139912 - DNA, 120 bp, Artificial Sequence
  ENSG00000104047_86 (sequence is synthesized)
aatcaaagagtttaaacagaattttgagaaatcccaaatcagttttttttcagcatatgacattttggagtagtttgttattcagcaatagataacagaaattggtatcaggagtggggt

SEQ ID NO: 139913 - DNA, 120 bp, Artificial Sequence
  ENSG00000104047_87 (sequence is synthesized)
gttaccataacaaaaggttaaaccttacatggtaaaaaggactttgcctctgtcattaagttaagcactttgaaatgtagagattatcctgaattatctaggtaggctcaatataagcat

SEQ ID NO: 139914 - DNA, 120 bp, Artificial Sequence
  ENSG00000104047_88 (sequence is synthesized)
gagtccttaaaagtggaagacggatacatgagaggatgtcagaatgatgtgaaatgagaagaactcaacctgctattgttggctttacaggtgagtgataggaaccacaagccccaagca

SEQ ID NO: 139915 - DNA, 120 bp, Artificial Sequence
  ENSG00000104047_89 (sequence is synthesized)
gcctctggaagctggaaaaagcaaagaaacagattctttccagagtgtccagaaaggaatgcagttcagctaacatcttgattttagatcagtgagatttttgtgttggacttctacaga

SEQ ID NO: 139916 - DNA, 120 bp, Artificial Sequence
  ENSG00000104047_90 (sequence is synthesized)
actatataagaataaattgtgttgcttaagcacactataatacatgtggcaagaagctgccagctaagccttgaagaatagtgaacaaactcttactggaggatgggaaggcagtaaata

SEQ ID NO: 139917 - DNA, 120 bp, Artificial Sequence
  ENSG00000104047_91 (sequence is synthesized)
aattattgaattattgaaataaatggaggattgagttatgcattgacagaatgcttagcaataattttgcttgtcttaatgtggaacagaaaatgaaacttaatagcttgtagatgtctt

SEQ ID NO: 139918 - DNA, 120 bp, Artificial Sequence
  ENSG00000104047_92 (sequence is synthesized)
aaggagatttccaggtgaatgttgaaagtactgatgaacttattatggctgcatctcataatgtacaggaagacatttactgagtgaactaaagaaggaactgttcaatttgaaagcaga

SEQ ID NO: 139919 - DNA, 120 bp, Artificial Sequence
  ENSG00000104047_93 (sequence is synthesized)
atttagaggaaatttttcaacctagtacttgtcatttttttatagaaaaggaaaaatagatggaagatggagccaaaatcccagagggaggagccaagaagcaaggagagcaatggatta

SEQ ID NO: 139920 - DNA, 120 bp, Artificial Sequence
  ENSG00000104047_94 (sequence is synthesized)
ggaaaccactaccagagggatgaactgaaccacaatcaaggaatagcctcttcctttggtgtagggggaccctgaaaacaatttaattttatgcttcctgtttccttgtctccttttttg

SEQ ID NO: 139921 - DNA, 120 bp, Artificial Sequence
  ENSG00000104047_95 (sequence is synthesized)
aatgatagtctctgtgtggtgttcctatcctagaaaaccttaactgggacaagctactctcaagcatcttcacttgagaaacagtaactgaggaagtttattgtatctggacatggttta

SEQ ID NO: 139922 - DNA, 120 bp, Artificial Sequence
  ENSG00000104047_96 (sequence is synthesized)
gatgataagattctgaacttaaacttatgccataatggagtgagactcttagggtacagagtaagtacatttttgcatgttagtgagacaagaactgtggccgggggcagactgtgatag

SEQ ID NO: 139923 - DNA, 120 bp, Artificial Sequence
  ENSG00000104047_97 (sequence is synthesized)
tttttgaagatgtccctcaaacaattccttcccttccttggactcctctcttcagagggtagagtccatttccttttccttttaatctggattggccttctaactcactttgaccaataa

SEQ ID NO: 139924 - DNA, 120 bp, Artificial Sequence
  ENSG00000104047_98 (sequence is synthesized)
aatgtggtaaaagtaaggtctggcagttttcactttcactctcctgaaccttcatattagaattccaggatatccttctagagatatccatatctctagggacatggtgagtccctagag

SEQ ID NO: 139925 - DNA, 120 bp, Artificial Sequence
  ENSG00000104047_99 (sequence is synthesized)
acaccacatggaaaggccacctagggaagaactgagatgccccagtcaatagcactgccttagtcagtttgggctagtataacagaaatatcatagattgagtgactttttttctttaaa

SEQ ID NO: 139926 - DNA, 120 bp, Artificial Sequence
  ENSG00000104047_100 (sequence is synthesized)
aaaatgagattgtggaacctgaaaatacagtgtagtaagagtggagagaaaggccacctaaggaagaactgagacgtcccagtcaatagcactgccttagtcagttggagctactgtaac

SEQ ID NO: 139927 - DNA, 120 bp, Artificial Sequence
  ENSG00000104047_101 (sequence is synthesized)
aaaaaatatcatagattgagtgacttaaacaacagaaatttatatcttacatttctggagactgaaaatatggaaatccaagatcagagtttcagcatggttaggtgtttagtgggcgct

SEQ ID NO: 139928 - DNA, 120 bp, Artificial Sequence
  ENSG00000104047_102 (sequence is synthesized)
cccttcctggtttgcagacagccatcttcctgctatatcctcacatgatgcagagagagagaactctggtatctttgtccccttataagggcaccaatctcatcatggagggtcttcaac

SEQ ID NO: 139929 - DNA, 120 bp, Artificial Sequence
  ENSG00000104047_103 (sequence is synthesized)
ctcatggcttcttggaaccaaattacttcccaaagtcctcacctccaaatctagcacattgaggtttagggcttcaacatatgaatttcagtgcatagaaagcaccaagtcctcagacaa

SEQ ID NO: 139930 - DNA, 120 bp, Artificial Sequence
  ENSG00000104047_104 (sequence is synthesized)
agagaacttgaaccttctaactcagcttagccattatctgcatgcaaccacataagtgaccctgggtaacaccatctggagctgaagaaccaccagccagtacacagaaatgagaaattt

SEQ ID NO: 139931 - DNA, 120 bp, Artificial Sequence
  ENSG00000104047_105 (sequence is synthesized)
taaaatggttgatttaggtaattaagttttggggtggtttattacatagcaattgataactgatacaacagtcttttcgttagtagaagagggggtaagaaagaaagacttatgaagaaa

SEQ ID NO: 139932 - DNA, 120 bp, Artificial Sequence
  ENSG00000104047_106 (sequence is synthesized)
agacctgtagaaaatcgggcctacgtacctctatttttttttcatactcccgtgttttttttagtccatgctggtggtatcctcatcaatgcaattttctttaaaactctgtgagccttt

SEQ ID NO: 139933 - DNA, 120 bp, Artificial Sequence
  ENSG00000104047_107 (sequence is synthesized)
atatcagattagtccaccccattagaacaaaagcaacttctataaatattgagacattccctttctacctttggctaagaattggggtgctatagataattcccaaaagattatctagcc

SEQ ID NO: 139934 - DNA, 120 bp, Artificial Sequence
  ENSG00000104047_108 (sequence is synthesized)
tacagggccgatgaggtatagcttgaagtcattctaaagtcttcacaaaggatcttacagcctttgattttattatcactctgggaccacgttttactgttggcacgttcggcttttctc

SEQ ID NO: 139935 - DNA, 120 bp, Artificial Sequence
  ENSG00000104047_109 (sequence is synthesized)
atcttttccctgagatcatttatgatgtggaaattactttgctggctgaagttgggaatagaaaacagtagagaatacttcaagagtattctaggtatgcactaagtttatgggaagata

SEQ ID NO: 139936 - DNA, 120 bp, Artificial Sequence
  ENSG00000104047_110 (sequence is synthesized)
tgccatctacataatttaccttcctctctaggcccatcataaaaatctttgaaaaattaatactacattttagtatgaatataagttaaacttagaggtgatatctattttgtggttaaa

SEQ ID NO: 139937 - DNA, 120 bp, Artificial Sequence
  ENSG00000104047_111 (sequence is synthesized)
tgtgttataaacatttatttagtgaaatacagtacaattacaacaagcatcaatgaatatttaatgagcagctgttaatttctgaagcagaaagaaagatgaataaaagttctggtttta

SEQ ID NO: 139938 - DNA, 120 bp, Artificial Sequence
  ENSG00000104047_112 (sequence is synthesized)
cttttaaaagtgaaggctaactgttagctcaagaaatactttatgtttgtcctatatgaaagtgttgattgcacctggttctttgctgtaaattaaataaaaattcaaatatttgtaaaa

SEQ ID NO: 139939 - DNA, 120 bp, Artificial Sequence
  ENSG00000104047_113 (sequence is synthesized)
tcgggctcgggcggagctggagacgtgtggagctgttcgaggactcgcgggtgtgcaggtctgagtaccactccgatccctggtggaggtccccgcgcctctctggagaccagtggtctg

SEQ ID NO: 139940 - DNA, 120 bp, Artificial Sequence
  ENSG00000104047_114 (sequence is synthesized)
agacgtgtggagctgttcgaggactcgcgggtgtgcaggtctgagtaccactccgatccctggtggaggtccccgcgcctctctggagaccagtggtctggccccagaggtgcggccgcg

SEQ ID NO: 139941 - DNA, 120 bp, Artificial Sequence
  ENSG00000104047_115 (sequence is synthesized)
ggaagtggacattctttgtcaggaccctagcggaggtcgcgctgggtgtcgcctgtgagggggatcctcggtttctgcgcggtctcttgctttttttaggatcttgcgggccctttggga

SEQ ID NO: 139942 - DNA, 120 bp, Artificial Sequence
  ENSG00000104047_116 (sequence is synthesized)
ttgtgaaggagaatccaatgcctgaagatctgtcactgtctcccatgtcctagatgggaccatcaagttgcaggaaaaccagctcagggatcctgctgattttacattatgcttccattg

SEQ ID NO: 139943 - DNA, 68 bp, Artificial Sequence
  ENSG00000104047_117 (sequence is synthesized)
tccagttgaaaatgtacctattgaacagattccacttgtgaagccgctccccatcactcgcattacca

SEQ ID NO: 139944 - DNA, 120 bp, Artificial Sequence
  ENSG00000104047_118 (sequence is synthesized)
ttgcatgctccttaggagaatccaatgcctgaagatctgtcactgtctcccatgtcctagatgggaccatcaagttgcaggaaaaccagctcagggatcctgctgattttacattatggt

SEQ ID NO: 139945 - DNA, 78 bp, Artificial Sequence
  ENSG00000104047_119 (sequence is synthesized)
ttgcactcatttttcctggacctcagtctatctcaataaaagatatttcttttcatctgcaaaaaaggattcaaaata

SEQ ID NO: 139946 - DNA, 120 bp, Artificial Sequence
  ENSG00000104047_120 (sequence is synthesized)
acatgtataggctaatggaaagtttactagccaagaataagtaagtgtggaatttaatatgatcttcacagtttgctccgaaaaaacaagaacttgaggataatactgatgtggtgctca

SEQ ID NO: 139947 - DNA, 120 bp, Artificial Sequence
  ENSG00000104047_121 (sequence is synthesized)
gagaccctagggagagggaaggtagtttcaactgagaccgagcgtcatgaggaaactctgatgtagtgttcagccagaagtagactgatgtaaaatcatttgtgaactgcctacttaaat

SEQ ID NO: 139948 - DNA, 120 bp, Artificial Sequence
  ENSG00000104047_122 (sequence is synthesized)
ggtaaattttccataactagaagttggtttgatgattagaagcaattgggcctaacttataaatgatcattgggcctaacttataaatgattgctaggcctaagcggggagggtaggaga

SEQ ID NO: 139949 - DNA, 120 bp, Artificial Sequence
  ENSG00000104047_123 (sequence is synthesized)
tacagcatttgaaaccctaattgaaaactatttgaggaattcatttgtaggccaaggtcctccaggggtgtattatttatactgttctgtccccaacataattgtccaggaagaaaaaaa

SEQ ID NO: 139950 - DNA, 120 bp, Artificial Sequence
  ENSG00000104055_0 (sequence is synthesized)
actctggcaccagtttgctgaagctccagaccgcccagctgttctgtggggagcatcccaggaaccggaggcagctaccatggcccaagggctagaagtggccctcacagacctccagag

SEQ ID NO: 139951 - DNA, 120 bp, Artificial Sequence
  ENSG00000104055_1 (sequence is synthesized)
ctccagaaataatgtgcggcaccacacggaggagatcactgtggaccacctgcttgttcgccggggccaggccttcaacctcaccctgtacttcaggaaccggagcttccagccaggcct

SEQ ID NO: 139952 - DNA, 120 bp, Artificial Sequence
  ENSG00000104055_2 (sequence is synthesized)
ggacaacatcatcttcgtggttgaaactggaccgctgccagacctggccttggggactcgggctgtgttcagcctggcacgccatcacagccccagcccctggattgcctggctggagac

SEQ ID NO: 139953 - DNA, 120 bp, Artificial Sequence
  ENSG00000104055_3 (sequence is synthesized)
caatggggccacctccacagaggtgagcttgtgcgctcctcccacggcggccgtgggtcggtacctcttgaaaatccacatcgactccttccaggggtctgtgacggcctaccagctagg

SEQ ID NO: 139954 - DNA, 120 bp, Artificial Sequence
  ENSG00000104055_4 (sequence is synthesized)
ggagttcatcctgcttttcaatccctggtgcccagaggatgctgtctacttggacagtgaaccccagaggcaggagtatgtcatgaatgattatggcttcatctaccaaggcagcaagaa

SEQ ID NO: 139955 - DNA, 120 bp, Artificial Sequence
  ENSG00000104055_5 (sequence is synthesized)
ctggatccgcccatgtccctggaactatggacagtttgaagacaaaatcatagacatctgcctgaagctgctagacaagagcctgcacttccagactgacccagccacagactgtgctct

SEQ ID NO: 139956 - DNA, 120 bp, Artificial Sequence
  ENSG00000104055_6 (sequence is synthesized)
gcggggaagccccgtctacgtcagcagagtggtgtgtgccatgatcaacagcaatgatgataatggggtgctcaatggaaactggagtgagaattacacagacggcgccaaccctgcgga

SEQ ID NO: 139957 - DNA, 120 bp, Artificial Sequence
  ENSG00000104055_7 (sequence is synthesized)
gtggacgggcagcgtggccatcctgaagcagtggaacgccacaggctgccagcccgtgcgctacgggcaatgctgggtctttgctgccgtcatgtgcacagtgatgaggtgtctggggat

SEQ ID NO: 139958 - DNA, 120 bp, Artificial Sequence
  ENSG00000104055_8 (sequence is synthesized)
ccctacccgtgtgatcaccaacttcgactctggccacgatacagatggaaacctgatcatagatgagtattatgacaacacaggcaggattttggggaataagaagaaggatactatctg

SEQ ID NO: 139959 - DNA, 120 bp, Artificial Sequence
  ENSG00000104055_9 (sequence is synthesized)
gaacttccatgtctggaatgagtgctggatggcccggaaggatctgccccctgcatatggaggctggcaggtgctggacgccacacctcaggagatgagcaacggcgtctactgctgtgg

SEQ ID NO: 139960 - DNA, 120 bp, Artificial Sequence
  ENSG00000104055_10 (sequence is synthesized)
ccctgcctctgtcagagccatcaaagaaggagaagtggacctgaactatgacacgccctttgtgttttcgatggtgaatgctgactgcatgtcctggctcgtccagggagggaaggagca

SEQ ID NO: 139961 - DNA, 120 bp, Artificial Sequence
  ENSG00000104055_11 (sequence is synthesized)
agaactacaagtatgaagaaggatccctccaggagaggcaggtgtttctgaaggctctgcagaagctgaaggctagaagcttccatggctcccaaagaggagcagagttgcaaccttcca

SEQ ID NO: 139962 - DNA, 120 bp, Artificial Sequence
  ENSG00000104055_12 (sequence is synthesized)
ggcccacatcactgagccaggacagccctcggagcctgcatacaccttcccttcgacccagtgatgtggtgcaagtctccctgaaattcaagctgctcgacccgcccaacatgggccagg

SEQ ID NO: 139963 - DNA, 120 bp, Artificial Sequence
  ENSG00000104055_13 (sequence is synthesized)
atatatgctttgtcctgctggccctcaacatgtcctcccagttcaaggacctcaaagtgaacctgagtgcccagtctctgctgcacgatggcagccccctgtccccattctggcaggaca

SEQ ID NO: 139964 - DNA, 120 bp, Artificial Sequence
  ENSG00000104055_14 (sequence is synthesized)
cagcgttcatcacactctctcctaaagaagcaaagacctacccctgcaaaatctcctattcccagtacagccagtacctgtcaacagacaagctgatccgcatcagtgccctgggtgaag

SEQ ID NO: 139965 - DNA, 120 bp, Artificial Sequence
  ENSG00000104055_15 (sequence is synthesized)
agaaaagcagtcctgagaaaatcctggtgaacaagatcatcaccttatcttatccaagcatcacgattaatgttctaggagcagccgttgtgaaccagccactctccatacaggtgatat

SEQ ID NO: 139966 - DNA, 120 bp, Artificial Sequence
  ENSG00000104055_16 (sequence is synthesized)
tttcaaaccccctctcggagcaggttgaggactgtgtgctgactgtggaaggaagtggcctcttcaagaaacagcagaaagtcttccttggagtcctcaaaccccaacaccaagcaagca

SEQ ID NO: 139967 - DNA, 120 bp, Artificial Sequence
  ENSG00000104055_17 (sequence is synthesized)
tcattctggagaccgtccccttcaagagtggacaaaggcagatccaagctaatatgagaagcaacaagtttaaggacattaagggttacaggaatgtttatgtagactttgcattataaa

SEQ ID NO: 139968 - DNA, 120 bp, Artificial Sequence
  ENSG00000104055_18 (sequence is synthesized)
ttctggaacaacgcgccagacgtgtgaatttcaagcttcaggaaaaggagcaagttcaaatgcaagctgcgccattccccaccacaacagaggcttcacagggctccagcaagagccaca

SEQ ID NO: 139969 - DNA, 120 bp, Artificial Sequence
  ENSG00000104055_19 (sequence is synthesized)
gaggggatgacgtgttcattttctgtctctcctgactccactagaaatttaagctccatgagggcaaagactttgctttgtttactacccctatactcagaaccatttctggcatatgct

SEQ ID NO: 139970 - DNA, 120 bp, Artificial Sequence
  ENSG00000104055_20 (sequence is synthesized)
aggcactcaacaaatattttttgaatgaatgaataggagactccagcatccagagaacaggtaggaaatgtctatggatggatatttccctggaccatttgcacagctcccctggactct

SEQ ID NO: 139971 - DNA, 120 bp, Artificial Sequence
  ENSG00000104055_21 (sequence is synthesized)
tttcagggcccagggattccactgtgtcccatccagagattccaggattccagtctcctatccagaagcgtgatttggcacagaggtcagaggatactggtaggacttggccatgactta

SEQ ID NO: 139972 - DNA, 120 bp, Artificial Sequence
  ENSG00000104055_22 (sequence is synthesized)
actgccccctgccccagatatccaggaaagaaaaagacaggctgaacagctcactgttgttttgttgttgcgaaagctaattccctagtatgaataaacttcagaccttgctctcctttg

SEQ ID NO: 139973 - DNA, 120 bp, Artificial Sequence
  ENSG00000104055_23 (sequence is synthesized)
cacagcttgctagactttactggctcaggcagtgcttgtctgagcagtcagcatccccacctttgcctagaatctctcccatgagctccagaagtggggaaggaagttggaaatatcact

SEQ ID NO: 139974 - DNA, 120 bp, Artificial Sequence
  ENSG00000104055_24 (sequence is synthesized)
acgggtccggaatctacagctcacaggaacttccatgtctggaatgagtgctggatggcccggaaggatctgccccctgcatatggaggctggcaggtgctggacgccacacctcaggag

SEQ ID NO: 139975 - DNA, 120 bp, Artificial Sequence
  ENSG00000104055_25 (sequence is synthesized)
atgagcaacggtgaggctctccagaagaaaggcaggccccgctcccgtggaaagcaccccacccctgcccagccctgcaacaaacagcccaccgaggctcccctgttctccttcaggcgt

SEQ ID NO: 139976 - DNA, 120 bp, Artificial Sequence
  ENSG00000104055_26 (sequence is synthesized)
ggagactcttttctgggaggcaaagagaggtccacaagaggaagacctgtcactaattaattacttttttgagacaaggtctggctttgctgcccaggctggagcacagtggtatgatca

SEQ ID NO: 139977 - DNA, 120 bp, Artificial Sequence
  ENSG00000104055_27 (sequence is synthesized)
ctcagcctcccaagtaggtgggactataggcatgtgccatgatgcctagttaatttttttttttttttgagacgagatcttccttttttgcccaggttaatcttgaactcctgagctcaa

SEQ ID NO: 139978 - DNA, 120 bp, Artificial Sequence
  ENSG00000104055_28 (sequence is synthesized)
tccttttttgcccaggttaatcttgaactcctgagctcaagcaatcctctcacctcagactcccaaagtactaagattactggcatgagccatcgtgcctggctatccacagaggtttta

SEQ ID NO: 139979 - DNA, 120 bp, Artificial Sequence
  ENSG00000104059_0 (sequence is synthesized)
cgcgtcccgccgcgctgccccgcagcctgtcccgcctgcgcgagtgcccgggccgctcccgcatcgtgctggcgctcggggccacgcagatggcgctcggatgcctcatcgtggcagtca

SEQ ID NO: 139980 - DNA, 120 bp, Artificial Sequence
  ENSG00000104059_1 (sequence is synthesized)
gcgctcggatgcctcatcgtggcagtcagcttcgccgcgctggcgctcaccacctcggcccgcgtccgccactcctgccccttctgggcaggcttctcggtgctgctgtcgggactcata

SEQ ID NO: 139981 - DNA, 120 bp, Artificial Sequence
  ENSG00000104059_2 (sequence is synthesized)
ggtgtcgtctcctggaagaggcctctctcccttgtgataacctttttcatgctgctttctgcagtgtgtgtaatgctgaatttggctggttcaattctctcttgtcagaatgctcagcta

SEQ ID NO: 139982 - DNA, 120 bp, Artificial Sequence
  ENSG00000104059_3 (sequence is synthesized)
gtcaactccctagaaggctgccagttgattaagtttgacagtgtggaggtgtgtgtctgctgtgagctgcagcaccagtcgtccggctgcagcaacctcggggagacgctgaagctgaac

SEQ ID NO: 139983 - DNA, 120 bp, Artificial Sequence
  ENSG00000104059_4 (sequence is synthesized)
ccgctgcaggagaactgcaacgctgtgaggctgaccttgaaggatctcctcttcagcgtgtgtgccctcaacgtcctgtccactatcgtgtgtgcgctggccacagccatgtgctgtatg

SEQ ID NO: 139984 - DNA, 120 bp, Artificial Sequence
  ENSG00000104059_5 (sequence is synthesized)
cagatggtctcctccgatgtcctgcagatgttccttccgcagaggtcacatcctgccaaccccacctgcgtgactcctcacggcaccgttctccaccagaccctggatttcgacgagttc

SEQ ID NO: 139985 - DNA, 120 bp, Artificial Sequence
  ENSG00000104059_6 (sequence is synthesized)
atccccccactcccgcctccaccctattaccccccagagtacacctgcacaccgtccactgaggcccagaggggcctccacctggactttgctccgtctccattcggcactttgtatgac

SEQ ID NO: 139986 - DNA, 120 bp, Artificial Sequence
  ENSG00000104059_7 (sequence is synthesized)
gtggccatcaatagccccggcctgctctatcctgctgagctcccccctccgtacgaggcggtggtgggccagccccctgccagccaggttacaagtataggtcagcaggtggccgagtcc

SEQ ID NO: 139987 - DNA, 120 bp, Artificial Sequence
  ENSG00000104059_8 (sequence is synthesized)
agctccggggacccaaacaccagtgctggcttcagcactccagtaccagctgacagcacaagcctcctggtgtccgagggcactgctacgccaggttccagcccatcccccgatggccct

SEQ ID NO: 139988 - DNA, 120 bp, Artificial Sequence
  ENSG00000104059_9 (sequence is synthesized)
gtgggcgccccagcaccctccgaacctgcccttccccctggccatgtgtctccagaggatcctggcatgggctcacaggtgcagccaggtcccgggcgtgtgtcccgctccaccagcgac

SEQ ID NO: 139989 - DNA, 120 bp, Artificial Sequence
  ENSG00000104059_10 (sequence is synthesized)
cccaccttgtgcacatctagcatggcaggcgatgcctcttcacacaggccgtcgtgtagccaggacctggaagcgggactgtctgaggctgtgcctgggagcgcttccatgtctcgctct

SEQ ID NO: 139990 - DNA, 120 bp, Artificial Sequence
  ENSG00000104059_11 (sequence is synthesized)
gccacggctgcctgtcgggcccagctttcaccagcgggggacccagatacctggaaaactgaccaacggccaacaccagagcccttcccagcgacctccaaagagcggccacgctcttta

SEQ ID NO: 139991 - DNA, 120 bp, Artificial Sequence
  ENSG00000104059_12 (sequence is synthesized)
gtggacagcaaggcctatgcggatgccagggttttggtggccaagtttttggaacactcacactgtgccctccccaccgaggcacagcacatggtgggtgccatgcgcttggctgtcacc

SEQ ID NO: 139992 - DNA, 120 bp, Artificial Sequence
  ENSG00000104059_13 (sequence is synthesized)
aacgaggagcgcctcgaggaggaggccgtcttcggcgctgacgttctggaccaggtatgaaggagccacatttctgaccgtggacaccaacgcctggcgccacagatgttcttggcagaa

SEQ ID NO: 139993 - DNA, 120 bp, Artificial Sequence
  ENSG00000104059_14 (sequence is synthesized)
gccatcatgcctgacaaagaggccttcaggcccagcttggcggaggataaatgtgggggggacacccaggatgatctgggggcggtgtgggcagggaactgttaccccctctctcgaggg

SEQ ID NO: 139994 - DNA, 120 bp, Artificial Sequence
  ENSG00000104059_15 (sequence is synthesized)
gagccgagcagtgtctctttggggattgcatttcctgcctagcccagtaattcggaaagatgactttcacgtccacagtgaactctctggttttatctggcgtgcagcaccttgaactga

SEQ ID NO: 139995 - DNA, 120 bp, Artificial Sequence
  ENSG00000104059_16 (sequence is synthesized)
gcagtgttgcacaaatgtgaatacagcaacaggcgacacttacgtcacctaaagactcaaagtatctccaaaatcagggccttccaaagcaggagtctcccatcccccatttaacttagt

SEQ ID NO: 139996 - DNA, 120 bp, Artificial Sequence
  ENSG00000104059_17 (sequence is synthesized)
gttcagtggacagagggtgacatcgagtcatgaaacattttctcatgtggctcgatggctctatcattaggcgttcatcacgctctggcctatttcctgtgaaaggaaataggtagtgtt

SEQ ID NO: 139997 - DNA, 120 bp, Artificial Sequence
  ENSG00000104059_18 (sequence is synthesized)
agcacagatggcagcctgggcccaactttctgtccacagggctattgtgcaaacaaatgtgcagtgcgggcctctgccatagcccggccccccccagggaacaggccggtgttgcggggg

SEQ ID NO: 139998 - DNA, 120 bp, Artificial Sequence
  ENSG00000104059_19 (sequence is synthesized)
ccttgagctcggcctccctccgtggggtgccttccccccctcctcttgggccccctttctccaggctcccatcctgtccctggagcagttgtgtgatccgtaacaacaagtgccgattcc

SEQ ID NO: 139999 - DNA, 120 bp, Artificial Sequence
  ENSG00000104059_20 (sequence is synthesized)
cagctcctttgtgtctgagctcacttgattgagctcagcgggtcacagttctgcaggagagaggccggtttctctgagaagtagcccctcctgataaagcaggtccctttgacccagagc

SEQ ID NO: 140000 - DNA, 120 bp, Artificial Sequence
  ENSG00000104059_21 (sequence is synthesized)
tgacctttccccgggcatgcggcagcagacacacctgcgcaggaggatcataaaccacttacaaacccacacgagaagggaagcagacacccaacgtgctgcttatggagaagcagacac

SEQ ID NO: 140001 - DNA, 120 bp, Artificial Sequence
  ENSG00000104059_22 (sequence is synthesized)
gcccagcttggggacagcctggggaccttggactttcttagcccccatccccttgttttctggtggcatcagtggcagctgctcccaacaatggccgtggaacagcgccatccacgagaa

SEQ ID NO: 140002 - DNA, 120 bp, Artificial Sequence
  ENSG00000104059_23 (sequence is synthesized)
ctttgtgcagtgatggaaatgcctgttcagggccactagcagccacagcccctgagctgcgttgggtgggccctgcggtgaacaaaacagcctagaggccaaggtctccccagagagccc

SEQ ID NO: 140003 - DNA, 120 bp, Artificial Sequence
  ENSG00000104059_24 (sequence is synthesized)
atgagcctggcatgggggcgcagggggaccagagggtgtcttccactcctgggtgccagggcagggggctcacgctgctgttccctcggctttgtggggcttgtccttgagctcccccaa

SEQ ID NO: 140004 - DNA, 120 bp, Artificial Sequence
  ENSG00000104059_25 (sequence is synthesized)
ttccctaatgccactgtggccagtgtgctggggagcttctgtgtggctggaagctgggaagggggtgaggttccaatccaggtgcccagagccttcctccagtcctttatccctgccctg

SEQ ID NO: 140005 - DNA, 120 bp, Artificial Sequence
  ENSG00000104059_26 (sequence is synthesized)
ggggctgcggtgtgggactccttcagctgtggtcggctgaaaaggcttcgattgctttagagagctgaaaacacataagccaggccttttgatgacaacctgcacttttgcaggagagac

SEQ ID NO: 140006 - DNA, 120 bp, Artificial Sequence
  ENSG00000104059_27 (sequence is synthesized)
gtactagagatgaatttttgagcactttattcagactataaaacaggaaatctctaattttcctcaagtgggggcttttgaattccctcaaggcaagtccctttgcaggtgaaattaatt

SEQ ID NO: 140007 - DNA, 120 bp, Artificial Sequence
  ENSG00000104059_28 (sequence is synthesized)
ggtggattttcagaatggccgccctggagccgagcttcagccacgcctgacgccctggcctctgaatctccactgtctctgaggtgcgctggggccacgccgcaggggtttcacctgctt

SEQ ID NO: 140008 - DNA, 120 bp, Artificial Sequence
  ENSG00000104059_29 (sequence is synthesized)
gggggggtccacactagggcttgggggttcacacagcattgtccctgggctgagcccttgggtgggctagagctgcagtcctcagacatggctgcaattccagcgaggccaagaccacca

SEQ ID NO: 140009 - DNA, 120 bp, Artificial Sequence
  ENSG00000104059_30 (sequence is synthesized)
gccacccagtggactcggtctctggggtgttctcctcatgcagccggggcagaggcctactggaccccctcagcctgctgctcagcatccttcccttctctgcagcagggcccggtccca

SEQ ID NO: 140010 - DNA, 120 bp, Artificial Sequence
  ENSG00000104059_31 (sequence is synthesized)
atggccaatggggctgctgccccagcagtgcctccctgtaggcccctcacctgcaccccaccttcacccagctctgggtttgcgctggtggcagctctgttttgtggatacggaaactgt

SEQ ID NO: 140011 - DNA, 120 bp, Artificial Sequence
  ENSG00000104059_32 (sequence is synthesized)
acccaacttgatgccgctgggctggaaccttctgccccttcgaaatgaggcagtcagggacggggtggggtgcccccatcagccccgctgctcagggccactcatggactctaggagggt

SEQ ID NO: 140012 - DNA, 120 bp, Artificial Sequence
  ENSG00000104059_33 (sequence is synthesized)
ccaggttctgggcttcctgggaaggtccccagaagagagaggtgctggtagactagggaatgtgctggcaacttgacccagaagctgtggtccccttggccccggctccacggcatccgg

SEQ ID NO: 140013 - DNA, 120 bp, Artificial Sequence
  ENSG00000104059_34 (sequence is synthesized)
gtaccagcagcaagagcccaggccccgggctgcacgtcagctcacagcccaggagaaagctggctgcttcccctccctatgcgtctttcccccgctccaatcatgttccatctgggatct

SEQ ID NO: 140014 - DNA, 120 bp, Artificial Sequence
  ENSG00000104059_35 (sequence is synthesized)
gaaatgggccaactgtggctgctttgggggtgacacgctccttctccaactcagctgggccccgggcatcccctgccctcccctgagacccaaagggggttggcacctgctgtgacacca

SEQ ID NO: 140015 - DNA, 120 bp, Artificial Sequence
  ENSG00000104059_36 (sequence is synthesized)
ccgttgaccccagcctgggggccacaaggttgctgagtggggagaacatggaccccaactctatggcaagcaagatcgcagaagggggagcatcatccgcaaggacttcaggtctccctt

SEQ ID NO: 140016 - DNA, 120 bp, Artificial Sequence
  ENSG00000104059_37 (sequence is synthesized)
ggctggagatgaggatccacattaaatgcttgtaacacaccaggccacagaaagctcgctacacacacatgcttctccccacccatgctgactctcagaggctgctaaggcagaatttat

SEQ ID NO: 140017 - DNA, 120 bp, Artificial Sequence
  ENSG00000104059_38 (sequence is synthesized)
aggaaattgttttcaagccaccagagacctgtctgtacaactggaaaggctgtatttatttaatgtacctcaaggtgttttaataatgatccgtgttttaataaaaagaagtatttctgg

SEQ ID NO: 140018 - DNA, 120 bp, Artificial Sequence
  ENSG00000104059_39 (sequence is synthesized)
gctttaagtgttatgttgagacaccagttaaatatattccttcagatatgagaaatgcattctgtattttaaagatgagagagctcccagtagcagaaaagacgtggatttgggcagcat

SEQ ID NO: 140019 - DNA, 120 bp, Artificial Sequence
  ENSG00000104059_40 (sequence is synthesized)
gcttgcagaagcatctctggagcctggagcgcagactcacacctaccctgtgacgctaaaggattcccgtctgttcttcttaagaatctgcacttaggactcagaggcaggtgctgctgt

SEQ ID NO: 140020 - DNA, 120 bp, Artificial Sequence
  ENSG00000104059_41 (sequence is synthesized)
cacactgaaacaggctcctttgaactgagccattttcctgtgttctgaactgtgtcactcacgcgtaccctcgggggtcgaatgcctgttaacggtgaggtctgtctgtgttcctctgtc

SEQ ID NO: 140021 - DNA, 120 bp, Artificial Sequence
  ENSG00000104059_42 (sequence is synthesized)
ggccgggcggcccctgtggtcgctcgctgacttggcttcggggacttctggtttcccgcgtccgcccagaacggcgtggtttgtgggcgacgggactgggcaggcgacccgcatccggcg

SEQ ID NO: 140022 - DNA, 120 bp, Artificial Sequence
  ENSG00000104059_43 (sequence is synthesized)
tcctggggcagggggcaggcaagggggggcggcgtgctttctgagctccagaccttaaggatgaccgattttcagactcttaaccaccaaatcagagaagccagtggtgaacaaatctcc

SEQ ID NO: 140023 - DNA, 120 bp, Artificial Sequence
  ENSG00000104059_44 (sequence is synthesized)
attttgatgaaagtcggtttttttcctatattaacaaagaatggacgttatgggaatgggagagatatatatgcagagcagatatttatgaagagaggcacttgttctgagaactcttga

SEQ ID NO: 140024 - DNA, 120 bp, Artificial Sequence
  ENSG00000104059_45 (sequence is synthesized)
catctgtaactgcatttggtggatcgtgctgaaatacatcgcataggcttgtaaactcagtgctgctgtcgggactcataggtgtcgtctcctggaagaggcctctctcccttgtggtaa

SEQ ID NO: 140025 - DNA, 120 bp, Artificial Sequence
  ENSG00000104064_0 (sequence is synthesized)
gctttctttgtgtggctgaagcgctagaaatggcatattttctttcccttcgttaaaaaatcagaccctctttcccctctctccccgcgggaacacagctagggagtgggtaggagcagg

SEQ ID NO: 140026 - DNA, 120 bp, Artificial Sequence
  ENSG00000104064_1 (sequence is synthesized)
atctgccgacgagggcagaggcggaaaatcctcgggcgatgagctgaagagggccgggtccgggagggatgctgggagcttgactcactcgcacaccatgtgtccctccgcgcgcagcac

SEQ ID NO: 140027 - DNA, 120 bp, Artificial Sequence
  ENSG00000104064_2 (sequence is synthesized)
gggggacttttcggtggggattttgggcgccgaccagacgcggcattttcggaaaatagcgccctgtgcagctgaagcgctttgtgtgtagcggggccgcgtcagcccggccgggtacga

SEQ ID NO: 140028 - DNA, 120 bp, Artificial Sequence
  ENSG00000104064_3 (sequence is synthesized)
ggcgcctcgggtccccgcaccacctcctgctgccttcccgtcgccgctcccgaagcttttccagatgtccctggtagatttgggaaagaagcttttagaagcggcacgagcaggtcaaga

SEQ ID NO: 140029 - DNA, 120 bp, Artificial Sequence
  ENSG00000104064_4 (sequence is synthesized)
tgatgaagttcgtattttgatggcaaatggagctccctttactacagactggctgggaacttctccacttcatctagcagcacagtatggtcattattccaccacagaggtactgctgcg

SEQ ID NO: 140030 - DNA, 120 bp, Artificial Sequence
  ENSG00000104064_5 (sequence is synthesized)
agctggtgtgagcagagatgccagaaccaaagtggaccgaacaccattacatatggcagcttctgagggccatgccagcatagtagaggttttacttaagcatggtgctgatgtcaatgc

SEQ ID NO: 140031 - DNA, 120 bp, Artificial Sequence
  ENSG00000104064_6 (sequence is synthesized)
aaaggacatgttaaagatgacagctctccattgggccacagaacacaatcatcaagaggtggtggaacttttaatcaaatatggtgctgatgtacacacgcaaagtaaattttgtaaaac

SEQ ID NO: 140032 - DNA, 120 bp, Artificial Sequence
  ENSG00000104064_7 (sequence is synthesized)
tgcatttgatatttcaatagacaatggaaatgaagatttagcagagatattacagattgctatgcagaaccaaatcaacacaaacccagagagtcctgacactgtgacaatacatgctgc

SEQ ID NO: 140033 - DNA, 120 bp, Artificial Sequence
  ENSG00000104064_8 (sequence is synthesized)
aacaccacagtttatcattggacctggaggggtggtgaacctaacagatgaaacgggtgtatctgctgttcagtttggaaactcttctacatcagtattagctacattagctgccttagc

SEQ ID NO: 140034 - DNA, 120 bp, Artificial Sequence
  ENSG00000104064_9 (sequence is synthesized)
tgaagcatctgctccattgtccaattcttcagaaactccagtagtggccacagaagaagtagttactgcagaatctgtggatggtgccattcagcaagtagttagttcagggggtcagca

SEQ ID NO: 140035 - DNA, 120 bp, Artificial Sequence
  ENSG00000104064_10 (sequence is synthesized)
agtcatcacaatagttacagatggaattcagcttggaaatttgcactctattccaaccagtggaattggtcagcccatcattgtgaccatgccagatggacaacaagtattaacagtacc

SEQ ID NO: 140036 - DNA, 120 bp, Artificial Sequence
  ENSG00000104064_11 (sequence is synthesized)
agcaacagacattgctgaagaaactgttataagtgaagaaccaccagctaagagacaatgtatcgaaataattgaaaaccgggtggaatctgcagaaatagaagagagagaagctcttca

SEQ ID NO: 140037 - DNA, 120 bp, Artificial Sequence
  ENSG00000104064_12 (sequence is synthesized)
gaaacagctggatgaagcaaatcgagaagcacaaaaatatcgacagcagctcctaaagaaagaacaggaagcagaggcctacagacagaagttggaagctatgactcgtcttcagactaa

SEQ ID NO: 140038 - DNA, 120 bp, Artificial Sequence
  ENSG00000104064_13 (sequence is synthesized)
taaagaagctgtttaattgaaatgaacatgtagtttgattttacttttggtcaagaaagaatacaatcttgaactgtacacaacaaaggtacagccatgggaatacagaatgatagaaga

SEQ ID NO: 140039 - DNA, 120 bp, Artificial Sequence
  ENSG00000104064_14 (sequence is synthesized)
gactacagatggataattggacttaagccatgagctctgagttcttgtaacataaaactttactttagaagttgtgaaatgtatttaaaactgaattctgtaaatagttttttttttttt

SEQ ID NO: 140040 - DNA, 120 bp, Artificial Sequence
  ENSG00000104064_15 (sequence is synthesized)
acagttccaaatgagttgataaagattgttgaagagatccaaaaccagaataagccactgtttttgtgaattctttttgattttagtacaaaccttaatttctcagaaacggaacagttt

SEQ ID NO: 140041 - DNA, 120 bp, Artificial Sequence
  ENSG00000104064_16 (sequence is synthesized)
taagggtgatcgttgttggttaggccaaatgttgtgtaataattatggtggactgatgctggaattactcctgtaggtataaacctctgtatgaagagaagatttctcccaggaaatctt

SEQ ID NO: 140042 - DNA, 120 bp, Artificial Sequence
  ENSG00000104064_17 (sequence is synthesized)
tgtacagctttaagttgtgtcagattctctgaaaacattttttagaaagcaaaatttttatatttgttcaatttcagctatacccaagtagatttacatgtatatgaagcaaatattttt

SEQ ID NO: 140043 - DNA, 120 bp, Artificial Sequence
  ENSG00000104064_18 (sequence is synthesized)
aaaaatttctgtttgtacatattctgcatgttttataatttcaaaatgcatcacttacataggtatttctcccacagaaatgatgaaagtgaccagaaaaaaacaaaaacaaaacccctt

SEQ ID NO: 140044 - DNA, 120 bp, Artificial Sequence
  ENSG00000104064_19 (sequence is synthesized)
tactctgtaggtcattgaaacgaagtaagctggcagctggttttattggaatgacagtgttctcggaaggagcagcctacaagataacttgaatttgccaattctgcaaaatctgtgctt

SEQ ID NO: 140045 - DNA, 120 bp, Artificial Sequence
  ENSG00000104064_20 (sequence is synthesized)
gtggggacgtgaaactgtattctgtgccttccatcatgatttccacatgaaagcactttaaggcactgattttaagataatgtttttggaaaacccaatgcatatgggtttctgaaatat

SEQ ID NO: 140046 - DNA, 120 bp, Artificial Sequence
  ENSG00000104064_21 (sequence is synthesized)
tttatggacttatttctccccaggaaatgattcttacggaaaaaaattgcttttgtatgtagaacaggaactttttgtattacagtgatgcaatagacatgtctaatgtaacttctactt

SEQ ID NO: 140047 - DNA, 120 bp, Artificial Sequence
  ENSG00000104064_22 (sequence is synthesized)
ttccttttgaaagctcagtgtctgtgctatgacttgctctcatcacaatattgttgaattccacaatgtatggacattaaacactggcagactgttcactttttcttttttttttttggt

SEQ ID NO: 140048 - DNA, 120 bp, Artificial Sequence
  ENSG00000104064_23 (sequence is synthesized)
aaaatattacttcaaacccctttttcttgctttatttttcagtgttttattgctttatgaactgtttaaccctgaaatccctctaggttatctatactgtataaaaaagcaattaccctt

SEQ ID NO: 140049 - DNA, 120 bp, Artificial Sequence
  ENSG00000104064_24 (sequence is synthesized)
aaaactgtactctggcctacttttctattttgcaattaaatatctttttcacatatgttcattgtagacttatgtttttatcacatcttattaacacattaaaaatgttatcctactgca

SEQ ID NO: 140050 - DNA, 120 bp, Artificial Sequence
  ENSG00000104064_25 (sequence is synthesized)
tatttgagccaccatatgaaaatattttatactctccacaacatgactttaaaattcctgaggtaactcttgagaatttgttaactctttcactggaattaccagtatatttgttaatgt

SEQ ID NO: 140051 - DNA, 120 bp, Artificial Sequence
  ENSG00000104064_26 (sequence is synthesized)
aataaaggggtctatggtctgtcagcctgatggttactattggaagcacttaaaaaagagtttagggcaaattgaagaactctgtaaggaagaggaaaaagatctttttcaattttccac

SEQ ID NO: 140052 - DNA, 120 bp, Artificial Sequence
  ENSG00000104064_27 (sequence is synthesized)
taaatttgacatattttaagtgatccaaaaactagtttttaaaaatgccaggccatattttcaatagcatgaagtgactttttctgcagtcctgaaaagtcaatagagaatgttgtttct

SEQ ID NO: 140053 - DNA, 120 bp, Artificial Sequence
  ENSG00000104064_28 (sequence is synthesized)
ggttacttcggtacattaatttgtcatgttaggcagggtgctggtaccacagccaggtaccctgacatgtggtgctggagcagagaagggccagtgtcttcaccccagagggcaatcact

SEQ ID NO: 140054 - DNA, 120 bp, Artificial Sequence
  ENSG00000104064_29 (sequence is synthesized)
gtagagttttgctttcagaccaggctggccctgaaaagactcaagacagtgttgggaacaagtttgtgaaagctaacttaatgtcgtctttgacttccagtctcctctcctgctggagac

SEQ ID NO: 140055 - DNA, 120 bp, Artificial Sequence
  ENSG00000104064_30 (sequence is synthesized)
tttacctggtgcaagaaataattttgattcctaataacaacagctggcatagatgggagaaaataattggtgcttaaaaggagtaagtctatgatagcatcaggtactcaggtatctgtg

SEQ ID NO: 140056 - DNA, 120 bp, Artificial Sequence
  ENSG00000104064_31 (sequence is synthesized)
gaggaagctcacctttttcagagtcattgttacataacataatttctcaatcatttacatctgatttactgttctgtaaaatcactacttagacaagaatttgtaattaaaacttaaaat

SEQ ID NO: 140057 - DNA, 120 bp, Artificial Sequence
  ENSG00000104064_32 (sequence is synthesized)
gggtgtcttcttcccttcacttatttcatgctgttttcaggtgggctgtaaaagctttgcattctagtcattctcaatagtgctctgaacagaggatttaaagaactgacaaaaataaaa

SEQ ID NO: 140058 - DNA, 120 bp, Artificial Sequence
  ENSG00000104064_33 (sequence is synthesized)
gtatatgaaataaaagttttcagaaatccacataattgtttccactacatagtgatggatttgtagttagcagtcatctggttgccacatcactggttaattgtttccacatatgtgtga

SEQ ID NO: 140059 - DNA, 120 bp, Artificial Sequence
  ENSG00000104064_34 (sequence is synthesized)
acaaacacctggagcaacctttctcaaccagggttctgcaagacaagccatttagtgttatggtgtaatgaattattttctttcctgtgcacctagaatcgttcttgttacgtactatcc

SEQ ID NO: 140060 - DNA, 120 bp, Artificial Sequence
  ENSG00000104064_35 (sequence is synthesized)
agacactgagttcgttaggcatcttgactgcccaattactttattcagatttaacacttccctctgtatagtccctggacctctagaattataaattctagactgaatctgtgatgcttt

SEQ ID NO: 140061 - DNA, 120 bp, Artificial Sequence
  ENSG00000104064_36 (sequence is synthesized)
cagaaagcctcatctgagaagtagtatctgcagggactgtgcttctcaactaattttcatttattgttatttattttatttatatcttaattacttcacaaaaggacttgtgatgtcatt

SEQ ID NO: 140062 - DNA, 120 bp, Artificial Sequence
  ENSG00000104064_37 (sequence is synthesized)
tgttttcgttggcttttaggaattattttcttaacatcaatcttttgtgatatgaatggcagaagagttcttttactctgtcactggattgctctatttctttatggtggtggagggttg

SEQ ID NO: 140063 - DNA, 120 bp, Artificial Sequence
  ENSG00000104064_38 (sequence is synthesized)
ggaagacaattagagagaaaagaggataaatgggaaatctcatgtaatgaaagctacacagatggtccccaatttatgatgctttgatttatgattgtttgactttacaatgggtttatc

SEQ ID NO: 140064 - DNA, 120 bp, Artificial Sequence
  ENSG00000104064_39 (sequence is synthesized)
agggtattaattgcattttacatttatgatatttttgacttaggatgggtttatcaggacataaccccattgcaagccagagagcatctgtacttgtttgtaataaaaagatctgcttac

SEQ ID NO: 140065 - DNA, 78 bp, Artificial Sequence
  ENSG00000104064_40 (sequence is synthesized)
gagttgagattactggcataagtcaccatatccaggagagagaagctcttcagaaacagctggatgaagcaaatcgag

SEQ ID NO: 140066 - DNA, 120 bp, Artificial Sequence
  ENSG00000104064_41 (sequence is synthesized)
tatatttattactgacagtattgttttgatacagaatgaaagtgcgtagtattttcattttgtttatttttgccttatacatatagcaagccctcaataaataaatattgaatgaatgaa

SEQ ID NO: 140067 - DNA, 120 bp, Artificial Sequence
  ENSG00000104064_42 (sequence is synthesized)
catggcacttgcccattaaatgctagcagagcatcctcaccttcagtctccaaaatgcctctataaacatacaaagggccctgaagggggcagtgctgctaccaatgagaaccactgatt

SEQ ID NO: 140068 - DNA, 66 bp, Artificial Sequence
  ENSG00000104064_43 (sequence is synthesized)
gtccctggtagatttgggaaagaagcttttagaagcggcacgagcaggtcaagatgatgaagttcg

SEQ ID NO: 140069 - DNA, 120 bp, Artificial Sequence
  ENSG00000104064_44 (sequence is synthesized)
ccaaggcaacaggtattgagatgcatataggataggctttgggattttatgctttagtaggtattcatccttgtaagaaaggacggttggagaatgagggtaagattctatcagccacct

SEQ ID NO: 140070 - DNA, 120 bp, Artificial Sequence
  ENSG00000104064_45 (sequence is synthesized)
aggaggggatgtgtatgagaacttctgagaagaaaggatcagaatgtatgcattctttttttgagcagaatattgatggttcatttttgtgacttacaagaaccagcagtttattggctt

SEQ ID NO: 140071 - DNA, 120 bp, Artificial Sequence
  ENSG00000104067_0 (sequence is synthesized)
cgggcatgctcagtgggccgggccggcaggtttgcgtggccgctgagttgccggcgccggctgagccagcggacgccgcgttccttggcggccgccggttcccgggaagttacgtggcga

SEQ ID NO: 140072 - DNA, 120 bp, Artificial Sequence
  ENSG00000104067_1 (sequence is synthesized)
gcgaagccggcttccgaggagacgccgggaggccacgggtgctgctgacgggcgggcgaccgggcgaggccgacgtggccgggctgcgaaagctgcgggaggccgagtgggtggccgcgc

SEQ ID NO: 140073 - DNA, 120 bp, Artificial Sequence
  ENSG00000104067_2 (sequence is synthesized)
agggaggtgccggtcgggcgcgccccgtggagaagacccgggcggggcgggcgcttcccggacttttgtccgagttgaattccctccccctgggccgggcccttccggccgcccccgccc

SEQ ID NO: 140074 - DNA, 120 bp, Artificial Sequence
  ENSG00000104067_3 (sequence is synthesized)
gtgccccgctcgctctcgggagatgtttatttgggctgtggcgtgaggagcgggcgggccagcgccgcggagtttcgggtccgaggagcctcgcgcggcgctggagagagacaagatgtc

SEQ ID NO: 140075 - DNA, 120 bp, Artificial Sequence
  ENSG00000104067_4 (sequence is synthesized)
cgccagagctgcggccgccaagagcacagcaatggaggaaacagctatatgggaacaacatacagtgacgcttcacagggctcctggatttggatttggaattgcaatatctggtggacg

SEQ ID NO: 140076 - DNA, 120 bp, Artificial Sequence
  ENSG00000104067_5 (sequence is synthesized)
agataatcctcattttcagagtggggaaacgtcaatagtgatttcagatgtgctgaaaggaggaccagctgaaggacagctacaggaaaatgaccgagttgcaatggttaacggagtttc

SEQ ID NO: 140077 - DNA, 120 bp, Artificial Sequence
  ENSG00000104067_6 (sequence is synthesized)
aatggataatgttgaacatgcttttgctgttcagcaactaaggaaaagtgggaaaaatgcaaaaattacaattagaaggaagaagaaagttcaaataccagtaagtcgtcctgatcctga

SEQ ID NO: 140078 - DNA, 120 bp, Artificial Sequence
  ENSG00000104067_7 (sequence is synthesized)
accagtatctgataatgaagaagatagttatgatgaggaaatacatgatccaagaagtggccggagtggtgtggttaacagaaggagtgagaagatttggccgagggatagaagtgcaag

SEQ ID NO: 140079 - DNA, 120 bp, Artificial Sequence
  ENSG00000104067_8 (sequence is synthesized)
tagagagaggagcttgtccccgcggtcagacaggcggtcagtggcttccagccagcctgctaaacctactaaagtcacactggtgaaatcccggaaaaatgaagaatatggtcttcgatt

SEQ ID NO: 140080 - DNA, 120 bp, Artificial Sequence
  ENSG00000104067_9 (sequence is synthesized)
ggcaagccatatatttgttaaggaaatttcacaagatagtttggcagcaagagatggcaatattcaagaaggtgatgttgtattgaagataaatggtactgtgacagaaaatatgtcatt

SEQ ID NO: 140081 - DNA, 120 bp, Artificial Sequence
  ENSG00000104067_10 (sequence is synthesized)
gacagatgcaaagacattgatagaaaggtctaaaggcaaattaaaaatggtagttcaaagagatgaacgggctacgctattgaatgtccctgatctttctgacagcatccactctgctaa

SEQ ID NO: 140082 - DNA, 120 bp, Artificial Sequence
  ENSG00000104067_11 (sequence is synthesized)
tgcctctgagagagacgacatttcagaaattcagtcactggcatcagatcattctggtcgatcacacgataggcctccccgccgcagccggtcacgatctcctgaccagcggtcagagcc

SEQ ID NO: 140083 - DNA, 120 bp, Artificial Sequence
  ENSG00000104067_12 (sequence is synthesized)
ttctgatcattccaggcactcgccgcagcagccaagcaatggcagtctccggagtagagatgaagagagaatttctaaacctggggctgtctcaactcctgtaaagcatgctgatgatca

SEQ ID NO: 140084 - DNA, 120 bp, Artificial Sequence
  ENSG00000104067_13 (sequence is synthesized)
cacacctaaaacagtggaagaagttacagttgaaagaaatgagaaacaaacaccttctcttccagaaccaaagcctgtgtatgcccaagttgggcaaccagatgtggatttacctgtcag

SEQ ID NO: 140085 - DNA, 120 bp, Artificial Sequence
  ENSG00000104067_14 (sequence is synthesized)
tccatctgatggtgtcctacctaattcaactcatgaagatgggattcttcggcccagcatgaaattggtaaaattcagaaaaggagatagtgtgggtttgcggctggctggtggaaatga

SEQ ID NO: 140086 - DNA, 120 bp, Artificial Sequence
  ENSG00000104067_15 (sequence is synthesized)
tgttggaatatttgtagctggcgttctagaagatagccctgcagccaaggaaggcttagaggaaggtgatcaaattctcagggtaaacaacgtagattttacaaatatcataagagaaga

SEQ ID NO: 140087 - DNA, 120 bp, Artificial Sequence
  ENSG00000104067_16 (sequence is synthesized)
agccgtccttttcctgcttgacctccctaaaggagaagaagtgaccatattggctcagaagaagaaggatgtttatcgtcgcattgtagaatcagatgtaggagattctttctatattag

SEQ ID NO: 140088 - DNA, 120 bp, Artificial Sequence
  ENSG00000104067_17 (sequence is synthesized)
aacccattttgaatatgaaaaggaatctccctatggacttagttttaacaaaggagaggtgttccgtgttgtggataccttgtacaatggaaaactgggctcttggcttgctattcgaat

SEQ ID NO: 140089 - DNA, 120 bp, Artificial Sequence
  ENSG00000104067_18 (sequence is synthesized)
tggtaaaaatcataaggaggtagaacgaggcatcatccctaataagaacagagctgagcagctagccagtgtacagtatacacttccaaaaacagcaggcggagaccgtgctgacttctg

SEQ ID NO: 140090 - DNA, 120 bp, Artificial Sequence
  ENSG00000104067_19 (sequence is synthesized)
gagattcagaggtcttcgcagctccaagagaaatcttcgaaaaagcagagaggatttgtccgctcagcctgttcaaacaaagtttccagcttatgaaagagtggttcttcgagaagctgg

SEQ ID NO: 140091 - DNA, 120 bp, Artificial Sequence
  ENSG00000104067_20 (sequence is synthesized)
atttctgaggcctgtaaccatttttggaccaatagctgatgttgccagagaaaagctggcaagagaagaaccagatatttatcaaattgcaaagagtgaaccacgagacgctggaactga

SEQ ID NO: 140092 - DNA, 120 bp, Artificial Sequence
  ENSG00000104067_21 (sequence is synthesized)
ccaacgtagctctggcattattcgcctgcatacaataaagcaaatcatagatcaagacaaacatgctttattagatgtaacaccaaatgcagttgatcgtcttaactatgcccagtggta

SEQ ID NO: 140093 - DNA, 120 bp, Artificial Sequence
  ENSG00000104067_22 (sequence is synthesized)
tccaattgttgtatttcttaaccctgattctaagcaaggagtaaaaacaatgagaatgaggttatgtccagaatctcggaaaagtgccaggaagttatacgagcgatctcataaacttcg

SEQ ID NO: 140094 - DNA, 120 bp, Artificial Sequence
  ENSG00000104067_23 (sequence is synthesized)
taaaaataatcaccatctttttacaactacaattaacttaaattcaatgaatgatggttggtatggtgcgctgaaagaagcaattcaacaacagcaaaaccagctggtatgggtttccga

SEQ ID NO: 140095 - DNA, 120 bp, Artificial Sequence
  ENSG00000104067_24 (sequence is synthesized)
gggaaaggcggatggtgctacaagtgatgaccttgatttgcatgatgatcgtctgtcctacctgtcagctccaggtagtgaatactcaatgtatagcacggacagtagacacacttctga

SEQ ID NO: 140096 - DNA, 120 bp, Artificial Sequence
  ENSG00000104067_25 (sequence is synthesized)
ctatgaagacacagacacagaaggcggggcctacactgatcaagaactagatgaaactcttaatgatgaggttgggactccaccggagtctgccattacacggtcctctgagcctgtaag

SEQ ID NO: 140097 - DNA, 120 bp, Artificial Sequence
  ENSG00000104067_26 (sequence is synthesized)
agaggactcctctggaatgcatcatgaaaaccaaacatatcctccttactcaccacaagcgcagccacaaccaattcatagaatagactcccctggatttaagccagcctctcaacagaa

SEQ ID NO: 140098 - DNA, 120 bp, Artificial Sequence
  ENSG00000104067_27 (sequence is synthesized)
agcagaagcttcatctccagtcccttacctttcgcctgaaacaaacccagcatcatcaacctctgctgttaatcataatgtaaatttaactaatgtcagactggaggagcccaccccagc

SEQ ID NO: 140099 - DNA, 120 bp, Artificial Sequence
  ENSG00000104067_28 (sequence is synthesized)
tccttccacctcttactcaccacaagctgattctttaagaacaccaagtactgaggcagctcacataatgctaagagatcaagaaccatcattgtcgtcgcatgtagatccaacaaaggt

SEQ ID NO: 140100 - DNA, 120 bp, Artificial Sequence
  ENSG00000104067_29 (sequence is synthesized)
gtatagaaaggatccatatcccgaggaaatgatgaggcagaaccatgttttgaaacagccagccgttagtcacccagggcacaggccagacaaagagcctaatctgacctatgaacccca

SEQ ID NO: 140101 - DNA, 120 bp, Artificial Sequence
  ENSG00000104067_30 (sequence is synthesized)
actcccatacgtagagaaacaagccagcagagacctcgagcagcccacatacagatacgagtcctcaagctatacggaccagttttctcgaaactatgaacatcgtctgcgatacgaaga

SEQ ID NO: 140102 - DNA, 120 bp, Artificial Sequence
  ENSG00000104067_31 (sequence is synthesized)
tcgcgtccccatgtatgaagaacagtggtcatattatgatgacaaacagccctacccatctcggccaccttttgataatcagcactctcaagaccttgactccagacagcatcccgaaga

SEQ ID NO: 140103 - DNA, 120 bp, Artificial Sequence
  ENSG00000104067_32 (sequence is synthesized)
gtcctcagaacgagggtactttccacgttttgaagagccagcccctctgtcttacgacagcagaccacgttacgaacaggcacctagagcatccgccctgcggcacgaagagcagccagc

SEQ ID NO: 140104 - DNA, 120 bp, Artificial Sequence
  ENSG00000104067_33 (sequence is synthesized)
accggaagcccagccccacccttcagcagggcccaagcctgcagagtccaagcagtattttgagcaatattcacgcagttacgagcaagtaccaccccaaggatttacctctagagcagg

SEQ ID NO: 140105 - DNA, 120 bp, Artificial Sequence
  ENSG00000104067_34 (sequence is synthesized)
tcattttgagcctctccatggtgctgcagctgtccctccgctgataccttcatctcagcataagccagaagctctgccttcaaacaccaaaccactgcctccacccccaactcaaaccga

SEQ ID NO: 140106 - DNA, 120 bp, Artificial Sequence
  ENSG00000104067_35 (sequence is synthesized)
agaagaggaagatccagcaatgaagccacagtctgtactcaccagagttaagatgtttgaaaacaaaagatctgcatccttagagaccaagaaggatgtaaatgacactggcagttttaa

SEQ ID NO: 140107 - DNA, 120 bp, Artificial Sequence
  ENSG00000104067_36 (sequence is synthesized)
gcctccagaagtagcatctaaaccttcaggtgctcccatcattggtcccaaacccacttctcagaatcaattcagtgaacatgacaaaactctgtacaggatcccagaacctcaaaaacc

SEQ ID NO: 140108 - DNA, 120 bp, Artificial Sequence
  ENSG00000104067_37 (sequence is synthesized)
tcaactgaagccacctgaagatattgttcggtccaatcattatgaccctgaagaagatgaagaatattatcgaaaacagctgtcatactttgaccgaagaagttttgagaataagcctcc

SEQ ID NO: 140109 - DNA, 120 bp, Artificial Sequence
  ENSG00000104067_38 (sequence is synthesized)
tgcacacattgccgccagccatctctccgagcctgcaaagccagcgcattctcagaatcaatcaaatttttctagttattcttcaaagggaaagcctcctgaagctgatggtgtggatag

SEQ ID NO: 140110 - DNA, 120 bp, Artificial Sequence
  ENSG00000104067_39 (sequence is synthesized)
atcatttggcgagaaacgctatgaacccatccaggccactccccctcctcctccattgccctcgcagtatgcccagccatctcagcctgtcaccagcgcgtctctccacatacattctaa

SEQ ID NO: 140111 - DNA, 120 bp, Artificial Sequence
  ENSG00000104067_40 (sequence is synthesized)
gggagcacatggtgaaggtaattcagtgtcattggattttcagaattccttagtgtccaaaccagacccacctccatctcagaataagccagcaactttcagaccaccaaaccgagaaga

SEQ ID NO: 140112 - DNA, 120 bp, Artificial Sequence
  ENSG00000104067_41 (sequence is synthesized)
tactgctcaggcagctttctatccccagaaaagttttccagataaagccccagttaatggaactgaacagactcagaaaacagtcactccagcatacaatcgattcacaccaaaaccata

SEQ ID NO: 140113 - DNA, 120 bp, Artificial Sequence
  ENSG00000104067_42 (sequence is synthesized)
tacaagttctgcccgaccatttgaacgcaagtttgaaagtcctaaattcaatcacaatcttctgccaagtgaaactgcacataaacctgacttgtcttcaaaaactcccacttctccaaa

SEQ ID NO: 140114 - DNA, 120 bp, Artificial Sequence
  ENSG00000104067_43 (sequence is synthesized)
aactcttgtgaaatcgcacagtttggcacagcctcctgagtttgacagtggagttgaaactttctctatccatgcagagaagcctaaatatcaaataaataatatcagcacagtgcctaa

SEQ ID NO: 140115 - DNA, 120 bp, Artificial Sequence
  ENSG00000104067_44 (sequence is synthesized)
agctattcctgtgagtccttcagctgtggaagaggatgaagatgaagatggtcatactgtggtggccacagcccgaggcatatttaacagcaatgggggcgtgctgagttccatagaaac

SEQ ID NO: 140116 - DNA, 120 bp, Artificial Sequence
  ENSG00000104067_45 (sequence is synthesized)
tggtgttagtataattatccctcaaggagccattcccgaaggagttgagcaggaaatctatttcaaggtctgccgggacaacagcatccttccacctttagataaagagaaaggtgaaac

SEQ ID NO: 140117 - DNA, 120 bp, Artificial Sequence
  ENSG00000104067_46 (sequence is synthesized)
actgctgagtcctttggtgatgtgtggtccccatggcctcaagttcctgaagcctgtggagctgcgcttaccacactgtgatcctaaaacctggcaaaacaagtgtcttcccggagatcc

SEQ ID NO: 140118 - DNA, 120 bp, Artificial Sequence
  ENSG00000104067_47 (sequence is synthesized)
aaattatctcgttggagcaaactgtgtttctgtccttattgaccacttttaactcttgaaatataggaacttaaataatgtgaaactggattaaacttaatctaaatggaaccactctat

SEQ ID NO: 140119 - DNA, 120 bp, Artificial Sequence
  ENSG00000104067_48 (sequence is synthesized)
caagtattataccttttttagagttgatactacagtttgttagtatgaggcatttgtttgaactgataaagatgagtgagcatgcccctgaaccatggtcggaaaacatgctacacactg

SEQ ID NO: 140120 - DNA, 120 bp, Artificial Sequence
  ENSG00000104067_49 (sequence is synthesized)
catgtttgtgattgacgggactgttggtattggctagaggttcaaagatattttgctttgtgatttttgtaatttttttatcgtcactgcttaacttcacatattgatttccgttaaaat

SEQ ID NO: 140121 - DNA, 120 bp, Artificial Sequence
  ENSG00000104067_50 (sequence is synthesized)
accagccagtaaatgggggtgcatttgaggtctgttctttccaaagtacactgtttcaaactttactatggccctggcctagcatacgtacacattttattttattatgcatgaagtaat

SEQ ID NO: 140122 - DNA, 120 bp, Artificial Sequence
  ENSG00000104067_51 (sequence is synthesized)
atgcacacattttttaaatgcacctggaatatataaccagtgttgtggatttaacagaaatgtacagcaaggagatttacaactgggggagggtgaagtgaagacaatgacttactgtac

SEQ ID NO: 140123 - DNA, 120 bp, Artificial Sequence
  ENSG00000104067_52 (sequence is synthesized)
atgaaaacacatttttcttagggaaggatacaaaagcatgtgagactggttccatggcctcttcagatctctaacttcaccatattaccacagacatactaaccagcagaaatgccttac

SEQ ID NO: 140124 - DNA, 120 bp, Artificial Sequence
  ENSG00000104067_53 (sequence is synthesized)
cctcatgttcttaattcttagctcattctccttgtgttactaagtttttatggcttttgtgcattatctagatactgtatcatgacaaagactgagtacgttgtgcatttggtggtttca

SEQ ID NO: 140125 - DNA, 85 bp, Artificial Sequence
  ENSG00000104067_54 (sequence is synthesized)
catgacaaagactgagtacgttgtgcatttggtggtttcagaaatgtgttatcacccagaagaaaatagtggtgtgatttgggga

SEQ ID NO: 140126 - DNA, 120 bp, Artificial Sequence
  ENSG00000104067_55 (sequence is synthesized)
ctatgcatttgaaaattttgatgttttaaggatgcttgtacataatgcgtgcataccacttttgttcttggtttgtaaattaacttttataaactttaccttttttatacataaacaaga

SEQ ID NO: 140127 - DNA, 120 bp, Artificial Sequence
  ENSG00000104067_56 (sequence is synthesized)
ccacgtttctaaaggctacctttgtattctctcctgtacctcttgagccttgaactttgacctctgcagcaataaagcagcgtttctatgacacatgcaaggtcattttttttaagaaaa

SEQ ID NO: 140128 - DNA, 120 bp, Artificial Sequence
  ENSG00000104067_57 (sequence is synthesized)
aggatgcacagagttgttacatttttaagtgctgcatttaaaagatacagttactcagaattctctagtttgattaaattcttgcaaagtatccctactgtaatttgtgatacaatgctg

SEQ ID NO: 140129 - DNA, 120 bp, Artificial Sequence
  ENSG00000104067_58 (sequence is synthesized)
tgccctaaagtgtatttttttactaatagacaatttattatggcacatcagcacgatttctgtttagataatacaccactacattctgttaatcattaggtgtgactgaatttcttttgc

SEQ ID NO: 140130 - DNA, 120 bp, Artificial Sequence
  ENSG00000104067_59 (sequence is synthesized)
cgttattaaaaatctcaaatttctaaatctccaaaataaaactttttaaaataaagtgctggcttggtctgtttgcccactgttttctagtttcatgcagctttataatcctgttttaaa

SEQ ID NO: 140131 - DNA, 120 bp, Artificial Sequence
  ENSG00000104067_60 (sequence is synthesized)
atcctgcacacaaatccctatcacccagcgtcacctaccacctcgtcgtctggtgttgcatgcagaatttctccccttggccagcatgtacagatgggtgggcagtgctcatctgaaggg

SEQ ID NO: 140132 - DNA, 120 bp, Artificial Sequence
  ENSG00000104067_61 (sequence is synthesized)
ctcagactgaagtggggcagaaggacctggagacagagtgggagaaggcagcaggccgacttccccctgtgggtaaacacacacccctgcgtggagaaacacccctgcatggggacacac

SEQ ID NO: 140133 - DNA, 120 bp, Artificial Sequence
  ENSG00000104067_62 (sequence is synthesized)
gtgcgtttgtgtgtgtgcgtgtaaccatttgtatatggttttattccccagataaatagcacgggcattgtttaatgtcacccacatttgggggaagaaaatgggtttagtgagcataaa

SEQ ID NO: 140134 - DNA, 120 bp, Artificial Sequence
  ENSG00000104067_63 (sequence is synthesized)
tattccattgtggacatcctacttacttaactgccacccctgttgacatttggattattgctatagtgtttcagtaaacacctttgtggactgaatccatctatgtggattttatttttt

SEQ ID NO: 140135 - DNA, 120 bp, Artificial Sequence
  ENSG00000104067_64 (sequence is synthesized)
tcatctttgttaaggtataatttacatagagtaagttactgtttttaaaatgtatagttcaaattttgacaaacacatactgtttatttaccacggttaatacatacaacagtttcttta

SEQ ID NO: 140136 - DNA, 120 bp, Artificial Sequence
  ENSG00000104067_65 (sequence is synthesized)
tcttctctaatcatttgtacccctttatactcaacccttcttccagcccctggcaggatgatctcttctgtttctatagttgcctttttgacagtgtcatataaatggaatcatacaata

SEQ ID NO: 140137 - DNA, 120 bp, Artificial Sequence
  ENSG00000104067_66 (sequence is synthesized)
gtagtttcgatctgatgtcactccctgcggtatgcgcacgccagcgataaggctttgagactgcaaaacactccactcagcctgtgaggcgtagtaggtcgggttttctttcatgctgta

SEQ ID NO: 140138 - DNA, 120 bp, Artificial Sequence
  ENSG00000104067_67 (sequence is synthesized)
ttacttatttaaggaggaaaggctttgtttccgtattacacagaatgtcactttgttcctgaagtgtgatctctggtacttaatatgcaagacaacacactttttaagaggttatttcaa

SEQ ID NO: 140139 - DNA, 120 bp, Artificial Sequence
  ENSG00000104067_68 (sequence is synthesized)
ctactttcatgataaattttgctattatagatatatttcttcattttcgattttattacatgaatctatttggtttttctgtggtaatgctctatttttaattactaggtttttacaata

SEQ ID NO: 140140 - DNA, 120 bp, Artificial Sequence
  ENSG00000104067_69 (sequence is synthesized)
ttttggtatctgttagagcaggttgtcattgtttttgaagttgcattgcctcttcttatactgttctcttacagatgctttccagaatcattcttatgctcttgattttttattttaatg

SEQ ID NO: 140141 - DNA, 120 bp, Artificial Sequence
  ENSG00000104067_70 (sequence is synthesized)
tccatctgatggtgtcctacctaattcaactcatgaagatgggattcttcggtaatacaattttaaagttgtattgttttctttgttcattattaacattattcagagtaggaatttaat

SEQ ID NO: 140142 - DNA, 120 bp, Artificial Sequence
  ENSG00000104067_71 (sequence is synthesized)
aaccatattgcatatattttttaaaatagtacataccacctaatactatgattatttttatatttaacattctgctacttatatatgatagtgagttagaaattagacaacaaaggaact

SEQ ID NO: 140143 - DNA, 120 bp, Artificial Sequence
  ENSG00000104067_72 (sequence is synthesized)
aactttttggatgctttctttctcaccgctgtctcctgcctagcttttaaattaggaattagaaaaaaaaaaaaattctattcagacatcagaatttccacagctttccaatggagcatt

SEQ ID NO: 140144 - DNA, 120 bp, Artificial Sequence
  ENSG00000104067_73 (sequence is synthesized)
ttaagatttaaactgtatgtgaacttccatccagtattgtatatttcatttcattgtgggtctttttccattttgcattttaaatgcccttattttaattttctcctttcttgtgtagag

SEQ ID NO: 140145 - DNA, 120 bp, Artificial Sequence
  ENSG00000104067_74 (sequence is synthesized)
gttctgattcactcattcaataaaaataagactttttgtcagtgaaaaattagcagtttatcccattcttttaatttggtgagaaaaccccagtgaccatgtccttgttccaccaattct

SEQ ID NO: 140146 - DNA, 120 bp, Artificial Sequence
  ENSG00000104067_75 (sequence is synthesized)
tttaatgagaaaagtcaccgtttaggaaactcttggcttcatatgaaaattgcataacatacaatgtcattgaatcctcccagtcatgctctgaggtaaggagtataatatccatgttac

SEQ ID NO: 140147 - DNA, 120 bp, Artificial Sequence
  ENSG00000104067_76 (sequence is synthesized)
ccaggcactcgccgcagcagccaagcaatggcagagtcacacgtacatttgagaatctgaagaaaattatgatccttctctccagaaaaatgtgcatgtgcacatacacgcagcaattgc

SEQ ID NO: 140148 - DNA, 120 bp, Artificial Sequence
  ENSG00000104067_77 (sequence is synthesized)
atacaatttctggagactcccaaggctctataggccaccacctgacccatggttaactgcagtccacatgaagatcacttgaaacatgagtccagggctgaagagacagtttagaagaaa

SEQ ID NO: 140149 - DNA, 89 bp, Artificial Sequence
  ENSG00000104067_78 (sequence is synthesized)
gaaacatgagtccagggctgaagagacagtttagaagaaaagggaacccttatacgttgttgatgagaatgtaattgatacggccattc

SEQ ID NO: 140150 - DNA, 120 bp, Artificial Sequence
  ENSG00000104067_79 (sequence is synthesized)
ttctgggtacatatccaaaggaaatgaaatcactgtctcgaagagatatctgcactctcatgtttgttgcagcattattcacaatagccaaggtatggagtcaacctgaatgtcgaacac

SEQ ID NO: 140151 - DNA, 120 bp, Artificial Sequence
  ENSG00000104067_80 (sequence is synthesized)
atgaatggataaagaaaatgttcacacacacaatgaaatgtgatttagcctttaaaaagaaggaaatcctgccatttggaacaacatggatgaacctggagggcattgtgctaagtgaaa

SEQ ID NO: 140152 - DNA, 120 bp, Artificial Sequence
  ENSG00000104067_81 (sequence is synthesized)
taaaccagacacagaaagacaaacactgcatgacctcacttactgtggaacctaagcaagttgaactcatagaaacagacagtagaatggtggttaccaggggttaggggtggggaggaa

SEQ ID NO: 140153 - DNA, 120 bp, Artificial Sequence
  ENSG00000104067_82 (sequence is synthesized)
tggggagatgtttgttaaagggtacacagtttcaattataagatgagtaagttctggagacctaatttacagtgtagtgacaagagttaataacgtatacttgaaatttgctaagagagt

SEQ ID NO: 140154 - DNA, 120 bp, Artificial Sequence
  ENSG00000104067_83 (sequence is synthesized)
agatcttaaggcattcttttgacacacactaagaaaagtaactatgaggtatggatatgttaattaacttggtctcggtcatcatttgaatatgtatatcaaaacatcactgttgtacac

SEQ ID NO: 140155 - DNA, 120 bp, Artificial Sequence
  ENSG00000104067_84 (sequence is synthesized)
ctttaatagatacaatgtttatttgtcaattggacctcagtaaagctggaaagaaaaagtaaatttgggtctagatctgaagagatgatttaggattagagatgttgaattgagacttaa

SEQ ID NO: 140156 - DNA, 120 bp, Artificial Sequence
  ENSG00000104067_85 (sequence is synthesized)
cttgcatagaggtgttagctgaagccatagaagtcactaaaattgctaagagaaacagtttggaaagaaggcagagaactggataacagggagcacgttcttttaggaaggtgaagaggc

SEQ ID NO: 140157 - DNA, 120 bp, Artificial Sequence
  ENSG00000104067_86 (sequence is synthesized)
gagggagaagtaagaaaagggaggcgtacctagccaggagagagcttttttaaagtttgtaaaaaaccgcagtgacagtggtagttaaaactgtaaagtgtttcgcattctactaaaatg

SEQ ID NO: 140158 - DNA, 120 bp, Artificial Sequence
  ENSG00000104067_87 (sequence is synthesized)
ggaactagtaagagaagaggataacttgtaagagctatgaatgtggttgctaattcgtatctactgtagtttttatgtatttgtgaagctgattatttctaaatttcaaacctagattta

SEQ ID NO: 140159 - DNA, 120 bp, Artificial Sequence
  ENSG00000104067_88 (sequence is synthesized)
ggcggcggatggcccagagctgatctatgcggcgcctggaggggctgtgtctgcggcggcggcggaggcggcggggccctgcccgcgagcggagcggggacaagatgaagtaccagaaat

SEQ ID NO: 140160 - DNA, 120 bp, Artificial Sequence
  ENSG00000104067_89 (sequence is synthesized)
acctgacggtgctgcagatggccatcggcgtcaccccctccaaccgcggcagcctcctgccgctcaagaggaagctgtgggtaacgccatcctctgaaaatcctaatggtgctacttcta

SEQ ID NO: 140161 - DNA, 120 bp, Artificial Sequence
  ENSG00000104067_90 (sequence is synthesized)
tataactcaggatactggcagctttgaaaacaatagaggaaagccagatgtcaggaagccagagggaggaggaaactttttctatattcttttgtttaaaattagagttacaataatttt

SEQ ID NO: 140162 - DNA, 120 bp, Artificial Sequence
  ENSG00000104081_0 (sequence is synthesized)
attttggaaacaataccgcaccgtgcggagtggcctcctcccgccccggcctgtgcccgccgccgccgccgcccctgcctgcgcctcccgcctcctgccgcagcccgctgggctttttcc

SEQ ID NO: 140163 - DNA, 120 bp, Artificial Sequence
  ENSG00000104081_1 (sequence is synthesized)
ctccttcccaatcgagtctgggcgtccagcccccgagtgctcgtcacgctggaccctggcgcggagccctggcatcacgactcggaggccgagactctctcctggagtcacccaggagag

SEQ ID NO: 140164 - DNA, 120 bp, Artificial Sequence
  ENSG00000104081_2 (sequence is synthesized)
atggagccatctcagtgtgtggaggagctggaggatgatgtgttccaaccagaggatggggagccggtgacccaacccgggagcttgctctctgctgacctgtttgcccagagcctactg

SEQ ID NO: 140165 - DNA, 120 bp, Artificial Sequence
  ENSG00000104081_3 (sequence is synthesized)
gactgccccctcagccgacttcagctcttccctctcacccactgctgtggccctggccttcgacccaccagccaggaagacaaagctacccagactctcagcccagcctcccccagccaa

SEQ ID NO: 140166 - DNA, 120 bp, Artificial Sequence
  ENSG00000104081_4 (sequence is synthesized)
ggtgtcatgctgccttgtggggtgactgaggaaccccagcgactcttttatggcaatgctggctatcggcttcctctccctgccagtttcccagcagtcttgcccattggggagcagccc

SEQ ID NO: 140167 - DNA, 120 bp, Artificial Sequence
  ENSG00000104081_5 (sequence is synthesized)
cccgaagggcagtggcaacatcaagcagaggtacagattgcccgaaagcttcagtgcattgcagaccagttccaccggcttcatgtgcagcaacaccagcagaaccaaaatcgtgtgtgg

SEQ ID NO: 140168 - DNA, 120 bp, Artificial Sequence
  ENSG00000104081_6 (sequence is synthesized)
tggcagatcctcctcttcctgcacaaccttgctttgaatggagaagagaacaggaacggggcaggccctaggtgagggtgggctgccctcttcacatggggcaccaggaacaccgtctgg

SEQ ID NO: 140169 - DNA, 120 bp, Artificial Sequence
  ENSG00000104081_7 (sequence is synthesized)
aacaggaaggacatcgggcaggactgacactgtgtcttgtgaaattgtttttttgttgttattttgtgttttaattttttttaatttctctctgagtgtacatacaacatactcaagcgg

SEQ ID NO: 140170 - DNA, 120 bp, Artificial Sequence
  ENSG00000104081_8 (sequence is synthesized)
gaccttctttctctgtcaggcccttgacctggaatgggggcctttgtcaaacactgttgaaggagaggctgatgtgtctgtgatggtgagaattcccaagggctctgacaagtagattct

SEQ ID NO: 140171 - DNA, 120 bp, Artificial Sequence
  ENSG00000104081_9 (sequence is synthesized)
tcgactgaggaatctaccagttgtcgaagatgatccgttagtgatgttctctgggaagtggactgtggtttttccagaggaactcagttaagaaatcgagagtggattagactcccagtt

SEQ ID NO: 140172 - DNA, 120 bp, Artificial Sequence
  ENSG00000104081_10 (sequence is synthesized)
ccaccaaacctatgagccttccactgtggatgggggccgtgatcctgatggtcacattgctttaacccagcagggcttcggccaggggctttccacttgaggatagcagcttcactaggc

SEQ ID NO: 140173 - DNA, 120 bp, Artificial Sequence
  ENSG00000104081_11 (sequence is synthesized)
tggccggccagctccacatctgactgggttcttacttctcagccagtacctgccccatgggctcaaggattcctggccagctcctgccacctccagcagacctcagggagggttgagttt

SEQ ID NO: 140174 - DNA, 120 bp, Artificial Sequence
  ENSG00000104081_12 (sequence is synthesized)
ctctaaggacccctcaaacatgtcgcaaaatgaaccaaacttctggctaggcctcaaaactgacttggtcccacttggaggccccaggattggtcctgaggtacagagccactgccacca

SEQ ID NO: 140175 - DNA, 120 bp, Artificial Sequence
  ENSG00000104081_13 (sequence is synthesized)
ctggcggcctgggaccagctgggtgtcagccacggatgagccgaatagccagtcagcatgttgctgctggcagcctgtgcctttgtcagctcttctttcaaaagaccccaccgacagacc

SEQ ID NO: 140176 - DNA, 120 bp, Artificial Sequence
  ENSG00000104081_14 (sequence is synthesized)
gcattccacccccaacatcggcactgagggacatcgggggcaagtttgcagtggggccggaaaatatggtggccaccctaccatgagagtcagccgtaggggaccccagaccccttggtt

SEQ ID NO: 140177 - DNA, 120 bp, Artificial Sequence
  ENSG00000104081_15 (sequence is synthesized)
tccttggaaacaacatacctcttcccccttatccccagtcctttttcatacctagtgggatacagaagaagccaggacagtggctttgccagctaagtgacttttagagtaacagataac

SEQ ID NO: 140178 - DNA, 120 bp, Artificial Sequence
  ENSG00000104081_16 (sequence is synthesized)
gattagagtggggaaccgtcaaagctgggtacacatttcctatcttcctccagcttccagctaggccagaagggcatgctctggaacccagcaggatcacagctgcctgtgcacgtcttc

SEQ ID NO: 140179 - DNA, 120 bp, Artificial Sequence
  ENSG00000104081_17 (sequence is synthesized)
ccttctctccctgctgcggcacttatggagaggatctaaagcagccggtgtggcagctccgatagcaggcacagggaatctgttaaccagacgctagaaactaaattataacttttgcat

SEQ ID NO: 140180 - DNA, 120 bp, Artificial Sequence
  ENSG00000104081_18 (sequence is synthesized)
atgtgagaaaagacaacattggtgctaacagtgaagtaaggcccaaaggaaagacggcttccctggacaaagaagacctcagggctacccaaggaaataggaggagtctagagtagactc

SEQ ID NO: 140181 - DNA, 120 bp, Artificial Sequence
  ENSG00000104081_19 (sequence is synthesized)
aagcccaagtcttccagttctgaggagaggaggtcttcagtactattgaaggagacattgatcttctggatgtacagttgtgcaggttgttcactgcacaagggcacctgcagctaatgg

SEQ ID NO: 140182 - DNA, 120 bp, Artificial Sequence
  ENSG00000104081_20 (sequence is synthesized)
aggctggaattcagcttgtgttctgctcactaagctgtgtgcgtgccctggtgtggggctacttctcccaagaagaaggggtgcctttcctaatttgcaaaggtgccatatgggctcaca

SEQ ID NO: 140183 - DNA, 120 bp, Artificial Sequence
  ENSG00000104081_21 (sequence is synthesized)
gcaccctggaggagaagggcctcaaactgtgcatgtaagcctttgttttgttctgctcagatattctggatattacctcttcttggtcagaattctattctcagggtgtgtaccatgatt

SEQ ID NO: 140184 - DNA, 120 bp, Artificial Sequence
  ENSG00000104081_22 (sequence is synthesized)
tgtctgctaagaagacgggttcctgctttgcagagaaggagccggggaccagcttgaagactggctctgggacacactgaccattgtgaaattcagccttccctgtgggtctccatacca

SEQ ID NO: 140185 - DNA, 120 bp, Artificial Sequence
  ENSG00000104081_23 (sequence is synthesized)
ttttatgatgtgtatgggacatacgttgttctcccctctctggatcaaggtggtgacaggcagcctgctgccgtatgcttcagtggcacacaccaaaaaaccgggattatttacagcagc

SEQ ID NO: 140186 - DNA, 120 bp, Artificial Sequence
  ENSG00000104081_24 (sequence is synthesized)
cactattcaccccttttggcagactctccacctgagttcagtgagagagaaaatgatttagatcttggtgctggggcaaggccatcagcttcagagaccttgccaggcccaggctgggtg

SEQ ID NO: 140187 - DNA, 120 bp, Artificial Sequence
  ENSG00000104081_25 (sequence is synthesized)
ccctgtggcctgagaactgagcccagactttgacaaacccacctcaacatcaagcctggggcaggtggaaggtggtctgactgcactgtctccatcttatgcaaagccaggaactcactc

SEQ ID NO: 140188 - DNA, 120 bp, Artificial Sequence
  ENSG00000104081_26 (sequence is synthesized)
actgtcttaagtgagccagggcaaaatttacacccctcacgtttccctctcccttcttccccaccaacaaaacccaggaggtagctggcagagtagctgtcaggaaggagaaaggttctt

SEQ ID NO: 140189 - DNA, 120 bp, Artificial Sequence
  ENSG00000104081_27 (sequence is synthesized)
tctggctggttgtttttaattggcttagtgatctaaactggccccttcctcctctgcctggtgagttggcctaaacattcctcaagtctagcctcaggagacctgcccctcccccccgac

SEQ ID NO: 140190 - DNA, 120 bp, Artificial Sequence
  ENSG00000104081_28 (sequence is synthesized)
ctccaccccctcagactccatcccccacccccaggagcctggctgtctctagcgaggggtggagaatcagatttagagggagggagagtctgacctggatcctgacctgtaaccagctga

SEQ ID NO: 140191 - DNA, 120 bp, Artificial Sequence
  ENSG00000104081_29 (sequence is synthesized)
agacggtggaggctttgtggcttgctgagggtgggggttgggagagggactggaaaccttcctcctcgggaaagaaatgcctgggaggaagggaagcctgatattcagggtcaaaacagc

SEQ ID NO: 140192 - DNA, 120 bp, Artificial Sequence
  ENSG00000104081_30 (sequence is synthesized)
ccttctaattcacaaccccaaagcaggggtttctagaagttggtcaacagatctggtgagggaagtccccaggccagacgctggactcctgcaatgagggtggaggactcagcctggcct

SEQ ID NO: 140193 - DNA, 120 bp, Artificial Sequence
  ENSG00000104081_31 (sequence is synthesized)
ctgcctggcctgtttcaaagtctgggccactggcagccttctcttgctcaatccgaggtggaaaaagatcacctcccagtgacctccctcagcccccaggggagtaggtctgtgtccaaa

SEQ ID NO: 140194 - DNA, 120 bp, Artificial Sequence
  ENSG00000104081_32 (sequence is synthesized)
gctatgtggcaggcttgtttgaaggacccagaggggcccagctgacctgtctcactgctcctggcagcccagccccatcggcaggtggcccctgcctgggggttattcgggatggttcag

SEQ ID NO: 140195 - DNA, 120 bp, Artificial Sequence
  ENSG00000104081_33 (sequence is synthesized)
ccagggcctcccaggaagagtgctgtggagccacggtgactgtcctggacagcaaggagcatgctaccccagtgagcacttctttttgagggacttgatggggaggtggggtaggcagaa

SEQ ID NO: 140196 - DNA, 120 bp, Artificial Sequence
  ENSG00000104081_34 (sequence is synthesized)
gggacgtggcagaagcgggaagactttggtcaccatggctctgcaggccttctgcaaatcagtgctggcctgggctggaaacagctctgtgtgtgaaggtgaggactcttggaagcaggc

SEQ ID NO: 140197 - DNA, 120 bp, Artificial Sequence
  ENSG00000104081_35 (sequence is synthesized)
catcctggccagacaccctagcaggaaggggctcacctgtcacccttaggcagcctgagggctggtggggacttttgagtcttgaggggatagcggaaaaagctgagctcataggtgccc

SEQ ID NO: 140198 - DNA, 120 bp, Artificial Sequence
  ENSG00000104081_36 (sequence is synthesized)
agccagcctcccagctaaaggtgctcagagccccactgccccctctctctgtgcaggtggccagtgcccctccctgctctgggagcattgctagccttctaccccatccctggatccaca

SEQ ID NO: 140199 - DNA, 120 bp, Artificial Sequence
  ENSG00000104081_37 (sequence is synthesized)
ggggctatcgaggagacccagtgagaatgtagcattttgttcatccccagggtagctgccctggggtctgggcactctgcctctgggagagaggaagaagaaaggggccccattttttaa

SEQ ID NO: 140200 - DNA, 120 bp, Artificial Sequence
  ENSG00000104081_38 (sequence is synthesized)
aaaactgtacagagcctttggctttatgtgtttatgttcttcacatgcatatgtgtgtatgtgtgtatatctttccccccatcaattggtacaatttttaataaaatcatttaaagcaaa

SEQ ID NO: 140201 - DNA, 120 bp, Artificial Sequence
  ENSG00000104081_39 (sequence is synthesized)
tagctgctgattctactcctgctattgctcacaaccctcagagtcaaactttgtgaccggcctaggtcagaaaacgtgatcaagaaaaagggtggttccaggcgggcccagggaagagga

SEQ ID NO: 140202 - DNA, 120 bp, Artificial Sequence
  ENSG00000104081_40 (sequence is synthesized)
cccgagcaggcgtattttggaaacaataccgcaccgtgcggagtggcctcctcccgccccggcctgtgcccgccgccgccgccgcccctgcctgcgcctcccgcctcctgccgcagcccg

SEQ ID NO: 140203 - DNA, 120 bp, Artificial Sequence
  ENSG00000104081_41 (sequence is synthesized)
ggagtctaagttcagcatccctcttccagcccttaggggttgggatggctgcagcggggcttgagttcctttgctaggaataaagcattccctggccctgttctcaggaagtgccctcct

SEQ ID NO: 140204 - DNA, 120 bp, Artificial Sequence
  ENSG00000104081_42 (sequence is synthesized)
ggagtcgcgctgcgcacgggggcccgggaagggtttgggctgcggacgtctggggtgaccatgaagaactggggcgctggggtgagggaacggggtgcagaacccacagttgggtgcgct

SEQ ID NO: 140205 - DNA, 120 bp, Artificial Sequence
  ENSG00000104081_43 (sequence is synthesized)
gctccaagagggaacttgggggtagcatttgggactcgaaggagttgggtccaggtaggcaggggaacctggggtgcactgctgagcagacctgggcgcccgagaacggcccagcctctg

SEQ ID NO: 140206 - DNA, 120 bp, Artificial Sequence
  ENSG00000104081_44 (sequence is synthesized)
tggcaacatcaagcagagcaccagcagaaccaaaatcgtgtgtggtggcagatcctcctcttcctgcacaaccttgctttgaatggagaagagaacaggaacggggcaggccctaggtga

SEQ ID NO: 140207 - DNA, 120 bp, Artificial Sequence
  ENSG00000104093_0 (sequence is synthesized)
acaagcacccttgccctcccgcatttgtgcgccggtgcagcaggcagtgggaacatccgggcatttccgcagctgagcggcgacccgggcggcggcggcggtcgaggagctcccatggca

SEQ ID NO: 140208 - DNA, 120 bp, Artificial Sequence
  ENSG00000104093_1 (sequence is synthesized)
gggacgaggcggagggaaggcgaaaggggggcgaggagttaagccagagcctccgcggggcgggtttccgagggaggcacagagggaaacggctctcgcagcccgaggagggtcaggcgc

SEQ ID NO: 140209 - DNA, 120 bp, Artificial Sequence
  ENSG00000104093_2 (sequence is synthesized)
ggagcttgtcgcacctcccgcgcattctgtccagcccgggctccggagatgcatctgcatcaggtcctcaccggagctgtcaaccctggagacaactgctactccgtgggcagcgtcggg

SEQ ID NO: 140210 - DNA, 120 bp, Artificial Sequence
  ENSG00000104093_3 (sequence is synthesized)
gatgtccccttcacggcatatggatcaggctgtgatattgttattttggcaaatgactttgaatgtgtacagatcattcctggtgctaagcatggaaacatccaagtcagctgtgtggag

SEQ ID NO: 140211 - DNA, 120 bp, Artificial Sequence
  ENSG00000104093_4 (sequence is synthesized)
tgttctaaccaacaaggaagaattgcagcttcatatggtaatgctgtttgtatatttgagcccttgggcataaattctcataaaagaaattgtcaactcaagtgccagtggcttaaaact

SEQ ID NO: 140212 - DNA, 120 bp, Artificial Sequence
  ENSG00000104093_5 (sequence is synthesized)
gggcagttttttttgagttctgtgacatacaacttagcatgggatcctcaagataatagattgttgacagcaactgattctattcagttgtgggctcctccaggagatgatattctggaa

SEQ ID NO: 140213 - DNA, 120 bp, Artificial Sequence
  ENSG00000104093_6 (sequence is synthesized)
gaggaggaagaaattgataatacagttcctcctgttttaaatgattggaagtgtgtctggcagtgcaaaacctcagtatctgtacatttgatggaatggtctcctgatggtgaatatttt

SEQ ID NO: 140214 - DNA, 120 bp, Artificial Sequence
  ENSG00000104093_7 (sequence is synthesized)
gctactgctggaaaggatgattgtcttttgaaagtgtggtatcctatgactggttggaagtcttcaattatacctcaggatcatcatgaagtaaaaaggagacagtcctctactcaattt

SEQ ID NO: 140215 - DNA, 120 bp, Artificial Sequence
  ENSG00000104093_8 (sequence is synthesized)
tcttttgtttacttggcacatccccgagctgtgacaggtttttcgtggcgcaaaactagcaagtatatgcccaggggttctgtctgtaatgtgttgttaacttcatgtcatgatggtgtg

SEQ ID NO: 140216 - DNA, 120 bp, Artificial Sequence
  ENSG00000104093_9 (sequence is synthesized)
tgccggctctgggcagaaactttattaccagaagactgtcttttgggtgagcagatttgtgagactaccacttccagcattgccagcagcctttctcatgctggaagacacaaagacaga

SEQ ID NO: 140217 - DNA, 120 bp, Artificial Sequence
  ENSG00000104093_10 (sequence is synthesized)
atacagcatgctcttgagacaatacaccatttgaaaaatttaaggaaaggacagaggaggtcatctgttcttgtaactcatgctgaattaatgcccgaccagacagcaatgcatgaagtt

SEQ ID NO: 140218 - DNA, 120 bp, Artificial Sequence
  ENSG00000104093_11 (sequence is synthesized)
caaagacacatttcccaccatgcaaatgcactctgtcattttcatattgcagcaagcatcaaccctgccacagatattccaaatgtcttggttggcactgcatttaatgttgatgatgga

SEQ ID NO: 140219 - DNA, 120 bp, Artificial Sequence
  ENSG00000104093_12 (sequence is synthesized)
aatgggggctttgtagttcattggttaaacaacaaggaatttcattttacatcatctacagaagtatttatgcatcaattacgaaaactttctgataagcaggtagatcatgaaaatgat

SEQ ID NO: 140220 - DNA, 120 bp, Artificial Sequence
  ENSG00000104093_13 (sequence is synthesized)
gatgcagatagagaagatgaggaacattcacaggaggatagagaacggggtttacatatgaaattagaccatgatttatccctggatagagaatctgaggcaggtacaggatcatcagaa

SEQ ID NO: 140221 - DNA, 120 bp, Artificial Sequence
  ENSG00000104093_14 (sequence is synthesized)
catgaagatggagaaagagaaggaagtcctagaacttactcacgacttagtgtaccaatgccactgcctacggttctgcttgatcggaagattgaaacgctgctaactgaatggaataag

SEQ ID NO: 140222 - DNA, 120 bp, Artificial Sequence
  ENSG00000104093_15 (sequence is synthesized)
aatcctgatatgctttttacaatacaccctgtagatggtacctttctagtgtggcatgtgaagtatttggatgaatataatcctggaatatttagacaagttcaggtttctttttcttct

SEQ ID NO: 140223 - DNA, 120 bp, Artificial Sequence
  ENSG00000104093_16 (sequence is synthesized)
cggattcctgttgcatttccctctggtgatgcaagctctcttagtaaaaatatcatgatgtatgcctgtataaatgcgacaaaagattctcaccacacgctgttacaccaggaggggatg

SEQ ID NO: 140224 - DNA, 120 bp, Artificial Sequence
  ENSG00000104093_17 (sequence is synthesized)
tctgtaggcagtcctcacggatcacagccacactctagatcccacagtacacatatgaacatcttagctcccacagtaatgatgatctctaaacacatagatggttctttaaatcagtgg

SEQ ID NO: 140225 - DNA, 120 bp, Artificial Sequence
  ENSG00000104093_18 (sequence is synthesized)
gcagtcacttttgctgataagtctgcctttaccactgttctaactgtatctcacaaatttagatattgcggtcatcgatttcacctcaatgacctggcatgtcattcagttttaccactg

SEQ ID NO: 140226 - DNA, 120 bp, Artificial Sequence
  ENSG00000104093_19 (sequence is synthesized)
ttattgacatcctctcatcataatgctctattgactcctgaattagattgtcagtgggactcagacaataaattaagtagattaatggaccctgtaaaacatataaaaggttcctcgaaa

SEQ ID NO: 140227 - DNA, 120 bp, Artificial Sequence
  ENSG00000104093_20 (sequence is synthesized)
caacctcttagaaatgcagcaactcgtacatttcatgacccaaatgcaatctacagtgaacttattctgtggcgtgtagacccaataggacctttgtcatacactggaggagtatcagaa

SEQ ID NO: 140228 - DNA, 120 bp, Artificial Sequence
  ENSG00000104093_21 (sequence is synthesized)
ttggctcgaattaactctttacatacctcagcgttctctaatgtggcttggcttccaactctcattcccagttactgtctaggcacatactgcaattctgcaagtgcttgctttgttgct

SEQ ID NO: 140229 - DNA, 120 bp, Artificial Sequence
  ENSG00000104093_22 (sequence is synthesized)
tctgatggcaaaaatctgagactctatcaagctgtagtggatgcaaggaaattattagatgaattgtcagacccagaatcttcaaaacttattggagaagtgtttaatattgtgagccaa

SEQ ID NO: 140230 - DNA, 120 bp, Artificial Sequence
  ENSG00000104093_23 (sequence is synthesized)
cagtctactgctcgacctggctgcattattgaactcgacgcaataaccaaccaatgtggctcaaatacacagttgcttcatgtgtttcaagaagacttcattataggatataaaccacat

SEQ ID NO: 140231 - DNA, 120 bp, Artificial Sequence
  ENSG00000104093_24 (sequence is synthesized)
aaggaagatatggagaaaaaggaaacagaaatattttttcagccatcacaaggataccgcccaccaccattttcagaaaagttctttctagtagtaattgagaaggacagcaataataac

SEQ ID NO: 140232 - DNA, 120 bp, Artificial Sequence
  ENSG00000104093_25 (sequence is synthesized)
tctattctgcatatgtggcaccttcatcttaaatctgtacaagcatgtttagctaaagcttcagaaggggcttcctctgagagtctactttcagtccctggacagaagaacgtagattct

SEQ ID NO: 140233 - DNA, 120 bp, Artificial Sequence
  ENSG00000104093_26 (sequence is synthesized)
tctccagaaacctctcctagtgtgagccccatgccacattcttcatcaattgccaatcttcaaactgccagtaaacttattctgagttctagactggtgtatagccaaccccttgatctc

SEQ ID NO: 140234 - DNA, 120 bp, Artificial Sequence
  ENSG00000104093_27 (sequence is synthesized)
ccagaatcagttgaagtaataagagcaacgccttcagcaggccatctgagttcttcttcaatttatccagtgtgccttgcaccttatttagtggttacaacttgttctgacaataaagta

SEQ ID NO: 140235 - DNA, 120 bp, Artificial Sequence
  ENSG00000104093_28 (sequence is synthesized)
cgcttctggaaatgttgtatggaagccaacccagagtgtaataaaagtgatgagaaagaaatttatcattggaagagatggcctttgatgaatgatgaaggagaagataatagcagtaca

SEQ ID NO: 140236 - DNA, 120 bp, Artificial Sequence
  ENSG00000104093_29 (sequence is synthesized)
gtgagcattgtgggaagaccagttgctgttagctgttcatacacaggtcgccttgcagtggcttataagcagcctatccaccataatggttttgtttctaaagaattttccatgcatgtt

SEQ ID NO: 140237 - DNA, 120 bp, Artificial Sequence
  ENSG00000104093_30 (sequence is synthesized)
tgtatatttgaatgtgaatctacaggaggatcagagtgggttttagaacaaacaattcatcttgatgatttggttaaggttgggagtgtacttgattcaagggtcagcgtcgacagtaat

SEQ ID NO: 140238 - DNA, 120 bp, Artificial Sequence
  ENSG00000104093_31 (sequence is synthesized)
ctgtttgtgtatagcaagtcagatgcactcttgagcaaggatagatatcttattccgaatatcaaacatttagtacatttggactgggtatcaaaagaagatggctcccacattcttaca

SEQ ID NO: 140239 - DNA, 120 bp, Artificial Sequence
  ENSG00000104093_32 (sequence is synthesized)
gtgggagtcggtgcgaatatcttcatgtatggaaggctttcaggaattgtgactgagcaaaccaacagtaaggatggagtagctgtcatcactttaccactaggtggtagtatcaagcaa

SEQ ID NO: 140240 - DNA, 120 bp, Artificial Sequence
  ENSG00000104093_33 (sequence is synthesized)
ggagttaagtcaagatgggttcttcttagatctatagacttggtatcttctgttgatggtactccttcactgcctgtttctctctcttgggtaagagatgggatattggtggtaggaatg

SEQ ID NO: 140241 - DNA, 120 bp, Artificial Sequence
  ENSG00000104093_34 (sequence is synthesized)
gattgtgaaatgcatgtatatgcacagtggaagcatgctgtcaaatttggagacactgaagctgatagttctaatgcagaagaggcagcaatgcaagatcattcgacctttaaatctaat

SEQ ID NO: 140242 - DNA, 120 bp, Artificial Sequence
  ENSG00000104093_35 (sequence is synthesized)
atgctggcaagaaaaagtgttgttgaaggaacagctatttctgatgatgttttttgttcaccaactgtaattcaagatggtggcttatttgaggctgcacatgtactttcccctactctt

SEQ ID NO: 140243 - DNA, 120 bp, Artificial Sequence
  ENSG00000104093_36 (sequence is synthesized)
ccacaatatcatccaactcagctgttagaattgatggatttagggaaagtgcgaagggctaaagccattctctctcatttagtaaaatgtattgcaggtgaagtagcaatagttagagat

SEQ ID NO: 140244 - DNA, 120 bp, Artificial Sequence
  ENSG00000104093_37 (sequence is synthesized)
cctgatgctggagaaggaactaagcgacatctctctcgaactattagtgtaagtggcagtacagcaaaggaaacagtcaccgtaggaaaagatggtactcgagattatactgagatagat

SEQ ID NO: 140245 - DNA, 120 bp, Artificial Sequence
  ENSG00000104093_38 (sequence is synthesized)
tctatccctccactaccactatatgcattacttgctgcagatcaagatacatcctacagaatttcagaagaaagtacaaagataccacagagctatgaagatcagacagtaagtcaacca

SEQ ID NO: 140246 - DNA, 120 bp, Artificial Sequence
  ENSG00000104093_39 (sequence is synthesized)
gaggatcagtattcagagctgtttcaaatccaggatataccaacggatgatattgatttagagcctgaaaagagagaaaacaaatcaaaagtaataaatctttctcaatatggaccagct

SEQ ID NO: 140247 - DNA, 120 bp, Artificial Sequence
  ENSG00000104093_40 (sequence is synthesized)
tactttggccaagaacatgcaagggtactttcaagtcatcttatgcactcaagtctaccaggccttacccgtttggagcagatgttccttgtagctttggctgatacagtggctactact

SEQ ID NO: 140248 - DNA, 120 bp, Artificial Sequence
  ENSG00000104093_41 (sequence is synthesized)
agtactgagcttgatgaaagcagagataagagttgctcaggaagagatacattagatgagtgtggtttgagatacttgttagctatgcgcctacacacatgccttttgacatcgctgcct

SEQ ID NO: 140249 - DNA, 120 bp, Artificial Sequence
  ENSG00000104093_42 (sequence is synthesized)
cctttataccgagtgcagctacttcatcaaggtgtctctacatgccattttgcctgggcttttcattctgaggctgaagaagaactgattaatatgattccagcaattcagagaggggac

SEQ ID NO: 140250 - DNA, 120 bp, Artificial Sequence
  ENSG00000104093_43 (sequence is synthesized)
ccccagtggtctgaattaagagctatgggcataggatggtgggtgaggaacattaacacgcttcgaagatgcattgaaaaggttgccaaagcttcttttcaaaggaacaatgatgcctta

SEQ ID NO: 140251 - DNA, 120 bp, Artificial Sequence
  ENSG00000104093_44 (sequence is synthesized)
atagatggcgaaaagctgctttgaaaaatgctttttccttacttggaaaacaacgctttgaacaatcggctgcttttttcttgctagctggttcattgaaagatgccatagaggtatgtc

SEQ ID NO: 140252 - DNA, 120 bp, Artificial Sequence
  ENSG00000104093_45 (sequence is synthesized)
ttgaaaaaatggaagatattcagctagccatggttattgcccgtttatatgaatctgaatttgagacttcatccacttatatatccatcctaaatcagaagattttgggttgccaaaagg

SEQ ID NO: 140253 - DNA, 120 bp, Artificial Sequence
  ENSG00000104093_46 (sequence is synthesized)
atggctcaggattcagttgcaaaagattacatcctgatcctttcctgcgtagtcttgcctattgggtaatgaaagattacacccgagccttggacacattactggaacaaacaccaaagg

SEQ ID NO: 140254 - DNA, 120 bp, Artificial Sequence
  ENSG00000104093_47 (sequence is synthesized)
aggatgatgaacatcaagttatcatcaagtcttgtaacccggtggcatttagtttttataactaccttcgaactcatcctttgctcattcgaagaaatcttgcctcccctgaaggaactt

SEQ ID NO: 140255 - DNA, 120 bp, Artificial Sequence
  ENSG00000104093_48 (sequence is synthesized)
tggcaaccttaggtctcaaaactgagaagaactttgttgataaaattaacctcatagaaagaaaattattctttaccactgcaaatgctcattttaaagttggatgccctgttttagcct

SEQ ID NO: 140256 - DNA, 120 bp, Artificial Sequence
  ENSG00000104093_49 (sequence is synthesized)
tggaggtactctccaaaattccaaaagtaaccaaaacatctgccttatctgcaaaaaaagatcagcctgacttcatttctcacaggatggatgatgtaccttcacattcaaaagctctga

SEQ ID NO: 140257 - DNA, 120 bp, Artificial Sequence
  ENSG00000104093_50 (sequence is synthesized)
gtgatggcaatggaagttctggcattgaatggtcaaatgtaacttcatcacagtatgactggagtcagccaatagtaaaagttgatgaggaacctcttaatcttgattggggtgaagatc

SEQ ID NO: 140258 - DNA, 120 bp, Artificial Sequence
  ENSG00000104093_51 (sequence is synthesized)
acgacagtgccttagatgaagaggaagacgatgctgttggtttagtgatgaaaagtacagatgccagggaaaaagataaacaatcagatcagaaggcctcagaccctaacatgttattaa

SEQ ID NO: 140259 - DNA, 120 bp, Artificial Sequence
  ENSG00000104093_52 (sequence is synthesized)
cacctcaggaagaggatgatcctgaaggtgatactgaagttgatgtgattgctgaacaactaaaattcagagcttgtttaaagatccttatgactgaattaagaacattggctacaggtt

SEQ ID NO: 140260 - DNA, 120 bp, Artificial Sequence
  ENSG00000104093_53 (sequence is synthesized)
atgaagtagatggaggaaaactcagatttcaactctataactggcttgaaaaggaaattgctgccttgcatgagatatgtaatcatgaatcagttattaaagagtattccagtaagacat

SEQ ID NO: 140261 - DNA, 120 bp, Artificial Sequence
  ENSG00000104093_54 (sequence is synthesized)
attccaaagtagagagtgatctgctggatcaggaagaaatggtagacaaaccagatattggttcctatgagcgccatcaaatagaaagaagaagattgcaggccaaacgagagcatgcag

SEQ ID NO: 140262 - DNA, 120 bp, Artificial Sequence
  ENSG00000104093_55 (sequence is synthesized)
aaagacgaaagtcgtggttgcagaaaaaccaagatctcctgagagtatttctcagctactgtagccttcatggggcccaaggtggtggtttggcttcagtaaggatggaactcaaatttt

SEQ ID NO: 140263 - DNA, 120 bp, Artificial Sequence
  ENSG00000104093_56 (sequence is synthesized)
tgctacaagaatcacaacaggaaactacagtaaagcagctccagtctccactaccactgcctaccaccctacctctgctttcagcaagtattgcgtcaacaaaaacagtcatagctaatc

SEQ ID NO: 140264 - DNA, 120 bp, Artificial Sequence
  ENSG00000104093_57 (sequence is synthesized)
ctgtattgtacttaaataatcacatccatgatatactttatactattgttcagatgaaaacaccacctcatcccagtattgaagatgtgaaggtgcacacacttcattcactagcagcat

SEQ ID NO: 140265 - DNA, 120 bp, Artificial Sequence
  ENSG00000104093_58 (sequence is synthesized)
cactttctgcatcaatttaccaagcattatgtgacagtcatagctacagtcaaacagaaggaaatcagtttacaggaatggcttatcaaggacttcttttaagtgatcgtagaagactaa

SEQ ID NO: 140266 - DNA, 120 bp, Artificial Sequence
  ENSG00000104093_59 (sequence is synthesized)
ggacagaaagcattgaagaacacgcaacaccaaattcatctcctgctcaatggcctggtgtgagctcacttattaatcttttgagttcagcccaagatgaagaccagccaaaactgaaca

SEQ ID NO: 140267 - DNA, 120 bp, Artificial Sequence
  ENSG00000104093_60 (sequence is synthesized)
ttttgctatgtgaagctgttgttgctgtttacttaagtttattgatacatgctcttgccacaaattcctccagtgaattatttcggcttgcagcccacccattaaataatcgaatgtggg

SEQ ID NO: 140268 - DNA, 120 bp, Artificial Sequence
  ENSG00000104093_61 (sequence is synthesized)
ctgctgtttttggaggcggtgtaaaacttgttgtgaaacctcgaagacaatcagaaaatatttcagcacctcctgtcctttctgaagacatagataaacaccgtaggagatttaacatga

SEQ ID NO: 140269 - DNA, 120 bp, Artificial Sequence
  ENSG00000104093_62 (sequence is synthesized)
gaatgctcgtccctggaaggcctgtaaaagatgctaccccaccaccggtgcctgcagaaagaccatcttacaaagaaaaatttattcctcccgaacttagtatgtgggattattttgttg

SEQ ID NO: 140270 - DNA, 120 bp, Artificial Sequence
  ENSG00000104093_63 (sequence is synthesized)
caaagccatttcttcctttgtctgatagtggtgttatatatgattctgatgaaagcattcatagtgatgaagaagatgatgcctttttttcagatacacaaatacaggagcaccaagatc

SEQ ID NO: 140271 - DNA, 120 bp, Artificial Sequence
  ENSG00000104093_64 (sequence is synthesized)
caaattcctatagctgggctcttctacatttgacaatggttaaactagcacttcacaatgtcaagaatttctttcctattgctggactggaattctctgagctgcctgtaacatcaccat

SEQ ID NO: 140272 - DNA, 120 bp, Artificial Sequence
  ENSG00000104093_65 (sequence is synthesized)
taggtattgctgtgattaaaaacttggagaactgggaacagatcttgcaagagaaaatggatcagtttgaaggtccaccccctaactatatcaacacatatccaactgacctttcagtgg

SEQ ID NO: 140273 - DNA, 120 bp, Artificial Sequence
  ENSG00000104093_66 (sequence is synthesized)
gagctggaccagctattcttcgaaataaagcaatgctagaacctgaaaataccccattcaagtcccgggattcttctgcatttccagtcaaacgactttggcatttccttgttaaacaag

SEQ ID NO: 140274 - DNA, 120 bp, Artificial Sequence
  ENSG00000104093_67 (sequence is synthesized)
aggtccttcaagagacatttattagatatattttcactaagaaaagaaagcagagtgaggttgaagctgatctgggctatccaggtggaaaggcgaaagtcatccataaggaatctgata

SEQ ID NO: 140275 - DNA, 120 bp, Artificial Sequence
  ENSG00000104093_68 (sequence is synthesized)
tgatcatggcattttctgttaataaggcaaattgtaatgaaattgttttggcttcaacacatgatgttcaagaacttgatgttacttctctactggcctgtcagtcatacatatggatcg

SEQ ID NO: 140276 - DNA, 120 bp, Artificial Sequence
  ENSG00000104093_69 (sequence is synthesized)
gagaagaatatgacagagaatccaaaagttcagatgatgttgattatcgtggttccactacaactctttatcaacccagtgcaacatcctattcagcaagtcaggtgcatccaccttcat

SEQ ID NO: 140277 - DNA, 120 bp, Artificial Sequence
  ENSG00000104093_70 (sequence is synthesized)
ctctgccatggctgggcactggacagactagcactggagctagtgtgcttatgaaaaggaatctacataatgttaagagaatgacttcacacccagtccatcaatactatcttacaggtg

SEQ ID NO: 140278 - DNA, 120 bp, Artificial Sequence
  ENSG00000104093_71 (sequence is synthesized)
ctcaggacggcagtgtacgaatgtttgaatggacgcggcctcagcaacttgtctgctttcgtcaagctggcaatgcaagagttactagattatattttaattcacaaggcaacaagtgtg

SEQ ID NO: 140279 - DNA, 120 bp, Artificial Sequence
  ENSG00000104093_72 (sequence is synthesized)
gtgttgcggatggagagggttttctgagtatctggcaagttaaccaaactgcatcaaatcctaaaccttatatgagttggcagtgccacagtaaagccacaagtgactttgcatttatta

SEQ ID NO: 140280 - DNA, 120 bp, Artificial Sequence
  ENSG00000104093_73 (sequence is synthesized)
cctcttcaagtctagttgccacatctggacactccaatgacaatagaaatgtttgcctctgggacacattaatatcacccggaaacagcctcattcatggtttcacgtgccacgatcatg

SEQ ID NO: 140281 - DNA, 120 bp, Artificial Sequence
  ENSG00000104093_74 (sequence is synthesized)
gtgccacggtactgcagtatgcacccaaacagcaactcctaatctcggggggtaggaaaggacacgtctgcatttttgacatcaggcaaaggcagctcattcacacgttccaggcccatg

SEQ ID NO: 140282 - DNA, 120 bp, Artificial Sequence
  ENSG00000104093_75 (sequence is synthesized)
actcagctattaaggctctggccttggatccctatgaggaatattttaccacaggttcagcagaaggtaacataaaggtttggagattgacaggccatggcctaattcattcatttaaaa

SEQ ID NO: 140283 - DNA, 120 bp, Artificial Sequence
  ENSG00000104093_76 (sequence is synthesized)
gtgaacatgctaagcagtccatatttcgaaacattggggctggagtcatgcagattgacatcatccagggcaatcggctcttctcctgtggtgcagatggcacgctgaaaaccagggttt

SEQ ID NO: 140284 - DNA, 120 bp, Artificial Sequence
  ENSG00000104093_77 (sequence is synthesized)
tgcccaatgcttttaacatccctaacagaattcttgacattctataaagattggggttttatttttatatacatttcagttaaaaggcacactacagtcatcactaggcaattctgcttt

SEQ ID NO: 140285 - DNA, 120 bp, Artificial Sequence
  ENSG00000104093_78 (sequence is synthesized)
ctaagcagttgtattgaaaacagagaatctctgtgtagaatttgaatatgacccaagctgagtattatctaaacaggttggtggaatgaatgcgcatgtaccttattatgctgacatact

SEQ ID NO: 140286 - DNA, 120 bp, Artificial Sequence
  ENSG00000104093_79 (sequence is synthesized)
aaaaaaaataaaacctagtattgtatgaaggatagctattctttacagcatttagcaaacctgattcagaaaacatttgagattagcaaattagtaacttgaaataatgaaaaggacgtt

SEQ ID NO: 140287 - DNA, 120 bp, Artificial Sequence
  ENSG00000104093_80 (sequence is synthesized)
tataccaaattaaggaagaaaatgttgctgatttgggtttttcttcctgttcttaccactgactgaagcatgcctgcagtctcctcctctgttgaatgaaggataatcataaggtgtttg

SEQ ID NO: 140288 - DNA, 120 bp, Artificial Sequence
  ENSG00000104093_81 (sequence is synthesized)
ttaggagcgctagaccacctggaaaactttcttagctgtggagcagtgcgcagtgaccagttctctgctgtgagaggccgtttccattctttcctgctgaatatttttcctgttagtgtt

SEQ ID NO: 140289 - DNA, 120 bp, Artificial Sequence
  ENSG00000104093_82 (sequence is synthesized)
tatactgagctagtactgtaacttgcaaatgagtgcaaatttaaatgcaatgttttactcacaatttgcacattcacattttttggactgctagtttttctatttaaatatttgccttca

SEQ ID NO: 140290 - DNA, 120 bp, Artificial Sequence
  ENSG00000104093_83 (sequence is synthesized)
tgttaggaatgtactatgtgaacatgacatatttgtagttaaccaaacacaccttcttagtccagtttagtactttttcttttcgtgtattcaaggttaaacacccaaacatttaaggat

SEQ ID NO: 140291 - DNA, 120 bp, Artificial Sequence
  ENSG00000104093_84 (sequence is synthesized)
atgttgaaactacaccaatagagcatttcatatcataattaaaatgaatgttaggcttcttgtggccagttaatagttgatgagattggtgacattatttattgccacagcctattgtat

SEQ ID NO: 140292 - DNA, 120 bp, Artificial Sequence
  ENSG00000104093_85 (sequence is synthesized)
aaactatgcagagttaaatatttgcttgtaaaatattagccaatgttgtcattattttgatgtatttccttggttatgaccaaaaatatgttgagatactgaaactaatgtctgtgtgtt

SEQ ID NO: 140293 - DNA, 120 bp, Artificial Sequence
  ENSG00000104093_86 (sequence is synthesized)
taaatgtttaccagcaaattgtcttatcatgttaatgagaatgttcaatgcctgtgtggtaaatagtaaatacaatggcataaaagtaactttctctgaagatgtgatgttcaggctgtg

SEQ ID NO: 140294 - DNA, 120 bp, Artificial Sequence
  ENSG00000104093_87 (sequence is synthesized)
aaatatatatgtaaaagaaaaataaatgttatttgttagagtttttagtttgatactgtttttgaccattgagatttttaatttgataaaatgtttaactgttagagaatttgcaagcta

SEQ ID NO: 140295 - DNA, 120 bp, Artificial Sequence
  ENSG00000104093_88 (sequence is synthesized)
gaatacttttctattagtagggtttttccactctaggcattaaaaaaaaaaactttgttacataattcttatttcagagtgttttttcttaccaaaaagagaaaagcaaaaatgaaagtt

SEQ ID NO: 140296 - DNA, 120 bp, Artificial Sequence
  ENSG00000104093_89 (sequence is synthesized)
attcctaatatatgtaatttttattttaaagctattcagtcttttttaaactactactgttaacactgttagtttctctaggactaacaggcatctgatattgtctccatcattctcaac

SEQ ID NO: 140297 - DNA, 120 bp, Artificial Sequence
  ENSG00000104093_90 (sequence is synthesized)
ctacatttaaatcttatgggatgtgcataactctaaatagagctgtgctgcagcaactaaaactgctgatgaatgttttctaggttgaagctgatctgggctatccaggtggaaaggcga

SEQ ID NO: 140298 - DNA, 120 bp, Artificial Sequence
  ENSG00000104093_91 (sequence is synthesized)
aagtcatccataaggaatctgatatgatcatggcattttctgttaataaggtaaaagctctcatcattatacacagtgtatttctccttagtgaaattgcttaaatcatcgattctgcct

SEQ ID NO: 140299 - DNA, 120 bp, Artificial Sequence
  ENSG00000104093_92 (sequence is synthesized)
gtccttcaagagacatttattagatatattttcactaagaaaagaaagcagagtgaggtattttgagaaaaatattttctattgtaatttttctttagttttctttaacatttctaagga

SEQ ID NO: 140300 - DNA, 120 bp, Artificial Sequence
  ENSG00000104093_93 (sequence is synthesized)
aatcagtgcttgatttattctgaaattttctttctggttgggtaatagtcaaagttcactaaactaccgtgaactacttttaagataaaaccttataattttcatttcatagcaatgaaa

SEQ ID NO: 140301 - DNA, 120 bp, Artificial Sequence
  ENSG00000104093_94 (sequence is synthesized)
caacataggtactttgataaattacatatattcaagtgaaagttggtactttacagtatttgtcattaggtttttacacataataaacattgtgatggatggcttgaggaatttaatata

SEQ ID NO: 140302 - DNA, 120 bp, Artificial Sequence
  ENSG00000104093_95 (sequence is synthesized)
gcaaattcatttttatcatctttaagtggtggagtggccatttcagcttgaaatatttcactgtctttataatttcattccatgcatgtgttttgtgtttgtgacggtgtggtggtattt

SEQ ID NO: 140303 - DNA, 120 bp, Artificial Sequence
  ENSG00000104093_96 (sequence is synthesized)
agtctatagaagaacatgtggagcaggtcaaccaaaactgcatagcagaagattgccacatcaaggttgaagctgatctgggctatccaggtggaaaggcgaaagtcatccataaggaat

SEQ ID NO: 140304 - DNA, 120 bp, Artificial Sequence
  ENSG00000104093_97 (sequence is synthesized)
ttctttgcggttttctatggctttttactccactctgtgcctcttaatgtatacacattcttattgcagaatatttatgcacttttggaagagctaagagagacatactactgtataaat

SEQ ID NO: 140305 - DNA, 120 bp, Artificial Sequence
  ENSG00000104093_98 (sequence is synthesized)
tactaataaaaatatattagccatgttttataattaatcagtatcttaccatcacagtggaaattggggtgattacaggacatcagagaatttaagcaaattttccaaagctagttttca

SEQ ID NO: 140306 - DNA, 120 bp, Artificial Sequence
  ENSG00000104093_99 (sequence is synthesized)
ctgaaaatagactagagtatcagtgaaaaattggtctagtgctttatgttaggatccttacattcactacggatacatccctagtgcttttagaaacccaagtctctagaatattgcaaa

SEQ ID NO: 140307 - DNA, 120 bp, Artificial Sequence
  ENSG00000104093_100 (sequence is synthesized)
ttgacatttactgtgttaactgagatctaccctagtttgaactactgttatttcttgtctggattactaatatctatctgatatctggtttcctgctgccttcagccccagtgtctgttc

SEQ ID NO: 140308 - DNA, 120 bp, Artificial Sequence
  ENSG00000104093_101 (sequence is synthesized)
tcaacagaggagatcatgacatttctctgcttaaaactttgtaatggttccatatttctctctcttttttcttttgttttgagacagggtcgcactgtatcccctgggctggagtgcagt

SEQ ID NO: 140309 - DNA, 120 bp, Artificial Sequence
  ENSG00000104093_102 (sequence is synthesized)
caaatggtcctcccacctcaacctcccaagtagttgcgactataggcatgtaccaccatggccagctaatttttaaatttttcgtagagatggagtttccctgtgttgctcaggctggtc

SEQ ID NO: 140310 - DNA, 120 bp, Artificial Sequence
  ENSG00000104093_103 (sequence is synthesized)
ttgaactctggggctaagtgatcctcccacttcagcctcccaaattgctggaattatgggcatgagccaccatgcccagctgctccatatttctttcagataaaaagccaaaagcctttt

SEQ ID NO: 140311 - DNA, 120 bp, Artificial Sequence
  ENSG00000104093_104 (sequence is synthesized)
gtagactacaacttcccttctactcagtagcacagttactatgtctcagagctcacctcgtaagttcttgtcctctctggttctactctggccacattggcatttttactgtttctcagt

SEQ ID NO: 140312 - DNA, 120 bp, Artificial Sequence
  ENSG00000104093_105 (sequence is synthesized)
taaccttccctctttgagcctttgtgttgtttgttttctttgtcaggaatgtttttcctccagctatctccaaggatagctcccatagatcctttaggtctttgctcactaataccttgt

SEQ ID NO: 140313 - DNA, 120 bp, Artificial Sequence
  ENSG00000104093_106 (sequence is synthesized)
caatgaggtttaccttgaccaccctttaaaaaattgtacccccacttatcttgctatttaaaaatttttttacagcatttatttatttattgtttactatgtaaaatgttatctaaaggt

SEQ ID NO: 140314 - DNA, 120 bp, Artificial Sequence
  ENSG00000104093_107 (sequence is synthesized)
attgtttactatgtaaaatgttatctaaaggtacataagggtaggaagcttttttcactgatgagtccccagtacttagaacagtatctggaacagccaggtgtggtggctcacacctgt

SEQ ID NO: 140315 - DNA, 73 bp, Artificial Sequence
  ENSG00000104093_108 (sequence is synthesized)
aaaaaattatccaggtgtggtggcacgtgcctatagtccctgctgctaggaaggctgaggcaggagaatcgct

SEQ ID NO: 140316 - DNA, 62 bp, Artificial Sequence
  ENSG00000104093_109 (sequence is synthesized)
ctggactgcaccattgcactccagcttgggagtcagagcaagactccatctcaaaaaaaaaa

SEQ ID NO: 140317 - DNA, 120 bp, Artificial Sequence
  ENSG00000104093_110 (sequence is synthesized)
taatactcaccaactttgagaaggttggtctctgctcttctgtatactttttatgaggcagtatcacttagggcttaaggtttaaactttctttttctctctgtgttcatttcatattga

SEQ ID NO: 140318 - DNA, 120 bp, Artificial Sequence
  ENSG00000104093_111 (sequence is synthesized)
gattatggataaaaagtttgttctgacattgcttaacatttttctttaatcatgtgattacagaaattcaatgacttacaaaacaataaatgtaccttagaatgaaaaatgcatcagtaa

SEQ ID NO: 140319 - DNA, 120 bp, Artificial Sequence
  ENSG00000104112_0 (sequence is synthesized)
acaggaacttcagcacccacagggcggacagcgctcccctctacctggagacttgactcccgcgcgccccaaccctgcttatcccttgaccgtcgagtgtcagagatcctgcagccgccc

SEQ ID NO: 140320 - DNA, 120 bp, Artificial Sequence
  ENSG00000104112_1 (sequence is synthesized)
agtcccggcccctctcccgccccacacccaccctcctggctcttcctgtttttactcctccttttcattcataacaaaagctacagctccaggagcccagcgccgggctgtgacccaagc

SEQ ID NO: 140321 - DNA, 120 bp, Artificial Sequence
  ENSG00000104112_2 (sequence is synthesized)
cgagcgtggaagaatggggttcctcgggaccggcacttggattctggtgttagtgctcccgattcaagctttccccaaacctggaggaagccaagacaaatctctacataatagagaatt

SEQ ID NO: 140322 - DNA, 120 bp, Artificial Sequence
  ENSG00000104112_3 (sequence is synthesized)
aagtgcagaaagacctttgaatgaacagattgctgaagcagaagaagacaagattaaaaaaacatatcctccagaaaacaagccaggtcagagcaactattcttttgttgataacttgaa

SEQ ID NO: 140323 - DNA, 120 bp, Artificial Sequence
  ENSG00000104112_4 (sequence is synthesized)
cctgctaaaggcaataacagaaaaggaaaaaattgagaaagaaagacaatctataagaagctccccacttgataataagttgaatgtggaagatgttgattcaaccaagaatcgaaaact

SEQ ID NO: 140324 - DNA, 120 bp, Artificial Sequence
  ENSG00000104112_5 (sequence is synthesized)
gatcgatgattatgactctactaagagtggattggatcataaatttcaagatgatccagatggtcttcatcaactagacgggactcctttaaccgctgaagacattgtccataaaatcgc

SEQ ID NO: 140325 - DNA, 120 bp, Artificial Sequence
  ENSG00000104112_6 (sequence is synthesized)
tgccaggatttatgaagaaaatgacagagccgtgtttgacaagattgtttctaaactacttaatctcggccttatcacagaaagccaagcacatacactggaagatgaagtagcagaggt

SEQ ID NO: 140326 - DNA, 120 bp, Artificial Sequence
  ENSG00000104112_7 (sequence is synthesized)
tttacaaaaattaatctcaaaggaagccaacaattatgaggaggatcccaataagcccacaagctggactgagaatcaggctggaaaaataccagagaaagtgactccaatggcagcaat

SEQ ID NO: 140327 - DNA, 120 bp, Artificial Sequence
  ENSG00000104112_8 (sequence is synthesized)
tcaagatggtcttgctaagggagaaaacgatgaaacagtatctaacacattaaccttgacaaatggcttggaaaggagaactaaaacctacagtgaagacaactttgaggaactccaata

SEQ ID NO: 140328 - DNA, 120 bp, Artificial Sequence
  ENSG00000104112_9 (sequence is synthesized)
tttcccaaatttctatgcgctactgaaaagtattgattcagaaaaagaagcaaaagagaaagaaacactgattactatcatgaaaacactgattgactttgtgaagatgatggtgaaata

SEQ ID NO: 140329 - DNA, 120 bp, Artificial Sequence
  ENSG00000104112_10 (sequence is synthesized)
tggaacaatatctccagaagaaggtgtttcctaccttgaaaacttggatgaaatgattgctcttcagaccaaaaacaagctagaaaaaaatgctactgacaatataagcaagcttttccc

SEQ ID NO: 140330 - DNA, 120 bp, Artificial Sequence
  ENSG00000104112_11 (sequence is synthesized)
agcaccatcagagaagagtcatgaagaaacagacagtaccaaggaagaagcagctaagatggaaaaggaatatggaagcttgaaggattccacaaaagatgataactccaacccaggagg

SEQ ID NO: 140331 - DNA, 120 bp, Artificial Sequence
  ENSG00000104112_12 (sequence is synthesized)
aaagacagatgaacccaaaggaaaaacagaagcctatttggaagccatcagaaaaaatattgaatggttgaagaaacatgacaaaaagggaaataaagaagattatgacctttcaaagat

SEQ ID NO: 140332 - DNA, 120 bp, Artificial Sequence
  ENSG00000104112_13 (sequence is synthesized)
aaaggcatccttgacaaggaagaagccgaggccatcaagcgcatttatagcagcctgtaaaaatggcaaaagatccaggagtctttcaactgtttcagaaaacataatatagcttaaaac

SEQ ID NO: 140333 - DNA, 120 bp, Artificial Sequence
  ENSG00000104112_14 (sequence is synthesized)
acttctaattctgtgattaaaattttttgacccaagggttattagaaagtgctgaatttacagtagttaaccttttacaagtggttaaaacatagctttcttcccgtaaaaactatctga

SEQ ID NO: 140334 - DNA, 120 bp, Artificial Sequence
  ENSG00000104112_15 (sequence is synthesized)
aagtaaagttgtatgtaagctgagattttgtatacagaatccttatttcctcatagacttatattttataatcagaatatgttgctttgaaaaagcctctaatggactgaccttaaaact

SEQ ID NO: 140335 - DNA, 120 bp, Artificial Sequence
  ENSG00000104112_16 (sequence is synthesized)
catccttcttccactgtctcatccacataagcactccccgaagaattaagggggttctgttttcaaggcatgccaagtactaaagcaccttgcagagcgtgtctattacaagatgtcatt

SEQ ID NO: 140336 - DNA, 120 bp, Artificial Sequence
  ENSG00000104112_17 (sequence is synthesized)
tccaccagcagttcccttaggggagctgaaataaattcacattttctcaaagtctcatagctttggaggagccatctgcttttttggctgctctttttagctggctttttattaggctca

SEQ ID NO: 140337 - DNA, 120 bp, Artificial Sequence
  ENSG00000104112_18 (sequence is synthesized)
gtgacataaaaaggatccaggtaaatgggtataggatttgctggatttactaacaatttccccctgttcttaacacttcctattagtgacttttcagacattgagtttacttataaagag

SEQ ID NO: 140338 - DNA, 120 bp, Artificial Sequence
  ENSG00000104112_19 (sequence is synthesized)
agatatttatgtactctctaagaagacaaatgaggtcataaacactgcataaagcaaggcaaaaatgtatgccacatctcagttatctaaactagattagatccaagccaagttttctca

SEQ ID NO: 140339 - DNA, 120 bp, Artificial Sequence
  ENSG00000104112_20 (sequence is synthesized)
acagagagcaaagggccaggcagtaaggtagaaatagagataaaaatcattccttccttgtgatccaaagctggtcgagcagctttcctggaggaaaaggttaatgaacttcaggtccct

SEQ ID NO: 140340 - DNA, 120 bp, Artificial Sequence
  ENSG00000104112_21 (sequence is synthesized)
gcaactcagcccccaccacaaacacagccctggaaacatacagtggcgcaaggtcctcttgaaatgttaatggttaatgttcccaaaccagagaatgctttgaaaatgtatcattcagtg

SEQ ID NO: 140341 - DNA, 120 bp, Artificial Sequence
  ENSG00000104112_22 (sequence is synthesized)
aatgtatcattcagtgtaaattaattacatacatatttttctatatatttgtttcaaactgtaaaaataacataatatgtaatttgtgtattagtgagaggtgaagccagctggacttcc

SEQ ID NO: 140342 - DNA, 120 bp, Artificial Sequence
  ENSG00000104112_23 (sequence is synthesized)
tcttacaagaggattgtaaaatgcacccatcagtgctctgtaaaacacaccaatcagcgctctgtagctagcaataggtttgtaaaatgcacccatcagcactctgtaaaacgcaccaat

SEQ ID NO: 140343 - DNA, 120 bp, Artificial Sequence
  ENSG00000104112_24 (sequence is synthesized)
gcaccaatcagcaggattctaaaagtagacaatcacagggaggattgaaaaaaagggcactctgatagggcaaaaacggaacatgggaggggacaaataagggaataaaatctggccacc

SEQ ID NO: 140344 - DNA, 120 bp, Artificial Sequence
  ENSG00000104112_25 (sequence is synthesized)
ggggacaaataagggaataaaatctggccaccccagccagcagcagcaacctgttcaggtcgcctgccgctgtggaagctttgtccttttgctcttcataataaaccttgctactgttca

SEQ ID NO: 140345 - DNA, 120 bp, Artificial Sequence
  ENSG00000104129_0 (sequence is synthesized)
gtagtacgaatccgtcaggccggaaccatggcagtgaccaaggagctcttacagatggacctgtacgcgctgctaggcattgaggagaaggcagcggacaaagaggtaaagaaggcgtat

SEQ ID NO: 140346 - DNA, 120 bp, Artificial Sequence
  ENSG00000104129_1 (sequence is synthesized)
aggcagaaggccctctcctgccacccagacaaaaatccagataatcccagagcagctgaactcttccaccagctttctcaggccttggaggtgctgaccgatgctgcagccagggctgca

SEQ ID NO: 140347 - DNA, 120 bp, Artificial Sequence
  ENSG00000104129_2 (sequence is synthesized)
tatgacaaggtcaggaaagccaagaagcaagcagcagagaggacccagaaacttgatgagaaaaggaagaaagtgaagcttgacctggaggcccgggagcggcaggcccaggcccaggag

SEQ ID NO: 140348 - DNA, 120 bp, Artificial Sequence
  ENSG00000104129_3 (sequence is synthesized)
agtgaggaggaagaggagagccggagcaccaggacactagagcaagagatcgaacgcctgagagaagagggttcccggcagctggaggaacagcagaggctcatccgggagcagatacgc

SEQ ID NO: 140349 - DNA, 120 bp, Artificial Sequence
  ENSG00000104129_4 (sequence is synthesized)
caggagcgtgaccagaggttgagaggaaaggcagaaaatactgaaggccaaggaacccccaaactaaagctaaaatggaagtgcaagaaggaggatgagtcaaaaggtggctactccaaa

SEQ ID NO: 140350 - DNA, 120 bp, Artificial Sequence
  ENSG00000104129_5 (sequence is synthesized)
gacgtcctcctacggcttttgcagaagtatggtgaggttctcaacctggtgctttccagtaagaagccaggcactgctgtggtggagtttgcaaccgtcaaggcagcggagctggctgtc

SEQ ID NO: 140351 - DNA, 120 bp, Artificial Sequence
  ENSG00000104129_6 (sequence is synthesized)
cagaatgaagttggcctggtggataaccctctgaagatttcctggttggagggacagccccaggatgccgtgggccgcagccactcaggactgtcaaagggctcagtgctgtcagagagg

SEQ ID NO: 140352 - DNA, 120 bp, Artificial Sequence
  ENSG00000104129_7 (sequence is synthesized)
gactacgagagcctcgtcatgatgcgcatgcgccaggcggccgagcggcaacagctgatcgcacggatgcagcaggaagaccaggaggggccgcctacgtagccccagctccagccatcc

SEQ ID NO: 140353 - DNA, 120 bp, Artificial Sequence
  ENSG00000104129_8 (sequence is synthesized)
acccctcagcccttttcttcaacgtcaccaataaattttttttttttttaagattttacctctatcccatacataggtataaggtgctgggctctgccgcagagcgctccacccaggcct

SEQ ID NO: 140354 - DNA, 120 bp, Artificial Sequence
  ENSG00000104129_9 (sequence is synthesized)
ggcgcccctcccaggaagtgggcagacccccagggaaacgctccgcagggtgagagtcccagagtccgtgcacaagcagagcacaggcgcagccactcatcacagccctttattggcttg

SEQ ID NO: 140355 - DNA, 120 bp, Artificial Sequence
  ENSG00000104129_10 (sequence is synthesized)
ggctagctatgcaggagccacgcgccagggccgctggagtgcccagctccggcccggggcagctgcccgaggaacatggcctacacaaggccctcggcccaggcccgaagcaggagggca

SEQ ID NO: 140356 - DNA, 120 bp, Artificial Sequence
  ENSG00000104129_11 (sequence is synthesized)
gctgggagcaccagggcaccgggcactgccctctcccactgcttgacgcagggtttcagagaaggccattcactgccctttggggctgggcccatggcggtgatgatttgggaagagagg

SEQ ID NO: 140357 - DNA, 120 bp, Artificial Sequence
  ENSG00000104129_12 (sequence is synthesized)
agcaaggcagacggtgaggcaggagcttggaggtcagggcccacagcagcccctccacaggggtgccccgtctgcaaatcagcatgagaaggtcactccttgtgcagacaccacaccagc

SEQ ID NO: 140358 - DNA, 120 bp, Artificial Sequence
  ENSG00000104129_13 (sequence is synthesized)
gtctggcccacccccgtcatgctcagcacacggaagcccctgcgttccagcttgtccaggactatgcggggagggtcatcgacgtagtattcataactgcaaagagacaggatggggggg

SEQ ID NO: 140359 - DNA, 120 bp, Artificial Sequence
  ENSG00000104129_14 (sequence is synthesized)
gtgaggaggggcacacagcaagctcctggtacaaagctagtgtctgcagcaggcagcctggccactcttgtagtgactcacacttgctggctgcttgctgggcgctggggtaagtgcacg

SEQ ID NO: 140360 - DNA, 120 bp, Artificial Sequence
  ENSG00000104129_15 (sequence is synthesized)
cccctgcctcctccccttctaggtacttcacgagctatctcatttattcttcccaacaagctagtgaaggtgccactgttgtggccattgatagatgagaaaacagaggggttaatcagg

SEQ ID NO: 140361 - DNA, 120 bp, Artificial Sequence
  ENSG00000104129_16 (sequence is synthesized)
ttccccagcgtcccagatggtagaccatgttagtctgaccacagccctgctgccgccctccctgggcttgctccccacccaggcttccaggtaggaggaggctgaggctgcagtgagcca

SEQ ID NO: 140362 - DNA, 120 bp, Artificial Sequence
  ENSG00000104129_17 (sequence is synthesized)
ctccagcctgggcgacagagactccatttcaaaaaaaaataagcctccaggcccctcactgccctggctgtcctgcagttctgtagcaacaaggctgagccccagtagctcctggctctg

SEQ ID NO: 140363 - DNA, 120 bp, Artificial Sequence
  ENSG00000104129_18 (sequence is synthesized)
gtagctcctggctctgtgcgccactccctagcatggagagtgctggtagtccttctgtcaggtttaattgatgctgaaagaccatgaagcagacaaagggctcaagccccaagctgggca

SEQ ID NO: 140364 - DNA, 120 bp, Artificial Sequence
  ENSG00000104129_19 (sequence is synthesized)
tggagaggcaagtgcctcatggcaaagggagggggctggcttctgtccccgagccttgacccaggggctgggatcagccctcctctttccccgatttgaactggcactcactctgacaac

SEQ ID NO: 140365 - DNA, 120 bp, Artificial Sequence
  ENSG00000104129_20 (sequence is synthesized)
tcttttcagagagcctgtgtagcttgggttctccctgcctccaggggtgagaggaggaatggaagcagtagtcacagtttagacatggaggcattaggaagaatgccaagggaaatggct

SEQ ID NO: 140366 - DNA, 120 bp, Artificial Sequence
  ENSG00000104129_21 (sequence is synthesized)
aggtccccaggcagcagccaccctggaggtaggacgcaggctccctgctccctgcttctagggcttagctttgcgactcatgcagatcctcacgacaaaaacctttctctctgtgcctgt

SEQ ID NO: 140367 - DNA, 120 bp, Artificial Sequence
  ENSG00000104129_22 (sequence is synthesized)
ctgtccttgatggggtccagcttaggagagggcagggcaaggaacagtctgctagtggagtcctagacccagggaacggactctgtttctgcggttccagtaaggatgtggaaagctttc

SEQ ID NO: 140368 - DNA, 120 bp, Artificial Sequence
  ENSG00000104129_23 (sequence is synthesized)
agagcaagcctcgtgggggagaggggggatgttggagaggctacagatgggaccaactcctccggagaacagagccccaggatgcaggcagggggctctgatgctgggccctgtccctgg

SEQ ID NO: 140369 - DNA, 120 bp, Artificial Sequence
  ENSG00000104129_24 (sequence is synthesized)
gcttggaggttgtataaagggagcagaggcaggtctaggggctggcagggagaggatactgagggaggctgctacttacaagttgtttcccaaggctcttctctttgaagcccccagatg

SEQ ID NO: 140370 - DNA, 120 bp, Artificial Sequence
  ENSG00000104129_25 (sequence is synthesized)
ctgcatcagctctggatccgactgttcatcgcccaccatagtggggcccacctcctgcaaggtaagccacagtggctgcttggctggctgccaggaggaggtggaaggtcttgcctgtcc

SEQ ID NO: 140371 - DNA, 120 bp, Artificial Sequence
  ENSG00000104129_26 (sequence is synthesized)
ttcctcccctgcctgctagccctgagtaaggttcaggtaaaggctacagagagtagcaaggattcttaggggctgagcacaagctgtgaaggggtggagcccatcaatgatcaggaggag

SEQ ID NO: 140372 - DNA, 120 bp, Artificial Sequence
  ENSG00000104129_27 (sequence is synthesized)
caatgtaggcgccctccctagtgccttaaagctcagctttagccaggcaaagtatcacgagcctatagttccagctactgaggctgaggtgggaggatcgcttgaggtgggaggagtttg

SEQ ID NO: 140373 - DNA, 87 bp, Artificial Sequence
  ENSG00000104129_28 (sequence is synthesized)
caaaacaaaataaacatgtaaatgaaagaagccagactcagatcacattaccacagaaaggtaattagtggttatctagggctgagg

SEQ ID NO: 140374 - DNA, 120 bp, Artificial Sequence
  ENSG00000104129_29 (sequence is synthesized)
ttaccacagaaaggtaattagtggttatctagggctgagggacttgggggaaatcaagagtgtctgccagtgggtacagggtttccttttggggtattagaaatgttctaaaactgatta

SEQ ID NO: 140375 - DNA, 120 bp, Artificial Sequence
  ENSG00000104129_30 (sequence is synthesized)
tggtgatggttgcacaactctgagtacactaaagaaacaacaacactgaattgtacactttaaatcaaagaatttatggtatgcacattacatatcaataaagccatatcttttaagaaa

SEQ ID NO: 140376 - DNA, 120 bp, Artificial Sequence
  ENSG00000104129_31 (sequence is synthesized)
ttcctgtggtcattttcattcatctccctcacctgaagcttcacttccagcaactcatctcaaagccttttggctcaggctctgggcaaaacgctgttcttagagacctggaggcccggg

SEQ ID NO: 140377 - DNA, 120 bp, Artificial Sequence
  ENSG00000104129_32 (sequence is synthesized)
aggaatagatgcttcctgtggctcgagggtttctggtggggctgctggatctgcgtggagcccgcaccattaccacctccctccatgctccagccgcccggagatcagagcttgccacga

SEQ ID NO: 140378 - DNA, 120 bp, Artificial Sequence
  ENSG00000104129_33 (sequence is synthesized)
aaggctgcttttagccctgatcacagggcagaggattctctagaagccctctcaggagagggtcttctgggcgggaagcgtccctggggtgagcaggccatcctgccttcaagttcccaa

SEQ ID NO: 140379 - DNA, 120 bp, Artificial Sequence
  ENSG00000104129_34 (sequence is synthesized)
agagagaaccagcttggtcagtgtgagctgtttttaactcttccagacccctggccactctgctagaccccatacttctgtgctgtgatttttctcaatggaaattgactcgggggcgtg

SEQ ID NO: 140380 - DNA, 120 bp, Artificial Sequence
  ENSG00000104129_35 (sequence is synthesized)
agcaagaggttgctgagccctagcttgcaggtggaagctcccaaggactttttacaaggtgagccagcctggaattggacctgcacagaattgtcacccccaccccctgctctgcagatc

SEQ ID NO: 140381 - DNA, 120 bp, Artificial Sequence
  ENSG00000104129_36 (sequence is synthesized)
ttcctatcatctcagtccacgtctcagtccacaccctagtatggtgaggttctcaacctggtgctttccagtaagaagccaggcactgctgtggtggagtttgcaaccgtcaaggcagcg

SEQ ID NO: 140382 - DNA, 120 bp, Artificial Sequence
  ENSG00000104129_37 (sequence is synthesized)
gctgggagttcctggcagcaagagtttcccacagggacaggagtggcctggttactgaatagggtagtggaaaaaaacccaggaggaagaagcagcacttactggagccagaatgagggc

SEQ ID NO: 140383 - DNA, 120 bp, Artificial Sequence
  ENSG00000104129_38 (sequence is synthesized)
agctccggcggaggcagaggtggaccttctcgggctgggtgaggctggcgagcgctccttccacaggcaggcagcagatggcccgagctcactcgccctggtgtttgcctggctcctata

SEQ ID NO: 140384 - DNA, 120 bp, Artificial Sequence
  ENSG00000104129_39 (sequence is synthesized)
gtagtacgaatccgtcaggccggaaccatggcagtgaccaaggagctcttacagatggacctgtacgcgctgctaggcattgaggagaaggcagcggacaaagagataggttgccccagt

SEQ ID NO: 140385 - DNA, 120 bp, Artificial Sequence
  ENSG00000104129_40 (sequence is synthesized)
ttatatgcccaccaagaatgtgtagagtacctgtcttcgagtggctgtcgagaaagcggggtactgtgctcctgcctgttgcagcagcccctggacatctgcagtggtgaggttgagcac

SEQ ID NO: 140386 - DNA, 120 bp, Artificial Sequence
  ENSG00000104129_41 (sequence is synthesized)
ttagcaggaggtgggcccagctcctgtgctgggcgacagtggctcactccctccatggccttggcctcctccattgccagtctccctggtggctaggaagtgggcgccagcagcttctct

SEQ ID NO: 140387 - DNA, 120 bp, Artificial Sequence
  ENSG00000104129_42 (sequence is synthesized)
tttaggtaaagaaggcgtataggcagaaggccctctcctgccacccagacaaaaatccagataatcccagagcaggtgagactcttctcagggcgtggggagaaagaaacccactcaccc

SEQ ID NO: 140388 - DNA, 120 bp, Artificial Sequence
  ENSG00000104129_43 (sequence is synthesized)
gggatgacaggcgtgagccaccgcaccggccaatcataatcttttaaatgagtctccccgttgatggggatcttggctggctagtatcaacagtgttgtagagagcatccttgtatattt

SEQ ID NO: 140389 - DNA, 120 bp, Artificial Sequence
  ENSG00000104131_0 (sequence is synthesized)
aactcctcgctagctctccctctcacacacgctcacacccggctcgagatggcggcggcggcggcggcggcgggggactcggactcctgggacgccgacgctttctccgtggaagaccca

SEQ ID NO: 140390 - DNA, 120 bp, Artificial Sequence
  ENSG00000104131_1 (sequence is synthesized)
gtgcggaaggtggggggcggcggcactgccggcggggaccgctgggaaggcgaggacgaggacgaggacgtcaaggataactgggatgacgatgatgatgaaaaaaaagaggaagcagaa

SEQ ID NO: 140391 - DNA, 120 bp, Artificial Sequence
  ENSG00000104131_2 (sequence is synthesized)
gtaaaaccagaggtaaaaatttcagaaaagaaaaaaatagcagagaagataaaagagaaagaacggcaacagaagaaaaggcaagaagaaattaaaaagaggttagaagaacccgaagaa

SEQ ID NO: 140392 - DNA, 120 bp, Artificial Sequence
  ENSG00000104131_3 (sequence is synthesized)
cctaaagtgctaacaccagaagaacaattagcagataaactgcggctaaagaaattacaggaagagtcagacctcgaattagcaaaggaaacttttggtgttaataatgcagtttatgga

SEQ ID NO: 140393 - DNA, 120 bp, Artificial Sequence
  ENSG00000104131_4 (sequence is synthesized)
atagatgctatgaacccatcttcaagagatgactttacagagtttggaaagttactaaaagataaaattacacaatatgaaaagtcactatattatgccagttttttggaagtcttagtt

SEQ ID NO: 140394 - DNA, 120 bp, Artificial Sequence
  ENSG00000104131_5 (sequence is synthesized)
cgagatgtgtgtatttcattggaaattgatgacttgaaaaaaattaccaattcactgactgtgctttgcagtgaaaaacagaagcaagaaaagcaaagcaaagccaaaaagaagaagaaa

SEQ ID NO: 140395 - DNA, 120 bp, Artificial Sequence
  ENSG00000104131_6 (sequence is synthesized)
ggtgtggttcctggagggggattaaaagccaccatgaaagatgatctggcagattatggtggttatgatggaggatatgtacaagactatgaagacttcatgtgacattttatcttttct

SEQ ID NO: 140396 - DNA, 120 bp, Artificial Sequence
  ENSG00000104131_7 (sequence is synthesized)
tggtgtcatctttatgttgcccacaatcccttgaacatgtagcacaacttcctttcctttcagttctgccaaatgctacaatcagaagtgcagtatcttttgtgctggttatttaacccc

SEQ ID NO: 140397 - DNA, 120 bp, Artificial Sequence
  ENSG00000104131_8 (sequence is synthesized)
ttgacacttaggtgctaatgtgcaaatgagggaacttggatcttgctgccaaggggttaaaattgggaacctaagttgctactaaatcatagttcaaaacctaataatgttgtcgttgtt

SEQ ID NO: 140398 - DNA, 120 bp, Artificial Sequence
  ENSG00000104131_9 (sequence is synthesized)
gctatctgatttcatagcagcagtcactaaattggaaacaaaaggttgcaacgtgacaaaaaaaattgtgtagtatttaccagcaccattcagtaatacagccttaaccatacctccttg

SEQ ID NO: 140399 - DNA, 120 bp, Artificial Sequence
  ENSG00000104131_10 (sequence is synthesized)
ttaaaattgaacatgaggatattaaaaatacattgtgaagaagactgcttatctcagagtgaagatactgcggctgaaaagcactagtttgatataaaattaaaatgaccaaaaccctcc

SEQ ID NO: 140400 - DNA, 120 bp, Artificial Sequence
  ENSG00000104131_11 (sequence is synthesized)
aactttgaagctaaagaaggtaaacctttccattattgcattacatgttgtggaatctctcgagtgcaaagactgtctagttatttatcaggctatttctactgatgaactgcttcaggt

SEQ ID NO: 140401 - DNA, 120 bp, Artificial Sequence
  ENSG00000104131_12 (sequence is synthesized)
gggggagggaaacttatttttatttgcctgatttaagtgtctgagaaacaaatctttgttctcttaggctgcaatggaacaactttaccagggttttggcatttcctttcctttccttta

SEQ ID NO: 140402 - DNA, 120 bp, Artificial Sequence
  ENSG00000104131_13 (sequence is synthesized)
taaaacatgctcagcaaactgcaccagttaactacagtttggtaaattgttatgttaacaattatgacatctgcaatgttttataaagcaactaatttaataaaatcactgttgtgagga

SEQ ID NO: 140403 - DNA, 120 bp, Artificial Sequence
  ENSG00000104131_14 (sequence is synthesized)
cttaaattttgtgttacctcccaagagatactttttgagagtatagaacacagctcttgggagtacagttctctacgttctctactaaatcttaataaatgcttgacatagttacagctt

SEQ ID NO: 140404 - DNA, 120 bp, Artificial Sequence
  ENSG00000104131_15 (sequence is synthesized)
taaaacatgagtgatttgccaggtccttatgttgtcaccatagagcaacaaaggtatagggctgccttcctcttatttatttggggacattattttgttatttagataccaaggcctaat

SEQ ID NO: 140405 - DNA, 120 bp, Artificial Sequence
  ENSG00000104131_16 (sequence is synthesized)
taattaagtacctataagaactatttatttggagtaactgagcctgtaactcaggtttatggctgttaagtatagattggggaatctttattatgtcttctcctaagcagtttaaccaaa

SEQ ID NO: 140406 - DNA, 120 bp, Artificial Sequence
  ENSG00000104131_17 (sequence is synthesized)
tgtgtggttagtgtttttttattcccctaagacagaaagaacaaaaaatgttttaaatttctcttatataggaaataataggaacgtcaaagctctgtatacctactaagtggaaaacaa

SEQ ID NO: 140407 - DNA, 120 bp, Artificial Sequence
  ENSG00000104131_18 (sequence is synthesized)
gaccatcatctaagtgatttgagaaattaacaaaagtagtgactacacagcaataattacagtaaattaaataaagattcctttaaggcagacaagggctaagatttccttagcagtaat

SEQ ID NO: 140408 - DNA, 120 bp, Artificial Sequence
  ENSG00000104131_19 (sequence is synthesized)
aatgacatacactgaattgaaaatctattttattacagaaagatcagtttctaacaaatgaaaatgtatcacctgttccttaactgtgtaaataataattaaatttctttgaaactggaa

SEQ ID NO: 140409 - DNA, 120 bp, Artificial Sequence
  ENSG00000104131_20 (sequence is synthesized)
gaaagacagttcttattcttggttagggcagctcagcattataagatgtcaattccccctacattaatttataaatttaatgcagtacaaaaaaataccaacaaacatttctctggagtt

SEQ ID NO: 140410 - DNA, 120 bp, Artificial Sequence
  ENSG00000104131_21 (sequence is synthesized)
gtgtagggaaatgggtattaaattagagtggggttataggtctaacagtcaacaaatataataggagcctgtcctaattaaaagtcaagcaactcactaataccatttaagttagactag

SEQ ID NO: 140411 - DNA, 120 bp, Artificial Sequence
  ENSG00000104131_22 (sequence is synthesized)
aagaggagtatgggtgctattactgtccttttgtttccagacatgttccccttttctgagttaatagaaattgctgaaatcacagactgggttcaaatactagcactgctacttaatagg

SEQ ID NO: 140412 - DNA, 120 bp, Artificial Sequence
  ENSG00000104131_23 (sequence is synthesized)
cgagatgtgtgtatttcatgtaagtaattctaatttctagcccctctgggtagatttttagtaggatgttctcttcaggaggttgaaggttattttttattttcaaggatactataatac

SEQ ID NO: 140413 - DNA, 120 bp, Artificial Sequence
  ENSG00000104133_0 (sequence is synthesized)
aaccgccgggccaagatggctgcagaggaaggggtcgcgagtgctgcttccgccggcggtagctggggcaccgcggccatggggcgggttctaccgatgctgttggtgccagtccccgcc

SEQ ID NO: 140414 - DNA, 120 bp, Artificial Sequence
  ENSG00000104133_1 (sequence is synthesized)
gaggcgatggggcagctcggctcccgggcgcagctgcgcacacagccggaggctctggggagcctgacggctgcgggcagcctccaagtgctttctttgacgcctggcagccggggcggg

SEQ ID NO: 140415 - DNA, 120 bp, Artificial Sequence
  ENSG00000104133_2 (sequence is synthesized)
ggtcgctgctgcctggagggccccttctggcactttctatgggaggattctcgtaacagcagcacaccaactgaaaagcccaaactgctcgctcttggtgaaaattatgaactgcttatc

SEQ ID NO: 140416 - DNA, 120 bp, Artificial Sequence
  ENSG00000104133_3 (sequence is synthesized)
tatgaatttaatttgaaagatggaagatgtgatgcaaccattttgtatagctgtagtagggaggcattgcaaaagctcattgacgatcaagatatcagtatttccttattgtctttgaga

SEQ ID NO: 140417 - DNA, 120 bp, Artificial Sequence
  ENSG00000104133_4 (sequence is synthesized)
atcctgtcatttcacaataacacatcattactgttcatcaacaaatgtgtcatcctacatattatatttcctgaaagagatgctgcaattagagtactcaactgtttcacacttcccttg

SEQ ID NO: 140418 - DNA, 120 bp, Artificial Sequence
  ENSG00000104133_5 (sequence is synthesized)
cctgcacaggcagtggacatgattattgacacgcagctctgcagaggaattctttttgttttgagtagtttaggctggatctacatttttgatgttgtggatggtacatatgtagctcat

SEQ ID NO: 140419 - DNA, 120 bp, Artificial Sequence
  ENSG00000104133_6 (sequence is synthesized)
gtggatttagcacttcacaaagaagacatgtgtaatgagcagcaacaggagccagccaagatttcttcatttacttcactgaaagtttctcaagacctcgatgttgcagtgattgtcagc

SEQ ID NO: 140420 - DNA, 120 bp, Artificial Sequence
  ENSG00000104133_7 (sequence is synthesized)
tcctccaactccgcagttgctcttaacttaaatttgtatttcaggcaacacccaggacacctactgtgtgaaagaatactagaagatcttcctattcaaggacctaagggcgtagatgaa

SEQ ID NO: 140421 - DNA, 120 bp, Artificial Sequence
  ENSG00000104133_8 (sequence is synthesized)
gatgatcctgttaactctgcctacaacatgaaactggccaagttttccttccaaattgataggtcttggaaagcccagctatcatcattgaatgaaacaataaagaactccaaactggag

SEQ ID NO: 140422 - DNA, 120 bp, Artificial Sequence
  ENSG00000104133_9 (sequence is synthesized)
gtttcctgttgtgctccatggttccaggatattttgcatttggagtcacctgaatctggtaaccacagtacaagtgtgcagagctgggccttcattccacaggacataatgcatgggcaa

SEQ ID NO: 140423 - DNA, 120 bp, Artificial Sequence
  ENSG00000104133_10 (sequence is synthesized)
tataatgttctacagaaagatcatgccaagaccagtgatccaggaagatcatggaaaataatgcacatcagtgaacaagaggaacccatagagcttaaatgtgtgtctgtgacaggattc

SEQ ID NO: 140424 - DNA, 120 bp, Artificial Sequence
  ENSG00000104133_11 (sequence is synthesized)
actgcactgtttacttgggaagtggaaaggatgggctataccattaccctctgggatttggagacccagggcatgcagtgtttttcccttggcacaaagtgtattcctgtagacagtagt

SEQ ID NO: 140425 - DNA, 120 bp, Artificial Sequence
  ENSG00000104133_12 (sequence is synthesized)
ggagaccagcagctgtgctttgttttgacagagaatggactctctctgattttgtttggtttgactcaagaagagtttttaaacagactcatgatccatggaagtgccagcactgtggac

SEQ ID NO: 140426 - DNA, 120 bp, Artificial Sequence
  ENSG00000104133_13 (sequence is synthesized)
actctttgtcatctcaatggctggggaaggtgctcaattcccatacatgcactagaggccgggatagaaaatcgtcagctggacacagtaaatttctttttgaagagcaaggaaaatctt

SEQ ID NO: 140427 - DNA, 120 bp, Artificial Sequence
  ENSG00000104133_14 (sequence is synthesized)
tttaatccatcctcaaaatcttctgtatctgatcagtttgatcacttgtcatcccatttatatttaagaaatgtggaagagctgataccagcattggatttactttgctcggcaattaga

SEQ ID NO: 140428 - DNA, 120 bp, Artificial Sequence
  ENSG00000104133_15 (sequence is synthesized)
gaaagttattctgaaccccaaagcaaacacttttcagaacaattgcttaatcttacactgtctttccttaacaaccaaataaaggagcttttcattcacactgaagaactagatgaacat

SEQ ID NO: 140429 - DNA, 120 bp, Artificial Sequence
  ENSG00000104133_16 (sequence is synthesized)
ctgcaaaaaggagtgaacattttgactagctacattaatgaacttcgaaccttcatgataaagtttccttggaagctaacagatgctatagatgaatatgatgtacatgaaaatgtcccc

SEQ ID NO: 140430 - DNA, 120 bp, Artificial Sequence
  ENSG00000104133_17 (sequence is synthesized)
aaagtaaaggagagcaatatatggaagaaactcagctttgaggaagttattgccagcgccattttaaacaacaaaataccagaggcacagactttcttcaggattgatagtcattctgct

SEQ ID NO: 140431 - DNA, 120 bp, Artificial Sequence
  ENSG00000104133_18 (sequence is synthesized)
caaaaacttgaggagcttattggcataggcctaaatttggtctttgacaatttaaaaaagaacaatataaaggaagcctctgaacttttgaagaatatggggtttgatgtaaaaggccaa

SEQ ID NO: 140432 - DNA, 120 bp, Artificial Sequence
  ENSG00000104133_19 (sequence is synthesized)
ttgctcaagatctgcttctatacaactaataaaaatatacgtgactttttggttgaaattttaaaagaaaaaaattatttttctgaaaaagagaaaagaactatagacttcgtgcatcaa

SEQ ID NO: 140433 - DNA, 120 bp, Artificial Sequence
  ENSG00000104133_20 (sequence is synthesized)
gttgagaagctttatttgggacatttccaagaaaatatgcaaatccagtcatttcccaggtactggataaaggaacaagattttttcaagcacaagtctgttttggactcattcctgaaa

SEQ ID NO: 140434 - DNA, 120 bp, Artificial Sequence
  ENSG00000104133_21 (sequence is synthesized)
tatgattgtaaagatgaatttaacaaacaggaccatagaattgtgttaaattgggctctgtggtgggatcaactaacacaagaatccatccttctccccaggataagtccagaagaatac

SEQ ID NO: 140435 - DNA, 120 bp, Artificial Sequence
  ENSG00000104133_22 (sequence is synthesized)
aaatcatattcccctgaagccctctggagatacctcacagctcgccatgattggttaaacattatcttatggattggagaatttcaaacccagcatagttatgcttcacttcagcagaac

SEQ ID NO: 140436 - DNA, 120 bp, Artificial Sequence
  ENSG00000104133_23 (sequence is synthesized)
aaatggccccttctgactgttgatgttattaaccagaatacttcctgtaacaactacatgaggaatgaaattttagataagctggccaggaatggggtttttttggcatctgaactggaa

SEQ ID NO: 140437 - DNA, 120 bp, Artificial Sequence
  ENSG00000104133_24 (sequence is synthesized)
gactttgaatgcttcctcctaagactgagccgtattggaggtgtaatacaggataccctccctgttcaaaactacaagaccaaagaaggttgggatttccattctcaattcattctctat

SEQ ID NO: 140438 - DNA, 120 bp, Artificial Sequence
  ENSG00000104133_25 (sequence is synthesized)
tgtttggagcacagtctgcagcatcttctttatgtctaccttgactgttacaaacttagtcctgaaaattgtccctttttggaaaaaaaagagttacatgaagcacacccttggtttgaa

SEQ ID NO: 140439 - DNA, 120 bp, Artificial Sequence
  ENSG00000104133_26 (sequence is synthesized)
tttttagttcagtgtcgacaagttgccagtaacttaacagatcccaaactgatcttccaggctagccttgcaaatgctcagattttgattcccaccaatcaggccagtgtaagcagtatg

SEQ ID NO: 140440 - DNA, 120 bp, Artificial Sequence
  ENSG00000104133_27 (sequence is synthesized)
ctattggaaggacataccctcctggcccttgctactacaatgtattctcctgggggtgtcagtcaggttgttcagaatgaagaaaatgaaaactgtttgaagaaagtggatccccagcta

SEQ ID NO: 140441 - DNA, 120 bp, Artificial Sequence
  ENSG00000104133_28 (sequence is synthesized)
ttgaagatggcattaactccttaccccaagctaaaaactgctctcttcccacagtgcactcctcctagtgtcctgccatctgatattacaatctaccaccttattcagtcattatcaccc

SEQ ID NO: 140442 - DNA, 120 bp, Artificial Sequence
  ENSG00000104133_29 (sequence is synthesized)
tttgatcctagcagattgtttggctggcagtctgctaacacactagctataggagatgcatggagtcatctcccacatttctctagccctgacctggttaataaatatgctatagtggaa

SEQ ID NO: 140443 - DNA, 120 bp, Artificial Sequence
  ENSG00000104133_30 (sequence is synthesized)
cgtctgaattttgcttattatttacataatgggcggccatcatttgcatttggtacttttctggtccaggaattaatcaagagcaagactcccaagcagctgatccagcaagtaggcaat

SEQ ID NO: 140444 - DNA, 120 bp, Artificial Sequence
  ENSG00000104133_31 (sequence is synthesized)
gaagcctatgttatagggctctcctccttccacataccttcaataggagctgcatgtgtttgtttcttagaattgcttggccttgacagcctcaagctcagagttgatatgaaagtggcc

SEQ ID NO: 140445 - DNA, 120 bp, Artificial Sequence
  ENSG00000104133_32 (sequence is synthesized)
tggtgaaaagacaaccacagaagaattgcttgttctcttagaagaaggtacatggaacagcattcagcaacaggaaataaagaggttatccagtgaatctagcagccaatgggcattagt

SEQ ID NO: 140446 - DNA, 120 bp, Artificial Sequence
  ENSG00000104133_33 (sequence is synthesized)
ggtgcagttctgcaggctacacaatatgaaactaagcatatcttaccttagagaatgtgccaaagcaaatgattggctgcagttcattattcacagccaactccacaactaccacccagc

SEQ ID NO: 140447 - DNA, 120 bp, Artificial Sequence
  ENSG00000104133_34 (sequence is synthesized)
agaggtgaaatcccttatccagtacttcagcccagtcattcaagaccacttaaggctggcttttgagaacttgccctcagtgcccacctccaaaatggacagcgatcaagtctgcaataa

SEQ ID NO: 140448 - DNA, 120 bp, Artificial Sequence
  ENSG00000104133_35 (sequence is synthesized)
gtgcccccaggaacttcaaggaagcaaacaagagatgaccgatttatttgaaattctgctccaatgctcagaggagccagactcctggcactggcttctggttgaagcagtgaaacaaca

SEQ ID NO: 140449 - DNA, 120 bp, Artificial Sequence
  ENSG00000104133_36 (sequence is synthesized)
ggcccctatcctcagtgttctggcctcatgtctccagggtgccagtgccatttcttgtctctgtgtttggatcatcacttctgtggaggacaatgttgcaactgaagcaatgggacacat

SEQ ID NO: 140450 - DNA, 120 bp, Artificial Sequence
  ENSG00000104133_37 (sequence is synthesized)
tcaggactcaacagaggaccatacctggaaccttgaggatctttcagtcatctggagaacattattaacaagacaaaagagcaaaactctcatcagaggtttccagcttttctttaagga

SEQ ID NO: 140451 - DNA, 120 bp, Artificial Sequence
  ENSG00000104133_38 (sequence is synthesized)
ttccccgttactactggtgatggagatgtatgaactgtgtatgttcttcaggaattataaagaagctgaagctaaacttctggagtttcagaagagccttgaaacgcttaacacagcagc

SEQ ID NO: 140452 - DNA, 120 bp, Artificial Sequence
  ENSG00000104133_39 (sequence is synthesized)
cacaaaggtccaccctgtcatccctgccatgtggctggaggatcaggtgtgtttccttttgaagcttatgctacagcagtgtaagacccagtatgagctggggaagcttttacagctctt

SEQ ID NO: 140453 - DNA, 120 bp, Artificial Sequence
  ENSG00000104133_40 (sequence is synthesized)
tgttgaaagagagcatctcttctctgatggtccagatgtgaaaaagctttgcatcctttgccagattttgaaggatacatccatagccattaatcatacaattattaccagctacagcat

SEQ ID NO: 140454 - DNA, 120 bp, Artificial Sequence
  ENSG00000104133_41 (sequence is synthesized)
tgagaatcttcagcatgaatgtagatctattttggaaagactgcagacagatggacaattcgctttggccaggagggtagcagaattagctgagttacctgtggacaacttggttattaa

SEQ ID NO: 140455 - DNA, 120 bp, Artificial Sequence
  ENSG00000104133_42 (sequence is synthesized)
agagataacacaggaaatgcagaccctaaaacacattgaacagtggtcactaaaacaagcaagaattgacttctggaaaaaatgccatgagaattttaagaaaaattcaatttcaagcaa

SEQ ID NO: 140456 - DNA, 120 bp, Artificial Sequence
  ENSG00000104133_43 (sequence is synthesized)
agcagcttcttcctttttctcaacccaggcccatgtggcatgtgagcacccaactggatggagcagcatggaggagcgccatctgctgctcaccttggcagggcactggcttgcccagga

SEQ ID NO: 140457 - DNA, 120 bp, Artificial Sequence
  ENSG00000104133_44 (sequence is synthesized)
ggacgtggtgcccttggataagctggaggagctggagaagcagatctggctgtgccgcatcacccagcacactcttggaagaaatcaggaggaaacagagcccagattttctcgacagat

SEQ ID NO: 140458 - DNA, 120 bp, Artificial Sequence
  ENSG00000104133_45 (sequence is synthesized)
ctcaactagtggtgaactttcctttgatagtttagccagtgagttttccttctccaagttggctgctctgaacacatcaaaatacttagaacttaacagccttccatccaaagagacatg

SEQ ID NO: 140459 - DNA, 120 bp, Artificial Sequence
  ENSG00000104133_46 (sequence is synthesized)
cgagaatagattggattggaaagagcaggagtcactaaactttttgattgggcgcctactggatgatggctgtgtgcatgaagcaagtagagtatgccggtattttcatttttataatcc

SEQ ID NO: 140460 - DNA, 120 bp, Artificial Sequence
  ENSG00000104133_47 (sequence is synthesized)
agatgtcgccttggtattgcactgcagagcactggcctcaggggaagctagtatggaggatctgcacccagagatccatgctctcctacaaagtgctgagctgcttgaggaagaagcacc

SEQ ID NO: 140461 - DNA, 120 bp, Artificial Sequence
  ENSG00000104133_48 (sequence is synthesized)
cgacattcccctaaggagagtccacagcacttcaagtctggatagtcagaagtttgtgacagtgccctccagtaatgaagtggtaactaacctggaagtgctgacaagcaaatgcctcca

SEQ ID NO: 140462 - DNA, 120 bp, Artificial Sequence
  ENSG00000104133_49 (sequence is synthesized)
tgggaagaactactgtcgacaggtcctctgtctgtatgatcttgccaaggagttgggctgttcctacacagatgttgctgctcaggatggtgaagccatgctccggaaaatcttggcctc

SEQ ID NO: 140463 - DNA, 120 bp, Artificial Sequence
  ENSG00000104133_50 (sequence is synthesized)
tcagcagcctgaccgatgcaaacgagcccaggccttcatcagcacacagggccttaagccagatactgtggctgaactcgtggcagaagaggtgacacgggagctgcttacttcatcaca

SEQ ID NO: 140464 - DNA, 120 bp, Artificial Sequence
  ENSG00000104133_51 (sequence is synthesized)
gggaacaggacataagcagatgttcaacccaacagaggaaagccagacatttcttcagctgaccactctgtgtcaagaccgcacattggtaggcatgaagttgttggataagatttcctc

SEQ ID NO: 140465 - DNA, 120 bp, Artificial Sequence
  ENSG00000104133_52 (sequence is synthesized)
cgttccccatggggaactgtcttgcaccacagagctcctgatcctggcccatcattgcttcaccctgacgtgccacatggagggcatcatccgagtcctacaggccgcccacatgctcac

SEQ ID NO: 140466 - DNA, 120 bp, Artificial Sequence
  ENSG00000104133_53 (sequence is synthesized)
agataaccacctggcccccagtgaggagtatgggctggtggtacggctcctcactggcattggaaggtacaacgagatgacatacatatttgatttgctgcataaaaagcactactttga

SEQ ID NO: 140467 - DNA, 120 bp, Artificial Sequence
  ENSG00000104133_54 (sequence is synthesized)
agtgctaatgaggaagaagttggatccgagtggtaccctgaaaacagccctgctggactacatcaaacgctgccgtcctggagacagtgaaaagcacaatatgattgccctgtgcttcag

SEQ ID NO: 140468 - DNA, 120 bp, Artificial Sequence
  ENSG00000104133_55 (sequence is synthesized)
catgtgccgggagattggcgagaaccacgaggcagctgcccgcatccaactgaaattgattgagtctcagccctgggaggacagcctcaaggatgggcaccagctgaaacaactgctgct

SEQ ID NO: 140469 - DNA, 120 bp, Artificial Sequence
  ENSG00000104133_56 (sequence is synthesized)
gaaggccctgactctgatgttggatgcagcagagagttatgccaaggactcctgtgtgcgacaggcccagcactgtcagcggctcaccaagttgataactctgcagattcactttctgaa

SEQ ID NO: 140470 - DNA, 120 bp, Artificial Sequence
  ENSG00000104133_57 (sequence is synthesized)
cactggccagaacacaatgctcatcaacttgggccgccacaagctgatggactgtattctggccctacctcggttctaccaggcttctattgtggctgaggcctacgattttgttccaga

SEQ ID NO: 140471 - DNA, 120 bp, Artificial Sequence
  ENSG00000104133_58 (sequence is synthesized)
ttgggctgaaattttataccagcaagtgattcttaaaggagactttaattacttggaagaatttaagcagcaaaggttattaaagtccagtatatttgaagagatttccaaaaaatataa

SEQ ID NO: 140472 - DNA, 120 bp, Artificial Sequence
  ENSG00000104133_59 (sequence is synthesized)
acaacatcagcctactgacatggtcatggaaaacctgaagaaattactcacatattgtgaagatgtttacctgtattacaagttggcatacgaacacaagttttatgaaattgtaaatgt

SEQ ID NO: 140473 - DNA, 120 bp, Artificial Sequence
  ENSG00000104133_60 (sequence is synthesized)
gcttctgaaggaccctcagacaggttgctgtctaaaggacatgctagcaggttagatgatttcataggtgtctgttttcttgtactgttagcagattctgacagatgtgatgagaagaag

SEQ ID NO: 140474 - DNA, 120 bp, Artificial Sequence
  ENSG00000104133_61 (sequence is synthesized)
aatgcattggagatctttgctaaagttgaacaatcccggtactgtaccatatcagtcctttgtgggtagtaggtagcaagtaagaaacttttcaggaggaaattcctatttaaaatagat

SEQ ID NO: 140475 - DNA, 120 bp, Artificial Sequence
  ENSG00000104133_62 (sequence is synthesized)
tgattttagatgattgttcatccacaccattttatatagatactagtattaagatcaaaagcttcctcttcctcaggacagcttctactttagatgatccaataatgattaaagaatacc

SEQ ID NO: 140476 - DNA, 120 bp, Artificial Sequence
  ENSG00000104133_63 (sequence is synthesized)
tgtacctgcagattccagtttcaaagaaatttaattattatttacacagttaaggaacaggtgatacattttcatttgttagaaactgatctttctgtaataaaatagattttcaattca

SEQ ID NO: 140477 - DNA, 75 bp, Artificial Sequence
  ENSG00000104133_64 (sequence is synthesized)
ccaggagttcaaggaatgaggctctgccactaaaacaaaaaaagtaaaataaaatataatttgtattctaaaaaa

SEQ ID NO: 140478 - DNA, 120 bp, Artificial Sequence
  ENSG00000104133_65 (sequence is synthesized)
gtaaagatgaatttaacaaacaggaccatagaattgtgttaaattgggctctgtggtgggatcaactaacacaagaatccatccttctccccaggataagtccagaaggcaagtgtgaga

SEQ ID NO: 140479 - DNA, 120 bp, Artificial Sequence
  ENSG00000104133_66 (sequence is synthesized)
gagcctgaaatatgaacatactgaatgaggattaaattgggtattgatatttgaatattttgatgtgtctcaattttagaattcctttcgggaaataatattcaggttctttaaaatgca

SEQ ID NO: 140480 - DNA, 120 bp, Artificial Sequence
  ENSG00000104133_67 (sequence is synthesized)
agtcgttgcattaagatctctttcttatctcagagtttctgggagggatttataatgtgctaataaaagaaaaaaatagttaattgagatttcaaggctgagttttcattccagcttcaa

SEQ ID NO: 140481 - DNA, 120 bp, Artificial Sequence
  ENSG00000104133_68 (sequence is synthesized)
agtgacaatctgttttttcaaatagtcttgagcttcttgtgtaaattggggatctatgccatctgatatgggggatctgggtcataactaacagtggtaaacagtagcaattcagagagt

SEQ ID NO: 140482 - DNA, 120 bp, Artificial Sequence
  ENSG00000104133_69 (sequence is synthesized)
aaaattctggcttactattatggctgaagtttttgtttgtttattatttttaatttatttttttcttttcatccttccccatctgaaacaaagtttttatttacattaagggaaagagaa

SEQ ID NO: 140483 - DNA, 120 bp, Artificial Sequence
  ENSG00000104133_70 (sequence is synthesized)
gggaaaaaaagggttgaacaggtaagtgaaatgtacagctaatacgtaagtttcattttaaccaccagagtaattagaagctacatctagttctttggctgtagcattgattataaaatg

SEQ ID NO: 140484 - DNA, 81 bp, Artificial Sequence
  ENSG00000104133_71 (sequence is synthesized)
agaaatttgggaaaccgagatgaaacatagtgagacccccatctctacagaatatatattttttaaaatacctgggtggac

SEQ ID NO: 140485 - DNA, 71 bp, Artificial Sequence
  ENSG00000104133_72 (sequence is synthesized)
ttcaagaccagcttggccaacattgtgaaaccccgcctctactaaaaatacaacaattagctgggtgtggt

SEQ ID NO: 140486 - DNA, 63 bp, Artificial Sequence
  ENSG00000104133_73 (sequence is synthesized)
tcacctgagttcaagaccagcttggccaacattgtgaaaccccgcctctactaaaaatacaac

SEQ ID NO: 140487 - DNA, 90 bp, Artificial Sequence
  ENSG00000104133_74 (sequence is synthesized)
tacctggtcatgatggcacatccctgtagtccctgctacttgggcagctgaagtaggagtaccacttgagcccaggaggtcgaggctgcc

SEQ ID NO: 140488 - DNA, 84 bp, Artificial Sequence
  ENSG00000104133_75 (sequence is synthesized)
tgatggcacatccctgtagtccctgctacttgggcagctgaagtaggagtaccacttgagcccaggaggtcgaggctgccacga

SEQ ID NO: 140489 - DNA, 120 bp, Artificial Sequence
  ENSG00000104133_76 (sequence is synthesized)
aaggaaaatagtaaaacagaggacctgaataattaatatattgtataaatatctatgtccagattgttatatttactcagtaatttagtgttgagttacatgtcaatagacataattaat

SEQ ID NO: 140490 - DNA, 120 bp, Artificial Sequence
  ENSG00000104133_77 (sequence is synthesized)
tgttgtgcttatatacatcctgtatgtggttctctcaagtttctggattgcagtaatgtattttgtttaaataaaacaaaatacatgctttattttttacaaaatacatgtacaaaatac

SEQ ID NO: 140491 - DNA, 120 bp, Artificial Sequence
  ENSG00000104133_78 (sequence is synthesized)
ctgcccgcatccaactgaaattgattgagtctcagccctggggtgagtgaggtcacagccacactaccagaacagtgctgctagctaggtaaaattccttttttttttttttttttgaga

SEQ ID NO: 140492 - DNA, 120 bp, Artificial Sequence
  ENSG00000104133_79 (sequence is synthesized)
aaacacaactttatttcagaaataagctttgaactttgaaaacaagagcagatgcatggagtcatctcccacatttctctagccctgacctggttaataaatatgctatagtggaacgtc

SEQ ID NO: 140493 - DNA, 120 bp, Artificial Sequence
  ENSG00000104133_80 (sequence is synthesized)
catagttatgcttcacttcagcagaacaaatggccccttctgactgttgatgttattaaccagaatacttcctgtaacaactacatgaggaatgaaattttagataagctggccaggtat

SEQ ID NO: 140494 - DNA, 120 bp, Artificial Sequence
  ENSG00000104133_81 (sequence is synthesized)
gtcttctaaaacctacgtcacagccaaaaagccctgcatgttaaacttaccttcagaatgacttttatggtgtgttcagaagtatacaggaagtattcagccaagactagggcctaactc

SEQ ID NO: 140495 - DNA, 120 bp, Artificial Sequence
  ENSG00000104133_82 (sequence is synthesized)
agcactaggcacagaggtactgaattataagtttttggtgcctattaacatatacgtgttttgaaacccggcagttaagtttctattccaccaaaacgcccagtattttttgtgattatg

SEQ ID NO: 140496 - DNA, 120 bp, Artificial Sequence
  ENSG00000104133_83 (sequence is synthesized)
ttgtatgaagtctagagtgaactacgagactatagtgactgagaaccaaatattagtcttccaaaaataatacgaagcaagaaccaaagtaaaaatcaggaatgaagtcacaaaagaagc

SEQ ID NO: 140497 - DNA, 120 bp, Artificial Sequence
  ENSG00000104133_84 (sequence is synthesized)
tcagggaggcagaggtgggagaatggcttgaggccaggagttcgaccagcctgggcaacatagtgaagaccctgttctttaccaacacaaaggaaagaaaaaaaaacagcagcagcagct

SEQ ID NO: 140498 - DNA, 120 bp, Artificial Sequence
  ENSG00000104133_85 (sequence is synthesized)
ggtctcaaaaggtctcccagtctctccaaaacttgatttgggtccctgttcctgctctggatgcctagccctccagcaggagttataagttcttggtagaaagccttaacttcactgaag

SEQ ID NO: 140499 - DNA, 120 bp, Artificial Sequence
  ENSG00000104133_86 (sequence is synthesized)
aagtgcagaaatgaagatgctcagtacagctttatcagagagtctgtaggtacagcaccttttatctggcctgctttgtttagagaaggtgtgacgaggtctaaggcattgaattgtgag

SEQ ID NO: 140500 - DNA, 120 bp, Artificial Sequence
  ENSG00000104133_87 (sequence is synthesized)
tgtttggggagaaaatggttatcttcttggttttatccttttcctgcagagtgtgtgttctttgtctcactttcttgggcactttaattgggttctgaaatggccctgagccacactatt

SEQ ID NO: 140501 - DNA, 120 bp, Artificial Sequence
  ENSG00000104133_88 (sequence is synthesized)
tgtctcaaaaaaaaaaaaaaaaaaaagaatctacttttttcaaagtagcctaataaatatttagtatttgttggagaatacactgtgctttaatttatatcatttttactcattttccag

SEQ ID NO: 140502 - DNA, 120 bp, Artificial Sequence
  ENSG00000104133_89 (sequence is synthesized)
gtgctttaatttatatcatttttactcattttccagttcaagctaaagctatattttaatgagttttttgttttttcttgaccacccccacctctaattctgattataggttatccagtg

SEQ ID NO: 140503 - DNA, 120 bp, Artificial Sequence
  ENSG00000104133_90 (sequence is synthesized)
gagactacatagtatacattttctagaaagcctgggtgaaaaacttggaagaaaaccttggaagaaaaaccttaagtaattttaatgttcaactaatatctaataagtaaaagtgtgaca

SEQ ID NO: 140504 - DNA, 120 bp, Artificial Sequence
  ENSG00000104133_91 (sequence is synthesized)
accccttcatctttttttccccttcatctttcttcaatgactattttacatttgtggcaaaagaaaatttgtgttaacatacattaactcaaatgttcaaaatataattcttgaatggca

SEQ ID NO: 140505 - DNA, 120 bp, Artificial Sequence
  ENSG00000104133_92 (sequence is synthesized)
gccttgatctttgtagcatatgaggtctttgaagtatcccagggtgggatttcctggaagagggcaatgaaagaagttgaggtggggccctgtcagcagtggtcctatccccagtcagag

SEQ ID NO: 140506 - DNA, 120 bp, Artificial Sequence
  ENSG00000104133_93 (sequence is synthesized)
taatgggagtgcagtgcagggagcttcaagcagagaggtagagccatagagagctagggagaggccagaacctcccagcttagagcccctcagacttgtatttgcttccagcttcaagtc

SEQ ID NO: 140507 - DNA, 120 bp, Artificial Sequence
  ENSG00000104133_94 (sequence is synthesized)
gggctctttccaggtgaagcgggagggcatcataggccaaccaggaacagaaggggtgaataccgttgtgagggttcacacaggaggtgacaactaggtctttctctactgtgcctctcc

SEQ ID NO: 140508 - DNA, 120 bp, Artificial Sequence
  ENSG00000104133_95 (sequence is synthesized)
cagatttcagaaagggctcttttgctttttcctggcttctaaaagtggccttgactggctttgtcttcctctcaggagttgggctgttcctacacagatgttgctgctcaggatggtgaa

SEQ ID NO: 140509 - DNA, 120 bp, Artificial Sequence
  ENSG00000104140_0 (sequence is synthesized)
acccattcagtcagaggcagccagcgggacctgcttcaccgagcgcagcgaagccgagacccgggctggcccctctgctgcccccggagcgggccatgccgccgcgggagctgagcgagg

SEQ ID NO: 140510 - DNA, 120 bp, Artificial Sequence
  ENSG00000104140_1 (sequence is synthesized)
gccgcccccgctccgggccccgacccctcccccgcggcggcgtagcgcgcccccagagctgggcatcaagtgcgtgctggtgggcgacggcgccgtgggcaagagcagcctcatcgtcag

SEQ ID NO: 140511 - DNA, 120 bp, Artificial Sequence
  ENSG00000104140_2 (sequence is synthesized)
tcagctacacctgcaatgggtaccccgcgcgctaccggcccactgcgctggacaccttctctgtgcaagtcctggtggatggagctccggtgcgcattgagctctgggacacagcgggac

SEQ ID NO: 140512 - DNA, 120 bp, Artificial Sequence
  ENSG00000104140_3 (sequence is synthesized)
aggaggattttgaccgacttcgttccctttgctacccggataccgatgtcttcctggcgtgcttcagcgtggtgcagcccagctcctttcaaaacatcacagagaaatggctgcccgaga

SEQ ID NO: 140513 - DNA, 120 bp, Artificial Sequence
  ENSG00000104140_4 (sequence is synthesized)
tccgcacgcacaacccccaggcgcctgtgctgctggtgggcacccaggccgacctgagggacgatgtcaacgtactaattcagctggaccaggggggccgggagggccccgtgccccaac

SEQ ID NO: 140514 - DNA, 120 bp, Artificial Sequence
  ENSG00000104140_5 (sequence is synthesized)
cccaggctcagggtctggccgagaagatccgagcctgctgctaccttgagtgctcagccttgacgcagaagaacttgaaggaagtatttgactcggctattctcagtgccattgagcaca

SEQ ID NO: 140515 - DNA, 120 bp, Artificial Sequence
  ENSG00000104140_6 (sequence is synthesized)
ctatggctgcatagcaagtagtaggcaggaggccaaagacttctgagacctggggcacccgggcctttgcggcagctactggcagggcctggccacctcataggactcagttcccttctg

SEQ ID NO: 140516 - DNA, 120 bp, Artificial Sequence
  ENSG00000104140_7 (sequence is synthesized)
aacactcgggggacatgggcctctaactgcccactctgatatgcctgggtgagcctaggagggaaggctctgatttggatttctccagtcaaagctcacagaaaaaaacctggcactttg

SEQ ID NO: 140517 - DNA, 120 bp, Artificial Sequence
  ENSG00000104140_8 (sequence is synthesized)
attttcatgggatggtcctaacagggtcagtcacctccgagcagtttgggaacccagtttcttgtcctgggccctcaggtcagcctggctgaattaggacccttccttggcacaggggtg

SEQ ID NO: 140518 - DNA, 120 bp, Artificial Sequence
  ENSG00000104140_9 (sequence is synthesized)
agaaagagcttggggaacgcttggcattatggagggctggaaggggctcaaccccgatttggagagaagtttgggatggagtgggcgagagattgagagagcgagcaggaaaagaggtct

SEQ ID NO: 140519 - DNA, 120 bp, Artificial Sequence
  ENSG00000104140_10 (sequence is synthesized)
tggagcctgggactgatggtggataaggcctggaaagaagatgacgaggaggaggagagagggaagtggggtggatgaggagcaggctgacacctgggctgccctcaatccccaaggcca

SEQ ID NO: 140520 - DNA, 120 bp, Artificial Sequence
  ENSG00000104140_11 (sequence is synthesized)
gggagggcggggctggcccctgggaagaactgggtctctgggctccctaggcactgcccaaactggctgagccaggagtggggcaggaagtgagagtcaaggcccagcaaaaggaggggg

SEQ ID NO: 140521 - DNA, 120 bp, Artificial Sequence
  ENSG00000104140_12 (sequence is synthesized)
aggagctgcaaattagaacctgaaggaggaccgggttggggatcatccctttcctcaaggtcacacagcctagaagctagagcagtgcagagtctgcaaataaaaccttaagtctgtgaa

SEQ ID NO: 140522 - DNA, 120 bp, Artificial Sequence
  ENSG00000104142_0 (sequence is synthesized)
agtcagctgagctgccggggcgaggttgggatcacctggcaccggctgaagggagcctgtgatttttttgtagcgggggcggggagtaaggtgcaagactgcgccagattcaaggacgag

SEQ ID NO: 140523 - DNA, 120 bp, Artificial Sequence
  ENSG00000104142_1 (sequence is synthesized)
ggctgcccgattatctcgctgcataaggcaagagcaagaggatcctcaggattttaaagaggaggcgacggctgcaggttcccaggatctgtcagaggctggggagttacagcttccatt

SEQ ID NO: 140524 - DNA, 120 bp, Artificial Sequence
  ENSG00000104142_2 (sequence is synthesized)
ctggggcgacggggaccccgggggggtagcccttttgtaatccccaggccccggacaaagagcccagaggccgggcaccatggcgtccatcctggatgagtacgagaactcgctgtcccg

SEQ ID NO: 140525 - DNA, 120 bp, Artificial Sequence
  ENSG00000104142_3 (sequence is synthesized)
ctcggccgtcttgcagcccggctgccctagcgtgggcatcccccactcggggtatgtgaatgcccagctggagaaggaagtgcccatcttcacaaagcagcgcattgacttcaccccttc

SEQ ID NO: 140526 - DNA, 120 bp, Artificial Sequence
  ENSG00000104142_4 (sequence is synthesized)
cgagcgcattaccagtcttgtcgtctccagcaatcagctgtgcatgagcctgggcaaggatacactgctccgcattgacttgggcaaggcaaatgagcccaaccacgtggagctgggacg

SEQ ID NO: 140527 - DNA, 120 bp, Artificial Sequence
  ENSG00000104142_5 (sequence is synthesized)
taaggatgacgcaaaagttcacaagatgttccttgaccatactggctctcacctgctgattgccctgagcagcacggaggtcctctacgtgaaccgaaatggacagaaggtacggccact

SEQ ID NO: 140528 - DNA, 120 bp, Artificial Sequence
  ENSG00000104142_6 (sequence is synthesized)
agcacgctggaaggggcagctggtggagagtgtgggttggaacaaggcactgggcacggagagcagcacaggccccatcctggtcgggactgcccaaggccacatctttgaagcagagct

SEQ ID NO: 140529 - DNA, 120 bp, Artificial Sequence
  ENSG00000104142_7 (sequence is synthesized)
ctcagccagcgaaggtgggcttttcggccctgctccggatctctacttccgcccattgtacgtgctaaatgaagaagggggtccagcacctgtgtgctcccttgaggccgagcggggccc

SEQ ID NO: 140530 - DNA, 120 bp, Artificial Sequence
  ENSG00000104142_8 (sequence is synthesized)
tgatgggcgtagctttgttattgccaccactcggcagcgcctcttccagttcataggccgagcagcagagggggctgaggcccagggtttctcagggctctttgcagcttacacggacca

SEQ ID NO: 140531 - DNA, 120 bp, Artificial Sequence
  ENSG00000104142_9 (sequence is synthesized)
cccacccccattccgtgagtttcccagcaacctgggctacagtgagttggccttctacacccccaagctgcgctccgcaccccgggccttcgcctggatgatgggggatggtgtgttgta

SEQ ID NO: 140532 - DNA, 120 bp, Artificial Sequence
  ENSG00000104142_10 (sequence is synthesized)
tggggcattggactgtgggcgccctgactctctgctgagcgaggagcgagtctgggagtacccagagggggtagggcctggggccagcccacccctagccatcgtcttgacccagttcca

SEQ ID NO: 140533 - DNA, 120 bp, Artificial Sequence
  ENSG00000104142_11 (sequence is synthesized)
cttcctgctgctactggcagaccgggtggaggcagtgtgcacactgaccgggcaggtggtgctgcgggatcacttcctggagaaatttgggccgctgaagcacatggtgaaggactcctc

SEQ ID NO: 140534 - DNA, 120 bp, Artificial Sequence
  ENSG00000104142_12 (sequence is synthesized)
cacaggccagctgtgggcctacactgagcgggctgtcttccgctaccacgtgcaacgggaggcccgagatgtctggcgcacctatctggacatgaaccgcttcgatctggccaaagagta

SEQ ID NO: 140535 - DNA, 120 bp, Artificial Sequence
  ENSG00000104142_13 (sequence is synthesized)
ttgtcgagagcggcccgactgcctggacacggtcctggcccgggaggccgatttctgctttcgccagcgtcgctacctggagagcgcacgctgctatgccctgacccagagctactttga

SEQ ID NO: 140536 - DNA, 120 bp, Artificial Sequence
  ENSG00000104142_14 (sequence is synthesized)
ggagattgccctcaagttcctggaggcccgacaggaggaggctctggctgagttcctgcagcgaaaactggccagtttgaagccagccgaacgtacccaggccacactgctgaccacctg

SEQ ID NO: 140537 - DNA, 120 bp, Artificial Sequence
  ENSG00000104142_15 (sequence is synthesized)
gctgacagagctctacctgagccggcttggggctctgcagggcgacccagaggccctgactctctaccgagaaaccaaggaatgctttcgaaccttcctcagcagcccccgccacaaaga

SEQ ID NO: 140538 - DNA, 120 bp, Artificial Sequence
  ENSG00000104142_16 (sequence is synthesized)
tgctcgccagtcatggggacacagaacacatggtgtactttgcagtgatcatgcaggactatgagcgggtggtggcttaccactgtcagcacgaggcctacgaggaggccctggccgtgc

SEQ ID NO: 140539 - DNA, 120 bp, Artificial Sequence
  ENSG00000104142_17 (sequence is synthesized)
tcgcccgccaccgtgacccccagctcttctacaagttctcacccatcctcatccgtcacatcccccgccagcttgtagatgcctggattgagatgggcagccggctggatgctcgtcagc

SEQ ID NO: 140540 - DNA, 120 bp, Artificial Sequence
  ENSG00000104142_18 (sequence is synthesized)
tcattcctgccctggtgaactacagccagggtggtgaggtccagcaggtgagccaggccatccgctacatggagttctgcgtgaacgtgctgggggagactgagcaggccatccacaact

SEQ ID NO: 140541 - DNA, 120 bp, Artificial Sequence
  ENSG00000104142_19 (sequence is synthesized)
acctgctgtcactgtatgcccgtggccggccggactcactactggcctatctggagcaggctggggccagcccccaccgggtgcattacgacctcaagtatgcgctgcggctctgcgccg

SEQ ID NO: 140542 - DNA, 120 bp, Artificial Sequence
  ENSG00000104142_20 (sequence is synthesized)
agcatggccaccaccgcgcttgtgtccatgtctacaaggtcctagagctgtatgaggaggccgtggacctggccctgcaggtggatgtggacctggccaagcagtgtgcagacctgcctg

SEQ ID NO: 140543 - DNA, 120 bp, Artificial Sequence
  ENSG00000104142_21 (sequence is synthesized)
aggaggatgaggaattgcgcaagaagctgtggctgaagatcgcacggcacgtggtgcaggaagaggaagatgtacagacagccatggcttgcctggctagctgccccttgctcaagattg

SEQ ID NO: 140544 - DNA, 120 bp, Artificial Sequence
  ENSG00000104142_22 (sequence is synthesized)
aggatgtgctgcccttctttcctgatttcgtcaccatcgaccacttcaaggaggcgatctgcagctcacttaaggcctacaaccaccacatccaggagctgcagcgggagatggaagagg

SEQ ID NO: 140545 - DNA, 120 bp, Artificial Sequence
  ENSG00000104142_23 (sequence is synthesized)
ctacagccagtgcccagcgcatccggcgagacctgcaggagctgcggggccgctacggcactgtggagccccaggacaaatgtgccacctgcgacttccccctgctcaaccgcccttttt

SEQ ID NO: 140546 - DNA, 120 bp, Artificial Sequence
  ENSG00000104142_24 (sequence is synthesized)
acctcttcctctgtggccatatgttccatgctgactgcctgctgcaggctgtgcgacctggcctgccagcctacaagcaggcccggctggaggagctgcagaggaagctgggggctgctc

SEQ ID NO: 140547 - DNA, 120 bp, Artificial Sequence
  ENSG00000104142_25 (sequence is synthesized)
cacccccagccaagggctctgcccgggccaaggaggccgagggtggggctgccacggcagggcccagccgggaacagctcaaggctgacctggatgagttggtggccgctgagtgtgtgt

SEQ ID NO: 140548 - DNA, 120 bp, Artificial Sequence
  ENSG00000104142_26 (sequence is synthesized)
actgtggggagctgatgatccgctctatcgaccggccgttcatcgacccccagcgctacgaggaggagcagctcagttggctgtaggagggtgtcacctttgatggggggtgggcaatgg

SEQ ID NO: 140549 - DNA, 120 bp, Artificial Sequence
  ENSG00000104142_27 (sequence is synthesized)
ggagcagtggcttgaacccacttgagaaggctgcctcctaggctctgctcagtcatcttgcaattgccacactgtgaccacgttgacgggagtagagtagcgctgttggccaggaggtgt

SEQ ID NO: 140550 - DNA, 120 bp, Artificial Sequence
  ENSG00000104142_28 (sequence is synthesized)
caggtgtgagtgtattctgccagcttttcatgctgttcttcagagctgcagttatgccagaccatcagcctgcctcccagtagaggcccttcacctggagaagtcagaaatctgacccaa

SEQ ID NO: 140551 - DNA, 120 bp, Artificial Sequence
  ENSG00000104142_29 (sequence is synthesized)
ttccaccccctgcctctagcacctcttctgtccctgtcattccccacacacgtcctgttcacctcgagagagagagagagagagcacctttcttccgtctgttcactctgcggcctctgg

SEQ ID NO: 140552 - DNA, 120 bp, Artificial Sequence
  ENSG00000104142_30 (sequence is synthesized)
aatcccagctcttctctctcagaagaagccttctcttcctcctgcctgtaggtgtcccagaagtgagaaggcagccttcgaagtcctgggcattgggtgagaaagtgatgctagttgggg

SEQ ID NO: 140553 - DNA, 120 bp, Artificial Sequence
  ENSG00000104142_31 (sequence is synthesized)
catgcttttgtgcacactctctggggctccagtgtgaagggtgccctggggctgagggccttgtggaggatggtcggtggtggtgatggaggtggagagcattaaactgtctgcactgca

SEQ ID NO: 140554 - DNA, 78 bp, Artificial Sequence
  ENSG00000104142_32 (sequence is synthesized)
gtgcacctggcctgtattcagcattttatgcatagatgtatatttcagggaacattgacttgggcaaggcaaatgagc

SEQ ID NO: 140555 - DNA, 120 bp, Artificial Sequence
  ENSG00000104147_0 (sequence is synthesized)
attcgaaaggaaggcgccggctgcgggaagatggcggctcagccgctgcggcatcgctcacgttgtgcaacgccgccccggggggacttttgtggtggcactgagagggcgattgaccaa

SEQ ID NO: 140556 - DNA, 120 bp, Artificial Sequence
  ENSG00000104147_1 (sequence is synthesized)
gcttcttttacgacctccatggagtgggatacgcaggtggtgaaggggtcctcgccgctcggccccgcagggctgggggctgaggagccagccgccggcccgcagctgccgtcttggctg

SEQ ID NO: 140557 - DNA, 120 bp, Artificial Sequence
  ENSG00000104147_2 (sequence is synthesized)
cagcctgagaggtgcgctgtgttccagtgcgcacagtgtcacgcagtgctcgccgactcggtgcacctcgcctgggacctgtcgcggtccctcggggccgtggtcttctccagagttaca

SEQ ID NO: 140558 - DNA, 120 bp, Artificial Sequence
  ENSG00000104147_3 (sequence is synthesized)
aataacgtcgttttggaagcgcccttcctagttggcattgaaggttcactcaaaggcagtacttacaaccttttattctgtggttcttgtgggattcccgttggtttccatctgtattct

SEQ ID NO: 140559 - DNA, 120 bp, Artificial Sequence
  ENSG00000104147_4 (sequence is synthesized)
acccatgctgccctggctgccttgagaggtcacttctgcctttccagtgacaaaatggtgtgctatctcttaaaaacaaaagccatagtaaatgcatcagagatggatattcaaaatgtt

SEQ ID NO: 140560 - DNA, 120 bp, Artificial Sequence
  ENSG00000104147_5 (sequence is synthesized)
ctctatcagaaaagattgcagagctgaaagagaagatagtgctaacgcacaatcgcttaaaatcactaatgaagattctgagtgaagtgactcctgaccagtccaagccagaaaactgat

SEQ ID NO: 140561 - DNA, 120 bp, Artificial Sequence
  ENSG00000104147_6 (sequence is synthesized)
cctgtaccaaagcttgagtgtcaggttcaggctttattgctgtcttcaacaacaggtgctgcttagtcatttcttgaaaaagattggcttcaagaatggaggggaaatgcagtttctatt

SEQ ID NO: 140562 - DNA, 120 bp, Artificial Sequence
  ENSG00000104147_7 (sequence is synthesized)
tacctttaggctgattttccaaattatttgtgaagctgtttttagaagatgagagactaaggattcttctcttttatagctatttgccttaagaacttactttagattcttattgaattc

SEQ ID NO: 140563 - DNA, 120 bp, Artificial Sequence
  ENSG00000104147_8 (sequence is synthesized)
ataatacttatctctgaaaatgtctttgactgtaaatttaggaattaagatgcagagtcccatgtgtcctctgatctaaagttgcatggttggtctgaaaatagagttgggcttaatgtt

SEQ ID NO: 140564 - DNA, 120 bp, Artificial Sequence
  ENSG00000104147_9 (sequence is synthesized)
gacttctattactcctgcatggagcagttgttatgaatactaatacatcactttttaacttctgtaaaatacagatcataatattctataggtaatgtttaataaattgcctgaataata

SEQ ID NO: 140565 - DNA, 80 bp, Artificial Sequence
  ENSG00000104154_0 (sequence is synthesized)
agacctggggagccggcctccagcagcgggcgcggcgggcgcgagcacgaccccactctcctgcggccgcgggtggagca

SEQ ID NO: 140566 - DNA, 120 bp, Artificial Sequence
  ENSG00000104154_1 (sequence is synthesized)
tgagttgcggccccgcggcagcgccccaggatggggagggacgcgcggcactgccctcgagaactggcgctccggtgaagtaggcgccgccggccgtccgcctcccccaagccgttccgc

SEQ ID NO: 140567 - DNA, 120 bp, Artificial Sequence
  ENSG00000104154_2 (sequence is synthesized)
accgcggccgctcagcctctgccatggccggctctggcgcgtggaagcgcctcaaatctatgctaaggaaggatgatgcgccgctgtttttaaatgacaccagcgcctttgacttctcgg

SEQ ID NO: 140568 - DNA, 120 bp, Artificial Sequence
  ENSG00000104154_3 (sequence is synthesized)
atgaggcgggggacgaggggctttctcggttcaacaaacttcgagttgtggtggccgatgacggttccgaagccccggaaaggcctgttaacggggcgcacccgaccctccaggccgacg

SEQ ID NO: 140569 - DNA, 120 bp, Artificial Sequence
  ENSG00000104154_4 (sequence is synthesized)
atgattccttactggaccaagacttacctttgaccaacagtcagctgagtttgaaggtggactcctgtgacaactgcagcaaacagagagagatactgaagcagagaaaggtgaaagcca

SEQ ID NO: 140570 - DNA, 120 bp, Artificial Sequence
  ENSG00000104154_5 (sequence is synthesized)
ggttgaccattgctgccgttctgtacttgcttttcatgattggagaacttgtaggtggatacattgcaaatagcctagcaatcatgacagatgcacttcatatgttaactgacctaagcg

SEQ ID NO: 140571 - DNA, 120 bp, Artificial Sequence
  ENSG00000104154_6 (sequence is synthesized)
ccatcatactcaccctgcttgctttgtggctatcatcaaaatcaccaaccaaaagattcacctttggatttcatcgcttagaggttttgtcagctatgattagtgtgctgttggtgtata

SEQ ID NO: 140572 - DNA, 120 bp, Artificial Sequence
  ENSG00000104154_7 (sequence is synthesized)
tacttatgggattcctcttatatgaagctgtgcaaagaactatccatatgaactatgaaataaatggagatataatgctcatcaccgcagctgttggagttgcagttaatgtaataatgg

SEQ ID NO: 140573 - DNA, 120 bp, Artificial Sequence
  ENSG00000104154_8 (sequence is synthesized)
ggtttctgttgaaccagtctggtcaccgtcactcccattcccactccctgccttcaaattcccctaccagaggttctgggtgtgaacgtaaccatgggcaggatagcctggcagtgagag

SEQ ID NO: 140574 - DNA, 120 bp, Artificial Sequence
  ENSG00000104154_9 (sequence is synthesized)
ctgcatttgtacatgctttgggagatttggtacagagtgttggtgtgctaatagctgcatacatcatacgattcaagccagaatacaagattgctgaccccatctgtacatacgtatttt

SEQ ID NO: 140575 - DNA, 120 bp, Artificial Sequence
  ENSG00000104154_10 (sequence is synthesized)
cattacttgtggcttttacaacatttcgaatcatatgggatacagtagttataatactagaaggtgtgccaagccatttgaatgtagactatatcaaagaagccttgatgaaaatagaag

SEQ ID NO: 140576 - DNA, 120 bp, Artificial Sequence
  ENSG00000104154_11 (sequence is synthesized)
atgtatattcagtcgaagatttaaatatctggtctctcacttcaggaaaatctactgccatagttcacatacagctaattcctggaagttcatctaaatgggaggaagtacagtccaaag

SEQ ID NO: 140577 - DNA, 120 bp, Artificial Sequence
  ENSG00000104154_12 (sequence is synthesized)
caaaccatttattattgaacacatttggcatgtatagatgtactattcagcttcagagttacaggcaagaagtggacagaacttgtgcaaattgtcagagttctagtccctaattttatg

SEQ ID NO: 140578 - DNA, 120 bp, Artificial Sequence
  ENSG00000104154_13 (sequence is synthesized)
tattttgggaactcctgccttatttatcctgcagtcacagacttgagagcaataaatgcaaacctaaatgagaaaatggaatccctgacagctgtgtccgtatcaagcatcagtctctca

SEQ ID NO: 140579 - DNA, 120 bp, Artificial Sequence
  ENSG00000104154_14 (sequence is synthesized)
aacagttgccccagcctgacagtgctagtctctgtttaatggtaaaaggagactttgccataattttcagatgaagatgtttcccaaacactgtttacagaatgagatgtgactctacag

SEQ ID NO: 140580 - DNA, 120 bp, Artificial Sequence
  ENSG00000104154_15 (sequence is synthesized)
atacctcatagaagacaatccaagatcatacttcattaacttgacagagtacgtgtcttaaaggaagcatcaagaattcaatatttgcatttaaaaatactttttaaggccattttatat

SEQ ID NO: 140581 - DNA, 120 bp, Artificial Sequence
  ENSG00000104154_16 (sequence is synthesized)
taagccagtgctggaaaactgaattttttttattatgtataataatctcgacacccagcttctggaattgctgctttctttttacagaaattactacccaacagatttcaggaagtacta

SEQ ID NO: 140582 - DNA, 120 bp, Artificial Sequence
  ENSG00000104154_17 (sequence is synthesized)
gtagttatcccaaaagtggaataagcatgtattcctaagtgtttcagaaatgttttatttcacacataagtcttaatgttattgttatgattatactttataaacaaccttttccagatg

SEQ ID NO: 140583 - DNA, 120 bp, Artificial Sequence
  ENSG00000104154_18 (sequence is synthesized)
ctacagggttttgaatctcaaagttaacatttttcattatttgtaatcttagaaccaaatctttatttattgtggtcactgttattaaatgatttaggaaatactttcaatattattctg

SEQ ID NO: 140584 - DNA, 120 bp, Artificial Sequence
  ENSG00000104154_19 (sequence is synthesized)
aatggctgaagttagtcttaaactcaaattactatatgatgatttaaaacaaaataaaagagcgaggatgggggttggagtttcaggtttatgtcttcccgacatcacttttatcattca

SEQ ID NO: 140585 - DNA, 120 bp, Artificial Sequence
  ENSG00000104154_20 (sequence is synthesized)
tgaaattgtcttaaaaaagcaagagactgcaaaatgtaaacagtaatcttctgtccctttaagaactgccaacaatttgtacaaaaaatgtggtacgttggttcctgcctccactccagg

SEQ ID NO: 140586 - DNA, 120 bp, Artificial Sequence
  ENSG00000104154_21 (sequence is synthesized)
tcatctgtgtgtttagcctttcagggtaaactctagagggttcagtttataattcccacctttcacatatagttcaacaacattaatccagagagaattttatgttttatgatatgggtt

SEQ ID NO: 140587 - DNA, 120 bp, Artificial Sequence
  ENSG00000104154_22 (sequence is synthesized)
atgttttattatatattttatgttttatgatatgggttagggattctccatggactccagaaaccctaaaatacaattttgaggttttccaataataccatagcagaaatgtccaagggg

SEQ ID NO: 140588 - DNA, 120 bp, Artificial Sequence
  ENSG00000104154_23 (sequence is synthesized)
ccaaggggttgggggaagatattactttgagaaaacagaaatgtaaaggatttttgaccttatatatgtgtgtggttttgtttttgtttttgttcttgagagagtctcactctgtcaccc

SEQ ID NO: 140589 - DNA, 120 bp, Artificial Sequence
  ENSG00000104154_24 (sequence is synthesized)
tggcctgtatgtgtgtgttttaaagcactagatagggatggacattaaatctgtgttgcagggaaactaaacagaggtttccaaactgaaggcaacctaattgtaaatgcctgtgttaaa

SEQ ID NO: 140590 - DNA, 120 bp, Artificial Sequence
  ENSG00000104154_25 (sequence is synthesized)
gaggcagcttgactgttcatgtttcattttgcaaccattggttttgagattatcttttatgcacatttggagtcccttttcaacagtgacagtttcttacacgaagaatggatatggtta

SEQ ID NO: 140591 - DNA, 120 bp, Artificial Sequence
  ENSG00000104154_26 (sequence is synthesized)
ttgggctcctctaagaatcagagtagggtaacaatgtaccaggcaaattgtaagttgaaattctagataagcatgcagatgacttacaatataaatgaagaataggaaacattttatctt

SEQ ID NO: 140592 - DNA, 120 bp, Artificial Sequence
  ENSG00000104154_27 (sequence is synthesized)
aagataagaaaacccagatttacctataagattgttgggagttaatggtgtcaataaaaggattgatggtccctctaatgaaacccagtagatgtttgttgaattgaactgaaaatttat

SEQ ID NO: 140593 - DNA, 120 bp, Artificial Sequence
  ENSG00000104154_28 (sequence is synthesized)
agtggctcatgcctgtaatctcagcatttggggaggcaaaggtggaagtatccctcgaggccaagagttcatgaccagcctggtcttttgtagagaccctgtctctacaaaaatataaaa

SEQ ID NO: 140594 - DNA, 120 bp, Artificial Sequence
  ENSG00000104154_29 (sequence is synthesized)
gagaccctgtctctacaaaaatataaaaatcagccaggcgtcgtgcacacctgtagtatcagctacttgtaaggctgtggcagaagtgctttagcccaggaggttgaggctgcagtgagc

SEQ ID NO: 140595 - DNA, 120 bp, Artificial Sequence
  ENSG00000104154_30 (sequence is synthesized)
cactgcagcctgagtaacaaaatgagaccctatctcaaaaacaaaaaggaaaagaaaatatacatgatgggattcctattgtgaagtcatttaaaataatgacttgaatttctcagaaat

SEQ ID NO: 140596 - DNA, 120 bp, Artificial Sequence
  ENSG00000104154_31 (sequence is synthesized)
ttcaggagcatataaactatttaaatcaaaatattcttacatatagaaaccaagtaagaataaatgagagatatttcagtggacatctggacatatttatggactttgagtatctagcaa

SEQ ID NO: 140597 - DNA, 120 bp, Artificial Sequence
  ENSG00000104154_32 (sequence is synthesized)
gtagaaaggaaaaaaatattcatcatactctaatcatttttttatatctattgagcttgtttcttgtaaacttttctttatcttataaaggcatatctcgcttttgtatcgacctgttcc

SEQ ID NO: 140598 - DNA, 120 bp, Artificial Sequence
  ENSG00000104154_33 (sequence is synthesized)
tgtatcgacctgttccttaaaaaatgtatttgataaaacaggctaaaattcatttgagtattgaaaagaattctttttttttttttaagatggtgtctcactgtcacccaggctggagtg

SEQ ID NO: 140599 - DNA, 75 bp, Artificial Sequence
  ENSG00000104154_34 (sequence is synthesized)
tgggcatgaaccactgtgcccagccaaaaagaatccttttgtaaaatacagaaacactgcaaacctttgtaaatc

SEQ ID NO: 140600 - DNA, 75 bp, Artificial Sequence
  ENSG00000104154_35 (sequence is synthesized)
gcttatgggcatgaaccactgtgcccagccaaaaagaatccttttgtaaaatacagaaacactgcaaacctgggg

SEQ ID NO: 140601 - DNA, 120 bp, Artificial Sequence
  ENSG00000104154_36 (sequence is synthesized)
caagaaatccttccacctcgggctcccaaagtgctgagattacagggtgtgagctaccgcacccagccatgaaaacttctgtaaatcttaactatcgtgttctgcttaaagtgaggtaca

SEQ ID NO: 140602 - DNA, 120 bp, Artificial Sequence
  ENSG00000104154_37 (sequence is synthesized)
cataaagtttcctgtgctttgtttttgtaggaaaaagtacatagtttgtatctttaccttacggagtctatgagatttgagaatttgatttcactttttgtaacttaacccacagaaaag

SEQ ID NO: 140603 - DNA, 120 bp, Artificial Sequence
  ENSG00000104154_38 (sequence is synthesized)
gacattaacttagcagataggaccaaggactgaatgacttctgacaaaaagcgtttggtctatccttcacttgttgagctacaaccatgcattacacttctcagctgagctctcaaagag

SEQ ID NO: 140604 - DNA, 120 bp, Artificial Sequence
  ENSG00000104154_39 (sequence is synthesized)
ctctatgccctgtgaaaagcagtggctgagttggatgaacacatagcattattaattttgcactgggaaaacagattatgacaggaccacagaccacaatataaaaacttggcagttctt

SEQ ID NO: 140605 - DNA, 120 bp, Artificial Sequence
  ENSG00000104154_40 (sequence is synthesized)
tggtgtgatatattttaattagtatttgcaaataatcagagttacttgtgtacataaacgtgtgtttcacaactatggccagatgcaaccttttggtctgtttcaggaaaagacctatta

SEQ ID NO: 140606 - DNA, 120 bp, Artificial Sequence
  ENSG00000104154_41 (sequence is synthesized)
ttccactaacaattatgctgccttagaaacataatgggagtgtaattgaagaaagcatgtctcagaaggttttgatatgcagaactggaagctattgtaattcctacatacatttccatt

SEQ ID NO: 140607 - DNA, 120 bp, Artificial Sequence
  ENSG00000104154_42 (sequence is synthesized)
agctatgccttatgtaatgtgagtgcagatttttacaacttagagttcccatcagtgtttttttgccacatcaccgggtttcttattttactgttttcttttcaactttgggtgctttat

SEQ ID NO: 140608 - DNA, 120 bp, Artificial Sequence
  ENSG00000104154_43 (sequence is synthesized)
ttccattctctaaaactaagtttcttgctcttacgagacttagtgttccttttgaacccaggtgttccacctgacagtgtttgtctttcatagactttccagaatagacatagtcaagat

SEQ ID NO: 140609 - DNA, 120 bp, Artificial Sequence
  ENSG00000104154_44 (sequence is synthesized)
cagacacgtgagcttctctctcattttaatgtgaggaaaatcatctttcagagacaaggcaccgcttagaaatgtatgtccaggtatgaaagaacctttttaaaatggctggttgttcca

SEQ ID NO: 140610 - DNA, 120 bp, Artificial Sequence
  ENSG00000104154_45 (sequence is synthesized)
gatccagatttctctgcacactggacttcgtagagtaagtgtggtagacaaagagactacactgcacaaccaccagtgaatatcattgctaagaagactttgggtcgtgtttctcagcca

SEQ ID NO: 140611 - DNA, 120 bp, Artificial Sequence
  ENSG00000104154_46 (sequence is synthesized)
ctctcacagcttttgtagacttatttgattttgaaacaagcagttagctaaatctattttccttttatgcatatatgttaattggctcaacttaatatggtgttcttacagaatatgagc

SEQ ID NO: 140612 - DNA, 120 bp, Artificial Sequence
  ENSG00000104154_47 (sequence is synthesized)
ccatttgaaataaggttttaggcaattttgctgttggctctgatttgtatatagcaaatttaaagttacagagtgtttcctagatagaagattagttcatttggttcattttgtctttga

SEQ ID NO: 140613 - DNA, 120 bp, Artificial Sequence
  ENSG00000104154_48 (sequence is synthesized)
agcaagccaagctcatgagccagttggttatttgtcataaatgaacacccatcactatatgctatgttgaggggaggcaagtctgatcttcgaataattgataaagtttaatatctttgt

SEQ ID NO: 140614 - DNA, 120 bp, Artificial Sequence
  ENSG00000104154_49 (sequence is synthesized)
agccaaaatacaatttgcaaaccctaactccagatgtgtcgtatgaatcttgacaaccaggtcttgagatttgttttactgattgccaatcaggtatattatttgtgatgttcgtgggag

SEQ ID NO: 140615 - DNA, 120 bp, Artificial Sequence
  ENSG00000104154_50 (sequence is synthesized)
catgcaaattagaagacagtgttgtgggagttcctcagtattgaattacatgtgtgcactcaggcctgccagtcactgaattctgacttgtaaagggtttaacctgctgttccaatcatt

SEQ ID NO: 140616 - DNA, 120 bp, Artificial Sequence
  ENSG00000104154_51 (sequence is synthesized)
gaggaccaatttgctttttgataagattggaaaacatttatggagactttcccagttaaatctatgacagtgtccacttaaatagtgcaatttagtatattctcagataactgcaacaca

SEQ ID NO: 140617 - DNA, 120 bp, Artificial Sequence
  ENSG00000104154_52 (sequence is synthesized)
aaattgaaatgtgccagtatgtcatctttctacctggaagatactgtatatttggaaagtttatgcttctctcaataaatacatgttattaaataagccatatcacagtttaagaaattg

SEQ ID NO: 140618 - DNA, 120 bp, Artificial Sequence
  ENSG00000104154_53 (sequence is synthesized)
tatatactttatcatatgccctttcagaaaccaggtattttgcatatgattgattttagaaagattttgaagctggggtttgtccatgttaattaagatcaaagtatatatatatatata

SEQ ID NO: 140619 - DNA, 120 bp, Artificial Sequence
  ENSG00000104154_54 (sequence is synthesized)
tatatgtgctgtatttgcaactttcacattgtaatttcctatacacttattaaagtattgttttgccatgtggtttattaaataaaaatgtacagtctcttaaatatctgctctttttat

SEQ ID NO: 140620 - DNA, 120 bp, Artificial Sequence
  ENSG00000104154_55 (sequence is synthesized)
taagtaatattagtaggcctaaaaacattgttcttaaaagaaaatcttttataattataatgtcattttataatgccctcttatatgtttaagaaataaaactgaaaaaaatcttctgga

SEQ ID NO: 140621 - DNA, 120 bp, Artificial Sequence
  ENSG00000104154_56 (sequence is synthesized)
tcttaccctcgcagcctccagagtagctaggactgcatgcatataccaccatacccagctaattttttaattttttgtacagacatggtcttgctttgttgccaggctggtcctgaactc

SEQ ID NO: 140622 - DNA, 120 bp, Artificial Sequence
  ENSG00000104154_57 (sequence is synthesized)
tcagtctcccaaagtgctgggattacaaccataagccactgcaccaggcctgatgaatggaaccttttaaagtcactaatagtccaggcactgtggctcatacctctaattgcagcactt

SEQ ID NO: 140623 - DNA, 61 bp, Artificial Sequence
  ENSG00000104154_58 (sequence is synthesized)
ggagatcccgtctttataaaaagaaaaattagcagatgtggtggcacacacctgtggtccc

SEQ ID NO: 140624 - DNA, 120 bp, Artificial Sequence
  ENSG00000104154_59 (sequence is synthesized)
acctgtggtcccagctacttgggaggctaagataggaagattgcttgggtccaggaggttgaggctacagtgagccatgttcgggccactgcactctagcctgggtgatggagcaagacc

SEQ ID NO: 140625 - DNA, 120 bp, Artificial Sequence
  ENSG00000104164_0 (sequence is synthesized)
aggtgccgccttgcttctgacgagccacacgtttgcttcttccctgtgttcccagctggagggacatgagtgtccctgggccgtcgtctccggacggggccctgacacggccaccctact

SEQ ID NO: 140626 - DNA, 120 bp, Artificial Sequence
  ENSG00000104164_1 (sequence is synthesized)
gcctggaggccggggagccgacgcctggtttaagtgacacttctccagatgaagggttaatagaggacttgactatagaagacaaagcagtggagcaactggcagaaggattgctttctc

SEQ ID NO: 140627 - DNA, 120 bp, Artificial Sequence
  ENSG00000104164_2 (sequence is synthesized)
attatttgccagatctgcagagatcaaaacaagccctccaggaactcacacagaaccaagttgtattgttagacacactggaacaagagatttcaaaatttaaagaatgtcattctatgt

SEQ ID NO: 140628 - DNA, 120 bp, Artificial Sequence
  ENSG00000104164_3 (sequence is synthesized)
tggatattaatgctttgtttgctgaggctaaacactatcatgccaagttggtgaatataagaaaagagatgctgatgcttcatgaaaaaacatcaaagttaaaaaaaagagcacttaaac

SEQ ID NO: 140629 - DNA, 120 bp, Artificial Sequence
  ENSG00000104164_4 (sequence is synthesized)
tgcagcagaagaggcaaaaagaagagttggaaagggagcagcaacgagagaaggagtttgaaagagaaaagcagttaactgccagaccagccaaaaggatgtgaaaagttgtgtttgtgt

SEQ ID NO: 140630 - DNA, 120 bp, Artificial Sequence
  ENSG00000104164_5 (sequence is synthesized)
gttttcttctcctgtcccatatttgggttatgatgactcaagtgtagactgaagttgaggtagtgccttatgccattatgtcatatgttgaaatccttattccggtattactgtgtctcc

SEQ ID NO: 140631 - DNA, 120 bp, Artificial Sequence
  ENSG00000104164_6 (sequence is synthesized)
atgccttttttccaagtagcagacgtcatgttgcatggtttttgatatttatatgtaagtttttcaaattttgcttaattttaaaatttattattttgatcttgaattatttataaactg

SEQ ID NO: 140632 - DNA, 120 bp, Artificial Sequence
  ENSG00000104164_7 (sequence is synthesized)
gaaagtggtttgattattgtgagtcaaaactctaagtggttaaaaattagtatgaattttttagcttcttaatgaatatggatttaaaactctccagttcttattttatgaaatgacttg

SEQ ID NO: 140633 - DNA, 120 bp, Artificial Sequence
  ENSG00000104164_8 (sequence is synthesized)
cctttctggtaatacaatgctgattttttagtaattgccttttcattactttgttaagaagaaatgccagctgtttaatcacacctacccctggaaaagaggtaaaccttttgaacagtt

SEQ ID NO: 140634 - DNA, 120 bp, Artificial Sequence
  ENSG00000104164_9 (sequence is synthesized)
gaatttcatcagaagctctatagctttttggtgagaggaagtgatactctttattacaagaaacaaggaattaacaaaaataaggaacttgttgctacctttcttttctgttgaacatta

SEQ ID NO: 140635 - DNA, 120 bp, Artificial Sequence
  ENSG00000104164_10 (sequence is synthesized)
aaaataatttggtttgtggactgggcatggtggcttatggaaaagaggtgagcctttgtgaagaacataatggaaaagtgcatgtacgggaaataacagcactttaggtgtagttcaggt

SEQ ID NO: 140636 - DNA, 120 bp, Artificial Sequence
  ENSG00000104164_11 (sequence is synthesized)
gagcaagatgccagatagtttctactaaccatatactctttctgcttcttagcgtcgttgtcactgcttctgtggcttttgggttcaaagtagattatatatattcctaaagcttggtgg

SEQ ID NO: 140637 - DNA, 120 bp, Artificial Sequence
  ENSG00000104164_12 (sequence is synthesized)
aggtagtggagctatcacacactcaaatgagcttgtatatttataatacaatatagtattatagtaacagttatcatacactgagatatagtttctgtgcttgtaaaaaattcttgaagt

SEQ ID NO: 140638 - DNA, 82 bp, Artificial Sequence
  ENSG00000104164_13 (sequence is synthesized)
ttctgtgcttgtaaaaaattcttgaaggctttgggacgccgaggcgggtggatcatgaggtcaaaagattgagaccatcctg

SEQ ID NO: 140639 - DNA, 120 bp, Artificial Sequence
  ENSG00000104164_14 (sequence is synthesized)
tgaagtggaatgatgtacaccaaatacccactttatagataattacagggatggtgaaaaattagtaaatagcttcacaaaagaggcagcgtgatacctttagtgttttctagaattttt

SEQ ID NO: 140640 - DNA, 120 bp, Artificial Sequence
  ENSG00000104164_15 (sequence is synthesized)
ttctggatattatatgtaagaatttattgtttgagggaaatacgaggtttcattgtttaaaatcaagagtgtattgtttactgttttacagtattatttaatatccaactggtctccaat

SEQ ID NO: 140641 - DNA, 120 bp, Artificial Sequence
  ENSG00000104164_16 (sequence is synthesized)
ctccattacatagggactgtacagagcctgtgaagatgtatgaatggtatcttttataatccacaatacatttctggtaagatggaatcactacctctgatcacatatcaggctaacgat

SEQ ID NO: 140642 - DNA, 120 bp, Artificial Sequence
  ENSG00000104164_17 (sequence is synthesized)
agagaaagcattaggtttaagttgagggctaagaactggtttgtttaaaggtttaaattgttggaaaagagcatttgccttctttaatgaatgatggtctcacaattcagttgactttga

SEQ ID NO: 140643 - DNA, 120 bp, Artificial Sequence
  ENSG00000104164_18 (sequence is synthesized)
cctaatatttaagaatataaatatattttatttgaaaggctgagtgttgccctcaaacacttgctaaaactgcctagggcaggattcattagggcttgcagacaatgtcacctaaattgc

SEQ ID NO: 140644 - DNA, 120 bp, Artificial Sequence
  ENSG00000104164_19 (sequence is synthesized)
tgaatgtactcattataatatgatatctgacaaaggtagtacagcgtttctgagtcatttgggaccaactgcagtggttgtttaaaatgctggttcctgcacacaattctctatctactg

SEQ ID NO: 140645 - DNA, 120 bp, Artificial Sequence
  ENSG00000104164_20 (sequence is synthesized)
aagcacatctgttttctttgtttgttttgctttgctttttgtttttaaagtttcccccagtgattccagtgcacctgaaaagttgagaaccacaggcttagtggtacgttggggtttccc

SEQ ID NO: 140646 - DNA, 120 bp, Artificial Sequence
  ENSG00000104164_21 (sequence is synthesized)
acgctaggctgcatagcattataacctgggaacgttaaaaaaaatacagacattcttgattcttagtgtagttatgatgtggatcctacgtattttttaaaaaactctccagataatttt

SEQ ID NO: 140647 - DNA, 120 bp, Artificial Sequence
  ENSG00000104164_22 (sequence is synthesized)
gatgtcacgagtcactagtatagactatctatctagtgagttgtattataagcgatgaaatactttaaaagctacccagtaactcttgggattaattttatgaaataaattctgagctgc

SEQ ID NO: 140648 - DNA, 120 bp, Artificial Sequence
  ENSG00000104164_23 (sequence is synthesized)
tgcttttgatatagtcagacttaagactgaaccccagtagacaggcaatagatatagaattctggttagctaattgaacttttgtgacctgtttaaaaacaaatcaaatttattgaacaa

SEQ ID NO: 140649 - DNA, 120 bp, Artificial Sequence
  ENSG00000104164_24 (sequence is synthesized)
atgacaaggcacaaatactttcagaattgtatttcagttttgaagatttaaaaaaaatgtgaaaataaatatatattagtatcctttattttaaagtcaattgtaaaccagaagtactgt

SEQ ID NO: 140650 - DNA, 120 bp, Artificial Sequence
  ENSG00000104164_25 (sequence is synthesized)
tcaattgtaaaccagaagtactgttattttggtgattaaaatccaaaactttagctgtatttcagtaacaaaaacataccttactagactgtgatggctcacacctgtaatcccagtgct

SEQ ID NO: 140651 - DNA, 120 bp, Artificial Sequence
  ENSG00000104164_26 (sequence is synthesized)
gagcccaggagttcaaggctgcagtgaattctgatcgcaccactgaactccagcccgtatgacagagtgagaccctgtttctaaaaacaaaacaaacaaacaaacaaacaacgtatctta

SEQ ID NO: 140652 - DNA, 120 bp, Artificial Sequence
  ENSG00000104164_27 (sequence is synthesized)
cttactgactaaactggaatggaaatcttataattagtgttgtatttttctgcaaaatagtgaattggtacttgggagacttctgttctttgttgaaaaaaattgcctttgttttgaaat

SEQ ID NO: 140653 - DNA, 120 bp, Artificial Sequence
  ENSG00000104164_28 (sequence is synthesized)
tatatcacctgtgttctgaactaaaatgatgggagttcattttgtatttactttgcagtaagtatcatgtaaatatgcaaatgttgaatgtaatatagattgtgtcctcattgagttttt

SEQ ID NO: 140654 - DNA, 120 bp, Artificial Sequence
  ENSG00000104164_29 (sequence is synthesized)
gggtgatacagtttataaatataacaattatacaccctcatacattcgtctgattttgagcttgtaagatgagaactgctttttacacatttaataaaaaaaggtctctgaattatctga

SEQ ID NO: 140655 - DNA, 120 bp, Artificial Sequence
  ENSG00000104164_30 (sequence is synthesized)
atcaatgaccagcacagagatgtaatcttcctctcggccacacacctgggtgtttcccttatttttttgctgcgtgtttccttcatgtcgtccaatttcttttcttattctcatatttgg

SEQ ID NO: 140656 - DNA, 120 bp, Artificial Sequence
  ENSG00000104164_31 (sequence is synthesized)
ctagatttttaataccagatctatgtcagctccttctcaaacctaaaattcagagccccagctctgttgagcgtgtattatatttcagttgctttatacatgttatctcataacagcaac

SEQ ID NO: 140657 - DNA, 120 bp, Artificial Sequence
  ENSG00000104164_32 (sequence is synthesized)
tgggtgtgaggggcggggacctgagtgagtagaactccggagaaaccctgggggagtaagcggtttttggcggctgcggcccccgggccctgccccgagtgcagaaatggggaaccgcgc

SEQ ID NO: 140658 - DNA, 120 bp, Artificial Sequence
  ENSG00000104164_33 (sequence is synthesized)
cggcccctctgcccagcgcaatgggcggaactgaagtcccgaggggaagctttgtattgggggtgcaattgaaggcggttgatggtgaagccattctgagtttatgtgttgactccgttt

SEQ ID NO: 140659 - DNA, 120 bp, Artificial Sequence
  ENSG00000104164_34 (sequence is synthesized)
gtgttcccagctggagggacatgagtgtccctgggccgtcgtctccggacggggccctgacacggccaccctactgcctggaggccggggagccgacgcctgcattctttaaaatattca

SEQ ID NO: 140660 - DNA, 120 bp, Artificial Sequence
  ENSG00000104164_35 (sequence is synthesized)
agacgacgatatcagcgcggggtccccacaacgccatggggcagagccaactctcgagcgcgtgatcgaagcccgcagttttttcgcccccgtcacttccgggtgcgacaatctcttctg

SEQ ID NO: 140661 - DNA, 69 bp, Artificial Sequence
  ENSG00000104164_36 (sequence is synthesized)
gaaaaaacatcaaagttaaaagtgagttgaaaattctttcacattctttacaaaagtagagggagacgg

SEQ ID NO: 140662 - DNA, 120 bp, Artificial Sequence
  ENSG00000104164_37 (sequence is synthesized)
attctgagtttatgtgttgactccggtacgtcattggttatttgtcatacggcagtggtgggggatggatttaccagaaagatgatcagcttataattcagagagtttgctgaggctaaa

SEQ ID NO: 140663 - DNA, 120 bp, Artificial Sequence
  ENSG00000104164_38 (sequence is synthesized)
tgactgtacgtgcctaaaactgaagaaagcaaaactgcagataaaggaggactgacatattttctggaagagactgtggggaattggtatcacgtcttccttaaatgtttggtaaaaatt

SEQ ID NO: 140664 - DNA, 120 bp, Artificial Sequence
  ENSG00000104164_39 (sequence is synthesized)
gtgttcccagctggagggacatgagtgtccctgggccgtcgtctccggacggggccctgacacggccaccctactgcctggaggccggggagccgacgcctgggtctcgctccgctgccc

SEQ ID NO: 140665 - DNA, 120 bp, Artificial Sequence
  ENSG00000104164_40 (sequence is synthesized)
tgccagatctgcagagatcaaaacaagccctccaggaactcaccattctttaaaatattcagacagaaccaagttgtattgttagacacactggaacaagagatttcaaaatttaaagaa

SEQ ID NO: 140666 - DNA, 120 bp, Artificial Sequence
  ENSG00000104177_0 (sequence is synthesized)
attgtcgcgctcggagcccctcagctcaggcggccgaggcggaggcagcggcggcgggatggcggacgccaacaaggccgaggtgcccggggccactggtggcgacagcccgcacctgca

SEQ ID NO: 140667 - DNA, 120 bp, Artificial Sequence
  ENSG00000104177_1 (sequence is synthesized)
gcccgcagagccgccgggcgagccgcggcgagagccgcaccccgcggaggcggagaagcagcagccgcagcacagcagcagctccaatggcgttaaaatggagaatgatgaatcagcaaa

SEQ ID NO: 140668 - DNA, 120 bp, Artificial Sequence
  ENSG00000104177_2 (sequence is synthesized)
agaagagaaatctgacttaaaggaaaaatctacaggaagtaagaaggccaatagatttcatccttattcaaaagacaagaattcgggcgctggagaaaagaagggtccaaatcgtaacag

SEQ ID NO: 140669 - DNA, 120 bp, Artificial Sequence
  ENSG00000104177_3 (sequence is synthesized)
agttttcattagcaacatcccatatgacatgaaatggcaagctattaaagatctaatgagagagaaagttggtgaggttacatacgtggagctctttaaggatgcggaaggaaaatcaag

SEQ ID NO: 140670 - DNA, 120 bp, Artificial Sequence
  ENSG00000104177_4 (sequence is synthesized)
gggttgtggtgtggttgaattcaaagatgaagaatttgtaaagaaagccctagaaactatgaacaaatatgatcttagtggaagaccccttaatattaaagaggatcctgatggagaaaa

SEQ ID NO: 140671 - DNA, 120 bp, Artificial Sequence
  ENSG00000104177_5 (sequence is synthesized)
tgctcgtagggcattgcagcgaacaggaggatcatttccaggaggacacgtccctgatatgggatcagggttgatgaatttaccaccttccatactcaataatccaaacattcctcctga

SEQ ID NO: 140672 - DNA, 120 bp, Artificial Sequence
  ENSG00000104177_6 (sequence is synthesized)
agtcatcagtaatttgcaggccggtagacttggttccacaatttttgttgccaatcttgacttcaaagttggttggaagaagctaaaggaagtgttcagcatagctggaactgtgaagcg

SEQ ID NO: 140673 - DNA, 120 bp, Artificial Sequence
  ENSG00000104177_7 (sequence is synthesized)
ggcagatattaaagaagacaaagatggcaagagcagaggaatgggcactgtcacttttgagcaagcaattgaagcagttcaagcaatttctatgttcaatgggcagtttttatttgatag

SEQ ID NO: 140674 - DNA, 120 bp, Artificial Sequence
  ENSG00000104177_8 (sequence is synthesized)
acctatgcatgtgaaaatggatgacaagtctgttcctcatgaagagtaccgttcacatgatggtaaaacaccacaattaccacgtggtcttggaggcattgggatgggacttggtccggg

SEQ ID NO: 140675 - DNA, 120 bp, Artificial Sequence
  ENSG00000104177_9 (sequence is synthesized)
tggacagcctattagtgccagccagttgaacataggtggagtaatgggaaatttaggtccaggtggtatgggaatggatggtccaggttttggaggaatgaatagaattggaggaggaat

SEQ ID NO: 140676 - DNA, 120 bp, Artificial Sequence
  ENSG00000104177_10 (sequence is synthesized)
agggtttggtggtctggaagcaatgaatagcatgggaggatttggaggagttggccgaatgggagagctgtaccgtggtgcgatgactagtagcatggagcgagattttggacgtggtga

SEQ ID NO: 140677 - DNA, 120 bp, Artificial Sequence
  ENSG00000104177_11 (sequence is synthesized)
tattggaataaatcgaggctttggagattcctttggtagacttggcagtgcaatgattggagggtttgcaggaagaataggatcttctaacatgggtccagtaggatctggaataagtgg

SEQ ID NO: 140678 - DNA, 120 bp, Artificial Sequence
  ENSG00000104177_12 (sequence is synthesized)
tggaatgggtagcatgaacagtgtgactggaggaatggggatgggactggaccggatgagttccagctttgatagaatgggaccaggtataggagctatactggaaaggagcatcgatat

SEQ ID NO: 140679 - DNA, 120 bp, Artificial Sequence
  ENSG00000104177_13 (sequence is synthesized)
ggatcgaggatttttatcgggtccaatgggaagcggaatgagagagagaataggctccaaaggcaaccagatatttgtcagaaatctaccttttgacttgacttggcagaaactaaaaga

SEQ ID NO: 140680 - DNA, 120 bp, Artificial Sequence
  ENSG00000104177_14 (sequence is synthesized)
gaaattcagtcagtgtggtcatgtaatgtttgcagaaataaaaatggagaatggaaagtcaaaaggctgtggaacagtcagatttgactccccagaatcagctgaaaaagcctgcagaat

SEQ ID NO: 140681 - DNA, 120 bp, Artificial Sequence
  ENSG00000104177_15 (sequence is synthesized)
aatgaatggcataaaaatcagtggcagagaaattgatgttcgcttggatcgtaatgcataatttcaagccatggttggaacattcctacatctgttttgctgaatctcctagtaaaagtc

SEQ ID NO: 140682 - DNA, 120 bp, Artificial Sequence
  ENSG00000104177_16 (sequence is synthesized)
atttttttaaagtaatattgtatgcttacaaaagctgtaaaaatgaacttttaaaactcccaccagcttttaacagtataatgttaaaaatatactgtaatttttgttaatctcaagttt

SEQ ID NO: 140683 - DNA, 120 bp, Artificial Sequence
  ENSG00000104177_17 (sequence is synthesized)
gggtttttaaagacagcaagtctggtcattcagtttaaatgaatggttatactgtttttaatgaaataagccattttcttgttgttttcagtactacatagttggatttgtttgttctag

SEQ ID NO: 140684 - DNA, 120 bp, Artificial Sequence
  ENSG00000104177_18 (sequence is synthesized)
tttctccagtttttgtcaacttattgtatggtaaaacatagattttttccccccaaacttctgttttataatatgtaatttttcatgaaaagaaagggctcagaaaaattaggatgtgat

SEQ ID NO: 140685 - DNA, 120 bp, Artificial Sequence
  ENSG00000104177_19 (sequence is synthesized)
tttggttggttttaaattactgtaagttttagattctaaggttcaagatttttaaaatttgatttaaatgaagaaatggatttttctctctgcccctccctgccattcatattttctgca

SEQ ID NO: 140686 - DNA, 120 bp, Artificial Sequence
  ENSG00000104177_20 (sequence is synthesized)
taacactattaataatatcaacctccacagccccttattttattatttccaataattccaagttcatatagaactgataatgtagcaagccccaagtatgataataggcagactattccc

SEQ ID NO: 140687 - DNA, 120 bp, Artificial Sequence
  ENSG00000104177_21 (sequence is synthesized)
aactttctgtctagtttccagccattgaagtgaactgctaaaaaaagaaaaataattgaaatgttgagagagatggttatgtaagttagtcctctgctgtttacttctgcaggagctgat

SEQ ID NO: 140688 - DNA, 120 bp, Artificial Sequence
  ENSG00000104177_22 (sequence is synthesized)
ccatttataaatgcagttttaataaaccatggaataccaaggcacaacatatcaaacacattggatcccacgatgttagacatagccatatctcctttccctacaaaagaaaagcatact

SEQ ID NO: 140689 - DNA, 120 bp, Artificial Sequence
  ENSG00000104177_23 (sequence is synthesized)
gttaaaatgtgcttaccaatactgtgttttattaataatcttcataagaaaagaaacactggatacttttttgttgttgattcgttttgaaaaattgttgttagagcaaaagtcttactg

SEQ ID NO: 140690 - DNA, 80 bp, Artificial Sequence
  ENSG00000104177_24 (sequence is synthesized)
ttcgttttgaaaaattgttgttagagcaaaagtcttactgaatttgtatttttaaatttttcttgggttagtatttaaag

SEQ ID NO: 140691 - DNA, 120 bp, Artificial Sequence
  ENSG00000104177_25 (sequence is synthesized)
atttaacatggttaatggttaattactatttaacacacatttcaaatgaatattatttgggggattagattgagtgaaattaacctgctattaaatagtaaacttttcctctggagtcac

SEQ ID NO: 140692 - DNA, 86 bp, Artificial Sequence
  ENSG00000104177_26 (sequence is synthesized)
taacctgctattaaatagtaaacttttcctctggagtcacttttttcccccttcaaagtatgttactgaggaagtaagacacagtc

SEQ ID NO: 140693 - DNA, 83 bp, Artificial Sequence
  ENSG00000104177_27 (sequence is synthesized)
cctgggattacaggcgcgagccaccacacccggctggaagtaaacatttttaaagctacttttactcattctagccttgtaga

SEQ ID NO: 140694 - DNA, 120 bp, Artificial Sequence
  ENSG00000104177_28 (sequence is synthesized)
acatttttaaagctacttttactcattctagccttgtagaatgaccattgcagcttgagggacctagttcttaccttttcttgcaaccaacacacttgcaattgtgtctggtatgcttgt

SEQ ID NO: 140695 - DNA, 120 bp, Artificial Sequence
  ENSG00000104177_29 (sequence is synthesized)
tcctgctgctaataaagtaaggcccattactgtatcgggaatttctagtgtttcccctgtaataaacagatatttcaagttacaaatcttaaagattcactaaccatcctttgcagttat

SEQ ID NO: 140696 - DNA, 120 bp, Artificial Sequence
  ENSG00000104177_30 (sequence is synthesized)
tttggatatttccttcgtgaacaaaaataaaataggcacatttagaattcagagccaatatgtgcttgcttattagttttttagctagcaacatatttgaatcaggctggtaattcgggt

SEQ ID NO: 140697 - DNA, 120 bp, Artificial Sequence
  ENSG00000104177_31 (sequence is synthesized)
aacccaggtagcacagatttttaatgacatatctaaagatacgtaacagctaaaattctgccagtgagaaattttcctgtttgatattcttacaaaagatgtttatgtccaccattatct

SEQ ID NO: 140698 - DNA, 120 bp, Artificial Sequence
  ENSG00000104177_32 (sequence is synthesized)
catcagggctgtgctgaatatttgataatgagactgatcattccgctttttctttcttaaaaatattagtcagagttaagcaaattaattatagctatctttaagctataaatgtgttaa

SEQ ID NO: 140699 - DNA, 120 bp, Artificial Sequence
  ENSG00000104177_33 (sequence is synthesized)
catgtatatataccatttattatgttctactttagtgatataccttaatttagtgggctttggcagggcgggggagggggaacgttcattaatctctgaggaaaacaaaacctgttttct

SEQ ID NO: 140700 - DNA, 120 bp, Artificial Sequence
  ENSG00000104177_34 (sequence is synthesized)
acttgagtctaacatatggtcccaatttattaatacttctgttaaatttgatgtcaggtcaacatttttcagaaatgtatttattctcagaaacagaaccagagagaagttaaacaaaag

SEQ ID NO: 140701 - DNA, 120 bp, Artificial Sequence
  ENSG00000104177_35 (sequence is synthesized)
gttatgtaactgttcctttaatgttgtaattgaaaacttggtttagcgtcttttttttctttctctttttttttcttaaaatgccaactaaaataattagaaagtagcttatttattgca

SEQ ID NO: 140702 - DNA, 120 bp, Artificial Sequence
  ENSG00000104177_36 (sequence is synthesized)
tgcttatacattgatattggaattggaattggttgttaatttctgttactggctttgctagaattcatatgtgcataaataacactaatatttatcatcttgggggctgttctgtgatct

SEQ ID NO: 140703 - DNA, 120 bp, Artificial Sequence
  ENSG00000104177_37 (sequence is synthesized)
attacatgatttttgctctctttttatttttctagtatcaaatgtgttctggctgagtgaatttggatagatataatatgcaagctaattggactttttcatttttctcattaaaaaaag

SEQ ID NO: 140704 - DNA, 120 bp, Artificial Sequence
  ENSG00000104177_38 (sequence is synthesized)
gaagaagtagtccactttttgctagcatactattctgagacttacattaatttgggaaaagtcaagggtcaacaaatttttgtgtctgtgaggggccagatagtaattatttaggctttg

SEQ ID NO: 140705 - DNA, 120 bp, Artificial Sequence
  ENSG00000104177_39 (sequence is synthesized)
caggctgtgtgatttctgttgcagttattcagctttgccaatgtagtgtgaaaacaatcatagataatatgtaaaaccttactaataaaaacaagctgggttatgttggcacacaggcag

SEQ ID NO: 140706 - DNA, 120 bp, Artificial Sequence
  ENSG00000104177_40 (sequence is synthesized)
tagtttgttcacctctgctgtaagttaatttgggttaacctttgtaggagaaattacagattatttttgtctttgttcatagtttttttgtttagggactgtagtggattatggccaagc

SEQ ID NO: 140707 - DNA, 120 bp, Artificial Sequence
  ENSG00000104177_41 (sequence is synthesized)
tatgcccttttcactcatttcataatatgtttgtattgccgtgttgaaaagccaaataaaatacaatccagttaagcagtgagcacccattgttttcccaaaaatagagctccttgcttt

SEQ ID NO: 140708 - DNA, 120 bp, Artificial Sequence
  ENSG00000104177_42 (sequence is synthesized)
ttttttgttcttttttttttttattatggaatggaattcaatataaagagtttattgtggaccccatggaatgtgattaaattattagcataataaaaagacatcctatgaatttgattt

SEQ ID NO: 140709 - DNA, 120 bp, Artificial Sequence
  ENSG00000104177_43 (sequence is synthesized)
tttgatttcatttataagatctcttgaattgtaccccaggctaaataacagtggaaaatacagtttatatataatatgcaactcacaaactccagtgatcttgttatagtaatacttaat

SEQ ID NO: 140710 - DNA, 120 bp, Artificial Sequence
  ENSG00000104177_44 (sequence is synthesized)
cattttgtaaatggtactaatcttcaatcttgctgaaaagaaatttgctgtgtagctagactactttgagtgaacatatgcaatttgttcttatatgaatattttcaagttgtgctattg

SEQ ID NO: 140711 - DNA, 120 bp, Artificial Sequence
  ENSG00000104177_45 (sequence is synthesized)
tacttaaaatacataccagttattgtgaccatccaaaccaggatatatgtaaatgcggatatccatattgcagacatgaaaaaggttatcacaaagtagtttttccaaaacttttttcta

SEQ ID NO: 140712 - DNA, 120 bp, Artificial Sequence
  ENSG00000104177_46 (sequence is synthesized)
caatctggtgtggttagaaaaagtaatgtaataataggaagggataatacccaaaaaattctttttaagtctgcttcaggcatgttgaaaacacttggtggatctgttgtggaaaaagta

SEQ ID NO: 140713 - DNA, 120 bp, Artificial Sequence
  ENSG00000104177_47 (sequence is synthesized)
aacacttttgagttttctcaaatggctaattaagttagaaatgcctatttagaaagttatattgaaataaattagctgtatcagtttttaaaaggctgtttaaaacatttgagtacctca

SEQ ID NO: 140714 - DNA, 120 bp, Artificial Sequence
  ENSG00000104177_48 (sequence is synthesized)
ttactgatattgctggtgaaaagaaactaattgaaactttagggcagacaatgtaagatgtgatactccgcatttctttatttggggccttaaatctataaaaatgtcttgggccattcg

SEQ ID NO: 140715 - DNA, 120 bp, Artificial Sequence
  ENSG00000104177_49 (sequence is synthesized)
ttaaatatattgtagatagtgtttatgaagtgtcaattggacatctcctgtggattgtcttcagtaactttttgcttaagggattaacctggtttctaacctagctactccagttgtctc

SEQ ID NO: 140716 - DNA, 120 bp, Artificial Sequence
  ENSG00000104177_50 (sequence is synthesized)
cacttcataatattgatgatgcctctgcctgccctatgtaccagataatgtatacttaaagaatataaaataatcatagcataatttttttattaagtcgcatatcctaattcttagtgg

SEQ ID NO: 140717 - DNA, 120 bp, Artificial Sequence
  ENSG00000104177_51 (sequence is synthesized)
aagtggtttttttgtcctatttcattactattttatttattaaattcagactttaccacagttcatagaaataaccttaaagtaggaggtagtatatcatctaaagtacaatttatgaaa

SEQ ID NO: 140718 - DNA, 120 bp, Artificial Sequence
  ENSG00000104177_52 (sequence is synthesized)
tctttattcaatttaatttagtagaaggataatgataatatattggataaaaattcgaattcaaaaatgttcaaaatttgtatggcatttacaaaataatgtaacaattggatgaaatca

SEQ ID NO: 140719 - DNA, 120 bp, Artificial Sequence
  ENSG00000104177_53 (sequence is synthesized)
tggatgaaatcatgttaaaactaatgttagtacaacaactcataaaaagtttgccaagcttcaaccaatgtgccattaagtaatattagatataattttaacataatcaaagaatttgga

SEQ ID NO: 140720 - DNA, 120 bp, Artificial Sequence
  ENSG00000104177_54 (sequence is synthesized)
ttggttcttttgcgtttcttattataaacttaatttggagaggcatacctcttatacctgaaagagtagaagctaaaatttttgtaaaaagggggaaaagtcatgttttaaaattttaag

SEQ ID NO: 140721 - DNA, 120 bp, Artificial Sequence
  ENSG00000104177_55 (sequence is synthesized)
tagtagattagaataaaaccctcctaaaggcttaattaaatttagaatctgttttggacaaccactttataaaaaggtaacccatgaacttataattttgaccatagctgaattttctga

SEQ ID NO: 140722 - DNA, 120 bp, Artificial Sequence
  ENSG00000104177_56 (sequence is synthesized)
cttcctactgaacctatttacctaaaagttttgctattgctttaaacaatggtaaacctcagctgtttttcttctttcttccaaaccagcccctttttctgagttcccagttttaataag

SEQ ID NO: 140723 - DNA, 120 bp, Artificial Sequence
  ENSG00000104177_57 (sequence is synthesized)
tgctgttcccattttctcagtcaagattaaaacataggaggtgtctttgttcctttttctggccccatatagtcttggtgatgcttccttcatatagtctcacatctgttctcatttatt

SEQ ID NO: 140724 - DNA, 120 bp, Artificial Sequence
  ENSG00000104177_58 (sequence is synthesized)
cccaccactttcacttggtctaggcacctagtaaacacatcagctgttgtaatagcctctcttacagacctctttgtctcttcatattttagttcggtgaacatcattttgggtaacatt

SEQ ID NO: 140725 - DNA, 120 bp, Artificial Sequence
  ENSG00000104177_59 (sequence is synthesized)
actaagataacagttctaataatttctctcctcagaaaccttccaagattcttaaaatagcatttaagattcttcttatcctattcctttctacctttcctctccttccttcctatgcac

SEQ ID NO: 140726 - DNA, 120 bp, Artificial Sequence
  ENSG00000104177_60 (sequence is synthesized)
atactgtgctctatgtgttttatctctgcatcatttatggaatgaagacctcagtagctgctacttattggtcataacatatgtcattagttaaagtctttcctgtccagcaaggcccaa

SEQ ID NO: 140727 - DNA, 120 bp, Artificial Sequence
  ENSG00000104177_61 (sequence is synthesized)
tttaaatgctcccttctctgtgaaaatctcctatctgtcctcaccacattttggcaatctgtcccatttgtgaaccacagtcacactttatttttctctttttatggtacttaacgttca

SEQ ID NO: 140728 - DNA, 120 bp, Artificial Sequence
  ENSG00000104177_62 (sequence is synthesized)
tactttagctattttgtatttcctgtgatattggaagttccttaaaggtagggacttggtctttatcatttctgagtcttcacagtcttttttacataaaaagcacacaatacttgctga

SEQ ID NO: 140729 - DNA, 120 bp, Artificial Sequence
  ENSG00000104177_63 (sequence is synthesized)
attgaaatgaaattttaaagtttttcctttgcgaatagacttaataatgggcaagatttagtgattaccttcagaaacctgactaaggccatgtaaacttatagagagctgagagtagcc

SEQ ID NO: 140730 - DNA, 120 bp, Artificial Sequence
  ENSG00000104177_64 (sequence is synthesized)
agaatcttcataaaatattccactatcagttcttgattgccgacgaatgaatggttgaccttcatcttcccagcccatcagtggctgttgttcacttctctccatagctttggcaagaca

SEQ ID NO: 140731 - DNA, 120 bp, Artificial Sequence
  ENSG00000104177_65 (sequence is synthesized)
ggcgcagcaaggactgcatttctttataatatattggttaattttaatgtcaaaacacagcaccaaaacatacaatccatatatcaaaagcagtaaagccccttcatacctacaaaagag

SEQ ID NO: 140732 - DNA, 120 bp, Artificial Sequence
  ENSG00000104177_66 (sequence is synthesized)
aaatttgtgtttttaaattaaaagtgaaagtcattttagagttgatagcttttgggcagtatctattgaatgattttctaacaaaagtagccatagaacaatcaaacatttctagatatt

SEQ ID NO: 140733 - DNA, 120 bp, Artificial Sequence
  ENSG00000104177_67 (sequence is synthesized)
ttttgttttgtagatttgtccagacttgattacagcattattatgtttattgataaaagctggacacttctgtgttgtttttttttttttaaaaacaagatcaacaaactcgtttttact

SEQ ID NO: 140734 - DNA, 120 bp, Artificial Sequence
  ENSG00000104177_68 (sequence is synthesized)
tgtagattccttccaaatgataggtataaaaatgcaaggaaaatgataattggagattttcaaaataaatgtaaaattaataaatagtggtgaacattttctgcctcagctcattggcat

SEQ ID NO: 140735 - DNA, 120 bp, Artificial Sequence
  ENSG00000104177_69 (sequence is synthesized)
aatacattccccaacatacataataattataaaataatatagtaactgttaagttatttcaactgtccaagttttctggtataggaactttgtgtaaaatattactcagatatgggaggc

SEQ ID NO: 140736 - DNA, 120 bp, Artificial Sequence
  ENSG00000104177_70 (sequence is synthesized)
ttaggctgggatttttcagtttgtcatacagagcatttttaatgatttgaatgtagctgaatttggcttacagtcacaagaaaacaagatgttctaaaatataaaattatacccttggaa

SEQ ID NO: 140737 - DNA, 120 bp, Artificial Sequence
  ENSG00000104177_71 (sequence is synthesized)
ccaagaactgtttccctgtactctggcagttagctaatgccatcacatttgaaccttgcatttaccttttatagccagtgaatctctgtctgctgtatcttaaagaacagttctgatttc

SEQ ID NO: 140738 - DNA, 120 bp, Artificial Sequence
  ENSG00000104177_72 (sequence is synthesized)
cctaatggaggaagaattagcttggatactctcacagtcactatcccttacagacaactgctgagttctagaaggatttctattctaccaacacagtgtcttagggagacggactagagg

SEQ ID NO: 140739 - DNA, 120 bp, Artificial Sequence
  ENSG00000104177_73 (sequence is synthesized)
acaggatgattagtttagaaattatgcttctggctaggttttaagtttcttgatagcaggtattacgccgtgctgcaaggttatggttctccagatggacaccattacattttttttttt

SEQ ID NO: 140740 - DNA, 120 bp, Artificial Sequence
  ENSG00000104177_74 (sequence is synthesized)
tcatatttttctggtgtcctctggagttatgcaatgtatataacctgtgtagctgtgttttacatttcattatcccttatgatatctagcatagtgagaaggacctagtaggtgcctgct

SEQ ID NO: 140741 - DNA, 120 bp, Artificial Sequence
  ENSG00000104177_75 (sequence is synthesized)
gcttactagttgaaaaagttagtatctgtccactcagtcaccacctttttcattttcttggaccagctaggcacagagagattgtaaggaaagcaaacaatttttaatatgaaaagctaa

SEQ ID NO: 140742 - DNA, 120 bp, Artificial Sequence
  ENSG00000104177_76 (sequence is synthesized)
gcattgttatttcttagaggaaggctatagtttctcctgaatgagcatcagaagtttggaggaatttaaaaagacttcttttacttcctctaccatccttctccagtcttttgtggccat

SEQ ID NO: 140743 - DNA, 120 bp, Artificial Sequence
  ENSG00000104177_77 (sequence is synthesized)
gaacacttctaaccaaggcaaggtgagcagtaacccagcagaagaaaaagtcaactgttgtggctttaatggacaacaggagttgggaaactttctgaataggcagccagtggggagaag

SEQ ID NO: 140744 - DNA, 120 bp, Artificial Sequence
  ENSG00000104177_78 (sequence is synthesized)
gaaaagtggtggtctccagtgactagtgagagaaaaaaggagactgtgaagtgattaagaagaaattgcaaactagtgagaagaactcaatcagcaattgtgatgaggttaactcacaga

SEQ ID NO: 140745 - DNA, 120 bp, Artificial Sequence
  ENSG00000104177_79 (sequence is synthesized)
cctgttggaatatggtatagaagtggcagattaagtgactgaaataacatttctgaaaaaaaattactgaaccatcagaaattcataaaatctctaatttttacataagaattattttca

SEQ ID NO: 140746 - DNA, 120 bp, Artificial Sequence
  ENSG00000104177_80 (sequence is synthesized)
agcttaccagtaaacttggttgtcatatattataccaagaactgctgctgcactaattgtgtacgctgcacagtctctgaataggggccaacatgatagtgttgagacctgtaatatggt

SEQ ID NO: 140747 - DNA, 120 bp, Artificial Sequence
  ENSG00000104177_81 (sequence is synthesized)
tggtaagttattatttccattacattgtaacttcttcaagtacaatccttagtataatactaaaattgtttatatatttgtagttaaatattgttatcttttgcatattgcttagagaaa

SEQ ID NO: 140748 - DNA, 120 bp, Artificial Sequence
  ENSG00000104177_82 (sequence is synthesized)
tgtaaaattgtgttctaacttacacagactttcataaatctgaccaagagctatttgtggattaacattaaattgaatacatgttgtttttctactgattaataaatttgattgcacata

SEQ ID NO: 140749 - DNA, 120 bp, Artificial Sequence
  ENSG00000104177_83 (sequence is synthesized)
gagtaatgggaaatttaggtccaggtggtgagtattctaacttcctcttttctttttaaatgatacatatgctagctaataaagcctccattgatgtggtctgtaataatgtttaaagga

SEQ ID NO: 140750 - DNA, 120 bp, Artificial Sequence
  ENSG00000104177_84 (sequence is synthesized)
acatgaaagagataggcagaagtcaggagggtttctttggggccagctatgttgtagctagccttttagcattttggattttgaaatgtcttgaaggcagaaggagaatatatcatctat

SEQ ID NO: 140751 - DNA, 120 bp, Artificial Sequence
  ENSG00000104177_85 (sequence is synthesized)
gaacagtatttatggagtagctgaaatgctaccatatcataggcagctaaaatctgtttatccatttgggaaggtggcttttcaggtagttatttggctgctcacctggaagaactcaca

SEQ ID NO: 140752 - DNA, 120 bp, Artificial Sequence
  ENSG00000104177_86 (sequence is synthesized)
gttcatttttagagattggtttttaaactttggtgttaggacccttttatattttaaaatttgttgagaacccgaaaatgctttgtttatgtagttataattaccagtatttactgtatt

SEQ ID NO: 140753 - DNA, 120 bp, Artificial Sequence
  ENSG00000104177_87 (sequence is synthesized)
ttagaaattaaaaaaattacatattaaaaaatgataaactcattacatgttaacatacataaaagttttaagaaaataaactatttttcaatgcaaaaaagaaattggtgaggagagtgg

SEQ ID NO: 140754 - DNA, 120 bp, Artificial Sequence
  ENSG00000104177_88 (sequence is synthesized)
tgaggagagtggcattgttttacctttccacacatctttttaatgtttggcttaatattgctgttatatctgtttctgcactttagttttttgtgatattgtacatcatatagtgtttgg

SEQ ID NO: 140755 - DNA, 120 bp, Artificial Sequence
  ENSG00000104177_89 (sequence is synthesized)
aaaattacaccttaaactcaagagaatgagggtaaaacatcaaataatgtcttagtagtatttggtgacttaaatagttttgacctattgaaccctcaagagtccctggaccatactttg

SEQ ID NO: 140756 - DNA, 120 bp, Artificial Sequence
  ENSG00000104177_90 (sequence is synthesized)
tgaattactgttttaattgatggactaataaatgctatcagattcctattttgtcaagatgctgtagtcacactttaaattatgaggctcattatcataatcattctgatccaaacaagt

SEQ ID NO: 140757 - DNA, 120 bp, Artificial Sequence
  ENSG00000104177_91 (sequence is synthesized)
tttctcccttacccttagactctcacacctacctaccctctcctaaatacatactatttatattttgaaaatttttactgctcttttaactgcgatgtttagagagtccttacattctgg

SEQ ID NO: 140758 - DNA, 120 bp, Artificial Sequence
  ENSG00000104177_92 (sequence is synthesized)
cctgatctctaaatctgctgtaatgctatttctgtgtctatgctggaaaaaaaaaatcattgatagtagtatttctgtgtttattgtggaaaaaaaagtgaatgattacctagttcaaga

SEQ ID NO: 140759 - DNA, 120 bp, Artificial Sequence
  ENSG00000104177_93 (sequence is synthesized)
tattctctaactgaatgttgtgggtgttactagtgaattttgctttcttgtctgataaatgttcaaagaaacccttttgaagattcatgattagacagctgctatggcatagcactttaa

SEQ ID NO: 140760 - DNA, 120 bp, Artificial Sequence
  ENSG00000104177_94 (sequence is synthesized)
accatgcctcctgtaccctaccgcttctctagtgtttcattgtggttataccagtggtatctattttgctataatgcattatatcatcttttagtcataaaaataaaatatacttaaagt

SEQ ID NO: 140761 - DNA, 120 bp, Artificial Sequence
  ENSG00000104177_95 (sequence is synthesized)
aagttccgtgtaatattgagattaaaagttatgttttgctatgagtattgaattaccatgagaataaaaactgggaaacagaggtgaagatgctgaggtgaaagataagctaggaaagga

SEQ ID NO: 140762 - DNA, 120 bp, Artificial Sequence
  ENSG00000104177_96 (sequence is synthesized)
gtatttacttgtaggagagtatgatgagagcggcttgagtgctagagttgtaataatttgcatttatctctgtgtatctttattttagcaattattatgcttgatattattggaaaataa

SEQ ID NO: 140763 - DNA, 120 bp, Artificial Sequence
  ENSG00000104177_97 (sequence is synthesized)
aaataaggatcagaacaactgtcctgttattggaagcagtgattggtagaggatttatatatttatatgatatatttagtgatcagaatacaattttatacagttatatatgcataatgt

SEQ ID NO: 140764 - DNA, 120 bp, Artificial Sequence
  ENSG00000104177_98 (sequence is synthesized)
atgtatttatacagtggctagaatttctcagctaactaaatgtatatgtaagcaaattctgttctttggaaagttgttatctgtatgaaaataattttatgtttttatattatttaatta

SEQ ID NO: 140765 - DNA, 120 bp, Artificial Sequence
  ENSG00000104177_99 (sequence is synthesized)
aacaaattaatttcccccttctttctcaaaaatgtttatctccttttcctcctttctcctcttctccttttccttatgtttttgaaacaaaaacacaaaattcccaaatccccccgtcct

SEQ ID NO: 140766 - DNA, 120 bp, Artificial Sequence
  ENSG00000104177_100 (sequence is synthesized)
aaaaaaagtcatggtttattgttggctcatgttctaaaggctgctagcagaaattgagcctggtacatacttaaaggaaggtgatgtgttaagaagtagctgcacaaggtagggtggatg

SEQ ID NO: 140767 - DNA, 120 bp, Artificial Sequence
  ENSG00000104177_101 (sequence is synthesized)
gggagcggctggtcggtggagcagtcagaacatttattgattaagttcgctgttttatttgggcacggttgatggtgccccaaaacaattaaaacatcaaagatcactgatcacagatca

SEQ ID NO: 140768 - DNA, 120 bp, Artificial Sequence
  ENSG00000104177_102 (sequence is synthesized)
tgatggtaaaacaccacaattaccactttctcacaatttgggattagtttggagttatgaagatagtttggcgctattgattaggaagactgagaagataagtgttacgtgccatttttt

SEQ ID NO: 140769 - DNA, 120 bp, Artificial Sequence
  ENSG00000104177_103 (sequence is synthesized)
ttttctctttggtaacttttcctgactaatcagcaatacattctaaaatgtttggtaaatttatacacttgaaggaaaaaaagtcctctgtaatttcaccatctgtgggtaacctcatta

SEQ ID NO: 140770 - DNA, 120 bp, Artificial Sequence
  ENSG00000104177_104 (sequence is synthesized)
ttgaattattttttgtttaacattagagtataagcattttttcatgttgaagattcttttcaaatatttttattggtagtataatagtctatcatatagatgttccataactatttcact

SEQ ID NO: 140771 - DNA, 120 bp, Artificial Sequence
  ENSG00000104177_105 (sequence is synthesized)
gttctgtattttaggtgttttaacttttcttttgagtaaccacagagtaacacatgcctttttgttcacaaatctttgtaatgtttttgagtacttccttcagacagatattctgaagta

SEQ ID NO: 140772 - DNA, 120 bp, Artificial Sequence
  ENSG00000104177_106 (sequence is synthesized)
gatttacagttctcatgggttagtattatcaaattgttttccaaaatgactataacagtgtaatatacttattgtattatgtgtctcagtgcctctgtgtctcagtgcctcctttgaaaa

SEQ ID NO: 140773 - DNA, 120 bp, Artificial Sequence
  ENSG00000104177_107 (sequence is synthesized)
gtggggagaataatattgtctacgtcatggggttgacatgagtattacatgaattaatatatgtaaagcacttagaatcattttggcataatgtaaacactcaataaatattagctattg

SEQ ID NO: 140774 - DNA, 120 bp, Artificial Sequence
  ENSG00000104177_108 (sequence is synthesized)
ggttttatagtcgggcttcagtgtgctactttctagacaaaaacaagaaccagtgcttttatatgaaaatttgcagaaattttacagatactactacaggtatatagctttttaaaaaat

SEQ ID NO: 140775 - DNA, 120 bp, Artificial Sequence
  ENSG00000104177_109 (sequence is synthesized)
ctccaaaggcaaccagatatttgtcagaaatgtaagcaaataaatattaaggataattcaaattcttttttttcttgtatatatgttactaatacctcttttcattctagctaccttttg

SEQ ID NO: 140776 - DNA, 120 bp, Artificial Sequence
  ENSG00000104205_0 (sequence is synthesized)
aggttgcatgatggaatttgaacattacttcaagaggttttgtattttggattagttaattgggtttgtcctctgctgactgtttcttcggatgcattttttggtgtgctcttgagggat

SEQ ID NO: 140777 - DNA, 120 bp, Artificial Sequence
  ENSG00000104205_1 (sequence is synthesized)
taaatgcaaagagatcacaccatggactacaaggaaagctgcccaagtgtaagcattcccagctccgatgaacacagagagaaaaagaagaggtttactgtttataaagttctggtttca

SEQ ID NO: 140778 - DNA, 120 bp, Artificial Sequence
  ENSG00000104205_2 (sequence is synthesized)
gtgggaagaagtgaatggtttgtcttcaggagatatgcagagtttgataaactttataacactttaaaaaaacagtttcctgctatggccctgaagattcctgccaagagaatatttggt

SEQ ID NO: 140779 - DNA, 120 bp, Artificial Sequence
  ENSG00000104205_3 (sequence is synthesized)
gataattttgatccagattttattaaacaaagacgagcaggactaaacgaattcattcagaacctagttaggtatccagaactttataaccatccagatgtcagagcattccttcaaatg

SEQ ID NO: 140780 - DNA, 120 bp, Artificial Sequence
  ENSG00000104205_4 (sequence is synthesized)
gacagtccaaaacaccagtcagatccatctgaagatgaggatgaaagaagttctcagaagctacactctacctcacagaacatcaacctgggaccgtctggaaatcctcatgccaaacca

SEQ ID NO: 140781 - DNA, 120 bp, Artificial Sequence
  ENSG00000104205_5 (sequence is synthesized)
actgactttgatttcttaaaagttattggaaaaggcagctttggcaaggttcttcttgcaaaacggaaactggatggaaaattttatgctgtcaaagtgttacagaaaaaaatagttctc

SEQ ID NO: 140782 - DNA, 120 bp, Artificial Sequence
  ENSG00000104205_6 (sequence is synthesized)
aacagaaaagagcaaaaacatattatggctgaacgtaatgtgctcttgaaaaatgtgaaacatccgtttttggttggattgcattattccttccaaacaactgaaaagctttattttgtt

SEQ ID NO: 140783 - DNA, 120 bp, Artificial Sequence
  ENSG00000104205_7 (sequence is synthesized)
ctggattttgttaatggaggggagctttttttccacttacaaagagaacggtcctttcctgagcacagagctaggttttacgctgctgaaattgctagtgcattgggttacttacattcc

SEQ ID NO: 140784 - DNA, 120 bp, Artificial Sequence
  ENSG00000104205_8 (sequence is synthesized)
atcaaaatagtatacagagacttgaaaccagaaaatattcttttggattcagtaggacatgttgtcttaacagattttgggctttgtaaagaaggaattgctatttctgacaccactacc

SEQ ID NO: 140785 - DNA, 120 bp, Artificial Sequence
  ENSG00000104205_9 (sequence is synthesized)
acattttgtgggacaccagagtatcttgcacctgaagtaattagaaaacagccctatgacaatactgtagattggtggtgccttggggctgttctgtatgaaatgctgtatggattgcct

SEQ ID NO: 140786 - DNA, 120 bp, Artificial Sequence
  ENSG00000104205_10 (sequence is synthesized)
cctttttattgccgagatgttgctgaaatgtatgacaatatccttcacaaacccctaagtttgaggccaggagtgagtcttacagcctggtccattctggaagaactcctagaaaaagac

SEQ ID NO: 140787 - DNA, 120 bp, Artificial Sequence
  ENSG00000104205_11 (sequence is synthesized)
aggcaaaatcgacttggtgccaaggaagactttcttgaaattcagaatcatcctttttttgaatcactcagctgggctgaccttgtacaaaagaagattccaccaccatttaatcctaat

SEQ ID NO: 140788 - DNA, 120 bp, Artificial Sequence
  ENSG00000104205_12 (sequence is synthesized)
gtggctggaccagatgatatcagaaactttgacacagcatttacagaagaaacagttccatattctgtgtgtgtatcttctgactattctatagtgaatgccagtgtattggaggcagat

SEQ ID NO: 140789 - DNA, 120 bp, Artificial Sequence
  ENSG00000104205_13 (sequence is synthesized)
gatgcattcgttggtttctcttatgcacctccttcagaagacttatttttgtgagcagtttgccattcagaaaccattgagcaaaataagtctatagatgggactgaaacttctatttgt

SEQ ID NO: 140790 - DNA, 120 bp, Artificial Sequence
  ENSG00000104205_14 (sequence is synthesized)
gtgaatatattcaaatatgtataactagtgcctcatttttatatgtaatgatgaaaactatgaaaaaatgtattttcttctatgtgcaagaaaaatagggcatttcaaagagctgttttg

SEQ ID NO: 140791 - DNA, 120 bp, Artificial Sequence
  ENSG00000104205_15 (sequence is synthesized)
attaaaatttatattcttgtttaataagcttatttttaaacaatttaaaagctattattcttagcattaacctatttttaaagaaaccttttttgctattgactgttttttccctctaag

SEQ ID NO: 140792 - DNA, 120 bp, Artificial Sequence
  ENSG00000104205_16 (sequence is synthesized)
ttttgttatcacaccaaaactatgcaattggtacatggttgtttaagaagaaaccgtatttttccatgataaatcactgtttgaaatatttggttcatggtatgatcgaaatgtaaaagc

SEQ ID NO: 140793 - DNA, 120 bp, Artificial Sequence
  ENSG00000104205_17 (sequence is synthesized)
gttcatggtatgatcgaaatgtaaaagcataattaacacattggctgctagttaacaattggaataactttattctgcagatcatttaagaagtaacaggccgggcgcggtggctcacgc

SEQ ID NO: 140794 - DNA, 120 bp, Artificial Sequence
  ENSG00000104205_18 (sequence is synthesized)
aaaagaaaaagtaacaaaaggaaattatttgtttttgaaataccagttcaactttgtggattatttttcctctgaaggaaaagaaaaggcttaatggttaggatttttaagtattcccaa

SEQ ID NO: 140795 - DNA, 120 bp, Artificial Sequence
  ENSG00000104205_19 (sequence is synthesized)
agatctgaagggtaataaaatgtactggattttttaaggtggtaccaaaaatgaatgtctgtcatatatttatattacaaatacattatatttatgttctattcatcttttgaatgttta

SEQ ID NO: 140796 - DNA, 120 bp, Artificial Sequence
  ENSG00000104205_20 (sequence is synthesized)
gtatgctattaagtcattctgaatctttgtatttgcttttgcaaataggtatttcaaagctcttttcctaactggttaagtaaaataaaaaattgagctttctagaatatttgcctaatt

SEQ ID NO: 140797 - DNA, 120 bp, Artificial Sequence
  ENSG00000104205_21 (sequence is synthesized)
atttgcctaattgggaattaaaaagtaaaataataggccaggcatggtggctcatgcctataagcaccctgggaggccgaggcaggcagattatttgagctcaggagtttgagaccatcc

SEQ ID NO: 140798 - DNA, 120 bp, Artificial Sequence
  ENSG00000104205_22 (sequence is synthesized)
aaattagccagacatggtggcacatgcctttagtcccagctactctggaggctgaagttggaggatggcttgagcccacgagatggaagttgcagtgaactgaaattgtgccactgcact

SEQ ID NO: 140799 - DNA, 120 bp, Artificial Sequence
  ENSG00000104205_23 (sequence is synthesized)
cagtgaactgaaattgtgccactgcacttttcagcctgggtgccacagcgagaccctagttaagagaaaaaaaaagtaaaaacaaattgtgggtcaaagtaaatgtatacagttttatta

SEQ ID NO: 140800 - DNA, 120 bp, Artificial Sequence
  ENSG00000104205_24 (sequence is synthesized)
caatgtaacaaaagttgaaaatcaggcagatgtgtattcagtatccaattcaatatatcttagaaaaagcacaggaaacagaccttaaaattgtaacctaccaactaacttacatgctta

SEQ ID NO: 140801 - DNA, 88 bp, Artificial Sequence
  ENSG00000104205_25 (sequence is synthesized)
gaccttaaaattgtaacctaccaactaacttacatgcttataaaagtaaaggagaataactggccgggcacggtggctcatgcctata

SEQ ID NO: 140802 - DNA, 120 bp, Artificial Sequence
  ENSG00000104205_26 (sequence is synthesized)
tgtagtgacacctcatttctatttattttaaaaaaaagagagagtaactacagaagaactttaaaaaataaaaaataagcttaccttggattcttggcttagagtagaggttttttttaa

SEQ ID NO: 140803 - DNA, 120 bp, Artificial Sequence
  ENSG00000104205_27 (sequence is synthesized)
gttatggaggaaacatttttgtaaaagtttaatgacccactttagatgctccaagaacaagcatcccttccatgtatgtcttgagaaagaaatcacagaagcatttctcaccaatactct

SEQ ID NO: 140804 - DNA, 120 bp, Artificial Sequence
  ENSG00000104205_28 (sequence is synthesized)
ttggcttaaaatgttcagcagaattgggcagtgggggtgacttttcttatattaataatatttacatccaatacactgaatcttcctttagaggtaagactttaatatctatactgtaaa

SEQ ID NO: 140805 - DNA, 120 bp, Artificial Sequence
  ENSG00000104205_29 (sequence is synthesized)
tatttggtttatttggcactactgtaagttttgtttttcacaaagctcttattatgaagcaaaataaaaattctagtttcttgtatgattttttgtactcattcattcctgttaagctgc

SEQ ID NO: 140806 - DNA, 120 bp, Artificial Sequence
  ENSG00000104205_30 (sequence is synthesized)
ctgccaaaaattaaagtgcaatattgtatatttttaagaacaaatttaaaatagaattttgatgtttctcagatcacaagaaatacaaatctatatagtataataaaatcagcaaaaaga

SEQ ID NO: 140807 - DNA, 120 bp, Artificial Sequence
  ENSG00000104205_31 (sequence is synthesized)
ggggcctgcaggtttggcccccgcagggagcgcagctggcgccgctgggagctggtggcgcggcgcaggtcccggccgagtgtggcgcagcagtggcggcgcttcccattcgccatgcgc

SEQ ID NO: 140808 - DNA, 120 bp, Artificial Sequence
  ENSG00000104205_32 (sequence is synthesized)
agttatggcagtgggagtcgaagcgagggtctgaagttcacgactactagaaggggaggggagtggaaaggctctcagtgaaaaaggtattagaattatttctgaattatcagtctctca

SEQ ID NO: 140809 - DNA, 120 bp, Artificial Sequence
  ENSG00000104205_33 (sequence is synthesized)
tttgtgctttggagaagcagaaaaggcaaaaggggtctttggccatcttctgctggagcttccagggaggatgtgtctccaagagaccagatgtaccgagtttgaaatcccagaagccca

SEQ ID NO: 140810 - DNA, 120 bp, Artificial Sequence
  ENSG00000104205_34 (sequence is synthesized)
agaggaaaagaatcacagggaggaaaagactgtccaaaggcttctggagtcttctgttctctaaccttggaaggttttgaacaatatttctcagaggatagcctttcacttattcatctg

SEQ ID NO: 140811 - DNA, 120 bp, Artificial Sequence
  ENSG00000104205_35 (sequence is synthesized)
ggcgccgctgggagctggtggcgcggcgcaggtcccggccgagtgtggcgcagcagtggcggcgcttcccattcgccatgcgccgggggtgggtgcccgaagggatttagacatagtgga

SEQ ID NO: 140812 - DNA, 120 bp, Artificial Sequence
  ENSG00000104205_36 (sequence is synthesized)
agagagagtcttgctacatgcgggaactagaattacatcactgcgttttttggctttgtttcttcaatgggttgtagtgtatgaatattattacaaaataaaatgatttaaaaatatcca

SEQ ID NO: 140813 - DNA, 120 bp, Artificial Sequence
  ENSG00000104205_37 (sequence is synthesized)
ggtgcgtctagctgcacttcctccttaggcggaggggaggattcagggaagcttggttaaaaacagttatggcagtgggagtcgaagcgagggtctgaagttcacgactactagaagggg

SEQ ID NO: 140814 - DNA, 120 bp, Artificial Sequence
  ENSG00000104205_38 (sequence is synthesized)
aggggagtggaaaggctctcagtgaaaaaggtatggaacccttcagatcaaagcttaccaataaattcagtatgtagaacagattaacgtagttgaaatgaggaagaatgagagttatct

SEQ ID NO: 140815 - DNA, 120 bp, Artificial Sequence
  ENSG00000104205_39 (sequence is synthesized)
agaatgagagttatctcaaccagccagcaccccctatccccattcccacactttccctcatgggaggctgtcgggagcacttcgaaaaccactggaaaggccgggcacggtggctcatgc

SEQ ID NO: 140816 - DNA, 70 bp, Artificial Sequence
  ENSG00000104205_40 (sequence is synthesized)
gaaaattagccaggtattagaattatttctgaattatcagtctctcatttgtgctttggagaagcagaaa

SEQ ID NO: 140817 - DNA, 120 bp, Artificial Sequence
  ENSG00000104205_41 (sequence is synthesized)
acatctctggtcgttctcatctgtaaaatgagaataaatgaaacccactaaccagaattggtatgaaaatgaaatgtggcagaaaaaaaatgaaagtgaatagtatcaccactgacacac

SEQ ID NO: 140818 - DNA, 120 bp, Artificial Sequence
  ENSG00000104205_42 (sequence is synthesized)
aagcactaaaggcccttcctgtctccatcaggtatggatttggggcaacatttggccaggtcttgtttatctttctgttcatctattctgtctaattcagtgctttgtttacaacgaatg

SEQ ID NO: 140819 - DNA, 120 bp, Artificial Sequence
  ENSG00000104205_43 (sequence is synthesized)
tcttacaaatgctgactgaacactagcatacctgcatgaacaacaggtaaataaattttagatgtgttttaatgtttattaatctatcctgtcagagaagaactgccagttatagataaa

SEQ ID NO: 140820 - DNA, 120 bp, Artificial Sequence
  ENSG00000104205_44 (sequence is synthesized)
tatgatgccaggtcagggctgaagagttgggcaggttgttatctgcatggggtcactaggttccagtggagaggtgggggctaagctctcacccgctctgcagccacctggcacccggtt

SEQ ID NO: 140821 - DNA, 120 bp, Artificial Sequence
  ENSG00000104205_45 (sequence is synthesized)
tcagtttcctgaaagggagccttctacttgctgacgactgcctcatctcttctgaggtttcctctgataaacaattttctctgctttttttttttaattatgaaatacttaaaatgtaaa

SEQ ID NO: 140822 - DNA, 120 bp, Artificial Sequence
  ENSG00000104205_46 (sequence is synthesized)
ggagataatgtgacacacatttacccataattgagattgccataattgctataactttttcaaaattttgacttaatttcagacttttagaaaaattggccaggtgtgatggctcatgcc

SEQ ID NO: 140823 - DNA, 88 bp, Artificial Sequence
  ENSG00000104205_47 (sequence is synthesized)
attacttgaacccagcagttcgagactttgaaaacaaactaaaaaaaaaattagccaaccatggtggtgcatgcctgtagtcctagct

SEQ ID NO: 140824 - DNA, 83 bp, Artificial Sequence
  ENSG00000104205_48 (sequence is synthesized)
agccaacagctgaggcaagaggatagcctgagcccaggggagttggggctgaagcctgggtgacagaggaagaccttgccttc

SEQ ID NO: 140825 - DNA, 70 bp, Artificial Sequence
  ENSG00000104205_49 (sequence is synthesized)
ggccaagatgggtggatcacttgaggtggcacgcctggggcacgcgcctgtggtcccagctactcaggag

SEQ ID NO: 140826 - DNA, 65 bp, Artificial Sequence
  ENSG00000104205_50 (sequence is synthesized)
ctactaaaaatgcaaaaattagccaggtggcacgcgcctgtggtcccagctactcaggagactga

SEQ ID NO: 140827 - DNA, 84 bp, Artificial Sequence
  ENSG00000104205_51 (sequence is synthesized)
aagcgcagtgcgttcggctccgcgcccgccgcgccgggagcagcaccgcggggccagcctaagaagccggccaggtgtggtggt

SEQ ID NO: 140828 - DNA, 120 bp, Artificial Sequence
  ENSG00000104205_52 (sequence is synthesized)
gttcaagaccagcttgggcaacatggtgagacctcatctcttaaaaaaaaaaaaattctgagaagcaataaggaagagttctggataatagcagaggaaaattctttaaagatgactcct

SEQ ID NO: 140829 - DNA, 120 bp, Artificial Sequence
  ENSG00000104205_53 (sequence is synthesized)
actcctgatattaggtgataagcccattcccccaacattgaacctcaggtatctgactttagcctattgccctttctttggcctacactagctctctttgaatgattaaggctactcttc

SEQ ID NO: 140830 - DNA, 120 bp, Artificial Sequence
  ENSG00000104205_54 (sequence is synthesized)
tttgaatgattaaggctactcttcaggctgtattatatgcatcttgtgtggattagcagatgcatggctcctacccggacccagacccctttatcttttttttttttttttttgacagag

SEQ ID NO: 140831 - DNA, 120 bp, Artificial Sequence
  ENSG00000104205_55 (sequence is synthesized)
gaaagctgcttgtccaggagatagcaaaatgctgacaaatgagaaacagacctgcatagccatcacaccctctagaaccaaggggtagtgttttaagatagaggactgggtgagtatcag

SEQ ID NO: 140832 - DNA, 120 bp, Artificial Sequence
  ENSG00000104205_56 (sequence is synthesized)
gtttacaacgaatgtcttacaaatgctgactgaacactagcatacctgcatgaacaacagtgtctgtcttcaccaagaaggacgactttgattggctgtaattggccactgttgctaatg

SEQ ID NO: 140833 - DNA, 120 bp, Artificial Sequence
  ENSG00000104205_57 (sequence is synthesized)
aaaaatcagaataagaagtacctgacatactttctacatctgtagttgcggaagacattttaataggtcttctcatagcctttctttgctaaggacattgtgactctccagagagcaaca

SEQ ID NO: 140834 - DNA, 120 bp, Artificial Sequence
  ENSG00000104205_58 (sequence is synthesized)
gtgatggctctagaatgtctaggaaaaagaagggcttaatgtcaggagtctgcttggggcacacaacactagaagatgtccttctgcacattgtttcatatcgagtatggaacccttcag

SEQ ID NO: 140835 - DNA, 120 bp, Artificial Sequence
  ENSG00000104205_59 (sequence is synthesized)
tgtattcatgtttttgtgacttataaaataggatgataaggagagaacatgaactctggagtcagacctgttacctcggacatgatactcttagctttgtcatttagtatttgagtaatt

SEQ ID NO: 140836 - DNA, 120 bp, Artificial Sequence
  ENSG00000104205_60 (sequence is synthesized)
ggttgaagagagagaatgattgttaggtggggacatggatgaaggggagtcacatttctgtgccttgttaacatttttagctcacattcaaagtaacaaagaacaattcctacctttgta

SEQ ID NO: 140837 - DNA, 120 bp, Artificial Sequence
  ENSG00000104205_61 (sequence is synthesized)
tttaccgaatatatttgtttaatgctatgtgtgaatgatcctaacattctctctccccccacccccacaaccaatttgacagctttttttccacttacaaagagaacggtcctttcctga

SEQ ID NO: 140838 - DNA, 120 bp, Artificial Sequence
  ENSG00000104205_62 (sequence is synthesized)
agctggcgccgctgggagctggtggcgcggcgcaggtcccggccgagtgtggcgcagcagtggcggcgcttcccattcgccatgcgccgggggtgggtgcccgaaggtttataaagttct

SEQ ID NO: 140839 - DNA, 120 bp, Artificial Sequence
  ENSG00000104205_63 (sequence is synthesized)
cgcccggcggccctgccgggaaggaggaagcgcagtgcgttcggctccgcgcccgccgcgccgggagcagcaccgcggggccagccggaagcagccccagcccacattgcagtctctgaa

SEQ ID NO: 140840 - DNA, 120 bp, Artificial Sequence
  ENSG00000104213_0 (sequence is synthesized)
acttctgccttgttatcagaggagcgaggatgtggcctgtgtgccgcctaatcatgcctagaactgtctgcacctgctgatcttttgcttctgcgaactggctgcacctgctgttctcct

SEQ ID NO: 140841 - DNA, 120 bp, Artificial Sequence
  ENSG00000104213_1 (sequence is synthesized)
gctcataccctagcccgtgcttaccctaattccctgttctcctgcctcaccaccagaggcccgggttgtctgcacagtctcattttccacgttattcctgtaatgaacccgtcctcccac

SEQ ID NO: 140842 - DNA, 120 bp, Artificial Sequence
  ENSG00000104213_2 (sequence is synthesized)
ccccaccagcagttacagggctgggtgcggagaccaactctggccagacacagaggagcagcaagaacccggggcaacggtcctaaaccgaatcctcccgcttcggcgtcccaggagccc

SEQ ID NO: 140843 - DNA, 120 bp, Artificial Sequence
  ENSG00000104213_3 (sequence is synthesized)
gcccctcgcccgccgcctcccctgcgtccccgccccgcgcagccgccgcgctcctgcgctccgaggtccgaggttcccgagatgaaggtctggctgctgcttggtcttctgctggtgcac

SEQ ID NO: 140844 - DNA, 120 bp, Artificial Sequence
  ENSG00000104213_4 (sequence is synthesized)
gaagcgctggaggatgttactggccaacaccttcccaagaacaagcgtccaaaagaaccaggagagaatagaatcaaacctaccaacaagaaggtgaagcccaaaattcctaaaatgaag

SEQ ID NO: 140845 - DNA, 120 bp, Artificial Sequence
  ENSG00000104213_5 (sequence is synthesized)
gacagggactcagccaattcagcaccaaagacgcagtctatcatgatgcaagtgctggataaaggtcgcttccagaaacccgccgctaccctgagtctgctggcggggcaaactgtagag

SEQ ID NO: 140846 - DNA, 120 bp, Artificial Sequence
  ENSG00000104213_6 (sequence is synthesized)
cttcgatgtaaagggagtagaattgggtggagctaccctgcgtatctggacacctttaaggattctcgcctcagcgtcaagcagaatgagcgctacggccagttgactctggtcaactcc

SEQ ID NO: 140847 - DNA, 120 bp, Artificial Sequence
  ENSG00000104213_7 (sequence is synthesized)
tacagagaaaggagaactctttgtaccttctcccagctacttcgatgttgtctacttgaacccggacagacaggctgtggttccttgtcgggtgaccgtgctgtcggccaaagtcacgct

SEQ ID NO: 140848 - DNA, 120 bp, Artificial Sequence
  ENSG00000104213_8 (sequence is synthesized)
ccacagggaattcccagccaaggagatcccagccaatggaacggacattgtttatgacatgaagcggggctttgtgtatctgcaacctcattccgagcaccagggtgtggtttactgcag

SEQ ID NO: 140849 - DNA, 120 bp, Artificial Sequence
  ENSG00000104213_9 (sequence is synthesized)
ggcggaggccgggggcagatctcagatctccgtcaagtaccagctgctctatgtggcggttcccagtggccctccctcaacaaccatcttggcttcttcaaacaaagtgaaaagtgggga

SEQ ID NO: 140850 - DNA, 120 bp, Artificial Sequence
  ENSG00000104213_10 (sequence is synthesized)
cgacatcagtgtgctctgcactgtcctgggggagcccgatgtggaggtggagttcacctggatcttcccagggcagaaggatgaaaggcctgtgacgatccaagacacttggaggttgat

SEQ ID NO: 140851 - DNA, 120 bp, Artificial Sequence
  ENSG00000104213_11 (sequence is synthesized)
ccacagaggactgggacacaccacgagaatctcccagagtgtcattacagtggaagactttgagacgattgatgcaggatattacatttgcactgctcagaatcttcaaggacagaccac

SEQ ID NO: 140852 - DNA, 120 bp, Artificial Sequence
  ENSG00000104213_12 (sequence is synthesized)
agtagctaccactgttgagttttcctgacttggaaaaggaaatgtaatgaacttatggaaagcccatttgtgtacacagtcagctttggggttccttttattagtgctttgccagaggct

SEQ ID NO: 140853 - DNA, 120 bp, Artificial Sequence
  ENSG00000104213_13 (sequence is synthesized)
gatgtcaagcaccacaccccaaccccagcgtctcgtgagtccgacccagacatccaaactaaaaggaagtcatccagtctattcacagaagtgttaacttttctaacagaaagcatgatt

SEQ ID NO: 140854 - DNA, 120 bp, Artificial Sequence
  ENSG00000104213_14 (sequence is synthesized)
ttgattgcttacctacatacgtgttcctagtttttatacatgtgtaaacaattttatataatcaatcatttctattaaatgagcacgtttttgtaaaaaataaaaagtgggataagtgtt

SEQ ID NO: 140855 - DNA, 120 bp, Artificial Sequence
  ENSG00000104213_15 (sequence is synthesized)
cctggatcttcccagggcagaagcagaaattgttacagccagccaaaatttatttgtcaaacatagatagctttgaatttagagaagaagagcttacctctcactctagctctgtgagcc

SEQ ID NO: 140856 - DNA, 120 bp, Artificial Sequence
  ENSG00000104213_16 (sequence is synthesized)
aactaagaggagatacgacctttactgtgctgtcacagggctgtaaaaatgaagaatttgaagaatgaagtaggtcagaggatgcaattcttgagtattccagcattatttatttgatca

SEQ ID NO: 140857 - DNA, 120 bp, Artificial Sequence
  ENSG00000104213_17 (sequence is synthesized)
gagtaaaatacacttcccatcactacaaactgagcacaactacagttgtctacacattcatatttttgacgtgccaacattttgcattctacatgaaacatttggtttaaacaaaatctt

SEQ ID NO: 140858 - DNA, 120 bp, Artificial Sequence
  ENSG00000104213_18 (sequence is synthesized)
aagaattctctattttgtttcccatcttccctcctgttctctcccatcctccaaagatgttttatattaactgctatgagatttatttgccggtcacgtaatacggaggacagcagggaa

SEQ ID NO: 140859 - DNA, 120 bp, Artificial Sequence
  ENSG00000104218_0 (sequence is synthesized)
gaggggcggagccccggcccggaggtctgtcatgctgttcccgctccaggtggccgctgtaacctcttcggtccgcgacgatcctctagagcactgtgtgtctccccggacgcgagcccg

SEQ ID NO: 140860 - DNA, 120 bp, Artificial Sequence
  ENSG00000104218_1 (sequence is synthesized)
ctcccctgaaatctgcaaaatggctgataatttggatgaatttattgaagagcaaaaagccagattggccgaagacaaagcagagttggaaagtgatccaccttacatggaaatgaaggg

SEQ ID NO: 140861 - DNA, 120 bp, Artificial Sequence
  ENSG00000104218_2 (sequence is synthesized)
aaagttgtcagcgaagctttctgaaaacagtaagatactgatctctatggctaaggaaaacataccaccaaatagtcaacagaccaggggttccttaggaattgattatggattaagttt

SEQ ID NO: 140862 - DNA, 120 bp, Artificial Sequence
  ENSG00000104218_3 (sequence is synthesized)
accacttggagaagactatgaacggaagaaacataaattaaaagaagaattgcggcaagattacagacgttatcttactcaggaaaggttgaaacttgaacgtaacaaagaatacaatca

SEQ ID NO: 140863 - DNA, 120 bp, Artificial Sequence
  ENSG00000104218_4 (sequence is synthesized)
gtttctcaggggtaaggaagaatccagtgaaaagttcaggcaggtggaaaagagtactgagcccaagagtcagagaaataaaaaacctattggtcaagttaagcctgatctaacttcaca

SEQ ID NO: 140864 - DNA, 120 bp, Artificial Sequence
  ENSG00000104218_5 (sequence is synthesized)
aatacagacatcttgtgaaaattcagagggtcctagaaaagatgtcttaactccttcagaggcatatgaagaacttctgaaccaaagacgactagaggaggacagataccgacaactaga

SEQ ID NO: 140865 - DNA, 120 bp, Artificial Sequence
  ENSG00000104218_6 (sequence is synthesized)
tgatgaaatcgaattaaggaatagaagaattattaaaaaagcaaatgaagaagtgggcatttccaacctaaaacatcaaaggtttgcaagcaaggctggcattccagatagaagatttca

SEQ ID NO: 140866 - DNA, 120 bp, Artificial Sequence
  ENSG00000104218_7 (sequence is synthesized)
cagatttaatgaggatcgtgtttttgatagacggtatcatagaccagaccaagatcctgaagtaagtgaagaaatggatgagaggtttagatatgaaagtgattttgatagaagactttc

SEQ ID NO: 140867 - DNA, 120 bp, Artificial Sequence
  ENSG00000104218_8 (sequence is synthesized)
gagagtgtatacaaatgacaggatgcacaggaacaaacgagggaatatgcctcctatggaacatgatggggatgttatagaacagtcaaacataagaatttcatctgctgaaaataaaag

SEQ ID NO: 140868 - DNA, 120 bp, Artificial Sequence
  ENSG00000104218_9 (sequence is synthesized)
tgctccagacaatgaaacatccaaatctgctaatcaagatacctgtagtccttttgcagggatgctctttggaggtgaagatcgagaacttattcagagaaggaaagagaaatacagact

SEQ ID NO: 140869 - DNA, 120 bp, Artificial Sequence
  ENSG00000104218_10 (sequence is synthesized)
agaactgttggaacaaatggctgagcaacagaggaacaagagacgagaaaaagatttagaactcagggttgcagcgtctggagcacaagaccctgagaaatcgcctgatagactaaagca

SEQ ID NO: 140870 - DNA, 120 bp, Artificial Sequence
  ENSG00000104218_11 (sequence is synthesized)
gtttagtgtggcaccaagacactttgaagagatgataccacctgaaagacccagaatagctttccagacacctctccctcctttatctgccccatctgtcccacccatcccatcagttca

SEQ ID NO: 140871 - DNA, 120 bp, Artificial Sequence
  ENSG00000104218_12 (sequence is synthesized)
tcctgttccttctcaaaatgaagatttgcgcagtggactcagcagcgcccttggtgaaatggtgtctcccaggattgcacctctgcctccacctcccctactaccacctttggctactaa

SEQ ID NO: 140872 - DNA, 120 bp, Artificial Sequence
  ENSG00000104218_13 (sequence is synthesized)
ctatcgaactccttatgatgatgcatactatttttatgggtccaggaatactttcgatcccagtcttgcttattatggttcaggaatgatgggcgtacagcctgcagcttatgttagtgc

SEQ ID NO: 140873 - DNA, 120 bp, Artificial Sequence
  ENSG00000104218_14 (sequence is synthesized)
tcctgtcacccaccaactagcacaacctgttgtgaatacggttggacagaatgaactgaagattacaagtgatcaagtgataaattcaggattgatttttgaagataaaccgaaaccttc

SEQ ID NO: 140874 - DNA, 120 bp, Artificial Sequence
  ENSG00000104218_15 (sequence is synthesized)
caaacagtcacttcagtcttaccaagaggctttgcagcagcagattcgggaaagagaagaaagaaggaagaaagaacgtgaagaaaaagaagaatatgaagctaaattagaagctgaaat

SEQ ID NO: 140875 - DNA, 120 bp, Artificial Sequence
  ENSG00000104218_16 (sequence is synthesized)
gagaacatataatccctggggaaaaggtggaggtggtgctcctctcagggatgcaaaaggaaatctgataactgatttgaataggatgcacagacaaaatatagatgcctaccataaccc

SEQ ID NO: 140876 - DNA, 120 bp, Artificial Sequence
  ENSG00000104218_17 (sequence is synthesized)
agatgcaagaacatatgaagataaaagggctgttgtatctctagacccaaatttagccacttcaaatgctgagaacctagaagatgctgcaaataaaagctcaggtcatatgcaaacaca

SEQ ID NO: 140877 - DNA, 120 bp, Artificial Sequence
  ENSG00000104218_18 (sequence is synthesized)
aacttcagattaaacagcaagaattatacaagaattttcttcgtttccagattgaggaaaagaaacaaagagaggaagcagagcgagagagactgagaattgcagaagaaaaagaagaaa

SEQ ID NO: 140878 - DNA, 120 bp, Artificial Sequence
  ENSG00000104218_19 (sequence is synthesized)
gacggcttgcagaacagagggcacgaattcagcaggagtatgaagaggaacaggaaaagaaaagagagaaagaggaggagcaaaggctaaaaaatgaagagcatattcggttagctgaag

SEQ ID NO: 140879 - DNA, 120 bp, Artificial Sequence
  ENSG00000104218_20 (sequence is synthesized)
aaagacaaaaagaagcagaaagaaagaagaaagaagaagaagaaaaatataacctgcaacttcagcactactgtgaaagagacaatttgattggggaagaaacaaagcacatgagacagc

SEQ ID NO: 140880 - DNA, 120 bp, Artificial Sequence
  ENSG00000104218_21 (sequence is synthesized)
cttctcctatagttcctgctcttcagaacaaaattgcaagcaaactccaaagacctccttcagttgacagcatcatacgttcctttattcatgaaagttccatgtccagggcacagtcac

SEQ ID NO: 140881 - DNA, 120 bp, Artificial Sequence
  ENSG00000104218_22 (sequence is synthesized)
ccccggtacctgccaggaaaaatcagctccgtgcagaagaggagaaaaaaaatgtaattatggaattatcagaaatgagaaaacagcttcgtagtgaagagaggcgtctacaagagcgat

SEQ ID NO: 140882 - DNA, 120 bp, Artificial Sequence
  ENSG00000104218_23 (sequence is synthesized)
tgctacacatggacagtgatgatgaaattcctatcaggaaaaaggaaaggaatcccatggatatatttgatatggctagacatcggttgcaagctcctgtcagaagacagtcccctaagg

SEQ ID NO: 140883 - DNA, 120 bp, Artificial Sequence
  ENSG00000104218_24 (sequence is synthesized)
gcttagacgctgccacttttcagaatgttcatgattttaatgagctgaaagatagagattcagaaacacgagttgatctgaaatttatgtacctggatcctccaagagatcatcacacct

SEQ ID NO: 140884 - DNA, 120 bp, Artificial Sequence
  ENSG00000104218_25 (sequence is synthesized)
tagagattcagcagcaagccctgctaagagagcagcagaagaggctgaacagaataaaaatgcaggaaggtgccaaagttgacttagatgccatcccaagtgctaaagtacgagagcaaa

SEQ ID NO: 140885 - DNA, 120 bp, Artificial Sequence
  ENSG00000104218_26 (sequence is synthesized)
gaatgcccagagatgacactagtgatttcttgaaaaactcattattggaatctgatagtgcttttattggggcttacggtgagacatatcctgccattgaagatgacgtcctccctccac

SEQ ID NO: 140886 - DNA, 120 bp, Artificial Sequence
  ENSG00000104218_27 (sequence is synthesized)
catcacagttgccctctgcacgggagcgcaggaggaacaaatggaaaggactagacattgatagcagtcgtcctaatgtagcaccagatggtctctctctaaaatctatatccagtgtaa

SEQ ID NO: 140887 - DNA, 120 bp, Artificial Sequence
  ENSG00000104218_28 (sequence is synthesized)
atgttgatgagcttagagtgagaaatgaggaacgaatgcgaagactgaatgaatttcacaataaacctattaatacagatgatgagagttcactggttgaccctgatgacatcatgaaac

SEQ ID NO: 140888 - DNA, 120 bp, Artificial Sequence
  ENSG00000104218_29 (sequence is synthesized)
acataggggatgacggatcaaactctgtagcaactgagccctggctccgccctggcacttcagaaacgctgaaacgtttcatggcagagcagctgaaccaggagcagcagcagattcctg

SEQ ID NO: 140889 - DNA, 120 bp, Artificial Sequence
  ENSG00000104218_30 (sequence is synthesized)
gaaaaccaggcactttcacttggcagggcctgtcgactgcacatggttaaaataaacctgtactggacccagtagtgccttttaaggtgaaaggaatggtaaatctgtacctttaatatg

SEQ ID NO: 140890 - DNA, 120 bp, Artificial Sequence
  ENSG00000104218_31 (sequence is synthesized)
tcctacttttggcccctacctgaaagttactttttttccatcatctgtatataaaattatttttatcatgatgtatattatgtacataaataaaaggccatgattattgatttatataat

SEQ ID NO: 140891 - DNA, 120 bp, Artificial Sequence
  ENSG00000104218_32 (sequence is synthesized)
agaattgtatagattatttttgcacagttttgtcataaattagggtggtaatgaactggattgaactactatatgtgcattatattgaattctgcttgtcattaagataaggtgaataag

SEQ ID NO: 140892 - DNA, 120 bp, Artificial Sequence
  ENSG00000104218_33 (sequence is synthesized)
tgtcttaaacgtcctgtaaaaccggactcccctttgttacatgcacattttccattgttacctcgatgcaaaagaattcatttagtaggtacatctattgtagctgtgattattccagtt

SEQ ID NO: 140893 - DNA, 120 bp, Artificial Sequence
  ENSG00000104218_34 (sequence is synthesized)
tctgtgtgatgcaatcaaatgtcctattaattaattattatttcatgtcatttgtagctactgatacagcagaaatgaagggaactgtaattacttgtatttttgtaagccatacgttaa

SEQ ID NO: 140894 - DNA, 120 bp, Artificial Sequence
  ENSG00000104218_35 (sequence is synthesized)
atgtttgttacatcatctttctgcttctatttttatgccaatgaaggcatttgtcttgttactaattacatgatgtaactacttcttgatataaataaatttttattttaattactaaaa

SEQ ID NO: 140895 - DNA, 120 bp, Artificial Sequence
  ENSG00000104218_36 (sequence is synthesized)
cagtcagaccgctaacaggagaaatggaatattaagtatagtatattgttccccctcaccttttctcatttcttcctctgtctcaggcactcattcatatattcatttgcagatttattc

SEQ ID NO: 140896 - DNA, 120 bp, Artificial Sequence
  ENSG00000104218_37 (sequence is synthesized)
aatgaacattttcttgggttaaagttatgtgccagcattataaaattgaatagcgcatgggccttgccttcatagattttatagtttagttttatatatgatgttccattctgaacatga

SEQ ID NO: 140897 - DNA, 120 bp, Artificial Sequence
  ENSG00000104218_38 (sequence is synthesized)
gaatcaaaactttctctccttaggcttaaattctgtatctttaaaaaaaggtttagattccttcaaaaggaaacagttcctttctaggatgatttaaaattccaagcatatggaatgctt

SEQ ID NO: 140898 - DNA, 120 bp, Artificial Sequence
  ENSG00000104218_39 (sequence is synthesized)
tagtttcttttggaagagagttagaagcatgtgtaagaggtgtccctaaggaatcctctgttataccctctatcatcaaggagttaaataggccagaaatgtttatcaagagaattccag

SEQ ID NO: 140899 - DNA, 120 bp, Artificial Sequence
  ENSG00000104218_40 (sequence is synthesized)
gaaaaacaaaaatatgctgagtagtatgatccatacctaaggataactaaaatctgttgataactttaaaccagagacatgaatacctggttcccatgctgctgttcttccctgcctcat

SEQ ID NO: 140900 - DNA, 120 bp, Artificial Sequence
  ENSG00000104218_41 (sequence is synthesized)
tcatcgggcgtgtggactatctatctcttagggccttctttccttcaaatcttaggctctagagtactcaacgctgcagactccaggtagcattcaagatgaaacttaattattgaggaa

SEQ ID NO: 140901 - DNA, 120 bp, Artificial Sequence
  ENSG00000104218_42 (sequence is synthesized)
ttacagacgttatcttactcagggcattacacaagggaaaagaaagaaaaattttctatctacgagtgaaacagatccatctactttgggagtttctcttcctattggtgagaggttatc

SEQ ID NO: 140902 - DNA, 120 bp, Artificial Sequence
  ENSG00000104218_43 (sequence is synthesized)
gggttgcagcgtctggagcacaagaccctgagaaatcggtaagggtttctggcatcttttaatgtttaatctttcatcaaatgatcctcaaatgtggtggcaggtggggatagagaatat

SEQ ID NO: 140903 - DNA, 120 bp, Artificial Sequence
  ENSG00000104218_44 (sequence is synthesized)
tgggagaaaaagagagtagaccaatttgaacagtaataaaattaactaaattcagttctcataaagtgtaaattctcttaactgttatttccttgaggtaatttttcctttttcatttgt

SEQ ID NO: 140904 - DNA, 120 bp, Artificial Sequence
  ENSG00000104218_45 (sequence is synthesized)
gtgtcatttttttaaagtttaaattagttctctctgctttattcacatgtactattccatgggaaagttatctgggttaaatttacaattgatgttaatatttttcttgaatacatcttg

SEQ ID NO: 140905 - DNA, 120 bp, Artificial Sequence
  ENSG00000104218_46 (sequence is synthesized)
atcacttacttttcttacattggagtgatttctgagaaaactgacgactttatttttaaagcgttttagtaattgttacttattgtaacattagagagataataatcttatttttacttt

SEQ ID NO: 140906 - DNA, 120 bp, Artificial Sequence
  ENSG00000104218_47 (sequence is synthesized)
aattttgcaattctcatcattaagtggaatgaattactcacatcattgcagttaagtaaggaggaggtaatttattgtttttaccacaatttattttttctgtagttggttatgtaatat

SEQ ID NO: 140907 - DNA, 120 bp, Artificial Sequence
  ENSG00000104218_48 (sequence is synthesized)
ttcatctttgaatgatgattaagacctttaatttcattaaaaagctcattcttaaaaaggatgcagcaacttaaaattatttacctgtaggcaacttttgatttgcttttacttatgctg

SEQ ID NO: 140908 - DNA, 120 bp, Artificial Sequence
  ENSG00000104218_49 (sequence is synthesized)
agaatatatcctgtgggttatctatttggaaaagtttcatattgcaccagcatcactcgcagtatgcttctgggttaacctgataaatcattcctgataagataaccatggtaggaaaaa

SEQ ID NO: 140909 - DNA, 120 bp, Artificial Sequence
  ENSG00000104218_50 (sequence is synthesized)
aagaagataaatttcaaagctaaatatattttcctttatgaatcaaaagtttccttttaagaggtgagctttttaatgtaatatgttggcatgttaaattttgtatttatggttacacta

SEQ ID NO: 140910 - DNA, 120 bp, Artificial Sequence
  ENSG00000104218_51 (sequence is synthesized)
gtgtgtgacagaccttatttatctttgaattgaagctcctatacagtgtcaagttgatttatgagaataaataagtaattggaggcaacagttacgcctttacttttgggtttacttttg

SEQ ID NO: 140911 - DNA, 120 bp, Artificial Sequence
  ENSG00000104218_52 (sequence is synthesized)
atgtgcaaatcttagaaaagggcacataagtgatgttctaaagtagagattagcaaagtgtggcctgtgaccaaatttgtttgctacctgttttcataaaaaaaagttttattgcagcac

SEQ ID NO: 140912 - DNA, 120 bp, Artificial Sequence
  ENSG00000104218_53 (sequence is synthesized)
agccttgttcattccttgacatactgtttgtggctgctttagcaccatagctgagtctgctcattatgaagagactatgtagtcttgcaaatcttaatctatttactgtctagcccttta

SEQ ID NO: 140913 - DNA, 90 bp, Artificial Sequence
  ENSG00000104218_54 (sequence is synthesized)
atgatgggcgtacagcctgcagcttatgttagtgctcctgtcacccaccaactagcacaacctgttgtggtctccctgtgttgcccagtg

SEQ ID NO: 140914 - DNA, 120 bp, Artificial Sequence
  ENSG00000104218_55 (sequence is synthesized)
cacttttcagaatgttcatgattttaatgagctgaaagatagagagcatacagtgttaaagtctggaatggatgagatcgcatagactagtacgaagaatggaacttggcatttaatgga

SEQ ID NO: 140915 - DNA, 120 bp, Artificial Sequence
  ENSG00000104218_56 (sequence is synthesized)
ggatggacagacaaagatgagctcatgaaaaatactgaggagaagccagagagactggaggagaagcaggagaatgtaggatcctgaaacctgaggggaaggagtatcaaggagacagga

SEQ ID NO: 140916 - DNA, 80 bp, Artificial Sequence
  ENSG00000104219_0 (sequence is synthesized)
gccgggctgaggagccgggagtccgccgcgccggctcggggctgcgggatggggagttagcgccacggcggcggcagtgg

SEQ ID NO: 140917 - DNA, 80 bp, Artificial Sequence
  ENSG00000104219_1 (sequence is synthesized)
ggagttagcgccacggcggcggcagtggccgcagcgcaccccgccgccgcccaggagcccgtccagccaggggtgccggg

SEQ ID NO: 140918 - DNA, 120 bp, Artificial Sequence
  ENSG00000104219_2 (sequence is synthesized)
agatggcgccctcgggcccgggcagcagcgccaggcggcggtgccggcgggtgctgtactggatcccggtggtgttcatcaccctcctgctcggctggtcctactacgcctacgccatcc

SEQ ID NO: 140919 - DNA, 120 bp, Artificial Sequence
  ENSG00000104219_3 (sequence is synthesized)
agctgtgcatagtgtccatggaaaacactggcgaacaagttgtgtgcctgatggcctatcatctactttttgcaatgtttgtctggtcatactggaaaactatctttacattaccaatga

SEQ ID NO: 140920 - DNA, 120 bp, Artificial Sequence
  ENSG00000104219_4 (sequence is synthesized)
atccttcaaaagaattccatctctcttatgcagagaaagatttgttggagagagagccaagaggagaagcccatcaggaagttcttaggcgagcagccaaggatcttcccatctatacca

SEQ ID NO: 140921 - DNA, 120 bp, Artificial Sequence
  ENSG00000104219_5 (sequence is synthesized)
ggaccatgtctggagccatccgatactgtgacagatgccaacttataaaaccagatcgctgccatcactgctccgtctgtgataaatgtattttgaagatggatcatcattgtccatggg

SEQ ID NO: 140922 - DNA, 120 bp, Artificial Sequence
  ENSG00000104219_6 (sequence is synthesized)
tgaacaattgtgttggattttcaaattataagttctttctccttttcttggcttattctctgctctactgcctttttattgcggcaacagatttacagtattttatcaaattttggacaa

SEQ ID NO: 140923 - DNA, 120 bp, Artificial Sequence
  ENSG00000104219_7 (sequence is synthesized)
atggcctacctgatactcaagccaagttccatattatgtttttattctttgctgcagctatgttttctgtcagcttgtcttctctgtttggctatcattgttggctagtcagcaaaaata

SEQ ID NO: 140924 - DNA, 120 bp, Artificial Sequence
  ENSG00000104219_8 (sequence is synthesized)
aatctacattagaggcattcagaagtccagtatttcgacatggaacagataagaatggattcagcttgggtttcagtaaaaacatgcgacaagtttttggtgatgagaagaagtactggt

SEQ ID NO: 140925 - DNA, 120 bp, Artificial Sequence
  ENSG00000104219_9 (sequence is synthesized)
tgctacccattttttcaagtctaggtgatggctgctcctttccaacttgccttgttaaccaggatcctgaacaagcatctactcctgcagggctgaattccacagctaaaaatctcgaaa

SEQ ID NO: 140926 - DNA, 120 bp, Artificial Sequence
  ENSG00000104219_10 (sequence is synthesized)
accatcagtttcctgcaaagccattgagagagtcccagagccaccttcttactgattctcagtcttggacggagagcagcataaacccaggaaaatgcaaagctggtatgagcaatcctg

SEQ ID NO: 140927 - DNA, 120 bp, Artificial Sequence
  ENSG00000104219_11 (sequence is synthesized)
cattaaccatggaaaatgagacttaactcttcaagcaagataaattcatactttataaaagtatcaatgctgtagatggatggaagaggcttcccacaggaaggtgccaccagtcagttg

SEQ ID NO: 140928 - DNA, 120 bp, Artificial Sequence
  ENSG00000104219_12 (sequence is synthesized)
tgcctatgtccctttggctggaaatgcagaatatgaattgattagttctctccaagccattgcttaaaatataacatgttttggatccaatacacacattgttacaactaacacaaattc

SEQ ID NO: 140929 - DNA, 120 bp, Artificial Sequence
  ENSG00000104219_13 (sequence is synthesized)
ctattaaatattaaaagtagttctggtttattaatcaacggggaaaacatcttctccaaaaaacttggaataaatccaaggaccagtttttacccaaatatatgggtagcacagtttatc

SEQ ID NO: 140930 - DNA, 120 bp, Artificial Sequence
  ENSG00000104219_14 (sequence is synthesized)
acatagaaactccattaatcatctgattttccgaatctgaaaattgagactattaagatattaggatttcagagatttcaagtcacattataatgataagcattattcataaaacttgtt

SEQ ID NO: 140931 - DNA, 120 bp, Artificial Sequence
  ENSG00000104219_15 (sequence is synthesized)
acctttaagaaggtggaagtggcaaaccatacttcttttttttcctctgatgtgaatccagcctcagactgagtgaactgtaataattatgaattcattacagagtccaggtggcctgca

SEQ ID NO: 140932 - DNA, 120 bp, Artificial Sequence
  ENSG00000104219_16 (sequence is synthesized)
gttgaagatcatcaaccatttttgcctcacttaattccagccttttgttttctgctggaaaataagtgtggacattgaagcttgagctctcaaagcagttggctggaatacttttgtcag

SEQ ID NO: 140933 - DNA, 120 bp, Artificial Sequence
  ENSG00000104219_17 (sequence is synthesized)
aatacggtacatttctattacatcagaaatatattttcatctcttcttgttaaattgggaggaaatttatgatagcaattatgaagattgttttatgacattcttttgtcagtttggctt

SEQ ID NO: 140934 - DNA, 120 bp, Artificial Sequence
  ENSG00000104219_18 (sequence is synthesized)
tctaaaaatctctttttagattatttctcctgttgaacatagtaaaactattgaatttctcttaagaattcctaataggtcaatagatttaccctccagtgatatctatattatttcttt

SEQ ID NO: 140935 - DNA, 120 bp, Artificial Sequence
  ENSG00000104219_19 (sequence is synthesized)
ctcgtctcatcaaaatgatgacaggtaaactatatttttccttaaacacctattacagttaaattatgcaaatcattaaataaaaatcatacaacttttggaaagttagttcaacatgaa

SEQ ID NO: 140936 - DNA, 120 bp, Artificial Sequence
  ENSG00000104219_20 (sequence is synthesized)
ctaaaatggcatgctatttggaaatttagtttgagataaactaaagtgtgttgatgccagaatgttcagcttcagtaaatataataagctcttgtgccttgtatgcactatttaaaaaaa

SEQ ID NO: 140937 - DNA, 120 bp, Artificial Sequence
  ENSG00000104219_21 (sequence is synthesized)
gttttttttatttgagtccagtataattcatgtaaatgttaacaattagaataatactctgtatgcttttttgatactgattttgagaatttaaagcagattaccttttaaaactggacc

SEQ ID NO: 140938 - DNA, 120 bp, Artificial Sequence
  ENSG00000104219_22 (sequence is synthesized)
aactaagtaattggtatttaatcaaagagaaaatggtaataaacttttcaaaatctttgttaaaccaaacattcaacacaaaataaactagaaggccagaggataatggaataaaagatc

SEQ ID NO: 140939 - DNA, 120 bp, Artificial Sequence
  ENSG00000104219_23 (sequence is synthesized)
attgcaattacttatccttcctaaaaatatagttttatattaattgtgcttatggaagaaacaatgtcagccaagtccattttatagtttgagtgcaattctttgaacaatagaaatatc

SEQ ID NO: 140940 - DNA, 120 bp, Artificial Sequence
  ENSG00000104219_24 (sequence is synthesized)
acaatctgcttcaagaaatctcagaaaatatgataacattttaactttcattttagagcacgttttggtcatttttaaaaatacctaaagtgccagaccggaacctatagctactgctag

SEQ ID NO: 140941 - DNA, 120 bp, Artificial Sequence
  ENSG00000104219_25 (sequence is synthesized)
atacctaaagtgccagaccggaacctatagctactgctagaagtcttaaaaaaaccaacagcagcacaggatgtattaagaattatatgaagtcaggtttgttttttttttttttttttt

SEQ ID NO: 140942 - DNA, 120 bp, Artificial Sequence
  ENSG00000104219_26 (sequence is synthesized)
tcgattaagtattccctcttgtcaaactggaagctaggggaaaaagagggatttttatcctttactcttctagagtactgttaatgcccctttcccacagtcttttatataattaaatat

SEQ ID NO: 140943 - DNA, 120 bp, Artificial Sequence
  ENSG00000104219_27 (sequence is synthesized)
atgtcaatacacattagaatcagatttgaaaaagttaaaacaatttcattgttgtaattgttccctttctgttttcatatagtgaataacctttaaagggttgttttgttttgttttgaa

SEQ ID NO: 140944 - DNA, 120 bp, Artificial Sequence
  ENSG00000104219_28 (sequence is synthesized)
ttataggagttataatctttggagatgattgcatatctcattagatatgcaatataaatttatctgagtgaacaaagtgctaaataaatagatctacattttgtacatatttatataaaa

SEQ ID NO: 140945 - DNA, 120 bp, Artificial Sequence
  ENSG00000104219_29 (sequence is synthesized)
tttacctttaagtatttactttaaaaaatttaatggcttaactcgaacttgaagacacatacttcaactgtccttattgtccattaaactgataattttgatttttcttgcttttataga

SEQ ID NO: 140946 - DNA, 120 bp, Artificial Sequence
  ENSG00000104219_30 (sequence is synthesized)
ttttactatataggaatcaagatttaagaaattttgcattaaaaatagtgtaccaatgcttcatatacgttagttatttgctattatgtagggaagaggattgttatttcaaagatatat

SEQ ID NO: 140947 - DNA, 120 bp, Artificial Sequence
  ENSG00000104219_31 (sequence is synthesized)
taaagaacagttgcatctgaatataatcatgatgcattcaatgaagttcatatccatgaattcactcctaatataccctaataaagtggttgatcacctacattatctgtctataagaaa

SEQ ID NO: 140948 - DNA, 120 bp, Artificial Sequence
  ENSG00000104219_32 (sequence is synthesized)
ctgcctttgcactgacaatgtaaattattttaagcataaattttcctaatagtttattagagctactaatggcaaaattcatgtcttcaatgtggccataacataggtcttgggaggggt

SEQ ID NO: 140949 - DNA, 120 bp, Artificial Sequence
  ENSG00000104219_33 (sequence is synthesized)
ggtgagaaaataaggtatttactttgtagtagttaagtgattctgaggacaattagaaacagactataaaactcaactacactgtaatcaatagacaactattggaaatatggcatatgt

SEQ ID NO: 140950 - DNA, 120 bp, Artificial Sequence
  ENSG00000104219_34 (sequence is synthesized)
tgacaaacacttaactagggaaatcaaagatataaatcatgtttataaaaaattaggcacgcaatcatgtgattcatgcttcaagaaaatatatgaaaaaagtgttactccattatgtta

SEQ ID NO: 140951 - DNA, 120 bp, Artificial Sequence
  ENSG00000104219_35 (sequence is synthesized)
taaactagcagattttccctattttgaaatgcatgtaaacgggctcggctgattctgaaattgtactgtatcatttggtatttacttatatggtcaaatacttgtttgtaaaagtgatgg

SEQ ID NO: 140952 - DNA, 120 bp, Artificial Sequence
  ENSG00000104219_36 (sequence is synthesized)
ttctgatacctttgatcaaacatagatacaaacctcagaaaatggtaaatgcaaagcagtttacgttgtaaatcatgatggtgtcctccagcacaaccatcccacccacacacctagact

SEQ ID NO: 140953 - DNA, 120 bp, Artificial Sequence
  ENSG00000104219_37 (sequence is synthesized)
acagattctgatctgtgaatattttcaccaaagtgacatttaaacaagtggatttttcacaaataacacgtgtttaatatctttctgcagaaacgtgttcttctaaagcagaaaaccacg

SEQ ID NO: 140954 - DNA, 120 bp, Artificial Sequence
  ENSG00000104219_38 (sequence is synthesized)
tggcttaatcccaaatgttttacacttcttttccacatacttagccagttcagcaccgatttcctcttatatgtggaaggagactatgttacatacctgaagtattactcttttacaaag

SEQ ID NO: 140955 - DNA, 120 bp, Artificial Sequence
  ENSG00000104219_39 (sequence is synthesized)
ataccattagaattttctcactgtcttggtaaaaattcctagattctactttttattgcaagtgttagcaatatgatcttgtaacgccatgaaaagcattaagtagaagccaacattaac

SEQ ID NO: 140956 - DNA, 120 bp, Artificial Sequence
  ENSG00000104219_40 (sequence is synthesized)
ctagattttacaactgagcaatctgttccccaccagatttcctttagaatttattaccaaaggatcttattttgttacagaacacaggaaattgttaaaccttataatgttgcaaaccat

SEQ ID NO: 140957 - DNA, 120 bp, Artificial Sequence
  ENSG00000104219_41 (sequence is synthesized)
gcattttccttttctcttttccataagatttttttattgtagtagtgccctggcttgtaaacagtggacatcactgaaaggatgaaatcaagtaggcttgtttcaaagagactcctgtga

SEQ ID NO: 140958 - DNA, 120 bp, Artificial Sequence
  ENSG00000104219_42 (sequence is synthesized)
atcaactatgaatatgaagtatctcccagaacaatgttgagtgtttcaggagactctgaaacagggcacccattttttttttccttcctcaaaatagtctccttgaaatgtgagcaaaga

SEQ ID NO: 140959 - DNA, 120 bp, Artificial Sequence
  ENSG00000104219_43 (sequence is synthesized)
actatgatgatgcagtccaggtatctaatagctcaatcaccaacaccgctgagaattgttcttataccagcaaaaagttcaaatacaataacctgggcaatgccaacagaagacactttt

SEQ ID NO: 140960 - DNA, 120 bp, Artificial Sequence
  ENSG00000104219_44 (sequence is synthesized)
aatcatttgcagacctttcttgttgcaggaaagtgagggcaaaaacaaactggtgaaaaatgttcaaaaatagatctttttgatgttcatagccagtattcagtatttctgtattgttta

SEQ ID NO: 140961 - DNA, 120 bp, Artificial Sequence
  ENSG00000104219_45 (sequence is synthesized)
caattgggggaaaatgtctgttaaggctaatcatctgagtgatttgagtagcaattaaaccaaagggaaacttttaataagttattttaagccctggtttatggctagttcccttttgct

SEQ ID NO: 140962 - DNA, 120 bp, Artificial Sequence
  ENSG00000104219_46 (sequence is synthesized)
caggaaaaatagtactactttatggtttatgaaaacctatgatttatgttgcatcttccggggaaggtttaacagtacaaggagctgaatcctacctgaaattattaatgcttaatatat

SEQ ID NO: 140963 - DNA, 120 bp, Artificial Sequence
  ENSG00000104219_47 (sequence is synthesized)
tgcttctgtttgattgataaaggtgcttaatcaattgaaaaaaaaacgcataatgcttcaaggtaaaattccgttgattctgaatttaaaaagatactacagaatgcgtcagttctcctg

SEQ ID NO: 140964 - DNA, 120 bp, Artificial Sequence
  ENSG00000104219_48 (sequence is synthesized)
ttgtatttttctcagttatgagagcaaggctattttgtcagtttagattttgtgtctttttctgtcagtatgtatggctccctaattgaaaacatcttaaatgaactaatcaaacactta

SEQ ID NO: 140965 - DNA, 120 bp, Artificial Sequence
  ENSG00000104219_49 (sequence is synthesized)
tttgttaaaattttcaggctttaaactaatgaaaataatacagcaaaagatagtttcaggaaaagcctctagttccataggcttgtaattctgtgtaggaactcttatttttaaaaaata

SEQ ID NO: 140966 - DNA, 120 bp, Artificial Sequence
  ENSG00000104219_50 (sequence is synthesized)
aacagtagggagagaaaaaaagaggtgatcgtctgaggtttttacatccagagagcgaagtggctccagtccgagttcgaggttcctgaattgtgtccatggaaaacactggcgaacaag

SEQ ID NO: 140967 - DNA, 120 bp, Artificial Sequence
  ENSG00000104221_0 (sequence is synthesized)
acttcttgctgcctcacggttgctgttgcagacccaggagtctctgaaggcttccgcggctttggggccggttgtgagatgccaggcagaggccgctgcccggactgcggctccacggag

SEQ ID NO: 140968 - DNA, 120 bp, Artificial Sequence
  ENSG00000104221_1 (sequence is synthesized)
ctggtggaagactcgcactattcgcagagccagctggtgtgctccgactgcggctgcgtggtcaccgagggggtccttaccactaccttcagcgacgagggcaatctccgagaggtaaca

SEQ ID NO: 140969 - DNA, 120 bp, Artificial Sequence
  ENSG00000104221_2 (sequence is synthesized)
tattcccgaagcacaggggaaaacgaacaagttagtcgcagccagcaacgaggtctccggcgagtgagagacctttgtcgagttctgcagttgccaccaacatttgaggataccgcggtt

SEQ ID NO: 140970 - DNA, 120 bp, Artificial Sequence
  ENSG00000104221_3 (sequence is synthesized)
gcctactaccaacaggcatatcggcactctggcatccgagcggccaggctgcaaaagaaggaggtgttggttgggtgctgcgtcttaatcacctgccgacagcataactggcccctaaca

SEQ ID NO: 140971 - DNA, 120 bp, Artificial Sequence
  ENSG00000104221_4 (sequence is synthesized)
atgggggccatctgcacgctgttgtatgcagatttggatgtgttttctagcacttacatgcagatagtgaagctcctgggactggatgtgccatctctgtgcttggcagaactggtgaag

SEQ ID NO: 140972 - DNA, 120 bp, Artificial Sequence
  ENSG00000104221_5 (sequence is synthesized)
acctattgcagcagcttcaaactgttccaagcttcaccttctgtgccagccaaatacgtggaagacaaagagaagatgctgtctcgaacaatgcagttggtggagctggcaaatgagacg

SEQ ID NO: 140973 - DNA, 120 bp, Artificial Sequence
  ENSG00000104221_6 (sequence is synthesized)
tggctggtgaccgggaggcatcccttgcccgtcatcactgctgcgactttcctggcttggcagtcgctgcagcctgcagatcggctttcatgttcccttgcccgattttgtaaattggca

SEQ ID NO: 140974 - DNA, 120 bp, Artificial Sequence
  ENSG00000104221_7 (sequence is synthesized)
aatgtggacctgccctacccggcgtcctcccgcctgcaggagctgctggctgtgctgctgcggatggctgagcagctggcctggttacgagttctgagacttgacaaacggtctgtggtg

SEQ ID NO: 140975 - DNA, 120 bp, Artificial Sequence
  ENSG00000104221_8 (sequence is synthesized)
aagcacatcggtgaccttctccagcaccgccagtcactggtccgctctgcctttcgggatgggacagcagaagtggagacccgagagaaggagccaccggggtggggacaggggcaagga

SEQ ID NO: 140976 - DNA, 120 bp, Artificial Sequence
  ENSG00000104221_9 (sequence is synthesized)
gaaggggaggtgggaaataattccttaggtttaccccaggggaagcggccggccagtcctgcccttctcttgccaccctgcatgttgaagtccccgaagcggatctgccctgtaccccct

SEQ ID NO: 140977 - DNA, 120 bp, Artificial Sequence
  ENSG00000104221_10 (sequence is synthesized)
aaatagaacagtatttgcgtacccctcaggaagttagggactttcagagagcccaggctgctagacaggctgccacgagtgtccctaaccctccctgatggatatccactgggagcactt

SEQ ID NO: 140978 - DNA, 120 bp, Artificial Sequence
  ENSG00000104221_11 (sequence is synthesized)
catcctgttctgacagcttgataacattcctgttataaccaaggatggaagtgtacaccagtccgtaggtattgcttttcttgtttgaaggaaccaagaggggctctgccattagttgga

SEQ ID NO: 140979 - DNA, 120 bp, Artificial Sequence
  ENSG00000104221_12 (sequence is synthesized)
ccctgggtcctggagtaaagtcaggagtgcagggatgactataggtaggagagattcccatcccttggtgtgggagagcaagttgcctatgtccatgttctgtgagatggctttcctcat

SEQ ID NO: 140980 - DNA, 120 bp, Artificial Sequence
  ENSG00000104221_13 (sequence is synthesized)
agatggatgggaaaatgtcaggctctttgctgctggtttgaattggacacactgctgcggctcctcctgcaggcctgagggggcttccctctgcttgtggagtggttggcattcccagca

SEQ ID NO: 140981 - DNA, 120 bp, Artificial Sequence
  ENSG00000104221_14 (sequence is synthesized)
gtatcaaccctcagaggagcgggaactggggaattctggccctacgtgcattcacaggcaatgatgggtttgtgtgtatggtgtcatgagatcctctacctcataacaaaaggacagtgg

SEQ ID NO: 140982 - DNA, 120 bp, Artificial Sequence
  ENSG00000104221_15 (sequence is synthesized)
gtagactaaggcagtagctcaaagggctttgcaaaattttaatatattaaaacaagaggcatctgctagaaaacattctattgtataaaacccgagttcttaaaaacatgttttctttgg

SEQ ID NO: 140983 - DNA, 120 bp, Artificial Sequence
  ENSG00000104221_16 (sequence is synthesized)
cactttcattccctccctcccctttccccagcatattgcaaaaagctctccagtgctaaggcattggcagggtgtgtaaacagcagccagcatatgtggaagaataatacaaagcttttt

SEQ ID NO: 140984 - DNA, 120 bp, Artificial Sequence
  ENSG00000104221_17 (sequence is synthesized)
tttttcttctaatatgtctgtgcagcaagcataaataacaggacccattccaaggagtgtgtgtgggttttccccctcccctgtgtcctctgtcaccttggtgatgaggccagagtgatg

SEQ ID NO: 140985 - DNA, 120 bp, Artificial Sequence
  ENSG00000104221_18 (sequence is synthesized)
tgaagactgggagggaaccctaggtcagaccttggtttcctgttgttcttcccaagacccagggttccctcggtttccatttggtcctgtagtgaaatgctggtggttggttttaggttg

SEQ ID NO: 140986 - DNA, 120 bp, Artificial Sequence
  ENSG00000104221_19 (sequence is synthesized)
gggaaaagacgggtgctggtgtttaaaaggagtaaaggcataggcccctcatgacctgcagggaccccagccactgcctctgggcttggcttgagctcctgggagtcgggaagctggttt

SEQ ID NO: 140987 - DNA, 120 bp, Artificial Sequence
  ENSG00000104221_20 (sequence is synthesized)
gacattttgtaggtttctctctactgtggagctggagatcaaatgattgggatggttcttcctctggccttacggaggcaaggaagtgctcttccttagtcccgtggtgttgtaaggctg

SEQ ID NO: 140988 - DNA, 120 bp, Artificial Sequence
  ENSG00000104221_21 (sequence is synthesized)
tattcccgaagcacaggggaaaacgaacaagttagtcgcagccagcaacgagaatgactataccaagtgtcactcctgtctatgcagaaaggtacataatttgtgcatctgatatctgag

SEQ ID NO: 140989 - DNA, 120 bp, Artificial Sequence
  ENSG00000104228_0 (sequence is synthesized)
gcaaaagttccgggcgcccgagccggctgctcgtgccatggagcggagtcccgacgtgtcccccgggccttcccgctccttcaaggaggagttgctctgcgccgtctgctacgacccctt

SEQ ID NO: 140990 - DNA, 120 bp, Artificial Sequence
  ENSG00000104228_1 (sequence is synthesized)
ccgcgacgcagtcactctgcgctgcggccacaacttctgccgcgggtgcgtgagccgctgctgggaggtgcaggtgtcgcccacctgcccagtgtgcaaagaccgcgcgtcacccgccga

SEQ ID NO: 140991 - DNA, 120 bp, Artificial Sequence
  ENSG00000104228_2 (sequence is synthesized)
cctgcgcaccaaccacaccctcaacaacctggtggagaagctgctgcgcgaggaggccgagggcgcgcgctggaccagctaccgcttctcgcgtgtctgccgcctgcaccgcggacagct

SEQ ID NO: 140992 - DNA, 120 bp, Artificial Sequence
  ENSG00000104228_3 (sequence is synthesized)
cagcctcttctgcctcgaggacaaggagctgctgtgctgctcctgccaggccgacccccgacaccaggggcaccgcgtgcagccggtgaaggacactgcccacgactttcgggccaagtg

SEQ ID NO: 140993 - DNA, 120 bp, Artificial Sequence
  ENSG00000104228_4 (sequence is synthesized)
caggaacatggagcatgcactgcgggagaaggccaaggccttctgggccatgcggcgctcctatgaggccatcgccaagcacaatcaggtggaggctgcatggctggaaggccggatccg

SEQ ID NO: 140994 - DNA, 120 bp, Artificial Sequence
  ENSG00000104228_5 (sequence is synthesized)
gcaggagtttgataagcttcgcgagttcttgagagtggaggagcaggccattctggatgccatggccgaggagacaaggcagaagcaacttctggccgacgagaagatgaagcagctcac

SEQ ID NO: 140995 - DNA, 120 bp, Artificial Sequence
  ENSG00000104228_6 (sequence is synthesized)
agaggagacggaggtgctggcacatgagatcgagcggctgcagatggagatgaaggaggacgacgtttcttttctcatgaaacacaagagccgaaaacgccgactcttctgcaccatgga

SEQ ID NO: 140996 - DNA, 120 bp, Artificial Sequence
  ENSG00000104228_7 (sequence is synthesized)
gccagagccagtccagcccggcatgcttatcgatgtctgcaagtacctgggctccctgcagtaccgcgtctggaagaagatgcttgcatctgtggaatctgtacccttcagctttgaccc

SEQ ID NO: 140997 - DNA, 120 bp, Artificial Sequence
  ENSG00000104228_8 (sequence is synthesized)
caacaccgcagctggctggctctccgtgtctgacgacctcaccagcgtcaccaaccatggctaccgcgtgcaggtggagaacccggaacgcttctcctcggcgccctgcctgctgggctc

SEQ ID NO: 140998 - DNA, 120 bp, Artificial Sequence
  ENSG00000104228_9 (sequence is synthesized)
ccgtgtcttctcacagggctcgcacgcctgggaggtggcccttggggggctgcagagctggagggtgggcgtggtacgtgtgcgccaggactcgggcgctgagggccactcacacagctg

SEQ ID NO: 140999 - DNA, 120 bp, Artificial Sequence
  ENSG00000104228_10 (sequence is synthesized)
ctaccacgacacacgctcgggcttctggtatgtctgccgcacgcagggcgtggagggggaccactgcgtgacctcggacccagccacgtcgcccctggtcctggccatcccacgccgcct

SEQ ID NO: 141000 - DNA, 120 bp, Artificial Sequence
  ENSG00000104228_11 (sequence is synthesized)
gcgtgtggagctggagtgtgaggagggcgagctgtctttctatgacgcggagcgccactgccacctgtacaccttccacgcccgctttggggaggttcgcccctacttctacctgggggg

SEQ ID NO: 141001 - DNA, 120 bp, Artificial Sequence
  ENSG00000104228_12 (sequence is synthesized)
tgcacggggcgccgggcctccagagcctttgcgcatctgccccttgcacatcagtgtcaaggaagaactggatggctgagctggcccggggctgccccggtcttgtgccacagcactgtt

SEQ ID NO: 141002 - DNA, 120 bp, Artificial Sequence
  ENSG00000104228_13 (sequence is synthesized)
ttctttctgccctcttcctaatgcccacactgcttgggcactattgcgcccctgcctccttgccaggctcttcctcctgtcctgcctggtccttttccatgactccaggctgtgcctctc

SEQ ID NO: 141003 - DNA, 120 bp, Artificial Sequence
  ENSG00000104228_14 (sequence is synthesized)
tccatgtttggtcccttctgtgcccatggtcaggagctattcgggtggcacctcgctggccaggctctcccgagtcgtggcacctccacaatgtgaattttctgaatccctattccagga

SEQ ID NO: 141004 - DNA, 120 bp, Artificial Sequence
  ENSG00000104228_15 (sequence is synthesized)
tttctgggaataatgtttacttctagaatgggcctgttgtaaaccatctcatcgaggtgtggtaaagccattggatgaggaggggactgccatggaaaggagagtttgttacttacggtt

SEQ ID NO: 141005 - DNA, 120 bp, Artificial Sequence
  ENSG00000104228_16 (sequence is synthesized)
ctgagaggaggggccacataggaaagccccacggtgggtcagaaggcggaaggagggaggggaacgtgtgggcaagagacttcctctggtttcctcaggaggaaatgggcaaggcagagt

SEQ ID NO: 141006 - DNA, 120 bp, Artificial Sequence
  ENSG00000104228_17 (sequence is synthesized)
gacaggtgaatgttggcctggggtgtgacagccctgggagagccatgtgaaggaggcagctggcgccatcgctccggattagttggtttccataggaaaggcatgctttcagccagatgc

SEQ ID NO: 141007 - DNA, 120 bp, Artificial Sequence
  ENSG00000104228_18 (sequence is synthesized)
ttgccatctctagggattgggggattggctagcctgggaggatcagtctgtccaggtcagcgaggccccagataccagagcatcaagagtacaggaaatacagttaatgcagggcctctg

SEQ ID NO: 141008 - DNA, 120 bp, Artificial Sequence
  ENSG00000104228_19 (sequence is synthesized)
tgtggctggatcctccgtctccatcagatcagctctgattgatctattcttgcacgatttcctctgaacacagggttccagagtacttaaacacaacattttttaaatcgtgatttcggc

SEQ ID NO: 141009 - DNA, 120 bp, Artificial Sequence
  ENSG00000104228_20 (sequence is synthesized)
ctatttccttgccaggcctgtttccccaccaggaaatgagataggaggactggatgaggatgtcctgttatagttgctgtggaggaagttcctctggttaattctcatcagcgtctgcag

SEQ ID NO: 141010 - DNA, 120 bp, Artificial Sequence
  ENSG00000104228_21 (sequence is synthesized)
aaaagaaggaaagagggcacccttttcagttgggaagaaaggagaggggtggcgccatggacgtggccctaaacgctgtgggagagggaagaggaggctgggcctcgctgccctcttgtc

SEQ ID NO: 141011 - DNA, 120 bp, Artificial Sequence
  ENSG00000104228_22 (sequence is synthesized)
tctgctgacttcagcctggtcatgcttgctctgccacttgcgatttcatccctaatttcttcctccaccatgcctgcagacttttccctgggcttgttttttctcgcacatctctgaaga

SEQ ID NO: 141012 - DNA, 120 bp, Artificial Sequence
  ENSG00000104228_23 (sequence is synthesized)
gtttttaatcttcagctcatcatgtcccaggaagtggcatcataaaaggaaatatttttttttcctaggagcagtgttaaaatctgggtcacattcctgaccaaggacagcatcctgcct

SEQ ID NO: 141013 - DNA, 120 bp, Artificial Sequence
  ENSG00000104228_24 (sequence is synthesized)
tctgcccatccccttcagttcacaaaagctgacattttaaacaaatcatgactcacacgtattaattggttataaatatgttgtgtacactggttagataaaacttaaggccacaaggag

SEQ ID NO: 141014 - DNA, 120 bp, Artificial Sequence
  ENSG00000104228_25 (sequence is synthesized)
ggcccaggtaggcgatgtcagtgtgtgaaggggctggattgggcgtggtgaggatgttggcaaaccagtgcatgcacctggttggaagatgctcagcctcacaaaagctccaagcccttt

SEQ ID NO: 141015 - DNA, 120 bp, Artificial Sequence
  ENSG00000104228_26 (sequence is synthesized)
gggagccaaagtgtctgagagtgtgaccctctcctgtaaagtatttatcccacccattaatataatttctgtataataaacttgacctgaaattatttcattctttatattaaactttta

SEQ ID NO: 141016 - DNA, 120 bp, Artificial Sequence
  ENSG00000104228_27 (sequence is synthesized)
aaaatgttttttattttcaccttagatatgggaagagttttttttttttttttttttttaacaggataacttgagcaggctaggcctcttaaaaaaaaatttgagctaaaactcattttt

SEQ ID NO: 141017 - DNA, 120 bp, Artificial Sequence
  ENSG00000104228_28 (sequence is synthesized)
cttttggcattttcttttcaatgttcttataagcaaagttcatccatgttgtagcatgtgttcaactttattttttcatcgggtaatattccattgtatggaatggtagtactacatttt

SEQ ID NO: 141018 - DNA, 120 bp, Artificial Sequence
  ENSG00000104228_29 (sequence is synthesized)
tacattttatttatcatgcatcgattggtggacatttggatcgtttctacttcttgactattatacataatgctgctaggaacttttgtgtatgagtttttgtgtggacatatgttttca

SEQ ID NO: 141019 - DNA, 120 bp, Artificial Sequence
  ENSG00000104228_30 (sequence is synthesized)
tggtatatgcctgggagcagatttgctggatcatatgaaactctatttaacccttgagggactcccaaactgttttccaatgtggtgacacaattttatatcccatcaacagggcatgag

SEQ ID NO: 141020 - DNA, 120 bp, Artificial Sequence
  ENSG00000104228_31 (sequence is synthesized)
ggttctgatgactccacatccctcagtgctttttattatctatcttttaacttagccatcctagtaggggtaatgtggcatctcattgtgattttggtttgcatttccctgatggcgaat

SEQ ID NO: 141021 - DNA, 120 bp, Artificial Sequence
  ENSG00000104228_32 (sequence is synthesized)
gatattgagcatcttttcatgagcttattggccatttgcatatcttcttaggacagctatctttagatcacttgctcattttttaattgggttatttgtctttttattattgagttgtaa

SEQ ID NO: 141022 - DNA, 120 bp, Artificial Sequence
  ENSG00000104228_33 (sequence is synthesized)
gagtccttttatagcctggcacaagtccctttaactggtatatgattataaaatttttctccgtgagctgtttcatttccttgatgatgtcctttgaaatactaaagcttttaattttga

SEQ ID NO: 141023 - DNA, 120 bp, Artificial Sequence
  ENSG00000104231_0 (sequence is synthesized)
cccttacggcgccggagagatggcggagttggacatcgggcagcactgccaggtggagcattgccggcagcgagattttcttccatttgtgtgtgatgattgttcaggaatattttgcct

SEQ ID NO: 141024 - DNA, 120 bp, Artificial Sequence
  ENSG00000104231_1 (sequence is synthesized)
tgaacacagaagcagggagtctcatggttgtcctgaggtgactgtaatcaatgagagactgaagacagatcaacatacatcttacccatgctctttcaaagactgtgctgagagagaact

SEQ ID NO: 141025 - DNA, 120 bp, Artificial Sequence
  ENSG00000104231_2 (sequence is synthesized)
tgtggcagttatatgtccttattgtgagaagaatttttgcctgagacaccgtcatcagtcagatcatgagtgtgaaaaactggaaatcccaaagcctcgaatggctgccactcagaaact

SEQ ID NO: 141026 - DNA, 120 bp, Artificial Sequence
  ENSG00000104231_3 (sequence is synthesized)
tgttaaagacattattgattccaagacaggagaaacagcaagtaaacgatggaaaggtgccaaaaatagtgaaacagctgcaaaggttgcattgatgaaattaaagatgcatgctgatgg

SEQ ID NO: 141027 - DNA, 120 bp, Artificial Sequence
  ENSG00000104231_4 (sequence is synthesized)
cgataagtcattaccacagacagaaagaatttactttcaggttttcttacctaaagggagcaaagagaagagcaaaccaatgttcttttgccaccgatggagcattggaaaggccataga

SEQ ID NO: 141028 - DNA, 120 bp, Artificial Sequence
  ENSG00000104231_5 (sequence is synthesized)
ctttgccgcttctctagccaggcttaaaaatgacaataacaaatttacagctaagaaattaaggctgtgtcacattacttcaggagaagccttacccttggatcatactttggaaacctg

SEQ ID NO: 141029 - DNA, 120 bp, Artificial Sequence
  ENSG00000104231_6 (sequence is synthesized)
gattgctaaggaggattgtcctttatataatggtggaaatataatcttggaatatcttaatgatgaagaacaattctgtaaaaatgttgaatcttacttggaatagtcattcaaagattc

SEQ ID NO: 141030 - DNA, 120 bp, Artificial Sequence
  ENSG00000104231_7 (sequence is synthesized)
aagtcagaaatcacagggaaaattctattacatgtttaagtccatttattttactacaaatactatttttgtaatttttaaaagttgctttttaacttatttccccttatgtcacatttt

SEQ ID NO: 141031 - DNA, 120 bp, Artificial Sequence
  ENSG00000104231_8 (sequence is synthesized)
aaattatgagttttctattagagttttttggttttaagtttaattgtgtacggatcctcaattattagcaaattcttatatttaattagctttcattagtttatgctgtagtgacaacaa

SEQ ID NO: 141032 - DNA, 120 bp, Artificial Sequence
  ENSG00000104231_9 (sequence is synthesized)
atgtcagctgttgattggctgtgacactgctttgtgtcatcttcttaccatgatcaaaggcaaaggaagggatctcttttgggacattgtgattgttttagcagagagagaaagagatga

SEQ ID NO: 141033 - DNA, 120 bp, Artificial Sequence
  ENSG00000104231_10 (sequence is synthesized)
aatacacttcggttttctcttaaaagatgcatgtatcatacgtgctttaagcaagtcatgtggccaagcctagcatcatggagccagaaagtatagccttgctgtctgtctacatcatga

SEQ ID NO: 141034 - DNA, 120 bp, Artificial Sequence
  ENSG00000104231_11 (sequence is synthesized)
tgtataaattgatatatctacatgaattatagaaacttagaagtgatctttattcagtcttataatttttacatgaagaatcttaggcctaggaggagaaaatgattttctttctattac

SEQ ID NO: 141035 - DNA, 120 bp, Artificial Sequence
  ENSG00000104231_12 (sequence is synthesized)
ctaactagattggggcatatttctgataaagacccacctctagtgagattcatcttttttgtttgtgtgactatattccatagagaagaaagatgggatagctcaacttcattatatacc

SEQ ID NO: 141036 - DNA, 120 bp, Artificial Sequence
  ENSG00000104231_13 (sequence is synthesized)
aaagcaaaacacatgccaaatgatgactacattttaccaacatatttagacgagtattcttgactagtgtttactatctatacccccaaaactactactatatagacagaatggaaagta

SEQ ID NO: 141037 - DNA, 120 bp, Artificial Sequence
  ENSG00000104231_14 (sequence is synthesized)
tttctatttgtcctttttttgttttctgttctaattgtcagggacatatgtagtggctataggtttacttaaaaggaataaatttggaatgctcatttggtttatttcctttctaattct

SEQ ID NO: 141038 - DNA, 120 bp, Artificial Sequence
  ENSG00000104231_15 (sequence is synthesized)
tcatattatttttatgtgaggaatggagataatttccaacttttattatgttcttgtactttcattcattagcatagttatttgagttcccactaaatgtagggatttgtcctaattgcc

SEQ ID NO: 141039 - DNA, 120 bp, Artificial Sequence
  ENSG00000104231_16 (sequence is synthesized)
atgattaatacaatgatgatatgtatacatacaggtataccttggaaatattgtgggttcagtttcagactaccacacaaagcaaatattggagtatattgagccagacaaatttttttt

SEQ ID NO: 141040 - DNA, 120 bp, Artificial Sequence
  ENSG00000104231_17 (sequence is synthesized)
tgtttcccagggcatataaaaattatgtttacactatactatagtctatttaatgtgcaatagcattatgtctaaaaaatgtatatactttaagtaaaaaaatactttattgctaaaaaa

SEQ ID NO: 141041 - DNA, 120 bp, Artificial Sequence
  ENSG00000104231_18 (sequence is synthesized)
ggctggccggcgccacccggccctctgggagttgagcgagagcagagaaaagttgaaaagaccgacaaagactgtgggaagttggcttttatccacactagggacggtcccaggaacgag

SEQ ID NO: 141042 - DNA, 120 bp, Artificial Sequence
  ENSG00000104231_19 (sequence is synthesized)
ccggagagatggcggagttggacatcgggcagcactgccaggtggagcattgccggcagcgagattttcttccatttgtgtgtgatgattgttcaggaatattttggtgactgtaatcaa

SEQ ID NO: 141043 - DNA, 120 bp, Artificial Sequence
  ENSG00000104231_20 (sequence is synthesized)
agatggcggagttggacatcgggcagcactgccaggtggagcattgccggcagcgaggtgatccgggagcttccagcccccatccccggccgcgggagaccagggctccgctttggctcc

SEQ ID NO: 141044 - DNA, 120 bp, Artificial Sequence
  ENSG00000104231_21 (sequence is synthesized)
gcggatggtggcggcgggtgaagggaggccacaaggctgggcagggcctgaggagcggggtgggagcgtttcttctggggctgcagtgagatcggttgattttcttccatttgtgtgtga

SEQ ID NO: 141045 - DNA, 120 bp, Artificial Sequence
  ENSG00000104231_22 (sequence is synthesized)
tattttgatgatattcttgtgacagtatttcttatgaggtctacctgaccgatggaaatttggaaattatttggaggtactccactgtaagtacttatctcttttgctgagccacttaga

SEQ ID NO: 141046 - DNA, 120 bp, Artificial Sequence
  ENSG00000104231_23 (sequence is synthesized)
ttagctagttaaccattgggctagaaatggtattcatgagattgaagtagtcagctgctttctctacagattaaactctaagcctagtcagctgttctgtgaatgctgctgataataaga

SEQ ID NO: 141047 - DNA, 120 bp, Artificial Sequence
  ENSG00000104231_24 (sequence is synthesized)
gataccaggaatgaatgtatctgtgacttaaatcagtctgcctgccagtatgttagctcagaatttttattccatattaaggatagtacctttattacaatcttgcataaccaaatctta

SEQ ID NO: 141048 - DNA, 120 bp, Artificial Sequence
  ENSG00000104231_25 (sequence is synthesized)
gagttcggagggccagcgatcccgggggcctctcgggagctccccggggccgcgccgaggggacaggtgagcaaggcagtcctctcggggacccagaccggaaaggcggccctcctggga

SEQ ID NO: 141049 - DNA, 120 bp, Artificial Sequence
  ENSG00000104231_26 (sequence is synthesized)
gaactagtttgtgaatggctcaaagaaaagcaaaccgatgtccaggggtcttgtgcaggacctgaaagtattttcttccatttgtgtgtgatgattgttcaggaatattttggtgactgt

SEQ ID NO: 141050 - DNA, 120 bp, Artificial Sequence
  ENSG00000104231_27 (sequence is synthesized)
ggggacctcagtggtgtgggccgattgtccccaagggaaaggctagaggcagatgggctcccgcctgtgggccagaccccagcctacctcgcttattctgcgtgccgtgcttcttggcca

SEQ ID NO: 141051 - DNA, 120 bp, Artificial Sequence
  ENSG00000104231_28 (sequence is synthesized)
gagcttttgaaatgacgtgtggtctccttggaaggaagccatgcaattcctgaaaacgtaccttgcagtgttcattttggtgttcgagtgtgccgtgtccgagcagtgcacgaagcccac

SEQ ID NO: 141052 - DNA, 120 bp, Artificial Sequence
  ENSG00000104231_29 (sequence is synthesized)
tgctggatcgcgtggctcacacttactctgctgagcgcggattttcttccatttgtgtgtgatgattgttcaggaatattttgccttgaacacagaagcagggagtctcatggttgtcct

SEQ ID NO: 141053 - DNA, 120 bp, Artificial Sequence
  ENSG00000104231_30 (sequence is synthesized)
tagatcaatctcaatgatatttttccattgacaatgtaaatacaatacctatacaatgaatgtggtctctgtatatctctcttgtgtgtaatttatatatgtttctgagccataattaat

SEQ ID NO: 141054 - DNA, 120 bp, Artificial Sequence
  ENSG00000104237_0 (sequence is synthesized)
gacatactgagaataaatccaaagacattagtttctttgcacgaaatgaggttacatatccagtgacatttatttgagctatttaaacaacttaaacatctttttcttttcttaataagg

SEQ ID NO: 141055 - DNA, 120 bp, Artificial Sequence
  ENSG00000104237_1 (sequence is synthesized)
gacgtttcaagttgtggtctcagccaaaatgagtgataccccttctactggtttttccatcattcatcctacgtcttctgaaggtcaagttccaccccctcgccatttgagcctcactca

SEQ ID NO: 141056 - DNA, 120 bp, Artificial Sequence
  ENSG00000104237_2 (sequence is synthesized)
tcctgttgtggccaagcgaatcagtttctacaagagcggagacccccaattcggcggggtcagggtggtggtcaaccctcgctcctttaagtcctttgatgctctgctggataacttgtc

SEQ ID NO: 141057 - DNA, 120 bp, Artificial Sequence
  ENSG00000104237_3 (sequence is synthesized)
caggaaggtgcccctcccttttggagtgaggaacatcagcacccctcggggcaggcacagcatcacgcgcctggaggagctggaggacggcgagtcctacctatgttcccacggcaggaa

SEQ ID NO: 141058 - DNA, 120 bp, Artificial Sequence
  ENSG00000104237_4 (sequence is synthesized)
ggtgcagcctgtagacctggacaaagcccgtcggcgcccgcggccctggctcagcagccgggccattagcgcgcactcaccgccccaccccgtagccgtcgctgctcccggcatgccccg

SEQ ID NO: 141059 - DNA, 120 bp, Artificial Sequence
  ENSG00000104237_5 (sequence is synthesized)
ccccccacggagcctagtggtcttcaggaatggcgacccgaagacgaggcgtgcggttcttctgagcaggagggtcacccagagcttcgaggcatttctacagcacctgacagaggtcat

SEQ ID NO: 141060 - DNA, 120 bp, Artificial Sequence
  ENSG00000104237_6 (sequence is synthesized)
gcagcgccctgtggtcaagctgtacgctacggacggaaggagggttcccagcctccaggcagtgatcctgagctctggagctgtggtggcggcaggaagggagccatttaaaccaggaaa

SEQ ID NO: 141061 - DNA, 120 bp, Artificial Sequence
  ENSG00000104237_7 (sequence is synthesized)
ttatgacatccaaaaatacttgcttcctgctagattaccagggatctctcagcgtgtgtaccccaagggaaatgcaaagtcagaaagcagaaagagtagtaactggaaagtttttataat

SEQ ID NO: 141062 - DNA, 120 bp, Artificial Sequence
  ENSG00000104237_8 (sequence is synthesized)
caccagtgacttgccagatgcagggaccagctcacagatttatattattctgtatggacaacatagaagttcagcccccatatatctttatggaacagatggggctcgatttcaggttgg

SEQ ID NO: 141063 - DNA, 120 bp, Artificial Sequence
  ENSG00000104237_9 (sequence is synthesized)
ccatgaagacatatttactataacagttggagacattggagcactctttaagattcgtattggtcataccaactctggatcctccccttcctggcactgcaaggagatacagctgcataa

SEQ ID NO: 141064 - DNA, 120 bp, Artificial Sequence
  ENSG00000104237_10 (sequence is synthesized)
tatgaattctggaaaacagttttatgtacctgttcaacgatggttggcacgagatcaagaggatggggaaatctgtcgagaatttcctcttttaagtaaaggacaacctgtccttccagt

SEQ ID NO: 141065 - DNA, 120 bp, Artificial Sequence
  ENSG00000104237_11 (sequence is synthesized)
gacaatatatgaagtgaatgtggcaacgggtgagctatggaatgctggaacagtagcaaacgtctacatttctatccatggggaaaagggagatacaggatccagacaactatttagatc

SEQ ID NO: 141066 - DNA, 120 bp, Artificial Sequence
  ENSG00000104237_12 (sequence is synthesized)
gaagagctccttcaattttttaagaggacaaactgacacctttttcctggaggctgtgcaccttggagatttgtgtaagattgtgataggccatgatggacttggcccaggaaatggttg

SEQ ID NO: 141067 - DNA, 120 bp, Artificial Sequence
  ENSG00000104237_13 (sequence is synthesized)
gtttcttgatgatgttgttatcaaggatcccacaacaaattacgaatatgccttcttctgtcacagatggctagatcagggggaagatgattgtaaaattgtcagagaactgtatgccag

SEQ ID NO: 141068 - DNA, 120 bp, Artificial Sequence
  ENSG00000104237_14 (sequence is synthesized)
ggataacagtatcttctctgcgagtaggtatcatgtatacacatttcctggaaaactcttttatgatgactggagaaagcatgacacttctgaaattaattgccctctctttatcttctc

SEQ ID NO: 141069 - DNA, 120 bp, Artificial Sequence
  ENSG00000104237_15 (sequence is synthesized)
agggcagaaattggaacttaagagaaaagaaacatggactgcagaaagctggaagtttacaaaaggaaatactcttcagttctataacaagctgactggagggtttgtccgtttgcatcc

SEQ ID NO: 141070 - DNA, 120 bp, Artificial Sequence
  ENSG00000104237_16 (sequence is synthesized)
agatggcacagttgacgccattggagagaagacagacaaatatggtgtctttgatgttattttcaacaaaagaaatatatgcattttccaaagtcatgagatgaggcatctttctcttgc

SEQ ID NO: 141071 - DNA, 120 bp, Artificial Sequence
  ENSG00000104237_17 (sequence is synthesized)
tcttgacaatggcattgtcactggaatggttagtggtgaagccaccactgagctgcgggtgctttatcagcctaaccgctgtgcacttcttgagtcggcactggttcctggtcacacagt

SEQ ID NO: 141072 - DNA, 120 bp, Artificial Sequence
  ENSG00000104237_18 (sequence is synthesized)
tgtttttgatcgtcatggcaaaatagctgatgcatcatcagcaggctatgcaaatctttcaaaagaatttgtgatttttgtcaagggggtgttcctcaacagtgctgtggttctgcttgc

SEQ ID NO: 141073 - DNA, 120 bp, Artificial Sequence
  ENSG00000104237_19 (sequence is synthesized)
tacaagcctgtgtcaggccctgtgtctccagcctgatggaagctgcactggagtgggaagccagtctgaaaaatcctactggaaagtgcataaaatcagctctgggatttgcatgtttga

SEQ ID NO: 141074 - DNA, 120 bp, Artificial Sequence
  ENSG00000104237_20 (sequence is synthesized)
aagtgtgaaaaatgcacaaatgtatctaagaatcaaggatggccgatgcgatggaacaggtacaggagatgttgactgtcattttaaaattaagaagaacttgaagaatgcatccataag

SEQ ID NO: 141075 - DNA, 120 bp, Artificial Sequence
  ENSG00000104237_21 (sequence is synthesized)
cctggaatctacgaagagcccaggattgtttgttggacttcagtcagatgggcaggcaaaaccaatgatttataccaaggatgagaatgtttgcttctatccacaagtcatccaatttgg

SEQ ID NO: 141076 - DNA, 120 bp, Artificial Sequence
  ENSG00000104237_22 (sequence is synthesized)
cagagaaaacccaatgggaatgtctgcaacacccagccaagaagaagaaaagatccatgagtcaaaaaaacagaaaaaaatacccccagaatctgaggctaggagtcccttaccttcttc

SEQ ID NO: 141077 - DNA, 120 bp, Artificial Sequence
  ENSG00000104237_23 (sequence is synthesized)
aactgcaaaagaaatcagacatttccaaagtagtgagactcttctgtcagaagatgaatggaaggtgttagtgctgacaggaaatacaggaactcaagccaatgtcactctctgggtgta

SEQ ID NO: 141078 - DNA, 120 bp, Artificial Sequence
  ENSG00000104237_24 (sequence is synthesized)
tggagataaaggagtcactgggccaataagtcttcgcaaggacagctcagagcagctcttccttccaggacacgaggatgagtttcaggttgaaataagaaacactggaaacatatataa

SEQ ID NO: 141079 - DNA, 120 bp, Artificial Sequence
  ENSG00000104237_25 (sequence is synthesized)
gaccatgcaacatatgaaaagcaagaagatcctagattttgcagcaaacgtatggctgtctcggattcaggcagatggggatgttgtctgtgagcttcctgtagtaaaaggaggacaagc

SEQ ID NO: 141080 - DNA, 120 bp, Artificial Sequence
  ENSG00000104237_26 (sequence is synthesized)
tatttttccattagtgagataccaggttgacgtctacactgggcagctgaagcatgcagagacggagtctgaggttttcctctgtctctttggggagaggggagactctggcctcagaca

SEQ ID NO: 141081 - DNA, 120 bp, Artificial Sequence
  ENSG00000104237_27 (sequence is synthesized)
gctgtacaaatctaacatgcaagtaaaatttcaaagaggacagattgataaatttcaagtagcagcagtgtcgcttggaaaactgcagaaggtgctgttgcgctgtgaggccagtgacaa

SEQ ID NO: 141082 - DNA, 120 bp, Artificial Sequence
  ENSG00000104237_28 (sequence is synthesized)
atcacagtactggtactgtgaacaagtcatagtcagagagcccggcaccacatccgagtccatctttacctgtcaaagatggcttcctttcatgtctcagggcataattcattcagaaat

SEQ ID NO: 141083 - DNA, 120 bp, Artificial Sequence
  ENSG00000104237_29 (sequence is synthesized)
tgaactttatcttcaagaaatgcaaataaatcatcaacctaaaatacaagaggaagcaaatgatggagactggaaggtgaccattgtcactggggatcttgaaaatgccggcaccacggc

SEQ ID NO: 141084 - DNA, 120 bp, Artificial Sequence
  ENSG00000104237_30 (sequence is synthesized)
aacagtgttcctttatgtctatggagaaacaaaatgttcaggtcctattattttgggatctgggaaacaccagctgtttaaccctaacactgcagatatattcaagattaatctcaaaga

SEQ ID NO: 141085 - DNA, 120 bp, Artificial Sequence
  ENSG00000104237_31 (sequence is synthesized)
tattggtgaaatctataaaatacgtattggacatgacaacactggaaagaatcccaggtggtatctggaagaagttagacttgaaaatatagccacatatgagctattttgtttacctgt

SEQ ID NO: 141086 - DNA, 120 bp, Artificial Sequence
  ENSG00000104237_32 (sequence is synthesized)
tgattcctggatagctgagaatgaaaatgatggcgatctatggaaggaaatacccatcatgggaccaaagaaagcacctttgccagtggtgctttatgagattcgcatatacacaggcac

SEQ ID NO: 141087 - DNA, 120 bp, Artificial Sequence
  ENSG00000104237_33 (sequence is synthesized)
aatgacaggtgcagaaacagagtctaatgtatttatcaacctcatcggtaccagaggtgattcaggaaaacgaagacttcatcagtccaaaaacaatgaaatcaagtttcagcgtggaca

SEQ ID NO: 141088 - DNA, 120 bp, Artificial Sequence
  ENSG00000104237_34 (sequence is synthesized)
ggttgatattttttccattaaggctgtatctctcggaaaattgaagaaagttctgattagtcatgatggaacaggtccaggtaatggatggtttcttgggagtattgttgttaagtctga

SEQ ID NO: 141089 - DNA, 120 bp, Artificial Sequence
  ENSG00000104237_35 (sequence is synthesized)
agatgaagacagcagtgaagaggtgctgtttctatgcaacagatggctagatgagtaccaagatgatggcaagacccagcgggaattgctcgcagaaagtagtcccagtgcagtaggaga

SEQ ID NO: 141090 - DNA, 120 bp, Artificial Sequence
  ENSG00000104237_36 (sequence is synthesized)
gactgggtctaccatctcctgaaagggcccacttgggcctgtcgctccaatatgcttcaaaaggctattgatctgattgtgatagtgcatttgtcttttgcttgggctggagcaaacacc

SEQ ID NO: 141091 - DNA, 120 bp, Artificial Sequence
  ENSG00000104237_37 (sequence is synthesized)
tggggagggtcagtttgtgttggacccactcattgtttctgagaacttccaaaattgggaggatgcactgacagcctccgccaacagctgaccaagatcagcccctggtatctggggtac

SEQ ID NO: 141092 - DNA, 120 bp, Artificial Sequence
  ENSG00000104237_38 (sequence is synthesized)
ccatactgctgctgctcacctcctccccctcctcttccttcaccttttctttcccttcctccccactcttcccctccctcctctcccttctttcttttcctttttctttcagaaaatctg

SEQ ID NO: 141093 - DNA, 120 bp, Artificial Sequence
  ENSG00000104237_39 (sequence is synthesized)
acttactgctaaggttactgaaatgtctaaataagtattctttgtagaaaataactgaagaggtacctaataacatttgatgcatgaaaaacacttttatgcaacctatgttaattttaa

SEQ ID NO: 141094 - DNA, 120 bp, Artificial Sequence
  ENSG00000104237_40 (sequence is synthesized)
agtggaagttttattgttagacaatggtatgtctctctcagaattagtggtaaaatcaataagaaaatgtagaaagaacccaaccaattgggttactgtgtgttcccagtgcacgtcctg

SEQ ID NO: 141095 - DNA, 120 bp, Artificial Sequence
  ENSG00000104237_41 (sequence is synthesized)
tgggtccacttgcagtttgagcttcgagctggtgacagagtcctgcaggcagagagcagcagagcgcagggcagatatctcacatccatcggtcactttttctcatgaagcctcaaatac

SEQ ID NO: 141096 - DNA, 120 bp, Artificial Sequence
  ENSG00000104237_42 (sequence is synthesized)
ttgtcaacttggtgccacaggtgccttcttctaatccgttaatttggcacataagctaaaactcatttgccagccccggagaggtcaggatgtagcttttgatatcaaagacacctgtct

SEQ ID NO: 141097 - DNA, 120 bp, Artificial Sequence
  ENSG00000104237_43 (sequence is synthesized)
ttgaatctctattttgccccgtgaggtagatgctatcatcacccacattttgcagatgaggaaaccgacacatggaaaagccaagtgacctgcccaagcttagagagtggaacaagcagg

SEQ ID NO: 141098 - DNA, 120 bp, Artificial Sequence
  ENSG00000104237_44 (sequence is synthesized)
agagccgggatgtgaccctagaagtctgacttcagagcccgtgcgcgtccacactgtgaccttggccctcctgccttccctgcttgtttttagtatcccatgaaatcaggcagaggggcc

SEQ ID NO: 141099 - DNA, 120 bp, Artificial Sequence
  ENSG00000104237_45 (sequence is synthesized)
aaggaggcaaatcttgcataccaccttcatgatttttgtcgtctgcaatagtacctgtactagtatatgcttgatattttcttccttgaactgtgtctaaatcagtgtatttagaggtga

SEQ ID NO: 141100 - DNA, 120 bp, Artificial Sequence
  ENSG00000104237_46 (sequence is synthesized)
agagagcttggcctcatcctaaatcatattccaaatatccatgaaatcactgatttaatatgtcattacattttttcctaaaacacattaaaataaatctatgtctaacaaaaattttag

SEQ ID NO: 141101 - DNA, 120 bp, Artificial Sequence
  ENSG00000104237_47 (sequence is synthesized)
gttagtctatatactacctaaaattattttataaatatctagtagtcggcacatttcaccattacggtgtgtgtgtatatgtgtgtgtgtgtgtgtgcatgtgtgtatgtgtgtgtagaa

SEQ ID NO: 141102 - DNA, 120 bp, Artificial Sequence
  ENSG00000104237_48 (sequence is synthesized)
cttaactctggcctggcagatcattattagtaaataatgttcagtaagtagatgctgttgttataatggtttcccttttactaacccatgaccaagaactaatccattccttagaaatgg

SEQ ID NO: 141103 - DNA, 120 bp, Artificial Sequence
  ENSG00000104237_49 (sequence is synthesized)
tatatttttacatctgaggatgaaaatacatcaagaatacggcttcagtgatttgaagttaaaaacagccttttttttttctaaagtgtccagcagaccatattacaggtaagaaaaata

SEQ ID NO: 141104 - DNA, 120 bp, Artificial Sequence
  ENSG00000104237_50 (sequence is synthesized)
agtacaatagttctcccttattggtggttttgctttctgaggtttcagttaccagaagtcaaccacagtctgaaaatattaaatggaaaatgtcagaaataaacaattcattcattttca

SEQ ID NO: 141105 - DNA, 120 bp, Artificial Sequence
  ENSG00000104237_51 (sequence is synthesized)
cctttccagttttccacgggggccccaaggaacgcctgcggctggaattccccgggagacagggagctgtaacaatagaggttcatattctaaagagagcaggcactgagcaaatgtttg

SEQ ID NO: 141106 - DNA, 120 bp, Artificial Sequence
  ENSG00000104237_52 (sequence is synthesized)
ttgaactgaaccaatctgctagttatggggacatgacctccacttcatggtgttgaactaaacaaacacatacttctccagacaaatattaaaactggtgaacttcaaaataacgtgaaa

SEQ ID NO: 141107 - DNA, 120 bp, Artificial Sequence
  ENSG00000104237_53 (sequence is synthesized)
agctcctatgtttccatgcctcattatatgccacaaaaaatcaaatgataacgagaacaaagtaggttattttgtttgctatttaacttgtgtgcaggtcttcacagaatgagaggcata

SEQ ID NO: 141108 - DNA, 120 bp, Artificial Sequence
  ENSG00000104237_54 (sequence is synthesized)
ccaacactcatgaccccaggctagttctgttctttgccagtgtgtggtttgggagttctgtgaagtgtttgcagtcgctactaataatccaggtgacacggcaaacattgcagttcctag

SEQ ID NO: 141109 - DNA, 120 bp, Artificial Sequence
  ENSG00000104237_55 (sequence is synthesized)
gtccagcacaattagaggagggttcactcgtaggcagcatctgagcaacaggctcaccagacttcagcctcttcactccgactcttccacgctccagctctcttcattaagatattctag

SEQ ID NO: 141110 - DNA, 120 bp, Artificial Sequence
  ENSG00000104237_56 (sequence is synthesized)
atttcagttaaggtacgagttgttctgactgctgtgcagacattcacacgcccgctgctagaaagctggagctggaaggagcattggggcccgctgagtcctcctttctcatgtatggat

SEQ ID NO: 141111 - DNA, 120 bp, Artificial Sequence
  ENSG00000104237_57 (sequence is synthesized)
tggggcccgctgagtcctcctttctcatgtatggatgcggatgtggaggcaggccctaagtcttagtgtaggtgccgatggtgcagatggtgtttcacactgtcacccaggctggagtgc

SEQ ID NO: 141112 - DNA, 90 bp, Artificial Sequence
  ENSG00000104237_58 (sequence is synthesized)
gcctcccggacctggctgaaaactttaaatcagtgaaagctatctgaatagatgggaaacaactgcctatttttggtgtaaaaagtgtca

SEQ ID NO: 141113 - DNA, 120 bp, Artificial Sequence
  ENSG00000104237_59 (sequence is synthesized)
gatgggaaacaactgcctatttttggtgtaaaaagtgtcaatcatttatttgtgatttatatgtaagagggaaaatgttgctgtcatatttactgaaagataaatgctaaaaaaagaata

SEQ ID NO: 141114 - DNA, 120 bp, Artificial Sequence
  ENSG00000104237_60 (sequence is synthesized)
acatcatggaacactattccccagttttcctcagaacatcccctttgatatttatcttttattattggatttatagtattcctcacagtgaaataaaaacatatgtaaagctgtgtctta

SEQ ID NO: 141115 - DNA, 120 bp, Artificial Sequence
  ENSG00000104237_61 (sequence is synthesized)
cagcttcaaagggatttgaagggtggtgacaggctccagcccagactgcgcctcggaatgcagacgcttctctgcctagaacctggcccggccctatgggaaagccccggttctcggcgg

SEQ ID NO: 141116 - DNA, 120 bp, Artificial Sequence
  ENSG00000104237_62 (sequence is synthesized)
ggtgccgatggtgcaggttgactcacttaaagaagaatttgaatcattatctaacagaaaaagatcaataacaagcattattgctggaacattctatggatagactgctttctatacatg

SEQ ID NO: 141117 - DNA, 120 bp, Artificial Sequence
  ENSG00000104237_63 (sequence is synthesized)
tagactgctttctatacatgattggtgaatattgtatttcaattaattatatatcctgataatatatgaattaatactgtgatatcctgcatacaataacaataatcaatggaaatatag

SEQ ID NO: 141118 - DNA, 120 bp, Artificial Sequence
  ENSG00000104237_64 (sequence is synthesized)
agagtaggcagggccttgattcaatatgactggtggtgttataagagagaagagaagcatcgagagagaacactatttagtgacagaggcagagattagattggtgagctgtaagccaaa

SEQ ID NO: 141119 - DNA, 120 bp, Artificial Sequence
  ENSG00000104237_65 (sequence is synthesized)
ggatgccaaagattgacagccaccaccaggagctagaaagaggcaaggaaggattccacccagagtctcagagggagtatggcctcattgacgtcttgatttcagacttccaggatccag

SEQ ID NO: 141120 - DNA, 120 bp, Artificial Sequence
  ENSG00000104237_66 (sequence is synthesized)
aatggggagatagaggagacagattcaggacttccgccttggctgccgttactacccccagccagaaagagaaggactctttctcggtgttcacctcaaccttccctgcaagtgcctggt

SEQ ID NO: 141121 - DNA, 120 bp, Artificial Sequence
  ENSG00000104237_67 (sequence is synthesized)
ggggttcttggaggaaaagtctgcaagagagtgcaaactcttatgcttcccatatccagcctttagcaatttgttggaaatttctaggtgcattctttactggtgtacaggacatctgta

SEQ ID NO: 141122 - DNA, 120 bp, Artificial Sequence
  ENSG00000104237_68 (sequence is synthesized)
agaaaacacataataatgattgctacttagactattcttttgttcctgaaaagtacttggccttagaaaagaatgattctcagaatttaccaatatatccttctgaagatgatattgaga

SEQ ID NO: 141123 - DNA, 120 bp, Artificial Sequence
  ENSG00000104237_69 (sequence is synthesized)
aatcaattatttttaatcaagacggcactatgacagttgagatgaaagttcgattcagaataaaagaggaagaaaccataaaatggacaactactgtcagtaaaactggtccttctaata

SEQ ID NO: 141124 - DNA, 120 bp, Artificial Sequence
  ENSG00000104237_70 (sequence is synthesized)
atgatgaaaagagtgagatgagttttccaggaagaacagaaagtcgatcatctggtttaaagcttgcagcatgttcattctctgcagatgtgtcacctatggagcgaagcagtaatcaag

SEQ ID NO: 141125 - DNA, 120 bp, Artificial Sequence
  ENSG00000104237_71 (sequence is synthesized)
agggcagtttggcagaggagataaacattcaaatgacagatcaagtggctgaaacttgcagttctgctagttgggagaatgctactgtggacacagatatcatccagggaactcaagacc

SEQ ID NO: 141126 - DNA, 120 bp, Artificial Sequence
  ENSG00000104237_72 (sequence is synthesized)
aagcaaagcatcgtttttataggccccctacacctggactaagaagagtgagacaaaagaaatctgtgattggcagtgtgaccttagtatctgaaactgaggttcaagagaaaatgattg

SEQ ID NO: 141127 - DNA, 120 bp, Artificial Sequence
  ENSG00000104237_73 (sequence is synthesized)
gacagttttcatatagtgaagaaagggaaagtggggaaaacaagtctgagtatcacatgtttacacattcttgcagtaaaatgtcatcagtatctaacaaaccagtacttgttcagatca

SEQ ID NO: 141128 - DNA, 120 bp, Artificial Sequence
  ENSG00000104237_74 (sequence is synthesized)
ataacaatgatcaaatggaggagtcatcattagaaagaaaaaaggaaaacagtctgcttaagtcaagtgcaataagtgctggtgttatagaaattacaagtcagaagatgttagagatgt

SEQ ID NO: 141129 - DNA, 120 bp, Artificial Sequence
  ENSG00000104237_75 (sequence is synthesized)
cacataataatggtttgccatcaactatatcaaataactcaattgtggaggaagatgtagttgattgtgtggtattggacaacaaaactggtatcaagaacttcaaaacttatggtaaca

SEQ ID NO: 141130 - DNA, 120 bp, Artificial Sequence
  ENSG00000104237_76 (sequence is synthesized)
ccaatgataggttcagtcctatttcagcagatgcaacccatttttcaagtaataactctggaactgacaaaaatatttctgaggctccagcttcagaagcatcctctactgtcactgcaa

SEQ ID NO: 141131 - DNA, 120 bp, Artificial Sequence
  ENSG00000104237_77 (sequence is synthesized)
gaattgacagactaattaatgaatttgctcagtgtggtttaacaaaacttccaaaaaatgaaaagaagattttgtcatctgttgccagcaaaaagaagaaaaaatctcgacagcaagcaa

SEQ ID NO: 141132 - DNA, 120 bp, Artificial Sequence
  ENSG00000104237_78 (sequence is synthesized)
taaattccaggtatcaagatggacagcttgcaaccaaaggaattcttaataagaatgagagaataaacacaaaaggtagaattacaaaggaaatgatagtgcaagattcagatagtcccc

SEQ ID NO: 141133 - DNA, 120 bp, Artificial Sequence
  ENSG00000104237_79 (sequence is synthesized)
ttaaaggagggatactttgtgaggaagacctccagaaaagtgatactgtaattgaatcaaatactttttgttccaaaagtaatctcaattccacgatttccaagaatttccatagaaata

SEQ ID NO: 141134 - DNA, 120 bp, Artificial Sequence
  ENSG00000104237_80 (sequence is synthesized)
aattaaatactactcaaaattccaaggttcaaggacttttaaccaaaagaaaatctagatcactaaataaaataagcttaggagcacctaaaaaaagagaaatcggtcaaagagataaag

SEQ ID NO: 141135 - DNA, 120 bp, Artificial Sequence
  ENSG00000104237_81 (sequence is synthesized)
tgtttcctcacaatgaatctaaatattgcaaaagtacttttgaaaacaaaagtttatttcatgtatttaacatccttgagcaaaaacccaaagatttttatgcaccgcaatctcaagcag

SEQ ID NO: 141136 - DNA, 120 bp, Artificial Sequence
  ENSG00000104237_82 (sequence is synthesized)
aagtggcatctgggtatttgagaggaatggcaaagaagagtttagtttcaaaagttactgattcacacataactttaaaaagccagaaaaaacgtaaaggggataaagtgaaagcaagtg

SEQ ID NO: 141137 - DNA, 120 bp, Artificial Sequence
  ENSG00000104237_83 (sequence is synthesized)
ctattttaagtaaacaacatgctacaaccagggcaaattctttagcttctttgaaaaaacctgattttcctgaggctattgctcatcattcaattcaaaattatatacagagttggttgc

SEQ ID NO: 141138 - DNA, 120 bp, Artificial Sequence
  ENSG00000104237_84 (sequence is synthesized)
agaacataaatccatatccaactttaaagcctataaaatcagctccagtatgtagaaatgaaacgagtgtggtaaattgtagcaataatagtttttcagggaatgatccccatacaaatt

SEQ ID NO: 141139 - DNA, 120 bp, Artificial Sequence
  ENSG00000104237_85 (sequence is synthesized)
ctggaaaaataagtaattttgttatggaaagtaataagcacataactaaaattgccggtttgacaggagataatctatgtaaagagggagataagtcttttattgccaatgacactggtg

SEQ ID NO: 141140 - DNA, 120 bp, Artificial Sequence
  ENSG00000104237_86 (sequence is synthesized)
aagaagatctccatgagacacaggttggatctctgaatgatgcttatttggttcccctgcatgaacactgtactttgtcacagtcagctattaatgatcataatactaaaagtcatatag

SEQ ID NO: 141141 - DNA, 120 bp, Artificial Sequence
  ENSG00000104237_87 (sequence is synthesized)
ctgctgaaaaatcaggaccagagaaaaaacttgtttaccaggaaataaacctagctagaaaaaggcaaagtgtagaggctgccattcaagtagatcctatagaagaggaaactccaaaag

SEQ ID NO: 141142 - DNA, 120 bp, Artificial Sequence
  ENSG00000104237_88 (sequence is synthesized)
acctcttaccagtcctgatgcttcaccaattgcaagcttcagttcctggtattcacaagactcagaatggagttgttcaaatgccaggttcacttgcaggtgttccctttcattctgcaa

SEQ ID NO: 141143 - DNA, 120 bp, Artificial Sequence
  ENSG00000104237_89 (sequence is synthesized)
cagaaacacttgcattgttggagattctaaagcacatagctatcacagaggaagctgatgacttgaaagctgctgttgccaatttagtggagtcaactacaagccactttggactcagtg

SEQ ID NO: 141144 - DNA, 120 bp, Artificial Sequence
  ENSG00000104237_90 (sequence is synthesized)
agaaagaacaagacatggttccaatagatctttctgcaaattgttccacggtcaacattcagagtgttcctaagtgcagtgaaaatgaaagaacacaaggaatctcctctttggatggag

SEQ ID NO: 141145 - DNA, 120 bp, Artificial Sequence
  ENSG00000104237_91 (sequence is synthesized)
gttgctctgccagtgaggcatgtgcccctgaagtctgtgttttggaagtgacttgctctccatgtgagatgtgcactgtaaataaggcttattctccaaaagagacatgtaaccccagtg

SEQ ID NO: 141146 - DNA, 120 bp, Artificial Sequence
  ENSG00000104237_92 (sequence is synthesized)
acactttttttcctagtgatggttatggtgtggatcagacttctatgaataaggcttgtttcctaggagaggtctgttcacttactgatactgtgttttctgataaggcttgtgctcaaa

SEQ ID NO: 141147 - DNA, 120 bp, Artificial Sequence
  ENSG00000104237_93 (sequence is synthesized)
aggagaaccatacctatgagggagcttgcccaattgatgagacctacgttcctgtcaatgtctgcaataccattgactttttaaactccaaagaaaacacatatactgataacttggatt

SEQ ID NO: 141148 - DNA, 120 bp, Artificial Sequence
  ENSG00000104237_94 (sequence is synthesized)
caactgaagagttagaaagaggtgatgacattcagaaagatctaaatattttgacagaccctgaatataaaaatggatttaatacattggtgtcacatcaaaatgtcagtaatttaagct

SEQ ID NO: 141149 - DNA, 120 bp, Artificial Sequence
  ENSG00000104237_95 (sequence is synthesized)
cctgtggcctttgcctaagtgaaaaagaagcagaacttgataagaaacatagttctctagatgattttgaaaattgttcactaaggaagtttcaggatgaaaatgcatatacttcctttg

SEQ ID NO: 141150 - DNA, 120 bp, Artificial Sequence
  ENSG00000104237_96 (sequence is synthesized)
atatggaagaaccacggacttctgaagaaccaggctcaataaccaacagcatgacatcaagtgaaagaaacatttcagaattggaatcttttgaagaattagaaaaccatgacactgata

SEQ ID NO: 141151 - DNA, 120 bp, Artificial Sequence
  ENSG00000104237_97 (sequence is synthesized)
tctttaatacagtggtaaatggaggagagcaagccactgaagaattaatccaagaagaggtagaggctagtaaaactttagaattgatagacatctctagtaagaatattatggaagaaa

SEQ ID NO: 141152 - DNA, 120 bp, Artificial Sequence
  ENSG00000104237_98 (sequence is synthesized)
aaagaatgaacggtataatttatgaaataatcagtaagaggctggcaacaccaccatctttagatttttgctatgattctaagcaaaatagtgaaaaggagaccaatgaaggagaaacta

SEQ ID NO: 141153 - DNA, 120 bp, Artificial Sequence
  ENSG00000104237_99 (sequence is synthesized)
agatggtaaaaatgatggtgaaaactatggaaactggaagttattcagagtcctctcctgatttaaaaaaatgcatcaaaagtccagtgacttctgattggtcagactatcggcctgaca

SEQ ID NO: 141154 - DNA, 120 bp, Artificial Sequence
  ENSG00000104237_100 (sequence is synthesized)
gtgacagtgagcagccatataaaacatccagtgatgatcccaatgacagtggcgaacttacccaagagaaagaatataacataggatttgttaaaagggcaatagaaaaactgtacggta

SEQ ID NO: 141155 - DNA, 120 bp, Artificial Sequence
  ENSG00000104237_101 (sequence is synthesized)
aagcagatattatcaaaccatctttttttcctgggtctacccgcaaatctcaggtttgtccttataattctgtggaatttcagtgttccaggaaagcaagtctttatgattctgaagggc

SEQ ID NO: 141156 - DNA, 120 bp, Artificial Sequence
  ENSG00000104237_102 (sequence is synthesized)
agtcatttggctcttctgaacaggtatctagtagttcatctatgttgcaggaattccaggaggaaagacaagataagtgtgatgttagtgctgtgagggacaattattgtaggggtgaca

SEQ ID NO: 141157 - DNA, 120 bp, Artificial Sequence
  ENSG00000104237_103 (sequence is synthesized)
ttgtagaacctggtacaaaacaaaatgatgatagcagaatcctcacagacatagaggaaggagtactgattgacaaaggcaaatggcttctgaaagaaaatcatttgctaaggatgtcat

SEQ ID NO: 141158 - DNA, 120 bp, Artificial Sequence
  ENSG00000104237_104 (sequence is synthesized)
ctgaaaatcctggcatgtgtggcaatgcagacaccacatcagtggacaccctacttgataataacagcagtgaggtaccatattcacattttggtaatttggccccaggcccaacgatgg

SEQ ID NO: 141159 - DNA, 120 bp, Artificial Sequence
  ENSG00000104237_105 (sequence is synthesized)
atgaactctcctcttcagaactcgaggaactgactcaaccccttgaactaaaatgcaattactttaacatgcctcatggtagtgactcagaaccttttcatgaggacttgctggatgttc

SEQ ID NO: 141160 - DNA, 120 bp, Artificial Sequence
  ENSG00000104237_106 (sequence is synthesized)
gcaatgaaacctgtgccaaggaaagaatagcaaatcatcatacagaggagaagggtagtcatcagtcagaaagagtatgcacatctgtcactcattcctttatttctgctggtaacaaag

SEQ ID NO: 141161 - DNA, 120 bp, Artificial Sequence
  ENSG00000104237_107 (sequence is synthesized)
tctaccctgtctctgatgatgctattaaaaaccaaccattgcctggcagtaatatgattcatggtacacttcaggaagctgactctttggataaactgtatgctctttgtggtcaacatt

SEQ ID NO: 141162 - DNA, 120 bp, Artificial Sequence
  ENSG00000104237_108 (sequence is synthesized)
gcccaatactaactgttattatccaacccatgaatgaggaagaccgaggatttgcatatcgcaaagaatctgatattgaaaatttcttgggtttttatttatggatgaaaatacacccat

SEQ ID NO: 141163 - DNA, 120 bp, Artificial Sequence
  ENSG00000104237_109 (sequence is synthesized)
atttacttcagacagacaaaaatgtgttcagggaagagaacaataaagcaagtatgagacaaaatcttattgataatgccattggtgatatatttgatcagttttatttcagtaacacat

SEQ ID NO: 141164 - DNA, 120 bp, Artificial Sequence
  ENSG00000104237_110 (sequence is synthesized)
ttgacttgatgggtaaaagaagaaaacaaaaaagaattaacttcttggggttagaggaagaaggtaatttaaagaaatttcaaccagatttgaaggaaaggttttgtatgaatttcttgc

SEQ ID NO: 141165 - DNA, 120 bp, Artificial Sequence
  ENSG00000104237_111 (sequence is synthesized)
acacatcattgttagttgtgggtaatgtggattcaaatacacaagacctcagcggtcagacaaatgaaatctttaaagcagtcgatgagaataacaacttattaaataacagattccagg

SEQ ID NO: 141166 - DNA, 120 bp, Artificial Sequence
  ENSG00000104237_112 (sequence is synthesized)
gctcaagaacaaatctcaaccaagtagtaagagaaaatatcaactgtcattacttctttgaaatgcttggtcaagcttgcctcttagatatttgccaagttgagacctccttaaatatta

SEQ ID NO: 141167 - DNA, 120 bp, Artificial Sequence
  ENSG00000104237_113 (sequence is synthesized)
gcaacagaaatattttagaactttgtatgtttgagggtgaaaatcttttcatttgggaagaggaagacatattaaatttaactgatcttgaaagcagtagagaacaagaagatttataat

SEQ ID NO: 141168 - DNA, 120 bp, Artificial Sequence
  ENSG00000104237_114 (sequence is synthesized)
ttcaatatcagcacactcattctttgtcaattcattttttcccatgagatgaagcacatgtgacgaatacggactagataacctctaagaattttccacttcttcaaaatgaacttactc

SEQ ID NO: 141169 - DNA, 120 bp, Artificial Sequence
  ENSG00000104237_115 (sequence is synthesized)
tagaaagcttacccttggataaccagtttgactttcataatgtctctgttttttgtttttccaacaattacagactcaggttctcttattttggaagtttctatctggttttgttctgaa

SEQ ID NO: 141170 - DNA, 120 bp, Artificial Sequence
  ENSG00000104237_116 (sequence is synthesized)
cttacattttttttttttttggtatctatgattttttttgctcagggcatcaaaatgtgctaaggacaagaattatatcctttttaaaaaatgttgttagcttggtgtaaaatgtatatt

SEQ ID NO: 141171 - DNA, 120 bp, Artificial Sequence
  ENSG00000104237_117 (sequence is synthesized)
gactgtattggtgaataaattgaatagacataacctcaaagtacttcacttattctttttaactactgatttgataaaaagtatgattataagatatccacgacaatctcatagtttctt

SEQ ID NO: 141172 - DNA, 120 bp, Artificial Sequence
  ENSG00000104237_118 (sequence is synthesized)
acagaccttgaagtccacagtgaaggcagattgagtgtctggtgagggcttgcttatggctcctgagtgggaccttcttgttatgtcctcgcgtggaaaaggaacactctggttgcttcg

SEQ ID NO: 141173 - DNA, 120 bp, Artificial Sequence
  ENSG00000104237_119 (sequence is synthesized)
gacacttgaagaaaagtgaaaaccatcttgataggttttagaatgagattttcatgagagccaatgcaatgtccatgcttgtttatgacatatttgaagtgcttaaaggaaatatccatg

SEQ ID NO: 141174 - DNA, 120 bp, Artificial Sequence
  ENSG00000104237_120 (sequence is synthesized)
gattatcaggattttaaaaagtcatttgtgttgtcaaactctctaatgcacaatattggagtgccaccacaaagtcagctaaaatatgctaaaggtgtgaaaagacatactatagtttta

SEQ ID NO: 141175 - DNA, 120 bp, Artificial Sequence
  ENSG00000104237_121 (sequence is synthesized)
gtttacattttcctgatgaacaaataagtgaagatcttctcagcctttgttgtagagttgaactgctgcaatcctcctctgtctgcagccccagggacttccaactctggttttatctcc

SEQ ID NO: 141176 - DNA, 120 bp, Artificial Sequence
  ENSG00000104237_122 (sequence is synthesized)
acactgggccttcagcaattcatcaaaaatttctagctgaatcttcttattggcttatatggcacctgatggcatctacatctgttccaggttcatattctaaagagagcaggcactgag

SEQ ID NO: 141177 - DNA, 120 bp, Artificial Sequence
  ENSG00000104237_123 (sequence is synthesized)
tcacttagtgctctatctgctcttccacactctccaacatgacgtcaccggtttataagtgagaagcaggtcacaggtccctaaggtttctgcgagggaggcaagcgttgcgcagtggtt

SEQ ID NO: 141178 - DNA, 120 bp, Artificial Sequence
  ENSG00000104237_124 (sequence is synthesized)
cagaacacctgctgcacgggttcatcccgtgcaccttctctcacctaagtttctgtttctatatctgtaggttgggaataatgctgtggctgtgtaaggccacaacacacagtgcttagc

SEQ ID NO: 141179 - DNA, 120 bp, Artificial Sequence
  ENSG00000104237_125 (sequence is synthesized)
acattgtgagcactcaacgtagaaacagatcttatttgctctaggtctgacaggcctagagcttgtcatccaagcaggagacccacatggcctgcagcacatttagggccatctctatgt

SEQ ID NO: 141180 - DNA, 120 bp, Artificial Sequence
  ENSG00000104237_126 (sequence is synthesized)
caatagcatccaatggctttaggtggggcctggactggagcctccatgttgggggtgcaggcagggggcatgttctctcactcccctcggcattggagacaggtgccactttgcaggctc

SEQ ID NO: 141181 - DNA, 120 bp, Artificial Sequence
  ENSG00000104267_0 (sequence is synthesized)
acacagtgcaggcgcccaagccgccgccgccagatcggtgccgattcctgccctgccccgaccgccagcgcgaccatgtcccatcactgggggtacggcaaacacaacggacctgagcac

SEQ ID NO: 141182 - DNA, 120 bp, Artificial Sequence
  ENSG00000104267_1 (sequence is synthesized)
tggcataaggacttccccattgccaagggagagcgccagtcccctgttgacatcgacactcatacagccaagtatgacccttccctgaagcccctgtctgtttcctatgatcaagcaact

SEQ ID NO: 141183 - DNA, 120 bp, Artificial Sequence
  ENSG00000104267_2 (sequence is synthesized)
tccctgaggatcctcaacaatggtcatgctttcaacgtggagtttgatgactctcaggacaaagcagtgctcaagggaggacccctggatggcacttacagattgattcagtttcacttt

SEQ ID NO: 141184 - DNA, 120 bp, Artificial Sequence
  ENSG00000104267_3 (sequence is synthesized)
cactggggttcacttgatggacaaggttcagagcatactgtggataaaaagaaatatgctgcagaacttcacttggttcactggaacaccaaatatggggattttgggaaagctgtgcag

SEQ ID NO: 141185 - DNA, 120 bp, Artificial Sequence
  ENSG00000104267_4 (sequence is synthesized)
caacctgatggactggccgttctaggtatttttttgaaggttggcagcgctaaaccgggccttcagaaagttgttgatgtgctggattccattaaaacaaagggcaagagtgctgacttc

SEQ ID NO: 141186 - DNA, 120 bp, Artificial Sequence
  ENSG00000104267_5 (sequence is synthesized)
actaacttcgatcctcgtggcctccttcctgaatccttggattactggacctacccaggctcactgaccacccctcctcttctggaatgtgtgacctggattgtgctcaaggaacccatc

SEQ ID NO: 141187 - DNA, 120 bp, Artificial Sequence
  ENSG00000104267_6 (sequence is synthesized)
cgtcagcagcgagcaggtgttgaaattccgtaaacttaacttcaatggggagggtgaacccgaagaactgatggtggacaactggcgcccagctcagccactgaagaacaggcaaatcaa

SEQ ID NO: 141188 - DNA, 120 bp, Artificial Sequence
  ENSG00000104267_7 (sequence is synthesized)
agcttccttcaaataagatggtcccatagtctgtatccaaataatgaatcttcgggtgtttccctttagctaagcacagatctaccttggtgatttggaccctggttgctttgtgtctag

SEQ ID NO: 141189 - DNA, 120 bp, Artificial Sequence
  ENSG00000104267_8 (sequence is synthesized)
ttttctagacccttcatctcttacttgatagacttactaataaaatgtgaagactagaccaattgtcatgcttgacacaactgctgtggctggttggtgctttgtttatggtagtagttt

SEQ ID NO: 141190 - DNA, 120 bp, Artificial Sequence
  ENSG00000104267_9 (sequence is synthesized)
ttctgtaacacagaatataggataagaaataagaataaagtaccttgactttgttcacagcatgtagggtgatgagcactcacaattgttgactaaaatgctgcttttaaaacataggaa

SEQ ID NO: 141191 - DNA, 120 bp, Artificial Sequence
  ENSG00000104267_10 (sequence is synthesized)
agtagaatggttgagtgcaaatccatagcacaagataaattgagctagttaaggcaaatcaggtaaaatagtcatgattctatgtaatgtaaaccagaaaaaataaatgttcatgatttc

SEQ ID NO: 141192 - DNA, 120 bp, Artificial Sequence
  ENSG00000104267_11 (sequence is synthesized)
aaagaatgaccagacagagtatttgtaacatacaggacattctacaaaagagcttaggaaatgcctttgtccctgaaatgttttcaagtttatctcctcctttcatatctgctagttgca

SEQ ID NO: 141193 - DNA, 120 bp, Artificial Sequence
  ENSG00000104267_12 (sequence is synthesized)
gttgatatttagcattaatttcaaaagcttaatttgtaaattcaactcacgcccagtgaaccacttcttttacaaaggaccttcacatttgctttttataacctttaattgtgacatcat

SEQ ID NO: 141194 - DNA, 120 bp, Artificial Sequence
  ENSG00000104290_0 (sequence is synthesized)
gcgcgcgccggcgttcctcggccgctccgggtacctgagggacgcgcggccgcccgcggcaggcggtgcagcccccccaccccttggagccaggcgccggggtctgaggatagcatttct

SEQ ID NO: 141195 - DNA, 120 bp, Artificial Sequence
  ENSG00000104290_1 (sequence is synthesized)
ccggggtctgaggatagcatttctcaagacctgacttatggagcacttgtaacctgagatatttcagttgaaggaagaaatagctcttctcctaagatggaatctgtggtttgggaatgt

SEQ ID NO: 141196 - DNA, 120 bp, Artificial Sequence
  ENSG00000104290_2 (sequence is synthesized)
ggttgatcaacttgatatgttggccaaatgtgccccatgtaataaaatgaaaagaagagacaagatgatgtcattttcccatattgtgaaaccaaaaacaaacgccttttgtgagaccaa

SEQ ID NO: 141197 - DNA, 120 bp, Artificial Sequence
  ENSG00000104290_3 (sequence is synthesized)
gctaacaaacctctgacggtgcgaagagtatttaactgtttgaagaatttaacagtaagatacagaagaagtaccttcgagctgagacctgcaggtgtataaatatctaaaatacatatt

SEQ ID NO: 141198 - DNA, 120 bp, Artificial Sequence
  ENSG00000104290_4 (sequence is synthesized)
gaataggcctgatcatctgaatctccttcagacccaggaaggatggctatgacttggattgtcttctctctttggcccttgactgtgttcatggggcatataggtgggcacagtttgttt

SEQ ID NO: 141199 - DNA, 120 bp, Artificial Sequence
  ENSG00000104290_5 (sequence is synthesized)
tcttgtgaacctattaccttgaggatgtgccaagatttgccttataatactaccttcatgcctaatcttctgaatcattatgaccaacagacagcagctttggcaatggagccattccac

SEQ ID NO: 141200 - DNA, 120 bp, Artificial Sequence
  ENSG00000104290_6 (sequence is synthesized)
cctatggtgaatctggattgttctcgggatttccggccttttctttgtgcactctacgctcctatttgtatggaatatggacgtgtcacacttccctgtcgtaggctgtgtcagcgggct

SEQ ID NO: 141201 - DNA, 120 bp, Artificial Sequence
  ENSG00000104290_7 (sequence is synthesized)
tacagtgagtgttcgaagctcatggagatgtttggtgttccttggcctgaagatatggaatgcagtaggttcccagattgtgatgagccatatcctcgacttgtggatctgaatttagct

SEQ ID NO: 141202 - DNA, 120 bp, Artificial Sequence
  ENSG00000104290_8 (sequence is synthesized)
ggagaaccaactgaaggagccccagtggcagtgcagagagactatggtttttggtgtccccgagagttaaaaattgatcctgatctgggttattcttttctgcatgtgcgtgattgttca

SEQ ID NO: 141203 - DNA, 120 bp, Artificial Sequence
  ENSG00000104290_9 (sequence is synthesized)
cctccttgtccaaatatgtacttcagaagagaagaactgtcatttgctcgctatttcataggattgatttcaatcatttgcctctcggccacattgtttacttttttaacttttttgatt

SEQ ID NO: 141204 - DNA, 120 bp, Artificial Sequence
  ENSG00000104290_10 (sequence is synthesized)
gatgtcacaagattccgttatcctgaaaggcctattatattttatgcagtctgctacatgatggtatccttaattttcttcattggatttttgcttgaagatcgagtagcctgcaatgca

SEQ ID NO: 141205 - DNA, 120 bp, Artificial Sequence
  ENSG00000104290_11 (sequence is synthesized)
tccatccctgcacaatataaggcttccacagtgacacaaggatctcataataaagcctgtaccatgctttttatgatactctatttttttactatggctggcagtgtatggtgggtaatt

SEQ ID NO: 141206 - DNA, 120 bp, Artificial Sequence
  ENSG00000104290_12 (sequence is synthesized)
cttaccatcacatggtttttagcagctgtgccaaagtggggtagtgaagctattgagaagaaagcattgctgtttcacgccagtgcatggggcatccccggaactctaaccatcatcctt

SEQ ID NO: 141207 - DNA, 120 bp, Artificial Sequence
  ENSG00000104290_13 (sequence is synthesized)
ttagcgatgaataaaattgaaggtgacaatattagtggcgtgtgttttgttggcctctacgatgttgatgcattgagatattttgttcttgctcccctctgcctgtatgtggtagttggg

SEQ ID NO: 141208 - DNA, 120 bp, Artificial Sequence
  ENSG00000104290_14 (sequence is synthesized)
gtttctctcctcttagctggcattatatccctaaacagagttcgaattgagattccattagaaaaggagaaccaagataaattagtgaagtttatgatccggatcggtgttttcagcatt

SEQ ID NO: 141209 - DNA, 120 bp, Artificial Sequence
  ENSG00000104290_15 (sequence is synthesized)
ctttatctcgtaccactcttggttgtaattggatgctacttttatgagcaagcttaccggggcatctgggaaacaacgtggatacaagaacgctgcagagaatatcacattccatgtcca

SEQ ID NO: 141210 - DNA, 120 bp, Artificial Sequence
  ENSG00000104290_16 (sequence is synthesized)
tatcaggttactcaaatgagtcgtccagacttgattctctttctgatgaaatacctgatggctctcatagttggcattccctctgtattttgggttggaagcaaaaagacatgctttgaa

SEQ ID NO: 141211 - DNA, 120 bp, Artificial Sequence
  ENSG00000104290_17 (sequence is synthesized)
tgggccagtttttttcatggtcgtaggaaaaaagagatagtgaatgagagccgacaggtactccaggaacctgattttgctcagtctctcctgagggatccaaatactcctatcataaga

SEQ ID NO: 141212 - DNA, 120 bp, Artificial Sequence
  ENSG00000104290_18 (sequence is synthesized)
aagtcaaggggaacttccactcaaggaacatccacccatgcttcttcaactcagctggctatggtggatgatcaaagaagcaaagcaggaagcatccacagcaaagtgagcagctaccac

SEQ ID NO: 141213 - DNA, 120 bp, Artificial Sequence
  ENSG00000104290_19 (sequence is synthesized)
ggcagcctccacagatcacgtgatggcaggtacacgccctgcagttacagaggaatggaggagagactacctcatggcagcatgtcacgactaacagatcactccaggcatagtagttct

SEQ ID NO: 141214 - DNA, 120 bp, Artificial Sequence
  ENSG00000104290_20 (sequence is synthesized)
catcggctcaatgaacagtcacgacatagcagcatcagagatctcagtaataatcccatgactcatatcacacatggcaccagcatgaatcgggttattgaagaagatggaaccagtgct

SEQ ID NO: 141215 - DNA, 120 bp, Artificial Sequence
  ENSG00000104290_21 (sequence is synthesized)
taatttgtcttgtctaaggtggaaatcttgtgctgtttaaaaagcagattttattctttgccttttgcatgactgatagctgtaactcacagttaacatgctttcagtcaagtacagatt

SEQ ID NO: 141216 - DNA, 120 bp, Artificial Sequence
  ENSG00000104290_22 (sequence is synthesized)
gtgtccactggaaaggtaaatgattgcttttttatattgcatcaaacttggaacatcaaggcatccaaaacactaagaattctatcatcacaaaaataattcgtctttctaggttatgaa

SEQ ID NO: 141217 - DNA, 120 bp, Artificial Sequence
  ENSG00000104290_23 (sequence is synthesized)
gagataattatttgtctggtaagcatttttataaacccactcattttatatttagaaaaatcctaaatgtgtggtgactgctttgtagtgaactttcatatactataaactagttgtgag

SEQ ID NO: 141218 - DNA, 120 bp, Artificial Sequence
  ENSG00000104290_24 (sequence is synthesized)
ataacattctggtagctcagttaataaaacaatttcagaattaaagaaattttctatgcaaggtttacttctcagatgaacagtaggactttgtagttttatttccactaagtgaaaaaa

SEQ ID NO: 141219 - DNA, 120 bp, Artificial Sequence
  ENSG00000104290_25 (sequence is synthesized)
gaactgtgtttttaaactgtaggagaatttaataaatcagcaagggtattttagctaatagaataaaagtgcaacagaagaatttgattagtctatgaaaggttctcttaaaattctatc

SEQ ID NO: 141220 - DNA, 120 bp, Artificial Sequence
  ENSG00000104290_26 (sequence is synthesized)
gaaataatcttcatgcagagatattcagggtttggattagcagtggaataaagagatgggcattgtttcccctataattgtgctgtttttataacttttgtaaatattactttttctggc

SEQ ID NO: 141221 - DNA, 120 bp, Artificial Sequence
  ENSG00000104290_27 (sequence is synthesized)
tgtgtttttataacttatccatatgcatgatggaaaaattttaatttgtagccatcttttcccatgtaatagtattgattcatagagaacttaatgttcaaaatttgctttgtggaggca

SEQ ID NO: 141222 - DNA, 120 bp, Artificial Sequence
  ENSG00000104290_28 (sequence is synthesized)
tgtaataagataaacatcatacattataaggtaaccacaattacaaaatggcaaaacattttctctgtattcattgttgtatttttctacagtgagatgtgatcttgccaaagccaccag

SEQ ID NO: 141223 - DNA, 120 bp, Artificial Sequence
  ENSG00000104290_29 (sequence is synthesized)
accttggcttccaggccctcctgtagtgagttgattgtctgcacttgccttgcccaatagccagtaggctacagcttttgccccacacccttattttcagattctggatcattcttgttt

SEQ ID NO: 141224 - DNA, 120 bp, Artificial Sequence
  ENSG00000104290_30 (sequence is synthesized)
acaactgaaatatatataacctcagtccaaagtggtgattgatttgagtatttgaaaattgttgtagctaaatgaagcatgattagtcttagtatgaatatcatttaatctttaaaaaat

SEQ ID NO: 141225 - DNA, 120 bp, Artificial Sequence
  ENSG00000104290_31 (sequence is synthesized)
caagtaaaaatgtttatctgataatgtttaaataatttacaatataaactgtaaaacttattaggcatgaaatcaatcagaagagaaagaaaaatgctggaacatgcttgatgtattatg

SEQ ID NO: 141226 - DNA, 120 bp, Artificial Sequence
  ENSG00000104290_32 (sequence is synthesized)
taaaaagcatatttaaacaagggtcctcaaccctgactgcagataagaatcacttgggttacttcagatgcctaacaccttcctctcatacaaataagaattggtagctttcttaaaaaa

SEQ ID NO: 141227 - DNA, 120 bp, Artificial Sequence
  ENSG00000104290_33 (sequence is synthesized)
aaaaaaaaaaaaaaaaagcgctccaggtgattctaatctgcagcctggcttgaaactcactactttaacttgcccctgatgatctgtcggcatcatatatcacatgaacatccacatgga

SEQ ID NO: 141228 - DNA, 120 bp, Artificial Sequence
  ENSG00000104290_34 (sequence is synthesized)
ttctgtctttcgcttttatatcattatctaatattcagttgttctgcacctgatgccaaattctgggctgtactcctagagagacttactcagtaaggccaaagtgataggactttaaaa

SEQ ID NO: 141229 - DNA, 120 bp, Artificial Sequence
  ENSG00000104290_35 (sequence is synthesized)
tctgtagttataaaaataccgcaggtgattcttacggaggtaatccaagaatcatactttgaagaattattctagactctgaagaggcctggctctgccttatgctattatagtttatga

SEQ ID NO: 141230 - DNA, 120 bp, Artificial Sequence
  ENSG00000104290_36 (sequence is synthesized)
cctttaacaatttaactctccgagcctcagttcccttgtttgtaaatgaagatagaagataaatacgtactctacctacctcacaaagctgtcagattaagatcaagtgaaaaaaattat

SEQ ID NO: 141231 - DNA, 120 bp, Artificial Sequence
  ENSG00000104290_37 (sequence is synthesized)
gtgaaagctctttgaaaactgtaaagcattatgaatgataagggattaggttattgtggatttaagaggtgtgaggactgctatagtacattccttgacgtgtgttgaattcatgtatac

SEQ ID NO: 141232 - DNA, 120 bp, Artificial Sequence
  ENSG00000104290_38 (sequence is synthesized)
tttctttcttaccctttaaaacaaactgccaagaaattaggtgttgaaaaagaatattctcatcaggcagcaaagtcagttttctgatagtaataatttgtctattatgttatatatttc

SEQ ID NO: 141233 - DNA, 120 bp, Artificial Sequence
  ENSG00000104290_39 (sequence is synthesized)
aaagtacatgtatgataatatgacttattcttcatgagagatatttgaatatttggcccaaaatgtttttcatttttctctgtgttcattgcctttctccttggagctggagttaatgct

SEQ ID NO: 141234 - DNA, 120 bp, Artificial Sequence
  ENSG00000104290_40 (sequence is synthesized)
caaagcaggcaggtctgaattccctcataaccgacaattagtaaacattttctctgaaagccaaacatataacaacttatttatcaataattcatgaagcttttgtctgagaatctctcc

SEQ ID NO: 141235 - DNA, 120 bp, Artificial Sequence
  ENSG00000104290_41 (sequence is synthesized)
tgcaaacagcatgagagaactaaaacaaacattcacaaacaaaaataagttaaaatagaaggtaccagtttgggctcgaagatgttgtcatccattgccatctgcattatattatcaact

SEQ ID NO: 141236 - DNA, 120 bp, Artificial Sequence
  ENSG00000104290_42 (sequence is synthesized)
gccaaaatgttaattggttttcttttacaagtgggccaagtatagacagttaagtgaacatcactatgaaaatcttaactttgtgcttctagatttttagataatcatttgtattttctc

SEQ ID NO: 141237 - DNA, 120 bp, Artificial Sequence
  ENSG00000104290_43 (sequence is synthesized)
tattaaattgtgggtatgtatgggaatactatattgacttttcagttactttcagtaagtatcttaattttgtcccacaaaatttatgtaatattaatccatggttttaaacaacagtat

SEQ ID NO: 141238 - DNA, 120 bp, Artificial Sequence
  ENSG00000104290_44 (sequence is synthesized)
tcagtttgggcagcagttttaagtctaactagcttaaaccaatctgaataagtctggacagttttcctaccatatgtttaactttgattggcatatgataatgtttagtgttttcttttt

SEQ ID NO: 141239 - DNA, 120 bp, Artificial Sequence
  ENSG00000104290_45 (sequence is synthesized)
tcagttgacaactgagaaaataatagttctctctaacatgttaatatattatcaaaaggttttcaaaaagtactttgatttcagcaactttttttattcaataactagacaaaagatcta

SEQ ID NO: 141240 - DNA, 120 bp, Artificial Sequence
  ENSG00000104290_46 (sequence is synthesized)
agataatattaaactcaaaacagtttgtttcaaagaacaattggttaataactcagctggcacagggattcatacacagtttttcaataaatatttaaatgaacaattcatgtcacacaa

SEQ ID NO: 141241 - DNA, 120 bp, Artificial Sequence
  ENSG00000104290_47 (sequence is synthesized)
cttgcttttaccctagtactgagtctcacatcaaagaaatttgaaagatctataacctatgtgaaatgaagtctctgctttaccagaataatatgtggcaggtaataaatatgtaaagta

SEQ ID NO: 141242 - DNA, 120 bp, Artificial Sequence
  ENSG00000104290_48 (sequence is synthesized)
caccaaatgaaacatattttgcatagataacagtccatatcactattataattaaagaaatatatgtacagacatgtaccaatccttttaattaattttagaagatgaacagtgattctt

SEQ ID NO: 141243 - DNA, 120 bp, Artificial Sequence
  ENSG00000104290_49 (sequence is synthesized)
agaagtgagtaattagactccttttagtcttatgctgttagatctttgtggaccagctgagtaaatgaatcttcaaatcaacctttctttttctgctgctcttagagcagatttataaaa

SEQ ID NO: 141244 - DNA, 120 bp, Artificial Sequence
  ENSG00000104290_50 (sequence is synthesized)
atcctaagaatgtcttcaaattagaaaaatttactacattttaacctacctcatcagtttctttgtgataatagctgaaaataactcaaactgtacccatcttagttaggctatatctct

SEQ ID NO: 141245 - DNA, 120 bp, Artificial Sequence
  ENSG00000104290_51 (sequence is synthesized)
gtgaaatgaaaggaaccacttaattttttttatataaattagtgaatcatttgctggagcttagaaaatattaacataccaaaatttcattatgatgatatttatattgctttttgacat

SEQ ID NO: 141246 - DNA, 120 bp, Artificial Sequence
  ENSG00000104290_52 (sequence is synthesized)
gccaaaggtacatttacatattaccatatttggatgacttacatagtctggtgtaatgaaaattcccctgggattggaattttaagactcatgatgtcaactgggctggtcattttattt

SEQ ID NO: 141247 - DNA, 120 bp, Artificial Sequence
  ENSG00000104290_53 (sequence is synthesized)
ctctgagtctttgtttcttcaatgtaaaatgtggataaggtaatttttggttttagcctccctcactggatattgtaaggatcaaatgaaatagtatttattataatgctctgtaaccca

SEQ ID NO: 141248 - DNA, 120 bp, Artificial Sequence
  ENSG00000104290_54 (sequence is synthesized)
agggtcttgctctgtcacacaggctggagagcagtggcataatcatagttcattataaccttgaactcctaggctcaagcagtcctccagcttcagcctcccaagtagctaagactgtag

SEQ ID NO: 141249 - DNA, 90 bp, Artificial Sequence
  ENSG00000104290_55 (sequence is synthesized)
atagttcattataaccttgaactcctaggctcaagcagtcctccagcttcagcctcccaagtagctaagactgtaatttttttttctttt

SEQ ID NO: 141250 - DNA, 60 bp, Artificial Sequence
  ENSG00000104290_56 (sequence is synthesized)
acatccagctagtttttgtatttttagtggagatggagttttgccatgttggtctcaaac

SEQ ID NO: 141251 - DNA, 77 bp, Artificial Sequence
  ENSG00000104290_57 (sequence is synthesized)
gattacaggcatgagtcactgcacctggcttaattttaatttttttaattttttgtagagatgctaaagcactggga

SEQ ID NO: 141252 - DNA, 120 bp, Artificial Sequence
  ENSG00000104290_58 (sequence is synthesized)
aagcatgagccaccatgcctgatccataaattgttctactgataccatttggttttgttagaatttgggggggctatagaaaacaaggttacagtcttcattagtatttctttttagcaa

SEQ ID NO: 141253 - DNA, 120 bp, Artificial Sequence
  ENSG00000104290_59 (sequence is synthesized)
taacaacaaaataggcaattagaccagtgttcatttggtacagtctttaaatcggtcatccaattaacctttaaaaagtaggttatgctcttaaattgtattggttctttaatatgtgtt

SEQ ID NO: 141254 - DNA, 120 bp, Artificial Sequence
  ENSG00000104290_60 (sequence is synthesized)
ataccagagtatgcctcaaattttatgtagttgaatttgtagaacaaatttggggatattcattttatttttccttttatatgaaattgtataagtacattagcttgacttaaattataa

SEQ ID NO: 141255 - DNA, 120 bp, Artificial Sequence
  ENSG00000104290_61 (sequence is synthesized)
aaaaaaatatatatgaagaagaatgtagaccctataatgttttttgtctttgactttttggcttttatgtacctcattttttctgattgagaaaaagttttgaaaaagtgattcacttgt

SEQ ID NO: 141256 - DNA, 120 bp, Artificial Sequence
  ENSG00000104290_62 (sequence is synthesized)
tggttttcattgtggcaaaactttaaattttaagtcatcacactatgagaattgtttgtacacatttataatttttttaaagtatgtaaagtaaggattttttctccattcttcactcac

SEQ ID NO: 141257 - DNA, 120 bp, Artificial Sequence
  ENSG00000104290_63 (sequence is synthesized)
aaaggatagcatttttatggaacctagatttacaaaggaacttgtgattcttttcaatgcttttgtgtcgttttacagctgattaagaaaaaatgtttacatttaattcagctgtatttc

SEQ ID NO: 141258 - DNA, 120 bp, Artificial Sequence
  ENSG00000104290_64 (sequence is synthesized)
ctagtagctgtataatcttacacattattcttatataattttgacctattttatatgaaaataattgtattggcatctcttcataatttaattctcttctctccttcttttgttccgatt

SEQ ID NO: 141259 - DNA, 120 bp, Artificial Sequence
  ENSG00000104290_65 (sequence is synthesized)
agatgaatttgggaaaggagtaggaagactaggtatcgcatgccttccgtctgattgtaatcagtctcctgggttttttactaatttaatcttaatcctgtgcttctttagtcatcaaat

SEQ ID NO: 141260 - DNA, 120 bp, Artificial Sequence
  ENSG00000104290_66 (sequence is synthesized)
tgatataggattacaattttctctcaggatccaagtcttctaagaatgaaaatgttgaagtctacccagaaccagccatccttgtagacatttctatttggttgatttataaagatttaa

SEQ ID NO: 141261 - DNA, 120 bp, Artificial Sequence
  ENSG00000104290_67 (sequence is synthesized)
tatataaagatttaatatgagttaaacatgtttcttattctgtgatctctaattagaaagtaaaattctgttgccataaatataaaagaaagttttcacttatattttagtcaaacacca

SEQ ID NO: 141262 - DNA, 120 bp, Artificial Sequence
  ENSG00000104290_68 (sequence is synthesized)
aaccactgcattacttacttcctataagacacagtagttcaatctgttgaaaggcattgaaggataatttccttcagattactttttaaatcatcatctgcctcaggaaattctttcttg

SEQ ID NO: 141263 - DNA, 120 bp, Artificial Sequence
  ENSG00000104290_69 (sequence is synthesized)
aatttttttgttggtgtgaaagcgttgcttatactttatgctcattttattggtcactgtcaccagtttttcccgataaagattaaaaatgttttttaccttgaaataattcagattttg

SEQ ID NO: 141264 - DNA, 120 bp, Artificial Sequence
  ENSG00000104290_70 (sequence is synthesized)
aagattcactgtttcattattttgctaattaccattaactagtaaagttagtttttaaagtttttttaaggttgatattttatcatattcctggagtaggatggattactttattattat

SEQ ID NO: 141265 - DNA, 120 bp, Artificial Sequence
  ENSG00000104290_71 (sequence is synthesized)
tgtagctttaaggttttttgttgtataagtcagcttgtttgtatatgctaaattgcagatatttctttgtgttgtgcttattggtttttttttttaacttagagcttaataatttctatt

SEQ ID NO: 141266 - DNA, 120 bp, Artificial Sequence
  ENSG00000104290_72 (sequence is synthesized)
ttctatcctggagtctaaaattaaacaaaaaaatctattttctaaattggcaggatttttttaatgattagtaaaactgtattattttatttttaaaaatacaataggattttgagtcag

SEQ ID NO: 141267 - DNA, 120 bp, Artificial Sequence
  ENSG00000104290_73 (sequence is synthesized)
gaaacttgacttctactcttgcctctcttttgcagttagctgtgtaactttggataaggcattttatctcgtggtgcctccatttttctcattctctagggaacaagagaattagtttag

SEQ ID NO: 141268 - DNA, 120 bp, Artificial Sequence
  ENSG00000104290_74 (sequence is synthesized)
gtagcgtctaaaattccgcccagctctcatttggttctcatttgaccattttataatcattattttggtctcatttttattcttcttattcatcccatgaactagatcaacttgtattat

SEQ ID NO: 141269 - DNA, 120 bp, Artificial Sequence
  ENSG00000104290_75 (sequence is synthesized)
tttactagatcaacctgtattattaacgtcatttacatgtaaattgatgggattcagatattttatcaactgtttttccattagtgattttaagtaattttaaagaaggaaaattatatt

SEQ ID NO: 141270 - DNA, 120 bp, Artificial Sequence
  ENSG00000104290_76 (sequence is synthesized)
acagataataaaaatgaaagaaagttataaatattggacatggcttttttaaatgggaaagtcttcttaagcaccaatataagcaccttaaattgatacatagaaaagaatgacataacg

SEQ ID NO: 141271 - DNA, 120 bp, Artificial Sequence
  ENSG00000104290_77 (sequence is synthesized)
ttttgtggtctttgttctcttaaatatgaatatagctagttagcctaaaatttacacaaaatgtattcaagatcaaattagtgaacaaagcaatggttcgtatggctaatttaaaagcaa

SEQ ID NO: 141272 - DNA, 120 bp, Artificial Sequence
  ENSG00000104290_78 (sequence is synthesized)
gcaattcaatttaccaatattaaaataattataaaatgtaaaagaaatttcagaggagttgattgaaaattttttgttcagtaattattcttaaactgcattcttaggtttattacataa

SEQ ID NO: 141273 - DNA, 120 bp, Artificial Sequence
  ENSG00000104290_79 (sequence is synthesized)
agttgccagattgccatgggcaagtgaatgtcttcatttgaaatattattagagatcaatgtggcttgttatttttaatttttttctggctatacagaaaatgtttctggaaaaattcct

SEQ ID NO: 141274 - DNA, 69 bp, Artificial Sequence
  ENSG00000104290_80 (sequence is synthesized)
tttttctggctatacagaaaatgtttctggaaaaattccttaattgtcatctgatataatgtagagatt

SEQ ID NO: 141275 - DNA, 120 bp, Artificial Sequence
  ENSG00000104290_81 (sequence is synthesized)
tgcattagttccatatctccgcagagttctctggtagattaaatgttctctgtgcactaggccaaggaagttcctgttacctttgaaaatcattgtgtttgctctgattgtctacattag

SEQ ID NO: 141276 - DNA, 120 bp, Artificial Sequence
  ENSG00000104290_82 (sequence is synthesized)
ctcatatcagtcttttgaacactggttcaaatctgggtgttgggttaggatctgatgagtagagaatagtggaaagttgatataggaaggtatactggtttctggtgtgattctttagct

SEQ ID NO: 141277 - DNA, 120 bp, Artificial Sequence
  ENSG00000104290_83 (sequence is synthesized)
acatttattccttgtcttatgtcatttcactggatcatgtaactgtcctggctttcagaaattatattagatgcccagcctttctcattcagagatgcctgtattattatgttatttcga

SEQ ID NO: 141278 - DNA, 120 bp, Artificial Sequence
  ENSG00000104290_84 (sequence is synthesized)
ttgcctaccaaaaaaaaaaaaaaaagaaaaggtttgtttttagttctctgcctctgcaagtctttgtgatcacatttgttaaattgaatctgagattcaaatatttcatttaatattttc

SEQ ID NO: 141279 - DNA, 120 bp, Artificial Sequence
  ENSG00000104290_85 (sequence is synthesized)
tgggttttgataatgggatattctgtaagataaagcaagtaatcctagagtgatttactttatgtttagccatccaccattttcctatttctctactcctcccattctccatttttaaaa

SEQ ID NO: 141280 - DNA, 120 bp, Artificial Sequence
  ENSG00000104290_86 (sequence is synthesized)
ggaaattaacaaatgtcttcctttatccctgcctcagataatttttccctgaactcatcttgtcagcagaaacatttaatgtgaaataattctgtatttctgagacaagatcaacacagt

SEQ ID NO: 141281 - DNA, 120 bp, Artificial Sequence
  ENSG00000104290_87 (sequence is synthesized)
agttctttacattgagctgaggtgaatgtatacttaaaaatactctattttctttttatatgaacttaaaatttttaaaatcatatatgggactccccaatgtgaaaatattagtctgga

SEQ ID NO: 141282 - DNA, 120 bp, Artificial Sequence
  ENSG00000104290_88 (sequence is synthesized)
cattctcttgccatcaggtgctatttctaccttagctgtgagttagactaaatccaaatttcgtatcattcatctttttataatatttaacttccctagaatcaccccatttcatgtctt

SEQ ID NO: 141283 - DNA, 120 bp, Artificial Sequence
  ENSG00000104290_89 (sequence is synthesized)
taaccccaacttccaacaacttttctgcttttattttcaaatgtcaaattgtatttttgtgttttattttctcattgaagtgtaaaagtatcacatatatgaaggaatggctggtttaga

SEQ ID NO: 141284 - DNA, 120 bp, Artificial Sequence
  ENSG00000104290_90 (sequence is synthesized)
catttactttggcatagtaaagattgatattgataccacccaccatcctttcctctagccccagaaagaaaagtttgacaactcaaaaacgattaaattatcttatcttgttatttaata

SEQ ID NO: 141285 - DNA, 120 bp, Artificial Sequence
  ENSG00000104290_91 (sequence is synthesized)
gaacaatggaagctgtttcgtcaaaattaaaatactttaccaaaaaaatacttttttgtattttaatctgatagtgaatttggggattatttatgtaaatgtatcataattaatagtaat

SEQ ID NO: 141286 - DNA, 120 bp, Artificial Sequence
  ENSG00000104290_92 (sequence is synthesized)
tatgagttatttcactctctgtaatttgtgatacccaagattcatatttatttaatgtgaggtgttttttgaggcttttttgttttatcttgttttcttaactttttacagtgttgttag

SEQ ID NO: 141287 - DNA, 120 bp, Artificial Sequence
  ENSG00000104290_93 (sequence is synthesized)
attatcgcggtcatctcggcatgtggatcgctcctcctgtagatcagctgttctctcttagagtcaggacaaggaggtttttgctacatggtcgtagttggataatacagcattattctg

SEQ ID NO: 141288 - DNA, 120 bp, Artificial Sequence
  ENSG00000104290_94 (sequence is synthesized)
aactatctgaaattgctggttttattggtcaaaaatgatcagatgctagcaatttcataatagatatattcaagaaggaaccaaactttaaaagatcttttagaataggtatgttaactt

SEQ ID NO: 141289 - DNA, 120 bp, Artificial Sequence
  ENSG00000104290_95 (sequence is synthesized)
ctcatcctaaccctatcaatatatcagaggctttatgaaggagactctacagataaccacaaatcttatcaagaaaattctccttaaaaaaagttatcctttattttgttgttaaatttc

SEQ ID NO: 141290 - DNA, 120 bp, Artificial Sequence
  ENSG00000104290_96 (sequence is synthesized)
ccagtttttaaaagtgttttatcaaaatgacttcataattgaagcaaataccttttggaagtatatatgttacataagactttcactaaatctgtgcgtaaagcttttataatctgagat

SEQ ID NO: 141291 - DNA, 120 bp, Artificial Sequence
  ENSG00000104290_97 (sequence is synthesized)
attgttatgtattaggtttgtgcaaacctaatataaaagggttcatctgtaagtatcatttagaggcaaaataatttccccctcacatctaatgtggactcaaattttggcaactggaat

SEQ ID NO: 141292 - DNA, 120 bp, Artificial Sequence
  ENSG00000104290_98 (sequence is synthesized)
gttatcctcttggtaggcattctaaattaatgaatactgctatgtggtgtagtaaacaaatttgccataaaatgccatttaaggattttctttttacctttatttcattataaaagtata

SEQ ID NO: 141293 - DNA, 120 bp, Artificial Sequence
  ENSG00000104290_99 (sequence is synthesized)
tgagttgaagatcatataaaaaatatgaaactcctacacaggaaatccccaattttgtgatttaataggttgtaaaaagagttgttccaaattcagactacatctcatcatataaataat

SEQ ID NO: 141294 - DNA, 120 bp, Artificial Sequence
  ENSG00000104290_100 (sequence is synthesized)
attatgaataataagggtaaaagattagccaacaaaagctaatctagtacaccccatagaggtactccaggtgtcttggttttggataaatttttatagtggagaaaggttactttgatc

SEQ ID NO: 141295 - DNA, 120 bp, Artificial Sequence
  ENSG00000104290_101 (sequence is synthesized)
tctcaataattgcttggtacacttcttcctaggcaatatgctcatgataccctcttcatgtgacctattcctcaaatgctgcattctccaaaacttccttacctgccttctatcccctag

SEQ ID NO: 141296 - DNA, 120 bp, Artificial Sequence
  ENSG00000104290_102 (sequence is synthesized)
tcattcttatcaatacttccaaaatataacctatctcaagtgttagaaatttgctttaactaatttatattaaagtgttagtgactatagcccttttatctctcttaaagagaaatctgc

SEQ ID NO: 141297 - DNA, 120 bp, Artificial Sequence
  ENSG00000104290_103 (sequence is synthesized)
attaaaagcaaacacattgctgttagctcaaattaatgtcagtgagtagaatcttaagctttaaaacaaaagtggaaataatttaaattagtgttgatgggactattttgaggcaagaga

SEQ ID NO: 141298 - DNA, 120 bp, Artificial Sequence
  ENSG00000104290_104 (sequence is synthesized)
taccattaagtgacctagcttggaaatctgccccctttgcccaaacccatgtgatgtctgaaactactgtatattttcaatgaccttgagaaagggagctagtcatttgtatttatgggc

SEQ ID NO: 141299 - DNA, 120 bp, Artificial Sequence
  ENSG00000104290_105 (sequence is synthesized)
cttatgaagtcagggcctgctgatcctgttttttaagttcaagcgcaatgcctgaagcatcctagatctccttcaccctcattctacctgacagacagctaggtctgtcttccagctctt

SEQ ID NO: 141300 - DNA, 120 bp, Artificial Sequence
  ENSG00000104290_106 (sequence is synthesized)
tctcattgatactacctttacatatgaatactatccatgcttgttaaaaaaaaaaaaagtctttccccattttactgttacaatttttcaagagctataaaggtagaaaaagtattcctt

SEQ ID NO: 141301 - DNA, 120 bp, Artificial Sequence
  ENSG00000104290_107 (sequence is synthesized)
ttcattattctaaaaaatatgtcatttttaaatagctggcacttagcagtttagttttccaaactttattctgaatcaaattgctgaggtgattctaaatgtctaatgttgatttatcat

SEQ ID NO: 141302 - DNA, 120 bp, Artificial Sequence
  ENSG00000104290_108 (sequence is synthesized)
ataaacatctaattagaaagtgtttatgctaaagacttgtattttgtggcattagttcttcatgtttcttttttatatgtttattaaaattgttcacttccaaatgagtggaaaagttgc

SEQ ID NO: 141303 - DNA, 120 bp, Artificial Sequence
  ENSG00000104290_109 (sequence is synthesized)
tgttgttgggatgtacagggcaagtgcacttggttagagcatgaactgggaatttcacattctctgatgtgctttgcactctgctcttgtagatttattttgtttacagtagactgatgt

SEQ ID NO: 141304 - DNA, 120 bp, Artificial Sequence
  ENSG00000104290_110 (sequence is synthesized)
cagtttttgtaaatgttttttcttagcactttaactgtgagtgtacaaactgattttaaatgtagtggttgtatattttggttataaattggagatttttaataaaattaaataattctc

SEQ ID NO: 141305 - DNA, 120 bp, Artificial Sequence
  ENSG00000104299_0 (sequence is synthesized)
ggctggcaggtggcggagattgcaccggaagacgcttcctgggtttgaggagttcagtgactgctattgaaccaccaaaagtccattatgaaactgtattgcctgtcagggcacccaacc

SEQ ID NO: 141306 - DNA, 120 bp, Artificial Sequence
  ENSG00000104299_1 (sequence is synthesized)
ttaccatgcaatgtgctcaaattcaaatcaaccaccattatgttggactgcggactggacatgacttctaccctcaatttccttcctttgccacttgttcaaagtcccaggctgtccaat

SEQ ID NO: 141307 - DNA, 120 bp, Artificial Sequence
  ENSG00000104299_2 (sequence is synthesized)
cttcctggctggtccctgaaggatggaaatgctttcttggacaaggagctaaaggagtgctcgggtcatgtatttgtggattctgtgccggaattctgtttaccagagacggagctaata

SEQ ID NO: 141308 - DNA, 120 bp, Artificial Sequence
  ENSG00000104299_3 (sequence is synthesized)
gatctgtctacagtagatgtgattctcatctctaactatcactgtatgatggcgctgccatacatcaccgagcacaccggcttcacaggcacagtgtatgccacggaacccaccgtccag

SEQ ID NO: 141309 - DNA, 120 bp, Artificial Sequence
  ENSG00000104299_4 (sequence is synthesized)
atcggcaggcttctcatggaagagctggtgaatttcattgaaagagtgccaaaggctcagtctgcctccttgtggaagaataaggacattcagaggctgttaccttctcctctcaaggat

SEQ ID NO: 141310 - DNA, 120 bp, Artificial Sequence
  ENSG00000104299_5 (sequence is synthesized)
gcagtggaagtctcaacctggagaagatgctatacaatgcaagaggtgaactctgcccttagtaaaatccagctggtgggatattctcagaaaattgagctttttggtgcggtccaggtg

SEQ ID NO: 141311 - DNA, 120 bp, Artificial Sequence
  ENSG00000104299_6 (sequence is synthesized)
actcctctgagctctggctatgcccttgggagctccaactggatcatccagtctcattacgagaaagtgtcttatgtctctggatcctccttgcttaccacacacccccagcccatggac

SEQ ID NO: 141312 - DNA, 120 bp, Artificial Sequence
  ENSG00000104299_7 (sequence is synthesized)
caagcttctctcaaaaacagcgatgttcttgttctgacagggcttacccagatccccactgcaaacccagatggaatggtgggagagttctgcagcaacctagctctgacagtccggaat

SEQ ID NO: 141313 - DNA, 120 bp, Artificial Sequence
  ENSG00000104299_8 (sequence is synthesized)
ggaggaaacgtgttggttccctgctacccttctggagtgatctatgacctcctggagtgcctatatcagtacatcgactcagccgggctttccagcgtccccctctacttcatctcccct

SEQ ID NO: 141314 - DNA, 120 bp, Artificial Sequence
  ENSG00000104299_9 (sequence is synthesized)
gtggccaacagttcactggagttttcccagatctttgctgagtggctttgtcacaacaaacagagtaaggtgtatcttccagaaccaccttttcctcatgcagagctcattcagaccaat

SEQ ID NO: 141315 - DNA, 120 bp, Artificial Sequence
  ENSG00000104299_10 (sequence is synthesized)
agacttcagcaacgactttagacagccctgtgtggtgttcaccgggcacccttccctccgcttcggggacgtggtccacttcatggagctctggggaaaatctagtctcaataccgtcat

SEQ ID NO: 141316 - DNA, 120 bp, Artificial Sequence
  ENSG00000104299_11 (sequence is synthesized)
attcacggaaccagacttctcctacctggaagccctggctccttaccagccgctggccatgaaatgcatctactgccccatcgacacccggctgaacttcatccaggtgtcaaagctgct

SEQ ID NO: 141317 - DNA, 120 bp, Artificial Sequence
  ENSG00000104299_12 (sequence is synthesized)
taaagaagtgcagcccctgcacgtggtgtgtcctgagcagtacactcagccgcccccagcccagtcccacaggatggacctcatgatcgactgccagccccccgccatgtcctatcggcg

SEQ ID NO: 141318 - DNA, 120 bp, Artificial Sequence
  ENSG00000104299_13 (sequence is synthesized)
ggctgaggttctcgccctgcccttcaaacgtcggtacgagaagatcgagatcatgccagagctcgcagattcactggtgcccatggagatcaagcctggcatctccttggcaactgtctc

SEQ ID NO: 141319 - DNA, 120 bp, Artificial Sequence
  ENSG00000104299_14 (sequence is synthesized)
ggccgtgctgcacaccaaagataacaagcacttgcttcagccccctcctcggcccgcccagcccacgagcgggaagaagagaaagcgggtgagcgatgacgtaccagactgcaaagtcct

SEQ ID NO: 141320 - DNA, 120 bp, Artificial Sequence
  ENSG00000104299_15 (sequence is synthesized)
gaagcctttgttgagcggttccatccctgtggagcagttcgtgcagaccctggagaagcatggcttcagtgatattaaggtggaggacacagccaagggccatatcgtcctgctccagga

SEQ ID NO: 141321 - DNA, 120 bp, Artificial Sequence
  ENSG00000104299_16 (sequence is synthesized)
ggctgagacgctcatccagattgaagaagactcgacccatatcatctgcgacaatgacgagatgctcagagtgcgactgcgggaccttgtcctcaaattcttacagaagttctgagtggg

SEQ ID NO: 141322 - DNA, 120 bp, Artificial Sequence
  ENSG00000104299_17 (sequence is synthesized)
ccatctgagctacttccctgaaatcctgcagtccctcactggctgccctcacaagccacctgaggagtggcatgagaggccattaactgtgtctttgtggtgtcctctggcttaaggagt

SEQ ID NO: 141323 - DNA, 120 bp, Artificial Sequence
  ENSG00000104299_18 (sequence is synthesized)
gaagaggtggctcttgagggaaatggtctggacttattcccagcactgtttcaggcaagaactttccctttcaacttcaggctcattttcttctcaactctggctctctcaaggagctgg

SEQ ID NO: 141324 - DNA, 120 bp, Artificial Sequence
  ENSG00000104299_19 (sequence is synthesized)
agggtggcagaagtgggacaggagaagttttccaagaggttcatgggaggcggaggtgactggctggctgtcttgcatcagtcccaggcctcggccaggggagccagcctttggtttcgt

SEQ ID NO: 141325 - DNA, 120 bp, Artificial Sequence
  ENSG00000104299_20 (sequence is synthesized)
ttacttgcctacagtgctgtacgcaataagatgatgatcccaaaatatggtaaagtgaacccatctgtctgcattttctactctgagcccatttgttaataaacacttatttttatataa

SEQ ID NO: 141326 - DNA, 120 bp, Artificial Sequence
  ENSG00000104299_21 (sequence is synthesized)
aacgatgaatttatcttagtttctgtgcattgatcagtagagctacaggaactatagataatgcttaaaagtgacttacgtgtgcagagacctgctgctattcttagaatcacattcatc

SEQ ID NO: 141327 - DNA, 120 bp, Artificial Sequence
  ENSG00000104299_22 (sequence is synthesized)
atcttgacatcttaggatacaatagaccctttttgacagccactcacccatttaactgagacaactaatgattttggccatatagtttataaaaagaatgtcagttcaacttgcagacta

SEQ ID NO: 141328 - DNA, 120 bp, Artificial Sequence
  ENSG00000104299_23 (sequence is synthesized)
ctccaggacagtgttagtgtcttcctaatacaaccaggtctcttcaattaaagatgaggtcttcaaggtgaagagagtttggcttctgtttgggctcattcagaccaataagctgaagca

SEQ ID NO: 141329 - DNA, 120 bp, Artificial Sequence
  ENSG00000104299_24 (sequence is synthesized)
tccctggctcactatggccccctggctgcagggagtggatgttgctgcttgtcacttagtccccactgtcctgtggcatctgtttggtctaaggtcctgctgggagacccaggagaaaga

SEQ ID NO: 141330 - DNA, 120 bp, Artificial Sequence
  ENSG00000104299_25 (sequence is synthesized)
aagcagagtgaggagtgccccatccttcctcccagcacgaggtcaccagaaggcctctccagactgaagaaaaagctgcttccacacacacatgtgacgagtggggcagggtagtgaggc

SEQ ID NO: 141331 - DNA, 120 bp, Artificial Sequence
  ENSG00000104299_26 (sequence is synthesized)
tggtccctgaaggatggaaatgctttcttggacaaggtaatatctaagactacaaactaaagcctatctacagccagtggaaagctatcttctcataccagagccaccctgtagtagtgt

SEQ ID NO: 141332 - DNA, 120 bp, Artificial Sequence
  ENSG00000104299_27 (sequence is synthesized)
gactgatggctttttttttttttcctctctgaaaatccccaagatctatgctagggtcttcagaacatggtaactgctgtttttaagcatgtttttagagaatgtcattgttctgattca

SEQ ID NO: 141333 - DNA, 120 bp, Artificial Sequence
  ENSG00000104299_28 (sequence is synthesized)
cagacacatggaagttaccgtgaaacttatgtaaagagtaagaaagataaattaagctgaggcagtttaggggtttccgagatgtttcttctgccccagtgccttcacgttccctctcct

SEQ ID NO: 141334 - DNA, 120 bp, Artificial Sequence
  ENSG00000104299_29 (sequence is synthesized)
ggccaacagttcactggagttttcccagatctttgctgagtggtatgtccgtggtttttttttttttttgtgaattttatttgattcaggacattcaagcagtaagaataaaaataatcc

SEQ ID NO: 141335 - DNA, 120 bp, Artificial Sequence
  ENSG00000104299_30 (sequence is synthesized)
gttttaatggaggtaaaatgtatatatggtgaaacacaaagatcttaaatgtgtaatactgaattttgatataatcagtgccccagtgaagatacagaacttgttcatcccttataaagc

SEQ ID NO: 141336 - DNA, 120 bp, Artificial Sequence
  ENSG00000104299_31 (sequence is synthesized)
tccctcttgcctcctcccatcagtccccacccaacttaggcagccagtggttaaggacagactattccttagagaacataagagaactcgatgatgggttaaacgtagaaagagcaatgt

SEQ ID NO: 141337 - DNA, 120 bp, Artificial Sequence
  ENSG00000104299_32 (sequence is synthesized)
gaaaggggagtcggagccgtcgggactacacatcccagaacaccatgggccccaggcccgtaaggaagacatgatatcatgctggggtggagagggaggatgcattggcggctgggatga

SEQ ID NO: 141338 - DNA, 120 bp, Artificial Sequence
  ENSG00000104299_33 (sequence is synthesized)
atttgagctgacggaaggaggcgttcggagaggaaagggaggaaaaggaaaggcgaccacagttcccatgatgcctggaggggagactacatttcccattattcccctggaagggacgtg

SEQ ID NO: 141339 - DNA, 120 bp, Artificial Sequence
  ENSG00000104299_34 (sequence is synthesized)
gaagacgcttcctgggtttgaggagttcagtgactgctattgaaccaccaaaagtccattatgaaactgtcccaggctgtccaatcttcctggctggtccctgaaggatggaaatgcttt

SEQ ID NO: 141340 - DNA, 120 bp, Artificial Sequence
  ENSG00000104299_35 (sequence is synthesized)
ttcctgggtttgaggagttcagtgactgctattgaaccaccaaaagtccattatgaaactgtctcataaccctcagtagatgatatgctgcttggtgacagaggaagaaaactggaattg

SEQ ID NO: 141341 - DNA, 120 bp, Artificial Sequence
  ENSG00000104299_36 (sequence is synthesized)
cacaaagagcatcgctggaggccacagggtctgggccctttgcaagcgcctcctgtacaagtgtgtgaacctcaggcagccactctgtgctcccgtgcactcagttgacccacgtattgc

SEQ ID NO: 141342 - DNA, 120 bp, Artificial Sequence
  ENSG00000104312_0 (sequence is synthesized)
ctttcgcggcgctacggcgttggcaccagtctctagaaaagaagtcagctctggttcggagaagcagcggctggcgtgggccatccggggaatgggcgccctcgtgacctagtgttgcgg

SEQ ID NO: 141343 - DNA, 120 bp, Artificial Sequence
  ENSG00000104312_1 (sequence is synthesized)
ggcaaaaagggtcttgccggcctcgctcgtgcaggggcgtatctgggcgcctgagcgcggcgtgggagccttgggagccgccgcagcagggggcacacccggaaccggcctgagcgcccg

SEQ ID NO: 141344 - DNA, 120 bp, Artificial Sequence
  ENSG00000104312_2 (sequence is synthesized)
ggaccatgaacggggaggccatctgcagcgccctgcccaccattccctaccacaaactcgccgacctgcgctacctgagccgcggcgcctctggcactgtgtcgtccgcccgccacgcag

SEQ ID NO: 141345 - DNA, 120 bp, Artificial Sequence
  ENSG00000104312_3 (sequence is synthesized)
actggcgcgtccaggtggccgtgaagcacctgcacatccacactccgctgctcgacagtgaaagaaaggatgtcttaagagaagctgaaattttacacaaagctagatttagttacattc

SEQ ID NO: 141346 - DNA, 120 bp, Artificial Sequence
  ENSG00000104312_4 (sequence is synthesized)
ttccaattttgggaatttgcaatgagcctgaatttttgggaatagttactgaatacatgccaaatggatcattaaatgaactcctacataggaaaactgaatatcctgatgttgcttggc

SEQ ID NO: 141347 - DNA, 120 bp, Artificial Sequence
  ENSG00000104312_5 (sequence is synthesized)
cattgagatttcgcatcctgcatgaaattgcccttggtgtaaattacctgcacaatatgactcctcctttacttcatcatgacttgaagactcagaatatcttattggacaatgaatttc

SEQ ID NO: 141348 - DNA, 120 bp, Artificial Sequence
  ENSG00000104312_6 (sequence is synthesized)
atgttaagattgcagattttggtttatcaaagtggcgcatgatgtccctctcacagtcacgaagtagcaaatctgcaccagaaggagggacaattatctatatgccacctgaaaactatg

SEQ ID NO: 141349 - DNA, 120 bp, Artificial Sequence
  ENSG00000104312_7 (sequence is synthesized)
aacctggacaaaaatcaagggccagtatcaagcacgatatatatagctatgcagttatcacatgggaagtgttatccagaaaacagccttttgaagatgtcaccaatcctttgcagataa

SEQ ID NO: 141350 - DNA, 120 bp, Artificial Sequence
  ENSG00000104312_8 (sequence is synthesized)
tgtatagtgtgtcacaaggacatcgacctgttattaatgaagaaagtttgccatatgatatacctcaccgagcacgtatgatctctctaatagaaagtggatgggcacaaaatccagatg

SEQ ID NO: 141351 - DNA, 120 bp, Artificial Sequence
  ENSG00000104312_9 (sequence is synthesized)
aaagaccatctttcttaaaatgtttaatagaacttgaaccagttttgagaacatttgaagagataacttttcttgaagctgttattcagctaaagaaaacaaagttacagagtgtttcaa

SEQ ID NO: 141352 - DNA, 120 bp, Artificial Sequence
  ENSG00000104312_10 (sequence is synthesized)
cctgaaacttcaaggtccctgccagctcctcaagacaatgattttttatctagaaaagctcaagactgttattttatgaagctgcatcactgtcctggaaatcacagttgggatagcacc

SEQ ID NO: 141353 - DNA, 120 bp, Artificial Sequence
  ENSG00000104312_11 (sequence is synthesized)
atttctggatctcaaagggctgcattctgtgatcacaagaccactccatgctcttcagcaataataaatccactctcaactgcaggaaactcagaacgtctgcagcctggtatagcccag

SEQ ID NO: 141354 - DNA, 120 bp, Artificial Sequence
  ENSG00000104312_12 (sequence is synthesized)
cagtggatccagagcaaaagggaagacattgtgaaccaaatgacagaagcctgccttaaccagtcgctagatgcccttctgtccagggacttgatcatgaaagaggactatgaacttgtt

SEQ ID NO: 141355 - DNA, 120 bp, Artificial Sequence
  ENSG00000104312_13 (sequence is synthesized)
agtaccaagcctacaaggacctcaaaagtcagacaattactagacactactgacatccaaggagaagaatttgccaaagttatagtacaaaaattgaaagataacaaacaaatgggtctt

SEQ ID NO: 141356 - DNA, 120 bp, Artificial Sequence
  ENSG00000104312_14 (sequence is synthesized)
cagccttacccggaaatacttgtggtttctagatcaccatctttaaatttacttcaaaataaaagcatgtaagtgactgtttttcaagaagaaatgtgtttcataaaaggatatttatat

SEQ ID NO: 141357 - DNA, 120 bp, Artificial Sequence
  ENSG00000104312_15 (sequence is synthesized)
ctctgttgctttgactttttttatataaaatccgtgagtattaaagctttattgaaggttctttgggtaaatattagtctccctccatgacactgcagtattttttttaattaatacaag

SEQ ID NO: 141358 - DNA, 120 bp, Artificial Sequence
  ENSG00000104312_16 (sequence is synthesized)
taaaaagtttgaattttgctacatagttcaatttttatgtctcttttgttaacagaaaccacttttaaaggatagtaattattcttgtttataacagtgccttaaggtatgatgtatttc

SEQ ID NO: 141359 - DNA, 120 bp, Artificial Sequence
  ENSG00000104312_17 (sequence is synthesized)
tgatggaagccattttcacattcatgttcttcatggattatttgttacttgtctaagatgcaatttgattttatgaagtatataccctttacccaccagagacagtacagaatccctgcc

SEQ ID NO: 141360 - DNA, 120 bp, Artificial Sequence
  ENSG00000104312_18 (sequence is synthesized)
ctaaaatcccaggcttaattgccctacaaagggttattaatttaaaactccattattaggattacattttaaagttttatttatgaattccctttaaaaatgatatttcaaaggtaaaac

SEQ ID NO: 141361 - DNA, 120 bp, Artificial Sequence
  ENSG00000104312_19 (sequence is synthesized)
aatacaatataaagaaaaaaataaatatattaataccggcttcctgtccccatttttaacctcagccttccctactgtcaccaacaaccaagctaaataaagtcaacagcctgatgtgta

SEQ ID NO: 141362 - DNA, 120 bp, Artificial Sequence
  ENSG00000104312_20 (sequence is synthesized)
gttaacatccatgattacaacattctcttctcctcctcctatatctaatgtgaaaatacgtcatccccgatgcctgattggccagaagcttgaaagaaaggatgtcttaagagaagctga

SEQ ID NO: 141363 - DNA, 120 bp, Artificial Sequence
  ENSG00000104312_21 (sequence is synthesized)
acttgaaccagttttgagaacatttgaagagataacttttcttgaagctgttattcagctaaagaaaacaaagattttaaagacatttccaggaccaggcgtggtgactcacacctgtaa

SEQ ID NO: 141364 - DNA, 120 bp, Artificial Sequence
  ENSG00000104312_22 (sequence is synthesized)
cacttgagcccaggagttcgagaccagctgggccacatagcaagaccccacctttatttaaaacgtaaaaaaaaaaaaaaagacatttccagaacccttatatatcagacataaatttaa

SEQ ID NO: 141365 - DNA, 120 bp, Artificial Sequence
  ENSG00000104312_23 (sequence is synthesized)
cagaacccttatatatcagacataaatttaaaaatgtataatcacagccagttgtgtacaatgaatgcactgagccattagaggtgtttgttttttaatgtacatttattttcccaaagt

SEQ ID NO: 141366 - DNA, 120 bp, Artificial Sequence
  ENSG00000104312_24 (sequence is synthesized)
tgtaatgcctagagaataatagatgtctgggttctcgcacttctctttttatttaatgtacatttttttctgagattcctcgccaagtttagctgtagaatttttattaaatttgagacc

SEQ ID NO: 141367 - DNA, 120 bp, Artificial Sequence
  ENSG00000104313_0 (sequence is synthesized)
ctcagatgctatctgccgctgctgtttggtggggaaggagcgctgggcgcaaagctgttaccaaacagaacggtgggagctgatggctccgagtttggggcgaggtagaaactctccagt

SEQ ID NO: 141368 - DNA, 120 bp, Artificial Sequence
  ENSG00000104313_1 (sequence is synthesized)
gccacttccgactttaagccttcctgttgccgtccactgtggcgggtttcttcctggggaacacgttttcgctcagtcgctcggcagcccgagcctgcggcagcggccaggcgcctgccc

SEQ ID NO: 141369 - DNA, 120 bp, Artificial Sequence
  ENSG00000104313_2 (sequence is synthesized)
cctgcgccgagctttcccctgcagaggcgctccactcccagaagcgccgcggctgcaccagagcgcctgagagcccccgcgcgtacccatccaggagcaaaactatgtcaggaatggagg

SEQ ID NO: 141370 - DNA, 120 bp, Artificial Sequence
  ENSG00000104313_3 (sequence is synthesized)
tttgctaacccagaaaattcgaaggaacacattaaactggtggatgcagcagatgtaagcgctgtgcaaacatctcaagccagttcagatgttgctgtttcctcaagttgcaggtctatg

SEQ ID NO: 141371 - DNA, 120 bp, Artificial Sequence
  ENSG00000104313_4 (sequence is synthesized)
gaaatgcaggatctaaccagcccgcatagccgtctgagtggtagtagtgaatcccccagtggccccaaactcggtaactctcatataaatagtaattccatgactcccaatggcaccgaa

SEQ ID NO: 141372 - DNA, 120 bp, Artificial Sequence
  ENSG00000104313_5 (sequence is synthesized)
gttaaaacagagccaatgagcagcagtgaaacagcttcaacgacagccgacgggtctttaaacaatttctcaggttcagcaattgggagcagtagtttcagcccacgaccaactcaccag

SEQ ID NO: 141373 - DNA, 120 bp, Artificial Sequence
  ENSG00000104313_6 (sequence is synthesized)
ttctctccaccacagatttacccttccaacagaccatacccacatattctccctaccccttcctcacaaactatggctgcatatgggcaaacacagtttaccacaggaatgcaacaagct

SEQ ID NO: 141374 - DNA, 120 bp, Artificial Sequence
  ENSG00000104313_7 (sequence is synthesized)
acagcctatgccacgtacccacagccaggacagccgtacggcatttcctcatatggtgcattgtgggcaggcatcaagactgaaggtggattgtcacagtctcagtcacctggacagaca

SEQ ID NO: 141375 - DNA, 120 bp, Artificial Sequence
  ENSG00000104313_8 (sequence is synthesized)
ggatttctcagctatggcacaagcttcagtacccctcaacctggacaggcaccatacagctaccagatgcaaggtagcagttttacaacatcatcaggaatatatacaggaaataattca

SEQ ID NO: 141376 - DNA, 120 bp, Artificial Sequence
  ENSG00000104313_9 (sequence is synthesized)
ctcacaaattcctctggatttaatagttcacagcaggactatccgtcttatcccagttttggccagggtcagtacgcacagtattataacagctcaccgtatccagcacattatatgacc

SEQ ID NO: 141377 - DNA, 120 bp, Artificial Sequence
  ENSG00000104313_10 (sequence is synthesized)
agcagcaacaccagcccaacgacaccatccaccaatgccacttaccagcttcaagaaccgccatctggcatcaccagccaagcagttacagatcccacagcagagtacagcacaatccac

SEQ ID NO: 141378 - DNA, 120 bp, Artificial Sequence
  ENSG00000104313_11 (sequence is synthesized)
agcccatcaacacccattaaagattcagattctgatcgattgcgtcgaggttcagatgggaaatcacgtggacggggccgaagaaacaataatccttcacctcccccagattctgatctt

SEQ ID NO: 141379 - DNA, 120 bp, Artificial Sequence
  ENSG00000104313_12 (sequence is synthesized)
gagagagtgttcatctgggacttggatgagacaatcattgttttccactccttgcttactgggtcctacgccaacagatatgggagggatccacccacttcagtttcccttggactgcga

SEQ ID NO: 141380 - DNA, 120 bp, Artificial Sequence
  ENSG00000104313_13 (sequence is synthesized)
atggaagaaatgattttcaacttggcagacacacatttattttttaatgacttagaagaatgtgaccaagtccatatagatgatgtttcttcagatgataacggacaggacctaagcaca

SEQ ID NO: 141381 - DNA, 120 bp, Artificial Sequence
  ENSG00000104313_14 (sequence is synthesized)
tataactttggaacagatggctttcctgctgcagcaaccagtgctaacttatgtttggcaactggtgtacggggcggtgtggactggatgagaaagttggccttccgctacagacgggta

SEQ ID NO: 141382 - DNA, 120 bp, Artificial Sequence
  ENSG00000104313_15 (sequence is synthesized)
aaagagatctacaacacctacaaaaataatgttggaggtctgcttggtccagctaagagggaagcctggctgcagttgagggccgaaattgaagccctgaccgactcctggttgacactg

SEQ ID NO: 141383 - DNA, 120 bp, Artificial Sequence
  ENSG00000104313_16 (sequence is synthesized)
gccctgaaagcactctcgctcattcactcccggacaaactgtgtgaatattttagtaacaactactcagctcatcccagcattggcgaaagtcctgctgtatgggttaggaattgtattt

SEQ ID NO: 141384 - DNA, 120 bp, Artificial Sequence
  ENSG00000104313_17 (sequence is synthesized)
ggtgtatgttgttataggagatggtgtagaagaagaacaaggagcaaaaaagcacgcgatgcccttctggaggatctccagccactcggacctcatggccctgcaccatgccttggaact

SEQ ID NO: 141385 - DNA, 120 bp, Artificial Sequence
  ENSG00000104313_18 (sequence is synthesized)
ggagtacctgtaacagcgctcggcactttgacagcgcacagctgctctgtgaccagggacagatccagcaggccccagtctcgcatcagcgccggcctccagaacttagcaatttccgcc

SEQ ID NO: 141386 - DNA, 120 bp, Artificial Sequence
  ENSG00000104313_19 (sequence is synthesized)
tggtgatgcgcagttgctgtcagtcttgacctctgcctttgtggtgaatggaggaccacgtctatttcatcagaacagctgttgactctagtactgtgaatccagtgaaaataagccatg

SEQ ID NO: 141387 - DNA, 120 bp, Artificial Sequence
  ENSG00000104313_20 (sequence is synthesized)
agaatgttttagcacagcgttatgtgtctgccacattaactacacggttcaaacctgtgaagaaaggacctgcaaacgcttcagttgttagcattttcaatgtgatataaacagcttctc

SEQ ID NO: 141388 - DNA, 120 bp, Artificial Sequence
  ENSG00000104313_21 (sequence is synthesized)
caatacagcaaacctaattgcacaacagagactgaaatgtgtttcctgaataccagtggaggaattttcttgtaaagaaggtttactttttggtgtctcatacccagggtaatctgtaca

SEQ ID NO: 141389 - DNA, 120 bp, Artificial Sequence
  ENSG00000104313_22 (sequence is synthesized)
tctctacttatttatgaacagactttttttaaaaagataaaaaaacagctttattgaggtataattcacccaccagacttttttaaacatcaaataattgaagagacaatagcattagaa

SEQ ID NO: 141390 - DNA, 120 bp, Artificial Sequence
  ENSG00000104313_23 (sequence is synthesized)
ataagtgattaaaggcctctgcctcacaacatggcaagtacagtactttgaattttagcacattgcatagtagttttaagtatgtctaatttaaacgtataatatgtacatcactgagac

SEQ ID NO: 141391 - DNA, 120 bp, Artificial Sequence
  ENSG00000104313_24 (sequence is synthesized)
aatcatgtacagaaagaatttttggtgtaaatttgtaataatggataattcttttacatattgtttagggaaatgatattgaaaggtagcaatgcctggatagtgaagcatgaggcagca

SEQ ID NO: 141392 - DNA, 120 bp, Artificial Sequence
  ENSG00000104313_25 (sequence is synthesized)
cgtgcacaaattcatgtgccgtgccttatctgagttttcggtataaatatgtagataatggattttttttttttagataatgttgtcaagaccaaaagcatggatgtcaagtgtcagtaa

SEQ ID NO: 141393 - DNA, 120 bp, Artificial Sequence
  ENSG00000104313_26 (sequence is synthesized)
ggattttgttttctaaaattttttcctgcatcagttcttctgagggccttgatgaaataacacagcagtttcttaaacaatttgaaacaaaatgagctctcctaccacctcactttttca

SEQ ID NO: 141394 - DNA, 120 bp, Artificial Sequence
  ENSG00000104313_27 (sequence is synthesized)
tttccacactaatgtattatatgtaactacttggaaaaaataattattcaaatgcttcttcccacaaagaatatagatgatagtagatatattttattaataaaatggttcatgaatcgg

SEQ ID NO: 141395 - DNA, 120 bp, Artificial Sequence
  ENSG00000104313_28 (sequence is synthesized)
agactaacaaagttttcatgtgctcagaattattaattatcgtgtctgcattttctttcgataaaggaagacacacgatgctaatccggaaatcagcaaactttgcattactccctatgt

SEQ ID NO: 141396 - DNA, 120 bp, Artificial Sequence
  ENSG00000104313_29 (sequence is synthesized)
gcgtattttctctttcttcctgtcaccctgaggaaggttcattgccattgtcatcaccatggaaacaacgttcctctccacctgcattatgtactacatgacaggcatcaatctggggaa

SEQ ID NO: 141397 - DNA, 120 bp, Artificial Sequence
  ENSG00000104313_30 (sequence is synthesized)
ataataaaattatcacctttgtcagaccataagagtttctccaaaagtggtcagtttggctgggcaatattttctctcatctaacaaacacaatccattgtcatgaaattacccttagga

SEQ ID NO: 141398 - DNA, 120 bp, Artificial Sequence
  ENSG00000104313_31 (sequence is synthesized)
tgagtcttctttaatcaatcatatattgggcgggaaaaacaccagctttgacccgaagtagttgaagagctacttcattcttttctgaagttgtgtgttgctgctagaaatagtcatttg

SEQ ID NO: 141399 - DNA, 120 bp, Artificial Sequence
  ENSG00000104313_32 (sequence is synthesized)
tgaattatccaaattgtttaaattcacaattgaattagttttttcttcctttttgcttgaagcaaacagttgacaatttttaaccttttcattttatgtttttgtactctgcagactgaa

SEQ ID NO: 141400 - DNA, 120 bp, Artificial Sequence
  ENSG00000104313_33 (sequence is synthesized)
aagacaaagtttatcttggccttactgtataaaggtgtgctgtgtccaccgttgtgtacagaatttttcttcattaattttgtgtttaagttaataaaatttatttgtgatgtactgtaa

SEQ ID NO: 141401 - DNA, 120 bp, Artificial Sequence
  ENSG00000104313_34 (sequence is synthesized)
gagacctcaacttaaagacaatatgcctttcactgctgcagtatcctcctttttctcttttggttaaaagagagcattgtcgttctcagccatgtgctctgtataattaagagctgacac

SEQ ID NO: 141402 - DNA, 120 bp, Artificial Sequence
  ENSG00000104313_35 (sequence is synthesized)
ggcacaggagcgtttagagaggaaagaaagaaaaagccaccgctggctcgaatttctggaagccggagccgggttttttgccctaaacaccgaggcagaacccctcttagcgctgccccg

SEQ ID NO: 141403 - DNA, 120 bp, Artificial Sequence
  ENSG00000104313_36 (sequence is synthesized)
gcctctctgttacccattttcggtttgcttttggaagaaccggttcctcagccccccgtcgccgcagttgtgacacaagtgcaggggtgttggaaccctttgaagaagtgtgtagctaat

SEQ ID NO: 141404 - DNA, 120 bp, Artificial Sequence
  ENSG00000104313_37 (sequence is synthesized)
agcccatacataattcagaagaagtcttcaatggaagacccccgggggataaatggacagtctgtcaagtgggatcatggattcaaatgttctttgaaaatgaaaagtgcaacataactc

SEQ ID NO: 141405 - DNA, 120 bp, Artificial Sequence
  ENSG00000104313_38 (sequence is synthesized)
taattcactttttattggaaacatctccagaaaaatgaataaacgaccatgaataaaaaattatctggccacctgcaagtctacaatacaattttaaaaatgtgaccatcacacctgcat

SEQ ID NO: 141406 - DNA, 120 bp, Artificial Sequence
  ENSG00000104313_39 (sequence is synthesized)
cagcaccttgaataactctagtttatgtggttgcaagtaatggaacttaccatgagctggcataagaaaacaaaaggaaagtcttaagaaagagggcatctggggaattcaggtgcaaac

SEQ ID NO: 141407 - DNA, 120 bp, Artificial Sequence
  ENSG00000104313_40 (sequence is synthesized)
ccgggaagcggctgaggggcgccgcgactctcagcgagcgccgcccgagccccagcccgcccgggcagcctccgaggcctagggcgccgccgccaggtgcaggggtgttggaaccctttg

SEQ ID NO: 141408 - DNA, 120 bp, Artificial Sequence
  ENSG00000104313_41 (sequence is synthesized)
attcattcctctttatagtttaactttctgttaggtggaaccatatgaaatttccatctccgcaggtcacaaagaccaaatatctgaaatttcatatggccaacctatagttgaaaatat

SEQ ID NO: 141409 - DNA, 120 bp, Artificial Sequence
  ENSG00000104313_42 (sequence is synthesized)
gggggataaatggacagtctcccattggcactgctgttcaatatgttacgacatttggagcaaccacagcagcagctctcaccagaaattaaaggtggagtctcgctctgtcgcccaggc

SEQ ID NO: 141410 - DNA, 120 bp, Artificial Sequence
  ENSG00000104313_43 (sequence is synthesized)
tatatatttctgaatcttaacatcatttgattatcgcttcctgtacttcacaatctatcagatgatgtgttctgtcagttttacctctagcttttaaacattttaaactgcaacccacac

SEQ ID NO: 141411 - DNA, 120 bp, Artificial Sequence
  ENSG00000104313_44 (sequence is synthesized)
ttggaaacatttttcatcacaattcagtaaaaatatatttgccatatttgcatatgtgaatatctatatggctaaaaaattcatggactaacactcttatgaagtgtggtgaccactgat

SEQ ID NO: 141412 - DNA, 120 bp, Artificial Sequence
  ENSG00000104313_45 (sequence is synthesized)
tcctctccctcttgctggggcttttcaatgactatgatatggacaactccaaaatgccctactcctgctctaaattgtattgttttttaaaatgtgcatttctgatgagatcacttcctt

SEQ ID NO: 141413 - DNA, 120 bp, Artificial Sequence
  ENSG00000104313_46 (sequence is synthesized)
tcttaaacacaaaatactcctaagtagggatgaaatatgttcgtccttcattatttggaccctgttgccattttcaatctgacttcgtagttccatttccaatcactgtgctgtagtcaa

SEQ ID NO: 141414 - DNA, 120 bp, Artificial Sequence
  ENSG00000104313_47 (sequence is synthesized)
actgaccacaacaatcaattccaaaaaggcacaattattttttaaatgtccttaatgttttctgaagtcacgaaaaacaagtatgtactttaagaagtgaaacaatccaaatatgtgtaa

SEQ ID NO: 141415 - DNA, 120 bp, Artificial Sequence
  ENSG00000104313_48 (sequence is synthesized)
agaaagataataaccttccctccacctcctcccattcccatcctcttgaaataaccagtgctatcagcttgggatgtatacttttatggctttctccctccttttccaaacatagctatt

SEQ ID NO: 141416 - DNA, 120 bp, Artificial Sequence
  ENSG00000104313_49 (sequence is synthesized)
atttgtaagactttgtttttgtttttaaatggtatcatggtgtacatatcactctgcagcttgtttttatgcttgaaagtagacatctcctcgggttcatagatatggctgtatctgatt

SEQ ID NO: 141417 - DNA, 120 bp, Artificial Sequence
  ENSG00000104313_50 (sequence is synthesized)
cttttaagaagtgcagtgcagttctttcacacctgtaatttaaaatataatttattatctactggtagatgatcaagtagatcccatttttgcagtaaccaaaatggtgcagtgaaagtc

SEQ ID NO: 141418 - DNA, 120 bp, Artificial Sequence
  ENSG00000104313_51 (sequence is synthesized)
cttatatactcgccttttttatgtcaataggatataatctcaagtccgagttttggtcatagcctgtatatgcaaactgaaaagcttgtttgaataaatactgccaactcatgtttccaa

SEQ ID NO: 141419 - DNA, 120 bp, Artificial Sequence
  ENSG00000104313_52 (sequence is synthesized)
gctcctccttctacctctggtagaattcagatgtgaatccatctggtcctggactttgtttggttggaggtgaagtaatctgctggagaagggccaggaatgtaagatgagagatttaag

SEQ ID NO: 141420 - DNA, 120 bp, Artificial Sequence
  ENSG00000104313_53 (sequence is synthesized)
agatgagagatttaaggagagtggaagagtggcttaacaacaacaacagtaacaaagaagcattgttgaggctccattggaaactggtcatgaatgtggtagaaccaagctaccatgtca

SEQ ID NO: 141421 - DNA, 120 bp, Artificial Sequence
  ENSG00000104313_54 (sequence is synthesized)
tgtgacacagaagtaaatagttgggctcaccaaacttcatgctttgtaagtaaatacagttaaaagacaagaggtagaagaatttgggattattgaaaagatgaattttattcctggaat

SEQ ID NO: 141422 - DNA, 120 bp, Artificial Sequence
  ENSG00000104313_55 (sequence is synthesized)
ctgtaaaatggaggtagagttgaaccctatttcagacaagctgaaaatgagagggttgtagggtcagaggtaggtgctaaaatttgtgatattggaaatggagagattacaggtgataac

SEQ ID NO: 141423 - DNA, 120 bp, Artificial Sequence
  ENSG00000104313_56 (sequence is synthesized)
aatgtctgaggtggagctgtggcatggatgacttaggtgcattggagagtaaagccaggaggagagaaggaactgagaggcctttataccggctgttgaacctggggcactgaagtaact

SEQ ID NO: 141424 - DNA, 120 bp, Artificial Sequence
  ENSG00000104313_57 (sequence is synthesized)
caaaatgatggcgggcttggggtagagagaagaatggtaaaccaaaggccaatgtctttcactggccgggaggttagaatggcctagctgagtggcataggcttcaagcaggaggtagct

SEQ ID NO: 141425 - DNA, 120 bp, Artificial Sequence
  ENSG00000104313_58 (sequence is synthesized)
aggagcattttgttataaatggtagatacttaacttacttttctttcaaaaaatttagatgatgatattctagatctttgtggactaattttactttagggctccattgtactctcataa

SEQ ID NO: 141426 - DNA, 120 bp, Artificial Sequence
  ENSG00000104313_59 (sequence is synthesized)
aaaggggctgtgggtgggggtacgggggagacccgaggggtgctgggaagagggctcccctctccagcgccagccctggtgtcgctgtgcactcggagccgcgcgaagggcgcccctcga

SEQ ID NO: 141427 - DNA, 120 bp, Artificial Sequence
  ENSG00000104313_60 (sequence is synthesized)
tagagcaggtcgctgcagcagaaacaccacagttcccagaggagaggctgggctgaccacccaatagttggctattgggatggaccttcaaaaactcccattttgagatcattgaagcac

SEQ ID NO: 141428 - DNA, 120 bp, Artificial Sequence
  ENSG00000104313_61 (sequence is synthesized)
cagtttgaaagcacatatctgatcctacctcatcattttgcagatggggagatttaacccttgatatgccatcacctataatctatttgatggaagtatctaataatgaatatataatta

SEQ ID NO: 141429 - DNA, 120 bp, Artificial Sequence
  ENSG00000104313_62 (sequence is synthesized)
cttccagagagtccatgatgctggtgaagctgggcagaagaaagcctagcagcgcttgagctcttcatgaggtctatttgaaagcacagtgagggcttggacgtgcccttagaaagcaca

SEQ ID NO: 141430 - DNA, 120 bp, Artificial Sequence
  ENSG00000104313_63 (sequence is synthesized)
catgtctgtgcccacatgttccatcttaatttaaatgaaagtgcatttcatagagatgtaaacatattgatacaaatttattttgagcatcatgtagtggagacactgaagtatttcagt

SEQ ID NO: 141431 - DNA, 120 bp, Artificial Sequence
  ENSG00000104313_64 (sequence is synthesized)
gctttgtcaattctgtgtgaaagttttactttaagatacaatatttagctggaatttgtgatgtggttgttaatcggtttgcatgtttccatctaatgcatgggctttctattttctgtc

SEQ ID NO: 141432 - DNA, 120 bp, Artificial Sequence
  ENSG00000104313_65 (sequence is synthesized)
tgacacagaagtaaatagttgggctcaccaaacttcatgctttgtggtgaccctacacccaggcaggactgtaaatccacgctgtttgcctgtgactgatttgggatttggatttctgat

SEQ ID NO: 141433 - DNA, 120 bp, Artificial Sequence
  ENSG00000104313_66 (sequence is synthesized)
tatactggatgaattggctcctgctactcccgttttggagaatatgaagaattttatactgtgctaaaataaatgtactttgtgcaaataactttcctaaataaaaaattttgaatatga

SEQ ID NO: 141434 - DNA, 120 bp, Artificial Sequence
  ENSG00000104320_0 (sequence is synthesized)
aagtcgcactcccgcctcatccaaggcagcctgcgtggctcccgggagcgcgcacgtcccggagcccatgccgaccgcaggcgccgtatccgcgctcgtctagcagccccggttacgcgg

SEQ ID NO: 141435 - DNA, 120 bp, Artificial Sequence
  ENSG00000104320_1 (sequence is synthesized)
ttgcacgtcggccccagccctgaggagccggaccgatgtggaaactgctgcccgccgcgggcccggcaggaggagaaccatacagacttttgactggcgttgagtacgttgttggaagga

SEQ ID NO: 141436 - DNA, 120 bp, Artificial Sequence
  ENSG00000104320_2 (sequence is synthesized)
aaaactgtgccattctgattgaaaatgatcagtcgatcagccgaaatcatgctgtgttaactgctaacttttctgtaaccaacctgagtcaaacagatgaaatccctgtattgacattaa

SEQ ID NO: 141437 - DNA, 120 bp, Artificial Sequence
  ENSG00000104320_3 (sequence is synthesized)
aagataattctaagtatggtacctttgttaatgaggaaaaaatgcagaatggcttttcccgaactttgaagtcgggggatggtattacttttggagtgtttggaagtaaattcagaatag

SEQ ID NO: 141438 - DNA, 120 bp, Artificial Sequence
  ENSG00000104320_4 (sequence is synthesized)
agtatgagcctttggttgcatgctcttcttgtttagatgtctctgggaaaactgctttaaatcaagctatattgcaacttggaggatttactgtaaacaattggacagaagaatgcactc

SEQ ID NO: 141439 - DNA, 120 bp, Artificial Sequence
  ENSG00000104320_5 (sequence is synthesized)
accttgtcatggtatcagtgaaagttaccattaaaacaatatgtgcactcatttgtggacgtccaattgtaaagccagaatattttactgaattcctgaaagcagttgagtccaagaagc

SEQ ID NO: 141440 - DNA, 120 bp, Artificial Sequence
  ENSG00000104320_6 (sequence is synthesized)
agcctccacaaattgaaagtttttacccacctcttgatgaaccatctattggaagtaaaaatgttgatctgtcaggacggcaggaaagaaaacaaatcttcaaagggaaaacatttatat

SEQ ID NO: 141441 - DNA, 120 bp, Artificial Sequence
  ENSG00000104320_7 (sequence is synthesized)
ttttgaatgccaaacagcataagaaattgagttccgcagttgtctttggaggtggggaagctaggttgataacagaagagaatgaagaagaacataatttctttttggctccgggaacgt

SEQ ID NO: 141442 - DNA, 120 bp, Artificial Sequence
  ENSG00000104320_8 (sequence is synthesized)
gtgttgttgatacaggaataacaaactcacagaccttaattcctgactgtcagaagaaatggattcagtcaataatggatatgctccaaaggcaaggtcttagacctattcctgaagcag

SEQ ID NO: 141443 - DNA, 120 bp, Artificial Sequence
  ENSG00000104320_9 (sequence is synthesized)
aaattggattggcggtgattttcatgactacaaagaattactgtgatcctcagggccatcccagtacaggattaaagacaacaactccaggaccaagcctttcacaaggcgtgtcagttg

SEQ ID NO: 141444 - DNA, 120 bp, Artificial Sequence
  ENSG00000104320_10 (sequence is synthesized)
atgaaaaactaatgccaagcgccccagtgaacactacaacatacgtagctgacacagaatcagagcaagcagatacatgggatttgagtgaaaggccaaaagaaatcaaagtctccaaaa

SEQ ID NO: 141445 - DNA, 120 bp, Artificial Sequence
  ENSG00000104320_11 (sequence is synthesized)
tggaacaaaaattcagaatgctttcacaagatgcacccactgtaaaggagtcctgcaaaacaagctctaataataatagtatggtatcaaatactttggctaagatgagaatcccaaact

SEQ ID NO: 141446 - DNA, 120 bp, Artificial Sequence
  ENSG00000104320_12 (sequence is synthesized)
atcagctttcaccaactaaattgccaagtataaataaaagtaaagatagggcttctcagcagcagcagaccaactccatcagaaactactttcagccgtctaccaaaaaaagggaaaggg

SEQ ID NO: 141447 - DNA, 120 bp, Artificial Sequence
  ENSG00000104320_13 (sequence is synthesized)
atgaagaaaatcaagaaatgtcttcatgcaaatcagcaagaatagaaacgtcttgttctcttttagaacaaacacaacctgctacaccctcattgtggaaaaataaggagcagcatctat

SEQ ID NO: 141448 - DNA, 120 bp, Artificial Sequence
  ENSG00000104320_14 (sequence is synthesized)
ctgagaatgagcctgtggacacaaactcagacaataacttatttacagatacagatttaaaatctattgtgaaaaattctgccagtaaatctcatgctgcagaaaagctaagatcaaata

SEQ ID NO: 141449 - DNA, 120 bp, Artificial Sequence
  ENSG00000104320_15 (sequence is synthesized)
aaaaaagggaaatggatgatgtggccatagaagatgaagtattggaacagttattcaaggacacaaaaccagagttagaaattgatgtgaaagttcaaaaacaggaggaagatgtcaatg

SEQ ID NO: 141450 - DNA, 120 bp, Artificial Sequence
  ENSG00000104320_16 (sequence is synthesized)
ttagaaaaaggccaaggatggatatagaaacaaatgacactttcagtgatgaagcagtaccagaaagtagcaaaatatctcaagaaaatgaaattgggaagaaacgtgaactcaaggaag

SEQ ID NO: 141451 - DNA, 120 bp, Artificial Sequence
  ENSG00000104320_17 (sequence is synthesized)
actcactatggtcagctaaagaaatatctaacaatgacaaacttcaggatgatagtgagatgcttccaaaaaagctgttattgactgaatttagatcactggtgattaaaaactctactt

SEQ ID NO: 141452 - DNA, 120 bp, Artificial Sequence
  ENSG00000104320_18 (sequence is synthesized)
ccagaaatccatctggcataaatgatgattatggtcaactaaaaaatttcaagaaattcaaaaaggtcacatatcctggagcaggaaaacttccacacatcattggaggatcagatctaa

SEQ ID NO: 141453 - DNA, 120 bp, Artificial Sequence
  ENSG00000104320_19 (sequence is synthesized)
tagatacaatccttatttaaaaaggagaagataactgaggattttaaaaagaagccatggaaaaacttcctagtaagcatctacttcaggccaacaaggttatatgaatatatagtgtat

SEQ ID NO: 141454 - DNA, 120 bp, Artificial Sequence
  ENSG00000104320_20 (sequence is synthesized)
agaagcgatttaagttacaatgttttatggcctaaatttattaaataaaatgcacaaaactttgattcttttgtatgtaacaattgtttgttctgttttcaggctttgtcattgcatctt

SEQ ID NO: 141455 - DNA, 120 bp, Artificial Sequence
  ENSG00000104320_21 (sequence is synthesized)
tttttcatttttaaatgtgttttgtttattaaatagttaatatagtcacagttcaaaattctaaatgtacgtaaggtaaagactaaagtcacccttccaccattgtcctagctacttggt

SEQ ID NO: 141456 - DNA, 120 bp, Artificial Sequence
  ENSG00000104320_22 (sequence is synthesized)
tcccctcagaaaaaaattcatgatactcatttcttatgaatctttccagggatttttgagtcctattcaaattcctatttttaaataatttcctacacaaatgatagcataacatatgca

SEQ ID NO: 141457 - DNA, 120 bp, Artificial Sequence
  ENSG00000104320_23 (sequence is synthesized)
gtgttctacaccttgcttttttacttagtagattaaaaattataggaatatcaatataatgtttttaatattttttcttttccattatgctgtagtcttacctaaactctggtgatccaa

SEQ ID NO: 141458 - DNA, 120 bp, Artificial Sequence
  ENSG00000104320_24 (sequence is synthesized)
acaaaatggcttcagtggtgcagatgtcacctacatgttattctagtactagaaactgaagaccatgtggagacttcatcaaacatgggtttagttttcaccagaatggaaagacctgta

SEQ ID NO: 141459 - DNA, 120 bp, Artificial Sequence
  ENSG00000104320_25 (sequence is synthesized)
cccctttttggtggtcttactgagctgggtgggtgtctgttttgagcttatttagagtcctagttttcctacttataaagtagaaatggtgagattgttttctttttctaccttaaaggg

SEQ ID NO: 141460 - DNA, 120 bp, Artificial Sequence
  ENSG00000104320_26 (sequence is synthesized)
agatggtaagaaacaatgaatgtcttttttcaaactttattgacaagtgattttcaagtctgtgttcaaaaatatattcatgtacctgtgatccagcaagaagggagttccagtcaagag

SEQ ID NO: 141461 - DNA, 120 bp, Artificial Sequence
  ENSG00000104320_27 (sequence is synthesized)
tcactacaactgattagttgtttagagaatgagaaatggaacagtgaggaatggaggccatatttccatgacttcccttgtaaacagaagcaacagaagggacaagaggctggcctctac

SEQ ID NO: 141462 - DNA, 120 bp, Artificial Sequence
  ENSG00000104320_28 (sequence is synthesized)
atcactctcaccttccaaatcttgtggaagtgcatctacttgccagaaccaaattaacttacttccaagttctggctgcttgcaggtggaactccagctgcaagggagttagggaaatga

SEQ ID NO: 141463 - DNA, 120 bp, Artificial Sequence
  ENSG00000104320_29 (sequence is synthesized)
aggtctttttttaaaagcttctcagccttcctagggaacagaaattgggtgagccaatctgcaatttctactacaggcattgagaccagttagattattgaaatattatagagagttatg

SEQ ID NO: 141464 - DNA, 120 bp, Artificial Sequence
  ENSG00000104320_30 (sequence is synthesized)
aacacttaaattatgatagtggtatgacattggatagaacatgggatactttagaagtagaattgacagggcatattagttgatgaaatggagtcatttgagtctcttaatagccatgta

SEQ ID NO: 141465 - DNA, 120 bp, Artificial Sequence
  ENSG00000104320_31 (sequence is synthesized)
tcataattaccaagtgaagctggtggaacatatggtctccattttacagttaaggaatataatggacagattaatattgttctctgtcatgcccacaatccctttctaaggaagactgcc

SEQ ID NO: 141466 - DNA, 120 bp, Artificial Sequence
  ENSG00000104320_32 (sequence is synthesized)
ctactatagcagtttttatatttgtcaatttatgaatataatgaatgagagttctggtacctcctgtctttacaaatattggtgttgtcagtatttttcctttttaaccattccaatcgg

SEQ ID NO: 141467 - DNA, 120 bp, Artificial Sequence
  ENSG00000104320_33 (sequence is synthesized)
tgtgtagtgatgtttcattttggttttaatttgtatatccctgatagctataattgggtcatagaaattctttatacattctagatgcaagtctcttgtcggatatatgtattgagatat

SEQ ID NO: 141468 - DNA, 120 bp, Artificial Sequence
  ENSG00000104320_34 (sequence is synthesized)
tacacctagtctgtggcttgactgttttctttatgtcttttgatgaatagaagttttaaattttgacaaggtcaaatttatttttttcttttgtttgatattttttctctccaatttaac

SEQ ID NO: 141469 - DNA, 120 bp, Artificial Sequence
  ENSG00000104320_35 (sequence is synthesized)
cccaagatttcagatattctgctctattatataaactttatatttttatatttgtgatctaccttgaattgatatgtatgttgtgaattatggatcagggttctttttttcccccataca

SEQ ID NO: 141470 - DNA, 120 bp, Artificial Sequence
  ENSG00000104320_36 (sequence is synthesized)
agtatccagtcattgtaacactgtttattgaaagaattatcctttcctcattaaattaccttgccaattagtaaaaaatcaattaaccataatggtggatctgtttctggactttctgtt

SEQ ID NO: 141471 - DNA, 120 bp, Artificial Sequence
  ENSG00000104320_37 (sequence is synthesized)
tggttacactgaaatgtttgtccatccttgcactcactcataccatactgccttgaattactgtagctgcatagatgctccttaagttgggattacattgtaataaacgcaatgtaagtt

SEQ ID NO: 141472 - DNA, 120 bp, Artificial Sequence
  ENSG00000104320_38 (sequence is synthesized)
agagagttcacaggatttgtcattttatagagctgtgtagacttttttaatgttaacaaaattaaatacttatattgtggcagtggtaccagtggtatttgttcattttgagatttgaag

SEQ ID NO: 141473 - DNA, 120 bp, Artificial Sequence
  ENSG00000104320_39 (sequence is synthesized)
tttctatttcagtaatttactctttgttttagttagaaactcagaggaagtaggacatagttatttttatttgcttactaaacatttattgtttactattagtttggtgcaaaagtaatt

SEQ ID NO: 141474 - DNA, 120 bp, Artificial Sequence
  ENSG00000104320_40 (sequence is synthesized)
aaaactcagcaagctagcaatatactattggttgtctttgagtggagatgggtgggagaaagctgtttagttagagctcttttgtaataatcttagcatggattgaaaatatagaggatc

SEQ ID NO: 141475 - DNA, 120 bp, Artificial Sequence
  ENSG00000104320_41 (sequence is synthesized)
agttgaatgaaatattgtagaggcaagaactcagatgtggtgacctccaggatgtggaaatctctaagatgacagtgacctatcactatagcaattcattaactatatattcaccactga

SEQ ID NO: 141476 - DNA, 120 bp, Artificial Sequence
  ENSG00000104320_42 (sequence is synthesized)
ataagatatatatctggaggtaaattgtttactgagatgatatttattagaataactactaggttaaaaatgcttcacagtttttagccttctgtcacagatgagtatgttataaatgtt

SEQ ID NO: 141477 - DNA, 120 bp, Artificial Sequence
  ENSG00000104320_43 (sequence is synthesized)
tccaaagtttatagagcatttgagtaagtaattttcttatcttgaattagctacaatttgattccaaatacaaagttcaggtacaagaaataaaacatttttactattttttcaggtatt

SEQ ID NO: 141478 - DNA, 120 bp, Artificial Sequence
  ENSG00000104320_44 (sequence is synthesized)
aaaaacatgatgttccctggaacaacctcccacatcacagatgtaaagacttttcttctcccaggaattcaaacttgaggctacatgtgctaggaaggggacaaaccacactaacagatt

SEQ ID NO: 141479 - DNA, 120 bp, Artificial Sequence
  ENSG00000104320_45 (sequence is synthesized)
gaagcagtaattgttgtctgccgtgttgggaggttagccacctgcctattgtcttttcttttgaaaactttttctctgagaagtgaatgtactgagtggtaaaagactttaaattatttg

SEQ ID NO: 141480 - DNA, 120 bp, Artificial Sequence
  ENSG00000104320_46 (sequence is synthesized)
cagaagcggcgagtacgctgtatggcaagcgcatattcttcccgggcagcacggcggctgtgagctggaattcagcgcgggcggtggggtgattgcggcgccccctggtggcagtcctcc

SEQ ID NO: 141481 - DNA, 120 bp, Artificial Sequence
  ENSG00000104320_47 (sequence is synthesized)
gcgcccctcccctgactccccctccctcccagcctcacccccgcgccgttgcagcgctagggctggatggcctgcgggagaaccatacagacttttgactggcgttgagtacgttgttgg

SEQ ID NO: 141482 - DNA, 120 bp, Artificial Sequence
  ENSG00000104321_0 (sequence is synthesized)
ccagaagttctccagggcttccgcagagcgactttttcgctgcctgtgagctgcagcgcgggagagctcgggctcgcgcggaccccagcgcctggcaggctgacagcgctctctcgcccc

SEQ ID NO: 141483 - DNA, 120 bp, Artificial Sequence
  ENSG00000104321_1 (sequence is synthesized)
aggtgcccgcgcgcgtggtgagcagctgcaccaggtggcgtccggggtggggtcaatgaagcgcagcctgaggaagatgtggcgccctggagaaaagaaggagccccagggcgttgtcta

SEQ ID NO: 141484 - DNA, 120 bp, Artificial Sequence
  ENSG00000104321_2 (sequence is synthesized)
tgaggatgtgccggacgacacggaggatttcaaggaatcgcttaaggtggtttttgaaggaagtgcatatggattacaaaactttaataagcaaaagaaattaaaaagatgtgacgatat

SEQ ID NO: 141485 - DNA, 120 bp, Artificial Sequence
  ENSG00000104321_3 (sequence is synthesized)
ggacaccttcttcttgcattatgctgcagcagaaggccaaattgagctaatggagaagatcaccagagattcctctttggaagtgctgcatgaaatggatgattatggaaatacccctct

SEQ ID NO: 141486 - DNA, 120 bp, Artificial Sequence
  ENSG00000104321_4 (sequence is synthesized)
gcattgtgctgtagaaaaaaaccaaattgaaagcgttaagtttcttctcagcagaggagcaaacccaaatctccgaaacttcaacatgatggctcctctccacatagctgtgcagggcat

SEQ ID NO: 141487 - DNA, 120 bp, Artificial Sequence
  ENSG00000104321_5 (sequence is synthesized)
gaataatgaggtgatgaaggtcttgcttgagcatagaactattgatgttaatttggaaggagaaaatggaaacacagctgtgatcattgcgtgcaccacaaataatagcgaagcattgca

SEQ ID NO: 141488 - DNA, 120 bp, Artificial Sequence
  ENSG00000104321_6 (sequence is synthesized)
gattttgcttaaaaaaggagctaagccatgtaaatcaaataaatggggatgtttccctattcaccaagctgcattttcaggttccaaagaatgcatggaaataatactaaggtttggtga

SEQ ID NO: 141489 - DNA, 120 bp, Artificial Sequence
  ENSG00000104321_7 (sequence is synthesized)
agagcatgggtacagtagacagttgcacattaactttatgaataatgggaaagccacccctctccacctggctgtgcaaaatggtgacttggaaatgatcaaaatgtgcctggacaatgg

SEQ ID NO: 141490 - DNA, 120 bp, Artificial Sequence
  ENSG00000104321_8 (sequence is synthesized)
tgcacaaatagacccagtggagaagggaaggtgcacagccattcattttgctgccacccagggagccactgagattgttaaactgatgatatcgtcctattctggtagcgtggatattgt

SEQ ID NO: 141491 - DNA, 120 bp, Artificial Sequence
  ENSG00000104321_9 (sequence is synthesized)
taacacaaccgatggatgtcatgagaccatgcttcacagagcttcattgtttgatcaccatgagctagcagactatttaatttcagtgggagcagatattaataagatcgattctgaagg

SEQ ID NO: 141492 - DNA, 120 bp, Artificial Sequence
  ENSG00000104321_10 (sequence is synthesized)
acgctctccacttatattagcaactgcttctgcatcttggaatattgtaaatttgctactctctaaaggtgcccaagtagacataaaagataattttggacgtaattttctgcatttaac

SEQ ID NO: 141493 - DNA, 120 bp, Artificial Sequence
  ENSG00000104321_11 (sequence is synthesized)
tgtacagcaaccttatggattaaaaaatctgcgacctgaatttatgcagatgcaacagatcaaagagctggtaatggatgaagacaacgatgggtgtactcctctacattatgcatgtag

SEQ ID NO: 141494 - DNA, 120 bp, Artificial Sequence
  ENSG00000104321_12 (sequence is synthesized)
acaggggggccctggttctgtaaataacctacttggctttaatgtgtccattcattccaaaagcaaagataagaaatcacctctgcattttgcagccagttatgggcgtatcaatacctg

SEQ ID NO: 141495 - DNA, 120 bp, Artificial Sequence
  ENSG00000104321_13 (sequence is synthesized)
tcagaggctcctacaagacataagtgatacgaggcttctgaatgaaggtgaccttcatggaatgactcctctccatctggcagcaaagaatggacatgataaagtagttcagcttcttct

SEQ ID NO: 141496 - DNA, 120 bp, Artificial Sequence
  ENSG00000104321_14 (sequence is synthesized)
gaaaaaaggtgcattgtttctcagtgaccacaatggctggacagctttgcatcatgcgtccatgggcgggtacactcagaccatgaaggtcattcttgatactaatttgaagtgcacaga

SEQ ID NO: 141497 - DNA, 120 bp, Artificial Sequence
  ENSG00000104321_15 (sequence is synthesized)
tcgcctggatgaagacgggaacactgcacttcactttgctgcaagggaaggccacgccaaagccgttgcgcttcttctgagccacaatgctgacatagtcctgaacaagcagcaggcctc

SEQ ID NO: 141498 - DNA, 120 bp, Artificial Sequence
  ENSG00000104321_16 (sequence is synthesized)
ctttttgcaccttgcacttcacaataagaggaaggaggttgttcttacgatcatcaggagcaaaagatgggatgaatgtcttaagattttcagtcataattctccaggcaataaatgtcc

SEQ ID NO: 141499 - DNA, 120 bp, Artificial Sequence
  ENSG00000104321_17 (sequence is synthesized)
aattacagaaatgatagaatacctccctgaatgcatgaaggtacttttagatttctgcatgttgcattccacagaagacaagtcctgccgagactattatatcgagtataatttcaaata

SEQ ID NO: 141500 - DNA, 120 bp, Artificial Sequence
  ENSG00000104321_18 (sequence is synthesized)
tcttcaatgtccattagaattcaccaaaaaaacacctacacaggatgttatatatgaaccgcttacagccctcaacgcaatggtacaaaataaccgcatagagcttctcaatcatcctgt

SEQ ID NO: 141501 - DNA, 120 bp, Artificial Sequence
  ENSG00000104321_19 (sequence is synthesized)
gtgtaaagaatatttactcatgaaatggttggcttatggatttagagctcatatgatgaatttaggatcttactgtcttggtctcatacctatgaccattctcgttgtcaatataaaacc

SEQ ID NO: 141502 - DNA, 120 bp, Artificial Sequence
  ENSG00000104321_20 (sequence is synthesized)
aggaatggctttcaactcaactggcatcatcaatgaaactagtgatcattcagaaatactagataccacgaattcatatctaataaaaacttgtatgattttagtgtttttatcaagtat

SEQ ID NO: 141503 - DNA, 120 bp, Artificial Sequence
  ENSG00000104321_21 (sequence is synthesized)
ttccaacagaaaaggaattattttatggatataagcaatgttcttgaatggattatctacacgacgggcatcatttttgtgctgcccttgtttgttgaaataccagctcatctgcagtgg

SEQ ID NO: 141504 - DNA, 120 bp, Artificial Sequence
  ENSG00000104321_22 (sequence is synthesized)
caatgtggagcaattgctgtttacttctattggatgaatttcttattgtatcttcaaagatttgaaaattgtggaatttttattgttatgttggaggtaattttgaaaactttgttgagg

SEQ ID NO: 141505 - DNA, 120 bp, Artificial Sequence
  ENSG00000104321_23 (sequence is synthesized)
tctacagttgtatttatcttccttcttctggcttttggactcagcttttacatcctcctgaatttacaggatcccttcagctctccattgctttctataatccagaccttcagcatgatg

SEQ ID NO: 141506 - DNA, 120 bp, Artificial Sequence
  ENSG00000104321_24 (sequence is synthesized)
ctaggagatatcaattatcgagagtccttcctagaaccatatctgagaaatgaattggcacatccagttctgtcctttgcacaacttgtttccttcacaatatttgtcccaattgtcctc

SEQ ID NO: 141507 - DNA, 120 bp, Artificial Sequence
  ENSG00000104321_25 (sequence is synthesized)
atgaatttacttattggtttggcagttggcgacattgctgaggtccagaaacatgcatcattgaagaggatagctatgcaggtggaacttcataccagcttagagaagaagctgccactt

SEQ ID NO: 141508 - DNA, 120 bp, Artificial Sequence
  ENSG00000104321_26 (sequence is synthesized)
tggtttctacgcaaagtggatcagaaatccaccatcgtgtatcccaacaaacccagatctggtgggatgttattccatatattctgttttttattttgcactggggaaataagacaagaa

SEQ ID NO: 141509 - DNA, 120 bp, Artificial Sequence
  ENSG00000104321_27 (sequence is synthesized)
ataccaaatgctgataaatctttagaaatggaaatattaaagcagaaataccggctgaaggatcttacttttctcctggaaaaacagcatgagctcattaaactgatcattcagaagatg

SEQ ID NO: 141510 - DNA, 120 bp, Artificial Sequence
  ENSG00000104321_28 (sequence is synthesized)
gagatcatctctgagacagaggatgatgatagccattgttcttttcaagacaggtttaagaaagagcagatggaacaaaggaatagcagatggaatactgtgttgagagcagtcaaggca

SEQ ID NO: 141511 - DNA, 120 bp, Artificial Sequence
  ENSG00000104321_29 (sequence is synthesized)
aaaacacaccatcttgagccttagctcctcagaccttcagtgaggcttctaatggggggtgcatgacttgctggttctaactttcaatttaaaaagagtgaggaagaagcagaatgattc

SEQ ID NO: 141512 - DNA, 120 bp, Artificial Sequence
  ENSG00000104321_30 (sequence is synthesized)
attttgctgcgtgtgaaatcatggttcctgcatgctgtataaaagtaaaccatcttttatcctctattcatattttctaccaatcactatgtattggggatatctttgcagatatgttca

SEQ ID NO: 141513 - DNA, 120 bp, Artificial Sequence
  ENSG00000104321_31 (sequence is synthesized)
aattggactggactttgatgagatataatctcattatttgaatgggtagaaaatgaatttgctagaacacacatttttaatgaaaagaagtaataaatgtaactattaagctaaaatgca

SEQ ID NO: 141514 - DNA, 120 bp, Artificial Sequence
  ENSG00000104321_32 (sequence is synthesized)
aatgtcagtactgaattcctgcttgttaattacataatatgtgatgctctagaaaatagtcacaagtattaataatgccttagatgatagtcttaaatattaggttgaggtctacctaac

SEQ ID NO: 141515 - DNA, 120 bp, Artificial Sequence
  ENSG00000104321_33 (sequence is synthesized)
ctaagctgcttcctggaaagcttcatgttgaaagaacctatgggtggcaccatgtggacttttctgtccctactgtgatgaatagccccacccttcttgctgtccccaacacacctgatg

SEQ ID NO: 141516 - DNA, 120 bp, Artificial Sequence
  ENSG00000104321_34 (sequence is synthesized)
tcactttgagccatatagttgaagtacaaattaataggccttatgatatgcacgaattttactatagataatatatgttgtttctggttttgtttgccaatgagcataataaatgtaaaa

SEQ ID NO: 141517 - DNA, 120 bp, Artificial Sequence
  ENSG00000104321_35 (sequence is synthesized)
cctatatagtatccctgtgattattgtatgagcctttgtttgagatttgaaaacaacatggctccatcacatattcccttttttcttttgatgtctactcaaatcatgaattaatcacat

SEQ ID NO: 141518 - DNA, 120 bp, Artificial Sequence
  ENSG00000104321_36 (sequence is synthesized)
acctcatcattaatcttttcaaggtccttctattgttttgtctgattttctccatcatcctgattagcatgtttattccctcactacccccaggagatattcactgtaatgaatatgtct

SEQ ID NO: 141519 - DNA, 120 bp, Artificial Sequence
  ENSG00000104321_37 (sequence is synthesized)
ttggctatgtatgtgtccttgtgttatgttgtacagtgttgttttgagtctgttattatttacacagatgttattatgctatagcttctatttctgtttttgcttcttatttctcttata

SEQ ID NO: 141520 - DNA, 120 bp, Artificial Sequence
  ENSG00000104321_38 (sequence is synthesized)
attctcacttatttcctattttttctactcatttctatttgttactcctttttactggacatgatgtttacaagatacaactgtgttactgtattccatctagtacggggcctttggtgt

SEQ ID NO: 141521 - DNA, 120 bp, Artificial Sequence
  ENSG00000104321_39 (sequence is synthesized)
ggcttactatttcattgtgtgcacccacccacccaccacactggacttttctagagatggacagcttggttacctccaccttcctgcactcattctcaaacatactgatgttcatacaaa

SEQ ID NO: 141522 - DNA, 120 bp, Artificial Sequence
  ENSG00000104321_40 (sequence is synthesized)
ccagcagagtgctgagggacgatatgtactattacaaaaccagacacttttacattcatggtccaacagatcacatggcctagaggcaatgttgcatataccttaatctttgatatgaat

SEQ ID NO: 141523 - DNA, 120 bp, Artificial Sequence
  ENSG00000104321_41 (sequence is synthesized)
aatatctttgttctttatatttcttaaaacagaaagggtggaaaatcactatacagaagcaatatccaaagatctcctgatcataaagacaaggggtcttttcagtcttccctctcctca

SEQ ID NO: 141524 - DNA, 120 bp, Artificial Sequence
  ENSG00000104321_42 (sequence is synthesized)
aaccttgtgtagcattgcacaatatagatctcagtcaacattcactgagtgccaagaatgtgagaaacactgtaccatgcctgtcatgcgaaatatttaaataaacagattgtcttacaa

SEQ ID NO: 141525 - DNA, 120 bp, Artificial Sequence
  ENSG00000104321_43 (sequence is synthesized)
agcagaaataccggaagacaacttgtgccttcgtactgactctaattcctgttggttgagtgactctgggcatatgtcctcctctctaaaatgatgatgatagaatatattctttatggt

SEQ ID NO: 141526 - DNA, 120 bp, Artificial Sequence
  ENSG00000104321_44 (sequence is synthesized)
gtggttcacgtcttctgtttccttattgaacttctgtctggttgttctatccataactgaaagtcagatagtgaagtcgcctaccattattgtgttgctgtttatttctcccttcagttc

SEQ ID NO: 141527 - DNA, 120 bp, Artificial Sequence
  ENSG00000104321_45 (sequence is synthesized)
ttagcaagtggattcttgaggtgaagtatgaatcaaaaggcaacagaattgggagaataccaaggggtgggtgaatgttggggaaacctccagtctcacagagcagcgaggtccacaggc

SEQ ID NO: 141528 - DNA, 120 bp, Artificial Sequence
  ENSG00000104321_46 (sequence is synthesized)
caatgaaatttgatggtaaagcgtttactccctggtaggtccagagaaatgaaggcaggggtgagttttcattaagataagtgttattttgaagtgtattgatttgaaatgctgcccttt

SEQ ID NO: 141529 - DNA, 120 bp, Artificial Sequence
  ENSG00000104321_47 (sequence is synthesized)
tcagaaatactagataccacggtaatttcaaattttaactttctaaaataaaggattataaaaaatgtattttttcttaagactactaaacccataataaatctgacatatcaggacttt

SEQ ID NO: 141530 - DNA, 120 bp, Artificial Sequence
  ENSG00000104321_48 (sequence is synthesized)
agaaataccaaatgctgataaatctttagaaatggaaatattaaagcagaaataccgtatcataaactgtattcttcatctgaattcataaagcaaagctctgaaagcttctgaagatcc

SEQ ID NO: 141531 - DNA, 120 bp, Artificial Sequence
  ENSG00000104321_49 (sequence is synthesized)
ctggagtaactatgtggtgggcagtcattaagcatgagggttttacagttagttagtacctgagttcaaacccctattcaactaggtacgtaataactgtgaccctgggcaatctgctta

SEQ ID NO: 141532 - DNA, 120 bp, Artificial Sequence
  ENSG00000104321_50 (sequence is synthesized)
ttctctataatagtttcttacctataaactgggaacaaaaataaactagccatgaactaacagtgtaactttgggaaaaatcatttaaacttcaaaaatacatgtttcctggaaggattg

SEQ ID NO: 141533 - DNA, 120 bp, Artificial Sequence
  ENSG00000104321_51 (sequence is synthesized)
tgactaccgaggttaaaacctatgcgttcctacattcagaagggaccgaggttaaaacctatgccttcctacattcagaagggctaaaagaagaactgaaaataaattcatgaaatgtgt

SEQ ID NO: 141534 - DNA, 120 bp, Artificial Sequence
  ENSG00000104324_0 (sequence is synthesized)
ctctcggccccgcggcctggccggcaagcagggctgcagtcacggggcggcgcggagggccccagcccagtcaggggtgtggccgccgccaccgtaaggctaggccgcgagcttagtcct

SEQ ID NO: 141535 - DNA, 120 bp, Artificial Sequence
  ENSG00000104324_1 (sequence is synthesized)
gggagccgcctccgtcgccgccgtcagagccgccctatcagattatcttaacaagaaaaccaactggaaaaaaaaatgaaattccttatcttcgcatttttcggtggtgttcacctttta

SEQ ID NO: 141536 - DNA, 120 bp, Artificial Sequence
  ENSG00000104324_2 (sequence is synthesized)
tccctgtgctctgggaaagctatatgcaagaatggcatctctaagaggacttttgaagaaataaaagaagaaatagccagctgtggagatgttgctaaagcaatcatcaacctagctgtt

SEQ ID NO: 141537 - DNA, 120 bp, Artificial Sequence
  ENSG00000104324_3 (sequence is synthesized)
tatggtaaagcccagaacagatcctatgagcgattggcacttctggttgatactgttggacccagactgagtggctccaagaacctagaaaaagccatccaaattatgtaccaaaacctg

SEQ ID NO: 141538 - DNA, 120 bp, Artificial Sequence
  ENSG00000104324_4 (sequence is synthesized)
cagcaagatgggctggagaaagttcacctggagccagtgagaataccccactgggagaggggagaagaatcagctgtgatgctggagccaagaattcataagatagccatcctgggtctt

SEQ ID NO: 141539 - DNA, 120 bp, Artificial Sequence
  ENSG00000104324_5 (sequence is synthesized)
ggcagcagcattgggactcctccagaaggcattacagcagaagttctggtggtgacctctttcgatgaactgcagagaagggcctcagaagcaagagggaagattgttgtttataaccaa

SEQ ID NO: 141540 - DNA, 120 bp, Artificial Sequence
  ENSG00000104324_6 (sequence is synthesized)
ccttacatcaactactcaaggacggtgcaataccgaacgcagggggcggtggaagctgccaaggtgggggctttggcatctctcattcgatccgtggcctccttctccatctacagtcct

SEQ ID NO: 141541 - DNA, 120 bp, Artificial Sequence
  ENSG00000104324_7 (sequence is synthesized)
cacacaggtattcaggaataccaggatggcgtgcccaagattccaacagcctgtattacggtggaagatgcagaaatgatgtcaagaatggcttctcatgggatcaaaattgtcattcag

SEQ ID NO: 141542 - DNA, 120 bp, Artificial Sequence
  ENSG00000104324_8 (sequence is synthesized)
gcaaagacctacccagatactgattccttcaacactgtagcagagatcactgggagcaaatatccagaacaggttgtactggtcagtggacatctggacagctgggatgttgggcagggt

SEQ ID NO: 141543 - DNA, 120 bp, Artificial Sequence
  ENSG00000104324_9 (sequence is synthesized)
gccatggatgatggcggtggagcctttatatcatgggaagcactctcacttattaaagatcttgggctgcgtccaaagaggactctgcggctggtgctctggactgcagaagaacaaggt

SEQ ID NO: 141544 - DNA, 120 bp, Artificial Sequence
  ENSG00000104324_10 (sequence is synthesized)
ggagttggtgccttccagtattatcagttacacaaggtaaatatttccaactacagtctggtgatggagtctgacgcaggaaccttcttacccactgggctgcaattcactggcagtgaa

SEQ ID NO: 141545 - DNA, 120 bp, Artificial Sequence
  ENSG00000104324_11 (sequence is synthesized)
aaggccagggccatcatggaggaggttatgagcctgctgcagcccctcaatatcactcaggtcctgagccatggagaagggacagacatcaacttttggatccaagctggagtgcctgga

SEQ ID NO: 141546 - DNA, 120 bp, Artificial Sequence
  ENSG00000104324_12 (sequence is synthesized)
gccagtctacttgatgacttatacaagtatttcttcttccatcactcccacggagacaccatgactgtcatggatccaaagcagatgaatgttgctgctgctgtttgggctgttgtttct

SEQ ID NO: 141547 - DNA, 120 bp, Artificial Sequence
  ENSG00000104324_13 (sequence is synthesized)
tatgttgttgcagacatggaagaaatgctgcctaggtcctagaaacagtaagaaagaaacgttttcatgcttctggccaggaatcctgggtctgcaactttggaaaactcctcttcacat

SEQ ID NO: 141548 - DNA, 120 bp, Artificial Sequence
  ENSG00000104324_14 (sequence is synthesized)
aacaatttcatccaattcatcttcaaagcacaactctatttcatgctttctgttattatctttcttgatactttccaaattctctgattctagaaaaaggaatcattctcccctccctcc

SEQ ID NO: 141549 - DNA, 120 bp, Artificial Sequence
  ENSG00000104324_15 (sequence is synthesized)
caccacatagaatcaacatatggtagggattacagtgggggcatttctttatatcacctcttaaaaacattgtttccactttaaaagtaaacacttaataaatttttggaagatctctga

SEQ ID NO: 141550 - DNA, 120 bp, Artificial Sequence
  ENSG00000104324_16 (sequence is synthesized)
aaagctgtaaaagtctcagttaggatgtgtgttgattaaactgtggtgtggctgagcattttgcctgaaacttcatagggaataagcatctgttaatgactttcagattatcttaacaag

SEQ ID NO: 141551 - DNA, 120 bp, Artificial Sequence
  ENSG00000104324_17 (sequence is synthesized)
gaaaaatgcattttagtttcctcagcattcacaatgtagaaccttccagagaagctttcttttctttctggcatctggataaatggaggaatagcacgaagcgattatcttaacaagaaa

SEQ ID NO: 141552 - DNA, 120 bp, Artificial Sequence
  ENSG00000104324_18 (sequence is synthesized)
aggctgaaggaaggcaagggctgaaacggagacaggatgctactgcagtactccacgtgaaggctggtggtcgcttggactgagtcagaacagggaaactgatgggaagttgtcggagag

SEQ ID NO: 141553 - DNA, 86 bp, Artificial Sequence
  ENSG00000104324_19 (sequence is synthesized)
aactatactacaagcctgcagtaaccaaaatggcatgttacgggtacaaaaacagacacataggccaatggaacaggttagagaag

SEQ ID NO: 141554 - DNA, 90 bp, Artificial Sequence
  ENSG00000104324_20 (sequence is synthesized)
ctctcaccatacataaaaatcaacccaagattgattaaagacttaagtgtaaaacctaaaattataaaaatcctacaagaaaaccttgga

SEQ ID NO: 141555 - DNA, 120 bp, Artificial Sequence
  ENSG00000104324_21 (sequence is synthesized)
aaaacctaaaattataaaaatcctacaagaaaaccttggaaataacattctggacattggccctggcaaagacttcatgatgaagactccaaaagcaattgtaacaaaaacaaaaatcga

SEQ ID NO: 141556 - DNA, 120 bp, Artificial Sequence
  ENSG00000104324_22 (sequence is synthesized)
caagtgggacctaattaaagagtttctgcacagtaaaagaaactgtcaacagagtaaatagacaacctacagaatggaagaaaatatttgcaaactacgtatctgacaaaggtctaatat

SEQ ID NO: 141557 - DNA, 120 bp, Artificial Sequence
  ENSG00000104324_23 (sequence is synthesized)
gcacatcaactcctgatacgcacgagctagcctgaactctgtgatgaccatcagatgcagataaactgccagacagagaagctgtcttgtagatgtgactttgctgccttcaagagcagg

SEQ ID NO: 141558 - DNA, 120 bp, Artificial Sequence
  ENSG00000104324_24 (sequence is synthesized)
gctttctgcacctatgctctaagcgcccttagtgttcctctcccagtggtcctggattgatttctctaatggggagcctcctctgtagggtctacaaggtgactggtggattgattgccc

SEQ ID NO: 141559 - DNA, 120 bp, Artificial Sequence
  ENSG00000104324_25 (sequence is synthesized)
aggatgagaaaaccagccaagaaaaatgagaaggatcatccagtaaagcataaaaagagccaagagtctgaggttccagaagccaaggcaagaatgcatttccaggagtaaacaaatgtc

SEQ ID NO: 141560 - DNA, 73 bp, Artificial Sequence
  ENSG00000104324_26 (sequence is synthesized)
ctacacaacctttccaccattattatgaggcctcccagccctgtgtaactattatcttaacaagaaaaccaac

SEQ ID NO: 141561 - DNA, 120 bp, Artificial Sequence
  ENSG00000104325_0 (sequence is synthesized)
gttctggagactcaacatgaagctaccggccagggttttctttactctggggtcccggctgccctgtggcctcgctcctcggaggtttttcagttatgggacaaaaatattatatcaaaa

SEQ ID NO: 141562 - DNA, 120 bp, Artificial Sequence
  ENSG00000104325_1 (sequence is synthesized)
cactgaagctttgcaatctaaattcttttcacctcttcaaaaagcgatgctaccacctaatagttttcaaggaaaagtggcattcattactgggggaggtactggccttggtaaaggaat

SEQ ID NO: 141563 - DNA, 120 bp, Artificial Sequence
  ENSG00000104325_2 (sequence is synthesized)
gacaactcttctgtccagcctaggtgctcagtgcgtgatagccagccggaagatggatgttttgaaagctaccgcagaacaaatttcttctcaaactggaaataaggttcatgcaattca

SEQ ID NO: 141564 - DNA, 120 bp, Artificial Sequence
  ENSG00000104325_3 (sequence is synthesized)
gtgtgatgtgagggatcctgatatggttcaaaacactgtgtcagaactgatcaaagttgcaggacatcctaatattgtgataaacaatgcagcagggaattttatttctcctactgaaag

SEQ ID NO: 141565 - DNA, 120 bp, Artificial Sequence
  ENSG00000104325_4 (sequence is synthesized)
actttctcctaatgcttggaaaaccataactgacatagttctaaatggcacagccttcgtgacactagaaattggaaaacaactaattaaagcacagaaaggagcagcatttctttctat

SEQ ID NO: 141566 - DNA, 120 bp, Artificial Sequence
  ENSG00000104325_5 (sequence is synthesized)
tactactatctatgctgagactggttcaggttttgtagtaccaagtgcttctgccaaagcaggtgtggaagccatgagcaagtctcttgcagctgaatggggtaaatatggaatgcgatt

SEQ ID NO: 141567 - DNA, 120 bp, Artificial Sequence
  ENSG00000104325_6 (sequence is synthesized)
caatgtgattcaaccagggcctataaaaaccaaaggtgcctttagccgtctggacccaactggaacatttgagaaagaaatgattggcagaattccctgtggtcgcctggggactgtaga

SEQ ID NO: 141568 - DNA, 120 bp, Artificial Sequence
  ENSG00000104325_7 (sequence is synthesized)
agaactcgcaaatcttgctgctttcctttgtagtgattatgcttcttggattaatggagcagtcattaaatttgacggtggagaggaagtacttatttcaggggaattcaacgacctgag

SEQ ID NO: 141569 - DNA, 120 bp, Artificial Sequence
  ENSG00000104325_8 (sequence is synthesized)
aaaggtcaccaaggagcagtgggacaccatagaagaactcatcaggaagacaaaaggttcctaagaccactttggccttcatcttggttacagaaaagggaatagaaatgaaacaaatta

SEQ ID NO: 141570 - DNA, 120 bp, Artificial Sequence
  ENSG00000104325_9 (sequence is synthesized)
tctctcatcttttgactatttcaagtctaataaattcttaattaacaaacattcattgaatatgtattatgtgccaggccagtgatagccattgtatattcaaagataaataaaatgaaa

SEQ ID NO: 141571 - DNA, 120 bp, Artificial Sequence
  ENSG00000104325_10 (sequence is synthesized)
tatagtccttcaaaacattaaaaaaaaaaaaaggaggcatggggagagtaggtaaaggctcctctttacctattgatagaggtaaaaagtacttagaagtgcagagagaacagatctttg

SEQ ID NO: 141572 - DNA, 120 bp, Artificial Sequence
  ENSG00000104325_11 (sequence is synthesized)
tgacttggaaaatcaggagaaactcaatggtggcggtagcatttgagttacataatatactatacctatattaatagggcctaaaagaaagaaattagaggatacacactaaatataata

SEQ ID NO: 141573 - DNA, 120 bp, Artificial Sequence
  ENSG00000104325_12 (sequence is synthesized)
gactttgcctttccagtatactttcttttcactggacttgtgaattatcttctttgggtaactcagtattaactcaaacctttaatttttactaggacctatttgtagccaggcatttta

SEQ ID NO: 141574 - DNA, 120 bp, Artificial Sequence
  ENSG00000104325_13 (sequence is synthesized)
tttagtactgaataagctatagccgttgccctttttaaattcattatctagcaagatagtcaaacttataaataattatttatgatacattgtgataagtattattccagcagtatttaa

SEQ ID NO: 141575 - DNA, 120 bp, Artificial Sequence
  ENSG00000104325_14 (sequence is synthesized)
gtgtagaggaggaagtaattcattctgtctccagagtttggagaatgtgatgcctaagagatagcatgccatcccagctgtaaaagaagaatagatttctctgggtaaaagaggtaaaga

SEQ ID NO: 141576 - DNA, 120 bp, Artificial Sequence
  ENSG00000104325_15 (sequence is synthesized)
aagcctataaaatatttttgtatatcatttgattaaatttcatctttggtttgactaatttgtcatcctgaaaatcaaataataatgaatccaaagtctcaagtctacagagctatactt

SEQ ID NO: 141577 - DNA, 120 bp, Artificial Sequence
  ENSG00000104325_16 (sequence is synthesized)
ttgagcctatatttttaaaatgtccattttgctttcccaggagtcagttacaacatgttcactagactgactatccccattgcccaagttgacacaagaggaaaccagcttccatcttac

SEQ ID NO: 141578 - DNA, 120 bp, Artificial Sequence
  ENSG00000104325_17 (sequence is synthesized)
ctcatctgaataaatctgccacaagcccatggaaaccccaattaacattgacagttaattgtgtacataaattacatttattacatttaattgtgtatatataggggatgttataggttt

SEQ ID NO: 141579 - DNA, 120 bp, Artificial Sequence
  ENSG00000104325_18 (sequence is synthesized)
ggaataagtggcccaacatttccaattatactgactttcactgggcttttttttaggctgttgcactttttctccacatgcttgcaatacaatactctcaaaataaaacgcagacaggta

SEQ ID NO: 141580 - DNA, 79 bp, Artificial Sequence
  ENSG00000104325_19 (sequence is synthesized)
ccaaactgggtaatttataaaagaaagaggtttcattgactcatagttcagcatggctagggaggcctcacaatcatgg

SEQ ID NO: 141581 - DNA, 82 bp, Artificial Sequence
  ENSG00000104325_20 (sequence is synthesized)
ttcattgactcatagttcaggtgaggagcaaagtcatgtcttacgtggtggcacccaagagagcttgtgcaggggaactccc

SEQ ID NO: 141582 - DNA, 120 bp, Artificial Sequence
  ENSG00000104325_21 (sequence is synthesized)
gatctcgtgagacttattcactatcacactattgtgttgatattgtgttcacacaccaataatgatggtttatcactcactccatttccaaacccaccttcccacccacctctcaccaaa

SEQ ID NO: 141583 - DNA, 120 bp, Artificial Sequence
  ENSG00000104325_22 (sequence is synthesized)
cacacaaagacacactctttccctccactgattccaccagtatagccatatttctctttctggttaaatttatactaaatgtttacatttatataacttaataaatattatttttttcca

SEQ ID NO: 141584 - DNA, 120 bp, Artificial Sequence
  ENSG00000104325_23 (sequence is synthesized)
tcaacatgaagctaccggccagggttttctttactctggggtcccggctgccctgtggcctcgctcctcggagggtgatgaacagcctccttctaaatcattgaccacatttcttattct

SEQ ID NO: 141585 - DNA, 120 bp, Artificial Sequence
  ENSG00000104325_24 (sequence is synthesized)
gccttccggcccgagttctggagactcaacatgaagctaccggccagggttttctttactctggggtcccggctgccctgtggcctcgctcctcggagggtgctcagtgcgtgatagcca

SEQ ID NO: 141586 - DNA, 120 bp, Artificial Sequence
  ENSG00000104325_25 (sequence is synthesized)
ttgcagctgaatggggtaaatatggaatgcgattcaatgtgattcaaccagggcctataaaaaccaaagagtgtgtttggggcagggaggtctgttgtggaaccaatcctgacaatgctg

SEQ ID NO: 141587 - DNA, 120 bp, Artificial Sequence
  ENSG00000104325_26 (sequence is synthesized)
gttctggagactcaacatgaagctaccggccagggttttctttactctggggtcccggctgccctgtggcctcgctcctcggaggtctgaaaaatgagtaaagatggaagccaaagtatc

SEQ ID NO: 141588 - DNA, 120 bp, Artificial Sequence
  ENSG00000104325_27 (sequence is synthesized)
acttttattgtggtttgtgagaggaagctgggcctatcagctggatctcccgaagtaggcggacttacataactctggaggagggcagaacattgtcctctgaaggcagctggctcccaa

SEQ ID NO: 141589 - DNA, 120 bp, Artificial Sequence
  ENSG00000104325_28 (sequence is synthesized)
tgctataaaggaatacctgaggctgggatgaagatggtactacgacattcatgatggatctgccaccataacccaggcacctcccattagaccccacctccaacattggggatcacattt

SEQ ID NO: 141590 - DNA, 120 bp, Artificial Sequence
  ENSG00000104325_29 (sequence is synthesized)
attggggatcacatttcaacatgagttttcaagggacaaacatccaaacatccttagcaggttgactaaggggacagaaagaagcctggagttgtactacctgaacttctcacagtaggg

SEQ ID NO: 141591 - DNA, 120 bp, Artificial Sequence
  ENSG00000104325_30 (sequence is synthesized)
atgattctgatgcctggacaagttcaagactgggcatctgcatctggtgacggcctaaggctgcttgcacttgtggcagaagttatgggacaaaaatattatatcaaaacactgaagctt

SEQ ID NO: 141592 - DNA, 120 bp, Artificial Sequence
  ENSG00000104325_31 (sequence is synthesized)
agttctggagactcaacatgaagctaccggccagggttttctttactctggggtcccggctgccctgtggcctcgctcctcggagggaagatggatgttttgaaagctaccgcagaacaa

SEQ ID NO: 141593 - DNA, 120 bp, Artificial Sequence
  ENSG00000104325_32 (sequence is synthesized)
tttggtggaaataacttttaagaacctcagagaatttaaaactaagaagtagaagcaacccaaggaagcttgaaccatatggagcttgtgttggggaaagggaaagagtgaagtgaataa

SEQ ID NO: 141594 - DNA, 120 bp, Artificial Sequence
  ENSG00000104325_33 (sequence is synthesized)
agttctggagactcaacatgaagctaccggccagggttttctttactctggggtcccggctgccctgtggcctcgctcctcggagggcaccttactagggatatgaaggtgagaagaaga

SEQ ID NO: 141595 - DNA, 120 bp, Artificial Sequence
  ENSG00000104325_34 (sequence is synthesized)
tagcatttgtagtgcttactatgtgctacacactgctctaggtgctttacctgtaataactcatataatcctcacaatgccatatgaagaaatttattttattgtccccattttgtagat

SEQ ID NO: 141596 - DNA, 120 bp, Artificial Sequence
  ENSG00000104325_35 (sequence is synthesized)
gaaggaactgaggcacagagaggtcaaataacctgctgaaagttacatagcttgggagaaaattctgtgctatgtagtccagctccagagcctgtgctttttaaatcagaaaacaaagaa

SEQ ID NO: 141597 - DNA, 120 bp, Artificial Sequence
  ENSG00000104325_36 (sequence is synthesized)
agaatttgattactattaaattcaagagcatgttttaaaaaattcatctgttttttggaaatatatgtatgcaaatttaaattcattttccccttttagtttttcagttatgggacaaaa

SEQ ID NO: 141598 - DNA, 120 bp, Artificial Sequence
  ENSG00000104325_37 (sequence is synthesized)
gagtgactaagggtacagactgaagctagacctcttgagattgacaaattggccatatgacatagagaaaatgatttaacctctctgtgccttagttacattatctgtaatatagggaac

SEQ ID NO: 141599 - DNA, 120 bp, Artificial Sequence
  ENSG00000104325_38 (sequence is synthesized)
aataatagtacctacctgttggggttgtaatctctggcatgtagtaagcatctagtgagtctcagttattactgtctttaacatatggtataatatttcagaatgtatgttgttgatttt

SEQ ID NO: 141600 - DNA, 120 bp, Artificial Sequence
  ENSG00000104325_39 (sequence is synthesized)
gcccaaccgcctgcgccgccttccggcccgagttctggagactcaacatgaagctaccggccagggttttctttactctggggtcccggctgccctgtggcctcgctcctcggaggcgat

SEQ ID NO: 141601 - DNA, 120 bp, Artificial Sequence
  ENSG00000104325_40 (sequence is synthesized)
taaatgtagtctctttgaacccataaatttagtacaaaacctactaacattataccatgaatatattttctttgtaaacctggcttatcaaggaaataatttaaatctgtgagtagataa

SEQ ID NO: 141602 - DNA, 120 bp, Artificial Sequence
  ENSG00000104325_41 (sequence is synthesized)
tggcttatcaaggaaataatttaaatctgtgagtagataatgttaaagtaaactggtttaaaagtgactaattcaataagttagtatcaaatatataaaaatgatctaaatttgactttt

SEQ ID NO: 141603 - DNA, 120 bp, Artificial Sequence
  ENSG00000104325_42 (sequence is synthesized)
atgcttttctttaagctatggattctctgtattcttcaatttatgaaattgaaaaatataatatgaagtcatacaaggtgtttatttctaggaagatggatgttttgaaagctaccgcag

SEQ ID NO: 141604 - DNA, 120 bp, Artificial Sequence
  ENSG00000104327_0 (sequence is synthesized)
agggagagaactctggaggaacgctgagctgagcagcaccgaggacagcgcccggcagcgcccgcgcccaggtctccctccgcagccctgactcgcgcacacgctgagcttttgctcact

SEQ ID NO: 141605 - DNA, 120 bp, Artificial Sequence
  ENSG00000104327_1 (sequence is synthesized)
ccccctcgcgcggacacagacacacgcatattcacacacccagacacacaccccgctgtacaatggcagaatcccacctgcagtcatccctcatcacagcctcacagtttttcgagatct

SEQ ID NO: 141606 - DNA, 120 bp, Artificial Sequence
  ENSG00000104327_2 (sequence is synthesized)
ggctccatttcgacgctgacggaagtggttacctggaaggaaaggagctgcagaacttgatccaggagctccagcaggcgcgaaagaaggctggattggagttatcacctgaaatgaaaa

SEQ ID NO: 141607 - DNA, 120 bp, Artificial Sequence
  ENSG00000104327_3 (sequence is synthesized)
cttttgtggatcagtatgggcaaagagatgatggaaaaataggaattgtagagttggctcacgtattacccacagaagagaatttcctgctgctcttccgatgccagcagctgaagtcct

SEQ ID NO: 141608 - DNA, 120 bp, Artificial Sequence
  ENSG00000104327_4 (sequence is synthesized)
gtgaggaattcatgaagacatggagaaaatatgatactgaccacagtggcttcatagaaactgaggagcttaagaactttctaaaggacctgctagaaaaagcaaacaagactgttgatg

SEQ ID NO: 141609 - DNA, 120 bp, Artificial Sequence
  ENSG00000104327_5 (sequence is synthesized)
acacaaaattagccgagtatacagacctaatgctgaaactatttgattcaaataatgatgggaagctggaattaactgagatggccaggttactaccagtgcaggagaattttcttctta

SEQ ID NO: 141610 - DNA, 120 bp, Artificial Sequence
  ENSG00000104327_6 (sequence is synthesized)
aattccagggaatcaaaatgtgtgggaaagagttcaataaggcttttgagctgtatgatcaggacggcaatggatacatagatgaaaatgaactggatgctttactgaaggatctgtgcg

SEQ ID NO: 141611 - DNA, 120 bp, Artificial Sequence
  ENSG00000104327_7 (sequence is synthesized)
agaagaataaacaggatctggatattaataatattacaacatacaagaagaacataatggctttgtcggatggagggaagctgtaccgaacggatcttgctcttattctctgtgctgggg

SEQ ID NO: 141612 - DNA, 120 bp, Artificial Sequence
  ENSG00000104327_8 (sequence is synthesized)
ataactagagttggtggccgcaaccacttgctagtgatacactgtatctaaaaaataactgtgcactataagggagtaggctgtattttcttttatatctgtaaatttaactgcatatag

SEQ ID NO: 141613 - DNA, 120 bp, Artificial Sequence
  ENSG00000104327_9 (sequence is synthesized)
ataattatccaggatgtgtggctcattcttttcagcttgtttctatactgtttgtaatatacagtttttgtaaccatatgattgaaaagaagaaagtctatgcttaggccagtcagtaca

SEQ ID NO: 141614 - DNA, 120 bp, Artificial Sequence
  ENSG00000104327_10 (sequence is synthesized)
aataacatattcttgctttcacaaatatagttgaacaagatttccctaaaaattccaccaggattaatctctaaaattctagtctctgatttgcaaatgcacatttgtcactgaataatg

SEQ ID NO: 141615 - DNA, 120 bp, Artificial Sequence
  ENSG00000104327_11 (sequence is synthesized)
gaattatgtataacaagccaaacattcttattttagacaaccatagaactgtcccacaaaatatttctaagcttatttctaactattaggaggaatgtgcttttccatctaaaatactca

SEQ ID NO: 141616 - DNA, 120 bp, Artificial Sequence
  ENSG00000104327_12 (sequence is synthesized)
ccaaaatatagttaattgtggctttatgaagttaacagtctcattacagatttagtttaccaatcaacagcatgtctactgcttggatccatacaaaactatcggttcaagttgatgtga

SEQ ID NO: 141617 - DNA, 120 bp, Artificial Sequence
  ENSG00000104327_13 (sequence is synthesized)
caagggaagggagcaccagatgacacataaatctgtctgattctatgcctgtatttccaacaaacttactgtcagagaatatgacctaaatccattttctaaactgttttcatgtgttgc

SEQ ID NO: 141618 - DNA, 120 bp, Artificial Sequence
  ENSG00000104327_14 (sequence is synthesized)
aaattattctagtcaactgctgttttatgtcatactctgtgtaatctctgattaaatttaatatactgcatatcctggtgtctagtttgcatacttcctggattttctttctatgtagaa

SEQ ID NO: 141619 - DNA, 120 bp, Artificial Sequence
  ENSG00000104327_15 (sequence is synthesized)
ctgttcatttccaccaagggtatctgctgcctctgaaaatatttttttctagctataacaactctattttttactacataattaaattttaatgtaaaattcatagcatcctgattattg

SEQ ID NO: 141620 - DNA, 120 bp, Artificial Sequence
  ENSG00000104327_16 (sequence is synthesized)
aatgttatatcatcaatacttttgtgtattctgtggattctatatttcatattgagatcagcattcaaaatagttctatttctatctgcaaatagtttcaaatgagtttaaaaaaataac

SEQ ID NO: 141621 - DNA, 120 bp, Artificial Sequence
  ENSG00000104327_17 (sequence is synthesized)
atctgaaaagaaatgctaatgtaatcatttatcttatctagcaagaagattctaaaacattctttaacatacatctaagtcagtttcacatatttgtagctagaatatcctatactggtt

SEQ ID NO: 141622 - DNA, 120 bp, Artificial Sequence
  ENSG00000104327_18 (sequence is synthesized)
atagttgatatgtaacagttggtgattttagatttctttgattgtgaaacagggagctatgagagatgtgtccatgtgaaatttacagttactgcctaggagttaatgatcgttctgggt

SEQ ID NO: 141623 - DNA, 120 bp, Artificial Sequence
  ENSG00000104327_19 (sequence is synthesized)
cagcttgaatgtccccattctataaattcaacacttattttctgaattcataaaaataaccaaaaaatgtgagctataatgtttccctcaagaacaaacagaaacgagatttgccaaaaa

SEQ ID NO: 141624 - DNA, 120 bp, Artificial Sequence
  ENSG00000104327_20 (sequence is synthesized)
ctaaaattcaacaaatgatgttgagtgggagattggctttgcctttagcgtgtaaatggaagcactgccattagactgaatttaactactaagaataaataaagaagaaaataaccttaa

SEQ ID NO: 141625 - DNA, 120 bp, Artificial Sequence
  ENSG00000104327_21 (sequence is synthesized)
ctccttcttggcttagcggctgaagattgatgctgcctcattgcctcagaagccccatagaccatcacggacgccaagcttccggtaactctcacagtggagggaagtggttacctggaa

SEQ ID NO: 141626 - DNA, 120 bp, Artificial Sequence
  ENSG00000104327_22 (sequence is synthesized)
ttcgacgctgacggaacggtaatggtaggagagagagagcagggattggggaatgctgcccccccaaagtttctgtggctgcgcttagcaccccaaccatcctcctttgtcctcagtgga

SEQ ID NO: 141627 - DNA, 120 bp, Artificial Sequence
  ENSG00000104327_23 (sequence is synthesized)
aattaatcgagagctaattaaaatttaaatatatatgttgggaaatatttccccatgggcacaaaactaagtaatcgagctgtccagtatcttggtaggtagtgtgacaatatcagaatt

SEQ ID NO: 141628 - DNA, 120 bp, Artificial Sequence
  ENSG00000104327_24 (sequence is synthesized)
tatggtcaatggattataaaatgttttgtcagcatgggatcctgaaaaaaatctgcctcctacaaaagattcttagaatacctcgaaccacagaatgcccttcctttccttcttaaaaag

SEQ ID NO: 141629 - DNA, 120 bp, Artificial Sequence
  ENSG00000104327_25 (sequence is synthesized)
aaagatgtcactaaatctatatccattataacactggacacattctgttctttaaaaacaaaaataatgttaatttttcacatatttagtgttcatttagtatacacattttatatattt

SEQ ID NO: 141630 - DNA, 120 bp, Artificial Sequence
  ENSG00000104327_26 (sequence is synthesized)
taattcatatatactactttggtataacatattatagcaatagttgctactatctaaaaaggtgaatgcttcccaaatacgggtatgagtgtgtttacatctggatgtgtctttgtgaat

SEQ ID NO: 141631 - DNA, 120 bp, Artificial Sequence
  ENSG00000104327_27 (sequence is synthesized)
gacgtatatataagtgcagtggagagttggagagctttatggagtttctaatacccaatagaaaataaaacaattcaaaattattcaaaaattctgttctgtaaggatttatttgtcatc

SEQ ID NO: 141632 - DNA, 120 bp, Artificial Sequence
  ENSG00000104327_28 (sequence is synthesized)
tgttttctgcttctgtttgtggtattctatgctctaaaagggtgaaataaatatttattttcttattggagagattccagatgtgcaaaaactgtcagacaccatccctcccacatcttg

SEQ ID NO: 141633 - DNA, 120 bp, Artificial Sequence
  ENSG00000104327_29 (sequence is synthesized)
atacacatatgaacgtatttgcaataaaaaagtgacagtattctagaaacatagctaaaaccactatttctctgtttgactattctatattatcctgataaactctagcaatggacacat

SEQ ID NO: 141634 - DNA, 120 bp, Artificial Sequence
  ENSG00000104327_30 (sequence is synthesized)
tacagaattgaaaatttgcattgaaagttttaaaaatgctagtttttaaaattttactgcatatatacaagtagttgataactcaaacagctttattttgaagttcatctccttcatgca

SEQ ID NO: 141635 - DNA, 120 bp, Artificial Sequence
  ENSG00000104327_31 (sequence is synthesized)
ataaattattcctcaaatagctagaataatggcattctgtctttcagctgaaactatttgattcaaataatgatgggaagctggaattaactgagatggccaggtgagtttaggaaccat

SEQ ID NO: 141636 - DNA, 120 bp, Artificial Sequence
  ENSG00000104327_32 (sequence is synthesized)
gaaaaatattgtaagtggatccttttcaaaaaatgtaatatattaatataatgtttttctctcaaaaggttactaccagtgcaggagaattttcttcttaaattccagggaatcaaaatg

SEQ ID NO: 141637 - DNA, 120 bp, Artificial Sequence
  ENSG00000104327_33 (sequence is synthesized)
tgtgggaaagagttcaataaggcttttgagctgtatgatcaggtaaaagtttgttactttttcctttcttttttattgaagtaagaacacaacataagatcctcttaacaaaatttaagt

SEQ ID NO: 141638 - DNA, 120 bp, Artificial Sequence
  ENSG00000104327_34 (sequence is synthesized)
ataaaatacagtactgcaaactatagagacaatcttgacagcagatctttagaatttatccatcttatataattgagactttatgcccattgatgagtaactcgtcatttctccttcccc

SEQ ID NO: 141639 - DNA, 120 bp, Artificial Sequence
  ENSG00000104327_35 (sequence is synthesized)
cagccctggcaataacattctactttatgagtgtgactattttagatacctcatacaagtggcatcatgcagaatttgtcttgtgctgagattgattgatcatatgcagttctattttta

SEQ ID NO: 141640 - DNA, 120 bp, Artificial Sequence
  ENSG00000104327_36 (sequence is synthesized)
attttttgagggctctccatactgtttttcatagtggatgcaccatttttgcattcccaccaatgtatacaagagttccaattttcttcattctcactaacacttgtcttttatcttttt

SEQ ID NO: 141641 - DNA, 120 bp, Artificial Sequence
  ENSG00000104327_37 (sequence is synthesized)
gataatagccattctaataggtgtgaggagatatcttattgttaatttttatttctctgattagtgatgttaagcattttttcattacctgttggccatttatataccttctttggataa

SEQ ID NO: 141642 - DNA, 120 bp, Artificial Sequence
  ENSG00000104327_38 (sequence is synthesized)
gtgtctactcaagtcattaacccattttttaaattgaattattcattttttgctattgagttacaggagttctttataaattttggaaattaaccctttttgggatgtggtttacaaata

SEQ ID NO: 141643 - DNA, 120 bp, Artificial Sequence
  ENSG00000104327_39 (sequence is synthesized)
ctgttgattgtttcctttgctgtgcagctttttagtttgatgtagtctcgcttgtctatttttgcttgtgttgtccttgcttatggtttcatatccacaatatcattgctaagaacaatg

SEQ ID NO: 141644 - DNA, 120 bp, Artificial Sequence
  ENSG00000104327_40 (sequence is synthesized)
tcatatccacaatatcattgctaagaacaatgtcataaaggtttcccttatgtttgtttgcttctaggagttttacagttttagatcttatatttaagtttttaatctatcttgaattta

SEQ ID NO: 141645 - DNA, 120 bp, Artificial Sequence
  ENSG00000104327_41 (sequence is synthesized)
ttttttatatggtgtaagctaagggtccaatttcattattttgcatgtgtctgtatagtttacctaacaccatttgttgaaaaaagctatccttgtcccattttgtgtttttggcaccct

SEQ ID NO: 141646 - DNA, 120 bp, Artificial Sequence
  ENSG00000104327_42 (sequence is synthesized)
tatcaaagatcagttgactataacatgtgaaactgagagctcattagtctatgtttcgatttttgtttcagagctatactgttttaatcattgtagctttgtaatatattttgaaatcaa

SEQ ID NO: 141647 - DNA, 120 bp, Artificial Sequence
  ENSG00000104327_43 (sequence is synthesized)
gaagtgtgatgtctccaggtttattcttttttctcaagatggtttttggctatttgggatcttttgtggttacatatgaattttagggtttttttatttctataaatattgccattggga

SEQ ID NO: 141648 - DNA, 120 bp, Artificial Sequence
  ENSG00000104327_44 (sequence is synthesized)
ttttggaagtgattacactgaatctgtagatgtgtttgagtaatatagacattttaacaatattaagccttccaattcataaacacaggacgtctttccatttgtttgtgtctctgttaa

SEQ ID NO: 141649 - DNA, 120 bp, Artificial Sequence
  ENSG00000104327_45 (sequence is synthesized)
ccatttcagatagtttatcatcataactaatttctgattgttaattttgcatcctacaactttatggaatttgtttattaattccaacagtttttgtgaggtctttagggttttctctct

SEQ ID NO: 141650 - DNA, 120 bp, Artificial Sequence
  ENSG00000104327_46 (sequence is synthesized)
ataaaaataatatctgcaaacagggataatttaacttctctctttccaatttggatgccttaaaattttgttcttatctataatttgattcttcagaatttggaaaaaacgattatgaaa

SEQ ID NO: 141651 - DNA, 120 bp, Artificial Sequence
  ENSG00000104327_47 (sequence is synthesized)
attacacaaataactccttcttttcataggaaaggtaatacggtatgcccaaattacacaaactcctgattcgaatcccacactatcatttacctgctttgagactttgaacaagatacc

SEQ ID NO: 141652 - DNA, 120 bp, Artificial Sequence
  ENSG00000104327_48 (sequence is synthesized)
aaactcatgtgagcctcaatttcttcatttgtaaacaagagataataataacaccactttgcaggattgaatgaggattaagctaggtgaaaatatccagcaaaataaaggttatttgtg

SEQ ID NO: 141653 - DNA, 120 bp, Artificial Sequence
  ENSG00000104327_49 (sequence is synthesized)
atgtcactaggtcacatcctttgcttctaatttgtttactcctggacctgtgagctctagcagaactctgccacaccctggtgtgacatagagccacataccttcctcagccctcagttt

SEQ ID NO: 141654 - DNA, 120 bp, Artificial Sequence
  ENSG00000104327_50 (sequence is synthesized)
cctcacttgtcctagaagatattattaacattaagtgaattacatgtgtaagtactttgaaaagttcaagatcttttacaaatgtaaggtgttgaatgagaagtaactaataccttgcat

SEQ ID NO: 141655 - DNA, 120 bp, Artificial Sequence
  ENSG00000104327_51 (sequence is synthesized)
attttacagctttggagcagctaaaaacttgggtggcctgacataacagattatctgccaagtatgcagttgggagactttctaaggattccaattatttccattttacttcatttccca

SEQ ID NO: 141656 - DNA, 120 bp, Artificial Sequence
  ENSG00000104327_52 (sequence is synthesized)
gtttccatgccccttcccattctttgcccttttctgagcctcctgatcccattatccctcctttctattctttacttcttcccccttctgcctaatcttatcttcttatctccccgactg

SEQ ID NO: 141657 - DNA, 120 bp, Artificial Sequence
  ENSG00000104327_53 (sequence is synthesized)
caccgtctgtacactttgctggttaatcaacgtccaggcaagagagagcctctcgggtcgccagaaagataactgtcttggaaagtgaacgggaaagacacttggaatgagatatctgac

SEQ ID NO: 141658 - DNA, 120 bp, Artificial Sequence
  ENSG00000104327_54 (sequence is synthesized)
aagaaacagatctgcagattatggatctcttactctatcaccaattattattgttgtgatgttgatgtagttggggagatgagaaaacatcttgtcctcactaagggagttatcacctga

SEQ ID NO: 141659 - DNA, 120 bp, Artificial Sequence
  ENSG00000104331_0 (sequence is synthesized)
acctcgcggccgtaggctaacgtggaagtcggaccagccggccggcggaagaacctagagcgcgctgcctggcgagtcaggcgcgcggggcggcgttggtggtcttcgcggcgcaactcg

SEQ ID NO: 141660 - DNA, 80 bp, Artificial Sequence
  ENSG00000104331_1 (sequence is synthesized)
gcctttcctgggagggagtgatggggcgcaccggggccggggagcgggcgccagtgtagcccgcgcggcgcctggcccgg

SEQ ID NO: 141661 - DNA, 120 bp, Artificial Sequence
  ENSG00000104331_2 (sequence is synthesized)
gcctgtgagagccgcagcccggagcgcccggcttcccacgccatggcccccatgggcatccgcctttccccactgggggtggcagtgttttgcctgctggggctcggcgtgctctaccac

SEQ ID NO: 141662 - DNA, 120 bp, Artificial Sequence
  ENSG00000104331_3 (sequence is synthesized)
ctctactcgggcttcttggccggccgcttcagcctcttcggcctgggcggcgagcctggcggcggcgcggcggggcccgcggccgcggccgatgggggcaccgtggacttgcgcgagatg

SEQ ID NO: 141663 - DNA, 120 bp, Artificial Sequence
  ENSG00000104331_4 (sequence is synthesized)
ctggctgtgtcagtgctggccgcagtccgcggcggcgacgaggtgaggcgcgtccgcgagagcaacgtcctccacgagaagtccaaggggaagacgcgcgagggagccgaggacaagatg

SEQ ID NO: 141664 - DNA, 120 bp, Artificial Sequence
  ENSG00000104331_5 (sequence is synthesized)
accagcggcgacgtgctgtccaaccgcaagatgttctacctgctcaagaccgccttccccagcgtccagattaatactgaggaacacgtggatgcagctgatcaggaggttatcttgtgg

SEQ ID NO: 141665 - DNA, 120 bp, Artificial Sequence
  ENSG00000104331_6 (sequence is synthesized)
gatcataagattcctgaggatatcctaaaggaagtaactactcctaaagaggtaccagcagaaagtgttactgtctggattgacccacttgatgctacacaggaatatacagaggatctt

SEQ ID NO: 141666 - DNA, 120 bp, Artificial Sequence
  ENSG00000104331_7 (sequence is synthesized)
cgaaagtacgtcactactatggtgtgtgtggctgtaaatggtaaacccatgctaggagttatacataagccattttccgaatatacagcttgggcaatggtagatggtggttcaaatgtg

SEQ ID NO: 141667 - DNA, 120 bp, Artificial Sequence
  ENSG00000104331_8 (sequence is synthesized)
aaagcccgctcttcctacaatgagaagaccccaaggatcgttgtgtctcgttcccattcagggatggtcaaacaggtcgctcttcagacttttggaaaccagactacaattatcccagct

SEQ ID NO: 141668 - DNA, 120 bp, Artificial Sequence
  ENSG00000104331_9 (sequence is synthesized)
ggtggtgctggttataaagttttagcacttttggatgtgcctgataagagtcaagaaaaagctgatttatacatccatgtgacatacatcaaaaagtgggatatatgtgctggtaatgcc

SEQ ID NO: 141669 - DNA, 120 bp, Artificial Sequence
  ENSG00000104331_10 (sequence is synthesized)
atcttaaaagccctaggggggcatatgactaccctgagtggtgaagaaatcagttacactggttcagacggcattgaagggggactccttgctagcatcagaatgaaccaccaggccctg

SEQ ID NO: 141670 - DNA, 120 bp, Artificial Sequence
  ENSG00000104331_11 (sequence is synthesized)
gtcagaaaactcccagatctagaaaagacaggacataaatgagcataactgattacagggtacagttcttcacagctgaaatggttagcctgagatgctggaagcttcaaaggattggtg

SEQ ID NO: 141671 - DNA, 120 bp, Artificial Sequence
  ENSG00000104331_12 (sequence is synthesized)
gagactatgcatggttaaggccatcccgaactttttaaagtatttatgaagcatcagagacttattttccctgtaatagaatgcaaaatcagggaaaatgggttgctttgtgtctcaagt

SEQ ID NO: 141672 - DNA, 120 bp, Artificial Sequence
  ENSG00000104331_13 (sequence is synthesized)
attgtctttatttttgagactattttcatacagttgtcatacacaaggcgcatatatatatttgtgaattaaaatctgtagctgagtctacattgttatgagtcaccattttcacacaac

SEQ ID NO: 141673 - DNA, 120 bp, Artificial Sequence
  ENSG00000104331_14 (sequence is synthesized)
atcatgaatcttcactgttagtactttcatatagaattcggttgaaggaaagattgatttttgtgtagatgtttaatataactttacaactatatctcattgaaaataaagtcattgggg

SEQ ID NO: 141674 - DNA, 120 bp, Artificial Sequence
  ENSG00000104331_15 (sequence is synthesized)
atttttacctctaatttggatggaaagcacaagaagccacacattcattaatatgcaacaaatgttgtatttatgttactgaatatttctatggattaaaatagaaaaagtttaattgat

SEQ ID NO: 141675 - DNA, 120 bp, Artificial Sequence
  ENSG00000104331_16 (sequence is synthesized)
tttttcttttaaattttaataacaggttcaccagctggtagaaaatagagacacatgatgatttgcattgtaataatttctgtgtgtatgtgtgtgtgttgttttgtttttataaagaaa

SEQ ID NO: 141676 - DNA, 120 bp, Artificial Sequence
  ENSG00000104331_17 (sequence is synthesized)
agtgtgtttgtacccatgagttcagcatttctgccatcttgctattttcattttccctgtggaagatgcatggttgcatccttttccttctgaccaacacttagtctttaactttgtaag

SEQ ID NO: 141677 - DNA, 120 bp, Artificial Sequence
  ENSG00000104331_18 (sequence is synthesized)
gttcggtttaaggtttcagggttagcactatagttttggttcattttctcattaacgataaaatatgctgtaaggcactataagaatataaatgattctattacaattgaaagttacttg

SEQ ID NO: 141678 - DNA, 120 bp, Artificial Sequence
  ENSG00000104331_19 (sequence is synthesized)
acattacatgaattgaactgcctttcattatcttcagacactttgttttagtatttttttttaatttgctaggtttgtatatagaagatcctttcattatcaagaatgagtatggttgct

SEQ ID NO: 141679 - DNA, 120 bp, Artificial Sequence
  ENSG00000104331_20 (sequence is synthesized)
tttgccatggttgcttttactattaataaatgtatctagcctacccaaactctgtagtaacttttgagattctcttaatttcccctcagattaaaatagagaaggttgaaggtacttttt

SEQ ID NO: 141680 - DNA, 120 bp, Artificial Sequence
  ENSG00000104331_21 (sequence is synthesized)
gatgaaatttttttctagtctggttagaaaaaaaaagttgtgacatattcattgtgttaccgtaactagaaccttgctttgtgaactgtctttcattgggatgtatggtttctctcaatg

SEQ ID NO: 141681 - DNA, 120 bp, Artificial Sequence
  ENSG00000104331_22 (sequence is synthesized)
tgaaatctggaaacttcatgtaaactacccatgccgttatttcatgtgactccagtgcccttgtattccataacatgctgatgagagggatttctcacggtttctttctttgctaaattt

SEQ ID NO: 141682 - DNA, 120 bp, Artificial Sequence
  ENSG00000104331_23 (sequence is synthesized)
tttaaccataaagcagcttaccctttattttcccatcttggaagtaaaattgaccaaagaatgtacgttctagcctggtggaatgtgcatactttaggtttgtatgttacattgtccaaa

SEQ ID NO: 141683 - DNA, 120 bp, Artificial Sequence
  ENSG00000104331_24 (sequence is synthesized)
gccctttactttcttattagtaaactgaatctaatatgacacaaatgttttcacccaatctcttgcaactggtcaaattcgagaaggtgttgggccttagcagtaggccttttcagtgaa

SEQ ID NO: 141684 - DNA, 120 bp, Artificial Sequence
  ENSG00000104331_25 (sequence is synthesized)
aattcattcaaagttttggtaggtggaacacttgatatttaaataggacttgaaaattttgaaaagagtatcagagacctcatttttttcctttgcaataagctgaagaaactttctttt

SEQ ID NO: 141685 - DNA, 120 bp, Artificial Sequence
  ENSG00000104331_26 (sequence is synthesized)
tcaggagagatggcaaaggtatatgctgttgccagagtcctgtggtataagcatctgtttttattatagtatgtcaaagttagggaaatgggactggcaagtaaaaaatggaatttaatt

SEQ ID NO: 141686 - DNA, 120 bp, Artificial Sequence
  ENSG00000104331_27 (sequence is synthesized)
tcaatgttttatgggaactctgatttaatgggaagcaaactagttcatattagcaggaattattttattttttcgagacagagtttcactctcgttggccaggctggagtgcaatggcgt

SEQ ID NO: 141687 - DNA, 75 bp, Artificial Sequence
  ENSG00000104331_28 (sequence is synthesized)
atgattttatttttatttttaattgtattaatctgcatctagataatgactttgtgaagggtgtgtgttgtgtgc

SEQ ID NO: 141688 - DNA, 120 bp, Artificial Sequence
  ENSG00000104331_29 (sequence is synthesized)
ggtgtgtgttgtgtgcaaaacttaaggtattggttgagagttaaatacattatttttataatatgttgggtatagtctagttactaatgattttttttaagtacttttataaaaagttca

SEQ ID NO: 141689 - DNA, 120 bp, Artificial Sequence
  ENSG00000104331_30 (sequence is synthesized)
tttttaaaattgtttgtttttaaaagccaatatacgttgcagaattaggaacagtatttatatttatttacacaagacattgtgccatagcatcctagtaaaacaccttcatgaatgagt

SEQ ID NO: 141690 - DNA, 120 bp, Artificial Sequence
  ENSG00000104331_31 (sequence is synthesized)
aatgttatctcccagaattacattaaaattatttctaaaaagtagcaaagtcattaccttttgcttttaatgacccacacctcaccagctcctggtcttttcttcactgttgcccttatt

SEQ ID NO: 141691 - DNA, 120 bp, Artificial Sequence
  ENSG00000104331_32 (sequence is synthesized)
ttgaggcaatttttcttaaaatatgacttttatgcaccacatttagtagaggcagtgacatcagtgatctcagtacccatcagctgtccccctcctctgcccttcttcatctcttctacc

SEQ ID NO: 141692 - DNA, 120 bp, Artificial Sequence
  ENSG00000104331_33 (sequence is synthesized)
ttgtgaccatttcccttaccggttcatgttctcctttatctctgcttttctttcttagccaggatacttccctcacaactctcactcccaaattcttttagatatacatttttctggata

SEQ ID NO: 141693 - DNA, 120 bp, Artificial Sequence
  ENSG00000104331_34 (sequence is synthesized)
ttggctgctgaaatctgaagctctggtaaagttcctagtatcagagatcaatcctggaggaggcctagttcactattagattacaaagactcctcacaaagtaaaggaaaatcaccttca

SEQ ID NO: 141694 - DNA, 120 bp, Artificial Sequence
  ENSG00000104331_35 (sequence is synthesized)
aaaccacaaccctttatgttgtcaagtctaatatgagtgtttttacgaagtatttctttctacccattgttcaagaatgtaaatgtaaaaaaaaatacaagagagttgggtagatatgca

SEQ ID NO: 141695 - DNA, 120 bp, Artificial Sequence
  ENSG00000104331_36 (sequence is synthesized)
tgcttgaggaaacttgcttttactgttttcctacttgtatccccagttcagttgaatttacaaggacctacaagatggtcatgtttgtcttggtatgtgctaccccaattttagtgtttc

SEQ ID NO: 141696 - DNA, 120 bp, Artificial Sequence
  ENSG00000104331_37 (sequence is synthesized)
tttctttattttaaatcagtaattattcagttgattgtttatactatataatgaagtaacaaaaacattttggtttgtatgttttaagtaacagttgtgcaaattcctcttgtttgttag

SEQ ID NO: 141697 - DNA, 120 bp, Artificial Sequence
  ENSG00000104331_38 (sequence is synthesized)
gtgctccctttgaatattttgtgaactgtgtcagagggagaggggtggtggctaggaagagggtcagaaagaagctagagggaggtcaggagaagggtaacagggaggatgcaaagcaga

SEQ ID NO: 141698 - DNA, 120 bp, Artificial Sequence
  ENSG00000104331_39 (sequence is synthesized)
catctaccctggtcaccccaggatcaggatatctgtccttgtttcatgttgaattcaaaaattggatctcacttaggctttgaaggtgacagccatctctgatagctgagcataagtaaa

SEQ ID NO: 141699 - DNA, 120 bp, Artificial Sequence
  ENSG00000104331_40 (sequence is synthesized)
gaaaggtggagtgccgatgcagaaaggaaaatattcagctttcctctcttagatcgcactttgaagatggccttttggagacaatctgacaggttaaaacaggaactgttggaattattc

SEQ ID NO: 141700 - DNA, 120 bp, Artificial Sequence
  ENSG00000104331_41 (sequence is synthesized)
tagctgtaactacctattggctatgtgttgattgatcctagaaagaaaaaataatttttcattttagatcttgattgaatttaagatgtatttatatgcctacaaaaggtctgtcttgta

SEQ ID NO: 141701 - DNA, 120 bp, Artificial Sequence
  ENSG00000104331_42 (sequence is synthesized)
actgttgtataaaataaacctaatctatggtttcatttttaatctaaaaaaagttgtgccttaacaatagggcattgtatgttaataagggaaaacaacctttttagtagatgggggaaa

SEQ ID NO: 141702 - DNA, 120 bp, Artificial Sequence
  ENSG00000104331_43 (sequence is synthesized)
ataggaactttttgccattaaaacttaagttcttttgatgtttttaatattatagttgggggagattcattaaaattaaattgaaataaaattatttttgcataacctagcatttacaac

SEQ ID NO: 141703 - DNA, 120 bp, Artificial Sequence
  ENSG00000104331_44 (sequence is synthesized)
taaagtatgttttttataagaactggcatcttgatgtatataggtctgaaataatatttcatcttttgatttttaattttaataatattagaccaggatagatcacagttttacaaatct

SEQ ID NO: 141704 - DNA, 120 bp, Artificial Sequence
  ENSG00000104331_45 (sequence is synthesized)
tagttttaaataaattatttcagtgtgctgttagtcctctacagtcattttggtttaaaaagtgactatttatttatggtagcatatcaataatttattaatgttaaaaaatactgtgta

SEQ ID NO: 141705 - DNA, 120 bp, Artificial Sequence
  ENSG00000104331_46 (sequence is synthesized)
tgacattacaaaccagaacagttcctgggggagaggattctaattgattggcagttctgagagggcaagaagaatggaactttatacttcaaaaggaggttttggttttaccaggtactg

SEQ ID NO: 141706 - DNA, 120 bp, Artificial Sequence
  ENSG00000104331_47 (sequence is synthesized)
cttatgtaaatcgtttatttttatttcatcaaagcctggcaagtatatgcattccaatttaccattggcaaagctttatttatttttaaggttggatgttgaattaattttgtgggaaaa

SEQ ID NO: 141707 - DNA, 120 bp, Artificial Sequence
  ENSG00000104331_48 (sequence is synthesized)
tgagatttgtaagtagttttctttctagataagataacataaaccaaactttcagaagttaaggatgatgaataatattgaaatgacttgttatatattgtaagggttcccttaagtatc

SEQ ID NO: 141708 - DNA, 120 bp, Artificial Sequence
  ENSG00000104331_49 (sequence is synthesized)
ataattaacaatttgtggaaattgaaaaagcataaactgtgttatttgattagtaatatgttcccttaaaattcattttgaggtgtatgttatacacacagtaaatttttgttcaggaat

SEQ ID NO: 141709 - DNA, 120 bp, Artificial Sequence
  ENSG00000104331_50 (sequence is synthesized)
gacttgctcattctgtgtttttaaaaataggaaataaggcatagtgagtcatcattacatcaattaaccaaaaaatatttcatcccctccgtcactgaaattatctacttcagccacctt

SEQ ID NO: 141710 - DNA, 120 bp, Artificial Sequence
  ENSG00000104331_51 (sequence is synthesized)
tcttattctcgtgttaggagggcacgtttatggactttttaatttccatgtgccatattgtccactaccggcagtagccaaagctagctgtttcagtcccacagaagagacagtgctctg

SEQ ID NO: 141711 - DNA, 120 bp, Artificial Sequence
  ENSG00000104331_52 (sequence is synthesized)
ccatgatgacagggcactgctagggctggtttttcttgtttttcccttttggcagtgtggacttcaggaactagatgtatatgcacaagggattgagtttacactaaaactaggaaatgg

SEQ ID NO: 141712 - DNA, 120 bp, Artificial Sequence
  ENSG00000104331_53 (sequence is synthesized)
agttttcaatctatgttcttgcctcttcatacttttatttattttttgtcatcctgccttatactgggctaacaatgagataaaataaaaatacctttgaatactcttttccctttcatg

SEQ ID NO: 141713 - DNA, 120 bp, Artificial Sequence
  ENSG00000104331_54 (sequence is synthesized)
catttaaagccatggaggaactagaccattagctgttgccgtcacatgcttagacaccagtttacttagcgtgttatgaccttcctcacccatactaccaaatttaaatgggtcccgact

SEQ ID NO: 141714 - DNA, 120 bp, Artificial Sequence
  ENSG00000104331_55 (sequence is synthesized)
tcaccctctggaaggaagtaaactcttctctccccatggtttcagagcagtttttacctgcaagcaccatctctgtatgtgctcttactagattatacagttcttgagagggattgcatc

SEQ ID NO: 141715 - DNA, 120 bp, Artificial Sequence
  ENSG00000104331_56 (sequence is synthesized)
ttagtgtttttgtatttccacctcacccccagcacatagcccagtctcttgcacaaattaagtacttaatgtgtgttgagctaaattgaataaaggattattagcattagcatattttgt

SEQ ID NO: 141716 - DNA, 120 bp, Artificial Sequence
  ENSG00000104331_57 (sequence is synthesized)
gccttggttgtataagctggttgtttgttttgttacctttgcaaatatttatgattatcacccccccacatactaaattgtttttaaaagttttgcctttccttcagatactaccccagg

SEQ ID NO: 141717 - DNA, 120 bp, Artificial Sequence
  ENSG00000104331_58 (sequence is synthesized)
caatttgctgtagataatgtgattgcttccaatgacataattatcccaaactctctgccccggatatactttgccaaacgaaatttgaattctctgaataaattggtcatgtctaaaaga

SEQ ID NO: 141718 - DNA, 120 bp, Artificial Sequence
  ENSG00000104331_59 (sequence is synthesized)
ttaatgtttatacagttactttaaaatttttttaatttgaaataattttaaacttaagcagttgcagagactgcagcaagctcctgcacactccatcctgctattttaacaggatactta

SEQ ID NO: 141719 - DNA, 80 bp, Artificial Sequence
  ENSG00000104332_0 (sequence is synthesized)
gcgcactccagccctgcagcctccggagtcagtgccgcgcgcccgccgccccgcgccttcctgctcgccgcacctccggg

SEQ ID NO: 141720 - DNA, 120 bp, Artificial Sequence
  ENSG00000104332_1 (sequence is synthesized)
cgcctccgaccgcaggccgagggccgccactggccggggggaccgggcagcagcttgcggccgcggagccgggcaacgctggggactgcgccttttgtccccggaggtccctggaagttt

SEQ ID NO: 141721 - DNA, 120 bp, Artificial Sequence
  ENSG00000104332_2 (sequence is synthesized)
ccggaggtccctggaagtttgcggcaggacgcgcgcggggaggcggcggaggcagccccgacgtcgcggagaacagggcgcagagccggcatgggcatcgggcgcagcgaggggggccgc

SEQ ID NO: 141722 - DNA, 120 bp, Artificial Sequence
  ENSG00000104332_3 (sequence is synthesized)
gcgtgctgctggcgctgggcgcggcgcttctggccgtgggctcggccagcgagtacgactacgtgagcttccagtcggacatcggcccgtaccagagcgggcgcttctacaccaagccac

SEQ ID NO: 141723 - DNA, 120 bp, Artificial Sequence
  ENSG00000104332_4 (sequence is synthesized)
ctcagtgcgtggacatccccgcggacctgcggctgtgccacaacgtgggctacaagaagatggtgctgcccaacctgctggagcacgagaccatggcggaggtgaagcagcaggccagca

SEQ ID NO: 141724 - DNA, 120 bp, Artificial Sequence
  ENSG00000104332_5 (sequence is synthesized)
gctgggtgcccctgctcaacaagaactgccacgccggcacccaggtcttcctctgctcgctcttcgcgcccgtctgcctggaccggcccatctacccgtgtcgctggctctgcgaggccg

SEQ ID NO: 141725 - DNA, 120 bp, Artificial Sequence
  ENSG00000104332_6 (sequence is synthesized)
tgcgcgactcgtgcgagccggtcatgcagttcttcggcttctactggcccgagatgcttaagtgtgacaagttccccgagggggacgtctgcatcgccatgacgccgcccaatgccaccg

SEQ ID NO: 141726 - DNA, 120 bp, Artificial Sequence
  ENSG00000104332_7 (sequence is synthesized)
aagcctccaagccccaaggcacaacggtgtgtcctccctgtgacaacgagttgaaatctgaggccatcattgaacatctctgtgccagcgagtttgcactgaggatgaaaataaaagaag

SEQ ID NO: 141727 - DNA, 120 bp, Artificial Sequence
  ENSG00000104332_8 (sequence is synthesized)
tgaaaaaagaaaatggcgacaagaagattgtccccaagaagaagaagcccctgaagttggggcccatcaagaagaaggacctgaagaagcttgtgctgtacctgaagaatggggctgact

SEQ ID NO: 141728 - DNA, 120 bp, Artificial Sequence
  ENSG00000104332_9 (sequence is synthesized)
gtccctgccaccagctggacaacctcagccaccacttcctcatcatgggccgcaaggtgaagagccagtacttgctgacggccatccacaagtgggacaagaaaaacaaggagttcaaaa

SEQ ID NO: 141729 - DNA, 120 bp, Artificial Sequence
  ENSG00000104332_10 (sequence is synthesized)
acttcatgaagaaaatgaaaaaccatgagtgccccacctttcagtccgtgtttaagtgattctcccgggggcagggtggggagggagcctcgggtggggtgggagcgggggggacagtgc

SEQ ID NO: 141730 - DNA, 120 bp, Artificial Sequence
  ENSG00000104332_11 (sequence is synthesized)
cccgggaacccggtgggtcacacacacgcactgcgcctgtcagtagtggacattgtaatccagtcggcttgttcttgcagcattcccgctcccttccctccatagccacgctccaaaccc

SEQ ID NO: 141731 - DNA, 120 bp, Artificial Sequence
  ENSG00000104332_12 (sequence is synthesized)
cagggtagccatggccgggtaaagcaagggccatttagattaggaaggtttttaagatccgcaatgtggagcagcagccactgcacaggaggaggtgacaaaccatttccaacagcaaca

SEQ ID NO: 141732 - DNA, 120 bp, Artificial Sequence
  ENSG00000104332_13 (sequence is synthesized)
cagccactaaaacacaaaaagggggattgggcggaaagtgagagccagcagcaaaaactacattttgcaacttgttggtgtggatctattggctgatctatgcctttcaactagaaaatt

SEQ ID NO: 141733 - DNA, 120 bp, Artificial Sequence
  ENSG00000104332_14 (sequence is synthesized)
ctaatgattggcaagtcacgttgttttcaggtccagagtagtttctttctgtctgctttaaatggaaacagactcataccacacttacaattaaggtcaagcccagaaagtgataagtgc

SEQ ID NO: 141734 - DNA, 120 bp, Artificial Sequence
  ENSG00000104332_15 (sequence is synthesized)
agggaggaaaagtgcaagtccattatgtaatagtgacagcaaagggaccaggggagaggcattgccttctctgcccacagtctttccgtgtgattgtctttgaatctgaatcagccagtc

SEQ ID NO: 141735 - DNA, 120 bp, Artificial Sequence
  ENSG00000104332_16 (sequence is synthesized)
tcagatgccccaaagtttcggttcctatgagcccggggcatgatctgatccccaagacatgtggaggggcagcctgtgcctgcctttgtgtcagaaaaaggaaaccacagtgagcctgag

SEQ ID NO: 141736 - DNA, 120 bp, Artificial Sequence
  ENSG00000104332_17 (sequence is synthesized)
agagacggcgattttcgggctgagaaggcagtagttttcaaaacacatagttaaaaaagaaacaaatgaaaaaaattttagaacagtccagcaaattgctagtcagggtgaattgtgaaa

SEQ ID NO: 141737 - DNA, 120 bp, Artificial Sequence
  ENSG00000104332_18 (sequence is synthesized)
atctcatgttttttccttttcacatttttaaaagaacaatgacaaacacccacttatttttcaaggttttaaaacagtctacattgagcatttgaaaggtgtgctagaacaaggtctcct

SEQ ID NO: 141738 - DNA, 120 bp, Artificial Sequence
  ENSG00000104332_19 (sequence is synthesized)
gatccgtccgaggctgcttcccagaggagcagctctccccaggcatttgccaagggaggcggatttccctggtagtgtagctgtgtggctttccttcctgaagagtccgtggttgcccta

SEQ ID NO: 141739 - DNA, 120 bp, Artificial Sequence
  ENSG00000104332_20 (sequence is synthesized)
gaacctaacaccccctagcaaaactcacagagctttccgtttttttctttcctgtaaagaaacatttcctttgaacttgattgcctatggatcaaagaaattcagaacagcctgcctgtc

SEQ ID NO: 141740 - DNA, 120 bp, Artificial Sequence
  ENSG00000104332_21 (sequence is synthesized)
cccccgcactttttacatatatttgtttcatttctgcagatggaaagttgacatgggtggggtgtccccatccagcgagagagtttcaaaagcaaaacatctctgcagtttttcccaagt

SEQ ID NO: 141741 - DNA, 120 bp, Artificial Sequence
  ENSG00000104332_22 (sequence is synthesized)
accctgagatacttcccaaagcccttatgtttaatcagcgatgtatataagccagttcacttagacaactttacccttcttgtccaatgtacaggaagtagttctaaaaaaaatgcatat

SEQ ID NO: 141742 - DNA, 120 bp, Artificial Sequence
  ENSG00000104332_23 (sequence is synthesized)
taatttcttcccccaaagccggattcttaattctctgcaacactttgaggacatttatgattgtccctctgggccaatgcttatacccagtgaggatgctgcagtgaggctgtaaagtgg

SEQ ID NO: 141743 - DNA, 120 bp, Artificial Sequence
  ENSG00000104332_24 (sequence is synthesized)
ccccctgcggccctagcctgacccggaggaaaggatggtagattctgttaactcttgaagactccagtatgaaaatcagcatgcccgcctagttacctaccggagagttatcctgataaa

SEQ ID NO: 141744 - DNA, 120 bp, Artificial Sequence
  ENSG00000104332_25 (sequence is synthesized)
ttaacctctcacagttagtgatcctgtccttttaacaccttttttgtggggttctctctgacctttcatcgtaaagtgctggggaccttaagtgatttgcctgtaattttggatgattaa

SEQ ID NO: 141745 - DNA, 120 bp, Artificial Sequence
  ENSG00000104332_26 (sequence is synthesized)
aaaatgtgtatatatattagctaattagaaatattctacttctctgttgtcaaactgaaattcagagcaagttcctgagtgcgtggatctgggtcttagttctggttgattcactcaaga

SEQ ID NO: 141746 - DNA, 120 bp, Artificial Sequence
  ENSG00000104332_27 (sequence is synthesized)
gttcagtgctcatacgtatctgctcattttgacaaagtgcctcatgcaaccgggccctctctctgcggcagagtccttagtggaggggtttacctggaacattagtagttaccacagaat

SEQ ID NO: 141747 - DNA, 120 bp, Artificial Sequence
  ENSG00000104332_28 (sequence is synthesized)
acggaagagcaggtgactgtgctgtgcagctctctaaatgggaattctcaggtaggaagcaacagcttcagaaagagctcaaaataaattggaaatgtgaatcgcagctgtgggttttac

SEQ ID NO: 141748 - DNA, 120 bp, Artificial Sequence
  ENSG00000104332_29 (sequence is synthesized)
caccgtctgtctcagagtcccaggaccttgagtgtcattagttactttattgaaggttttagacccatagcagctttgtctctgtcacatcagcaatttcagaaccaaaagggaggctct

SEQ ID NO: 141749 - DNA, 120 bp, Artificial Sequence
  ENSG00000104332_30 (sequence is synthesized)
ctgtaggcacagagctgcactatcacgagcctttgtttttctccacaaagtatctaacaaaaccaatgtgcagactgattggcctggtcattggtctccgagagaggaggtttgcctgtg

SEQ ID NO: 141750 - DNA, 120 bp, Artificial Sequence
  ENSG00000104332_31 (sequence is synthesized)
atttcctaattatcgctagggccaaggtgggatttgtaaagctttacaataatcattctggatagagtcctgggaggtccttggcagaactcagttaaatctttgaagaatatttgtagt

SEQ ID NO: 141751 - DNA, 120 bp, Artificial Sequence
  ENSG00000104332_32 (sequence is synthesized)
tatcttagaagatagcatgggaggtgaggattccaaaaacattttatttttaaaatatcctgtgtaacacttggctcttggtacctgtgggttagcatcaagttctccccagggtagaat

SEQ ID NO: 141752 - DNA, 120 bp, Artificial Sequence
  ENSG00000104332_33 (sequence is synthesized)
tcaatcagagctccagtttgcatttggatgtgtaaattacagtaatcccatttcccaaacctaaaatctgtttttctcatcagactctgagtaactggttgctgtgtcataacttcatag

SEQ ID NO: 141753 - DNA, 120 bp, Artificial Sequence
  ENSG00000104332_34 (sequence is synthesized)
atgcaggaggctcaggtgatctgtttgaggagagcaccctaggcagcctgcagggaataacatactggccgttctgacctgttgccagcagatacacaggacatggatgaaattcccgtt

SEQ ID NO: 141754 - DNA, 120 bp, Artificial Sequence
  ENSG00000104332_35 (sequence is synthesized)
tcctctagtttcttcctgtagtactcctcttttagatcctaagtctcttacaaaagctttgaatactgtgaaaatgttttacattccatttcatttgtgttgtttttttaactgcatttt

SEQ ID NO: 141755 - DNA, 120 bp, Artificial Sequence
  ENSG00000104332_36 (sequence is synthesized)
accagatgttttgatgttatcgcttatgttaatagtaattcccgtacgtgttcattttattttcatgctttttcagccatgtatcaatattcacttgactaaaatcactcaattaatcaa

SEQ ID NO: 141756 - DNA, 120 bp, Artificial Sequence
  ENSG00000104332_37 (sequence is synthesized)
agacatgagtggacaccttagggggctcggctgcggaaaaggtgctgcagtccacagggaacatggggggattggacgggttgcctgaagaagagaggaaagaatccctcaccccagccc

SEQ ID NO: 141757 - DNA, 120 bp, Artificial Sequence
  ENSG00000104332_38 (sequence is synthesized)
ccaaaaggctgtgatgggatggggaaaccccataatcgctgtcttccggacaccttttgccccttggctgcagttccactggtcggcgcccttctcagcctggcttggaaccgtcctcac

SEQ ID NO: 141758 - DNA, 120 bp, Artificial Sequence
  ENSG00000104341_0 (sequence is synthesized)
gtccccgccgctgcagcggtcgccttcggagcgaagggtaccgacccggcagaagctcggagctctcggggtatcgaggaggcaggcccgcgggcgcacgggcgagcgggccgggagccg

SEQ ID NO: 141759 - DNA, 120 bp, Artificial Sequence
  ENSG00000104341_1 (sequence is synthesized)
gagcggcggaggagccggcagcagcggcgcggcgggctccaggcgaggcggtcgacgctcctgaaaacttgcgcgcgcgctcgcgccactgcgcccggagcgatgaagatggtcgcgccc

SEQ ID NO: 141760 - DNA, 120 bp, Artificial Sequence
  ENSG00000104341_2 (sequence is synthesized)
tggacgcggttctactccaacagctgctgcttgtgctgccatgtccgcaccggcaccatcctgctcggcgtctggtatctgatcatcaatgctgtggtactgttgattttattgagtgcc

SEQ ID NO: 141761 - DNA, 120 bp, Artificial Sequence
  ENSG00000104341_3 (sequence is synthesized)
ctggctgatccggatcagtataacttttcaagttctgaactgggaggtgactttgagttcatggatgatgccaacatgtgcattgccattgcgatttctcttctcatgatcctgatatgt

SEQ ID NO: 141762 - DNA, 120 bp, Artificial Sequence
  ENSG00000104341_4 (sequence is synthesized)
gctatggctacttacggagcgtacaagcaacgcgcagcctggatcatcccattcttctgttaccagatctttgactttgccctgaacatgttggttgcaatcactgtgcttatttatcca

SEQ ID NO: 141763 - DNA, 120 bp, Artificial Sequence
  ENSG00000104341_5 (sequence is synthesized)
aactccattcaggaatacatacggcaactgcctcctaattttccctacagagatgatgtcatgtcagtgaatcctacctgtttggtccttattattcttctgtttattagcattatcttg

SEQ ID NO: 141764 - DNA, 120 bp, Artificial Sequence
  ENSG00000104341_6 (sequence is synthesized)
acttttaagggttacttgattagctgtgtttggaactgctaccgatacatcaatggtaggaactcctctgatgtcctggtttatgttaccagcaatgacactacggtgctgctacccccg

SEQ ID NO: 141765 - DNA, 120 bp, Artificial Sequence
  ENSG00000104341_7 (sequence is synthesized)
tatgatgatgccactgtgaatggtgctgccaaggagccaccgccaccttacgtgtctgcctaagccttcaagtgggcggagctgagggcagcagcttgactttgcagacatctgagcaat

SEQ ID NO: 141766 - DNA, 120 bp, Artificial Sequence
  ENSG00000104341_8 (sequence is synthesized)
agttctgttatttcacttttgccatgagcctctctgagcttgtttgttgctgaaatgctactttttaaaatttagatgttagattgaaaactgtagttttcaacatatgctttgctggaa

SEQ ID NO: 141767 - DNA, 120 bp, Artificial Sequence
  ENSG00000104341_9 (sequence is synthesized)
cactgtgatagattaactgtagaattcttcctgtacgattggggatataatgggcttcactaaccttccctaggcattgaaacttcccccaaatctgatggacctagaagtctgcttttg

SEQ ID NO: 141768 - DNA, 120 bp, Artificial Sequence
  ENSG00000104341_10 (sequence is synthesized)
ctctcttttgaaaatgtaaaataaaaccaaaaatagacaactttttcttcagccattccagcatagagaacaaaaccttatggaaacaggaatgtcaattgtgtaatcattgttctaatt

SEQ ID NO: 141769 - DNA, 120 bp, Artificial Sequence
  ENSG00000104341_11 (sequence is synthesized)
aggtaaatagaagtccttatgtatgtgttacaagaatttcccccacaacatcctttatgactgaagttcaatgacagtttgtgtttggtggtaaaggattttctccatggcctgaattaa

SEQ ID NO: 141770 - DNA, 120 bp, Artificial Sequence
  ENSG00000104341_12 (sequence is synthesized)
gaccattagaaagcaccaggccgtgggagcagtgaccatctgctgactgttcttgtggatcttgtgtccagggacatggggtgacatgcctcgtatgtgttagagggtggaatggatgtg

SEQ ID NO: 141771 - DNA, 120 bp, Artificial Sequence
  ENSG00000104341_13 (sequence is synthesized)
tttggcgctgcatgggatctggtgcccctcttctcctggattcacatccccacccagggcccgcttttactaagtgttctgccctagattggttcaaggaggtcatccaactgactttat

SEQ ID NO: 141772 - DNA, 120 bp, Artificial Sequence
  ENSG00000104341_14 (sequence is synthesized)
caagtggaattgggatatatttgatatacttctgcctaacaacatggaaaagggttttcttttccctgcaagctacatcctactgctttgaacttccaagtatgtctagtcaccttttaa

SEQ ID NO: 141773 - DNA, 120 bp, Artificial Sequence
  ENSG00000104341_15 (sequence is synthesized)
aatgtaaacattttcagaaaaatgaggattgccttccttgtatgcgctttttaccttgactacctgaattgcaagggatttttatatattcatatgttacaaagtcagcaactctcctgt

SEQ ID NO: 141774 - DNA, 120 bp, Artificial Sequence
  ENSG00000104341_16 (sequence is synthesized)
tggttcattattgaatgtgctgtaaattaagttgtttgcaattaaaacaaggtttgcccacatccaagatgaccttgtgattttgtgctgattgtgtctgaggacctttccctccacata

SEQ ID NO: 141775 - DNA, 120 bp, Artificial Sequence
  ENSG00000104341_17 (sequence is synthesized)
tggtctggcagatgcacccagttcagcctaaggagtaggcttttttttgggggggggaggtcgggtgggggggatttttaatcttttaattttcaagatggttaaaatattgaaatgttt

SEQ ID NO: 141776 - DNA, 120 bp, Artificial Sequence
  ENSG00000104341_18 (sequence is synthesized)
aagtggataactatattattcataaaatgactgagtgaaaactaatacactatgagatgaaaagtacttgtcagggattttcaagcttttgctcaagtaattactatgaaataacaattt

SEQ ID NO: 141777 - DNA, 120 bp, Artificial Sequence
  ENSG00000104341_19 (sequence is synthesized)
ctagaaatgaagaacaatccgtggagaataaattaccattggtgtgggggaaaaaagccaaacagaagtagaaaaaggtgtagccggcatacaaatgttatctacagtgtatttttagat

SEQ ID NO: 141778 - DNA, 120 bp, Artificial Sequence
  ENSG00000104341_20 (sequence is synthesized)
atcctattttctgggaaaagattactaccacagtaattgagctgtgaagcggagacaaattgctctcggtggtggttcaaagtactgcaattgactggaatagcaccgcgcagttttcct

SEQ ID NO: 141779 - DNA, 120 bp, Artificial Sequence
  ENSG00000104341_21 (sequence is synthesized)
aattgactggaatagcaccgcgcagttttccttcctctcgtgcaagataagagtgataggagctgtatcgattacctgcaagatagaagtagaagcgggccgggtgcggtggctcacgcc

SEQ ID NO: 141780 - DNA, 120 bp, Artificial Sequence
  ENSG00000104341_22 (sequence is synthesized)
aaaagaagtagaagggaagaaaatcgcaaggaactagactaaaagaatctcgacccttgaatggagttacacgaacggccagatgaaagaaggaaggcccggacctccactcagggccga

SEQ ID NO: 141781 - DNA, 120 bp, Artificial Sequence
  ENSG00000104341_23 (sequence is synthesized)
ctaggggactggcggagggtgcacgctgatggatttactcaccgggtgcttggagctccagcagctggctggagcccgcgatgacgtcacggactcgggtcacatggccaagtccgcccc

SEQ ID NO: 141782 - DNA, 120 bp, Artificial Sequence
  ENSG00000104343_0 (sequence is synthesized)
gatgttgagcccccgcggcgtgacgcgagcacggcagctcctccccctgcgtctctggcctcgccggtcttggggggatggttccatcatggcgtcaatgcagaaacgactacagaaaga

SEQ ID NO: 141783 - DNA, 120 bp, Artificial Sequence
  ENSG00000104343_1 (sequence is synthesized)
actgttggctttgcaaaatgacccacctcctggaatgaccttaaatgagaagagtgttcaaaattcaattacacagtggattgtagacatggaaggtgcaccaggtaccttatatgaagg

SEQ ID NO: 141784 - DNA, 120 bp, Artificial Sequence
  ENSG00000104343_2 (sequence is synthesized)
ggaaaaatttcaacttctatttaaatttagtagtcgatatccttttgactctcctcaggtcatgtttactggtgaaaatattcctgttcatcctcatgtttatagcaatggtcatatctg

SEQ ID NO: 141785 - DNA, 120 bp, Artificial Sequence
  ENSG00000104343_3 (sequence is synthesized)
tttatccattctaacagaagactggtccccagcgctctcagtccaatcagtttgtcttagcattattagcatgctttccagctgcaaggaaaagagacgaccaccggataattcttttta

SEQ ID NO: 141786 - DNA, 120 bp, Artificial Sequence
  ENSG00000104343_4 (sequence is synthesized)
tgtgcgaacatgtaacaagaatccaaagaaaacaaaatggtggtatcatgatgatacttgttgatgccactgttatcatcctcctagcagaagatagtcctactgagaaaatgagcactt

SEQ ID NO: 141787 - DNA, 120 bp, Artificial Sequence
  ENSG00000104343_5 (sequence is synthesized)
tgatcattcagtctttgaactttaacctttgactggaagtgacctataggcaatgaagactacttccttttactgcatttttactcgtgtgcattctgggcgcatgttgatcgctggttc

SEQ ID NO: 141788 - DNA, 120 bp, Artificial Sequence
  ENSG00000104343_6 (sequence is synthesized)
agtccaggcaactgacatgcttttattagtcatacagtattaatgcaggtgtcaggaaatgtcaaatataattccattttttatttttatttttttaagcttttggaaaagctccaggtc

SEQ ID NO: 141789 - DNA, 120 bp, Artificial Sequence
  ENSG00000104343_7 (sequence is synthesized)
ctcatgtattgtgcaataacaatgacttccttggcggttttggtacgttcattgccggcaatgggcgttgtaacaggaaaagttttcattaactcctgccattcaatgattaatgcatga

SEQ ID NO: 141790 - DNA, 120 bp, Artificial Sequence
  ENSG00000104343_8 (sequence is synthesized)
tagggcctatgaaatgaacttactggttatagtgggaatataaataaagtgagggatccaacattactttaaaagtcaccccaactgtttatatttggattctatgcactgtgatcctaa

SEQ ID NO: 141791 - DNA, 120 bp, Artificial Sequence
  ENSG00000104343_9 (sequence is synthesized)
ggttaacagcatgaattaacatgcgtctttaaaggactgtaatgaaagatcattgcatatttattgaattgtttatatctactgtcaagttgttttgacatggaagattttcaagtaaca

SEQ ID NO: 141792 - DNA, 120 bp, Artificial Sequence
  ENSG00000104343_10 (sequence is synthesized)
ttggcagagaggtacagtatgttatccctatggtgaaaataaattaatttgttgtatatagttcctcaatctctgaagtaaaggtatgagtaatatagggtatgaatggtttaatcaagg

SEQ ID NO: 141793 - DNA, 120 bp, Artificial Sequence
  ENSG00000104343_11 (sequence is synthesized)
ctttattttggaagtaagaaaaatggcagtgatgattaaattgctgcagtccataatttgggcttgttatttgtacattaaagattttttccaagtaagttacactctgttaacttcctg

SEQ ID NO: 141794 - DNA, 120 bp, Artificial Sequence
  ENSG00000104343_12 (sequence is synthesized)
ctagccatcagcatgagccctactgcctaaacactatttcatttatttatgtttggaaaccccgtaaacatttttgtttgcaatcttgtttcttttgttataagtcaagtttgaatgtta

SEQ ID NO: 141795 - DNA, 120 bp, Artificial Sequence
  ENSG00000104343_13 (sequence is synthesized)
caatacttttattgaaacttttgttaagttttttcttgtaaattttctttacttgtgagtatcatcttgtcctttaatcctgtaccctaaaataagaaatacatttttgacagaggctta

SEQ ID NO: 141796 - DNA, 120 bp, Artificial Sequence
  ENSG00000104343_14 (sequence is synthesized)
atgttttaacaaaagagtgtggacatttttattttaaaatttaggcaaaagtcactatcaaatggttgcttatttgtctcacacagccatatagtttttcctggagggttttgttttgtt

SEQ ID NO: 141797 - DNA, 120 bp, Artificial Sequence
  ENSG00000104343_15 (sequence is synthesized)
gttgttgaaaagactttgcttacagctagatgaaactttctatagaaaaaaaaaattgttgaaaggtccagttctcagtaccatgtgagttaatgatactacaactaagttctttttaaa

SEQ ID NO: 141798 - DNA, 120 bp, Artificial Sequence
  ENSG00000104343_16 (sequence is synthesized)
aagtgattaatgtattttataaattaccttttcacatatgcaaaatctgtttctactacaatgttatttttactaatgccttattgttgcactctttttgaaatatcctgcagtgaatat

SEQ ID NO: 141799 - DNA, 120 bp, Artificial Sequence
  ENSG00000104343_17 (sequence is synthesized)
atgaatcaatttgggcttaaaactgaaagccagttggctgaaaggtttgaaatacgtaccccagtaaaaccattcaatcaataattggtaaataatattttaaaattgtttttaatctgt

SEQ ID NO: 141800 - DNA, 120 bp, Artificial Sequence
  ENSG00000104343_18 (sequence is synthesized)
atagatgacattttgtagctttgtacatgttgttaattaagggcatataattttacactcaaagtataattgctgaactcaggggtgggtagacttcaaaaatatgtctgctatagaaat

SEQ ID NO: 141801 - DNA, 120 bp, Artificial Sequence
  ENSG00000104343_19 (sequence is synthesized)
aacttgaaaaaaaaaattaaaaccgtggccagccaccaaattgtggacactgtttatatactgctagttaacaattaccacttttaaaaaattataaccgtttttgttctatcttgacta

SEQ ID NO: 141802 - DNA, 120 bp, Artificial Sequence
  ENSG00000104343_20 (sequence is synthesized)
gataaattctcacaatgatctctgtcagttttattagttggcctgtttaaccaagacagaaagtctttgaattactcatagttttaaactgcttttaatatgaaaattgcagctgtaaat

SEQ ID NO: 141803 - DNA, 120 bp, Artificial Sequence
  ENSG00000104343_21 (sequence is synthesized)
tatgtattttcatattttgcgtaactgctctacactactgtttgacttgatcttcttctgggggttagggagaaatctgtctccatattgctggttctcttaccaaaatgcttttataaa

SEQ ID NO: 141804 - DNA, 120 bp, Artificial Sequence
  ENSG00000104343_22 (sequence is synthesized)
gaaatgaccggtgacatttattcaccaaaggaattaatatactgagtcaaagattaacaatgctatactatagagtaataggtcatatatagcctcaattgagttttttatgacaatatt

SEQ ID NO: 141805 - DNA, 120 bp, Artificial Sequence
  ENSG00000104343_23 (sequence is synthesized)
ttaacatacctctctctctacatataaataccataaagtaaactaaaatgacacagaggaaagtagaggaaaatgaaataatttcggtacatcttatggtttaaagagtagaaaataaga

SEQ ID NO: 141806 - DNA, 120 bp, Artificial Sequence
  ENSG00000104343_24 (sequence is synthesized)
tgaaatatcctaaaatataggagcacagacatttaaaattcataatcaggctaacaacactctcttgaatttaggaatcattgaaaactccttgcacttagatttaatttatatgttagt

SEQ ID NO: 141807 - DNA, 120 bp, Artificial Sequence
  ENSG00000104343_25 (sequence is synthesized)
tacattattaaaagtcataaggcatttatctgagtcattgctctacagagagcaattaatggcttgtaataataaaaagaatatttctctgtaatgcattgttgaaagacaaccagaata

SEQ ID NO: 141808 - DNA, 120 bp, Artificial Sequence
  ENSG00000104343_26 (sequence is synthesized)
tcaagaaaatgtatataggaatatgctacttgcctcctccctgcatttcctcgtggggcactatttgcgacataggcctacagaattagactttcatacttagaagataaggtacactct

SEQ ID NO: 141809 - DNA, 120 bp, Artificial Sequence
  ENSG00000104343_27 (sequence is synthesized)
tcttcttttatttatttatttatttatttttaggccattcttctggtttgccaaattctattaagacagtgatacatttgcttccttatttatgcatgcttagatcatgaacatgatgcc

SEQ ID NO: 141810 - DNA, 120 bp, Artificial Sequence
  ENSG00000104343_28 (sequence is synthesized)
cttcttttttttttttttctttggtcaagtagggattaatgccataggtttagagagaaggattgttttcagtttttaagagaattttttaaaaatacattttatggttctcttaaggaa

SEQ ID NO: 141811 - DNA, 120 bp, Artificial Sequence
  ENSG00000104343_29 (sequence is synthesized)
ttaatattcacttctgaaggacttacttgtaatatataatttatcattttagccagcagggaaataaatcatttttaatccccagaagaaagtgctggaaatagcttctatatagtcagc

SEQ ID NO: 141812 - DNA, 120 bp, Artificial Sequence
  ENSG00000104343_30 (sequence is synthesized)
agttcacctggagaaagatcttaattccttgttgttttgactaggaatatcaatatttggtataaaataactagaatagtttattaccttttccctcatgaaattttaaatatatgcaaa

SEQ ID NO: 141813 - DNA, 120 bp, Artificial Sequence
  ENSG00000104343_31 (sequence is synthesized)
tatatatatcattagattcctgtggtggataataatttcttcagattctaaaacaggtgtctagtgactgcttaattgtttccaagttgcatcaaagatgaattggtaaataatggaaat

SEQ ID NO: 141814 - DNA, 120 bp, Artificial Sequence
  ENSG00000104343_32 (sequence is synthesized)
gagtagtgatatgaaaatggttatgtaactacatattacttgtttctggtaatcaagtcttattttttaaaagcctattgtttttcagaattgagatatttaaaacttgttataacttct

SEQ ID NO: 141815 - DNA, 120 bp, Artificial Sequence
  ENSG00000104343_33 (sequence is synthesized)
tcctaaaaatagaagagaagaggaggtactgtgtgttacaaaaatttttttaaataaagaattcagtgtcactagttctaagcctttatggttactgctgcttatatttcttgatctcac

SEQ ID NO: 141816 - DNA, 120 bp, Artificial Sequence
  ENSG00000104343_34 (sequence is synthesized)
tttcattaatttttttgtacatatcttagctgaatgcttaaaatttacaattatttgtaattgtgtatgtaaattgcttttcaaaaagaactgaagcttaaccatattcttcttttctga

SEQ ID NO: 141817 - DNA, 120 bp, Artificial Sequence
  ENSG00000104343_35 (sequence is synthesized)
tactgttctgtgttatagtaatgccgttactgcctgtgcatgattgaggtctgtgaagaaggtgtcttttaatctgcaccaactggccccaatcctctttgtagtcctttttaaattgtt

SEQ ID NO: 141818 - DNA, 120 bp, Artificial Sequence
  ENSG00000104343_36 (sequence is synthesized)
ttaaatctgtcctttatttttcttcctatttttctgcctcttcccactgatgtccaatgtgtcagtcttccgcagtttccttttctcacttctaatttattctctcttttttttttctga

SEQ ID NO: 141819 - DNA, 120 bp, Artificial Sequence
  ENSG00000104343_37 (sequence is synthesized)
ggttagggattctacagaaggacgattattaaaattatgccatgaatttttgaaaaatttaaaatgctctcctacaaataaaatacatggagtttctgatactaatttcagtttgtcagt

SEQ ID NO: 141820 - DNA, 120 bp, Artificial Sequence
  ENSG00000104343_38 (sequence is synthesized)
agatggctaaatttgttgaataattgactacttggtaaatgagctgttagctgtaattagttctttagtactaatattaaggaaattttgttattttcggatgaggactctcccaaagcc

SEQ ID NO: 141821 - DNA, 120 bp, Artificial Sequence
  ENSG00000104343_39 (sequence is synthesized)
tcggatgaggactctcccaaagccaaattattgtccaagcaaattatttattttttccatttaaatttctaagtcattttgagatgtggaatgattatttttattatttatttatttatt

SEQ ID NO: 141822 - DNA, 79 bp, Artificial Sequence
  ENSG00000104343_40 (sequence is synthesized)
agacggagtcttgctctgtcacccgggctttagtgcagtgcacgatcttggctcatttcaatctccacctcctgggtct

SEQ ID NO: 141823 - DNA, 120 bp, Artificial Sequence
  ENSG00000104343_41 (sequence is synthesized)
cccaccacacccagcctggaatcattttttaaaaataatttgtgggagacttgctttctcaacataaattgtgtgtgggttgttttttgttttttgagacggtcttcctctgttgcccag

SEQ ID NO: 141824 - DNA, 120 bp, Artificial Sequence
  ENSG00000104343_42 (sequence is synthesized)
gctggagtgtgcagtggaacagtcattgcagccttgaccaccttggctcaagcaatcctcctgcctcccgggtagctgagtctacaggtgtgtgccaccatgcctggatggatagaattt

SEQ ID NO: 141825 - DNA, 78 bp, Artificial Sequence
  ENSG00000104343_43 (sequence is synthesized)
ttttttttttttttttttttaaagacacgaggtctcaccatgttgcccaggctgatcttgaattcctgggctcaagca

SEQ ID NO: 141826 - DNA, 120 bp, Artificial Sequence
  ENSG00000104343_44 (sequence is synthesized)
ggattacaggtgcaagccaccatgcctcgtctgtttgccgatttaagacaggtttatgtacatcattatcattagaggcacatagaatctagacatgtacttgaaacttagctctctatc

SEQ ID NO: 141827 - DNA, 120 bp, Artificial Sequence
  ENSG00000104343_45 (sequence is synthesized)
ctgaaagttgaagttagggttctttgatcctggtgagatgttaattgtaattttaattttcatatgttaatattgtgacttgtattttgtgatgagtctctagaatgattaaatgactat

SEQ ID NO: 141828 - DNA, 120 bp, Artificial Sequence
  ENSG00000104343_46 (sequence is synthesized)
ttttttatgaaaaattttttgttaataaaatatctgagggtattttgagtatgtggaaggaatgcctgaatagaagctgatctatcttaacatacctcaagaactccagttttaatatgg

SEQ ID NO: 141829 - DNA, 120 bp, Artificial Sequence
  ENSG00000104343_47 (sequence is synthesized)
tgagtgaggagttgactgggaaaaggagagatccaattcttgttctagtccttggcacatacactctctgggttttgagaaaaggatggtcctacaacgattctaagttgttttctcatt

SEQ ID NO: 141830 - DNA, 120 bp, Artificial Sequence
  ENSG00000104343_48 (sequence is synthesized)
ggtcctacaacaattctaagttgttttctcaaaggcaaaagcatgatttcaaaatgacatcacttgtcagattttctggtgtatggaaagatttaataatcctgcctcttttgaagcctg

SEQ ID NO: 141831 - DNA, 120 bp, Artificial Sequence
  ENSG00000104343_49 (sequence is synthesized)
aaacttacaatttaaagcctgaaatctaccataaggaacttggtaaattgtgtcagataccatgaaaatgcatcttttcatagttaaccacagattgtttatgtaaaggcaaattggtgg

SEQ ID NO: 141832 - DNA, 120 bp, Artificial Sequence
  ENSG00000104343_50 (sequence is synthesized)
tcaggttcaaggtaaaatggattattgggttgattagtagccaaaaactaaatgcatgttcaggtcaaaatgaatttgtttgttttagttggtgccattttccttttattattcagaact

SEQ ID NO: 141833 - DNA, 120 bp, Artificial Sequence
  ENSG00000104343_51 (sequence is synthesized)
acagagtgtgcattttattaataggaatgaaagctcatgcttgaggatttgaatagggtggatgtatatattttataaactcaagttgcaaaatatgtaaagtcactactttttaaatag

SEQ ID NO: 141834 - DNA, 120 bp, Artificial Sequence
  ENSG00000104343_52 (sequence is synthesized)
aatataaatgttaaaacagacaaatctatgttatatattttttaatacatgtatcagacttgttagttgaatgcagattactttgctttatggaatttcataacttttaataataaagca

SEQ ID NO: 141835 - DNA, 120 bp, Artificial Sequence
  ENSG00000104343_53 (sequence is synthesized)
gttgttattggattttttctgtagacttgaatactaaatgggatagataccagacctctttttggtttatgacgtaaaagtatttgtacagtagtttctcttcacaaaagactgaatttt

SEQ ID NO: 141836 - DNA, 120 bp, Artificial Sequence
  ENSG00000104343_54 (sequence is synthesized)
aaaggattatagaaacaggaacatgtccatttccaaaatgagtgcaacagaatgaagatagtcacttaaaccatctatttaacacatcacctttatgtaatatgtagctagttttagtgt

SEQ ID NO: 141837 - DNA, 120 bp, Artificial Sequence
  ENSG00000104343_55 (sequence is synthesized)
tttaataagtcccaactaaagactgagtgttttcagtgaagatggaaatggagacccaggcacttgcttagagttatcgtgagtccgatgttcctgaacttcaagttgtacaattaaggg

SEQ ID NO: 141838 - DNA, 120 bp, Artificial Sequence
  ENSG00000104343_56 (sequence is synthesized)
catactctaagaacttctggatgctttctggagtatacaaacagatcaactaatgacttaaatgagtgactcttgaagctgcaagaagaggaaagaaataaccacaagaaggggctatct

SEQ ID NO: 141839 - DNA, 120 bp, Artificial Sequence
  ENSG00000104343_57 (sequence is synthesized)
cagcatctgttattcctgacaggaggaattaaatatgctctgctggtaattctaagcttttctgcaggggatctgcttgccccaggagcaccttagtcctcattgaggcagccattctgc

SEQ ID NO: 141840 - DNA, 120 bp, Artificial Sequence
  ENSG00000104343_58 (sequence is synthesized)
cataaaaacgatcatgtctcaagctgttcctgccgtcctacacaactatgttagtagatggttagataaatatatgaaccatcttttgtactttgatgatgcccttttcctttattataa

SEQ ID NO: 141841 - DNA, 120 bp, Artificial Sequence
  ENSG00000104343_59 (sequence is synthesized)
tccttaatttctactttccatagtaggatttgacttttctccattagtttaagctaccctggataagtgactctgtttatgtcctccctatatttcttactcattttcacactaacataa

SEQ ID NO: 141842 - DNA, 120 bp, Artificial Sequence
  ENSG00000104343_60 (sequence is synthesized)
cacgtaacaaaattaaacataagctaaattgaagaagcaagtgagacagctaagagttttgtgtacttggacaacaaagctcaaagccactgtggttatctgtcctgttgggagcccctt

SEQ ID NO: 141843 - DNA, 120 bp, Artificial Sequence
  ENSG00000104343_61 (sequence is synthesized)
tcaaccatttttttagttgcctgtaagatttatttttaatgtttgcctgcataatgcaaaatacataagtgggaatccctacgccctttacagttaagtggattatggaaataataagga

SEQ ID NO: 141844 - DNA, 120 bp, Artificial Sequence
  ENSG00000104343_62 (sequence is synthesized)
aagtttatcaactaaggtaggaaatatcttctcatgtctgtatctggccttcagggacttaatgtgggtgaatatatgtcattagacaagatcctaatatagatggctgtatcctgcaga

SEQ ID NO: 141845 - DNA, 120 bp, Artificial Sequence
  ENSG00000104343_63 (sequence is synthesized)
tagccaattcaacattaaaattttatgtttccatacctcaatgaaaacatatttcttttatcctgttataatttaatgacattcccatccaacttaatcaagcaatgatactcagtagtc

SEQ ID NO: 141846 - DNA, 120 bp, Artificial Sequence
  ENSG00000104343_64 (sequence is synthesized)
ctctccttgcatttttcaagtcctgttgagtgtaactttaaaatgtctctgagatttctaccttctctccagtctccttaccattagggcctttcactacctggccttggtgtccctagg

SEQ ID NO: 141847 - DNA, 120 bp, Artificial Sequence
  ENSG00000104343_65 (sequence is synthesized)
ctgctcttcagctgtccacaaaccttgtttcataagcagtagcaatgcaagcttccactgccgtctgctaatgttcttccctcctagaatgttcatgatctgcgtttctacctgaaaggt

SEQ ID NO: 141848 - DNA, 120 bp, Artificial Sequence
  ENSG00000104343_66 (sequence is synthesized)
ctagttcaaaggtagctgaaaggttatcatccttgtcctttcttctctccctaccagtcatctatcctgaactttttaacagtagggacagtgttgcaattgtgtttgtgtccccagcac

SEQ ID NO: 141849 - DNA, 120 bp, Artificial Sequence
  ENSG00000104343_67 (sequence is synthesized)
gtagcacacagtacctagtatacagtacctgtagcacataggcatttaataagtgtgtattgaattaacttggttatgcttgtatttttatcctagctttctcaaagaaacttaggtgct

SEQ ID NO: 141850 - DNA, 120 bp, Artificial Sequence
  ENSG00000104343_68 (sequence is synthesized)
agctattttgaaacatatatccagaaccaccacctgagtaaaatgtataacaggaccctgctctttctatcccagagagtttgagaaaactacttttaaataaatcattaatcattcttc

SEQ ID NO: 141851 - DNA, 120 bp, Artificial Sequence
  ENSG00000104343_69 (sequence is synthesized)
atgttgagcccccgcggcgtgacgcgagcacggcagctcctccccctgcgtctctggcctcgccggtcttggggggatggttccatcatggcgtcaatgcagaccacaggaaggagggtg

SEQ ID NO: 141852 - DNA, 120 bp, Artificial Sequence
  ENSG00000104343_70 (sequence is synthesized)
catgtaacaagaatccaaagaaaacaaaatggtggtatcatgaggcaacattttgccgtattgcctaggctggtcttgaactcctgggcccaagcagtccatccacctcagcctccccaa

SEQ ID NO: 141853 - DNA, 120 bp, Artificial Sequence
  ENSG00000104343_71 (sequence is synthesized)
atgctggaattacaggcgtgagccactttgcattgccaagaaaattatgatacttgttgatgccactgttatcatcctcctagcagaagatagtcctactgagaaaatgagcactttgat

SEQ ID NO: 141854 - DNA, 120 bp, Artificial Sequence
  ENSG00000104343_72 (sequence is synthesized)
ttgaagtcttaactcccagtacctcaaattgtgaccctatttggaaatagagtcattgcagatgtcattagttgaggtgaggttataccgaagtagaatgtggccttaatccaatataac

SEQ ID NO: 141855 - DNA, 120 bp, Artificial Sequence
  ENSG00000104343_73 (sequence is synthesized)
tggtgtcctaagaattggagaagagactcagacacatggggagaagaccatgcagtcatggggtgatgtatcaacaagccagcaaatgccagggattgctgggaacatcagaggctggaa

SEQ ID NO: 141856 - DNA, 120 bp, Artificial Sequence
  ENSG00000104343_74 (sequence is synthesized)
gaggcagggaaatgttcttccctagagctgtgggagagaacatgattctgctgacaccttgatcatggacttccagcctccagaactgtgagacaataaatgtctggtttcttttaagtc

SEQ ID NO: 141857 - DNA, 120 bp, Artificial Sequence
  ENSG00000104356_0 (sequence is synthesized)
gtgatctggaatggcccagatcccttaaatgtcaaatgcaaaagaaagaaaacacgccaagaaaatgagaaaccagcctaccaatgtgactctgtcctctggctttgtggctgacagagg

SEQ ID NO: 141858 - DNA, 120 bp, Artificial Sequence
  ENSG00000104356_1 (sequence is synthesized)
tgtaaagcaccacagtggaggtgaaaaacctttccaagctcaaaaacaagagcctcatcctggaacttcacgacagcggcaaaccagagtcaacccccattctctgcctgaccctgaagt

SEQ ID NO: 141859 - DNA, 120 bp, Artificial Sequence
  ENSG00000104356_2 (sequence is synthesized)
gaatgagcagtcttcctccaaagggatgtttagaaaaaagggaggatggaaagcaggtcccgagggcacgtctcaggagatccccaagtatataactgcttctacttttgctcaagcacg

SEQ ID NO: 141860 - DNA, 120 bp, Artificial Sequence
  ENSG00000104356_3 (sequence is synthesized)
agctgctgaaatcagtgctatgttaaaagctgtgacccagaagtcttcgaattcactggtttttcagactctgccacggcacatgcgacgaagagccatgagccacaacgtcaaacgcct

SEQ ID NO: 141861 - DNA, 120 bp, Artificial Sequence
  ENSG00000104356_4 (sequence is synthesized)
tcccagacggttacaggagattgcccagaaagaggcggagaaagccgtacatcagaaaaaagaacattcaaaaaataaatgccataaagctcgaagatgtcacatgaaccggacgctaga

SEQ ID NO: 141862 - DNA, 120 bp, Artificial Sequence
  ENSG00000104356_5 (sequence is synthesized)
atttaaccgtagacaaaagaagaacatttggttagaaactcacatctggcacgccaagcggtttcatatggtcaagaagtggggctactgccttggggagaggccaacagtcaagagcca

SEQ ID NO: 141863 - DNA, 120 bp, Artificial Sequence
  ENSG00000104356_6 (sequence is synthesized)
cagagcctgctatcgagccatgacgaaccggtgcctcctgcaggatttatcctattactgttgtttggagttgaaaggcaaagaggaagaaatactaaaggcgctttctggaatgtgtaa

SEQ ID NO: 141864 - DNA, 120 bp, Artificial Sequence
  ENSG00000104356_7 (sequence is synthesized)
catagacacagggctgacgtttgcagcagttcactgcttgtctggaaagcgccaagggagccttgtgctttatcgggtgaataaatatcccagagaaatgcttgggcctgttacgtttat

SEQ ID NO: 141865 - DNA, 120 bp, Artificial Sequence
  ENSG00000104356_8 (sequence is synthesized)
ctggaagtcccagaggaccccgggtgacccttctgagagcaggcagctgtggatctggctgcatccaacccttaaacaggatatcttagaggaaataaaagcagcgtgccagtgtgtgga

SEQ ID NO: 141866 - DNA, 120 bp, Artificial Sequence
  ENSG00000104356_9 (sequence is synthesized)
acccatcaaatcagctgtctgcatcgctgacccacttccaacaccatcccaagaaaaaagccaaactgaattgcctgacgagaaaattggcaagaaaagaaaaaggaaagatgatggaga

SEQ ID NO: 141867 - DNA, 120 bp, Artificial Sequence
  ENSG00000104356_10 (sequence is synthesized)
aaatgctaaaccaattaaaaaaattatcggtgatggaactagagatccatgtctaccatactcttggatctctccaaccacaggcattataatcagcgatttgacgatggagatgaacag

SEQ ID NO: 141868 - DNA, 120 bp, Artificial Sequence
  ENSG00000104356_11 (sequence is synthesized)
attccggctgattgggccactttcccactccatcctaactgaagcaataaaagctgcttctgtccacactgtgggagaggacacagaggagacacctcaccgctggtggatagaaacctg

SEQ ID NO: 141869 - DNA, 120 bp, Artificial Sequence
  ENSG00000104356_12 (sequence is synthesized)
taagaaacctgacagcgtttcccttcattgcagacaagaagccattttcgagttgttgggaggaataacatcaccagcagaaattccggcaggtactattctgggactgacagttgggga

SEQ ID NO: 141870 - DNA, 120 bp, Artificial Sequence
  ENSG00000104356_13 (sequence is synthesized)
cgaataaatttgccccaaaagaagtccaaagctttgcccaatccagaaaaatgccaagataatgagaaagttagacagctgcttctggagggtgtgcctgtggaatgtacgcatagcttt

SEQ ID NO: 141871 - DNA, 120 bp, Artificial Sequence
  ENSG00000104356_14 (sequence is synthesized)
atctggaaccaagatatctgtaagagtgtcacagagaataaaatctcggatcaggatttaaaccggatgaggagtgaattgctggtgcctgggtcacagcttattttaggtccccatgaa

SEQ ID NO: 141872 - DNA, 120 bp, Artificial Sequence
  ENSG00000104356_15 (sequence is synthesized)
tccaagatacctatacttttgattcagcagccaggaaaagtgactggtgaagatcgactaggctggggaagtggctgggatgtcctactcccaaagggctggggcatggctttctggatt

SEQ ID NO: 141873 - DNA, 120 bp, Artificial Sequence
  ENSG00000104356_16 (sequence is synthesized)
ccatttatttatcgaggtgtgagagtcggagggttgaaagagtctgcagtgcattctcagtataagaggtcgcctaatgtcccaggcgattttccagactgccctgccgggatgctgttt

SEQ ID NO: 141874 - DNA, 120 bp, Artificial Sequence
  ENSG00000104356_17 (sequence is synthesized)
gcggaagagcaagctaagaatcttcttgaaaagtacaaaagacgccctcctgcaaaacggcccaactacgttaagcttggcactctggcacctttctgctgtccctgggagcagttaact

SEQ ID NO: 141875 - DNA, 120 bp, Artificial Sequence
  ENSG00000104356_18 (sequence is synthesized)
caagactgggagtcaagagtccaggcttacgaagaaccttctgtagcttcatctccaaatggtaaggagagtgacctaagaagatctgaggtgccttgtgctcccatgcctaaaaaaact

SEQ ID NO: 141876 - DNA, 120 bp, Artificial Sequence
  ENSG00000104356_19 (sequence is synthesized)
catcagccatctgatgaagtgggcacatccatagagcaccccagggaggcagaggaggtaatggatgcagggtgtcaagaatcggcagggcctgagaggatcacagaccaggaggccagt

SEQ ID NO: 141877 - DNA, 120 bp, Artificial Sequence
  ENSG00000104356_20 (sequence is synthesized)
gaaaaccatgttgctgccacagggagtcacctctgcgttctcaggagtagaaaattactgaagcaactgtcagcctggtgtgggcccagttctgaggatagtcggggaggccggcgagct

SEQ ID NO: 141878 - DNA, 120 bp, Artificial Sequence
  ENSG00000104356_21 (sequence is synthesized)
cccggcagaggccagcaaggattgaccagagaggcttgcctgtccatcttgggccacttccccagggccctggtttgggtcagcctgtccctgctcagcaagggcagccccgagcctcac

SEQ ID NO: 141879 - DNA, 120 bp, Artificial Sequence
  ENSG00000104356_22 (sequence is synthesized)
accatgatctgtgtcccagccaaggaggacttcctccagctccatgaggactggcattactgtgggccccaggaatccaaacacagtgacccattcaggagcaagatcctgaaacagaaa

SEQ ID NO: 141880 - DNA, 120 bp, Artificial Sequence
  ENSG00000104356_23 (sequence is synthesized)
gagaagaagaaaagggagaagaggcagaagccaggacgtgcctcttctgatggcccggcgggggaagagcccgtggctgggcaggaagctctgactctagggctgtggtcaggccctctg

SEQ ID NO: 141881 - DNA, 120 bp, Artificial Sequence
  ENSG00000104356_24 (sequence is synthesized)
ccgcgtgtgacgttgcactgctccagaactctcctaggctttgtgactcagggagatttttccatggctgttggctgtggagaagccctggggtttgttagcttgacaggcttgctggat

SEQ ID NO: 141882 - DNA, 120 bp, Artificial Sequence
  ENSG00000104356_25 (sequence is synthesized)
atgctgtccagccagcctgcagcgcagaggggcttagtgctactgaggcctcccgcctctctgcagtatcgatttgcgaggattgctattgaggtgtgaatgcgtgcttgtatcccagca

SEQ ID NO: 141883 - DNA, 120 bp, Artificial Sequence
  ENSG00000104356_26 (sequence is synthesized)
gggcatagataatacgttattattgtctgccaagttctacatgtggagaatctgcttctgctttaaaatatcatgtgaaactccctggaaacaagaataaaaaattatgtattatgcaga

SEQ ID NO: 141884 - DNA, 120 bp, Artificial Sequence
  ENSG00000104356_27 (sequence is synthesized)
atgcgctctccagcgcgctctccaggagctttggctcggtgggtactgtcgcggaggcttgtcattctgacccggggattcctcacagcgtctggcagaaatgtcaaatgcaaaagaaag

SEQ ID NO: 141885 - DNA, 120 bp, Artificial Sequence
  ENSG00000104356_28 (sequence is synthesized)
tctcttggtctgtgtagttgtggctgaaaataatgagaagctctacgagttatcatcccctttttttgttagaaacaaagggcttgtcaggtctatttgaaaaacctcatagtcatgtga

SEQ ID NO: 141886 - DNA, 120 bp, Artificial Sequence
  ENSG00000104356_29 (sequence is synthesized)
taagcaacaatagatgtttaatgatttcactgttatagcagaagacaagagaagacgcttggcctctgtacatgaaatatgggctcctgatggacctcattcaattctgtactgtgattt

SEQ ID NO: 141887 - DNA, 120 bp, Artificial Sequence
  ENSG00000104356_30 (sequence is synthesized)
ccatgccgaacaactcaagccttaaagagagaaatcatggacaactgatttctgcctgttttcaggcaggcacagtttatggcgtcagtgctaggctggaattagaaagtgggggtctat

SEQ ID NO: 141888 - DNA, 120 bp, Artificial Sequence
  ENSG00000104356_31 (sequence is synthesized)
gacgtggacttcctgactctttgatctctttgttgttgaccaacacttgatcctactagttacttaatttttttaagtaaaaaattattattattttgtttctgcaaagattttctcaaa

SEQ ID NO: 141889 - DNA, 120 bp, Artificial Sequence
  ENSG00000104356_32 (sequence is synthesized)
gccatagaggagcatttctcagaatatgttctatgatatgtgtcacctaaaaaagtaagagattccaaggtcaggttgatatggaaactctaggttaaataaagttaagcatttctttat

SEQ ID NO: 141890 - DNA, 120 bp, Artificial Sequence
  ENSG00000104356_33 (sequence is synthesized)
gaaagaacttctggaaacttccatgtgataatgtgcattgcggatctctaggaaggaaatgatagtgtatagtattttctaaatacttgtgattcctaaagttctcttacaaggagccct

SEQ ID NO: 141891 - DNA, 120 bp, Artificial Sequence
  ENSG00000104356_34 (sequence is synthesized)
ttgtaggaccagtgttcttagtagcgcgctttgggcagtgtggctgtgtagtgcatagctacctctgcaaggtgataactaagccggcaagctgcctttcaacactcatgcagtcacgtt

SEQ ID NO: 141892 - DNA, 120 bp, Artificial Sequence
  ENSG00000104356_35 (sequence is synthesized)
gtccacctgagattctcaacagggtataaaaggaaggtctcatcttgcctcacaggaagagtgggctcagtgtggcttttttccaactatggagaaactcagtgctcatctactttaagt

SEQ ID NO: 141893 - DNA, 120 bp, Artificial Sequence
  ENSG00000104356_36 (sequence is synthesized)
ttccacatatggcttgctcatagccttggtccttacctttcctgccataactttctagaagagcttaatgggattttttttctaaaaaatgtaaatatgcagttaggcattattttatgt

SEQ ID NO: 141894 - DNA, 120 bp, Artificial Sequence
  ENSG00000104356_37 (sequence is synthesized)
aaatgcattgggtttttactgtagcatttggcactaaatggctttgggggtgatgaggtggggaaggatacagcaggtggtacagtagtcaggaagtacctgccaccaatgagatgtctg

SEQ ID NO: 141895 - DNA, 120 bp, Artificial Sequence
  ENSG00000104356_38 (sequence is synthesized)
atgctttgcctcttaccatgcctctgaatgtctttggatccaacccagatgagactgaaaaaaaaaaaacagtgtaactaagtggcatctgtaaacagaataaatgaaaatgtcacctga

SEQ ID NO: 141896 - DNA, 120 bp, Artificial Sequence
  ENSG00000104356_39 (sequence is synthesized)
ttaaaatagagatgcattataatggttataattattttagttttccaatcctaaattgttcaacattggttctcctgtatgtttttctttagacgccctcctgcaaaacggcccaactac

SEQ ID NO: 141897 - DNA, 80 bp, Artificial Sequence
  ENSG00000104361_0 (sequence is synthesized)
gagcaggaagtggctgcggcgcggcctcctcgcggtgcaacagggcggggaggcggccgcagcccgagccggagcccgag

SEQ ID NO: 141898 - DNA, 120 bp, Artificial Sequence
  ENSG00000104361_1 (sequence is synthesized)
gccccggggactccgcctcggccgccctggacgagctgtcactgaatttcacgtacggggcaccaggcgccggcaacggctccctctcgggcgactggtaccgcaggaaccagattcacc

SEQ ID NO: 141899 - DNA, 120 bp, Artificial Sequence
  ENSG00000104361_2 (sequence is synthesized)
tttttggagttttgctggctattttaggaaacttggtgatcagtatttctctaaatattcagaaatattctcaccttcagctggcacaacaagagcacccaaggccatacttcaagagtg

SEQ ID NO: 141900 - DNA, 120 bp, Artificial Sequence
  ENSG00000104361_3 (sequence is synthesized)
tgctgtggtggggtggtgtcctgctgatggccgtgggagagacggggaactttgcagcctatggatttgctcccattactctgatcgctccgttaggctgtgtgtctgttacaggtagtg

SEQ ID NO: 141901 - DNA, 120 bp, Artificial Sequence
  ENSG00000104361_4 (sequence is synthesized)
ccattatttctgttacatttctgaaagacaatttgagagcctcagacttactcggtacgacactggcatttgcaggaacatatttactggtgaactttgctccaaatataactcaggcaa

SEQ ID NO: 141902 - DNA, 120 bp, Artificial Sequence
  ENSG00000104361_5 (sequence is synthesized)
tctcagcaagaacagtacagtattaccttgtcggatggcagttcctgatctatgtgattttagaaatattaattttctgcattctcctgtatttctataaaagaaaaggaatgaagcata

SEQ ID NO: 141903 - DNA, 120 bp, Artificial Sequence
  ENSG00000104361_6 (sequence is synthesized)
tggtgattctgctaaccctggtggcaattctagcctcattgactgttatttcagtaaaggccgtctcaggcatgatcactttttctgtgatggataaaatgcaactaacttaccccattt

SEQ ID NO: 141904 - DNA, 120 bp, Artificial Sequence
  ENSG00000104361_7 (sequence is synthesized)
tctatatcatgtttatcatcatgatagcatcttgtgttttccaagtcaagttcctgaatcaagccacgaaactctacaatacgacaacagtggtgccagttaatcatattttctttacaa

SEQ ID NO: 141905 - DNA, 120 bp, Artificial Sequence
  ENSG00000104361_8 (sequence is synthesized)
tcagtgccatcattgcaggtatcatattttatcaggaattccttggtgctccttttctcactgtatttatatatctttttgggtgttttctgtcattccttggtgtatttttggtcacaa

SEQ ID NO: 141906 - DNA, 120 bp, Artificial Sequence
  ENSG00000104361_9 (sequence is synthesized)
gaaatcgagaaaaggaacatctgcaacagtcttatattgattttggaaatattcctgggaaacaaatgttggacaaaatacaaccagattcacatagcttatcctatggaactttgcctg

SEQ ID NO: 141907 - DNA, 120 bp, Artificial Sequence
  ENSG00000104361_10 (sequence is synthesized)
atggaagtgactcaacaaagagccaaagtggagagaagaaagaggtctaaatgctgagaaggatggctgttggcctgttattcgataccacctttttaaaaaattgcacatgttcaattt

SEQ ID NO: 141908 - DNA, 120 bp, Artificial Sequence
  ENSG00000104361_11 (sequence is synthesized)
gtgtcagcagctcttttataagctaacatgtgctagcattcatttcagtcctttcccccacctcagcgtctatggacaatcggggacttcctaagctctgacagtctaatatttccatgg

SEQ ID NO: 141909 - DNA, 120 bp, Artificial Sequence
  ENSG00000104361_12 (sequence is synthesized)
aatgtgatttggagtgttccccacaccctggacctctccctagtgattatctagccagctacaccttactcagagcccggctgctctagcaggaatgttgcacagaaacatacatttgcg

SEQ ID NO: 141910 - DNA, 120 bp, Artificial Sequence
  ENSG00000104361_13 (sequence is synthesized)
gtttggccacaggtcgcataggtggcttctcccacgggtagtgtcagttgcttcactttaaaaagtcacttcagccccacaacctcactcccaaaagaaaggtttgagagcgctcatttt

SEQ ID NO: 141911 - DNA, 120 bp, Artificial Sequence
  ENSG00000104361_14 (sequence is synthesized)
ttttctaagacaccttttataagcctccctataaaaatctcacctttcaagtactaagttagaattgcaagtcatcttttctgaaaactaatgctatcaaagtcctcctttgaaaattaa

SEQ ID NO: 141912 - DNA, 120 bp, Artificial Sequence
  ENSG00000104361_15 (sequence is synthesized)
gggtctctttaaaattagaatttataaatggcattcagtgatagtgtacaccaaaattaaaagaccttgactggtgggctttttacgtgtaaggaagaggaagtttaagaagtaggactc

SEQ ID NO: 141913 - DNA, 120 bp, Artificial Sequence
  ENSG00000104361_16 (sequence is synthesized)
tgcttgtttcagtagcccatgtactaaaataggaacaatgcagagattagcacagcccctgcacaaggctgacacataaattcatgaagcgttagagacaaaaagtaggactaatgtttg

SEQ ID NO: 141914 - DNA, 120 bp, Artificial Sequence
  ENSG00000104361_17 (sequence is synthesized)
tttgtttattttttaataaaaatctagaatggtgatgttttcttcagctgtatgattctatcatacttgaaactgaagaaaaatttaatatcctatgtcttttttatagatcttataatt

SEQ ID NO: 141915 - DNA, 120 bp, Artificial Sequence
  ENSG00000104361_18 (sequence is synthesized)
ttcttcccaaagtcattacctcaagctttgtaaattcttctagataaaaggagagttgtgattagagaactgaatttcagccatttaaacctgtagacatagaaaacaacccagtggtca

SEQ ID NO: 141916 - DNA, 120 bp, Artificial Sequence
  ENSG00000104361_19 (sequence is synthesized)
aacctgagcttcaagaggaagcccaagtcctcctgtttcctgaatggcttttccactccaattcatcacatatctgctaagacacatttgcaggtagaatccataataatatctgttatt

SEQ ID NO: 141917 - DNA, 120 bp, Artificial Sequence
  ENSG00000104361_20 (sequence is synthesized)
tatgatctacctaatatttaaaggagaagaaaagaagtagccttcgttgcagccaacatccaacaataagtcccacccttaatgacatttcaaagccttcagatcacttctgacatgtct

SEQ ID NO: 141918 - DNA, 120 bp, Artificial Sequence
  ENSG00000104361_21 (sequence is synthesized)
gtccaatatcattccaatcaatagtcttgcatttaaataggttgtttaactcggtggtattgagactgtaaccttaatggctcaggtcttttagctttgttctttgtcataatctgcact

SEQ ID NO: 141919 - DNA, 120 bp, Artificial Sequence
  ENSG00000104361_22 (sequence is synthesized)
cctggccagactgaccaaacctggctgcaaaggaaagagatttgaattgatcaccaatgtatgaaaaatacagaacccatgtctggctcctaaactcctggtaataattcccgccatcgt

SEQ ID NO: 141920 - DNA, 120 bp, Artificial Sequence
  ENSG00000104361_23 (sequence is synthesized)
agcaagtgtcccatgcattcagataaagcagtcataatttatggtgtattttaccgaattggtccagcatattggtcctacaaggctcagccaagaaatgtatctggtgccttaaactac

SEQ ID NO: 141921 - DNA, 120 bp, Artificial Sequence
  ENSG00000104361_24 (sequence is synthesized)
agatttctggtgactcttaaaactggtttacaaagattgagaaaacaattagattgaagagttttgcttcaagtagacctgcattcatagctagagtgcatgagattttcagcactgtag

SEQ ID NO: 141922 - DNA, 120 bp, Artificial Sequence
  ENSG00000104361_25 (sequence is synthesized)
aatttcacacaggcacaagcataacaccagtactttagcagccgccaacagttgcatctattaaacgttttgagaaatgacattgacttatgcacatttaagcaatcaacaatgttttag

SEQ ID NO: 141923 - DNA, 120 bp, Artificial Sequence
  ENSG00000104361_26 (sequence is synthesized)
aagtccaggtaacatataaaatatattcagacctagttttactttccatattgttgctccaaagtaaggtaaataggagttttagttgtactggcctgtaagattttttaaattacacag

SEQ ID NO: 141924 - DNA, 120 bp, Artificial Sequence
  ENSG00000104361_27 (sequence is synthesized)
tgcatgacaacaactaaagccaactcagtccttctcttggcattgtgagttgaggacctttagccaactgttagctcatctgactatctgtctagaccaagggtcggcaaagttttcagt

SEQ ID NO: 141925 - DNA, 120 bp, Artificial Sequence
  ENSG00000104361_28 (sequence is synthesized)
aaagacccacagagtacatattttggagtttgtgttgtctgtaccaacagacagacatggtgtctgtcccaactacccaactctgccattgtagcactaaagcagccatagacaagatgt

SEQ ID NO: 141926 - DNA, 78 bp, Artificial Sequence
  ENSG00000104361_29 (sequence is synthesized)
ctctgccattgtagcactaaagcagccatagacaagatgtaaacagaagagcatggctgtgttccagtaaaactttat

SEQ ID NO: 141927 - DNA, 120 bp, Artificial Sequence
  ENSG00000104361_30 (sequence is synthesized)
gccagtctgtgagctatagttcccaacacctggtctagactcttctgcccttgctctgcagcttctttcctgttgattgggcattcagggaaggagtttaaaaagtgacactcatggctc

SEQ ID NO: 141928 - DNA, 120 bp, Artificial Sequence
  ENSG00000104361_31 (sequence is synthesized)
atgacaaatgagatactttgggagtgtggaaacatggcttgatatttgccttcagatatttttgcttatataagttctaaatggaagtgataagttcattcttagggtccaagttgaaag

SEQ ID NO: 141929 - DNA, 120 bp, Artificial Sequence
  ENSG00000104361_32 (sequence is synthesized)
gcagtggttcttttgtgaacaccactaactacattcgaaaagcctctccaattccacattccaagtctataacagctttggaaatgagtaacaatgacctctcatgtagtagattaaagc

SEQ ID NO: 141930 - DNA, 120 bp, Artificial Sequence
  ENSG00000104361_33 (sequence is synthesized)
agaggcctttgccatatgattgttttttggcttaaatgtttgcttgccctgtaactgtaatactttggttaccagaatcacttgaaaacaaatacaataaaaaaatttctcaagcagtga

SEQ ID NO: 141931 - DNA, 120 bp, Artificial Sequence
  ENSG00000104361_34 (sequence is synthesized)
agaaacttaaagagcagaataatcggagaaaaacacacaactgaaacaacaaatgcaccaaagaagaaagtctattgcctggtttcttatcacgttaacatggaacaattattctgctaa

SEQ ID NO: 141932 - DNA, 120 bp, Artificial Sequence
  ENSG00000104361_35 (sequence is synthesized)
tttcagcgatccattgtcatgctgtcacattaaccatgaagaaacttgcattttgtgactctaacacctatgtgtgaaagcctgatgcctgagtcttaataaattaacggtgacagaaga

SEQ ID NO: 141933 - DNA, 120 bp, Artificial Sequence
  ENSG00000104361_36 (sequence is synthesized)
tctcagaggtaaagcatgtgaaattctattacttttacgtaggattttcggcattgtaccggaggtatagaaaattggaaaataatataagaaacatcagtttcctgagctcctaaaaga

SEQ ID NO: 141934 - DNA, 120 bp, Artificial Sequence
  ENSG00000104361_37 (sequence is synthesized)
aacatattttttaacttaaggccctaaacagggctcagcgtctttggctttgtgacttaggtatatctctgctgttctgaaacattggggatttccaattccaggccaaagacaagatac

SEQ ID NO: 141935 - DNA, 120 bp, Artificial Sequence
  ENSG00000104361_38 (sequence is synthesized)
ctgttacatttctgaaagacaatttgagagcctcagacttactcgcaaatgaaagtttgtttttcatgatggaacaaatgaagatttggggaccatgtggaaacaagctgaactaattta

SEQ ID NO: 141936 - DNA, 80 bp, Artificial Sequence
  ENSG00000104361_39 (sequence is synthesized)
agctggacggccccgggaggccgcagaccgccgggctccccgaggacacctcgcaccggaggaggagaggaggcagcgcc

SEQ ID NO: 141937 - DNA, 120 bp, Artificial Sequence
  ENSG00000104361_40 (sequence is synthesized)
atagtcattagctgttaacaactagatcaagcatatcacatgtttacatatcccaatttaaatgttcctcctaaacaactatatgatattcttaaagaaaacatcatttaaactgaaacg

SEQ ID NO: 141938 - DNA, 120 bp, Artificial Sequence
  ENSG00000104361_41 (sequence is synthesized)
ttaaatggaagcctcacagagacaaggctcaggagcttttcctctgatctggtacagaaaagaaaggaaggaagatttgagaagcccagtgtataccagccagagaagaataaagtgcac

SEQ ID NO: 141939 - DNA, 120 bp, Artificial Sequence
  ENSG00000104361_42 (sequence is synthesized)
tcactaaaacagcctttcccagcctgtctgctgcagatgggcaatccccatccttgccaaaatgcaaagaggagtggagttttcaaggtcaaactagattttagaaatattaattttctg

SEQ ID NO: 141940 - DNA, 120 bp, Artificial Sequence
  ENSG00000104365_0 (sequence is synthesized)
gtgacgtcagagcaggaagtgtttgaggaagtcgcgccgcgctgcccgcgttaagattcccgcattttaatgttttcaggggggtgtcatagccccgggtttggccgccccagccccgcc

SEQ ID NO: 141941 - DNA, 120 bp, Artificial Sequence
  ENSG00000104365_1 (sequence is synthesized)
ttccccgccccggggagcccgccccctgccccgcgtccctgccgacagagttagcacgacatcagtatgagctggtcaccttccctgacaacgcagacatgtggggcctgggaaatgaaa

SEQ ID NO: 141942 - DNA, 120 bp, Artificial Sequence
  ENSG00000104365_2 (sequence is synthesized)
gagcgccttgggacagggggatttggaaatgtcatccgatggcacaatcaggaaacaggtgagcagattgccatcaagcagtgccggcaggagctcagcccccggaaccgagagcggtgg

SEQ ID NO: 141943 - DNA, 120 bp, Artificial Sequence
  ENSG00000104365_3 (sequence is synthesized)
tgcctggagatccagatcatgagaaggctgacccaccccaatgtggtggctgcccgagatgtccctgaggggatgcagaacttggcgcccaatgacctgcccctgctggccatggagtac

SEQ ID NO: 141944 - DNA, 120 bp, Artificial Sequence
  ENSG00000104365_4 (sequence is synthesized)
tgccaaggaggagatctccggaagtacctgaaccagtttgagaactgctgtggtctgcgggaaggtgccatcctcaccttgctgagtgacattgcctctgcgcttagataccttcatgaa

SEQ ID NO: 141945 - DNA, 120 bp, Artificial Sequence
  ENSG00000104365_5 (sequence is synthesized)
aacagaatcatccatcgggatctaaagccagaaaacatcgtcctgcagcaaggagaacagaggttaatacacaaaattattgacctaggatatgccaaggagctggatcagggcagtctt

SEQ ID NO: 141946 - DNA, 120 bp, Artificial Sequence
  ENSG00000104365_6 (sequence is synthesized)
tgcacatcattcgtggggaccctgcagtacctggccccagagctactggagcagcagaagtacacagtgaccgtcgactactggagcttcggcaccctggcctttgagtgcatcacgggc

SEQ ID NO: 141947 - DNA, 120 bp, Artificial Sequence
  ENSG00000104365_7 (sequence is synthesized)
ttccggcccttcctccccaactggcagcccgtgcagtggcattcaaaagtgcggcagaagagtgaggtggacattgttgttagcgaagacttgaatggaacggtgaagttttcaagctct

SEQ ID NO: 141948 - DNA, 120 bp, Artificial Sequence
  ENSG00000104365_8 (sequence is synthesized)
ttaccctaccccaataatcttaacagtgtcctggctgagcgactggagaagtggctgcaactgatgctgatgtggcacccccgacagaggggcacggatcccacgtatgggcccaatggc

SEQ ID NO: 141949 - DNA, 120 bp, Artificial Sequence
  ENSG00000104365_9 (sequence is synthesized)
tgcttcaaggccctggatgacatcttaaacttaaagctggttcatatcttgaacatggtcacgggcaccatccacacctaccctgtgacagaggatgagagtctgcagagcttgaaggcc

SEQ ID NO: 141950 - DNA, 120 bp, Artificial Sequence
  ENSG00000104365_10 (sequence is synthesized)
agaatccaacaggacacgggcatcccagaggaggaccaggagctgctgcaggaagcgggcctggcgttgatccccgataagcctgccactcagtgtatttcagacggcaagttaaatgag

SEQ ID NO: 141951 - DNA, 120 bp, Artificial Sequence
  ENSG00000104365_11 (sequence is synthesized)
ggccacacattggacatggatcttgtttttctctttgacaacagtaaaatcacctatgagactcagatctccccacggccccaacctgaaagtgtcagctgtatccttcaagagcccaag

SEQ ID NO: 141952 - DNA, 120 bp, Artificial Sequence
  ENSG00000104365_12 (sequence is synthesized)
aggaatctcgccttcttccagctgaggaaggtgtggggccaggtctggcacagcatccagaccctgaaggaagattgcaaccggctgcagcagggacagcgagccgccatgatgaatctc

SEQ ID NO: 141953 - DNA, 120 bp, Artificial Sequence
  ENSG00000104365_13 (sequence is synthesized)
ctccgaaacaacagctgcctctccaaaatgaagaattccatggcttccatgtctcagcagctcaaggccaagttggatttcttcaaaaccagcatccagattgacctggagaagtacagc

SEQ ID NO: 141954 - DNA, 120 bp, Artificial Sequence
  ENSG00000104365_14 (sequence is synthesized)
gagcaaaccgagtttgggatcacatcagataaactgctgctggcctggagggaaatggagcaggctgtggagctctgtgggcgggagaacgaagtgaaactcctggtagaacggatgatg

SEQ ID NO: 141955 - DNA, 120 bp, Artificial Sequence
  ENSG00000104365_15 (sequence is synthesized)
gctctgcagaccgacattgtggacttacagaggagccccatgggccggaagcaggggggaacgctggacgacctagaggagcaagcaagggagctgtacaggagactaagggaaaaacct

SEQ ID NO: 141956 - DNA, 120 bp, Artificial Sequence
  ENSG00000104365_16 (sequence is synthesized)
gctcagtaaaactgtggtttgcaagcagaaggcgctggaactgttgcccaaggtggaagaggtggtgagcttaatgaatgaggatgagaagactgttgtccggctgcaggagaagcggca

SEQ ID NO: 141957 - DNA, 120 bp, Artificial Sequence
  ENSG00000104365_17 (sequence is synthesized)
gaaggagctctggaatctcctgaagattgcttgtagcaaggtccgtggtcctgtcagtggaagcccggatagcatgaatgcctctcgacttagccagcctgggcagctgatgtctcagcc

SEQ ID NO: 141958 - DNA, 120 bp, Artificial Sequence
  ENSG00000104365_18 (sequence is synthesized)
ctccacggcctccaacagcttacctgagccagccaagaagagtgaagaactggtggctgaagcacataacctctgcaccctgctagaaaatgccatacaggacactgtgagggaacaaga

SEQ ID NO: 141959 - DNA, 120 bp, Artificial Sequence
  ENSG00000104365_19 (sequence is synthesized)
ccagagtttcacggccctagactggagctggttacagacggaagaagaagagcacagctgcctggagcaggcctcatgatgtggggggactcgaccccctgacatggggcagcccatagc

SEQ ID NO: 141960 - DNA, 120 bp, Artificial Sequence
  ENSG00000104365_20 (sequence is synthesized)
aggccttgtgcagtggggggactcgaccccctgacatggggctgcctggagcaggccgcgtgacgtggggctgcctggccgcggctctcacatggtggttcctgctgcactgatggccca

SEQ ID NO: 141961 - DNA, 120 bp, Artificial Sequence
  ENSG00000104365_21 (sequence is synthesized)
ggggtctctggtatccagatggagctctcgcttcctcagcagctgtgactttcacccaggacccaggacgcagccctccgtgggcactgccggcgccttgtctgcacactggaggtcctc

SEQ ID NO: 141962 - DNA, 120 bp, Artificial Sequence
  ENSG00000104365_22 (sequence is synthesized)
cattacagaggcccagcgcacatcgctggccccacaaacgttcaggggtacagccatggcagctccttcctctgccgtgagaaaagtgcttggagtacggtttgccacacacgtgactgg

SEQ ID NO: 141963 - DNA, 120 bp, Artificial Sequence
  ENSG00000104365_23 (sequence is synthesized)
acagtgtccaattcaaatctttcagggcagagtccgagcagcgcttggtgacagcctgtcctctcctgctctccaaaggccctgctccctgtcctctctcactttacagcttgtgtttct

SEQ ID NO: 141964 - DNA, 120 bp, Artificial Sequence
  ENSG00000104365_24 (sequence is synthesized)
tctggattcagcttctcctaaacagacagtttaattatagttgcggcctggccccatcctcacttcctctttttatttcactgctgctaaaattgtgtttttacctactactttggtggt

SEQ ID NO: 141965 - DNA, 120 bp, Artificial Sequence
  ENSG00000104365_25 (sequence is synthesized)
tgtcctcttttcggcaaagttggagcgagtgccaagctctccatctgtggtcctttctgccaagagcgactcatagtaaccaggatgggagagcagctgccttattctgaatcccaaaaa

SEQ ID NO: 141966 - DNA, 120 bp, Artificial Sequence
  ENSG00000104365_26 (sequence is synthesized)
ttacttgggggtgattgtcacagaggagggacagaaagggtatctgctgaccaccagcctgcctacccatgcccatgtctccattcctgctcaagcgtgtgtgctgggccggggagtccc

SEQ ID NO: 141967 - DNA, 120 bp, Artificial Sequence
  ENSG00000104365_27 (sequence is synthesized)
tgtctctcacagcatctagcagtattattaaatggattcattttaaaaatagctcctatattttgtaacatgtctcaaacactcatactgggttccacaatccactgttagaatacctat

SEQ ID NO: 141968 - DNA, 120 bp, Artificial Sequence
  ENSG00000104365_28 (sequence is synthesized)
ggttagggcttctgaactaaaataatggaaaattttaacaatttgtatagtgcctggatcattactagtgccataaccctgcttcttcaacatttcacagaacttctcttttatataaag

SEQ ID NO: 141969 - DNA, 120 bp, Artificial Sequence
  ENSG00000104365_29 (sequence is synthesized)
gcaagagcacaaaatgagttcagatgatcacaaacaggtgagttttgttggagaagaaagttggagtaggagactttcacaagtggtttccatggagatagaatgaagcattctgtggtc

SEQ ID NO: 141970 - DNA, 120 bp, Artificial Sequence
  ENSG00000104365_30 (sequence is synthesized)
aagtaagtttagggagctattcatgtttcacttgctttgtggagattcacactatgcactgggaaagtatctgaaaagtcttataataaagaaacaggcttaactttgtgtaagaacact

SEQ ID NO: 141971 - DNA, 120 bp, Artificial Sequence
  ENSG00000104365_31 (sequence is synthesized)
gtttatcaatgtcatttggctatagaaacattttctcctgctgattgtgtgtgtgaaacatgtattaacattccaatgaactagcatttaataaagcacaattttggaaaccctggtaaa

SEQ ID NO: 141972 - DNA, 120 bp, Artificial Sequence
  ENSG00000104365_32 (sequence is synthesized)
gtgggcgggtaggagactcattttgggtttcggaacttaccaagggggtgagattttgtgctcccacttttcactttctcatcaaacactgggtcgatctctgtcaaaaatcaggtgttc

SEQ ID NO: 141973 - DNA, 120 bp, Artificial Sequence
  ENSG00000104365_33 (sequence is synthesized)
ctcaccatgctttgagcttaactggaccagctgaaaagaggccaagagagtagccagtgaagggagcccctctgtggccagatgcaagagctgcatgaatggacagagatggtccaggtt

SEQ ID NO: 141974 - DNA, 120 bp, Artificial Sequence
  ENSG00000104365_34 (sequence is synthesized)
ttctgctttgtcatgtagtctgttaatcacacagtgcggatacctggctggtttttaagttggagtatggtgtcctctgtgtggcctgataggaaacacaaatctccttgctggacttgt

SEQ ID NO: 141975 - DNA, 120 bp, Artificial Sequence
  ENSG00000104365_35 (sequence is synthesized)
gaaacacaaatctccttgctggacttgttacttccaaaccctccaagaccggtctcttgcctttattgcaaaaaatgatgctataacactcgaatctctcaagttgcctgcttggccctc

SEQ ID NO: 141976 - DNA, 120 bp, Artificial Sequence
  ENSG00000104365_36 (sequence is synthesized)
ggggaacgctggacgacctgtgagtactggctggggggcccctctgtgcccagcacacacagacagccctggagcttcggtgtgtgtgtcaagggcaccctcagtggctgtgcgggacca

SEQ ID NO: 141977 - DNA, 120 bp, Artificial Sequence
  ENSG00000104365_37 (sequence is synthesized)
ttctctagagcatgcttccctgtggggtcacttccagcaaatcatcactgagcttcagtttccaaatctgttcagtgacaagaaaaacagtcttaagtcacgaagttgtaaggatgaatt

SEQ ID NO: 141978 - DNA, 120 bp, Artificial Sequence
  ENSG00000104365_38 (sequence is synthesized)
cagataatgcatttgagacgcaggccataatctgtaaaggctgtaaaatgcaagcagcctctacccctgtagcagactcccctgatttgttccacccaccctgactcaggcatagctcag

SEQ ID NO: 141979 - DNA, 120 bp, Artificial Sequence
  ENSG00000104365_39 (sequence is synthesized)
agcagaaagtaaaacagagaaggaagaacctgatgaggcttaggagtttggacctggaaactattcgtttgagtctttgtcaggtatttggcattggctccatgaggggcggaggggtct

SEQ ID NO: 141980 - DNA, 120 bp, Artificial Sequence
  ENSG00000104365_40 (sequence is synthesized)
aggcagatcactcctacctgaaggagatcacatgtgctcctggcgtacagatggagggaaccaggcaggccgcttgagggctgtgtcaccgtgagctcagcagtgttccctgattctctc

SEQ ID NO: 141981 - DNA, 120 bp, Artificial Sequence
  ENSG00000104365_41 (sequence is synthesized)
actaggattcttaggacaggagctccaaatgtcagaactttgattctgtattttctctaattaaccctttattctcctctagttcttttatttgtatttgtattatttttttaagagaca

SEQ ID NO: 141982 - DNA, 86 bp, Artificial Sequence
  ENSG00000104365_42 (sequence is synthesized)
tatgcagtcctcccatctcagcctcccaagtaaccgggactacaggcgcatgccaccatgctcagctaatttaaaaaaaaaatgtt

SEQ ID NO: 141983 - DNA, 120 bp, Artificial Sequence
  ENSG00000104365_43 (sequence is synthesized)
cgcatgccaccatgctcagctaatttaaaaaaaaaatgtttttggctgggcacagtggatcacatctgtaatcccagcaccttgggatgccaaggcaagaagattgcttgtgagcccaga

SEQ ID NO: 141984 - DNA, 120 bp, Artificial Sequence
  ENSG00000104365_44 (sequence is synthesized)
accagcctgggcaacatggtgaaactctacctctaccaaaaaaatgtaaaaattagccatatttgacctcaagtctagacagaacttctttgtatattttagagaggagcaagcaaggga

SEQ ID NO: 141985 - DNA, 120 bp, Artificial Sequence
  ENSG00000104365_45 (sequence is synthesized)
cagtgagtgtgcactttgcaatgagtttaaagacaccatttttttttctttttctctttctaaggtttcttttgtcctattataattgagttgcttatttctgtttcagttttgtggtgt

SEQ ID NO: 141986 - DNA, 120 bp, Artificial Sequence
  ENSG00000104365_46 (sequence is synthesized)
gttcccttggggaaaagccaagaccatttcctgttaggaagggcattggatggatgatcaacactccctcttgtcgaaggtttttgactaattttgttgggatgctaaatccataggaaa

SEQ ID NO: 141987 - DNA, 120 bp, Artificial Sequence
  ENSG00000104365_47 (sequence is synthesized)
taaaaggtctaggcagaaagtctcagggcagcgtaaatcagatgtcaccaaaaaaagttaattatgaaggcaaaggaaatacatgtgacttaatgaacctcacacaaactgaaggttgaa

SEQ ID NO: 141988 - DNA, 120 bp, Artificial Sequence
  ENSG00000104365_48 (sequence is synthesized)
gtcaggctccggggctttttcctggacttatcctctgttttcccctgtgtacttgggcaaggatcttcacctgtgtcttagtatcgatttttatgaatcagtactgatggagtatatgtg

SEQ ID NO: 141989 - DNA, 120 bp, Artificial Sequence
  ENSG00000104365_49 (sequence is synthesized)
tgtttaatggtgaatattaaccatagaagggctgagtgctcctccccatcttgggactcataatctgtgaaataaaacagtctgggcctccctgcccgggtagcatcaggatagacagat

SEQ ID NO: 141990 - DNA, 120 bp, Artificial Sequence
  ENSG00000104365_50 (sequence is synthesized)
accatgccagaggctttaagtacttcatcttacttgactcctcagatggccctgttagaagcctattttatgcaaaaggaaactgtagctgggggtaagtaacttgccaaggggtcacac

SEQ ID NO: 141991 - DNA, 120 bp, Artificial Sequence
  ENSG00000104365_51 (sequence is synthesized)
agctagaaagcggtggaccctagatgcaggcgcagccattcagaccccacagtccacattcctttgagccagtccattgagggtcctcagggaatgtggcgggtcccctggtctcgctcc

SEQ ID NO: 141992 - DNA, 120 bp, Artificial Sequence
  ENSG00000104365_52 (sequence is synthesized)
gtgagcttatgttacaggcaactgagccactgaagaattttgacgaagaaaatgccaaccaaagcagtcattttaaaagtttatggctgttcagttacaggacaagttgtgaaaagaaag

SEQ ID NO: 141993 - DNA, 120 bp, Artificial Sequence
  ENSG00000104365_53 (sequence is synthesized)
gcttgcggactggggagcgtttcacttgtgcgggttggagttcgggaagccgggagaaacagctctccctggggtggcttcttgggggtgggtggctttgaggggaacctgcgatttatg

SEQ ID NO: 141994 - DNA, 120 bp, Artificial Sequence
  ENSG00000104365_54 (sequence is synthesized)
ccgatggcacaatcaggtaggccctctgtgcagcttggggaggggcggggagccaggccccctcctcactgcctccactttctctgatcctgctgggccaagggctcacctttggctttg

SEQ ID NO: 141995 - DNA, 120 bp, Artificial Sequence
  ENSG00000104365_55 (sequence is synthesized)
gtcatcttgggacagtgaatagggggactgggaagagggcttcaggacttctgagctgactccaggttagtggtctccatgctttattgactatgtcacctaaataaatagtaaaataaa

SEQ ID NO: 141996 - DNA, 120 bp, Artificial Sequence
  ENSG00000104365_56 (sequence is synthesized)
gataataattatagcagggacctcccttgacatttgagggggttttgttattgtacaggaaatggaatttggatcccagagatgctccaagactgttccttgtggtccctgcaggatgaa

SEQ ID NO: 141997 - DNA, 120 bp, Artificial Sequence
  ENSG00000104365_57 (sequence is synthesized)
ttcagagcttcgagaagaaagtgcgagtgatctatacgcagctcaggtatgagccccgaccttcctgctctggaggaaggactgggagatgcaggtatgaggtcaccttcctccctcctc

SEQ ID NO: 141998 - DNA, 120 bp, Artificial Sequence
  ENSG00000104365_58 (sequence is synthesized)
ttcacggtaacagcttgtgtgagactcctgcgattccatgtcctttctttctatggcaaaatagaagagaaaatggaaatgcaatctggcattatcctcaacctcagtgtttgtttgttt

SEQ ID NO: 141999 - DNA, 66 bp, Artificial Sequence
  ENSG00000104365_59 (sequence is synthesized)
gcaatctggcattatcctcaacctcagtgtttgtttgtttgcttgtttatttgtgacagggtctct

SEQ ID NO: 142000 - DNA, 120 bp, Artificial Sequence
  ENSG00000104365_60 (sequence is synthesized)
agtagctgggactacaggcgtgcgtcaccacattcagctgattttttcagtgtatatttataattttctagtacacattttttattattcataataatagtgatgtctaacaattattga

SEQ ID NO: 142001 - DNA, 120 bp, Artificial Sequence
  ENSG00000104365_61 (sequence is synthesized)
aggcttacaactacatgtatgcattatcttatttaatccttggaacacttaattccgatgatgaggaagaaggtagcattgttcccagaagcctgtccccacctgcaccattggtactac

SEQ ID NO: 142002 - DNA, 120 bp, Artificial Sequence
  ENSG00000104365_62 (sequence is synthesized)
tgctgagtatttgtgtgttgagtgctgggctgggagcaggaaccagccatggccttgtcctcagggccttggagcttagtggtaggtagtactagttatgagaaaactagccaagttaca

SEQ ID NO: 142003 - DNA, 120 bp, Artificial Sequence
  ENSG00000104365_63 (sequence is synthesized)
ggtacattaagacaaagcttccattgttgagagaatcctgcatcatttgcttagatctttacatggcctttacctgctaatcacttgctaacctcccctaactttaagcttttggaagaa

SEQ ID NO: 142004 - DNA, 120 bp, Artificial Sequence
  ENSG00000104365_64 (sequence is synthesized)
ttacaagggataccactgtgaattgcagcctttgctgatgtagtcgcatgtcctcctccagtctgtggacattctatatctcttgctgctctcctcctcctggcatgataatgttttgat

SEQ ID NO: 142005 - DNA, 120 bp, Artificial Sequence
  ENSG00000104365_65 (sequence is synthesized)
cagttcattgcttacttgcatgtctgtgggaggaagaggaagtctcatcaggccaagtcatgtggtgaggctggaaatccataactgagattagctacccacagtgagcatgggagtgag

SEQ ID NO: 142006 - DNA, 120 bp, Artificial Sequence
  ENSG00000104365_66 (sequence is synthesized)
taacttagcttaagagtaccctgcagtcacaagatttattaataaaagggtttggctttttaatttgtatttgtttaatttatttgttttatgcagcctgggtcttgctatgttgcccag

SEQ ID NO: 142007 - DNA, 120 bp, Artificial Sequence
  ENSG00000104365_67 (sequence is synthesized)
tgaactcctggcctcaagcgatccgctcgcctctgcctcccaaagtgctggaactataggcatgagccaccatacccagccaataaaggggtttcaatatatttctttttattttttatt

SEQ ID NO: 142008 - DNA, 120 bp, Artificial Sequence
  ENSG00000104365_68 (sequence is synthesized)
tataggcatgagccactgtgcctggctgggttttagtatatttctcaattgtcctgatttcctcctgaagaggaaaaataacctgaaatgtgttggtggctgttgtttttttaacatgtc

SEQ ID NO: 142009 - DNA, 120 bp, Artificial Sequence
  ENSG00000104365_69 (sequence is synthesized)
tggaggttgcagtgagccaagatcgcacatcgcacttcagcccaggcgacagagcaagactctcaatcataatcaatcagtaaagctgatgaaaataaaaaagcctgcaaattaatgtag

SEQ ID NO: 142010 - DNA, 120 bp, Artificial Sequence
  ENSG00000104365_70 (sequence is synthesized)
gcacccaggtctccttaaatttagaatcctttcctcaaaagtctccgttgatacagaaacacttttgaagccagatgtgaagcaccagttgacccgcaggtgggggtgccaactggtagg

SEQ ID NO: 142011 - DNA, 120 bp, Artificial Sequence
  ENSG00000104365_71 (sequence is synthesized)
ctgtagggttagctctggcctctggcagccagccagttgtctcctaagaaaatactgtggcgtgaatgcaaaatgtgattcatcacttggctcctaatttcttttgattttgtcccctag

SEQ ID NO: 142012 - DNA, 120 bp, Artificial Sequence
  ENSG00000104365_72 (sequence is synthesized)
gtctggcacagcatccagaccctgaaggaagattgcaaccggctgcagcagggacagcgagccgccatgtagcgtgccaggctttttttttaaacttaatttatttaaaattccttggtg

SEQ ID NO: 142013 - DNA, 120 bp, Artificial Sequence
  ENSG00000104365_73 (sequence is synthesized)
gctttggccacagggaggtggttgaggcagggacccagaagcaaccgttatgagcaacaaaaggaagacactggtttggatggacgggaagcggttgggtgggctggactgacggaggcc

SEQ ID NO: 142014 - DNA, 120 bp, Artificial Sequence
  ENSG00000104365_74 (sequence is synthesized)
cagtgttcctcaccatgctttgagcttaactggaccagctgaaaagaggccaagagagtagccagtgaagggagcccctctgtggccagatgcaagagctgcatgaatggacagagatgg

SEQ ID NO: 142015 - DNA, 120 bp, Artificial Sequence
  ENSG00000104365_75 (sequence is synthesized)
aagaaacacgtgacctcggcgatgctcagaagtaggttctgcccctgccacctcgggcagaaggcgggcaggcccgggcgcccctggtggagtcagctggggatcccctcgctagggcaa

SEQ ID NO: 142016 - DNA, 120 bp, Artificial Sequence
  ENSG00000104365_76 (sequence is synthesized)
gggcgtgggcatcgcctccctcggtgactttcttccttgcctgatgccacagcaaccggatgggggagggtgagagggacaaaagtttgccacaaagtttggaccaaccaaacacattgg

SEQ ID NO: 142017 - DNA, 120 bp, Artificial Sequence
  ENSG00000104365_77 (sequence is synthesized)
tttctttacaaaataaaaaaccagttgtatttttcttctctcccattcaagagcagtggtatctcttgccttctccatccctttgagctccatttttttcttaatcctaaccttttttcc

SEQ ID NO: 142018 - DNA, 120 bp, Artificial Sequence
  ENSG00000104365_78 (sequence is synthesized)
gggtcctgtggggacaaaagtgatacatgtttggctctcatagtcccttgaaacttactaactagtttctttgtccaaggcttggatgactaactgcttaatgagaacattggaaatgct

SEQ ID NO: 142019 - DNA, 120 bp, Artificial Sequence
  ENSG00000104365_79 (sequence is synthesized)
ggtcaggcacatgctgttaccctttatccataggaagccacattcccttcagggaggccctgaagccctctgcccccactcaccctaccagtaccttgagttaccgagtcaccaccctcc

SEQ ID NO: 142020 - DNA, 120 bp, Artificial Sequence
  ENSG00000104365_80 (sequence is synthesized)
tactgtatttttactgtaccttttctgggtttagatatgtttagatacaccaatacttaccattgtgttaccctggcctacagtattcagtaccggagcatgctgtacaggtttgtagcc

SEQ ID NO: 142021 - DNA, 120 bp, Artificial Sequence
  ENSG00000104365_81 (sequence is synthesized)
ctaaaatcacctaatgacgaatttcttagaatgtgtccccgtcatagcaacgtgtgactgcacctaacaagattcatatttgcaggcattcaaaagtgcggcagaagagtgaggtggaca

SEQ ID NO: 142022 - DNA, 120 bp, Artificial Sequence
  ENSG00000104368_0 (sequence is synthesized)
agagctgagatcctacaggagtccagggctggagagaaaacctctgcgaggaaagggaaggagcaagccgtgaatttaagggacgctgtgaagcaatcatggatgcaatgaagagagggc

SEQ ID NO: 142023 - DNA, 120 bp, Artificial Sequence
  ENSG00000104368_1 (sequence is synthesized)
tctgctgtgtgctgctgctgtgtggagcagtcttcgtttcgcccagccaggaaatccatgcccgattcagaagaggagccagatcttaccaagtgatctgcagagatgaaaaaacgcaga

SEQ ID NO: 142024 - DNA, 120 bp, Artificial Sequence
  ENSG00000104368_2 (sequence is synthesized)
tgatataccagcaacatcagtcatggctgcgccctgtgctcagaagcaaccgggtggaatattgctggtgcaacagtggcagggcacagtgccactcagtgcctgtcaaaagttgcagcg

SEQ ID NO: 142025 - DNA, 120 bp, Artificial Sequence
  ENSG00000104368_3 (sequence is synthesized)
agccaaggtgtttcaacgggggcacctgccagcaggccctgtacttctcagatttcgtgtgccagtgccccgaaggatttgctgggaagtgctgtgaaatagataccagggccacgtgct

SEQ ID NO: 142026 - DNA, 120 bp, Artificial Sequence
  ENSG00000104368_4 (sequence is synthesized)
acgaggaccagggcatcagctacaggggcacgtggagcacagcggagagtggcgccgagtgcaccaactggaacagcagcgcgttggcccagaagccctacagcgggcggaggccagacg

SEQ ID NO: 142027 - DNA, 120 bp, Artificial Sequence
  ENSG00000104368_5 (sequence is synthesized)
ccatcaggctgggcctggggaaccacaactactgcagaaacccagatcgagactcaaagccctggtgctacgtctttaaggcggggaagtacagctcagagttctgcagcacccctgcct

SEQ ID NO: 142028 - DNA, 120 bp, Artificial Sequence
  ENSG00000104368_6 (sequence is synthesized)
gctctgagggaaacagtgactgctactttgggaatgggtcagcctaccgtggcacgcacagcctcaccgagtcgggtgcctcctgcctcccgtggaattccatgatcctgataggcaagg

SEQ ID NO: 142029 - DNA, 120 bp, Artificial Sequence
  ENSG00000104368_7 (sequence is synthesized)
tttacacagcacagaaccccagtgcccaggcactgggcctgggcaaacataattactgccggaatcctgatggggatgccaagccctggtgccacgtgctgaagaaccgcaggctgacgt

SEQ ID NO: 142030 - DNA, 120 bp, Artificial Sequence
  ENSG00000104368_8 (sequence is synthesized)
gggagtactgtgatgtgccctcctgctccacctgcggcctgagacagtacagccagcctcagtttcgcatcaaaggagggctcttcgccgacatcgcctcccacccctggcaggctgcca

SEQ ID NO: 142031 - DNA, 120 bp, Artificial Sequence
  ENSG00000104368_9 (sequence is synthesized)
tctttgccaagcacaggaggtcgcccggagagcggttcctgtgcgggggcatactcatcagctcctgctggattctctctgccgcccactgcttccaggagaggtttccgccccaccacc

SEQ ID NO: 142032 - DNA, 120 bp, Artificial Sequence
  ENSG00000104368_10 (sequence is synthesized)
tgacggtgatcttgggcagaacataccgggtggtccctggcgaggaggagcagaaatttgaagtcgaaaaatacattgtccataaggaattcgatgatgacacttacgacaatgacattg

SEQ ID NO: 142033 - DNA, 120 bp, Artificial Sequence
  ENSG00000104368_11 (sequence is synthesized)
cgctgctgcagctgaaatcggattcgtcccgctgtgcccaggagagcagcgtggtccgcactgtgtgccttcccccggcggacctgcagctgccggactggacggagtgtgagctctccg

SEQ ID NO: 142034 - DNA, 120 bp, Artificial Sequence
  ENSG00000104368_12 (sequence is synthesized)
agactgtacccatccagccgctgcacatcacaacatttacttaacagaacagtcaccgacaacatgctgtgtgctggagacactcggagcggcgggccccaggcaaacttgcacgacgcc

SEQ ID NO: 142035 - DNA, 120 bp, Artificial Sequence
  ENSG00000104368_13 (sequence is synthesized)
tgccagggcgattcgggaggccccctggtgtgtctgaacgatggccgcatgactttggtgggcatcatcagctggggcctgggctgtggacagaaggatgtcccgggtgtgtacaccaag

SEQ ID NO: 142036 - DNA, 120 bp, Artificial Sequence
  ENSG00000104368_14 (sequence is synthesized)
gttaccaactacctagactggattcgtgacaacatgcgaccgtgaccaggaacacccgactcctcaaaagcaaatgagatcccgcctcttcttcttcagaagacactgcaaaggcgcagt

SEQ ID NO: 142037 - DNA, 120 bp, Artificial Sequence
  ENSG00000104368_15 (sequence is synthesized)
gcttctctacagacttctccagacccaccacaccgcagaagcgggacgagaccctacaggagagggaagagtgcattttcccagatacttcccattttggaagttttcaggacttggtct

SEQ ID NO: 142038 - DNA, 120 bp, Artificial Sequence
  ENSG00000104368_16 (sequence is synthesized)
gatttcaggatactctgtcagatgggaagacatgaatgcacactagcctctccaggaatgcctcctccctgggcagaaagtggccatgccaccctgttttcagctaaagcccaacctcct

SEQ ID NO: 142039 - DNA, 120 bp, Artificial Sequence
  ENSG00000104368_17 (sequence is synthesized)
gacctgtcaccgtgagcagctttggaaacaggaccacaaaaatgaaagcatgtctcaatagtaaaagataacaagatctttcaggaaagacggattgcattagaaatagacagtatattt

SEQ ID NO: 142040 - DNA, 120 bp, Artificial Sequence
  ENSG00000104368_18 (sequence is synthesized)
atagtcacaagagcccagcagggcctcaaagttggggcaggctggctggcccgtcatgttcctcaaaagcacccttgacgtcaagtctccttcccctttccccactccctggctctcaga

SEQ ID NO: 142041 - DNA, 120 bp, Artificial Sequence
  ENSG00000104368_19 (sequence is synthesized)
aggtattccttttgtgtacagtgtgtaaagtgtaaatcctttttctttataaactttagagtagcatgagagaattgtatcatttgaacaactaggcttcagcatatttatagcaatcca

SEQ ID NO: 142042 - DNA, 120 bp, Artificial Sequence
  ENSG00000104368_20 (sequence is synthesized)
tgttagtttttactttctgttgccacaaccctgttttatactgtacttaataaattcagatatatttttcacagtttttccaaaatcagagtggaatggttttgttatagatgctgtatc

SEQ ID NO: 142043 - DNA, 120 bp, Artificial Sequence
  ENSG00000104368_21 (sequence is synthesized)
ccactctttattcatgttcacattttaaaatcatttggaattctgcttcactcgcttaacatatacacaacacctgtaacatacaaggcaatgggctaggtgctccagaccgggaaaagg

SEQ ID NO: 142044 - DNA, 120 bp, Artificial Sequence
  ENSG00000104368_22 (sequence is synthesized)
agggacaggaatgcttggtctgatgggctaatatggcatttagagaagtaccaaggtacagtggagccggtcacaaaagggcagacttgtagtagaattcagttgcaagagggattgggg

SEQ ID NO: 142045 - DNA, 120 bp, Artificial Sequence
  ENSG00000104368_23 (sequence is synthesized)
aatcttaaggaaaaaatagaatcttaaggaaaaaataactgggtgagacgtggactgtggacaggtgtggaaaaggcactctccatggaggtatgaatatgtagagggccaagagagggg

SEQ ID NO: 142046 - DNA, 120 bp, Artificial Sequence
  ENSG00000104368_24 (sequence is synthesized)
agtacagggagaaatgagttgagcttgtctgaagtgaacttcaggaagaggaacataggctggaatttagattatgggggctctgaacaccaaactgagtttggacttaattgacttctg

SEQ ID NO: 142047 - DNA, 120 bp, Artificial Sequence
  ENSG00000104368_25 (sequence is synthesized)
agagctgagatcctacaggagtccagggctggagagaaaacctctgcgaggaaagggaaggagcaagccgtgggagggagagaggaagggagggagggaagacgaaaacacgccgaggtc

SEQ ID NO: 142048 - DNA, 120 bp, Artificial Sequence
  ENSG00000104368_26 (sequence is synthesized)
aaaaaaaaaaaaggacatgctacagcatggatgcaccttgaagacatttgcaaagtgaaacaaaccagtcgcaaaagaagaaacactgtctcattccacttctaggataatttaagggac

SEQ ID NO: 142049 - DNA, 120 bp, Artificial Sequence
  ENSG00000104368_27 (sequence is synthesized)
tcttcacttgctagaataacacatattgtgaaaagcaaggtctaccagttttccaacctaaatcccaagttaagggtcctggcctgtaaccatttagtcctcagctgttctcctgacatc

SEQ ID NO: 142050 - DNA, 120 bp, Artificial Sequence
  ENSG00000104368_28 (sequence is synthesized)
tttattgcaatgatttgtaagagttccgtaacaggacagctcacagttctgtctgacaaccctatgagattagaacactacattactgactgggtaacaaagttaaagagaagttctcct

SEQ ID NO: 142051 - DNA, 120 bp, Artificial Sequence
  ENSG00000104368_29 (sequence is synthesized)
cggccttaggcggaggtgaaggtacaagcagaaaagggagcaagaccaagtgaccttgggcaaatgcccgcttgcctcagtttcctcatctataaagaggtgggaataacagtacacact

SEQ ID NO: 142052 - DNA, 120 bp, Artificial Sequence
  ENSG00000104368_30 (sequence is synthesized)
tcatggtttgctgtgaggattaaattagctaatttttgtagactgtacaacagcgcctggcacatagagcacattcttaatattttaactcacatcatccttggagctgctttgaaaata

SEQ ID NO: 142053 - DNA, 120 bp, Artificial Sequence
  ENSG00000104368_31 (sequence is synthesized)
caggggacccttgaacaacacttgtctgacctgcagggtccacttatgtatggatttttttcaaccaaaggcaggatgaaaacagtatttgtaggatgcagaactggtatacgcgtgttc

SEQ ID NO: 142054 - DNA, 120 bp, Artificial Sequence
  ENSG00000104368_32 (sequence is synthesized)
cacgctgcaggacttgagtgtgtgtggattgtggtagacagggctcctggaaccatggcctgagcacacagaaggaggctgtcattaggggcttccttttttatacttgacaggttgcag

SEQ ID NO: 142055 - DNA, 120 bp, Artificial Sequence
  ENSG00000104368_33 (sequence is synthesized)
ttctcccaagaaacataaccaatacaggatggatagatggatagatgatagacagataatagatgataggtgatagatgatagattgatagatgatagatgataggtgatagattagata

SEQ ID NO: 142056 - DNA, 120 bp, Artificial Sequence
  ENSG00000104368_34 (sequence is synthesized)
aatagatgatacatacatgatagatagatgataaatagacggtagatggatgacagatagacagatgataggtgatagatagatgatagattgatagatgattgatagataaatagatga

SEQ ID NO: 142057 - DNA, 120 bp, Artificial Sequence
  ENSG00000104368_35 (sequence is synthesized)
tagatacatagatgatagatggtagatagatgatagatggatagatgatagatgataggtggtagatgatagacagatgattagaaagatagatgatagatacatagatgatagacacat

SEQ ID NO: 142058 - DNA, 120 bp, Artificial Sequence
  ENSG00000104368_36 (sequence is synthesized)
agatgatagacagattgacagatgatagatgattgatagatgattaaatagatgatacatagatgataatgataaatagatgatagatgatagatgataggtgatagatagattgataga

SEQ ID NO: 142059 - DNA, 120 bp, Artificial Sequence
  ENSG00000104368_37 (sequence is synthesized)
tgatagaagattgatagatgatagatacataggtgatagtagatgtaagatgatagatgatagatagatagatgatagacagattgatagatgatagagagatagagatagagaaagagg

SEQ ID NO: 142060 - DNA, 120 bp, Artificial Sequence
  ENSG00000104368_38 (sequence is synthesized)
agagagaaatagagagagagagagaatgtgtgtgaacccaaagtatctgagacaggtctcaatcgatttagaaagttgattttgccaaggttaaggacacccccgtgacacagcctcagg

SEQ ID NO: 142061 - DNA, 120 bp, Artificial Sequence
  ENSG00000104368_39 (sequence is synthesized)
aggtcctgaggacatgtgcccaaggttgtcagggcacagcttgcctttagacgttttagggagtcatgagacatcaatcaacatgtgtgagatgtacatcggtttggtcgggaaagttgg

SEQ ID NO: 142062 - DNA, 120 bp, Artificial Sequence
  ENSG00000104368_40 (sequence is synthesized)
gctcagttcatctgcatttttacataaaaaatagggcagaggaagcaatcagatacgcatttgtctcagatgagcagagggatgattttctgtcctgcacctgggaagataagctatcca

SEQ ID NO: 142063 - DNA, 120 bp, Artificial Sequence
  ENSG00000104368_41 (sequence is synthesized)
tttacaatgccaaggtgaaagtcaacagaactgttttagggtaaagatctttaggcctgcaaggaatgtccttgtagagaattaaaaaaaaaaaaaaaaaactttgcagctatcttattg

SEQ ID NO: 142064 - DNA, 120 bp, Artificial Sequence
  ENSG00000104368_42 (sequence is synthesized)
aggaataaatgagaggcaggtttgcctgacgtagttcccggcttgacatttcccttggctcatgacgttggggtcctgagatttattttcctttcacactagatagatagacatttatgt

SEQ ID NO: 142065 - DNA, 120 bp, Artificial Sequence
  ENSG00000104368_43 (sequence is synthesized)
taaggaactggctgacaggatcgtgggggctggcaagtccgaaacatcttggtaagccaggctggaagtgcaggcagaagctgaggctgctctcttaaggcagaatttcttattcaggaa

SEQ ID NO: 142066 - DNA, 120 bp, Artificial Sequence
  ENSG00000104368_44 (sequence is synthesized)
acctcatatttgctcttaaggcctttaagtgattggacgaggcccaactacattatctaggacaatttccttttctaaagtcaactggctgtagatattaaccacatctataaaacactt

SEQ ID NO: 142067 - DNA, 120 bp, Artificial Sequence
  ENSG00000104368_45 (sequence is synthesized)
tcacaactcctagatgaatgtttggttaactgactgggtgccacagcctggccaagttgacatataagactattccagtccacaccttgtcaatttggcacccatgtgcatctccttaaa

SEQ ID NO: 142068 - DNA, 120 bp, Artificial Sequence
  ENSG00000104368_46 (sequence is synthesized)
taaaccatccttcacctccaagtaaacacaggaacaaaatcatactcctgcctaacatgatagaactaccagtgtacaaccaaaaacgcactcccggctgggcgtggtggctcacgcctg

SEQ ID NO: 142069 - DNA, 120 bp, Artificial Sequence
  ENSG00000104368_47 (sequence is synthesized)
aatcccagctactcgggaagctgaggctgaagaattgcccaaatccaggaaacggaggttgcagtgagaggagatgcgccgctgcactccagcctgggataaacagcgagactctgtcaa

SEQ ID NO: 142070 - DNA, 120 bp, Artificial Sequence
  ENSG00000104368_48 (sequence is synthesized)
agactctgtcaaaaaaaaaagcaccccccattcctccagaaaaggataccaaagtccttgggtcctaaaggagaggcttcacctttgacctaccctggcccttcccttggctgatttttc

SEQ ID NO: 142071 - DNA, 120 bp, Artificial Sequence
  ENSG00000104368_49 (sequence is synthesized)
agaaacccagatcgagactcaaagccctggtgctacgtctttaaggcggggaagtacagctcagagttctgcagcacccctgcctgctctgagggtaagtggcagccaccccgcctttcc

SEQ ID NO: 142072 - DNA, 120 bp, Artificial Sequence
  ENSG00000104368_50 (sequence is synthesized)
ctgaatgtccctgggggaggaaagtccaggaggacaggccgatagccctcctgcacctgaggggagaaagggggaggccaggagtgagtcattttggttgcagagggaagaaagacagga

SEQ ID NO: 142073 - DNA, 120 bp, Artificial Sequence
  ENSG00000104368_51 (sequence is synthesized)
cttaggtctgtgcctgggcttggcctctgactggctatttgtctgacctggagctgatctcctcacactctgaccctcaatttcctcctctatggaggagaggatggggctgaatcagtg

SEQ ID NO: 142074 - DNA, 120 bp, Artificial Sequence
  ENSG00000104368_52 (sequence is synthesized)
gttttcagtccttttgagaatgaatggagattctcccttttttgattaatgggtgaatggggctttgtctctctttcgctccctctcaaactttttaatgcaaaaaaaaaaaaaaaaaaa

SEQ ID NO: 142075 - DNA, 120 bp, Artificial Sequence
  ENSG00000104368_53 (sequence is synthesized)
acacaacacacccacatgcactcacctatgtttacacacacgggcctcctcctccagcccctgcccctcctgcgtgttcctcccctcccggggacgcggccctcacgccagctcactcct

SEQ ID NO: 142076 - DNA, 120 bp, Artificial Sequence
  ENSG00000104369_0 (sequence is synthesized)
ctctcgcgcgcggcgctggcccaggcggcggcggcgaaggaggaggaggaggaggaggaaggcggcggtggcggcggcaaaagaggagggaggacgggggcggcgtcggactggagccga

SEQ ID NO: 142077 - DNA, 120 bp, Artificial Sequence
  ENSG00000104369_1 (sequence is synthesized)
gtcggactggagccgagcggcagcgcgagctgcccagggcgctgtcgtgagctcgcccgccgggcccccacccccgagctacaccctgccgtgcccagcactgcccgcgtccgtgcccct

SEQ ID NO: 142078 - DNA, 120 bp, Artificial Sequence
  ENSG00000104369_2 (sequence is synthesized)
ggctgccccccgaatgacgggcggaaggttcgacttcgacgatggcggcacctactgcggcggctgggaggagggcaaggcgcacgggcatggcatctgcacggggcccaagggccaggg

SEQ ID NO: 142079 - DNA, 120 bp, Artificial Sequence
  ENSG00000104369_3 (sequence is synthesized)
cgagtactcgggctcctggtcgcacggcttcgaggtggtcggaggctacacctggcccagcggcaacacctaccagggctactgggcgcagggcaagcggcacgggctgggggtggagac

SEQ ID NO: 142080 - DNA, 120 bp, Artificial Sequence
  ENSG00000104369_4 (sequence is synthesized)
gaagggcaagtggatgtaccggggggagtggtcacatggtttcaaggggcgctacggggtccggcagagcctgtgcacccccgctcgctacgagggtacctggagtaacgggctgcaaga

SEQ ID NO: 142081 - DNA, 120 bp, Artificial Sequence
  ENSG00000104369_5 (sequence is synthesized)
cgggtacggcgtggagacctacggggacggaggtacctaccagggccagtgggccggaggcatgcggcatggctacggcgtgcgccagagcgtgccctacggcatggccacggtgatccg

SEQ ID NO: 142082 - DNA, 120 bp, Artificial Sequence
  ENSG00000104369_6 (sequence is synthesized)
ctcaccgctgcgtacctcgctggcctcgctgcgcagcgagcagagcaatggcagcgtgctccacgacgccgcagccgccgccgacagcccggccggcacccgcggcggtttcgtgctcaa

SEQ ID NO: 142083 - DNA, 120 bp, Artificial Sequence
  ENSG00000104369_7 (sequence is synthesized)
cttccacgcagacgctgagctagcgggcaagaagaagggcggcctcttccggaggggctcccttcttggaagcatgaaacttcgcaagtccgaatccaagtcttccatctcgagcaagcg

SEQ ID NO: 142084 - DNA, 120 bp, Artificial Sequence
  ENSG00000104369_8 (sequence is synthesized)
cagctctgtccgcagcgacgcggccatgagcagaattagttccagcgatgccaactccacgatcagctttggcgatgtagattgtgatttttgcccggtggaagaccacgtggacgccac

SEQ ID NO: 142085 - DNA, 120 bp, Artificial Sequence
  ENSG00000104369_9 (sequence is synthesized)
caccacggaaacctacatgggcgagtggaagaacgacaagcgcaacggcttcggcgttagcgagcgctccaatggcatgaagtatgaaggggagtgggcaaataacaagaggcatggata

SEQ ID NO: 142086 - DNA, 120 bp, Artificial Sequence
  ENSG00000104369_10 (sequence is synthesized)
tggctgtaccgtgtttcctgacggctccaaagaagagggaaaatacaaaaataatattctggtccgtgggataaggaagcagcttataccaataagacatacaaaaactagggagaaggt

SEQ ID NO: 142087 - DNA, 120 bp, Artificial Sequence
  ENSG00000104369_11 (sequence is synthesized)
ggacagagcaattgaaggcgcccaaagggcagctgccatggccagaaccaaagtggaaatagcaaattcaaggactgcacatgccagagcgaaggccgatgccgccgaccaggccgcgct

SEQ ID NO: 142088 - DNA, 120 bp, Artificial Sequence
  ENSG00000104369_12 (sequence is synthesized)
ggccgctcgccaggagtgcgacatcgcgagagctgtggccagggagctgtcacctgatttctaccaaccaggccctgattacgtcaaacagagatttcaggaaggtgtagatgctaaaga

SEQ ID NO: 142089 - DNA, 120 bp, Artificial Sequence
  ENSG00000104369_13 (sequence is synthesized)
aaatccagaagaaaaggtaccagaaaagccacctacaccaaaggagtctcctcatttttatcgcaaaggcacgacacccccaagatctcctgaggcaagtcccaaacacagccactctcc

SEQ ID NO: 142090 - DNA, 120 bp, Artificial Sequence
  ENSG00000104369_14 (sequence is synthesized)
tgcttcctccccaaagcccctgaagaagcaaaaccccagctcaggggcgagactcaaccaagacaaaaggagtgtggctgatgagcaggtgacggccattgtcaataagcccttgatgtc

SEQ ID NO: 142091 - DNA, 120 bp, Artificial Sequence
  ENSG00000104369_15 (sequence is synthesized)
aaaggctcccacgaaggaggcaggagcggttgtgccccagtccaagtactctggccgccaccacatccccaaccccagtaacggggagctgcattctcagtatcacggctactacgtgaa

SEQ ID NO: 142092 - DNA, 120 bp, Artificial Sequence
  ENSG00000104369_16 (sequence is synthesized)
gctgaacgccccccagcaccctccagtagacgtggaggacggcgatggatccagccagtcttcctcagcactggtgcacaagccatccgctaacaagtggagtccctccaaatctgtgac

SEQ ID NO: 142093 - DNA, 120 bp, Artificial Sequence
  ENSG00000104369_17 (sequence is synthesized)
aaaaccagttgccaaagaaagcaaagctgagccaaaagctaagaagtctgaacttgctataccaaagaatccagcaagcaacgattcatgccctgctttggaaaaagaagccaattcagg

SEQ ID NO: 142094 - DNA, 120 bp, Artificial Sequence
  ENSG00000104369_18 (sequence is synthesized)
ccctaattcaatcatgattgtccttgtcatgctgttgaatatcgggttggccattctttttgttcactttctaacttgattggaattaggaaagtgaagtcctgacaactagtggtgtgt

SEQ ID NO: 142095 - DNA, 120 bp, Artificial Sequence
  ENSG00000104369_19 (sequence is synthesized)
agccctttaaatggcccaccccaggcagactcagacacagggaaggaggcttggaattaggatgggatcgcgagagagatgaaacttggaaaattcagccagaggacctgttcggttccc

SEQ ID NO: 142096 - DNA, 120 bp, Artificial Sequence
  ENSG00000104369_20 (sequence is synthesized)
ctgggagtgctttgtggctttggggtcctctgggagctgaagcacacggccatgttggagagcaaaacttaataataattcttttttaaaatctgctgaagcagccccatccggcgaagt

SEQ ID NO: 142097 - DNA, 120 bp, Artificial Sequence
  ENSG00000104369_21 (sequence is synthesized)
tcttggcattggctactccatctgtcctagcagagtgtgactaaactggaaatgtatggagctgcattttttttttttttttgatggaagtcaacagctgccttactattttaccatctg

SEQ ID NO: 142098 - DNA, 120 bp, Artificial Sequence
  ENSG00000104369_22 (sequence is synthesized)
acgtttttagtagggagctggggaaacgactgcccgaggaatgcggtcggaggattgtgttgctgtggacgtggttccaacattcactcctatctcattagaagaaataggtagcagcat

SEQ ID NO: 142099 - DNA, 120 bp, Artificial Sequence
  ENSG00000104369_23 (sequence is synthesized)
cactcaccagtcttatgccatgacctgctgctttaacatctcctggaatgttctgggagagaacgtttcgtttgcttgtgcacgactctgttcatttttgctgtttatttaaatctgacg

SEQ ID NO: 142100 - DNA, 120 bp, Artificial Sequence
  ENSG00000104369_24 (sequence is synthesized)
tatagtcatctaccacctgcggtcctggccggacgaaacacacgtgttgcatctcaaggaaaagaaacaacaaaatgctagtgaaaatgtgcttattttgatagcaatataccatctttt

SEQ ID NO: 142101 - DNA, 120 bp, Artificial Sequence
  ENSG00000104369_25 (sequence is synthesized)
atgtcatttattcttcctatacttgtaaaaggttatttatctttaaaatttagcaatttgaagacactatgccttcctaagaactaatttaattctaaatatttttaacattactgaggt

SEQ ID NO: 142102 - DNA, 120 bp, Artificial Sequence
  ENSG00000104369_26 (sequence is synthesized)
gaattatttatgcacttaggaagtgctaaattttaaaagctgaaacacaacagaattctaagaaatatagtccaaacgttgcatggattgcagtaatcagtgtttaaaggattcagtttc

SEQ ID NO: 142103 - DNA, 120 bp, Artificial Sequence
  ENSG00000104369_27 (sequence is synthesized)
tttgctgacgtactttacaaccaaataaaatcttgtcggtggctgtgttaattcccatgaaagttaagcaagatgctattaataaactgctctgctctttcttgttttctttttccaact

SEQ ID NO: 142104 - DNA, 120 bp, Artificial Sequence
  ENSG00000104369_28 (sequence is synthesized)
taaatttctgttgaatacattcaggtagaacataaagccttgttcaatcactgcctctcagttttctgcctttcctgtttttcaaagtccttttgtaatttcatttcacattttaaaggc

SEQ ID NO: 142105 - DNA, 120 bp, Artificial Sequence
  ENSG00000104369_29 (sequence is synthesized)
ttagacatttttattttaaatatgtgtcttttacagtcttttgtcattctgacatttctggatttttgctgttttataatttaccctttgttattcagaagcatgcttacttatagaaac

SEQ ID NO: 142106 - DNA, 120 bp, Artificial Sequence
  ENSG00000104369_30 (sequence is synthesized)
taaatggtctttataaaagtaattacttaaaaagaaatcaggggaagaaagatatctatctaatctattaaatctttataaaacattacattgcagagggggagctactcctaaatattt

SEQ ID NO: 142107 - DNA, 120 bp, Artificial Sequence
  ENSG00000104369_31 (sequence is synthesized)
tcatgatttgcatggtttaatcagatttttttttttttttacaccatattagctaccttttcaatggagaagagacagttcacacaattccctggttagcacagatgtggactgagtgct

SEQ ID NO: 142108 - DNA, 120 bp, Artificial Sequence
  ENSG00000104369_32 (sequence is synthesized)
ttgtcacctgcagggtagtaacccagtgatgtttcttacagaagcacaatatgttgaaaatcctgggtgtgaccaatatggaataaagaagaaggcagaaagagagcaaatgaaaaattt

SEQ ID NO: 142109 - DNA, 120 bp, Artificial Sequence
  ENSG00000104369_33 (sequence is synthesized)
caacttgtatattcattttttacattttgctttgacttttaaatttaggaagtccgtttttacctgagaacaaatgtttaaagttcctgcgtcactctcagtactctcactgcccctccc

SEQ ID NO: 142110 - DNA, 120 bp, Artificial Sequence
  ENSG00000104369_34 (sequence is synthesized)
aaaccctatagctccttacgctgggaaagctggttttttaaaaaaataataataaaatatttaatcttattaagtgttcatttaaaatgcgtaatgctttggaaataatgggtaacagat

SEQ ID NO: 142111 - DNA, 120 bp, Artificial Sequence
  ENSG00000104369_35 (sequence is synthesized)
agcgagaggatatgtttataaagtgagcatgttggtcccatttataaatatatgtatgatttataagcttttttaaaacaaagctcaaattgttggtatttttctaaaatgtgcacagct

SEQ ID NO: 142112 - DNA, 120 bp, Artificial Sequence
  ENSG00000104369_36 (sequence is synthesized)
gtattttacatgaaggctctttctaatgggttgttatactgtactcaacattttggacagcacatgaagtctgccaatgtacttaataaaacatgactttgtttatttaaagtttcttgc

SEQ ID NO: 142113 - DNA, 120 bp, Artificial Sequence
  ENSG00000104369_37 (sequence is synthesized)
tgtgaaaaagaactccctacctgtgagttcctttatttataattcttgaaaccaaaatgtataatgtacagttttcacaactgtatctgctctaataaaaaaaagttggttattaatgaa

SEQ ID NO: 142114 - DNA, 120 bp, Artificial Sequence
  ENSG00000104371_0 (sequence is synthesized)
agactttgctcagccgatttcacgcaccttactcagactaaggtttacttctttcagaaaaagcagtgacaaacagacgacgtgctgagctgccagcttagtggaagctctgctctgggt

SEQ ID NO: 142115 - DNA, 120 bp, Artificial Sequence
  ENSG00000104371_1 (sequence is synthesized)
ggagagcagcctcgctttggtgacgcacagtgctgggaccctccaggagccccgggattgaaggatggtggcggccgtcctgctggggctgagctggctctgctctcccctgggagctct

SEQ ID NO: 142116 - DNA, 120 bp, Artificial Sequence
  ENSG00000104371_2 (sequence is synthesized)
ggtcctggacttcaacaacatcaggagctctgctgacctgcatggggcccggaagggctcacagtgcctgtctgacacggactgcaataccagaaagttctgcctccagccccgcgatga

SEQ ID NO: 142117 - DNA, 120 bp, Artificial Sequence
  ENSG00000104371_3 (sequence is synthesized)
tgtgctgccctgggacactctgtgtgaacgatgtttgtactacgatggaagatgcaaccccaatattagaaaggcagcttgatgagcaagatggcacacatgcagaaggaacaactgggc

SEQ ID NO: 142118 - DNA, 120 bp, Artificial Sequence
  ENSG00000104371_4 (sequence is synthesized)
acccagtccaggaaaaccaacccaaaaggaagccaagtattaagaaatcacaaggcaggaagggacaagagggagaaagttgtctgagaacttttgactgtggccctggactttgctgtg

SEQ ID NO: 142119 - DNA, 120 bp, Artificial Sequence
  ENSG00000104371_5 (sequence is synthesized)
ctcgtcatttttggacgaaaatttgtaagccagtccttttggagggacaggtctgctccagaagagggcataaagacactgctcaagctccagaaatcttccagcgttgcgactgtggcc

SEQ ID NO: 142120 - DNA, 120 bp, Artificial Sequence
  ENSG00000104371_6 (sequence is synthesized)
ctggactactgtgtcgaagccaattgaccagcaatcggcagcatgctcgattaagagtatgccaaaaaatagaaaagctataaatatttcaaaataaagaagaatccacattgcatttga

SEQ ID NO: 142121 - DNA, 120 bp, Artificial Sequence
  ENSG00000104375_0 (sequence is synthesized)
agatccgccgcggagttacgggaaagttggtccgagttcccagagtttccctctgtggtgccctaggctcggccggccggtgccccggctcctttcctcctttcggccttcgccgtccac

SEQ ID NO: 142122 - DNA, 120 bp, Artificial Sequence
  ENSG00000104375_1 (sequence is synthesized)
caggtccctctctctgtccccggccgccatggagcagccgccggcgcctaagagtaaactaaaaaagctgagtgaagacagtttgactaagcagcctgaagaagtttttgatgtattaga

SEQ ID NO: 142123 - DNA, 120 bp, Artificial Sequence
  ENSG00000104375_2 (sequence is synthesized)
gaagcttggagaagggtcttatggaagtgtatttaaagcaatacacaaggaatccggtcaagttgtcgcaattaaacaagtacctgttgaatcagatcttcaggaaataatcaaagaaat

SEQ ID NO: 142124 - DNA, 120 bp, Artificial Sequence
  ENSG00000104375_3 (sequence is synthesized)
ttccataatgcagcaatgtgacagcccatatgttgtaaagtactatggcagttattttaagaatacagacctctggattgttatggagtactgtggcgctggctctgtctcagacataat

SEQ ID NO: 142125 - DNA, 120 bp, Artificial Sequence
  ENSG00000104375_4 (sequence is synthesized)
tagattacgaaacaagacattaatagaagatgaaattgcaaccattcttaaatctacattgaaaggactagaatatttgcactttatgagaaaaatacacagagatataaaagctggaaa

SEQ ID NO: 142126 - DNA, 120 bp, Artificial Sequence
  ENSG00000104375_5 (sequence is synthesized)
tattctcctcaatacagaaggacatgcaaaattggcagattttggagtggctggtcagttaacagatacaatggcaaaacgcaatactgtaataggaactccattttggatggctcctga

SEQ ID NO: 142127 - DNA, 120 bp, Artificial Sequence
  ENSG00000104375_6 (sequence is synthesized)
ggtgattcaagaaataggctataactgtgtggccgacatctggtcccttggcattacttctatagaaatggctgaaggaaaacctccttatgctgatatacatccaatgagggctatttt

SEQ ID NO: 142128 - DNA, 120 bp, Artificial Sequence
  ENSG00000104375_7 (sequence is synthesized)
tatgattcccacaaatccaccaccaacattcagaaagccagaactttggtccgatgatttcaccgattttgttaaaaagtgtttggtgaagaatcctgagcagagagctactgcaacaca

SEQ ID NO: 142129 - DNA, 120 bp, Artificial Sequence
  ENSG00000104375_8 (sequence is synthesized)
acttttacagcatccttttatcaagaatgccaaacctgtatcaatattaagagacctgatcacagaagctatggagatcaaagctaaaagacatgaggaacagcaacgagaattggaaga

SEQ ID NO: 142130 - DNA, 120 bp, Artificial Sequence
  ENSG00000104375_9 (sequence is synthesized)
ggaagaagaaaattcggatgaagatgagctggattcccacaccatggtgaagactagtgtggagagtgtgggcaccatgcgggccacaagcacgatgagtgaaggggcccagaccatgat

SEQ ID NO: 142131 - DNA, 120 bp, Artificial Sequence
  ENSG00000104375_10 (sequence is synthesized)
tgaacataatagcacgatgttggaatccgacttggggaccatggtgataaacagtgaggatgaggaagaagaagatggaactatgaaaagaaatgcaacctcaccacaagtacaaagacc

SEQ ID NO: 142132 - DNA, 120 bp, Artificial Sequence
  ENSG00000104375_11 (sequence is synthesized)
gaacccttccctatgtccaaaaacgtttttcctgataactggaaagttcctcaagatggagactttgactttttgaaaaatctaagtttagaagaactacagatgcggttaaaagcactg

SEQ ID NO: 142133 - DNA, 120 bp, Artificial Sequence
  ENSG00000104375_12 (sequence is synthesized)
gaccccatgatggaacgggagatagaagaacttcgtcagagatacactgcgaaaagacagcccattctggatgcgatggatgcaaagaaaagaaggcagcaaaacttttgagtctaattt

SEQ ID NO: 142134 - DNA, 120 bp, Artificial Sequence
  ENSG00000104375_13 (sequence is synthesized)
cctctctgtttttaactattctggagaccaagaaaccactaggaattgaaggaatatttggatatttttaatcctaagattttgccctacaattaggcagaggtcaaaaagtgacaatgg

SEQ ID NO: 142135 - DNA, 120 bp, Artificial Sequence
  ENSG00000104375_14 (sequence is synthesized)
tacatgcccaggtaaattcccaaaaggcagaattgacagttgtatctgctgtgcattcactctaagatgaggagaacaaaagaagtgtattctcttgttctgtcagctgcataccagtaa

SEQ ID NO: 142136 - DNA, 120 bp, Artificial Sequence
  ENSG00000104375_15 (sequence is synthesized)
taaaactgttatgaaatggattttcaaggtctctaaaccttgaaaatccaaagctattgttgcattgtacagcactgaagggctttatgttacaatattctttattcctatctagtatac

SEQ ID NO: 142137 - DNA, 120 bp, Artificial Sequence
  ENSG00000104375_16 (sequence is synthesized)
taggctatttattgtatccccttaggtaaacttatttatttatgctattttgctttgtttcattttttaaggacaagatcaggatagctttggtgaaggtagggtcatattaatatgatg

SEQ ID NO: 142138 - DNA, 120 bp, Artificial Sequence
  ENSG00000104375_17 (sequence is synthesized)
ataatgtgcaaccaatttatactttctgcagggagctatggggtacattccttgatttccaggatagtttttcaaataggaaagcaataatggcagtagttctcaaatgggctaggcctt

SEQ ID NO: 142139 - DNA, 120 bp, Artificial Sequence
  ENSG00000104375_18 (sequence is synthesized)
ttttatattgaagcaataattccatttttaccctttgaaattttgtttttttgatttttgatgtttggtacaaatagaactatatatatttaggtaaaatagatctatcgtgtttaaaac

SEQ ID NO: 142140 - DNA, 120 bp, Artificial Sequence
  ENSG00000104375_19 (sequence is synthesized)
caaagaaatcaatggaacccttgcacaaaaaagtgtgataaatatttttaaataaaaacttaatacaaatgtaatttgttaatattgtttcatgttttatgtgtagatctaatagctgaa

SEQ ID NO: 142141 - DNA, 120 bp, Artificial Sequence
  ENSG00000104375_20 (sequence is synthesized)
ctgattcaaactgtaataagctcatcaatttcatttctatgaaaatgtgctctgttgtcacaggatgtttctgttgattttattcatttcctgggaattggtaaacatcatgttcctgat

SEQ ID NO: 142142 - DNA, 120 bp, Artificial Sequence
  ENSG00000104375_21 (sequence is synthesized)
gataacccagtagcaaaaacatttgtactgagtggtacaagccttggggactgaaaaaaaaaagattaaaaccattaaaaagaaactcatttttacgctgaatgaacatttatatgattg

SEQ ID NO: 142143 - DNA, 120 bp, Artificial Sequence
  ENSG00000104375_22 (sequence is synthesized)
cattgggaccagtcatttcctaagctacatatggccatcttgacagtgttttttcttttgtgtgtttaattattatgtgtaaatcataaagacaaataaatttcactgtgccacccagca

SEQ ID NO: 142144 - DNA, 120 bp, Artificial Sequence
  ENSG00000104375_23 (sequence is synthesized)
tggaaagttcctcaagatggagactttgactttgtaagtacattttaattcttcaatttatgttttctccttctatattttatcatcaaattgagaagcatagttcatatgtatatgaac

SEQ ID NO: 142145 - DNA, 120 bp, Artificial Sequence
  ENSG00000104375_24 (sequence is synthesized)
tgtgtgtatgtatatacaattatagaccatatgttaatattcattatacagccatatacatggttagagaaattgtgaaactgtagcttgcttatagaaatgtacttgcagagaaatact

SEQ ID NO: 142146 - DNA, 120 bp, Artificial Sequence
  ENSG00000104375_25 (sequence is synthesized)
tttttatagttaaataaatcatagctcaaatttaaataaatattcaggactccttaaaactaaaatgacaactattttaaaagatgttttcaataatgcaaatatgagatacttctgaca

SEQ ID NO: 142147 - DNA, 120 bp, Artificial Sequence
  ENSG00000104375_26 (sequence is synthesized)
gtgctcaatgagctacaattcaaatagaggaaatttaatgggaaatgattacattagtagcagatggactggcttcctgaatttcagtgttactagaaatcctagaacagcttaaatttg

SEQ ID NO: 142148 - DNA, 120 bp, Artificial Sequence
  ENSG00000104375_27 (sequence is synthesized)
gtgcagaaccgtttggttttcccgaggggtaggcagaatttccaaccccacgagctgctccctctttccgcaaacctcctaaccccggggtttttccataaatgtgtttacttcgtccac

SEQ ID NO: 142149 - DNA, 120 bp, Artificial Sequence
  ENSG00000104375_28 (sequence is synthesized)
gccagcctgcgaagttccaaaatggagtctgggccacgccggcgttctgggcacgactacggtctcttgaaaagatttggaattgaccatgtagataatctctgagagcagttcttaaag

SEQ ID NO: 142150 - DNA, 120 bp, Artificial Sequence
  ENSG00000104375_29 (sequence is synthesized)
tgtaatccagaaccggtggaacttgctagaaacgcatattcttcggaccccctccaaatctgctgaatctgagattgtggaggccattcaatgtcccttcttcaggaatttggaaaaagg

SEQ ID NO: 142151 - DNA, 120 bp, Artificial Sequence
  ENSG00000104375_30 (sequence is synthesized)
atggagagatctctctgagctagactcttcagtggaggaaatgttacaactcatggacagtggcattaccatctgccttaggaacggagcagcctctgtcttcaagaaaaaagaatggag

SEQ ID NO: 142152 - DNA, 120 bp, Artificial Sequence
  ENSG00000104375_31 (sequence is synthesized)
aagtcatcctttgtaatacctattgctcacatgtatttgagcacttacactattttattaaaatgatctgatatacatttttatattccattagactctaaatttcttgaagaagttaat

SEQ ID NO: 142153 - DNA, 120 bp, Artificial Sequence
  ENSG00000104375_32 (sequence is synthesized)
gctagaattctcccataaagaccatttgcacatcaactatttggctacctgaaaaggagcttttcagccactgagaattcagagcctttaatgattctggagacctcttaggtgtgggga

SEQ ID NO: 142154 - DNA, 120 bp, Artificial Sequence
  ENSG00000104375_33 (sequence is synthesized)
aatgtttgaagaagaaaatatcagagtgacattcctgctgctggctcccctctgatgtaccgcccttgtgctttctcctactgcacttgcgatccagcagcctacaaagaacatgtgctt

SEQ ID NO: 142155 - DNA, 120 bp, Artificial Sequence
  ENSG00000104375_34 (sequence is synthesized)
tcgaatgaaagccctgctccagcactcactagctagttaaccttaggagtattatttcaaagctcttggagcctcggttttcctcatctgttaaaatgggaccataaatacttaactcag

SEQ ID NO: 142156 - DNA, 120 bp, Artificial Sequence
  ENSG00000104375_35 (sequence is synthesized)
ttgcagtccctcctcagaccaggcagcagttttggtgttgcgttcctttagatgtttattgtccttaaaataaattcttctttttatttatgttaaattgatgtgttacttggaaacaaa

SEQ ID NO: 142157 - DNA, 120 bp, Artificial Sequence
  ENSG00000104375_36 (sequence is synthesized)
ggacttcagtaatacagaagagtgtttggatttccttgcagatattttagcccaagagagtgatttagatagtttcgatgaaattttgtaatatgctgtattttccttctggcaggccag

SEQ ID NO: 142158 - DNA, 120 bp, Artificial Sequence
  ENSG00000104375_37 (sequence is synthesized)
cctaatccataagtaatgtgatgaatggtggagagtgacctcatcaagccccaatgaatgtacattgttgggtggtttccaaactggatggttaatcatcagacttgcctggaggcactt

SEQ ID NO: 142159 - DNA, 120 bp, Artificial Sequence
  ENSG00000104375_38 (sequence is synthesized)
tttaaaaaatcagattcaggactcccctctcccccttagctgtggaaggagaacagtagagggaaaacaggagagaaattagttttgcgtaagcgtgcctggatagttttgagagattcc

SEQ ID NO: 142160 - DNA, 120 bp, Artificial Sequence
  ENSG00000104375_39 (sequence is synthesized)
atgtcagacattcaactttcttttaatattttctcttaaaaaacaaaacaaaacaaaacaaaacccttgctgataacgtgcttgtgcttaccataggccttttctcactttacaaagaaa

SEQ ID NO: 142161 - DNA, 120 bp, Artificial Sequence
  ENSG00000104375_40 (sequence is synthesized)
gacccatcaccatcccaaatcaagctggccttgggtatgagaactcctaggacaccaaagagaaggttcctacgatgatgtggttcccagataaggcttagaaactctcatttagaaaac

SEQ ID NO: 142162 - DNA, 120 bp, Artificial Sequence
  ENSG00000104375_41 (sequence is synthesized)
cttatttctgagagtaaaaccagcattagaaatggccattttggtattgagatatttggttgagtgtgatggtaggagtaatgataattgttgtttaacatctttcttccttaatctgag

SEQ ID NO: 142163 - DNA, 120 bp, Artificial Sequence
  ENSG00000104375_42 (sequence is synthesized)
tggccctgtcctagtggttcctctaaataaggcagctgttaaagaatgcatcacctggtgagtaaaaaaagaggatattgggccaggcatggtggctcatgcctccggcactttgggagg

SEQ ID NO: 142164 - DNA, 120 bp, Artificial Sequence
  ENSG00000104375_43 (sequence is synthesized)
aaaaaaacaaaaaaaaaaggatattggtatgaaggagtgactgtcaatatatttaagtatatgtaaatattgattattttttacctcttcaattacttattcctaaaatgtatcattgat

SEQ ID NO: 142165 - DNA, 120 bp, Artificial Sequence
  ENSG00000104375_44 (sequence is synthesized)
tagaaaggaacccataaacatatacatctactacgtacccacaaaaattaaaaataaaaaaattttaaaaaggaaagggaagcaactataaacacccaaagcagaataggtgaatgattc

SEQ ID NO: 142166 - DNA, 120 bp, Artificial Sequence
  ENSG00000104375_45 (sequence is synthesized)
tgactattttaaatgtttttcatgactacccaatttttcaggaataagtcatggataaattttttatttattttggacttgctgtatattattacataaagaatatagttagaattgatt

SEQ ID NO: 142167 - DNA, 120 bp, Artificial Sequence
  ENSG00000104375_46 (sequence is synthesized)
gattatcaaatcatcatgaaatatttatttcaaatatggtcaattctcatctttaaaaatattttttgaatgaagcaatttttttttagaaacagggtcttgctccatcacccaggctgg

SEQ ID NO: 142168 - DNA, 120 bp, Artificial Sequence
  ENSG00000104375_47 (sequence is synthesized)
cagtggcataatcctagctcaccatggcctcaacctcctggcctcaagcttctagccttctccctctttggcctaattctcatttttatttattaaattttgcatatttccttctttcga

SEQ ID NO: 142169 - DNA, 120 bp, Artificial Sequence
  ENSG00000104375_48 (sequence is synthesized)
ttaataagaaataaaatgctagcttctggatttttttagcaatgcatacacttttctttcattaattcatagggaaattttgatcatatatttaaacaaaattacagagtttgatatttt

SEQ ID NO: 142170 - DNA, 120 bp, Artificial Sequence
  ENSG00000104375_49 (sequence is synthesized)
ttaaattaacagactgttttttagagcagttttaggtttacagaacaaatgagtgaaaagtacagagttcccaaatctcttcttgtttctccccctcccaacatttccctgatgattaat

SEQ ID NO: 142171 - DNA, 120 bp, Artificial Sequence
  ENSG00000104375_50 (sequence is synthesized)
ttattattaactaaagtccacagtttacattagggttaattctttgtgtggtacattctatgggtttggacaaatgtctaatgacatatacccaccacaacagtatcggacagaagagtt

SEQ ID NO: 142172 - DNA, 120 bp, Artificial Sequence
  ENSG00000104375_51 (sequence is synthesized)
cagtatcggacagaagagttttactgctctgaaatgctcctgtgctccacctgttcatccatctctcccccacaactccaggaacaactgaccttttactgtctccatagttttgccttt

SEQ ID NO: 142173 - DNA, 120 bp, Artificial Sequence
  ENSG00000104375_52 (sequence is synthesized)
gaatcatatagtatgtagccttttggggttggcttctttcacttagtaatatgcatttaaggttcctctatgtcttttcgtggcttgataactcatttcatgttagtgctgaataatatt

SEQ ID NO: 142174 - DNA, 120 bp, Artificial Sequence
  ENSG00000104375_53 (sequence is synthesized)
ccattgtatggatgtactacagcctgtccattcacatattgaaggaaatcattgtcatgttcaagttttagaaattagaatgaagctgctatgtttattattaactaaataataatatgc

SEQ ID NO: 142175 - DNA, 120 bp, Artificial Sequence
  ENSG00000104375_54 (sequence is synthesized)
tatatgttattggcataaatatgttatttattaactaaacattcatatgcaggttttgggttagtcataagtttgggtgataccaaggagcaaaaccattgctgcataattaagagtatg

SEQ ID NO: 142176 - DNA, 120 bp, Artificial Sequence
  ENSG00000104375_55 (sequence is synthesized)
tttagttttgtaaaatactgccaaaccgactttcacactggctgtatcatttgcattcctaccagcaatgaactgaagtttctgttgctccacatcctcatcagcattttgtattgtcag

SEQ ID NO: 142177 - DNA, 120 bp, Artificial Sequence
  ENSG00000104375_56 (sequence is synthesized)
tgttttccattttagctatttaaataggtgtgtagtagtttctaattttttgttttaatttgtaattccctaatgacatatgatgttgaacttcttttcgtatgcttattttccgtctgt

SEQ ID NO: 142178 - DNA, 120 bp, Artificial Sequence
  ENSG00000104375_57 (sequence is synthesized)
atatcttttttggtgaagtgagatcttttcatgtcttttgcccatcctttatcagatatgcaaatattttctcccagtctgtggcttgtctttttattttcttaatggagtttgatttgt

SEQ ID NO: 142179 - DNA, 120 bp, Artificial Sequence
  ENSG00000104375_58 (sequence is synthesized)
attcttggttcttattctttctcaacaaatgaacaccagagtttgatcaaactaaatttttcagaagaatactatgccttttatgatacctctaacttcacaaataacctaaaagtttag

SEQ ID NO: 142180 - DNA, 120 bp, Artificial Sequence
  ENSG00000104375_59 (sequence is synthesized)
gatacctctaacttcacaaataacctaaaagtttagtcacacattctattacatttttacaaagtatcacgttggtgggaaaaagtttttgctttgttgaaatttgccatttgatattgg

SEQ ID NO: 142181 - DNA, 120 bp, Artificial Sequence
  ENSG00000104375_60 (sequence is synthesized)
cattttaatgcacatttcttactttttttggctaatgaattattacttgcatttattttatatgtattttatttatttttgagatggaatctccctctgtcaccgagggtagagggcagt

SEQ ID NO: 142182 - DNA, 77 bp, Artificial Sequence
  ENSG00000104375_61 (sequence is synthesized)
tacaggcatgcattttgccacattagccaggctggtcttgaactcctgacaggtgttccacccacctcggcctccca

SEQ ID NO: 142183 - DNA, 120 bp, Artificial Sequence
  ENSG00000104375_62 (sequence is synthesized)
gatgttagacaaaaagcaaattcaagtgattttcttattcgagttcaaaattgttgaaacagcaaattgatttattatcttgcttagcacgtttgaataacatgttataaaatgatatat

SEQ ID NO: 142184 - DNA, 120 bp, Artificial Sequence
  ENSG00000104375_63 (sequence is synthesized)
acgtttgaataacatgttataaaatgatatattaattatcatgttattgatttaatcttttttagtaatattatgtggtacttccctgaagatatttctcagttgtttttaacaatgttt

SEQ ID NO: 142185 - DNA, 120 bp, Artificial Sequence
  ENSG00000104375_64 (sequence is synthesized)
gatatgaattaatacattaatttgaattgaaaaacaaagttattgcacactgattaatttttgagaaaaaaaagaaaaagtcaggctttatatgaaagtgaaataaggctgattggattg

SEQ ID NO: 142186 - DNA, 120 bp, Artificial Sequence
  ENSG00000104375_65 (sequence is synthesized)
acatagaggattagctctttaggttttgtggcaggtattttccaagacttgaatgtattctttcctcagcacccagttttgataaaagtatatgtaaaatgtattaataacagtttactg

SEQ ID NO: 142187 - DNA, 120 bp, Artificial Sequence
  ENSG00000104375_66 (sequence is synthesized)
aaaaaaattgaattgacagaagtgtaatggaattaaaattgatatggatatcctagtcctgtctaaatccaaaggataaaacctgatgcctcgaagtgaaagagtaacaaccgtggtcag

SEQ ID NO: 142188 - DNA, 120 bp, Artificial Sequence
  ENSG00000104375_67 (sequence is synthesized)
ccatccgtatccgtgggttcagcatctgtggattcaaccaacctcagatcaaaaatattcagaaaaaaagttgtctgtactcaacatgtacagactttttgctttcttctcattattccc

SEQ ID NO: 142189 - DNA, 88 bp, Artificial Sequence
  ENSG00000104375_68 (sequence is synthesized)
ctgtattagatgttacaagtaatctacgggttatatgaaaatactatgccattttatattagggacttcaatatccgtggattttggt

SEQ ID NO: 142190 - DNA, 120 bp, Artificial Sequence
  ENSG00000104375_69 (sequence is synthesized)
ggttatatgaaaatactatgccattttatattagggacttcaatatccgtggattttggtatccaagtgtgcatacacaaatacaccaatttatggccgggcgcggtggctcacacctgt

SEQ ID NO: 142191 - DNA, 120 bp, Artificial Sequence
  ENSG00000104375_70 (sequence is synthesized)
acacaaggagaagaaaacaagcaagacaggttgtaggctcatcagcaaagaatgagaggaatttttccatgtctcttccaacaaagaagcctaggcattgtgttctgaaacctggatttc

SEQ ID NO: 142192 - DNA, 120 bp, Artificial Sequence
  ENSG00000104375_71 (sequence is synthesized)
aagagaatgtgaattagatgcttgtgtttaaaaaacagaagttttcatataaaaactgaaatttccagtacctctttaaaaatcagaagatttggtaacattcagcctgacttccctgtg

SEQ ID NO: 142193 - DNA, 120 bp, Artificial Sequence
  ENSG00000104375_72 (sequence is synthesized)
acaacaggcagttggggatgagctggagctccaactcaagacaagaatgttctttccagtttgccacagtacctaagatacctgaatgtcttctatggtaccaacatccttaaagaatat

SEQ ID NO: 142194 - DNA, 120 bp, Artificial Sequence
  ENSG00000104375_73 (sequence is synthesized)
agagctcagtcctgagcctcagctgcgggatgcctgcggtcctctctctccaactgcctcattcctcctgcagcttttctcagtttgggagatttggagggagctttctcttccttcaga

SEQ ID NO: 142195 - DNA, 120 bp, Artificial Sequence
  ENSG00000104375_74 (sequence is synthesized)
ctccccaagcctcccactcacggggtggtgacctgaagagcgttcctacgcttcgcacttccttttcatcaaaggggaggcaactccccagcagcgggcttcacacctttcccgccctta

SEQ ID NO: 142196 - DNA, 120 bp, Artificial Sequence
  ENSG00000104375_75 (sequence is synthesized)
acgccggcgttctgggcacgactacggtctcttgaaaaggccattcaatgtcccttcttcaggaatttggaaaaaggatggagagatctctctgagctagactcttcagtggaggaaatg

SEQ ID NO: 142197 - DNA, 120 bp, Artificial Sequence
  ENSG00000104375_76 (sequence is synthesized)
ttcttaacagataccactgaaggaagtgctagctgtgatttgagaatggatctaacgcttttccatcttggagctgaattcttacattaccttcttctatatgaagcagatcctctctca

SEQ ID NO: 142198 - DNA, 120 bp, Artificial Sequence
  ENSG00000104375_77 (sequence is synthesized)
tgtgttttctccctcttggtgttttcagtataaatctgaccattttgaaatagttgggtatggacctatccagcctcatgaaaagtcttacagatatgagaaagaattaagcatctgttt

SEQ ID NO: 142199 - DNA, 120 bp, Artificial Sequence
  ENSG00000104375_78 (sequence is synthesized)
gtaaacctcccctcccctcctgtttgctcccttcttttctttcctcccctctcgtcccctcatttcccccagagtcattttaaaacaaaatttccaaagcattctcctttcagaaaggaa

SEQ ID NO: 142200 - DNA, 120 bp, Artificial Sequence
  ENSG00000104375_79 (sequence is synthesized)
tctttgtcttcatagttactatttctcatgttttttttttcttctgttccttgactcagcatttatcctttgactttttgctccaccataaaatatgtaagtacaagatccctggactcc

SEQ ID NO: 142201 - DNA, 120 bp, Artificial Sequence
  ENSG00000104375_80 (sequence is synthesized)
ttgaagagattatcacgttgtaaatatcagttacaggattatctaaatgaagagcttcagagtttcaattttttttgatagaataattgtaagtagactttgtatccagaatgtcagtag

SEQ ID NO: 142202 - DNA, 120 bp, Artificial Sequence
  ENSG00000104375_81 (sequence is synthesized)
attttaaaatctaccttaaaatttaatgcaaatagaaataatttaatatttataataggtgtttgtgaatcttaatttccccaacagaatagtcttagaactttcagctaataataagta

SEQ ID NO: 142203 - DNA, 120 bp, Artificial Sequence
  ENSG00000104375_82 (sequence is synthesized)
tgtctcacattaacaaaacttgatatttgctaaatgatttctattgttaagtgacaaaaggatgaaaaacatggttcttgtaaaaagggacttccctgtctctaaaggaaccattgggtt

SEQ ID NO: 142204 - DNA, 120 bp, Artificial Sequence
  ENSG00000104375_83 (sequence is synthesized)
aggctcttaagtataatgtttattgttatgaaagtgtaacttggtactcaatctccatagatgccagtacagcaatatctatttaaaataaaaatccatatattctttgatccaacagtt

SEQ ID NO: 142205 - DNA, 120 bp, Artificial Sequence
  ENSG00000104375_84 (sequence is synthesized)
gcacttctaggaatttattctacagaaatatttaaccatgtgtgaaataacatgtgtaaaaatattcgtagaacattgaaattgtaaaagattggaaagatcctaaatgtctgtcaacaa

SEQ ID NO: 142206 - DNA, 120 bp, Artificial Sequence
  ENSG00000104375_85 (sequence is synthesized)
gttggaaacaatttaaagtacaagaaaaagagttactggaaaaatacacctatgtacacacaacatatatacatatcttaatgcttataatgaagtatctctggaaaaataagcaagaaa

SEQ ID NO: 142207 - DNA, 120 bp, Artificial Sequence
  ENSG00000104375_86 (sequence is synthesized)
gaggttggagagcagtgctgtgcgtccttcctcagccttaacgagtgcggggcaaggttaacacagatttctacacccttttgctgcatacacagacgaggccacctgcagatgccacca

SEQ ID NO: 142208 - DNA, 120 bp, Artificial Sequence
  ENSG00000104375_87 (sequence is synthesized)
ctgctcagtgaatcagcagaagccttggaaagccttgtgagttccacaggacacagaattgcttgagcttgagccaaattgtctctgttatccattgctacattaaaaaaacacttcaaa

SEQ ID NO: 142209 - DNA, 120 bp, Artificial Sequence
  ENSG00000104375_88 (sequence is synthesized)
aaggatgctccgtacacagactatataaaccacacctggtaaggactcctgaaaaaggcaacgggaaccctcatttttgagcatgggctctgtacctggcactttcttcacagtgacctt

SEQ ID NO: 142210 - DNA, 120 bp, Artificial Sequence
  ENSG00000104375_89 (sequence is synthesized)
ctctctaagatagagccttactgggcccgtgcagattttccacttcctcggctgtggcccttggcatctgcggttatattcaacaggagcaccaacggtggccaagaagtcactaggatg

SEQ ID NO: 142211 - DNA, 120 bp, Artificial Sequence
  ENSG00000104375_90 (sequence is synthesized)
agagtgaaattatgttatgtacagggaagtacacatagcaagtatttgatatgtgttaatttctctttctcgtccttactggatgggatcagagggatggataaaccagttaccacttca

SEQ ID NO: 142212 - DNA, 120 bp, Artificial Sequence
  ENSG00000104381_0 (sequence is synthesized)
gtgggagggagaagtccagggcggacaggctgggcgcacccgtgctcgcgcaccccaagatggctgagaggcaggaagagcagagagggagcccgcccttgagggcggaaggcaaggccg

SEQ ID NO: 142213 - DNA, 120 bp, Artificial Sequence
  ENSG00000104381_1 (sequence is synthesized)
acgcggaggttaagctcattctgtaccattggacgcattccttcagctctcaaaaggtgcgcttggtaattgctgaaaaggcattgaagtgcgaggaacatgatgtaagtctgcccttga

SEQ ID NO: 142214 - DNA, 120 bp, Artificial Sequence
  ENSG00000104381_2 (sequence is synthesized)
gtgagcacaatgagccttggtttatgcgtttgaactcaactggagaagtgcctgtccttatccacggggaaaacataatttgtgaggccactcagatcattgattatcttgaacagactt

SEQ ID NO: 142215 - DNA, 120 bp, Artificial Sequence
  ENSG00000104381_3 (sequence is synthesized)
tcctggatgaaagaacacccaggttaatgcctgataaagaaagcatgtattacccacgggtacaacattaccgagagctgcttgactccttgccaatggatgcctatacacatggctgca

SEQ ID NO: 142216 - DNA, 120 bp, Artificial Sequence
  ENSG00000104381_4 (sequence is synthesized)
ttttacatcctgagttaactgtggactccatgatcccggcttatgcaactacaaggattcgtagccaaattggaaacacagagtctgagctgaagaaacttgctgaagaaaacccagatt

SEQ ID NO: 142217 - DNA, 120 bp, Artificial Sequence
  ENSG00000104381_5 (sequence is synthesized)
tacaagaagcatacattgcaaaacagaaacgacttaaatcaaagctgcttgatcatgacaatgtcaagtatttgaagaaaattcttgatgagttggagaaagtcttggatcaggttgaaa

SEQ ID NO: 142218 - DNA, 120 bp, Artificial Sequence
  ENSG00000104381_6 (sequence is synthesized)
ctgaattgcaaagaagaaatgaagaaaccccagaagagggccagcaaccttggctctgcggtgaatccttcaccctggcagacgtctcactcgctgtcacattgcatcgactgaagttcc

SEQ ID NO: 142219 - DNA, 120 bp, Artificial Sequence
  ENSG00000104381_7 (sequence is synthesized)
tggggtttgcaaggagaaactggggaaacggaaagcgaccaaacttggaaacctattacgagcgtgtcttgaagagaaaaacatttaacaaggttttaggacatgtcaacaatatattaa

SEQ ID NO: 142220 - DNA, 120 bp, Artificial Sequence
  ENSG00000104381_8 (sequence is synthesized)
tctctgcagtgctgccaacagcattccgggtggccaagaaaagggccccaaaagttcttggcacgacccttgtggttggtttgcttgcaggagtgggatattttgcttttatgcttttca

SEQ ID NO: 142221 - DNA, 120 bp, Artificial Sequence
  ENSG00000104381_9 (sequence is synthesized)
gaaagaggcttggcagcatgatattagcatttagacccagaccaaattatttctaggtttgttgggatcttgtcgtggcagctcatccaagcatttagctagaccctgtgattgcccgtg

SEQ ID NO: 142222 - DNA, 120 bp, Artificial Sequence
  ENSG00000104381_10 (sequence is synthesized)
gctctctgagtctgtcttattgagtagttagcagtattttttcctaaaattcagaagtcatctttgttacacaacacaggggttcaggtagcaataggacacaaaattgctttattctac

SEQ ID NO: 142223 - DNA, 120 bp, Artificial Sequence
  ENSG00000104381_11 (sequence is synthesized)
aactgccagctccaggcagaaataggaaggcaaagagataagagaaggaaaaatgagagaatgaagtctgtatagggtagagcaatagaaagtaagcttcgggtgcctccaacgttcatg

SEQ ID NO: 142224 - DNA, 120 bp, Artificial Sequence
  ENSG00000104381_12 (sequence is synthesized)
gctgcctgtctcattggtaaacctcacatttagttacttgtggctactgcccacacatacacttctgtaattgagaactcttaggagaggactagggaatcactggggatagtgggctgg

SEQ ID NO: 142225 - DNA, 120 bp, Artificial Sequence
  ENSG00000104381_13 (sequence is synthesized)
agagaaccccaggctttatatgtatactttgacctcagtgttaattttaaatgcttatgaatcacacacattgctttagtaagattaagtgcttatatactagaaatttgatgctcattg

SEQ ID NO: 142226 - DNA, 120 bp, Artificial Sequence
  ENSG00000104381_14 (sequence is synthesized)
gaacacatctgcctagcatttctgtaaaagtcttaagtgatattaagatgattccttaccatttcagatggtccgcaatttgaattaccaagtggtaatggttccttactgttttagatg

SEQ ID NO: 142227 - DNA, 120 bp, Artificial Sequence
  ENSG00000104381_15 (sequence is synthesized)
gggaggtagaaagggtggcatctgtagccctcttcatacacataagtggcatttaggtgaatgtcccagctaatcactagcatgtctaggtattggctgggtagtgggtattttgatgat

SEQ ID NO: 142228 - DNA, 120 bp, Artificial Sequence
  ENSG00000104381_16 (sequence is synthesized)
ctgggagcaccaaatatgttcattcttcgtttggggaggctggtctgtaaacacaaaaattgttgtccagatctttcatctgtttatgatcatcaacaaagacttgttagaaaggtctag

SEQ ID NO: 142229 - DNA, 120 bp, Artificial Sequence
  ENSG00000104381_17 (sequence is synthesized)
tcttagcacttggcagttaatctagggaagatgaattaaatgggtagatagtgatgcatacctgtattcactgatgtatgtttaagggatttgggggggatacctcagttcatgtggaag

SEQ ID NO: 142230 - DNA, 120 bp, Artificial Sequence
  ENSG00000104381_18 (sequence is synthesized)
ggacagtctcggtgtgtcccatgaataaccttggaactgcaacaaatggtttgtgctcagaaaaagtctttcatggtgacaggaagacagtttccctggagctggccatgaaggccttag

SEQ ID NO: 142231 - DNA, 120 bp, Artificial Sequence
  ENSG00000104381_19 (sequence is synthesized)
aagccatttctggtgtctggtgggtagcaggcatagagatgatgtgccgaggtcccagtgaacaacagtagccaaagaatgtactaactttatcattaataggaaagtcatacctaggaa

SEQ ID NO: 142232 - DNA, 120 bp, Artificial Sequence
  ENSG00000104381_20 (sequence is synthesized)
acaatgactttttgatggcaaaatgattttttaattctattttgatgctgtaattccatttcatgacctagttgtattagaaaaccttgatgaactatatgttcccgatttacaaaaaaa

SEQ ID NO: 142233 - DNA, 120 bp, Artificial Sequence
  ENSG00000104381_21 (sequence is synthesized)
ttaataaaacctccagagtaaactcagtcaaacaataattgagtagcagcttttataacatttaaaatttgcacatgagtgtgttgtcatatggagtgtctgaatctgttgctgggacat

SEQ ID NO: 142234 - DNA, 120 bp, Artificial Sequence
  ENSG00000104381_22 (sequence is synthesized)
accaatccatgtattcattagagccatagaagttattattcattagttcatagtgtttgagttctttatgtcactctgttagaaacaagaactgagtcgtgaagaaataagaattggatt

SEQ ID NO: 142235 - DNA, 120 bp, Artificial Sequence
  ENSG00000104381_23 (sequence is synthesized)
tttataaaaacctctgaaggatatttacctatgaaaaagttgttaagaataaaaattagaagtccatggttaacttttccttcaatttatattattcctgaatcatagggaatctttcta

SEQ ID NO: 142236 - DNA, 120 bp, Artificial Sequence
  ENSG00000104381_24 (sequence is synthesized)
gaatgtgtttataatttccttgtacagtttctttggaaatacgttaaagatagtggcaatttcatatatttcatggatacttgagtttgtgcttttaaggtgtttgtttagggatacaat

SEQ ID NO: 142237 - DNA, 120 bp, Artificial Sequence
  ENSG00000104381_25 (sequence is synthesized)
gaccactagatgtcgctgtttatccagtagactaagattgagtgttctttttgttcagcaactcttctaaaatgtttcaagcaaagatagtaatgacctcagtttctgaaataagggcat

SEQ ID NO: 142238 - DNA, 120 bp, Artificial Sequence
  ENSG00000104381_26 (sequence is synthesized)
cttcatcagattattcttctgttttaaaaaaaagcttgaggcaaatgtgagtgatttccagtgctttgaaagggattacagtatcacacaatgtcaagctagagttaaacacagtattag

SEQ ID NO: 142239 - DNA, 120 bp, Artificial Sequence
  ENSG00000104381_27 (sequence is synthesized)
ctaaataggcacttatgtgtattttctttttcatgattatcggtgactggtcagtgtactcatcaatttccaaaatttgtataaatatcacaattagaaaaatgcctgaggtactaaagt

SEQ ID NO: 142240 - DNA, 120 bp, Artificial Sequence
  ENSG00000104381_28 (sequence is synthesized)
tatgttggctttttgtgtcttaacacacataaatactattgttattgcagcagatgccttttgaatccattttccataattgcggatagtcataaattgcttgctcaatttttagtaatt

SEQ ID NO: 142241 - DNA, 120 bp, Artificial Sequence
  ENSG00000104381_29 (sequence is synthesized)
attgctgttgacaccagcgttgtagatttttggtgttgttgaatgcagtagagagaccaagacactattctgtaagatcaataaaagtaattggaaaataaatatgaaccctaaaacaaa

SEQ ID NO: 142242 - DNA, 120 bp, Artificial Sequence
  ENSG00000104381_30 (sequence is synthesized)
gtgtagcctccgaccacctcgaagccgtgcgaccaggagcccgagtactcgccctggcccttgggccccgtgcagatgccatgcccgtgcgccttgccctcctcccagccgccgcaaaag

SEQ ID NO: 142243 - DNA, 120 bp, Artificial Sequence
  ENSG00000104381_31 (sequence is synthesized)
ctcaaaagaaagaacacccaggttaatgcctgataaagaaagcatgtattacccacgggtacaacattaccgagagctgcttgactccttgccaatggatgcctatacacatggctgcat

SEQ ID NO: 142244 - DNA, 120 bp, Artificial Sequence
  ENSG00000104381_32 (sequence is synthesized)
gatcatgacaatgtcaagtatttgaagaaaattcttgatgagttggagaaagtcttggatcaggttgaaactgaattgcaaagaagaaatgaagaaaccccagcttctcatatgcagcat

SEQ ID NO: 142245 - DNA, 120 bp, Artificial Sequence
  ENSG00000104381_33 (sequence is synthesized)
ctgccttgacagtgtatcaatagcagagctgatctggcacctgccagttgggtttatttcagcaaacccactttaaaaattttattagcaaataatgaataaataggtttggagcctttc

SEQ ID NO: 142246 - DNA, 120 bp, Artificial Sequence
  ENSG00000104388_0 (sequence is synthesized)
attgttcggctgggctcggtcgggcgctgtctccctcggctctgcgggtgtcagttcgtccggcttcctcacagcccctcactcccggcggctgacagcagcagcggcggcggcgggcgg

SEQ ID NO: 142247 - DNA, 120 bp, Artificial Sequence
  ENSG00000104388_1 (sequence is synthesized)
cgcctggcgtttcgaggctgagcggcaccggggttggggcgcggaggaggagcagcagcgggaggaggagccgtgtgccctggcactgagcggccgcggccatggcgtacgcctatctct

SEQ ID NO: 142248 - DNA, 120 bp, Artificial Sequence
  ENSG00000104388_2 (sequence is synthesized)
tcaagtacatcataatcggcgacacaggtgttggtaaatcatgcttattgctacagtttacagacaagaggtttcagccagtgcatgaccttactattggtgtagagttcggtgctcgaa

SEQ ID NO: 142249 - DNA, 120 bp, Artificial Sequence
  ENSG00000104388_3 (sequence is synthesized)
tgataactattgatgggaaacagataaaacttcagatatgggatacggcagggcaagaatcctttcgttccatcacaaggtcgtattacagaggtgcagcaggagctttactagtttacg

SEQ ID NO: 142250 - DNA, 120 bp, Artificial Sequence
  ENSG00000104388_4 (sequence is synthesized)
atattacacggagagatacattcaaccacttgacaacctggttagaagatgcccgccagcattccaattccaacatggtcattatgcttattggaaataaaagtgatttagaatctagaa

SEQ ID NO: 142251 - DNA, 120 bp, Artificial Sequence
  ENSG00000104388_5 (sequence is synthesized)
gagaagtaaaaaaagaagaaggtgaagcttttgcacgagaacatggactcatcttcatggaaacgtctgctaagactgcttccaatgtagaagaggcatttattaatacagcaaaagaaa

SEQ ID NO: 142252 - DNA, 120 bp, Artificial Sequence
  ENSG00000104388_6 (sequence is synthesized)
tttatgaaaaaattcaagaaggagtctttgacattaataatgaggcaaatggcattaaaattggccctcagcatgctgctaccaatgcaacacatgcaggcaatcagggaggacagcagg

SEQ ID NO: 142253 - DNA, 120 bp, Artificial Sequence
  ENSG00000104388_7 (sequence is synthesized)
ctgggggcggctgctgttgagtctgtttttactgtctagctgcccaacggggcctactcacttattctttcaccccctctcctcctgctcagctgagacatgaaactatttgaaatggct

SEQ ID NO: 142254 - DNA, 120 bp, Artificial Sequence
  ENSG00000104388_8 (sequence is synthesized)
ttatgtcacagaagactttaatccgtcaaattcttgtataactttgaataaatggttaatgttcacttaaaagacagattttggagattgtattcatatctatttgcatttgatttctag

SEQ ID NO: 142255 - DNA, 120 bp, Artificial Sequence
  ENSG00000104388_9 (sequence is synthesized)
gtcaattgatgtgattatttttgttaaatgttgtcttgtgcccttaactacgaactgaattgtattaaacactacaaagtcatcttgagtattttaaatcggtttgtgtagttaggtttc

SEQ ID NO: 142256 - DNA, 120 bp, Artificial Sequence
  ENSG00000104388_10 (sequence is synthesized)
ccaacatctgtggttacctaatgtttaatattatagaactgtcctcagaaactttgtcaattttcacggctataaggaaacagaaggactcttttaattctgtatttatcatttactttc

SEQ ID NO: 142257 - DNA, 120 bp, Artificial Sequence
  ENSG00000104388_11 (sequence is synthesized)
tgtatatatagtttaataacctgcttgggtgtaatttgccaagcttgaattctttaatgcatttgcataaattctatactgtttagagcttaaagctacagaagcattgttaggaattgc

SEQ ID NO: 142258 - DNA, 120 bp, Artificial Sequence
  ENSG00000104388_12 (sequence is synthesized)
ttggacactgaattttaaactttttgacattgttaacaagcatgttcatcttttcttgtcactagtccaagaaaaatatgcttaatgtatattacaaaggctttgtatatgttaacctgt

SEQ ID NO: 142259 - DNA, 120 bp, Artificial Sequence
  ENSG00000104388_13 (sequence is synthesized)
tttaatgccaaaagtttgctttgtccacaatttccttaagacctcttcagaaagggatttgtttgccttaatgaatactgttgggaaaaaacacagtataatgagtgaaaagggcagaag

SEQ ID NO: 142260 - DNA, 120 bp, Artificial Sequence
  ENSG00000104388_14 (sequence is synthesized)
caagaaatttctacatcttagcgactccaagaagaatgagtatccacatttagatggcacattatgaggactttaatctttccttaaacacaataatgttttcttttttcttttattcac

SEQ ID NO: 142261 - DNA, 120 bp, Artificial Sequence
  ENSG00000104388_15 (sequence is synthesized)
atttttcatgcaggacagtttttcaaccttgatgtacagtgactgtgtaaaatttttctttcagtggcaacctctataatctttaaaatatggtgagcatcttgtctgttttgaagggga

SEQ ID NO: 142262 - DNA, 120 bp, Artificial Sequence
  ENSG00000104388_16 (sequence is synthesized)
tatgacaataaatctatcagatggaaaatcctgttacaaagtagaaaagctttagtaatttactcagtgtggtggttttatcctttttttctttttctcccttggtctataatgaaattg

SEQ ID NO: 142263 - DNA, 120 bp, Artificial Sequence
  ENSG00000104388_17 (sequence is synthesized)
ttacagcagtgcaaaataaaatcctatgtataaaagtgttctttttttttattatgaccacctcttttttaatgtatttttagtccacttacagcttttacatgggtttaagcatgtttt

SEQ ID NO: 142264 - DNA, 120 bp, Artificial Sequence
  ENSG00000104388_18 (sequence is synthesized)
ttaaaagggtcagaatggttaacactcaaccctttttaaaaattttgctaaaatgcgacaaatctcaccatactgaaattatttttgttgatggtgtaagcagtgtaagcaagtgttttc

SEQ ID NO: 142265 - DNA, 120 bp, Artificial Sequence
  ENSG00000104388_19 (sequence is synthesized)
tcctgaactagcacaaaagcacttatgcctgaaagaaagcataaagaagttctaactctgaaactaactactttcatttcgctcatggccttcaactttctacaggtcttccctgaagat

SEQ ID NO: 142266 - DNA, 120 bp, Artificial Sequence
  ENSG00000104388_20 (sequence is synthesized)
tcagcagtactctctcaaaggtttgacagtactcttgtgggaaatcaccaaatgctgtcatagttttgttttaactgtctccttgagggcagagggaagggtgagagaaaatctgttttc

SEQ ID NO: 142267 - DNA, 120 bp, Artificial Sequence
  ENSG00000104388_21 (sequence is synthesized)
atgggtatttgtagtacagcctttttttctttcaagtggctgtatcaaattcactggtcttactaatcactgtctttaccagtgagtacaaaaagttaaggcaactaggacaggtactgc

SEQ ID NO: 142268 - DNA, 120 bp, Artificial Sequence
  ENSG00000104388_22 (sequence is synthesized)
tctataccaagaagagaatgattctttggaaattgttatttttaagcttctgttaatttttccagaagtttagtgcgtttcttttccatactttctcccctaattcttttatttgaagaa

SEQ ID NO: 142269 - DNA, 120 bp, Artificial Sequence
  ENSG00000104388_23 (sequence is synthesized)
gagaacttaatggcaaataaacaacaaaccaggacatgcattttaataccctaaggaaaaatggaaccctcaaatataactcctcccacaaccaccctaatgtgcctcagtctggggcag

SEQ ID NO: 142270 - DNA, 120 bp, Artificial Sequence
  ENSG00000104388_24 (sequence is synthesized)
caggtggacttctcaatagttcttttccacattctctacaaatcacatctaccgttaaggaatatgttatgaatcctttctgttaattgagaaagcaatgttattgtctgtgatttccag

SEQ ID NO: 142271 - DNA, 120 bp, Artificial Sequence
  ENSG00000104388_25 (sequence is synthesized)
tctttgctcattttattatccctgtcaaataatgtaatattggtacctgcagttgaatttgtaatattgtaattgaatttttagttgatcttcgatcagtttttatagcatctatggaca

SEQ ID NO: 142272 - DNA, 120 bp, Artificial Sequence
  ENSG00000104388_26 (sequence is synthesized)
tagaaaatcagtcactgaaaaaaataaacacagctttcaatgtctcactcaacatgtaacattcaaaattgtgatcttcataaagacattgttaccattcgtcttgcaaatttaagacaa

SEQ ID NO: 142273 - DNA, 120 bp, Artificial Sequence
  ENSG00000104388_27 (sequence is synthesized)
ctgaatgaaaagccaattttttgaaagaatgtggcatataattagatatacaactgaaacaggatatacaactgcatacaatttgtttttaatgatattttaaaatagcctgttagcagg

SEQ ID NO: 142274 - DNA, 120 bp, Artificial Sequence
  ENSG00000104388_28 (sequence is synthesized)
aaaatagtccctatttatctgctaatggtcaaaaagagttaggatataaatcgtaccaaaatgtttccaatcactcagaaaaactgattcatgtctggctttgcaacaccttaaacattt

SEQ ID NO: 142275 - DNA, 120 bp, Artificial Sequence
  ENSG00000104388_29 (sequence is synthesized)
attctgtcatagatagtaaagccccatctcagtttatttagtcctgaggttggcagcatggggtttgactatatgagctaaaagatacacaaagagataacgctgtttcataataaacag

SEQ ID NO: 142276 - DNA, 120 bp, Artificial Sequence
  ENSG00000104388_30 (sequence is synthesized)
gaattgactatacaaataggtaaaccagcatatctacctgtatttctcagagtttagatgtgtgctttatgtttacattaaaataaagcctaacgccacagtagatcatctcatactgca

SEQ ID NO: 142277 - DNA, 120 bp, Artificial Sequence
  ENSG00000104388_31 (sequence is synthesized)
ggaaacttggtcttggaattgggcaggaacaaagcatcttggagcccaggaagcagaaactgttaagagctatcctgcagcaggagcagttgtgttagcttctcatctgctcggatggaa

SEQ ID NO: 142278 - DNA, 120 bp, Artificial Sequence
  ENSG00000104388_32 (sequence is synthesized)
tctttatacttaatagaaatgttttatatatcttcattttacttattatttaagtttttagtcggatggtctttgaacatcataaagtaggaaagtttcttccctttgaaatcccttgta

SEQ ID NO: 142279 - DNA, 120 bp, Artificial Sequence
  ENSG00000104388_33 (sequence is synthesized)
tacagcaaaagaaatttatgaaaaaattcaagaaggagtctttgacattaataatgaggtatatacatataaatattgttggtcaatattaatttagagttcacttttgattactatttt

SEQ ID NO: 142280 - DNA, 120 bp, Artificial Sequence
  ENSG00000104388_34 (sequence is synthesized)
attcctaaaatcaatcatgataatcagttaacaccattagtttacagtcatccaactgaaaaattggtatatgtggtatagtagttaaatatttatgttctagtagagcaacactttgtc

SEQ ID NO: 142281 - DNA, 120 bp, Artificial Sequence
  ENSG00000104388_35 (sequence is synthesized)
tatggaaatggattaaagtaagtggccctatccattcattgcaagcaatgcaaaataatataaatcccccaaagagaaaagaaaatccacttttatccacatgaccatatggtgtcatct

SEQ ID NO: 142282 - DNA, 120 bp, Artificial Sequence
  ENSG00000104388_36 (sequence is synthesized)
gctttgggaataatgttctggtatataaatgcatgtactatgtactaatgcaagatgctctctctgttatctggcaggaaagagggaaataccaaatttggaaattactcccaatatagc

SEQ ID NO: 142283 - DNA, 120 bp, Artificial Sequence
  ENSG00000104388_37 (sequence is synthesized)
ttacgctgtttaatctctgtcacttttttaaaaatatgtgtagtaaaaataaatattacctaactttgtagaagtggttaaagaagctactgctgaaagacagtagtttttaagatttca

SEQ ID NO: 142284 - DNA, 120 bp, Artificial Sequence
  ENSG00000104388_38 (sequence is synthesized)
attgtaattagcgatgaaacaatttaagagacagtatccaagcatggtaagagcagaaactttgactcagcttgctggaagttaaatcaagtctctgctactaacttgctgtgcaagcca

SEQ ID NO: 142285 - DNA, 120 bp, Artificial Sequence
  ENSG00000104388_39 (sequence is synthesized)
gtgttctaaatactaaccctcataataccctgaataatacagttagtatgttaaaaattaattaaaagaatggtcatcacaactttgaattccatggtacactttccacaaatgcttctg

SEQ ID NO: 142286 - DNA, 120 bp, Artificial Sequence
  ENSG00000104388_40 (sequence is synthesized)
gcttttcccagaaaagtagatctcagacacttattgctggcttatttgtttgttcataggggagtatgataaaatgaactattaactatgctttaaatattttcactgtaacacaaaaaa

SEQ ID NO: 142287 - DNA, 120 bp, Artificial Sequence
  ENSG00000104388_41 (sequence is synthesized)
caaaagtgcacaaaaacagtactgtagtagaggctaccagaaggacctggttagttgtcatctgtgagtttagctgccatatttatctttcacattgaaatattaaatgtgtaagaaagg

SEQ ID NO: 142288 - DNA, 120 bp, Artificial Sequence
  ENSG00000104388_42 (sequence is synthesized)
catggtagattattcacagtgcaccagaaaccctggctgcctcttttccatgtcctttttgtaaagcatcttaatttctgtgaattttgtctcttatttatttttttttaactttcaggt

SEQ ID NO: 142289 - DNA, 120 bp, Artificial Sequence
  ENSG00000104408_0 (sequence is synthesized)
cttttctttggcaagatggcggagtacgacttgactactcgcatcgcgcactttttggatcggcatctagtctttccgcttcttgaatttctctctgtaaaggagatatataatgaaaag

SEQ ID NO: 142290 - DNA, 120 bp, Artificial Sequence
  ENSG00000104408_1 (sequence is synthesized)
gaattattacaaggtaaattggaccttcttagtgataccaacatggtagactttgctatggatgtatacaaaaacctttattctgatgatattcctcatgctttgagagagaaaagaacc

SEQ ID NO: 142291 - DNA, 120 bp, Artificial Sequence
  ENSG00000104408_2 (sequence is synthesized)
acagtggttgcacaactgaaacagcttcaggcagaaacagaaccaattgtgaagatgtttgaagatccagaaactacaaggcaaatgcagtcaaccagggatggtaggatgctctttgac

SEQ ID NO: 142292 - DNA, 120 bp, Artificial Sequence
  ENSG00000104408_3 (sequence is synthesized)
tacctggcggacaagcatggttttaggcaggaatatttagatacactctacagatatgcaaaattccagtacgaatgtgggaattactcaggagcagcagaatatctttatttttttaga

SEQ ID NO: 142293 - DNA, 120 bp, Artificial Sequence
  ENSG00000104408_4 (sequence is synthesized)
gtgctggttccagcaacagatagaaatgctttaagttcactctggggaaagctggcctctgaaatcttaatgcagaattgggatgcagccatggaagaccttacacggttaaaagagacc

SEQ ID NO: 142294 - DNA, 120 bp, Artificial Sequence
  ENSG00000104408_5 (sequence is synthesized)
atagataataattctgtgagttctccacttcagtctcttcagcagagaacatggctcattcactggtctctgtttgttttcttcaatcaccccaaaggtcgcgataatattattgacctc

SEQ ID NO: 142295 - DNA, 120 bp, Artificial Sequence
  ENSG00000104408_6 (sequence is synthesized)
ttcctttatcagccacaatatcttaatgcaattcagacaatgtgtccacacattcttcgctatttgactacagcagtcataacaaacaaggatgttcgaaaacgtcggcaggttctaaaa

SEQ ID NO: 142296 - DNA, 120 bp, Artificial Sequence
  ENSG00000104408_7 (sequence is synthesized)
gatctagttaaagttattcaacaggagtcttacacatataaagacccaattacagaatttgttgaatgtttatatgttaactttgactttgatggggctcagaaaaagctgagggaatgt

SEQ ID NO: 142297 - DNA, 120 bp, Artificial Sequence
  ENSG00000104408_8 (sequence is synthesized)
tgtatcagcattaacatgttggcagataaattgaacatgactccagaagaagctgaaaggtggattgtaaatttgattagaaatgcaagactggatgccaagattgattctaaattaggt

SEQ ID NO: 142298 - DNA, 120 bp, Artificial Sequence
  ENSG00000104408_9 (sequence is synthesized)
catgtggttatgggtaacaatgcagtctcaccctatcagcaagtgattgaaaagaccaaaagcctttcctttagaagccagatgttggccatgaatattgagaagaaacttaatcagaat

SEQ ID NO: 142299 - DNA, 120 bp, Artificial Sequence
  ENSG00000104408_10 (sequence is synthesized)
agcaggtcagaggctcctaactgggcaactcaagattctggcttctactgaagaaccataaagaaaagatgaaaaaaaaaactatcaaagaaagatgaaataataaaactattatataaa

SEQ ID NO: 142300 - DNA, 120 bp, Artificial Sequence
  ENSG00000104408_11 (sequence is synthesized)
gggtgacttacattttggaaacaacatattacgtataaattttgaagaattggaataaaattgattcattttatcttgctgtcagttttcttgcatgtgcaagtttgtgtttttttaact

SEQ ID NO: 142301 - DNA, 120 bp, Artificial Sequence
  ENSG00000104408_12 (sequence is synthesized)
ttcttttttggaataattatattcagaggaatttgcaaaaatagtacagagaagtccctgtaggctgaaccctgtttccctcaattttttcactttgtcttactatggtacagtatcaaa

SEQ ID NO: 142302 - DNA, 120 bp, Artificial Sequence
  ENSG00000104408_13 (sequence is synthesized)
accaggatgttgacattggtacaatgtgtgtacaaatagctccctaccattttatcacgtgtagatttgtgtaaccatcactgcagccaagatagagaactatcatcatgatctccctca

SEQ ID NO: 142303 - DNA, 120 bp, Artificial Sequence
  ENSG00000104408_14 (sequence is synthesized)
tgctacctttttgtagccatacctactcccaaccaactctaaccctaggaaccactaatctgttcctcatcgctatattttgtcattatgagaatgttatataaatggaattacataata

SEQ ID NO: 142304 - DNA, 120 bp, Artificial Sequence
  ENSG00000104408_15 (sequence is synthesized)
cacaacctttgagattagcttttttcattcatcacaatgctcttgagagccatccaagttgagagatagatatatatatatatatgatcagtagttaattccttttttattgccaaatag

SEQ ID NO: 142305 - DNA, 120 bp, Artificial Sequence
  ENSG00000104408_16 (sequence is synthesized)
cttttctttggcaagatggcggagtacgacttgactactcgcatcgcgcactttttggatcggcatctagtctttccgcttcttgaatttctctctgtaaaggaggaaagatggcgtggg

SEQ ID NO: 142306 - DNA, 120 bp, Artificial Sequence
  ENSG00000104408_17 (sequence is synthesized)
ttttatttatacacagccttgcctagaaagggtaagagatggtttgtagggacacataaaaaataaggtcatgtaaatcagaagtaggtgggaatgtctacagtaattctcttcatttta

SEQ ID NO: 142307 - DNA, 120 bp, Artificial Sequence
  ENSG00000104408_18 (sequence is synthesized)
gaattcttaactaggacattttattacctcctttaataatttattttgttttaatgtaaaacagttctttgaaggcaacagaagcctcctattttttttcttccttggtaaatattgtca

SEQ ID NO: 142308 - DNA, 120 bp, Artificial Sequence
  ENSG00000104408_19 (sequence is synthesized)
cttttctttggcaagatggcggagtacgacttgactactcgcatcgcgcactttttggatcggcatctagtctttccgcttcttgaatttctctctgtaaaggagtagagacagggtttc

SEQ ID NO: 142309 - DNA, 120 bp, Artificial Sequence
  ENSG00000104408_20 (sequence is synthesized)
gtatgggagagagaagatagaagtaaacgtggaaaacctcagtaagaatatgcctcagtgaatattctacaccattgcctctttttttataagtacaataggtggttggagagaaacagg

SEQ ID NO: 142310 - DNA, 120 bp, Artificial Sequence
  ENSG00000104408_21 (sequence is synthesized)
atccactaaaattcttgattatgtcatgtgctgcaaagtaacacgcttcttaaatgaagaacaaaggagccattatgtgtctgatactttcaaaactaggaatatttgagtttctgtcag

SEQ ID NO: 142311 - DNA, 120 bp, Artificial Sequence
  ENSG00000104408_22 (sequence is synthesized)
taagtcttagtcttggctcctgtttggtctctctttggtggggtgagaagagggttgaagagaatgtttgtctttctctgtgacaggaaggtaaaaacaaaatcaacggccaaatgactc

SEQ ID NO: 142312 - DNA, 120 bp, Artificial Sequence
  ENSG00000104408_23 (sequence is synthesized)
aactgcgattgtgccagtgagaacctcaggagcctagcagaagataacgctgggaagggttcaaggagctaagccgagagttttggctgcccaccacagatatataatgaaaaggaatta

SEQ ID NO: 142313 - DNA, 120 bp, Artificial Sequence
  ENSG00000104408_24 (sequence is synthesized)
tttagaaatgaggctctagggcatactacttgaaaggaatacgtgcatctttttatatcatctttgctctgtcaactagcttttgtttaatattttggtgatgagaaattcactgcttat

SEQ ID NO: 142314 - DNA, 120 bp, Artificial Sequence
  ENSG00000104408_25 (sequence is synthesized)
aataaacttaagcaagactaaattttatcagtattttccaacagtagataattgattacaggtgtgaaatatgaatgctgcgtaaatatgcagcccctcaatgtcatcttgctgttctct

SEQ ID NO: 142315 - DNA, 120 bp, Artificial Sequence
  ENSG00000104408_26 (sequence is synthesized)
tggatgccaaggcagccttagttagcatctgctgtgctgcacagatgctcttctgggaagagacaaggtctcccgaggttgcccctgctggtcttgaactcttggattcaagcattcttc

SEQ ID NO: 142316 - DNA, 120 bp, Artificial Sequence
  ENSG00000104408_27 (sequence is synthesized)
taggaatagagactacatgcatcaaaagagcatcaagactgaaacatagacttgtcttgacaggagaaaaccagacctcccccagttaaaagcaatctatctgtaatttaactgcctgct

SEQ ID NO: 142317 - DNA, 120 bp, Artificial Sequence
  ENSG00000104408_28 (sequence is synthesized)
agaacaagacttcaccacttttcagaggaagatcgagagtctctgcaatctattactcaaagcataacaaaaaaaattactagacatgtgatgaaatgggaaaatgtgacttatactaaa

SEQ ID NO: 142318 - DNA, 120 bp, Artificial Sequence
  ENSG00000104408_29 (sequence is synthesized)
tcattggcaaaagagaaaaaagtaaagaaaaccctcccactcaaaaacagaaactagaaaccttgtttcagggcctcaaaatttggagggtgatttaacttgtccttgaaatccaaaagt

SEQ ID NO: 142319 - DNA, 120 bp, Artificial Sequence
  ENSG00000104408_30 (sequence is synthesized)
aggaacaattttatgatttttagcattaacagaatcgtatcatgtaatggatttattattataatattatacagcacagtgagtggcacattgtaggtgcttaattaatattgttgagta

SEQ ID NO: 142320 - DNA, 120 bp, Artificial Sequence
  ENSG00000104408_31 (sequence is synthesized)
aatccattattcctgatttaatactttatcatatatatatatactccttgaacttggctctaaacaactgtggaatcctaacggtatgtgaaatattttatgccttagtagtaacttttt

SEQ ID NO: 142321 - DNA, 120 bp, Artificial Sequence
  ENSG00000104408_32 (sequence is synthesized)
tccagttacctctgccttcagctattggaatataaatatcaatggtttcttcattacgtggggtatagatgagtttaaatggtactattaaccatgaagtatcctattaccgtatatttg

SEQ ID NO: 142322 - DNA, 120 bp, Artificial Sequence
  ENSG00000104408_33 (sequence is synthesized)
tattaccgtatatttgacaggcttctagatttagtgcttttgttagagaaggagagttgtgtgaagccaaattaaaaatcaggccttggccaagtgcggtggctcacacctgtaatcaca

SEQ ID NO: 142323 - DNA, 120 bp, Artificial Sequence
  ENSG00000104408_34 (sequence is synthesized)
tttagtatgcatttccttatgattaatgacgttgagaaccttttcatgtgtctgttggccatttggttgtcttcttttgcgaagtgcctatcttttagccatttcaattgcaaggtctgt

SEQ ID NO: 142324 - DNA, 120 bp, Artificial Sequence
  ENSG00000104408_35 (sequence is synthesized)
cttgtcttactcatttataggagttctgcatgtaatttggaaggttcgattttgctctcatggctaaataccctttgaccaccttcatctttattttttgtgggcagtgaaatattgtgg

SEQ ID NO: 142325 - DNA, 120 bp, Artificial Sequence
  ENSG00000104408_36 (sequence is synthesized)
cattttcttggatttttctttccttgcaaaattaagttcagtacagaaatcttttcttttgctgaagcatttctgtccgtgaatattttgtagaatctttacatattactcagtacactt

SEQ ID NO: 142326 - DNA, 120 bp, Artificial Sequence
  ENSG00000104408_37 (sequence is synthesized)
catgttgttgtgagtttgtgtatatgtatctatttgctccctgtactataggttaaattatgcttttttggatcctttgcaaagcaaaagcctgatctgacatggttgacttaaaaactt

SEQ ID NO: 142327 - DNA, 120 bp, Artificial Sequence
  ENSG00000104408_38 (sequence is synthesized)
ctggcctgaagtgatcctccctcctcagcctttcaatgctttgggatttacagccatgagcctctgcaccctgcctgtctaagatttctctagttaatcctagaagttggaaaaagacct

SEQ ID NO: 142328 - DNA, 120 bp, Artificial Sequence
  ENSG00000104408_39 (sequence is synthesized)
taaaacagagactttttgtcttccaaccttggaagagtttgtttctttttgcctttactttctggtgcttttttcttcacttgtagctccacatgttgcaaaataaagtctcatggctgc

SEQ ID NO: 142329 - DNA, 120 bp, Artificial Sequence
  ENSG00000104408_40 (sequence is synthesized)
ctgattattgaagacctgagtatttttagcaaaggttttttgaaacaaaccagtgtgatccaataaggacttagataattacagttttttgtagaaagctataggtcttttagtaggcta

SEQ ID NO: 142330 - DNA, 120 bp, Artificial Sequence
  ENSG00000104408_41 (sequence is synthesized)
ttttctttggcaagatggcggagtacgacttgactactcgcatcgcgcactttttggatcggcatctagtctttccgcttcttgaatttctctctgtaaaggaggttgtttcagcaatgt

SEQ ID NO: 142331 - DNA, 120 bp, Artificial Sequence
  ENSG00000104412_0 (sequence is synthesized)
gccctctcaccccgctgcctctaggttctgggaagatggcgaaggtctcagagctttacgatgtcacttgggaagaaatgagagataaaatgagaaaatggagagaagaaaactcaagaa

SEQ ID NO: 142332 - DNA, 120 bp, Artificial Sequence
  ENSG00000104412_1 (sequence is synthesized)
atagtgagcaaattgtggaagttggagaagaattaattaatgaatatgcttctaagctgggagatgatatttggatcatatatgaacaggtgatgattgcagcactagactatggtcggg

SEQ ID NO: 142333 - DNA, 120 bp, Artificial Sequence
  ENSG00000104412_2 (sequence is synthesized)
atgacttggcattgttttgtcttcaagagctgagaagacagttccctggcagtcacagagtcaagcgattaacaggcatgagatttgaagccatggaaagatatgatgatgctatacagc

SEQ ID NO: 142334 - DNA, 120 bp, Artificial Sequence
  ENSG00000104412_3 (sequence is synthesized)
tatatgataggattttacaagaagatccaactaacactgctgcaagaaagcgtaagattgccattcgaaaagcccaggggaaaaatgtggaggccattcgggagctgaatgagtatctgg

SEQ ID NO: 142335 - DNA, 120 bp, Artificial Sequence
  ENSG00000104412_4 (sequence is synthesized)
aacaatttgttggagaccaagaagcctggcatgaacttgcagaactttacatcaatgaacatgactatgcaaaagcagccttttgtttagaggaactaatgatgactaatccacacaacc

SEQ ID NO: 142336 - DNA, 120 bp, Artificial Sequence
  ENSG00000104412_5 (sequence is synthesized)
acttatactgtcagcagtatgctgaagttaagtatacccaaggtggacttgaaaacctcgaactttcaagaaagtattttgcacaggcattgaaactgaacaacagaaatatgagagctt

SEQ ID NO: 142337 - DNA, 120 bp, Artificial Sequence
  ENSG00000104412_6 (sequence is synthesized)
tgtttggactttatatgtcggcaagtcatattgcttctaatccaaaagcaagtgcaaaaacgaaaaaggacaacatgaaatatgctagttgggcagctagtcaaataaacagagcttatc

SEQ ID NO: 142338 - DNA, 120 bp, Artificial Sequence
  ENSG00000104412_7 (sequence is synthesized)
agtttgcaggtcgaagtaagaaggaaaccaaatattctcttaaggctgtcgaagacatgttggaaacattgcagatcacccagtcttaaggtttcaaaaactctttgacattagatttca

SEQ ID NO: 142339 - DNA, 120 bp, Artificial Sequence
  ENSG00000104412_8 (sequence is synthesized)
caactgcacaattgaacttattggcctgtaacttatttactaaatgctcagtgctatttatatactacagtaattttctgttaagaaggcagttgtaaagaatgtgtttatataaaccta

SEQ ID NO: 142340 - DNA, 120 bp, Artificial Sequence
  ENSG00000104412_9 (sequence is synthesized)
aaaatgccttttactgctaagtggggagatgggggaaatccatggaagagagatttaagacttattgattgtacatcagtctcttcatatcacatatacatgtatatatataaaactcta

SEQ ID NO: 142341 - DNA, 120 bp, Artificial Sequence
  ENSG00000104412_10 (sequence is synthesized)
atgtagtataaccttgttaaataaaccatgatgatttattaaacttgcatatgaagattctaacttcattttgttatactcacagtggatatattgtttaagaactcagtttctagttaa

SEQ ID NO: 142342 - DNA, 120 bp, Artificial Sequence
  ENSG00000104412_11 (sequence is synthesized)
ctccttactggtgatagcaaagtcacagcatatgtagctgaccgaagcagattattttgactttgtttatattgtcgaattggattttgctgtacattccagtgggctatttgaattgtt

SEQ ID NO: 142343 - DNA, 120 bp, Artificial Sequence
  ENSG00000104412_12 (sequence is synthesized)
ttatctgctgtaatatccttctgatgaatcttgcttaaaatatgtcattctccaaagttcagcaatatttctttgtaaaatttttgttttgatataggacataattgagatttttacata

SEQ ID NO: 142344 - DNA, 120 bp, Artificial Sequence
  ENSG00000104412_13 (sequence is synthesized)
taaaatgccttaagataaatatgtgttacgacactttaacttttatgcaagttatatttattgaatcctttaatagtaaattacatgaaagaatattaaagaatcataaagagtagggat

SEQ ID NO: 142345 - DNA, 120 bp, Artificial Sequence
  ENSG00000104412_14 (sequence is synthesized)
aaactatccttagaaacaaaaatgttaaaattttcctattctatcattaccttagttagaattttttatttttctcttttcataataaacaaccattatgctaccttcaacagtatttga

SEQ ID NO: 142346 - DNA, 120 bp, Artificial Sequence
  ENSG00000104412_15 (sequence is synthesized)
catgtttcaacaaaatagaagagacttgaaagttaaatttcatttagacacaaatcagtttttaaaatagcaactgttcaccgcaaatatttatggtatttgtttataataaatatattt

SEQ ID NO: 142347 - DNA, 120 bp, Artificial Sequence
  ENSG00000104412_16 (sequence is synthesized)
aaatttatttttactaaaaatatacagaggcatctacagacttgtcattgctgctttggacaagtggggattgtggaggaattgacaatctagaagtgtttagaaagaaaagtattgtca

SEQ ID NO: 142348 - DNA, 120 bp, Artificial Sequence
  ENSG00000104412_17 (sequence is synthesized)
atatcagcttcttttaaccttttgaatagttctgctaataaattattctccatatctagtctaatctttcatattacagtcattttcgttttattctgccacgagtaataggcagctgat

SEQ ID NO: 142349 - DNA, 120 bp, Artificial Sequence
  ENSG00000104412_18 (sequence is synthesized)
taatatattctgtgaaagaactcttctcatctgaaggtaattctctactaatctttattaccacaaagatcccgtctttgtacacatgaaattagtaactgcattttcaacatgatgaac

SEQ ID NO: 142350 - DNA, 120 bp, Artificial Sequence
  ENSG00000104412_19 (sequence is synthesized)
catttgaaatttacattttctgtaaagaaaatagtgcctgcacgttgtttcactaccttttccccttcaaacctcctccccgtcagtcactggattagtgtttactctagcaattatatt

SEQ ID NO: 142351 - DNA, 90 bp, Artificial Sequence
  ENSG00000104412_20 (sequence is synthesized)
cgtcagtcactggattagtgtttactctagcaattatatttgtgtaataagtaattcagtgcctcttatagctgtctgccttagtttcac

SEQ ID NO: 142352 - DNA, 73 bp, Artificial Sequence
  ENSG00000104412_21 (sequence is synthesized)
tgatctacccgcctcaagtatcactttattttttcaaaattttaataacttctttccaagattttatatttgt

SEQ ID NO: 142353 - DNA, 120 bp, Artificial Sequence
  ENSG00000104412_22 (sequence is synthesized)
tcaaaattttaataacttctttccaagattttatatttgttaagcacattgccaatccttagttatttataaacttcaacttaaatgtactgataatcccattacagcaggcagttgcct

SEQ ID NO: 142354 - DNA, 120 bp, Artificial Sequence
  ENSG00000104412_23 (sequence is synthesized)
acagctattacctttatttcttctttagcagtaccttagtttgatctgatagtggcaaggatccctcttcctcaaagagattaggaccttaccccaactccagaggttgcaccttcattg

SEQ ID NO: 142355 - DNA, 120 bp, Artificial Sequence
  ENSG00000104412_24 (sequence is synthesized)
atctgaaacagaagtggtagtttaattctgtatagtctgattagtacgaggcagaactttttgcagtgaaggaaatcaaccatccattctgtctctctattgtggtagctactaaccata

SEQ ID NO: 142356 - DNA, 120 bp, Artificial Sequence
  ENSG00000104412_25 (sequence is synthesized)
tgtgatattgagtacttgatatgtgactactgcaattgagaaattgaatgaaatgaacagaaccctactgagaagggctttcctttcaaattaaaaaatcagagctttgtgtggtaacag

SEQ ID NO: 142357 - DNA, 120 bp, Artificial Sequence
  ENSG00000104412_26 (sequence is synthesized)
tcattgcctctttctcctctttctggccaacagcatgcctaaaggtgcagctgccatcaaacaaccatgaaacagcaaatgtgagaatgaaagttacatttcagagatagaactgaagga

SEQ ID NO: 142358 - DNA, 120 bp, Artificial Sequence
  ENSG00000104412_27 (sequence is synthesized)
ggattaaggggatcctgggtccctgatatggcattgttgaacacccaaatcaagatgagcaattgccaaactccccaattattaaatgagaaaaaataaactccagattgtttaagacac

SEQ ID NO: 142359 - DNA, 120 bp, Artificial Sequence
  ENSG00000104412_28 (sequence is synthesized)
gtagcaggggccagactgtgacgtgggaattaagcccagctctgcaggttgcattttcatctttttcatcttctcacgccttgagggctgcaagaaagcgtaagattgccattcgaaaag

SEQ ID NO: 142360 - DNA, 120 bp, Artificial Sequence
  ENSG00000104412_29 (sequence is synthesized)
caaattatttttacttctctattcttagtcttgttgagtcactgtgtgtaatgaattaacttctctatgcacctagaatagtactggctatgtattatccctgacaagactgaggaaata

SEQ ID NO: 142361 - DNA, 120 bp, Artificial Sequence
  ENSG00000104412_30 (sequence is synthesized)
gtcactttctgcgtggcctaacaatggcctagaaaagctggactagaccatctgttgagctccttctagctctaattttatttaattctatattttatccacaaaattagtttgatactg

SEQ ID NO: 142362 - DNA, 120 bp, Artificial Sequence
  ENSG00000104412_31 (sequence is synthesized)
tactttataaaattgggggaaggagtccttttctcatatgtgatgctaattgatttttgagaaaatatcttggtattcattttaccctaagagctgctactacctgcccattttatcttg

SEQ ID NO: 142363 - DNA, 120 bp, Artificial Sequence
  ENSG00000104412_32 (sequence is synthesized)
ctttatgcaccagtgtcacagttgtgctcaacccatttaaatgtctaagaacttttattcttagtctcaatatgaatttttggcatcatactattaataattaaaggaacacatttagaa

SEQ ID NO: 142364 - DNA, 120 bp, Artificial Sequence
  ENSG00000104412_33 (sequence is synthesized)
gagaactgtcttttgataaagtgtttaaggtagagacaaattttcccttttcttttcgagtgataaatatatattaggtaggtagtcataacacatttgttttagacatttattcaatca

SEQ ID NO: 142365 - DNA, 120 bp, Artificial Sequence
  ENSG00000104412_34 (sequence is synthesized)
tttgttcagtcttattaaatacctatcatgtgtcaagaaccaatgctaggttttgaatttaaaaatggaaagggctaaatagctgcatgatcttggatgagagtacacacacacacacac

SEQ ID NO: 142366 - DNA, 120 bp, Artificial Sequence
  ENSG00000104412_35 (sequence is synthesized)
acacacatacatatatatatgtggtccttcataaatctaaaatgctgtaattattaggtaatctgcagggtgtattttttttcctcagtccctttgggtgtgactgctgtacacattttc

SEQ ID NO: 142367 - DNA, 120 bp, Artificial Sequence
  ENSG00000104412_36 (sequence is synthesized)
atgttaccattgacatcttcagtttttcaatgtgatgtgtaatgcatataagcagcatatgtagtggttgaagagtacaggctgtctggagtggcacagcctgggattcagtttacatct

SEQ ID NO: 142368 - DNA, 120 bp, Artificial Sequence
  ENSG00000104412_37 (sequence is synthesized)
ctgtgcctcagtattctcagctctagcatgttgataataatttccttcttcctagggttttggtaggattaaatgagttaatacatgtaacacatttagaacaatgcatgacacgtaata

SEQ ID NO: 142369 - DNA, 120 bp, Artificial Sequence
  ENSG00000104412_38 (sequence is synthesized)
agcatttagtaaaagctattattagtatacatgtgtgaaacaggaaaataatttttaaaagtatatcaggcagtagtgtaaaggtagatccctttgtatactggtaaatgccaaaaataa

SEQ ID NO: 142370 - DNA, 120 bp, Artificial Sequence
  ENSG00000104412_39 (sequence is synthesized)
ctttaggtagcctctttttgttgggtagtgtcatcacttcctcactgggaagaaatcttgtaacacctgtgttcattagaatttcctgtagatagtgaggatagtcacatggcattaaac

SEQ ID NO: 142371 - DNA, 120 bp, Artificial Sequence
  ENSG00000104412_40 (sequence is synthesized)
ttttgtttattctaccacaagattaaataatagtacagtatatatcaaaaccaacttgatctgtttttcatgggcttagaaatttataacttcattataatttggtatttgacagtgaac

SEQ ID NO: 142372 - DNA, 120 bp, Artificial Sequence
  ENSG00000104412_41 (sequence is synthesized)
ttaagtaatgagagaaatctttgtaatagaatatgttggtaaatatatgcctgtgaagaatttttagtgagtagagaatatttaataaaatgtttattttctccttacacattagctgtt

SEQ ID NO: 142373 - DNA, 120 bp, Artificial Sequence
  ENSG00000104412_42 (sequence is synthesized)
tgaatatttttttaaatgatcagtcaacttccagaagttgttttatatacagcttgatccaaggtcttgaagcccttcttattagtagtgatgggatgtagtaggagtgacccagttttt

SEQ ID NO: 142374 - DNA, 120 bp, Artificial Sequence
  ENSG00000104412_43 (sequence is synthesized)
gaaatgtagtatctattgattgtttgcaggctgctttaagatttaagcctgtgtttattaatttcatgataaaatttaatgtcattgatatttatgaatttcagatgacaaatactttat

SEQ ID NO: 142375 - DNA, 120 bp, Artificial Sequence
  ENSG00000104412_44 (sequence is synthesized)
aaagctatgtaaattatattgggaataaattgtttaacatgactaaagttgtttttaaattatttcaaggtttaactaagataaaaatttgtgactttaaaaattaatttctcctcttga

SEQ ID NO: 142376 - DNA, 120 bp, Artificial Sequence
  ENSG00000104412_45 (sequence is synthesized)
acactgtaagttggcagattgtcttgaaaaaaatctaaagtttaatttaaaagataaaattaatcgaggaaataatagatacataaggaactaggtcttatatttttaatttttaattaa

SEQ ID NO: 142377 - DNA, 120 bp, Artificial Sequence
  ENSG00000104412_46 (sequence is synthesized)
gggtcacgtgactgcgtctccccgccctctcaccccgctgcctctaggttctgggaagatggcgaaggtctcagagctttacgatgtcacttgggaagtgcccagatcaggcctggcaca

SEQ ID NO: 142378 - DNA, 120 bp, Artificial Sequence
  ENSG00000104412_47 (sequence is synthesized)
taggcatttaggaaatattagttgagtgatgaagaactccaatatttactccaagaagtaaatattagtggaataatgaagtatagttccagtcatacactatactgcctcaaagaagaa

SEQ ID NO: 142379 - DNA, 120 bp, Artificial Sequence
  ENSG00000104412_48 (sequence is synthesized)
aatgaacatgaaatagaatcagattctcatgcgcattttcttgtgcatgaatatttaaccttgttctcatactacaaacaactgatgagaaacagaatgaagacatttgtctattgtctg

SEQ ID NO: 142380 - DNA, 120 bp, Artificial Sequence
  ENSG00000104413_0 (sequence is synthesized)
cttttgcactagcagtagcaaggaaggggggtgggcgctctttctttttctcttagaagagggtttagcacaggttttttcgttctcacttccacaccaccttaccgcctcccgaccccc

SEQ ID NO: 142381 - DNA, 120 bp, Artificial Sequence
  ENSG00000104413_1 (sequence is synthesized)
cctctccccctccccacctatcgtcatgacggcctctccggattacttggtggtgctttttgggatcactgctggggccaccggggccaagctaggctcggatgagaaggagttgatcct

SEQ ID NO: 142382 - DNA, 120 bp, Artificial Sequence
  ENSG00000104413_2 (sequence is synthesized)
gctgttctggaaagtcgtggatctggccaacaagaaggtgggacagttgcacgaagtgctagttagaccggatcagttggaactgacggaggactgcaaagaagaaactaaaatagacgt

SEQ ID NO: 142383 - DNA, 120 bp, Artificial Sequence
  ENSG00000104413_3 (sequence is synthesized)
cgaaagcctgtcctcggcgtcgcagctggaccaagccctccgacagtttaaccagtcagtgagcaatgaactgaatattggagtagggacttccttctgtctctgtactgatgggcagct

SEQ ID NO: 142384 - DNA, 120 bp, Artificial Sequence
  ENSG00000104413_4 (sequence is synthesized)
tcatgtcaggcaaatcctgcatcctgaggcttccaagaagaatgtactattacctgaatgcttctattccttttttgatcttcgaaaagaattcaagaaatgttgccctggttcacctga

SEQ ID NO: 142385 - DNA, 120 bp, Artificial Sequence
  ENSG00000104413_5 (sequence is synthesized)
tattgacaaactggacgttgccacaatgacagagtatttaaattttgagaagagtagttcagtctctcgatatggagcctctcaagttgaagatatggggaatataattttagcaatgat

SEQ ID NO: 142386 - DNA, 120 bp, Artificial Sequence
  ENSG00000104413_6 (sequence is synthesized)
ttcagagccttataatcacaggttttcagatccagagagagtgaattacaagtttgaaagtggaacttgcagcaagatggaacttattgatgataacaccgtagtcagggcacgaggttt

SEQ ID NO: 142387 - DNA, 120 bp, Artificial Sequence
  ENSG00000104413_7 (sequence is synthesized)
accatggcagtcttcagatcaagatattgcaagattcttcaaaggactcaatattgccaagggaggtgcagcactttgtctgaatgctcagggtcgaaggaacggagaagctctggttag

SEQ ID NO: 142388 - DNA, 120 bp, Artificial Sequence
  ENSG00000104413_8 (sequence is synthesized)
gtttgtaagtgaggagcaccgagacctagcactacagaggcacaaacatcacatggggacccggtatattgaggtttacaaagcaacaggtgaagatttccttaaaattgctggtggtac

SEQ ID NO: 142389 - DNA, 120 bp, Artificial Sequence
  ENSG00000104413_9 (sequence is synthesized)
ttccaatgaggtagcccagtttctctccaaggaaaatcaagtcattgtccgcatgcgggggctccctttcacggccacagctgaagaagtggtggccttctttggacagcattgccctat

SEQ ID NO: 142390 - DNA, 120 bp, Artificial Sequence
  ENSG00000104413_10 (sequence is synthesized)
tactgggggaaaggaaggcatcctctttgtcacctacccagatggtaggccaacaggggacgcttttgtcctctttgcctgtgaggaatatgcacagaatgcgttgaggaagcataaaga

SEQ ID NO: 142391 - DNA, 120 bp, Artificial Sequence
  ENSG00000104413_11 (sequence is synthesized)
cttgttgggtaaaagatacattgaactcttcaggagcacagcagctgaagttcagcaggtgctgaatcgattctcctcggcccctctcattccacttccaacccctcccattattccagt

SEQ ID NO: 142392 - DNA, 120 bp, Artificial Sequence
  ENSG00000104413_12 (sequence is synthesized)
actacctcagcaatttgtgccccctacaaatgttagagactgtatacgccttcgaggtcttccctatgcagccacaattgaggacatcctggatttcctgggggagttcgccacagatat

SEQ ID NO: 142393 - DNA, 120 bp, Artificial Sequence
  ENSG00000104413_13 (sequence is synthesized)
tcgtactcatggggttcacatggttttgaatcaccagggccgcccatcaggagatgcctttatccagatgaagtctgcggacagagcatttatggctgcacagaagtgtcataaaaaaaa

SEQ ID NO: 142394 - DNA, 120 bp, Artificial Sequence
  ENSG00000104413_14 (sequence is synthesized)
catgaaggacagatatgttgaagtctttcagtgttcagctgaggagatgaactttgtgttaatggggggcactttaaatcgaaatggcttatccccaccgccatgtaagttaccatgcct

SEQ ID NO: 142395 - DNA, 120 bp, Artificial Sequence
  ENSG00000104413_15 (sequence is synthesized)
agaagctgccatttaccagccctctgtgattttgaatccacgagcactgcagccctccacagcgtactacccagcaggcactcagctcttcatgaattacacagcgtactatcccagccc

SEQ ID NO: 142396 - DNA, 120 bp, Artificial Sequence
  ENSG00000104413_16 (sequence is synthesized)
cccaggttcgcctaatagtcttggctacttccctacagctgctaatcttagcggtgtccctccacagcctggcacggtggtcagaatgcagggcctggcctacaatactggagttaagga

SEQ ID NO: 142397 - DNA, 120 bp, Artificial Sequence
  ENSG00000104413_17 (sequence is synthesized)
aattcttaacttcttccaaggttaccagtatgcaaccgaggatggacttatacacacaaatgaccaggccaggactctacccaaagaatgggtttgtatttaagggccccagcagttaga

SEQ ID NO: 142398 - DNA, 120 bp, Artificial Sequence
  ENSG00000104413_18 (sequence is synthesized)
acatcctcagaaaagaagtgtttgaaagatgtatggtgatcttgaaacctccagacacaagaaaacttctagcaaattcaggggaagtttgtctacactcaggctgcagtattttcagca

SEQ ID NO: 142399 - DNA, 120 bp, Artificial Sequence
  ENSG00000104413_19 (sequence is synthesized)
aacttgattggacaaacgggcctgtgccttatcttttggtggagtgaaaaaatttgagctagtgaagccaaatcgtaacttacagcaagcagcatgcagcatacctggctctttgctgat

SEQ ID NO: 142400 - DNA, 120 bp, Artificial Sequence
  ENSG00000104413_20 (sequence is synthesized)
tgcaaataggcatttaaaatgtgaatttggaatcagatgtctccattacttccagttaaagtggcatcataggtgtttcctaagttttaagtcttggataaaaactccaccagtgtctac

SEQ ID NO: 142401 - DNA, 120 bp, Artificial Sequence
  ENSG00000104413_21 (sequence is synthesized)
catctccaccatgaactctgttaaggaagcttcatttttgtatattcccgctcttttctcttcatttccctgtcttctgcataatcatgccttcttgctaagtaattcaagcataagatc

SEQ ID NO: 142402 - DNA, 120 bp, Artificial Sequence
  ENSG00000104413_22 (sequence is synthesized)
ttggaataataaaatcacaatcttaggagaaagaataaaattgttattttcccagtctcttggccatgatgatatcttatgattaaaaacaaattaaattttaaaacacctgaagataaa

SEQ ID NO: 142403 - DNA, 120 bp, Artificial Sequence
  ENSG00000104413_23 (sequence is synthesized)
ttagaagaaattgtgcaccctccacaaaacatacaaagtttaaaagtttggatctttttctcagcaggtatcagttgtaaataatgaattaggggccaaaatgcaaaacgaaaaatgaag

SEQ ID NO: 142404 - DNA, 120 bp, Artificial Sequence
  ENSG00000104413_24 (sequence is synthesized)
cagctacatgtagttagtaatttctagtttgaactgtaattgaatattgtggcttcatatgtattattttatattgtacttttttcattattgatggtttggactttaataagagaaatt

SEQ ID NO: 142405 - DNA, 120 bp, Artificial Sequence
  ENSG00000104413_25 (sequence is synthesized)
ccatagtttttaatatcccagaagtgagacaatttgaacagtgtattctagaaaacaatacactaactgaacagaagtgaatgcttatatatattatgatagccttaaacctttttcctc

SEQ ID NO: 142406 - DNA, 120 bp, Artificial Sequence
  ENSG00000104413_26 (sequence is synthesized)
taatgccttaactgtcaaataattataaccttttaaagcataggactatagtcagcatgctagactgagaggtaaacactgatgcaattagaacaggtactgatgctgtcagtgtttaac

SEQ ID NO: 142407 - DNA, 120 bp, Artificial Sequence
  ENSG00000104413_27 (sequence is synthesized)
actatgtttagctgtgtttatgctataaaagtgcaatattagacactagctagtactgctgcctcatgtaactccaaagaaaacaggatttcattaagtgcattgaatgtggatatttct

SEQ ID NO: 142408 - DNA, 120 bp, Artificial Sequence
  ENSG00000104413_28 (sequence is synthesized)
ctaagttactcatattgtcctttgcttgaatgcaatgccgtgcagatttatgaggctgctatttttattttctgtgcattactttaacaccttaaagggagaagcaaacatttccttctt

SEQ ID NO: 142409 - DNA, 120 bp, Artificial Sequence
  ENSG00000104413_29 (sequence is synthesized)
cagctgactggcaatggccctttaactgcaataggaagaaaaaaaaaaaggtttgtgtgaaaattggtgataactggcacttaagatcgaaaagaaatttctgtatacttgatgccttaa

SEQ ID NO: 142410 - DNA, 120 bp, Artificial Sequence
  ENSG00000104413_30 (sequence is synthesized)
gatgcccaaagctgcccaaagctctgaaagactttaagataggcagtaatgcttactacaatactactgagtttttgtagagttaacatttgataataaaacttgcctgtttaatctcaa

SEQ ID NO: 142411 - DNA, 120 bp, Artificial Sequence
  ENSG00000104413_31 (sequence is synthesized)
gacgttgccacaatgacagagtgtatcctttaaatcattactcaagaatcatttgaaaagatagttccagaaaagagcctccctctgttacccaggctggagtgaaatggcgtgatctcg

SEQ ID NO: 142412 - DNA, 120 bp, Artificial Sequence
  ENSG00000104413_32 (sequence is synthesized)
aaggtaattcaagaaactttcaaacattttaaattttgtcagcatatggataaaattggcctatccaaaatttgtttactctgctgagaaactaaaatacaattatagacatctttgaaa

SEQ ID NO: 142413 - DNA, 120 bp, Artificial Sequence
  ENSG00000104413_33 (sequence is synthesized)
attggccaactgccttggagccatttcagtcctccgcaacttagctcaggtggagaggccggcgctaccgagccgggttctttgcccgtcgggggacgctccgccgagacgaggtggggt

SEQ ID NO: 142414 - DNA, 120 bp, Artificial Sequence
  ENSG00000104413_34 (sequence is synthesized)
ctcggaggccccggggtccacttccagggcttttccgacctatcgggtggggggtggggcggggggcaggaacgcaccggaaccgatggcgagtcgagagctttgattctgcgtccggac

SEQ ID NO: 142415 - DNA, 120 bp, Artificial Sequence
  ENSG00000104413_35 (sequence is synthesized)
cccaagagaggcgcgggccgccccagcaggggagcgagggaggagggtgcagaaagaggctccgaaattgggggaaactgacccgtgcttctctaccttcggaggtgggacagttgcacg

SEQ ID NO: 142416 - DNA, 120 bp, Artificial Sequence
  ENSG00000104413_36 (sequence is synthesized)
agcaggttggttttaaaaacaagtatgttgtacctttgcattaatttctgttctttatctctgaaaatagtcctacattgctcattatgttaaaataaaactggcaaaatactaaaagtg

SEQ ID NO: 142417 - DNA, 120 bp, Artificial Sequence
  ENSG00000104413_37 (sequence is synthesized)
aactaaacacatgatactacaaagggtaggagtggtgcagaacgccaactactgtgtaaaccatggaaacttccttggctagtgctgtactcccaaagcccttgccatgtaaatgccaac

SEQ ID NO: 142418 - DNA, 120 bp, Artificial Sequence
  ENSG00000104413_38 (sequence is synthesized)
tatgtctgtgtgaaataataacttggaccatcttaaggctttttttccacaaagtccttgtggaatttgaaatcatttttgtggctgctgagaatgacatttagagactataacatttcc

SEQ ID NO: 142419 - DNA, 120 bp, Artificial Sequence
  ENSG00000104415_0 (sequence is synthesized)
atatctggtgctcctgatgggccggccagtctgggcccagctcccccgagaggtggtcggatcctctgggctgctcggtcgatgcctgtgccactgacgtccaggcatgaggtggttcct

SEQ ID NO: 142420 - DNA, 120 bp, Artificial Sequence
  ENSG00000104415_1 (sequence is synthesized)
gccctggacgctggcagcagtgacagcagcagccgccagcaccgtcctggccacggccctctctccagcccctacgaccatggactttaccccagctccactggaggacacctcctcacg

SEQ ID NO: 142421 - DNA, 120 bp, Artificial Sequence
  ENSG00000104415_2 (sequence is synthesized)
cccccaattctgcaagtggccatgtgagtgcccgccatccccaccccgctgcccgctgggggtcagcctcatcacagatggctgtgagtgctgtaagatgtgcgctcagcagcttgggga

SEQ ID NO: 142422 - DNA, 120 bp, Artificial Sequence
  ENSG00000104415_3 (sequence is synthesized)
caactgcacggaggctgccatctgtgacccccaccggggcctctactgtgactacagcggggaccgcccgaggtacgcaataggagtgtgtgcacaggtggtcggtgtgggctgcgtcct

SEQ ID NO: 142423 - DNA, 120 bp, Artificial Sequence
  ENSG00000104415_4 (sequence is synthesized)
ggatggggtgcgctacaacaacggccagtccttccagcctaactgcaagtacaactgcacgtgcatcgacggcgcggtgggctgcacaccactgtgcctccgagtgcgccccccgcgtct

SEQ ID NO: 142424 - DNA, 120 bp, Artificial Sequence
  ENSG00000104415_5 (sequence is synthesized)
ctggtgcccccacccgcggcgcgtgagcatacctggccactgctgtgagcagtgggtatgtgaggacgacgccaagaggccacgcaagaccgcaccccgtgacacaggagccttcgatgc

SEQ ID NO: 142425 - DNA, 120 bp, Artificial Sequence
  ENSG00000104415_6 (sequence is synthesized)
tgtgggtgaggtggaggcatggcacaggaactgcatagcctacacaagcccctggagcccttgctccaccagctgcggcctgggggtctccactcggatctccaatgttaacgcccagtg

SEQ ID NO: 142426 - DNA, 120 bp, Artificial Sequence
  ENSG00000104415_7 (sequence is synthesized)
ctggcctgagcaagagagccgcctctgcaacttgcggccatgcgatgtggacatccatacactcattaaggcagggaagaagtgtctggctgtgtaccagccagaggcatccatgaactt

SEQ ID NO: 142427 - DNA, 120 bp, Artificial Sequence
  ENSG00000104415_8 (sequence is synthesized)
cacacttgcgggctgcatcagcacacgctcctatcaacccaagtactgtggagtttgcatggacaataggtgctgcatcccctacaagtctaagactatcgacgtgtccttccagtgtcc

SEQ ID NO: 142428 - DNA, 120 bp, Artificial Sequence
  ENSG00000104415_9 (sequence is synthesized)
tgatgggcttggcttctcccgccaggtcctatggattaatgcctgcttctgtaacctgagctgtaggaatcccaatgacatctttgctgacttggaatcctaccctgacttctcagaaat

SEQ ID NO: 142429 - DNA, 120 bp, Artificial Sequence
  ENSG00000104415_10 (sequence is synthesized)
tgccaactaggcaggcacaaatcttgggtcttggggactaacccaatgcctgtgaagcagtcagcccttatggccaataacttttcaccaatgagccttagttaccctgatctggaccct

SEQ ID NO: 142430 - DNA, 120 bp, Artificial Sequence
  ENSG00000104415_11 (sequence is synthesized)
tggcctccatttctgtctctaaccattcaaatgacgcctgatggtgctgctcaggcccatgctatgagttttctccttgatatcattcagcatctactctaaagaaaaatgcctgtctct

SEQ ID NO: 142431 - DNA, 120 bp, Artificial Sequence
  ENSG00000104415_12 (sequence is synthesized)
agctgttctggactacacccaagcctgatccagcctttccaagtcactagaagtcctgctggatcttgcctaaatcccaagaaatggaatcaggtagacttttaatatcactaatttctt

SEQ ID NO: 142432 - DNA, 120 bp, Artificial Sequence
  ENSG00000104415_13 (sequence is synthesized)
ctttagatgccaaaccacaagactctttgggtccattcagatgaatagatggaatttggaacaatagaataatctattatttggagcctgccaagaggtactgtaatgggtaattctgac

SEQ ID NO: 142433 - DNA, 120 bp, Artificial Sequence
  ENSG00000104415_14 (sequence is synthesized)
gtcagcgcaccaaaactatcctgattccaaatatgtatgcacctcaaggtcatcaaacatttgccaagtgagttgaatagttgcttaattttgatttttaatggaaagttgtatccatta

SEQ ID NO: 142434 - DNA, 120 bp, Artificial Sequence
  ENSG00000104415_15 (sequence is synthesized)
acctgggcattgttgaggttaagtttctcttcacccctacactgtgaagggtacagattaggtttgtcccagtcagaaataaaatttgataaacattcctgttgatgggaaaagccccca

SEQ ID NO: 142435 - DNA, 120 bp, Artificial Sequence
  ENSG00000104415_16 (sequence is synthesized)
gttaatactccagagacagggaaaggtcagcccgtttcagaaggaccaattgactctcacactgaatcagctgctgactggcagggctttgggcagttggccaggctcttccttgaatct

SEQ ID NO: 142436 - DNA, 120 bp, Artificial Sequence
  ENSG00000104415_17 (sequence is synthesized)
tctcccttgtcctgcttggggttcataggaattggtaaggcctctggactggcctgtctggcccctgagagtggtgccctggaacactcctctactcttacagagccttgagagacccag

SEQ ID NO: 142437 - DNA, 120 bp, Artificial Sequence
  ENSG00000104415_18 (sequence is synthesized)
ctgcagaccatgccagacccactgaaatgaccaagacaggttcaggtaggggtgtgggtcaaaccaagaagtgggtgcccttggtagcagcctggggtgacctctagagctggaggctgt

SEQ ID NO: 142438 - DNA, 120 bp, Artificial Sequence
  ENSG00000104415_19 (sequence is synthesized)
gggactccaggggcccccgtgttcaggacacatctattgcagagactcatttcacagcctttcgttctgctgaccaaatggccagttttctggtaggaagatggaggtttaccggttgtt

SEQ ID NO: 142439 - DNA, 120 bp, Artificial Sequence
  ENSG00000104415_20 (sequence is synthesized)
tagaaacagaaatagacttaataaaggtttaaagctgaagaggttgaagctaaaaggaaaaggttgttgttaatgaatatcaggctattatttattgtattaggaaaatataatatttac

SEQ ID NO: 142440 - DNA, 120 bp, Artificial Sequence
  ENSG00000104415_21 (sequence is synthesized)
tgtgccagacattgctctcagtgctttgcatgtattagctcactgaatcttcacgacaatgttgagaagttcccattattatttctgttcttacaaatgtgaaacggaagctcatagagg

SEQ ID NO: 142441 - DNA, 120 bp, Artificial Sequence
  ENSG00000104415_22 (sequence is synthesized)
tgagaaaactcaaccagagtcacccagttggtgactgggaaagttaggattcagatcgaaattggactgtctttataacccatattttccccctgtttttagagcttccaaatgtgtcag

SEQ ID NO: 142442 - DNA, 120 bp, Artificial Sequence
  ENSG00000104415_23 (sequence is synthesized)
aataggaaaacattgcaataaatggcttgattttttaatgtcatttttccctcttatagtctttctagctccttttcaaaagacgagaatatctgattttctgataatttaggtgcttaa

SEQ ID NO: 142443 - DNA, 120 bp, Artificial Sequence
  ENSG00000104415_24 (sequence is synthesized)
gcatccaaaatacatgggacacacaaaaatccaggaatcccctgtagcttattccctctttcccatcggaaccagctctcatcacacatttaaaagatgattctgtttacccaatgctgc

SEQ ID NO: 142444 - DNA, 120 bp, Artificial Sequence
  ENSG00000104415_25 (sequence is synthesized)
atattgaatgttgtgtagttattcacagggaattctgtgcagtgtgcagagagattcctaaacgggaaaaggactgggaatacatcctccttactgtgacctccccaaaacctagtccag

SEQ ID NO: 142445 - DNA, 120 bp, Artificial Sequence
  ENSG00000104415_26 (sequence is synthesized)
tgcaaggtatacagtggtgctcattaaatacttgatgaatacaggaagctgtgcatgtgttcctacttttattcgaagctctcttcttccaaagctacatgaaaatagaattttaacagt

SEQ ID NO: 142446 - DNA, 120 bp, Artificial Sequence
  ENSG00000104415_27 (sequence is synthesized)
caaaattttatattaagtgccttagcaaaagagacatttaatatttcaaagaaatgcatatgtatgtatacatatatttgtgtatgcgtatgcaagaattcttgtataaagagaattcac

SEQ ID NO: 142447 - DNA, 120 bp, Artificial Sequence
  ENSG00000104415_28 (sequence is synthesized)
tccatgaatgatctcttctgtaagtcagtgtgaatcatgttagattttctgagagtgaaaacacctgccatctacaaattacaaggctggataacagctcactccatttgaaattcagtg

SEQ ID NO: 142448 - DNA, 120 bp, Artificial Sequence
  ENSG00000104415_29 (sequence is synthesized)
gaaacccaagagctaggttcttactgaatttgcatctcaatttgggaaactgaacttagctttcaaagatcataggaagtctggttggagaaactagggattattctggcaatgggtgca

SEQ ID NO: 142449 - DNA, 120 bp, Artificial Sequence
  ENSG00000104415_30 (sequence is synthesized)
ggaaggtggtcagaataacccagtcgccattggttttgagaaacggaactatcttatgcagagcccggagggcaagtctcagacccatgggttgaagccatggagaaggaaatttggatc

SEQ ID NO: 142450 - DNA, 120 bp, Artificial Sequence
  ENSG00000104415_31 (sequence is synthesized)
caatgtaatgaagcgctttctaagtcagaatttccctgcaatggtgtggcctgattcaataaaaattaagaataataaatataatggaaaaaaatctccactgattgagtgtttacttgg

SEQ ID NO: 142451 - DNA, 120 bp, Artificial Sequence
  ENSG00000104415_32 (sequence is synthesized)
tgccaagcactatgctaagttgttcattattttatttaattgttacagcaattttgagtatgcatctttcactattttataagtggaaaagagaagtgcccccaaaaagttagagctcaa

SEQ ID NO: 142452 - DNA, 120 bp, Artificial Sequence
  ENSG00000104415_33 (sequence is synthesized)
acagcagcttattctaccagcccctgctcttgcggaggcctctggaaaagacctgaatgacacctattggagaattacatctacaaggggcttcaaacagaccaaatagatcatcacctc

SEQ ID NO: 142453 - DNA, 120 bp, Artificial Sequence
  ENSG00000104415_34 (sequence is synthesized)
tgtggtcccttgttaactatatgttctgagacaaaggaaagctaccctaagggttagttaacctttgctgaggaaatttacattcatacttagagtgaattactcaggtgtgcttaggtg

SEQ ID NO: 142454 - DNA, 120 bp, Artificial Sequence
  ENSG00000104415_35 (sequence is synthesized)
tgcaaaagggaaggagacctgaattcaccaagttaaatcttgctaaaccttatcataagcattttttgagcgcttagcatacaccaagccttgtggaaggtgctttcctgccatatctca

SEQ ID NO: 142455 - DNA, 120 bp, Artificial Sequence
  ENSG00000104415_36 (sequence is synthesized)
tttaatcctcacagcaaacctatagaatatggcattatcatctgagtctcacagaagtttagtcgtgtactcaaggtcttaccagctagtgaacagcagaccaagactggaaacccagga

SEQ ID NO: 142456 - DNA, 120 bp, Artificial Sequence
  ENSG00000104415_37 (sequence is synthesized)
tagtctgatacctgagccatctcttcttgtgctacgcctagttattctgtcccccaaatcaaaaggcatgacctttataagaggcgctttactgacaatagctgcaattttaactttgaa

SEQ ID NO: 142457 - DNA, 120 bp, Artificial Sequence
  ENSG00000104415_38 (sequence is synthesized)
aatgattcagaattatcaaagatagtagattcgaatgacatgattgtctataatctcgctagccttgtactgtgtgtgcatagcaattacagggaagtaatctagctcctgactattatg

SEQ ID NO: 142458 - DNA, 120 bp, Artificial Sequence
  ENSG00000104415_39 (sequence is synthesized)
ttgaactatgtcgctgctttttacaaacttgtcttgatccaaagcagtcacaatgataaccctgcatatctgggaatcataagtcaactatgtatccctgtgtgtgtatatatatgtatg

SEQ ID NO: 142459 - DNA, 120 bp, Artificial Sequence
  ENSG00000104415_40 (sequence is synthesized)
tatgtatctattttcaaactgtgatttaatatttaaatattcctactgccatttttgtgactgaaaaactacacatgaggaaacgtcttagaattttccaatagaggaaaaataacactt

SEQ ID NO: 142460 - DNA, 120 bp, Artificial Sequence
  ENSG00000104415_41 (sequence is synthesized)
gggcaatctgtcatgtttcacaacagttctcatttttctcatgatttgtgtagcgtggaatgtgtttgctcaatgtgaagggttttcattgctcaatttctctgtgtaagtcttttcctt

SEQ ID NO: 142461 - DNA, 120 bp, Artificial Sequence
  ENSG00000104415_42 (sequence is synthesized)
aaggtaataaaccatcagcaaagtcacatactggagttggtggcttttcttgtacaggcagttgttatgagacaatgatggagcattgagcatgttcaataaatgtgcagatggtggaaa

SEQ ID NO: 142462 - DNA, 120 bp, Artificial Sequence
  ENSG00000104419_0 (sequence is synthesized)
cccagctggtgctgaagctcgtcagttcaccatccgccctcggcttccgcggggcgctgggccgccagcctcggcaccgtcctttcctttctccctcgcgttaggcaggtgacagcaggg

SEQ ID NO: 142463 - DNA, 120 bp, Artificial Sequence
  ENSG00000104419_1 (sequence is synthesized)
acatgtctcgggagatgcaggatgtagacctcgctgaggtgaagcctttggtggagaaaggggagaccatcaccggcctcctgcaagagtttgatgtccaggagcaggacatcgagactt

SEQ ID NO: 142464 - DNA, 120 bp, Artificial Sequence
  ENSG00000104419_2 (sequence is synthesized)
tacatggctctgttcacgtcacgctgtgtgggactcccaagggaaaccggcctgtcatcctcacctaccatgacatcggcatgaaccacaaaacctgctacaaccccctcttcaactacg

SEQ ID NO: 142465 - DNA, 120 bp, Artificial Sequence
  ENSG00000104419_3 (sequence is synthesized)
aggacatgcaggagatcacccagcactttgccgtctgccacgtggacgcccctggccagcaggacggcgcagcctccttccccgcagggtacatgtacccctccatggatcagctggctg

SEQ ID NO: 142466 - DNA, 120 bp, Artificial Sequence
  ENSG00000104419_4 (sequence is synthesized)
aaatgcttcctggagtccttcaacagtttgggctgaaaagcattattggcatgggaacaggagcaggcgcctacatcctaactcgatttgctctaaacaaccctgagatggtggagggcc

SEQ ID NO: 142467 - DNA, 120 bp, Artificial Sequence
  ENSG00000104419_5 (sequence is synthesized)
ttgtccttatcaacgtgaacccttgtgcggaaggctggatggactgggccgcctccaagatctcaggatggacccaagctctgccggacatggtggtgtcccacctttttgggaaggaag

SEQ ID NO: 142468 - DNA, 120 bp, Artificial Sequence
  ENSG00000104419_6 (sequence is synthesized)
aaatgcagagtaacgtggaagtggtccacacctaccgccagcacattgtgaatgacatgaaccccggcaacctgcacctgttcatcaatgcctacaacagccggcgcgacctggagattg

SEQ ID NO: 142469 - DNA, 120 bp, Artificial Sequence
  ENSG00000104419_7 (sequence is synthesized)
agcgaccaatgccgggaacccacacagtcaccctgcagtgccctgctctgttggtggttggggacagctcgcctgcagtggatgccgtggtggagtgcaactcaaaattggacccaacaa

SEQ ID NO: 142470 - DNA, 120 bp, Artificial Sequence
  ENSG00000104419_8 (sequence is synthesized)
agaccactctcctcaagatggcggactgtggcggcctcccgcagatctcccagccggccaagctcgctgaggccttcaagtacttcgtgcagggcatgggatacatgccctcggctagca

SEQ ID NO: 142471 - DNA, 120 bp, Artificial Sequence
  ENSG00000104419_9 (sequence is synthesized)
tgacccgcctgatgcggtcccgcacagcctctggttccagcgtcacttctctggatggcacccgcagccgctcccacaccagcgagggcacccgaagccgctcccacaccagcgagggca

SEQ ID NO: 142472 - DNA, 120 bp, Artificial Sequence
  ENSG00000104419_10 (sequence is synthesized)
cccgcagccgctcgcacaccagcgagggggcccacctggacatcacccccaactcgggtgctgctgggaacagcgccgggcccaagtccatggaggtctcctgctaggcggcctgcccag

SEQ ID NO: 142473 - DNA, 120 bp, Artificial Sequence
  ENSG00000104419_11 (sequence is synthesized)
ctgccgcccccggactctgatctctgtagtggccccctcctccccggccccttttcgccccctgcctgccatactgcgcctaactcggtattaatccaaagcttattttgtaagagtgag

SEQ ID NO: 142474 - DNA, 120 bp, Artificial Sequence
  ENSG00000104419_12 (sequence is synthesized)
aatgaggtctattacgtgggtgccctctccaaaggcggggtggcggtggaccaaaggaaggaagcaagcatctccgcatcgcatcctcttccattaaccagtggccggttgccactctcc

SEQ ID NO: 142475 - DNA, 120 bp, Artificial Sequence
  ENSG00000104419_13 (sequence is synthesized)
tcccctccctcagagacaccaaactgccaaaaacaagacgcgtagcagcacacacttcacaaagccaagcctaggccgccctgagcatcctggttcaaacgggtgcctggtcagaaggcc

SEQ ID NO: 142476 - DNA, 120 bp, Artificial Sequence
  ENSG00000104419_14 (sequence is synthesized)
agccgcccacttcccgtttcctctttaactgaggagaagctgatccagtttccggaaacaaaatccttttctcatttggggaggggggtaatagtgacatgcaggcacctcttttaaaca

SEQ ID NO: 142477 - DNA, 120 bp, Artificial Sequence
  ENSG00000104419_15 (sequence is synthesized)
ggcaaaacaggaagggggaaaaggtgggattcatgtcgaggctagaggcatttggaacaacaaatctacgtagttaacttgaagaaaccgatttttaaagttggtgcatctagaaagctt

SEQ ID NO: 142478 - DNA, 120 bp, Artificial Sequence
  ENSG00000104419_16 (sequence is synthesized)
tgaatgcagaagcaaacaagcttgatttttctagcatcctcttaatgtgcagcaaaagcaggcgacaaaatctcctggctttacagacaaaaatatttcagcaaacgttgggcatcatgg

SEQ ID NO: 142479 - DNA, 120 bp, Artificial Sequence
  ENSG00000104419_17 (sequence is synthesized)
tttttgaaggctttagttctgctttctgcctctcctccacagccccaacctcccacccctgatacatgagccagtgattattcttgttcagggagaagatcatttagatttgttttgcat

SEQ ID NO: 142480 - DNA, 120 bp, Artificial Sequence
  ENSG00000104419_18 (sequence is synthesized)
tccttagaatggagggcaacattccacagctgccctggctgtgatgagtgtccttgcaggggccggagtaggagcactggggtgggggtggaattggggttactcgatgtaagggattcc

SEQ ID NO: 142481 - DNA, 120 bp, Artificial Sequence
  ENSG00000104419_19 (sequence is synthesized)
ttgttgttgtgttgagatccagtgcagttgtgatttctgtggatcccagcttggttccaggaattttgtgtgattggcttaaatccagttttcaatcttcgacagctgggctggaacgtg

SEQ ID NO: 142482 - DNA, 120 bp, Artificial Sequence
  ENSG00000104419_20 (sequence is synthesized)
aactcagtagctgaacctgtctgacccggtcacgttcttggatcctcagaactctttgctcttgtcggggtgggggtgggaactcacgtggggagcggtggctgagaaaatgtaaggatt

SEQ ID NO: 142483 - DNA, 120 bp, Artificial Sequence
  ENSG00000104419_21 (sequence is synthesized)
ctggaatacatattccatgggactttccttccctctcctgcttcctcttttcctgctccctaacctttcgccgaatggggcagcaccactgacgtttctgggcggccagtgcggctgcca

SEQ ID NO: 142484 - DNA, 120 bp, Artificial Sequence
  ENSG00000104419_22 (sequence is synthesized)
ggttcctgtactactgccttgtacttttcattttggctcaccgtggattttctcataggaagtttggtcagagtgaattgaatattgtaagtcagccactgggacccgaggatttctggg

SEQ ID NO: 142485 - DNA, 120 bp, Artificial Sequence
  ENSG00000104419_23 (sequence is synthesized)
accccgcagttgggaggaggaagtagtccagccttccaggtggcgtgagaggcaatgactcgttacctgccgcccatcaccttggaggccttccctggccttgagtagaaaagtcgggga

SEQ ID NO: 142486 - DNA, 120 bp, Artificial Sequence
  ENSG00000104419_24 (sequence is synthesized)
tcggggcaagagaggctgagtacggatgggaaactattgtgcacaagtctttccagaggagtttcttaatgagatatttgtatttatttccagaccaataaatttgtaactttgcagcgg

SEQ ID NO: 142487 - DNA, 120 bp, Artificial Sequence
  ENSG00000104419_25 (sequence is synthesized)
acacaaacgcctcctccgggcagggcacacgcgcccgctgcacaggccgaggccctggactcggaggggactgcagagccgacccacaacccgggccccgatgcccctcccggccgcgcc

SEQ ID NO: 142488 - DNA, 80 bp, Artificial Sequence
  ENSG00000104419_26 (sequence is synthesized)
cctacgactgcttgcgcaacaggcggcggctccagtgggcgcccgccgcgcgctgccggagcccagcccagcccggcgcg

SEQ ID NO: 142489 - DNA, 120 bp, Artificial Sequence
  ENSG00000104419_27 (sequence is synthesized)
gcgacgcggagcagaaaggggccgcccgtgcggtgccgctggagcgccaggaccgccctttgtagccccgcgtactccaggagtaagcgccccggagctgcaagtgcgcggtcaccccgg

SEQ ID NO: 142490 - DNA, 120 bp, Artificial Sequence
  ENSG00000104419_28 (sequence is synthesized)
ggcgcgggcgcgagggggctttgggtgcagacaccgctgaagtggggggttcaattacggaaagggaggaaaaaaagacagggtcccattcatctcccccctagctggggattggggttc

SEQ ID NO: 142491 - DNA, 120 bp, Artificial Sequence
  ENSG00000104419_29 (sequence is synthesized)
tggaggtcgggaagggggcgatgagacggtccgaaaaaataccaggatagcgtttcctggcgtcgtctccgaatcccagctggcgccgctggcaggggtgcgcgctggacgtgggtgcag

SEQ ID NO: 142492 - DNA, 120 bp, Artificial Sequence
  ENSG00000104419_30 (sequence is synthesized)
gcatcttcctgccccttggctttgatctggactgaccactaaaattaaggttgcaatttagagatgaggcaagaaattagctcgtcactctgtgaacactgttcttcacacagtctctga

SEQ ID NO: 142493 - DNA, 120 bp, Artificial Sequence
  ENSG00000104419_31 (sequence is synthesized)
ctagcagtagctgggtctttattcagcacttatttgctgtgcatcttgtgcatgggcctctgaaaataaggaactggatatagtcccaggccctgcatttgggggatcaggtccaggagg

SEQ ID NO: 142494 - DNA, 120 bp, Artificial Sequence
  ENSG00000104419_32 (sequence is synthesized)
gaactggagacaggaactgagtttctatcaagggggatgtccttgaggcctgcatgtaggggggagtccagcaatgccaccctgcacccagggaagtggggttttgctgaccttgttaac

SEQ ID NO: 142495 - DNA, 120 bp, Artificial Sequence
  ENSG00000104419_33 (sequence is synthesized)
gaaacaaaatgaatgtgctttgccaccgagacacctaatttttttctcatcttacttttttctcttctctccctcactgctgttcttcagacaaaacctgctacaaccccctcttcaact

SEQ ID NO: 142496 - DNA, 120 bp, Artificial Sequence
  ENSG00000104419_34 (sequence is synthesized)
tcttcatagtaactctaggaggtgagaatttttatcaccgtttcagaggtaaggactcggtgtggctaaggggattgtccagggtcacataaagctaggcagtagaacggggactggatg

SEQ ID NO: 142497 - DNA, 120 bp, Artificial Sequence
  ENSG00000104419_35 (sequence is synthesized)
cagcttgctttgactttgtggttcgtggacctgaccacccgtgcccctggggctcctgtccagggtgggagacaggcaggcctggcaagcagggtaggctgcctggaggagaagggacct

SEQ ID NO: 142498 - DNA, 120 bp, Artificial Sequence
  ENSG00000104419_36 (sequence is synthesized)
gtgctgtcttgggaagctctgtcctggctggtgtcctaaggttccttgtttatcttttaaaaattatcattgtggtgtttttgtttttgtttttttccctgtaaaggcctcagtgttggc

SEQ ID NO: 142499 - DNA, 120 bp, Artificial Sequence
  ENSG00000104419_37 (sequence is synthesized)
caaggagagggggaggtcattccagttgaaataggacagagtctttcaagctgaggtgatcgcagcttctcattctgcaagtgcatttttgcccaattttgggtggctgccagggaccga

SEQ ID NO: 142500 - DNA, 120 bp, Artificial Sequence
  ENSG00000104419_38 (sequence is synthesized)
tggtttgaaggggccctgcctcttgccccatcccctgccctgtaccagccactgtgattttgcatttgttctttgaacattcctccagaatgcaggagcccttccgtccagcctgtatga

SEQ ID NO: 142501 - DNA, 120 bp, Artificial Sequence
  ENSG00000104419_39 (sequence is synthesized)
cgttctggagtggaacacactccctgttttttatttgattttccagcaaaggaagtgacattccagtcaacccgctgggcttcatgatagctgtcctgagtgagactcgaaggtctgggg

SEQ ID NO: 142502 - DNA, 120 bp, Artificial Sequence
  ENSG00000104419_40 (sequence is synthesized)
atgtcgaccactggctaatgtgaagcctgaggattgtctttaatagctgtactattcccttcagtacagctttaatagctgtactattcccttctttttcaactccagcctttcgattac

SEQ ID NO: 142503 - DNA, 120 bp, Artificial Sequence
  ENSG00000104419_41 (sequence is synthesized)
caggcattggtattagatactgtgatgtgtgcagttacttcttgcagtccttcccttgaccttgtggccttgaagttcctggcactcccagttccagattagaagtctgagacccagagg

SEQ ID NO: 142504 - DNA, 120 bp, Artificial Sequence
  ENSG00000104419_42 (sequence is synthesized)
tatgcagactgcccagtgccacacagctaggctgtggcaggcaagggccagccaaagacccttaggtctagagcttctctcctactcatttttgcctaatgcttaggtcagcacacattt

SEQ ID NO: 142505 - DNA, 120 bp, Artificial Sequence
  ENSG00000104419_43 (sequence is synthesized)
atggagcttctgctgtatactaggacttatagagctcctgctgcaaacctagtcactggggagaggtaggaaaagaagattgtcagtgtctttggtaatatcagtatacttagaaagggg

SEQ ID NO: 142506 - DNA, 120 bp, Artificial Sequence
  ENSG00000104419_44 (sequence is synthesized)
aaactggcttggagatgagagaggagggatagttgggagccaagcatatcttggggtatagactggggagctcagtgtgtttttagaagaggtgaatggatggccctctttgctgaggac

SEQ ID NO: 142507 - DNA, 120 bp, Artificial Sequence
  ENSG00000104419_45 (sequence is synthesized)
agtgggcaaggtccagtgagtgtgcttagaactgggaagatgaggggaagggtaagcgctgggcggcggtgggcaagatggacgagattaaacgggagcgaggatttcagcgagagcttt

SEQ ID NO: 142508 - DNA, 120 bp, Artificial Sequence
  ENSG00000104419_46 (sequence is synthesized)
cttggggaatggagtgaaattatctgtagggcctagcatagtgcctggcacgtagcaagctgcaagtgatggttgccacggagacaccagcagccttgcctggtggggctggagtgttcc

SEQ ID NO: 142509 - DNA, 120 bp, Artificial Sequence
  ENSG00000104419_47 (sequence is synthesized)
ctacccacggtccaccctgttcctcctttgtaaggcaggacaaggcagggcagggcagcgggcggatgggcatcctttcggaaaaaattcatagagcgcagagggccttggctgtggtgt

SEQ ID NO: 142510 - DNA, 120 bp, Artificial Sequence
  ENSG00000104419_48 (sequence is synthesized)
gtcggggcatgtgtcggaattggaagtgctctgtcctgagccaggtttggatgagcaattctgtgtccccctggccagcttcagctttctgggaggaaacagttaggtgtgtggagggca

SEQ ID NO: 142511 - DNA, 120 bp, Artificial Sequence
  ENSG00000104419_49 (sequence is synthesized)
tttcctgttgaggaagcaaaggcgcaaagagatcctgtgttctccccaaggccacacagctagaaagtggcagagcatgatttggatcctgcttgtctaactccaggctgtgagctggga

SEQ ID NO: 142512 - DNA, 120 bp, Artificial Sequence
  ENSG00000104419_50 (sequence is synthesized)
cagagggcggatctgtggaaattctttgaagactgtgaagctctgtggaagtggctaacaaagttgcttacattcaaggtggagcatgccatagtcaagtcatgagctttgggaagtgga

SEQ ID NO: 142513 - DNA, 120 bp, Artificial Sequence
  ENSG00000104419_51 (sequence is synthesized)
ggatacattggaagcatcattcaggaactcactcgttcttattttgcagttatagtttgttagacacatacagccttttttccagaagtgctgtcccaggactaggacagaccctggcga

SEQ ID NO: 142514 - DNA, 120 bp, Artificial Sequence
  ENSG00000104419_52 (sequence is synthesized)
gttgtaactcggctgaacagcagccacactcagtgctgtgggcctgtcagccatggtccggccctgacatgactagtggctcttctgaccctactgcttggaactataattcgtgtgtcc

SEQ ID NO: 142515 - DNA, 120 bp, Artificial Sequence
  ENSG00000104419_53 (sequence is synthesized)
tcccttactaggaagttattgaacttctgatcccttttatcatttccttaaactgtttgcccatgtatagtaagagtatgcttggtaagctgactgcagtcctagcattggccttagcca

SEQ ID NO: 142516 - DNA, 120 bp, Artificial Sequence
  ENSG00000104419_54 (sequence is synthesized)
tgattagctctagcaaggcgaggctggcaggtttgatttccatgcctcaggctcaggcaggatccacatccccaggtgccctcttccaacagaagctatctgctagtggggctcctgcct

SEQ ID NO: 142517 - DNA, 120 bp, Artificial Sequence
  ENSG00000104419_55 (sequence is synthesized)
ttctagcctgctttccccgacggaagttgcaggcaaaggttgtcattggagacagccatggagacagccgcggggcagtcctgctttaccctgcacggtgtgaattgtggctcccatttg

SEQ ID NO: 142518 - DNA, 120 bp, Artificial Sequence
  ENSG00000104419_56 (sequence is synthesized)
tcttggtcccgccagggtttggatttctgctttgagagtgtgttctggagagaaaggaagtgaatgctagacctcatctttctccccaaatcggcttctattaccagaaagctgaagcct

SEQ ID NO: 142519 - DNA, 120 bp, Artificial Sequence
  ENSG00000104419_57 (sequence is synthesized)
cctgcaggtcttggggggaaaataacaggaagagctatggtctcaaaggcatcagccaaagagaaggaaaggaaccggtcactggccttctgcacaccacggggtgctggcttgatgaac

SEQ ID NO: 142520 - DNA, 120 bp, Artificial Sequence
  ENSG00000104419_58 (sequence is synthesized)
cctttgcacacctggcatcagtgctcactgtacgcttctcatcctgctcagtagacatcccagatttgtgggtgagaagtaggggctcagagaaatatgtgagctgcggatgtggcattg

SEQ ID NO: 142521 - DNA, 120 bp, Artificial Sequence
  ENSG00000104419_59 (sequence is synthesized)
accccaattctttctgaattcaaaactagctctttaagacaattcagcaaggattaattctgtttgggagtgcctgacatcaaaagcccctccctgtgcctatcaaggagataacataag

SEQ ID NO: 142522 - DNA, 120 bp, Artificial Sequence
  ENSG00000104419_60 (sequence is synthesized)
ccctgcatgcttggtgtggatcaactgcccctgtttctgatgtctgactcagtgtggcctcctagccatgatgcttcagttgggtggagtactagtttcctaaagctgccgtaacaaatc

SEQ ID NO: 142523 - DNA, 120 bp, Artificial Sequence
  ENSG00000104419_61 (sequence is synthesized)
aggaggcctaaagtccaaaatcaaggtgtgggcagggccttgctccctccaacgctgctgtggaagaaccttccatgcctcttcctggcttctggtggccccagcaatccttggctttat

SEQ ID NO: 142524 - DNA, 120 bp, Artificial Sequence
  ENSG00000104419_62 (sequence is synthesized)
gtggcttgtggctgcatcactccaatctcagcctctgtctttgcgtggacttctcccctgcatatccctgtgtgctgtttctataaggacatcacagtcattgggtttagggttccctct

SEQ ID NO: 142525 - DNA, 120 bp, Artificial Sequence
  ENSG00000104419_63 (sequence is synthesized)
caacccaggatgatttcatctcaagatccttaactaattacatatgcaaagaccctatttccaaataaggttcccttctgaagtttcaggtaggtgtgaatcttccgggacactgtccca

SEQ ID NO: 142526 - DNA, 120 bp, Artificial Sequence
  ENSG00000104419_64 (sequence is synthesized)
cccggtacaggtgggcaggattgttcctcctcattccaccccatcagcacgtgctaccccatcagcatgtgccacttgcacgtgccatgtgcaagagcatttgaggtctcagagaagatc

SEQ ID NO: 142527 - DNA, 120 bp, Artificial Sequence
  ENSG00000104419_65 (sequence is synthesized)
ccaaagaatagacagcgcccttgttagcacctgggctgacaggcttctttgggagagatgacaacgaatagccatgccgggaacttgccgtgtggcccctctccctttccccacctgtga

SEQ ID NO: 142528 - DNA, 120 bp, Artificial Sequence
  ENSG00000104419_66 (sequence is synthesized)
tgtgcagggccactgaccccaggtgtcctccctgctccagtgatcatggacagcatggggtcatgggcgtacacacaggtgctgataccaggggtcagtatttaacatacttgctttaca

SEQ ID NO: 142529 - DNA, 120 bp, Artificial Sequence
  ENSG00000104419_67 (sequence is synthesized)
gatgggaacagggaggctcagggggacactctcaaaattacacagcttttaacaggtggcagaattggggttcagacccagatctgggttcaagtcactcatggtgtgattgcggcagtt

SEQ ID NO: 142530 - DNA, 120 bp, Artificial Sequence
  ENSG00000104419_68 (sequence is synthesized)
ccttcccgcatctgggccttgccatctctctctccgagtggacatggagaggacgggggcccagcagctggatggctgcagggatcaagtcttctctggggctggcacgtagaagagcat

SEQ ID NO: 142531 - DNA, 120 bp, Artificial Sequence
  ENSG00000104419_69 (sequence is synthesized)
gtggctggtggacgggcatgcctggctcctcacctggcagtctcctgccctctaaccggctgtctcttgttcccctagtgccctcggctagcatgacccgcctgatgcggtcccgcacag

SEQ ID NO: 142532 - DNA, 120 bp, Artificial Sequence
  ENSG00000104419_70 (sequence is synthesized)
aaggaagcaaggaagcgcaggcttgatggcctgttttccagatggagcaaacagtccggggcagagatggtggcgggcaagccctttccccagcatttggtgcatttaacagcgcagtct

SEQ ID NO: 142533 - DNA, 120 bp, Artificial Sequence
  ENSG00000104419_71 (sequence is synthesized)
gagccaggcctctgtcccctgcctcctgggagtcccctcctagccctggtccttggagtggcttctggccagagagagctgctgcccgaagccggggctcttatggccagatgagaagag

SEQ ID NO: 142534 - DNA, 120 bp, Artificial Sequence
  ENSG00000104419_72 (sequence is synthesized)
agtcccgtagcacacacagggcggtgtgcatgtcaggcagccgagagtcctgcaccgtggggtgtgtatgtgtgttcacgcgcatgcgtgtgcctgtgtgtctgtgcgtctgcatcacca

SEQ ID NO: 142535 - DNA, 120 bp, Artificial Sequence
  ENSG00000104419_73 (sequence is synthesized)
aggagatcacagacaccagaagacagcagcttctgccagaactgggtccttccatgattctcaggtggtgactttgaatcccagaaaaagtgttttggggagagtggagtgaaggaagag

SEQ ID NO: 142536 - DNA, 120 bp, Artificial Sequence
  ENSG00000104427_0 (sequence is synthesized)
agagctgggcggtggcgggcgctgctgaaggagtctcgctgagctcgaggaggtggcgcgatggagggactggaagagaatggaggtgttgtccaagttggagaattgttaccttgcaag

SEQ ID NO: 142537 - DNA, 120 bp, Artificial Sequence
  ENSG00000104427_1 (sequence is synthesized)
atttgtggaagaacattctttccagtagcattaaaaaaacatggacccatttgccagaagactgcaactaaaaaacggaagacttttgattcaagcagacagagagctgaaggaactgat

SEQ ID NO: 142538 - DNA, 120 bp, Artificial Sequence
  ENSG00000104427_2 (sequence is synthesized)
attccaacagtaaaacctctcaaaccgaggccagaaccaccaaagaaaccatctaattggagaaggaaacatgaagaattcattgctaccataagagcagctaaaggccttgatcaggcc

SEQ ID NO: 142539 - DNA, 120 bp, Artificial Sequence
  ENSG00000104427_3 (sequence is synthesized)
ctcaaagagggtggcaaacttcctcctcctcctccaccttcttatgatcctgattatattcaatgtccatattgtcagaggagattcaatgaaaatgcagctgatagacatataaatttc

SEQ ID NO: 142540 - DNA, 120 bp, Artificial Sequence
  ENSG00000104427_4 (sequence is synthesized)
tgtaaagaacaggcagcacgtattagtaataaagggaaattttctacagataccaaaggaaaaccaacttctcggacacaggtgtataagccacccgcacttaaaaagtcaaattctcct

SEQ ID NO: 142541 - DNA, 120 bp, Artificial Sequence
  ENSG00000104427_5 (sequence is synthesized)
ggaactgcatcatcaggatcttcacgattaccgcagccaagtggcgctggcaaaactgttgtaggtgttccttcaggtaaagtgtcttcaagtagcagctctttgggaaacaaacttcag

SEQ ID NO: 142542 - DNA, 120 bp, Artificial Sequence
  ENSG00000104427_6 (sequence is synthesized)
accttatctccctctcataaagggatagcagcccctcatgcaggagctaatgtcaaaccccgaaattccacaccacctagtttggcaagaaatcctgccccaggtgtgcttacaaacaaa

SEQ ID NO: 142543 - DNA, 120 bp, Artificial Sequence
  ENSG00000104427_7 (sequence is synthesized)
agaaaaacatatactgagagctacatagccaggccagatggggactgtgcatcttcccttaatggtggaaatattaaaggcattgaaggacattcacctggaaacttaccaaaattctgc

SEQ ID NO: 142544 - DNA, 120 bp, Artificial Sequence
  ENSG00000104427_8 (sequence is synthesized)
catgagtgtgggactaaataccctgtagaatgggccaaattttgctgtgaatgtggcattcgaagaatgattctatgaatagaatctcaaaaaaaaaaaaaagccaagttcagagtttat

SEQ ID NO: 142545 - DNA, 120 bp, Artificial Sequence
  ENSG00000104427_9 (sequence is synthesized)
gattattgctgcttggacagctagagcacatcctctagttagtttgtgctaaaaatactcgaaataccatttccagttaattttgaagtgtaatcttttggctatataatgtgtgtatgt

SEQ ID NO: 142546 - DNA, 120 bp, Artificial Sequence
  ENSG00000104427_10 (sequence is synthesized)
ttatatgtgtacatatactgtatataataaatatctgataccccagactgtgtcattcaaggaaatattcacttatctgtcagaaaataatttcaaatggaacaattaatttaggtgtta

SEQ ID NO: 142547 - DNA, 120 bp, Artificial Sequence
  ENSG00000104427_11 (sequence is synthesized)
cttttctgttgttgttaaagcacgttaagtacatttccacaaactctcatactctagtgcttagcccttcaagctttaggataagtataactttgagcaaaaaatttggataaacatttg

SEQ ID NO: 142548 - DNA, 120 bp, Artificial Sequence
  ENSG00000104427_12 (sequence is synthesized)
tattattggtgcctatcttcagatagtatcatagtaggatagatgctgggaattttgtaattaaagagaacagttttagttaccattaggtatgttaaggtcactcctgtagagcatgtc

SEQ ID NO: 142549 - DNA, 120 bp, Artificial Sequence
  ENSG00000104427_13 (sequence is synthesized)
atcttacttgttttgtaaaagtgtaattatgcaatttccttttcaaatacacaagactaaaaatacaaatctatcttgttctatttataactgattttttttagttctgtatgtattcgt

SEQ ID NO: 142550 - DNA, 120 bp, Artificial Sequence
  ENSG00000104427_14 (sequence is synthesized)
tgaacatatttttttacttccaattgtttttccagatttcacttttcctctttttccataacccgtgaagatagttttaatttgctagttcattttttgctgtatttgaaaatgtaatta

SEQ ID NO: 142551 - DNA, 120 bp, Artificial Sequence
  ENSG00000104427_15 (sequence is synthesized)
tttaatatagaaggcacagaattccctgcaaaatcttacatgtttaaaaacatataattttttgtatctgaatttagaataaatcattttaatgcatcttaaatcacgtcacctaatcat

SEQ ID NO: 142552 - DNA, 120 bp, Artificial Sequence
  ENSG00000104427_16 (sequence is synthesized)
aatagttgtggtaactaatcattagtgcagagcatgcagataaaaaatatttgaatttttttttcttggaagtacatgtagttatgagtaggttaagagaatatctaattttcctactct

SEQ ID NO: 142553 - DNA, 120 bp, Artificial Sequence
  ENSG00000104427_17 (sequence is synthesized)
ttttttcatctttagcatttaatgttgaaacaccattcacgtcacattaaggacccactgaaaatgtattgttttaatgcataattgacttacctaattaaacatacacacaaatttaat

SEQ ID NO: 142554 - DNA, 120 bp, Artificial Sequence
  ENSG00000104427_18 (sequence is synthesized)
tatttttttctctttaacctgatcacgacacagctcttaatcattgtcactttcagtatatcatagtagttagtagtagattgccttgatggcagtaattctgtagtaatttctattcaa

SEQ ID NO: 142555 - DNA, 120 bp, Artificial Sequence
  ENSG00000104427_19 (sequence is synthesized)
tcaaacctaagagagctttgatcttactgtaaaggtacaaacaaatctcttatataattcctagcttttttttttgtttatgattctgatcaactataagacacaatgtaaagaattgtg

SEQ ID NO: 142556 - DNA, 120 bp, Artificial Sequence
  ENSG00000104427_20 (sequence is synthesized)
gcttataatttatctgaaatttattagcttagtttagtttgggcaggagttacaaacttaataggaattgtcattttacttacagtttatttcctgattagttgttaatttttttcccct

SEQ ID NO: 142557 - DNA, 120 bp, Artificial Sequence
  ENSG00000104427_21 (sequence is synthesized)
cagttatctttattcagtcttattggtcaaaacaaagaaacaaatagtccatcaactaaaataagctgtaatgaatttagaagatgaatgcatatattagatttccatttaaatcacttc

SEQ ID NO: 142558 - DNA, 120 bp, Artificial Sequence
  ENSG00000104427_22 (sequence is synthesized)
tgttataaatcatataaagaactttaaacttgttttatctaatactgagcactgtttttttgtcaagtatttttttaagaccacataattctttttgtctgctcaaggaaaggatagata

SEQ ID NO: 142559 - DNA, 120 bp, Artificial Sequence
  ENSG00000104427_23 (sequence is synthesized)
aataattggcacacatttgtttctcactgaattttacagtagtaaattaatgttataatgtaccacatggagatgagttggtaagaaatcatctagttccagagcccagagattataaac

SEQ ID NO: 142560 - DNA, 120 bp, Artificial Sequence
  ENSG00000104427_24 (sequence is synthesized)
agtaggtgaaatagatttatgacttacgaaatatgttgtgacaatatatttaaatgcatttttatattacttgcatattctcacattgatttgtgcaatagttcagttttaaaaaaaatc

SEQ ID NO: 142561 - DNA, 120 bp, Artificial Sequence
  ENSG00000104427_25 (sequence is synthesized)
ttcctatgcatcatgtattttatttttatttattttcacaagtatttgacagtatggtagaataaaagatgattgtaagattaaaaatgtaaaaattgcttatgtattattctgaattgt

SEQ ID NO: 142562 - DNA, 120 bp, Artificial Sequence
  ENSG00000104427_26 (sequence is synthesized)
gttaggttgaaaaagatgattgtggtgactattatttcttgtccactatttgttttttgttttttcaccaataatgtcttcatatttgaacctattcaataaagacatgaagcataaaaa

SEQ ID NO: 142563 - DNA, 120 bp, Artificial Sequence
  ENSG00000104427_27 (sequence is synthesized)
attccaacagtaaaacctctcaaaccgagggtaactatataaccttttgaacagtatgaactttggtgttatgtatgttgaaaaatattatattatctgttacagtaaggttaagaataa

SEQ ID NO: 142564 - DNA, 120 bp, Artificial Sequence
  ENSG00000104427_28 (sequence is synthesized)
cattaagattaaagaataaatacaattctgtgttatatgttcagtttagaaattatctgaagcttataaaacaaattttattttaaaaaataagcttctaaacttcaaagaagagaccaa

SEQ ID NO: 142565 - DNA, 120 bp, Artificial Sequence
  ENSG00000104427_29 (sequence is synthesized)
tgtttcaaactccatcaattacagtgagatttttatagcattggagagccaattgctgtcccacattcttttcaagtcattattaaaaacttttgatataacttaagttttgattcattt

SEQ ID NO: 142566 - DNA, 120 bp, Artificial Sequence
  ENSG00000104427_30 (sequence is synthesized)
catcttctaccattatgataatctctacatccaaaaagttaagccattatttacagacattttagcataatagatactgcttattttgacatattgactgccaggatttgtaatctatat

SEQ ID NO: 142567 - DNA, 120 bp, Artificial Sequence
  ENSG00000104427_31 (sequence is synthesized)
tatgtttctaaggaaaagttttatctgttgttcagtgtccagatatagttattgtcagcttattttctttcttgaaaccaaagcaatgaatctattgtgataatctctccttaatatctg

SEQ ID NO: 142568 - DNA, 120 bp, Artificial Sequence
  ENSG00000104427_32 (sequence is synthesized)
ttatatattatagtaatcccttggtatctgtgggagattggttccagggactcgcctctgatatcaatatctgtggatactcaaactccttatggcatagtatttgcatataacttatgc

SEQ ID NO: 142569 - DNA, 120 bp, Artificial Sequence
  ENSG00000104427_33 (sequence is synthesized)
cttgtgcaaaggttgtatgacagtgatacaaaatcagacagtgccatcaaaagacatgagttattacctatttacaaagctaatgtcaaaccccgaaattccacaccacctagtttggca

SEQ ID NO: 142570 - DNA, 120 bp, Artificial Sequence
  ENSG00000104432_0 (sequence is synthesized)
acacttgtggcttccgtgcacacattaacaactcatggttctagctcccagtcgccaagcgttgccaaggcgttgagagatcatctgggaagtcttttacccagaattgctttgattcag

SEQ ID NO: 142571 - DNA, 120 bp, Artificial Sequence
  ENSG00000104432_1 (sequence is synthesized)
gccagctggtttttcctgcggtgattcggaaattcgcgaattcctctggtcctcatccaggtgcgcgggaagcaggtgcccaggagagaggggataatgaagattccatgctgatgatcc

SEQ ID NO: 142572 - DNA, 120 bp, Artificial Sequence
  ENSG00000104432_2 (sequence is synthesized)
caaagattgaacctgcagaccaagcgcaaagtagaaactgaaagtacactgctggcggatcctacggaagttatggaaaaggcaaagcgcagagccacgccgtagtgtgtgccgcccccc

SEQ ID NO: 142573 - DNA, 120 bp, Artificial Sequence
  ENSG00000104432_3 (sequence is synthesized)
ttgggatggatgaaactgcagtcgcggcgtgggtaagaggaaccagctgcagagatcaccctgcccaacacagactcggcaactccgcggaagaccagggtcctgggagtgactatgggc

SEQ ID NO: 142574 - DNA, 120 bp, Artificial Sequence
  ENSG00000104432_4 (sequence is synthesized)
ggtgagagcttgctcctgctccagttgcggtcatcatgactacgcccgcctcccgcagaccatgttccatgtttcttttaggtatatctttggacttcctcccctgatccttgttctgtt

SEQ ID NO: 142575 - DNA, 120 bp, Artificial Sequence
  ENSG00000104432_5 (sequence is synthesized)
gccagtagcatcatctgattgtgatattgaaggtaaagatggcaaacaatatgagagtgttctaatggtcagcatcgatcaattattggacagcatgaaagaaattggtagcaattgcct

SEQ ID NO: 142576 - DNA, 120 bp, Artificial Sequence
  ENSG00000104432_6 (sequence is synthesized)
gaataatgaatttaacttttttaaaagacatatctgtgatgctaataaggaaggtatgtttttattccgtgctgctcgcaagttgaggcaatttcttaaaatgaatagcactggtgattt

SEQ ID NO: 142577 - DNA, 120 bp, Artificial Sequence
  ENSG00000104432_7 (sequence is synthesized)
tgatctccacttattaaaagtttcagaaggcacaacaatactgttgaactgcactggccaggttaaaggaagaaaaccagctgccctgggtgaagcccaaccaacaaagagtttggaaga

SEQ ID NO: 142578 - DNA, 120 bp, Artificial Sequence
  ENSG00000104432_8 (sequence is synthesized)
gggcactaaagaacactgaaaaatatggagtggcaatatagaaacacgaactttagctgcatcctccaagaatctatctgcttatgcagtttttcagagtggaatgcttcctagaagtta

SEQ ID NO: 142579 - DNA, 120 bp, Artificial Sequence
  ENSG00000104432_9 (sequence is synthesized)
ctgaatgcaccatggtcaaaacggattagggcatttgagaaatgcatattgtattactagaagatgaatacaaacaatggaaactgaatgctccagtcaacaaactatttcttatatatg

SEQ ID NO: 142580 - DNA, 120 bp, Artificial Sequence
  ENSG00000104432_10 (sequence is synthesized)
tgaacatttatcaatcagtataattctgtactgatttttgtaagacaatccatgtaaggtatcagttgcaataatacttctcaaacctgtttaaatatttcaagacattaaatctatgaa

SEQ ID NO: 142581 - DNA, 120 bp, Artificial Sequence
  ENSG00000104432_11 (sequence is synthesized)
gtatataatggtttcaaagattcaaaattgacattgctttactgtcaaaataattttatggctcactatgaatctattatactgtattaagagtgaaaattgtcttcttctgtgctggag

SEQ ID NO: 142582 - DNA, 120 bp, Artificial Sequence
  ENSG00000104432_12 (sequence is synthesized)
atgttttagagttaacaatgatatatggataatgccggtgagaataagagagtcataaaccttaagtaagcaacagcataacaaggtccaagatacctaaaagagatttcaagagattta

SEQ ID NO: 142583 - DNA, 120 bp, Artificial Sequence
  ENSG00000104432_13 (sequence is synthesized)
attaatcatgaatgtgtaacacagtgccttcaataaatggtatagcaaatgttttgacatgaaaaaaggacaatttcaaaaaaataaaataaaataaaaataaattcacctagtctaagg

SEQ ID NO: 142584 - DNA, 120 bp, Artificial Sequence
  ENSG00000104432_14 (sequence is synthesized)
aaggatgctaaaccttagtactgagttacattgtcatttatatagattataacttgtctaaataagtttgcaatttgggagatatatttttaagataataatatatgtttaccttttaat

SEQ ID NO: 142585 - DNA, 120 bp, Artificial Sequence
  ENSG00000104432_15 (sequence is synthesized)
gaaatatctgtatttaattttgacactatatctgtatataaaatattttcatacagcattacaaattgcttactttggaatacatttctcctttgataaaataaatgagctatgtattaa

SEQ ID NO: 142586 - DNA, 120 bp, Artificial Sequence
  ENSG00000104432_16 (sequence is synthesized)
gtcctcaggactacagaagcagttcacattttacagatcaaacggacgacacacacattctttccactgcaaattgtcctttctccactagaagcaagaaggccctcgccagatgctagc

SEQ ID NO: 142587 - DNA, 120 bp, Artificial Sequence
  ENSG00000104432_17 (sequence is synthesized)
tctcgtaaaatgaggaatacctttaaactttaacagaagagttctgaagaccaaactctgaaggaaagaaagcattctggaagaatggcatagctgaaatcaagacccttgaacaaagaa

SEQ ID NO: 142588 - DNA, 120 bp, Artificial Sequence
  ENSG00000104432_18 (sequence is synthesized)
tagtacccattaactcttcaaaaactattccacgtaaattcttcccatgagaattgaccagaattattgaacaattacagatctgtaaaaccataaaggtacaaaatcagtctactcact

SEQ ID NO: 142589 - DNA, 120 bp, Artificial Sequence
  ENSG00000104432_19 (sequence is synthesized)
aatgctactggaaagaatgttcttccacaaatcttgcaaggtaacaattctccaacttggacaacacctccattctctaaaacaggaaggaatttaataaataatttatataacttgaaa

SEQ ID NO: 142590 - DNA, 120 bp, Artificial Sequence
  ENSG00000104432_20 (sequence is synthesized)
tatcagtttctccaaataaattgtatcaacttgagggcagacacttaattacatcttattatctcgatccccatcattgcatatccagaaagagcacataaagcgtttttcaatgcttat

SEQ ID NO: 142591 - DNA, 120 bp, Artificial Sequence
  ENSG00000104432_21 (sequence is synthesized)
tttagttgatggactatttgtttctttgttttgaccaataagactgaataaagataactgaggggaaaaaaattaacaactaatcaggaaataaacttttttcggatttatgaaataatt

SEQ ID NO: 142592 - DNA, 120 bp, Artificial Sequence
  ENSG00000104432_22 (sequence is synthesized)
tgttgacatgctctacaggagtgaccttaacatacctaatggtaactaaaactgttctctttaattacaaaattcccagcatctatcctactatgatactatctgaagataggcaccaat

SEQ ID NO: 142593 - DNA, 120 bp, Artificial Sequence
  ENSG00000104432_23 (sequence is synthesized)
tggtatgtgattattttgttttactcacattttcatgcattgggaaaatttgaacctttttggtatgcagttttataatcaagtattcatctttcttgacaagaaagtgaagtaactata

SEQ ID NO: 142594 - DNA, 120 bp, Artificial Sequence
  ENSG00000104432_24 (sequence is synthesized)
gaataaaatttaatgagctactaactgtatatttttatagctgacataattatgtagcttaaaaataattctttcctcgactctaagattctcacaactattcatttcagtcctatttcc

SEQ ID NO: 142595 - DNA, 120 bp, Artificial Sequence
  ENSG00000104432_25 (sequence is synthesized)
cagaaaggaagcagcaatcagctatgagcaataattagacattcgtttgctagctctagcacatgtgaccatgaagagtaactgtgaaccatattgactttctctcctgaaaagaaaaat

SEQ ID NO: 142596 - DNA, 120 bp, Artificial Sequence
  ENSG00000104435_0 (sequence is synthesized)
agctcctaggaagcttcagggcttaaagctccactctacttggactgtactatcaggcccccaaaatggggggagccgacagggaaggactgatttccatttcaaactgcattctggtac

SEQ ID NO: 142597 - DNA, 120 bp, Artificial Sequence
  ENSG00000104435_1 (sequence is synthesized)
tttgtactccagcaccattggccgatcaatatttaatgcttggagattctgactctgcgggagtcatgtcaggggaccttgggagccaatctgcttgagcttctgagtgataattattca

SEQ ID NO: 142598 - DNA, 120 bp, Artificial Sequence
  ENSG00000104435_2 (sequence is synthesized)
tgggctcctgcctcttgctctttctctagcacggtcccactctgcagactcagtgccttattcagtcttctctctcgctctctccgctgctgtagccggaccctttgccttcgccactgc

SEQ ID NO: 142599 - DNA, 120 bp, Artificial Sequence
  ENSG00000104435_3 (sequence is synthesized)
tcagcgtctgcacatccctacaatggctaaaacagcaatggcctacaaggaaaaaatgaaggagctgtccatgctgtcactgatctgctcttgcttttacccggaacctcgcaacatcaa

SEQ ID NO: 142600 - DNA, 120 bp, Artificial Sequence
  ENSG00000104435_4 (sequence is synthesized)
catctatacttacgatgatatggaagtgaagcaaatcaacaaacgtgcctctggccaggcttttgagctgatcttgaagccaccatctcctatctcagaagccccacgaactttagcttc

SEQ ID NO: 142601 - DNA, 120 bp, Artificial Sequence
  ENSG00000104435_5 (sequence is synthesized)
tccaaagaagaaagacctgtccctggaggagatccagaagaaactggaggctgcagaggaaagaagaaagtctcaggaggcccaggtgctgaaacaattggcagagaagagggaacacga

SEQ ID NO: 142602 - DNA, 120 bp, Artificial Sequence
  ENSG00000104435_6 (sequence is synthesized)
gcgagaagtccttcagaaggctttggaggagaacaacaacttcagcaagatggcggaggaaaagctgatcctgaaaatggaacaaattaaggaaaaccgtgaggctaatctagctgctat

SEQ ID NO: 142603 - DNA, 120 bp, Artificial Sequence
  ENSG00000104435_7 (sequence is synthesized)
tattgaacgtctgcaggaaaaggagaggcatgctgcggaggtgcgcaggaacaaggaactccaggttgaactgtctggctgaagcaagggagggtctggcacgccccaccaatagtaaat

SEQ ID NO: 142604 - DNA, 120 bp, Artificial Sequence
  ENSG00000104435_8 (sequence is synthesized)
acgccccaccaatagtaaatccccctgcctatattataatggatcatgcgatatcaggatggggaatgtatgacatggtttaaaaagaactcattataaaaaaaaaaaaacaaaaaaaat

SEQ ID NO: 142605 - DNA, 120 bp, Artificial Sequence
  ENSG00000104435_9 (sequence is synthesized)
atacttacatttttgttaaaaaatacaagtattgcattatgcaagttatttcataatcttacatgtcctgtaacaggcttttgatgttgtgtctttccactcaaatgaatttgctaggtc

SEQ ID NO: 142606 - DNA, 120 bp, Artificial Sequence
  ENSG00000104435_10 (sequence is synthesized)
tgttctttttgaagctccccatgtctaactccattccaaaagaaaaatgaggtcagtagacagtctatggtgctagaaacccaccattgcctaatgacctagaaggctttgttgtctctg

SEQ ID NO: 142607 - DNA, 120 bp, Artificial Sequence
  ENSG00000104435_11 (sequence is synthesized)
agcttgactaagaccatacctagatcacaggtattatgactccacatgaaccttcacatttgttcgctcataatctacttactgcctaaaaactacaaaaccaggctaagaaataccacc

SEQ ID NO: 142608 - DNA, 120 bp, Artificial Sequence
  ENSG00000104435_12 (sequence is synthesized)
agtcatagcatttacttctgcttctcctggattatgtgctacaaatgtgctttggctttagaaagggatggatgagaagacagacctgagaccaatctgggtagaagcaaaaagttgaac

SEQ ID NO: 142609 - DNA, 120 bp, Artificial Sequence
  ENSG00000104435_13 (sequence is synthesized)
cttttaaagtgctgaacacaaatccaaattcgaatggttcaagcagccgtgaaatcgctcttcataaagtgggcttaattctctagtttaagttcttttgatggaatgaattaattaatg

SEQ ID NO: 142610 - DNA, 120 bp, Artificial Sequence
  ENSG00000104435_14 (sequence is synthesized)
tgtcaggtggcttatttgtggatgccatgattgatgatgttcattttaagctcttacctatagtacaagtacatgatgctactgaatatttttccacttggaaactgtgagctggttgtt

SEQ ID NO: 142611 - DNA, 120 bp, Artificial Sequence
  ENSG00000104435_15 (sequence is synthesized)
gcattaaaacacacatacaaacaaaatcaaaaacactgcggactttcactcaagctggtctttcttccccagtgtaaggcaatcctgcctactaacaacaccaacaacaaaacactccat

SEQ ID NO: 142612 - DNA, 120 bp, Artificial Sequence
  ENSG00000104435_16 (sequence is synthesized)
ctgtgaagctgacgcagttaagggggctaggcagggcatttgtgccaactaagaatcaccagatacccaccataagtacctatcgcagttttgaagtcgtttctccccaactcccaactc

SEQ ID NO: 142613 - DNA, 120 bp, Artificial Sequence
  ENSG00000104435_17 (sequence is synthesized)
ctgaaggttgctgcctgcatatttactcttcattagtgctattttcctgtatgtcattgtgagcaagctgtgattaataaagaattggagttctgtgaactaataaaggtttggtctgtt

SEQ ID NO: 142614 - DNA, 120 bp, Artificial Sequence
  ENSG00000104442_0 (sequence is synthesized)
agagcctttgcccgccagcgccttcgctctttggctccctgagttagtccggttgcttgcgatcgccgcggccggggctgcgaaccgaagggctcgctccgcgccgcctgggtctctacc

SEQ ID NO: 142615 - DNA, 120 bp, Artificial Sequence
  ENSG00000104442_1 (sequence is synthesized)
tcatccgtaggtgtggccctgatggtgtggcaggctctggactcctaaagctctggagcgaatttaagattttattcatgtgcatggcatagaagatgaattcttccacttccaccatga

SEQ ID NO: 142616 - DNA, 120 bp, Artificial Sequence
  ENSG00000104442_2 (sequence is synthesized)
gtgaagagcctgacgctctatcggtagttaaccagttacgggatctagcagcagatccgttaaacagaagagccatcgtccaggatcagggatgtctgcctggccttattttatttatgg

SEQ ID NO: 142617 - DNA, 120 bp, Artificial Sequence
  ENSG00000104442_3 (sequence is synthesized)
accatcccaaccctccagtcgtccactccgctttgcttgctcttcgatacttggcagaatgccgtgcaaacagagaaaagatgaaaggagaactgggtatgatgttgagcttacaaaatg

SEQ ID NO: 142618 - DNA, 120 bp, Artificial Sequence
  ENSG00000104442_4 (sequence is synthesized)
ttatacagaaaactacaactccaggagaaacaaaacttctggcctctgaaatctatgacattcttcagtcctccaatatggcagatggtgatagttttaatgagatgaattcacgtcgaa

SEQ ID NO: 142619 - DNA, 120 bp, Artificial Sequence
  ENSG00000104442_5 (sequence is synthesized)
ggaaagctcaattttttctgggaactacaaacaaacgtgccaaaacagtggttttgcatatagatggccttgatgatacgtctcggagaaatctatgtgaagaggctttgttaaaaatta

SEQ ID NO: 142620 - DNA, 120 bp, Artificial Sequence
  ENSG00000104442_6 (sequence is synthesized)
aaggtgttattagctttacttttcaaatggctgttcaaaggtgtgtggtgcgaatccgttcagatttgaaagctgaggctttggcatcagcaatagcatcaaccaaggttatgaaagctc

SEQ ID NO: 142621 - DNA, 120 bp, Artificial Sequence
  ENSG00000104442_7 (sequence is synthesized)
agcaagttgtgaaaagtgaaagtggagaagagatgttggtcccattccaagatactcctgtggaagttgaacagaacacagagctacctgactacctgcctgaggatgagagtcccacaa

SEQ ID NO: 142622 - DNA, 120 bp, Artificial Sequence
  ENSG00000104442_8 (sequence is synthesized)
aggaacaggacaaagcggtgtcccgggtcggctcacacccagaaggtggagctagctggcttagcacagctgcaaactttttatccagatcattttattggtgacttcacttttgggctc

SEQ ID NO: 142623 - DNA, 120 bp, Artificial Sequence
  ENSG00000104442_9 (sequence is synthesized)
aaggactgtgtgaaccaacaaggggccagttttccattgttgtggtgaactgtcaagtgcaatttgcaataagttatcatgaaaagtttttagattacacgatcgcatatgctgcatttc

SEQ ID NO: 142624 - DNA, 120 bp, Artificial Sequence
  ENSG00000104442_10 (sequence is synthesized)
acgttttattggacattttaccccactgagtggtaaaaaggacagaggctacagatggagttgctttgtttatgaaagtattttggtttgttttctttcatttaattgcctcatatttaa

SEQ ID NO: 142625 - DNA, 120 bp, Artificial Sequence
  ENSG00000104442_11 (sequence is synthesized)
aaaccatgggtccactgttaaaaccacatgtgtatgtgcagctttacattttattttacgtgaagcatgtgattaggaaaactcattttcttttcaagcctcaggacctacctgaagaga

SEQ ID NO: 142626 - DNA, 120 bp, Artificial Sequence
  ENSG00000104442_12 (sequence is synthesized)
agttttcttgtagctcaagttgtgcatgaattactgaatattttactgtgcttttcttcatgaagggtacatgctttgtactcttcactgaaagctgaaaacatttcttgttaccctctt

SEQ ID NO: 142627 - DNA, 120 bp, Artificial Sequence
  ENSG00000104442_13 (sequence is synthesized)
ttgtgcctttttattttgccaaccgtgtttatagaaaggacattactaatgacattttgcagattaaaaacattcatttgaacacagtagtcccctagaaaaacaactctacaaaaattt

SEQ ID NO: 142628 - DNA, 120 bp, Artificial Sequence
  ENSG00000104442_14 (sequence is synthesized)
tgcagccttattcattataattttgataaaattaacacaaaatcagtcaagaaggaaacatgtatattagtgaagtgtttttggagactgtttgaatgtgaccaaatgtggttctagttg

SEQ ID NO: 142629 - DNA, 120 bp, Artificial Sequence
  ENSG00000104442_15 (sequence is synthesized)
acttcttttcactttggcttatatcaattcttgagagttaatgtgatcatgatattgcaaacaactataaatggtctctaggccttactttgtgattatacgttatctccggctagaaaa

SEQ ID NO: 142630 - DNA, 120 bp, Artificial Sequence
  ENSG00000104442_16 (sequence is synthesized)
aaataatggtagtaaagaaactgacaaactgaaaataagaaaacaaaaatcaaatgcctataataccataatgccagtttggtatagagtccaactttaaaacatgaattgctcgacaga

SEQ ID NO: 142631 - DNA, 120 bp, Artificial Sequence
  ENSG00000104442_17 (sequence is synthesized)
gttctattcagtaggtgtttctttgtattgtcttttgtgaatttattatgaaaatgctgcgttgtgttgaatgaaaaagacccaaattactgcttatgaagaaataaagccagcattgat

SEQ ID NO: 142632 - DNA, 120 bp, Artificial Sequence
  ENSG00000104442_18 (sequence is synthesized)
cacttaatcctgtttctcatgtccagccagaaaaaagaacttcagtgaaggtaagataaataaatacatacacatatgtttttttggtagataagtgctaattacatatatgtaatgctt

SEQ ID NO: 142633 - DNA, 120 bp, Artificial Sequence
  ENSG00000104442_19 (sequence is synthesized)
aaatttctgaaatatttggtaactaaaattttctttttggaaattaataaatccagatacatattaatgttgatatgagtaaaaacaaataggaagaaattgaaatttcttttcatcaac

SEQ ID NO: 142634 - DNA, 120 bp, Artificial Sequence
  ENSG00000104442_20 (sequence is synthesized)
caacatgtagagctgctattttactatttggagaatatgatgtgaaaattggacctcaaagggtttccttgtgttttcattgtaaaataccatcatcagtgagagtcttgagttcactaa

SEQ ID NO: 142635 - DNA, 120 bp, Artificial Sequence
  ENSG00000104442_21 (sequence is synthesized)
cattgtcaccttctggagagagagttaatggggggcattgaggatgatatttttttacatgtgtttggtttctgattcaagtgacacgcacaaactgaaaaaaaaaaaacaaaaaaagca

SEQ ID NO: 142636 - DNA, 120 bp, Artificial Sequence
  ENSG00000104442_22 (sequence is synthesized)
acaataactttcagggcacctattgctctaaatgcataatataacttgctgccagaaccagatgtgtttaaaaaagaaaataaaaccaccttctttctatagccattaaagcaaacttta

SEQ ID NO: 142637 - DNA, 120 bp, Artificial Sequence
  ENSG00000104442_23 (sequence is synthesized)
ctgttctaacaaatttgtattttattttgcattgccacacatctgcttatttaaaaactacatccctttggtagtaatgtttcaggacaagtaggtattacagcttgatgtttgtgtgtt

SEQ ID NO: 142638 - DNA, 120 bp, Artificial Sequence
  ENSG00000104442_24 (sequence is synthesized)
ctaattctaagagttctttattccagatcatatagagtagttaagacaactgtaacagcattttttgaaatacattgtaaaataataaaaggtaacataattaaaatcgagtggatatta

SEQ ID NO: 142639 - DNA, 120 bp, Artificial Sequence
  ENSG00000104442_25 (sequence is synthesized)
gccctgatggtgtggcaggctctggactcctaaagctctggagcggtatgtggggtccacgggcggcagacaaagcagtggagccgggaaggccgcgggaagcggcccctgtaccgaggc

SEQ ID NO: 142640 - DNA, 120 bp, Artificial Sequence
  ENSG00000104442_26 (sequence is synthesized)
agcgaatccgcctgggaggggcgccccgcctgcctcttgtcagatccagtagtgggtcccagtgaggcgctttagcacgctctacccccacgtgtcccgtgaatctgttagctttgctca

SEQ ID NO: 142641 - DNA, 120 bp, Artificial Sequence
  ENSG00000104442_27 (sequence is synthesized)
tttcttctttgtcccccctcacatctgacttttactaaccccagtattattaatgggtgtcatctcatcttttcatctctccagaatttaagattttattcatgtgcatggcatagaaga

SEQ ID NO: 142642 - DNA, 120 bp, Artificial Sequence
  ENSG00000104442_28 (sequence is synthesized)
tcatccgtaggtgtggccctgatggtgtggcaggctctggactcctaaagctctggagcggaacctttaactgaccagagtgctcattaaacgatgagaagtattctttgtcatagaatg

SEQ ID NO: 142643 - DNA, 120 bp, Artificial Sequence
  ENSG00000104442_29 (sequence is synthesized)
ccagtcgtccactccgctttgcttaactacaactccaggagaaacaaaacttctggcctctgaaatctatgacattcttcagtcctccaatatggcagatggtgatagttttaatgagat

SEQ ID NO: 142644 - DNA, 120 bp, Artificial Sequence
  ENSG00000104447_0 (sequence is synthesized)
aatagtgttggtgtcttgaaactgacgtaatgcgcggagactgaggtcctgacaagcgataacatttctgataaagacccgatcttactgcaatctctagcgtcctcttttttggtgctg

SEQ ID NO: 142645 - DNA, 120 bp, Artificial Sequence
  ENSG00000104447_1 (sequence is synthesized)
ctggtttctccagacctcgcgtcctctcgattgctctctcgccttcctatttcttttttttttttttaaacaaaaaacaacaccccctcccctctcccacccggcaccgggcacatcctt

SEQ ID NO: 142646 - DNA, 120 bp, Artificial Sequence
  ENSG00000104447_2 (sequence is synthesized)
ctttctctctctctctctctctctctcttttttaataagggtgggggagggaaaggggggggaggcaggaaagacctttttctctcccccccgcaataatccaagatcaactctgcaaac

SEQ ID NO: 142647 - DNA, 120 bp, Artificial Sequence
  ENSG00000104447_3 (sequence is synthesized)
gatcaactctgcaaacaacagaagacggttcatggctttggccgccgcgccaccatctttcgggctgccgagggtgttcttgacgattaatcaacagatgtacagatcagctctcaaaat

SEQ ID NO: 142648 - DNA, 120 bp, Artificial Sequence
  ENSG00000104447_4 (sequence is synthesized)
gtcttctgtgtcttctgagcgtcttctaagacaattgcattagcctcctgctagttgactaatagaattaataattgtaaaaagcactctaaagccacatgccttatgaagtcaatgctg

SEQ ID NO: 142649 - DNA, 120 bp, Artificial Sequence
  ENSG00000104447_5 (sequence is synthesized)
ggtatgattttacaaatatggtccggaaaaagaacccccctctgagaaacgttgcaagtgaaggcgagggccagatcctggagcctataggtacagaaagcaaggtatctggaaagaaca

SEQ ID NO: 142650 - DNA, 120 bp, Artificial Sequence
  ENSG00000104447_6 (sequence is synthesized)
aagaattttctgcagatcagatgtcagaaaatacggatcagagtgatgctgcagaactaaatcataaggaggaacatagcttgcatgttcaagatccatcttctagcagtaagaaggact

SEQ ID NO: 142651 - DNA, 120 bp, Artificial Sequence
  ENSG00000104447_7 (sequence is synthesized)
tgaaaagcgcagttctgagtgagaaggctggcttcaattatgaaagccccagtaagggaggaaactttccctcctttccgcatgatgaggtgacagacagaaatatgttggctttctcat

SEQ ID NO: 142652 - DNA, 120 bp, Artificial Sequence
  ENSG00000104447_8 (sequence is synthesized)
ctccagctgctgggggagtctgtgagcccttgaagtctccgcaaagagcagaggcagatgaccctcaagatatggcctgcaccccctcaggggactcactggagacaaaggaagatcaga

SEQ ID NO: 142653 - DNA, 120 bp, Artificial Sequence
  ENSG00000104447_9 (sequence is synthesized)
agatgtcaccaaaggctacagaggaaacagggcaagcacagagtggtcaagccaattgtcaaggtttgagcccagtttcagtggcctcaaaaaacccacaagtgccttcagatgggggtg

SEQ ID NO: 142654 - DNA, 120 bp, Artificial Sequence
  ENSG00000104447_10 (sequence is synthesized)
taagactgaataaatccaaaactgacttactggtgaatgacaacccagacccggcacctctgtctccagagcttcaggactttaaatgcaatatctgtggatatggttactacggcaacg

SEQ ID NO: 142655 - DNA, 120 bp, Artificial Sequence
  ENSG00000104447_11 (sequence is synthesized)
accccacagatctgattaagcacttccgaaagtatcacttaggactgcataaccgcaccaggcaagatgctgagctggacagcaaaatcttggcccttcataacatggtgcagttcagcc

SEQ ID NO: 142656 - DNA, 120 bp, Artificial Sequence
  ENSG00000104447_12 (sequence is synthesized)
attccaaagacttccagaaggtcaaccgttctgtgttttctggtgtgctgcaggacatcaattcttcaaggcctgttttactaaatgggacctatgatgtgcaggtgacttcaggtggaa

SEQ ID NO: 142657 - DNA, 120 bp, Artificial Sequence
  ENSG00000104447_13 (sequence is synthesized)
cattcattggcattggacggaaaacaccagattgccaagggaacaccaagtatttccgctgtaaattctgcaatttcacttatatgggcaactcatccaccgaattagaacaacattttc

SEQ ID NO: 142658 - DNA, 120 bp, Artificial Sequence
  ENSG00000104447_14 (sequence is synthesized)
ttcagactcacccaaacaaaataaaagcttctctcccctcctctgaggttgcaaaaccttcagagaaaaactctaacaagtccatccctgcacttcaatccagtgattctggagacttgg

SEQ ID NO: 142659 - DNA, 120 bp, Artificial Sequence
  ENSG00000104447_15 (sequence is synthesized)
gaaaatggcaggacaagataacagtcaaagcaggagatgacactcctgttgggtactcagtgcccataaagcccctcgattcctctagacaaaatggtacagaggccaccagttactact

SEQ ID NO: 142660 - DNA, 120 bp, Artificial Sequence
  ENSG00000104447_16 (sequence is synthesized)
ggtgtaaattttgtagtttcagctgtgagtcatctagctcacttaaactgctagaacattatggcaagcagcacggagcagtgcagtcaggcggccttaatccagagttaaatgataagc

SEQ ID NO: 142661 - DNA, 120 bp, Artificial Sequence
  ENSG00000104447_17 (sequence is synthesized)
tttccaggggctctgtcattaatcagaatgatctagccaaaagttcagaaggagagacaatgaccaagacagacaagagctcgagtggggctaaaaagaaggacttctccagcaagggag

SEQ ID NO: 142662 - DNA, 120 bp, Artificial Sequence
  ENSG00000104447_18 (sequence is synthesized)
ccgaggataatatggtaacgagctataattgtcagttctgtgacttccgatattccaaaagccatggccctgatgtaattgtagtggggccacttctccgtcattatcaacagctccata

SEQ ID NO: 142663 - DNA, 120 bp, Artificial Sequence
  ENSG00000104447_19 (sequence is synthesized)
acattcacaagtgtaccattaaacactgtccattctgtcccagaggactttgcagcccagaaaagcaccttggagaaattacttatccgtttgcttgtagaaaaagtaattgttcccact

SEQ ID NO: 142664 - DNA, 120 bp, Artificial Sequence
  ENSG00000104447_20 (sequence is synthesized)
gtgcactcttgcttctgcacttgtctcctggggcggctggaagctcgcgagtcaaacatcagtgccatcagtgttcattcaccacccctgacgtagatgtactcctctttcactatgaaa

SEQ ID NO: 142665 - DNA, 120 bp, Artificial Sequence
  ENSG00000104447_21 (sequence is synthesized)
gtgtgcatgagtcccaagcatcggatgtcaaacaagaagcaaatcacctgcaaggatcggatgggcagcagtctgtcaaggaaagcaaagaacactcatgtaccaaatgtgattttatta

SEQ ID NO: 142666 - DNA, 120 bp, Artificial Sequence
  ENSG00000104447_22 (sequence is synthesized)
cccaagtggaagaagagatttcccgacactacaggagagcacacagctgctacaaatgccgtcagtgcagttttacagctgccgatactcagtcactactggagcacttcaacactgttc

SEQ ID NO: 142667 - DNA, 120 bp, Artificial Sequence
  ENSG00000104447_23 (sequence is synthesized)
actgccaggaacaggacatcactacagccaacggcgaagaggacggtcatgccatatccaccatcaaagaggagcccaaaattgacttcagggtctacaatctgctaactccagactcta

SEQ ID NO: 142668 - DNA, 120 bp, Artificial Sequence
  ENSG00000104447_24 (sequence is synthesized)
aaatgggagagccagtttctgagagtgtggtgaagagagagaagctggaagagaaggacgggctcaaagagaaagtttggaccgagagttccagtgatgaccttcgcaatgtgacttgga

SEQ ID NO: 142669 - DNA, 120 bp, Artificial Sequence
  ENSG00000104447_25 (sequence is synthesized)
gaggggcagacatcctgcgggggagtccgtcatacacccaagcaagcctggggctgctgacgcctgtgtctggcacccaagagcagacaaagactctaagggatagtcccaatgtggagg

SEQ ID NO: 142670 - DNA, 120 bp, Artificial Sequence
  ENSG00000104447_26 (sequence is synthesized)
ccgcccatctggcgcgacctatttatggcttggctgtggaaaccaagggattcctgcagggggcgccagctggcggagagaagtctggggccctcccccagcagtatcctgcatcgggag

SEQ ID NO: 142671 - DNA, 120 bp, Artificial Sequence
  ENSG00000104447_27 (sequence is synthesized)
aaaacaagtccaaggatgaatcccagtccctgttacggaggcgtagaggctccggtgttttttgtgccaattgcctgaccacaaagacctctctctggcgaaagaatgcaaatggcggat

SEQ ID NO: 142672 - DNA, 120 bp, Artificial Sequence
  ENSG00000104447_28 (sequence is synthesized)
atgtatgcaacgcgtgtggcctctaccagaagcttcactcgactcccaggcctttaaacatcattaaacaaaacaacggtgagcagattattaggaggagaacaagaaagcgccttaacc

SEQ ID NO: 142673 - DNA, 120 bp, Artificial Sequence
  ENSG00000104447_29 (sequence is synthesized)
cagaggcacttcaggctgagcagctcaacaaacagcagaggggcagcaatgaggagcaagtcaatggaagcccgttagagaggaggtcagaagatcatctaactgaaagtcaccagagag

SEQ ID NO: 142674 - DNA, 120 bp, Artificial Sequence
  ENSG00000104447_30 (sequence is synthesized)
aaattccactccccagcctaagtaaatacgaagcccagggttcattgactaaaagccattctgctcagcagccagtcctggtcagccaaactctggatattcacaaaaggatgcaacctt

SEQ ID NO: 142675 - DNA, 120 bp, Artificial Sequence
  ENSG00000104447_31 (sequence is synthesized)
tgcacattcagataaaaagtcctcaggaaagtactggagatccaggaaatagttcatccgtatctgaagggaaaggaagttctgagagaggcagtcctatagaaaagtacatgagacctg

SEQ ID NO: 142676 - DNA, 120 bp, Artificial Sequence
  ENSG00000104447_32 (sequence is synthesized)
cgaaacacccaaattattcaccaccaggcagccctattgaaaagtaccagtacccactttttggacttccctttgtacataatgacttccagagtgaagctgattggctgcggttctgga

SEQ ID NO: 142677 - DNA, 120 bp, Artificial Sequence
  ENSG00000104447_33 (sequence is synthesized)
gtaaatataagctctccgttcctgggaatccgcactacttgagtcacgtgcctggcctaccaaatccttgccaaaactatgtgccttatcccaccttcaatctgcctcctcatttttcag

SEQ ID NO: 142678 - DNA, 120 bp, Artificial Sequence
  ENSG00000104447_34 (sequence is synthesized)
ctgttggatcagacaatgacattcctctagatttggcgatcaagcattccagacctgggccaactgcaaacggtgcctccaaggagaaaacgaaggcaccaccaaatgtaaaaaatgaag

SEQ ID NO: 142679 - DNA, 120 bp, Artificial Sequence
  ENSG00000104447_35 (sequence is synthesized)
gtcccttgaatgtagtaaaaacagagaaagttgatagaagtactcaagatgaactttcaacaaaatgtgtgcactgtggcattgtctttctggatgaagtgatgtatgctttgcatatga

SEQ ID NO: 142680 - DNA, 120 bp, Artificial Sequence
  ENSG00000104447_36 (sequence is synthesized)
gttgccatggtgacagtggacctttccagtgcagcatatgccagcatctttgcacggacaaatatgacttcacaacacatatccagaggggcctgcataggaacaatgcacaagtggaaa

SEQ ID NO: 142681 - DNA, 120 bp, Artificial Sequence
  ENSG00000104447_37 (sequence is synthesized)
aaaatggaaaacctaaagagtaaaaccttagcacttagcacaattaaatagaaataggttttcttgatgggaattcaatagcttgtaatgtcttatgaagacctattaaaaaaatacttc

SEQ ID NO: 142682 - DNA, 120 bp, Artificial Sequence
  ENSG00000104447_38 (sequence is synthesized)
atagagcctgccttatccaacatgaaattcccttcttttgttattctttcttttgatgagtaggttaccaagattaaaaagtgagataaatggtcaatgagaaagaatggaagatggtaa

SEQ ID NO: 142683 - DNA, 120 bp, Artificial Sequence
  ENSG00000104447_39 (sequence is synthesized)
acaatcactttttaaaacctgttaagtcaaaaccatcttggctaatatgtactggggaaataatccataagagatatcaccagactagaattaatatatttataaagaaagagaccaaaa

SEQ ID NO: 142684 - DNA, 120 bp, Artificial Sequence
  ENSG00000104447_40 (sequence is synthesized)
ctgtctagaatttgaaagggtttacatattattatactaaagcagtactggactggccattggaccatttgttccaaaacccataaattgttgcctaaatttataatgatcatgaaaccc

SEQ ID NO: 142685 - DNA, 120 bp, Artificial Sequence
  ENSG00000104447_41 (sequence is synthesized)
ggcaatgaaagaaaaatggcgccctctcaatttagtcttctctcattggccatgtttcagattttgacctagaaatgcgagctgtggttaggcttggttagagtgcagcaagcaacatga

SEQ ID NO: 142686 - DNA, 120 bp, Artificial Sequence
  ENSG00000104447_42 (sequence is synthesized)
cagatggtggcacgctgtttttacccagccctgcctgtacatacacatgcacaccctctctgatatttttgtcctttagatgttcaaatactcagtagtccttttgtttgcggtttagat

SEQ ID NO: 142687 - DNA, 120 bp, Artificial Sequence
  ENSG00000104447_43 (sequence is synthesized)
tcattttgtccacacatgtacccattttaaaaaacaatgtcctcgatgcttctgtagtgatttcattttagccaggtatttctttcttgtgtgtgatgaaccagtatggatttgcttttc

SEQ ID NO: 142688 - DNA, 120 bp, Artificial Sequence
  ENSG00000104447_44 (sequence is synthesized)
taagcctcctgttggttactaatctcacttggcacattataactaaaggaatcccctcaattcaaaagcatagatggatacaaatgtcagaccgtgggtttaatttgtttagaacacatg

SEQ ID NO: 142689 - DNA, 120 bp, Artificial Sequence
  ENSG00000104447_45 (sequence is synthesized)
gcatttcttcacaaggtaacctgctgtatttatttattttcttttggttaaatataatttccaaactttgtggtcaggcagcgtctaaggttacgttaccacagactgacagttggtata

SEQ ID NO: 142690 - DNA, 120 bp, Artificial Sequence
  ENSG00000104447_46 (sequence is synthesized)
tgtaccagccaatcccttcattaaatgtatacagatttagttaagtagcattaaataggattcttagaagtatgtcctcatagaacttttaatacttaaggctttgtaaaaactatccat

SEQ ID NO: 142691 - DNA, 120 bp, Artificial Sequence
  ENSG00000104447_47 (sequence is synthesized)
gaagggaaagctcctcagcataactgctcagggaaatagggctaaataactgaacattaaataattggttaaaggtgctgttagtcgagcctcaatgcttgctacaaggatgtatgtaca

SEQ ID NO: 142692 - DNA, 120 bp, Artificial Sequence
  ENSG00000104447_48 (sequence is synthesized)
aggactgactttaataatttgcattatattgtcccaaccagtagtttattttttgccacggagatgtagaagatattacaagctactggatgcactgtcagattaacttatttcattaaa

SEQ ID NO: 142693 - DNA, 120 bp, Artificial Sequence
  ENSG00000104447_49 (sequence is synthesized)
gaagttgggagaacaaataggaaaaaaaaaacttatttttctagtaaatattaatgtattacatttcaaataatggtgcctgacatattgaataattattttctacagtgtacgtatgca

SEQ ID NO: 142694 - DNA, 120 bp, Artificial Sequence
  ENSG00000104447_50 (sequence is synthesized)
acaaagatattccatcatgcattagagtcagttctggctctgcctagctgtttacatttgcaaatgtagcaaacaaggtaatgaagcaactatttctattgcagtagatatccttttgtg

SEQ ID NO: 142695 - DNA, 120 bp, Artificial Sequence
  ENSG00000104447_51 (sequence is synthesized)
tgtgtgtgtgtgcattaaagttgtaaacggtaacatgaaacaaatgaaagttcttgctataatggtatggaaaacaagaaggaaatgaaaatatttttatgcctacttaggaaaaaaagg

SEQ ID NO: 142696 - DNA, 120 bp, Artificial Sequence
  ENSG00000104447_52 (sequence is synthesized)
gtagcacttattcattccaagtacttttttttttttaatttttaagctcttaactcacattgttatgcttaagatgataaacatatatcctctttttattgctttgtctatgtttcatat

SEQ ID NO: 142697 - DNA, 120 bp, Artificial Sequence
  ENSG00000104447_53 (sequence is synthesized)
gaaacatttcagaaattattttgataagtgttgctggaatctgcaacgctgatttttttttgcattctgtagtcgcatttgcactccatttttacattaattcgcagttgctttgtatca

SEQ ID NO: 142698 - DNA, 120 bp, Artificial Sequence
  ENSG00000104447_54 (sequence is synthesized)
ttgttttgtttgggttttgtttctttttcacagtgccgggtcttcgtttcttaaagttggatggcaggtagagttcaaccagttcgtgactgttgtagcgaatgaagttaaaaaaatgtc

SEQ ID NO: 142699 - DNA, 120 bp, Artificial Sequence
  ENSG00000104447_55 (sequence is synthesized)
tttctgatgttgtgttgtcattttcatttttgcatttttttgtttgcatattaaaaaaagagaaaagagaaagcaagagacagaaatcaggactaagtcctctgcttcagtttcattgtt

SEQ ID NO: 142700 - DNA, 120 bp, Artificial Sequence
  ENSG00000104447_56 (sequence is synthesized)
aacgggccttattctgatctcacctgtcgcgtagctctaatattcacataaactgaaataaagaagtggaatgaggagctttgacattcaaattatgtgatgtaatttatcttccttagg

SEQ ID NO: 142701 - DNA, 120 bp, Artificial Sequence
  ENSG00000104447_57 (sequence is synthesized)
aattttgatggatgcatctcaaaatgtatagccagacttgagaggtgacaattaaagatctaaaaaagagaggagattcccccaaacaacaatatttaattttcttagtaaaaagaataa

SEQ ID NO: 142702 - DNA, 120 bp, Artificial Sequence
  ENSG00000104447_58 (sequence is synthesized)
cagaatgcatcgtggcaatccttaagcaacattatctatgtggactgcttaaatcagcaaaacaccagaagtttggttaacttgggcaatatgacaagtattactttttgggcaaaacta

SEQ ID NO: 142703 - DNA, 120 bp, Artificial Sequence
  ENSG00000104447_59 (sequence is synthesized)
ctcattaagcaatttctctagtgtgtcggacacaaataggttctttatttttggcatgtatgcctttttattttcattcaattttttttttttctcagacagacatagtagtaacgacta

SEQ ID NO: 142704 - DNA, 120 bp, Artificial Sequence
  ENSG00000104447_60 (sequence is synthesized)
gcattggaaaatacatatcactattcttggaatatttatggtcagtctactttttagtagaatatttttggatagcgttgacacgatagatcttattccatacttctttattattgataa

SEQ ID NO: 142705 - DNA, 120 bp, Artificial Sequence
  ENSG00000104447_61 (sequence is synthesized)
ttttattttcattttttgctttcattattatacatattttggtggagaagaggttgggcttttttgaaagagacaaaaatttattataacactaaacactccttttttgacatattaaag

SEQ ID NO: 142706 - DNA, 120 bp, Artificial Sequence
  ENSG00000104447_62 (sequence is synthesized)
aaagcctttattccatctctcaagatatattataaaatttatttttttaatttaagatttctgaattattttatcttaaattgtgattttaaacgagctattatggtacggaactttttt

SEQ ID NO: 142707 - DNA, 120 bp, Artificial Sequence
  ENSG00000104447_63 (sequence is synthesized)
gaggaatttcatgatgatttaggaattttctctcttggaaaaggcttcccctgtgatgaaaatgatgtgccagctaaaattgtgtgccatttaaaaactgaaaatattttaaaattattt

SEQ ID NO: 142708 - DNA, 120 bp, Artificial Sequence
  ENSG00000104447_64 (sequence is synthesized)
gtctatattctaaattgagctttggatcaaactttaggccaggaccagctcatgcgttctcattcttccttttctcactctttctctcatcactcacctctgtattcattctgttgtttg

SEQ ID NO: 142709 - DNA, 120 bp, Artificial Sequence
  ENSG00000104447_65 (sequence is synthesized)
ggatagaaaaatcataaagagccaacccatctcagaacgttgtggattgagagagacactacatgactccaagtatatgagaaaaggacagagctctaattgataactctgtagttcaaa

SEQ ID NO: 142710 - DNA, 120 bp, Artificial Sequence
  ENSG00000104447_66 (sequence is synthesized)
aggaaaagagtatgcccaattctctctacatgacatattgagattttttttaatcaacttttaagatagtgatgttctgttctaaactgttctgttttagtgaaggtagatttttataaa

SEQ ID NO: 142711 - DNA, 120 bp, Artificial Sequence
  ENSG00000104447_67 (sequence is synthesized)
acaagcatggggattcttttctaaggtaatattaatgagaagggaaaaaagtatctttaacagctctttgttgaagcctgtggtagcacattatgtttataattgcacatgtgcacataa

SEQ ID NO: 142712 - DNA, 120 bp, Artificial Sequence
  ENSG00000104447_68 (sequence is synthesized)
tctattatgatccaatgcaaatacagctccaaaaatattaaatgtatatatattttaaaatgcctgaggaaatacatttttcttaataaactgaagagtctcagtatggctattaaaata

SEQ ID NO: 142713 - DNA, 120 bp, Artificial Sequence
  ENSG00000104447_69 (sequence is synthesized)
attattagcctcctgttgtgtggctgcaaaacatcacaaagtgaccggtcttgagacctgtgaactgctgccctgtttagtaaataaaattaatgcatttctagagggggaatatctgcc

SEQ ID NO: 142714 - DNA, 120 bp, Artificial Sequence
  ENSG00000104447_70 (sequence is synthesized)
atccagtggtggaaatgtggagtaaagaagctggtggtctgcttctgtgctgtatgccagccttttgccttaagttgagaggaggtcaactttagctactgtctttggtttgagagccat

SEQ ID NO: 142715 - DNA, 120 bp, Artificial Sequence
  ENSG00000104447_71 (sequence is synthesized)
ggcaaaaaaaaaaaaagaaaaaaagatcaagtcgtctttggtgagccagtaaggtgaaagcttgctgactgtccaaggcacaagagaaaattgaggaattgaaatgcaacctgagtatca

SEQ ID NO: 142716 - DNA, 120 bp, Artificial Sequence
  ENSG00000104447_72 (sequence is synthesized)
aactaaatattctaatcaaaggtaggtactgttaggtggaattctatcagcaggcaactgcaaatgagaagaagatagaaggacgcccgtcgggactttggagggcattgttattttccc

SEQ ID NO: 142717 - DNA, 120 bp, Artificial Sequence
  ENSG00000104447_73 (sequence is synthesized)
aaagaaagacggccaagggcagaggcatggattctttgcagagcacttccttttggtttttcagtactgtttcatagacagtgggctcacatgttcctgatagtgctgcagttgcttaga

SEQ ID NO: 142718 - DNA, 120 bp, Artificial Sequence
  ENSG00000104447_74 (sequence is synthesized)
aagcatcccagttaattgcagtaattagaacttctggaatatgctagggcagaagtatgtcaagtatgtcacatgaagaaaatgtgaaattcaagagtaatccacacgtgagaaactaga

SEQ ID NO: 142719 - DNA, 120 bp, Artificial Sequence
  ENSG00000104447_75 (sequence is synthesized)
caatgtacattcatgtgttctcttgaaaggaaagggagagctgtaagcttcactctgtcctacaccggagaaaagcaggaataactttaccgtggaaataatgtttagcttttatcagag

SEQ ID NO: 142720 - DNA, 90 bp, Artificial Sequence
  ENSG00000104447_76 (sequence is synthesized)
ctggcccaacatataaactgcagcatatcactttttctttttgtgcctcaggttcctcagctgtaaaattgaaaaatatatgtattaata

SEQ ID NO: 142721 - DNA, 120 bp, Artificial Sequence
  ENSG00000104447_77 (sequence is synthesized)
ggttcctcagctgtaaaattgaaaaatatatgtattaataatattattaataataataatggtaatgtagtacttgtttgtaaagcactttgagatccttggttgaaaggcaccatagga

SEQ ID NO: 142722 - DNA, 120 bp, Artificial Sequence
  ENSG00000104447_78 (sequence is synthesized)
gtgccaagtattattatgtggccaagggggttatttaaactgtcagttcccaaaggccaggaaaggttggggtcatttttcttaaagacgagctgtaaatatcaactaggcagccaatag

SEQ ID NO: 142723 - DNA, 120 bp, Artificial Sequence
  ENSG00000104447_79 (sequence is synthesized)
tgttgactatgaagatgcaaaactattactaggctgataaaatcatagtttcttaatggctaccaataaggcaaatatcacaataataaacgccaaattccttagggcggactatttgac

SEQ ID NO: 142724 - DNA, 120 bp, Artificial Sequence
  ENSG00000104447_80 (sequence is synthesized)
aaccacatggaaaactttgggggaggcatgaggggggaacatctcaaaatgccaatgtaaaatttaacttacagcaatattcaccagcagaaaatgtctttcatatggaatgatttcatg

SEQ ID NO: 142725 - DNA, 120 bp, Artificial Sequence
  ENSG00000104447_81 (sequence is synthesized)
ttgctaagaaaaagaattcaatttgtagtcctgatttgaatactagaatgttggctataatagttctgttcttacaacacatgaaattttttcgttttattttattttgttttcatagtg

SEQ ID NO: 142726 - DNA, 120 bp, Artificial Sequence
  ENSG00000104447_82 (sequence is synthesized)
catgttcatttctactcacaaacatgttcttggtgtatttcttatgcaaacaatcttcaggcagcaaagatgtctgttacatctaaacttgaataataaagttttaccaccagttacaca

SEQ ID NO: 142727 - DNA, 120 bp, Artificial Sequence
  ENSG00000104447_83 (sequence is synthesized)
attttaattctctcctaccgggcgcagcggaggagctggaggtggttggacccgaggggccgccgccgccgccgccactgcaagttttctgggggctcgtgacaagcggggcgcagacta

SEQ ID NO: 142728 - DNA, 120 bp, Artificial Sequence
  ENSG00000104447_84 (sequence is synthesized)
aggatgaatcccagtccctgttacgggtttttgaatctgcttggatgactcccgaagagcagtttagtctttgagaaaaccagatctccattgcttccatgaagatcttattaatattta

SEQ ID NO: 142729 - DNA, 120 bp, Artificial Sequence
  ENSG00000104447_85 (sequence is synthesized)
accattctgcactacttctgctccaagaatccaccactatcttggttcctgagagattaaggatgatgttttctgttgtataatgaacagcagtattatttgaacaaagatgtacagatc

SEQ ID NO: 142730 - DNA, 120 bp, Artificial Sequence
  ENSG00000104447_86 (sequence is synthesized)
gagaagggaaagtaacaacagaaaaggtaaaaggactttgagagttctttaaattgtttctgttagcatctctgagtgtctggggaacgtcggtttggcggccacgcactgccccccacc

SEQ ID NO: 142731 - DNA, 120 bp, Artificial Sequence
  ENSG00000104447_87 (sequence is synthesized)
agtaagagaaaaatacactggagttttcatggcgtttctaggaaacaagaacaaaacaaggttcttaggaaagattttgaaaccccattcaaagaggacttctaaagaaaatgtcactac

SEQ ID NO: 142732 - DNA, 120 bp, Artificial Sequence
  ENSG00000104447_88 (sequence is synthesized)
aaagagtaatttctctagcacagaaatatcttcaacgttttgtgatttcctgacgatgaaacttcaagtggcttcctgctttctccaagtggtccagcctcatcaactgggattcaagat

SEQ ID NO: 142733 - DNA, 120 bp, Artificial Sequence
  ENSG00000104447_89 (sequence is synthesized)
acatgcattttctttcttcctttttgagcgtgtgatttctttctttctttcttctcttctgctccctttttcccccttcctctcctccttttggtgggtctgaggcatctgagctttgga

SEQ ID NO: 142734 - DNA, 120 bp, Artificial Sequence
  ENSG00000104447_90 (sequence is synthesized)
aaccagcgacttcaaactgcagtagcccctggagtcagcagggtcaagttcagccgccggggaggaggaaaaacaaatccccatttgccaaaaaaagaagtttcaggccggtgccccctc

SEQ ID NO: 142735 - DNA, 120 bp, Artificial Sequence
  ENSG00000104450_0 (sequence is synthesized)
gacgagaccctccctcagcacctgcagtgcagccagagccggtgcggcggccgcgacttccccgacgcggggcgctgagaagcactatgaccaccaaagattatccatcattgtggggct

SEQ ID NO: 142736 - DNA, 120 bp, Artificial Sequence
  ENSG00000104450_1 (sequence is synthesized)
ttggaacaacaaaaacattcaaaattcccattgaacatctagatttcaaatacattgaaaaatgttcagatgttaaacatctggaaaaaattctttgcgtgctcagatctggtgaggaag

SEQ ID NO: 142737 - DNA, 120 bp, Artificial Sequence
  ENSG00000104450_2 (sequence is synthesized)
gatattatcctgaacttacagaattttgtgaaaagcatcttcaagccttggcccctgaaagcagagctttgaggaaagataaaccagcagcaacagcagccagttttacagctgaagaat

SEQ ID NO: 142738 - DNA, 120 bp, Artificial Sequence
  ENSG00000104450_3 (sequence is synthesized)
gggaaaaaattgatggtgatataaagagttgggtatcagaaattaaaaaagaagaagataaaatgcactttcatgaaactgagacatttccagcaatgaaagataatttgcctccagttc

SEQ ID NO: 142739 - DNA, 120 bp, Artificial Sequence
  ENSG00000104450_4 (sequence is synthesized)
gtggttcaaacagctgtcttcatgtaggcaaggaaaaatattctaaaagaccaactaaaaagaaaactccaagggattacgcggaatgggataaatttgacgtggagaaggaatgtttaa

SEQ ID NO: 142740 - DNA, 120 bp, Artificial Sequence
  ENSG00000104450_5 (sequence is synthesized)
aaattgatgaagattacaaagaaaagacggtaatagacaagtcacacttgtctaaaattgagacaagaatagatacagcaggtctaactgagaaagaaaaggattttcttgccactcgtg

SEQ ID NO: 142741 - DNA, 120 bp, Artificial Sequence
  ENSG00000104450_6 (sequence is synthesized)
aaaaggagaaaggaaatgaagctttcaactcaggagattatgaagaagcagtgatgtattataccaggagcatatcagcgcttcccactgtagttgcctataacaatcgagctcaagcag

SEQ ID NO: 142742 - DNA, 120 bp, Artificial Sequence
  ENSG00000104450_7 (sequence is synthesized)
aaatcaaattacagaactggaatagtgcttttcaggattgtgaaaaggtcttggagttagaacctggaaacgtaaaggctcttctgcgtcgtgctactacatataaacatcaaaacaagc

SEQ ID NO: 142743 - DNA, 120 bp, Artificial Sequence
  ENSG00000104450_8 (sequence is synthesized)
tccgggaagctacagaagatttgagtaaagtactagatgttgagcctgataatgatttggccaagaaaaccttgtcagaggttgaaagagatctgaaaaattctgaagctgcatctgaga

SEQ ID NO: 142744 - DNA, 120 bp, Artificial Sequence
  ENSG00000104450_9 (sequence is synthesized)
ctcaaaccaaagggaaaaggatggttattcaggaaatagaaaactccgaagatgaagaaggaaaaagcggaagaaaacatgaagatggcggtggagataagaagcccgcggagccggcgg

SEQ ID NO: 142745 - DNA, 120 bp, Artificial Sequence
  ENSG00000104450_10 (sequence is synthesized)
gagccgcgcgcgccgcccagccgtgcgtcatgggcaacatccagaagaagctgactggcaaagccgaaggcggcaagcggccggcaaggggcgcgccgcagcggggccagaccccggagg

SEQ ID NO: 142746 - DNA, 80 bp, Artificial Sequence
  ENSG00000104450_11 (sequence is synthesized)
cgggcggcggcgccaccgggcatccgggcggcgggcagggcgcggagaaccctgccggcctgaagagccagggcaacgag

SEQ ID NO: 142747 - DNA, 120 bp, Artificial Sequence
  ENSG00000104450_12 (sequence is synthesized)
gcaacgagctgttccgaagcgggcagttcgccgaggcggccggcaagtactcggcggcaatcgcgctcctggagccagcaggaagtgaaattgcagatgatctaagtatcttatattcaa

SEQ ID NO: 142748 - DNA, 120 bp, Artificial Sequence
  ENSG00000104450_13 (sequence is synthesized)
atagagcagcatgttacctaaaagaaggaaactgcagtggctgcattcaagattgtaacagggctctggaacttcatccattctctatgaaacctcttctgaggcgggcgatggcctatg

SEQ ID NO: 142749 - DNA, 120 bp, Artificial Sequence
  ENSG00000104450_14 (sequence is synthesized)
aaactctagagcagtatgggaaagcttatgtggattataaaacagtgttgcagatagactgtggactccagctagcaaatgacagtgttaacaggctatcaagaattttaatggagctgg

SEQ ID NO: 142750 - DNA, 120 bp, Artificial Sequence
  ENSG00000104450_15 (sequence is synthesized)
acctattcctgctgtgcctgcttctgtgccactgcaagcttggcatccggcaaaagagatgatctcaaaacaagcaggagactccagcagccatcgccagcagggcatcacagatgaaaa

SEQ ID NO: 142751 - DNA, 120 bp, Artificial Sequence
  ENSG00000104450_16 (sequence is synthesized)
aacatttaaagcccttaaggaagaaggaaatcaatgtgtaaatgacaaaaactataaagacgccctcagtaaatacagcgaatgcttaaagattaacaataaggaatgtgccatatatac

SEQ ID NO: 142752 - DNA, 120 bp, Artificial Sequence
  ENSG00000104450_17 (sequence is synthesized)
aaacagagctctctgttacttgaagctgtgccagtttgaagaagcaaagcaggactgtgatcaggcacttcagctagctgatgggaacgtgaaagccttctatagacgagctctggctca

SEQ ID NO: 142753 - DNA, 120 bp, Artificial Sequence
  ENSG00000104450_18 (sequence is synthesized)
taaaggactcaagaattatcagaaaagcttaattgatctcaataaagttatcctactagatccaagtattattgaggcaaagatggaactggaagaggtaactagactccttaatcttaa

SEQ ID NO: 142754 - DNA, 120 bp, Artificial Sequence
  ENSG00000104450_19 (sequence is synthesized)
ggataagacagcaccattcaacaaagaaaaggagagaaggaaaattgagattcaagaggtgaatgaaggcaaggaggagcctggaagacctgcaggggaggtctccatgggatgccttgc

SEQ ID NO: 142755 - DNA, 120 bp, Artificial Sequence
  ENSG00000104450_20 (sequence is synthesized)
ttctgagaagggaggcaaaagcagcaggtcaccagaagaccctgagaaacttccgatagccaagcctaataatgcctatgaatttggtcagattataaatgctctcagtaccaggaagga

SEQ ID NO: 142756 - DNA, 120 bp, Artificial Sequence
  ENSG00000104450_21 (sequence is synthesized)
taaagaagcctgtgcacatcttttagccatcactgcaccaaaagatttgccgatgtttttaagtaacaaacttgaaggggatacattccttctcctcattcagtctctgaaaaataatct

SEQ ID NO: 142757 - DNA, 120 bp, Artificial Sequence
  ENSG00000104450_22 (sequence is synthesized)
tattgaaaaagatccctcattggtgtatcagcatcttttatacctgagtaaagcagaaaggtttaagatgatgttgacactaattagcaagggccaaaaggagctaattgaacagctgtt

SEQ ID NO: 142758 - DNA, 120 bp, Artificial Sequence
  ENSG00000104450_23 (sequence is synthesized)
tgaggacctttcggacacaccaaacaaccattttactttagaagatatacaggccctaaaaaggcagtatgagctttaaatcaagataattgttagatttcttccatgcatgtatgtgtt

SEQ ID NO: 142759 - DNA, 120 bp, Artificial Sequence
  ENSG00000104450_24 (sequence is synthesized)
ccaggaatgttaatgagatggtattgtaaaagagttgcatggataaaacttggcctagaaaagtttggtctgcactataaaacattttacttattttcctacatagaacatgtatattct

SEQ ID NO: 142760 - DNA, 120 bp, Artificial Sequence
  ENSG00000104450_25 (sequence is synthesized)
tgtaccagaaccaaataagtatatttagaacttgttaaaaatacattttaatttatgatatacatattattttaattacttgttaaaattttgagttaagttgcatttctttgggctatg

SEQ ID NO: 142761 - DNA, 120 bp, Artificial Sequence
  ENSG00000104450_26 (sequence is synthesized)
aaaattttgagttaagttgcatttctttgggctatgaaggagtcctcttaagtttgatagaaatgaatttcttgtaacattcttttttaaaagtggaagtcattaacagtgattattata

SEQ ID NO: 142762 - DNA, 120 bp, Artificial Sequence
  ENSG00000104450_27 (sequence is synthesized)
tcacttatatcctgctaagatacacataaatcccattttgtactagtacctgtggattacagtcagttaaaatgaaatgcaacactgaagtctataacatgaaatgattattaaattgtt

SEQ ID NO: 142763 - DNA, 120 bp, Artificial Sequence
  ENSG00000104450_28 (sequence is synthesized)
tattaatttagagctataagaggaacttattttttctaatacggaagcattgcctaataattaagaacaaaaattgccaaaaatttctaccactttttactagattttaaaaagctactt

SEQ ID NO: 142764 - DNA, 120 bp, Artificial Sequence
  ENSG00000104450_29 (sequence is synthesized)
tcttttatattgcctatataagcaaaaaaccaaccactgtattaaagcaaactaagcctgcatttatatctgaattattacctccatattttaccaaacatttgaatgtcccccttcccc

SEQ ID NO: 142765 - DNA, 120 bp, Artificial Sequence
  ENSG00000104450_30 (sequence is synthesized)
cttttttgttttctgcttttatgactgtatttattcctttactgtaaaagaatatgaagaactcatacatgttgaaagctcctttgttgactgggtcaaagtgaaggaatttcaatctcc

SEQ ID NO: 142766 - DNA, 120 bp, Artificial Sequence
  ENSG00000104450_31 (sequence is synthesized)
ggggctccccagtcccggcaggtcctggcgccgctgtacatagaaaccgttgccacggcgggaggatgccgtttcttttcggtctccgactgcagggggcggtcggccctgtggatgcag

SEQ ID NO: 142767 - DNA, 120 bp, Artificial Sequence
  ENSG00000104450_32 (sequence is synthesized)
aagtttaccactttttgattttttccctgctgttgcttctttggaccacttggtggcactagatttaccttcaggcaagccactggatgaaccgccagcatgacttcgggtggcactgcc

SEQ ID NO: 142768 - DNA, 120 bp, Artificial Sequence
  ENSG00000104450_33 (sequence is synthesized)
atcatccacactactgcttccactgttgtgcctgaatttggatggctttgactcaatatctacttgcacctccatactgttgccttctctgaaatataagagtaacaaatacaaacataa

SEQ ID NO: 142769 - DNA, 120 bp, Artificial Sequence
  ENSG00000104450_34 (sequence is synthesized)
gtgaaggcggggaaggtgaacctgtggccgtcggcagatctgcagatctgccggactgcgggtcggggcgtggcaggggcctagtccccgccccggccgtcagcctgtcgcctctggctc

SEQ ID NO: 142770 - DNA, 120 bp, Artificial Sequence
  ENSG00000104450_35 (sequence is synthesized)
gagctggctcaatttttctattcgtacagaaattcgtaatctatcagtttttctagctttgccttgtaaattcacaagccagtttcgctcatctttttcttaatacagcttggtagaatc

SEQ ID NO: 142771 - DNA, 120 bp, Artificial Sequence
  ENSG00000104450_36 (sequence is synthesized)
tctcaaacccattttccttcttaacctgtcacctttttctagtgctcagtttaattcctggtcatcacctttaaatgtaaatggctgtgtttatttgacacagaccatttgccagttaac

SEQ ID NO: 142772 - DNA, 120 bp, Artificial Sequence
  ENSG00000104450_37 (sequence is synthesized)
tttaaatatctctctttgataattgttttgtatatatctacttgattgcaaacaaatgtgttggtttcaaaacaggtatgggtagccccatttatatgccaaaaatgaacgtattactag

SEQ ID NO: 142773 - DNA, 120 bp, Artificial Sequence
  ENSG00000104450_38 (sequence is synthesized)
gcttgttttaatggtctgtctcttccacttgattgcatcctccttgagggctgtgactgtattttgtttgcggttgtatgcccagtgccataattgaatcaaatgttaagtttcaatgga

SEQ ID NO: 142774 - DNA, 120 bp, Artificial Sequence
  ENSG00000104450_39 (sequence is synthesized)
aaccgcagtggtatagcaacagacatattgagctattttctgatttttcttagctgtctaaaacttacagatagccaatctttacctttcataatactgagttccattgcattatgccag

SEQ ID NO: 142775 - DNA, 120 bp, Artificial Sequence
  ENSG00000104472_0 (sequence is synthesized)
ctcacggagctcgtagtttcccggacgggccgctcccggcctcgcggcctcgcctccccacactacaactcccacggggcagcgggcgcggctccccgtacccaccagctggccgggcag

SEQ ID NO: 142776 - DNA, 120 bp, Artificial Sequence
  ENSG00000104472_1 (sequence is synthesized)
ggcagccacttcgcggtcgggcccgccggctgcgggcacccgcgcgacgggcgggaagatggcggacgtggtcgtgggtaaagacaagggcggggagcagcggctcatctcgctgcctct

SEQ ID NO: 142777 - DNA, 120 bp, Artificial Sequence
  ENSG00000104472_2 (sequence is synthesized)
atcccgcatccgggtcatcatgaagagctcccccgaggtgtccagcatcaaccaggaggcgttggtgctcacggccaaggccacggagctctttgttcaatgcctagccacctattccta

SEQ ID NO: 142778 - DNA, 120 bp, Artificial Sequence
  ENSG00000104472_3 (sequence is synthesized)
cagacacggcagtggaaaggaaaagaaagtactgacttacagtgatttagcaaacactgcacagcaatcagaaacttttcagtttcttgcagatatattaccaaagaagattttagctag

SEQ ID NO: 142779 - DNA, 120 bp, Artificial Sequence
  ENSG00000104472_4 (sequence is synthesized)
taaatacctgaaaatgcttaaagaggaaaagagggaagaagatgaggagaatgacaatgataatgaaagtgaccatgatgaagctgactcctaaaccaaaagtgctttaaaaaccagcct

SEQ ID NO: 142780 - DNA, 120 bp, Artificial Sequence
  ENSG00000104472_5 (sequence is synthesized)
ggcgaggacagccctggacccactccactgtctctaagtaaacacagcactgcccgcttttagcgtcttcacttcttcacagagttccagtgtgtggtattctttcgaggtattctttcc

SEQ ID NO: 142781 - DNA, 120 bp, Artificial Sequence
  ENSG00000104472_6 (sequence is synthesized)
aggccgagattgagcacctcatgtacctacgccacagacagccagagggaaagcgacccagacagcagcccctcctcgacaggcccaccctgcagctcaggcaccaagaaaacagccgat

SEQ ID NO: 142782 - DNA, 120 bp, Artificial Sequence
  ENSG00000104472_7 (sequence is synthesized)
actggcagccattgcagctccaaactgcagaggcaaggccaattttaacttttcaatttacagtcgattttgaagagcttctacatatcggttatgtaaattcatatatgtatattttgg

SEQ ID NO: 142783 - DNA, 120 bp, Artificial Sequence
  ENSG00000104472_8 (sequence is synthesized)
aatcagttcttataaacagctcgattcagttttagctaaatttatagtttaggtagtatgttacatttgaatttttgtcttaagaaaagttgactgttcagatatttttctactgtaaag

SEQ ID NO: 142784 - DNA, 120 bp, Artificial Sequence
  ENSG00000104472_9 (sequence is synthesized)
aaatatacttttctattaaagatctgtacatatttttacagtaaaatgctttatggaactagttttagagccctctatggctttaaggccttgcttactgcctgcaaattttgagaaatt

SEQ ID NO: 142785 - DNA, 120 bp, Artificial Sequence
  ENSG00000104472_10 (sequence is synthesized)
acctcttgtataagcatgttgtactaaaaaaaaattttgaaacattttgtatattggagatctctctcatcttactgttctttgctttaaattcctggcacttctttttactgtctataa

SEQ ID NO: 142786 - DNA, 120 bp, Artificial Sequence
  ENSG00000104472_11 (sequence is synthesized)
gagaaaacctatcataagcccaattttttttttccacttagggtaaatgtttggctcctctcatttcattatctttttttttttttttttaaagacagattctcactcagttgcccaggc

SEQ ID NO: 142787 - DNA, 120 bp, Artificial Sequence
  ENSG00000104472_12 (sequence is synthesized)
gccaccatgcctggccttcattatctcttttttaaaaatgaaaaagtttataatttacattcagtaaaatcaccctttttagtgtctagtctgtgaattttgacaaatgcatggttttgt

SEQ ID NO: 142788 - DNA, 120 bp, Artificial Sequence
  ENSG00000104472_13 (sequence is synthesized)
aaccaatcgataggacagttctgccacccaggacattcccctctgttcctctgttcctctcttctcctgccccctagcaaccactggtgttttctgtccctcttgttcattgacatttat

SEQ ID NO: 142789 - DNA, 120 bp, Artificial Sequence
  ENSG00000104472_14 (sequence is synthesized)
tttaaaataaaatattttaaaatctactttttggtgtacagttctgagttttggcaaatgcagtcaagtcactaccaccaccacaattaacagctatatcaccctccagtaaattccctg

SEQ ID NO: 142790 - DNA, 120 bp, Artificial Sequence
  ENSG00000104472_15 (sequence is synthesized)
tggtcagctccttccccaccttttaccgtggcaaccgtcaagctattctctgtccctataccaggtgtcatcaaatttttttctggaaagggccatgcagtaaatagttcaagctttgtg

SEQ ID NO: 142791 - DNA, 120 bp, Artificial Sequence
  ENSG00000104472_16 (sequence is synthesized)
ggcttttatagtctctgttgctgctgctgaactcagctgttgtagcacgaaagcagccaggtaattactagatgaaggaatgcaggtggctgtgtttcaatagagctttatttctgcaaa

SEQ ID NO: 142792 - DNA, 120 bp, Artificial Sequence
  ENSG00000104472_17 (sequence is synthesized)
ctgaaacttgagttttgtgtaattttcatgtgtcatgaaatactgttttctccaaccatttaataatgtaaatacttgctagcttatgtgccattaaaaaatgacttgatttggcttaca

SEQ ID NO: 142793 - DNA, 120 bp, Artificial Sequence
  ENSG00000104472_18 (sequence is synthesized)
tttgtcgccttccttcgctccgcccgccccttccttccgtgcgcaccttcgccccgcccaccccactgtcctcccgccgtttctctcgcgcttccattcggcaaacccgagctctttgtt

SEQ ID NO: 142794 - DNA, 120 bp, Artificial Sequence
  ENSG00000104472_19 (sequence is synthesized)
tagtctttgaaacattctggttaaaaaatgattagtaatcaatagctctttccccaccccttgcctcccttctgctctcacggaaaattagactttttgctactttttccaagccgcaaa

SEQ ID NO: 142795 - DNA, 120 bp, Artificial Sequence
  ENSG00000104472_20 (sequence is synthesized)
gccaacaacattcacaagatgttggttggccgcgtatgctgggcagtcctttactctctacagggaccctgcctgccactgaagggaaaactcagggtgggtctacatggccgtagttag

SEQ ID NO: 142796 - DNA, 120 bp, Artificial Sequence
  ENSG00000104472_21 (sequence is synthesized)
agcttaagtctaccctggggctagcctaggctatctcaggtagtcgggcagggttgctcataaaagcagctcatagagacaccatggtttgtactcattggactggaaagaggcctatag

SEQ ID NO: 142797 - DNA, 120 bp, Artificial Sequence
  ENSG00000104472_22 (sequence is synthesized)
cgttcgttaggagacaatgctagtttctttgatattttacccagaaatgcagcctgaatttcatcttgttttggaacctcttatagaggtcaaagcaggaactagtacattttgaaatgt

SEQ ID NO: 142798 - DNA, 120 bp, Artificial Sequence
  ENSG00000104472_23 (sequence is synthesized)
gcattgctgtgttcatagtctaccataaccaattgctgatgtacgctttatgtttttaagatatattaccaaagaagattttagctagtaaatacctgaaaatgcttaaagaggaaaaga

SEQ ID NO: 142799 - DNA, 120 bp, Artificial Sequence
  ENSG00000104490_0 (sequence is synthesized)
aaaggcttgtgagaatctggtggatgctggaccttgctgctgctgctactgctgtttccaggggctgcagagcatggactgttaaatcttgcacttcttctgagtgagctgaattcttgc

SEQ ID NO: 142800 - DNA, 120 bp, Artificial Sequence
  ENSG00000104490_1 (sequence is synthesized)
cgccaggatggggaaacagaacagcaagctgcgcccggaggtcatgcaggacttgctggaaagcacagactttacagagcatgagatccaggaatggtataaaggcttcttgagagactg

SEQ ID NO: 142801 - DNA, 120 bp, Artificial Sequence
  ENSG00000104490_2 (sequence is synthesized)
ccccagtggacatttgtcaatggaagagtttaagaaaatatatgggaactttttcccttatggggatgcttccaaatttgcagagcatgtcttccgcaccttcgatgcaaatggagatgg

SEQ ID NO: 142802 - DNA, 120 bp, Artificial Sequence
  ENSG00000104490_3 (sequence is synthesized)
gacaatagactttagagaattcatcatcgccttgagtgtaacttcgagggggaagctggagcagaagctgaaatgggccttcagcatgtacgacctggacggaaatggctatatcagcaa

SEQ ID NO: 142803 - DNA, 120 bp, Artificial Sequence
  ENSG00000104490_4 (sequence is synthesized)
ggcagagatgctagagatcgtgcaggcaatctataagatggtttcctctgtaatgaaaatgcctgaagatgagtcaaccccagagaaaagaacagaaaagatcttccgccagatggacac

SEQ ID NO: 142804 - DNA, 120 bp, Artificial Sequence
  ENSG00000104490_5 (sequence is synthesized)
caatagagacggaaaactctccctggaagagttcatccgaggagccaaaagcgacccgtccattgtgcgcctcctgcagtgcgacccgagcagtgccggccagttctgagccctgcgccc

SEQ ID NO: 142805 - DNA, 120 bp, Artificial Sequence
  ENSG00000104490_6 (sequence is synthesized)
accaatcgaattgtagagctgcttgtgttcccttttgattcttctttttaacaatttttttttttttttgccaaacaatatcaatggtgatgccgtcccctgtgcggtctgatgcgcctt

SEQ ID NO: 142806 - DNA, 120 bp, Artificial Sequence
  ENSG00000104490_7 (sequence is synthesized)
cctccgtgacgccttcagcttcttttgtcgtggatgcttcgtgggaatgcccagagccccagtgtgcttgtggagagcatggacagacttcgtggtgttcattgtttgatgatttttaat

SEQ ID NO: 142807 - DNA, 120 bp, Artificial Sequence
  ENSG00000104490_8 (sequence is synthesized)
cgttactattatttttttttattctaatgtctctgttctaaaacgtaagactcgggggttggggcaaaagaagggaaacccatccagtcctgtgattctattgcaagcttcaaggggctt

SEQ ID NO: 142808 - DNA, 120 bp, Artificial Sequence
  ENSG00000104490_9 (sequence is synthesized)
ttgtttgaaagacaaaactccccacctgaatctgttgtcacacgtgccgtaggggtgatggatggcaccggatgctggattccccaagaacaagttaccctctggggtgaggctattcca

SEQ ID NO: 142809 - DNA, 120 bp, Artificial Sequence
  ENSG00000104490_10 (sequence is synthesized)
gcgagctgggacatttccccatgggggcccactcccctctcttccccagcaggctgtagtttctaagctgtgaacatttcaagataaattaacagaggagaggaaaaagatggctcagct

SEQ ID NO: 142810 - DNA, 120 bp, Artificial Sequence
  ENSG00000104490_11 (sequence is synthesized)
attttttcacaggtttacactagttgagctaatatgcgtgtctttggaaattaaacacaaatggtaacatattccaaaaccagacccatcttgttgcctattgtgataaaataaaaagac

SEQ ID NO: 142811 - DNA, 120 bp, Artificial Sequence
  ENSG00000104490_12 (sequence is synthesized)
ggctgtatataacatattgggtaatgcagaccaaattaagtgttttgccttgtttaaatgaaatgcatgtttagtgagcactaatacaatcttattccagaagactgtttttagtagctt

SEQ ID NO: 142812 - DNA, 120 bp, Artificial Sequence
  ENSG00000104490_13 (sequence is synthesized)
attgtgaagtaagacaactataatgaatgtctgtcttgtttggaagtcatatctgtctttgcacaaatgtaccaatcgacaagtatattttatatattccataaaaatacaaagtaaccc

SEQ ID NO: 142813 - DNA, 120 bp, Artificial Sequence
  ENSG00000104490_14 (sequence is synthesized)
atgacaggggaccagtagggtggtttccctctcaggcccagcagcccattgacagcattagactggcggcatggtgcttttctgagcagatcaatactctgcagactcgaaaaaacatca

SEQ ID NO: 142814 - DNA, 120 bp, Artificial Sequence
  ENSG00000104490_15 (sequence is synthesized)
catacattcttggaacttcccagtggtttaatctatgtgcatggttagggagccaggtctggaatattcagtttccctgcccctgttaaagaatcagaggttgggcagtcatcaaattca

SEQ ID NO: 142815 - DNA, 120 bp, Artificial Sequence
  ENSG00000104490_16 (sequence is synthesized)
tcataaagacatgggcaagtgtgtctgtggtttccaaggcccccctatggagaatccaaaagtattttccattgccgtgctctttgaatgcagacttctatttccagaagtgacagcaca

SEQ ID NO: 142816 - DNA, 120 bp, Artificial Sequence
  ENSG00000104490_17 (sequence is synthesized)
agtctgagttgctgtttggtctggtgacctcagacacactaatttgaattgaaagctaagagtaaaaatttgctggttacaggcgagtcatactcttgcaagtagttagcaaagggaggc

SEQ ID NO: 142817 - DNA, 120 bp, Artificial Sequence
  ENSG00000104490_18 (sequence is synthesized)
ccaaattctcaaggttgttgatggggaacttgccactaagagaaggcagagaggtccctagtgggtatatttgctgccaagccacttgccaaagaagaggaaccacagaaagagagacat

SEQ ID NO: 142818 - DNA, 120 bp, Artificial Sequence
  ENSG00000104490_19 (sequence is synthesized)
catgaccaggagaaaaatgtgactagacatgctaacctccaggtttttatatatgacttgagtctgctgtaattggcagcagaaatccaaatttgtatggtagaccaaaaagaaccaaat

SEQ ID NO: 142819 - DNA, 120 bp, Artificial Sequence
  ENSG00000104490_20 (sequence is synthesized)
ccatagggtgaaattttgagacctagactctgtaaaaataatcctagtcttcctccaggggtcagttcctcacagtggttctgtaccaaaacttgccaaattcctccatggccaagtgtt

SEQ ID NO: 142820 - DNA, 120 bp, Artificial Sequence
  ENSG00000104490_21 (sequence is synthesized)
aaaatctgtgtttggaaaatagcgaattaacctaagacacagaaggcagactgggtgaggagacctagcatgccctattggcagtgctcaggagctgcatcccacttttccctgctctga

SEQ ID NO: 142821 - DNA, 120 bp, Artificial Sequence
  ENSG00000104490_22 (sequence is synthesized)
atcgaagtcctagttccttcctttgattctcctttggtaggtggaatcagttaatgttttgagaaacctgcctgggctctgcccttagtcatgacatctcgctgagccagacccactctg

SEQ ID NO: 142822 - DNA, 120 bp, Artificial Sequence
  ENSG00000104490_23 (sequence is synthesized)
ttccttggaacctagagctggagtgaggagtagaggtctccggctattccagaaagaaaagtgagccacatgcaggctgatgaatgccgacacttccagaatgtatagaaatagtccctg

SEQ ID NO: 142823 - DNA, 120 bp, Artificial Sequence
  ENSG00000104490_24 (sequence is synthesized)
tcctggcctgccactgaccctgtctgtattttctcggaggttgtttttctccttctccttcccaggaaggtctttgtatgtcgaatccagtgcactcaagtttggccaagggactccaca

SEQ ID NO: 142824 - DNA, 120 bp, Artificial Sequence
  ENSG00000104490_25 (sequence is synthesized)
gcacccagaagactgcatgcctcaaggtttatgtcactcctctgctgggctgttcattgtcattgctgtgttcagggacctttggaaataaaacctgttctgtcccaaataaaaccagcc

SEQ ID NO: 142825 - DNA, 120 bp, Artificial Sequence
  ENSG00000104490_26 (sequence is synthesized)
tgtgatgttcaagggactggaataaagtggcttacgacctgaaggattctacagagtgctcaactgttcatacatcattcagagtgggagggagctgggggtgctgtcccatcccatctg

SEQ ID NO: 142826 - DNA, 120 bp, Artificial Sequence
  ENSG00000104490_27 (sequence is synthesized)
tatgcccacggtggatttaataatatataatttataaatcatagcctatggagtggcccgtaaatcagttgactgtgtagctcttgcctggcattaaagcatgtttttggtttaacatga

SEQ ID NO: 142827 - DNA, 120 bp, Artificial Sequence
  ENSG00000104490_28 (sequence is synthesized)
gacggtgctgtccagggggaggcgggcggagggaaggcgctgccgctgctgccgccgcctcgcccgaagcgacacagacgctgggagcggccgaggcgagtgatttcttctgacttgagc

SEQ ID NO: 142828 - DNA, 120 bp, Artificial Sequence
  ENSG00000104490_29 (sequence is synthesized)
ctgcagtgtgctgtgagagatctaccactagattatctcaactttggtctcctgggaccactcgttgctgacagtcagaaattgcaaggcatctgatctcctggtgttaaaatctgtcgt

SEQ ID NO: 142829 - DNA, 120 bp, Artificial Sequence
  ENSG00000104490_30 (sequence is synthesized)
aggggccccttagatgtcttcctccggattttttgttaagcttttcctagacagtttacagaaggctttgggtagagaaagcactagttagacaaaagcagcccccctcccaccttgtgg

SEQ ID NO: 142830 - DNA, 120 bp, Artificial Sequence
  ENSG00000104490_31 (sequence is synthesized)
gcatgaagagtccagaggacaccacctgagaagcttttcaactgccttccaaggctcccttgaacttcactgcggtagagcagggaccccagaccccccctcaaatcgaagcttggaagg

SEQ ID NO: 142831 - DNA, 120 bp, Artificial Sequence
  ENSG00000104490_32 (sequence is synthesized)
aggtgctctaggctgaatctgacctcccaggacccgaggaggcaagcagatggcaccccttggaaagtagcagtgcaggctggctagaggcctgggcgagtgatttcttctgacttgagc

SEQ ID NO: 142832 - DNA, 120 bp, Artificial Sequence
  ENSG00000104490_33 (sequence is synthesized)
gggggaggcgggcggagggaaggcgctgccgctgctgccgccgcctcgcccgaagcgacacagacgctgggagcggccgaggcgagatcctatcattattttaaaattcctcctcctcca

SEQ ID NO: 142833 - DNA, 120 bp, Artificial Sequence
  ENSG00000104490_34 (sequence is synthesized)
tgttaggaacttctggcagggttggtcctgagcaagactgtaaagcagctcaggtgaagcttcagtgtctttttctgctctcacctttcccatttggaggcgactcccctcagctgcttt

SEQ ID NO: 142834 - DNA, 120 bp, Artificial Sequence
  ENSG00000104490_35 (sequence is synthesized)
cctttctctgtcctctgcacctgccttgctgcccctagagctccagaactctctgaaattttctgcctactccctggcaaaatctattttttctaaaaattgtccccagggccaagatgc

SEQ ID NO: 142835 - DNA, 120 bp, Artificial Sequence
  ENSG00000104490_36 (sequence is synthesized)
ccaaagtgactctgattagcaaagtcatgatctggggataaaaacaatgacttttcattcctcttcccaaataaaaactacctttgaccacagaggtcaaagggcccttactgagtccca

SEQ ID NO: 142836 - DNA, 120 bp, Artificial Sequence
  ENSG00000104490_37 (sequence is synthesized)
tgtggaggtcacaggcatggggtgatagtttcagtagtgcttacaaaactccacagaatcctctttcgcccatcagatctcatagctgtacccagtttagctcaggcctgaggatgcata

SEQ ID NO: 142837 - DNA, 120 bp, Artificial Sequence
  ENSG00000104490_38 (sequence is synthesized)
ataattcagagctctgatggcaggtggtttccatctcaggactgcctggaagcttgctgagaaggaacttgagaccattgtcacacacagggagaaaagcactggaatggactagaagtc

SEQ ID NO: 142838 - DNA, 120 bp, Artificial Sequence
  ENSG00000104490_39 (sequence is synthesized)
tgcctggggaaacatgtggcatgcacttacagagtgttacatgtctgtcatccttgaggagtcattgtggactctcaagggtccatgataggcatccacttgcctctctagcctgaagaa

SEQ ID NO: 142839 - DNA, 120 bp, Artificial Sequence
  ENSG00000104490_40 (sequence is synthesized)
tgtcatctgcagccttgctcctcaaagtgggaaccttgcttttcaaagcagcgtcttcagaacagcagcatcagcatcacaccggagcttattaaaaatacagactctcagccccacccc

SEQ ID NO: 142840 - DNA, 120 bp, Artificial Sequence
  ENSG00000104490_41 (sequence is synthesized)
tttcccccacactacccaatcagattctgcattttaacaagattcccaggggatttgtatgcacataaacaatggagacggctaggagaggtggcgcatgtctgtaatcccagcactttg

SEQ ID NO: 142841 - DNA, 75 bp, Artificial Sequence
  ENSG00000104490_42 (sequence is synthesized)
accagcttgggcaacataatgagaccttgtctgtgtggtggggagtacctctagtcccagctgctgctcaggaga

SEQ ID NO: 142842 - DNA, 86 bp, Artificial Sequence
  ENSG00000104490_43 (sequence is synthesized)
aaaaaaaaaaaaaaaaaaaaaaacgccctgtgtggtggggagtacctctagtcccagctgctgtatgaaatggagcctgcagtgag

SEQ ID NO: 142843 - DNA, 120 bp, Artificial Sequence
  ENSG00000104490_44 (sequence is synthesized)
gagaccctgtctcaaaaaacaatcaaaaaacattggagacacaggggtctactgggtcttcctgctggttgtccctcctgaaggtcctcactggaggagaacaagctttgtgggcccggc

SEQ ID NO: 142844 - DNA, 120 bp, Artificial Sequence
  ENSG00000104490_45 (sequence is synthesized)
ttcttctacctgtgcctccacatcttataccaatcaataggggtaggactaggtccaatgcggatggggacattcccttcagcccgcatttgggaggtttaatgataggtctattgtgtg

SEQ ID NO: 142845 - DNA, 80 bp, Artificial Sequence
  ENSG00000104490_46 (sequence is synthesized)
actttgcagagggccgcgcagaggcgcgtggggccggcgggatggggcgcgctgggcagaagggggcgttggtgagcctg

SEQ ID NO: 142846 - DNA, 120 bp, Artificial Sequence
  ENSG00000104490_47 (sequence is synthesized)
gggccggggccgggggccggggcacccgctggatcccgggcctgcggagtctgcccggaaaggccacaggagagtgatttcttctgacttgagcctgcagtgtgctgtgagagatctacc

SEQ ID NO: 142847 - DNA, 120 bp, Artificial Sequence
  ENSG00000104490_48 (sequence is synthesized)
acacagtcaaaggcttgtgagaatctggtggatgctggaccttgctgctgctgctactgctgtttccaggggctgcagagcatggactgttaaatcttgcacttcttctgagtgagggag

SEQ ID NO: 142848 - DNA, 120 bp, Artificial Sequence
  ENSG00000104490_49 (sequence is synthesized)
tgactttgcaagatggctgactgaacaaaagacacagaaatgcctggtcctgctaattcctgagccatttggggattatgcaacgtaaatctggttgcttcttggctttccggctaccgc

SEQ ID NO: 142849 - DNA, 120 bp, Artificial Sequence
  ENSG00000104490_50 (sequence is synthesized)
tgtattttatgtatattaacagatctataaatacatctattagatgtatttagactttttaattattcttcctagttcctgataagctaagacaatacttttatttttgacagagtgatt

SEQ ID NO: 142850 - DNA, 120 bp, Artificial Sequence
  ENSG00000104490_51 (sequence is synthesized)
acacagtcaaaggcttgtgagaatctggtggatgctggaccttgctgctgctgctactgctgtttccaggggctgcagagcatggactgttaaatcttgcacttcttctgagtgagccac

SEQ ID NO: 142851 - DNA, 120 bp, Artificial Sequence
  ENSG00000104490_52 (sequence is synthesized)
agtccaaaagagaattctaaaaggaaacagtacaaaacagaacatcaaaacaaaacagacaaacaacctgggaaccattaggttttacaccagagtgaaaccccagaagagacattctgc

SEQ ID NO: 142852 - DNA, 120 bp, Artificial Sequence
  ENSG00000104490_53 (sequence is synthesized)
agctggtgaacagccggcctcatttgtgagcaatctgttcccatcagtgtcagggattccagaagaaaaagaactctgaaatgaaattgaggatttgaacttcacacagctgtttgaagt

SEQ ID NO: 142853 - DNA, 120 bp, Artificial Sequence
  ENSG00000104490_54 (sequence is synthesized)
gctgctgctgctactgctgtttccaggggctgcagagcatggactgttaaatcttgcacttcttctgagtgagactatatttcagcggtatgaaatacaagagaataattcagcgttgat

SEQ ID NO: 142854 - DNA, 120 bp, Artificial Sequence
  ENSG00000104490_55 (sequence is synthesized)
aaagactgtcatcagaatcattttacagcattgagactatgttgatttcaaggtcatgtttgttgcagcttcaaaagatgctggcaaggaacgaggtactctagaaacctggctgttgca

SEQ ID NO: 142855 - DNA, 120 bp, Artificial Sequence
  ENSG00000104490_56 (sequence is synthesized)
ttattaaatattttgtgtatagtttcggacattcttaacccgtttggtgctgtggacctctttggcagcctggtgaagcctatgtacttttctcagaattatgtttttacatgcataaaa

SEQ ID NO: 142856 - DNA, 120 bp, Artificial Sequence
  ENSG00000104490_57 (sequence is synthesized)
agtagttttcacaagagacagttctgttcaaatgttttatcaagaatagtagcataatgaatgggagttttgtatatataaaagatactaaagcccatttaaaaaatttatggaaatgat

SEQ ID NO: 142857 - DNA, 120 bp, Artificial Sequence
  ENSG00000104490_58 (sequence is synthesized)
aaataaatagaaatgaagtaaataaggtactgcctgcttatcacctttgaatattacttacagcataataaagtatatttgcaaccactcagtggagtagtttttatatgacatcttcat

SEQ ID NO: 142858 - DNA, 120 bp, Artificial Sequence
  ENSG00000104490_59 (sequence is synthesized)
agatgacagctgcaagtgttgagtgctgtacgagtttaaatggagagcgggattgctggcagctgcggtgggcagggattttctcctttttaaaattgagatcaggtttgaacatgactt

SEQ ID NO: 142859 - DNA, 120 bp, Artificial Sequence
  ENSG00000104490_60 (sequence is synthesized)
acagtcagaaactgctctatgaatggacgctgccccagtacagcgaggacctgctgcaaaatgcatttcttagtcttcaatacttattcctccttgtaactggatttctgaagaaaaaga

SEQ ID NO: 142860 - DNA, 120 bp, Artificial Sequence
  ENSG00000104490_61 (sequence is synthesized)
gatgctggaccttgctgctgctgctactgctgtttccaggggctgcagagcatggactgttaaatcttgcacttcttctgagtgagaagaaaaagaactctgaaatgaaattgaggattt

SEQ ID NO: 142861 - DNA, 120 bp, Artificial Sequence
  ENSG00000104490_62 (sequence is synthesized)
gaacttcacacagctgtttgaaggagaaaagggaatttttaaaaggagaatgaaagtgtccttgtctctagaactgaagcaacttggaggaatgagtggagtctttgtttagtgagtgag

SEQ ID NO: 142862 - DNA, 120 bp, Artificial Sequence
  ENSG00000104490_63 (sequence is synthesized)
ctgccatcatgtgaagaagggcatgtttgcttccccttctaccatgattctctctttctttaaatgagatatggtggtgcgtaatgatcgaagcagagacttggagtctggtgtgcctgt

SEQ ID NO: 142863 - DNA, 120 bp, Artificial Sequence
  ENSG00000104490_64 (sequence is synthesized)
attcaaatctgactgcaccacttactgtctgccagatcttggataaattatttaatctccctaaacctcagtgtcctcatctgtgaagtgagctgaattcttgccgccaggatggggaaa

SEQ ID NO: 142864 - DNA, 120 bp, Artificial Sequence
  ENSG00000104490_65 (sequence is synthesized)
ccttcctgccatcatgtgaagaagggcatgtttgcttccccttctaccatgattctgaattcttgccgccaggatggggaaacagaacagcaagctgcgcccggaggtcatgcaggactt

SEQ ID NO: 142865 - DNA, 120 bp, Artificial Sequence
  ENSG00000104490_66 (sequence is synthesized)
acacactgaagtttgagaagcactgcctttgcagctatggcaaacttctggaacacgaagaaataaagctattatctcaactttggtctcctgggaccactcgttgctgacagtcagaaa

SEQ ID NO: 142866 - DNA, 120 bp, Artificial Sequence
  ENSG00000104490_67 (sequence is synthesized)
agaatctggtggatgctggaccttgctgctgctgctactgctgtttccaggggctgcagagcatggactgttaaatcttgcacttcttctgagtgaggaagacgaagcaaccccagtgga

SEQ ID NO: 142867 - DNA, 120 bp, Artificial Sequence
  ENSG00000104490_68 (sequence is synthesized)
gactctgcctcaagggcctgactgtgtagcaggagggagacagaaacaaaccccagaatgcgtgaaatcgcaaagaagattggcaatcattaaaatggggatatgctgtctttcagctga

SEQ ID NO: 142868 - DNA, 120 bp, Artificial Sequence
  ENSG00000104497_0 (sequence is synthesized)
aaggagagtccggtttaaccgtcaccgggaagcgcgctcgttcgggatcgccgagggggctgagatagtgaattcctaagaagaaaataatggattgcatattagttgttctctaagtgg

SEQ ID NO: 142869 - DNA, 120 bp, Artificial Sequence
  ENSG00000104497_1 (sequence is synthesized)
actcaacagtgtgcaagcttgttggaaaagccaaaagaagatggcaactccttatgtcccagttcctatgcccataggaaactctgcttccagttttacaacaaacagaaatcaaagaag

SEQ ID NO: 142870 - DNA, 120 bp, Artificial Sequence
  ENSG00000104497_2 (sequence is synthesized)
ttcttcttttggcagtgtctcaacaagctcaaattcttctaagggccagttagaagactcaaatatgggtaattttaaacagacaagtgttcctgatcaaatggataatacttcatctgt

SEQ ID NO: 142871 - DNA, 120 bp, Artificial Sequence
  ENSG00000104497_3 (sequence is synthesized)
ctgtagcagtcccctcattaggactaaatttacaggtacagcttcttccattgagtattctactagaccaagagacactgaagaacaaaatccggaaacagtgaattgggaagatagacc

SEQ ID NO: 142872 - DNA, 120 bp, Artificial Sequence
  ENSG00000104497_4 (sequence is synthesized)
atctacacctactatactgggttatgaagtgatggaagaaagagctaaatttactgtatataaaatactagtaaagaaaaccccagaagaaagctgggtagttttcagaagatacactga

SEQ ID NO: 142873 - DNA, 120 bp, Artificial Sequence
  ENSG00000104497_5 (sequence is synthesized)
cttctctaggcttaatgacaaattaaaagagatgtttccaggttttcgactagcacttcctccaaaacgctggtttaaagataattacaatgctgactttttagaagacagacaattagg

SEQ ID NO: 142874 - DNA, 120 bp, Artificial Sequence
  ENSG00000104497_6 (sequence is synthesized)
attacaagcgtttcttcaaaatttagtagctcacaaggacattgctaactgccttgcagtgagagaatttctttgtttggatgatccaccgggtccatttgatagcctagaagaaagcag

SEQ ID NO: 142875 - DNA, 120 bp, Artificial Sequence
  ENSG00000104497_7 (sequence is synthesized)
ggcattctgtgaaactttagaagagacaaactaccgcttacagaaagaactacttgaaaaacaaaaggagatggaatcactaaagaaactgctcagtgagaagcaacttcatatagacac

SEQ ID NO: 142876 - DNA, 120 bp, Artificial Sequence
  ENSG00000104497_8 (sequence is synthesized)
tttagagaacagaatcagaacattgtctttagaacctgaagaatcactggatgtgtcagaaacagaaggtgaacagatcctaaaggtggagtcctctgcacttgaggttgatcaagatgt

SEQ ID NO: 142877 - DNA, 120 bp, Artificial Sequence
  ENSG00000104497_9 (sequence is synthesized)
cctggatgaagaatctagagctgataataaaccatgcttaagttttagtgaacctgaaaatgctgtatcagagatagaagtagcagaagtggcatatgatgctgaagaagactaatgtat

SEQ ID NO: 142878 - DNA, 120 bp, Artificial Sequence
  ENSG00000104497_10 (sequence is synthesized)
cacaagcagttccctccatttagactattcaaaaatttagaagagtggcaaatactattttaaaagaagaaccaagaactgtaaaacatatagaaaagagcaagaatgcacatgtataaa

SEQ ID NO: 142879 - DNA, 120 bp, Artificial Sequence
  ENSG00000104497_11 (sequence is synthesized)
gtttacataaagaagtttttttaagttattgagataggaaatatattcactgctgcttttaattgtattttatccaattacatttaatacactaaaaaaaatcttgttggaattctgtta

SEQ ID NO: 142880 - DNA, 120 bp, Artificial Sequence
  ENSG00000104497_12 (sequence is synthesized)
taatcaaatggaaattaattgcatgttactatctgggtgatatattcttctttatatctctgacatgacatattttcattaatagtttaaatcagtgaccatcataataaagataaaatt

SEQ ID NO: 142881 - DNA, 120 bp, Artificial Sequence
  ENSG00000104497_13 (sequence is synthesized)
tagttgagtttttaatgtttacatgtttacatctctaaataaaatttgcttatttgaaatgttaatgctctttagaaaaatgactttctagtaccaaaggaaaactacttgaaagagctg

SEQ ID NO: 142882 - DNA, 120 bp, Artificial Sequence
  ENSG00000104497_14 (sequence is synthesized)
taatcatatagctaaagtgataagatagccttgattttaaaagctgattcattaatatcaaaatactttaataagtgtcacagttattaatatgttacatttgtttagtttccacgtaat

SEQ ID NO: 142883 - DNA, 120 bp, Artificial Sequence
  ENSG00000104497_15 (sequence is synthesized)
ctttatctctacctagatttagtgagtttgcctctttcagaatactacctccttttgttaaggcatattctttcgaaaatatagattctaaataaataggggcttatacaaaaaagaaaa

SEQ ID NO: 142884 - DNA, 120 bp, Artificial Sequence
  ENSG00000104497_16 (sequence is synthesized)
taaaaagccatatatactgcaaagttcctaactggcttgactcctgacattgcatttttatttctatttgtgtgaagatgttgttatactgtattatggctgattttctttttaatatat

SEQ ID NO: 142885 - DNA, 120 bp, Artificial Sequence
  ENSG00000104497_17 (sequence is synthesized)
ttagccaagtgatgcactttatgataattaaactcttttgtgccaagtttaattggtggatttttttagtaagtagagttaggagaaagaattatgtagtgcctttactatttcactttc

SEQ ID NO: 142886 - DNA, 120 bp, Artificial Sequence
  ENSG00000104497_18 (sequence is synthesized)
tacaaaagtctcctagggtctttgagtcagctttatgaaaaaatgtttgtttatttcagctttgtgtacagtcattaaaagtgccttgtttcatttttataggatgaagttatttatttt

SEQ ID NO: 142887 - DNA, 120 bp, Artificial Sequence
  ENSG00000104497_19 (sequence is synthesized)
ctattttcactgttttgcatattgctgttaataagcattgtaatcatgctggcattttgcaatcccagtcggtatgctttctaaaaactgagggaaacttactggggaaatagaataaca

SEQ ID NO: 142888 - DNA, 120 bp, Artificial Sequence
  ENSG00000104497_20 (sequence is synthesized)
atctccatttttttctttactatctaaaagtttatcggtatcttgatgtatatatatattaaggtgtggctgtttaaaattctaatgacatatatcaacacattcaatggctgttgttaa

SEQ ID NO: 142889 - DNA, 120 bp, Artificial Sequence
  ENSG00000104497_21 (sequence is synthesized)
cctttgaagtaaaaaggagatcactttttaccaaataaccaaaaatttttagtctgtcaaagtgcacaggtatgttctcagaacatttttcacaatgtgtatcagaaatatgtttgctat

SEQ ID NO: 142890 - DNA, 120 bp, Artificial Sequence
  ENSG00000104497_22 (sequence is synthesized)
ccttagagacagaaatgaatataataaattgatctgcttatttattaaaattattattctagacttacaaaaggcttaaaaagaacaatcatttaatcagtaccattctgtatcttatat

SEQ ID NO: 142891 - DNA, 120 bp, Artificial Sequence
  ENSG00000104497_23 (sequence is synthesized)
aacagatctttgccaaattctagatattatagtgttgcctgtctgttctaaagcgaaccagccactttttcaatctggctttttggaagattgtatttaaagttcttcaaggatgaagaa

SEQ ID NO: 142892 - DNA, 120 bp, Artificial Sequence
  ENSG00000104497_24 (sequence is synthesized)
ggaagattgtatttaaagttcttcaaggatgaagaaaaaaatctgttaattaggtaaaccactattatttatatttataatttacttttttttacttttataatgcattttactcccagt

SEQ ID NO: 142893 - DNA, 120 bp, Artificial Sequence
  ENSG00000104497_25 (sequence is synthesized)
gcccgggcagagactggctgaggcggggagcagctgcttttggggcgggggtgtcacgtgaggcttctcgctgctgagggaggaggcgaaaagctgcggttaaggagagtccggtttaac

SEQ ID NO: 142894 - DNA, 120 bp, Artificial Sequence
  ENSG00000104497_26 (sequence is synthesized)
cgtcaccgggaagcgcgctcgttcgggatcgccgagggggctgagtactgtcaagatgataagcatggaataaagcttcagaagggtctttaccaatctttctcctaccaacttttacat

SEQ ID NO: 142895 - DNA, 120 bp, Artificial Sequence
  ENSG00000104497_27 (sequence is synthesized)
acatgaaatcaggttaaaatgaactttacagaaatacttcacaagggaataaagtagaggaaaaagggataacatgtaacatggagtcaaggaaaaagagtgtgaagtagttttgctctc

SEQ ID NO: 142896 - DNA, 120 bp, Artificial Sequence
  ENSG00000104497_28 (sequence is synthesized)
caaccttgatgtctggcgggcggcaaggggctccgcgggagagtggagaggcgccgcaggaagcccagccaccttcaggccaccgccgaccccactgtgcgtctgggaggcgctgggcgc

SEQ ID NO: 142897 - DNA, 120 bp, Artificial Sequence
  ENSG00000104497_29 (sequence is synthesized)
gtgcgtctgggaggcgctgggcgcgcaccggtcagcggaggcgggagagtctgtgatcccagggagctgcgggtctcgccgcctgcagtgcggaagacccgtgaccggcgcagaccccgg

SEQ ID NO: 142898 - DNA, 120 bp, Artificial Sequence
  ENSG00000104497_30 (sequence is synthesized)
ccttaccttccgagggtcgaactgtgcctggtatttgcctctttcctcccgcccacggggttgctcagagtcgggccacctcacctgaggttttccagagtgagaatgaactgagcgtcc

SEQ ID NO: 142899 - DNA, 120 bp, Artificial Sequence
  ENSG00000104497_31 (sequence is synthesized)
atttactgcattctgtgaaactttagaagagacaaactaccgcttacagaaagaactacttgaaaaacaaaaggagatggaatcactaaagaaactgctcagtgagaagcaacttcatat

SEQ ID NO: 142900 - DNA, 120 bp, Artificial Sequence
  ENSG00000104497_32 (sequence is synthesized)
tggtagttttgcacagaaagctttcatgtttgagtcaaaggttgctttcagtgaaatacatagacttagctcagtgaaaaagtaaaaattcatatatgtcttatagtcaataaagctcta

SEQ ID NO: 142901 - DNA, 120 bp, Artificial Sequence
  ENSG00000104497_33 (sequence is synthesized)
ttcttccatttgagtgtcaaaataaggaatgtacagctaaaatcaaatttaaaacttcaggggtaggagtgattatcttgttatcggtttagcttgtgcctgatgcttctcaaattacat

SEQ ID NO: 142902 - DNA, 120 bp, Artificial Sequence
  ENSG00000104497_34 (sequence is synthesized)
taattgacgtgttaaagtgtcctgtttcttgaagcaatagcctagattcacaaaacagatttggtaatagtagattagctaggattttatgcaagttttttccccaaatgtttaatggca

SEQ ID NO: 142903 - DNA, 120 bp, Artificial Sequence
  ENSG00000104497_35 (sequence is synthesized)
tttaaatggaacagatttaattggtaggtttgtaatgttttcattcaagctgagtcagttctttgtgttagattgaatgccctggcctttttaaaacagctttattggagtaatattttc

SEQ ID NO: 142904 - DNA, 120 bp, Artificial Sequence
  ENSG00000104497_36 (sequence is synthesized)
gatgactacaagtcccatgatgcaaagtatgagcacggaccaatgttggtcgcagttccttctgggaattgtagtcttctcctgtttggcaaactagatagtgaattcctaagaagaaaa

SEQ ID NO: 142905 - DNA, 120 bp, Artificial Sequence
  ENSG00000104499_0 (sequence is synthesized)
gtcggcgcgggaggctcagatggctggaggcggcgggcacgcacactgcggggctccgaggggcacaggtccaggctcctgcgtgaagtgatgctcctctttgccttactcctagccatg

SEQ ID NO: 142906 - DNA, 120 bp, Artificial Sequence
  ENSG00000104499_1 (sequence is synthesized)
gagctcccattggtggcagccagtgccaccatgcgcgctcagtggacttacagtttgagatgccatgactgtgcggtcataaatgacttcaactgtcccaacattagagtatgtccgtat

SEQ ID NO: 142907 - DNA, 120 bp, Artificial Sequence
  ENSG00000104499_2 (sequence is synthesized)
catattaggcgctgtatgacaatctccattcgcataaattctcgtgaactacttgtttataagaactgtacaaacaactgcacatttgtatatgcagctgaacagcctcctgaagcccca

SEQ ID NO: 142908 - DNA, 120 bp, Artificial Sequence
  ENSG00000104499_3 (sequence is synthesized)
cttcaaaactaatagcttctactgggtttgttgttgtaatagcatggtttgcaatgcaggaggacctactaatcttgaaagggacatgttacccgatgaagtaactgaggaggagcttcc

SEQ ID NO: 142909 - DNA, 120 bp, Artificial Sequence
  ENSG00000104499_4 (sequence is synthesized)
agaaggaactgtgaggctgggggtatcaaaactgttgctgagttttgcctctatcatagtcagcaatatattgccatgaggaccccaccttggagggtctgaccatcttcacctgttccg

SEQ ID NO: 142910 - DNA, 120 bp, Artificial Sequence
  ENSG00000104499_5 (sequence is synthesized)
cagagaaatgttgctctccattattcccttctaagccagagacccttatccactgctcctctaggtggcccatttatggtttgttgtaagagaaaaattaaaaaaatattgtttagtgga

SEQ ID NO: 142911 - DNA, 120 bp, Artificial Sequence
  ENSG00000104499_6 (sequence is synthesized)
tccagcctggagcatggatccccacacaggtgaccgactccaagcatcagcctctccctgcccacctgaccaggcgccaccctctccacgggccaggaaacatcctccccagtgccatca

SEQ ID NO: 142912 - DNA, 120 bp, Artificial Sequence
  ENSG00000104517_0 (sequence is synthesized)
agaagtgaagatggcggcggcagcttctcgctagtgacgcgcggtgcgggctcatctccttcccctccttcctcacctcccctagtccggaccccgtccgccgccgggaccagaccgtcc

SEQ ID NO: 142913 - DNA, 80 bp, Artificial Sequence
  ENSG00000104517_1 (sequence is synthesized)
ccgtagcccgcagccagcagccgcccctctcctcccccggccgcccctctcccaacgcccgtctgccgctggccggcggc

SEQ ID NO: 142914 - DNA, 120 bp, Artificial Sequence
  ENSG00000104517_2 (sequence is synthesized)
tcgccgggggagcgggtggcgtgtggattcgccctcctgcccgcccctccgggccgcggacacacgcccggcagggaggcggcggcggcccctgcgtatttgcttccctccatttgggga

SEQ ID NO: 142915 - DNA, 120 bp, Artificial Sequence
  ENSG00000104517_3 (sequence is synthesized)
ctgggaggcggcggcggctgtgggttttggggaggggtagagggctggggggcgggcgagagcgggagggggccgccctcgagtggaggacgagaaggaaagcaccatgacgtccatcca

SEQ ID NO: 142916 - DNA, 120 bp, Artificial Sequence
  ENSG00000104517_4 (sequence is synthesized)
tttcgtggttcacccgctgccgggcaccgaggaccagctcaatgacaggttacgagaagtttctgagaagctgaacaaatataatttaaacagccacccccctttgaatgtattggaaca

SEQ ID NO: 142917 - DNA, 120 bp, Artificial Sequence
  ENSG00000104517_5 (sequence is synthesized)
ggctactattaaacagtgtgtggtgggaccaaatcatgctgcctttcttcttgaggatggtagagtttgcaggattggtttttcagtacagccagacagattggaattgggtaaacctga

SEQ ID NO: 142918 - DNA, 120 bp, Artificial Sequence
  ENSG00000104517_6 (sequence is synthesized)
taataatgatgggtcaaagttgaacagcaactcgggggcagggaggacgtcaaggcctggtaggacaagcgactctccatggtttctctcaggttctgagactctaggcaggctggcagg

SEQ ID NO: 142919 - DNA, 120 bp, Artificial Sequence
  ENSG00000104517_7 (sequence is synthesized)
caacaccttaggaagccgctggagttctggagtgggtggaagtggtggaggatcctctggtaggtcatcagctggagctcgagattcccgccggcagactcgagttattcggacaggacg

SEQ ID NO: 142920 - DNA, 120 bp, Artificial Sequence
  ENSG00000104517_8 (sequence is synthesized)
ggatcgagggtctgggcttttgggcagtcagccccagccagttattccagcatctgtcattccagaggagctgatttcacaggcccaagttgttttacaaggcaaatccagaagtgtcat

SEQ ID NO: 142921 - DNA, 120 bp, Artificial Sequence
  ENSG00000104517_9 (sequence is synthesized)
tattcgagaacttcagagaacaaatcttgatgtgaaccttgctgtaaataatttacttagccgggatgatgaagatggagatgatggggatgatacagccagcgaatcttatttgcctgg

SEQ ID NO: 142922 - DNA, 120 bp, Artificial Sequence
  ENSG00000104517_10 (sequence is synthesized)
agaggatcttatgtctctccttgatgccgacattcattctgcccacccaagtgtcattattgatgcagatgccatgttttctgaagacattagctattttggttacccttcttttcgtcg

SEQ ID NO: 142923 - DNA, 120 bp, Artificial Sequence
  ENSG00000104517_11 (sequence is synthesized)
ttcatcactttccaggctaggctcatctcgagttctccttcttcccttagagagagactctgagctgttgcgtgaacgtgaatccgttttacgtttacgtgaacgaaggtggcttgatgg

SEQ ID NO: 142924 - DNA, 120 bp, Artificial Sequence
  ENSG00000104517_12 (sequence is synthesized)
agcctcatttgataatgaaaggggttctaccagcaaggaaggagagccaaacttggataagaagaatacacctgttcaaagtccagtatctctaggagaagatttgcagtggtggcctga

SEQ ID NO: 142925 - DNA, 120 bp, Artificial Sequence
  ENSG00000104517_13 (sequence is synthesized)
taaggatggaacaaaattcatctgtattggggctctgtattctgaacttctggctgtcagcagtaaaggagaactttatcagtggaaatggagtgaatctgagccttacagaaatgccca

SEQ ID NO: 142926 - DNA, 120 bp, Artificial Sequence
  ENSG00000104517_14 (sequence is synthesized)
gaatccttcattacatcatccacgagcaacatttttggggttaaccaatgaaaagatagtcctcctgtctgcaaatagcataagagcaactgtagctacagaaaataacaaggttgctac

SEQ ID NO: 142927 - DNA, 120 bp, Artificial Sequence
  ENSG00000104517_15 (sequence is synthesized)
atgggtggatgaaactttaagttctgtggcttctaaattagagcacactgctcagacttactctgaacttcaaggagagcggatagtttctttacattgctgtgccctttacacctgcgc

SEQ ID NO: 142928 - DNA, 120 bp, Artificial Sequence
  ENSG00000104517_16 (sequence is synthesized)
tcagctggaaaacagtttatattggtggggtgtagttccttttagtcaaaggaagaaaatgttagagaaagctagagcaaaaaataaaaagcctaaatccagtgctggtatttcttcaat

SEQ ID NO: 142929 - DNA, 120 bp, Artificial Sequence
  ENSG00000104517_17 (sequence is synthesized)
gccgaacatcactgttggtacccaggtatgcttgagaaataatcctctttatcatgctggagcagttgcattttcaattagtgctgggattcctaaagttggtgtcttaatggagtcagt

SEQ ID NO: 142930 - DNA, 120 bp, Artificial Sequence
  ENSG00000104517_18 (sequence is synthesized)
ttggaatatgaatgacagctgtagatttcaacttagatctcctgaaagcttgaaaaacatggaaaaagctagcaaaactactgaagctaagcctgaaagtaagcaggagccagtgaaaac

SEQ ID NO: 142931 - DNA, 120 bp, Artificial Sequence
  ENSG00000104517_19 (sequence is synthesized)
agaaatgggtcctccaccatctccagcatccacgtgtagtgatgcatcctcaattgccagcagtgcatcaatgccatacaaacgacgacggtcaacccctgcaccaaaagaagaggaaaa

SEQ ID NO: 142932 - DNA, 120 bp, Artificial Sequence
  ENSG00000104517_20 (sequence is synthesized)
ggtgaatgaagagcagtggtctcttcgggaagtggtttttgtggaagatgtcaagaatgttcctgttggcaaggtgctaaaagtagatggtgcctatgttgctgtaaaatttccaggaac

SEQ ID NO: 142933 - DNA, 120 bp, Artificial Sequence
  ENSG00000104517_21 (sequence is synthesized)
ctccagtaatactaactgtcagaacagctctggtccagatgctgacccttcttctctcctgcaggattgtaggttacttagaattgatgaattgcaggttgtcaaaactggtggaacacc

SEQ ID NO: 142934 - DNA, 120 bp, Artificial Sequence
  ENSG00000104517_22 (sequence is synthesized)
gaaggttcccgactgtttccaaaggactcctaaaaagctttgtatacctgaaaaaacagaaatattagcagtgaatgtagattccaaaggtgttcatgctgttctgaagactggaaattg

SEQ ID NO: 142935 - DNA, 120 bp, Artificial Sequence
  ENSG00000104517_23 (sequence is synthesized)
ggtacgatactgtatctttgatcttgctacaggaaaagcagaacaggaaaataattttcctacaagcagcattgctttccttggtcagaatgagaggaatgtagccattttcactgctgg

SEQ ID NO: 142936 - DNA, 120 bp, Artificial Sequence
  ENSG00000104517_24 (sequence is synthesized)
acaggaatctcccattattcttcgagatggaaatggtaccatctacccaatggccaaagattgcatgggaggaataagggatcccgattggctggatcttccacctattagtagtcttgg

SEQ ID NO: 142937 - DNA, 120 bp, Artificial Sequence
  ENSG00000104517_25 (sequence is synthesized)
aatgggtgtgcattctttaataaatcttcctgccaattcaacaatcaaaaagaaagctgctgttatcatcatggctgtagagaaacaaaccttaatgcaacacattctgcgctgtgacta

SEQ ID NO: 142938 - DNA, 120 bp, Artificial Sequence
  ENSG00000104517_26 (sequence is synthesized)
tgaggcctgtcgacaatatctaatgaatcttgagcaagcggttgttttagagcagaatctacagatgctgcagacattcatcagccacagatgtgatggaaatcgaaatattttgcatgc

SEQ ID NO: 142939 - DNA, 120 bp, Artificial Sequence
  ENSG00000104517_27 (sequence is synthesized)
ttgtgtatcagtttgctttccaaccagcaataaagaaactaaagaagaagaggaagcggagcgttctgaaagaaatacatttgcagaaaggctttctgctgttgaggccattgcaaatgc

SEQ ID NO: 142940 - DNA, 120 bp, Artificial Sequence
  ENSG00000104517_28 (sequence is synthesized)
aatatcagttgtttcaagtaatggcccaggtaatcgggctggatcatcaagtagccgaagtttgagattacgggaaatgatgagacgttcgttgagagcagctggtttgggtagacatga

SEQ ID NO: 142941 - DNA, 120 bp, Artificial Sequence
  ENSG00000104517_29 (sequence is synthesized)
agctggagcttcatccagtgaccaccaggatccagtttcaccccccatagctccccctagttgggttcctgaccctcctgcgatggatcctgatggtgacattgattttatcctggcccc

SEQ ID NO: 142942 - DNA, 120 bp, Artificial Sequence
  ENSG00000104517_30 (sequence is synthesized)
cgctgtgggatctcttaccacagcagcaaccggtactggtcaaggaccaagcacctccactattccaggtccttccacagagccatctgtagtagaatccaaggatcgaaaggcgaatgc

SEQ ID NO: 142943 - DNA, 120 bp, Artificial Sequence
  ENSG00000104517_31 (sequence is synthesized)
tcattttatattgaaattgttatgtgacagtgtggttctccagccctatctacgagaacttctttctgccaaggatgcaagagggatgaccccatttatgtcagctgtaagtggccgagc

SEQ ID NO: 142944 - DNA, 120 bp, Artificial Sequence
  ENSG00000104517_32 (sequence is synthesized)
ttatcctgctgcaattaccatcttagaaactgctcagaaaattgcaaaagctgaaatatcctcaagtgaaaaagaggaagatgtattcatgggaatggtttgcccatcaggtaccaaccc

SEQ ID NO: 142945 - DNA, 120 bp, Artificial Sequence
  ENSG00000104517_33 (sequence is synthesized)
tgatgactctcctttatatgttttatgttgtaatgacacttgcagttttacatggactggagcagagcacattaaccaggatatttttgagtgtcgaacttgtggcttgctggagtcact

SEQ ID NO: 142946 - DNA, 120 bp, Artificial Sequence
  ENSG00000104517_34 (sequence is synthesized)
gtgttgttgtacggaatgtgcaagggtttgtcataaaggtcatgattgcaaactcaaacggacatcaccaacagcctactgtgattgttgggagaaatgtaaatgtaaaactcttattgc

SEQ ID NO: 142947 - DNA, 120 bp, Artificial Sequence
  ENSG00000104517_35 (sequence is synthesized)
tggacagaaatctgctcgtcttgatctactttatcgcctgctcactgctactaatctggttactctgccaaacagcaggggagagcacctcttactattcttagtacagacagtcgcaag

SEQ ID NO: 142948 - DNA, 120 bp, Artificial Sequence
  ENSG00000104517_36 (sequence is synthesized)
gcagacggtggagcattgtcaatacaggccacctcgaatcagggaagatcgtaaccgaaaaacagccagtcctgaagattcagatatgccagatcatgatttagagcctccaagatttgc

SEQ ID NO: 142949 - DNA, 120 bp, Artificial Sequence
  ENSG00000104517_37 (sequence is synthesized)
ccagcttgcattggagcgtgttctacaggactggaatgccttgaaatctatgattatgtttgggtcgcaggagaataaagaccctcttagtgccagcagtagaataggccatcttttgcc

SEQ ID NO: 142950 - DNA, 120 bp, Artificial Sequence
  ENSG00000104517_38 (sequence is synthesized)
agaagagcaagtatacctcaatcagcaaagtggcacaattcggctggactgtttcactcattgccttatagttaagtgtacagcagatattttgcttttagatactctactaggtacact

SEQ ID NO: 142951 - DNA, 120 bp, Artificial Sequence
  ENSG00000104517_39 (sequence is synthesized)
agtgaaagaactccaaaacaaatatacacctggacgtagagaagaagctattgctgtgacaatgaggtttctacgttcagtggcaagagtttttgttattctgagtgtggaaatggcttc

SEQ ID NO: 142952 - DNA, 120 bp, Artificial Sequence
  ENSG00000104517_40 (sequence is synthesized)
atccaaaaagaaaaacaactttattccacagccaattggaaaatgcaagcgtgtattccaagcattgctaccttacgctgtggaagaattgtgcaacgtagcagagtcactgattgttcc

SEQ ID NO: 142953 - DNA, 120 bp, Artificial Sequence
  ENSG00000104517_41 (sequence is synthesized)
tgtcagaatggggattgctcgtccaactgcaccatttaccctggctagtactagcatagatgccatgcagggcagtgaagaattattttcagtggaaccactaccaccacgaccatcatc

SEQ ID NO: 142954 - DNA, 120 bp, Artificial Sequence
  ENSG00000104517_42 (sequence is synthesized)
tgatcagtctagcagctccagtcagtctcagtcatcctacatcatcaggaatccacagcagaggcgcatcagccagtcacagcccgttcggggcagagatgaagaacaggatgatattgt

SEQ ID NO: 142955 - DNA, 120 bp, Artificial Sequence
  ENSG00000104517_43 (sequence is synthesized)
ttcagcagatgtggaagaggttgaggtggtggagggtgtggctggagaagaggatcatcatgatgaacaggaagaacacggggaagaaaatgctgaggcagagggacaacatgatgagca

SEQ ID NO: 142956 - DNA, 120 bp, Artificial Sequence
  ENSG00000104517_44 (sequence is synthesized)
tgatgaagacgggagtgatatggagctggacttgttagcagcagctgaaacagaaagtgatagtgaaagtaaccacagcaaccaagataatgctagtgggcgcagaagcgttgtcactgc

SEQ ID NO: 142957 - DNA, 120 bp, Artificial Sequence
  ENSG00000104517_45 (sequence is synthesized)
gtagtagtcagagtgacgacatagaacaggagacctttatgcttgatgagccattagaaagaaccacaaatagctcccatgccaatggtgctgcccaagctccccgttcaatgcagtggg

SEQ ID NO: 142958 - DNA, 120 bp, Artificial Sequence
  ENSG00000104517_46 (sequence is synthesized)
ctgtccgcaacacccagcatcagcgagcagccagtacagccccttccagtacatctacaccagcagcaagttcagcgggtttgatttatattgatccttcaaacttacgccggagtggta

SEQ ID NO: 142959 - DNA, 120 bp, Artificial Sequence
  ENSG00000104517_47 (sequence is synthesized)
ccatcagtacaagtgctgcagctgcagcagctgctttggaagctagcaacgccagcagttacctaacatctgcaagcagtttagccagggcttacagcattgtcattagacaaatctcgg

SEQ ID NO: 142960 - DNA, 120 bp, Artificial Sequence
  ENSG00000104517_48 (sequence is synthesized)
acttgatgggccttattcctaagtataatcacctagtatactctcagattccagcagctgtgaaattgacttaccaagatgcagtaaacttacagaactatgtagaagaaaagcttattc

SEQ ID NO: 142961 - DNA, 120 bp, Artificial Sequence
  ENSG00000104517_49 (sequence is synthesized)
ccacttggaactggatggtcagtattatggattctactgaagctcaattacgttatggttctgcattagcatctgctggtgatcctggacatccaaatcatcctcttcacgcttctcaga

SEQ ID NO: 142962 - DNA, 120 bp, Artificial Sequence
  ENSG00000104517_50 (sequence is synthesized)
attcagcgagaagagagaggatgactgcgcgagaagaagctagcttacgaacacttgaaggcagacgacgtgccaccttgcttagcgcccgtcaaggaatgatgtctgcacgaggagact

SEQ ID NO: 142963 - DNA, 120 bp, Artificial Sequence
  ENSG00000104517_51 (sequence is synthesized)
tcctaaattatgctctgtctctaatgcggtctcataatgatgagcattctgatgttcttccagttttggatgtttgctcattgaagcatgtggcatatgtttttcaagcacttatatact

SEQ ID NO: 142964 - DNA, 120 bp, Artificial Sequence
  ENSG00000104517_52 (sequence is synthesized)
ggattaaggcaatgaatcagcagacaacattggatacacctcaactagaacgcaaaaggacgcgagaactcttggaactgggtattgataatgaagattcagaacatgaaaatgatgatg

SEQ ID NO: 142965 - DNA, 120 bp, Artificial Sequence
  ENSG00000104517_53 (sequence is synthesized)
acaccaatcaaagtgctactttgaatgataaggatgatgactctcttcctgcagaaactggccaaaaccatccatttttccgacgttcagactccatgacattccttgggtgtatacccc

SEQ ID NO: 142966 - DNA, 120 bp, Artificial Sequence
  ENSG00000104517_54 (sequence is synthesized)
caaatccatttgaagtgcctctggctgaagccatccccttggctgatcagccacatctgttgcagccaaatgctagaaaggaggatctttttggccgtccaagtcagggtctttattctt

SEQ ID NO: 142967 - DNA, 120 bp, Artificial Sequence
  ENSG00000104517_55 (sequence is synthesized)
catctgccagtagtgggaaatgtttaatggaggttacagtggatagaaactgcctagaggttcttccaacaaaaatgtcttatgctgccaatctgaaaaatgtaatgaacatgcaaaacc

SEQ ID NO: 142968 - DNA, 120 bp, Artificial Sequence
  ENSG00000104517_56 (sequence is synthesized)
ggcaaaaaaaagaaggggaagaacagcccgtgctgccagaagaaactgagagttcaaaaccagggccatctgctcatgatcttgctgcacaattaaaaagtagcttactagcagaaatag

SEQ ID NO: 142969 - DNA, 120 bp, Artificial Sequence
  ENSG00000104517_57 (sequence is synthesized)
gacttactgaaagtgaagggccacctctcacatctttcaggccacagtgtagctttatgggaatggttatttcccatgatatgctgctaggacgttggcgcctttctttagaactgttcg

SEQ ID NO: 142970 - DNA, 120 bp, Artificial Sequence
  ENSG00000104517_58 (sequence is synthesized)
gcagggtattcatggaagatgttggagcagaacctggatcaatcctaactgaattgggtggttttgaggtaaaagaatcaaaattccgcagagaaatggaaaaactgagaaaccagcagt

SEQ ID NO: 142971 - DNA, 120 bp, Artificial Sequence
  ENSG00000104517_59 (sequence is synthesized)
caagagatttgtcactagaggttgatcgggatcgagatcttctcattcagcagactatgaggcagcttaacaatcactttggtcgaagatgtgctactacaccaatggctgtacacagag

SEQ ID NO: 142972 - DNA, 120 bp, Artificial Sequence
  ENSG00000104517_60 (sequence is synthesized)
taaaagtcacatttaaggatgagccaggagagggcagtggtgtagcacgaagtttttatacagccattgcacaagcatttttatcaaatgaaaaattgccaaatctagagtgtatccaaa

SEQ ID NO: 142973 - DNA, 120 bp, Artificial Sequence
  ENSG00000104517_61 (sequence is synthesized)
atgccaacaaaggcacccacacaagtttaatgcagagattaaggaaccgaggagagagagaccgggaaagggagagagaaagggaaatgaggaggagtagtggtttgcgagcaggttctc

SEQ ID NO: 142974 - DNA, 120 bp, Artificial Sequence
  ENSG00000104517_62 (sequence is synthesized)
ggagggaccgggatagagactttagaagacagctttccatcgacactaggccctttagaccagcctctgaagggaatcctagcgatgatcctgagcctttgccagcacatcggcaggcac

SEQ ID NO: 142975 - DNA, 120 bp, Artificial Sequence
  ENSG00000104517_63 (sequence is synthesized)
ttggagagaggctttatcctcgtgtacaagcaatgcaaccagcatttgcaagtaaaatcactggcatgttgttggaattatccccagctcagctgcttctccttctagcaagtgaggatt

SEQ ID NO: 142976 - DNA, 120 bp, Artificial Sequence
  ENSG00000104517_64 (sequence is synthesized)
ctctgagagcaagagtggatgaggccatggaactcattattgcacatggacgggaaaatggagctgatagtatcctggatcttggattagtagactcctcagaaaaggtacagcaggaaa

SEQ ID NO: 142977 - DNA, 120 bp, Artificial Sequence
  ENSG00000104517_65 (sequence is synthesized)
accgaaagcgccatggctctagtcgaagtgtagtagatatggatttagatgatacagatgatggtgatgacaatgcccctttgttttaccaacctgggaaaagaggattttatactccaa

SEQ ID NO: 142978 - DNA, 120 bp, Artificial Sequence
  ENSG00000104517_66 (sequence is synthesized)
ggcctggcaagaacacagaagcaaggttgaattgtttcagaaacattggcaggattcttggactatgtctgttacagaatgaactatgtcctatcacattgaatagacatgtaattaaag

SEQ ID NO: 142979 - DNA, 120 bp, Artificial Sequence
  ENSG00000104517_67 (sequence is synthesized)
tattgcttggtagaaaagtcaattggcatgattttgctttttttgatcctgtaatgtatgagagtttgcggcaactaatcctcgcgtctcagagttcagatgctgatgctgttttctcag

SEQ ID NO: 142980 - DNA, 120 bp, Artificial Sequence
  ENSG00000104517_68 (sequence is synthesized)
caatggatttggcatttgcaattgacctgtgtaaagaagaaggtggaggacaggttgaactcattcctaatggtgtaaatataccagtcactccacagaatgtatatgagtatgtgcgga

SEQ ID NO: 142981 - DNA, 120 bp, Artificial Sequence
  ENSG00000104517_69 (sequence is synthesized)
aatacgcagaacacagaatgttggtagttgcagaacagcccttacatgcaatgaggaaaggtctactagatgtgcttccaaaaaattcattagaagatttaacggcagaagattttaggc

SEQ ID NO: 142982 - DNA, 120 bp, Artificial Sequence
  ENSG00000104517_70 (sequence is synthesized)
ttttggtaaatggctgcggtgaagtcaatgtgcaaatgctgatcagttttacctctttcaatgatgaatcaggagaaaatgctgagaagcttctgcagttcaagcgttggttctggtcaa

SEQ ID NO: 142983 - DNA, 120 bp, Artificial Sequence
  ENSG00000104517_71 (sequence is synthesized)
tagtagagaagatgagcatgacagaacgacaagatcttgtttacttttggacatcaagcccatcactgccagccagtgaagaaggattccagcctatgccctcaatcacaataagaccac

SEQ ID NO: 142984 - DNA, 120 bp, Artificial Sequence
  ENSG00000104517_72 (sequence is synthesized)
cagatgaccaacatcttcctactgcaaatacttgcatttctcgactttacgtcccactctattcctctaaacagattctcaaacagaaattgttactcgccattaagaccaagaattttg

SEQ ID NO: 142985 - DNA, 120 bp, Artificial Sequence
  ENSG00000104517_73 (sequence is synthesized)
gttttgtgtagagtataaaaagtgtgtattgctgtgtaatattactagcaaattttgtagatttttttccatttgtctataaaagtttatggaagttaatgctgtcatacccccctggtg

SEQ ID NO: 142986 - DNA, 120 bp, Artificial Sequence
  ENSG00000104517_74 (sequence is synthesized)
gtaccttaaagagataaaatgcagacattccttgctgagtttatagcttaaaggcctaaggagcactagcaacatttggctatattggtttgctagtcaccaacttctgggtctaacccc

SEQ ID NO: 142987 - DNA, 120 bp, Artificial Sequence
  ENSG00000104517_75 (sequence is synthesized)
agccaaagatgacagcagaacaacataatttacactgtgatttatctttttgctgagggggaaaaaatgtaaatgttctgaaaattcactgctgcctttgtggaaactgtttcagcaaag

SEQ ID NO: 142988 - DNA, 120 bp, Artificial Sequence
  ENSG00000104517_76 (sequence is synthesized)
gttcttgtatagagggaatagggaatttcaaaataaaaaattaagtatgttctgtgttttcattttaactttttttatggtgtttaatttgtggttggctgcaactgtgtatcatgtata

SEQ ID NO: 142989 - DNA, 120 bp, Artificial Sequence
  ENSG00000104517_77 (sequence is synthesized)
tggaacttgtaaaaaagttctcgacattcagatcttaagagatgaaatcacttttacctataaaaaccacttttattgcggtttgactgcattgagctctaggatattaaatgatatcac

SEQ ID NO: 142990 - DNA, 120 bp, Artificial Sequence
  ENSG00000104517_78 (sequence is synthesized)
taatattttgcatgtaatttgctcatttgagtgagggcactttttttgtacatatgatggggccaatgcacaatacttttatcacaatcaactttttctttgtatccctatttcaatgag

SEQ ID NO: 142991 - DNA, 120 bp, Artificial Sequence
  ENSG00000104517_79 (sequence is synthesized)
cagtcagtctcaagaggttactgcacttcagttctaactagacatttgtactaaggtatttcagttatgtaaactcagcctgggcactttctgataactgtaaaatgttttataagatca

SEQ ID NO: 142992 - DNA, 120 bp, Artificial Sequence
  ENSG00000104517_80 (sequence is synthesized)
tgattattgaagatacattttggaaaattttaaatgttcgtgagcagcttaactacttttgtatctagccttttttaagtatcttgttacatttacttttttaaataaagaaattacaga

SEQ ID NO: 142993 - DNA, 120 bp, Artificial Sequence
  ENSG00000104517_81 (sequence is synthesized)
agaaatgtcaagtaatattgaagaaacaatagtttttatttatgtagttgtacatttttaaactaagggcaatacactgacatggttatgtgcataaaaattttgacttaaagaactgga

SEQ ID NO: 142994 - DNA, 120 bp, Artificial Sequence
  ENSG00000104517_82 (sequence is synthesized)
agtttatatacacctggactataagaaacagaagaaaatcagtccacattttacagttagcagagaatcctaaatggcactggcctggccaccttttcattttacaaatgggggaagtga

SEQ ID NO: 142995 - DNA, 120 bp, Artificial Sequence
  ENSG00000104517_83 (sequence is synthesized)
agtgtgaccccttacttggcataggaagttaacttacacctaataactgacaggtttttgttttgatgacctattaattatgtagcctaggattaatatcccaaaattactctggtttaa

SEQ ID NO: 142996 - DNA, 120 bp, Artificial Sequence
  ENSG00000104517_84 (sequence is synthesized)
gtagctttattcagtggcataataacactgttttcttccttaagtcttcaatgaagtgacttaaaacagtcactttacatattaaaaatgaggagagcaattctctggaatctctccttt

SEQ ID NO: 142997 - DNA, 120 bp, Artificial Sequence
  ENSG00000104517_85 (sequence is synthesized)
cagttcctttgtaggatttctggccttgaggatagtcttcatgttcaaaggcactatgcttttattatataacttccttcagaagactgaaccacatgatattctcagccctgttaacac

SEQ ID NO: 142998 - DNA, 120 bp, Artificial Sequence
  ENSG00000104517_86 (sequence is synthesized)
taaaaatatttaaaactgaatgatagtagtgactcattgtattacttaaaacttatataacacgctgtattagatgtgtgtaaattagccaaaggttattttacaaagtgagacattggt

SEQ ID NO: 142999 - DNA, 120 bp, Artificial Sequence
  ENSG00000104517_87 (sequence is synthesized)
ttttatgtctaaatgctatttctgaataaatgaaatagtaattagatcaagagctgattagcatcaatgtgtttgaaagatataaaatttatacatcaccttaacctctgtatgcacatg

SEQ ID NO: 143000 - DNA, 120 bp, Artificial Sequence
  ENSG00000104517_88 (sequence is synthesized)
atgggattgataaaatattaaatgagaacaaactagatatgattaggacatttgaaaccctaattgtgaatttatttttaatagttactgaaatgaaaatatttaaaataatgcacaatg

SEQ ID NO: 143001 - DNA, 120 bp, Artificial Sequence
  ENSG00000104517_89 (sequence is synthesized)
gcacaatgtcttaagtcttcctaaatcaagattttggttaaaaaatacttctaataatagtaaaagattttttttttaagtaaatcataaaacggttctaaatgtaaaataaagacatgt

SEQ ID NO: 143002 - DNA, 120 bp, Artificial Sequence
  ENSG00000104517_90 (sequence is synthesized)
tgtgactgtacattagaagctccaagaagttctctgtgaaaggattatacctatattccaagattattatgtacacaaaggagaaaatgctgagaagcttctgcagttcaagcgttggtt

SEQ ID NO: 143003 - DNA, 120 bp, Artificial Sequence
  ENSG00000104517_91 (sequence is synthesized)
attcatcagccacagatgtgatggaaatcgaaatattttgcatgcttgtgtatcagtttgctttccaaccagcaataaagaaactaaagaagaagaggcggagcgttctgaaagaaatac

SEQ ID NO: 143004 - DNA, 120 bp, Artificial Sequence
  ENSG00000104517_92 (sequence is synthesized)
cagaataccctcctggcaaaggccatacatattatactgtgttcttgccataaccatgacatttcttttaggcttcctgatttgtcttaaaaattcatggaagtttttgctttctattct

SEQ ID NO: 143005 - DNA, 120 bp, Artificial Sequence
  ENSG00000104517_93 (sequence is synthesized)
gtaaagtatgaatttaatataaaatctaaaaaatatctaacagattacatatccctttttccaaggtgacaagtaaaagtgacttaggaagataaggccgggtgcggtggctctcacctg

SEQ ID NO: 143006 - DNA, 120 bp, Artificial Sequence
  ENSG00000104517_94 (sequence is synthesized)
caaagcgggtggatcacgaggtcaggaattcgaaaccagcctgaccaacatgatgaaacccgtctctacgaaaaatagaaaaattagccaggcatgatggtgggcgcctgtaatcctagc

SEQ ID NO: 143007 - DNA, 69 bp, Artificial Sequence
  ENSG00000104517_95 (sequence is synthesized)
ctgaccaacatgatgaaacccgtctctacgaaaaatagaaaaattagccaggcatgatggtgggccagg

SEQ ID NO: 143008 - DNA, 63 bp, Artificial Sequence
  ENSG00000104517_96 (sequence is synthesized)
gagactccatctcaaaaaataaataagtaaataaataaatgagaattgcttaaacccgggaga

SEQ ID NO: 143009 - DNA, 120 bp, Artificial Sequence
  ENSG00000104517_97 (sequence is synthesized)
ctgagattgcgccactgcactccagcctatgtgacagagcgagcctctgtctcaaaaaaaaagaaaaaaaaagggaagataggtcacatttatgctgtagtttctatcctggggctaatc

SEQ ID NO: 143010 - DNA, 120 bp, Artificial Sequence
  ENSG00000104517_98 (sequence is synthesized)
gttgtatttttttcttcctaatgagttaggaatttagattagatacactcctagagatgtataagctggtaggctgggcactagagctaaacagccacttctagagccttttaatggtcc

SEQ ID NO: 143011 - DNA, 120 bp, Artificial Sequence
  ENSG00000104517_99 (sequence is synthesized)
aagccaaagactgttgagagaactgtattttctttgctgatgctcttttcttctctggattttatgtactgttcgtttattcctctgccctgtctctggagctactgcatactggtatag

SEQ ID NO: 143012 - DNA, 120 bp, Artificial Sequence
  ENSG00000104517_100 (sequence is synthesized)
cttagtccattatagaaaaatcaagaacaatgtacatttttggtgaaaagatttttgtgagtatatgttaagagttgcgtatttagtcatgttttctgttgaatgcaaccaatgtacaat

SEQ ID NO: 143013 - DNA, 120 bp, Artificial Sequence
  ENSG00000104517_101 (sequence is synthesized)
attgacagctttcacctggctttctggagtaaacagtgaatttattggtgttctagaatcattaaattcgctagagaatttgctagtgaatttggattgctttctgaacatttttctgtt

SEQ ID NO: 143014 - DNA, 120 bp, Artificial Sequence
  ENSG00000104517_102 (sequence is synthesized)
cttctgtagtgctccctctgagcattgtagaagtgttccagcacccctatgaagaccacattcattttgtcagggagcctttagtccactatcttgaatcatacatgaaggatctagtga

SEQ ID NO: 143015 - DNA, 120 bp, Artificial Sequence
  ENSG00000104517_103 (sequence is synthesized)
tacacttttttaaagatttgtattaccaacttctctgctcatactgcattagtactagcaggtgcattggatatttattgactccaaaacttgaatgtattttggaaaatggagctgata

SEQ ID NO: 143016 - DNA, 120 bp, Artificial Sequence
  ENSG00000104517_104 (sequence is synthesized)
tttgtaatggataagcttctgagaactccaattactttgttgttttttaaactctcaaggaaaggctaaaactagattttcagattgtacatagaaaaattcaagctactttccaacatt

SEQ ID NO: 143017 - DNA, 120 bp, Artificial Sequence
  ENSG00000104517_105 (sequence is synthesized)
gtgctctcagtctgaatgatcatcttcaatattctatctagtgatggagtgagaaaattctcctgaactctgggcaggaagttcatattgctcagggtgagccaccatgataaaaataac

SEQ ID NO: 143018 - DNA, 120 bp, Artificial Sequence
  ENSG00000104517_106 (sequence is synthesized)
tcacacaggctaattacaattaatctaggctcttgacctttaaaaaatgtatataatgtttacatatgtttataatgtcacgccatttatttcatttaaaattttaaatgattttatctt

SEQ ID NO: 143019 - DNA, 120 bp, Artificial Sequence
  ENSG00000104517_107 (sequence is synthesized)
tggtcctctcttacaacttattcttggtacaacttattctttgtactataacagcagagatgagtaattgggacagactagcctccaaagcataaacttatttatgatttggccctttac

SEQ ID NO: 143020 - DNA, 120 bp, Artificial Sequence
  ENSG00000104517_108 (sequence is synthesized)
ggtggtagatatttttcactgtagagttgcttgattttattgtaaagtttcttttatttttttcttttcttttttgagacggagccttgctttgttacccaggccggagtgcagtggcat

SEQ ID NO: 143021 - DNA, 120 bp, Artificial Sequence
  ENSG00000104518_0 (sequence is synthesized)
gcagtttcacttttagctctgggcacctccagctcctgctcgccggacggctcccagggagagcagacgcgccagacgcgccaccctcggggcgccgacggtcacggagcatggggtcgg

SEQ ID NO: 143022 - DNA, 120 bp, Artificial Sequence
  ENSG00000104518_1 (sequence is synthesized)
cctttgagcgggtagtccggagagtggtccaggagctggaccatggtggggagttcatccctgtgaccagcctgcagagctccactggcttccagccctactgcctggtggttaggaagc

SEQ ID NO: 143023 - DNA, 120 bp, Artificial Sequence
  ENSG00000104518_2 (sequence is synthesized)
cctcaagctcatggttctggaaaccccgttataagtgtgtcaacctgtctatcaaggacatcctggagccggatgccgcggaaccagacgtgcagcgtggcaggagcttccacttctacg

SEQ ID NO: 143024 - DNA, 120 bp, Artificial Sequence
  ENSG00000104518_3 (sequence is synthesized)
atgccatggatgggcagatacagggcagcgtggagctggcagccccaggacaggcaaagatcgcaggcggggccgcggtgtctgacagctccagcacctcaatgaatgtgtactcgctga

SEQ ID NO: 143025 - DNA, 120 bp, Artificial Sequence
  ENSG00000104518_4 (sequence is synthesized)
gtgtggaccctaacacctggcagactctgctccatgagaggcacctgcggcagccagaacacaaagtcctgcagcagctgcgcagccgcggggacaacgtgtacgtggtgactgaggtgc

SEQ ID NO: 143026 - DNA, 120 bp, Artificial Sequence
  ENSG00000104518_5 (sequence is synthesized)
tgcagacacagaaggaggtggaagtcacgcgcacccacaagcgggagggctcgggccggttttccctgcccggagccacgtgcttgcagggtgagggccagggccatctgagccagaaga

SEQ ID NO: 143027 - DNA, 120 bp, Artificial Sequence
  ENSG00000104518_6 (sequence is synthesized)
agacggtcaccatcccctcaggcagcaccctcgcattccgggtggcccagctggttattgactctgacttggacgtccttctcttcccggataagaagcagaggaccttccagccacccg

SEQ ID NO: 143028 - DNA, 120 bp, Artificial Sequence
  ENSG00000104518_7 (sequence is synthesized)
gctgccctctggcctctccatgatgaggtgcctccacaacttcctgacagatggggtccctgcggagggggcgttcactgaagacttccagggcctacgggcagaggtggagaccatctc

SEQ ID NO: 143029 - DNA, 120 bp, Artificial Sequence
  ENSG00000104518_8 (sequence is synthesized)
caaggaactggagcttttggacagagagctgtgccagctgctgctggagggcctggagggggtgctgcgggaccagctggccctgcgagccttggaggaggcgctggagcagggccagag

SEQ ID NO: 143030 - DNA, 120 bp, Artificial Sequence
  ENSG00000104518_9 (sequence is synthesized)
ccttgggccggtggagcccctggacggtccagcaggtgctgtcctggagtgcctggtgttgtcctccggaatgctggtgccggaactcgctatccctgttgtctacctgctgggggcact

SEQ ID NO: 143031 - DNA, 120 bp, Artificial Sequence
  ENSG00000104518_10 (sequence is synthesized)
gaccatgctgagtgaaacgcagcacaagctgctggcggaggcgctggagtcgcagaccctgttggggccgctcgagctggtgggcagcctcttggagcagagtgccccgtggcaggagcg

SEQ ID NO: 143032 - DNA, 120 bp, Artificial Sequence
  ENSG00000104518_11 (sequence is synthesized)
cagcaccatgtccctgccccccgggctcctggggaacagctggggcgaaggagcaccggcctgggtcttgctggacgagtgtggcctagagctgggggaggacactccccacgtgtgctg

SEQ ID NO: 143033 - DNA, 120 bp, Artificial Sequence
  ENSG00000104518_12 (sequence is synthesized)
ggagccgcaggcccagggccgcatgtgtgcactctacgcctccctggcactgctatcaggactgagccaggagccccactagcctgtgcccgggcatggcctggcagctctccagcaggg

SEQ ID NO: 143034 - DNA, 120 bp, Artificial Sequence
  ENSG00000104518_13 (sequence is synthesized)
cagagtgtttgcccaccagctgctagccctaggaaggccaggagcccagtagccatgtggccagtctaccatggggcccaggagttggggaaacacaataaaggtggcatacgaaggaaa

SEQ ID NO: 143035 - DNA, 120 bp, Artificial Sequence
  ENSG00000104518_14 (sequence is synthesized)
cttcccggctcggggattacctctctggctggtcccctcctccgtgctctgcgcgcctccaccctagcgcttgtcttggctcctagaaccaggggcctggacgctgctcagggcagaggc

SEQ ID NO: 143036 - DNA, 120 bp, Artificial Sequence
  ENSG00000104518_15 (sequence is synthesized)
gccccctctgaggggctggcccctcagccgcactccgagacagccgcccccgggaccgcccttccttggagccccgccgcccgccgctcactctgcacacgcagcagaagggacgtggtg

SEQ ID NO: 143037 - DNA, 120 bp, Artificial Sequence
  ENSG00000104518_16 (sequence is synthesized)
ttccccaggctctggccccccaggacctgcgcggatctggcccagggcgcctcgccgacttccgtaaactgggcggagggatgaaccccgacccaggggacggaggcgctcgccctctcg

SEQ ID NO: 143038 - DNA, 120 bp, Artificial Sequence
  ENSG00000104518_17 (sequence is synthesized)
ctgcagggttctgccctcaacacttctggccccgcctgtgaatgggggccggagcgatggggcggggccggcctccctccctcctcccaggctgacctctgccctccttcgagcacttcc

SEQ ID NO: 143039 - DNA, 120 bp, Artificial Sequence
  ENSG00000104518_18 (sequence is synthesized)
cgttcggggtgatgattgaagaactgagtgtggacagagcacctgtcctcgccagcgcccagctggaagctgagttatttgtggctgcagcattccaacgcacacaccaccagaaatccc

SEQ ID NO: 143040 - DNA, 120 bp, Artificial Sequence
  ENSG00000104518_19 (sequence is synthesized)
tccccttcagcatactggcctcagacctaccagggcagagaccttgtcttgtttgctgctagaacccaggatcgctggaaaatcacctagcagcagccaggtgcggtgactcacgcctgt

SEQ ID NO: 143041 - DNA, 120 bp, Artificial Sequence
  ENSG00000104518_20 (sequence is synthesized)
ggccggtgctgttcccgcccccagctgccttctgggcccagcctccactttcagcagacccagcactcagaggcttcctggggcagctgcagcccctccacagtggcccaggtgccccct

SEQ ID NO: 143042 - DNA, 120 bp, Artificial Sequence
  ENSG00000104518_21 (sequence is synthesized)
atcccagcggaggcccgctatggcctctgacccccaaagcctcagccttggacaggtggctcatggagctccaggcacagagaaggccctggaggacgcagctggggtggggcgacactc

SEQ ID NO: 143043 - DNA, 120 bp, Artificial Sequence
  ENSG00000104518_22 (sequence is synthesized)
tggctgggttttgcagtgggtccctggtgacactctggctgggttttgcagtgggtccctgcaccacgctcaggaggtgacagcttgtttcctcccagccagaggcagccattctagtgg

SEQ ID NO: 143044 - DNA, 120 bp, Artificial Sequence
  ENSG00000104518_23 (sequence is synthesized)
acagagccctctgtgttagagcaggtctgggcgtcaggcctcactgtccctggctggaggtgctcatggtaccgtagacaacagggagaacactgtaattctgtgttggggagggccggg

SEQ ID NO: 143045 - DNA, 120 bp, Artificial Sequence
  ENSG00000104518_24 (sequence is synthesized)
gacagaagctttctgctagtgggagcatcccaggatgagctgggcagggctgttctggagggaaggagtcccccatcatgggagacatccaagtactgacccttctcccactccctcccg

SEQ ID NO: 143046 - DNA, 120 bp, Artificial Sequence
  ENSG00000104518_25 (sequence is synthesized)
gcagggcagggcagggccccacctaccccaagcaaccctgcttttatttatttatttatttaaattattttttgaggtgaggttttgctatctcggccagggtggtcttgaactcctggc

SEQ ID NO: 143047 - DNA, 120 bp, Artificial Sequence
  ENSG00000104518_26 (sequence is synthesized)
tgggattacaggggtgagccactgtgccaggtcccagccttgctcttgggaaggtcacaaccttggggcatcaggaaagtcccagaggcaaaagagcgctgtggccggaaccagcttgca

SEQ ID NO: 143048 - DNA, 120 bp, Artificial Sequence
  ENSG00000104518_27 (sequence is synthesized)
agagcgctgtggccggaaccagcttgcaggaaggaagctgcaggggtcatctggggcctccgctgccaggactggatcctaaggaccggactgagccccaggctgctgtgaggacaaggg

SEQ ID NO: 143049 - DNA, 120 bp, Artificial Sequence
  ENSG00000104518_28 (sequence is synthesized)
gtggtgtgaacacgggggcccaggtgagggggccgcacctcgagtctggacttggagtccccgagtccacctttcctcatggggtcccgtccccgtggggagcacacggagaggctgccg

SEQ ID NO: 143050 - DNA, 120 bp, Artificial Sequence
  ENSG00000104518_29 (sequence is synthesized)
gtgccccggcacccacagacctctggagggcccctctgcaccacctcccccggtggcgtggggctgtcaggggagggaagacgccttcaggggctgcggcccagcgagctttgctgctcc

SEQ ID NO: 143051 - DNA, 80 bp, Artificial Sequence
  ENSG00000104518_30 (sequence is synthesized)
atgcggcggcgggtgacggaggcggcgggctgggctccgccaaggcccctcggagcagctcccagccctgcgcttggctg

SEQ ID NO: 143052 - DNA, 120 bp, Artificial Sequence
  ENSG00000104518_31 (sequence is synthesized)
ccggcccgcacccgcaccccacggcccggtgccagggcccagccccgagcccatctccatgcctcagggtgagggccagggccatctgagccagaagaagacggtcaccatcccctcagg

SEQ ID NO: 143053 - DNA, 120 bp, Artificial Sequence
  ENSG00000104518_32 (sequence is synthesized)
ccgccagcttgggctgccgtgggcccctggctgaacaacgtcctgtgtctggcaggtggctgaggtcctgtgctctggtgtgtgggtgattgggcagggcctgagctggacaggggagct

SEQ ID NO: 143054 - DNA, 120 bp, Artificial Sequence
  ENSG00000104518_33 (sequence is synthesized)
cctagtaggggaggggaggggatgctgggatctaggtgacatgcctgtccctgtctgctcccgtctggctgccagacgtccttctcttcccggataagaagcagaggaccttccagccac

SEQ ID NO: 143055 - DNA, 120 bp, Artificial Sequence
  ENSG00000104518_34 (sequence is synthesized)
cctgaccgccccggggacctttggtgggctctcctgccccctggggtctgcctgtcctgaccgaggctttccagggccctgtaagcacctgggcagtgccagcccttctgtccctacaga

SEQ ID NO: 143056 - DNA, 120 bp, Artificial Sequence
  ENSG00000104518_35 (sequence is synthesized)
gccccagggaggctggatgggagaggggagcgggctggggccaaccatccactgggctctgcagcctctagctctgggcctctcttccagaggccggggcctttccaaaggtccctctgc

SEQ ID NO: 143057 - DNA, 120 bp, Artificial Sequence
  ENSG00000104518_36 (sequence is synthesized)
cagaaggccccgcgccgcacacgggggcggaagctccaggcttcgggaaaggctgcccctggccagcccaggggcccggcctttggacctgggcttgggcttgactcccaggagcatggg

SEQ ID NO: 143058 - DNA, 120 bp, Artificial Sequence
  ENSG00000104522_0 (sequence is synthesized)
acctggctccgcgggcagccggagcgcacccggccggaagccgctgtcggggagccggcggtggggctggacgcaggtgcaactgacatgggtgaaccccagggatccatgcggattcta

SEQ ID NO: 143059 - DNA, 120 bp, Artificial Sequence
  ENSG00000104522_1 (sequence is synthesized)
gtgacagggggctctgggctggtaggcaaagccatccagaaggtggtagcagatggagctggacttcctggagaggactgggtgtttgtctcctctaaagacgccgatctcacggataca

SEQ ID NO: 143060 - DNA, 120 bp, Artificial Sequence
  ENSG00000104522_2 (sequence is synthesized)
gcacagacccgcgccctgtttgagaaggtccaacccacacacgtcatccatcttgctgcaatggtggggggcctgttccggaatatcaaatacaatttggacttctggaggaaaaacgtg

SEQ ID NO: 143061 - DNA, 120 bp, Artificial Sequence
  ENSG00000104522_3 (sequence is synthesized)
cacatgaacgacaacgtcctgcactcggcctttgaggtgggcgcccgcaaggtggtgtcctgcctgtccacctgtatcttccctgacaagacgacctacccgatagatgagaccatgatc

SEQ ID NO: 143062 - DNA, 120 bp, Artificial Sequence
  ENSG00000104522_4 (sequence is synthesized)
cacaatgggcctccccacaacagcaattttgggtactcgtatgccaagaggatgatcgacgtgcagaacagggcctacttccagcagtacggctgcaccttcaccgctgtcatccccacc

SEQ ID NO: 143063 - DNA, 120 bp, Artificial Sequence
  ENSG00000104522_5 (sequence is synthesized)
tcaacatcgaggatggccacgtgctgcctggcctcatccacaaggtgcacctggccaagagcagcggctcggccctgacggtgtggggtacagggaatccgcggaggcagttcatatact

SEQ ID NO: 143064 - DNA, 120 bp, Artificial Sequence
  ENSG00000104522_6 (sequence is synthesized)
cgctggacctggcccagctctttatctgggtcctgcgggagtacaatgaagtggagcccatcatcctctccgtgggcgaggaagatgaggtctccatcaaggaggcagccgaggcggtgg

SEQ ID NO: 143065 - DNA, 120 bp, Artificial Sequence
  ENSG00000104522_7 (sequence is synthesized)
tggaggccatggacttccatggggaagtcacctttgatacaaccaagtcggatgggcagtttaagaagacagccagtaacagcaagctgaggacctacctgcccgacttccggttcacac

SEQ ID NO: 143066 - DNA, 120 bp, Artificial Sequence
  ENSG00000104522_8 (sequence is synthesized)
ccttcaagcaggcggtgaaggagacctgtgcttggttcactgacaactacgagcaggcccggaagtgaagctggaagacaggatcaggtgccagcggaccatcggctggcagagcccagc

SEQ ID NO: 143067 - DNA, 120 bp, Artificial Sequence
  ENSG00000104522_9 (sequence is synthesized)
ggccaccacccgtcaaccctgccaggagctgagggcaccacccagcaacctgggcctgcattccatccgctctgcagccccaagcatctttccagtggggcccccattcacgttggtcct

SEQ ID NO: 143068 - DNA, 120 bp, Artificial Sequence
  ENSG00000104522_10 (sequence is synthesized)
cagggaaaccagggtcccgggcaggcccggcgctttgctccccacaccagccccctgcgcgtgtccactctgatcctgcatcccactccctgggagccaataaagtgcattttcacaggc

SEQ ID NO: 143069 - DNA, 120 bp, Artificial Sequence
  ENSG00000104522_11 (sequence is synthesized)
gtgagcccatccccagatcagcccttcctctccatcctaccccccaccctagaactaagagttccaggctgggcatgttgctgagtctaacagtagctgtgtttctgggtccttcctgcc

SEQ ID NO: 143070 - DNA, 120 bp, Artificial Sequence
  ENSG00000104522_12 (sequence is synthesized)
gtgtgcttggctgtgttcctggaaaaacaaacaccctcccatctcttcctggaagcctgcaccctcatatcagccaggccctggggccaccctcccttttgactgtccctcctgccatag

SEQ ID NO: 143071 - DNA, 120 bp, Artificial Sequence
  ENSG00000104522_13 (sequence is synthesized)
aggttctgggaacttcctggcgggcttcccactctcacaggcccacattcccaccccaggaagtccctgaggatcagggcttggcacagcctggtgggggcagcccctgagggaccccca

SEQ ID NO: 143072 - DNA, 120 bp, Artificial Sequence
  ENSG00000104522_14 (sequence is synthesized)
gatgatcgacgtgcagaacaggtcctcgcgcccatcctgctgaggcccagccaggagtcggggagagggcccccaggggcgggtggggccggctggtcgggtcttcgtgccagcctcagt

SEQ ID NO: 143073 - DNA, 120 bp, Artificial Sequence
  ENSG00000104522_15 (sequence is synthesized)
aagaggccagcggcagcctggggtgggatcgcgggcccaggacgagggcaggagacgctgtgcctccgcagggcctacttccagcagtacggctgcaccttcaccgctgtcatccccacc

SEQ ID NO: 143074 - DNA, 120 bp, Artificial Sequence
  ENSG00000104522_16 (sequence is synthesized)
gtcggggagccggcggtggggctggacgcaggtgaggtggcaccggactcagccgcgccctgggccctggatgctccgtgagagtcagggagcgctgtgggggtctgggatcgaggggca

SEQ ID NO: 143075 - DNA, 120 bp, Artificial Sequence
  ENSG00000104522_17 (sequence is synthesized)
tgggggcagcctggggctgtggtagagggtctggctgcggtgaggtctccccgcgtgcttgggagccgcgcgacgcctgcgcagggccccctcccctaagggctggccctggggccctgc

SEQ ID NO: 143076 - DNA, 120 bp, Artificial Sequence
  ENSG00000104522_18 (sequence is synthesized)
cgggggagcccgagcaggtttccggctcccaggatgggatccttgagggtggctgcgccccgaggcctgtcctgccctggaggaatctggctcgccagggctctccaggaccagccagcc

SEQ ID NO: 143077 - DNA, 120 bp, Artificial Sequence
  ENSG00000104522_19 (sequence is synthesized)
tcgagtgggcgtgggctgcacacaggcgccgtctcgtgcctgtccctagcatgcgggctttagctgcgaaccgtgttaacgacctgtgccaggagcccccgtcccaaggttgtctgcctc

SEQ ID NO: 143078 - DNA, 120 bp, Artificial Sequence
  ENSG00000104522_20 (sequence is synthesized)
ccctcttgtcagtcagaggggagtagaatgtaccttttctcggcctagtggggagtcgtgggttgggaccagctgctctgggctgggtggtagctcaggacccctgcggcgctgtaggct

SEQ ID NO: 143079 - DNA, 120 bp, Artificial Sequence
  ENSG00000104522_21 (sequence is synthesized)
gagagctcccaggggaacagggctgcgacgagggagtgcctcggtccagctgggtctttctggttgccagtggactatgccccactctgagggcctcactctgtgccagttgccacagaa

SEQ ID NO: 143080 - DNA, 120 bp, Artificial Sequence
  ENSG00000104522_22 (sequence is synthesized)
gtgggtggggccggggagccggtgggcagggccaggaagtagcggcctctgcctctcccacgcccgcagatccacaatgggcctccccacaacagcaattttgggtactcgtatgccaag

SEQ ID NO: 143081 - DNA, 120 bp, Artificial Sequence
  ENSG00000104522_23 (sequence is synthesized)
acaacttcaacatcgaggatggccacgtgctgcctggcctcatccacaaggtgcacctggccaagagtgagtgcgtccgtccgatggggtgcccgggctcagctcgggaggaggtgaccc

SEQ ID NO: 143082 - DNA, 120 bp, Artificial Sequence
  ENSG00000104522_24 (sequence is synthesized)
tgaggggtgggagcaggaatattcatgggccgtcgggtggcaccaaggggaggcctgacccggtggctccccacagtgggcgaggaagatgaggtctccatcaaggaggcagccgaggcg

SEQ ID NO: 143083 - DNA, 120 bp, Artificial Sequence
  ENSG00000104522_25 (sequence is synthesized)
catgctcgctaccagggcagaggtgaggtgccccctcagagcctgtactgccctggaggtgggacaccaaagctctgaggggtgacttccctgtccctgggcctcctccccccacttcct

SEQ ID NO: 143084 - DNA, 120 bp, Artificial Sequence
  ENSG00000104522_26 (sequence is synthesized)
gttgtttgctgcttgctgcccgagcctgggcgtacccatgggcgcgggtgacagtgcaagtgcttgggacgacaacccgggctcctcatcgcggccggaatccaagaggctgcggcgcga

SEQ ID NO: 143085 - DNA, 120 bp, Artificial Sequence
  ENSG00000104522_27 (sequence is synthesized)
gctgtggctcccctgggaatggcagaggttcaagggcaagctgcgggggctggggtggaggtgctcttctcgctgtggccttgacaaagcctccagtttgatacaaccaagtcggatggg

SEQ ID NO: 143086 - DNA, 120 bp, Artificial Sequence
  ENSG00000104524_0 (sequence is synthesized)
ctagatctgtgggcggggcgcggcctgtggatgggcggtgagcgcagcggcgtccgaggcaacaagatggcagctgcggagccgtctccgcggcgcgtgggcttcgtgggcgcgggccgc

SEQ ID NO: 143087 - DNA, 120 bp, Artificial Sequence
  ENSG00000104524_1 (sequence is synthesized)
atggcgggggccatcgcgcagggcctcatcagagcaggaaaagtggaagctcagcacatactggccagtgcaccaacagacaggaacctatgtcactttcaagctctgggttgccggacc

SEQ ID NO: 143088 - DNA, 120 bp, Artificial Sequence
  ENSG00000104524_2 (sequence is synthesized)
acgcactccaaccaggaggtgctgcagagctgcctgctcgtcatctttgccaccaagcctcatgtgctgccagctgtcctggcagaggtggctcctgtggtcaccactgaacacatcttg

SEQ ID NO: 143089 - DNA, 120 bp, Artificial Sequence
  ENSG00000104524_3 (sequence is synthesized)
gtgtccgtggctgctggggtgtctctgagcaccctggaggagctgctgcccccaaacacacgggtgctgcgggtcttgcccaacctgccctgtgtggtccaggaaggggccatagtgatg

SEQ ID NO: 143090 - DNA, 120 bp, Artificial Sequence
  ENSG00000104524_4 (sequence is synthesized)
gcgcggggccgccacgtggggagcagcgagaccaagctcctgcagcatctgctggaggcctgtgggcggtgtgaggaggtgcctgaagcctacgtcgacatccacactggcctcagtggc

SEQ ID NO: 143091 - DNA, 120 bp, Artificial Sequence
  ENSG00000104524_5 (sequence is synthesized)
agtggcgtggccttcgtgtgtgcattctccgaggccctggctgaaggagccgtcaagatgggcatgcccagcagcctggcccaccgcatcgctgcccagaccctgctggggacggccaag

SEQ ID NO: 143092 - DNA, 120 bp, Artificial Sequence
  ENSG00000104524_6 (sequence is synthesized)
atgctgctgcacgagggccaacacccagcccagctgcgctcagacgtgtgcaccccgggtggcaccaccatctatggactccacgccctggagcagggcgggctgcgagcagccaccatg

SEQ ID NO: 143093 - DNA, 120 bp, Artificial Sequence
  ENSG00000104524_7 (sequence is synthesized)
agcgccgtggaggctgccacctgccgggccaaggagctcagcagaaagtaggctgggctctggccatcctttcctgcctctgtgcccctgcctctccctgtgtcccttcccctgaggact

SEQ ID NO: 143094 - DNA, 120 bp, Artificial Sequence
  ENSG00000104524_8 (sequence is synthesized)
gcggctccctccctcctgcatgagggtctcctactgctccttctccccttgcacagggaaatgcagggggcaggacttgggaggttccagcaggcgggggagccccgaccagtggggaca

SEQ ID NO: 143095 - DNA, 120 bp, Artificial Sequence
  ENSG00000104524_9 (sequence is synthesized)
ctcctccctccccagtgagcagaaggcaccgtggtggtggctctgccccttgctgcagtgagcccaccttgctgcaacattggttctgaggggcccaagagatggcgtcttggtcatttg

SEQ ID NO: 143096 - DNA, 120 bp, Artificial Sequence
  ENSG00000104524_10 (sequence is synthesized)
cccgcatggttgggcagttggttgaggccatgaacagaacttacggtaacaggcacggctggcccaatgcctggtctggagctggagcttgcctttggctttccaggtggctccgtgcag

SEQ ID NO: 143097 - DNA, 120 bp, Artificial Sequence
  ENSG00000104524_11 (sequence is synthesized)
gcacgagccatatggggtctgcacaagagaccctctcccctgcagtaaagccaggggccctggcctgatggggcccccatggggagctggagcctgccctgcagcctggagaagagggtg

SEQ ID NO: 143098 - DNA, 120 bp, Artificial Sequence
  ENSG00000104524_12 (sequence is synthesized)
gctgtggtgggcgtgctcatcccctgctaaggagcaggagctgctgggccaggtctgcggcagtgctggggtggcaccaggtgggcagtggtaggtggggtggcttgaggtctgggaggg

SEQ ID NO: 143099 - DNA, 120 bp, Artificial Sequence
  ENSG00000104524_13 (sequence is synthesized)
tggccctggccagccaggacacatgcagacccctggctttagtctggatacaggctccctctttcctcccaatcctaagctcctgacaagtggccaggtggctctgggccctcctgcccc

SEQ ID NO: 143100 - DNA, 120 bp, Artificial Sequence
  ENSG00000104524_14 (sequence is synthesized)
gtgcctaggtcaggggtcctggaataccccgtagctctggcaccaccacactggcctctgatggcaagacttggcccctccacctgtccctaacggacggcaggtcaggaaagccaggac

SEQ ID NO: 143101 - DNA, 120 bp, Artificial Sequence
  ENSG00000104524_15 (sequence is synthesized)
tcaggggagaagcaaacccccaggattgaaggctagggttctagggcctttgggtggggagggcccgggccggacagcctcagctccgtcccctgccccacaagattcacctgggcctcc

SEQ ID NO: 143102 - DNA, 120 bp, Artificial Sequence
  ENSG00000104524_16 (sequence is synthesized)
agtcccacgctggccccaactgctgcagctctcggcttccgcccaacagcctctggaggtgaggcgggagcatgccctcagcgaggctgggcggcgggtcctgctgtgccatctccctgt

SEQ ID NO: 143103 - DNA, 120 bp, Artificial Sequence
  ENSG00000104524_17 (sequence is synthesized)
gcgcctgagcagatcaatccaccagtgcaaaacagggctaacggcacctgcaggacagcagcacgctccatccctcatgctcagctgcctctgcggccacggacttctgcccttcatctg

SEQ ID NO: 143104 - DNA, 120 bp, Artificial Sequence
  ENSG00000104524_18 (sequence is synthesized)
ctctctcttactctcctgagcctagcccgtccgtaagctccctcccctgcctggttcccagggcaggctgactcagttgactgcttggtccaagcctggccctggcacttgtcagggtca

SEQ ID NO: 143105 - DNA, 120 bp, Artificial Sequence
  ENSG00000104524_19 (sequence is synthesized)
gtcagcctaaggagatgggaataaagaggccagagagcaccaagtgagctcatgtttcaccagaggtggataaaaccaagttctgggctgggcccagtggctcacatctgtaattccagc

SEQ ID NO: 143106 - DNA, 120 bp, Artificial Sequence
  ENSG00000104524_20 (sequence is synthesized)
gcaagactctgtcttggaaaaaaaaaaaaagaaggtccaatgcctgccccataagttgaggcctggaaccttggtcaagcacaggtgtcagccgaagggggtgctggcactgtggacagc

SEQ ID NO: 143107 - DNA, 120 bp, Artificial Sequence
  ENSG00000104524_21 (sequence is synthesized)
agaggtctccccatgcctgctacaggcctctacatcacctgggggctttgtagggcatggaattgcagtttcccctgcacgctgtcaccccaggggactgtatgccaagcctgggcaggc

SEQ ID NO: 143108 - DNA, 120 bp, Artificial Sequence
  ENSG00000104524_22 (sequence is synthesized)
ctgggagcctggggtctggtgcaggcggccccctgaaggaaggtggacagcccttctgacggccacctgcattcacaccaagcccatctgcaaggagaaatcattgactttgcaccaaca

SEQ ID NO: 143109 - DNA, 120 bp, Artificial Sequence
  ENSG00000104524_23 (sequence is synthesized)
cctgtctccccctgggacctctgacaagccctgggcactaggtgagctcagctcgggaggtggagatcccaagccagccactcctggcccagctggtgagggcctgtgacaaagacacgg

SEQ ID NO: 143110 - DNA, 120 bp, Artificial Sequence
  ENSG00000104524_24 (sequence is synthesized)
gctcagttctcggcacggcagggagcgttgtggtgagccaggcctcccctgtgccttctacttccaggtgaaaactgttcttcaagacagaaaacgatggatatgattacggtatctttg

SEQ ID NO: 143111 - DNA, 120 bp, Artificial Sequence
  ENSG00000104524_25 (sequence is synthesized)
atcaatgttccacttttatgccctatgccccaactgttaatctagggggtattcctgatccaagcgttggatcaagagtttaaaaataagacttcaaaacagggatgctcatgaagtgga

SEQ ID NO: 143112 - DNA, 120 bp, Artificial Sequence
  ENSG00000104524_26 (sequence is synthesized)
atagccctttcgggccaataagcagcgagaggcggggttcccgcgccttgcgaacttgtagagtgcggacaaaaagccggccggagtgtgccgtcccagaaaagtggaagctcagcacat

SEQ ID NO: 143113 - DNA, 120 bp, Artificial Sequence
  ENSG00000104524_27 (sequence is synthesized)
tttagggttccctcctggtgctgtacctgggaggcagacgctggagcccaccgcgagctgacgtggacctttcctgaggcccctgctggggcctgcccagcagggcccagtcctacagac

SEQ ID NO: 143114 - DNA, 120 bp, Artificial Sequence
  ENSG00000104524_28 (sequence is synthesized)
agcggcgtccgaggcaacaagatggcagctgcggagccgtctccgcggcgcgtgggcttcgtgggcgcgggccgcatggcgggggccatcgcgcagggcctcatcagagcagccatactt

SEQ ID NO: 143115 - DNA, 120 bp, Artificial Sequence
  ENSG00000104524_29 (sequence is synthesized)
cagggtccagaagagtcaagatcaatcgggaaatagcttactatgagtctcaggagtcttccctgtgaaacctggcagtaccgcatgcctcccagagctgtacaggaaaagtggaagctc

SEQ ID NO: 143116 - DNA, 120 bp, Artificial Sequence
  ENSG00000104529_0 (sequence is synthesized)
gacaccactggccgcgaagcgcagggggggcgcgcgcgctgccgcccgttcccagcacttgtgcagactcctccggggaagagcggcctccgcggtcatctccaacggaattctgccttt

SEQ ID NO: 143117 - DNA, 120 bp, Artificial Sequence
  ENSG00000104529_1 (sequence is synthesized)
gaagtgtcggggcacggcgcgtcgagggtcctggcggccaggcggggcgtgtgcaagggtcgcgtcccccccccgggcccccggcccgtggctcttggtagagcccagtgcttcatttcc

SEQ ID NO: 143118 - DNA, 120 bp, Artificial Sequence
  ENSG00000104529_2 (sequence is synthesized)
cgtgcgcggcccgggcggccctccctttcatcagtcttcccgcgtccgccgattcctcctccttggtcgccgcgtccttggctggcgtgtgtccggaagatgaggagcgggaaggcctcc

SEQ ID NO: 143119 - DNA, 120 bp, Artificial Sequence
  ENSG00000104529_3 (sequence is synthesized)
tgcaccctggagaccgtgtgggaagacaagcacaagtatgaggaggccgagcggcgcttctacgaacacgaggccacacaggcggccgcctccgcccagcagctgccagccgaggggcca

SEQ ID NO: 143120 - DNA, 120 bp, Artificial Sequence
  ENSG00000104529_4 (sequence is synthesized)
gccatgaatgggcccggccaggacgaccctgaggacgctgatgaggcggaagcccctgacggcggcagcaggcgtgatcccaggaagagccaggacagcaggaagcccctgcagaaaaag

SEQ ID NO: 143121 - DNA, 120 bp, Artificial Sequence
  ENSG00000104529_5 (sequence is synthesized)
aggaagcgctcccccaagagcgggctcggccccgcggacctggccctcctgggcctctcggccgaacgcgtgtggctggacaagtcacttttcgaccaggcagagagctcctaccgccag

SEQ ID NO: 143122 - DNA, 120 bp, Artificial Sequence
  ENSG00000104529_6 (sequence is synthesized)
aagctggcagatgtggctgcccaggcagcctggcctcctgccttggccccttggggtctctgcacccatggaaaccaggtggcctgccaccacgtgacctgggggatctgggtcaacaag

SEQ ID NO: 143123 - DNA, 120 bp, Artificial Sequence
  ENSG00000104529_7 (sequence is synthesized)
tcctccttcgaccaggctgagcgggccttcgtggagtggtctcaggccctgttgctggcccccgacggcagccgcaggcaggggactcccaacacaggccagcaggtggccgtccccgac

SEQ ID NO: 143124 - DNA, 120 bp, Artificial Sequence
  ENSG00000104529_8 (sequence is synthesized)
ctggcccaccagcccagcccaccggtcaatggccagcccccgctgggcagcctgcaggcactggttcgggaggtgtggctggagaagccccggtatgatgcagccgagaggggcttctac

SEQ ID NO: 143125 - DNA, 120 bp, Artificial Sequence
  ENSG00000104529_9 (sequence is synthesized)
ccgcaacatcttagggaacaagcgggccgggctgcgacgggccgatggggaggccccctctgccttgccctactgttacttcctgcagaaggatgcagaggccccctggctcagcaagcc

SEQ ID NO: 143126 - DNA, 120 bp, Artificial Sequence
  ENSG00000104529_10 (sequence is synthesized)
tgcctacgacagcgccgagtgccgccaccacgctgccgaggccctgcgggtggcctggtgcctcgaagctgcctccctgtctcaccgacccggtcctcggtctggcctgtccgtgtccag

SEQ ID NO: 143127 - DNA, 120 bp, Artificial Sequence
  ENSG00000104529_11 (sequence is synthesized)
cctgagacccaacagaaaaatggctacaaacttcctagcacatgagaagatctggttcgacaagttcaaatatgacgacgcagaaaggagattctacgagcagatgaacgggcctgtggc

SEQ ID NO: 143128 - DNA, 120 bp, Artificial Sequence
  ENSG00000104529_12 (sequence is synthesized)
aggtgcctcccgccaggagaacggcgccagcgtgatcctccgtgacattgcgagagccagagagaacatccagaaatccctggctggaagctcaggccccggggcctccagcggcaccag

SEQ ID NO: 143129 - DNA, 120 bp, Artificial Sequence
  ENSG00000104529_13 (sequence is synthesized)
cggagaccacggtgagctcgtcgtccggattgccagtctggaagtggagaaccagagtctgcgtggcgtggtacaggagctgcagcaggccatctccaagctggaggcccggctgaacgt

SEQ ID NO: 143130 - DNA, 120 bp, Artificial Sequence
  ENSG00000104529_14 (sequence is synthesized)
gctggagaagagctcgcctggccaccgggccacggccccacagacccagcacgtatctcccatgcgccaagtggagcccccagccaagaagccagccacaccagcagaggatgacgagga

SEQ ID NO: 143131 - DNA, 120 bp, Artificial Sequence
  ENSG00000104529_15 (sequence is synthesized)
tgatgacattgacctgtttggcagtgacaatgaggaggaggacaaggaggcggcacagctgcgggaggagcggctacggcagtacgcggagaagaaggccaagaagcctgcactggtggc

SEQ ID NO: 143132 - DNA, 120 bp, Artificial Sequence
  ENSG00000104529_16 (sequence is synthesized)
caagtcctccatcctgctggatgtcaagccttgggatgatgagacggacatggcccagctggaggcctgtgtgcgctctatccagctggacgggctggtctggggggcttccaagctggt

SEQ ID NO: 143133 - DNA, 120 bp, Artificial Sequence
  ENSG00000104529_17 (sequence is synthesized)
gcccgtgggctacggtatccggaagctacagattcagtgtgtggtggaggacgacaaggtggggacagacttgctggaggaggagatcaccaagtttgaggagcacgtgcagagtgtcga

SEQ ID NO: 143134 - DNA, 120 bp, Artificial Sequence
  ENSG00000104529_18 (sequence is synthesized)
tatcgcagctttcaacaagatctgaagcctgagtgtgtgtacgtgcgcgcgtgcgtgaggccctgccacgattaaagactgagaccggccctctggctccgtcctggtcatttcctgctc

SEQ ID NO: 143135 - DNA, 82 bp, Artificial Sequence
  ENSG00000104529_19 (sequence is synthesized)
ctccctttcatcagtcttcccgcgtccgccgattcctcctccttggtcgccgcgtccttggctggcgtagtctccagaccct

SEQ ID NO: 143136 - DNA, 120 bp, Artificial Sequence
  ENSG00000104529_20 (sequence is synthesized)
gccgattcctcctccttggtcgccgcgtccttggctggcgtgtgagtaccgcggcccccgccggaaggagtcgggcgcgacagagacgcccgaggggccgggagggcgggcggcccgggc

SEQ ID NO: 143137 - DNA, 120 bp, Artificial Sequence
  ENSG00000104529_21 (sequence is synthesized)
tgcgccagaagctcgcgccgttagggactgaggcacaagtgcgccagcgcgggcttaggggccgtgggccaagtgcggcacttggggcgagcgcagagaggcggggcgacggaggccacg

SEQ ID NO: 143138 - DNA, 120 bp, Artificial Sequence
  ENSG00000104529_22 (sequence is synthesized)
tggccggcttggagggcgtccgcgggacgggggcgccgggagcactgtctcacggcgcatcccggtcgtggaagcccctcggccaggctgctggggcctaaggcctgtgtttgctgccgt

SEQ ID NO: 143139 - DNA, 120 bp, Artificial Sequence
  ENSG00000104529_23 (sequence is synthesized)
ctccgtgggagaccagacatctgccccagctgtttctctggcctgcagaccttcgtacaccacgtctttgtcaagcaccagttactgcacgcatcagctgagcacggaggggataggcac

SEQ ID NO: 143140 - DNA, 120 bp, Artificial Sequence
  ENSG00000104529_24 (sequence is synthesized)
agcgaaggggctgaccgtttgtcgggacgcagttgaaagagtcgctgtgtcctgctccgggctctcctgctggagaggagaggcttgcacgtgcctgtcgtctgcgcaagctttgaagct

SEQ ID NO: 143141 - DNA, 120 bp, Artificial Sequence
  ENSG00000104529_25 (sequence is synthesized)
ctccctttcatcagtcttcccgcgtccgccgattcctcctccttggtcgccgcgtccttggctggcgtgggatgacggagtgacgtcacctgtgtggactcagctgccacctgggattgt

SEQ ID NO: 143142 - DNA, 120 bp, Artificial Sequence
  ENSG00000104529_26 (sequence is synthesized)
ggtggcggcgggtctgtctggcgctcagcttccatctccaccagtgtcacctccacaccacctcgccaagcagcttctggaaaggcccccggccgccccgggctgacctgctgctgtgtc

SEQ ID NO: 143143 - DNA, 120 bp, Artificial Sequence
  ENSG00000104529_27 (sequence is synthesized)
taaagcttatttcagataaatgacgaaaaatttttagtgtaagtatgtctcagatacttcatgggccatacattcactaacaaaattatatattgttcatgtattgggaggcacttggcc

SEQ ID NO: 143144 - DNA, 120 bp, Artificial Sequence
  ENSG00000104529_28 (sequence is synthesized)
aggcatgagccactgcgcccggcctgttttctcttcacaacaaaacgtccccacatgggcttgacttcgaagtcctcgaatgtcatctcatggaagccccactggggagcatcctcagcc

SEQ ID NO: 143145 - DNA, 120 bp, Artificial Sequence
  ENSG00000104529_29 (sequence is synthesized)
actggggagcatcctcagcccctgcccagggagggcagccacggggagggcgggcacggggagggtgggcacggggctgcggccacccgctgtgttgcaactctgccctctgcttgcttt

SEQ ID NO: 143146 - DNA, 120 bp, Artificial Sequence
  ENSG00000104529_30 (sequence is synthesized)
cctgtgagtgggcggggtggggcttcagggggccaggcactgccctggtgcccgcctagccggctcagcctgtgaccctccccctgccctctgggttctggggagactttaaagccgagt

SEQ ID NO: 143147 - DNA, 120 bp, Artificial Sequence
  ENSG00000104529_31 (sequence is synthesized)
acagggacagccatcccaggctggggctcctccagcttcctcccctgcccacctggggtgggggctccccgagacccgtgggcccagcagagttgaatgcaggagcaggctgagtaaaga

SEQ ID NO: 143148 - DNA, 85 bp, Artificial Sequence
  ENSG00000104529_32 (sequence is synthesized)
tgagccgagatcgcgccgctgatcacaaaaaaaaaataacaaaaaaactcagaaatgctaagtgtacttatttgttgaagaaact

SEQ ID NO: 143149 - DNA, 120 bp, Artificial Sequence
  ENSG00000104529_33 (sequence is synthesized)
aactcagaaatgctaagtgtacttatttgttgaagaaacttgttacatattactaacatcttttttttttatgagaaatacttttcccataaccaaaaaattcagtgagcagaatggcct

SEQ ID NO: 143150 - DNA, 120 bp, Artificial Sequence
  ENSG00000104529_34 (sequence is synthesized)
tgcttgaggtttttgcaaatctctcgggtgtctggcttagtgggaggcagctgggccctcatacctgcctccgcacttcagctgtttgacataaacccagcttcgtgtgagtgaaaggga

SEQ ID NO: 143151 - DNA, 120 bp, Artificial Sequence
  ENSG00000104529_35 (sequence is synthesized)
agggcctggggaccctcagaggttctcggaccacactttgagaactcctcgtctggaagacaggcctggggatgccatgtggggtgagggcttacgggcttggtgtcgctttgtggagaa

SEQ ID NO: 143152 - DNA, 120 bp, Artificial Sequence
  ENSG00000104529_36 (sequence is synthesized)
ctccctttcatcagtcttcccgcgtccgccgattcctcctccttggtcgccgcgtccttggctggcgtggtttcaacgtgttagccaggatggtctcagtctccagaccctgtgatccgc

SEQ ID NO: 143153 - DNA, 120 bp, Artificial Sequence
  ENSG00000104529_37 (sequence is synthesized)
cagaggctttaagtggaaggaagaaggcaaagggggcggagtgggttggggacctgatgagacgtcaggattggtttccagaatgaaggaccgcctggcagcagaagaactgtgtagcta

SEQ ID NO: 143154 - DNA, 120 bp, Artificial Sequence
  ENSG00000104529_38 (sequence is synthesized)
aacttggggttgtccctgcccgacagggcggggtgcttcttaagttgacactgcctgcggctcacctcccagggaggcaggccaggccatctcacctgagcagcctccttctacagctcc

SEQ ID NO: 143155 - DNA, 120 bp, Artificial Sequence
  ENSG00000104529_39 (sequence is synthesized)
gcccaccccgtcatctggaccccatgagccttaagcagctggctcgcaggcagttggttacttccggagcccgtgtgtgcccagccccgttctgggggtgggggatgcagctgaggggct

SEQ ID NO: 143156 - DNA, 120 bp, Artificial Sequence
  ENSG00000104529_40 (sequence is synthesized)
gcctcaggcccagccaggctcctagacctgcctctgtagaggctttctgggcgcagtgccaatcctgtgagacagcagcatctcccctgggctgctgcagggttcacacgcagtcagtgc

SEQ ID NO: 143157 - DNA, 120 bp, Artificial Sequence
  ENSG00000104529_41 (sequence is synthesized)
tggcagagtgagcgcccagccgacagagcccccgctgcctcccgcctcctctggaggactaggccctctgggctttgctcccgggttgctgggtgaggctgcaaggtttagcacagcaga

SEQ ID NO: 143158 - DNA, 120 bp, Artificial Sequence
  ENSG00000104529_42 (sequence is synthesized)
ctccctttcatcagtcttcccgcgtccgccgattcctcctccttggtcgccgcgtccttggctggcgtggcctgcctaggctccaactgacagtaatcccaagagctcccctttcagggg

SEQ ID NO: 143159 - DNA, 120 bp, Artificial Sequence
  ENSG00000104529_43 (sequence is synthesized)
cctgcagccctcgggcggacccccatcatcgtccaggtgcagccactccgcaacctcctccggagccaggcacttgtaggccagagccgccaggtgggtgaggtcgctgagcaccctgct

SEQ ID NO: 143160 - DNA, 120 bp, Artificial Sequence
  ENSG00000104529_44 (sequence is synthesized)
gtgctcggcggcttcctcggcctgggccggctgcccagcactgtcctcgccgggccggggctcgaaggcagcccgcaggcccagcagccagcagcgctcaatgctgcccgcctgcaccag

SEQ ID NO: 143161 - DNA, 120 bp, Artificial Sequence
  ENSG00000104529_45 (sequence is synthesized)
tccctttcatcagtcttcccgcgtccgccgattcctcctccttggtcgccgcgtccttggctggcgtatgtgtggagacctccaggccgtgcagcaccttggtggccacagctctccagg

SEQ ID NO: 143162 - DNA, 85 bp, Artificial Sequence
  ENSG00000104529_46 (sequence is synthesized)
ctccctttcatcagtcttcccgcgtccgccgattcctcctccttggtcgccgcgtccttggctggcgtagtctccagaccctgtg

SEQ ID NO: 143163 - DNA, 120 bp, Artificial Sequence
  ENSG00000104529_47 (sequence is synthesized)
atgctgctggttgttttggcttcacagcagagtcagggcagggtgcacggcgctgtgctccttgggacgtgtggctctgtgacctccatgcccggactgccacggacagtgttcttattc

SEQ ID NO: 143164 - DNA, 120 bp, Artificial Sequence
  ENSG00000104529_48 (sequence is synthesized)
agaaccagagtctgcgtggcggtgaggccccgggccagtgggttggggctgtccctggcccctgccatctaaccgtgctccccttgcccccccagtggtacaggagctgcagcaggccat

SEQ ID NO: 143165 - DNA, 120 bp, Artificial Sequence
  ENSG00000104529_49 (sequence is synthesized)
tcccctgaggcgtgtcccaggttgtccctaggactgtgagtccttcagcacctcccacccagcctctgagcctggctgctcagcaggattccgccgggcagcagcagccatggcccagct

SEQ ID NO: 143166 - DNA, 120 bp, Artificial Sequence
  ENSG00000104529_50 (sequence is synthesized)
ggtcataagtttgagctgggcatcagcggggggcacctcctgctctcccgagctgtagttttccttccgtgagttcctgcagtcctgagcatggcagggggaccctaggagcaggctggg

SEQ ID NO: 143167 - DNA, 120 bp, Artificial Sequence
  ENSG00000104529_51 (sequence is synthesized)
gaataagcctatgaggagcgggaaggcctcctgcaccctggagaccgtgtgggaagacaagcacaagtatgaggaggccgagcggcgcttctacgaacacgaggccacacaggcggccgc

SEQ ID NO: 143168 - DNA, 120 bp, Artificial Sequence
  ENSG00000104529_52 (sequence is synthesized)
cacgctcctcaaaattcttcccgcctcaccactgcccaactccaaagccatctccacattgttaggcattccagcagcaccccacttcctgggccaggatctgtgttggtttccacttga

SEQ ID NO: 143169 - DNA, 120 bp, Artificial Sequence
  ENSG00000104529_53 (sequence is synthesized)
tgttgctgtaacgttgccacacttccgtggcttaaaacagcacaagttcctcaccttacagttccgggggccagaagtctgagatcatcttatggggcaaaatcaaggctgtggtccttc

SEQ ID NO: 143170 - DNA, 120 bp, Artificial Sequence
  ENSG00000104529_54 (sequence is synthesized)
tggtgtctctgcggggagaatccgcttccttgtctcttctggctgctggaagctgctcacggtccttggcccaaggctcccaggcagctgtcttgtcactcagcctccctctcccctccc

SEQ ID NO: 143171 - DNA, 120 bp, Artificial Sequence
  ENSG00000104529_55 (sequence is synthesized)
tcgctcctgctgcctagtgtgggcccttgtgatgacagtgggcccacctgggtgatccagcatcctctctgccgcttaacttaatcttatcacatctacagaatccctttgccatgggag

SEQ ID NO: 143172 - DNA, 120 bp, Artificial Sequence
  ENSG00000104529_56 (sequence is synthesized)
accatatttacaggctctgcggactcgtatgtggctttgtgggggccattgttctgtctgccacagccacagccacctaggggtgtgctggctcccgggccataagctgggcatccctgg

SEQ ID NO: 143173 - DNA, 120 bp, Artificial Sequence
  ENSG00000104529_57 (sequence is synthesized)
gtgggtgggcccaggaagggctgccactcctgtctgccaggtggggtgctcctttgtgccttgcgttctgcccactggcttgcacccctggcttgcccaggcacctgaccaagtccaggc

SEQ ID NO: 143174 - DNA, 120 bp, Artificial Sequence
  ENSG00000104529_58 (sequence is synthesized)
taggcagacatgagattaagggagcacagatttttgcgcccaagtcaggcatattgcactccagtgcccagaaggcagcggtcgggggcttggccctggggctgcaggaactcttcagcc

SEQ ID NO: 143175 - DNA, 120 bp, Artificial Sequence
  ENSG00000104529_59 (sequence is synthesized)
ctggctgtgtggagtcaaccctaaggtgtctctgggacaggcaggtggtcgcactgttagggcttagggactggtttgctgctataacaaaggtccatagactgggtgacttaaaccaca

SEQ ID NO: 143176 - DNA, 120 bp, Artificial Sequence
  ENSG00000104529_60 (sequence is synthesized)
tgtattttctcacagctctggaggctggaagtccatgatcgaggtggcagcaaggctggtttctcctgaggcctctctcagcatgtagaccgtcttctccatgtcttcacacggtcatcc

SEQ ID NO: 143177 - DNA, 120 bp, Artificial Sequence
  ENSG00000104529_61 (sequence is synthesized)
atctgagtgtgtgtgtgtcctgatgtcttcttattggacaccagtcagattggattagccccctgcccctcagtgacagttacctctgcaaaggccctgtctccaaataaggtcacatcc

SEQ ID NO: 143178 - DNA, 120 bp, Artificial Sequence
  ENSG00000104529_62 (sequence is synthesized)
taagataccgggggataagactccagcatgtggatttggaaggacattattcagcccatggcaggggcccagtctcatcttggatttggggtgggagtgctcagcagacactggggtttc

SEQ ID NO: 143179 - DNA, 120 bp, Artificial Sequence
  ENSG00000104529_63 (sequence is synthesized)
agaactgcagggtttctggtagcgtggtgctggcacagggttacaggcatgggtctggctctgaagtgtttgcctttggcatcccccaagtccctgaggggctctctgaggcccgctgtg

SEQ ID NO: 143180 - DNA, 120 bp, Artificial Sequence
  ENSG00000104529_64 (sequence is synthesized)
actgcactgggtgacctgagcctgcccgttgaagctgtgctcagggattctgatgcctggcatccctagtcccccctgagtcagcatcaaaggaggggactctccctgtgtcctgagtgc

SEQ ID NO: 143181 - DNA, 120 bp, Artificial Sequence
  ENSG00000104529_65 (sequence is synthesized)
tgtgggctctggcctagtggcccgcagagccaggcagtggtgagacggcccccgctgctcatcatgcagcccggggccagtgctgacttagtgcctcttccagaggggaccttttccctg

SEQ ID NO: 143182 - DNA, 120 bp, Artificial Sequence
  ENSG00000104529_66 (sequence is synthesized)
tccttgggcctgctgtgtggggtgcatgaggcctcaggtgccactcacagactccggcctcctcaggacccagccccactcccgcgggaggtctgctgtgattctccatgccccctggcg

SEQ ID NO: 143183 - DNA, 120 bp, Artificial Sequence
  ENSG00000104529_67 (sequence is synthesized)
ccatttcctcctggccttgctgccaggtgggcctcctgggccagtttggctcggccttgcccatgatctgcggggcttagctcccacaccctccagatacataaacaagcattccccaca

SEQ ID NO: 143184 - DNA, 120 bp, Artificial Sequence
  ENSG00000104529_68 (sequence is synthesized)
gcatggtcccaaggacggtggcaggagggccccagggatgggtttgcacgttgggcaaaggcctgagtatgtccgcacctgctgcaaggagcggctttgcctgcccggctactccaggcc

SEQ ID NO: 143185 - DNA, 120 bp, Artificial Sequence
  ENSG00000104529_69 (sequence is synthesized)
cctccccacagagagggagccccggggagctgccgagatggggtttgctgagagctccatgcagccaggtgcaccctgtccttcgagccatcctgttggagggtgggcaggctaaatggc

SEQ ID NO: 143186 - DNA, 120 bp, Artificial Sequence
  ENSG00000104529_70 (sequence is synthesized)
ccatgcgtgcaggtagatgcttaaggactggctagtgttaagggccaggaggctgggatcctgtctgggccccgaggtatcagtctcagctatggcagagtatgaggtgggcttggggcc

SEQ ID NO: 143187 - DNA, 120 bp, Artificial Sequence
  ENSG00000104529_71 (sequence is synthesized)
ctggatcacctagagactggcttgctgagtgagatggcaggcgtgaggcccagggagacaaagctttgggtggctgctgtccacacaggtgggctccttccttcttcccccactgggccc

SEQ ID NO: 143188 - DNA, 120 bp, Artificial Sequence
  ENSG00000104537_0 (sequence is synthesized)
gtaaactttgcctgtaggaggactgatctcttgatgaaatacagaaaaaccatctcagaaaaaggaaaatgggcaatcgtcatagccagtcgtacaccctctcagaaggcagtcaacagt

SEQ ID NO: 143189 - DNA, 120 bp, Artificial Sequence
  ENSG00000104537_1 (sequence is synthesized)
tgcctaaaggggactcccaaccctcgacagtcgtgcagcctctcagccacccatcacggaatggagagccagaggccccacagcctgctaaagcgagcagtcctcagggttttgatgtgg

SEQ ID NO: 143190 - DNA, 120 bp, Artificial Sequence
  ENSG00000104537_2 (sequence is synthesized)
atcgagatgccaaaaagctgaacaaagcctgcaaaggaatggggaccaatgaagcagccatcattgaaatcttatcgggcaggacatcagatgagaggcaacaaatcaagcaaaagtaca

SEQ ID NO: 143191 - DNA, 120 bp, Artificial Sequence
  ENSG00000104537_3 (sequence is synthesized)
aggcaacgtacggcaaggagctggaggaagtactcaagagtgagctgagtggaaacttcgagaagacagcgttggcccttctggaccgtcccagcgagtacgccgcccggcagctgcaga

SEQ ID NO: 143192 - DNA, 120 bp, Artificial Sequence
  ENSG00000104537_4 (sequence is synthesized)
aggctatgaagggtctgggcacagatgagtccgtcctcattgaggtcctgtgcacgaggaccaataaggaaatcatcgccattaaagaggcctaccaaaggctatttgataggagcctcg

SEQ ID NO: 143193 - DNA, 120 bp, Artificial Sequence
  ENSG00000104537_5 (sequence is synthesized)
aatcagatgtcaaaggtgatacaagtggaaacctaaaaaaaatcctggtgtctctgctgcaggctaatcgcaatgaaggagatgacgtggacaaagatctagctggtcaggatgccaaag

SEQ ID NO: 143194 - DNA, 120 bp, Artificial Sequence
  ENSG00000104537_6 (sequence is synthesized)
gggcactgatgagcttgcgttcaatgaagtcctggccaagaggagctacaagcagttacgagccacctttcaagcctatcaaattctcattggcaaagacatagaagaagccattgaaga

SEQ ID NO: 143195 - DNA, 120 bp, Artificial Sequence
  ENSG00000104537_7 (sequence is synthesized)
agaaacatcaggcgacttgcagaaggcctatttaactctcgtgagatgtgcccaggattgtgaggactattttgctgaacgtctgtacaagtcgatgaagggtgcggggaccgatgagga

SEQ ID NO: 143196 - DNA, 120 bp, Artificial Sequence
  ENSG00000104537_8 (sequence is synthesized)
gacgttgattcgcatagtcgtgaccagggccgaggtggaccttcaggggatcaaagcaaagttccaagagaagtatcagaagtctctctctgacatggttcgctcagatacctccgggga

SEQ ID NO: 143197 - DNA, 120 bp, Artificial Sequence
  ENSG00000104537_9 (sequence is synthesized)
cttccggaaactgctagtagccctcttgcactgagccaagccagggcaataggaacacagggtggaaccgcctttgtcaagagcacattccaaatcaaacttgcaaatgagactcccgca

SEQ ID NO: 143198 - DNA, 120 bp, Artificial Sequence
  ENSG00000104537_10 (sequence is synthesized)
cgaaaacccttaagagtcccggattactttcttggcagcttaagtggcgcagccaggccaagctgtgtaagttaagggcagtaacgttaagatgcgtgggcagggcaccttgaactctgg

SEQ ID NO: 143199 - DNA, 120 bp, Artificial Sequence
  ENSG00000104537_11 (sequence is synthesized)
cttagcaagcatctaggctgcctcttcactttcttttagcatggtaactggatgttttctaaacactaatgaaatcagcagttgatgaaaaaactatgcatttgtaatggcacatttaga

SEQ ID NO: 143200 - DNA, 120 bp, Artificial Sequence
  ENSG00000104537_12 (sequence is synthesized)
aggatatgcatcacacaagtaaggtacaggaaagacaaaattaaacaatttattaattttccttctgtgtgttcaatttgaaagcctcattgttaattaaagttgtggattatgcctcta

SEQ ID NO: 143201 - DNA, 120 bp, Artificial Sequence
  ENSG00000104537_13 (sequence is synthesized)
atgaatcccatgttcatactctcattgaattggcaaaagacgacctttggcaatataagaaggaaatggatcattcttttctaatgagaaacgtgcttcatttttcataactcctgaaag

SEQ ID NO: 143202 - DNA, 120 bp, Artificial Sequence
  ENSG00000104537_14 (sequence is synthesized)
catggttcctttcacggttgagaaatatccatcatctccacacaaccactttatcctccaagttctcttttgttgatgcaatacagtggtaattggatatctggaagtttagcactcttc

SEQ ID NO: 143203 - DNA, 120 bp, Artificial Sequence
  ENSG00000104537_15 (sequence is synthesized)
agaggtctccaactccccaaacaatctgtggacaacctcaaagcagacagtcattttccccaggacacaaaatcttgtttccacataatgaatgttattctgcctctactagaaactcca

SEQ ID NO: 143204 - DNA, 120 bp, Artificial Sequence
  ENSG00000104537_16 (sequence is synthesized)
agttctccagcccaacacagcactcaagggcccctaagaatgagtcaacagagagatgtcacttgggcacgttgccctgccggtataggctgggatgttcacaacaatcttgatgcagac

SEQ ID NO: 143205 - DNA, 120 bp, Artificial Sequence
  ENSG00000104537_17 (sequence is synthesized)
aaagaagcaggaggtgacaacaggtttctcactttgaactgatctcagctcacaccttcctcctagttaccttatctcagcactcatctttcagatttgtcatctgggtttctttgcaaa

SEQ ID NO: 143206 - DNA, 120 bp, Artificial Sequence
  ENSG00000104537_18 (sequence is synthesized)
aaaattaaagaatgtaagacatcatggtccatttctattcttcccttttaagttaccacagcaatttgcccttggtgactggaggccttgctttagtcagcacctgtgtgccgtttacca

SEQ ID NO: 143207 - DNA, 120 bp, Artificial Sequence
  ENSG00000104537_19 (sequence is synthesized)
ccagaggcttggccttctccacactttttaaagagacccgttgacagaatcgttacaaccattcagccagggttgtggacccttggcacattcgtccttggcactgctgacatttgggac

SEQ ID NO: 143208 - DNA, 120 bp, Artificial Sequence
  ENSG00000104537_20 (sequence is synthesized)
caggctaaagcgagcagtcctcagggttttgatgtggatcgagatgccaaaaagctgaacaaagcctgcaaaggaatgggtatgagagatattttgttgctaatttgcttctgaagttga

SEQ ID NO: 143209 - DNA, 120 bp, Artificial Sequence
  ENSG00000104537_21 (sequence is synthesized)
tgacatctcactatcttgtgtattccgagctaacgcaagtcaatcacttccactaacctctttattaaagttcgcaaaattacagtaggatcctattacttttcaggattctatataaca

SEQ ID NO: 143210 - DNA, 120 bp, Artificial Sequence
  ENSG00000104537_22 (sequence is synthesized)
ttctatataacagctaggagttggatattgtgacgtttaatttgaacttgaggtgagagaaacttcatgagaagtgcagttcatgcaatcctggtgtattagtctgttctcacactgcta

SEQ ID NO: 143211 - DNA, 86 bp, Artificial Sequence
  ENSG00000104537_23 (sequence is synthesized)
gcatggcagaagacaaaggaagagcagagggacttcttatatggcagcaggaaagagagaatgagaaccaagtgaaaggagtttcc

SEQ ID NO: 143212 - DNA, 120 bp, Artificial Sequence
  ENSG00000104537_24 (sequence is synthesized)
gcaggaaagagagaatgagaaccaagtgaaaggagtttccccttataaaatcatctgatctcgtgagactcattcactaccgtgagaacggtatgggggaaactgcccctgtgagtcaat

SEQ ID NO: 143213 - DNA, 82 bp, Artificial Sequence
  ENSG00000104537_25 (sequence is synthesized)
gggagctacggccaaacctggtatgatctaaacccctctgatcccttccctaggagatggtggggaattgagtctgatgaga

SEQ ID NO: 143214 - DNA, 120 bp, Artificial Sequence
  ENSG00000104537_26 (sequence is synthesized)
tctaaacccctctgatcccttccctaggagatggtggggaattgagtctgatgagagccggattagggacctggaagcagcatgtagaagtagatcggccgggcacagtggctcacgcct

SEQ ID NO: 143215 - DNA, 120 bp, Artificial Sequence
  ENSG00000104537_27 (sequence is synthesized)
atagatagttcaggcaccaagagaactccatggcctcacatagctccagattagcagcctcaaggaaaatctcttctttctctaagtatctgtaagatgtcagggaagaattccagttgg

SEQ ID NO: 143216 - DNA, 120 bp, Artificial Sequence
  ENSG00000104537_28 (sequence is synthesized)
cttgggtcatggacctaccctgtgaataatcatacaaatcagaacttgtccacatactgttgactgcatcctgctacacagcacatttgatgccatgaaggccccgctcagcccccaata

SEQ ID NO: 143217 - DNA, 120 bp, Artificial Sequence
  ENSG00000104549_0 (sequence is synthesized)
gagacgcgtggagcctggcggcgagtgggggcgtgcgacggttactctggttactggggccgcgccgcgctggcgagagccgccgcccgcgagggatgctggtgaggaagccgtcgggag

SEQ ID NO: 143218 - DNA, 120 bp, Artificial Sequence
  ENSG00000104549_1 (sequence is synthesized)
ccgccgccgccatctgagggaggtaccctggaaaccaccttttatcggtggggaagtgcagtcgcggtgggcggctctgggggccagcgaaacgggaggcctctaaatctttaggttggg

SEQ ID NO: 143219 - DNA, 120 bp, Artificial Sequence
  ENSG00000104549_2 (sequence is synthesized)
gctgcattgccctggagccgcactcttgagtccgaggccatcttttgttggagaaggcgtcggcgttggcgttttcccgaggttgggctgtacagtgtctccgtccgcggaaaaagaagc

SEQ ID NO: 143220 - DNA, 120 bp, Artificial Sequence
  ENSG00000104549_3 (sequence is synthesized)
ctctgaacccgcgccggcccgcagcccccgtgccttccggccgctgctcgccgtcgccagaggctaggccacgtttcccccagtgccgaggtgtttctgtgaccctccctccactcccat

SEQ ID NO: 143221 - DNA, 120 bp, Artificial Sequence
  ENSG00000104549_4 (sequence is synthesized)
tcccttctgaaagggcacctgctcttggtgagaaaagaaattatagcacgaagagccagtatcagaagagtatccatcacccgcagcaaccgctcagggaacaccatcaaaaaagaaaaa

SEQ ID NO: 143222 - DNA, 120 bp, Artificial Sequence
  ENSG00000104549_5 (sequence is synthesized)
aagggaatatctggatttcctgggcgaggaggagcgagtctgctcgggagctgttccagcaggcgatttttaaatactgctttctacgccctatacaacttggcttcacatacttttaca

SEQ ID NO: 143223 - DNA, 120 bp, Artificial Sequence
  ENSG00000104549_6 (sequence is synthesized)
ctaactttatatgatttttaaaaactggtctgatcggacttctcgtcctgggacactgtttactggagtctggccggctctccgtgctcctcttggtacctcattttggggagaacctta

SEQ ID NO: 143224 - DNA, 120 bp, Artificial Sequence
  ENSG00000104549_7 (sequence is synthesized)
aacccactcgagcagataatctccgccttgaccggtgccaccaaagaagccttggaaccatgtggacttttctgggcattgccactttcacctatttttataagaagttcggggacttca

SEQ ID NO: 143225 - DNA, 120 bp, Artificial Sequence
  ENSG00000104549_8 (sequence is synthesized)
tcactttggccaacagggaggtcctgttgtgcgtgctggtgttcctctcgctgggcctggtgctctcctaccgctgtcgccaccgaaacgggggtctcctcgggcgccagcagagcggct

SEQ ID NO: 143226 - DNA, 120 bp, Artificial Sequence
  ENSG00000104549_9 (sequence is synthesized)
cccagttcgccctcttctcggatattctctcaggcctgcctttcattggcttcttctgggccaaatccccccctgaatcagaaaataaggagcagctcgaggccaggaggcgcagaaaag

SEQ ID NO: 143227 - DNA, 120 bp, Artificial Sequence
  ENSG00000104549_10 (sequence is synthesized)
gaaccaatatttcagaaacaagcttaataggaacagctgcctgtacatcaacatcttctcagaatgacccagaagttatcatcgtgggagctggcgtgcttggctctgctttggcagctg

SEQ ID NO: 143228 - DNA, 120 bp, Artificial Sequence
  ENSG00000104549_11 (sequence is synthesized)
tgctttccagagatggaagaaaggtgacagtcattgagagagacttaaaagagcctgacagaatagttggagaattcctgcagccgggtggttatcatgttctcaaagaccttggtcttg

SEQ ID NO: 143229 - DNA, 120 bp, Artificial Sequence
  ENSG00000104549_12 (sequence is synthesized)
tccttaccctctgtcagaaaacaatcaagtgcagagtggaagagctttccatcacggaagattcatcatgagtctccggaaagcagctatggcagagcccaatgcaaagtttattgaagg

SEQ ID NO: 143230 - DNA, 120 bp, Artificial Sequence
  ENSG00000104549_13 (sequence is synthesized)
tgttgtgttacagttattagaggaagatgatgttgtgatgggagttcagtacaaggataaagagactggagatatcaaggaactccatgctccactgactgttgttgcagatgggctttt

SEQ ID NO: 143231 - DNA, 120 bp, Artificial Sequence
  ENSG00000104549_14 (sequence is synthesized)
ctccaagttcaggaaaagcctggtctccaataaagtttctgtatcatctcattttgttggctttcttatgaagaatgcaccacagtttaaagcaaatcatgctgaacttattttagctaa

SEQ ID NO: 143232 - DNA, 120 bp, Artificial Sequence
  ENSG00000104549_15 (sequence is synthesized)
cccgagtccagttctcatctaccagatttcatccagtgaaactcgagtacttgttgacattagaggagaaatgccaaggaatttaagagaatacatggttgaaaaaatttacccacaaat

SEQ ID NO: 143233 - DNA, 120 bp, Artificial Sequence
  ENSG00000104549_16 (sequence is synthesized)
acctgatcacctgaaagaaccattcttagaagccactgacaattctcatctgaggtccatgccagcaagcttccttcctccttcatcagtgaagaaacgaggtgttcttcttttgggaga

SEQ ID NO: 143234 - DNA, 120 bp, Artificial Sequence
  ENSG00000104549_17 (sequence is synthesized)
cgcatataatatgaggcatccacttactggtggaggaatgactgttgcttttaaagatataaaactatggagaaaactgctaaagggtatccctgacctttatgatgatgcagctatttt

SEQ ID NO: 143235 - DNA, 120 bp, Artificial Sequence
  ENSG00000104549_18 (sequence is synthesized)
cgaggccaaaaaatcattttactgggcaagaaaaacatctcattcctttgtcgtgaatatccttgctcaggctctttatgaattattttctgccacagatgattccctgcatcaactaag

SEQ ID NO: 143236 - DNA, 120 bp, Artificial Sequence
  ENSG00000104549_19 (sequence is synthesized)
aaaagcctgttttctttatttcaaacttggtggcgaatgtgttgcgggtcctgttgggctgctttctgtattgtctcctaaccctctagttttaattggacacttctttgctgttgcaat

SEQ ID NO: 143237 - DNA, 120 bp, Artificial Sequence
  ENSG00000104549_20 (sequence is synthesized)
ctatgccgtgtatttttgctttaagtcagaaccttggattacaaaacctcgagcccttctcagtagtggtgctgtattgtacaaagcgtgttctgtaatatttcctctaatttactcaga

SEQ ID NO: 143238 - DNA, 120 bp, Artificial Sequence
  ENSG00000104549_21 (sequence is synthesized)
aatgaagtatatggttcattaagcttaaaggggaaccatttgtgaatgaatatttggaacttaccaagtcctaagagacttttggaagaggatatatatagcatagtaccataccactta

SEQ ID NO: 143239 - DNA, 120 bp, Artificial Sequence
  ENSG00000104549_22 (sequence is synthesized)
taaagtggaaactcttggaccaagatttggattaatttgtttttgaagttttttgtatataaatatgtaaatacatgctttaatttgcaatttaaaatgaaggggttaaataagttagac

SEQ ID NO: 143240 - DNA, 120 bp, Artificial Sequence
  ENSG00000104549_23 (sequence is synthesized)
atttaaaagaaatgattgttaccataaattagtgctaatgctgaggagaactacagtttttcttttgaatttagtatttgagatgagttgttgggacatgcaaataaaatgaagaatgaa

SEQ ID NO: 143241 - DNA, 120 bp, Artificial Sequence
  ENSG00000104549_24 (sequence is synthesized)
ggttactctggttactggggccgcgccgcgctggcgagagccgccgcccgcgagggatgctggtgaggaagccgtcgggagccgccgccgccatctgagggagcattggttgagcctcag

SEQ ID NO: 143242 - DNA, 120 bp, Artificial Sequence
  ENSG00000104549_25 (sequence is synthesized)
atggaggttggatatttgattatgaaagatggaacgaaatgttagaatttcattttgaaggagaagaacaaccactttccatgatgaaaaagtttttaaaaagttcttgggtaaggattg

SEQ ID NO: 143243 - DNA, 120 bp, Artificial Sequence
  ENSG00000104549_26 (sequence is synthesized)
atcacactgggaattgtatgacagttcattttctatataagtagcacagaaatttaaagcttgtttggaagtatctcagagatgagctgatcaaaccatttcatttttatagatgaagaa

SEQ ID NO: 143244 - DNA, 120 bp, Artificial Sequence
  ENSG00000104549_27 (sequence is synthesized)
attgaagctcagagaggtagggctggcctcgaattccttttctagtgtacataccctcctgctgtttgtgaattggtagtgtatttcatctgattattacaagaatatattgattataat

SEQ ID NO: 143245 - DNA, 120 bp, Artificial Sequence
  ENSG00000104549_28 (sequence is synthesized)
acattaaatattaaatatgacagtagtctgttaacatttggaagaaaggtaggtggttttctccctgtttcatttcatctgaatttgcctcattgttttttcattcagttgtatgtatgt

SEQ ID NO: 143246 - DNA, 120 bp, Artificial Sequence
  ENSG00000104549_29 (sequence is synthesized)
tagattccttagtcattccttggcattaacagctaagtgcttaatgaataattttattaatgaaataattagttcttgatttatcacaagggatatatgtaacaaccataacagatgtat

SEQ ID NO: 143247 - DNA, 120 bp, Artificial Sequence
  ENSG00000104549_30 (sequence is synthesized)
attttcacatttttcttattattagcttacatcagtaatctttatacattgagttatcctttttgttttgtctcaagggatgctctaaaataaaatcttcattacctctcttcataggtg

SEQ ID NO: 143248 - DNA, 120 bp, Artificial Sequence
  ENSG00000104549_31 (sequence is synthesized)
attactcaattgcagatttttagcgtaggaaaggaataaacaagttagtgatttgtccagaaataaaaatgttacctgagtttgctaactcccaagttggtagttttttaaaattccatt

SEQ ID NO: 143249 - DNA, 120 bp, Artificial Sequence
  ENSG00000104549_32 (sequence is synthesized)
ttgagcaatagttgtagttttagttttagtttggaaggtagtggaatttccttagacaacattaatagcaatgcctcagtaacatattcattattttgaattcctctggtgcagactaga

SEQ ID NO: 143250 - DNA, 120 bp, Artificial Sequence
  ENSG00000104549_33 (sequence is synthesized)
tcatgcttgtcctcacacacacaagactgtgatggaaggtgtttttggccatgtattaaaaggcaatgtagtctttttcttcctaacactagtttcaatttctttttaaagtagtatttt

SEQ ID NO: 143251 - DNA, 120 bp, Artificial Sequence
  ENSG00000104611_0 (sequence is synthesized)
gtatttgctcagcccgcctgcgccgcttgggacgcctctgcctttccctccctcccttccccgacggcttctggcggccaagtggatgtggcgggtgatcgagccaccctgcccaggggc

SEQ ID NO: 143252 - DNA, 120 bp, Artificial Sequence
  ENSG00000104611_1 (sequence is synthesized)
gcccagcactggttcagtgaacagcattttggacaggacatttggtgccaggtctgagtagccagtttgctgaattattgtcccagtcagccaggattgtgagctgtttgggaagtttcg

SEQ ID NO: 143253 - DNA, 120 bp, Artificial Sequence
  ENSG00000104611_2 (sequence is synthesized)
tggaaacgcccaagtgccagcacaggtggagggacacctggaggccagtttcaggaacttttgccacaagtataaaagacttcagaagtgcaaagatgctgaaacagatactgtcggaga

SEQ ID NO: 143254 - DNA, 120 bp, Artificial Sequence
  ENSG00000104611_3 (sequence is synthesized)
tgtacatagatcctgatctactggcagagctcagcgaagaacagaaacagatcctgttcttcaagatgagagaggaacagatccgacgatggaaagaaagagaagcagctatggaaagaa

SEQ ID NO: 143255 - DNA, 120 bp, Artificial Sequence
  ENSG00000104611_4 (sequence is synthesized)
aggagtccctgccagtgaaacccagaccaaagaaagagaatggcaaatcggttcattggaaacttggagctgataaggaagtctgggtatgggtgatgggcgaacaccatctagataaac

SEQ ID NO: 143256 - DNA, 120 bp, Artificial Sequence
  ENSG00000104611_5 (sequence is synthesized)
cctatgatgtgctctgtaatgaaattattgctgagagggcccggctgaaagcagaacaggaggcagaagagcccagaaaaactcactctgaagaattcaccaatagcttgaaaacaaaat

SEQ ID NO: 143257 - DNA, 120 bp, Artificial Sequence
  ENSG00000104611_6 (sequence is synthesized)
cacagtaccatgatctgcaggctccggataaccagcagactaaagacatctggaagaaagtggcagaaaaggaggaactggagcaaggatcgaggccagcaccaaccctggaagaagaga

SEQ ID NO: 143258 - DNA, 120 bp, Artificial Sequence
  ENSG00000104611_7 (sequence is synthesized)
aaatccgatcactctccagttcttcaagaaatattcaacaaatgttggcagattcaatcaatcgtatgaaggcatatgcatttcaccagaagaaagaatctatgaagaaaaaacaagatg

SEQ ID NO: 143259 - DNA, 120 bp, Artificial Sequence
  ENSG00000104611_8 (sequence is synthesized)
aagaaataaatcaaatagaagaagagagaacgaagcagatttgtaagagctggaaagaagactcggaatggcaggcatctctgcgaaaatccaaagcagctgatgagaagagacgctcct

SEQ ID NO: 143260 - DNA, 120 bp, Artificial Sequence
  ENSG00000104611_9 (sequence is synthesized)
tggctaaacaagcacgagaagactacaagaggttatccctcggggcccagaaaggaagaggcggtgagaggctgcaaagccccttgcgtgttccgcagaaaccagaaagacctccccttc

SEQ ID NO: 143261 - DNA, 120 bp, Artificial Sequence
  ENSG00000104611_10 (sequence is synthesized)
cacccaagcctcagttcctaaactcaggggcatatcctcaaaaacctcttagaaatcagggagtggtgaggacactgtccagctctgcccaagaggacatcatccggtggtttaaagagg

SEQ ID NO: 143262 - DNA, 120 bp, Artificial Sequence
  ENSG00000104611_11 (sequence is synthesized)
agcagctaccacttcgagcgggctaccagaaaacctcagacaccatagccccctggttccatggaattctcacactcaagaaagcaaatgaacttcttctgagcacaggcatgcccggca

SEQ ID NO: 143263 - DNA, 120 bp, Artificial Sequence
  ENSG00000104611_12 (sequence is synthesized)
gttttctcatccgagtcagtgaaaggatcaaaggctatgccctgtcctatctgtcggaggacggctgtaaacatttcctcatcgatgcctctgcagacgcctacagcttcctgggcgtgg

SEQ ID NO: 143264 - DNA, 120 bp, Artificial Sequence
  ENSG00000104611_13 (sequence is synthesized)
aatatcacaaggaggaacccatcacttccctggggaaggagctccttctctatccctgtggtcagcaggaccagctgcctgactacctggagctgtttgagtgacagcctccatcagggt

SEQ ID NO: 143265 - DNA, 120 bp, Artificial Sequence
  ENSG00000104611_14 (sequence is synthesized)
catcctacagcctccaagcgggctttcccctggacaaatgccactgcaacatttatgtgtgaagccaaaatcaccctgcagcagagccaatactgatcaactgaaagtaaagtatccatg

SEQ ID NO: 143266 - DNA, 120 bp, Artificial Sequence
  ENSG00000104611_15 (sequence is synthesized)
gagtcctcattgacacctcttttctgcacaaatactggaattcaatgtcaagagaaaatgacctctgctcaaaagggagaagagtctcaatttcagcaagtacctgtcatgaagggtatg

SEQ ID NO: 143267 - DNA, 120 bp, Artificial Sequence
  ENSG00000104611_16 (sequence is synthesized)
accttaatgatgtacataaaataaaacaaatgaagaaatggaaaacttttagaaattaaggtgtacttgaaaacgaatatctatcatatgacccctgcactccctctgtatcatctcagg

SEQ ID NO: 143268 - DNA, 120 bp, Artificial Sequence
  ENSG00000104611_17 (sequence is synthesized)
aggtttcaggggcctgttgacatgaagtttcgaagtttcatgttggctttggaatggtagcaaaagcctttcctggctgagatgatgcttaaaacacacctcacttattgtacatgttgg

SEQ ID NO: 143269 - DNA, 120 bp, Artificial Sequence
  ENSG00000104611_18 (sequence is synthesized)
aaccaggacatgagagacatagaaaaacagaagtcatgaatgtaaattgaatgagaggcttaacatgcatgaaaatacagatggacctgcaggaaagtgagcaaacatcgctgagtttgt

SEQ ID NO: 143270 - DNA, 120 bp, Artificial Sequence
  ENSG00000104611_19 (sequence is synthesized)
tttcttgttcgggagaatggggccggggctggcctggcctcccctggatatactctatagtgcaccaaaaggataaagcatctgtacatgtatttttttattttttatcagaagtgctta

SEQ ID NO: 143271 - DNA, 120 bp, Artificial Sequence
  ENSG00000104611_20 (sequence is synthesized)
gacaagaacagaataagcaggctgtttggatgctacttgtggttgaattgtgttcccccaaaatatatggtgaagtcttaacccccatccccgtgaatgggaccttgtttggaaataggg

SEQ ID NO: 143272 - DNA, 120 bp, Artificial Sequence
  ENSG00000104611_21 (sequence is synthesized)
tctttgcagatatagtcaagatgaggtcacattggattagggtgggccccaaatccaatgactggcatccttaggagaagagagagttttggtaatagacacaaatgcagtgggaagaag

SEQ ID NO: 143273 - DNA, 120 bp, Artificial Sequence
  ENSG00000104611_22 (sequence is synthesized)
accaggggacaagaggcaagttggagtgatgcagccggaagggaagggacaccaaggatctccggccaccagcagaagccagcagagaggcatgggacaggttccccacaagccttagaa

SEQ ID NO: 143274 - DNA, 120 bp, Artificial Sequence
  ENSG00000104611_23 (sequence is synthesized)
ggaagcatggccctgacttcagaattccagactccagaactggaagaataaatgtctgttgttttaagctgcttagttcatgctgagttcatgctgacttgttactatagccccagaaag

SEQ ID NO: 143275 - DNA, 120 bp, Artificial Sequence
  ENSG00000104611_24 (sequence is synthesized)
ctaatacagtcgtttatgtaattacataacctgacacacaagatcgacccattcactgctgcccagtccaccattttcataatgaagtagaaatgggaggtaagaaaaacattccagcca

SEQ ID NO: 143276 - DNA, 120 bp, Artificial Sequence
  ENSG00000104611_25 (sequence is synthesized)
gttctgtttagccctggcacacatatttgtcccgtcaggaatcttatgccctcctggaacccccgcccacctcagtccagtcccagtcaggcgaacggcctctggacagggactgaggtg

SEQ ID NO: 143277 - DNA, 120 bp, Artificial Sequence
  ENSG00000104611_26 (sequence is synthesized)
gctctgagccactggagatcatttttcttggaggatggagattggctagtacctctggcctaactgtgtaggtcaatactcttttacattgccttctaataaaagcagaatgatacagca

SEQ ID NO: 143278 - DNA, 120 bp, Artificial Sequence
  ENSG00000104611_27 (sequence is synthesized)
ctctctcatcccttcttcctcctcttccttttctctccctctcagaaaacccccagtcctgtatgaagagaggaatcctgcagcgaacgctgggcaagccctaatggcctggatcatagg

SEQ ID NO: 143279 - DNA, 120 bp, Artificial Sequence
  ENSG00000104611_28 (sequence is synthesized)
tgttgataatgattgttccttattataagcagacaacaaactgctgagaacctgcgctgctgcccgttgtgcaatgaatgctgagccttctcacctgctctgtgggctgatgagggtttt

SEQ ID NO: 143280 - DNA, 120 bp, Artificial Sequence
  ENSG00000104611_29 (sequence is synthesized)
aatagtgtgtttacatccttcagggagtcagtttgaagcagctaagtactgtgtctgaggaaaaggaatattttttcttactatatgttatacactgtgccagggacttcttaagttatc

SEQ ID NO: 143281 - DNA, 120 bp, Artificial Sequence
  ENSG00000104611_30 (sequence is synthesized)
taatcctcaatataaccctaagaaatatttttttctcatctttcttatggggaaacagcccaagagaggttcatttgttgctcctggagttacacactagctagcaatggtcagtcttac

SEQ ID NO: 143282 - DNA, 79 bp, Artificial Sequence
  ENSG00000104611_31 (sequence is synthesized)
aacagaagaaagaatctatgaagaaaaaacaagatgaagaaataaatcaaatagaagaagagagaacgaagcagatttg

SEQ ID NO: 143283 - DNA, 120 bp, Artificial Sequence
  ENSG00000104611_32 (sequence is synthesized)
aaataaatcaaatagaagaagagagaacgaagcagatttgtaagagctggaaagaagactcggaatggcaggcatctcgtgagtacccagagtgcgaaaatccaaagcagctgatgagaa

SEQ ID NO: 143284 - DNA, 120 bp, Artificial Sequence
  ENSG00000104613_0 (sequence is synthesized)
agacatgcgcagtagcctcccccgcggtggcggcggcggcggcggtggctgccgtggcggctgagagtccagagccggacgttccggccgcttcgggctggcggctggagagcgctcggg

SEQ ID NO: 143285 - DNA, 120 bp, Artificial Sequence
  ENSG00000104613_1 (sequence is synthesized)
tcatgtctgcccagggggactgcgagttcctggtgcagcgagcccgggagttggtgccgcaagacctgtgggcagccaaggcgtggctgatcacggcccgcagcctctacccggcagact

SEQ ID NO: 143286 - DNA, 120 bp, Artificial Sequence
  ENSG00000104613_2 (sequence is synthesized)
ttaacatccagtatgagatgtacaccatcgagcggaatgcagagcggaccgccaccgccgggaggctgctgtacgacatgtttgtgaatttcccagaccagccggtggtgtggagagaaa

SEQ ID NO: 143287 - DNA, 120 bp, Artificial Sequence
  ENSG00000104613_3 (sequence is synthesized)
tcagcattattacatcagcattaaggaacgattcacaggacaaacaaacccaatttttaagaagtttatttgaaactcttcctggtcgggtccagtgtgaaatgttactaaaggtcacgg

SEQ ID NO: 143288 - DNA, 120 bp, Artificial Sequence
  ENSG00000104613_4 (sequence is synthesized)
aacaatgcttcaacacgttagaacgatcagaaatgttgcttctacttttgaggcgcttccctgaaacggtggtgcagcatggggttggccttggggaggcactattagaggctgaaacta

SEQ ID NO: 143289 - DNA, 120 bp, Artificial Sequence
  ENSG00000104613_5 (sequence is synthesized)
ttgaagaacaagaatctccagtgaactgctttagaaaattatttgtttgtgatgtccttcctctaataattaacaaccatgatgttcgattacctgccaatttattgtataagtacttga

SEQ ID NO: 143290 - DNA, 120 bp, Artificial Sequence
  ENSG00000104613_6 (sequence is synthesized)
acaaagcagctgaattttatatcaattatgtcactaggtctactcaaatagaaaatcagcatcaaggcgcccaggatacatctgatttaatgtcacctagcaaacgtagctctcagaagt

SEQ ID NO: 143291 - DNA, 120 bp, Artificial Sequence
  ENSG00000104613_7 (sequence is synthesized)
acataatagaagggctgacggaaaaatcatcccagatcgtggacccttgggagaggttgtttaagattttgaatgttgttggaatgagatgtgaatggcagatggataaaggaagacgaa

SEQ ID NO: 143292 - DNA, 120 bp, Artificial Sequence
  ENSG00000104613_8 (sequence is synthesized)
gctatggagatattttgcatagaatgaaggatctctgcagatacatgaacaactttgatagtgaagcacatgcaaaatataaaaaccaagtggtgtattccaccatgctggtcttcttta

SEQ ID NO: 143293 - DNA, 120 bp, Artificial Sequence
  ENSG00000104613_9 (sequence is synthesized)
agaatgcattccagtatgtcaacagcatacagccatctctcttccaaggtcctaatgccccgagccaagttccactggttcttcttgaagatgtatcgaatgtgtatggtgatgtagaaa

SEQ ID NO: 143294 - DNA, 120 bp, Artificial Sequence
  ENSG00000104613_10 (sequence is synthesized)
ataaagccgaacttgctaactccactgaagtgttagaaagctttaaattggccagggagagctgggagttgctctattccctagaattccttgacaaagaatttacaaggatttgcttgg

SEQ ID NO: 143295 - DNA, 120 bp, Artificial Sequence
  ENSG00000104613_11 (sequence is synthesized)
cctggaagacggatacttggctttggttaagaatcttcctcactgatatgatcatctatcagggtcaatataaaaaggcgatagccagcctgcatcacttagcagctctccagggatcca

SEQ ID NO: 143296 - DNA, 120 bp, Artificial Sequence
  ENSG00000104613_12 (sequence is synthesized)
tttctcagccacagatcacagggcaggggaccctggagcatcagagggcgctcatccagctggcgacgtgccactttgcgctaggggagtacagaatgacatgtgaaaaagtccttgatt

SEQ ID NO: 143297 - DNA, 120 bp, Artificial Sequence
  ENSG00000104613_13 (sequence is synthesized)
tgatgtgctacatggtactccccattcaagatggaggcaaatcccaggaggaaccctcgaaagtaaagcccaaatttagaaaaggttcggatctgaagctcctgccttgtaccagcaagg

SEQ ID NO: 143298 - DNA, 120 bp, Artificial Sequence
  ENSG00000104613_14 (sequence is synthesized)
ctatcatgccatactgcctccatttaatgttagcctgttttaagcttagagctttcacagacaacagagacgacatggcattggggcatgtgattgtgttgcttcagcaagagtggccac

SEQ ID NO: 143299 - DNA, 120 bp, Artificial Sequence
  ENSG00000104613_15 (sequence is synthesized)
ggggcgagaatcttttcctgaaagctgtcaataaaatttgccaacaaggaaatttccaatatgagaattttttcaattacgttacaaatattgatatgctggaggaatttgcctacttga

SEQ ID NO: 143300 - DNA, 120 bp, Artificial Sequence
  ENSG00000104613_16 (sequence is synthesized)
gaactcaggaaggtgggaaaattcatctggaattactacccaatcaaggaatgctgatcaagcaccacactgtaactcgaggcatcaccaaaggcgtgaaggaggactttcgcctggcca

SEQ ID NO: 143301 - DNA, 120 bp, Artificial Sequence
  ENSG00000104613_17 (sequence is synthesized)
tggagcgccaggtctcccgctgtggagagaatctgatggtggttctgcacaggttctgcattaatgagaagatcttgctccttcagactctgacctgagtggagacctttccaccagaca

SEQ ID NO: 143302 - DNA, 120 bp, Artificial Sequence
  ENSG00000104613_18 (sequence is synthesized)
cagctcgggcctgtgtaattgtaggagaagacactcagcagtgattgccatggcacagagccgtggtcattgttgctgttacaaagaagaaaaccatctgagttctaactccttggttgc

SEQ ID NO: 143303 - DNA, 120 bp, Artificial Sequence
  ENSG00000104613_19 (sequence is synthesized)
ttaaaagtagttcccaagagtctgagaagctatttctatttttaagagtcattttttgtaatttttgtaaaacaaaagtaccaatctgttttgtaaataaaaatcatcctaaaatttgaa

SEQ ID NO: 143304 - DNA, 120 bp, Artificial Sequence
  ENSG00000104613_20 (sequence is synthesized)
gtgctacatggtactccccattcaagatggaggcaaatcccaggaggaaccctcgaaagtaaagcccaaatttagaaaagggtcatgagtttcaaccagaaattttcttttttaatgaga

SEQ ID NO: 143305 - DNA, 120 bp, Artificial Sequence
  ENSG00000104613_21 (sequence is synthesized)
tagaattcaataatattttaagacgacatctcagacaagaagagagactgttattccatgcaccttttgttttggatctatcacattatgttcggatctgaagctcctgccttgtaccag

SEQ ID NO: 143306 - DNA, 120 bp, Artificial Sequence
  ENSG00000104613_22 (sequence is synthesized)
tttgcagaagagtttaattattattcttatgttttatccttgttaaaacttctgtttcataatttattctagaaataatatgtgctcattacaaaaattcaaacactacttgttatagag

SEQ ID NO: 143307 - DNA, 120 bp, Artificial Sequence
  ENSG00000104613_23 (sequence is synthesized)
aacaaaaagtgaaagtgcatcctaaactgaaccagagttaagttttgtaggcagtatatctatacatgtatgcataatacataaataaggttttggggggaaggggttacaaaagtgaga

SEQ ID NO: 143308 - DNA, 120 bp, Artificial Sequence
  ENSG00000104613_24 (sequence is synthesized)
agaccatactacctttgccctgcagcatgtttcctttactcactctcatggaccccttcccatatcagtatgtagagatccacttcattccttttcatgcctgtgtagtatttcgtagac

SEQ ID NO: 143309 - DNA, 120 bp, Artificial Sequence
  ENSG00000104613_25 (sequence is synthesized)
ccaccgccgggaggctgctgtacgacatgtgagtgggacgcttgacatcacttttactgcactgaatctctccatgaggttttgtttctctctgcagaagtgggagttgggggaagatct

SEQ ID NO: 143310 - DNA, 120 bp, Artificial Sequence
  ENSG00000104613_26 (sequence is synthesized)
tcaagttcatctatatcttcgatacctaaagcaaacctagtttgtgaatttcccagaccagccggtggtgtggagagaaatcagcattattacatcagcattaaggaacgattcacagga

SEQ ID NO: 143311 - DNA, 120 bp, Artificial Sequence
  ENSG00000104613_27 (sequence is synthesized)
gaacgattcacaggacaaacaaacccaatttttaagaagttggccttggggaggcactattagaggctgaaactattgaagaacaagaatctccagtgaactgctttagaaaattatttg

SEQ ID NO: 143312 - DNA, 120 bp, Artificial Sequence
  ENSG00000104613_28 (sequence is synthesized)
atattggacaataaagaatagttttacatgcctagggcaacatttggtacatgtaatggtaccaccagagcttttctctagacttcttgctgaccagcccagagtaatcaaataagtttc

SEQ ID NO: 143313 - DNA, 120 bp, Artificial Sequence
  ENSG00000104613_29 (sequence is synthesized)
aaggtacagtgacatgttttatgactattttgtaaaaatagctttagaaagccaggcacggtggctcacacttgtaatctcagctactcggaagtcgaggcgggaggatagcttttgagc

SEQ ID NO: 143314 - DNA, 120 bp, Artificial Sequence
  ENSG00000104613_30 (sequence is synthesized)
tgggcaatgtagtgagaccccatctcttaaaaaattttaaaaagaaaagaaaaatagttttaggacccaaggctgaacaatgttttacagttcctaatgagataatactgctgcagggct

SEQ ID NO: 143315 - DNA, 120 bp, Artificial Sequence
  ENSG00000104613_31 (sequence is synthesized)
gataatactgctgcagggcttgccaaattgtataaaaagttaatccctttccaagtttttccttggctctgatttcatgagcagctgtaaatgtctttcttccaaagctctcttcacttc

SEQ ID NO: 143316 - DNA, 120 bp, Artificial Sequence
  ENSG00000104613_32 (sequence is synthesized)
ggaaaattcatctggaattactacccaatcaaggaatgctgatcaagccttctagccctcccatggggttactgcagcaggaattcttacctgtgcttcagcccagcatacagactgctg

SEQ ID NO: 143317 - DNA, 120 bp, Artificial Sequence
  ENSG00000104613_33 (sequence is synthesized)
agtgctaggtatctcctatcttcctaaatcccctgaagtaaatagtatcccactttacagatgacgaaactgagcattttgtgttttagtaacttcccatagccagtgaggtgtcaggtt

SEQ ID NO: 143318 - DNA, 120 bp, Artificial Sequence
  ENSG00000104613_34 (sequence is synthesized)
tcaaaccattcactccattcgttcatactctgcggcttatttcccatgccattttctggcgtctggcccgggttaatcatttccatacctgcttgtgttagtctcctagggttgccataa

SEQ ID NO: 143319 - DNA, 120 bp, Artificial Sequence
  ENSG00000104613_35 (sequence is synthesized)
caaagtactacaaactgggtagcttaaaacaacagaaggactcccacaattctggaagctagaagtctaaaagtcaggtgttggcagaggcactttccctctgaaggttctggggaagaa

SEQ ID NO: 143320 - DNA, 120 bp, Artificial Sequence
  ENSG00000104613_36 (sequence is synthesized)
tctttctttacctctccctggcttctgatggttgtcagcaatctttggcattccctggcaggcagcttcatcactcctccaatttctgctccatcaccacatgatcttctttcttttgtg

SEQ ID NO: 143321 - DNA, 120 bp, Artificial Sequence
  ENSG00000104613_37 (sequence is synthesized)
ccacatgatcttctttcttttgtgcctttgtctttacatggccttttttgtcgttgttttttgaggcagagtcttgctccgttgcccaggcagcagtgcagtggcatgatcttggctcac

SEQ ID NO: 143322 - DNA, 120 bp, Artificial Sequence
  ENSG00000104613_38 (sequence is synthesized)
tgagtagctgggattacaggtgtgtgtacatggccatgttataaggacactagtcattggattgagggcctttctaatccaccatgacctcatcttaattaattatatctacaaagatac

SEQ ID NO: 143323 - DNA, 120 bp, Artificial Sequence
  ENSG00000104613_39 (sequence is synthesized)
aattaattatatctacaaagatactttttttaaaaaaaaaggtaagatgtctatgaggtcacattctgaggttctgcggggatatgaatttgggggggcactgttcagcccagcacactt

SEQ ID NO: 143324 - DNA, 120 bp, Artificial Sequence
  ENSG00000104613_40 (sequence is synthesized)
tctggtcataactctgacctttcaccttctgtgtgatgtaatctttcgcacttttccactcctgtggtgcatccctgtgtggtcacaaggaagttgataccagtgtcttggtggatttga

SEQ ID NO: 143325 - DNA, 120 bp, Artificial Sequence
  ENSG00000104613_41 (sequence is synthesized)
gtaagggaccgtctactatgctaaggcattggtaatggaaaggtagccttaaaactctgacttttctgtccattctacaccagactgtatgactggctacacctcagaacttatcttgaa

SEQ ID NO: 143326 - DNA, 120 bp, Artificial Sequence
  ENSG00000104613_42 (sequence is synthesized)
ttctttatttcttagaaaatctctctacctctgtattatcatttgaactccagttccattgcttcctttacatttctatagacattttgttaattcttgttcatcgttaattagaatttg

SEQ ID NO: 143327 - DNA, 120 bp, Artificial Sequence
  ENSG00000104613_43 (sequence is synthesized)
ctaattatgaagagaataaccaagacagagtggtcagatgttcaggtgaatttggccttctagggtgtgtggctggtgcattcttttattttccagtctttaaaatgtgattatttgttt

SEQ ID NO: 143328 - DNA, 120 bp, Artificial Sequence
  ENSG00000104613_44 (sequence is synthesized)
ctcagataagtttgattatgcaaactgtgataagtaaaaaaaataccccattacttcatatagttctgacaacttatgctgtaacacatttaaatgagtaattttgttttgaaataggtt

SEQ ID NO: 143329 - DNA, 120 bp, Artificial Sequence
  ENSG00000104613_45 (sequence is synthesized)
atgcgtaggtatagtttttgggcaaattttgtgacactcaatgcaaaagaggatggtttttcattttatcaaaacatttctgactgggcacaatggctcacatctgtaatcccagtgctt

SEQ ID NO: 143330 - DNA, 76 bp, Artificial Sequence
  ENSG00000104613_46 (sequence is synthesized)
aattagccaggcgaagaaaatcacttgaacccaggacgtggaggctacgatgagccaagatcacaccactgcaatc

SEQ ID NO: 143331 - DNA, 120 bp, Artificial Sequence
  ENSG00000104613_47 (sequence is synthesized)
catctcatgccaagagttatctgtgcgagggagtttagtgggtataagaatcaggttttggcatcagacagatctgggttcaaatatggagtctgcagttagtggggtagcaatgggcaa

SEQ ID NO: 143332 - DNA, 120 bp, Artificial Sequence
  ENSG00000104613_48 (sequence is synthesized)
gttactcaactgccaagaccccatttccttatcagagagaactggcaccttttttagtgggatggcaatgggcaagttactcaactgccgagaccccatttcctcatcagagaaaactag

SEQ ID NO: 143333 - DNA, 120 bp, Artificial Sequence
  ENSG00000104613_49 (sequence is synthesized)
catgtggttaacctgaatctggcctgcagatattgatatgctggaggaatttgcctacttgagaactcaggaaggtgggaaaattcatctggaattactacccaatcaaggaatgctgat

SEQ ID NO: 143334 - DNA, 120 bp, Artificial Sequence
  ENSG00000104613_50 (sequence is synthesized)
caagtaagcatgttctcttttgctcttccatgctgagtgctcaccttttgtgtctttgtatgaagtatttgtaaatgtctatacctatcaaaaatttaatacaaaggactttaaacctgg

SEQ ID NO: 143335 - DNA, 120 bp, Artificial Sequence
  ENSG00000104613_51 (sequence is synthesized)
ctgggactggtgtaccgtgagaagagtggaaagtaaagaggctggctttgaaaatgtgtcttctcaaaggctgcccctactccctattgccattcagctgcattccatcatcctcttcct

SEQ ID NO: 143336 - DNA, 120 bp, Artificial Sequence
  ENSG00000104613_52 (sequence is synthesized)
cactggtcgctttttataccacctcaaaagggggctgagctctgggaccaggaactgagacgcctctggacacgcaccagcagcagcgggtgcagtgagggctggctagcttctccccag

SEQ ID NO: 143337 - DNA, 120 bp, Artificial Sequence
  ENSG00000104613_53 (sequence is synthesized)
tctccttaaacacccagccacggccaggggcttgttgaggttaatgagtttctgtttagtctgcttctagtcttgtgtattttctctggagtgttgtttttgcagtgcagggtgagtcgg

SEQ ID NO: 143338 - DNA, 120 bp, Artificial Sequence
  ENSG00000104613_54 (sequence is synthesized)
tgttgcttcagcaagagtggccacggggcgagaatcttttcctgaaagctgtcaataaaatttgccaacaaggaaatttccaatatgagaattttttcaattacgttacaacctgcagat

SEQ ID NO: 143339 - DNA, 120 bp, Artificial Sequence
  ENSG00000104626_0 (sequence is synthesized)
cctccctcttgttcgtcctccctccccctgtggactgcggcgctggcgttccgcgcacgccggctcactgcgcctgcccggcgtgtggacgccacacgctcccggaagtgggaggtggcc

SEQ ID NO: 143340 - DNA, 120 bp, Artificial Sequence
  ENSG00000104626_1 (sequence is synthesized)
gctggagtttgtgtggccgccgccgcgggaacgcgagcccggtaatttttcaacggagaaaggcgaggctttcgggctctgcagagtgagagttagcaagtgtccggctccagcaactct

SEQ ID NO: 143341 - DNA, 120 bp, Artificial Sequence
  ENSG00000104626_2 (sequence is synthesized)
cctctggcgtgacagccggcatggaggatccacagagtaaagagcctgccggcgaggccgtggctctcgcgctgctggagtcgccgcggccggagggcggggaggagccgccgcgtccca

SEQ ID NO: 143342 - DNA, 120 bp, Artificial Sequence
  ENSG00000104626_3 (sequence is synthesized)
gtcccgaggaaactcaacagtgtaaatttgatggccaggagacaaaaggatccaagttcattacctccagtgcgagtgacttcagtgacccggtttacaaagagattgccattacgaatg

SEQ ID NO: 143343 - DNA, 120 bp, Artificial Sequence
  ENSG00000104626_4 (sequence is synthesized)
gctgtattaatagaatgagtaaggaagaactcagagctaagctttcagaattcaagcttgaaactagaggagtaaaggatgttctaaagaagagactgaaaaactattataagaagcaga

SEQ ID NO: 143344 - DNA, 120 bp, Artificial Sequence
  ENSG00000104626_5 (sequence is synthesized)
agctgatgctgaaagagagcaattttgctgacagttattatgactacatttgtattattgactttgaagccacttgtgaagaaggaaacccacctgagtttgtacatgaaataattgaat

SEQ ID NO: 143345 - DNA, 120 bp, Artificial Sequence
  ENSG00000104626_6 (sequence is synthesized)
ttccggttgttttactgaatacgcatactttagaaatagaagacacgtttcagcagtatgtaagaccagagattaacacacagctgtctgatttctgcatcagtctaactggaattactc

SEQ ID NO: 143346 - DNA, 120 bp, Artificial Sequence
  ENSG00000104626_7 (sequence is synthesized)
aggatcaggtagacagagctgataccttccctcaggtactaaaaaaagtaattgactggatgaaattgaaggaattaggaacaaagtataaatactcacttttaacagatggttcttggg

SEQ ID NO: 143347 - DNA, 120 bp, Artificial Sequence
  ENSG00000104626_8 (sequence is synthesized)
atatgagtaagttcttgaacattcagtgtcaactcagcaggctcaaataccctccttttgcgaaaaagtggatcaatattcggaagtcatatggaaatttttacaaggttcctagaagcc

SEQ ID NO: 143348 - DNA, 120 bp, Artificial Sequence
  ENSG00000104626_9 (sequence is synthesized)
aaaccaaactgacaataatgcttgaaaaattaggaatggattatgatgggcggcctcactgtggtcttgatgactctaagaatatcgcccgaatagcagttcgaatgcttcaggatgggt

SEQ ID NO: 143349 - DNA, 120 bp, Artificial Sequence
  ENSG00000104626_10 (sequence is synthesized)
gtgaactccgaatcaacgagaaaatgcatgcaggacagctaatgagtgtgtcctcttccttaccaatagagggcactccaccaccacaaatgccacattttagaaagtaacaacagtttt

SEQ ID NO: 143350 - DNA, 120 bp, Artificial Sequence
  ENSG00000104626_11 (sequence is synthesized)
gtgtgtggatcattccaattgaagttgctatgaagaggtagcagatgaatctcattgaattagtcctgtagtgcaaactttaagcaccttaaaacatttaaaatcttattacaggtgata

SEQ ID NO: 143351 - DNA, 120 bp, Artificial Sequence
  ENSG00000104626_12 (sequence is synthesized)
gagatagatacatgtatgtgaacagattttgtaggaaggcatactgaattctttgtcaccagcacttttgatatgaacagtattcgttacatagtaacagttcctgcttacaactgaatt

SEQ ID NO: 143352 - DNA, 120 bp, Artificial Sequence
  ENSG00000104626_13 (sequence is synthesized)
ttataatttaaggtgttcaagatatattctttttggttttaaaatgcaaaatcttattggctgttctgttgaatgtcatatcttactggtgtttaaatatgtaatgtgtttctttattaa

SEQ ID NO: 143353 - DNA, 120 bp, Artificial Sequence
  ENSG00000104626_14 (sequence is synthesized)
catcactagatgaaaccatatcttaaaatgcagaaatgattggaaggtagatcttatctagcctttggatttcaagaatatcatagtccttttgattttcaaagtttatatgtgaagttc

SEQ ID NO: 143354 - DNA, 120 bp, Artificial Sequence
  ENSG00000104626_15 (sequence is synthesized)
accatgtatgtggtgaatttcgtaaggtacttggtatacatatctgcctatgtttcttttcaactcataattggaagaattatgatggattatagggtttggttaaaaatccagttactg

SEQ ID NO: 143355 - DNA, 120 bp, Artificial Sequence
  ENSG00000104626_16 (sequence is synthesized)
aaggaattaatgaaaacgtagaagaaagtactaaaaggaatatcataagggctgtagctcaaacttcataatacataaatcactggggtctttttggatttggttgtttgattcgccttc

SEQ ID NO: 143356 - DNA, 120 bp, Artificial Sequence
  ENSG00000104626_17 (sequence is synthesized)
cttttttgacatatgtatgccttaattcttaaatctgagggaccatgctttgaaatagactgaaaattaagggtcaccacctaattttactttgtattcagtatcgtaagtgaggttaat

SEQ ID NO: 143357 - DNA, 120 bp, Artificial Sequence
  ENSG00000104626_18 (sequence is synthesized)
aaagtcaatactttctaccatatattacgtttttgttattaaaaaacttcattggccactagtgaagttagtcaataaaagacttgtttttctgattttacatagtaaatggctgctaag

SEQ ID NO: 143358 - DNA, 120 bp, Artificial Sequence
  ENSG00000104626_19 (sequence is synthesized)
aggtaaaactcttatctagaggctaaacccatgtattttcagaattgaatttttctccttgtagctttcagggaacaatttcattgacattgcttgcttcctgccttttaccttttaata

SEQ ID NO: 143359 - DNA, 120 bp, Artificial Sequence
  ENSG00000104626_20 (sequence is synthesized)
aaaattgtgatgctactttattctaaagatttatattttataaccagatgaatttcctcaaaggtttccaaacctatatcatatagggtgaaaagcaggaaagtagacatttttcttggc

SEQ ID NO: 143360 - DNA, 120 bp, Artificial Sequence
  ENSG00000104626_21 (sequence is synthesized)
gtgggaattctctacatagggcagtagatttcttaagccaatgaatttctgcttttcagcagtagtcatataatcagtatcataaagaataatgtgtaaataacagaaggcatatgagag

SEQ ID NO: 143361 - DNA, 120 bp, Artificial Sequence
  ENSG00000104626_22 (sequence is synthesized)
tgtggtgttcctagatgaactgttacagattatagtaaaataaggaaatctaagtgctttaagtttatacagttaactcttaggataagagggatgtatgctgagatgtttgtgcatccc

SEQ ID NO: 143362 - DNA, 120 bp, Artificial Sequence
  ENSG00000104626_23 (sequence is synthesized)
agatagcactgtacaataacctgtaaagtattactgaatactgaatagctgaaactgcaattggaaaatctgatgatgacgaggaaatattacgtttccagtttttttagctctatctgc

SEQ ID NO: 143363 - DNA, 120 bp, Artificial Sequence
  ENSG00000104626_24 (sequence is synthesized)
taatttctttgcctgttttcactttcgccaagtaccaacaagctcatgttgtatttctttttaagaacttcaacattataagctctcagtaccctattttgttgttgttgttgtttgaga

SEQ ID NO: 143364 - DNA, 60 bp, Artificial Sequence
  ENSG00000104626_25 (sequence is synthesized)
agctctcagtaccctattttgttgttgttgttgtttgagacagagtttttgctcgtctgg

SEQ ID NO: 143365 - DNA, 120 bp, Artificial Sequence
  ENSG00000104626_26 (sequence is synthesized)
agacgtgagccactgcgctcagccatagattttactgtcttaacccattttaattcctctgttgagtctctgtcctcccctccaatttgatttgggattttgctgatgagatgatactaa

SEQ ID NO: 143366 - DNA, 120 bp, Artificial Sequence
  ENSG00000104626_27 (sequence is synthesized)
acattgagagtactgctttttactctgacttttattgtgttgtctttgaaagacaaatagtacaactttttacaaggaaacacgtaagagatggatgtccatgaaaacaatattagtata

SEQ ID NO: 143367 - DNA, 120 bp, Artificial Sequence
  ENSG00000104626_28 (sequence is synthesized)
ttctattattgtttcttattaatagttacttagtatttacaaacaatttattattagctgtgttaacttttattctatgcttcatatgctctgacattgacatagtggatttctgctgat

SEQ ID NO: 143368 - DNA, 120 bp, Artificial Sequence
  ENSG00000104626_29 (sequence is synthesized)
ttttttcaaatccgcaatctttataaccaactgaagtatataatagagcattacattttatctttatttgtgttctgttggatcaagtatttaacatttgctctgaaaaaaatgtttttg

SEQ ID NO: 143369 - DNA, 120 bp, Artificial Sequence
  ENSG00000104626_30 (sequence is synthesized)
tgatgtgtctttgttgccttgagatagatccatttatcctgcctcctagggagaagtttctgcctggattgaaacaaaaaaacacaggcgtcacaagcatgttacctattaagagagaga

SEQ ID NO: 143370 - DNA, 120 bp, Artificial Sequence
  ENSG00000104626_31 (sequence is synthesized)
gggtatctctgaagactaattaaaatggtaatttttaaaaagatgtgaccagttgacttttagtatatcatcccaagtattatccccaaaatgataatgcaaaacagaataatttggaga

SEQ ID NO: 143371 - DNA, 120 bp, Artificial Sequence
  ENSG00000104626_32 (sequence is synthesized)
ccaggagaaaaactggtatgattactggggaggggaagaagcacaggtggtcaagataataatgcatgtttggcctcagctgtagttgccaaagaaactacctgcctcacagatgagcac

SEQ ID NO: 143372 - DNA, 120 bp, Artificial Sequence
  ENSG00000104626_33 (sequence is synthesized)
gcacgggtgcattgtcaaagtctgagaaggatgtattgtactttgaaggaagactttccatttctaagctaccatggagaagtatatgctcctcgagaccagagactgtgacttctgcat

SEQ ID NO: 143373 - DNA, 120 bp, Artificial Sequence
  ENSG00000104626_34 (sequence is synthesized)
ctttgattccagcgacatatgataaaatgttttgcacatagttgaatccagcgttgatacatgaaggacagcattacatcttttttctattatacttagaaatttcctctttgttctgca

SEQ ID NO: 143374 - DNA, 120 bp, Artificial Sequence
  ENSG00000104626_35 (sequence is synthesized)
ccaccaacctgtatatcaagcctccttgccccacaaagcttccaaagcccgtaaatttgttaatctagagcaggggtcagcaaactaccacccatgggccaaatctggctgctgcctatt

SEQ ID NO: 143375 - DNA, 120 bp, Artificial Sequence
  ENSG00000104626_36 (sequence is synthesized)
tttgtatggcctacaaactatggtttttatattcccttttgttaatggctcaaaataatattttgtataatacgaaaattacgaaattttagtttctctaaataaagttttggaaagaac

SEQ ID NO: 143376 - DNA, 120 bp, Artificial Sequence
  ENSG00000104626_37 (sequence is synthesized)
ttgttctttcctggccttgtggagtttcacgttttttattcagttaaagattcaaggtactcctaagcagatttctgaagctctttttccatgtaattccctcctctccagaattctgcc

SEQ ID NO: 143377 - DNA, 120 bp, Artificial Sequence
  ENSG00000104626_38 (sequence is synthesized)
ctacaaattccaaccgacttggcctaccccaatttcgtcaactccaatctctgtcttttcaacccaggagatcctaggtttccatatgatttcctttcatcgcaccacagactggaaatc

SEQ ID NO: 143378 - DNA, 120 bp, Artificial Sequence
  ENSG00000104626_39 (sequence is synthesized)
gcctctgggcaaaagggcaggatgatatacggctccttttatttcttttctctcaggaaacactgacgggaacacacgtgccggtgctaccctccagtgactggactagatccttgcgca

SEQ ID NO: 143379 - DNA, 63 bp, Artificial Sequence
  ENSG00000104626_40 (sequence is synthesized)
cggagagataacctagtcattcagaggccgcaggcttccgaggcaatccggcagtgtcagtct

SEQ ID NO: 143380 - DNA, 120 bp, Artificial Sequence
  ENSG00000104626_41 (sequence is synthesized)
actgtgagtggaattgctgagtcatgtggcaaactaccagttctgttgaacctcagggccatcattctgttcatgtcagctcgttgtagaaccacatcgatgaagaccaagatggtaaag

SEQ ID NO: 143381 - DNA, 120 bp, Artificial Sequence
  ENSG00000104626_42 (sequence is synthesized)
atgaaaaattgtagctaacatttactgcacatttactacaagccaagcattgcactatgaagtttaagtgcattattcattaaccccttcaataaaatttgtaattttcatttcagaagc

SEQ ID NO: 143382 - DNA, 120 bp, Artificial Sequence
  ENSG00000104626_43 (sequence is synthesized)
gaaggtctcgttaaggatctctgtatgttccttttgccctgtgtgcacttcctttggatccttgcaattatctttctccttctaaggttgttatttcaaagagtacttgcacatcccttc

SEQ ID NO: 143383 - DNA, 120 bp, Artificial Sequence
  ENSG00000104626_44 (sequence is synthesized)
tcttgtaaagaaccactcttccacctgcctccctcttcagcctgagatacgttgtcaatctcatcctgaaactcaacagtgtaaatttgatggccaggagacaaaaggatccaagttcat

SEQ ID NO: 143384 - DNA, 120 bp, Artificial Sequence
  ENSG00000104626_45 (sequence is synthesized)
ttttacaagagaaagaggaaaggaccaggagtggcgaccggcaaaccacagcttgtgtgggaaggaaatttgacatgtgatgcaagcggacgtttgtgtaaactgctgggagattaacaa

SEQ ID NO: 143385 - DNA, 120 bp, Artificial Sequence
  ENSG00000104626_46 (sequence is synthesized)
ggctccagagggagggagtcctgtggatgtggaagatacgcttttgtctgagagtcatgagattggactgtgggtccctgttgttgttaacccctgtgtgatcttgggcaattcactgtt

SEQ ID NO: 143386 - DNA, 120 bp, Artificial Sequence
  ENSG00000104626_47 (sequence is synthesized)
cctgtctttacctctacttgctcctcagtaagtcagagtgaactgagatctcttcctgaaattacttagcctaattctatggttggtttctggtggccaggaaccagaaataaatctctc

SEQ ID NO: 143387 - DNA, 120 bp, Artificial Sequence
  ENSG00000104626_48 (sequence is synthesized)
agcaaaattttgcttatggaccatgaatcttagagtatccatggtatcactgatatctttaattcccagatattttccagtaatgaaattcatataataaagccaggatctctggttctt

SEQ ID NO: 143388 - DNA, 120 bp, Artificial Sequence
  ENSG00000104635_0 (sequence is synthesized)
atatagccgggcatgcgcgcggtgccggggcccggacgcagtgaggggggtcggcgcgcgtgtctacgcggacgcaccggctaagctgcttctgccgccgccggccgcctgggaccttgc

SEQ ID NO: 143389 - DNA, 120 bp, Artificial Sequence
  ENSG00000104635_1 (sequence is synthesized)
ggtgaggctgcgcggggccgaggccgcctccgagcgccaggtttattcagtcaccatgaagctgctgctgctgcacccggccttccagagctgcctcctgctgaccctgcttggcttatg

SEQ ID NO: 143390 - DNA, 120 bp, Artificial Sequence
  ENSG00000104635_2 (sequence is synthesized)
gagaaccacccctgaggctcacgcttcatccctgggtgcaccagctatcagcgctgcctccttcctgcaggatctaatacatcggtatggcgagggtgacagcctcactctgcagcagct

SEQ ID NO: 143391 - DNA, 120 bp, Artificial Sequence
  ENSG00000104635_3 (sequence is synthesized)
gaaggccctactcaaccacctggatgtgggagtgggccggggtaatgtcacccagcacgtgcaaggacacaggaacctctccacgtgctttagttctggagacctcttcactgcccacaa

SEQ ID NO: 143392 - DNA, 120 bp, Artificial Sequence
  ENSG00000104635_4 (sequence is synthesized)
tttcagcgagcagtcgcggattgggagcagcgagctccaggagttctgccccaccatcctccagcagctggattcccgggcctgcacctcggagaaccaggaaaacgaggagaatgagca

SEQ ID NO: 143393 - DNA, 120 bp, Artificial Sequence
  ENSG00000104635_5 (sequence is synthesized)
gacggaggaggggcggccaagcgctgttgaagtgtggggctttggttttctcagtgtctcactgattaacctggcctctctcctgggagtcctcgtcctgccctgcacagagaaagcgtt

SEQ ID NO: 143394 - DNA, 120 bp, Artificial Sequence
  ENSG00000104635_6 (sequence is synthesized)
tttcagccgtgtgctcacttacttcatcgccctgtccattggaacgctgctgtctaacgcgctattccagctcatcccagaggcatttggtttcaaccctctggaagattattatgtctc

SEQ ID NO: 143395 - DNA, 120 bp, Artificial Sequence
  ENSG00000104635_7 (sequence is synthesized)
caagtctgcagtggtgtttgggggcttttatcttttctttttcacagagaagatcttgaagattcttcttaagcagaaaaatgagcatcatcatggacacagccattatgcctctgagtc

SEQ ID NO: 143396 - DNA, 120 bp, Artificial Sequence
  ENSG00000104635_8 (sequence is synthesized)
gcttccctccaagaaggaccaggaggagggggtgatggagaagctgcagaacggggacctggaccacatgattcctcagcactgcagcagtgagctggacggcaaggcgcccatggtgga

SEQ ID NO: 143397 - DNA, 120 bp, Artificial Sequence
  ENSG00000104635_9 (sequence is synthesized)
cgagaaggtcattgtgggctcgctctctgtgcaggacctgcaggcttcccagagtgcttgctactggctgaaaggtgtccgctactctgatatcggcactctggcctggatgatcactct

SEQ ID NO: 143398 - DNA, 120 bp, Artificial Sequence
  ENSG00000104635_10 (sequence is synthesized)
gagcgacggcctccataatttcatcgatggcctggccatcggtgcttccttcactgtgtcagttttccaaggcatcagcacctcggtggccatcctctgtgaggagttcccacatgagct

SEQ ID NO: 143399 - DNA, 120 bp, Artificial Sequence
  ENSG00000104635_11 (sequence is synthesized)
aggagactttgtcatcctgctcaacgctgggatgagcatccaacaagctctcttcttcaacttcctttctgcctgctgctgctacctgggtctggcctttggcatcctggccggcagcca

SEQ ID NO: 143400 - DNA, 120 bp, Artificial Sequence
  ENSG00000104635_12 (sequence is synthesized)
cttctctgccaactggatttttgcgctagctggaggaatgttcttgtatatttctctggctgatatgttccctgagatgaatgaggtctgtcaagaggatgaaaggaagggcagcatctt

SEQ ID NO: 143401 - DNA, 120 bp, Artificial Sequence
  ENSG00000104635_13 (sequence is synthesized)
gattccatttatcatccagaacctgggcctcctgactggattcaccatcatggtggtcctcaccatgtattcaggacagatccagattgggtagggctctgccaagagcctgtgggactg

SEQ ID NO: 143402 - DNA, 120 bp, Artificial Sequence
  ENSG00000104635_14 (sequence is synthesized)
gaagtcgggccctgggctgcccgatcgccagcccgaggacttaccatccacaatgcaccacggaagaggccgttctatgaaaaactgacacagactgtattcctgcattcaaatgtcagc

SEQ ID NO: 143403 - DNA, 120 bp, Artificial Sequence
  ENSG00000104635_15 (sequence is synthesized)
cgtttgtaaaatgctgtatcctaggaataagctgccctggtaaccagtctctagctagtgcctcttgccctctcctcacctccttttctctcagtgactctggaacctgaatgcagctta

SEQ ID NO: 143404 - DNA, 120 bp, Artificial Sequence
  ENSG00000104635_16 (sequence is synthesized)
caagacaagcctgacttttttctctgattaccttggcctcctcttggaaccagtgctgaaaggttttgaatcctttacccaacaatgcaaaaatagagccaatggttataacttggctag

SEQ ID NO: 143405 - DNA, 120 bp, Artificial Sequence
  ENSG00000104635_17 (sequence is synthesized)
aaatatcaagagttgaatccatagtgtggggcccatgactctagctgggcaccttggacctccagctggccaatagaagagacaggagacaggaagccttcccattttttcaaagtctgt

SEQ ID NO: 143406 - DNA, 120 bp, Artificial Sequence
  ENSG00000104635_18 (sequence is synthesized)
ttaattgcctattacttctctcaaagagaacctgaagtcagaacacatgagcagggtgagaggtgaggcaaggttcatcctgaatgggagaggaagtcgaaccactgctgtgtgtcttgt

SEQ ID NO: 143407 - DNA, 120 bp, Artificial Sequence
  ENSG00000104635_19 (sequence is synthesized)
ctaacgtggcggtgtggctgcctggacctcctctttcaggttaacgctgacagaatggaggctcaggctgtctgcaagaaaacagttggtttggctgtgattttgacctcctcttcccca

SEQ ID NO: 143408 - DNA, 120 bp, Artificial Sequence
  ENSG00000104635_20 (sequence is synthesized)
ctgccatcttctaagagactttgtagctgcctcctagaagcacattctgagcacatttgagacctctgtgttagaggggagactgcacaaactatcctcccccaggttgagacgtctgca

SEQ ID NO: 143409 - DNA, 120 bp, Artificial Sequence
  ENSG00000104635_21 (sequence is synthesized)
gagtggcaagctgacttgtagaaatggggtgccatttatgctctacttagacaagggtaatcagaaatggaatcagtgcaggcaaaatttaggatttgccgcttccataaatcaaagcat

SEQ ID NO: 143410 - DNA, 120 bp, Artificial Sequence
  ENSG00000104635_22 (sequence is synthesized)
gactaatagggggtctctgaaatgtaagggcacaaacttcacttagggcatcgcagatgtttgcagaatggttggcctaatgattatgctacagatgggttttaaatgacccgtctaggt

SEQ ID NO: 143411 - DNA, 120 bp, Artificial Sequence
  ENSG00000104635_23 (sequence is synthesized)
tactgcttccttgcaaaaaaagtcgaatcctgcattgaattgaatatgaatttctctaactctctccagaaaatggatggagataacttgtctttaaaactgtaggccagccttagccac

SEQ ID NO: 143412 - DNA, 120 bp, Artificial Sequence
  ENSG00000104635_24 (sequence is synthesized)
tgtggagcccttgcctccgagctctggcttcaaggggagctcttctccaggttcactaggtgaattgatttattattatcatattgataatgtgagattctttagccactttggggagcc

SEQ ID NO: 143413 - DNA, 120 bp, Artificial Sequence
  ENSG00000104635_25 (sequence is synthesized)
tgtctctccagaagcctttcttagtggtgcccacagttggagcccaggggccatgtttgcaaactgattcatgtgcatggctgacaggagtactggttcactaccaatgcctgagctttt

SEQ ID NO: 143414 - DNA, 120 bp, Artificial Sequence
  ENSG00000104635_26 (sequence is synthesized)
ctcttacatagaaaaactgtccgctctcagtaatcacaagcagcatccgttttgttttctcttcttgggagacatctgtcaaaccaggaatattcttgaaaagaacgtgagcaggaaaaa

SEQ ID NO: 143415 - DNA, 120 bp, Artificial Sequence
  ENSG00000104635_27 (sequence is synthesized)
ctgctggtgatactttttttaagttttgtttttatcttgcctgttggcttcaatacatttgagaatacgctgaagagggaaaatttcagtgatggagattctagattaaatatcaggact

SEQ ID NO: 143416 - DNA, 120 bp, Artificial Sequence
  ENSG00000104635_28 (sequence is synthesized)
gatttcctggtgggattatggtccagttttaccaaagaaccaattccttgaatgttggaatctaactttttatattgtcattattattgttgtttttaaacggttctttgtcttttctgt

SEQ ID NO: 143417 - DNA, 120 bp, Artificial Sequence
  ENSG00000104635_29 (sequence is synthesized)
tttatttttctcaagctgctttcaggagctagcagaaaataactcaaagttgaagactctggaagattttgctttaacctaactcgcattgatgtattaaatttataattttagcattcc

SEQ ID NO: 143418 - DNA, 120 bp, Artificial Sequence
  ENSG00000104635_30 (sequence is synthesized)
caatagatcctatcattccttaaacataataccctttgtcttggagtagaatactaagttagagttagtggatttctagtttaggagaggagctcaaaactataatctttaacaaattga

SEQ ID NO: 143419 - DNA, 120 bp, Artificial Sequence
  ENSG00000104635_31 (sequence is synthesized)
aaaatgaaatagggtgttttccctttttgtgcacacctatattaccttaagaaatttccttccatagacagctgcctcaaagggaaatcctctttaaaccgtagttggcgcagaggtcag

SEQ ID NO: 143420 - DNA, 120 bp, Artificial Sequence
  ENSG00000104635_32 (sequence is synthesized)
tcctagtcggagcttaggaggggcggagacgctcacatcgtctgacttgagtcgccactgattgtggcaacagctttgcctcatgagtcaaaaattggcaatttcttttgatttttagtt

SEQ ID NO: 143421 - DNA, 120 bp, Artificial Sequence
  ENSG00000104635_33 (sequence is synthesized)
gttgaatttgctgtttcaagcatttgtacatattagaagtctaaggagtagcaagtcagtgggaggactttttcacccctggcattagcagcttcgacctcattttccagatgcaccagc

SEQ ID NO: 143422 - DNA, 120 bp, Artificial Sequence
  ENSG00000104635_34 (sequence is synthesized)
tcctattaataagttagcaaggaaagtgtatgtcacgtgcaggaacagtgaggcagggacaggggttctgctccttctcacttcaccaccggcacacagcttgcccctgtctttgccccc

SEQ ID NO: 143423 - DNA, 120 bp, Artificial Sequence
  ENSG00000104635_35 (sequence is synthesized)
aaaggtattttgtgtctagtgtcaaattggagctattcttcactggtccttaaccttgggttttaaaaagaaggcttctctgtttgggtagcgtaagagctgagtatagtaagtcctctt

SEQ ID NO: 143424 - DNA, 120 bp, Artificial Sequence
  ENSG00000104635_36 (sequence is synthesized)
ccaaagagatggcaatatgctgggcatctactttaaaacaaagttgtctgatttttgcaagagaggttaggattttattgttcttatttccctttacagttctgcagttccatcacagta

SEQ ID NO: 143425 - DNA, 120 bp, Artificial Sequence
  ENSG00000104635_37 (sequence is synthesized)
tttttttaaataactcaggtgtatgagaagaaattagaaaagaaaattaacttatgtggactgtaaatgttttatttgtaagattctataaataaagctatattctgtaattgttgagaa

SEQ ID NO: 143426 - DNA, 120 bp, Artificial Sequence
  ENSG00000104635_38 (sequence is synthesized)
gatacggtctcctctgtgtgaccgtcatctccctctgctccctcctgggggccagcgtggtgcccttcatgaagaagaccttttacaagaggctgctgctctacttcatagctctggcga

SEQ ID NO: 143427 - DNA, 120 bp, Artificial Sequence
  ENSG00000104635_39 (sequence is synthesized)
tgccatctcagctcactgcaacctctgccgcttgggttgaagcgattatcctgtctaagcctcccgagtaactgagccagccatgtttgttaataaaaatggggacaatactgtatatat

SEQ ID NO: 143428 - DNA, 120 bp, Artificial Sequence
  ENSG00000104635_40 (sequence is synthesized)
ccatgtttgttaataaaaatggggacaatactgtatatatatggttatattttagctttttcacttttcagtatctcctgaggcttttctcatgtcattaaatatttttctaatttaaaa

SEQ ID NO: 143429 - DNA, 120 bp, Artificial Sequence
  ENSG00000104635_41 (sequence is synthesized)
cacacgcccggacggctgggtggaggctgcacctggccgtggtgccgcgctggcgaggggagaggtcaaggcgcggcctgtccgcctggagggtgcgggatgctagagccgcagaagggt

SEQ ID NO: 143430 - DNA, 120 bp, Artificial Sequence
  ENSG00000104635_42 (sequence is synthesized)
gcccagagcgtgggtcgccgcgccgaaggctgagccaggctcccggattccccgcgcggacacggacgcagaacgcagacagtttattcagtcaccatgaagctgctgctgctgcacccg

SEQ ID NO: 143431 - DNA, 120 bp, Artificial Sequence
  ENSG00000104635_43 (sequence is synthesized)
gcccggacgcagtgaggggggtcggcgcgcgtgtctacgcggacgcaccggctaagctgcttctgccgccgccggccgcctgggaccttgcggtttattcagtcaccatgaagctgctgc

SEQ ID NO: 143432 - DNA, 120 bp, Artificial Sequence
  ENSG00000104635_44 (sequence is synthesized)
aagtaaaatgcttaataaaaccccggtttagactgtcttcaaaccgaccgccaccccagagcctgcagctgactctgaccccgcgtttattcagtcaccatgaagctgctgctgctgcac

SEQ ID NO: 143433 - DNA, 120 bp, Artificial Sequence
  ENSG00000104635_45 (sequence is synthesized)
tctgatttttcttttttgttccgttaatatccaccaaacttttccttgcgacctccctatctgctccaccttcctcccgctaaatggtggttgctgtgcaatggggcatgtgccttctct

SEQ ID NO: 143434 - DNA, 120 bp, Artificial Sequence
  ENSG00000104635_46 (sequence is synthesized)
agtagtttatcccctttgttttgttctaagattatttccttaatatatttgtatctttacaggatggggagaagagcttgataccatgcattcattctgtatgaagtatgaggctgcaga

SEQ ID NO: 143435 - DNA, 120 bp, Artificial Sequence
  ENSG00000104635_47 (sequence is synthesized)
gaaacaggactattatagtacagtttcaaaaagatatctttagtggctggcatgcagttattccctaaatagctgctgaattgagtgagattagccattgcaaaagaggagctctaaata

SEQ ID NO: 143436 - DNA, 120 bp, Artificial Sequence
  ENSG00000104635_48 (sequence is synthesized)
tttgagcagtggctgccttggtggaataagcatgtaccccgaggagacagctttgatatctgtctgacaccaggtccttcgcacttggtgcagatttatatatatagatattagaaacgg

SEQ ID NO: 143437 - DNA, 89 bp, Artificial Sequence
  ENSG00000104635_49 (sequence is synthesized)
gcacttggtgcagatttatatatatagatattagaaacggggtctcgcttcgttgcccaggctgctctcaaacttctcacagtgctggg

SEQ ID NO: 143438 - DNA, 120 bp, Artificial Sequence
  ENSG00000104635_50 (sequence is synthesized)
cttttgctatgtttctgggcacgtgacctgcttgtgtcatcttcgatggtaaggctgaggtcttccagtgtgtgaagcacttccttggagcaggtgctcaatcaggtttgtggttttggt

SEQ ID NO: 143439 - DNA, 120 bp, Artificial Sequence
  ENSG00000104635_51 (sequence is synthesized)
acactcactccgcgctcagcgtggggctaaataagccattccctgtttgtctgtgccgctgcctggggccctgaccacccgtctctgcctcataacctcctcccacaggcgctggcacac

SEQ ID NO: 143440 - DNA, 120 bp, Artificial Sequence
  ENSG00000104635_52 (sequence is synthesized)
acagtgggggctcagtaaatattagttggtgaacagcaggctcaaggttctaattttgttccctgcttctgggtcaccagagtttttattattatttttcttagttttcccatcctgccc

SEQ ID NO: 143441 - DNA, 120 bp, Artificial Sequence
  ENSG00000104635_53 (sequence is synthesized)
attcgtttttattctgtgctttcaaaagaagggtttttctcaaaggctaattcaagaaggagcagagaagcagagactgagggatagtctcaacatgttcagtgtgtggcgggcgggcct

SEQ ID NO: 143442 - DNA, 120 bp, Artificial Sequence
  ENSG00000104643_0 (sequence is synthesized)
gctacttccctgcggcggggtaaccgcctcgcacctaccgggctcggttccctggctccggccgcgggggagcatggagtttgcggagctgattaagaccccgcgggtggacaatgtggt

SEQ ID NO: 143443 - DNA, 120 bp, Artificial Sequence
  ENSG00000104643_1 (sequence is synthesized)
gctgcaccggcctttctacccggctgtcgagggcaccctgtgcctgacgggccaccacttgatcctgtcctcccggcaggacaatacggaggagctgtggctcctccattcaaacatcga

SEQ ID NO: 143444 - DNA, 120 bp, Artificial Sequence
  ENSG00000104643_2 (sequence is synthesized)
cgccatcgacaagcgatttgtaggatcactgggtaccatcatcataaaatgtaaagattttcgaattattcagttggatattcctggaatggaggaatgcttgaatatagccagttccat

SEQ ID NO: 143445 - DNA, 120 bp, Artificial Sequence
  ENSG00000104643_3 (sequence is synthesized)
tgaggcattgtctactctggactccatcactctgatgtaccctttcttttaccgtcctatgtttgaagtgatagaagatggctggcattccttccttcctgagcaagaatttgaactcta

SEQ ID NO: 143446 - DNA, 120 bp, Artificial Sequence
  ENSG00000104643_4 (sequence is synthesized)
ttcttcagctaccagtgaatggaggctaagctatgtcaataaggaatttgctgtctgtccctcttacccaccaattgtcacagtgcccaaatccatcgatgatgaagctcttcggaaggt

SEQ ID NO: 143447 - DNA, 120 bp, Artificial Sequence
  ENSG00000104643_5 (sequence is synthesized)
agctacatttcgacatggagggcgcttcccagtactaagctattaccacaaaaaaaatgggatggtaattatgcgaagtggtcagccactcactggtacaaacgggaggaggtgcaagga

SEQ ID NO: 143448 - DNA, 120 bp, Artificial Sequence
  ENSG00000104643_6 (sequence is synthesized)
ggacgagaagctgataaatgctaccctcagggctggaaagcgtggctacatcattgacacccgatccctgaacgtggctcagcaaactagagccaaaggaggtggctttgaacaagaagc

SEQ ID NO: 143449 - DNA, 120 bp, Artificial Sequence
  ENSG00000104643_7 (sequence is synthesized)
tcattatcctcagtggaggcgaattcataagtccattgagaggtatcacattcttcaggagagcttaatcaaacttgtggaagcttgtaatgaccaaacacataacatggaccgatggct

SEQ ID NO: 143450 - DNA, 120 bp, Artificial Sequence
  ENSG00000104643_8 (sequence is synthesized)
cagtaaattggaggcctctaactggctgactcacatcaaagagattctgacaactgcctgcctagcggctcagtgcatcgacagggaaggagcatcaatattgattcacggaacagaagg

SEQ ID NO: 143451 - DNA, 120 bp, Artificial Sequence
  ENSG00000104643_9 (sequence is synthesized)
aactgattccacactccaggtgacctccttggcccagatcatcttagagccaagaagcaggaccattcgtggttttgaggccctgattgaaagagagtggctgcaggctggtcacccatt

SEQ ID NO: 143452 - DNA, 120 bp, Artificial Sequence
  ENSG00000104643_10 (sequence is synthesized)
ccagcagcgctgtgcacagtcagcctactgtaacaccaagcagaagtgggaggctcctgtatttcttctcttcttggactgcgtgtggcagatccttcgtcagtttccctgttcttttga

SEQ ID NO: 143453 - DNA, 120 bp, Artificial Sequence
  ENSG00000104643_11 (sequence is synthesized)
gtttaatgagaatttcctcatcatgctctttgagcatgcttatgcctcacagtttggaacatttctgggcaacaatgaaagtgaaagatgtaagttgaagctacagcagaagacgatgtc

SEQ ID NO: 143454 - DNA, 120 bp, Artificial Sequence
  ENSG00000104643_12 (sequence is synthesized)
tttgtggtcctgggttaatcagcccagtgagctgagtaaattcaccaatcccctctttgaagccaacaaccttgtcatctggccttcagttgctccgcagagtcttccactgtgggaagg

SEQ ID NO: 143455 - DNA, 120 bp, Artificial Sequence
  ENSG00000104643_13 (sequence is synthesized)
tattttcctacgttggaatagatcctctaagtatttggatgaagcatatgaagaaatggttaacatcattgaatataataaagaattacaagcaaaagtcaatatccttcgaaggcagtt

SEQ ID NO: 143456 - DNA, 120 bp, Artificial Sequence
  ENSG00000104643_14 (sequence is synthesized)
ggcagaactggaaacagaggacgggatgcaggagagtccctgaaaggtctcctcgcacccttcgcaaggaccttcttgggcctgtgtccgccgttctctccttgtgcccttcagttcact

SEQ ID NO: 143457 - DNA, 120 bp, Artificial Sequence
  ENSG00000104643_15 (sequence is synthesized)
tttacacggtagccttgaagtgaaggctttagatgtgggacccccctaatgtaatggatttctcaatactgtatgaataatgaaacttactatcataaaccatgtttcatgtggcctgtt

SEQ ID NO: 143458 - DNA, 120 bp, Artificial Sequence
  ENSG00000104643_16 (sequence is synthesized)
agggcctgtcactttgggagccggaaggaggtgctagtcattttatttttacgtgaaatagatgacctatttaatgccatttgtgtttcatgccattttatccaaagctttttctctgtg

SEQ ID NO: 143459 - DNA, 120 bp, Artificial Sequence
  ENSG00000104643_17 (sequence is synthesized)
tccactctccaaacagcattctagagcagtcaaggagacagctaatctctctagggactatttggtggtttaaaaaaagggtcagacttttaaacactctgaccatagaaatgtttttca

SEQ ID NO: 143460 - DNA, 120 bp, Artificial Sequence
  ENSG00000104643_18 (sequence is synthesized)
aaatggcaacaatggataaaccaaggattttgtgtttaacaatccatttccagtgtcttcgccacataaaatagccattttctttaaaatagttttggactaacgaagctgaaatctatt

SEQ ID NO: 143461 - DNA, 120 bp, Artificial Sequence
  ENSG00000104643_19 (sequence is synthesized)
ctcattcttgtttgtcaagaaaggaaaatctgttattcaaggtaaattatttctacaagggcaacaggtatggtcctccgatatttacattaagaagagttaaatttattttaacgtaga

SEQ ID NO: 143462 - DNA, 120 bp, Artificial Sequence
  ENSG00000104643_20 (sequence is synthesized)
cactaaaagtatgtgcaatatacaattaaagtaggaatttgttactgattgagaattgttactggtgaattggttttcaggttttgagcatacatatacaatgtgtttcaaatgctgctt

SEQ ID NO: 143463 - DNA, 120 bp, Artificial Sequence
  ENSG00000104643_21 (sequence is synthesized)
gtaaaattaaaccatcatctagaatagagttaatttattataatcaagctacaaataggttttcttaaaccagagatgcactgcccttgtctaaagttcttattgcactggtttatatgt

SEQ ID NO: 143464 - DNA, 120 bp, Artificial Sequence
  ENSG00000104643_22 (sequence is synthesized)
gtatgtgtgttttattgtgtgtttttttaatttgtaagtattctaagagtttcctaatactaaggttaaaattttcatgttgacctgagccttttgcaaatttgctttggctctattgat

SEQ ID NO: 143465 - DNA, 120 bp, Artificial Sequence
  ENSG00000104643_23 (sequence is synthesized)
ttgtccattatgtgttaggcaaatataacttaagtggagggggaagtttatgaatataatatagctctgtgttttaaacctcagaaacagatttgagtgtttcagtattatagaaacagt

SEQ ID NO: 143466 - DNA, 120 bp, Artificial Sequence
  ENSG00000104643_24 (sequence is synthesized)
gatgactattcatgctctgctagtctatgcctgcaactccaaatgtttgtggttcagtatttcccacctacatttctgtttggtgacattgctcattttaacaaatatgaccgagtctag

SEQ ID NO: 143467 - DNA, 120 bp, Artificial Sequence
  ENSG00000104643_25 (sequence is synthesized)
tttttctttaaaaggatagtttatgagtaatctttaaaaccatttccataccatctgtatataaccatttcggtagagaacacactacactgaaccctgctttagagctgtgtgttgagc

SEQ ID NO: 143468 - DNA, 120 bp, Artificial Sequence
  ENSG00000104643_26 (sequence is synthesized)
taaaaatataattttttaaaaattgactagcaaaatctatggccacactgagaagcctttgaaaatggcaaatacttttcatcaccaattgcccaattcatctttcttctgcttcctcag

SEQ ID NO: 143469 - DNA, 120 bp, Artificial Sequence
  ENSG00000104643_27 (sequence is synthesized)
ccttgtagcaaaggctacacagcagcccacagtccacagtctttttgggaaaattggcctgccaccttctttaagctcagtttatttttgacttactttctttgctgtagttatgaacct

SEQ ID NO: 143470 - DNA, 120 bp, Artificial Sequence
  ENSG00000104643_28 (sequence is synthesized)
tggggcattaaaatcccatggcaaggagcataagagatgttctcgtagctctgcgttgtgtgaaatgtccatcttagttttgttaaaaaaaaaaaaaaaaaaaggaaacagcctcacttt

SEQ ID NO: 143471 - DNA, 120 bp, Artificial Sequence
  ENSG00000104643_29 (sequence is synthesized)
ttgtgctccctcagaattgcttgctatgtctgttaatacagctgagctttttgttttcttctctttttgtctcaagattgtatatgaaggaggcttttcttctcagctaacaggcatata

SEQ ID NO: 143472 - DNA, 90 bp, Artificial Sequence
  ENSG00000104643_30 (sequence is synthesized)
tatatgaaggaggcttttcttctcagctaacaggcatataaggaaaaccatctagagagttttctttagaagtgactcccattagcctca

SEQ ID NO: 143473 - DNA, 120 bp, Artificial Sequence
  ENSG00000104643_31 (sequence is synthesized)
agcctgagcaacagagcgagaccctgtgtctaagtaaagaaaaagccagaagtgactcccactgcttctgttgatcggccatagggcttccatgggtggaaacttgtgagggagtttgta

SEQ ID NO: 143474 - DNA, 120 bp, Artificial Sequence
  ENSG00000104643_32 (sequence is synthesized)
atagggcttccatgggtggaaacttgtgagggagtttgtattaggtctggtcatggagggatgatgtaccatcaaggtagacccatcttcctgatgcacatttgctgtgcgagccagagt

SEQ ID NO: 143475 - DNA, 120 bp, Artificial Sequence
  ENSG00000104643_33 (sequence is synthesized)
acagtcataacacggtattcgcatttcgttttctctgtctcactgagacaacaatctatactgttttggcaagtttgcattttagtattaatttataattagggattgttcaaacttcag

SEQ ID NO: 143476 - DNA, 120 bp, Artificial Sequence
  ENSG00000104643_34 (sequence is synthesized)
atctgtttacaggttgtaaaaataaacttcggtatcagtgcatctacagaagtgttatttggtaatccaaatattagagttttcccaaatccaaaaacggtcagaaataagtccattatc

SEQ ID NO: 143477 - DNA, 120 bp, Artificial Sequence
  ENSG00000104643_35 (sequence is synthesized)
aatataatttgaagaagatttttagtagtactgtgaagttcgtgcttacctggatgagaagaataaatgacacggatacactcctgagaagacactcgttaaacattgcatcggagagct

SEQ ID NO: 143478 - DNA, 120 bp, Artificial Sequence
  ENSG00000104643_36 (sequence is synthesized)
gcctttgataaatgtgctgttaaacacttgaatgaagagaatggtggcagaatgagtgagcaagcagattgccccagaggggccggtaataatcacgtgagggataatcagattcctgcg

SEQ ID NO: 143479 - DNA, 120 bp, Artificial Sequence
  ENSG00000104643_37 (sequence is synthesized)
tattcagcatcttctctattcatgtggagtgaaagctggtttttatacaggagatacgtaaagtaggccccacaaataatatttttaaaatacaaaggatcaccacaatcctctattgaa

SEQ ID NO: 143480 - DNA, 120 bp, Artificial Sequence
  ENSG00000104643_38 (sequence is synthesized)
catataaggatcctcagatttaaataagtactttttttttttttaatcagaagaacattgttgtttgattatatgtttttaaaaacctgaagcttttttggtggcaggacctttcaataa

SEQ ID NO: 143481 - DNA, 120 bp, Artificial Sequence
  ENSG00000104643_39 (sequence is synthesized)
atatttatttggtcaaaattttttattttgattttattaaatgggaagaaagcaagcagaaatagtaaaattcagtaggtttaaaacaatctataaatgtattttatttccaagaaaact

SEQ ID NO: 143482 - DNA, 120 bp, Artificial Sequence
  ENSG00000104643_40 (sequence is synthesized)
tagggtctcaaagcaagattttaaagtgatttttgagaagacttgggggggacaataatagacattcatgtcagatcccatatgggggatttttaaacatttctttgaactttgaggcct

SEQ ID NO: 143483 - DNA, 120 bp, Artificial Sequence
  ENSG00000104643_41 (sequence is synthesized)
gatttaggggtgggattttattgctttttgttttaaaggatgaaattttgtggggttttagtctttgattcagtcagtatttggtttatgttaaataaaaaatcagtatcatggaaaaga

SEQ ID NO: 143484 - DNA, 120 bp, Artificial Sequence
  ENSG00000104643_42 (sequence is synthesized)
tatgaccataatttagtctcctcaagtgaaaaacaggagtaatgtttcgttgcactttgaaagatctgcttcaaggcataactcgtgtagttgtctggtttcagggatagctgtttgaat

SEQ ID NO: 143485 - DNA, 120 bp, Artificial Sequence
  ENSG00000104643_43 (sequence is synthesized)
tgtcattctaaagtaggtcatcaggttcacttattatccgaccttaatctgggataaaggttttggtatttgcccacttctagatagaatgaatgaaaacaacacaagcgttttatgagc

SEQ ID NO: 143486 - DNA, 120 bp, Artificial Sequence
  ENSG00000104643_44 (sequence is synthesized)
actctttatcagaaaggtatttcctggaccagaaatgggcaatagttacaatagttgatcctctgttctggaagctttgaaatttatcagagaatgaagtcattcagtacatctgataaa

SEQ ID NO: 143487 - DNA, 120 bp, Artificial Sequence
  ENSG00000104643_45 (sequence is synthesized)
gttttgttgttgttgttgttgttgttgttttaattgggcaaccctcagaactgaagaggttcagagaactttccaggtttatactatacctcaagaccacatagattagctactgcttat

SEQ ID NO: 143488 - DNA, 120 bp, Artificial Sequence
  ENSG00000104643_46 (sequence is synthesized)
tctttcacatgggctaggcctgttctcctcctccagacctagtattctaagttattaccacatagtatttttatgttacccatcatctttaaaaacattataggctgggcatggtggctt

SEQ ID NO: 143489 - DNA, 120 bp, Artificial Sequence
  ENSG00000104643_47 (sequence is synthesized)
aaaaaagactcatttatccatttacatttattctcagatgataaaatatatactgatactataactttcttatggtatcagttttctttattttcttgaataaaattacttctaccttca

SEQ ID NO: 143490 - DNA, 120 bp, Artificial Sequence
  ENSG00000104643_48 (sequence is synthesized)
tctttattttcttgaataaaattacttctaccttcatttggtctttataatccactgtccacagcatcttcctttaaaccaatagtcccagaagagaccctctgaaattctaggactgga

SEQ ID NO: 143491 - DNA, 120 bp, Artificial Sequence
  ENSG00000104643_49 (sequence is synthesized)
tattaaaatgcctgaacctgttatctaaatcctttttaagaaacttaatgttccagctcttgaactacactgtggaacagtaatttgtgcccaatttagtggaagataatgaggctcact

SEQ ID NO: 143492 - DNA, 120 bp, Artificial Sequence
  ENSG00000104643_50 (sequence is synthesized)
gtaaacactacattgtcctgcaaagtaattctgatgagagtttactgacttctagagccattctctttaaccgtctgcaggtctaaggattaactatatttgtgatttgtaataaaactg

SEQ ID NO: 143493 - DNA, 120 bp, Artificial Sequence
  ENSG00000104643_51 (sequence is synthesized)
agttgtacaacactgcctgtgtttgtctggccaagacatttgcttcacttttaaaatgcacgttatctttggagaggtgaattattctacaaaatgcaccctaaatctcattgtttaaaa

SEQ ID NO: 143494 - DNA, 120 bp, Artificial Sequence
  ENSG00000104643_52 (sequence is synthesized)
ccttactgatctaataccatctacacaaaaaaatgttgtagttgcagaacttagtttataaaaacaaagaatgtgtatttcttcaatagccgggtatttggattgttctcttgataatat

SEQ ID NO: 143495 - DNA, 120 bp, Artificial Sequence
  ENSG00000104643_53 (sequence is synthesized)
ttgaatgtgactcttggatttaagtgcactattattcatggcttatacaataaaattgcactgtatggcaaatatgtctataatgtatgctttgctgaaacctcaagagtgctgtaaggt

SEQ ID NO: 143496 - DNA, 120 bp, Artificial Sequence
  ENSG00000104643_54 (sequence is synthesized)
acaggtttccatattgtgaacctgtgtacgcacacacacatatacatacagtcttagggaaaaaaaaaagcagaacttttgtaagtctgtgtaacattttaatattgtttgtaatattca

SEQ ID NO: 143497 - DNA, 120 bp, Artificial Sequence
  ENSG00000104643_55 (sequence is synthesized)
ctaggtgataatttcccctgtaccctataactgtaatcattcaccttgggttggccggtttgtcaagcttggtttactgaatcaagaaagagtcttgtcgaatgtggtactgttcttagt

SEQ ID NO: 143498 - DNA, 120 bp, Artificial Sequence
  ENSG00000104643_56 (sequence is synthesized)
gtgtaatatttgcgtatggtgttcctctgcctcagaggacagttgcacagatggctagtgttaaatttctatagacgatggtaataaaatctgaatatatttaagtgctaataaattaaa

SEQ ID NO: 143499 - DNA, 120 bp, Artificial Sequence
  ENSG00000104643_57 (sequence is synthesized)
cacggcacccggcccttttgctttttataaattgatacataatatgtatcacttggaagtaagggaaatctgaagtgaactgttttcctatgctccagaaatatctctctacaaacactt

SEQ ID NO: 143500 - DNA, 120 bp, Artificial Sequence
  ENSG00000104643_58 (sequence is synthesized)
aacacattagttacagatctttttcctattctttgaaataaggccccaaataatctccatcagaacagttagcttaatgtgaattactttatatatttgaaatttaaaaaagacatatat

SEQ ID NO: 143501 - DNA, 120 bp, Artificial Sequence
  ENSG00000104643_59 (sequence is synthesized)
tgtaagtaatgtatggctcacattttaatgatgcagccttgcttcttccttaattagactgaggagaagaaagttaatatagatggtaactacaactatattctcttttcaaagaaataa

SEQ ID NO: 143502 - DNA, 120 bp, Artificial Sequence
  ENSG00000104643_60 (sequence is synthesized)
tgagaagtaacccaataccttatttgacttgtgaaaatgatcacttcttttgaagagtaataaggtgaagttgacttatccattcctaatcttaatatatttaaaaggattgaagccatg

SEQ ID NO: 143503 - DNA, 120 bp, Artificial Sequence
  ENSG00000104643_61 (sequence is synthesized)
cagagtatgatctctgatcacaaaggaattagattaataatcagtaatactaagatatctaggaatacccccaagtatttctaaattaaacagaacgcttgtaaataatctgcatgtcaa

SEQ ID NO: 143504 - DNA, 120 bp, Artificial Sequence
  ENSG00000104643_62 (sequence is synthesized)
agaaattagaaaacattttgaagtgagtgataatggttatgtaacatattgaaatttgtggaatacagacagctaaggcagtgtttagagataaacttacagctttaaaatttttactag

SEQ ID NO: 143505 - DNA, 120 bp, Artificial Sequence
  ENSG00000104643_63 (sequence is synthesized)
aaaggaaagtctaaaattattgacctaagcaccaatttaagaagctagaaaaaaaaagcaaagtaactagaaagaaaaaataataaaaataagagcagaaagcaataaaataactagaat

SEQ ID NO: 143506 - DNA, 120 bp, Artificial Sequence
  ENSG00000104643_64 (sequence is synthesized)
aagtaagtttagcaaagttggttgatataagatcggtatacaaaaacgaattgaattggcaacaagcgatctgacaatgaataaaatatttacgaataaatttaacaaaagaaattcaag

SEQ ID NO: 143507 - DNA, 120 bp, Artificial Sequence
  ENSG00000104643_65 (sequence is synthesized)
tccgcagggagccgggggtcccttgtgggcgccccgggaaatacttcctggcgttttccgcgcagcctgccgcccagctagccggcaagatgagccctctgtggcctagaatcaggattt

SEQ ID NO: 143508 - DNA, 120 bp, Artificial Sequence
  ENSG00000104660_0 (sequence is synthesized)
gcacttccgggtgttgtctggccgccgtagcgcgtcttgggtctcccggctgccgctgctgccgccgccgcctcgggtcgtggagccaggagcgacgtcaccgccatggcaggcatcaaa

SEQ ID NO: 143509 - DNA, 120 bp, Artificial Sequence
  ENSG00000104660_1 (sequence is synthesized)
gctttgattagtttgtcctttggaggagcaatcggactgatgtttttgatgcttggatgtgcccttccaatatacaacaaatactggcccctctttgttctatttttttacatcctttca

SEQ ID NO: 143510 - DNA, 120 bp, Artificial Sequence
  ENSG00000104660_2 (sequence is synthesized)
cctattccatactgcatagcaagaagattagtggatgatacagatgctatgagtaacgcttgtaaggaacttgccatctttcttacaacgggcattgtcgtgtcagcttttggactccct

SEQ ID NO: 143511 - DNA, 120 bp, Artificial Sequence
  ENSG00000104660_3 (sequence is synthesized)
attgtatttgccagagcacatctgattgagtggggagcttgtgcacttgttctcacaggaaacacagtcatctttgcaactatactaggctttttcttggtctttggaagcaatgacgac

SEQ ID NO: 143512 - DNA, 120 bp, Artificial Sequence
  ENSG00000104660_4 (sequence is synthesized)
ttcagctggcagcagtggtgaaaagaaattactgaactattgtcaaatggacttcctgtcatttgttggccattcacgcacacaggagatggggcagttaatgctgaatggtatagcaag

SEQ ID NO: 143513 - DNA, 120 bp, Artificial Sequence
  ENSG00000104660_5 (sequence is synthesized)
cctcttgggggtattttaggtgctcccttctcacttttattgtaagcatactattttcacagagacttgctgaaggattaaaaggattttctcttttggaaaagcttgactgatttcaca

SEQ ID NO: 143514 - DNA, 120 bp, Artificial Sequence
  ENSG00000104660_6 (sequence is synthesized)
cttatctatagtatgctttttgtggtgtcctgctgaatttaaatatttatgtgtttttcctgttaggttgattttttttggaatcaatatgcaatgttaaacacttttttaatgtaatca

SEQ ID NO: 143515 - DNA, 120 bp, Artificial Sequence
  ENSG00000104660_7 (sequence is synthesized)
tttgcattggttaggaattcagaattccgccggctctattactggtcaagtacatcttttctcttaaaattatttagcctccattattacaaaaaattataaaaataagttttcagtcag

SEQ ID NO: 143516 - DNA, 120 bp, Artificial Sequence
  ENSG00000104660_8 (sequence is synthesized)
tcaggatgacatcactcccaatgttatgcagacatacagacggttggcatacgttatagactgtatactcagtgcaaatatagctgcatttatacctcagaggggccaagtgttaatgcc

SEQ ID NO: 143517 - DNA, 120 bp, Artificial Sequence
  ENSG00000104660_9 (sequence is synthesized)
catgccctccgttaagggttgttggttttactggtagacagatgttttgtggattgaaaattattttatggaattgctacagaggagtgcttttcttctcaattgttagaagaatttatg

SEQ ID NO: 143518 - DNA, 120 bp, Artificial Sequence
  ENSG00000104660_10 (sequence is synthesized)
ttaaactttaaggtaagggtgtaaaaacatttttgagataaggtttttatttatgtttattattgttagagtgagttgcaatgtgggaagaaatgacattgaaattccagtttttgaatc

SEQ ID NO: 143519 - DNA, 120 bp, Artificial Sequence
  ENSG00000104660_11 (sequence is synthesized)
ctgtttctatttataagtgaaatttgtgatctcctatcaacctttcatgttttaccctgttaaaatggacatacatggaaccactactgatgagggacagttgtatgtttgcatcatata

SEQ ID NO: 143520 - DNA, 120 bp, Artificial Sequence
  ENSG00000104660_12 (sequence is synthesized)
tgccagaaaaccttcctctgcttcctccttttgacttatttggtatgttgtatatattacataaaataacttttcaaatatagtttaataacacttagaagtgtttacttacctggaaaa

SEQ ID NO: 143521 - DNA, 120 bp, Artificial Sequence
  ENSG00000104660_13 (sequence is synthesized)
gccttgccatgattaacaagtaacttgttagtcttacagataattcatgcattaacagtttaagatttagaccatggtaatagtagttcttattctctaaggttatatcatatgtaattt

SEQ ID NO: 143522 - DNA, 120 bp, Artificial Sequence
  ENSG00000104660_14 (sequence is synthesized)
aaaagtatttttaagacaagtttcctgtatacctctgaactgttttgattttgagttcatcatgatagatctgctgtttccttataaaaggcatttgttgtgtgagttaatgcaaagtag

SEQ ID NO: 143523 - DNA, 120 bp, Artificial Sequence
  ENSG00000104660_15 (sequence is synthesized)
ccaagtccagctatatagcagcttcagaaacatacctgaccaaaaaattcccagtaaccaggcatgatcaatttatagtggtcgtttacatctaataattatcaggacttttttcaggag

SEQ ID NO: 143524 - DNA, 120 bp, Artificial Sequence
  ENSG00000104660_16 (sequence is synthesized)
tgggttataaaaacattcaagttggtctgacagtattttgttaaggatatttgtttgtatgtttattcagtatacttacataaaaattatttcgccatcagccaaaactcagtaatcatg

SEQ ID NO: 143525 - DNA, 120 bp, Artificial Sequence
  ENSG00000104660_17 (sequence is synthesized)
acagctgtctgttgttttatgaagtttatttctcaagaaaatgggaataaatttgggatttgttcagcttttttactaaagatgcctaaagccacaggttttattgcctaacttaagcca

SEQ ID NO: 143526 - DNA, 120 bp, Artificial Sequence
  ENSG00000104660_18 (sequence is synthesized)
tgacttttagatatgagatgacgggaagcaggacgaaatatcggcgtgtggctggagccttcccactggaggctgaaagtggcttgtggtattataatgttcagatttcaagaggaaggt

SEQ ID NO: 143527 - DNA, 120 bp, Artificial Sequence
  ENSG00000104660_19 (sequence is synthesized)
gcaggtacacatgagttagagagctggtgagacagttgggaactctttgtgcttgtgatctactggacttttttttgcaggaagtgcattctctggtccttccctattttctgttctgga

SEQ ID NO: 143528 - DNA, 120 bp, Artificial Sequence
  ENSG00000104660_20 (sequence is synthesized)
tgtcagtgcagtgcactgctactgttttatccacttggccacagactttttctaacagctgcgtattatttctatatactaactgcattggcagcattgtgtctttgaccttgtatacta

SEQ ID NO: 143529 - DNA, 120 bp, Artificial Sequence
  ENSG00000104660_21 (sequence is synthesized)
gcttgacatagtgctgtctctgatttctaggctagttacttgagatatgaattttccatagaatatgcactgatacaatattaccattcttctatggaaagaaaacttttgatgatgaaa

SEQ ID NO: 143530 - DNA, 120 bp, Artificial Sequence
  ENSG00000104660_22 (sequence is synthesized)
caataaagattttaaatatctattttagtttgtgggtgtttttgaaatgaaaatatatggcacactttcattctgaagtgcattaacattctaataaggtgatgtaaagcaagatgacat

SEQ ID NO: 143531 - DNA, 120 bp, Artificial Sequence
  ENSG00000104660_23 (sequence is synthesized)
tggtgtaatgttagagttgcagaagtttccattccaaaataaaatggaaaccatagttacagatattacaatgcagccctgtaattttgagctgtagtaaaaggattggtaatctgggaa

SEQ ID NO: 143532 - DNA, 120 bp, Artificial Sequence
  ENSG00000104660_24 (sequence is synthesized)
gtagaatttttacaaaatcttttacaaaaatagtcataaaaggttttgttgacatttaagactactactgatctaaaggcaaggtcctacttcttaaattttcagaacatttttatgact

SEQ ID NO: 143533 - DNA, 120 bp, Artificial Sequence
  ENSG00000104660_25 (sequence is synthesized)
tcttattatgtatttattaccactcattattatagcatgttactttttgcaaacattttaaacaaaaaatatttctgtttggtacactgtgaagagagaaaagtactgttctgtattttc

SEQ ID NO: 143534 - DNA, 120 bp, Artificial Sequence
  ENSG00000104660_26 (sequence is synthesized)
gacccccgccccggccctgcgcttggcccggaggtgggcgcggcgccctcgggcaacggacggttgcgaccccggcttcgccccgcagcccccactttctgccgatttcggcagcctctc

SEQ ID NO: 143535 - DNA, 70 bp, Artificial Sequence
  ENSG00000104660_27 (sequence is synthesized)
cgggcattgtcgtgtcagcttttggactccctattgtatttgccagagcacatcacctcactgcaagctc

SEQ ID NO: 143536 - DNA, 120 bp, Artificial Sequence
  ENSG00000104660_28 (sequence is synthesized)
ctggagcagttgtatgtgtagaaagtgaaatcagaggagatgtaactatcggacctcggacagtgatccaccctaaagcaagaattattgcggaagccgggccaatagtgattggcgaag

SEQ ID NO: 143537 - DNA, 120 bp, Artificial Sequence
  ENSG00000104660_29 (sequence is synthesized)
ggaacctaatagaagaacaggcccttatcataaatgcttacccagataatatcactcctgacactgaagatccagaaccaaaacctatgatcattggcaccaataatgtgtttgaagttg

SEQ ID NO: 143538 - DNA, 75 bp, Artificial Sequence
  ENSG00000104660_30 (sequence is synthesized)
tggcttgctaatacttaactgtcagagttgagcatatcaactcccccagtgctgaacaacccaggcctatcctgt

SEQ ID NO: 143539 - DNA, 120 bp, Artificial Sequence
  ENSG00000104660_31 (sequence is synthesized)
gccagcatgatgtaggcaatgatcaactgggtgtgggcccaggtgagggttctatagaacagcctcatcggccaggatctgataaactcattggcaaaggagtgaatcaggtagtcagct

SEQ ID NO: 143540 - DNA, 120 bp, Artificial Sequence
  ENSG00000104660_32 (sequence is synthesized)
ccaaagcccgctgcgtggaggagggagtcgtccaggatccagtgggagtagtagatggggcgcctacccttcttcagcaagatgggaacagctgagtctgaaggaagagaaacactgaca

SEQ ID NO: 143541 - DNA, 120 bp, Artificial Sequence
  ENSG00000104660_33 (sequence is synthesized)
cagcagctgcctctcccagcagccgccatgagaagattgttacctgcaagcagagtgtccactcaacccgtgctgaggctggcagacagtgctgagtcacttctgggcaggcctgctctg

SEQ ID NO: 143542 - DNA, 120 bp, Artificial Sequence
  ENSG00000104660_34 (sequence is synthesized)
tgggctctaggattcctgctttgccctccctctcaggcacaatgacaactactgctcagtgccagacactgcaccatgtaggcaacacgtggcagtgatgattagtcacaaaatcacatt

SEQ ID NO: 143543 - DNA, 78 bp, Artificial Sequence
  ENSG00000104660_35 (sequence is synthesized)
ggcaacacgtggcagtgatgattagtcacaaaatcacatttatattcattctaagtctgacctaaccaactccatctt

SEQ ID NO: 143544 - DNA, 120 bp, Artificial Sequence
  ENSG00000104660_36 (sequence is synthesized)
agtttaaaacaaagacaatcacagacctttcccaaaacaaacccccttcttgcctggaaactagactgcctttgtaggattaacaaattagccgaaagattagaaattatggtttaggag

SEQ ID NO: 143545 - DNA, 120 bp, Artificial Sequence
  ENSG00000104660_37 (sequence is synthesized)
agattctgacactcctccaattgctcctggggataacattactattctaaggcctaacatcagtgcttgagatgttttgtagaccctgcccttgatggatcagctggtactacccagacc

SEQ ID NO: 143546 - DNA, 120 bp, Artificial Sequence
  ENSG00000104660_38 (sequence is synthesized)
gataaactggctcgtcttatcttgtggcccccacccaggagctgactcaatgcaagaagactgttctgactccctatgatttcatctccaacccaaccaagcggcactgtcaactcactg

SEQ ID NO: 143547 - DNA, 120 bp, Artificial Sequence
  ENSG00000104660_39 (sequence is synthesized)
gcctccccctacccaccaaattatccttaaaaactcagatccccaaatgctcagggaaactgattatgattaccccaaagcttggagtaataataaaactggcctgtctcccgcacagcc

SEQ ID NO: 143548 - DNA, 120 bp, Artificial Sequence
  ENSG00000104660_40 (sequence is synthesized)
agctctctgtgaattactctttctttactgcaattcccctgtttgtctaggcagtggagaaggtgaacccactgggcggttacactaacattcacaacaatcttgcaacacagtattgtt

SEQ ID NO: 143549 - DNA, 120 bp, Artificial Sequence
  ENSG00000104671_0 (sequence is synthesized)
aattggggccgtaccatggcggagaagactcaaaagagtgtgaagattgctcctggagcagttgtatgtgtagaaagtgaaatcagaggagatgtaactatcggacctcggacagtgatc

SEQ ID NO: 143550 - DNA, 120 bp, Artificial Sequence
  ENSG00000104671_1 (sequence is synthesized)
caccctaaagcaagaattattgcggaagccgggccaatagtgattggcgaagggaacctaatagaagaacaggcccttatcataaatgcttacccagataatatcactcctgacactgaa

SEQ ID NO: 143551 - DNA, 120 bp, Artificial Sequence
  ENSG00000104671_2 (sequence is synthesized)
gatccagaaccaaaacctatgatcattggcaccaataatgtgtttgaagttggctgttattcccaagccatgaagatgggagataataatgtcattgaatcaaaagcatatgtaggcaga

SEQ ID NO: 143552 - DNA, 120 bp, Artificial Sequence
  ENSG00000104671_3 (sequence is synthesized)
aatgtaatattgacaagtggctgcatcattggggcttgttgcaacctaaatacatttgaagtcatccctgagaatacggtgatctatggtgcagactgccttcgtcgggtgcagactgag

SEQ ID NO: 143553 - DNA, 120 bp, Artificial Sequence
  ENSG00000104671_4 (sequence is synthesized)
cagtaaagaactaagaacagtgtataacatgaagataacattttgtctttgaccactgtcttttgaatgggcccacagtgtttatgtactcttaacaactcacagaataatacatgttca

SEQ ID NO: 143554 - DNA, 120 bp, Artificial Sequence
  ENSG00000104671_5 (sequence is synthesized)
ctttattttgtaaaattgggttgagaggaaactaatggagtttcattgtaactgtcctttgtaatttatataaatgtattattttcctatatccttggttcttttctgataatttacaga

SEQ ID NO: 143555 - DNA, 120 bp, Artificial Sequence
  ENSG00000104671_6 (sequence is synthesized)
tttagcttttcttttgttatataaactgctagccacaaattttagttatgtaaaaggctacccttgacaagaaaagacatactgtcatgtatttatattctagcatagactaaactgaat

SEQ ID NO: 143556 - DNA, 120 bp, Artificial Sequence
  ENSG00000104671_7 (sequence is synthesized)
aaaaatgctgataacaggacctttagtaagcatactttaatcagtttttctccttgaattaatcttttctcttaatttttattatgtactagttgtattaaagctaatgtgtttactttt

SEQ ID NO: 143557 - DNA, 120 bp, Artificial Sequence
  ENSG00000104671_8 (sequence is synthesized)
tctgctgattttcccaaaatacaatgtaattgtcttcatgaggcagcaggtacactatttaagaacataattaaaataaaacaaaagatgccagtctcagtgactcgtgcctggaattct

SEQ ID NO: 143558 - DNA, 83 bp, Artificial Sequence
  ENSG00000104671_9 (sequence is synthesized)
aggaatttaagagcactagaaaaactaagccaggtgtggtggggcatgactatagtccagctactgaggaggctgaggtggga

SEQ ID NO: 143559 - DNA, 120 bp, Artificial Sequence
  ENSG00000104671_10 (sequence is synthesized)
ctagaaaaactaagccaggtgtggtggggcatgactatagtccagctactgaggaggctgaggtgggaagataattcttgagtgtgaggttaccatgagccatgatcatgccactgcact

SEQ ID NO: 143560 - DNA, 120 bp, Artificial Sequence
  ENSG00000104671_11 (sequence is synthesized)
cgcatgtggaattatcgctctacccaggcggtggtgtcgatctacgttccaattggggccgtaccatggcggagaagactcaaaagagtgtgaagattgctcctggagcagttgtatgtg

SEQ ID NO: 143561 - DNA, 120 bp, Artificial Sequence
  ENSG00000104671_12 (sequence is synthesized)
ggccgtaccatggcggagaagactcaaaagagtgtgaagattgctcctggagcagttgtatgtgtagaaagtgaaatcagaggagatgtaactatcgctgggcatggtggtgcatgcctg

SEQ ID NO: 143562 - DNA, 120 bp, Artificial Sequence
  ENSG00000104671_13 (sequence is synthesized)
tcctttagtacctaagtcttctcctgtagaaattgtaaataattcctggctctcctttagtacctaagtcttctcctgtagaaattgtaaaattgtcataatttatctatcaaacatact

SEQ ID NO: 143563 - DNA, 89 bp, Artificial Sequence
  ENSG00000104671_14 (sequence is synthesized)
ttgtcataatttatctatcaaacatacttacattcacaatatatattataattacatttttaaaagtaggtcatatcccagcactgtgg

SEQ ID NO: 143564 - DNA, 120 bp, Artificial Sequence
  ENSG00000104679_0 (sequence is synthesized)
gctggcccctggggacgccgagggcggctgcgacgcgccgagaggccgcggctctcccacctgtcaccctggcccttctctgcttggatggtgtcttcctctcctcagccgagaatgact

SEQ ID NO: 143565 - DNA, 120 bp, Artificial Sequence
  ENSG00000104679_1 (sequence is synthesized)
tcgtccaccggatccaggaggaactggaccgctttctgctgcagaagcagctgtcaaaggttcttcttttccccccactctccagtcgcctccggtacctgatccatagaacagcagaga

SEQ ID NO: 143566 - DNA, 120 bp, Artificial Sequence
  ENSG00000104679_2 (sequence is synthesized)
attttgatctcttgagcagcttctccgttggggagggctggaagaggaggacggtcatctgtcaccaggacatcagggtacccagttcggatggcctctctggcccctgccgcgctcctg

SEQ ID NO: 143567 - DNA, 120 bp, Artificial Sequence
  ENSG00000104679_3 (sequence is synthesized)
cctcctgccccagcaggtaccacggtcctcggcccatctccaaccaaggagcagctgcggttccccgaggtgcccgggctggccggtggtatcgtggacgcaagcctgaccagcctttgt

SEQ ID NO: 143568 - DNA, 120 bp, Artificial Sequence
  ENSG00000104679_4 (sequence is synthesized)
atgtgccccgggtgctgcgcaggcaggaagaatgggggctgacctctacctcggtgctcaagagagaggccccagctggcagggacccagaagagcctggagatgttggtgctggagacc

SEQ ID NO: 143569 - DNA, 120 bp, Artificial Sequence
  ENSG00000104679_5 (sequence is synthesized)
ccaactctgatcagggactccctgtgctgatgactcagggaacagaggacctaaagggcccaggacaaaggtgtgagaatgagccactgctggaccctgttggccctgagcctctggggc

SEQ ID NO: 143570 - DNA, 120 bp, Artificial Sequence
  ENSG00000104679_6 (sequence is synthesized)
agggaagggagacatggtggagatggccacacggtttgggtccaccctgcagctagacctggaaaaggggaaggagagtctgttggagaagaggctggtggcagaggaggaagaggacga

SEQ ID NO: 143571 - DNA, 120 bp, Artificial Sequence
  ENSG00000104679_7 (sequence is synthesized)
agaggaggtggaagaggatggccccagcagctgctcggaggacgattacagtgagctgctgcaggagatcacagacaacctgacgaagaaggagattcagatagagaagatccatttgga

SEQ ID NO: 143572 - DNA, 120 bp, Artificial Sequence
  ENSG00000104679_8 (sequence is synthesized)
cacatcctccttcgtggaggagctgcctggagagaaggaccttgcccacgtggtagagatctatgactttgaaccagcgctcaagacggaggacctgctggcaacgttttctgagttcca

SEQ ID NO: 143573 - DNA, 120 bp, Artificial Sequence
  ENSG00000104679_9 (sequence is synthesized)
agagaaggggttcaggattcagtgggtggatgatactcacgcactcggcatctttccctgcctggcctcagctgcggaagccctgacccgggagttctcggtgctcaagatccggcccct

SEQ ID NO: 143574 - DNA, 120 bp, Artificial Sequence
  ENSG00000104679_10 (sequence is synthesized)
cacacagggaaccaagcagtcaaagctcaaagccttgcagaggccaaaactcctgcgtctggtgaaggagaggccacagacaaatgcgactgtggcccggcggctggtggcccgggccct

SEQ ID NO: 143575 - DNA, 120 bp, Artificial Sequence
  ENSG00000104679_11 (sequence is synthesized)
gggactccaacacaaaaagaaagagcggcctgctgtccggggtccgctgccgccctgaggcctggagacccaactggcctggatctgcgtcccgacgtagctggcgcccccaacaccata

SEQ ID NO: 143576 - DNA, 120 bp, Artificial Sequence
  ENSG00000104679_12 (sequence is synthesized)
agccttcacagacgccagagcagccccgcaccaccctcgagcttcaccatggggtgtggtgggctttagtttagtcccagaaatggagaaaaaataaaaactcacgttgttctaatgtga

SEQ ID NO: 143577 - DNA, 120 bp, Artificial Sequence
  ENSG00000104679_13 (sequence is synthesized)
tgtctgggtctcggttttgccatgaatatgaaagctagtcgtgtcactctaggagaagcggtttgtgttggtggcaggtgcgccccctcccaataggtgacaagaacacgcactctcccg

SEQ ID NO: 143578 - DNA, 120 bp, Artificial Sequence
  ENSG00000104679_14 (sequence is synthesized)
actagtaaaatggacctgcaagaggcctgccgaggccagctgtgctctcgtgggtggttacgtagccaacatggtccagggtttcttggaacaataaatatcctgtccgtaggtctgtga

SEQ ID NO: 143579 - DNA, 120 bp, Artificial Sequence
  ENSG00000104679_15 (sequence is synthesized)
gccctttcggtgccggcgttgcggggtcgcgggagatccgggggtctgtgctctgattcccggccctgcccgtctctcttacaggctctcccacctgtcaccctggcccttctctgcttg

SEQ ID NO: 143580 - DNA, 120 bp, Artificial Sequence
  ENSG00000104679_16 (sequence is synthesized)
gtggttatctgagcttcagtgggcacattcctatctcttgggctttactaacccttgtacttggaagttcatccagagaactcacaacgatactgggggctgctctcacatactcacttt

SEQ ID NO: 143581 - DNA, 120 bp, Artificial Sequence
  ENSG00000104679_17 (sequence is synthesized)
gtcgtcccgacccccgggctcccgggtgggaaggagcagctgggctgcgcggagcaggcccccgtgagccccgggaaggagcgcagcgcagggctctcccacctgtcaccctggcccttc

SEQ ID NO: 143582 - DNA, 120 bp, Artificial Sequence
  ENSG00000104679_18 (sequence is synthesized)
atcactagtagaggagggaaagttcttggacttgcccagctctgcctcttactgactttgcactttgggaaaaattacttaactcttgggccttcagtttccccatctgtaaaacagctt

SEQ ID NO: 143583 - DNA, 120 bp, Artificial Sequence
  ENSG00000104679_19 (sequence is synthesized)
tctaaaatatagttttcaggattctatggaacattatgtgtgtaattgccagtcacttagtggggactccatacaagtaagtgccctcccgtaaaacccatgcgtcttgacgtcttgacc

SEQ ID NO: 143584 - DNA, 120 bp, Artificial Sequence
  ENSG00000104679_20 (sequence is synthesized)
tcccagacttttgccaggtgggccccttctccctgcagagctctcagcgcgtgggctagtggtttgggagctctgcgtgtccaagctccccttgctaagggtccgatctctcctagatca

SEQ ID NO: 143585 - DNA, 80 bp, Artificial Sequence
  ENSG00000104687_0 (sequence is synthesized)
cttccgcgtgcatggccctgctgccccgagccctgagcgccggcgcgggaccgagctggcggcgggcggcgcgcgccttc

SEQ ID NO: 143586 - DNA, 120 bp, Artificial Sequence
  ENSG00000104687_1 (sequence is synthesized)
ctcacgcgcgccctctcccgtgccatggcctgcaggcaggagccgcagccgcagggcccgccgcccgctgctggcgccgtggcctcctatgactacctggtgatcgggggcggctcgggc

SEQ ID NO: 143587 - DNA, 120 bp, Artificial Sequence
  ENSG00000104687_2 (sequence is synthesized)
tggccagcgcgcgcagggcggccgagctgggtgccagggccgccgtggtggagagccacaagctgggtggcacttgcgtgaatgttggatgtgtacccaaaaaggtaatgtggaacacag

SEQ ID NO: 143588 - DNA, 120 bp, Artificial Sequence
  ENSG00000104687_3 (sequence is synthesized)
ctgtccactctgaattcatgcatgatcatgctgattatggctttccaagttgtgagggtaaattcaattggcgtgttattaaggaaaagcgggatgcctatgtgagccgcctgaatgcca

SEQ ID NO: 143589 - DNA, 120 bp, Artificial Sequence
  ENSG00000104687_4 (sequence is synthesized)
tctatcaaaacaatctcaccaagtcccatatagaaatcatccgtggccatgcagccttcacgagtgatcccaagcccacaatagaggtcagtgggaaaaagtacaccgccccacacatcc

SEQ ID NO: 143590 - DNA, 120 bp, Artificial Sequence
  ENSG00000104687_5 (sequence is synthesized)
tgatcgccacaggtggtatgccctccacccctcatgagagccagatccccggtgccagcttaggaataaccagcgatggattttttcagctggaagaattgcccggccgcagcgtcattg

SEQ ID NO: 143591 - DNA, 120 bp, Artificial Sequence
  ENSG00000104687_6 (sequence is synthesized)
ttggtgcaggttacattgctgtggagatggcagggatcctgtcagccctgggttctaagacatcactgatgatacggcatgataaggtacttagaagttttgattcaatgatcagcacca

SEQ ID NO: 143592 - DNA, 120 bp, Artificial Sequence
  ENSG00000104687_7 (sequence is synthesized)
actgcacggaggagctggagaacgctggcgtggaggtgctgaagttctcccaggtcaaggaggttaaaaagactttgtcgggcttggaagtcagcatggttactgcagttcccggtaggc

SEQ ID NO: 143593 - DNA, 120 bp, Artificial Sequence
  ENSG00000104687_8 (sequence is synthesized)
taccagtcatgaccatgattccagatgttgactgcctgctctgggccattgggcgggtcccgaataccaaggacctgagtttaaacaaactggggattcaaaccgatgacaagggtcata

SEQ ID NO: 143594 - DNA, 120 bp, Artificial Sequence
  ENSG00000104687_9 (sequence is synthesized)
tcatcgtagacgaattccagaataccaacgtcaaaggcatctatgcagttggggatgtatgtggaaaagctcttcttactccagttgcaatagctgctggccgaaaacttgcccatcgac

SEQ ID NO: 143595 - DNA, 120 bp, Artificial Sequence
  ENSG00000104687_10 (sequence is synthesized)
tttttgaatataaggaagattccaaattagattataacaacatcccaactgtggtcttcagccacccccctattgggacagtgggactcacggaagatgaagccattcataaatatggaa

SEQ ID NO: 143596 - DNA, 120 bp, Artificial Sequence
  ENSG00000104687_11 (sequence is synthesized)
tagaaaatgtgaagacctattcaacgagctttaccccgatgtatcacgcagttaccaaaaggaaaacaaaatgtgtgatgaaaatggtctgtgctaacaaggaagaaaaggtggttggga

SEQ ID NO: 143597 - DNA, 120 bp, Artificial Sequence
  ENSG00000104687_12 (sequence is synthesized)
gcagggttttgctgttgcagtgaagatgggagcaacgaaggcagactttgacaacacagtcgccattcaccctacctcttcagaagagctggtcacacttcgttgagaaccaggagacac

SEQ ID NO: 143598 - DNA, 120 bp, Artificial Sequence
  ENSG00000104687_13 (sequence is synthesized)
gtgtggcgggcagtgggacccatagatcttctgaaatgaaacaaataatcacattgacttactgtttgagttttatgtatttctttattttaatcaggatcttctgatagtggaaatttt

SEQ ID NO: 143599 - DNA, 120 bp, Artificial Sequence
  ENSG00000104687_14 (sequence is synthesized)
tagtacataatagaacttatttatggagttagaaatttgtagtgttatccaggattgattttcatttgatcacatctcacagtaattaatattttcaagttttttttttattaacagctc

SEQ ID NO: 143600 - DNA, 120 bp, Artificial Sequence
  ENSG00000104687_15 (sequence is synthesized)
tgtgctagttttttttttctgttttagcctcatcccaaatataaagctttgtgaagtacaattaacttaatgtacttgaatgaatagaacttgctactttttttttttttttttttgaga

SEQ ID NO: 143601 - DNA, 60 bp, Artificial Sequence
  ENSG00000104687_16 (sequence is synthesized)
cttcaggtgatccgcccacctcggcctcctgaggtgctgagattacaggcgtgagccact

SEQ ID NO: 143602 - DNA, 120 bp, Artificial Sequence
  ENSG00000104687_17 (sequence is synthesized)
ctgagattacaggcgtgagccactgtgccagcttgctaattttcacagaagttgatggcaattcttcacatgtaaacagtgccagtgcacagaacctttatatattttttgaagccagta

SEQ ID NO: 143603 - DNA, 120 bp, Artificial Sequence
  ENSG00000104687_18 (sequence is synthesized)
agtactgtgctctgcatataacaaagctgcttcaaggatgagacctttttctaaaagcatgtaatgtgagaagccggcctgccttattttcttttttcttttttaatgattaaaaatagt

SEQ ID NO: 143604 - DNA, 120 bp, Artificial Sequence
  ENSG00000104687_19 (sequence is synthesized)
ctttgggaggccgaggcaggaggattacttgagcctacaagtttgaggccagcatgcacagcatagcaagactgcatctctacagagagtaaaaaaaattacccgagtgtggtgatgtgc

SEQ ID NO: 143605 - DNA, 78 bp, Artificial Sequence
  ENSG00000104687_20 (sequence is synthesized)
gtttgaggccagcatgcacagcatagcaagactgcatctctacagagagtaaaaaaaattacccgagtgtggtgatgt

SEQ ID NO: 143606 - DNA, 75 bp, Artificial Sequence
  ENSG00000104687_21 (sequence is synthesized)
tatttttatgaggtgaagtgcatcaaacttgggaaagatttgaggaggctgggaacctcctggaaaaccactcct

SEQ ID NO: 143607 - DNA, 120 bp, Artificial Sequence
  ENSG00000104687_22 (sequence is synthesized)
agatttgaggaggctgggaacctcctggaaaaccactccttgaagaaagatatgagagacatttagaagtgattcctgctttcagaaggaggtggattcaaatacatcaaaagtcccttc

SEQ ID NO: 143608 - DNA, 120 bp, Artificial Sequence
  ENSG00000104687_23 (sequence is synthesized)
ctctgctaagtgtttatagttcaatgaataatttcaatatttgtatgtgttcttgtcattttatttttttctgaaaaacttccaaaaatttgaaaataaaattacagccttttcttctta

SEQ ID NO: 143609 - DNA, 120 bp, Artificial Sequence
  ENSG00000104687_24 (sequence is synthesized)
ttgcagatgaagtcattaagacctgagggaatggtgttctggaggcctgtggattttgtctttgaccttgattcagcttgattaagcctggcacctgcaggaacaggcctggagggtgca

SEQ ID NO: 143610 - DNA, 69 bp, Artificial Sequence
  ENSG00000104687_25 (sequence is synthesized)
gaggtgtgcaccaccacgcctggtcccatatagaaatcatccgtggccatgcagccttcacgagtgatc

SEQ ID NO: 143611 - DNA, 120 bp, Artificial Sequence
  ENSG00000104687_26 (sequence is synthesized)
aattggtctgaggtgcacttgggctttgggatgtttcccgacttaattggtctgaagtgcagcctgggctttgggattttcgggtgatctgaattgcagccaaggcgaccttgagtaggt

SEQ ID NO: 143612 - DNA, 120 bp, Artificial Sequence
  ENSG00000104689_0 (sequence is synthesized)
gtcatagccaagcacgctgcttcttggattgacctggcaggatggcgccaccaccagctagagtacatctaggtgcgttcctggcagtgactccgaatcccgggagcgcagcgagtggga

SEQ ID NO: 143613 - DNA, 120 bp, Artificial Sequence
  ENSG00000104689_1 (sequence is synthesized)
cagaggcagccgcggccacacccagcaaagtgtggggctcttccgcggggaggattgaaccacgaggcgggggccgaggagcgctccctacctccatgggacagcacggacccagtgccc

SEQ ID NO: 143614 - DNA, 120 bp, Artificial Sequence
  ENSG00000104689_2 (sequence is synthesized)
gggcccgggcagggcgcgccccaggacccaggccggcgcgggaagccagccctcggctccgggtccacaagaccttcaagtttgtcgtcgtcggggtcctgctgcaggtcgtacctagct

SEQ ID NO: 143615 - DNA, 120 bp, Artificial Sequence
  ENSG00000104689_3 (sequence is synthesized)
cagctgcaaccatcaaacttcatgatcaatcaattggcacacagcaatgggaacatagccctttgggagagttgtgtccaccaggatctcatagatcagaacatcctggagcctgtaacc

SEQ ID NO: 143616 - DNA, 120 bp, Artificial Sequence
  ENSG00000104689_4 (sequence is synthesized)
ggtgcacagagggtgtgggttacaccaatgcttccaacaatttgtttgcttgcctcccatgtacagcttgtaaatcagatgaagaagagagaagtccctgcaccacgaccaggaacacag

SEQ ID NO: 143617 - DNA, 120 bp, Artificial Sequence
  ENSG00000104689_5 (sequence is synthesized)
catgtcagtgcaaaccaggaactttccggaatgacaattctgctgagatgtgccggaagtgcagcagagggtgccccagagggatggtcaaggtcaaggattgtacgccctggagtgaca

SEQ ID NO: 143618 - DNA, 120 bp, Artificial Sequence
  ENSG00000104689_6 (sequence is synthesized)
tcgagtgtgtccacaaagaatcaggcaatggacataatatatgggtgattttggttgtgactttggttgttccgttgctgttggtggctgtgctgattgtctgttgttgcatcggctcag

SEQ ID NO: 143619 - DNA, 120 bp, Artificial Sequence
  ENSG00000104689_7 (sequence is synthesized)
gttgtggaggggaccccaagtgcatggacagggtgtgtttctggcgcttgggtctcctacgagggcctggggctgaggacaatgctcacaacgagattctgagcaacgcagactcgctgt

SEQ ID NO: 143620 - DNA, 120 bp, Artificial Sequence
  ENSG00000104689_8 (sequence is synthesized)
ccactttcgtctctgagcagcaaatggaaagccaggagccggcagatttgacaggtgtcactgtacagtccccaggggaggcacagtgtctgctgggaccggcagaagctgaagggtctc

SEQ ID NO: 143621 - DNA, 120 bp, Artificial Sequence
  ENSG00000104689_9 (sequence is synthesized)
agaggaggaggctgctggttccagcaaatggtgctgaccccactgagactctgatgctgttctttgacaagtttgcaaacatcgtgccctttgactcctgggaccagctcatgaggcagc

SEQ ID NO: 143622 - DNA, 120 bp, Artificial Sequence
  ENSG00000104689_10 (sequence is synthesized)
tggacctcacgaaaaatgagatcgatgtggtcagagctggtacagcaggcccaggggatgccttgtatgcaatgctgatgaaatgggtcaacaaaactggacggaacgcctcgatccaca

SEQ ID NO: 143623 - DNA, 120 bp, Artificial Sequence
  ENSG00000104689_11 (sequence is synthesized)
attcaggacctcttggtggactctggaaagttcatctacttagaagatggcacaggctctgccgtgtccttggagtgaaagactctttttaccagaggtttcctcttaggtgttaggagt

SEQ ID NO: 143624 - DNA, 120 bp, Artificial Sequence
  ENSG00000104689_12 (sequence is synthesized)
gactctttttaccagaggtttcctcttaggtgttaggagttaatacatattaggttttttttttttttaacatgtatacaaagtaaattcttagccaggtgtagtggctcatgcctgtaa

SEQ ID NO: 143625 - DNA, 120 bp, Artificial Sequence
  ENSG00000104689_13 (sequence is synthesized)
agaagttcaagaccagcctgaccaacatcgtgaaatgccgtctttacaaaaaaatacaaaaattaactggatgtgatggtgtgtgcatatattctcggctactcgggaggctgaggcagg

SEQ ID NO: 143626 - DNA, 120 bp, Artificial Sequence
  ENSG00000104689_14 (sequence is synthesized)
agattgcaccactgcactccagcctgggacacagagcaagactctgtctcaagataaaataaaataaacttgaaagaattattgcccgactgaggctcacatgccaaaggaaaatctggt

SEQ ID NO: 143627 - DNA, 120 bp, Artificial Sequence
  ENSG00000104689_15 (sequence is synthesized)
cccgactgaggctcacatgccaaaggaaaatctggttctcccctgagctggcctccgtgtgtttccttatcatggtggtcaattggaggtgttaatttgaatggattaaggaacacctag

SEQ ID NO: 143628 - DNA, 120 bp, Artificial Sequence
  ENSG00000104689_16 (sequence is synthesized)
aacactggtaaggcattatttctgggacattatttctgggcatgtcttcgagggtgtttccagaggggattggcatgcgatcgggtggactgagtggaaaagacctacccttaatttggg

SEQ ID NO: 143629 - DNA, 120 bp, Artificial Sequence
  ENSG00000104689_17 (sequence is synthesized)
ggggcaccgtccgacagactggggagcaagatagaagaaaacaaaaaaaaaaggaaaagcaaatccatctgatctcctggagctgggacactcttctgcctgtggacatcagagtctagg

SEQ ID NO: 143630 - DNA, 120 bp, Artificial Sequence
  ENSG00000104689_18 (sequence is synthesized)
atttctagcccttggactccagggcatacaccagtggcctcccgaaggatctaaggattttggccttgaactaagaattacaccatcggcttccctgggtcttaggtttttgggctggat

SEQ ID NO: 143631 - DNA, 120 bp, Artificial Sequence
  ENSG00000104689_19 (sequence is synthesized)
taagtcctgcttccagcatttcagggtctctgctgtgcagatggcctgttgtggaacttctcaacctccattatcagatgcattaattcctccaataagtcccatttcatatatagtcat

SEQ ID NO: 143632 - DNA, 120 bp, Artificial Sequence
  ENSG00000104689_20 (sequence is synthesized)
ttaccccacaacatttcagtcaagggaacagcatataagatggtggccgtccagtaagctaaggttaatttattaattatttaatttatttaccttgagttcaagtcacaattaaagtac

SEQ ID NO: 143633 - DNA, 120 bp, Artificial Sequence
  ENSG00000104689_21 (sequence is synthesized)
atatacctttggaaatttggacttttgtatataaaagtacttttttttggcgggggcagtgggcagctctcatcctaaacaaatgtgttatttggtacctatgcaaagatttggttaaaa

SEQ ID NO: 143634 - DNA, 120 bp, Artificial Sequence
  ENSG00000104689_22 (sequence is synthesized)
ggccaggcaggagcgacccgggcctggaggcagcagagccccctcccgcaggaggctgggcccggggactccaccccgttggctgctgcctggcgcgtctccctcctgcccacacctcac

SEQ ID NO: 143635 - DNA, 120 bp, Artificial Sequence
  ENSG00000104691_0 (sequence is synthesized)
cgcctgcaccaggcgcttccgccaccatggcttcacgtggggttgttggcattttcttcctctctgctgtcccccttgtgtgtctggagctccggcgtgggatcccggatataggaatca

SEQ ID NO: 143636 - DNA, 120 bp, Artificial Sequence
  ENSG00000104691_1 (sequence is synthesized)
aggattttcttttgctttgtggccggattttgctactgcttgctcttcttactttaactatttctgtgactacctcatggcttaactcatttaaatctccccaagtttatctgaaggaag

SEQ ID NO: 143637 - DNA, 120 bp, Artificial Sequence
  ENSG00000104691_2 (sequence is synthesized)
aagaagaaaagaatgagaaaagacaaaaacttgtgagaaaaaaacaacaagaagcacaaggagagaaggccagcagatacatagagaatgttttaaaacctcaccaggaaatgaaattga

SEQ ID NO: 143638 - DNA, 120 bp, Artificial Sequence
  ENSG00000104691_3 (sequence is synthesized)
gaaaactggaggagcgcttttatcaaatgacgggtgaagcctggaaattaagcagtggtcacaaacttgggggtgatgaaggtacaagtcagacatcttttgaaacatcaaacagagaag

SEQ ID NO: 143639 - DNA, 120 bp, Artificial Sequence
  ENSG00000104691_4 (sequence is synthesized)
cagcaaagagccagaacttgcctaaacctttaactgaatttccgtctcctgctgaacagcccacatgcaaggagattcctgatttacctgaagaaccttctcaaacagcagaagaagtag

SEQ ID NO: 143640 - DNA, 120 bp, Artificial Sequence
  ENSG00000104691_5 (sequence is synthesized)
ttactgttgctctccgatgtcccagtgggaatgtcctgaggagaaggtttttgaagtcctacagctcacaggtcttatttgactggatgacgagaattgggtaccacatatctctataca

SEQ ID NO: 143641 - DNA, 120 bp, Artificial Sequence
  ENSG00000104691_6 (sequence is synthesized)
tcctttcccagacggcctctggcagtggagggaggccagtcgctggaggacataggaataactgtggacactgtactcatcctggaggagaaggagcagaccaactaggaaagaagggag

SEQ ID NO: 143642 - DNA, 120 bp, Artificial Sequence
  ENSG00000104691_7 (sequence is synthesized)
agctccctgtttgcatgaagtcagttatgctatgaccttctggcacaataaaggcttcactttcaaatcacactataccttgattgagctcatggcagtaaactttgaacattgatatcc

SEQ ID NO: 143643 - DNA, 120 bp, Artificial Sequence
  ENSG00000104691_8 (sequence is synthesized)
atgggaataggattagaaaaggattgctttctatatataataatctgtggactgtgccattttacagtgtaccaaatgagaatgaggttgaaatgtatgcagtaaggtactcagtaatta

SEQ ID NO: 143644 - DNA, 120 bp, Artificial Sequence
  ENSG00000104691_9 (sequence is synthesized)
attggtattttttcccagctgacatgatttctcagtgttagaaaacaaacccttagaactttcctttctgcctcttcaatccatcttaccacacaatatttcatgattcaaattcttcaa

SEQ ID NO: 143645 - DNA, 120 bp, Artificial Sequence
  ENSG00000104691_10 (sequence is synthesized)
agtcttatacgcaggaatgtttattctgctgtatttctgtgaaattaaaaacttggaagaagcttcaaagctcttggaggctttaaagttctttctgttgggtgtgcattacagtttact

SEQ ID NO: 143646 - DNA, 120 bp, Artificial Sequence
  ENSG00000104691_11 (sequence is synthesized)
taactgatgtttgcgatttatataattttgccttgtattaaatgttacaaagttccaaatgaatcagtattttaaaaaataaaactatgaaagcattaaaatataggtgaatttttaaaa

SEQ ID NO: 143647 - DNA, 77 bp, Artificial Sequence
  ENSG00000104691_12 (sequence is synthesized)
gaccttttgctgggacaccccacggcagtcgggtgcgccaagagaacagatgctctactagctcagatctgccaaca

SEQ ID NO: 143648 - DNA, 120 bp, Artificial Sequence
  ENSG00000104691_13 (sequence is synthesized)
gcaggaatgttgcatagaacgaccgcctcttcggctgcgtggcttcggagcagctttgactacaactcccagactgcatcgcccctgcccccccacttccggagctgacttcacttcgag

SEQ ID NO: 143649 - DNA, 120 bp, Artificial Sequence
  ENSG00000104691_14 (sequence is synthesized)
aggcgcttccgccaccatggcttcacgtggggttgttggcattttcttcctctctgctgtcccccttgtgtgtctggagctccggcgtgggatcccggatataggtaagtgtgacttttt

SEQ ID NO: 143650 - DNA, 63 bp, Artificial Sequence
  ENSG00000104691_15 (sequence is synthesized)
ggttcaagcaattcttctgcctcagctaatttttgtttttgagacagagtctctctccaggct

SEQ ID NO: 143651 - DNA, 120 bp, Artificial Sequence
  ENSG00000104691_16 (sequence is synthesized)
acctatgtcttttaataattagcaaagcagtatctaagtcctttttagctgcttagctgttttatggaatgaaaggaattgcaaagagcaatggatcggagttcttatgtgaatatttct

SEQ ID NO: 143652 - DNA, 120 bp, Artificial Sequence
  ENSG00000104691_17 (sequence is synthesized)
acactgttgttgaagccagatcgttgccccagggcacttcagctcagaaagctgaactcattgctttaattcgggccttagaactcagtgaaggtgactcttaaatttgagaaacattgg

SEQ ID NO: 143653 - DNA, 120 bp, Artificial Sequence
  ENSG00000104691_18 (sequence is synthesized)
aatagtggattaattcggagtagcggtttttgtgatccacagatgaagcacagagaaaaggatagagatggagacacaaaaacattgatctcccaagctgtagagactgggtctcctttg

SEQ ID NO: 143654 - DNA, 120 bp, Artificial Sequence
  ENSG00000104691_19 (sequence is synthesized)
cagtgcacaggtcatccgagcacacggctgagcccggtaggcaaaggaaggaaggtccaggtcacagggcagcgaggcccagcacaatgaaggagaatggaaacacaccacacctcaatt

SEQ ID NO: 143655 - DNA, 120 bp, Artificial Sequence
  ENSG00000104691_20 (sequence is synthesized)
agaatgggatccaattcttttacaaaaatttttttctgattacaaaatttaagggaaaaagggaaagttcttccttcctacagactgacatgtaataaatggagatggaacacacaaaaa

SEQ ID NO: 143656 - DNA, 70 bp, Artificial Sequence
  ENSG00000104691_21 (sequence is synthesized)
cattgtatgtgtcagagagagaaaagatggcagttgggagttttaacccaaactgtggggccctggccga

SEQ ID NO: 143657 - DNA, 72 bp, Artificial Sequence
  ENSG00000104691_22 (sequence is synthesized)
agacggggtttttaaaggatggccccctaagctgactcttgggcaaaaccggaacataaaggccccccatgc

SEQ ID NO: 143658 - DNA, 70 bp, Artificial Sequence
  ENSG00000104691_23 (sequence is synthesized)
taaaggccgagtgctagactcactaagtaccaaagtttgctttgtgaaaatccccgtataaccattgaag

SEQ ID NO: 143659 - DNA, 79 bp, Artificial Sequence
  ENSG00000104691_24 (sequence is synthesized)
ttcccagtatcagagagccctgttgagcatgactgtgtagaagtgttggactcagtttactctagcagacctgacctcc

SEQ ID NO: 143660 - DNA, 120 bp, Artificial Sequence
  ENSG00000104691_25 (sequence is synthesized)
cagggtatgcggtggtaactctggacactgttgttgaagccagatcgttgccccagggcacttcagctcagaaagctgaactcattgctttaattcgggccttagaactcagtgaaggaa

SEQ ID NO: 143661 - DNA, 120 bp, Artificial Sequence
  ENSG00000104695_0 (sequence is synthesized)
gagagaaggggaaagacaagtcgggagaggccggtaggcgtgaggcgggcctgaagcggcagcgggcggccttcgtccggcgagagctaggccgaggacccgcgccgcgctccccggcac

SEQ ID NO: 143662 - DNA, 80 bp, Artificial Sequence
  ENSG00000104695_1 (sequence is synthesized)
ctcaccgcgtccttcaccgactcccgcggcgcgcggccgggcggggaagggcgggcgggggtctcctccaggctgcgcgc

SEQ ID NO: 143663 - DNA, 80 bp, Artificial Sequence
  ENSG00000104695_2 (sequence is synthesized)
cggccgccctacccggctcagtcctccccctgtgggacctggcgacggcggcggagggagaggggagcggcgcccgggcc

SEQ ID NO: 143664 - DNA, 120 bp, Artificial Sequence
  ENSG00000104695_3 (sequence is synthesized)
ggctggggctcgggatccgcatcgggatcgggccgccatggacgacaaggcgttcaccaaggagctggaccagtgggtcgagcagctgaacgagtgtaagcagctgaacgagaaccaagt

SEQ ID NO: 143665 - DNA, 120 bp, Artificial Sequence
  ENSG00000104695_4 (sequence is synthesized)
gcggacgctgtgcgagaaggcaaaggaaattttaacaaaagaatcaaatgtgcaagaggttcgttgccctgttactgtctgtggagatgtgcatggtcaatttcatgatcttatggaact

SEQ ID NO: 143666 - DNA, 120 bp, Artificial Sequence
  ENSG00000104695_5 (sequence is synthesized)
ctttagaattggtggaaaatcaccggatacaaactacttattcatgggtgactatgtagacagaggatattattcagtggagactgtgactcttcttgtagcattaaaggtgcgttatcc

SEQ ID NO: 143667 - DNA, 120 bp, Artificial Sequence
  ENSG00000104695_6 (sequence is synthesized)
agaacgcattacaatattgagaggaaatcacgaaagccgacaaattacccaagtatatggcttttatgatgaatgtctgcgaaagtatgggaatgccaacgtttggaaatattttacaga

SEQ ID NO: 143668 - DNA, 120 bp, Artificial Sequence
  ENSG00000104695_7 (sequence is synthesized)
tctctttgattatcttccacttacagctttagtagatggacagatattctgcctccatggtggcctctctccatccatagacacactggatcatataagagccctggatcgtttacagga

SEQ ID NO: 143669 - DNA, 120 bp, Artificial Sequence
  ENSG00000104695_8 (sequence is synthesized)
atctgttatggtcagatccagatgatcgtggtggatggggtatttcaccacgtggtgctggctacacatttggacaagacatttctgaaacctttaaccatgccaatggtctcacactgg

SEQ ID NO: 143670 - DNA, 120 bp, Artificial Sequence
  ENSG00000104695_9 (sequence is synthesized)
tttctcgtgcccaccagcttgtaatggagggatacaattggtgtcatgatcggaatgtggttaccattttcagtgcacccaattactgttatcgttgtgggaaccaggctgctatcatgg

SEQ ID NO: 143671 - DNA, 120 bp, Artificial Sequence
  ENSG00000104695_10 (sequence is synthesized)
aattagatgacactttaaaatattccttccttcaatttgacccagcgcctcgtcgtggtgagcctcatgttacacggcgcaccccagactacttcctataaatttctcctgggaaacctg

SEQ ID NO: 143672 - DNA, 120 bp, Artificial Sequence
  ENSG00000104695_11 (sequence is synthesized)
cctttgtatgtggaagtatacctggctttttaaaatatatgtatttaaaaacaaaaagcaacagtaatctatgtgtttctgtaacaaattgggatctgtcttggcattaaaccacatcat

SEQ ID NO: 143673 - DNA, 120 bp, Artificial Sequence
  ENSG00000104695_12 (sequence is synthesized)
ggaccaaatgtgccatactaatgatgagcatttagcacaatttgagactgaaatttagtacactatgttctaggtcagtctaacagtttgcctgctgtatttatagtaaccattttcctt

SEQ ID NO: 143674 - DNA, 120 bp, Artificial Sequence
  ENSG00000104695_13 (sequence is synthesized)
tggactgttcaagcaaaaaaggtaactaactgcttcatctccttttgcgcttatttggaaattttagttatagtgtttaactggcatggattaatagagttggagttttatttttaagaa

SEQ ID NO: 143675 - DNA, 120 bp, Artificial Sequence
  ENSG00000104695_14 (sequence is synthesized)
aaattcacaagctaacttccactaatccattatcctttattttattgaaatgtataattaacttaactgaagaaaaggttcttcttgggagtatgttgtcataacatttaaagagatttc

SEQ ID NO: 143676 - DNA, 120 bp, Artificial Sequence
  ENSG00000104695_15 (sequence is synthesized)
ccttcatttaaactaaattactgttttatgttgatctgcatatttctgtatatttgtcatgacagtgcttgcatcctatttggtgtactcagcaaataaacttttcattttaaacaaaaa

SEQ ID NO: 143677 - DNA, 120 bp, Artificial Sequence
  ENSG00000104695_16 (sequence is synthesized)
ggggaaaaaaaaaaaaagaaatttaatggtgggtccccaaggatggggataccattgaccagagaaggggtaaagaagaaaaaatgatggacaaaatatgtttaaatgttggcactattt

SEQ ID NO: 143678 - DNA, 120 bp, Artificial Sequence
  ENSG00000104695_17 (sequence is synthesized)
ggactgacacttttaaccattatttactctttgttaactgtttggagttagtaaaacaaatacattctcttttgttaattcatacatagatattctgcctccatggtggcctctctccat

SEQ ID NO: 143679 - DNA, 120 bp, Artificial Sequence
  ENSG00000104695_18 (sequence is synthesized)
aatgatctttatttcagattagtatatacttctgtaataaggcattatgacttaactaagaaacattcctcaccatttattacctaggtgaaaagaggaaaaacttgctggttttagcaa

SEQ ID NO: 143680 - DNA, 120 bp, Artificial Sequence
  ENSG00000104695_19 (sequence is synthesized)
aaaaagttacaaaaatagtaccccataattccctgtatgcttcattcagattcctgactgtaaatattttactatatttgctttatcattttgtgtctctcttcctcttcacccctcaca

SEQ ID NO: 143681 - DNA, 120 bp, Artificial Sequence
  ENSG00000104695_20 (sequence is synthesized)
ctttcttctgaaccatttgaatatctgttgcagacagatactcctttactaccaactttctatgtgtattttgtaaaattaaggacacactgtcacataaccaccgtatagttatcacag

SEQ ID NO: 143682 - DNA, 120 bp, Artificial Sequence
  ENSG00000104695_21 (sequence is synthesized)
ttgggaaatttgtgttcatatagtactgttatttaatatgaacactttattcaaattttgctaattgtctcactaatgtctttaatagcaaaatttaattttttgtgcatactgtatgtg

SEQ ID NO: 143683 - DNA, 120 bp, Artificial Sequence
  ENSG00000104695_22 (sequence is synthesized)
catagtcgaatccaaagattaggttgtattcattctactttgatgtggaaatcctccgattttcattgttttccacattcttgacattttggaagagtaggagcattttatcttacagaa

SEQ ID NO: 143684 - DNA, 120 bp, Artificial Sequence
  ENSG00000104695_23 (sequence is synthesized)
atatccctcagttggggtttgcctgatgttttccttgcagttagggattcaatgtatgcatttttggcagtcatgacatagaaagatggtgtgtcctcctccgtgcattgtatcaagtgg

SEQ ID NO: 143685 - DNA, 81 bp, Artificial Sequence
  ENSG00000104695_24 (sequence is synthesized)
tgaagtgatctcgtgcacagcccctattgactttctaataattttaagatgaacttctagagaagaatattgtaccactgc

SEQ ID NO: 143686 - DNA, 120 bp, Artificial Sequence
  ENSG00000104695_25 (sequence is synthesized)
ttttaagatgaacttctagagaagaatattgtaccactgctgtactttgaaataatcacaccggagtgtcaacgatcacttgaggaagctttctgtatttgtcaaaagagattattttta

SEQ ID NO: 143687 - DNA, 120 bp, Artificial Sequence
  ENSG00000104695_26 (sequence is synthesized)
atgaggagtatagcaaagcccctctccagcaaaaataaccattagctggagaacattatttttaaaaaataatttttcaaagcttttggaaattgtcctaagggcatacagcaggtggag

SEQ ID NO: 143688 - DNA, 120 bp, Artificial Sequence
  ENSG00000104695_27 (sequence is synthesized)
aagtacggcaaagccaaacactgacattggggtttgtagtgaaagtgaggcatttattgcattgcaccaagcaagaagaatcaggcagctcatgcttaagaccccaactccctgatggtt

SEQ ID NO: 143689 - DNA, 120 bp, Artificial Sequence
  ENSG00000104695_28 (sequence is synthesized)
ggtttacaggtaaggggttttttgtgtgcttttttttttttttttgaaacagagtttcactcttgtcacccatgctggagtgcaatggcgagatttcggctcactgcaacctccacctcc

SEQ ID NO: 143690 - DNA, 120 bp, Artificial Sequence
  ENSG00000104695_29 (sequence is synthesized)
agatttcaagcatagatacggcaaaacaacaattagcgagctgcatttaacagactcctaggcccacgaattgcacagtattctttacaggtacacaaactattaaagatggagacctta

SEQ ID NO: 143691 - DNA, 120 bp, Artificial Sequence
  ENSG00000104695_30 (sequence is synthesized)
tatagtaatatagacgactacatttccacagagagtacctgtagtttttgagtttagttttttttaaatgtgtctgtgtcaaaatcataatattataatgaaataatgaatttgttttta

SEQ ID NO: 143692 - DNA, 70 bp, Artificial Sequence
  ENSG00000104695_31 (sequence is synthesized)
tgcaacctccacctcccaagatgatgatgatgattgagacatgatctcactctgtcacccaggctggagc

SEQ ID NO: 143693 - DNA, 120 bp, Artificial Sequence
  ENSG00000104695_32 (sequence is synthesized)
gagcacagaggtgagatcatggctcactgcaacctcaacctgtggggctccagtgatcctcccacctcagtctccagagtagctgagactacaggtgcaggcaatcacgcctggctaatt

SEQ ID NO: 143694 - DNA, 120 bp, Artificial Sequence
  ENSG00000104714_0 (sequence is synthesized)
ggaaggcacggcgctcagctcaggaccgcgcgccgtggtctgaggtccgcggcagggtcccgcatggcggcgcacaggaagcacgtgtttgtggagaaggtgctgcagagactttttcct

SEQ ID NO: 143695 - DNA, 120 bp, Artificial Sequence
  ENSG00000104714_1 (sequence is synthesized)
cctgttccaagtggccaaggaaagagggaaccccagacgctggccgtccaaaatccaccaaagaaagtgacctctgagaaagtgagccagaaacatgctgagcctttgacagacactggc

SEQ ID NO: 143696 - DNA, 120 bp, Artificial Sequence
  ENSG00000104714_2 (sequence is synthesized)
tctgagaccccgactgcccgacggctctacactgccagcgggcctcctgagggctacgtcccctgttggccggagcccagcagctgtgggagccccgagaacgcctccagcggggatgac

SEQ ID NO: 143697 - DNA, 120 bp, Artificial Sequence
  ENSG00000104714_3 (sequence is synthesized)
acagaagatcaggatcctcatgaccagccaaagagaagaagaattaggaagcataaatcaaagaaaaaatttaaaaatcccaataatgttcttatagaacaagcagaattagagaaacag

SEQ ID NO: 143698 - DNA, 120 bp, Artificial Sequence
  ENSG00000104714_4 (sequence is synthesized)
cagagtctgttacaggagaaatctcagcgacagcacacagatggcaccacaataagcaaaaataaaaaaaggaaactgaaaaagaaacagcaaattaaaaggaagaaagcagccggcttg

SEQ ID NO: 143699 - DNA, 120 bp, Artificial Sequence
  ENSG00000104714_5 (sequence is synthesized)
gcagcaaaggctgctggtgtcagtttcatgtaccagcccgaggacagcagcaatgaaggggaaggcgtgggagaggcttgtgaggaggatggtgtggacaccagcgaggaagacccgaca

SEQ ID NO: 143700 - DNA, 120 bp, Artificial Sequence
  ENSG00000104714_6 (sequence is synthesized)
ctggccggggaggaagacgttaaagataccagggaggaagatggtgcggacgctagcgaggaagacctgacacgggccaggcaggaagagggtgcggacgccagtgaggaagatccgaca

SEQ ID NO: 143701 - DNA, 120 bp, Artificial Sequence
  ENSG00000104714_7 (sequence is synthesized)
cggacgccagcgaggaagacccgacatgggctggggaggaagagggtgcagactccggggaggaggacggtgcagacgccagcgaggaagatgatacaattaccaatgaaaaggcacaca

SEQ ID NO: 143702 - DNA, 120 bp, Artificial Sequence
  ENSG00000104714_8 (sequence is synthesized)
gtattctaaattttttgaagtcaacacaggaaatgtatttttatgacggtgtctccagagatgcagcttcagctgccctcgcagatgccgctgaggagctgctggaccgccttgcgtcac

SEQ ID NO: 143703 - DNA, 120 bp, Artificial Sequence
  ENSG00000104714_9 (sequence is synthesized)
acagcatgctgccctcagacgtgtccatcctgtaccacatgaaaacgctgctgctcctgcaagatactgagagattgaagcatgctctggaaatgttcccagaacattgcacgatgcctc

SEQ ID NO: 143704 - DNA, 120 bp, Artificial Sequence
  ENSG00000104714_10 (sequence is synthesized)
ctgaccatgccagagtaatctcagctttctttagttactggatcacacatatccttcctgagaagagcagtgactaaaatggaatatctctttaagaacagctcctctttaacaaaaaaa

SEQ ID NO: 143705 - DNA, 120 bp, Artificial Sequence
  ENSG00000104714_11 (sequence is synthesized)
cttaaaagacaaatgtgagatgggcttagagttagttctctgggaacttgaaagacatttatgccatattatttattcacgtgtttgttcctggtgggcaagatgccatctgaggcttca

SEQ ID NO: 143706 - DNA, 120 bp, Artificial Sequence
  ENSG00000104714_12 (sequence is synthesized)
gatgagaaattggggtaaaatggaaatttttcacttatttgcaattatatatatcttgaattactacataaaacttgattctgtttctctacttattgtaaaaattgaaaatggacattc

SEQ ID NO: 143707 - DNA, 120 bp, Artificial Sequence
  ENSG00000104714_13 (sequence is synthesized)
tgttaagttaaatgtatagtttgaagctcatatatttttatgaagttttgaatcaccttgtatctgaaagtctctgctttaagaatgctttctgggtattaaaatgttctagtttaagta

SEQ ID NO: 143708 - DNA, 120 bp, Artificial Sequence
  ENSG00000104714_14 (sequence is synthesized)
taaccagctgtggtgctgacttggacaattccaggtcaagaggaactgtctactttcgactttgtgtgatagtaactttttaagcagtggaccgggagcccaagactcagatgcagcaag

SEQ ID NO: 143709 - DNA, 120 bp, Artificial Sequence
  ENSG00000104714_15 (sequence is synthesized)
ctttgcaaggctgacgagagctgagatcttcagtggccgatgggtacagggctgctgggagcgtagccacgtctgctccaaggtggcttgaatgaggcagtgcccaagtccttttgactg

SEQ ID NO: 143710 - DNA, 120 bp, Artificial Sequence
  ENSG00000104714_16 (sequence is synthesized)
gctgaggtgagcctgtggctcagtcacagtttgtccctctcctaataagtgcatttcccagacagcagctccttggtgtcatgcaactgaggaacctaattggctgggtgggttgttccc

SEQ ID NO: 143711 - DNA, 120 bp, Artificial Sequence
  ENSG00000104714_17 (sequence is synthesized)
atccaacttccacctgtcacgaaggatgctttttcagatcagtctccacagctaccatcttgtcgggcacagagccgggcatcaacaagtgtatgttgaataaagaatgaattgatgaaa

SEQ ID NO: 143712 - DNA, 120 bp, Artificial Sequence
  ENSG00000104714_18 (sequence is synthesized)
gatactctcatcgaggtttgcctctgaaagacttacacgccaccaaaacagcaatgagttggaaaatatgacactgcacatatggcatgggagaatagagtcccagagagaaacaggctt

SEQ ID NO: 143713 - DNA, 120 bp, Artificial Sequence
  ENSG00000104714_19 (sequence is synthesized)
cctgcatctctgcttgatataaaaatatttcacataatatatgcagaaatgcatgtgcagtctaagtttccggacttgggagctgtcaactcttggagccaaattttcctaagtttaaat

SEQ ID NO: 143714 - DNA, 120 bp, Artificial Sequence
  ENSG00000104714_20 (sequence is synthesized)
agaaatgaattcatttcttcctcttttccttctcctctactgctgtggtagatggtaaatttttgcttacctccaactctctggtaccttattgaacccctgacgtggtgatgacgactt

SEQ ID NO: 143715 - DNA, 120 bp, Artificial Sequence
  ENSG00000104714_21 (sequence is synthesized)
ttattttctgccaccttcaccgggcatccttttcatgcaaactgttgtgtgctggagcagctgtgctcatgtcttcccaatgccgtgtgcggtgacacaagctgtggtgagggtattcag

SEQ ID NO: 143716 - DNA, 120 bp, Artificial Sequence
  ENSG00000104714_22 (sequence is synthesized)
gccacagaaacctgcaaatgctgaaaatcagaaattcaggctgttgagccattcacctgcacaccactgagtgcagagcagcccacctggcccagggctggcgtcccagaggaggagtgg

SEQ ID NO: 143717 - DNA, 120 bp, Artificial Sequence
  ENSG00000104714_23 (sequence is synthesized)
aggagggtccgtggcacccgtcagtggcacctatcccagaggaggagtgaaggtgggtccgtggcacccgtcccagagaaggagtgaaggaggctctgcagattttgtggagggagtttc

SEQ ID NO: 143718 - DNA, 120 bp, Artificial Sequence
  ENSG00000104714_24 (sequence is synthesized)
agagtaagtgtcgggagtggtttctgtccgtagaaaccacattgctgaggggtcaagaccagcatgttagagaagccaggtagcaaacagttacataaccacggtatgatgatgccgtgg

SEQ ID NO: 143719 - DNA, 120 bp, Artificial Sequence
  ENSG00000104714_25 (sequence is synthesized)
cactggtgcagggagccgggggctgcagggaccacaaggctggagtcacagcgtgcagagcatatgggtgctggaggagctgccttcatgcagaacgccctcatccgtcaaggagctgtt

SEQ ID NO: 143720 - DNA, 120 bp, Artificial Sequence
  ENSG00000104714_26 (sequence is synthesized)
ggaaggctggtggggaccccaccctggggcgcttgctccctagctgaggagctggaaaagaagccagatactcggtgagatgcgtcatagagctgcagatagatcctggagatgaggctg

SEQ ID NO: 143721 - DNA, 120 bp, Artificial Sequence
  ENSG00000104714_27 (sequence is synthesized)
tggaggagcgggaagaggagggtgttgttgcagccaagtgcgcatgcgctgagatgggtgaacccatgtgtttgggaactgcgaggagcccggtggctggaccaggggatggatgtgagt

SEQ ID NO: 143722 - DNA, 120 bp, Artificial Sequence
  ENSG00000104714_28 (sequence is synthesized)
tgcagaaggtggagaaggtgaagaggtgacagggccaggcacatgggaggagcccggtggctggaccaggggatgcacgtgacagggcgagaggcattgagtgagtctcagaagggggaa

SEQ ID NO: 143723 - DNA, 120 bp, Artificial Sequence
  ENSG00000104714_29 (sequence is synthesized)
aggtgacaggaccaggcacatgggaccccgggcatgtgagccttgtgggcttctacgcagacagagacaggaggttcctggaagctatgaggcttctgggctgttatcttgaggctggat

SEQ ID NO: 143724 - DNA, 120 bp, Artificial Sequence
  ENSG00000104714_30 (sequence is synthesized)
ggaggagatagagaatggagaccagtctggggctgctgaggacctgctgagagatacctgcagcgtggaccaggtgggggtggctgaggatttgccaagaggtacttgcagcatggacca

SEQ ID NO: 143725 - DNA, 120 bp, Artificial Sequence
  ENSG00000104714_31 (sequence is synthesized)
ggttggggttgctgaggacctgctgagaggggcctgcagcgtggaccaaggtgcagccacaggttaggcagctgtagccaacgtccaggtggaccatggaggtagaaccagtgggagctg

SEQ ID NO: 143726 - DNA, 120 bp, Artificial Sequence
  ENSG00000104714_32 (sequence is synthesized)
ccgagtggccggtgaggcactgggaggaccaggtcaccgcgaggaggaggaggggctcccagaaagatagggtttgaggtgagaggccctgcccagagcgcagtgctgggcagctatgca

SEQ ID NO: 143727 - DNA, 120 bp, Artificial Sequence
  ENSG00000104714_33 (sequence is synthesized)
ggtgccagtcagacctcaggttccagctgaggctcaagagggccataaggcccggagtgcagggaggagagagatcagggacagtgagtacagatgcccaccaggagcgtgaccagggac

SEQ ID NO: 143728 - DNA, 120 bp, Artificial Sequence
  ENSG00000104714_34 (sequence is synthesized)
catgagaaacgacactggaggaggaagcagggcccgcgggcgacggaagagagaggaggggccccagcaggaaggtggcagtgctcctgagaaggcacctgtgtgtgcggagagggcggc

SEQ ID NO: 143729 - DNA, 120 bp, Artificial Sequence
  ENSG00000104714_35 (sequence is synthesized)
gttggccccaggcgggcatctgtttctggtgggttgtcaggcctcttacagcaagtacttaacaaacttagatttccataatcagatttatctcaaaccgcaaaaaaaagctgattttat

SEQ ID NO: 143730 - DNA, 120 bp, Artificial Sequence
  ENSG00000104714_36 (sequence is synthesized)
tatgttaaactgataggagatttttatgagagatgaaagtaagcgattttaactttttaatttttttaatttttgctctgtttctcacacttgaggcttttctgaaattcaccaaaagag

SEQ ID NO: 143731 - DNA, 120 bp, Artificial Sequence
  ENSG00000104714_37 (sequence is synthesized)
ttttggcagttgtggggaatttaccagaaccccccattattaaaacaattggtttcttatattaaaatcatcagacaggttttgtgtacacagacatttatgttaagccactgatagaac

SEQ ID NO: 143732 - DNA, 120 bp, Artificial Sequence
  ENSG00000104714_38 (sequence is synthesized)
taaactgtgtgtaggaacctgttttctctaagaaaggactcctttgagttctgtaggatatgtgcttaaaggttttctgtgtcaagctattttatgaaataaaattttacaaacaatgaa

SEQ ID NO: 143733 - DNA, 80 bp, Artificial Sequence
  ENSG00000104714_39 (sequence is synthesized)
ccgagcgcggccagggatgcgcggagcccggcgaggagcgcaacgcgcgacccccgagcacaggctgtccctggggtccc

SEQ ID NO: 143734 - DNA, 80 bp, Artificial Sequence
  ENSG00000104714_40 (sequence is synthesized)
ccccgcccccaaccctgacgccctcggggcgtccccgcgggtccgacacaccgcgccctccccgcctcgacggctctcgg

SEQ ID NO: 143735 - DNA, 120 bp, Artificial Sequence
  ENSG00000104714_41 (sequence is synthesized)
ctccagcaaatgacccatcgttttccaccagtgtctctgtttctatgtaaaattatagattaaacgccaagtcctctgcctccacctgtccaggcttttattggctcttgtcgaaatcaa

SEQ ID NO: 143736 - DNA, 120 bp, Artificial Sequence
  ENSG00000104714_42 (sequence is synthesized)
ccaggtccatccccaaggaaccaacaccgatgacatggactcaggaatcttataacctacgtggactctttccatccgtacattgtcgtgcacatgccactcatcacctggcgtgcccag

SEQ ID NO: 143737 - DNA, 120 bp, Artificial Sequence
  ENSG00000104714_43 (sequence is synthesized)
atcctcgcagggcaacaccctgtgataattccaggtgattctctacatctgcagcttgagcatctgcagtggccatgagcagagccagacagcaggagctgggccctggacgactccacg

SEQ ID NO: 143738 - DNA, 120 bp, Artificial Sequence
  ENSG00000104714_44 (sequence is synthesized)
ggcaacaccctgtgataattccaggtgattctctacatctgcagcttgaggtgggaagtctgaagctcagagagcctgggccaatggtacaggtcacacagcacatcagtggctacatgt

SEQ ID NO: 143739 - DNA, 120 bp, Artificial Sequence
  ENSG00000104714_45 (sequence is synthesized)
gagctcagacctgggtctgctgctgtctgtcttcccaatatccatgaccttgactgatgcaggtgtctagggatacgtccatccccgtcctgctggagcccagagcacggaagcctggcc

SEQ ID NO: 143740 - DNA, 120 bp, Artificial Sequence
  ENSG00000104714_46 (sequence is synthesized)
cgagagcttggcagaataaataacttctttaaacaattttacggcatgaagaaatctggaccagtttattaaatgggatttctgccacaaaccttggaagaatcacatcatcttagccca

SEQ ID NO: 143741 - DNA, 120 bp, Artificial Sequence
  ENSG00000104714_47 (sequence is synthesized)
aggtgaaaactgtgttgcgtaacaaagaacatgactgcgctccacacatacatcattgcccggcgaggcgggacacaagtcaacgacggaacacttgagacaggcctacaactgtgcacg

SEQ ID NO: 143742 - DNA, 120 bp, Artificial Sequence
  ENSG00000104714_48 (sequence is synthesized)
gttcagaagcaggtttaagccatacttgctgcagtgagactacatttctgtctaaagaagatgtccctgacttgatctgtttttcagctccagttcccagatgtgcgtgttgtggtcccc

SEQ ID NO: 143743 - DNA, 120 bp, Artificial Sequence
  ENSG00000104714_49 (sequence is synthesized)
tgggccaggggaggcgtctcaccagacagaggtgtagacgggccaggtttccacagtcgttcatgcagtggtattttgtgctgagctctgttctgattctctcttctggtagcttctcat

SEQ ID NO: 143744 - DNA, 120 bp, Artificial Sequence
  ENSG00000104714_50 (sequence is synthesized)
ttctgtgtggaagcgtaggtttgagaccttccttaagagaggaaagcttatctttagtttatagaaataaaaacaaaactgtatttccaagcaaaactgactttatgtaggtgtctccag

SEQ ID NO: 143745 - DNA, 120 bp, Artificial Sequence
  ENSG00000104714_51 (sequence is synthesized)
tctgcaagtcctgtgtgtgggcgttgggtgagggtctggggaaaggacctggtggagcccagagaggcagaaaaaccagcctcacaggttgagaaaccaaaagcagagcctggagcccag

SEQ ID NO: 143746 - DNA, 120 bp, Artificial Sequence
  ENSG00000104714_52 (sequence is synthesized)
tgagcacagacagagccggggctggcaggttcagaggtcgcagcctggagcccagtgagcacagacattagagccggggccggcaggttcagaggtctcagcctggagcccagtgagcgc

SEQ ID NO: 143747 - DNA, 120 bp, Artificial Sequence
  ENSG00000104714_53 (sequence is synthesized)
gccaagctgtgctttcctcctccacggcacagctcgggttggggttccagagggtcccagctggccctggaaggtaccttactctaggcaagaatgaacaggttccaaccgccagcattt

SEQ ID NO: 143748 - DNA, 120 bp, Artificial Sequence
  ENSG00000104714_54 (sequence is synthesized)
ccttagctctccctggacagcctccgagattaagagaccaaaaactccatgatgtgatataaatcagcaaatataaaaaacaaaatcttcactctgcaactgagagacaggacaggagtc

SEQ ID NO: 143749 - DNA, 120 bp, Artificial Sequence
  ENSG00000104714_55 (sequence is synthesized)
caggggctcaggatgaggatggcatcgcgatgagagacagacgccagctggaacaccctctaggcaggccaccctctgggcaggccgtcagccacagttccatgtttaggaggaccttga

SEQ ID NO: 143750 - DNA, 120 bp, Artificial Sequence
  ENSG00000104714_56 (sequence is synthesized)
caaggtcattcataataaaattattccccggcagagcatcacttctcggagggaactgtgtctctgaactgtgttcagtttttgtcccggggagctctgtctggtgctcacctttgtacc

SEQ ID NO: 143751 - DNA, 120 bp, Artificial Sequence
  ENSG00000104714_57 (sequence is synthesized)
tgcagcaggtgcactgggcaccatgttattagtgtctcagagctgagttcatgtgcatttcttcacctaagaacccactcacaatgaccccaccccagctcctgcagacccggcagaggc

SEQ ID NO: 143752 - DNA, 120 bp, Artificial Sequence
  ENSG00000104714_58 (sequence is synthesized)
taggacgtggctcaggagacaagtagggtctttagagaagccccccggtcactccctttcaagccataagttcccaggtcctcaatagttggctctgagtagaattgtcagagaatggga

SEQ ID NO: 143753 - DNA, 120 bp, Artificial Sequence
  ENSG00000104714_59 (sequence is synthesized)
ttttcttaaccatcacaatttccaagtagactcaggcctaactcccagcaatttgtatgtcagactctacagacaattctgtgctgtctatttttgctcatctttaaaacagccacgaaa

SEQ ID NO: 143754 - DNA, 120 bp, Artificial Sequence
  ENSG00000104714_60 (sequence is synthesized)
tatgcagcttcctttccctgagaaaatggcaaagaaaattcaacacagaaggccagggagggtgtgtggaaacgattcacatgttcaaaagatttatatgtgtagaagaaagctgtgaag

SEQ ID NO: 143755 - DNA, 120 bp, Artificial Sequence
  ENSG00000104714_61 (sequence is synthesized)
gtgcggggttcggtcagcctcacacacgtggcaggagtttctctctggacggcggccgcccacacctggccgacaggagcctgtcttcagcaactttcagttaacgcgtccctcttgccc

SEQ ID NO: 143756 - DNA, 120 bp, Artificial Sequence
  ENSG00000104714_62 (sequence is synthesized)
catgcttgtcctgccacacaaatgtgaaaatgcaacgttacaaagatctgtgcctcagacaccatttgaacacagagaaactcgtgggcttatgtgactacacttttcaggttacggaat

SEQ ID NO: 143757 - DNA, 120 bp, Artificial Sequence
  ENSG00000104714_63 (sequence is synthesized)
ttctttaaggtgtacccttgagtttaatatacttattaataacttatcattacagagaaaaaattaccagaagtacagggtgtttttaacggactttcttctcttgcacattgctgggca

SEQ ID NO: 143758 - DNA, 120 bp, Artificial Sequence
  ENSG00000104714_64 (sequence is synthesized)
tggcgtgtactgtgacagggcggagtgatgggctgagaatgtgtgtgtgtctccaacagttcccaaacgtctacattttcaagaaaaaggcaatctacatcatctggaaaattgtaactt

SEQ ID NO: 143759 - DNA, 120 bp, Artificial Sequence
  ENSG00000104714_65 (sequence is synthesized)
agtaattaattaggataatttccctaggttctctgtgctgcatgagaccacagcgtattcattaaagaggaaagctgaatattggcggaaaacagggttgtaaatttgtaacaagttttt

SEQ ID NO: 143760 - DNA, 120 bp, Artificial Sequence
  ENSG00000104714_66 (sequence is synthesized)
ctatcagaaaatgaaatgcaattttctgtcctctctgagcttttaccacatagctcttagcaatgggtgttttttctgtcattccactcaattctcactcgagtaaacctccaagcaata

SEQ ID NO: 143761 - DNA, 120 bp, Artificial Sequence
  ENSG00000104714_67 (sequence is synthesized)
agaatgttgtctttcctgtttagactagactgactacctttccaggacagtccattaagttgatttccaatggtgaagggtcagacacgcctcccctgggcagatcagggatagttcata

SEQ ID NO: 143762 - DNA, 120 bp, Artificial Sequence
  ENSG00000104714_68 (sequence is synthesized)
gcatttgccaaatagctgtctgcagctgcagccatcacctccgtaatcaacactgccattgtctgagccttccctttgcaggaatggtgtcagtgcacccaggcctcgtagagatgacag

SEQ ID NO: 143763 - DNA, 120 bp, Artificial Sequence
  ENSG00000104714_69 (sequence is synthesized)
ccaccccaggcactattgtgaccattgctttgatcattgttctgtttatgactgaggaaagcagggcttaggaagactaatcttagttatctctttatcccagcaatcggcacacatctg

SEQ ID NO: 143764 - DNA, 120 bp, Artificial Sequence
  ENSG00000104714_70 (sequence is synthesized)
tggatcaataaacattgtattaaaatgatgaacacaactgatctcccttaacctgattttccaggagtcctaagcagacttaaagccaagaaaataagaagaggaaagagagaggggctg

SEQ ID NO: 143765 - DNA, 120 bp, Artificial Sequence
  ENSG00000104722_0 (sequence is synthesized)
gctgtgacagccacacgccccaaggcctccaagatgagctacacgttggactcgctgggcaacccgtccgcctaccggcgggtaaccgagacccgctcgagcttcagccgcgtcagcggc

SEQ ID NO: 143766 - DNA, 120 bp, Artificial Sequence
  ENSG00000104722_1 (sequence is synthesized)
tccccgtccagtggcttccgctcgcagtcgtggtcccgcggctcgcccagcaccgtgtcctcctcctataagcgcagcatgctcgccccgcgcctcgcttacagctcggccatgctcagc

SEQ ID NO: 143767 - DNA, 120 bp, Artificial Sequence
  ENSG00000104722_2 (sequence is synthesized)
tccgccgagagcagccttgacttcagccagtcctcgtccctgctcaacggcggctccggacccggcggcgactacaagctgtcccgctccaacgagaaggagcagctgcaggggctgaac

SEQ ID NO: 143768 - DNA, 120 bp, Artificial Sequence
  ENSG00000104722_3 (sequence is synthesized)
gaccgctttgccggctacatagagaaggtgcactacctggagcagcagaataaggagattgaggcggagatccaggcgctgcggcagaagcaggcctcgcacgcccagctgggcgacgcg

SEQ ID NO: 143769 - DNA, 120 bp, Artificial Sequence
  ENSG00000104722_4 (sequence is synthesized)
tacgaccaggagatccgcgagctgcgcgccaccctggagatggtgaaccacgagaaggctcaggtgcagctggactcggaccacctggaggaagacatccaccggctcaaggagcgcttt

SEQ ID NO: 143770 - DNA, 120 bp, Artificial Sequence
  ENSG00000104722_5 (sequence is synthesized)
gaggaggaggcgcggttgcgcgacgacactgaggcggccatccgcgcgctgcgcaaagacatcgaggaggcgtcgctggtcaaggtggagctggacaagaaggtgcagtcgctgcaggat

SEQ ID NO: 143771 - DNA, 120 bp, Artificial Sequence
  ENSG00000104722_6 (sequence is synthesized)
gaggtggccttcctgcggagcaaccacgaggaggaggtggccgaccttctggcccagatccaggcatcgcacatcacggtggagcgcaaagactacctgaagacagacatctcgacggcg

SEQ ID NO: 143772 - DNA, 120 bp, Artificial Sequence
  ENSG00000104722_7 (sequence is synthesized)
ctgaaggaaatccgctcccagctcgaaagccactcagaccagaatatgcaccaggccgaagagtggttcaaatgccgctacgccaagctcaccgaggcggccgagcagaacaaggaggcc

SEQ ID NO: 143773 - DNA, 120 bp, Artificial Sequence
  ENSG00000104722_8 (sequence is synthesized)
atccgctccgccaaggaagagatcgccgagtaccggcgccagctgcagtccaagagcatcgagctagagtcggtgcgcggcaccaaggagtccctggagcggcagctcagcgacatcgag

SEQ ID NO: 143774 - DNA, 120 bp, Artificial Sequence
  ENSG00000104722_9 (sequence is synthesized)
gagcgccacaaccacgacctcagcagctaccaggacaccatccagcagctggaaaatgagcttcggggcacaaagtgggaaatggctcgtcatttgcgcgaataccaggacctcctcaac

SEQ ID NO: 143775 - DNA, 120 bp, Artificial Sequence
  ENSG00000104722_10 (sequence is synthesized)
gtcaagatggctctggatatagaaatcgctgcgtacagaaaactcctggagggtgaagagactagatttagcacatttgcaggaagcatcactgggccactgtatacacaccgaccccca

SEQ ID NO: 143776 - DNA, 120 bp, Artificial Sequence
  ENSG00000104722_11 (sequence is synthesized)
atcacaatatccagtaagattcagaaacccaaggtggaagctcccaagcttaaggtccaacacaaatttgtcgaggagatcatagaggaaaccaaagtggaggatgagaagtcagaaatg

SEQ ID NO: 143777 - DNA, 120 bp, Artificial Sequence
  ENSG00000104722_12 (sequence is synthesized)
gaagaggccctgacagccattacagaggaattggccgtttccatgaaggaagagaagaaagaagcagcagaagaaaaggaagaggaacccgaagctgaagaagaagaagtagctgccaaa

SEQ ID NO: 143778 - DNA, 120 bp, Artificial Sequence
  ENSG00000104722_13 (sequence is synthesized)
ttaaagaagaggaaggggaaaaggaggaagaagaaggccaggaagaagaggaggaagaagatgagggagctaagtcagaccaagccgaagagggaggatccgagaaggaaggctctagtg

SEQ ID NO: 143779 - DNA, 120 bp, Artificial Sequence
  ENSG00000104722_14 (sequence is synthesized)
aaaaagaggaaggtgagcaggaagaaggagaaacagaagctgaagctgaaggagaggaagccgaagctaaagaggaaaagaaagtggaggaaaagagtgaggaagtggctaccaaggagg

SEQ ID NO: 143780 - DNA, 120 bp, Artificial Sequence
  ENSG00000104722_15 (sequence is synthesized)
agctggtggcagatgccaaggtggaaaagccagaaaaagccaagtctcctgtgccaaaatcaccagtggaagagaaaggcaagtctcctgtgcccaagtcaccagtggaagagaaaggca

SEQ ID NO: 143781 - DNA, 120 bp, Artificial Sequence
  ENSG00000104722_16 (sequence is synthesized)
agtctcctgtgcccaagtcaccagtggaagagaaaggcaagtctcctgtgccgaaatcaccagtggaagagaaaggcaagtctcctgtgtcaaaatcaccagtggaagagaaagccaaat

SEQ ID NO: 143782 - DNA, 120 bp, Artificial Sequence
  ENSG00000104722_17 (sequence is synthesized)
ctcctgtgccaaaatcaccagtggaagaggcaaagtcaaaagcagaagtggggaaaggtgaacagaaagaggaagaagaaaaggaagtcaaggaagctcccaaggaagagaaggtagaga

SEQ ID NO: 143783 - DNA, 120 bp, Artificial Sequence
  ENSG00000104722_18 (sequence is synthesized)
aaaaggaagagaaaccaaaggatgtgccagagaagaagaaagctgagtcccctgtaaaggaggaagctgtggcagaggtggtcaccatcaccaaatcggtaaaggtgcacttggagaaag

SEQ ID NO: 143784 - DNA, 120 bp, Artificial Sequence
  ENSG00000104722_19 (sequence is synthesized)
agaccaaagaagaggggaagccactgcagcaggagaaagagaaggagaaagcgggaggagagggaggaagtgaggaggaagggagtgataaaggtgccaagggatccaggaaggaagaca

SEQ ID NO: 143785 - DNA, 120 bp, Artificial Sequence
  ENSG00000104722_20 (sequence is synthesized)
tagctgtcaatggggaggtagaaggaaaagaggaggtagagcaggagaccaaggaaaaaggcagtgggagggaagaggagaaaggcgttgtcaccaatggcctagacttgagcccagcag

SEQ ID NO: 143786 - DNA, 120 bp, Artificial Sequence
  ENSG00000104722_21 (sequence is synthesized)
atgaaaagaaggggggtgataaaagtgaggagaaagtggtggtgaccaaaacggtagaaaaaatcaccagtgaggggggagatggtgctaccaaatacatcactaaatctgtaaccgtca

SEQ ID NO: 143787 - DNA, 120 bp, Artificial Sequence
  ENSG00000104722_22 (sequence is synthesized)
ctcaaaaggttgaagagcatgaagagacctttgaggagaaactagtgtctactaaaaaggtagaaaaagtcacttcacacgccatagtaaaggaagtcacccagagtgactaagatttga

SEQ ID NO: 143788 - DNA, 120 bp, Artificial Sequence
  ENSG00000104722_23 (sequence is synthesized)
gtccattgcaaaaggttaagccatatgacaatttcaaaatgcatgtgattggcagcttcaaaacagaacgggttctcccatgggggctccagacattgtattttactttgtgcaatatga

SEQ ID NO: 143789 - DNA, 120 bp, Artificial Sequence
  ENSG00000104722_24 (sequence is synthesized)
ggggactgcatgcaagctcagggtgctccctcctcagtctttgggggattcaaatgcatgatattgtatgtacctgggaaatttgccgatttcctaagctgttggaagggggtcacttaa

SEQ ID NO: 143790 - DNA, 120 bp, Artificial Sequence
  ENSG00000104722_25 (sequence is synthesized)
ggggggatgtcttgagatgtattatgcaaagtaccaactgagccaaaaacaataaacgaaacacagaactcagccttaagaaagctatatatgaataattatgtttacctcactggtgca

SEQ ID NO: 143791 - DNA, 120 bp, Artificial Sequence
  ENSG00000104722_26 (sequence is synthesized)
tttaaaatggacttttgttcatgggagaacctcgttgacatgcacagtttgcaatcttatgttgatcgatgttaaacgtcacagcagtacttgctcaataaaggtcatattggaaacata

SEQ ID NO: 143792 - DNA, 120 bp, Artificial Sequence
  ENSG00000104722_27 (sequence is synthesized)
gtgcccaggcgccctctccgccgcgctccctggtggccgctcgctagagcacgcgcgccgcagacctagggtatttgcggatcagcgtcctcgcccatctcatcctccacactccgcccc

SEQ ID NO: 143793 - DNA, 120 bp, Artificial Sequence
  ENSG00000104722_28 (sequence is synthesized)
cacccacctgccccagctgctaagggtcttgacctttttcagaaacgtgcatcttttccagttctaattttgcacgcttgcacgtttaaagcaggagggatgaattcggtagtggataaa

SEQ ID NO: 143794 - DNA, 120 bp, Artificial Sequence
  ENSG00000104722_29 (sequence is synthesized)
tcagcaactttaggatagcttatgcagaaacgcgtgtattctctacttttccggcagtgatcggaagagctctcaaaattggcttcagcccaaagggctcagatgggaatggccaggaca

SEQ ID NO: 143795 - DNA, 120 bp, Artificial Sequence
  ENSG00000104723_0 (sequence is synthesized)
agtctcctcctctgcgtcctcggccgcggcccgggtccctcgcaaagccgctgccatcccggagggcccagccagcgggctcccggaggctggccgggcaggcgtggtgcgcggtaggag

SEQ ID NO: 143796 - DNA, 120 bp, Artificial Sequence
  ENSG00000104723_1 (sequence is synthesized)
ctgggcgcgcacggctaccgcgcgtggaggagacactgccctgccgcgatgggggcccggggcgctccttcacgccgtaggcaagcggggcggcggctgcggtacctgcccaccgggagc

SEQ ID NO: 143797 - DNA, 120 bp, Artificial Sequence
  ENSG00000104723_2 (sequence is synthesized)
tttcccttccttctcctgctgctgctgctctgcatccagctcgggggaggacagaagaaaaaggagaatcttttagctgaaaaagtagagcagctgatggaatggagttccagacgctca

SEQ ID NO: 143798 - DNA, 120 bp, Artificial Sequence
  ENSG00000104723_3 (sequence is synthesized)
atcttccgaatgaatggtgataaattccgaaaatttataaaggcaccacctcgaaactattccatgattgttatgttcactgctcttcagcctcagcggcagtgttctgtgtgcaggcaa

SEQ ID NO: 143799 - DNA, 120 bp, Artificial Sequence
  ENSG00000104723_4 (sequence is synthesized)
gctaatgaagaatatcaaatactggcgaactcctggcgctattcatctgctttttgtaacaagctcttcttcagtatggtggactatgatgaggggacagacgtttttcagcagctcaac

SEQ ID NO: 143800 - DNA, 120 bp, Artificial Sequence
  ENSG00000104723_5 (sequence is synthesized)
atgaactctgctcctacattcatgcattttcctccaaaaggcagacctaagagagctgatacttttgacctccaaagaattggatttgcagctgagcaactagcaaagtggattgctgac

SEQ ID NO: 143801 - DNA, 120 bp, Artificial Sequence
  ENSG00000104723_6 (sequence is synthesized)
agaacggatgttcatattcgggttttcagaccacccaactactctggtaccattgctttggccctgttagtgtcgcttgttggaggtttgctttatttgagaaggaacaacttggagttc

SEQ ID NO: 143802 - DNA, 120 bp, Artificial Sequence
  ENSG00000104723_7 (sequence is synthesized)
atctataacaagactggttgggccatggtgtctctgtgtatagtctttgctatgacttctggccagatgtggaaccatatccgtggacctccatatgctcataagaacccacacaatgga

SEQ ID NO: 143803 - DNA, 120 bp, Artificial Sequence
  ENSG00000104723_8 (sequence is synthesized)
caagtgagctacattcatgggagcagccaggctcagtttgtggcagaatcacacattattctggtactgaatgccgctatcaccatggggatggttcttctaaatgaagcagcaacttcg

SEQ ID NO: 143804 - DNA, 120 bp, Artificial Sequence
  ENSG00000104723_9 (sequence is synthesized)
aaaggcgatgttggaaaaagacggataatttgcctagtgggattgggcctggtggtcttcttcttcagttttctactttcaatatttcgttccaagtaccacggctatccttatagtgat

SEQ ID NO: 143805 - DNA, 120 bp, Artificial Sequence
  ENSG00000104723_10 (sequence is synthesized)
ctggactttgagtgagaagatgtgatttggaccatggcacttaaaaactctataacctcagctttttaattaaatgaagccaagtgggatttgcataaagtgaatgtttaccatgaagat

SEQ ID NO: 143806 - DNA, 120 bp, Artificial Sequence
  ENSG00000104723_11 (sequence is synthesized)
aaactgttcctgactttatactattttgaattcattcatttcattgtgatcagctagcttattcttgtgtactttttttaaactgtgggttttcctagtaaatttaatttacagaaatca

SEQ ID NO: 143807 - DNA, 120 bp, Artificial Sequence
  ENSG00000104723_12 (sequence is synthesized)
atggtagcatttagtaatctacaaaggaaatatcaaagtgtttttcaagcctgttatattcagtgtgtgccacaggattgaaataaatgacaatgtaattatgaattcatgttttagagc

SEQ ID NO: 143808 - DNA, 120 bp, Artificial Sequence
  ENSG00000104723_13 (sequence is synthesized)
tgtttactcattagtaaaggaccgcaatgttagtaaagaaaacctatgaaatgtatgttaaagattcttagtattgtacagggataaagcaaatgcatgaaaatatgtcatgtactgaaa

SEQ ID NO: 143809 - DNA, 120 bp, Artificial Sequence
  ENSG00000104723_14 (sequence is synthesized)
attaaacttacttcagtttcagttataaaggacgtgcactgttacgaatagtgttttgttattaattataactagataaaggtatataggacagggaactggatgaatggtacctacaat

SEQ ID NO: 143810 - DNA, 120 bp, Artificial Sequence
  ENSG00000104723_15 (sequence is synthesized)
agcaacataccacaactaggagttatttctcaaacttaaatgtcctctgggaatccagacttaaaaataagagcaaacttaacacactatccattttcgagcaaacctaacccactatat

SEQ ID NO: 143811 - DNA, 120 bp, Artificial Sequence
  ENSG00000104723_16 (sequence is synthesized)
ccattttgctcatgtgttttatgcaaccagctttccatcaaatcctcaatctttgaatccaggtaaaaggttaattatcctaggattagtgaatgattcaatgaagctttcttgaaaaca

SEQ ID NO: 143812 - DNA, 120 bp, Artificial Sequence
  ENSG00000104723_17 (sequence is synthesized)
aacataggagtgtaatgtactattatgtttgtatcctgttttagtttataaagcactttcacatacattatggtatttcttcctcacaataaccttgtaaattagtcaggaaatgtaaat

SEQ ID NO: 143813 - DNA, 120 bp, Artificial Sequence
  ENSG00000104723_18 (sequence is synthesized)
tttatctgactcatagaactaatggaagctgaaagccaaaaataaagtttataaccaggccttcaaactctcaaacatggatttttatattctgtggagttatccaaattaattagggtt

SEQ ID NO: 143814 - DNA, 120 bp, Artificial Sequence
  ENSG00000104723_19 (sequence is synthesized)
taggaaagcagttcttcttgagtcagttcaataagtgtttgctttttgtttttaaggtttgttatctaattttcattaagatttgagtaacagaccatggagaattgttttcattgggag

SEQ ID NO: 143815 - DNA, 120 bp, Artificial Sequence
  ENSG00000104723_20 (sequence is synthesized)
ttccagctatatagcctcaaacaagaaacgggtgtacaaccattgagtttacttacttaaatctgtgaatttcaatgaagaatgggaatataaaggcctactggggcatgtttatcaagt

SEQ ID NO: 143816 - DNA, 120 bp, Artificial Sequence
  ENSG00000104723_21 (sequence is synthesized)
tatatcccagggcaatgtgtatgctagcaggatgaatgctatcttttcaaaacataatattcagtgaaaattacgtaataattgtaagtttataatcatactcccaaatctgttactaaa

SEQ ID NO: 143817 - DNA, 120 bp, Artificial Sequence
  ENSG00000104723_22 (sequence is synthesized)
aataacataaattctcctagttcatgtacttagatgaataaatttagttttggaatgacgtttatggaaaagcaatagatgaacttaatcatttgatcactgcctatcactaggcagaac

SEQ ID NO: 143818 - DNA, 120 bp, Artificial Sequence
  ENSG00000104723_23 (sequence is synthesized)
ttgacctgtaattcttaatccattgtagattttttacattttactcaaaacttcatacatagagactctcaggtcaaattttacaagtattaaacatttgttaattataatcacttttgt

SEQ ID NO: 143819 - DNA, 120 bp, Artificial Sequence
  ENSG00000104723_24 (sequence is synthesized)
ttgtatccttaaatctcagaattatcttgcagttaatatgcagctgattaaatgatattacaaattatctctaatctcactgtaaatcttttaatcatatcaaagtcaggtcatcctcag

SEQ ID NO: 143820 - DNA, 120 bp, Artificial Sequence
  ENSG00000104723_25 (sequence is synthesized)
acactataactaagatagataaggagtactttactataccatattagtaaaggttttctagctcttattttctaatttcctctgagcatttaaaattacatccagtgataaaaacaatat

SEQ ID NO: 143821 - DNA, 120 bp, Artificial Sequence
  ENSG00000104723_26 (sequence is synthesized)
ttttttttcagaatttcatgctttaaaaagctgtggcttctctatagacaactgttacattagggaagtgattctagagcaaaatatactgcctcaacataagtcgttactgactggaaa

SEQ ID NO: 143822 - DNA, 120 bp, Artificial Sequence
  ENSG00000104723_27 (sequence is synthesized)
atgctataggcagaattgcaaagagtggctcaaacatatagtttgcttgcagaatgtaacgtgcaaaatcacatacatgcgatgtatttacctttgctagacaatgagaattgaataatt

SEQ ID NO: 143823 - DNA, 120 bp, Artificial Sequence
  ENSG00000104723_28 (sequence is synthesized)
gatttgtacctggtatgttatatcctccagtgtcactttttaaccagattcactgtgcgttccaaactgtcataaaaattgattatatgtttaacaattgtttttctactacagtggaga

SEQ ID NO: 143824 - DNA, 120 bp, Artificial Sequence
  ENSG00000104723_29 (sequence is synthesized)
gaaaaatcccaattataaaattccacctaaaggagtttcattttgtaataacatctgattaataacttgttgcattttgcttaacatactgttcctggcattagatattcacatgagtaa

SEQ ID NO: 143825 - DNA, 120 bp, Artificial Sequence
  ENSG00000104723_30 (sequence is synthesized)
ccgtgggtgtaggaccctccgagccagaatcttttagctgaaaaagtagagcagctgatggaatggagttccagacgctcaatcttccgaatgaatggtgataaattccgaaaatttata

SEQ ID NO: 143826 - DNA, 84 bp, Artificial Sequence
  ENSG00000104723_31 (sequence is synthesized)
gcttcatgcatgatccatagcctgcagaaatgctggagtacaatggcaccatctcgactcaccacaacctctgcctcccgggtt

SEQ ID NO: 143827 - DNA, 89 bp, Artificial Sequence
  ENSG00000104723_32 (sequence is synthesized)
tcttttagctgaaaaagtagagcagctgatggaatggagttccagacgctcaatcttccgaatgaatggtgataaattccgaaaattta

SEQ ID NO: 143828 - DNA, 120 bp, Artificial Sequence
  ENSG00000104723_33 (sequence is synthesized)
cctcagataaaaatgtctaccaaaagactgacacgtggagttaatcatttgacagatgcaatgcttccacccccaacaaatatactttcttaacttctgtttgttatcacttagggaaaa

SEQ ID NO: 143829 - DNA, 120 bp, Artificial Sequence
  ENSG00000104723_34 (sequence is synthesized)
aaggcagtcaacaaatatatttcattctatctaggaaaaatgtagccaaatcttttttcccattaacaaataatgtaagccttaatattcaagggtaataaaaaatacaagtcttccaaa

SEQ ID NO: 143830 - DNA, 120 bp, Artificial Sequence
  ENSG00000104723_35 (sequence is synthesized)
tgacttctggccagatgtggaaccatatccgtggacctccatatgctcataagaacccacacaatggacaagtgtttaaccattctggaacattgtgttcagagccagaaaaattaatag

SEQ ID NO: 143831 - DNA, 120 bp, Artificial Sequence
  ENSG00000104723_36 (sequence is synthesized)
catgtgttcagcatagtgaagtacacaaaggagatataaggcatggttcttgttccctgacagcatgtagtttctttctagacatacatatttttatataacaaatgaggtttaagctca

SEQ ID NO: 143832 - DNA, 120 bp, Artificial Sequence
  ENSG00000104723_37 (sequence is synthesized)
ttttgaggacttgaaaatttttatcttcccttagtttgtcgtgatttcgacttcatttgcaagattgttttctcatataattcactgttcattgtctaataaactttgtattatcttttg

SEQ ID NO: 143833 - DNA, 64 bp, Artificial Sequence
  ENSG00000104723_38 (sequence is synthesized)
tggtcgatacatttttgtttgtcacataaaaatacaattcattcatcggtggaggacagagcaa

SEQ ID NO: 143834 - DNA, 120 bp, Artificial Sequence
  ENSG00000104723_39 (sequence is synthesized)
actttatctggataaagtgatgactatcgaaacacatcaggaataccgagctgaaggatgaaaagctgtgttgagatcatccttttattgtatggcaggaattctccaaggtttaatttc

SEQ ID NO: 143835 - DNA, 120 bp, Artificial Sequence
  ENSG00000104723_40 (sequence is synthesized)
atggatcattgacatcaagctgagatttaggattcaaataaatttcacaagcagtgtgaatgttttcatatagatcttagcagtgatacataaaagaattaaaagtctgtattctcttta

SEQ ID NO: 143836 - DNA, 80 bp, Artificial Sequence
  ENSG00000104728_0 (sequence is synthesized)
gctgggcgcatccctgtagccggcgggcgcgcgatccgggacggacggggtcgcgggggacgcgggggacgcgggggacg

SEQ ID NO: 143837 - DNA, 120 bp, Artificial Sequence
  ENSG00000104728_1 (sequence is synthesized)
gacggcggggaacagcgggggacggcggggaacagcaggggactgcgggtcgcgtcctggccgccgaggagctccttcccttaacagagctgagagaggcatctggagctgcagcatgga

SEQ ID NO: 143838 - DNA, 120 bp, Artificial Sequence
  ENSG00000104728_2 (sequence is synthesized)
ccagcgagagcccctgcctcccgctcctgcagaaaatgaaatgaaatatgataccaataataatgaagaggaagagggagaacagttcgattttgacagtggagatgaaatcccagaagc

SEQ ID NO: 143839 - DNA, 120 bp, Artificial Sequence
  ENSG00000104728_3 (sequence is synthesized)
ggacagacaggccccatccgcccctgagacaggaggtgctggagccagtgaagcccctgcacccacaggaggtgaggatggagctggagcagaaaccaccccagtggcagagcctactaa

SEQ ID NO: 143840 - DNA, 120 bp, Artificial Sequence
  ENSG00000104728_4 (sequence is synthesized)
gctggtgctcccgatgaaagtcaacccatattctgtcatcgacatcacgccattccaggaggaccagccgcccacccccgtgcccagcgctgaggaggagaatgtgggtctccatgtgcc

SEQ ID NO: 143841 - DNA, 120 bp, Artificial Sequence
  ENSG00000104728_5 (sequence is synthesized)
ctgcgggtacttggtgcctgtaccctgcggctatgcggtgccctccaacctgcccctcctgctgcccgcctactccagcccggtcatcatctgcgccacgtccctggacgaagaagaaac

SEQ ID NO: 143842 - DNA, 120 bp, Artificial Sequence
  ENSG00000104728_6 (sequence is synthesized)
accagaagtcacagaagatcgccagcccaattctctgagttccgaggagcctccaaccagtgaagatcaagtcggtcgagaggacagcgcacttgcccgctgggccgcagacccggccaa

SEQ ID NO: 143843 - DNA, 120 bp, Artificial Sequence
  ENSG00000104728_7 (sequence is synthesized)
cacagcctggatggagaatccagaggaagcaatttacgatgacgttccaagggaaaactcagactctgaaccagatgaaatgatttatgatgatgttgagaatggggatgaaggtggaaa

SEQ ID NO: 143844 - DNA, 120 bp, Artificial Sequence
  ENSG00000104728_8 (sequence is synthesized)
cagctccttggaatacggatggagttcgagtgaatttgaaagttacgaagagcagagtgactcggagtgcaagaatgggattcccaggtccttcctgcgcagcaaccacaaaaagcaact

SEQ ID NO: 143845 - DNA, 120 bp, Artificial Sequence
  ENSG00000104728_9 (sequence is synthesized)
ttctcatgacctaacccgtttaaaggagcactatgagaaaaagatgagagatttgatggcaagcacggtgggcgtggtggagattcagcagctcaggcagaagcatgaactgaagatgca

SEQ ID NO: 143846 - DNA, 120 bp, Artificial Sequence
  ENSG00000104728_10 (sequence is synthesized)
gaagctcgtgaaggccgcgaaggacggcaccaaggacgggctggagaggaccagggcagccgtgaagaggggccgctccttcatcaggaccaagtctctcatcgcacaggatcacagatc

SEQ ID NO: 143847 - DNA, 120 bp, Artificial Sequence
  ENSG00000104728_11 (sequence is synthesized)
ttctcttgaggaagaacagaatttgttcattgatgttgactgcaagcacccggaagccatcttgaccccgatgcccgagggtttatctcagcagcaggttgtaagaagatatatactggg

SEQ ID NO: 143848 - DNA, 120 bp, Artificial Sequence
  ENSG00000104728_12 (sequence is synthesized)
ttcagttgtcgacagtgaaaagaactacgtagatgctcttaagaggattttggagcaatatgagaagccgctgtctgagatggagccaaaggttctgagtgagaggaagctgaagacggt

SEQ ID NO: 143849 - DNA, 120 bp, Artificial Sequence
  ENSG00000104728_13 (sequence is synthesized)
gttctaccgagtcaaagagatcctgcagtgccactcgctatttcagatcgcgctggccagccgcgtttccgagtgggactccgtggaaatgataggcgatgtcttcgtggcttcgttttc

SEQ ID NO: 143850 - DNA, 120 bp, Artificial Sequence
  ENSG00000104728_14 (sequence is synthesized)
taagtccatggtgctggatgcatacagtgaatatgtgaacaatttcagcacagccgtggcagtcctcaagaaaacatgtgccacaaagcccgcttttcttgaatttttaaagcaggaaca

SEQ ID NO: 143851 - DNA, 120 bp, Artificial Sequence
  ENSG00000104728_15 (sequence is synthesized)
ggaggccagccccgatcgaaccacgctctacagcctgatgatgaagcccatccagaggttcccacagttcatcctcctgctccaggacatgctgaagaacacctccaaaggccaccccga

SEQ ID NO: 143852 - DNA, 120 bp, Artificial Sequence
  ENSG00000104728_16 (sequence is synthesized)
caggctgcctcttcagatggccctgacagagctcgaaacactagcagagaagttaaatgaaagaaagagagatgctgatcaacgctgtgaagtgaagcaaatagccaaagccataaacga

SEQ ID NO: 143853 - DNA, 120 bp, Artificial Sequence
  ENSG00000104728_17 (sequence is synthesized)
aagatacctgaacaagcttctcagcagtggaagccgatacctcattcgatcagatgatatgatagaaacagtttacaacgacagaggagagattgttaaaaccaaagaacgccgagtctt

SEQ ID NO: 143854 - DNA, 120 bp, Artificial Sequence
  ENSG00000104728_18 (sequence is synthesized)
catgttaaatgatgtgttaatgtgtgccaccgtcagctcacgcccctctcatgacagccgtgtgatgagcagccagaggtacttgctgaagtggagcgttccactgggacatgtggacgc

SEQ ID NO: 143855 - DNA, 120 bp, Artificial Sequence
  ENSG00000104728_19 (sequence is synthesized)
catcgagtatggcagcagcgcaggcacgggcgagcacagcaggcaccttgccgttcacccgccggagagcctggccgtggttgctaacgcgaaaccaaacaaagtttacatggggccagg

SEQ ID NO: 143856 - DNA, 120 bp, Artificial Sequence
  ENSG00000104728_20 (sequence is synthesized)
acaactgtatcaagatttacaaaacttgttgcatgacttaaatgtaattggccaaatcactcagctgataggaaaccttaaaggaaactatcagaacttaaaccagtcagtagcccatga

SEQ ID NO: 143857 - DNA, 120 bp, Artificial Sequence
  ENSG00000104728_21 (sequence is synthesized)
ctggacatcaggtttacaaaggcttattttgaagaaagaagatgaaatcagagctgcggactgctgcagaattcagttacagcttcccgggaagcaggacaaatctgggcgaccgacgtt

SEQ ID NO: 143858 - DNA, 120 bp, Artificial Sequence
  ENSG00000104728_22 (sequence is synthesized)
ctttacagctgtgttcaatacgttcacccctgccatcaaggagtcctgggtcaacagcttacagatggccaagctcgccctagaagaggagaaccacatgggctggttctgtgtggaaga

SEQ ID NO: 143859 - DNA, 120 bp, Artificial Sequence
  ENSG00000104728_23 (sequence is synthesized)
atcacattaaaaaggagaagcatcctctcctcgtcggacacatgcccgtgatggtggccaagcagcaggagttcaagattgaatgtgctgcttataaccctgaaccttacctaaataatg

SEQ ID NO: 143860 - DNA, 120 bp, Artificial Sequence
  ENSG00000104728_24 (sequence is synthesized)
aaagccagccagattcattttccacggcacatggtttcctgtggatcggaagttgcacccatcaaatgggtcagattgccatcgtctcgtttcaaaattccactcccaaagtcattgagt

SEQ ID NO: 143861 - DNA, 120 bp, Artificial Sequence
  ENSG00000104728_25 (sequence is synthesized)
gcttcaacgtggaatctcgcatcctgtgcatgctgtacgttcccgtcgaggagaagcgcagagagcctggggcacccccggaccccgagaccccggccgtgagagcttctgatgtcccca

SEQ ID NO: 143862 - DNA, 120 bp, Artificial Sequence
  ENSG00000104728_26 (sequence is synthesized)
cgatctgtgtagggacggaggagggaagcatttccatttataaaagcagtcaaggctccaagaaagtgagacttcagcactttttcactcctgagaagtccacagtcatgagcctggctt

SEQ ID NO: 143863 - DNA, 120 bp, Artificial Sequence
  ENSG00000104728_27 (sequence is synthesized)
gcacgtctcagagcctgtacgctggcctggtcaacggggcagtcgccagctacgccagagccccagatggatcctgggattcagaacctcaaaaagtgatcaagttaggcgtcctaccag

SEQ ID NO: 143864 - DNA, 120 bp, Artificial Sequence
  ENSG00000104728_28 (sequence is synthesized)
ttagaagtctactcatgatggaagacacgttgtgggcggcttccggaggtcaagtcttcatcatcagtgtggagactcatgctgtagagggtcagctggaggcccaccaggaggaaggca

SEQ ID NO: 143865 - DNA, 120 bp, Artificial Sequence
  ENSG00000104728_29 (sequence is synthesized)
tggtgatctcccacatggccgtgtccggcgtcgggatctggattgccttcacctcagggtccacgctccgcctttttcacacggaaactctcaagcacctgcaggacatcaacatcgcca

SEQ ID NO: 143866 - DNA, 120 bp, Artificial Sequence
  ENSG00000104728_30 (sequence is synthesized)
cccctgttcacaacatgctgccagggcaccagcggctgtcggtgacgagcctgctcgtctgccacggattgctgatggtcggcaccagcctgggagtcctcgtggccctgccggtcccac

SEQ ID NO: 143867 - DNA, 120 bp, Artificial Sequence
  ENSG00000104728_31 (sequence is synthesized)
gtctgcaagggattcccaaagtgaccggaagaggcatggtctcctaccatgcacacaacagtcctgtcaaattcatcgtcctggccacggctctgcacgagaaagacaaggacaaatcca

SEQ ID NO: 143868 - DNA, 120 bp, Artificial Sequence
  ENSG00000104728_32 (sequence is synthesized)
gggacagcctggctcctggccccgagcctcaggacgaagaccagaaggacgcacttccgagtggaggagctggttcatctctgagccagggtgaccctgacgcagccatctggttgggag

SEQ ID NO: 143869 - DNA, 120 bp, Artificial Sequence
  ENSG00000104728_33 (sequence is synthesized)
attcgctgggatcgatgactcagaaaagcgacctgtcctcctcatctgggtccctgagcttgtctcacggctccagctctctagagcacagatcagaggacagcaccatctatgatctcc

SEQ ID NO: 143870 - DNA, 120 bp, Artificial Sequence
  ENSG00000104728_34 (sequence is synthesized)
tgaaggatcctgtctcgctgagaagcaaagcacgccgggccaagaaagccaaggccagctcggcgctggtggtctgtggagggcagggccaccgccgggtgcacaggaaggcccggcagc

SEQ ID NO: 143871 - DNA, 120 bp, Artificial Sequence
  ENSG00000104728_35 (sequence is synthesized)
cccaccaggaagagctggcgccgaccgtcatggtctggcagatccctctgctgaatatataagcaggacggccgccttctgctgtcagaatttgcaatcaagggtgacttctcagctaat

SEQ ID NO: 143872 - DNA, 120 bp, Artificial Sequence
  ENSG00000104728_36 (sequence is synthesized)
cctacagcctgagtggttaagctgtgtctacactggttgggaataaattaaaaacagtatttgggggagaaacgtgcaatagcgtaatggtggtgtccctgccaattccttccttctctt

SEQ ID NO: 143873 - DNA, 120 bp, Artificial Sequence
  ENSG00000104728_37 (sequence is synthesized)
ctgtacagcagaagtaattacaagcacttctcacgaaggcagaagactgatgcaattttcgagtaattgagtgcagttctgggaaaataccacattctttttgactgctgtagtccatat

SEQ ID NO: 143874 - DNA, 120 bp, Artificial Sequence
  ENSG00000104728_38 (sequence is synthesized)
gtgaatactaaatgttaaacttcatcagcgtcagacctattgtatcatattagagaatttgcagactaagaatttatgagaaaatatatgtattcagtagtgcaggcatttattaacaat

SEQ ID NO: 143875 - DNA, 120 bp, Artificial Sequence
  ENSG00000104728_39 (sequence is synthesized)
tcttaaaagttttacctgattcagattcacgacttttatttatattctatatttttgaatttcagagtaaaatttgttaacaattttaaaagccaggtaacacctaccagtccagttagc

SEQ ID NO: 143876 - DNA, 120 bp, Artificial Sequence
  ENSG00000104728_40 (sequence is synthesized)
atgatttgctttcagaagtgagctgggttttccaaagtggtataatgtgtgtactgtatattttaacaaagtaatatttttgtattgcatttttctattaaaaaattaacagttaatgtt

SEQ ID NO: 143877 - DNA, 120 bp, Artificial Sequence
  ENSG00000104728_41 (sequence is synthesized)
tcagtcaatgtattatctgtagcatttcacaaataatgtttgctttgaaccaaaatgctcagtgcctatcaacatttggactcaagcatcaacaccaaattattcctcccttctcgtata

SEQ ID NO: 143878 - DNA, 120 bp, Artificial Sequence
  ENSG00000104728_42 (sequence is synthesized)
aatagagtgactatccacaggagaaaagtgtgtgctttagtattagaggagataggcagagaagtcttgcttagttccttcgtgcagcttcttgcccctgttgacgtggaatgctgtgtc

SEQ ID NO: 143879 - DNA, 120 bp, Artificial Sequence
  ENSG00000104728_43 (sequence is synthesized)
tgctttagcacgcacgctccgaatgactcctggtgctaggccatgctggctgctgtcactgagcgggactcaggccaagaggcgtgacctcgggccagcctgtctgttgtgcagacgcct

SEQ ID NO: 143880 - DNA, 120 bp, Artificial Sequence
  ENSG00000104728_44 (sequence is synthesized)
cctctgcagaacgcatcagtttctattctgcagttgcagagccagccccgcgtgagaacgtgcataatgagtgcacaccatcatgtcaaggtgcatacttagtgagcgccatcctgctga

SEQ ID NO: 143881 - DNA, 120 bp, Artificial Sequence
  ENSG00000104728_45 (sequence is synthesized)
acgtgtatttcagtgtttcacttactggacggataacaagaaaaaaatcctaacacaggcaggcaccagaaataaatgtctcagcactttacagatgactaaaaatgttaattttatgac

SEQ ID NO: 143882 - DNA, 120 bp, Artificial Sequence
  ENSG00000104728_46 (sequence is synthesized)
ttagccaaatatgttctaggttgcatatatcccccatgtgaaagtgatttcttcccaagcttctcaaactgttagctgctgtctgacttcatcaataaagtatttttattttaaaatgca

SEQ ID NO: 143883 - DNA, 120 bp, Artificial Sequence
  ENSG00000104728_47 (sequence is synthesized)
ttgtgctaataagctgtcgttgtccagcaatactaatcttttggatcgtttggagtaattcccttcgcccagagttcttaaccggggtggatggaggccttcgggagagtcacaccaatg

SEQ ID NO: 143884 - DNA, 120 bp, Artificial Sequence
  ENSG00000104728_48 (sequence is synthesized)
tggaaattgtatgtaaaaccttaacagcctgtcttaacagcattttcttaggaaagagattcatacattcattagaccctcaaatggatccaggacctcccaaggggttaagagcaactc

SEQ ID NO: 143885 - DNA, 120 bp, Artificial Sequence
  ENSG00000104728_49 (sequence is synthesized)
taagagcaactcctttagcttacttttcctttcaaaataacggtatttaatttcagatagtaatagttaaagctgaaaatatttacaggctaggcacagtggctcacacctgtaagccca

SEQ ID NO: 143886 - DNA, 120 bp, Artificial Sequence
  ENSG00000104728_50 (sequence is synthesized)
cccaggagttcaagaccagcctgggcatgatagtgagaacccatatctaaaaaaagaaaaaaaaaatagctgggcacagtggcatgcacctatatagtctgagctacgtgggaggctgag

SEQ ID NO: 143887 - DNA, 120 bp, Artificial Sequence
  ENSG00000104728_51 (sequence is synthesized)
gtctgagctacgtgggaggctgaggccagaggattgctcgagcctgggaggtccaggctgtggtgagctgttattgaggtgctgcactctagcctgggtgatggagcaaaaccctgtttc

SEQ ID NO: 143888 - DNA, 120 bp, Artificial Sequence
  ENSG00000104728_52 (sequence is synthesized)
gaacggcgggggacggcggggaacagcgggggacggcggggaacagcgggggacggcggggaacagcaggggactgcgggtcgcgtcctggccgccgagcatttatttgctggctttagc

SEQ ID NO: 143889 - DNA, 120 bp, Artificial Sequence
  ENSG00000104728_53 (sequence is synthesized)
agccaacatcggcagttacggatgcataactctttatagacagatgagacctccaggatttctcagcagagctccttcccttaacagagctgagagaggcatctggagctgcagcatgga

SEQ ID NO: 143890 - DNA, 120 bp, Artificial Sequence
  ENSG00000104728_54 (sequence is synthesized)
gaaaatttaaaaatccgtgtgtattttcttgctagtgctggtacttgaatatctgtatcatccacctatccatccacctacccatatttctataatccaccgtccatcgacatgcctatc

SEQ ID NO: 143891 - DNA, 120 bp, Artificial Sequence
  ENSG00000104728_55 (sequence is synthesized)
atctgtccaccatttctctctgtctaattttcaaaacatcctgtaagtttatataaaggaagatttttcttcttgtgaagttctctaaggctgacaagttacctggcatgactgtggcgg

SEQ ID NO: 143892 - DNA, 120 bp, Artificial Sequence
  ENSG00000104728_56 (sequence is synthesized)
atgcccatagccaggtggtcctcggggtacagatggggcaggggcacttgtgagaaacacctgaagtgcttttccccagcctccccggccctgcccgggtggtggaggcgctgcacggtg

SEQ ID NO: 143893 - DNA, 120 bp, Artificial Sequence
  ENSG00000104728_57 (sequence is synthesized)
ccttccatggagcaagcccggggctccgcagggtcctcagcatgattcagatttccttccacccccagctctagatgatttggtaaaaccacaaacaggcacaaaacagcccacatggaa

SEQ ID NO: 143894 - DNA, 120 bp, Artificial Sequence
  ENSG00000104728_58 (sequence is synthesized)
tcattttccacggcacatggtttcctgtgggtaagatgtgtttatttggttttggtacaagttcacagagaatcaacgttcatggtcggtgtgatgagagactgagatgtgaattgctca

SEQ ID NO: 143895 - DNA, 120 bp, Artificial Sequence
  ENSG00000104728_59 (sequence is synthesized)
gtagagagttggcggtggcgtatcccagagtgtacttagaaacatgaaaacttctttgaaagggagctgatcacttttggaaaagatttacagttcttaggaatgcaaatatttgtttct

SEQ ID NO: 143896 - DNA, 120 bp, Artificial Sequence
  ENSG00000104728_60 (sequence is synthesized)
tttccttttcatctaaaacatttaccagataaagttgagtccagagacaactaactaataagagaataattttaatatgtttttccattttggtgtcaacattgcatggattttttttct

SEQ ID NO: 143897 - DNA, 120 bp, Artificial Sequence
  ENSG00000104728_61 (sequence is synthesized)
tgttccaagactggctttttccagtggaaacttagcagttaaaattaatttgttccaaatgaaatattgcatctgaaattaggctggaattgcagtagacgttcctggttcttgcaaacc

SEQ ID NO: 143898 - DNA, 120 bp, Artificial Sequence
  ENSG00000104728_62 (sequence is synthesized)
agaggacattcttgaagctgtgtggtcccaggctctcccctctctggtttcctgtgttccctccctgcagcctcagactcgccctccagggctccactgtgcttttccaaactctcatcc

SEQ ID NO: 143899 - DNA, 120 bp, Artificial Sequence
  ENSG00000104728_63 (sequence is synthesized)
tttcctcccaggcgtcctgtgcagcacgccactgcctctcacttctcacatccacagctcctgcttggtcagtgttcctagttgagtgtcagaaattgaacaacccaattagctggtatt

SEQ ID NO: 143900 - DNA, 120 bp, Artificial Sequence
  ENSG00000104728_64 (sequence is synthesized)
tcatttgtaccaacctatgaatggaggagtagccttaattcccttgggggcttccacttctaagagaactgttttccgtccaggtaggcagacctgtcatggctgaagcttcatcacctg

SEQ ID NO: 143901 - DNA, 120 bp, Artificial Sequence
  ENSG00000104728_65 (sequence is synthesized)
gcctggtcatagcccccaggccctgtaggcaggacaggggcttggcagattggcatccttcccacaaaagcatgaaagtaggatgtctgtatgtagcgacaacaaatacaagaataagga

SEQ ID NO: 143902 - DNA, 120 bp, Artificial Sequence
  ENSG00000104728_66 (sequence is synthesized)
gagtttaacaacattctcaaagttggtggaaaagaaaaagaatcaatgaaaacatcaccctaaaccagctagtgctttctgtttacagggatcagaccccttcccacttaaaaaaaaaaa

SEQ ID NO: 143903 - DNA, 120 bp, Artificial Sequence
  ENSG00000104728_67 (sequence is synthesized)
gttcataaaaacacttgggatctttgtgtgtgagattcgtgttccgctggggagtaagagctggattatctgcctaggaaccaagtcacaagtcagtgatgcagactcctttgcaattgg

SEQ ID NO: 143904 - DNA, 120 bp, Artificial Sequence
  ENSG00000104728_68 (sequence is synthesized)
ggatgggacagcaaccggggacggacgtggggggtgcggagcgctgtcagcccaccttagcgcttcccagtgcaggacactgttcacaacatgctgccaggtaatggggtgggacaaggc

SEQ ID NO: 143905 - DNA, 120 bp, Artificial Sequence
  ENSG00000104728_69 (sequence is synthesized)
ccagggacagacgtgggagtacggagcatggtcagcccactttagcgcttcccggtgcagggcacaggtcctgaaggagccgcgtgctgggaggagccgcgtgctgggaggagccgcgtg

SEQ ID NO: 143906 - DNA, 120 bp, Artificial Sequence
  ENSG00000104728_70 (sequence is synthesized)
agttcataaaaacacttgggatctttgtgtgtgagattcgtgttccgctggggagtaagagctggattatctgcctaggaaccaagtcacaagtcagtgatgcagactcctttgcaattg

SEQ ID NO: 143907 - DNA, 120 bp, Artificial Sequence
  ENSG00000104728_71 (sequence is synthesized)
tgagcaccagttccttctcattgacaaatatttaaattcaacttgtgattattgaagaaattttctatgaggaaactacgggcatatggcgagaggtattacacggctgactctagaatg

SEQ ID NO: 143908 - DNA, 120 bp, Artificial Sequence
  ENSG00000104728_72 (sequence is synthesized)
aatctgaatgtacattttctcttacgttagataaggtgagactatttaatggtaacttttcttcattttgcaaatagggtttaatatcagttctatcttagaaatgtctcagccccccac

SEQ ID NO: 143909 - DNA, 120 bp, Artificial Sequence
  ENSG00000104728_73 (sequence is synthesized)
agtgtgatctgactcccaaagctttctttttcataatctaatagtttcatttggtctgaatttctcatattaaaattgtgtctttttatcttccttgggatggccctagtttttaaacac

SEQ ID NO: 143910 - DNA, 120 bp, Artificial Sequence
  ENSG00000104728_74 (sequence is synthesized)
ctggaattgatttgaggagattcagctcagcagcctttccctctggatgccaaagtgactatttagtggacggcccagacgttttctgtattcatgttttgtatgttgcttctagaatgg

SEQ ID NO: 143911 - DNA, 120 bp, Artificial Sequence
  ENSG00000104728_75 (sequence is synthesized)
cttattgatgtgtggtggaatattggtgtttgtgcacatatgtgtgtgtgcttataacccttgaaatagggcagtttaatcttacttatcccaagcaaacagaggagtaaaggtacagaa

SEQ ID NO: 143912 - DNA, 120 bp, Artificial Sequence
  ENSG00000104728_76 (sequence is synthesized)
aatgccggcaaagaggtaggaaacacagaggctgagaagcagcaatgtatatcgaataaatgacatcagtgagaaagtagagagaatcaggcaaaggtaatagtcaaagaaataactaag

SEQ ID NO: 143913 - DNA, 120 bp, Artificial Sequence
  ENSG00000104728_77 (sequence is synthesized)
aattctctacaattaaagaaaaacataaattctcagattttagacatagagattcaaagcaagatgaattacacgttgatccatacctaggccgatgcaatggaggccgcggagcaccag

SEQ ID NO: 143914 - DNA, 120 bp, Artificial Sequence
  ENSG00000104728_78 (sequence is synthesized)
gcccagggtgaatctcccgagagcaactggagagaaaacatggctgcctacacaggaaccgctattccactgacccacaggctgggggcgggttctcaaagcgaagaaggacgtggctct

SEQ ID NO: 143915 - DNA, 120 bp, Artificial Sequence
  ENSG00000104728_79 (sequence is synthesized)
gcgggggagcttgctgcccatagaatctaaggaaatagttaatgatgcactcgctgcagggaagagcacactgaaccacggaggaggtgacaggggcccggagggagtggggagcccggg

SEQ ID NO: 143916 - DNA, 120 bp, Artificial Sequence
  ENSG00000104728_80 (sequence is synthesized)
aagtgtcgggcgtgtggagagtcgataccagcaccgctcaagacagcgctgatagtgccgattgagtttcagatgcagccggagccccagccagtgccgactgaagaggagggtgaccgt

SEQ ID NO: 143917 - DNA, 120 bp, Artificial Sequence
  ENSG00000104728_81 (sequence is synthesized)
ccccagccagtgccgactgaagaggagggtgaccgttcatgccgtgtgttctgaagttctgaagtcggcatttttcagggggaggatcttgttaccgatttttttttttttttttttttt

SEQ ID NO: 143918 - DNA, 120 bp, Artificial Sequence
  ENSG00000104728_82 (sequence is synthesized)
taactgctaagaaaataggaatagattattttaactttgaaaccagtagtgcaaaacccaatctggtaaatgcaagaaaatataaaataagaaagctttgcaaatcatatgagaaaagac

SEQ ID NO: 143919 - DNA, 120 bp, Artificial Sequence
  ENSG00000104728_83 (sequence is synthesized)
tgcaaaataagtacaaacatattggtacgcatagtaaagtgcatcctattgccagtaaaagaaatcctcagattggataaaatagcaaagctagccataaattcttgtgagagatacata

SEQ ID NO: 143920 - DNA, 120 bp, Artificial Sequence
  ENSG00000104728_84 (sequence is synthesized)
agagtacagaagatttgtaagtaaatggatggaaaaagaaatataatgcaaattctaaccaaagtattgtcagtataactataataatacactaaatgttaagccataagcaaggaataa

SEQ ID NO: 143921 - DNA, 120 bp, Artificial Sequence
  ENSG00000104728_85 (sequence is synthesized)
ttcatgaggaagatatataacagttctaaactcatatgcacctaacagcatagccttaagatatataagcaaaatataacaaggcttaatcagaaatatgtaaatacgctgttggggtga

SEQ ID NO: 143922 - DNA, 120 bp, Artificial Sequence
  ENSG00000104728_86 (sequence is synthesized)
tggggtgagagattttaagaaaactgtctctgctattgacagatcctggacataaaatcagtaaaccggccaggcacggtcgctcacgcctgtcatcccaacactttgggaggccaaggt

SEQ ID NO: 143923 - DNA, 82 bp, Artificial Sequence
  ENSG00000104728_87 (sequence is synthesized)
ctgcagtgagtcgagattgtgccactgctctccagcctgggaaatgagtgaaaactctgtgtcaaaaaaaaaaaaaaaaaaa

SEQ ID NO: 143924 - DNA, 120 bp, Artificial Sequence
  ENSG00000104731_0 (sequence is synthesized)
gtgcgccgagctccgccccacgagcacctgtttccgagcggagagcgcgggccgttttctttcctggtgtcccgtcgcggcttgggacccggcaagatgggcaagaagggcaagaaggag

SEQ ID NO: 143925 - DNA, 120 bp, Artificial Sequence
  ENSG00000104731_1 (sequence is synthesized)
aagaagggccgcggcgcggagaagacggccgccaagatggagaagaaggtgtctaagcgctcgcggaaggaggaggaagacctggaagcgctcatagcccatttccagacactcgatgcc

SEQ ID NO: 143926 - DNA, 120 bp, Artificial Sequence
  ENSG00000104731_2 (sequence is synthesized)
aagaggactcagactgtggaacttccgtgccccccaccctcaccaaggttaaatgcctccctctcggttcatcctgagaaagatgagttaatcctttttggaggtgaatatttcaacggc

SEQ ID NO: 143927 - DNA, 120 bp, Artificial Sequence
  ENSG00000104731_3 (sequence is synthesized)
caaaaaacttttttgtataacgagctctatgtctacaataccagaaaggacacctggaccaaagttgacatccccagtccacctccgaggcgctgtgctcaccaggcggtggtagtgcct

SEQ ID NO: 143928 - DNA, 120 bp, Artificial Sequence
  ENSG00000104731_4 (sequence is synthesized)
caaggtggcggacagctgtgggtctttggaggggagtttgcctctcccaacggagagcagttctaccactacaaggatctctgggtcctgcatttggccaccaagacctgggaacaagtc

SEQ ID NO: 143929 - DNA, 120 bp, Artificial Sequence
  ENSG00000104731_5 (sequence is synthesized)
aaatcaacaggcggtccttcgggtcggagtggacatcggatggtggcctggaagagacaattgatcctgtttggtggcttccatgaaagtacacgggattacatctactacaacgacgtg

SEQ ID NO: 143930 - DNA, 120 bp, Artificial Sequence
  ENSG00000104731_6 (sequence is synthesized)
tatgcctttaatctggacaccttcacatggagcaagctgtccccgtcagggacggggcccacacccagatcaggctgccagatgtccgtcactccccagggcggcatcgtcgtctatggg

SEQ ID NO: 143931 - DNA, 120 bp, Artificial Sequence
  ENSG00000104731_7 (sequence is synthesized)
ggctactcgaaacagagagttaagaaagacgtggacaagggcacacggcactcagacatgttcctgctgaagccagaggacggaagagaagacaagtgggtttggactcggatgaaccct

SEQ ID NO: 143932 - DNA, 120 bp, Artificial Sequence
  ENSG00000104731_8 (sequence is synthesized)
gggtcaagcccaccccacggtctggcttttccgtggccatggccccgaatcaccagacactgttcttcgggggtgtctgtgacgaggaagaggaggagagcctgtcgggcgagttcttca

SEQ ID NO: 143933 - DNA, 120 bp, Artificial Sequence
  ENSG00000104731_9 (sequence is synthesized)
acgatctgtacttctacgacgccaccaggaaccgttggtttgagggacagctgaagggacccaagtctgaaaagaagaaacgcaggcggggcagaaaagaggagcccgaaggtggtagca

SEQ ID NO: 143934 - DNA, 120 bp, Artificial Sequence
  ENSG00000104731_10 (sequence is synthesized)
ggccggcgtgtgggggagctggcacccaggggcctgtgcagctggtcaaggaggtggtggccgaggatggcaccgtggtcaccattaagcaggtgctcaccgcgccaggctcggcggggc

SEQ ID NO: 143935 - DNA, 120 bp, Artificial Sequence
  ENSG00000104731_11 (sequence is synthesized)
agccccggtctgaggacgaagacagccttgaggaggccggcagccccgcacctgggccgtgtccacgctccaacgccatgctggctgtgaagcatggggtgctctacgtctatgggggca

SEQ ID NO: 143936 - DNA, 120 bp, Artificial Sequence
  ENSG00000104731_12 (sequence is synthesized)
tgtttgaggccggcgaccgccaggtcaccctcagcgacctgcactgcctggacctgcacaggatggaggcgtggaaggccttggtggagatggacccagaaactcaggagtggctggagg

SEQ ID NO: 143937 - DNA, 120 bp, Artificial Sequence
  ENSG00000104731_13 (sequence is synthesized)
agacggactcggaagaggacagtgaggaggttgagggcgccgagggtggggtcgacgacgaagacagcggagaggagagcggtgcggaggactgagaagagcccctgccaggggcgcctg

SEQ ID NO: 143938 - DNA, 120 bp, Artificial Sequence
  ENSG00000104731_14 (sequence is synthesized)
gcaagtgctgtgcccacgtccgcccaggacccagccgtgttgagtgaagctcttggggccagcgtgcgtcctgacgcacaggagagagctgaaggtgggtggcccaggccagggtgtgaa

SEQ ID NO: 143939 - DNA, 120 bp, Artificial Sequence
  ENSG00000104731_15 (sequence is synthesized)
ctttctcccatggtttagtctctgacgcggcactgggccggaagttcaactgagtgcagtgcaggtggattccctcagcagcctgtgtgttgtgtgaaataaattggacttgaaacaaga

SEQ ID NO: 143940 - DNA, 120 bp, Artificial Sequence
  ENSG00000104731_16 (sequence is synthesized)
ccgtcctgaccttggggttgagtgttctgcggctgctgctcatggattccctaaccggggccagttttatggcctgccgtgcgccaggcacagctccctgggctttactcctcacgagca

SEQ ID NO: 143941 - DNA, 74 bp, Artificial Sequence
  ENSG00000104731_17 (sequence is synthesized)
gcgccaggcacagctccctgggctttactcctcacgagcagatggagtcctgctctgtcacccagagcaagtgt

SEQ ID NO: 143942 - DNA, 120 bp, Artificial Sequence
  ENSG00000104731_18 (sequence is synthesized)
ggtcagtttctccctatggaactactgggcttttagaatgataggaaacctggcctgtccctttacaggtgcgttacagtcaggcgaagctgggctgcgtgaccctgggcagggtgggcg

SEQ ID NO: 143943 - DNA, 120 bp, Artificial Sequence
  ENSG00000104731_19 (sequence is synthesized)
gctctcacctgtggagatgcagcactgaggggcccctccagcgtggttgctaacacagactgcctaggagcgtgcttttctcatcctggaccccagctactgcttaatttgcaggcggtg

SEQ ID NO: 143944 - DNA, 120 bp, Artificial Sequence
  ENSG00000104731_20 (sequence is synthesized)
agctattttgagatctcttcagtctcttgcttgagtgggagttgcctgcaaagctgccccattgcgactttgcagcatagatctccgtactgtttcttatttttgtttctgtgtgtttgt

SEQ ID NO: 143945 - DNA, 120 bp, Artificial Sequence
  ENSG00000104731_21 (sequence is synthesized)
tttactgtccacgtgagcatagctgctgtccagggccagcccagcacaggcacagcagtgggtgacagtcccagaaggggatcccccagttggcctcagggtctctgagtgtaccaggtc

SEQ ID NO: 143946 - DNA, 120 bp, Artificial Sequence
  ENSG00000104731_22 (sequence is synthesized)
agccggacccagaaagggccaaggagggctggtcgctgttggttgcaaactcctgaagctgcttttgacgtgtggtggcacctgggctggaaattggaaaaacacgcgggttcgtttctg

SEQ ID NO: 143947 - DNA, 120 bp, Artificial Sequence
  ENSG00000104731_23 (sequence is synthesized)
gacccacagtccgcctcgctcttttactttagaaggaattgctccaagcagagtctacacaggtttcccctgtggcttttcttcagagagcgtgttgaccccagctagtgtcacggttct

SEQ ID NO: 143948 - DNA, 120 bp, Artificial Sequence
  ENSG00000104731_24 (sequence is synthesized)
cacactgtgatctcagggccgttgacattccccaggattacggaggacctcagagagctttcccttttgaaactcactgttgcagagtccagacacaaagtggatcttagaagtctagaa

SEQ ID NO: 143949 - DNA, 120 bp, Artificial Sequence
  ENSG00000104731_25 (sequence is synthesized)
tgtgaagctgactttgggttgatctggaggtagtgatccttggaaaatttggaaataacctggcaaatgtcacctcgtgagctggcagcgttttgtgacaaaatgacaaaggctgtgaca

SEQ ID NO: 143950 - DNA, 120 bp, Artificial Sequence
  ENSG00000104731_26 (sequence is synthesized)
gaagggtccagactgacccctgcgacgcagccagggaagtgggacagagagggatggacagctgtcctgcaggaggcagcctgacctgagagctcccctttaaaaacgtttggtgaggaa

SEQ ID NO: 143951 - DNA, 120 bp, Artificial Sequence
  ENSG00000104731_27 (sequence is synthesized)
gggcccctctctggctcgccgtttgtagtaaatgagctgggcttgtgggcctgaccgtctgtcttgcttgggaaaggggaggaagcccctcagcctggcttccccagcccttctgggagc

SEQ ID NO: 143952 - DNA, 120 bp, Artificial Sequence
  ENSG00000104731_28 (sequence is synthesized)
cagcactgtgggtgattgggttttcccagggtgagcgtcggagcctgtggggctggtgccctgtgtgtggggtctggtgggcctgtccacctctcagtggaggtgtggagcggcccctca

SEQ ID NO: 143953 - DNA, 120 bp, Artificial Sequence
  ENSG00000104731_29 (sequence is synthesized)
agcccaggagtgaacggcgaggctagtgggagacaggagcgtgctcctgcagcccagtgcctgcacccagggcagtcagggatggcgccttcctgggtcacacactccccacgcttgtgg

SEQ ID NO: 143954 - DNA, 120 bp, Artificial Sequence
  ENSG00000104731_30 (sequence is synthesized)
gtggtccccgcaaacccttgcctggccttgtgggcatagcaggaatgacccctgcctcgctgaagctgctgctctctgcttcctcggtctattaatagggacccaagtctgaaaagaaga

SEQ ID NO: 143955 - DNA, 120 bp, Artificial Sequence
  ENSG00000104731_31 (sequence is synthesized)
ccttggtggagatggacccaggacgtagccaccaccgtcccgcagcctcccccacctgcctcagctgcgctgacgtgtatgtgcgttcattctgcttttgaagaaactcaggagtggctg

SEQ ID NO: 143956 - DNA, 120 bp, Artificial Sequence
  ENSG00000104731_32 (sequence is synthesized)
ccccttcaccccttgtatcacgcgcttgagccgtcaggcctgatgtgagacgtcgccaggatgctccaggccctggcatgactgttgatgacttcagtggtcctggggtctctattcctg

SEQ ID NO: 143957 - DNA, 120 bp, Artificial Sequence
  ENSG00000104731_33 (sequence is synthesized)
ggacttaggctgaggcccagctctgccgtcatcactcttggcgggcgcacccctctttgtggttgtctgtgctgttcttcctcccagcgggtttccaggtttcacactcagctttcaggt

SEQ ID NO: 143958 - DNA, 120 bp, Artificial Sequence
  ENSG00000104731_34 (sequence is synthesized)
tgtcttaaacacggaaagtgctgataaattttagggctaatttttatttttgagcaggccagtaagacctgtgtttcacaattgtgtgtgacacacaaaagcaggagctcaccttccctg

SEQ ID NO: 143959 - DNA, 120 bp, Artificial Sequence
  ENSG00000104731_35 (sequence is synthesized)
tcaccttccctgcagcccgggatgggccttgggggtttgactgcatttgtccatcttcgtctctcagttttcgtgcatttagaaactaggcttgactgggtacagtggctcatgcctgta

SEQ ID NO: 143960 - DNA, 71 bp, Artificial Sequence
  ENSG00000104731_36 (sequence is synthesized)
caggagtttgagagcagtctggccaatgtggtgaaacccagtctctgctaacgatacaggctgaggcagag

SEQ ID NO: 143961 - DNA, 120 bp, Artificial Sequence
  ENSG00000104731_37 (sequence is synthesized)
gcacctgggaggcggaggttgcagtgagcaaagattgcgccattgcactccattgtgggcaacagcgagacttcatctcaaacaaaacaaaaacaaaaaaactaggctggaattaggaga

SEQ ID NO: 143962 - DNA, 120 bp, Artificial Sequence
  ENSG00000104731_38 (sequence is synthesized)
aacaaaacaaaaacaaaaaaactaggctggaattaggagaatgaccagtcctaataacaacgagggctttcagtaccttccagattgatgggcctggtgggcgttcggtcgttttcattg

SEQ ID NO: 143963 - DNA, 120 bp, Artificial Sequence
  ENSG00000104731_39 (sequence is synthesized)
taagcgctcgcggaaggaggagatgtgactgagcccagtcgaatcacactgattggaggaaagctgagcgggctgtggctccgcggcgggtcctgggaataagtctcacgtgtgcctgct

SEQ ID NO: 143964 - DNA, 120 bp, Artificial Sequence
  ENSG00000104731_40 (sequence is synthesized)
ctacgacgccaccaggaaccgttggtttgagggacagctgaaggtagtgcaacctctgagtagcatgcgccgtggtgcgcagccctaacttgggtccctgccaccactgccttcctccag

SEQ ID NO: 143965 - DNA, 120 bp, Artificial Sequence
  ENSG00000104731_41 (sequence is synthesized)
caccttttggtattggggcccccaaagcccatgagctctctcaagaggggcgagggttccgtctctgactgtcctgggtgactaggcttggagagcccttggtcacggtccccttagtct

SEQ ID NO: 143966 - DNA, 120 bp, Artificial Sequence
  ENSG00000104731_42 (sequence is synthesized)
gtcctggatgctggcggggctgctacctcagaagccagttgccctgggctgaggtgcccgggacctccccggccctctgtgtgagaagggtttgctggaggtcctggtgtggaccagcct

SEQ ID NO: 143967 - DNA, 120 bp, Artificial Sequence
  ENSG00000104731_43 (sequence is synthesized)
gtgttatgacccttgagcttccctggtttccgacaccatctttactgtccacgtgagcatagctgctgtccagggccagcccagcacaggcacagcagtgggtgacagtcccagaagggg

SEQ ID NO: 143968 - DNA, 120 bp, Artificial Sequence
  ENSG00000104731_44 (sequence is synthesized)
ggccctgccctgcttttctacatcaccactgtcttgtcagttagctcggctcaggcattgcatgcctgatctgtatctttgggaatcctgtgaggtaatggttctagatccaaaagaatg

SEQ ID NO: 143969 - DNA, 120 bp, Artificial Sequence
  ENSG00000104731_45 (sequence is synthesized)
ttatccaggcacattctgtgcgctactgaacttcagaaagcaccagtccatccagtgtgcagaggctgatgaaaaagttaataaacagaatggcgactccgatgttgagcaagatcacca

SEQ ID NO: 143970 - DNA, 120 bp, Artificial Sequence
  ENSG00000104731_46 (sequence is synthesized)
tgaccaccaggataggcgctgagccctggaagagagcgaggggaagaggtgagcgacagctgcggggggctctgcctgggccaccacgcctcccacccacgtcttttcaccaagctagca

SEQ ID NO: 143971 - DNA, 120 bp, Artificial Sequence
  ENSG00000104731_47 (sequence is synthesized)
atgtgtttcaagatatttctctgtctgttgcttgtctttttattttctaatggtgtatttttgaagttttttatgttggcggagtccagtttataatgttctacctaggaaatctttatg

SEQ ID NO: 143972 - DNA, 120 bp, Artificial Sequence
  ENSG00000104731_48 (sequence is synthesized)
cagtccaaggtcttggagatgttctcctgttttattcttgaggtttgagcttagctagctgggctcttagcaggatggttttggtagttgatagatcagattaaatggtatttaatttgt

SEQ ID NO: 143973 - DNA, 120 bp, Artificial Sequence
  ENSG00000104731_49 (sequence is synthesized)
gcagatgagcagagtcctgctagagaggtcagctcagcgtccaggagggggcgcctgcccccgaggaggccacggacatgcctgggaagttgctgccggagaagtgtgctctgatgtggc

SEQ ID NO: 143974 - DNA, 120 bp, Artificial Sequence
  ENSG00000104731_50 (sequence is synthesized)
tacatttggggacgcgggctccccagaggcccaagcgagaaagccgggggttcccaggctgggggtgcaggacgggccaggcactgccctgcagggcccgcccccctgcccctgcaccct

SEQ ID NO: 143975 - DNA, 120 bp, Artificial Sequence
  ENSG00000104731_51 (sequence is synthesized)
cacacccatcttcctctctcagcctgaccccagggcctgggagcccccggcagaccggccctccttgccaaacagtggctgccctttatggactcggcgcctggcagagccactgtggag

SEQ ID NO: 143976 - DNA, 120 bp, Artificial Sequence
  ENSG00000104731_52 (sequence is synthesized)
gaggagttggctgtcatggtcaggggaggcagcccttgggttgtcaaggttggtggtcaacgttgaacccatatctgctggaatctcccggtctgttccacacacgatcatgcgggaagc

SEQ ID NO: 143977 - DNA, 120 bp, Artificial Sequence
  ENSG00000104731_53 (sequence is synthesized)
tctgggacccgaaggctgttctgatctcgggggtcacaagttctcacagcagcctggggtcaccagggaccagacccggcgttagcctctgtaaggagctgcctggctgctgggctgagc

SEQ ID NO: 143978 - DNA, 120 bp, Artificial Sequence
  ENSG00000104731_54 (sequence is synthesized)
tttgttgcaggcccaggaagatgaccaagaaggacagagcagagccccatctaccactgctgggagggcccgagggagcacgtgcacagcagagccccatcctccactccctgggctcga

SEQ ID NO: 143979 - DNA, 120 bp, Artificial Sequence
  ENSG00000104731_55 (sequence is synthesized)
agaggcttcctcggtgtggatggcagctgttaacgagcagtggtggtgcagctggaggcctctgtcccatggggcacagacgggagaaggatggcggacgggtgtgcacgcttgggagga

SEQ ID NO: 143980 - DNA, 120 bp, Artificial Sequence
  ENSG00000104731_56 (sequence is synthesized)
cgggcgggcggcataggcctgagcaggtggcatgggcgcacgagaagggtgtgtctgagacaggatgtttatcccaaatgccaggagtggacgaggcggacgagtggcagtgaggtaggc

SEQ ID NO: 143981 - DNA, 120 bp, Artificial Sequence
  ENSG00000104731_57 (sequence is synthesized)
atgtgaggttgttgcctggcccactctgccgaccccagaaacccagcggcctgggcccagcacccggctacacatggggtgagctcacgcccacactgtggcctgtgcccgtcacggggc

SEQ ID NO: 143982 - DNA, 120 bp, Artificial Sequence
  ENSG00000104731_58 (sequence is synthesized)
tgcttgcttctcctaggcttgggaacaagctggcatgaacgctgtggccgcattcacagctcaggcacttccactttgggtttcatgaagaaacagacttaaagagcatttgttcctaat

SEQ ID NO: 143983 - DNA, 120 bp, Artificial Sequence
  ENSG00000104731_59 (sequence is synthesized)
gggtgggctgaagcttgggaggagcattcagcttctctccacagtatggcttcacctgttcctgagcgccctgctaccctcttgctaacctgggtggctgaggtcctctgctttggtggc

SEQ ID NO: 143984 - DNA, 120 bp, Artificial Sequence
  ENSG00000104731_60 (sequence is synthesized)
gttgacttcccgtctgcagccagcgccaggtgccagcccccgcctctgctcatcgggaagcgctggcctgcaggtgctttgtggttgccacggacccttgttctgtccctttccagcacc

SEQ ID NO: 143985 - DNA, 120 bp, Artificial Sequence
  ENSG00000104731_61 (sequence is synthesized)
caccccccacgcgctgtgcattccgtagttcattttcaaggcagggggcacatggtgaaaatacagcctggctttttttcaacaaatgcagctgcactcttccttgcttgttttgaaggc

SEQ ID NO: 143986 - DNA, 120 bp, Artificial Sequence
  ENSG00000104731_62 (sequence is synthesized)
tgagccagcaacctccttggcacctggggacagtcgcttcctcagtttctgcgtaccgactgcctcacctgacacgcggcctgggcgcgagagaagccaaccaggtgcctgagttgactg

SEQ ID NO: 143987 - DNA, 120 bp, Artificial Sequence
  ENSG00000104731_63 (sequence is synthesized)
actccttccgccctccagcttcctccctccgccctccaacctcctccctccaccctccaacctcctccctccgccctccaacctcctccctctgccctgcaacctcctcccctctgccct

SEQ ID NO: 143988 - DNA, 120 bp, Artificial Sequence
  ENSG00000104731_64 (sequence is synthesized)
ccaacctcctccctccgccctccaatctcctccctctgccctgcatcctcctcccctccgccctccaacctcctccctccgccctccaacctcctccctccgccctccaacctcctccct

SEQ ID NO: 143989 - DNA, 120 bp, Artificial Sequence
  ENSG00000104731_65 (sequence is synthesized)
ccgccctctgccctcctccctctgccctccagcgttctccctcctccctccaccctgtttcctccctccacctcttctctcctccctccaccctcttccttctaccctcttccctctgcc

SEQ ID NO: 143990 - DNA, 120 bp, Artificial Sequence
  ENSG00000104731_66 (sequence is synthesized)
ctcttcttctgccctcctccctccaccctctttcctccctcctccctccaccctctgccctcctccctctaccccctgccctcctccctccgccttatctggaatcggggtcttggtcct

SEQ ID NO: 143991 - DNA, 120 bp, Artificial Sequence
  ENSG00000104731_67 (sequence is synthesized)
tggaggcagaccctggcccgggcgaggttaaaggtactgcaggagggcggcatcatgatgtcctgaagcttgttgcgcccggtgctgtcggccggctgaaggcagaaacagtcacagcac

SEQ ID NO: 143992 - DNA, 120 bp, Artificial Sequence
  ENSG00000104731_68 (sequence is synthesized)
ctgcagctatggaaggcgacgactgaaaatctaataggcaccttgatgtcaagtttccaagaccaaaggcaagaacagtcagatcaaacttcggaagagtcagagaaagtgagcatgacc

SEQ ID NO: 143993 - DNA, 120 bp, Artificial Sequence
  ENSG00000104731_69 (sequence is synthesized)
tagaggagggagacggtccttccgctgtctcctgcagagcgtctgtcgcacgtatgaggtgaaatccgcactgtcccatgaagactgtgaggggagttgccacccgcacacggcccagga

SEQ ID NO: 143994 - DNA, 120 bp, Artificial Sequence
  ENSG00000104731_70 (sequence is synthesized)
gcgccagcagcttggggaccaccacaggcctcagggtctcttcagtccgacgggtccagctgtcgataaaacctcccggggaaggagtaaaggacaaccaagaacctgaactgcaaaagt

SEQ ID NO: 143995 - DNA, 120 bp, Artificial Sequence
  ENSG00000104731_71 (sequence is synthesized)
atgaaaaacatttcatttccctcgagttctccacactttaggtctgcagcgccttgggggtgactgatggccctccgtgagacgcggtggccatgtgcttctacaagtgaaaaggagcaa

SEQ ID NO: 143996 - DNA, 120 bp, Artificial Sequence
  ENSG00000104731_72 (sequence is synthesized)
gtgtggttagagcctggagtatggacgtcccggggaccgctggcccatggcctggcttggggccttacaggggagcgagctgagtgaatgcaggggagggcccgtctttctacagtgtgt

SEQ ID NO: 143997 - DNA, 120 bp, Artificial Sequence
  ENSG00000104731_73 (sequence is synthesized)
caccagtccatccagtgtgcagaggctggtaagtaaaacaggccagccgtgggcacagacagtttcaccagaggccccggggcagagggtcttctccagctcttccagggcggggctcat

SEQ ID NO: 143998 - DNA, 120 bp, Artificial Sequence
  ENSG00000104731_74 (sequence is synthesized)
ctgttcctgggccagaggtggacctgtctgcaggcttgtaagggtggggagacgccagcctggcccatgggctgtccacacccaccccccgcagaccgcgctgctgtctgcaggggatgc

SEQ ID NO: 143999 - DNA, 120 bp, Artificial Sequence
  ENSG00000104731_75 (sequence is synthesized)
caccacttcctcctggcctcgggtgcacaggtgaaacatgaagaagctattggggcggaaaatggctctcaccaggctgctctcgggttaatgaaaactcgtcaaattctccatgcagca

SEQ ID NO: 144000 - DNA, 120 bp, Artificial Sequence
  ENSG00000104731_76 (sequence is synthesized)
gcagccagccgggcacatgctgtcctgccctgcccgactgtgtgcagggaagcaggtcccctgggcctgggcggagggactgcgtgcctgtcagggaaggccgaggctccggacaggcgg

SEQ ID NO: 144001 - DNA, 120 bp, Artificial Sequence
  ENSG00000104731_77 (sequence is synthesized)
gaagcagccttctgcttaatcaccccatgtggaaaccaattaaagattcgattctctcagacccggggcattttagccttggttgaatcctcctggaattcacagggaagtggctttgcc

SEQ ID NO: 144002 - DNA, 120 bp, Artificial Sequence
  ENSG00000104731_78 (sequence is synthesized)
ctctgccctcgctgctggaaggcaaggggccgttctcgccttggttttctaggttgtgttgcggcaggagctgactgcccctaggcctagatctctgcacaacttcgctcagggacacct

SEQ ID NO: 144003 - DNA, 120 bp, Artificial Sequence
  ENSG00000104731_79 (sequence is synthesized)
gcctctgtgcatgtctcatggtgtgaatgtgtttcctgctcacaggtaccgttttgtgtcatgcagttactggaatgtacaaaagcagctgtgatctttgtgagagctgcacagagcagg

SEQ ID NO: 144004 - DNA, 120 bp, Artificial Sequence
  ENSG00000104731_80 (sequence is synthesized)
agtctgagagctgcacagagcaggagtctttatttggttcacttctggtctgcagcaaccacttgctactaaaagatggaaaagatgtacaaaaatgtcacagccctttagaaagcgaca

SEQ ID NO: 144005 - DNA, 120 bp, Artificial Sequence
  ENSG00000104731_81 (sequence is synthesized)
ttatcagaaatgtatgaccttcagtcctccctccctctcctatgcccccaccagaccaggcggcgagaaggaacagggagtgaacatgtaacggaaaacaataaaactgaatttaactgg

SEQ ID NO: 144006 - DNA, 120 bp, Artificial Sequence
  ENSG00000104731_82 (sequence is synthesized)
tgccgggagactcagggctgggggagacatgccctggtcaccactgcggagactcagggctgggggagacatgccctgcacgtttcctgctcgaaaaccaggagagcctccacgtgccga

SEQ ID NO: 144007 - DNA, 120 bp, Artificial Sequence
  ENSG00000104731_83 (sequence is synthesized)
tgccgaccccagaaacccagcggcctgggcccagcacccggctacacatggggctgagccagcaacctccttggcacctggggacagtcgcttcctcagtttctgcgtaccgactgcctc

SEQ ID NO: 144008 - DNA, 120 bp, Artificial Sequence
  ENSG00000104731_84 (sequence is synthesized)
catggaactcactcgcgattcctgcacgcgcgctgacccggggacgccatggaactcactcgcgattcctgctcacagcacgtttcctgctcgaaaaccaggagagcctccacgtgccga

SEQ ID NO: 144009 - DNA, 120 bp, Artificial Sequence
  ENSG00000104731_85 (sequence is synthesized)
ctagctctgtccacacatccattgcgcagctctgcagcggaaggaccttcagtaaagacgctggtttgtaacgagagaagcgttccaaagtgtcacacgacattgtttattactaaaagg

SEQ ID NO: 144010 - DNA, 120 bp, Artificial Sequence
  ENSG00000104738_0 (sequence is synthesized)
gtctcgcggtttgggagcgctactcgccaggtggactcggagtccgcgagcgtcgtcggcaagcggccgcctttccacggtaaccgcgcgccggcggggagggcgtggcgcggagccgac

SEQ ID NO: 144011 - DNA, 120 bp, Artificial Sequence
  ENSG00000104738_1 (sequence is synthesized)
gggaacgtccgcgctgcggagcagggcagggaagccgggaggcgggcccggcccgagcttgtccttgtcgcgcaggtactccgagcactatgtcgtccccggcgtcgaccccgagccgcc

SEQ ID NO: 144012 - DNA, 120 bp, Artificial Sequence
  ENSG00000104738_2 (sequence is synthesized)
gcggcagccggcgtggaagggccacccccgcccagacgcctcggagtgaggatgccaggtcatctccctctcagagacgtagaggcgaggattccacctccacgggggagttgcagccga

SEQ ID NO: 144013 - DNA, 120 bp, Artificial Sequence
  ENSG00000104738_3 (sequence is synthesized)
tgccaacctcgcctggagtggacctgcagagccctgctgcgcaggacgtgctgttttccagccctccccaaatgcattcttcagctatccctcttgactttgatgttagttcaccactga

SEQ ID NO: 144014 - DNA, 120 bp, Artificial Sequence
  ENSG00000104738_4 (sequence is synthesized)
catacggcactcccagctctcgggtagagggaaccccaagaagtggtgttaggggcacacctgtgagacagaggcctgacctgggctctgcacagaagggcctgcaagtggatctgcagt

SEQ ID NO: 144015 - DNA, 120 bp, Artificial Sequence
  ENSG00000104738_5 (sequence is synthesized)
ctgacggggcagcagcagaagatatagtggcaagtgagcagtctctaggccaaaaacttgtgatctggggaacagatgtaaatgtggcagcatgcaaagaaaactttcagagatttcttc

SEQ ID NO: 144016 - DNA, 120 bp, Artificial Sequence
  ENSG00000104738_6 (sequence is synthesized)
agcgttttattgaccctctggctaaagaagaagaaaatgttggcatagatattactgaacctctatacatgcaacgacttggggagattaatgttattggtgagccatttttaaatgtga

SEQ ID NO: 144017 - DNA, 120 bp, Artificial Sequence
  ENSG00000104738_7 (sequence is synthesized)
actgtgaacacatcaaatcatttgacaaaaatttgtacagacaactcatctcttacccacaggaagttattccaacttttgacatggctgtcaatgaaatcttctttgaccgttaccctg

SEQ ID NO: 144018 - DNA, 120 bp, Artificial Sequence
  ENSG00000104738_8 (sequence is synthesized)
actcaatcttagaacatcagattcaagtaagaccattcaacgcattgaagactaagaatatgagaaacctgaatccagaagacattgaccagctcatcaccatcagcggcatggtgatca

SEQ ID NO: 144019 - DNA, 120 bp, Artificial Sequence
  ENSG00000104738_9 (sequence is synthesized)
ggacatcccagctgattcccgagatgcaggaggccttcttccagtgccaagtgtgtgcccacacgacccgggtggagatggaccgcggccgcattgcagagcccagtgtgtgcgggcgct

SEQ ID NO: 144020 - DNA, 120 bp, Artificial Sequence
  ENSG00000104738_10 (sequence is synthesized)
gccacaccacccacagcatggcactcatccacaaccgctccctcttctctgacaagcagatgatcaagcttcaggagtctccggaagacatgcctgcagggcagacaccacacacagtta

SEQ ID NO: 144021 - DNA, 120 bp, Artificial Sequence
  ENSG00000104738_11 (sequence is synthesized)
tcctgtttgctcacaatgatctcgttgacaaggtccagcctggggacagagtgaatgttacaggcatctatcgagctgtgcctattcgagtcaatccaagagtgagtaatgtgaagtctg

SEQ ID NO: 144022 - DNA, 120 bp, Artificial Sequence
  ENSG00000104738_12 (sequence is synthesized)
tctacaaaacccacattgatgtcattcattatcggaaaacggatgcaaaacgtctgcatggccttgatgaagaagcagaacagaaacttttttcagagaaacgtgtggaattgcttaagg

SEQ ID NO: 144023 - DNA, 120 bp, Artificial Sequence
  ENSG00000104738_13 (sequence is synthesized)
aactttccaggaaaccagacatttatgagaggcttgcttcagccttggctccaagcatttatgaacatgaagatataaagaagggaattttgcttcagctctttggcgggacaaggaagg

SEQ ID NO: 144024 - DNA, 120 bp, Artificial Sequence
  ENSG00000104738_14 (sequence is synthesized)
attttagtcacactggaaggggcaaatttcgggctgagatcaacatcttgctgtgtggcgaccctggtaccagcaagtcccagctgctgcagtacgtgtacaacctcgtccccaggggcc

SEQ ID NO: 144025 - DNA, 120 bp, Artificial Sequence
  ENSG00000104738_15 (sequence is synthesized)
agtacacgtctgggaagggctccagtgcagttggcctcactgcgtacgtaatgaaagaccctgagacaaggcagctggtcctgcagacaggtgctcttgtcctgagtgacaacggcatct

SEQ ID NO: 144026 - DNA, 120 bp, Artificial Sequence
  ENSG00000104738_16 (sequence is synthesized)
gctgtatcgatgagttcgacaagatgaatgaaagtacaagatcggtattgcatgaagtcatggaacagcagactctgtccattgcaaaggctgggatcatctgtcagctcaatgcgcgca

SEQ ID NO: 144027 - DNA, 120 bp, Artificial Sequence
  ENSG00000104738_17 (sequence is synthesized)
tttgatcttcctcttgctggaccctcaggacgaagcctatgacaggcgtctggctcaccacctggtcgcactgtactaccagagcgaggagcaggcagaggaggagctcctggacatggc

SEQ ID NO: 144028 - DNA, 120 bp, Artificial Sequence
  ENSG00000104738_18 (sequence is synthesized)
ggtgctaaaggactacattgcctacgcgcacagcaccatcatgccgcggctaagtgaggaagccagccaggctctcatcgaggcttatgtagacatgaggaagattggcagtagccgggg

SEQ ID NO: 144029 - DNA, 120 bp, Artificial Sequence
  ENSG00000104738_19 (sequence is synthesized)
aatggtttctgcataccctcgacagctagagtcattaatccgcttagcagaagcccatgctaaagtaagattgtctaacaaagttgaagccattgatgtggaagaggccaaacgcctcca

SEQ ID NO: 144030 - DNA, 120 bp, Artificial Sequence
  ENSG00000104738_20 (sequence is synthesized)
tcgggaagctctgaagcagtctgcaactgatccccggactggcatcgtggacatatctattcttactacggggatgagtgccacctctcgtaaacggaaagaagaattagctgaagcatt

SEQ ID NO: 144031 - DNA, 120 bp, Artificial Sequence
  ENSG00000104738_21 (sequence is synthesized)
gaaaaagcttattttatctaagggcaaaacaccagctctaaaataccagcaactttttgaagatattcggggacaatctgacatagcaattactaaagatatgtttgaagaagcactgcg

SEQ ID NO: 144032 - DNA, 120 bp, Artificial Sequence
  ENSG00000104738_22 (sequence is synthesized)
tgccctggcagatgatgatttcctgacagtgactgggaagaccgtgcgcttgctctgaagccttgtgagcaaggaaggctccctgcatgtcctgcttgctgcacgccacatgggtgtggt

SEQ ID NO: 144033 - DNA, 120 bp, Artificial Sequence
  ENSG00000104738_23 (sequence is synthesized)
ctgcatctcagttggccgccatcagtgtaaatagagcttaaagtcatggtttggctgcataaaaattttctaacttgggttcaatatttgtagtgaagtatctgttttcatttttttcac

SEQ ID NO: 144034 - DNA, 66 bp, Artificial Sequence
  ENSG00000104738_24 (sequence is synthesized)
agccaagatggtgaaaccccgtctctagtaaagataacaaaaaattagctgggcttgaaaacccag

SEQ ID NO: 144035 - DNA, 81 bp, Artificial Sequence
  ENSG00000104738_25 (sequence is synthesized)
cagcaatctgccaattttcaaacataccgtagagattattttcaggtgccattttatagtatagcagcagggcttttactc

SEQ ID NO: 144036 - DNA, 120 bp, Artificial Sequence
  ENSG00000104738_26 (sequence is synthesized)
tcaggtgccattttatagtatagcagcagggcttttactctgtgtatgcacagatgcagtctggggcatggtttgtgtgctggactttctcatggccatcatcagtatgcttatggattt

SEQ ID NO: 144037 - DNA, 120 bp, Artificial Sequence
  ENSG00000104738_27 (sequence is synthesized)
atcagtatgcttatggatttgatgacaggcatagcctgggcatatcacctcattggtaaagggctagagcctttcttttttatggcacttctttttttgagatagggtcttactctgtca

SEQ ID NO: 144038 - DNA, 120 bp, Artificial Sequence
  ENSG00000104738_28 (sequence is synthesized)
tacaatcacggctcaatgtaggcttaacctcctgggctcaggtgtatgtcactatgcccggctactttttgtattttttggtagagacggcttcgccacgttgcccaggctgcaagcgat

SEQ ID NO: 144039 - DNA, 81 bp, Artificial Sequence
  ENSG00000104738_29 (sequence is synthesized)
ttgttttattttttattttttgagaggtatgattctttctagagattttttctcatggctactattagatcaggaatgggt

SEQ ID NO: 144040 - DNA, 120 bp, Artificial Sequence
  ENSG00000104738_30 (sequence is synthesized)
gagattttttctcatggctactattagatcaggaatgggtgattggagattattagattctaggttaacttctaccactttaccctaatacataaaactttttcctaaataaatgatgga

SEQ ID NO: 144041 - DNA, 120 bp, Artificial Sequence
  ENSG00000104738_31 (sequence is synthesized)
aggaataatacttggttacctggcattatttttcagtaagaaaaaagctttactaaccactacatttatggaaatttgtaggggtaagtattttataggtcataaaaaacaccataatat

SEQ ID NO: 144042 - DNA, 120 bp, Artificial Sequence
  ENSG00000104738_32 (sequence is synthesized)
aacgaatctcattttctttaaatgtgaattaaatcctaacagtcatctttataaaatgaccataggctaaaatcttacgtgtaagtactactacaataaataatttctgaaacctttaaa

SEQ ID NO: 144043 - DNA, 120 bp, Artificial Sequence
  ENSG00000104738_33 (sequence is synthesized)
attacttcctcccatattgcaaaattgatctttccaaatgttgcaaaagggggaaatagttcatttatgtaggtagtacacacactttatatgtttaagtacttacaagcatagtgaatt

SEQ ID NO: 144044 - DNA, 120 bp, Artificial Sequence
  ENSG00000104738_34 (sequence is synthesized)
taagatcaaagacctggtttcaaatagaggcaacactacacagtaatttggaaactgaaaaagtcatccagtttctgtaagcttccttttgcttgtaaaaaacagaatgagctgtctttt

SEQ ID NO: 144045 - DNA, 120 bp, Artificial Sequence
  ENSG00000104738_35 (sequence is synthesized)
aggttcacttttcagcatcctggtacatgagctgaagtgcatgatggcacatttaggttattcaagcattgtgatattaagaaggttcctggtgctttgatgagctttgcatcctaactg

SEQ ID NO: 144046 - DNA, 120 bp, Artificial Sequence
  ENSG00000104738_36 (sequence is synthesized)
agctcctaaaaattctaagatgaaagttacagacattatgtaatttttttgtgtgtcatagtcttgggggttgttaatgaagaaataagactgtgtcatctgtatgtgaaattgatacaa

SEQ ID NO: 144047 - DNA, 120 bp, Artificial Sequence
  ENSG00000104738_37 (sequence is synthesized)
agcaatccttatgagccccattgtgccccatgtgagcacttttcccagacaggcctgattctccctatgagtgctcacagccttctcctctccccacatgccacattccttccctctgcc

SEQ ID NO: 144048 - DNA, 120 bp, Artificial Sequence
  ENSG00000104738_38 (sequence is synthesized)
acgccatgcccgtctctgttcttcagagctacgttagatgccaccctctccaagaattcttcccaagcatctcccagttggaatatgttcacccaccactgcacgctgcacgttgatgtc

SEQ ID NO: 144049 - DNA, 120 bp, Artificial Sequence
  ENSG00000104738_39 (sequence is synthesized)
ttcacctgcgatttctgtggtctgtctgtgtagtctctaccacttgatgagctccggggcccaggaccatatctgagttccgtttacttaatggaagcctaagtgttcaaaattcaccca

SEQ ID NO: 144050 - DNA, 80 bp, Artificial Sequence
  ENSG00000104738_40 (sequence is synthesized)
ggcgtggaagggccacccccgcccagacgcgtgagtcccccgagccgggcccactacagcccccggcgccgccccgtctg

SEQ ID NO: 144051 - DNA, 120 bp, Artificial Sequence
  ENSG00000104738_41 (sequence is synthesized)
gcacagacacccacagcaggctgtggcctgggtgctgcttaattcgattgccatttgcctctgtttggtttggttcagtggtgagtcataatgccccaaggaaaagacaaatccaggaag

SEQ ID NO: 144052 - DNA, 120 bp, Artificial Sequence
  ENSG00000104738_42 (sequence is synthesized)
gccggccctgaaagttaatggctgtcttttctgttttgtgtgacacaagctcggagtgaggatgccaggtcatctccctctcagagacgtagaggcgaggattccacctccacgggggag

SEQ ID NO: 144053 - DNA, 120 bp, Artificial Sequence
  ENSG00000104738_43 (sequence is synthesized)
gcttagtgagcagaggaagcagcttctctggtgcttttttttaatagaacatttaagagtgctcagaatctcagccaccgcaggttgcaataaatattcagtttgctgttgcgattagat

SEQ ID NO: 144054 - DNA, 120 bp, Artificial Sequence
  ENSG00000104738_44 (sequence is synthesized)
ccttgaatttgtcctaaagctcttgcaaggtgcctgcttcctgagaaagatgtggttatagcacacattcatctaaactcagtccttggcatgaatctgaggacagggcttatccaggct

SEQ ID NO: 144055 - DNA, 120 bp, Artificial Sequence
  ENSG00000104738_45 (sequence is synthesized)
gttttaaggagattctgtctccttgactgtctgggaagttttgttaacccattttagagaagttgtttgtttcttagcagcagctgcttgctgcacagatgtgtagactgttaaggaaag

SEQ ID NO: 144056 - DNA, 120 bp, Artificial Sequence
  ENSG00000104738_46 (sequence is synthesized)
cagcagctagtggcttacagaaatttccaaataattaaaaactcattcccttcaaatgtactcagcccctgtcgccttatctttctaggtgatactactaaaggaatatttttgagaatt

SEQ ID NO: 144057 - DNA, 120 bp, Artificial Sequence
  ENSG00000104738_47 (sequence is synthesized)
cagcccgacgtggtgcctcgctctgaagtgcacctgttgcctacgctggttgctgagccactcggaggaagatatgggaaggtaaaagtgcatctcctggttgtgccctcaggcatctat

SEQ ID NO: 144058 - DNA, 120 bp, Artificial Sequence
  ENSG00000104738_48 (sequence is synthesized)
aggggcggagacgaccttgccgccggcgggaactctgggtctcgcggtttgggagcgctactcgccaggtggactcggagtccgcgagcgtcgtcggcaagcggccgcctttccacggta

SEQ ID NO: 144059 - DNA, 120 bp, Artificial Sequence
  ENSG00000104738_49 (sequence is synthesized)
acgcgcggaggcggggctgcggggcgcggcggcaggaactttcccggggacccctgcgggaaggcctggccagtaagcgcgcctctttggcccgaatcaacatggaaacctaaggaaaaa

SEQ ID NO: 144060 - DNA, 120 bp, Artificial Sequence
  ENSG00000104738_50 (sequence is synthesized)
ggggcggagacgaccttgccgccggcgggaactctgggtctcgcggtttgggagcgctactcgccaggtggactcggagtccgcgagcgtcgtcggcaagcggccgcctttccacgctcg

SEQ ID NO: 144061 - DNA, 69 bp, Artificial Sequence
  ENSG00000104738_51 (sequence is synthesized)
cctggggacagagtgaatgttacagacggagttttgctctcgtcacccaggctggagtccaatggcacc

SEQ ID NO: 144062 - DNA, 120 bp, Artificial Sequence
  ENSG00000104738_52 (sequence is synthesized)
gggaagtaaaaatactgcttattaaaaacaaccacgaacccagcattgagctagaagcacagcagctccatttcaccctcagggtgactgtgcccgtgggcatgctcacgtagctacagt

SEQ ID NO: 144063 - DNA, 120 bp, Artificial Sequence
  ENSG00000104738_53 (sequence is synthesized)
tgccctggagcactgctgactagtgggcccaggtgaacacgtcctcgggtctatcatttgcagaaacctgggttctttctcttttgttttgttttgttttgttttgtttcattttgtttt

SEQ ID NO: 144064 - DNA, 120 bp, Artificial Sequence
  ENSG00000104755_0 (sequence is synthesized)
accaactgccattattccggctgggacccaggacttcaagccatgtggcgcgtcttgtttctgctcagcgggctcggcgggctgcggatggacagtaattttgatagtttacctgtgcaa

SEQ ID NO: 144065 - DNA, 120 bp, Artificial Sequence
  ENSG00000104755_1 (sequence is synthesized)
attacagttccggagaaaatacggtcaataataaaggaaggaattgaatcgcaggcatcctacaaaattgtaattgaagggaaaccatatactgtgaatttaatgcaaaaaaacttttta

SEQ ID NO: 144066 - DNA, 120 bp, Artificial Sequence
  ENSG00000104755_2 (sequence is synthesized)
ccccataattttagagtttacagttatagtggcacaggaattatgaaaccacttgaccaagattttcagaatttctgccactaccaagggtatattgaaggttatccaaaatctgtggtg

SEQ ID NO: 144067 - DNA, 120 bp, Artificial Sequence
  ENSG00000104755_3 (sequence is synthesized)
atggttagcacatgtactggactcaggggcgtactacagtttgaaaatgttagttatggaatagaacccctggagtcttcagttggctttgaacatgtaatttaccaagtaaaacataag

SEQ ID NO: 144068 - DNA, 120 bp, Artificial Sequence
  ENSG00000104755_4 (sequence is synthesized)
aaagcagatgtttccttatataatgagaaggatattgaatcaagagatctgtcctttaaattacaaagcgtagagccacagcaagattttgcaaagtatatagaaatgcatgttatagtt

SEQ ID NO: 144069 - DNA, 120 bp, Artificial Sequence
  ENSG00000104755_5 (sequence is synthesized)
gaaaaacaattgtataatcatatggggtctgatacaactgttgtcgctcaaaaagttttccagttgattggattgacgaatgctatttttgtttcatttaatattacaattattctgtct

SEQ ID NO: 144070 - DNA, 120 bp, Artificial Sequence
  ENSG00000104755_6 (sequence is synthesized)
tcattggagctttggatagatgaaaataaaattgcaaccactggagaagctaatgagttattacacacatttttaagatggaaaacatcttatcttgttttacgtcctcatgatgtggca

SEQ ID NO: 144071 - DNA, 120 bp, Artificial Sequence
  ENSG00000104755_7 (sequence is synthesized)
tttttacttgtttacagagaaaagtcaaattatgttggtgcaacctttcaagggaagatgtgtgatgcaaactatgcaggaggtgttgttctgcaccccagaaccataagtctggaatca

SEQ ID NO: 144072 - DNA, 120 bp, Artificial Sequence
  ENSG00000104755_8 (sequence is synthesized)
cttgcagttattttagctcaattattgagccttagtatggggatcacttatgatgacattaacaaatgccagtgctcaggagctgtctgcattatgaatccagaagcaattcatttcagt

SEQ ID NO: 144073 - DNA, 120 bp, Artificial Sequence
  ENSG00000104755_9 (sequence is synthesized)
ggtgtgaagatctttagtaactgcagcttcgaagactttgcacattttatttcaaagcagaagtcccagtgtcttcacaatcagcctcgcttagatccttttttcaaacagcaagcagtg

SEQ ID NO: 144074 - DNA, 120 bp, Artificial Sequence
  ENSG00000104755_10 (sequence is synthesized)
gccacatgtagatttaaagccggttcaaactgtgctgaaggaccatgctgcgaaaactgtctatttatgtcaaaagaaagaatgtgtaggccttcctttgaagaatgcgacctccctgaa

SEQ ID NO: 144075 - DNA, 120 bp, Artificial Sequence
  ENSG00000104755_11 (sequence is synthesized)
tattgcaatggatcatctgcatcatgcccagaaaaccactatgttcagactgggcatccgtgtggactgaatcaatggatctgtatagatggagtttgtatgagtggggataaacaatgt

SEQ ID NO: 144076 - DNA, 120 bp, Artificial Sequence
  ENSG00000104755_12 (sequence is synthesized)
acagacacatttggcaaagaagtagagtttggcccttcagaatgttattctcaccttaattcaaagactgatgtatctggaaactgtggtataagtgattcaggatacacacagtgtgaa

SEQ ID NO: 144077 - DNA, 120 bp, Artificial Sequence
  ENSG00000104755_13 (sequence is synthesized)
gctgacaatctgcagtgcggaaaattaatatgtaaatatgtaggtaaatttttattacaaattccaagagccactattatttatgccaacataagtggacatctctgcattgctgtggaa

SEQ ID NO: 144078 - DNA, 120 bp, Artificial Sequence
  ENSG00000104755_14 (sequence is synthesized)
tttgccagtgatcatgcagacagccaaaagatgtggataaaagatggaacttcttgtggttcaaataaggtttgcaggaatcaaagatgtgtgagttcttcatacttgggttatgattgt

SEQ ID NO: 144079 - DNA, 120 bp, Artificial Sequence
  ENSG00000104755_15 (sequence is synthesized)
actactgacaaatgcaatgatagaggtgtatgcaataacaaaaagcactgtcactgtagtgcttcatatttacctccagattgctcagttcaatcagatctatggcctggtgggagtatt

SEQ ID NO: 144080 - DNA, 120 bp, Artificial Sequence
  ENSG00000104755_16 (sequence is synthesized)
gacagtggcaattttccacctgtagctataccagccagactccctgaaaggcgctacattgagaacatttaccattccaaaccaatgagatggccatttttcttattcattcctttcttt

SEQ ID NO: 144081 - DNA, 120 bp, Artificial Sequence
  ENSG00000104755_17 (sequence is synthesized)
attattttctgtgtactgattgctataatggtgaaagttaatttccaaaggaaaaaatggagaactgaggactattcaagcgatgagcaacctgaaagtgagagtgaacctaaagggtag

SEQ ID NO: 144082 - DNA, 120 bp, Artificial Sequence
  ENSG00000104755_18 (sequence is synthesized)
tctggacaacagagatgccatgatatcacttcttctagagtaattatctgtgatggatggacacaaaaaaatggaaagaaaagaatgtacattacctggtttcctgggattcaaacctgc

SEQ ID NO: 144083 - DNA, 120 bp, Artificial Sequence
  ENSG00000104755_19 (sequence is synthesized)
aaacctgcatattgtgattttaatttgaccagaaaatatgatatatatgtataatttcacagataatttacttatttaaaaatgcatgataatgagttttacattacaaatttctgtttt

SEQ ID NO: 144084 - DNA, 120 bp, Artificial Sequence
  ENSG00000104755_20 (sequence is synthesized)
tatcttacgctatttctgttggttagtagacactaattctgtcagtaggggcatggtataaggaaatatcataatgtaatgaggtggtactatgattaaaagccactgttacatttcaaa

SEQ ID NO: 144085 - DNA, 120 bp, Artificial Sequence
  ENSG00000104755_21 (sequence is synthesized)
gatttaattatttcaacatctgtaaaatccatctgggattggacatttttagggaaggatttttattagtaattaaattttttctcattaagtctattataattttctaatttcttttgg

SEQ ID NO: 144086 - DNA, 120 bp, Artificial Sequence
  ENSG00000104756_0 (sequence is synthesized)
gaggaccggccgaaccttgggtgtgggacagagtgcgtgcgtgtggtgtgtccccaagggcaggaaggtggcgaagggaggcgaatccgagtgggtggagggaggggaagggcgggagga

SEQ ID NO: 144087 - DNA, 120 bp, Artificial Sequence
  ENSG00000104756_1 (sequence is synthesized)
gaaaaaggtgggaggaggaccaggtgggagggtggcggctcactcaggacccagcgggggcagcgcgatgaggcgggtgaccctgttcctgaacggcagccccaagaacggaaaggtggt

SEQ ID NO: 144088 - DNA, 120 bp, Artificial Sequence
  ENSG00000104756_2 (sequence is synthesized)
tgctgtatatggaactttatctgatttgctttctgtggccagcagtaaactcggcataaaagccaccagtgtgtataatgggaaaggtggactgattgatgatattgctttgatcaggga

SEQ ID NO: 144089 - DNA, 120 bp, Artificial Sequence
  ENSG00000104756_3 (sequence is synthesized)
tgatgatgttttgtttgtttgtgaaggagagccatttattgatcctcagacagattctaagcctcctgagggattgttaggattccacacagactggctgacattaaatgttggagggcg

SEQ ID NO: 144090 - DNA, 120 bp, Artificial Sequence
  ENSG00000104756_4 (sequence is synthesized)
gtactttacaactacacggagcactttagtgaataaagaacctgacagtatgctggcccacatgtttaaggacaaaggtgtctggggaaataagcaagatcatagaggagctttcttaat

SEQ ID NO: 144091 - DNA, 120 bp, Artificial Sequence
  ENSG00000104756_5 (sequence is synthesized)
tgaccgaagtcctgagtacttcgaacccattttgaactacttgcgtcatggacagctcattgtaaatgatggcattaatttattgggtgtgttagaagaagcaagattttttggtattga

SEQ ID NO: 144092 - DNA, 120 bp, Artificial Sequence
  ENSG00000104756_6 (sequence is synthesized)
ctcattgattgaacacctagaagtggcaataaagaattctcaaccaccggaggatcattcaccaatatcccgaaaggaatttgtccgatttttgctagcaactccaaccaagtcagaact

SEQ ID NO: 144093 - DNA, 120 bp, Artificial Sequence
  ENSG00000104756_7 (sequence is synthesized)
gcgatgccagggtttgaacttcagtggtgctgatctttctcgtttggaccttcgatacattaacttcaaaatggccaatttaagccgctgtaatcttgcacatgcaaatctttgctgtgc

SEQ ID NO: 144094 - DNA, 120 bp, Artificial Sequence
  ENSG00000104756_8 (sequence is synthesized)
aaatcttgaacgagctgatctctctggatcagtgcttgactgtgcgaatctccagggagtcaagatgctctgttctaatgcagaaggagcatccctgaaactgtgtaattttgaggatcc

SEQ ID NO: 144095 - DNA, 120 bp, Artificial Sequence
  ENSG00000104756_9 (sequence is synthesized)
ttctggtcttaaagccaatttagaaggtgctaatctgaaaggtgtggatatggaaggaagtcagatgacaggaattaacctgagagtggctaccttaaaaaatgcaaagttgaagaactg

SEQ ID NO: 144096 - DNA, 120 bp, Artificial Sequence
  ENSG00000104756_10 (sequence is synthesized)
taacctcagaggagcaactctggcaggaactgatttagagaattgtgatctgtctgggtgtgatcttcaagaagccaacctgagagggtccaacgtgaagggagctatatttgaagagat

SEQ ID NO: 144097 - DNA, 120 bp, Artificial Sequence
  ENSG00000104756_11 (sequence is synthesized)
gctgacaccactacacatgtcacaaagtgtcagatgagaattttaggggctggaggaagatgtaaaagatgaaaatgttttccttatcacttttctttctccacccactcagttgtctag

SEQ ID NO: 144098 - DNA, 120 bp, Artificial Sequence
  ENSG00000104756_12 (sequence is synthesized)
aagaaataacactgtaaggaaatttaaaaaaaaaacatttagaggattatgcttgttttgagtggtgcataagggaaaaaactgactttttttccatattctgatttttaacagaaaagc

SEQ ID NO: 144099 - DNA, 120 bp, Artificial Sequence
  ENSG00000104756_13 (sequence is synthesized)
actcatttaatagatgtagggaaactagatattgctgccttttgaatggggtaggggggtttacctggttttatgaccaggcatagtatctattatatttgcttttaaataggcatgatg

SEQ ID NO: 144100 - DNA, 120 bp, Artificial Sequence
  ENSG00000104756_14 (sequence is synthesized)
accatcttggtttgagatgcatttgaggattttaatttatggaaagcacaacatatgcaattatatttattgaattcctagatgcagtatggatatttaaattgttaaaactttatgaaa

SEQ ID NO: 144101 - DNA, 120 bp, Artificial Sequence
  ENSG00000104756_15 (sequence is synthesized)
acttggaaaaggttgttcaggtttataaatagctttagtgatgcctcccctctttaaatacctgtcacaccgtatgaatatggtgagatcagactccctaagactcttttcaggttcatt

SEQ ID NO: 144102 - DNA, 120 bp, Artificial Sequence
  ENSG00000104756_16 (sequence is synthesized)
tttataatgtttactttttaggacagaacagtagctaaattaaagtaatatccagttcttactgattgagacagagtggaaagaaagacatcattgtacatcactgtcattccaaaggta

SEQ ID NO: 144103 - DNA, 120 bp, Artificial Sequence
  ENSG00000104756_17 (sequence is synthesized)
cagtgtaactctggatggaggaataacttacctatcactacaacacttacaaatgagaatttctcagaatttcattctaggcaagttccactcaacaccagatcaagcaattctatctat

SEQ ID NO: 144104 - DNA, 120 bp, Artificial Sequence
  ENSG00000104756_18 (sequence is synthesized)
ttacactattagcctagttttctcatacagtcatcacaagcataggaagatacttcaaaaccaaaaaaaccaaggtgcatcattaatattcatttaattcaaataccaaatagtttacat

SEQ ID NO: 144105 - DNA, 120 bp, Artificial Sequence
  ENSG00000104756_19 (sequence is synthesized)
agggccagcttagaaatagatactaaatccagagctactgcaatcaaagcttatatgagtgaatatggtagagttgcctgctaaaaggcaatgtaatataattgcagctagaaccctaca

SEQ ID NO: 144106 - DNA, 120 bp, Artificial Sequence
  ENSG00000104756_20 (sequence is synthesized)
gtggggaatgaggaattttaaacacacatttgattacagccaccaaaaaaatagacgtaaaaataaaggcatttggctggtccaagatgtaattatcaatcagtcagcacctgtgattct

SEQ ID NO: 144107 - DNA, 120 bp, Artificial Sequence
  ENSG00000104756_21 (sequence is synthesized)
tttacttatttttttgtggttttttttttttaaacaaattttagcccaattttcttgagtcattctctctctgcagcagcagaggaagggcctgtacctccctaccaatgacttggtgtc

SEQ ID NO: 144108 - DNA, 120 bp, Artificial Sequence
  ENSG00000104756_22 (sequence is synthesized)
cttattttctaccccaagagcagggatattagctgtgtccaaatgggttctgaattctacagactcatcaacatgaggcaaggaatcattgaaaaccacctgtgtctcctttgggagaat

SEQ ID NO: 144109 - DNA, 120 bp, Artificial Sequence
  ENSG00000104756_23 (sequence is synthesized)
gacatatctttagtatttacgtagcttattcttctatatctacatatgcaaagctttccttaacagtaaagggtacatatgcatagtgggaggagatcagacctttacaagtgaaggaaa

SEQ ID NO: 144110 - DNA, 120 bp, Artificial Sequence
  ENSG00000104756_24 (sequence is synthesized)
gcaacttcagaaatgaattattttctttgctttattatttttaccaagacagagaagtattgtattgagagataatctattttcataatcaatatgtgcctaaattatatttaaatcatt

SEQ ID NO: 144111 - DNA, 120 bp, Artificial Sequence
  ENSG00000104756_25 (sequence is synthesized)
tcactctgtactatattttcaggaattacagaatgtggtattcattcacttaaaggtacctctgtagaaataacctaaaactgcagaaggatctgaaagatctaaacatggtgtgcttag

SEQ ID NO: 144112 - DNA, 120 bp, Artificial Sequence
  ENSG00000104756_26 (sequence is synthesized)
aaactgcagattttagatctaatgtatactgcattaataaatgatataaagtgtttgttgaaaaggagtttcttctcttccttttgaaaatcatcactttctgtattttgcttacatttc

SEQ ID NO: 144113 - DNA, 120 bp, Artificial Sequence
  ENSG00000104756_27 (sequence is synthesized)
ttcaatatgtgttgacaaccagccctgtggttctgggtagcaaaggaaatacagtataacttaatttgttatggattagtctttttgaaagtaccattaaagtaaatttatttctttaaa

SEQ ID NO: 144114 - DNA, 120 bp, Artificial Sequence
  ENSG00000104756_28 (sequence is synthesized)
gagatgggtcagggagacagaagtaaactgcccgtggataaacaaaatctcccatccgaggtcgcagacaggatttttaaaatgggggcattttcttgttgatttttgccctcctctctg

SEQ ID NO: 144115 - DNA, 120 bp, Artificial Sequence
  ENSG00000104756_29 (sequence is synthesized)
agatgcctcaagcccccacgccccgccgccgccaaacttctctgtactctttttattattttgccttattttgattccctagaggacgggtacagcagacccaaaagggatcgatttgac

SEQ ID NO: 144116 - DNA, 120 bp, Artificial Sequence
  ENSG00000104756_30 (sequence is synthesized)
aattctcttccttcccagccttttgccccacccatgaaagttgttctgctcctttgggaaattttcactgttcgaggcagacatttattgcgttgctaaatgatacctagaagtaactca

SEQ ID NO: 144117 - DNA, 120 bp, Artificial Sequence
  ENSG00000104756_31 (sequence is synthesized)
gcctttacgagtctaagtgtaagagacttaaatgaatatgactgtcacacaaaaaaggtgtgtcctacttcaacactcaacattcaagaaatatttgtcaaagacctgctgtaagccagg

SEQ ID NO: 144118 - DNA, 120 bp, Artificial Sequence
  ENSG00000104756_32 (sequence is synthesized)
gtgggaggaggaccaggtgggagggtggcggctcactcaggacccagcgggggcagcgcgatgaggcgggtgaccctgttcctgaacggcagccccaagaacggaaagatcctcagacag

SEQ ID NO: 144119 - DNA, 120 bp, Artificial Sequence
  ENSG00000104756_33 (sequence is synthesized)
gtgatccacccaccttggcctcccaaaaagtgccggcattacaggcttgagccaccatgcccagactgctttagaattgcatttatactgtgtatttttttaccctaatgacagtgtaag

SEQ ID NO: 144120 - DNA, 120 bp, Artificial Sequence
  ENSG00000104756_34 (sequence is synthesized)
ccagtgacatggaaacatcaggccacatggtggagataacacatacaaatgtaagagacttaaatgaatatgactgtcacacaaaaaaggtgtgtcctacttcaacactcaacattcaag

SEQ ID NO: 144121 - DNA, 120 bp, Artificial Sequence
  ENSG00000104756_35 (sequence is synthesized)
gcgttactcctaccaggttgtagcatgcatctttttgagagagcagctgggatcgagtatactcttgacttaaatatgtttgtttataaagacaaatggagaaatcaatttttttccctg

SEQ ID NO: 144122 - DNA, 120 bp, Artificial Sequence
  ENSG00000104756_36 (sequence is synthesized)
ggcggctcactcaggacccagcgggggcagcgcgatgaggcgggtgaccctgttcctgaacggcagccccaagaacggaaagtgtaagagacttaaatgaatatgactgtcacacaaaaa

SEQ ID NO: 144123 - DNA, 120 bp, Artificial Sequence
  ENSG00000104756_37 (sequence is synthesized)
ttttgccccacccatgaaagttgttctgctcctttgggaaattttcactgttcgaggcagacatttattgcgttgctaaatgatacctagaagtaactcagcctttacgagtctaaggtg

SEQ ID NO: 144124 - DNA, 120 bp, Artificial Sequence
  ENSG00000104760_0 (sequence is synthesized)
aatgctaatttatttcacaggtatgatagtaaccaaaactcaggtaacaaccattagcttttgcaagaagtcaggttgactagcaaggagtctgcttctgctacttggagaagagattta

SEQ ID NO: 144125 - DNA, 120 bp, Artificial Sequence
  ENSG00000104760_1 (sequence is synthesized)
gaattatgtatcttttgttacagatatacagatatacaaatatacagatatacaaataagttttttcaagggggaacatggcaaaggtgttcagtttcatccttgttaccaccgctctga

SEQ ID NO: 144126 - DNA, 120 bp, Artificial Sequence
  ENSG00000104760_2 (sequence is synthesized)
caatgggcagggaaatttcggcgctcgaggactgtgcccaggagcagatgcggctcagagcccaggtgcgcctgcttgagacccgggtcaaacagcaacaggtcaagatcaagcagcttt

SEQ ID NO: 144127 - DNA, 120 bp, Artificial Sequence
  ENSG00000104760_3 (sequence is synthesized)
tgcaggagaatgaagtccagttccttgataaaggagatgagaatactgtcattgatcttggaagcaagaggcagtatgcagattgttcagagattttcaatgatgggtataagctcagtg

SEQ ID NO: 144128 - DNA, 120 bp, Artificial Sequence
  ENSG00000104760_4 (sequence is synthesized)
gattttacaaaatcaaacctctccagagcccagcagaattttctgtttattgtgacatgtccgatggaggaggatggactgtaattcagagacgatctgatggcagtgaaaactttaaca

SEQ ID NO: 144129 - DNA, 120 bp, Artificial Sequence
  ENSG00000104760_5 (sequence is synthesized)
atgaaaatggctttggaaattttgtccaaaaacatggtgaatattggctgggcaataaaaatcttcacttcttgaccactcaagaagactacactttaaaaatcgaccttgcagattttg

SEQ ID NO: 144130 - DNA, 120 bp, Artificial Sequence
  ENSG00000104760_6 (sequence is synthesized)
aaaaaaatagccgttatgcacaatataagaatttcaaagttggagatgaaaagaatttctacgagttgaatattggggaatattctggaacagctggagattcccttgcggggaattttc

SEQ ID NO: 144131 - DNA, 120 bp, Artificial Sequence
  ENSG00000104760_7 (sequence is synthesized)
atcctgaggtgcagtggtgggctagtcaccaaagaatgaaattcagcacgtgggacagagatcatgacaactatgaagggaactgcgcagaagaagatcagtctggctggtggtttaaca

SEQ ID NO: 144132 - DNA, 120 bp, Artificial Sequence
  ENSG00000104760_8 (sequence is synthesized)
ggtgtcactctgcaaacctgaatggtgtatactacagcggcccctacacggctaaaacagacaatgggattgtctggtacacctggcatgggtggtggtattctctgaaatctgtggtta

SEQ ID NO: 144133 - DNA, 120 bp, Artificial Sequence
  ENSG00000104760_9 (sequence is synthesized)
tgaaaattaggccaaatgattttattccaaatgtaatttaattgctgctgttgggctttcgtttctgcaattcagctttgtttaaagtgatttgaaaaatactcattctgaacatatcca

SEQ ID NO: 144134 - DNA, 120 bp, Artificial Sequence
  ENSG00000104760_10 (sequence is synthesized)
tgcgcaatcatgataactgttgtgagtagtgcttttcattcttctcacttgcctttgttacttaatgtgctttcagtacagcagatatgcaatattcaccaaataaatgtagactgtgtt

SEQ ID NO: 144135 - DNA, 120 bp, Artificial Sequence
  ENSG00000104760_11 (sequence is synthesized)
aattacaaattcccaatgcagttacaggatcctgggaagcagagtgtctggatggaacctgagctgggtctctgactcacttctgactttagggtgaagatggagggaatctgataaaga

SEQ ID NO: 144136 - DNA, 120 bp, Artificial Sequence
  ENSG00000104760_12 (sequence is synthesized)
catcttataaattcaacagacacaaaagaatttgatctcccataagcaactgtgaaattacaataacagatcctgggaagttctacaattctaattcagttttttcaagggggaacatgg

SEQ ID NO: 144137 - DNA, 120 bp, Artificial Sequence
  ENSG00000104760_13 (sequence is synthesized)
gatcaggtctccacagcagcggaacaacacttttctggacagaaagttaatttacatgaaggaaaaacggtctggtggaaggataccagaactaaaacttgggaattaagaaaaattatg

SEQ ID NO: 144138 - DNA, 120 bp, Artificial Sequence
  ENSG00000104760_14 (sequence is synthesized)
acgcggggaagggcttttgcttgtgtttcaccaggagacaatcaaacacccatttagatacccaatagacatttgaaattctgcaatgaaccctacaccgaccggacagaagaaagggaa

SEQ ID NO: 144139 - DNA, 120 bp, Artificial Sequence
  ENSG00000104760_15 (sequence is synthesized)
gaatccaaagaggaagaagactggtccctccgacctgtcctttcgggagctgagaaagatgacgaagctgagcgtctcagagaaacaacagaagacggagaagacccgccaggctacacc

SEQ ID NO: 144140 - DNA, 120 bp, Artificial Sequence
  ENSG00000104760_16 (sequence is synthesized)
accgacatgagaacagataaagaagctgactcaaatggcagagggcagcctaaaggagaaacaactggcaattatcccgggtaatatgatcttggctgccttgatggtaattaccgcggc

SEQ ID NO: 144141 - DNA, 120 bp, Artificial Sequence
  ENSG00000104760_17 (sequence is synthesized)
gtaaatcaacaggattacctttcccttaataatcttcaaaatgtccacgtgaaggacaggaagatgtttaatgggaagaccaaacatcgtcagtgctcaagtccagtagataacaaagaa

SEQ ID NO: 144142 - DNA, 120 bp, Artificial Sequence
  ENSG00000104760_18 (sequence is synthesized)
cagaaagaaaacaaaactttggtattttactggaatctgagtgaataaatagggaccacaggacaaatggcaaacaactgcttgagttacatcagaaggaaagaagaaatgatgaaccca

SEQ ID NO: 144143 - DNA, 120 bp, Artificial Sequence
  ENSG00000104760_19 (sequence is synthesized)
gatttccattacaggatcctgggaagcagagtgtctggatggaacctgagctgggtctctgactcacttctgactttagttttttcaagggggaacatggcaaaggtgttcagtttcatc

SEQ ID NO: 144144 - DNA, 120 bp, Artificial Sequence
  ENSG00000104760_20 (sequence is synthesized)
gtgatgaaacagattcaattctagttaacactcagtgtcattctgtgtggtgagaggctgggaaagtctgggagaatttcctcggcgactctaagattagggatggcctgcggctgcatc

SEQ ID NO: 144145 - DNA, 120 bp, Artificial Sequence
  ENSG00000104760_21 (sequence is synthesized)
cgacttcctggagctactgaagtctgaactctggtctcatgaaaaattcaaggttgatacatttataaaattctttttgttcttgcagttttttcaagggggaacatggcaaaggtgttc

SEQ ID NO: 144146 - DNA, 120 bp, Artificial Sequence
  ENSG00000104760_22 (sequence is synthesized)
tctttatttataatattagtattattaagtaatcattctcattagaattcttcagcaatgaagtcgttttgaggatttgttcattgtgtacattagtaaagtgtaaatgtcatagaaata

SEQ ID NO: 144147 - DNA, 120 bp, Artificial Sequence
  ENSG00000104760_23 (sequence is synthesized)
aggttcagctgtgcccccaaaacatgtacattcctaacttttattacctgtgaatgtgatctcatttgcaaatagggtctttgtacatgtaactgagttaagatgaggtcatactggatt

SEQ ID NO: 144148 - DNA, 120 bp, Artificial Sequence
  ENSG00000104760_24 (sequence is synthesized)
agggcagaccctaatccaatgaccgatgtccttatatgaagagggaaattagacacagagacacacagaggaaagacagctatgtgaagatggtatcagagaatagagtgatactgccac

SEQ ID NO: 144149 - DNA, 120 bp, Artificial Sequence
  ENSG00000104760_25 (sequence is synthesized)
aagtcaaaggatgtcaagaattgctggcaaccaccaaatgctagaagagtccagaaaggattttctcttagagcctttgaaggaagtatggccctgttcttcttgattttggacttgtat

SEQ ID NO: 144150 - DNA, 120 bp, Artificial Sequence
  ENSG00000104760_26 (sequence is synthesized)
caagaagtcaggttgactagcaaggagtctgcttctgctacttggagaagagatttagaattatgtatcttttgttacagatatacagatatacaaatatacagatatacaaataagtta

SEQ ID NO: 144151 - DNA, 120 bp, Artificial Sequence
  ENSG00000104760_27 (sequence is synthesized)
acaagatgcaattttaaaacgctgatttctataccatgtgttatctgtctccagtgatactgagtagtctcattcagaggctccctaaggcggggggagaaaaagacacataatgaatgt

SEQ ID NO: 144152 - DNA, 120 bp, Artificial Sequence
  ENSG00000104763_0 (sequence is synthesized)
agtgcaacccagagggcaggatttcctgctggactttgaaatccaacccggtcacctacccgcgcgactgtgtccacggatggcacgaaagccaagcgagtccccctgccgagctactcg

SEQ ID NO: 144153 - DNA, 120 bp, Artificial Sequence
  ENSG00000104763_1 (sequence is synthesized)
cgtccgcctcctcccaagctgagctctgctccgcccacctgagtccttcgccagttaggaggaaacacagccgcttaatgaactgctgcatcgggctgggagagaaagctcgcgggtccc

SEQ ID NO: 144154 - DNA, 120 bp, Artificial Sequence
  ENSG00000104763_2 (sequence is synthesized)
accgggcctcctacccaagtctcagcgcgcttttcaccgaggcctcaattctgggatttggcagctttgctgtgaaagcccaatggacagaggactgcagaaaatcaacctatcctcctt

SEQ ID NO: 144155 - DNA, 120 bp, Artificial Sequence
  ENSG00000104763_3 (sequence is synthesized)
caggaccaacgtacagaggtgcagttccatggtacaccataaatcttgacttaccaccctacaaaagatggcatgaattgatgcttgacaaggcaccagtgctaaaggttatagtgaatt

SEQ ID NO: 144156 - DNA, 120 bp, Artificial Sequence
  ENSG00000104763_4 (sequence is synthesized)
ctctgaagaatatgataaatacattcgtgccaagtggaaaaattatgcaggtggtggatgaaaaattgcctggcctacttggcaactttcctggcccttttgaagaggaaatgaagggta

SEQ ID NO: 144157 - DNA, 120 bp, Artificial Sequence
  ENSG00000104763_5 (sequence is synthesized)
ttgccgctgttactgatatacctttaggagagattatttcattcaatattttttatgaattatttaccatttgtacttcaatagtagcagaagacaaaaaaggtcatctaatacatggga

SEQ ID NO: 144158 - DNA, 120 bp, Artificial Sequence
  ENSG00000104763_6 (sequence is synthesized)
gaaacatggattttggagtatttcttgggtggaacataaataatgatacctgggtcataactgagcaactaaaacctttaacagtgaatttggatttccaaagaaacaacaaaactgtct

SEQ ID NO: 144159 - DNA, 120 bp, Artificial Sequence
  ENSG00000104763_7 (sequence is synthesized)
tcaaggcttcaagctttgctggctatgtgggcatgttaacaggattcaaaccaggactgttcagtcttacactgaatgaacgtttcagtataaatggtggttatctgggtattctagaat

SEQ ID NO: 144160 - DNA, 120 bp, Artificial Sequence
  ENSG00000104763_8 (sequence is synthesized)
ggattctgggaaagaaagatgtcatgtggatagggttcctcactagaacagttctggaaaatagcacaagttatgaagaagccaagaatttattgaccaagaccaagatattggccccag

SEQ ID NO: 144161 - DNA, 120 bp, Artificial Sequence
  ENSG00000104763_9 (sequence is synthesized)
cctactttatcctgggaggcaaccagtctggggaaggttgtgtgattacacgagacagaaaggaatcattggatgtatatgaactcgatgctaagcagggtagatggtatgtggtacaaa

SEQ ID NO: 144162 - DNA, 120 bp, Artificial Sequence
  ENSG00000104763_10 (sequence is synthesized)
tgtcctgtcaacaaaacctgtcctcaacaagctgaccgtatacacaaccttgatagatgttaccaaaggtcaattcgaaacttacctgcgggactgccctgacccttgtataggttggtg

SEQ ID NO: 144163 - DNA, 120 bp, Artificial Sequence
  ENSG00000104763_11 (sequence is synthesized)
agcacacgtctggcctacagaatgcggcctctgagacatgaagacaccatctccatgtgaccgaacactgcagctgtctgaccttccaaagactaagactcgcggcaggttctctttgag

SEQ ID NO: 144164 - DNA, 120 bp, Artificial Sequence
  ENSG00000104763_12 (sequence is synthesized)
tcaatagcttgtcttcgtccatctgttgacaaatgacagatcttttttttttccccctatcagttgatttttcttatttacagataacttctttaggggaagtaaaacagtcatctagaa

SEQ ID NO: 144165 - DNA, 120 bp, Artificial Sequence
  ENSG00000104763_13 (sequence is synthesized)
ttcactgagttttgtttcactttgacatttggggatctggtgggcagtcgaaccatggtgaactccacctccgtggaataaatggagattcagcgtgggtgttgaatccagcacgtctgt

SEQ ID NO: 144166 - DNA, 120 bp, Artificial Sequence
  ENSG00000104763_14 (sequence is synthesized)
gtgagtaacgggacagtaaacactccacattcttcagtttttcacttctacctacatatttgtatgtttttctgtataacagccttttccttctggttctaactgctgttaaaattaata

SEQ ID NO: 144167 - DNA, 120 bp, Artificial Sequence
  ENSG00000104763_15 (sequence is synthesized)
tatcattatctttgctgttattgacagcgatataattttattacatatgattagagggatgagacagacattcacctgtatatttcttttaatgggcacaaaatgggcccttgcctctaa

SEQ ID NO: 144168 - DNA, 120 bp, Artificial Sequence
  ENSG00000104763_16 (sequence is synthesized)
atagcactttttggggttcaagaagtaatcagtatgcaaagcaatcttttatacaataattgaagtgttccctttttcataattactctacttcccagtaaccctaaggaagttgctaac

SEQ ID NO: 144169 - DNA, 120 bp, Artificial Sequence
  ENSG00000104763_17 (sequence is synthesized)
ttaaaaaactgcatcccacgttctgttaatttagtaaataaacaagtcaaagacttgtggaaaataggaagtgaacccatattttaaattctcataagtagcattcatgtaataaacagg

SEQ ID NO: 144170 - DNA, 120 bp, Artificial Sequence
  ENSG00000104763_18 (sequence is synthesized)
tttttagtttgttcttcagattgatagggagttttaaagaaattttagtagttactaaaattatgttactgtatttttcagaaatcaaactgcttatgaaaagtactaatagaacttgtt

SEQ ID NO: 144171 - DNA, 120 bp, Artificial Sequence
  ENSG00000104763_19 (sequence is synthesized)
aacctttctaaccttcacgattaactgtgaaatgtacgtcatttgtgcaagaccgtttgtccacttcattttgtataatcacagttgtgttcctgacactcaataaacagtcactggaaa

SEQ ID NO: 144172 - DNA, 120 bp, Artificial Sequence
  ENSG00000104763_20 (sequence is synthesized)
ggctcggtccgactattgcccgcggtgggggagggggatggatcacgccacgcgccaaaggcgatcgcgactctccttctgcaggtagcctggaaggctctctctctttctctacgccac

SEQ ID NO: 144173 - DNA, 120 bp, Artificial Sequence
  ENSG00000104763_21 (sequence is synthesized)
ccttttcgtggcactgaaaagccccgtcctctcctcccagtcccgcctcctccgagcgttccccctactgcctggaatggtgcggtcccaggtcgcgggtcacgcggcggagggggcgtg

SEQ ID NO: 144174 - DNA, 120 bp, Artificial Sequence
  ENSG00000104763_22 (sequence is synthesized)
gcctgcccccggcccagccggctcttctttgcctctgctggagtccggggagtggcgttggctgctagagcgatgccgggccggagttgcgtcgccttagtcctcctggctgccgccgtc

SEQ ID NO: 144175 - DNA, 120 bp, Artificial Sequence
  ENSG00000104763_23 (sequence is synthesized)
aattaaataacaagggttatgtaagtgggttattaaatatgactaaacggtcacaatcttactcttacatgactgataccacctcttaaccagatactatcaacccaatttgcaggtgtt

SEQ ID NO: 144176 - DNA, 120 bp, Artificial Sequence
  ENSG00000104763_24 (sequence is synthesized)
taaaggcagtttttcccccagataggtggtgcttccacaaaactttagtgattccaagattactttagtgaaacgaggaattataagaggatttacattaaaataggatttaattaatga

SEQ ID NO: 144177 - DNA, 120 bp, Artificial Sequence
  ENSG00000104763_25 (sequence is synthesized)
aaaaaaaactttactcagattttctacctcttacataaatgaagtcaggtcaacttgatgtatttttttgttaatgtaataacctttgatatgcctgatagtaaagaggtgagatgctaa

SEQ ID NO: 144178 - DNA, 120 bp, Artificial Sequence
  ENSG00000104763_26 (sequence is synthesized)
gaagctttaaaaaaaaaagtaattaaattcttttacaagtttccattgaggtgtgatatacatacagcacaggtgctgtatgtcttagatatacagcacaggtgcacaggtcttagatat

SEQ ID NO: 144179 - DNA, 120 bp, Artificial Sequence
  ENSG00000104763_27 (sequence is synthesized)
acagctcagtgaagcttcagaaatgcatgcatgcatgtagccatgactcagatcaagatacggaagagcccagcactccacgatgctccatcatgcccctttgcagaaaatactgcctcc

SEQ ID NO: 144180 - DNA, 120 bp, Artificial Sequence
  ENSG00000104763_28 (sequence is synthesized)
tccagtaaacactattctgatgtcactatagattagttttgcctcttcgtgaactttgtataaatagaactgaacaatatgaactgtcctgtgtgatttcttgtatttcattatgggtgg

SEQ ID NO: 144181 - DNA, 120 bp, Artificial Sequence
  ENSG00000104763_29 (sequence is synthesized)
tgtgctattgtatcaacagggtatttgggtggttttcagatttgtgatattaacaataaaggaattataaatattgtagtacattttgggggtgtctgggtactcattttctggatatat

SEQ ID NO: 144182 - DNA, 120 bp, Artificial Sequence
  ENSG00000104763_30 (sequence is synthesized)
acctaggaagtgaactgttgtgttatagagtaattgtgtgtttagccttatagattctgccaaacagttttccaaagtgattccagcagttgacaatcagcagagtatgagagtttcagt

SEQ ID NO: 144183 - DNA, 120 bp, Artificial Sequence
  ENSG00000104763_31 (sequence is synthesized)
tttctcctcttgataattctcctctcgatagtgtcagtctttttttttcctttttttttgttagtgtcaatctttatttgagcctttttgttgagtgtcgcagtatcgcattttagtttc

SEQ ID NO: 144184 - DNA, 85 bp, Artificial Sequence
  ENSG00000104763_32 (sequence is synthesized)
agcctttttgttgagtgtcgcagtatcgcattttagtttcaatttgcatttccttgatgattaatgagattgaacagtttattga

SEQ ID NO: 144185 - DNA, 120 bp, Artificial Sequence
  ENSG00000104763_33 (sequence is synthesized)
ttagattgaaggaattttttacatactttgaatataagccctttgtcagatatatggattctgaatatctgctcccagtctatgaccttcatttttattctcttacttttgtcttttgat

SEQ ID NO: 144186 - DNA, 120 bp, Artificial Sequence
  ENSG00000104763_34 (sequence is synthesized)
gaacagaaatttttaattttagtgaagtctaatatctcagtcttctcttttatgagtagtgccttttgtatccatttaaggaatcttggcctaccccaaagtcatatatatatgcttata

SEQ ID NO: 144187 - DNA, 120 bp, Artificial Sequence
  ENSG00000104763_35 (sequence is synthesized)
tattttcttctagatgtttaatgtttactttttacatttaggcctatcatctattttgaattatttttgtatatgctatgacttatgggtcaagcttcaggtttttctcatgtggtatat

SEQ ID NO: 144188 - DNA, 120 bp, Artificial Sequence
  ENSG00000104763_36 (sequence is synthesized)
catgtggtatatccagttagttaaacagcatcaattcaaaaggctatcctttcctcagcaaattgcagtggtgtctttgatataaatatacaatacatatatatatacacacacacacac

SEQ ID NO: 144189 - DNA, 120 bp, Artificial Sequence
  ENSG00000104763_37 (sequence is synthesized)
acaatgtgtatctgtatatacaatcaggtgattgtatatatgttgttttgtttggggaattaagtttcatttacatatttgtctttttgtcttcccttatatcaatactatttcacctca

SEQ ID NO: 144190 - DNA, 120 bp, Artificial Sequence
  ENSG00000104763_38 (sequence is synthesized)
gttactaaagctttatagtaagtcttcaaattaggtggtataattcttccaactttgtttttctcaatatttatttaagttactgatttctctgagcagtatcttttattttcagggaga

SEQ ID NO: 144191 - DNA, 120 bp, Artificial Sequence
  ENSG00000104763_39 (sequence is synthesized)
agacctcacatgccattcgttaaaattattcttagatattgatggtttgggaagctatttttaaaatttcaatttaagctttatggcatgtaacgaaaaatattttccccacgaccccaa

SEQ ID NO: 144192 - DNA, 120 bp, Artificial Sequence
  ENSG00000104763_40 (sequence is synthesized)
aagttttatctttaagctagcaaagcagtagtgtcattattttaaatagccaacagtaccttcattttatgagatgattgagaatttgtgaaaatcagtagtatttatcaacaaaagtgg

SEQ ID NO: 144193 - DNA, 120 bp, Artificial Sequence
  ENSG00000104763_41 (sequence is synthesized)
ggaaatatgtacttgctgcctttatggaaagcaagtctaattcctttattatgtaaagaactctagcaactcaataccaaatagaaataccttatggattaagaagaataacatgatgta

SEQ ID NO: 144194 - DNA, 120 bp, Artificial Sequence
  ENSG00000104763_42 (sequence is synthesized)
taaattattataaatgtataataaaataactagaatttcaccaaattagaaatttaatggaaataaaatacacattggatttgggtgaaaaaaacatgttgagcttaacatgttaatgtt

SEQ ID NO: 144195 - DNA, 120 bp, Artificial Sequence
  ENSG00000104763_43 (sequence is synthesized)
aacatgttgagcttaacatgttaatgttaaatgggacagaaatacaatgtgctgcctacttttgaattaaatgctaaatagcagtattatacattttgggaaaatattcaaaaaataaaa

SEQ ID NO: 144196 - DNA, 120 bp, Artificial Sequence
  ENSG00000104763_44 (sequence is synthesized)
taccctagaatggagtttcttggcagctctgtactaattttaatagttcttgaatctcctttttcaccttagaaattttagtcacactttaaaaatctgggcaaaatatatgtccagcaa

SEQ ID NO: 144197 - DNA, 120 bp, Artificial Sequence
  ENSG00000104763_45 (sequence is synthesized)
acagccaagagccagatgtattaaatgatcatatttacgctcccaaaagaaaattcaaaatgaagcatgttgataaacattttggatgtgatgttggagaacaattgcaacctgcccaga

SEQ ID NO: 144198 - DNA, 120 bp, Artificial Sequence
  ENSG00000104763_46 (sequence is synthesized)
tgttcagctcgcccgaaggctgcctccttggtgacttgtttcatcttgagtctagagagtccaggctggggaagaaaaccacctccagccggccgttccagcacagccccactggccaaa

SEQ ID NO: 144199 - DNA, 120 bp, Artificial Sequence
  ENSG00000104763_47 (sequence is synthesized)
gcacacactcacacaatgaaaacactgaaactttttcttaaaacaaatttttctcccattgtcatggttctgtatattaacacaaaattttcttttctcataggagagattatttcattc

SEQ ID NO: 144200 - DNA, 120 bp, Artificial Sequence
  ENSG00000104763_48 (sequence is synthesized)
tgaaattagaacttctgaaatttgggcttgctatgtaaattctgtgtatgttgcatacagctttttatttcttggtaaaattttgtgattgtactgaaaattttccttattttcagacta

SEQ ID NO: 144201 - DNA, 120 bp, Artificial Sequence
  ENSG00000104763_49 (sequence is synthesized)
ctgtactgcctattaaagttgatttcagacatgcaaaaaacctggaagaaatgttgcagggctagaaacattcttctcttcctcatagtttacttctacccatctacatgctttgatgga

SEQ ID NO: 144202 - DNA, 120 bp, Artificial Sequence
  ENSG00000104763_50 (sequence is synthesized)
agtgctcgcaggaggtgcttccttatcttcgtgtatgtcatgacatctgtccttttcttgaggcccagaacacacattctcccatcctttcccagccaggcaacccaatggataccagcc

SEQ ID NO: 144203 - DNA, 120 bp, Artificial Sequence
  ENSG00000104763_51 (sequence is synthesized)
tcactttcccgtatttttcctgactggttcccagagtacaaagcacaggacaacttcgctaactcaccctgatctttgacctatactctgggtataaatctgcctgtaccttacccttga

SEQ ID NO: 144204 - DNA, 120 bp, Artificial Sequence
  ENSG00000104763_52 (sequence is synthesized)
gatgtcctgctctaggggatgatgcctgaagggaaacatttgatgaatcacagtaattgaggctccgatttctgtgtcctggtagaaccatgtgatagtgaaccaaaacatgaccattga

SEQ ID NO: 144205 - DNA, 120 bp, Artificial Sequence
  ENSG00000104763_53 (sequence is synthesized)
ttccttttcccatattctgatcttacctggaaacccgtgctctcagattttgtggggttatctggcagatagacggtgacaacagtcccatctggtgaaggcttaggatattaggatgtt

SEQ ID NO: 144206 - DNA, 120 bp, Artificial Sequence
  ENSG00000104763_54 (sequence is synthesized)
tcttacttcttattgtttgaagaaacagttgtgaataaaaattaatcaaaattagaggccaggcacagtggcttacacctgtaatgccagcactttgcgaggccgaggcgggcgaatcat

SEQ ID NO: 144207 - DNA, 86 bp, Artificial Sequence
  ENSG00000104763_55 (sequence is synthesized)
acatggtaaaaccccttctctgccaggtgcggtcgcacatgtctgtaatcccaactacgtggaaggctgaggcacaagaattgctt

SEQ ID NO: 144208 - DNA, 75 bp, Artificial Sequence
  ENSG00000104763_56 (sequence is synthesized)
gaggcccaacagaacgagactctgtctcaaaaataaattaattaatcaaaattaattgtccagctttgatttaga

SEQ ID NO: 144209 - DNA, 88 bp, Artificial Sequence
  ENSG00000104763_57 (sequence is synthesized)
ataggtcatctaatacatgggagaaacatggattttggagtatttcttgggtaagtaaagaacaaagggttttttgggaggctgacac

SEQ ID NO: 144210 - DNA, 120 bp, Artificial Sequence
  ENSG00000104763_58 (sequence is synthesized)
acagggctacggacttcctaactgcaagagacagtgagggacgagcgtgactctttcattttacagaagaggaagtagacctagagtgagaaaatatttagccagaggttacactgttgt

SEQ ID NO: 144211 - DNA, 120 bp, Artificial Sequence
  ENSG00000104763_59 (sequence is synthesized)
ttactgaacatgcgtaacgtccgagcctcttgacgcccagtactctttcataattcatttctttataaagcaatcagactgcgtttgtctttgccaacagaatcggataagtaggaacct

SEQ ID NO: 144212 - DNA, 120 bp, Artificial Sequence
  ENSG00000104763_60 (sequence is synthesized)
tatgcaggtggtggatgaaaaattgcctggcctacttggcaactttcctggcccttttgaagaggaaatgaagggtattgccgctgttactgatatacctttaggtggaacataaataat

SEQ ID NO: 144213 - DNA, 120 bp, Artificial Sequence
  ENSG00000104763_61 (sequence is synthesized)
ttcaaaccagtaaggagtctgttgttacataattatacaggtagccttctgtcctgttaccgttatgtaaaagttgaaatctaagaatatgaggacctaaagggaatatgaagccccatt

SEQ ID NO: 144214 - DNA, 120 bp, Artificial Sequence
  ENSG00000104763_62 (sequence is synthesized)
tcacccccttgtacttcttgtcacttcataggtatgagatctcgtggtagagaagagtagaaaggaaacggaggtttctgagcctcttctgggataaagagcatgtggctgggtgtcaag

SEQ ID NO: 144215 - DNA, 120 bp, Artificial Sequence
  ENSG00000104763_63 (sequence is synthesized)
ggctgggagtcacaatctgatttctagtcctgggtcttccgctcacttaggcaagtcaggcgttcattctctgcccttcagtttcctgtccaaaaagcgttgccagtgataccccaccta

SEQ ID NO: 144216 - DNA, 120 bp, Artificial Sequence
  ENSG00000104763_64 (sequence is synthesized)
cttatctcacatactagaatcaaaaatgctttgaactttttaaaaagccttttatggttttgatttatttttgccttccccattacccaagctaggcctttatatcccactctgaagtac

SEQ ID NO: 144217 - DNA, 120 bp, Artificial Sequence
  ENSG00000104763_65 (sequence is synthesized)
agtgagcgacagggccttaaagcgcatggttgatgtttctgacttcgttgctttgtctttttctcagggactgttcagtcttacactgaatgaacgtttcagtataaatggtggttatct

SEQ ID NO: 144218 - DNA, 120 bp, Artificial Sequence
  ENSG00000104763_66 (sequence is synthesized)
gggtaagtagagcattctcaagtgaaatgggaatctcagagcttttttatgaggaaggctggactgtgccttctggttacaaagtccaacctcttccggttcccgactggttacaaagtc

SEQ ID NO: 144219 - DNA, 120 bp, Artificial Sequence
  ENSG00000104763_67 (sequence is synthesized)
taacctcttctggttcctgactggttatatagtccagcctcttccgggtcctgactggttacatagtgtcacctcttccggttcctgacattgtgttcatctcttccaggtattctagaa

SEQ ID NO: 144220 - DNA, 120 bp, Artificial Sequence
  ENSG00000104763_68 (sequence is synthesized)
tgatgttgtcttcacagattaactacttttgaaattgcttattccgttggcaagcatttgttattttctgaaacttaattttctttgcttttcagtggacagaggactgcagaaaatcaa

SEQ ID NO: 144221 - DNA, 72 bp, Artificial Sequence
  ENSG00000104763_69 (sequence is synthesized)
caggcatggtggtgggcatctgtaatcccggctacttgggagcctgaggcagagacttttttgaacctttgg

SEQ ID NO: 144222 - DNA, 120 bp, Artificial Sequence
  ENSG00000104763_70 (sequence is synthesized)
aaaaaaaaaaaaaaagaacacagaactgttttggtctgtaggaagagtaggttgtgttatattgatgataagtaagtcccaagtcacacccaaaatgtgatcataagtgaagataaatgg

SEQ ID NO: 144223 - DNA, 120 bp, Artificial Sequence
  ENSG00000104763_71 (sequence is synthesized)
atggattgcttgagtgctgagacaagagggacatgctcttctattttatgtgtccatcttgacctttctgaaaaaataagaatattgtaattagcattctatgtttgaatctgaggctca

SEQ ID NO: 144224 - DNA, 120 bp, Artificial Sequence
  ENSG00000104763_72 (sequence is synthesized)
ctatttataagctgtgtgatattgagagagttacctgacttctctgaacctcaattttatcatttggaaaacagaataaatataccatattgtaaaggtcttgttaggattgatcgtggt

SEQ ID NO: 144225 - DNA, 120 bp, Artificial Sequence
  ENSG00000104763_73 (sequence is synthesized)
gactcggtaaataaagctcctagtgtaatgcctggccctcatcatcatgttgatcattactatcactgtgtttctgaaatgtcactgaaacatgtcttttataggtggaacataaataat

SEQ ID NO: 144226 - DNA, 120 bp, Artificial Sequence
  ENSG00000104763_74 (sequence is synthesized)
actgctccttgtccctgactccgcggtggggatgaataactcaactcatttcgggccgcttttctcagagggcaaagatgggtcagggtgggatgttacattagtgttgagactctttgg

SEQ ID NO: 144227 - DNA, 120 bp, Artificial Sequence
  ENSG00000104763_75 (sequence is synthesized)
atccgtttcgtgggtaccgaggacgcctgggtacgcgggacaggctgcacccgcctgctagaggcgccccatcgaggcgccacgggtgaagctcccggccccacctacggggcggggctc

SEQ ID NO: 144228 - DNA, 120 bp, Artificial Sequence
  ENSG00000104763_76 (sequence is synthesized)
ggaaagatgatgaagggccctgtgctgtgtgccctgaaaatctggtttgggaggcaaatcccaggacaggttgcaacacacatggctggtaagtgcagataatacatcctatcagtggac

SEQ ID NO: 144229 - DNA, 120 bp, Artificial Sequence
  ENSG00000104763_77 (sequence is synthesized)
gagagtgtgcacaaatgctgtgggaggaaaggagggtatgaatattttcatatggaagatagatgaagacttcacaagaaagaaaatgcttgaactgaatcttggaagttagaaccagca

SEQ ID NO: 144230 - DNA, 120 bp, Artificial Sequence
  ENSG00000104763_78 (sequence is synthesized)
atgtttagcagtgtccctggcccttacccactggatgctggtaacaccccctcagttgtgacaaccaaaaatgtccttagatgttaccaaatctcccgtggtcgagaatcattgccctag

SEQ ID NO: 144231 - DNA, 120 bp, Artificial Sequence
  ENSG00000104763_79 (sequence is synthesized)
cggctgagtgctgtggccacatcctccctatgacacttgtacctgccaagcaccaaacccattatccctcacgtgcatgctctcggagcttttgtttcaggctatcctttatgttcatac

SEQ ID NO: 144232 - DNA, 120 bp, Artificial Sequence
  ENSG00000104763_80 (sequence is synthesized)
ttaccggacttcctcaaaacaaaaaaatgctggcaggagcaaaagaggatgaggcccccacgttccccgtatgccttaatctcccctctactctgaatgttatcagggagggcaacattg

SEQ ID NO: 144233 - DNA, 120 bp, Artificial Sequence
  ENSG00000104763_81 (sequence is synthesized)
cagagagtttttgtgccacgccttggaatcggacaatactgggttttaaggctggatcagtcacatactagccttgtgtcctagggaaagtttcttaacctatgaaacctcagttttctc

SEQ ID NO: 144234 - DNA, 120 bp, Artificial Sequence
  ENSG00000104763_82 (sequence is synthesized)
atcagggagaataataattactaatatatatttcatatggtggttgtaagggttaaatgacatactgtgtataaagcatagtgcttggatgtaataagtgtttaataaatacccattacg

SEQ ID NO: 144235 - DNA, 120 bp, Artificial Sequence
  ENSG00000104763_83 (sequence is synthesized)
tcacatttgtttgttaaatggctggaacattccacttggggaatgctttgagttcctagggagaaaaaaaatatgtttaggtgacattacatgtaattaccaagttggttaaaaaagtga

SEQ ID NO: 144236 - DNA, 120 bp, Artificial Sequence
  ENSG00000104763_84 (sequence is synthesized)
gattcgtgaattttaagcagattatctcagcaaaaggccgtgaacttaagttgtgatctggatgttagtagttgccattgagaataaatatatgatgtccaccactgaatttgctcaatg

SEQ ID NO: 144237 - DNA, 120 bp, Artificial Sequence
  ENSG00000104763_85 (sequence is synthesized)
tctctggtttgctaaaagaatgcagttacttcatcttagctgaagatcagccattaaccatgacacagggctatggatagaatagtgcaggtttatctctgtgagtgtgggaaggaaatg

SEQ ID NO: 144238 - DNA, 120 bp, Artificial Sequence
  ENSG00000104763_86 (sequence is synthesized)
gtaagaacggtatatgccagtggctagagggtgaattcgtgcagagagataaggagtgcttgttatgatgtttttgtggtgtgggtcaggttaggtcatccaagtggaattactctcgtt

SEQ ID NO: 144239 - DNA, 120 bp, Artificial Sequence
  ENSG00000104763_87 (sequence is synthesized)
cctgccttctctggagaatgatggaaaaataaggcaggaaaaacaatctgagaatctggtctctgtataggggcccaatattcagtattacatagaatctttttataactacatgatgta

SEQ ID NO: 144240 - DNA, 120 bp, Artificial Sequence
  ENSG00000104763_88 (sequence is synthesized)
atgatgtaaaaatgctttaaaaaataattcctatcacttattatgatagcagtatctagaaaaaattatatgtccaagaactagatttcaaagcatgcttttattatatttgtttatatt

SEQ ID NO: 144241 - DNA, 120 bp, Artificial Sequence
  ENSG00000104763_89 (sequence is synthesized)
ctccttctgcaggcagtgacgtcagtgttgggggccgtcctcacctcaaggagcgcagagtctggtattgacaaggaacgcaaacagatgattataaagcagtgtcataaacatgttgat

SEQ ID NO: 144242 - DNA, 120 bp, Artificial Sequence
  ENSG00000104763_90 (sequence is synthesized)
ttttctgagctcaagctacagttccaagagttttcttacctactctactttatcttattttggatttgtacttttttaaaacaattattttactttcacagaactggttctccagaggaa

SEQ ID NO: 144243 - DNA, 120 bp, Artificial Sequence
  ENSG00000104763_91 (sequence is synthesized)
aggagataaagacacttgatatgttgaatgagtaacaaaagaatcataaatctgtgtggactttttttgataagtttaggagaaggttccattttgccactaagcttggacaacttcccc

SEQ ID NO: 144244 - DNA, 120 bp, Artificial Sequence
  ENSG00000104763_92 (sequence is synthesized)
gtatggctataaatactaaggggagtgtcaggagatgaggctgggatggtaagttaccatggaaagatgatgaagggccctgtgctgtgtgccctgaaaatctggtttgggaggcaaatc

SEQ ID NO: 144245 - DNA, 120 bp, Artificial Sequence
  ENSG00000104763_93 (sequence is synthesized)
ccaggacaggttgcaacacacatggctggtaagtgcagataatacatcctatcaggtcatttacttttagtgctaagtcagcctctctaacataaatattttccatctactttgttacat

SEQ ID NO: 144246 - DNA, 120 bp, Artificial Sequence
  ENSG00000104763_94 (sequence is synthesized)
ggcgttggctgctagagcgatgccgggccggagttgcgtcgccttagtcctcctggctgccgccgtcagctgtgccgtcgcgcagcacgcgccgccgaggactgcagaaaatcaacctat

SEQ ID NO: 144247 - DNA, 120 bp, Artificial Sequence
  ENSG00000104763_95 (sequence is synthesized)
gtactttccttttctggttctaatgctggataccactctgaagttgaataacaaacaggcaagaatttaaaaaaggggaaggagagagaggaaagtaatccattaaaactgttacctgtg

SEQ ID NO: 144248 - DNA, 120 bp, Artificial Sequence
  ENSG00000104763_96 (sequence is synthesized)
tttctaacagtgactcccacagaaactccactgcggggatggaggggaggttgattaaagaatgtcttggtttctggtggcccatgtgtgtagataaggctgttggcttctgtatttaac

SEQ ID NO: 144249 - DNA, 120 bp, Artificial Sequence
  ENSG00000104763_97 (sequence is synthesized)
ttactgaacaaaactattttcttgtgttttagaatatctcatttgaaaccatgtatgatgtcctgtcaacaaaacctgtcctcaacaaggtattttaaatgttatatgtatatttgcctt

SEQ ID NO: 144250 - DNA, 120 bp, Artificial Sequence
  ENSG00000104763_98 (sequence is synthesized)
ttagggaaagaatttggccctatgttttatctttctctgttatctttgatcagtttgagcacaaaaggtgtgttcagcttaggactgattttttattaaaaaatgtttttgtgtggctaa

SEQ ID NO: 144251 - DNA, 120 bp, Artificial Sequence
  ENSG00000104763_99 (sequence is synthesized)
aactgtattttggaatacaagaaagaaattgatcactgaggcttgataggtcagaatattgtttatagctttatttacatagcatttgaattaaggctagcattttactcttattggtat

SEQ ID NO: 144252 - DNA, 120 bp, Artificial Sequence
  ENSG00000104763_100 (sequence is synthesized)
ctattaaaaatctcacactatataactaacacctaaatgtcaacaaaacaaagtctgcagtccattttcagacagagctctgtgtcttggtgggttcgggtttcccttaaactttactac

SEQ ID NO: 144253 - DNA, 120 bp, Artificial Sequence
  ENSG00000104763_101 (sequence is synthesized)
atctgtttatcttttccctacactgtagttttaaaaaaatgcaaaaagtttcctatcatcccaccactcgctaacaatcattccctgaacgttctgaatatgcccccctaattttcccat

SEQ ID NO: 144254 - DNA, 120 bp, Artificial Sequence
  ENSG00000104763_102 (sequence is synthesized)
ttgttccttcttttcttggtccttctccacagctctccctaaagtaaacatgccgcctttaccctgccaggacaaatccctccggcctttagcatccaggtcaccctggctctcacagga

SEQ ID NO: 144255 - DNA, 120 bp, Artificial Sequence
  ENSG00000104763_103 (sequence is synthesized)
agcctgccttcagttcacgggccctgccatacttgcgttttgcctataccatctttgagcaagtcacaatctcgtgacttgtgtttgggtgtgtgccttgtgatctgggtgcctgcagtt

SEQ ID NO: 144256 - DNA, 120 bp, Artificial Sequence
  ENSG00000104763_104 (sequence is synthesized)
tcccccactgtattggaaatgctttaaggatagggatagccaaagctccacggtttttactccataggacaccggcaggtctcccaggactgccagctgtgcgtcaaggagggttaaggc

SEQ ID NO: 144257 - DNA, 120 bp, Artificial Sequence
  ENSG00000104763_105 (sequence is synthesized)
agtcttaaagcattgggggtggagcaatgtgctgtcaggaataagctcctataaggagctggagattctttcctgagcctgtttatattcattacctgaaacagtgatcctgttgaagtt

SEQ ID NO: 144258 - DNA, 120 bp, Artificial Sequence
  ENSG00000104763_106 (sequence is synthesized)
ataacatgctttgcatatattaagttatattatttaatattaaataacttctaaagcaaattctacaagtatagaaatgctaatatatatcagaacatctctgaattgaaaacgtcctta

SEQ ID NO: 144259 - DNA, 120 bp, Artificial Sequence
  ENSG00000104763_107 (sequence is synthesized)
tggttatctgggtattctagaatggattctgggaaagaaagatgtcatgtggatagggttcctcactagaacagttctggaaaatagcacaaggtaaagtgtttcgttgctttactatta

SEQ ID NO: 144260 - DNA, 120 bp, Artificial Sequence
  ENSG00000104763_108 (sequence is synthesized)
aatatttattttaaattactcatattaaaaaataaaaatatttgtcaagctccagcttaatcctttgaggaactattgcagaatttcttaggtgaacctctgacactcatgtggaattac

SEQ ID NO: 144261 - DNA, 120 bp, Artificial Sequence
  ENSG00000104763_109 (sequence is synthesized)
tcatgttttcttcgtgcagactgtgtgttttatagcaaataaatgaattacttaaaaagcactagggatactgacattatgaaaggcacctatgaatatttttggtgtacagaaaaaaaa

SEQ ID NO: 144262 - DNA, 120 bp, Artificial Sequence
  ENSG00000104763_110 (sequence is synthesized)
tgacccacacacaaaagaacagtcatacagtaaaatcttcatttaaatggtagtacagaccaggcacagtggcttatgcctgtaatcctcacgctttgggtggctgagatagacagatga

SEQ ID NO: 144263 - DNA, 88 bp, Artificial Sequence
  ENSG00000104763_111 (sequence is synthesized)
tgtaatcctcacgctttgggtggctgagatagacagatgacttgcacccaggggtttgagaccagtctgagcaacatggcgaaacccc

SEQ ID NO: 144264 - DNA, 120 bp, Artificial Sequence
  ENSG00000104763_112 (sequence is synthesized)
ggctgaggtgggaggatcacctgagcccaaggaggtcgagactgcagtgagctgggatcagtccactgcacttcaccctgagtgatagagtgagactctgtcttaaaaaaacaaaataaa

SEQ ID NO: 144265 - DNA, 120 bp, Artificial Sequence
  ENSG00000104763_113 (sequence is synthesized)
taaatacaaaatgtactacatattaacctgtaagttatatcttgccttggtatagaaatcttacaatagcaaaactgcctttccttcattcagccagcactgcgtccaaataaatgggca

SEQ ID NO: 144266 - DNA, 120 bp, Artificial Sequence
  ENSG00000104763_114 (sequence is synthesized)
caatttttaatagtcctaattttcaagaaggtttactttctgttctctaagtcctacatactgtaatattatttccctttgttctgttgttgagtgaaaggcatggacagtaagggtgga

SEQ ID NO: 144267 - DNA, 120 bp, Artificial Sequence
  ENSG00000104763_115 (sequence is synthesized)
agatgatctcttgaggccactttgtttctccttcagattagaggggcttcctaagattcccgcttcccatctcagtgttcaccatacagggtcagggattgcttttcccagaggcattgc

SEQ ID NO: 144268 - DNA, 80 bp, Artificial Sequence
  ENSG00000104763_116 (sequence is synthesized)
accatacagggtcagggattgcttttcccagaggcattgctcaccatccttttttagaaaacacattgtggctggcgaag

SEQ ID NO: 144269 - DNA, 120 bp, Artificial Sequence
  ENSG00000104763_117 (sequence is synthesized)
gggcaacagagtgagagcccatctctaaaaatagaaataaataaataacacattccttagatacttgtttttctttagtttctacagagctaaacatttccgttctaagtcatctaaaaa

SEQ ID NO: 144270 - DNA, 84 bp, Artificial Sequence
  ENSG00000104763_118 (sequence is synthesized)
gagctgaacaaagagaacacgtgaacacagggaggggaacatcacgcaccagggcctgtcagggggtggggtgaaaggggaggg

SEQ ID NO: 144271 - DNA, 70 bp, Artificial Sequence
  ENSG00000104763_119 (sequence is synthesized)
tgaacaaagagaacacgtgaacacagggaggggaacatcacgcaccagggcctgtcagggggtgggggaa

SEQ ID NO: 144272 - DNA, 120 bp, Artificial Sequence
  ENSG00000104763_120 (sequence is synthesized)
tacctatgtaacaaacctgcacgttcagcacatgtgtcccagaacttaaagtaaaatttaaaaataaatgaagttatttactaaaattaaaaaaaagtttcatttttctttttaaatgtt

SEQ ID NO: 144273 - DNA, 120 bp, Artificial Sequence
  ENSG00000104763_121 (sequence is synthesized)
taaatgtttctatatagttatgaagaagccaagaatttattgaccaagaccaagatattggccccagcctactttatcctgggaggcaaccagtctggggaaggttgtgtgattacacga

SEQ ID NO: 144274 - DNA, 120 bp, Artificial Sequence
  ENSG00000104763_122 (sequence is synthesized)
aaattatgcaggtggtggatgaaaaattggtaagagatattatttctcacaataaatgttaagcacatagaaaatgcgctgttatttatttaaaggcataattcagcaacctcttcgcag

SEQ ID NO: 144275 - DNA, 120 bp, Artificial Sequence
  ENSG00000104763_123 (sequence is synthesized)
ggacttgggcaaatctgcatgaatctagctcactgtcagaacttcagagggacttaaatttggggaattggtaatattagggttacagcatagcaaattatggtttcgtaaaaggggatg

SEQ ID NO: 144276 - DNA, 120 bp, Artificial Sequence
  ENSG00000104763_124 (sequence is synthesized)
ggactacattacgacattgggcaaataaccatatttcatctgggagtgtggtatttccttccctttatgtagtgagttcactattgaagacttggttttttttcttaagtgtctcaggga

SEQ ID NO: 144277 - DNA, 120 bp, Artificial Sequence
  ENSG00000104765_0 (sequence is synthesized)
ggactcggcttgttgtgttgctgcctgagtgccggagacggtcctgctgctgccgcagtcctgccagctgtccgacaatgtcgtcccacctagtcgagccgccgccgcccctgcacaaca

SEQ ID NO: 144278 - DNA, 120 bp, Artificial Sequence
  ENSG00000104765_1 (sequence is synthesized)
acaacaacaactgcgaggaaaatgagcagtctctgcccccgccggccggcctcaacagttcctgggtggagctacccatgaacagcagcaatggcaatgataatggcaatgggaaaaatg

SEQ ID NO: 144279 - DNA, 120 bp, Artificial Sequence
  ENSG00000104765_2 (sequence is synthesized)
gggggctggaacacgtaccatcctcatcctccatccacaatggagacatggagaagattcttttggatgcacaacatgaatcaggacagagtagttccagaggcagttctcactgtgaca

SEQ ID NO: 144280 - DNA, 120 bp, Artificial Sequence
  ENSG00000104765_3 (sequence is synthesized)
gcccttcgccacaagaagatgggcagatcatgtttgatgtggaaatgcacaccagcagggaccatagctctcagtcagaagaagaagttgtagaaggagagaaggaagtcgaggctttga

SEQ ID NO: 144281 - DNA, 120 bp, Artificial Sequence
  ENSG00000104765_4 (sequence is synthesized)
agaaaagtgcggactgggtatcagactggtccagtagacccgaaaacattccacccaaggagttccacttcagacaccctaaacgttctgtgtctttaagcatgaggaaaagtggagcca

SEQ ID NO: 144282 - DNA, 120 bp, Artificial Sequence
  ENSG00000104765_5 (sequence is synthesized)
tgaagaaagggggtattttctccgcagaatttctgaaggtgttcattccatctctcttcctttctcatgttttggctttggggctaggcatctatattggaaagcgactgagcacaccct

SEQ ID NO: 144283 - DNA, 120 bp, Artificial Sequence
  ENSG00000104765_6 (sequence is synthesized)
ctgccagcacctactgagggaaaggaaaagcccctggaaatgcgtgtgacctgtgaagtggtgtattgtcacagtagcttatttgaacttgagaccattgtaagcatgacccaacctacc

SEQ ID NO: 144284 - DNA, 120 bp, Artificial Sequence
  ENSG00000104765_7 (sequence is synthesized)
accctgtttttacatatccaattccagtaactctcaaattcaatattttattcaaactctgttgaggcattttactaaccttataccctttttggcctgaagacattttagaatttccta

SEQ ID NO: 144285 - DNA, 120 bp, Artificial Sequence
  ENSG00000104765_8 (sequence is synthesized)
acagagtttactgttgtttagaaatttgcaagggcttcttttccgcaaatgccaccagcagattataattttgtcagcaatgctattatctctaattagtgccaccagactagacctgta

SEQ ID NO: 144286 - DNA, 120 bp, Artificial Sequence
  ENSG00000104765_9 (sequence is synthesized)
tcattcatggtataaattttactcttgcaacataactaccatctctctcttaaaacgagatcaggttagcaaatgatgtaaaagaagctttattgtctagttgttttttttcccccaaga

SEQ ID NO: 144287 - DNA, 120 bp, Artificial Sequence
  ENSG00000104765_10 (sequence is synthesized)
caaaggcaagtttccctaagtttgagttgatagttattaaaaagaaaacaaaacaaaaaaaaaaggcaaggcacaacaaaaaaatatcctgggcaataaaaaaaatattttaaaccagct

SEQ ID NO: 144288 - DNA, 120 bp, Artificial Sequence
  ENSG00000104765_11 (sequence is synthesized)
ttggagccacttttttgtctaagcctcctaatagcgtcttttaatttataggaggcaaactgtataaatgataggtatgaaatagaataagaagtaaaatacatcagcagattttcatac

SEQ ID NO: 144289 - DNA, 120 bp, Artificial Sequence
  ENSG00000104765_12 (sequence is synthesized)
tagtatgttgtaatgctgtcttttctatggtgtagaatctttctttctgataaggaacgtctcaggcttagaaatatatgaaattgctttttgagatttttgcgtgtgtgtttgatattt

SEQ ID NO: 144290 - DNA, 86 bp, Artificial Sequence
  ENSG00000104765_13 (sequence is synthesized)
aaattgctttttgagatttttgcgtgtgtgtttgatattttttacgataattagctgcatgtgaatttttcatgaccttctttacc

SEQ ID NO: 144291 - DNA, 120 bp, Artificial Sequence
  ENSG00000104765_14 (sequence is synthesized)
caacttggaaaaacagacttgggttgtgggaacagttgacagcgttctgaaaagatgccatttgtttccttctgatctctcactgaataatgtttactgtacagtcttcccaaggtgatt

SEQ ID NO: 144292 - DNA, 120 bp, Artificial Sequence
  ENSG00000104765_15 (sequence is synthesized)
cctgcgactgcaggcactggtcattttctcatgtagctgtcttttcagttatggtaaactcttaaagttcagaacactcaacagattccttcagtgatatacttgttcgttcatttctaa

SEQ ID NO: 144293 - DNA, 120 bp, Artificial Sequence
  ENSG00000104765_16 (sequence is synthesized)
aatgtgaagctttaggaccaaattgttagaaagcatcaggatgaccagttatctcgagtagattttcttggatttcagaacatctagcatgactctgaaggataccacatgttttatata

SEQ ID NO: 144294 - DNA, 120 bp, Artificial Sequence
  ENSG00000104765_17 (sequence is synthesized)
taaataattactgtttatgatatagacattgatattgactatttagagaaccgttgttaattttaaaactagcaatctataaagtgcaccaggtcaacttgaataaaaacactatgacag

SEQ ID NO: 144295 - DNA, 120 bp, Artificial Sequence
  ENSG00000104765_18 (sequence is synthesized)
acaggtttgccagtttgcagaaactaactcttttctcacatcaacatttgtaaaattgatgtgttatagtggaaaataacatatagattaaacaaaatttttatcttttttcaagaatat

SEQ ID NO: 144296 - DNA, 120 bp, Artificial Sequence
  ENSG00000104765_19 (sequence is synthesized)
agctggctatctttaagaaagatgatatatcctagttttgaaagtaattttcttttttctttctagcatttgatgtctaaataattttggacatctttttcctagaccatgtttctgtct

SEQ ID NO: 144297 - DNA, 120 bp, Artificial Sequence
  ENSG00000104765_20 (sequence is synthesized)
tactcttaaacctggtaacacttgatttgccttctataacctatttatttcaagtgttcatatttgaatttctttgggaagaaagtaaatctgatggctcactgatttttgaaaagcctg

SEQ ID NO: 144298 - DNA, 120 bp, Artificial Sequence
  ENSG00000104765_21 (sequence is synthesized)
aataaaattggaaagactggaaagttaggagaactgactagctaaactgctacagtatgcaatttctattacaattggtattacaggggggaaaagtaaaattacactttacctgaaagt

SEQ ID NO: 144299 - DNA, 120 bp, Artificial Sequence
  ENSG00000104765_22 (sequence is synthesized)
gacttcttacagctagtgcattgtgctctttccaagttcagcagcagttctatcagtggtgccactgaaactgggtatatttatgatttctttcagcgttaaaaagaaacatagtgttgc

SEQ ID NO: 144300 - DNA, 120 bp, Artificial Sequence
  ENSG00000104765_23 (sequence is synthesized)
cctttttcttaaagcatcagtgaaattatggaaaattacttaaaacgtgaatacatcatcacagtagaatttattatgagagcatgtagtatgtatctgtagccctaacacatgggatga

SEQ ID NO: 144301 - DNA, 120 bp, Artificial Sequence
  ENSG00000104765_24 (sequence is synthesized)
acgttttactgctacacccagatttgtgttgaacgaaaacattgtggtttggaaaggagaattcaacaattaatagttgaaattgtgaggttaatgtttaaaaagctttacacctgttta

SEQ ID NO: 144302 - DNA, 120 bp, Artificial Sequence
  ENSG00000104765_25 (sequence is synthesized)
caatttggggacaaaaaggcaggcttcatttttcatatgtttgatgaaaactggctcaagatgtttgtaaatagaatcaagagcaaaactgcacaaacttgcacattggaaagtgcaaca

SEQ ID NO: 144303 - DNA, 120 bp, Artificial Sequence
  ENSG00000104765_26 (sequence is synthesized)
agttcccgtgattgcagtaaaaatatttactattctaaaaaaatgagaattgaagacttagccagtcagataagttttttcatgaacccgttgtggaaattattggaattaactgagcca

SEQ ID NO: 144304 - DNA, 120 bp, Artificial Sequence
  ENSG00000104765_27 (sequence is synthesized)
aagtgattatgcattcttcatctattttagttagcactttgtatcgttatatacagtttacaatacatgtataacttgtagctataaacattttgtgccattaaagctctcacaaaactt

SEQ ID NO: 144305 - DNA, 68 bp, Artificial Sequence
  ENSG00000104765_28 (sequence is synthesized)
tcagaagaagaagttgtagaaggagagaaggaagtcgaggctttgaagaaaagtgcggactgggtatc

SEQ ID NO: 144306 - DNA, 120 bp, Artificial Sequence
  ENSG00000104765_29 (sequence is synthesized)
ctctgttgcctcctggggtcttgggcccggggccgtttgggctcgcggtccgggagcggcgcgggtagcgcggatccccctggttcctgggtggagctacccatgaacagcagcaatggc

SEQ ID NO: 144307 - DNA, 120 bp, Artificial Sequence
  ENSG00000104765_30 (sequence is synthesized)
cctttctcatgttttggctttggggctaggatgtggaaactgatgtctagagaagctaagcaatttgcttacagtatgcacaaatctaccacaagactacacatcaactgtgttggagat

SEQ ID NO: 144308 - DNA, 120 bp, Artificial Sequence
  ENSG00000104765_31 (sequence is synthesized)
ttgcctagcacatataactaaatggtgctcatctgcactgcactcacacacttacgtgatacacaggtctgatctaaatacacaggtctgatctacacaaccatgtggtgctaccgcttt

SEQ ID NO: 144309 - DNA, 120 bp, Artificial Sequence
  ENSG00000104765_32 (sequence is synthesized)
taaaatctgtgaacaattaaaagaagtttggatacgtacacagataccataaaggaaactttgctctaaggtctgcacaaaatgagccaatctgaaaataaaagtaaacctggtggtgaa

SEQ ID NO: 144310 - DNA, 120 bp, Artificial Sequence
  ENSG00000104765_33 (sequence is synthesized)
ctgtcaagaggaggggcgcctgccttgctccgggcctctctgttgcctcctggggtcttgggcccggggccgtttgggctcgcggtccgggagcggcgcgggttcctgggtggagctacc

SEQ ID NO: 144311 - DNA, 120 bp, Artificial Sequence
  ENSG00000104765_34 (sequence is synthesized)
gtggctccaccccttcaactttttgtccaagaaaacttttcgtgtttgcctgtagctgatgtgcagttgtttctgctcccaaatcaacagggtttaatgaaaaccctagaaagtagaaac

SEQ ID NO: 144312 - DNA, 120 bp, Artificial Sequence
  ENSG00000104774_0 (sequence is synthesized)
ctttccagggccggggaaccccaggaggaagctgctgagccatgggcgcctacgcgcgggcttcgggggtctgcgctcgcggctgcctggactcagcaggcccctggaccatgtcccgcg

SEQ ID NO: 144313 - DNA, 120 bp, Artificial Sequence
  ENSG00000104774_1 (sequence is synthesized)
ccctgcggccaccgctcccgcctctctgctttttccttttgttgctggcggctgccggtgctcgggccgggggatacgagacatgccccacagtgcagccgaacatgctgaacgtgcacc

SEQ ID NO: 144314 - DNA, 120 bp, Artificial Sequence
  ENSG00000104774_2 (sequence is synthesized)
tgctgcctcacacacatgatgacgtgggctggctcaaaaccgtggaccagtacttttatggaatcaagaatgacatccagcacgccggtgtgcagtacatcctggactcggtcatctctg

SEQ ID NO: 144315 - DNA, 120 bp, Artificial Sequence
  ENSG00000104774_3 (sequence is synthesized)
ccttgctggcagatcccacccgtcgcttcatttacgtggagattgccttcttctcccgttggtggcaccagcagacaaatgccacacaggaagtcgtgcgagaccttgtgcgccaggggc

SEQ ID NO: 144316 - DNA, 120 bp, Artificial Sequence
  ENSG00000104774_4 (sequence is synthesized)
gcctggagttcgccaatggtggctgggtgatgaacgatgaggcagccacccactacggtgccatcgtggaccagatgacacttgggctgcgctttctggaggacacatttggcaatgatg

SEQ ID NO: 144317 - DNA, 120 bp, Artificial Sequence
  ENSG00000104774_5 (sequence is synthesized)
ggcgaccccgtgtggcctggcacattgaccccttcggccactctcgggagcaggcctcgctgtttgcgcagatgggcttcgacggcttcttctttgggcgccttgattatcaagataagt

SEQ ID NO: 144318 - DNA, 120 bp, Artificial Sequence
  ENSG00000104774_6 (sequence is synthesized)
gggtacggatgcagaagctggagatggagcaggtgtggcgggccagcaccagcctgaagcccccgaccgcggacctcttcactggtgtgcttcccaatggttacaacccgccaaggaatc

SEQ ID NO: 144319 - DNA, 120 bp, Artificial Sequence
  ENSG00000104774_7 (sequence is synthesized)
tgtgctgggatgtgctgtgtgtcgatcagccgctggtggaggaccctcgcagccccgagtacaacgccaaggagctggtcgattacttcctaaatgtggccactgcccagggccggtatt

SEQ ID NO: 144320 - DNA, 120 bp, Artificial Sequence
  ENSG00000104774_8 (sequence is synthesized)
accgcaccaaccacactgtgatgaccatgggctcggacttccaatatgagaatgccaacatgtggttcaagaaccttgacaagctcatccggctggtaaatgcgcagcaggcaaaaggaa

SEQ ID NO: 144321 - DNA, 120 bp, Artificial Sequence
  ENSG00000104774_9 (sequence is synthesized)
gcagtgtccatgttctctactccacccccgcttgttacctctgggagctgaacaaggccaacctcacctggtcagtgaaacatgacgacttcttcccttacgcggatggcccccaccagt

SEQ ID NO: 144322 - DNA, 120 bp, Artificial Sequence
  ENSG00000104774_10 (sequence is synthesized)
tctggaccggttacttttccagtcggccggccctcaaacgctacgagcgcctcagctacaacttcctgcaggtgtgcaaccagctggaggcgctggtgggcctggcggccaacgtgggac

SEQ ID NO: 144323 - DNA, 120 bp, Artificial Sequence
  ENSG00000104774_11 (sequence is synthesized)
cctatggctccggagacagtgcacccctcaatgaggcgatggctgtgctccagcatcacgacgccgtcagcggcacctcccgccagcacgtggccaacgactacgcgcgccagcttgcgg

SEQ ID NO: 144324 - DNA, 120 bp, Artificial Sequence
  ENSG00000104774_12 (sequence is synthesized)
caggctgggggccttgcgaggttcttctgagcaacgcgctggcgcggctcagaggcttcaaagatcacttcaccttttgccaacagctaaacatcagcatctgcccgctcagccagacgg

SEQ ID NO: 144325 - DNA, 120 bp, Artificial Sequence
  ENSG00000104774_13 (sequence is synthesized)
ccggtcagcgaaggcgttttcgttgtgaaggaccccaatggcaggacagtgcccagcgatgtggtaatatttcccagctcagacagccaggcgcaccctccggagctgctgttctcagcc

SEQ ID NO: 144326 - DNA, 120 bp, Artificial Sequence
  ENSG00000104774_14 (sequence is synthesized)
tcactgcccgccctgggcttcagcacctattcagtagcccaggtgcctcgctggaagccccaggcccgcgcaccacagcccatccccagaagatcctggtcccctgctttaaccatcgaa

SEQ ID NO: 144327 - DNA, 120 bp, Artificial Sequence
  ENSG00000104774_15 (sequence is synthesized)
aatgagcacatccgggcaacgtttgatcctgacacagggctgttgatggagattatgaacatgaatcagcaactcctgctgcctgttcgccagaccttcttctggtacaacgccagtata

SEQ ID NO: 144328 - DNA, 120 bp, Artificial Sequence
  ENSG00000104774_16 (sequence is synthesized)
ggtgacaacgaaagtgaccaggcctcaggtgcctacatcttcagacccaaccaacagaaaccgctgcctgtgagccgctgggctcagatccacctggtgaagacacccttggtgcaggag

SEQ ID NO: 144329 - DNA, 120 bp, Artificial Sequence
  ENSG00000104774_17 (sequence is synthesized)
gtgcaccagaacttctcagcttggtgttcccaggtggttcgcctgtacccaggacagcggcacctggagctagagtggtcggtggggccgatacctgtgggcgacacctgggggaaggag

SEQ ID NO: 144330 - DNA, 120 bp, Artificial Sequence
  ENSG00000104774_18 (sequence is synthesized)
gtcatcagccgttttgacacaccgctggagacaaagggacgcttctacacagacagcaatggccgggagatcctggagaggaggcgggattatcgacccacctggaaactgaaccagacg

SEQ ID NO: 144331 - DNA, 120 bp, Artificial Sequence
  ENSG00000104774_19 (sequence is synthesized)
gagcccgtggcaggaaactactatccagtcaacacccggatttacatcacggatggaaacatgcagctgactgtgctgactgaccgctcccaggggggcagcagcctgagagatggctcg

SEQ ID NO: 144332 - DNA, 120 bp, Artificial Sequence
  ENSG00000104774_20 (sequence is synthesized)
ctggagctcatggtgcaccgaaggctgctgaaggacgatggacgcggagtatcggagccactaatggagaacgggtcgggggcgtgggtgcgagggcgccacctggtgctgctggacaca

SEQ ID NO: 144333 - DNA, 120 bp, Artificial Sequence
  ENSG00000104774_21 (sequence is synthesized)
gcccaggctgcagccgccggacaccggctcctggcggagcaggaggtcctggcccctcaggtggtgctggccccgggtggcggcgccgcctacaatctcggggctcctccgcgcacgcag

SEQ ID NO: 144334 - DNA, 120 bp, Artificial Sequence
  ENSG00000104774_22 (sequence is synthesized)
ttctcagggctgcgcagggacctgccgccctcggtgcacctgctcacgctggccagctggggccccgaaatggtgctgctgcgcttggagcaccagtttgccgtaggagaggattccgga

SEQ ID NO: 144335 - DNA, 120 bp, Artificial Sequence
  ENSG00000104774_23 (sequence is synthesized)
cgtaacctgagcgcccccgttaccttgaacttgagggacctgttctccaccttcaccatcacccgcctgcaggagaccacgctggtggccaaccagctccgcgaggcagcctccaggctc

SEQ ID NO: 144336 - DNA, 120 bp, Artificial Sequence
  ENSG00000104774_24 (sequence is synthesized)
aagtggacaacaaacacaggccccacaccccaccaaactccgtaccagctggacccggccaacatcacgctggaacccatggaaatccgcactttcctggcctcagttcaatggaaggag

SEQ ID NO: 144337 - DNA, 120 bp, Artificial Sequence
  ENSG00000104774_25 (sequence is synthesized)
gtggatggttaggtctgctgggatgggccctccaagcccaagcctcctgctccgggggcagaccagactctgactctcctcttggggctgctgccattaaaacgctactactaagactca

SEQ ID NO: 144338 - DNA, 120 bp, Artificial Sequence
  ENSG00000104774_26 (sequence is synthesized)
atattcccccgctgggactcctcccccagtgggcatttcctcatcgcccccatggatatcgcctgcttccatgaatacctcccactcatgcatatctcttcccccctcttgtatcttctc

SEQ ID NO: 144339 - DNA, 120 bp, Artificial Sequence
  ENSG00000104774_27 (sequence is synthesized)
ctcatgcatatctcttcccccctcttgtatcttctccctctgccccttaatatcagtctccccttgggaacatatgcctcctgtgagtggtcctcccttttttttttttttttgagacgg

SEQ ID NO: 144340 - DNA, 120 bp, Artificial Sequence
  ENSG00000104774_28 (sequence is synthesized)
cttccccaggaaaatttattgctgtttatggacatctccttcattccagaaaacgtcctcccccaaacctcttcctcccccgagaacctgcctcaagggtttcttcccctacttcctcct

SEQ ID NO: 144341 - DNA, 120 bp, Artificial Sequence
  ENSG00000104774_29 (sequence is synthesized)
tcactcccccgactccatggtctctccaccctcccggtgggtttttttttccacctggtgaatcttctctgcaatcatttccttggaatctgactgtccccccaccacacacacctccat

SEQ ID NO: 144342 - DNA, 120 bp, Artificial Sequence
  ENSG00000104774_30 (sequence is synthesized)
ttcctttccccatctcaggactcttttccttccttgagttttttgtctccatgcatgtatagctttccatgggtactcttgactcagtttccctcctcctttatccgaggtggtaatatt

SEQ ID NO: 144343 - DNA, 120 bp, Artificial Sequence
  ENSG00000104774_31 (sequence is synthesized)
agtaagactccgtcccaaaaaaaaaaagttgtgttttttggtaacaatctgacagtcctgcaaaacgattattcctgccctataatgtcacacttagtttttccacaaaagtttttaata

SEQ ID NO: 144344 - DNA, 120 bp, Artificial Sequence
  ENSG00000104774_32 (sequence is synthesized)
gttccttcttaaagcctctaagaatcctgcccgccagcaccggacctttcgcttccccttggggtctcagctgagtcccacagaacctcaccggactcattgtctatgagcagatgaggc

SEQ ID NO: 144345 - DNA, 120 bp, Artificial Sequence
  ENSG00000104774_33 (sequence is synthesized)
ccccgttaccttgaacttgagggtgagaagggcaaaattgagaaggagatcggagagaggcaagagagagggagagaagagaaacctggctttgccccaactcatctgggcccatcccct

SEQ ID NO: 144346 - DNA, 120 bp, Artificial Sequence
  ENSG00000104774_34 (sequence is synthesized)
gagaaactgaacctatgggatgcatgaatgtgcacacatgtgtggaagtgtgggcccccaggaaggtgcggactcccgagggctcactccgtcgcctcccccagcagcaggcaaaaggaa

SEQ ID NO: 144347 - DNA, 120 bp, Artificial Sequence
  ENSG00000104774_35 (sequence is synthesized)
gcagtgtccatgttctctactccacccccgcttgttacctctgggagctgaacaaggccaacctcacctggtatttggggaaactggggagcttgggggggttggcatgccccgtgggtc

SEQ ID NO: 144348 - DNA, 120 bp, Artificial Sequence
  ENSG00000104774_36 (sequence is synthesized)
ggtcattctataacaaatgaccacacacttagcagctcaaaacaacagaaatacattgtcttacagttctgtaggtaagaagtccagcatgaggccgggcgcaatggctcatgcctgtaa

SEQ ID NO: 144349 - DNA, 120 bp, Artificial Sequence
  ENSG00000104783_0 (sequence is synthesized)
agagccagcagagcaggctgacgacctgcaagccacagtggctgccctgtgcgtgctgcgaggtgggggaccctgggcaggaagctggctgagccccaagaccccgggggccatgggcgg

SEQ ID NO: 144350 - DNA, 120 bp, Artificial Sequence
  ENSG00000104783_1 (sequence is synthesized)
ggatctggtgcttggcctgggggccttgagacgccgaaagcgcttgctggagcaggagaagtctctggccggctgggcactggtgctggcaggaactggcattggactcatggtgctgca

SEQ ID NO: 144351 - DNA, 120 bp, Artificial Sequence
  ENSG00000104783_2 (sequence is synthesized)
tgcagagatgctgtggttcggggggtgctcgtgggcgctctacctgttcctggttaaatgcacgatcagcatttccaccttcttactcctctgcctcatcgtggcctttcatgccaaaga

SEQ ID NO: 144352 - DNA, 120 bp, Artificial Sequence
  ENSG00000104783_3 (sequence is synthesized)
ggtccagctgttcatgaccgacaacgggctgcgggactggcgcgtggcgctgaccgggcggcaggcggcgcagatcgtgctggagctggtggtgtgtgggctgcacccggcgcccgtgcg

SEQ ID NO: 144353 - DNA, 120 bp, Artificial Sequence
  ENSG00000104783_4 (sequence is synthesized)
gggcccgccgtgcgtgcaggatttaggggcgccgctgacctccccgcagccctggccgggattcctgggccaaggggaagcgctgctgtccctggccatgctgctgcgtctctacctggt

SEQ ID NO: 144354 - DNA, 120 bp, Artificial Sequence
  ENSG00000104783_5 (sequence is synthesized)
gccccgcgccgtgctcctgcgcagcggcgtcctgctcaacgcttcctaccgcagcatcggcgctctcaatcaagtccgcttccgccactggttcgtggccaagctttacatgaacacgca

SEQ ID NO: 144355 - DNA, 120 bp, Artificial Sequence
  ENSG00000104783_6 (sequence is synthesized)
ccctggccgcctgctgctcggcctcacgcttggcctctggctgaccaccgcctgggtgctgtccgtggccgagaggcaggctgttaatgccactgggcacctttcagacacactttggct

SEQ ID NO: 144356 - DNA, 120 bp, Artificial Sequence
  ENSG00000104783_7 (sequence is synthesized)
gatccccatcacattcctgaccatcggctatggtgacgtggtgccgggcaccatgtggggcaagatcgtctgcctgtgcactggagtcatgggtgtctgctgcacagccctgctggtggc

SEQ ID NO: 144357 - DNA, 120 bp, Artificial Sequence
  ENSG00000104783_8 (sequence is synthesized)
gaagcacgtgcacaacttcatgatggatatccagtataccaaagagatgaaggagtccgctgcccgagtgctacaagaagcctggatgttctacaaacatactcgcaggaaggagtctca

SEQ ID NO: 144358 - DNA, 120 bp, Artificial Sequence
  ENSG00000104783_9 (sequence is synthesized)
tgctgcccgcaggcatcagcgcaagctgctggccgccatcaacgcgttccgccaggtgcggctgaaacaccggaagctccgggaacaagtgaactccatggtggacatctccaagatgca

SEQ ID NO: 144359 - DNA, 120 bp, Artificial Sequence
  ENSG00000104783_10 (sequence is synthesized)
catgatcctgtatgacctgcagcagaatctgagcagctcacaccgggccctggagaaacagattgacacgctggcggggaagctggatgccctgactgagctgcttagcactgccctggg

SEQ ID NO: 144360 - DNA, 120 bp, Artificial Sequence
  ENSG00000104783_11 (sequence is synthesized)
gccgaggcagcttccagaacccagccagcagtccaagtagctggacccacgaggaggaaccaggctactttccccagtactgaggtggtggacatcgtctctgccactcctgacccagcc

SEQ ID NO: 144361 - DNA, 120 bp, Artificial Sequence
  ENSG00000104783_12 (sequence is synthesized)
ctgaacaaagcacctcaagtgcaaggaccaaagggggccctggcttggagtgggttggcttgctgatggctgctggaggggacgctggctaaagtgggtaggccttggcccacctgaggc

SEQ ID NO: 144362 - DNA, 120 bp, Artificial Sequence
  ENSG00000104783_13 (sequence is synthesized)
cccaggtgggaacatggtcacccccactctgcataccctcatcaaaaacactctcactatgctgctatggacgacctccagctctcagttacaagtgcaggcgactggaggcaggactcc

SEQ ID NO: 144363 - DNA, 120 bp, Artificial Sequence
  ENSG00000104783_14 (sequence is synthesized)
tgggtccctgggaaagagggtactaggggcccggatccaggattctgggaggcttcagttaccgctggccgagctgaagaactgggtatgaggctggggcggggctggaggtggcgcccc

SEQ ID NO: 144364 - DNA, 120 bp, Artificial Sequence
  ENSG00000104783_15 (sequence is synthesized)
ctggtgggacaacaaagaggacaccatttttccagagctgcagagagcacctggtggggaggaagaagtgtaactcaccagcctctgctcttatctttgtaataaatgttaaagccagaa

SEQ ID NO: 144365 - DNA, 120 bp, Artificial Sequence
  ENSG00000104783_16 (sequence is synthesized)
gcaccctatgtggctaagggggcgggggatggctgggagacaaggccgccttttctcatcagctctggcactgtctggaggaaaggactcagttcggggctggactggcagtgaaggaag

SEQ ID NO: 144366 - DNA, 120 bp, Artificial Sequence
  ENSG00000104783_17 (sequence is synthesized)
atggtgtaccctctccccttcactgacccttgatggccttctccctctttgcttggtctctctctctctctctgcctgtcctgggcacattgtctggctgtccatccaatgtctctgtct

SEQ ID NO: 144367 - DNA, 120 bp, Artificial Sequence
  ENSG00000104783_18 (sequence is synthesized)
gtccttcggtgtctgggtgtggtgagtagaggtgtgtgtcacaaagtacagaccattgtgtgtgacaaagcccatcgtgtgtctgtgtgtgtctttatccacgtggatggacgtctcttt

SEQ ID NO: 144368 - DNA, 120 bp, Artificial Sequence
  ENSG00000104783_19 (sequence is synthesized)
cttgctctgccccaagacacaccctagcccctccttattctcaaaagggggagctggggagcctccccctaccctggggcctcccctgcccctccccgccctgcctggccgtcaccactc

SEQ ID NO: 144369 - DNA, 120 bp, Artificial Sequence
  ENSG00000104783_20 (sequence is synthesized)
tatgcacacgtgtccatgtgcacccatgtccaagtcacctctctgcacggctgtgtgtgtgcatgtccatgcctgtccaggtcaggacacccaggtgtggtctcactcaacatccaggtc

SEQ ID NO: 144370 - DNA, 120 bp, Artificial Sequence
  ENSG00000104783_21 (sequence is synthesized)
tcacctggatctgaccgtgcatgactctatgtgtctgtgctggtttgtctccgcatatctcggtgtgtctgcggacctgggtacctgggtttctactggggatgggggctcgtggggagg

SEQ ID NO: 144371 - DNA, 120 bp, Artificial Sequence
  ENSG00000104783_22 (sequence is synthesized)
cagggtgcatcccctcccactctttcagctcttcgacaactttgtttctttgttttgtttcttcatgtgcctctcctcccttcattcctcccctgagctacagctacattcagggaccag

SEQ ID NO: 144372 - DNA, 120 bp, Artificial Sequence
  ENSG00000104783_23 (sequence is synthesized)
ggtttacaggccatctgttcggtctccgaacctatctctgggacctgcctaaagggttgcctctgccttggaggaaggagacatattttcccaattagcacggaatgcactgtaggcagg

SEQ ID NO: 144373 - DNA, 120 bp, Artificial Sequence
  ENSG00000104783_24 (sequence is synthesized)
tgtctgctgcacagccctgctggtggccgtggtggcccggaagctggagtttaacaaggcagagaagcacgtgcacaacttcatgatggatatccagtataccaaagaggaaggagtctc

SEQ ID NO: 144374 - DNA, 120 bp, Artificial Sequence
  ENSG00000104783_25 (sequence is synthesized)
cgcactgggcccagatgatggttttgagacttctccagaaccgacacatcaagagggactgatttgcaggggaaggaggctaggaaaattgggaatcaaaaaaaaaaaatggtggttttg

SEQ ID NO: 144375 - DNA, 120 bp, Artificial Sequence
  ENSG00000104804_0 (sequence is synthesized)
gttactttgttggaagtggagagtggagggtcagaagggagtggaccagttcaggtcccagagggaatcctccctccctctgagccgtctttcttctcctccctatttcgcagatatccc

SEQ ID NO: 144376 - DNA, 120 bp, Artificial Sequence
  ENSG00000104804_1 (sequence is synthesized)
gagattaggtccccagcttccaaagagaggatcagaatgtctcaggataatgacacattgatgagagacatcctggggcatgagctcgctgctatgaggctgcagaagctggaacagcag

SEQ ID NO: 144377 - DNA, 120 bp, Artificial Sequence
  ENSG00000104804_2 (sequence is synthesized)
cggcggctgtttgaaaagaagcagcgacagaagcgccaggagctcctcatggttcaggccaatcctgacgcttccccgtggctttggcgctcttgtctgcgggaggagcgccttttaggt

SEQ ID NO: 144378 - DNA, 120 bp, Artificial Sequence
  ENSG00000104804_3 (sequence is synthesized)
gacagaggccttgggaaccctttcctccggaagaaagtgtcagaggcacatctgccctctggcatccacagtgccctgggcaccgtgagctgtggtggagacggcaggggcgagcgcggc

SEQ ID NO: 144379 - DNA, 120 bp, Artificial Sequence
  ENSG00000104804_4 (sequence is synthesized)
ctcccgacaccgcggacagaagcagtgttcaggaatctcggtctccagtcccctttcttatcctggctcccagacaattccgatgcagaattggaggaagtctccgtggagaatggttcc

SEQ ID NO: 144380 - DNA, 120 bp, Artificial Sequence
  ENSG00000104804_5 (sequence is synthesized)
gtctctcccccaccttttaaacagtctccgagaatccgacgcaagggttggcaagcccaccaacgacctgggacccgtgcagagggtgagagtgactcccaggatatgggagatgcacac

SEQ ID NO: 144381 - DNA, 120 bp, Artificial Sequence
  ENSG00000104804_6 (sequence is synthesized)
aagtcacccaatatgggaccaaaccctggaatggatggtgactgtgtatatgaaaacttggccttccaaaaggaagaagacttggaaaagaagagagaggcctctgagtctacagggacg

SEQ ID NO: 144382 - DNA, 120 bp, Artificial Sequence
  ENSG00000104804_7 (sequence is synthesized)
agcctccttggcaatccgctccccctgccctgggctggaggaggacatggaagcctacgtgctgcggccagcgctcccgggcaccatgatgcagtgctacctcacccgtgacaagcacgg

SEQ ID NO: 144383 - DNA, 120 bp, Artificial Sequence
  ENSG00000104804_8 (sequence is synthesized)
cgtggacaagggcttgttccccctctactacctctacctggagacctctgacagcctgcagcgcttcctcctggctgggcgaaagagaagaaggagcaaaacttctaattacctcatctc

SEQ ID NO: 144384 - DNA, 120 bp, Artificial Sequence
  ENSG00000104804_9 (sequence is synthesized)
cctggatcctacacacctatctcgggacggggacaatttcgtgggcaaagtcagatccaatgtcttcagcaccaagttcaccatctttgacaatggggtgaatcctgaccgggagcattt

SEQ ID NO: 144385 - DNA, 120 bp, Artificial Sequence
  ENSG00000104804_10 (sequence is synthesized)
aaccaggaatactgcccggatcagacaggagctgggggctgtgtgttatgagcccaacgtcttaggatacctggggcctcggaaaatgactgtgattctcccaggaaccaacagccagaa

SEQ ID NO: 144386 - DNA, 120 bp, Artificial Sequence
  ENSG00000104804_11 (sequence is synthesized)
ccagcgaatcaatgtccagccactaaatgaacaggagtcgctactgagtcgttaccaacgtggggacaaacaagggttgcttttgttgcacaacaaaaccccgtcgtgggacaaggagaa

SEQ ID NO: 144387 - DNA, 120 bp, Artificial Sequence
  ENSG00000104804_12 (sequence is synthesized)
cggtgtctacacgctcaatttccatggtcgagtcactcgggcttcggtgaagaacttccaaatcgtggatcccaaacaccaagaacatctggtgctccagttcggccgagtgggcccaga

SEQ ID NO: 144388 - DNA, 120 bp, Artificial Sequence
  ENSG00000104804_13 (sequence is synthesized)
cacattcaccatggacttctgctttccatttagcccgctccaggccttcagcatctgcttgtccagtttcaattagaagctggctgttgaataactcaataaaataccatacccttgcca

SEQ ID NO: 144389 - DNA, 120 bp, Artificial Sequence
  ENSG00000104804_14 (sequence is synthesized)
agatatcccgagattaggtccccagcttccaaagagaggatcaggtatgtttagagattggccagagaggcaaggtaccgaggcatcaatgtgagcagcctctccaggcacctggtgagg

SEQ ID NO: 144390 - DNA, 120 bp, Artificial Sequence
  ENSG00000104804_15 (sequence is synthesized)
tgggacaaggagaacggtgtctacacgctcaatttccatggtcgagtcactcgggcttcggtgaagaacttccaaatcgtggatcccaaacaccgtgagctcctggaaaccagtttagcc

SEQ ID NO: 144391 - DNA, 120 bp, Artificial Sequence
  ENSG00000104804_16 (sequence is synthesized)
agcggacttgcggacccccgtgggaagctggaaacaggctactagatcccgacaggagtgggtgctgggattcgggctgcctgggtccggaagcaaatttaaagaatgtctcaggataat

SEQ ID NO: 144392 - DNA, 120 bp, Artificial Sequence
  ENSG00000104804_17 (sequence is synthesized)
tgagtccaacggtggaataagggaggagctgctgaagaactgagggcctggacgtgtgggccccagtggaggaaggggttcacgaactctcgcgccgatgcgagcccttgccccaggccc

SEQ ID NO: 144393 - DNA, 120 bp, Artificial Sequence
  ENSG00000104805_0 (sequence is synthesized)
accaagaacgcaccggaggtccttgcccgccctggaaaacgccctctgcggtgaaggagagaccacactgccatgcctccctctgggccccgaggaaccctccttctgttgccgctgctg

SEQ ID NO: 144394 - DNA, 120 bp, Artificial Sequence
  ENSG00000104805_1 (sequence is synthesized)
ctgctgctcctgcttcgcgccgtgctggctgtccccctggagcgaggggcgcccaacaaggaggagacccctgcgactgagagtcccgacacaggcctgtactaccaccggtacctccag

SEQ ID NO: 144395 - DNA, 120 bp, Artificial Sequence
  ENSG00000104805_2 (sequence is synthesized)
gaggtcatcgatgtactggagacggatgggcatttccgagagaagctgcaggctgccaatgcggaggacatcaagagcgggaagctgagccgagagctggactttgtcagccaccacgtc

SEQ ID NO: 144396 - DNA, 120 bp, Artificial Sequence
  ENSG00000104805_3 (sequence is synthesized)
cgcaccaagctggatgagctcaagcgacaggaggtgtcacggctgcggatgctgctcaaggccaagatggacgccgagcaggatcccaatgtacaggtggatcatctgaatctcctgaaa

SEQ ID NO: 144397 - DNA, 120 bp, Artificial Sequence
  ENSG00000104805_4 (sequence is synthesized)
cagtttgaacacctggaccctcagaaccagcatacattcgaggcccgcgacctggagctgctgatccagacggccacccgggaccttgcccagtacgacgcagcccatcatgaagagttc

SEQ ID NO: 144398 - DNA, 120 bp, Artificial Sequence
  ENSG00000104805_5 (sequence is synthesized)
aagcgctacgagatgcttaaggaacacgagagacggcgttatctggagtcactgggagaggagcagagaaaggaggcggagaggaagctggaagagcaacagcgccggcaccgcgagcac

SEQ ID NO: 144399 - DNA, 120 bp, Artificial Sequence
  ENSG00000104805_6 (sequence is synthesized)
cctaaagtcaacgtgcctggcagccaagcccagttgaaggaggtgtgggaggagctggatggactggaccccaacaggtttaaccccaagaccttcttcatactgcatgatatcaacagt

SEQ ID NO: 144400 - DNA, 120 bp, Artificial Sequence
  ENSG00000104805_7 (sequence is synthesized)
gatggtgtcctggatgagcaggagctggaggcactcttcaccaaggagctggagaaagtgtacgacccaaagaatgaggaggacgacatgcgggagatggaggaggagcgactgcgcatg

SEQ ID NO: 144401 - DNA, 120 bp, Artificial Sequence
  ENSG00000104805_8 (sequence is synthesized)
cgggagcatgtgatgaagaatgtggacaccaaccaggaccgcctcgtgaccctggaggagttcctcgcatccactcagaggaaggagtttggggacaccggggagggctgggagacagtg

SEQ ID NO: 144402 - DNA, 120 bp, Artificial Sequence
  ENSG00000104805_9 (sequence is synthesized)
gagatgcaccctgcctacaccgaggaagagctgaggcgctttgaagaggagctggctgcccgggaggcagagctgaatgccaaggcccagcgcctcagccaggagacagaggctctaggg

SEQ ID NO: 144403 - DNA, 120 bp, Artificial Sequence
  ENSG00000104805_10 (sequence is synthesized)
cagggccgcctggaggcccagaagagagagctgcagcaggctgtgctgcacatggagcagcggaagcagcagcagcagcagcagcaaggccacaaggccccggctgcccaccctgagggg

SEQ ID NO: 144404 - DNA, 120 bp, Artificial Sequence
  ENSG00000104805_11 (sequence is synthesized)
cagctcaagttccacccagacacagacgatgtacctgtcccagctccagccggtgaccagaaggaggtggacacttcagaaaagaaacttctcgagcggctccctgaggttgaggtgccc

SEQ ID NO: 144405 - DNA, 120 bp, Artificial Sequence
  ENSG00000104805_12 (sequence is synthesized)
cagcatctgtgatcctccgggaccccagccctcaggattcctgatgctccaaggcgactgatgggcgctggatgaagtggcacagtcagcttccctgggggctggtgtcatgttgggctc

SEQ ID NO: 144406 - DNA, 120 bp, Artificial Sequence
  ENSG00000104805_13 (sequence is synthesized)
ctggggcgggggcacggcctggcatttcacgcattgctgccaccccaggtccacctgtctccactttcacagcctccaagtctgtggctcttcccttctgtcctccgaggggcttgcctt

SEQ ID NO: 144407 - DNA, 120 bp, Artificial Sequence
  ENSG00000104805_14 (sequence is synthesized)
ctctcgtgtccagtgaggtgctcagtgatcggcttaacttagagaagcccgccccctccccttctccgtctgtcccaagagggtctgctctgagcctgcgttcctaggtggctcggcctc

SEQ ID NO: 144408 - DNA, 120 bp, Artificial Sequence
  ENSG00000104805_15 (sequence is synthesized)
agctgcctgggttgtggccgccctagcatcctgtatgcccacagctactggaatccccgctgctgctccgggccaagcttctggttgattaatgagggcatggggtggtccctcaagacc

SEQ ID NO: 144409 - DNA, 120 bp, Artificial Sequence
  ENSG00000104805_16 (sequence is synthesized)
ttcccctaccttttgtggaaccagtgatgcctcaaagacagtgtcccctccacagctgggtgccaggggcaggggatcctcagtatagccggtgaaccctgataccaggagcctgggcct

SEQ ID NO: 144410 - DNA, 120 bp, Artificial Sequence
  ENSG00000104805_17 (sequence is synthesized)
ccctgaacccctggcttccagccatctcatcgccagcctcctcctggacctcttggcccccagccccttccccacacagccccagaagggtcccagagctgaccccactccaggacctag

SEQ ID NO: 144411 - DNA, 120 bp, Artificial Sequence
  ENSG00000104805_18 (sequence is synthesized)
gcccagcccctcagcctcatctggagcccctgaagaccagtcccacccacctttctggcctcatctgacactgctccgcatcctgctgtgtgtcctgttccatgttccggttccatccaa

SEQ ID NO: 144412 - DNA, 120 bp, Artificial Sequence
  ENSG00000104805_19 (sequence is synthesized)
atacactttctggaacaaatgcatggctccatgcctgtgtatctggactggtccctccaaaacgctattgccacgtcacctgccggagtcctcatctttgaagactggattcaagcatca

SEQ ID NO: 144413 - DNA, 120 bp, Artificial Sequence
  ENSG00000104805_20 (sequence is synthesized)
cctggatgagcaggagctggaggcactcttcaccaaggaggtgagcatcttggaagcctcgggcacctggagggacgcccaaatcagccacttgtttcctcctgcagtccccttaaatcc

SEQ ID NO: 144414 - DNA, 120 bp, Artificial Sequence
  ENSG00000104805_21 (sequence is synthesized)
ccctggatgggagctcagtgaaaactacaactcccatcagcccctggggcaaaaacggctcccaggagtggtagcgtgcccaaaggactgctgggagttgaagttgtcgggaatgagctc

SEQ ID NO: 144415 - DNA, 120 bp, Artificial Sequence
  ENSG00000104805_22 (sequence is synthesized)
ctggcctggttgtctgggaggcagaggtccctgataaccctggagctgactctgtgtccagagcactgaatgccagggccagagaatcctgcatgacagtgacccaagcatgtttcctcg

SEQ ID NO: 144416 - DNA, 120 bp, Artificial Sequence
  ENSG00000104805_23 (sequence is synthesized)
aaccctccctttgatctattccattctcaaccccctggtcgctaggcagtggccctagcaacgggtctagtggggtactaaagcctgggggccaccgttccaccgcgggagacccgtagt

SEQ ID NO: 144417 - DNA, 120 bp, Artificial Sequence
  ENSG00000104805_24 (sequence is synthesized)
gagcgtgttgggagccaggacccctgggtctgagggcccagactcctgtgtcggaggaagggaaggccggaggcctggaatcctggggcctgggtaacaaaatgcttgtgtcttgattct

SEQ ID NO: 144418 - DNA, 120 bp, Artificial Sequence
  ENSG00000104805_25 (sequence is synthesized)
tggaagtgggggcggcgctgggggcccgaactcctggttccaggggaggaagaggcttgggacagacattatgcattatccagccctccatcccccacagaccacactgccatgcctccc

SEQ ID NO: 144419 - DNA, 120 bp, Artificial Sequence
  ENSG00000104805_26 (sequence is synthesized)
gaggtgagaggccagggttcccatactcttgggtcctagggaggatgggggccagagggctggaaaactgggtcccggaggaggatgcactgggtgccagtactttaggtcctgggaaaa

SEQ ID NO: 144420 - DNA, 120 bp, Artificial Sequence
  ENSG00000104805_27 (sequence is synthesized)
gaggaggctgggaccctggactcttgggtctgggggaggaggcggccgagatcccggattcctgagtgtgagagaggagcgtgttgggagccaggacccctgggtctgagggcccagact

SEQ ID NO: 144421 - DNA, 120 bp, Artificial Sequence
  ENSG00000104808_0 (sequence is synthesized)
gccgagggctccgcatcgcaaccatggcgctgcgctggggcatcgtgtctgtcggcctcatctccagcgacttcacagccgtgctgcagacgctgcctcgctctgagcaccaggtggtgg

SEQ ID NO: 144422 - DNA, 120 bp, Artificial Sequence
  ENSG00000104808_1 (sequence is synthesized)
cggtggcggcccgcgatctgagccgtgcgaaggagtttgcacagaaacacgacatccccaaggcctacggctcctatgaggagctggccaaggacccgagcgtggaggtggcctacattg

SEQ ID NO: 144423 - DNA, 120 bp, Artificial Sequence
  ENSG00000104808_2 (sequence is synthesized)
gcacccagcacccccagcacaaggcggcggtgatgctgtgcttggcggcgggcaaggccgttctgtgcgagaagcccacgggcgtgaacgcggcggaagttcgcgagatggtcgcggagg

SEQ ID NO: 144424 - DNA, 120 bp, Artificial Sequence
  ENSG00000104808_3 (sequence is synthesized)
cccgatcccgagccctcttccttatggaggccatctggacccgcttctttcctgcctccgaggctctgaggtctgttttggcccagggaactctaggagacctccgggtggctcgggcag

SEQ ID NO: 144425 - DNA, 120 bp, Artificial Sequence
  ENSG00000104808_4 (sequence is synthesized)
gtctttggagggcagaagccagagaagatttctgtcgtgggaaggcgtcatgaaacaggtgtggatgacactgtcacggtgctcctgcagtacccaggggaggtccatggcagcttcacc

SEQ ID NO: 144426 - DNA, 120 bp, Artificial Sequence
  ENSG00000104808_5 (sequence is synthesized)
tgcagcatcaccgtgcagctctccaacacggcctccgtgagcggcaccaagggcatggtacagctcctcaacccctgctggtgcccgaccgagctggtggtgaagggggagcataaggag

SEQ ID NO: 144427 - DNA, 120 bp, Artificial Sequence
  ENSG00000104808_6 (sequence is synthesized)
ttcccgctgcccccagtcccaaaggactgcaattttgacaacggggcaggcatgagttatgaggccaagcacgtctgggagtgcctacgcaagggtatgaaggaaagtcctgtgattccc

SEQ ID NO: 144428 - DNA, 120 bp, Artificial Sequence
  ENSG00000104808_7 (sequence is synthesized)
ctgtcggaaagtgagctcctggctgacatccttgaagaggtgaggaaggccattggagtcaccttcccccaagacaaacgctgatgtatccccgaataaataaagacatcttacatcttc

SEQ ID NO: 144429 - DNA, 120 bp, Artificial Sequence
  ENSG00000104812_0 (sequence is synthesized)
agtgacgctgcggcctccttctgcctaggtcccaacgcttcggggcaggggtgcggtcttgcaataggaagccgagcgtcttgcaagcttcccgtcgggcaccagctactcggccccgca

SEQ ID NO: 144430 - DNA, 120 bp, Artificial Sequence
  ENSG00000104812_1 (sequence is synthesized)
ccctacctggtgcattccctagacacctccggggtccctacctggagatccccggagccccccttcctgcgccagccatgcctttaaaccgcactttgtccatgtcctcactgccaggac

SEQ ID NO: 144431 - DNA, 120 bp, Artificial Sequence
  ENSG00000104812_2 (sequence is synthesized)
tggaggactgggaggatgaattcgacctggagaacgcagtgctcttcgaagtggcctgggaggtggctaacaaggtgggtggcatctacacggtgctgcagacgaaggcgaaggtgacag

SEQ ID NO: 144432 - DNA, 120 bp, Artificial Sequence
  ENSG00000104812_3 (sequence is synthesized)
gggacgaatggggcgacaactacttcctggtggggccgtacacggagcagggcgtgaggacccaggtggaactgctggaggcccccaccccggccctgaagaggacactggattccatga

SEQ ID NO: 144433 - DNA, 120 bp, Artificial Sequence
  ENSG00000104812_4 (sequence is synthesized)
acagcaagggctgcaaggtgtatttcgggcgctggctgatcgagggaggccctctggtggtgctcctggacgtgggtgcctcagcttgggccctggagcgctggaagggagagctctggg

SEQ ID NO: 144434 - DNA, 120 bp, Artificial Sequence
  ENSG00000104812_5 (sequence is synthesized)
atacctgcaacatcggagtgccgtggtacgaccgcgaggccaacgacgctgtcctctttggctttctgaccacctggttcctgggtgagttcctggcacagagtgaggagaagccacatg

SEQ ID NO: 144435 - DNA, 120 bp, Artificial Sequence
  ENSG00000104812_6 (sequence is synthesized)
tggttgctcacttccatgagtggttggcaggcgttggactctgcctgtgtcgtgcccggcgactgcctgtagcaaccatcttcaccacccatgccacgctgctggggcgctacctgtgtg

SEQ ID NO: 144436 - DNA, 120 bp, Artificial Sequence
  ENSG00000104812_7 (sequence is synthesized)
ccggtgccgtggacttctacaacaacctggagaacttcaacgtggacaaggaagcaggggagaggcagatctaccaccgatactgcatggaaagggcggcagcccactgcgctcacgtct

SEQ ID NO: 144437 - DNA, 120 bp, Artificial Sequence
  ENSG00000104812_8 (sequence is synthesized)
tcactactgtgtcccagatcaccgccatcgaggcacagcacttgctcaagaggaaaccagatattgtgacccccaatgggctgaatgtgaagaagttttctgccatgcatgagttccaga

SEQ ID NO: 144438 - DNA, 120 bp, Artificial Sequence
  ENSG00000104812_9 (sequence is synthesized)
acctccatgctcagagcaaggctcgaatccaggagtttgtgcggggccatttttatgggcatctggacttcaacttggacaagaccttatacttctttatcgccggccgctatgagttct

SEQ ID NO: 144439 - DNA, 120 bp, Artificial Sequence
  ENSG00000104812_10 (sequence is synthesized)
ccaacaagggtgctgacgtcttcctggaggcattggctcggctcaactatctgctcagagtgaacggcagcgagcagacagtggttgccttcttcatcatgccagcgcggaccaacaatt

SEQ ID NO: 144440 - DNA, 120 bp, Artificial Sequence
  ENSG00000104812_11 (sequence is synthesized)
tcaacgtggaaaccctcaaaggccaagctgtgcgcaaacagctttgggacacggccaacacggtgaaggaaaagttcgggaggaagctttatgaatccttactggttgggagccttcccg

SEQ ID NO: 144441 - DNA, 120 bp, Artificial Sequence
  ENSG00000104812_12 (sequence is synthesized)
acatgaacaagatgctggataaggaagacttcactatgatgaagagagccatctttgcaacgcagcggcagtctttcccccctgtgtgcacccacaatatgctggatgactcctcagacc

SEQ ID NO: 144442 - DNA, 120 bp, Artificial Sequence
  ENSG00000104812_13 (sequence is synthesized)
ccatcctgaccaccatccgccgaatcggcctcttcaatagcagtgccgacagggtgaaggtgattttccacccggagttcctctcctccacaagccccctgctccctgtggactatgagg

SEQ ID NO: 144443 - DNA, 120 bp, Artificial Sequence
  ENSG00000104812_14 (sequence is synthesized)
cccagtatctccaccaatctctccggcttcggctgcttcatggaggaacacatcgcagacccctcagcttacggtatctacattcttgaccggcggttccgcagcctggatgattcctgc

SEQ ID NO: 144444 - DNA, 120 bp, Artificial Sequence
  ENSG00000104812_15 (sequence is synthesized)
tcgcagctcacctccttcctctacagtttctgtcagcagagccggcggcagcgtatcatccagcggaaccgcacggagcgcctctccgaccttctggactggaaatacctaggccggtac

SEQ ID NO: 144445 - DNA, 120 bp, Artificial Sequence
  ENSG00000104812_16 (sequence is synthesized)
tatatgtctgcgcgccacatggcgctgtccaaggcctttccagagcacttcacctacgagcccaacgaggcggatgcggcccaggggtaccgctacccacggccagcctcggtgccaccg

SEQ ID NO: 144446 - DNA, 120 bp, Artificial Sequence
  ENSG00000104812_17 (sequence is synthesized)
tcgccctcgctgtcacgacactccagcccgcaccagagtgaggacgaggaggatccccggaacgggccgctggaggaagacggcgagcgctacgatgaggacgaggaggccgccaaggac

SEQ ID NO: 144447 - DNA, 120 bp, Artificial Sequence
  ENSG00000104812_18 (sequence is synthesized)
cggcgcaacatccgtgcaccagagtggccgcgccgagcgtcctgcacctcctccaccagcggcagcaagcgcaactctgtggacacggccacctccagctcactcagcaccccgagcgag

SEQ ID NO: 144448 - DNA, 120 bp, Artificial Sequence
  ENSG00000104812_19 (sequence is synthesized)
cccctcagccccaccagctccctgggcgaggagcgtaactaagtccgccccaccacactccccgcctgtcctgcctctctgctccagagagaggatgcagaggggtgctgctcctaaacc

SEQ ID NO: 144449 - DNA, 120 bp, Artificial Sequence
  ENSG00000104812_20 (sequence is synthesized)
cccgctccagatctgcactgggtgtggccccgcagtgcccccacccagtccgccaaacactccaccccctccagctccagtttccaagttcctgcactccagaatccacaaagccgtgcc

SEQ ID NO: 144450 - DNA, 120 bp, Artificial Sequence
  ENSG00000104812_21 (sequence is synthesized)
tttctctggctccagaatatgcataatcagcgccctggagtcccctgggcctggaccgcttcccagaggccaggaatctgccattactctgcggtggtgccagaggttttaggaaacctg

SEQ ID NO: 144451 - DNA, 120 bp, Artificial Sequence
  ENSG00000104812_22 (sequence is synthesized)
gcatggtgctttcaggtctggggcttttagagccccccgtgtggcttacaaattctacagcatacagagcaggccacgctcaggcccggcatgcgggccaccaagttctggaaaccacgt

SEQ ID NO: 144452 - DNA, 120 bp, Artificial Sequence
  ENSG00000104812_23 (sequence is synthesized)
ggtgtccctgcgaatggggcgatcaagtccagagccggggcactttcagagtttgaaggtaactgagagcagatggtcctccatttcaactccagaagtggggctctgggagggatgttc

SEQ ID NO: 144453 - DNA, 120 bp, Artificial Sequence
  ENSG00000104812_24 (sequence is synthesized)
tagccctccctggcatgtcagagccaggctctgcctggaggatccctccatccggctcctgtcatcccctacactttggccaagcaagaggtggtagaaccacttggctgctcattcctt

SEQ ID NO: 144454 - DNA, 120 bp, Artificial Sequence
  ENSG00000104812_25 (sequence is synthesized)
ctggaggacacacagtctcagtccagatgccttcctgtctttctggccctttctggaccagatcctactcttcctttctaaatctgagatctccctccagggaatccgcctgcagaggac

SEQ ID NO: 144455 - DNA, 120 bp, Artificial Sequence
  ENSG00000104812_26 (sequence is synthesized)
agagctggctgtcttcccccacccctaacctggcttattcccaactgctctgcccactgtgaaaccactaggttctaggtcctggcttctagatctggaaccttaccacgttactgcata

SEQ ID NO: 144456 - DNA, 120 bp, Artificial Sequence
  ENSG00000104812_27 (sequence is synthesized)
ctgatccctttcccatgatccagaactgaggtcactgggttctagaacccccacatttacctcgaggctcttccatccccaaactgtgccctgccttcagctttggtgaaagggagggcc

SEQ ID NO: 144457 - DNA, 120 bp, Artificial Sequence
  ENSG00000104812_28 (sequence is synthesized)
cctcatgtgtgctgtgctgtgtctgcaccgcttggtttgcagttgagaggggagggcaggaggggtgtgattggagtgtgtccggagatgagatgaaaaaaatacatctatatttaagaa

SEQ ID NO: 144458 - DNA, 120 bp, Artificial Sequence
  ENSG00000104812_29 (sequence is synthesized)
agctgtgcgcaaacagctttggttagcagccctcgctccggcccctggcgcagcccactcccagatgcatgctttgggtcctgtgtttctcctagagtctcagttttttgttttgtttgt

SEQ ID NO: 144459 - DNA, 120 bp, Artificial Sequence
  ENSG00000104812_30 (sequence is synthesized)
tctcctggcaaatcagcagctcctggctaggggtctttggtgcagggtgcagggtctcatcctacttgtaacagttgctgtccctttaagcaatgaaccaggccgatcgcgatggtggct

SEQ ID NO: 144460 - DNA, 120 bp, Artificial Sequence
  ENSG00000104812_31 (sequence is synthesized)
catggttgtaatcccagcactttgggaggcctaacaggaaggatcgcatgagctcaggagttaagagaccagcctgggcaacattttatttttactaaaaataaaaaaaaatcagccgag

SEQ ID NO: 144461 - DNA, 120 bp, Artificial Sequence
  ENSG00000104812_32 (sequence is synthesized)
aaacaaactaactaaagaagcctaacagtaaatggcagctggtgtgtatgtgaccctgttgctctgcttcctccagggacacggccaacacggtgaaggaaaagttcgggaggaagcttt

SEQ ID NO: 144462 - DNA, 120 bp, Artificial Sequence
  ENSG00000104812_33 (sequence is synthesized)
tcctgggaaggaggagcttgcacccttggagaccaggggcaccaggaaatgggggggctctcgggccgctgggagaggaggggtcctggtgccacagagtcctggagaccatgaagatct

SEQ ID NO: 144463 - DNA, 120 bp, Artificial Sequence
  ENSG00000104814_0 (sequence is synthesized)
agttgagccctgaggccctgctggcccctgggcgcaggcccagctcaggcccccagggatggacgtcgtggaccctgacattttcaatagagacccccgggaccactatgacctgctaca

SEQ ID NO: 144464 - DNA, 120 bp, Artificial Sequence
  ENSG00000104814_1 (sequence is synthesized)
gcggctgggtggcggcacgtatggggaagtctttaaggctcgagacaaggtgtcaggggacctggtggcactgaagatggtgaagatggagcctgatgatgatgtctccacccttcagaa

SEQ ID NO: 144465 - DNA, 120 bp, Artificial Sequence
  ENSG00000104814_2 (sequence is synthesized)
ggaaatcctcatattgaaaacttgccggcacgccaacatcgtggcctaccatgggagttatctctggttgcagaaactctggatctgcatggaattctgtggggctggttctctccagga

SEQ ID NO: 144466 - DNA, 120 bp, Artificial Sequence
  ENSG00000104814_3 (sequence is synthesized)
catctaccaagtgacaggctccctgtcagagctccagattagctatgtctgccgggaagtgctccagggactggcctatttgcactcacagaagaagatacacagggacatcaagggagc

SEQ ID NO: 144467 - DNA, 120 bp, Artificial Sequence
  ENSG00000104814_4 (sequence is synthesized)
taacatcctcatcaatgatgctggggaggtcagattggctgactttggcatctcggcccagattggggctacactggccagacgcctctctttcattgggacaccctactggatggctcc

SEQ ID NO: 144468 - DNA, 120 bp, Artificial Sequence
  ENSG00000104814_5 (sequence is synthesized)
ggaagtggcagctgtggccctgaagggaggatacaatgagctgtgtgacatctggtccctgggcatcacggccatcgaactggccgagctacagccaccgctctttgatgtgcaccctct

SEQ ID NO: 144469 - DNA, 120 bp, Artificial Sequence
  ENSG00000104814_6 (sequence is synthesized)
cagagttctcttcctcatgaccaagagtggctaccagcctccccgactgaaggaaaaaggcaaatggtcggctgccttccacaacttcatcaaagtcactctgactaagagtcccaagaa

SEQ ID NO: 144470 - DNA, 120 bp, Artificial Sequence
  ENSG00000104814_7 (sequence is synthesized)
acgacccagcgccaccaagatgctcagtcatcaactggtatcccagcctgggctgaatcgaggcctgatcctggatcttcttgacaaactgaagaatcccgggaaaggaccctccattgg

SEQ ID NO: 144471 - DNA, 120 bp, Artificial Sequence
  ENSG00000104814_8 (sequence is synthesized)
ggacattgaggatgaggagcccgagctaccccctgctatccctcggcggatcagatccacccaccgctccagctctctggggatcccagatgcagactgctgtcggcggcacatggagtt

SEQ ID NO: 144472 - DNA, 120 bp, Artificial Sequence
  ENSG00000104814_9 (sequence is synthesized)
caggaagctccgaggaatggagaccagacccccagccaacaccgctcgcctacagcctcctcgagacctcaggagcagcagccccaggaagcaactgtcagagtcgtctgacgatgacta

SEQ ID NO: 144473 - DNA, 120 bp, Artificial Sequence
  ENSG00000104814_10 (sequence is synthesized)
gcagctgagcccgggggtgctggtccggtgtgccagtgggcccccaccaaacagcccccgtcctgggcctcccccatccaccagcagcccccacctcaccgcccattcagaaccctcact

SEQ ID NO: 144474 - DNA, 120 bp, Artificial Sequence
  ENSG00000104814_11 (sequence is synthesized)
ctggaacccaccctcccgggagcttgacaagcccccacttctgccccccaagaaggaaaagatgaagagaaagggatgtgcccttctcgtaaagttgttcaatggctgccccctccggat

SEQ ID NO: 144475 - DNA, 120 bp, Artificial Sequence
  ENSG00000104814_12 (sequence is synthesized)
ccacagcacggccgcctggacacatccctccaccaaggaccagcacctgctcctgggggcagaggaaggcatcttcatcctgaaccggaatgaccaggaggccacgctggaaatgctctt

SEQ ID NO: 144476 - DNA, 120 bp, Artificial Sequence
  ENSG00000104814_13 (sequence is synthesized)
tcctagccggactacgtgggtgtactccatcaacaacgttctcatgtctctctcaggaaagaccccccacctgtattctcatagcatccttggcctgctggaacggaaagagaccagagc

SEQ ID NO: 144477 - DNA, 120 bp, Artificial Sequence
  ENSG00000104814_14 (sequence is synthesized)
aggaaaccccatcgctcacattagcccccaccgcctactggcaaggaagaacatggtttccaccaagatccaggacaccaaaggctgccgggcgtgctgtgtggcggagggtgcgagctc

SEQ ID NO: 144478 - DNA, 120 bp, Artificial Sequence
  ENSG00000104814_15 (sequence is synthesized)
tgggggcccgttcctgtgcggtgcattggagacgtccgttgtcctgcttcagtggtaccagcccatgaacaaattcctgcttgtccggcaggtgctgttcccactgccgacgcctctgtc

SEQ ID NO: 144479 - DNA, 120 bp, Artificial Sequence
  ENSG00000104814_16 (sequence is synthesized)
cgtgttcgcgctgctgaccgggccaggctctgagctgcccgctgtgtgcatcggcgtgagccccgggcggccggggaagtcggtgctcttccacacggtgcgctttggcgcgctctcttg

SEQ ID NO: 144480 - DNA, 120 bp, Artificial Sequence
  ENSG00000104814_17 (sequence is synthesized)
ctggctgggcgagatgagcaccgagcacaggggacccgtgcaggtgacccaggtagaggaagatatggtgatggtgttgatggatggctctgtgaagctggtgaccccggaggggtcccc

SEQ ID NO: 144481 - DNA, 120 bp, Artificial Sequence
  ENSG00000104814_18 (sequence is synthesized)
agtccggggacttcgcacacctgagatccccatgaccgaagcggtggaggccgtggctatggttggaggtcagcttcaggccttctggaagcatggagtgcaggtgtgggctctaggctc

SEQ ID NO: 144482 - DNA, 120 bp, Artificial Sequence
  ENSG00000104814_19 (sequence is synthesized)
ggatcagctgctacaggagctgagagaccctaccctcactttccgtctgcttggctcccccaggcctgtagtggtggagacacgcccagtggatgatcctactgctcccagcaacctcta

SEQ ID NO: 144483 - DNA, 120 bp, Artificial Sequence
  ENSG00000104814_20 (sequence is synthesized)
catccaggaatgagtccctaggggggtgtcaggaactagtccttgcaccccctcccccatagacacactagtggtcatggcatgtcctcatctcccaataaacatgactttagcctctgc

SEQ ID NO: 144484 - DNA, 120 bp, Artificial Sequence
  ENSG00000104814_21 (sequence is synthesized)
ctcccgagtagctgggattacaggcctgtagtggtggagacacgcccagtggatgatcctactgctcccagcaacctctacatccaggaatgagtccctaggggggtgtcaggaactagt

SEQ ID NO: 144485 - DNA, 120 bp, Artificial Sequence
  ENSG00000104814_22 (sequence is synthesized)
acctcaggagcagcagccccaggtcagggaccccagggaggatggggagggggctggaatgtggacaaggcccccaaggctcatacctgtcacccttcaggaagcaactgtcagagtcgt

SEQ ID NO: 144486 - DNA, 120 bp, Artificial Sequence
  ENSG00000104814_23 (sequence is synthesized)
acccggagctctggcggcgtgcgcgcgcgttgtattgcgcgcggccatgaggccacggagctctgcgggaatgcacgcagcagccttacgtttaggccatggccaagttccgagggagag

SEQ ID NO: 144487 - DNA, 120 bp, Artificial Sequence
  ENSG00000104814_24 (sequence is synthesized)
aagcggtggaggccgtgggtctgtgcagggacgggagagcccaggatcaggggtggaaactcaagtgatccccaagggtaacgggcattgctttctccccagctatggttggaggtcagc

SEQ ID NO: 144488 - DNA, 120 bp, Artificial Sequence
  ENSG00000104814_25 (sequence is synthesized)
caggttccctggctcccatccaatgcctggcctggccggggtgacctttgcagtgacaggctccctgtcagagctccagattagctatgtctgccgggaagtgctccaggtaaggagagg

SEQ ID NO: 144489 - DNA, 120 bp, Artificial Sequence
  ENSG00000104814_26 (sequence is synthesized)
cctggggattctggggatgggaggggagggtggccccactccagcccccaaacactcactgtccccttgtccacccttctccccagggactggcctatttgcactcacagaagaagatac

SEQ ID NO: 144490 - DNA, 120 bp, Artificial Sequence
  ENSG00000104814_27 (sequence is synthesized)
cccccacctgtattctcatagcatccttggcctgctggaacggaaagagaccagagcaggaaaccccatcgctcacattagcccccaccgcctactggcaaggtaccagctcccaatgaa

SEQ ID NO: 144491 - DNA, 120 bp, Artificial Sequence
  ENSG00000104814_28 (sequence is synthesized)
tggcaccacacagccttataattcctcccatgcccctctgcctcctgctgtcctaccccccttcacacctacctattctccaggaagaacatggtttccaccaagatccaggacaccaaa

SEQ ID NO: 144492 - DNA, 120 bp, Artificial Sequence
  ENSG00000104818_0 (sequence is synthesized)
gttcccgtgccgcgtccaacacccctcactccctgtctcactcccccacggagactcaatttactttccatgtccacatccccagtgcttgcggaagatatcccgctaagagagagacat

SEQ ID NO: 144493 - DNA, 120 bp, Artificial Sequence
  ENSG00000104818_1 (sequence is synthesized)
ctgttgctgctgctgagcatgggcgggacatgggcatccaaggagccgcttcggccacggtgccgccccatcaatgccaccctggctgtggagaaggagggctgccccgtgtgcatcacc

SEQ ID NO: 144494 - DNA, 120 bp, Artificial Sequence
  ENSG00000104818_2 (sequence is synthesized)
catctgtgccggctactgccccaccatgacccgcgtgctgcagggggtcctgccggccctgcctcaggtggtgtgcaactaccgcgatgtgcgcttcgagtccatccggctccctggctg

SEQ ID NO: 144495 - DNA, 120 bp, Artificial Sequence
  ENSG00000104818_3 (sequence is synthesized)
cccgcgcggcgtgaaccccgtggtctcctacgccgtggctctcagctgtcaatgtgcactctgccgccgcagcaccactgactgcgggggtcccaaggaccaccccttgacctgtgatga

SEQ ID NO: 144496 - DNA, 120 bp, Artificial Sequence
  ENSG00000104818_4 (sequence is synthesized)
cccccgcttccaggcctcctcttcctcaaaggcccctccccccagccttccaagcccatcccgactcccggggccctcagacaccccgatcctcccacaataaaggcttctcaatccgca

SEQ ID NO: 144497 - DNA, 120 bp, Artificial Sequence
  ENSG00000104818_5 (sequence is synthesized)
gaaagactgcagggcccctgggcaccttccacctgcttccaggccatcactggcatgagaaggggcagaccagtgtgagctgtggaaggaggcctctttctggaggagcgtgacccccag

SEQ ID NO: 144498 - DNA, 120 bp, Artificial Sequence
  ENSG00000104823_0 (sequence is synthesized)
gcagtagacgaaggcggcggcgatggcggcggggatagtggcttctcgcagactccgcgacctactgacccggcgactgacaggctccaactacccgggactcagtattagccttcgcct

SEQ ID NO: 144499 - DNA, 120 bp, Artificial Sequence
  ENSG00000104823_1 (sequence is synthesized)
cactggctcctctgcacaagaggaggcttccggagtagccctcggtgaagccccagaccacagctatgagtcccttcgtgtgacgtctgcgcagaaacatgttctgcatgtccagctcaa

SEQ ID NO: 144500 - DNA, 120 bp, Artificial Sequence
  ENSG00000104823_2 (sequence is synthesized)
ccggcccaacaagaggaatgccatgaacaaggtcttctggagagagatggtagagtgcttcaacaagatttcgagagacgctgactgtcgggcggtggtgatctctggtgcaggaaaaat

SEQ ID NO: 144501 - DNA, 120 bp, Artificial Sequence
  ENSG00000104823_3 (sequence is synthesized)
gttcactgcaggtattgacctgatggacatggcttcggacatcctgcagcccaaaggagatgatgtggcccggatcagctggtacctccgtgacatcatcactcgataccaggagacctt

SEQ ID NO: 144502 - DNA, 120 bp, Artificial Sequence
  ENSG00000104823_4 (sequence is synthesized)
caacgtcatcgagaggtgccccaagcccgtgattgctgccgtccatgggggctgcattggcggaggtgtggaccttgtcaccgcctgtgacatccggtactgtgcccaggatgctttctt

SEQ ID NO: 144503 - DNA, 120 bp, Artificial Sequence
  ENSG00000104823_5 (sequence is synthesized)
ccaggtgaaggaggtggacgtgggtttggctgccgatgtaggaacactgcagcgcctgcccaaggtcatcgggaaccagagcctggtcaacgagctggccttcaccgcccgcaagatgat

SEQ ID NO: 144504 - DNA, 120 bp, Artificial Sequence
  ENSG00000104823_6 (sequence is synthesized)
ggctgacgaggccctgggcagtgggctggtcagccgggtgttcccagacaaagaggtcatgctggatgctgccttagcgctggcggccgagatttccagcaagagccccgtggcggtgca

SEQ ID NO: 144505 - DNA, 120 bp, Artificial Sequence
  ENSG00000104823_7 (sequence is synthesized)
gagcaccaaggtcaacctgctgtattcccgcgaccattcggtggccgagagcctcaactacgtggcgtcctggaacatgagcatgctgcagacccaagacctcgtgaagtcggtccaggc

SEQ ID NO: 144506 - DNA, 120 bp, Artificial Sequence
  ENSG00000104823_8 (sequence is synthesized)
cacgactgagaacaaggaactgaaaaccgtcaccttctccaagctctgagagccctcgcgtcccaggccccagccagggggccggccttgtcccgcctcatccacagaaagggaggatgg

SEQ ID NO: 144507 - DNA, 120 bp, Artificial Sequence
  ENSG00000104823_9 (sequence is synthesized)
gcgatgacagttgtttctatgccttctgacccagtttcccagtttataactttatgacaatgagtttctcaagcccaaggccttatcttcaccccacaaacaataaagcaaagtaaagaa

SEQ ID NO: 144508 - DNA, 120 bp, Artificial Sequence
  ENSG00000104823_10 (sequence is synthesized)
tctcgcagactccgcgacctactgacccggcagagatggtagagtgcttcaacaagatttcgagagacgctgactgtcgggcggtggtgatctctggtgcaggaaaaatgttcactgcag

SEQ ID NO: 144509 - DNA, 120 bp, Artificial Sequence
  ENSG00000104823_11 (sequence is synthesized)
cccggcgtgagtcacctcttgccttatggggagagatggtagagtgcttcaacaagatttcgagagacgctgactgtcgggcggtggtgatctctggtgcaggaaaaatgttcactgcag

SEQ ID NO: 144510 - DNA, 120 bp, Artificial Sequence
  ENSG00000104823_12 (sequence is synthesized)
tcacacaccctgccagccttcctagctcctggcaatagacagtggagcagtgcttctgaattagggttttaagcagcttctgacttacacactttttttttttttttttgagacggggtc

SEQ ID NO: 144511 - DNA, 120 bp, Artificial Sequence
  ENSG00000104823_13 (sequence is synthesized)
cgcgcctcccctgggccagccctgaccccactcttcctgttccctctcagtgccccaagcccgtgattgctgccgtccatgggggctgcattggcggaggtgagtctgcggctatcctcc

SEQ ID NO: 144512 - DNA, 120 bp, Artificial Sequence
  ENSG00000104823_14 (sequence is synthesized)
tgctcgggtgctccccaggtggggctgctgctccgatgccgcggccactggcatccagcctcagctctgtcatgggccagactgtgtcccaagaggcagccccacctcccgggagccagg

SEQ ID NO: 144513 - DNA, 120 bp, Artificial Sequence
  ENSG00000104823_15 (sequence is synthesized)
gttggttctggtggtcattcagcatccctggcctctacctcctaggtgtggaccttgtcaccgcctgtgacatccggtactgtgcccaggatgctttcttccaggtgaaggtgagtcatc

SEQ ID NO: 144514 - DNA, 120 bp, Artificial Sequence
  ENSG00000104823_16 (sequence is synthesized)
ctcccgagctcctgcttagagctgggcagtggggtgaggttggggggcctggagtgagcctcgagggcttcatggaagagtcggagttgaacccgacaaagtaagacttgcccatagagg

SEQ ID NO: 144515 - DNA, 120 bp, Artificial Sequence
  ENSG00000104823_17 (sequence is synthesized)
ggcagtgggctggtcaggtagggccatggccgtggtagctcagtgctgggggcagccaggcctggagggttggaggcctctccgggtccccttgtctcctcgctctagaattcctagtgg

SEQ ID NO: 144516 - DNA, 120 bp, Artificial Sequence
  ENSG00000104823_18 (sequence is synthesized)
gccttcctctgtgagtggccacttcttcatctgcgggaggctggaggagagagcccttcccagcccacccggtccctgatctctttcactgcagccgggtgttcccagacaaagaggtca

SEQ ID NO: 144517 - DNA, 120 bp, Artificial Sequence
  ENSG00000104823_19 (sequence is synthesized)
gcattggcggaggtgtggaccttgtcaccgcctgtgacatccggtactgtgcccaggatgctttcttccaggtgaaggtgagtcatcctcccgagctcctgcttagagctgggcagtggg

SEQ ID NO: 144518 - DNA, 120 bp, Artificial Sequence
  ENSG00000104823_20 (sequence is synthesized)
cacagctatgagtcccttcgtgtgacgtctgcgcagaaacatgttctgcatgtccagctcaaccggcccaacaagaggaatgccatgaacaagagagatggtagagtgcttcaacaagat

SEQ ID NO: 144519 - DNA, 120 bp, Artificial Sequence
  ENSG00000104823_21 (sequence is synthesized)
ggcggcggcgatggcggcggggatagtggcttctcgcagactccgcgacctactgacccggcgtgagtcacctcttgccttatgggggactgacaggctccaactacccgggactcagta

SEQ ID NO: 144520 - DNA, 120 bp, Artificial Sequence
  ENSG00000104823_22 (sequence is synthesized)
gacggggagggctatccggggtcacgaagggcccgagtcccctaaattcaggggtgcgtgtgctcccttttgaaggactccctaattcgataggcctgtgtcttgcagtctggggtcatc

SEQ ID NO: 144521 - DNA, 120 bp, Artificial Sequence
  ENSG00000104824_0 (sequence is synthesized)
ggagaccaatgaaagtgggagggaggcggagattcttgggaggtttagagcgccgttcctatcaggtgcttttagggaggccagcagcgccagaaatccgacctatcaaattggatttta

SEQ ID NO: 144522 - DNA, 120 bp, Artificial Sequence
  ENSG00000104824_1 (sequence is synthesized)
ttttaaggcggcggggtcgacggaaagactggcagaaagcgaccacctataaggagtgtctcagacaaacaagggcgggccctcctgcagaacggcgtgggcaatgtccaataagcgcgc

SEQ ID NO: 144523 - DNA, 120 bp, Artificial Sequence
  ENSG00000104824_2 (sequence is synthesized)
aaggcgtgtggcggcctaccctccccccgcggcgggaccagtggctccccctatcgggtgggggcggcgggtgacgggcgtgtccctcccccaatgagaggcggggggaggcgggttctg

SEQ ID NO: 144524 - DNA, 120 bp, Artificial Sequence
  ENSG00000104824_3 (sequence is synthesized)
cgccgccatgtcgcggaggctgctgccccgggcggagaagcggcgtcggcggctggagcagaggcagcagccggacgagcagcggaggcggtcgggagcgatggtgaagatggcggcggc

SEQ ID NO: 144525 - DNA, 120 bp, Artificial Sequence
  ENSG00000104824_4 (sequence is synthesized)
gggcggcggaggcggcggtggccgctactacggcggcggcagtgagggcggccgggcccctaagcggctcaagactgacaacgccggcgaccagcacggaggcggcggcggtggcggtgg

SEQ ID NO: 144526 - DNA, 120 bp, Artificial Sequence
  ENSG00000104824_5 (sequence is synthesized)
aggagccggggcggcgggcggcggcggcggtggggagaactacgatgacccgcacaaaacccctgcctccccagttgtccacatcaggggcctgattgacggtgtggtggaagcagacct

SEQ ID NO: 144527 - DNA, 120 bp, Artificial Sequence
  ENSG00000104824_6 (sequence is synthesized)
tgtggaggccttgcaggagtttggacccatcagctatgtggtggtaatgcctaaaaagagacaagcactggtggagtttgaagatgtgttgggggcttgcaacgcagtgaactacgcagc

SEQ ID NO: 144528 - DNA, 120 bp, Artificial Sequence
  ENSG00000104824_7 (sequence is synthesized)
cgacaaccaaatatacattgctggtcacccagcttttgtcaactactctaccagccagaagatctcccgccctggggactcggatgactcccggagcgtgaacagtgtgcttctctttac

SEQ ID NO: 144529 - DNA, 120 bp, Artificial Sequence
  ENSG00000104824_8 (sequence is synthesized)
catcctgaaccccatttattcgatcaccacggatgttctttacactatctgtaatccttgtggccctgtccagagaattgtcattttcaggaagaatggagttcaggcgatggtggaatt

SEQ ID NO: 144530 - DNA, 120 bp, Artificial Sequence
  ENSG00000104824_9 (sequence is synthesized)
tgactcagttcaaagtgcccagcgggccaaggcctctctcaatggggctgatatctattctggctgttgcactctgaagatcgaatacgcaaagcctacacgcttgaatgtgttcaagaa

SEQ ID NO: 144531 - DNA, 120 bp, Artificial Sequence
  ENSG00000104824_10 (sequence is synthesized)
aacgccagaggcagccccctctcctgggagatcaccccgcagaatatggagggccccacggtgggtaccacagccattaccatgatgagggctacgggccccccccacctcactacgaag

SEQ ID NO: 144532 - DNA, 120 bp, Artificial Sequence
  ENSG00000104824_11 (sequence is synthesized)
ggagaaggatgggtccaccagtggggggtcaccgtcggggcccaagtcgctacggcccccagtatgggcaccccccaccccctcccccaccacccgagtatggccctcacgccgacagcc

SEQ ID NO: 144533 - DNA, 120 bp, Artificial Sequence
  ENSG00000104824_12 (sequence is synthesized)
ctgtgctcatggtctatggcttggatcaatctaagatgaactgtgaccgagtcttcaatgtcttctgcttatatggcaatgtggagaaggtgaaattcatgaaaagcaagccgggggccg

SEQ ID NO: 144534 - DNA, 120 bp, Artificial Sequence
  ENSG00000104824_13 (sequence is synthesized)
ccatggtggagatggctgatggctacgctgtagaccgggccattacccacctcaacaacaacttcatgtttgggcagaagctgaatgtctgtgtctccaagcagccagccatcatgcctg

SEQ ID NO: 144535 - DNA, 120 bp, Artificial Sequence
  ENSG00000104824_14 (sequence is synthesized)
gtcagtcatacgggttggaagacgggtcttgcagttacaaagacttcagtgaatcccggaacaatcggttctccaccccagagcaggcagccaagaaccgcatccagcaccccagcaacg

SEQ ID NO: 144536 - DNA, 120 bp, Artificial Sequence
  ENSG00000104824_15 (sequence is synthesized)
tgctgcacttcttcaacgccccgctggaggtgaccgaggagaacttctttgagatctgcgatgagctgggagtgaagcggccatcttctgtgaaagtattctcaggcaaaagtgagcgca

SEQ ID NO: 144537 - DNA, 120 bp, Artificial Sequence
  ENSG00000104824_16 (sequence is synthesized)
gctcctctggactgctggagtgggaatccaagagcgatgccctggagactctgggcttcctgaaccattaccagatgaaaaacccaaatggtccatacccttacactctgaagttgtgtt

SEQ ID NO: 144538 - DNA, 120 bp, Artificial Sequence
  ENSG00000104824_17 (sequence is synthesized)
tctccactgctcagcacgcctcctaattaggtgcctaggaagagtcccatctgagcaggaagacatttctctttcctttatgccattttttgtttttgttatttgcaaaagatcttgtat

SEQ ID NO: 144539 - DNA, 120 bp, Artificial Sequence
  ENSG00000104824_18 (sequence is synthesized)
tttttttttttttttttttttaaatgctaggtttgtagaggcttacttaaccttaatggaaacgctggaaatctgcagggggagggagaggggaactgttatctcccaagattaaccttc

SEQ ID NO: 144540 - DNA, 120 bp, Artificial Sequence
  ENSG00000104824_19 (sequence is synthesized)
taaccttcacttttaaaaaattattgtacatgtgatttttttttttcctgttcatacatttgtgctgcccatgtactcttggcacatttcaataaaattgtttggaaaataaacacagca

SEQ ID NO: 144541 - DNA, 120 bp, Artificial Sequence
  ENSG00000104824_20 (sequence is synthesized)
gtgctgtactgggcgcttggtaggtggccaccctctccagggtcggggccaggacctcctgtggtgctcagaggggtcgagctgtcaggagaactacgatgacccgcacaaaacccctgc

SEQ ID NO: 144542 - DNA, 120 bp, Artificial Sequence
  ENSG00000104824_21 (sequence is synthesized)
cttttcggagaacgtttcatagacggaagtagattccatgggcctccaagacaataggatcctctctccattcctcgccatatgggttttgttttttaagtcatttggtttggggagggc

SEQ ID NO: 144543 - DNA, 120 bp, Artificial Sequence
  ENSG00000104824_22 (sequence is synthesized)
cttgttttttttctgttttgatatttttattttttctgcagtcaccggctgccaacataatctgcaccaactggagatcagaaaccaaaaaaaaaaaaaaaaattttaaccacaacaaaa

SEQ ID NO: 144544 - DNA, 120 bp, Artificial Sequence
  ENSG00000104824_23 (sequence is synthesized)
aaaaaatcaaaaaaaccaaaacagacctaaaaccagacagccaaacagctcagaggcacacagttacctgctgccgggtaaccaggcgcgctcccaaggccaaaagcgcgagcgtagtgg

SEQ ID NO: 144545 - DNA, 120 bp, Artificial Sequence
  ENSG00000104824_24 (sequence is synthesized)
ggccactggcacacctcataccaggagacacgcacacggagcgctacacagccagaagcaccgcaccaccgcactgcagcacatatgtgaggaggtgacaacatggagggacactaccca

SEQ ID NO: 144546 - DNA, 120 bp, Artificial Sequence
  ENSG00000104824_25 (sequence is synthesized)
cttcatacacctttatttccacttttctgatatcttctgaggacagaacatctgtgagccatttttgatttaatcaaaatattgacttttaaaacaattctttaaaaaaattgtagcgga

SEQ ID NO: 144547 - DNA, 120 bp, Artificial Sequence
  ENSG00000104824_26 (sequence is synthesized)
tgtgtaccgtgacttgtatttatgactgtaaaaccatgtgatgcagggtcgcagtgtatgtttgatgggacgccatctttcagaactgtgctaactcactgttgaagcgtccaatggtaa

SEQ ID NO: 144548 - DNA, 120 bp, Artificial Sequence
  ENSG00000104824_27 (sequence is synthesized)
gagaaaatacagatttgttttttgtgacaaatggacattgtactctgtacttctgctgtaagtagtccttttccattttgtaatgactggtaacaaaacccaggccgggtggcaggaaag

SEQ ID NO: 144549 - DNA, 120 bp, Artificial Sequence
  ENSG00000104824_28 (sequence is synthesized)
ggcagtggtttcgagccctgggttttggagtcagccagacctgggttcaaatatggctcagccactgtcttgctttgtgactttgggccaaagtgtcttttaactgctcagttaaaagtt

SEQ ID NO: 144550 - DNA, 120 bp, Artificial Sequence
  ENSG00000104824_29 (sequence is synthesized)
aacaactcagtcttcttatctgtaaaatggggctgaaatatcagaacctacctcatagggttgttgtgaggaatttcagaagctgtgatgtctgtaaagcgcttagcccagtgcctgcca

SEQ ID NO: 144551 - DNA, 120 bp, Artificial Sequence
  ENSG00000104824_30 (sequence is synthesized)
cttaagcgctaagttaaaggcagtgattacgaactgctggggtcggggtggatctgcgccattgctgggtgtgggaatgtcgatgccttgtacatgattgcttatttgaactgattctgc

SEQ ID NO: 144552 - DNA, 120 bp, Artificial Sequence
  ENSG00000104824_31 (sequence is synthesized)
tgttgccctgcttgtcagctacagtcagtccctcttgggctggcgggactgggagggaggggggactgggattaagaaagaagggatctaacagagacagtctggagctcctagaacttt

SEQ ID NO: 144553 - DNA, 120 bp, Artificial Sequence
  ENSG00000104824_32 (sequence is synthesized)
gggggctttgggggtcaaacttgcttgcttccctctggggttattttcctcttaatctactctcccttcattgggagtcactttagaaagctgcttttggcccgccataatatatcagct

SEQ ID NO: 144554 - DNA, 120 bp, Artificial Sequence
  ENSG00000104824_33 (sequence is synthesized)
acagaacaaggccagccctttggtatgagcaggggaaggagagtgggcaccagctttgaggctcgggcttcatgcccgccgtaggtcagatcacaaaaggaggccccacagccctcgagg

SEQ ID NO: 144555 - DNA, 120 bp, Artificial Sequence
  ENSG00000104824_34 (sequence is synthesized)
aagggagggcttgcagttggcaggagctgggggctcagatcagcctgtgcagtcaggagggagggagagaccccaatttctgagtgagactcctaactgttttctctctccacaggtgac

SEQ ID NO: 144556 - DNA, 120 bp, Artificial Sequence
  ENSG00000104824_35 (sequence is synthesized)
cctggcagcaaccccaacaaacgccagaggcagccccctctcctgggagatcaccccgcagaatatggtgagggcagggggttcccctccgtggactcccgtggctcatgtgcccctgcc

SEQ ID NO: 144557 - DNA, 120 bp, Artificial Sequence
  ENSG00000104824_36 (sequence is synthesized)
ttaaacccgtctgggtcttgggggcctttgtgcagctcatgacttggcccattacttagagtagttcgtaacacaggtgaagtgttgttagttaccaggcactgttaaagatgctttaca

SEQ ID NO: 144558 - DNA, 120 bp, Artificial Sequence
  ENSG00000104824_37 (sequence is synthesized)
tgtagtgacctgtgtaatttctcacattaatccttaatgagatggacaggggaagtggaggacggggcttaaataacgcgcccaggttcacatagcctttatgtgaagcaggactcagag

SEQ ID NO: 144559 - DNA, 120 bp, Artificial Sequence
  ENSG00000104824_38 (sequence is synthesized)
ccagactgcctggctccagagccggcactgctctgttgtaacccagctgaaggagtattttaccttgtgactgtagacacagccatccatagatcacacacgtctgtgtgtaacagacaa

SEQ ID NO: 144560 - DNA, 120 bp, Artificial Sequence
  ENSG00000104824_39 (sequence is synthesized)
aatggtgaaaatggctgatttgatttctgattcctgtacagttttctgtcatgcttcactaaatgatttactggtgggttatgtcccacagttaaaaacatggcccaggctctgcttctc

SEQ ID NO: 144561 - DNA, 120 bp, Artificial Sequence
  ENSG00000104824_40 (sequence is synthesized)
actatgggttgagcacttggtgtgggccaggcatgtttttctagtggtcccgattaactgtgaggacatgggaggccagagcaggggttattatcactaacttgggaggggcaggagagg

SEQ ID NO: 144562 - DNA, 120 bp, Artificial Sequence
  ENSG00000104824_41 (sequence is synthesized)
tgacctaatgggttggctggcttcaggccagggatgtccttcctgcccttgagataggaccccgggatcttcgcactgttggtgacacaggcaggtgggacctgctcatcaggagagcag

SEQ ID NO: 144563 - DNA, 120 bp, Artificial Sequence
  ENSG00000104824_42 (sequence is synthesized)
cctgtgctcctcttgggagagccagcctgactgcctgctgccactcactctgccagcttgggagttgctcaggcttgtcctccagggaggtggcattctcttctttgcatcagagactgg

SEQ ID NO: 144564 - DNA, 120 bp, Artificial Sequence
  ENSG00000104824_43 (sequence is synthesized)
cttaggtaggaaagccactctgttacctaggaaagaggcaacactatccagcaggtaaaacttgcccacccagttgctgggagaggcccattgccttgggctggcgaaggagataggaat

SEQ ID NO: 144565 - DNA, 120 bp, Artificial Sequence
  ENSG00000104824_44 (sequence is synthesized)
gggattctctatgggaatgaaggaagagaaggagaaacgccgtgcataattggtaattggctcatcttgaagcctcacgttgggcagtcactccttagacccctgccgttgacctgcaga

SEQ ID NO: 144566 - DNA, 120 bp, Artificial Sequence
  ENSG00000104824_45 (sequence is synthesized)
aaatgggagatgggtacaaacttgaggggacctgggtttggggagcctccaaagacgggaaccaaccaaacttgtctctcctttgcagatggtccatacccttacactctgaagttgtgt

SEQ ID NO: 144567 - DNA, 120 bp, Artificial Sequence
  ENSG00000104824_46 (sequence is synthesized)
gtggacaaggtaatcttgacgaccactttgttctaaacatacccgccttgctttcactcgactagtgcacttaataggcctgggctcagggttatgtaatgccattgggccccccatgga

SEQ ID NO: 144568 - DNA, 120 bp, Artificial Sequence
  ENSG00000104824_47 (sequence is synthesized)
catgggagggccttggggtcagcacttggacaccctagtgggatgggggagtgagaggcctccatgggtcttcactgctgcttggggccctccgatgctgctcaggatacagaggcaagg

SEQ ID NO: 144569 - DNA, 120 bp, Artificial Sequence
  ENSG00000104824_48 (sequence is synthesized)
cagaagcctggatgggcggggagcagggcctcactgaggatgaggcgtgggggcggccttagaaaccagcagtggctcctttgagagtctggtgagggtcactcactccattcttgctgg

SEQ ID NO: 144570 - DNA, 120 bp, Artificial Sequence
  ENSG00000104824_49 (sequence is synthesized)
accaggaattgtcctcttgttctgcgctgttgagagggtctgatttgggggagtgacagtgttggggggcgatgaggtctcctgggctcttgcagtgagccttgtgagcaagctgaccct

SEQ ID NO: 144571 - DNA, 120 bp, Artificial Sequence
  ENSG00000104824_50 (sequence is synthesized)
cactcaggaccactgttctgctgacccagaatccttctgggctgattggcttcaattgctgcccctagtctttcctgtgcatccttcacggatgacctccaactgttttatctgactggg

SEQ ID NO: 144572 - DNA, 120 bp, Artificial Sequence
  ENSG00000104824_51 (sequence is synthesized)
aggtgctcaggctcgggagggcagcagaggtacaggggagagaaaaggaggggaatggggcccagcagaggagcacagtgaggccgaggtgttgactcacacagaaatgggatgtggcag

SEQ ID NO: 144573 - DNA, 120 bp, Artificial Sequence
  ENSG00000104824_52 (sequence is synthesized)
gtgtgttcccagacgtgtctctgacaccacaggagaaagtgagtcagccttgcctcaggtgtagagcaatgccccaaggcacacagggcaagctaagcctctggaggccacaggggaaag

SEQ ID NO: 144574 - DNA, 120 bp, Artificial Sequence
  ENSG00000104825_0 (sequence is synthesized)
gaactcccggcaaagcccagctacaggcgggcgactgcggggggcccctgaggcggcgggggccatggctggggtcgcgtgcttgggaaaagctgccgacgcagatgaatggtgcgacag

SEQ ID NO: 144575 - DNA, 120 bp, Artificial Sequence
  ENSG00000104825_1 (sequence is synthesized)
cggcctgggctccctgggtccggacgcagcggcccccggaggacctgggttgggcgcggagttgggcccggggctgtcgtgggctcccctcgtcttcggctacgtcactgaggatgggga

SEQ ID NO: 144576 - DNA, 120 bp, Artificial Sequence
  ENSG00000104825_2 (sequence is synthesized)
cacggcactgcacttggctgtgattcatcagcatgaacccttcctggattttcttctaggcttctcggccggcactgagtacatggacctgcagaatgacctaggccagacagccctgca

SEQ ID NO: 144577 - DNA, 120 bp, Artificial Sequence
  ENSG00000104825_3 (sequence is synthesized)
cctggcagccatcctgggggagacatccacggtggagaagctgtacgcagcaggcgccgggctgtgtgtggcggagcgtaggggccacacggcgctgcacctggcctgccgtgtgggggc

SEQ ID NO: 144578 - DNA, 120 bp, Artificial Sequence
  ENSG00000104825_4 (sequence is synthesized)
gtcgccttgtaccccgattccgacttggagaaggaagaagaggagagtgaggaggactggaagctgcagctggaggctgaaaactacgagggccacaccccactccacgtggccgttatc

SEQ ID NO: 144579 - DNA, 120 bp, Artificial Sequence
  ENSG00000104825_5 (sequence is synthesized)
cacaaagatgtggagatggtccggctgctccgagatgctggagctgaccttgacaaaccggagcccacgtgcggccggagcccccttcatttggcagtggaggcccaggcagccgatgtg

SEQ ID NO: 144580 - DNA, 120 bp, Artificial Sequence
  ENSG00000104825_6 (sequence is synthesized)
ctggagcttctcctgagggcaggcgcgaaccctgctgcccgcatgtacggtggccgcaccccactcggcagtgccatgctccggcccaaccccatcctcgcccgcctcctccgtgcacac

SEQ ID NO: 144581 - DNA, 120 bp, Artificial Sequence
  ENSG00000104825_7 (sequence is synthesized)
ggagcccctgagcccgagggcgaggacgagaaatccggcccctgcagcagcagtagcgacagcgacagcggagacgagggcgatgaatacgacgacattgtggttcacagcagccgcagc

SEQ ID NO: 144582 - DNA, 120 bp, Artificial Sequence
  ENSG00000104825_8 (sequence is synthesized)
caaacccggctgcctcccaccccagcctcaaaacctcttcctgacgacccccgccccgtgtgatttgtttcattgttaatataatttccagtttaataaacaaaaccctagttctgacaa

SEQ ID NO: 144583 - DNA, 120 bp, Artificial Sequence
  ENSG00000104825_9 (sequence is synthesized)
gagggcgtgagtcaggaggagagacagggcagcccagctggggggtcaggatagaccggcaggcaagaagcccaagaagataattaggcaccgaccttgggctgctgttagagaactcag

SEQ ID NO: 144584 - DNA, 120 bp, Artificial Sequence
  ENSG00000104825_10 (sequence is synthesized)
ctggacaggggtggtgggaagagcttgggcagaagtggctgaaaaactaaggcagtggcaaaggtagaactcaggcaggggtggagaaaaggcgttggtcgcagtgattggtgaacacag

SEQ ID NO: 144585 - DNA, 120 bp, Artificial Sequence
  ENSG00000104825_11 (sequence is synthesized)
cgggggtgggtggtagcgctgggggtgattttaggcagcaagaattggagaactcacactgcgaaaagaaaaccttgggtggcagtgatttgaacaccggcagtgctggggcaggacccg

SEQ ID NO: 144586 - DNA, 120 bp, Artificial Sequence
  ENSG00000104825_12 (sequence is synthesized)
agccagcggtggggagagatatagtcagagaacccagcaatacagatccgtccttgggcaaggcgcggtgctggatgatgggtgcggaggaatttgggtaaaggcagagggaaggggtgg

SEQ ID NO: 144587 - DNA, 120 bp, Artificial Sequence
  ENSG00000104825_13 (sequence is synthesized)
gggaaggggtggaggagggccagctcagttgccgaaactctggagtggcggctggctagaaattggtctgtagaaatgaccttgaaaatggagttctggccaggtgcggtggctcacgcc

SEQ ID NO: 144588 - DNA, 120 bp, Artificial Sequence
  ENSG00000104825_14 (sequence is synthesized)
aaaaaaaaaaaaagaaagaaaagaaaatggagttctgagagctaggaaactgggaggttgagccaggagcaggggaacttgggctttgaggcgagacctaattcttagggtgctctatga

SEQ ID NO: 144589 - DNA, 120 bp, Artificial Sequence
  ENSG00000104825_15 (sequence is synthesized)
gcaaagcccagctacaggcgggcgactgcggggggcccctgaggcggcgggggccatggctggggtcgcgtgcttgggaaaagctgccgacgcagatgaatggcttctcggccggcactg

SEQ ID NO: 144590 - DNA, 120 bp, Artificial Sequence
  ENSG00000104826_0 (sequence is synthesized)
gctgttgctgctgctgagcatgggcggggcatgggcatccagggagccgcttcggccatggtgccaccccatcaatgccatcctggctgtcgagaaggagggctgcccagtgtgcatcac

SEQ ID NO: 144591 - DNA, 120 bp, Artificial Sequence
  ENSG00000104826_1 (sequence is synthesized)
gtcgagaaggagggctgcccagtgtgcatcaccgtcaacaccaccatctgtgccggctactgccccaccatgatgcgcgtgctgcaggcggtcctgccgcccctgcctcaggtggtgtgc

SEQ ID NO: 144592 - DNA, 120 bp, Artificial Sequence
  ENSG00000104826_2 (sequence is synthesized)
gcccgcgtggtgtggaccccgtggtctccttccctgtggctctcagctgtcgctgtggaccctgccgccgcagcacctctgactgtgggggtcccaaagaccaccccttgacctgtgacc

SEQ ID NO: 144593 - DNA, 120 bp, Artificial Sequence
  ENSG00000104826_3 (sequence is synthesized)
acccccaactctcaggcctcctcttcctctaaagaccctccccgcagccttccaagtccatcccgactcctggagccctgacaccccgatcctcccacaataaaggcttctcaatccgca

SEQ ID NO: 144594 - DNA, 120 bp, Artificial Sequence
  ENSG00000104826_4 (sequence is synthesized)
cgggaagggtctctgggtctttgtgggtggtgtaccacgcgggatgggaaggccaggactcggggctgcggtctcagacctgggtgaagcagtgtccttgtcccaggggctgctgctgtt

SEQ ID NO: 144595 - DNA, 120 bp, Artificial Sequence
  ENSG00000104827_0 (sequence is synthesized)
agcacctttctcgggtcacggcctcctcctggctcccaggaccccaccataggcagaggcaggccttcctacaccctactccctgtgcctccagcctcgactagtccctagcactcgacg

SEQ ID NO: 144596 - DNA, 120 bp, Artificial Sequence
  ENSG00000104827_1 (sequence is synthesized)
actgagtctctgaggtcacttcaccgtggtctccgcctcacccttggcgctggaccagtgagaggagagggctggggcgctccgctgagccactcctgcgcccccctggccttgtctacc

SEQ ID NO: 144597 - DNA, 120 bp, Artificial Sequence
  ENSG00000104827_2 (sequence is synthesized)
tcttgccccccgaggggttagtgtcgagctcaccccagcatcctatcacctcctggtggccttgccgcccccacaaccccgaggtataaagccaggtacacgaggcaggggacgcaccaa

SEQ ID NO: 144598 - DNA, 120 bp, Artificial Sequence
  ENSG00000104827_3 (sequence is synthesized)
gctgagcatgggcgggacatgggcatccaaggagccgcttcggccacggtgccgccccatcaatgccaccctggctgtggagaaggagggctgccccgtgtgcatcaccgtcaacaccac

SEQ ID NO: 144599 - DNA, 120 bp, Artificial Sequence; identical to SEQ ID NO: 144494
  ENSG00000104827_4 (sequence is synthesized)

SEQ ID NO: 144600 - DNA, 120 bp, Artificial Sequence; identical to SEQ ID NO: 144495
  ENSG00000104827_5 (sequence is synthesized)

SEQ ID NO: 144601 - DNA, 120 bp, Artificial Sequence
  ENSG00000104827_6 (sequence is synthesized)
cccccgcttccaggactcctcttcctcaaaggcccctccccccagccttccaagcccatcccgactcccggggccctcggacaccccgatcctcccacaataaaggcttctcaatccgca

SEQ ID NO: 144602 - DNA, 120 bp, Artificial Sequence
  ENSG00000104833_0 (sequence is synthesized)
gtgctccgccgtctccgccgcatcttccaccctcgccgccgccgcagctccccgcgctcgtgccaccgccgccgcgtccaccctcagcgccaccgccatgcgggagatcgtgcacctgca

SEQ ID NO: 144603 - DNA, 120 bp, Artificial Sequence
  ENSG00000104833_1 (sequence is synthesized)
ggccggccagtgcggcaaccagatcggggccaagttttgggaggttatcagtgacgaacatggcatcgaccccacaggcacataccatggggacagtgacctgcaactggagaggatcaa

SEQ ID NO: 144604 - DNA, 120 bp, Artificial Sequence
  ENSG00000104833_2 (sequence is synthesized)
cgtgtactacaacgaggccacaggaggaaattatgtccccagagcggtgctggtggacctggaacccggcaccatggactctgtccgttctggccccttcggtcagatctttcggccgga

SEQ ID NO: 144605 - DNA, 120 bp, Artificial Sequence
  ENSG00000104833_3 (sequence is synthesized)
caacttcgtgtttggccaatccggagccggcaacaactgggcaaaggggcactacacggagggcgcagagctggtggacgctgtcctggacgtagtccggaaggaggccgagagctgcga

SEQ ID NO: 144606 - DNA, 120 bp, Artificial Sequence
  ENSG00000104833_4 (sequence is synthesized)
ctgccttcagggcttccagctgacccactcgctggggggtggcacggggtccggaatgggcacgctgctcatcagtaagatccgcgaggagttcccagaccgcatcatgaacaccttcag

SEQ ID NO: 144607 - DNA, 120 bp, Artificial Sequence
  ENSG00000104833_5 (sequence is synthesized)
cgtggtgccctcgcccaaagtgtcagacacggtggtggagccctacaacgccacgctgtctgtgcaccagctggtggagaatacggatgagacctactgcatcgacaacgaggcactcta

SEQ ID NO: 144608 - DNA, 120 bp, Artificial Sequence
  ENSG00000104833_6 (sequence is synthesized)
cgacatctgtttccgcaccctcaagctgaccacccccacctacggggacctcaaccacctggtgtcggccaccatgagcggggtcaccacctgcctgcgcttcccgggccagctgaacgc

SEQ ID NO: 144609 - DNA, 120 bp, Artificial Sequence
  ENSG00000104833_7 (sequence is synthesized)
cgacctgcgcaagctggccgtcaacatggttccctttcctcgcctgcacttcttcatgcccggcttcgcacccctgaccagccggggcagccagcagtaccgggccctgacggtgcccga

SEQ ID NO: 144610 - DNA, 120 bp, Artificial Sequence
  ENSG00000104833_8 (sequence is synthesized)
gctcacccagcagatgttcgatgccaagaacatgatggcggcgtgcgacccgcgccacggccgctacctgaccgtggccgccgtgttccggggccgcatgtccatgaaggaggtggacga

SEQ ID NO: 144611 - DNA, 120 bp, Artificial Sequence
  ENSG00000104833_9 (sequence is synthesized)
catcggcaacagcacggccatccaggagctgttcaagcgcatctccgagcagttcacggccatgttccggcgcaaggccttcttgcactggtacacgggcgagggcatggacgagatgga

SEQ ID NO: 144612 - DNA, 120 bp, Artificial Sequence
  ENSG00000104833_10 (sequence is synthesized)
gttcaccgaggccgagagcaacatgaatgacctggtatctgagtaccagcagtaccaggacgccacggccgaggagggcgagttcgaggaggaggcggaggaggaggtggcctaggctgc

SEQ ID NO: 144613 - DNA, 120 bp, Artificial Sequence
  ENSG00000104833_11 (sequence is synthesized)
tcccatcgcttcccacctgtcccctcgaggcttctgacctttgatccgctaggccccccatctctgaaccctagagccccgctttccctccaaggctgactccccgctgaccctaacaat

SEQ ID NO: 144614 - DNA, 120 bp, Artificial Sequence
  ENSG00000104833_12 (sequence is synthesized)
acctttggagctcgctttacctctggctacttcatctccgaccctggctcccctttgagccctaatttatctttaacccccttgagctcttccaaccttgacattcccaggaggagcccc

SEQ ID NO: 144615 - DNA, 120 bp, Artificial Sequence
  ENSG00000104833_13 (sequence is synthesized)
gcttcaccccttctgactctggaaaccgcacctttaactttgcagaccttccttcacccctgacttctgcttcacctttgacctctgccccccatgaatcccattttacctctagaccta

SEQ ID NO: 144616 - DNA, 120 bp, Artificial Sequence
  ENSG00000104833_14 (sequence is synthesized)
taagttctggtttatgtttgacccctccctctgagctgcacttcaccgctgaccttgcctcacctttaaccccccacctgagccccagctcctacctctgaccccaacttctctttgatc

SEQ ID NO: 144617 - DNA, 120 bp, Artificial Sequence
  ENSG00000104833_15 (sequence is synthesized)
tctgaatcccctctgactccaacttctctttcaccctctatgagtcccattttacttctacacctgcaagtcctggtttatattggacccctccctccgagctgcagttcacctttgacc

SEQ ID NO: 144618 - DNA, 120 bp, Artificial Sequence
  ENSG00000104833_16 (sequence is synthesized)
ttgcctcacctttcaccccccaccccccacagcgtcagctcctacctctgaccccagcttctctctgattcccacaggccccatgcatcctccctgcctcactcccctcagcccctgccg

SEQ ID NO: 144619 - DNA, 120 bp, Artificial Sequence
  ENSG00000104833_17 (sequence is synthesized)
accttagcttatctgggagagaaacaaggcctggtgcctgtgaggaagagaggtcacccctaccctccctccccgcttccctgcctcaccctcaataaataaattaattgttgtcatgga

SEQ ID NO: 144620 - DNA, 120 bp, Artificial Sequence
  ENSG00000104833_18 (sequence is synthesized)
caacttcgtgtttggtgagtcccccagcagggagccagaggctggaaaacctccttattcctgctaacaccacagagtcaacagccaccaccggggcccacagaccagagatggggtgga

SEQ ID NO: 144621 - DNA, 120 bp, Artificial Sequence
  ENSG00000104833_19 (sequence is synthesized)
aggattcagggaagtcttcctggaggaggtggcattttaattcaacggtctgaaccggaaccagactgcctgggtgcacatcccaattctgccacttcatgcattcaacaaacagtgagc

SEQ ID NO: 144622 - DNA, 120 bp, Artificial Sequence
  ENSG00000104833_20 (sequence is synthesized)
actatgcagcttcaggacaagccctccaggaacctaccgccccccacccgcaaaccagatcgccgctccggagcccccagcccactgggagggctcgcggttactgcaaggattctggcg

SEQ ID NO: 144623 - DNA, 120 bp, Artificial Sequence
  ENSG00000104833_21 (sequence is synthesized)
actgtcacctccacctctgggcacacgtgatcctcttgcctcagtctcccaagtagctggacctacaggccaatccggagccggcaacaactgggcaaaggggcactacacggagggcgc

SEQ ID NO: 144624 - DNA, 76 bp, Artificial Sequence
  ENSG00000104833_22 (sequence is synthesized)
atccggagccggcaacaactgggcaaaggggcactacacggagggcgcagagctggtggacgctgtcctggacgta

SEQ ID NO: 144625 - DNA, 120 bp, Artificial Sequence
  ENSG00000104833_23 (sequence is synthesized)
cttcttgctgcctcatcctcgccccgacaccatgcctctaggtcccccgttcaccttgctgggggagaggtggcagctagggagctagttgggggctgggggcagtcctcggcttggcca

SEQ ID NO: 144626 - DNA, 120 bp, Artificial Sequence
  ENSG00000104835_0 (sequence is synthesized)
tgaagaggcgggacacagacgacgattgggcgacgaaggactctatcgcggtcaactttcctcaggatctgattggctcgtcacggtcaggttcgctgccttgcaattggtctaaacgcg

SEQ ID NO: 144627 - DNA, 120 bp, Artificial Sequence
  ENSG00000104835_1 (sequence is synthesized)
gagtgggcgggacgaagtgccgccttgttcccggtccaagatggctgcgtccatggcgcggcgcttgtggcctttgctgactcgtcgggggttccggccccggggaggctgcatctccaa

SEQ ID NO: 144628 - DNA, 120 bp, Artificial Sequence
  ENSG00000104835_2 (sequence is synthesized)
cgatagtccaaggagaagtttcactacagagaaacgaaaccggaacctcctgtacgagtatgcgcgcgagggctacagcgcactccctcagctggacatagagcggttctgcgcatgccc

SEQ ID NO: 144629 - DNA, 120 bp, Artificial Sequence
  ENSG00000104835_3 (sequence is synthesized)
agaagaggccgcacacgccctggagctccgcaagggggagctgcgctcggcggacctgcccgcgatcatctcgacatggcaggagctgaggcagctgcaggagcagatccggagcctgga

SEQ ID NO: 144630 - DNA, 120 bp, Artificial Sequence
  ENSG00000104835_4 (sequence is synthesized)
ggaagagaaggcagctgtgactgaggcagtgcgggccctgctggcaaaccaggacagtggtgaagtgcagcaggaccccaagtaccagggtctgcgggcacgtggccgggagatccggaa

SEQ ID NO: 144631 - DNA, 120 bp, Artificial Sequence
  ENSG00000104835_5 (sequence is synthesized)
ggagcttgttcacctgtaccccagggaggcccagcttgaggagcagttctacctgcaggcgctgaagctgcccaaccagacccacccagacgtgcccgtcggggatgagagccaggctcg

SEQ ID NO: 144632 - DNA, 120 bp, Artificial Sequence
  ENSG00000104835_6 (sequence is synthesized)
agtgctccacatggtcggagacaagccagttttctccttccaacctcggggccacctggaaattggcgagaaactcgacatcatccgtcagaagcgcctgtcccacgtgtctggccaccg

SEQ ID NO: 144633 - DNA, 120 bp, Artificial Sequence
  ENSG00000104835_7 (sequence is synthesized)
gtcctattacctgcgcggggctggagccctcctgcagcacggcctggtcaacttcacattcaacaagcttctccgccggggcttcacccccatgacggtgccagaccttctccgcggagc

SEQ ID NO: 144634 - DNA, 120 bp, Artificial Sequence
  ENSG00000104835_8 (sequence is synthesized)
ggatgacaccaaatgccaacccatcccaaatttacaacatcgaccctgcccgcttcaaagatctcaacctggctggaacagcggaggtggggcttgcaggctacttcatggaccacaccg

SEQ ID NO: 144635 - DNA, 120 bp, Artificial Sequence
  ENSG00000104835_9 (sequence is synthesized)
tggccttcagggacctgccagtcaggatggtttgctccagcacctgctaccgggcagagacaaacacgggacaggaaccccgggggctgtatcgagtacaccacttcaccaaggtggaga

SEQ ID NO: 144636 - DNA, 120 bp, Artificial Sequence
  ENSG00000104835_10 (sequence is synthesized)
tgtttggggtgacaggccctgggctggagcagagctcacagctgctggaggagttcctgtcccttcagatggagatcttgacagagctgggcttgcacttccgggtcctggatatgccca

SEQ ID NO: 144637 - DNA, 120 bp, Artificial Sequence
  ENSG00000104835_11 (sequence is synthesized)
cccaagaactgggcctccccgcctaccgcaagtttgacattgaggcctggatgccaggccgaggccgctttggagaggtcaccagtgcttccaactgcacagacttccagagccgccgcc

SEQ ID NO: 144638 - DNA, 120 bp, Artificial Sequence
  ENSG00000104835_12 (sequence is synthesized)
tccacatcatgttccagaccgaggctggggagctgcagtttgcccacacggtgaacgccaccgcctgtgctgtcccccgccttctcatcgcgctcctggagagtaaccagcagaaggacg

SEQ ID NO: 144639 - DNA, 120 bp, Artificial Sequence
  ENSG00000104835_13 (sequence is synthesized)
gctcagtgctcgtgccccctgccctccagtcctacctcggcactgatcggatcacagcccctacccacgtgcctctccagtacatcggccccaaccagccccggaagcctgggctgcctg

SEQ ID NO: 144640 - DNA, 120 bp, Artificial Sequence
  ENSG00000104835_14 (sequence is synthesized)
gccagcctgctgtaagctaagaacccacccacagcagccctcgggggtgtcactgcttcctggagttcaggagaccccggacacctgggacctgtgttgctgagcccgtcctgacatctg

SEQ ID NO: 144641 - DNA, 120 bp, Artificial Sequence
  ENSG00000104835_15 (sequence is synthesized)
tgttcttcctgtcagctccacgcccgggcccctggaccacggggtccacctctcctctgtccttgctgcctcagagtcagtcactgaccctgttatcattgagggtcccagtgggaagca

SEQ ID NO: 144642 - DNA, 120 bp, Artificial Sequence
  ENSG00000104835_16 (sequence is synthesized)
ggacgtctgggctttacggttctagggacaggagaagcagaggaagaggcttccatccctccttccttctttcctcctacagtgctgagcaaaaagtccccaataaatggtcaggacaaa

SEQ ID NO: 144643 - DNA, 120 bp, Artificial Sequence
  ENSG00000104835_17 (sequence is synthesized)
aaaatggggagccaagtgtgaatcggacggggtcagggctggggtgtggtggagctcttgcgtttagagagagagatctcgacatggcaggagctgaggcagctgcaggagcagatccgg

SEQ ID NO: 144644 - DNA, 120 bp, Artificial Sequence
  ENSG00000104835_18 (sequence is synthesized)
aacgttctagttggccaggcctgattcttttccccacaaacctgccatgtggtggtaagggaagttctgcgaagacgttcaggatcctgggcctggagaagaggcatgaatgtccaccac

SEQ ID NO: 144645 - DNA, 120 bp, Artificial Sequence
  ENSG00000104835_19 (sequence is synthesized)
aggggctctgccggtcaggatcaaggtcacactggatgagggagtcctgaccctctcccgggctgagcccacctgtgctgcccccaggaccccaagtaccagggtctgcgggcacgtggc

SEQ ID NO: 144646 - DNA, 120 bp, Artificial Sequence
  ENSG00000104835_20 (sequence is synthesized)
gatgtggaaatgccatgaatctttgatgccccagccccacccagcagccgggcctcttcccccgggtgttttcatccccacattccctgccagcctggcccatgtgcacccgcctgtctg

SEQ ID NO: 144647 - DNA, 120 bp, Artificial Sequence
  ENSG00000104835_21 (sequence is synthesized)
aggctctattgatgcatgaaactaaaactggcttcaggtgcggctggatccaggtgctggctccatatttggtcctacgttcctcccattcccaggccagctttctctccttgtgtaagt

SEQ ID NO: 144648 - DNA, 120 bp, Artificial Sequence
  ENSG00000104835_22 (sequence is synthesized)
aggaggcaaagtcaagcacgctttcctgatagttccagttaaagtcctggggctgattctcatgagttcagctgacatcaggtgcctgtctctgagccagtcattgtggccaaggcaata

SEQ ID NO: 144649 - DNA, 120 bp, Artificial Sequence
  ENSG00000104835_23 (sequence is synthesized)
aatcagtcttccctccttgacccgactttccctgctctctgccaggatggtttgctccagcacctgctaccgggcagagacaaacacgggacaggaaccccgggggctgtatcgagtaca

SEQ ID NO: 144650 - DNA, 120 bp, Artificial Sequence
  ENSG00000104835_24 (sequence is synthesized)
ccacttcaccaaggctggtgtcgctgggactaaacggggctggggtggggggccaccccaagagctcagagcctcctgactcctgtgccctctgtcccaggtggagatgtttggggtgac

SEQ ID NO: 144651 - DNA, 120 bp, Artificial Sequence
  ENSG00000104835_25 (sequence is synthesized)
tgcccacacggtgaggcccgcacagcctcctgcccgcgtgccctcgcccgcagcctctgccgccctagacccacccaccttggctcctccccgggctcagcttggggtgggcgccagttc

SEQ ID NO: 144652 - DNA, 120 bp, Artificial Sequence
  ENSG00000104848_0 (sequence is synthesized)
aaacttggagagacgcaggacaggatcccggcggcagaaggacggagagaaaggggaccccgggacgggaaaggcgcagagcaggcgcgggcggcggcggcggcggggcagggcagggcg

SEQ ID NO: 144653 - DNA, 120 bp, Artificial Sequence
  ENSG00000104848_1 (sequence is synthesized)
ggcgtcccggcagagggcgcgcggtcgccctgtcgccctccgccccgccggggtcacagtgccccctccctcgcgccctagccgccctgccgggctatttttacgcgcggacaccggaca

SEQ ID NO: 144654 - DNA, 80 bp, Artificial Sequence
  ENSG00000104848_2 (sequence is synthesized)
atttttacgcgcggacaccggacaccggacaccgggctggggcggcggcggcggcggccgaggcggccgaggcggggccg

SEQ ID NO: 144655 - DNA, 120 bp, Artificial Sequence
  ENSG00000104848_3 (sequence is synthesized)
agccgcggtgcccgccgccgtgcggctgctgcgagcggctggtgctcaacgtggccgggctgcgcttcgagacgcgggcgcgcacgctgggccgcttcccggacactctgctaggggacc

SEQ ID NO: 144656 - DNA, 120 bp, Artificial Sequence
  ENSG00000104848_4 (sequence is synthesized)
cagcgcgccgcggccgcttctacgacgacgcgcgccgcgagtatttcttcgaccggcaccggcccagcttcgacgccgtgctctactactaccagtccggtgggcggctgcggcggccgg

SEQ ID NO: 144657 - DNA, 120 bp, Artificial Sequence
  ENSG00000104848_5 (sequence is synthesized)
cgcacgtgccgctcgacgtcttcctggaagaggtggccttctacgggctgggcgcggcggccctggcacgcctgcgcgaggacgagggctgcccggtgccgcccgagcgccccctgcccc

SEQ ID NO: 144658 - DNA, 120 bp, Artificial Sequence
  ENSG00000104848_6 (sequence is synthesized)
gccgcgccttcgcccgccagctgtggctgcttttcgagtttcccgagagctctcaggccgcgcgcgtgctcgccgtagtctccgtgctggtcatcctcgtctccatcgtcgtcttctgcc

SEQ ID NO: 144659 - DNA, 120 bp, Artificial Sequence
  ENSG00000104848_7 (sequence is synthesized)
tcgagacgctgcctgacttccgcgacgaccgcgacggcacggggcttgctgctgcagccgcagccggcccgttccccgctccgctgaatggctccagccaaatgcctggaaatccacccc

SEQ ID NO: 144660 - DNA, 120 bp, Artificial Sequence
  ENSG00000104848_8 (sequence is synthesized)
gcctgcccttcaatgacccgttcttcgtggtggagacgctgtgtatttgttggttctcctttgagctgctggtacgcctcctggtctgtccaagcaaggctatcttcttcaagaacgtga

SEQ ID NO: 144661 - DNA, 120 bp, Artificial Sequence
  ENSG00000104848_9 (sequence is synthesized)
tgaacctcatcgattttgtggctatccttccctactttgtggcactgggcaccgagctggcccggcagcgaggggtgggccagcaggccatgtcactggccatcctgagagtcatccgat

SEQ ID NO: 144662 - DNA, 120 bp, Artificial Sequence
  ENSG00000104848_10 (sequence is synthesized)
tggtgcgtgtcttccgcatcttcaagctgtcccggcactcaaagggcctgcaaatcttgggccagacgcttcgggcctccatgcgtgagctgggcctcctcatctttttcctcttcatcg

SEQ ID NO: 144663 - DNA, 120 bp, Artificial Sequence
  ENSG00000104848_11 (sequence is synthesized)
gtgtggtcctcttttccagcgccgtctactttgccgaagttgaccgggtggactcccatttcactagcatccctgagtccttctggtgggcggtagtcaccatgactacagttggctatg

SEQ ID NO: 144664 - DNA, 120 bp, Artificial Sequence
  ENSG00000104848_12 (sequence is synthesized)
gagacatggcacccgtcactgtgggtggcaagatagtgggctctctgtgtgccattgcgggcgtgctgactatttccctgccagtgcccgtcattgtctccaatttcagctacttttatc

SEQ ID NO: 144665 - DNA, 120 bp, Artificial Sequence
  ENSG00000104848_13 (sequence is synthesized)
accgggagacagagggcgaagaggctgggatgttcagccatgtggacatgcagccttgtggcccactggagggcaaggccaatggggggctggtggacggggaggtacctgagctaccac

SEQ ID NO: 144666 - DNA, 120 bp, Artificial Sequence
  ENSG00000104848_14 (sequence is synthesized)
ctccactctgggcacccccagggaaacacctggtcaccgaagtgtgaggaacagttgaggtctgcaggacctcacacctccctagagggagggagggagggcagggtggagggcaaggct

SEQ ID NO: 144667 - DNA, 120 bp, Artificial Sequence
  ENSG00000104848_15 (sequence is synthesized)
ggggggaggggattgggtttaggaagagctaggttaagtcgtaacgagtggggaaacactgagtcttgttgggtcttgggttgtgtggtttggtagctcctgtgggtacctcctgaagca

SEQ ID NO: 144668 - DNA, 120 bp, Artificial Sequence
  ENSG00000104848_16 (sequence is synthesized)
gcagcgaatggcaatgggttgtgttgtgttaatgaagactcaattggttcatattactctgagttgtgcaaagctcatggagccttttggggtagtgttgagataggtttggtcgtatca

SEQ ID NO: 144669 - DNA, 120 bp, Artificial Sequence
  ENSG00000104848_17 (sequence is synthesized)
ttttgtgagtttcctaggtcagtgttgggtttggttgggttgtgagtctgggatagtgtggtccagctgcattgtgtaggattctgtggtttggtgggtcccctagggccatgttgggtc

SEQ ID NO: 144670 - DNA, 120 bp, Artificial Sequence
  ENSG00000104848_18 (sequence is synthesized)
gtttcgttgagacatggtggaaattgtgtagctctgtgattcttccaggggcatgttattttaggttctgtgaacttgcgagtcatgtagaaatgtgaagagtccagtggtagaatttga

SEQ ID NO: 144671 - DNA, 120 bp, Artificial Sequence
  ENSG00000104848_19 (sequence is synthesized)
gctttctaggtcacattgggttaagtttgtatgaccaaatgaatcttgtagggttctgttgggcttaactgtgtagaggtgtgtggctggacatttttcgtggccacagcgagttgagtt

SEQ ID NO: 144672 - DNA, 120 bp, Artificial Sequence
  ENSG00000104848_20 (sequence is synthesized)
gtgttgaattgtacaaccatatgagccttgtaaggccagttcagttgggtcatgccactgtttgagtctcatagggccatgctgaattgagttccattgagttgtgtcactatgtgagtc

SEQ ID NO: 144673 - DNA, 120 bp, Artificial Sequence
  ENSG00000104848_21 (sequence is synthesized)
ctacaggaagttgggttgagttggactgtgcgaacgagttccatagggccacatcgggctgttttgcatttagtggtagcaccaggacccaaaggaaatagcagtggggaagcatcatgt

SEQ ID NO: 144674 - DNA, 120 bp, Artificial Sequence
  ENSG00000104848_22 (sequence is synthesized)
atctgggagcatgcagtggcgagggctctgggaggtgtgccgagctggctccccagctcgctgtagggggcgggactggattctgtatccatgggattgggtgttcatccagaggcgact

SEQ ID NO: 144675 - DNA, 120 bp, Artificial Sequence
  ENSG00000104848_23 (sequence is synthesized)
gggtaaattaggaagaggtggatgctcctcctgtttaccccacatccacttcattgtgctgttcactcccattctcccctacagttttatgctcagacatggaggtcagagccacaaggg

SEQ ID NO: 144676 - DNA, 120 bp, Artificial Sequence
  ENSG00000104848_24 (sequence is synthesized)
aaaggggagagggggagaaaactgtactctgtccagacatgatagagggacagagccaaaaggatagagaaagagacccagaaaaaggaagaggtggaaacccagagagacagagaccca

SEQ ID NO: 144677 - DNA, 120 bp, Artificial Sequence
  ENSG00000104848_25 (sequence is synthesized)
aagggagagaaacagagactcagggagagggagacaatgacctggagggtggggtatggcagagacgcagaagagaggaacagaaatccagagtggggagacagagaccaagagcagggg

SEQ ID NO: 144678 - DNA, 120 bp, Artificial Sequence
  ENSG00000104848_26 (sequence is synthesized)
ggagacagagaccaagagcaggggatagaagccgggcgaagtggcccatgcctgtaatctcagcactctgggagaccgaggaagggggattgattgaggccaggagttcaagaccagcct

SEQ ID NO: 144679 - DNA, 120 bp, Artificial Sequence
  ENSG00000104848_27 (sequence is synthesized)
ctgcactccagcctgggcaacagagggagcccccgtctcaacaaacaaacaaaaagagccagtgggggagggagggacagagacccagagggcagcgtcagacacccagagttggagaca

SEQ ID NO: 144680 - DNA, 120 bp, Artificial Sequence
  ENSG00000104848_28 (sequence is synthesized)
acagagacccagagggcagcgtcagacacccagagttggagacagaacaacagagtctcagggaaagagaaccacaatagaaaaaggcagaaaaggccgggcgcggtggctcatgcctgt

SEQ ID NO: 144681 - DNA, 120 bp, Artificial Sequence
  ENSG00000104848_29 (sequence is synthesized)
agaaaaagccagaaaaagttggtgcccctgaacccaagagtgatgtacagtctattccatagaatcacagaacaatcctgaaccaggcctgtcacctaccctccctgcagctcaggaagg

SEQ ID NO: 144682 - DNA, 120 bp, Artificial Sequence
  ENSG00000104848_30 (sequence is synthesized)
ctgtcagacaggctgggggcctcactctgttttccaggggagaaacctgagtctcagagcaggggagtggcttcccaaggtctcacagcttgtccccaggggccaggcaggctgtctgtc

SEQ ID NO: 144683 - DNA, 120 bp, Artificial Sequence
  ENSG00000104848_31 (sequence is synthesized)
tgcttcacatgtccccatcagcctgctgggacacacgggtcctcctgagtcccgtagcctcatttcttacagacggggaaactgaggctcagagcagcaggtgttacccaaggtcacaag

SEQ ID NO: 144684 - DNA, 120 bp, Artificial Sequence
  ENSG00000104848_32 (sequence is synthesized)
gccgaacattttcagaaatctttcagaactcaaagggcatttagaggaagaaggctgaaatcactaacacatatagggcttcctttggtatcaaagtactttacttgggttaatttatta

SEQ ID NO: 144685 - DNA, 120 bp, Artificial Sequence
  ENSG00000104852_0 (sequence is synthesized)
agtcgctatcggaggccgcgcgggtggctgagcagcggcctggtgcgctcgcttagcgggcgacggaatcagacggacgtggacgcccccggagtggaagccgaagcaggagttgttgtt

SEQ ID NO: 144686 - DNA, 120 bp, Artificial Sequence
  ENSG00000104852_1 (sequence is synthesized)
gctgaggggctgccgcagccgccgcgagcctccggacagacgccagagcgaggagggcgctacgcgacttggcaagatgacccagttcctgccgcccaaccttctggccctctttgcccc

SEQ ID NO: 144687 - DNA, 120 bp, Artificial Sequence
  ENSG00000104852_2 (sequence is synthesized)
ccgtgaccctattccatacctgccacccctggagaaactgccacatgaaaaacaccacaatcaaccttattgtggcattgcgccgtacattcgagagtttgaggaccctcgagatgcccc

SEQ ID NO: 144688 - DNA, 120 bp, Artificial Sequence
  ENSG00000104852_3 (sequence is synthesized)
tcctccaactcgtgctgaaacccgagaggagcgcatggagaggaaaagacgggaaaagattgagcggcgacagcaagaagtggagacagagcttaaaatgtgggaccctcacaatgatcc

SEQ ID NO: 144689 - DNA, 120 bp, Artificial Sequence
  ENSG00000104852_4 (sequence is synthesized)
caatgctcagggggatgccttcaagactctcttcgtggcgagagtgaattatgacacaacagaatccaagctccggagagagtttgaggtgtacggacctatcaaaagaatacacatggt

SEQ ID NO: 144690 - DNA, 120 bp, Artificial Sequence
  ENSG00000104852_5 (sequence is synthesized)
ctacagtaagcggtcaggaaagccccgtggctatgccttcatcgagtacgaacacgagcgagacatgcactccgcttacaaacacgcagatggcaagaagattgatggcaggagggtcct

SEQ ID NO: 144691 - DNA, 120 bp, Artificial Sequence
  ENSG00000104852_6 (sequence is synthesized)
ccgcgatgacacctcccgctacgatgagaggcccggcccctccccgcttccgcacagggaccgggaccgggaccgtgagcgggagcgcagagagcggagccgggagcgagacaaggagcg

SEQ ID NO: 144692 - DNA, 120 bp, Artificial Sequence
  ENSG00000104852_7 (sequence is synthesized)
agaacggcgacgctcccgctcccgggaccggcggaggcgctcacggagtcgcgacaaggaggagcggaggcgctccagggagcggagcaaggacaaggaccgggaccggaagcggcgaag

SEQ ID NO: 144693 - DNA, 120 bp, Artificial Sequence
  ENSG00000104852_8 (sequence is synthesized)
cagccggagtcgggagcgggcccggcgggagcgggagcgcaaggaggagctgcgtggcggcggtggcgacatggcggagccctccgaggcgggtgacgcgccccctgatgatgggcctcc

SEQ ID NO: 144694 - DNA, 120 bp, Artificial Sequence
  ENSG00000104852_9 (sequence is synthesized)
aggggagctcgggcctgacggccctgacggtccagaggaaaagggccgggatcgtgaccgggagcgacggcggagccaccggagcgagcgcgagcggcgccgggaccgggatcgtgaccg

SEQ ID NO: 144695 - DNA, 120 bp, Artificial Sequence
  ENSG00000104852_10 (sequence is synthesized)
tgaccgtgaccgcgagcacaaacggggggagcggggcagtgagcggggcagggatgaggcccgaggtgggggcggtggccaggacaacgggctggagggtctgggcaacgacagccgaga

SEQ ID NO: 144696 - DNA, 120 bp, Artificial Sequence
  ENSG00000104852_11 (sequence is synthesized)
catgtacatggagtctgagggcggcgacggctacctggctccggagaatgggtatttgatggaggctgcgccggagtgaagaggtcgtcctctccatctgctgtgtttggacgcgttcct

SEQ ID NO: 144697 - DNA, 120 bp, Artificial Sequence
  ENSG00000104852_12 (sequence is synthesized)
gcccagccccttgctgtcatcccctcccccaaccttggccacttgagtttgtcctccaagggtaggtgtctcatttgttctggccccttggatttaaaaataaaattaatttcctgttga

SEQ ID NO: 144698 - DNA, 120 bp, Artificial Sequence
  ENSG00000104852_13 (sequence is synthesized)
ggcggcggcctctccgcttgggttccacccagcctctgatgacccggcttcgtgatgtcagcggcgaggtggcaggaacaccgagggcagggctccaggccagggctccactggagccct

SEQ ID NO: 144699 - DNA, 120 bp, Artificial Sequence
  ENSG00000104852_14 (sequence is synthesized)
tcagccttccctccctgcccccgtgctttctatggggctgctactgtgctggccctggagagtctttttggctgctagttttggggtgctctgccccctttctgtcttccttactgtggt

SEQ ID NO: 144700 - DNA, 120 bp, Artificial Sequence
  ENSG00000104852_15 (sequence is synthesized)
tgaggcctcccgagggggctggctgtggtgtccagcagctctccagaggtggtcaggagctccctaaagtgcatggaattggggcttggggtgtgggagggaccaaggggtaggctgcta

SEQ ID NO: 144701 - DNA, 120 bp, Artificial Sequence
  ENSG00000104852_16 (sequence is synthesized)
gcagctgaaggtgtcgtaggtttttactaaagaaccttccactgtctagagacttgagagagggaaagagagagagaggcctagacgaacacaatcacatgttttctttgctgttcctcc

SEQ ID NO: 144702 - DNA, 120 bp, Artificial Sequence
  ENSG00000104852_17 (sequence is synthesized)
cgggatgggcctgttttggggtttgggactctgaacccgagcggggttccttcgcttgactttgatcctggtccttaaatgcctttccccactcccctcccgtgggttcaggggccaagc

SEQ ID NO: 144703 - DNA, 120 bp, Artificial Sequence
  ENSG00000104852_18 (sequence is synthesized)
ggcccctcctcagagcacgggcagcaccgtctcctggacccctgtgtgccagcctctgcagacgcagctggtgggagggagcatggatttggaggtggagaagtcactcctggtcctcgg

SEQ ID NO: 144704 - DNA, 120 bp, Artificial Sequence
  ENSG00000104852_19 (sequence is synthesized)
agggggtgggctgtgtgcctagttcagtgtgactcggggattggtgagggcggacaggtttctgaggcctccctagccttctttgtaaattcacacgagatagtccagggctttccagcg

SEQ ID NO: 144705 - DNA, 120 bp, Artificial Sequence
  ENSG00000104852_20 (sequence is synthesized)
cccagcttggatgataatcctcgtctcccccactctaaggcctccttgagatttctttggggtctaccacgtcctctgcctgtctccaggtggtacaggagatgtggttcctctccctct

SEQ ID NO: 144706 - DNA, 120 bp, Artificial Sequence
  ENSG00000104852_21 (sequence is synthesized)
cctggctccctagaaccccccacttcccctccctgtagctttagctgaccccgtggtggtgggtgtggggtctgtgcgcgtgctcaggtaagcttgggggctccaggtaagcggtcccgt

SEQ ID NO: 144707 - DNA, 120 bp, Artificial Sequence
  ENSG00000104852_22 (sequence is synthesized)
gtcccccccccgggaagcccgcctcctcgccaggcccccaggagttgccgagccccccccatcccgctcggtttggacacccgcaaggccggcatcggtaaatggcacctttttctcttc

SEQ ID NO: 144708 - DNA, 120 bp, Artificial Sequence
  ENSG00000104852_23 (sequence is synthesized)
ctctggttgttatttgggggggagcgggctggggcggggcagggtattacggttggttgaggacagccccctaggccagggctgggtgggggaacggggactttttggccttcatgacag

SEQ ID NO: 144709 - DNA, 120 bp, Artificial Sequence
  ENSG00000104852_24 (sequence is synthesized)
ccccacgttgatcacaggccagggcctcaggcttgccttctgctacgcgctgcccgagagcagcagtgagcctctcccccgtctcccctctacgactcccctttcctggcaggctcaggc

SEQ ID NO: 144710 - DNA, 120 bp, Artificial Sequence
  ENSG00000104852_25 (sequence is synthesized)
tggggtgcgctcccagcacgtgttgagccgggggtgtggagggcgagatggggcagggctggggggaggcagagtcagtcgtctcaggtaaggcagggattttcagtagcaccgcacggc

SEQ ID NO: 144711 - DNA, 120 bp, Artificial Sequence
  ENSG00000104852_26 (sequence is synthesized)
gatttctcccacccccttctggttcattttctgttctgatgtctgttccccccacactcacccccctccaaaaaaaacaaaaacagaaaaaaccggtgtggtctggggtgcggagcgtcc

SEQ ID NO: 144712 - DNA, 120 bp, Artificial Sequence
  ENSG00000104852_27 (sequence is synthesized)
cagctgggcctcctgccccggcttggtgtctcagggtgcatgcttggggttgtggaggagccccctcccccacagcagagtccagcgtggagttaaccttcagtttctttgcagcgattt

SEQ ID NO: 144713 - DNA, 120 bp, Artificial Sequence
  ENSG00000104852_28 (sequence is synthesized)
tggccgccctggcgggagggggctgttccatcatgtgggagaggaagggccggggagcctagggggtggcgggtgagggtggacgtctcccccgaccaggagtggttggggcgctgagag

SEQ ID NO: 144714 - DNA, 120 bp, Artificial Sequence
  ENSG00000104852_29 (sequence is synthesized)
gaagcagacgctgagatggagcaggcccttcaccggtttgggagagggttggtctggctgtcagttgcctggctgtctgttgggcgtgtgcgtgtgcgtgatgatggggacacggggcgg

SEQ ID NO: 144715 - DNA, 120 bp, Artificial Sequence
  ENSG00000104852_30 (sequence is synthesized)
ggattctgtagagctgggcctgtcctgactagaggaccctctggggactcctctcccctccccctccccacatctgttacagccgcttacaaacacgcagatggcaagaagattgatggc

SEQ ID NO: 144716 - DNA, 120 bp, Artificial Sequence
  ENSG00000104852_31 (sequence is synthesized)
agtacgaacacgagcgagacatgcactccaccacgcagctggcttgcagctgatgcttacgctccccttacaacacctcagtgtatggttggtataaggccgcttacaaacacgcagatg

SEQ ID NO: 144717 - DNA, 120 bp, Artificial Sequence
  ENSG00000104852_32 (sequence is synthesized)
cccccgtagcctccccgcacccatggccctttccttgtttgggtgccctttgtccctcctgccccgatccgtatgctctctgagaatcttgctgatcccaggaggggaaggatgaacctg

SEQ ID NO: 144718 - DNA, 120 bp, Artificial Sequence
  ENSG00000104852_33 (sequence is synthesized)
tgtaagtctctcatccaccatttggctctctcctctcccaaaccctctgtattcttcccaggtcatacccaggaccctgctgtctccctaaggcctgtgttgtggggaacagggttgtta

SEQ ID NO: 144719 - DNA, 120 bp, Artificial Sequence
  ENSG00000104852_34 (sequence is synthesized)
ggctatgccttcatcgagtacgaacacgagcgagacatgcactgtgagtacctcccgccgagccctgccctctgacctgctctcacttctctgctgccccagcccctcccagtctgtccc

SEQ ID NO: 144720 - DNA, 120 bp, Artificial Sequence
  ENSG00000104852_35 (sequence is synthesized)
ctcccccaccctgccacacctgacattagcgatgtctcttctcctcctccctctgtttctgatgtatcttttttttttttatatacgtgttttttaaaaaacaaaaaccaaatcccccac

SEQ ID NO: 144721 - DNA, 120 bp, Artificial Sequence
  ENSG00000104852_36 (sequence is synthesized)
gccacccctggagaaactgccacatgaaaaacaccacaatcaaccttattgtggcattgcgccgtacattcgagagtttgagggtcatctcttaggtgcatcagagcacacctgagaaaa

SEQ ID NO: 144722 - DNA, 120 bp, Artificial Sequence
  ENSG00000104853_0 (sequence is synthesized)
gacccggagcgggaagatggcggcggcgcaggaggcggacggggcccgcagcgccgtggtggcggccgggggaggcagctccggtcaggtgaccagcaatggcagcatcgggagggaccc

SEQ ID NO: 144723 - DNA, 120 bp, Artificial Sequence
  ENSG00000104853_1 (sequence is synthesized)
gccagcggagacccagcctcagaacccaccggcccagccggcacccaatgcctggcaggtcatcaaaggtgtgctgtttaggatcttcatcatctgggccatcagcagttggttccgccg

SEQ ID NO: 144724 - DNA, 120 bp, Artificial Sequence
  ENSG00000104853_2 (sequence is synthesized)
agggccggcccctcaggaccaggcgggccccggaggagctccacgcgtcgccagccgcaacctgttccccaaagacactttaatgaacctgcatgtgtacatctcagagcacgagcactt

SEQ ID NO: 144725 - DNA, 120 bp, Artificial Sequence
  ENSG00000104853_3 (sequence is synthesized)
tacagacttcaacgccacgtcggcactcttctgggaacagcacgatcttgtgtatggcgactggactagcggcgagaactcagacggctgctacgagcactttgctgagctcgatatccc

SEQ ID NO: 144726 - DNA, 120 bp, Artificial Sequence
  ENSG00000104853_4 (sequence is synthesized)
acagagcgtccagcagaacggctccatctacatccacgtttacttcaccaagagtggcttccacccagacccccggcagaaggccctgtaccgccggcttgccacagtccacatgtcccg

SEQ ID NO: 144727 - DNA, 120 bp, Artificial Sequence
  ENSG00000104853_5 (sequence is synthesized)
gatgatcaacaaatacaagcgcagacgatttcagaaaaccaagaacctgctgacaggagagacagaagcggacccagaaatgatcaagagggctgaggactatgggcctgtggaggtgat

SEQ ID NO: 144728 - DNA, 120 bp, Artificial Sequence
  ENSG00000104853_6 (sequence is synthesized)
ctcccattggcaccccaacatcaccatcaacatcgtggacgaccacacgccgtgggtgaagggcagtgtgccccctcccctggatcaatatgtgaagttcgacgccgtgagcggtgacta

SEQ ID NO: 144729 - DNA, 120 bp, Artificial Sequence
  ENSG00000104853_7 (sequence is synthesized)
ctatcccatcatctacttcaatgactactggaacctgcagaaggactactaccccatcaacgagagcctggccagcctgccgctccgcgtctccttctgcccactctcgctttggcgctg

SEQ ID NO: 144730 - DNA, 120 bp, Artificial Sequence
  ENSG00000104853_8 (sequence is synthesized)
gcagctctatgctgcccagagcaccaagtcgccctggaacttcctgggtgatgagttgtacgagcagtcagatgaggagcaggactcggtgaaggtggccctgctggagaccaaccccta

SEQ ID NO: 144731 - DNA, 120 bp, Artificial Sequence
  ENSG00000104853_9 (sequence is synthesized)
cctgctggcgctcaccatcatcgtgtctatcgttcacagtgtcttcgagttcctggccttcaagaatgatatccagttctggaacagccggcagtccctggagggcctgtccgtgcgctc

SEQ ID NO: 144732 - DNA, 120 bp, Artificial Sequence
  ENSG00000104853_10 (sequence is synthesized)
gtccaggtcagcgtcttcattggggtcctcatcgacctctggaagatcaccaaggtcatggacgtccggctggaccgagagcacagggtggcaggaatcttcccccgcctatccttcaag

SEQ ID NO: 144733 - DNA, 120 bp, Artificial Sequence
  ENSG00000104853_11 (sequence is synthesized)
gacaagtccacgtatatcgagtcctcgaccaaagtgtatgatgatatggcattccggtacctgtcctggatcctcttcccgctcctgggctgctatgccgtctacagtcttctgtacctg

SEQ ID NO: 144734 - DNA, 120 bp, Artificial Sequence
  ENSG00000104853_12 (sequence is synthesized)
gagcacaagggctggtactcctgggtgctcagcatgctctacggcttcctgctgaccttcggcttcatcaccatgacgccccagctcttcatcaactacaagctcaagtctgtggcccac

SEQ ID NO: 144735 - DNA, 120 bp, Artificial Sequence
  ENSG00000104853_13 (sequence is synthesized)
cttccctggcgcatgctcacctacaaggccctcaacacattcatcgacgacctgttcgcctttgtcatcaagatgcccgttatgtaccggatcggctgcctgcgggacgatgtggttttc

SEQ ID NO: 144736 - DNA, 120 bp, Artificial Sequence
  ENSG00000104853_14 (sequence is synthesized)
ttcatctacctctaccaacggtggatctaccgcgtcgaccccacccgagtcaacgagtttggcatgagtggagaagaccccacagctgccgcccccgtggccgaggttcccacagcagca

SEQ ID NO: 144737 - DNA, 120 bp, Artificial Sequence
  ENSG00000104853_15 (sequence is synthesized)
ggggccctcacgcccacacctgcacccaccacgaccaccgccaccagggaggaggcctccacgtccctgcccaccaagcccacccagggggccagctctgccagcgagccccaggaagcc

SEQ ID NO: 144738 - DNA, 120 bp, Artificial Sequence
  ENSG00000104853_16 (sequence is synthesized)
cctccaaagccagcagaggacaagaaaaaggattagtcgagactggtcctcacctgctccggctcctggcgaccactacccctgcgtcccggccccctcgcctcccctccctgtcgccct

SEQ ID NO: 144739 - DNA, 120 bp, Artificial Sequence
  ENSG00000104853_17 (sequence is synthesized)
ttccctggacagatcaggccggggcggtgggaggcccgcctcaggtcagggcccagcgtgtgatgtaggggccggggcaggccagggtttgtttgtggaggcgctgtctgtccctctgtc

SEQ ID NO: 144740 - DNA, 120 bp, Artificial Sequence
  ENSG00000104853_18 (sequence is synthesized)
cctctgtgtttccagccatctcgccctgccagcccagcaccactgggaatcatggtgaagctgatgcagcgttgccgagggggtgggttgggcgggggtggggccgggcccccctacggg

SEQ ID NO: 144741 - DNA, 120 bp, Artificial Sequence
  ENSG00000104853_19 (sequence is synthesized)
atgcccacggccgttcatcatcttgtccctcgtccccctaccacactccccctcctagaccgccgccctttaacacagtctggatttaataaattcatatgggtgtttaacttaaactca

SEQ ID NO: 144742 - DNA, 120 bp, Artificial Sequence
  ENSG00000104853_20 (sequence is synthesized)
aaactaagggtctctcagcagatggccgggtttagagctgtacgaagacacacagctaatgaaaaattgtggaattctcagagcccgtgaagcctagcccacggatgcgaggtttggacc

SEQ ID NO: 144743 - DNA, 120 bp, Artificial Sequence
  ENSG00000104853_21 (sequence is synthesized)
actgagggaacgcgcatgcgtgctaggcagggcagtccgaaggcttgggggtgtatcatagggtctcatcggaggtttgttggccgtaagacccctggaattggaactctaaaaacacag

SEQ ID NO: 144744 - DNA, 120 bp, Artificial Sequence
  ENSG00000104853_22 (sequence is synthesized)
aaaggatatgagctcaggagacttgaacgaaagagttgtcttaggaagaggggtcagaagacaagggtgctgggcaaaaggctagttcttcgaatcagaatacggtggccagaaaggttc

SEQ ID NO: 144745 - DNA, 120 bp, Artificial Sequence
  ENSG00000104853_23 (sequence is synthesized)
ctctgacgaaagaggggcgtggttcgaagccgtacagtggccggtaaagctcaagaaacatggaacgaaaaggacgcgaagaatcggcagggagaagcggacaggatgtcccgaaaggct

SEQ ID NO: 144746 - DNA, 120 bp, Artificial Sequence
  ENSG00000104853_24 (sequence is synthesized)
aaactaagggtctctcagcagatggccgggtttagagctgtacgaagacacacagctaatgaaaaattgtggaattctcagagcccgtgaagcctagcccacggatgcgaggtgaccagc

SEQ ID NO: 144747 - DNA, 120 bp, Artificial Sequence
  ENSG00000104853_25 (sequence is synthesized)
cgagctggcaccatggtgtggcacagaccccgcgtcccttcagattctgccatgccaggctgtttggcctcagggaagcagcttccctgaccagtccttagcacctggcacgtggtgagc

SEQ ID NO: 144748 - DNA, 120 bp, Artificial Sequence
  ENSG00000104853_26 (sequence is synthesized)
cctgtccatggcaccagtcaccgtcaccatcagtcaagggactgcaccttggggtgctgggtgctgacgtcctatgggagggctccaggggtgccgcctgtctggtgctctgggggtcac

SEQ ID NO: 144749 - DNA, 120 bp, Artificial Sequence
  ENSG00000104853_27 (sequence is synthesized)
ccaatgaatatgagagccttcctgggagagaggggtctcgttcagcacccctcctgaggacccagccccaccccagggtgtgaggatgcaggccaagggggcctgagggagctgcagtag

SEQ ID NO: 144750 - DNA, 120 bp, Artificial Sequence
  ENSG00000104853_28 (sequence is synthesized)
taagctccccagccctgccagctgcctgcagagcctttgagagggtgctcggggtccatctccttgtcttctcctggccctgtccccctgagagagctttccagggctccaccctcccaa

SEQ ID NO: 144751 - DNA, 120 bp, Artificial Sequence
  ENSG00000104853_29 (sequence is synthesized)
gctcccaccctgtcctatccccttcccatgtcctctccctctcccacaccaccacccctggggaccccaggactgacttctacacgccagcatcggtccgcaatcaagtgccatccagcc

SEQ ID NO: 144752 - DNA, 120 bp, Artificial Sequence
  ENSG00000104853_30 (sequence is synthesized)
cacaaactgttttcaaaaaatgtcttatcacttgccagcttttgaaattgaggcagtatcacttaaaagccacaatttctggcttattttataaaactgggttacatggtcacccacagg

SEQ ID NO: 144753 - DNA, 120 bp, Artificial Sequence
  ENSG00000104853_31 (sequence is synthesized)
gcactgggggctccttggccagagggaccttgaatacccggcccaggcagggccggaccgcccgggaggccggacggtgccgggaacagggccctgttgcgggtcggttcccctgcacgc

SEQ ID NO: 144754 - DNA, 120 bp, Artificial Sequence
  ENSG00000104853_32 (sequence is synthesized)
tcgagccgggcggccaccaggctcattgctcgatccggggagacagtggctcggaggggcgcaggcttgtaccttggcgcgctgggttctcaactccgcgattccatgctctgaggccgt

SEQ ID NO: 144755 - DNA, 120 bp, Artificial Sequence
  ENSG00000104853_33 (sequence is synthesized)
gctgtgggacctcccgcctggtgctcctctgcccacagtttcacaacctcccaggtcccttctccacagtgaaaggaagtgggcacccagccctccagccctagatgactgggggtcctc

SEQ ID NO: 144756 - DNA, 120 bp, Artificial Sequence
  ENSG00000104853_34 (sequence is synthesized)
tccccaggctgttctgttggaccctttgggtccagacctgtcccttcctccttctgtcccagaccttgtgtccctggccctggctccaactctgtgtctctgccatctcactgggtcctg

SEQ ID NO: 144757 - DNA, 120 bp, Artificial Sequence
  ENSG00000104853_35 (sequence is synthesized)
aaatgtcagcctgtgtctgtggcgtgaggctcggctttgcctcctgggctgtcgtcactgttgggtctctgctcctggctcccagtgtcccttcacccactccccgcagcactcccttgg

SEQ ID NO: 144758 - DNA, 120 bp, Artificial Sequence
  ENSG00000104853_36 (sequence is synthesized)
gcatttccgcacagagtttgcagactggttgcagggacagacagcaggcaggtaaaccactggctaagtggttttggatagtggtgaaatgttgtgaaggaaacaagctggcaggagaat

SEQ ID NO: 144759 - DNA, 120 bp, Artificial Sequence
  ENSG00000104853_37 (sequence is synthesized)
gactgcataggctcattcagtggggtggccagggaagccctgtggaagaaggacattctgccagggacttgaatgccacggaggagccaggccacgaagattgtgtcagggcatgggttc

SEQ ID NO: 144760 - DNA, 120 bp, Artificial Sequence
  ENSG00000104853_38 (sequence is synthesized)
tttataaaactgggttacatggtcacccacagggcagccgtgggctggagctgagccacagctgcccccttcagtggggacctgcctgccctttgcctcagtcccctctgctgaggtcaa

SEQ ID NO: 144761 - DNA, 120 bp, Artificial Sequence
  ENSG00000104853_39 (sequence is synthesized)
ggcaccctttagctcctcatggtgtggcctagaaatgtcccctgtcctccagtctctgtagaggggccctgttgggtctctccagacatctgaggcctgcgggtaccctggcctcctgcc

SEQ ID NO: 144762 - DNA, 120 bp, Artificial Sequence
  ENSG00000104856_0 (sequence is synthesized)
tgcggccccagcccttgcgccgctcgtccgacccgcgatcgtccaccagaccgtgcctcccggccgcccggccggcccgcgtgcatgcttcggtctgggccagcctctgggccgtccgtc

SEQ ID NO: 144763 - DNA, 120 bp, Artificial Sequence
  ENSG00000104856_1 (sequence is synthesized)
ttcggtctgggccagcctctgggccgtccgtccccactggccgggccatgccgagtcgccgcgtcgccagaccgccggctgcgccggagctgggggccttagggtcccccgacctctcct

SEQ ID NO: 144764 - DNA, 120 bp, Artificial Sequence
  ENSG00000104856_2 (sequence is synthesized)
cactctcgctcgccgtttccaggagcacagatgaattggagatcatcgacgagtacatcaaggagaacggcttcggcctggacgggggacagccgggcccgggcgaggggctgccacgcc

SEQ ID NO: 144765 - DNA, 120 bp, Artificial Sequence
  ENSG00000104856_3 (sequence is synthesized)
ggctgccacgcctggtgtctcgcggggctgcgtccctgagcacggtcaccctgggccctgtggcgcccccagccacgccgccgccttggggctgccccctgggccgactagtgtccccag

SEQ ID NO: 144766 - DNA, 120 bp, Artificial Sequence
  ENSG00000104856_4 (sequence is synthesized)
gcccgcagccgcacctggtcatcacggagcagcccaagcagcgcggcatgcgcttccgctacgagtgcgagggccgctcggccggcagcatccttggggagagcagcaccgaggccagca

SEQ ID NO: 144767 - DNA, 120 bp, Artificial Sequence
  ENSG00000104856_5 (sequence is synthesized)
agacgctgcccgccatcgagctccgggattgtggagggctgcgggaggtggaggtgactgcctgcctggtgtggaaggactggcctcaccgagtccacccccacagcctcgtggggaaag

SEQ ID NO: 144768 - DNA, 120 bp, Artificial Sequence
  ENSG00000104856_6 (sequence is synthesized)
actgcaccgacggcatctgcagggtgcggctccggcctcacgtcagcccccggcacagttttaacaacctgggcatccagtgtgtgaggaagaaggagattgaggctgccattgagcgga

SEQ ID NO: 144769 - DNA, 120 bp, Artificial Sequence
  ENSG00000104856_7 (sequence is synthesized)
agattcaactgggcattgacccctacaacgctgggtccctgaagaaccatcaggaagtagacatgaatgtggtgaggatctgcttccaggcctcatatcgggaccagcagggacagatgc

SEQ ID NO: 144770 - DNA, 120 bp, Artificial Sequence
  ENSG00000104856_8 (sequence is synthesized)
gccggatggatcctgtgctttccgagcccgtctatgacaagaaatccacaaacacatcagagctgcggatttgccgaattaacaaggaaagcgggccgtgcaccggtggcgaggagctct

SEQ ID NO: 144771 - DNA, 120 bp, Artificial Sequence
  ENSG00000104856_9 (sequence is synthesized)
cgccagattgccattgtgttcaagacgccgccctacgaggacctggagattgtcgagcccgtgacagtcaacgtcttcctgcagcggctcaccgatggggtctgcagcgagccattgcct

SEQ ID NO: 144772 - DNA, 120 bp, Artificial Sequence
  ENSG00000104856_10 (sequence is synthesized)
ttcacgtacctgcctcgcgaccatgacagctacggcgtggacaagaagcggaaacgggggatgcccgacgtccttggggagctgaacagctctgacccccatggcatcgagagcaaacgg

SEQ ID NO: 144773 - DNA, 120 bp, Artificial Sequence
  ENSG00000104856_11 (sequence is synthesized)
cggaagaaaaagccggccatcctggaccacttcctgcccaaccacggctcaggcccgttcctcccgccgtcagccctgctgccagaccctgacttcttctctggcaccgtgtccctgccc

SEQ ID NO: 144774 - DNA, 120 bp, Artificial Sequence
  ENSG00000104856_12 (sequence is synthesized)
ggcctggagccccctggcgggcctgacctcctggacgatggctttgcctacgaccctacggcccccacactcttcaccatgctggacctgctgcccccggcaccgccacacgctagcgct

SEQ ID NO: 144775 - DNA, 120 bp, Artificial Sequence
  ENSG00000104856_13 (sequence is synthesized)
gttgtgtgcagcggaggtgccggggccgtggttggggagacccccggccctgaaccactgacactggactcgtaccaggccccgggccccggggatggaggcaccgccagccttgtgggc

SEQ ID NO: 144776 - DNA, 120 bp, Artificial Sequence
  ENSG00000104856_14 (sequence is synthesized)
agcaacatgttccccaatcattaccgcgaggcggcctttgggggcggcctcctatccccggggcctgaagccacgtagccccgcgatgccagaggaggggcactgggtggggagggaggt

SEQ ID NO: 144777 - DNA, 120 bp, Artificial Sequence
  ENSG00000104856_15 (sequence is synthesized)
ggaggagccgtgcaatcccaaccaggatgtctagcacccccatccccttggcccttcctcatgcttctgaagtggacatattcagccttggcgagaagctccgttgcacgggtttcccct

SEQ ID NO: 144778 - DNA, 120 bp, Artificial Sequence
  ENSG00000104856_16 (sequence is synthesized)
tgagcccattttacagatgaggaaactgagtccggagaggaaaagggacatggctcccgtgcactagcttgttacagctgcctctgtccccacatgtgggggcaccttctccagtaggat

SEQ ID NO: 144779 - DNA, 120 bp, Artificial Sequence
  ENSG00000104856_17 (sequence is synthesized)
tcggaaaagattgtacatatgggaggagggggcagattcctggccctccctccccagacttgaaggtggggggtaggttggttgttcagagtcttcccaataaagatgagtttttgagcc

SEQ ID NO: 144780 - DNA, 120 bp, Artificial Sequence
  ENSG00000104856_18 (sequence is synthesized)
cttccaacgtgctgggattgcaggcgtgagccacctcgcccggcccaaagtggtcttaagcaaacacattccatcatcctggtcgcgggagaaggttggggagctcccaacagaggaccc

SEQ ID NO: 144781 - DNA, 120 bp, Artificial Sequence
  ENSG00000104856_19 (sequence is synthesized)
cctctctgccagcctcagtatccccatctgccaaattggggggaccttggcaccctactggcttcacagatcccatgagataaggggtgcaggaaaactacctttcaaggggcaaaggtc

SEQ ID NO: 144782 - DNA, 120 bp, Artificial Sequence
  ENSG00000104856_20 (sequence is synthesized)
aaattttaaaaagggggaatattagtcttgattttaggggaggctgggcaagttgggagcacagtggtccagatgtcctggcttagctgatgtcccccgtttcctgccagaggacatatc

SEQ ID NO: 144783 - DNA, 120 bp, Artificial Sequence
  ENSG00000104856_21 (sequence is synthesized)
tccacccccatccccaggttctggggaggggacagctgaccccactgccctgtcccaccccaggctggggaggaagggctgtcggggaacaggggtcctcatctctgccttccctcagac

SEQ ID NO: 144784 - DNA, 120 bp, Artificial Sequence
  ENSG00000104859_0 (sequence is synthesized)
ctttcatttccgcttccggtgcgggccgcgcgcgagcgcagcggtgggaggcggcgaccagccggttgaggccccaggcttggcctcaccacaatgtggcacgaggctcggaagcatgag

SEQ ID NO: 144785 - DNA, 120 bp, Artificial Sequence
  ENSG00000104859_1 (sequence is synthesized)
cggaagcttcgaggcatgatggtcgactacaagaagagggcggagcggagacgggagtattatgaaaagatcaagaaggacccagcccagttcctgcaggtacatggccgagcttgcaag

SEQ ID NO: 144786 - DNA, 120 bp, Artificial Sequence
  ENSG00000104859_2 (sequence is synthesized)
gtgcacctggattctgcagtcgccctggccgctgagagccctgttaatatgatgccctggcagggggacaccaacaacatgattgaccgattcgatgtccgtgcccacctggaccacatc

SEQ ID NO: 144787 - DNA, 120 bp, Artificial Sequence
  ENSG00000104859_3 (sequence is synthesized)
cccgactacaccccccctctgctcaccaccatctccccagaacaggagtcggacgaacggaagtgtaactacgagcgctacagaggcctggtgcagaacgactttgccggcatctcagag

SEQ ID NO: 144788 - DNA, 120 bp, Artificial Sequence
  ENSG00000104859_4 (sequence is synthesized)
gagcagtgcctgtaccagatctacattgatgagttgtacggaggcctccagagacccagcgaagatgagaagaagaagctggcagagaagaaggcttccatcggttatacctacgaggac

SEQ ID NO: 144789 - DNA, 120 bp, Artificial Sequence
  ENSG00000104859_5 (sequence is synthesized)
agcacggtggccgaggtagagaaggcggcagaaaagccagaggaggaggagtcagcggccgaggaggagagcaactcggacgaagatgaggtcatccccgacatcgacgtggaggtggac

SEQ ID NO: 144790 - DNA, 120 bp, Artificial Sequence
  ENSG00000104859_6 (sequence is synthesized)
gtggatgaattgaaccaggagcaggtggcagatctcaacaaacaggccacgacttatggcatggccgacggtgacttcgtcaggatgctccggaaagacaaggaggaggcagaggccatc

SEQ ID NO: 144791 - DNA, 120 bp, Artificial Sequence
  ENSG00000104859_7 (sequence is synthesized)
aagcatgccaaggctcttgaggaggagaaggccatgtactcgggacgccgctctcgacgccagcggagagagtttcgggagaagcggctgaggggtcgcaagatcagcccacccagctat

SEQ ID NO: 144792 - DNA, 120 bp, Artificial Sequence
  ENSG00000104859_8 (sequence is synthesized)
gcccgccgagacagccccacctatgacccctataagcggtcaccctcggagtccagctcagagtcccgctcccgctcccgctccccgaccccgggccgcgaggagaagatcacgttcatc

SEQ ID NO: 144793 - DNA, 120 bp, Artificial Sequence
  ENSG00000104859_9 (sequence is synthesized)
acagggaagccccccgcacctccccagcctggcggccccgccccgggacgtaatgccagcgcccgccgccgctcctcctcctcctcctcctcctcttctgcctcgaggacctccagctcc

SEQ ID NO: 144794 - DNA, 120 bp, Artificial Sequence
  ENSG00000104859_10 (sequence is synthesized)
cgctccagctctcgctccagctcccgctctcgccgtggtgggggctactaccgttccggccgccacgcccgctcccggtcccgctcctggtcccgctcccgctcccgctcccggcgctat

SEQ ID NO: 144795 - DNA, 120 bp, Artificial Sequence
  ENSG00000104859_11 (sequence is synthesized)
tcccggtcccgtagccgtggccggcggcactcaggtgggggctcccgagacggacaccggtactcccgctcgcccgcccggcgtggtggttacgggccccggcgcagaagcaggagccgc

SEQ ID NO: 144796 - DNA, 120 bp, Artificial Sequence
  ENSG00000104859_12 (sequence is synthesized)
tcccactcaggggaccgctacaggcggggcggccggggcctcaggcaccacagcagtagccgcagccgcagcagctggtccctcagcccgtcccgcagtcgcagcctgactcgcagccgc

SEQ ID NO: 144797 - DNA, 120 bp, Artificial Sequence
  ENSG00000104859_13 (sequence is synthesized)
agccatagccccagccccagccagagccgcagccgcagccgcagccgcagccagagcccctcgccatcacccgcaagagagaagctgaccaggccggccgcgtcccctgctgtgggcgag

SEQ ID NO: 144798 - DNA, 120 bp, Artificial Sequence
  ENSG00000104859_14 (sequence is synthesized)
aagctgaaaaagaccgaacctgccgctggtaaagagacaggagctgccaaacccaagctgacgcctcaggagaagctgaaactgaggatgcagaaggcgctgaacaggcagttcaaggcg

SEQ ID NO: 144799 - DNA, 120 bp, Artificial Sequence
  ENSG00000104859_15 (sequence is synthesized)
gataagaaggcggcacaagaaaagatgatccagcaggagcatgagcggcaggagcgggaagacgagcttcgagccatggcccgcaagatccgcatgaaggagcgggaacgccgagagaag

SEQ ID NO: 144800 - DNA, 120 bp, Artificial Sequence
  ENSG00000104859_16 (sequence is synthesized)
gagagagaagagtgggaacgccagtacagccggcagagccgctcaccctccccccgatacagtcgagaatacagctcttctcgaaggcgctcaaggtcccgatcccgaagcccccattac

SEQ ID NO: 144801 - DNA, 120 bp, Artificial Sequence
  ENSG00000104859_17 (sequence is synthesized)
cgacattaggcagaagagtggggggtggggaggacaagggggtgggtaaggggctcaagctgtgatgctgctggttttatctctagtgaaataaagtcaaaagttatttaattcccgtca

SEQ ID NO: 144802 - DNA, 120 bp, Artificial Sequence
  ENSG00000104859_18 (sequence is synthesized)
ctctttttctttggatgctctccccaccccgccatctagatcccatctttagacctcagcttcactctggtctccttgcaacactccctccccgtgttcccactccctctagcatcttca

SEQ ID NO: 144803 - DNA, 120 bp, Artificial Sequence
  ENSG00000104859_19 (sequence is synthesized)
tcttccgccacgcccttcacctgtcctcgacctccaccttcatacaactgcactgttcccttaaaagctttctccgatttcctccacctgccttcatccttattctccttatccctctac

SEQ ID NO: 144804 - DNA, 120 bp, Artificial Sequence
  ENSG00000104859_20 (sequence is synthesized)
cacccagactcatacccaaccccacgcatggcccctagtgggagccttttcagttcttctctttctcttgagctccagccttaagtgctcagggtttgccttctgaccctacttcaaaca

SEQ ID NO: 144805 - DNA, 120 bp, Artificial Sequence
  ENSG00000104859_21 (sequence is synthesized)
ctgctgatgtttcaaaacctttcattcccgactccagcgcgtggaatctaggacacccctttcccagtgatgctcacctcagaatcacctgagggtttttcagaatgcccaagcttctag

SEQ ID NO: 144806 - DNA, 120 bp, Artificial Sequence
  ENSG00000104859_22 (sequence is synthesized)
atcgaagttgttagggatggacttgaacatctggcatactgttctgcagcttcacttctgctccctgaagctaagagatgtgttgtttgggatcgactctgccaccaacttgttagatga

SEQ ID NO: 144807 - DNA, 120 bp, Artificial Sequence
  ENSG00000104859_23 (sequence is synthesized)
ggatttgacaagatcaaggccaggcacggaggaggcacccagtagacgtagccattgggttgccaagcctggccactgtgacggagaccatttcaacactcactgtgtgcaggtgcccca

SEQ ID NO: 144808 - DNA, 120 bp, Artificial Sequence
  ENSG00000104859_24 (sequence is synthesized)
gtgcggcaggaaatgatgggactatcctgcctccctctgttccccaggctttcctaggaaggggctgggattccagtcagccccgccagctggggtccctctgaacctggggctcccttt

SEQ ID NO: 144809 - DNA, 120 bp, Artificial Sequence
  ENSG00000104859_25 (sequence is synthesized)
ccaagcggggattggtggcagtaccggcccccttggtttactgtcttcctcggagtagggtgttggaagcacctgccctccctgagttcagtgtgtccagtgttcccggccagatgctca

SEQ ID NO: 144810 - DNA, 120 bp, Artificial Sequence
  ENSG00000104859_26 (sequence is synthesized)
cttggaagtaacacttgtcctttgatgggaggtcctggctgtcattcctccagcctcaccctgtacccacctccagttggaggggctggtctcatcccttggggaacatccttccctcca

SEQ ID NO: 144811 - DNA, 120 bp, Artificial Sequence
  ENSG00000104859_27 (sequence is synthesized)
cagacaagtgccccgatcactgaagcatccacggccccaggtgtgttgatgtgtgtatgccccatcctcacggcccctccctttctctttccaggcgctcaaggtcccgatcccgaagcc

SEQ ID NO: 144812 - DNA, 120 bp, Artificial Sequence
  ENSG00000104859_28 (sequence is synthesized)
agaaccatgtccctctcccctcctcactgtacactggggctccacctgtcactgaacctctgggagcctcagggctgtccacagcctgcccctcctccccacgtcgttctccccccccca

SEQ ID NO: 144813 - DNA, 120 bp, Artificial Sequence
  ENSG00000104859_29 (sequence is synthesized)
ccccccccccgcacaaagccccaggcttttggctgaggtgggttgtgggagctctgggacacccaccccctctcccgcctcttctcccccctccccagcccaagctgacgcctcaggaga

SEQ ID NO: 144814 - DNA, 120 bp, Artificial Sequence
  ENSG00000104859_30 (sequence is synthesized)
gcacagcgtcatacccaggagcccctgttcttttcccagcctacctgtcaccttcctaggagccgttcctatttggtaccgccctgagcctgagggggatgcctcatttcccttcctgct

SEQ ID NO: 144815 - DNA, 120 bp, Artificial Sequence
  ENSG00000104859_31 (sequence is synthesized)
catcggtggggtcccctctctgccctccccacctgcagtccctgggcatcgtttctgtgtctcgtccctcaccctctgtggggcaccccgtgcttacgaaccgtgtctctctccctaccc

SEQ ID NO: 144816 - DNA, 120 bp, Artificial Sequence
  ENSG00000104859_32 (sequence is synthesized)
cgccccagggcacaccagcctcctgctgcccctgtctcactcctgtcctcctccgttccggccttcctctgcctcactcatctctcatttctagggtgctatttctatgatcttttcccc

SEQ ID NO: 144817 - DNA, 120 bp, Artificial Sequence
  ENSG00000104859_33 (sequence is synthesized)
tcctaggtgttggctccattctcctccacttgggccggcctctctctgcctttgcccctctctcctgctctcttccctcctctggaaaacaagtgttcatcctcttacagagtcagcccc

SEQ ID NO: 144818 - DNA, 120 bp, Artificial Sequence
  ENSG00000104859_34 (sequence is synthesized)
aagaatttggaactcgcccgtctaattcccgtcagcagcagtgcccaagagctgggcccggtgggcctgcaggggggcccgggtgggctgggagatccagccccagggacagggagggga

SEQ ID NO: 144819 - DNA, 120 bp, Artificial Sequence
  ENSG00000104859_35 (sequence is synthesized)
gcggcacaagaaaagatgatccagcaggagcatgagcggcaggtgaagtgggaaagggagggctggggtgacgggtgggtgctggcctggccacgtcctcatagccctgtctgctgcagg

SEQ ID NO: 144820 - DNA, 120 bp, Artificial Sequence
  ENSG00000104859_36 (sequence is synthesized)
caagaagagggcggagcggagacgggagtattatgaaaagatcgtgagtaactggccttttgtctggggtgagggaccctgggttggggggcacagctggtcatcctggtaaaatctggg

SEQ ID NO: 144821 - DNA, 120 bp, Artificial Sequence
  ENSG00000104859_37 (sequence is synthesized)
tttggtgtggcctcccagtgccgatccggtgttagcaagaaaaagggaagtctctgtaaccctcagagcagtcctgacgttagactggccacctccagaatgtctgtttcgcttattgct

SEQ ID NO: 144822 - DNA, 120 bp, Artificial Sequence
  ENSG00000104859_38 (sequence is synthesized)
tgtttcgcttattgctgtgttccccattcccagaagagctcagccactcttgagatttggcttggcacacaataggagtgagtattaagttggcctggcacagtggctcacgcctgtaat

SEQ ID NO: 144823 - DNA, 120 bp, Artificial Sequence
  ENSG00000104863_0 (sequence is synthesized)
agggcaggcgggcggctggcagctgtggcgccgacatggctgcgctggtggagccgctggggctggagcgggacgtgtcccgggcggttgagctcctcgagcggctccagcgcagcgggg

SEQ ID NO: 144824 - DNA, 120 bp, Artificial Sequence
  ENSG00000104863_1 (sequence is synthesized)
agctgccgccgcagaagctgcaggccctccagcgagttctgcagagccgcttctgctccgctatccgagaggtgtatgagcagctttatgacacgctggacatcaccggcagcgccgaga

SEQ ID NO: 144825 - DNA, 120 bp, Artificial Sequence
  ENSG00000104863_2 (sequence is synthesized)
tccgagcccatgccacagccaaggccacagtggctgccttcacagccagcgagggccacgcacatcccagggtagtggagctacccaagacggatgagggcctaggcttcaacatcatgg

SEQ ID NO: 144826 - DNA, 120 bp, Artificial Sequence
  ENSG00000104863_3 (sequence is synthesized)
tacatctcccgggtcatcccagggggtgtggctgaccgccatggaggcctcaagcgtggggatcaactgttgtcggtgaacggtgtgagcgttgagggtgagcagcatgagaaggcggtg

SEQ ID NO: 144827 - DNA, 120 bp, Artificial Sequence
  ENSG00000104863_4 (sequence is synthesized)
gagctgctgaaggcggcccagggctcggtgaagctggttgtccgttacacaccgcgagtgctggaggagatggaggcccggttcgagaagatgcgctctgcccgccggcgccaacagcat

SEQ ID NO: 144828 - DNA, 120 bp, Artificial Sequence
  ENSG00000104863_5 (sequence is synthesized)
cagagctactcgtccttggagtctcgaggttgaaaccacagatctggacgttcacgtgcactctcttcctgtacagtatttattgttcctggcactttatttaaagatatttgaccctca

SEQ ID NO: 144829 - DNA, 80 bp, Artificial Sequence
  ENSG00000104863_6 (sequence is synthesized)
cccacccgggccgcggcctacatacccagcccccggtccccgcccttcccgggtcaggccagtgcgggtgggccagcgga

SEQ ID NO: 144830 - DNA, 120 bp, Artificial Sequence
  ENSG00000104863_7 (sequence is synthesized)
tcgctaggtgtgggaggctccctgggcgcgggccgggacgctgggcgcccgccttacaacccggcctgtggaggggtcccggggccgcagggccgctggtggcagtctctcctgcgccac

SEQ ID NO: 144831 - DNA, 120 bp, Artificial Sequence
  ENSG00000104863_8 (sequence is synthesized)
cctggactctgcggggtgtccgactaggcttcggccgtcctccccggactgtgcgctcggcctcactccgccgctctccttgcttctctgcgtctcggggtctctgacactcggggtttc

SEQ ID NO: 144832 - DNA, 120 bp, Artificial Sequence
  ENSG00000104863_9 (sequence is synthesized)
ctgcctagtcgaactcaatatctccttcatgccagtcatttctgtttcctccctcatgatttttgctaaatctatgtgccaccttactattagtaaataatcgcacatttttaacttaaa

SEQ ID NO: 144833 - DNA, 120 bp, Artificial Sequence
  ENSG00000104863_10 (sequence is synthesized)
ggatcgtgcattgtgccatgacaagtgtcccatgcttggggatagtaacccaggctaaatcgctgtcctcggtccacatcccccaccccagctttcatgcctacctggaaggggccctca

SEQ ID NO: 144834 - DNA, 120 bp, Artificial Sequence
  ENSG00000104866_0 (sequence is synthesized)
gacgactacgaccactaggagagcggacggaggcggcgcctgaagcggcggcggagcccatgccccgggacggcgggcggacccggagagacaaatccggggcccggggcatgtccccgg

SEQ ID NO: 144835 - DNA, 120 bp, Artificial Sequence
  ENSG00000104866_1 (sequence is synthesized)
ggcccccgtgaggaggcggcggcggctatggagatcgcgccgcaggaggcgccgcccgtgccgggcgcggacggcgacattgaagaggccccagctgaggccgggtctcccagccccgcg

SEQ ID NO: 144836 - DNA, 120 bp, Artificial Sequence
  ENSG00000104866_2 (sequence is synthesized)
tcgccccccgccgatgggcgcctcaaggctgcagccaagcgcgtcacattcccgtccgacgaggatatcgtgtctggagcagtggagcccaaagacccctggagacatgcccagaatgtg

SEQ ID NO: 144837 - DNA, 120 bp, Artificial Sequence
  ENSG00000104866_3 (sequence is synthesized)
accgtggacgaggtcatcggcgcctacaagcaggcctgccagaagctgaactgcaggcagatccccaagctcctcaggcagctgcaggaattcacagacctcgggcaccgcctcgactgt

SEQ ID NO: 144838 - DNA, 120 bp, Artificial Sequence
  ENSG00000104866_4 (sequence is synthesized)
ctggacctgaaaggtgagaagcttgactacaagacctgtgaggccctggaagaggtcttcaagaggctgcagttcaaggtcgtggacctggagcagacaaacctggatgaagatggtgcc

SEQ ID NO: 144839 - DNA, 120 bp, Artificial Sequence
  ENSG00000104866_5 (sequence is synthesized)
tcggccctcttcgacatgatcgagtactacgagtcggccacccacctcaacatctccttcaacaagcacatcggcacccggggctggcaggcggccgcccacatgatgcgcaagacgagc

SEQ ID NO: 144840 - DNA, 120 bp, Artificial Sequence
  ENSG00000104866_6 (sequence is synthesized)
tgcctgcagtatctggacgcccgcaacacgcccctgctggaccactcggcgcccttcgtggcccgtgccctgcgcatccgcagcagcctggcagtgctgcacttggagaacgccagcctg

SEQ ID NO: 144841 - DNA, 120 bp, Artificial Sequence
  ENSG00000104866_7 (sequence is synthesized)
tcggggcggcccctcatgctgctcgccacggccctgaagatgaacatgaacctgcgggagctgtacctggcggacaacaagctcaacggcctgcaggactcggcccagctgggtaacctg

SEQ ID NO: 144842 - DNA, 120 bp, Artificial Sequence
  ENSG00000104866_8 (sequence is synthesized)
ctcaagttcaactgctccctgcagatcctggacctccggaacaaccacgtgctagactcgggtctggcctacatctgcgagggcctcaaggagcagaggaaggggctggtgaccctggtg

SEQ ID NO: 144843 - DNA, 120 bp, Artificial Sequence
  ENSG00000104866_9 (sequence is synthesized)
ctgtggaacaaccagctcacgcacacaggcatggccttcctgggcatgacactgccgcacactcagagcctggagacgctgaacctgggccacaaccccatcgggaacgagggtgtgcgg

SEQ ID NO: 144844 - DNA, 120 bp, Artificial Sequence
  ENSG00000104866_10 (sequence is synthesized)
cacctcaagaacgggctcatcagcaaccgcagcgtgctgcgcctcgggctggcctccaccaagctcacgtgcgagggcgcggtggcggtggcggagttcatcgctgagagcccccgcctc

SEQ ID NO: 144845 - DNA, 120 bp, Artificial Sequence
  ENSG00000104866_11 (sequence is synthesized)
ctgagactggaccttcgggagaacgagatcaagacaggcgggctcatggcactgtcgttggccctcaaggtgaaccactcactgctgcgcctggacctcgaccgtgaacccaagaaagag

SEQ ID NO: 144846 - DNA, 120 bp, Artificial Sequence
  ENSG00000104866_12 (sequence is synthesized)
aacttggtgctggcgcgggagagggaggagaaggagcagccgccacagctgtcggcctccatgcctgagaccaccgccaccgagccccagcccgacgacgagcccgccgctggggtgcag

SEQ ID NO: 144847 - DNA, 120 bp, Artificial Sequence
  ENSG00000104866_13 (sequence is synthesized)
aacggggcccccagccccgcacccagcccggactcagactcagactcggactcggatggggaggaagaggaggaagaggaaggggagagggacgagaccccctgtcctgccctggtgccc

SEQ ID NO: 144848 - DNA, 120 bp, Artificial Sequence
  ENSG00000104866_14 (sequence is synthesized)
cccacggactccctgggccctggggacaggagtcccccaggcagcccctccacacccaccgagcagcggatttccgtgtccagcccgggccggggccacaaggtgtttgtggtgacccgg

SEQ ID NO: 144849 - DNA, 120 bp, Artificial Sequence
  ENSG00000104866_15 (sequence is synthesized)
gtggagagcccgcccgagagggcagagccccctgcgtcccccacccctccctctcccccaccccctccctccccacccgcctcaccttccctaccaccagccggggccattgacacccgg

SEQ ID NO: 144850 - DNA, 120 bp, Artificial Sequence
  ENSG00000104866_16 (sequence is synthesized)
gacacagggtcctctgagcctcagccaccaccggagccgcctcggtcagggccaccactgcccaacggcctgaagcccgagttcgccctggcactgccccctgagccgcccccggggcct
